United States Patent Application Publication US 2005/0244851 A1 - sequence listing, part 136

SEQ ID NO: 5308968 - DNA, 25 bp, Homo sapien
tcccattcgcaaacacagctttggg

SEQ ID NO: 5308969 - DNA, 25 bp, Homo sapien
ctcccattcgcaaacacagctttgg

SEQ ID NO: 5308970 - DNA, 25 bp, Homo sapien
gctttggggccaacagtggtttatc

SEQ ID NO: 5308971 - DNA, 25 bp, Homo sapien
tcttgcccaagtagggagaatgtgt

SEQ ID NO: 5308972 - DNA, 25 bp, Homo sapien
tgtacacagagactctcaaaattgg

SEQ ID NO: 5308973 - DNA, 25 bp, Homo sapien
taaacgtaaacggagctgctcatcc

SEQ ID NO: 5308974 - DNA, 25 bp, Homo sapien
aaagcacataaacctctcgggttgt

SEQ ID NO: 5308975 - DNA, 25 bp, Homo sapien
cttgatgtcacaggcacccactgaa

SEQ ID NO: 5308976 - DNA, 25 bp, Homo sapien
agaagagaggtttcgtttttcagct

SEQ ID NO: 5308977 - DNA, 25 bp, Homo sapien
agaggtttcgtttttcagctggtgg

SEQ ID NO: 5308978 - DNA, 25 bp, Homo sapien
tcagtgccttgatgtcacaggcacc

SEQ ID NO: 5308979 - DNA, 25 bp, Homo sapien
agaaatctttatacttggagtacct

SEQ ID NO: 5308980 - DNA, 25 bp, Homo sapien
tctccctctcaaactagctgcgata

SEQ ID NO: 5308981 - DNA, 25 bp, Homo sapien
tatagaagttgttaaatgctaactc

SEQ ID NO: 5308982 - DNA, 25 bp, Homo sapien
aactagctgcgataaagaaccagaa

SEQ ID NO: 5308983 - DNA, 25 bp, Homo sapien
gattagctgtgagatttgcaaatgt

SEQ ID NO: 5308984 - DNA, 25 bp, Homo sapien
caggctgtactgtggattagctgtg

SEQ ID NO: 5308985 - DNA, 25 bp, Homo sapien
taagacagggtctgcttgtgccaca

SEQ ID NO: 5308986 - DNA, 25 bp, Homo sapien
catattggattgcacacaggctgta

SEQ ID NO: 5308987 - DNA, 25 bp, Homo sapien
tttaagcttctgccaggacttctgg

SEQ ID NO: 5308988 - DNA, 25 bp, Homo sapien
ctttaagcttctgccaggacttctg

SEQ ID NO: 5308989 - DNA, 25 bp, Homo sapien
ttaagcttctgccaggacttctgga

SEQ ID NO: 5308990 - DNA, 25 bp, Homo sapien
tgcagcttgactctaactttcaaag

SEQ ID NO: 5308991 - DNA, 25 bp, Homo sapien
aacagaacatgcagcttgactctaa

SEQ ID NO: 5308992 - DNA, 25 bp, Homo sapien
cagaacatgcagcttgactctaact

SEQ ID NO: 5308993 - DNA, 25 bp, Homo sapien
ttgactctaactttcaaagcattct

SEQ ID NO: 5308994 - DNA, 25 bp, Homo sapien
ccagagagatgtagtgaaaaataaa

SEQ ID NO: 5308995 - DNA, 25 bp, Homo sapien
ttccaaaagtttgataccagagaga

SEQ ID NO: 5308996 - DNA, 25 bp, Homo sapien
ggctttgttaggtgtctcatgtgca

SEQ ID NO: 5308997 - DNA, 25 bp, Homo sapien
gtttcaggctttgttaggtgtctca

SEQ ID NO: 5308998 - DNA, 25 bp, Homo sapien
tgctctctgaatggagactgtttgc

SEQ ID NO: 5308999 - DNA, 25 bp, Homo sapien
ctaaaatcagtgcctacatttgacc

SEQ ID NO: 5309000 - DNA, 25 bp, Homo sapien
tataaccggcatttccaggtccggc

SEQ ID NO: 5309001 - DNA, 25 bp, Homo sapien
tcggcactcggatgaccgtgtccta

SEQ ID NO: 5309002 - DNA, 25 bp, Homo sapien
gttaatgagtctgtgcgccaagcca

SEQ ID NO: 5309003 - DNA, 25 bp, Homo sapien
cgtgtcctattcgtctctctcgtga

SEQ ID NO: 5309004 - DNA, 25 bp, Homo sapien
tcccgcagccgatgggcatctaggg

SEQ ID NO: 5309005 - DNA, 25 bp, Homo sapien
cagaacgaagagtgggcgccgaaac

SEQ ID NO: 5309006 - DNA, 25 bp, Homo sapien
ttctcggtagagagggccgtgcacc

SEQ ID NO: 5309007 - DNA, 25 bp, Homo sapien
aaaccatggcagcattgcggctccg

SEQ ID NO: 5309008 - DNA, 25 bp, Homo sapien
cctacacgagtattctgctccagga

SEQ ID NO: 5309009 - DNA, 25 bp, Homo sapien
attgcaaggaagtttaaggattagg

SEQ ID NO: 5309010 - DNA, 25 bp, Homo sapien
aatgagaacatagaagcattgcttc

SEQ ID NO: 5309011 - DNA, 25 bp, Homo sapien
aagtcaggactcagtatggttggcc

SEQ ID NO: 5309012 - DNA, 25 bp, Homo sapien
gatcatcatttgagctattccactg

SEQ ID NO: 5309013 - DNA, 25 bp, Homo sapien
tctcccaaacagatcatcatttgag

SEQ ID NO: 5309014 - DNA, 25 bp, Homo sapien
catcatttgagctattccactgaag

SEQ ID NO: 5309015 - DNA, 25 bp, Homo sapien
tctttaatttactctcccaaacaga

SEQ ID NO: 5309016 - DNA, 25 bp, Homo sapien
agcatgaaatctatttagctggata

SEQ ID NO: 5309017 - DNA, 25 bp, Homo sapien
tatttagctggatagctacccattt

SEQ ID NO: 5309018 - DNA, 25 bp, Homo sapien
tcaagcatgaaatctatttagctgg

SEQ ID NO: 5309019 - DNA, 25 bp, Homo sapien
tttagctggatagctacccatttcc

SEQ ID NO: 5309020 - DNA, 25 bp, Homo sapien
aatgacaacctgtgcctctgggact

SEQ ID NO: 5309021 - DNA, 25 bp, Homo sapien
gctcactggatccttagaattattt

SEQ ID NO: 5309022 - DNA, 25 bp, Homo sapien
cagtatgggatggtgctatggcaac

SEQ ID NO: 5309023 - DNA, 25 bp, Homo sapien
atggcaacagtctccttggagctca

SEQ ID NO: 5309024 - DNA, 25 bp, Homo sapien
gaatattgctcaagggcccatcacc

SEQ ID NO: 5309025 - DNA, 25 bp, Homo sapien
tgctggccatagctggaggattccc

SEQ ID NO: 5309026 - DNA, 25 bp, Homo sapien
tgtaaaattctctccgatcatccgc

SEQ ID NO: 5309027 - DNA, 25 bp, Homo sapien
aggatgttgcagagccgggcttcca

SEQ ID NO: 5309028 - DNA, 25 bp, Homo sapien
ctttaagggttatctgcggtttgca

SEQ ID NO: 5309029 - DNA, 25 bp, Homo sapien
tatataggttgggttgcatcaccac

SEQ ID NO: 5309030 - DNA, 25 bp, Homo sapien
catgttgtctgttgcactggctccc

SEQ ID NO: 5309031 - DNA, 25 bp, Homo sapien
tgggtactccttcatgacagtcacc

SEQ ID NO: 5309032 - DNA, 25 bp, Homo sapien
tacttttattcctcagtgttttgct

SEQ ID NO: 5309033 - DNA, 25 bp, Homo sapien
ctggttccttgcctcggaacattat

SEQ ID NO: 5309034 - DNA, 25 bp, Homo sapien
cccttttgaaatcctacgtggcttg

SEQ ID NO: 5309035 - DNA, 25 bp, Homo sapien
aatcctacgtggcttgtaaggctca

SEQ ID NO: 5309036 - DNA, 25 bp, Homo sapien
catccttgtctttgttacgcctgta

SEQ ID NO: 5309037 - DNA, 25 bp, Homo sapien
catcacaggacttatttcatccttg

SEQ ID NO: 5309038 - DNA, 25 bp, Homo sapien
ctctccatcacaggacttatttcat

SEQ ID NO: 5309039 - DNA, 25 bp, Homo sapien
tcctgtgaagtcaggtagaattttg

SEQ ID NO: 5309040 - DNA, 25 bp, Homo sapien
tggagcggccaagaccacaacccat

SEQ ID NO: 5309041 - DNA, 25 bp, Homo sapien
agaagtggagcggccaagaccacaa

SEQ ID NO: 5309042 - DNA, 25 bp, Homo sapien
ggctgcaggcagaagtggagcggcc

SEQ ID NO: 5309043 - DNA, 25 bp, Homo sapien
ctgcaggcagaagtggagcggccaa

SEQ ID NO: 5309044 - DNA, 25 bp, Homo sapien
tggcttgaagtggtttgcgcagacc

SEQ ID NO: 5309045 - DNA, 25 bp, Homo sapien
ccgagtccagatatgtaatagctgt

SEQ ID NO: 5309046 - DNA, 25 bp, Homo sapien
ccttctacaggctcaaggctggaag

SEQ ID NO: 5309047 - DNA, 25 bp, Homo sapien
gaaccttctacaggctcaaggctgg

SEQ ID NO: 5309048 - DNA, 25 bp, Homo sapien
aatactagatttgggtcgagccgcc

SEQ ID NO: 5309049 - DNA, 25 bp, Homo sapien
agccgccggctgatgtcatgctgga

SEQ ID NO: 5309050 - DNA, 25 bp, Homo sapien
tctcctgagcactaatgggctgcca

SEQ ID NO: 5309051 - DNA, 25 bp, Homo sapien
tgggctgccaataacaagtctgttt

SEQ ID NO: 5309052 - DNA, 25 bp, Homo sapien
gaacgtgccatcagagctggaagct

SEQ ID NO: 5309053 - DNA, 25 bp, Homo sapien
tccaaagggcctgtctcggcctatc

SEQ ID NO: 5309054 - DNA, 25 bp, Homo sapien
tcaacatccgggacacagcatcaga

SEQ ID NO: 5309055 - DNA, 25 bp, Homo sapien
tagccatcactgagtgttcagttcc

SEQ ID NO: 5309056 - DNA, 25 bp, Homo sapien
cacatggcttcaatttccatgtgct

SEQ ID NO: 5309057 - DNA, 25 bp, Homo sapien
aggcactatttgatctcttgttaag

SEQ ID NO: 5309058 - DNA, 25 bp, Homo sapien
tctcttgttaagtcccacatggctt

SEQ ID NO: 5309059 - DNA, 25 bp, Homo sapien
tatttgatctcttgttaagtcccac

SEQ ID NO: 5309060 - DNA, 25 bp, Homo sapien
caataggtaatgcagcaggtgttgg

SEQ ID NO: 5309061 - DNA, 25 bp, Homo sapien
ctaaaacaataggtaatgcagcagg

SEQ ID NO: 5309062 - DNA, 25 bp, Homo sapien
gactccacactgactcttttgaaaa

SEQ ID NO: 5309063 - DNA, 25 bp, Homo sapien
gcaattcgcacaattttgagcacca

SEQ ID NO: 5309064 - DNA, 25 bp, Homo sapien
tgagctcaaggcatcgttcatggcc

SEQ ID NO: 5309065 - DNA, 25 bp, Homo sapien
tgaagctcagcagatcatccaggcc

SEQ ID NO: 5309066 - DNA, 25 bp, Homo sapien
tgatcccagggaccactacataggg

SEQ ID NO: 5309067 - DNA, 25 bp, Homo sapien
gctgagtccaagcatccaggtacag

SEQ ID NO: 5309068 - DNA, 25 bp, Homo sapien
tcagttattctcaggtatcaagccc

SEQ ID NO: 5309069 - DNA, 25 bp, Homo sapien
ctcaggtgttcatgggcggtcgcct

SEQ ID NO: 5309070 - DNA, 25 bp, Homo sapien
taatgtgcaactttgggaaccagga

SEQ ID NO: 5309071 - DNA, 25 bp, Homo sapien
tccaggctgtttatcagatgggtgc

SEQ ID NO: 5309072 - DNA, 25 bp, Homo sapien
gctctgggcaacagtcagctggcta

SEQ ID NO: 5309073 - DNA, 25 bp, Homo sapien
gacgattggtttcctgaaggcggcc

SEQ ID NO: 5309074 - DNA, 25 bp, Homo sapien
tctgaactgggtatcttcttgggag

SEQ ID NO: 5309075 - DNA, 25 bp, Homo sapien
cgaagtctgaggtaacatccatgga

SEQ ID NO: 5309076 - DNA, 25 bp, Homo sapien
gttgcagacgaccaataaaaataca

SEQ ID NO: 5309077 - DNA, 25 bp, Homo sapien
ctcggagagccgactggatacctgc

SEQ ID NO: 5309078 - DNA, 25 bp, Homo sapien
gcgtgggcctcctttaaagaggtga

SEQ ID NO: 5309079 - DNA, 25 bp, Homo sapien
ataaggcatcaaggccgggagctcg

SEQ ID NO: 5309080 - DNA, 25 bp, Homo sapien
tctttattggagtctggcaccgcat

SEQ ID NO: 5309081 - DNA, 25 bp, Homo sapien
gagaccacaattggaagcctgctgg

SEQ ID NO: 5309082 - DNA, 25 bp, Homo sapien
ttgtctgattagtggattgctgccc

SEQ ID NO: 5309083 - DNA, 25 bp, Homo sapien
gacaaagcaatatatcccagacgtg

SEQ ID NO: 5309084 - DNA, 25 bp, Homo sapien
ggggccagtctgacattgtacatct

SEQ ID NO: 5309085 - DNA, 25 bp, Homo sapien
gcctggggccagtctgacattgtac

SEQ ID NO: 5309086 - DNA, 25 bp, Homo sapien
ggccttgccaattagcaggcctggg

SEQ ID NO: 5309087 - DNA, 25 bp, Homo sapien
tgtggccttgccaattagcaggcct

SEQ ID NO: 5309088 - DNA, 25 bp, Homo sapien
tgctaccctcaattacctttatgag

SEQ ID NO: 5309089 - DNA, 25 bp, Homo sapien
tattcaggccttggatacctcttgc

SEQ ID NO: 5309090 - DNA, 25 bp, Homo sapien
gaataaccactgcacactgtctatg

SEQ ID NO: 5309091 - DNA, 25 bp, Homo sapien
tatggcaccagtgttgtctctccgc

SEQ ID NO: 5309092 - DNA, 25 bp, Homo sapien
gaaagcaacagtgtgagagactaga

SEQ ID NO: 5309093 - DNA, 25 bp, Homo sapien
tgaaagcaacagtgtgagagactag

SEQ ID NO: 5309094 - DNA, 25 bp, Homo sapien
tatcagagaagtatagaccaatatc

SEQ ID NO: 5309095 - DNA, 25 bp, Homo sapien
tttgagggcactagggaacgatctg

SEQ ID NO: 5309096 - DNA, 25 bp, Homo sapien
ggtagtttctcggtttgtggcagca

SEQ ID NO: 5309097 - DNA, 25 bp, Homo sapien
gaacgatctgttctaggcctctctt

SEQ ID NO: 5309098 - DNA, 25 bp, Homo sapien
gagacatccaaaagcgtgctccctt

SEQ ID NO: 5309099 - DNA, 25 bp, Homo sapien
tcgttaggactggagagagacatcc

SEQ ID NO: 5309100 - DNA, 25 bp, Homo sapien
tgatcaaagaaccaatcgttaggac

SEQ ID NO: 5309101 - DNA, 25 bp, Homo sapien
gacagtgtgcttcgttggaaattca

SEQ ID NO: 5309102 - DNA, 25 bp, Homo sapien
tctgaacaagcatctagcaggccgt

SEQ ID NO: 5309103 - DNA, 25 bp, Homo sapien
tgttcacatccattagccacgtcgt

SEQ ID NO: 5309104 - DNA, 25 bp, Homo sapien
cattcagtcttacggctctaagcag

SEQ ID NO: 5309105 - DNA, 25 bp, Homo sapien
aggccgtgccatgagaaaaaattct

SEQ ID NO: 5309106 - DNA, 25 bp, Homo sapien
gaatgaagtccaaaaggcctgatta

SEQ ID NO: 5309107 - DNA, 25 bp, Homo sapien
taactacaaacacgtcagaatctgt

SEQ ID NO: 5309108 - DNA, 25 bp, Homo sapien
caaagacggtacaattcaaatcaag

SEQ ID NO: 5309109 - DNA, 25 bp, Homo sapien
tttgagaagtgtttcgagccattca

SEQ ID NO: 5309110 - DNA, 25 bp, Homo sapien
tcaactttgcctgtaagaactgtcc

SEQ ID NO: 5309111 - DNA, 25 bp, Homo sapien
catttcgtatgggaatcagcccaga

SEQ ID NO: 5309112 - DNA, 25 bp, Homo sapien
cacccgaatgaggtccagagtaatc

SEQ ID NO: 5309113 - DNA, 25 bp, Homo sapien
gcagatcttccaggcatactatgct

SEQ ID NO: 5309114 - DNA, 25 bp, Homo sapien
atgatgacctgtaaggtgtgtactg

SEQ ID NO: 5309115 - DNA, 25 bp, Homo sapien
tgatgacctgtaaggtgtgtactgt

SEQ ID NO: 5309116 - DNA, 25 bp, Homo sapien
ctgtaaggtgtgtactgttgtttgc

SEQ ID NO: 5309117 - DNA, 25 bp, Homo sapien
gtaaggtgtgtactgttgtttgcaa

SEQ ID NO: 5309118 - DNA, 25 bp, Homo sapien
tgtccctccaatggatgacaaaaac

SEQ ID NO: 5309119 - DNA, 25 bp, Homo sapien
cagtgtccctccaatggatgacaaa

SEQ ID NO: 5309120 - DNA, 25 bp, Homo sapien
catacagtgtccctccaatggatga

SEQ ID NO: 5309121 - DNA, 25 bp, Homo sapien
cctcatacagtgtccctccaatgga

SEQ ID NO: 5309122 - DNA, 25 bp, Homo sapien
taaaaagcgcaacacttaacaatat

SEQ ID NO: 5309123 - DNA, 25 bp, Homo sapien
ctattatgtgtcctgtgctgtaaac

SEQ ID NO: 5309124 - DNA, 25 bp, Homo sapien
cacctgctcagagtcagcaccaaaa

SEQ ID NO: 5309125 - DNA, 25 bp, Homo sapien
tagacccataggtcaatcaatcagt

SEQ ID NO: 5309126 - DNA, 25 bp, Homo sapien
ttagtgctgatggacgaacagtagc

SEQ ID NO: 5309127 - DNA, 25 bp, Homo sapien
gaaaggcagccggtatctcttagtg

SEQ ID NO: 5309128 - DNA, 25 bp, Homo sapien
gaacagtagcatacaagggtcccgg

SEQ ID NO: 5309129 - DNA, 25 bp, Homo sapien
agggtcccggtgacaaggaacagct

SEQ ID NO: 5309130 - DNA, 25 bp, Homo sapien
tagttagaagacttctttgctcggc

SEQ ID NO: 5309131 - DNA, 25 bp, Homo sapien
gctccggttggagggaaggcaatga

SEQ ID NO: 5309132 - DNA, 25 bp, Homo sapien
tgctcggcagtaagctccggttgga

SEQ ID NO: 5309133 - DNA, 25 bp, Homo sapien
attctcaaggagcagttcagagatg

SEQ ID NO: 5309134 - DNA, 25 bp, Homo sapien
gtggctatataggaattcactgtaa

SEQ ID NO: 5309135 - DNA, 25 bp, Homo sapien
taacatctaggtgtggctatatagg

SEQ ID NO: 5309136 - DNA, 25 bp, Homo sapien
gaaaccaggaactagttggatgttc

SEQ ID NO: 5309137 - DNA, 25 bp, Homo sapien
tgttaatgataacatctaggtgtgg

SEQ ID NO: 5309138 - DNA, 25 bp, Homo sapien
gatgaatacaagtttggtccaaagg

SEQ ID NO: 5309139 - DNA, 25 bp, Homo sapien
gctgaagatgtcacagcaactcctt

SEQ ID NO: 5309140 - DNA, 25 bp, Homo sapien
catttgtgacctcaacgtctgctga

SEQ ID NO: 5309141 - DNA, 25 bp, Homo sapien
ctatgtcatatgattctggatgaat

SEQ ID NO: 5309142 - DNA, 25 bp, Homo sapien
aacgacggctcctggcctatgctgt

SEQ ID NO: 5309143 - DNA, 25 bp, Homo sapien
ttctaaccaagtgttcaaagaacat

SEQ ID NO: 5309144 - DNA, 25 bp, Homo sapien
tggcctcaggtgaacgacggctcct

SEQ ID NO: 5309145 - DNA, 25 bp, Homo sapien
gcctatgctgtgagttttctaacca

SEQ ID NO: 5309146 - DNA, 25 bp, Homo sapien
tgattctgatgaagccagcacactg

SEQ ID NO: 5309147 - DNA, 25 bp, Homo sapien
ctgcaaaacgttcggatataatcct

SEQ ID NO: 5309148 - DNA, 25 bp, Homo sapien
tgttctcggttgataaagggtccat

SEQ ID NO: 5309149 - DNA, 25 bp, Homo sapien
cgttcggatataatcctggttgatt

SEQ ID NO: 5309150 - DNA, 25 bp, Homo sapien
gctgacacattcttctacaacactg

SEQ ID NO: 5309151 - DNA, 25 bp, Homo sapien
cactgtccagtgttgccttgagtaa

SEQ ID NO: 5309152 - DNA, 25 bp, Homo sapien
caaaacttctgaacagatgttaata

SEQ ID NO: 5309153 - DNA, 25 bp, Homo sapien
cttgagtaaagtctgggatacgtca

SEQ ID NO: 5309154 - DNA, 25 bp, Homo sapien
cacatacatatgttagttggcatca

SEQ ID NO: 5309155 - DNA, 25 bp, Homo sapien
taagtttaaaatagctttgctttga

SEQ ID NO: 5309156 - DNA, 25 bp, Homo sapien
ggaccacactatactggttcaaagt

SEQ ID NO: 5309157 - DNA, 25 bp, Homo sapien
tagttggcatcataattgggataat

SEQ ID NO: 5309158 - DNA, 25 bp, Homo sapien
ttaaaatggcatgttgaggtcgggc

SEQ ID NO: 5309159 - DNA, 25 bp, Homo sapien
gaaaagcaattgttactgagtcctc

SEQ ID NO: 5309160 - DNA, 25 bp, Homo sapien
tcctaaatgggtcagatacaaagag

SEQ ID NO: 5309161 - DNA, 25 bp, Homo sapien
tagccattaggcatataaaaccatg

SEQ ID NO: 5309162 - DNA, 25 bp, Homo sapien
cattcctgtaacagtagacggccat

SEQ ID NO: 5309163 - DNA, 25 bp, Homo sapien
gtagacggccattttcacaacatca

SEQ ID NO: 5309164 - DNA, 25 bp, Homo sapien
gaacgggatctcttttcattcctgt

SEQ ID NO: 5309165 - DNA, 25 bp, Homo sapien
cacaaaagatgtttgaacgggatct

SEQ ID NO: 5309166 - DNA, 25 bp, Homo sapien
atttgcagggtgatgactgattcaa

SEQ ID NO: 5309167 - DNA, 25 bp, Homo sapien
tttgcagggtgatgactgattcaag

SEQ ID NO: 5309168 - DNA, 25 bp, Homo sapien
ctatttgcagggtgatgactgattc

SEQ ID NO: 5309169 - DNA, 25 bp, Homo sapien
tatttgcagggtgatgactgattca

SEQ ID NO: 5309170 - DNA, 25 bp, Homo sapien
ggcagcaacaaactctaggtctagg

SEQ ID NO: 5309171 - DNA, 25 bp, Homo sapien
ctgaaaaaatagcccctgtactggg

SEQ ID NO: 5309172 - DNA, 25 bp, Homo sapien
tctggtttgagttagacttcctgaa

SEQ ID NO: 5309173 - DNA, 25 bp, Homo sapien
gaaagaattctagcagggcccagag

SEQ ID NO: 5309174 - DNA, 25 bp, Homo sapien
caacaagtgctttctatatactgca

SEQ ID NO: 5309175 - DNA, 25 bp, Homo sapien
caatggctgtttatgagtatacaac

SEQ ID NO: 5309176 - DNA, 25 bp, Homo sapien
tgctggatatggctccactccaagg

SEQ ID NO: 5309177 - DNA, 25 bp, Homo sapien
gcaggttcacatcaccagatgatgc

SEQ ID NO: 5309178 - DNA, 25 bp, Homo sapien
taacacttttaatgatcaaagtata

SEQ ID NO: 5309179 - DNA, 25 bp, Homo sapien
cttaacacttttaatgatcaaagta

SEQ ID NO: 5309180 - DNA, 25 bp, Homo sapien
cacttttaatgatcaaagtataaga

SEQ ID NO: 5309181 - DNA, 25 bp, Homo sapien
cttgaacataaaggacttaacactt

SEQ ID NO: 5309182 - DNA, 25 bp, Homo sapien
aacacaatgcagcctttatcttccg

SEQ ID NO: 5309183 - DNA, 25 bp, Homo sapien
aatgcagcctttatcttccgggccc

SEQ ID NO: 5309184 - DNA, 25 bp, Homo sapien
gcatgtcttcttaggttcattttag

SEQ ID NO: 5309185 - DNA, 25 bp, Homo sapien
gtgcatgtcttcttaggttcatttt

SEQ ID NO: 5309186 - DNA, 25 bp, Homo sapien
cataagcaggaatttagtgttggcc

SEQ ID NO: 5309187 - DNA, 25 bp, Homo sapien
caataataggactgttgtcaatctc

SEQ ID NO: 5309188 - DNA, 25 bp, Homo sapien
tgaacgctgaaggtttagaacgtcc

SEQ ID NO: 5309189 - DNA, 25 bp, Homo sapien
tagaacgtcctctgtatcatgtgac

SEQ ID NO: 5309190 - DNA, 25 bp, Homo sapien
ctccggtgataatgtgggaaatgtg

SEQ ID NO: 5309191 - DNA, 25 bp, Homo sapien
acatcatgccaggtgtcatgtacat

SEQ ID NO: 5309192 - DNA, 25 bp, Homo sapien
gtgggacatcatgccaggtgtcatg

SEQ ID NO: 5309193 - DNA, 25 bp, Homo sapien
ggaaatgtgggacatcatgccaggt

SEQ ID NO: 5309194 - DNA, 25 bp, Homo sapien
tcttgtacacgccttgctatggaaa

SEQ ID NO: 5309195 - DNA, 25 bp, Homo sapien
ttttcactagctcagctaatggatc

SEQ ID NO: 5309196 - DNA, 25 bp, Homo sapien
tgatacattccaactccaatgtgct

SEQ ID NO: 5309197 - DNA, 25 bp, Homo sapien
cattccaactccaatgtgctttggc

SEQ ID NO: 5309198 - DNA, 25 bp, Homo sapien
taggcctcttgggtcagttagccaa

SEQ ID NO: 5309199 - DNA, 25 bp, Homo sapien
tgctttagaacaccacgaaccacac

SEQ ID NO: 5309200 - DNA, 25 bp, Homo sapien
tattccccgacacacaacggtattg

SEQ ID NO: 5309201 - DNA, 25 bp, Homo sapien
tgtgactccagtggacacacaaatg

SEQ ID NO: 5309202 - DNA, 25 bp, Homo sapien
ggttgagaatgatcaggctgacaaa

SEQ ID NO: 5309203 - DNA, 25 bp, Homo sapien
cagagctcgaggttgagaatgatca

SEQ ID NO: 5309204 - DNA, 25 bp, Homo sapien
ttagtggacagtaataatgcagagc

SEQ ID NO: 5309205 - DNA, 25 bp, Homo sapien
taataatgcagagctcgaggttgag

SEQ ID NO: 5309206 - DNA, 25 bp, Homo sapien
ttgttagcttcagggctgacactgt

SEQ ID NO: 5309207 - DNA, 25 bp, Homo sapien
ttagcttcagggctgacactgtaga

SEQ ID NO: 5309208 - DNA, 25 bp, Homo sapien
tagcttcagggctgacactgtagat

SEQ ID NO: 5309209 - DNA, 25 bp, Homo sapien
tgttagcttcagggctgacactgta

SEQ ID NO: 5309210 - DNA, 25 bp, Homo sapien
aagacagaaaaaggggaatatcact

SEQ ID NO: 5309211 - DNA, 25 bp, Homo sapien
gaatatcactttcctaacttcctgc

SEQ ID NO: 5309212 - DNA, 25 bp, Homo sapien
ggaatatcactttcctaacttcctg

SEQ ID NO: 5309213 - DNA, 25 bp, Homo sapien
ctgagaagacagaaaaaggggaata

SEQ ID NO: 5309214 - DNA, 25 bp, Homo sapien
gtactgttacaatctcagcgaactc

SEQ ID NO: 5309215 - DNA, 25 bp, Homo sapien
tctgctacattcactaatatgcttc

SEQ ID NO: 5309216 - DNA, 25 bp, Homo sapien
gaaataacaatggtttctgctacat

SEQ ID NO: 5309217 - DNA, 25 bp, Homo sapien
gctgaataaagttttggaaataaca

SEQ ID NO: 5309218 - DNA, 25 bp, Homo sapien
ttgaaaatataagatggtgttgtct

SEQ ID NO: 5309219 - DNA, 25 bp, Homo sapien
tttgaaaatataagatggtgttgtc

SEQ ID NO: 5309220 - DNA, 25 bp, Homo sapien
gccaagcagcttgaactatcacatt

SEQ ID NO: 5309221 - DNA, 25 bp, Homo sapien
gttagactattttaggtgaggctcc

SEQ ID NO: 5309222 - DNA, 25 bp, Homo sapien
caagagaagactccacttcaggccc

SEQ ID NO: 5309223 - DNA, 25 bp, Homo sapien
agtgctgtttcaaaggcattcccca

SEQ ID NO: 5309224 - DNA, 25 bp, Homo sapien
tcaagactgctagaatccagttatg

SEQ ID NO: 5309225 - DNA, 25 bp, Homo sapien
catcaagactgctagaatccagtta

SEQ ID NO: 5309226 - DNA, 25 bp, Homo sapien
tcatcaagactgctagaatccagtt

SEQ ID NO: 5309227 - DNA, 25 bp, Homo sapien
ctcatcaagactgctagaatccagt

SEQ ID NO: 5309228 - DNA, 25 bp, Homo sapien
gcaagatcttgtctgtaccaaaaac

SEQ ID NO: 5309229 - DNA, 25 bp, Homo sapien
taattagctagatctggcagcacgt

SEQ ID NO: 5309230 - DNA, 25 bp, Homo sapien
gagaaagtgtaatatcataataggc

SEQ ID NO: 5309231 - DNA, 25 bp, Homo sapien
tatttgatgagaaagtgtaatatca

SEQ ID NO: 5309232 - DNA, 25 bp, Homo sapien
caaaattcatatgatcgcagaaaca

SEQ ID NO: 5309233 - DNA, 25 bp, Homo sapien
tgaaagactggatgtttcccctaaa

SEQ ID NO: 5309234 - DNA, 25 bp, Homo sapien
cagtcaacaacacaattaatgatga

SEQ ID NO: 5309235 - DNA, 25 bp, Homo sapien
agtttgacagaagggagtatctttt

SEQ ID NO: 5309236 - DNA, 25 bp, Homo sapien
aacaaaggggcaagctggacatggt

SEQ ID NO: 5309237 - DNA, 25 bp, Homo sapien
ctactttgcctatgtcaacaaaggg

SEQ ID NO: 5309238 - DNA, 25 bp, Homo sapien
gatgttctactttgcctatgtcaac

SEQ ID NO: 5309239 - DNA, 25 bp, Homo sapien
tatatggtatatggcaatgacagta

SEQ ID NO: 5309240 - DNA, 25 bp, Homo sapien
taaactcaaagattagcccacactt

SEQ ID NO: 5309241 - DNA, 25 bp, Homo sapien
cagtggtcaatggtgctaacaggta

SEQ ID NO: 5309242 - DNA, 25 bp, Homo sapien
tccaaagatgaagatgctaaagcta

SEQ ID NO: 5309243 - DNA, 25 bp, Homo sapien
gaacctaggtcgtctctatagccca

SEQ ID NO: 5309244 - DNA, 25 bp, Homo sapien
cagttctgaagggtaatgattcata

SEQ ID NO: 5309245 - DNA, 25 bp, Homo sapien
tctgaagggtaatgattcataggct

SEQ ID NO: 5309246 - DNA, 25 bp, Homo sapien
tctcagttctgaagggtaatgattc

SEQ ID NO: 5309247 - DNA, 25 bp, Homo sapien
gggtaatgattcataggcttcaaag

SEQ ID NO: 5309248 - DNA, 25 bp, Homo sapien
ttatcaggtcagcaaagtaagcttc

SEQ ID NO: 5309249 - DNA, 25 bp, Homo sapien
cagtaaacaacatccagtggtgcaa

SEQ ID NO: 5309250 - DNA, 25 bp, Homo sapien
atttccaatcactactgtgctgcag

SEQ ID NO: 5309251 - DNA, 25 bp, Homo sapien
cattatcaggtcagcaaagtaagct

SEQ ID NO: 5309252 - DNA, 25 bp, Homo sapien
aatgcaagtaaaccacatcagtatg

SEQ ID NO: 5309253 - DNA, 25 bp, Homo sapien
agccttgtccacaatgcaagtaaac

SEQ ID NO: 5309254 - DNA, 25 bp, Homo sapien
caagtaaaccacatcagtatgaagt

SEQ ID NO: 5309255 - DNA, 25 bp, Homo sapien
gaagccttgtccacaatgcaagtaa

SEQ ID NO: 5309256 - DNA, 25 bp, Homo sapien
tttgcaaccatgtttataaccagga

SEQ ID NO: 5309257 - DNA, 25 bp, Homo sapien
tggaacagggcttgttaaaaggagc

SEQ ID NO: 5309258 - DNA, 25 bp, Homo sapien
aaggagctgacgaaggttccgtcca

SEQ ID NO: 5309259 - DNA, 25 bp, Homo sapien
tcccattaaggtgcgccctggaaca

SEQ ID NO: 5309260 - DNA, 25 bp, Homo sapien
gccttgcaaagctacgtggtctcca

SEQ ID NO: 5309261 - DNA, 25 bp, Homo sapien
taaggcgtttaaaggaatcattcag

SEQ ID NO: 5309262 - DNA, 25 bp, Homo sapien
ctctggccttgcaaagctacgtggt

SEQ ID NO: 5309263 - DNA, 25 bp, Homo sapien
cattcagtgaattatataagatctt

SEQ ID NO: 5309264 - DNA, 25 bp, Homo sapien
tgtgagttaacataagcaagggact

SEQ ID NO: 5309265 - DNA, 25 bp, Homo sapien
tatgttcatggtggatttacttaag

SEQ ID NO: 5309266 - DNA, 25 bp, Homo sapien
gggacttataatggtgcctaataca

SEQ ID NO: 5309267 - DNA, 25 bp, Homo sapien
catgtctggccttgctctatgttca

SEQ ID NO: 5309268 - DNA, 25 bp, Homo sapien
ccatcagaaatattgaccttaaccg

SEQ ID NO: 5309269 - DNA, 25 bp, Homo sapien
atattgaccttaaccgtcagtacct

SEQ ID NO: 5309270 - DNA, 25 bp, Homo sapien
tggatgcaccacctacagaattcat

SEQ ID NO: 5309271 - DNA, 25 bp, Homo sapien
attttctccacggttaattgccaga

SEQ ID NO: 5309272 - DNA, 25 bp, Homo sapien
tactaaactcaatgtgaacacccaa

SEQ ID NO: 5309273 - DNA, 25 bp, Homo sapien
gctggtctcccgttcctgtggggtc

SEQ ID NO: 5309274 - DNA, 25 bp, Homo sapien
ccatattgatactaaactcaatgtg

SEQ ID NO: 5309275 - DNA, 25 bp, Homo sapien
ctcccgttcctgtggggtcaccata

SEQ ID NO: 5309276 - DNA, 25 bp, Homo sapien
tggttactaagctaacaagggagac

SEQ ID NO: 5309277 - DNA, 25 bp, Homo sapien
aagctaacaagggagacctcagtgg

SEQ ID NO: 5309278 - DNA, 25 bp, Homo sapien
taactagatggttactaagctaaca

SEQ ID NO: 5309279 - DNA, 25 bp, Homo sapien
gaatctctgttaaataactagatgg

SEQ ID NO: 5309280 - DNA, 25 bp, Homo sapien
tttttgaggatacttttgccagaga

SEQ ID NO: 5309281 - DNA, 25 bp, Homo sapien
gaatgtttcttatgttgcaggaaaa

SEQ ID NO: 5309282 - DNA, 25 bp, Homo sapien
ggtagagcagaaacttatcaacatc

SEQ ID NO: 5309283 - DNA, 25 bp, Homo sapien
atgactggatacaaacatgtctctt

SEQ ID NO: 5309284 - DNA, 25 bp, Homo sapien
gaatgaagtcaagcgtgtctttgtc

SEQ ID NO: 5309285 - DNA, 25 bp, Homo sapien
gttccgaatgaagtcaagcgtgtct

SEQ ID NO: 5309286 - DNA, 25 bp, Homo sapien
aagttccgaatgaagtcaagcgtgt

SEQ ID NO: 5309287 - DNA, 25 bp, Homo sapien
tccgaatgaagtcaagcgtgtcttt

SEQ ID NO: 5309288 - DNA, 25 bp, Homo sapien
tgctaaaatatgctgcactcctatt

SEQ ID NO: 5309289 - DNA, 25 bp, Homo sapien
ctgctaaaatatgctgcactcctat

SEQ ID NO: 5309290 - DNA, 25 bp, Homo sapien
tctgctaaaatatgctgcactccta

SEQ ID NO: 5309291 - DNA, 25 bp, Homo sapien
tcagctttatgtcatcagtaaggct

SEQ ID NO: 5309292 - DNA, 25 bp, Homo sapien
tgggagactgtatatctaatggact

SEQ ID NO: 5309293 - DNA, 25 bp, Homo sapien
cctatgagggaattttcagtaacaa

SEQ ID NO: 5309294 - DNA, 25 bp, Homo sapien
agctctctcagtcttcatctaggaa

SEQ ID NO: 5309295 - DNA, 25 bp, Homo sapien
atatttggattttacagacacaccc

SEQ ID NO: 5309296 - DNA, 25 bp, Homo sapien
gggtatgaacagatatttggatttt

SEQ ID NO: 5309297 - DNA, 25 bp, Homo sapien
cattattgcccttctccaaacatta

SEQ ID NO: 5309298 - DNA, 25 bp, Homo sapien
tactcatttcaacccatctctaaat

SEQ ID NO: 5309299 - DNA, 25 bp, Homo sapien
tgctccttctaagcccaactgtctt

SEQ ID NO: 5309300 - DNA, 25 bp, Homo sapien
tccttctaagcccaactgtcttgct

SEQ ID NO: 5309301 - DNA, 25 bp, Homo sapien
taacgtcaggcctaatgtacgatag

SEQ ID NO: 5309302 - DNA, 25 bp, Homo sapien
tgtacgatagcagactgagctcccc

SEQ ID NO: 5309303 - DNA, 25 bp, Homo sapien
tggcttttaacaagcactcagacat

SEQ ID NO: 5309304 - DNA, 25 bp, Homo sapien
taacaagcactcagacatcttccct

SEQ ID NO: 5309305 - DNA, 25 bp, Homo sapien
tttctggattgtactatgaactttc

SEQ ID NO: 5309306 - DNA, 25 bp, Homo sapien
tctggattgtactatgaactttctt

SEQ ID NO: 5309307 - DNA, 25 bp, Homo sapien
gagctcttttctataacgtataatg

SEQ ID NO: 5309308 - DNA, 25 bp, Homo sapien
tctctcaaggaatcagcatcaaggt

SEQ ID NO: 5309309 - DNA, 25 bp, Homo sapien
cgtagctcttctagggtttgctgaa

SEQ ID NO: 5309310 - DNA, 25 bp, Homo sapien
taaagagacgaatgatgttggcaca

SEQ ID NO: 5309311 - DNA, 25 bp, Homo sapien
ggaaacttgacaggctgcccctgag

SEQ ID NO: 5309312 - DNA, 25 bp, Homo sapien
ccctgaggatatgtctcagtcttga

SEQ ID NO: 5309313 - DNA, 25 bp, Homo sapien
tgattttctttaaagcggactgacc

SEQ ID NO: 5309314 - DNA, 25 bp, Homo sapien
caaatgtaaagtcatcgtcattctc

SEQ ID NO: 5309315 - DNA, 25 bp, Homo sapien
ttactctcaccctctaagttgctgg

SEQ ID NO: 5309316 - DNA, 25 bp, Homo sapien
ggatggtgtctctgaactattactc

SEQ ID NO: 5309317 - DNA, 25 bp, Homo sapien
tgtacctccccacacagtgcttgtg

SEQ ID NO: 5309318 - DNA, 25 bp, Homo sapien
tagtccttcgaactgtatgtggctg

SEQ ID NO: 5309319 - DNA, 25 bp, Homo sapien
gggcattcttcttcacccgaggcat

SEQ ID NO: 5309320 - DNA, 25 bp, Homo sapien
taacaacaacgacttctgagccatc

SEQ ID NO: 5309321 - DNA, 25 bp, Homo sapien
tgagccatcactgatctgtggggca

SEQ ID NO: 5309322 - DNA, 25 bp, Homo sapien
gctcccaggcactatcttccttgtc

SEQ ID NO: 5309323 - DNA, 25 bp, Homo sapien
agcaagagcagagaaaaagcagcca

SEQ ID NO: 5309324 - DNA, 25 bp, Homo sapien
gcaagagcagagaaaaagcagccat

SEQ ID NO: 5309325 - DNA, 25 bp, Homo sapien
tgtactttcgctcttcttggcaatg

SEQ ID NO: 5309326 - DNA, 25 bp, Homo sapien
cctggacctgtactttcgctcttct

SEQ ID NO: 5309327 - DNA, 25 bp, Homo sapien
atctttcagtaccacatcctggacc

SEQ ID NO: 5309328 - DNA, 25 bp, Homo sapien
gacctgtactttcgctcttcttggc

SEQ ID NO: 5309329 - DNA, 25 bp, Homo sapien
gcccggcacgtcagaagacccgaga

SEQ ID NO: 5309330 - DNA, 25 bp, Homo sapien
ccgagattccgtgagtgccaccgca

SEQ ID NO: 5309331 - DNA, 25 bp, Homo sapien
gcacgtcagaagacccgagattccg

SEQ ID NO: 5309332 - DNA, 25 bp, Homo sapien
tcagaagacccgagattccgtgagt

SEQ ID NO: 5309333 - DNA, 25 bp, Homo sapien
tctttcaatctagctgggaacagca

SEQ ID NO: 5309334 - DNA, 25 bp, Homo sapien
caaatttggcctgtcctattaactc

SEQ ID NO: 5309335 - DNA, 25 bp, Homo sapien
aggctggtaggtgggttctcaaatt

SEQ ID NO: 5309336 - DNA, 25 bp, Homo sapien
attaactctttcaatctagctggga

SEQ ID NO: 5309337 - DNA, 25 bp, Homo sapien
cttgggttgagtcagcaggtgtcag

SEQ ID NO: 5309338 - DNA, 25 bp, Homo sapien
ttgggttgagtcagcaggtgtcagt

SEQ ID NO: 5309339 - DNA, 25 bp, Homo sapien
gagagtttcttgggttgagtcagca

SEQ ID NO: 5309340 - DNA, 25 bp, Homo sapien
tcttgggttgagtcagcaggtgtca

SEQ ID NO: 5309341 - DNA, 25 bp, Homo sapien
actttgctgttgaattttcaagccc

SEQ ID NO: 5309342 - DNA, 25 bp, Homo sapien
tttgctgttgaattttcaagccctg

SEQ ID NO: 5309343 - DNA, 25 bp, Homo sapien
ttgctgttgaattttcaagccctgg

SEQ ID NO: 5309344 - DNA, 25 bp, Homo sapien
ccactttgctgttgaattttcaagc

SEQ ID NO: 5309345 - DNA, 25 bp, Homo sapien
agtggacaaggttggtcataggagg

SEQ ID NO: 5309346 - DNA, 25 bp, Homo sapien
ggtcataggagggaagccttgtctg

SEQ ID NO: 5309347 - DNA, 25 bp, Homo sapien
tggacaaggttggtcataggaggga

SEQ ID NO: 5309348 - DNA, 25 bp, Homo sapien
aagtggacaaggttggtcataggag

SEQ ID NO: 5309349 - DNA, 25 bp, Homo sapien
tctttcacttgcaccacagagtcct

SEQ ID NO: 5309350 - DNA, 25 bp, Homo sapien
tcgtccttatcttggcccacacctg

SEQ ID NO: 5309351 - DNA, 25 bp, Homo sapien
atcacacctcatcgtccttatcttg

SEQ ID NO: 5309352 - DNA, 25 bp, Homo sapien
cacttgcaccacagagtcctcatag

SEQ ID NO: 5309353 - DNA, 25 bp, Homo sapien
ggatggcaggcggactcgccggacc

SEQ ID NO: 5309354 - DNA, 25 bp, Homo sapien
tcttcgcctctccatccggctccgg

SEQ ID NO: 5309355 - DNA, 25 bp, Homo sapien
acccaaggctctcttcgcctctcca

SEQ ID NO: 5309356 - DNA, 25 bp, Homo sapien
ctaagccgggatggcaggcggactc

SEQ ID NO: 5309357 - DNA, 25 bp, Homo sapien
ccggtagccgacgacagagaaacta

SEQ ID NO: 5309358 - DNA, 25 bp, Homo sapien
agagaaactagaccggccaggacgt

SEQ ID NO: 5309359 - DNA, 25 bp, Homo sapien
gaggcggtgagagcctcgggagcca

SEQ ID NO: 5309360 - DNA, 25 bp, Homo sapien
gccaggacgtagaagggtcgcttcc

SEQ ID NO: 5309361 - DNA, 25 bp, Homo sapien
gcaagctcgatagggctgcctctga

SEQ ID NO: 5309362 - DNA, 25 bp, Homo sapien
tgcaggtattaagtgaagcttggcc

SEQ ID NO: 5309363 - DNA, 25 bp, Homo sapien
gggctcacagtcacaggccctgagg

SEQ ID NO: 5309364 - DNA, 25 bp, Homo sapien
gcatcctagtgagtagggctcacag

SEQ ID NO: 5309365 - DNA, 25 bp, Homo sapien
gacttcccaacaggatcaggactag

SEQ ID NO: 5309366 - DNA, 25 bp, Homo sapien
tacacggagtaacagtctgctgagc

SEQ ID NO: 5309367 - DNA, 25 bp, Homo sapien
tacccttgctccaaaagagttgctg

SEQ ID NO: 5309368 - DNA, 25 bp, Homo sapien
cattggtcgcccttgagaattgcag

SEQ ID NO: 5309369 - DNA, 25 bp, Homo sapien
cggcggtagcttccagcgagagttt

SEQ ID NO: 5309370 - DNA, 25 bp, Homo sapien
gacccgccagatgaacactcagctt

SEQ ID NO: 5309371 - DNA, 25 bp, Homo sapien
ttttaagccgcaggcaatgataacc

SEQ ID NO: 5309372 - DNA, 25 bp, Homo sapien
tgataacctttacccactgaggaaa

SEQ ID NO: 5309373 - DNA, 25 bp, Homo sapien
gaggatccgggttgaaatctgcgcc

SEQ ID NO: 5309374 - DNA, 25 bp, Homo sapien
gacatgcatccctccggatagactg

SEQ ID NO: 5309375 - DNA, 25 bp, Homo sapien
ggatagactgaacatccctccgttc

SEQ ID NO: 5309376 - DNA, 25 bp, Homo sapien
cgcggatgtgagattccgggctcct

SEQ ID NO: 5309377 - DNA, 25 bp, Homo sapien
gcctttagagagcaaagctttgctt

SEQ ID NO: 5309378 - DNA, 25 bp, Homo sapien
tgctttccaccacgatgttggaatt

SEQ ID NO: 5309379 - DNA, 25 bp, Homo sapien
ttgctttccaccacgatgttggaat

SEQ ID NO: 5309380 - DNA, 25 bp, Homo sapien
gctttccaccacgatgttggaattg

SEQ ID NO: 5309381 - DNA, 25 bp, Homo sapien
tcaacacacatttagggacagtact

SEQ ID NO: 5309382 - DNA, 25 bp, Homo sapien
tctggatggcaattgagcgagcagt

SEQ ID NO: 5309383 - DNA, 25 bp, Homo sapien
caagagaaactaacatggtgaggag

SEQ ID NO: 5309384 - DNA, 25 bp, Homo sapien
tacgacatatttagggctgctggcc

SEQ ID NO: 5309385 - DNA, 25 bp, Homo sapien
gagtttatgagaattctcggcctca

SEQ ID NO: 5309386 - DNA, 25 bp, Homo sapien
cggcctcatcttgataaacttgaag

SEQ ID NO: 5309387 - DNA, 25 bp, Homo sapien
ctctgagtgagtctacaggaactcc

SEQ ID NO: 5309388 - DNA, 25 bp, Homo sapien
cctgaaaagaggtgggcactgcttg

SEQ ID NO: 5309389 - DNA, 25 bp, Homo sapien
tactccagagcagtgagggcacttg

SEQ ID NO: 5309390 - DNA, 25 bp, Homo sapien
ggggagatgaatacactgtcattta

SEQ ID NO: 5309391 - DNA, 25 bp, Homo sapien
catgttttactccagagcagtgagg

SEQ ID NO: 5309392 - DNA, 25 bp, Homo sapien
tctagcccatgttttactccagagc

SEQ ID NO: 5309393 - DNA, 25 bp, Homo sapien
tttggtttcttgagagctggttgtg

SEQ ID NO: 5309394 - DNA, 25 bp, Homo sapien
tgattttcacaaggactgagcaagt

SEQ ID NO: 5309395 - DNA, 25 bp, Homo sapien
ttggaatcgtcataggagcagaact

SEQ ID NO: 5309396 - DNA, 25 bp, Homo sapien
caagtcctgcaggtaattcagtgcc

SEQ ID NO: 5309397 - DNA, 25 bp, Homo sapien
tgaatgaaaggatactggctagcca

SEQ ID NO: 5309398 - DNA, 25 bp, Homo sapien
agcttcccatagcttcttgtggcca

SEQ ID NO: 5309399 - DNA, 25 bp, Homo sapien
gctccaagagcttcccatagcttct

SEQ ID NO: 5309400 - DNA, 25 bp, Homo sapien
caagagcttcccatagcttcttgtg

SEQ ID NO: 5309401 - DNA, 25 bp, Homo sapien
agagcttcccatagcttcttgtggc

SEQ ID NO: 5309402 - DNA, 25 bp, Homo sapien
tcagataaacctccacgctttggct

SEQ ID NO: 5309403 - DNA, 25 bp, Homo sapien
cgctttggcttctagagtgatgggt

SEQ ID NO: 5309404 - DNA, 25 bp, Homo sapien
tgaatatccctgagtgtcctttgac

SEQ ID NO: 5309405 - DNA, 25 bp, Homo sapien
ggtataggtagctttaccaggcata

SEQ ID NO: 5309406 - DNA, 25 bp, Homo sapien
ccaactgccaagccaggaatcagac

SEQ ID NO: 5309407 - DNA, 25 bp, Homo sapien
ttagttcccaactgccaagccagga

SEQ ID NO: 5309408 - DNA, 25 bp, Homo sapien
gttcccaactgccaagccaggaatc

SEQ ID NO: 5309409 - DNA, 25 bp, Homo sapien
tcccaactgccaagccaggaatcag

SEQ ID NO: 5309410 - DNA, 25 bp, Homo sapien
ggcgctgctgctcacacctggagct

SEQ ID NO: 5309411 - DNA, 25 bp, Homo sapien
ctgctgctcacacctggagctgcct

SEQ ID NO: 5309412 - DNA, 25 bp, Homo sapien
cgctgctgctcacacctggagctgc

SEQ ID NO: 5309413 - DNA, 25 bp, Homo sapien
tggcgctgctgctcacacctggagc

SEQ ID NO: 5309414 - DNA, 25 bp, Homo sapien
tggcaggtgctggtcaggagcaccc

SEQ ID NO: 5309415 - DNA, 25 bp, Homo sapien
ggtggcaggtgctggtcaggagcac

SEQ ID NO: 5309416 - DNA, 25 bp, Homo sapien
caggtgctggtcaggagcaccctgg

SEQ ID NO: 5309417 - DNA, 25 bp, Homo sapien
ggcaggtgctggtcaggagcaccct

SEQ ID NO: 5309418 - DNA, 25 bp, Homo sapien
ggcagctgctccaaccaggccaaga

SEQ ID NO: 5309419 - DNA, 25 bp, Homo sapien
gcagacccagccaggccaaggtggc

SEQ ID NO: 5309420 - DNA, 25 bp, Homo sapien
gtggcagctgctccaaccaggccaa

SEQ ID NO: 5309421 - DNA, 25 bp, Homo sapien
aggtggcagctgctccaaccaggcc

SEQ ID NO: 5309422 - DNA, 25 bp, Homo sapien
gatggcttgtttgctggagtccctt

SEQ ID NO: 5309423 - DNA, 25 bp, Homo sapien
caggtcttggatctcccttcggaaa

SEQ ID NO: 5309424 - DNA, 25 bp, Homo sapien
gaaaagcagataggtcaccatcctt

SEQ ID NO: 5309425 - DNA, 25 bp, Homo sapien
aggaaaagcagataggtcaccatcc

SEQ ID NO: 5309426 - DNA, 25 bp, Homo sapien
tcttggatctcccttcggaaatggg

SEQ ID NO: 5309427 - DNA, 25 bp, Homo sapien
tacagatgtcctagagaagggccat

SEQ ID NO: 5309428 - DNA, 25 bp, Homo sapien
tgtcagccacagtcctagaaattcc

SEQ ID NO: 5309429 - DNA, 25 bp, Homo sapien
gaatgacctcctactccacagaact

SEQ ID NO: 5309430 - DNA, 25 bp, Homo sapien
gacatgaaccagtgtacctggccaa

SEQ ID NO: 5309431 - DNA, 25 bp, Homo sapien
cagtgatggtaagcgactgtggatt

SEQ ID NO: 5309432 - DNA, 25 bp, Homo sapien
tggtaagcgactgtggattctgcat

SEQ ID NO: 5309433 - DNA, 25 bp, Homo sapien
tggataggaacactaggcagtgatg

SEQ ID NO: 5309434 - DNA, 25 bp, Homo sapien
ccttgagcatcctccagtagatgtg

SEQ ID NO: 5309435 - DNA, 25 bp, Homo sapien
ggaggacctctcggctccttttctg

SEQ ID NO: 5309436 - DNA, 25 bp, Homo sapien
ctcctcgcaactgcccagcggagga

SEQ ID NO: 5309437 - DNA, 25 bp, Homo sapien
tgtccccattcacgaagcgggagac

SEQ ID NO: 5309438 - DNA, 25 bp, Homo sapien
cctttgtgcgggtgggaacagtgtc

SEQ ID NO: 5309439 - DNA, 25 bp, Homo sapien
gagggcacttgactgtgtgtcctat

SEQ ID NO: 5309440 - DNA, 25 bp, Homo sapien
agggcacttgactgtgtgtcctatg

SEQ ID NO: 5309441 - DNA, 25 bp, Homo sapien
ctgagggcacttgactgtgtgtcct

SEQ ID NO: 5309442 - DNA, 25 bp, Homo sapien
tgagggcacttgactgtgtgtccta

SEQ ID NO: 5309443 - DNA, 25 bp, Homo sapien
ggtttatctttcagatcccgccctg

SEQ ID NO: 5309444 - DNA, 25 bp, Homo sapien
tgattccggctctggttcctacaga

SEQ ID NO: 5309445 - DNA, 25 bp, Homo sapien
catccgtattgtgggcgtgggtatc

SEQ ID NO: 5309446 - DNA, 25 bp, Homo sapien
caaaaccttgccctaagcaggaggt

SEQ ID NO: 5309447 - DNA, 25 bp, Homo sapien
gcttttgggagggaacacattgaca

SEQ ID NO: 5309448 - DNA, 25 bp, Homo sapien
cattccccagtctagtaagagtggc

SEQ ID NO: 5309449 - DNA, 25 bp, Homo sapien
cagaagcaggatgtgacgtcaagcc

SEQ ID NO: 5309450 - DNA, 25 bp, Homo sapien
caactaccctgtaagatatgtggca

SEQ ID NO: 5309451 - DNA, 25 bp, Homo sapien
ttagtatgtcttgagctgctctgtt

SEQ ID NO: 5309452 - DNA, 25 bp, Homo sapien
gtatgtcttgagctgctctgttttg

SEQ ID NO: 5309453 - DNA, 25 bp, Homo sapien
agtatgtcttgagctgctctgtttt

SEQ ID NO: 5309454 - DNA, 25 bp, Homo sapien
tagtatgtcttgagctgctctgttt

SEQ ID NO: 5309455 - DNA, 25 bp, Homo sapien
gttcctcacattcagcaattagcgc

SEQ ID NO: 5309456 - DNA, 25 bp, Homo sapien
cctcacattcagcaattagcgccat

SEQ ID NO: 5309457 - DNA, 25 bp, Homo sapien
ctgggagatgcctgttgttcctcac

SEQ ID NO: 5309458 - DNA, 25 bp, Homo sapien
aggaagcaagggctgcggtggctgg

SEQ ID NO: 5309459 - DNA, 25 bp, Homo sapien
agtctgcagaccttctatttccctt

SEQ ID NO: 5309460 - DNA, 25 bp, Homo sapien
ttccctttgggttagatcggagaga

SEQ ID NO: 5309461 - DNA, 25 bp, Homo sapien
tccctttgggttagatcggagagat

SEQ ID NO: 5309462 - DNA, 25 bp, Homo sapien
cctttgggttagatcggagagattc

SEQ ID NO: 5309463 - DNA, 25 bp, Homo sapien
acttgctgctttctctagcatgcat

SEQ ID NO: 5309464 - DNA, 25 bp, Homo sapien
agaatgtgccttcactgtcagcagt

SEQ ID NO: 5309465 - DNA, 25 bp, Homo sapien
tcagcagtgcttctgtggacttgct

SEQ ID NO: 5309466 - DNA, 25 bp, Homo sapien
gaatgtgccttcactgtcagcagtg

SEQ ID NO: 5309467 - DNA, 25 bp, Homo sapien
tgagctcaatgatgatgagggtccc

SEQ ID NO: 5309468 - DNA, 25 bp, Homo sapien
gtgttccctccaagcgtactttcat

SEQ ID NO: 5309469 - DNA, 25 bp, Homo sapien
atgagggtcccccagtgtttagagg

SEQ ID NO: 5309470 - DNA, 25 bp, Homo sapien
cattcctgggttgactaatcagtgg

SEQ ID NO: 5309471 - DNA, 25 bp, Homo sapien
atggtgatgctagggaatttggaag

SEQ ID NO: 5309472 - DNA, 25 bp, Homo sapien
caaagatggtgatgctagggaattt

SEQ ID NO: 5309473 - DNA, 25 bp, Homo sapien
agatggtgatgctagggaatttgga

SEQ ID NO: 5309474 - DNA, 25 bp, Homo sapien
aaagatggtgatgctagggaatttg

SEQ ID NO: 5309475 - DNA, 25 bp, Homo sapien
cagcttgccatgatattcattgatc

SEQ ID NO: 5309476 - DNA, 25 bp, Homo sapien
gatattcattgatcactttcactat

SEQ ID NO: 5309477 - DNA, 25 bp, Homo sapien
tttcactattcaattgaccatctcc

SEQ ID NO: 5309478 - DNA, 25 bp, Homo sapien
ttgaccatctcctgggtactctgcc

SEQ ID NO: 5309479 - DNA, 25 bp, Homo sapien
tcactggacatccatgcttggagaa

SEQ ID NO: 5309480 - DNA, 25 bp, Homo sapien
gctgcttactgaagagatgtgagtt

SEQ ID NO: 5309481 - DNA, 25 bp, Homo sapien
gaagttaagtggcagctgcttactg

SEQ ID NO: 5309482 - DNA, 25 bp, Homo sapien
gccacatgctcagcaccatttaggg

SEQ ID NO: 5309483 - DNA, 25 bp, Homo sapien
agtgagaggtgtccccaagtaggcc

SEQ ID NO: 5309484 - DNA, 25 bp, Homo sapien
tagaattccagtgagaggtgtcccc

SEQ ID NO: 5309485 - DNA, 25 bp, Homo sapien
ttctagaattccagtgagaggtgtc

SEQ ID NO: 5309486 - DNA, 25 bp, Homo sapien
cagtgagaggtgtccccaagtaggc

SEQ ID NO: 5309487 - DNA, 25 bp, Homo sapien
gcaaacatccctgctgagcgatgct

SEQ ID NO: 5309488 - DNA, 25 bp, Homo sapien
tgagcgatgctcttgctcggtgctg

SEQ ID NO: 5309489 - DNA, 25 bp, Homo sapien
aggccttcagcaaacatccctgctg

SEQ ID NO: 5309490 - DNA, 25 bp, Homo sapien
gctcggtgctgtccgctgctgtcat

SEQ ID NO: 5309491 - DNA, 25 bp, Homo sapien
ccaccttgccttctgatagatgaat

SEQ ID NO: 5309492 - DNA, 25 bp, Homo sapien
gagactacctgatttcccaccttgc

SEQ ID NO: 5309493 - DNA, 25 bp, Homo sapien
gatagatgaatcaagccgggacgcc

SEQ ID NO: 5309494 - DNA, 25 bp, Homo sapien
aaagctgaatgccaggaatcgggtg

SEQ ID NO: 5309495 - DNA, 25 bp, Homo sapien
aaggctgcaccctgttggttttctt

SEQ ID NO: 5309496 - DNA, 25 bp, Homo sapien
gaaggctgcaccctgttggttttct

SEQ ID NO: 5309497 - DNA, 25 bp, Homo sapien
cgaaggctgcaccctgttggttttc

SEQ ID NO: 5309498 - DNA, 25 bp, Homo sapien
aggctgcaccctgttggttttcttt

SEQ ID NO: 5309499 - DNA, 25 bp, Homo sapien
cttccaggccatgacttcgaacttt

SEQ ID NO: 5309500 - DNA, 25 bp, Homo sapien
tccaggccatgacttcgaactttgt

SEQ ID NO: 5309501 - DNA, 25 bp, Homo sapien
ggccatgacttcgaactttgttagg

SEQ ID NO: 5309502 - DNA, 25 bp, Homo sapien
gacttcgaactttgttaggatccaa

SEQ ID NO: 5309503 - DNA, 25 bp, Homo sapien
tctgtgctggcgctcaaggacctca

SEQ ID NO: 5309504 - DNA, 25 bp, Homo sapien
tgtgctggcgctcaaggacctcagg

SEQ ID NO: 5309505 - DNA, 25 bp, Homo sapien
ccactagcatcgctgtatccaatat

SEQ ID NO: 5309506 - DNA, 25 bp, Homo sapien
cgctgtatccaatatcttctctgga

SEQ ID NO: 5309507 - DNA, 25 bp, Homo sapien
tttcctaaacaggtgtttcatggga

SEQ ID NO: 5309508 - DNA, 25 bp, Homo sapien
gatggtttcctaaacaggtgtttca

SEQ ID NO: 5309509 - DNA, 25 bp, Homo sapien
tccagatggtttcctaaacaggtgt

SEQ ID NO: 5309510 - DNA, 25 bp, Homo sapien
tcctaaacaggtgtttcatgggaac

SEQ ID NO: 5309511 - DNA, 25 bp, Homo sapien
gacctcaagggatgaagttctcagc

SEQ ID NO: 5309512 - DNA, 25 bp, Homo sapien
caacttggctcagggttcgcgatac

SEQ ID NO: 5309513 - DNA, 25 bp, Homo sapien
aacagaagagacctgacaacttggc

SEQ ID NO: 5309514 - DNA, 25 bp, Homo sapien
ttctcagcaaggaattgcaggcctg

SEQ ID NO: 5309515 - DNA, 25 bp, Homo sapien
ctgattaaggacctctagaaaggcg

SEQ ID NO: 5309516 - DNA, 25 bp, Homo sapien
gacctctagaaaggcgtgtaggcct

SEQ ID NO: 5309517 - DNA, 25 bp, Homo sapien
gattaaggacctctagaaaggcgtg

SEQ ID NO: 5309518 - DNA, 25 bp, Homo sapien
taaggacctctagaaaggcgtgtag

SEQ ID NO: 5309519 - DNA, 25 bp, Homo sapien
gctcttctttctcgcttgttctctt

SEQ ID NO: 5309520 - DNA, 25 bp, Homo sapien
ggaaaatgcaaagctcccaatcccc

SEQ ID NO: 5309521 - DNA, 25 bp, Homo sapien
aatttgggcgaatggggaaaatgca

SEQ ID NO: 5309522 - DNA, 25 bp, Homo sapien
tcttcttctgctcttgtgtgttcca

SEQ ID NO: 5309523 - DNA, 25 bp, Homo sapien
gatcaaggccaaacaccatactttg

SEQ ID NO: 5309524 - DNA, 25 bp, Homo sapien
tactttgatcgaggccatcaggaac

SEQ ID NO: 5309525 - DNA, 25 bp, Homo sapien
gcagttagccaattccaggtgtaga

SEQ ID NO: 5309526 - DNA, 25 bp, Homo sapien
tagatatgtttggaactgggatccg

SEQ ID NO: 5309527 - DNA, 25 bp, Homo sapien
tcttctccttcttgaggtcccccac

SEQ ID NO: 5309528 - DNA, 25 bp, Homo sapien
cacgggggtttccagagactgcagc

SEQ ID NO: 5309529 - DNA, 25 bp, Homo sapien
ggtttccagagactgcagcatccat

SEQ ID NO: 5309530 - DNA, 25 bp, Homo sapien
ggaggtgaggccagcacctcttctc

SEQ ID NO: 5309531 - DNA, 25 bp, Homo sapien
ctgccagcaggcttcttgcacgcac

SEQ ID NO: 5309532 - DNA, 25 bp, Homo sapien
gttctccttaattaattcgctctgc

SEQ ID NO: 5309533 - DNA, 25 bp, Homo sapien
tgaggccgttgttctccttaattaa

SEQ ID NO: 5309534 - DNA, 25 bp, Homo sapien
caggctgaggccgttgttctcctta

SEQ ID NO: 5309535 - DNA, 25 bp, Homo sapien
attaattcgctctgcaagccagcca

SEQ ID NO: 5309536 - DNA, 25 bp, Homo sapien
cagcactacgcagaggatggctgga

SEQ ID NO: 5309537 - DNA, 25 bp, Homo sapien
tgttggggcaacagcactacgcaga

SEQ ID NO: 5309538 - DNA, 25 bp, Homo sapien
gcaacagcactacgcagaggatggc

SEQ ID NO: 5309539 - DNA, 25 bp, Homo sapien
gggcaacagcactacgcagaggatg

SEQ ID NO: 5309540 - DNA, 25 bp, Homo sapien
gcacattcaggttgggtgccaagaa

SEQ ID NO: 5309541 - DNA, 25 bp, Homo sapien
tcctagctctggacagtgtcttgta

SEQ ID NO: 5309542 - DNA, 25 bp, Homo sapien
gcaacagagttgctgacatgtccta

SEQ ID NO: 5309543 - DNA, 25 bp, Homo sapien
cattcaggttgggtgccaagaatat

SEQ ID NO: 5309544 - DNA, 25 bp, Homo sapien
ccctggagtgtcacgaggtttaaag

SEQ ID NO: 5309545 - DNA, 25 bp, Homo sapien
tagatgaccaggctgaatgatattt

SEQ ID NO: 5309546 - DNA, 25 bp, Homo sapien
gatatttgttcactaccccctggag

SEQ ID NO: 5309547 - DNA, 25 bp, Homo sapien
taaagtttttggagtgtcctggtgc

SEQ ID NO: 5309548 - DNA, 25 bp, Homo sapien
catggataatgacgaaaacctatgc

SEQ ID NO: 5309549 - DNA, 25 bp, Homo sapien
tggctgtttccaaaacatggataat

SEQ ID NO: 5309550 - DNA, 25 bp, Homo sapien
caaacactcttgcatttgccaccga

SEQ ID NO: 5309551 - DNA, 25 bp, Homo sapien
ccaccgagtgtatctaatagcttgc

SEQ ID NO: 5309552 - DNA, 25 bp, Homo sapien
cttgctccctgccaaactgactggt

SEQ ID NO: 5309553 - DNA, 25 bp, Homo sapien
ttgctccctgccaaactgactggtt

SEQ ID NO: 5309554 - DNA, 25 bp, Homo sapien
tccaggtgattggatggaagcacac

SEQ ID NO: 5309555 - DNA, 25 bp, Homo sapien
acagtccaggtgattggatggaagc

SEQ ID NO: 5309556 - DNA, 25 bp, Homo sapien
caggtgattggatggaagcacacac

SEQ ID NO: 5309557 - DNA, 25 bp, Homo sapien
ggtgattggatggaagcacacacat

SEQ ID NO: 5309558 - DNA, 25 bp, Homo sapien
cagcagtaacgttgagcctctgctc

SEQ ID NO: 5309559 - DNA, 25 bp, Homo sapien
tatcagcagtaacgttgagcctctg

SEQ ID NO: 5309560 - DNA, 25 bp, Homo sapien
gagttatcagcagtaacgttgagcc

SEQ ID NO: 5309561 - DNA, 25 bp, Homo sapien
gagagttatcagcagtaacgttgag

SEQ ID NO: 5309562 - DNA, 25 bp, Homo sapien
gacaactgggtctgttccgtgctgg

SEQ ID NO: 5309563 - DNA, 25 bp, Homo sapien
gagaggcatgtgctctggacaactg

SEQ ID NO: 5309564 - DNA, 25 bp, Homo sapien
gggcccagttccacctctgagggca

SEQ ID NO: 5309565 - DNA, 25 bp, Homo sapien
ccgtgctggcagagctttcgcagag

SEQ ID NO: 5309566 - DNA, 25 bp, Homo sapien
tcccagctttctatgagggcacagc

SEQ ID NO: 5309567 - DNA, 25 bp, Homo sapien
cagctttctatgagggcacagccca

SEQ ID NO: 5309568 - DNA, 25 bp, Homo sapien
cagttccatcctgtgtagtgctgac

SEQ ID NO: 5309569 - DNA, 25 bp, Homo sapien
agttccatcctgtgtagtgctgact

SEQ ID NO: 5309570 - DNA, 25 bp, Homo sapien
tggtggaacaagggcagtgcaagcc

SEQ ID NO: 5309571 - DNA, 25 bp, Homo sapien
ctgtccctgttgcccttttgcctct

SEQ ID NO: 5309572 - DNA, 25 bp, Homo sapien
tgtccctgttgcccttttgcctctc

SEQ ID NO: 5309573 - DNA, 25 bp, Homo sapien
ccttttgcctctctccacgcctttg

SEQ ID NO: 5309574 - DNA, 25 bp, Homo sapien
ccatggcagggatattggaagacca

SEQ ID NO: 5309575 - DNA, 25 bp, Homo sapien
ggaaaaatggacactcagctctctc

SEQ ID NO: 5309576 - DNA, 25 bp, Homo sapien
tcctcttggcagtgagaaacaaaca

SEQ ID NO: 5309577 - DNA, 25 bp, Homo sapien
gaagaccatgtgtagttcctcttgg

SEQ ID NO: 5309578 - DNA, 25 bp, Homo sapien
cccagaatagaacctgttgtagaag

SEQ ID NO: 5309579 - DNA, 25 bp, Homo sapien
tgaactgcccagaatagaacctgtt

SEQ ID NO: 5309580 - DNA, 25 bp, Homo sapien
aactgcccagaatagaacctgttgt

SEQ ID NO: 5309581 - DNA, 25 bp, Homo sapien
tgcccagaatagaacctgttgtaga

SEQ ID NO: 5309582 - DNA, 25 bp, Homo sapien
cagcttattgcatgtgaatagccaa

SEQ ID NO: 5309583 - DNA, 25 bp, Homo sapien
tctttcgatggtgggtaggactttc

SEQ ID NO: 5309584 - DNA, 25 bp, Homo sapien
gctagcatgtgttgctctgaagaaa

SEQ ID NO: 5309585 - DNA, 25 bp, Homo sapien
caaagcaattttcactgggctaaat

SEQ ID NO: 5309586 - DNA, 25 bp, Homo sapien
ccaacaacagcaataacaagtaggc

SEQ ID NO: 5309587 - DNA, 25 bp, Homo sapien
taaaccaacaacagcaataacaagt

SEQ ID NO: 5309588 - DNA, 25 bp, Homo sapien
aacaacagcaataacaagtaggccc

SEQ ID NO: 5309589 - DNA, 25 bp, Homo sapien
caacagcaataacaagtaggcccat

SEQ ID NO: 5309590 - DNA, 25 bp, Homo sapien
aaaccaagagaggtttgcatacagc

SEQ ID NO: 5309591 - DNA, 25 bp, Homo sapien
tcaaaaccaagagaggtttgcatac

SEQ ID NO: 5309592 - DNA, 25 bp, Homo sapien
ccaagagaggtttgcatacagctgg

SEQ ID NO: 5309593 - DNA, 25 bp, Homo sapien
accaagagaggtttgcatacagctg

SEQ ID NO: 5309594 - DNA, 25 bp, Homo sapien
gtctttgcttgagattttgccttca

SEQ ID NO: 5309595 - DNA, 25 bp, Homo sapien
cttctgtctttgcttgagattttgc

SEQ ID NO: 5309596 - DNA, 25 bp, Homo sapien
tgcttgagattttgccttcagggtt

SEQ ID NO: 5309597 - DNA, 25 bp, Homo sapien
gagattttgccttcagggttttcat

SEQ ID NO: 5309598 - DNA, 25 bp, Homo sapien
tactgctttttcaaaccctgttagc

SEQ ID NO: 5309599 - DNA, 25 bp, Homo sapien
tctgaaggcagatttctagggtgag

SEQ ID NO: 5309600 - DNA, 25 bp, Homo sapien
gcccttctgtatggttgctgtcaag

SEQ ID NO: 5309601 - DNA, 25 bp, Homo sapien
gctgaggttttagacttgtagctgg

SEQ ID NO: 5309602 - DNA, 25 bp, Homo sapien
taaatgaatgtacactaaggtataa

SEQ ID NO: 5309603 - DNA, 25 bp, Homo sapien
taaggtataagtagttgctagccca

SEQ ID NO: 5309604 - DNA, 25 bp, Homo sapien
tgtacactaaggtataagtagttgc

SEQ ID NO: 5309605 - DNA, 25 bp, Homo sapien
tagttgctagcccaactctcctgag

SEQ ID NO: 5309606 - DNA, 25 bp, Homo sapien
tctcattacggaaaggggaaatgta

SEQ ID NO: 5309607 - DNA, 25 bp, Homo sapien
ctatttggcctacattccaattagg

SEQ ID NO: 5309608 - DNA, 25 bp, Homo sapien
gtctatttggcctacattccaatta

SEQ ID NO: 5309609 - DNA, 25 bp, Homo sapien
tatttggcctacattccaattaggt

SEQ ID NO: 5309610 - DNA, 25 bp, Homo sapien
tgatatgtcaggtctgactggccag

SEQ ID NO: 5309611 - DNA, 25 bp, Homo sapien
tgggtttatgagctttccaaagcgc

SEQ ID NO: 5309612 - DNA, 25 bp, Homo sapien
ccttgccttccattgggtttatgag

SEQ ID NO: 5309613 - DNA, 25 bp, Homo sapien
tttccaaagcgctgatatgtcaggt

SEQ ID NO: 5309614 - DNA, 25 bp, Homo sapien
agaacgtgaatctttcccactgaac

SEQ ID NO: 5309615 - DNA, 25 bp, Homo sapien
tgtcttgccactgaccccacgtttg

SEQ ID NO: 5309616 - DNA, 25 bp, Homo sapien
cactgaactccctggtcagtgtggc

SEQ ID NO: 5309617 - DNA, 25 bp, Homo sapien
ggcctacctgggctgtcttgccact

SEQ ID NO: 5309618 - DNA, 25 bp, Homo sapien
ctctgggcttgcttcacatgctgga

SEQ ID NO: 5309619 - DNA, 25 bp, Homo sapien
cctgctctccacagttgacacctgg

SEQ ID NO: 5309620 - DNA, 25 bp, Homo sapien
ccctgctctccacagttgacacctg

SEQ ID NO: 5309621 - DNA, 25 bp, Homo sapien
atctacgcaggtgcgcaggtgtaga

SEQ ID NO: 5309622 - DNA, 25 bp, Homo sapien
caggaatctacgcaggtgcgcaggt

SEQ ID NO: 5309623 - DNA, 25 bp, Homo sapien
gaggcaggaatctacgcaggtgcgc

SEQ ID NO: 5309624 - DNA, 25 bp, Homo sapien
gaggatgcaggcaaggggctcccag

SEQ ID NO: 5309625 - DNA, 25 bp, Homo sapien
ctgtccacgaggaaggcctcagatg

SEQ ID NO: 5309626 - DNA, 25 bp, Homo sapien
tgtccacgaggaaggcctcagatga

SEQ ID NO: 5309627 - DNA, 25 bp, Homo sapien
ggagggcacttcaggtagagcgtgg

SEQ ID NO: 5309628 - DNA, 25 bp, Homo sapien
gcgtgggcactgcacaatggttgtc

SEQ ID NO: 5309629 - DNA, 25 bp, Homo sapien
tggtcatccacaaatgagtgttgct

SEQ ID NO: 5309630 - DNA, 25 bp, Homo sapien
gggtggtcatccacaaatgagtgtt

SEQ ID NO: 5309631 - DNA, 25 bp, Homo sapien
tcatccacaaatgagtgttgctaac

SEQ ID NO: 5309632 - DNA, 25 bp, Homo sapien
gagtggggtggtcatccacaaatga

SEQ ID NO: 5309633 - DNA, 25 bp, Homo sapien
cacactaggagatacttggataaca

SEQ ID NO: 5309634 - DNA, 25 bp, Homo sapien
tttcacactaggagatacttggata

SEQ ID NO: 5309635 - DNA, 25 bp, Homo sapien
agggcatttgactttcacactagga

SEQ ID NO: 5309636 - DNA, 25 bp, Homo sapien
gggcatttgactttcacactaggag

SEQ ID NO: 5309637 - DNA, 25 bp, Homo sapien
taagagcaggtcattttgcaataac

SEQ ID NO: 5309638 - DNA, 25 bp, Homo sapien
tcagagtttaagagcaggtcatttt

SEQ ID NO: 5309639 - DNA, 25 bp, Homo sapien
taaaagagtatggtgacttcagagt

SEQ ID NO: 5309640 - DNA, 25 bp, Homo sapien
cagccaggtgcggtaaaagagtatg

SEQ ID NO: 5309641 - DNA, 25 bp, Homo sapien
aaaagcctgccaatgcccagcctgc

SEQ ID NO: 5309642 - DNA, 25 bp, Homo sapien
caaaagcctgccaatgcccagcctg

SEQ ID NO: 5309643 - DNA, 25 bp, Homo sapien
agcctgccaatgcccagcctgccaa

SEQ ID NO: 5309644 - DNA, 25 bp, Homo sapien
aaagcctgccaatgcccagcctgcc

SEQ ID NO: 5309645 - DNA, 25 bp, Homo sapien
tgaactaaggggctgtgatccaaca

SEQ ID NO: 5309646 - DNA, 25 bp, Homo sapien
gaggatattgcccacaggtagctcc

SEQ ID NO: 5309647 - DNA, 25 bp, Homo sapien
caacaggaggatattgcccacaggt

SEQ ID NO: 5309648 - DNA, 25 bp, Homo sapien
acaggtagctccaagtctgcctgag

SEQ ID NO: 5309649 - DNA, 25 bp, Homo sapien
gaggtcccgggcgtggaccatggag

SEQ ID NO: 5309650 - DNA, 25 bp, Homo sapien
ccgggcgtggaccatggagagctgg

SEQ ID NO: 5309651 - DNA, 25 bp, Homo sapien
tgtgaggtcccgggcgtggaccatg

SEQ ID NO: 5309652 - DNA, 25 bp, Homo sapien
agctgggggtccacgtgtgaggtcc

SEQ ID NO: 5309653 - DNA, 25 bp, Homo sapien
tcagtcgcggccttgttttggtgct

SEQ ID NO: 5309654 - DNA, 25 bp, Homo sapien
caaagctccagtgaaccctaaagaa

SEQ ID NO: 5309655 - DNA, 25 bp, Homo sapien
agatcgatggcatgaacttccaaga

SEQ ID NO: 5309656 - DNA, 25 bp, Homo sapien
gagcaagttgtttctacctgaggag

SEQ ID NO: 5309657 - DNA, 25 bp, Homo sapien
tttccaagactcgtactaagggaga

SEQ ID NO: 5309658 - DNA, 25 bp, Homo sapien
tctgaagcttgatactgggcagcca

SEQ ID NO: 5309659 - DNA, 25 bp, Homo sapien
caagactcgtactaagggagagggt

SEQ ID NO: 5309660 - DNA, 25 bp, Homo sapien
tctcatttccaagactcgtactaag

SEQ ID NO: 5309661 - DNA, 25 bp, Homo sapien
ccacaacaatgtgtatagaagtaat

SEQ ID NO: 5309662 - DNA, 25 bp, Homo sapien
taacagaaggatgccgaagcgtctt

SEQ ID NO: 5309663 - DNA, 25 bp, Homo sapien
ttccacaacaatgtgtatagaagta

SEQ ID NO: 5309664 - DNA, 25 bp, Homo sapien
acagaaggatgccgaagcgtctttg

SEQ ID NO: 5309665 - DNA, 25 bp, Homo sapien
ttgtaagcattgcagggatactgtc

SEQ ID NO: 5309666 - DNA, 25 bp, Homo sapien
cattgggaatttttgtaagcattgc

SEQ ID NO: 5309667 - DNA, 25 bp, Homo sapien
ttgggaatttttgtaagcattgcag

SEQ ID NO: 5309668 - DNA, 25 bp, Homo sapien
ggaatttttgtaagcattgcaggga

SEQ ID NO: 5309669 - DNA, 25 bp, Homo sapien
tgttgggcacataattgtgtccctg

SEQ ID NO: 5309670 - DNA, 25 bp, Homo sapien
gctgctgttgggcacataattgtgt

SEQ ID NO: 5309671 - DNA, 25 bp, Homo sapien
ggcacataattgtgtccctgatcct

SEQ ID NO: 5309672 - DNA, 25 bp, Homo sapien
gctgttgggcacataattgtgtccc

SEQ ID NO: 5309673 - DNA, 25 bp, Homo sapien
gtaaattactctagttggagccaca

SEQ ID NO: 5309674 - DNA, 25 bp, Homo sapien
catggctagtgagtatacaggtgac

SEQ ID NO: 5309675 - DNA, 25 bp, Homo sapien
aatgctgcgtatgactgattctgcc

SEQ ID NO: 5309676 - DNA, 25 bp, Homo sapien
cagggtcttaccatgagactggcca

SEQ ID NO: 5309677 - DNA, 25 bp, Homo sapien
tgatcccaaagccttttaggcccga

SEQ ID NO: 5309678 - DNA, 25 bp, Homo sapien
taggcccgaatcacttcgttggtga

SEQ ID NO: 5309679 - DNA, 25 bp, Homo sapien
tccattcggactttttgatgctcct

SEQ ID NO: 5309680 - DNA, 25 bp, Homo sapien
gcatattcttgactagattcattga

SEQ ID NO: 5309681 - DNA, 25 bp, Homo sapien
gtaggaaaagcctcagcgtctctcc

SEQ ID NO: 5309682 - DNA, 25 bp, Homo sapien
tgtaggaaaagcctcagcgtctctc

SEQ ID NO: 5309683 - DNA, 25 bp, Homo sapien
ttagatgacgagagggcagaaagtc

SEQ ID NO: 5309684 - DNA, 25 bp, Homo sapien
tggccctcgcagaggctttctgttt

SEQ ID NO: 5309685 - DNA, 25 bp, Homo sapien
gcacaacctctccaaaaaggatctg

SEQ ID NO: 5309686 - DNA, 25 bp, Homo sapien
ctttctgtttcaacagggttgaaag

SEQ ID NO: 5309687 - DNA, 25 bp, Homo sapien
cacctatgttgaacttataatggcc

SEQ ID NO: 5309688 - DNA, 25 bp, Homo sapien
attctttcattgccttttatctcca

SEQ ID NO: 5309689 - DNA, 25 bp, Homo sapien
ttctttcattgccttttatctccat

SEQ ID NO: 5309690 - DNA, 25 bp, Homo sapien
cattctttcattgccttttatctcc

SEQ ID NO: 5309691 - DNA, 25 bp, Homo sapien
atgtggctttccgttcaaagatctc

SEQ ID NO: 5309692 - DNA, 25 bp, Homo sapien
gtggctttccgttcaaagatctctt

SEQ ID NO: 5309693 - DNA, 25 bp, Homo sapien
tgtggctttccgttcaaagatctct

SEQ ID NO: 5309694 - DNA, 25 bp, Homo sapien
ccttaattatggtcaggccacctct

SEQ ID NO: 5309695 - DNA, 25 bp, Homo sapien
ttaaaatgggcacgggtttgctggc

SEQ ID NO: 5309696 - DNA, 25 bp, Homo sapien
gtaactctagaaggtcctaatcagg

SEQ ID NO: 5309697 - DNA, 25 bp, Homo sapien
attggctaggctgaaaaaatgccca

SEQ ID NO: 5309698 - DNA, 25 bp, Homo sapien
tataagttgaagtagccgtcagtgg

SEQ ID NO: 5309699 - DNA, 25 bp, Homo sapien
tcatgtatagaactggagccatcca

SEQ ID NO: 5309700 - DNA, 25 bp, Homo sapien
ctggaaacacggaggtataagttga

SEQ ID NO: 5309701 - DNA, 25 bp, Homo sapien
ccgtcagtggtgcttctaaaggtca

SEQ ID NO: 5309702 - DNA, 25 bp, Homo sapien
caaaatcagaatgacccttgatgtc

SEQ ID NO: 5309703 - DNA, 25 bp, Homo sapien
tcagggctttcaagcagagcacatt

SEQ ID NO: 5309704 - DNA, 25 bp, Homo sapien
attcccagcttccatcgtccaggtg

SEQ ID NO: 5309705 - DNA, 25 bp, Homo sapien
tttgctctggctcagcaaaatcaga

SEQ ID NO: 5309706 - DNA, 25 bp, Homo sapien
aatttttgaagctggcctgaaaggc

SEQ ID NO: 5309707 - DNA, 25 bp, Homo sapien
atttttgaagctggcctgaaaggcc

SEQ ID NO: 5309708 - DNA, 25 bp, Homo sapien
gcccaggccctggtagatgctgact

SEQ ID NO: 5309709 - DNA, 25 bp, Homo sapien
agcagctgccaggacggaccctcct

SEQ ID NO: 5309710 - DNA, 25 bp, Homo sapien
gactctcagaagctcccagcagctg

SEQ ID NO: 5309711 - DNA, 25 bp, Homo sapien
tccaggacacttgggttcagcccct

SEQ ID NO: 5309712 - DNA, 25 bp, Homo sapien
tccacagctgacacacagtctgtct

SEQ ID NO: 5309713 - DNA, 25 bp, Homo sapien
tggtctttggagtgtgtgaatttca

SEQ ID NO: 5309714 - DNA, 25 bp, Homo sapien
gagacagggagtaacatccacagct

SEQ ID NO: 5309715 - DNA, 25 bp, Homo sapien
ctggctgagacagggagtaacatcc

SEQ ID NO: 5309716 - DNA, 25 bp, Homo sapien
aggaaggagatacaaggtctgtctt

SEQ ID NO: 5309717 - DNA, 25 bp, Homo sapien
aggagatacaaggtctgtctttccc

SEQ ID NO: 5309718 - DNA, 25 bp, Homo sapien
cttgactgagcttggggcaagattg

SEQ ID NO: 5309719 - DNA, 25 bp, Homo sapien
cttggggcaagattgtccgggccca

SEQ ID NO: 5309720 - DNA, 25 bp, Homo sapien
ttaagttatttgaccctgtacatcc

SEQ ID NO: 5309721 - DNA, 25 bp, Homo sapien
ttatacgataataatttaccaagct

SEQ ID NO: 5309722 - DNA, 25 bp, Homo sapien
ttctagcttgagaagccatgctctt

SEQ ID NO: 5309723 - DNA, 25 bp, Homo sapien
acacttcagcgctggcatcacagat

SEQ ID NO: 5309724 - DNA, 25 bp, Homo sapien
caagactatttaacagacgttccaa

SEQ ID NO: 5309725 - DNA, 25 bp, Homo sapien
agtccaactgtcattttaaccttgg

SEQ ID NO: 5309726 - DNA, 25 bp, Homo sapien
ccaaaaagctggatgctgacagtcc

SEQ ID NO: 5309727 - DNA, 25 bp, Homo sapien
gcaaagatccagcatccgtcaagac

SEQ ID NO: 5309728 - DNA, 25 bp, Homo sapien
atatttattgtgtttctaccaagga

SEQ ID NO: 5309729 - DNA, 25 bp, Homo sapien
gagagaataacttcaggctgccttc

SEQ ID NO: 5309730 - DNA, 25 bp, Homo sapien
tgtttctaccaaggaagtgtagtag

SEQ ID NO: 5309731 - DNA, 25 bp, Homo sapien
ttttccttaaaatcaacttgatgcc

SEQ ID NO: 5309732 - DNA, 25 bp, Homo sapien
ctcacattgttcaagattttactca

SEQ ID NO: 5309733 - DNA, 25 bp, Homo sapien
ttgtgcttctaatttgccaggcctt

SEQ ID NO: 5309734 - DNA, 25 bp, Homo sapien
ctgcccttcaaggttgtgcttctaa

SEQ ID NO: 5309735 - DNA, 25 bp, Homo sapien
tcaaggttgtgcttctaatttgcca

SEQ ID NO: 5309736 - DNA, 25 bp, Homo sapien
tcttccactagaccgaggtgatgcc

SEQ ID NO: 5309737 - DNA, 25 bp, Homo sapien
ggaccgcctctttttcgtcatggaa

SEQ ID NO: 5309738 - DNA, 25 bp, Homo sapien
cgttcacggttctatgctgcagagg

SEQ ID NO: 5309739 - DNA, 25 bp, Homo sapien
tcttctagaggaggattgttcaacc

SEQ ID NO: 5309740 - DNA, 25 bp, Homo sapien
tgggatcccacttcactttcatcct

SEQ ID NO: 5309741 - DNA, 25 bp, Homo sapien
tgctgcaaagctgtcaccctgggat

SEQ ID NO: 5309742 - DNA, 25 bp, Homo sapien
cctgctgcaaagctgtcaccctggg

SEQ ID NO: 5309743 - DNA, 25 bp, Homo sapien
tcactttcatcctaggcttcctttt

SEQ ID NO: 5309744 - DNA, 25 bp, Homo sapien
cagatgtagatgatgtaggcttttt

SEQ ID NO: 5309745 - DNA, 25 bp, Homo sapien
tcagatgtagatgatgtaggctttt

SEQ ID NO: 5309746 - DNA, 25 bp, Homo sapien
tgtagatgatgtaggcttttttaac

SEQ ID NO: 5309747 - DNA, 25 bp, Homo sapien
gatgatgtaggcttttttaactctt

SEQ ID NO: 5309748 - DNA, 25 bp, Homo sapien
tcacagctgttacgtttgttcacca

SEQ ID NO: 5309749 - DNA, 25 bp, Homo sapien
ctcacagctgttacgtttgttcacc

SEQ ID NO: 5309750 - DNA, 25 bp, Homo sapien
cacagctgttacgtttgttcaccat

SEQ ID NO: 5309751 - DNA, 25 bp, Homo sapien
ctccctggtaaaatctgaggaaaga

SEQ ID NO: 5309752 - DNA, 25 bp, Homo sapien
ccattataatcaggagagtcctggt

SEQ ID NO: 5309753 - DNA, 25 bp, Homo sapien
gaggaaagatcctagaaagctttac

SEQ ID NO: 5309754 - DNA, 25 bp, Homo sapien
gcactagtcaccattataatcagga

SEQ ID NO: 5309755 - DNA, 25 bp, Homo sapien
taagaggaaagttgactgaagttca

SEQ ID NO: 5309756 - DNA, 25 bp, Homo sapien
ggaaagttgactgaagttcactagc

SEQ ID NO: 5309757 - DNA, 25 bp, Homo sapien
tattactgcccaggggccatggttt

SEQ ID NO: 5309758 - DNA, 25 bp, Homo sapien
tgtggcaatattactgcccaggggc

SEQ ID NO: 5309759 - DNA, 25 bp, Homo sapien
ctcctggatcttctgatacatctct

SEQ ID NO: 5309760 - DNA, 25 bp, Homo sapien
tcctggatcttctgatacatctctg

SEQ ID NO: 5309761 - DNA, 25 bp, Homo sapien
ctctgctgactctcctggatcttct

SEQ ID NO: 5309762 - DNA, 25 bp, Homo sapien
tcacctctgctgactctcctggatc

SEQ ID NO: 5309763 - DNA, 25 bp, Homo sapien
gacagcctaggattggcaaaggaga

SEQ ID NO: 5309764 - DNA, 25 bp, Homo sapien
cacatgcagactctactgccttgaa

SEQ ID NO: 5309765 - DNA, 25 bp, Homo sapien
acatggaactctggtgggttttctc

SEQ ID NO: 5309766 - DNA, 25 bp, Homo sapien
tcttggttggaagactggaaggcat

SEQ ID NO: 5309767 - DNA, 25 bp, Homo sapien
tcttcaagtaactggaggaatttgc

SEQ ID NO: 5309768 - DNA, 25 bp, Homo sapien
caagtctccactatttgtcccaaaa

SEQ ID NO: 5309769 - DNA, 25 bp, Homo sapien
gctgttatttctgcagcactcaggc

SEQ ID NO: 5309770 - DNA, 25 bp, Homo sapien
tcttcataatctccctcgagggcct

SEQ ID NO: 5309771 - DNA, 25 bp, Homo sapien
ggttccatggaagttctcgtaagtc

SEQ ID NO: 5309772 - DNA, 25 bp, Homo sapien
tctcgtaagtcttcagtcgagtgga

SEQ ID NO: 5309773 - DNA, 25 bp, Homo sapien
cagtcgagtggagagtaaagtagcc

SEQ ID NO: 5309774 - DNA, 25 bp, Homo sapien
tccatggaagttctcgtaagtcttc

SEQ ID NO: 5309775 - DNA, 25 bp, Homo sapien
gactgaaaattgaggtagccggctg

SEQ ID NO: 5309776 - DNA, 25 bp, Homo sapien
tctgggaggcccactgcgtaaaagt

SEQ ID NO: 5309777 - DNA, 25 bp, Homo sapien
taatagccgtggtcattccgtggaa

SEQ ID NO: 5309778 - DNA, 25 bp, Homo sapien
taacacagggcagttgaagctcaga

SEQ ID NO: 5309779 - DNA, 25 bp, Homo sapien
gatttgccatcaggcagtcagccct

SEQ ID NO: 5309780 - DNA, 25 bp, Homo sapien
tgggacagcccagatttaggttcac

SEQ ID NO: 5309781 - DNA, 25 bp, Homo sapien
cactggatagcacaagcttgggaca

SEQ ID NO: 5309782 - DNA, 25 bp, Homo sapien
tagactctaagctccctgggttaac

SEQ ID NO: 5309783 - DNA, 25 bp, Homo sapien
tgcctgtctgatacaaggaggacct

SEQ ID NO: 5309784 - DNA, 25 bp, Homo sapien
tacaaggacagagccccttcgtgga

SEQ ID NO: 5309785 - DNA, 25 bp, Homo sapien
cctcaaggagacattgggcgtgtgt

SEQ ID NO: 5309786 - DNA, 25 bp, Homo sapien
ccatactgaatctgggtgacccggg

SEQ ID NO: 5309787 - DNA, 25 bp, Homo sapien
gccaataacagtagcacatttcgct

SEQ ID NO: 5309788 - DNA, 25 bp, Homo sapien
gccaaagccttcgatgctggagaaa

SEQ ID NO: 5309789 - DNA, 25 bp, Homo sapien
gagaaaatctccaaccctagaattc

SEQ ID NO: 5309790 - DNA, 25 bp, Homo sapien
cttttgtgttactgatgggcttgcc

SEQ ID NO: 5309791 - DNA, 25 bp, Homo sapien
tcttggggatgttctgctcactcct

SEQ ID NO: 5309792 - DNA, 25 bp, Homo sapien
ttctccgctgtgtacccattccttc

SEQ ID NO: 5309793 - DNA, 25 bp, Homo sapien
gcgttcagctctgagactctggctc

SEQ ID NO: 5309794 - DNA, 25 bp, Homo sapien
ttcccctcaaaagcgttcagctctg

SEQ ID NO: 5309795 - DNA, 25 bp, Homo sapien
tttttgctgggtacagctgtgcggc

SEQ ID NO: 5309796 - DNA, 25 bp, Homo sapien
ctcagtagtgtttttgctgggtaca

SEQ ID NO: 5309797 - DNA, 25 bp, Homo sapien
tgacgttcgttgacgttccctgcct

SEQ ID NO: 5309798 - DNA, 25 bp, Homo sapien
cgttgacgttcgttgacgttccctg

SEQ ID NO: 5309799 - DNA, 25 bp, Homo sapien
tcctatccaagtgggtctgcactgc

SEQ ID NO: 5309800 - DNA, 25 bp, Homo sapien
gagctctgcctttcaaggtttgagg

SEQ ID NO: 5309801 - DNA, 25 bp, Homo sapien
tgcactgctggataagcaatgccct

SEQ ID NO: 5309802 - DNA, 25 bp, Homo sapien
tgcagaagatcctatccaagtgggt

SEQ ID NO: 5309803 - DNA, 25 bp, Homo sapien
catcgccaggctcgggtcctgccac

SEQ ID NO: 5309804 - DNA, 25 bp, Homo sapien
cgccaggctcgggtcctgccactgc

SEQ ID NO: 5309805 - DNA, 25 bp, Homo sapien
tgcatcgccaggctcgggtcctgcc

SEQ ID NO: 5309806 - DNA, 25 bp, Homo sapien
ctgcatcgccaggctcgggtcctgc

SEQ ID NO: 5309807 - DNA, 25 bp, Homo sapien
ccagtcccatgtccactgtctattt

SEQ ID NO: 5309808 - DNA, 25 bp, Homo sapien
gttcttgtctcaccagtaatgcaga

SEQ ID NO: 5309809 - DNA, 25 bp, Homo sapien
cagaaggcgctctcggttcttgtct

SEQ ID NO: 5309810 - DNA, 25 bp, Homo sapien
tgtgttggagacactcagcaggtct

SEQ ID NO: 5309811 - DNA, 25 bp, Homo sapien
caactattgcacgtggatttcccag

SEQ ID NO: 5309812 - DNA, 25 bp, Homo sapien
ctgcaaggcctgtggaattaattcg

SEQ ID NO: 5309813 - DNA, 25 bp, Homo sapien
gcatatagaggtatcaactgctgca

SEQ ID NO: 5309814 - DNA, 25 bp, Homo sapien
tgtatatagtgtttgctgcaaggcc

SEQ ID NO: 5309815 - DNA, 25 bp, Homo sapien
cagaaacatctttacggtggcatca

SEQ ID NO: 5309816 - DNA, 25 bp, Homo sapien
cctagtgtttgcacggcagtgggaa

SEQ ID NO: 5309817 - DNA, 25 bp, Homo sapien
cggacagtaactatcttgagcccat

SEQ ID NO: 5309818 - DNA, 25 bp, Homo sapien
tcttctggagttgagtacaagcaca

SEQ ID NO: 5309819 - DNA, 25 bp, Homo sapien
cttgccattcattagtgttatttca

SEQ ID NO: 5309820 - DNA, 25 bp, Homo sapien
cattgtaaacgttattgtgccaaat

SEQ ID NO: 5309821 - DNA, 25 bp, Homo sapien
ctcttgccattcattagtgttattt

SEQ ID NO: 5309822 - DNA, 25 bp, Homo sapien
tatttcattgtaaacgttattgtgc

SEQ ID NO: 5309823 - DNA, 25 bp, Homo sapien
ttgtctgcgaattctccagccacca

SEQ ID NO: 5309824 - DNA, 25 bp, Homo sapien
tcagctcccgtggtgaccgctgtgt

SEQ ID NO: 5309825 - DNA, 25 bp, Homo sapien
tagacttagccctcatgtctttggg

SEQ ID NO: 5309826 - DNA, 25 bp, Homo sapien
ggctcctttgtctgcgaattctcca

SEQ ID NO: 5309827 - DNA, 25 bp, Homo sapien
tactcagcgtaacacccaacaggta

SEQ ID NO: 5309828 - DNA, 25 bp, Homo sapien
tttgtcacccaagtactcagcgtaa

SEQ ID NO: 5309829 - DNA, 25 bp, Homo sapien
catgggtaaactgcacgttgcaggg

SEQ ID NO: 5309830 - DNA, 25 bp, Homo sapien
ccaacaggtaactcccactctccac

SEQ ID NO: 5309831 - DNA, 25 bp, Homo sapien
tggtgccatagagaagtaggcaggc

SEQ ID NO: 5309832 - DNA, 25 bp, Homo sapien
cgttaatgaatcatgtgcgtccatg

SEQ ID NO: 5309833 - DNA, 25 bp, Homo sapien
caggcatgccgtgcgttaatgaatc

SEQ ID NO: 5309834 - DNA, 25 bp, Homo sapien
ttgagaactgccgatttggtgccat

SEQ ID NO: 5309835 - DNA, 25 bp, Homo sapien
cccagggcagctctttattaagtga

SEQ ID NO: 5309836 - DNA, 25 bp, Homo sapien
gatttctcacattttccggatgact

SEQ ID NO: 5309837 - DNA, 25 bp, Homo sapien
cacattttccggatgactcagtcag

SEQ ID NO: 5309838 - DNA, 25 bp, Homo sapien
tccccagggcagctctttattaagt

SEQ ID NO: 5309839 - DNA, 25 bp, Homo sapien
gaagtactgatttcccccaggagga

SEQ ID NO: 5309840 - DNA, 25 bp, Homo sapien
caaaatgtcctcatcagcaattatg

SEQ ID NO: 5309841 - DNA, 25 bp, Homo sapien
tgaagtactgatttcccccaggagg

SEQ ID NO: 5309842 - DNA, 25 bp, Homo sapien
tctgcagttgggtgcgacatgttcc

SEQ ID NO: 5309843 - DNA, 25 bp, Homo sapien
aaagtgctcgtatctctgaatagcc

SEQ ID NO: 5309844 - DNA, 25 bp, Homo sapien
ggtgatgttagccttcctctggaaa

SEQ ID NO: 5309845 - DNA, 25 bp, Homo sapien
cagccttggcacaaagctcttggtg

SEQ ID NO: 5309846 - DNA, 25 bp, Homo sapien
agttcttcggtttccaggtactctg

SEQ ID NO: 5309847 - DNA, 25 bp, Homo sapien
gctgatgtgtaccacacttcttata

SEQ ID NO: 5309848 - DNA, 25 bp, Homo sapien
ctgtgaggctgatgtgtaccacact

SEQ ID NO: 5309849 - DNA, 25 bp, Homo sapien
gctctgtgaggctgatgtgtaccac

SEQ ID NO: 5309850 - DNA, 25 bp, Homo sapien
ggccattgatgaagagtacttgtgg

SEQ ID NO: 5309851 - DNA, 25 bp, Homo sapien
cgtggccccgtgtgactcactggtt

SEQ ID NO: 5309852 - DNA, 25 bp, Homo sapien
cactggtgattagtgattctccagc

SEQ ID NO: 5309853 - DNA, 25 bp, Homo sapien
tacttgtgggttgcccaccgtggcc

SEQ ID NO: 5309854 - DNA, 25 bp, Homo sapien
ttcaggatcaacagaaacccctggg

SEQ ID NO: 5309855 - DNA, 25 bp, Homo sapien
ccacatctctaaggcaattggtggg

SEQ ID NO: 5309856 - DNA, 25 bp, Homo sapien
tggccccacatctctaaggcaattg

SEQ ID NO: 5309857 - DNA, 25 bp, Homo sapien
aggattcaggatcaacagaaacccc

SEQ ID NO: 5309858 - DNA, 25 bp, Homo sapien
ggttcttgggtactggcctgagtga

SEQ ID NO: 5309859 - DNA, 25 bp, Homo sapien
gcctgagtgacttaaagccgttcat

SEQ ID NO: 5309860 - DNA, 25 bp, Homo sapien
tcacgctaccccagaaccaccccaa

SEQ ID NO: 5309861 - DNA, 25 bp, Homo sapien
aggcccagcacagtgttgggttctt

SEQ ID NO: 5309862 - DNA, 25 bp, Homo sapien
aactaaatagccagacaagggtcag

SEQ ID NO: 5309863 - DNA, 25 bp, Homo sapien
gacagaggccagtgtacttgcatga

SEQ ID NO: 5309864 - DNA, 25 bp, Homo sapien
tatctcacgacattggcctaaagcc

SEQ ID NO: 5309865 - DNA, 25 bp, Homo sapien
tattacgtgagataaggcatgtggc

SEQ ID NO: 5309866 - DNA, 25 bp, Homo sapien
ttctgcaaatgtgtgcggctcgccg

SEQ ID NO: 5309867 - DNA, 25 bp, Homo sapien
ttgataaacgggagcgaatcgcgcc

SEQ ID NO: 5309868 - DNA, 25 bp, Homo sapien
gtgtatcctccggtcgaaagcagcg

SEQ ID NO: 5309869 - DNA, 25 bp, Homo sapien
tgttccaacttccactacgggactg

SEQ ID NO: 5309870 - DNA, 25 bp, Homo sapien
gactgcctgcgaaacgccttggagg

SEQ ID NO: 5309871 - DNA, 25 bp, Homo sapien
aatggcagggcaaacagcgtgtcct

SEQ ID NO: 5309872 - DNA, 25 bp, Homo sapien
taacaatggcccgtcaagaagtggg

SEQ ID NO: 5309873 - DNA, 25 bp, Homo sapien
tttgtcccagaatgttcacacgtcg

SEQ ID NO: 5309874 - DNA, 25 bp, Homo sapien
caggcaaatgtaaatgagatccttg

SEQ ID NO: 5309875 - DNA, 25 bp, Homo sapien
tcccagagtgcttatacagtagtgc

SEQ ID NO: 5309876 - DNA, 25 bp, Homo sapien
cagctggacttagttgttcctcttc

SEQ ID NO: 5309877 - DNA, 25 bp, Homo sapien
cttggataatcagggatcaaagtcc

SEQ ID NO: 5309878 - DNA, 25 bp, Homo sapien
ccctccacacttgatatgtttccat

SEQ ID NO: 5309879 - DNA, 25 bp, Homo sapien
cctccacacttgatatgtttccatt

SEQ ID NO: 5309880 - DNA, 25 bp, Homo sapien
tcaacacctttaggctgcagtagaa

SEQ ID NO: 5309881 - DNA, 25 bp, Homo sapien
tattgttcacaggagagtaccccag

SEQ ID NO: 5309882 - DNA, 25 bp, Homo sapien
tgaggatgatttccgaaggagtgcc

SEQ ID NO: 5309883 - DNA, 25 bp, Homo sapien
taaaagacttctccggtcacaagga

SEQ ID NO: 5309884 - DNA, 25 bp, Homo sapien
tcagatcccagacagttcttgtgtt

SEQ ID NO: 5309885 - DNA, 25 bp, Homo sapien
agttcttgtgttttactgccattgc

SEQ ID NO: 5309886 - DNA, 25 bp, Homo sapien
tcttgtgttttactgccattgcctc

SEQ ID NO: 5309887 - DNA, 25 bp, Homo sapien
ttgtgttttactgccattgcctctc

SEQ ID NO: 5309888 - DNA, 25 bp, Homo sapien
cttgagtttttctagtgctgccaaa

SEQ ID NO: 5309889 - DNA, 25 bp, Homo sapien
cacagtcgatgtggtggtcatccat

SEQ ID NO: 5309890 - DNA, 25 bp, Homo sapien
aagagagaagcaagccgtgttggca

SEQ ID NO: 5309891 - DNA, 25 bp, Homo sapien
gaagcaagccgtgttggcaactgtg

SEQ ID NO: 5309892 - DNA, 25 bp, Homo sapien
ggcaactgtgcatcacagtcgatgt

SEQ ID NO: 5309893 - DNA, 25 bp, Homo sapien
gagcaatggagagccacgcaaatgc

SEQ ID NO: 5309894 - DNA, 25 bp, Homo sapien
agcaccgagtcttctctatacatcc

SEQ ID NO: 5309895 - DNA, 25 bp, Homo sapien
acagcaccgagtcttctctatacat

SEQ ID NO: 5309896 - DNA, 25 bp, Homo sapien
acgcaaatgcctcctgcacccgctg

SEQ ID NO: 5309897 - DNA, 25 bp, Homo sapien
ttgatacctgaatggccacaggcat

SEQ ID NO: 5309898 - DNA, 25 bp, Homo sapien
ggtaataggcatattgttttgatac

SEQ ID NO: 5309899 - DNA, 25 bp, Homo sapien
ttttgatacctgaatggccacaggc

SEQ ID NO: 5309900 - DNA, 25 bp, Homo sapien
ttaaccttatagggtaataggcata

SEQ ID NO: 5309901 - DNA, 25 bp, Homo sapien
tattcgcctaggaagagcagggttc

SEQ ID NO: 5309902 - DNA, 25 bp, Homo sapien
taagcagtgaaaagagtattcgcct

SEQ ID NO: 5309903 - DNA, 25 bp, Homo sapien
aaaggtttttgatagagcaccaggc

SEQ ID NO: 5309904 - DNA, 25 bp, Homo sapien
gatggaattagatagggatcccctg

SEQ ID NO: 5309905 - DNA, 25 bp, Homo sapien
ctggccaggttccttcagaagctcc

SEQ ID NO: 5309906 - DNA, 25 bp, Homo sapien
tggccaggttccttcagaagctccc

SEQ ID NO: 5309907 - DNA, 25 bp, Homo sapien
ggccaggttccttcagaagctccca

SEQ ID NO: 5309908 - DNA, 25 bp, Homo sapien
aaagtaagtctgagaagattcccag

SEQ ID NO: 5309909 - DNA, 25 bp, Homo sapien
catagcgtctggtacagaacaggca

SEQ ID NO: 5309910 - DNA, 25 bp, Homo sapien
gaatgcttcaaaacgagtgcccaca

SEQ ID NO: 5309911 - DNA, 25 bp, Homo sapien
taaatgcactatataaaccgatggg

SEQ ID NO: 5309912 - DNA, 25 bp, Homo sapien
agacagccaagttcagtgcagccag

SEQ ID NO: 5309913 - DNA, 25 bp, Homo sapien
gcagccagcagagtcacaaccccgc

SEQ ID NO: 5309914 - DNA, 25 bp, Homo sapien
cagccagcagagtcacaaccccgca

SEQ ID NO: 5309915 - DNA, 25 bp, Homo sapien
acagccaagttcagtgcagccagca

SEQ ID NO: 5309916 - DNA, 25 bp, Homo sapien
agaagagtggttgcctggaaccagg

SEQ ID NO: 5309917 - DNA, 25 bp, Homo sapien
gacaattcgaatatatagtggcaaa

SEQ ID NO: 5309918 - DNA, 25 bp, Homo sapien
gcctgcaacgccatgatgaatctca

SEQ ID NO: 5309919 - DNA, 25 bp, Homo sapien
catgcaacggaatacaactcactga

SEQ ID NO: 5309920 - DNA, 25 bp, Homo sapien
tcataagtaggaagcctagctgggc

SEQ ID NO: 5309921 - DNA, 25 bp, Homo sapien
tgtgggtcacaaaccttcagtggcc

SEQ ID NO: 5309922 - DNA, 25 bp, Homo sapien
aatggcagcagatggaacattctgg

SEQ ID NO: 5309923 - DNA, 25 bp, Homo sapien
tcagtggcccaaaaggtggcaagcc

SEQ ID NO: 5309924 - DNA, 25 bp, Homo sapien
tggtctttcacacggcacatttgga

SEQ ID NO: 5309925 - DNA, 25 bp, Homo sapien
tacaagatggacttacctggcagac

SEQ ID NO: 5309926 - DNA, 25 bp, Homo sapien
aaatggtatagtgaccccgtccacg

SEQ ID NO: 5309927 - DNA, 25 bp, Homo sapien
tgaagggtcaactccaacgtatgtg

SEQ ID NO: 5309928 - DNA, 25 bp, Homo sapien
agggcgttctctggagtattggaac

SEQ ID NO: 5309929 - DNA, 25 bp, Homo sapien
ggtgaggagagatgagggcgttctc

SEQ ID NO: 5309930 - DNA, 25 bp, Homo sapien
tgtgagaatccacgcgtgtctaaga

SEQ ID NO: 5309931 - DNA, 25 bp, Homo sapien
tccacgcgtgtctaagaaaccatag

SEQ ID NO: 5309932 - DNA, 25 bp, Homo sapien
aacagcaggtatcagggtggccagg

SEQ ID NO: 5309933 - DNA, 25 bp, Homo sapien
tagctggaagggagatccagcatgc

SEQ ID NO: 5309934 - DNA, 25 bp, Homo sapien
tgtcctgcagcacctagggaccaac

SEQ ID NO: 5309935 - DNA, 25 bp, Homo sapien
tgcacactcacagaacgcaaagtgg

SEQ ID NO: 5309936 - DNA, 25 bp, Homo sapien
aagtcactccaggtagacccatccc

SEQ ID NO: 5309937 - DNA, 25 bp, Homo sapien
tcaagtcactccaggtagacccatc

SEQ ID NO: 5309938 - DNA, 25 bp, Homo sapien
gaaggatgaaattccaggcatcaca

SEQ ID NO: 5309939 - DNA, 25 bp, Homo sapien
ggatgaaattccaggcatcacagca

SEQ ID NO: 5309940 - DNA, 25 bp, Homo sapien
aaaccaggaccggggagactgcagc

SEQ ID NO: 5309941 - DNA, 25 bp, Homo sapien
ctagatatgggcacgggcaggacac

SEQ ID NO: 5309942 - DNA, 25 bp, Homo sapien
tagatatgggcacgggcaggacaca

SEQ ID NO: 5309943 - DNA, 25 bp, Homo sapien
tccatcattcacatcacaagcttca

SEQ ID NO: 5309944 - DNA, 25 bp, Homo sapien
ggccgagattgctgcagcactttca

SEQ ID NO: 5309945 - DNA, 25 bp, Homo sapien
gtgccaaaggccgagattgctgcag

SEQ ID NO: 5309946 - DNA, 25 bp, Homo sapien
ttcataaattcctgaggagagtgcc

SEQ ID NO: 5309947 - DNA, 25 bp, Homo sapien
gatgcagagcctttgagtggcagct

SEQ ID NO: 5309948 - DNA, 25 bp, Homo sapien
agctgccgtggccggccggaagcat

SEQ ID NO: 5309949 - DNA, 25 bp, Homo sapien
cctgccaagccacccggatgcagag

SEQ ID NO: 5309950 - DNA, 25 bp, Homo sapien
tggatctccagaggacacccctgcc

SEQ ID NO: 5309951 - DNA, 25 bp, Homo sapien
tgtcattgttgttatccagatcaaa

SEQ ID NO: 5309952 - DNA, 25 bp, Homo sapien
agatcaaacactgtacacagcacat

SEQ ID NO: 5309953 - DNA, 25 bp, Homo sapien
ctatagatatccgttgtcattgttg

SEQ ID NO: 5309954 - DNA, 25 bp, Homo sapien
ccagatcaaacactgtacacagcac

SEQ ID NO: 5309955 - DNA, 25 bp, Homo sapien
atcttctgggaggttaccgtatcaa

SEQ ID NO: 5309956 - DNA, 25 bp, Homo sapien
caccgagtcggcataatacagccca

SEQ ID NO: 5309957 - DNA, 25 bp, Homo sapien
aggcaaactaatggtcccccatctt

SEQ ID NO: 5309958 - DNA, 25 bp, Homo sapien
gaggttaccgtatcaatgccattct

SEQ ID NO: 5309959 - DNA, 25 bp, Homo sapien
gaaagccttgatggggttgaaacca

SEQ ID NO: 5309960 - DNA, 25 bp, Homo sapien
agatggagcacagccgtagccaatc

SEQ ID NO: 5309961 - DNA, 25 bp, Homo sapien
gctgcactctgctttaaggaagagt

SEQ ID NO: 5309962 - DNA, 25 bp, Homo sapien
cgtagccaatctgggccgggccact

SEQ ID NO: 5309963 - DNA, 25 bp, Homo sapien
ctgcataccacagcagggaggtcat

SEQ ID NO: 5309964 - DNA, 25 bp, Homo sapien
tcactttgcctcaaacttttcatca

SEQ ID NO: 5309965 - DNA, 25 bp, Homo sapien
aaagcagcctttgtaaggtcctggg

SEQ ID NO: 5309966 - DNA, 25 bp, Homo sapien
ccaggaagccatgcagaaagtgctg

SEQ ID NO: 5309967 - DNA, 25 bp, Homo sapien
gggcagaaagcaggccttggaagac

SEQ ID NO: 5309968 - DNA, 25 bp, Homo sapien
gcagatctatactcaaaggcctcgg

SEQ ID NO: 5309969 - DNA, 25 bp, Homo sapien
catgagtggcagcagatctatactc

SEQ ID NO: 5309970 - DNA, 25 bp, Homo sapien
tgccatttcatgagtggcagcagat

SEQ ID NO: 5309971 - DNA, 25 bp, Homo sapien
tcaaaggcctcggtaactccctctg

SEQ ID NO: 5309972 - DNA, 25 bp, Homo sapien
tctgtctccaaaaggcctcttggat

SEQ ID NO: 5309973 - DNA, 25 bp, Homo sapien
aatattttctccaacgtgcttccgt

SEQ ID NO: 5309974 - DNA, 25 bp, Homo sapien
caaaaggcctcttggattcaaaata

SEQ ID NO: 5309975 - DNA, 25 bp, Homo sapien
tccaacgtgcttccgtaaagcccat

SEQ ID NO: 5309976 - DNA, 25 bp, Homo sapien
ggcactcgccaacacgccctgctat

SEQ ID NO: 5309977 - DNA, 25 bp, Homo sapien
ggctcatacggcctcgacttccctg

SEQ ID NO: 5309978 - DNA, 25 bp, Homo sapien
tcatggctcatacggcctcgacttc

SEQ ID NO: 5309979 - DNA, 25 bp, Homo sapien
cactcgccaacacgccctgctattt

SEQ ID NO: 5309980 - DNA, 25 bp, Homo sapien
gaacagtatcagagcatcaaagagg

SEQ ID NO: 5309981 - DNA, 25 bp, Homo sapien
agttaacactttagctatccaaagg

SEQ ID NO: 5309982 - DNA, 25 bp, Homo sapien
tcaacactagcttcacttcccagag

SEQ ID NO: 5309983 - DNA, 25 bp, Homo sapien
tatccaaagggtatttcgtgaagaa

SEQ ID NO: 5309984 - DNA, 25 bp, Homo sapien
tcacaggttccagcagtcggagcag

SEQ ID NO: 5309985 - DNA, 25 bp, Homo sapien
cggcagcgtacaatcatcacaggtt

SEQ ID NO: 5309986 - DNA, 25 bp, Homo sapien
tgttagcaccaaacaaggccattcg

SEQ ID NO: 5309987 - DNA, 25 bp, Homo sapien
catttcgggctctcaggactttcag

SEQ ID NO: 5309988 - DNA, 25 bp, Homo sapien
gagggagctcgtacaccgtttggct

SEQ ID NO: 5309989 - DNA, 25 bp, Homo sapien
acggcagagagggagctcgtacacc

SEQ ID NO: 5309990 - DNA, 25 bp, Homo sapien
tcgtacaccgtttggctcctttgac

SEQ ID NO: 5309991 - DNA, 25 bp, Homo sapien
ggctcctttgacttaggacaatttc

SEQ ID NO: 5309992 - DNA, 25 bp, Homo sapien
ccaggatttaatccagccaggattg

SEQ ID NO: 5309993 - DNA, 25 bp, Homo sapien
gtagttagggcagacctagtccaga

SEQ ID NO: 5309994 - DNA, 25 bp, Homo sapien
taagactcagatagcaagccaacag

SEQ ID NO: 5309995 - DNA, 25 bp, Homo sapien
tatatacccctcacttcacagatga

SEQ ID NO: 5309996 - DNA, 25 bp, Homo sapien
tgtaataaacttagcagccctgcct

SEQ ID NO: 5309997 - DNA, 25 bp, Homo sapien
tggcaaagcagtatacccctcaagc

SEQ ID NO: 5309998 - DNA, 25 bp, Homo sapien
tggaacttggaacgcacgctggaac

SEQ ID NO: 5309999 - DNA, 25 bp, Homo sapien
taacaggtatgcatggtgacccagg

SEQ ID NO: 5310000 - DNA, 25 bp, Homo sapien
taatgtattgttgacctgaagatgt

SEQ ID NO: 5310001 - DNA, 25 bp, Homo sapien
tcaattcgacaagtttttgggctga

SEQ ID NO: 5310002 - DNA, 25 bp, Homo sapien
taacaacagaacaccaatagggagg

SEQ ID NO: 5310003 - DNA, 25 bp, Homo sapien
gagaccttccatgggtaacaacaga

SEQ ID NO: 5310004 - DNA, 25 bp, Homo sapien
tggctgggactacaggcacctgcca

SEQ ID NO: 5310005 - DNA, 25 bp, Homo sapien
aggtgcacaccatcgtgtctaattt

SEQ ID NO: 5310006 - DNA, 25 bp, Homo sapien
ggactacaggcacctgccaccatgc

SEQ ID NO: 5310007 - DNA, 25 bp, Homo sapien
acaggtgcacaccatcgtgtctaat

SEQ ID NO: 5310008 - DNA, 25 bp, Homo sapien
acctgcattgggtgtctccaagtgt

SEQ ID NO: 5310009 - DNA, 25 bp, Homo sapien
accgtgaccgtttggtggactatga

SEQ ID NO: 5310010 - DNA, 25 bp, Homo sapien
tgagttatagaggttctttatccct

SEQ ID NO: 5310011 - DNA, 25 bp, Homo sapien
ggtgtctccaagtgtgaaccgtgac

SEQ ID NO: 5310012 - DNA, 25 bp, Homo sapien
tgctcaagatagaaacagtgtccga

SEQ ID NO: 5310013 - DNA, 25 bp, Homo sapien
caggagcctgggttgcaagcaacag

SEQ ID NO: 5310014 - DNA, 25 bp, Homo sapien
tgtgtacccaccactaaagctgcag

SEQ ID NO: 5310015 - DNA, 25 bp, Homo sapien
agttagagtgatagggtttgcccca

SEQ ID NO: 5310016 - DNA, 25 bp, Homo sapien
aaaacatccactatggaagaacaac

SEQ ID NO: 5310017 - DNA, 25 bp, Homo sapien
caaaacatccactatggaagaacaa

SEQ ID NO: 5310018 - DNA, 25 bp, Homo sapien
tggccaaaacatccactatggaaga

SEQ ID NO: 5310019 - DNA, 25 bp, Homo sapien
cagtggccaaaacatccactatgga

SEQ ID NO: 5310020 - DNA, 25 bp, Homo sapien
aggccaaaattagggattcagtcag

SEQ ID NO: 5310021 - DNA, 25 bp, Homo sapien
atacaggccaaaattagggattcag

SEQ ID NO: 5310022 - DNA, 25 bp, Homo sapien
gaagatggttcacagagggagaaga

SEQ ID NO: 5310023 - DNA, 25 bp, Homo sapien
ttcagtcagtatggactcctgtatt

SEQ ID NO: 5310024 - DNA, 25 bp, Homo sapien
tcagggatgaactaagttgagctaa

SEQ ID NO: 5310025 - DNA, 25 bp, Homo sapien
aacatggtatatggatggtgatgcc

SEQ ID NO: 5310026 - DNA, 25 bp, Homo sapien
gaagttcaagactttgttcaatgag

SEQ ID NO: 5310027 - DNA, 25 bp, Homo sapien
tcaatgagtgggtcaagagaagctc

SEQ ID NO: 5310028 - DNA, 25 bp, Homo sapien
tctaagagcaagtagcagaggccgg

SEQ ID NO: 5310029 - DNA, 25 bp, Homo sapien
tgaacaaatggtcctgcaagccaag

SEQ ID NO: 5310030 - DNA, 25 bp, Homo sapien
ggtaacactgctaaccagggtcaga

SEQ ID NO: 5310031 - DNA, 25 bp, Homo sapien
ggccggtcttgaaccaggaactgac

SEQ ID NO: 5310032 - DNA, 25 bp, Homo sapien
ggaaatcagattcggagtttgagag

SEQ ID NO: 5310033 - DNA, 25 bp, Homo sapien
gagagtggaaatcagattcggagtt

SEQ ID NO: 5310034 - DNA, 25 bp, Homo sapien
gagtggaaatcagattcggagtttg

SEQ ID NO: 5310035 - DNA, 25 bp, Homo sapien
aatcagattcggagtttgagagttc

SEQ ID NO: 5310036 - DNA, 25 bp, Homo sapien
gctggaagcctttgggacaaccgct

SEQ ID NO: 5310037 - DNA, 25 bp, Homo sapien
tacaacagtgagcatttccccaagt

SEQ ID NO: 5310038 - DNA, 25 bp, Homo sapien
caagtccttgagtactgggagcagc

SEQ ID NO: 5310039 - DNA, 25 bp, Homo sapien
tacaacctaagggtgatggtccagt

SEQ ID NO: 5310040 - DNA, 25 bp, Homo sapien
tattgcgtcatcgtggaggtcgtcg

SEQ ID NO: 5310041 - DNA, 25 bp, Homo sapien
tccgttgtgcacttagaggccgaga

SEQ ID NO: 5310042 - DNA, 25 bp, Homo sapien
cgagcacaggccaagtttcagagca

SEQ ID NO: 5310043 - DNA, 25 bp, Homo sapien
taaagctcgtgctacggaaggcgtg

SEQ ID NO: 5310044 - DNA, 25 bp, Homo sapien
ttatgatccggcggatcctcctggg

SEQ ID NO: 5310045 - DNA, 25 bp, Homo sapien
ccggccggtcttatgatccggcgga

SEQ ID NO: 5310046 - DNA, 25 bp, Homo sapien
gggccggccggtcttatgatccggc

SEQ ID NO: 5310047 - DNA, 25 bp, Homo sapien
ccggtcttatgatccggcggatcct

SEQ ID NO: 5310048 - DNA, 25 bp, Homo sapien
tccttggcaggaaggcagaacttga

SEQ ID NO: 5310049 - DNA, 25 bp, Homo sapien
tggcaggaaggcagaacttgatacc

SEQ ID NO: 5310050 - DNA, 25 bp, Homo sapien
ttaatccttggcaggaaggcagaac

SEQ ID NO: 5310051 - DNA, 25 bp, Homo sapien
ccttggcaggaaggcagaacttgat

SEQ ID NO: 5310052 - DNA, 25 bp, Homo sapien
ttccatccttgctcagcccggtgag

SEQ ID NO: 5310053 - DNA, 25 bp, Homo sapien
catccttgctcagcccggtgagcag

SEQ ID NO: 5310054 - DNA, 25 bp, Homo sapien
ggtccttgtagccccgtgttccatc

SEQ ID NO: 5310055 - DNA, 25 bp, Homo sapien
ccttgctcagcccggtgagcagagc

SEQ ID NO: 5310056 - DNA, 25 bp, Homo sapien
ttcagcaggagagggacgcagttac

SEQ ID NO: 5310057 - DNA, 25 bp, Homo sapien
tgggtagaacgctctcctgcccagt

SEQ ID NO: 5310058 - DNA, 25 bp, Homo sapien
agctgtgggtgctacagaggcctca

SEQ ID NO: 5310059 - DNA, 25 bp, Homo sapien
tccagaaagagcacatgtgttggca

SEQ ID NO: 5310060 - DNA, 25 bp, Homo sapien
tattgtttgccctcttgggccatcc

SEQ ID NO: 5310061 - DNA, 25 bp, Homo sapien
ctaaatatggcgcaaaacttcctct

SEQ ID NO: 5310062 - DNA, 25 bp, Homo sapien
tatggcgcaaaacttcctctgccac

SEQ ID NO: 5310063 - DNA, 25 bp, Homo sapien
cacctgctgctcatattgtttgccc

SEQ ID NO: 5310064 - DNA, 25 bp, Homo sapien
tagttttccaccacttcaccgagag

SEQ ID NO: 5310065 - DNA, 25 bp, Homo sapien
aaatggcactcctccctagccaggt

SEQ ID NO: 5310066 - DNA, 25 bp, Homo sapien
gaaagagaggaatgacaccacctgt

SEQ ID NO: 5310067 - DNA, 25 bp, Homo sapien
cacctgtcccgttgctgactctaag

SEQ ID NO: 5310068 - DNA, 25 bp, Homo sapien
cattttggcaattgacagcacctcc

SEQ ID NO: 5310069 - DNA, 25 bp, Homo sapien
tacactcactagtcatgcgggcctg

SEQ ID NO: 5310070 - DNA, 25 bp, Homo sapien
cagaaacgatgtctaggtaggccaa

SEQ ID NO: 5310071 - DNA, 25 bp, Homo sapien
ggtggtactgccctagctgagagcc

SEQ ID NO: 5310072 - DNA, 25 bp, Homo sapien
gaagtgccagttcgtcacaacacag

SEQ ID NO: 5310073 - DNA, 25 bp, Homo sapien
acgtggcggtcttctagttcagggc

SEQ ID NO: 5310074 - DNA, 25 bp, Homo sapien
cacattaaatctgctagtagggctg

SEQ ID NO: 5310075 - DNA, 25 bp, Homo sapien
tagataatgacaaggccagtcctct

SEQ ID NO: 5310076 - DNA, 25 bp, Homo sapien
gatgaaagattctgcacacctccac

SEQ ID NO: 5310077 - DNA, 25 bp, Homo sapien
taagggcagttgctctacatttgac

SEQ ID NO: 5310078 - DNA, 25 bp, Homo sapien
attcacacaggatactatgtgatgc

SEQ ID NO: 5310079 - DNA, 25 bp, Homo sapien
ggtctcattcttgtactaactgccg

SEQ ID NO: 5310080 - DNA, 25 bp, Homo sapien
gcagccacagataccaatagaaaaa

SEQ ID NO: 5310081 - DNA, 25 bp, Homo sapien
ccttagtatacaggaacctcttgca

SEQ ID NO: 5310082 - DNA, 25 bp, Homo sapien
taaaatgtagtatcaggaggcaaaa

SEQ ID NO: 5310083 - DNA, 25 bp, Homo sapien
gcatatgagttaatcagaagcagcc

SEQ ID NO: 5310084 - DNA, 25 bp, Homo sapien
taagcgcaatcatgtcactgctctg

SEQ ID NO: 5310085 - DNA, 25 bp, Homo sapien
gtgggtccccagctcagactaaacg

SEQ ID NO: 5310086 - DNA, 25 bp, Homo sapien
ctaaacgccaaagtccgcacagtgg

SEQ ID NO: 5310087 - DNA, 25 bp, Homo sapien
gcttctgtctatgccccatggtcat

SEQ ID NO: 5310088 - DNA, 25 bp, Homo sapien
tgtttttgatgaggctatcatagcc

SEQ ID NO: 5310089 - DNA, 25 bp, Homo sapien
gaaatgctacagctatacccagacc

SEQ ID NO: 5310090 - DNA, 25 bp, Homo sapien
cttcagtggccaaggaaactgtcca

SEQ ID NO: 5310091 - DNA, 25 bp, Homo sapien
cctgtcctcagaattctataaagtg

SEQ ID NO: 5310092 - DNA, 25 bp, Homo sapien
tctctcaggggtttcatagtttaaa

SEQ ID NO: 5310093 - DNA, 25 bp, Homo sapien
tacaatctctcaggggtttcatagt

SEQ ID NO: 5310094 - DNA, 25 bp, Homo sapien
aaggtacaatctctcaggggtttca

SEQ ID NO: 5310095 - DNA, 25 bp, Homo sapien
aatctctcaggggtttcatagttta

SEQ ID NO: 5310096 - DNA, 25 bp, Homo sapien
ggtcgctccaagcgtacaggagatg

SEQ ID NO: 5310097 - DNA, 25 bp, Homo sapien
gctccaagcgtacaggagatgggcc

SEQ ID NO: 5310098 - DNA, 25 bp, Homo sapien
tcgctccaagcgtacaggagatggg

SEQ ID NO: 5310099 - DNA, 25 bp, Homo sapien
ctccaagcgtacaggagatgggcca

SEQ ID NO: 5310100 - DNA, 25 bp, Homo sapien
gaaccacagcagaagttatagagcg

SEQ ID NO: 5310101 - DNA, 25 bp, Homo sapien
gagaagtgtgtatgctgaccaaacc

SEQ ID NO: 5310102 - DNA, 25 bp, Homo sapien
tttgacgctccccaaagtgcatgag

SEQ ID NO: 5310103 - DNA, 25 bp, Homo sapien
caagcagttggtccctaagtgaaag

SEQ ID NO: 5310104 - DNA, 25 bp, Homo sapien
gctgagagtctactaatcattggca

SEQ ID NO: 5310105 - DNA, 25 bp, Homo sapien
cattggcaaagtatgagtccctata

SEQ ID NO: 5310106 - DNA, 25 bp, Homo sapien
taatgaagggttacggcttggaaca

SEQ ID NO: 5310107 - DNA, 25 bp, Homo sapien
gatgggtcaggctttgtacttacaa

SEQ ID NO: 5310108 - DNA, 25 bp, Homo sapien
gcagggctgaagtaatctcttaaaa

SEQ ID NO: 5310109 - DNA, 25 bp, Homo sapien
ctacagaacagggacagaagtacct

SEQ ID NO: 5310110 - DNA, 25 bp, Homo sapien
tatgtaataagtagaaccggcagtt

SEQ ID NO: 5310111 - DNA, 25 bp, Homo sapien
tcaggagctgtacaacatactggca

SEQ ID NO: 5310112 - DNA, 25 bp, Homo sapien
tgcactacggttgtcaggattaagt

SEQ ID NO: 5310113 - DNA, 25 bp, Homo sapien
cttgcactacggttgtcaggattaa

SEQ ID NO: 5310114 - DNA, 25 bp, Homo sapien
ttgcactacggttgtcaggattaag

SEQ ID NO: 5310115 - DNA, 25 bp, Homo sapien
cactacggttgtcaggattaagtta

SEQ ID NO: 5310116 - DNA, 25 bp, Homo sapien
catggagagatctataagtgctacg

SEQ ID NO: 5310117 - DNA, 25 bp, Homo sapien
tataagtgctacgttttctttctac

SEQ ID NO: 5310118 - DNA, 25 bp, Homo sapien
cagggtacatggagagatctataag

SEQ ID NO: 5310119 - DNA, 25 bp, Homo sapien
agagatctataagtgctacgttttc

SEQ ID NO: 5310120 - DNA, 25 bp, Homo sapien
aatcatcatgttacctgcctaccca

SEQ ID NO: 5310121 - DNA, 25 bp, Homo sapien
tcaacccagtaatctgatgccagaa

SEQ ID NO: 5310122 - DNA, 25 bp, Homo sapien
gatgccagaactcctaatcatcatg

SEQ ID NO: 5310123 - DNA, 25 bp, Homo sapien
cttttctaggtcacaaatgcctgta

SEQ ID NO: 5310124 - DNA, 25 bp, Homo sapien
ctagttcatccttattgttaacaag

SEQ ID NO: 5310125 - DNA, 25 bp, Homo sapien
ggatctagttcatccttattgttaa

SEQ ID NO: 5310126 - DNA, 25 bp, Homo sapien
tcaatttggatctagttcatcctta

SEQ ID NO: 5310127 - DNA, 25 bp, Homo sapien
agttcatccttattgttaacaagca

SEQ ID NO: 5310128 - DNA, 25 bp, Homo sapien
tatagttacaggcatggagagagac

SEQ ID NO: 5310129 - DNA, 25 bp, Homo sapien
gagacagctgcaaaaattatcacca

SEQ ID NO: 5310130 - DNA, 25 bp, Homo sapien
ggaatgttacataccctctaggtgt

SEQ ID NO: 5310131 - DNA, 25 bp, Homo sapien
cattgacatagaatgagctccataa

SEQ ID NO: 5310132 - DNA, 25 bp, Homo sapien
tgatacaagacgaaaaatctgatgt

SEQ ID NO: 5310133 - DNA, 25 bp, Homo sapien
tttcttgataacacaggccgctgct

SEQ ID NO: 5310134 - DNA, 25 bp, Homo sapien
cacagtgctttacctagcatatcag

SEQ ID NO: 5310135 - DNA, 25 bp, Homo sapien
tatcttattgtgatacaagacgaaa

SEQ ID NO: 5310136 - DNA, 25 bp, Homo sapien
caggaagatcgtttaggcccaagca

SEQ ID NO: 5310137 - DNA, 25 bp, Homo sapien
gaagctgcccagattacagtgactg

SEQ ID NO: 5310138 - DNA, 25 bp, Homo sapien
aaattcctatactggctgggctcgg

SEQ ID NO: 5310139 - DNA, 25 bp, Homo sapien
tggacagtccccattaagaagctgc

SEQ ID NO: 5310140 - DNA, 25 bp, Homo sapien
tttcccaatccagtggaataggaag

SEQ ID NO: 5310141 - DNA, 25 bp, Homo sapien
aaagctagaaattgtagtgatctgg

SEQ ID NO: 5310142 - DNA, 25 bp, Homo sapien
tcctacaaagctagaaattgtagtg

SEQ ID NO: 5310143 - DNA, 25 bp, Homo sapien
gctcctacaaagctagaaattgtag

SEQ ID NO: 5310144 - DNA, 25 bp, Homo sapien
tacaaagctagaaattgtagtgatc

SEQ ID NO: 5310145 - DNA, 25 bp, Homo sapien
gaataggtagcatcaggtcttaaac

SEQ ID NO: 5310146 - DNA, 25 bp, Homo sapien
tgacaatgatgactaagcttcaact

SEQ ID NO: 5310147 - DNA, 25 bp, Homo sapien
caagtcagattgctagaggccacgt

SEQ ID NO: 5310148 - DNA, 25 bp, Homo sapien
actggccaagttcaatgtaaaggga

SEQ ID NO: 5310149 - DNA, 25 bp, Homo sapien
tttccttccaatgcggcccagagaa

SEQ ID NO: 5310150 - DNA, 25 bp, Homo sapien
tattctgcctagatggtataagcct

SEQ ID NO: 5310151 - DNA, 25 bp, Homo sapien
gcaatggctgtacaactgtgcctat

SEQ ID NO: 5310152 - DNA, 25 bp, Homo sapien
gagattgtacccaacaggctcagta

SEQ ID NO: 5310153 - DNA, 25 bp, Homo sapien
caaaaacctttgcacaagtatacaa

SEQ ID NO: 5310154 - DNA, 25 bp, Homo sapien
catggtacatggaatacttgtaatg

SEQ ID NO: 5310155 - DNA, 25 bp, Homo sapien
tcaagtaatctagtctacaaaaacc

SEQ ID NO: 5310156 - DNA, 25 bp, Homo sapien
tcctttgatctaggaatgttactca

SEQ ID NO: 5310157 - DNA, 25 bp, Homo sapien
ttgaggtttggtcctaacaaacata

SEQ ID NO: 5310158 - DNA, 25 bp, Homo sapien
tgctttgaggtttggtcctaacaaa

SEQ ID NO: 5310159 - DNA, 25 bp, Homo sapien
gaataacctgtcagtttagtgtgtg

SEQ ID NO: 5310160 - DNA, 25 bp, Homo sapien
ccattttccattacaaaggtcttgt

SEQ ID NO: 5310161 - DNA, 25 bp, Homo sapien
taaaatggattagacaggaaccacc

SEQ ID NO: 5310162 - DNA, 25 bp, Homo sapien
tctctcccatctagaaaagaataac

SEQ ID NO: 5310163 - DNA, 25 bp, Homo sapien
aagacataagaaagtagatacagca

SEQ ID NO: 5310164 - DNA, 25 bp, Homo sapien
caagacataagaaagtagatacagc

SEQ ID NO: 5310165 - DNA, 25 bp, Homo sapien
acaagacataagaaagtagatacag

SEQ ID NO: 5310166 - DNA, 25 bp, Homo sapien
gaatgaagacacttaggataattga

SEQ ID NO: 5310167 - DNA, 25 bp, Homo sapien
ggtatacagtagtctcttgatatcg

SEQ ID NO: 5310168 - DNA, 25 bp, Homo sapien
tgtcaagtgtgtttccaatattgag

SEQ ID NO: 5310169 - DNA, 25 bp, Homo sapien
tatgcataaaagatgggtatacagt

SEQ ID NO: 5310170 - DNA, 25 bp, Homo sapien
gcctgcagaagtgccacgggcatga

SEQ ID NO: 5310171 - DNA, 25 bp, Homo sapien
tctcaacagatagcccttcagcgat

SEQ ID NO: 5310172 - DNA, 25 bp, Homo sapien
ttctgagccaccctcggaatcgcag

SEQ ID NO: 5310173 - DNA, 25 bp, Homo sapien
gatgtaatacagtgagcaggaccca

SEQ ID NO: 5310174 - DNA, 25 bp, Homo sapien
tcttccgagcggcacccagaggagc

SEQ ID NO: 5310175 - DNA, 25 bp, Homo sapien
ggctcttccgagcggcacccagagg

SEQ ID NO: 5310176 - DNA, 25 bp, Homo sapien
tcagggctgcttcggcaattcgcgg

SEQ ID NO: 5310177 - DNA, 25 bp, Homo sapien
gtccatcagggcacgccggaagagt

SEQ ID NO: 5310178 - DNA, 25 bp, Homo sapien
cagaggcgaaaactcggatccgaaa

SEQ ID NO: 5310179 - DNA, 25 bp, Homo sapien
tagcttgcacctcgtgaggcgagac

SEQ ID NO: 5310180 - DNA, 25 bp, Homo sapien
ggaagcggggaactactgcctccta

SEQ ID NO: 5310181 - DNA, 25 bp, Homo sapien
ctctccctcccgcggaagggaagcg

SEQ ID NO: 5310182 - DNA, 25 bp, Homo sapien
tactgcctcctaccatcaggtacga

SEQ ID NO: 5310183 - DNA, 25 bp, Homo sapien
tcctaccatcaggtacgacgggcgg

SEQ ID NO: 5310184 - DNA, 25 bp, Homo sapien
taaataatttatctgagagcaggaa

SEQ ID NO: 5310185 - DNA, 25 bp, Homo sapien
ttccctatttccaactgcagtatgt

SEQ ID NO: 5310186 - DNA, 25 bp, Homo sapien
ttaaaacctgcagcctaccgtggga

SEQ ID NO: 5310187 - DNA, 25 bp, Homo sapien
tgccttcagaggttcaggacttctg

SEQ ID NO: 5310188 - DNA, 25 bp, Homo sapien
tgagtagcctccttccatgaatgga

SEQ ID NO: 5310189 - DNA, 25 bp, Homo sapien
gccttatgccacagccagagttgaa

SEQ ID NO: 5310190 - DNA, 25 bp, Homo sapien
gaatggatcatccagtggccgcact

SEQ ID NO: 5310191 - DNA, 25 bp, Homo sapien
ggccgcacttaggttctcctatgaa

SEQ ID NO: 5310192 - DNA, 25 bp, Homo sapien
aatctgttaagatatcagattgtaa

SEQ ID NO: 5310193 - DNA, 25 bp, Homo sapien
aagaatctgttaagatatcagattg

SEQ ID NO: 5310194 - DNA, 25 bp, Homo sapien
gaatctgttaagatatcagattgta

SEQ ID NO: 5310195 - DNA, 25 bp, Homo sapien
agaatctgttaagatatcagattgt

SEQ ID NO: 5310196 - DNA, 25 bp, Homo sapien
aaaagccaactgtagtggcttacac

SEQ ID NO: 5310197 - DNA, 25 bp, Homo sapien
aggagaccaattcaaaagcaatgat

SEQ ID NO: 5310198 - DNA, 25 bp, Homo sapien
ctaggaattcaaggtggcagtaagc

SEQ ID NO: 5310199 - DNA, 25 bp, Homo sapien
tgaaagaatagtaactaaagggaga

SEQ ID NO: 5310200 - DNA, 25 bp, Homo sapien
gaatataggctcttcgaaggcagct

SEQ ID NO: 5310201 - DNA, 25 bp, Homo sapien
tataggctcttcgaaggcagctgcc

SEQ ID NO: 5310202 - DNA, 25 bp, Homo sapien
aatataggctcttcgaaggcagctg

SEQ ID NO: 5310203 - DNA, 25 bp, Homo sapien
ggaatataggctcttcgaaggcagc

SEQ ID NO: 5310204 - DNA, 25 bp, Homo sapien
gagatttacctccaatggtaaggag

SEQ ID NO: 5310205 - DNA, 25 bp, Homo sapien
tggctgttgccttcctcaaatcact

SEQ ID NO: 5310206 - DNA, 25 bp, Homo sapien
tagacggctgcattggacagtacct

SEQ ID NO: 5310207 - DNA, 25 bp, Homo sapien
tgtggcaggtggaacccaacaagga

SEQ ID NO: 5310208 - DNA, 25 bp, Homo sapien
aacattttccttgcggatcttgttt

SEQ ID NO: 5310209 - DNA, 25 bp, Homo sapien
actcctcaaactgggcttttgaaca

SEQ ID NO: 5310210 - DNA, 25 bp, Homo sapien
attttccttgcggatcttgtttatt

SEQ ID NO: 5310211 - DNA, 25 bp, Homo sapien
ttccttgcggatcttgtttatttgg

SEQ ID NO: 5310212 - DNA, 25 bp, Homo sapien
tctctgtcgatatgggaggtggtca

SEQ ID NO: 5310213 - DNA, 25 bp, Homo sapien
aggtctctgtcgatatgggaggtgg

SEQ ID NO: 5310214 - DNA, 25 bp, Homo sapien
ctctgtcgatatgggaggtggtcat

SEQ ID NO: 5310215 - DNA, 25 bp, Homo sapien
ttgcaggtctctgtcgatatgggag

SEQ ID NO: 5310216 - DNA, 25 bp, Homo sapien
ggagacaaagggttggctcaattgt

SEQ ID NO: 5310217 - DNA, 25 bp, Homo sapien
aggagacaaagggttggctcaattg

SEQ ID NO: 5310218 - DNA, 25 bp, Homo sapien
gaaggagacaaagggttggctcaat

SEQ ID NO: 5310219 - DNA, 25 bp, Homo sapien
gagacaaagggttggctcaattgtt

SEQ ID NO: 5310220 - DNA, 25 bp, Homo sapien
aggcacacccgtgctgccctgatgg

SEQ ID NO: 5310221 - DNA, 25 bp, Homo sapien
tgtgatggaggcacacccgtgctgc

SEQ ID NO: 5310222 - DNA, 25 bp, Homo sapien
ctggcactgtagatgagttccagat

SEQ ID NO: 5310223 - DNA, 25 bp, Homo sapien
ctgtagatgagttccagataggtta

SEQ ID NO: 5310224 - DNA, 25 bp, Homo sapien
tgctttgcatcggcaacctgtgcct

SEQ ID NO: 5310225 - DNA, 25 bp, Homo sapien
gctttgcatcggcaacctgtgcctg

SEQ ID NO: 5310226 - DNA, 25 bp, Homo sapien
cctgctttgcatcggcaacctgtgc

SEQ ID NO: 5310227 - DNA, 25 bp, Homo sapien
ttcctgctttgcatcggcaacctgt

SEQ ID NO: 5310228 - DNA, 25 bp, Homo sapien
tggtttctccccaggtaccatgatg

SEQ ID NO: 5310229 - DNA, 25 bp, Homo sapien
ggaggtttctgctgtctgataacat

SEQ ID NO: 5310230 - DNA, 25 bp, Homo sapien
ggctcaaggaattcttccatccagt

SEQ ID NO: 5310231 - DNA, 25 bp, Homo sapien
gtctcctacttccaggaggcttcct

SEQ ID NO: 5310232 - DNA, 25 bp, Homo sapien
gttggttactgctattgtcacattc

SEQ ID NO: 5310233 - DNA, 25 bp, Homo sapien
gggtgttggttactgctattgtcac

SEQ ID NO: 5310234 - DNA, 25 bp, Homo sapien
ttggttactgctattgtcacattct

SEQ ID NO: 5310235 - DNA, 25 bp, Homo sapien
gtgttggttactgctattgtcacat

SEQ ID NO: 5310236 - DNA, 25 bp, Homo sapien
gactcccgtgtatgaagtgcagctg

SEQ ID NO: 5310237 - DNA, 25 bp, Homo sapien
gcaattcaatttaaacgcggagccc

SEQ ID NO: 5310238 - DNA, 25 bp, Homo sapien
gaagcactaggtcatctggaggccc

SEQ ID NO: 5310239 - DNA, 25 bp, Homo sapien
tggccggcaaagtaaacccatggtg

SEQ ID NO: 5310240 - DNA, 25 bp, Homo sapien
cgcgagccccgtgcagaccacgccg

SEQ ID NO: 5310241 - DNA, 25 bp, Homo sapien
tggccgggaaaaggactgctagccc

SEQ ID NO: 5310242 - DNA, 25 bp, Homo sapien
tgggctggccgggaaaaggactgct

SEQ ID NO: 5310243 - DNA, 25 bp, Homo sapien
aaaggactgctagcccgggccgcga

SEQ ID NO: 5310244 - DNA, 25 bp, Homo sapien
tgggagcttgcgcttagtaggctct

SEQ ID NO: 5310245 - DNA, 25 bp, Homo sapien
ttagtaggctctcgatgcatttctg

SEQ ID NO: 5310246 - DNA, 25 bp, Homo sapien
ggctctcgatgcatttctgtggaat

SEQ ID NO: 5310247 - DNA, 25 bp, Homo sapien
gcgcttagtaggctctcgatgcatt

SEQ ID NO: 5310248 - DNA, 25 bp, Homo sapien
cagtaggagggcatccgtgatcggg

SEQ ID NO: 5310249 - DNA, 25 bp, Homo sapien
tcgtccggggccagtaggagggcat

SEQ ID NO: 5310250 - DNA, 25 bp, Homo sapien
tgatcggggtcgtggtgggtcgcgg

SEQ ID NO: 5310251 - DNA, 25 bp, Homo sapien
gcggggaggccaccggagactgaag

SEQ ID NO: 5310252 - DNA, 25 bp, Homo sapien
tttgcgagtactacagtatcatagc

SEQ ID NO: 5310253 - DNA, 25 bp, Homo sapien
gagtactacagtatcatagcctttc

SEQ ID NO: 5310254 - DNA, 25 bp, Homo sapien
cagtatcatagcctttctctattac

SEQ ID NO: 5310255 - DNA, 25 bp, Homo sapien
tttgtttttgcgagtactacagtat

SEQ ID NO: 5310256 - DNA, 25 bp, Homo sapien
tcggaagaggatacaaccaccctgt

SEQ ID NO: 5310257 - DNA, 25 bp, Homo sapien
taggaagtcgctctctaagacagag

SEQ ID NO: 5310258 - DNA, 25 bp, Homo sapien
gacagttctgcaattccacaagcta

SEQ ID NO: 5310259 - DNA, 25 bp, Homo sapien
caagctaattgtgactcggaagagg

SEQ ID NO: 5310260 - DNA, 25 bp, Homo sapien
tcttttcgttaatgtgctctgtacc

SEQ ID NO: 5310261 - DNA, 25 bp, Homo sapien
tagacattttgcactaaagtagccg

SEQ ID NO: 5310262 - DNA, 25 bp, Homo sapien
gagcgcttttggaagttatatcaag

SEQ ID NO: 5310263 - DNA, 25 bp, Homo sapien
tatgtactactacttgagtgagcgc

SEQ ID NO: 5310264 - DNA, 25 bp, Homo sapien
gaagcaggttaaatgaagtcttgtg

SEQ ID NO: 5310265 - DNA, 25 bp, Homo sapien
ttatagtaaatgagtatctgtaacc

SEQ ID NO: 5310266 - DNA, 25 bp, Homo sapien
gtgaatttgtaatagatcagtacca

SEQ ID NO: 5310267 - DNA, 25 bp, Homo sapien
ctcccactgcatcagaagcaggtta

SEQ ID NO: 5310268 - DNA, 25 bp, Homo sapien
caagggtgagaaagtttcgaaagag

SEQ ID NO: 5310269 - DNA, 25 bp, Homo sapien
agtttcgaaagagggcaatgctgct

SEQ ID NO: 5310270 - DNA, 25 bp, Homo sapien
caagggctgactcaagggtgagaaa

SEQ ID NO: 5310271 - DNA, 25 bp, Homo sapien
ttttactttgatgaaattagataga

SEQ ID NO: 5310272 - DNA, 25 bp, Homo sapien
ccttcctggcaaggctagctgtgga

SEQ ID NO: 5310273 - DNA, 25 bp, Homo sapien
tttgcttgttgctccccaggggtgg

SEQ ID NO: 5310274 - DNA, 25 bp, Homo sapien
gttgggtggccatgtcagattcagt

SEQ ID NO: 5310275 - DNA, 25 bp, Homo sapien
cagattcagttctggcaggatgctg

SEQ ID NO: 5310276 - DNA, 25 bp, Homo sapien
aacaattctcttcatgcccgttgca

SEQ ID NO: 5310277 - DNA, 25 bp, Homo sapien
ttcatgcccgttgcagctgccgtgc

SEQ ID NO: 5310278 - DNA, 25 bp, Homo sapien
tgccgtgccatagttgctgttagcc

SEQ ID NO: 5310279 - DNA, 25 bp, Homo sapien
agctgccgtgccatagttgctgtta

SEQ ID NO: 5310280 - DNA, 25 bp, Homo sapien
aggtctttgaggttaaagagctgct

SEQ ID NO: 5310281 - DNA, 25 bp, Homo sapien
agctgctgaaatgcagtagtgttgc

SEQ ID NO: 5310282 - DNA, 25 bp, Homo sapien
tctttgaggttaaagagctgctgaa

SEQ ID NO: 5310283 - DNA, 25 bp, Homo sapien
gagctgctgaaatgcagtagtgttg

SEQ ID NO: 5310284 - DNA, 25 bp, Homo sapien
catttcactatggtctcagtttgca

SEQ ID NO: 5310285 - DNA, 25 bp, Homo sapien
tcactatggtctcagtttgcaatgg

SEQ ID NO: 5310286 - DNA, 25 bp, Homo sapien
tatggtctcagtttgcaatgggagg

SEQ ID NO: 5310287 - DNA, 25 bp, Homo sapien
ccatttcactatggtctcagtttgc

SEQ ID NO: 5310288 - DNA, 25 bp, Homo sapien
catattcactaacaaagctgggtcc

SEQ ID NO: 5310289 - DNA, 25 bp, Homo sapien
tctcagctgagccgagtttcctcca

SEQ ID NO: 5310290 - DNA, 25 bp, Homo sapien
caaagctgggtccttggacgttgtt

SEQ ID NO: 5310291 - DNA, 25 bp, Homo sapien
ggtccttggacgttgttatgagcac

SEQ ID NO: 5310292 - DNA, 25 bp, Homo sapien
gaggccaggcgatgtcctccagtgt

SEQ ID NO: 5310293 - DNA, 25 bp, Homo sapien
atggccagaaccacacgctgcaggt

SEQ ID NO: 5310294 - DNA, 25 bp, Homo sapien
tgtccccgtggccagtcatcggctg

SEQ ID NO: 5310295 - DNA, 25 bp, Homo sapien
cattggttcgtgtgaagaggcttct

SEQ ID NO: 5310296 - DNA, 25 bp, Homo sapien
cactgctcccctctaatatttagga

SEQ ID NO: 5310297 - DNA, 25 bp, Homo sapien
tccccgcttgcttgtggcactgctc

SEQ ID NO: 5310298 - DNA, 25 bp, Homo sapien
atatttaggaagagagtttcagcac

SEQ ID NO: 5310299 - DNA, 25 bp, Homo sapien
gaatctccagcatgagctgtgtggc

SEQ ID NO: 5310300 - DNA, 25 bp, Homo sapien
ctgagcacaggccactaaggaaaga

SEQ ID NO: 5310301 - DNA, 25 bp, Homo sapien
gctgagcacaggccactaaggaaag

SEQ ID NO: 5310302 - DNA, 25 bp, Homo sapien
tgagcacaggccactaaggaaagaa

SEQ ID NO: 5310303 - DNA, 25 bp, Homo sapien
ctgggttcccgtggcattgcctgga

SEQ ID NO: 5310304 - DNA, 25 bp, Homo sapien
cctatcagagtcttgcacagcccag

SEQ ID NO: 5310305 - DNA, 25 bp, Homo sapien
tgctgaatccccgtgtggcaggtga

SEQ ID NO: 5310306 - DNA, 25 bp, Homo sapien
tgactgctatgatgggatggcccca

SEQ ID NO: 5310307 - DNA, 25 bp, Homo sapien
tttctggggcgctgtgccaggagct

SEQ ID NO: 5310308 - DNA, 25 bp, Homo sapien
cttgctttctggggcgctgtgccag

SEQ ID NO: 5310309 - DNA, 25 bp, Homo sapien
tgtgccaggagctgtcgctggagcc

SEQ ID NO: 5310310 - DNA, 25 bp, Homo sapien
gccaggagctgtcgctggagcccat

SEQ ID NO: 5310311 - DNA, 25 bp, Homo sapien
tcctggaacactagaccacccagaa

SEQ ID NO: 5310312 - DNA, 25 bp, Homo sapien
tatctgtcctggaacactagaccac

SEQ ID NO: 5310313 - DNA, 25 bp, Homo sapien
ggaacactagaccacccagaaacag

SEQ ID NO: 5310314 - DNA, 25 bp, Homo sapien
ttatatctgtcctggaacactagac

SEQ ID NO: 5310315 - DNA, 25 bp, Homo sapien
gctggccccaaacgggatttgggca

SEQ ID NO: 5310316 - DNA, 25 bp, Homo sapien
cgagtgttctccgtgtgagggccct

SEQ ID NO: 5310317 - DNA, 25 bp, Homo sapien
gggccctgccgttctgtttccagga

SEQ ID NO: 5310318 - DNA, 25 bp, Homo sapien
ccttccttctcgagtgttctccgtg

SEQ ID NO: 5310319 - DNA, 25 bp, Homo sapien
tgtcagctggtacctcggggtccta

SEQ ID NO: 5310320 - DNA, 25 bp, Homo sapien
tgagatcagccaccctgtcagctgg

SEQ ID NO: 5310321 - DNA, 25 bp, Homo sapien
tggccatactggacccatgagatca

SEQ ID NO: 5310322 - DNA, 25 bp, Homo sapien
agccctggtcctctaactcggaggt

SEQ ID NO: 5310323 - DNA, 25 bp, Homo sapien
tcaattcacgaaagtagtgtgaccc

SEQ ID NO: 5310324 - DNA, 25 bp, Homo sapien
aaagtagtgtgacccatctcccctt

SEQ ID NO: 5310325 - DNA, 25 bp, Homo sapien
atgtgctgtcgcctctgctgccctc

SEQ ID NO: 5310326 - DNA, 25 bp, Homo sapien
tttgcatgtgctgtcgcctctgctg

SEQ ID NO: 5310327 - DNA, 25 bp, Homo sapien
gggctggagggctgttcctggtaga

SEQ ID NO: 5310328 - DNA, 25 bp, Homo sapien
gctggagggctgttcctggtagaaa

SEQ ID NO: 5310329 - DNA, 25 bp, Homo sapien
tggagggctgttcctggtagaaagg

SEQ ID NO: 5310330 - DNA, 25 bp, Homo sapien
tcactccctggttttggggctggag

SEQ ID NO: 5310331 - DNA, 25 bp, Homo sapien
cctgggacagtgatagttgcagttc

SEQ ID NO: 5310332 - DNA, 25 bp, Homo sapien
gctactcccgtgcttgccttcctgg

SEQ ID NO: 5310333 - DNA, 25 bp, Homo sapien
cagttcctgctgacttggagtgccc

SEQ ID NO: 5310334 - DNA, 25 bp, Homo sapien
tgctgacttggagtgcccctccgct

SEQ ID NO: 5310335 - DNA, 25 bp, Homo sapien
ggagtccaaggccataccgtctgca

SEQ ID NO: 5310336 - DNA, 25 bp, Homo sapien
ttggcctgagcccagccgtactgcg

SEQ ID NO: 5310337 - DNA, 25 bp, Homo sapien
tgagccagcacctcgcatatgatta

SEQ ID NO: 5310338 - DNA, 25 bp, Homo sapien
attacaattaccgtgagtttggcct

SEQ ID NO: 5310339 - DNA, 25 bp, Homo sapien
ttttctatgactaaccggctggcgg

SEQ ID NO: 5310340 - DNA, 25 bp, Homo sapien
aaaacatctgtctctcggctctgcc

SEQ ID NO: 5310341 - DNA, 25 bp, Homo sapien
cagtcccatcgctggagttaaagtc

SEQ ID NO: 5310342 - DNA, 25 bp, Homo sapien
tagtctttaaaacctgtgctgcccc

SEQ ID NO: 5310343 - DNA, 25 bp, Homo sapien
cagacatgtattgtcccgcagttct

SEQ ID NO: 5310344 - DNA, 25 bp, Homo sapien
taagtatattgcttcctagggctgc

SEQ ID NO: 5310345 - DNA, 25 bp, Homo sapien
gaaatcacggtgtcaacagagccat

SEQ ID NO: 5310346 - DNA, 25 bp, Homo sapien
tccagggaacgtgaaagcaaagtaa

SEQ ID NO: 5310347 - DNA, 25 bp, Homo sapien
tcctgttcctgtcggctgttttctt

SEQ ID NO: 5310348 - DNA, 25 bp, Homo sapien
caagatcctgttcctgtcggctgtt

SEQ ID NO: 5310349 - DNA, 25 bp, Homo sapien
gatcctgttcctgtcggctgttttc

SEQ ID NO: 5310350 - DNA, 25 bp, Homo sapien
aagatcctgttcctgtcggctgttt

SEQ ID NO: 5310351 - DNA, 25 bp, Homo sapien
agatcggggtgtttcatgcatgggc

SEQ ID NO: 5310352 - DNA, 25 bp, Homo sapien
aagatcggggtgtttcatgcatggg

SEQ ID NO: 5310353 - DNA, 25 bp, Homo sapien
gatcggggtgtttcatgcatgggca

SEQ ID NO: 5310354 - DNA, 25 bp, Homo sapien
tgcaagcccactcccgttcagacag

SEQ ID NO: 5310355 - DNA, 25 bp, Homo sapien
ggccacctgggccacgaaggcccac

SEQ ID NO: 5310356 - DNA, 25 bp, Homo sapien
tcagacagcgtgaacctgagtcttt

SEQ ID NO: 5310357 - DNA, 25 bp, Homo sapien
gaaggcccacacatcgaggcacctg

SEQ ID NO: 5310358 - DNA, 25 bp, Homo sapien
tcaggccttcggtctttagggtgag

SEQ ID NO: 5310359 - DNA, 25 bp, Homo sapien
ttagggtgaggatgtgatagccaag

SEQ ID NO: 5310360 - DNA, 25 bp, Homo sapien
gccaaagtccagctggccgggggga

SEQ ID NO: 5310361 - DNA, 25 bp, Homo sapien
gatgtgatagccaaggccaaagtcc

SEQ ID NO: 5310362 - DNA, 25 bp, Homo sapien
ttcccactgtgcagatgtgtgaggc

SEQ ID NO: 5310363 - DNA, 25 bp, Homo sapien
tgctgtcgttgtgcctcatgacatt

SEQ ID NO: 5310364 - DNA, 25 bp, Homo sapien
tgacatttaccgactccttcggaag

SEQ ID NO: 5310365 - DNA, 25 bp, Homo sapien
gattcctacctcgtagctcctcaga

SEQ ID NO: 5310366 - DNA, 25 bp, Homo sapien
gagcagtagacctggcctggaccaa

SEQ ID NO: 5310367 - DNA, 25 bp, Homo sapien
ccaactccagatgctcgtaggtgca

SEQ ID NO: 5310368 - DNA, 25 bp, Homo sapien
taggtgtctgtactgcattggagca

SEQ ID NO: 5310369 - DNA, 25 bp, Homo sapien
tcgtttgtcagcaattggccgtttt

SEQ ID NO: 5310370 - DNA, 25 bp, Homo sapien
cccacaggctacaagaataggcact

SEQ ID NO: 5310371 - DNA, 25 bp, Homo sapien
ttcccgtcccgtgacctgctccagg

SEQ ID NO: 5310372 - DNA, 25 bp, Homo sapien
tgggttcccattaacccacaggcta

SEQ ID NO: 5310373 - DNA, 25 bp, Homo sapien
gaccccaaggctgggctgttgacga

SEQ ID NO: 5310374 - DNA, 25 bp, Homo sapien
tttaactacagacacctgagacccc

SEQ ID NO: 5310375 - DNA, 25 bp, Homo sapien
cccaggaatttaactacagacacct

SEQ ID NO: 5310376 - DNA, 25 bp, Homo sapien
tgttcccttctcataccggccagag

SEQ ID NO: 5310377 - DNA, 25 bp, Homo sapien
ttgttcccttctcataccggccaga

SEQ ID NO: 5310378 - DNA, 25 bp, Homo sapien
ggacttctcattactgctaggcagg

SEQ ID NO: 5310379 - DNA, 25 bp, Homo sapien
taaaggaggtgtgccactgtatcac

SEQ ID NO: 5310380 - DNA, 25 bp, Homo sapien
tatcactgacaggtgtccaggctcc

SEQ ID NO: 5310381 - DNA, 25 bp, Homo sapien
gtattctaggacacccctctggcag

SEQ ID NO: 5310382 - DNA, 25 bp, Homo sapien
gagcagggtatagccgaagatagtc

SEQ ID NO: 5310383 - DNA, 25 bp, Homo sapien
tatagccgaagatagtcacaggaac

SEQ ID NO: 5310384 - DNA, 25 bp, Homo sapien
caggaactatgataagagcaggcac

SEQ ID NO: 5310385 - DNA, 25 bp, Homo sapien
ttgtagtaaacacaccctgcatgtg

SEQ ID NO: 5310386 - DNA, 25 bp, Homo sapien
gctctgactgcacaaatacttgaca

SEQ ID NO: 5310387 - DNA, 25 bp, Homo sapien
gaatagtttacaagtcagctctgac

SEQ ID NO: 5310388 - DNA, 25 bp, Homo sapien
taagtctgtatacatcctacgacaa

SEQ ID NO: 5310389 - DNA, 25 bp, Homo sapien
tacagaacgtccatcacatccaata

SEQ ID NO: 5310390 - DNA, 25 bp, Homo sapien
tgaacaacagccgtgaaagcagcca

SEQ ID NO: 5310391 - DNA, 25 bp, Homo sapien
cagactctgtggctaggctgacatt

SEQ ID NO: 5310392 - DNA, 25 bp, Homo sapien
tagactctgtggctaggctgaactc

SEQ ID NO: 5310393 - DNA, 25 bp, Homo sapien
taataaatatccacttgcccagagc

SEQ ID NO: 5310394 - DNA, 25 bp, Homo sapien
tgttcaatcacattatcacgggtca

SEQ ID NO: 5310395 - DNA, 25 bp, Homo sapien
cacttagggactattagatgtccca

SEQ ID NO: 5310396 - DNA, 25 bp, Homo sapien
tctcaccccagtgtaacgaatcgct

SEQ ID NO: 5310397 - DNA, 25 bp, Homo sapien
aggtatttaatagcacttagggact

SEQ ID NO: 5310398 - DNA, 25 bp, Homo sapien
cttcactcattagtggtgcctgttc

SEQ ID NO: 5310399 - DNA, 25 bp, Homo sapien
ttcagcatagtcaatgtatccatca

SEQ ID NO: 5310400 - DNA, 25 bp, Homo sapien
gcatagtcaatgtatccatcattgt

SEQ ID NO: 5310401 - DNA, 25 bp, Homo sapien
tcactcattagtggtgcctgttcac

SEQ ID NO: 5310402 - DNA, 25 bp, Homo sapien
ttaattggaaaagtgccagtcctcc

SEQ ID NO: 5310403 - DNA, 25 bp, Homo sapien
tgccagttaaaagaaggcccttcaa

SEQ ID NO: 5310404 - DNA, 25 bp, Homo sapien
cattcttctttaattggaaaagtgc

SEQ ID NO: 5310405 - DNA, 25 bp, Homo sapien
ttgccagttaaaagaaggcccttca

SEQ ID NO: 5310406 - DNA, 25 bp, Homo sapien
aaggacaacacaagtcaacaagact

SEQ ID NO: 5310407 - DNA, 25 bp, Homo sapien
tgagtacgtagaactacgggcatgc

SEQ ID NO: 5310408 - DNA, 25 bp, Homo sapien
gagaagcagcactcttggcacataa

SEQ ID NO: 5310409 - DNA, 25 bp, Homo sapien
tttctgtgatacagtcccccaagcc

SEQ ID NO: 5310410 - DNA, 25 bp, Homo sapien
ggtttgttgatgacaccttctagat

SEQ ID NO: 5310411 - DNA, 25 bp, Homo sapien
gagttctaagccatcaagcaaatta

SEQ ID NO: 5310412 - DNA, 25 bp, Homo sapien
ttgttgatgacaccttctagatgct

SEQ ID NO: 5310413 - DNA, 25 bp, Homo sapien
agagttctaagccatcaagcaaatt

SEQ ID NO: 5310414 - DNA, 25 bp, Homo sapien
cattttcaggccatcaatttaaaaa

SEQ ID NO: 5310415 - DNA, 25 bp, Homo sapien
ttatgctggcaggattagggtattc

SEQ ID NO: 5310416 - DNA, 25 bp, Homo sapien
tttgttataacattttcaggccatc

SEQ ID NO: 5310417 - DNA, 25 bp, Homo sapien
ggaccataggcatgtactgccacat

SEQ ID NO: 5310418 - DNA, 25 bp, Homo sapien
tccacctgtgatacaatgatgaaaa

SEQ ID NO: 5310419 - DNA, 25 bp, Homo sapien
aaagaatacctgacttataggtggc

SEQ ID NO: 5310420 - DNA, 25 bp, Homo sapien
tgagcatgcccttgccgctggctca

SEQ ID NO: 5310421 - DNA, 25 bp, Homo sapien
ggagagaccggattcagacaagtaa

SEQ ID NO: 5310422 - DNA, 25 bp, Homo sapien
tcttggtcgtgcactgtgttcttat

SEQ ID NO: 5310423 - DNA, 25 bp, Homo sapien
tggtcgtgcactgtgttcttatcca

SEQ ID NO: 5310424 - DNA, 25 bp, Homo sapien
cactgtgttcttatccaggcccatg

SEQ ID NO: 5310425 - DNA, 25 bp, Homo sapien
ggtcgtgcactgtgttcttatccag

SEQ ID NO: 5310426 - DNA, 25 bp, Homo sapien
agccctggcgcctggggcacaaaag

SEQ ID NO: 5310427 - DNA, 25 bp, Homo sapien
tcagcctagacaacacagtcagacc

SEQ ID NO: 5310428 - DNA, 25 bp, Homo sapien
tagacaacacagtcagacccccatc

SEQ ID NO: 5310429 - DNA, 25 bp, Homo sapien
cctagacaacacagtcagaccccca

SEQ ID NO: 5310430 - DNA, 25 bp, Homo sapien
gatcagcctagacaacacagtcaga

SEQ ID NO: 5310431 - DNA, 25 bp, Homo sapien
tccacattcccagtatcaggcacag

SEQ ID NO: 5310432 - DNA, 25 bp, Homo sapien
tgggataaaggccaagaatcactga

SEQ ID NO: 5310433 - DNA, 25 bp, Homo sapien
tgctggttcttagcctgtgtgccat

SEQ ID NO: 5310434 - DNA, 25 bp, Homo sapien
gattaccacctttgcagatatgctg

SEQ ID NO: 5310435 - DNA, 25 bp, Homo sapien
caggattcttccagccaagaccaat

SEQ ID NO: 5310436 - DNA, 25 bp, Homo sapien
aattgctctctcatccgacctcagt

SEQ ID NO: 5310437 - DNA, 25 bp, Homo sapien
acagcctccgctcctactggttcca

SEQ ID NO: 5310438 - DNA, 25 bp, Homo sapien
gctcctactggttccatctgtccat

SEQ ID NO: 5310439 - DNA, 25 bp, Homo sapien
tctcatttaccttactgatctctgc

SEQ ID NO: 5310440 - DNA, 25 bp, Homo sapien
ctctgagagtcaggaccctctctcc

SEQ ID NO: 5310441 - DNA, 25 bp, Homo sapien
ctcatttaccttactgatctctgct

SEQ ID NO: 5310442 - DNA, 25 bp, Homo sapien
tatttgttcatctagggagcccaag

SEQ ID NO: 5310443 - DNA, 25 bp, Homo sapien
cctggtagaaaagagagaccggcag

SEQ ID NO: 5310444 - DNA, 25 bp, Homo sapien
catactgaaggaacatgtaagccca

SEQ ID NO: 5310445 - DNA, 25 bp, Homo sapien
tgcctcagacatagcgaacatactg

SEQ ID NO: 5310446 - DNA, 25 bp, Homo sapien
cttacggtctccgaagcagacgcga

SEQ ID NO: 5310447 - DNA, 25 bp, Homo sapien
gtctccgaagcagacgcgaagccct

SEQ ID NO: 5310448 - DNA, 25 bp, Homo sapien
agcagacgcgaagccctccaacgtg

SEQ ID NO: 5310449 - DNA, 25 bp, Homo sapien
agccctccaacgtgagcctcaccag

SEQ ID NO: 5310450 - DNA, 25 bp, Homo sapien
gacactcggctccactccagttggg

SEQ ID NO: 5310451 - DNA, 25 bp, Homo sapien
tccactccagttgggccgctggacg

SEQ ID NO: 5310452 - DNA, 25 bp, Homo sapien
cagttgctaggcaacgccggaagcc

SEQ ID NO: 5310453 - DNA, 25 bp, Homo sapien
gaagccctcaggaacgtagttccac

SEQ ID NO: 5310454 - DNA, 25 bp, Homo sapien
tctagtcctgcaatagtgtctactc

SEQ ID NO: 5310455 - DNA, 25 bp, Homo sapien
tctgaagttcttgtgctctagtcct

SEQ ID NO: 5310456 - DNA, 25 bp, Homo sapien
gcactgtcacaggatacattataca

SEQ ID NO: 5310457 - DNA, 25 bp, Homo sapien
gtctcttgtcaaagcataactcaaa

SEQ ID NO: 5310458 - DNA, 25 bp, Homo sapien
tcagaaaccgcaggttgagggttca

SEQ ID NO: 5310459 - DNA, 25 bp, Homo sapien
gaatagcttttagatggatttccca

SEQ ID NO: 5310460 - DNA, 25 bp, Homo sapien
tccaaggcccctaaaacatctgact

SEQ ID NO: 5310461 - DNA, 25 bp, Homo sapien
cccacactggaggaagcacatcaat

SEQ ID NO: 5310462 - DNA, 25 bp, Homo sapien
ctctcatggttctgtcttaatatca

SEQ ID NO: 5310463 - DNA, 25 bp, Homo sapien
ggttctgtcttaatatcaacctgtc

SEQ ID NO: 5310464 - DNA, 25 bp, Homo sapien
tgtctatggcttcctcgggccagac

SEQ ID NO: 5310465 - DNA, 25 bp, Homo sapien
taatatcaacctgtctatggcttcc

SEQ ID NO: 5310466 - DNA, 25 bp, Homo sapien
tgaaggtggagagcgagctggagcg

SEQ ID NO: 5310467 - DNA, 25 bp, Homo sapien
ccactgggaccgcatgccggagctg

SEQ ID NO: 5310468 - DNA, 25 bp, Homo sapien
gctgccgcgccgagggccactggga

SEQ ID NO: 5310469 - DNA, 25 bp, Homo sapien
ggcggaggtaacaggcgaggcagcc

SEQ ID NO: 5310470 - DNA, 25 bp, Homo sapien
aggcgctggtaacatgtccttgtca

SEQ ID NO: 5310471 - DNA, 25 bp, Homo sapien
tgagcaaggtctgaggcaaacaagg

SEQ ID NO: 5310472 - DNA, 25 bp, Homo sapien
ccaaggtaactttggggcaggcgct

SEQ ID NO: 5310473 - DNA, 25 bp, Homo sapien
gagctgtcggcatgtgcttgagcat

SEQ ID NO: 5310474 - DNA, 25 bp, Homo sapien
ctctgtagtaataagcctttgggca

SEQ ID NO: 5310475 - DNA, 25 bp, Homo sapien
tgggcaattgccattgcatcatctt

SEQ ID NO: 5310476 - DNA, 25 bp, Homo sapien
tagtaataagcctttgggcaattgc

SEQ ID NO: 5310477 - DNA, 25 bp, Homo sapien
taagcctttgggcaattgccattgc

SEQ ID NO: 5310478 - DNA, 25 bp, Homo sapien
ttcatcttccgtgggtgctgcagct

SEQ ID NO: 5310479 - DNA, 25 bp, Homo sapien
tccccccgagagctgaatgaattgc

SEQ ID NO: 5310480 - DNA, 25 bp, Homo sapien
gcattttttcgcttcttcccgtggc

SEQ ID NO: 5310481 - DNA, 25 bp, Homo sapien
gtacccaagtctgggattcatcttc

SEQ ID NO: 5310482 - DNA, 25 bp, Homo sapien
agactgaaggagttgggaccagcct

SEQ ID NO: 5310483 - DNA, 25 bp, Homo sapien
aatcgaaagttctgagttaatgaaa

SEQ ID NO: 5310484 - DNA, 25 bp, Homo sapien
agtcctcctcttgcaagggaccttt

SEQ ID NO: 5310485 - DNA, 25 bp, Homo sapien
caggatcagcttggctccaaatcga

SEQ ID NO: 5310486 - DNA, 25 bp, Homo sapien
tgtgttgaaacagatccactccatg

SEQ ID NO: 5310487 - DNA, 25 bp, Homo sapien
tctccggggactacaaggcagctgt

SEQ ID NO: 5310488 - DNA, 25 bp, Homo sapien
tcagcacatctctccggggactaca

SEQ ID NO: 5310489 - DNA, 25 bp, Homo sapien
ccatgtcccctggaattggctgtgc

SEQ ID NO: 5310490 - DNA, 25 bp, Homo sapien
cctctgaacagttcgtaggttcgcc

SEQ ID NO: 5310491 - DNA, 25 bp, Homo sapien
ggccaggcctctgaacagttcgtag

SEQ ID NO: 5310492 - DNA, 25 bp, Homo sapien
tgaacagttcgtaggttcgccccac

SEQ ID NO: 5310493 - DNA, 25 bp, Homo sapien
caggcctctgaacagttcgtaggtt

SEQ ID NO: 5310494 - DNA, 25 bp, Homo sapien
cacctgggtctttgtgttgagcaag

SEQ ID NO: 5310495 - DNA, 25 bp, Homo sapien
ttcctgcaaggtggataggctgcat

SEQ ID NO: 5310496 - DNA, 25 bp, Homo sapien
ttggcagtcgttgacacccagtgtc

SEQ ID NO: 5310497 - DNA, 25 bp, Homo sapien
tctggcagtgagcaacgaggcctgc

SEQ ID NO: 5310498 - DNA, 25 bp, Homo sapien
cttttccatctagcaggtatccctg

SEQ ID NO: 5310499 - DNA, 25 bp, Homo sapien
ggtatccctgcccaatggagctgct

SEQ ID NO: 5310500 - DNA, 25 bp, Homo sapien
gcttatcagtaaccttgagcttgag

SEQ ID NO: 5310501 - DNA, 25 bp, Homo sapien
gactgttcgatgtggtgcccttgta

SEQ ID NO: 5310502 - DNA, 25 bp, Homo sapien
gcccggcagttgaagctggagatca

SEQ ID NO: 5310503 - DNA, 25 bp, Homo sapien
gcttggaccacttgtgccagagatg

SEQ ID NO: 5310504 - DNA, 25 bp, Homo sapien
gccagttgtgagctcccagggatga

SEQ ID NO: 5310505 - DNA, 25 bp, Homo sapien
gctgctgcttggagcgcccttgtct

SEQ ID NO: 5310506 - DNA, 25 bp, Homo sapien
tctgcattcgggcatctctgaatgg

SEQ ID NO: 5310507 - DNA, 25 bp, Homo sapien
cgtcagctcatctgcattcgggcat

SEQ ID NO: 5310508 - DNA, 25 bp, Homo sapien
actgacgtcagctcatctgcattcg

SEQ ID NO: 5310509 - DNA, 25 bp, Homo sapien
gctcatctgcattcgggcatctctg

SEQ ID NO: 5310510 - DNA, 25 bp, Homo sapien
ggttcgagctatggccaggaggagg

SEQ ID NO: 5310511 - DNA, 25 bp, Homo sapien
ctcccctcgtggagtgaccgtccca

SEQ ID NO: 5310512 - DNA, 25 bp, Homo sapien
cctcgtggagtgaccgtcccagagg

SEQ ID NO: 5310513 - DNA, 25 bp, Homo sapien
tgcggggttcgagctatggccagga

SEQ ID NO: 5310514 - DNA, 25 bp, Homo sapien
cagttcggccacctggttgccagaa

SEQ ID NO: 5310515 - DNA, 25 bp, Homo sapien
ctcttttgcatgaaacagctctagg

SEQ ID NO: 5310516 - DNA, 25 bp, Homo sapien
ttggagcctcgccccaggcagttcg

SEQ ID NO: 5310517 - DNA, 25 bp, Homo sapien
tccagactatgggggaggctccaga

SEQ ID NO: 5310518 - DNA, 25 bp, Homo sapien
agaggcagcaaaggcaccttagaaa

SEQ ID NO: 5310519 - DNA, 25 bp, Homo sapien
ttccagctggatgccgagttggaga

SEQ ID NO: 5310520 - DNA, 25 bp, Homo sapien
ctttccagctggatgccgagttgga

SEQ ID NO: 5310521 - DNA, 25 bp, Homo sapien
ggcaccttagaaagcccagcctgct

SEQ ID NO: 5310522 - DNA, 25 bp, Homo sapien
cagctgttgggatctgccaactagc

SEQ ID NO: 5310523 - DNA, 25 bp, Homo sapien
caactagctatgctcttctgggtct

SEQ ID NO: 5310524 - DNA, 25 bp, Homo sapien
ttgtcccctgattcacccgttcagc

SEQ ID NO: 5310525 - DNA, 25 bp, Homo sapien
ctgattcacccgttcagctgttggg

SEQ ID NO: 5310526 - DNA, 25 bp, Homo sapien
gaagggctccgcgaaacgtgtagca

SEQ ID NO: 5310527 - DNA, 25 bp, Homo sapien
tgcacggactgagtaaggtaaagga

SEQ ID NO: 5310528 - DNA, 25 bp, Homo sapien
gaaacgtgtagcactgcctgctgcc

SEQ ID NO: 5310529 - DNA, 25 bp, Homo sapien
tcattagaagctgcacggactgagt

SEQ ID NO: 5310530 - DNA, 25 bp, Homo sapien
gccagccgcttgcacatcccaccca

SEQ ID NO: 5310531 - DNA, 25 bp, Homo sapien
ttgccagccgcttgcacatcccacc

SEQ ID NO: 5310532 - DNA, 25 bp, Homo sapien
tgccagccgcttgcacatcccaccc

SEQ ID NO: 5310533 - DNA, 25 bp, Homo sapien
gtctttctgttcctggccaaccagg

SEQ ID NO: 5310534 - DNA, 25 bp, Homo sapien
ctgttcctggccaaccaggctttac

SEQ ID NO: 5310535 - DNA, 25 bp, Homo sapien
ctttctgttcctggccaaccaggct

SEQ ID NO: 5310536 - DNA, 25 bp, Homo sapien
tctgttcctggccaaccaggcttta

SEQ ID NO: 5310537 - DNA, 25 bp, Homo sapien
caaagagatctttcaagctggcctc

SEQ ID NO: 5310538 - DNA, 25 bp, Homo sapien
taaaagtgggcagctttgctcagaa

SEQ ID NO: 5310539 - DNA, 25 bp, Homo sapien
ccagcaatggctcggaaaagcccca

SEQ ID NO: 5310540 - DNA, 25 bp, Homo sapien
gattgctcaggctcatggccatctg

SEQ ID NO: 5310541 - DNA, 25 bp, Homo sapien
gccgctggtttgaacctccgggaga

SEQ ID NO: 5310542 - DNA, 25 bp, Homo sapien
taactaccctggaagggtgcggatg

SEQ ID NO: 5310543 - DNA, 25 bp, Homo sapien
cctggagcgagccatgaagtttgcg

SEQ ID NO: 5310544 - DNA, 25 bp, Homo sapien
tgcagcctcccaaaagcggtgactt

SEQ ID NO: 5310545 - DNA, 25 bp, Homo sapien
agtgtgccggtgtgctggtgtgagt

SEQ ID NO: 5310546 - DNA, 25 bp, Homo sapien
gtgagtgtgccggtgtgctggtgtg

SEQ ID NO: 5310547 - DNA, 25 bp, Homo sapien
tgccggtgtgctggtgtgagtctgt

SEQ ID NO: 5310548 - DNA, 25 bp, Homo sapien
ccggtgtgctggtgtgagtctgtgg

SEQ ID NO: 5310549 - DNA, 25 bp, Homo sapien
ctgcatgtggtggatatgaggtgca

SEQ ID NO: 5310550 - DNA, 25 bp, Homo sapien
tgtggtggatatgaggtgcatccag

SEQ ID NO: 5310551 - DNA, 25 bp, Homo sapien
catgtggtggatatgaggtgcatcc

SEQ ID NO: 5310552 - DNA, 25 bp, Homo sapien
gactgcatgtggtggatatgaggtg

SEQ ID NO: 5310553 - DNA, 25 bp, Homo sapien
gaataatggatgagttccgtgacat

SEQ ID NO: 5310554 - DNA, 25 bp, Homo sapien
tctgtgcggcaattgcattggctgt

SEQ ID NO: 5310555 - DNA, 25 bp, Homo sapien
tccgtgacatgatttaggtcgttcc

SEQ ID NO: 5310556 - DNA, 25 bp, Homo sapien
tgagtctgggtagttgaacctgcag

SEQ ID NO: 5310557 - DNA, 25 bp, Homo sapien
attggccatgcctccagagtcctta

SEQ ID NO: 5310558 - DNA, 25 bp, Homo sapien
gggatcctcagattactgtctggag

SEQ ID NO: 5310559 - DNA, 25 bp, Homo sapien
gccagtttagaatatctccccttcc

SEQ ID NO: 5310560 - DNA, 25 bp, Homo sapien
tcagcaggtccagtctgagtccctg

SEQ ID NO: 5310561 - DNA, 25 bp, Homo sapien
cctgatggccgcgaaggtctgcatc

SEQ ID NO: 5310562 - DNA, 25 bp, Homo sapien
cataaggaagtagaggtgttcccca

SEQ ID NO: 5310563 - DNA, 25 bp, Homo sapien
aaaggatgggagctaccaggcagat

SEQ ID NO: 5310564 - DNA, 25 bp, Homo sapien
tgcatcgggtcccttcgctgggtga

SEQ ID NO: 5310565 - DNA, 25 bp, Homo sapien
tgaaaagaatgggtctgcctggcag

SEQ ID NO: 5310566 - DNA, 25 bp, Homo sapien
ttcgtctcctgccttcgcagttatt

SEQ ID NO: 5310567 - DNA, 25 bp, Homo sapien
gccttcgcagttattctggctcacg

SEQ ID NO: 5310568 - DNA, 25 bp, Homo sapien
cagttattctggctcacgtcagccc

SEQ ID NO: 5310569 - DNA, 25 bp, Homo sapien
ctgggtctgagagcaaggttgtgtc

SEQ ID NO: 5310570 - DNA, 25 bp, Homo sapien
tgttggacaccccataccgggtctg

SEQ ID NO: 5310571 - DNA, 25 bp, Homo sapien
aggctctgactcagtgacgccagca

SEQ ID NO: 5310572 - DNA, 25 bp, Homo sapien
ggtttggaatgggagagcactgacc

SEQ ID NO: 5310573 - DNA, 25 bp, Homo sapien
aaggaaagcccggtgctgtaacctg

SEQ ID NO: 5310574 - DNA, 25 bp, Homo sapien
agagccaccagctgttaacttggag

SEQ ID NO: 5310575 - DNA, 25 bp, Homo sapien
cctagaagtattttgatgagcaagg

SEQ ID NO: 5310576 - DNA, 25 bp, Homo sapien
accagctgttaacttggaggccaca

SEQ ID NO: 5310577 - DNA, 25 bp, Homo sapien
gattagagcaatttttccagatcgc

SEQ ID NO: 5310578 - DNA, 25 bp, Homo sapien
gccatctgattagagcaatttttcc

SEQ ID NO: 5310579 - DNA, 25 bp, Homo sapien
cagccatctgattagagcaattttt

SEQ ID NO: 5310580 - DNA, 25 bp, Homo sapien
gcaatttttccagatcgcaggtggg

SEQ ID NO: 5310581 - DNA, 25 bp, Homo sapien
tatggcctcccataagccctgggtt

SEQ ID NO: 5310582 - DNA, 25 bp, Homo sapien
tgagctcgcccacaaggtggctgta

SEQ ID NO: 5310583 - DNA, 25 bp, Homo sapien
ctgaggctgagctgtagacagctgt

SEQ ID NO: 5310584 - DNA, 25 bp, Homo sapien
ttctcgggcctattggtgccaaaga

SEQ ID NO: 5310585 - DNA, 25 bp, Homo sapien
ctctctgctctttcagtttgcacat

SEQ ID NO: 5310586 - DNA, 25 bp, Homo sapien
tatgggcttcccgacaagccagagc

SEQ ID NO: 5310587 - DNA, 25 bp, Homo sapien
ggagtttctgctggcccagtactgg

SEQ ID NO: 5310588 - DNA, 25 bp, Homo sapien
cagtacaggaataatatgggcttcc

SEQ ID NO: 5310589 - DNA, 25 bp, Homo sapien
ccgtcggtcagggtaggccctcttg

SEQ ID NO: 5310590 - DNA, 25 bp, Homo sapien
ggaaccttgcaagccacgtggcaga

SEQ ID NO: 5310591 - DNA, 25 bp, Homo sapien
gaagtgttaagccagtcataatcac

SEQ ID NO: 5310592 - DNA, 25 bp, Homo sapien
gacattcagcatttcccttcgtggg

SEQ ID NO: 5310593 - DNA, 25 bp, Homo sapien
tcccgtgagaacctctgtggccttg

SEQ ID NO: 5310594 - DNA, 25 bp, Homo sapien
ttctagggtagatgacacaggttgt

SEQ ID NO: 5310595 - DNA, 25 bp, Homo sapien
tacaggtgaaagttgatggtcatca

SEQ ID NO: 5310596 - DNA, 25 bp, Homo sapien
cattctccagttagtggtctgccta

SEQ ID NO: 5310597 - DNA, 25 bp, Homo sapien
gcctacattcagacttctagggtag

SEQ ID NO: 5310598 - DNA, 25 bp, Homo sapien
tgtttgggaagtcctctcaaggtag

SEQ ID NO: 5310599 - DNA, 25 bp, Homo sapien
tgggaagttcttccacccctgaatg

SEQ ID NO: 5310600 - DNA, 25 bp, Homo sapien
gtttgggaagtcctctcaaggtagc

SEQ ID NO: 5310601 - DNA, 25 bp, Homo sapien
ggcagagagaccaaggcaattgctt

SEQ ID NO: 5310602 - DNA, 25 bp, Homo sapien
atcccccgcatcctggccagggtct

SEQ ID NO: 5310603 - DNA, 25 bp, Homo sapien
agggtctgggtgatcacacttgaat

SEQ ID NO: 5310604 - DNA, 25 bp, Homo sapien
ccagggtctgggtgatcacacttga

SEQ ID NO: 5310605 - DNA, 25 bp, Homo sapien
gcatatcccccgcatcctggccagg

SEQ ID NO: 5310606 - DNA, 25 bp, Homo sapien
ctataggcctttgtctgcccttcct

SEQ ID NO: 5310607 - DNA, 25 bp, Homo sapien
tctcccactataggcctttgtctgc

SEQ ID NO: 5310608 - DNA, 25 bp, Homo sapien
ccactataggcctttgtctgccctt

SEQ ID NO: 5310609 - DNA, 25 bp, Homo sapien
ccctctctcccactataggcctttg

SEQ ID NO: 5310610 - DNA, 25 bp, Homo sapien
ctcatttgagtaccagattctgttc

SEQ ID NO: 5310611 - DNA, 25 bp, Homo sapien
tacttcaaagctgaaccactcattt

SEQ ID NO: 5310612 - DNA, 25 bp, Homo sapien
tcttgttgtgtttcccaatgcgttg

SEQ ID NO: 5310613 - DNA, 25 bp, Homo sapien
tgtcttgtttgagtttggaagtacc

SEQ ID NO: 5310614 - DNA, 25 bp, Homo sapien
catgcggggatttggggatctcaca

SEQ ID NO: 5310615 - DNA, 25 bp, Homo sapien
aaggaagagaaccatgcggggattt

SEQ ID NO: 5310616 - DNA, 25 bp, Homo sapien
ctccagctgctagacaatgggaggg

SEQ ID NO: 5310617 - DNA, 25 bp, Homo sapien
ggatctcacagccagagtactgtca

SEQ ID NO: 5310618 - DNA, 25 bp, Homo sapien
cgttcggccttaaaagacctcagtg

SEQ ID NO: 5310619 - DNA, 25 bp, Homo sapien
tcatatcatccttcgatgccgatgg

SEQ ID NO: 5310620 - DNA, 25 bp, Homo sapien
caagaggggtcacagcgagcatgct

SEQ ID NO: 5310621 - DNA, 25 bp, Homo sapien
tcagtgtttacttcacatgggcttc

SEQ ID NO: 5310622 - DNA, 25 bp, Homo sapien
cccttgggacctgataggcaagcca

SEQ ID NO: 5310623 - DNA, 25 bp, Homo sapien
tgttccaagatgggtgcagggcatc

SEQ ID NO: 5310624 - DNA, 25 bp, Homo sapien
caggtggtcgttagttctatgttcc

SEQ ID NO: 5310625 - DNA, 25 bp, Homo sapien
tcaggtccgtgcagtccatgctagg

SEQ ID NO: 5310626 - DNA, 25 bp, Homo sapien
cccagctcttgatgagcaagtgtca

SEQ ID NO: 5310627 - DNA, 25 bp, Homo sapien
tggttcaaactcttcgcaggctgcc

SEQ ID NO: 5310628 - DNA, 25 bp, Homo sapien
caagtgtcatgactggcctgtgaga

SEQ ID NO: 5310629 - DNA, 25 bp, Homo sapien
gccgtctggccctcggtggttcaaa

SEQ ID NO: 5310630 - DNA, 25 bp, Homo sapien
taactgaggacctgcttaaagcaga

SEQ ID NO: 5310631 - DNA, 25 bp, Homo sapien
tatggctgtatgcagagcttctgtc

SEQ ID NO: 5310632 - DNA, 25 bp, Homo sapien
aacctagcacccaactttagaggca

SEQ ID NO: 5310633 - DNA, 25 bp, Homo sapien
tctgtagacatgagcctttctgtgg

SEQ ID NO: 5310634 - DNA, 25 bp, Homo sapien
tgccgtgaggtctcctgagtttatt

SEQ ID NO: 5310635 - DNA, 25 bp, Homo sapien
taaactgaagtcatccgtggtttgc

SEQ ID NO: 5310636 - DNA, 25 bp, Homo sapien
caaagttattaggactccaggtaca

SEQ ID NO: 5310637 - DNA, 25 bp, Homo sapien
ggtacacttgtctcataaactgaag

SEQ ID NO: 5310638 - DNA, 25 bp, Homo sapien
aggtgtttggcttccgtctcgtcca

SEQ ID NO: 5310639 - DNA, 25 bp, Homo sapien
gtcagggtggccattacaagtgctc

SEQ ID NO: 5310640 - DNA, 25 bp, Homo sapien
gacagcgagtgtcttaacaccggct

SEQ ID NO: 5310641 - DNA, 25 bp, Homo sapien
gaagaggcagcatggccccacggac

SEQ ID NO: 5310642 - DNA, 25 bp, Homo sapien
actgtgttcacggatataagcctgc

SEQ ID NO: 5310643 - DNA, 25 bp, Homo sapien
tctttgataaatgcctcgccagagg

SEQ ID NO: 5310644 - DNA, 25 bp, Homo sapien
gtgtgggctatatcattgggcctgc

SEQ ID NO: 5310645 - DNA, 25 bp, Homo sapien
catccagaaacttgattagggcagt

SEQ ID NO: 5310646 - DNA, 25 bp, Homo sapien
ttgtcccaagtttgtccatcaggct

SEQ ID NO: 5310647 - DNA, 25 bp, Homo sapien
tggctgccgtctgtgccaggctcaa

SEQ ID NO: 5310648 - DNA, 25 bp, Homo sapien
gagaaccagcggaatttgtcccaag

SEQ ID NO: 5310649 - DNA, 25 bp, Homo sapien
cctccgggaaactggcaagtgtaga

SEQ ID NO: 5310650 - DNA, 25 bp, Homo sapien
caccctcaagcatgagtggacaagc

SEQ ID NO: 5310651 - DNA, 25 bp, Homo sapien
ttgacaccctcaagcatgagtggac

SEQ ID NO: 5310652 - DNA, 25 bp, Homo sapien
tcaagcatgagtggacaagcgaggt

SEQ ID NO: 5310653 - DNA, 25 bp, Homo sapien
cctcaagcatgagtggacaagcgag

SEQ ID NO: 5310654 - DNA, 25 bp, Homo sapien
taatttggtaattcctgggatgcag

SEQ ID NO: 5310655 - DNA, 25 bp, Homo sapien
gggatgcagttactgaagcattcct

SEQ ID NO: 5310656 - DNA, 25 bp, Homo sapien
gagatggctctgcatgagctttggc

SEQ ID NO: 5310657 - DNA, 25 bp, Homo sapien
ttcctggcatgtgacccagcttctt

SEQ ID NO: 5310658 - DNA, 25 bp, Homo sapien
aagccgaactcatccttttaccagg

SEQ ID NO: 5310659 - DNA, 25 bp, Homo sapien
tcttaaaggtctcacacttcaattc

SEQ ID NO: 5310660 - DNA, 25 bp, Homo sapien
gagggcaaagcccgcctgacctcat

SEQ ID NO: 5310661 - DNA, 25 bp, Homo sapien
gagaagtcaaagatcgaggggcaca

SEQ ID NO: 5310662 - DNA, 25 bp, Homo sapien
accaggctggtttctgttggaccat

SEQ ID NO: 5310663 - DNA, 25 bp, Homo sapien
ttcttagtgtgggatgagggtcttt

SEQ ID NO: 5310664 - DNA, 25 bp, Homo sapien
atttccttgtgatgccagcagggtg

SEQ ID NO: 5310665 - DNA, 25 bp, Homo sapien
gttggaccattcttagtgtgggatg

SEQ ID NO: 5310666 - DNA, 25 bp, Homo sapien
tcacagaccctagctgccttgtgga

SEQ ID NO: 5310667 - DNA, 25 bp, Homo sapien
caagccccaaagactcattgcagta

SEQ ID NO: 5310668 - DNA, 25 bp, Homo sapien
gtggaaacctggtgccaagccccaa

SEQ ID NO: 5310669 - DNA, 25 bp, Homo sapien
tgtggacaggacaagagtgcacaca

SEQ ID NO: 5310670 - DNA, 25 bp, Homo sapien
gagataccttgggtaatctgtgccc

SEQ ID NO: 5310671 - DNA, 25 bp, Homo sapien
gacgagggagataccttgggtaatc

SEQ ID NO: 5310672 - DNA, 25 bp, Homo sapien
tgagctgagggacgagggagatacc

SEQ ID NO: 5310673 - DNA, 25 bp, Homo sapien
ccttgggtaatctgtgcccgttggg

SEQ ID NO: 5310674 - DNA, 25 bp, Homo sapien
tgccggttcagcatctgttttctga

SEQ ID NO: 5310675 - DNA, 25 bp, Homo sapien
gccatgccggttcagcatctgtttt

SEQ ID NO: 5310676 - DNA, 25 bp, Homo sapien
cgccatgccggttcagcatctgttt

SEQ ID NO: 5310677 - DNA, 25 bp, Homo sapien
catgccggttcagcatctgttttct

SEQ ID NO: 5310678 - DNA, 25 bp, Homo sapien
gcattttggaggtgccctgacactg

SEQ ID NO: 5310679 - DNA, 25 bp, Homo sapien
tgaggaatgacactcagtgcctggc

SEQ ID NO: 5310680 - DNA, 25 bp, Homo sapien
aaggatgtgccgagcagctgaggaa

SEQ ID NO: 5310681 - DNA, 25 bp, Homo sapien
gggctcagtgcacaaacagcagggt

SEQ ID NO: 5310682 - DNA, 25 bp, Homo sapien
ttcacccctcgccagtgctgcctga

SEQ ID NO: 5310683 - DNA, 25 bp, Homo sapien
taggagcgtcttggctctgtgacct

SEQ ID NO: 5310684 - DNA, 25 bp, Homo sapien
tctgtgttcatttccggagctgtgg

SEQ ID NO: 5310685 - DNA, 25 bp, Homo sapien
gattttattgtgagctttctgttca

SEQ ID NO: 5310686 - DNA, 25 bp, Homo sapien
gaagtcaatttcttggaggttcgtc

SEQ ID NO: 5310687 - DNA, 25 bp, Homo sapien
tagaacctgataccagcccaggaag

SEQ ID NO: 5310688 - DNA, 25 bp, Homo sapien
gatgtgacccatcgggcccctggcc

SEQ ID NO: 5310689 - DNA, 25 bp, Homo sapien
tcttggaggttcgtcaggctgcaga

SEQ ID NO: 5310690 - DNA, 25 bp, Homo sapien
ccacatcagggaagtaggaccctgt

SEQ ID NO: 5310691 - DNA, 25 bp, Homo sapien
catcagggaagtaggaccctgtggc

SEQ ID NO: 5310692 - DNA, 25 bp, Homo sapien
cagggaagtaggaccctgtggcttt

SEQ ID NO: 5310693 - DNA, 25 bp, Homo sapien
ccccacatcagggaagtaggaccct

SEQ ID NO: 5310694 - DNA, 25 bp, Homo sapien
gctgggctggaatgccagcctccct

SEQ ID NO: 5310695 - DNA, 25 bp, Homo sapien
gagaatccggaatgccagagagcct

SEQ ID NO: 5310696 - DNA, 25 bp, Homo sapien
ggctgttacagaatcccaggaatgt

SEQ ID NO: 5310697 - DNA, 25 bp, Homo sapien
tccctggaagggtgtgtctatgttc

SEQ ID NO: 5310698 - DNA, 25 bp, Homo sapien
catttgggctacatcctgagctctg

SEQ ID NO: 5310699 - DNA, 25 bp, Homo sapien
cagcatccctgatcggaggtccaca

SEQ ID NO: 5310700 - DNA, 25 bp, Homo sapien
tctgcatttgggctacatcctgagc

SEQ ID NO: 5310701 - DNA, 25 bp, Homo sapien
gctctgcatttgggctacatcctga

SEQ ID NO: 5310702 - DNA, 25 bp, Homo sapien
aggctggggcgctgtccctctcagc

SEQ ID NO: 5310703 - DNA, 25 bp, Homo sapien
ttggggaataacaaagcaggcagga

SEQ ID NO: 5310704 - DNA, 25 bp, Homo sapien
ctttggggaataacaaagcaggcag

SEQ ID NO: 5310705 - DNA, 25 bp, Homo sapien
ggaataacaaagcaggcaggaggct

SEQ ID NO: 5310706 - DNA, 25 bp, Homo sapien
agggtcctgaggtgggaatttctgg

SEQ ID NO: 5310707 - DNA, 25 bp, Homo sapien
gagggtcctgaggtgggaatttctg

SEQ ID NO: 5310708 - DNA, 25 bp, Homo sapien
ccccttggaggtacgatgtctgatc

SEQ ID NO: 5310709 - DNA, 25 bp, Homo sapien
gacggtcaaaaactggaagcctctc

SEQ ID NO: 5310710 - DNA, 25 bp, Homo sapien
cctggaatcatgtctgtggctataa

SEQ ID NO: 5310711 - DNA, 25 bp, Homo sapien
ggacatcactttcgaatccctgtgg

SEQ ID NO: 5310712 - DNA, 25 bp, Homo sapien
ttaattttgtgtctggcggcccgtc

SEQ ID NO: 5310713 - DNA, 25 bp, Homo sapien
ggctcaaaccctccatttttggtgc

SEQ ID NO: 5310714 - DNA, 25 bp, Homo sapien
catttttggtgcttaattttgtgtc

SEQ ID NO: 5310715 - DNA, 25 bp, Homo sapien
aattttgtgtctggcggcccgtcgg

SEQ ID NO: 5310716 - DNA, 25 bp, Homo sapien
ctgtgggccgtgttccattgtgagc

SEQ ID NO: 5310717 - DNA, 25 bp, Homo sapien
cgaactggttgtgttccaagctctc

SEQ ID NO: 5310718 - DNA, 25 bp, Homo sapien
tctccgaggacttgatgaaaccagg

SEQ ID NO: 5310719 - DNA, 25 bp, Homo sapien
tgaaaccaggcatgcgcatcttccc

SEQ ID NO: 5310720 - DNA, 25 bp, Homo sapien
tctccatagcaacagagggcctaac

SEQ ID NO: 5310721 - DNA, 25 bp, Homo sapien
tctgatgctgagtcggctgggccac

SEQ ID NO: 5310722 - DNA, 25 bp, Homo sapien
cctgtgcttcgtccacagggtctga

SEQ ID NO: 5310723 - DNA, 25 bp, Homo sapien
gaggctgccgttgactgcttcctca

SEQ ID NO: 5310724 - DNA, 25 bp, Homo sapien
gcccagaaggtgcttcgtgatgccg

SEQ ID NO: 5310725 - DNA, 25 bp, Homo sapien
ccaagtgcctttggggtctgaccag

SEQ ID NO: 5310726 - DNA, 25 bp, Homo sapien
tgaccaggggtactgagcaccggcc

SEQ ID NO: 5310727 - DNA, 25 bp, Homo sapien
gggtactgagcaccggccctaacac

SEQ ID NO: 5310728 - DNA, 25 bp, Homo sapien
ctctttccccctgctaccaagtgcc

SEQ ID NO: 5310729 - DNA, 25 bp, Homo sapien
tccatggcacactagctcagcactg

SEQ ID NO: 5310730 - DNA, 25 bp, Homo sapien
tgcatttcccgagatgattcccaag

SEQ ID NO: 5310731 - DNA, 25 bp, Homo sapien
tcaggtacagcttgcatttcaggat

SEQ ID NO: 5310732 - DNA, 25 bp, Homo sapien
ccttcctcggaaggagtgggctgtt

SEQ ID NO: 5310733 - DNA, 25 bp, Homo sapien
caggcttgtctgaagcagcatgtat

SEQ ID NO: 5310734 - DNA, 25 bp, Homo sapien
gaagcagcatgtatattcactgggc

SEQ ID NO: 5310735 - DNA, 25 bp, Homo sapien
gcatgtatattcactgggcatgtag

SEQ ID NO: 5310736 - DNA, 25 bp, Homo sapien
ctgacagtgactttgcaggttgaat

SEQ ID NO: 5310737 - DNA, 25 bp, Homo sapien
cagagaaggcatcgaagccaagacc

SEQ ID NO: 5310738 - DNA, 25 bp, Homo sapien
gagaaggcatcgaagccaagacctg

SEQ ID NO: 5310739 - DNA, 25 bp, Homo sapien
agaaggcatcgaagccaagacctgg

SEQ ID NO: 5310740 - DNA, 25 bp, Homo sapien
gccagagaaggcatcgaagccaaga

SEQ ID NO: 5310741 - DNA, 25 bp, Homo sapien
gtctgaacagagatcccctcgggca

SEQ ID NO: 5310742 - DNA, 25 bp, Homo sapien
gatcccctcgggcattgctgatggg

SEQ ID NO: 5310743 - DNA, 25 bp, Homo sapien
cagagatcccctcgggcattgctga

SEQ ID NO: 5310744 - DNA, 25 bp, Homo sapien
ctgaacagagatcccctcgggcatt

SEQ ID NO: 5310745 - DNA, 25 bp, Homo sapien
ggacctgggccttgttcagattggc

SEQ ID NO: 5310746 - DNA, 25 bp, Homo sapien
tgggccttgttcagattggccacct

SEQ ID NO: 5310747 - DNA, 25 bp, Homo sapien
agggacctgggccttgttcagattg

SEQ ID NO: 5310748 - DNA, 25 bp, Homo sapien
cttgttcagattggccacctctgct

SEQ ID NO: 5310749 - DNA, 25 bp, Homo sapien
tgttgaagaaaaggctatgctcttg

SEQ ID NO: 5310750 - DNA, 25 bp, Homo sapien
tcggagactgcttagggaattgtct

SEQ ID NO: 5310751 - DNA, 25 bp, Homo sapien
tcttggcccattttggctatggtcg

SEQ ID NO: 5310752 - DNA, 25 bp, Homo sapien
attgtcttaaagttgtatatgctcc

SEQ ID NO: 5310753 - DNA, 25 bp, Homo sapien
acagctgggcaagaatcgagggact

SEQ ID NO: 5310754 - DNA, 25 bp, Homo sapien
tgaacagctgggcaagaatcgaggg

SEQ ID NO: 5310755 - DNA, 25 bp, Homo sapien
gaacagctgggcaagaatcgaggga

SEQ ID NO: 5310756 - DNA, 25 bp, Homo sapien
aacagctgggcaagaatcgagggac

SEQ ID NO: 5310757 - DNA, 25 bp, Homo sapien
aagtgacagagcttgttggaggcat

SEQ ID NO: 5310758 - DNA, 25 bp, Homo sapien
caagaagtgacagagcttgttggag

SEQ ID NO: 5310759 - DNA, 25 bp, Homo sapien
aacaagaagtgacagagcttgttgg

SEQ ID NO: 5310760 - DNA, 25 bp, Homo sapien
tgacagagcttgttggaggcatttt

SEQ ID NO: 5310761 - DNA, 25 bp, Homo sapien
tcacacaaagggatgtataggatgc

SEQ ID NO: 5310762 - DNA, 25 bp, Homo sapien
gacgcctctcaaggaagtacatttg

SEQ ID NO: 5310763 - DNA, 25 bp, Homo sapien
gagagtaaacccatctggtccaagg

SEQ ID NO: 5310764 - DNA, 25 bp, Homo sapien
tataggatgctatggagagcacctc

SEQ ID NO: 5310765 - DNA, 25 bp, Homo sapien
cacttaagatagcatgagcaccctc

SEQ ID NO: 5310766 - DNA, 25 bp, Homo sapien
cctcacaccgcacatagagatgggt

SEQ ID NO: 5310767 - DNA, 25 bp, Homo sapien
tagtaggtaggtgttgtcccgcttc

SEQ ID NO: 5310768 - DNA, 25 bp, Homo sapien
aactaaggtcactccctcagtgtgg

SEQ ID NO: 5310769 - DNA, 25 bp, Homo sapien
cagattctctcttcatgccacgtgg

SEQ ID NO: 5310770 - DNA, 25 bp, Homo sapien
tcgaacggctgggatgggcaattcc

SEQ ID NO: 5310771 - DNA, 25 bp, Homo sapien
taaaacctggtattgcgatcccaca

SEQ ID NO: 5310772 - DNA, 25 bp, Homo sapien
tgttacaggcagcacggtgttcccg

SEQ ID NO: 5310773 - DNA, 25 bp, Homo sapien
taggttgttgggaatctttgaactg

SEQ ID NO: 5310774 - DNA, 25 bp, Homo sapien
ttgggaatctttgaactgttgagcg

SEQ ID NO: 5310775 - DNA, 25 bp, Homo sapien
aactgttgagcgaaatacacagctc

SEQ ID NO: 5310776 - DNA, 25 bp, Homo sapien
ctttgaactgttgagcgaaatacac

SEQ ID NO: 5310777 - DNA, 25 bp, Homo sapien
tggtgcaggaagcacgttgtattgc

SEQ ID NO: 5310778 - DNA, 25 bp, Homo sapien
gcacgttgtattgccccggagaaag

SEQ ID NO: 5310779 - DNA, 25 bp, Homo sapien
caggaagcacgttgtattgccccgg

SEQ ID NO: 5310780 - DNA, 25 bp, Homo sapien
gaagcacgttgtattgccccggaga

SEQ ID NO: 5310781 - DNA, 25 bp, Homo sapien
gtctcactctatcggggaggcggtg

SEQ ID NO: 5310782 - DNA, 25 bp, Homo sapien
gattcaagcgactgtcccgccttag

SEQ ID NO: 5310783 - DNA, 25 bp, Homo sapien
cttccagattcaagcgactgtcccg

SEQ ID NO: 5310784 - DNA, 25 bp, Homo sapien
cagattcaagcgactgtcccgcctt

SEQ ID NO: 5310785 - DNA, 25 bp, Homo sapien
taatgatatccttaatttcaccaat

SEQ ID NO: 5310786 - DNA, 25 bp, Homo sapien
aataaacaacatgggactttctcaa

SEQ ID NO: 5310787 - DNA, 25 bp, Homo sapien
aagtaaagcctcttgtgtcatatgg

SEQ ID NO: 5310788 - DNA, 25 bp, Homo sapien
tatccaatgatactaatgatatcct

SEQ ID NO: 5310789 - DNA, 25 bp, Homo sapien
tttgcttaactgtgattttcattga

SEQ ID NO: 5310790 - DNA, 25 bp, Homo sapien
ttcatttgcttaactgtgattttca

SEQ ID NO: 5310791 - DNA, 25 bp, Homo sapien
actgtgattttcattgaaatgttcc

SEQ ID NO: 5310792 - DNA, 25 bp, Homo sapien
gcttaactgtgattttcattgaaat

SEQ ID NO: 5310793 - DNA, 25 bp, Homo sapien
tcagtaatgattcactggctacagg

SEQ ID NO: 5310794 - DNA, 25 bp, Homo sapien
tgattcactggctacaggctgagac

SEQ ID NO: 5310795 - DNA, 25 bp, Homo sapien
taatgattcactggctacaggctga

SEQ ID NO: 5310796 - DNA, 25 bp, Homo sapien
cttgttcagtaatgattcactggct

SEQ ID NO: 5310797 - DNA, 25 bp, Homo sapien
tttcccacacaaagcaatctgccag

SEQ ID NO: 5310798 - DNA, 25 bp, Homo sapien
aagcaatctgccagtagcgctttac

SEQ ID NO: 5310799 - DNA, 25 bp, Homo sapien
gggctcttagtagctttcccacaca

SEQ ID NO: 5310800 - DNA, 25 bp, Homo sapien
tcttagtagctttcccacacaaagc

SEQ ID NO: 5310801 - DNA, 25 bp, Homo sapien
cttgcttctttaacaggtccaggaa

SEQ ID NO: 5310802 - DNA, 25 bp, Homo sapien
gaagtcaggaggcatatactgcgga

SEQ ID NO: 5310803 - DNA, 25 bp, Homo sapien
tactgcggaagatcatttaggactg

SEQ ID NO: 5310804 - DNA, 25 bp, Homo sapien
gatctttgtcaactagtgtgctggg

SEQ ID NO: 5310805 - DNA, 25 bp, Homo sapien
aaattgacatcagttttaagattgt

SEQ ID NO: 5310806 - DNA, 25 bp, Homo sapien
ttttaagattgtgtaaacatgtaac

SEQ ID NO: 5310807 - DNA, 25 bp, Homo sapien
agattgtgtaaacatgtaacttctc

SEQ ID NO: 5310808 - DNA, 25 bp, Homo sapien
ctgtggaaaattgacatcagtttta

SEQ ID NO: 5310809 - DNA, 25 bp, Homo sapien
ccctcaagtgggaagctgaaggata

SEQ ID NO: 5310810 - DNA, 25 bp, Homo sapien
caacttcggtgattcaactttggga

SEQ ID NO: 5310811 - DNA, 25 bp, Homo sapien
gaatttcagacctctagtgagacca

SEQ ID NO: 5310812 - DNA, 25 bp, Homo sapien
taaactggcagagcatatggcctag

SEQ ID NO: 5310813 - DNA, 25 bp, Homo sapien
caccatccttctctttcaaaagagg

SEQ ID NO: 5310814 - DNA, 25 bp, Homo sapien
ctctttcaaaagaggaagtcttttg

SEQ ID NO: 5310815 - DNA, 25 bp, Homo sapien
gttaatgctattctccaccatcctt

SEQ ID NO: 5310816 - DNA, 25 bp, Homo sapien
tgttaatgctattctccaccatcct

SEQ ID NO: 5310817 - DNA, 25 bp, Homo sapien
aagctgtgatgaatgattctccacc

SEQ ID NO: 5310818 - DNA, 25 bp, Homo sapien
ctgtgatgaatgattctccacccac

SEQ ID NO: 5310819 - DNA, 25 bp, Homo sapien
cgaagctgtgatgaatgattctcca

SEQ ID NO: 5310820 - DNA, 25 bp, Homo sapien
gctgtgatgaatgattctccaccca

SEQ ID NO: 5310821 - DNA, 25 bp, Homo sapien
cttattgaggtggaagcggtggcga

SEQ ID NO: 5310822 - DNA, 25 bp, Homo sapien
cttcccttattgaggtggaagcggt

SEQ ID NO: 5310823 - DNA, 25 bp, Homo sapien
aggtggaagcggtggcgacggctgg

SEQ ID NO: 5310824 - DNA, 25 bp, Homo sapien
attgaggtggaagcggtggcgacgg

SEQ ID NO: 5310825 - DNA, 25 bp, Homo sapien
cctctctctctaggctgaacctgag

SEQ ID NO: 5310826 - DNA, 25 bp, Homo sapien
ctcctctctctctaggctgaacctg

SEQ ID NO: 5310827 - DNA, 25 bp, Homo sapien
ctctctctaggctgaacctgagctc

SEQ ID NO: 5310828 - DNA, 25 bp, Homo sapien
ggtggcctcctctctctctaggctg

SEQ ID NO: 5310829 - DNA, 25 bp, Homo sapien
aattattagacttcaacagttaaat

SEQ ID NO: 5310830 - DNA, 25 bp, Homo sapien
cagttaaatgactcagatgcagagc

SEQ ID NO: 5310831 - DNA, 25 bp, Homo sapien
agttaaatgactcagatgcagagca

SEQ ID NO: 5310832 - DNA, 25 bp, Homo sapien
ttcaacaacaacatgctgacagttc

SEQ ID NO: 5310833 - DNA, 25 bp, Homo sapien
actgtccatagtccacgcagagtta

SEQ ID NO: 5310834 - DNA, 25 bp, Homo sapien
aaaaatagtgtacgagtacctggat

SEQ ID NO: 5310835 - DNA, 25 bp, Homo sapien
taatacacccgttttgcaatagtgc

SEQ ID NO: 5310836 - DNA, 25 bp, Homo sapien
tgcaacatgttacttgatcaatttt

SEQ ID NO: 5310837 - DNA, 25 bp, Homo sapien
gacaatgacagtaagataagggaag

SEQ ID NO: 5310838 - DNA, 25 bp, Homo sapien
acaatgacagtaagataagggaaga

SEQ ID NO: 5310839 - DNA, 25 bp, Homo sapien
acatgcaacatgttacttgatcaat

SEQ ID NO: 5310840 - DNA, 25 bp, Homo sapien
actttgctgtcatcatttgtacaaa

SEQ ID NO: 5310841 - DNA, 25 bp, Homo sapien
tcactttgctgtcatcatttgtaca

SEQ ID NO: 5310842 - DNA, 25 bp, Homo sapien
cactttgctgtcatcatttgtacaa

SEQ ID NO: 5310843 - DNA, 25 bp, Homo sapien
taaacttcagtttcagactaaagcc

SEQ ID NO: 5310844 - DNA, 25 bp, Homo sapien
gtacagagggaagctagtttattgc

SEQ ID NO: 5310845 - DNA, 25 bp, Homo sapien
caaattaacgctttagataggccaa

SEQ ID NO: 5310846 - DNA, 25 bp, Homo sapien
tcctcagaattaccattaagtacag

SEQ ID NO: 5310847 - DNA, 25 bp, Homo sapien
tcatcacatggcgaagttctgcagc

SEQ ID NO: 5310848 - DNA, 25 bp, Homo sapien
ttgaccatcaccatcaatatctgct

SEQ ID NO: 5310849 - DNA, 25 bp, Homo sapien
ttgtcatcacatggcgaagttctgc

SEQ ID NO: 5310850 - DNA, 25 bp, Homo sapien
aaggtttgtcatcacatggcgaagt

SEQ ID NO: 5310851 - DNA, 25 bp, Homo sapien
tgcttggtaattaaaatatgttggt

SEQ ID NO: 5310852 - DNA, 25 bp, Homo sapien
aaacacaagtcttcataatgagtcc

SEQ ID NO: 5310853 - DNA, 25 bp, Homo sapien
tttaacatatccagtccttgacgta

SEQ ID NO: 5310854 - DNA, 25 bp, Homo sapien
gagtcctggtatcttcatttcatcc

SEQ ID NO: 5310855 - DNA, 25 bp, Homo sapien
caaacacacggaatgcttctctaat

SEQ ID NO: 5310856 - DNA, 25 bp, Homo sapien
gaaattcagggaagtcaattgtgcc

SEQ ID NO: 5310857 - DNA, 25 bp, Homo sapien
tgccatcattgtcagaaattcaggg

SEQ ID NO: 5310858 - DNA, 25 bp, Homo sapien
cttatcaaacacacggaatgcttct

SEQ ID NO: 5310859 - DNA, 25 bp, Homo sapien
ctttagtggaaacatataagcaaac

SEQ ID NO: 5310860 - DNA, 25 bp, Homo sapien
tttagtggaaacatcaaagctttag

SEQ ID NO: 5310861 - DNA, 25 bp, Homo sapien
tttagtggaaacatctaagtatcac

SEQ ID NO: 5310862 - DNA, 25 bp, Homo sapien
taagcaaacagcaaaggtttagtgg

SEQ ID NO: 5310863 - DNA, 25 bp, Homo sapien
caagagatctcattacagttcccaa

SEQ ID NO: 5310864 - DNA, 25 bp, Homo sapien
tgggattctgcccaagagatctcat

SEQ ID NO: 5310865 - DNA, 25 bp, Homo sapien
ctgtgggattctgcccaagagatct

SEQ ID NO: 5310866 - DNA, 25 bp, Homo sapien
attacagttcccaattcctttgttg

SEQ ID NO: 5310867 - DNA, 25 bp, Homo sapien
tttgtcaaatagtgaaaaagcttct

SEQ ID NO: 5310868 - DNA, 25 bp, Homo sapien
ctttgtcaaatagtgaaaaagcttc

SEQ ID NO: 5310869 - DNA, 25 bp, Homo sapien
tgtcaaatagtgaaaaagcttcttt

SEQ ID NO: 5310870 - DNA, 25 bp, Homo sapien
tcaaatagtgaaaaagcttctttga

SEQ ID NO: 5310871 - DNA, 25 bp, Homo sapien
taaagagtctataacaatgggctga

SEQ ID NO: 5310872 - DNA, 25 bp, Homo sapien
tggccaaactgtaagaccccacgtc

SEQ ID NO: 5310873 - DNA, 25 bp, Homo sapien
cctactcagtggtgggatcgtgcca

SEQ ID NO: 5310874 - DNA, 25 bp, Homo sapien
tgggctgatcaagatataaatgtcc

SEQ ID NO: 5310875 - DNA, 25 bp, Homo sapien
tggtgcaacactccagactacctgg

SEQ ID NO: 5310876 - DNA, 25 bp, Homo sapien
gactacctggcttcattcaccattt

SEQ ID NO: 5310877 - DNA, 25 bp, Homo sapien
atacatcactagattacatggaaac

SEQ ID NO: 5310878 - DNA, 25 bp, Homo sapien
tgtgcccggctatatgttccttcta

SEQ ID NO: 5310879 - DNA, 25 bp, Homo sapien
tgaattctatactcccaggcaaccc

SEQ ID NO: 5310880 - DNA, 25 bp, Homo sapien
taaaggtactagcaaaagcccaaga

SEQ ID NO: 5310881 - DNA, 25 bp, Homo sapien
ctttgccagggctattacaattgcc

SEQ ID NO: 5310882 - DNA, 25 bp, Homo sapien
ggctgtctacaggatatagctcccc

SEQ ID NO: 5310883 - DNA, 25 bp, Homo sapien
cttgaagttggacagcaaaggttgc

SEQ ID NO: 5310884 - DNA, 25 bp, Homo sapien
ttgcttgaagttggacagcaaaggt

SEQ ID NO: 5310885 - DNA, 25 bp, Homo sapien
agaattgcttgaagttggacagcaa

SEQ ID NO: 5310886 - DNA, 25 bp, Homo sapien
ttgaagttggacagcaaaggttgca

SEQ ID NO: 5310887 - DNA, 25 bp, Homo sapien
gctttaaatgggctatatagttcca

SEQ ID NO: 5310888 - DNA, 25 bp, Homo sapien
tgtggcaaataaactgcttggtgct

SEQ ID NO: 5310889 - DNA, 25 bp, Homo sapien
ggtgctcatgctaataaaagtgtct

SEQ ID NO: 5310890 - DNA, 25 bp, Homo sapien
caagtgcttttgagctcttatcaaa

SEQ ID NO: 5310891 - DNA, 25 bp, Homo sapien
aatctgctcttcagtcagttggtca

SEQ ID NO: 5310892 - DNA, 25 bp, Homo sapien
ctgcaatctgctcttcagtcagttg

SEQ ID NO: 5310893 - DNA, 25 bp, Homo sapien
gcaatctgctcttcagtcagttggt

SEQ ID NO: 5310894 - DNA, 25 bp, Homo sapien
tctgctcttcagtcagttggtcagc

SEQ ID NO: 5310895 - DNA, 25 bp, Homo sapien
ggcaaaatgcaaagaatccagagct

SEQ ID NO: 5310896 - DNA, 25 bp, Homo sapien
tgtgaccttggacgtggtactcctc

SEQ ID NO: 5310897 - DNA, 25 bp, Homo sapien
gcatcaagttctgagtcacaggcca

SEQ ID NO: 5310898 - DNA, 25 bp, Homo sapien
tatctaaaatccctaccaacatggg

SEQ ID NO: 5310899 - DNA, 25 bp, Homo sapien
caaagtgagatgctatgtacaaagc

SEQ ID NO: 5310900 - DNA, 25 bp, Homo sapien
ttgtgcaaagtgagatgctatgtac

SEQ ID NO: 5310901 - DNA, 25 bp, Homo sapien
gaatgaattaagcacccaagagacc

SEQ ID NO: 5310902 - DNA, 25 bp, Homo sapien
gatgcagcggacatcactttaaggc

SEQ ID NO: 5310903 - DNA, 25 bp, Homo sapien
gacaggttcgttctctctacatggg

SEQ ID NO: 5310904 - DNA, 25 bp, Homo sapien
gaaggatcccgtactctgtacagga

SEQ ID NO: 5310905 - DNA, 25 bp, Homo sapien
cccaactgctacaaaggcgaataaa

SEQ ID NO: 5310906 - DNA, 25 bp, Homo sapien
caactgctacaaaggcgaataaatt

SEQ ID NO: 5310907 - DNA, 25 bp, Homo sapien
tcccaactgctacaaaggcgaataa

SEQ ID NO: 5310908 - DNA, 25 bp, Homo sapien
tttcccaactgctacaaaggcgaat

SEQ ID NO: 5310909 - DNA, 25 bp, Homo sapien
gaagcaatcccgttttcaatgagca

SEQ ID NO: 5310910 - DNA, 25 bp, Homo sapien
gaaacaggcgttggcacttataaga

SEQ ID NO: 5310911 - DNA, 25 bp, Homo sapien
gaccccgtattacattagtgacctg

SEQ ID NO: 5310912 - DNA, 25 bp, Homo sapien
tgatctgtcaacactaaggagcacg

SEQ ID NO: 5310913 - DNA, 25 bp, Homo sapien
tgtagaaccctagctggagccgaac

SEQ ID NO: 5310914 - DNA, 25 bp, Homo sapien
aagcttaacactgggcaagggacca

SEQ ID NO: 5310915 - DNA, 25 bp, Homo sapien
tcttgaacattaggactgcacgctg

SEQ ID NO: 5310916 - DNA, 25 bp, Homo sapien
caagatgtgtattgcgaggacgcgc

SEQ ID NO: 5310917 - DNA, 25 bp, Homo sapien
gtggattgaattcgccccctgcttg

SEQ ID NO: 5310918 - DNA, 25 bp, Homo sapien
tcggtcgggtggattgaattcgccc

SEQ ID NO: 5310919 - DNA, 25 bp, Homo sapien
ctgcttgacctttccagacgcccga

SEQ ID NO: 5310920 - DNA, 25 bp, Homo sapien
gacgcccgacagaaggctctctacg

SEQ ID NO: 5310921 - DNA, 25 bp, Homo sapien
ggaactgtgcgtccggccctcaact

SEQ ID NO: 5310922 - DNA, 25 bp, Homo sapien
ggagcttcaccacctcgggaactgt

SEQ ID NO: 5310923 - DNA, 25 bp, Homo sapien
tccggccctcaactcactagaggaa

SEQ ID NO: 5310924 - DNA, 25 bp, Homo sapien
gtgcactgggctgtccctcatcccg

SEQ ID NO: 5310925 - DNA, 25 bp, Homo sapien
gaagagaatgggggtgggggagcac

SEQ ID NO: 5310926 - DNA, 25 bp, Homo sapien
ctgaagagaatgggggtgggggagc

SEQ ID NO: 5310927 - DNA, 25 bp, Homo sapien
tgaagagaatgggggtgggggagca

SEQ ID NO: 5310928 - DNA, 25 bp, Homo sapien
agcgccggcagctcagcgatgcact

SEQ ID NO: 5310929 - DNA, 25 bp, Homo sapien
tttgtttagtcagttcgctccagtc

SEQ ID NO: 5310930 - DNA, 25 bp, Homo sapien
tttcgcgccatccctctggcagaaa

SEQ ID NO: 5310931 - DNA, 25 bp, Homo sapien
cactccttgaaggtgtaagggaggc

SEQ ID NO: 5310932 - DNA, 25 bp, Homo sapien
cgttggtcgttgagcctgcctctga

SEQ ID NO: 5310933 - DNA, 25 bp, Homo sapien
cacagttatttggtcgatgaggcaa

SEQ ID NO: 5310934 - DNA, 25 bp, Homo sapien
acggaacatcgcaaacgagtcccgg

SEQ ID NO: 5310935 - DNA, 25 bp, Homo sapien
gggtttcatttccagcgagccgtta

SEQ ID NO: 5310936 - DNA, 25 bp, Homo sapien
gaaatttgtctctgattactcctca

SEQ ID NO: 5310937 - DNA, 25 bp, Homo sapien
atttgtctctgattactcctcaaat

SEQ ID NO: 5310938 - DNA, 25 bp, Homo sapien
aaatttgtctctgattactcctcaa

SEQ ID NO: 5310939 - DNA, 25 bp, Homo sapien
aatttgtctctgattactcctcaaa

SEQ ID NO: 5310940 - DNA, 25 bp, Homo sapien
atttccgtaaagcctctcttgcaga

SEQ ID NO: 5310941 - DNA, 25 bp, Homo sapien
tgcagaactttccttgctgacctct

SEQ ID NO: 5310942 - DNA, 25 bp, Homo sapien
gatttccgtaaagcctctcttgcag

SEQ ID NO: 5310943 - DNA, 25 bp, Homo sapien
tggatttccgtaaagcctctcttgc

SEQ ID NO: 5310944 - DNA, 25 bp, Homo sapien
acatcatcctcaggtccactctcca

SEQ ID NO: 5310945 - DNA, 25 bp, Homo sapien
cattgtcaacatcatcctcaggtcc

SEQ ID NO: 5310946 - DNA, 25 bp, Homo sapien
atcctcaggtccactctccacacta

SEQ ID NO: 5310947 - DNA, 25 bp, Homo sapien
catctccattgtcaacatcatcctc

SEQ ID NO: 5310948 - DNA, 25 bp, Homo sapien
tgctcaggatcacattatctatttt

SEQ ID NO: 5310949 - DNA, 25 bp, Homo sapien
tctgtgctcaggatcacattatcta

SEQ ID NO: 5310950 - DNA, 25 bp, Homo sapien
tcttccatggaactcttggtaacaa

SEQ ID NO: 5310951 - DNA, 25 bp, Homo sapien
tctctgtttgagatgcactgacctc

SEQ ID NO: 5310952 - DNA, 25 bp, Homo sapien
cccagatctcctgccattgtttcct

SEQ ID NO: 5310953 - DNA, 25 bp, Homo sapien
gatctcctgccattgtttcctgcag

SEQ ID NO: 5310954 - DNA, 25 bp, Homo sapien
agatctcctgccattgtttcctgca

SEQ ID NO: 5310955 - DNA, 25 bp, Homo sapien
cagatctcctgccattgtttcctgc

SEQ ID NO: 5310956 - DNA, 25 bp, Homo sapien
tgcttctttagcttcctgagccagc

SEQ ID NO: 5310957 - DNA, 25 bp, Homo sapien
aggctgttaacagggggtgcttctt

SEQ ID NO: 5310958 - DNA, 25 bp, Homo sapien
agggggtgcttctttagcttcctga

SEQ ID NO: 5310959 - DNA, 25 bp, Homo sapien
aaggctgttaacagggggtgcttct

SEQ ID NO: 5310960 - DNA, 25 bp, Homo sapien
gctgtccacagtttatccgagcaag

SEQ ID NO: 5310961 - DNA, 25 bp, Homo sapien
aaagctgtccacagtttatccgagc

SEQ ID NO: 5310962 - DNA, 25 bp, Homo sapien
gtttatccgagcaagggcctcacat

SEQ ID NO: 5310963 - DNA, 25 bp, Homo sapien
tccacagtttatccgagcaagggcc

SEQ ID NO: 5310964 - DNA, 25 bp, Homo sapien
tattcttctatcatcccccccgact

SEQ ID NO: 5310965 - DNA, 25 bp, Homo sapien
tgctgaactgaaagcctctattctt

SEQ ID NO: 5310966 - DNA, 25 bp, Homo sapien
gcccaggactcagtaatgtttgctg

SEQ ID NO: 5310967 - DNA, 25 bp, Homo sapien
gggccatggcaccatatggcctgaa

SEQ ID NO: 5310968 - DNA, 25 bp, Homo sapien
acaagctgatcgagctggctggcca

SEQ ID NO: 5310969 - DNA, 25 bp, Homo sapien
caagcaatccttgggacaagctgat

SEQ ID NO: 5310970 - DNA, 25 bp, Homo sapien
tcagtctaaggtgtagcccaagcaa

SEQ ID NO: 5310971 - DNA, 25 bp, Homo sapien
taaggtgtagcccaagcaatccttg

SEQ ID NO: 5310972 - DNA, 25 bp, Homo sapien
gagtagcaacgagttgttgccctgg

SEQ ID NO: 5310973 - DNA, 25 bp, Homo sapien
tcttaagtaggttgtgagtagcaac

SEQ ID NO: 5310974 - DNA, 25 bp, Homo sapien
tagttcttgtgctttgaccaacagt

SEQ ID NO: 5310975 - DNA, 25 bp, Homo sapien
gaaattccctggcattgatttaacc

SEQ ID NO: 5310976 - DNA, 25 bp, Homo sapien
ttgctcaggagaaagatcagatgaa

SEQ ID NO: 5310977 - DNA, 25 bp, Homo sapien
gctcaaagggtgggaaacacttaga

SEQ ID NO: 5310978 - DNA, 25 bp, Homo sapien
agcaaagctcaaagggtgggaaaca

SEQ ID NO: 5310979 - DNA, 25 bp, Homo sapien
ctcagcaaagctcaaagggtgggaa

SEQ ID NO: 5310980 - DNA, 25 bp, Homo sapien
agctcaaagggtgggaaacacttag

SEQ ID NO: 5310981 - DNA, 25 bp, Homo sapien
tccttctggtctgggtaatcacagc

SEQ ID NO: 5310982 - DNA, 25 bp, Homo sapien
tgacaccttgttggtatggcgccag

SEQ ID NO: 5310983 - DNA, 25 bp, Homo sapien
tgtaccatcaataggcaacacaggg

SEQ ID NO: 5310984 - DNA, 25 bp, Homo sapien
caaatttctgactagcctgaggcca

SEQ ID NO: 5310985 - DNA, 25 bp, Homo sapien
tgtgagccacgtcaactcttagagg

SEQ ID NO: 5310986 - DNA, 25 bp, Homo sapien
cacatagaacatgggctctgagcac

SEQ ID NO: 5310987 - DNA, 25 bp, Homo sapien
caaaaacgagctgtgtaactcaagt

SEQ ID NO: 5310988 - DNA, 25 bp, Homo sapien
cttagaggaacagcaatagagcaca

SEQ ID NO: 5310989 - DNA, 25 bp, Homo sapien
ttgaaaaagagcgaaggcacccagt

SEQ ID NO: 5310990 - DNA, 25 bp, Homo sapien
acttctgggccataagagtccttgc

SEQ ID NO: 5310991 - DNA, 25 bp, Homo sapien
taaagctgttagtacggcgtctggc

SEQ ID NO: 5310992 - DNA, 25 bp, Homo sapien
taagcaacttgctagggaggccaca

SEQ ID NO: 5310993 - DNA, 25 bp, Homo sapien
cagagcagctggcggtggcattcct

SEQ ID NO: 5310994 - DNA, 25 bp, Homo sapien
gaaatgagctggcggttgccacagt

SEQ ID NO: 5310995 - DNA, 25 bp, Homo sapien
aaatgagctggcggttgccacagtt

SEQ ID NO: 5310996 - DNA, 25 bp, Homo sapien
gagcagctggcggtggcattcctgg

SEQ ID NO: 5310997 - DNA, 25 bp, Homo sapien
tggatcccgtgagtatcctccttcc

SEQ ID NO: 5310998 - DNA, 25 bp, Homo sapien
gtccacctgagctgggcgttagcct

SEQ ID NO: 5310999 - DNA, 25 bp, Homo sapien
ctgggcgttagcctgagcctttgcc

SEQ ID NO: 5311000 - DNA, 25 bp, Homo sapien
gtatggatcccgtgagtatcctcct

SEQ ID NO: 5311001 - DNA, 25 bp, Homo sapien
tccaggaccacaatgctttcttgag

SEQ ID NO: 5311002 - DNA, 25 bp, Homo sapien
aggaccacaatgctttcttgagcag

SEQ ID NO: 5311003 - DNA, 25 bp, Homo sapien
ttccaggaccacaatgctttcttga

SEQ ID NO: 5311004 - DNA, 25 bp, Homo sapien
atgggttccaggaccacaatgcttt

SEQ ID NO: 5311005 - DNA, 25 bp, Homo sapien
actctgttccaagcacagatacggg

SEQ ID NO: 5311006 - DNA, 25 bp, Homo sapien
tctcagggaagatcacactcccttt

SEQ ID NO: 5311007 - DNA, 25 bp, Homo sapien
caagattgtaaggttaacaccttca

SEQ ID NO: 5311008 - DNA, 25 bp, Homo sapien
gcacagatacgggatctcttgtttt

SEQ ID NO: 5311009 - DNA, 25 bp, Homo sapien
tcccttaggtggattgtcccgcttc

SEQ ID NO: 5311010 - DNA, 25 bp, Homo sapien
tgcataacgaaaaagcccagtgttt

SEQ ID NO: 5311011 - DNA, 25 bp, Homo sapien
taggtggattgtcccgcttcctctt

SEQ ID NO: 5311012 - DNA, 25 bp, Homo sapien
ctttcctctgcataacgaaaaagcc

SEQ ID NO: 5311013 - DNA, 25 bp, Homo sapien
tctcctcggaatgctcccatccagc

SEQ ID NO: 5311014 - DNA, 25 bp, Homo sapien
ccaatgactgctatctttgtagctc

SEQ ID NO: 5311015 - DNA, 25 bp, Homo sapien
ggacaggcagctcatggccaagaag

SEQ ID NO: 5311016 - DNA, 25 bp, Homo sapien
tgggtacttcctttgtccgagcgag

SEQ ID NO: 5311017 - DNA, 25 bp, Homo sapien
ctaccgcctgcacctctatccccat

SEQ ID NO: 5311018 - DNA, 25 bp, Homo sapien
tctaccgcctgcacctctatcccca

SEQ ID NO: 5311019 - DNA, 25 bp, Homo sapien
gggtgatgctgacttgagagaaacc

SEQ ID NO: 5311020 - DNA, 25 bp, Homo sapien
ccagctcagcatgttttagatacag

SEQ ID NO: 5311021 - DNA, 25 bp, Homo sapien
tcagccccaggcctacgtactgttt

SEQ ID NO: 5311022 - DNA, 25 bp, Homo sapien
tccagcttcaggatcggggatgcct

SEQ ID NO: 5311023 - DNA, 25 bp, Homo sapien
ttatattttcacaaaactctgttga

SEQ ID NO: 5311024 - DNA, 25 bp, Homo sapien
tatattttcacaaaactctgttgac

SEQ ID NO: 5311025 - DNA, 25 bp, Homo sapien
ggtgggagaagtgctccaatgaact

SEQ ID NO: 5311026 - DNA, 25 bp, Homo sapien
ctccttgctagtgcctgacattctc

SEQ ID NO: 5311027 - DNA, 25 bp, Homo sapien
cagccccctctgagagaggtcgtgg

SEQ ID NO: 5311028 - DNA, 25 bp, Homo sapien
gagaagtgctccaatgaactccttg

SEQ ID NO: 5311029 - DNA, 25 bp, Homo sapien
ccactgaaaggagaggtgtgatgct

SEQ ID NO: 5311030 - DNA, 25 bp, Homo sapien
tgatgctggggggaatccctctgac

SEQ ID NO: 5311031 - DNA, 25 bp, Homo sapien
cctcattgttttatcccccaggaag

SEQ ID NO: 5311032 - DNA, 25 bp, Homo sapien
gaggccactgaaaggagaggtgtga

SEQ ID NO: 5311033 - DNA, 25 bp, Homo sapien
agatgaaatgacatctctgaggcca

SEQ ID NO: 5311034 - DNA, 25 bp, Homo sapien
gatgaaatgacatctctgaggccac

SEQ ID NO: 5311035 - DNA, 25 bp, Homo sapien
tcaggtgctccctcttgctccagag

SEQ ID NO: 5311036 - DNA, 25 bp, Homo sapien
cagagccggtcaggtgctccctctt

SEQ ID NO: 5311037 - DNA, 25 bp, Homo sapien
aaggcatccatccttaaaaatcaca

SEQ ID NO: 5311038 - DNA, 25 bp, Homo sapien
atcacatcagtgcagacacggcaca

SEQ ID NO: 5311039 - DNA, 25 bp, Homo sapien
tctggagacctcctacaaggccagg

SEQ ID NO: 5311040 - DNA, 25 bp, Homo sapien
tcctggggccaaggtacattggacc

SEQ ID NO: 5311041 - DNA, 25 bp, Homo sapien
caaggtacattggacccaccatctc

SEQ ID NO: 5311042 - DNA, 25 bp, Homo sapien
agggttctggagacctcctacaagg

SEQ ID NO: 5311043 - DNA, 25 bp, Homo sapien
taatcagagtgctgtgccacatgtg

SEQ ID NO: 5311044 - DNA, 25 bp, Homo sapien
gcctgatgattaacttctgtctgga

SEQ ID NO: 5311045 - DNA, 25 bp, Homo sapien
gatgctgagcaactattgcagcctg

SEQ ID NO: 5311046 - DNA, 25 bp, Homo sapien
tatactgattccatgggagccatcc

SEQ ID NO: 5311047 - DNA, 25 bp, Homo sapien
agtcatcattatccttgagttcccc

SEQ ID NO: 5311048 - DNA, 25 bp, Homo sapien
tttctctgaattccaattacaagag

SEQ ID NO: 5311049 - DNA, 25 bp, Homo sapien
gagttcccctgacaaattcactact

SEQ ID NO: 5311050 - DNA, 25 bp, Homo sapien
tttatatactatgggtcttagaata

SEQ ID NO: 5311051 - DNA, 25 bp, Homo sapien
cttgtggaatcttttacttgctgtt

SEQ ID NO: 5311052 - DNA, 25 bp, Homo sapien
ttgctgttttaatgtttctttcaaa

SEQ ID NO: 5311053 - DNA, 25 bp, Homo sapien
ttgtggaatcttttacttgctgttt

SEQ ID NO: 5311054 - DNA, 25 bp, Homo sapien
taatgtttctttcaaacgactccat

SEQ ID NO: 5311055 - DNA, 25 bp, Homo sapien
tgtgaaaaccccagtaaagcctctg

SEQ ID NO: 5311056 - DNA, 25 bp, Homo sapien
tctctaggcgtctgtgagggcaaac

SEQ ID NO: 5311057 - DNA, 25 bp, Homo sapien
taatattagcttggtactggccagg

SEQ ID NO: 5311058 - DNA, 25 bp, Homo sapien
gaaataaccgtagaaacctgcaagc

SEQ ID NO: 5311059 - DNA, 25 bp, Homo sapien
cagtagagcccagtagcaatgaaac

SEQ ID NO: 5311060 - DNA, 25 bp, Homo sapien
tgaaacaacacattgtggccaggca

SEQ ID NO: 5311061 - DNA, 25 bp, Homo sapien
tgtaatcacgataccttgggaggct

SEQ ID NO: 5311062 - DNA, 25 bp, Homo sapien
ttagctgggcgcagggatgcattcc

SEQ ID NO: 5311063 - DNA, 25 bp, Homo sapien
gacattcttagagacgccactgaag

SEQ ID NO: 5311064 - DNA, 25 bp, Homo sapien
tatttcttctggactcctacaggct

SEQ ID NO: 5311065 - DNA, 25 bp, Homo sapien
gatgatgataccctgaaagcacctg

SEQ ID NO: 5311066 - DNA, 25 bp, Homo sapien
ccactgaagacctagtgctgggttg

SEQ ID NO: 5311067 - DNA, 25 bp, Homo sapien
ttgtttaagggtcagacctgccgca

SEQ ID NO: 5311068 - DNA, 25 bp, Homo sapien
gacctgccgcatgtacttttcacaa

SEQ ID NO: 5311069 - DNA, 25 bp, Homo sapien
gccctgcattccacacgtcagaaga

SEQ ID NO: 5311070 - DNA, 25 bp, Homo sapien
cagtggctaaacagtgaatgacagg

SEQ ID NO: 5311071 - DNA, 25 bp, Homo sapien
acagggcgaactcaaggccagtgga

SEQ ID NO: 5311072 - DNA, 25 bp, Homo sapien
gggcgaactcaaggccagtggattc

SEQ ID NO: 5311073 - DNA, 25 bp, Homo sapien
ggcgaactcaaggccagtggattct

SEQ ID NO: 5311074 - DNA, 25 bp, Homo sapien
agggcgaactcaaggccagtggatt

SEQ ID NO: 5311075 - DNA, 25 bp, Homo sapien
tgatagtgatgttagcagattttta

SEQ ID NO: 5311076 - DNA, 25 bp, Homo sapien
aacctaaaggcctggactgtactct

SEQ ID NO: 5311077 - DNA, 25 bp, Homo sapien
ttattcaacctaaaggcctggactg

SEQ ID NO: 5311078 - DNA, 25 bp, Homo sapien
attcaacctaaaggcctggactgta

SEQ ID NO: 5311079 - DNA, 25 bp, Homo sapien
gccttggcaaaccacaaagagctac

SEQ ID NO: 5311080 - DNA, 25 bp, Homo sapien
gagtcagtgaaccagaaagccttgg

SEQ ID NO: 5311081 - DNA, 25 bp, Homo sapien
accacaaagagctacgaccagaggc

SEQ ID NO: 5311082 - DNA, 25 bp, Homo sapien
cttttgagtcagtgaaccagaaagc

SEQ ID NO: 5311083 - DNA, 25 bp, Homo sapien
cagactgttagggtttaaatatcag

SEQ ID NO: 5311084 - DNA, 25 bp, Homo sapien
taaatatcagttacactcctttcta

SEQ ID NO: 5311085 - DNA, 25 bp, Homo sapien
ttataacatgtgtgtattaatagtg

SEQ ID NO: 5311086 - DNA, 25 bp, Homo sapien
tcagttacactcctttctagttgcg

SEQ ID NO: 5311087 - DNA, 25 bp, Homo sapien
tcctaataggccagtactggtctgt

SEQ ID NO: 5311088 - DNA, 25 bp, Homo sapien
gacaatcaaggtcgccactgatctg

SEQ ID NO: 5311089 - DNA, 25 bp, Homo sapien
tgccatgcgcagttcactagagggt

SEQ ID NO: 5311090 - DNA, 25 bp, Homo sapien
taggcgatcccatctcggagtgatg

SEQ ID NO: 5311091 - DNA, 25 bp, Homo sapien
cagccaggaccagctacctaattta

SEQ ID NO: 5311092 - DNA, 25 bp, Homo sapien
tctataccatctgctacagccagga

SEQ ID NO: 5311093 - DNA, 25 bp, Homo sapien
cctaatttacaagtctcagcacaaa

SEQ ID NO: 5311094 - DNA, 25 bp, Homo sapien
tgctacagccaggaccagctaccta

SEQ ID NO: 5311095 - DNA, 25 bp, Homo sapien
ggctagaccaccagactgacatgcc

SEQ ID NO: 5311096 - DNA, 25 bp, Homo sapien
ggagtaggaggtgggctgcccgtga

SEQ ID NO: 5311097 - DNA, 25 bp, Homo sapien
tagaccaccagactgacatgccata

SEQ ID NO: 5311098 - DNA, 25 bp, Homo sapien
tgcccgtgactgcatatccatgcac

SEQ ID NO: 5311099 - DNA, 25 bp, Homo sapien
gcctgggaagcatagcgagacctcc

SEQ ID NO: 5311100 - DNA, 25 bp, Homo sapien
ctgggaagcatagcgagacctccca

SEQ ID NO: 5311101 - DNA, 25 bp, Homo sapien
tgagtccagcctgggaagcatagcg

SEQ ID NO: 5311102 - DNA, 25 bp, Homo sapien
tttgagtccagcctgggaagcatag

SEQ ID NO: 5311103 - DNA, 25 bp, Homo sapien
gtctggaatgtaatagctcaatctc

SEQ ID NO: 5311104 - DNA, 25 bp, Homo sapien
cccagtctggaatgtaatagctcaa

SEQ ID NO: 5311105 - DNA, 25 bp, Homo sapien
acccagtctggaatgtaatagctca

SEQ ID NO: 5311106 - DNA, 25 bp, Homo sapien
cagtctggaatgtaatagctcaatc

SEQ ID NO: 5311107 - DNA, 25 bp, Homo sapien
tcttggcccaaattatgtgctggct

SEQ ID NO: 5311108 - DNA, 25 bp, Homo sapien
cacagttaaccaaatcttggcccaa

SEQ ID NO: 5311109 - DNA, 25 bp, Homo sapien
gcagctgtgagacccctccttgccc

SEQ ID NO: 5311110 - DNA, 25 bp, Homo sapien
cttgtcccaatccacagttaaccaa

SEQ ID NO: 5311111 - DNA, 25 bp, Homo sapien
ttacgggagctcataggattcgcct

SEQ ID NO: 5311112 - DNA, 25 bp, Homo sapien
gccaggtgagtcaggtgctgctgcc

SEQ ID NO: 5311113 - DNA, 25 bp, Homo sapien
gccttacgggagctcataggattcg

SEQ ID NO: 5311114 - DNA, 25 bp, Homo sapien
agccaggtgagtcaggtgctgctgc

SEQ ID NO: 5311115 - DNA, 25 bp, Homo sapien
tccaagaaattggattctggaatct

SEQ ID NO: 5311116 - DNA, 25 bp, Homo sapien
aatccaagaaattggattctggaat

SEQ ID NO: 5311117 - DNA, 25 bp, Homo sapien
aagaaattggattctggaatctgag

SEQ ID NO: 5311118 - DNA, 25 bp, Homo sapien
ccaagaaattggattctggaatctg

SEQ ID NO: 5311119 - DNA, 25 bp, Homo sapien
tttggatctctgggcgaacctcttt

SEQ ID NO: 5311120 - DNA, 25 bp, Homo sapien
tggatctctgggcgaacctctttcc

SEQ ID NO: 5311121 - DNA, 25 bp, Homo sapien
atctctgggcgaacctctttccttt

SEQ ID NO: 5311122 - DNA, 25 bp, Homo sapien
tggtcatccagtctgcccgccacac

SEQ ID NO: 5311123 - DNA, 25 bp, Homo sapien
gatggagaggaattttggtattgca

SEQ ID NO: 5311124 - DNA, 25 bp, Homo sapien
cttccttctggaacttgagagcttg

SEQ ID NO: 5311125 - DNA, 25 bp, Homo sapien
tcgtcctcttcgacctagcatgcag

SEQ ID NO: 5311126 - DNA, 25 bp, Homo sapien
ggaaggagacacctacctatccagc

SEQ ID NO: 5311127 - DNA, 25 bp, Homo sapien
ccagtcctctatcggggctggtcgt

SEQ ID NO: 5311128 - DNA, 25 bp, Homo sapien
gagtcagtttcgtgtacagtgatga

SEQ ID NO: 5311129 - DNA, 25 bp, Homo sapien
cagactatgacacttgacaactccc

SEQ ID NO: 5311130 - DNA, 25 bp, Homo sapien
tcaatctgggtattctgagtcagtt

SEQ ID NO: 5311131 - DNA, 25 bp, Homo sapien
gctcagccagactatgacacttgac

SEQ ID NO: 5311132 - DNA, 25 bp, Homo sapien
tcgtcgctgtcctcccgacgcggac

SEQ ID NO: 5311133 - DNA, 25 bp, Homo sapien
acgcggacccgcgtgccccaggcct

SEQ ID NO: 5311134 - DNA, 25 bp, Homo sapien
tcggcgcgcgcgcagcatggcgccc

SEQ ID NO: 5311135 - DNA, 25 bp, Homo sapien
ggctcctcgtgtcccactcccggcg

SEQ ID NO: 5311136 - DNA, 25 bp, Homo sapien
aaatataagcagcttgaaactggct

SEQ ID NO: 5311137 - DNA, 25 bp, Homo sapien
tgtgcgtgggacgaagacatctttg

SEQ ID NO: 5311138 - DNA, 25 bp, Homo sapien
cacaagtgtcttatatatgcagatc

SEQ ID NO: 5311139 - DNA, 25 bp, Homo sapien
tttgtaatagtgaaacctgtactca

SEQ ID NO: 5311140 - DNA, 25 bp, Homo sapien
aaagctgcctttctatttacttgag

SEQ ID NO: 5311141 - DNA, 25 bp, Homo sapien
cttggactccatcgttaaaattatt

SEQ ID NO: 5311142 - DNA, 25 bp, Homo sapien
tgtgtgcattaaatatgcttccaca

SEQ ID NO: 5311143 - DNA, 25 bp, Homo sapien
tacttgagtcttgtacatacatact

SEQ ID NO: 5311144 - DNA, 25 bp, Homo sapien
gcttcactggtatgaatctctcctg

SEQ ID NO: 5311145 - DNA, 25 bp, Homo sapien
tcccaggatttgtccttagttctat

SEQ ID NO: 5311146 - DNA, 25 bp, Homo sapien
ctgattgtgtaatactgatgttccc

SEQ ID NO: 5311147 - DNA, 25 bp, Homo sapien
tattaccttctgtgaggctcaatga

SEQ ID NO: 5311148 - DNA, 25 bp, Homo sapien
gcgacttctatacggcgcacggcga

SEQ ID NO: 5311149 - DNA, 25 bp, Homo sapien
ggcttcgtgcgcttctttcagggca

SEQ ID NO: 5311150 - DNA, 25 bp, Homo sapien
cgttggtgcttgtgcggattccgcc

SEQ ID NO: 5311151 - DNA, 25 bp, Homo sapien
tcctttcccgcctcagagagtgggc

SEQ ID NO: 5311152 - DNA, 25 bp, Homo sapien
tggcgcagtttccgctcactgcaag

SEQ ID NO: 5311153 - DNA, 25 bp, Homo sapien
tatatgaaatccagcttggagagaa

SEQ ID NO: 5311154 - DNA, 25 bp, Homo sapien
gtttcaagcgattaagtgattctcc

SEQ ID NO: 5311155 - DNA, 25 bp, Homo sapien
atggaatcttgctcccgtcgggcag

SEQ ID NO: 5311156 - DNA, 25 bp, Homo sapien
gatttgatctagataaggcattcca

SEQ ID NO: 5311157 - DNA, 25 bp, Homo sapien
cagacttggtgaagctcaatgctta

SEQ ID NO: 5311158 - DNA, 25 bp, Homo sapien
caaatgtagagttatatgccacaaa

SEQ ID NO: 5311159 - DNA, 25 bp, Homo sapien
taatttgactacatccattgtttct

SEQ ID NO: 5311160 - DNA, 25 bp, Homo sapien
aaaatattttccgtagcagtaggca

SEQ ID NO: 5311161 - DNA, 25 bp, Homo sapien
tttaagccagcagtctcaacctggg

SEQ ID NO: 5311162 - DNA, 25 bp, Homo sapien
gggctataaacttggcagcaaattg

SEQ ID NO: 5311163 - DNA, 25 bp, Homo sapien
ttagctgcctagacgttagctggac

SEQ ID NO: 5311164 - DNA, 25 bp, Homo sapien
tccataaaaaacacgtatctgttgt

SEQ ID NO: 5311165 - DNA, 25 bp, Homo sapien
caagcttagtgtgtgtcagtttcat

SEQ ID NO: 5311166 - DNA, 25 bp, Homo sapien
tgtgtactctaattttgggattgct

SEQ ID NO: 5311167 - DNA, 25 bp, Homo sapien
gctaatttttgatctgctgggttac

SEQ ID NO: 5311168 - DNA, 25 bp, Homo sapien
acaagtgtgagtttagagaggtata

SEQ ID NO: 5311169 - DNA, 25 bp, Homo sapien
cctggtcctggaaacatgtactgca

SEQ ID NO: 5311170 - DNA, 25 bp, Homo sapien
taattttaggtatggcaggctgcca

SEQ ID NO: 5311171 - DNA, 25 bp, Homo sapien
gctgccatcctaaatatgaagtggt

SEQ ID NO: 5311172 - DNA, 25 bp, Homo sapien
gtgatccaggattaggcagactctt

SEQ ID NO: 5311173 - DNA, 25 bp, Homo sapien
taacctctgtggtgcagtgctagga

SEQ ID NO: 5311174 - DNA, 25 bp, Homo sapien
gatcacactgttgcttgctgccctg

SEQ ID NO: 5311175 - DNA, 25 bp, Homo sapien
tattgactaagctagcccggtgact

SEQ ID NO: 5311176 - DNA, 25 bp, Homo sapien
gaaatagttcatcccgtggttgtga

SEQ ID NO: 5311177 - DNA, 25 bp, Homo sapien
tctgagacattaatgcaactgtttt

SEQ ID NO: 5311178 - DNA, 25 bp, Homo sapien
agtataattgaatctgagacattaa

SEQ ID NO: 5311179 - DNA, 25 bp, Homo sapien
gagataggttaatgccaaattaagt

SEQ ID NO: 5311180 - DNA, 25 bp, Homo sapien
tagagataggttaatgccaaattaa

SEQ ID NO: 5311181 - DNA, 25 bp, Homo sapien
tacttgggtggctgaggcaggagaa

SEQ ID NO: 5311182 - DNA, 25 bp, Homo sapien
aatacaaaaagccatgcatggtggc

SEQ ID NO: 5311183 - DNA, 25 bp, Homo sapien
gcctgtagtcccagctacttgggtg

SEQ ID NO: 5311184 - DNA, 25 bp, Homo sapien
caaaaagccatgcatggtggcgggt

SEQ ID NO: 5311185 - DNA, 25 bp, Homo sapien
ggcactcttgggtatgacactgtat

SEQ ID NO: 5311186 - DNA, 25 bp, Homo sapien
gaggctcacttgcttctcgacaggc

SEQ ID NO: 5311187 - DNA, 25 bp, Homo sapien
gaaacttcttgtgagcttgcgatga

SEQ ID NO: 5311188 - DNA, 25 bp, Homo sapien
tgtggcacttgcatcagaccttgga

SEQ ID NO: 5311189 - DNA, 25 bp, Homo sapien
ttgggacactattagggtctgtagc

SEQ ID NO: 5311190 - DNA, 25 bp, Homo sapien
gacactattagggtctgtagcattg

SEQ ID NO: 5311191 - DNA, 25 bp, Homo sapien
ctttttgggacactattagggtctg

SEQ ID NO: 5311192 - DNA, 25 bp, Homo sapien
cactattagggtctgtagcattggt

SEQ ID NO: 5311193 - DNA, 25 bp, Homo sapien
ttccataggcacaccaagccacctg

SEQ ID NO: 5311194 - DNA, 25 bp, Homo sapien
cataggcacaccaagccacctggag

SEQ ID NO: 5311195 - DNA, 25 bp, Homo sapien
acaccaagccacctggagagcgcat

SEQ ID NO: 5311196 - DNA, 25 bp, Homo sapien
ggcacaccaagccacctggagagcg

SEQ ID NO: 5311197 - DNA, 25 bp, Homo sapien
ctttgggtctgggaactttggtgct

SEQ ID NO: 5311198 - DNA, 25 bp, Homo sapien
ttgggtctgggaactttggtgcttg

SEQ ID NO: 5311199 - DNA, 25 bp, Homo sapien
tctttgggtctgggaactttggtgc

SEQ ID NO: 5311200 - DNA, 25 bp, Homo sapien
tgggtctgggaactttggtgcttgt

SEQ ID NO: 5311201 - DNA, 25 bp, Homo sapien
gtgctggtcactttattctcagctg

SEQ ID NO: 5311202 - DNA, 25 bp, Homo sapien
cttataggcagcctctgattcacct

SEQ ID NO: 5311203 - DNA, 25 bp, Homo sapien
gcttgtggcctagccctaacatggg

SEQ ID NO: 5311204 - DNA, 25 bp, Homo sapien
ctttctgggtacaagtatttgagac

SEQ ID NO: 5311205 - DNA, 25 bp, Homo sapien
cgggagcgaagcacctaaagcacat

SEQ ID NO: 5311206 - DNA, 25 bp, Homo sapien
cctaaagcacatgggtgcaggagca

SEQ ID NO: 5311207 - DNA, 25 bp, Homo sapien
tttctctagcgggagcgaagcacct

SEQ ID NO: 5311208 - DNA, 25 bp, Homo sapien
ctctggagtttctctagcgggagcg

SEQ ID NO: 5311209 - DNA, 25 bp, Homo sapien
taagaaagcgccagcagtgactgag

SEQ ID NO: 5311210 - DNA, 25 bp, Homo sapien
actgagagaagcaaaccacgcccgg

SEQ ID NO: 5311211 - DNA, 25 bp, Homo sapien
taaagattaagaaagcgccagcagt

SEQ ID NO: 5311212 - DNA, 25 bp, Homo sapien
agagaagcaaaccacgcccggcggc

SEQ ID NO: 5311213 - DNA, 25 bp, Homo sapien
acgaagcagaagtagagcgagtcca

SEQ ID NO: 5311214 - DNA, 25 bp, Homo sapien
caggatgagcagcacgtggtacacc

SEQ ID NO: 5311215 - DNA, 25 bp, Homo sapien
tccacgctggtgtacatggccgagg

SEQ ID NO: 5311216 - DNA, 25 bp, Homo sapien
gccagccggttgttcatgatgccca

SEQ ID NO: 5311217 - DNA, 25 bp, Homo sapien
cagcgcggtcctggccgcgcaggtg

SEQ ID NO: 5311218 - DNA, 25 bp, Homo sapien
tcagcgcggtcctggccgcgcaggt

SEQ ID NO: 5311219 - DNA, 25 bp, Homo sapien
gtcagcgcggtcctggccgcgcagg

SEQ ID NO: 5311220 - DNA, 25 bp, Homo sapien
gggcatgcaggtgcttgcgcggctc

SEQ ID NO: 5311221 - DNA, 25 bp, Homo sapien
gcggctcctatctcgagtggcacca

SEQ ID NO: 5311222 - DNA, 25 bp, Homo sapien
gtgcttgcgcggctcctatctcgag

SEQ ID NO: 5311223 - DNA, 25 bp, Homo sapien
tgcgcggctcctatctcgagtggca

SEQ ID NO: 5311224 - DNA, 25 bp, Homo sapien
tagtcatttatctcccttggtggca

SEQ ID NO: 5311225 - DNA, 25 bp, Homo sapien
ctgatcttggcagcccctaaactga

SEQ ID NO: 5311226 - DNA, 25 bp, Homo sapien
ggaagaacagcacttagtcatttat

SEQ ID NO: 5311227 - DNA, 25 bp, Homo sapien
tcctgatcttggcagcccctaaact

SEQ ID NO: 5311228 - DNA, 25 bp, Homo sapien
gccaagtaatcttagtgctgtgact

SEQ ID NO: 5311229 - DNA, 25 bp, Homo sapien
ggaaactccactgcctacttgagaa

SEQ ID NO: 5311230 - DNA, 25 bp, Homo sapien
gaaaaggcctttggtcaaacgatca

SEQ ID NO: 5311231 - DNA, 25 bp, Homo sapien
ctttacaggcacttcgaaaaggcct

SEQ ID NO: 5311232 - DNA, 25 bp, Homo sapien
tggctctgccattgggtgccggctc

SEQ ID NO: 5311233 - DNA, 25 bp, Homo sapien
ttcagagactgagcatggctctgcc

SEQ ID NO: 5311234 - DNA, 25 bp, Homo sapien
ttctcaaccaaggatcaccatcagt

SEQ ID NO: 5311235 - DNA, 25 bp, Homo sapien
acccttcagagactgagcatggctc

SEQ ID NO: 5311236 - DNA, 25 bp, Homo sapien
caggctttaagggtgtctttatcaa

SEQ ID NO: 5311237 - DNA, 25 bp, Homo sapien
aggctttaagggtgtctttatcaat

SEQ ID NO: 5311238 - DNA, 25 bp, Homo sapien
acaggctttaagggtgtctttatca

SEQ ID NO: 5311239 - DNA, 25 bp, Homo sapien
cacaggctttaagggtgtctttatc

SEQ ID NO: 5311240 - DNA, 25 bp, Homo sapien
caccgcgcccagctgtgattttcat

SEQ ID NO: 5311241 - DNA, 25 bp, Homo sapien
tcattttaagtttcttctatttgct

SEQ ID NO: 5311242 - DNA, 25 bp, Homo sapien
ctatttgcttttataaatatttcac

SEQ ID NO: 5311243 - DNA, 25 bp, Homo sapien
cgcgcccagctgtgattttcatttt

SEQ ID NO: 5311244 - DNA, 25 bp, Homo sapien
gcattcaagggttcaggtgtcatgt

SEQ ID NO: 5311245 - DNA, 25 bp, Homo sapien
aggcagttgggcacaaggtctgcaa

SEQ ID NO: 5311246 - DNA, 25 bp, Homo sapien
cacgtgtggtatgagaatgaaggcc

SEQ ID NO: 5311247 - DNA, 25 bp, Homo sapien
tggaactgagtagtgaagatgcctt

SEQ ID NO: 5311248 - DNA, 25 bp, Homo sapien
ccaattgatttttagcttccttcat

SEQ ID NO: 5311249 - DNA, 25 bp, Homo sapien
ttccaattgatttttagcttccttc

SEQ ID NO: 5311250 - DNA, 25 bp, Homo sapien
tccaattgatttttagcttccttca

SEQ ID NO: 5311251 - DNA, 25 bp, Homo sapien
cacaaccacctagtgaggtaagcat

SEQ ID NO: 5311252 - DNA, 25 bp, Homo sapien
tttagatgcacaatctgaggctcag

SEQ ID NO: 5311253 - DNA, 25 bp, Homo sapien
taatgtcagaatttgggtcagagac

SEQ ID NO: 5311254 - DNA, 25 bp, Homo sapien
gaataagtcatagaggtaatgtcag

SEQ ID NO: 5311255 - DNA, 25 bp, Homo sapien
tgctgtattgctgggtgctcctgtt

SEQ ID NO: 5311256 - DNA, 25 bp, Homo sapien
tgaagacactgtagaaacccgtggg

SEQ ID NO: 5311257 - DNA, 25 bp, Homo sapien
aaacccgtgggaagctctgctgtat

SEQ ID NO: 5311258 - DNA, 25 bp, Homo sapien
cccgtgggaagctctgctgtattgc

SEQ ID NO: 5311259 - DNA, 25 bp, Homo sapien
ctgtggcaagacaacctagaaggtg

SEQ ID NO: 5311260 - DNA, 25 bp, Homo sapien
gatgggggatgggtcattccctcct

SEQ ID NO: 5311261 - DNA, 25 bp, Homo sapien
ggatcaggacggtcatgcaggctgg

SEQ ID NO: 5311262 - DNA, 25 bp, Homo sapien
cttctccgagacatgtgctctgctg

SEQ ID NO: 5311263 - DNA, 25 bp, Homo sapien
tcaatcctgcaacccagaggagctg

SEQ ID NO: 5311264 - DNA, 25 bp, Homo sapien
tcctgaagggcctgcatcacctcct

SEQ ID NO: 5311265 - DNA, 25 bp, Homo sapien
cattcaatcctgcaacccagaggag

SEQ ID NO: 5311266 - DNA, 25 bp, Homo sapien
atcctgcaacccagaggagctgggc

SEQ ID NO: 5311267 - DNA, 25 bp, Homo sapien
ttaggcagagtctccctcaagccaa

SEQ ID NO: 5311268 - DNA, 25 bp, Homo sapien
taggcagagtctccctcaagccaac

SEQ ID NO: 5311269 - DNA, 25 bp, Homo sapien
cacccttcaggaggcgagttctgag

SEQ ID NO: 5311270 - DNA, 25 bp, Homo sapien
tgggaagcacgtgctctaccctctc

SEQ ID NO: 5311271 - DNA, 25 bp, Homo sapien
ggagctcggtcctcttcaacaagtt

SEQ ID NO: 5311272 - DNA, 25 bp, Homo sapien
ctggtgtgcttaagggaggccctcc

SEQ ID NO: 5311273 - DNA, 25 bp, Homo sapien
cagatcctgtcctgctccgggaggc

SEQ ID NO: 5311274 - DNA, 25 bp, Homo sapien
gatactggtgggctctgtggcctcc

SEQ ID NO: 5311275 - DNA, 25 bp, Homo sapien
cacccaccagggagtcatggtagcc

SEQ ID NO: 5311276 - DNA, 25 bp, Homo sapien
tccccagaacaaaggcattggctgc

SEQ ID NO: 5311277 - DNA, 25 bp, Homo sapien
gctgttgagtataaagacactgtga

SEQ ID NO: 5311278 - DNA, 25 bp, Homo sapien
aaatctgcaattacaagattctgga

SEQ ID NO: 5311279 - DNA, 25 bp, Homo sapien
ttacaagattctggatgcttcatcc

SEQ ID NO: 5311280 - DNA, 25 bp, Homo sapien
caattacaagattctggatgcttca

SEQ ID NO: 5311281 - DNA, 25 bp, Homo sapien
tccacacactttccggattgctggc

SEQ ID NO: 5311282 - DNA, 25 bp, Homo sapien
cacactttccggattgctggctggt

SEQ ID NO: 5311283 - DNA, 25 bp, Homo sapien
gctccacacactttccggattgctg

SEQ ID NO: 5311284 - DNA, 25 bp, Homo sapien
ttgggctccacacactttccggatt

SEQ ID NO: 5311285 - DNA, 25 bp, Homo sapien
gccagaaaacttggggaggactcca

SEQ ID NO: 5311286 - DNA, 25 bp, Homo sapien
gggtgacacaggaatagaccaacgg

SEQ ID NO: 5311287 - DNA, 25 bp, Homo sapien
caggaatagaccaacggccttttgt

SEQ ID NO: 5311288 - DNA, 25 bp, Homo sapien
ttttgttgtttccaagatcctctga

SEQ ID NO: 5311289 - DNA, 25 bp, Homo sapien
ctttggcaatattgatgtaactctt

SEQ ID NO: 5311290 - DNA, 25 bp, Homo sapien
caagactgagtggaaatatgttctc

SEQ ID NO: 5311291 - DNA, 25 bp, Homo sapien
ggcccaggaatagcggcagaccatt

SEQ ID NO: 5311292 - DNA, 25 bp, Homo sapien
ggcccttgggcatagtcaagactga

SEQ ID NO: 5311293 - DNA, 25 bp, Homo sapien
aattctgagctgttcgacgcggagg

SEQ ID NO: 5311294 - DNA, 25 bp, Homo sapien
cattaaaacaagggaggttgaagat

SEQ ID NO: 5311295 - DNA, 25 bp, Homo sapien
acgccacaggcttgttcgggaggca

SEQ ID NO: 5311296 - DNA, 25 bp, Homo sapien
caaaggaagctgctctcattaaaac

SEQ ID NO: 5311297 - DNA, 25 bp, Homo sapien
ggttgaagatcctaacgccacaggc

SEQ ID NO: 5311298 - DNA, 25 bp, Homo sapien
gaagtgaccaatttgaaccactgac

SEQ ID NO: 5311299 - DNA, 25 bp, Homo sapien
gagaaagctgaaatgccaattatgc

SEQ ID NO: 5311300 - DNA, 25 bp, Homo sapien
tgaaatgccaattatgctacttggg

SEQ ID NO: 5311301 - DNA, 25 bp, Homo sapien
acttatctgactgatggaagtgacc

SEQ ID NO: 5311302 - DNA, 25 bp, Homo sapien
agcaggggcaataatcagcagagac

SEQ ID NO: 5311303 - DNA, 25 bp, Homo sapien
cagcaggggcaataatcagcagaga

SEQ ID NO: 5311304 - DNA, 25 bp, Homo sapien
gcaggggcaataatcagcagagacc

SEQ ID NO: 5311305 - DNA, 25 bp, Homo sapien
ggttcaaccctgagctgtacacagg

SEQ ID NO: 5311306 - DNA, 25 bp, Homo sapien
gattttggaagcaacgtgctgggtc

SEQ ID NO: 5311307 - DNA, 25 bp, Homo sapien
gggtcactcgtaatataaccacatg

SEQ ID NO: 5311308 - DNA, 25 bp, Homo sapien
cacatgcttcagtgtagccctccta

SEQ ID NO: 5311309 - DNA, 25 bp, Homo sapien
ggctcacaaaggtcagatcacagag

SEQ ID NO: 5311310 - DNA, 25 bp, Homo sapien
cggccagtgttggagcacaggcggc

SEQ ID NO: 5311311 - DNA, 25 bp, Homo sapien
tcacaaaggtcagatcacagagccg

SEQ ID NO: 5311312 - DNA, 25 bp, Homo sapien
ggtcagatcacagagccggccagtg

SEQ ID NO: 5311313 - DNA, 25 bp, Homo sapien
ccagcagcacgaagcggccggtgtc

SEQ ID NO: 5311314 - DNA, 25 bp, Homo sapien
tcgagcgccgagaagactgtggcac

SEQ ID NO: 5311315 - DNA, 25 bp, Homo sapien
gcgcggcctcgtagtgccggaggaa

SEQ ID NO: 5311316 - DNA, 25 bp, Homo sapien
tgaagttgcgcagcgtggcgcccca

SEQ ID NO: 5311317 - DNA, 25 bp, Homo sapien
ctcgttgaggtgcgaacggcggcag

SEQ ID NO: 5311318 - DNA, 25 bp, Homo sapien
gttgaggtgcgaacggcggcagcag

SEQ ID NO: 5311319 - DNA, 25 bp, Homo sapien
cgttgaggtgcgaacggcggcagca

SEQ ID NO: 5311320 - DNA, 25 bp, Homo sapien
tcgttgaggtgcgaacggcggcagc

SEQ ID NO: 5311321 - DNA, 25 bp, Homo sapien
gcgtcggcttcagagcctcggagcc

SEQ ID NO: 5311322 - DNA, 25 bp, Homo sapien
ctaggtgcgggctgtgcgggcagtc

SEQ ID NO: 5311323 - DNA, 25 bp, Homo sapien
accgggacgcggcagcaaggcgtgg

SEQ ID NO: 5311324 - DNA, 25 bp, Homo sapien
aggcgttcgggatcggcgcctccta

SEQ ID NO: 5311325 - DNA, 25 bp, Homo sapien
gacgcagcgggttccactggaaacg

SEQ ID NO: 5311326 - DNA, 25 bp, Homo sapien
gaatcggggagaggcggtcgctggg

SEQ ID NO: 5311327 - DNA, 25 bp, Homo sapien
gacagcgcatcggtgccgcagccgc

SEQ ID NO: 5311328 - DNA, 25 bp, Homo sapien
tgggctccgggcgacctgggaacga

SEQ ID NO: 5311329 - DNA, 25 bp, Homo sapien
caggtgcggtcgctgaagcaggctg

SEQ ID NO: 5311330 - DNA, 25 bp, Homo sapien
cggtcgctgaagcaggctgctgaca

SEQ ID NO: 5311331 - DNA, 25 bp, Homo sapien
gaggcaggtgcggtcgctgaagcag

SEQ ID NO: 5311332 - DNA, 25 bp, Homo sapien
gccacccgaggcaggtgcggtcgct

SEQ ID NO: 5311333 - DNA, 25 bp, Homo sapien
gactcctaaggacaagggcttgctt

SEQ ID NO: 5311334 - DNA, 25 bp, Homo sapien
caatagactcctaaggacaagggct

SEQ ID NO: 5311335 - DNA, 25 bp, Homo sapien
gaattgctgcaatagactcctaagg

SEQ ID NO: 5311336 - DNA, 25 bp, Homo sapien
taaggacaagggcttgcttagtgtc

SEQ ID NO: 5311337 - DNA, 25 bp, Homo sapien
cagggccttccagaatggaagggaa

SEQ ID NO: 5311338 - DNA, 25 bp, Homo sapien
taagattaaggggtcttgttgagaa

SEQ ID NO: 5311339 - DNA, 25 bp, Homo sapien
ttaagattaaggggtcttgttgaga

SEQ ID NO: 5311340 - DNA, 25 bp, Homo sapien
ccagggccttccagaatggaaggga

SEQ ID NO: 5311341 - DNA, 25 bp, Homo sapien
ttccattggcatttggaggacaggg

SEQ ID NO: 5311342 - DNA, 25 bp, Homo sapien
tttctttccattggcatttggagga

SEQ ID NO: 5311343 - DNA, 25 bp, Homo sapien
tttccattggcatttggaggacagg

SEQ ID NO: 5311344 - DNA, 25 bp, Homo sapien
tctttccattggcatttggaggaca

SEQ ID NO: 5311345 - DNA, 25 bp, Homo sapien
attttttcctcttatctcccaatct

SEQ ID NO: 5311346 - DNA, 25 bp, Homo sapien
tatctcccaatctcccctcttctct

SEQ ID NO: 5311347 - DNA, 25 bp, Homo sapien
ctcccctcttctctcaggtatttgt

SEQ ID NO: 5311348 - DNA, 25 bp, Homo sapien
cctcttatctcccaatctcccctct

SEQ ID NO: 5311349 - DNA, 25 bp, Homo sapien
gagagatgaaatgtcaataactttt

SEQ ID NO: 5311350 - DNA, 25 bp, Homo sapien
ggagagatgaaatgtcaataacttt

SEQ ID NO: 5311351 - DNA, 25 bp, Homo sapien
tgtcaataacttttccaatccaaaa

SEQ ID NO: 5311352 - DNA, 25 bp, Homo sapien
tggaccctcctgcatgcaagttcct

SEQ ID NO: 5311353 - DNA, 25 bp, Homo sapien
tctacctccttatagtattggaccc

SEQ ID NO: 5311354 - DNA, 25 bp, Homo sapien
tccttggggctcttattgaatatgc

SEQ ID NO: 5311355 - DNA, 25 bp, Homo sapien
gcatttgcagtctccatcaacccaa

SEQ ID NO: 5311356 - DNA, 25 bp, Homo sapien
aaaacacacgctgacctttgcctgg

SEQ ID NO: 5311357 - DNA, 25 bp, Homo sapien
tgcaacccaccgtccatggctggtt

SEQ ID NO: 5311358 - DNA, 25 bp, Homo sapien
ttgacagtcttcctctgcaacccac

SEQ ID NO: 5311359 - DNA, 25 bp, Homo sapien
cttcctaaaacacacgctgaccttt

SEQ ID NO: 5311360 - DNA, 25 bp, Homo sapien
ctttgagttttaatggattcaaatg

SEQ ID NO: 5311361 - DNA, 25 bp, Homo sapien
tttgagttttaatggattcaaatgg

SEQ ID NO: 5311362 - DNA, 25 bp, Homo sapien
tgaggttggaccaccctgaattggg

SEQ ID NO: 5311363 - DNA, 25 bp, Homo sapien
ggcttgtactccctctgaggttgga

SEQ ID NO: 5311364 - DNA, 25 bp, Homo sapien
tctcactagcgctggctgaactgcc

SEQ ID NO: 5311365 - DNA, 25 bp, Homo sapien
agcatttgaacttgagtacttcccc

SEQ ID NO: 5311366 - DNA, 25 bp, Homo sapien
caagccgtgccagggaaaatttgct

SEQ ID NO: 5311367 - DNA, 25 bp, Homo sapien
gactggctctcttcccgagcgggtg

SEQ ID NO: 5311368 - DNA, 25 bp, Homo sapien
caaattgcctgaggcccaagccgtg

SEQ ID NO: 5311369 - DNA, 25 bp, Homo sapien
gctaggcttcggtgcttgtccttct

SEQ ID NO: 5311370 - DNA, 25 bp, Homo sapien
tgatctatcccctatacccgcacca

SEQ ID NO: 5311371 - DNA, 25 bp, Homo sapien
atacccgcaccactagccttcccag

SEQ ID NO: 5311372 - DNA, 25 bp, Homo sapien
actgttttgctgtcaattactaggt

SEQ ID NO: 5311373 - DNA, 25 bp, Homo sapien
taatcatcctgatctatcccctata

SEQ ID NO: 5311374 - DNA, 25 bp, Homo sapien
tctttcaggtagatggtgcctaaga

SEQ ID NO: 5311375 - DNA, 25 bp, Homo sapien
ggtctgtggcctctgttcttgcgta

SEQ ID NO: 5311376 - DNA, 25 bp, Homo sapien
ttaatcactagaggtctgtggcctc

SEQ ID NO: 5311377 - DNA, 25 bp, Homo sapien
tctcccaccgttcttcccttgctat

SEQ ID NO: 5311378 - DNA, 25 bp, Homo sapien
tgtcccgtggttgagagattcatag

SEQ ID NO: 5311379 - DNA, 25 bp, Homo sapien
cccgtggttgagagattcataggcc

SEQ ID NO: 5311380 - DNA, 25 bp, Homo sapien
tggttgagagattcataggccccaa

SEQ ID NO: 5311381 - DNA, 25 bp, Homo sapien
cgtggttgagagattcataggcccc

SEQ ID NO: 5311382 - DNA, 25 bp, Homo sapien
attctgaacatatcctgaccatgtt

SEQ ID NO: 5311383 - DNA, 25 bp, Homo sapien
tctgaacatatcctgaccatgtttg

SEQ ID NO: 5311384 - DNA, 25 bp, Homo sapien
ctgaacatatcctgaccatgtttgc

SEQ ID NO: 5311385 - DNA, 25 bp, Homo sapien
tgaacatatcctgaccatgtttgcc

SEQ ID NO: 5311386 - DNA, 25 bp, Homo sapien
agagatacggtcctgagcacacagc

SEQ ID NO: 5311387 - DNA, 25 bp, Homo sapien
gcttccctgaattgtcagtcatgac

SEQ ID NO: 5311388 - DNA, 25 bp, Homo sapien
agtcatgactgccttgctttggatt

SEQ ID NO: 5311389 - DNA, 25 bp, Homo sapien
tgcccaccttacaccactgagttgc

SEQ ID NO: 5311390 - DNA, 25 bp, Homo sapien
tccacattcacttagcacctctgtg

SEQ ID NO: 5311391 - DNA, 25 bp, Homo sapien
acattcacttagcacctctgtgggc

SEQ ID NO: 5311392 - DNA, 25 bp, Homo sapien
tcacttagcacctctgtgggcaaga

SEQ ID NO: 5311393 - DNA, 25 bp, Homo sapien
gatggggaaggctccctgaacttcc

SEQ ID NO: 5311394 - DNA, 25 bp, Homo sapien
catagccactccgttatcattctgg

SEQ ID NO: 5311395 - DNA, 25 bp, Homo sapien
cttaagggccatagccactccgtta

SEQ ID NO: 5311396 - DNA, 25 bp, Homo sapien
tagccactccgttatcattctggac

SEQ ID NO: 5311397 - DNA, 25 bp, Homo sapien
gggccatagccactccgttatcatt

SEQ ID NO: 5311398 - DNA, 25 bp, Homo sapien
ctcatagagaaccagccatgccctg

SEQ ID NO: 5311399 - DNA, 25 bp, Homo sapien
gagtattaggtatggtgatattttc

SEQ ID NO: 5311400 - DNA, 25 bp, Homo sapien
tcctggttatcttgctgctcataga

SEQ ID NO: 5311401 - DNA, 25 bp, Homo sapien
gatattttctggctggtgccttcct

SEQ ID NO: 5311402 - DNA, 25 bp, Homo sapien
ccctcccctcaagaaactactgtct

SEQ ID NO: 5311403 - DNA, 25 bp, Homo sapien
cctcaagaaactactgtctaatttt

SEQ ID NO: 5311404 - DNA, 25 bp, Homo sapien
gcacaggccccctttgcaaatggtc

SEQ ID NO: 5311405 - DNA, 25 bp, Homo sapien
cccctcaagaaactactgtctaatt

SEQ ID NO: 5311406 - DNA, 25 bp, Homo sapien
tatcaattatctgagaggcaagacc

SEQ ID NO: 5311407 - DNA, 25 bp, Homo sapien
aacagccagtcccagagtcaagaga

SEQ ID NO: 5311408 - DNA, 25 bp, Homo sapien
ggcaagaccataaaccactggaaca

SEQ ID NO: 5311409 - DNA, 25 bp, Homo sapien
tgagcctagctggacacatggcaga

SEQ ID NO: 5311410 - DNA, 25 bp, Homo sapien
actacctcaatgcactctgctggcc

SEQ ID NO: 5311411 - DNA, 25 bp, Homo sapien
gaactacctcaatgcactctgctgg

SEQ ID NO: 5311412 - DNA, 25 bp, Homo sapien
tgaactacctcaatgcactctgctg

SEQ ID NO: 5311413 - DNA, 25 bp, Homo sapien
gtgaactacctcaatgcactctgct

SEQ ID NO: 5311414 - DNA, 25 bp, Homo sapien
tcccggagggcagggagatgtcccc

SEQ ID NO: 5311415 - DNA, 25 bp, Homo sapien
ctcccggagggcagggagatgtccc

SEQ ID NO: 5311416 - DNA, 25 bp, Homo sapien
agctcccggagggcagggagatgtc

SEQ ID NO: 5311417 - DNA, 25 bp, Homo sapien
ccggagggcagggagatgtcccctc

SEQ ID NO: 5311418 - DNA, 25 bp, Homo sapien
aagccaccacaatctgtaccagcag

SEQ ID NO: 5311419 - DNA, 25 bp, Homo sapien
accagcagctcaaaatgtatgtcat

SEQ ID NO: 5311420 - DNA, 25 bp, Homo sapien
taccagcagctcaaaatgtatgtca

SEQ ID NO: 5311421 - DNA, 25 bp, Homo sapien
accacaatctgtaccagcagctcaa

SEQ ID NO: 5311422 - DNA, 25 bp, Homo sapien
gagaagattgtctgccccgaaagca

SEQ ID NO: 5311423 - DNA, 25 bp, Homo sapien
ctagagaagattgtctgccccgaaa

SEQ ID NO: 5311424 - DNA, 25 bp, Homo sapien
agtatccacgtcagcctggcaccat

SEQ ID NO: 5311425 - DNA, 25 bp, Homo sapien
ccagagtttcagctctgggacacag

SEQ ID NO: 5311426 - DNA, 25 bp, Homo sapien
aattttttctgacaccttcaattga

SEQ ID NO: 5311427 - DNA, 25 bp, Homo sapien
tctccatattccaacgtctttcaca

SEQ ID NO: 5311428 - DNA, 25 bp, Homo sapien
taggacatccggaaatttctccata

SEQ ID NO: 5311429 - DNA, 25 bp, Homo sapien
ctggcacaggacataggacatccgg

SEQ ID NO: 5311430 - DNA, 25 bp, Homo sapien
ggcgttcctgagtttatttggggca

SEQ ID NO: 5311431 - DNA, 25 bp, Homo sapien
gcacacccgggcgagggccctgcac

SEQ ID NO: 5311432 - DNA, 25 bp, Homo sapien
gggcacacccgggcgagggccctgc

SEQ ID NO: 5311433 - DNA, 25 bp, Homo sapien
cgttcctgagtttatttggggcaca

SEQ ID NO: 5311434 - DNA, 25 bp, Homo sapien
ggcttgtgctgacggcgcaggaccc

SEQ ID NO: 5311435 - DNA, 25 bp, Homo sapien
agcgtggcttgtgctgacggcgcag

SEQ ID NO: 5311436 - DNA, 25 bp, Homo sapien
cccggtggggcagcgggaacttgat

SEQ ID NO: 5311437 - DNA, 25 bp, Homo sapien
gtggcttgtgctgacggcgcaggac

SEQ ID NO: 5311438 - DNA, 25 bp, Homo sapien
ggcccggccgccgtgccgggcgctc

SEQ ID NO: 5311439 - DNA, 25 bp, Homo sapien
tcatgtctcggtagcaccgggtgac

SEQ ID NO: 5311440 - DNA, 25 bp, Homo sapien
gaatggagtgggcccggccgccgtg

SEQ ID NO: 5311441 - DNA, 25 bp, Homo sapien
ccgccgtgccgggcgctcatgtctc

SEQ ID NO: 5311442 - DNA, 25 bp, Homo sapien
gcggtagaggggtggtgtgtggcat

SEQ ID NO: 5311443 - DNA, 25 bp, Homo sapien
tgtgtggcatttgggggtgggcagg

SEQ ID NO: 5311444 - DNA, 25 bp, Homo sapien
tgggggtgggcaggcagcgacccac

SEQ ID NO: 5311445 - DNA, 25 bp, Homo sapien
atttgggggtgggcaggcagcgacc

SEQ ID NO: 5311446 - DNA, 25 bp, Homo sapien
ctcgtagtgtgcccgaggccttcat

SEQ ID NO: 5311447 - DNA, 25 bp, Homo sapien
tactctcgtagtgtgcccgaggcct

SEQ ID NO: 5311448 - DNA, 25 bp, Homo sapien
tactttgtactctcgtagtgtgccc

SEQ ID NO: 5311449 - DNA, 25 bp, Homo sapien
ctctcgtagtgtgcccgaggccttc

SEQ ID NO: 5311450 - DNA, 25 bp, Homo sapien
cactgagagcatcattatcaatccg

SEQ ID NO: 5311451 - DNA, 25 bp, Homo sapien
tatcaatccgagtgctgttcagcac

SEQ ID NO: 5311452 - DNA, 25 bp, Homo sapien
ggtgaaatcatcaaatactctgagc

SEQ ID NO: 5311453 - DNA, 25 bp, Homo sapien
ggtgggtgaaatcatcaaatactct

SEQ ID NO: 5311454 - DNA, 25 bp, Homo sapien
cttcgggcctctgagaaacccctga

SEQ ID NO: 5311455 - DNA, 25 bp, Homo sapien
gaaacccctgaagtagcactacact

SEQ ID NO: 5311456 - DNA, 25 bp, Homo sapien
ctggtgaccatgaagttccttcggg

SEQ ID NO: 5311457 - DNA, 25 bp, Homo sapien
atgaagttccttcgggcctctgaga

SEQ ID NO: 5311458 - DNA, 25 bp, Homo sapien
cccattcttcccggacctttctgag

SEQ ID NO: 5311459 - DNA, 25 bp, Homo sapien
cattcttcccggacctttctgagca

SEQ ID NO: 5311460 - DNA, 25 bp, Homo sapien
ttcttcccggacctttctgagcaca

SEQ ID NO: 5311461 - DNA, 25 bp, Homo sapien
cacccattcttcccggacctttctg

SEQ ID NO: 5311462 - DNA, 25 bp, Homo sapien
ctgctgaattctggcaagatactca

SEQ ID NO: 5311463 - DNA, 25 bp, Homo sapien
tacacgtatcttcagagaatctcag

SEQ ID NO: 5311464 - DNA, 25 bp, Homo sapien
tcctcctggtgcacagaaaaactgc

SEQ ID NO: 5311465 - DNA, 25 bp, Homo sapien
ctcaaaggattctgacgggtgacca

SEQ ID NO: 5311466 - DNA, 25 bp, Homo sapien
acagaagcacgctggtagatttctc

SEQ ID NO: 5311467 - DNA, 25 bp, Homo sapien
acagcctattgtgggcactttcaag

SEQ ID NO: 5311468 - DNA, 25 bp, Homo sapien
gggcactttcaaggccccactgtgt

SEQ ID NO: 5311469 - DNA, 25 bp, Homo sapien
cacagaagcacgctggtagatttct

SEQ ID NO: 5311470 - DNA, 25 bp, Homo sapien
aatccttctaccgcagcatcctgca

SEQ ID NO: 5311471 - DNA, 25 bp, Homo sapien
tgcatagctgacactacagacgcat

SEQ ID NO: 5311472 - DNA, 25 bp, Homo sapien
atcctgcatagctgacactacagac

SEQ ID NO: 5311473 - DNA, 25 bp, Homo sapien
catagctgacactacagacgcatgc

SEQ ID NO: 5311474 - DNA, 25 bp, Homo sapien
cccgctgcccatttggagataggag

SEQ ID NO: 5311475 - DNA, 25 bp, Homo sapien
ccccgctgcccatttggagatagga

SEQ ID NO: 5311476 - DNA, 25 bp, Homo sapien
ggccccgctgcccatttggagatag

SEQ ID NO: 5311477 - DNA, 25 bp, Homo sapien
gctgcccatttggagataggaggca

SEQ ID NO: 5311478 - DNA, 25 bp, Homo sapien
tctgtagatgttcaagagaaaggcc

SEQ ID NO: 5311479 - DNA, 25 bp, Homo sapien
ctgtagatgttcaagagaaaggcct

SEQ ID NO: 5311480 - DNA, 25 bp, Homo sapien
gatgcatcaccactatactacaact

SEQ ID NO: 5311481 - DNA, 25 bp, Homo sapien
tactacaactgagccattaattttg

SEQ ID NO: 5311482 - DNA, 25 bp, Homo sapien
attagtggtaactggttttgctttg

SEQ ID NO: 5311483 - DNA, 25 bp, Homo sapien
ctgggcaagattagaaagtctgaca

SEQ ID NO: 5311484 - DNA, 25 bp, Homo sapien
gggcaagattagaaagtctgacacc

SEQ ID NO: 5311485 - DNA, 25 bp, Homo sapien
tgggcaagattagaaagtctgacac

SEQ ID NO: 5311486 - DNA, 25 bp, Homo sapien
tgtccctggacaaagaacaatggat

SEQ ID NO: 5311487 - DNA, 25 bp, Homo sapien
tgtgagatatgcaggtccagagaga

SEQ ID NO: 5311488 - DNA, 25 bp, Homo sapien
catccatgtctgagggcaattgctt

SEQ ID NO: 5311489 - DNA, 25 bp, Homo sapien
gagacacgagtatgggacttcagtc

SEQ ID NO: 5311490 - DNA, 25 bp, Homo sapien
tgggtaccagcatgaacattccctc

SEQ ID NO: 5311491 - DNA, 25 bp, Homo sapien
gaacctcccactctttgattgaagg

SEQ ID NO: 5311492 - DNA, 25 bp, Homo sapien
gagttctcctgaattagaacctccc

SEQ ID NO: 5311493 - DNA, 25 bp, Homo sapien
gattgaaggtccaaacgttgtttga

SEQ ID NO: 5311494 - DNA, 25 bp, Homo sapien
cgtataacacgtctggtttcccatg

SEQ ID NO: 5311495 - DNA, 25 bp, Homo sapien
catgccttgatcactgtgctgccac

SEQ ID NO: 5311496 - DNA, 25 bp, Homo sapien
tgctcttctggacacgtataacacg

SEQ ID NO: 5311497 - DNA, 25 bp, Homo sapien
ggtttcccatgccttgatcactgtg

SEQ ID NO: 5311498 - DNA, 25 bp, Homo sapien
tctatgggaagaagtcatcttcact

SEQ ID NO: 5311499 - DNA, 25 bp, Homo sapien
caggaggcaggccaatgtctaggca

SEQ ID NO: 5311500 - DNA, 25 bp, Homo sapien
cacttggcgaagaattgatagcggc

SEQ ID NO: 5311501 - DNA, 25 bp, Homo sapien
gttgatatttagtactgggagcagt

SEQ ID NO: 5311502 - DNA, 25 bp, Homo sapien
tcttgatctgggtaggtctgcagtc

SEQ ID NO: 5311503 - DNA, 25 bp, Homo sapien
gacacgggttttgtgaagggtctgc

SEQ ID NO: 5311504 - DNA, 25 bp, Homo sapien
gaaagtcagaacacaggtctcttgt

SEQ ID NO: 5311505 - DNA, 25 bp, Homo sapien
aagggtctgctaatgggctatctgg

SEQ ID NO: 5311506 - DNA, 25 bp, Homo sapien
tgcaaagcccagtcgcgcgagcttg

SEQ ID NO: 5311507 - DNA, 25 bp, Homo sapien
gttccggcgcctggtcaagagtgcc

SEQ ID NO: 5311508 - DNA, 25 bp, Homo sapien
gcttgcctttgggattagggcgagg

SEQ ID NO: 5311509 - DNA, 25 bp, Homo sapien
gcctctgaggcggacacctgttctt

SEQ ID NO: 5311510 - DNA, 25 bp, Homo sapien
tactaagagcacaagtccgccccgg

SEQ ID NO: 5311511 - DNA, 25 bp, Homo sapien
actaagagcacaagtccgccccggg

SEQ ID NO: 5311512 - DNA, 25 bp, Homo sapien
ctaagagcacaagtccgccccggga

SEQ ID NO: 5311513 - DNA, 25 bp, Homo sapien
ctactaagagcacaagtccgccccg

SEQ ID NO: 5311514 - DNA, 25 bp, Homo sapien
caagggccctcctgtatcagccggc

SEQ ID NO: 5311515 - DNA, 25 bp, Homo sapien
gagcccagaatcctgtgggatgcgc

SEQ ID NO: 5311516 - DNA, 25 bp, Homo sapien
ggcttttcacactctttgtctgtgt

SEQ ID NO: 5311517 - DNA, 25 bp, Homo sapien
tgtatcagccggcttttcacactct

SEQ ID NO: 5311518 - DNA, 25 bp, Homo sapien
tttgtgggaggcatctaactgtagc

SEQ ID NO: 5311519 - DNA, 25 bp, Homo sapien
tctgctgttagtcgcataagggaag

SEQ ID NO: 5311520 - DNA, 25 bp, Homo sapien
tggccactaaaactcccctagagag

SEQ ID NO: 5311521 - DNA, 25 bp, Homo sapien
cctagagaggagatttacggcagct

SEQ ID NO: 5311522 - DNA, 25 bp, Homo sapien
caaatcttgagaatacaacgtgaag

SEQ ID NO: 5311523 - DNA, 25 bp, Homo sapien
cgctccgtctccttgcgaaaatgct

SEQ ID NO: 5311524 - DNA, 25 bp, Homo sapien
tacaacgtgaaggtgaactgctgac

SEQ ID NO: 5311525 - DNA, 25 bp, Homo sapien
taccaagtgcctactctatacaaat

SEQ ID NO: 5311526 - DNA, 25 bp, Homo sapien
ctgtcggtatgtcgcgacagagcac

SEQ ID NO: 5311527 - DNA, 25 bp, Homo sapien
gccttgccggctgtcggtatgtcgc

SEQ ID NO: 5311528 - DNA, 25 bp, Homo sapien
tccgacagaacggttgggccttgcc

SEQ ID NO: 5311529 - DNA, 25 bp, Homo sapien
ttaggagctccgtccgacagaacgg

SEQ ID NO: 5311530 - DNA, 25 bp, Homo sapien
gtacagcttcttccccaagtctccg

SEQ ID NO: 5311531 - DNA, 25 bp, Homo sapien
ctgtacagcttcttccccaagtctc

SEQ ID NO: 5311532 - DNA, 25 bp, Homo sapien
cagcttcttccccaagtctccggcg

SEQ ID NO: 5311533 - DNA, 25 bp, Homo sapien
cctgtacagcttcttccccaagtct

SEQ ID NO: 5311534 - DNA, 25 bp, Homo sapien
tgatgccaacaaggcctcggccagg

SEQ ID NO: 5311535 - DNA, 25 bp, Homo sapien
ctgagtgatgccaacaaggcctcgg

SEQ ID NO: 5311536 - DNA, 25 bp, Homo sapien
agtgatgccaacaaggcctcggcca

SEQ ID NO: 5311537 - DNA, 25 bp, Homo sapien
tgagtgatgccaacaaggcctcggc

SEQ ID NO: 5311538 - DNA, 25 bp, Homo sapien
aacctcaacggagggctgcggagat

SEQ ID NO: 5311539 - DNA, 25 bp, Homo sapien
cgcgtcaccgcccaaggcgaagaac

SEQ ID NO: 5311540 - DNA, 25 bp, Homo sapien
tctccttccccaggcggggatgcgg

SEQ ID NO: 5311541 - DNA, 25 bp, Homo sapien
cggagatcggtagcgcctgctgccc

SEQ ID NO: 5311542 - DNA, 25 bp, Homo sapien
aacacaaagtttaatggtcgctatt

SEQ ID NO: 5311543 - DNA, 25 bp, Homo sapien
cattcaagataagagccagttcgtg

SEQ ID NO: 5311544 - DNA, 25 bp, Homo sapien
ccgcggtccggctgatttttcacca

SEQ ID NO: 5311545 - DNA, 25 bp, Homo sapien
ggtcgctatttgaacaaacgaagaa

SEQ ID NO: 5311546 - DNA, 25 bp, Homo sapien
gagaaattatgtgtcagattctgta

SEQ ID NO: 5311547 - DNA, 25 bp, Homo sapien
cacccggcccatactgctatttctt

SEQ ID NO: 5311548 - DNA, 25 bp, Homo sapien
aactgataatggttggatccagctt

SEQ ID NO: 5311549 - DNA, 25 bp, Homo sapien
aaactgataatggttggatccagct

SEQ ID NO: 5311550 - DNA, 25 bp, Homo sapien
tggaacattcatccgcgagaaaggg

SEQ ID NO: 5311551 - DNA, 25 bp, Homo sapien
tttatcacagacatcaacagcctgg

SEQ ID NO: 5311552 - DNA, 25 bp, Homo sapien
gaaatcagtccgtgttcatgtacag

SEQ ID NO: 5311553 - DNA, 25 bp, Homo sapien
gaaagatggagatgcgcactacctg

SEQ ID NO: 5311554 - DNA, 25 bp, Homo sapien
tcagtaaccgggactagaggtgtct

SEQ ID NO: 5311555 - DNA, 25 bp, Homo sapien
gagtctccagtctagtacgttgtcg

SEQ ID NO: 5311556 - DNA, 25 bp, Homo sapien
caagggtcagtttcccaggtaactg

SEQ ID NO: 5311557 - DNA, 25 bp, Homo sapien
tacgttgtcgtactcggtgttgtaa

SEQ ID NO: 5311558 - DNA, 25 bp, Homo sapien
tgcacccggcccttattgtttataa

SEQ ID NO: 5311559 - DNA, 25 bp, Homo sapien
cccagaagggaggtcatttttacag

SEQ ID NO: 5311560 - DNA, 25 bp, Homo sapien
gatttacaggtaagcaccggcgtgc

SEQ ID NO: 5311561 - DNA, 25 bp, Homo sapien
tgttacccaggacagacctctcgtg

SEQ ID NO: 5311562 - DNA, 25 bp, Homo sapien
caggctagaatatggtgacacaacc

SEQ ID NO: 5311563 - DNA, 25 bp, Homo sapien
cagtctttaataatcgaacaaaagg

SEQ ID NO: 5311564 - DNA, 25 bp, Homo sapien
tctgaacgcaagtatctaatggaac

SEQ ID NO: 5311565 - DNA, 25 bp, Homo sapien
ggcacattctgctaagtaagaggct

SEQ ID NO: 5311566 - DNA, 25 bp, Homo sapien
tacaatgggatgactagctcactgc

SEQ ID NO: 5311567 - DNA, 25 bp, Homo sapien
caggcatatgccacgtgtattaggc

SEQ ID NO: 5311568 - DNA, 25 bp, Homo sapien
cattcaggtcatgaggccctttgac

SEQ ID NO: 5311569 - DNA, 25 bp, Homo sapien
tagagcttaaaggatcacgccatcc

SEQ ID NO: 5311570 - DNA, 25 bp, Homo sapien
gcccagtaattctgttgccggaaga

SEQ ID NO: 5311571 - DNA, 25 bp, Homo sapien
tgtgcctggctaactatagtcgagg

SEQ ID NO: 5311572 - DNA, 25 bp, Homo sapien
caggtgaggccctatgcctcttgtc

SEQ ID NO: 5311573 - DNA, 25 bp, Homo sapien
taggtgattctattctggccagcgt

SEQ ID NO: 5311574 - DNA, 25 bp, Homo sapien
tggccagcgttgagaatcactaggg

SEQ ID NO: 5311575 - DNA, 25 bp, Homo sapien
cacttgattggaattgattctaggc

SEQ ID NO: 5311576 - DNA, 25 bp, Homo sapien
accaatatgtgtagctcatgatagc

SEQ ID NO: 5311577 - DNA, 25 bp, Homo sapien
tgcccggccaataattgcatagtct

SEQ ID NO: 5311578 - DNA, 25 bp, Homo sapien
agtgaaactgccagcatactcatgc

SEQ ID NO: 5311579 - DNA, 25 bp, Homo sapien
tgcatagtctcttaatgagatttaa

SEQ ID NO: 5311580 - DNA, 25 bp, Homo sapien
aattcattaagggagcttgtcctaa

SEQ ID NO: 5311581 - DNA, 25 bp, Homo sapien
tactgcaacatttgatgggacggca

SEQ ID NO: 5311582 - DNA, 25 bp, Homo sapien
tctcccagaggaagttattcaaaag

SEQ ID NO: 5311583 - DNA, 25 bp, Homo sapien
caaaatgttgctgtgcgcctaggac

SEQ ID NO: 5311584 - DNA, 25 bp, Homo sapien
gactgactacattggaagctttgag

SEQ ID NO: 5311585 - DNA, 25 bp, Homo sapien
gcctggctagtgaaaggtcaactgt

SEQ ID NO: 5311586 - DNA, 25 bp, Homo sapien
gacaaaggtggtaaattcagacaac

SEQ ID NO: 5311587 - DNA, 25 bp, Homo sapien
ctgtagatgctgaagctgtccataa

SEQ ID NO: 5311588 - DNA, 25 bp, Homo sapien
tacttgtctcagcttaatgcaggaa

SEQ ID NO: 5311589 - DNA, 25 bp, Homo sapien
ggtacatgcatacactttcaggctg

SEQ ID NO: 5311590 - DNA, 25 bp, Homo sapien
caaaagcaattggtacccatgtcca

SEQ ID NO: 5311591 - DNA, 25 bp, Homo sapien
tctaggtgtgctaacaaaacagggc

SEQ ID NO: 5311592 - DNA, 25 bp, Homo sapien
ttagattctataggtggagcagagt

SEQ ID NO: 5311593 - DNA, 25 bp, Homo sapien
tcagttgtgctgcaatgtattagat

SEQ ID NO: 5311594 - DNA, 25 bp, Homo sapien
tgtattagattctataggtggagca

SEQ ID NO: 5311595 - DNA, 25 bp, Homo sapien
tggagcagagtcatatagtgtatct

SEQ ID NO: 5311596 - DNA, 25 bp, Homo sapien
gattagacagtgttccagcaccaca

SEQ ID NO: 5311597 - DNA, 25 bp, Homo sapien
gctaatgtacaaggattagacagtg

SEQ ID NO: 5311598 - DNA, 25 bp, Homo sapien
tacaaggattagacagtgttccagc

SEQ ID NO: 5311599 - DNA, 25 bp, Homo sapien
cagctaatgtacaaggattagacag

SEQ ID NO: 5311600 - DNA, 25 bp, Homo sapien
tatatcaagcaagtgtgctacatac

SEQ ID NO: 5311601 - DNA, 25 bp, Homo sapien
gtaattgggtaatatatcaagcaag

SEQ ID NO: 5311602 - DNA, 25 bp, Homo sapien
gggaaagtaattgggtaatatatca

SEQ ID NO: 5311603 - DNA, 25 bp, Homo sapien
tgggtaatatatcaagcaagtgtgc

SEQ ID NO: 5311604 - DNA, 25 bp, Homo sapien
acatcatgtccctgatggcacttct

SEQ ID NO: 5311605 - DNA, 25 bp, Homo sapien
tgcagttcacacatatggcatttcg

SEQ ID NO: 5311606 - DNA, 25 bp, Homo sapien
catttcgatctgtggtgttacaagt

SEQ ID NO: 5311607 - DNA, 25 bp, Homo sapien
tcatgtccctgatggcacttcttaa

SEQ ID NO: 5311608 - DNA, 25 bp, Homo sapien
tatagtctcaacaccggcaaatagc

SEQ ID NO: 5311609 - DNA, 25 bp, Homo sapien
ggatatatcaaacacttaaccccga

SEQ ID NO: 5311610 - DNA, 25 bp, Homo sapien
acaatttttggaggcgtgaagagtc

SEQ ID NO: 5311611 - DNA, 25 bp, Homo sapien
cgcctacccacagttacagtcttaa

SEQ ID NO: 5311612 - DNA, 25 bp, Homo sapien
ttttctatggcatcttgattgttca

SEQ ID NO: 5311613 - DNA, 25 bp, Homo sapien
catgggatagctggtataacttgat

SEQ ID NO: 5311614 - DNA, 25 bp, Homo sapien
cctctactaacagccttttctatgg

SEQ ID NO: 5311615 - DNA, 25 bp, Homo sapien
ctgtagaaatcatgcatgggatagc

SEQ ID NO: 5311616 - DNA, 25 bp, Homo sapien
gattgccttctagtgttgcagttgc

SEQ ID NO: 5311617 - DNA, 25 bp, Homo sapien
gccttctagtgttgcagttgcgtga

SEQ ID NO: 5311618 - DNA, 25 bp, Homo sapien
gcagttgcgtgatttgtaatttcaa

SEQ ID NO: 5311619 - DNA, 25 bp, Homo sapien
aaatctgattgccttctagtgttgc

SEQ ID NO: 5311620 - DNA, 25 bp, Homo sapien
cacctgcttgagcattcctgaaaat

SEQ ID NO: 5311621 - DNA, 25 bp, Homo sapien
tgcttgagcattcctgaaaatatca

SEQ ID NO: 5311622 - DNA, 25 bp, Homo sapien
tggatgactattagtgctgatgaga

SEQ ID NO: 5311623 - DNA, 25 bp, Homo sapien
atgactattagtgctgatgagaaca

SEQ ID NO: 5311624 - DNA, 25 bp, Homo sapien
ctaaactttcacctggatgagtggg

SEQ ID NO: 5311625 - DNA, 25 bp, Homo sapien
gccaggtgcataggtgattctcaat

SEQ ID NO: 5311626 - DNA, 25 bp, Homo sapien
cagggtccatgtctaagtttactca

SEQ ID NO: 5311627 - DNA, 25 bp, Homo sapien
gacaggtaagagcattctgaccaat

SEQ ID NO: 5311628 - DNA, 25 bp, Homo sapien
aaacatttgtctcttaactctaggc

SEQ ID NO: 5311629 - DNA, 25 bp, Homo sapien
aaaggcttactgacaactgcagact

SEQ ID NO: 5311630 - DNA, 25 bp, Homo sapien
ggttattgacatttcaggaacagcg

SEQ ID NO: 5311631 - DNA, 25 bp, Homo sapien
gactcaaagtggctacaaaaggaaa

SEQ ID NO: 5311632 - DNA, 25 bp, Homo sapien
gttagcaatgtcattgatcattaaa

SEQ ID NO: 5311633 - DNA, 25 bp, Homo sapien
tagttagcaatgtcattgatcatta

SEQ ID NO: 5311634 - DNA, 25 bp, Homo sapien
ttagttagcaatgtcattgatcatt

SEQ ID NO: 5311635 - DNA, 25 bp, Homo sapien
tagcaatgtcattgatcattaaaga

SEQ ID NO: 5311636 - DNA, 25 bp, Homo sapien
cccattaaatatacagatgccacca

SEQ ID NO: 5311637 - DNA, 25 bp, Homo sapien
tcttcttagtgtaggattactatct

SEQ ID NO: 5311638 - DNA, 25 bp, Homo sapien
gactccagccattgcattgtcaaat

SEQ ID NO: 5311639 - DNA, 25 bp, Homo sapien
tcattgtcttctatacagcctagac

SEQ ID NO: 5311640 - DNA, 25 bp, Homo sapien
ctataaatgcaaaaatgtaggttat

SEQ ID NO: 5311641 - DNA, 25 bp, Homo sapien
tccccagattttgttgcgtctaatt

SEQ ID NO: 5311642 - DNA, 25 bp, Homo sapien
ccagattttgttgcgtctaattttg

SEQ ID NO: 5311643 - DNA, 25 bp, Homo sapien
cagaattataaactagaattccacc

SEQ ID NO: 5311644 - DNA, 25 bp, Homo sapien
tctaattttggggttgcttccagtc

SEQ ID NO: 5311645 - DNA, 25 bp, Homo sapien
tctgggtcagagtagtccgcatgcc

SEQ ID NO: 5311646 - DNA, 25 bp, Homo sapien
gaatgaacatccacgcagaaatgtg

SEQ ID NO: 5311647 - DNA, 25 bp, Homo sapien
cacaaaggatctggcctaacggtga

SEQ ID NO: 5311648 - DNA, 25 bp, Homo sapien
tgatggacagagtcgggaaacccag

SEQ ID NO: 5311649 - DNA, 25 bp, Homo sapien
tcagacccccaatttcagaggactt

SEQ ID NO: 5311650 - DNA, 25 bp, Homo sapien
ccccaatttcagaggactttagcaa

SEQ ID NO: 5311651 - DNA, 25 bp, Homo sapien
cccaatttcagaggactttagcaaa

SEQ ID NO: 5311652 - DNA, 25 bp, Homo sapien
ggctttcagacccccaatttcagag

SEQ ID NO: 5311653 - DNA, 25 bp, Homo sapien
tcagctgagggcgtaagaatcccag

SEQ ID NO: 5311654 - DNA, 25 bp, Homo sapien
gagttagaagttctggagtcttccc

SEQ ID NO: 5311655 - DNA, 25 bp, Homo sapien
tcttgagcatcaacgggccagaagc

SEQ ID NO: 5311656 - DNA, 25 bp, Homo sapien
gaatcccagatgtaaggttagcgag

SEQ ID NO: 5311657 - DNA, 25 bp, Homo sapien
tgggatggatgctgtattagcaggc

SEQ ID NO: 5311658 - DNA, 25 bp, Homo sapien
aaaacaacaatctccttgtgcatct

SEQ ID NO: 5311659 - DNA, 25 bp, Homo sapien
tctccttgtgcatctgcatcagaat

SEQ ID NO: 5311660 - DNA, 25 bp, Homo sapien
gatggatgctgtattagcaggcgtg

SEQ ID NO: 5311661 - DNA, 25 bp, Homo sapien
aggctgaggttgcggtgagccgaga

SEQ ID NO: 5311662 - DNA, 25 bp, Homo sapien
aaaaatacaaagtcagccaggcatg

SEQ ID NO: 5311663 - DNA, 25 bp, Homo sapien
acttgggaggctgaggttgcggtga

SEQ ID NO: 5311664 - DNA, 25 bp, Homo sapien
gtggcacaagcctgtaatcccagct

SEQ ID NO: 5311665 - DNA, 25 bp, Homo sapien
tcattttattgagtgccaatgatat

SEQ ID NO: 5311666 - DNA, 25 bp, Homo sapien
tttattgagtgccaatgatatgcca

SEQ ID NO: 5311667 - DNA, 25 bp, Homo sapien
tatgccaggcataatgcacaagtat

SEQ ID NO: 5311668 - DNA, 25 bp, Homo sapien
tattgagtgccaatgatatgccagg

SEQ ID NO: 5311669 - DNA, 25 bp, Homo sapien
cactctccaagtatgaaggatcata

SEQ ID NO: 5311670 - DNA, 25 bp, Homo sapien
agtgagctcttatggcacatgtgcc

SEQ ID NO: 5311671 - DNA, 25 bp, Homo sapien
gcagaacggtggaagtgagctctta

SEQ ID NO: 5311672 - DNA, 25 bp, Homo sapien
gatgtgactctcatagtggaaagca

SEQ ID NO: 5311673 - DNA, 25 bp, Homo sapien
tacaatagggggataaagattgggc

SEQ ID NO: 5311674 - DNA, 25 bp, Homo sapien
tcctaactccctcccaaaagatagc

SEQ ID NO: 5311675 - DNA, 25 bp, Homo sapien
gctacattctgacaatttaagtcaa

SEQ ID NO: 5311676 - DNA, 25 bp, Homo sapien
ctagaccaaggaaagctacattctg

SEQ ID NO: 5311677 - DNA, 25 bp, Homo sapien
tatagatatcattgtcttctagcac

SEQ ID NO: 5311678 - DNA, 25 bp, Homo sapien
gtcttctagcactccatgtccattg

SEQ ID NO: 5311679 - DNA, 25 bp, Homo sapien
tatctgaacccctgaatacatatga

SEQ ID NO: 5311680 - DNA, 25 bp, Homo sapien
gcactccatgtccattgtcataaaa

SEQ ID NO: 5311681 - DNA, 25 bp, Homo sapien
cagtactggagtgctgccagttgtc

SEQ ID NO: 5311682 - DNA, 25 bp, Homo sapien
ctccagctagagtgttactataaac

SEQ ID NO: 5311683 - DNA, 25 bp, Homo sapien
tatccggtttcttctcagtactgga

SEQ ID NO: 5311684 - DNA, 25 bp, Homo sapien
cagttgtcacccagactccagctag

SEQ ID NO: 5311685 - DNA, 25 bp, Homo sapien
tatgccgaacaattggacaactgtt

SEQ ID NO: 5311686 - DNA, 25 bp, Homo sapien
ccgaacaattggacaactgtttgtc

SEQ ID NO: 5311687 - DNA, 25 bp, Homo sapien
catgaattttgttatgccgaacaat

SEQ ID NO: 5311688 - DNA, 25 bp, Homo sapien
ttttgttatgccgaacaattggaca

SEQ ID NO: 5311689 - DNA, 25 bp, Homo sapien
taaggcctcgtccatcaccaaagat

SEQ ID NO: 5311690 - DNA, 25 bp, Homo sapien
caccaaagatgtaaactcctccttg

SEQ ID NO: 5311691 - DNA, 25 bp, Homo sapien
tgtcatttccttcaataaggcctcg

SEQ ID NO: 5311692 - DNA, 25 bp, Homo sapien
gatgtaaactcctccttgatttcca

SEQ ID NO: 5311693 - DNA, 25 bp, Homo sapien
ggtaatccatacacctgcaaagttg

SEQ ID NO: 5311694 - DNA, 25 bp, Homo sapien
gttgggtcactatttgaggtaatcc

SEQ ID NO: 5311695 - DNA, 25 bp, Homo sapien
ccactgtagggttagcataggcttt

SEQ ID NO: 5311696 - DNA, 25 bp, Homo sapien
ggtgaatttcacatcgaaccactgt

SEQ ID NO: 5311697 - DNA, 25 bp, Homo sapien
tacagcgctgcaagcaaaatttgat

SEQ ID NO: 5311698 - DNA, 25 bp, Homo sapien
tgactggtaaacttttacagcgctg

SEQ ID NO: 5311699 - DNA, 25 bp, Homo sapien
ccgggccgacaaatctgactggtaa

SEQ ID NO: 5311700 - DNA, 25 bp, Homo sapien
ttgatacctctgaatgcagtgatac

SEQ ID NO: 5311701 - DNA, 25 bp, Homo sapien
cgcgcccagctgatccacaagtttt

SEQ ID NO: 5311702 - DNA, 25 bp, Homo sapien
tgccatgatcaaatgtgaacacacc

SEQ ID NO: 5311703 - DNA, 25 bp, Homo sapien
aaatcccagctaacgcattattgga

SEQ ID NO: 5311704 - DNA, 25 bp, Homo sapien
tgaacacaccaacatcacgtccatg

SEQ ID NO: 5311705 - DNA, 25 bp, Homo sapien
tccgtctaataattgggtttccatg

SEQ ID NO: 5311706 - DNA, 25 bp, Homo sapien
ccactaacacatactgcagaaccaa

SEQ ID NO: 5311707 - DNA, 25 bp, Homo sapien
tgatgttacagtgcttgatggtggg

SEQ ID NO: 5311708 - DNA, 25 bp, Homo sapien
catgatctgttatatatagtccaac

SEQ ID NO: 5311709 - DNA, 25 bp, Homo sapien
tgctccttgaccactaacacatact

SEQ ID NO: 5311710 - DNA, 25 bp, Homo sapien
tgtacatgtacttcggatgatacag

SEQ ID NO: 5311711 - DNA, 25 bp, Homo sapien
tacagtgatcaataatagggctaca

SEQ ID NO: 5311712 - DNA, 25 bp, Homo sapien
tgtaatctctaagcagtggtgtgca

SEQ ID NO: 5311713 - DNA, 25 bp, Homo sapien
tagggctacaatttactgtaatctc

SEQ ID NO: 5311714 - DNA, 25 bp, Homo sapien
ccttattgtcatatatccaacataa

SEQ ID NO: 5311715 - DNA, 25 bp, Homo sapien
tccataaaaacgaaggttgaatctc

SEQ ID NO: 5311716 - DNA, 25 bp, Homo sapien
aaaacgaaggttgaatctctagtgt

SEQ ID NO: 5311717 - DNA, 25 bp, Homo sapien
cgaaggttgaatctctagtgttttc

SEQ ID NO: 5311718 - DNA, 25 bp, Homo sapien
atgagcctcttgtaccccaccaagg

SEQ ID NO: 5311719 - DNA, 25 bp, Homo sapien
ccaatcatggtgattggagattcaa

SEQ ID NO: 5311720 - DNA, 25 bp, Homo sapien
ttccagaatgaacaaagataagtcc

SEQ ID NO: 5311721 - DNA, 25 bp, Homo sapien
tccattcatcagtatatattccaga

SEQ ID NO: 5311722 - DNA, 25 bp, Homo sapien
tagaaatgttcagcaaatcctggct

SEQ ID NO: 5311723 - DNA, 25 bp, Homo sapien
aatcctggctttacatgtgcacctt

SEQ ID NO: 5311724 - DNA, 25 bp, Homo sapien
gcagggttactgtagaaatgttcag

SEQ ID NO: 5311725 - DNA, 25 bp, Homo sapien
tcttcctttatatcttgcagggtta

SEQ ID NO: 5311726 - DNA, 25 bp, Homo sapien
aaatacttccatatataatcgtttc

SEQ ID NO: 5311727 - DNA, 25 bp, Homo sapien
caggttcaggatgcatcatagggcg

SEQ ID NO: 5311728 - DNA, 25 bp, Homo sapien
ccagggatttggatgttcatactct

SEQ ID NO: 5311729 - DNA, 25 bp, Homo sapien
catagggcgagtatattcaaatact

SEQ ID NO: 5311730 - DNA, 25 bp, Homo sapien
tataggcgtgagccacttcgcctag

SEQ ID NO: 5311731 - DNA, 25 bp, Homo sapien
ataggcgtgagccacttcgcctagc

SEQ ID NO: 5311732 - DNA, 25 bp, Homo sapien
tgtagaaatgaggtcccagtatgtt

SEQ ID NO: 5311733 - DNA, 25 bp, Homo sapien
ttttgtagaaatgaggtcccagtat

SEQ ID NO: 5311734 - DNA, 25 bp, Homo sapien
tgggcaacaaataacatatctcaag

SEQ ID NO: 5311735 - DNA, 25 bp, Homo sapien
gcaccgactttcctaccatgtttag

SEQ ID NO: 5311736 - DNA, 25 bp, Homo sapien
agtggttatatcacaactctccaag

SEQ ID NO: 5311737 - DNA, 25 bp, Homo sapien
taaataccacctggactgacagccc

SEQ ID NO: 5311738 - DNA, 25 bp, Homo sapien
tttttagaaccacttcatctggcag

SEQ ID NO: 5311739 - DNA, 25 bp, Homo sapien
ccagcaagtaagagaagatttttag

SEQ ID NO: 5311740 - DNA, 25 bp, Homo sapien
gctgctctacaaagatcctgttcca

SEQ ID NO: 5311741 - DNA, 25 bp, Homo sapien
cactgaagcgtttacatacacaagc

SEQ ID NO: 5311742 - DNA, 25 bp, Homo sapien
cattttttggtatcaagcaaaatta

SEQ ID NO: 5311743 - DNA, 25 bp, Homo sapien
ttttcattttttggtatcaagcaaa

SEQ ID NO: 5311744 - DNA, 25 bp, Homo sapien
aattttcattttttggtatcaagca

SEQ ID NO: 5311745 - DNA, 25 bp, Homo sapien
ttcattttttggtatcaagcaaaat

SEQ ID NO: 5311746 - DNA, 25 bp, Homo sapien
tttctgtagttgaagttgaggcgcc

SEQ ID NO: 5311747 - DNA, 25 bp, Homo sapien
cagacactcttgcacgttttgcacg

SEQ ID NO: 5311748 - DNA, 25 bp, Homo sapien
gcacgatgaccaaagttttctgtag

SEQ ID NO: 5311749 - DNA, 25 bp, Homo sapien
gatcttgtgattttccagacactct

SEQ ID NO: 5311750 - DNA, 25 bp, Homo sapien
ggacacgctgttcttttcggcaaaa

SEQ ID NO: 5311751 - DNA, 25 bp, Homo sapien
tctacgaagttggtatggactattt

SEQ ID NO: 5311752 - DNA, 25 bp, Homo sapien
tattttgtgcaccaggacctgattc

SEQ ID NO: 5311753 - DNA, 25 bp, Homo sapien
agagtttttctacgaagttggtatg

SEQ ID NO: 5311754 - DNA, 25 bp, Homo sapien
tcttgccttgttggtattacaaaga

SEQ ID NO: 5311755 - DNA, 25 bp, Homo sapien
atgggaaacataaaaggcttagtag

SEQ ID NO: 5311756 - DNA, 25 bp, Homo sapien
tagtagctggcaaagttctagttct

SEQ ID NO: 5311757 - DNA, 25 bp, Homo sapien
gcttagtagtagctggcaaagttct

SEQ ID NO: 5311758 - DNA, 25 bp, Homo sapien
ggacacacagattcaagataactat

SEQ ID NO: 5311759 - DNA, 25 bp, Homo sapien
gctttgagacaatattatttggaca

SEQ ID NO: 5311760 - DNA, 25 bp, Homo sapien
cactaacaatgctttctgccttaca

SEQ ID NO: 5311761 - DNA, 25 bp, Homo sapien
tatttttggtctatcagctttctgt

SEQ ID NO: 5311762 - DNA, 25 bp, Homo sapien
cactagctcccgcttactgttctga

SEQ ID NO: 5311763 - DNA, 25 bp, Homo sapien
tgtgctatatacagcaacactagct

SEQ ID NO: 5311764 - DNA, 25 bp, Homo sapien
tagaacatatgcaggaccaaaagcc

SEQ ID NO: 5311765 - DNA, 25 bp, Homo sapien
taatctctatgcgtaattagggaag

SEQ ID NO: 5311766 - DNA, 25 bp, Homo sapien
gccaaggaggcacttcatctgaggc

SEQ ID NO: 5311767 - DNA, 25 bp, Homo sapien
ttgaacctgaaaggtgtagactgca

SEQ ID NO: 5311768 - DNA, 25 bp, Homo sapien
gtaacacagcatgcctctattcaga

SEQ ID NO: 5311769 - DNA, 25 bp, Homo sapien
aaatagtacgtatgtgtaacacagc

SEQ ID NO: 5311770 - DNA, 25 bp, Homo sapien
tatagtaagtgccataccaaggaca

SEQ ID NO: 5311771 - DNA, 25 bp, Homo sapien
tttgtatttttaccacgcgtggcta

SEQ ID NO: 5311772 - DNA, 25 bp, Homo sapien
tcgtcatacgcacacagtttaaaag

SEQ ID NO: 5311773 - DNA, 25 bp, Homo sapien
caaatttgtgcgtctatcttgggca

SEQ ID NO: 5311774 - DNA, 25 bp, Homo sapien
ttattttattaataggtagctcctc

SEQ ID NO: 5311775 - DNA, 25 bp, Homo sapien
taataggtagctcctcagatgtttt

SEQ ID NO: 5311776 - DNA, 25 bp, Homo sapien
tattaataggtagctcctcagatgt

SEQ ID NO: 5311777 - DNA, 25 bp, Homo sapien
ttttattaataggtagctcctcaga

SEQ ID NO: 5311778 - DNA, 25 bp, Homo sapien
tgggctccacctccgtaatttctga

SEQ ID NO: 5311779 - DNA, 25 bp, Homo sapien
tgtggtccctactgcttagaacacc

SEQ ID NO: 5311780 - DNA, 25 bp, Homo sapien
gaacctagctgtatgactggacaag

SEQ ID NO: 5311781 - DNA, 25 bp, Homo sapien
gagagggacaaactagatcagcggt

SEQ ID NO: 5311782 - DNA, 25 bp, Homo sapien
caacgtgcatataagaaactaaggc

SEQ ID NO: 5311783 - DNA, 25 bp, Homo sapien
taagagatggctttggcagcaacgt

SEQ ID NO: 5311784 - DNA, 25 bp, Homo sapien
ggaaaatgacagactaggtagactc

SEQ ID NO: 5311785 - DNA, 25 bp, Homo sapien
tagaacatgaaatcaggaatcactt

SEQ ID NO: 5311786 - DNA, 25 bp, Homo sapien
tgggaccaaaggcgcacatttgttt

SEQ ID NO: 5311787 - DNA, 25 bp, Homo sapien
accaaaggcgcacatttgttttttg

SEQ ID NO: 5311788 - DNA, 25 bp, Homo sapien
ccaaaggcgcacatttgttttttgc

SEQ ID NO: 5311789 - DNA, 25 bp, Homo sapien
ctgggaccaaaggcgcacatttgtt

SEQ ID NO: 5311790 - DNA, 25 bp, Homo sapien
gtgcccagcccacttatccaagttt

SEQ ID NO: 5311791 - DNA, 25 bp, Homo sapien
gtagtaaatctacagactgatgtca

SEQ ID NO: 5311792 - DNA, 25 bp, Homo sapien
aatctacagactgatgtcaataaca

SEQ ID NO: 5311793 - DNA, 25 bp, Homo sapien
ccaagttttcatgtagtaaatctac

SEQ ID NO: 5311794 - DNA, 25 bp, Homo sapien
tgtacacttatgtatcttgtaaaaa

SEQ ID NO: 5311795 - DNA, 25 bp, Homo sapien
tagccgtcctcaaacttagttgtac

SEQ ID NO: 5311796 - DNA, 25 bp, Homo sapien
tagttgtacactgtgtacacttatg

SEQ ID NO: 5311797 - DNA, 25 bp, Homo sapien
ggaagtgtagccgtcctcaaactta

SEQ ID NO: 5311798 - DNA, 25 bp, Homo sapien
acccagcccatttatggtgactcca

SEQ ID NO: 5311799 - DNA, 25 bp, Homo sapien
gcacccagcccatttatggtgactc

SEQ ID NO: 5311800 - DNA, 25 bp, Homo sapien
cagcacccagcccatttatggtgac

SEQ ID NO: 5311801 - DNA, 25 bp, Homo sapien
cagcccatttatggtgactccatac

SEQ ID NO: 5311802 - DNA, 25 bp, Homo sapien
tggcaggtccaagccaatgtggccc

SEQ ID NO: 5311803 - DNA, 25 bp, Homo sapien
cattatttacagaaggcagccatcc

SEQ ID NO: 5311804 - DNA, 25 bp, Homo sapien
tggcccaatgagacacaagaagtta

SEQ ID NO: 5311805 - DNA, 25 bp, Homo sapien
gatacaaacaaggatgacggatgca

SEQ ID NO: 5311806 - DNA, 25 bp, Homo sapien
tctacaagtgctcttaaacagctcg

SEQ ID NO: 5311807 - DNA, 25 bp, Homo sapien
cacagctaaagaaaacttaagcgaa

SEQ ID NO: 5311808 - DNA, 25 bp, Homo sapien
aaatgctataggagagctaatgagc

SEQ ID NO: 5311809 - DNA, 25 bp, Homo sapien
gttgttaggttagctcaacatatag

SEQ ID NO: 5311810 - DNA, 25 bp, Homo sapien
tgcaaatccctggacaactactgcc

SEQ ID NO: 5311811 - DNA, 25 bp, Homo sapien
cactgcaaatccctggacaactact

SEQ ID NO: 5311812 - DNA, 25 bp, Homo sapien
actgcaaatccctggacaactactg

SEQ ID NO: 5311813 - DNA, 25 bp, Homo sapien
caaatccctggacaactactgccat

SEQ ID NO: 5311814 - DNA, 25 bp, Homo sapien
tttccacaacgatgacaatgttccg

SEQ ID NO: 5311815 - DNA, 25 bp, Homo sapien
ccagccaccgtgaagtaagagtaat

SEQ ID NO: 5311816 - DNA, 25 bp, Homo sapien
cgtatctgtgcagtccaacatggca

SEQ ID NO: 5311817 - DNA, 25 bp, Homo sapien
tcattattggcgtatggaacagcaa

SEQ ID NO: 5311818 - DNA, 25 bp, Homo sapien
tataccaagggtttagccttcttca

SEQ ID NO: 5311819 - DNA, 25 bp, Homo sapien
ccttctaaatagttggcactgctct

SEQ ID NO: 5311820 - DNA, 25 bp, Homo sapien
ggtctaatggactcatatggtaact

SEQ ID NO: 5311821 - DNA, 25 bp, Homo sapien
aactgaccctgatggtataccaagg

SEQ ID NO: 5311822 - DNA, 25 bp, Homo sapien
tggtaagcaactgttcagcagtgcg

SEQ ID NO: 5311823 - DNA, 25 bp, Homo sapien
tatacattcggaggaaagaagatcc

SEQ ID NO: 5311824 - DNA, 25 bp, Homo sapien
cagcagtgcgctatttcaatatgaa

SEQ ID NO: 5311825 - DNA, 25 bp, Homo sapien
cctccctgaggatcttaaacataca

SEQ ID NO: 5311826 - DNA, 25 bp, Homo sapien
gtcctagctactggcgcagaggtga

SEQ ID NO: 5311827 - DNA, 25 bp, Homo sapien
cactgtgttcctgctgggtgagaga

SEQ ID NO: 5311828 - DNA, 25 bp, Homo sapien
cccttaaattctatgtcccgtgcca

SEQ ID NO: 5311829 - DNA, 25 bp, Homo sapien
cacaaaagaacagttaagagctacc

SEQ ID NO: 5311830 - DNA, 25 bp, Homo sapien
taaactaagctgacaccaaaaaaga

SEQ ID NO: 5311831 - DNA, 25 bp, Homo sapien
cataaacagatcagtaggtccaaca

SEQ ID NO: 5311832 - DNA, 25 bp, Homo sapien
caaacctcaagaattgggacagtgg

SEQ ID NO: 5311833 - DNA, 25 bp, Homo sapien
tatcattactgactgggaatctgga

SEQ ID NO: 5311834 - DNA, 25 bp, Homo sapien
actgtatggcggaacttattcatcc

SEQ ID NO: 5311835 - DNA, 25 bp, Homo sapien
tttcacccctgacaaccacgattcc

SEQ ID NO: 5311836 - DNA, 25 bp, Homo sapien
aaacttcatgcctgctgactagtaa

SEQ ID NO: 5311837 - DNA, 25 bp, Homo sapien
aggtacaatactgtatggcggaact

SEQ ID NO: 5311838 - DNA, 25 bp, Homo sapien
cctttcctactaagtgttagaatct

SEQ ID NO: 5311839 - DNA, 25 bp, Homo sapien
tacataccaaagttgtccatctcaa

SEQ ID NO: 5311840 - DNA, 25 bp, Homo sapien
ccatctcaatatataacaagggaat

SEQ ID NO: 5311841 - DNA, 25 bp, Homo sapien
tgtgggaagaaacaataactagtaa

SEQ ID NO: 5311842 - DNA, 25 bp, Homo sapien
tcgccgacgttgttccgctcctgag

SEQ ID NO: 5311843 - DNA, 25 bp, Homo sapien
cccgctcgccgacgttgttccgctc

SEQ ID NO: 5311844 - DNA, 25 bp, Homo sapien
gcggccgcgacactcgcctgggtct

SEQ ID NO: 5311845 - DNA, 25 bp, Homo sapien
cgcggccgcgacactcgcctgggtc

SEQ ID NO: 5311846 - DNA, 25 bp, Homo sapien
cacgcacacgcacagcgagcttcgg

SEQ ID NO: 5311847 - DNA, 25 bp, Homo sapien
acgcacacgcacagcgagcttcggg

SEQ ID NO: 5311848 - DNA, 25 bp, Homo sapien
cgcacacgcacagcgagcttcgggg

SEQ ID NO: 5311849 - DNA, 25 bp, Homo sapien
cacacgcacagcgagcttcggggca

SEQ ID NO: 5311850 - DNA, 25 bp, Homo sapien
aaggggaaatgagtgtgaagggagg

SEQ ID NO: 5311851 - DNA, 25 bp, Homo sapien
cgtcagccctgtcgccgctgcttct

SEQ ID NO: 5311852 - DNA, 25 bp, Homo sapien
cctcgtcagccctgtcgccgctgct

SEQ ID NO: 5311853 - DNA, 25 bp, Homo sapien
gtcagccctgtcgccgctgcttctg

SEQ ID NO: 5311854 - DNA, 25 bp, Homo sapien
ggagaagtgattaatccttcggttc

SEQ ID NO: 5311855 - DNA, 25 bp, Homo sapien
taatccttcggttcgccgtttcagc

SEQ ID NO: 5311856 - DNA, 25 bp, Homo sapien
cgaagagagcgccagtgcgtagcga

SEQ ID NO: 5311857 - DNA, 25 bp, Homo sapien
ccagtgcgtagcgacgattctggga

SEQ ID NO: 5311858 - DNA, 25 bp, Homo sapien
catcagttgctctctaggtttgaca

SEQ ID NO: 5311859 - DNA, 25 bp, Homo sapien
ctttgggcgatgtctctgagtgtca

SEQ ID NO: 5311860 - DNA, 25 bp, Homo sapien
gaattacctttatacctgatgcccc

SEQ ID NO: 5311861 - DNA, 25 bp, Homo sapien
gataattaagcaactacaaagcgtg

SEQ ID NO: 5311862 - DNA, 25 bp, Homo sapien
actgagtctgattaacctcttcctt

SEQ ID NO: 5311863 - DNA, 25 bp, Homo sapien
ctgagtctgattaacctcttccttg

SEQ ID NO: 5311864 - DNA, 25 bp, Homo sapien
tgagtctgattaacctcttccttgt

SEQ ID NO: 5311865 - DNA, 25 bp, Homo sapien
cactgagtctgattaacctcttcct

SEQ ID NO: 5311866 - DNA, 25 bp, Homo sapien
tcatctcggacaggatctaatgcct

SEQ ID NO: 5311867 - DNA, 25 bp, Homo sapien
ttcatctcggacaggatctaatgcc

SEQ ID NO: 5311868 - DNA, 25 bp, Homo sapien
catctcggacaggatctaatgcctg

SEQ ID NO: 5311869 - DNA, 25 bp, Homo sapien
caggttataatcacttctttaggcc

SEQ ID NO: 5311870 - DNA, 25 bp, Homo sapien
tgaaggcctccatgcatgtaaaaat

SEQ ID NO: 5311871 - DNA, 25 bp, Homo sapien
ggcagtttcattggcagtctccagt

SEQ ID NO: 5311872 - DNA, 25 bp, Homo sapien
cactgaaatggatctgcacaaactt

SEQ ID NO: 5311873 - DNA, 25 bp, Homo sapien
caattactttgaagtaaatcctaga

SEQ ID NO: 5311874 - DNA, 25 bp, Homo sapien
tgaagtaaatcctagatatcgtaat

SEQ ID NO: 5311875 - DNA, 25 bp, Homo sapien
tactttgaagtaaatcctagatatc

SEQ ID NO: 5311876 - DNA, 25 bp, Homo sapien
agccttctcaattactttgaagtaa

SEQ ID NO: 5311877 - DNA, 25 bp, Homo sapien
aaatctggatattggctctttttcc

SEQ ID NO: 5311878 - DNA, 25 bp, Homo sapien
gacgcagcccaaggacttgccattg

SEQ ID NO: 5311879 - DNA, 25 bp, Homo sapien
caaagaactcagttggctggtgcca

SEQ ID NO: 5311880 - DNA, 25 bp, Homo sapien
gcatctgcaaagcactcacaactct

SEQ ID NO: 5311881 - DNA, 25 bp, Homo sapien
tcttgaccctatggaggagcctata

SEQ ID NO: 5311882 - DNA, 25 bp, Homo sapien
tctacaggataagaacacaagggcc

SEQ ID NO: 5311883 - DNA, 25 bp, Homo sapien
taatgtccaaggatgtgcaagcctc

SEQ ID NO: 5311884 - DNA, 25 bp, Homo sapien
ttcattatacaccatccagacgagg

SEQ ID NO: 5311885 - DNA, 25 bp, Homo sapien
ttggtaatcaagttcaaagattccc

SEQ ID NO: 5311886 - DNA, 25 bp, Homo sapien
tccttggtaatcaagttcaaagatt

SEQ ID NO: 5311887 - DNA, 25 bp, Homo sapien
taatcaagttcaaagattccctctt

SEQ ID NO: 5311888 - DNA, 25 bp, Homo sapien
tcaagttcaaagattccctcttcat

SEQ ID NO: 5311889 - DNA, 25 bp, Homo sapien
tgctctgtgaacatgcccgtgatga

SEQ ID NO: 5311890 - DNA, 25 bp, Homo sapien
tgcccgtgatgagcatgttcctatg

SEQ ID NO: 5311891 - DNA, 25 bp, Homo sapien
atgttcctatgccagggcctcactg

SEQ ID NO: 5311892 - DNA, 25 bp, Homo sapien
tttgctctgtgaacatgcccgtgat

SEQ ID NO: 5311893 - DNA, 25 bp, Homo sapien
cagggtgagctaagcagctgagcca

SEQ ID NO: 5311894 - DNA, 25 bp, Homo sapien
ctcaacacaatctttggaagccttt

SEQ ID NO: 5311895 - DNA, 25 bp, Homo sapien
aacacaatctttggaagcctttggc

SEQ ID NO: 5311896 - DNA, 25 bp, Homo sapien
ggcccagggtgagctaagcagctga

SEQ ID NO: 5311897 - DNA, 25 bp, Homo sapien
ttgcactttccgcaggaattctgca

SEQ ID NO: 5311898 - DNA, 25 bp, Homo sapien
ctcctctcaggattggttctaccat

SEQ ID NO: 5311899 - DNA, 25 bp, Homo sapien
gcactttccgcaggaattctgcacc

SEQ ID NO: 5311900 - DNA, 25 bp, Homo sapien
aattctgcacctcctctcaggattg

SEQ ID NO: 5311901 - DNA, 25 bp, Homo sapien
gtcctctcaagtgttgctctgacag

SEQ ID NO: 5311902 - DNA, 25 bp, Homo sapien
tgcgtcctctcaagtgttgctctga

SEQ ID NO: 5311903 - DNA, 25 bp, Homo sapien
gctgcgtcctctcaagtgttgctct

SEQ ID NO: 5311904 - DNA, 25 bp, Homo sapien
tggctgcgtcctctcaagtgttgct

SEQ ID NO: 5311905 - DNA, 25 bp, Homo sapien
tctgcttgtactttttctccaccat

SEQ ID NO: 5311906 - DNA, 25 bp, Homo sapien
gagaagttgggaaaagtcttctgct

SEQ ID NO: 5311907 - DNA, 25 bp, Homo sapien
ggagaagttgggaaaagtcttctgc

SEQ ID NO: 5311908 - DNA, 25 bp, Homo sapien
acctcaaagtcagtgtgttatattt

SEQ ID NO: 5311909 - DNA, 25 bp, Homo sapien
cacctcaaagtcagtgtgttatatt

SEQ ID NO: 5311910 - DNA, 25 bp, Homo sapien
taactgtcaaccatgacattatgtg

SEQ ID NO: 5311911 - DNA, 25 bp, Homo sapien
tgtgtgaggtctcagttaaacagac

SEQ ID NO: 5311912 - DNA, 25 bp, Homo sapien
taaacagactacagtccactggatc

SEQ ID NO: 5311913 - DNA, 25 bp, Homo sapien
gatttccttcaaccagtaactgtca

SEQ ID NO: 5311914 - DNA, 25 bp, Homo sapien
cagatggccatcttgaatccccagg

SEQ ID NO: 5311915 - DNA, 25 bp, Homo sapien
gaatggtctccttcgatgataaagt

SEQ ID NO: 5311916 - DNA, 25 bp, Homo sapien
tcttcatggagatgagaaccagcca

SEQ ID NO: 5311917 - DNA, 25 bp, Homo sapien
gtcactgtgcgcctctggaactgga

SEQ ID NO: 5311918 - DNA, 25 bp, Homo sapien
tgaccacataggcatagaaactttt

SEQ ID NO: 5311919 - DNA, 25 bp, Homo sapien
ttttttgggttatgaccacataggc

SEQ ID NO: 5311920 - DNA, 25 bp, Homo sapien
gcatagaaacttttcgaagcaaagt

SEQ ID NO: 5311921 - DNA, 25 bp, Homo sapien
cttttcgaagcaaagttgatgtttg

SEQ ID NO: 5311922 - DNA, 25 bp, Homo sapien
ctgctttctgtctgagccttcttct

SEQ ID NO: 5311923 - DNA, 25 bp, Homo sapien
cagattttggctatctggtcaggcc

SEQ ID NO: 5311924 - DNA, 25 bp, Homo sapien
caaataccggattctcagacatgtc

SEQ ID NO: 5311925 - DNA, 25 bp, Homo sapien
caaaacaacactacatgctgaggct

SEQ ID NO: 5311926 - DNA, 25 bp, Homo sapien
tcatccaaataggacacttgggaac

SEQ ID NO: 5311927 - DNA, 25 bp, Homo sapien
caaggtgagcatgttagaatctggg

SEQ ID NO: 5311928 - DNA, 25 bp, Homo sapien
tctggaggccactttcatgggaggt

SEQ ID NO: 5311929 - DNA, 25 bp, Homo sapien
catcgcagggtgatgtctaggtcct

SEQ ID NO: 5311930 - DNA, 25 bp, Homo sapien
tcttctcagacctgtgcagtggagg

SEQ ID NO: 5311931 - DNA, 25 bp, Homo sapien
agtcacatggacattcttcatgatg

SEQ ID NO: 5311932 - DNA, 25 bp, Homo sapien
ggacattcttcatgatgagctgagc

SEQ ID NO: 5311933 - DNA, 25 bp, Homo sapien
attttattaaccaaagtcacatgga

SEQ ID NO: 5311934 - DNA, 25 bp, Homo sapien
catggacattcttcatgatgagctg

SEQ ID NO: 5311935 - DNA, 25 bp, Homo sapien
caagactgtaccactctactccaga

SEQ ID NO: 5311936 - DNA, 25 bp, Homo sapien
ctctactccagattgggtgagaaag

SEQ ID NO: 5311937 - DNA, 25 bp, Homo sapien
ctactccagattgggtgagaaagca

SEQ ID NO: 5311938 - DNA, 25 bp, Homo sapien
ctgtaccactctactccagattggg

SEQ ID NO: 5311939 - DNA, 25 bp, Homo sapien
agtgccgtcagtgccatgatagagg

SEQ ID NO: 5311940 - DNA, 25 bp, Homo sapien
catgatagagggatgcatatagagc

SEQ ID NO: 5311941 - DNA, 25 bp, Homo sapien
aagcacagtgccgtcagtgccatga

SEQ ID NO: 5311942 - DNA, 25 bp, Homo sapien
ttaaagcacagtgccgtcagtgcca

SEQ ID NO: 5311943 - DNA, 25 bp, Homo sapien
aactgaagccagtgtttggtcctgg

SEQ ID NO: 5311944 - DNA, 25 bp, Homo sapien
ttctttaatctgtccaaactgaagc

SEQ ID NO: 5311945 - DNA, 25 bp, Homo sapien
aagccagtgtttggtcctggacagc

SEQ ID NO: 5311946 - DNA, 25 bp, Homo sapien
tatccagtcactaagatggggcact

SEQ ID NO: 5311947 - DNA, 25 bp, Homo sapien
ttccccttcagctctaaatggaatt

SEQ ID NO: 5311948 - DNA, 25 bp, Homo sapien
ccccttcagctctaaatggaatttt

SEQ ID NO: 5311949 - DNA, 25 bp, Homo sapien
atggaattttgcctggacctgggag

SEQ ID NO: 5311950 - DNA, 25 bp, Homo sapien
ctaaatggaattttgcctggacctg

SEQ ID NO: 5311951 - DNA, 25 bp, Homo sapien
gctaagtgtcctgatgcatcaccct

SEQ ID NO: 5311952 - DNA, 25 bp, Homo sapien
tctgcaccctcagctaagtgtcctg

SEQ ID NO: 5311953 - DNA, 25 bp, Homo sapien
tgcatcaccctgcaggtgtgccctg

SEQ ID NO: 5311954 - DNA, 25 bp, Homo sapien
tgtggctctcagcacatctgcaccc

SEQ ID NO: 5311955 - DNA, 25 bp, Homo sapien
ccagacttcaccctcccaggctctt

SEQ ID NO: 5311956 - DNA, 25 bp, Homo sapien
cttcaccctcccaggctcttgccat

SEQ ID NO: 5311957 - DNA, 25 bp, Homo sapien
acttcaccctcccaggctcttgcca

SEQ ID NO: 5311958 - DNA, 25 bp, Homo sapien
agacttcaccctcccaggctcttgc

SEQ ID NO: 5311959 - DNA, 25 bp, Homo sapien
tttgcatatctcctgcaattcctgc

SEQ ID NO: 5311960 - DNA, 25 bp, Homo sapien
ctgctttaaggcctccattcacagg

SEQ ID NO: 5311961 - DNA, 25 bp, Homo sapien
ctccattcacaggattgattggccc

SEQ ID NO: 5311962 - DNA, 25 bp, Homo sapien
cctccattcacaggattgattggcc

SEQ ID NO: 5311963 - DNA, 25 bp, Homo sapien
ggatggccctaagcatgcacaaagc

SEQ ID NO: 5311964 - DNA, 25 bp, Homo sapien
agcaggatggccctaagcatgcaca

SEQ ID NO: 5311965 - DNA, 25 bp, Homo sapien
tctggaagcaggatggccctaagca

SEQ ID NO: 5311966 - DNA, 25 bp, Homo sapien
tggccctaagcatgcacaaagctgg

SEQ ID NO: 5311967 - DNA, 25 bp, Homo sapien
gaagagccaacattgttctttctgg

SEQ ID NO: 5311968 - DNA, 25 bp, Homo sapien
tgtagtactaggatggctatctcca

SEQ ID NO: 5311969 - DNA, 25 bp, Homo sapien
gaaccattccagttggaagagccaa

SEQ ID NO: 5311970 - DNA, 25 bp, Homo sapien
tctggttggaacttgtgtggaattc

SEQ ID NO: 5311971 - DNA, 25 bp, Homo sapien
caagcattctaatgtgactagggta

SEQ ID NO: 5311972 - DNA, 25 bp, Homo sapien
tgcctaagtaacaacttgagaaacc

SEQ ID NO: 5311973 - DNA, 25 bp, Homo sapien
taaccatttccaggtttatggcatc

SEQ ID NO: 5311974 - DNA, 25 bp, Homo sapien
gcagatgtcctaagctatgggtggt

SEQ ID NO: 5311975 - DNA, 25 bp, Homo sapien
ttacaatcacggagaagggcgaagg

SEQ ID NO: 5311976 - DNA, 25 bp, Homo sapien
tttacaatcacggagaagggcgaag

SEQ ID NO: 5311977 - DNA, 25 bp, Homo sapien
tacacatcttcaaagaggccctcag

SEQ ID NO: 5311978 - DNA, 25 bp, Homo sapien
cacatcttcaaagaggccctcagag

SEQ ID NO: 5311979 - DNA, 25 bp, Homo sapien
catcttcaaagaggccctcagagaa

SEQ ID NO: 5311980 - DNA, 25 bp, Homo sapien
ttacacatcttcaaagaggccctca

SEQ ID NO: 5311981 - DNA, 25 bp, Homo sapien
ggagcaagcctccagctgctacagc

SEQ ID NO: 5311982 - DNA, 25 bp, Homo sapien
aagcctccagctgctacagccagga

SEQ ID NO: 5311983 - DNA, 25 bp, Homo sapien
ctcagagggagcaagcctccagctg

SEQ ID NO: 5311984 - DNA, 25 bp, Homo sapien
ctagtagctcagagggagcaagcct

SEQ ID NO: 5311985 - DNA, 25 bp, Homo sapien
aactctgtagccaatgtgcattatg

SEQ ID NO: 5311986 - DNA, 25 bp, Homo sapien
tgtgcattatgcattctgcttggag

SEQ ID NO: 5311987 - DNA, 25 bp, Homo sapien
caatctcccatataactctgtagcc

SEQ ID NO: 5311988 - DNA, 25 bp, Homo sapien
gagacttggtcaggtttcaagttct

SEQ ID NO: 5311989 - DNA, 25 bp, Homo sapien
cagttagacaaattagagtgttcta

SEQ ID NO: 5311990 - DNA, 25 bp, Homo sapien
tagacaaattagagtgttctagctt

SEQ ID NO: 5311991 - DNA, 25 bp, Homo sapien
aattagagtgttctagctttgtggg

SEQ ID NO: 5311992 - DNA, 25 bp, Homo sapien
gacaaattagagtgttctagctttg

SEQ ID NO: 5311993 - DNA, 25 bp, Homo sapien
aatagaagggagaaacaagctggct

SEQ ID NO: 5311994 - DNA, 25 bp, Homo sapien
gtttctcagcctaagactctccagg

SEQ ID NO: 5311995 - DNA, 25 bp, Homo sapien
ttcaagggttgtaagctgccatatc

SEQ ID NO: 5311996 - DNA, 25 bp, Homo sapien
aactagctgtctaacatatgggccc

SEQ ID NO: 5311997 - DNA, 25 bp, Homo sapien
agagctcaacttgggaacagtactg

SEQ ID NO: 5311998 - DNA, 25 bp, Homo sapien
agtcgacttggtttgagcttccgca

SEQ ID NO: 5311999 - DNA, 25 bp, Homo sapien
gagcttccgcagagctcaacttggg

SEQ ID NO: 5312000 - DNA, 25 bp, Homo sapien
catcgattgtccacagtcgacttgg

SEQ ID NO: 5312001 - DNA, 25 bp, Homo sapien
tgtctttatcctgatccactttgat

SEQ ID NO: 5312002 - DNA, 25 bp, Homo sapien
attttctggttgaaaagatcattgt

SEQ ID NO: 5312003 - DNA, 25 bp, Homo sapien
cataggcagtaagcacacactgtaa

SEQ ID NO: 5312004 - DNA, 25 bp, Homo sapien
gcacacactgtaaaatccatctctt

SEQ ID NO: 5312005 - DNA, 25 bp, Homo sapien
gttgaaaagatcattgtagaaaagg

SEQ ID NO: 5312006 - DNA, 25 bp, Homo sapien
cttctctcttattagtctgactagc

SEQ ID NO: 5312007 - DNA, 25 bp, Homo sapien
ctcttattagtctgactagcggtct

SEQ ID NO: 5312008 - DNA, 25 bp, Homo sapien
tctctcttattagtctgactagcgg

SEQ ID NO: 5312009 - DNA, 25 bp, Homo sapien
tctcttattagtctgactagcggtc

SEQ ID NO: 5312010 - DNA, 25 bp, Homo sapien
ggttacatcaattggtggccccagg

SEQ ID NO: 5312011 - DNA, 25 bp, Homo sapien
tctagaacatttcagccccagcgga

SEQ ID NO: 5312012 - DNA, 25 bp, Homo sapien
tagattatgccccttgtaaagagcg

SEQ ID NO: 5312013 - DNA, 25 bp, Homo sapien
gcggacatcacccagagaagagaga

SEQ ID NO: 5312014 - DNA, 25 bp, Homo sapien
gaaccaccgcacttagcctactgta

SEQ ID NO: 5312015 - DNA, 25 bp, Homo sapien
tgttctaccttacagcttttaggct

SEQ ID NO: 5312016 - DNA, 25 bp, Homo sapien
gctagccgactgcttttggactcaa

SEQ ID NO: 5312017 - DNA, 25 bp, Homo sapien
gtgtgtgtcttaagagggtctctgt

SEQ ID NO: 5312018 - DNA, 25 bp, Homo sapien
tgccttttagtcctctttcctggca

SEQ ID NO: 5312019 - DNA, 25 bp, Homo sapien
cttttagtcctctttcctggcaagg

SEQ ID NO: 5312020 - DNA, 25 bp, Homo sapien
tttagtcctctttcctggcaaggtg

SEQ ID NO: 5312021 - DNA, 25 bp, Homo sapien
acacttcctgttcgccgcctccttt

SEQ ID NO: 5312022 - DNA, 25 bp, Homo sapien
cgttttttgccgttctctgctgttt

SEQ ID NO: 5312023 - DNA, 25 bp, Homo sapien
ccgacgttttttgccgttctctgct

SEQ ID NO: 5312024 - DNA, 25 bp, Homo sapien
cttgcagttctcctaaggtgtatac

SEQ ID NO: 5312025 - DNA, 25 bp, Homo sapien
agttctcctaaggtgtataccgacg

SEQ ID NO: 5312026 - DNA, 25 bp, Homo sapien
tagagtgatggggaataatagagta

SEQ ID NO: 5312027 - DNA, 25 bp, Homo sapien
agtgatggggaataatagagtagtg

SEQ ID NO: 5312028 - DNA, 25 bp, Homo sapien
attaggtaccatcatagagtgatgg

SEQ ID NO: 5312029 - DNA, 25 bp, Homo sapien
ttaggtaccatcatagagtgatggg

SEQ ID NO: 5312030 - DNA, 25 bp, Homo sapien
tgtcctgccactaatataaagggat

SEQ ID NO: 5312031 - DNA, 25 bp, Homo sapien
cacgcccggcttatagtattgtttt

SEQ ID NO: 5312032 - DNA, 25 bp, Homo sapien
gtatacagagtatacctcacccagt

SEQ ID NO: 5312033 - DNA, 25 bp, Homo sapien
tctaaatgagaaggctatccctgtc

SEQ ID NO: 5312034 - DNA, 25 bp, Homo sapien
attattaataatcatagcaacaact

SEQ ID NO: 5312035 - DNA, 25 bp, Homo sapien
gcaacaactgcagtctttattgtgt

SEQ ID NO: 5312036 - DNA, 25 bp, Homo sapien
acaactgcagtctttattgtgttta

SEQ ID NO: 5312037 - DNA, 25 bp, Homo sapien
attaataatcatagcaacaactgca

SEQ ID NO: 5312038 - DNA, 25 bp, Homo sapien
gttgtgctctgtcgcccatgttgga

SEQ ID NO: 5312039 - DNA, 25 bp, Homo sapien
atggagttgtgctctgtcgcccatg

SEQ ID NO: 5312040 - DNA, 25 bp, Homo sapien
ggagttgtgctctgtcgcccatgtt

SEQ ID NO: 5312041 - DNA, 25 bp, Homo sapien
gagttgtgctctgtcgcccatgttg

SEQ ID NO: 5312042 - DNA, 25 bp, Homo sapien
tcatgctggtaatcctttggttcac

SEQ ID NO: 5312043 - DNA, 25 bp, Homo sapien
tcatcattaccatctctgcagcgag

SEQ ID NO: 5312044 - DNA, 25 bp, Homo sapien
tttggttcactgtctccagatgtga

SEQ ID NO: 5312045 - DNA, 25 bp, Homo sapien
gataggtctcatagcttagtgaaaa

SEQ ID NO: 5312046 - DNA, 25 bp, Homo sapien
tgctgactatatcgcaagtaattgc

SEQ ID NO: 5312047 - DNA, 25 bp, Homo sapien
ctatatcgcaagtaattgcagtggg

SEQ ID NO: 5312048 - DNA, 25 bp, Homo sapien
agtgctgactatatcgcaagtaatt

SEQ ID NO: 5312049 - DNA, 25 bp, Homo sapien
tgactatatcgcaagtaattgcagt

SEQ ID NO: 5312050 - DNA, 25 bp, Homo sapien
atgctttaaccacagtataaataat

SEQ ID NO: 5312051 - DNA, 25 bp, Homo sapien
ttatagacagtgaataaaacaccaa

SEQ ID NO: 5312052 - DNA, 25 bp, Homo sapien
taccatagcctctgtatagacctta

SEQ ID NO: 5312053 - DNA, 25 bp, Homo sapien
tttagatcgatcacatctacagaaa

SEQ ID NO: 5312054 - DNA, 25 bp, Homo sapien
gccagtgccattgtcaaaacttatt

SEQ ID NO: 5312055 - DNA, 25 bp, Homo sapien
tatatgtcttggtagaccaggaggc

SEQ ID NO: 5312056 - DNA, 25 bp, Homo sapien
tataactgccagtagatgaccagtc

SEQ ID NO: 5312057 - DNA, 25 bp, Homo sapien
tgtcccggtttgagttataactgcc

SEQ ID NO: 5312058 - DNA, 25 bp, Homo sapien
atttccacctgaactgcaaagagcc

SEQ ID NO: 5312059 - DNA, 25 bp, Homo sapien
tggggatttccacctgaactgcaaa

SEQ ID NO: 5312060 - DNA, 25 bp, Homo sapien
aggatggagacagctgtatttcttg

SEQ ID NO: 5312061 - DNA, 25 bp, Homo sapien
cctggggatttccacctgaactgca

SEQ ID NO: 5312062 - DNA, 25 bp, Homo sapien
ccaggcttttgtccctctatgttag

SEQ ID NO: 5312063 - DNA, 25 bp, Homo sapien
agtggagtcctctttgtacatgaag

SEQ ID NO: 5312064 - DNA, 25 bp, Homo sapien
tgaagctgctaaagtgcttctgttg

SEQ ID NO: 5312065 - DNA, 25 bp, Homo sapien
tctgtatatcttccctaaacttagc

SEQ ID NO: 5312066 - DNA, 25 bp, Homo sapien
cctcctatatgagagctggcaagct

SEQ ID NO: 5312067 - DNA, 25 bp, Homo sapien
aaaagtgaggtagcctttcagacag

SEQ ID NO: 5312068 - DNA, 25 bp, Homo sapien
tgccccagggctcaacttaatcttg

SEQ ID NO: 5312069 - DNA, 25 bp, Homo sapien
caatctttgtggtatggaacatcct

SEQ ID NO: 5312070 - DNA, 25 bp, Homo sapien
catagcattgagatacacttacaat

SEQ ID NO: 5312071 - DNA, 25 bp, Homo sapien
tagcattgagatacacttacaatat

SEQ ID NO: 5312072 - DNA, 25 bp, Homo sapien
atagcattgagatacacttacaata

SEQ ID NO: 5312073 - DNA, 25 bp, Homo sapien
acatagcattgagatacacttacaa

SEQ ID NO: 5312074 - DNA, 25 bp, Homo sapien
catatgcggatgacaaaatagccga

SEQ ID NO: 5312075 - DNA, 25 bp, Homo sapien
cacgcttgtgctgaaagatgtaacc

SEQ ID NO: 5312076 - DNA, 25 bp, Homo sapien
agatgtaaccatcaagcgccaggcg

SEQ ID NO: 5312077 - DNA, 25 bp, Homo sapien
tgcatgcatagaaggaatcgatacc

SEQ ID NO: 5312078 - DNA, 25 bp, Homo sapien
gggccgggcggtgtctgcgtccgtg

SEQ ID NO: 5312079 - DNA, 25 bp, Homo sapien
tccgtgagcgtttttgcagggagaa

SEQ ID NO: 5312080 - DNA, 25 bp, Homo sapien
tctgcgtccgtgagcgtttttgcag

SEQ ID NO: 5312081 - DNA, 25 bp, Homo sapien
cggtgtctgcgtccgtgagcgtttt

SEQ ID NO: 5312082 - DNA, 25 bp, Homo sapien
tacctgtatgtgtgatctcctgtgg

SEQ ID NO: 5312083 - DNA, 25 bp, Homo sapien
tcatactggattaaagagagtccta

SEQ ID NO: 5312084 - DNA, 25 bp, Homo sapien
aacacctagggccaacagaagctgg

SEQ ID NO: 5312085 - DNA, 25 bp, Homo sapien
gctgccacaggcaagtaacacctag

SEQ ID NO: 5312086 - DNA, 25 bp, Homo sapien
cagcctcagcaacatgtcaagacct

SEQ ID NO: 5312087 - DNA, 25 bp, Homo sapien
accagcctcagcaacatgtcaagac

SEQ ID NO: 5312088 - DNA, 25 bp, Homo sapien
gcctcagcaacatgtcaagacctca

SEQ ID NO: 5312089 - DNA, 25 bp, Homo sapien
gaccagcctcagcaacatgtcaaga

SEQ ID NO: 5312090 - DNA, 25 bp, Homo sapien
cattaagaacccagtaggaaagtgt

SEQ ID NO: 5312091 - DNA, 25 bp, Homo sapien
gaaagatatctgatcttcactctgg

SEQ ID NO: 5312092 - DNA, 25 bp, Homo sapien
tgatccaaatgcaaacactgtgtga

SEQ ID NO: 5312093 - DNA, 25 bp, Homo sapien
tagctttactttgcctgaaaccgta

SEQ ID NO: 5312094 - DNA, 25 bp, Homo sapien
caagcaatccatcacctcggtgtcc

SEQ ID NO: 5312095 - DNA, 25 bp, Homo sapien
tagtagcaccattttggcccggctg

SEQ ID NO: 5312096 - DNA, 25 bp, Homo sapien
ttcggggttcaaaggagcctcctgc

SEQ ID NO: 5312097 - DNA, 25 bp, Homo sapien
tgccttcggggttcaaaggagcctc

SEQ ID NO: 5312098 - DNA, 25 bp, Homo sapien
tgtagtgttcaccaaaggcaagtct

SEQ ID NO: 5312099 - DNA, 25 bp, Homo sapien
cacaagtcctgcatgttgcctctga

SEQ ID NO: 5312100 - DNA, 25 bp, Homo sapien
ctctgatgggacaagatgactgttt

SEQ ID NO: 5312101 - DNA, 25 bp, Homo sapien
tcatggtgaccttgaatggtcgcca

SEQ ID NO: 5312102 - DNA, 25 bp, Homo sapien
tcaggtcatttttgagcagggacca

SEQ ID NO: 5312103 - DNA, 25 bp, Homo sapien
caggtcatttttgagcagggaccat

SEQ ID NO: 5312104 - DNA, 25 bp, Homo sapien
ttcaggtcatttttgagcagggacc

SEQ ID NO: 5312105 - DNA, 25 bp, Homo sapien
taaaagacagtccaaggatgatctt

SEQ ID NO: 5312106 - DNA, 25 bp, Homo sapien
gtaaatgcagctacctatcttcatg

SEQ ID NO: 5312107 - DNA, 25 bp, Homo sapien
attattggttactgcctcatggcag

SEQ ID NO: 5312108 - DNA, 25 bp, Homo sapien
gtttcagtgagaatggctaatcagc

SEQ ID NO: 5312109 - DNA, 25 bp, Homo sapien
ccggcttaactaacacagatacttt

SEQ ID NO: 5312110 - DNA, 25 bp, Homo sapien
gagccagcaggcccggcttaactaa

SEQ ID NO: 5312111 - DNA, 25 bp, Homo sapien
aggcaatctgcccaatccacccgcc

SEQ ID NO: 5312112 - DNA, 25 bp, Homo sapien
caggcccggcttaactaacacagat

SEQ ID NO: 5312113 - DNA, 25 bp, Homo sapien
tcaaatgtgtcgttgcttcctgcat

SEQ ID NO: 5312114 - DNA, 25 bp, Homo sapien
aaatgtgtcgttgcttcctgcatga

SEQ ID NO: 5312115 - DNA, 25 bp, Homo sapien
caaatgtgtcgttgcttcctgcatg

SEQ ID NO: 5312116 - DNA, 25 bp, Homo sapien
aatgcctgcggtcaaagcatgagga

SEQ ID NO: 5312117 - DNA, 25 bp, Homo sapien
gaggacaacaaagagttgccccttc

SEQ ID NO: 5312118 - DNA, 25 bp, Homo sapien
gggaccccaaaatgcctgcggtcaa

SEQ ID NO: 5312119 - DNA, 25 bp, Homo sapien
taccagaagcctgacttaggggtcc

SEQ ID NO: 5312120 - DNA, 25 bp, Homo sapien
agctcggaccttagcctgtgcctgc

SEQ ID NO: 5312121 - DNA, 25 bp, Homo sapien
ctcagctcggaccttagcctgtgcc

SEQ ID NO: 5312122 - DNA, 25 bp, Homo sapien
ctcggaccttagcctgtgcctgcag

SEQ ID NO: 5312123 - DNA, 25 bp, Homo sapien
tcagctcggaccttagcctgtgcct

SEQ ID NO: 5312124 - DNA, 25 bp, Homo sapien
ctggaaggcaaggagccaggccacg

SEQ ID NO: 5312125 - DNA, 25 bp, Homo sapien
tggaaggcaaggagccaggccacgg

SEQ ID NO: 5312126 - DNA, 25 bp, Homo sapien
ggccaccacactggcccaaatattt

SEQ ID NO: 5312127 - DNA, 25 bp, Homo sapien
aggccacggggccacagccgcgggg

SEQ ID NO: 5312128 - DNA, 25 bp, Homo sapien
gctggggttgtaatgaaggccacgg

SEQ ID NO: 5312129 - DNA, 25 bp, Homo sapien
ccacgggtacaagagtctgcccagc

SEQ ID NO: 5312130 - DNA, 25 bp, Homo sapien
gatggtttgccacgggtacaagagt

SEQ ID NO: 5312131 - DNA, 25 bp, Homo sapien
tttgccacgggtacaagagtctgcc

SEQ ID NO: 5312132 - DNA, 25 bp, Homo sapien
gcttgctgtctgtctaaccagaggg

SEQ ID NO: 5312133 - DNA, 25 bp, Homo sapien
ggcttgctgtctgtctaaccagagg

SEQ ID NO: 5312134 - DNA, 25 bp, Homo sapien
ccatgattctttcgagggctgcctc

SEQ ID NO: 5312135 - DNA, 25 bp, Homo sapien
catgattctttcgagggctgcctca

SEQ ID NO: 5312136 - DNA, 25 bp, Homo sapien
acaggcgctggctcctttagtggtt

SEQ ID NO: 5312137 - DNA, 25 bp, Homo sapien
gcgctggctcctttagtggtttcct

SEQ ID NO: 5312138 - DNA, 25 bp, Homo sapien
caggcgctggctcctttagtggttt

SEQ ID NO: 5312139 - DNA, 25 bp, Homo sapien
cagacaggcgctggctcctttagtg

SEQ ID NO: 5312140 - DNA, 25 bp, Homo sapien
aacatagagctacgaggcatggcca

SEQ ID NO: 5312141 - DNA, 25 bp, Homo sapien
gggatagcagtcagtgtcccatggt

SEQ ID NO: 5312142 - DNA, 25 bp, Homo sapien
ttaagcaaacatagagctacgaggc

SEQ ID NO: 5312143 - DNA, 25 bp, Homo sapien
cagtcagtgtcccatggtcgtgcgg

SEQ ID NO: 5312144 - DNA, 25 bp, Homo sapien
tatgccacctcaggtgatgggagac

SEQ ID NO: 5312145 - DNA, 25 bp, Homo sapien
acctcaggtgatgggagacttcctt

SEQ ID NO: 5312146 - DNA, 25 bp, Homo sapien
gccacctcaggtgatgggagacttc

SEQ ID NO: 5312147 - DNA, 25 bp, Homo sapien
atgcttatgccacctcaggtgatgg

SEQ ID NO: 5312148 - DNA, 25 bp, Homo sapien
gtcctgtgttttgggtggactctcc

SEQ ID NO: 5312149 - DNA, 25 bp, Homo sapien
tctccaggtcctgacatctgccgtg

SEQ ID NO: 5312150 - DNA, 25 bp, Homo sapien
tgtcctgtgttttgggtggactctc

SEQ ID NO: 5312151 - DNA, 25 bp, Homo sapien
tgacatctgccgtgggaacccagct

SEQ ID NO: 5312152 - DNA, 25 bp, Homo sapien
cattttttggagagtaggaagccca

SEQ ID NO: 5312153 - DNA, 25 bp, Homo sapien
ctgaagagcccacagaacacagatg

SEQ ID NO: 5312154 - DNA, 25 bp, Homo sapien
ggtctttgcctgaacgaagcctgct

SEQ ID NO: 5312155 - DNA, 25 bp, Homo sapien
gcagccctgaaagcaggccttgttt

SEQ ID NO: 5312156 - DNA, 25 bp, Homo sapien
tgagaacagaaggtagatagggtat

SEQ ID NO: 5312157 - DNA, 25 bp, Homo sapien
aacagaaggtagatagggtatgaag

SEQ ID NO: 5312158 - DNA, 25 bp, Homo sapien
agaacagaaggtagatagggtatga

SEQ ID NO: 5312159 - DNA, 25 bp, Homo sapien
ctgagaacagaaggtagatagggta

SEQ ID NO: 5312160 - DNA, 25 bp, Homo sapien
cctggcctcatgttacttttgatta

SEQ ID NO: 5312161 - DNA, 25 bp, Homo sapien
ggcctcatgttacttttgattagtc

SEQ ID NO: 5312162 - DNA, 25 bp, Homo sapien
ctggcctcatgttacttttgattag

SEQ ID NO: 5312163 - DNA, 25 bp, Homo sapien
cctcatgttacttttgattagtctt

SEQ ID NO: 5312164 - DNA, 25 bp, Homo sapien
caaattgtagatgagagactgactg

SEQ ID NO: 5312165 - DNA, 25 bp, Homo sapien
aattgtagatgagagactgactgac

SEQ ID NO: 5312166 - DNA, 25 bp, Homo sapien
aaattgtagatgagagactgactga

SEQ ID NO: 5312167 - DNA, 25 bp, Homo sapien
tcaaattgtagatgagagactgact

SEQ ID NO: 5312168 - DNA, 25 bp, Homo sapien
gaatggtgacatggtaaggttgagt

SEQ ID NO: 5312169 - DNA, 25 bp, Homo sapien
ggaatggtgacatggtaaggttgag

SEQ ID NO: 5312170 - DNA, 25 bp, Homo sapien
tggtaaggttgagtggagacagact

SEQ ID NO: 5312171 - DNA, 25 bp, Homo sapien
caggaatggtgacatggtaaggttg

SEQ ID NO: 5312172 - DNA, 25 bp, Homo sapien
ccctaggcagagtgcacactgggca

SEQ ID NO: 5312173 - DNA, 25 bp, Homo sapien
ggccctaggcagagtgcacactggg

SEQ ID NO: 5312174 - DNA, 25 bp, Homo sapien
cagagtgcacactgggcatcctgca

SEQ ID NO: 5312175 - DNA, 25 bp, Homo sapien
ctaggcagagtgcacactgggcatc

SEQ ID NO: 5312176 - DNA, 25 bp, Homo sapien
ttgatcagcacaacagagatccatg

SEQ ID NO: 5312177 - DNA, 25 bp, Homo sapien
gagtcttcggagatgaccccaaagg

SEQ ID NO: 5312178 - DNA, 25 bp, Homo sapien
ggatgtagtcctgccatacctggag

SEQ ID NO: 5312179 - DNA, 25 bp, Homo sapien
gaggtccctccatgcaagagtgtgg

SEQ ID NO: 5312180 - DNA, 25 bp, Homo sapien
ttgtgctgcagtcaggaagggacac

SEQ ID NO: 5312181 - DNA, 25 bp, Homo sapien
gtccaccctttgtgctgcagtcagg

SEQ ID NO: 5312182 - DNA, 25 bp, Homo sapien
tccagtccaccctttgtgctgcagt

SEQ ID NO: 5312183 - DNA, 25 bp, Homo sapien
tttgtgctgcagtcaggaagggaca

SEQ ID NO: 5312184 - DNA, 25 bp, Homo sapien
gtatcagcactactttgaacatctg

SEQ ID NO: 5312185 - DNA, 25 bp, Homo sapien
ggaatagttttcagcatatttggaa

SEQ ID NO: 5312186 - DNA, 25 bp, Homo sapien
ttttggtataaaggcgacgctggct

SEQ ID NO: 5312187 - DNA, 25 bp, Homo sapien
ctgtgagtctatctggtctggggct

SEQ ID NO: 5312188 - DNA, 25 bp, Homo sapien
caagcagttgtgatgacaggtgata

SEQ ID NO: 5312189 - DNA, 25 bp, Homo sapien
tcctcatggtagagcaactatgcca

SEQ ID NO: 5312190 - DNA, 25 bp, Homo sapien
tcatgtgggtgataggcagcaagca

SEQ ID NO: 5312191 - DNA, 25 bp, Homo sapien
cacgccagccgacctgtttttctta

SEQ ID NO: 5312192 - DNA, 25 bp, Homo sapien
tctgcggaggcatttctgtcaatgt

SEQ ID NO: 5312193 - DNA, 25 bp, Homo sapien
cttctgcggaggcatttctgtcaat

SEQ ID NO: 5312194 - DNA, 25 bp, Homo sapien
tcaccctcagggccttctgcggagg

SEQ ID NO: 5312195 - DNA, 25 bp, Homo sapien
ggccttctgcggaggcatttctgtc

SEQ ID NO: 5312196 - DNA, 25 bp, Homo sapien
aagtatttcaacagcttggccagcc

SEQ ID NO: 5312197 - DNA, 25 bp, Homo sapien
taaagtcaatgtaccaattatggtg

SEQ ID NO: 5312198 - DNA, 25 bp, Homo sapien
gccttcagtaatacaaactagtgtt

SEQ ID NO: 5312199 - DNA, 25 bp, Homo sapien
gtattcttcagcatccaattcagca

SEQ ID NO: 5312200 - DNA, 25 bp, Homo sapien
gtggccagtaactggatatcctgaa

SEQ ID NO: 5312201 - DNA, 25 bp, Homo sapien
tcaggggacagatagtggccagtaa

SEQ ID NO: 5312202 - DNA, 25 bp, Homo sapien
ttcttggtatcaggggacagatagt

SEQ ID NO: 5312203 - DNA, 25 bp, Homo sapien
caacttcttggtatcaggggacaga

SEQ ID NO: 5312204 - DNA, 25 bp, Homo sapien
acgaggtcagcagatctacatcatc

SEQ ID NO: 5312205 - DNA, 25 bp, Homo sapien
gtcagcagatctacatcatcctggc

SEQ ID NO: 5312206 - DNA, 25 bp, Homo sapien
gaggtcagcagatctacatcatcct

SEQ ID NO: 5312207 - DNA, 25 bp, Homo sapien
cagcagatctacatcatcctggcta

SEQ ID NO: 5312208 - DNA, 25 bp, Homo sapien
cattgagaacttgaaacgtggctag

SEQ ID NO: 5312209 - DNA, 25 bp, Homo sapien
gtagaggtctcttgcctaatgtacc

SEQ ID NO: 5312210 - DNA, 25 bp, Homo sapien
cactagtcacacgtagccattgaga

SEQ ID NO: 5312211 - DNA, 25 bp, Homo sapien
gagacagggttcctactcacgagga

SEQ ID NO: 5312212 - DNA, 25 bp, Homo sapien
tctgtgtagcgagtcttgtctagga

SEQ ID NO: 5312213 - DNA, 25 bp, Homo sapien
ttaacactctgtgtagcgagtcttg

SEQ ID NO: 5312214 - DNA, 25 bp, Homo sapien
ttgtctaggagagctgtaccttgac

SEQ ID NO: 5312215 - DNA, 25 bp, Homo sapien
gcgagtcttgtctaggagagctgta

SEQ ID NO: 5312216 - DNA, 25 bp, Homo sapien
aagttcagcccgacgtttacagcag

SEQ ID NO: 5312217 - DNA, 25 bp, Homo sapien
gatagagccccatgcaaaagtctgc

SEQ ID NO: 5312218 - DNA, 25 bp, Homo sapien
catgtaattgctgacaccgacaagg

SEQ ID NO: 5312219 - DNA, 25 bp, Homo sapien
taatcgcagcttttggtccaggtga

SEQ ID NO: 5312220 - DNA, 25 bp, Homo sapien
agaagaattattggcttgaggtaag

SEQ ID NO: 5312221 - DNA, 25 bp, Homo sapien
tattggcttgaggtaagggattttc

SEQ ID NO: 5312222 - DNA, 25 bp, Homo sapien
aagaattattggcttgaggtaaggg

SEQ ID NO: 5312223 - DNA, 25 bp, Homo sapien
agaattattggcttgaggtaaggga

SEQ ID NO: 5312224 - DNA, 25 bp, Homo sapien
cttactgtgctttcacattgtttgg

SEQ ID NO: 5312225 - DNA, 25 bp, Homo sapien
tcacattgtttggaaaagttttcag

SEQ ID NO: 5312226 - DNA, 25 bp, Homo sapien
tttccttactgtgctttcacattgt

SEQ ID NO: 5312227 - DNA, 25 bp, Homo sapien
ttcacattgtttggaaaagttttca

SEQ ID NO: 5312228 - DNA, 25 bp, Homo sapien
gactctaggccatagctcggcaggg

SEQ ID NO: 5312229 - DNA, 25 bp, Homo sapien
gcaattagcctctgaatggactcta

SEQ ID NO: 5312230 - DNA, 25 bp, Homo sapien
gaataggatgacgtggcaattagcc

SEQ ID NO: 5312231 - DNA, 25 bp, Homo sapien
tggcctccaggagattgacaaatgt

SEQ ID NO: 5312232 - DNA, 25 bp, Homo sapien
ctgcaatttggtggaagaaatatcc

SEQ ID NO: 5312233 - DNA, 25 bp, Homo sapien
tatgatgggataactggtcgccgtg

SEQ ID NO: 5312234 - DNA, 25 bp, Homo sapien
tagagtagggtgtcgtggactgcca

SEQ ID NO: 5312235 - DNA, 25 bp, Homo sapien
taactggtcgccgtgtgtgagagca

SEQ ID NO: 5312236 - DNA, 25 bp, Homo sapien
cctctatgatgggataactggtcgc

SEQ ID NO: 5312237 - DNA, 25 bp, Homo sapien
ggacaccctaagcagtcctgttggg

SEQ ID NO: 5312238 - DNA, 25 bp, Homo sapien
tgatgtctcacatatcagcttgggg

SEQ ID NO: 5312239 - DNA, 25 bp, Homo sapien
ggagggacaccctaagcagtcctgt

SEQ ID NO: 5312240 - DNA, 25 bp, Homo sapien
tcacatatcagcttggggatgatgt

SEQ ID NO: 5312241 - DNA, 25 bp, Homo sapien
cacggaaggctccattgtgcatctt

SEQ ID NO: 5312242 - DNA, 25 bp, Homo sapien
ccccacggaaggctccattgtgcat

SEQ ID NO: 5312243 - DNA, 25 bp, Homo sapien
cttctccagatgtacgttttccttt

SEQ ID NO: 5312244 - DNA, 25 bp, Homo sapien
tggccccacggaaggctccattgtg

SEQ ID NO: 5312245 - DNA, 25 bp, Homo sapien
caggtgtttgcgaactttgcaggac

SEQ ID NO: 5312246 - DNA, 25 bp, Homo sapien
gcaaattattcttgtgtcagcccag

SEQ ID NO: 5312247 - DNA, 25 bp, Homo sapien
tgaccttgcggtgtgagaagcacag

SEQ ID NO: 5312248 - DNA, 25 bp, Homo sapien
cagtatggactgactcctagacccc

SEQ ID NO: 5312249 - DNA, 25 bp, Homo sapien
ttttattcctgagctggggaaataa

SEQ ID NO: 5312250 - DNA, 25 bp, Homo sapien
catttttattcctgagctggggaaa

SEQ ID NO: 5312251 - DNA, 25 bp, Homo sapien
cctgagctggggaaataagcaaata

SEQ ID NO: 5312252 - DNA, 25 bp, Homo sapien
tattcctgagctggggaaataagca

SEQ ID NO: 5312253 - DNA, 25 bp, Homo sapien
agtcagtgtcgtcccattgaatgca

SEQ ID NO: 5312254 - DNA, 25 bp, Homo sapien
gaagtcagtgtcgtcccattgaatg

SEQ ID NO: 5312255 - DNA, 25 bp, Homo sapien
cccattgaatgcatgactttgtact

SEQ ID NO: 5312256 - DNA, 25 bp, Homo sapien
agtgaagtcagtgtcgtcccattga

SEQ ID NO: 5312257 - DNA, 25 bp, Homo sapien
cctcctgtaacatatattactaagg

SEQ ID NO: 5312258 - DNA, 25 bp, Homo sapien
tattacaggcattcataatatctag

SEQ ID NO: 5312259 - DNA, 25 bp, Homo sapien
cgacaagaagcctaaccctcagtgt

SEQ ID NO: 5312260 - DNA, 25 bp, Homo sapien
tcatttccattataccgacaagaag

SEQ ID NO: 5312261 - DNA, 25 bp, Homo sapien
aggctctcaaacacctttggtctgt

SEQ ID NO: 5312262 - DNA, 25 bp, Homo sapien
tactagcgtcatggacttttttgcc

SEQ ID NO: 5312263 - DNA, 25 bp, Homo sapien
tctgtactagcgtcatggacttttt

SEQ ID NO: 5312264 - DNA, 25 bp, Homo sapien
aacacctttggtctgtactagcgtc

SEQ ID NO: 5312265 - DNA, 25 bp, Homo sapien
gtgttacagattcattattcatccc

SEQ ID NO: 5312266 - DNA, 25 bp, Homo sapien
ggtggttatgtgtaagttatcacaa

SEQ ID NO: 5312267 - DNA, 25 bp, Homo sapien
gtggttatgtgtaagttatcacaaa

SEQ ID NO: 5312268 - DNA, 25 bp, Homo sapien
agtgttacagattcattattcatcc

SEQ ID NO: 5312269 - DNA, 25 bp, Homo sapien
tgattcagaggagaagaccttcgta

SEQ ID NO: 5312270 - DNA, 25 bp, Homo sapien
tttgattcagaggagaagaccttcg

SEQ ID NO: 5312271 - DNA, 25 bp, Homo sapien
tgaaatttgattcagaggagaagac

SEQ ID NO: 5312272 - DNA, 25 bp, Homo sapien
cagaggagaagaccttcgtaacatc

SEQ ID NO: 5312273 - DNA, 25 bp, Homo sapien
atgctccgggctcaatgtatctcag

SEQ ID NO: 5312274 - DNA, 25 bp, Homo sapien
taaatgctccgggctcaatgtatct

SEQ ID NO: 5312275 - DNA, 25 bp, Homo sapien
aatgtatctcagatttttggtgttc

SEQ ID NO: 5312276 - DNA, 25 bp, Homo sapien
ttataaatgctccgggctcaatgta

SEQ ID NO: 5312277 - DNA, 25 bp, Homo sapien
cagggaatcaatctgagagatttca

SEQ ID NO: 5312278 - DNA, 25 bp, Homo sapien
gcttctatcctttccagggaatcaa

SEQ ID NO: 5312279 - DNA, 25 bp, Homo sapien
cctttccagggaatcaatctgagag

SEQ ID NO: 5312280 - DNA, 25 bp, Homo sapien
gcattagcttctatcctttccaggg

SEQ ID NO: 5312281 - DNA, 25 bp, Homo sapien
cctcattaagtcctctgaaagcttg

SEQ ID NO: 5312282 - DNA, 25 bp, Homo sapien
tcactttgacagggaggtaggcaag

SEQ ID NO: 5312283 - DNA, 25 bp, Homo sapien
taagtcctctgaaagcttgagatgg

SEQ ID NO: 5312284 - DNA, 25 bp, Homo sapien
tctgaaagcttgagatgggatcact

SEQ ID NO: 5312285 - DNA, 25 bp, Homo sapien
gccaaatccaattgccaagcactca

SEQ ID NO: 5312286 - DNA, 25 bp, Homo sapien
tgacttgatccccttcccagccaaa

SEQ ID NO: 5312287 - DNA, 25 bp, Homo sapien
gacttgatccccttcccagccaaat

SEQ ID NO: 5312288 - DNA, 25 bp, Homo sapien
tcccagccaaatccaattgccaagc

SEQ ID NO: 5312289 - DNA, 25 bp, Homo sapien
tcagagcttgaatacaagatgtttc

SEQ ID NO: 5312290 - DNA, 25 bp, Homo sapien
cagatgccatgcgtgaacatttcct

SEQ ID NO: 5312291 - DNA, 25 bp, Homo sapien
tctgttctcccatcgaacacccagt

SEQ ID NO: 5312292 - DNA, 25 bp, Homo sapien
gccatgcgtgaacatttcctctgtt

SEQ ID NO: 5312293 - DNA, 25 bp, Homo sapien
tcccatcgaacacccagtctctggt

SEQ ID NO: 5312294 - DNA, 25 bp, Homo sapien
aagatccagaatgggcttggatgct

SEQ ID NO: 5312295 - DNA, 25 bp, Homo sapien
tgtgtccagtctgaggcttagggat

SEQ ID NO: 5312296 - DNA, 25 bp, Homo sapien
gggcagacaggaccaaaaacagcca

SEQ ID NO: 5312297 - DNA, 25 bp, Homo sapien
ggaaaagatccagaatgggcttgga

SEQ ID NO: 5312298 - DNA, 25 bp, Homo sapien
gtcatcttccagtgaggcagaagct

SEQ ID NO: 5312299 - DNA, 25 bp, Homo sapien
aggtggcattaaggaactgaggttc

SEQ ID NO: 5312300 - DNA, 25 bp, Homo sapien
aggtggtgtcatcttccagtgaggc

SEQ ID NO: 5312301 - DNA, 25 bp, Homo sapien
ttggctgaggtggcattaaggaact

SEQ ID NO: 5312302 - DNA, 25 bp, Homo sapien
ggcgccgtcgggcacgcagttgcag

SEQ ID NO: 5312303 - DNA, 25 bp, Homo sapien
agcgcctcgcgcagcgctcgtggca

SEQ ID NO: 5312304 - DNA, 25 bp, Homo sapien
agctgcagcgccgagaaccgctgct

SEQ ID NO: 5312305 - DNA, 25 bp, Homo sapien
ggcacgcagttgcagggctcagggc

SEQ ID NO: 5312306 - DNA, 25 bp, Homo sapien
gggcttctgcggcttgccagtgtct

SEQ ID NO: 5312307 - DNA, 25 bp, Homo sapien
gaactgggcttctgcggcttgccag

SEQ ID NO: 5312308 - DNA, 25 bp, Homo sapien
ggccggcgaactgggcttctgcggc

SEQ ID NO: 5312309 - DNA, 25 bp, Homo sapien
gcgaactgggcttctgcggcttgcc

SEQ ID NO: 5312310 - DNA, 25 bp, Homo sapien
tcttatctctgtcacaggactcatt

SEQ ID NO: 5312311 - DNA, 25 bp, Homo sapien
ctctgtcacaggactcattatagtc

SEQ ID NO: 5312312 - DNA, 25 bp, Homo sapien
ccagttaggagagaaatagggcttt

SEQ ID NO: 5312313 - DNA, 25 bp, Homo sapien
cttcccagttaggagagaaataggg

SEQ ID NO: 5312314 - DNA, 25 bp, Homo sapien
ctttcggcaaaaggagaagctgatt

SEQ ID NO: 5312315 - DNA, 25 bp, Homo sapien
tagcaggcggtactgaattttgcat

SEQ ID NO: 5312316 - DNA, 25 bp, Homo sapien
tagtttagaaatagcaggcggtact

SEQ ID NO: 5312317 - DNA, 25 bp, Homo sapien
gggctgacagtctgtaagaatactg

SEQ ID NO: 5312318 - DNA, 25 bp, Homo sapien
tcaggttactctcttccttaacctc

SEQ ID NO: 5312319 - DNA, 25 bp, Homo sapien
tccttaacctcctggtaacctgcta

SEQ ID NO: 5312320 - DNA, 25 bp, Homo sapien
taacctcctggtaacctgctaaatc

SEQ ID NO: 5312321 - DNA, 25 bp, Homo sapien
atgaactcaggttactctcttcctt

SEQ ID NO: 5312322 - DNA, 25 bp, Homo sapien
taccagggttcgtcatgggcagcaa

SEQ ID NO: 5312323 - DNA, 25 bp, Homo sapien
tatcagcagggagataccagggttc

SEQ ID NO: 5312324 - DNA, 25 bp, Homo sapien
gaggccctaatcctaattttctgag

SEQ ID NO: 5312325 - DNA, 25 bp, Homo sapien
tgggcagcaatgactacgatggaca

SEQ ID NO: 5312326 - DNA, 25 bp, Homo sapien
gctcaaagatgttttgtgcttgcct

SEQ ID NO: 5312327 - DNA, 25 bp, Homo sapien
gtcaggccactggaacagcctgcag

SEQ ID NO: 5312328 - DNA, 25 bp, Homo sapien
agtcaggccactggaacagcctgca

SEQ ID NO: 5312329 - DNA, 25 bp, Homo sapien
aagcaggtgggtaacgtgctcaaag

SEQ ID NO: 5312330 - DNA, 25 bp, Homo sapien
tgctttacaatgataggattgcccc

SEQ ID NO: 5312331 - DNA, 25 bp, Homo sapien
tcttagggcgttcttggacaagaca

SEQ ID NO: 5312332 - DNA, 25 bp, Homo sapien
catttatagggcagttgaactttca

SEQ ID NO: 5312333 - DNA, 25 bp, Homo sapien
taaaatggctacaagaatatgggca

SEQ ID NO: 5312334 - DNA, 25 bp, Homo sapien
cgtcttcacggacatcaaggagtcc

SEQ ID NO: 5312335 - DNA, 25 bp, Homo sapien
tcttcacggacatcaaggagtccag

SEQ ID NO: 5312336 - DNA, 25 bp, Homo sapien
gatatcctgaaatggctgcctgatt

SEQ ID NO: 5312337 - DNA, 25 bp, Homo sapien
gattagcaacggctgtacaagggtg

SEQ ID NO: 5312338 - DNA, 25 bp, Homo sapien
ggctggatttctgggtcgggtcaga

SEQ ID NO: 5312339 - DNA, 25 bp, Homo sapien
ctggtgatggcaagacgatgcatga

SEQ ID NO: 5312340 - DNA, 25 bp, Homo sapien
atgaggccctgcacatcgagccctt

SEQ ID NO: 5312341 - DNA, 25 bp, Homo sapien
ggcaagacgatgcatgagtttggct

SEQ ID NO: 5312342 - DNA, 25 bp, Homo sapien
tacagcaagctactgacagagatgg

SEQ ID NO: 5312343 - DNA, 25 bp, Homo sapien
ggctcttttaccagctcttcagata

SEQ ID NO: 5312344 - DNA, 25 bp, Homo sapien
gatgtaaaccagtcctacagcaagc

SEQ ID NO: 5312345 - DNA, 25 bp, Homo sapien
tacattccagatttctgatggacac

SEQ ID NO: 5312346 - DNA, 25 bp, Homo sapien
gggaattcaggagacaagacatcga

SEQ ID NO: 5312347 - DNA, 25 bp, Homo sapien
gataggcctatatgcagagctaggg

SEQ ID NO: 5312348 - DNA, 25 bp, Homo sapien
gatttccttggtactgctttagcca

SEQ ID NO: 5312349 - DNA, 25 bp, Homo sapien
gctttagccataacagagataggcc

SEQ ID NO: 5312350 - DNA, 25 bp, Homo sapien
agcaggaaggcttcgatggccgcca

SEQ ID NO: 5312351 - DNA, 25 bp, Homo sapien
agagcaggaaggcttcgatggccgc

SEQ ID NO: 5312352 - DNA, 25 bp, Homo sapien
gaaggcttcgatggccgccatttta

SEQ ID NO: 5312353 - DNA, 25 bp, Homo sapien
caggaaggcttcgatggccgccatt

SEQ ID NO: 5312354 - DNA, 25 bp, Homo sapien
caatttcccaccctcgtcagactct

SEQ ID NO: 5312355 - DNA, 25 bp, Homo sapien
cctcgtcagactctccttggacctg

SEQ ID NO: 5312356 - DNA, 25 bp, Homo sapien
gcaggtttatatggagtctgggtcc

SEQ ID NO: 5312357 - DNA, 25 bp, Homo sapien
cctgagagcccaggatgactctgga

SEQ ID NO: 5312358 - DNA, 25 bp, Homo sapien
ggtgggctcaagatttcttaatgcc

SEQ ID NO: 5312359 - DNA, 25 bp, Homo sapien
gagaacatggcccttctttagggag

SEQ ID NO: 5312360 - DNA, 25 bp, Homo sapien
tgatagacagggtaataatgtggct

SEQ ID NO: 5312361 - DNA, 25 bp, Homo sapien
gtgatagacagggtaataatgtggc

SEQ ID NO: 5312362 - DNA, 25 bp, Homo sapien
tgtgatagacagggtaataatgtgg

SEQ ID NO: 5312363 - DNA, 25 bp, Homo sapien
atagacagggtaataatgtggctta

SEQ ID NO: 5312364 - DNA, 25 bp, Homo sapien
gagttttagagtatgtaatttctag

SEQ ID NO: 5312365 - DNA, 25 bp, Homo sapien
catttctggaagcacatattggctg

SEQ ID NO: 5312366 - DNA, 25 bp, Homo sapien
atgtaatttctagggccatttctgg

SEQ ID NO: 5312367 - DNA, 25 bp, Homo sapien
tctggaagcacatattggctgttgt

SEQ ID NO: 5312368 - DNA, 25 bp, Homo sapien
tcaggcatatataagaatccagtta

SEQ ID NO: 5312369 - DNA, 25 bp, Homo sapien
caggcatatataagaatccagttat

SEQ ID NO: 5312370 - DNA, 25 bp, Homo sapien
tactctagttgctgtagaacatgtt

SEQ ID NO: 5312371 - DNA, 25 bp, Homo sapien
tcttctactctagttgctgtagaac

SEQ ID NO: 5312372 - DNA, 25 bp, Homo sapien
ggtcaattagaacctgaaaattctg

SEQ ID NO: 5312373 - DNA, 25 bp, Homo sapien
taagtttaccggaatgattatcaga

SEQ ID NO: 5312374 - DNA, 25 bp, Homo sapien
tcagagtgaccactggttctaaaat

SEQ ID NO: 5312375 - DNA, 25 bp, Homo sapien
aattctggaagacctcttgatctgt

SEQ ID NO: 5312376 - DNA, 25 bp, Homo sapien
aatcccatcatgttctctggtaggt

SEQ ID NO: 5312377 - DNA, 25 bp, Homo sapien
cataatcccatcatgttctctggta

SEQ ID NO: 5312378 - DNA, 25 bp, Homo sapien
ggtaggtaaggaatatgtaatagga

SEQ ID NO: 5312379 - DNA, 25 bp, Homo sapien
gttctctggtaggtaaggaatatgt

SEQ ID NO: 5312380 - DNA, 25 bp, Homo sapien
aatagtagctaaaagctggcagaga

SEQ ID NO: 5312381 - DNA, 25 bp, Homo sapien
gaatagtagctaaaagctggcagag

SEQ ID NO: 5312382 - DNA, 25 bp, Homo sapien
ctcctaactgtgctggagtggccag

SEQ ID NO: 5312383 - DNA, 25 bp, Homo sapien
cagcagctcgttagctaattttggc

SEQ ID NO: 5312384 - DNA, 25 bp, Homo sapien
gagtggccagcagctcgttagctaa

SEQ ID NO: 5312385 - DNA, 25 bp, Homo sapien
cctaactgtgctggagtggccagca

SEQ ID NO: 5312386 - DNA, 25 bp, Homo sapien
ttgctttaccgccatatttagggtc

SEQ ID NO: 5312387 - DNA, 25 bp, Homo sapien
gctttaccgccatatttagggtcca

SEQ ID NO: 5312388 - DNA, 25 bp, Homo sapien
cttctttgctttaccgccatattta

SEQ ID NO: 5312389 - DNA, 25 bp, Homo sapien
taccgccatatttagggtccaagga

SEQ ID NO: 5312390 - DNA, 25 bp, Homo sapien
ctggatctgtttgtgcttgtggcat

SEQ ID NO: 5312391 - DNA, 25 bp, Homo sapien
ctgtacatctgcggtcagggtacat

SEQ ID NO: 5312392 - DNA, 25 bp, Homo sapien
gctgtacatctgcggtcagggtaca

SEQ ID NO: 5312393 - DNA, 25 bp, Homo sapien
actttctttaaaactgatgtctcca

SEQ ID NO: 5312394 - DNA, 25 bp, Homo sapien
ctttctttaaaactgatgtctccat

SEQ ID NO: 5312395 - DNA, 25 bp, Homo sapien
ccaactttctttaaaactgatgtct

SEQ ID NO: 5312396 - DNA, 25 bp, Homo sapien
caactttctttaaaactgatgtctc

SEQ ID NO: 5312397 - DNA, 25 bp, Homo sapien
ttcaggtatgcgatgggcagcctct

SEQ ID NO: 5312398 - DNA, 25 bp, Homo sapien
tgcttctggaaagtccgggcttttc

SEQ ID NO: 5312399 - DNA, 25 bp, Homo sapien
aggatgcttctggaaagtccgggct

SEQ ID NO: 5312400 - DNA, 25 bp, Homo sapien
tgtttaaggagactaggttgactct

SEQ ID NO: 5312401 - DNA, 25 bp, Homo sapien
aaagctcccatcttcgtcttctcgt

SEQ ID NO: 5312402 - DNA, 25 bp, Homo sapien
gtcttctcgtattgtttctccttgc

SEQ ID NO: 5312403 - DNA, 25 bp, Homo sapien
cttcgtcttctcgtattgtttctcc

SEQ ID NO: 5312404 - DNA, 25 bp, Homo sapien
tcccatcttcgtcttctcgtattgt

SEQ ID NO: 5312405 - DNA, 25 bp, Homo sapien
agggcctgcgttagacaccctcctt

SEQ ID NO: 5312406 - DNA, 25 bp, Homo sapien
aatggcagcacgcagttttaggcag

SEQ ID NO: 5312407 - DNA, 25 bp, Homo sapien
ttttaggcagaaagagggcctgcgt

SEQ ID NO: 5312408 - DNA, 25 bp, Homo sapien
gggtgccctgcccacaatgtgatgg

SEQ ID NO: 5312409 - DNA, 25 bp, Homo sapien
cgaaaagcccttctagcctggccat

SEQ ID NO: 5312410 - DNA, 25 bp, Homo sapien
tcccgaaaagcccttctagcctggc

SEQ ID NO: 5312411 - DNA, 25 bp, Homo sapien
ccgaaaagcccttctagcctggcca

SEQ ID NO: 5312412 - DNA, 25 bp, Homo sapien
tatgcagtgggtggtactctgagga

SEQ ID NO: 5312413 - DNA, 25 bp, Homo sapien
ttatgcagtgggtggtactctgagg

SEQ ID NO: 5312414 - DNA, 25 bp, Homo sapien
atgcagtgggtggtactctgaggat

SEQ ID NO: 5312415 - DNA, 25 bp, Homo sapien
cttcactacttgtttctctctacaa

SEQ ID NO: 5312416 - DNA, 25 bp, Homo sapien
tcttggagtgtcctccctcacctcc

SEQ ID NO: 5312417 - DNA, 25 bp, Homo sapien
tagtttcccttcatggcctttgctg

SEQ ID NO: 5312418 - DNA, 25 bp, Homo sapien
gataaactctaaactcctgtgcttg

SEQ ID NO: 5312419 - DNA, 25 bp, Homo sapien
ggatgactaaagtaaccatcacctt

SEQ ID NO: 5312420 - DNA, 25 bp, Homo sapien
tgactaaagtaaccatcaccttcta

SEQ ID NO: 5312421 - DNA, 25 bp, Homo sapien
gatgactaaagtaaccatcaccttc

SEQ ID NO: 5312422 - DNA, 25 bp, Homo sapien
atgactaaagtaaccatcaccttct

SEQ ID NO: 5312423 - DNA, 25 bp, Homo sapien
cgggttgcatatataaagggcactg

SEQ ID NO: 5312424 - DNA, 25 bp, Homo sapien
ggctgtggcttgcaaccagtgaaat

SEQ ID NO: 5312425 - DNA, 25 bp, Homo sapien
tatgatgcatttcacccgggttgca

SEQ ID NO: 5312426 - DNA, 25 bp, Homo sapien
cactgcaatggaaagagttgcaaaa

SEQ ID NO: 5312427 - DNA, 25 bp, Homo sapien
ggagccaggtccttggtccgtggtg

SEQ ID NO: 5312428 - DNA, 25 bp, Homo sapien
agccaggtccttggtccgtggtgtt

SEQ ID NO: 5312429 - DNA, 25 bp, Homo sapien
gaggagccaggtccttggtccgtgg

SEQ ID NO: 5312430 - DNA, 25 bp, Homo sapien
ggaggagccaggtccttggtccgtg

SEQ ID NO: 5312431 - DNA, 25 bp, Homo sapien
cagtggcaatgtagagagtgatccc

SEQ ID NO: 5312432 - DNA, 25 bp, Homo sapien
aatgtagagagtgatcccgttcctc

SEQ ID NO: 5312433 - DNA, 25 bp, Homo sapien
agacagtggcaatgtagagagtgat

SEQ ID NO: 5312434 - DNA, 25 bp, Homo sapien
tggcaatgtagagagtgatcccgtt

SEQ ID NO: 5312435 - DNA, 25 bp, Homo sapien
acttcttcagcacctggggaaataa

SEQ ID NO: 5312436 - DNA, 25 bp, Homo sapien
tacttcttcagcacctggggaaata

SEQ ID NO: 5312437 - DNA, 25 bp, Homo sapien
ttacttcttcagcacctggggaaat

SEQ ID NO: 5312438 - DNA, 25 bp, Homo sapien
ttcttcagcacctggggaaataaac

SEQ ID NO: 5312439 - DNA, 25 bp, Homo sapien
atcagtcagtttaaggaaccaaccg

SEQ ID NO: 5312440 - DNA, 25 bp, Homo sapien
ttcctccttatcagtcagtttaagg

SEQ ID NO: 5312441 - DNA, 25 bp, Homo sapien
ccgtaaggggcatttctgaagggct

SEQ ID NO: 5312442 - DNA, 25 bp, Homo sapien
ctttttcctccttatcagtcagttt

SEQ ID NO: 5312443 - DNA, 25 bp, Homo sapien
ttatcttgcattcagctggatgagg

SEQ ID NO: 5312444 - DNA, 25 bp, Homo sapien
tcttgcattcagctggatgaggtgt

SEQ ID NO: 5312445 - DNA, 25 bp, Homo sapien
tgcattcagctggatgaggtgtaat

SEQ ID NO: 5312446 - DNA, 25 bp, Homo sapien
attcagctggatgaggtgtaatttc

SEQ ID NO: 5312447 - DNA, 25 bp, Homo sapien
gcactttctggatcacagtgacctg

SEQ ID NO: 5312448 - DNA, 25 bp, Homo sapien
cactttctggatcacagtgacctgt

SEQ ID NO: 5312449 - DNA, 25 bp, Homo sapien
ttaaataagataatgtctgttatga

SEQ ID NO: 5312450 - DNA, 25 bp, Homo sapien
aaataagataatgtctgttatgatg

SEQ ID NO: 5312451 - DNA, 25 bp, Homo sapien
cttgtctttaaataagataatgtct

SEQ ID NO: 5312452 - DNA, 25 bp, Homo sapien
tgtctttaaataagataatgtctgt

SEQ ID NO: 5312453 - DNA, 25 bp, Homo sapien
gactcttctcactgaagggagttgg

SEQ ID NO: 5312454 - DNA, 25 bp, Homo sapien
agactcttctcactgaagggagttg

SEQ ID NO: 5312455 - DNA, 25 bp, Homo sapien
ctggaaaggacaggcatagagcaga

SEQ ID NO: 5312456 - DNA, 25 bp, Homo sapien
tcttctcactgaagggagttgggag

SEQ ID NO: 5312457 - DNA, 25 bp, Homo sapien
gatggcatcaatgccccttgggaaa

SEQ ID NO: 5312458 - DNA, 25 bp, Homo sapien
ttgtgtctgacattccaggcagatg

SEQ ID NO: 5312459 - DNA, 25 bp, Homo sapien
ttgttgtttatcttttgcggccctg

SEQ ID NO: 5312460 - DNA, 25 bp, Homo sapien
ttttgttgttcctggtattcagagt

SEQ ID NO: 5312461 - DNA, 25 bp, Homo sapien
gtagggaaagcttctgtcatacaag

SEQ ID NO: 5312462 - DNA, 25 bp, Homo sapien
gggaaagcttctgtcatacaagttg

SEQ ID NO: 5312463 - DNA, 25 bp, Homo sapien
agggaaagcttctgtcatacaagtt

SEQ ID NO: 5312464 - DNA, 25 bp, Homo sapien
tagggaaagcttctgtcatacaagt

SEQ ID NO: 5312465 - DNA, 25 bp, Homo sapien
gcagtagggttttgggatggtgcag

SEQ ID NO: 5312466 - DNA, 25 bp, Homo sapien
aaagggcagaggatatcagggtggg

SEQ ID NO: 5312467 - DNA, 25 bp, Homo sapien
gaaaagggcagaggatatcagggtg

SEQ ID NO: 5312468 - DNA, 25 bp, Homo sapien
aaaagggcagaggatatcagggtgg

SEQ ID NO: 5312469 - DNA, 25 bp, Homo sapien
ctgaaaagggcagaggatatcaggg

SEQ ID NO: 5312470 - DNA, 25 bp, Homo sapien
tgtaccactgtcgggagattgtgaa

SEQ ID NO: 5312471 - DNA, 25 bp, Homo sapien
gtaccactgtcgggagattgtgaat

SEQ ID NO: 5312472 - DNA, 25 bp, Homo sapien
taccactgtcgggagattgtgaatc

SEQ ID NO: 5312473 - DNA, 25 bp, Homo sapien
accactgtcgggagattgtgaatca

SEQ ID NO: 5312474 - DNA, 25 bp, Homo sapien
tgtggcaccactgagctcgagatga

SEQ ID NO: 5312475 - DNA, 25 bp, Homo sapien
atgtggcaccactgagctcgagatg

SEQ ID NO: 5312476 - DNA, 25 bp, Homo sapien
tatgtggcaccactgagctcgagat

SEQ ID NO: 5312477 - DNA, 25 bp, Homo sapien
ctgatgtgacaaagaattcttgttc

SEQ ID NO: 5312478 - DNA, 25 bp, Homo sapien
tgacaaagaattcttgttcacacag

SEQ ID NO: 5312479 - DNA, 25 bp, Homo sapien
gaattcttgttcacacagtttctta

SEQ ID NO: 5312480 - DNA, 25 bp, Homo sapien
cacacagtttcttaagctttctgaa

SEQ ID NO: 5312481 - DNA, 25 bp, Homo sapien
tggtggctcaacagatctcggtggc

SEQ ID NO: 5312482 - DNA, 25 bp, Homo sapien
ggtggctcaacagatctcggtggca

SEQ ID NO: 5312483 - DNA, 25 bp, Homo sapien
ctgtggtggctcaacagatctcggt

SEQ ID NO: 5312484 - DNA, 25 bp, Homo sapien
tgtggtggctcaacagatctcggtg

SEQ ID NO: 5312485 - DNA, 25 bp, Homo sapien
atacagataaaattccttgcatctt

SEQ ID NO: 5312486 - DNA, 25 bp, Homo sapien
caaagccaaagggctctgattcctg

SEQ ID NO: 5312487 - DNA, 25 bp, Homo sapien
tgtggttatgttccttgaaactgca

SEQ ID NO: 5312488 - DNA, 25 bp, Homo sapien
tacagtaaagtcattggtgaggttg

SEQ ID NO: 5312489 - DNA, 25 bp, Homo sapien
catgtcgagggctgcgcctctatcc

SEQ ID NO: 5312490 - DNA, 25 bp, Homo sapien
aagacactgaatccgaaggccttgg

SEQ ID NO: 5312491 - DNA, 25 bp, Homo sapien
gtagggattataaagtaagacactg

SEQ ID NO: 5312492 - DNA, 25 bp, Homo sapien
cagcgtcttcgcagggatgcaggct

SEQ ID NO: 5312493 - DNA, 25 bp, Homo sapien
aggctgctccggatccacctctgct

SEQ ID NO: 5312494 - DNA, 25 bp, Homo sapien
agcgcctcgtacagccacggttcct

SEQ ID NO: 5312495 - DNA, 25 bp, Homo sapien
tggcagatggtggagtcggctgttt

SEQ ID NO: 5312496 - DNA, 25 bp, Homo sapien
ggcagatggtggagtcggctgtttc

SEQ ID NO: 5312497 - DNA, 25 bp, Homo sapien
ctcgtacagccacggttcctccggt

SEQ ID NO: 5312498 - DNA, 25 bp, Homo sapien
tgttgcacacagcaatcccgagctc

SEQ ID NO: 5312499 - DNA, 25 bp, Homo sapien
ggatgttgcacacagcaatcccgag

SEQ ID NO: 5312500 - DNA, 25 bp, Homo sapien
ttgcacacagcaatcccgagctcac

SEQ ID NO: 5312501 - DNA, 25 bp, Homo sapien
ctcggaagggatgttgcacacagca

SEQ ID NO: 5312502 - DNA, 25 bp, Homo sapien
gattttgtggtacgtcatggcgccc

SEQ ID NO: 5312503 - DNA, 25 bp, Homo sapien
aacagtcactcttagggccttgaac

SEQ ID NO: 5312504 - DNA, 25 bp, Homo sapien
ggccagtgcctatctgcaacagtca

SEQ ID NO: 5312505 - DNA, 25 bp, Homo sapien
gtccatccacattgtcgtggccagt

SEQ ID NO: 5312506 - DNA, 25 bp, Homo sapien
agttgcagtggtccagcaacgccac

SEQ ID NO: 5312507 - DNA, 25 bp, Homo sapien
gcagtggtccagcaacgccacaggg

SEQ ID NO: 5312508 - DNA, 25 bp, Homo sapien
tgcagttgcagtggtccagcaacgc

SEQ ID NO: 5312509 - DNA, 25 bp, Homo sapien
ttgcagtggtccagcaacgccacag

SEQ ID NO: 5312510 - DNA, 25 bp, Homo sapien
cgtgggggcgtataccttcacagac

SEQ ID NO: 5312511 - DNA, 25 bp, Homo sapien
taccttcacagactgtgtccaatcg

SEQ ID NO: 5312512 - DNA, 25 bp, Homo sapien
gggcgtataccttcacagactgtgt

SEQ ID NO: 5312513 - DNA, 25 bp, Homo sapien
acagactgtgtccaatcgctgcctc

SEQ ID NO: 5312514 - DNA, 25 bp, Homo sapien
caagtaggtctgatgtttggtgaag

SEQ ID NO: 5312515 - DNA, 25 bp, Homo sapien
gaccaagctagtttcctccatcgaa

SEQ ID NO: 5312516 - DNA, 25 bp, Homo sapien
ctggaagggcaaactagaccaagct

SEQ ID NO: 5312517 - DNA, 25 bp, Homo sapien
agtctaagattaaggcacaagtagg

SEQ ID NO: 5312518 - DNA, 25 bp, Homo sapien
ggtctccatgggaatatgtctaatt

SEQ ID NO: 5312519 - DNA, 25 bp, Homo sapien
gggaagatatcaagtccttggtctc

SEQ ID NO: 5312520 - DNA, 25 bp, Homo sapien
tgtgggggtgcttgcaaattgtcaa

SEQ ID NO: 5312521 - DNA, 25 bp, Homo sapien
gccacatagcgtttatttctgtgac

SEQ ID NO: 5312522 - DNA, 25 bp, Homo sapien
cattgttgactttgtcactgttttc

SEQ ID NO: 5312523 - DNA, 25 bp, Homo sapien
ccactaaagtgaggatgtcctgtaa

SEQ ID NO: 5312524 - DNA, 25 bp, Homo sapien
taaggctctgactgttcagctcaac

SEQ ID NO: 5312525 - DNA, 25 bp, Homo sapien
aatcagagaagccagtttggcttat

SEQ ID NO: 5312526 - DNA, 25 bp, Homo sapien
cagttgtttacctgaggcctgtggc

SEQ ID NO: 5312527 - DNA, 25 bp, Homo sapien
taggaggagcatagacatgtgggaa

SEQ ID NO: 5312528 - DNA, 25 bp, Homo sapien
gccgtggatagatttatgtctgcag

SEQ ID NO: 5312529 - DNA, 25 bp, Homo sapien
gggcccaaagaactggtgctctttg

SEQ ID NO: 5312530 - DNA, 25 bp, Homo sapien
agacatgaggcatcggtgaaggttg

SEQ ID NO: 5312531 - DNA, 25 bp, Homo sapien
tggaaaaggtagttgtggacacagc

SEQ ID NO: 5312532 - DNA, 25 bp, Homo sapien
acacagcatggacaaagcggaggtg

SEQ ID NO: 5312533 - DNA, 25 bp, Homo sapien
gaggcatcggtgaaggttggaaaag

SEQ ID NO: 5312534 - DNA, 25 bp, Homo sapien
tgatgttggttgacactggtcactt

SEQ ID NO: 5312535 - DNA, 25 bp, Homo sapien
aataatggcaactggtgggaccagc

SEQ ID NO: 5312536 - DNA, 25 bp, Homo sapien
catagaacatatgggcgctaggaac

SEQ ID NO: 5312537 - DNA, 25 bp, Homo sapien
tggcagtaacttgggaactccacag

SEQ ID NO: 5312538 - DNA, 25 bp, Homo sapien
ccggaaactggccaatatctgctaa

SEQ ID NO: 5312539 - DNA, 25 bp, Homo sapien
tcaaacaagctaacaccggaaactg

SEQ ID NO: 5312540 - DNA, 25 bp, Homo sapien
tccttcaaggcccaacctaggtgtc

SEQ ID NO: 5312541 - DNA, 25 bp, Homo sapien
tctgtcgtctgaagtaggagctctt

SEQ ID NO: 5312542 - DNA, 25 bp, Homo sapien
gtgtagaaccttgtctgatttgtaa

SEQ ID NO: 5312543 - DNA, 25 bp, Homo sapien
cttctgtgtagaaccttgtctgatt

SEQ ID NO: 5312544 - DNA, 25 bp, Homo sapien
tctgtgtagaaccttgtctgatttg

SEQ ID NO: 5312545 - DNA, 25 bp, Homo sapien
accttctgtgtagaaccttgtctga

SEQ ID NO: 5312546 - DNA, 25 bp, Homo sapien
ggctgcctagtaagcactgattcca

SEQ ID NO: 5312547 - DNA, 25 bp, Homo sapien
gttgataatcatgccttgctgctgg

SEQ ID NO: 5312548 - DNA, 25 bp, Homo sapien
caggaggagtgtgagtcacgtgaca

SEQ ID NO: 5312549 - DNA, 25 bp, Homo sapien
aaagctttaatgctgcccgtctggc

SEQ ID NO: 5312550 - DNA, 25 bp, Homo sapien
tactaataattcagcttcctaatgt

SEQ ID NO: 5312551 - DNA, 25 bp, Homo sapien
tgtcagctctttgtgacataccctt

SEQ ID NO: 5312552 - DNA, 25 bp, Homo sapien
taccttaaaggtatgccaggaatat

SEQ ID NO: 5312553 - DNA, 25 bp, Homo sapien
gaaatgtgtagaagcactgtcagct

SEQ ID NO: 5312554 - DNA, 25 bp, Homo sapien
cacaaggagggacatgacatacagc

SEQ ID NO: 5312555 - DNA, 25 bp, Homo sapien
gatgaccacaaaggccaggacattg

SEQ ID NO: 5312556 - DNA, 25 bp, Homo sapien
tggaaccactggtgactctgggagc

SEQ ID NO: 5312557 - DNA, 25 bp, Homo sapien
catgcgcttggcgatcctggtgtca

SEQ ID NO: 5312558 - DNA, 25 bp, Homo sapien
gatctctgacccctagcctgagtca

SEQ ID NO: 5312559 - DNA, 25 bp, Homo sapien
cctagcctgagtcatataatcaact

SEQ ID NO: 5312560 - DNA, 25 bp, Homo sapien
ctgacccctagcctgagtcatataa

SEQ ID NO: 5312561 - DNA, 25 bp, Homo sapien
gaggatctctgacccctagcctgag

SEQ ID NO: 5312562 - DNA, 25 bp, Homo sapien
gattttctaagccatagctaggcag

SEQ ID NO: 5312563 - DNA, 25 bp, Homo sapien
taagttgtaagtcgacctggccctc

SEQ ID NO: 5312564 - DNA, 25 bp, Homo sapien
ttccatgagggcgacaagcttttcc

SEQ ID NO: 5312565 - DNA, 25 bp, Homo sapien
taggcagggaatggatccttgttct

SEQ ID NO: 5312566 - DNA, 25 bp, Homo sapien
gagagactccggttcctccaacaca

SEQ ID NO: 5312567 - DNA, 25 bp, Homo sapien
tggatgaggagagagactccggttc

SEQ ID NO: 5312568 - DNA, 25 bp, Homo sapien
aggagagagactccggttcctccaa

SEQ ID NO: 5312569 - DNA, 25 bp, Homo sapien
gatgaggagagagactccggttcct

SEQ ID NO: 5312570 - DNA, 25 bp, Homo sapien
gccagatggatatttggctaatagg

SEQ ID NO: 5312571 - DNA, 25 bp, Homo sapien
gatatttggctaataggacatttgg

SEQ ID NO: 5312572 - DNA, 25 bp, Homo sapien
tggctaataggacatttggttctgt

SEQ ID NO: 5312573 - DNA, 25 bp, Homo sapien
acatttggttctgtaggagtcctgg

SEQ ID NO: 5312574 - DNA, 25 bp, Homo sapien
cagaggctccgtggaaaacatcatt

SEQ ID NO: 5312575 - DNA, 25 bp, Homo sapien
taaattattattatcgcttagattc

SEQ ID NO: 5312576 - DNA, 25 bp, Homo sapien
ggctccgtggaaaacatcattaggc

SEQ ID NO: 5312577 - DNA, 25 bp, Homo sapien
atcattaggcaattcttctaaatta

SEQ ID NO: 5312578 - DNA, 25 bp, Homo sapien
tgaatgcacagttgtgtatttcttg

SEQ ID NO: 5312579 - DNA, 25 bp, Homo sapien
gtgtatttcttgaatcccattctta

SEQ ID NO: 5312580 - DNA, 25 bp, Homo sapien
ggttccattgaatgcacagttgtgt

SEQ ID NO: 5312581 - DNA, 25 bp, Homo sapien
gctcatctagttgggttccattgaa

SEQ ID NO: 5312582 - DNA, 25 bp, Homo sapien
ctaattaagttgtcagacaacctga

SEQ ID NO: 5312583 - DNA, 25 bp, Homo sapien
ttagtgggcttgcaaataacactgt

SEQ ID NO: 5312584 - DNA, 25 bp, Homo sapien
agcttagtgggcttgcaaataacac

SEQ ID NO: 5312585 - DNA, 25 bp, Homo sapien
cttagtgggcttgcaaataacactg

SEQ ID NO: 5312586 - DNA, 25 bp, Homo sapien
gcttagtgggcttgcaaataacact

SEQ ID NO: 5312587 - DNA, 25 bp, Homo sapien
agaacaactgtatgtctttttcctc

SEQ ID NO: 5312588 - DNA, 25 bp, Homo sapien
gaacaactgtatgtctttttcctcc

SEQ ID NO: 5312589 - DNA, 25 bp, Homo sapien
ccatgggtagccagaaaacacttaa

SEQ ID NO: 5312590 - DNA, 25 bp, Homo sapien
catgggtagccagaaaacacttaaa

SEQ ID NO: 5312591 - DNA, 25 bp, Homo sapien
tcagccccacgaaagaatttctttc

SEQ ID NO: 5312592 - DNA, 25 bp, Homo sapien
gaatttctttcaattgtgtggatgt

SEQ ID NO: 5312593 - DNA, 25 bp, Homo sapien
aatttctttcaattgtgtggatgtt

SEQ ID NO: 5312594 - DNA, 25 bp, Homo sapien
tttctttcaattgtgtggatgttta

SEQ ID NO: 5312595 - DNA, 25 bp, Homo sapien
gagaatgaatcttgtgaacatctgg

SEQ ID NO: 5312596 - DNA, 25 bp, Homo sapien
atctggaaggtgcttaatacctgtg

SEQ ID NO: 5312597 - DNA, 25 bp, Homo sapien
gagagaatgaatcttgtgaacatct

SEQ ID NO: 5312598 - DNA, 25 bp, Homo sapien
aacatctggaaggtgcttaatacct

SEQ ID NO: 5312599 - DNA, 25 bp, Homo sapien
cccaatatgaggctttagtagtgga

SEQ ID NO: 5312600 - DNA, 25 bp, Homo sapien
taaacctcccaatatgaggctttag

SEQ ID NO: 5312601 - DNA, 25 bp, Homo sapien
ggtggggtatttgcctaatgtctct

SEQ ID NO: 5312602 - DNA, 25 bp, Homo sapien
tagtggaataagaggcaacagttta

SEQ ID NO: 5312603 - DNA, 25 bp, Homo sapien
tgatagtcctgcataagatgtctgg

SEQ ID NO: 5312604 - DNA, 25 bp, Homo sapien
gattgtgcccaaacatccttgtagt

SEQ ID NO: 5312605 - DNA, 25 bp, Homo sapien
tgcaacactgacagccaggagatgg

SEQ ID NO: 5312606 - DNA, 25 bp, Homo sapien
tctgccaggcagattactgataaaa

SEQ ID NO: 5312607 - DNA, 25 bp, Homo sapien
tacagaggtattgctatttccaggg

SEQ ID NO: 5312608 - DNA, 25 bp, Homo sapien
cacagctctacagaggtattgctat

SEQ ID NO: 5312609 - DNA, 25 bp, Homo sapien
gctctacagaggtattgctatttcc

SEQ ID NO: 5312610 - DNA, 25 bp, Homo sapien
ccacacagctctacagaggtattgc

SEQ ID NO: 5312611 - DNA, 25 bp, Homo sapien
cactgaaggctctatgatccccatt

SEQ ID NO: 5312612 - DNA, 25 bp, Homo sapien
gttctgtcactgaaggctctatgat

SEQ ID NO: 5312613 - DNA, 25 bp, Homo sapien
tgtcactgaaggctctatgatcccc

SEQ ID NO: 5312614 - DNA, 25 bp, Homo sapien
gaaggctctatgatccccattttcc

SEQ ID NO: 5312615 - DNA, 25 bp, Homo sapien
gttgatgtagagcaggttgttggcc

SEQ ID NO: 5312616 - DNA, 25 bp, Homo sapien
gcctcagggttgatgtagagcaggt

SEQ ID NO: 5312617 - DNA, 25 bp, Homo sapien
cagggttgatgtagagcaggttgtt

SEQ ID NO: 5312618 - DNA, 25 bp, Homo sapien
cctcagggttgatgtagagcaggtt

SEQ ID NO: 5312619 - DNA, 25 bp, Homo sapien
ccaagacatcattctgagagatctc

SEQ ID NO: 5312620 - DNA, 25 bp, Homo sapien
caagacatcattctgagagatctct

SEQ ID NO: 5312621 - DNA, 25 bp, Homo sapien
tccaagacatcattctgagagatct

SEQ ID NO: 5312622 - DNA, 25 bp, Homo sapien
aagagttctagaaaggctcttgatc

SEQ ID NO: 5312623 - DNA, 25 bp, Homo sapien
aaaggctcttgatcaagagaaaggc

SEQ ID NO: 5312624 - DNA, 25 bp, Homo sapien
ttcaaactggctggggtagaagtgc

SEQ ID NO: 5312625 - DNA, 25 bp, Homo sapien
gcctaggatttagcggaagagttct

SEQ ID NO: 5312626 - DNA, 25 bp, Homo sapien
gaacagggtacagtcatggaaaagt

SEQ ID NO: 5312627 - DNA, 25 bp, Homo sapien
cagggtacagtcatggaaaagtcct

SEQ ID NO: 5312628 - DNA, 25 bp, Homo sapien
ggcaggtgaacagggtacagtcatg

SEQ ID NO: 5312629 - DNA, 25 bp, Homo sapien
ggtacagtcatggaaaagtccttca

SEQ ID NO: 5312630 - DNA, 25 bp, Homo sapien
taggccttctctggctatcagttga

SEQ ID NO: 5312631 - DNA, 25 bp, Homo sapien
atacctttatccgtgcctctctggg

SEQ ID NO: 5312632 - DNA, 25 bp, Homo sapien
cagagtataacatgcaagtgacaca

SEQ ID NO: 5312633 - DNA, 25 bp, Homo sapien
aaaaatatttggtctgctgaccaga

SEQ ID NO: 5312634 - DNA, 25 bp, Homo sapien
gatactcatttgacaagtgccgaac

SEQ ID NO: 5312635 - DNA, 25 bp, Homo sapien
gccgaactgttttattccgagtaga

SEQ ID NO: 5312636 - DNA, 25 bp, Homo sapien
tgttcaccattataactgatactca

SEQ ID NO: 5312637 - DNA, 25 bp, Homo sapien
tccgagtagagttgttactgactta

SEQ ID NO: 5312638 - DNA, 25 bp, Homo sapien
aatcaaattgtgtattcgcacagga

SEQ ID NO: 5312639 - DNA, 25 bp, Homo sapien
ggaagcttcttagcagaaaacttgg

SEQ ID NO: 5312640 - DNA, 25 bp, Homo sapien
gagtgaatctttaagcgagtggaga

SEQ ID NO: 5312641 - DNA, 25 bp, Homo sapien
tgtattcgcacaggagggaagcttc

SEQ ID NO: 5312642 - DNA, 25 bp, Homo sapien
cagatgacagccagtggtgctatcc

SEQ ID NO: 5312643 - DNA, 25 bp, Homo sapien
cctcagatgacagccagtggtgcta

SEQ ID NO: 5312644 - DNA, 25 bp, Homo sapien
tgacagccagtggtgctatcctttc

SEQ ID NO: 5312645 - DNA, 25 bp, Homo sapien
ctcctcagatgacagccagtggtgc

SEQ ID NO: 5312646 - DNA, 25 bp, Homo sapien
cctgagatggtcttgtcttcccaga

SEQ ID NO: 5312647 - DNA, 25 bp, Homo sapien
atgcctgagatggtcttgtcttccc

SEQ ID NO: 5312648 - DNA, 25 bp, Homo sapien
gatggtcttgtcttcccagatctgc

SEQ ID NO: 5312649 - DNA, 25 bp, Homo sapien
tgagatggtcttgtcttcccagatc

SEQ ID NO: 5312650 - DNA, 25 bp, Homo sapien
ggcaagataagtctttgctagagtc

SEQ ID NO: 5312651 - DNA, 25 bp, Homo sapien
gggcaagataagtctttgctagagt

SEQ ID NO: 5312652 - DNA, 25 bp, Homo sapien
tagtaagggagtggatatgctgtgt

SEQ ID NO: 5312653 - DNA, 25 bp, Homo sapien
ggcatgttgatcaggtcgtttgggt

SEQ ID NO: 5312654 - DNA, 25 bp, Homo sapien
aggcatgttgatcaggtcgtttggg

SEQ ID NO: 5312655 - DNA, 25 bp, Homo sapien
gagtggatatgctgtgtagaggaga

SEQ ID NO: 5312656 - DNA, 25 bp, Homo sapien
taagtttgagttgtgtaactcaagg

SEQ ID NO: 5312657 - DNA, 25 bp, Homo sapien
gccataggtttgagacacttgtaag

SEQ ID NO: 5312658 - DNA, 25 bp, Homo sapien
cacttgtaagtttgagttgtgtaac

SEQ ID NO: 5312659 - DNA, 25 bp, Homo sapien
cagtaaagtggccataggtttgaga

SEQ ID NO: 5312660 - DNA, 25 bp, Homo sapien
aaaacttggcatgctagaaagaaca

SEQ ID NO: 5312661 - DNA, 25 bp, Homo sapien
aacaaaacttggcatgctagaaaga

SEQ ID NO: 5312662 - DNA, 25 bp, Homo sapien
caaaacttggcatgctagaaagaac

SEQ ID NO: 5312663 - DNA, 25 bp, Homo sapien
taacaatgggggctactaaatccat

SEQ ID NO: 5312664 - DNA, 25 bp, Homo sapien
ttatttgatttcacattgcctttca

SEQ ID NO: 5312665 - DNA, 25 bp, Homo sapien
tttatttgatttcacattgcctttc

SEQ ID NO: 5312666 - DNA, 25 bp, Homo sapien
gctttatttgatttcacattgcctt

SEQ ID NO: 5312667 - DNA, 25 bp, Homo sapien
gtgctttatttgatttcacattgcc

SEQ ID NO: 5312668 - DNA, 25 bp, Homo sapien
ggaatgatagaacaagagcagagaa

SEQ ID NO: 5312669 - DNA, 25 bp, Homo sapien
tcagggcaatgggataagtctcaca

SEQ ID NO: 5312670 - DNA, 25 bp, Homo sapien
agaaacacaacatcctaaaaacagg

SEQ ID NO: 5312671 - DNA, 25 bp, Homo sapien
cacttcccttaataaagagttgaag

SEQ ID NO: 5312672 - DNA, 25 bp, Homo sapien
tacagttatctcagtgcatgaagca

SEQ ID NO: 5312673 - DNA, 25 bp, Homo sapien
tgggagcccactgtgcataatggga

SEQ ID NO: 5312674 - DNA, 25 bp, Homo sapien
ggagcctgcaacctctttgagaaga

SEQ ID NO: 5312675 - DNA, 25 bp, Homo sapien
tttgaacattcagagctcagtggga

SEQ ID NO: 5312676 - DNA, 25 bp, Homo sapien
tcaagcatgtgcaaaacgggaacat

SEQ ID NO: 5312677 - DNA, 25 bp, Homo sapien
cagtccagtgattagctctgcagca

SEQ ID NO: 5312678 - DNA, 25 bp, Homo sapien
tcctttggaactcatgcagaccagc

SEQ ID NO: 5312679 - DNA, 25 bp, Homo sapien
tccatcaggtgtgcagaaatgctac

SEQ ID NO: 5312680 - DNA, 25 bp, Homo sapien
cagtgccaagtgctcaacgctgagt

SEQ ID NO: 5312681 - DNA, 25 bp, Homo sapien
gagcaaaaacatgtgcatatgaagg

SEQ ID NO: 5312682 - DNA, 25 bp, Homo sapien
tctctttggcgtggaaaaggccagc

SEQ ID NO: 5312683 - DNA, 25 bp, Homo sapien
ggattagacatccatccgcttctaa

SEQ ID NO: 5312684 - DNA, 25 bp, Homo sapien
gcgtgtagtcagtcaagctgagaca

SEQ ID NO: 5312685 - DNA, 25 bp, Homo sapien
aaagggcaggattagtagtcagcgt

SEQ ID NO: 5312686 - DNA, 25 bp, Homo sapien
tgctaggtgctttcgaggaatatgg

SEQ ID NO: 5312687 - DNA, 25 bp, Homo sapien
tcattccagtgtgcctaactctgtg

SEQ ID NO: 5312688 - DNA, 25 bp, Homo sapien
tggcataaacaattgctatctctct

SEQ ID NO: 5312689 - DNA, 25 bp, Homo sapien
ttggcataaacaattgctatctctc

SEQ ID NO: 5312690 - DNA, 25 bp, Homo sapien
gcataaacaattgctatctctctgc

SEQ ID NO: 5312691 - DNA, 25 bp, Homo sapien
ggcataaacaattgctatctctctg

SEQ ID NO: 5312692 - DNA, 25 bp, Homo sapien
tgattcattcccctgcaattatttt

SEQ ID NO: 5312693 - DNA, 25 bp, Homo sapien
tcccctgcaattatttttgatccct

SEQ ID NO: 5312694 - DNA, 25 bp, Homo sapien
acaagctgtcacattctaaatatgc

SEQ ID NO: 5312695 - DNA, 25 bp, Homo sapien
tatgcaatatgatgtctggtaataa

SEQ ID NO: 5312696 - DNA, 25 bp, Homo sapien
agtgtaaggtacacagtgcatatgg

SEQ ID NO: 5312697 - DNA, 25 bp, Homo sapien
gtgagagtgtaaggtacacagtgca

SEQ ID NO: 5312698 - DNA, 25 bp, Homo sapien
cagcgaggaagatccctagaagttc

SEQ ID NO: 5312699 - DNA, 25 bp, Homo sapien
tgtgccaggagcttatgacttaagt

SEQ ID NO: 5312700 - DNA, 25 bp, Homo sapien
aatacgcaagtctcctcaggttcag

SEQ ID NO: 5312701 - DNA, 25 bp, Homo sapien
ggtgaccaagagtgtaaggtaagac

SEQ ID NO: 5312702 - DNA, 25 bp, Homo sapien
gacaatggacaaaggtgagcacgga

SEQ ID NO: 5312703 - DNA, 25 bp, Homo sapien
tgagcacggagactgaggaatacgc

SEQ ID NO: 5312704 - DNA, 25 bp, Homo sapien
ctctgttcagctttagtatccccat

SEQ ID NO: 5312705 - DNA, 25 bp, Homo sapien
tttggatgactcgaagcttggtgag

SEQ ID NO: 5312706 - DNA, 25 bp, Homo sapien
cctttttggatgactcgaagcttgg

SEQ ID NO: 5312707 - DNA, 25 bp, Homo sapien
tgaaaatgcacctttttggatgact

SEQ ID NO: 5312708 - DNA, 25 bp, Homo sapien
tttttggatgactcgaagcttggtg

SEQ ID NO: 5312709 - DNA, 25 bp, Homo sapien
tgaagtgaagattttcaaacccctg

SEQ ID NO: 5312710 - DNA, 25 bp, Homo sapien
ctagagagctaagaaggaatgaagt

SEQ ID NO: 5312711 - DNA, 25 bp, Homo sapien
ctactgtgctagagagctaagaagg

SEQ ID NO: 5312712 - DNA, 25 bp, Homo sapien
ctggaatagaataacgttaggacag

SEQ ID NO: 5312713 - DNA, 25 bp, Homo sapien
ccctgcactgtgagaggtactggtt

SEQ ID NO: 5312714 - DNA, 25 bp, Homo sapien
tggtttctgaagtttaacatcggtc

SEQ ID NO: 5312715 - DNA, 25 bp, Homo sapien
ctgcactgtgagaggtactggtttc

SEQ ID NO: 5312716 - DNA, 25 bp, Homo sapien
cactgtgagaggtactggtttctga

SEQ ID NO: 5312717 - DNA, 25 bp, Homo sapien
tggctatttgcccagatgtgtgcat

SEQ ID NO: 5312718 - DNA, 25 bp, Homo sapien
tgcccagatgtgtgcatttctacca

SEQ ID NO: 5312719 - DNA, 25 bp, Homo sapien
tatttctggctatttgcccagatgt

SEQ ID NO: 5312720 - DNA, 25 bp, Homo sapien
tatttgcccagatgtgtgcatttct

SEQ ID NO: 5312721 - DNA, 25 bp, Homo sapien
gattgccatcctcaatacagcaggg

SEQ ID NO: 5312722 - DNA, 25 bp, Homo sapien
taaagaggaccgaagttgcttcagc

SEQ ID NO: 5312723 - DNA, 25 bp, Homo sapien
gagagaagggagtagtcagccccat

SEQ ID NO: 5312724 - DNA, 25 bp, Homo sapien
gaaagatatcgtgttccaaagggca

SEQ ID NO: 5312725 - DNA, 25 bp, Homo sapien
tatgcagggaatatcttggagatct

SEQ ID NO: 5312726 - DNA, 25 bp, Homo sapien
aatgtcagaggagatgtcttcaccg

SEQ ID NO: 5312727 - DNA, 25 bp, Homo sapien
gatgagcagaaattccctatccaga

SEQ ID NO: 5312728 - DNA, 25 bp, Homo sapien
gcagatggcattaagcacgcctgct

SEQ ID NO: 5312729 - DNA, 25 bp, Homo sapien
aggcagccacctgccatggaacttt

SEQ ID NO: 5312730 - DNA, 25 bp, Homo sapien
tctccagtatctcagaaattgcttt

SEQ ID NO: 5312731 - DNA, 25 bp, Homo sapien
catctaccacaagcctgcatagttc

SEQ ID NO: 5312732 - DNA, 25 bp, Homo sapien
agagctggtcaaataaagaggcagc

SEQ ID NO: 5312733 - DNA, 25 bp, Homo sapien
cagaccgattatagtttttgccaaa

SEQ ID NO: 5312734 - DNA, 25 bp, Homo sapien
caggtgttttcgcctttaaaatgct

SEQ ID NO: 5312735 - DNA, 25 bp, Homo sapien
ccagtaactgttctgcctcctgagc

SEQ ID NO: 5312736 - DNA, 25 bp, Homo sapien
gcttttggtctttgaattcagaccg

SEQ ID NO: 5312737 - DNA, 25 bp, Homo sapien
gacttggccactgtatgacccttta

SEQ ID NO: 5312738 - DNA, 25 bp, Homo sapien
tgaccctttacaggatccaaccagg

SEQ ID NO: 5312739 - DNA, 25 bp, Homo sapien
ccttagagtggtatgtggagaaaac

SEQ ID NO: 5312740 - DNA, 25 bp, Homo sapien
tggagaaaacctggcatacaagatg

SEQ ID NO: 5312741 - DNA, 25 bp, Homo sapien
tagtgccaaggtgtcttcattcatt

SEQ ID NO: 5312742 - DNA, 25 bp, Homo sapien
aaatgttactgtcaaggacctcaat

SEQ ID NO: 5312743 - DNA, 25 bp, Homo sapien
ttagtaagaatcagctgtagtgcca

SEQ ID NO: 5312744 - DNA, 25 bp, Homo sapien
gatgaaggtccagttatagtgcaaa

SEQ ID NO: 5312745 - DNA, 25 bp, Homo sapien
agcttgctttggctctactatcagg

SEQ ID NO: 5312746 - DNA, 25 bp, Homo sapien
cctctctagtgaatgggacatatca

SEQ ID NO: 5312747 - DNA, 25 bp, Homo sapien
ctctggtatgtcatcggtgtcatta

SEQ ID NO: 5312748 - DNA, 25 bp, Homo sapien
tcaaagcaatccttgccctgactgc

SEQ ID NO: 5312749 - DNA, 25 bp, Homo sapien
tgtttatgctgaggagctataagag

SEQ ID NO: 5312750 - DNA, 25 bp, Homo sapien
taaatggagtgtcctttttggaagc

SEQ ID NO: 5312751 - DNA, 25 bp, Homo sapien
attccaggtaaatggagtgtccttt

SEQ ID NO: 5312752 - DNA, 25 bp, Homo sapien
agctataagagttccgaagactggg

SEQ ID NO: 5312753 - DNA, 25 bp, Homo sapien
gctaaaaaggtatctatccactcca

SEQ ID NO: 5312754 - DNA, 25 bp, Homo sapien
ccagcaggagttgagagatgtattc

SEQ ID NO: 5312755 - DNA, 25 bp, Homo sapien
atgagtaggtgtagccgatggctct

SEQ ID NO: 5312756 - DNA, 25 bp, Homo sapien
tccaaggtggtggacttgtgcctga

SEQ ID NO: 5312757 - DNA, 25 bp, Homo sapien
aaggggtgccggcactagttgcacc

SEQ ID NO: 5312758 - DNA, 25 bp, Homo sapien
agaggtgtcatgtgaagtggcttca

SEQ ID NO: 5312759 - DNA, 25 bp, Homo sapien
aacagtggcttttggacccctgtgg

SEQ ID NO: 5312760 - DNA, 25 bp, Homo sapien
acccctgtggctttcacatggcagc

SEQ ID NO: 5312761 - DNA, 25 bp, Homo sapien
gcagttgtcattctggataccttgg

SEQ ID NO: 5312762 - DNA, 25 bp, Homo sapien
gacttcctttgccttgcagttgtca

SEQ ID NO: 5312763 - DNA, 25 bp, Homo sapien
cagtgacagacttctatatgactta

SEQ ID NO: 5312764 - DNA, 25 bp, Homo sapien
ggctttcccatacctagctgaggtt

SEQ ID NO: 5312765 - DNA, 25 bp, Homo sapien
caaatcctggcattggtggtgagag

SEQ ID NO: 5312766 - DNA, 25 bp, Homo sapien
gggcatattcttggcttacacggga

SEQ ID NO: 5312767 - DNA, 25 bp, Homo sapien
gactgacagacctacacgggcatat

SEQ ID NO: 5312768 - DNA, 25 bp, Homo sapien
tcatgatggaaagaaagagctgaaa

SEQ ID NO: 5312769 - DNA, 25 bp, Homo sapien
acctcatgactaaccataatggcct

SEQ ID NO: 5312770 - DNA, 25 bp, Homo sapien
gagtgttgtatacctcatgactaac

SEQ ID NO: 5312771 - DNA, 25 bp, Homo sapien
tttctagttttatcctggctgagag

SEQ ID NO: 5312772 - DNA, 25 bp, Homo sapien
tcctggctgagagtgttgtatacct

SEQ ID NO: 5312773 - DNA, 25 bp, Homo sapien
tggaaaaactcggacatgtggatag

SEQ ID NO: 5312774 - DNA, 25 bp, Homo sapien
gaagaatgacgaaaaatagaactga

SEQ ID NO: 5312775 - DNA, 25 bp, Homo sapien
cagctagctgctttaaatgagtctc

SEQ ID NO: 5312776 - DNA, 25 bp, Homo sapien
tagaactgatatcagaagacaggag

SEQ ID NO: 5312777 - DNA, 25 bp, Homo sapien
taccacccactctatagataggcat

SEQ ID NO: 5312778 - DNA, 25 bp, Homo sapien
tccttgacattagccagcttctgat

SEQ ID NO: 5312779 - DNA, 25 bp, Homo sapien
ttggagccagccctgataccaccca

SEQ ID NO: 5312780 - DNA, 25 bp, Homo sapien
tacatattgctcaaacagctccttg

SEQ ID NO: 5312781 - DNA, 25 bp, Homo sapien
tgtttgcaggattccagatgacctc

SEQ ID NO: 5312782 - DNA, 25 bp, Homo sapien
taaaggagttcagcagattttcaca

SEQ ID NO: 5312783 - DNA, 25 bp, Homo sapien
tgagatgccattcaaagactgtgtg

SEQ ID NO: 5312784 - DNA, 25 bp, Homo sapien
aagcaattttgctactgtttgcagg

SEQ ID NO: 5312785 - DNA, 25 bp, Homo sapien
tagagaaatgctgcactgcttgccc

SEQ ID NO: 5312786 - DNA, 25 bp, Homo sapien
ctttgatgggtacatggtagtggca

SEQ ID NO: 5312787 - DNA, 25 bp, Homo sapien
tcaggctgtgatctgatggtagaca

SEQ ID NO: 5312788 - DNA, 25 bp, Homo sapien
tgccctgacgagaaattagctttga

SEQ ID NO: 5312789 - DNA, 25 bp, Homo sapien
agatacaaaaatgggctcagctgtg

SEQ ID NO: 5312790 - DNA, 25 bp, Homo sapien
ttcatcaagcttgccattagaaaga

SEQ ID NO: 5312791 - DNA, 25 bp, Homo sapien
gtttctgacacaggactctgtgata

SEQ ID NO: 5312792 - DNA, 25 bp, Homo sapien
gctgtgcattcttgatggtttctga

SEQ ID NO: 5312793 - DNA, 25 bp, Homo sapien
caggaggcataacgtaaagacacaa

SEQ ID NO: 5312794 - DNA, 25 bp, Homo sapien
actgggaaatcacaacatggtggca

SEQ ID NO: 5312795 - DNA, 25 bp, Homo sapien
aatgcacaaactatgcttgagccct

SEQ ID NO: 5312796 - DNA, 25 bp, Homo sapien
ccctgtggagtaggctcctgttgga

SEQ ID NO: 5312797 - DNA, 25 bp, Homo sapien
aatatcagcatgtgcagatcatagg

SEQ ID NO: 5312798 - DNA, 25 bp, Homo sapien
gctggcagatgtatcaaatgaaatg

SEQ ID NO: 5312799 - DNA, 25 bp, Homo sapien
ggaaattagcaatctttcgtgatag

SEQ ID NO: 5312800 - DNA, 25 bp, Homo sapien
tctttcgtgatagctggcagatgta

SEQ ID NO: 5312801 - DNA, 25 bp, Homo sapien
tgtcctctaatacgtacactgaagt

SEQ ID NO: 5312802 - DNA, 25 bp, Homo sapien
taaggaattgacctagagctagcct

SEQ ID NO: 5312803 - DNA, 25 bp, Homo sapien
gttttatgcaactttgtcctctaat

SEQ ID NO: 5312804 - DNA, 25 bp, Homo sapien
gctagcctttgtcaagaatgtgaaa

SEQ ID NO: 5312805 - DNA, 25 bp, Homo sapien
ttcagtgtcaatatggcaattggtg

SEQ ID NO: 5312806 - DNA, 25 bp, Homo sapien
aatatggcaattggtgaactaaaga

SEQ ID NO: 5312807 - DNA, 25 bp, Homo sapien
tgtcaatatggcaattggtgaacta

SEQ ID NO: 5312808 - DNA, 25 bp, Homo sapien
tatggcaattggtgaactaaagaga

SEQ ID NO: 5312809 - DNA, 25 bp, Homo sapien
ccttttctggttccactaaagagag

SEQ ID NO: 5312810 - DNA, 25 bp, Homo sapien
tctgacactgccgttctctgacaaa

SEQ ID NO: 5312811 - DNA, 25 bp, Homo sapien
gacaaatgctgatacaaactctcat

SEQ ID NO: 5312812 - DNA, 25 bp, Homo sapien
gagagtatgaaacccaagagcaaat

SEQ ID NO: 5312813 - DNA, 25 bp, Homo sapien
gttcaatggcattcctcgggaggtc

SEQ ID NO: 5312814 - DNA, 25 bp, Homo sapien
gagcagtgacagatccgatgatgac

SEQ ID NO: 5312815 - DNA, 25 bp, Homo sapien
agagaaaaaccctgttagagcagtg

SEQ ID NO: 5312816 - DNA, 25 bp, Homo sapien
ggaatgccagcaaagagaccaggag

SEQ ID NO: 5312817 - DNA, 25 bp, Homo sapien
ttatgcatccatccacctgatttct

SEQ ID NO: 5312818 - DNA, 25 bp, Homo sapien
aattatgcatccatccacctgattt

SEQ ID NO: 5312819 - DNA, 25 bp, Homo sapien
attatgcatccatccacctgatttc

SEQ ID NO: 5312820 - DNA, 25 bp, Homo sapien
tgcagagaaaaacctccacagatct

SEQ ID NO: 5312821 - DNA, 25 bp, Homo sapien
agagaaaaacctccacagatctcag

SEQ ID NO: 5312822 - DNA, 25 bp, Homo sapien
gagaaaaacctccacagatctcaga

SEQ ID NO: 5312823 - DNA, 25 bp, Homo sapien
gcagagaaaaacctccacagatctc

SEQ ID NO: 5312824 - DNA, 25 bp, Homo sapien
tccttcaagattgggtttcttacac

SEQ ID NO: 5312825 - DNA, 25 bp, Homo sapien
ttccttcaagattgggtttcttaca

SEQ ID NO: 5312826 - DNA, 25 bp, Homo sapien
ccaaaaaagacacaacccacaatat

SEQ ID NO: 5312827 - DNA, 25 bp, Homo sapien
aaagacacaacccacaatatgacac

SEQ ID NO: 5312828 - DNA, 25 bp, Homo sapien
tctgggttgcattcaatgatcctct

SEQ ID NO: 5312829 - DNA, 25 bp, Homo sapien
ttcaaccagcccacctgagagaaaa

SEQ ID NO: 5312830 - DNA, 25 bp, Homo sapien
tctgaggaacgtttggcaacacttt

SEQ ID NO: 5312831 - DNA, 25 bp, Homo sapien
tggcattcccctcctcgatggtgag

SEQ ID NO: 5312832 - DNA, 25 bp, Homo sapien
gcattcccctcctcgatggtgaggg

SEQ ID NO: 5312833 - DNA, 25 bp, Homo sapien
ttgttggcattcccctcctcgatgg

SEQ ID NO: 5312834 - DNA, 25 bp, Homo sapien
agaagatttgtcaccggttagataa

SEQ ID NO: 5312835 - DNA, 25 bp, Homo sapien
catggtttcatggaactgtatataa

SEQ ID NO: 5312836 - DNA, 25 bp, Homo sapien
ctgtgaaattaatttccgggtcaat

SEQ ID NO: 5312837 - DNA, 25 bp, Homo sapien
tttttagggtagtcatgtgaaggta

SEQ ID NO: 5312838 - DNA, 25 bp, Homo sapien
gatgacttttctgtcaaaaggaaac

SEQ ID NO: 5312839 - DNA, 25 bp, Homo sapien
aagtaggagtgtagaatgagttgag

SEQ ID NO: 5312840 - DNA, 25 bp, Homo sapien
gaatgagttgaggtaggaacatttg

SEQ ID NO: 5312841 - DNA, 25 bp, Homo sapien
tgatgacttttctgtcaaaaggaaa

SEQ ID NO: 5312842 - DNA, 25 bp, Homo sapien
ttatgacgggaccaaagacatttat

SEQ ID NO: 5312843 - DNA, 25 bp, Homo sapien
ttaaaaatctgtcgttatgacggga

SEQ ID NO: 5312844 - DNA, 25 bp, Homo sapien
aaaatctgtcgttatgacgggacca

SEQ ID NO: 5312845 - DNA, 25 bp, Homo sapien
tctgtcgttatgacgggaccaaaga

SEQ ID NO: 5312846 - DNA, 25 bp, Homo sapien
tatgtctgtcgtggacattcaaggg

SEQ ID NO: 5312847 - DNA, 25 bp, Homo sapien
ctgggaccgttgtggctgccattcc

SEQ ID NO: 5312848 - DNA, 25 bp, Homo sapien
cattgtgtttcctgggaccgttgtg

SEQ ID NO: 5312849 - DNA, 25 bp, Homo sapien
gtggacattcaagggacatcctagc

SEQ ID NO: 5312850 - DNA, 25 bp, Homo sapien
ccaaatcaccttgtgaacaggaaga

SEQ ID NO: 5312851 - DNA, 25 bp, Homo sapien
tcaggccaaggaaccgatgatatat

SEQ ID NO: 5312852 - DNA, 25 bp, Homo sapien
tattctgaacatttgggcaaatgcc

SEQ ID NO: 5312853 - DNA, 25 bp, Homo sapien
tattacacatttcctagttctctgt

SEQ ID NO: 5312854 - DNA, 25 bp, Homo sapien
caggtcagccacttgttgggtcctg

SEQ ID NO: 5312855 - DNA, 25 bp, Homo sapien
ccacttgttgggtcctggcggttgt

SEQ ID NO: 5312856 - DNA, 25 bp, Homo sapien
cagccacttgttgggtcctggcggt

SEQ ID NO: 5312857 - DNA, 25 bp, Homo sapien
gtcagccacttgttgggtcctggcg

SEQ ID NO: 5312858 - DNA, 25 bp, Homo sapien
aggccccacagaatgctgtatcagc

SEQ ID NO: 5312859 - DNA, 25 bp, Homo sapien
tggcttttggtaccattatcagagg

SEQ ID NO: 5312860 - DNA, 25 bp, Homo sapien
gtaccattatcagaggccccacaga

SEQ ID NO: 5312861 - DNA, 25 bp, Homo sapien
ggccccacagaatgctgtatcagca

SEQ ID NO: 5312862 - DNA, 25 bp, Homo sapien
tgcaatactcttacttgcttccttc

SEQ ID NO: 5312863 - DNA, 25 bp, Homo sapien
ctattgcaatactcttacttgcttc

SEQ ID NO: 5312864 - DNA, 25 bp, Homo sapien
aatactcttacttgcttccttcagg

SEQ ID NO: 5312865 - DNA, 25 bp, Homo sapien
tattgcaatactcttacttgcttcc

SEQ ID NO: 5312866 - DNA, 25 bp, Homo sapien
gatttggccgtccagataatacagg

SEQ ID NO: 5312867 - DNA, 25 bp, Homo sapien
caatttctgttggtcagatgcctga

SEQ ID NO: 5312868 - DNA, 25 bp, Homo sapien
cagagcagtattccttattggcacc

SEQ ID NO: 5312869 - DNA, 25 bp, Homo sapien
gactggtatttgctcctagaagcca

SEQ ID NO: 5312870 - DNA, 25 bp, Homo sapien
ctcctcagtcaacattggcagtttg

SEQ ID NO: 5312871 - DNA, 25 bp, Homo sapien
gtcaacattggcagtttgaattgtt

SEQ ID NO: 5312872 - DNA, 25 bp, Homo sapien
ggccctcctcagtcaacattggcag

SEQ ID NO: 5312873 - DNA, 25 bp, Homo sapien
cctcagtcaacattggcagtttgaa

SEQ ID NO: 5312874 - DNA, 25 bp, Homo sapien
gatgcaaataccgacactcacactt

SEQ ID NO: 5312875 - DNA, 25 bp, Homo sapien
caacagcggcctttagaagcagctg

SEQ ID NO: 5312876 - DNA, 25 bp, Homo sapien
ttttcagatgcaaataccgacactc

SEQ ID NO: 5312877 - DNA, 25 bp, Homo sapien
tagaatacactggtgttgaacacag

SEQ ID NO: 5312878 - DNA, 25 bp, Homo sapien
ccaatcgaaaaatgtcccggaccag

SEQ ID NO: 5312879 - DNA, 25 bp, Homo sapien
agcctaccaatcgaaaaatgtcccg

SEQ ID NO: 5312880 - DNA, 25 bp, Homo sapien
tagcctaccaatcgaaaaatgtccc

SEQ ID NO: 5312881 - DNA, 25 bp, Homo sapien
atcgaaaaatgtcccggaccagacg

SEQ ID NO: 5312882 - DNA, 25 bp, Homo sapien
cctgataaatagcaaagtgcactct

SEQ ID NO: 5312883 - DNA, 25 bp, Homo sapien
catttccgctgggtgtggatatagc

SEQ ID NO: 5312884 - DNA, 25 bp, Homo sapien
tagataaaccgatccccatttccgc

SEQ ID NO: 5312885 - DNA, 25 bp, Homo sapien
tcttttaaaattgcatcacgcttgc

SEQ ID NO: 5312886 - DNA, 25 bp, Homo sapien
tagctcctatgtaagcaggtatggg

SEQ ID NO: 5312887 - DNA, 25 bp, Homo sapien
aagacctataccaaacagtgactgt

SEQ ID NO: 5312888 - DNA, 25 bp, Homo sapien
tttatagctcctatgtaagcaggta

SEQ ID NO: 5312889 - DNA, 25 bp, Homo sapien
aaaggcattggctgttaaagaccta

SEQ ID NO: 5312890 - DNA, 25 bp, Homo sapien
agcgatgattatggtagcggaggtg

SEQ ID NO: 5312891 - DNA, 25 bp, Homo sapien
atagcgatgattatggtagcggagg

SEQ ID NO: 5312892 - DNA, 25 bp, Homo sapien
gatgattatggtagcggaggtgaaa

SEQ ID NO: 5312893 - DNA, 25 bp, Homo sapien
atgattatggtagcggaggtgaaat

SEQ ID NO: 5312894 - DNA, 25 bp, Homo sapien
tccttgcacagggtcttgctggtct

SEQ ID NO: 5312895 - DNA, 25 bp, Homo sapien
tgcacagggtcttgctggtcttctc

SEQ ID NO: 5312896 - DNA, 25 bp, Homo sapien
cttgcacagggtcttgctggtcttc

SEQ ID NO: 5312897 - DNA, 25 bp, Homo sapien
cacagggtcttgctggtcttctctg

SEQ ID NO: 5312898 - DNA, 25 bp, Homo sapien
cttattcttacctttgccttcgtgt

SEQ ID NO: 5312899 - DNA, 25 bp, Homo sapien
ccagaaccatctctaatgttaatca

SEQ ID NO: 5312900 - DNA, 25 bp, Homo sapien
gccttcgtgtatctctccattggga

SEQ ID NO: 5312901 - DNA, 25 bp, Homo sapien
ggcatattactcacccttccagaac

SEQ ID NO: 5312902 - DNA, 25 bp, Homo sapien
tttccatggacaccactgacaattt

SEQ ID NO: 5312903 - DNA, 25 bp, Homo sapien
ctttgcattctctctcgttttgaag

SEQ ID NO: 5312904 - DNA, 25 bp, Homo sapien
caccactgacaatttacaggttgtt

SEQ ID NO: 5312905 - DNA, 25 bp, Homo sapien
tggacaccactgacaatttacaggt

SEQ ID NO: 5312906 - DNA, 25 bp, Homo sapien
tctccatcgtgtaccctcagtaagg

SEQ ID NO: 5312907 - DNA, 25 bp, Homo sapien
tctgccttaggcctggaagtccatc

SEQ ID NO: 5312908 - DNA, 25 bp, Homo sapien
tgtacagcatgttggccaaaggcca

SEQ ID NO: 5312909 - DNA, 25 bp, Homo sapien
ttctggagcctaaagataagtcggg

SEQ ID NO: 5312910 - DNA, 25 bp, Homo sapien
agctagtgtcaatttgctgacagct

SEQ ID NO: 5312911 - DNA, 25 bp, Homo sapien
tcccacatgcacttataccagctag

SEQ ID NO: 5312912 - DNA, 25 bp, Homo sapien
ctagtgtcaatttgctgacagctga

SEQ ID NO: 5312913 - DNA, 25 bp, Homo sapien
tgcacttataccagctagtgtcaat

SEQ ID NO: 5312914 - DNA, 25 bp, Homo sapien
taaggaccaggatatgcaaggccag

SEQ ID NO: 5312915 - DNA, 25 bp, Homo sapien
gcaaggccagactcacaataaaggg

SEQ ID NO: 5312916 - DNA, 25 bp, Homo sapien
tcctgagcatagagacaaacactac

SEQ ID NO: 5312917 - DNA, 25 bp, Homo sapien
tctgtacacaagaggcttaaggacc

SEQ ID NO: 5312918 - DNA, 25 bp, Homo sapien
atacatcaagtaaatgggcctgatt

SEQ ID NO: 5312919 - DNA, 25 bp, Homo sapien
tactttttccatcatatacatcaag

SEQ ID NO: 5312920 - DNA, 25 bp, Homo sapien
atgggcctgattcaagtgggctaca

SEQ ID NO: 5312921 - DNA, 25 bp, Homo sapien
cctgattcaagtgggctacaaagct

SEQ ID NO: 5312922 - DNA, 25 bp, Homo sapien
atctttccgaagagagaagattggg

SEQ ID NO: 5312923 - DNA, 25 bp, Homo sapien
ggatgtgagaaaaggtcctggccag

SEQ ID NO: 5312924 - DNA, 25 bp, Homo sapien
tatcagggggtgaatctttccgaag

SEQ ID NO: 5312925 - DNA, 25 bp, Homo sapien
cagcaatagcagactgtgtcacact

SEQ ID NO: 5312926 - DNA, 25 bp, Homo sapien
aatcctattaatgtggaaaatgaca

SEQ ID NO: 5312927 - DNA, 25 bp, Homo sapien
tggtgacaaataaggcaaattctca

SEQ ID NO: 5312928 - DNA, 25 bp, Homo sapien
caaaatcctattaatgtggaaaatg

SEQ ID NO: 5312929 - DNA, 25 bp, Homo sapien
agctgcatggtgacaaataaggcaa

SEQ ID NO: 5312930 - DNA, 25 bp, Homo sapien
taagagtcctcgttcaaaatcacac

SEQ ID NO: 5312931 - DNA, 25 bp, Homo sapien
tcctcgttcaaaatcacacggatgg

SEQ ID NO: 5312932 - DNA, 25 bp, Homo sapien
cgttcaaaatcacacggatggcagg

SEQ ID NO: 5312933 - DNA, 25 bp, Homo sapien
gagtcctcgttcaaaatcacacgga

SEQ ID NO: 5312934 - DNA, 25 bp, Homo sapien
agaaattcaagaggtgtgcatgact

SEQ ID NO: 5312935 - DNA, 25 bp, Homo sapien
gaagaaattcaagaggtgtgcatga

SEQ ID NO: 5312936 - DNA, 25 bp, Homo sapien
aagaaattcaagaggtgtgcatgac

SEQ ID NO: 5312937 - DNA, 25 bp, Homo sapien
ccaggcaaaagcctcgtcattcaga

SEQ ID NO: 5312938 - DNA, 25 bp, Homo sapien
tcagatttagcatcttgttatccat

SEQ ID NO: 5312939 - DNA, 25 bp, Homo sapien
ttcagatttagcatcttgttatcca

SEQ ID NO: 5312940 - DNA, 25 bp, Homo sapien
caaaagcctcgtcattcagatttag

SEQ ID NO: 5312941 - DNA, 25 bp, Homo sapien
taattacagaaatgattacagtagc

SEQ ID NO: 5312942 - DNA, 25 bp, Homo sapien
tagccatccatggaacagcttgcag

SEQ ID NO: 5312943 - DNA, 25 bp, Homo sapien
tcttacagctggattcattgttaac

SEQ ID NO: 5312944 - DNA, 25 bp, Homo sapien
tctacaacacctaatttaccagcag

SEQ ID NO: 5312945 - DNA, 25 bp, Homo sapien
cacaaaaatcttccaaatccttgac

SEQ ID NO: 5312946 - DNA, 25 bp, Homo sapien
attcttcttcacaaaaatcttccaa

SEQ ID NO: 5312947 - DNA, 25 bp, Homo sapien
ttcacaaaaatcttccaaatccttg

SEQ ID NO: 5312948 - DNA, 25 bp, Homo sapien
tcattcttcttcacaaaaatcttcc

SEQ ID NO: 5312949 - DNA, 25 bp, Homo sapien
gacctctgaagcctcttgtcttgtg

SEQ ID NO: 5312950 - DNA, 25 bp, Homo sapien
gtcgctccaaagcaatggagagaaa

SEQ ID NO: 5312951 - DNA, 25 bp, Homo sapien
tgtcttgtgtttctatcatcaccag

SEQ ID NO: 5312952 - DNA, 25 bp, Homo sapien
atcatcaccagtcaagtcgctccaa

SEQ ID NO: 5312953 - DNA, 25 bp, Homo sapien
ttgggaaatgatagtaactccactc

SEQ ID NO: 5312954 - DNA, 25 bp, Homo sapien
ttccatgagcaaccatgataggagg

SEQ ID NO: 5312955 - DNA, 25 bp, Homo sapien
ggtgtttccatgagcaaccatgata

SEQ ID NO: 5312956 - DNA, 25 bp, Homo sapien
tgagcaaccatgataggaggagctg

SEQ ID NO: 5312957 - DNA, 25 bp, Homo sapien
catgagcaaccatgataggaggagc

SEQ ID NO: 5312958 - DNA, 25 bp, Homo sapien
tcctggctctgctggacagctgcat

SEQ ID NO: 5312959 - DNA, 25 bp, Homo sapien
accagctcctggctctgctggacag

SEQ ID NO: 5312960 - DNA, 25 bp, Homo sapien
cagctcctggctctgctggacagct

SEQ ID NO: 5312961 - DNA, 25 bp, Homo sapien
gctcctggctctgctggacagctgc

SEQ ID NO: 5312962 - DNA, 25 bp, Homo sapien
tgctttctgcatttcggagagcaga

SEQ ID NO: 5312963 - DNA, 25 bp, Homo sapien
ggtccctctaccatttccactgctt

SEQ ID NO: 5312964 - DNA, 25 bp, Homo sapien
agtaccagactggtccctctaccat

SEQ ID NO: 5312965 - DNA, 25 bp, Homo sapien
gtcaggattgcatttgctctactgc

SEQ ID NO: 5312966 - DNA, 25 bp, Homo sapien
ggattgcatttgctctactgccttt

SEQ ID NO: 5312967 - DNA, 25 bp, Homo sapien
gcctgggtggaagcaactcactatg

SEQ ID NO: 5312968 - DNA, 25 bp, Homo sapien
ctgagaccacctgaacctgagcttg

SEQ ID NO: 5312969 - DNA, 25 bp, Homo sapien
gatatggcccccctttacattctgc

SEQ ID NO: 5312970 - DNA, 25 bp, Homo sapien
acctgagcttgtggccataaaaata

SEQ ID NO: 5312971 - DNA, 25 bp, Homo sapien
cacaagcctccggatgtttatctgt

SEQ ID NO: 5312972 - DNA, 25 bp, Homo sapien
tttgtatccattacattgtcattga

SEQ ID NO: 5312973 - DNA, 25 bp, Homo sapien
aaaaccttttgtatccattacattg

SEQ ID NO: 5312974 - DNA, 25 bp, Homo sapien
gcctccggatgtttatctgtgtgct

SEQ ID NO: 5312975 - DNA, 25 bp, Homo sapien
catcaacttcagagccagcactgtc

SEQ ID NO: 5312976 - DNA, 25 bp, Homo sapien
ttttccacaccatcaacttcagagc

SEQ ID NO: 5312977 - DNA, 25 bp, Homo sapien
caacatgataacctggcagaattgt

SEQ ID NO: 5312978 - DNA, 25 bp, Homo sapien
aaagcaacatgataacctggcagaa

SEQ ID NO: 5312979 - DNA, 25 bp, Homo sapien
tatccattgatcacatgacacagga

SEQ ID NO: 5312980 - DNA, 25 bp, Homo sapien
ccattgatcacatgacacaggattt

SEQ ID NO: 5312981 - DNA, 25 bp, Homo sapien
tcccatatccattgatcacatgaca

SEQ ID NO: 5312982 - DNA, 25 bp, Homo sapien
actggccttcccatatccattgatc

SEQ ID NO: 5312983 - DNA, 25 bp, Homo sapien
gtcttcttgtccttatctctcaaac

SEQ ID NO: 5312984 - DNA, 25 bp, Homo sapien
ttgccagtctccacttctacctctt

SEQ ID NO: 5312985 - DNA, 25 bp, Homo sapien
tcttcttgtccttatctctcaaacc

SEQ ID NO: 5312986 - DNA, 25 bp, Homo sapien
ctatttcaaatagtgatgctgtctg

SEQ ID NO: 5312987 - DNA, 25 bp, Homo sapien
atgctgtctgataaagcttaatgag

SEQ ID NO: 5312988 - DNA, 25 bp, Homo sapien
aactatttcaaatagtgatgctgtc

SEQ ID NO: 5312989 - DNA, 25 bp, Homo sapien
aggaacctggtgaactatttcaaat

SEQ ID NO: 5312990 - DNA, 25 bp, Homo sapien
tttcccaagaactgatgctgccaac

SEQ ID NO: 5312991 - DNA, 25 bp, Homo sapien
gccttatgcactagagaaaacttct

SEQ ID NO: 5312992 - DNA, 25 bp, Homo sapien
cataattagccatgtgttcgtcaat

SEQ ID NO: 5312993 - DNA, 25 bp, Homo sapien
cttctcgagataagtacttaaatca

SEQ ID NO: 5312994 - DNA, 25 bp, Homo sapien
gctctgcatacccttgaacatctct

SEQ ID NO: 5312995 - DNA, 25 bp, Homo sapien
ccaaggcgataagtaaaatgatcca

SEQ ID NO: 5312996 - DNA, 25 bp, Homo sapien
ctgaggctctgcatacccttgaaca

SEQ ID NO: 5312997 - DNA, 25 bp, Homo sapien
ataatggtaattccaaggcgataag

SEQ ID NO: 5312998 - DNA, 25 bp, Homo sapien
tggatcagagaggttggttgacacc

SEQ ID NO: 5312999 - DNA, 25 bp, Homo sapien
gttgaacaacagagtttctactgtc

SEQ ID NO: 5313000 - DNA, 25 bp, Homo sapien
agcctctggatcagagaggttggtt

SEQ ID NO: 5313001 - DNA, 25 bp, Homo sapien
ggttgacaccggttgaacaacagag

SEQ ID NO: 5313002 - DNA, 25 bp, Homo sapien
cctgaatgactcttgtgctaactga

SEQ ID NO: 5313003 - DNA, 25 bp, Homo sapien
ttgctaaatactgattgattccctg

SEQ ID NO: 5313004 - DNA, 25 bp, Homo sapien
ttacacagcaattactgtagtactt

SEQ ID NO: 5313005 - DNA, 25 bp, Homo sapien
ttccctgaatgactcttgtgctaac

SEQ ID NO: 5313006 - DNA, 25 bp, Homo sapien
tgcgcttcttccgtgcaacctcccc

SEQ ID NO: 5313007 - DNA, 25 bp, Homo sapien
tcagtgttctttaaccacctgcgct

SEQ ID NO: 5313008 - DNA, 25 bp, Homo sapien
tgttctttaaccacctgcgcttctt

SEQ ID NO: 5313009 - DNA, 25 bp, Homo sapien
tttcagtgttctttaaccacctgcg

SEQ ID NO: 5313010 - DNA, 25 bp, Homo sapien
tatcgtttgtcccccgtgatttcca

SEQ ID NO: 5313011 - DNA, 25 bp, Homo sapien
tcgtttgtcccccgtgatttccagc

SEQ ID NO: 5313012 - DNA, 25 bp, Homo sapien
gtttgtcccccgtgatttccagctc

SEQ ID NO: 5313013 - DNA, 25 bp, Homo sapien
tgtcccccgtgatttccagctcctt

SEQ ID NO: 5313014 - DNA, 25 bp, Homo sapien
tttgagtggtcggatgttatttctt

SEQ ID NO: 5313015 - DNA, 25 bp, Homo sapien
cgcttttgagtggtcggatgttatt

SEQ ID NO: 5313016 - DNA, 25 bp, Homo sapien
cttttgagtggtcggatgttatttc

SEQ ID NO: 5313017 - DNA, 25 bp, Homo sapien
gcttttgagtggtcggatgttattt

SEQ ID NO: 5313018 - DNA, 25 bp, Homo sapien
ttcccccatatgaatgtctcttatt

SEQ ID NO: 5313019 - DNA, 25 bp, Homo sapien
ctccactgcaaggtcatctacaaca

SEQ ID NO: 5313020 - DNA, 25 bp, Homo sapien
gggatatcaccagaactcatgttga

SEQ ID NO: 5313021 - DNA, 25 bp, Homo sapien
cagtctccactgcaaggtcatctac

SEQ ID NO: 5313022 - DNA, 25 bp, Homo sapien
tgcagcttgctcacttgtttgctcc

SEQ ID NO: 5313023 - DNA, 25 bp, Homo sapien
ccttacgacctttgcatcttattga

SEQ ID NO: 5313024 - DNA, 25 bp, Homo sapien
gcatgttccttacgacctttgcatc

SEQ ID NO: 5313025 - DNA, 25 bp, Homo sapien
cgtacttgtagaatgcttctgcatg

SEQ ID NO: 5313026 - DNA, 25 bp, Homo sapien
tgcttctgcatgttccttacgacct

SEQ ID NO: 5313027 - DNA, 25 bp, Homo sapien
tgtctgtgtgtctccatatgtgtat

SEQ ID NO: 5313028 - DNA, 25 bp, Homo sapien
ttcctgtgcttctttgtgtgtgtct

SEQ ID NO: 5313029 - DNA, 25 bp, Homo sapien
aaagcattcttccactttcctgtgc

SEQ ID NO: 5313030 - DNA, 25 bp, Homo sapien
ctgtgtgtctccatatgtgtatttt

SEQ ID NO: 5313031 - DNA, 25 bp, Homo sapien
aaatactacccgacctccgctccat

SEQ ID NO: 5313032 - DNA, 25 bp, Homo sapien
tgccggattgtagatgagacctttg

SEQ ID NO: 5313033 - DNA, 25 bp, Homo sapien
ccttgatgaacaacctgccggattg

SEQ ID NO: 5313034 - DNA, 25 bp, Homo sapien
acaacttggccagattcagaggaag

SEQ ID NO: 5313035 - DNA, 25 bp, Homo sapien
gagacctttgacttgtttgtatctg

SEQ ID NO: 5313036 - DNA, 25 bp, Homo sapien
cagaaggtaaaatagcgctagtttt

SEQ ID NO: 5313037 - DNA, 25 bp, Homo sapien
gctagttttgtcttgtgcaaatcca

SEQ ID NO: 5313038 - DNA, 25 bp, Homo sapien
caaatccatagactgccaccagtag

SEQ ID NO: 5313039 - DNA, 25 bp, Homo sapien
catagactgccaccagtagacagaa

SEQ ID NO: 5313040 - DNA, 25 bp, Homo sapien
tcagaacattgctgtgaccatgctg

SEQ ID NO: 5313041 - DNA, 25 bp, Homo sapien
aacagattctgtgtatctgctgctg

SEQ ID NO: 5313042 - DNA, 25 bp, Homo sapien
gaacattgctgtgaccatgctgtga

SEQ ID NO: 5313043 - DNA, 25 bp, Homo sapien
acagattctgtgtatctgctgctgc

SEQ ID NO: 5313044 - DNA, 25 bp, Homo sapien
aaagcacagctcaaaactcgtcagc

SEQ ID NO: 5313045 - DNA, 25 bp, Homo sapien
agaaagcacagctcaaaactcgtca

SEQ ID NO: 5313046 - DNA, 25 bp, Homo sapien
agcacagctcaaaactcgtcagcat

SEQ ID NO: 5313047 - DNA, 25 bp, Homo sapien
gaaagcacagctcaaaactcgtcag

SEQ ID NO: 5313048 - DNA, 25 bp, Homo sapien
ggtttctggcatatcaagatgaaca

SEQ ID NO: 5313049 - DNA, 25 bp, Homo sapien
cacttaagcacgaaatggtgccgca

SEQ ID NO: 5313050 - DNA, 25 bp, Homo sapien
gggtcttcccttcaaatgcagcctt

SEQ ID NO: 5313051 - DNA, 25 bp, Homo sapien
ctataatataaggatgggtcttccc

SEQ ID NO: 5313052 - DNA, 25 bp, Homo sapien
tccctgagtaagactgaatgagacg

SEQ ID NO: 5313053 - DNA, 25 bp, Homo sapien
caatcacacaaagcactagaagggt

SEQ ID NO: 5313054 - DNA, 25 bp, Homo sapien
tcttagggattgaccacttcacacg

SEQ ID NO: 5313055 - DNA, 25 bp, Homo sapien
tgcaaactatgcagggaaccctgat

SEQ ID NO: 5313056 - DNA, 25 bp, Homo sapien
tactgtatgcacgtttggatcttcc

SEQ ID NO: 5313057 - DNA, 25 bp, Homo sapien
cagcagccagagttaaggtgtagat

SEQ ID NO: 5313058 - DNA, 25 bp, Homo sapien
tcttcttaaggttacctgggagcaa

SEQ ID NO: 5313059 - DNA, 25 bp, Homo sapien
tgggagcaagatctcaatgaagcaa

SEQ ID NO: 5313060 - DNA, 25 bp, Homo sapien
gacttctcaggaaagcgctagcact

SEQ ID NO: 5313061 - DNA, 25 bp, Homo sapien
tgaatgcgtgcggtcatcactgtct

SEQ ID NO: 5313062 - DNA, 25 bp, Homo sapien
taaaggtttgcaggttgagtcactc

SEQ ID NO: 5313063 - DNA, 25 bp, Homo sapien
gcaccaggcggcaaactcttaaagg

SEQ ID NO: 5313064 - DNA, 25 bp, Homo sapien
aaaatgaagactatttctatacaag

SEQ ID NO: 5313065 - DNA, 25 bp, Homo sapien
aaataagtttatattatgtctcaga

SEQ ID NO: 5313066 - DNA, 25 bp, Homo sapien
ttccctgtcttcttttgtatgtgct

SEQ ID NO: 5313067 - DNA, 25 bp, Homo sapien
acaagtgtccatttaagatcttggg

SEQ ID NO: 5313068 - DNA, 25 bp, Homo sapien
tatcccaacgaccatacccgtggtg

SEQ ID NO: 5313069 - DNA, 25 bp, Homo sapien
tatgagccttcatcccggtttctgt

SEQ ID NO: 5313070 - DNA, 25 bp, Homo sapien
gttggagcttttcgcactgctgggt

SEQ ID NO: 5313071 - DNA, 25 bp, Homo sapien
gactctcgtccacatggtatgagcc

SEQ ID NO: 5313072 - DNA, 25 bp, Homo sapien
ctatagaaaagaggatgagaacaaa

SEQ ID NO: 5313073 - DNA, 25 bp, Homo sapien
agaaaagaggatgagaacaaacaca

SEQ ID NO: 5313074 - DNA, 25 bp, Homo sapien
tagaaaagaggatgagaacaaacac

SEQ ID NO: 5313075 - DNA, 25 bp, Homo sapien
tgcaccctctgttgcttcctccatt

SEQ ID NO: 5313076 - DNA, 25 bp, Homo sapien
tcttgcaccctctgttgcttcctcc

SEQ ID NO: 5313077 - DNA, 25 bp, Homo sapien
cagcttcttgcaccctctgttgctt

SEQ ID NO: 5313078 - DNA, 25 bp, Homo sapien
gcttcttgcaccctctgttgcttcc

SEQ ID NO: 5313079 - DNA, 25 bp, Homo sapien
ccaggtaaatgaagaaggtcaggcc

SEQ ID NO: 5313080 - DNA, 25 bp, Homo sapien
gtaaatgaagaaggtcaggccagca

SEQ ID NO: 5313081 - DNA, 25 bp, Homo sapien
tcttccagctcctgaattatccttg

SEQ ID NO: 5313082 - DNA, 25 bp, Homo sapien
cagctcctgaattatccttgtaggg

SEQ ID NO: 5313083 - DNA, 25 bp, Homo sapien
gaacgccacaggaagccaatttcat

SEQ ID NO: 5313084 - DNA, 25 bp, Homo sapien
tgaaagcatattggctcctcatgga

SEQ ID NO: 5313085 - DNA, 25 bp, Homo sapien
caagttactgtgttgagatgagagc

SEQ ID NO: 5313086 - DNA, 25 bp, Homo sapien
gaggcagcatgtcctctagattgga

SEQ ID NO: 5313087 - DNA, 25 bp, Homo sapien
tccattaacagctttaggaaggtac

SEQ ID NO: 5313088 - DNA, 25 bp, Homo sapien
tgtttcttccattaacagctttagg

SEQ ID NO: 5313089 - DNA, 25 bp, Homo sapien
tttcctgtttcttccattaacagct

SEQ ID NO: 5313090 - DNA, 25 bp, Homo sapien
tcttccattaacagctttaggaagg

SEQ ID NO: 5313091 - DNA, 25 bp, Homo sapien
ctgaggccacaaggatgtcatctgt

SEQ ID NO: 5313092 - DNA, 25 bp, Homo sapien
tgctgaggccacaaggatgtcatct

SEQ ID NO: 5313093 - DNA, 25 bp, Homo sapien
gaggccacaaggatgtcatctgtgg

SEQ ID NO: 5313094 - DNA, 25 bp, Homo sapien
tgagctcggctcacaggggtcaatg

SEQ ID NO: 5313095 - DNA, 25 bp, Homo sapien
tcagcagtgatattgccaccttttc

SEQ ID NO: 5313096 - DNA, 25 bp, Homo sapien
cacctggaggcacgtttggtaatat

SEQ ID NO: 5313097 - DNA, 25 bp, Homo sapien
atatttgaggtcacaattggaattc

SEQ ID NO: 5313098 - DNA, 25 bp, Homo sapien
ggaattctgaggtctgctactatca

SEQ ID NO: 5313099 - DNA, 25 bp, Homo sapien
gacaacaaagaatgatctaacctga

SEQ ID NO: 5313100 - DNA, 25 bp, Homo sapien
tattaaaccgaaacttgtacatatg

SEQ ID NO: 5313101 - DNA, 25 bp, Homo sapien
tatcaaaatacagtagctacattgg

SEQ ID NO: 5313102 - DNA, 25 bp, Homo sapien
cagttctgtcttattgttctcctaa

SEQ ID NO: 5313103 - DNA, 25 bp, Homo sapien
tttttacgtagaacctgatgcagcc

SEQ ID NO: 5313104 - DNA, 25 bp, Homo sapien
ctgtatctatccagagtgggtgatt

SEQ ID NO: 5313105 - DNA, 25 bp, Homo sapien
gagtgggtgattcacctggtgtacc

SEQ ID NO: 5313106 - DNA, 25 bp, Homo sapien
ctgaaaaactcgaaggtacactggt

SEQ ID NO: 5313107 - DNA, 25 bp, Homo sapien
acacataatttcaacactaatcatt

SEQ ID NO: 5313108 - DNA, 25 bp, Homo sapien
ctgctctaagagaagctgtacacat

SEQ ID NO: 5313109 - DNA, 25 bp, Homo sapien
gtacacataatttcaacactaatca

SEQ ID NO: 5313110 - DNA, 25 bp, Homo sapien
gctgctctaagagaagctgtacaca

SEQ ID NO: 5313111 - DNA, 25 bp, Homo sapien
tatcaatggtaattaaaatataaag

SEQ ID NO: 5313112 - DNA, 25 bp, Homo sapien
cgagtactaaccaggatcaactctg

SEQ ID NO: 5313113 - DNA, 25 bp, Homo sapien
tccgagtactaaccaggatcaactc

SEQ ID NO: 5313114 - DNA, 25 bp, Homo sapien
ccatccgagtactaaccaggatcaa

SEQ ID NO: 5313115 - DNA, 25 bp, Homo sapien
cccatccgagtactaaccaggatca

SEQ ID NO: 5313116 - DNA, 25 bp, Homo sapien
atttttgcttttctcgagaataagg

SEQ ID NO: 5313117 - DNA, 25 bp, Homo sapien
tagggaatgtttgaatgccaaggca

SEQ ID NO: 5313118 - DNA, 25 bp, Homo sapien
tgcttttctcgagaataaggactag

SEQ ID NO: 5313119 - DNA, 25 bp, Homo sapien
taattctccacaggcctagggaatg

SEQ ID NO: 5313120 - DNA, 25 bp, Homo sapien
gtatcttaaaccctgcatgctgcag

SEQ ID NO: 5313121 - DNA, 25 bp, Homo sapien
catgctgcagatctaagctgtgctc

SEQ ID NO: 5313122 - DNA, 25 bp, Homo sapien
cacatacagcgtgcataaatttgac

SEQ ID NO: 5313123 - DNA, 25 bp, Homo sapien
gctcagcagcggctgtgacagaaga

SEQ ID NO: 5313124 - DNA, 25 bp, Homo sapien
gtgccatctcatatccatgtctgtc

SEQ ID NO: 5313125 - DNA, 25 bp, Homo sapien
tggctaccctgcgtgcttagagctt

SEQ ID NO: 5313126 - DNA, 25 bp, Homo sapien
aatcctaggaaatttagtccatcct

SEQ ID NO: 5313127 - DNA, 25 bp, Homo sapien
caatactggtgacaggagagctccc

SEQ ID NO: 5313128 - DNA, 25 bp, Homo sapien
aaggcttattttcatgcacgaacat

SEQ ID NO: 5313129 - DNA, 25 bp, Homo sapien
aaaggcttattttcatgcacgaaca

SEQ ID NO: 5313130 - DNA, 25 bp, Homo sapien
aaaaaaaggcttattttcatgcacg

SEQ ID NO: 5313131 - DNA, 25 bp, Homo sapien
aaaaaggcttattttcatgcacgaa

SEQ ID NO: 5313132 - DNA, 25 bp, Homo sapien
tccatgaagctagcaactgaaagtc

SEQ ID NO: 5313133 - DNA, 25 bp, Homo sapien
catactttaagaaccttgggaccat

SEQ ID NO: 5313134 - DNA, 25 bp, Homo sapien
ggagcagagaatagcttcacagcag

SEQ ID NO: 5313135 - DNA, 25 bp, Homo sapien
gcataagaaccaacaaggcacacgt

SEQ ID NO: 5313136 - DNA, 25 bp, Homo sapien
aatattgacaatttaggtgtagttc

SEQ ID NO: 5313137 - DNA, 25 bp, Homo sapien
gctgcgagagaatgaaatattgaca

SEQ ID NO: 5313138 - DNA, 25 bp, Homo sapien
gacaatttaggtgtagttctcataa

SEQ ID NO: 5313139 - DNA, 25 bp, Homo sapien
tccaatgctgcgagagaatgaaata

SEQ ID NO: 5313140 - DNA, 25 bp, Homo sapien
ctgtttcaagtcttgggttggccca

SEQ ID NO: 5313141 - DNA, 25 bp, Homo sapien
tgtttcaagtcttgggttggcccag

SEQ ID NO: 5313142 - DNA, 25 bp, Homo sapien
ccagactaccaccacttcagggatt

SEQ ID NO: 5313143 - DNA, 25 bp, Homo sapien
ttgggttggcccagactaccaccac

SEQ ID NO: 5313144 - DNA, 25 bp, Homo sapien
gaagtacaaattttatgatcccttc

SEQ ID NO: 5313145 - DNA, 25 bp, Homo sapien
caatcatactgaagtacaaatttta

SEQ ID NO: 5313146 - DNA, 25 bp, Homo sapien
ctgaagtacaaattttatgatccct

SEQ ID NO: 5313147 - DNA, 25 bp, Homo sapien
catactgaagtacaaattttatgat

SEQ ID NO: 5313148 - DNA, 25 bp, Homo sapien
cggtgtccgtgctattaaaaacact

SEQ ID NO: 5313149 - DNA, 25 bp, Homo sapien
caactttgccctatagagaggtttc

SEQ ID NO: 5313150 - DNA, 25 bp, Homo sapien
tgaaagtataacttgccaccggtgt

SEQ ID NO: 5313151 - DNA, 25 bp, Homo sapien
gccctatagagaggtttctgaaagt

SEQ ID NO: 5313152 - DNA, 25 bp, Homo sapien
gttgtctacctcatcagtgactacc

SEQ ID NO: 5313153 - DNA, 25 bp, Homo sapien
ggttgtctacctcatcagtgactac

SEQ ID NO: 5313154 - DNA, 25 bp, Homo sapien
tgtctacctcatcagtgactaccat

SEQ ID NO: 5313155 - DNA, 25 bp, Homo sapien
ttgtctacctcatcagtgactacca

SEQ ID NO: 5313156 - DNA, 25 bp, Homo sapien
ttataatctgcggaacccaggtctg

SEQ ID NO: 5313157 - DNA, 25 bp, Homo sapien
ccaggtctgaaaccacttggtggaa

SEQ ID NO: 5313158 - DNA, 25 bp, Homo sapien
ttgacctcttgaattgttggcctgg

SEQ ID NO: 5313159 - DNA, 25 bp, Homo sapien
ggaaataaggtaagacatgccatgg

SEQ ID NO: 5313160 - DNA, 25 bp, Homo sapien
caatgtggataagctagtaggaggc

SEQ ID NO: 5313161 - DNA, 25 bp, Homo sapien
gagataagccttgagtaggacctca

SEQ ID NO: 5313162 - DNA, 25 bp, Homo sapien
tgtaatgacggaatgctaaagctag

SEQ ID NO: 5313163 - DNA, 25 bp, Homo sapien
tatagcactagagatagcaacaacc

SEQ ID NO: 5313164 - DNA, 25 bp, Homo sapien
ggattaggcaattcttacttgtggg

SEQ ID NO: 5313165 - DNA, 25 bp, Homo sapien
tagcagagcgaatagtgttgaagtc

SEQ ID NO: 5313166 - DNA, 25 bp, Homo sapien
gaatgatgatcatggttagcaccca

SEQ ID NO: 5313167 - DNA, 25 bp, Homo sapien
cctgtgcactgtatgatggttagca

SEQ ID NO: 5313168 - DNA, 25 bp, Homo sapien
tcatctcactctaggcacacaggag

SEQ ID NO: 5313169 - DNA, 25 bp, Homo sapien
tcttctaggctttggctggacaagg

SEQ ID NO: 5313170 - DNA, 25 bp, Homo sapien
tgctaggagggaaaaaggtctctcc

SEQ ID NO: 5313171 - DNA, 25 bp, Homo sapien
gggacacttgctgcacactttatga

SEQ ID NO: 5313172 - DNA, 25 bp, Homo sapien
gaaattttgccagacaggcttatcc

SEQ ID NO: 5313173 - DNA, 25 bp, Homo sapien
tatcctcagagtatgctttagtagg

SEQ ID NO: 5313174 - DNA, 25 bp, Homo sapien
caggattagccaggtagagctagcc

SEQ ID NO: 5313175 - DNA, 25 bp, Homo sapien
taaactgttctagtgcaaaaatgct

SEQ ID NO: 5313176 - DNA, 25 bp, Homo sapien
tctctttttcaatgccatttgcaaa

SEQ ID NO: 5313177 - DNA, 25 bp, Homo sapien
tttcaatgccatttgcaaatatgtg

SEQ ID NO: 5313178 - DNA, 25 bp, Homo sapien
ctttttcaatgccatttgcaaatat

SEQ ID NO: 5313179 - DNA, 25 bp, Homo sapien
ttctctttttcaatgccatttgcaa

SEQ ID NO: 5313180 - DNA, 25 bp, Homo sapien
cactcttgactacttcttgaatttt

SEQ ID NO: 5313181 - DNA, 25 bp, Homo sapien
tgcacaccaccactcttgactactt

SEQ ID NO: 5313182 - DNA, 25 bp, Homo sapien
caccactcttgactacttcttgaat

SEQ ID NO: 5313183 - DNA, 25 bp, Homo sapien
accaccactcttgactacttcttga

SEQ ID NO: 5313184 - DNA, 25 bp, Homo sapien
tgtgctgtctctcaatgagttcagt

SEQ ID NO: 5313185 - DNA, 25 bp, Homo sapien
caaaatagccatttccttcacatgg

SEQ ID NO: 5313186 - DNA, 25 bp, Homo sapien
tgtcatcagatctggcaatgtgaga

SEQ ID NO: 5313187 - DNA, 25 bp, Homo sapien
ctgagctgttgggagaattacaaag

SEQ ID NO: 5313188 - DNA, 25 bp, Homo sapien
acagttatgggaagcctccttatac

SEQ ID NO: 5313189 - DNA, 25 bp, Homo sapien
tctctgggctaacattctgtcttca

SEQ ID NO: 5313190 - DNA, 25 bp, Homo sapien
cttaagggccttgctccagttgtaa

SEQ ID NO: 5313191 - DNA, 25 bp, Homo sapien
tctgtcttcaagatctttgtgttta

SEQ ID NO: 5313192 - DNA, 25 bp, Homo sapien
aagccccgattcctattatgttgtg

SEQ ID NO: 5313193 - DNA, 25 bp, Homo sapien
gtaaatagccatatctagtctcact

SEQ ID NO: 5313194 - DNA, 25 bp, Homo sapien
cagtcttgtaaatagccatatctag

SEQ ID NO: 5313195 - DNA, 25 bp, Homo sapien
cttcaacagtcttgtaaatagccat

SEQ ID NO: 5313196 - DNA, 25 bp, Homo sapien
cttgtaaatagccatatctagtctc

SEQ ID NO: 5313197 - DNA, 25 bp, Homo sapien
tgtgtgaccttcgacaaatggttcc

SEQ ID NO: 5313198 - DNA, 25 bp, Homo sapien
tggttcccatttctgagggctaaac

SEQ ID NO: 5313199 - DNA, 25 bp, Homo sapien
tgaccttcgacaaatggttcccatt

SEQ ID NO: 5313200 - DNA, 25 bp, Homo sapien
aaatggttcccatttctgagggcta

SEQ ID NO: 5313201 - DNA, 25 bp, Homo sapien
tggaggatattttgatgaacactac

SEQ ID NO: 5313202 - DNA, 25 bp, Homo sapien
ccctattactatccctgcaggatgg

SEQ ID NO: 5313203 - DNA, 25 bp, Homo sapien
ttaattctgcctgaccaaaaatctg

SEQ ID NO: 5313204 - DNA, 25 bp, Homo sapien
aaacatgcaatcaccccaaggtaca

SEQ ID NO: 5313205 - DNA, 25 bp, Homo sapien
ctattgaagattgtgagctgacgcc

SEQ ID NO: 5313206 - DNA, 25 bp, Homo sapien
gccagggtcgtggtagtctccataa

SEQ ID NO: 5313207 - DNA, 25 bp, Homo sapien
actcagttgtcatagaggaaggcac

SEQ ID NO: 5313208 - DNA, 25 bp, Homo sapien
ccattgtagtacagcccagagagct

SEQ ID NO: 5313209 - DNA, 25 bp, Homo sapien
caagtcgatatggaattcgctgtct

SEQ ID NO: 5313210 - DNA, 25 bp, Homo sapien
tagccattcatcaactactcgacca

SEQ ID NO: 5313211 - DNA, 25 bp, Homo sapien
aactactcgaccaagtcgatatgga

SEQ ID NO: 5313212 - DNA, 25 bp, Homo sapien
ctttgtcgagtagccattcatcaac

SEQ ID NO: 5313213 - DNA, 25 bp, Homo sapien
tctaatgactgtgtacaagaaacag

SEQ ID NO: 5313214 - DNA, 25 bp, Homo sapien
caagaaacagtcttggacttgatga

SEQ ID NO: 5313215 - DNA, 25 bp, Homo sapien
cctccaaggagcatttacttccaaa

SEQ ID NO: 5313216 - DNA, 25 bp, Homo sapien
gagagctgatcatgacaatctttga

SEQ ID NO: 5313217 - DNA, 25 bp, Homo sapien
aaccatgaacaggagtggatgctgc

SEQ ID NO: 5313218 - DNA, 25 bp, Homo sapien
catggtcccaggtatcagatggtgt

SEQ ID NO: 5313219 - DNA, 25 bp, Homo sapien
ggatggcttctaagctgaccctcaa

SEQ ID NO: 5313220 - DNA, 25 bp, Homo sapien
gaccctcaatgctaatggcccatgg

SEQ ID NO: 5313221 - DNA, 25 bp, Homo sapien
tctacccatttaccacagcatgtca

SEQ ID NO: 5313222 - DNA, 25 bp, Homo sapien
ttctacccatttaccacagcatgtc

SEQ ID NO: 5313223 - DNA, 25 bp, Homo sapien
ttagggacaaatcagagattaatga

SEQ ID NO: 5313224 - DNA, 25 bp, Homo sapien
gagagaaaattttcccgcataactg

SEQ ID NO: 5313225 - DNA, 25 bp, Homo sapien
ccgcataactgtaattagggacaaa

SEQ ID NO: 5313226 - DNA, 25 bp, Homo sapien
gggacaaatcagagattaatgatgc

SEQ ID NO: 5313227 - DNA, 25 bp, Homo sapien
ttataaattgtgtgctttgcaaaaa

SEQ ID NO: 5313228 - DNA, 25 bp, Homo sapien
tataaattgtgtgctttgcaaaaaa

SEQ ID NO: 5313229 - DNA, 25 bp, Homo sapien
gtgctttgcaaaaaacatagttata

SEQ ID NO: 5313230 - DNA, 25 bp, Homo sapien
ttgtgtgctttgcaaaaaacatagt

SEQ ID NO: 5313231 - DNA, 25 bp, Homo sapien
tctcctataaaatggcatttgtaca

SEQ ID NO: 5313232 - DNA, 25 bp, Homo sapien
tgaaaacgataatgtacaccttcac

SEQ ID NO: 5313233 - DNA, 25 bp, Homo sapien
ttgaaaacgataatgtacaccttca

SEQ ID NO: 5313234 - DNA, 25 bp, Homo sapien
ttcccccgatacatattcacttgct

SEQ ID NO: 5313235 - DNA, 25 bp, Homo sapien
tcttcccccgatacatattcacttg

SEQ ID NO: 5313236 - DNA, 25 bp, Homo sapien
ccccgatacatattcacttgcttac

SEQ ID NO: 5313237 - DNA, 25 bp, Homo sapien
aatcttcccccgatacatattcact

SEQ ID NO: 5313238 - DNA, 25 bp, Homo sapien
tgcagggtagcgctcgatcactggc

SEQ ID NO: 5313239 - DNA, 25 bp, Homo sapien
ggattcttcaatggcgatgtcatct

SEQ ID NO: 5313240 - DNA, 25 bp, Homo sapien
gaaacgaactacatggtatttccca

SEQ ID NO: 5313241 - DNA, 25 bp, Homo sapien
tgtccacctgcaacgtggcattgcc

SEQ ID NO: 5313242 - DNA, 25 bp, Homo sapien
aaaagagttgaattaagttgactag

SEQ ID NO: 5313243 - DNA, 25 bp, Homo sapien
gttgaattaagttgactagtcacca

SEQ ID NO: 5313244 - DNA, 25 bp, Homo sapien
aagagttgaattaagttgactagtc

SEQ ID NO: 5313245 - DNA, 25 bp, Homo sapien
gagttgaattaagttgactagtcac

SEQ ID NO: 5313246 - DNA, 25 bp, Homo sapien
agcagctcaggtgttccatgtgtca

SEQ ID NO: 5313247 - DNA, 25 bp, Homo sapien
gcagctcaggtgttccatgtgtcat

SEQ ID NO: 5313248 - DNA, 25 bp, Homo sapien
cagcagctcaggtgttccatgtgtc

SEQ ID NO: 5313249 - DNA, 25 bp, Homo sapien
gggcgttcctatggacttagtggca

SEQ ID NO: 5313250 - DNA, 25 bp, Homo sapien
gaaatctggggcgttcctatggact

SEQ ID NO: 5313251 - DNA, 25 bp, Homo sapien
gcaattgaagcagtcagattttcag

SEQ ID NO: 5313252 - DNA, 25 bp, Homo sapien
tatggacttagtggcaattgaagca

SEQ ID NO: 5313253 - DNA, 25 bp, Homo sapien
gaggaatttcttagtggcacactcc

SEQ ID NO: 5313254 - DNA, 25 bp, Homo sapien
taaacgccagacactatgatcagca

SEQ ID NO: 5313255 - DNA, 25 bp, Homo sapien
tgaagatggtcacagacaaacaagc

SEQ ID NO: 5313256 - DNA, 25 bp, Homo sapien
gatgtcctccctagtcttgttctga

SEQ ID NO: 5313257 - DNA, 25 bp, Homo sapien
gggaggacagagacaagacttcttg

SEQ ID NO: 5313258 - DNA, 25 bp, Homo sapien
gacagagacaagacttcttggccat

SEQ ID NO: 5313259 - DNA, 25 bp, Homo sapien
gcgaccggcccagctcttatctttt

SEQ ID NO: 5313260 - DNA, 25 bp, Homo sapien
gaccggcccagctcttatcttttta

SEQ ID NO: 5313261 - DNA, 25 bp, Homo sapien
cattttgtgataccatcattgatga

SEQ ID NO: 5313262 - DNA, 25 bp, Homo sapien
cattgatgaaattgatgaaagcctc

SEQ ID NO: 5313263 - DNA, 25 bp, Homo sapien
ttacactcacaaactgagtcgcagg

SEQ ID NO: 5313264 - DNA, 25 bp, Homo sapien
tcttaagtcccctagctgcaaatat

SEQ ID NO: 5313265 - DNA, 25 bp, Homo sapien
gaaatagcacggctgatatatacct

SEQ ID NO: 5313266 - DNA, 25 bp, Homo sapien
cctggcaggtaattgcttaaaactc

SEQ ID NO: 5313267 - DNA, 25 bp, Homo sapien
aggtaattgcttaaaactccagcag

SEQ ID NO: 5313268 - DNA, 25 bp, Homo sapien
tagcacggctgatatatacctggca

SEQ ID NO: 5313269 - DNA, 25 bp, Homo sapien
tgtttcaagatggagcctcacgttc

SEQ ID NO: 5313270 - DNA, 25 bp, Homo sapien
cactcttgaagaaaactttgggcct

SEQ ID NO: 5313271 - DNA, 25 bp, Homo sapien
ttggaaatagcaccacatgtaaggc

SEQ ID NO: 5313272 - DNA, 25 bp, Homo sapien
actttggtttacttgactggacttg

SEQ ID NO: 5313273 - DNA, 25 bp, Homo sapien
ctgagccttgcccacgctaccacca

SEQ ID NO: 5313274 - DNA, 25 bp, Homo sapien
gagccttgcccacgctaccaccact

SEQ ID NO: 5313275 - DNA, 25 bp, Homo sapien
agttttcctgactgtctaagacaac

SEQ ID NO: 5313276 - DNA, 25 bp, Homo sapien
tttcatccaggttgatactcacagc

SEQ ID NO: 5313277 - DNA, 25 bp, Homo sapien
aagtgttaccgcatctggaaagtcc

SEQ ID NO: 5313278 - DNA, 25 bp, Homo sapien
tcagacacagatagttcccttttgg

SEQ ID NO: 5313279 - DNA, 25 bp, Homo sapien
tactaacagctaaagcagactggga

SEQ ID NO: 5313280 - DNA, 25 bp, Homo sapien
ggtgaaacttgttgcaatgttccac

SEQ ID NO: 5313281 - DNA, 25 bp, Homo sapien
tcttttgtccttatgccctgaggtg

SEQ ID NO: 5313282 - DNA, 25 bp, Homo sapien
ttcttttgtccttatgccctgaggt

SEQ ID NO: 5313283 - DNA, 25 bp, Homo sapien
aaatgtaccagaaattcttgtgtgt

SEQ ID NO: 5313284 - DNA, 25 bp, Homo sapien
cacccggcctacacctcctaacatt

SEQ ID NO: 5313285 - DNA, 25 bp, Homo sapien
acacccggcctacacctcctaacat

SEQ ID NO: 5313286 - DNA, 25 bp, Homo sapien
gaatccaaaggttcatatatccatc

SEQ ID NO: 5313287 - DNA, 25 bp, Homo sapien
ttataatgactgcaggtcaaggatt

SEQ ID NO: 5313288 - DNA, 25 bp, Homo sapien
tatttcacgttagctggatgaaaat

SEQ ID NO: 5313289 - DNA, 25 bp, Homo sapien
ttcattataatgactgcaggtcaag

SEQ ID NO: 5313290 - DNA, 25 bp, Homo sapien
tgcctccacaaaagcattctgatca

SEQ ID NO: 5313291 - DNA, 25 bp, Homo sapien
gataatttgcttatgattccgtagc

SEQ ID NO: 5313292 - DNA, 25 bp, Homo sapien
tgtgacggaacttgactttgaatca

SEQ ID NO: 5313293 - DNA, 25 bp, Homo sapien
tctttcaagcatagcagttgcctcc

SEQ ID NO: 5313294 - DNA, 25 bp, Homo sapien
tggtatatggtttgaagacctgctt

SEQ ID NO: 5313295 - DNA, 25 bp, Homo sapien
tcagtaccacaagttagggcctttg

SEQ ID NO: 5313296 - DNA, 25 bp, Homo sapien
gacacaagcctaggttggtatatgg

SEQ ID NO: 5313297 - DNA, 25 bp, Homo sapien
tgtttccatgtagagtaggagggac

SEQ ID NO: 5313298 - DNA, 25 bp, Homo sapien
tgaagaagaggagaaaaaggcaaac

SEQ ID NO: 5313299 - DNA, 25 bp, Homo sapien
tgggtgaagaagaggagaaaaaggc

SEQ ID NO: 5313300 - DNA, 25 bp, Homo sapien
ggtgaagaagaggagaaaaaggcaa

SEQ ID NO: 5313301 - DNA, 25 bp, Homo sapien
cttgggtgaagaagaggagaaaaag

SEQ ID NO: 5313302 - DNA, 25 bp, Homo sapien
ccaaatgatggtgttctgaaatgca

SEQ ID NO: 5313303 - DNA, 25 bp, Homo sapien
tggcttacagcctgcaacggttggc

SEQ ID NO: 5313304 - DNA, 25 bp, Homo sapien
tgagctgctgtgctccactagttag

SEQ ID NO: 5313305 - DNA, 25 bp, Homo sapien
cactagttagttgtggctggcttac

SEQ ID NO: 5313306 - DNA, 25 bp, Homo sapien
gtttctgtgatcgtggtaaaacacc

SEQ ID NO: 5313307 - DNA, 25 bp, Homo sapien
tgatcgtggtaaaacacctgggtca

SEQ ID NO: 5313308 - DNA, 25 bp, Homo sapien
tgtcatgtttctgtgatcgtggtaa

SEQ ID NO: 5313309 - DNA, 25 bp, Homo sapien
cttgtcatgtttctgtgatcgtggt

SEQ ID NO: 5313310 - DNA, 25 bp, Homo sapien
ccattaaagcatttacttagaagcc

SEQ ID NO: 5313311 - DNA, 25 bp, Homo sapien
ttccaggaagagcccaccattaaag

SEQ ID NO: 5313312 - DNA, 25 bp, Homo sapien
agcctagttgcagtgtgatcttcca

SEQ ID NO: 5313313 - DNA, 25 bp, Homo sapien
gatcttccagggcagttgagcgtcc

SEQ ID NO: 5313314 - DNA, 25 bp, Homo sapien
aaataactagagaataattcatgat

SEQ ID NO: 5313315 - DNA, 25 bp, Homo sapien
aataactagagaataattcatgata

SEQ ID NO: 5313316 - DNA, 25 bp, Homo sapien
aagtgctggaggtaaacttaggtag

SEQ ID NO: 5313317 - DNA, 25 bp, Homo sapien
tagaacaatttattgggcaaaccaa

SEQ ID NO: 5313318 - DNA, 25 bp, Homo sapien
gaaagcttacacaaattttccttga

SEQ ID NO: 5313319 - DNA, 25 bp, Homo sapien
tgtatcattgatagcatagcaccaa

SEQ ID NO: 5313320 - DNA, 25 bp, Homo sapien
tagaactggtacccgatgaccactt

SEQ ID NO: 5313321 - DNA, 25 bp, Homo sapien
ttagaactggtacccgatgaccact

SEQ ID NO: 5313322 - DNA, 25 bp, Homo sapien
agaactggtacccgatgaccacttt

SEQ ID NO: 5313323 - DNA, 25 bp, Homo sapien
gaacagtgctaaaacctatggccag

SEQ ID NO: 5313324 - DNA, 25 bp, Homo sapien
ttgctaaagatatatgtcgtcccag

SEQ ID NO: 5313325 - DNA, 25 bp, Homo sapien
taggaggccacttatacgtgatttg

SEQ ID NO: 5313326 - DNA, 25 bp, Homo sapien
tactgggtcggtcattaggaggcca

SEQ ID NO: 5313327 - DNA, 25 bp, Homo sapien
accaattagtccaaatacatcaagt

SEQ ID NO: 5313328 - DNA, 25 bp, Homo sapien
aaaccaattagtccaaatacatcaa

SEQ ID NO: 5313329 - DNA, 25 bp, Homo sapien
aaccaattagtccaaatacatcaag

SEQ ID NO: 5313330 - DNA, 25 bp, Homo sapien
gatgaataccataagactcctgatt

SEQ ID NO: 5313331 - DNA, 25 bp, Homo sapien
gatggagtatctgcagctatataag

SEQ ID NO: 5313332 - DNA, 25 bp, Homo sapien
aatacactcctcaagctaagtcagg

SEQ ID NO: 5313333 - DNA, 25 bp, Homo sapien
aaagtatgcatcctgaagaaaggga

SEQ ID NO: 5313334 - DNA, 25 bp, Homo sapien
tctgacagatagcaccttaaccagg

SEQ ID NO: 5313335 - DNA, 25 bp, Homo sapien
gatataccttgctagtcctcaggct

SEQ ID NO: 5313336 - DNA, 25 bp, Homo sapien
tcatcaagagtcgagggcaggaaac

SEQ ID NO: 5313337 - DNA, 25 bp, Homo sapien
tgaggacactgcaacattctgtgct

SEQ ID NO: 5313338 - DNA, 25 bp, Homo sapien
aagtagagtttgagattttgtttgg

SEQ ID NO: 5313339 - DNA, 25 bp, Homo sapien
tgaagtagagtttgagattttgttt

SEQ ID NO: 5313340 - DNA, 25 bp, Homo sapien
aatgaagtagagtttgagattttgt

SEQ ID NO: 5313341 - DNA, 25 bp, Homo sapien
ctcttgaaatgaagtagagtttgag

SEQ ID NO: 5313342 - DNA, 25 bp, Homo sapien
agaaattaggactattcaaggtcag

SEQ ID NO: 5313343 - DNA, 25 bp, Homo sapien
tacagagcacaaatcacatagtaga

SEQ ID NO: 5313344 - DNA, 25 bp, Homo sapien
tgtctcttgaattaaatctccagat

SEQ ID NO: 5313345 - DNA, 25 bp, Homo sapien
taagaaagactgcacttagtaagtg

SEQ ID NO: 5313346 - DNA, 25 bp, Homo sapien
aaagaactgccagagcaatcccttg

SEQ ID NO: 5313347 - DNA, 25 bp, Homo sapien
tgtgtctacctttgaccaatggtga

SEQ ID NO: 5313348 - DNA, 25 bp, Homo sapien
tctgaggctaatgtgctctgtgagg

SEQ ID NO: 5313349 - DNA, 25 bp, Homo sapien
caatcccttgtataggctactgtga

SEQ ID NO: 5313350 - DNA, 25 bp, Homo sapien
tgttacaaaattgatgtcagatagc

SEQ ID NO: 5313351 - DNA, 25 bp, Homo sapien
tgaatgacaaggtattgaccatggt

SEQ ID NO: 5313352 - DNA, 25 bp, Homo sapien
cagatagcttagaagacttcatatg

SEQ ID NO: 5313353 - DNA, 25 bp, Homo sapien
tgttttgaatgacaaggtattgacc

SEQ ID NO: 5313354 - DNA, 25 bp, Homo sapien
catagtaaacatagcagtgaattgc

SEQ ID NO: 5313355 - DNA, 25 bp, Homo sapien
tagtcccagaacataattgttgccc

SEQ ID NO: 5313356 - DNA, 25 bp, Homo sapien
ctcctggatttttggcacgtagtta

SEQ ID NO: 5313357 - DNA, 25 bp, Homo sapien
tataactatagtgtcaaaagccatg

SEQ ID NO: 5313358 - DNA, 25 bp, Homo sapien
aagctctggaatagttgtatgaaca

SEQ ID NO: 5313359 - DNA, 25 bp, Homo sapien
tcacatcctctcatctagtcactag

SEQ ID NO: 5313360 - DNA, 25 bp, Homo sapien
tcagatttgtgtcataggtaagcca

SEQ ID NO: 5313361 - DNA, 25 bp, Homo sapien
ggctctcatcctacacacatgttaa

SEQ ID NO: 5313362 - DNA, 25 bp, Homo sapien
ggtaagccaaatacatatgttgcaa

SEQ ID NO: 5313363 - DNA, 25 bp, Homo sapien
tcattcactcgagtatctgggaacc

SEQ ID NO: 5313364 - DNA, 25 bp, Homo sapien
gacgctagtcctcctctcacataaa

SEQ ID NO: 5313365 - DNA, 25 bp, Homo sapien
taatctttgatggtagacgctagtc

SEQ ID NO: 5313366 - DNA, 25 bp, Homo sapien
tgtttcccatgtggactctgtatga

SEQ ID NO: 5313367 - DNA, 25 bp, Homo sapien
cagggcccacaacttccgtttcagt

SEQ ID NO: 5313368 - DNA, 25 bp, Homo sapien
aagcatggactttctaattggcctg

SEQ ID NO: 5313369 - DNA, 25 bp, Homo sapien
aaatgggagagtaaagtacctatct

SEQ ID NO: 5313370 - DNA, 25 bp, Homo sapien
gtgcctcaatatccttatgggtaaa

SEQ ID NO: 5313371 - DNA, 25 bp, Homo sapien
tactctcatccttattattctctgg

SEQ ID NO: 5313372 - DNA, 25 bp, Homo sapien
ctctttccaacaatagcttggattt

SEQ ID NO: 5313373 - DNA, 25 bp, Homo sapien
ggttctgcctccgatatcttgcctc

SEQ ID NO: 5313374 - DNA, 25 bp, Homo sapien
gaactaagttgtaaacttcttgatg

SEQ ID NO: 5313375 - DNA, 25 bp, Homo sapien
cattaaacggcatagaggaccctct

SEQ ID NO: 5313376 - DNA, 25 bp, Homo sapien
gactccagtgaggtaccaacagctt

SEQ ID NO: 5313377 - DNA, 25 bp, Homo sapien
gaagcaaaacgctggaccatgtatc

SEQ ID NO: 5313378 - DNA, 25 bp, Homo sapien
gggccataggccttgattctaattc

SEQ ID NO: 5313379 - DNA, 25 bp, Homo sapien
tctcccagtacctcgacaaggaacg

SEQ ID NO: 5313380 - DNA, 25 bp, Homo sapien
cagggctggtcctttagtaggtgtc

SEQ ID NO: 5313381 - DNA, 25 bp, Homo sapien
catccggccactgagtgaccttctg

SEQ ID NO: 5313382 - DNA, 25 bp, Homo sapien
agataagtggctcgcaccaagcaca

SEQ ID NO: 5313383 - DNA, 25 bp, Homo sapien
ccgcgagaacttggcatcgcagacc

SEQ ID NO: 5313384 - DNA, 25 bp, Homo sapien
cgcgagaacttggcatcgcagaccc

SEQ ID NO: 5313385 - DNA, 25 bp, Homo sapien
gcgagaacttggcatcgcagaccca

SEQ ID NO: 5313386 - DNA, 25 bp, Homo sapien
cgagaacttggcatcgcagacccac

SEQ ID NO: 5313387 - DNA, 25 bp, Homo sapien
aaggatgccggtgacctgtagattg

SEQ ID NO: 5313388 - DNA, 25 bp, Homo sapien
gtgtccgcctcgcaaggatgccggt

SEQ ID NO: 5313389 - DNA, 25 bp, Homo sapien
gacctgtagattgcaataggcactg

SEQ ID NO: 5313390 - DNA, 25 bp, Homo sapien
gattgcaataggcactgaatgatgc

SEQ ID NO: 5313391 - DNA, 25 bp, Homo sapien
aggaggccgctgagggtgagcggga

SEQ ID NO: 5313392 - DNA, 25 bp, Homo sapien
taggaggccgctgagggtgagcggg

SEQ ID NO: 5313393 - DNA, 25 bp, Homo sapien
ctaggaggccgctgagggtgagcgg

SEQ ID NO: 5313394 - DNA, 25 bp, Homo sapien
gccgcccccgggcgagcccagctcg

SEQ ID NO: 5313395 - DNA, 25 bp, Homo sapien
ccgcccccgggcgagcccagctcgg

SEQ ID NO: 5313396 - DNA, 25 bp, Homo sapien
agccgccgcgggaggcaaagtttgg

SEQ ID NO: 5313397 - DNA, 25 bp, Homo sapien
ggcggggcgcccgccgaggggcagc

SEQ ID NO: 5313398 - DNA, 25 bp, Homo sapien
agcgggcggcgcggagtgggctgag

SEQ ID NO: 5313399 - DNA, 25 bp, Homo sapien
tgggctgaggggccggccgcctcac

SEQ ID NO: 5313400 - DNA, 25 bp, Homo sapien
aaatccatttagctttgtgtgcggg

SEQ ID NO: 5313401 - DNA, 25 bp, Homo sapien
cccaaagagtttcgggcgagagtgc

SEQ ID NO: 5313402 - DNA, 25 bp, Homo sapien
aacaatccgaaacatagccgaggcg

SEQ ID NO: 5313403 - DNA, 25 bp, Homo sapien
tacatgacagacatccaccgcgaat

SEQ ID NO: 5313404 - DNA, 25 bp, Homo sapien
agcggcgcgcatcgcctgctcccga

SEQ ID NO: 5313405 - DNA, 25 bp, Homo sapien
gcatcgcctgctcccgaggcaatct

SEQ ID NO: 5313406 - DNA, 25 bp, Homo sapien
ccgaggcaatctccgcgtccgccgc

SEQ ID NO: 5313407 - DNA, 25 bp, Homo sapien
ggctcgcccgctagcgccagcctcc

SEQ ID NO: 5313408 - DNA, 25 bp, Homo sapien
gttcagagggaagagtgcgcccttc

SEQ ID NO: 5313409 - DNA, 25 bp, Homo sapien
gtgggaatcgaacggcggaaaggca

SEQ ID NO: 5313410 - DNA, 25 bp, Homo sapien
tctgaaggaagtgggaatcgaacgg

SEQ ID NO: 5313411 - DNA, 25 bp, Homo sapien
agaagaagatgcagacgaaggagta

SEQ ID NO: 5313412 - DNA, 25 bp, Homo sapien
gaagccaaattagacgactgcaggt

SEQ ID NO: 5313413 - DNA, 25 bp, Homo sapien
ggtaacattaggtgattagctgaca

SEQ ID NO: 5313414 - DNA, 25 bp, Homo sapien
gttgaactcatcctatatagacagt

SEQ ID NO: 5313415 - DNA, 25 bp, Homo sapien
gaataaggaactatgcagggaagcc

SEQ ID NO: 5313416 - DNA, 25 bp, Homo sapien
taagcctcccacacattagctattt

SEQ ID NO: 5313417 - DNA, 25 bp, Homo sapien
ttaagatccaagatacatgtgaagg

SEQ ID NO: 5313418 - DNA, 25 bp, Homo sapien
tatgaaggcaaacatgtgcgatggt

SEQ ID NO: 5313419 - DNA, 25 bp, Homo sapien
taaagttgggactagttgatctcca

SEQ ID NO: 5313420 - DNA, 25 bp, Homo sapien
ggttgatcggctattgtaagcttca

SEQ ID NO: 5313421 - DNA, 25 bp, Homo sapien
agatttggacttaaggtcaaagttg

SEQ ID NO: 5313422 - DNA, 25 bp, Homo sapien
ggctattgtaagcttcaggtgaaac

SEQ ID NO: 5313423 - DNA, 25 bp, Homo sapien
caaagttgttgaaggttgatcggct

SEQ ID NO: 5313424 - DNA, 25 bp, Homo sapien
catgtctggacaaatatgtgcgtga

SEQ ID NO: 5313425 - DNA, 25 bp, Homo sapien
aatgttttccagcactgttagaggg

SEQ ID NO: 5313426 - DNA, 25 bp, Homo sapien
gataccctgagtttcatcatgcagt

SEQ ID NO: 5313427 - DNA, 25 bp, Homo sapien
tggttgacaccacatgaggtctgga

SEQ ID NO: 5313428 - DNA, 25 bp, Homo sapien
accgtagcaaccagaaccacaaata

SEQ ID NO: 5313429 - DNA, 25 bp, Homo sapien
attgtctgcttaaccgtagcaacca

SEQ ID NO: 5313430 - DNA, 25 bp, Homo sapien
gtctgcttaaccgtagcaaccagaa

SEQ ID NO: 5313431 - DNA, 25 bp, Homo sapien
cttaaccgtagcaaccagaaccaca

SEQ ID NO: 5313432 - DNA, 25 bp, Homo sapien
agttccctccactaatcacacttaa

SEQ ID NO: 5313433 - DNA, 25 bp, Homo sapien
ttcttcaaacattatctctgtcttc

SEQ ID NO: 5313434 - DNA, 25 bp, Homo sapien
ttaacataagccagcaatttttccc

SEQ ID NO: 5313435 - DNA, 25 bp, Homo sapien
ctttttgtatgtccaatctttgtct

SEQ ID NO: 5313436 - DNA, 25 bp, Homo sapien
cgattccccatctccagtggcttgg

SEQ ID NO: 5313437 - DNA, 25 bp, Homo sapien
ttccccatctccagtggcttggtca

SEQ ID NO: 5313438 - DNA, 25 bp, Homo sapien
ccatccccgatttccgattccccat

SEQ ID NO: 5313439 - DNA, 25 bp, Homo sapien
cccatctccagtggcttggtcataa

SEQ ID NO: 5313440 - DNA, 25 bp, Homo sapien
agatgacatatttgaattcccgaag

SEQ ID NO: 5313441 - DNA, 25 bp, Homo sapien
ggtatacaccaaattgcactttaga

SEQ ID NO: 5313442 - DNA, 25 bp, Homo sapien
gcactttagaaatataagcacctat

SEQ ID NO: 5313443 - DNA, 25 bp, Homo sapien
gacagaaaaaagtacacggttgcta

SEQ ID NO: 5313444 - DNA, 25 bp, Homo sapien
cagtgtcagtgaataaattgtagca

SEQ ID NO: 5313445 - DNA, 25 bp, Homo sapien
agtgtcagtgaataaattgtagcag

SEQ ID NO: 5313446 - DNA, 25 bp, Homo sapien
ttcagtgtcagtgaataaattgtag

SEQ ID NO: 5313447 - DNA, 25 bp, Homo sapien
atttcagtgtcagtgaataaattgt

SEQ ID NO: 5313448 - DNA, 25 bp, Homo sapien
gatatcatgtgttgagggggtgagg

SEQ ID NO: 5313449 - DNA, 25 bp, Homo sapien
ttgatatcatgtgttgagggggtga

SEQ ID NO: 5313450 - DNA, 25 bp, Homo sapien
tgatatcatgtgttgagggggtgag

SEQ ID NO: 5313451 - DNA, 25 bp, Homo sapien
ctgtaggatcggtggctctcttgtc

SEQ ID NO: 5313452 - DNA, 25 bp, Homo sapien
ggtggctctcttgtcctgccaaaag

SEQ ID NO: 5313453 - DNA, 25 bp, Homo sapien
ggccactgtgggttctaatggctag

SEQ ID NO: 5313454 - DNA, 25 bp, Homo sapien
tctaatggctagctttaaaaagcca

SEQ ID NO: 5313455 - DNA, 25 bp, Homo sapien
cttgctctgcatcggttcttcctca

SEQ ID NO: 5313456 - DNA, 25 bp, Homo sapien
ttgctctgcatcggttcttcctcat

SEQ ID NO: 5313457 - DNA, 25 bp, Homo sapien
gaatacagtctcaaatagacaaagg

SEQ ID NO: 5313458 - DNA, 25 bp, Homo sapien
tagcactgacaacatatagcacgta

SEQ ID NO: 5313459 - DNA, 25 bp, Homo sapien
aaccgttgcatcttctattccatca

SEQ ID NO: 5313460 - DNA, 25 bp, Homo sapien
ccatcatcctggaggtttagcttaa

SEQ ID NO: 5313461 - DNA, 25 bp, Homo sapien
tagatatcaaacagtaactggaagc

SEQ ID NO: 5313462 - DNA, 25 bp, Homo sapien
agtaactggaagcaacgatgagtat

SEQ ID NO: 5313463 - DNA, 25 bp, Homo sapien
cgatgagtatcagtccatactcaga

SEQ ID NO: 5313464 - DNA, 25 bp, Homo sapien
gaagcaacgatgagtatcagtccat

SEQ ID NO: 5313465 - DNA, 25 bp, Homo sapien
gcacacaccttgattggaacatgag

SEQ ID NO: 5313466 - DNA, 25 bp, Homo sapien
ggaagtcatactacagtcacagctg

SEQ ID NO: 5313467 - DNA, 25 bp, Homo sapien
gcagagtggtccactgaaggaagtc

SEQ ID NO: 5313468 - DNA, 25 bp, Homo sapien
gattggaacatgagtcctcttggca

SEQ ID NO: 5313469 - DNA, 25 bp, Homo sapien
tgcaaaacaatccaaaggaaacttg

SEQ ID NO: 5313470 - DNA, 25 bp, Homo sapien
ctgcaaaacaatccaaaggaaactt

SEQ ID NO: 5313471 - DNA, 25 bp, Homo sapien
tgcaagtcagctttcatcaatgcaa

SEQ ID NO: 5313472 - DNA, 25 bp, Homo sapien
ttgcaagtcagctttcatcaatgca

SEQ ID NO: 5313473 - DNA, 25 bp, Homo sapien
cttgcaagtcagctttcatcaatgc

SEQ ID NO: 5313474 - DNA, 25 bp, Homo sapien
gagcatgatgacaaaaatctaatac

SEQ ID NO: 5313475 - DNA, 25 bp, Homo sapien
ttatttagagcatgatgacaaaaat

SEQ ID NO: 5313476 - DNA, 25 bp, Homo sapien
tagagcatgatgacaaaaatctaat

SEQ ID NO: 5313477 - DNA, 25 bp, Homo sapien
tttagagcatgatgacaaaaatcta

SEQ ID NO: 5313478 - DNA, 25 bp, Homo sapien
acatcctctctcgatctgtccgttg

SEQ ID NO: 5313479 - DNA, 25 bp, Homo sapien
aaaagagcatcggagatgaggtccg

SEQ ID NO: 5313480 - DNA, 25 bp, Homo sapien
tgtatgtttctttagctactcctcc

SEQ ID NO: 5313481 - DNA, 25 bp, Homo sapien
tgaggtccggaagccgtccatttaa

SEQ ID NO: 5313482 - DNA, 25 bp, Homo sapien
gcaagaagatcaaagtctttgttac

SEQ ID NO: 5313483 - DNA, 25 bp, Homo sapien
ctgcaagaagatcaaagtctttgtt

SEQ ID NO: 5313484 - DNA, 25 bp, Homo sapien
tttgttacaaaagtaccatgtcatt

SEQ ID NO: 5313485 - DNA, 25 bp, Homo sapien
gaagatcaaagtctttgttacaaaa

SEQ ID NO: 5313486 - DNA, 25 bp, Homo sapien
tttttatctacttcttcaactttca

SEQ ID NO: 5313487 - DNA, 25 bp, Homo sapien
tagtcaaactttgttggcagccttt

SEQ ID NO: 5313488 - DNA, 25 bp, Homo sapien
gcagcctttccccaactctgcattt

SEQ ID NO: 5313489 - DNA, 25 bp, Homo sapien
gtcaaactttgttggcagcctttcc

SEQ ID NO: 5313490 - DNA, 25 bp, Homo sapien
ctttagtcaaactttgttggcagcc

SEQ ID NO: 5313491 - DNA, 25 bp, Homo sapien
ctgagcacctgcaggtacttgctgc

SEQ ID NO: 5313492 - DNA, 25 bp, Homo sapien
tttgagaactcagctctgagcacct

SEQ ID NO: 5313493 - DNA, 25 bp, Homo sapien
aagagctcaagccatctaatcacca

SEQ ID NO: 5313494 - DNA, 25 bp, Homo sapien
gcacaaatgtcaccaccttgaagag

SEQ ID NO: 5313495 - DNA, 25 bp, Homo sapien
ttggtgactcgatcagcacactgga

SEQ ID NO: 5313496 - DNA, 25 bp, Homo sapien
ttttgctttagctttggtgactcga

SEQ ID NO: 5313497 - DNA, 25 bp, Homo sapien
cctttcttttgacaattaccacctg

SEQ ID NO: 5313498 - DNA, 25 bp, Homo sapien
tcttttgacaattaccacctgagcc

SEQ ID NO: 5313499 - DNA, 25 bp, Homo sapien
gttgctctgacttaacatgcactta

SEQ ID NO: 5313500 - DNA, 25 bp, Homo sapien
accgtgtggtgcaaggctcgttgct

SEQ ID NO: 5313501 - DNA, 25 bp, Homo sapien
caaggctcgttgctctgacttaaca

SEQ ID NO: 5313502 - DNA, 25 bp, Homo sapien
tttccatgtgaagggagaccgtgtg

SEQ ID NO: 5313503 - DNA, 25 bp, Homo sapien
ctccggcggtgatttgcgttgtgat

SEQ ID NO: 5313504 - DNA, 25 bp, Homo sapien
tgatatcatcacgttgtgccactga

SEQ ID NO: 5313505 - DNA, 25 bp, Homo sapien
gaggtctaagttcctggctccggcg

SEQ ID NO: 5313506 - DNA, 25 bp, Homo sapien
gatgaggttagcaccatttcccaaa

SEQ ID NO: 5313507 - DNA, 25 bp, Homo sapien
taaggcaacatagctcgatttggtc

SEQ ID NO: 5313508 - DNA, 25 bp, Homo sapien
gatctgctatgatgttcctgaagcc

SEQ ID NO: 5313509 - DNA, 25 bp, Homo sapien
cattaaatgtcaagctctgcaggtg

SEQ ID NO: 5313510 - DNA, 25 bp, Homo sapien
gccaaatctggcattaagctcacag

SEQ ID NO: 5313511 - DNA, 25 bp, Homo sapien
taaaagagaagataatatatgatta

SEQ ID NO: 5313512 - DNA, 25 bp, Homo sapien
gagaagataatatatgattattttc

SEQ ID NO: 5313513 - DNA, 25 bp, Homo sapien
ctaaaagagaagataatatatgatt

SEQ ID NO: 5313514 - DNA, 25 bp, Homo sapien
gaagataatatatgattattttctg

SEQ ID NO: 5313515 - DNA, 25 bp, Homo sapien
ctgtcatggcctgttggtcatccac

SEQ ID NO: 5313516 - DNA, 25 bp, Homo sapien
cgcactgtgtgccactcgttatcat

SEQ ID NO: 5313517 - DNA, 25 bp, Homo sapien
tatcattgaggttatagccagcaaa

SEQ ID NO: 5313518 - DNA, 25 bp, Homo sapien
cacgccgaactacacgcactgtgtg

SEQ ID NO: 5313519 - DNA, 25 bp, Homo sapien
agcaaaaagagtctcgggacctttg

SEQ ID NO: 5313520 - DNA, 25 bp, Homo sapien
catgatgcatacagcctagtggaac

SEQ ID NO: 5313521 - DNA, 25 bp, Homo sapien
tatcacataacaggacagctagcag

SEQ ID NO: 5313522 - DNA, 25 bp, Homo sapien
tagcaggatggaatttggtaacccc

SEQ ID NO: 5313523 - DNA, 25 bp, Homo sapien
tcaaaaggtcaattccaagggatgc

SEQ ID NO: 5313524 - DNA, 25 bp, Homo sapien
gttcaaatgaaggctatggacaaac

SEQ ID NO: 5313525 - DNA, 25 bp, Homo sapien
tctttacataatgattgttcaaatg

SEQ ID NO: 5313526 - DNA, 25 bp, Homo sapien
tggacaaactgtacatgattattaa

SEQ ID NO: 5313527 - DNA, 25 bp, Homo sapien
gctatggacaaactgtacatgatta

SEQ ID NO: 5313528 - DNA, 25 bp, Homo sapien
gactttgtgttgtgatcattggaga

SEQ ID NO: 5313529 - DNA, 25 bp, Homo sapien
gatcattggagatttcttaatgtga

SEQ ID NO: 5313530 - DNA, 25 bp, Homo sapien
tgactttgtgttgtgatcattggag

SEQ ID NO: 5313531 - DNA, 25 bp, Homo sapien
gatttcttaatgtgatcagcaaaac

SEQ ID NO: 5313532 - DNA, 25 bp, Homo sapien
aacaactggagtctaaaaatgccac

SEQ ID NO: 5313533 - DNA, 25 bp, Homo sapien
cagtgggaaagtcttcagctgtaca

SEQ ID NO: 5313534 - DNA, 25 bp, Homo sapien
gccacttgcagtatctaaatgtcta

SEQ ID NO: 5313535 - DNA, 25 bp, Homo sapien
gactagcttacatcataatggagga

SEQ ID NO: 5313536 - DNA, 25 bp, Homo sapien
tggaattacagttaatcctgataca

SEQ ID NO: 5313537 - DNA, 25 bp, Homo sapien
gaattacagttaatcctgatacaat

SEQ ID NO: 5313538 - DNA, 25 bp, Homo sapien
ggaattacagttaatcctgatacaa

SEQ ID NO: 5313539 - DNA, 25 bp, Homo sapien
attcatccttcaaggtaatagctgc

SEQ ID NO: 5313540 - DNA, 25 bp, Homo sapien
ttataaagcccagatgttttgttat

SEQ ID NO: 5313541 - DNA, 25 bp, Homo sapien
ggccactccatatcattattcttta

SEQ ID NO: 5313542 - DNA, 25 bp, Homo sapien
cattggaaacaacaatagaaggttt

SEQ ID NO: 5313543 - DNA, 25 bp, Homo sapien
tgtaaaagtgctccgtcacaatggg

SEQ ID NO: 5313544 - DNA, 25 bp, Homo sapien
tgtttggcttagactggctgcaact

SEQ ID NO: 5313545 - DNA, 25 bp, Homo sapien
tacagtgcaggttcagctaggctca

SEQ ID NO: 5313546 - DNA, 25 bp, Homo sapien
gctcagacatcttggacctccgaaa

SEQ ID NO: 5313547 - DNA, 25 bp, Homo sapien
cagaacgtcttgtatgggtaacaca

SEQ ID NO: 5313548 - DNA, 25 bp, Homo sapien
tattcaaggcacacaagcctatgcc

SEQ ID NO: 5313549 - DNA, 25 bp, Homo sapien
tcgtcaaccgcatcagaaaagtggt

SEQ ID NO: 5313550 - DNA, 25 bp, Homo sapien
tccagtggctaaggagcagtcatta

SEQ ID NO: 5313551 - DNA, 25 bp, Homo sapien
gctttgctgttcgaaaattctcatg

SEQ ID NO: 5313552 - DNA, 25 bp, Homo sapien
cagcagctttactgcatgcaattag

SEQ ID NO: 5313553 - DNA, 25 bp, Homo sapien
ggcttgtaataacctgtcatcgtca

SEQ ID NO: 5313554 - DNA, 25 bp, Homo sapien
gtgtttccactttgactaacagcag

SEQ ID NO: 5313555 - DNA, 25 bp, Homo sapien
agtaaaggagagtgctctgtgttct

SEQ ID NO: 5313556 - DNA, 25 bp, Homo sapien
cagtaaaggagagtgctctgtgttc

SEQ ID NO: 5313557 - DNA, 25 bp, Homo sapien
gtaaaggagagtgctctgtgttctt

SEQ ID NO: 5313558 - DNA, 25 bp, Homo sapien
tagagagccctttccgtgataagac

SEQ ID NO: 5313559 - DNA, 25 bp, Homo sapien
tcatggctgtttgctaagggccgca

SEQ ID NO: 5313560 - DNA, 25 bp, Homo sapien
ttatgagttatcgttctgcccagca

SEQ ID NO: 5313561 - DNA, 25 bp, Homo sapien
gattattcaaaggagaagcccatgg

SEQ ID NO: 5313562 - DNA, 25 bp, Homo sapien
aattcagcttgaggcaacctcaggc

SEQ ID NO: 5313563 - DNA, 25 bp, Homo sapien
tctgcaaggatgtcacctacaaccg

SEQ ID NO: 5313564 - DNA, 25 bp, Homo sapien
ctcttttaagaaccctcagtggtag

SEQ ID NO: 5313565 - DNA, 25 bp, Homo sapien
cctacaaccgatccaaatgtcagtg

SEQ ID NO: 5313566 - DNA, 25 bp, Homo sapien
tcaatgtttgcaggcaaattgaaca

SEQ ID NO: 5313567 - DNA, 25 bp, Homo sapien
tttgcaggcaaattgaacaaaaagt

SEQ ID NO: 5313568 - DNA, 25 bp, Homo sapien
ttgatcaatgtttgcaggcaaattg

SEQ ID NO: 5313569 - DNA, 25 bp, Homo sapien
agtgttagttcaatgggggaaggca

SEQ ID NO: 5313570 - DNA, 25 bp, Homo sapien
tcctgcgtctagctccaggcggagg

SEQ ID NO: 5313571 - DNA, 25 bp, Homo sapien
agattgaccgtcagtttcacacgtc

SEQ ID NO: 5313572 - DNA, 25 bp, Homo sapien
catcagaatgccatatgcacgctgg

SEQ ID NO: 5313573 - DNA, 25 bp, Homo sapien
tgcacgctgggatcggaaccgtaag

SEQ ID NO: 5313574 - DNA, 25 bp, Homo sapien
ccatcatagctcaaaaccgttgcct

SEQ ID NO: 5313575 - DNA, 25 bp, Homo sapien
ttcataaacatgctcccatcatagc

SEQ ID NO: 5313576 - DNA, 25 bp, Homo sapien
gactacggggagctgaattttcata

SEQ ID NO: 5313577 - DNA, 25 bp, Homo sapien
tgctcccatcatagctcaaaaccgt

SEQ ID NO: 5313578 - DNA, 25 bp, Homo sapien
cagacagggagccaaattatattgc

SEQ ID NO: 5313579 - DNA, 25 bp, Homo sapien
gttgcagtctaaagtgtacacctgt

SEQ ID NO: 5313580 - DNA, 25 bp, Homo sapien
cacagggttgtagtctagagttgcc

SEQ ID NO: 5313581 - DNA, 25 bp, Homo sapien
tacacctgtgctcagttttgccgaa

SEQ ID NO: 5313582 - DNA, 25 bp, Homo sapien
tcagggagttggctgctggggtttt

SEQ ID NO: 5313583 - DNA, 25 bp, Homo sapien
cagggagttggctgctggggtttta

SEQ ID NO: 5313584 - DNA, 25 bp, Homo sapien
gacctgccaagatagcctgttccgg

SEQ ID NO: 5313585 - DNA, 25 bp, Homo sapien
tgaacaaatccctgatgcagcccac

SEQ ID NO: 5313586 - DNA, 25 bp, Homo sapien
tccggaacaatcacagacatatctg

SEQ ID NO: 5313587 - DNA, 25 bp, Homo sapien
ctttgaacttcagccatttgccgga

SEQ ID NO: 5313588 - DNA, 25 bp, Homo sapien
gttgagggtgggaccagagaagagg

SEQ ID NO: 5313589 - DNA, 25 bp, Homo sapien
tgttgagggtgggaccagagaagag

SEQ ID NO: 5313590 - DNA, 25 bp, Homo sapien
gtgttgagggtgggaccagagaaga

SEQ ID NO: 5313591 - DNA, 25 bp, Homo sapien
tttactttagtatggccaacagcag

SEQ ID NO: 5313592 - DNA, 25 bp, Homo sapien
gaattgctcttaggcgtgggttccc

SEQ ID NO: 5313593 - DNA, 25 bp, Homo sapien
tctgtatgtcagaaaggagcccatg

SEQ ID NO: 5313594 - DNA, 25 bp, Homo sapien
tgaacaactgctatacccaggaatg

SEQ ID NO: 5313595 - DNA, 25 bp, Homo sapien
gattgggtctaaagttgcaacattc

SEQ ID NO: 5313596 - DNA, 25 bp, Homo sapien
tcaaaggtgattgggtctaaagttg

SEQ ID NO: 5313597 - DNA, 25 bp, Homo sapien
ggtctaaagttgcaacattctcaca

SEQ ID NO: 5313598 - DNA, 25 bp, Homo sapien
tgtacggaaatcaaatgatatggag

SEQ ID NO: 5313599 - DNA, 25 bp, Homo sapien
tggcaagtcgagataattccagcct

SEQ ID NO: 5313600 - DNA, 25 bp, Homo sapien
gatctccttgcttggcaagtcgaga

SEQ ID NO: 5313601 - DNA, 25 bp, Homo sapien
ttgcttggcaagtcgagataattcc

SEQ ID NO: 5313602 - DNA, 25 bp, Homo sapien
cttaggatctccttgcttggcaagt

SEQ ID NO: 5313603 - DNA, 25 bp, Homo sapien
tcactgacagggttcacggtatcat

SEQ ID NO: 5313604 - DNA, 25 bp, Homo sapien
tgacagggttcacggtatcatacat

SEQ ID NO: 5313605 - DNA, 25 bp, Homo sapien
cactgacagggttcacggtatcata

SEQ ID NO: 5313606 - DNA, 25 bp, Homo sapien
gatggtcctaaggctttttggattc

SEQ ID NO: 5313607 - DNA, 25 bp, Homo sapien
gattgctgagaaaattcaactaact

SEQ ID NO: 5313608 - DNA, 25 bp, Homo sapien
tggattgctgagaaaattcaactaa

SEQ ID NO: 5313609 - DNA, 25 bp, Homo sapien
atttttggattgctgagaaaattca

SEQ ID NO: 5313610 - DNA, 25 bp, Homo sapien
tttggattgctgagaaaattcaact

SEQ ID NO: 5313611 - DNA, 25 bp, Homo sapien
gatgtataccccagttaccttcatg

SEQ ID NO: 5313612 - DNA, 25 bp, Homo sapien
gtgtccaccaacagacaaatcaata

SEQ ID NO: 5313613 - DNA, 25 bp, Homo sapien
tgaattcatagagactaaaaggatg

SEQ ID NO: 5313614 - DNA, 25 bp, Homo sapien
tcacaacagtgtgactgtagtcaac

SEQ ID NO: 5313615 - DNA, 25 bp, Homo sapien
taatatagtaatgccagcggccagg

SEQ ID NO: 5313616 - DNA, 25 bp, Homo sapien
ataatatagtaatgccagcggccag

SEQ ID NO: 5313617 - DNA, 25 bp, Homo sapien
ggatcaaagaaggtggtatcaaggt

SEQ ID NO: 5313618 - DNA, 25 bp, Homo sapien
tatcaaggttgtggtctgttaataa

SEQ ID NO: 5313619 - DNA, 25 bp, Homo sapien
ttcttccagcaacagtccttctctc

SEQ ID NO: 5313620 - DNA, 25 bp, Homo sapien
tctctctttttgctcatggccaact

SEQ ID NO: 5313621 - DNA, 25 bp, Homo sapien
tctctttttgctcatggccaacttt

SEQ ID NO: 5313622 - DNA, 25 bp, Homo sapien
tctctctctttttgctcatggccaa

SEQ ID NO: 5313623 - DNA, 25 bp, Homo sapien
tcacagtgcggtataacctctgctc

SEQ ID NO: 5313624 - DNA, 25 bp, Homo sapien
gatcacagtgcggtataacctctgc

SEQ ID NO: 5313625 - DNA, 25 bp, Homo sapien
agtgcggtataacctctgctcctgg

SEQ ID NO: 5313626 - DNA, 25 bp, Homo sapien
gcacgatcacagtgcggtataacct

SEQ ID NO: 5313627 - DNA, 25 bp, Homo sapien
gcttagcatgtgtgatcataggacc

SEQ ID NO: 5313628 - DNA, 25 bp, Homo sapien
gaaagcatgttttgaatctcatcca

SEQ ID NO: 5313629 - DNA, 25 bp, Homo sapien
tattctttaatggactccagccctg

SEQ ID NO: 5313630 - DNA, 25 bp, Homo sapien
tcataggaccaactacagggatggc

SEQ ID NO: 5313631 - DNA, 25 bp, Homo sapien
caaagccgttggctggctcagaaag

SEQ ID NO: 5313632 - DNA, 25 bp, Homo sapien
taatctgattcttggatgctttgcc

SEQ ID NO: 5313633 - DNA, 25 bp, Homo sapien
gattcttggatgctttgcccaactt

SEQ ID NO: 5313634 - DNA, 25 bp, Homo sapien
gaatgctgagctctagcatcaaagc

SEQ ID NO: 5313635 - DNA, 25 bp, Homo sapien
gttcagtgccatactacttttctca

SEQ ID NO: 5313636 - DNA, 25 bp, Homo sapien
agtgccatactacttttctcaaatg

SEQ ID NO: 5313637 - DNA, 25 bp, Homo sapien
ttcgttcagtgccatactacttttc

SEQ ID NO: 5313638 - DNA, 25 bp, Homo sapien
ttttcgttcagtgccatactacttt

SEQ ID NO: 5313639 - DNA, 25 bp, Homo sapien
gataggtcagtgactacagaaacac

SEQ ID NO: 5313640 - DNA, 25 bp, Homo sapien
cataataattgcaggaacaggttct

SEQ ID NO: 5313641 - DNA, 25 bp, Homo sapien
aataagcatttcagagcatttcggg

SEQ ID NO: 5313642 - DNA, 25 bp, Homo sapien
taaaatatatctagtgagcacctga

SEQ ID NO: 5313643 - DNA, 25 bp, Homo sapien
tatgagattataggttgtttcaata

SEQ ID NO: 5313644 - DNA, 25 bp, Homo sapien
catatagggaaagacctaagttgct

SEQ ID NO: 5313645 - DNA, 25 bp, Homo sapien
ggttagttgttctacgtgcaagcaa

SEQ ID NO: 5313646 - DNA, 25 bp, Homo sapien
ctaaggaatatgagattataggttg

SEQ ID NO: 5313647 - DNA, 25 bp, Homo sapien
tgcagtgtgctatcgaccaggaagt

SEQ ID NO: 5313648 - DNA, 25 bp, Homo sapien
tcttccatgacttcagacaaggtgt

SEQ ID NO: 5313649 - DNA, 25 bp, Homo sapien
taagaggcactacatactagactga

SEQ ID NO: 5313650 - DNA, 25 bp, Homo sapien
caggaagtccaagctagagttcagg

SEQ ID NO: 5313651 - DNA, 25 bp, Homo sapien
ccatttagctcaactttagacccag

SEQ ID NO: 5313652 - DNA, 25 bp, Homo sapien
taatgatctatgagctgtttccctc

SEQ ID NO: 5313653 - DNA, 25 bp, Homo sapien
agtcgttgcttctcctataggctaa

SEQ ID NO: 5313654 - DNA, 25 bp, Homo sapien
cacaactacagctgataatgaggga

SEQ ID NO: 5313655 - DNA, 25 bp, Homo sapien
ctacataaacaatagtagaatattg

SEQ ID NO: 5313656 - DNA, 25 bp, Homo sapien
tgtgccgtttgactctggaacatcg

SEQ ID NO: 5313657 - DNA, 25 bp, Homo sapien
cgtttgactctggaacatcgggtct

SEQ ID NO: 5313658 - DNA, 25 bp, Homo sapien
actctggaacatcgggtcttcagca

SEQ ID NO: 5313659 - DNA, 25 bp, Homo sapien
taaagttgtgccgtttgactctgga

SEQ ID NO: 5313660 - DNA, 25 bp, Homo sapien
ctgaaatgatgagaccatgaattag

SEQ ID NO: 5313661 - DNA, 25 bp, Homo sapien
gaaatgatgagaccatgaattagga

SEQ ID NO: 5313662 - DNA, 25 bp, Homo sapien
atgattctgatggcaacgatattta

SEQ ID NO: 5313663 - DNA, 25 bp, Homo sapien
tgattctgatggcaacgatatttac

SEQ ID NO: 5313664 - DNA, 25 bp, Homo sapien
tttgagacagcccataaagttgtta

SEQ ID NO: 5313665 - DNA, 25 bp, Homo sapien
gacagcccataaagttgttactgac

SEQ ID NO: 5313666 - DNA, 25 bp, Homo sapien
gagacagcccataaagttgttactg

SEQ ID NO: 5313667 - DNA, 25 bp, Homo sapien
ctctttgagacagcccataaagttg

SEQ ID NO: 5313668 - DNA, 25 bp, Homo sapien
tgcctccaacatagaaaaagtcatc

SEQ ID NO: 5313669 - DNA, 25 bp, Homo sapien
tggtaagaatcccatccactgatat

SEQ ID NO: 5313670 - DNA, 25 bp, Homo sapien
gaccccagcatggtataatcttctt

SEQ ID NO: 5313671 - DNA, 25 bp, Homo sapien
cgtgtagcccgttgtggtaagaatc

SEQ ID NO: 5313672 - DNA, 25 bp, Homo sapien
ggcaaaacaaccagtagaagcggca

SEQ ID NO: 5313673 - DNA, 25 bp, Homo sapien
taaaaggcgcaagctatttccagca

SEQ ID NO: 5313674 - DNA, 25 bp, Homo sapien
tgttcagcatgcaagtgcctaagtc

SEQ ID NO: 5313675 - DNA, 25 bp, Homo sapien
tgcctaagtccatgccaaagggaga

SEQ ID NO: 5313676 - DNA, 25 bp, Homo sapien
caaccgcagttcctcttttgttaat

SEQ ID NO: 5313677 - DNA, 25 bp, Homo sapien
ccgcagttcctcttttgttaatgat

SEQ ID NO: 5313678 - DNA, 25 bp, Homo sapien
accgcagttcctcttttgttaatga

SEQ ID NO: 5313679 - DNA, 25 bp, Homo sapien
gcagttcctcttttgttaatgatgt

SEQ ID NO: 5313680 - DNA, 25 bp, Homo sapien
aatgggcacctagaagattaactgg

SEQ ID NO: 5313681 - DNA, 25 bp, Homo sapien
tgtgacttaatgaccccaatgtgca

SEQ ID NO: 5313682 - DNA, 25 bp, Homo sapien
gggatatccttgcagcccttttgga

SEQ ID NO: 5313683 - DNA, 25 bp, Homo sapien
tagatatgcccctgctcaagtatgg

SEQ ID NO: 5313684 - DNA, 25 bp, Homo sapien
aattaatgaccagagagacagctcc

SEQ ID NO: 5313685 - DNA, 25 bp, Homo sapien
caggctccactagtgcttcaaaggc

SEQ ID NO: 5313686 - DNA, 25 bp, Homo sapien
tttcccagtgtgaagcatcagtcca

SEQ ID NO: 5313687 - DNA, 25 bp, Homo sapien
gacaagtcgtagcagaagtattcag

SEQ ID NO: 5313688 - DNA, 25 bp, Homo sapien
caatggattccaagatgttttcaac

SEQ ID NO: 5313689 - DNA, 25 bp, Homo sapien
tggattactgatctattccctggtg

SEQ ID NO: 5313690 - DNA, 25 bp, Homo sapien
gtaaacagacctcctacagagcatg

SEQ ID NO: 5313691 - DNA, 25 bp, Homo sapien
gatagaatctggtctgggagtaaac

SEQ ID NO: 5313692 - DNA, 25 bp, Homo sapien
cctacaaattttagagaagactatc

SEQ ID NO: 5313693 - DNA, 25 bp, Homo sapien
acaaataagcaacccctggaggatt

SEQ ID NO: 5313694 - DNA, 25 bp, Homo sapien
taccctgattatgttaggtaactga

SEQ ID NO: 5313695 - DNA, 25 bp, Homo sapien
tcctaggatcttcatgtggaaaaaa

SEQ ID NO: 5313696 - DNA, 25 bp, Homo sapien
ttctatggaatatctgtgcaacagg

SEQ ID NO: 5313697 - DNA, 25 bp, Homo sapien
gatcctcttgaataattacccgctg

SEQ ID NO: 5313698 - DNA, 25 bp, Homo sapien
caagcattatattgtttgagagggc

SEQ ID NO: 5313699 - DNA, 25 bp, Homo sapien
gaggaagaaggacagactatgcctg

SEQ ID NO: 5313700 - DNA, 25 bp, Homo sapien
aaaccatattgggatctacagagac

SEQ ID NO: 5313701 - DNA, 25 bp, Homo sapien
tacagagactcaatcgccaacaacg

SEQ ID NO: 5313702 - DNA, 25 bp, Homo sapien
tcaagccaaagaactgtcaaaccat

SEQ ID NO: 5313703 - DNA, 25 bp, Homo sapien
gacataaggcaaaacctcccacaga

SEQ ID NO: 5313704 - DNA, 25 bp, Homo sapien
atttgcttccagaagtcatgaaagt

SEQ ID NO: 5313705 - DNA, 25 bp, Homo sapien
tctgtactaggacatttgcttccag

SEQ ID NO: 5313706 - DNA, 25 bp, Homo sapien
tgtactaggacatttgcttccagaa

SEQ ID NO: 5313707 - DNA, 25 bp, Homo sapien
ctgagtctgtactaggacatttgct

SEQ ID NO: 5313708 - DNA, 25 bp, Homo sapien
gagagctggctctacaatctccata

SEQ ID NO: 5313709 - DNA, 25 bp, Homo sapien
gatccatatgtagcccaagtttgaa

SEQ ID NO: 5313710 - DNA, 25 bp, Homo sapien
tggctacactagtaaaggtgcttcc

SEQ ID NO: 5313711 - DNA, 25 bp, Homo sapien
tttagagttgtataagcttcctgag

SEQ ID NO: 5313712 - DNA, 25 bp, Homo sapien
tactgggcaagtaaagctatgttgt

SEQ ID NO: 5313713 - DNA, 25 bp, Homo sapien
actgctgcatcaaatctgaactctg

SEQ ID NO: 5313714 - DNA, 25 bp, Homo sapien
taaatgggatgagcaaaggaaattc

SEQ ID NO: 5313715 - DNA, 25 bp, Homo sapien
ggaaattcgttggttcactgctgca

SEQ ID NO: 5313716 - DNA, 25 bp, Homo sapien
gaaaatctacgcaggagaaatggga

SEQ ID NO: 5313717 - DNA, 25 bp, Homo sapien
ggaaattgagtgtagccagctggtc

SEQ ID NO: 5313718 - DNA, 25 bp, Homo sapien
taagctctgagcatgtagaaggcaa

SEQ ID NO: 5313719 - DNA, 25 bp, Homo sapien
cagattcaaacccagatgcattgtg

SEQ ID NO: 5313720 - DNA, 25 bp, Homo sapien
tcttcatatcgagatggagggcatt

SEQ ID NO: 5313721 - DNA, 25 bp, Homo sapien
cctcttcttcatatcgagatggagg

SEQ ID NO: 5313722 - DNA, 25 bp, Homo sapien
tcttcttcatatcgagatggagggc

SEQ ID NO: 5313723 - DNA, 25 bp, Homo sapien
cttcttcatatcgagatggagggca

SEQ ID NO: 5313724 - DNA, 25 bp, Homo sapien
actctttttatgtcctctctcagtg

SEQ ID NO: 5313725 - DNA, 25 bp, Homo sapien
tactcactctttttatgtcctctct

SEQ ID NO: 5313726 - DNA, 25 bp, Homo sapien
cttattattgcatactcactctttt

SEQ ID NO: 5313727 - DNA, 25 bp, Homo sapien
tattgcatactcactctttttatgt

SEQ ID NO: 5313728 - DNA, 25 bp, Homo sapien
taaacttcattctggtgtctactag

SEQ ID NO: 5313729 - DNA, 25 bp, Homo sapien
tactcagcagtagactagtagaaca

SEQ ID NO: 5313730 - DNA, 25 bp, Homo sapien
tctgccatggatccccgtcaagctt

SEQ ID NO: 5313731 - DNA, 25 bp, Homo sapien
tacaaaaactatggttactgccttc

SEQ ID NO: 5313732 - DNA, 25 bp, Homo sapien
ttccagccatagctcaatccaggca

SEQ ID NO: 5313733 - DNA, 25 bp, Homo sapien
cactgtgtgagcttccagccatagc

SEQ ID NO: 5313734 - DNA, 25 bp, Homo sapien
tcaggaacaagcctgttggtgcttt

SEQ ID NO: 5313735 - DNA, 25 bp, Homo sapien
ccaggcactcagatcaggaacaagc

SEQ ID NO: 5313736 - DNA, 25 bp, Homo sapien
gacaaggtcagtatgggcccctcct

SEQ ID NO: 5313737 - DNA, 25 bp, Homo sapien
acagggttctatgcagacatttgat

SEQ ID NO: 5313738 - DNA, 25 bp, Homo sapien
gctgatttctaacagggactgtcct

SEQ ID NO: 5313739 - DNA, 25 bp, Homo sapien
ccaagagccagcctttatgggagcc

SEQ ID NO: 5313740 - DNA, 25 bp, Homo sapien
ttttcagcaagctattagatgtcat

SEQ ID NO: 5313741 - DNA, 25 bp, Homo sapien
tttttcagcaagctattagatgtca

SEQ ID NO: 5313742 - DNA, 25 bp, Homo sapien
ctctatgcacagagaggatcttata

SEQ ID NO: 5313743 - DNA, 25 bp, Homo sapien
tgcacagagaggatcttataaacat

SEQ ID NO: 5313744 - DNA, 25 bp, Homo sapien
gaaatggacgaatttcacttacaat

SEQ ID NO: 5313745 - DNA, 25 bp, Homo sapien
caattatagttttaatctgagctgc

SEQ ID NO: 5313746 - DNA, 25 bp, Homo sapien
tacaggatgctgaagggtccaaggt

SEQ ID NO: 5313747 - DNA, 25 bp, Homo sapien
ttctcacagtacaggatgctgaagg

SEQ ID NO: 5313748 - DNA, 25 bp, Homo sapien
gactctgtcacccacttgcaggcca

SEQ ID NO: 5313749 - DNA, 25 bp, Homo sapien
gattttcagtatggagtctggcagg

SEQ ID NO: 5313750 - DNA, 25 bp, Homo sapien
tctcccctgaagttgatacaagaaa

SEQ ID NO: 5313751 - DNA, 25 bp, Homo sapien
cactcccatgcacggttgattttca

SEQ ID NO: 5313752 - DNA, 25 bp, Homo sapien
gaatatcaagctacagtccactctg

SEQ ID NO: 5313753 - DNA, 25 bp, Homo sapien
actgaaaaccttcgccagtaaatca

SEQ ID NO: 5313754 - DNA, 25 bp, Homo sapien
tacagtccactctgccgaaagcttc

SEQ ID NO: 5313755 - DNA, 25 bp, Homo sapien
ccttcgccagtaaatcacaactgtt

SEQ ID NO: 5313756 - DNA, 25 bp, Homo sapien
gactcagattagtggaaaattctcg

SEQ ID NO: 5313757 - DNA, 25 bp, Homo sapien
tagcttagaaatctcaaccccaccg

SEQ ID NO: 5313758 - DNA, 25 bp, Homo sapien
ttaagtcagtaacctctcagagtct

SEQ ID NO: 5313759 - DNA, 25 bp, Homo sapien
tcttgagaactgctccactggacat

SEQ ID NO: 5313760 - DNA, 25 bp, Homo sapien
taatgtggaaatcaaggtcgctttt

SEQ ID NO: 5313761 - DNA, 25 bp, Homo sapien
tatgcagtgaaatcgggataatgtg

SEQ ID NO: 5313762 - DNA, 25 bp, Homo sapien
tcgcttttgatggaagagaggtgac

SEQ ID NO: 5313763 - DNA, 25 bp, Homo sapien
taatctactgcatttttatgcagtg

SEQ ID NO: 5313764 - DNA, 25 bp, Homo sapien
tgtaatttagaatggattagatagc

SEQ ID NO: 5313765 - DNA, 25 bp, Homo sapien
ctcttacttgagggaatatatgtaa

SEQ ID NO: 5313766 - DNA, 25 bp, Homo sapien
tattgaagatatgtctggagtctgc

SEQ ID NO: 5313767 - DNA, 25 bp, Homo sapien
tcagaaattagtgaagtccttcctt

SEQ ID NO: 5313768 - DNA, 25 bp, Homo sapien
tgtgtctaccgttgtcatctttatg

SEQ ID NO: 5313769 - DNA, 25 bp, Homo sapien
gtgccctgtgtctaccgttgtcatc

SEQ ID NO: 5313770 - DNA, 25 bp, Homo sapien
atccatgatatatatgcaccagatt

SEQ ID NO: 5313771 - DNA, 25 bp, Homo sapien
ctctccctctaatagtgccctgtgt

SEQ ID NO: 5313772 - DNA, 25 bp, Homo sapien
tttaagaccctcttcacgtatcacc

SEQ ID NO: 5313773 - DNA, 25 bp, Homo sapien
tgttctttaagaccctcttcacgta

SEQ ID NO: 5313774 - DNA, 25 bp, Homo sapien
tctttaagaccctcttcacgtatca

SEQ ID NO: 5313775 - DNA, 25 bp, Homo sapien
ttaagaccctcttcacgtatcacct

SEQ ID NO: 5313776 - DNA, 25 bp, Homo sapien
tgaaccctggcaatagagcacacgt

SEQ ID NO: 5313777 - DNA, 25 bp, Homo sapien
catttataggcaaaagcccctgtag

SEQ ID NO: 5313778 - DNA, 25 bp, Homo sapien
tactggccgggaagacatttatagg

SEQ ID NO: 5313779 - DNA, 25 bp, Homo sapien
tattcttgttagaggccagtcatcc

SEQ ID NO: 5313780 - DNA, 25 bp, Homo sapien
catgatttatggtctgaggtgtcac

SEQ ID NO: 5313781 - DNA, 25 bp, Homo sapien
tagagctcatgtactacaacaaagc

SEQ ID NO: 5313782 - DNA, 25 bp, Homo sapien
taactccttgctattgaacacatga

SEQ ID NO: 5313783 - DNA, 25 bp, Homo sapien
aaggaggttttctatccatcagagg

SEQ ID NO: 5313784 - DNA, 25 bp, Homo sapien
ttaacatgaccatctagtgtcaaaa

SEQ ID NO: 5313785 - DNA, 25 bp, Homo sapien
gaaattaacatgaccatctagtgtc

SEQ ID NO: 5313786 - DNA, 25 bp, Homo sapien
tgggaaattaacatgaccatctagt

SEQ ID NO: 5313787 - DNA, 25 bp, Homo sapien
tcaaaaattattgccatgaggttct

SEQ ID NO: 5313788 - DNA, 25 bp, Homo sapien
tcagacacttttagcagcatcagaa

SEQ ID NO: 5313789 - DNA, 25 bp, Homo sapien
cagacacttttagcagcatcagaag

SEQ ID NO: 5313790 - DNA, 25 bp, Homo sapien
gctgccacttgcaaacctgtcagat

SEQ ID NO: 5313791 - DNA, 25 bp, Homo sapien
ctgccacttgcaaacctgtcagatt

SEQ ID NO: 5313792 - DNA, 25 bp, Homo sapien
gcaggattggctcttatcatctcag

SEQ ID NO: 5313793 - DNA, 25 bp, Homo sapien
ctccctgctcttagtttggataaag

SEQ ID NO: 5313794 - DNA, 25 bp, Homo sapien
gatgtttaatgcacagagtgagatg

SEQ ID NO: 5313795 - DNA, 25 bp, Homo sapien
gatgaaagttagcattcacttgaga

SEQ ID NO: 5313796 - DNA, 25 bp, Homo sapien
ctgtcccatggcttccgaattatga

SEQ ID NO: 5313797 - DNA, 25 bp, Homo sapien
tgaaatgtgccccattcagttcttg

SEQ ID NO: 5313798 - DNA, 25 bp, Homo sapien
gaattatgaaatgtgccccattcag

SEQ ID NO: 5313799 - DNA, 25 bp, Homo sapien
gcttccgaattatgaaatgtgcccc

SEQ ID NO: 5313800 - DNA, 25 bp, Homo sapien
tgaccggctaatccaacactgatga

SEQ ID NO: 5313801 - DNA, 25 bp, Homo sapien
tattgtctgcaaccaagataggtaa

SEQ ID NO: 5313802 - DNA, 25 bp, Homo sapien
tagaccactagaacacatggctgtt

SEQ ID NO: 5313803 - DNA, 25 bp, Homo sapien
gattccttgaaacatccctgtgact

SEQ ID NO: 5313804 - DNA, 25 bp, Homo sapien
atattaatagtttgataaggattgc

SEQ ID NO: 5313805 - DNA, 25 bp, Homo sapien
gaatctgctgattgctttagatagt

SEQ ID NO: 5313806 - DNA, 25 bp, Homo sapien
aaaagatattaatagtttgataagg

SEQ ID NO: 5313807 - DNA, 25 bp, Homo sapien
atgcctttctatttatctgtgtctt

SEQ ID NO: 5313808 - DNA, 25 bp, Homo sapien
gaagatagggagttgctgttcaatg

SEQ ID NO: 5313809 - DNA, 25 bp, Homo sapien
ttattaacaatagagtcctgcacac

SEQ ID NO: 5313810 - DNA, 25 bp, Homo sapien
tagagagtttcagtcacgcaaggtg

SEQ ID NO: 5313811 - DNA, 25 bp, Homo sapien
gagatcttccctacaacaatgttca

SEQ ID NO: 5313812 - DNA, 25 bp, Homo sapien
gttcagtgagggatcagatgactcc

SEQ ID NO: 5313813 - DNA, 25 bp, Homo sapien
gactcctaggtgtatttcgcttgaa

SEQ ID NO: 5313814 - DNA, 25 bp, Homo sapien
tcttgctactagatgatggtggcct

SEQ ID NO: 5313815 - DNA, 25 bp, Homo sapien
tatctattgagaagaaacttcggca

SEQ ID NO: 5313816 - DNA, 25 bp, Homo sapien
tttcactttactactggggattcca

SEQ ID NO: 5313817 - DNA, 25 bp, Homo sapien
agccatcgtctgtgctggagagcct

SEQ ID NO: 5313818 - DNA, 25 bp, Homo sapien
gtagccatcgtctgtgctggagagc

SEQ ID NO: 5313819 - DNA, 25 bp, Homo sapien
gagggagcctataataatgagaaag

SEQ ID NO: 5313820 - DNA, 25 bp, Homo sapien
ccagagctcgcccacggttggcagc

SEQ ID NO: 5313821 - DNA, 25 bp, Homo sapien
acacccagagctcgcccacggttgg

SEQ ID NO: 5313822 - DNA, 25 bp, Homo sapien
acccagagctcgcccacggttggca

SEQ ID NO: 5313823 - DNA, 25 bp, Homo sapien
agagctcgcccacggttggcagcgc

SEQ ID NO: 5313824 - DNA, 25 bp, Homo sapien
tatctgcctacgtgaaaagagcctt

SEQ ID NO: 5313825 - DNA, 25 bp, Homo sapien
tacttgtaaggaataaggcagcctc

SEQ ID NO: 5313826 - DNA, 25 bp, Homo sapien
tcaggaaaggaggaatactagacac

SEQ ID NO: 5313827 - DNA, 25 bp, Homo sapien
taacttacagtctttggccctcagg

SEQ ID NO: 5313828 - DNA, 25 bp, Homo sapien
ccttggaggtggtagaaaactcgca

SEQ ID NO: 5313829 - DNA, 25 bp, Homo sapien
caaaggtgcgaggaccacttgtggc

SEQ ID NO: 5313830 - DNA, 25 bp, Homo sapien
agtataacccatgcctacacaaggg

SEQ ID NO: 5313831 - DNA, 25 bp, Homo sapien
tcctttaggccagggctcaagaaaa

SEQ ID NO: 5313832 - DNA, 25 bp, Homo sapien
aaacacccagactgcacctgttaga

SEQ ID NO: 5313833 - DNA, 25 bp, Homo sapien
tggcagaatatacaaattgcttgat

SEQ ID NO: 5313834 - DNA, 25 bp, Homo sapien
gagctccactttagagaacttgaaa

SEQ ID NO: 5313835 - DNA, 25 bp, Homo sapien
ctgtatttatggccaagagctggtc

SEQ ID NO: 5313836 - DNA, 25 bp, Homo sapien
gggacactataggacttacataaag

SEQ ID NO: 5313837 - DNA, 25 bp, Homo sapien
tgtacacaactgtaccctacagcaa

SEQ ID NO: 5313838 - DNA, 25 bp, Homo sapien
caaaacttgtttcttgggacactat

SEQ ID NO: 5313839 - DNA, 25 bp, Homo sapien
gattactcactgttagtagcagaat

SEQ ID NO: 5313840 - DNA, 25 bp, Homo sapien
ctcaacaatgtatcaatcaaagctg

SEQ ID NO: 5313841 - DNA, 25 bp, Homo sapien
aacttttgacgaaagcagcttacct

SEQ ID NO: 5313842 - DNA, 25 bp, Homo sapien
tgctttttgctaaacacatgtgtgc

SEQ ID NO: 5313843 - DNA, 25 bp, Homo sapien
ctgagactcctatcttatcattaga

SEQ ID NO: 5313844 - DNA, 25 bp, Homo sapien
taaatcacccaagtatcactcaacg

SEQ ID NO: 5313845 - DNA, 25 bp, Homo sapien
gggcttatactctgcagagacaaac

SEQ ID NO: 5313846 - DNA, 25 bp, Homo sapien
gaagagagccaaaaacatcccagct

SEQ ID NO: 5313847 - DNA, 25 bp, Homo sapien
gtaagatactgtcccaggcatttgg

SEQ ID NO: 5313848 - DNA, 25 bp, Homo sapien
atctacttggacatacaataatgta

SEQ ID NO: 5313849 - DNA, 25 bp, Homo sapien
gacgcactgataagtcatctacttg

SEQ ID NO: 5313850 - DNA, 25 bp, Homo sapien
tcagcacaggttctatggcttagga

SEQ ID NO: 5313851 - DNA, 25 bp, Homo sapien
acagccggctgtggacctggacgca

SEQ ID NO: 5313852 - DNA, 25 bp, Homo sapien
gtacaagcctccaatcaaagtgcca

SEQ ID NO: 5313853 - DNA, 25 bp, Homo sapien
cacaggcatttcaacagtaagggtc

SEQ ID NO: 5313854 - DNA, 25 bp, Homo sapien
cactatggcctatgagaagaatgag

SEQ ID NO: 5313855 - DNA, 25 bp, Homo sapien
gatattataaggtgaaactccggtc

SEQ ID NO: 5313856 - DNA, 25 bp, Homo sapien
agtttccaaaccctgagttgttatg

SEQ ID NO: 5313857 - DNA, 25 bp, Homo sapien
tctccagctgacttcgccatttttg

SEQ ID NO: 5313858 - DNA, 25 bp, Homo sapien
tgtacacatgataagggattttgca

SEQ ID NO: 5313859 - DNA, 25 bp, Homo sapien
ttttgtcatgtacacatgataaggg

SEQ ID NO: 5313860 - DNA, 25 bp, Homo sapien
gatattcacataagacagacttgga

SEQ ID NO: 5313861 - DNA, 25 bp, Homo sapien
aaccccgattttatgcacaactagg

SEQ ID NO: 5313862 - DNA, 25 bp, Homo sapien
ctgtaaggacacatcacaaagtgag

SEQ ID NO: 5313863 - DNA, 25 bp, Homo sapien
gagaccagtgcttacctcgagagaa

SEQ ID NO: 5313864 - DNA, 25 bp, Homo sapien
caagcaatgcgggaatgcatagcta

SEQ ID NO: 5313865 - DNA, 25 bp, Homo sapien
gaatgcatagctagttgataatgcc

SEQ ID NO: 5313866 - DNA, 25 bp, Homo sapien
gcgggaatgcatagctagttgataa

SEQ ID NO: 5313867 - DNA, 25 bp, Homo sapien
caatgcgggaatgcatagctagttg

SEQ ID NO: 5313868 - DNA, 25 bp, Homo sapien
catataatttgcaagcatttgccca

SEQ ID NO: 5313869 - DNA, 25 bp, Homo sapien
tttgcagtgatggtttgaaagcagc

SEQ ID NO: 5313870 - DNA, 25 bp, Homo sapien
cttggtcgcccatcatcaggtgcgc

SEQ ID NO: 5313871 - DNA, 25 bp, Homo sapien
tggtcgcccatcatcaggtgcgcca

SEQ ID NO: 5313872 - DNA, 25 bp, Homo sapien
tcgcccatcatcaggtgcgccagac

SEQ ID NO: 5313873 - DNA, 25 bp, Homo sapien
gtcgcccatcatcaggtgcgccaga

SEQ ID NO: 5313874 - DNA, 25 bp, Homo sapien
tctaacttcaagatgtaccctatta

SEQ ID NO: 5313875 - DNA, 25 bp, Homo sapien
aacttcaagatgtaccctattagta

SEQ ID NO: 5313876 - DNA, 25 bp, Homo sapien
catctaacttcaagatgtaccctat

SEQ ID NO: 5313877 - DNA, 25 bp, Homo sapien
taacttcaagatgtaccctattagt

SEQ ID NO: 5313878 - DNA, 25 bp, Homo sapien
gcagcatgcagactggaccttgcct

SEQ ID NO: 5313879 - DNA, 25 bp, Homo sapien
aacattcattaagcagcatgcagac

SEQ ID NO: 5313880 - DNA, 25 bp, Homo sapien
gtcttcctcatgcaaggcaccaaac

SEQ ID NO: 5313881 - DNA, 25 bp, Homo sapien
caaacacatcatgcaagtgctccat

SEQ ID NO: 5313882 - DNA, 25 bp, Homo sapien
ctgtgccctgggaaatatcccacag

SEQ ID NO: 5313883 - DNA, 25 bp, Homo sapien
atatcccacaggccttgtagatctt

SEQ ID NO: 5313884 - DNA, 25 bp, Homo sapien
gaagcaatcatcccaataagaattc

SEQ ID NO: 5313885 - DNA, 25 bp, Homo sapien
aaatatcccacaggccttgtagatc

SEQ ID NO: 5313886 - DNA, 25 bp, Homo sapien
tcttactgggcagggaatagctaag

SEQ ID NO: 5313887 - DNA, 25 bp, Homo sapien
ttagcagtctagcataatccctgac

SEQ ID NO: 5313888 - DNA, 25 bp, Homo sapien
cttttcccatgcacggcaatggaga

SEQ ID NO: 5313889 - DNA, 25 bp, Homo sapien
taactgcatagttcatgactttcct

SEQ ID NO: 5313890 - DNA, 25 bp, Homo sapien
aaattctatcttttctcacacatac

SEQ ID NO: 5313891 - DNA, 25 bp, Homo sapien
acattatttatagaattggaccaga

SEQ ID NO: 5313892 - DNA, 25 bp, Homo sapien
caggatgctgctgcctattaagatt

SEQ ID NO: 5313893 - DNA, 25 bp, Homo sapien
tgaggaagacaccagcattgacata

SEQ ID NO: 5313894 - DNA, 25 bp, Homo sapien
gaatgaggaagacaccagcattgac

SEQ ID NO: 5313895 - DNA, 25 bp, Homo sapien
ggaagacaccagcattgacatacat

SEQ ID NO: 5313896 - DNA, 25 bp, Homo sapien
tgaatgaggaagacaccagcattga

SEQ ID NO: 5313897 - DNA, 25 bp, Homo sapien
tgcagaaccattagctaaacaaatc

SEQ ID NO: 5313898 - DNA, 25 bp, Homo sapien
tcatctgtcccaaatgcagaaccat

SEQ ID NO: 5313899 - DNA, 25 bp, Homo sapien
tcagaccgactctctcaaagacact

SEQ ID NO: 5313900 - DNA, 25 bp, Homo sapien
gctaaacaaatcagaccgactctct

SEQ ID NO: 5313901 - DNA, 25 bp, Homo sapien
cactaggtgcacaaaggaacaattc

SEQ ID NO: 5313902 - DNA, 25 bp, Homo sapien
ggaaaagtgaatacaccacctctgt

SEQ ID NO: 5313903 - DNA, 25 bp, Homo sapien
gaagtactcgggaactgtaaccatg

SEQ ID NO: 5313904 - DNA, 25 bp, Homo sapien
agtactcgggaactgtaaccctgtg

SEQ ID NO: 5313905 - DNA, 25 bp, Homo sapien
ggattattctcagtattgcagcatg

SEQ ID NO: 5313906 - DNA, 25 bp, Homo sapien
tataccaagaccacatatgcctcag

SEQ ID NO: 5313907 - DNA, 25 bp, Homo sapien
tgaaagtaatgtaagtgggtccacc

SEQ ID NO: 5313908 - DNA, 25 bp, Homo sapien
tgagcatgcaaagcacatactgcct

SEQ ID NO: 5313909 - DNA, 25 bp, Homo sapien
caaataccttggaaacttgccagtt

SEQ ID NO: 5313910 - DNA, 25 bp, Homo sapien
catccctattctcagcacagtatcc

SEQ ID NO: 5313911 - DNA, 25 bp, Homo sapien
gcacagtatcctccttgtttaacaa

SEQ ID NO: 5313912 - DNA, 25 bp, Homo sapien
ccctattctcagcacagtatcctcc

SEQ ID NO: 5313913 - DNA, 25 bp, Homo sapien
cagtaggaatggaggactcttttcc

SEQ ID NO: 5313914 - DNA, 25 bp, Homo sapien
tccaaaaaatcgagatagtgctatc

SEQ ID NO: 5313915 - DNA, 25 bp, Homo sapien
acataggaatggaaaaaagcaactc

SEQ ID NO: 5313916 - DNA, 25 bp, Homo sapien
aacagcaccctgaaatcttaatagt

SEQ ID NO: 5313917 - DNA, 25 bp, Homo sapien
tacagaggggaaccttagtgacaca

SEQ ID NO: 5313918 - DNA, 25 bp, Homo sapien
tcatcaggtgtagacatagacttta

SEQ ID NO: 5313919 - DNA, 25 bp, Homo sapien
tagtgacacagtttttggttctgtc

SEQ ID NO: 5313920 - DNA, 25 bp, Homo sapien
cagtttgggtttgggcctacattca

SEQ ID NO: 5313921 - DNA, 25 bp, Homo sapien
gaaagatccaactgcagtagtacct

SEQ ID NO: 5313922 - DNA, 25 bp, Homo sapien
gagctgaagtgtcgtagtgctgcac

SEQ ID NO: 5313923 - DNA, 25 bp, Homo sapien
tttcccaggtggagacctcgccatt

SEQ ID NO: 5313924 - DNA, 25 bp, Homo sapien
tgggagcatccaatagacctgggcc

SEQ ID NO: 5313925 - DNA, 25 bp, Homo sapien
tacgccttatagttttccagatgag

SEQ ID NO: 5313926 - DNA, 25 bp, Homo sapien
tgagacataatgaactgccaagctg

SEQ ID NO: 5313927 - DNA, 25 bp, Homo sapien
gaaaggtacagcaagcacaggatac

SEQ ID NO: 5313928 - DNA, 25 bp, Homo sapien
taatttcagagagaactgcattgct

SEQ ID NO: 5313929 - DNA, 25 bp, Homo sapien
gaatcacttaggctttgatctccta

SEQ ID NO: 5313930 - DNA, 25 bp, Homo sapien
tcacttaggctttgatctcctacac

SEQ ID NO: 5313931 - DNA, 25 bp, Homo sapien
cttaggctttgatctcctacaccag

SEQ ID NO: 5313932 - DNA, 25 bp, Homo sapien
taggctttgatctcctacaccagtt

SEQ ID NO: 5313933 - DNA, 25 bp, Homo sapien
aaggtgagtctgcaatacaggcagc

SEQ ID NO: 5313934 - DNA, 25 bp, Homo sapien
gagctcaaccagctcaacaacgttt

SEQ ID NO: 5313935 - DNA, 25 bp, Homo sapien
caacgtttaaggaaacatgaaactg

SEQ ID NO: 5313936 - DNA, 25 bp, Homo sapien
cagcggctgtaactcgagctcaacc

SEQ ID NO: 5313937 - DNA, 25 bp, Homo sapien
tagtgatacagattcacccaccact

SEQ ID NO: 5313938 - DNA, 25 bp, Homo sapien
gatttgcacgttaaaaggctttcag

SEQ ID NO: 5313939 - DNA, 25 bp, Homo sapien
caaatgttacttagtccaggctgct

SEQ ID NO: 5313940 - DNA, 25 bp, Homo sapien
ttcggcctaaaccagcacaattttg

SEQ ID NO: 5313941 - DNA, 25 bp, Homo sapien
gaggctgaatgtcagaccagttgca

SEQ ID NO: 5313942 - DNA, 25 bp, Homo sapien
tagcctttggaagagcattagccag

SEQ ID NO: 5313943 - DNA, 25 bp, Homo sapien
gcaagtcagacaaaggcaacaggga

SEQ ID NO: 5313944 - DNA, 25 bp, Homo sapien
gcctgatctacagacactagtgaga

SEQ ID NO: 5313945 - DNA, 25 bp, Homo sapien
gaggaacaccattacttagaagaaa

SEQ ID NO: 5313946 - DNA, 25 bp, Homo sapien
tatttccctaaggagagcccaggca

SEQ ID NO: 5313947 - DNA, 25 bp, Homo sapien
aatttccttgtctccgctggacggg

SEQ ID NO: 5313948 - DNA, 25 bp, Homo sapien
gctgggactacaatacacgtatggc

SEQ ID NO: 5313949 - DNA, 25 bp, Homo sapien
gaggcatctagtccattttctgaaa

SEQ ID NO: 5313950 - DNA, 25 bp, Homo sapien
tagacaaagtacactgcataatgcc

SEQ ID NO: 5313951 - DNA, 25 bp, Homo sapien
gctccgtggatgcaagtgtaaaata

SEQ ID NO: 5313952 - DNA, 25 bp, Homo sapien
tatggttgaactacctggtaatgcc

SEQ ID NO: 5313953 - DNA, 25 bp, Homo sapien
caagcggaataagggaaacaatgtc

SEQ ID NO: 5313954 - DNA, 25 bp, Homo sapien
tgatgcatacttctgggcataaatg

SEQ ID NO: 5313955 - DNA, 25 bp, Homo sapien
taagagaactctaccaaatctgatg

SEQ ID NO: 5313956 - DNA, 25 bp, Homo sapien
tctagtcaagaccactaaaaggtac

SEQ ID NO: 5313957 - DNA, 25 bp, Homo sapien
ctggaatttagttcttcagattcca

SEQ ID NO: 5313958 - DNA, 25 bp, Homo sapien
caggtactaatgtgtctcagagccc

SEQ ID NO: 5313959 - DNA, 25 bp, Homo sapien
taattctgcaaccagtgtagctgag

SEQ ID NO: 5313960 - DNA, 25 bp, Homo sapien
gagtatagaatgtggtcaacgacta

SEQ ID NO: 5313961 - DNA, 25 bp, Homo sapien
cagaaatattatacagtgccagttc

SEQ ID NO: 5313962 - DNA, 25 bp, Homo sapien
aacacactgaagaccgaattttatt

SEQ ID NO: 5313963 - DNA, 25 bp, Homo sapien
cagcaccggcaaaacacactgaaga

SEQ ID NO: 5313964 - DNA, 25 bp, Homo sapien
ggtcattgtcatgtaacagcaccgg

SEQ ID NO: 5313965 - DNA, 25 bp, Homo sapien
catgtaacagcaccggcaaaacaca

SEQ ID NO: 5313966 - DNA, 25 bp, Homo sapien
gagcacacacctccgttgaggcaca

SEQ ID NO: 5313967 - DNA, 25 bp, Homo sapien
cttggctgcagtccttgccgcggaa

SEQ ID NO: 5313968 - DNA, 25 bp, Homo sapien
tccttgccgcggaagccggttcgcg

SEQ ID NO: 5313969 - DNA, 25 bp, Homo sapien
cggttcgcgagcagtcgcacacggc

SEQ ID NO: 5313970 - DNA, 25 bp, Homo sapien
gcaggacctgcgaggagttgaccct

SEQ ID NO: 5313971 - DNA, 25 bp, Homo sapien
gcagaagccctcgtcgtcgaagtag

SEQ ID NO: 5313972 - DNA, 25 bp, Homo sapien
tcgttaaccggcgtgtcggccagga

SEQ ID NO: 5313973 - DNA, 25 bp, Homo sapien
aaaaggccgctgaacaccgtcatgt

SEQ ID NO: 5313974 - DNA, 25 bp, Homo sapien
gaagcgcgtccattggccctcggcg

SEQ ID NO: 5313975 - DNA, 25 bp, Homo sapien
cagaagaaaacagcccccgcgctgg

SEQ ID NO: 5313976 - DNA, 25 bp, Homo sapien
cgcgctggagcagcgccgtccccat

SEQ ID NO: 5313977 - DNA, 25 bp, Homo sapien
gctctcgcagcaggcgttccacttg

SEQ ID NO: 5313978 - DNA, 25 bp, Homo sapien
tgccggggccgacagggtcaaaatg

SEQ ID NO: 5313979 - DNA, 25 bp, Homo sapien
cagaacggagaaagggatgcttgcc

SEQ ID NO: 5313980 - DNA, 25 bp, Homo sapien
taacccgaggatagcttcaaaggcc

SEQ ID NO: 5313981 - DNA, 25 bp, Homo sapien
cccagcagttgcgaaatagccagaa

SEQ ID NO: 5313982 - DNA, 25 bp, Homo sapien
tagatgtggaaatcgcaacagctcc

SEQ ID NO: 5313983 - DNA, 25 bp, Homo sapien
tgaagcatgcatcggtcaaagcgaa

SEQ ID NO: 5313984 - DNA, 25 bp, Homo sapien
ggttattcccctcagctcgagccag

SEQ ID NO: 5313985 - DNA, 25 bp, Homo sapien
tatggataaggcgactgctgctgcc

SEQ ID NO: 5313986 - DNA, 25 bp, Homo sapien
gctcgagccagagcctgaagcatgc

SEQ ID NO: 5313987 - DNA, 25 bp, Homo sapien
aggcttgagcgtctatctccaggag

SEQ ID NO: 5313988 - DNA, 25 bp, Homo sapien
tcaggcttgagcgtctatctccagg

SEQ ID NO: 5313989 - DNA, 25 bp, Homo sapien
gagaacaggcaacggaggggagcag

SEQ ID NO: 5313990 - DNA, 25 bp, Homo sapien
gggagaacaggcaacggaggggagc

SEQ ID NO: 5313991 - DNA, 25 bp, Homo sapien
tctccgcagtaccatggagagcggc

SEQ ID NO: 5313992 - DNA, 25 bp, Homo sapien
tgagctctccgcagtaccatggaga

SEQ ID NO: 5313993 - DNA, 25 bp, Homo sapien
tggagagcggcgggcccgtcctttg

SEQ ID NO: 5313994 - DNA, 25 bp, Homo sapien
gagctgagctctccgcagtaccatg

SEQ ID NO: 5313995 - DNA, 25 bp, Homo sapien
ggctcggcccgtggtcgcagcccct

SEQ ID NO: 5313996 - DNA, 25 bp, Homo sapien
gaggtgcttttacctttgcatcgtc

SEQ ID NO: 5313997 - DNA, 25 bp, Homo sapien
atgctgcggagcgaggtgcttttac

SEQ ID NO: 5313998 - DNA, 25 bp, Homo sapien
tacctttgcatcgtccccttgcagg

SEQ ID NO: 5313999 - DNA, 25 bp, Homo sapien
gggaccttccgcaagcgcttctaac

SEQ ID NO: 5314000 - DNA, 25 bp, Homo sapien
gcaagcgcttctaacttgtcaccac

SEQ ID NO: 5314001 - DNA, 25 bp, Homo sapien
ggcggggaccttccgcaagcgcttc

SEQ ID NO: 5314002 - DNA, 25 bp, Homo sapien
tctcttccccatcggaaagaaagaa

SEQ ID NO: 5314003 - DNA, 25 bp, Homo sapien
gcaaactcataatcatgggtggtta

SEQ ID NO: 5314004 - DNA, 25 bp, Homo sapien
ccactactaccacaatactgtgcag

SEQ ID NO: 5314005 - DNA, 25 bp, Homo sapien
ctgaaatgttatgtaaaatcttctg

SEQ ID NO: 5314006 - DNA, 25 bp, Homo sapien
ggcacacagcctaccagtttgttcc

SEQ ID NO: 5314007 - DNA, 25 bp, Homo sapien
gattctaacctagtcaatttattca

SEQ ID NO: 5314008 - DNA, 25 bp, Homo sapien
attcagttatttaaaccagtggttg

SEQ ID NO: 5314009 - DNA, 25 bp, Homo sapien
ttctattgattctaacctagtcaat

SEQ ID NO: 5314010 - DNA, 25 bp, Homo sapien
atttatctaacttactaattttctg

SEQ ID NO: 5314011 - DNA, 25 bp, Homo sapien
agtttatcttcgaggaattcagaca

SEQ ID NO: 5314012 - DNA, 25 bp, Homo sapien
gatgacacaaaagtccatgatgaag

SEQ ID NO: 5314013 - DNA, 25 bp, Homo sapien
tatcttcgaggaattcagacacaat

SEQ ID NO: 5314014 - DNA, 25 bp, Homo sapien
ttcgaggaattcagacacaatcatt

SEQ ID NO: 5314015 - DNA, 25 bp, Homo sapien
ctagaccactgggtccctgatctct

SEQ ID NO: 5314016 - DNA, 25 bp, Homo sapien
tttctagaccactgggtccctgatc

SEQ ID NO: 5314017 - DNA, 25 bp, Homo sapien
agaccactgggtccctgatctctag

SEQ ID NO: 5314018 - DNA, 25 bp, Homo sapien
ttctagaccactgggtccctgatct

SEQ ID NO: 5314019 - DNA, 25 bp, Homo sapien
agacactgaagtatgggtcaaagtc

SEQ ID NO: 5314020 - DNA, 25 bp, Homo sapien
ggcttggaggaagacactgaagtat

SEQ ID NO: 5314021 - DNA, 25 bp, Homo sapien
gaagacactgaagtatgggtcaaag

SEQ ID NO: 5314022 - DNA, 25 bp, Homo sapien
gaggaagacactgaagtatgggtca

SEQ ID NO: 5314023 - DNA, 25 bp, Homo sapien
ggagcagaacacagagcaccacttt

SEQ ID NO: 5314024 - DNA, 25 bp, Homo sapien
gagcagaacacagagcaccactttt

SEQ ID NO: 5314025 - DNA, 25 bp, Homo sapien
gaacacagagcaccacttttccatt

SEQ ID NO: 5314026 - DNA, 25 bp, Homo sapien
cacagagcaccacttttccatttac

SEQ ID NO: 5314027 - DNA, 25 bp, Homo sapien
ttgtcagtgaatggagagcatcagt

SEQ ID NO: 5314028 - DNA, 25 bp, Homo sapien
tgtcagtgaatggagagcatcagtg

SEQ ID NO: 5314029 - DNA, 25 bp, Homo sapien
tcttgtcagtgaatggagagcatca

SEQ ID NO: 5314030 - DNA, 25 bp, Homo sapien
cttgtcagtgaatggagagcatcag

SEQ ID NO: 5314031 - DNA, 25 bp, Homo sapien
tggattcttaaaatagcatacccag

SEQ ID NO: 5314032 - DNA, 25 bp, Homo sapien
tagcatacccagtggtgaaaaccat

SEQ ID NO: 5314033 - DNA, 25 bp, Homo sapien
ccagtggtgaaaaccatgacctcat

SEQ ID NO: 5314034 - DNA, 25 bp, Homo sapien
gatagagccacatgaaatggattct

SEQ ID NO: 5314035 - DNA, 25 bp, Homo sapien
ctgaagcatcatctcggttgttgat

SEQ ID NO: 5314036 - DNA, 25 bp, Homo sapien
cggttgttgatgaatttgcttgcag

SEQ ID NO: 5314037 - DNA, 25 bp, Homo sapien
tctcggttgttgatgaatttgcttg

SEQ ID NO: 5314038 - DNA, 25 bp, Homo sapien
gttgttgatgaatttgcttgcagtc

SEQ ID NO: 5314039 - DNA, 25 bp, Homo sapien
tatcagtgcaacaatgcctctctcc

SEQ ID NO: 5314040 - DNA, 25 bp, Homo sapien
ctcctctaggcaccctgtgagttgg

SEQ ID NO: 5314041 - DNA, 25 bp, Homo sapien
ctatcagtgcaacaatgcctctctc

SEQ ID NO: 5314042 - DNA, 25 bp, Homo sapien
tcagtgcaacaatgcctctctcctc

SEQ ID NO: 5314043 - DNA, 25 bp, Homo sapien
tgtcttctccccgatcttagctttg

SEQ ID NO: 5314044 - DNA, 25 bp, Homo sapien
ccccgatcttagctttgtaattatt

SEQ ID NO: 5314045 - DNA, 25 bp, Homo sapien
tcttctccccgatcttagctttgta

SEQ ID NO: 5314046 - DNA, 25 bp, Homo sapien
ttctccccgatcttagctttgtaat

SEQ ID NO: 5314047 - DNA, 25 bp, Homo sapien
tctgctccaattaaaccagttgttc

SEQ ID NO: 5314048 - DNA, 25 bp, Homo sapien
tgctccaattaaaccagttgttcat

SEQ ID NO: 5314049 - DNA, 25 bp, Homo sapien
ctgctccaattaaaccagttgttca

SEQ ID NO: 5314050 - DNA, 25 bp, Homo sapien
caacatgtggttatgagacttgtcc

SEQ ID NO: 5314051 - DNA, 25 bp, Homo sapien
ggatgcctcgagacagtaagaatgc

SEQ ID NO: 5314052 - DNA, 25 bp, Homo sapien
gcaccagaaacgaagatgaggagct

SEQ ID NO: 5314053 - DNA, 25 bp, Homo sapien
tccttaagtcgcttggtgcctcagc

SEQ ID NO: 5314054 - DNA, 25 bp, Homo sapien
tatctgggccaagtgtctcctactg

SEQ ID NO: 5314055 - DNA, 25 bp, Homo sapien
cttaaaggctgagtaaggaacccat

SEQ ID NO: 5314056 - DNA, 25 bp, Homo sapien
ttcttcagatggtggtagcagtgtg

SEQ ID NO: 5314057 - DNA, 25 bp, Homo sapien
gtcagccaaagcaaatcgcagacca

SEQ ID NO: 5314058 - DNA, 25 bp, Homo sapien
caggttggttatcaattaagggcca

SEQ ID NO: 5314059 - DNA, 25 bp, Homo sapien
ctcagcaggttggttatcaattaag

SEQ ID NO: 5314060 - DNA, 25 bp, Homo sapien
tggttatcaattaagggccaagcag

SEQ ID NO: 5314061 - DNA, 25 bp, Homo sapien
ggttatcaattaagggccaagcagg

SEQ ID NO: 5314062 - DNA, 25 bp, Homo sapien
aagtctgagatgggtgtgccagcct

SEQ ID NO: 5314063 - DNA, 25 bp, Homo sapien
tgccagcctggtcaggttctggtga

SEQ ID NO: 5314064 - DNA, 25 bp, Homo sapien
ctggaagtctgagatgggtgtgcca

SEQ ID NO: 5314065 - DNA, 25 bp, Homo sapien
ggtgaggaccctcttccaggttgca

SEQ ID NO: 5314066 - DNA, 25 bp, Homo sapien
tctttctgggaccttactggctatc

SEQ ID NO: 5314067 - DNA, 25 bp, Homo sapien
ctacaacatgaataagggacttttg

SEQ ID NO: 5314068 - DNA, 25 bp, Homo sapien
acatgaataagggacttttgttctc

SEQ ID NO: 5314069 - DNA, 25 bp, Homo sapien
ccttactggctatcaggaacttgta

SEQ ID NO: 5314070 - DNA, 25 bp, Homo sapien
acatcagagggcattctcatagctt

SEQ ID NO: 5314071 - DNA, 25 bp, Homo sapien
atcagagggcattctcatagcttcc

SEQ ID NO: 5314072 - DNA, 25 bp, Homo sapien
catcagagggcattctcatagcttc

SEQ ID NO: 5314073 - DNA, 25 bp, Homo sapien
gcagctgctacttgttccaaccaaa

SEQ ID NO: 5314074 - DNA, 25 bp, Homo sapien
ggcagctgctacttgttccaaccaa

SEQ ID NO: 5314075 - DNA, 25 bp, Homo sapien
atgatgtatgtgtttgtcggagaga

SEQ ID NO: 5314076 - DNA, 25 bp, Homo sapien
ttcctttagatgatgtatgtgtttg

SEQ ID NO: 5314077 - DNA, 25 bp, Homo sapien
tattccagctgcattgcatactacc

SEQ ID NO: 5314078 - DNA, 25 bp, Homo sapien
tgatgcttgtggtgccctgaaccat

SEQ ID NO: 5314079 - DNA, 25 bp, Homo sapien
ggtaaacacgccttcttattccagc

SEQ ID NO: 5314080 - DNA, 25 bp, Homo sapien
catactacctgatgcttgtggtgcc

SEQ ID NO: 5314081 - DNA, 25 bp, Homo sapien
gaacaatacaatgagtggaattaac

SEQ ID NO: 5314082 - DNA, 25 bp, Homo sapien
caatgagtggaattaacaagcatgc

SEQ ID NO: 5314083 - DNA, 25 bp, Homo sapien
tcacagtctggtacacgaagagaac

SEQ ID NO: 5314084 - DNA, 25 bp, Homo sapien
tctctttcctgtgacacaaggatgg

SEQ ID NO: 5314085 - DNA, 25 bp, Homo sapien
taccgggtaaccattaatggcagtg

SEQ ID NO: 5314086 - DNA, 25 bp, Homo sapien
aatgcccgaatatgaattatgcagc

SEQ ID NO: 5314087 - DNA, 25 bp, Homo sapien
gcagtgctgtgtcttaatgcccgaa

SEQ ID NO: 5314088 - DNA, 25 bp, Homo sapien
cattggtagtgtggtgataagaaca

SEQ ID NO: 5314089 - DNA, 25 bp, Homo sapien
tactgtcgggactctgggcttttaa

SEQ ID NO: 5314090 - DNA, 25 bp, Homo sapien
taaaatagattaggtggtaatactg

SEQ ID NO: 5314091 - DNA, 25 bp, Homo sapien
gtatactgtcgggactctgggcttt

SEQ ID NO: 5314092 - DNA, 25 bp, Homo sapien
ccatggtatactgtcgggactctgg

SEQ ID NO: 5314093 - DNA, 25 bp, Homo sapien
tgtggtgaaggaacatttagatccc

SEQ ID NO: 5314094 - DNA, 25 bp, Homo sapien
gaaggaacatttagatcccttcatc

SEQ ID NO: 5314095 - DNA, 25 bp, Homo sapien
actgtggtgaaggaacatttagatc

SEQ ID NO: 5314096 - DNA, 25 bp, Homo sapien
ggtgaaggaacatttagatcccttc

SEQ ID NO: 5314097 - DNA, 25 bp, Homo sapien
atgcacagctttgcttttgtagatc

SEQ ID NO: 5314098 - DNA, 25 bp, Homo sapien
gcacagctttgcttttgtagatcat

SEQ ID NO: 5314099 - DNA, 25 bp, Homo sapien
tgcacagctttgcttttgtagatca

SEQ ID NO: 5314100 - DNA, 25 bp, Homo sapien
tttacagttgctatagggttaatcc

SEQ ID NO: 5314101 - DNA, 25 bp, Homo sapien
cttttacagttgctatagggttaat

SEQ ID NO: 5314102 - DNA, 25 bp, Homo sapien
ttttacagttgctatagggttaatc

SEQ ID NO: 5314103 - DNA, 25 bp, Homo sapien
tccttttacagttgctatagggtta

SEQ ID NO: 5314104 - DNA, 25 bp, Homo sapien
tcagtctgatgaaatgacagcattc

SEQ ID NO: 5314105 - DNA, 25 bp, Homo sapien
gtctgatgaaatgacagcattcttc

SEQ ID NO: 5314106 - DNA, 25 bp, Homo sapien
agtctgatgaaatgacagcattctt

SEQ ID NO: 5314107 - DNA, 25 bp, Homo sapien
cagtctgatgaaatgacagcattct

SEQ ID NO: 5314108 - DNA, 25 bp, Homo sapien
cagaagaactggcagtacttttcca

SEQ ID NO: 5314109 - DNA, 25 bp, Homo sapien
tgtatcatctccctgttattgagga

SEQ ID NO: 5314110 - DNA, 25 bp, Homo sapien
gacagtgatctgatcctcctggcaa

SEQ ID NO: 5314111 - DNA, 25 bp, Homo sapien
tggaaattcgaaagccagaagaact

SEQ ID NO: 5314112 - DNA, 25 bp, Homo sapien
tcagtctggttctacaaggccacgg

SEQ ID NO: 5314113 - DNA, 25 bp, Homo sapien
ctggttctacaaggccacggttgct

SEQ ID NO: 5314114 - DNA, 25 bp, Homo sapien
gtctggttctacaaggccacggttg

SEQ ID NO: 5314115 - DNA, 25 bp, Homo sapien
cagtctggttctacaaggccacggt

SEQ ID NO: 5314116 - DNA, 25 bp, Homo sapien
agctgctccatcagcatggttttga

SEQ ID NO: 5314117 - DNA, 25 bp, Homo sapien
catggttttgaggcccaaaattgcc

SEQ ID NO: 5314118 - DNA, 25 bp, Homo sapien
aggcccaaaattgccctcagcaaga

SEQ ID NO: 5314119 - DNA, 25 bp, Homo sapien
gagtggcttcgagaatctgccctct

SEQ ID NO: 5314120 - DNA, 25 bp, Homo sapien
agcaggacagcaaccaaaccttcca

SEQ ID NO: 5314121 - DNA, 25 bp, Homo sapien
gcagcaggacagcaaccaaaccttc

SEQ ID NO: 5314122 - DNA, 25 bp, Homo sapien
tgcagcaggacagcaaccaaacctt

SEQ ID NO: 5314123 - DNA, 25 bp, Homo sapien
ctgcagcaggacagcaaccaaacct

SEQ ID NO: 5314124 - DNA, 25 bp, Homo sapien
cagtccccaaatatgtatcacaatc

SEQ ID NO: 5314125 - DNA, 25 bp, Homo sapien
tgtctgaatgactttgactgtactc

SEQ ID NO: 5314126 - DNA, 25 bp, Homo sapien
tgaatgactttgactgtactcccca

SEQ ID NO: 5314127 - DNA, 25 bp, Homo sapien
tgtatcacaatcacctcttgtgcca

SEQ ID NO: 5314128 - DNA, 25 bp, Homo sapien
tgtctgttggactgagtagaaggca

SEQ ID NO: 5314129 - DNA, 25 bp, Homo sapien
ctgtctgttggactgagtagaaggc

SEQ ID NO: 5314130 - DNA, 25 bp, Homo sapien
actgtctgttggactgagtagaagg

SEQ ID NO: 5314131 - DNA, 25 bp, Homo sapien
gtctgttggactgagtagaaggcat

SEQ ID NO: 5314132 - DNA, 25 bp, Homo sapien
gaactgtacctttactaacaagtgc

SEQ ID NO: 5314133 - DNA, 25 bp, Homo sapien
agtgcagagcttacacccttaaaaa

SEQ ID NO: 5314134 - DNA, 25 bp, Homo sapien
ctttactaacaagtgcagagcttac

SEQ ID NO: 5314135 - DNA, 25 bp, Homo sapien
gcagagcttacacccttaaaaacca

SEQ ID NO: 5314136 - DNA, 25 bp, Homo sapien
gacagcactgagctccgttcaggaa

SEQ ID NO: 5314137 - DNA, 25 bp, Homo sapien
ggagacagcactgagctccgttcag

SEQ ID NO: 5314138 - DNA, 25 bp, Homo sapien
cttggtttgcattccctgctggctg

SEQ ID NO: 5314139 - DNA, 25 bp, Homo sapien
tgtttatgattgtttcagaaggaga

SEQ ID NO: 5314140 - DNA, 25 bp, Homo sapien
gagtctctgagccaatcagtagcac

SEQ ID NO: 5314141 - DNA, 25 bp, Homo sapien
ggagatgggtcctgagagtctctga

SEQ ID NO: 5314142 - DNA, 25 bp, Homo sapien
gccaatcagtagcacaaatgtgtcc

SEQ ID NO: 5314143 - DNA, 25 bp, Homo sapien
cacaaatgtgtccatgtttatagaa

SEQ ID NO: 5314144 - DNA, 25 bp, Homo sapien
gctggtgtgtatattttcccttcat

SEQ ID NO: 5314145 - DNA, 25 bp, Homo sapien
ctgctggtgtgtatattttcccttc

SEQ ID NO: 5314146 - DNA, 25 bp, Homo sapien
tgctggtgtgtatattttcccttca

SEQ ID NO: 5314147 - DNA, 25 bp, Homo sapien
gcactgtgttgcatggaatctcctg

SEQ ID NO: 5314148 - DNA, 25 bp, Homo sapien
tacatgactgaggagacctcacaat

SEQ ID NO: 5314149 - DNA, 25 bp, Homo sapien
accatatcactatatgtttagtttg

SEQ ID NO: 5314150 - DNA, 25 bp, Homo sapien
caaagacatatccttacagttctac

SEQ ID NO: 5314151 - DNA, 25 bp, Homo sapien
tctgtcctacgacatcattaataag

SEQ ID NO: 5314152 - DNA, 25 bp, Homo sapien
gtctctctgtcctacgacatcatta

SEQ ID NO: 5314153 - DNA, 25 bp, Homo sapien
ctgtcctacgacatcattaataaga

SEQ ID NO: 5314154 - DNA, 25 bp, Homo sapien
tctctgtcctacgacatcattaata

SEQ ID NO: 5314155 - DNA, 25 bp, Homo sapien
gttacaagtatcttataagactgtg

SEQ ID NO: 5314156 - DNA, 25 bp, Homo sapien
tccctccaaggggagcatgttgtgc

SEQ ID NO: 5314157 - DNA, 25 bp, Homo sapien
ccaaggggagcatgttgtgctttcc

SEQ ID NO: 5314158 - DNA, 25 bp, Homo sapien
tttattatcattgttttgaccacaa

SEQ ID NO: 5314159 - DNA, 25 bp, Homo sapien
aaacttgatactttcttattctaca

SEQ ID NO: 5314160 - DNA, 25 bp, Homo sapien
tgatactttcttattctacaagtac

SEQ ID NO: 5314161 - DNA, 25 bp, Homo sapien
tctccagttattagagtttcttaag

SEQ ID NO: 5314162 - DNA, 25 bp, Homo sapien
ttactctccagttattagagtttct

SEQ ID NO: 5314163 - DNA, 25 bp, Homo sapien
gcaccagagtcatagatggacagtg

SEQ ID NO: 5314164 - DNA, 25 bp, Homo sapien
gagccgtcagcttagatataattcc

SEQ ID NO: 5314165 - DNA, 25 bp, Homo sapien
ttggttggactccatttggtcagtg

SEQ ID NO: 5314166 - DNA, 25 bp, Homo sapien
aaccagcaccagagtcatagatgga

SEQ ID NO: 5314167 - DNA, 25 bp, Homo sapien
ggaattaggatggtaaagatcatca

SEQ ID NO: 5314168 - DNA, 25 bp, Homo sapien
gaggaattaggatggtaaagatcat

SEQ ID NO: 5314169 - DNA, 25 bp, Homo sapien
aggaggaattaggatggtaaagatc

SEQ ID NO: 5314170 - DNA, 25 bp, Homo sapien
gaattaggatggtaaagatcatcat

SEQ ID NO: 5314171 - DNA, 25 bp, Homo sapien
tagctttgccaagttaccatatcca

SEQ ID NO: 5314172 - DNA, 25 bp, Homo sapien
caaacccgttttcacaagcagcaga

SEQ ID NO: 5314173 - DNA, 25 bp, Homo sapien
tattgctgctctagctttgccaagt

SEQ ID NO: 5314174 - DNA, 25 bp, Homo sapien
tgccaagttaccatatccaaacccg

SEQ ID NO: 5314175 - DNA, 25 bp, Homo sapien
atagtaattttcctctaggccaaat

SEQ ID NO: 5314176 - DNA, 25 bp, Homo sapien
tagtaattttcctctaggccaaatg

SEQ ID NO: 5314177 - DNA, 25 bp, Homo sapien
gatttttctgaggatcgtaattgta

SEQ ID NO: 5314178 - DNA, 25 bp, Homo sapien
cctgatttttctgaggatcgtaatt

SEQ ID NO: 5314179 - DNA, 25 bp, Homo sapien
tcgtaattgtaataactatctgccc

SEQ ID NO: 5314180 - DNA, 25 bp, Homo sapien
tctgaggatcgtaattgtaataact

SEQ ID NO: 5314181 - DNA, 25 bp, Homo sapien
cacaaaacgcaaattctatttcttt

SEQ ID NO: 5314182 - DNA, 25 bp, Homo sapien
tcataaggacaccttaagctcctca

SEQ ID NO: 5314183 - DNA, 25 bp, Homo sapien
aagcacaaaacgcaaattctatttc

SEQ ID NO: 5314184 - DNA, 25 bp, Homo sapien
cataaggacaccttaagctcctcaa

SEQ ID NO: 5314185 - DNA, 25 bp, Homo sapien
ataaaccagctggaacagcttaatt

SEQ ID NO: 5314186 - DNA, 25 bp, Homo sapien
cagctggaacagcttaattagcttc

SEQ ID NO: 5314187 - DNA, 25 bp, Homo sapien
aacagcttaattagcttcttggcaa

SEQ ID NO: 5314188 - DNA, 25 bp, Homo sapien
ggaacagcttaattagcttcttggc

SEQ ID NO: 5314189 - DNA, 25 bp, Homo sapien
gtgcctgaggtttactgagttgctg

SEQ ID NO: 5314190 - DNA, 25 bp, Homo sapien
gacacttcctaaaacatgccttgtt

SEQ ID NO: 5314191 - DNA, 25 bp, Homo sapien
tgctgtgcctgaggtttactgagtt

SEQ ID NO: 5314192 - DNA, 25 bp, Homo sapien
gttgctgacacttcctaaaacatgc

SEQ ID NO: 5314193 - DNA, 25 bp, Homo sapien
tattttgtagatgtcgttattttcg

SEQ ID NO: 5314194 - DNA, 25 bp, Homo sapien
tagatgtcgttattttcggagaggc

SEQ ID NO: 5314195 - DNA, 25 bp, Homo sapien
ggccttccggacaccagctttgctt

SEQ ID NO: 5314196 - DNA, 25 bp, Homo sapien
tcggagaggcttctatgaaccacca

SEQ ID NO: 5314197 - DNA, 25 bp, Homo sapien
tccatttgtgatcagcaatggccct

SEQ ID NO: 5314198 - DNA, 25 bp, Homo sapien
gtgatcagcaatggccctttctgga

SEQ ID NO: 5314199 - DNA, 25 bp, Homo sapien
tttgtgatcagcaatggccctttct

SEQ ID NO: 5314200 - DNA, 25 bp, Homo sapien
ccagacctcttcctttgtaataagt

SEQ ID NO: 5314201 - DNA, 25 bp, Homo sapien
gtgactgctagtaaagtgtatctta

SEQ ID NO: 5314202 - DNA, 25 bp, Homo sapien
tgactgctagtaaagtgtatcttac

SEQ ID NO: 5314203 - DNA, 25 bp, Homo sapien
agtgactgctagtaaagtgtatctt

SEQ ID NO: 5314204 - DNA, 25 bp, Homo sapien
gtgggggatgaggtggcaggagtgg

SEQ ID NO: 5314205 - DNA, 25 bp, Homo sapien
agtgtgggggatgaggtggcaggag

SEQ ID NO: 5314206 - DNA, 25 bp, Homo sapien
gtgtgggggatgaggtggcaggagt

SEQ ID NO: 5314207 - DNA, 25 bp, Homo sapien
tgtgggggatgaggtggcaggagtg

SEQ ID NO: 5314208 - DNA, 25 bp, Homo sapien
tggttggcgtagtcaccgcagcaca

SEQ ID NO: 5314209 - DNA, 25 bp, Homo sapien
gttggcgtagtcaccgcagcacagg

SEQ ID NO: 5314210 - DNA, 25 bp, Homo sapien
gaggcccatccactgtcggtggttg

SEQ ID NO: 5314211 - DNA, 25 bp, Homo sapien
cactgtcggtggttggcgtagtcac

SEQ ID NO: 5314212 - DNA, 25 bp, Homo sapien
ctgtccacctcaacttgaggtttta

SEQ ID NO: 5314213 - DNA, 25 bp, Homo sapien
tgtttacaagaaggagtcagactct

SEQ ID NO: 5314214 - DNA, 25 bp, Homo sapien
gagacaattctaagccggtgaggcg

SEQ ID NO: 5314215 - DNA, 25 bp, Homo sapien
tggttagtatctgtaagtttctgaa

SEQ ID NO: 5314216 - DNA, 25 bp, Homo sapien
gagacttcagtcaaatacgtttaaa

SEQ ID NO: 5314217 - DNA, 25 bp, Homo sapien
tcacttgtgagcatctaggcctgtg

SEQ ID NO: 5314218 - DNA, 25 bp, Homo sapien
tgaagacatccattgtgtggactac

SEQ ID NO: 5314219 - DNA, 25 bp, Homo sapien
tgagggtttgcagtatatcacccaa

SEQ ID NO: 5314220 - DNA, 25 bp, Homo sapien
tctggaagaaattggcttgatcggg

SEQ ID NO: 5314221 - DNA, 25 bp, Homo sapien
tctgactgagaaggctttggtaaga

SEQ ID NO: 5314222 - DNA, 25 bp, Homo sapien
tgctgaaatggcacatcatagtctg

SEQ ID NO: 5314223 - DNA, 25 bp, Homo sapien
caatcctccacggagagtgtggctt

SEQ ID NO: 5314224 - DNA, 25 bp, Homo sapien
catagtctgactcgccctgggtgag

SEQ ID NO: 5314225 - DNA, 25 bp, Homo sapien
tctctcctgttggcattactatatt

SEQ ID NO: 5314226 - DNA, 25 bp, Homo sapien
aactggcgcacttctctcctgttgg

SEQ ID NO: 5314227 - DNA, 25 bp, Homo sapien
ctgagagcccaactggcgcacttct

SEQ ID NO: 5314228 - DNA, 25 bp, Homo sapien
gagagcccaactggcgcacttctct

SEQ ID NO: 5314229 - DNA, 25 bp, Homo sapien
tcccactcagatggacagagtagca

SEQ ID NO: 5314230 - DNA, 25 bp, Homo sapien
tgttgcaggatctatgaggcagctg

SEQ ID NO: 5314231 - DNA, 25 bp, Homo sapien
tacgacaggaaaataccaggaaagc

SEQ ID NO: 5314232 - DNA, 25 bp, Homo sapien
catgtggagactcacgcttttgctc

SEQ ID NO: 5314233 - DNA, 25 bp, Homo sapien
caaactataggggtagacaaagcag

SEQ ID NO: 5314234 - DNA, 25 bp, Homo sapien
tgagcaaactataggggtagacaaa

SEQ ID NO: 5314235 - DNA, 25 bp, Homo sapien
agtccccaggaaaatcattcctgac

SEQ ID NO: 5314236 - DNA, 25 bp, Homo sapien
aactataggggtagacaaagcagca

SEQ ID NO: 5314237 - DNA, 25 bp, Homo sapien
tagagttgtactatcagacaataaa

SEQ ID NO: 5314238 - DNA, 25 bp, Homo sapien
gatcttctgttggccttgaaaaagg

SEQ ID NO: 5314239 - DNA, 25 bp, Homo sapien
ttctgttggccttgaaaaaggcact

SEQ ID NO: 5314240 - DNA, 25 bp, Homo sapien
cttcatatttagagttgtactatca

SEQ ID NO: 5314241 - DNA, 25 bp, Homo sapien
tccactattggattgttttctttct

SEQ ID NO: 5314242 - DNA, 25 bp, Homo sapien
ccactattggattgttttctttctt

SEQ ID NO: 5314243 - DNA, 25 bp, Homo sapien
gctccactattggattgttttcttt

SEQ ID NO: 5314244 - DNA, 25 bp, Homo sapien
ctttctttaatttccagacattcat

SEQ ID NO: 5314245 - DNA, 25 bp, Homo sapien
ttgtttatcattgaactttagcttc

SEQ ID NO: 5314246 - DNA, 25 bp, Homo sapien
tagttgtttatcattgaactttagc

SEQ ID NO: 5314247 - DNA, 25 bp, Homo sapien
tctagttgtttatcattgaacttta

SEQ ID NO: 5314248 - DNA, 25 bp, Homo sapien
tttctagttgtttatcattgaactt

SEQ ID NO: 5314249 - DNA, 25 bp, Homo sapien
gtaacatttgctctatctcaggcat

SEQ ID NO: 5314250 - DNA, 25 bp, Homo sapien
ggtaacatttgctctatctcaggca

SEQ ID NO: 5314251 - DNA, 25 bp, Homo sapien
ttctagccagtccaggtccacagcc

SEQ ID NO: 5314252 - DNA, 25 bp, Homo sapien
cttgtctctgtacctggttttctct

SEQ ID NO: 5314253 - DNA, 25 bp, Homo sapien
tcctccactgcaactggtttggcct

SEQ ID NO: 5314254 - DNA, 25 bp, Homo sapien
ctctgtacctggttttctctagggc

SEQ ID NO: 5314255 - DNA, 25 bp, Homo sapien
gagaataacctcattggcattgaca

SEQ ID NO: 5314256 - DNA, 25 bp, Homo sapien
tactgttggctttaaagcaactggg

SEQ ID NO: 5314257 - DNA, 25 bp, Homo sapien
cgtggaaaatcgtgtgcagacttgt

SEQ ID NO: 5314258 - DNA, 25 bp, Homo sapien
taatgcttgggcacctcaagtactg

SEQ ID NO: 5314259 - DNA, 25 bp, Homo sapien
ggtgctactgtgtgacagagtttgc

SEQ ID NO: 5314260 - DNA, 25 bp, Homo sapien
cctcctctccttctatcagttttcc

SEQ ID NO: 5314261 - DNA, 25 bp, Homo sapien
cttgatttcccaaggtgctactgtg

SEQ ID NO: 5314262 - DNA, 25 bp, Homo sapien
tatcagttttcctggtttcccaagc

SEQ ID NO: 5314263 - DNA, 25 bp, Homo sapien
ttccttctctgcatagcaaaagctt

SEQ ID NO: 5314264 - DNA, 25 bp, Homo sapien
gtctcatacctgatctttaattcct

SEQ ID NO: 5314265 - DNA, 25 bp, Homo sapien
tattccttctctgcatagcaaaagc

SEQ ID NO: 5314266 - DNA, 25 bp, Homo sapien
cattttttgttgtctcatacctgat

SEQ ID NO: 5314267 - DNA, 25 bp, Homo sapien
ccacttgagaattgcatgtcccaga

SEQ ID NO: 5314268 - DNA, 25 bp, Homo sapien
agaattgcatgtcccagatagtgtc

SEQ ID NO: 5314269 - DNA, 25 bp, Homo sapien
cttgagaattgcatgtcccagatag

SEQ ID NO: 5314270 - DNA, 25 bp, Homo sapien
attgcatgtcccagatagtgtcagc

SEQ ID NO: 5314271 - DNA, 25 bp, Homo sapien
ggacagacatcagtagactgagaga

SEQ ID NO: 5314272 - DNA, 25 bp, Homo sapien
ccatcaaatcctgttctacaaggtg

SEQ ID NO: 5314273 - DNA, 25 bp, Homo sapien
aagaggacagacatcagtagactga

SEQ ID NO: 5314274 - DNA, 25 bp, Homo sapien
actgagagaagcttggcataagtcc

SEQ ID NO: 5314275 - DNA, 25 bp, Homo sapien
gttgctgccacaacctccatcatca

SEQ ID NO: 5314276 - DNA, 25 bp, Homo sapien
ttgctgccacaacctccatcatcat

SEQ ID NO: 5314277 - DNA, 25 bp, Homo sapien
ccttcacctccatgaaataattcat

SEQ ID NO: 5314278 - DNA, 25 bp, Homo sapien
tcccttcacctccatgaaataattc

SEQ ID NO: 5314279 - DNA, 25 bp, Homo sapien
aaccatagaagtactcatactggag

SEQ ID NO: 5314280 - DNA, 25 bp, Homo sapien
cctttgtaaccatagaagtactcat

SEQ ID NO: 5314281 - DNA, 25 bp, Homo sapien
gaatggatcagtgtcatagatgtta

SEQ ID NO: 5314282 - DNA, 25 bp, Homo sapien
atgcttgctggaatggatcagtgtc

SEQ ID NO: 5314283 - DNA, 25 bp, Homo sapien
tcaagagtgccagaataaaatgctt

SEQ ID NO: 5314284 - DNA, 25 bp, Homo sapien
ctgtgctatcaagagtgccagaata

SEQ ID NO: 5314285 - DNA, 25 bp, Homo sapien
gaaagcatggaagtaaaaatgttca

SEQ ID NO: 5314286 - DNA, 25 bp, Homo sapien
ctgaaagcatggaagtaaaaatgtt

SEQ ID NO: 5314287 - DNA, 25 bp, Homo sapien
tgaaagcatggaagtaaaaatgttc

SEQ ID NO: 5314288 - DNA, 25 bp, Homo sapien
aaagcatggaagtaaaaatgttcat

SEQ ID NO: 5314289 - DNA, 25 bp, Homo sapien
agacctaaattgaattcactttcat

SEQ ID NO: 5314290 - DNA, 25 bp, Homo sapien
cactttcattctttgctacctttgt

SEQ ID NO: 5314291 - DNA, 25 bp, Homo sapien
gacctaaattgaattcactttcatt

SEQ ID NO: 5314292 - DNA, 25 bp, Homo sapien
cagacctaaattgaattcactttca

SEQ ID NO: 5314293 - DNA, 25 bp, Homo sapien
tctattccatagacaaggtaggaaa

SEQ ID NO: 5314294 - DNA, 25 bp, Homo sapien
ttctattccatagacaaggtaggaa

SEQ ID NO: 5314295 - DNA, 25 bp, Homo sapien
ccaagttgactgtcctcttgtgatg

SEQ ID NO: 5314296 - DNA, 25 bp, Homo sapien
tgatgagcaggtctaaaggaacaga

SEQ ID NO: 5314297 - DNA, 25 bp, Homo sapien
cttgtgatggcatcacaaagggtgc

SEQ ID NO: 5314298 - DNA, 25 bp, Homo sapien
ggaacagaaaaggtctggtagatgc

SEQ ID NO: 5314299 - DNA, 25 bp, Homo sapien
tgacagactcaggaagggctagcct

SEQ ID NO: 5314300 - DNA, 25 bp, Homo sapien
tcacagcagcagtcatctattgtac

SEQ ID NO: 5314301 - DNA, 25 bp, Homo sapien
gggctagcctcaccttggttctcaa

SEQ ID NO: 5314302 - DNA, 25 bp, Homo sapien
gaaaacatcctgcagtcagacacct

SEQ ID NO: 5314303 - DNA, 25 bp, Homo sapien
tgtgcggttccgtagcattcgaagc

SEQ ID NO: 5314304 - DNA, 25 bp, Homo sapien
gctcagtgtgcggttccgtagcatt

SEQ ID NO: 5314305 - DNA, 25 bp, Homo sapien
gcattcgaagctgtacctgtggaaa

SEQ ID NO: 5314306 - DNA, 25 bp, Homo sapien
tccgtagcattcgaagctgtacctg

SEQ ID NO: 5314307 - DNA, 25 bp, Homo sapien
cagtttcagttcattggacctatat

SEQ ID NO: 5314308 - DNA, 25 bp, Homo sapien
gatcagcagttagacttgtcagttt

SEQ ID NO: 5314309 - DNA, 25 bp, Homo sapien
gccagtaaaggatcaaggaacaaca

SEQ ID NO: 5314310 - DNA, 25 bp, Homo sapien
gggttctgatcagcagttagacttg

SEQ ID NO: 5314311 - DNA, 25 bp, Homo sapien
ccacagccatcattctgtctgccat

SEQ ID NO: 5314312 - DNA, 25 bp, Homo sapien
accacagccatcattctgtctgcca

SEQ ID NO: 5314313 - DNA, 25 bp, Homo sapien
caccacagccatcattctgtctgcc

SEQ ID NO: 5314314 - DNA, 25 bp, Homo sapien
cccaccacagccatcattctgtctg

SEQ ID NO: 5314315 - DNA, 25 bp, Homo sapien
aatgtaaaagttgtggccgagtgag

SEQ ID NO: 5314316 - DNA, 25 bp, Homo sapien
gaagccatgcatatctttgattcag

SEQ ID NO: 5314317 - DNA, 25 bp, Homo sapien
gtcagaaatacacctccagagaagc

SEQ ID NO: 5314318 - DNA, 25 bp, Homo sapien
gcccagacgacggtgtgagactccg

SEQ ID NO: 5314319 - DNA, 25 bp, Homo sapien
tggactgcgggaaatctgttcttct

SEQ ID NO: 5314320 - DNA, 25 bp, Homo sapien
gagaccaagggcctgcactgtattc

SEQ ID NO: 5314321 - DNA, 25 bp, Homo sapien
ctgcgggaaatctgttcttcttcac

SEQ ID NO: 5314322 - DNA, 25 bp, Homo sapien
acagagaccaagggcctgcactgta

SEQ ID NO: 5314323 - DNA, 25 bp, Homo sapien
ccactgtgaaagtggcccttccaga

SEQ ID NO: 5314324 - DNA, 25 bp, Homo sapien
aaatattcacaacaatgccttccaa

SEQ ID NO: 5314325 - DNA, 25 bp, Homo sapien
tcctgcagctctctagcatcgtagt

SEQ ID NO: 5314326 - DNA, 25 bp, Homo sapien
atcatgaccaatgccagaggatttt

SEQ ID NO: 5314327 - DNA, 25 bp, Homo sapien
tattgtattgtgtttccccttcacc

SEQ ID NO: 5314328 - DNA, 25 bp, Homo sapien
tcttgttttattgtattgtgtttcc

SEQ ID NO: 5314329 - DNA, 25 bp, Homo sapien
tttccccttcacctctcaatgtcat

SEQ ID NO: 5314330 - DNA, 25 bp, Homo sapien
cccaatatcttgttttattgtattg

SEQ ID NO: 5314331 - DNA, 25 bp, Homo sapien
ctttctccttgccacagcctagtgt

SEQ ID NO: 5314332 - DNA, 25 bp, Homo sapien
tcatcctttctccttgccacagcct

SEQ ID NO: 5314333 - DNA, 25 bp, Homo sapien
tttctccttgccacagcctagtgtc

SEQ ID NO: 5314334 - DNA, 25 bp, Homo sapien
tcctttctccttgccacagcctagt

SEQ ID NO: 5314335 - DNA, 25 bp, Homo sapien
tgttctgcatttctcatgtcatcct

SEQ ID NO: 5314336 - DNA, 25 bp, Homo sapien
ctctgttctgcatttctcatgtcat

SEQ ID NO: 5314337 - DNA, 25 bp, Homo sapien
tctgcatttctcatgtcatcctcca

SEQ ID NO: 5314338 - DNA, 25 bp, Homo sapien
ctgcatttctcatgtcatcctccat

SEQ ID NO: 5314339 - DNA, 25 bp, Homo sapien
tattttaaatcgtccctctattgtc

SEQ ID NO: 5314340 - DNA, 25 bp, Homo sapien
ctctattgtcacatcaggaacactc

SEQ ID NO: 5314341 - DNA, 25 bp, Homo sapien
tcgtccctctattgtcacatcagga

SEQ ID NO: 5314342 - DNA, 25 bp, Homo sapien
taaatcgtccctctattgtcacatc

SEQ ID NO: 5314343 - DNA, 25 bp, Homo sapien
ttgtttcttctacttctctctccat

SEQ ID NO: 5314344 - DNA, 25 bp, Homo sapien
atcgtctaatactttgaaatggtcc

SEQ ID NO: 5314345 - DNA, 25 bp, Homo sapien
catcgtctaatactttgaaatggtc

SEQ ID NO: 5314346 - DNA, 25 bp, Homo sapien
gtgaatttgtaaactggatacttcc

SEQ ID NO: 5314347 - DNA, 25 bp, Homo sapien
gaagccaggagtagcagtgaatttg

SEQ ID NO: 5314348 - DNA, 25 bp, Homo sapien
agtgaatttgtaaactggatacttc

SEQ ID NO: 5314349 - DNA, 25 bp, Homo sapien
ccaggagtagcagtgaatttgtaaa

SEQ ID NO: 5314350 - DNA, 25 bp, Homo sapien
aatgatgggagaagtaaccatgatg

SEQ ID NO: 5314351 - DNA, 25 bp, Homo sapien
attttgaatgatgggagaagtaacc

SEQ ID NO: 5314352 - DNA, 25 bp, Homo sapien
gattaaagtacttgattttgaatga

SEQ ID NO: 5314353 - DNA, 25 bp, Homo sapien
ttccactcttacatcatctgtactg

SEQ ID NO: 5314354 - DNA, 25 bp, Homo sapien
agttagttgtaaatgtgtggcatta

SEQ ID NO: 5314355 - DNA, 25 bp, Homo sapien
tgagaattaactacaaccttttgtc

SEQ ID NO: 5314356 - DNA, 25 bp, Homo sapien
taatgcacataggtaatgagagcag

SEQ ID NO: 5314357 - DNA, 25 bp, Homo sapien
gagagttgtctccagtcctagtttg

SEQ ID NO: 5314358 - DNA, 25 bp, Homo sapien
aatgtttctcctgcattctgaatgt

SEQ ID NO: 5314359 - DNA, 25 bp, Homo sapien
tgctactttttatgtatcttgaaag

SEQ ID NO: 5314360 - DNA, 25 bp, Homo sapien
cctcatgtgctactgatgttgttat

SEQ ID NO: 5314361 - DNA, 25 bp, Homo sapien
caatctgcgagtgatgaaatatctc

SEQ ID NO: 5314362 - DNA, 25 bp, Homo sapien
gaaggtaagattctacatctgtttc

SEQ ID NO: 5314363 - DNA, 25 bp, Homo sapien
taaactctggtctcacgataggcag

SEQ ID NO: 5314364 - DNA, 25 bp, Homo sapien
gctgttcggtattcacagacttcct

SEQ ID NO: 5314365 - DNA, 25 bp, Homo sapien
ggagaaataactgtcgctgttcggt

SEQ ID NO: 5314366 - DNA, 25 bp, Homo sapien
ggactgctatcgcaataaactctgg

SEQ ID NO: 5314367 - DNA, 25 bp, Homo sapien
cgtgattcccgagtcataaccccga

SEQ ID NO: 5314368 - DNA, 25 bp, Homo sapien
gtgattcccgagtcataaccccgac

SEQ ID NO: 5314369 - DNA, 25 bp, Homo sapien
tgattcccgagtcataaccccgacc

SEQ ID NO: 5314370 - DNA, 25 bp, Homo sapien
ttccatgcggaggtatttgtttcct

SEQ ID NO: 5314371 - DNA, 25 bp, Homo sapien
cctggtgtcaggctgttgagtgtga

SEQ ID NO: 5314372 - DNA, 25 bp, Homo sapien
gctgttgagtgtgatttgtacttcc

SEQ ID NO: 5314373 - DNA, 25 bp, Homo sapien
actgtcagatgtgcaaattccatgc

SEQ ID NO: 5314374 - DNA, 25 bp, Homo sapien
ctgcaggctggagcactaacactgc

SEQ ID NO: 5314375 - DNA, 25 bp, Homo sapien
caccaaaagtgtggccctcctcact

SEQ ID NO: 5314376 - DNA, 25 bp, Homo sapien
gcaggctggagcactaacactgctg

SEQ ID NO: 5314377 - DNA, 25 bp, Homo sapien
gtctgcctacctaagctagcactct

SEQ ID NO: 5314378 - DNA, 25 bp, Homo sapien
cttggctgtgggggtcctccgcctc

SEQ ID NO: 5314379 - DNA, 25 bp, Homo sapien
ttggctgtgggggtcctccgcctcc

SEQ ID NO: 5314380 - DNA, 25 bp, Homo sapien
tgcttggctgtgggggtcctccgcc

SEQ ID NO: 5314381 - DNA, 25 bp, Homo sapien
tctgcttggctgtgggggtcctccg

SEQ ID NO: 5314382 - DNA, 25 bp, Homo sapien
tattagtactgactccccaaggtgt

SEQ ID NO: 5314383 - DNA, 25 bp, Homo sapien
tattgtgtaacctaaagaactggtc

SEQ ID NO: 5314384 - DNA, 25 bp, Homo sapien
tcagctccagagtcacgtaaccaga

SEQ ID NO: 5314385 - DNA, 25 bp, Homo sapien
taaacaagaaccaactgagatgcat

SEQ ID NO: 5314386 - DNA, 25 bp, Homo sapien
tgtcagcatactcacggtcagcatg

SEQ ID NO: 5314387 - DNA, 25 bp, Homo sapien
gtcagcatactcacggtcagcatga

SEQ ID NO: 5314388 - DNA, 25 bp, Homo sapien
tcagcatactcacggtcagcatgag

SEQ ID NO: 5314389 - DNA, 25 bp, Homo sapien
gcaggtaggccatgcagaagaatgc

SEQ ID NO: 5314390 - DNA, 25 bp, Homo sapien
gaagaatgccactgaggttgctgct

SEQ ID NO: 5314391 - DNA, 25 bp, Homo sapien
tgcaggtaggccatgcagaagaatg

SEQ ID NO: 5314392 - DNA, 25 bp, Homo sapien
ccaagtgcacgtttctatagaagca

SEQ ID NO: 5314393 - DNA, 25 bp, Homo sapien
gatccattagctgtatcattagtat

SEQ ID NO: 5314394 - DNA, 25 bp, Homo sapien
gaagtagggaaggtgatccattagc

SEQ ID NO: 5314395 - DNA, 25 bp, Homo sapien
atctgcaagcagacctgaagtcatt

SEQ ID NO: 5314396 - DNA, 25 bp, Homo sapien
cagagggcttggcatagctctcttc

SEQ ID NO: 5314397 - DNA, 25 bp, Homo sapien
acagagggcttggcatagctctctt

SEQ ID NO: 5314398 - DNA, 25 bp, Homo sapien
cccactggcttaatgttgatccagc

SEQ ID NO: 5314399 - DNA, 25 bp, Homo sapien
taatgttgatccagcagtatagatc

SEQ ID NO: 5314400 - DNA, 25 bp, Homo sapien
cactggcttaatgttgatccagcag

SEQ ID NO: 5314401 - DNA, 25 bp, Homo sapien
tggcttaatgttgatccagcagtat

SEQ ID NO: 5314402 - DNA, 25 bp, Homo sapien
agccaggaacctatgttcttctttg

SEQ ID NO: 5314403 - DNA, 25 bp, Homo sapien
ttatttgcactgtattctatgtgac

SEQ ID NO: 5314404 - DNA, 25 bp, Homo sapien
ctatacacagagtttccccaaaagt

SEQ ID NO: 5314405 - DNA, 25 bp, Homo sapien
ggctcaagtaattaaaccatattcg

SEQ ID NO: 5314406 - DNA, 25 bp, Homo sapien
agttgctggtggtacattatagaaa

SEQ ID NO: 5314407 - DNA, 25 bp, Homo sapien
atagttgctggtggtacattataga

SEQ ID NO: 5314408 - DNA, 25 bp, Homo sapien
tagttgctggtggtacattatagaa

SEQ ID NO: 5314409 - DNA, 25 bp, Homo sapien
gaataaattaatacaccatgtgttc

SEQ ID NO: 5314410 - DNA, 25 bp, Homo sapien
caccatgtgttcagcccaaactcag

SEQ ID NO: 5314411 - DNA, 25 bp, Homo sapien
tacaccatgtgttcagcccaaactc

SEQ ID NO: 5314412 - DNA, 25 bp, Homo sapien
agcccaaactcaggaagtttaatcg

SEQ ID NO: 5314413 - DNA, 25 bp, Homo sapien
aattactataaagtctgacattcaa

SEQ ID NO: 5314414 - DNA, 25 bp, Homo sapien
atagtgagacccccaggtatcttct

SEQ ID NO: 5314415 - DNA, 25 bp, Homo sapien
tctaccacttgtctctcagaatgct

SEQ ID NO: 5314416 - DNA, 25 bp, Homo sapien
gcagctgagtcttatctaattacta

SEQ ID NO: 5314417 - DNA, 25 bp, Homo sapien
taccatgatgtgctaattgcagcaa

SEQ ID NO: 5314418 - DNA, 25 bp, Homo sapien
tgctttgtgcgtgttcatctccagt

SEQ ID NO: 5314419 - DNA, 25 bp, Homo sapien
tggagaagggatacacaaatgactt

SEQ ID NO: 5314420 - DNA, 25 bp, Homo sapien
cacttgcaatgcacaaaggactcac

SEQ ID NO: 5314421 - DNA, 25 bp, Homo sapien
cttgtggaaggaggaagcatgtggg

SEQ ID NO: 5314422 - DNA, 25 bp, Homo sapien
acccttgtggaaggaggaagcatgt

SEQ ID NO: 5314423 - DNA, 25 bp, Homo sapien
gaggaagcatgtgggatgaaggcat

SEQ ID NO: 5314424 - DNA, 25 bp, Homo sapien
caaacccttgtggaaggaggaagca

SEQ ID NO: 5314425 - DNA, 25 bp, Homo sapien
tccctgcaccgcctgaccaacatcc

SEQ ID NO: 5314426 - DNA, 25 bp, Homo sapien
accttccccgcactcagtagctcca

SEQ ID NO: 5314427 - DNA, 25 bp, Homo sapien
tccagcagcaccgacaacgtctcgg

SEQ ID NO: 5314428 - DNA, 25 bp, Homo sapien
gctcgactccgaggagcccaccttc

SEQ ID NO: 5314429 - DNA, 25 bp, Homo sapien
aatataggtccacttgaatctgaag

SEQ ID NO: 5314430 - DNA, 25 bp, Homo sapien
tgaatctgaagaagactcttcttga

SEQ ID NO: 5314431 - DNA, 25 bp, Homo sapien
agaaaatataggtccacttgaatct

SEQ ID NO: 5314432 - DNA, 25 bp, Homo sapien
tataggtccacttgaatctgaagaa

SEQ ID NO: 5314433 - DNA, 25 bp, Homo sapien
caccagtatcatgaggagaggaaac

SEQ ID NO: 5314434 - DNA, 25 bp, Homo sapien
gaccacaacgcggtgacttggagga

SEQ ID NO: 5314435 - DNA, 25 bp, Homo sapien
gagccttcggtcttcttgtctgtga

SEQ ID NO: 5314436 - DNA, 25 bp, Homo sapien
gctgaaaaactcgtaaagctacgga

SEQ ID NO: 5314437 - DNA, 25 bp, Homo sapien
gggagatggaggaagcccagcgccc

SEQ ID NO: 5314438 - DNA, 25 bp, Homo sapien
cttcgggagatggaggaagcccagc

SEQ ID NO: 5314439 - DNA, 25 bp, Homo sapien
tcgggagatggaggaagcccagcgc

SEQ ID NO: 5314440 - DNA, 25 bp, Homo sapien
gagatggaggaagcccagcgcccgg

SEQ ID NO: 5314441 - DNA, 25 bp, Homo sapien
tatagtacaatctttgccgcagaaa

SEQ ID NO: 5314442 - DNA, 25 bp, Homo sapien
tagaatttggaacagtcatctggca

SEQ ID NO: 5314443 - DNA, 25 bp, Homo sapien
actgcctggcactaagactttaaac

SEQ ID NO: 5314444 - DNA, 25 bp, Homo sapien
aacatgttctttcagggcacaagca

SEQ ID NO: 5314445 - DNA, 25 bp, Homo sapien
ttagcctgcggtgtgaagcgaagtt

SEQ ID NO: 5314446 - DNA, 25 bp, Homo sapien
tcttgctgttcccagactctttggt

SEQ ID NO: 5314447 - DNA, 25 bp, Homo sapien
gccttataaaattgggctggcctta

SEQ ID NO: 5314448 - DNA, 25 bp, Homo sapien
ggtgtccttgcctaaggcctgggca

SEQ ID NO: 5314449 - DNA, 25 bp, Homo sapien
cgctgccttggtccagtgcgtacat

SEQ ID NO: 5314450 - DNA, 25 bp, Homo sapien
tccaagttctgaggcccctctggta

SEQ ID NO: 5314451 - DNA, 25 bp, Homo sapien
gagtcgctgccttggtccagtgcgt

SEQ ID NO: 5314452 - DNA, 25 bp, Homo sapien
ctctggtagggtgaggggagtcgct

SEQ ID NO: 5314453 - DNA, 25 bp, Homo sapien
tctggatatttactgcactacttct

SEQ ID NO: 5314454 - DNA, 25 bp, Homo sapien
tctgattaatctggatatttactgc

SEQ ID NO: 5314455 - DNA, 25 bp, Homo sapien
taatctggatatttactgcactact

SEQ ID NO: 5314456 - DNA, 25 bp, Homo sapien
gatatttactgcactacttctcaca

SEQ ID NO: 5314457 - DNA, 25 bp, Homo sapien
gtcttataatatggcttcacactga

SEQ ID NO: 5314458 - DNA, 25 bp, Homo sapien
gtcccagtggactcatagtggaata

SEQ ID NO: 5314459 - DNA, 25 bp, Homo sapien
taaccccaaccagctatggtaagag

SEQ ID NO: 5314460 - DNA, 25 bp, Homo sapien
ggtaagagtatgtggtatgagtccc

SEQ ID NO: 5314461 - DNA, 25 bp, Homo sapien
taagagacttcactgtttgggcaag

SEQ ID NO: 5314462 - DNA, 25 bp, Homo sapien
tcattgcacggcatagactcagccc

SEQ ID NO: 5314463 - DNA, 25 bp, Homo sapien
gagcaccacgtgaagtttagcagct

SEQ ID NO: 5314464 - DNA, 25 bp, Homo sapien
ggcaagacattaccctacctaggcg

SEQ ID NO: 5314465 - DNA, 25 bp, Homo sapien
tgcagcatatcataatccacgtcta

SEQ ID NO: 5314466 - DNA, 25 bp, Homo sapien
cataatccacgtctacttcaactgg

SEQ ID NO: 5314467 - DNA, 25 bp, Homo sapien
tcaactggactgtatggcctttgag

SEQ ID NO: 5314468 - DNA, 25 bp, Homo sapien
tatggcctttgagctaattccttgt

SEQ ID NO: 5314469 - DNA, 25 bp, Homo sapien
tttcatctctctggtatttggaagc

SEQ ID NO: 5314470 - DNA, 25 bp, Homo sapien
tctctggtatttggaagctgttttt

SEQ ID NO: 5314471 - DNA, 25 bp, Homo sapien
catctctctggtatttggaagctgt

SEQ ID NO: 5314472 - DNA, 25 bp, Homo sapien
ctctggtatttggaagctgtttttt

SEQ ID NO: 5314473 - DNA, 25 bp, Homo sapien
ttcttcatcactctgtcctgaccaa

SEQ ID NO: 5314474 - DNA, 25 bp, Homo sapien
aattcttcatcactctgtcctgacc

SEQ ID NO: 5314475 - DNA, 25 bp, Homo sapien
ttaattcttcatcactctgtcctga

SEQ ID NO: 5314476 - DNA, 25 bp, Homo sapien
tcttcatcactctgtcctgaccaac

SEQ ID NO: 5314477 - DNA, 25 bp, Homo sapien
gaatccttaagggagtccacatctt

SEQ ID NO: 5314478 - DNA, 25 bp, Homo sapien
ctttcctattctgacctcccggatg

SEQ ID NO: 5314479 - DNA, 25 bp, Homo sapien
tgggtcttcatcactagttgtgtgt

SEQ ID NO: 5314480 - DNA, 25 bp, Homo sapien
ctgaatccttaagggagtccacatc

SEQ ID NO: 5314481 - DNA, 25 bp, Homo sapien
gaccattcagtggttgctcctaccc

SEQ ID NO: 5314482 - DNA, 25 bp, Homo sapien
aagaccattcagtggttgctcctac

SEQ ID NO: 5314483 - DNA, 25 bp, Homo sapien
ttaagaccattcagtggttgctcct

SEQ ID NO: 5314484 - DNA, 25 bp, Homo sapien
ccattcagtggttgctcctacccat

SEQ ID NO: 5314485 - DNA, 25 bp, Homo sapien
gctcgtgtgacctcagtgcctaata

SEQ ID NO: 5314486 - DNA, 25 bp, Homo sapien
cagtgcctaatacagcctccatctg

SEQ ID NO: 5314487 - DNA, 25 bp, Homo sapien
ccttagggctcgtgtgacctcagtg

SEQ ID NO: 5314488 - DNA, 25 bp, Homo sapien
tgacctcagtgcctaatacagcctc

SEQ ID NO: 5314489 - DNA, 25 bp, Homo sapien
gaagctactgcagtgtactgggtag

SEQ ID NO: 5314490 - DNA, 25 bp, Homo sapien
gagtggaggtgtaaaaaggcttcca

SEQ ID NO: 5314491 - DNA, 25 bp, Homo sapien
agatgaaggctagtgaatggctgaa

SEQ ID NO: 5314492 - DNA, 25 bp, Homo sapien
gagacaggaggagcttactttccat

SEQ ID NO: 5314493 - DNA, 25 bp, Homo sapien
cactaaaatgcttgtggcctctaaa

SEQ ID NO: 5314494 - DNA, 25 bp, Homo sapien
tcaccaagcaatctttgtgttgtaa

SEQ ID NO: 5314495 - DNA, 25 bp, Homo sapien
cctgttttgatcacatgctcaccaa

SEQ ID NO: 5314496 - DNA, 25 bp, Homo sapien
ttaacttctcgtacaggaggcgtta

SEQ ID NO: 5314497 - DNA, 25 bp, Homo sapien
caatgtggactaactctttgggtaa

SEQ ID NO: 5314498 - DNA, 25 bp, Homo sapien
taactctttgggtaatatattaagc

SEQ ID NO: 5314499 - DNA, 25 bp, Homo sapien
ggattaactcccagttcaatgtgga

SEQ ID NO: 5314500 - DNA, 25 bp, Homo sapien
gacagacaaggattaactcccagtt

SEQ ID NO: 5314501 - DNA, 25 bp, Homo sapien
aagtctcttattcttcctcagcctg

SEQ ID NO: 5314502 - DNA, 25 bp, Homo sapien
caagtctcttattcttcctcagcct

SEQ ID NO: 5314503 - DNA, 25 bp, Homo sapien
aagactcttgtactccattcctcca

SEQ ID NO: 5314504 - DNA, 25 bp, Homo sapien
gtgttaactattccaagtgtgtgta

SEQ ID NO: 5314505 - DNA, 25 bp, Homo sapien
tcacttatgatcaggcaaggcaata

SEQ ID NO: 5314506 - DNA, 25 bp, Homo sapien
ggcaaggcaataagactcttgtact

SEQ ID NO: 5314507 - DNA, 25 bp, Homo sapien
cactagaatagcaaagcctctgatt

SEQ ID NO: 5314508 - DNA, 25 bp, Homo sapien
actacacagcctctcattaaggcca

SEQ ID NO: 5314509 - DNA, 25 bp, Homo sapien
tctgatttttaactacacagcctct

SEQ ID NO: 5314510 - DNA, 25 bp, Homo sapien
ccagtagcccactagaatagcaaag

SEQ ID NO: 5314511 - DNA, 25 bp, Homo sapien
tcaggtccccaagaattttgaacat

SEQ ID NO: 5314512 - DNA, 25 bp, Homo sapien
aaatatccacactgattcaggtccc

SEQ ID NO: 5314513 - DNA, 25 bp, Homo sapien
agaaacactctctgtggacccaaac

SEQ ID NO: 5314514 - DNA, 25 bp, Homo sapien
attttgaacataacctaaagctgac

SEQ ID NO: 5314515 - DNA, 25 bp, Homo sapien
gacagagcctgagggagcagccgac

SEQ ID NO: 5314516 - DNA, 25 bp, Homo sapien
ccagacagagcctgagggagcagcc

SEQ ID NO: 5314517 - DNA, 25 bp, Homo sapien
tcatccagacagagcctgagggagc

SEQ ID NO: 5314518 - DNA, 25 bp, Homo sapien
catccagacagagcctgagggagca

SEQ ID NO: 5314519 - DNA, 25 bp, Homo sapien
cacttggctgaaggaaactggctgc

SEQ ID NO: 5314520 - DNA, 25 bp, Homo sapien
ctgcacttggctgaaggaaactggc

SEQ ID NO: 5314521 - DNA, 25 bp, Homo sapien
ttggctgaaggaaactggctgccat

SEQ ID NO: 5314522 - DNA, 25 bp, Homo sapien
tgcacttggctgaaggaaactggct

SEQ ID NO: 5314523 - DNA, 25 bp, Homo sapien
cagagctcctctaaccattaccccc

SEQ ID NO: 5314524 - DNA, 25 bp, Homo sapien
ctctctctacacaggattctgaatc

SEQ ID NO: 5314525 - DNA, 25 bp, Homo sapien
tctctctacacaggattctgaatcc

SEQ ID NO: 5314526 - DNA, 25 bp, Homo sapien
tcagagctcctctaaccattacccc

SEQ ID NO: 5314527 - DNA, 25 bp, Homo sapien
ttaaagagtaaaggatgacggtagc

SEQ ID NO: 5314528 - DNA, 25 bp, Homo sapien
tgggtaaggttaccagaacaacaca

SEQ ID NO: 5314529 - DNA, 25 bp, Homo sapien
tcattcaggcctcataaagtaggca

SEQ ID NO: 5314530 - DNA, 25 bp, Homo sapien
tgacggtagctacagtttccagatg

SEQ ID NO: 5314531 - DNA, 25 bp, Homo sapien
tgtgtataaattcctcaatattacc

SEQ ID NO: 5314532 - DNA, 25 bp, Homo sapien
cagaacaggtgccaggatccaaaat

SEQ ID NO: 5314533 - DNA, 25 bp, Homo sapien
ctataagaacagaacaggtgccagg

SEQ ID NO: 5314534 - DNA, 25 bp, Homo sapien
tcaatattacccagaagaatttcta

SEQ ID NO: 5314535 - DNA, 25 bp, Homo sapien
acactgaatttgaacttagacagga

SEQ ID NO: 5314536 - DNA, 25 bp, Homo sapien
acaggaagcctgttgtatgtttctc

SEQ ID NO: 5314537 - DNA, 25 bp, Homo sapien
gaacttagacaggaagcctgttgta

SEQ ID NO: 5314538 - DNA, 25 bp, Homo sapien
gaatttgaacttagacaggaagcct

SEQ ID NO: 5314539 - DNA, 25 bp, Homo sapien
tatctgagagattttgagaaagctt

SEQ ID NO: 5314540 - DNA, 25 bp, Homo sapien
ttggtgcagtcctttgtatttggca

SEQ ID NO: 5314541 - DNA, 25 bp, Homo sapien
ttcccttgctgtccaagtaacaagt

SEQ ID NO: 5314542 - DNA, 25 bp, Homo sapien
tcttggtgcagtcctttgtatttgg

SEQ ID NO: 5314543 - DNA, 25 bp, Homo sapien
gataacaggccctccaagagtggca

SEQ ID NO: 5314544 - DNA, 25 bp, Homo sapien
gaagccaagaagcatatccctcagc

SEQ ID NO: 5314545 - DNA, 25 bp, Homo sapien
tctgagctgatgcatgactagcctc

SEQ ID NO: 5314546 - DNA, 25 bp, Homo sapien
gaaaccttagtgcatgtcagggaaa

SEQ ID NO: 5314547 - DNA, 25 bp, Homo sapien
agtccactgatgagcctattaaaag

SEQ ID NO: 5314548 - DNA, 25 bp, Homo sapien
gaatacagtctatcttagtcaaagt

SEQ ID NO: 5314549 - DNA, 25 bp, Homo sapien
cattagaccccttaccacattgatt

SEQ ID NO: 5314550 - DNA, 25 bp, Homo sapien
tgattgtttgttcaaccatgtccag

SEQ ID NO: 5314551 - DNA, 25 bp, Homo sapien
gccagatgctccaatacccgaggca

SEQ ID NO: 5314552 - DNA, 25 bp, Homo sapien
ccagatgctccaatacccgaggcac

SEQ ID NO: 5314553 - DNA, 25 bp, Homo sapien
tctaggcaaagagctccaataaaca

SEQ ID NO: 5314554 - DNA, 25 bp, Homo sapien
cttgttctccagaataccatgaatc

SEQ ID NO: 5314555 - DNA, 25 bp, Homo sapien
tctccagaataccatgaatccaatt

SEQ ID NO: 5314556 - DNA, 25 bp, Homo sapien
tgaatccaattatcagttctaggca

SEQ ID NO: 5314557 - DNA, 25 bp, Homo sapien
tcataggcattgttagctctgcctg

SEQ ID NO: 5314558 - DNA, 25 bp, Homo sapien
taggcattgttagctctgcctgtgc

SEQ ID NO: 5314559 - DNA, 25 bp, Homo sapien
cttcataggcattgttagctctgcc

SEQ ID NO: 5314560 - DNA, 25 bp, Homo sapien
aaacttgccaaactcctttcatcct

SEQ ID NO: 5314561 - DNA, 25 bp, Homo sapien
ttgattctttctcttcaagtctcat

SEQ ID NO: 5314562 - DNA, 25 bp, Homo sapien
gcttgattctttctcttcaagtctc

SEQ ID NO: 5314563 - DNA, 25 bp, Homo sapien
cttgattctttctcttcaagtctca

SEQ ID NO: 5314564 - DNA, 25 bp, Homo sapien
ctcagatgtttatgtacctagtaac

SEQ ID NO: 5314565 - DNA, 25 bp, Homo sapien
tcagatgtttatgtacctagtaaca

SEQ ID NO: 5314566 - DNA, 25 bp, Homo sapien
aatttttgaagcgaaatctgataga

SEQ ID NO: 5314567 - DNA, 25 bp, Homo sapien
aaaatttttgaagcgaaatctgata

SEQ ID NO: 5314568 - DNA, 25 bp, Homo sapien
ggcaggaaggataagtgccgagaaa

SEQ ID NO: 5314569 - DNA, 25 bp, Homo sapien
gcaggaaggataagtgccgagaaaa

SEQ ID NO: 5314570 - DNA, 25 bp, Homo sapien
gaaggataagtgccgagaaaaagac

SEQ ID NO: 5314571 - DNA, 25 bp, Homo sapien
gtgcacttacaggcccaacaccctt

SEQ ID NO: 5314572 - DNA, 25 bp, Homo sapien
aatggataccacagggagtccacac

SEQ ID NO: 5314573 - DNA, 25 bp, Homo sapien
agctttgaccaaaggccatgcaaaa

SEQ ID NO: 5314574 - DNA, 25 bp, Homo sapien
tctgagagcaagctttgaccaaagg

SEQ ID NO: 5314575 - DNA, 25 bp, Homo sapien
taaatttattcacaatggataccac

SEQ ID NO: 5314576 - DNA, 25 bp, Homo sapien
gtaaaaatcgttttacatcacatct

SEQ ID NO: 5314577 - DNA, 25 bp, Homo sapien
tacatcacatctttctaaataggtc

SEQ ID NO: 5314578 - DNA, 25 bp, Homo sapien
aatcgttttacatcacatctttcta

SEQ ID NO: 5314579 - DNA, 25 bp, Homo sapien
catctttctaaataggtcatgaagg

SEQ ID NO: 5314580 - DNA, 25 bp, Homo sapien
ctccagccctacaatgagagtcaat

SEQ ID NO: 5314581 - DNA, 25 bp, Homo sapien
tacaatgagagtcaatttgagccat

SEQ ID NO: 5314582 - DNA, 25 bp, Homo sapien
gatctccagccctacaatgagagtc

SEQ ID NO: 5314583 - DNA, 25 bp, Homo sapien
aagatctccagccctacaatgagag

SEQ ID NO: 5314584 - DNA, 25 bp, Homo sapien
gaaaggaggtagctgttatagtctt

SEQ ID NO: 5314585 - DNA, 25 bp, Homo sapien
tatttcaatagtcagaaactacatg

SEQ ID NO: 5314586 - DNA, 25 bp, Homo sapien
tcttaatcatatgttaatgcatgaa

SEQ ID NO: 5314587 - DNA, 25 bp, Homo sapien
gtcagaaactacatggaagggaaag

SEQ ID NO: 5314588 - DNA, 25 bp, Homo sapien
cataatttggagatgagtccactgt

SEQ ID NO: 5314589 - DNA, 25 bp, Homo sapien
tcagtcccacctttttgcacccagt

SEQ ID NO: 5314590 - DNA, 25 bp, Homo sapien
tattccataatttggagatgagtcc

SEQ ID NO: 5314591 - DNA, 25 bp, Homo sapien
cccagaattagacttagactgtgct

SEQ ID NO: 5314592 - DNA, 25 bp, Homo sapien
gctttcatgctaatatctttaccca

SEQ ID NO: 5314593 - DNA, 25 bp, Homo sapien
tgcaagcctctccaggtttgacact

SEQ ID NO: 5314594 - DNA, 25 bp, Homo sapien
ggtttgacactgtttgctgctttca

SEQ ID NO: 5314595 - DNA, 25 bp, Homo sapien
tgctttcatgctaatatctttaccc

SEQ ID NO: 5314596 - DNA, 25 bp, Homo sapien
gaaaagtttacgatgcgaatcctaa

SEQ ID NO: 5314597 - DNA, 25 bp, Homo sapien
tagacacaacagatacaccttaaac

SEQ ID NO: 5314598 - DNA, 25 bp, Homo sapien
caaatacagtgtttgtggcaagaca

SEQ ID NO: 5314599 - DNA, 25 bp, Homo sapien
taaaaaacgacaacagtagacacaa

SEQ ID NO: 5314600 - DNA, 25 bp, Homo sapien
ttcttttctgaagctgacccctcca

SEQ ID NO: 5314601 - DNA, 25 bp, Homo sapien
taccagaactatgcacttgaccatt

SEQ ID NO: 5314602 - DNA, 25 bp, Homo sapien
aggaactccaccactggtacttcgc

SEQ ID NO: 5314603 - DNA, 25 bp, Homo sapien
gacccctccacctatgctgtcttta

SEQ ID NO: 5314604 - DNA, 25 bp, Homo sapien
tctgggcagccttacacctacctaa

SEQ ID NO: 5314605 - DNA, 25 bp, Homo sapien
caagatttcaggtggaggactttga

SEQ ID NO: 5314606 - DNA, 25 bp, Homo sapien
tgggtctgatgatcgatgaatcaac

SEQ ID NO: 5314607 - DNA, 25 bp, Homo sapien
gcaccctagggcaaaagcatcatcc

SEQ ID NO: 5314608 - DNA, 25 bp, Homo sapien
tctgacccacaaggaagctgtgaca

SEQ ID NO: 5314609 - DNA, 25 bp, Homo sapien
gtgaaagctcttatcagcagaacag

SEQ ID NO: 5314610 - DNA, 25 bp, Homo sapien
tccactttagagagtgcttagcagc

SEQ ID NO: 5314611 - DNA, 25 bp, Homo sapien
tatccaaagagttgttccactttag

SEQ ID NO: 5314612 - DNA, 25 bp, Homo sapien
tcacactgagtatacagttatacca

SEQ ID NO: 5314613 - DNA, 25 bp, Homo sapien
cttcacactgagtatacagttatac

SEQ ID NO: 5314614 - DNA, 25 bp, Homo sapien
cactgagtatacagttataccaaga

SEQ ID NO: 5314615 - DNA, 25 bp, Homo sapien
tgagtatacagttataccaagacat

SEQ ID NO: 5314616 - DNA, 25 bp, Homo sapien
tgcacttcccaagaaggcacataga

SEQ ID NO: 5314617 - DNA, 25 bp, Homo sapien
gaaagcttcactagatccaaagtgt

SEQ ID NO: 5314618 - DNA, 25 bp, Homo sapien
tgttgatgacagcactaaaacctcc

SEQ ID NO: 5314619 - DNA, 25 bp, Homo sapien
tactgaaccaggaggacgagatcac

SEQ ID NO: 5314620 - DNA, 25 bp, Homo sapien
ctttgcagggcgcatattgttggct

SEQ ID NO: 5314621 - DNA, 25 bp, Homo sapien
cacctggtgttgcaacactgctgtc

SEQ ID NO: 5314622 - DNA, 25 bp, Homo sapien
tcctctagcaatgaccacctggtgt

SEQ ID NO: 5314623 - DNA, 25 bp, Homo sapien
cataagggctgttaaggagctttcc

SEQ ID NO: 5314624 - DNA, 25 bp, Homo sapien
taaatcccatgctctgagaaaagct

SEQ ID NO: 5314625 - DNA, 25 bp, Homo sapien
gctgaagactttctccctccttagt

SEQ ID NO: 5314626 - DNA, 25 bp, Homo sapien
aagctgaagactttctccctcctta

SEQ ID NO: 5314627 - DNA, 25 bp, Homo sapien
tgaagactttctccctccttagtcc

SEQ ID NO: 5314628 - DNA, 25 bp, Homo sapien
tattcaaatgccttatgtgccagtg

SEQ ID NO: 5314629 - DNA, 25 bp, Homo sapien
aatgccttatgtgccagtgacactg

SEQ ID NO: 5314630 - DNA, 25 bp, Homo sapien
tcaaatgccttatgtgccagtgaca

SEQ ID NO: 5314631 - DNA, 25 bp, Homo sapien
gccttatgtgccagtgacactggag

SEQ ID NO: 5314632 - DNA, 25 bp, Homo sapien
atctggagggctgggtttactcatc

SEQ ID NO: 5314633 - DNA, 25 bp, Homo sapien
cactgagaacccagacaatatggat

SEQ ID NO: 5314634 - DNA, 25 bp, Homo sapien
taggtaacctgaggcactgctctcc

SEQ ID NO: 5314635 - DNA, 25 bp, Homo sapien
gagttaggagccaccctgtctgtca

SEQ ID NO: 5314636 - DNA, 25 bp, Homo sapien
gactttctacctgttcccagatcca

SEQ ID NO: 5314637 - DNA, 25 bp, Homo sapien
ctcagaagtgccctctcttctaccc

SEQ ID NO: 5314638 - DNA, 25 bp, Homo sapien
ttcttctcctacaaacttgcctgac

SEQ ID NO: 5314639 - DNA, 25 bp, Homo sapien
tcttctacccatggctgactttcta

SEQ ID NO: 5314640 - DNA, 25 bp, Homo sapien
tcaccagggccatcacagagtctgt

SEQ ID NO: 5314641 - DNA, 25 bp, Homo sapien
tacataacgttaccaccgaagtggc

SEQ ID NO: 5314642 - DNA, 25 bp, Homo sapien
caccgctccttgatgacttttggca

SEQ ID NO: 5314643 - DNA, 25 bp, Homo sapien
ggcaaggttccattccgaagttcaa

SEQ ID NO: 5314644 - DNA, 25 bp, Homo sapien
gagacatgatgtctaaattcttact

SEQ ID NO: 5314645 - DNA, 25 bp, Homo sapien
taatcttgctatgcactctgatgca

SEQ ID NO: 5314646 - DNA, 25 bp, Homo sapien
gaaagcaagtacatagccattaatc

SEQ ID NO: 5314647 - DNA, 25 bp, Homo sapien
tgcactctgatgcaatttgttcccc

SEQ ID NO: 5314648 - DNA, 25 bp, Homo sapien
tggagaagctgcaaaagtatcccta

SEQ ID NO: 5314649 - DNA, 25 bp, Homo sapien
ctttttcctcagtctatggatggaa

SEQ ID NO: 5314650 - DNA, 25 bp, Homo sapien
aatttctcctgccaaacatcttgga

SEQ ID NO: 5314651 - DNA, 25 bp, Homo sapien
aagtatccctaccagaagtctctcc

SEQ ID NO: 5314652 - DNA, 25 bp, Homo sapien
gcacaagcacaagtttaagagcagg

SEQ ID NO: 5314653 - DNA, 25 bp, Homo sapien
gcagagtgagtaacaaattgaattc

SEQ ID NO: 5314654 - DNA, 25 bp, Homo sapien
caagatgaattgtgttctcagactg

SEQ ID NO: 5314655 - DNA, 25 bp, Homo sapien
gagaatgaaattaggtaaagcttgc

SEQ ID NO: 5314656 - DNA, 25 bp, Homo sapien
tttagaaaaatagcttgtctttgtc

SEQ ID NO: 5314657 - DNA, 25 bp, Homo sapien
agaaaaatagcttgtctttgtctaa

SEQ ID NO: 5314658 - DNA, 25 bp, Homo sapien
ggtctccatcgcacaattttagaaa

SEQ ID NO: 5314659 - DNA, 25 bp, Homo sapien
tgtcttggtctccatcgcacaattt

SEQ ID NO: 5314660 - DNA, 25 bp, Homo sapien
ttcacaacaaattaggacacatttc

SEQ ID NO: 5314661 - DNA, 25 bp, Homo sapien
tctgtcaagtctaaagacactttac

SEQ ID NO: 5314662 - DNA, 25 bp, Homo sapien
tgtattatctgtcaagtctaaagac

SEQ ID NO: 5314663 - DNA, 25 bp, Homo sapien
gcaattgcatgattagaagagtaaa

SEQ ID NO: 5314664 - DNA, 25 bp, Homo sapien
ctgagctccaccttctccagtagtc

SEQ ID NO: 5314665 - DNA, 25 bp, Homo sapien
gagctccaccttctccagtagtcat

SEQ ID NO: 5314666 - DNA, 25 bp, Homo sapien
tgagctccaccttctccagtagtca

SEQ ID NO: 5314667 - DNA, 25 bp, Homo sapien
gacacagcaacaatctgatttctct

SEQ ID NO: 5314668 - DNA, 25 bp, Homo sapien
acacagcaacaatctgatttctcta

SEQ ID NO: 5314669 - DNA, 25 bp, Homo sapien
acagcaacaatctgatttctctatc

SEQ ID NO: 5314670 - DNA, 25 bp, Homo sapien
cagcaacaatctgatttctctatct

SEQ ID NO: 5314671 - DNA, 25 bp, Homo sapien
agcctgatttctcctcaggttgttc

SEQ ID NO: 5314672 - DNA, 25 bp, Homo sapien
gaaagcccaagataatagcctgatt

SEQ ID NO: 5314673 - DNA, 25 bp, Homo sapien
cccaagataatagcctgatttctcc

SEQ ID NO: 5314674 - DNA, 25 bp, Homo sapien
aatgttgattatctgcagaaagccc

SEQ ID NO: 5314675 - DNA, 25 bp, Homo sapien
cagacttaaaggacccttagttgca

SEQ ID NO: 5314676 - DNA, 25 bp, Homo sapien
aggacccttagttgcatgttgtgaa

SEQ ID NO: 5314677 - DNA, 25 bp, Homo sapien
ccttagttgcatgttgtgaatatca

SEQ ID NO: 5314678 - DNA, 25 bp, Homo sapien
ttaaaggacccttagttgcatgttg

SEQ ID NO: 5314679 - DNA, 25 bp, Homo sapien
tattaattgacacagccatcaccac

SEQ ID NO: 5314680 - DNA, 25 bp, Homo sapien
gatgaggatactaaagatctactcc

SEQ ID NO: 5314681 - DNA, 25 bp, Homo sapien
ttcacttaatgacatcacaaatggc

SEQ ID NO: 5314682 - DNA, 25 bp, Homo sapien
taccctttgactaaccatatgaact

SEQ ID NO: 5314683 - DNA, 25 bp, Homo sapien
atttttgaggaacaacaatagtttg

SEQ ID NO: 5314684 - DNA, 25 bp, Homo sapien
atagtttgccataatgctgtaccat

SEQ ID NO: 5314685 - DNA, 25 bp, Homo sapien
gccaatatttgctgtctctagtctt

SEQ ID NO: 5314686 - DNA, 25 bp, Homo sapien
gattactatatcatacagtagctct

SEQ ID NO: 5314687 - DNA, 25 bp, Homo sapien
cataagatctaagagcctttgagca

SEQ ID NO: 5314688 - DNA, 25 bp, Homo sapien
gctttggtcggtatggccagttaaa

SEQ ID NO: 5314689 - DNA, 25 bp, Homo sapien
ccagttaaacagtagtgattcttcc

SEQ ID NO: 5314690 - DNA, 25 bp, Homo sapien
cattggtagataggaacagcattga

SEQ ID NO: 5314691 - DNA, 25 bp, Homo sapien
tcatatatgatcaaactgcgctaga

SEQ ID NO: 5314692 - DNA, 25 bp, Homo sapien
tcaaactgcgctagaatgttcacac

SEQ ID NO: 5314693 - DNA, 25 bp, Homo sapien
tatatgatcaaactgcgctagaatg

SEQ ID NO: 5314694 - DNA, 25 bp, Homo sapien
gatcaaactgcgctagaatgttcac

SEQ ID NO: 5314695 - DNA, 25 bp, Homo sapien
ttggttgccagaatgctcccagcca

SEQ ID NO: 5314696 - DNA, 25 bp, Homo sapien
caatgttaaggccctcagacgtttt

SEQ ID NO: 5314697 - DNA, 25 bp, Homo sapien
ctgcttggttgccagaatgctccca

SEQ ID NO: 5314698 - DNA, 25 bp, Homo sapien
cctctgcttggttgccagaatgctc

SEQ ID NO: 5314699 - DNA, 25 bp, Homo sapien
tgaagagtgtgttggattgtagatt

SEQ ID NO: 5314700 - DNA, 25 bp, Homo sapien
agagtgtgttggattgtagattgtt

SEQ ID NO: 5314701 - DNA, 25 bp, Homo sapien
ttatgaagagtgtgttggattgtag

SEQ ID NO: 5314702 - DNA, 25 bp, Homo sapien
tatgaagagtgtgttggattgtaga

SEQ ID NO: 5314703 - DNA, 25 bp, Homo sapien
tcatcattcctttcctcatggctac

SEQ ID NO: 5314704 - DNA, 25 bp, Homo sapien
ctaaatcatcattcctttcctcatg

SEQ ID NO: 5314705 - DNA, 25 bp, Homo sapien
aatcatcattcctttcctcatggct

SEQ ID NO: 5314706 - DNA, 25 bp, Homo sapien
aaatcatcattcctttcctcatggc

SEQ ID NO: 5314707 - DNA, 25 bp, Homo sapien
aatcttatcgatgagaacatatata

SEQ ID NO: 5314708 - DNA, 25 bp, Homo sapien
tcttgaatcttatcgatgagaacat

SEQ ID NO: 5314709 - DNA, 25 bp, Homo sapien
ttgaatcttatcgatgagaacatat

SEQ ID NO: 5314710 - DNA, 25 bp, Homo sapien
aacttcctccaaaagttctgaatat

SEQ ID NO: 5314711 - DNA, 25 bp, Homo sapien
ctgtatcgctccaatgttagcatct

SEQ ID NO: 5314712 - DNA, 25 bp, Homo sapien
aatgttagcatctgtgccgctgaag

SEQ ID NO: 5314713 - DNA, 25 bp, Homo sapien
agaatgctttatgagtttgcgtgtc

SEQ ID NO: 5314714 - DNA, 25 bp, Homo sapien
ttgcgcagcggccacgctagtcttc

SEQ ID NO: 5314715 - DNA, 25 bp, Homo sapien
gcaaaagcacttaaagggccacgct

SEQ ID NO: 5314716 - DNA, 25 bp, Homo sapien
tgatgaagctaatgggcaaaagcac

SEQ ID NO: 5314717 - DNA, 25 bp, Homo sapien
ttgttgttattgatgccgccaagcc

SEQ ID NO: 5314718 - DNA, 25 bp, Homo sapien
ccaagcctgcaattacttgatgaag

SEQ ID NO: 5314719 - DNA, 25 bp, Homo sapien
cagcctgaggccaataaaacttttt

SEQ ID NO: 5314720 - DNA, 25 bp, Homo sapien
caggacaacgtcaataatataccca

SEQ ID NO: 5314721 - DNA, 25 bp, Homo sapien
tttggaatataattgcaaacttcag

SEQ ID NO: 5314722 - DNA, 25 bp, Homo sapien
cgtcaataatatacccactttgggt

SEQ ID NO: 5314723 - DNA, 25 bp, Homo sapien
catatggattccacatgaggacatt

SEQ ID NO: 5314724 - DNA, 25 bp, Homo sapien
gctttgcagctatctaaagatttta

SEQ ID NO: 5314725 - DNA, 25 bp, Homo sapien
tccacgtaggtgtgaatctgaggag

SEQ ID NO: 5314726 - DNA, 25 bp, Homo sapien
cctgttggtttccacgtaggtgtga

SEQ ID NO: 5314727 - DNA, 25 bp, Homo sapien
cattatcacatttctcttttgccct

SEQ ID NO: 5314728 - DNA, 25 bp, Homo sapien
ctcattatcacatttctcttttgcc

SEQ ID NO: 5314729 - DNA, 25 bp, Homo sapien
catcctcattatcacatttctcttt

SEQ ID NO: 5314730 - DNA, 25 bp, Homo sapien
catcatcatcctcattatcacattt

SEQ ID NO: 5314731 - DNA, 25 bp, Homo sapien
tttcccaagaggatgagttgcagtg

SEQ ID NO: 5314732 - DNA, 25 bp, Homo sapien
tagacacctccttatcagcaacaat

SEQ ID NO: 5314733 - DNA, 25 bp, Homo sapien
caagattttgatagtaagagttgta

SEQ ID NO: 5314734 - DNA, 25 bp, Homo sapien
cattaaatgcaaatctctagacacc

SEQ ID NO: 5314735 - DNA, 25 bp, Homo sapien
gcctggggaacatagggagattcca

SEQ ID NO: 5314736 - DNA, 25 bp, Homo sapien
cgcttgagctcagaaattcaagatc

SEQ ID NO: 5314737 - DNA, 25 bp, Homo sapien
cttactaaaatgctctctggccagg

SEQ ID NO: 5314738 - DNA, 25 bp, Homo sapien
catggtggctcacgcctataatcct

SEQ ID NO: 5314739 - DNA, 25 bp, Homo sapien
tgcggcaacgctcaaagtgtagcat

SEQ ID NO: 5314740 - DNA, 25 bp, Homo sapien
gcaggttcttgagccggaggaataa

SEQ ID NO: 5314741 - DNA, 25 bp, Homo sapien
ttgaattcacctgactgcggcaacg

SEQ ID NO: 5314742 - DNA, 25 bp, Homo sapien
tatggcgaccagttcatttgaagga

SEQ ID NO: 5314743 - DNA, 25 bp, Homo sapien
gagctgtaacatacctttcaaccga

SEQ ID NO: 5314744 - DNA, 25 bp, Homo sapien
ttgaaggtcccagatatttttgcag

SEQ ID NO: 5314745 - DNA, 25 bp, Homo sapien
gaaactatggatcctacaggaaatg

SEQ ID NO: 5314746 - DNA, 25 bp, Homo sapien
ccctgagcagaaaatccacttgtga

SEQ ID NO: 5314747 - DNA, 25 bp, Homo sapien
gttttggatgttcccctcagcagac

SEQ ID NO: 5314748 - DNA, 25 bp, Homo sapien
cagcaagagccttctaggacaccac

SEQ ID NO: 5314749 - DNA, 25 bp, Homo sapien
tcatgtgaaatgcaagacagactca

SEQ ID NO: 5314750 - DNA, 25 bp, Homo sapien
acagactcaagtgggtttccgaggg

SEQ ID NO: 5314751 - DNA, 25 bp, Homo sapien
tggttccttgatctcgcccatggga

SEQ ID NO: 5314752 - DNA, 25 bp, Homo sapien
tctgcagcatgcatagcggactgtt

SEQ ID NO: 5314753 - DNA, 25 bp, Homo sapien
tggaggtggaacaagacacatcact

SEQ ID NO: 5314754 - DNA, 25 bp, Homo sapien
gaggcctgcgcattccaaggatgct

SEQ ID NO: 5314755 - DNA, 25 bp, Homo sapien
tccctcctcctatgagactgaactg

SEQ ID NO: 5314756 - DNA, 25 bp, Homo sapien
cataacaattggacctattctaaaa

SEQ ID NO: 5314757 - DNA, 25 bp, Homo sapien
tcaaagccatgctaaatggaggaaa

SEQ ID NO: 5314758 - DNA, 25 bp, Homo sapien
gactgaactgtgttgtttcttagaa

SEQ ID NO: 5314759 - DNA, 25 bp, Homo sapien
gtattccaaagatccacacagaact

SEQ ID NO: 5314760 - DNA, 25 bp, Homo sapien
gggccttgcaaaaggctctgagaca

SEQ ID NO: 5314761 - DNA, 25 bp, Homo sapien
gcactgaaccttcttggtagtaaga

SEQ ID NO: 5314762 - DNA, 25 bp, Homo sapien
cacagaacttcacacaaaggaccag

SEQ ID NO: 5314763 - DNA, 25 bp, Homo sapien
gaagcccccagtaagcagaattgct

SEQ ID NO: 5314764 - DNA, 25 bp, Homo sapien
cccacggagtgtggctcatgagtgt

SEQ ID NO: 5314765 - DNA, 25 bp, Homo sapien
tgcaactgcaggaagcccccagtaa

SEQ ID NO: 5314766 - DNA, 25 bp, Homo sapien
ctgcctgaaccccacggagtgtggc

SEQ ID NO: 5314767 - DNA, 25 bp, Homo sapien
ctgacacaaactccactggagacag

SEQ ID NO: 5314768 - DNA, 25 bp, Homo sapien
ccacttccactctgacacaaactcc

SEQ ID NO: 5314769 - DNA, 25 bp, Homo sapien
cactctgacacaaactccactggag

SEQ ID NO: 5314770 - DNA, 25 bp, Homo sapien
acacaaactccactggagacaggct

SEQ ID NO: 5314771 - DNA, 25 bp, Homo sapien
ccctccaattccatacacatttctg

SEQ ID NO: 5314772 - DNA, 25 bp, Homo sapien
aatgacattctgactggcttctctg

SEQ ID NO: 5314773 - DNA, 25 bp, Homo sapien
ttgggcatggtaatgacattctgac

SEQ ID NO: 5314774 - DNA, 25 bp, Homo sapien
catggtaatgacattctgactggct

SEQ ID NO: 5314775 - DNA, 25 bp, Homo sapien
tctcacgtgtaaagacactcacagg

SEQ ID NO: 5314776 - DNA, 25 bp, Homo sapien
cagactggcctcctctcaatatgat

SEQ ID NO: 5314777 - DNA, 25 bp, Homo sapien
ttacctgaagtcatgaacagtgcca

SEQ ID NO: 5314778 - DNA, 25 bp, Homo sapien
ttctgtaagctgtcaaatatgagcc

SEQ ID NO: 5314779 - DNA, 25 bp, Homo sapien
ctagtgggtaaataatgaaatgaac

SEQ ID NO: 5314780 - DNA, 25 bp, Homo sapien
taaagcagggtgtagagggaaatgt

SEQ ID NO: 5314781 - DNA, 25 bp, Homo sapien
gtgggtaaataatgaaatgaacgca

SEQ ID NO: 5314782 - DNA, 25 bp, Homo sapien
tctgtctgatcacagtgcaatcaaa

SEQ ID NO: 5314783 - DNA, 25 bp, Homo sapien
gaaaaagctgggtgctatcttacaa

SEQ ID NO: 5314784 - DNA, 25 bp, Homo sapien
tatcagaatgtccacctggttttct

SEQ ID NO: 5314785 - DNA, 25 bp, Homo sapien
tatcttacaaatcagagacttaggg

SEQ ID NO: 5314786 - DNA, 25 bp, Homo sapien
attatcagaatgtccacctggtttt

SEQ ID NO: 5314787 - DNA, 25 bp, Homo sapien
gaggtggcgcctcattaatctagga

SEQ ID NO: 5314788 - DNA, 25 bp, Homo sapien
gccacaggatcccaacaggacagaa

SEQ ID NO: 5314789 - DNA, 25 bp, Homo sapien
gctggcccgctctcatctattttaa

SEQ ID NO: 5314790 - DNA, 25 bp, Homo sapien
tactgcttcataggaacaaagctgc

SEQ ID NO: 5314791 - DNA, 25 bp, Homo sapien
cttgcctttgcagattagaattggg

SEQ ID NO: 5314792 - DNA, 25 bp, Homo sapien
aatcctaattgtgctaacatgccca

SEQ ID NO: 5314793 - DNA, 25 bp, Homo sapien
aacatgcccatttatctcaaaactg

SEQ ID NO: 5314794 - DNA, 25 bp, Homo sapien
cagctgagcacatctttgagtttag

SEQ ID NO: 5314795 - DNA, 25 bp, Homo sapien
tgtgagtttacatgtgaaacggcaa

SEQ ID NO: 5314796 - DNA, 25 bp, Homo sapien
aaagtgactgaattaccctggggca

SEQ ID NO: 5314797 - DNA, 25 bp, Homo sapien
gggaaaacccagcaatatgattgat

SEQ ID NO: 5314798 - DNA, 25 bp, Homo sapien
tatcaattcttcataaaagtgactg

SEQ ID NO: 5314799 - DNA, 25 bp, Homo sapien
gaagctttatgcattccattctgag

SEQ ID NO: 5314800 - DNA, 25 bp, Homo sapien
cacgaatcataggtggaaatatgcc

SEQ ID NO: 5314801 - DNA, 25 bp, Homo sapien
cattctgagctcctaataccaggta

SEQ ID NO: 5314802 - DNA, 25 bp, Homo sapien
cataaaaacttgtactctgtggctc

SEQ ID NO: 5314803 - DNA, 25 bp, Homo sapien
ttatccatcttgaatagctgccagt

SEQ ID NO: 5314804 - DNA, 25 bp, Homo sapien
agttctggaacttcatacatcctca

SEQ ID NO: 5314805 - DNA, 25 bp, Homo sapien
catcttgaatagctgccagttctgg

SEQ ID NO: 5314806 - DNA, 25 bp, Homo sapien
ctggaacttcatacatcctcagaac

SEQ ID NO: 5314807 - DNA, 25 bp, Homo sapien
ggaagtggcagctgactaatataac

SEQ ID NO: 5314808 - DNA, 25 bp, Homo sapien
taatataactgtcagaccgtagacg

SEQ ID NO: 5314809 - DNA, 25 bp, Homo sapien
aataattatgtaggcttctgggaag

SEQ ID NO: 5314810 - DNA, 25 bp, Homo sapien
tgattttagactggaccgaatttcc

SEQ ID NO: 5314811 - DNA, 25 bp, Homo sapien
cagctgacatgtaatcaaggaatcc

SEQ ID NO: 5314812 - DNA, 25 bp, Homo sapien
accagtgtctgatacacagctgaca

SEQ ID NO: 5314813 - DNA, 25 bp, Homo sapien
gctaaatgttcgttagttttgtgta

SEQ ID NO: 5314814 - DNA, 25 bp, Homo sapien
tcaaggaatccactaattaaggaat

SEQ ID NO: 5314815 - DNA, 25 bp, Homo sapien
gctctcgtgattgggtcagttctac

SEQ ID NO: 5314816 - DNA, 25 bp, Homo sapien
gggtcatgacagatagaagaggcaa

SEQ ID NO: 5314817 - DNA, 25 bp, Homo sapien
taaagccgcgttattatcacatgat

SEQ ID NO: 5314818 - DNA, 25 bp, Homo sapien
ttgggcaaaatgagagctctcgtga

SEQ ID NO: 5314819 - DNA, 25 bp, Homo sapien
ggcacgagcagagagcatcctttca

SEQ ID NO: 5314820 - DNA, 25 bp, Homo sapien
aatccaagcgtttgaggcacgagca

SEQ ID NO: 5314821 - DNA, 25 bp, Homo sapien
tggtgcaagtgtcttccaattagta

SEQ ID NO: 5314822 - DNA, 25 bp, Homo sapien
taagggtgtcaatgctgactgagtc

SEQ ID NO: 5314823 - DNA, 25 bp, Homo sapien
atgtaaattgaccatccttacagac

SEQ ID NO: 5314824 - DNA, 25 bp, Homo sapien
acagcaccaatgacatcagtggatt

SEQ ID NO: 5314825 - DNA, 25 bp, Homo sapien
tcttgccaaatgtaaattgaccatc

SEQ ID NO: 5314826 - DNA, 25 bp, Homo sapien
cctcccatttggactatcttgccaa

SEQ ID NO: 5314827 - DNA, 25 bp, Homo sapien
caggcaattattcagccagatacat

SEQ ID NO: 5314828 - DNA, 25 bp, Homo sapien
ggtcttactgtgaccaaacacaaag

SEQ ID NO: 5314829 - DNA, 25 bp, Homo sapien
tatcatatgcagtgtaaacattggc

SEQ ID NO: 5314830 - DNA, 25 bp, Homo sapien
tgcgcaggcagaggaatacttagtc

SEQ ID NO: 5314831 - DNA, 25 bp, Homo sapien
gttgcccttctgaggaactacctga

SEQ ID NO: 5314832 - DNA, 25 bp, Homo sapien
cctcttagaagagctcactggcatc

SEQ ID NO: 5314833 - DNA, 25 bp, Homo sapien
cacaggatgctgtacggcaggacta

SEQ ID NO: 5314834 - DNA, 25 bp, Homo sapien
tgagggatagacaacagaaatctcc

SEQ ID NO: 5314835 - DNA, 25 bp, Homo sapien
gaaaacttctcgtacttcaggcagt

SEQ ID NO: 5314836 - DNA, 25 bp, Homo sapien
catggtcccaatgagcaacctttcc

SEQ ID NO: 5314837 - DNA, 25 bp, Homo sapien
tcatatatatggttccatggtccca

SEQ ID NO: 5314838 - DNA, 25 bp, Homo sapien
cagcaaccagaagatgtggcaacca

SEQ ID NO: 5314839 - DNA, 25 bp, Homo sapien
caataaacaacgtgatcaatcctta

SEQ ID NO: 5314840 - DNA, 25 bp, Homo sapien
gaagttagactttgacataagatac

SEQ ID NO: 5314841 - DNA, 25 bp, Homo sapien
ggatggtttctacacatctagtgga

SEQ ID NO: 5314842 - DNA, 25 bp, Homo sapien
ttgctttttacaccctcctgcatgg

SEQ ID NO: 5314843 - DNA, 25 bp, Homo sapien
caatcaaggctcactgtaactgaac

SEQ ID NO: 5314844 - DNA, 25 bp, Homo sapien
cacaatcaaggctcactgtaactga

SEQ ID NO: 5314845 - DNA, 25 bp, Homo sapien
ggtgggactacagctacatgccacc

SEQ ID NO: 5314846 - DNA, 25 bp, Homo sapien
atcaaggctcactgtaactgaactc

SEQ ID NO: 5314847 - DNA, 25 bp, Homo sapien
aatcttctaagttacctggtaccag

SEQ ID NO: 5314848 - DNA, 25 bp, Homo sapien
agaaacgccacaacccagaaggcag

SEQ ID NO: 5314849 - DNA, 25 bp, Homo sapien
ctcattaagaaaagtaagaagggct

SEQ ID NO: 5314850 - DNA, 25 bp, Homo sapien
gatataggaaattcgtgtatcactc

SEQ ID NO: 5314851 - DNA, 25 bp, Homo sapien
gaccatgcctttctgtgagtttatc

SEQ ID NO: 5314852 - DNA, 25 bp, Homo sapien
ttgatactgtcccttcgttccctga

SEQ ID NO: 5314853 - DNA, 25 bp, Homo sapien
aattacaaaagctagttgcccagag

SEQ ID NO: 5314854 - DNA, 25 bp, Homo sapien
tgaatgttagacctgttgatactgt

SEQ ID NO: 5314855 - DNA, 25 bp, Homo sapien
ggctaccaatttgggcagcacagct

SEQ ID NO: 5314856 - DNA, 25 bp, Homo sapien
catttgaagggtggctagggaaact

SEQ ID NO: 5314857 - DNA, 25 bp, Homo sapien
ttagaaatgcagagtatgggccagg

SEQ ID NO: 5314858 - DNA, 25 bp, Homo sapien
tattcggtagggtagctagccacac

SEQ ID NO: 5314859 - DNA, 25 bp, Homo sapien
tatttctaatatctggaccatctca

SEQ ID NO: 5314860 - DNA, 25 bp, Homo sapien
ggttgtctcctggacattgtgaatg

SEQ ID NO: 5314861 - DNA, 25 bp, Homo sapien
tcatgaagcaccattataagagctg

SEQ ID NO: 5314862 - DNA, 25 bp, Homo sapien
ggaccatctcaggactggcatctat

SEQ ID NO: 5314863 - DNA, 25 bp, Homo sapien
cttttggaaagccatgcacacagga

SEQ ID NO: 5314864 - DNA, 25 bp, Homo sapien
tgggcgtctgggctgtagccattcc

SEQ ID NO: 5314865 - DNA, 25 bp, Homo sapien
atatttctaggcaatcttcatgtcc

SEQ ID NO: 5314866 - DNA, 25 bp, Homo sapien
agccattccggagtaatatttctag

SEQ ID NO: 5314867 - DNA, 25 bp, Homo sapien
tcacaggcccggttagtaagtggta

SEQ ID NO: 5314868 - DNA, 25 bp, Homo sapien
cccagtgtcacaggcccggttagta

SEQ ID NO: 5314869 - DNA, 25 bp, Homo sapien
cacaggcccggttagtaagtggtat

SEQ ID NO: 5314870 - DNA, 25 bp, Homo sapien
tgtttagcccagtgtcacaggcccg

SEQ ID NO: 5314871 - DNA, 25 bp, Homo sapien
ggagagcaaaagctccacacatttt

SEQ ID NO: 5314872 - DNA, 25 bp, Homo sapien
catgaataggtaactgccaactgtc

SEQ ID NO: 5314873 - DNA, 25 bp, Homo sapien
tcttgagcagcaatgaacaagggtg

SEQ ID NO: 5314874 - DNA, 25 bp, Homo sapien
caagggtgtagctttgtccaaggct

SEQ ID NO: 5314875 - DNA, 25 bp, Homo sapien
aataagtatgctcaagctttctagc

SEQ ID NO: 5314876 - DNA, 25 bp, Homo sapien
tctagcttgccatactgagcagcca

SEQ ID NO: 5314877 - DNA, 25 bp, Homo sapien
taaaggtgtgattccaaagtcatcc

SEQ ID NO: 5314878 - DNA, 25 bp, Homo sapien
caaataaaggtgtgattccaaagtc

SEQ ID NO: 5314879 - DNA, 25 bp, Homo sapien
cctggtgcaaggagttccatccaca

SEQ ID NO: 5314880 - DNA, 25 bp, Homo sapien
catccacacatagaatgggatccat

SEQ ID NO: 5314881 - DNA, 25 bp, Homo sapien
gcaacagccttaacacatctatctg

SEQ ID NO: 5314882 - DNA, 25 bp, Homo sapien
tttgctccgtgttgaagcaacagcc

SEQ ID NO: 5314883 - DNA, 25 bp, Homo sapien
gtatttattaagatcaagccagtga

SEQ ID NO: 5314884 - DNA, 25 bp, Homo sapien
ttattaagatcaagccagtgataag

SEQ ID NO: 5314885 - DNA, 25 bp, Homo sapien
atttattaagatcaagccagtgata

SEQ ID NO: 5314886 - DNA, 25 bp, Homo sapien
tttattaagatcaagccagtgataa

SEQ ID NO: 5314887 - DNA, 25 bp, Homo sapien
aaagcggctagaatggagattgcgt

SEQ ID NO: 5314888 - DNA, 25 bp, Homo sapien
ttactcctccacgtagacgatttct

SEQ ID NO: 5314889 - DNA, 25 bp, Homo sapien
cgatttcttgaggaaagcggctaga

SEQ ID NO: 5314890 - DNA, 25 bp, Homo sapien
gtatagctgagcctcaataaatgct

SEQ ID NO: 5314891 - DNA, 25 bp, Homo sapien
cactaaactttatgggacacaatgt

SEQ ID NO: 5314892 - DNA, 25 bp, Homo sapien
gaatttggctgtcgtccttaaggaa

SEQ ID NO: 5314893 - DNA, 25 bp, Homo sapien
gatgcactgattctattccaaacgc

SEQ ID NO: 5314894 - DNA, 25 bp, Homo sapien
gaccaaaactatagtccagatgcac

SEQ ID NO: 5314895 - DNA, 25 bp, Homo sapien
gctacaatttaagtgatacctggtc

SEQ ID NO: 5314896 - DNA, 25 bp, Homo sapien
gatggtgcctacaattcgaaacaga

SEQ ID NO: 5314897 - DNA, 25 bp, Homo sapien
cctggtcttcagaactacagtgaga

SEQ ID NO: 5314898 - DNA, 25 bp, Homo sapien
cagaagctaccacccaagaatagaa

SEQ ID NO: 5314899 - DNA, 25 bp, Homo sapien
agtagttgcattaggatctgcccca

SEQ ID NO: 5314900 - DNA, 25 bp, Homo sapien
gtcgtttcttctaaagtagttgcat

SEQ ID NO: 5314901 - DNA, 25 bp, Homo sapien
ctaaaagaatctgtacgattttcca

SEQ ID NO: 5314902 - DNA, 25 bp, Homo sapien
cgattttccaatgtccttgacttgc

SEQ ID NO: 5314903 - DNA, 25 bp, Homo sapien
cagctctttggtattcttaatacac

SEQ ID NO: 5314904 - DNA, 25 bp, Homo sapien
agagatcccactgtgaacagctctt

SEQ ID NO: 5314905 - DNA, 25 bp, Homo sapien
agaaaaagttctacagagatcccac

SEQ ID NO: 5314906 - DNA, 25 bp, Homo sapien
ggtattcttaatacacaaatcctgt

SEQ ID NO: 5314907 - DNA, 25 bp, Homo sapien
gctcctccccactgcataaggtgag

SEQ ID NO: 5314908 - DNA, 25 bp, Homo sapien
ggctcctccccactgcataaggtga

SEQ ID NO: 5314909 - DNA, 25 bp, Homo sapien
aggctcctccccactgcataaggtg

SEQ ID NO: 5314910 - DNA, 25 bp, Homo sapien
caggctcctccccactgcataaggt

SEQ ID NO: 5314911 - DNA, 25 bp, Homo sapien
gatcctaggatagcatgcagactgt

SEQ ID NO: 5314912 - DNA, 25 bp, Homo sapien
tcagagacctagaccgatgttacat

SEQ ID NO: 5314913 - DNA, 25 bp, Homo sapien
cacaagcattgaagcgtgcctagac

SEQ ID NO: 5314914 - DNA, 25 bp, Homo sapien
gatgttacattacagaagccaagga

SEQ ID NO: 5314915 - DNA, 25 bp, Homo sapien
gccttacatcttggttttcactatc

SEQ ID NO: 5314916 - DNA, 25 bp, Homo sapien
ggccttacatcttggttttcactat

SEQ ID NO: 5314917 - DNA, 25 bp, Homo sapien
ccatgcctggccttacatcttggtt

SEQ ID NO: 5314918 - DNA, 25 bp, Homo sapien
gcctggccttacatcttggttttca

SEQ ID NO: 5314919 - DNA, 25 bp, Homo sapien
tttttacccagcttatccctctgca

SEQ ID NO: 5314920 - DNA, 25 bp, Homo sapien
cccaagtttgtaaatggctaggagg

SEQ ID NO: 5314921 - DNA, 25 bp, Homo sapien
tctctcatcatgtaagatgctctcc

SEQ ID NO: 5314922 - DNA, 25 bp, Homo sapien
ggccagggccttgaaactcatgacc

SEQ ID NO: 5314923 - DNA, 25 bp, Homo sapien
caaagtgagacagttagccaggcat

SEQ ID NO: 5314924 - DNA, 25 bp, Homo sapien
ttcctatcttcagggcagactgccg

SEQ ID NO: 5314925 - DNA, 25 bp, Homo sapien
ccatgaattttggtgtccgtggaca

SEQ ID NO: 5314926 - DNA, 25 bp, Homo sapien
tatccacgggttttgcacctgcaga

SEQ ID NO: 5314927 - DNA, 25 bp, Homo sapien
tcaaatcaaataccctagtttatta

SEQ ID NO: 5314928 - DNA, 25 bp, Homo sapien
gcatgtggcacaatgactatcacaa

SEQ ID NO: 5314929 - DNA, 25 bp, Homo sapien
tcaaataccctagtttattatgtaa

SEQ ID NO: 5314930 - DNA, 25 bp, Homo sapien
aaagcaatgctcagtcaccatttgt

SEQ ID NO: 5314931 - DNA, 25 bp, Homo sapien
caaagcctccataccttgaatttac

SEQ ID NO: 5314932 - DNA, 25 bp, Homo sapien
taggcaaagcctccataccttgaat

SEQ ID NO: 5314933 - DNA, 25 bp, Homo sapien
ggcaaagcctccataccttgaattt

SEQ ID NO: 5314934 - DNA, 25 bp, Homo sapien
aggcaaagcctccataccttgaatt

SEQ ID NO: 5314935 - DNA, 25 bp, Homo sapien
tttaacattgccttccctggcagca

SEQ ID NO: 5314936 - DNA, 25 bp, Homo sapien
agtccaactgtagagcacgtgtccg

SEQ ID NO: 5314937 - DNA, 25 bp, Homo sapien
cgtgtccgcgtaagcctctgtaaaa

SEQ ID NO: 5314938 - DNA, 25 bp, Homo sapien
tatcagcaacatcgacacttcggcc

SEQ ID NO: 5314939 - DNA, 25 bp, Homo sapien
cacaatacagaaagtgactgccatg

SEQ ID NO: 5314940 - DNA, 25 bp, Homo sapien
tgacgaagaagggcccacaatacag

SEQ ID NO: 5314941 - DNA, 25 bp, Homo sapien
acagaaagtgactgccatgccacag

SEQ ID NO: 5314942 - DNA, 25 bp, Homo sapien
gtctctgctggtgcctaaagcagga

SEQ ID NO: 5314943 - DNA, 25 bp, Homo sapien
gtccaagcgaatttcctaaacaata

SEQ ID NO: 5314944 - DNA, 25 bp, Homo sapien
gccatgatagtccaagcgaatttcc

SEQ ID NO: 5314945 - DNA, 25 bp, Homo sapien
ttttagcattcaagatcatggtata

SEQ ID NO: 5314946 - DNA, 25 bp, Homo sapien
agacacagccatgatagtccaagcg

SEQ ID NO: 5314947 - DNA, 25 bp, Homo sapien
taaataatggtgtggattaggaaat

SEQ ID NO: 5314948 - DNA, 25 bp, Homo sapien
cataattgatactacgaaaagcatt

SEQ ID NO: 5314949 - DNA, 25 bp, Homo sapien
tcaaattggtaacttataactccta

SEQ ID NO: 5314950 - DNA, 25 bp, Homo sapien
aaaatcaagcagttagtaatggcag

SEQ ID NO: 5314951 - DNA, 25 bp, Homo sapien
caaatttttaatgcagctggtccaa

SEQ ID NO: 5314952 - DNA, 25 bp, Homo sapien
gattatcttggtcctgcacctctgg

SEQ ID NO: 5314953 - DNA, 25 bp, Homo sapien
gaattaacttcagtgcacaatgaca

SEQ ID NO: 5314954 - DNA, 25 bp, Homo sapien
gatgagcatcttttcgctttggaaa

SEQ ID NO: 5314955 - DNA, 25 bp, Homo sapien
aaatattagttttccagacggcatt

SEQ ID NO: 5314956 - DNA, 25 bp, Homo sapien
aatattagttttccagacggcattt

SEQ ID NO: 5314957 - DNA, 25 bp, Homo sapien
taaagtacattattagtcactatat

SEQ ID NO: 5314958 - DNA, 25 bp, Homo sapien
tactcttagcaagtataaagtacat

SEQ ID NO: 5314959 - DNA, 25 bp, Homo sapien
tactgtgcaacatatctcaaagaaa

SEQ ID NO: 5314960 - DNA, 25 bp, Homo sapien
tagtcactatattcaccatactgtg

SEQ ID NO: 5314961 - DNA, 25 bp, Homo sapien
caagtagctatgacaatcaagtaat

SEQ ID NO: 5314962 - DNA, 25 bp, Homo sapien
gtagctatgacaatcaagtaatttt

SEQ ID NO: 5314963 - DNA, 25 bp, Homo sapien
agacaaacaagtagctatgacaatc

SEQ ID NO: 5314964 - DNA, 25 bp, Homo sapien
caaacaagtagctatgacaatcaag

SEQ ID NO: 5314965 - DNA, 25 bp, Homo sapien
cttcccactgacgtactcccctgcc

SEQ ID NO: 5314966 - DNA, 25 bp, Homo sapien
catctggtcaatctggtatcagtgt

SEQ ID NO: 5314967 - DNA, 25 bp, Homo sapien
caatctggtatcagtgtatttgtca

SEQ ID NO: 5314968 - DNA, 25 bp, Homo sapien
ggtcaatctggtatcagtgtatttg

SEQ ID NO: 5314969 - DNA, 25 bp, Homo sapien
gaaatggacctcttggattgatcct

SEQ ID NO: 5314970 - DNA, 25 bp, Homo sapien
gaagcagagctatttccgggaatgg

SEQ ID NO: 5314971 - DNA, 25 bp, Homo sapien
agtaaaagcacaacagacagaaagg

SEQ ID NO: 5314972 - DNA, 25 bp, Homo sapien
gaactgaaaatcaaggaaatggacc

SEQ ID NO: 5314973 - DNA, 25 bp, Homo sapien
tgtttgtacaatctccctgcctaga

SEQ ID NO: 5314974 - DNA, 25 bp, Homo sapien
gacttaagactagtgcttagcacag

SEQ ID NO: 5314975 - DNA, 25 bp, Homo sapien
tagccctaaatgctaaaacaggacc

SEQ ID NO: 5314976 - DNA, 25 bp, Homo sapien
catcagctctattgaacacagattc

SEQ ID NO: 5314977 - DNA, 25 bp, Homo sapien
tatcactccgtgtgggtcaaacctc

SEQ ID NO: 5314978 - DNA, 25 bp, Homo sapien
aattcggaggcttgcggtattcacc

SEQ ID NO: 5314979 - DNA, 25 bp, Homo sapien
tgtctagctgcccattccacgagag

SEQ ID NO: 5314980 - DNA, 25 bp, Homo sapien
tgttaagtaacgagatggccacggt

SEQ ID NO: 5314981 - DNA, 25 bp, Homo sapien
gtgctgccacttctacaccgaaatg

SEQ ID NO: 5314982 - DNA, 25 bp, Homo sapien
aatggctggtccgaggccgcgtctc

SEQ ID NO: 5314983 - DNA, 25 bp, Homo sapien
gtctccagagctgcgtcccagaagc

SEQ ID NO: 5314984 - DNA, 25 bp, Homo sapien
atgctgcagccgtccgaaaacgaga

SEQ ID NO: 5314985 - DNA, 25 bp, Homo sapien
aaattgccttccagagttagaccag

SEQ ID NO: 5314986 - DNA, 25 bp, Homo sapien
tcttcaagacgatggtacccagaca

SEQ ID NO: 5314987 - DNA, 25 bp, Homo sapien
aaaagaataagacaccctgggccag

SEQ ID NO: 5314988 - DNA, 25 bp, Homo sapien
tagcatgcaataaacctgggctgcc

SEQ ID NO: 5314989 - DNA, 25 bp, Homo sapien
ggctcacatgggagttgtcctcacc

SEQ ID NO: 5314990 - DNA, 25 bp, Homo sapien
tcatccaagcaagttagagtccagc

SEQ ID NO: 5314991 - DNA, 25 bp, Homo sapien
gagtccagcctaatcaaatgtcata

SEQ ID NO: 5314992 - DNA, 25 bp, Homo sapien
tatagcaactgctctctgcaagtag

SEQ ID NO: 5314993 - DNA, 25 bp, Homo sapien
cccacaagtaaagggctcagttgca

SEQ ID NO: 5314994 - DNA, 25 bp, Homo sapien
tactgtgtacaagataggaaaaacc

SEQ ID NO: 5314995 - DNA, 25 bp, Homo sapien
atacagcacagaacacgaggtcacc

SEQ ID NO: 5314996 - DNA, 25 bp, Homo sapien
tctacttggagttgacagcagaccc

SEQ ID NO: 5314997 - DNA, 25 bp, Homo sapien
gctgattcacccttcttgagcaatc

SEQ ID NO: 5314998 - DNA, 25 bp, Homo sapien
ggaggtaaggaacccactgcacact

SEQ ID NO: 5314999 - DNA, 25 bp, Homo sapien
tgtcataaagcatcctaagagtcgg

SEQ ID NO: 5315000 - DNA, 25 bp, Homo sapien
catatgctgatagtctcaaacgtgg

SEQ ID NO: 5315001 - DNA, 25 bp, Homo sapien
tttcagcaagcaggcaagatgatgc

SEQ ID NO: 5315002 - DNA, 25 bp, Homo sapien
ggactaatacaggtttgagggaggc

SEQ ID NO: 5315003 - DNA, 25 bp, Homo sapien
aggcacatctcaaacatgcgtgtgc

SEQ ID NO: 5315004 - DNA, 25 bp, Homo sapien
atggactaatacaggtttgagggag

SEQ ID NO: 5315005 - DNA, 25 bp, Homo sapien
aacatgcgtgtgcaaacccaatcat

SEQ ID NO: 5315006 - DNA, 25 bp, Homo sapien
gcagcgcctagcaaagtacatattt

SEQ ID NO: 5315007 - DNA, 25 bp, Homo sapien
aaatgttgactactggccggatgca

SEQ ID NO: 5315008 - DNA, 25 bp, Homo sapien
ggtccttaggttacagaatatcacg

SEQ ID NO: 5315009 - DNA, 25 bp, Homo sapien
tgctgagattgctatgcagcgccta

SEQ ID NO: 5315010 - DNA, 25 bp, Homo sapien
cattgccatgctctgatagttttaa

SEQ ID NO: 5315011 - DNA, 25 bp, Homo sapien
aaatgtaacgcctctattcccagca

SEQ ID NO: 5315012 - DNA, 25 bp, Homo sapien
caacacattgttatccattgggcaa

SEQ ID NO: 5315013 - DNA, 25 bp, Homo sapien
cattatattgcaaactggtgttcag

SEQ ID NO: 5315014 - DNA, 25 bp, Homo sapien
aaaaagagataataggccagtgcac

SEQ ID NO: 5315015 - DNA, 25 bp, Homo sapien
caaaataattcgaggctgcccctgg

SEQ ID NO: 5315016 - DNA, 25 bp, Homo sapien
gggcctcatgccagtcaaatcatct

SEQ ID NO: 5315017 - DNA, 25 bp, Homo sapien
gctatgaatcgagcccactatgtat

SEQ ID NO: 5315018 - DNA, 25 bp, Homo sapien
tacataagatcctatagcctccatg

SEQ ID NO: 5315019 - DNA, 25 bp, Homo sapien
aaaaccataactgccaacttttcag

SEQ ID NO: 5315020 - DNA, 25 bp, Homo sapien
cagatactgacacatcagatgaaag

SEQ ID NO: 5315021 - DNA, 25 bp, Homo sapien
ttgtaggttttgatccgccactgat

SEQ ID NO: 5315022 - DNA, 25 bp, Homo sapien
ctgtaagttacatgggctgctctcc

SEQ ID NO: 5315023 - DNA, 25 bp, Homo sapien
cttttcccatggctcgaagtcgagt

SEQ ID NO: 5315024 - DNA, 25 bp, Homo sapien
gaccacagtgttgatgtccagcaga

SEQ ID NO: 5315025 - DNA, 25 bp, Homo sapien
aaaacccaggcctatgtattggagg

SEQ ID NO: 5315026 - DNA, 25 bp, Homo sapien
taccaaggaaatccccagtggaaga

SEQ ID NO: 5315027 - DNA, 25 bp, Homo sapien
ctgtaccaaggaaatccccagtgga

SEQ ID NO: 5315028 - DNA, 25 bp, Homo sapien
tgtaccaaggaaatccccagtggaa

SEQ ID NO: 5315029 - DNA, 25 bp, Homo sapien
ccgggatactactggctgagctgaa

SEQ ID NO: 5315030 - DNA, 25 bp, Homo sapien
tgaagttgccataggaacccaggca

SEQ ID NO: 5315031 - DNA, 25 bp, Homo sapien
taattctggttcctatacagagccg

SEQ ID NO: 5315032 - DNA, 25 bp, Homo sapien
gatgaccgccagtagaaaagtacag

SEQ ID NO: 5315033 - DNA, 25 bp, Homo sapien
ggcacatggagcgaggtggcattgg

SEQ ID NO: 5315034 - DNA, 25 bp, Homo sapien
cctgaaggtggcctgttgagttcat

SEQ ID NO: 5315035 - DNA, 25 bp, Homo sapien
gtggcattgggggcatcctgaaggt

SEQ ID NO: 5315036 - DNA, 25 bp, Homo sapien
tgagtgaggcacatggagcgaggtg

SEQ ID NO: 5315037 - DNA, 25 bp, Homo sapien
tactcagtgagtcagggcctcagct

SEQ ID NO: 5315038 - DNA, 25 bp, Homo sapien
gtgagtcagggcctcagctcacaga

SEQ ID NO: 5315039 - DNA, 25 bp, Homo sapien
ctcagtgagtcagggcctcagctca

SEQ ID NO: 5315040 - DNA, 25 bp, Homo sapien
aatactcagtgagtcagggcctcag

SEQ ID NO: 5315041 - DNA, 25 bp, Homo sapien
gataaagggagctttagcaagcaca

SEQ ID NO: 5315042 - DNA, 25 bp, Homo sapien
tgttgatgcataatgtggcccttca

SEQ ID NO: 5315043 - DNA, 25 bp, Homo sapien
gatttcttggcctcgccccttgtga

SEQ ID NO: 5315044 - DNA, 25 bp, Homo sapien
gaagcactgcggcaaaaaactgcat

SEQ ID NO: 5315045 - DNA, 25 bp, Homo sapien
gggaccgactaagctgttccttgga

SEQ ID NO: 5315046 - DNA, 25 bp, Homo sapien
caacagatgcttctggtgggaccga

SEQ ID NO: 5315047 - DNA, 25 bp, Homo sapien
aaatctacattgtcccaaatcccaa

SEQ ID NO: 5315048 - DNA, 25 bp, Homo sapien
aaagtcctgcaagggttggtgccca

SEQ ID NO: 5315049 - DNA, 25 bp, Homo sapien
tatcagacatataccagtcctggga

SEQ ID NO: 5315050 - DNA, 25 bp, Homo sapien
cattcatatggtacagatcaggacg

SEQ ID NO: 5315051 - DNA, 25 bp, Homo sapien
tgtacttaaccaccagctcaagctg

SEQ ID NO: 5315052 - DNA, 25 bp, Homo sapien
tacagcggaatgaaccaggtcagtc

SEQ ID NO: 5315053 - DNA, 25 bp, Homo sapien
tttctgaacacttttgatacctata

SEQ ID NO: 5315054 - DNA, 25 bp, Homo sapien
gtttctgaacacttttgatacctat

SEQ ID NO: 5315055 - DNA, 25 bp, Homo sapien
ttttgatacctatataatgagaaag

SEQ ID NO: 5315056 - DNA, 25 bp, Homo sapien
tgtttctgaacacttttgataccta

SEQ ID NO: 5315057 - DNA, 25 bp, Homo sapien
tctccggcatcgtggggttgtcctc

SEQ ID NO: 5315058 - DNA, 25 bp, Homo sapien
gacgggcgagaaggctaccctgcag

SEQ ID NO: 5315059 - DNA, 25 bp, Homo sapien
ccctgcaggccgcaccaggaagaca

SEQ ID NO: 5315060 - DNA, 25 bp, Homo sapien
caggaagacaggtacgcggagccgg

SEQ ID NO: 5315061 - DNA, 25 bp, Homo sapien
gccgcccctcctccatctcgcagtc

SEQ ID NO: 5315062 - DNA, 25 bp, Homo sapien
ccctcctccatctcgcagtccggac

SEQ ID NO: 5315063 - DNA, 25 bp, Homo sapien
cgcccctcctccatctcgcagtccg

SEQ ID NO: 5315064 - DNA, 25 bp, Homo sapien
ctgccgggtggccgcagcgccgccc

SEQ ID NO: 5315065 - DNA, 25 bp, Homo sapien
ccgctctggatgatgcaggactaga

SEQ ID NO: 5315066 - DNA, 25 bp, Homo sapien
catcgccatcgccaccgcctccgcg

SEQ ID NO: 5315067 - DNA, 25 bp, Homo sapien
cgcctgccgctctggatgatgcagg

SEQ ID NO: 5315068 - DNA, 25 bp, Homo sapien
caggactagaggcatcatcgccatc

SEQ ID NO: 5315069 - DNA, 25 bp, Homo sapien
ggcgcttgagccaggtttttcaggc

SEQ ID NO: 5315070 - DNA, 25 bp, Homo sapien
gggagccgcggcaagacgcgggcgc

SEQ ID NO: 5315071 - DNA, 25 bp, Homo sapien
caggctcgcagttttgctgtttggg

SEQ ID NO: 5315072 - DNA, 25 bp, Homo sapien
cagtcacggagacgccgagggcacc

SEQ ID NO: 5315073 - DNA, 25 bp, Homo sapien
ggcactactttatacagggattacg

SEQ ID NO: 5315074 - DNA, 25 bp, Homo sapien
gggattacgcctgtgtatgccgaca

SEQ ID NO: 5315075 - DNA, 25 bp, Homo sapien
ttaaatactgtaccaggaccactgc

SEQ ID NO: 5315076 - DNA, 25 bp, Homo sapien
aaatggcattcagtgggtacaaagc

SEQ ID NO: 5315077 - DNA, 25 bp, Homo sapien
tgtcttggtcgagcaatccatcagg

SEQ ID NO: 5315078 - DNA, 25 bp, Homo sapien
aaactccagtctgtgggaagtgcac

SEQ ID NO: 5315079 - DNA, 25 bp, Homo sapien
tgtggaatgcagactaacgagatct

SEQ ID NO: 5315080 - DNA, 25 bp, Homo sapien
tctggaaacacttccggacaagttg

SEQ ID NO: 5315081 - DNA, 25 bp, Homo sapien
ttatctaactattcccaggctgaca

SEQ ID NO: 5315082 - DNA, 25 bp, Homo sapien
tttccaatggccgtagcaaaagcca

SEQ ID NO: 5315083 - DNA, 25 bp, Homo sapien
cacccaggaggcaaccaagaataag

SEQ ID NO: 5315084 - DNA, 25 bp, Homo sapien
tgggtactccctctttaacagaatg

SEQ ID NO: 5315085 - DNA, 25 bp, Homo sapien
gctgtttatgttcctgccagttgtc

SEQ ID NO: 5315086 - DNA, 25 bp, Homo sapien
ggtcatcagtgaattgctgtttatg

SEQ ID NO: 5315087 - DNA, 25 bp, Homo sapien
cagttgtcatggtgagtccttcgga

SEQ ID NO: 5315088 - DNA, 25 bp, Homo sapien
tagcatggtgacacaagaagatcgg

SEQ ID NO: 5315089 - DNA, 25 bp, Homo sapien
gataatacacgtacaaactaataag

SEQ ID NO: 5315090 - DNA, 25 bp, Homo sapien
ctgataatacacgtacaaactaata

SEQ ID NO: 5315091 - DNA, 25 bp, Homo sapien
taatacacgtacaaactaataagga

SEQ ID NO: 5315092 - DNA, 25 bp, Homo sapien
ataatacacgtacaaactaataagg

SEQ ID NO: 5315093 - DNA, 25 bp, Homo sapien
tgcactgagattcatgaggagctgg

SEQ ID NO: 5315094 - DNA, 25 bp, Homo sapien
aagaacacatgcaccaagtcctagc

SEQ ID NO: 5315095 - DNA, 25 bp, Homo sapien
gcaccccagcatggcgtttgaccaa

SEQ ID NO: 5315096 - DNA, 25 bp, Homo sapien
gggcatccaggtgggaacatcgtaa

SEQ ID NO: 5315097 - DNA, 25 bp, Homo sapien
gaaagttacactgtagcagaccgct

SEQ ID NO: 5315098 - DNA, 25 bp, Homo sapien
gactgtccatggtaagaaagttaca

SEQ ID NO: 5315099 - DNA, 25 bp, Homo sapien
tctcctacagaaccagggtctcgct

SEQ ID NO: 5315100 - DNA, 25 bp, Homo sapien
cagaccgcttaaggtagtagcagcc

SEQ ID NO: 5315101 - DNA, 25 bp, Homo sapien
gccagaacctgacattaagatcaag

SEQ ID NO: 5315102 - DNA, 25 bp, Homo sapien
taaatgaagcgtgtacacagtccat

SEQ ID NO: 5315103 - DNA, 25 bp, Homo sapien
caaagagtttgtggcctcataatgg

SEQ ID NO: 5315104 - DNA, 25 bp, Homo sapien
tcatcagggctataactgtaaaagc

SEQ ID NO: 5315105 - DNA, 25 bp, Homo sapien
cactctgagtagtcagatctgtgca

SEQ ID NO: 5315106 - DNA, 25 bp, Homo sapien
caaaggcttagaaagtcatctctgc

SEQ ID NO: 5315107 - DNA, 25 bp, Homo sapien
gctaaaaatgcctcactgtttcaag

SEQ ID NO: 5315108 - DNA, 25 bp, Homo sapien
ttacaataccaccaccactctgagt

SEQ ID NO: 5315109 - DNA, 25 bp, Homo sapien
caaagagttgaggttataaatataa

SEQ ID NO: 5315110 - DNA, 25 bp, Homo sapien
aattgactgaatttccgttttctat

SEQ ID NO: 5315111 - DNA, 25 bp, Homo sapien
cacctggccgcaaatacttattaaa

SEQ ID NO: 5315112 - DNA, 25 bp, Homo sapien
tataaacaattgcacctggccgcaa

SEQ ID NO: 5315113 - DNA, 25 bp, Homo sapien
ggttataaaataccatggtctggag

SEQ ID NO: 5315114 - DNA, 25 bp, Homo sapien
tgttcgtcctccaaaagacttataa

SEQ ID NO: 5315115 - DNA, 25 bp, Homo sapien
cagccacctgatatctttaactgca

SEQ ID NO: 5315116 - DNA, 25 bp, Homo sapien
tctggaggtaggtcagtactgtgta

SEQ ID NO: 5315117 - DNA, 25 bp, Homo sapien
tgaagtaccaaaggcacttgatgag

SEQ ID NO: 5315118 - DNA, 25 bp, Homo sapien
cacttgatgagggtaaagcaacccc

SEQ ID NO: 5315119 - DNA, 25 bp, Homo sapien
gagggtaaagcaacccctgagacat

SEQ ID NO: 5315120 - DNA, 25 bp, Homo sapien
tgttttagcacctgaagtaccaaag

SEQ ID NO: 5315121 - DNA, 25 bp, Homo sapien
tcttttcagttcatcgtagctattg

SEQ ID NO: 5315122 - DNA, 25 bp, Homo sapien
tgataaacataactttgcatctctt

SEQ ID NO: 5315123 - DNA, 25 bp, Homo sapien
gataaacataactttgcatctcttt

SEQ ID NO: 5315124 - DNA, 25 bp, Homo sapien
agttcatcgtagctattgtcatttt

SEQ ID NO: 5315125 - DNA, 25 bp, Homo sapien
ttctgctttacaggtatgtcatttc

SEQ ID NO: 5315126 - DNA, 25 bp, Homo sapien
tttctgctttacaggtatgtcattt

SEQ ID NO: 5315127 - DNA, 25 bp, Homo sapien
tctgctttacaggtatgtcatttca

SEQ ID NO: 5315128 - DNA, 25 bp, Homo sapien
ggatcttcctgcacttgccatcagc

SEQ ID NO: 5315129 - DNA, 25 bp, Homo sapien
gaagttgttctgtaactgctgtaga

SEQ ID NO: 5315130 - DNA, 25 bp, Homo sapien
taactgctgtagaaaaggatcttcc

SEQ ID NO: 5315131 - DNA, 25 bp, Homo sapien
aaacaaaggtagaagctgaagttgt

SEQ ID NO: 5315132 - DNA, 25 bp, Homo sapien
atccacatccatgagaggtttcaat

SEQ ID NO: 5315133 - DNA, 25 bp, Homo sapien
caagagtttaatgccctgagttcgc

SEQ ID NO: 5315134 - DNA, 25 bp, Homo sapien
tccagaattcgagcagtaaactcag

SEQ ID NO: 5315135 - DNA, 25 bp, Homo sapien
cattttcttccataacatggttctg

SEQ ID NO: 5315136 - DNA, 25 bp, Homo sapien
ttgggttccaagtacttcagtagtc

SEQ ID NO: 5315137 - DNA, 25 bp, Homo sapien
tctccattcttgctgggcaaggcca

SEQ ID NO: 5315138 - DNA, 25 bp, Homo sapien
agtctgtgcaatagttcaggcactc

SEQ ID NO: 5315139 - DNA, 25 bp, Homo sapien
ccaagtacttcagtagtctgtgcaa

SEQ ID NO: 5315140 - DNA, 25 bp, Homo sapien
gcctttacatattgacagtatggac

SEQ ID NO: 5315141 - DNA, 25 bp, Homo sapien
tcatccacactactagaaaactgaa

SEQ ID NO: 5315142 - DNA, 25 bp, Homo sapien
caatatccacaactcaaaatagcct

SEQ ID NO: 5315143 - DNA, 25 bp, Homo sapien
catcgtagtgttatattggaggccc

SEQ ID NO: 5315144 - DNA, 25 bp, Homo sapien
aagccagtgaagtttccggggatct

SEQ ID NO: 5315145 - DNA, 25 bp, Homo sapien
catgcatctacaaaggatcctcctt

SEQ ID NO: 5315146 - DNA, 25 bp, Homo sapien
gaagtttccggggatctctgctttc

SEQ ID NO: 5315147 - DNA, 25 bp, Homo sapien
caccactcaatggtgattccaacag

SEQ ID NO: 5315148 - DNA, 25 bp, Homo sapien
agtcattataagtttctacggtaat

SEQ ID NO: 5315149 - DNA, 25 bp, Homo sapien
acagaagctcccaaagcttctccac

SEQ ID NO: 5315150 - DNA, 25 bp, Homo sapien
tataagtttctacggtaatattgga

SEQ ID NO: 5315151 - DNA, 25 bp, Homo sapien
ttctacggtaatattggacagtgct

SEQ ID NO: 5315152 - DNA, 25 bp, Homo sapien
acatcgctgggtgctttcatgtgaa

SEQ ID NO: 5315153 - DNA, 25 bp, Homo sapien
gtccagtgcttagaacctctgatta

SEQ ID NO: 5315154 - DNA, 25 bp, Homo sapien
ggaaggcatcatcaaaattcctgaa

SEQ ID NO: 5315155 - DNA, 25 bp, Homo sapien
tgattaaaccagctataatttctgc

SEQ ID NO: 5315156 - DNA, 25 bp, Homo sapien
tgctcaacaaatttaggatcagaaa

SEQ ID NO: 5315157 - DNA, 25 bp, Homo sapien
aattaactgctcaacaaatttagga

SEQ ID NO: 5315158 - DNA, 25 bp, Homo sapien
taattaactgctcaacaaatttagg

SEQ ID NO: 5315159 - DNA, 25 bp, Homo sapien
caacaaatttaggatcagaaaaatg

SEQ ID NO: 5315160 - DNA, 25 bp, Homo sapien
cataaagcagtagccaacggagggc

SEQ ID NO: 5315161 - DNA, 25 bp, Homo sapien
aacatgcatttacggagatcccata

SEQ ID NO: 5315162 - DNA, 25 bp, Homo sapien
tgtcaactggcactagtatgaaggg

SEQ ID NO: 5315163 - DNA, 25 bp, Homo sapien
tcaaaacgcttgtatcagaactgat

SEQ ID NO: 5315164 - DNA, 25 bp, Homo sapien
ccctgcttctgccaagcttaggctg

SEQ ID NO: 5315165 - DNA, 25 bp, Homo sapien
tccacaccagcataaacaaccatat

SEQ ID NO: 5315166 - DNA, 25 bp, Homo sapien
cttccacaccagcataaacaaccat

SEQ ID NO: 5315167 - DNA, 25 bp, Homo sapien
cctgcttctgccaagcttaggctgc

SEQ ID NO: 5315168 - DNA, 25 bp, Homo sapien
ccagcaataatttgggtgggtttag

SEQ ID NO: 5315169 - DNA, 25 bp, Homo sapien
ccaggtgtagtatccccagtgagtt

SEQ ID NO: 5315170 - DNA, 25 bp, Homo sapien
gattatcaggcctatcaccagcaat

SEQ ID NO: 5315171 - DNA, 25 bp, Homo sapien
gcaaccaatgattatcaggcctatc

SEQ ID NO: 5315172 - DNA, 25 bp, Homo sapien
tagctgtttaaggataccagcaaca

SEQ ID NO: 5315173 - DNA, 25 bp, Homo sapien
tgatttcacaggggttaatggtcag

SEQ ID NO: 5315174 - DNA, 25 bp, Homo sapien
agctgtttaaggataccagcaacag

SEQ ID NO: 5315175 - DNA, 25 bp, Homo sapien
tcagcagtagagacagaagcccaat

SEQ ID NO: 5315176 - DNA, 25 bp, Homo sapien
gcaacactcggtcatctctcagcag

SEQ ID NO: 5315177 - DNA, 25 bp, Homo sapien
ctttcgaactacaattgcatcatgg

SEQ ID NO: 5315178 - DNA, 25 bp, Homo sapien
ccgtatggcacgaagaggcaacact

SEQ ID NO: 5315179 - DNA, 25 bp, Homo sapien
caaggtgtctaccaaattttcatag

SEQ ID NO: 5315180 - DNA, 25 bp, Homo sapien
ccatctagcaaggtgtctaccaaat

SEQ ID NO: 5315181 - DNA, 25 bp, Homo sapien
tccacaccatctagcaaggtgtcta

SEQ ID NO: 5315182 - DNA, 25 bp, Homo sapien
tgctccacaccatctagcaaggtgt

SEQ ID NO: 5315183 - DNA, 25 bp, Homo sapien
tagggcatcggcattcttttcctgt

SEQ ID NO: 5315184 - DNA, 25 bp, Homo sapien
agggcatcggcattcttttcctgtt

SEQ ID NO: 5315185 - DNA, 25 bp, Homo sapien
ttagggcatcggcattcttttcctg

SEQ ID NO: 5315186 - DNA, 25 bp, Homo sapien
cttagggcatcggcattcttttcct

SEQ ID NO: 5315187 - DNA, 25 bp, Homo sapien
tgttgaagtaattccgctatttcaa

SEQ ID NO: 5315188 - DNA, 25 bp, Homo sapien
gaagtaattccgctatttcaacaca

SEQ ID NO: 5315189 - DNA, 25 bp, Homo sapien
aattccgctatttcaacacatgact

SEQ ID NO: 5315190 - DNA, 25 bp, Homo sapien
gtaattccgctatttcaacacatga

SEQ ID NO: 5315191 - DNA, 25 bp, Homo sapien
tggctaagccctgaagaaacaatcg

SEQ ID NO: 5315192 - DNA, 25 bp, Homo sapien
gaaggtttgccaagcacacaccact

SEQ ID NO: 5315193 - DNA, 25 bp, Homo sapien
gaaacaatcgctggccacgtctgta

SEQ ID NO: 5315194 - DNA, 25 bp, Homo sapien
cactattgatggcttttccagggac

SEQ ID NO: 5315195 - DNA, 25 bp, Homo sapien
tgaattgttgctgtgtaacaccttg

SEQ ID NO: 5315196 - DNA, 25 bp, Homo sapien
aaaaatgtttgctgagccttatttc

SEQ ID NO: 5315197 - DNA, 25 bp, Homo sapien
tatcaggccttaagaactccaaaac

SEQ ID NO: 5315198 - DNA, 25 bp, Homo sapien
gaagttatatgctcccaaggcagca

SEQ ID NO: 5315199 - DNA, 25 bp, Homo sapien
gactgtatgaacttgtagataaacg

SEQ ID NO: 5315200 - DNA, 25 bp, Homo sapien
tattcacaaccctcaacagttagtg

SEQ ID NO: 5315201 - DNA, 25 bp, Homo sapien
tgtatctttttgtattcacaaccct

SEQ ID NO: 5315202 - DNA, 25 bp, Homo sapien
gaagatctctgatcatatcttgatg

SEQ ID NO: 5315203 - DNA, 25 bp, Homo sapien
taacattactctatcaatcaacagt

SEQ ID NO: 5315204 - DNA, 25 bp, Homo sapien
acattactctatcaatcaacagtgc

SEQ ID NO: 5315205 - DNA, 25 bp, Homo sapien
aacattactctatcaatcaacagtg

SEQ ID NO: 5315206 - DNA, 25 bp, Homo sapien
gtaacattactctatcaatcaacag

SEQ ID NO: 5315207 - DNA, 25 bp, Homo sapien
gactttaaaacaattagtgcagact

SEQ ID NO: 5315208 - DNA, 25 bp, Homo sapien
caaattacgaggttattatacgact

SEQ ID NO: 5315209 - DNA, 25 bp, Homo sapien
aaattcccattgagagtttagagac

SEQ ID NO: 5315210 - DNA, 25 bp, Homo sapien
ggtagtctcaatgctattgtccaaa

SEQ ID NO: 5315211 - DNA, 25 bp, Homo sapien
cttttccatcgggagtcaaattcat

SEQ ID NO: 5315212 - DNA, 25 bp, Homo sapien
ccatcgggagtcaaattcatgcttg

SEQ ID NO: 5315213 - DNA, 25 bp, Homo sapien
tccttggaattgtaaaaggtctcca

SEQ ID NO: 5315214 - DNA, 25 bp, Homo sapien
aattcatgcttgtgagatccttgga

SEQ ID NO: 5315215 - DNA, 25 bp, Homo sapien
ttataataagaaacaatgacttagt

SEQ ID NO: 5315216 - DNA, 25 bp, Homo sapien
agaaacaatgacttagtatcatctt

SEQ ID NO: 5315217 - DNA, 25 bp, Homo sapien
acaatgacttagtatcatcttctga

SEQ ID NO: 5315218 - DNA, 25 bp, Homo sapien
taataagaaacaatgacttagtatc

SEQ ID NO: 5315219 - DNA, 25 bp, Homo sapien
tacttctcggtggttctctcgagac

SEQ ID NO: 5315220 - DNA, 25 bp, Homo sapien
tctcggtggttctctcgagacagat

SEQ ID NO: 5315221 - DNA, 25 bp, Homo sapien
aattacttctcggtggttctctcga

SEQ ID NO: 5315222 - DNA, 25 bp, Homo sapien
gtagcaattacttctcggtggttct

SEQ ID NO: 5315223 - DNA, 25 bp, Homo sapien
atattcaagtccagtatacaacttt

SEQ ID NO: 5315224 - DNA, 25 bp, Homo sapien
tattcaagtccagtatacaactttg

SEQ ID NO: 5315225 - DNA, 25 bp, Homo sapien
catattcaagtccagtatacaactt

SEQ ID NO: 5315226 - DNA, 25 bp, Homo sapien
tatgataccacaaccagaggctacc

SEQ ID NO: 5315227 - DNA, 25 bp, Homo sapien
taccctgagcctataagcggtagcc

SEQ ID NO: 5315228 - DNA, 25 bp, Homo sapien
ttctcaccataacccagtacagagg

SEQ ID NO: 5315229 - DNA, 25 bp, Homo sapien
cagacccagccagttaaattcattg

SEQ ID NO: 5315230 - DNA, 25 bp, Homo sapien
tacagggcctactgtggcacttgag

SEQ ID NO: 5315231 - DNA, 25 bp, Homo sapien
tggtatgctgtaggtccaatcccct

SEQ ID NO: 5315232 - DNA, 25 bp, Homo sapien
aagtggactcacatacacctcaggc

SEQ ID NO: 5315233 - DNA, 25 bp, Homo sapien
tcttgcctaccacaaattaactgga

SEQ ID NO: 5315234 - DNA, 25 bp, Homo sapien
tcccccagcagagctgggtagtttc

SEQ ID NO: 5315235 - DNA, 25 bp, Homo sapien
ccttttctgtgtgcagctcccccag

SEQ ID NO: 5315236 - DNA, 25 bp, Homo sapien
ttccttttctgtgtgcagctccccc

SEQ ID NO: 5315237 - DNA, 25 bp, Homo sapien
ttttctgtgtgcagctcccccagca

SEQ ID NO: 5315238 - DNA, 25 bp, Homo sapien
gccaattaaacagttgtgcactata

SEQ ID NO: 5315239 - DNA, 25 bp, Homo sapien
ttaaacagttgtgcactatagtcag

SEQ ID NO: 5315240 - DNA, 25 bp, Homo sapien
tcaacggaggtaggaggtttccaga

SEQ ID NO: 5315241 - DNA, 25 bp, Homo sapien
tgtgcactatagtcagactctgtag

SEQ ID NO: 5315242 - DNA, 25 bp, Homo sapien
tggagtttgacgagctcaggctgaa

SEQ ID NO: 5315243 - DNA, 25 bp, Homo sapien
caatgctggagtttgacgagctcag

SEQ ID NO: 5315244 - DNA, 25 bp, Homo sapien
cagattccacaagtccccgggtttg

SEQ ID NO: 5315245 - DNA, 25 bp, Homo sapien
gattcccagattccacaagtccccg

SEQ ID NO: 5315246 - DNA, 25 bp, Homo sapien
atattcttgaatcctaaagtactga

SEQ ID NO: 5315247 - DNA, 25 bp, Homo sapien
caacatattcttgaatcctaaagta

SEQ ID NO: 5315248 - DNA, 25 bp, Homo sapien
acatattcttgaatcctaaagtact

SEQ ID NO: 5315249 - DNA, 25 bp, Homo sapien
aaatcaacatattcttgaatcctaa

SEQ ID NO: 5315250 - DNA, 25 bp, Homo sapien
gaaggaggcttgtcaaagccacctg

SEQ ID NO: 5315251 - DNA, 25 bp, Homo sapien
aaggaggcttgtcaaagccacctgg

SEQ ID NO: 5315252 - DNA, 25 bp, Homo sapien
gaggcttgtcaaagccacctggcac

SEQ ID NO: 5315253 - DNA, 25 bp, Homo sapien
tggtagaacggagaagatgatgcaa

SEQ ID NO: 5315254 - DNA, 25 bp, Homo sapien
tacaagacagagtgtaaccctgctt

SEQ ID NO: 5315255 - DNA, 25 bp, Homo sapien
gatgatgcaaaaggttacaagacag

SEQ ID NO: 5315256 - DNA, 25 bp, Homo sapien
tattctgtagggtagataagtgtgg

SEQ ID NO: 5315257 - DNA, 25 bp, Homo sapien
taattccttgtctagctcttcatca

SEQ ID NO: 5315258 - DNA, 25 bp, Homo sapien
gacaaaagttgaagattccatagta

SEQ ID NO: 5315259 - DNA, 25 bp, Homo sapien
gtaattccttgtctagctcttcatc

SEQ ID NO: 5315260 - DNA, 25 bp, Homo sapien
ctcagacaaaagttgaagattccat

SEQ ID NO: 5315261 - DNA, 25 bp, Homo sapien
tcattgtaagctgagttataacact

SEQ ID NO: 5315262 - DNA, 25 bp, Homo sapien
attgtaagctgagttataacactgc

SEQ ID NO: 5315263 - DNA, 25 bp, Homo sapien
cattgtaagctgagttataacactg

SEQ ID NO: 5315264 - DNA, 25 bp, Homo sapien
ttgtaagctgagttataacactgca

SEQ ID NO: 5315265 - DNA, 25 bp, Homo sapien
ctttacagcagcgcggcacatgtct

SEQ ID NO: 5315266 - DNA, 25 bp, Homo sapien
tgtctgccaccatgcgacctgctac

SEQ ID NO: 5315267 - DNA, 25 bp, Homo sapien
ccaccatgcgacctgctactcttgt

SEQ ID NO: 5315268 - DNA, 25 bp, Homo sapien
acagcagcgcggcacatgtctgcca

SEQ ID NO: 5315269 - DNA, 25 bp, Homo sapien
gacagacctaattcgaccaaactct

SEQ ID NO: 5315270 - DNA, 25 bp, Homo sapien
tatttctttggaacattgggtgagg

SEQ ID NO: 5315271 - DNA, 25 bp, Homo sapien
caaactctccaagtgtgtcattttc

SEQ ID NO: 5315272 - DNA, 25 bp, Homo sapien
tgtactaaacgtagaagacagacct

SEQ ID NO: 5315273 - DNA, 25 bp, Homo sapien
tggctgaacaaagttctcgttccac

SEQ ID NO: 5315274 - DNA, 25 bp, Homo sapien
tgtaagacgaaatcctcaaattcag

SEQ ID NO: 5315275 - DNA, 25 bp, Homo sapien
tgtggctgaacaaagttctcgttcc

SEQ ID NO: 5315276 - DNA, 25 bp, Homo sapien
ccataaactgtaagacgaaatcctc

SEQ ID NO: 5315277 - DNA, 25 bp, Homo sapien
caatctactaaaggcaccagagtag

SEQ ID NO: 5315278 - DNA, 25 bp, Homo sapien
tgaacaatctactaaaggcaccaga

SEQ ID NO: 5315279 - DNA, 25 bp, Homo sapien
tctactaaaggcaccagagtagaaa

SEQ ID NO: 5315280 - DNA, 25 bp, Homo sapien
aaatgttgctatgaactggaatgtg

SEQ ID NO: 5315281 - DNA, 25 bp, Homo sapien
agtcatttggatccaccccaggcaa

SEQ ID NO: 5315282 - DNA, 25 bp, Homo sapien
caggcaatgctctcatcaacagagg

SEQ ID NO: 5315283 - DNA, 25 bp, Homo sapien
gtagcatatgtgtaggaccttcagg

SEQ ID NO: 5315284 - DNA, 25 bp, Homo sapien
tcctgataccaaactgcgggctact

SEQ ID NO: 5315285 - DNA, 25 bp, Homo sapien
ggagatgtaaaactaagtgtctaag

SEQ ID NO: 5315286 - DNA, 25 bp, Homo sapien
aacagaagctttcttggagatgtaa

SEQ ID NO: 5315287 - DNA, 25 bp, Homo sapien
aacataccaaactctttaacagaag

SEQ ID NO: 5315288 - DNA, 25 bp, Homo sapien
tttaaaaggtgatgccacttcaaaa

SEQ ID NO: 5315289 - DNA, 25 bp, Homo sapien
cacaggagttaaccaagagggcttc

SEQ ID NO: 5315290 - DNA, 25 bp, Homo sapien
cactgtttggcaaccgctgaagtag

SEQ ID NO: 5315291 - DNA, 25 bp, Homo sapien
ccaattcaggtctcatgagtgcaag

SEQ ID NO: 5315292 - DNA, 25 bp, Homo sapien
tgggctgcttctagactaccggttt

SEQ ID NO: 5315293 - DNA, 25 bp, Homo sapien
gctaagtgtttttgcactagcttac

SEQ ID NO: 5315294 - DNA, 25 bp, Homo sapien
ggatggtaaaaagatgtgatgctgt

SEQ ID NO: 5315295 - DNA, 25 bp, Homo sapien
cagccagcgcccattatttgaagga

SEQ ID NO: 5315296 - DNA, 25 bp, Homo sapien
gtttttgcactagcttacttggtcc

SEQ ID NO: 5315297 - DNA, 25 bp, Homo sapien
gagtaaaaatgtcagtacccacatc

SEQ ID NO: 5315298 - DNA, 25 bp, Homo sapien
gataaaagagtaaaaatgtcagtac

SEQ ID NO: 5315299 - DNA, 25 bp, Homo sapien
aagagtaaaaatgtcagtacccaca

SEQ ID NO: 5315300 - DNA, 25 bp, Homo sapien
taaaaatgtcagtacccacatcata

SEQ ID NO: 5315301 - DNA, 25 bp, Homo sapien
caacttaggataacaaacagcgtac

SEQ ID NO: 5315302 - DNA, 25 bp, Homo sapien
actgttctgcagtaaataacctgga

SEQ ID NO: 5315303 - DNA, 25 bp, Homo sapien
ggcccaagcctatacgtaaatcact

SEQ ID NO: 5315304 - DNA, 25 bp, Homo sapien
taagggcagcttacttgaaccaaca

SEQ ID NO: 5315305 - DNA, 25 bp, Homo sapien
aaatagctgcagaagcaatatatga

SEQ ID NO: 5315306 - DNA, 25 bp, Homo sapien
gatgacattgaaatctaagcttgat

SEQ ID NO: 5315307 - DNA, 25 bp, Homo sapien
gtcaacaaagtaatccttcacatct

SEQ ID NO: 5315308 - DNA, 25 bp, Homo sapien
tttccacagaaacaagctaacgtgt

SEQ ID NO: 5315309 - DNA, 25 bp, Homo sapien
catggcggtgatccatattacagca

SEQ ID NO: 5315310 - DNA, 25 bp, Homo sapien
gggactaacacttgactgcttccca

SEQ ID NO: 5315311 - DNA, 25 bp, Homo sapien
cactgggaggttcaagcttctcaga

SEQ ID NO: 5315312 - DNA, 25 bp, Homo sapien
ctaacacttgactgcttcccactgg

SEQ ID NO: 5315313 - DNA, 25 bp, Homo sapien
gacacacctggaacatctagcttta

SEQ ID NO: 5315314 - DNA, 25 bp, Homo sapien
tagaggagcaaccaaatacggtaca

SEQ ID NO: 5315315 - DNA, 25 bp, Homo sapien
tgatagttcataccctgcacaagaa

SEQ ID NO: 5315316 - DNA, 25 bp, Homo sapien
gctccacaggttattctaccacagg

SEQ ID NO: 5315317 - DNA, 25 bp, Homo sapien
tagccaatcgagcaaagagatttac

SEQ ID NO: 5315318 - DNA, 25 bp, Homo sapien
tatctgtagccaatcgagcaaagag

SEQ ID NO: 5315319 - DNA, 25 bp, Homo sapien
aatctatgtaccctatattatctgt

SEQ ID NO: 5315320 - DNA, 25 bp, Homo sapien
ccctatattatctgtagccaatcga

SEQ ID NO: 5315321 - DNA, 25 bp, Homo sapien
agattttgcactgaaacccaaaggc

SEQ ID NO: 5315322 - DNA, 25 bp, Homo sapien
ttttgcactgaaacccaaaggccaa

SEQ ID NO: 5315323 - DNA, 25 bp, Homo sapien
gcactgaaacccaaaggccaattaa

SEQ ID NO: 5315324 - DNA, 25 bp, Homo sapien
tgcactgaaacccaaaggccaatta

SEQ ID NO: 5315325 - DNA, 25 bp, Homo sapien
ttcaaaataagtgatggccttttgc

SEQ ID NO: 5315326 - DNA, 25 bp, Homo sapien
attaaaggtcgccattcttctagca

SEQ ID NO: 5315327 - DNA, 25 bp, Homo sapien
catcaaaagggcacattaaaggtcg

SEQ ID NO: 5315328 - DNA, 25 bp, Homo sapien
ggcacattaaaggtcgccattcttc

SEQ ID NO: 5315329 - DNA, 25 bp, Homo sapien
caaaagggcacattaaaggtcgcca

SEQ ID NO: 5315330 - DNA, 25 bp, Homo sapien
ctcagcggtggcatctgctggaaaa

SEQ ID NO: 5315331 - DNA, 25 bp, Homo sapien
agcggtggcatctgctggaaaatat

SEQ ID NO: 5315332 - DNA, 25 bp, Homo sapien
cagcggtggcatctgctggaaaata

SEQ ID NO: 5315333 - DNA, 25 bp, Homo sapien
tcagcggtggcatctgctggaaaat

SEQ ID NO: 5315334 - DNA, 25 bp, Homo sapien
tcacaaagcgtttatgtgtcaggtc

SEQ ID NO: 5315335 - DNA, 25 bp, Homo sapien
tcaaatagacttataggcttggccc

SEQ ID NO: 5315336 - DNA, 25 bp, Homo sapien
caggtccttgtgtaacaggttggaa

SEQ ID NO: 5315337 - DNA, 25 bp, Homo sapien
tcaaagatctcacatatcaaggatc

SEQ ID NO: 5315338 - DNA, 25 bp, Homo sapien
tttaaatattctacagaacatagtt

SEQ ID NO: 5315339 - DNA, 25 bp, Homo sapien
ttaaatattctacagaacatagttg

SEQ ID NO: 5315340 - DNA, 25 bp, Homo sapien
agaacatagttgaaaaaagttatga

SEQ ID NO: 5315341 - DNA, 25 bp, Homo sapien
ggtcggcagcttttcacgagtgttt

SEQ ID NO: 5315342 - DNA, 25 bp, Homo sapien
gtcggcagcttttcacgagtgtttt

SEQ ID NO: 5315343 - DNA, 25 bp, Homo sapien
ggcagcttttcacgagtgttttgag

SEQ ID NO: 5315344 - DNA, 25 bp, Homo sapien
cggcagcttttcacgagtgttttga

SEQ ID NO: 5315345 - DNA, 25 bp, Homo sapien
tgataattagattggtgtattttaa

SEQ ID NO: 5315346 - DNA, 25 bp, Homo sapien
taattagattggtgtattttaagaa

SEQ ID NO: 5315347 - DNA, 25 bp, Homo sapien
gataattagattggtgtattttaag

SEQ ID NO: 5315348 - DNA, 25 bp, Homo sapien
tttgataattagattggtgtatttt

SEQ ID NO: 5315349 - DNA, 25 bp, Homo sapien
ggccagcaacaattatcaaaaagaa

SEQ ID NO: 5315350 - DNA, 25 bp, Homo sapien
tttcagtctttacaaggtaggcagc

SEQ ID NO: 5315351 - DNA, 25 bp, Homo sapien
gatgagagttcgataaccctcccag

SEQ ID NO: 5315352 - DNA, 25 bp, Homo sapien
ctgtctctggtatgaactaaaggga

SEQ ID NO: 5315353 - DNA, 25 bp, Homo sapien
tttgtgattcttgtaatctctcaag

SEQ ID NO: 5315354 - DNA, 25 bp, Homo sapien
gattcttgtaatctctcaagatgaa

SEQ ID NO: 5315355 - DNA, 25 bp, Homo sapien
gtgattcttgtaatctctcaagatg

SEQ ID NO: 5315356 - DNA, 25 bp, Homo sapien
ctgtatagtgaccttttgtgattct

SEQ ID NO: 5315357 - DNA, 25 bp, Homo sapien
tttctaccatgtcataaagtggtct

SEQ ID NO: 5315358 - DNA, 25 bp, Homo sapien
taggtgctctgtcttggaatataat

SEQ ID NO: 5315359 - DNA, 25 bp, Homo sapien
gtggtctccagggtaactccaaatc

SEQ ID NO: 5315360 - DNA, 25 bp, Homo sapien
cagggtaactccaaatcagctcttg

SEQ ID NO: 5315361 - DNA, 25 bp, Homo sapien
aaaaggcgggcaaatccctgcatca

SEQ ID NO: 5315362 - DNA, 25 bp, Homo sapien
tgatcaaaaggcgggcaaatccctg

SEQ ID NO: 5315363 - DNA, 25 bp, Homo sapien
tcaaaaggcgggcaaatccctgcat

SEQ ID NO: 5315364 - DNA, 25 bp, Homo sapien
agttgatcaaaaggcgggcaaatcc

SEQ ID NO: 5315365 - DNA, 25 bp, Homo sapien
taccagctcatacaataacttaata

SEQ ID NO: 5315366 - DNA, 25 bp, Homo sapien
gataccagctcatacaataacttaa

SEQ ID NO: 5315367 - DNA, 25 bp, Homo sapien
tgataccagctcatacaataactta

SEQ ID NO: 5315368 - DNA, 25 bp, Homo sapien
ttgataccagctcatacaataactt

SEQ ID NO: 5315369 - DNA, 25 bp, Homo sapien
gacaaatactgtgtaggtatccaaa

SEQ ID NO: 5315370 - DNA, 25 bp, Homo sapien
cagctagaaccagtgatgaggatga

SEQ ID NO: 5315371 - DNA, 25 bp, Homo sapien
ggaaatccagtcataagctacagca

SEQ ID NO: 5315372 - DNA, 25 bp, Homo sapien
actatgctccatctagcctaggcga

SEQ ID NO: 5315373 - DNA, 25 bp, Homo sapien
tcaaggtataatcccatgatctcac

SEQ ID NO: 5315374 - DNA, 25 bp, Homo sapien
agcaaatatagagggaggagcaatg

SEQ ID NO: 5315375 - DNA, 25 bp, Homo sapien
gagcaatgagacgtgagatcttgtt

SEQ ID NO: 5315376 - DNA, 25 bp, Homo sapien
taaagttagggcatctaactgcttt

SEQ ID NO: 5315377 - DNA, 25 bp, Homo sapien
agttcctcgccaaccagcaagtggt

SEQ ID NO: 5315378 - DNA, 25 bp, Homo sapien
ggattcctggaaagcctagggctgc

SEQ ID NO: 5315379 - DNA, 25 bp, Homo sapien
tcccctgtggttaggatacttctgc

SEQ ID NO: 5315380 - DNA, 25 bp, Homo sapien
aatctaaagattctggagggactcc

SEQ ID NO: 5315381 - DNA, 25 bp, Homo sapien
tatctacagatggtgcattccctct

SEQ ID NO: 5315382 - DNA, 25 bp, Homo sapien
gactactctggtttgactttcctgt

SEQ ID NO: 5315383 - DNA, 25 bp, Homo sapien
gtgctagagtgcagactaccaatct

SEQ ID NO: 5315384 - DNA, 25 bp, Homo sapien
tgaaaaccctggtaaacagtcacga

SEQ ID NO: 5315385 - DNA, 25 bp, Homo sapien
ccatgctctcagtttggtgttcata

SEQ ID NO: 5315386 - DNA, 25 bp, Homo sapien
taccatgctctcagtttggtgttca

SEQ ID NO: 5315387 - DNA, 25 bp, Homo sapien
tatagaatgagattttgatctaatt

SEQ ID NO: 5315388 - DNA, 25 bp, Homo sapien
tcatatagaatgagattttgatcta

SEQ ID NO: 5315389 - DNA, 25 bp, Homo sapien
aaagaagcagaaccttatgagattg

SEQ ID NO: 5315390 - DNA, 25 bp, Homo sapien
gaagcagaaccttatgagattgatc

SEQ ID NO: 5315391 - DNA, 25 bp, Homo sapien
gaaccttatgagattgatcaaagtg

SEQ ID NO: 5315392 - DNA, 25 bp, Homo sapien
aatcacaaatttggcaaagaagcag

SEQ ID NO: 5315393 - DNA, 25 bp, Homo sapien
tccgggttcaagcaattcttctgcc

SEQ ID NO: 5315394 - DNA, 25 bp, Homo sapien
aattcttctgcctcagccccccgag

SEQ ID NO: 5315395 - DNA, 25 bp, Homo sapien
ctgcagccagcctctgccttccggg

SEQ ID NO: 5315396 - DNA, 25 bp, Homo sapien
tgatccacctgcttcagcctcccaa

SEQ ID NO: 5315397 - DNA, 25 bp, Homo sapien
tgtcacaacaggagcaacacacaat

SEQ ID NO: 5315398 - DNA, 25 bp, Homo sapien
tgatactaatatcgccctggacatc

SEQ ID NO: 5315399 - DNA, 25 bp, Homo sapien
gatcaactccgccaggtctgagagg

SEQ ID NO: 5315400 - DNA, 25 bp, Homo sapien
taagacgttaagctcaagaatgagg

SEQ ID NO: 5315401 - DNA, 25 bp, Homo sapien
tagacgccaacggagatgcgaagag

SEQ ID NO: 5315402 - DNA, 25 bp, Homo sapien
aagacaaattctctttgccccgcct

SEQ ID NO: 5315403 - DNA, 25 bp, Homo sapien
cggaggacccttgagaaaggctcac

SEQ ID NO: 5315404 - DNA, 25 bp, Homo sapien
tctcccatgcgcaaaagtccacgga

SEQ ID NO: 5315405 - DNA, 25 bp, Homo sapien
gaggacggcttgagtacttcacagg

SEQ ID NO: 5315406 - DNA, 25 bp, Homo sapien
tcccgtaggaaagtggcagggagga

SEQ ID NO: 5315407 - DNA, 25 bp, Homo sapien
tgcggaggacgtagagggatggtaa

SEQ ID NO: 5315408 - DNA, 25 bp, Homo sapien
ttcgggagaagcagatgcggaggac

SEQ ID NO: 5315409 - DNA, 25 bp, Homo sapien
ggacaaagagcaaccatccccgaca

SEQ ID NO: 5315410 - DNA, 25 bp, Homo sapien
aaagagcaaccatccccgacacctc

SEQ ID NO: 5315411 - DNA, 25 bp, Homo sapien
tctggacaaagagcaaccatccccg

SEQ ID NO: 5315412 - DNA, 25 bp, Homo sapien
aagagcaaccatccccgacacctct

SEQ ID NO: 5315413 - DNA, 25 bp, Homo sapien
gcccggcccaggttgcatttgatct

SEQ ID NO: 5315414 - DNA, 25 bp, Homo sapien
gcaagtcggactcggcgtctagccg

SEQ ID NO: 5315415 - DNA, 25 bp, Homo sapien
gccagctgcaagtcggactcggcgt

SEQ ID NO: 5315416 - DNA, 25 bp, Homo sapien
cgtctagccgctccgcgtagggcag

SEQ ID NO: 5315417 - DNA, 25 bp, Homo sapien
ggctctccgactcccgcccgctcgg

SEQ ID NO: 5315418 - DNA, 25 bp, Homo sapien
actcccgcccgctcggccggctcca

SEQ ID NO: 5315419 - DNA, 25 bp, Homo sapien
gctccgggggctctccgactcccgc

SEQ ID NO: 5315420 - DNA, 25 bp, Homo sapien
ctcccgcccgctcggccggctccat

SEQ ID NO: 5315421 - DNA, 25 bp, Homo sapien
ctccatcccgcttgttccttataga

SEQ ID NO: 5315422 - DNA, 25 bp, Homo sapien
tccatcccgcttgttccttatagat

SEQ ID NO: 5315423 - DNA, 25 bp, Homo sapien
tgttgcctagaagtgttacacagcc

SEQ ID NO: 5315424 - DNA, 25 bp, Homo sapien
gctcaataattttcctattacagaa

SEQ ID NO: 5315425 - DNA, 25 bp, Homo sapien
ccacaccggaacagatgtaccattt

SEQ ID NO: 5315426 - DNA, 25 bp, Homo sapien
tacacagcctagaagtgttaccagt

SEQ ID NO: 5315427 - DNA, 25 bp, Homo sapien
ttttgctcaaaaatgttgcgtctcc

SEQ ID NO: 5315428 - DNA, 25 bp, Homo sapien
cttttgctcaaaaatgttgcgtctc

SEQ ID NO: 5315429 - DNA, 25 bp, Homo sapien
tcttttgctcaaaaatgttgcgtct

SEQ ID NO: 5315430 - DNA, 25 bp, Homo sapien
gtcttttgctcaaaaatgttgcgtc

SEQ ID NO: 5315431 - DNA, 25 bp, Homo sapien
tgctgtggcaacagacccaaaatat

SEQ ID NO: 5315432 - DNA, 25 bp, Homo sapien
tggcaacagacccaaaatattagtg

SEQ ID NO: 5315433 - DNA, 25 bp, Homo sapien
caacagacccaaaatattagtgact

SEQ ID NO: 5315434 - DNA, 25 bp, Homo sapien
gctgtggcaacagacccaaaatatt

SEQ ID NO: 5315435 - DNA, 25 bp, Homo sapien
aacattcatccaattggaagtcttc

SEQ ID NO: 5315436 - DNA, 25 bp, Homo sapien
tcctttccaaactgcaggtttctct

SEQ ID NO: 5315437 - DNA, 25 bp, Homo sapien
ttccaaactgcaggtttctcttgtc

SEQ ID NO: 5315438 - DNA, 25 bp, Homo sapien
ttcctttccaaactgcaggtttctc

SEQ ID NO: 5315439 - DNA, 25 bp, Homo sapien
ctttccaaactgcaggtttctcttg

SEQ ID NO: 5315440 - DNA, 25 bp, Homo sapien
gaaaggctaaaagacacgtcacatt

SEQ ID NO: 5315441 - DNA, 25 bp, Homo sapien
aaatctttgttgcttggcttgtctc

SEQ ID NO: 5315442 - DNA, 25 bp, Homo sapien
ttacagacctgaactaccacacgcg

SEQ ID NO: 5315443 - DNA, 25 bp, Homo sapien
tgcacatgcctcctttattcactta

SEQ ID NO: 5315444 - DNA, 25 bp, Homo sapien
tcagtttctgtggttttccttcctc

SEQ ID NO: 5315445 - DNA, 25 bp, Homo sapien
cagtttctgtggttttccttcctct

SEQ ID NO: 5315446 - DNA, 25 bp, Homo sapien
ttctgtggttttccttcctcttcat

SEQ ID NO: 5315447 - DNA, 25 bp, Homo sapien
tgtggttttccttcctcttcatctc

SEQ ID NO: 5315448 - DNA, 25 bp, Homo sapien
gctgactggtgcttcagttgaatcc

SEQ ID NO: 5315449 - DNA, 25 bp, Homo sapien
ggtgcttcagttgaatccaggtaac

SEQ ID NO: 5315450 - DNA, 25 bp, Homo sapien
ggtggagctgactggtgcttcagtt

SEQ ID NO: 5315451 - DNA, 25 bp, Homo sapien
gtgcttcagttgaatccaggtaact

SEQ ID NO: 5315452 - DNA, 25 bp, Homo sapien
ggtaagttagtaaagtgtcttctga

SEQ ID NO: 5315453 - DNA, 25 bp, Homo sapien
gagatttctcatggtaagttagtaa

SEQ ID NO: 5315454 - DNA, 25 bp, Homo sapien
ctgtccccaagatagagatttctca

SEQ ID NO: 5315455 - DNA, 25 bp, Homo sapien
tgtccccaagatagagatttctcat

SEQ ID NO: 5315456 - DNA, 25 bp, Homo sapien
gtcttccctggatgatgccttgact

SEQ ID NO: 5315457 - DNA, 25 bp, Homo sapien
ttccctggatgatgccttgactgct

SEQ ID NO: 5315458 - DNA, 25 bp, Homo sapien
tgatgccttgactgcttcatggtca

SEQ ID NO: 5315459 - DNA, 25 bp, Homo sapien
cctggatgatgccttgactgcttca

SEQ ID NO: 5315460 - DNA, 25 bp, Homo sapien
tggggtttcatcatgttgcccaagc

SEQ ID NO: 5315461 - DNA, 25 bp, Homo sapien
tggtctcgaactcctcgatccaccc

SEQ ID NO: 5315462 - DNA, 25 bp, Homo sapien
gtctcgaactcctcgatccacccac

SEQ ID NO: 5315463 - DNA, 25 bp, Homo sapien
tcgaactcctcgatccacccacctc

SEQ ID NO: 5315464 - DNA, 25 bp, Homo sapien
tcgtttcacgaatccaagttggaga

SEQ ID NO: 5315465 - DNA, 25 bp, Homo sapien
tcaaatttgtattcagcaggccgaa

SEQ ID NO: 5315466 - DNA, 25 bp, Homo sapien
tagatgctggagagtgactcacaga

SEQ ID NO: 5315467 - DNA, 25 bp, Homo sapien
gaagcaacgtggaagaccaaccaat

SEQ ID NO: 5315468 - DNA, 25 bp, Homo sapien
gtggctaaaactgtactttgtctgg

SEQ ID NO: 5315469 - DNA, 25 bp, Homo sapien
tatggtaaacacactactgaacatg

SEQ ID NO: 5315470 - DNA, 25 bp, Homo sapien
ttcaatagccactattgaaaatgtg

SEQ ID NO: 5315471 - DNA, 25 bp, Homo sapien
actataccgtgtcattttttgtatg

SEQ ID NO: 5315472 - DNA, 25 bp, Homo sapien
gaaaaatcagtcattgggaagttga

SEQ ID NO: 5315473 - DNA, 25 bp, Homo sapien
caagaaaggcaatagatttctgagg

SEQ ID NO: 5315474 - DNA, 25 bp, Homo sapien
tcaagaaaggcaatagatttctgag

SEQ ID NO: 5315475 - DNA, 25 bp, Homo sapien
cagtcattgggaagttgatggaagt

SEQ ID NO: 5315476 - DNA, 25 bp, Homo sapien
gatcagggaaaatgcagttggtctc

SEQ ID NO: 5315477 - DNA, 25 bp, Homo sapien
cagtgcttgattcaacagatccctg

SEQ ID NO: 5315478 - DNA, 25 bp, Homo sapien
ctatccctgatcagggaaaatgcag

SEQ ID NO: 5315479 - DNA, 25 bp, Homo sapien
gtgcttgattcaacagatccctggg

SEQ ID NO: 5315480 - DNA, 25 bp, Homo sapien
tataagcagagcaagatcaccaaca

SEQ ID NO: 5315481 - DNA, 25 bp, Homo sapien
agcaagatcaccaacaacagtgtca

SEQ ID NO: 5315482 - DNA, 25 bp, Homo sapien
ttgagactctaaaggttgaatttct

SEQ ID NO: 5315483 - DNA, 25 bp, Homo sapien
aaatgtctgtgttcctataagcaga

SEQ ID NO: 5315484 - DNA, 25 bp, Homo sapien
ttatatttgctacatcttcatattt

SEQ ID NO: 5315485 - DNA, 25 bp, Homo sapien
catagcaatttttatatttgctaca

SEQ ID NO: 5315486 - DNA, 25 bp, Homo sapien
ttttcttaccacaaagctgtaaagc

SEQ ID NO: 5315487 - DNA, 25 bp, Homo sapien
ttcttaccacaaagctgtaaagcat

SEQ ID NO: 5315488 - DNA, 25 bp, Homo sapien
ttttgaatgatgaacctaatagcct

SEQ ID NO: 5315489 - DNA, 25 bp, Homo sapien
ttgtggcaacaccattgtttcttct

SEQ ID NO: 5315490 - DNA, 25 bp, Homo sapien
tgatgaacctaatagccttatccgt

SEQ ID NO: 5315491 - DNA, 25 bp, Homo sapien
gccttatccgtaggctgcacatggc

SEQ ID NO: 5315492 - DNA, 25 bp, Homo sapien
atttataacttaagaactgccaggg

SEQ ID NO: 5315493 - DNA, 25 bp, Homo sapien
ctattttcttccccttgggagagat

SEQ ID NO: 5315494 - DNA, 25 bp, Homo sapien
ttttttgggcacagcatccggcttt

SEQ ID NO: 5315495 - DNA, 25 bp, Homo sapien
ggtgcgccaagcagtcccatgtgtc

SEQ ID NO: 5315496 - DNA, 25 bp, Homo sapien
ggcccctctacggtgggagatcaaa

SEQ ID NO: 5315497 - DNA, 25 bp, Homo sapien
caaatccgtggactacgaggtgttc

SEQ ID NO: 5315498 - DNA, 25 bp, Homo sapien
gagacctgtccctgtctaccgagga

SEQ ID NO: 5315499 - DNA, 25 bp, Homo sapien
taatgatacgcctcctcacagaagg

SEQ ID NO: 5315500 - DNA, 25 bp, Homo sapien
tagtggactggaccttgactgagca

SEQ ID NO: 5315501 - DNA, 25 bp, Homo sapien
tcatactaggaatcaggactctcag

SEQ ID NO: 5315502 - DNA, 25 bp, Homo sapien
taagtcagcgttgtggtgacacact

SEQ ID NO: 5315503 - DNA, 25 bp, Homo sapien
gatgacagtcacataggtgtaacag

SEQ ID NO: 5315504 - DNA, 25 bp, Homo sapien
tgcagtcactcaaaaagccaggatg

SEQ ID NO: 5315505 - DNA, 25 bp, Homo sapien
tgacggatcaccactgtatatgcag

SEQ ID NO: 5315506 - DNA, 25 bp, Homo sapien
caaatttgttgcgataaattttata

SEQ ID NO: 5315507 - DNA, 25 bp, Homo sapien
ctgcacccagcaagtaactgatata

SEQ ID NO: 5315508 - DNA, 25 bp, Homo sapien
agtaactgatatagttgagttttcc

SEQ ID NO: 5315509 - DNA, 25 bp, Homo sapien
tgatatagttgagttttccagatgt

SEQ ID NO: 5315510 - DNA, 25 bp, Homo sapien
caggcaattccatttgatctggcca

SEQ ID NO: 5315511 - DNA, 25 bp, Homo sapien
aagctactggtaatccataggaccc

SEQ ID NO: 5315512 - DNA, 25 bp, Homo sapien
gatctggccatcaccaaagctactg

SEQ ID NO: 5315513 - DNA, 25 bp, Homo sapien
cataggacccttcctcatgacggca

SEQ ID NO: 5315514 - DNA, 25 bp, Homo sapien
tgaaatgtcaatcatgttgaccaat

SEQ ID NO: 5315515 - DNA, 25 bp, Homo sapien
tcaatcatgttgaccaatttttcac

SEQ ID NO: 5315516 - DNA, 25 bp, Homo sapien
aagggtgtgaagacaaatttagctt

SEQ ID NO: 5315517 - DNA, 25 bp, Homo sapien
ctgatgaaatgtcaatcatgttgac

SEQ ID NO: 5315518 - DNA, 25 bp, Homo sapien
atgtggtcactgctataaaagggcc

SEQ ID NO: 5315519 - DNA, 25 bp, Homo sapien
cactgctataaaagggccgattgtt

SEQ ID NO: 5315520 - DNA, 25 bp, Homo sapien
gtgcatctgcctacagggtgtttct

SEQ ID NO: 5315521 - DNA, 25 bp, Homo sapien
tttgatcttcacagaacttcatgtg

SEQ ID NO: 5315522 - DNA, 25 bp, Homo sapien
ctctggacgatccaccaactgtgtg

SEQ ID NO: 5315523 - DNA, 25 bp, Homo sapien
tctggacgatccaccaactgtgtgc

SEQ ID NO: 5315524 - DNA, 25 bp, Homo sapien
tttattataactattctagagtggt

SEQ ID NO: 5315525 - DNA, 25 bp, Homo sapien
tggcggctgatcatgttaaaatcct

SEQ ID NO: 5315526 - DNA, 25 bp, Homo sapien
tctagagtggtaagtggtatctcat

SEQ ID NO: 5315527 - DNA, 25 bp, Homo sapien
tttgtatttccctggcggctgatca

SEQ ID NO: 5315528 - DNA, 25 bp, Homo sapien
catggtgggtaaagtctgtgaggcc

SEQ ID NO: 5315529 - DNA, 25 bp, Homo sapien
taacccatgggagctggtctaaaaa

SEQ ID NO: 5315530 - DNA, 25 bp, Homo sapien
tcaagcacctgcataggcatggtgg

SEQ ID NO: 5315531 - DNA, 25 bp, Homo sapien
gccatggtggatattgccagtaacc

SEQ ID NO: 5315532 - DNA, 25 bp, Homo sapien
ttgcataattgggtcaggatattca

SEQ ID NO: 5315533 - DNA, 25 bp, Homo sapien
aatgtgatacaagctttggtttagg

SEQ ID NO: 5315534 - DNA, 25 bp, Homo sapien
agagtgtttgcataattgggtcagg

SEQ ID NO: 5315535 - DNA, 25 bp, Homo sapien
cacttttaatgtgatacaagctttg

SEQ ID NO: 5315536 - DNA, 25 bp, Homo sapien
ccctggacttccaatgttgactgaa

SEQ ID NO: 5315537 - DNA, 25 bp, Homo sapien
tagtagaaagatgttgccacaagtc

SEQ ID NO: 5315538 - DNA, 25 bp, Homo sapien
aactctgccagtgaatagtcttgga

SEQ ID NO: 5315539 - DNA, 25 bp, Homo sapien
tgtatatcataaagcagagttcccc

SEQ ID NO: 5315540 - DNA, 25 bp, Homo sapien
catttgctaattccatcctcttttt

SEQ ID NO: 5315541 - DNA, 25 bp, Homo sapien
atttgctaattccatcctctttttt

SEQ ID NO: 5315542 - DNA, 25 bp, Homo sapien
tcatttgctaattccatcctctttt

SEQ ID NO: 5315543 - DNA, 25 bp, Homo sapien
aatccaagtaggaggagccagacca

SEQ ID NO: 5315544 - DNA, 25 bp, Homo sapien
tgcagaatagcaagacgaccaggtg

SEQ ID NO: 5315545 - DNA, 25 bp, Homo sapien
tacttgggaatagccagtagcaggc

SEQ ID NO: 5315546 - DNA, 25 bp, Homo sapien
ttcgcttagaaggatgtgacccatc

SEQ ID NO: 5315547 - DNA, 25 bp, Homo sapien
caaagggcctggggatctccactgg

SEQ ID NO: 5315548 - DNA, 25 bp, Homo sapien
cacactggaacccaaagggcctggg

SEQ ID NO: 5315549 - DNA, 25 bp, Homo sapien
accacactggaacccaaagggcctg

SEQ ID NO: 5315550 - DNA, 25 bp, Homo sapien
aagggcctggggatctccactggct

SEQ ID NO: 5315551 - DNA, 25 bp, Homo sapien
tgagcaatcctgtcggactctggaa

SEQ ID NO: 5315552 - DNA, 25 bp, Homo sapien
cacttggccgaaggatctgacctca

SEQ ID NO: 5315553 - DNA, 25 bp, Homo sapien
tggccccggcgccacatgattagag

SEQ ID NO: 5315554 - DNA, 25 bp, Homo sapien
taaacttgcagcctgtcctagggtg

SEQ ID NO: 5315555 - DNA, 25 bp, Homo sapien
gacccgcatcgaccaagatgtggaa

SEQ ID NO: 5315556 - DNA, 25 bp, Homo sapien
ttgtcagcgaggcagaggccgcttc

SEQ ID NO: 5315557 - DNA, 25 bp, Homo sapien
tccaagcggccatcaaacatatctg

SEQ ID NO: 5315558 - DNA, 25 bp, Homo sapien
ttccagagcatagtcgagagtagcg

SEQ ID NO: 5315559 - DNA, 25 bp, Homo sapien
agaggtaggtagcgtcaacgttcct

SEQ ID NO: 5315560 - DNA, 25 bp, Homo sapien
cagaggtaggtagcgtcaacgttcc

SEQ ID NO: 5315561 - DNA, 25 bp, Homo sapien
aggccagaggtaggtagcgtcaacg

SEQ ID NO: 5315562 - DNA, 25 bp, Homo sapien
ttgggaaatgtgagtgttctctgta

SEQ ID NO: 5315563 - DNA, 25 bp, Homo sapien
gggaaatgtgagtgttctctgtaaa

SEQ ID NO: 5315564 - DNA, 25 bp, Homo sapien
tgggaaatgtgagtgttctctgtaa

SEQ ID NO: 5315565 - DNA, 25 bp, Homo sapien
taaaatcatcaggaattgactgtgc

SEQ ID NO: 5315566 - DNA, 25 bp, Homo sapien
tataagagccaggtaacagtggcct

SEQ ID NO: 5315567 - DNA, 25 bp, Homo sapien
cagtggccttggagtgttttaagtt

SEQ ID NO: 5315568 - DNA, 25 bp, Homo sapien
catgaaacatctaccacgtgctgag

SEQ ID NO: 5315569 - DNA, 25 bp, Homo sapien
cataagtcacagcacataggaatga

SEQ ID NO: 5315570 - DNA, 25 bp, Homo sapien
cagcacataggaatgagaaggtcac

SEQ ID NO: 5315571 - DNA, 25 bp, Homo sapien
aaggtcacaggtactggcatagcgg

SEQ ID NO: 5315572 - DNA, 25 bp, Homo sapien
gcatagcgggtagtcccttttttca

SEQ ID NO: 5315573 - DNA, 25 bp, Homo sapien
cttccagtgaacaattccagaagca

SEQ ID NO: 5315574 - DNA, 25 bp, Homo sapien
gacactcgtaacttccagtgaacaa

SEQ ID NO: 5315575 - DNA, 25 bp, Homo sapien
tctctgacactcgtaacttccagtg

SEQ ID NO: 5315576 - DNA, 25 bp, Homo sapien
tcgtaacttccagtgaacaattcca

SEQ ID NO: 5315577 - DNA, 25 bp, Homo sapien
tccaaacatatacgtatgcatagcc

SEQ ID NO: 5315578 - DNA, 25 bp, Homo sapien
catagcctgatataaggcagaattc

SEQ ID NO: 5315579 - DNA, 25 bp, Homo sapien
tttccgttatccagggaaatgcgtg

SEQ ID NO: 5315580 - DNA, 25 bp, Homo sapien
cactctccaaggtgaatgtaaacac

SEQ ID NO: 5315581 - DNA, 25 bp, Homo sapien
cagctccggaaacagcccttcccct

SEQ ID NO: 5315582 - DNA, 25 bp, Homo sapien
aaatcagtcctgataaacacccctc

SEQ ID NO: 5315583 - DNA, 25 bp, Homo sapien
aaggaccaaatcagtcctgataaac

SEQ ID NO: 5315584 - DNA, 25 bp, Homo sapien
agggcgggcacggcggagacggcag

SEQ ID NO: 5315585 - DNA, 25 bp, Homo sapien
ctcctcgctgcctggtgccgtagag

SEQ ID NO: 5315586 - DNA, 25 bp, Homo sapien
tcctcgctgcctggtgccgtagagg

SEQ ID NO: 5315587 - DNA, 25 bp, Homo sapien
gcagggctgcgtccctgttcttccc

SEQ ID NO: 5315588 - DNA, 25 bp, Homo sapien
tcgctgcctggtgccgtagaggccc

SEQ ID NO: 5315589 - DNA, 25 bp, Homo sapien
cagtcagtagtttaaccttcttaat

SEQ ID NO: 5315590 - DNA, 25 bp, Homo sapien
taaccttcttaattagagttgccat

SEQ ID NO: 5315591 - DNA, 25 bp, Homo sapien
ttaaccttcttaattagagttgcca

SEQ ID NO: 5315592 - DNA, 25 bp, Homo sapien
taacgcttgattgtaaaccatcaga

SEQ ID NO: 5315593 - DNA, 25 bp, Homo sapien
tgggcacatttcagaactccatctg

SEQ ID NO: 5315594 - DNA, 25 bp, Homo sapien
ctgcccttttgaggcttgaatgact

SEQ ID NO: 5315595 - DNA, 25 bp, Homo sapien
gagccaagactgtaacagtggtcct

SEQ ID NO: 5315596 - DNA, 25 bp, Homo sapien
tgttcttcaccaccccaacaagatg

SEQ ID NO: 5315597 - DNA, 25 bp, Homo sapien
tcttcaggcctggaggaatgctggc

SEQ ID NO: 5315598 - DNA, 25 bp, Homo sapien
tcagcctggtcctaacgaatgcctt

SEQ ID NO: 5315599 - DNA, 25 bp, Homo sapien
gccaaaacaactgaagggctacttc

SEQ ID NO: 5315600 - DNA, 25 bp, Homo sapien
ggaggctccatctcgacctgtttta

SEQ ID NO: 5315601 - DNA, 25 bp, Homo sapien
aggaggctccatctcgacctgtttt

SEQ ID NO: 5315602 - DNA, 25 bp, Homo sapien
atgaacagtcagcagacgcccctga

SEQ ID NO: 5315603 - DNA, 25 bp, Homo sapien
caatgaactgaagtcgacctcaaca

SEQ ID NO: 5315604 - DNA, 25 bp, Homo sapien
tctcagtcctctggctgaatgaaca

SEQ ID NO: 5315605 - DNA, 25 bp, Homo sapien
atctccagctctgcggcacaatgaa

SEQ ID NO: 5315606 - DNA, 25 bp, Homo sapien
cctaagagtcagctgatttgctaca

SEQ ID NO: 5315607 - DNA, 25 bp, Homo sapien
cttttttaacctaagagtcagctga

SEQ ID NO: 5315608 - DNA, 25 bp, Homo sapien
gctgatttgctacatcatccaccat

SEQ ID NO: 5315609 - DNA, 25 bp, Homo sapien
gagtcagctgatttgctacatcatc

SEQ ID NO: 5315610 - DNA, 25 bp, Homo sapien
gttccaaattacgtacagccatagg

SEQ ID NO: 5315611 - DNA, 25 bp, Homo sapien
taaatccagcagctcaaggtgagag

SEQ ID NO: 5315612 - DNA, 25 bp, Homo sapien
cacaggatgttacttagggctccaa

SEQ ID NO: 5315613 - DNA, 25 bp, Homo sapien
gttaaaatcaagtcagtgccctggt

SEQ ID NO: 5315614 - DNA, 25 bp, Homo sapien
gaactactgttgagatctccagggc

SEQ ID NO: 5315615 - DNA, 25 bp, Homo sapien
ggatatggccgaaaggactgctcct

SEQ ID NO: 5315616 - DNA, 25 bp, Homo sapien
caggaagtcctatgggagcccttca

SEQ ID NO: 5315617 - DNA, 25 bp, Homo sapien
tgtgaggtcaaaggtaaacccattg

SEQ ID NO: 5315618 - DNA, 25 bp, Homo sapien
ggagatccatggatcagatcaggtg

SEQ ID NO: 5315619 - DNA, 25 bp, Homo sapien
tggagatccatggatcagatcaggt

SEQ ID NO: 5315620 - DNA, 25 bp, Homo sapien
ttggagatccatggatcagatcagg

SEQ ID NO: 5315621 - DNA, 25 bp, Homo sapien
gttggagatccatggatcagatcag

SEQ ID NO: 5315622 - DNA, 25 bp, Homo sapien
cttgcaatttggagagggtatgtaa

SEQ ID NO: 5315623 - DNA, 25 bp, Homo sapien
tgcaatttggagagggtatgtaaag

SEQ ID NO: 5315624 - DNA, 25 bp, Homo sapien
caatttggagagggtatgtaaagtt

SEQ ID NO: 5315625 - DNA, 25 bp, Homo sapien
gcaatttggagagggtatgtaaagt

SEQ ID NO: 5315626 - DNA, 25 bp, Homo sapien
cagcaatgccaaatgccatccccat

SEQ ID NO: 5315627 - DNA, 25 bp, Homo sapien
gccttcataacctaagaagccatca

SEQ ID NO: 5315628 - DNA, 25 bp, Homo sapien
ttcataacctaagaagccatcagca

SEQ ID NO: 5315629 - DNA, 25 bp, Homo sapien
ccgccttcataacctaagaagccat

SEQ ID NO: 5315630 - DNA, 25 bp, Homo sapien
ccttcataacctaagaagccatcag

SEQ ID NO: 5315631 - DNA, 25 bp, Homo sapien
tatgtttcataggttggggacccca

SEQ ID NO: 5315632 - DNA, 25 bp, Homo sapien
tacttgagaaacattccaatgtatt

SEQ ID NO: 5315633 - DNA, 25 bp, Homo sapien
cagtctggtatgtttcataggttgg

SEQ ID NO: 5315634 - DNA, 25 bp, Homo sapien
gaaacattccaatgtatttgtacat

SEQ ID NO: 5315635 - DNA, 25 bp, Homo sapien
tccattcgtggtcctggtgattcca

SEQ ID NO: 5315636 - DNA, 25 bp, Homo sapien
caggccaggttctagtgatctgaga

SEQ ID NO: 5315637 - DNA, 25 bp, Homo sapien
gacgacccctctctcgggagtgact

SEQ ID NO: 5315638 - DNA, 25 bp, Homo sapien
cagtttccgtttcagggaatgcgca

SEQ ID NO: 5315639 - DNA, 25 bp, Homo sapien
ggttcgagcggagcctgcactgaga

SEQ ID NO: 5315640 - DNA, 25 bp, Homo sapien
ttcgagcggagcctgcactgagagg

SEQ ID NO: 5315641 - DNA, 25 bp, Homo sapien
cgagcggagcctgcactgagaggca

SEQ ID NO: 5315642 - DNA, 25 bp, Homo sapien
tcaggttcgagcggagcctgcactg

SEQ ID NO: 5315643 - DNA, 25 bp, Homo sapien
aagggtgggcgaaaaagcatttgca

SEQ ID NO: 5315644 - DNA, 25 bp, Homo sapien
agcgaaagggtgggcgaaaaagcat

SEQ ID NO: 5315645 - DNA, 25 bp, Homo sapien
tttcccacgaagaggtcgccgtcgc

SEQ ID NO: 5315646 - DNA, 25 bp, Homo sapien
tcacgtagaaaattagaccgcctct

SEQ ID NO: 5315647 - DNA, 25 bp, Homo sapien
ggcgataatcgaattagcctcaaat

SEQ ID NO: 5315648 - DNA, 25 bp, Homo sapien
gcattccgaacgcaacatcaagggc

SEQ ID NO: 5315649 - DNA, 25 bp, Homo sapien
catcaagggcgaaaagaggctgcac

SEQ ID NO: 5315650 - DNA, 25 bp, Homo sapien
ggaggatgaggtccgggctggaccc

SEQ ID NO: 5315651 - DNA, 25 bp, Homo sapien
ctattgtcctgctcgggtagcggca

SEQ ID NO: 5315652 - DNA, 25 bp, Homo sapien
aggatgaggtccgggctggacccgg

SEQ ID NO: 5315653 - DNA, 25 bp, Homo sapien
ttgtcctgctcgggtagcggcagca

SEQ ID NO: 5315654 - DNA, 25 bp, Homo sapien
cgaggctcggctccctgggcggctg

SEQ ID NO: 5315655 - DNA, 25 bp, Homo sapien
gaggacgtggacgcgcccgaggctc

SEQ ID NO: 5315656 - DNA, 25 bp, Homo sapien
acgcgcccgaggctcggctccctgg

SEQ ID NO: 5315657 - DNA, 25 bp, Homo sapien
acgtggacgcgcccgaggctcggct

SEQ ID NO: 5315658 - DNA, 25 bp, Homo sapien
ggccgccgaggagcgggaggaggac

SEQ ID NO: 5315659 - DNA, 25 bp, Homo sapien
ccggccgccgaggagcgggaggagg

SEQ ID NO: 5315660 - DNA, 25 bp, Homo sapien
gccgaggagcgggaggaggacggga

SEQ ID NO: 5315661 - DNA, 25 bp, Homo sapien
ccgccgaggagcgggaggaggacgg

SEQ ID NO: 5315662 - DNA, 25 bp, Homo sapien
tgccctcgccgtgatgcagcacaat

SEQ ID NO: 5315663 - DNA, 25 bp, Homo sapien
caatgcagcagtatcgcagcttcct

SEQ ID NO: 5315664 - DNA, 25 bp, Homo sapien
ctggcggggcttggcacggccgctc

SEQ ID NO: 5315665 - DNA, 25 bp, Homo sapien
cttccttggttctcgctggcggggc

SEQ ID NO: 5315666 - DNA, 25 bp, Homo sapien
gatgtggcgtcaggaggaccaggtc

SEQ ID NO: 5315667 - DNA, 25 bp, Homo sapien
cctgtggttgcggatcggaatctga

SEQ ID NO: 5315668 - DNA, 25 bp, Homo sapien
cttcttgggctgcgctctgccggag

SEQ ID NO: 5315669 - DNA, 25 bp, Homo sapien
tgggatgatccctcctgcacctctt

SEQ ID NO: 5315670 - DNA, 25 bp, Homo sapien
aaggaactgctgtcactaggtcgtc

SEQ ID NO: 5315671 - DNA, 25 bp, Homo sapien
tacttgtgacacatcctgagcagag

SEQ ID NO: 5315672 - DNA, 25 bp, Homo sapien
ctcttgggcaagactagtaacaact

SEQ ID NO: 5315673 - DNA, 25 bp, Homo sapien
gagaagacctccctctacttgtgac

SEQ ID NO: 5315674 - DNA, 25 bp, Homo sapien
taaggtgacttattgaagccctggc

SEQ ID NO: 5315675 - DNA, 25 bp, Homo sapien
gaagccctggccagctctaggagtt

SEQ ID NO: 5315676 - DNA, 25 bp, Homo sapien
taagagtgacattcatcctggtgcc

SEQ ID NO: 5315677 - DNA, 25 bp, Homo sapien
ttcacttgtcaatgtagagggagct

SEQ ID NO: 5315678 - DNA, 25 bp, Homo sapien
gagagggcatctcagaggcaattct

SEQ ID NO: 5315679 - DNA, 25 bp, Homo sapien
cttgaggcgagtgtagagagggcat

SEQ ID NO: 5315680 - DNA, 25 bp, Homo sapien
tgtacatcactgacgggtggtaagc

SEQ ID NO: 5315681 - DNA, 25 bp, Homo sapien
gagcattgttttgaaagcgttgtac

SEQ ID NO: 5315682 - DNA, 25 bp, Homo sapien
tttggagtcatacccacttggttca

SEQ ID NO: 5315683 - DNA, 25 bp, Homo sapien
tagaccactattaaagggttcttgc

SEQ ID NO: 5315684 - DNA, 25 bp, Homo sapien
cacttggttcaagtcctcttggttt

SEQ ID NO: 5315685 - DNA, 25 bp, Homo sapien
ggttcttgccttagagggtaggcca

SEQ ID NO: 5315686 - DNA, 25 bp, Homo sapien
caaaggtacaggatgataatttcca

SEQ ID NO: 5315687 - DNA, 25 bp, Homo sapien
cctaatggttatgacctgtggtagc

SEQ ID NO: 5315688 - DNA, 25 bp, Homo sapien
tctttacctcaaaggtacaggatga

SEQ ID NO: 5315689 - DNA, 25 bp, Homo sapien
aaagcctggcatggtaacattccag

SEQ ID NO: 5315690 - DNA, 25 bp, Homo sapien
aaaatctcatagaattgagagttga

SEQ ID NO: 5315691 - DNA, 25 bp, Homo sapien
tctcatagaattgagagttgattta

SEQ ID NO: 5315692 - DNA, 25 bp, Homo sapien
gaggcgctccgttcttctgtgaaaa

SEQ ID NO: 5315693 - DNA, 25 bp, Homo sapien
ttttgaggcgctccgttcttctgtg

SEQ ID NO: 5315694 - DNA, 25 bp, Homo sapien
cccagagaccccactaagtgataga

SEQ ID NO: 5315695 - DNA, 25 bp, Homo sapien
tttaacaagcctactattctattgc

SEQ ID NO: 5315696 - DNA, 25 bp, Homo sapien
taagtgatagatactagctgaatgc

SEQ ID NO: 5315697 - DNA, 25 bp, Homo sapien
tactgggtatatataaaacggagta

SEQ ID NO: 5315698 - DNA, 25 bp, Homo sapien
catgagttctgactctaatgacaac

SEQ ID NO: 5315699 - DNA, 25 bp, Homo sapien
catgaaggttgggttgtcgagatca

SEQ ID NO: 5315700 - DNA, 25 bp, Homo sapien
gactcaatctcaaagatgctgactg

SEQ ID NO: 5315701 - DNA, 25 bp, Homo sapien
taatgacaactctgtgggaaatgga

SEQ ID NO: 5315702 - DNA, 25 bp, Homo sapien
gaggatctgtcttgtgttgggcaca

SEQ ID NO: 5315703 - DNA, 25 bp, Homo sapien
ccagctgggtaatctgggaagcctt

SEQ ID NO: 5315704 - DNA, 25 bp, Homo sapien
tcatgcacttgtttgaggacatcac

SEQ ID NO: 5315705 - DNA, 25 bp, Homo sapien
cagaggcatggaaagcccaagacag

SEQ ID NO: 5315706 - DNA, 25 bp, Homo sapien
tagcaaagtcctatggcagggaggc

SEQ ID NO: 5315707 - DNA, 25 bp, Homo sapien
tggagcctgcctcctacttacgagg

SEQ ID NO: 5315708 - DNA, 25 bp, Homo sapien
cagcgagtggctgcctagcaaagtc

SEQ ID NO: 5315709 - DNA, 25 bp, Homo sapien
tattttacagtaatctggagcctgc

SEQ ID NO: 5315710 - DNA, 25 bp, Homo sapien
tacgccgggcataatggaattgcag

SEQ ID NO: 5315711 - DNA, 25 bp, Homo sapien
tcctcgcggagctaaggtggactct

SEQ ID NO: 5315712 - DNA, 25 bp, Homo sapien
cagaggacgtctagtatctccgggc

SEQ ID NO: 5315713 - DNA, 25 bp, Homo sapien
tatttcgagcttccaggcaagggcc

SEQ ID NO: 5315714 - DNA, 25 bp, Homo sapien
ggcgcttgcaagtagtaaatagagg

SEQ ID NO: 5315715 - DNA, 25 bp, Homo sapien
ttttcgggtcggagaatccactgcg

SEQ ID NO: 5315716 - DNA, 25 bp, Homo sapien
tgagctcttcggcagtcaaatttgc

SEQ ID NO: 5315717 - DNA, 25 bp, Homo sapien
gggcgttcattatctaggtttgtta

SEQ ID NO: 5315718 - DNA, 25 bp, Homo sapien
tagtctgtcttacacatacaagccg

SEQ ID NO: 5315719 - DNA, 25 bp, Homo sapien
tatttcgtgaagtctgggagcctga

SEQ ID NO: 5315720 - DNA, 25 bp, Homo sapien
tttccctgtatttcgtgaagtctgg

SEQ ID NO: 5315721 - DNA, 25 bp, Homo sapien
ccttttgttacagttccagtctttg

SEQ ID NO: 5315722 - DNA, 25 bp, Homo sapien
aaatatctgttacatggtaagtgct

SEQ ID NO: 5315723 - DNA, 25 bp, Homo sapien
ctagtggtgccttcaggttttagcg

SEQ ID NO: 5315724 - DNA, 25 bp, Homo sapien
tagcgctaatagtggatttgaagta

SEQ ID NO: 5315725 - DNA, 25 bp, Homo sapien
tgccttcaggttttagcgctaatag

SEQ ID NO: 5315726 - DNA, 25 bp, Homo sapien
ctgctgaaacttgttggccggaagt

SEQ ID NO: 5315727 - DNA, 25 bp, Homo sapien
tgctgaaacttgttggccggaagtt

SEQ ID NO: 5315728 - DNA, 25 bp, Homo sapien
attactggttattgattgggtaggg

SEQ ID NO: 5315729 - DNA, 25 bp, Homo sapien
ctttaaaattactggttattgattg

SEQ ID NO: 5315730 - DNA, 25 bp, Homo sapien
ggctacagaaccatacacttgcagt

SEQ ID NO: 5315731 - DNA, 25 bp, Homo sapien
cacttgcagtctttatcagggtagt

SEQ ID NO: 5315732 - DNA, 25 bp, Homo sapien
tcatactcgttcagcagtgggcttg

SEQ ID NO: 5315733 - DNA, 25 bp, Homo sapien
ggcttgactgtagccagtttgacta

SEQ ID NO: 5315734 - DNA, 25 bp, Homo sapien
aggggctctagaagctgactgcctt

SEQ ID NO: 5315735 - DNA, 25 bp, Homo sapien
gctgactgcctttgtgtttgccaca

SEQ ID NO: 5315736 - DNA, 25 bp, Homo sapien
tgggaaggggctctagaagctgact

SEQ ID NO: 5315737 - DNA, 25 bp, Homo sapien
agctgactgcctttgtgtttgccac

SEQ ID NO: 5315738 - DNA, 25 bp, Homo sapien
gcaggcctgtgtttagaatgggtca

SEQ ID NO: 5315739 - DNA, 25 bp, Homo sapien
taagctgcagcacttgagtcacagg

SEQ ID NO: 5315740 - DNA, 25 bp, Homo sapien
gcccatcagttgctgataagctgca

SEQ ID NO: 5315741 - DNA, 25 bp, Homo sapien
ggaatcagtgatcccatgagagctc

SEQ ID NO: 5315742 - DNA, 25 bp, Homo sapien
gagcgttgacatatcaggattcttt

SEQ ID NO: 5315743 - DNA, 25 bp, Homo sapien
tacacagagacgtggatgtagaccc

SEQ ID NO: 5315744 - DNA, 25 bp, Homo sapien
tcaggtgatattgagcgttgacata

SEQ ID NO: 5315745 - DNA, 25 bp, Homo sapien
cactggtagcaattgcaaaggctct

SEQ ID NO: 5315746 - DNA, 25 bp, Homo sapien
caatgaggggtagttcgtctctgta

SEQ ID NO: 5315747 - DNA, 25 bp, Homo sapien
gtattggtagcattagcgcacgtgc

SEQ ID NO: 5315748 - DNA, 25 bp, Homo sapien
gctatatagctctcttaatacctga

SEQ ID NO: 5315749 - DNA, 25 bp, Homo sapien
catagggaccgtggcccccaatgag

SEQ ID NO: 5315750 - DNA, 25 bp, Homo sapien
ggacatgggtatccttttgatgctg

SEQ ID NO: 5315751 - DNA, 25 bp, Homo sapien
ccaggacatgggtatccttttgatg

SEQ ID NO: 5315752 - DNA, 25 bp, Homo sapien
caggacatgggtatccttttgatgc

SEQ ID NO: 5315753 - DNA, 25 bp, Homo sapien
atgctgacagcatttgctgctgctt

SEQ ID NO: 5315754 - DNA, 25 bp, Homo sapien
ctgcctctgggctgctttgctcact

SEQ ID NO: 5315755 - DNA, 25 bp, Homo sapien
ctgacattgaacttccactgcctct

SEQ ID NO: 5315756 - DNA, 25 bp, Homo sapien
ctctgggctgctttgctcactcctc

SEQ ID NO: 5315757 - DNA, 25 bp, Homo sapien
ggctgacattgaacttccactgcct

SEQ ID NO: 5315758 - DNA, 25 bp, Homo sapien
gagacagtcgtatttaatttatcaa

SEQ ID NO: 5315759 - DNA, 25 bp, Homo sapien
tgtggagtttggcactcgaattgag

SEQ ID NO: 5315760 - DNA, 25 bp, Homo sapien
gcactcgaattgagacagtcgtatt

SEQ ID NO: 5315761 - DNA, 25 bp, Homo sapien
tatcaatctgtcgtttcaaccctga

SEQ ID NO: 5315762 - DNA, 25 bp, Homo sapien
gtgtccatcaaaataagagctgaag

SEQ ID NO: 5315763 - DNA, 25 bp, Homo sapien
aggtgatggtgtatgaagtgtccat

SEQ ID NO: 5315764 - DNA, 25 bp, Homo sapien
gattgaagtccccttccatggagga

SEQ ID NO: 5315765 - DNA, 25 bp, Homo sapien
cttggattgaagtccccttccatgg

SEQ ID NO: 5315766 - DNA, 25 bp, Homo sapien
taggtatgtgatgcttaataatcac

SEQ ID NO: 5315767 - DNA, 25 bp, Homo sapien
ttattgattaattcacactggttcc

SEQ ID NO: 5315768 - DNA, 25 bp, Homo sapien
taatataggtatgtgatgcttaata

SEQ ID NO: 5315769 - DNA, 25 bp, Homo sapien
ttgattaattcacactggttcccac

SEQ ID NO: 5315770 - DNA, 25 bp, Homo sapien
gctctcatcttagaagaggtagttg

SEQ ID NO: 5315771 - DNA, 25 bp, Homo sapien
tatggattgtgactttatgcggctc

SEQ ID NO: 5315772 - DNA, 25 bp, Homo sapien
tgcctcttattttcggagaaagccc

SEQ ID NO: 5315773 - DNA, 25 bp, Homo sapien
tatgcggctcaccttgacgtacgac

SEQ ID NO: 5315774 - DNA, 25 bp, Homo sapien
tttcattccgtttctctgtaggaca

SEQ ID NO: 5315775 - DNA, 25 bp, Homo sapien
ttcctgcagttgaggccgccacaaa

SEQ ID NO: 5315776 - DNA, 25 bp, Homo sapien
ttgaggccgccacaaaaaagcacga

SEQ ID NO: 5315777 - DNA, 25 bp, Homo sapien
tctgtaggacaactttgggtttgac

SEQ ID NO: 5315778 - DNA, 25 bp, Homo sapien
gacgtgggccacgatgagtattcca

SEQ ID NO: 5315779 - DNA, 25 bp, Homo sapien
tctggtcaagaaacacaaggacgtg

SEQ ID NO: 5315780 - DNA, 25 bp, Homo sapien
gaagagatcgccaattacaggccca

SEQ ID NO: 5315781 - DNA, 25 bp, Homo sapien
cgaagacatgatcgcggaggagcac

SEQ ID NO: 5315782 - DNA, 25 bp, Homo sapien
gaactaccacctcgagtgcaatgaa

SEQ ID NO: 5315783 - DNA, 25 bp, Homo sapien
ccagtacatgtttctgcggcagcgg

SEQ ID NO: 5315784 - DNA, 25 bp, Homo sapien
caagctgcagcagttcctacgggac

SEQ ID NO: 5315785 - DNA, 25 bp, Homo sapien
gacaactacgaggaggactaccaga

SEQ ID NO: 5315786 - DNA, 25 bp, Homo sapien
gatgccgccaccatcgctgaatgga

SEQ ID NO: 5315787 - DNA, 25 bp, Homo sapien
cagtggagaccttacagagaatgca

SEQ ID NO: 5315788 - DNA, 25 bp, Homo sapien
cacaagttttaccacgatgccaagg

SEQ ID NO: 5315789 - DNA, 25 bp, Homo sapien
aaggagatctttgggcgtatacagg

SEQ ID NO: 5315790 - DNA, 25 bp, Homo sapien
aaaacggtttgccagctgaacaggg

SEQ ID NO: 5315791 - DNA, 25 bp, Homo sapien
cagcctcaggagtaaagtgcccgct

SEQ ID NO: 5315792 - DNA, 25 bp, Homo sapien
tggatgcccacttgccttaaagcag

SEQ ID NO: 5315793 - DNA, 25 bp, Homo sapien
gagtctcttaactgatggatgccca

SEQ ID NO: 5315794 - DNA, 25 bp, Homo sapien
gaagcttttaggatggtatctatca

SEQ ID NO: 5315795 - DNA, 25 bp, Homo sapien
aaaaccttgtgagacattcacttgc

SEQ ID NO: 5315796 - DNA, 25 bp, Homo sapien
gacaaactccactgtacatcttgga

SEQ ID NO: 5315797 - DNA, 25 bp, Homo sapien
tgccatatttagatgtgtcagtgga

SEQ ID NO: 5315798 - DNA, 25 bp, Homo sapien
ccctcagccctgatgctaattatga

SEQ ID NO: 5315799 - DNA, 25 bp, Homo sapien
cacttgcaaggccttggtgatcacc

SEQ ID NO: 5315800 - DNA, 25 bp, Homo sapien
tgccatgagggtaaagggttccaat

SEQ ID NO: 5315801 - DNA, 25 bp, Homo sapien
gaagtttccgaatctcacactagag

SEQ ID NO: 5315802 - DNA, 25 bp, Homo sapien
ttactgtactgcctcgatctgtgcc

SEQ ID NO: 5315803 - DNA, 25 bp, Homo sapien
gctgtccctagatggcagaaacggt

SEQ ID NO: 5315804 - DNA, 25 bp, Homo sapien
ccacatgtgcgagtcaggtagagcg

SEQ ID NO: 5315805 - DNA, 25 bp, Homo sapien
gagttagctgaatggcctctccgct

SEQ ID NO: 5315806 - DNA, 25 bp, Homo sapien
ggaaggcttcctcaatcggaaacac

SEQ ID NO: 5315807 - DNA, 25 bp, Homo sapien
aggagacaccttcggcccagatgga

SEQ ID NO: 5315808 - DNA, 25 bp, Homo sapien
gacctctgatcgtaaagccaagact

SEQ ID NO: 5315809 - DNA, 25 bp, Homo sapien
atcggaaacacgagtgggaggccca

SEQ ID NO: 5315810 - DNA, 25 bp, Homo sapien
acaaagatgcaaagactgctgcttc

SEQ ID NO: 5315811 - DNA, 25 bp, Homo sapien
tggaattccctaccacagcgaggtc

SEQ ID NO: 5315812 - DNA, 25 bp, Homo sapien
gcttctggaattccctaccacagcg

SEQ ID NO: 5315813 - DNA, 25 bp, Homo sapien
ccacagcgaggtccctgtgagtttg

SEQ ID NO: 5315814 - DNA, 25 bp, Homo sapien
tcagcttatcccgacccaggagatg

SEQ ID NO: 5315815 - DNA, 25 bp, Homo sapien
tttcacagtttaagggaggctttga

SEQ ID NO: 5315816 - DNA, 25 bp, Homo sapien
ggtcaagtgagtcatcctggagctg

SEQ ID NO: 5315817 - DNA, 25 bp, Homo sapien
aaagagagctagtcacatttcacag

SEQ ID NO: 5315818 - DNA, 25 bp, Homo sapien
tcagtgaaattccagcatgcaagct

SEQ ID NO: 5315819 - DNA, 25 bp, Homo sapien
tgttggaaataacccgcctctagtg

SEQ ID NO: 5315820 - DNA, 25 bp, Homo sapien
tcacttactaacacacgacatgcgg

SEQ ID NO: 5315821 - DNA, 25 bp, Homo sapien
gactcttagaagtgcccgagatggg

SEQ ID NO: 5315822 - DNA, 25 bp, Homo sapien
aatctagcacggtgactagttgttg

SEQ ID NO: 5315823 - DNA, 25 bp, Homo sapien
gcttttaaatctagcacggtgacta

SEQ ID NO: 5315824 - DNA, 25 bp, Homo sapien
aaatgcttttaaatctagcacggtg

SEQ ID NO: 5315825 - DNA, 25 bp, Homo sapien
agcacggtgactagttgttgttctt

SEQ ID NO: 5315826 - DNA, 25 bp, Homo sapien
tattcttccactatcatgttttttg

SEQ ID NO: 5315827 - DNA, 25 bp, Homo sapien
ccctgattttcagtgatacaatatg

SEQ ID NO: 5315828 - DNA, 25 bp, Homo sapien
atatgggtgacaatactggcccctc

SEQ ID NO: 5315829 - DNA, 25 bp, Homo sapien
tcttgttgccataatgctgtgctat

SEQ ID NO: 5315830 - DNA, 25 bp, Homo sapien
tgcggttcagggcattttcactcaa

SEQ ID NO: 5315831 - DNA, 25 bp, Homo sapien
gaagtgaaaggtcctgcttgttccc

SEQ ID NO: 5315832 - DNA, 25 bp, Homo sapien
cacgatgtgtgagtagctgacgctt

SEQ ID NO: 5315833 - DNA, 25 bp, Homo sapien
gacgcttctcttccatgcggttcag

SEQ ID NO: 5315834 - DNA, 25 bp, Homo sapien
tgggctctgtgcgttcttgcctcag

SEQ ID NO: 5315835 - DNA, 25 bp, Homo sapien
tggcttccccgtggtgagcctgggc

SEQ ID NO: 5315836 - DNA, 25 bp, Homo sapien
tctgtgcgttcttgcctcagcacag

SEQ ID NO: 5315837 - DNA, 25 bp, Homo sapien
ggctctgtgcgttcttgcctcagca

SEQ ID NO: 5315838 - DNA, 25 bp, Homo sapien
gatatttatcacacggtggagaccc

SEQ ID NO: 5315839 - DNA, 25 bp, Homo sapien
gcgtatgtttccacttggccttgac

SEQ ID NO: 5315840 - DNA, 25 bp, Homo sapien
ggcgtgtggcttgcgtatgtttcca

SEQ ID NO: 5315841 - DNA, 25 bp, Homo sapien
gacttgtcttttcggatatttatca

SEQ ID NO: 5315842 - DNA, 25 bp, Homo sapien
gatataatttatcctcataagcagt

SEQ ID NO: 5315843 - DNA, 25 bp, Homo sapien
gcttgtattagttcacttcttttca

SEQ ID NO: 5315844 - DNA, 25 bp, Homo sapien
agcagctccatcttactgagatata

SEQ ID NO: 5315845 - DNA, 25 bp, Homo sapien
attcattcacaaattgatggatatt

SEQ ID NO: 5315846 - DNA, 25 bp, Homo sapien
gagcatcttccttttaaaggcagcc

SEQ ID NO: 5315847 - DNA, 25 bp, Homo sapien
agcttttgagcatcttccttttaaa

SEQ ID NO: 5315848 - DNA, 25 bp, Homo sapien
tagtctaatggcgtggtaacagctc

SEQ ID NO: 5315849 - DNA, 25 bp, Homo sapien
gtagagaaggagtgtcaccaaagcc

SEQ ID NO: 5315850 - DNA, 25 bp, Homo sapien
caaatcctcattactgcgggcagca

SEQ ID NO: 5315851 - DNA, 25 bp, Homo sapien
ggcactgttttatggcacgacatca

SEQ ID NO: 5315852 - DNA, 25 bp, Homo sapien
ttcgagctttcctaccaggtcggag

SEQ ID NO: 5315853 - DNA, 25 bp, Homo sapien
tctttccaaagactagctatggccc

SEQ ID NO: 5315854 - DNA, 25 bp, Homo sapien
ttacagcaacactcagagaccgatg

SEQ ID NO: 5315855 - DNA, 25 bp, Homo sapien
caatcgtccttggtgagccgggatc

SEQ ID NO: 5315856 - DNA, 25 bp, Homo sapien
cctctaatttaggacgcaggtcatg

SEQ ID NO: 5315857 - DNA, 25 bp, Homo sapien
tgttcatggcgtgagcaccttcctg

SEQ ID NO: 5315858 - DNA, 25 bp, Homo sapien
gtggtttacaacacccgcgagcaca

SEQ ID NO: 5315859 - DNA, 25 bp, Homo sapien
caacctgtactacacggcaggcaag

SEQ ID NO: 5315860 - DNA, 25 bp, Homo sapien
cttatcatggcggatcggacggcgc

SEQ ID NO: 5315861 - DNA, 25 bp, Homo sapien
ctgtgcctgtgtgtcgccgcggaaa

SEQ ID NO: 5315862 - DNA, 25 bp, Homo sapien
gaagcaaatctagccgaggataccc

SEQ ID NO: 5315863 - DNA, 25 bp, Homo sapien
cctgagagtccaagggcttcatgtt

SEQ ID NO: 5315864 - DNA, 25 bp, Homo sapien
ggtggtggcaacatactactatagg

SEQ ID NO: 5315865 - DNA, 25 bp, Homo sapien
catgttttcagagcgggtcacttca

SEQ ID NO: 5315866 - DNA, 25 bp, Homo sapien
aatttcatcggaaaacagcttcagc

SEQ ID NO: 5315867 - DNA, 25 bp, Homo sapien
tctaccaggagcctaaaagggtgaa

SEQ ID NO: 5315868 - DNA, 25 bp, Homo sapien
gaaaatatggagaatgaaaatcgtc

SEQ ID NO: 5315869 - DNA, 25 bp, Homo sapien
tggtgctttcagggcgtgacactag

SEQ ID NO: 5315870 - DNA, 25 bp, Homo sapien
ctctggccttttccctcgttgacct

SEQ ID NO: 5315871 - DNA, 25 bp, Homo sapien
tctgatgctgccttcaggctccctt

SEQ ID NO: 5315872 - DNA, 25 bp, Homo sapien
tctccaaactccgttggttgttctg

SEQ ID NO: 5315873 - DNA, 25 bp, Homo sapien
tccgttggttgttctgtgccatctt

SEQ ID NO: 5315874 - DNA, 25 bp, Homo sapien
ttgactctttgtttgactcccagtg

SEQ ID NO: 5315875 - DNA, 25 bp, Homo sapien
cccagtgcagttgaaatctgcctct

SEQ ID NO: 5315876 - DNA, 25 bp, Homo sapien
tgccattcttttggtgtgtaagcct

SEQ ID NO: 5315877 - DNA, 25 bp, Homo sapien
tgtgtaagcctttttctctcgggct

SEQ ID NO: 5315878 - DNA, 25 bp, Homo sapien
cagtcctcttccctggcagaaacat

SEQ ID NO: 5315879 - DNA, 25 bp, Homo sapien
tcagtcctcttccctggcagaaaca

SEQ ID NO: 5315880 - DNA, 25 bp, Homo sapien
gactcttctttatcccctctaccca

SEQ ID NO: 5315881 - DNA, 25 bp, Homo sapien
cttgactcttctttatcccctctac

SEQ ID NO: 5315882 - DNA, 25 bp, Homo sapien
actcttctttatcccctctacccat

SEQ ID NO: 5315883 - DNA, 25 bp, Homo sapien
ttgactcttctttatcccctctacc

SEQ ID NO: 5315884 - DNA, 25 bp, Homo sapien
gctgacaggccatgataaagggctc

SEQ ID NO: 5315885 - DNA, 25 bp, Homo sapien
tgatcgcccgctgtaacatggaaga

SEQ ID NO: 5315886 - DNA, 25 bp, Homo sapien
tggagcctggctgatcatgccttga

SEQ ID NO: 5315887 - DNA, 25 bp, Homo sapien
tactgttggtgtggtgagcagccct

SEQ ID NO: 5315888 - DNA, 25 bp, Homo sapien
gtctagaggatcaggcaactctcct

SEQ ID NO: 5315889 - DNA, 25 bp, Homo sapien
tccccatggacgaggactcatttcc

SEQ ID NO: 5315890 - DNA, 25 bp, Homo sapien
taccagtagccccttgtgatatgca

SEQ ID NO: 5315891 - DNA, 25 bp, Homo sapien
catatttggctgatcgcagctgtca

SEQ ID NO: 5315892 - DNA, 25 bp, Homo sapien
gggtcaatacttaaaatccgctgaa

SEQ ID NO: 5315893 - DNA, 25 bp, Homo sapien
tccgctgaatttgccacaatgcagg

SEQ ID NO: 5315894 - DNA, 25 bp, Homo sapien
caggtgtttggtgaacatccagtac

SEQ ID NO: 5315895 - DNA, 25 bp, Homo sapien
gtgttcacgcagaatccacaaccgc

SEQ ID NO: 5315896 - DNA, 25 bp, Homo sapien
gctggcatcgttcagaacctctcca

SEQ ID NO: 5315897 - DNA, 25 bp, Homo sapien
ttaatgatggcgctgacatcatctt

SEQ ID NO: 5315898 - DNA, 25 bp, Homo sapien
atgatggcgctgacatcatcttcca

SEQ ID NO: 5315899 - DNA, 25 bp, Homo sapien
agcagcggctggcatcgttcagaac

SEQ ID NO: 5315900 - DNA, 25 bp, Homo sapien
caagaacaggagaattggctgcttt

SEQ ID NO: 5315901 - DNA, 25 bp, Homo sapien
taagagcttgagctgtccaagaaca

SEQ ID NO: 5315902 - DNA, 25 bp, Homo sapien
tgtccaagaacaggagaattggctg

SEQ ID NO: 5315903 - DNA, 25 bp, Homo sapien
gtgctgaagctctcacctgaggtag

SEQ ID NO: 5315904 - DNA, 25 bp, Homo sapien
ctgacaaggtgaggccgactctgcc

SEQ ID NO: 5315905 - DNA, 25 bp, Homo sapien
tcagatgcccacgagtgggctgcgc

SEQ ID NO: 5315906 - DNA, 25 bp, Homo sapien
ccggatctgggacctggctgacaag

SEQ ID NO: 5315907 - DNA, 25 bp, Homo sapien
tcatctctgccagcaacgatggcac

SEQ ID NO: 5315908 - DNA, 25 bp, Homo sapien
aatgtcattctacatatttcccggg

SEQ ID NO: 5315909 - DNA, 25 bp, Homo sapien
gagaggctgaccacatgtgagtcac

SEQ ID NO: 5315910 - DNA, 25 bp, Homo sapien
tcattgcctttaggcctggaaggcc

SEQ ID NO: 5315911 - DNA, 25 bp, Homo sapien
tgttgaattccgtagaatgccagga

SEQ ID NO: 5315912 - DNA, 25 bp, Homo sapien
gaaatatcgctagcctctgttctcc

SEQ ID NO: 5315913 - DNA, 25 bp, Homo sapien
aagacagcctaagttagatgcaccg

SEQ ID NO: 5315914 - DNA, 25 bp, Homo sapien
caggacccttagcagattcagtgtg

SEQ ID NO: 5315915 - DNA, 25 bp, Homo sapien
tccatatggtgctaaaacctcaaag

SEQ ID NO: 5315916 - DNA, 25 bp, Homo sapien
cagcaaaggaattgaagttcgggac

SEQ ID NO: 5315917 - DNA, 25 bp, Homo sapien
gcagcaaaggaattgaagttcggga

SEQ ID NO: 5315918 - DNA, 25 bp, Homo sapien
caaaggaattgaagttcgggacagg

SEQ ID NO: 5315919 - DNA, 25 bp, Homo sapien
gcaaaggaattgaagttcgggacag

SEQ ID NO: 5315920 - DNA, 25 bp, Homo sapien
gaatgagctgacttatctcgttaaa

SEQ ID NO: 5315921 - DNA, 25 bp, Homo sapien
tcaggaaggtctatgagaatgagct

SEQ ID NO: 5315922 - DNA, 25 bp, Homo sapien
gaaggtctatgagaatgagctgact

SEQ ID NO: 5315923 - DNA, 25 bp, Homo sapien
tatgagaatgagctgacttatctcg

SEQ ID NO: 5315924 - DNA, 25 bp, Homo sapien
cgaactatataggtcaagtccagat

SEQ ID NO: 5315925 - DNA, 25 bp, Homo sapien
ttgattgcttcaggcgaactatata

SEQ ID NO: 5315926 - DNA, 25 bp, Homo sapien
ttgcttcaggcgaactatataggtc

SEQ ID NO: 5315927 - DNA, 25 bp, Homo sapien
tcaggcgaactatataggtcaagtc

SEQ ID NO: 5315928 - DNA, 25 bp, Homo sapien
ggttgtatgacggaatatgacttgg

SEQ ID NO: 5315929 - DNA, 25 bp, Homo sapien
ccttggagttggttgtatgacggaa

SEQ ID NO: 5315930 - DNA, 25 bp, Homo sapien
taaagtgagttagagttccttggag

SEQ ID NO: 5315931 - DNA, 25 bp, Homo sapien
gagttccttggagttggttgtatga

SEQ ID NO: 5315932 - DNA, 25 bp, Homo sapien
gcaatagtgtccgtgtgtcatgaaa

SEQ ID NO: 5315933 - DNA, 25 bp, Homo sapien
cattcgctggttgaagcagtttacc

SEQ ID NO: 5315934 - DNA, 25 bp, Homo sapien
cactaataggttgttgggcccgcag

SEQ ID NO: 5315935 - DNA, 25 bp, Homo sapien
cagtagagtccctatgcagtcccaa

SEQ ID NO: 5315936 - DNA, 25 bp, Homo sapien
tttacagttcacaatgcattccaca

SEQ ID NO: 5315937 - DNA, 25 bp, Homo sapien
ctttattgatactttgcttttacag

SEQ ID NO: 5315938 - DNA, 25 bp, Homo sapien
tgcttttacagttcacaatgcattc

SEQ ID NO: 5315939 - DNA, 25 bp, Homo sapien
ctataagctttattgatactttgct

SEQ ID NO: 5315940 - DNA, 25 bp, Homo sapien
ttcagtacagcttaaaccacaatgg

SEQ ID NO: 5315941 - DNA, 25 bp, Homo sapien
tcagtacagcttaaaccacaatggt

SEQ ID NO: 5315942 - DNA, 25 bp, Homo sapien
gattcagtccatagattctgtgaca

SEQ ID NO: 5315943 - DNA, 25 bp, Homo sapien
tgttgaaaacagatggtagtgctcc

SEQ ID NO: 5315944 - DNA, 25 bp, Homo sapien
aattaactacagtcagtctgtgcaa

SEQ ID NO: 5315945 - DNA, 25 bp, Homo sapien
tttttggaagcattagattcagtcc

SEQ ID NO: 5315946 - DNA, 25 bp, Homo sapien
ctttgtgaaacactatacatatata

SEQ ID NO: 5315947 - DNA, 25 bp, Homo sapien
aagtcacaatacacctagaacatac

SEQ ID NO: 5315948 - DNA, 25 bp, Homo sapien
gtaaaagtcacaatacacctagaac

SEQ ID NO: 5315949 - DNA, 25 bp, Homo sapien
acaatacacctagaacataccagaa

SEQ ID NO: 5315950 - DNA, 25 bp, Homo sapien
aatctgcatcaatctacacggacca

SEQ ID NO: 5315951 - DNA, 25 bp, Homo sapien
ctttgtcattcctgctttaccggta

SEQ ID NO: 5315952 - DNA, 25 bp, Homo sapien
gatctcgtctaaacaaacatttcat

SEQ ID NO: 5315953 - DNA, 25 bp, Homo sapien
tctctgcaacttgccaagatgcggc

SEQ ID NO: 5315954 - DNA, 25 bp, Homo sapien
tacggtttaaatccatacatagcag

SEQ ID NO: 5315955 - DNA, 25 bp, Homo sapien
tacatagcagcttacaatacttaag

SEQ ID NO: 5315956 - DNA, 25 bp, Homo sapien
tgatgaacacatggcagtcaagaca

SEQ ID NO: 5315957 - DNA, 25 bp, Homo sapien
caccagtgcctcagatagataggaa

SEQ ID NO: 5315958 - DNA, 25 bp, Homo sapien
aactgcactgcaacgtcaaggttcg

SEQ ID NO: 5315959 - DNA, 25 bp, Homo sapien
tgtgaaactgcactgcaacgtcaag

SEQ ID NO: 5315960 - DNA, 25 bp, Homo sapien
ctaacaacgatctgtgaaactgcac

SEQ ID NO: 5315961 - DNA, 25 bp, Homo sapien
gcactgcaacgtcaaggttcgttct

SEQ ID NO: 5315962 - DNA, 25 bp, Homo sapien
atgaatatcccctttaaagatgaac

SEQ ID NO: 5315963 - DNA, 25 bp, Homo sapien
gaatatcccctttaaagatgaactc

SEQ ID NO: 5315964 - DNA, 25 bp, Homo sapien
aaatgaatatcccctttaaagatga

SEQ ID NO: 5315965 - DNA, 25 bp, Homo sapien
atatcccctttaaagatgaactcct

SEQ ID NO: 5315966 - DNA, 25 bp, Homo sapien
gctttgcgcttcaatccagggattt

SEQ ID NO: 5315967 - DNA, 25 bp, Homo sapien
tgcgcttcaatccagggatttttgc

SEQ ID NO: 5315968 - DNA, 25 bp, Homo sapien
tcattcagctttgcgcttcaatcca

SEQ ID NO: 5315969 - DNA, 25 bp, Homo sapien
cttcaatccagggatttttgcttgg

SEQ ID NO: 5315970 - DNA, 25 bp, Homo sapien
taagctataattttgccaccttggc

SEQ ID NO: 5315971 - DNA, 25 bp, Homo sapien
cccagaaacgaatggtccaaatgtt

SEQ ID NO: 5315972 - DNA, 25 bp, Homo sapien
gcctgcaatatgaaaatactgttct

SEQ ID NO: 5315973 - DNA, 25 bp, Homo sapien
aaacaatcttttggcaactctgaag

SEQ ID NO: 5315974 - DNA, 25 bp, Homo sapien
tatttgcaagtcctagataatgatc

SEQ ID NO: 5315975 - DNA, 25 bp, Homo sapien
cgtaaatcccatgtaatagagtgag

SEQ ID NO: 5315976 - DNA, 25 bp, Homo sapien
gagtgagtgctctattctgaagtca

SEQ ID NO: 5315977 - DNA, 25 bp, Homo sapien
taaaggcttaagaaaccatcacact

SEQ ID NO: 5315978 - DNA, 25 bp, Homo sapien
gaaaatgggcactaatacatccgta

SEQ ID NO: 5315979 - DNA, 25 bp, Homo sapien
aataacaggaacactgaagagtgaa

SEQ ID NO: 5315980 - DNA, 25 bp, Homo sapien
gatgccgttcataaataacaggaac

SEQ ID NO: 5315981 - DNA, 25 bp, Homo sapien
ctgatgccgttcataaataacagga

SEQ ID NO: 5315982 - DNA, 25 bp, Homo sapien
gttcataaataacaggaacactgaa

SEQ ID NO: 5315983 - DNA, 25 bp, Homo sapien
cataaggatctctggatgcatctgc

SEQ ID NO: 5315984 - DNA, 25 bp, Homo sapien
gctgtcttcagcaactaaggtagca

SEQ ID NO: 5315985 - DNA, 25 bp, Homo sapien
tggcaactcaagataaccaagcagt

SEQ ID NO: 5315986 - DNA, 25 bp, Homo sapien
caataaaccgggaagcagtatcacc

SEQ ID NO: 5315987 - DNA, 25 bp, Homo sapien
ggtaaatacccacatcaacactgca

SEQ ID NO: 5315988 - DNA, 25 bp, Homo sapien
atcagtagtgtcagaccattaaaca

SEQ ID NO: 5315989 - DNA, 25 bp, Homo sapien
gcaccaacataggtaaatacccaca

SEQ ID NO: 5315990 - DNA, 25 bp, Homo sapien
tcagtagtgtcagaccattaaacaa

SEQ ID NO: 5315991 - DNA, 25 bp, Homo sapien
gatcagacaatataccaagggtgca

SEQ ID NO: 5315992 - DNA, 25 bp, Homo sapien
gaagactgggtaaagtaccatgagc

SEQ ID NO: 5315993 - DNA, 25 bp, Homo sapien
aaatatcacctctagcctttgaagg

SEQ ID NO: 5315994 - DNA, 25 bp, Homo sapien
gagcagttcactattaagtcacgag

SEQ ID NO: 5315995 - DNA, 25 bp, Homo sapien
catcactatccacaagtctaaaggg

SEQ ID NO: 5315996 - DNA, 25 bp, Homo sapien
gcaattgctattggaacccctggta

SEQ ID NO: 5315997 - DNA, 25 bp, Homo sapien
gaagaaattactctagcaacgaaga

SEQ ID NO: 5315998 - DNA, 25 bp, Homo sapien
gaagacactttggatgactctacca

SEQ ID NO: 5315999 - DNA, 25 bp, Homo sapien
taaaaggactaatgagccctggagt

SEQ ID NO: 5316000 - DNA, 25 bp, Homo sapien
ggagaactctgcagaacatgtctta

SEQ ID NO: 5316001 - DNA, 25 bp, Homo sapien
tctttcataattgcgggtgggaagc

SEQ ID NO: 5316002 - DNA, 25 bp, Homo sapien
tttcacatgctagcaagagcggctc

SEQ ID NO: 5316003 - DNA, 25 bp, Homo sapien
taatacagtccactattaaggaact

SEQ ID NO: 5316004 - DNA, 25 bp, Homo sapien
gacagaatataactttccctaccag

SEQ ID NO: 5316005 - DNA, 25 bp, Homo sapien
gactggagctattagcaaacttccc

SEQ ID NO: 5316006 - DNA, 25 bp, Homo sapien
taccagtttttgtggctaaaaggca

SEQ ID NO: 5316007 - DNA, 25 bp, Homo sapien
aggcatgggcgaccatggctggctg

SEQ ID NO: 5316008 - DNA, 25 bp, Homo sapien
atgggcgaccatggctggctgattt

SEQ ID NO: 5316009 - DNA, 25 bp, Homo sapien
ctacaggcatgggcgaccatggctg

SEQ ID NO: 5316010 - DNA, 25 bp, Homo sapien
ttttttatagaaacagtctcacaat

SEQ ID NO: 5316011 - DNA, 25 bp, Homo sapien
aaaaactgtggtggataagtgtggc

SEQ ID NO: 5316012 - DNA, 25 bp, Homo sapien
catatacaatgacattaggaaaggg

SEQ ID NO: 5316013 - DNA, 25 bp, Homo sapien
aagtgtggccatacacagaagtctc

SEQ ID NO: 5316014 - DNA, 25 bp, Homo sapien
gtctctctagaaaggtaatcctatc

SEQ ID NO: 5316015 - DNA, 25 bp, Homo sapien
taaatgccaggttcactttaagtgc

SEQ ID NO: 5316016 - DNA, 25 bp, Homo sapien
agtcctaaatgaattgccagctggg

SEQ ID NO: 5316017 - DNA, 25 bp, Homo sapien
catgtacattatcagagtgtgcacc

SEQ ID NO: 5316018 - DNA, 25 bp, Homo sapien
cacaaggtttatcgtttatcaagga

SEQ ID NO: 5316019 - DNA, 25 bp, Homo sapien
tgtttcttaagatctcatcagcccc

SEQ ID NO: 5316020 - DNA, 25 bp, Homo sapien
tacgtgtgcaaaacagagatttaaa

SEQ ID NO: 5316021 - DNA, 25 bp, Homo sapien
tattcgattctcaaatacgtgtgca

SEQ ID NO: 5316022 - DNA, 25 bp, Homo sapien
aactagagcataatgaatcattccc

SEQ ID NO: 5316023 - DNA, 25 bp, Homo sapien
tgttctaccctagaagtcagctacg

SEQ ID NO: 5316024 - DNA, 25 bp, Homo sapien
gacttttggtgtatctctgttgccg

SEQ ID NO: 5316025 - DNA, 25 bp, Homo sapien
ttaagcggcatcagtacctcctcct

SEQ ID NO: 5316026 - DNA, 25 bp, Homo sapien
tgctatactgtgcaaacatcgagga

SEQ ID NO: 5316027 - DNA, 25 bp, Homo sapien
caagcatgccaaacaacataaccgt

SEQ ID NO: 5316028 - DNA, 25 bp, Homo sapien
tgtaagcccagagacgcaaacagct

SEQ ID NO: 5316029 - DNA, 25 bp, Homo sapien
tgcaaccactctatacgaaagaggt

SEQ ID NO: 5316030 - DNA, 25 bp, Homo sapien
taaaaataagagatgcggctgggcg

SEQ ID NO: 5316031 - DNA, 25 bp, Homo sapien
cagctgcttatgtagcgagatccaa

SEQ ID NO: 5316032 - DNA, 25 bp, Homo sapien
tagtgcctgtttcgtcagtcagaac

SEQ ID NO: 5316033 - DNA, 25 bp, Homo sapien
caggtccagtgcttcaggcttaaat

SEQ ID NO: 5316034 - DNA, 25 bp, Homo sapien
tttgcaaggtgagactcttaacagc

SEQ ID NO: 5316035 - DNA, 25 bp, Homo sapien
gatactaaattctgggtatatcaaa

SEQ ID NO: 5316036 - DNA, 25 bp, Homo sapien
ctctcttgatactaaattctgggta

SEQ ID NO: 5316037 - DNA, 25 bp, Homo sapien
cttgatactaaattctgggtatatc

SEQ ID NO: 5316038 - DNA, 25 bp, Homo sapien
ctcttgatactaaattctgggtata

SEQ ID NO: 5316039 - DNA, 25 bp, Homo sapien
cttcagagaatcaactaaatcatca

SEQ ID NO: 5316040 - DNA, 25 bp, Homo sapien
gaagaggcgcctgagttcctttatc

SEQ ID NO: 5316041 - DNA, 25 bp, Homo sapien
catgaccaagagcagaattactgta

SEQ ID NO: 5316042 - DNA, 25 bp, Homo sapien
gagttcctttatcgtgcagttcaca

SEQ ID NO: 5316043 - DNA, 25 bp, Homo sapien
agtggctgccaaaagcacagtagca

SEQ ID NO: 5316044 - DNA, 25 bp, Homo sapien
cagggtacaaccaactcagaagtgc

SEQ ID NO: 5316045 - DNA, 25 bp, Homo sapien
cagaagtgctgagtgttccctcgta

SEQ ID NO: 5316046 - DNA, 25 bp, Homo sapien
tcaagcaccagattgtaaagtggct

SEQ ID NO: 5316047 - DNA, 25 bp, Homo sapien
tccccatcaccccataaaatggagt

SEQ ID NO: 5316048 - DNA, 25 bp, Homo sapien
caatttcaagttactgaattccaac

SEQ ID NO: 5316049 - DNA, 25 bp, Homo sapien
gagtgataccacctatctcacagaa

SEQ ID NO: 5316050 - DNA, 25 bp, Homo sapien
gcatgagccaacacgtttggctggc

SEQ ID NO: 5316051 - DNA, 25 bp, Homo sapien
gctattacagtacgaaaccagctac

SEQ ID NO: 5316052 - DNA, 25 bp, Homo sapien
aggagcctgaaaactagcatggtag

SEQ ID NO: 5316053 - DNA, 25 bp, Homo sapien
tacaggcccctggttagactgagga

SEQ ID NO: 5316054 - DNA, 25 bp, Homo sapien
caatgtagtaacaaatggagtccaa

SEQ ID NO: 5316055 - DNA, 25 bp, Homo sapien
ggctgttacgctcacaatgctgaat

SEQ ID NO: 5316056 - DNA, 25 bp, Homo sapien
acccttgtatatcctaaagctgatg

SEQ ID NO: 5316057 - DNA, 25 bp, Homo sapien
gggccaaggcaatgtaggctgttac

SEQ ID NO: 5316058 - DNA, 25 bp, Homo sapien
ggatagcttggatcacacccttgta

SEQ ID NO: 5316059 - DNA, 25 bp, Homo sapien
accactccagtcttcttaatgtctc

SEQ ID NO: 5316060 - DNA, 25 bp, Homo sapien
ccactccagtcttcttaatgtctct

SEQ ID NO: 5316061 - DNA, 25 bp, Homo sapien
aataggctggcaccaaacaccactc

SEQ ID NO: 5316062 - DNA, 25 bp, Homo sapien
caggaataggctggcaccaaacacc

SEQ ID NO: 5316063 - DNA, 25 bp, Homo sapien
tgtactagcacaactgaggactgac

SEQ ID NO: 5316064 - DNA, 25 bp, Homo sapien
taaaacatctaaaggcgcttagtgc

SEQ ID NO: 5316065 - DNA, 25 bp, Homo sapien
cctaaatggtctggcttgaatgcta

SEQ ID NO: 5316066 - DNA, 25 bp, Homo sapien
tgaataaagagataagagcaacgct

SEQ ID NO: 5316067 - DNA, 25 bp, Homo sapien
tcttctttgaacagcccgaagtcag

SEQ ID NO: 5316068 - DNA, 25 bp, Homo sapien
gaacagcccgaagtcaggtttcaat

SEQ ID NO: 5316069 - DNA, 25 bp, Homo sapien
tctttgaacagcccgaagtcaggtt

SEQ ID NO: 5316070 - DNA, 25 bp, Homo sapien
ttgaacagcccgaagtcaggtttca

SEQ ID NO: 5316071 - DNA, 25 bp, Homo sapien
taatcttaccgaccaaaacagccag

SEQ ID NO: 5316072 - DNA, 25 bp, Homo sapien
ccttaatagttgcagaatgagccct

SEQ ID NO: 5316073 - DNA, 25 bp, Homo sapien
cattccacttacaaagtgaggctcc

SEQ ID NO: 5316074 - DNA, 25 bp, Homo sapien
ggctccccagagatattcaggagta

SEQ ID NO: 5316075 - DNA, 25 bp, Homo sapien
acacgtgagatagccgttttaatcc

SEQ ID NO: 5316076 - DNA, 25 bp, Homo sapien
ctttagacttcaactcttcagaggt

SEQ ID NO: 5316077 - DNA, 25 bp, Homo sapien
ggcaggactgaaaagactaaaccga

SEQ ID NO: 5316078 - DNA, 25 bp, Homo sapien
agaacagaacctaaacggcaggact

SEQ ID NO: 5316079 - DNA, 25 bp, Homo sapien
ccttgtccttccaatttttcttctg

SEQ ID NO: 5316080 - DNA, 25 bp, Homo sapien
tccaatttttcttctgaccgtccat

SEQ ID NO: 5316081 - DNA, 25 bp, Homo sapien
tgtccttccaatttttcttctgacc

SEQ ID NO: 5316082 - DNA, 25 bp, Homo sapien
ttccaatttttcttctgaccgtcca

SEQ ID NO: 5316083 - DNA, 25 bp, Homo sapien
tgaagtcacctgacgtcttctgggt

SEQ ID NO: 5316084 - DNA, 25 bp, Homo sapien
tactccctgagacatgaaatacccg

SEQ ID NO: 5316085 - DNA, 25 bp, Homo sapien
caactgcagcaggactgaagtcacc

SEQ ID NO: 5316086 - DNA, 25 bp, Homo sapien
tggaacagtctgacgcagtgcaatc

SEQ ID NO: 5316087 - DNA, 25 bp, Homo sapien
aattgctcctaagttcattaagacg

SEQ ID NO: 5316088 - DNA, 25 bp, Homo sapien
cagcattttgcaccttatgaagaga

SEQ ID NO: 5316089 - DNA, 25 bp, Homo sapien
tagacacctctacagacagtattaa

SEQ ID NO: 5316090 - DNA, 25 bp, Homo sapien
aagcttgtgaaatgatgagtctcct

SEQ ID NO: 5316091 - DNA, 25 bp, Homo sapien
gatatttgagaacccggtcagcaag

SEQ ID NO: 5316092 - DNA, 25 bp, Homo sapien
gcccagtattctcagctcgagttaa

SEQ ID NO: 5316093 - DNA, 25 bp, Homo sapien
tttctggaacctgctatctgtgggc

SEQ ID NO: 5316094 - DNA, 25 bp, Homo sapien
gcaatcattggtcacatggcaacct

SEQ ID NO: 5316095 - DNA, 25 bp, Homo sapien
acaaattctatgcgtcattcttgtg

SEQ ID NO: 5316096 - DNA, 25 bp, Homo sapien
aaattctatgcgtcattcttgtgca

SEQ ID NO: 5316097 - DNA, 25 bp, Homo sapien
caaattctatgcgtcattcttgtgc

SEQ ID NO: 5316098 - DNA, 25 bp, Homo sapien
aattctatgcgtcattcttgtgcag

SEQ ID NO: 5316099 - DNA, 25 bp, Homo sapien
gaattcaagaattaatagtcactag

SEQ ID NO: 5316100 - DNA, 25 bp, Homo sapien
gcctcaagcacgcatttttaaattc

SEQ ID NO: 5316101 - DNA, 25 bp, Homo sapien
tcactaggccctaaacagatcttct

SEQ ID NO: 5316102 - DNA, 25 bp, Homo sapien
cttcatttaagtatccaggtttggg

SEQ ID NO: 5316103 - DNA, 25 bp, Homo sapien
atttgccaagggtcatacagctaaa

SEQ ID NO: 5316104 - DNA, 25 bp, Homo sapien
tacattgtacatctactgatagcct

SEQ ID NO: 5316105 - DNA, 25 bp, Homo sapien
tgatagccttccagttaagattaac

SEQ ID NO: 5316106 - DNA, 25 bp, Homo sapien
tttcaatctgtattgggcccacagt

SEQ ID NO: 5316107 - DNA, 25 bp, Homo sapien
tgtgactggccactacttacctgct

SEQ ID NO: 5316108 - DNA, 25 bp, Homo sapien
aaagtgattgtcagtggtatagcca

SEQ ID NO: 5316109 - DNA, 25 bp, Homo sapien
ggtatagccaagactaaaacctcag

SEQ ID NO: 5316110 - DNA, 25 bp, Homo sapien
gacttgagctaatccacccttcctt

SEQ ID NO: 5316111 - DNA, 25 bp, Homo sapien
gcacctttgatgtagcagacccatt

SEQ ID NO: 5316112 - DNA, 25 bp, Homo sapien
tctgtgcaaggcaatgacccagctc

SEQ ID NO: 5316113 - DNA, 25 bp, Homo sapien
cacttttgtgggatacttctaggtc

SEQ ID NO: 5316114 - DNA, 25 bp, Homo sapien
caggtggcaaagcactgagtttttc

SEQ ID NO: 5316115 - DNA, 25 bp, Homo sapien
gctgggctgtatcacggaagcacca

SEQ ID NO: 5316116 - DNA, 25 bp, Homo sapien
gagaaatccggagctggttcagcag

SEQ ID NO: 5316117 - DNA, 25 bp, Homo sapien
gctgtgctgcaggatagagtgactc

SEQ ID NO: 5316118 - DNA, 25 bp, Homo sapien
gaagcaccagcactaggaactgcag

SEQ ID NO: 5316119 - DNA, 25 bp, Homo sapien
tccctaggatttgctactattacgg

SEQ ID NO: 5316120 - DNA, 25 bp, Homo sapien
caatttagtaagagctgtaggtaac

SEQ ID NO: 5316121 - DNA, 25 bp, Homo sapien
taactcttgttgattatgaaggatg

SEQ ID NO: 5316122 - DNA, 25 bp, Homo sapien
tgcttttggagagacactgaacgat

SEQ ID NO: 5316123 - DNA, 25 bp, Homo sapien
taatactgttgacaaattaccaagg

SEQ ID NO: 5316124 - DNA, 25 bp, Homo sapien
tctttgaaagaagcggctgagagag

SEQ ID NO: 5316125 - DNA, 25 bp, Homo sapien
agcagtttcaagcaggacagatggg

SEQ ID NO: 5316126 - DNA, 25 bp, Homo sapien
tcttgaccagccgaaatagtgttac

SEQ ID NO: 5316127 - DNA, 25 bp, Homo sapien
aaatagtgttagtaaagacttactg

SEQ ID NO: 5316128 - DNA, 25 bp, Homo sapien
aatagtgttagtaaagacttactgt

SEQ ID NO: 5316129 - DNA, 25 bp, Homo sapien
atagtgttagtaaagacttactgtt

SEQ ID NO: 5316130 - DNA, 25 bp, Homo sapien
gttagagaatgccagtgttctcaga

SEQ ID NO: 5316131 - DNA, 25 bp, Homo sapien
gaggagcgtatcacaggctcagatg

SEQ ID NO: 5316132 - DNA, 25 bp, Homo sapien
gcaggaagagcaaaaagggtctcat

SEQ ID NO: 5316133 - DNA, 25 bp, Homo sapien
cagaggagcgtatcacaggctcaga

SEQ ID NO: 5316134 - DNA, 25 bp, Homo sapien
agaggagcgtatcacaggctcagat

SEQ ID NO: 5316135 - DNA, 25 bp, Homo sapien
gaattacaagtgtgaactaacacac

SEQ ID NO: 5316136 - DNA, 25 bp, Homo sapien
tgtgaactaacacacctggcctgga

SEQ ID NO: 5316137 - DNA, 25 bp, Homo sapien
cctggcctggattagcaaatattaa

SEQ ID NO: 5316138 - DNA, 25 bp, Homo sapien
cacctggcctggattagcaaatatt

SEQ ID NO: 5316139 - DNA, 25 bp, Homo sapien
gatacagatgatttaggccccacta

SEQ ID NO: 5316140 - DNA, 25 bp, Homo sapien
catgcagtctatgttctacaatgaa

SEQ ID NO: 5316141 - DNA, 25 bp, Homo sapien
ttcctgggctacaaaacaatctcaa

SEQ ID NO: 5316142 - DNA, 25 bp, Homo sapien
gaggtacagctaaaaccccaacaga

SEQ ID NO: 5316143 - DNA, 25 bp, Homo sapien
gtaaataatagtcaatgtgaggcca

SEQ ID NO: 5316144 - DNA, 25 bp, Homo sapien
cagtaaataatagtcaatgtgaggc

SEQ ID NO: 5316145 - DNA, 25 bp, Homo sapien
aggcgcgctcgctcacaccagcact

SEQ ID NO: 5316146 - DNA, 25 bp, Homo sapien
aaataatagtcaatgtgaggccagg

SEQ ID NO: 5316147 - DNA, 25 bp, Homo sapien
aacagtctgatacttctgtgtgaac

SEQ ID NO: 5316148 - DNA, 25 bp, Homo sapien
ggctagtttccttacaatgcagatt

SEQ ID NO: 5316149 - DNA, 25 bp, Homo sapien
tgtaatgcaacctactaaaactcca

SEQ ID NO: 5316150 - DNA, 25 bp, Homo sapien
atttatggaaaagccgtttagctag

SEQ ID NO: 5316151 - DNA, 25 bp, Homo sapien
agttcccatccctagtgctgtcatc

SEQ ID NO: 5316152 - DNA, 25 bp, Homo sapien
acagttcccatccctagtgctgtca

SEQ ID NO: 5316153 - DNA, 25 bp, Homo sapien
cagttcccatccctagtgctgtcat

SEQ ID NO: 5316154 - DNA, 25 bp, Homo sapien
gttcccatccctagtgctgtcatcc

SEQ ID NO: 5316155 - DNA, 25 bp, Homo sapien
gagaccagttcgaagtcacccttaa

SEQ ID NO: 5316156 - DNA, 25 bp, Homo sapien
taatactgctttcacggtgccttgc

SEQ ID NO: 5316157 - DNA, 25 bp, Homo sapien
ccaatgatctgggtgggtaaggcca

SEQ ID NO: 5316158 - DNA, 25 bp, Homo sapien
gagttttctgcgcatatcctcaaag

SEQ ID NO: 5316159 - DNA, 25 bp, Homo sapien
aaagtttcccaataggtatcatcaa

SEQ ID NO: 5316160 - DNA, 25 bp, Homo sapien
tatggaattagggaactctgtagaa

SEQ ID NO: 5316161 - DNA, 25 bp, Homo sapien
actaaagtttcccaataggtatcat

SEQ ID NO: 5316162 - DNA, 25 bp, Homo sapien
atggaattagggaactctgtagaac

SEQ ID NO: 5316163 - DNA, 25 bp, Homo sapien
aattttatattcttattctataagc

SEQ ID NO: 5316164 - DNA, 25 bp, Homo sapien
cacattttaaagctatagaaaagaa

SEQ ID NO: 5316165 - DNA, 25 bp, Homo sapien
taaaaactaagatacaaacgcatta

SEQ ID NO: 5316166 - DNA, 25 bp, Homo sapien
acaaacacattttaaagctatagaa

SEQ ID NO: 5316167 - DNA, 25 bp, Homo sapien
cgctaggcggcaggaatttttcagc

SEQ ID NO: 5316168 - DNA, 25 bp, Homo sapien
tatggagccaccgttgcaaatgcgg

SEQ ID NO: 5316169 - DNA, 25 bp, Homo sapien
tcaagatcaagacgtcgctaggcgg

SEQ ID NO: 5316170 - DNA, 25 bp, Homo sapien
taaacgtcgttatgaggcacgtgac

SEQ ID NO: 5316171 - DNA, 25 bp, Homo sapien
ctccacgcaccacaccactggaggc

SEQ ID NO: 5316172 - DNA, 25 bp, Homo sapien
ggacgttttccactcggccagctcc

SEQ ID NO: 5316173 - DNA, 25 bp, Homo sapien
tcactgcggttgggtcaatgtggac

SEQ ID NO: 5316174 - DNA, 25 bp, Homo sapien
ctgcggttgggtcaatgtggacgtt

SEQ ID NO: 5316175 - DNA, 25 bp, Homo sapien
taacttccgagaatccgtacgctgg

SEQ ID NO: 5316176 - DNA, 25 bp, Homo sapien
gaaaccaagacggacaataagaaca

SEQ ID NO: 5316177 - DNA, 25 bp, Homo sapien
gcggtgcacgtgttccccgaaacca

SEQ ID NO: 5316178 - DNA, 25 bp, Homo sapien
atcacacagggtgaaagtgggagcc

SEQ ID NO: 5316179 - DNA, 25 bp, Homo sapien
agacggggcgccatcgccccgaagt

SEQ ID NO: 5316180 - DNA, 25 bp, Homo sapien
ccccgaagtccgcagacaaagcgcc

SEQ ID NO: 5316181 - DNA, 25 bp, Homo sapien
cagacggggcgccatcgccccgaag

SEQ ID NO: 5316182 - DNA, 25 bp, Homo sapien
tcgccccgaagtccgcagacaaagc

SEQ ID NO: 5316183 - DNA, 25 bp, Homo sapien
ggagaggagggaccagcccaaagca

SEQ ID NO: 5316184 - DNA, 25 bp, Homo sapien
ctcggggcggagaggagggaccagc

SEQ ID NO: 5316185 - DNA, 25 bp, Homo sapien
gagaggagggaccagcccaaagcat

SEQ ID NO: 5316186 - DNA, 25 bp, Homo sapien
ggcggagaggagggaccagcccaaa

SEQ ID NO: 5316187 - DNA, 25 bp, Homo sapien
tttccgaagtccatcaggggcgcgc

SEQ ID NO: 5316188 - DNA, 25 bp, Homo sapien
agcttggagggcgagactgcggcag

SEQ ID NO: 5316189 - DNA, 25 bp, Homo sapien
ggcggcacgaagtcatttccgaagt

SEQ ID NO: 5316190 - DNA, 25 bp, Homo sapien
gaggctcgtcgtcctcagggagctt

SEQ ID NO: 5316191 - DNA, 25 bp, Homo sapien
agctcctccaggtcttcgtcctcgt

SEQ ID NO: 5316192 - DNA, 25 bp, Homo sapien
ccagctcctccaggtcttcgtcctc

SEQ ID NO: 5316193 - DNA, 25 bp, Homo sapien
gctcctccaggtcttcgtcctcgtc

SEQ ID NO: 5316194 - DNA, 25 bp, Homo sapien
tcctccaggtcttcgtcctcgtcct

SEQ ID NO: 5316195 - DNA, 25 bp, Homo sapien
gccggggtgggctgtccgaggacga

SEQ ID NO: 5316196 - DNA, 25 bp, Homo sapien
gacgagaccagaggagactggtcca

SEQ ID NO: 5316197 - DNA, 25 bp, Homo sapien
ggtgggctgtccgaggacgagacca

SEQ ID NO: 5316198 - DNA, 25 bp, Homo sapien
tccgaggacgagaccagaggagact

SEQ ID NO: 5316199 - DNA, 25 bp, Homo sapien
gggccgcgtctcagagccgcgggcg

SEQ ID NO: 5316200 - DNA, 25 bp, Homo sapien
gggctgggccgactgagccgaggga

SEQ ID NO: 5316201 - DNA, 25 bp, Homo sapien
ggccgcgtctcagagccgcgggcgg

SEQ ID NO: 5316202 - DNA, 25 bp, Homo sapien
tgggccgactgagccgagggaccta

SEQ ID NO: 5316203 - DNA, 25 bp, Homo sapien
tgacggctcccggaacaatgagact

SEQ ID NO: 5316204 - DNA, 25 bp, Homo sapien
gagctaggagtgaggccagcggact

SEQ ID NO: 5316205 - DNA, 25 bp, Homo sapien
ggactctccgcccagtttggcgtga

SEQ ID NO: 5316206 - DNA, 25 bp, Homo sapien
gcctccgcgccggtgatgcgccacc

SEQ ID NO: 5316207 - DNA, 25 bp, Homo sapien
cttgcccgcagctggcgtccgtatg

SEQ ID NO: 5316208 - DNA, 25 bp, Homo sapien
cgcagctggcgtccgtatgtcgtta

SEQ ID NO: 5316209 - DNA, 25 bp, Homo sapien
gctgggattgcgttcaatgggcggg

SEQ ID NO: 5316210 - DNA, 25 bp, Homo sapien
ctggcgtccgtatgtcgttagagca

SEQ ID NO: 5316211 - DNA, 25 bp, Homo sapien
ttgcaagttgtttatatgatatttc

SEQ ID NO: 5316212 - DNA, 25 bp, Homo sapien
agttgtttatatgatatttctgcat

SEQ ID NO: 5316213 - DNA, 25 bp, Homo sapien
gttatttgcaagttgtttatatgat

SEQ ID NO: 5316214 - DNA, 25 bp, Homo sapien
caagttgtttatatgatatttctgc

SEQ ID NO: 5316215 - DNA, 25 bp, Homo sapien
gtagttggaggttttcattctctct

SEQ ID NO: 5316216 - DNA, 25 bp, Homo sapien
tgtgttaagcctgattcatggtagt

SEQ ID NO: 5316217 - DNA, 25 bp, Homo sapien
taagcctgattcatggtagttggag

SEQ ID NO: 5316218 - DNA, 25 bp, Homo sapien
gcctgattcatggtagttggaggtt

SEQ ID NO: 5316219 - DNA, 25 bp, Homo sapien
gtgtcagacataatttttataccct

SEQ ID NO: 5316220 - DNA, 25 bp, Homo sapien
cagacataatttttatacccttctt

SEQ ID NO: 5316221 - DNA, 25 bp, Homo sapien
ttctctccatatcctgtgtcagaca

SEQ ID NO: 5316222 - DNA, 25 bp, Homo sapien
ctctccatatcctgtgtcagacata

SEQ ID NO: 5316223 - DNA, 25 bp, Homo sapien
atagtcttgttattttcgatgacaa

SEQ ID NO: 5316224 - DNA, 25 bp, Homo sapien
gtcttgttattttcgatgacaactc

SEQ ID NO: 5316225 - DNA, 25 bp, Homo sapien
tcttgttattttcgatgacaactct

SEQ ID NO: 5316226 - DNA, 25 bp, Homo sapien
tagtcttgttattttcgatgacaac

SEQ ID NO: 5316227 - DNA, 25 bp, Homo sapien
aggtgatagagccaacaagagtcag

SEQ ID NO: 5316228 - DNA, 25 bp, Homo sapien
aataggtgatagagccaacaagagt

SEQ ID NO: 5316229 - DNA, 25 bp, Homo sapien
ataggtgatagagccaacaagagtc

SEQ ID NO: 5316230 - DNA, 25 bp, Homo sapien
agagccaacaagagtcagatcttct

SEQ ID NO: 5316231 - DNA, 25 bp, Homo sapien
gggaagttcttgcactcataacctc

SEQ ID NO: 5316232 - DNA, 25 bp, Homo sapien
tagaggtgatgcttcttccggagga

SEQ ID NO: 5316233 - DNA, 25 bp, Homo sapien
cattctcctgttacgccagaaaggt

SEQ ID NO: 5316234 - DNA, 25 bp, Homo sapien
gattccgcagcatagcttagaggtg

SEQ ID NO: 5316235 - DNA, 25 bp, Homo sapien
cttgtatttcccgtattatcgccat

SEQ ID NO: 5316236 - DNA, 25 bp, Homo sapien
tcttgtatttcccgtattatcgcca

SEQ ID NO: 5316237 - DNA, 25 bp, Homo sapien
ctactccacacaagtcctcctcttg

SEQ ID NO: 5316238 - DNA, 25 bp, Homo sapien
ctcctactccacacaagtcctcctc

SEQ ID NO: 5316239 - DNA, 25 bp, Homo sapien
tccctaaggaaactctgtgcaaaga

SEQ ID NO: 5316240 - DNA, 25 bp, Homo sapien
ttccaggagctctgtgctaaacaca

SEQ ID NO: 5316241 - DNA, 25 bp, Homo sapien
aggctcagctggacacgtctccaag

SEQ ID NO: 5316242 - DNA, 25 bp, Homo sapien
tcctcacagaataattccaggagct

SEQ ID NO: 5316243 - DNA, 25 bp, Homo sapien
gaaatcggtgaaacaagaatggcag

SEQ ID NO: 5316244 - DNA, 25 bp, Homo sapien
gaatggcagtacgttaattgctgaa

SEQ ID NO: 5316245 - DNA, 25 bp, Homo sapien
gtataccatgttttatcagaagtcc

SEQ ID NO: 5316246 - DNA, 25 bp, Homo sapien
gggattcattacactatgctctcca

SEQ ID NO: 5316247 - DNA, 25 bp, Homo sapien
ccaataatacgggaggactgtgtca

SEQ ID NO: 5316248 - DNA, 25 bp, Homo sapien
tactgttcctcacaaggctgtaagg

SEQ ID NO: 5316249 - DNA, 25 bp, Homo sapien
caggatactgcccacaccggtatgt

SEQ ID NO: 5316250 - DNA, 25 bp, Homo sapien
ggtacccttgaggtgtctagtccaa

SEQ ID NO: 5316251 - DNA, 25 bp, Homo sapien
tagctgttattcagggggataaagc

SEQ ID NO: 5316252 - DNA, 25 bp, Homo sapien
gcacttaataatttgttacggtaga

SEQ ID NO: 5316253 - DNA, 25 bp, Homo sapien
cagggggataaagcttcagttacac

SEQ ID NO: 5316254 - DNA, 25 bp, Homo sapien
ttaagtgtttgtatcaggctgttct

SEQ ID NO: 5316255 - DNA, 25 bp, Homo sapien
ttgtctcccactggcctgtcgctca

SEQ ID NO: 5316256 - DNA, 25 bp, Homo sapien
agtcctataagactcctcccatctg

SEQ ID NO: 5316257 - DNA, 25 bp, Homo sapien
aggggaagcatctcttttcaccagt

SEQ ID NO: 5316258 - DNA, 25 bp, Homo sapien
gctcaccacgtctcacagctcagct

SEQ ID NO: 5316259 - DNA, 25 bp, Homo sapien
ctactcaggaatcatcaggccttgt

SEQ ID NO: 5316260 - DNA, 25 bp, Homo sapien
ctctagacactcagctgacctggga

SEQ ID NO: 5316261 - DNA, 25 bp, Homo sapien
ctgacctgggaaaattacaagctgc

SEQ ID NO: 5316262 - DNA, 25 bp, Homo sapien
tacaagctgcttgaccaacaagctc

SEQ ID NO: 5316263 - DNA, 25 bp, Homo sapien
aggaggctggccaaaaacagcctgc

SEQ ID NO: 5316264 - DNA, 25 bp, Homo sapien
gaaaatatggtaattctttactatc

SEQ ID NO: 5316265 - DNA, 25 bp, Homo sapien
agaaaatatggtaattctttactat

SEQ ID NO: 5316266 - DNA, 25 bp, Homo sapien
tgcgcctggcaccaaataagaaaat

SEQ ID NO: 5316267 - DNA, 25 bp, Homo sapien
ccactgcgcctggcaccaaataaga

SEQ ID NO: 5316268 - DNA, 25 bp, Homo sapien
cagcttccaagaaggtaacaccgag

SEQ ID NO: 5316269 - DNA, 25 bp, Homo sapien
cagtagtgccaaaacctctataggt

SEQ ID NO: 5316270 - DNA, 25 bp, Homo sapien
tgtttggcccacacagtactgctca

SEQ ID NO: 5316271 - DNA, 25 bp, Homo sapien
tataggtagacgcagatcctcaagg

SEQ ID NO: 5316272 - DNA, 25 bp, Homo sapien
gacctaatagaacacatgaacgttg

SEQ ID NO: 5316273 - DNA, 25 bp, Homo sapien
gagaaacttagttcatcatgaccct

SEQ ID NO: 5316274 - DNA, 25 bp, Homo sapien
gagaagacacgctcaagacagcaag

SEQ ID NO: 5316275 - DNA, 25 bp, Homo sapien
gacagctttatacaccgaacatttg

SEQ ID NO: 5316276 - DNA, 25 bp, Homo sapien
caggcaaccctaatacaagtgtgga

SEQ ID NO: 5316277 - DNA, 25 bp, Homo sapien
atttataagataagccaggcaaccc

SEQ ID NO: 5316278 - DNA, 25 bp, Homo sapien
taatctcagcaataagttgtaccaa

SEQ ID NO: 5316279 - DNA, 25 bp, Homo sapien
tagacatatgggatttagtaagtac

SEQ ID NO: 5316280 - DNA, 25 bp, Homo sapien
gcataagggctaaaggctgttctga

SEQ ID NO: 5316281 - DNA, 25 bp, Homo sapien
taatattacacctgtccatggcaca

SEQ ID NO: 5316282 - DNA, 25 bp, Homo sapien
ccatgttccatggtcaaggatgaca

SEQ ID NO: 5316283 - DNA, 25 bp, Homo sapien
gctagtaagctctggtgtggcataa

SEQ ID NO: 5316284 - DNA, 25 bp, Homo sapien
tcccaaccagcatacataaggtgtt

SEQ ID NO: 5316285 - DNA, 25 bp, Homo sapien
agctccctcagctggttaagatata

SEQ ID NO: 5316286 - DNA, 25 bp, Homo sapien
cataaggtgttgtacaagctccctc

SEQ ID NO: 5316287 - DNA, 25 bp, Homo sapien
tccctcagctggttaagatatagaa

SEQ ID NO: 5316288 - DNA, 25 bp, Homo sapien
ccattaggttgactgcgtcatcctc

SEQ ID NO: 5316289 - DNA, 25 bp, Homo sapien
gaatagacgtgatgtcattagataa

SEQ ID NO: 5316290 - DNA, 25 bp, Homo sapien
tgtaactgcagcctgagatcgaaga

SEQ ID NO: 5316291 - DNA, 25 bp, Homo sapien
gtcattagataatttgtcaaagcca

SEQ ID NO: 5316292 - DNA, 25 bp, Homo sapien
gcaaaaggaatcatttatcataaga

SEQ ID NO: 5316293 - DNA, 25 bp, Homo sapien
aaaggaatcatttatcataagactt

SEQ ID NO: 5316294 - DNA, 25 bp, Homo sapien
gagcaaaaggaatcatttatcataa

SEQ ID NO: 5316295 - DNA, 25 bp, Homo sapien
ggaatcatttatcataagactttct

SEQ ID NO: 5316296 - DNA, 25 bp, Homo sapien
acaatattatagtatggcacttatt

SEQ ID NO: 5316297 - DNA, 25 bp, Homo sapien
gtatggcacttatttgataatctat

SEQ ID NO: 5316298 - DNA, 25 bp, Homo sapien
taatctatactttagtgattcttca

SEQ ID NO: 5316299 - DNA, 25 bp, Homo sapien
tgataatctatactttagtgattct

SEQ ID NO: 5316300 - DNA, 25 bp, Homo sapien
tacttatggtacttcataaaagagg

SEQ ID NO: 5316301 - DNA, 25 bp, Homo sapien
ttagaatactgtcatcactataatt

SEQ ID NO: 5316302 - DNA, 25 bp, Homo sapien
taaaaatatcttagtgatctatcaa

SEQ ID NO: 5316303 - DNA, 25 bp, Homo sapien
tatctattacctgcattacttatgg

SEQ ID NO: 5316304 - DNA, 25 bp, Homo sapien
gatttcttgaagtagcttaatgcca

SEQ ID NO: 5316305 - DNA, 25 bp, Homo sapien
tcttgaagtagcttaatgccaactt

SEQ ID NO: 5316306 - DNA, 25 bp, Homo sapien
ttgaagtagcttaatgccaactttt

SEQ ID NO: 5316307 - DNA, 25 bp, Homo sapien
ttgatttcttgaagtagcttaatgc

SEQ ID NO: 5316308 - DNA, 25 bp, Homo sapien
tgtttctcattcaactctttagtga

SEQ ID NO: 5316309 - DNA, 25 bp, Homo sapien
attcaactctttagtgagacactga

SEQ ID NO: 5316310 - DNA, 25 bp, Homo sapien
caaaagataaagatggttgtttctc

SEQ ID NO: 5316311 - DNA, 25 bp, Homo sapien
gaacagatgaagtatagcaagacca

SEQ ID NO: 5316312 - DNA, 25 bp, Homo sapien
ggggacatgacattaatagctgcaa

SEQ ID NO: 5316313 - DNA, 25 bp, Homo sapien
tggggacatgacattaatagctgca

SEQ ID NO: 5316314 - DNA, 25 bp, Homo sapien
gattctgtcctgtcactacataacc

SEQ ID NO: 5316315 - DNA, 25 bp, Homo sapien
caataatagtatagggcatgctgtt

SEQ ID NO: 5316316 - DNA, 25 bp, Homo sapien
tcacttagctctagctgtgcctcag

SEQ ID NO: 5316317 - DNA, 25 bp, Homo sapien
gaataatgtgacctaaaaatggcca

SEQ ID NO: 5316318 - DNA, 25 bp, Homo sapien
catgaccctatgagtctgaccctgt

SEQ ID NO: 5316319 - DNA, 25 bp, Homo sapien
caactgctgtatgtactccatgacc

SEQ ID NO: 5316320 - DNA, 25 bp, Homo sapien
tgcaggccacattcactgtagacaa

SEQ ID NO: 5316321 - DNA, 25 bp, Homo sapien
ggtagtaaagtccttcaactgctgt

SEQ ID NO: 5316322 - DNA, 25 bp, Homo sapien
gactggattttctactacctgtaag

SEQ ID NO: 5316323 - DNA, 25 bp, Homo sapien
gaacaagcagatcaataagacatat

SEQ ID NO: 5316324 - DNA, 25 bp, Homo sapien
tgtagtggtgtatttgctaagaaaa

SEQ ID NO: 5316325 - DNA, 25 bp, Homo sapien
caccccgataatagtcaatatgaaa

SEQ ID NO: 5316326 - DNA, 25 bp, Homo sapien
gctgcatcaacaggacatggaaaag

SEQ ID NO: 5316327 - DNA, 25 bp, Homo sapien
gataatccacatttgattccttcca

SEQ ID NO: 5316328 - DNA, 25 bp, Homo sapien
tctaaccgtttttctgataatccac

SEQ ID NO: 5316329 - DNA, 25 bp, Homo sapien
gaaaagcatgacttgtgataaagag

SEQ ID NO: 5316330 - DNA, 25 bp, Homo sapien
tttcatagctacaacacaaaaggca

SEQ ID NO: 5316331 - DNA, 25 bp, Homo sapien
accgcgcctggacagatctctatga

SEQ ID NO: 5316332 - DNA, 25 bp, Homo sapien
tcataagtggaacttatcaaaatta

SEQ ID NO: 5316333 - DNA, 25 bp, Homo sapien
tggacagatctctatgatcttaagt

SEQ ID NO: 5316334 - DNA, 25 bp, Homo sapien
aaccgcaaaggtggtacctctaatg

SEQ ID NO: 5316335 - DNA, 25 bp, Homo sapien
tgacctactacattcccagagctgg

SEQ ID NO: 5316336 - DNA, 25 bp, Homo sapien
caaggactgcaacttggagagactc

SEQ ID NO: 5316337 - DNA, 25 bp, Homo sapien
taatgcagatatggttgcagtaacc

SEQ ID NO: 5316338 - DNA, 25 bp, Homo sapien
aaagcaggtggattgcctgaggtta

SEQ ID NO: 5316339 - DNA, 25 bp, Homo sapien
aattgggctgggcacgatggttcac

SEQ ID NO: 5316340 - DNA, 25 bp, Homo sapien
acctgtaattccagtactttgggag

SEQ ID NO: 5316341 - DNA, 25 bp, Homo sapien
caaattgggctgggcacgatggttc

SEQ ID NO: 5316342 - DNA, 25 bp, Homo sapien
tgctgcataacaagctgccttttca

SEQ ID NO: 5316343 - DNA, 25 bp, Homo sapien
aattcttctaggactgtttgctgca

SEQ ID NO: 5316344 - DNA, 25 bp, Homo sapien
tattcattgtaccaatgtttcgaag

SEQ ID NO: 5316345 - DNA, 25 bp, Homo sapien
ttttcatattcaccaagtgagatta

SEQ ID NO: 5316346 - DNA, 25 bp, Homo sapien
tttcaatgtagtgaagcataatttc

SEQ ID NO: 5316347 - DNA, 25 bp, Homo sapien
tgcgtggatcatcttccattagttc

SEQ ID NO: 5316348 - DNA, 25 bp, Homo sapien
aatgtagtgaagcataatttcagct

SEQ ID NO: 5316349 - DNA, 25 bp, Homo sapien
ttcttttgccctgcgtggatcatct

SEQ ID NO: 5316350 - DNA, 25 bp, Homo sapien
tctgaatttgctccacaaagtcttg

SEQ ID NO: 5316351 - DNA, 25 bp, Homo sapien
cccatgaactaagtgcctgtgaaat

SEQ ID NO: 5316352 - DNA, 25 bp, Homo sapien
cacaaagtcttgaaatgggctgctc

SEQ ID NO: 5316353 - DNA, 25 bp, Homo sapien
ggctgctcatatcagattttaccca

SEQ ID NO: 5316354 - DNA, 25 bp, Homo sapien
gattttcagctacatctcgccgttt

SEQ ID NO: 5316355 - DNA, 25 bp, Homo sapien
tcatctaaatcagccttcctctgag

SEQ ID NO: 5316356 - DNA, 25 bp, Homo sapien
tgttcagattttcagctacatctcg

SEQ ID NO: 5316357 - DNA, 25 bp, Homo sapien
catctcgccgttttaataacacaat

SEQ ID NO: 5316358 - DNA, 25 bp, Homo sapien
tagtgagagcatctagattcatgga

SEQ ID NO: 5316359 - DNA, 25 bp, Homo sapien
catgtatttagtgagagcatctaga

SEQ ID NO: 5316360 - DNA, 25 bp, Homo sapien
gtttcatgtatttagtgagagcatc

SEQ ID NO: 5316361 - DNA, 25 bp, Homo sapien
tatttagtgagagcatctagattca

SEQ ID NO: 5316362 - DNA, 25 bp, Homo sapien
tgagattgaatcttcgaggaattac

SEQ ID NO: 5316363 - DNA, 25 bp, Homo sapien
ctggaataggttttgaaggatcttt

SEQ ID NO: 5316364 - DNA, 25 bp, Homo sapien
gccctacactgcttgatgtgatcta

SEQ ID NO: 5316365 - DNA, 25 bp, Homo sapien
gaggaattactttcgataatcctca

SEQ ID NO: 5316366 - DNA, 25 bp, Homo sapien
tcttatgtctttcaactaacttaat

SEQ ID NO: 5316367 - DNA, 25 bp, Homo sapien
actcaacttggaaaactatgcaaag

SEQ ID NO: 5316368 - DNA, 25 bp, Homo sapien
taccacatggacgagaaagtatcta

SEQ ID NO: 5316369 - DNA, 25 bp, Homo sapien
gaatctagttgagtatttcttcgta

SEQ ID NO: 5316370 - DNA, 25 bp, Homo sapien
tcttcgtatttatgatgcttgggat

SEQ ID NO: 5316371 - DNA, 25 bp, Homo sapien
aattatctgtaaaaggccgggcacg

SEQ ID NO: 5316372 - DNA, 25 bp, Homo sapien
attgtctcaataaaggcatcatatt

SEQ ID NO: 5316373 - DNA, 25 bp, Homo sapien
tttcctgtaatataccaaagctgta

SEQ ID NO: 5316374 - DNA, 25 bp, Homo sapien
ttattgtctcaataaaggcatcata

SEQ ID NO: 5316375 - DNA, 25 bp, Homo sapien
ttttcctgtaatataccaaagctgt

SEQ ID NO: 5316376 - DNA, 25 bp, Homo sapien
tgtatgcagtgatatgctctattac

SEQ ID NO: 5316377 - DNA, 25 bp, Homo sapien
taagaatggatttgtatgcagtgat

SEQ ID NO: 5316378 - DNA, 25 bp, Homo sapien
ttttgattgaagtaagaatggattt

SEQ ID NO: 5316379 - DNA, 25 bp, Homo sapien
gaagtaagaatggatttgtatgcag

SEQ ID NO: 5316380 - DNA, 25 bp, Homo sapien
ttttctgcctatggtattgattttt

SEQ ID NO: 5316381 - DNA, 25 bp, Homo sapien
attcattcaatgcattccttaataa

SEQ ID NO: 5316382 - DNA, 25 bp, Homo sapien
cattcattcaatgcattccttaata

SEQ ID NO: 5316383 - DNA, 25 bp, Homo sapien
aaacattcattcaatgcattcctta

SEQ ID NO: 5316384 - DNA, 25 bp, Homo sapien
aacattcattcaatgcattccttaa

SEQ ID NO: 5316385 - DNA, 25 bp, Homo sapien
tttctgtaattatgtatctttgcac

SEQ ID NO: 5316386 - DNA, 25 bp, Homo sapien
cagtttctgtaattatgtatctttg

SEQ ID NO: 5316387 - DNA, 25 bp, Homo sapien
ttatcaaaaacatttcggtatatga

SEQ ID NO: 5316388 - DNA, 25 bp, Homo sapien
aacatttcggtatatgatgtaatat

SEQ ID NO: 5316389 - DNA, 25 bp, Homo sapien
caaatgataggtgggagaactgcat

SEQ ID NO: 5316390 - DNA, 25 bp, Homo sapien
aatgataggtgggagaactgcatgt

SEQ ID NO: 5316391 - DNA, 25 bp, Homo sapien
aaatgataggtgggagaactgcatg

SEQ ID NO: 5316392 - DNA, 25 bp, Homo sapien
atgataggtgggagaactgcatgtt

SEQ ID NO: 5316393 - DNA, 25 bp, Homo sapien
cagctaaatcttgacctgctcttgc

SEQ ID NO: 5316394 - DNA, 25 bp, Homo sapien
aacagctaaatcttgacctgctctt

SEQ ID NO: 5316395 - DNA, 25 bp, Homo sapien
acagctaaatcttgacctgctcttg

SEQ ID NO: 5316396 - DNA, 25 bp, Homo sapien
ggtccggacttctgctaaaatccat

SEQ ID NO: 5316397 - DNA, 25 bp, Homo sapien
ttcagagtatagctttcaagcagcc

SEQ ID NO: 5316398 - DNA, 25 bp, Homo sapien
tttcagagtatagctttcaagcagc

SEQ ID NO: 5316399 - DNA, 25 bp, Homo sapien
caagcaaaaagaggtccggacttct

SEQ ID NO: 5316400 - DNA, 25 bp, Homo sapien
cgggactgagttccgcgccggcgtg

SEQ ID NO: 5316401 - DNA, 25 bp, Homo sapien
ccgctctcggctttggggaccggat

SEQ ID NO: 5316402 - DNA, 25 bp, Homo sapien
tgctgtgctccgagcgccaagggtc

SEQ ID NO: 5316403 - DNA, 25 bp, Homo sapien
ggaccggatggaggagcggcgtgtc

SEQ ID NO: 5316404 - DNA, 25 bp, Homo sapien
gatggcgtcccatgcagagtgccgt

SEQ ID NO: 5316405 - DNA, 25 bp, Homo sapien
gattcctggtccttagctggcgctg

SEQ ID NO: 5316406 - DNA, 25 bp, Homo sapien
tcagttcaagcgaagggaggtcaca

SEQ ID NO: 5316407 - DNA, 25 bp, Homo sapien
gagtgtgaactccacgccttgacag

SEQ ID NO: 5316408 - DNA, 25 bp, Homo sapien
ttctggaccactgcgagcagcactg

SEQ ID NO: 5316409 - DNA, 25 bp, Homo sapien
gctgtgccgaaaaggtagcccaaag

SEQ ID NO: 5316410 - DNA, 25 bp, Homo sapien
gagtaaagctccgtcaaagaggccc

SEQ ID NO: 5316411 - DNA, 25 bp, Homo sapien
cccggttctcggacattgagtgcag

SEQ ID NO: 5316412 - DNA, 25 bp, Homo sapien
gaagaaacgggtgttatcattagag

SEQ ID NO: 5316413 - DNA, 25 bp, Homo sapien
gggtagtgacatttggacaccagtg

SEQ ID NO: 5316414 - DNA, 25 bp, Homo sapien
caccagtggcttcctaccgtattac

SEQ ID NO: 5316415 - DNA, 25 bp, Homo sapien
ttcctttacttggcctattagtgcc

SEQ ID NO: 5316416 - DNA, 25 bp, Homo sapien
ttggtcagatgccactgctatgttc

SEQ ID NO: 5316417 - DNA, 25 bp, Homo sapien
ctgccttagagacttcctgtttata

SEQ ID NO: 5316418 - DNA, 25 bp, Homo sapien
tatgttctcccataatactgtgcac

SEQ ID NO: 5316419 - DNA, 25 bp, Homo sapien
tcctccatcatggtattatccttcc

SEQ ID NO: 5316420 - DNA, 25 bp, Homo sapien
ctctgagtgagattcgaagccttta

SEQ ID NO: 5316421 - DNA, 25 bp, Homo sapien
aaacagattataggacgcaagggtc

SEQ ID NO: 5316422 - DNA, 25 bp, Homo sapien
taaagccaagatctgccaaggtaga

SEQ ID NO: 5316423 - DNA, 25 bp, Homo sapien
cgcaagggtcaaagctggaagtgct

SEQ ID NO: 5316424 - DNA, 25 bp, Homo sapien
cagtgcttagagatagtaactaggg

SEQ ID NO: 5316425 - DNA, 25 bp, Homo sapien
atagtaactagggaatctgggaggt

SEQ ID NO: 5316426 - DNA, 25 bp, Homo sapien
tctccaaacaccgacttcagtgctt

SEQ ID NO: 5316427 - DNA, 25 bp, Homo sapien
caccgacttcagtgcttagagatag

SEQ ID NO: 5316428 - DNA, 25 bp, Homo sapien
ttctcttagccacgttgattgtacg

SEQ ID NO: 5316429 - DNA, 25 bp, Homo sapien
tagccacgttgattgtacgggaaaa

SEQ ID NO: 5316430 - DNA, 25 bp, Homo sapien
taaaaattctcttagccacgttgat

SEQ ID NO: 5316431 - DNA, 25 bp, Homo sapien
cacgttgattgtacgggaaaagcct

SEQ ID NO: 5316432 - DNA, 25 bp, Homo sapien
agaggagaaacgaagttcacgtcct

SEQ ID NO: 5316433 - DNA, 25 bp, Homo sapien
agtttcgaaagcattccgaaggcta

SEQ ID NO: 5316434 - DNA, 25 bp, Homo sapien
ttcacgtcctagtctggcaccgggt

SEQ ID NO: 5316435 - DNA, 25 bp, Homo sapien
gcattccgaaggctaaagtgagaaa

SEQ ID NO: 5316436 - DNA, 25 bp, Homo sapien
ccgcatttaatattagggacaatac

SEQ ID NO: 5316437 - DNA, 25 bp, Homo sapien
cgggacaagcgaatgcactccagcc

SEQ ID NO: 5316438 - DNA, 25 bp, Homo sapien
cattttaccgcatttaatattaggg

SEQ ID NO: 5316439 - DNA, 25 bp, Homo sapien
gcagtaagccgggacaagcgaatgc

SEQ ID NO: 5316440 - DNA, 25 bp, Homo sapien
tctttacatgtcacattttaccgca

SEQ ID NO: 5316441 - DNA, 25 bp, Homo sapien
gtaagccgggacaagcgaatgcact

SEQ ID NO: 5316442 - DNA, 25 bp, Homo sapien
gcggtaaaatgtgacatgtaaagat

SEQ ID NO: 5316443 - DNA, 25 bp, Homo sapien
gagtgcattcgcttgtcccggctta

SEQ ID NO: 5316444 - DNA, 25 bp, Homo sapien
tgcattcgcttgtcccggcttactg

SEQ ID NO: 5316445 - DNA, 25 bp, Homo sapien
gtattgtccctaatattaaatgcgg

SEQ ID NO: 5316446 - DNA, 25 bp, Homo sapien
ggctggagtgcattcgcttgtcccg

SEQ ID NO: 5316447 - DNA, 25 bp, Homo sapien
ccctaatattaaatgcggtaaaatg

SEQ ID NO: 5316448 - DNA, 25 bp, Homo sapien
tggcaggtatacagaaccactgggt

SEQ ID NO: 5316449 - DNA, 25 bp, Homo sapien
cctttacaagtggttggcacctggc

SEQ ID NO: 5316450 - DNA, 25 bp, Homo sapien
gaaccactgggtcacataatcccca

SEQ ID NO: 5316451 - DNA, 25 bp, Homo sapien
gccaaagtataggtagtctaagaat

SEQ ID NO: 5316452 - DNA, 25 bp, Homo sapien
ttcacacagcgatagcagtagcact

SEQ ID NO: 5316453 - DNA, 25 bp, Homo sapien
tggtgtgaccatcaatttggtgctt

SEQ ID NO: 5316454 - DNA, 25 bp, Homo sapien
agtgctactgctatcgctgtgtgaa

SEQ ID NO: 5316455 - DNA, 25 bp, Homo sapien
gggattatgtgacccagtggttctg

SEQ ID NO: 5316456 - DNA, 25 bp, Homo sapien
taagcaccaaattgatggtcacacc

SEQ ID NO: 5316457 - DNA, 25 bp, Homo sapien
acccagtggttctgtatacctgcca

SEQ ID NO: 5316458 - DNA, 25 bp, Homo sapien
gccaggtgccaaccacttgtaaagg

SEQ ID NO: 5316459 - DNA, 25 bp, Homo sapien
ttcttagactacctatactttggca

SEQ ID NO: 5316460 - DNA, 25 bp, Homo sapien
ggaaagctggttcacttgataagcc

SEQ ID NO: 5316461 - DNA, 25 bp, Homo sapien
gcaaatgcatatgaacacatggtaa

SEQ ID NO: 5316462 - DNA, 25 bp, Homo sapien
gggtagcctatcttccttcggagct

SEQ ID NO: 5316463 - DNA, 25 bp, Homo sapien
agcatacacttgaaagaaatcggtg

SEQ ID NO: 5316464 - DNA, 25 bp, Homo sapien
cccacttgaaattccatattgtctt

SEQ ID NO: 5316465 - DNA, 25 bp, Homo sapien
ctcccacttgaaattccatattgtc

SEQ ID NO: 5316466 - DNA, 25 bp, Homo sapien
tcccacttgaaattccatattgtct

SEQ ID NO: 5316467 - DNA, 25 bp, Homo sapien
ccaagaagtcttggcttgaatttgc

SEQ ID NO: 5316468 - DNA, 25 bp, Homo sapien
aattacatgtccattacgggttagt

SEQ ID NO: 5316469 - DNA, 25 bp, Homo sapien
aaattacatgtccattacgggttag

SEQ ID NO: 5316470 - DNA, 25 bp, Homo sapien
tacatgtccattacgggttagttta

SEQ ID NO: 5316471 - DNA, 25 bp, Homo sapien
attacatgtccattacgggttagtt

SEQ ID NO: 5316472 - DNA, 25 bp, Homo sapien
ctgttacagagaaggtagctagtat

SEQ ID NO: 5316473 - DNA, 25 bp, Homo sapien
tacagagaaggtagctagtatagat

SEQ ID NO: 5316474 - DNA, 25 bp, Homo sapien
gagaaggtagctagtatagatgcct

SEQ ID NO: 5316475 - DNA, 25 bp, Homo sapien
aaggtagctagtatagatgcctcac

SEQ ID NO: 5316476 - DNA, 25 bp, Homo sapien
gcaaatgggcactatatctcaaaca

SEQ ID NO: 5316477 - DNA, 25 bp, Homo sapien
aagtatactgttgggacaacggaca

SEQ ID NO: 5316478 - DNA, 25 bp, Homo sapien
aaacatcacgtgtgcatggagcagg

SEQ ID NO: 5316479 - DNA, 25 bp, Homo sapien
gagctagagagatatgacaacatgg

SEQ ID NO: 5316480 - DNA, 25 bp, Homo sapien
cttgcaaatcttcaacaagacggta

SEQ ID NO: 5316481 - DNA, 25 bp, Homo sapien
cttccacagcacagggtaatctgct

SEQ ID NO: 5316482 - DNA, 25 bp, Homo sapien
ttggataacattgcctgcattcaca

SEQ ID NO: 5316483 - DNA, 25 bp, Homo sapien
cctttttttgcagctgactgttgga

SEQ ID NO: 5316484 - DNA, 25 bp, Homo sapien
gttcaaaatggcctcaacagaacca

SEQ ID NO: 5316485 - DNA, 25 bp, Homo sapien
tcaaaatggcctcaacagaaccatc

SEQ ID NO: 5316486 - DNA, 25 bp, Homo sapien
tgttcaaaatggcctcaacagaacc

SEQ ID NO: 5316487 - DNA, 25 bp, Homo sapien
caaaatggcctcaacagaaccatca

SEQ ID NO: 5316488 - DNA, 25 bp, Homo sapien
tccacagtagatggccatacttctc

SEQ ID NO: 5316489 - DNA, 25 bp, Homo sapien
ttctcacgggctttctgatgtgctt

SEQ ID NO: 5316490 - DNA, 25 bp, Homo sapien
aataatcacagaaagtacatttgaa

SEQ ID NO: 5316491 - DNA, 25 bp, Homo sapien
tctaaaaaccgtagaattgatctct

SEQ ID NO: 5316492 - DNA, 25 bp, Homo sapien
gcttaactcatgtatgaaactacta

SEQ ID NO: 5316493 - DNA, 25 bp, Homo sapien
taactgctagattaaagcctttgtg

SEQ ID NO: 5316494 - DNA, 25 bp, Homo sapien
tgaaatagacatcaataactgctag

SEQ ID NO: 5316495 - DNA, 25 bp, Homo sapien
cctgcattaggaaattagcttaact

SEQ ID NO: 5316496 - DNA, 25 bp, Homo sapien
tttcatcaaacattaagcgtacttt

SEQ ID NO: 5316497 - DNA, 25 bp, Homo sapien
tgtaattcccactggcatgctggga

SEQ ID NO: 5316498 - DNA, 25 bp, Homo sapien
gtacttttgcccaacattttccagc

SEQ ID NO: 5316499 - DNA, 25 bp, Homo sapien
gataggcctcatcaattgtttttcc

SEQ ID NO: 5316500 - DNA, 25 bp, Homo sapien
tattactgttccttccactggacca

SEQ ID NO: 5316501 - DNA, 25 bp, Homo sapien
gcaactgttgcttctgccaaagcca

SEQ ID NO: 5316502 - DNA, 25 bp, Homo sapien
ttctgcaagagcaactgttgcttct

SEQ ID NO: 5316503 - DNA, 25 bp, Homo sapien
gggatctgctttcaattctaacatt

SEQ ID NO: 5316504 - DNA, 25 bp, Homo sapien
gaggacaacttgagctttggaggtc

SEQ ID NO: 5316505 - DNA, 25 bp, Homo sapien
ttagctggtgactgacctctctgag

SEQ ID NO: 5316506 - DNA, 25 bp, Homo sapien
tgttttccacttgtaagaggcatga

SEQ ID NO: 5316507 - DNA, 25 bp, Homo sapien
ctgtgatggcaccacgtctttgtcc

SEQ ID NO: 5316508 - DNA, 25 bp, Homo sapien
gtcacatttatttacggcaaggata

SEQ ID NO: 5316509 - DNA, 25 bp, Homo sapien
caggatcagcctcagctttgtcaca

SEQ ID NO: 5316510 - DNA, 25 bp, Homo sapien
ttcactttctcaggatcagcctcag

SEQ ID NO: 5316511 - DNA, 25 bp, Homo sapien
taccacatcgtaagccagcagctct

SEQ ID NO: 5316512 - DNA, 25 bp, Homo sapien
tacaaccaatacgacaatgtcagtg

SEQ ID NO: 5316513 - DNA, 25 bp, Homo sapien
gtgcatctttggcatgctgaataga

SEQ ID NO: 5316514 - DNA, 25 bp, Homo sapien
cagcatgtcctggagtatcaagaaa

SEQ ID NO: 5316515 - DNA, 25 bp, Homo sapien
ggcatgctgaatagattctacagtt

SEQ ID NO: 5316516 - DNA, 25 bp, Homo sapien
gttttcccgtgatcaacatggccca

SEQ ID NO: 5316517 - DNA, 25 bp, Homo sapien
tttcgaaatttgtcaagtaatgtcg

SEQ ID NO: 5316518 - DNA, 25 bp, Homo sapien
ggcaccaatgtgctgagtgatgcct

SEQ ID NO: 5316519 - DNA, 25 bp, Homo sapien
caagaaaggcaccaatgtgctgagt

SEQ ID NO: 5316520 - DNA, 25 bp, Homo sapien
cttggggttaataaagctggatctg

SEQ ID NO: 5316521 - DNA, 25 bp, Homo sapien
ttggggttaataaagctggatctgc

SEQ ID NO: 5316522 - DNA, 25 bp, Homo sapien
gaatctatgtcaatatcagtgttca

SEQ ID NO: 5316523 - DNA, 25 bp, Homo sapien
ccctgccttcgttatcacttctttg

SEQ ID NO: 5316524 - DNA, 25 bp, Homo sapien
tttgatccagacttcatctaaatgt

SEQ ID NO: 5316525 - DNA, 25 bp, Homo sapien
tatcagtgttcaataaagcttcata

SEQ ID NO: 5316526 - DNA, 25 bp, Homo sapien
caatagtcattccaatccatacttc

SEQ ID NO: 5316527 - DNA, 25 bp, Homo sapien
gttcctcaatagtcattccaatcca

SEQ ID NO: 5316528 - DNA, 25 bp, Homo sapien
gtcattccaatccatacttctacca

SEQ ID NO: 5316529 - DNA, 25 bp, Homo sapien
tccatacttctaccacctttttaga

SEQ ID NO: 5316530 - DNA, 25 bp, Homo sapien
tgagctgtccacacagggtaagcag

SEQ ID NO: 5316531 - DNA, 25 bp, Homo sapien
ctagaagcctatactgagataaagc

SEQ ID NO: 5316532 - DNA, 25 bp, Homo sapien
tgaaatcgtagcaagttctccaact

SEQ ID NO: 5316533 - DNA, 25 bp, Homo sapien
acagactgtgcagttgcctataaat

SEQ ID NO: 5316534 - DNA, 25 bp, Homo sapien
cctctagttggaatcgtctttgaac

SEQ ID NO: 5316535 - DNA, 25 bp, Homo sapien
gggttcctgccctgaaaaatctcag

SEQ ID NO: 5316536 - DNA, 25 bp, Homo sapien
tactatatgcatagcactggactac

SEQ ID NO: 5316537 - DNA, 25 bp, Homo sapien
gatgggattccataacaagtactct

SEQ ID NO: 5316538 - DNA, 25 bp, Homo sapien
cctatgggcctcattttccggatct

SEQ ID NO: 5316539 - DNA, 25 bp, Homo sapien
gcaagtcacttgtttcctatgggcc

SEQ ID NO: 5316540 - DNA, 25 bp, Homo sapien
acagtcagtgttatctggactcagc

SEQ ID NO: 5316541 - DNA, 25 bp, Homo sapien
gttatctggactcagcaagtcactt

SEQ ID NO: 5316542 - DNA, 25 bp, Homo sapien
tattacaagactaagaggagaaaat

SEQ ID NO: 5316543 - DNA, 25 bp, Homo sapien
tgtatatactttatcatcagctatt

SEQ ID NO: 5316544 - DNA, 25 bp, Homo sapien
cttcctattacaagactaagaggag

SEQ ID NO: 5316545 - DNA, 25 bp, Homo sapien
aaaccatatcacatgtcttgatact

SEQ ID NO: 5316546 - DNA, 25 bp, Homo sapien
caaaaaagcttctccaatgtcatac

SEQ ID NO: 5316547 - DNA, 25 bp, Homo sapien
ccagtacggtgttgtttcgccgcta

SEQ ID NO: 5316548 - DNA, 25 bp, Homo sapien
gctagttaatggcagtcaagactag

SEQ ID NO: 5316549 - DNA, 25 bp, Homo sapien
gccgctaggatatccttgtcaagga

SEQ ID NO: 5316550 - DNA, 25 bp, Homo sapien
gactagaacccagacgttctgactc

SEQ ID NO: 5316551 - DNA, 25 bp, Homo sapien
gtatgttgcaaatacgtagttgcgt

SEQ ID NO: 5316552 - DNA, 25 bp, Homo sapien
gcaaatacgtagttgcgttagggaa

SEQ ID NO: 5316553 - DNA, 25 bp, Homo sapien
ttgcgttagggaaaacgtctgaatg

SEQ ID NO: 5316554 - DNA, 25 bp, Homo sapien
cgttagggaaaacgtctgaatgtga

SEQ ID NO: 5316555 - DNA, 25 bp, Homo sapien
cgtgggctcacgcagggattaaatg

SEQ ID NO: 5316556 - DNA, 25 bp, Homo sapien
tatgaagttcgcgtgatttgtgcca

SEQ ID NO: 5316557 - DNA, 25 bp, Homo sapien
gacacgttaggcgaaacaacacaca

SEQ ID NO: 5316558 - DNA, 25 bp, Homo sapien
tccgagagaacagtgcacatgcctt

SEQ ID NO: 5316559 - DNA, 25 bp, Homo sapien
cccctggattctgagcacgggcgga

SEQ ID NO: 5316560 - DNA, 25 bp, Homo sapien
tggattctgagcacgggcggagatc

SEQ ID NO: 5316561 - DNA, 25 bp, Homo sapien
gggcccctggattctgagcacgggc

SEQ ID NO: 5316562 - DNA, 25 bp, Homo sapien
gattctgagcacgggcggagatcac

SEQ ID NO: 5316563 - DNA, 25 bp, Homo sapien
cttctggacccggaagaatggtcgg

SEQ ID NO: 5316564 - DNA, 25 bp, Homo sapien
gaatggtcggtaggtcagtccgtcc

SEQ ID NO: 5316565 - DNA, 25 bp, Homo sapien
tctttccggaattcagagagttgct

SEQ ID NO: 5316566 - DNA, 25 bp, Homo sapien
ttccggaattcagagagttgctgtc

SEQ ID NO: 5316567 - DNA, 25 bp, Homo sapien
gcggtgtccgcggcgggcgtccagc

SEQ ID NO: 5316568 - DNA, 25 bp, Homo sapien
tgcggtgtccgcggcgggcgtccag

SEQ ID NO: 5316569 - DNA, 25 bp, Homo sapien
ctgcggtgtccgcggcgggcgtcca

SEQ ID NO: 5316570 - DNA, 25 bp, Homo sapien
cctaagtcagctcgtgtgtatggca

SEQ ID NO: 5316571 - DNA, 25 bp, Homo sapien
caaatgcaagcgaacagtggcggta

SEQ ID NO: 5316572 - DNA, 25 bp, Homo sapien
gaggcctcggtggtgcttaacactg

SEQ ID NO: 5316573 - DNA, 25 bp, Homo sapien
taatgacagtagctagttcacagga

SEQ ID NO: 5316574 - DNA, 25 bp, Homo sapien
tcattgcaaccaaactccgcttcct

SEQ ID NO: 5316575 - DNA, 25 bp, Homo sapien
cctgacacgtcctccgtactgctgt

SEQ ID NO: 5316576 - DNA, 25 bp, Homo sapien
aacaaaggaagtaacttatggaatg

SEQ ID NO: 5316577 - DNA, 25 bp, Homo sapien
acctgacacgtcctccgtactgctg

SEQ ID NO: 5316578 - DNA, 25 bp, Homo sapien
ctgacacgtcctccgtactgctgtg

SEQ ID NO: 5316579 - DNA, 25 bp, Homo sapien
ccggcgtcggccgagatccctctgg

SEQ ID NO: 5316580 - DNA, 25 bp, Homo sapien
caggcaccagcactacgctgccggc

SEQ ID NO: 5316581 - DNA, 25 bp, Homo sapien
accagcactacgctgccggcgtcgg

SEQ ID NO: 5316582 - DNA, 25 bp, Homo sapien
gcgtcggccgagatccctctgggca

SEQ ID NO: 5316583 - DNA, 25 bp, Homo sapien
tcaggcttcggtctgcgcagccgcg

SEQ ID NO: 5316584 - DNA, 25 bp, Homo sapien
cagccgcgggaagccgtgccgtttt

SEQ ID NO: 5316585 - DNA, 25 bp, Homo sapien
gtttttccgcccatcgccacgatag

SEQ ID NO: 5316586 - DNA, 25 bp, Homo sapien
ccatccacactgaggtcgtggagca

SEQ ID NO: 5316587 - DNA, 25 bp, Homo sapien
gtgagaacgtcgctcctggaatatt

SEQ ID NO: 5316588 - DNA, 25 bp, Homo sapien
tactcttgggagtgatctgcttaca

SEQ ID NO: 5316589 - DNA, 25 bp, Homo sapien
gaggttactgcacggaaatctttac

SEQ ID NO: 5316590 - DNA, 25 bp, Homo sapien
gaaccagcacaacatacggaggact

SEQ ID NO: 5316591 - DNA, 25 bp, Homo sapien
gtgcaaggacatgaagtttacccaa

SEQ ID NO: 5316592 - DNA, 25 bp, Homo sapien
accgcgccagaccacttgcaaatat

SEQ ID NO: 5316593 - DNA, 25 bp, Homo sapien
ttctttatgtgtgcgtatgccagct

SEQ ID NO: 5316594 - DNA, 25 bp, Homo sapien
catggtctggacgtaacggaatgct

SEQ ID NO: 5316595 - DNA, 25 bp, Homo sapien
gaaatctgcgatttgctgatgaaac

SEQ ID NO: 5316596 - DNA, 25 bp, Homo sapien
gagcttgccaagcagttaggtgttg

SEQ ID NO: 5316597 - DNA, 25 bp, Homo sapien
cccagcaggcaaaataggtataaac

SEQ ID NO: 5316598 - DNA, 25 bp, Homo sapien
taaaagttggtcaaggctgtgccac

SEQ ID NO: 5316599 - DNA, 25 bp, Homo sapien
gatacgtgaatgttagtccaactta

SEQ ID NO: 5316600 - DNA, 25 bp, Homo sapien
gatgcctgtgactgacatcaggtat

SEQ ID NO: 5316601 - DNA, 25 bp, Homo sapien
gccattcaactctaaatcccttatt

SEQ ID NO: 5316602 - DNA, 25 bp, Homo sapien
aacagtggtatctcttgtcatgagt

SEQ ID NO: 5316603 - DNA, 25 bp, Homo sapien
agattttgttgaagggtgttataag

SEQ ID NO: 5316604 - DNA, 25 bp, Homo sapien
taataacagttataagtacaatggt

SEQ ID NO: 5316605 - DNA, 25 bp, Homo sapien
tataagtacaatggtagacactgaa

SEQ ID NO: 5316606 - DNA, 25 bp, Homo sapien
ttttgttgaagggtgttataagtgc

SEQ ID NO: 5316607 - DNA, 25 bp, Homo sapien
aatatctcaacatgtacatcaaggt

SEQ ID NO: 5316608 - DNA, 25 bp, Homo sapien
aaatacatctcaggactaagtgtag

SEQ ID NO: 5316609 - DNA, 25 bp, Homo sapien
tatgcattccttttaaggcattttc

SEQ ID NO: 5316610 - DNA, 25 bp, Homo sapien
catgtacatcaaggtttatattata

SEQ ID NO: 5316611 - DNA, 25 bp, Homo sapien
taatttaaagcatgtcaggccccgg

SEQ ID NO: 5316612 - DNA, 25 bp, Homo sapien
tctggagaggtcaagctgtaatgtc

SEQ ID NO: 5316613 - DNA, 25 bp, Homo sapien
caatgtgctacttgaatccagggag

SEQ ID NO: 5316614 - DNA, 25 bp, Homo sapien
tacttcattgtgaggtggctacaac

SEQ ID NO: 5316615 - DNA, 25 bp, Homo sapien
ttactgggttagtgatgaaacccac

SEQ ID NO: 5316616 - DNA, 25 bp, Homo sapien
gactgtgaacacaacattgctactg

SEQ ID NO: 5316617 - DNA, 25 bp, Homo sapien
ttgctactggcctacgaaagagaga

SEQ ID NO: 5316618 - DNA, 25 bp, Homo sapien
tcagagctggtaatgaaagcctaag

SEQ ID NO: 5316619 - DNA, 25 bp, Homo sapien
aaaagtatcaacacatgcagtctgc

SEQ ID NO: 5316620 - DNA, 25 bp, Homo sapien
gtctgctaaccaaataaggctctga

SEQ ID NO: 5316621 - DNA, 25 bp, Homo sapien
tgcacacgcatacataacccaatac

SEQ ID NO: 5316622 - DNA, 25 bp, Homo sapien
taagcaacagtcagctctcaagtta

SEQ ID NO: 5316623 - DNA, 25 bp, Homo sapien
tccagtagtgctccttgattcaagg

SEQ ID NO: 5316624 - DNA, 25 bp, Homo sapien
tcttgcctgctctattcacgaagga

SEQ ID NO: 5316625 - DNA, 25 bp, Homo sapien
aaatgattcctatagttgctaggtg

SEQ ID NO: 5316626 - DNA, 25 bp, Homo sapien
cagtacaaggtatagtaagtcctaa

SEQ ID NO: 5316627 - DNA, 25 bp, Homo sapien
gtatttctataagaatgagaatgac

SEQ ID NO: 5316628 - DNA, 25 bp, Homo sapien
aaagcttaaagataagagagacaca

SEQ ID NO: 5316629 - DNA, 25 bp, Homo sapien
aagcttaaagataagagagacacaa

SEQ ID NO: 5316630 - DNA, 25 bp, Homo sapien
ggtatttctataagaatgagaatga

SEQ ID NO: 5316631 - DNA, 25 bp, Homo sapien
gtaatagaattaggagctttgttgc

SEQ ID NO: 5316632 - DNA, 25 bp, Homo sapien
cacttggcccacatgtcatgtagtg

SEQ ID NO: 5316633 - DNA, 25 bp, Homo sapien
taggagctttgttgctccctagacc

SEQ ID NO: 5316634 - DNA, 25 bp, Homo sapien
gtcatgtagtgggtaatagaattag

SEQ ID NO: 5316635 - DNA, 25 bp, Homo sapien
ataatttctagaaagctaggccagg

SEQ ID NO: 5316636 - DNA, 25 bp, Homo sapien
agaactagtgttgtggccagtcgca

SEQ ID NO: 5316637 - DNA, 25 bp, Homo sapien
tgtttgggacacatcggttccatat

SEQ ID NO: 5316638 - DNA, 25 bp, Homo sapien
tactaagaaaaccagggcttgatgc

SEQ ID NO: 5316639 - DNA, 25 bp, Homo sapien
tcagctataggctaaatccaaatgg

SEQ ID NO: 5316640 - DNA, 25 bp, Homo sapien
tttgaaggcattccttccaggtgcc

SEQ ID NO: 5316641 - DNA, 25 bp, Homo sapien
gcaatctgggagttagagattcaaa

SEQ ID NO: 5316642 - DNA, 25 bp, Homo sapien
tctctggaagtaaatggatcagggt

SEQ ID NO: 5316643 - DNA, 25 bp, Homo sapien
atggttacaagttctaattttacat

SEQ ID NO: 5316644 - DNA, 25 bp, Homo sapien
acttgctaccctttttgattagaag

SEQ ID NO: 5316645 - DNA, 25 bp, Homo sapien
tgctaccctttttgattagaagtaa

SEQ ID NO: 5316646 - DNA, 25 bp, Homo sapien
cttgctaccctttttgattagaagt

SEQ ID NO: 5316647 - DNA, 25 bp, Homo sapien
tgccatcatgtacagctgaacactg

SEQ ID NO: 5316648 - DNA, 25 bp, Homo sapien
tcttggtaagagagcatgcaactgt

SEQ ID NO: 5316649 - DNA, 25 bp, Homo sapien
tagaggcatgcagaagtgacaagat

SEQ ID NO: 5316650 - DNA, 25 bp, Homo sapien
gataactggcctaggaggtaaccca

SEQ ID NO: 5316651 - DNA, 25 bp, Homo sapien
cagcagctggtggtgaatcaactga

SEQ ID NO: 5316652 - DNA, 25 bp, Homo sapien
ttccttcggcagttgagatcacgct

SEQ ID NO: 5316653 - DNA, 25 bp, Homo sapien
gaggaccaggtctcaaaaactcagg

SEQ ID NO: 5316654 - DNA, 25 bp, Homo sapien
gatcacgctgcttgcacgaggtaaa

SEQ ID NO: 5316655 - DNA, 25 bp, Homo sapien
tacagaaatttaacttgtggtgttc

SEQ ID NO: 5316656 - DNA, 25 bp, Homo sapien
tgtggtgttcatctaaattaaggtc

SEQ ID NO: 5316657 - DNA, 25 bp, Homo sapien
aattgtggtacctcttaatactcct

SEQ ID NO: 5316658 - DNA, 25 bp, Homo sapien
aagcagattagtgaatatagtgcca

SEQ ID NO: 5316659 - DNA, 25 bp, Homo sapien
gatgtcgactctccagtgtttcaga

SEQ ID NO: 5316660 - DNA, 25 bp, Homo sapien
gattggactgctaccactgctggac

SEQ ID NO: 5316661 - DNA, 25 bp, Homo sapien
ccagttttgatcttgtgatgtcgac

SEQ ID NO: 5316662 - DNA, 25 bp, Homo sapien
tggagcactgggcttgatctggtct

SEQ ID NO: 5316663 - DNA, 25 bp, Homo sapien
ggcctgctttggttattaactgcac

SEQ ID NO: 5316664 - DNA, 25 bp, Homo sapien
ttgtggcctgctttggttattaact

SEQ ID NO: 5316665 - DNA, 25 bp, Homo sapien
tgtggcctgctttggttattaactg

SEQ ID NO: 5316666 - DNA, 25 bp, Homo sapien
gtggcctgctttggttattaactgc

SEQ ID NO: 5316667 - DNA, 25 bp, Homo sapien
catactcagagcctaaacagagcct

SEQ ID NO: 5316668 - DNA, 25 bp, Homo sapien
taacaattgtctgccatagcctgct

SEQ ID NO: 5316669 - DNA, 25 bp, Homo sapien
tagttataaaatgccttgcaggcca

SEQ ID NO: 5316670 - DNA, 25 bp, Homo sapien
aacagagcctcatacaaagcattca

SEQ ID NO: 5316671 - DNA, 25 bp, Homo sapien
tccagaatctgagtaggcagtatat

SEQ ID NO: 5316672 - DNA, 25 bp, Homo sapien
ccttgtaacctgacaattctggagt

SEQ ID NO: 5316673 - DNA, 25 bp, Homo sapien
tgtgagtgtccatgcgtcataagaa

SEQ ID NO: 5316674 - DNA, 25 bp, Homo sapien
tctatggtgttccttaagagtacgg

SEQ ID NO: 5316675 - DNA, 25 bp, Homo sapien
ctagtggatgttctgccactatcaa

SEQ ID NO: 5316676 - DNA, 25 bp, Homo sapien
tgccactatcaaggctggctggtct

SEQ ID NO: 5316677 - DNA, 25 bp, Homo sapien
ctttgacttcatgtagtgaagcatt

SEQ ID NO: 5316678 - DNA, 25 bp, Homo sapien
gacttcatgtagtgaagcattatta

SEQ ID NO: 5316679 - DNA, 25 bp, Homo sapien
gatgagcttttacattctgattaca

SEQ ID NO: 5316680 - DNA, 25 bp, Homo sapien
tgctgatgagcttttacattctgat

SEQ ID NO: 5316681 - DNA, 25 bp, Homo sapien
aacttctagctgatgatgctgatga

SEQ ID NO: 5316682 - DNA, 25 bp, Homo sapien
tgagcttttacattctgattacaga

SEQ ID NO: 5316683 - DNA, 25 bp, Homo sapien
ctctaaataaggttcattatcttac

SEQ ID NO: 5316684 - DNA, 25 bp, Homo sapien
catgaactcttgatcccgtactaga

SEQ ID NO: 5316685 - DNA, 25 bp, Homo sapien
tgatcccgtactagaatcatcacta

SEQ ID NO: 5316686 - DNA, 25 bp, Homo sapien
tgtggacttatgtcttcaaaggatg

SEQ ID NO: 5316687 - DNA, 25 bp, Homo sapien
catcactaacaccttgtggacttat

SEQ ID NO: 5316688 - DNA, 25 bp, Homo sapien
caatcatgtataatacagattgact

SEQ ID NO: 5316689 - DNA, 25 bp, Homo sapien
tttcatagactcaactagaaactgg

SEQ ID NO: 5316690 - DNA, 25 bp, Homo sapien
ctagaaactggaactaggaataaga

SEQ ID NO: 5316691 - DNA, 25 bp, Homo sapien
cagattgacttaacatatttcatag

SEQ ID NO: 5316692 - DNA, 25 bp, Homo sapien
ttttacccgttgaaatatcatcagg

SEQ ID NO: 5316693 - DNA, 25 bp, Homo sapien
accatggactgcaccaggtcattca

SEQ ID NO: 5316694 - DNA, 25 bp, Homo sapien
caactgcttggatctgaagcctgca

SEQ ID NO: 5316695 - DNA, 25 bp, Homo sapien
tagagaaggccatagctcccaattc

SEQ ID NO: 5316696 - DNA, 25 bp, Homo sapien
catgcgattgtgcagcgatgtgcta

SEQ ID NO: 5316697 - DNA, 25 bp, Homo sapien
tccttggtcagagcaggttactgaa

SEQ ID NO: 5316698 - DNA, 25 bp, Homo sapien
taattagcagccttcacaatgtggt

SEQ ID NO: 5316699 - DNA, 25 bp, Homo sapien
ttttactaagtacgactgccatgcg

SEQ ID NO: 5316700 - DNA, 25 bp, Homo sapien
catggaacgacggtagcaggccttc

SEQ ID NO: 5316701 - DNA, 25 bp, Homo sapien
cattttgtctttatccttcggtctg

SEQ ID NO: 5316702 - DNA, 25 bp, Homo sapien
ggtagcaggccttcattttgtcttt

SEQ ID NO: 5316703 - DNA, 25 bp, Homo sapien
ttatccttcggtctgttcctcaaaa

SEQ ID NO: 5316704 - DNA, 25 bp, Homo sapien
gcttggattggttacagtcctataa

SEQ ID NO: 5316705 - DNA, 25 bp, Homo sapien
tatttatgcagggatcaactttcct

SEQ ID NO: 5316706 - DNA, 25 bp, Homo sapien
gcccggcctgaggaacatatacttt

SEQ ID NO: 5316707 - DNA, 25 bp, Homo sapien
gatcaactttcctagttaagtcgta

SEQ ID NO: 5316708 - DNA, 25 bp, Homo sapien
ccaaggactgctttactgacagata

SEQ ID NO: 5316709 - DNA, 25 bp, Homo sapien
catactgaaattaagggaacattag

SEQ ID NO: 5316710 - DNA, 25 bp, Homo sapien
cttccaaaatggacaggataaaagg

SEQ ID NO: 5316711 - DNA, 25 bp, Homo sapien
tttatacctaaacagacaagatgac

SEQ ID NO: 5316712 - DNA, 25 bp, Homo sapien
ggtctggccatcttctaaagagttt

SEQ ID NO: 5316713 - DNA, 25 bp, Homo sapien
tgttagagatttctggcgttcccga

SEQ ID NO: 5316714 - DNA, 25 bp, Homo sapien
actgtcttgatgagggagctgaaga

SEQ ID NO: 5316715 - DNA, 25 bp, Homo sapien
ttgaacctactgaagaactatcttg

SEQ ID NO: 5316716 - DNA, 25 bp, Homo sapien
tctccttctgacgtcttaattcatt

SEQ ID NO: 5316717 - DNA, 25 bp, Homo sapien
tttctccttctgacgtcttaattca

SEQ ID NO: 5316718 - DNA, 25 bp, Homo sapien
gtttctccttctgacgtcttaattc

SEQ ID NO: 5316719 - DNA, 25 bp, Homo sapien
ttctccttctgacgtcttaattcat

SEQ ID NO: 5316720 - DNA, 25 bp, Homo sapien
ccaactgcttggatctgaggcctgc

SEQ ID NO: 5316721 - DNA, 25 bp, Homo sapien
aaatgtattagtcaccaagggtcag

SEQ ID NO: 5316722 - DNA, 25 bp, Homo sapien
gatgccttgtgaacagatgttgcca

SEQ ID NO: 5316723 - DNA, 25 bp, Homo sapien
gctaggaccacgtaacaaaggcatt

SEQ ID NO: 5316724 - DNA, 25 bp, Homo sapien
tagtagatgccgattttcttcttct

SEQ ID NO: 5316725 - DNA, 25 bp, Homo sapien
ctgtagcattaatgtctgaatttga

SEQ ID NO: 5316726 - DNA, 25 bp, Homo sapien
ttctgttctgtagcattaatgtctg

SEQ ID NO: 5316727 - DNA, 25 bp, Homo sapien
tgtctgaatttgatctagtagatgc

SEQ ID NO: 5316728 - DNA, 25 bp, Homo sapien
tgtacctatgccctcttgcaatgtg

SEQ ID NO: 5316729 - DNA, 25 bp, Homo sapien
tctaggcctcaagttgcctgtggac

SEQ ID NO: 5316730 - DNA, 25 bp, Homo sapien
tggtgtaacagttccaagtctaggc

SEQ ID NO: 5316731 - DNA, 25 bp, Homo sapien
gaaacataacatatgtggtagattc

SEQ ID NO: 5316732 - DNA, 25 bp, Homo sapien
gccctcagcgtacatgccagctaat

SEQ ID NO: 5316733 - DNA, 25 bp, Homo sapien
ccctggcccatacatcagtgagtag

SEQ ID NO: 5316734 - DNA, 25 bp, Homo sapien
cagtgagtagattagcatagatgct

SEQ ID NO: 5316735 - DNA, 25 bp, Homo sapien
aagaaatgtttactgtccattacca

SEQ ID NO: 5316736 - DNA, 25 bp, Homo sapien
tcacactggttattcagcttggttg

SEQ ID NO: 5316737 - DNA, 25 bp, Homo sapien
ctcacactggttattcagcttggtt

SEQ ID NO: 5316738 - DNA, 25 bp, Homo sapien
ttaaaagttgactataggtatgatt

SEQ ID NO: 5316739 - DNA, 25 bp, Homo sapien
taaaagttgactataggtatgattc

SEQ ID NO: 5316740 - DNA, 25 bp, Homo sapien
aagttgactataggtatgattcagc

SEQ ID NO: 5316741 - DNA, 25 bp, Homo sapien
aaagttgactataggtatgattcag

SEQ ID NO: 5316742 - DNA, 25 bp, Homo sapien
tttcctgttctactttgagcatttt

SEQ ID NO: 5316743 - DNA, 25 bp, Homo sapien
gagattcatactctgaagcctgacg

SEQ ID NO: 5316744 - DNA, 25 bp, Homo sapien
caagatttttgtgggcagacttcag

SEQ ID NO: 5316745 - DNA, 25 bp, Homo sapien
aggtcttctcgctctttgattacag

SEQ ID NO: 5316746 - DNA, 25 bp, Homo sapien
caaggtctctatgttccacctcaag

SEQ ID NO: 5316747 - DNA, 25 bp, Homo sapien
ctgttcttgtaatgacactgtctgc

SEQ ID NO: 5316748 - DNA, 25 bp, Homo sapien
gaagcttggcattctgtgtttgaag

SEQ ID NO: 5316749 - DNA, 25 bp, Homo sapien
gagttttcaacgcttgcttctctgc

SEQ ID NO: 5316750 - DNA, 25 bp, Homo sapien
tctgcctctgaagtgcaagaatctg

SEQ ID NO: 5316751 - DNA, 25 bp, Homo sapien
cactatggaataataggtagtcatt

SEQ ID NO: 5316752 - DNA, 25 bp, Homo sapien
atatacttctacatacagataaatg

SEQ ID NO: 5316753 - DNA, 25 bp, Homo sapien
caaataggaattttgtatagcatga

SEQ ID NO: 5316754 - DNA, 25 bp, Homo sapien
tctgctaaaattgagacatctccaa

SEQ ID NO: 5316755 - DNA, 25 bp, Homo sapien
tctttctacttcaattaatctgtct

SEQ ID NO: 5316756 - DNA, 25 bp, Homo sapien
taactttcagaagttctctagtcgt

SEQ ID NO: 5316757 - DNA, 25 bp, Homo sapien
tctcgctcccatttgttgtcttcac

SEQ ID NO: 5316758 - DNA, 25 bp, Homo sapien
cgtttcttgactttctcgctcccat

SEQ ID NO: 5316759 - DNA, 25 bp, Homo sapien
tgagagcttcataattttttttcac

SEQ ID NO: 5316760 - DNA, 25 bp, Homo sapien
tgtttgagagcttcataattttttt

SEQ ID NO: 5316761 - DNA, 25 bp, Homo sapien
ctgtttgagagcttcataatttttt

SEQ ID NO: 5316762 - DNA, 25 bp, Homo sapien
tttgagagcttcataattttttttc

SEQ ID NO: 5316763 - DNA, 25 bp, Homo sapien
tgcgctcaagcgaacttgccgacct

SEQ ID NO: 5316764 - DNA, 25 bp, Homo sapien
gcaggaagctagtccataacagtta

SEQ ID NO: 5316765 - DNA, 25 bp, Homo sapien
tcagttgaatacatagcaggaagct

SEQ ID NO: 5316766 - DNA, 25 bp, Homo sapien
ctgaaagtggaagtcaatgatggct

SEQ ID NO: 5316767 - DNA, 25 bp, Homo sapien
tctctgagtacagcaactctcataa

SEQ ID NO: 5316768 - DNA, 25 bp, Homo sapien
taattgattggtatgtgcactgtgg

SEQ ID NO: 5316769 - DNA, 25 bp, Homo sapien
ttaaagaccaatagacagccctatc

SEQ ID NO: 5316770 - DNA, 25 bp, Homo sapien
gaatcgtaaatccatacctttggag

SEQ ID NO: 5316771 - DNA, 25 bp, Homo sapien
ttaaccttgagaccactcctggtgg

SEQ ID NO: 5316772 - DNA, 25 bp, Homo sapien
aaccttgagaccactcctggtggca

SEQ ID NO: 5316773 - DNA, 25 bp, Homo sapien
taaccttgagaccactcctggtggc

SEQ ID NO: 5316774 - DNA, 25 bp, Homo sapien
gctggttataattcgtggattcttc

SEQ ID NO: 5316775 - DNA, 25 bp, Homo sapien
tcttctaatcgagcttctaaagcag

SEQ ID NO: 5316776 - DNA, 25 bp, Homo sapien
gcttctaaagcagcaattttttctt

SEQ ID NO: 5316777 - DNA, 25 bp, Homo sapien
aagttcttggcgcaattgctggtta

SEQ ID NO: 5316778 - DNA, 25 bp, Homo sapien
tttatgaccacaaatattcatgcca

SEQ ID NO: 5316779 - DNA, 25 bp, Homo sapien
ataaatgggtcttataaaagcattt

SEQ ID NO: 5316780 - DNA, 25 bp, Homo sapien
tatgaccacaaatattcatgccata

SEQ ID NO: 5316781 - DNA, 25 bp, Homo sapien
ttatgaccacaaatattcatgccat

SEQ ID NO: 5316782 - DNA, 25 bp, Homo sapien
tttgccaagtagacttagtactcac

SEQ ID NO: 5316783 - DNA, 25 bp, Homo sapien
aatgttttctatagctagtacagaa

SEQ ID NO: 5316784 - DNA, 25 bp, Homo sapien
tttctatagctagtacagaaagaat

SEQ ID NO: 5316785 - DNA, 25 bp, Homo sapien
tcaactgtttgccaagtagacttag

SEQ ID NO: 5316786 - DNA, 25 bp, Homo sapien
catcagtactttgttcatcatgtaa

SEQ ID NO: 5316787 - DNA, 25 bp, Homo sapien
gagtcgctccttatttaaccctatc

SEQ ID NO: 5316788 - DNA, 25 bp, Homo sapien
taaccctatcttctcaagctcatga

SEQ ID NO: 5316789 - DNA, 25 bp, Homo sapien
gctcatgagttaatttttcgagatc

SEQ ID NO: 5316790 - DNA, 25 bp, Homo sapien
tagtgtcttgatcaaacattattat

SEQ ID NO: 5316791 - DNA, 25 bp, Homo sapien
gtcagataccactaggaaactttat

SEQ ID NO: 5316792 - DNA, 25 bp, Homo sapien
gcaaattactgatagattccaataa

SEQ ID NO: 5316793 - DNA, 25 bp, Homo sapien
tctaattccaaaattctactgaacc

SEQ ID NO: 5316794 - DNA, 25 bp, Homo sapien
atttctgcttgttgtcggagtctct

SEQ ID NO: 5316795 - DNA, 25 bp, Homo sapien
tgtaaccaacgtttttatatcaata

SEQ ID NO: 5316796 - DNA, 25 bp, Homo sapien
tctagttctttcagacggacacaag

SEQ ID NO: 5316797 - DNA, 25 bp, Homo sapien
cacaagattctttatatataccaat

SEQ ID NO: 5316798 - DNA, 25 bp, Homo sapien
ccagttgagaagtctcttgctctaa

SEQ ID NO: 5316799 - DNA, 25 bp, Homo sapien
tttccagttgagaagtctcttgctc

SEQ ID NO: 5316800 - DNA, 25 bp, Homo sapien
ttgagaagtctcttgctctaatgat

SEQ ID NO: 5316801 - DNA, 25 bp, Homo sapien
ccaattgtttcttatccttttccag

SEQ ID NO: 5316802 - DNA, 25 bp, Homo sapien
tgtagttcactctctaattgctgga

SEQ ID NO: 5316803 - DNA, 25 bp, Homo sapien
tctagggattctaactgaaaggtca

SEQ ID NO: 5316804 - DNA, 25 bp, Homo sapien
gaccgctgccttaaggaagacactg

SEQ ID NO: 5316805 - DNA, 25 bp, Homo sapien
tggtagctaacttctaagcgttctg

SEQ ID NO: 5316806 - DNA, 25 bp, Homo sapien
aaaaaagggtgctagaacatgtctt

SEQ ID NO: 5316807 - DNA, 25 bp, Homo sapien
aaaagggtgctagaacatgtcttac

SEQ ID NO: 5316808 - DNA, 25 bp, Homo sapien
caaaaaaagggtgctagaacatgtc

SEQ ID NO: 5316809 - DNA, 25 bp, Homo sapien
aagggtgctagaacatgtcttactt

SEQ ID NO: 5316810 - DNA, 25 bp, Homo sapien
ctttctccttcattagatccttgct

SEQ ID NO: 5316811 - DNA, 25 bp, Homo sapien
tcattagatccttgcttaaattctg

SEQ ID NO: 5316812 - DNA, 25 bp, Homo sapien
ctctcagtgtttctattgttttttc

SEQ ID NO: 5316813 - DNA, 25 bp, Homo sapien
tttctctcagtgtttctattgtttt

SEQ ID NO: 5316814 - DNA, 25 bp, Homo sapien
aactcattcacctcatggcccaggg

SEQ ID NO: 5316815 - DNA, 25 bp, Homo sapien
ttttcaggattttggaagcattgcc

SEQ ID NO: 5316816 - DNA, 25 bp, Homo sapien
gaatccacagtagtccgaagctctt

SEQ ID NO: 5316817 - DNA, 25 bp, Homo sapien
gaagctcttctacggtttttgtcaa

SEQ ID NO: 5316818 - DNA, 25 bp, Homo sapien
gagaatttccgggtctgcttttgtg

SEQ ID NO: 5316819 - DNA, 25 bp, Homo sapien
gcatccacagcattctagttaaaaa

SEQ ID NO: 5316820 - DNA, 25 bp, Homo sapien
tggagttcaagcagacccattaaat

SEQ ID NO: 5316821 - DNA, 25 bp, Homo sapien
tccagcttttctagtcatcatgttg

SEQ ID NO: 5316822 - DNA, 25 bp, Homo sapien
aatgaatattctgaacacgctgaaa

SEQ ID NO: 5316823 - DNA, 25 bp, Homo sapien
tattctaagtagcaactaatgaacg

SEQ ID NO: 5316824 - DNA, 25 bp, Homo sapien
aatacactactacttattttggcta

SEQ ID NO: 5316825 - DNA, 25 bp, Homo sapien
taaaatctttaatccagttccattc

SEQ ID NO: 5316826 - DNA, 25 bp, Homo sapien
caattgtacataatcatgcccagct

SEQ ID NO: 5316827 - DNA, 25 bp, Homo sapien
gaacaatctaatactgggcaaaact

SEQ ID NO: 5316828 - DNA, 25 bp, Homo sapien
gaataaatgtgacctaactggtgaa

SEQ ID NO: 5316829 - DNA, 25 bp, Homo sapien
tcaagagtttatgtctacgtcaaca

SEQ ID NO: 5316830 - DNA, 25 bp, Homo sapien
agttcactagttctggatatctgtt

SEQ ID NO: 5316831 - DNA, 25 bp, Homo sapien
aaagttcactagttctggatatctg

SEQ ID NO: 5316832 - DNA, 25 bp, Homo sapien
tcttttttctatccatatctcgttc

SEQ ID NO: 5316833 - DNA, 25 bp, Homo sapien
cagttcccagccaagatgtaatgat

SEQ ID NO: 5316834 - DNA, 25 bp, Homo sapien
tttatcagaacgagcacgagttccc

SEQ ID NO: 5316835 - DNA, 25 bp, Homo sapien
cgagcacgagttccctctagttggt

SEQ ID NO: 5316836 - DNA, 25 bp, Homo sapien
gagttccctctagttggtcttccaa

SEQ ID NO: 5316837 - DNA, 25 bp, Homo sapien
tgtaatttatcagaacgagcacgag

SEQ ID NO: 5316838 - DNA, 25 bp, Homo sapien
tcaactcttgccttataaaattcaa

SEQ ID NO: 5316839 - DNA, 25 bp, Homo sapien
tgtagtctctctttatatctgctga

SEQ ID NO: 5316840 - DNA, 25 bp, Homo sapien
ttctctcgaagtgcatctaattcat

SEQ ID NO: 5316841 - DNA, 25 bp, Homo sapien
tttcaagcttatcgactctgactgc

SEQ ID NO: 5316842 - DNA, 25 bp, Homo sapien
cagagcgagcatccgaaagcaaatt

SEQ ID NO: 5316843 - DNA, 25 bp, Homo sapien
gcagagcgagcatccgaaagcaaat

SEQ ID NO: 5316844 - DNA, 25 bp, Homo sapien
agcgagcatccgaaagcaaattcat

SEQ ID NO: 5316845 - DNA, 25 bp, Homo sapien
ctggcagagcgagcatccgaaagca

SEQ ID NO: 5316846 - DNA, 25 bp, Homo sapien
ccatttgctcaagttcttgtttaca

SEQ ID NO: 5316847 - DNA, 25 bp, Homo sapien
gctcaagttcttgtttacaatccaa

SEQ ID NO: 5316848 - DNA, 25 bp, Homo sapien
gttcttgtttacaatccaacaactg

SEQ ID NO: 5316849 - DNA, 25 bp, Homo sapien
gttctatttccatttgctcaagttc

SEQ ID NO: 5316850 - DNA, 25 bp, Homo sapien
caccattgtaatgttacaggaccac

SEQ ID NO: 5316851 - DNA, 25 bp, Homo sapien
tagatgatagggatttttcagcacc

SEQ ID NO: 5316852 - DNA, 25 bp, Homo sapien
gcactagcctatgcctacacagggt

SEQ ID NO: 5316853 - DNA, 25 bp, Homo sapien
taatagtataatgcgaagaactcag

SEQ ID NO: 5316854 - DNA, 25 bp, Homo sapien
cacaagctagcaatatttccataag

SEQ ID NO: 5316855 - DNA, 25 bp, Homo sapien
tgtttaggtcacctttgggaccata

SEQ ID NO: 5316856 - DNA, 25 bp, Homo sapien
ttatgccaacctccttatttttctc

SEQ ID NO: 5316857 - DNA, 25 bp, Homo sapien
ccataaatccagaataaaaggcatc

SEQ ID NO: 5316858 - DNA, 25 bp, Homo sapien
aatggagaccatcccgctcttcaga

SEQ ID NO: 5316859 - DNA, 25 bp, Homo sapien
cgactttctgttcgcttcatgcctg

SEQ ID NO: 5316860 - DNA, 25 bp, Homo sapien
ctgccagttccaccgacagatgttg

SEQ ID NO: 5316861 - DNA, 25 bp, Homo sapien
ttatcttggctttagcatctgccag

SEQ ID NO: 5316862 - DNA, 25 bp, Homo sapien
aaaacaattcactggtcaaaaacat

SEQ ID NO: 5316863 - DNA, 25 bp, Homo sapien
cactaggtctaagaattgtactgcc

SEQ ID NO: 5316864 - DNA, 25 bp, Homo sapien
ttcattcaacagttcatgcatgggc

SEQ ID NO: 5316865 - DNA, 25 bp, Homo sapien
gcatgggctacttagcaaatgacac

SEQ ID NO: 5316866 - DNA, 25 bp, Homo sapien
ctttagagttcctactcagcctgga

SEQ ID NO: 5316867 - DNA, 25 bp, Homo sapien
gactctatcgctgttatcctcctgg

SEQ ID NO: 5316868 - DNA, 25 bp, Homo sapien
tagaacttgtgagggattttccaac

SEQ ID NO: 5316869 - DNA, 25 bp, Homo sapien
gaagttacacagtcctactacagat

SEQ ID NO: 5316870 - DNA, 25 bp, Homo sapien
tccaacctcaacatgtggcaataaa

SEQ ID NO: 5316871 - DNA, 25 bp, Homo sapien
cgaaattagccttaagcaaattctt

SEQ ID NO: 5316872 - DNA, 25 bp, Homo sapien
tatgcttcacggcaatgatttttcc

SEQ ID NO: 5316873 - DNA, 25 bp, Homo sapien
tccacttacatcaactatattttca

SEQ ID NO: 5316874 - DNA, 25 bp, Homo sapien
gtctttttagatgcaatgccatatt

SEQ ID NO: 5316875 - DNA, 25 bp, Homo sapien
gacatatcagtcacttccatccatt

SEQ ID NO: 5316876 - DNA, 25 bp, Homo sapien
tccattgcaggtcaaacacattttc

SEQ ID NO: 5316877 - DNA, 25 bp, Homo sapien
tttcaagagtggttctatgtcctcc

SEQ ID NO: 5316878 - DNA, 25 bp, Homo sapien
tatgtgcggcaaccgctgcttttgt

SEQ ID NO: 5316879 - DNA, 25 bp, Homo sapien
ctcttgaatatgtgcggcaaccgct

SEQ ID NO: 5316880 - DNA, 25 bp, Homo sapien
cggcaaccgctgcttttgtatcaaa

SEQ ID NO: 5316881 - DNA, 25 bp, Homo sapien
gaatatgtgcggcaaccgctgcttt

SEQ ID NO: 5316882 - DNA, 25 bp, Homo sapien
gactaaaggcgcatcattgaaccaa

SEQ ID NO: 5316883 - DNA, 25 bp, Homo sapien
tttctggatactaagcagcctgcac

SEQ ID NO: 5316884 - DNA, 25 bp, Homo sapien
tcttctgcataggatggtttcacct

SEQ ID NO: 5316885 - DNA, 25 bp, Homo sapien
gattgtagccatcaaactaaccaag

SEQ ID NO: 5316886 - DNA, 25 bp, Homo sapien
ctgaactgcacaacccaataaaagt

SEQ ID NO: 5316887 - DNA, 25 bp, Homo sapien
aagcagttttttaacttcttctgtg

SEQ ID NO: 5316888 - DNA, 25 bp, Homo sapien
tgaactgcacaacccaataaaagta

SEQ ID NO: 5316889 - DNA, 25 bp, Homo sapien
cagttttttaacttcttctgtgcct

SEQ ID NO: 5316890 - DNA, 25 bp, Homo sapien
gccaatgattaagacatttggcaac

SEQ ID NO: 5316891 - DNA, 25 bp, Homo sapien
gggatttttgccaatgattaagaca

SEQ ID NO: 5316892 - DNA, 25 bp, Homo sapien
tttgccaatgattaagacatttggc

SEQ ID NO: 5316893 - DNA, 25 bp, Homo sapien
tttttgccaatgattaagacatttg

SEQ ID NO: 5316894 - DNA, 25 bp, Homo sapien
gtcacccacatgggagtacatcggt

SEQ ID NO: 5316895 - DNA, 25 bp, Homo sapien
tcacccacatgggagtacatcggtg

SEQ ID NO: 5316896 - DNA, 25 bp, Homo sapien
cacccacatgggagtacatcggtgc

SEQ ID NO: 5316897 - DNA, 25 bp, Homo sapien
taaattttagctccatgatgtacaa

SEQ ID NO: 5316898 - DNA, 25 bp, Homo sapien
tgaagtcaaaacacccaggcttaaa

SEQ ID NO: 5316899 - DNA, 25 bp, Homo sapien
gatgaaagcaatctcacacactctt

SEQ ID NO: 5316900 - DNA, 25 bp, Homo sapien
aatgtcttattggttaccctatggg

SEQ ID NO: 5316901 - DNA, 25 bp, Homo sapien
tcaccaaaatggatagattgtgcat

SEQ ID NO: 5316902 - DNA, 25 bp, Homo sapien
tgtctcaccaaaatggatagattgt

SEQ ID NO: 5316903 - DNA, 25 bp, Homo sapien
tctctgactctccaatttaggatta

SEQ ID NO: 5316904 - DNA, 25 bp, Homo sapien
taaacagcaccaccattaagggtta

SEQ ID NO: 5316905 - DNA, 25 bp, Homo sapien
gcaccaccattaagggttatccaag

SEQ ID NO: 5316906 - DNA, 25 bp, Homo sapien
ccattaagggttatccaagtatcca

SEQ ID NO: 5316907 - DNA, 25 bp, Homo sapien
ctgggtaaacagcaccaccattaag

SEQ ID NO: 5316908 - DNA, 25 bp, Homo sapien
ttgtttaatagattcaatggacagc

SEQ ID NO: 5316909 - DNA, 25 bp, Homo sapien
ttaatagattcaatggacagcactg

SEQ ID NO: 5316910 - DNA, 25 bp, Homo sapien
agattgtttaatagattcaatggac

SEQ ID NO: 5316911 - DNA, 25 bp, Homo sapien
aatagattcaatggacagcactgat

SEQ ID NO: 5316912 - DNA, 25 bp, Homo sapien
cacaatgtggcttggatttcagtac

SEQ ID NO: 5316913 - DNA, 25 bp, Homo sapien
tgtaggttccccaaaagagaagtca

SEQ ID NO: 5316914 - DNA, 25 bp, Homo sapien
taggttgtgataatgggctgagccc

SEQ ID NO: 5316915 - DNA, 25 bp, Homo sapien
tcatcaggctttagttattacaggc

SEQ ID NO: 5316916 - DNA, 25 bp, Homo sapien
atttggagcatgacctggttcaaga

SEQ ID NO: 5316917 - DNA, 25 bp, Homo sapien
caaggttggtcccatttcctgcggc

SEQ ID NO: 5316918 - DNA, 25 bp, Homo sapien
tcctgcggccagaggtccaaacgtt

SEQ ID NO: 5316919 - DNA, 25 bp, Homo sapien
tgacctggttcaagaataccccatc

SEQ ID NO: 5316920 - DNA, 25 bp, Homo sapien
ctagaacaaacagaaggatcaccac

SEQ ID NO: 5316921 - DNA, 25 bp, Homo sapien
gcagccacaaataactcagcaaaat

SEQ ID NO: 5316922 - DNA, 25 bp, Homo sapien
catctctgcagccacaaataactca

SEQ ID NO: 5316923 - DNA, 25 bp, Homo sapien
ctcagcaaaatatacaataaaggac

SEQ ID NO: 5316924 - DNA, 25 bp, Homo sapien
tatacaataaaggacaccccactta

SEQ ID NO: 5316925 - DNA, 25 bp, Homo sapien
gaactgctccagaaggggagtaaaa

SEQ ID NO: 5316926 - DNA, 25 bp, Homo sapien
ccaagtgaccaaagggctggtcatg

SEQ ID NO: 5316927 - DNA, 25 bp, Homo sapien
tggtcatgaactgctccagaagggg

SEQ ID NO: 5316928 - DNA, 25 bp, Homo sapien
catgaactgctccagaaggggagta

SEQ ID NO: 5316929 - DNA, 25 bp, Homo sapien
tttacagagtatgtatttgaaaaaa

SEQ ID NO: 5316930 - DNA, 25 bp, Homo sapien
cagagtatgtatttgaaaaaaggaa

SEQ ID NO: 5316931 - DNA, 25 bp, Homo sapien
acagagtatgtatttgaaaaaagga

SEQ ID NO: 5316932 - DNA, 25 bp, Homo sapien
tacagagtatgtatttgaaaaaagg

SEQ ID NO: 5316933 - DNA, 25 bp, Homo sapien
tcactaaacgtggaagtaagtagaa

SEQ ID NO: 5316934 - DNA, 25 bp, Homo sapien
gaattggtcactaaacgtggaagta

SEQ ID NO: 5316935 - DNA, 25 bp, Homo sapien
cctagggaattggtcactaaacgtg

SEQ ID NO: 5316936 - DNA, 25 bp, Homo sapien
tggtcactaaacgtggaagtaagta

SEQ ID NO: 5316937 - DNA, 25 bp, Homo sapien
gggagaaaaatcccatcgtggagga

SEQ ID NO: 5316938 - DNA, 25 bp, Homo sapien
tccatttcggcaagggagaaaaatc

SEQ ID NO: 5316939 - DNA, 25 bp, Homo sapien
gagaaaaatcccatcgtggaggagg

SEQ ID NO: 5316940 - DNA, 25 bp, Homo sapien
agaaaaatcccatcgtggaggaggg

SEQ ID NO: 5316941 - DNA, 25 bp, Homo sapien
tgcgctggaaatgtctgtaccgggc

SEQ ID NO: 5316942 - DNA, 25 bp, Homo sapien
cgagcagcagcctgcgctggaaatg

SEQ ID NO: 5316943 - DNA, 25 bp, Homo sapien
caagaagtggcttcgacgacggaca

SEQ ID NO: 5316944 - DNA, 25 bp, Homo sapien
aacgagccgaaatcccaagaagtgg

SEQ ID NO: 5316945 - DNA, 25 bp, Homo sapien
tgaaatacgttaaacagagaccacg

SEQ ID NO: 5316946 - DNA, 25 bp, Homo sapien
ctcccaatgaatcaatcccaacggg

SEQ ID NO: 5316947 - DNA, 25 bp, Homo sapien
caaaaagcccgtcaaggttgtccag

SEQ ID NO: 5316948 - DNA, 25 bp, Homo sapien
tggaggatccagaccagcgaaactg

SEQ ID NO: 5316949 - DNA, 25 bp, Homo sapien
ggaatccctggcacaaaatcaccgc

SEQ ID NO: 5316950 - DNA, 25 bp, Homo sapien
ctgccagcctttcagcgcgtctctg

SEQ ID NO: 5316951 - DNA, 25 bp, Homo sapien
tccgccctctatggagaagccggag

SEQ ID NO: 5316952 - DNA, 25 bp, Homo sapien
agtaacggcctcagaaccgcagtgc

SEQ ID NO: 5316953 - DNA, 25 bp, Homo sapien
tccctccgcgccgatatccttccgc

SEQ ID NO: 5316954 - DNA, 25 bp, Homo sapien
gccgtcaaagggagcgcgctgctcc

SEQ ID NO: 5316955 - DNA, 25 bp, Homo sapien
gcgccgatatccttccgccgactcc

SEQ ID NO: 5316956 - DNA, 25 bp, Homo sapien
gctgcctctggattgtgggagaaga

SEQ ID NO: 5316957 - DNA, 25 bp, Homo sapien
cagggtgtgactggcctatcacata

SEQ ID NO: 5316958 - DNA, 25 bp, Homo sapien
ggtgtgactggcctatcacatagtc

SEQ ID NO: 5316959 - DNA, 25 bp, Homo sapien
tgtgactggcctatcacatagtcag

SEQ ID NO: 5316960 - DNA, 25 bp, Homo sapien
actggcctatcacatagtcagtcat

SEQ ID NO: 5316961 - DNA, 25 bp, Homo sapien
tctaataatatgaataatcatgtct

SEQ ID NO: 5316962 - DNA, 25 bp, Homo sapien
ataatatgaataatcatgtcttgat

SEQ ID NO: 5316963 - DNA, 25 bp, Homo sapien
tatgaataatcatgtcttgatttat

SEQ ID NO: 5316964 - DNA, 25 bp, Homo sapien
ctctaataatatgaataatcatgtc

SEQ ID NO: 5316965 - DNA, 25 bp, Homo sapien
agctgcagtgtccaaggggcttggg

SEQ ID NO: 5316966 - DNA, 25 bp, Homo sapien
gaatgaactgtgtataagcaaaaac

SEQ ID NO: 5316967 - DNA, 25 bp, Homo sapien
ttggtttaattagctgcaaagaatg

SEQ ID NO: 5316968 - DNA, 25 bp, Homo sapien
ctttgtttcaaacttgattcccaag

SEQ ID NO: 5316969 - DNA, 25 bp, Homo sapien
tagcagctcccagtaactttaagtt

SEQ ID NO: 5316970 - DNA, 25 bp, Homo sapien
aatagcagctcccagtaactttaag

SEQ ID NO: 5316971 - DNA, 25 bp, Homo sapien
aaaatagcagctcccagtaacttta

SEQ ID NO: 5316972 - DNA, 25 bp, Homo sapien
agcagctcccagtaactttaagttt

SEQ ID NO: 5316973 - DNA, 25 bp, Homo sapien
catcatcctcgccagtagcaagtgg

SEQ ID NO: 5316974 - DNA, 25 bp, Homo sapien
tcttcaaatttctccacaagatctg

SEQ ID NO: 5316975 - DNA, 25 bp, Homo sapien
atcatcatcatcctcgccagtagca

SEQ ID NO: 5316976 - DNA, 25 bp, Homo sapien
gcctcttcaaatttctccacaagat

SEQ ID NO: 5316977 - DNA, 25 bp, Homo sapien
attagtcagactgcctgtaccaagc

SEQ ID NO: 5316978 - DNA, 25 bp, Homo sapien
tccttaaattagtcagactgcctgt

SEQ ID NO: 5316979 - DNA, 25 bp, Homo sapien
gattgttgggcagagcttcatccag

SEQ ID NO: 5316980 - DNA, 25 bp, Homo sapien
taaattagtcagactgcctgtacca

SEQ ID NO: 5316981 - DNA, 25 bp, Homo sapien
ctgtaacggtgaaagtgttcgctgc

SEQ ID NO: 5316982 - DNA, 25 bp, Homo sapien
gtaacggtgaaagtgttcgctgcca

SEQ ID NO: 5316983 - DNA, 25 bp, Homo sapien
tgaaagtgttcgctgccagagatgc

SEQ ID NO: 5316984 - DNA, 25 bp, Homo sapien
ggtgaaagtgttcgctgccagagat

SEQ ID NO: 5316985 - DNA, 25 bp, Homo sapien
ccttggtttgtaaacatattcacct

SEQ ID NO: 5316986 - DNA, 25 bp, Homo sapien
tccttggtttgtaaacatattcacc

SEQ ID NO: 5316987 - DNA, 25 bp, Homo sapien
tactgttccttggtttgtaaacata

SEQ ID NO: 5316988 - DNA, 25 bp, Homo sapien
tgttccttggtttgtaaacatattc

SEQ ID NO: 5316989 - DNA, 25 bp, Homo sapien
tcaataccagagatattgtttaccc

SEQ ID NO: 5316990 - DNA, 25 bp, Homo sapien
aataccagagatattgtttacccct

SEQ ID NO: 5316991 - DNA, 25 bp, Homo sapien
cttcaataccagagatattgtttac

SEQ ID NO: 5316992 - DNA, 25 bp, Homo sapien
taccagagatattgtttacccctaa

SEQ ID NO: 5316993 - DNA, 25 bp, Homo sapien
ttatcatctgctgcggctgctctat

SEQ ID NO: 5316994 - DNA, 25 bp, Homo sapien
gttttttatcatctgctgcggctgc

SEQ ID NO: 5316995 - DNA, 25 bp, Homo sapien
tctgctgcggctgctctatgaacca

SEQ ID NO: 5316996 - DNA, 25 bp, Homo sapien
ttttatcatctgctgcggctgctct

SEQ ID NO: 5316997 - DNA, 25 bp, Homo sapien
tgcctgcagtttgcgagtttttcct

SEQ ID NO: 5316998 - DNA, 25 bp, Homo sapien
ttgtgcctgcagtttgcgagttttt

SEQ ID NO: 5316999 - DNA, 25 bp, Homo sapien
cctgcagtttgcgagtttttcctgg

SEQ ID NO: 5317000 - DNA, 25 bp, Homo sapien
ctgcagtttgcgagtttttcctggt

SEQ ID NO: 5317001 - DNA, 25 bp, Homo sapien
actagggttggtgctcagggggtct

SEQ ID NO: 5317002 - DNA, 25 bp, Homo sapien
ccgggggactagggttggtgctcag

SEQ ID NO: 5317003 - DNA, 25 bp, Homo sapien
tgtcggagtggataaggggccaccc

SEQ ID NO: 5317004 - DNA, 25 bp, Homo sapien
cttgtcggagtggataaggggccac

SEQ ID NO: 5317005 - DNA, 25 bp, Homo sapien
cagatgtccacacgtggtctgatta

SEQ ID NO: 5317006 - DNA, 25 bp, Homo sapien
tcagatgtccacacgtggtctgatt

SEQ ID NO: 5317007 - DNA, 25 bp, Homo sapien
agatgtccacacgtggtctgattat

SEQ ID NO: 5317008 - DNA, 25 bp, Homo sapien
ctgtccacaagacagagatatattt

SEQ ID NO: 5317009 - DNA, 25 bp, Homo sapien
tttactgtccacaagacagagatat

SEQ ID NO: 5317010 - DNA, 25 bp, Homo sapien
aggggcctcattcacctggaaagtc

SEQ ID NO: 5317011 - DNA, 25 bp, Homo sapien
cagagatatatttatcaggggcctc

SEQ ID NO: 5317012 - DNA, 25 bp, Homo sapien
aaaatatacggaatgcttagcaaat

SEQ ID NO: 5317013 - DNA, 25 bp, Homo sapien
tgcttagcaaattttcatgacatcc

SEQ ID NO: 5317014 - DNA, 25 bp, Homo sapien
tctgcattgttcctatcttatttta

SEQ ID NO: 5317015 - DNA, 25 bp, Homo sapien
gcaaattttcatgacatccttgtgc

SEQ ID NO: 5317016 - DNA, 25 bp, Homo sapien
gagaatacaatggtgcactccccag

SEQ ID NO: 5317017 - DNA, 25 bp, Homo sapien
agaatacaatggtgcactccccagc

SEQ ID NO: 5317018 - DNA, 25 bp, Homo sapien
tctctgtcagaacgatcaatttgaa

SEQ ID NO: 5317019 - DNA, 25 bp, Homo sapien
tccccgatgttagctgtggcaggaa

SEQ ID NO: 5317020 - DNA, 25 bp, Homo sapien
ttattgccctgtctgaatttggcac

SEQ ID NO: 5317021 - DNA, 25 bp, Homo sapien
gactgaactccctttgcattgcctt

SEQ ID NO: 5317022 - DNA, 25 bp, Homo sapien
ccataggaaactgacctggtaatta

SEQ ID NO: 5317023 - DNA, 25 bp, Homo sapien
tactgacccagaaactccataggaa

SEQ ID NO: 5317024 - DNA, 25 bp, Homo sapien
ggaaactgacctggtaattattctc

SEQ ID NO: 5317025 - DNA, 25 bp, Homo sapien
actgacctggtaattattctcttgg

SEQ ID NO: 5317026 - DNA, 25 bp, Homo sapien
ttgaccaacagtcaatcatgggtcc

SEQ ID NO: 5317027 - DNA, 25 bp, Homo sapien
gggttgaccaacagtcaatcatggg

SEQ ID NO: 5317028 - DNA, 25 bp, Homo sapien
ctagggttgaccaacagtcaatcat

SEQ ID NO: 5317029 - DNA, 25 bp, Homo sapien
accaacagtcaatcatgggtccagg

SEQ ID NO: 5317030 - DNA, 25 bp, Homo sapien
cttgctaattgtctctgcattgttt

SEQ ID NO: 5317031 - DNA, 25 bp, Homo sapien
taattgtctctgcattgtttctatt

SEQ ID NO: 5317032 - DNA, 25 bp, Homo sapien
gctaattgtctctgcattgtttcta

SEQ ID NO: 5317033 - DNA, 25 bp, Homo sapien
tgctaattgtctctgcattgtttct

SEQ ID NO: 5317034 - DNA, 25 bp, Homo sapien
cagatttagaccgaacctcaacttc

SEQ ID NO: 5317035 - DNA, 25 bp, Homo sapien
caacccagatttagaccgaacctca

SEQ ID NO: 5317036 - DNA, 25 bp, Homo sapien
aggccagcaacccagatttagaccg

SEQ ID NO: 5317037 - DNA, 25 bp, Homo sapien
cagcaacccagatttagaccgaacc

SEQ ID NO: 5317038 - DNA, 25 bp, Homo sapien
tgctggcatataacgcttgggttga

SEQ ID NO: 5317039 - DNA, 25 bp, Homo sapien
tataacgcttgggttgagaaatgat

SEQ ID NO: 5317040 - DNA, 25 bp, Homo sapien
cagatctttcagttgggttgttttt

SEQ ID NO: 5317041 - DNA, 25 bp, Homo sapien
ggcatataacgcttgggttgagaaa

SEQ ID NO: 5317042 - DNA, 25 bp, Homo sapien
tggttggcagggaataacacagttg

SEQ ID NO: 5317043 - DNA, 25 bp, Homo sapien
tctcagtggatagtgttttgccaca

SEQ ID NO: 5317044 - DNA, 25 bp, Homo sapien
tctgctgtatctcagtggatagtgt

SEQ ID NO: 5317045 - DNA, 25 bp, Homo sapien
ttttaattatggttggcagggaata

SEQ ID NO: 5317046 - DNA, 25 bp, Homo sapien
ttgtcccttcctcctagcttagcag

SEQ ID NO: 5317047 - DNA, 25 bp, Homo sapien
ccttcctcctagcttagcagggctt

SEQ ID NO: 5317048 - DNA, 25 bp, Homo sapien
gtcccttcctcctagcttagcaggg

SEQ ID NO: 5317049 - DNA, 25 bp, Homo sapien
acaagtgagcttggattcaaacttg

SEQ ID NO: 5317050 - DNA, 25 bp, Homo sapien
catcatcctgtctggcagtgtgttc

SEQ ID NO: 5317051 - DNA, 25 bp, Homo sapien
catcctgtctggcagtgtgttcaca

SEQ ID NO: 5317052 - DNA, 25 bp, Homo sapien
gtttgcatcatcctgtctggcagtg

SEQ ID NO: 5317053 - DNA, 25 bp, Homo sapien
tgcatcatcctgtctggcagtgtgt

SEQ ID NO: 5317054 - DNA, 25 bp, Homo sapien
gatgcttttgcatcttggttctctg

SEQ ID NO: 5317055 - DNA, 25 bp, Homo sapien
agagatgcttttgcatcttggttct

SEQ ID NO: 5317056 - DNA, 25 bp, Homo sapien
ccagagatgcttttgcatcttggtt

SEQ ID NO: 5317057 - DNA, 25 bp, Homo sapien
tgcttttgcatcttggttctctgtc

SEQ ID NO: 5317058 - DNA, 25 bp, Homo sapien
agtgatctcccctgatcctggtgag

SEQ ID NO: 5317059 - DNA, 25 bp, Homo sapien
gatggtggtgctgtctttggttccc

SEQ ID NO: 5317060 - DNA, 25 bp, Homo sapien
cagtatgtatgtatccgggaggcct

SEQ ID NO: 5317061 - DNA, 25 bp, Homo sapien
gctgtcggtgaaagaatgtgatcca

SEQ ID NO: 5317062 - DNA, 25 bp, Homo sapien
acaatgtgtcaatgattgttagtgg

SEQ ID NO: 5317063 - DNA, 25 bp, Homo sapien
gaggagaataaaatcctagtatcta

SEQ ID NO: 5317064 - DNA, 25 bp, Homo sapien
gtgtcaatgattgttagtggttttc

SEQ ID NO: 5317065 - DNA, 25 bp, Homo sapien
gtcttttagagtacctgtagactcc

SEQ ID NO: 5317066 - DNA, 25 bp, Homo sapien
tctggtgatctaaatcagcacctac

SEQ ID NO: 5317067 - DNA, 25 bp, Homo sapien
ggtgatctaaatcagcacctacgtt

SEQ ID NO: 5317068 - DNA, 25 bp, Homo sapien
gatctaaatcagcacctacgttttc

SEQ ID NO: 5317069 - DNA, 25 bp, Homo sapien
cctctggtgatctaaatcagcacct

SEQ ID NO: 5317070 - DNA, 25 bp, Homo sapien
gctgaagtgatagtccacagtgcct

SEQ ID NO: 5317071 - DNA, 25 bp, Homo sapien
ttatgatcacacaatgggaaactag

SEQ ID NO: 5317072 - DNA, 25 bp, Homo sapien
ccttgttgcttaggtgtctagtaca

SEQ ID NO: 5317073 - DNA, 25 bp, Homo sapien
aatgtgtggaatttgtgttaccctc

SEQ ID NO: 5317074 - DNA, 25 bp, Homo sapien
ctcatgctgtcccttaacctggaat

SEQ ID NO: 5317075 - DNA, 25 bp, Homo sapien
gcatctgtacacctacctttgctca

SEQ ID NO: 5317076 - DNA, 25 bp, Homo sapien
ctgccccttgctcttataagcatct

SEQ ID NO: 5317077 - DNA, 25 bp, Homo sapien
taacctggaatgtatggtcccctcc

SEQ ID NO: 5317078 - DNA, 25 bp, Homo sapien
cctcccaacgtggccggaagcagtg

SEQ ID NO: 5317079 - DNA, 25 bp, Homo sapien
tctggggtaccgataatttgcattt

SEQ ID NO: 5317080 - DNA, 25 bp, Homo sapien
tagcaagcattggaaatggttggag

SEQ ID NO: 5317081 - DNA, 25 bp, Homo sapien
atggttggagggcttgctgaagcac

SEQ ID NO: 5317082 - DNA, 25 bp, Homo sapien
tcttaagggcctggaacatgcaaca

SEQ ID NO: 5317083 - DNA, 25 bp, Homo sapien
cagttgtatcgttggctcttaaggg

SEQ ID NO: 5317084 - DNA, 25 bp, Homo sapien
gctaatagcgctgttgtctgtgggt

SEQ ID NO: 5317085 - DNA, 25 bp, Homo sapien
tgagtagagactcttagagccagcc

SEQ ID NO: 5317086 - DNA, 25 bp, Homo sapien
actgatctaatcaaggaccccgaca

SEQ ID NO: 5317087 - DNA, 25 bp, Homo sapien
agggccctgcctctaagtagttagc

SEQ ID NO: 5317088 - DNA, 25 bp, Homo sapien
ccttaggctgtcagtaacagaacac

SEQ ID NO: 5317089 - DNA, 25 bp, Homo sapien
gaataatgactattgtcaggccaca

SEQ ID NO: 5317090 - DNA, 25 bp, Homo sapien
tttcatttttaggggtgctgtgcta

SEQ ID NO: 5317091 - DNA, 25 bp, Homo sapien
catttttaggggtgctgtgctaatg

SEQ ID NO: 5317092 - DNA, 25 bp, Homo sapien
tttttaggggtgctgtgctaatgta

SEQ ID NO: 5317093 - DNA, 25 bp, Homo sapien
tatttcatttttaggggtgctgtgc

SEQ ID NO: 5317094 - DNA, 25 bp, Homo sapien
gtgaagctatagaaaacttgatctc

SEQ ID NO: 5317095 - DNA, 25 bp, Homo sapien
tcctgctttaggtttgtctgtgctc

SEQ ID NO: 5317096 - DNA, 25 bp, Homo sapien
tctgtgctctagtttgctgacccaa

SEQ ID NO: 5317097 - DNA, 25 bp, Homo sapien
cccagtatgaagacctgagtttgga

SEQ ID NO: 5317098 - DNA, 25 bp, Homo sapien
aacagatacaaaatatggagcagaa

SEQ ID NO: 5317099 - DNA, 25 bp, Homo sapien
taaacagatacaaaatatggagcag

SEQ ID NO: 5317100 - DNA, 25 bp, Homo sapien
actaaacagatacaaaatatggagc

SEQ ID NO: 5317101 - DNA, 25 bp, Homo sapien
ggactaaacagatacaaaatatgga

SEQ ID NO: 5317102 - DNA, 25 bp, Homo sapien
ggagattgcttgcagagaaactcaa

SEQ ID NO: 5317103 - DNA, 25 bp, Homo sapien
aagcaaacattactaaagaggagat

SEQ ID NO: 5317104 - DNA, 25 bp, Homo sapien
cattactaaagaggagattgcttgc

SEQ ID NO: 5317105 - DNA, 25 bp, Homo sapien
ctaaagaggagattgcttgcagaga

SEQ ID NO: 5317106 - DNA, 25 bp, Homo sapien
taaattttgtaataccagcagtgtc

SEQ ID NO: 5317107 - DNA, 25 bp, Homo sapien
tgtgatgctatgatttccccaaggc

SEQ ID NO: 5317108 - DNA, 25 bp, Homo sapien
taagcacttgtaccatgaaaaccgt

SEQ ID NO: 5317109 - DNA, 25 bp, Homo sapien
tactaaaagctgagagatgggtctc

SEQ ID NO: 5317110 - DNA, 25 bp, Homo sapien
ccaggtggcggatgttgcaataagc

SEQ ID NO: 5317111 - DNA, 25 bp, Homo sapien
taagaccacatgttgagggtcccct

SEQ ID NO: 5317112 - DNA, 25 bp, Homo sapien
tactggtaggcggttgacaacattc

SEQ ID NO: 5317113 - DNA, 25 bp, Homo sapien
tactagcaagcaatcaagttcctgg

SEQ ID NO: 5317114 - DNA, 25 bp, Homo sapien
catgtgctgcatgctgactttgaca

SEQ ID NO: 5317115 - DNA, 25 bp, Homo sapien
ttatgagccaagacgaggtcttttc

SEQ ID NO: 5317116 - DNA, 25 bp, Homo sapien
gataatccactaagccaaccaaact

SEQ ID NO: 5317117 - DNA, 25 bp, Homo sapien
tcatctggataatccactaagccaa

SEQ ID NO: 5317118 - DNA, 25 bp, Homo sapien
agccaagacgaggtcttttcctggg

SEQ ID NO: 5317119 - DNA, 25 bp, Homo sapien
aaaaaagctttcgatgtcagtacat

SEQ ID NO: 5317120 - DNA, 25 bp, Homo sapien
tgtgaagctgattccatacttttaa

SEQ ID NO: 5317121 - DNA, 25 bp, Homo sapien
gtttctgcccaagattaataaattg

SEQ ID NO: 5317122 - DNA, 25 bp, Homo sapien
tctagagatgcactttgtgaagctg

SEQ ID NO: 5317123 - DNA, 25 bp, Homo sapien
tattttagtatccacaaatggcttc

SEQ ID NO: 5317124 - DNA, 25 bp, Homo sapien
caagtggtcacatattgcagcaatg

SEQ ID NO: 5317125 - DNA, 25 bp, Homo sapien
tttaatgcccatcacattgataggg

SEQ ID NO: 5317126 - DNA, 25 bp, Homo sapien
aatgtcctgatatgaagagctcacc

SEQ ID NO: 5317127 - DNA, 25 bp, Homo sapien
gaagaggatccattagaagttgctg

SEQ ID NO: 5317128 - DNA, 25 bp, Homo sapien
cattagcagcactggcagagtggga

SEQ ID NO: 5317129 - DNA, 25 bp, Homo sapien
cttggtggctgttactgacgtaggc

SEQ ID NO: 5317130 - DNA, 25 bp, Homo sapien
aaagtaaatttgaagccaccaggag

SEQ ID NO: 5317131 - DNA, 25 bp, Homo sapien
tggaaaatcatcttctggcttaggt

SEQ ID NO: 5317132 - DNA, 25 bp, Homo sapien
ggcttttgcatctctgcgaaatctg

SEQ ID NO: 5317133 - DNA, 25 bp, Homo sapien
gaaaatcatcttctggcttaggttt

SEQ ID NO: 5317134 - DNA, 25 bp, Homo sapien
ttttgcatctctgcgaaatctgtta

SEQ ID NO: 5317135 - DNA, 25 bp, Homo sapien
caactatatgggcagtaagagactt

SEQ ID NO: 5317136 - DNA, 25 bp, Homo sapien
gggcagtaagagacttgatatcttc

SEQ ID NO: 5317137 - DNA, 25 bp, Homo sapien
tataaaagttttcaactatatgggc

SEQ ID NO: 5317138 - DNA, 25 bp, Homo sapien
ttttcttgctcatatttagtcttca

SEQ ID NO: 5317139 - DNA, 25 bp, Homo sapien
atagattctaagacacatggaatat

SEQ ID NO: 5317140 - DNA, 25 bp, Homo sapien
tagattctaagacacatggaatata

SEQ ID NO: 5317141 - DNA, 25 bp, Homo sapien
tctgtttattagaatagattctaag

SEQ ID NO: 5317142 - DNA, 25 bp, Homo sapien
cactttgcttacatgtaattctttt

SEQ ID NO: 5317143 - DNA, 25 bp, Homo sapien
tatccgcctcataaagcgaagggca

SEQ ID NO: 5317144 - DNA, 25 bp, Homo sapien
tccattatccagaagtgcatttata

SEQ ID NO: 5317145 - DNA, 25 bp, Homo sapien
ccttggtgatgtaacgattataaaa

SEQ ID NO: 5317146 - DNA, 25 bp, Homo sapien
tcaaacaactcaataacagctgaat

SEQ ID NO: 5317147 - DNA, 25 bp, Homo sapien
gatgccagatgccaatcacataaag

SEQ ID NO: 5317148 - DNA, 25 bp, Homo sapien
tcacataaaggagatctaaaggttt

SEQ ID NO: 5317149 - DNA, 25 bp, Homo sapien
cactaaagaggctcctgatgccaga

SEQ ID NO: 5317150 - DNA, 25 bp, Homo sapien
tatttccactcacactattctactt

SEQ ID NO: 5317151 - DNA, 25 bp, Homo sapien
ttgcttacaagctattttacctggc

SEQ ID NO: 5317152 - DNA, 25 bp, Homo sapien
tttgtgaaccaatcctatctccgta

SEQ ID NO: 5317153 - DNA, 25 bp, Homo sapien
gcactgtggcagatcagaatgtatt

SEQ ID NO: 5317154 - DNA, 25 bp, Homo sapien
tacctggctaaatatgcactgtggc

SEQ ID NO: 5317155 - DNA, 25 bp, Homo sapien
aaattaaggcaagtagctgtgctgt

SEQ ID NO: 5317156 - DNA, 25 bp, Homo sapien
cacacaaaatgtgagtaactctaaa

SEQ ID NO: 5317157 - DNA, 25 bp, Homo sapien
caaggccagaaaagtgtgctttgaa

SEQ ID NO: 5317158 - DNA, 25 bp, Homo sapien
agaccaagactcttcttagcaagtc

SEQ ID NO: 5317159 - DNA, 25 bp, Homo sapien
cagttttacctactagataactaag

SEQ ID NO: 5317160 - DNA, 25 bp, Homo sapien
tcatatccatttaaaaggctgtaga

SEQ ID NO: 5317161 - DNA, 25 bp, Homo sapien
aacatgataataataccttgatggc

SEQ ID NO: 5317162 - DNA, 25 bp, Homo sapien
taggcagactctccagaagcatatt

SEQ ID NO: 5317163 - DNA, 25 bp, Homo sapien
tgtctttattagtatcaagcccata

SEQ ID NO: 5317164 - DNA, 25 bp, Homo sapien
catacctactatgcctattctaagt

SEQ ID NO: 5317165 - DNA, 25 bp, Homo sapien
aatgccttctcataacaacatcaga

SEQ ID NO: 5317166 - DNA, 25 bp, Homo sapien
tcatgaacaataaccataaagtggt

SEQ ID NO: 5317167 - DNA, 25 bp, Homo sapien
tgtttttgtttgatccaactatatt

SEQ ID NO: 5317168 - DNA, 25 bp, Homo sapien
gtttttgtttgatccaactatatta

SEQ ID NO: 5317169 - DNA, 25 bp, Homo sapien
gttgtttttgtttgatccaactata

SEQ ID NO: 5317170 - DNA, 25 bp, Homo sapien
gtgttgtttttgtttgatccaacta

SEQ ID NO: 5317171 - DNA, 25 bp, Homo sapien
cataaagacttggttgcttcagcaa

SEQ ID NO: 5317172 - DNA, 25 bp, Homo sapien
taaagacttggttgcttcagcaaaa

SEQ ID NO: 5317173 - DNA, 25 bp, Homo sapien
taaccataaagacttggttgcttca

SEQ ID NO: 5317174 - DNA, 25 bp, Homo sapien
caaaataaccataaagacttggttg

SEQ ID NO: 5317175 - DNA, 25 bp, Homo sapien
ggtacatatgaaactccaactatat

SEQ ID NO: 5317176 - DNA, 25 bp, Homo sapien
aatgggaatgtgaaggggtacatat

SEQ ID NO: 5317177 - DNA, 25 bp, Homo sapien
ggaatgtgaaggggtacatatgaaa

SEQ ID NO: 5317178 - DNA, 25 bp, Homo sapien
ggaatgggaatgtgaaggggtacat

SEQ ID NO: 5317179 - DNA, 25 bp, Homo sapien
tgcaagaaaaccctctgcgatgtgc

SEQ ID NO: 5317180 - DNA, 25 bp, Homo sapien
caagtattctcagatagtggctaat

SEQ ID NO: 5317181 - DNA, 25 bp, Homo sapien
gatagtattacatagggtgtgctca

SEQ ID NO: 5317182 - DNA, 25 bp, Homo sapien
taagtgactcttcaggttaacaagt

SEQ ID NO: 5317183 - DNA, 25 bp, Homo sapien
atagaaatggcccccgaaagaatag

SEQ ID NO: 5317184 - DNA, 25 bp, Homo sapien
ctgaagtattggtcaaaagtggtgc

SEQ ID NO: 5317185 - DNA, 25 bp, Homo sapien
acatgcatacaatggttgtagaaaa

SEQ ID NO: 5317186 - DNA, 25 bp, Homo sapien
ttggtcaaaagtggtgctgtgagaa

SEQ ID NO: 5317187 - DNA, 25 bp, Homo sapien
tattggtcaaaagtggtgctgtgag

SEQ ID NO: 5317188 - DNA, 25 bp, Homo sapien
aaacatttttatctcagagtaattt

SEQ ID NO: 5317189 - DNA, 25 bp, Homo sapien
tttttatctcagagtaatttcttac

SEQ ID NO: 5317190 - DNA, 25 bp, Homo sapien
taggccaaaacatttttatctcaga

SEQ ID NO: 5317191 - DNA, 25 bp, Homo sapien
acatttttatctcagagtaatttct

SEQ ID NO: 5317192 - DNA, 25 bp, Homo sapien
gaagtcccattaactgaacagcgcc

SEQ ID NO: 5317193 - DNA, 25 bp, Homo sapien
caattagagtacgaagaagtcccat

SEQ ID NO: 5317194 - DNA, 25 bp, Homo sapien
gttcaattaccacattaataagaag

SEQ ID NO: 5317195 - DNA, 25 bp, Homo sapien
ttgtagccagcatgttctctggatc

SEQ ID NO: 5317196 - DNA, 25 bp, Homo sapien
gatctgacttgcaaatcatccatgc

SEQ ID NO: 5317197 - DNA, 25 bp, Homo sapien
caaactctcggaccatagatggact

SEQ ID NO: 5317198 - DNA, 25 bp, Homo sapien
gatggactaaattctactagataag

SEQ ID NO: 5317199 - DNA, 25 bp, Homo sapien
tgctgagcttcttgcattacaaact

SEQ ID NO: 5317200 - DNA, 25 bp, Homo sapien
aggttgtaatgtctgagaaaatgca

SEQ ID NO: 5317201 - DNA, 25 bp, Homo sapien
gaggttgtaatgtctgagaaaatgc

SEQ ID NO: 5317202 - DNA, 25 bp, Homo sapien
ggttgtaatgtctgagaaaatgcac

SEQ ID NO: 5317203 - DNA, 25 bp, Homo sapien
gttgtaatgtctgagaaaatgcaca

SEQ ID NO: 5317204 - DNA, 25 bp, Homo sapien
tagcctcatctgttaattgtgcaaa

SEQ ID NO: 5317205 - DNA, 25 bp, Homo sapien
ttatcatcatctgtagcctcatctg

SEQ ID NO: 5317206 - DNA, 25 bp, Homo sapien
aattcacgccgtttatcatcatctg

SEQ ID NO: 5317207 - DNA, 25 bp, Homo sapien
tctgtagcctcatctgttaattgtg

SEQ ID NO: 5317208 - DNA, 25 bp, Homo sapien
aaaggaggctgaattccgacagtag

SEQ ID NO: 5317209 - DNA, 25 bp, Homo sapien
tagaggtgttacgtgaaaactcact

SEQ ID NO: 5317210 - DNA, 25 bp, Homo sapien
tcatcatgaaacctaatattctggg

SEQ ID NO: 5317211 - DNA, 25 bp, Homo sapien
caagcctaaggatcttattgtcagt

SEQ ID NO: 5317212 - DNA, 25 bp, Homo sapien
cagtccattaagagaatatgtattc

SEQ ID NO: 5317213 - DNA, 25 bp, Homo sapien
tatatgattcggtacttgtgagctg

SEQ ID NO: 5317214 - DNA, 25 bp, Homo sapien
taaaatattacagatagaggcaatc

SEQ ID NO: 5317215 - DNA, 25 bp, Homo sapien
tcctgcatctgttgtagattacatc

SEQ ID NO: 5317216 - DNA, 25 bp, Homo sapien
tacttaatctgtaactgggatggga

SEQ ID NO: 5317217 - DNA, 25 bp, Homo sapien
gaactaaaccgctaatcctgctggg

SEQ ID NO: 5317218 - DNA, 25 bp, Homo sapien
tgaaaagccctattactctaaacag

SEQ ID NO: 5317219 - DNA, 25 bp, Homo sapien
tctttccgtgccaaaaccttagcat

SEQ ID NO: 5317220 - DNA, 25 bp, Homo sapien
gagaaacagctatatgatccaaaat

SEQ ID NO: 5317221 - DNA, 25 bp, Homo sapien
tgcagaaagctgagtataggctact

SEQ ID NO: 5317222 - DNA, 25 bp, Homo sapien
caatacctggcttaacaaatgacaa

SEQ ID NO: 5317223 - DNA, 25 bp, Homo sapien
acactctgagatccacaatactaag

SEQ ID NO: 5317224 - DNA, 25 bp, Homo sapien
ctattaagggaactaaatatctgaa

SEQ ID NO: 5317225 - DNA, 25 bp, Homo sapien
aatggaatcgtgaagagtatctttt

SEQ ID NO: 5317226 - DNA, 25 bp, Homo sapien
ctgcttgaactattaagggaactaa

SEQ ID NO: 5317227 - DNA, 25 bp, Homo sapien
tctgaaaaatggaatcgtgaagagt

SEQ ID NO: 5317228 - DNA, 25 bp, Homo sapien
ttcattttccaaggcgagagccagc

SEQ ID NO: 5317229 - DNA, 25 bp, Homo sapien
ccagcttttccctacggataggtga

SEQ ID NO: 5317230 - DNA, 25 bp, Homo sapien
taggttctcgcaagcttggaacagc

SEQ ID NO: 5317231 - DNA, 25 bp, Homo sapien
tgatgtcctgaatgtactgtaccct

SEQ ID NO: 5317232 - DNA, 25 bp, Homo sapien
ggcatttcttcaaatcgttcttctt

SEQ ID NO: 5317233 - DNA, 25 bp, Homo sapien
cctgtgtgacttccactgatgggtc

SEQ ID NO: 5317234 - DNA, 25 bp, Homo sapien
caatcagatgactagtttcaggcat

SEQ ID NO: 5317235 - DNA, 25 bp, Homo sapien
tcacatgtgggcaggtcaatcagat

SEQ ID NO: 5317236 - DNA, 25 bp, Homo sapien
aatacacttatatccaagaacatgt

SEQ ID NO: 5317237 - DNA, 25 bp, Homo sapien
catgtattaaaaagtaggtgttgac

SEQ ID NO: 5317238 - DNA, 25 bp, Homo sapien
tagtaggatgggacaaggtataatc

SEQ ID NO: 5317239 - DNA, 25 bp, Homo sapien
gtgagtaaccgcgtccggatggaca

SEQ ID NO: 5317240 - DNA, 25 bp, Homo sapien
caatatcctagttctaaataagagg

SEQ ID NO: 5317241 - DNA, 25 bp, Homo sapien
taaacattaggcaaacatatgacca

SEQ ID NO: 5317242 - DNA, 25 bp, Homo sapien
gcctggtacagtatgcataaacatt

SEQ ID NO: 5317243 - DNA, 25 bp, Homo sapien
aatactgttgagcattagtgcctgg

SEQ ID NO: 5317244 - DNA, 25 bp, Homo sapien
ctcctgaaaactcagagccaaatca

SEQ ID NO: 5317245 - DNA, 25 bp, Homo sapien
aaaccctttatccagccatccaatg

SEQ ID NO: 5317246 - DNA, 25 bp, Homo sapien
atgaaatccaaaaccctttatccag

SEQ ID NO: 5317247 - DNA, 25 bp, Homo sapien
caaaaccctttatccagccatccaa

SEQ ID NO: 5317248 - DNA, 25 bp, Homo sapien
aatccaaaaccctttatccagccat

SEQ ID NO: 5317249 - DNA, 25 bp, Homo sapien
tttggctacaatcaatgtttggtcc

SEQ ID NO: 5317250 - DNA, 25 bp, Homo sapien
aaatctgaattaaggtaactgagca

SEQ ID NO: 5317251 - DNA, 25 bp, Homo sapien
caatcaatgtttggtccaggtaaac

SEQ ID NO: 5317252 - DNA, 25 bp, Homo sapien
tctgaattaaggtaactgagcacct

SEQ ID NO: 5317253 - DNA, 25 bp, Homo sapien
tggcctctagcaagggaaactgtac

SEQ ID NO: 5317254 - DNA, 25 bp, Homo sapien
gaaactggtgatgtcagtggcctct

SEQ ID NO: 5317255 - DNA, 25 bp, Homo sapien
gaaactgtacggacagaatctggcg

SEQ ID NO: 5317256 - DNA, 25 bp, Homo sapien
tacagtatgctaccagttataccaa

SEQ ID NO: 5317257 - DNA, 25 bp, Homo sapien
taacagctcactgaagcactgacct

SEQ ID NO: 5317258 - DNA, 25 bp, Homo sapien
tattttttgcagtgagagtctcagt

SEQ ID NO: 5317259 - DNA, 25 bp, Homo sapien
tttttgcagtgagagtctcagtatg

SEQ ID NO: 5317260 - DNA, 25 bp, Homo sapien
attttttgcagtgagagtctcagta

SEQ ID NO: 5317261 - DNA, 25 bp, Homo sapien
tcttccattaacgacttcagtacta

SEQ ID NO: 5317262 - DNA, 25 bp, Homo sapien
tttaggctcacaatttggtacttca

SEQ ID NO: 5317263 - DNA, 25 bp, Homo sapien
gcacacaatttagtagttggctcat

SEQ ID NO: 5317264 - DNA, 25 bp, Homo sapien
tcagtactatgcacagtaaggaaga

SEQ ID NO: 5317265 - DNA, 25 bp, Homo sapien
gcttactacagtctcgacctccgaa

SEQ ID NO: 5317266 - DNA, 25 bp, Homo sapien
tttaacccattactgcagtcccagc

SEQ ID NO: 5317267 - DNA, 25 bp, Homo sapien
taaaggtgcaaatttagcctggaca

SEQ ID NO: 5317268 - DNA, 25 bp, Homo sapien
tgtgcaggctgttcccgaaatcctc

SEQ ID NO: 5317269 - DNA, 25 bp, Homo sapien
tgtctaaggtataggaaacatcttc

SEQ ID NO: 5317270 - DNA, 25 bp, Homo sapien
taaaaactcggtataaagacagaga

SEQ ID NO: 5317271 - DNA, 25 bp, Homo sapien
cctggctgactgagaaattaaattt

SEQ ID NO: 5317272 - DNA, 25 bp, Homo sapien
tctagtagagcaacattatacatga

SEQ ID NO: 5317273 - DNA, 25 bp, Homo sapien
ttgttctaacagtaagactttgtaa

SEQ ID NO: 5317274 - DNA, 25 bp, Homo sapien
aattgttctaacagtaagactttgt

SEQ ID NO: 5317275 - DNA, 25 bp, Homo sapien
tgttctaacagtaagactttgtaat

SEQ ID NO: 5317276 - DNA, 25 bp, Homo sapien
attgttctaacagtaagactttgta

SEQ ID NO: 5317277 - DNA, 25 bp, Homo sapien
caacgggatggatacaaacaagctt

SEQ ID NO: 5317278 - DNA, 25 bp, Homo sapien
gcactgacgctgtaaatgtaatcct

SEQ ID NO: 5317279 - DNA, 25 bp, Homo sapien
tcttagaataaaccgacagtggctc

SEQ ID NO: 5317280 - DNA, 25 bp, Homo sapien
taaaccttgaagtgggcactgacgc

SEQ ID NO: 5317281 - DNA, 25 bp, Homo sapien
cctttgtcagattaatacttccttg

SEQ ID NO: 5317282 - DNA, 25 bp, Homo sapien
ttcccacctttgtcagattaatact

SEQ ID NO: 5317283 - DNA, 25 bp, Homo sapien
taatacttccttgatcacagatgaa

SEQ ID NO: 5317284 - DNA, 25 bp, Homo sapien
gatcacagatgaagtctttcaaatt

SEQ ID NO: 5317285 - DNA, 25 bp, Homo sapien
gcagtatttggatttatctttgatt

SEQ ID NO: 5317286 - DNA, 25 bp, Homo sapien
cagtatttggatttatctttgattc

SEQ ID NO: 5317287 - DNA, 25 bp, Homo sapien
tatgcagtatttggatttatctttg

SEQ ID NO: 5317288 - DNA, 25 bp, Homo sapien
agtatttggatttatctttgattcc

SEQ ID NO: 5317289 - DNA, 25 bp, Homo sapien
tacagccaggaaaacgtgcctttcg

SEQ ID NO: 5317290 - DNA, 25 bp, Homo sapien
tccatgtatcgtggcaacagtcagc

SEQ ID NO: 5317291 - DNA, 25 bp, Homo sapien
tcggtctccgaggataagtccagtc

SEQ ID NO: 5317292 - DNA, 25 bp, Homo sapien
caaaggcagcccgaagaaatgcaga

SEQ ID NO: 5317293 - DNA, 25 bp, Homo sapien
agggtatagaccttcactcgccgcc

SEQ ID NO: 5317294 - DNA, 25 bp, Homo sapien
tcggtcgtcccattgccggtcttcg

SEQ ID NO: 5317295 - DNA, 25 bp, Homo sapien
tccacgtaagtggaggagacgtgcc

SEQ ID NO: 5317296 - DNA, 25 bp, Homo sapien
tcttcgttcagggtatagaccttca

SEQ ID NO: 5317297 - DNA, 25 bp, Homo sapien
cctcctcgcttacctcgtccgcgct

SEQ ID NO: 5317298 - DNA, 25 bp, Homo sapien
cctcgcttacctcgtccgcgctcct

SEQ ID NO: 5317299 - DNA, 25 bp, Homo sapien
ctcctcgcttacctcgtccgcgctc

SEQ ID NO: 5317300 - DNA, 25 bp, Homo sapien
ccgcctcctcgcttacctcgtccgc

SEQ ID NO: 5317301 - DNA, 25 bp, Homo sapien
ggagccccgttacctctcacttcac

SEQ ID NO: 5317302 - DNA, 25 bp, Homo sapien
cttaggagacggtaaaggcagtagt

SEQ ID NO: 5317303 - DNA, 25 bp, Homo sapien
gctccaaaggttcagccgcgagaag

SEQ ID NO: 5317304 - DNA, 25 bp, Homo sapien
gaggcccgaattcaccatggctcca

SEQ ID NO: 5317305 - DNA, 25 bp, Homo sapien
gagtacttcggcgagacttcctcct

SEQ ID NO: 5317306 - DNA, 25 bp, Homo sapien
gggacttcggttccgcacgtcgtca

SEQ ID NO: 5317307 - DNA, 25 bp, Homo sapien
tcgtcatgttgttggatggcaccag

SEQ ID NO: 5317308 - DNA, 25 bp, Homo sapien
gccgccgcggtaactactacagatc

SEQ ID NO: 5317309 - DNA, 25 bp, Homo sapien
tggatatagtcacgcgctgggtcgt

SEQ ID NO: 5317310 - DNA, 25 bp, Homo sapien
tctgtgaaaaagaacgtggagccct

SEQ ID NO: 5317311 - DNA, 25 bp, Homo sapien
gatacttctcagtttctcgcgggca

SEQ ID NO: 5317312 - DNA, 25 bp, Homo sapien
tgtttcttgcagagcgcttcaccgt

SEQ ID NO: 5317313 - DNA, 25 bp, Homo sapien
caatgggactgatagagctgttaac

SEQ ID NO: 5317314 - DNA, 25 bp, Homo sapien
cataaaagctgtggactcagccgca

SEQ ID NO: 5317315 - DNA, 25 bp, Homo sapien
cacctgactttgagtgagggaccac

SEQ ID NO: 5317316 - DNA, 25 bp, Homo sapien
acacaacgcgatgggaagcagcagt

SEQ ID NO: 5317317 - DNA, 25 bp, Homo sapien
tgaactagttaaccctgagtcatga

SEQ ID NO: 5317318 - DNA, 25 bp, Homo sapien
ttccagtttgtgaaccgttgtaggc

SEQ ID NO: 5317319 - DNA, 25 bp, Homo sapien
cacactacagtgtcgaacttctggg

SEQ ID NO: 5317320 - DNA, 25 bp, Homo sapien
cacaggtatgattgttgcacactac

SEQ ID NO: 5317321 - DNA, 25 bp, Homo sapien
gcgactgaagcacttttcgagaaag

SEQ ID NO: 5317322 - DNA, 25 bp, Homo sapien
ctggcgactgaagcacttttcgaga

SEQ ID NO: 5317323 - DNA, 25 bp, Homo sapien
acggttgtagctggcgactgaagca

SEQ ID NO: 5317324 - DNA, 25 bp, Homo sapien
ccacggttgtagctggcgactgaag

SEQ ID NO: 5317325 - DNA, 25 bp, Homo sapien
gttacagcacattgagtgacatcta

SEQ ID NO: 5317326 - DNA, 25 bp, Homo sapien
tcctttaaagttacagcacattgag

SEQ ID NO: 5317327 - DNA, 25 bp, Homo sapien
gcacattgagtgacatctaaactaa

SEQ ID NO: 5317328 - DNA, 25 bp, Homo sapien
taaagttacagcacattgagtgaca

SEQ ID NO: 5317329 - DNA, 25 bp, Homo sapien
gccaacttctaatcctagggcagta

SEQ ID NO: 5317330 - DNA, 25 bp, Homo sapien
cttctaatcctagggcagtaggatg

SEQ ID NO: 5317331 - DNA, 25 bp, Homo sapien
ccaacttctaatcctagggcagtag

SEQ ID NO: 5317332 - DNA, 25 bp, Homo sapien
aacttctaatcctagggcagtagga

SEQ ID NO: 5317333 - DNA, 25 bp, Homo sapien
gaagcagtaccgcagtcatatttgg

SEQ ID NO: 5317334 - DNA, 25 bp, Homo sapien
tatgaagcagtaccgcagtcatatt

SEQ ID NO: 5317335 - DNA, 25 bp, Homo sapien
gttatgaagcagtaccgcagtcata

SEQ ID NO: 5317336 - DNA, 25 bp, Homo sapien
cagtaccgcagtcatatttggatat

SEQ ID NO: 5317337 - DNA, 25 bp, Homo sapien
gtggcggtatatactgctccaaatt

SEQ ID NO: 5317338 - DNA, 25 bp, Homo sapien
ttgtggcggtatatactgctccaaa

SEQ ID NO: 5317339 - DNA, 25 bp, Homo sapien
gttattgtggcggtatatactgctc

SEQ ID NO: 5317340 - DNA, 25 bp, Homo sapien
tattgtggcggtatatactgctcca

SEQ ID NO: 5317341 - DNA, 25 bp, Homo sapien
cttcatccacctgactaatagttac

SEQ ID NO: 5317342 - DNA, 25 bp, Homo sapien
ttcatccacctgactaatagttaca

SEQ ID NO: 5317343 - DNA, 25 bp, Homo sapien
ttcttcatccacctgactaatagtt

SEQ ID NO: 5317344 - DNA, 25 bp, Homo sapien
tcttcatccacctgactaatagtta

SEQ ID NO: 5317345 - DNA, 25 bp, Homo sapien
ctacttgggactcacagtcgggagg

SEQ ID NO: 5317346 - DNA, 25 bp, Homo sapien
ctggtagcatgtgcccacctacttg

SEQ ID NO: 5317347 - DNA, 25 bp, Homo sapien
gggtcaaggctggagttagctgtga

SEQ ID NO: 5317348 - DNA, 25 bp, Homo sapien
tgggactcacagtcgggaggatcac

SEQ ID NO: 5317349 - DNA, 25 bp, Homo sapien
ccaggtccaacaaattttgctcgtt

SEQ ID NO: 5317350 - DNA, 25 bp, Homo sapien
gccaccaggtccaacaaattttgct

SEQ ID NO: 5317351 - DNA, 25 bp, Homo sapien
caggtccaacaaattttgctcgttt

SEQ ID NO: 5317352 - DNA, 25 bp, Homo sapien
caccaggtccaacaaattttgctcg

SEQ ID NO: 5317353 - DNA, 25 bp, Homo sapien
ctggaacgtaatacagacaaatata

SEQ ID NO: 5317354 - DNA, 25 bp, Homo sapien
aatattttcgttttgtgcactgggt

SEQ ID NO: 5317355 - DNA, 25 bp, Homo sapien
aacaattcaactacatacatgaacc

SEQ ID NO: 5317356 - DNA, 25 bp, Homo sapien
aaacatgccatggtcacttgagatt

SEQ ID NO: 5317357 - DNA, 25 bp, Homo sapien
attttcttttctagatgctcgaggt

SEQ ID NO: 5317358 - DNA, 25 bp, Homo sapien
gatgctcgaggttttgaaatagttt

SEQ ID NO: 5317359 - DNA, 25 bp, Homo sapien
tgttcatgatctgtaatatctcctt

SEQ ID NO: 5317360 - DNA, 25 bp, Homo sapien
gaaatagttttgttcatgatctgta

SEQ ID NO: 5317361 - DNA, 25 bp, Homo sapien
ttgttgaatagcctccatcacaatt

SEQ ID NO: 5317362 - DNA, 25 bp, Homo sapien
cctccatcacaatttttattggtat

SEQ ID NO: 5317363 - DNA, 25 bp, Homo sapien
gttgaatagcctccatcacaatttt

SEQ ID NO: 5317364 - DNA, 25 bp, Homo sapien
cacaatttttattggtattccaggt

SEQ ID NO: 5317365 - DNA, 25 bp, Homo sapien
gcagttattcctttattagtgccag

SEQ ID NO: 5317366 - DNA, 25 bp, Homo sapien
ctgtaatgcagttattcctttatta

SEQ ID NO: 5317367 - DNA, 25 bp, Homo sapien
aatgcagttattcctttattagtgc

SEQ ID NO: 5317368 - DNA, 25 bp, Homo sapien
tgtaatgcagttattcctttattag

SEQ ID NO: 5317369 - DNA, 25 bp, Homo sapien
tgaagtccatgtcaccattgtaatc

SEQ ID NO: 5317370 - DNA, 25 bp, Homo sapien
ttttgaagtccatgtcaccattgta

SEQ ID NO: 5317371 - DNA, 25 bp, Homo sapien
tccatgtcaccattgtaatcttcaa

SEQ ID NO: 5317372 - DNA, 25 bp, Homo sapien
tgtcaccattgtaatcttcaattcc

SEQ ID NO: 5317373 - DNA, 25 bp, Homo sapien
tttggtgaccaatcctattgctacg

SEQ ID NO: 5317374 - DNA, 25 bp, Homo sapien
aaatatctgtcagcaaacgataatc

SEQ ID NO: 5317375 - DNA, 25 bp, Homo sapien
aggatcggttttggtgaccaatcct

SEQ ID NO: 5317376 - DNA, 25 bp, Homo sapien
ttggtgaccaatcctattgctacgc

SEQ ID NO: 5317377 - DNA, 25 bp, Homo sapien
ctgcaacagcagatgaaattggaac

SEQ ID NO: 5317378 - DNA, 25 bp, Homo sapien
tgcaacagcagatgaaattggaacc

SEQ ID NO: 5317379 - DNA, 25 bp, Homo sapien
gcaacagcagatgaaattggaaccc

SEQ ID NO: 5317380 - DNA, 25 bp, Homo sapien
gccaaaccctggacctgtattagta

SEQ ID NO: 5317381 - DNA, 25 bp, Homo sapien
tatccctcctgtccagctatctgtg

SEQ ID NO: 5317382 - DNA, 25 bp, Homo sapien
tatcccatcaagtcacaaagatctg

SEQ ID NO: 5317383 - DNA, 25 bp, Homo sapien
ggttgaaagcaactaagacactcat

SEQ ID NO: 5317384 - DNA, 25 bp, Homo sapien
gcagcagtattttaccagctacctt

SEQ ID NO: 5317385 - DNA, 25 bp, Homo sapien
tgcttggcacataggtgccacaaag

SEQ ID NO: 5317386 - DNA, 25 bp, Homo sapien
gaagatgaaaatagtagcagcagta

SEQ ID NO: 5317387 - DNA, 25 bp, Homo sapien
taacaacttagatcagtgcttggca

SEQ ID NO: 5317388 - DNA, 25 bp, Homo sapien
taaacttccgccacatgcagatgcc

SEQ ID NO: 5317389 - DNA, 25 bp, Homo sapien
gccacatgcagatgccatagaagat

SEQ ID NO: 5317390 - DNA, 25 bp, Homo sapien
ttaatgctaaacttccgccacatgc

SEQ ID NO: 5317391 - DNA, 25 bp, Homo sapien
tgaatccattaatgctaaacttccg

SEQ ID NO: 5317392 - DNA, 25 bp, Homo sapien
cttatggtgaaaggaaaatctcggg

SEQ ID NO: 5317393 - DNA, 25 bp, Homo sapien
tcggggaataacaggatacaaagct

SEQ ID NO: 5317394 - DNA, 25 bp, Homo sapien
ctctaggacttcagatgtaactctt

SEQ ID NO: 5317395 - DNA, 25 bp, Homo sapien
cagatgtaactcttatggtgaaagg

SEQ ID NO: 5317396 - DNA, 25 bp, Homo sapien
aaaccagtgactttgccaatttcat

SEQ ID NO: 5317397 - DNA, 25 bp, Homo sapien
tatttaaaccagtgactttgccaat

SEQ ID NO: 5317398 - DNA, 25 bp, Homo sapien
tctatttaaaccagtgactttgcca

SEQ ID NO: 5317399 - DNA, 25 bp, Homo sapien
cttctatttaaaccagtgactttgc

SEQ ID NO: 5317400 - DNA, 25 bp, Homo sapien
gtacttatctcttatctctctaaag

SEQ ID NO: 5317401 - DNA, 25 bp, Homo sapien
aaagtagtactttagagagtgctaa

SEQ ID NO: 5317402 - DNA, 25 bp, Homo sapien
acttttacgtatgacttagaacagg

SEQ ID NO: 5317403 - DNA, 25 bp, Homo sapien
gtaagcaataaaatagtagccccaa

SEQ ID NO: 5317404 - DNA, 25 bp, Homo sapien
catgaaatttttatcttttatccca

SEQ ID NO: 5317405 - DNA, 25 bp, Homo sapien
gtagtgcagcatgaaatttttatct

SEQ ID NO: 5317406 - DNA, 25 bp, Homo sapien
ctcgtagtgcagcatgaaattttta

SEQ ID NO: 5317407 - DNA, 25 bp, Homo sapien
gcatgaaatttttatcttttatccc

SEQ ID NO: 5317408 - DNA, 25 bp, Homo sapien
tcatcagaattgatttggcctgcaa

SEQ ID NO: 5317409 - DNA, 25 bp, Homo sapien
cagaattgatttggcctgcaataaa

SEQ ID NO: 5317410 - DNA, 25 bp, Homo sapien
cccggcctgcaataaagattcttat

SEQ ID NO: 5317411 - DNA, 25 bp, Homo sapien
gattcttatcatcagaattgatttg

SEQ ID NO: 5317412 - DNA, 25 bp, Homo sapien
tatagctgttataacttgatctgac

SEQ ID NO: 5317413 - DNA, 25 bp, Homo sapien
taacttgatctgacttaataccaga

SEQ ID NO: 5317414 - DNA, 25 bp, Homo sapien
gctgttataacttgatctgacttaa

SEQ ID NO: 5317415 - DNA, 25 bp, Homo sapien
ctgacttaataccagattctaatga

SEQ ID NO: 5317416 - DNA, 25 bp, Homo sapien
gactaatggtctacattcgacagct

SEQ ID NO: 5317417 - DNA, 25 bp, Homo sapien
taaacatagcagactaccacaggca

SEQ ID NO: 5317418 - DNA, 25 bp, Homo sapien
gactatcatatggtgacatcacaag

SEQ ID NO: 5317419 - DNA, 25 bp, Homo sapien
ggaggtcttcctttcatacaacgtg

SEQ ID NO: 5317420 - DNA, 25 bp, Homo sapien
tttgaaataatgctgatccatgaag

SEQ ID NO: 5317421 - DNA, 25 bp, Homo sapien
gtgtttgtcctctttgaaataatgc

SEQ ID NO: 5317422 - DNA, 25 bp, Homo sapien
gaaataatgctgatccatgaagggt

SEQ ID NO: 5317423 - DNA, 25 bp, Homo sapien
taaacatatctacctcacaacttac

SEQ ID NO: 5317424 - DNA, 25 bp, Homo sapien
attcctaagtgaagtcaaatcccga

SEQ ID NO: 5317425 - DNA, 25 bp, Homo sapien
taagtgaagtcaaatcccgaccatc

SEQ ID NO: 5317426 - DNA, 25 bp, Homo sapien
tcctaagtgaagtcaaatcccgacc

SEQ ID NO: 5317427 - DNA, 25 bp, Homo sapien
gtgaagtcaaatcccgaccatcgca

SEQ ID NO: 5317428 - DNA, 25 bp, Homo sapien
tattatttcatatggatcggcttct

SEQ ID NO: 5317429 - DNA, 25 bp, Homo sapien
catatggatcggcttctggaaattt

SEQ ID NO: 5317430 - DNA, 25 bp, Homo sapien
gattctattatttcatatggatcgg

SEQ ID NO: 5317431 - DNA, 25 bp, Homo sapien
tatttcatatggatcggcttctgga

SEQ ID NO: 5317432 - DNA, 25 bp, Homo sapien
agttgttcctccgtatctaatctta

SEQ ID NO: 5317433 - DNA, 25 bp, Homo sapien
attttgttaacagcttcatctctgg

SEQ ID NO: 5317434 - DNA, 25 bp, Homo sapien
ttcctccgtatctaatcttattttg

SEQ ID NO: 5317435 - DNA, 25 bp, Homo sapien
ttagttgttcctccgtatctaatct

SEQ ID NO: 5317436 - DNA, 25 bp, Homo sapien
ttgtcatgctcgtaatctgtaaaaa

SEQ ID NO: 5317437 - DNA, 25 bp, Homo sapien
gtcatgctcgtaatctgtaaaaact

SEQ ID NO: 5317438 - DNA, 25 bp, Homo sapien
tgtcatgctcgtaatctgtaaaaac

SEQ ID NO: 5317439 - DNA, 25 bp, Homo sapien
tttgtcatgctcgtaatctgtaaaa

SEQ ID NO: 5317440 - DNA, 25 bp, Homo sapien
tgctgaatgccctgaattatttgtt

SEQ ID NO: 5317441 - DNA, 25 bp, Homo sapien
accagtttcttttaccaactgctga

SEQ ID NO: 5317442 - DNA, 25 bp, Homo sapien
actcccactttgatagcatggcaaa

SEQ ID NO: 5317443 - DNA, 25 bp, Homo sapien
atatttcacaatctctggcgaaggg

SEQ ID NO: 5317444 - DNA, 25 bp, Homo sapien
tattctccatcaattattcctattc

SEQ ID NO: 5317445 - DNA, 25 bp, Homo sapien
tctccatcaattattcctattcgta

SEQ ID NO: 5317446 - DNA, 25 bp, Homo sapien
tcaattattcctattcgtactgccc

SEQ ID NO: 5317447 - DNA, 25 bp, Homo sapien
ccatcaattattcctattcgtactg

SEQ ID NO: 5317448 - DNA, 25 bp, Homo sapien
atcagggccgaaattaaaatttcat

SEQ ID NO: 5317449 - DNA, 25 bp, Homo sapien
tctgataattttaatctctactttt

SEQ ID NO: 5317450 - DNA, 25 bp, Homo sapien
aatctgataattttaatctctactt

SEQ ID NO: 5317451 - DNA, 25 bp, Homo sapien
atctgataattttaatctctacttt

SEQ ID NO: 5317452 - DNA, 25 bp, Homo sapien
ggctcatttacaccatctactgcta

SEQ ID NO: 5317453 - DNA, 25 bp, Homo sapien
aggctcatttacaccatctactgct

SEQ ID NO: 5317454 - DNA, 25 bp, Homo sapien
atcaggctcatttacaccatctact

SEQ ID NO: 5317455 - DNA, 25 bp, Homo sapien
acatcaggctcatttacaccatcta

SEQ ID NO: 5317456 - DNA, 25 bp, Homo sapien
tggaaagagcggtctaattgaacga

SEQ ID NO: 5317457 - DNA, 25 bp, Homo sapien
ggaaagagcggtctaattgaacgat

SEQ ID NO: 5317458 - DNA, 25 bp, Homo sapien
ctggaaagagcggtctaattgaacg

SEQ ID NO: 5317459 - DNA, 25 bp, Homo sapien
agctggaaagagcggtctaattgaa

SEQ ID NO: 5317460 - DNA, 25 bp, Homo sapien
ctattattcgacttgttagaatttc

SEQ ID NO: 5317461 - DNA, 25 bp, Homo sapien
tctttatcagaagtaccaatctctc

SEQ ID NO: 5317462 - DNA, 25 bp, Homo sapien
tttgtgggaattctacctgctgcag

SEQ ID NO: 5317463 - DNA, 25 bp, Homo sapien
cttctcagatagtttgtgggaattc

SEQ ID NO: 5317464 - DNA, 25 bp, Homo sapien
ttgttttactgaccgctgtgaccat

SEQ ID NO: 5317465 - DNA, 25 bp, Homo sapien
caccaaaggcataaactgggaaggg

SEQ ID NO: 5317466 - DNA, 25 bp, Homo sapien
gttttgttttactgaccgctgtgac

SEQ ID NO: 5317467 - DNA, 25 bp, Homo sapien
aggttttgttttactgaccgctgtg

SEQ ID NO: 5317468 - DNA, 25 bp, Homo sapien
tgcaaatctggccagctttccagaa

SEQ ID NO: 5317469 - DNA, 25 bp, Homo sapien
cagagccatctgcaaatctggccag

SEQ ID NO: 5317470 - DNA, 25 bp, Homo sapien
ggccagctttccagaagatatttct

SEQ ID NO: 5317471 - DNA, 25 bp, Homo sapien
ctgtactacagcagagccatctgca

SEQ ID NO: 5317472 - DNA, 25 bp, Homo sapien
cagtggtcccggaaagtaaagagat

SEQ ID NO: 5317473 - DNA, 25 bp, Homo sapien
cgtcaactcgttattcctaggtgga

SEQ ID NO: 5317474 - DNA, 25 bp, Homo sapien
tcggatggagcaaagaagcccggca

SEQ ID NO: 5317475 - DNA, 25 bp, Homo sapien
taaagagatcggaagtcaggtggac

SEQ ID NO: 5317476 - DNA, 25 bp, Homo sapien
cggaggcacgagcagcagtacctgc

SEQ ID NO: 5317477 - DNA, 25 bp, Homo sapien
aggaaaggaccatcgctcaggggcc

SEQ ID NO: 5317478 - DNA, 25 bp, Homo sapien
cgctactccatagtgctcgcacttg

SEQ ID NO: 5317479 - DNA, 25 bp, Homo sapien
ccgatcccgccgtggcagaaggaaa

SEQ ID NO: 5317480 - DNA, 25 bp, Homo sapien
taactccatggatgtctgaagcagc

SEQ ID NO: 5317481 - DNA, 25 bp, Homo sapien
taccagttcctctgatctcgagcaa

SEQ ID NO: 5317482 - DNA, 25 bp, Homo sapien
tatggcggaaggattcctgttctgg

SEQ ID NO: 5317483 - DNA, 25 bp, Homo sapien
tctcgagcaagtgactgagcgtcat

SEQ ID NO: 5317484 - DNA, 25 bp, Homo sapien
tagccctgtccaattattagtttag

SEQ ID NO: 5317485 - DNA, 25 bp, Homo sapien
ttctttaagtttccagagaagatgt

SEQ ID NO: 5317486 - DNA, 25 bp, Homo sapien
ctagattttccaggtagccctgtcc

SEQ ID NO: 5317487 - DNA, 25 bp, Homo sapien
tagattctttaagtttccagagaag

SEQ ID NO: 5317488 - DNA, 25 bp, Homo sapien
agcccatcggaaaagcacagtattc

SEQ ID NO: 5317489 - DNA, 25 bp, Homo sapien
atggtgcaccgttttttaagcccat

SEQ ID NO: 5317490 - DNA, 25 bp, Homo sapien
catggtgcaccgttttttaagccca

SEQ ID NO: 5317491 - DNA, 25 bp, Homo sapien
cccatcggaaaagcacagtattcgg

SEQ ID NO: 5317492 - DNA, 25 bp, Homo sapien
cagagatgagcttgagttttggaga

SEQ ID NO: 5317493 - DNA, 25 bp, Homo sapien
gagatgagcttgagttttggagaag

SEQ ID NO: 5317494 - DNA, 25 bp, Homo sapien
aggcctttgcaaactcagattggaa

SEQ ID NO: 5317495 - DNA, 25 bp, Homo sapien
agagatgagcttgagttttggagaa

SEQ ID NO: 5317496 - DNA, 25 bp, Homo sapien
gacttgcaatgtccctgttcagctt

SEQ ID NO: 5317497 - DNA, 25 bp, Homo sapien
tcttgcagacgtcctgttgccctga

SEQ ID NO: 5317498 - DNA, 25 bp, Homo sapien
gaatgccaactgcaggacaaagctg

SEQ ID NO: 5317499 - DNA, 25 bp, Homo sapien
agctgggtcttgcagacgtcctgtt

SEQ ID NO: 5317500 - DNA, 25 bp, Homo sapien
gctagattcaaaattttcgtgccga

SEQ ID NO: 5317501 - DNA, 25 bp, Homo sapien
ttcgtgccgaattaactgtgtaaac

SEQ ID NO: 5317502 - DNA, 25 bp, Homo sapien
tctcagagagagtgacaatgcccac

SEQ ID NO: 5317503 - DNA, 25 bp, Homo sapien
cataagcaagggtatacagtctcag

SEQ ID NO: 5317504 - DNA, 25 bp, Homo sapien
gaattggctagttcctttgcacccc

SEQ ID NO: 5317505 - DNA, 25 bp, Homo sapien
tctgttgctaggtaaagaaggtaac

SEQ ID NO: 5317506 - DNA, 25 bp, Homo sapien
tatttgcacctgtgtaggtctcttt

SEQ ID NO: 5317507 - DNA, 25 bp, Homo sapien
ttgcaccccttattgttgtctcttg

SEQ ID NO: 5317508 - DNA, 25 bp, Homo sapien
tgaatatgtgctgagtttggagtag

SEQ ID NO: 5317509 - DNA, 25 bp, Homo sapien
ctgaatatgtgctgagtttggagta

SEQ ID NO: 5317510 - DNA, 25 bp, Homo sapien
aatatgtgctgagtttggagtaggt

SEQ ID NO: 5317511 - DNA, 25 bp, Homo sapien
atgtgctgagtttggagtaggtgaa

SEQ ID NO: 5317512 - DNA, 25 bp, Homo sapien
tcttcaattgtaattttcttggggc

SEQ ID NO: 5317513 - DNA, 25 bp, Homo sapien
attcttcaattgtaattttcttggg

SEQ ID NO: 5317514 - DNA, 25 bp, Homo sapien
aattcttcaattgtaattttcttgg

SEQ ID NO: 5317515 - DNA, 25 bp, Homo sapien
aaattcttcaattgtaattttcttg

SEQ ID NO: 5317516 - DNA, 25 bp, Homo sapien
gaaagttactcaggagctgtaaggc

SEQ ID NO: 5317517 - DNA, 25 bp, Homo sapien
ctagagagatcgtgaaagttactca

SEQ ID NO: 5317518 - DNA, 25 bp, Homo sapien
gcaaattggcaatagtaatgaagcc

SEQ ID NO: 5317519 - DNA, 25 bp, Homo sapien
ctgtaaggctggagtgttagcaaat

SEQ ID NO: 5317520 - DNA, 25 bp, Homo sapien
ggcacggttatatctttgaataata

SEQ ID NO: 5317521 - DNA, 25 bp, Homo sapien
ttttggggcacggttatatctttga

SEQ ID NO: 5317522 - DNA, 25 bp, Homo sapien
gacactatgggaatagatattttgg

SEQ ID NO: 5317523 - DNA, 25 bp, Homo sapien
gtctctaatctgctgaagacactat

SEQ ID NO: 5317524 - DNA, 25 bp, Homo sapien
cactggataccttggagccttgtaa

SEQ ID NO: 5317525 - DNA, 25 bp, Homo sapien
gcatttgcatctggtcccaacgcgg

SEQ ID NO: 5317526 - DNA, 25 bp, Homo sapien
tgcccgggccgaatatgcaaagctt

SEQ ID NO: 5317527 - DNA, 25 bp, Homo sapien
gcagttgggcacaatttcaatgcac

SEQ ID NO: 5317528 - DNA, 25 bp, Homo sapien
ccctcaggctgccttaaaatattgt

SEQ ID NO: 5317529 - DNA, 25 bp, Homo sapien
ctcaggctgccttaaaatattgtct

SEQ ID NO: 5317530 - DNA, 25 bp, Homo sapien
tgttgttactgtgttggtgaccaca

SEQ ID NO: 5317531 - DNA, 25 bp, Homo sapien
tgttactgtgttggtgaccacatct

SEQ ID NO: 5317532 - DNA, 25 bp, Homo sapien
ctgctttggatttcgataagtgttt

SEQ ID NO: 5317533 - DNA, 25 bp, Homo sapien
ctttggatttcgataagtgtttgaa

SEQ ID NO: 5317534 - DNA, 25 bp, Homo sapien
gttgacactttggaggagatcaaga

SEQ ID NO: 5317535 - DNA, 25 bp, Homo sapien
acactttggaggagatcaagaattc

SEQ ID NO: 5317536 - DNA, 25 bp, Homo sapien
tctattgtagccaatctctgtcctt

SEQ ID NO: 5317537 - DNA, 25 bp, Homo sapien
cttcttgactgttctattgtagcca

SEQ ID NO: 5317538 - DNA, 25 bp, Homo sapien
agcttttgcctgttggatctgcttg

SEQ ID NO: 5317539 - DNA, 25 bp, Homo sapien
gattctccttaaccatgagtttggc

SEQ ID NO: 5317540 - DNA, 25 bp, Homo sapien
taactgcctaacactcctttgtaat

SEQ ID NO: 5317541 - DNA, 25 bp, Homo sapien
gggaacctctatcagatttctgtca

SEQ ID NO: 5317542 - DNA, 25 bp, Homo sapien
tctgtcatatcagatctatatgagt

SEQ ID NO: 5317543 - DNA, 25 bp, Homo sapien
gcaaatttttgatattgctctcaga

SEQ ID NO: 5317544 - DNA, 25 bp, Homo sapien
tcagaggacttgagctacagttgct

SEQ ID NO: 5317545 - DNA, 25 bp, Homo sapien
caacacttaccacagggacgggagt

SEQ ID NO: 5317546 - DNA, 25 bp, Homo sapien
gccgcagatctccttagccatatga

SEQ ID NO: 5317547 - DNA, 25 bp, Homo sapien
tctccagtatgaggaagcacaccct

SEQ ID NO: 5317548 - DNA, 25 bp, Homo sapien
tcaactctttgagaggtatttgttt

SEQ ID NO: 5317549 - DNA, 25 bp, Homo sapien
gagtcaactctttgagaggtatttg

SEQ ID NO: 5317550 - DNA, 25 bp, Homo sapien
agtcaactctttgagaggtatttgt

SEQ ID NO: 5317551 - DNA, 25 bp, Homo sapien
gagcccatcccctactctcacagaa

SEQ ID NO: 5317552 - DNA, 25 bp, Homo sapien
ccatagaattgggtaggagggtaat

SEQ ID NO: 5317553 - DNA, 25 bp, Homo sapien
tgtgagcatcaagtacgaagatgag

SEQ ID NO: 5317554 - DNA, 25 bp, Homo sapien
tctggatgccaggaataaaaaccat

SEQ ID NO: 5317555 - DNA, 25 bp, Homo sapien
caggtcagttccaatgtggtttaga

SEQ ID NO: 5317556 - DNA, 25 bp, Homo sapien
tacagcaatgatttattactatata

SEQ ID NO: 5317557 - DNA, 25 bp, Homo sapien
cacctttaggctggatatgaaaata

SEQ ID NO: 5317558 - DNA, 25 bp, Homo sapien
ctatataataaacaaccacctttag

SEQ ID NO: 5317559 - DNA, 25 bp, Homo sapien
taaacaaccacctttaggctggata

SEQ ID NO: 5317560 - DNA, 25 bp, Homo sapien
gatcatcattgcttggtcccacttt

SEQ ID NO: 5317561 - DNA, 25 bp, Homo sapien
gcctgtggttgactcttagaaaaga

SEQ ID NO: 5317562 - DNA, 25 bp, Homo sapien
tagtaagtttccttaagcaccacag

SEQ ID NO: 5317563 - DNA, 25 bp, Homo sapien
caccagatagtgtatacttagctct

SEQ ID NO: 5317564 - DNA, 25 bp, Homo sapien
ggaaggtccctatactgctgactgt

SEQ ID NO: 5317565 - DNA, 25 bp, Homo sapien
tgacttcacgagcacaagcattgca

SEQ ID NO: 5317566 - DNA, 25 bp, Homo sapien
tcttggtcctgataatgacttcacg

SEQ ID NO: 5317567 - DNA, 25 bp, Homo sapien
taacacagagcttgtgcggaaggtc

SEQ ID NO: 5317568 - DNA, 25 bp, Homo sapien
gagtagttgtggactttacagagac

SEQ ID NO: 5317569 - DNA, 25 bp, Homo sapien
tatgcagggtacgtatgaagataca

SEQ ID NO: 5317570 - DNA, 25 bp, Homo sapien
ttttgaatgcctgatgagagtcacc

SEQ ID NO: 5317571 - DNA, 25 bp, Homo sapien
gactagagcttaagtgagaatctga

SEQ ID NO: 5317572 - DNA, 25 bp, Homo sapien
tttcatgcgtttcaatgccctctgc

SEQ ID NO: 5317573 - DNA, 25 bp, Homo sapien
gaaaatatgaagtcggtaagtgcac

SEQ ID NO: 5317574 - DNA, 25 bp, Homo sapien
tcctcatgacacctagcatagagct

SEQ ID NO: 5317575 - DNA, 25 bp, Homo sapien
tgccctctgcacaagtagaatttta

SEQ ID NO: 5317576 - DNA, 25 bp, Homo sapien
cataaatagttgtggcctgtatctg

SEQ ID NO: 5317577 - DNA, 25 bp, Homo sapien
tccagatttaatccgaaaagtattg

SEQ ID NO: 5317578 - DNA, 25 bp, Homo sapien
gatggcacagacctatcagatcgga

SEQ ID NO: 5317579 - DNA, 25 bp, Homo sapien
tcagatcggatgctcatgtatttgt

SEQ ID NO: 5317580 - DNA, 25 bp, Homo sapien
tcgtggataacaacggaagccgcca

SEQ ID NO: 5317581 - DNA, 25 bp, Homo sapien
catcctcccggcattcatttgtggt

SEQ ID NO: 5317582 - DNA, 25 bp, Homo sapien
gaagccgccatgataattccaacac

SEQ ID NO: 5317583 - DNA, 25 bp, Homo sapien
gatcttgacaaggatttcgtggata

SEQ ID NO: 5317584 - DNA, 25 bp, Homo sapien
catgttctacttctcaccacttggt

SEQ ID NO: 5317585 - DNA, 25 bp, Homo sapien
gaatttcccaggttcattgacacat

SEQ ID NO: 5317586 - DNA, 25 bp, Homo sapien
tattgacacaggtagcttgaggttc

SEQ ID NO: 5317587 - DNA, 25 bp, Homo sapien
tccctgggggcacatacatgagaat

SEQ ID NO: 5317588 - DNA, 25 bp, Homo sapien
gacggccttcattttggactctgca

SEQ ID NO: 5317589 - DNA, 25 bp, Homo sapien
gaatgacagcttggcaggatctgac

SEQ ID NO: 5317590 - DNA, 25 bp, Homo sapien
cctacagtttactcagaagggcaga

SEQ ID NO: 5317591 - DNA, 25 bp, Homo sapien
aatgaattggcttgtggttgacggc

SEQ ID NO: 5317592 - DNA, 25 bp, Homo sapien
tgagacgcaacatgctagagcaccc

SEQ ID NO: 5317593 - DNA, 25 bp, Homo sapien
ctaattattagagccagcctgcacc

SEQ ID NO: 5317594 - DNA, 25 bp, Homo sapien
gaggtgctgacatacctggtcactg

SEQ ID NO: 5317595 - DNA, 25 bp, Homo sapien
tcccatgggtaagcgtttgttttca

SEQ ID NO: 5317596 - DNA, 25 bp, Homo sapien
actgcttagctcatatccttgattg

SEQ ID NO: 5317597 - DNA, 25 bp, Homo sapien
cttcacagttgagcctgtcactgct

SEQ ID NO: 5317598 - DNA, 25 bp, Homo sapien
gaatgaaccaagaatgttgtagcac

SEQ ID NO: 5317599 - DNA, 25 bp, Homo sapien
tccttgattgcactgacagatgaat

SEQ ID NO: 5317600 - DNA, 25 bp, Homo sapien
gcaatatggagggatggtacattca

SEQ ID NO: 5317601 - DNA, 25 bp, Homo sapien
tacgcaggtatagttgtttgctgcc

SEQ ID NO: 5317602 - DNA, 25 bp, Homo sapien
gtgtattcacgcatctttggtggca

SEQ ID NO: 5317603 - DNA, 25 bp, Homo sapien
gtttgctgccaattgaaacccagga

SEQ ID NO: 5317604 - DNA, 25 bp, Homo sapien
tgctctacagttgtgcgtccctgca

SEQ ID NO: 5317605 - DNA, 25 bp, Homo sapien
cgtccctgcagtgcactcgtctatg

SEQ ID NO: 5317606 - DNA, 25 bp, Homo sapien
gatgcacacttggtctgctctacag

SEQ ID NO: 5317607 - DNA, 25 bp, Homo sapien
cactgacatgcaaaggatccccgta

SEQ ID NO: 5317608 - DNA, 25 bp, Homo sapien
tctgtccctctaatctgtaggatca

SEQ ID NO: 5317609 - DNA, 25 bp, Homo sapien
ctgtaggatcaaaggagagtctgaa

SEQ ID NO: 5317610 - DNA, 25 bp, Homo sapien
ttggatcttgggaaacctgagtaac

SEQ ID NO: 5317611 - DNA, 25 bp, Homo sapien
ccatttcttcttgcgtcctttttca

SEQ ID NO: 5317612 - DNA, 25 bp, Homo sapien
caatggaattttccgatcttgtttc

SEQ ID NO: 5317613 - DNA, 25 bp, Homo sapien
cacagtacctgccttgcctcaaccc

SEQ ID NO: 5317614 - DNA, 25 bp, Homo sapien
ctgccttgcctcaacccaaacagtg

SEQ ID NO: 5317615 - DNA, 25 bp, Homo sapien
ccaatggaattttccgatcttgttt

SEQ ID NO: 5317616 - DNA, 25 bp, Homo sapien
ggttcatccttcattaactgcatca

SEQ ID NO: 5317617 - DNA, 25 bp, Homo sapien
ctgtcctgttcttctcaggtttgtt

SEQ ID NO: 5317618 - DNA, 25 bp, Homo sapien
gttcatccttcattaactgcatcac

SEQ ID NO: 5317619 - DNA, 25 bp, Homo sapien
ttcttctcaggtttgttcccctctg

SEQ ID NO: 5317620 - DNA, 25 bp, Homo sapien
gaattattgagctgaattatttgta

SEQ ID NO: 5317621 - DNA, 25 bp, Homo sapien
ggactgaggctctcaactagggtct

SEQ ID NO: 5317622 - DNA, 25 bp, Homo sapien
tcgccacttaccactgatgatgtgg

SEQ ID NO: 5317623 - DNA, 25 bp, Homo sapien
gaatttttcagtaatcgccacttac

SEQ ID NO: 5317624 - DNA, 25 bp, Homo sapien
taaaggtatggctcagttgtttgct

SEQ ID NO: 5317625 - DNA, 25 bp, Homo sapien
ggctcagttgtttgctccgtttttg

SEQ ID NO: 5317626 - DNA, 25 bp, Homo sapien
tgtttgaatatagtcctggccccta

SEQ ID NO: 5317627 - DNA, 25 bp, Homo sapien
tggcccctaccctagcaggtactcc

SEQ ID NO: 5317628 - DNA, 25 bp, Homo sapien
tgtgccatgaacttaaggaggagcc

SEQ ID NO: 5317629 - DNA, 25 bp, Homo sapien
tgtggttctacacaaaccgaaccgc

SEQ ID NO: 5317630 - DNA, 25 bp, Homo sapien
gaaccgctacagcattgcctcatct

SEQ ID NO: 5317631 - DNA, 25 bp, Homo sapien
tcaaagtcagagtcaatctccttct

SEQ ID NO: 5317632 - DNA, 25 bp, Homo sapien
ttctgactcatgacagtaacacgaa

SEQ ID NO: 5317633 - DNA, 25 bp, Homo sapien
tcacaacatgggttaggtcttgatg

SEQ ID NO: 5317634 - DNA, 25 bp, Homo sapien
aaacagatgctaatacgatgcaccc

SEQ ID NO: 5317635 - DNA, 25 bp, Homo sapien
gaaaagtgacaccatcacaacatgg

SEQ ID NO: 5317636 - DNA, 25 bp, Homo sapien
tggaacccacctcagagactgtgat

SEQ ID NO: 5317637 - DNA, 25 bp, Homo sapien
tcaccacgaggtgcacttgggcaaa

SEQ ID NO: 5317638 - DNA, 25 bp, Homo sapien
tgggttggaaggtcagctctgcact

SEQ ID NO: 5317639 - DNA, 25 bp, Homo sapien
tgtctggcacgcgagaagtccttaa

SEQ ID NO: 5317640 - DNA, 25 bp, Homo sapien
tttgctcgtagcctgctgcacactg

SEQ ID NO: 5317641 - DNA, 25 bp, Homo sapien
atttcagggcctgcgactgcagcag

SEQ ID NO: 5317642 - DNA, 25 bp, Homo sapien
gtcagctgggttccgccggatgaca

SEQ ID NO: 5317643 - DNA, 25 bp, Homo sapien
tttcggccagtctgcatttcagggc

SEQ ID NO: 5317644 - DNA, 25 bp, Homo sapien
gctggcagctacaaccccggtggtt

SEQ ID NO: 5317645 - DNA, 25 bp, Homo sapien
gctgctggcagctacaaccccggtg

SEQ ID NO: 5317646 - DNA, 25 bp, Homo sapien
tggcagctacaaccccggtggttgc

SEQ ID NO: 5317647 - DNA, 25 bp, Homo sapien
tgctggcagctacaaccccggtggt

SEQ ID NO: 5317648 - DNA, 25 bp, Homo sapien
tgctgaggctgttcattattgacaa

SEQ ID NO: 5317649 - DNA, 25 bp, Homo sapien
ttacaagcgtctgggacaatgtcac

SEQ ID NO: 5317650 - DNA, 25 bp, Homo sapien
ccatagtggttgacacacttcattc

SEQ ID NO: 5317651 - DNA, 25 bp, Homo sapien
ctgttttcggaaggcagaggtatcc

SEQ ID NO: 5317652 - DNA, 25 bp, Homo sapien
tcccactcatatccgtcagtgcatt

SEQ ID NO: 5317653 - DNA, 25 bp, Homo sapien
gctgtctcacaggatcccactcata

SEQ ID NO: 5317654 - DNA, 25 bp, Homo sapien
tgtctcacaggatcccactcatatc

SEQ ID NO: 5317655 - DNA, 25 bp, Homo sapien
aggatcccactcatatccgtcagtg

SEQ ID NO: 5317656 - DNA, 25 bp, Homo sapien
cattcttatggcaacaatccttgtg

SEQ ID NO: 5317657 - DNA, 25 bp, Homo sapien
ctaaagtcctagatatatgatgaga

SEQ ID NO: 5317658 - DNA, 25 bp, Homo sapien
ggtgtgtccattccctaagaaatca

SEQ ID NO: 5317659 - DNA, 25 bp, Homo sapien
gaaaacatcaaaggtggggccagga

SEQ ID NO: 5317660 - DNA, 25 bp, Homo sapien
tggcaggtgccttctacaagtgtat

SEQ ID NO: 5317661 - DNA, 25 bp, Homo sapien
gaatggaagcctgaattctaccctg

SEQ ID NO: 5317662 - DNA, 25 bp, Homo sapien
ctgggcccacccaaaggatttgatt

SEQ ID NO: 5317663 - DNA, 25 bp, Homo sapien
gacagataggtagacaagttgcagc

SEQ ID NO: 5317664 - DNA, 25 bp, Homo sapien
tttgtcacagaatcccgctgaaccg

SEQ ID NO: 5317665 - DNA, 25 bp, Homo sapien
tcagcagagtatagcccaaatacac

SEQ ID NO: 5317666 - DNA, 25 bp, Homo sapien
tgaacggatcccatttttagccctg

SEQ ID NO: 5317667 - DNA, 25 bp, Homo sapien
gtttaatttatcaccctcagcagag

SEQ ID NO: 5317668 - DNA, 25 bp, Homo sapien
cgtgtacgtgatggtttcttcggtg

SEQ ID NO: 5317669 - DNA, 25 bp, Homo sapien
gtgtacgtgatggtttcttcggtgt

SEQ ID NO: 5317670 - DNA, 25 bp, Homo sapien
ctttagcagtgagcacaagcgagga

SEQ ID NO: 5317671 - DNA, 25 bp, Homo sapien
tagccaacgaacgaggcagcaaaga

SEQ ID NO: 5317672 - DNA, 25 bp, Homo sapien
tactgcacctacaaagcaggctgca

SEQ ID NO: 5317673 - DNA, 25 bp, Homo sapien
tcctgaaccttctcggtagccaacg

SEQ ID NO: 5317674 - DNA, 25 bp, Homo sapien
gttccttgcacagcacagcaaaaat

SEQ ID NO: 5317675 - DNA, 25 bp, Homo sapien
tccttgcacagcacagcaaaaatac

SEQ ID NO: 5317676 - DNA, 25 bp, Homo sapien
ctagcagagttccttgcacagcaca

SEQ ID NO: 5317677 - DNA, 25 bp, Homo sapien
agctagcagagttccttgcacagca

SEQ ID NO: 5317678 - DNA, 25 bp, Homo sapien
ttgtcttatcagtctgggtccccga

SEQ ID NO: 5317679 - DNA, 25 bp, Homo sapien
caaaactcggagagcaatcttccag

SEQ ID NO: 5317680 - DNA, 25 bp, Homo sapien
tgaggtcccctttcttaacagcaag

SEQ ID NO: 5317681 - DNA, 25 bp, Homo sapien
taccttcggtttcaggctgcctagg

SEQ ID NO: 5317682 - DNA, 25 bp, Homo sapien
tgggtctgatctggcgaagtccggc

SEQ ID NO: 5317683 - DNA, 25 bp, Homo sapien
tctgatctggcgaagtccggcagcg

SEQ ID NO: 5317684 - DNA, 25 bp, Homo sapien
cgtgggtctgatctggcgaagtccg

SEQ ID NO: 5317685 - DNA, 25 bp, Homo sapien
gagggcagccccgtgggtctgatct

SEQ ID NO: 5317686 - DNA, 25 bp, Homo sapien
taataccactcctccattgtatcga

SEQ ID NO: 5317687 - DNA, 25 bp, Homo sapien
cgggcactagatctttaattctttg

SEQ ID NO: 5317688 - DNA, 25 bp, Homo sapien
tctttgtcctcctatgccattagta

SEQ ID NO: 5317689 - DNA, 25 bp, Homo sapien
taaacgggcactagatctttaattc

SEQ ID NO: 5317690 - DNA, 25 bp, Homo sapien
ttttccacctaagagggcatcagac

SEQ ID NO: 5317691 - DNA, 25 bp, Homo sapien
ttgttgttttccacctaagagggca

SEQ ID NO: 5317692 - DNA, 25 bp, Homo sapien
ttccacctaagagggcatcagacaa

SEQ ID NO: 5317693 - DNA, 25 bp, Homo sapien
tgttttccacctaagagggcatcag

SEQ ID NO: 5317694 - DNA, 25 bp, Homo sapien
cccccgagtgcgcagcttctggagg

SEQ ID NO: 5317695 - DNA, 25 bp, Homo sapien
gatggtcaccttcttcccccgagtg

SEQ ID NO: 5317696 - DNA, 25 bp, Homo sapien
ctcctctatccagatggtcaccttc

SEQ ID NO: 5317697 - DNA, 25 bp, Homo sapien
cgagtgcgcagcttctggagggatg

SEQ ID NO: 5317698 - DNA, 25 bp, Homo sapien
gcttccaaactcatgcctgtctccc

SEQ ID NO: 5317699 - DNA, 25 bp, Homo sapien
catatatggtacatgggcagcctct

SEQ ID NO: 5317700 - DNA, 25 bp, Homo sapien
cagcctctgatggtcgggggcatgc

SEQ ID NO: 5317701 - DNA, 25 bp, Homo sapien
ttccaaactcatgcctgtctcccct

SEQ ID NO: 5317702 - DNA, 25 bp, Homo sapien
acttgttaactcctgtgcctttttg

SEQ ID NO: 5317703 - DNA, 25 bp, Homo sapien
tctctgcagtactaatatttccgat

SEQ ID NO: 5317704 - DNA, 25 bp, Homo sapien
tgccttgtccgaagtttctcttcat

SEQ ID NO: 5317705 - DNA, 25 bp, Homo sapien
taatatttccgatcttctctgcctt

SEQ ID NO: 5317706 - DNA, 25 bp, Homo sapien
tacagggagattagtagaactgccc

SEQ ID NO: 5317707 - DNA, 25 bp, Homo sapien
ctttgaaaattgcagggctacaggg

SEQ ID NO: 5317708 - DNA, 25 bp, Homo sapien
tcagctgggtgatcaaggctcagtc

SEQ ID NO: 5317709 - DNA, 25 bp, Homo sapien
taaaatgggactgttcaaaggcaac

SEQ ID NO: 5317710 - DNA, 25 bp, Homo sapien
ttgtctccaaagagctttcaggtgg

SEQ ID NO: 5317711 - DNA, 25 bp, Homo sapien
cttaactttgtctccaaagagcttt

SEQ ID NO: 5317712 - DNA, 25 bp, Homo sapien
ccaaagagctttcaggtgggatcat

SEQ ID NO: 5317713 - DNA, 25 bp, Homo sapien
aactttgtctccaaagagctttcag

SEQ ID NO: 5317714 - DNA, 25 bp, Homo sapien
tgtctgtgattttcagctctctcag

SEQ ID NO: 5317715 - DNA, 25 bp, Homo sapien
tcagctctctcagtgctttcagatg

SEQ ID NO: 5317716 - DNA, 25 bp, Homo sapien
tctctcagtgctttcagatgtacca

SEQ ID NO: 5317717 - DNA, 25 bp, Homo sapien
tgtgattttcagctctctcagtgct

SEQ ID NO: 5317718 - DNA, 25 bp, Homo sapien
cattaggaactgatggtgactgatt

SEQ ID NO: 5317719 - DNA, 25 bp, Homo sapien
tcctgatgcagtatctgcgacatca

SEQ ID NO: 5317720 - DNA, 25 bp, Homo sapien
tctgcgacatcaaaaactatgtaat

SEQ ID NO: 5317721 - DNA, 25 bp, Homo sapien
gaaggcaatgcattaggaactgatg

SEQ ID NO: 5317722 - DNA, 25 bp, Homo sapien
aaattgctctgtttagcataatccc

SEQ ID NO: 5317723 - DNA, 25 bp, Homo sapien
aattgctctgtttagcataatccca

SEQ ID NO: 5317724 - DNA, 25 bp, Homo sapien
gaaattgctctgtttagcataatcc

SEQ ID NO: 5317725 - DNA, 25 bp, Homo sapien
catacatcgagtgcaccagcagaag

SEQ ID NO: 5317726 - DNA, 25 bp, Homo sapien
gcagaagccctgatgtacccctctg

SEQ ID NO: 5317727 - DNA, 25 bp, Homo sapien
tgcctcaggtggaagcacatcttca

SEQ ID NO: 5317728 - DNA, 25 bp, Homo sapien
caagagaaagtgtatgagcagaggc

SEQ ID NO: 5317729 - DNA, 25 bp, Homo sapien
aggcattacgagaagggaatttgag

SEQ ID NO: 5317730 - DNA, 25 bp, Homo sapien
gagataaggcattacgagaagggaa

SEQ ID NO: 5317731 - DNA, 25 bp, Homo sapien
ctagagataaggcattacgagaagg

SEQ ID NO: 5317732 - DNA, 25 bp, Homo sapien
taaggcattacgagaagggaatttg

SEQ ID NO: 5317733 - DNA, 25 bp, Homo sapien
tgtcgagtccaaagccaaagccgga

SEQ ID NO: 5317734 - DNA, 25 bp, Homo sapien
aaagccggaactgccattgagctga

SEQ ID NO: 5317735 - DNA, 25 bp, Homo sapien
tcatagtgtgcataagtgggtgtcg

SEQ ID NO: 5317736 - DNA, 25 bp, Homo sapien
gccattgagctgagcttcccactgg

SEQ ID NO: 5317737 - DNA, 25 bp, Homo sapien
cagtgtttagaatccagatctctga

SEQ ID NO: 5317738 - DNA, 25 bp, Homo sapien
ctctggtagagtacatccacagtaa

SEQ ID NO: 5317739 - DNA, 25 bp, Homo sapien
cctggaaatatttaggagacagtgt

SEQ ID NO: 5317740 - DNA, 25 bp, Homo sapien
ctggtagagtacatccacagtaaaa

SEQ ID NO: 5317741 - DNA, 25 bp, Homo sapien
cagtgcctgactggaactcaatggc

SEQ ID NO: 5317742 - DNA, 25 bp, Homo sapien
caggggccaagtttgagatttcttc

SEQ ID NO: 5317743 - DNA, 25 bp, Homo sapien
cttctgcaattctcgcagtgcctga

SEQ ID NO: 5317744 - DNA, 25 bp, Homo sapien
tgaggagttgagtgccatgccacaa

SEQ ID NO: 5317745 - DNA, 25 bp, Homo sapien
catttgtgaactgaagaaggttctc

SEQ ID NO: 5317746 - DNA, 25 bp, Homo sapien
ttagtggatagtcatttgtgaactg

SEQ ID NO: 5317747 - DNA, 25 bp, Homo sapien
atttgtgaactgaagaaggttctcc

SEQ ID NO: 5317748 - DNA, 25 bp, Homo sapien
tagtggatagtcatttgtgaactga

SEQ ID NO: 5317749 - DNA, 25 bp, Homo sapien
gccactttgaagttgtacttaagat

SEQ ID NO: 5317750 - DNA, 25 bp, Homo sapien
ctctacgggtaagtgtgtgatttcc

SEQ ID NO: 5317751 - DNA, 25 bp, Homo sapien
gatgaaatggttcgatgcttgaaga

SEQ ID NO: 5317752 - DNA, 25 bp, Homo sapien
tgtcagactgtagaatctctacggg

SEQ ID NO: 5317753 - DNA, 25 bp, Homo sapien
aagaaaggcaaatgccccagggaga

SEQ ID NO: 5317754 - DNA, 25 bp, Homo sapien
tctaaattaatcttgctgacagtta

SEQ ID NO: 5317755 - DNA, 25 bp, Homo sapien
ggagagggaacacgtggatctaaat

SEQ ID NO: 5317756 - DNA, 25 bp, Homo sapien
ggaacacgtggatctaaattaatct

SEQ ID NO: 5317757 - DNA, 25 bp, Homo sapien
cagagattccaaccaaggtccctta

SEQ ID NO: 5317758 - DNA, 25 bp, Homo sapien
tcagagattccaaccaaggtccctt

SEQ ID NO: 5317759 - DNA, 25 bp, Homo sapien
gctttgtggcaaatctttccaaaca

SEQ ID NO: 5317760 - DNA, 25 bp, Homo sapien
catctgctgcatgaaaaggagcaaa

SEQ ID NO: 5317761 - DNA, 25 bp, Homo sapien
tttccaaacatctgctgcatgaaaa

SEQ ID NO: 5317762 - DNA, 25 bp, Homo sapien
cttagaagccataatgctttgtggc

SEQ ID NO: 5317763 - DNA, 25 bp, Homo sapien
ttctctgagcacaggcgtacccagg

SEQ ID NO: 5317764 - DNA, 25 bp, Homo sapien
gcaattgccgtcaaaagcgtcccag

SEQ ID NO: 5317765 - DNA, 25 bp, Homo sapien
cctgttcttacatattcctgctggc

SEQ ID NO: 5317766 - DNA, 25 bp, Homo sapien
gggctatcttggcacagctctgtgg

SEQ ID NO: 5317767 - DNA, 25 bp, Homo sapien
gaaagaaagagtgagtgtgtcgaca

SEQ ID NO: 5317768 - DNA, 25 bp, Homo sapien
caaattggctttggatcccaggaaa

SEQ ID NO: 5317769 - DNA, 25 bp, Homo sapien
gacattacaccaggatagagaacat

SEQ ID NO: 5317770 - DNA, 25 bp, Homo sapien
tccttttctacacagtctttgaagt

SEQ ID NO: 5317771 - DNA, 25 bp, Homo sapien
caaggaactatttatcagtgccagg

SEQ ID NO: 5317772 - DNA, 25 bp, Homo sapien
gtaaaaagcagtctgggtatgaaga

SEQ ID NO: 5317773 - DNA, 25 bp, Homo sapien
actgctctcagcacgccgaggagta

SEQ ID NO: 5317774 - DNA, 25 bp, Homo sapien
gaagattaattgaaggtcaaggaac

SEQ ID NO: 5317775 - DNA, 25 bp, Homo sapien
tagataatgtctgattggaaggagt

SEQ ID NO: 5317776 - DNA, 25 bp, Homo sapien
aaagcagaacttgagcatgccatga

SEQ ID NO: 5317777 - DNA, 25 bp, Homo sapien
gcatgccatgagaaaggcacaagaa

SEQ ID NO: 5317778 - DNA, 25 bp, Homo sapien
gaaaggtactgtgagtgatcaaaga

SEQ ID NO: 5317779 - DNA, 25 bp, Homo sapien
ggagggaagtatgtgagcagaggct

SEQ ID NO: 5317780 - DNA, 25 bp, Homo sapien
tttgaaggtaggatggtgggaagcc

SEQ ID NO: 5317781 - DNA, 25 bp, Homo sapien
ggtgcatccagggaacaagcagctg

SEQ ID NO: 5317782 - DNA, 25 bp, Homo sapien
aagcagctggttctgggaaccggaa

SEQ ID NO: 5317783 - DNA, 25 bp, Homo sapien
gaaaagaactggcagaggctgcaag

SEQ ID NO: 5317784 - DNA, 25 bp, Homo sapien
gctgcaaggtcagatggctcttcag

SEQ ID NO: 5317785 - DNA, 25 bp, Homo sapien
aggctgcaaggtcagatggctcttc

SEQ ID NO: 5317786 - DNA, 25 bp, Homo sapien
aaggtcagatggctcttcagaaggc

SEQ ID NO: 5317787 - DNA, 25 bp, Homo sapien
gtgactcaggttggatggaccccag

SEQ ID NO: 5317788 - DNA, 25 bp, Homo sapien
tgaaatggagttgaaagacagggca

SEQ ID NO: 5317789 - DNA, 25 bp, Homo sapien
tatcaggccagacatcttggtgtcc

SEQ ID NO: 5317790 - DNA, 25 bp, Homo sapien
gagtctctgctgagtccaataggaa

SEQ ID NO: 5317791 - DNA, 25 bp, Homo sapien
gctctttaggaaagagccttacatt

SEQ ID NO: 5317792 - DNA, 25 bp, Homo sapien
caggctctttaggaaagagccttac

SEQ ID NO: 5317793 - DNA, 25 bp, Homo sapien
ctaaagaaggttctcaggctcttta

SEQ ID NO: 5317794 - DNA, 25 bp, Homo sapien
tcaggctctttaggaaagagcctta

SEQ ID NO: 5317795 - DNA, 25 bp, Homo sapien
tccatgttaaaccttccagtaacac

SEQ ID NO: 5317796 - DNA, 25 bp, Homo sapien
tgtaattgtgaaaatacctccatgt

SEQ ID NO: 5317797 - DNA, 25 bp, Homo sapien
atttctggagtatgaggaagaatca

SEQ ID NO: 5317798 - DNA, 25 bp, Homo sapien
ttctggagtatgaggaagaatcaat

SEQ ID NO: 5317799 - DNA, 25 bp, Homo sapien
agaccctgacgtatgcctccttcag

SEQ ID NO: 5317800 - DNA, 25 bp, Homo sapien
tctcttcacctggtaatatgcagcc

SEQ ID NO: 5317801 - DNA, 25 bp, Homo sapien
gtactctatgagtcttgaagacttc

SEQ ID NO: 5317802 - DNA, 25 bp, Homo sapien
atcacctaccatccacatctgtaat

SEQ ID NO: 5317803 - DNA, 25 bp, Homo sapien
caattattttagaggctgactttct

SEQ ID NO: 5317804 - DNA, 25 bp, Homo sapien
cctccaattattttagaggctgact

SEQ ID NO: 5317805 - DNA, 25 bp, Homo sapien
ctcctccaattattttagaggctga

SEQ ID NO: 5317806 - DNA, 25 bp, Homo sapien
tccaattattttagaggctgacttt

SEQ ID NO: 5317807 - DNA, 25 bp, Homo sapien
caacccaacaataggatgagaggat

SEQ ID NO: 5317808 - DNA, 25 bp, Homo sapien
cccaacaataggatgagaggatgtt

SEQ ID NO: 5317809 - DNA, 25 bp, Homo sapien
gtgaatgaagaacaacccaacaata

SEQ ID NO: 5317810 - DNA, 25 bp, Homo sapien
tgaagaacaacccaacaataggatg

SEQ ID NO: 5317811 - DNA, 25 bp, Homo sapien
cagcagcaccttgctggtggtgatc

SEQ ID NO: 5317812 - DNA, 25 bp, Homo sapien
ttcagcagcaccttgctggtggtga

SEQ ID NO: 5317813 - DNA, 25 bp, Homo sapien
gcagcaccttgctggtggtgatcat

SEQ ID NO: 5317814 - DNA, 25 bp, Homo sapien
cttatagttcagcagcaccttgctg

SEQ ID NO: 5317815 - DNA, 25 bp, Homo sapien
tgcttgtagggtgctaagagtgttc

SEQ ID NO: 5317816 - DNA, 25 bp, Homo sapien
gctgaggcagcggaaccaaaagtaa

SEQ ID NO: 5317817 - DNA, 25 bp, Homo sapien
gcagcgttggccttcgtctttatag

SEQ ID NO: 5317818 - DNA, 25 bp, Homo sapien
tgtttattaaccctcacctggatgg

SEQ ID NO: 5317819 - DNA, 25 bp, Homo sapien
tgcagcgccctggatttccagttaa

SEQ ID NO: 5317820 - DNA, 25 bp, Homo sapien
tcttaggaagcgttgctggagcgct

SEQ ID NO: 5317821 - DNA, 25 bp, Homo sapien
tagagtagttctcgtctgtaagccc

SEQ ID NO: 5317822 - DNA, 25 bp, Homo sapien
gcccttcccgctggtcttcttagga

SEQ ID NO: 5317823 - DNA, 25 bp, Homo sapien
aaggttgaaggactgcaggccatac

SEQ ID NO: 5317824 - DNA, 25 bp, Homo sapien
taatgcttgccgactcatcactagc

SEQ ID NO: 5317825 - DNA, 25 bp, Homo sapien
cagtgcaccttaatgtgaacatggc

SEQ ID NO: 5317826 - DNA, 25 bp, Homo sapien
catcactagcctttcttagggtgga

SEQ ID NO: 5317827 - DNA, 25 bp, Homo sapien
aaatctggccacaccgtagaaatga

SEQ ID NO: 5317828 - DNA, 25 bp, Homo sapien
ctgtgtcctgtagtgccggaaaggg

SEQ ID NO: 5317829 - DNA, 25 bp, Homo sapien
aaagctgagccatcagatattccat

SEQ ID NO: 5317830 - DNA, 25 bp, Homo sapien
tccataaattgcaggctttccctgt

SEQ ID NO: 5317831 - DNA, 25 bp, Homo sapien
tattggccaattcccaaactaagat

SEQ ID NO: 5317832 - DNA, 25 bp, Homo sapien
catcacattcctgccattgtttttg

SEQ ID NO: 5317833 - DNA, 25 bp, Homo sapien
cccatctgatggatatattggccaa

SEQ ID NO: 5317834 - DNA, 25 bp, Homo sapien
gccaattcccaaactaagatctgga

SEQ ID NO: 5317835 - DNA, 25 bp, Homo sapien
taaaatttacagactatgccccaga

SEQ ID NO: 5317836 - DNA, 25 bp, Homo sapien
ttgaacagcacacctcatgaaggag

SEQ ID NO: 5317837 - DNA, 25 bp, Homo sapien
gaaaacaactgtgggctggactcta

SEQ ID NO: 5317838 - DNA, 25 bp, Homo sapien
gaggcattctcggacttgaacagca

SEQ ID NO: 5317839 - DNA, 25 bp, Homo sapien
taccccaccaaatgggatctatcaa

SEQ ID NO: 5317840 - DNA, 25 bp, Homo sapien
tttctaccccaccaaatgggatcta

SEQ ID NO: 5317841 - DNA, 25 bp, Homo sapien
ttctaccccaccaaatgggatctat

SEQ ID NO: 5317842 - DNA, 25 bp, Homo sapien
tctaccccaccaaatgggatctatc

SEQ ID NO: 5317843 - DNA, 25 bp, Homo sapien
tttataggccacatttatcgaggga

SEQ ID NO: 5317844 - DNA, 25 bp, Homo sapien
gggccatacgagttccataagcaag

SEQ ID NO: 5317845 - DNA, 25 bp, Homo sapien
tggagttagaccagcgctgctcaaa

SEQ ID NO: 5317846 - DNA, 25 bp, Homo sapien
gaatttaccgcaaagtgcatccttg

SEQ ID NO: 5317847 - DNA, 25 bp, Homo sapien
ggaaactgcagatgcaagcactgtg

SEQ ID NO: 5317848 - DNA, 25 bp, Homo sapien
agcaatggagcttagaggaaactgc

SEQ ID NO: 5317849 - DNA, 25 bp, Homo sapien
aagatccaaggaagcaatgtcacaa

SEQ ID NO: 5317850 - DNA, 25 bp, Homo sapien
gatgatattcttggatccatcagag

SEQ ID NO: 5317851 - DNA, 25 bp, Homo sapien
cacctgatctaaaggctaattttaa

SEQ ID NO: 5317852 - DNA, 25 bp, Homo sapien
ccataagcagctattctagtgtgtt

SEQ ID NO: 5317853 - DNA, 25 bp, Homo sapien
agcactatattctgtgtgaggattc

SEQ ID NO: 5317854 - DNA, 25 bp, Homo sapien
tccaaatgtttttggagtgcttcct

SEQ ID NO: 5317855 - DNA, 25 bp, Homo sapien
gttatgaggcgcttgagaattcttt

SEQ ID NO: 5317856 - DNA, 25 bp, Homo sapien
cagcactgatgttatgaggcgcttg

SEQ ID NO: 5317857 - DNA, 25 bp, Homo sapien
tcattggtattcatccacaacgggt

SEQ ID NO: 5317858 - DNA, 25 bp, Homo sapien
catccacaacgggtggtgaaggagc

SEQ ID NO: 5317859 - DNA, 25 bp, Homo sapien
taggatggacttggtgatattccaa

SEQ ID NO: 5317860 - DNA, 25 bp, Homo sapien
gcttaggatggacttggtgatattc

SEQ ID NO: 5317861 - DNA, 25 bp, Homo sapien
ggacttggtgatattccaatcaata

SEQ ID NO: 5317862 - DNA, 25 bp, Homo sapien
caaaaaagtgactccttttctgtca

SEQ ID NO: 5317863 - DNA, 25 bp, Homo sapien
tctactccgaatgcctaaaacttgg

SEQ ID NO: 5317864 - DNA, 25 bp, Homo sapien
tcattcgtggcttgctctactccga

SEQ ID NO: 5317865 - DNA, 25 bp, Homo sapien
aggtcagggttctgagagccaccta

SEQ ID NO: 5317866 - DNA, 25 bp, Homo sapien
tggatctcactgcatatgccactgt

SEQ ID NO: 5317867 - DNA, 25 bp, Homo sapien
gaaacacaagtgaccaggcaagcag

SEQ ID NO: 5317868 - DNA, 25 bp, Homo sapien
caagcaggcgttacaatggctgtgt

SEQ ID NO: 5317869 - DNA, 25 bp, Homo sapien
catatggagatctcttcaggaagca

SEQ ID NO: 5317870 - DNA, 25 bp, Homo sapien
tgtcagggcctgaaccgtttgagaa

SEQ ID NO: 5317871 - DNA, 25 bp, Homo sapien
gctgtgagtctagggttcgggaggg

SEQ ID NO: 5317872 - DNA, 25 bp, Homo sapien
ccatagagtgtagctgtgagtctag

SEQ ID NO: 5317873 - DNA, 25 bp, Homo sapien
caaaagacacctggcatcttaacaa

SEQ ID NO: 5317874 - DNA, 25 bp, Homo sapien
tctcttctttgcgtactcctggtgg

SEQ ID NO: 5317875 - DNA, 25 bp, Homo sapien
tcctatttctagacaagaggctgcc

SEQ ID NO: 5317876 - DNA, 25 bp, Homo sapien
agaggctgcccaatgtaatatgtaa

SEQ ID NO: 5317877 - DNA, 25 bp, Homo sapien
gaacccgtgatggaggaataaacag

SEQ ID NO: 5317878 - DNA, 25 bp, Homo sapien
gaatacgactcttgaagaacccgtg

SEQ ID NO: 5317879 - DNA, 25 bp, Homo sapien
cgccggtggaggacctgtccaaagt

SEQ ID NO: 5317880 - DNA, 25 bp, Homo sapien
ccaaagtgtcggacgaggagctgct

SEQ ID NO: 5317881 - DNA, 25 bp, Homo sapien
tgcggcgcgccgaggcggagaaggt

SEQ ID NO: 5317882 - DNA, 25 bp, Homo sapien
aacctcatccgcgaggtgaaccgcc

SEQ ID NO: 5317883 - DNA, 25 bp, Homo sapien
gagcagtcttgtgtcaccgggtaca

SEQ ID NO: 5317884 - DNA, 25 bp, Homo sapien
cataggagttcaagctctgccttca

SEQ ID NO: 5317885 - DNA, 25 bp, Homo sapien
ttagggaggctggaaaatctgtgcc

SEQ ID NO: 5317886 - DNA, 25 bp, Homo sapien
ttcagtcagttaggcggaaaggcca

SEQ ID NO: 5317887 - DNA, 25 bp, Homo sapien
ccttagtctggtccttacatagcca

SEQ ID NO: 5317888 - DNA, 25 bp, Homo sapien
ggtccttacatagccacttgcattc

SEQ ID NO: 5317889 - DNA, 25 bp, Homo sapien
cagccaaagtgctgtgtccagggaa

SEQ ID NO: 5317890 - DNA, 25 bp, Homo sapien
cttgagaagatggtctgaccttagt

SEQ ID NO: 5317891 - DNA, 25 bp, Homo sapien
tatgtttgttcggacaggaattctg

SEQ ID NO: 5317892 - DNA, 25 bp, Homo sapien
catggagcaatgaggatatgtttgt

SEQ ID NO: 5317893 - DNA, 25 bp, Homo sapien
caatgaggatatgtttgttcggaca

SEQ ID NO: 5317894 - DNA, 25 bp, Homo sapien
tcggacaggaattctgtgtgtaggt

SEQ ID NO: 5317895 - DNA, 25 bp, Homo sapien
atgtttttggagatatctcagtcct

SEQ ID NO: 5317896 - DNA, 25 bp, Homo sapien
tttttggagatatctcagtcctcac

SEQ ID NO: 5317897 - DNA, 25 bp, Homo sapien
atctcagtcctcactagagatgatt

SEQ ID NO: 5317898 - DNA, 25 bp, Homo sapien
tctcagtcctcactagagatgattc

SEQ ID NO: 5317899 - DNA, 25 bp, Homo sapien
tcagtgttcataggagggtaaatct

SEQ ID NO: 5317900 - DNA, 25 bp, Homo sapien
ttttgtcagtgttcataggagggta

SEQ ID NO: 5317901 - DNA, 25 bp, Homo sapien
ttcataggagggtaaatctgaatgt

SEQ ID NO: 5317902 - DNA, 25 bp, Homo sapien
ttgtttttgtcagtgttcataggag

SEQ ID NO: 5317903 - DNA, 25 bp, Homo sapien
agtgcaaacttcctgtaggaaactg

SEQ ID NO: 5317904 - DNA, 25 bp, Homo sapien
gtagatccactgaagtatgagtcat

SEQ ID NO: 5317905 - DNA, 25 bp, Homo sapien
aggtagatccactgaagtatgagtc

SEQ ID NO: 5317906 - DNA, 25 bp, Homo sapien
ggtagatccactgaagtatgagtca

SEQ ID NO: 5317907 - DNA, 25 bp, Homo sapien
aaagttaatctccattgatatcccc

SEQ ID NO: 5317908 - DNA, 25 bp, Homo sapien
atatcccctttgatacattctcttt

SEQ ID NO: 5317909 - DNA, 25 bp, Homo sapien
tctcctcattaccaagaatagcacg

SEQ ID NO: 5317910 - DNA, 25 bp, Homo sapien
gaatagcacgcaataaaatgttcca

SEQ ID NO: 5317911 - DNA, 25 bp, Homo sapien
tgtagtaatggcaaccattccccag

SEQ ID NO: 5317912 - DNA, 25 bp, Homo sapien
taaggaatttaatggccatgctagt

SEQ ID NO: 5317913 - DNA, 25 bp, Homo sapien
catccgcttcataggattaaggaat

SEQ ID NO: 5317914 - DNA, 25 bp, Homo sapien
taatggccatgctagtcacaccttt

SEQ ID NO: 5317915 - DNA, 25 bp, Homo sapien
ggctcttgggatggactagatctgc

SEQ ID NO: 5317916 - DNA, 25 bp, Homo sapien
gaaggctcttgggatggactagatc

SEQ ID NO: 5317917 - DNA, 25 bp, Homo sapien
tcttgggatggactagatctgcagc

SEQ ID NO: 5317918 - DNA, 25 bp, Homo sapien
ttgggatggactagatctgcagctt

SEQ ID NO: 5317919 - DNA, 25 bp, Homo sapien
tagggacagataccttgggcagatg

SEQ ID NO: 5317920 - DNA, 25 bp, Homo sapien
cgtaattaagtctatgggttctgaa

SEQ ID NO: 5317921 - DNA, 25 bp, Homo sapien
aattaagtctatgggttctgaatcc

SEQ ID NO: 5317922 - DNA, 25 bp, Homo sapien
atccaggtaattgcgtttggtggaa

SEQ ID NO: 5317923 - DNA, 25 bp, Homo sapien
gttctgaatccaggtaattgcgttt

SEQ ID NO: 5317924 - DNA, 25 bp, Homo sapien
tctgggtggataaaagatgttccct

SEQ ID NO: 5317925 - DNA, 25 bp, Homo sapien
ttgcagtctgggtggataaaagatg

SEQ ID NO: 5317926 - DNA, 25 bp, Homo sapien
cagtctgggtggataaaagatgttc

SEQ ID NO: 5317927 - DNA, 25 bp, Homo sapien
tgggtggataaaagatgttccctaa

SEQ ID NO: 5317928 - DNA, 25 bp, Homo sapien
gatcagaggagatctggtgcattca

SEQ ID NO: 5317929 - DNA, 25 bp, Homo sapien
cattcagggtggtgtgaccgcagac

SEQ ID NO: 5317930 - DNA, 25 bp, Homo sapien
tgcattcagggtggtgtgaccgcag

SEQ ID NO: 5317931 - DNA, 25 bp, Homo sapien
agaggagatctggtgcattcagggt

SEQ ID NO: 5317932 - DNA, 25 bp, Homo sapien
agtggaggcatgacgagaatccaga

SEQ ID NO: 5317933 - DNA, 25 bp, Homo sapien
catgacgagaatccagatctcctgc

SEQ ID NO: 5317934 - DNA, 25 bp, Homo sapien
ctagtggaggcatgacgagaatcca

SEQ ID NO: 5317935 - DNA, 25 bp, Homo sapien
tggaggcatgacgagaatccagatc

SEQ ID NO: 5317936 - DNA, 25 bp, Homo sapien
tcagaaagtgacaggggatataagt

SEQ ID NO: 5317937 - DNA, 25 bp, Homo sapien
tgacaggggatataagtgatattac

SEQ ID NO: 5317938 - DNA, 25 bp, Homo sapien
aaagtgacaggggatataagtgata

SEQ ID NO: 5317939 - DNA, 25 bp, Homo sapien
cagaaagtgacaggggatataagtg

SEQ ID NO: 5317940 - DNA, 25 bp, Homo sapien
aaagaatattctgccagccatcagg

SEQ ID NO: 5317941 - DNA, 25 bp, Homo sapien
caatttctggaagttaggatatgtc

SEQ ID NO: 5317942 - DNA, 25 bp, Homo sapien
ccatcaggaaggatgatagatttag

SEQ ID NO: 5317943 - DNA, 25 bp, Homo sapien
tattccatagaaacattggcgctag

SEQ ID NO: 5317944 - DNA, 25 bp, Homo sapien
ataggaggagacaagggcaggacat

SEQ ID NO: 5317945 - DNA, 25 bp, Homo sapien
tgagagagagagtcgggagaatagg

SEQ ID NO: 5317946 - DNA, 25 bp, Homo sapien
gagaataggaggagacaagggcagg

SEQ ID NO: 5317947 - DNA, 25 bp, Homo sapien
ctagggtagaagctcagtgagagag

SEQ ID NO: 5317948 - DNA, 25 bp, Homo sapien
gatgctgtgtcggtgttattgatgc

SEQ ID NO: 5317949 - DNA, 25 bp, Homo sapien
ttaacattctcggagggttcccagc

SEQ ID NO: 5317950 - DNA, 25 bp, Homo sapien
tggtagcagtggtatcaaggataaa

SEQ ID NO: 5317951 - DNA, 25 bp, Homo sapien
tatcaaggataaaaatgtggacccc

SEQ ID NO: 5317952 - DNA, 25 bp, Homo sapien
ctgtgacttcagaagttgtgaaaag

SEQ ID NO: 5317953 - DNA, 25 bp, Homo sapien
tgacttcagaagttgtgaaaagtct

SEQ ID NO: 5317954 - DNA, 25 bp, Homo sapien
aaagtctgaacagccctgcagactc

SEQ ID NO: 5317955 - DNA, 25 bp, Homo sapien
gtgaaaagtctgaacagccctgcag

SEQ ID NO: 5317956 - DNA, 25 bp, Homo sapien
gaaagctgtgaccaaggagccaatg

SEQ ID NO: 5317957 - DNA, 25 bp, Homo sapien
catccatattcctagaggctggcct

SEQ ID NO: 5317958 - DNA, 25 bp, Homo sapien
tagaggctggcctattggaagtaag

SEQ ID NO: 5317959 - DNA, 25 bp, Homo sapien
ggcctattggaagtaagtccttcag

SEQ ID NO: 5317960 - DNA, 25 bp, Homo sapien
tggcccaattaggaggtctccgttg

SEQ ID NO: 5317961 - DNA, 25 bp, Homo sapien
ggcccaattaggaggtctccgttgc

SEQ ID NO: 5317962 - DNA, 25 bp, Homo sapien
tctcctgatccatcattatatccca

SEQ ID NO: 5317963 - DNA, 25 bp, Homo sapien
ttctcctgatccatcattatatccc

SEQ ID NO: 5317964 - DNA, 25 bp, Homo sapien
cagagagctgccatagggtgtttta

SEQ ID NO: 5317965 - DNA, 25 bp, Homo sapien
gagtttttcgtcttccacagagagc

SEQ ID NO: 5317966 - DNA, 25 bp, Homo sapien
cccatatcttgggatgattgacagt

SEQ ID NO: 5317967 - DNA, 25 bp, Homo sapien
ggctcctttacagagcctggcgtca

SEQ ID NO: 5317968 - DNA, 25 bp, Homo sapien
gacatttccagaaccgagtttagtg

SEQ ID NO: 5317969 - DNA, 25 bp, Homo sapien
ccagaaccgagtttagtggtgtatt

SEQ ID NO: 5317970 - DNA, 25 bp, Homo sapien
ttccagaaccgagtttagtggtgta

SEQ ID NO: 5317971 - DNA, 25 bp, Homo sapien
atttccagaaccgagtttagtggtg

SEQ ID NO: 5317972 - DNA, 25 bp, Homo sapien
cgatagagaaatgcatttcatctcc

SEQ ID NO: 5317973 - DNA, 25 bp, Homo sapien
cctggggccctgttgcttcttccca

SEQ ID NO: 5317974 - DNA, 25 bp, Homo sapien
agaaatgcatttcatctcctggggc

SEQ ID NO: 5317975 - DNA, 25 bp, Homo sapien
ctcctggggccctgttgcttcttcc

SEQ ID NO: 5317976 - DNA, 25 bp, Homo sapien
ccaggagatagtgttgttgtaagca

SEQ ID NO: 5317977 - DNA, 25 bp, Homo sapien
cagggagcatgtgataccaggagat

SEQ ID NO: 5317978 - DNA, 25 bp, Homo sapien
caacaggtgaagttttggctggtga

SEQ ID NO: 5317979 - DNA, 25 bp, Homo sapien
caggtaataagcattgaggaggtcc

SEQ ID NO: 5317980 - DNA, 25 bp, Homo sapien
agcactggagcacttggtccctggt

SEQ ID NO: 5317981 - DNA, 25 bp, Homo sapien
catttatgaggctgtccagttgggt

SEQ ID NO: 5317982 - DNA, 25 bp, Homo sapien
cagttgggtggccacagaaggttcc

SEQ ID NO: 5317983 - DNA, 25 bp, Homo sapien
tgcctgccatttgagcatacccatg

SEQ ID NO: 5317984 - DNA, 25 bp, Homo sapien
ctgtctctcctgtcttgcaaagcta

SEQ ID NO: 5317985 - DNA, 25 bp, Homo sapien
ctggcattgccagtatagcatttct

SEQ ID NO: 5317986 - DNA, 25 bp, Homo sapien
attaaacacttaaccaggcaactca

SEQ ID NO: 5317987 - DNA, 25 bp, Homo sapien
tattaatgtatgaactaaggctgtc

SEQ ID NO: 5317988 - DNA, 25 bp, Homo sapien
caaggacaggaagctagtctgaaga

SEQ ID NO: 5317989 - DNA, 25 bp, Homo sapien
tgctataggtagaagattgtgcacc

SEQ ID NO: 5317990 - DNA, 25 bp, Homo sapien
tgtagtcctagatctgccgtcatga

SEQ ID NO: 5317991 - DNA, 25 bp, Homo sapien
cccaatgcttatgtttagtgctcca

SEQ ID NO: 5317992 - DNA, 25 bp, Homo sapien
taagtaggaggctgacctttgcttg

SEQ ID NO: 5317993 - DNA, 25 bp, Homo sapien
ctaagtaggaggctgacctttgctt

SEQ ID NO: 5317994 - DNA, 25 bp, Homo sapien
aagtaggaggctgacctttgcttgc

SEQ ID NO: 5317995 - DNA, 25 bp, Homo sapien
tctgtgtttacaataggatcatttt

SEQ ID NO: 5317996 - DNA, 25 bp, Homo sapien
ttacaataggatcatttttggcttc

SEQ ID NO: 5317997 - DNA, 25 bp, Homo sapien
tttctttctgtgtttacaataggat

SEQ ID NO: 5317998 - DNA, 25 bp, Homo sapien
ctttcttttccgtcatgtgattcct

SEQ ID NO: 5317999 - DNA, 25 bp, Homo sapien
caatgtagagtgtgattatgttcca

SEQ ID NO: 5318000 - DNA, 25 bp, Homo sapien
gattatgttccatgatggccatcat

SEQ ID NO: 5318001 - DNA, 25 bp, Homo sapien
agatttctaagtgttatactaaagg

SEQ ID NO: 5318002 - DNA, 25 bp, Homo sapien
gtgttatactaaagggtgcagatat

SEQ ID NO: 5318003 - DNA, 25 bp, Homo sapien
tactggcccagcattgaatccatct

SEQ ID NO: 5318004 - DNA, 25 bp, Homo sapien
aatccatcttgatgatgattcccat

SEQ ID NO: 5318005 - DNA, 25 bp, Homo sapien
ggcccagcattgaatccatcttgat

SEQ ID NO: 5318006 - DNA, 25 bp, Homo sapien
cttgatgatgattcccattctgacc

SEQ ID NO: 5318007 - DNA, 25 bp, Homo sapien
tacgtccactgtgactccacagaca

SEQ ID NO: 5318008 - DNA, 25 bp, Homo sapien
tgactccacagacatcaatctcagc

SEQ ID NO: 5318009 - DNA, 25 bp, Homo sapien
acgtccactgtgactccacagacat

SEQ ID NO: 5318010 - DNA, 25 bp, Homo sapien
cactgtgactccacagacatcaatc

SEQ ID NO: 5318011 - DNA, 25 bp, Homo sapien
aaacaggccctcaagaagtcctctg

SEQ ID NO: 5318012 - DNA, 25 bp, Homo sapien
ggctacaatccttcaccacatgtga

SEQ ID NO: 5318013 - DNA, 25 bp, Homo sapien
taatggacagcacttagggtagtgc

SEQ ID NO: 5318014 - DNA, 25 bp, Homo sapien
cacatgtgacgcagagagtagtcgc

SEQ ID NO: 5318015 - DNA, 25 bp, Homo sapien
gacttctgaggtgctaaaaaatacc

SEQ ID NO: 5318016 - DNA, 25 bp, Homo sapien
taccagctagaagggtagcaagacg

SEQ ID NO: 5318017 - DNA, 25 bp, Homo sapien
caagacgttgtagagtgcttatcag

SEQ ID NO: 5318018 - DNA, 25 bp, Homo sapien
catgtaaattctccctaccagctag

SEQ ID NO: 5318019 - DNA, 25 bp, Homo sapien
ggactgaagcaaccagaacatctga

SEQ ID NO: 5318020 - DNA, 25 bp, Homo sapien
gagacatcctatagattatggtggc

SEQ ID NO: 5318021 - DNA, 25 bp, Homo sapien
ttggcccagaacatctaaaatcagg

SEQ ID NO: 5318022 - DNA, 25 bp, Homo sapien
tggagaagagtactaaaaacaagct

SEQ ID NO: 5318023 - DNA, 25 bp, Homo sapien
ctcttcgagtctaggtatggtcctg

SEQ ID NO: 5318024 - DNA, 25 bp, Homo sapien
ttgatgtctgctcttcgagtctagg

SEQ ID NO: 5318025 - DNA, 25 bp, Homo sapien
caggatacaagttaggagagggtgc

SEQ ID NO: 5318026 - DNA, 25 bp, Homo sapien
gatctaaagcatggaaatctatgta

SEQ ID NO: 5318027 - DNA, 25 bp, Homo sapien
tgcagaggtgaagctatcttcctct

SEQ ID NO: 5318028 - DNA, 25 bp, Homo sapien
tggaggatgcagaggtgaagctatc

SEQ ID NO: 5318029 - DNA, 25 bp, Homo sapien
ggatgcagaggtgaagctatcttcc

SEQ ID NO: 5318030 - DNA, 25 bp, Homo sapien
tctgctatggaggatgcagaggtga

SEQ ID NO: 5318031 - DNA, 25 bp, Homo sapien
gctgatttgcttggcaggtgtccag

SEQ ID NO: 5318032 - DNA, 25 bp, Homo sapien
aagtcctgaagtctagtctgagccc

SEQ ID NO: 5318033 - DNA, 25 bp, Homo sapien
cacatttgtccagaacatggcgtga

SEQ ID NO: 5318034 - DNA, 25 bp, Homo sapien
gaaggaactgtgaactactgcctcc

SEQ ID NO: 5318035 - DNA, 25 bp, Homo sapien
cacgttttgacacgtggtgggtctt

SEQ ID NO: 5318036 - DNA, 25 bp, Homo sapien
caaatcgccttgaggcttgaagtaa

SEQ ID NO: 5318037 - DNA, 25 bp, Homo sapien
tgaagtaaagacagcacgttttgac

SEQ ID NO: 5318038 - DNA, 25 bp, Homo sapien
cacgtggtgggtcttccaacttggg

SEQ ID NO: 5318039 - DNA, 25 bp, Homo sapien
tgaggacagcaaatatccagggaga

SEQ ID NO: 5318040 - DNA, 25 bp, Homo sapien
tatgtacgggtgacaagccagatcc

SEQ ID NO: 5318041 - DNA, 25 bp, Homo sapien
cactgggtgtaaatgcctgatgtca

SEQ ID NO: 5318042 - DNA, 25 bp, Homo sapien
catgtgagactaccactgctgagta

SEQ ID NO: 5318043 - DNA, 25 bp, Homo sapien
caagtggaaagcaggaattctgcaa

SEQ ID NO: 5318044 - DNA, 25 bp, Homo sapien
tctccaagtggaaagcaggaattct

SEQ ID NO: 5318045 - DNA, 25 bp, Homo sapien
gaagctcagaataccaagactaatg

SEQ ID NO: 5318046 - DNA, 25 bp, Homo sapien
gaggcaggaagccaattagcttaaa

SEQ ID NO: 5318047 - DNA, 25 bp, Homo sapien
gatatatctccacttaaagtctcca

SEQ ID NO: 5318048 - DNA, 25 bp, Homo sapien
gggcaatgttgcatctgagggatat

SEQ ID NO: 5318049 - DNA, 25 bp, Homo sapien
gggatatatctccacttaaagtctc

SEQ ID NO: 5318050 - DNA, 25 bp, Homo sapien
tgcatctgagggatatatctccact

SEQ ID NO: 5318051 - DNA, 25 bp, Homo sapien
tgtccttgccatagaaatgcaccaa

SEQ ID NO: 5318052 - DNA, 25 bp, Homo sapien
cacaccctggattgtaactccctga

SEQ ID NO: 5318053 - DNA, 25 bp, Homo sapien
cctggattgtaactccctgaagatg

SEQ ID NO: 5318054 - DNA, 25 bp, Homo sapien
atgatgctgtccttgccatagaaat

SEQ ID NO: 5318055 - DNA, 25 bp, Homo sapien
ctgtcaaacttaagatacgactata

SEQ ID NO: 5318056 - DNA, 25 bp, Homo sapien
aacttaagatacgactatatgccac

SEQ ID NO: 5318057 - DNA, 25 bp, Homo sapien
tcaaacttaagatacgactatatgc

SEQ ID NO: 5318058 - DNA, 25 bp, Homo sapien
taagatacgactatatgccactaag

SEQ ID NO: 5318059 - DNA, 25 bp, Homo sapien
tcctgctctaaaactcaccttggtc

SEQ ID NO: 5318060 - DNA, 25 bp, Homo sapien
caatttccctgagtatgacttacag

SEQ ID NO: 5318061 - DNA, 25 bp, Homo sapien
ctaacgtaatgttttgtggacttct

SEQ ID NO: 5318062 - DNA, 25 bp, Homo sapien
caagaatcgagttgctgcaggcctg

SEQ ID NO: 5318063 - DNA, 25 bp, Homo sapien
tacagtattggtgtttatagccata

SEQ ID NO: 5318064 - DNA, 25 bp, Homo sapien
tctttttgtaatacagtattggtgt

SEQ ID NO: 5318065 - DNA, 25 bp, Homo sapien
tatagccataaatttctctctgaga

SEQ ID NO: 5318066 - DNA, 25 bp, Homo sapien
tgctgaccttttcaaagatctaact

SEQ ID NO: 5318067 - DNA, 25 bp, Homo sapien
taaggtggctaagatcccttgcatt

SEQ ID NO: 5318068 - DNA, 25 bp, Homo sapien
caggctctagtacattaaaagctac

SEQ ID NO: 5318069 - DNA, 25 bp, Homo sapien
tacctttgtgcaggtacccttcacc

SEQ ID NO: 5318070 - DNA, 25 bp, Homo sapien
tagagctggttgaggttaaggtggc

SEQ ID NO: 5318071 - DNA, 25 bp, Homo sapien
gaaacatgatgttactgaacgtcat

SEQ ID NO: 5318072 - DNA, 25 bp, Homo sapien
tgctttgtcttaaccccagaagaaa

SEQ ID NO: 5318073 - DNA, 25 bp, Homo sapien
tcgtgaatgtcttacatgcacccat

SEQ ID NO: 5318074 - DNA, 25 bp, Homo sapien
ggtcgtgaatgtcttacatgcaccc

SEQ ID NO: 5318075 - DNA, 25 bp, Homo sapien
gtcgtgaatgtcttacatgcaccca

SEQ ID NO: 5318076 - DNA, 25 bp, Homo sapien
tataaattgcacttgactgctccca

SEQ ID NO: 5318077 - DNA, 25 bp, Homo sapien
gatggtgcaatctagtccctcctaa

SEQ ID NO: 5318078 - DNA, 25 bp, Homo sapien
cagttacgatagctccaaaaagtca

SEQ ID NO: 5318079 - DNA, 25 bp, Homo sapien
gaaagtgtcagcttaggacgggtac

SEQ ID NO: 5318080 - DNA, 25 bp, Homo sapien
tttccaggaatgtcatccggtagca

SEQ ID NO: 5318081 - DNA, 25 bp, Homo sapien
tagctctaagtagaatgtcagtttc

SEQ ID NO: 5318082 - DNA, 25 bp, Homo sapien
tatgttatgtagagaatcctctctg

SEQ ID NO: 5318083 - DNA, 25 bp, Homo sapien
tgtcccgctaataactagctctaag

SEQ ID NO: 5318084 - DNA, 25 bp, Homo sapien
gtggattccccatatacatatcttc

SEQ ID NO: 5318085 - DNA, 25 bp, Homo sapien
ttctcaattgttacacaaataaaaa

SEQ ID NO: 5318086 - DNA, 25 bp, Homo sapien
gggtggattccccatatacatatct

SEQ ID NO: 5318087 - DNA, 25 bp, Homo sapien
gtgggtggattccccatatacatat

SEQ ID NO: 5318088 - DNA, 25 bp, Homo sapien
tctgaatgcaggtgtacctccagtt

SEQ ID NO: 5318089 - DNA, 25 bp, Homo sapien
gcaggtgtacctccagttgtaacca

SEQ ID NO: 5318090 - DNA, 25 bp, Homo sapien
ccagttgtaaccacagttgtttctt

SEQ ID NO: 5318091 - DNA, 25 bp, Homo sapien
gtacctccagttgtaaccacagttg

SEQ ID NO: 5318092 - DNA, 25 bp, Homo sapien
tgtgcctacgcaaataaaggaatag

SEQ ID NO: 5318093 - DNA, 25 bp, Homo sapien
aaaggaatagttctgcacttccaac

SEQ ID NO: 5318094 - DNA, 25 bp, Homo sapien
cctcaatgagtttgtgcctacgcaa

SEQ ID NO: 5318095 - DNA, 25 bp, Homo sapien
aataattccctcaatgagtttgtgc

SEQ ID NO: 5318096 - DNA, 25 bp, Homo sapien
ggcgtagcatcagatagcactgtat

SEQ ID NO: 5318097 - DNA, 25 bp, Homo sapien
gatttttggcgtagcatcagatagc

SEQ ID NO: 5318098 - DNA, 25 bp, Homo sapien
gcatcagatagcactgtatacccca

SEQ ID NO: 5318099 - DNA, 25 bp, Homo sapien
ctgccaggatttttggcgtagcatc

SEQ ID NO: 5318100 - DNA, 25 bp, Homo sapien
tgcagaagcaaatgggcaagggtcc

SEQ ID NO: 5318101 - DNA, 25 bp, Homo sapien
gacctggaaggttggtgttagcact

SEQ ID NO: 5318102 - DNA, 25 bp, Homo sapien
tgagctggtgaaatgcagaagcaaa

SEQ ID NO: 5318103 - DNA, 25 bp, Homo sapien
gagagaagatacatgccacagaaga

SEQ ID NO: 5318104 - DNA, 25 bp, Homo sapien
tgcaggttccttaacgagactcagc

SEQ ID NO: 5318105 - DNA, 25 bp, Homo sapien
ggtatctgcaggctcatgatcatgc

SEQ ID NO: 5318106 - DNA, 25 bp, Homo sapien
gactcagcaatttgtaggtatctgc

SEQ ID NO: 5318107 - DNA, 25 bp, Homo sapien
gatcatgcacctcaatgctttccag

SEQ ID NO: 5318108 - DNA, 25 bp, Homo sapien
aattgggacatgtgcctcaattttc

SEQ ID NO: 5318109 - DNA, 25 bp, Homo sapien
aaattgggacatgtgcctcaatttt

SEQ ID NO: 5318110 - DNA, 25 bp, Homo sapien
ggaaattgggacatgtgcctcaatt

SEQ ID NO: 5318111 - DNA, 25 bp, Homo sapien
gaaattgggacatgtgcctcaattt

SEQ ID NO: 5318112 - DNA, 25 bp, Homo sapien
ggggagtttctgataattcaactta

SEQ ID NO: 5318113 - DNA, 25 bp, Homo sapien
agtggggagtttctgataattcaac

SEQ ID NO: 5318114 - DNA, 25 bp, Homo sapien
gagtttctgataattcaacttaatc

SEQ ID NO: 5318115 - DNA, 25 bp, Homo sapien
gtttctgataattcaacttaatctg

SEQ ID NO: 5318116 - DNA, 25 bp, Homo sapien
tagatttgcgtgttggactgtccag

SEQ ID NO: 5318117 - DNA, 25 bp, Homo sapien
aatatgaccctggtctatagccagg

SEQ ID NO: 5318118 - DNA, 25 bp, Homo sapien
tgccttccacagttgtccgtatact

SEQ ID NO: 5318119 - DNA, 25 bp, Homo sapien
gactgtccagggtaattttcacgat

SEQ ID NO: 5318120 - DNA, 25 bp, Homo sapien
gccacagggtcacgttgacataaat

SEQ ID NO: 5318121 - DNA, 25 bp, Homo sapien
gatgcaaatgttaagttgatatgcc

SEQ ID NO: 5318122 - DNA, 25 bp, Homo sapien
tgtagcagctgcattgttagaagtc

SEQ ID NO: 5318123 - DNA, 25 bp, Homo sapien
tatgccatataaactcatctctcag

SEQ ID NO: 5318124 - DNA, 25 bp, Homo sapien
ccaggacctccacagttcactcctg

SEQ ID NO: 5318125 - DNA, 25 bp, Homo sapien
ctgtgagacagcctgttacatgctg

SEQ ID NO: 5318126 - DNA, 25 bp, Homo sapien
tgttacatgctggcataggccaggc

SEQ ID NO: 5318127 - DNA, 25 bp, Homo sapien
gatggggcacaggtctttgagttct

SEQ ID NO: 5318128 - DNA, 25 bp, Homo sapien
ccagtttggttggaacaccagtgcc

SEQ ID NO: 5318129 - DNA, 25 bp, Homo sapien
aaggtttagctgagccagtttggtt

SEQ ID NO: 5318130 - DNA, 25 bp, Homo sapien
ggcagcccttggaagagaggatact

SEQ ID NO: 5318131 - DNA, 25 bp, Homo sapien
tgttaaccttcggaatgtgcatgaa

SEQ ID NO: 5318132 - DNA, 25 bp, Homo sapien
aaccactgggccataccttctgtag

SEQ ID NO: 5318133 - DNA, 25 bp, Homo sapien
gacaagaccagcaagattaccattg

SEQ ID NO: 5318134 - DNA, 25 bp, Homo sapien
ccttcacatcttgctggattgcaga

SEQ ID NO: 5318135 - DNA, 25 bp, Homo sapien
cataggctggcaatatcctgtatct

SEQ ID NO: 5318136 - DNA, 25 bp, Homo sapien
tgccagctatagaagcagcaccttc

SEQ ID NO: 5318137 - DNA, 25 bp, Homo sapien
aggattctgccagctatagaagcag

SEQ ID NO: 5318138 - DNA, 25 bp, Homo sapien
ttcctgccggctcttacctgcccaa

SEQ ID NO: 5318139 - DNA, 25 bp, Homo sapien
gccggctcttacctgcccaattctg

SEQ ID NO: 5318140 - DNA, 25 bp, Homo sapien
gaatcctccaccccttctcgaacac

SEQ ID NO: 5318141 - DNA, 25 bp, Homo sapien
tcctctgtatagtgctgaatcctcc

SEQ ID NO: 5318142 - DNA, 25 bp, Homo sapien
gtcctctgtatagtgctgaatcctc

SEQ ID NO: 5318143 - DNA, 25 bp, Homo sapien
ctccaccccttctcgaacacagcac

SEQ ID NO: 5318144 - DNA, 25 bp, Homo sapien
gtgtagttttgacagcactagcagc

SEQ ID NO: 5318145 - DNA, 25 bp, Homo sapien
ctagcaggtgtagtaaaaggatgcc

SEQ ID NO: 5318146 - DNA, 25 bp, Homo sapien
gttttgacagcactagcagcttccc

SEQ ID NO: 5318147 - DNA, 25 bp, Homo sapien
ccagttggctgcctagcaggtgtag

SEQ ID NO: 5318148 - DNA, 25 bp, Homo sapien
tggcatggccttaaattggatttct

SEQ ID NO: 5318149 - DNA, 25 bp, Homo sapien
gcatggccttaaattggatttctcc

SEQ ID NO: 5318150 - DNA, 25 bp, Homo sapien
catggccttaaattggatttctcct

SEQ ID NO: 5318151 - DNA, 25 bp, Homo sapien
ggcatggccttaaattggatttctc

SEQ ID NO: 5318152 - DNA, 25 bp, Homo sapien
ctgagggattttatcaccgccaggt

SEQ ID NO: 5318153 - DNA, 25 bp, Homo sapien
gggattttatcaccgccaggtctgc

SEQ ID NO: 5318154 - DNA, 25 bp, Homo sapien
agaaactgctccaactaatgtgtaa

SEQ ID NO: 5318155 - DNA, 25 bp, Homo sapien
aagaaactgctccaactaatgtgta

SEQ ID NO: 5318156 - DNA, 25 bp, Homo sapien
tctgatattcccatgttcgttgatg

SEQ ID NO: 5318157 - DNA, 25 bp, Homo sapien
taagaacccatacgcctcaatttta

SEQ ID NO: 5318158 - DNA, 25 bp, Homo sapien
tcatgcgtaagaacccatacgcctc

SEQ ID NO: 5318159 - DNA, 25 bp, Homo sapien
ccatgttcgttgatgcctcatttgc

SEQ ID NO: 5318160 - DNA, 25 bp, Homo sapien
ctaggcaagtagaaaagagactgga

SEQ ID NO: 5318161 - DNA, 25 bp, Homo sapien
gactggagcaaaggaaatcctcttc

SEQ ID NO: 5318162 - DNA, 25 bp, Homo sapien
ggcaagtagaaaagagactggagca

SEQ ID NO: 5318163 - DNA, 25 bp, Homo sapien
agcaaaggaaatcctcttcccagcc

SEQ ID NO: 5318164 - DNA, 25 bp, Homo sapien
cagtacacgtgactctgcttcctcc

SEQ ID NO: 5318165 - DNA, 25 bp, Homo sapien
tacacgtgactctgcttcctccatt

SEQ ID NO: 5318166 - DNA, 25 bp, Homo sapien
acgtgactctgcttcctccatttac

SEQ ID NO: 5318167 - DNA, 25 bp, Homo sapien
gtacacgtgactctgcttcctccat

SEQ ID NO: 5318168 - DNA, 25 bp, Homo sapien
tttccactagtgccacaggatagaa

SEQ ID NO: 5318169 - DNA, 25 bp, Homo sapien
gaccctgtagtagttcttgtgcatc

SEQ ID NO: 5318170 - DNA, 25 bp, Homo sapien
gaatgattgaagcaaatatcctctt

SEQ ID NO: 5318171 - DNA, 25 bp, Homo sapien
gccacaaaccctgtagtagctattg

SEQ ID NO: 5318172 - DNA, 25 bp, Homo sapien
tttattttggaaccagaaccacaca

SEQ ID NO: 5318173 - DNA, 25 bp, Homo sapien
ttattttggaaccagaaccacacat

SEQ ID NO: 5318174 - DNA, 25 bp, Homo sapien
ccaactctggagcaatctgagtgat

SEQ ID NO: 5318175 - DNA, 25 bp, Homo sapien
tcccatgaagaaggttgaccgcctc

SEQ ID NO: 5318176 - DNA, 25 bp, Homo sapien
tgttctggttttctcggtagtccca

SEQ ID NO: 5318177 - DNA, 25 bp, Homo sapien
tctgagtgatctccaatcatatctt

SEQ ID NO: 5318178 - DNA, 25 bp, Homo sapien
gagtattagaagagatcaacgatgc

SEQ ID NO: 5318179 - DNA, 25 bp, Homo sapien
tagaagagatcaacgatgcagggat

SEQ ID NO: 5318180 - DNA, 25 bp, Homo sapien
tctttaggagtattagaagagatca

SEQ ID NO: 5318181 - DNA, 25 bp, Homo sapien
agagatcaacgatgcagggatggcc

SEQ ID NO: 5318182 - DNA, 25 bp, Homo sapien
gtcttatttccctgttctttgtcta

SEQ ID NO: 5318183 - DNA, 25 bp, Homo sapien
caaacaaggtgttcttctccaaaag

SEQ ID NO: 5318184 - DNA, 25 bp, Homo sapien
tacaaacaaggtgttcttctccaaa

SEQ ID NO: 5318185 - DNA, 25 bp, Homo sapien
tactgtctgtcctgaagtcttattt

SEQ ID NO: 5318186 - DNA, 25 bp, Homo sapien
tataattcatccaggagtgccagtc

SEQ ID NO: 5318187 - DNA, 25 bp, Homo sapien
gcgctaatagtcctagagccccagg

SEQ ID NO: 5318188 - DNA, 25 bp, Homo sapien
tagaaacacgctgactgaaagggac

SEQ ID NO: 5318189 - DNA, 25 bp, Homo sapien
cattgctgagcgtgcatacaagaca

SEQ ID NO: 5318190 - DNA, 25 bp, Homo sapien
tagagttggatgtgcttctacagga

SEQ ID NO: 5318191 - DNA, 25 bp, Homo sapien
gcagagctgtgttcacttgcccatg

SEQ ID NO: 5318192 - DNA, 25 bp, Homo sapien
ccatgttcggcgtgtgtgacaagta

SEQ ID NO: 5318193 - DNA, 25 bp, Homo sapien
tgtccaggcaaatcttcacagcatg

SEQ ID NO: 5318194 - DNA, 25 bp, Homo sapien
gggagacaatacgtttgtttataga

SEQ ID NO: 5318195 - DNA, 25 bp, Homo sapien
tctggggagacaatacgtttgttta

SEQ ID NO: 5318196 - DNA, 25 bp, Homo sapien
gagacaatacgtttgtttatagaaa

SEQ ID NO: 5318197 - DNA, 25 bp, Homo sapien
aggtgtctggggagacaatacgttt

SEQ ID NO: 5318198 - DNA, 25 bp, Homo sapien
cagtcttaagaacctttacatcttc

SEQ ID NO: 5318199 - DNA, 25 bp, Homo sapien
tttcagtcttaagaacctttacatc

SEQ ID NO: 5318200 - DNA, 25 bp, Homo sapien
ttaagaacctttacatcttcttcac

SEQ ID NO: 5318201 - DNA, 25 bp, Homo sapien
agtcttaagaacctttacatcttct

SEQ ID NO: 5318202 - DNA, 25 bp, Homo sapien
catctggatcatcataagcatctct

SEQ ID NO: 5318203 - DNA, 25 bp, Homo sapien
atctggatcatcataagcatctctt

SEQ ID NO: 5318204 - DNA, 25 bp, Homo sapien
ccagctctcgtaaggaatccagaag

SEQ ID NO: 5318205 - DNA, 25 bp, Homo sapien
ttagagccctccagctctcgtaagg

SEQ ID NO: 5318206 - DNA, 25 bp, Homo sapien
cctccagctctcgtaaggaatccag

SEQ ID NO: 5318207 - DNA, 25 bp, Homo sapien
ctaagttgacaccgcggcctgggat

SEQ ID NO: 5318208 - DNA, 25 bp, Homo sapien
ccagtaactatgaaaagcctccgat

SEQ ID NO: 5318209 - DNA, 25 bp, Homo sapien
tcttagcttagctttggccacgccg

SEQ ID NO: 5318210 - DNA, 25 bp, Homo sapien
cagttcatttgcacaataggcttcc

SEQ ID NO: 5318211 - DNA, 25 bp, Homo sapien
tacgtcattccagagattatcctcg

SEQ ID NO: 5318212 - DNA, 25 bp, Homo sapien
cctgtcttcttacgccctttttcag

SEQ ID NO: 5318213 - DNA, 25 bp, Homo sapien
gtcttcttacgccctttttcagcat

SEQ ID NO: 5318214 - DNA, 25 bp, Homo sapien
tctctgctcatattccctgtcttct

SEQ ID NO: 5318215 - DNA, 25 bp, Homo sapien
tgtcttcttacgccctttttcagca

SEQ ID NO: 5318216 - DNA, 25 bp, Homo sapien
cctggagtccattatctctggctga

SEQ ID NO: 5318217 - DNA, 25 bp, Homo sapien
tgctgccaacttgctctgaggaatt

SEQ ID NO: 5318218 - DNA, 25 bp, Homo sapien
cagagactgccttgaaaatagtgat

SEQ ID NO: 5318219 - DNA, 25 bp, Homo sapien
caagcctgaaggaataccgtccaat

SEQ ID NO: 5318220 - DNA, 25 bp, Homo sapien
ctcagagactgccttgaaaatagtg

SEQ ID NO: 5318221 - DNA, 25 bp, Homo sapien
gaataccgtccaattattgcttcct

SEQ ID NO: 5318222 - DNA, 25 bp, Homo sapien
gcagtcatcacagttaacactacca

SEQ ID NO: 5318223 - DNA, 25 bp, Homo sapien
catttggtgggtgatataacttcta

SEQ ID NO: 5318224 - DNA, 25 bp, Homo sapien
aaaaaatatttcagtagtagcaagg

SEQ ID NO: 5318225 - DNA, 25 bp, Homo sapien
ccagcaagtgtataagcagtcatca

SEQ ID NO: 5318226 - DNA, 25 bp, Homo sapien
cttcccttttgtggaatttatacat

SEQ ID NO: 5318227 - DNA, 25 bp, Homo sapien
ttatcttgatgtcttcccttttgtg

SEQ ID NO: 5318228 - DNA, 25 bp, Homo sapien
gatgtcttcccttttgtggaattta

SEQ ID NO: 5318229 - DNA, 25 bp, Homo sapien
tatcttgatgtcttcccttttgtgg

SEQ ID NO: 5318230 - DNA, 25 bp, Homo sapien
tctgcatactccaatccccagttgt

SEQ ID NO: 5318231 - DNA, 25 bp, Homo sapien
tcctctctgcatactccaatcccca

SEQ ID NO: 5318232 - DNA, 25 bp, Homo sapien
atccccagttgtcccgcagaactga

SEQ ID NO: 5318233 - DNA, 25 bp, Homo sapien
gaggaaggctctgatatcccagaat

SEQ ID NO: 5318234 - DNA, 25 bp, Homo sapien
tgccgctcctggtctccgttttctt

SEQ ID NO: 5318235 - DNA, 25 bp, Homo sapien
tctgtataagcaattagctaatgca

SEQ ID NO: 5318236 - DNA, 25 bp, Homo sapien
gcaattagctaatgcaggaaagtaa

SEQ ID NO: 5318237 - DNA, 25 bp, Homo sapien
agctgccgctcctggtctccgtttt

SEQ ID NO: 5318238 - DNA, 25 bp, Homo sapien
aatggagcaattagtcaagggtctc

SEQ ID NO: 5318239 - DNA, 25 bp, Homo sapien
aataatggagcaattagtcaagggt

SEQ ID NO: 5318240 - DNA, 25 bp, Homo sapien
gcaattagtcaagggtctcagagac

SEQ ID NO: 5318241 - DNA, 25 bp, Homo sapien
ggagcaattagtcaagggtctcaga

SEQ ID NO: 5318242 - DNA, 25 bp, Homo sapien
cacagtttggcacttccatttggga

SEQ ID NO: 5318243 - DNA, 25 bp, Homo sapien
tctggaagccatgatatccctgggt

SEQ ID NO: 5318244 - DNA, 25 bp, Homo sapien
tccctgggtcagaaataaaggacta

SEQ ID NO: 5318245 - DNA, 25 bp, Homo sapien
tccttgtttagcttaagaggctcca

SEQ ID NO: 5318246 - DNA, 25 bp, Homo sapien
ttaacaaaaatagatacaggatttg

SEQ ID NO: 5318247 - DNA, 25 bp, Homo sapien
taatgttcaatattctcctaatcta

SEQ ID NO: 5318248 - DNA, 25 bp, Homo sapien
gatgcaaacccaatctaatttgctg

SEQ ID NO: 5318249 - DNA, 25 bp, Homo sapien
tttgcatgttacctacgaatgctga

SEQ ID NO: 5318250 - DNA, 25 bp, Homo sapien
caaagtagtcacagagctcaatagg

SEQ ID NO: 5318251 - DNA, 25 bp, Homo sapien
ggtttataggatatcctggcccagc

SEQ ID NO: 5318252 - DNA, 25 bp, Homo sapien
aatggctaaaatactggactctctg

SEQ ID NO: 5318253 - DNA, 25 bp, Homo sapien
ccagtaggaacccatggacttaatt

SEQ ID NO: 5318254 - DNA, 25 bp, Homo sapien
gtttatgatctgatatacatgtaca

SEQ ID NO: 5318255 - DNA, 25 bp, Homo sapien
aatcaagctaattcaagctaattaa

SEQ ID NO: 5318256 - DNA, 25 bp, Homo sapien
tatacattacttcacatcattgcaa

SEQ ID NO: 5318257 - DNA, 25 bp, Homo sapien
taagatatacaagtttatgatctga

SEQ ID NO: 5318258 - DNA, 25 bp, Homo sapien
aattcaaaactaagtgcagggaagt

SEQ ID NO: 5318259 - DNA, 25 bp, Homo sapien
gaagtcgagctcaaatgaagggatc

SEQ ID NO: 5318260 - DNA, 25 bp, Homo sapien
taagtgcagggaagtcgagctcaaa

SEQ ID NO: 5318261 - DNA, 25 bp, Homo sapien
tactattggacaggggaaaaattca

SEQ ID NO: 5318262 - DNA, 25 bp, Homo sapien
tcaatcaagaccaccctaaaagtgg

SEQ ID NO: 5318263 - DNA, 25 bp, Homo sapien
aaagctaagtaagcatcttgtgagc

SEQ ID NO: 5318264 - DNA, 25 bp, Homo sapien
gtcaggtacccagccactagatggg

SEQ ID NO: 5318265 - DNA, 25 bp, Homo sapien
tgaaagacatgcacttacgataact

SEQ ID NO: 5318266 - DNA, 25 bp, Homo sapien
acataggtatacatgcaccatggta

SEQ ID NO: 5318267 - DNA, 25 bp, Homo sapien
taggtatacatgcaccatggtagtt

SEQ ID NO: 5318268 - DNA, 25 bp, Homo sapien
gtatacatgcaccatggtagtttgc

SEQ ID NO: 5318269 - DNA, 25 bp, Homo sapien
tatacatgcaccatggtagtttgct

SEQ ID NO: 5318270 - DNA, 25 bp, Homo sapien
attagcaggaaaggttggagtaaat

SEQ ID NO: 5318271 - DNA, 25 bp, Homo sapien
aataaacctggaattagcaggaaag

SEQ ID NO: 5318272 - DNA, 25 bp, Homo sapien
aaaatgtgtagcagttcctcttgca

SEQ ID NO: 5318273 - DNA, 25 bp, Homo sapien
gtgtaaaatgtgtagcagttcctct

SEQ ID NO: 5318274 - DNA, 25 bp, Homo sapien
ccagagccaaaggagcctgaatttt

SEQ ID NO: 5318275 - DNA, 25 bp, Homo sapien
ttgacattaatgacaataaccataa

SEQ ID NO: 5318276 - DNA, 25 bp, Homo sapien
tctatgaaataagtccccagagcca

SEQ ID NO: 5318277 - DNA, 25 bp, Homo sapien
cattttgacatctatgaaataagtc

SEQ ID NO: 5318278 - DNA, 25 bp, Homo sapien
caaatcgttgccaaggtcaaattgt

SEQ ID NO: 5318279 - DNA, 25 bp, Homo sapien
gcctatgcttttgggatcacagtca

SEQ ID NO: 5318280 - DNA, 25 bp, Homo sapien
gattttctatcctattcctccattg

SEQ ID NO: 5318281 - DNA, 25 bp, Homo sapien
aagccccttcttctaaggttctcag

SEQ ID NO: 5318282 - DNA, 25 bp, Homo sapien
cgtttttccaattcagagtgttctg

SEQ ID NO: 5318283 - DNA, 25 bp, Homo sapien
gagcgtttttccaattcagagtgtt

SEQ ID NO: 5318284 - DNA, 25 bp, Homo sapien
tctagagcgtttttccaattcagag

SEQ ID NO: 5318285 - DNA, 25 bp, Homo sapien
acttctagagcgtttttccaattca

SEQ ID NO: 5318286 - DNA, 25 bp, Homo sapien
gcagttgtacgggtctagtaggaat

SEQ ID NO: 5318287 - DNA, 25 bp, Homo sapien
gtggccggagagagtaatgtcagaa

SEQ ID NO: 5318288 - DNA, 25 bp, Homo sapien
tagtaggaatatatctgaatccctc

SEQ ID NO: 5318289 - DNA, 25 bp, Homo sapien
tccacaaagggtggccggagagagt

SEQ ID NO: 5318290 - DNA, 25 bp, Homo sapien
gctaccaaaatctggcccatcaaag

SEQ ID NO: 5318291 - DNA, 25 bp, Homo sapien
tcagatacaaaggatgctgctacca

SEQ ID NO: 5318292 - DNA, 25 bp, Homo sapien
tacaaaggatgctgctaccaaaatc

SEQ ID NO: 5318293 - DNA, 25 bp, Homo sapien
gatgctgctaccaaaatctggccca

SEQ ID NO: 5318294 - DNA, 25 bp, Homo sapien
cagctccacgatgattcccttctgg

SEQ ID NO: 5318295 - DNA, 25 bp, Homo sapien
gccccaatcacgtctaatgtgtata

SEQ ID NO: 5318296 - DNA, 25 bp, Homo sapien
gatgattcccttctggctctatcac

SEQ ID NO: 5318297 - DNA, 25 bp, Homo sapien
tcttagcaggtctgtcacctcagct

SEQ ID NO: 5318298 - DNA, 25 bp, Homo sapien
gcagtcatttgtgtgtccggtaagc

SEQ ID NO: 5318299 - DNA, 25 bp, Homo sapien
ctttcaattcgggagcagtcatttg

SEQ ID NO: 5318300 - DNA, 25 bp, Homo sapien
tgtgtgtccggtaagcttttgcaca

SEQ ID NO: 5318301 - DNA, 25 bp, Homo sapien
tcgggagcagtcatttgtgtgtccg

SEQ ID NO: 5318302 - DNA, 25 bp, Homo sapien
aatttgttgcatatagggtttgtaa

SEQ ID NO: 5318303 - DNA, 25 bp, Homo sapien
ttccataattggatttttgcttact

SEQ ID NO: 5318304 - DNA, 25 bp, Homo sapien
ctttttgagaagttacttctttgtg

SEQ ID NO: 5318305 - DNA, 25 bp, Homo sapien
cctttatatagtctacatcttagta

SEQ ID NO: 5318306 - DNA, 25 bp, Homo sapien
gctgacattctccttctctcacatc

SEQ ID NO: 5318307 - DNA, 25 bp, Homo sapien
agcagctgctgctgacattctcctt

SEQ ID NO: 5318308 - DNA, 25 bp, Homo sapien
agctgctgctgacattctccttctc

SEQ ID NO: 5318309 - DNA, 25 bp, Homo sapien
gctgctgacattctccttctctcac

SEQ ID NO: 5318310 - DNA, 25 bp, Homo sapien
tctgctggaggccttggaacacatc

SEQ ID NO: 5318311 - DNA, 25 bp, Homo sapien
actgtaatatgtttgacactttgca

SEQ ID NO: 5318312 - DNA, 25 bp, Homo sapien
gttcagtactatccacacttatagg

SEQ ID NO: 5318313 - DNA, 25 bp, Homo sapien
cacatccaccatggatgaaggcagg

SEQ ID NO: 5318314 - DNA, 25 bp, Homo sapien
tagaaattagcaactcagggctgaa

SEQ ID NO: 5318315 - DNA, 25 bp, Homo sapien
aatgatgttgctcaaatatctgacc

SEQ ID NO: 5318316 - DNA, 25 bp, Homo sapien
gggctgaactcctaggaaccctcat

SEQ ID NO: 5318317 - DNA, 25 bp, Homo sapien
tcacaaaccagcttaacggcttaat

SEQ ID NO: 5318318 - DNA, 25 bp, Homo sapien
atttcattcatattatctcgtattc

SEQ ID NO: 5318319 - DNA, 25 bp, Homo sapien
ttcctcttcggagtaattccgaaca

SEQ ID NO: 5318320 - DNA, 25 bp, Homo sapien
taattccgaacatggtttcaagatg

SEQ ID NO: 5318321 - DNA, 25 bp, Homo sapien
ccgaacatggtttcaagatgactgc

SEQ ID NO: 5318322 - DNA, 25 bp, Homo sapien
tgaaatatctgtttaaaacagccat

SEQ ID NO: 5318323 - DNA, 25 bp, Homo sapien
tcagggtaagttgccattatctctt

SEQ ID NO: 5318324 - DNA, 25 bp, Homo sapien
tcaaaatgtgtaatcagggtaagtt

SEQ ID NO: 5318325 - DNA, 25 bp, Homo sapien
cagcttgcagttaatcaatttattg

SEQ ID NO: 5318326 - DNA, 25 bp, Homo sapien
aaatgcattgtccaacataatgcat

SEQ ID NO: 5318327 - DNA, 25 bp, Homo sapien
tggcaaatgcattgtccaacataat

SEQ ID NO: 5318328 - DNA, 25 bp, Homo sapien
ttggcaaatgcattgtccaacataa

SEQ ID NO: 5318329 - DNA, 25 bp, Homo sapien
gcaaatgcattgtccaacataatgc

SEQ ID NO: 5318330 - DNA, 25 bp, Homo sapien
tgtttgtatagatgtgaaggcctct

SEQ ID NO: 5318331 - DNA, 25 bp, Homo sapien
tgttagcactacaggactcctctcc

SEQ ID NO: 5318332 - DNA, 25 bp, Homo sapien
tcctatgatcccacagtgacatgaa

SEQ ID NO: 5318333 - DNA, 25 bp, Homo sapien
tactgggatatatgttagcactaca

SEQ ID NO: 5318334 - DNA, 25 bp, Homo sapien
ccgatcattggagtagcctttattc

SEQ ID NO: 5318335 - DNA, 25 bp, Homo sapien
ggccaaatccagttaactcatcctc

SEQ ID NO: 5318336 - DNA, 25 bp, Homo sapien
acagcatccatacttctaaaccgat

SEQ ID NO: 5318337 - DNA, 25 bp, Homo sapien
aatccagttaactcatcctcataca

SEQ ID NO: 5318338 - DNA, 25 bp, Homo sapien
tgtatgtccataactcccaaattca

SEQ ID NO: 5318339 - DNA, 25 bp, Homo sapien
ggcgttcatgtacctagaggctcag

SEQ ID NO: 5318340 - DNA, 25 bp, Homo sapien
gtcttcagtcattcccatggtagtc

SEQ ID NO: 5318341 - DNA, 25 bp, Homo sapien
gaggctcagctcttggttattcttc

SEQ ID NO: 5318342 - DNA, 25 bp, Homo sapien
ggatctgaaattgtggcaataatca

SEQ ID NO: 5318343 - DNA, 25 bp, Homo sapien
aatcaatagcttaccaacaaaaaag

SEQ ID NO: 5318344 - DNA, 25 bp, Homo sapien
tatacacaaaccaataaatgtaatc

SEQ ID NO: 5318345 - DNA, 25 bp, Homo sapien
ggctggttcaatatacacaaaccaa

SEQ ID NO: 5318346 - DNA, 25 bp, Homo sapien
gatgctgccttactaaccaggtaga

SEQ ID NO: 5318347 - DNA, 25 bp, Homo sapien
tctgttatcactggaccagggtgga

SEQ ID NO: 5318348 - DNA, 25 bp, Homo sapien
caccacggcaaggaaagttgtcggg

SEQ ID NO: 5318349 - DNA, 25 bp, Homo sapien
tacttggcgtctgacctccactgaa

SEQ ID NO: 5318350 - DNA, 25 bp, Homo sapien
gatagctccccggacagatggagag

SEQ ID NO: 5318351 - DNA, 25 bp, Homo sapien
ttacaaccccatagaagtggaaatg

SEQ ID NO: 5318352 - DNA, 25 bp, Homo sapien
tgttgaagtgcctcattacaacccc

SEQ ID NO: 5318353 - DNA, 25 bp, Homo sapien
tgacaccaaagggagtaggacttta

SEQ ID NO: 5318354 - DNA, 25 bp, Homo sapien
tggtatcaggatcttaatagctccc

SEQ ID NO: 5318355 - DNA, 25 bp, Homo sapien
tggtaatagctcatgcactgatgcg

SEQ ID NO: 5318356 - DNA, 25 bp, Homo sapien
tattcattagggaagttgcccaagc

SEQ ID NO: 5318357 - DNA, 25 bp, Homo sapien
cactgggactacgtgggcagcttta

SEQ ID NO: 5318358 - DNA, 25 bp, Homo sapien
gttgacatggataacggcttccact

SEQ ID NO: 5318359 - DNA, 25 bp, Homo sapien
ggttcaatgttgacatggataacgg

SEQ ID NO: 5318360 - DNA, 25 bp, Homo sapien
catggataacggcttccactaactt

SEQ ID NO: 5318361 - DNA, 25 bp, Homo sapien
tcaatgttgacatggataacggctt

SEQ ID NO: 5318362 - DNA, 25 bp, Homo sapien
aacagggatacttctgcttcatgga

SEQ ID NO: 5318363 - DNA, 25 bp, Homo sapien
tctcagacatgcctgaagttgtggg

SEQ ID NO: 5318364 - DNA, 25 bp, Homo sapien
caagttcctcaagtgggttcctggg

SEQ ID NO: 5318365 - DNA, 25 bp, Homo sapien
gcttcatggatccaggtgtctccta

SEQ ID NO: 5318366 - DNA, 25 bp, Homo sapien
gacattgaggccagttgtgctatgg

SEQ ID NO: 5318367 - DNA, 25 bp, Homo sapien
tcccatcttgggattgtagaataaa

SEQ ID NO: 5318368 - DNA, 25 bp, Homo sapien
tgtggatttcttgggctgtacagac

SEQ ID NO: 5318369 - DNA, 25 bp, Homo sapien
tctgaagtgagcagcttatttggct

SEQ ID NO: 5318370 - DNA, 25 bp, Homo sapien
ggaataatgaagtcgttatccagca

SEQ ID NO: 5318371 - DNA, 25 bp, Homo sapien
ctggaataatgaagtcgttatccag

SEQ ID NO: 5318372 - DNA, 25 bp, Homo sapien
tggaataatgaagtcgttatccagc

SEQ ID NO: 5318373 - DNA, 25 bp, Homo sapien
gaataatgaagtcgttatccagcat

SEQ ID NO: 5318374 - DNA, 25 bp, Homo sapien
gttgttaactggtcccacaacatcc

SEQ ID NO: 5318375 - DNA, 25 bp, Homo sapien
tgttaactggtcccacaacatcctc

SEQ ID NO: 5318376 - DNA, 25 bp, Homo sapien
caaccagttgttaactggtcccaca

SEQ ID NO: 5318377 - DNA, 25 bp, Homo sapien
ttgttaactggtcccacaacatcct

SEQ ID NO: 5318378 - DNA, 25 bp, Homo sapien
gctcaaatcaacattcactgcacat

SEQ ID NO: 5318379 - DNA, 25 bp, Homo sapien
cctggttttaatgacaccagcaggg

SEQ ID NO: 5318380 - DNA, 25 bp, Homo sapien
tcggcagatgaagatatcaaggact

SEQ ID NO: 5318381 - DNA, 25 bp, Homo sapien
gtgtaaagccaagccgtgccaaaga

SEQ ID NO: 5318382 - DNA, 25 bp, Homo sapien
tacagctgtggggcttgagtgggac

SEQ ID NO: 5318383 - DNA, 25 bp, Homo sapien
ctacagctgtggggcttgagtggga

SEQ ID NO: 5318384 - DNA, 25 bp, Homo sapien
taatatcattgtacacaagataatg

SEQ ID NO: 5318385 - DNA, 25 bp, Homo sapien
atatcattgtacacaagataatggc

SEQ ID NO: 5318386 - DNA, 25 bp, Homo sapien
gataatggcattcaaatacatccat

SEQ ID NO: 5318387 - DNA, 25 bp, Homo sapien
agataatggcattcaaatacatcca

SEQ ID NO: 5318388 - DNA, 25 bp, Homo sapien
acggcgccaggcacctaggagctgt

SEQ ID NO: 5318389 - DNA, 25 bp, Homo sapien
tacgctgcatgcataaaacggcgcc

SEQ ID NO: 5318390 - DNA, 25 bp, Homo sapien
gcacttcaagtaaagacattacgct

SEQ ID NO: 5318391 - DNA, 25 bp, Homo sapien
taacattgatcgatgtgcctgccaa

SEQ ID NO: 5318392 - DNA, 25 bp, Homo sapien
gagagaggggcgtaggagagagagc

SEQ ID NO: 5318393 - DNA, 25 bp, Homo sapien
gaacgaccgagccagcaagagggca

SEQ ID NO: 5318394 - DNA, 25 bp, Homo sapien
acgaccgagccagcaagagggcact

SEQ ID NO: 5318395 - DNA, 25 bp, Homo sapien
ggagtgagggaacgaccgagccagc

SEQ ID NO: 5318396 - DNA, 25 bp, Homo sapien
acaggaccatttggcggaaacgtgg

SEQ ID NO: 5318397 - DNA, 25 bp, Homo sapien
tggtgaataacgctgagagctgtgc

SEQ ID NO: 5318398 - DNA, 25 bp, Homo sapien
tccagcccatacaaggcgaggagac

SEQ ID NO: 5318399 - DNA, 25 bp, Homo sapien
tgtgcctcgagagttcagacccgac

SEQ ID NO: 5318400 - DNA, 25 bp, Homo sapien
tatcttgattaatgttgctgatttc

SEQ ID NO: 5318401 - DNA, 25 bp, Homo sapien
aattttatcttgattaatgttgctg

SEQ ID NO: 5318402 - DNA, 25 bp, Homo sapien
tgattaatgttgctgatttctcttc

SEQ ID NO: 5318403 - DNA, 25 bp, Homo sapien
caactgataattttatcttgattaa

SEQ ID NO: 5318404 - DNA, 25 bp, Homo sapien
aagggcttccccattaaatgctcgg

SEQ ID NO: 5318405 - DNA, 25 bp, Homo sapien
ccagggtcccagtgaaatttcacag

SEQ ID NO: 5318406 - DNA, 25 bp, Homo sapien
ctgatgacagtgaaaaactaggagc

SEQ ID NO: 5318407 - DNA, 25 bp, Homo sapien
tctgacacatggatagctcttggta

SEQ ID NO: 5318408 - DNA, 25 bp, Homo sapien
tgcactgcatcccaggtggcagagg

SEQ ID NO: 5318409 - DNA, 25 bp, Homo sapien
caggccactgcactgcatcccaggt

SEQ ID NO: 5318410 - DNA, 25 bp, Homo sapien
cactgcactgcatcccaggtggcag

SEQ ID NO: 5318411 - DNA, 25 bp, Homo sapien
ctgtggtcaggccactgcactgcat

SEQ ID NO: 5318412 - DNA, 25 bp, Homo sapien
gaaaatgactcttgttggtactcca

SEQ ID NO: 5318413 - DNA, 25 bp, Homo sapien
gggctcacaatccaagaaattcttc

SEQ ID NO: 5318414 - DNA, 25 bp, Homo sapien
taatatatacccttgaactgggcaa

SEQ ID NO: 5318415 - DNA, 25 bp, Homo sapien
taagaggacatatccatctccccag

SEQ ID NO: 5318416 - DNA, 25 bp, Homo sapien
gcttcaaacacaggcgccagcttca

SEQ ID NO: 5318417 - DNA, 25 bp, Homo sapien
ctcagcaacatcaaatgccgcagct

SEQ ID NO: 5318418 - DNA, 25 bp, Homo sapien
cgtctaacaatattaaagtctgtct

SEQ ID NO: 5318419 - DNA, 25 bp, Homo sapien
caaatttacaaacgtcctcagcaac

SEQ ID NO: 5318420 - DNA, 25 bp, Homo sapien
taccccagccatttgcttctacttt

SEQ ID NO: 5318421 - DNA, 25 bp, Homo sapien
tgttttaccccagccatttgcttct

SEQ ID NO: 5318422 - DNA, 25 bp, Homo sapien
tgtgttttaccccagccatttgctt

SEQ ID NO: 5318423 - DNA, 25 bp, Homo sapien
ttttaccccagccatttgcttctac

SEQ ID NO: 5318424 - DNA, 25 bp, Homo sapien
gattacagtacctggttagagcaca

SEQ ID NO: 5318425 - DNA, 25 bp, Homo sapien
cagagcttactggaattcaaggtta

SEQ ID NO: 5318426 - DNA, 25 bp, Homo sapien
aaatattattggcagagtgacatca

SEQ ID NO: 5318427 - DNA, 25 bp, Homo sapien
caagagctaggaaatccaggtgaga

SEQ ID NO: 5318428 - DNA, 25 bp, Homo sapien
gagttctcctctgcgactgacaaca

SEQ ID NO: 5318429 - DNA, 25 bp, Homo sapien
tgtgtggatcttgcccaacaaaagc

SEQ ID NO: 5318430 - DNA, 25 bp, Homo sapien
tcttgttaatagagtaagcggccag

SEQ ID NO: 5318431 - DNA, 25 bp, Homo sapien
tggtagcggctgtaactcattcaac

SEQ ID NO: 5318432 - DNA, 25 bp, Homo sapien
gcctgaatctattccaagtgtcctt

SEQ ID NO: 5318433 - DNA, 25 bp, Homo sapien
ctcctcgctgccagcgtcgccagtg

SEQ ID NO: 5318434 - DNA, 25 bp, Homo sapien
ttgcattttaatgttgcctgaatct

SEQ ID NO: 5318435 - DNA, 25 bp, Homo sapien
tgccagcgtcgccagtgacgaagag

SEQ ID NO: 5318436 - DNA, 25 bp, Homo sapien
tatcattaaagctgtgtgaaaggga

SEQ ID NO: 5318437 - DNA, 25 bp, Homo sapien
cttatcattaaagctgtgtgaaagg

SEQ ID NO: 5318438 - DNA, 25 bp, Homo sapien
gcaggcagttgaatgccttttgccg

SEQ ID NO: 5318439 - DNA, 25 bp, Homo sapien
ttgccgactctgtcacttatcatta

SEQ ID NO: 5318440 - DNA, 25 bp, Homo sapien
tacttgacttgattggcaaaagtgt

SEQ ID NO: 5318441 - DNA, 25 bp, Homo sapien
atacttgacttgattggcaaaagtg

SEQ ID NO: 5318442 - DNA, 25 bp, Homo sapien
cctgcattctactgcactgtccaca

SEQ ID NO: 5318443 - DNA, 25 bp, Homo sapien
cagtgagcatcagcagcctgcattc

SEQ ID NO: 5318444 - DNA, 25 bp, Homo sapien
tcaggtttgtgtccagtgagcatca

SEQ ID NO: 5318445 - DNA, 25 bp, Homo sapien
agtttcttcaggtttgtgtccagtg

SEQ ID NO: 5318446 - DNA, 25 bp, Homo sapien
gaagagaggcacaaggacataaaca

SEQ ID NO: 5318447 - DNA, 25 bp, Homo sapien
agcaggtttgtgaagagaggcacaa

SEQ ID NO: 5318448 - DNA, 25 bp, Homo sapien
gcaggtttgtgaagagaggcacaag

SEQ ID NO: 5318449 - DNA, 25 bp, Homo sapien
tgtgaagagaggcacaaggacataa

SEQ ID NO: 5318450 - DNA, 25 bp, Homo sapien
aatacagcaggtgttctgacaagga

SEQ ID NO: 5318451 - DNA, 25 bp, Homo sapien
ttctgagcactcgaagtcacctcca

SEQ ID NO: 5318452 - DNA, 25 bp, Homo sapien
gacattttctaaggcttctgagcac

SEQ ID NO: 5318453 - DNA, 25 bp, Homo sapien
tcattagaggagagacgccgtggcc

SEQ ID NO: 5318454 - DNA, 25 bp, Homo sapien
catgatgaggaactgcatgcacgtt

SEQ ID NO: 5318455 - DNA, 25 bp, Homo sapien
taggaatacaatagttccctgtgcc

SEQ ID NO: 5318456 - DNA, 25 bp, Homo sapien
cagacactggatggtatagaatttc

SEQ ID NO: 5318457 - DNA, 25 bp, Homo sapien
ccctgtgccacaaaagactaagtca

SEQ ID NO: 5318458 - DNA, 25 bp, Homo sapien
gacttgttctgagagatgctctgac

SEQ ID NO: 5318459 - DNA, 25 bp, Homo sapien
gagtttcccaagctatatgtcccta

SEQ ID NO: 5318460 - DNA, 25 bp, Homo sapien
cattggcatattgaaagccttgaga

SEQ ID NO: 5318461 - DNA, 25 bp, Homo sapien
gagagtcacagttaacattggcata

SEQ ID NO: 5318462 - DNA, 25 bp, Homo sapien
tagaccaccagatttcaactaccca

SEQ ID NO: 5318463 - DNA, 25 bp, Homo sapien
gtaattaattccagcatgtgaagct

SEQ ID NO: 5318464 - DNA, 25 bp, Homo sapien
tataaagagagaggatttacaagtc

SEQ ID NO: 5318465 - DNA, 25 bp, Homo sapien
tggagacacatgtgcaacctgtgtt

SEQ ID NO: 5318466 - DNA, 25 bp, Homo sapien
attctggatgattatttcatttagc

SEQ ID NO: 5318467 - DNA, 25 bp, Homo sapien
cattctggatgattatttcatttag

SEQ ID NO: 5318468 - DNA, 25 bp, Homo sapien
gcattctggatgattatttcattta

SEQ ID NO: 5318469 - DNA, 25 bp, Homo sapien
ggccttgtagatgtgtttgaaagta

SEQ ID NO: 5318470 - DNA, 25 bp, Homo sapien
catcagaaatattggctggaagttt

SEQ ID NO: 5318471 - DNA, 25 bp, Homo sapien
atctatgtgatactaactgtgggtc

SEQ ID NO: 5318472 - DNA, 25 bp, Homo sapien
tgccattgggttgtaggcttttctt

SEQ ID NO: 5318473 - DNA, 25 bp, Homo sapien
atatcctgcagccattgaataaatt

SEQ ID NO: 5318474 - DNA, 25 bp, Homo sapien
tatagggtatctttgagaataatcc

SEQ ID NO: 5318475 - DNA, 25 bp, Homo sapien
tctgctaggtcatcttgttctatag

SEQ ID NO: 5318476 - DNA, 25 bp, Homo sapien
cattgtggctagagaaaatacctga

SEQ ID NO: 5318477 - DNA, 25 bp, Homo sapien
tgagatgctgaactaaatactttgg

SEQ ID NO: 5318478 - DNA, 25 bp, Homo sapien
aatactttggagaggaccatgggca

SEQ ID NO: 5318479 - DNA, 25 bp, Homo sapien
caaaatatatctagtcaatggagac

SEQ ID NO: 5318480 - DNA, 25 bp, Homo sapien
taggttactcccatctagtagctgg

SEQ ID NO: 5318481 - DNA, 25 bp, Homo sapien
caaacatgtattgatcctgctcaaa

SEQ ID NO: 5318482 - DNA, 25 bp, Homo sapien
ttacaccactttatttaagcctcca

SEQ ID NO: 5318483 - DNA, 25 bp, Homo sapien
cagaaacaactttacaccactttat

SEQ ID NO: 5318484 - DNA, 25 bp, Homo sapien
ggagccagttctcttagtttcattg

SEQ ID NO: 5318485 - DNA, 25 bp, Homo sapien
gaaattgataatacccataaggaaa

SEQ ID NO: 5318486 - DNA, 25 bp, Homo sapien
ggaaatgcaatgtcttctcctttga

SEQ ID NO: 5318487 - DNA, 25 bp, Homo sapien
ggtatgcctgtataaaggcagagag

SEQ ID NO: 5318488 - DNA, 25 bp, Homo sapien
tgctcaagctggtgttgcactacta

SEQ ID NO: 5318489 - DNA, 25 bp, Homo sapien
ggccatgataactttatgcaaatta

SEQ ID NO: 5318490 - DNA, 25 bp, Homo sapien
gtcgtgggatgatgcatatctgtta

SEQ ID NO: 5318491 - DNA, 25 bp, Homo sapien
cagatgtcgtgggatgatgcatatc

SEQ ID NO: 5318492 - DNA, 25 bp, Homo sapien
gataactttatgcaaattatagcca

SEQ ID NO: 5318493 - DNA, 25 bp, Homo sapien
tggtgaactgataggagagatactg

SEQ ID NO: 5318494 - DNA, 25 bp, Homo sapien
caggccttattggtgaactgatagg

SEQ ID NO: 5318495 - DNA, 25 bp, Homo sapien
gataggagagatactgtagctggca

SEQ ID NO: 5318496 - DNA, 25 bp, Homo sapien
ctgtagctggcagcgctgaattccc

SEQ ID NO: 5318497 - DNA, 25 bp, Homo sapien
gaaaacatagttttcggtggatgtg

SEQ ID NO: 5318498 - DNA, 25 bp, Homo sapien
acatagttttcggtggatgtgttcc

SEQ ID NO: 5318499 - DNA, 25 bp, Homo sapien
tagttttcggtggatgtgttcctca

SEQ ID NO: 5318500 - DNA, 25 bp, Homo sapien
tttcggtggatgtgttcctcatgtc

SEQ ID NO: 5318501 - DNA, 25 bp, Homo sapien
agcaggagcaaggctgagactgagc

SEQ ID NO: 5318502 - DNA, 25 bp, Homo sapien
ttgtgacttcagcaggagcaaggct

SEQ ID NO: 5318503 - DNA, 25 bp, Homo sapien
caggagcaaggctgagactgagcat

SEQ ID NO: 5318504 - DNA, 25 bp, Homo sapien
gtgacttcagcaggagcaaggctga

SEQ ID NO: 5318505 - DNA, 25 bp, Homo sapien
tgggtggatagatgccatctccttt

SEQ ID NO: 5318506 - DNA, 25 bp, Homo sapien
atgccatctcctttctgctggctca

SEQ ID NO: 5318507 - DNA, 25 bp, Homo sapien
gtggatagatgccatctcctttctg

SEQ ID NO: 5318508 - DNA, 25 bp, Homo sapien
tgccatctcctttctgctggctcat

SEQ ID NO: 5318509 - DNA, 25 bp, Homo sapien
tacttcaagaagttctaaggaaatg

SEQ ID NO: 5318510 - DNA, 25 bp, Homo sapien
aaaactgaggaaatcgcagaaacaa

SEQ ID NO: 5318511 - DNA, 25 bp, Homo sapien
ggagtaaaactaaagctgcatcaaa

SEQ ID NO: 5318512 - DNA, 25 bp, Homo sapien
tcaagaatttagaaacaatacttca

SEQ ID NO: 5318513 - DNA, 25 bp, Homo sapien
tgggtgccacatcactagagacatg

SEQ ID NO: 5318514 - DNA, 25 bp, Homo sapien
catgtgatccctcaggccaagtatc

SEQ ID NO: 5318515 - DNA, 25 bp, Homo sapien
aatgctttactttcgatttgcctca

SEQ ID NO: 5318516 - DNA, 25 bp, Homo sapien
gataacagaagacctaaaaagccag

SEQ ID NO: 5318517 - DNA, 25 bp, Homo sapien
tatggttgcttcaactgccagtcgg

SEQ ID NO: 5318518 - DNA, 25 bp, Homo sapien
tgaaaaactggattggtcacaggcc

SEQ ID NO: 5318519 - DNA, 25 bp, Homo sapien
cacattagggctcaagacacactgc

SEQ ID NO: 5318520 - DNA, 25 bp, Homo sapien
catcaggtgaaactagctggcctcc

SEQ ID NO: 5318521 - DNA, 25 bp, Homo sapien
gacacagttgttgaatagcccaaag

SEQ ID NO: 5318522 - DNA, 25 bp, Homo sapien
cacctgacgtgactaatctccttgg

SEQ ID NO: 5318523 - DNA, 25 bp, Homo sapien
ggtaacctgttgtgatgttgcccac

SEQ ID NO: 5318524 - DNA, 25 bp, Homo sapien
tctgggagtcccaagtggctgcagt

SEQ ID NO: 5318525 - DNA, 25 bp, Homo sapien
tgtaggggcaattttctccgctggg

SEQ ID NO: 5318526 - DNA, 25 bp, Homo sapien
tcacttttcccactatttgcatttc

SEQ ID NO: 5318527 - DNA, 25 bp, Homo sapien
tcccatccgcgcagattttgtaggg

SEQ ID NO: 5318528 - DNA, 25 bp, Homo sapien
tggccttctttcctgttatccaaca

SEQ ID NO: 5318529 - DNA, 25 bp, Homo sapien
gcaaacaaaccagatcacatgaatt

SEQ ID NO: 5318530 - DNA, 25 bp, Homo sapien
gctgatacttgataattacgtgaaa

SEQ ID NO: 5318531 - DNA, 25 bp, Homo sapien
tattaatgatagtaaagctagtctc

SEQ ID NO: 5318532 - DNA, 25 bp, Homo sapien
tatcctaaagtggaaagctcctatt

SEQ ID NO: 5318533 - DNA, 25 bp, Homo sapien
tcatgctatccatattgagtaccca

SEQ ID NO: 5318534 - DNA, 25 bp, Homo sapien
cctggacatagcacattaactgact

SEQ ID NO: 5318535 - DNA, 25 bp, Homo sapien
tgaaacccttaatcagtcagaacgt

SEQ ID NO: 5318536 - DNA, 25 bp, Homo sapien
tcacaattggctaccgaaacctaca

SEQ ID NO: 5318537 - DNA, 25 bp, Homo sapien
atcaatatagaagctttggagagga

SEQ ID NO: 5318538 - DNA, 25 bp, Homo sapien
aatcaatatagaagctttggagagg

SEQ ID NO: 5318539 - DNA, 25 bp, Homo sapien
aagaatcaatatagaagctttggag

SEQ ID NO: 5318540 - DNA, 25 bp, Homo sapien
ttaaagaatcaatatagaagctttg

SEQ ID NO: 5318541 - DNA, 25 bp, Homo sapien
aacagccctgattgatagtataacc

SEQ ID NO: 5318542 - DNA, 25 bp, Homo sapien
tataggagccttttaaacagcagaa

SEQ ID NO: 5318543 - DNA, 25 bp, Homo sapien
gaatccagggactaaatgccttgcc

SEQ ID NO: 5318544 - DNA, 25 bp, Homo sapien
cagattacccagtgactcagcaaaa

SEQ ID NO: 5318545 - DNA, 25 bp, Homo sapien
gactcaaacaatcccttaatctagg

SEQ ID NO: 5318546 - DNA, 25 bp, Homo sapien
gaggaattgaatgtggataaacaac

SEQ ID NO: 5318547 - DNA, 25 bp, Homo sapien
aaatgtgaccaacactacagtgttt

SEQ ID NO: 5318548 - DNA, 25 bp, Homo sapien
cctaggctttcaagtgaagaagtgc

SEQ ID NO: 5318549 - DNA, 25 bp, Homo sapien
tgcaaatactgcagttctctgggtg

SEQ ID NO: 5318550 - DNA, 25 bp, Homo sapien
ccagtctcccttaggataggataga

SEQ ID NO: 5318551 - DNA, 25 bp, Homo sapien
gattcattgtctagtgaggatccac

SEQ ID NO: 5318552 - DNA, 25 bp, Homo sapien
gacagcctaggctttgttccagtct

SEQ ID NO: 5318553 - DNA, 25 bp, Homo sapien
ccaactgcatgcttaggtcctgaaa

SEQ ID NO: 5318554 - DNA, 25 bp, Homo sapien
cccctgtagtggaagtagtaaagca

SEQ ID NO: 5318555 - DNA, 25 bp, Homo sapien
tgacccaaagcgacaagagaagcct

SEQ ID NO: 5318556 - DNA, 25 bp, Homo sapien
gctatgttccccagataagcatgta

SEQ ID NO: 5318557 - DNA, 25 bp, Homo sapien
cattaggtaagctatgtgtcaacag

SEQ ID NO: 5318558 - DNA, 25 bp, Homo sapien
gacaaagtgatggagcacatctgag

SEQ ID NO: 5318559 - DNA, 25 bp, Homo sapien
gttcgttcaagacccttagaggatg

SEQ ID NO: 5318560 - DNA, 25 bp, Homo sapien
caacagtagataccaaccaaaaggt

SEQ ID NO: 5318561 - DNA, 25 bp, Homo sapien
cagctcatgtttttggttactgcag

SEQ ID NO: 5318562 - DNA, 25 bp, Homo sapien
ttaaaaatcattcggccagctcctc

SEQ ID NO: 5318563 - DNA, 25 bp, Homo sapien
tctgcttaaaaatcattcggccagc

SEQ ID NO: 5318564 - DNA, 25 bp, Homo sapien
gcttaaaaatcattcggccagctcc

SEQ ID NO: 5318565 - DNA, 25 bp, Homo sapien
gctgctctaaagattcccctacaag

SEQ ID NO: 5318566 - DNA, 25 bp, Homo sapien
tcttgggtaaatatgcgaatgctgg

SEQ ID NO: 5318567 - DNA, 25 bp, Homo sapien
tactgttaggaagattttggctgca

SEQ ID NO: 5318568 - DNA, 25 bp, Homo sapien
tgatattcatccagcttgttgactg

SEQ ID NO: 5318569 - DNA, 25 bp, Homo sapien
agttcttgagaacagcaggccactg

SEQ ID NO: 5318570 - DNA, 25 bp, Homo sapien
ggaaccacctacaagtaatctgctg

SEQ ID NO: 5318571 - DNA, 25 bp, Homo sapien
tgatggagcagtctatacggatacc

SEQ ID NO: 5318572 - DNA, 25 bp, Homo sapien
taagcgttaaggatcatgtggctgc

SEQ ID NO: 5318573 - DNA, 25 bp, Homo sapien
cttattgtcataatcttataaccaa

SEQ ID NO: 5318574 - DNA, 25 bp, Homo sapien
ttgtcataatcttataaccaataac

SEQ ID NO: 5318575 - DNA, 25 bp, Homo sapien
gtcataatcttataaccaataacct

SEQ ID NO: 5318576 - DNA, 25 bp, Homo sapien
tattgtcataatcttataaccaata

SEQ ID NO: 5318577 - DNA, 25 bp, Homo sapien
taaacgcggtgagttacatacaggc

SEQ ID NO: 5318578 - DNA, 25 bp, Homo sapien
caatagttagttgctcggcgagagc

SEQ ID NO: 5318579 - DNA, 25 bp, Homo sapien
cgagagctcggtaaggactagccat

SEQ ID NO: 5318580 - DNA, 25 bp, Homo sapien
ggtcctgaaccaatatgcctttgag

SEQ ID NO: 5318581 - DNA, 25 bp, Homo sapien
ggcggttcttcgtccagacgctggc

SEQ ID NO: 5318582 - DNA, 25 bp, Homo sapien
agggtggaggtagtaacacagctcc

SEQ ID NO: 5318583 - DNA, 25 bp, Homo sapien
gacaggccgctgaaaggaaccggct

SEQ ID NO: 5318584 - DNA, 25 bp, Homo sapien
accggctgcggcctgtgtgaggctc

SEQ ID NO: 5318585 - DNA, 25 bp, Homo sapien
cgaggccgacgcagctggagagaag

SEQ ID NO: 5318586 - DNA, 25 bp, Homo sapien
ctgcgaggccgacgcagctggagag

SEQ ID NO: 5318587 - DNA, 25 bp, Homo sapien
tccgcctcgtcgcagcggcaggtag

SEQ ID NO: 5318588 - DNA, 25 bp, Homo sapien
gagtcgctgcttccgcgtttggttc

SEQ ID NO: 5318589 - DNA, 25 bp, Homo sapien
aaaagggctgccgtcggagttagat

SEQ ID NO: 5318590 - DNA, 25 bp, Homo sapien
tttccccgctgggagtgagaacaag

SEQ ID NO: 5318591 - DNA, 25 bp, Homo sapien
tttgccggtgcagagagaacttgtg

SEQ ID NO: 5318592 - DNA, 25 bp, Homo sapien
gagtttctctttttgccggtgcaga

SEQ ID NO: 5318593 - DNA, 25 bp, Homo sapien
cgacgtgttagcggaaaagtgggtg

SEQ ID NO: 5318594 - DNA, 25 bp, Homo sapien
tgccaaaagcgggtccgacgtgtta

SEQ ID NO: 5318595 - DNA, 25 bp, Homo sapien
gctgcttctcgttaccttccgcagg

SEQ ID NO: 5318596 - DNA, 25 bp, Homo sapien
tttgctcggaaactcgtgttgagga

SEQ ID NO: 5318597 - DNA, 25 bp, Homo sapien
ctgggtaccagtttgctcggaaact

SEQ ID NO: 5318598 - DNA, 25 bp, Homo sapien
gggcggacggaccaggcggctgggc

SEQ ID NO: 5318599 - DNA, 25 bp, Homo sapien
taacattttatatccagggttggac

SEQ ID NO: 5318600 - DNA, 25 bp, Homo sapien
cccattctgcatcacgtgtttgagg

SEQ ID NO: 5318601 - DNA, 25 bp, Homo sapien
ttggactggttaattggtacactgg

SEQ ID NO: 5318602 - DNA, 25 bp, Homo sapien
ggttaattggtacactggtagtcat

SEQ ID NO: 5318603 - DNA, 25 bp, Homo sapien
ctcttctgggattctacatgttcaa

SEQ ID NO: 5318604 - DNA, 25 bp, Homo sapien
ctataagtttctaaggtggtgttca

SEQ ID NO: 5318605 - DNA, 25 bp, Homo sapien
caatgttttgttactgcctataagt

SEQ ID NO: 5318606 - DNA, 25 bp, Homo sapien
tgacattattgagtctgtaggctta

SEQ ID NO: 5318607 - DNA, 25 bp, Homo sapien
tctgccccaataagatgtgattctc

SEQ ID NO: 5318608 - DNA, 25 bp, Homo sapien
tcttaatatgttgagtggaaacctc

SEQ ID NO: 5318609 - DNA, 25 bp, Homo sapien
ggcttatagtaaaactctgccccaa

SEQ ID NO: 5318610 - DNA, 25 bp, Homo sapien
cccatgttgattaggttctggcaaa

SEQ ID NO: 5318611 - DNA, 25 bp, Homo sapien
attctgcatgataccataatggtga

SEQ ID NO: 5318612 - DNA, 25 bp, Homo sapien
tcatcatttggttgttaagatccat

SEQ ID NO: 5318613 - DNA, 25 bp, Homo sapien
ctatctccataggttagaagggaga

SEQ ID NO: 5318614 - DNA, 25 bp, Homo sapien
ttttttactatctccataggttaga

SEQ ID NO: 5318615 - DNA, 25 bp, Homo sapien
tgggagagctaggacatctgattag

SEQ ID NO: 5318616 - DNA, 25 bp, Homo sapien
ggagagctaggacatctgattagag

SEQ ID NO: 5318617 - DNA, 25 bp, Homo sapien
agaattgggagagctaggacatctg

SEQ ID NO: 5318618 - DNA, 25 bp, Homo sapien
agagctaggacatctgattagagag

SEQ ID NO: 5318619 - DNA, 25 bp, Homo sapien
taaaggagactcataacattaggtt

SEQ ID NO: 5318620 - DNA, 25 bp, Homo sapien
tactgtttaccagaagccttcctga

SEQ ID NO: 5318621 - DNA, 25 bp, Homo sapien
tgcacagtcaaaaatttgcataatt

SEQ ID NO: 5318622 - DNA, 25 bp, Homo sapien
cagttgacctatgacaatgccaggg

SEQ ID NO: 5318623 - DNA, 25 bp, Homo sapien
caaatgctgctagtgtgagtggaac

SEQ ID NO: 5318624 - DNA, 25 bp, Homo sapien
caatgtttagtctgcactcagaggg

SEQ ID NO: 5318625 - DNA, 25 bp, Homo sapien
tatgttagtaatttagctgcagaca

SEQ ID NO: 5318626 - DNA, 25 bp, Homo sapien
ggacttcctggaacatatgttagta

SEQ ID NO: 5318627 - DNA, 25 bp, Homo sapien
gaagagagtcatagaaaccagaatt

SEQ ID NO: 5318628 - DNA, 25 bp, Homo sapien
gagagtcatagaaaccagaattcct

SEQ ID NO: 5318629 - DNA, 25 bp, Homo sapien
tgtaccccaagcaaggcattaaact

SEQ ID NO: 5318630 - DNA, 25 bp, Homo sapien
ccaagaagagagtcatagaaaccag

SEQ ID NO: 5318631 - DNA, 25 bp, Homo sapien
agtcctgtgcaacatggaaagtgca

SEQ ID NO: 5318632 - DNA, 25 bp, Homo sapien
agaaactgattggattgatgaacaa

SEQ ID NO: 5318633 - DNA, 25 bp, Homo sapien
ctgagtcctgtgcaacatggaaagt

SEQ ID NO: 5318634 - DNA, 25 bp, Homo sapien
aaagaggagaaactgattggattga

SEQ ID NO: 5318635 - DNA, 25 bp, Homo sapien
aattcactgaaacttattttgtcac

SEQ ID NO: 5318636 - DNA, 25 bp, Homo sapien
aggaaaaggcctagtttagtgaatg

SEQ ID NO: 5318637 - DNA, 25 bp, Homo sapien
gaacacatcctgtattattgcaatc

SEQ ID NO: 5318638 - DNA, 25 bp, Homo sapien
tccttgtatacttatgaagtttggg

SEQ ID NO: 5318639 - DNA, 25 bp, Homo sapien
gattgcttttgttccatagtggcag

SEQ ID NO: 5318640 - DNA, 25 bp, Homo sapien
caagtttgcaaatccctgctcagca

SEQ ID NO: 5318641 - DNA, 25 bp, Homo sapien
caagtcatattagacagcgtggctc

SEQ ID NO: 5318642 - DNA, 25 bp, Homo sapien
ggctctagaaattaccatgtgcaca

SEQ ID NO: 5318643 - DNA, 25 bp, Homo sapien
tacatttcaattttgttcacttcaa

SEQ ID NO: 5318644 - DNA, 25 bp, Homo sapien
tgttcacttcaaaatatatttcccc

SEQ ID NO: 5318645 - DNA, 25 bp, Homo sapien
cacttcaaaatatatttccccttga

SEQ ID NO: 5318646 - DNA, 25 bp, Homo sapien
catttcaattttgttcacttcaaaa

SEQ ID NO: 5318647 - DNA, 25 bp, Homo sapien
ttagggagatgtgcgatgccaactc

SEQ ID NO: 5318648 - DNA, 25 bp, Homo sapien
tgcacagcaggcacggtcaaaaggg

SEQ ID NO: 5318649 - DNA, 25 bp, Homo sapien
tatggataggatatgacggtctgcc

SEQ ID NO: 5318650 - DNA, 25 bp, Homo sapien
gaacagagctttctagttagggaga

SEQ ID NO: 5318651 - DNA, 25 bp, Homo sapien
cttggataactcacgtctaacaaac

SEQ ID NO: 5318652 - DNA, 25 bp, Homo sapien
tatttagcattcttacacactacac

SEQ ID NO: 5318653 - DNA, 25 bp, Homo sapien
caaaataaatacttggataactcac

SEQ ID NO: 5318654 - DNA, 25 bp, Homo sapien
gcattcttacacactacacaaaata

SEQ ID NO: 5318655 - DNA, 25 bp, Homo sapien
ctatatatgtattttttccatagga

SEQ ID NO: 5318656 - DNA, 25 bp, Homo sapien
actatatatgtattttttccatagg

SEQ ID NO: 5318657 - DNA, 25 bp, Homo sapien
aactatatatgtattttttccatag

SEQ ID NO: 5318658 - DNA, 25 bp, Homo sapien
taaactatatatgtattttttccat

SEQ ID NO: 5318659 - DNA, 25 bp, Homo sapien
tgagcctcatcaagattttaccagt

SEQ ID NO: 5318660 - DNA, 25 bp, Homo sapien
gagtctcaagaacctttgaatgaag

SEQ ID NO: 5318661 - DNA, 25 bp, Homo sapien
tagtgaagagacaaacgcagatgtt

SEQ ID NO: 5318662 - DNA, 25 bp, Homo sapien
tccagctcttcaccgaaatgttgta

SEQ ID NO: 5318663 - DNA, 25 bp, Homo sapien
tcagtgtttccttccagacattttt

SEQ ID NO: 5318664 - DNA, 25 bp, Homo sapien
cttccagacatttttaaggtaattg

SEQ ID NO: 5318665 - DNA, 25 bp, Homo sapien
cagtgtttccttccagacattttta

SEQ ID NO: 5318666 - DNA, 25 bp, Homo sapien
tagataaactgatatactatataga

SEQ ID NO: 5318667 - DNA, 25 bp, Homo sapien
tttcagatcacctaggaaatctaga

SEQ ID NO: 5318668 - DNA, 25 bp, Homo sapien
catagaatagtgtcatagtacagtt

SEQ ID NO: 5318669 - DNA, 25 bp, Homo sapien
aatagtgtcatagaatagtgtcata

SEQ ID NO: 5318670 - DNA, 25 bp, Homo sapien
tactacaatatggacattcaccaaa

SEQ ID NO: 5318671 - DNA, 25 bp, Homo sapien
tactagttagtagtcctctcagcca

SEQ ID NO: 5318672 - DNA, 25 bp, Homo sapien
cttactacaatatggacattcacca

SEQ ID NO: 5318673 - DNA, 25 bp, Homo sapien
tatgatgttaaaactctgtctacta

SEQ ID NO: 5318674 - DNA, 25 bp, Homo sapien
gatcaggaatggtaccgtcaagttg

SEQ ID NO: 5318675 - DNA, 25 bp, Homo sapien
tttgatggaaaggttgtccacactg

SEQ ID NO: 5318676 - DNA, 25 bp, Homo sapien
ctcatataagcatatttgatggaaa

SEQ ID NO: 5318677 - DNA, 25 bp, Homo sapien
agttgataagcataacaaattccac

SEQ ID NO: 5318678 - DNA, 25 bp, Homo sapien
tataaaggtgactatattgctgtat

SEQ ID NO: 5318679 - DNA, 25 bp, Homo sapien
ctaactactttagaatacgaaatca

SEQ ID NO: 5318680 - DNA, 25 bp, Homo sapien
aaacacaaggtaagatcaggaagaa

SEQ ID NO: 5318681 - DNA, 25 bp, Homo sapien
aaaaagcgtatgtgtctcactaact

SEQ ID NO: 5318682 - DNA, 25 bp, Homo sapien
tgacgtcactactgaagaccatgaa

SEQ ID NO: 5318683 - DNA, 25 bp, Homo sapien
ttaatgacgtcactactgaagacca

SEQ ID NO: 5318684 - DNA, 25 bp, Homo sapien
attaatgacgtcactactgaagacc

SEQ ID NO: 5318685 - DNA, 25 bp, Homo sapien
aatgacgtcactactgaagaccatg

SEQ ID NO: 5318686 - DNA, 25 bp, Homo sapien
cttcattatgcaatactgtctggaa

SEQ ID NO: 5318687 - DNA, 25 bp, Homo sapien
aatactgtctggaatatcaaaacac

SEQ ID NO: 5318688 - DNA, 25 bp, Homo sapien
acttcattatgcaatactgtctgga

SEQ ID NO: 5318689 - DNA, 25 bp, Homo sapien
aacttcattatgcaatactgtctgg

SEQ ID NO: 5318690 - DNA, 25 bp, Homo sapien
agatttttccaggatagcacgagct

SEQ ID NO: 5318691 - DNA, 25 bp, Homo sapien
ccaggatagcacgagctggaaaatc

SEQ ID NO: 5318692 - DNA, 25 bp, Homo sapien
gatagcacgagctggaaaatcaatt

SEQ ID NO: 5318693 - DNA, 25 bp, Homo sapien
tttttccaggatagcacgagctgga

SEQ ID NO: 5318694 - DNA, 25 bp, Homo sapien
ttatgctgtgaactttgtaaaatca

SEQ ID NO: 5318695 - DNA, 25 bp, Homo sapien
tgctgtgaactttgtaaaatcacca

SEQ ID NO: 5318696 - DNA, 25 bp, Homo sapien
aaaaaattatgctgtgaactttgta

SEQ ID NO: 5318697 - DNA, 25 bp, Homo sapien
aaattatgctgtgaactttgtaaaa

SEQ ID NO: 5318698 - DNA, 25 bp, Homo sapien
tgtatgttcctgctcagcttaattc

SEQ ID NO: 5318699 - DNA, 25 bp, Homo sapien
tatgttcctgctcagcttaattccc

SEQ ID NO: 5318700 - DNA, 25 bp, Homo sapien
aaatgtatgttcctgctcagcttaa

SEQ ID NO: 5318701 - DNA, 25 bp, Homo sapien
aatgtatgttcctgctcagcttaat

SEQ ID NO: 5318702 - DNA, 25 bp, Homo sapien
taactatcattattgcggtgaaccg

SEQ ID NO: 5318703 - DNA, 25 bp, Homo sapien
taatttaacaatgctaggcaaggat

SEQ ID NO: 5318704 - DNA, 25 bp, Homo sapien
aattgcatgctctactcttggtttc

SEQ ID NO: 5318705 - DNA, 25 bp, Homo sapien
cattacactacatactgggcaacaa

SEQ ID NO: 5318706 - DNA, 25 bp, Homo sapien
tcaggaagcatagtaggatgcctgg

SEQ ID NO: 5318707 - DNA, 25 bp, Homo sapien
ctccaagaaagaagcactcaggaag

SEQ ID NO: 5318708 - DNA, 25 bp, Homo sapien
actcaggaagcatagtaggatgcct

SEQ ID NO: 5318709 - DNA, 25 bp, Homo sapien
gatgcctggggtctacctctatatt

SEQ ID NO: 5318710 - DNA, 25 bp, Homo sapien
tcttattagccctcaacactgtcat

SEQ ID NO: 5318711 - DNA, 25 bp, Homo sapien
gacagtactttcacgtaatatgggc

SEQ ID NO: 5318712 - DNA, 25 bp, Homo sapien
cattcttagtatctacttgttcaca

SEQ ID NO: 5318713 - DNA, 25 bp, Homo sapien
aaactagactatgtatgctgaatga

SEQ ID NO: 5318714 - DNA, 25 bp, Homo sapien
tacccaggtcttctcatcgatttca

SEQ ID NO: 5318715 - DNA, 25 bp, Homo sapien
atcgatttcatccataacatcccag

SEQ ID NO: 5318716 - DNA, 25 bp, Homo sapien
ctaatgcaattctgcgtgctgttgc

SEQ ID NO: 5318717 - DNA, 25 bp, Homo sapien
ttttctggctcaagtacccaggtct

SEQ ID NO: 5318718 - DNA, 25 bp, Homo sapien
gaaactagccacttccttaaacatg

SEQ ID NO: 5318719 - DNA, 25 bp, Homo sapien
caaggtttacacttggatgaattca

SEQ ID NO: 5318720 - DNA, 25 bp, Homo sapien
gaatatgatacaccctaagatgaaa

SEQ ID NO: 5318721 - DNA, 25 bp, Homo sapien
tcaatctgaaataactggccacacc

SEQ ID NO: 5318722 - DNA, 25 bp, Homo sapien
gaatagccatgcttgtttcagtcca

SEQ ID NO: 5318723 - DNA, 25 bp, Homo sapien
ccagagtcacacttccatacaattc

SEQ ID NO: 5318724 - DNA, 25 bp, Homo sapien
aagtatatgagtcaagcactgaaga

SEQ ID NO: 5318725 - DNA, 25 bp, Homo sapien
gcaatcctcacttacatcacatcag

SEQ ID NO: 5318726 - DNA, 25 bp, Homo sapien
acactgcgaccagccataattttgt

SEQ ID NO: 5318727 - DNA, 25 bp, Homo sapien
actacagacacgttgcccccacacc

SEQ ID NO: 5318728 - DNA, 25 bp, Homo sapien
gaaaattttactagccaaattctga

SEQ ID NO: 5318729 - DNA, 25 bp, Homo sapien
gcgaccagccataattttgtcaatt

SEQ ID NO: 5318730 - DNA, 25 bp, Homo sapien
cacatccatttttgcttgatcagtg

SEQ ID NO: 5318731 - DNA, 25 bp, Homo sapien
catccatttttgcttgatcagtgac

SEQ ID NO: 5318732 - DNA, 25 bp, Homo sapien
aggcaaaaccgcaattttcacatcc

SEQ ID NO: 5318733 - DNA, 25 bp, Homo sapien
caaaaccgcaattttcacatccatt

SEQ ID NO: 5318734 - DNA, 25 bp, Homo sapien
ggcacaaaatggaacaggaaaatcc

SEQ ID NO: 5318735 - DNA, 25 bp, Homo sapien
aatccacaaaataatctggtgattc

SEQ ID NO: 5318736 - DNA, 25 bp, Homo sapien
aataatctggtgattctgcaggata

SEQ ID NO: 5318737 - DNA, 25 bp, Homo sapien
ctgaggtgtccaggaggcacaaaat

SEQ ID NO: 5318738 - DNA, 25 bp, Homo sapien
tcttctgcttttaacttgatggtac

SEQ ID NO: 5318739 - DNA, 25 bp, Homo sapien
tgaagcaggtatccgcatacacaag

SEQ ID NO: 5318740 - DNA, 25 bp, Homo sapien
tcaacttgagagtgattaaatgctc

SEQ ID NO: 5318741 - DNA, 25 bp, Homo sapien
tttaacttgatggtactgaagcagg

SEQ ID NO: 5318742 - DNA, 25 bp, Homo sapien
ctggtgagcagaggagaataaaaaa

SEQ ID NO: 5318743 - DNA, 25 bp, Homo sapien
taaaaaatgatcacaccggggagag

SEQ ID NO: 5318744 - DNA, 25 bp, Homo sapien
ggtgagcagaggagaataaaaaatg

SEQ ID NO: 5318745 - DNA, 25 bp, Homo sapien
agaataaaaaatgatcacaccgggg

SEQ ID NO: 5318746 - DNA, 25 bp, Homo sapien
acagtatgagactttaatgctccct

SEQ ID NO: 5318747 - DNA, 25 bp, Homo sapien
gccgttcatataccagcctagcact

SEQ ID NO: 5318748 - DNA, 25 bp, Homo sapien
gcatgttcctgtcagcctctactta

SEQ ID NO: 5318749 - DNA, 25 bp, Homo sapien
caaggctcatgctgtggtcagtgag

SEQ ID NO: 5318750 - DNA, 25 bp, Homo sapien
agtgctgggaccctgtgcccacttt

SEQ ID NO: 5318751 - DNA, 25 bp, Homo sapien
ttatgtgagtggctgccgtgaagac

SEQ ID NO: 5318752 - DNA, 25 bp, Homo sapien
ggcccaagctctacactggcccttt

SEQ ID NO: 5318753 - DNA, 25 bp, Homo sapien
agccacggcccaagctctacactgg

SEQ ID NO: 5318754 - DNA, 25 bp, Homo sapien
taagtaacagcagctaaatcgaaag

SEQ ID NO: 5318755 - DNA, 25 bp, Homo sapien
taacagcagctaaatcgaaagtcat

SEQ ID NO: 5318756 - DNA, 25 bp, Homo sapien
cagcagctaaatcgaaagtcattta

SEQ ID NO: 5318757 - DNA, 25 bp, Homo sapien
aatgattaagtaacagcagctaaat

SEQ ID NO: 5318758 - DNA, 25 bp, Homo sapien
tagagatgtggggtagttctcctta

SEQ ID NO: 5318759 - DNA, 25 bp, Homo sapien
agagatgtggggtagttctccttac

SEQ ID NO: 5318760 - DNA, 25 bp, Homo sapien
ctagagatgtggggtagttctcctt

SEQ ID NO: 5318761 - DNA, 25 bp, Homo sapien
gaggagaagaggctcgcttctctac

SEQ ID NO: 5318762 - DNA, 25 bp, Homo sapien
aagaggctcgcttctctaccatcct

SEQ ID NO: 5318763 - DNA, 25 bp, Homo sapien
tggaatccaagcacgggggtaaagc

SEQ ID NO: 5318764 - DNA, 25 bp, Homo sapien
ggagaagaggctcgcttctctacca

SEQ ID NO: 5318765 - DNA, 25 bp, Homo sapien
aggccaggggttccacatctgttca

SEQ ID NO: 5318766 - DNA, 25 bp, Homo sapien
ctgttcactgggcaaaaatcaaggt

SEQ ID NO: 5318767 - DNA, 25 bp, Homo sapien
ctaggagagaatctattccttgcct

SEQ ID NO: 5318768 - DNA, 25 bp, Homo sapien
ggtggctgccagcaagaaaaatatt

SEQ ID NO: 5318769 - DNA, 25 bp, Homo sapien
agtagacttaaactggaactcaata

SEQ ID NO: 5318770 - DNA, 25 bp, Homo sapien
aactcaataacccaaaaatctccag

SEQ ID NO: 5318771 - DNA, 25 bp, Homo sapien
agtattgagataattaaaaggatga

SEQ ID NO: 5318772 - DNA, 25 bp, Homo sapien
tattgagataattaaaaggatgatt

SEQ ID NO: 5318773 - DNA, 25 bp, Homo sapien
ggaggaggtagtgcatacagctctt

SEQ ID NO: 5318774 - DNA, 25 bp, Homo sapien
tatcccaaccaagagttcctatctc

SEQ ID NO: 5318775 - DNA, 25 bp, Homo sapien
gctcttgtctattctttaaggcaac

SEQ ID NO: 5318776 - DNA, 25 bp, Homo sapien
ggtagtgcatacagctcttgtctat

SEQ ID NO: 5318777 - DNA, 25 bp, Homo sapien
gctcattagatcaggagagtgctgc

SEQ ID NO: 5318778 - DNA, 25 bp, Homo sapien
aaagctcattagatcaggagagtgc

SEQ ID NO: 5318779 - DNA, 25 bp, Homo sapien
ttagatcaggagagtgctgcattct

SEQ ID NO: 5318780 - DNA, 25 bp, Homo sapien
atcataaagctcattagatcaggag

SEQ ID NO: 5318781 - DNA, 25 bp, Homo sapien
tccacgtcattctgccggtcaatgg

SEQ ID NO: 5318782 - DNA, 25 bp, Homo sapien
catgctgaagtctatcggtgtgctc

SEQ ID NO: 5318783 - DNA, 25 bp, Homo sapien
ggtgtgctcttgacatgctctcgat

SEQ ID NO: 5318784 - DNA, 25 bp, Homo sapien
tttcccctggcgtcgggttgctcag

SEQ ID NO: 5318785 - DNA, 25 bp, Homo sapien
gcctattaacacactaagcagcctt

SEQ ID NO: 5318786 - DNA, 25 bp, Homo sapien
ccacagctctaaatgggtctgattt

SEQ ID NO: 5318787 - DNA, 25 bp, Homo sapien
ggaaatcgatttcaacacaaaggct

SEQ ID NO: 5318788 - DNA, 25 bp, Homo sapien
ttgttacaacattgtgcaaagcagg

SEQ ID NO: 5318789 - DNA, 25 bp, Homo sapien
ctgttgtactattcgatggtatcca

SEQ ID NO: 5318790 - DNA, 25 bp, Homo sapien
tctcagctgccaactacataataat

SEQ ID NO: 5318791 - DNA, 25 bp, Homo sapien
gtattgttctcagctgccaactaca

SEQ ID NO: 5318792 - DNA, 25 bp, Homo sapien
ggtatccactaagtattgttctcag

SEQ ID NO: 5318793 - DNA, 25 bp, Homo sapien
ggtggtacctaaattttcagtctca

SEQ ID NO: 5318794 - DNA, 25 bp, Homo sapien
tctagcttagagatctgagccggga

SEQ ID NO: 5318795 - DNA, 25 bp, Homo sapien
ggtacgccccaaggtcttgtcactg

SEQ ID NO: 5318796 - DNA, 25 bp, Homo sapien
taactacacttctgttggtcacaaa

SEQ ID NO: 5318797 - DNA, 25 bp, Homo sapien
tgtaaatcttcaggcaacactatcc

SEQ ID NO: 5318798 - DNA, 25 bp, Homo sapien
aggcaacactatcctaaggtggaag

SEQ ID NO: 5318799 - DNA, 25 bp, Homo sapien
gttgtaaatcttcaggcaacactat

SEQ ID NO: 5318800 - DNA, 25 bp, Homo sapien
actatcctaaggtggaagtctcttc

SEQ ID NO: 5318801 - DNA, 25 bp, Homo sapien
tacaaaattgctaaccaggcccata

SEQ ID NO: 5318802 - DNA, 25 bp, Homo sapien
ttacaaaattgctaaccaggcccat

SEQ ID NO: 5318803 - DNA, 25 bp, Homo sapien
attacaaaattgctaaccaggccca

SEQ ID NO: 5318804 - DNA, 25 bp, Homo sapien
agatgaatccctcatacacggtttt

SEQ ID NO: 5318805 - DNA, 25 bp, Homo sapien
catacacggttttcgaccggttctg

SEQ ID NO: 5318806 - DNA, 25 bp, Homo sapien
gggcactggcgcaacaggctcgctt

SEQ ID NO: 5318807 - DNA, 25 bp, Homo sapien
tggcgcaacaggctcgcttccgtca

SEQ ID NO: 5318808 - DNA, 25 bp, Homo sapien
cgccgcggagcggaaaccccagcct

SEQ ID NO: 5318809 - DNA, 25 bp, Homo sapien
ggctcgaagtccggagaaacacaga

SEQ ID NO: 5318810 - DNA, 25 bp, Homo sapien
gccttggcgggaagatcctggagga

SEQ ID NO: 5318811 - DNA, 25 bp, Homo sapien
gcgcagtccgctggcgctcggacgc

SEQ ID NO: 5318812 - DNA, 25 bp, Homo sapien
tatgacactgaacgcatcggagttg

SEQ ID NO: 5318813 - DNA, 25 bp, Homo sapien
tgctttagccccaacagagtgattg

SEQ ID NO: 5318814 - DNA, 25 bp, Homo sapien
cttttgatggtgacctacctggcca

SEQ ID NO: 5318815 - DNA, 25 bp, Homo sapien
tgtgtgactctaataaacggagcct

SEQ ID NO: 5318816 - DNA, 25 bp, Homo sapien
ggtccccaggaatgaaatagacaga

SEQ ID NO: 5318817 - DNA, 25 bp, Homo sapien
taccacacaatgcaggcgaggctag

SEQ ID NO: 5318818 - DNA, 25 bp, Homo sapien
tattctaggtctggtgaacagaggc

SEQ ID NO: 5318819 - DNA, 25 bp, Homo sapien
tagccagatgctacactcagggatc

SEQ ID NO: 5318820 - DNA, 25 bp, Homo sapien
gaacaacgctgaagcgtcttgaggt

SEQ ID NO: 5318821 - DNA, 25 bp, Homo sapien
aggaacaacgctgaagcgtcttgag

SEQ ID NO: 5318822 - DNA, 25 bp, Homo sapien
ggaacaacgctgaagcgtcttgagg

SEQ ID NO: 5318823 - DNA, 25 bp, Homo sapien
aaaggaacaacgctgaagcgtcttg

SEQ ID NO: 5318824 - DNA, 25 bp, Homo sapien
caagctcaggaagatgtaatagatc

SEQ ID NO: 5318825 - DNA, 25 bp, Homo sapien
gatgtaatagatcaaatccatgaag

SEQ ID NO: 5318826 - DNA, 25 bp, Homo sapien
gaagaacctcacaacgaattaggaa

SEQ ID NO: 5318827 - DNA, 25 bp, Homo sapien
aaatccatgaagaacctcacaacga

SEQ ID NO: 5318828 - DNA, 25 bp, Homo sapien
gatggacatctctccgatgaccagc

SEQ ID NO: 5318829 - DNA, 25 bp, Homo sapien
tgctcgactctagagaaggttgctt

SEQ ID NO: 5318830 - DNA, 25 bp, Homo sapien
tagcttgaaagcctgccctgaatcc

SEQ ID NO: 5318831 - DNA, 25 bp, Homo sapien
gattgtatccagaagcttcatcccc

SEQ ID NO: 5318832 - DNA, 25 bp, Homo sapien
tctgggttagccctcacaactttac

SEQ ID NO: 5318833 - DNA, 25 bp, Homo sapien
tccattcttcaataagggagtcaaa

SEQ ID NO: 5318834 - DNA, 25 bp, Homo sapien
aatagtcattgtgttcagctgcctc

SEQ ID NO: 5318835 - DNA, 25 bp, Homo sapien
ttgtgttcagctgcctctgggttag

SEQ ID NO: 5318836 - DNA, 25 bp, Homo sapien
gtcacccctctgatggtagtgacca

SEQ ID NO: 5318837 - DNA, 25 bp, Homo sapien
tcacccctctgatggtagtgaccat

SEQ ID NO: 5318838 - DNA, 25 bp, Homo sapien
tgtcacccctctgatggtagtgacc

SEQ ID NO: 5318839 - DNA, 25 bp, Homo sapien
ttttgttctgcaaacatatcatatc

SEQ ID NO: 5318840 - DNA, 25 bp, Homo sapien
gttctgcaaacatatcatatcctaa

SEQ ID NO: 5318841 - DNA, 25 bp, Homo sapien
cctgagtggggcctaggtctgaaat

SEQ ID NO: 5318842 - DNA, 25 bp, Homo sapien
atatcctaaagactgtacctcttcc

SEQ ID NO: 5318843 - DNA, 25 bp, Homo sapien
tagtaatcccagtaggactgttgga

SEQ ID NO: 5318844 - DNA, 25 bp, Homo sapien
aatttttgatccctccccagatgtt

SEQ ID NO: 5318845 - DNA, 25 bp, Homo sapien
aaatgggtatcattcattccaggaa

SEQ ID NO: 5318846 - DNA, 25 bp, Homo sapien
agccagaagtaaggtcccacttcct

SEQ ID NO: 5318847 - DNA, 25 bp, Homo sapien
aatgtggttacagatttggttatct

SEQ ID NO: 5318848 - DNA, 25 bp, Homo sapien
acatgccccacattttcccactccc

SEQ ID NO: 5318849 - DNA, 25 bp, Homo sapien
ctgcacatgccccacattttcccac

SEQ ID NO: 5318850 - DNA, 25 bp, Homo sapien
tgttcctgcacatgccccacatttt

SEQ ID NO: 5318851 - DNA, 25 bp, Homo sapien
catgccccacattttcccactccca

SEQ ID NO: 5318852 - DNA, 25 bp, Homo sapien
agcacttggcatttgttctttgaaa

SEQ ID NO: 5318853 - DNA, 25 bp, Homo sapien
catatagtacggtcctaacttagga

SEQ ID NO: 5318854 - DNA, 25 bp, Homo sapien
gctcacattatactggactctactg

SEQ ID NO: 5318855 - DNA, 25 bp, Homo sapien
cctgagacagagatcctaagtagct

SEQ ID NO: 5318856 - DNA, 25 bp, Homo sapien
taatctgtagatgatgggaatctac

SEQ ID NO: 5318857 - DNA, 25 bp, Homo sapien
cagaatttgtccttatatgttctaa

SEQ ID NO: 5318858 - DNA, 25 bp, Homo sapien
aaatagaatagaaccttagtatcct

SEQ ID NO: 5318859 - DNA, 25 bp, Homo sapien
tggagcgactctggttgtaactggt

SEQ ID NO: 5318860 - DNA, 25 bp, Homo sapien
tggcaatcgagcgctgctttgtcat

SEQ ID NO: 5318861 - DNA, 25 bp, Homo sapien
gcaatcgagcgctgctttgtcattg

SEQ ID NO: 5318862 - DNA, 25 bp, Homo sapien
caatcgagcgctgctttgtcattgg

SEQ ID NO: 5318863 - DNA, 25 bp, Homo sapien
ggcaatcgagcgctgctttgtcatt

SEQ ID NO: 5318864 - DNA, 25 bp, Homo sapien
tccatcgtggctggatagcactctg

SEQ ID NO: 5318865 - DNA, 25 bp, Homo sapien
ccatcgtggctggatagcactctgc

SEQ ID NO: 5318866 - DNA, 25 bp, Homo sapien
atccatcgtggctggatagcactct

SEQ ID NO: 5318867 - DNA, 25 bp, Homo sapien
gtcttctgcaattttcagcgattct

SEQ ID NO: 5318868 - DNA, 25 bp, Homo sapien
tgtcttctgcaattttcagcgattc

SEQ ID NO: 5318869 - DNA, 25 bp, Homo sapien
ttgtcttctgcaattttcagcgatt

SEQ ID NO: 5318870 - DNA, 25 bp, Homo sapien
tcttctgcaattttcagcgattctg

SEQ ID NO: 5318871 - DNA, 25 bp, Homo sapien
ttgatcaactccttggccgacccag

SEQ ID NO: 5318872 - DNA, 25 bp, Homo sapien
tgatcaactccttggccgacccagg

SEQ ID NO: 5318873 - DNA, 25 bp, Homo sapien
cttgatcaactccttggccgaccca

SEQ ID NO: 5318874 - DNA, 25 bp, Homo sapien
atcaactccttggccgacccaggtc

SEQ ID NO: 5318875 - DNA, 25 bp, Homo sapien
caacgtccacggactcatcatgtac

SEQ ID NO: 5318876 - DNA, 25 bp, Homo sapien
ctttgtcaacgtccacggactcatc

SEQ ID NO: 5318877 - DNA, 25 bp, Homo sapien
tcatcatgtacttttggcttctcaa

SEQ ID NO: 5318878 - DNA, 25 bp, Homo sapien
ctcatcatgtacttttggcttctca

SEQ ID NO: 5318879 - DNA, 25 bp, Homo sapien
ctctcggtcctgctctcactctcgt

SEQ ID NO: 5318880 - DNA, 25 bp, Homo sapien
tcctgctctcactctcgttcccgat

SEQ ID NO: 5318881 - DNA, 25 bp, Homo sapien
tcggtcctgctctcactctcgttcc

SEQ ID NO: 5318882 - DNA, 25 bp, Homo sapien
ggtcctgctctcactctcgttcccg

SEQ ID NO: 5318883 - DNA, 25 bp, Homo sapien
gattgtggagggtgtataatcccca

SEQ ID NO: 5318884 - DNA, 25 bp, Homo sapien
cttgattgtggagggtgtataatcc

SEQ ID NO: 5318885 - DNA, 25 bp, Homo sapien
tgtcttgattgtggagggtgtataa

SEQ ID NO: 5318886 - DNA, 25 bp, Homo sapien
tgattgtggagggtgtataatcccc

SEQ ID NO: 5318887 - DNA, 25 bp, Homo sapien
gcaactgggtaagcttgctaatgac

SEQ ID NO: 5318888 - DNA, 25 bp, Homo sapien
agcaactgggtaagcttgctaatga

SEQ ID NO: 5318889 - DNA, 25 bp, Homo sapien
caactgggtaagcttgctaatgaca

SEQ ID NO: 5318890 - DNA, 25 bp, Homo sapien
gggatatctgtgtcagcttactcat

SEQ ID NO: 5318891 - DNA, 25 bp, Homo sapien
tgtgtcagcttactcatcatccagg

SEQ ID NO: 5318892 - DNA, 25 bp, Homo sapien
ctgcggataagagtggtggggatat

SEQ ID NO: 5318893 - DNA, 25 bp, Homo sapien
tgtcagcttactcatcatccaggcc

SEQ ID NO: 5318894 - DNA, 25 bp, Homo sapien
ctttgctggcaatctcagctcgtac

SEQ ID NO: 5318895 - DNA, 25 bp, Homo sapien
tttgaagcagagcaaaatccaagcc

SEQ ID NO: 5318896 - DNA, 25 bp, Homo sapien
tggactcctggatcaactgtcttct

SEQ ID NO: 5318897 - DNA, 25 bp, Homo sapien
taggccatgcggcccggcaggaaca

SEQ ID NO: 5318898 - DNA, 25 bp, Homo sapien
gcgtagcttagcataataacttttc

SEQ ID NO: 5318899 - DNA, 25 bp, Homo sapien
ttaaactgcatctgaccagtgccaa

SEQ ID NO: 5318900 - DNA, 25 bp, Homo sapien
ctgaccagtgccaagtaatacattc

SEQ ID NO: 5318901 - DNA, 25 bp, Homo sapien
ttagcttaatggatcaatttttttc

SEQ ID NO: 5318902 - DNA, 25 bp, Homo sapien
atacattcagcattgatctttgtct

SEQ ID NO: 5318903 - DNA, 25 bp, Homo sapien
ggagaaaatatatgagccccattca

SEQ ID NO: 5318904 - DNA, 25 bp, Homo sapien
ctgaagcctactggttagaactggg

SEQ ID NO: 5318905 - DNA, 25 bp, Homo sapien
acccagtaactccagggatctgaag

SEQ ID NO: 5318906 - DNA, 25 bp, Homo sapien
tatgagccccattcacatgtgcaaa

SEQ ID NO: 5318907 - DNA, 25 bp, Homo sapien
tatcatacactttctttcgaaagca

SEQ ID NO: 5318908 - DNA, 25 bp, Homo sapien
tacttatcagccatatcatacactt

SEQ ID NO: 5318909 - DNA, 25 bp, Homo sapien
tacactttctttcgaaagcaattct

SEQ ID NO: 5318910 - DNA, 25 bp, Homo sapien
ttacttatcagccatatcatacact

SEQ ID NO: 5318911 - DNA, 25 bp, Homo sapien
gtcttttctcgtcttggattttcat

SEQ ID NO: 5318912 - DNA, 25 bp, Homo sapien
aacttgtatggttcctccagtcttt

SEQ ID NO: 5318913 - DNA, 25 bp, Homo sapien
caacttgtatggttcctccagtctt

SEQ ID NO: 5318914 - DNA, 25 bp, Homo sapien
tctgtggccctcacagggggcgctt

SEQ ID NO: 5318915 - DNA, 25 bp, Homo sapien
aatttctaggcacttcaaataatag

SEQ ID NO: 5318916 - DNA, 25 bp, Homo sapien
tcaaataatagttagaacgaatccc

SEQ ID NO: 5318917 - DNA, 25 bp, Homo sapien
caggcaatgcaaattagcacaggaa

SEQ ID NO: 5318918 - DNA, 25 bp, Homo sapien
tttatctgagcttaaggtctcaaca

SEQ ID NO: 5318919 - DNA, 25 bp, Homo sapien
caacattagtttcatgctgccagag

SEQ ID NO: 5318920 - DNA, 25 bp, Homo sapien
ccctttgaatttccaagatttatct

SEQ ID NO: 5318921 - DNA, 25 bp, Homo sapien
aactgccttgagtttccctttgaat

SEQ ID NO: 5318922 - DNA, 25 bp, Homo sapien
tagtctctgatggtaggaaacagca

SEQ ID NO: 5318923 - DNA, 25 bp, Homo sapien
gatcaaagccaaagtaactctgtct

SEQ ID NO: 5318924 - DNA, 25 bp, Homo sapien
gtatagtctctgatggtaggaaaca

SEQ ID NO: 5318925 - DNA, 25 bp, Homo sapien
tagctgtagattcttaaagactggc

SEQ ID NO: 5318926 - DNA, 25 bp, Homo sapien
tgccactgacaggaactgtgcgtga

SEQ ID NO: 5318927 - DNA, 25 bp, Homo sapien
cctgatgcgtttgcaatgttgagca

SEQ ID NO: 5318928 - DNA, 25 bp, Homo sapien
caggaactgtgcgtgatacagtgct

SEQ ID NO: 5318929 - DNA, 25 bp, Homo sapien
ggtgccacattattatgtacagaaa

SEQ ID NO: 5318930 - DNA, 25 bp, Homo sapien
tggtgtcagaggtgtttttccgctg

SEQ ID NO: 5318931 - DNA, 25 bp, Homo sapien
tccgctgatgagtggacaagccaaa

SEQ ID NO: 5318932 - DNA, 25 bp, Homo sapien
caggttatttgtcaacccaatggtg

SEQ ID NO: 5318933 - DNA, 25 bp, Homo sapien
tgctgctgcctgacccatatggccc

SEQ ID NO: 5318934 - DNA, 25 bp, Homo sapien
gacagttgacagcttttagtcagac

SEQ ID NO: 5318935 - DNA, 25 bp, Homo sapien
cagcttttagtcagactagactcac

SEQ ID NO: 5318936 - DNA, 25 bp, Homo sapien
ttgacagcttttagtcagactagac

SEQ ID NO: 5318937 - DNA, 25 bp, Homo sapien
cagttgacagcttttagtcagacta

SEQ ID NO: 5318938 - DNA, 25 bp, Homo sapien
atcctgaggcgagcacgcggccagc

SEQ ID NO: 5318939 - DNA, 25 bp, Homo sapien
ctgaggcgagcacgcggccagcgcc

SEQ ID NO: 5318940 - DNA, 25 bp, Homo sapien
tcctgaggcgagcacgcggccagcg

SEQ ID NO: 5318941 - DNA, 25 bp, Homo sapien
gaggcgagcacgcggccagcgcccg

SEQ ID NO: 5318942 - DNA, 25 bp, Homo sapien
ctggcagcctttgtaatctcagggt

SEQ ID NO: 5318943 - DNA, 25 bp, Homo sapien
agtttcatcatcaggccccgattcc

SEQ ID NO: 5318944 - DNA, 25 bp, Homo sapien
aggccccgattcccttggatctctg

SEQ ID NO: 5318945 - DNA, 25 bp, Homo sapien
cttgtgccgaaataaataatgtggg

SEQ ID NO: 5318946 - DNA, 25 bp, Homo sapien
cagagattgtgttggcattgtgttc

SEQ ID NO: 5318947 - DNA, 25 bp, Homo sapien
tgactatcagatttgatggcaaagc

SEQ ID NO: 5318948 - DNA, 25 bp, Homo sapien
tactatgcaacaagacatgacgcag

SEQ ID NO: 5318949 - DNA, 25 bp, Homo sapien
ttctgatgaccccacacattgtgtg

SEQ ID NO: 5318950 - DNA, 25 bp, Homo sapien
aacagctattttgcatcccttgatg

SEQ ID NO: 5318951 - DNA, 25 bp, Homo sapien
ggtccatgtgtgatttagctttgcg

SEQ ID NO: 5318952 - DNA, 25 bp, Homo sapien
tgcatgcctctgtacataaaactgg

SEQ ID NO: 5318953 - DNA, 25 bp, Homo sapien
tctccactcccctttaaacagctat

SEQ ID NO: 5318954 - DNA, 25 bp, Homo sapien
tattgacctgatgccgtaaggcgtg

SEQ ID NO: 5318955 - DNA, 25 bp, Homo sapien
ttgatggaatcaggcaaccttattg

SEQ ID NO: 5318956 - DNA, 25 bp, Homo sapien
cgtaaggcgtgttgggaaattctgc

SEQ ID NO: 5318957 - DNA, 25 bp, Homo sapien
gcaaccttattgacctgatgccgta

SEQ ID NO: 5318958 - DNA, 25 bp, Homo sapien
tgggtgctgtgtggaagcggcttgg

SEQ ID NO: 5318959 - DNA, 25 bp, Homo sapien
gcggcttggatgcaggattctaaaa

SEQ ID NO: 5318960 - DNA, 25 bp, Homo sapien
ttaagctagcaagatctgtgtttct

SEQ ID NO: 5318961 - DNA, 25 bp, Homo sapien
aaaggaccatcgcagttttgcataa

SEQ ID NO: 5318962 - DNA, 25 bp, Homo sapien
caagagggtggacaaatgcaagtac

SEQ ID NO: 5318963 - DNA, 25 bp, Homo sapien
caggtttgctatgaccttccccaga

SEQ ID NO: 5318964 - DNA, 25 bp, Homo sapien
taccactgggcttcaatactagcag

SEQ ID NO: 5318965 - DNA, 25 bp, Homo sapien
gcaaatgtctgtgttagcgtatcca

SEQ ID NO: 5318966 - DNA, 25 bp, Homo sapien
aatcggtctcaaacagattcactgg

SEQ ID NO: 5318967 - DNA, 25 bp, Homo sapien
gctgctggtcagtgggttggaaccg

SEQ ID NO: 5318968 - DNA, 25 bp, Homo sapien
cactgcgcaggggtgctgcaaccct

SEQ ID NO: 5318969 - DNA, 25 bp, Homo sapien
ccccactgcgcaggggtgctgcaac

SEQ ID NO: 5318970 - DNA, 25 bp, Homo sapien
agttctaatttagatgtcactgtca

SEQ ID NO: 5318971 - DNA, 25 bp, Homo sapien
ttctaatttagatgtcactgtcaaa

SEQ ID NO: 5318972 - DNA, 25 bp, Homo sapien
gttctaatttagatgtcactgtcaa

SEQ ID NO: 5318973 - DNA, 25 bp, Homo sapien
tccttggcatatacccttagaccca

SEQ ID NO: 5318974 - DNA, 25 bp, Homo sapien
gcatatacccttagacccaaaatta

SEQ ID NO: 5318975 - DNA, 25 bp, Homo sapien
tgtccttggcatatacccttagacc

SEQ ID NO: 5318976 - DNA, 25 bp, Homo sapien
ttggcatatacccttagacccaaaa

SEQ ID NO: 5318977 - DNA, 25 bp, Homo sapien
aacaatcaagaccaacataaaaagg

SEQ ID NO: 5318978 - DNA, 25 bp, Homo sapien
gctggggatcattaacaacaatcaa

SEQ ID NO: 5318979 - DNA, 25 bp, Homo sapien
ggcagcaggacttctctccctcttg

SEQ ID NO: 5318980 - DNA, 25 bp, Homo sapien
aaaggcagcaggacttctctccctc

SEQ ID NO: 5318981 - DNA, 25 bp, Homo sapien
cctgtccttggatgcatggatgtcc

SEQ ID NO: 5318982 - DNA, 25 bp, Homo sapien
cctaagagttggaggtgatggcctc

SEQ ID NO: 5318983 - DNA, 25 bp, Homo sapien
ggcctcagtgactgcatgcaggttt

SEQ ID NO: 5318984 - DNA, 25 bp, Homo sapien
caagtccaggcccaactctactgtg

SEQ ID NO: 5318985 - DNA, 25 bp, Homo sapien
tgttgtgtccatctaactctccttt

SEQ ID NO: 5318986 - DNA, 25 bp, Homo sapien
gttgtgtccatctaactctcctttc

SEQ ID NO: 5318987 - DNA, 25 bp, Homo sapien
caaggcattggatccagtgaggtag

SEQ ID NO: 5318988 - DNA, 25 bp, Homo sapien
tattcgcttctgttgatttcctctg

SEQ ID NO: 5318989 - DNA, 25 bp, Homo sapien
actttggccacaccaactgattcag

SEQ ID NO: 5318990 - DNA, 25 bp, Homo sapien
ctctggaagaactgcgtttacattc

SEQ ID NO: 5318991 - DNA, 25 bp, Homo sapien
cattaacgctaatgtgaaggcctaa

SEQ ID NO: 5318992 - DNA, 25 bp, Homo sapien
attaacgctaatgtgaaggcctaac

SEQ ID NO: 5318993 - DNA, 25 bp, Homo sapien
cagggagcccagatgaacattcacg

SEQ ID NO: 5318994 - DNA, 25 bp, Homo sapien
gaacattcacgtgcttctagaacat

SEQ ID NO: 5318995 - DNA, 25 bp, Homo sapien
gggctgtgccctgcttcgtggtcca

SEQ ID NO: 5318996 - DNA, 25 bp, Homo sapien
gccctgcttcgtggtccaggtggac

SEQ ID NO: 5318997 - DNA, 25 bp, Homo sapien
ttctgaaattaactgaggggacatg

SEQ ID NO: 5318998 - DNA, 25 bp, Homo sapien
attctgaaattaactgaggggacat

SEQ ID NO: 5318999 - DNA, 25 bp, Homo sapien
tctgaaattaactgaggggacatga

SEQ ID NO: 5319000 - DNA, 25 bp, Homo sapien
acaatccaagggacccgaaaatgtg

SEQ ID NO: 5319001 - DNA, 25 bp, Homo sapien
tacctccttgggcatgagaatggac

SEQ ID NO: 5319002 - DNA, 25 bp, Homo sapien
tgtgctcatccagacactttgaaca

SEQ ID NO: 5319003 - DNA, 25 bp, Homo sapien
gacccgaaaatgtgctcatccagac

SEQ ID NO: 5319004 - DNA, 25 bp, Homo sapien
cagacaaattgtgccgattgtctgt

SEQ ID NO: 5319005 - DNA, 25 bp, Homo sapien
acagacaaattgtgccgattgtctg

SEQ ID NO: 5319006 - DNA, 25 bp, Homo sapien
gacaaattgtgccgattgtctgtat

SEQ ID NO: 5319007 - DNA, 25 bp, Homo sapien
caaattgtgccgattgtctgtattt

SEQ ID NO: 5319008 - DNA, 25 bp, Homo sapien
tagatttctggaatacggtgtgcga

SEQ ID NO: 5319009 - DNA, 25 bp, Homo sapien
gcagacctgattgcttgccatatgg

SEQ ID NO: 5319010 - DNA, 25 bp, Homo sapien
gtgtgcgatgaaaccactgacctct

SEQ ID NO: 5319011 - DNA, 25 bp, Homo sapien
tatggacctagtgattgcagacctg

SEQ ID NO: 5319012 - DNA, 25 bp, Homo sapien
tagtagtgttcaaagaaccccatcc

SEQ ID NO: 5319013 - DNA, 25 bp, Homo sapien
gctgagacctgtgcacctttgaaat

SEQ ID NO: 5319014 - DNA, 25 bp, Homo sapien
ctgttaaaagcaatcagtaaggtct

SEQ ID NO: 5319015 - DNA, 25 bp, Homo sapien
tattcatcacttaggtttggcagct

SEQ ID NO: 5319016 - DNA, 25 bp, Homo sapien
atcagcctcattgcttttattactt

SEQ ID NO: 5319017 - DNA, 25 bp, Homo sapien
gattccttcatcttaaatgctttct

SEQ ID NO: 5319018 - DNA, 25 bp, Homo sapien
caatgattccttcatcttaaatgct

SEQ ID NO: 5319019 - DNA, 25 bp, Homo sapien
ttcaatgattccttcatcttaaatg

SEQ ID NO: 5319020 - DNA, 25 bp, Homo sapien
atgattccttcatcttaaatgcttt

SEQ ID NO: 5319021 - DNA, 25 bp, Homo sapien
agttttggccatctcttgaactgtt

SEQ ID NO: 5319022 - DNA, 25 bp, Homo sapien
taaagcctttgtgaaggtgtgtggg

SEQ ID NO: 5319023 - DNA, 25 bp, Homo sapien
taaagttttggccatctcttgaact

SEQ ID NO: 5319024 - DNA, 25 bp, Homo sapien
tggtgtaaagttttggccatctctt

SEQ ID NO: 5319025 - DNA, 25 bp, Homo sapien
agtgcggagggtaccacatagggag

SEQ ID NO: 5319026 - DNA, 25 bp, Homo sapien
tgcggagggtaccacatagggagag

SEQ ID NO: 5319027 - DNA, 25 bp, Homo sapien
cagtgcggagggtaccacataggga

SEQ ID NO: 5319028 - DNA, 25 bp, Homo sapien
gtgcggagggtaccacatagggaga

SEQ ID NO: 5319029 - DNA, 25 bp, Homo sapien
aggaagacgaggtgaagggtgaaag

SEQ ID NO: 5319030 - DNA, 25 bp, Homo sapien
ggcgctcacatcctgttagcttgct

SEQ ID NO: 5319031 - DNA, 25 bp, Homo sapien
tgaaaggcgctcacatcctgttagc

SEQ ID NO: 5319032 - DNA, 25 bp, Homo sapien
tgaagggtgaaaggcgctcacatcc

SEQ ID NO: 5319033 - DNA, 25 bp, Homo sapien
atattcttgggactcagggatcttc

SEQ ID NO: 5319034 - DNA, 25 bp, Homo sapien
attcttgggactcagggatcttcat

SEQ ID NO: 5319035 - DNA, 25 bp, Homo sapien
caaatattcttgggactcagggatc

SEQ ID NO: 5319036 - DNA, 25 bp, Homo sapien
aaatattcttgggactcagggatct

SEQ ID NO: 5319037 - DNA, 25 bp, Homo sapien
gatgctagctaaagggcatgtcaat

SEQ ID NO: 5319038 - DNA, 25 bp, Homo sapien
atgctagctaaagggcatgtcaatg

SEQ ID NO: 5319039 - DNA, 25 bp, Homo sapien
aaatgtgccaatgactcattgtatc

SEQ ID NO: 5319040 - DNA, 25 bp, Homo sapien
tcccacatactattgggtaagttga

SEQ ID NO: 5319041 - DNA, 25 bp, Homo sapien
ggtcttgcattactgcgatgaaatc

SEQ ID NO: 5319042 - DNA, 25 bp, Homo sapien
gggtaagttgatgtgttcaccttcc

SEQ ID NO: 5319043 - DNA, 25 bp, Homo sapien
cagggatcatttacatactgtggtc

SEQ ID NO: 5319044 - DNA, 25 bp, Homo sapien
ggataggctactggatattttctca

SEQ ID NO: 5319045 - DNA, 25 bp, Homo sapien
ctgttttgtgaagtgatacttggat

SEQ ID NO: 5319046 - DNA, 25 bp, Homo sapien
ctttcaaggacgtggacttttctgt

SEQ ID NO: 5319047 - DNA, 25 bp, Homo sapien
ctctttcaaggacgtggacttttct

SEQ ID NO: 5319048 - DNA, 25 bp, Homo sapien
tctatcaaaggcatgtgactgccaa

SEQ ID NO: 5319049 - DNA, 25 bp, Homo sapien
gccaatgatcattggagctgatcaa

SEQ ID NO: 5319050 - DNA, 25 bp, Homo sapien
cattggagctgatcaaagtcacact

SEQ ID NO: 5319051 - DNA, 25 bp, Homo sapien
gcatgtgactgccaatgatcattgg

SEQ ID NO: 5319052 - DNA, 25 bp, Homo sapien
tgacagtgacgctaggaggtttgca

SEQ ID NO: 5319053 - DNA, 25 bp, Homo sapien
cacacaagatcatatatggtagcta

SEQ ID NO: 5319054 - DNA, 25 bp, Homo sapien
gagattgacatagggtagggcaaca

SEQ ID NO: 5319055 - DNA, 25 bp, Homo sapien
aagtaataatgagcagttgcaggtg

SEQ ID NO: 5319056 - DNA, 25 bp, Homo sapien
tcgctgcatcccacaccttccttgt

SEQ ID NO: 5319057 - DNA, 25 bp, Homo sapien
ccatcagggcagttagctggacggt

SEQ ID NO: 5319058 - DNA, 25 bp, Homo sapien
tgctggcagcacagtgtccctcgct

SEQ ID NO: 5319059 - DNA, 25 bp, Homo sapien
gcctgttccatcagggcagttagct

SEQ ID NO: 5319060 - DNA, 25 bp, Homo sapien
accactcgccattcatcagtttatg

SEQ ID NO: 5319061 - DNA, 25 bp, Homo sapien
cactcgccattcatcagtttatgca

SEQ ID NO: 5319062 - DNA, 25 bp, Homo sapien
caccactcgccattcatcagtttat

SEQ ID NO: 5319063 - DNA, 25 bp, Homo sapien
cagcccaccactcgccattcatcag

SEQ ID NO: 5319064 - DNA, 25 bp, Homo sapien
aattcttggactctgggtcagcctc

SEQ ID NO: 5319065 - DNA, 25 bp, Homo sapien
ggtcagcctcgtttctcatgtaaaa

SEQ ID NO: 5319066 - DNA, 25 bp, Homo sapien
gcctcgtttctcatgtaaaactctt

SEQ ID NO: 5319067 - DNA, 25 bp, Homo sapien
aactctttcagctgataatctattt

SEQ ID NO: 5319068 - DNA, 25 bp, Homo sapien
tcatgagacacagtaagtctttctt

SEQ ID NO: 5319069 - DNA, 25 bp, Homo sapien
agtctttctttttgcgctatgtttc

SEQ ID NO: 5319070 - DNA, 25 bp, Homo sapien
cccaaataggtaatgtagtttcatg

SEQ ID NO: 5319071 - DNA, 25 bp, Homo sapien
tttgcgctatgtttcatcgtttcgt

SEQ ID NO: 5319072 - DNA, 25 bp, Homo sapien
caagggtaaatcttggtgtgcagcc

SEQ ID NO: 5319073 - DNA, 25 bp, Homo sapien
gacagactacatccatcgagagcat

SEQ ID NO: 5319074 - DNA, 25 bp, Homo sapien
tgtcgacaactgtgtattgccgaaa

SEQ ID NO: 5319075 - DNA, 25 bp, Homo sapien
gagctcaatagtcccctgattccag

SEQ ID NO: 5319076 - DNA, 25 bp, Homo sapien
taattggattgtcattgggctgaga

SEQ ID NO: 5319077 - DNA, 25 bp, Homo sapien
cctattatctttggatcatgcccca

SEQ ID NO: 5319078 - DNA, 25 bp, Homo sapien
aattagagtgcatgaagttggcttt

SEQ ID NO: 5319079 - DNA, 25 bp, Homo sapien
gaagttggctttgattggcattgta

SEQ ID NO: 5319080 - DNA, 25 bp, Homo sapien
ttgtcattattgtttagcaggagca

SEQ ID NO: 5319081 - DNA, 25 bp, Homo sapien
tttgcacaagtatgagctccagcaa

SEQ ID NO: 5319082 - DNA, 25 bp, Homo sapien
cattattgtttagcaggagcacagc

SEQ ID NO: 5319083 - DNA, 25 bp, Homo sapien
cagccaaattttgggtagtttgcac

SEQ ID NO: 5319084 - DNA, 25 bp, Homo sapien
gcattcagtgagaacgatgatggtt

SEQ ID NO: 5319085 - DNA, 25 bp, Homo sapien
tcacgcacagtacacttggtcaatg

SEQ ID NO: 5319086 - DNA, 25 bp, Homo sapien
cgatgatggttaaaggttggatttc

SEQ ID NO: 5319087 - DNA, 25 bp, Homo sapien
gcacagtacacttggtcaatgcatt

SEQ ID NO: 5319088 - DNA, 25 bp, Homo sapien
gatgcaaacattacaggatgtgcct

SEQ ID NO: 5319089 - DNA, 25 bp, Homo sapien
tcacttttggtaaggatcccacaga

SEQ ID NO: 5319090 - DNA, 25 bp, Homo sapien
catgcaatatgatgtggacaaggaa

SEQ ID NO: 5319091 - DNA, 25 bp, Homo sapien
aaggatcccacagaatagtcatgca

SEQ ID NO: 5319092 - DNA, 25 bp, Homo sapien
ttctggcaaatattatgcatggtgg

SEQ ID NO: 5319093 - DNA, 25 bp, Homo sapien
tctgtgctgaagacacgttcaatag

SEQ ID NO: 5319094 - DNA, 25 bp, Homo sapien
gaggtggtttaactcttctggcaaa

SEQ ID NO: 5319095 - DNA, 25 bp, Homo sapien
cgttcccaagtcaactctgtgctga

SEQ ID NO: 5319096 - DNA, 25 bp, Homo sapien
tgcaaatttccagcaacagaggcca

SEQ ID NO: 5319097 - DNA, 25 bp, Homo sapien
tacaagggctggtgtagttcatgct

SEQ ID NO: 5319098 - DNA, 25 bp, Homo sapien
gccctgggacctttctacacatgca

SEQ ID NO: 5319099 - DNA, 25 bp, Homo sapien
gaagtgccacaaattttgccctggg

SEQ ID NO: 5319100 - DNA, 25 bp, Homo sapien
taaaacatcgcccacagtttgtgtc

SEQ ID NO: 5319101 - DNA, 25 bp, Homo sapien
cagtttgtgtctgcccaagtgtcca

SEQ ID NO: 5319102 - DNA, 25 bp, Homo sapien
ggtggttggaatcataaaacatcgc

SEQ ID NO: 5319103 - DNA, 25 bp, Homo sapien
gtggttggaatcataaaacatcgcc

SEQ ID NO: 5319104 - DNA, 25 bp, Homo sapien
tgccagtttgaaagtattccaccat

SEQ ID NO: 5319105 - DNA, 25 bp, Homo sapien
ggtgccagtttgaaagtattccacc

SEQ ID NO: 5319106 - DNA, 25 bp, Homo sapien
cttggtgccagtttgaaagtattcc

SEQ ID NO: 5319107 - DNA, 25 bp, Homo sapien
tggtgccagtttgaaagtattccac

SEQ ID NO: 5319108 - DNA, 25 bp, Homo sapien
gaggatcttgcctctactttagcaa

SEQ ID NO: 5319109 - DNA, 25 bp, Homo sapien
cacaacacttgatgtccataaaaac

SEQ ID NO: 5319110 - DNA, 25 bp, Homo sapien
ctctctgctgtacatatcatttgtg

SEQ ID NO: 5319111 - DNA, 25 bp, Homo sapien
cattctgtggaagcatcattattca

SEQ ID NO: 5319112 - DNA, 25 bp, Homo sapien
ttggcattgcttgagacttatctga

SEQ ID NO: 5319113 - DNA, 25 bp, Homo sapien
gaagataaataaaagattcagccgg

SEQ ID NO: 5319114 - DNA, 25 bp, Homo sapien
gcagagcagcatgtctttggcattg

SEQ ID NO: 5319115 - DNA, 25 bp, Homo sapien
aataaaagattcagccgggtgccac

SEQ ID NO: 5319116 - DNA, 25 bp, Homo sapien
ctttttgataccaacactgcccggc

SEQ ID NO: 5319117 - DNA, 25 bp, Homo sapien
gataccaacactgcccggctagctg

SEQ ID NO: 5319118 - DNA, 25 bp, Homo sapien
ccactgccaccacgttgccttttct

SEQ ID NO: 5319119 - DNA, 25 bp, Homo sapien
gtttcctaccacttcctcagcctcc

SEQ ID NO: 5319120 - DNA, 25 bp, Homo sapien
gaatcctcgtaaaaggagaagacca

SEQ ID NO: 5319121 - DNA, 25 bp, Homo sapien
cctggctcatgaagtggtattgatt

SEQ ID NO: 5319122 - DNA, 25 bp, Homo sapien
ggagaagaccaagacctggctcatg

SEQ ID NO: 5319123 - DNA, 25 bp, Homo sapien
cagtaatggccccttgcattgacag

SEQ ID NO: 5319124 - DNA, 25 bp, Homo sapien
ctgtgattcgtggagatgatcatgt

SEQ ID NO: 5319125 - DNA, 25 bp, Homo sapien
aatgctgtgattcgtggagatgatc

SEQ ID NO: 5319126 - DNA, 25 bp, Homo sapien
gaatgctgtgattcgtggagatgat

SEQ ID NO: 5319127 - DNA, 25 bp, Homo sapien
tgctgtgattcgtggagatgatcat

SEQ ID NO: 5319128 - DNA, 25 bp, Homo sapien
cacatgcttcagcaaagtttccagc

SEQ ID NO: 5319129 - DNA, 25 bp, Homo sapien
ctccacacatgcttcagcaaagttt

SEQ ID NO: 5319130 - DNA, 25 bp, Homo sapien
catgcttcagcaaagtttccagctc

SEQ ID NO: 5319131 - DNA, 25 bp, Homo sapien
cacacatgcttcagcaaagtttcca

SEQ ID NO: 5319132 - DNA, 25 bp, Homo sapien
agacaattgacagttggtccagttg

SEQ ID NO: 5319133 - DNA, 25 bp, Homo sapien
caattgacagttggtccagttgcag

SEQ ID NO: 5319134 - DNA, 25 bp, Homo sapien
aattgacagttggtccagttgcagg

SEQ ID NO: 5319135 - DNA, 25 bp, Homo sapien
caaagacaattgacagttggtccag

SEQ ID NO: 5319136 - DNA, 25 bp, Homo sapien
gagcaaaaatgtttcggaggaatga

SEQ ID NO: 5319137 - DNA, 25 bp, Homo sapien
gcttagtaccagatatggaagcgta

SEQ ID NO: 5319138 - DNA, 25 bp, Homo sapien
tatttggatctactggcttagtacc

SEQ ID NO: 5319139 - DNA, 25 bp, Homo sapien
gaggaatgagtaccccagaggtccc

SEQ ID NO: 5319140 - DNA, 25 bp, Homo sapien
gaacaaggatcatgtttggatgacc

SEQ ID NO: 5319141 - DNA, 25 bp, Homo sapien
ccagggtagaattcacagatttgca

SEQ ID NO: 5319142 - DNA, 25 bp, Homo sapien
ggcactgggagttacatggatattt

SEQ ID NO: 5319143 - DNA, 25 bp, Homo sapien
tacaaaatcaccagaggcacatttg

SEQ ID NO: 5319144 - DNA, 25 bp, Homo sapien
cttcatccaacaaacagtcaacgtg

SEQ ID NO: 5319145 - DNA, 25 bp, Homo sapien
caaccgtatgttggcttttagaact

SEQ ID NO: 5319146 - DNA, 25 bp, Homo sapien
ttccaaatggaagcctctgagtcca

SEQ ID NO: 5319147 - DNA, 25 bp, Homo sapien
tgagtccagaaccacaatctggcca

SEQ ID NO: 5319148 - DNA, 25 bp, Homo sapien
gggcctaatagagtaaatcatgtcc

SEQ ID NO: 5319149 - DNA, 25 bp, Homo sapien
gcctaatagagtaaatcatgtccat

SEQ ID NO: 5319150 - DNA, 25 bp, Homo sapien
ctgggcctaatagagtaaatcatgt

SEQ ID NO: 5319151 - DNA, 25 bp, Homo sapien
tgggcctaatagagtaaatcatgtc

SEQ ID NO: 5319152 - DNA, 25 bp, Homo sapien
taccaatgaccgaaagagaccttcc

SEQ ID NO: 5319153 - DNA, 25 bp, Homo sapien
gaatggcaccctcctagagaggaaa

SEQ ID NO: 5319154 - DNA, 25 bp, Homo sapien
taagagctgctacggtacctgtgtg

SEQ ID NO: 5319155 - DNA, 25 bp, Homo sapien
gaggttcccatgagagtttactaaa

SEQ ID NO: 5319156 - DNA, 25 bp, Homo sapien
cacttatgtgtttttagaatgcatg

SEQ ID NO: 5319157 - DNA, 25 bp, Homo sapien
ctcagtaggcaaggtacttttggag

SEQ ID NO: 5319158 - DNA, 25 bp, Homo sapien
tatccaaatatgaagtaggctgttg

SEQ ID NO: 5319159 - DNA, 25 bp, Homo sapien
tttaccttctttgcgaaggcagaag

SEQ ID NO: 5319160 - DNA, 25 bp, Homo sapien
aaacaggtaggcttctcccgtctat

SEQ ID NO: 5319161 - DNA, 25 bp, Homo sapien
taaagcattggtcttcacataatgc

SEQ ID NO: 5319162 - DNA, 25 bp, Homo sapien
taggcttctcccgtctatgtggttc

SEQ ID NO: 5319163 - DNA, 25 bp, Homo sapien
taatgctaccaccttgctcttagct

SEQ ID NO: 5319164 - DNA, 25 bp, Homo sapien
atccaactcagttccccctgtcttg

SEQ ID NO: 5319165 - DNA, 25 bp, Homo sapien
ctggctgtctgcatccaactcagtt

SEQ ID NO: 5319166 - DNA, 25 bp, Homo sapien
gaatcatggcaagaggctgctctct

SEQ ID NO: 5319167 - DNA, 25 bp, Homo sapien
aatcatggcaagaggctgctctctg

SEQ ID NO: 5319168 - DNA, 25 bp, Homo sapien
tatatccttgccgataggctgccat

SEQ ID NO: 5319169 - DNA, 25 bp, Homo sapien
tggaaatttggtgcccttgcagctt

SEQ ID NO: 5319170 - DNA, 25 bp, Homo sapien
ggaaatttggtgcccttgcagcttc

SEQ ID NO: 5319171 - DNA, 25 bp, Homo sapien
ctggaaatttggtgcccttgcagct

SEQ ID NO: 5319172 - DNA, 25 bp, Homo sapien
cctggaaatttggtgcccttgcagc

SEQ ID NO: 5319173 - DNA, 25 bp, Homo sapien
tgtcaccctgaatagtttctcaatt

SEQ ID NO: 5319174 - DNA, 25 bp, Homo sapien
ctgtcaccctgaatagtttctcaat

SEQ ID NO: 5319175 - DNA, 25 bp, Homo sapien
gctgtcaccctgaatagtttctcaa

SEQ ID NO: 5319176 - DNA, 25 bp, Homo sapien
ggctgtcaccctgaatagtttctca

SEQ ID NO: 5319177 - DNA, 25 bp, Homo sapien
atttcatcattaaggaagcaggtcc

SEQ ID NO: 5319178 - DNA, 25 bp, Homo sapien
tcttcaggttgatttacatagcagc

SEQ ID NO: 5319179 - DNA, 25 bp, Homo sapien
tcttggcttgtctggcaagcaattc

SEQ ID NO: 5319180 - DNA, 25 bp, Homo sapien
tacatagcagcgtgacatttcatca

SEQ ID NO: 5319181 - DNA, 25 bp, Homo sapien
tgtttctgaacagccccaaccgcag

SEQ ID NO: 5319182 - DNA, 25 bp, Homo sapien
aatttggagacaaagccaggttctg

SEQ ID NO: 5319183 - DNA, 25 bp, Homo sapien
tattatatcctctgaaatgatggtt

SEQ ID NO: 5319184 - DNA, 25 bp, Homo sapien
tcaacttgctccgaaaactcggaat

SEQ ID NO: 5319185 - DNA, 25 bp, Homo sapien
cttggaggggtgccttggcagtgca

SEQ ID NO: 5319186 - DNA, 25 bp, Homo sapien
tggaggggtgccttggcagtgcaca

SEQ ID NO: 5319187 - DNA, 25 bp, Homo sapien
cttcttggaggggtgccttggcagt

SEQ ID NO: 5319188 - DNA, 25 bp, Homo sapien
ggaggggtgccttggcagtgcacat

SEQ ID NO: 5319189 - DNA, 25 bp, Homo sapien
cactgtgggtccagatgtatgggtt

SEQ ID NO: 5319190 - DNA, 25 bp, Homo sapien
agatgtatgggttgcattctgctgg

SEQ ID NO: 5319191 - DNA, 25 bp, Homo sapien
ctgagtacagtcaagtaaataaatc

SEQ ID NO: 5319192 - DNA, 25 bp, Homo sapien
ggtccagatgtatgggttgcattct

SEQ ID NO: 5319193 - DNA, 25 bp, Homo sapien
ttaaatatcaatggagcattgctgt

SEQ ID NO: 5319194 - DNA, 25 bp, Homo sapien
aatggagcattgctgtgtctgcacc

SEQ ID NO: 5319195 - DNA, 25 bp, Homo sapien
tatcaatggagcattgctgtgtctg

SEQ ID NO: 5319196 - DNA, 25 bp, Homo sapien
taaatatcaatggagcattgctgtg

SEQ ID NO: 5319197 - DNA, 25 bp, Homo sapien
tgttcagtggacacctctttgttgt

SEQ ID NO: 5319198 - DNA, 25 bp, Homo sapien
ccatatttgttcagtggacacctct

SEQ ID NO: 5319199 - DNA, 25 bp, Homo sapien
cagtggacacctctttgttgtcttt

SEQ ID NO: 5319200 - DNA, 25 bp, Homo sapien
tatttgttcagtggacacctctttg

SEQ ID NO: 5319201 - DNA, 25 bp, Homo sapien
tgtctgtgcactaataatcctctga

SEQ ID NO: 5319202 - DNA, 25 bp, Homo sapien
tccaagtgacgtactctgtgttttc

SEQ ID NO: 5319203 - DNA, 25 bp, Homo sapien
taagatggcagtcattctccacagc

SEQ ID NO: 5319204 - DNA, 25 bp, Homo sapien
tgaagctataacaccctccaagtga

SEQ ID NO: 5319205 - DNA, 25 bp, Homo sapien
tctgttcccggaaggaccaaggctc

SEQ ID NO: 5319206 - DNA, 25 bp, Homo sapien
tacccctgacaagagctgagttgcc

SEQ ID NO: 5319207 - DNA, 25 bp, Homo sapien
aaaggaagaattagccgcctgcttg

SEQ ID NO: 5319208 - DNA, 25 bp, Homo sapien
cttgaatcgaccgtatgtgtgttgg

SEQ ID NO: 5319209 - DNA, 25 bp, Homo sapien
tgagagttgtgatgagacgtacccc

SEQ ID NO: 5319210 - DNA, 25 bp, Homo sapien
gctaaccaacaattatagtctgaca

SEQ ID NO: 5319211 - DNA, 25 bp, Homo sapien
tataactcatctggtaaccttgctg

SEQ ID NO: 5319212 - DNA, 25 bp, Homo sapien
tatagtctgacatttgaatacaaag

SEQ ID NO: 5319213 - DNA, 25 bp, Homo sapien
ggacaagccacagttgtacatggaa

SEQ ID NO: 5319214 - DNA, 25 bp, Homo sapien
ttgccctgccctgcaccatccttca

SEQ ID NO: 5319215 - DNA, 25 bp, Homo sapien
cttgccctgccctgcaccatccttc

SEQ ID NO: 5319216 - DNA, 25 bp, Homo sapien
tgccctgccctgcaccatccttcat

SEQ ID NO: 5319217 - DNA, 25 bp, Homo sapien
tagacaatatctagggtaacccctc

SEQ ID NO: 5319218 - DNA, 25 bp, Homo sapien
cgatgtaattggtagttagtgtgaa

SEQ ID NO: 5319219 - DNA, 25 bp, Homo sapien
gccaaaaggtttatggcgatgtaat

SEQ ID NO: 5319220 - DNA, 25 bp, Homo sapien
tatggcatacagcttgaagtagcca

SEQ ID NO: 5319221 - DNA, 25 bp, Homo sapien
ttcctggaaccgcacaaatactgtg

SEQ ID NO: 5319222 - DNA, 25 bp, Homo sapien
cattcaacctgcacgggaagcttcc

SEQ ID NO: 5319223 - DNA, 25 bp, Homo sapien
tattccaagcacaaagtgagcagcg

SEQ ID NO: 5319224 - DNA, 25 bp, Homo sapien
tgagcagcgcatttctagagcctga

SEQ ID NO: 5319225 - DNA, 25 bp, Homo sapien
ggttttagcctgatgatctctagca

SEQ ID NO: 5319226 - DNA, 25 bp, Homo sapien
cggaatagccagtctagtgtttaga

SEQ ID NO: 5319227 - DNA, 25 bp, Homo sapien
gcagctcacgatataaaagcattag

SEQ ID NO: 5319228 - DNA, 25 bp, Homo sapien
gcattctcataatttgcttcttatc

SEQ ID NO: 5319229 - DNA, 25 bp, Homo sapien
tcttgttgctcacttaagggcttct

SEQ ID NO: 5319230 - DNA, 25 bp, Homo sapien
tttctgtttcgatgaattctgatgg

SEQ ID NO: 5319231 - DNA, 25 bp, Homo sapien
ttgctcacttaagggcttcttggtg

SEQ ID NO: 5319232 - DNA, 25 bp, Homo sapien
gtttcgatgaattctgatggaccag

SEQ ID NO: 5319233 - DNA, 25 bp, Homo sapien
ggcacttctcctgcccattgacaaa

SEQ ID NO: 5319234 - DNA, 25 bp, Homo sapien
tcctgcccattgacaaatgcgtcca

SEQ ID NO: 5319235 - DNA, 25 bp, Homo sapien
ccattgacaaatgcgtccattctcc

SEQ ID NO: 5319236 - DNA, 25 bp, Homo sapien
aaagatggcacttctcctgcccatt

SEQ ID NO: 5319237 - DNA, 25 bp, Homo sapien
ggaaactcccttcattgaatgtgct

SEQ ID NO: 5319238 - DNA, 25 bp, Homo sapien
gatcaggccctagcagctgttggga

SEQ ID NO: 5319239 - DNA, 25 bp, Homo sapien
tctttgttggcagcaacaggacgct

SEQ ID NO: 5319240 - DNA, 25 bp, Homo sapien
catctcttgaattgggatcaggccc

SEQ ID NO: 5319241 - DNA, 25 bp, Homo sapien
caatctcctagactgcaaggcttga

SEQ ID NO: 5319242 - DNA, 25 bp, Homo sapien
tgaaagatcatagtggccctccaag

SEQ ID NO: 5319243 - DNA, 25 bp, Homo sapien
aatattcgacaaaatgccgcctgca

SEQ ID NO: 5319244 - DNA, 25 bp, Homo sapien
cctggaagacccgaaataatctgtt

SEQ ID NO: 5319245 - DNA, 25 bp, Homo sapien
tatggtctaggtctgtgaaaaggac

SEQ ID NO: 5319246 - DNA, 25 bp, Homo sapien
cattatagaaaggtcagtcaggttc

SEQ ID NO: 5319247 - DNA, 25 bp, Homo sapien
gcgtagccagtatctacaagccaca

SEQ ID NO: 5319248 - DNA, 25 bp, Homo sapien
caaggagtaccacccacacatgaaa

SEQ ID NO: 5319249 - DNA, 25 bp, Homo sapien
tcggccgtaatgatgttattagtat

SEQ ID NO: 5319250 - DNA, 25 bp, Homo sapien
gccgtaatgatgttattagtatgca

SEQ ID NO: 5319251 - DNA, 25 bp, Homo sapien
agcccagatgtagcctttagcagcc

SEQ ID NO: 5319252 - DNA, 25 bp, Homo sapien
gtagcctttagcagcccaagccctt

SEQ ID NO: 5319253 - DNA, 25 bp, Homo sapien
tacagcgtttctcttacctggagga

SEQ ID NO: 5319254 - DNA, 25 bp, Homo sapien
tctttgtgccatgttagactaccca

SEQ ID NO: 5319255 - DNA, 25 bp, Homo sapien
tccgtttggccgagaaagaagccaa

SEQ ID NO: 5319256 - DNA, 25 bp, Homo sapien
ttgaataatatcctgggccaagcgt

SEQ ID NO: 5319257 - DNA, 25 bp, Homo sapien
cggagcgactttcccagagtggagt

SEQ ID NO: 5319258 - DNA, 25 bp, Homo sapien
tgcagtaaacattttcggagcgact

SEQ ID NO: 5319259 - DNA, 25 bp, Homo sapien
taacttcgaataaaggcaattgctg

SEQ ID NO: 5319260 - DNA, 25 bp, Homo sapien
gctgtggtctcaaaagatgggcaag

SEQ ID NO: 5319261 - DNA, 25 bp, Homo sapien
cattttagaatcactaagtaatgac

SEQ ID NO: 5319262 - DNA, 25 bp, Homo sapien
ctgactctattatcttacaaaacat

SEQ ID NO: 5319263 - DNA, 25 bp, Homo sapien
tagaatctgagttagctgactctat

SEQ ID NO: 5319264 - DNA, 25 bp, Homo sapien
ttttccgttgttccagtagaatctg

SEQ ID NO: 5319265 - DNA, 25 bp, Homo sapien
gaccactgaaaccacttgtggctgc

SEQ ID NO: 5319266 - DNA, 25 bp, Homo sapien
ccaaatccatagcatagctctgatc

SEQ ID NO: 5319267 - DNA, 25 bp, Homo sapien
tccaaatccatagcatagctctgat

SEQ ID NO: 5319268 - DNA, 25 bp, Homo sapien
ctccaaatccatagcatagctctga

SEQ ID NO: 5319269 - DNA, 25 bp, Homo sapien
caaatccatagcatagctctgatcc

SEQ ID NO: 5319270 - DNA, 25 bp, Homo sapien
cactgaactctgctgatgctcaggc

SEQ ID NO: 5319271 - DNA, 25 bp, Homo sapien
gaactctgctgatgctcaggcaggc

SEQ ID NO: 5319272 - DNA, 25 bp, Homo sapien
actgaactctgctgatgctcaggca

SEQ ID NO: 5319273 - DNA, 25 bp, Homo sapien
tgaactctgctgatgctcaggcagg

SEQ ID NO: 5319274 - DNA, 25 bp, Homo sapien
ttaggattgtctaacacttggaagc

SEQ ID NO: 5319275 - DNA, 25 bp, Homo sapien
gaggtacgtagcactttcttccaca

SEQ ID NO: 5319276 - DNA, 25 bp, Homo sapien
cagccacggaaatacgccttttact

SEQ ID NO: 5319277 - DNA, 25 bp, Homo sapien
aaagctgaccgaggaagtcaaaatg

SEQ ID NO: 5319278 - DNA, 25 bp, Homo sapien
tcttgacaacgctgagtgaaccagg

SEQ ID NO: 5319279 - DNA, 25 bp, Homo sapien
ctctctgagaggtatcgctggatga

SEQ ID NO: 5319280 - DNA, 25 bp, Homo sapien
gagatattacccatgcagtccactc

SEQ ID NO: 5319281 - DNA, 25 bp, Homo sapien
tgaaccagggtgtgagatattaccc

SEQ ID NO: 5319282 - DNA, 25 bp, Homo sapien
aagacaaaggaacctcgggctgctt

SEQ ID NO: 5319283 - DNA, 25 bp, Homo sapien
caaaggaacctcgggctgctttttg

SEQ ID NO: 5319284 - DNA, 25 bp, Homo sapien
agacaaaggaacctcgggctgcttt

SEQ ID NO: 5319285 - DNA, 25 bp, Homo sapien
aggaacctcgggctgctttttgcat

SEQ ID NO: 5319286 - DNA, 25 bp, Homo sapien
ttacaaaggagacggaacaatacca

SEQ ID NO: 5319287 - DNA, 25 bp, Homo sapien
tcattaaggtaaggtaagagttggc

SEQ ID NO: 5319288 - DNA, 25 bp, Homo sapien
cagcagaatcttcaacattgagaag

SEQ ID NO: 5319289 - DNA, 25 bp, Homo sapien
ttgagaagataagaggttttcctcc

SEQ ID NO: 5319290 - DNA, 25 bp, Homo sapien
aatactgaagagataaattggtagc

SEQ ID NO: 5319291 - DNA, 25 bp, Homo sapien
gataaattggtagccgctgaaactg

SEQ ID NO: 5319292 - DNA, 25 bp, Homo sapien
tgaagagataaattggtagccgctg

SEQ ID NO: 5319293 - DNA, 25 bp, Homo sapien
gccgctgaaactgctcagcttctta

SEQ ID NO: 5319294 - DNA, 25 bp, Homo sapien
ttattctctactcccaagaaggttc

SEQ ID NO: 5319295 - DNA, 25 bp, Homo sapien
tattctctactcccaagaaggttct

SEQ ID NO: 5319296 - DNA, 25 bp, Homo sapien
tccctcttagtttcactcaggagaa

SEQ ID NO: 5319297 - DNA, 25 bp, Homo sapien
ctcttagtttcactcaggagaattc

SEQ ID NO: 5319298 - DNA, 25 bp, Homo sapien
gcagagatcagttaagcattgccac

SEQ ID NO: 5319299 - DNA, 25 bp, Homo sapien
tgtgccacaacgtaagacaggaatc

SEQ ID NO: 5319300 - DNA, 25 bp, Homo sapien
tcaagcgtaggactttggaaccact

SEQ ID NO: 5319301 - DNA, 25 bp, Homo sapien
gagcatgccgcctggctttaagaaa

SEQ ID NO: 5319302 - DNA, 25 bp, Homo sapien
tacattggaacacatgctgctagga

SEQ ID NO: 5319303 - DNA, 25 bp, Homo sapien
tataagaactcagtgtcttgtgact

SEQ ID NO: 5319304 - DNA, 25 bp, Homo sapien
caagatatagccgaaagaagtttca

SEQ ID NO: 5319305 - DNA, 25 bp, Homo sapien
gatactgtcacagctaaggctgtat

SEQ ID NO: 5319306 - DNA, 25 bp, Homo sapien
agaagtttcagaagatactgtcaca

SEQ ID NO: 5319307 - DNA, 25 bp, Homo sapien
tcaggacgactttgcaggcgcggcc

SEQ ID NO: 5319308 - DNA, 25 bp, Homo sapien
cctccagctgaggaacgttcaggac

SEQ ID NO: 5319309 - DNA, 25 bp, Homo sapien
tcttcttggcaatggtccagacact

SEQ ID NO: 5319310 - DNA, 25 bp, Homo sapien
ggcaatggtccagacactgagtagg

SEQ ID NO: 5319311 - DNA, 25 bp, Homo sapien
tcccctgttctcatgtgaactgccg

SEQ ID NO: 5319312 - DNA, 25 bp, Homo sapien
cttcccctgttctcatgtgaactgc

SEQ ID NO: 5319313 - DNA, 25 bp, Homo sapien
tgttctcatgtgaactgccgctctg

SEQ ID NO: 5319314 - DNA, 25 bp, Homo sapien
ccctgttctcatgtgaactgccgct

SEQ ID NO: 5319315 - DNA, 25 bp, Homo sapien
cttgtgtgatttttggatgtcccct

SEQ ID NO: 5319316 - DNA, 25 bp, Homo sapien
tcttgtgtgatttttggatgtcccc

SEQ ID NO: 5319317 - DNA, 25 bp, Homo sapien
gaaatgatgcctcagtgccttccct

SEQ ID NO: 5319318 - DNA, 25 bp, Homo sapien
ttgtgtgatttttggatgtcccctc

SEQ ID NO: 5319319 - DNA, 25 bp, Homo sapien
ctgggtacactcgagactttcccat

SEQ ID NO: 5319320 - DNA, 25 bp, Homo sapien
cattaattagctttggacctgggta

SEQ ID NO: 5319321 - DNA, 25 bp, Homo sapien
cctgggtacactcgagactttccca

SEQ ID NO: 5319322 - DNA, 25 bp, Homo sapien
gacctgggtacactcgagactttcc

SEQ ID NO: 5319323 - DNA, 25 bp, Homo sapien
ttaaagctgtagacactgctgtgta

SEQ ID NO: 5319324 - DNA, 25 bp, Homo sapien
aaagctgtagacactgctgtgtaag

SEQ ID NO: 5319325 - DNA, 25 bp, Homo sapien
gctgtgtaagggattcctaaagggc

SEQ ID NO: 5319326 - DNA, 25 bp, Homo sapien
ttttaaagctgtagacactgctgtg

SEQ ID NO: 5319327 - DNA, 25 bp, Homo sapien
taacaccgcctgtgccaatagacag

SEQ ID NO: 5319328 - DNA, 25 bp, Homo sapien
aaaggcagttgcgttgagatccagt

SEQ ID NO: 5319329 - DNA, 25 bp, Homo sapien
ggaagagatttcaaaggcagttgcg

SEQ ID NO: 5319330 - DNA, 25 bp, Homo sapien
gagatccagttggattgtgataaca

SEQ ID NO: 5319331 - DNA, 25 bp, Homo sapien
tcccattgcatgccagtgggaagag

SEQ ID NO: 5319332 - DNA, 25 bp, Homo sapien
cactcttggctagactttgggaatt

SEQ ID NO: 5319333 - DNA, 25 bp, Homo sapien
gaaggacagtacagtgaccaagccc

SEQ ID NO: 5319334 - DNA, 25 bp, Homo sapien
aagcccatagcctggatttgcacac

SEQ ID NO: 5319335 - DNA, 25 bp, Homo sapien
aacactttaccagtatgagtagcca

SEQ ID NO: 5319336 - DNA, 25 bp, Homo sapien
cactttaccagtatgagtagccagt

SEQ ID NO: 5319337 - DNA, 25 bp, Homo sapien
ctggacaaacactttaccagtatga

SEQ ID NO: 5319338 - DNA, 25 bp, Homo sapien
gacaaacactttaccagtatgagta

SEQ ID NO: 5319339 - DNA, 25 bp, Homo sapien
ctgtttattaatacaaatagcagag

SEQ ID NO: 5319340 - DNA, 25 bp, Homo sapien
ttattaatacaaatagcagaggaaa

SEQ ID NO: 5319341 - DNA, 25 bp, Homo sapien
taatacaaatagcagaggaaaggtg

SEQ ID NO: 5319342 - DNA, 25 bp, Homo sapien
ttaatacaaatagcagaggaaaggt

SEQ ID NO: 5319343 - DNA, 25 bp, Homo sapien
gatctctttgccgtagaagattcac

SEQ ID NO: 5319344 - DNA, 25 bp, Homo sapien
tgataatttgccgatctctttgccg

SEQ ID NO: 5319345 - DNA, 25 bp, Homo sapien
tttgccgtagaagattcacccaaac

SEQ ID NO: 5319346 - DNA, 25 bp, Homo sapien
cttgacattgtctggtttgataatt

SEQ ID NO: 5319347 - DNA, 25 bp, Homo sapien
gggtttccatgacccgtgagtcaat

SEQ ID NO: 5319348 - DNA, 25 bp, Homo sapien
ccatgacccgtgagtcaattgccat

SEQ ID NO: 5319349 - DNA, 25 bp, Homo sapien
gggattgggtttccatgacccgtga

SEQ ID NO: 5319350 - DNA, 25 bp, Homo sapien
gattgggtttccatgacccgtgagt

SEQ ID NO: 5319351 - DNA, 25 bp, Homo sapien
tccctgccataccatgaatgagttg

SEQ ID NO: 5319352 - DNA, 25 bp, Homo sapien
tagaaactgccatccagagtaagat

SEQ ID NO: 5319353 - DNA, 25 bp, Homo sapien
taactaagttgtcgtcccactgaga

SEQ ID NO: 5319354 - DNA, 25 bp, Homo sapien
tctccaaggcaagggtagttatata

SEQ ID NO: 5319355 - DNA, 25 bp, Homo sapien
cattccaagcctgacgaaaggtgtg

SEQ ID NO: 5319356 - DNA, 25 bp, Homo sapien
cagagcacagcgtggcatagaatcc

SEQ ID NO: 5319357 - DNA, 25 bp, Homo sapien
aaaggtgtgcggttgcagcagaccc

SEQ ID NO: 5319358 - DNA, 25 bp, Homo sapien
ccctggatttgatggtctgatgctc

SEQ ID NO: 5319359 - DNA, 25 bp, Homo sapien
cctctgctttgataacagtctggga

SEQ ID NO: 5319360 - DNA, 25 bp, Homo sapien
tcaatgttcggctgagggtagaacc

SEQ ID NO: 5319361 - DNA, 25 bp, Homo sapien
gggtagaaccagaccgtgtcatttc

SEQ ID NO: 5319362 - DNA, 25 bp, Homo sapien
gaatgggacgcaggtagagactctc

SEQ ID NO: 5319363 - DNA, 25 bp, Homo sapien
gtccatcctcccttctaaccagtcc

SEQ ID NO: 5319364 - DNA, 25 bp, Homo sapien
ccatcctcccttctaaccagtcctt

SEQ ID NO: 5319365 - DNA, 25 bp, Homo sapien
tccatcctcccttctaaccagtcct

SEQ ID NO: 5319366 - DNA, 25 bp, Homo sapien
catcctcccttctaaccagtccttt

SEQ ID NO: 5319367 - DNA, 25 bp, Homo sapien
acctccttcataagtactctgccaa

SEQ ID NO: 5319368 - DNA, 25 bp, Homo sapien
ttctctccctggaattgtagctggc

SEQ ID NO: 5319369 - DNA, 25 bp, Homo sapien
agtactctgccaaaacacgaaggtg

SEQ ID NO: 5319370 - DNA, 25 bp, Homo sapien
ggtgaggcaaaagccgctgttcctt

SEQ ID NO: 5319371 - DNA, 25 bp, Homo sapien
gagtccctgggtattctgctataac

SEQ ID NO: 5319372 - DNA, 25 bp, Homo sapien
gggcctccttgggtactgtttcatc

SEQ ID NO: 5319373 - DNA, 25 bp, Homo sapien
caggtagagacaatgaaacagggcc

SEQ ID NO: 5319374 - DNA, 25 bp, Homo sapien
gttaatgacaaggtcgccgccactg

SEQ ID NO: 5319375 - DNA, 25 bp, Homo sapien
tcctaagtcccaccctaatatccat

SEQ ID NO: 5319376 - DNA, 25 bp, Homo sapien
ctcctaagtcccaccctaatatcca

SEQ ID NO: 5319377 - DNA, 25 bp, Homo sapien
gactcctaagtcccaccctaatatc

SEQ ID NO: 5319378 - DNA, 25 bp, Homo sapien
cgactcctaagtcccaccctaatat

SEQ ID NO: 5319379 - DNA, 25 bp, Homo sapien
cggtaattgcagcaaagtgaggtac

SEQ ID NO: 5319380 - DNA, 25 bp, Homo sapien
caaagtgaggtactgcaccatacat

SEQ ID NO: 5319381 - DNA, 25 bp, Homo sapien
gaggtactgcaccatacattgtcat

SEQ ID NO: 5319382 - DNA, 25 bp, Homo sapien
tgttcggtaattgcagcaaagtgag

SEQ ID NO: 5319383 - DNA, 25 bp, Homo sapien
gtttcctcagaatatctcacagttc

SEQ ID NO: 5319384 - DNA, 25 bp, Homo sapien
attcccaacaaattactggcatttc

SEQ ID NO: 5319385 - DNA, 25 bp, Homo sapien
cgctcttgaatacagagggtcttca

SEQ ID NO: 5319386 - DNA, 25 bp, Homo sapien
gtgcacagctgccaagcttcgctct

SEQ ID NO: 5319387 - DNA, 25 bp, Homo sapien
tgatgtggggccttcaacgaagatg

SEQ ID NO: 5319388 - DNA, 25 bp, Homo sapien
aaatgatgtggggccttcaacgaag

SEQ ID NO: 5319389 - DNA, 25 bp, Homo sapien
catggcaaatgatgtggggccttca

SEQ ID NO: 5319390 - DNA, 25 bp, Homo sapien
tggggccttcaacgaagatggggaa

SEQ ID NO: 5319391 - DNA, 25 bp, Homo sapien
tggaaatagacaagtttagaggtgg

SEQ ID NO: 5319392 - DNA, 25 bp, Homo sapien
gaataacttgaagtaataccaaagc

SEQ ID NO: 5319393 - DNA, 25 bp, Homo sapien
cttctgaatggtgtaatggtttgag

SEQ ID NO: 5319394 - DNA, 25 bp, Homo sapien
aatggtgtaatggtttgagctctgc

SEQ ID NO: 5319395 - DNA, 25 bp, Homo sapien
taacttgaagtaataccaaagccag

SEQ ID NO: 5319396 - DNA, 25 bp, Homo sapien
gcctgtgttgcgtttgcggttgttt

SEQ ID NO: 5319397 - DNA, 25 bp, Homo sapien
atctgtgtagcctgtgttgcgtttg

SEQ ID NO: 5319398 - DNA, 25 bp, Homo sapien
tcatctccccacacgtgactgcttt

SEQ ID NO: 5319399 - DNA, 25 bp, Homo sapien
tctccccacacgtgactgctttctg

SEQ ID NO: 5319400 - DNA, 25 bp, Homo sapien
caagtcctgcttgggacaagattcc

SEQ ID NO: 5319401 - DNA, 25 bp, Homo sapien
tgggacaagattcctttggatgtag

SEQ ID NO: 5319402 - DNA, 25 bp, Homo sapien
gagagtcgagcatctgagattcctc

SEQ ID NO: 5319403 - DNA, 25 bp, Homo sapien
tcagaaagttcatgtctgcacagcc

SEQ ID NO: 5319404 - DNA, 25 bp, Homo sapien
agatcctggacagctatcacaggcc

SEQ ID NO: 5319405 - DNA, 25 bp, Homo sapien
caggttttcttggccacggtgttag

SEQ ID NO: 5319406 - DNA, 25 bp, Homo sapien
ccacggtgttaggcatctgtgtgct

SEQ ID NO: 5319407 - DNA, 25 bp, Homo sapien
tcctggacagctatcacaggccagg

SEQ ID NO: 5319408 - DNA, 25 bp, Homo sapien
tgaagagttcattaccaagatcggt

SEQ ID NO: 5319409 - DNA, 25 bp, Homo sapien
ttaacgtcagcagtaatcactgtgg

SEQ ID NO: 5319410 - DNA, 25 bp, Homo sapien
aggtagctcctatctttaacgtcag

SEQ ID NO: 5319411 - DNA, 25 bp, Homo sapien
cagaattgggctataattgaagagt

SEQ ID NO: 5319412 - DNA, 25 bp, Homo sapien
ccagcaggacttgggatgccatccg

SEQ ID NO: 5319413 - DNA, 25 bp, Homo sapien
gttcaaaaaacagccgatcctccag

SEQ ID NO: 5319414 - DNA, 25 bp, Homo sapien
caggttagcaatttggagcctcccc

SEQ ID NO: 5319415 - DNA, 25 bp, Homo sapien
cactaataatcagacgagggctcgg

SEQ ID NO: 5319416 - DNA, 25 bp, Homo sapien
tctcagcccaaacatgcttccgttt

SEQ ID NO: 5319417 - DNA, 25 bp, Homo sapien
ctctcagcccaaacatgcttccgtt

SEQ ID NO: 5319418 - DNA, 25 bp, Homo sapien
ctcttctttgcagaagtgtgaagcc

SEQ ID NO: 5319419 - DNA, 25 bp, Homo sapien
ttctttgcagaagtgtgaagcctgg

SEQ ID NO: 5319420 - DNA, 25 bp, Homo sapien
tcctttacatttcagagttactgaa

SEQ ID NO: 5319421 - DNA, 25 bp, Homo sapien
cctttacatttcagagttactgaat

SEQ ID NO: 5319422 - DNA, 25 bp, Homo sapien
gagttactgaatgatggtcagtcat

SEQ ID NO: 5319423 - DNA, 25 bp, Homo sapien
cagcaggtggtgcaagagtttccaa

SEQ ID NO: 5319424 - DNA, 25 bp, Homo sapien
gcaggtggtgcaagagtttccaagt

SEQ ID NO: 5319425 - DNA, 25 bp, Homo sapien
gtcagtgaacttccccttcacatgg

SEQ ID NO: 5319426 - DNA, 25 bp, Homo sapien
caagtcagtgaacttccccttcaca

SEQ ID NO: 5319427 - DNA, 25 bp, Homo sapien
caataatcacaagggatcgggaagc

SEQ ID NO: 5319428 - DNA, 25 bp, Homo sapien
gtgctccaataatcacaagggatcg

SEQ ID NO: 5319429 - DNA, 25 bp, Homo sapien
atcacaagggatcgggaagcgtctt

SEQ ID NO: 5319430 - DNA, 25 bp, Homo sapien
gctccaataatcacaagggatcggg

SEQ ID NO: 5319431 - DNA, 25 bp, Homo sapien
gaaggtgaaagctgaccctggccca

SEQ ID NO: 5319432 - DNA, 25 bp, Homo sapien
tctagagcagctgatacatggtttg

SEQ ID NO: 5319433 - DNA, 25 bp, Homo sapien
tttctagagcagctgatacatggtt

SEQ ID NO: 5319434 - DNA, 25 bp, Homo sapien
gttgaattactaccctttctagagc

SEQ ID NO: 5319435 - DNA, 25 bp, Homo sapien
atggttgaattactaccctttctag

SEQ ID NO: 5319436 - DNA, 25 bp, Homo sapien
tcagctcactggaaggcagccattg

SEQ ID NO: 5319437 - DNA, 25 bp, Homo sapien
gaaagactgtatgccaagtcatgag

SEQ ID NO: 5319438 - DNA, 25 bp, Homo sapien
tactgaagggccaagggaaagactg

SEQ ID NO: 5319439 - DNA, 25 bp, Homo sapien
tcataaacggacttaaatctctcag

SEQ ID NO: 5319440 - DNA, 25 bp, Homo sapien
taatatctcatgtcagctaactcca

SEQ ID NO: 5319441 - DNA, 25 bp, Homo sapien
tgccaaattcttctgggttcagcat

SEQ ID NO: 5319442 - DNA, 25 bp, Homo sapien
taactccatgtcttatttatgccaa

SEQ ID NO: 5319443 - DNA, 25 bp, Homo sapien
caatagcggcccagttttgtcctcg

SEQ ID NO: 5319444 - DNA, 25 bp, Homo sapien
cacagactcctagaatagcattgtt

SEQ ID NO: 5319445 - DNA, 25 bp, Homo sapien
tctagcacagactcctagaatagca

SEQ ID NO: 5319446 - DNA, 25 bp, Homo sapien
tgcattaggattttattctagcaca

SEQ ID NO: 5319447 - DNA, 25 bp, Homo sapien
ttattctagcacagactcctagaat

SEQ ID NO: 5319448 - DNA, 25 bp, Homo sapien
tttggattgaggaggttggttgatt

SEQ ID NO: 5319449 - DNA, 25 bp, Homo sapien
gattgaggaggttggttgatttggt

SEQ ID NO: 5319450 - DNA, 25 bp, Homo sapien
catttggattgaggaggttggttga

SEQ ID NO: 5319451 - DNA, 25 bp, Homo sapien
tggattgaggaggttggttgatttg

SEQ ID NO: 5319452 - DNA, 25 bp, Homo sapien
cacttaagccaggtatttgtgcaga

SEQ ID NO: 5319453 - DNA, 25 bp, Homo sapien
ttaagtgctaaagctaaggcccatg

SEQ ID NO: 5319454 - DNA, 25 bp, Homo sapien
tgaatagccagtcagtcataacact

SEQ ID NO: 5319455 - DNA, 25 bp, Homo sapien
tgaggctaagtaaaggtaggctcct

SEQ ID NO: 5319456 - DNA, 25 bp, Homo sapien
agaaatctaggttagcttcaatatg

SEQ ID NO: 5319457 - DNA, 25 bp, Homo sapien
gcactgaagaaatctaggttagctt

SEQ ID NO: 5319458 - DNA, 25 bp, Homo sapien
tgaagaaatctaggttagcttcaat

SEQ ID NO: 5319459 - DNA, 25 bp, Homo sapien
aaatctaggttagcttcaatatggg

SEQ ID NO: 5319460 - DNA, 25 bp, Homo sapien
gatgtgcccaccaaagcaacaagag

SEQ ID NO: 5319461 - DNA, 25 bp, Homo sapien
gcagtaaaccttgttggcgtccaca

SEQ ID NO: 5319462 - DNA, 25 bp, Homo sapien
caggcagagtactaccacaggttta

SEQ ID NO: 5319463 - DNA, 25 bp, Homo sapien
tagagccaccagtatgcagtaccag

SEQ ID NO: 5319464 - DNA, 25 bp, Homo sapien
tttcctgcttgaagggtttccatat

SEQ ID NO: 5319465 - DNA, 25 bp, Homo sapien
gcttgaagggtttccatattgtggt

SEQ ID NO: 5319466 - DNA, 25 bp, Homo sapien
gtgtgtggctgtaatgggggcttcc

SEQ ID NO: 5319467 - DNA, 25 bp, Homo sapien
tttccatattgtggtgaatctgtgt

SEQ ID NO: 5319468 - DNA, 25 bp, Homo sapien
gaaatgtgactccaccagagaccat

SEQ ID NO: 5319469 - DNA, 25 bp, Homo sapien
cctgtattttcttgcacccctttct

SEQ ID NO: 5319470 - DNA, 25 bp, Homo sapien
cttctgattttgatgtttcctgtat

SEQ ID NO: 5319471 - DNA, 25 bp, Homo sapien
ctccttgaaatgtgactccaccaga

SEQ ID NO: 5319472 - DNA, 25 bp, Homo sapien
tacagctgtaacaatgatgctgggc

SEQ ID NO: 5319473 - DNA, 25 bp, Homo sapien
cgtattatctagtttgcctccgctg

SEQ ID NO: 5319474 - DNA, 25 bp, Homo sapien
tgctgggccctgaacaataccgtta

SEQ ID NO: 5319475 - DNA, 25 bp, Homo sapien
cctaacaaatgtaagtctgtgctgc

SEQ ID NO: 5319476 - DNA, 25 bp, Homo sapien
ctttggcaaacacccaaattggata

SEQ ID NO: 5319477 - DNA, 25 bp, Homo sapien
cccaaattggataaaattgccattt

SEQ ID NO: 5319478 - DNA, 25 bp, Homo sapien
tggcaaacacccaaattggataaaa

SEQ ID NO: 5319479 - DNA, 25 bp, Homo sapien
acacccaaattggataaaattgcca

SEQ ID NO: 5319480 - DNA, 25 bp, Homo sapien
tgtagtttgagagcctcttcaatgt

SEQ ID NO: 5319481 - DNA, 25 bp, Homo sapien
ctccattagtacgtatagaatcttc

SEQ ID NO: 5319482 - DNA, 25 bp, Homo sapien
ctctccattagtacgtatagaatct

SEQ ID NO: 5319483 - DNA, 25 bp, Homo sapien
cattagtacgtatagaatcttctca

SEQ ID NO: 5319484 - DNA, 25 bp, Homo sapien
ctcactggcactatcctcaaattcc

SEQ ID NO: 5319485 - DNA, 25 bp, Homo sapien
tgttggtgggattgtgaattcaacc

SEQ ID NO: 5319486 - DNA, 25 bp, Homo sapien
ctacatcagaatgaacaggcaacct

SEQ ID NO: 5319487 - DNA, 25 bp, Homo sapien
agcaaaagaaactacatcagaatga

SEQ ID NO: 5319488 - DNA, 25 bp, Homo sapien
ggtgggattgtgaattcaaccattg

SEQ ID NO: 5319489 - DNA, 25 bp, Homo sapien
ggacagcattcaagtggaatcctgt

SEQ ID NO: 5319490 - DNA, 25 bp, Homo sapien
cagagggatggggattgcaagagcc

SEQ ID NO: 5319491 - DNA, 25 bp, Homo sapien
aagtggaatcctgtgttctggggaa

SEQ ID NO: 5319492 - DNA, 25 bp, Homo sapien
gaatcaggacagcattcaagtggaa

SEQ ID NO: 5319493 - DNA, 25 bp, Homo sapien
catgccctccatccccgggctctat

SEQ ID NO: 5319494 - DNA, 25 bp, Homo sapien
cctgtcctctggcataaagatcaca

SEQ ID NO: 5319495 - DNA, 25 bp, Homo sapien
gatcacaccaggaaaaaacggattc

SEQ ID NO: 5319496 - DNA, 25 bp, Homo sapien
tggcataaagatcacaccaggaaaa

SEQ ID NO: 5319497 - DNA, 25 bp, Homo sapien
gaacattccgttaaacccattgctg

SEQ ID NO: 5319498 - DNA, 25 bp, Homo sapien
tgtatctaatgagacacataacctt

SEQ ID NO: 5319499 - DNA, 25 bp, Homo sapien
tatttaggactatgcttggccgaca

SEQ ID NO: 5319500 - DNA, 25 bp, Homo sapien
tatagtatttagttgacagtgggtc

SEQ ID NO: 5319501 - DNA, 25 bp, Homo sapien
tcctcaatagagtaagagccagagc

SEQ ID NO: 5319502 - DNA, 25 bp, Homo sapien
taaagccagtggtactcacgggtcc

SEQ ID NO: 5319503 - DNA, 25 bp, Homo sapien
gcatagtgccactgaatccggccct

SEQ ID NO: 5319504 - DNA, 25 bp, Homo sapien
cacgggtccagtgagttgcatctcc

SEQ ID NO: 5319505 - DNA, 25 bp, Homo sapien
tgctctaaatccattaacagggccc

SEQ ID NO: 5319506 - DNA, 25 bp, Homo sapien
tgatgatgtagaacaacccatgtcc

SEQ ID NO: 5319507 - DNA, 25 bp, Homo sapien
tctagcctcttgatcagccggtggg

SEQ ID NO: 5319508 - DNA, 25 bp, Homo sapien
taaacattccagatggcttgctctg

SEQ ID NO: 5319509 - DNA, 25 bp, Homo sapien
tatattatccttgctctgcaaacac

SEQ ID NO: 5319510 - DNA, 25 bp, Homo sapien
cattttttcattccgactgtcctgg

SEQ ID NO: 5319511 - DNA, 25 bp, Homo sapien
tcagtggacattaagtacataatca

SEQ ID NO: 5319512 - DNA, 25 bp, Homo sapien
gggtggttgggaggcataccactga

SEQ ID NO: 5319513 - DNA, 25 bp, Homo sapien
tcaccttggccaaaggggcacttac

SEQ ID NO: 5319514 - DNA, 25 bp, Homo sapien
taagttcaccttggccaaaggggca

SEQ ID NO: 5319515 - DNA, 25 bp, Homo sapien
ctgcctgcctttaagttcaccttgg

SEQ ID NO: 5319516 - DNA, 25 bp, Homo sapien
cctgcctttaagttcaccttggcca

SEQ ID NO: 5319517 - DNA, 25 bp, Homo sapien
gccacagccagggtaaacggattga

SEQ ID NO: 5319518 - DNA, 25 bp, Homo sapien
caactggtggagctgctaggccaac

SEQ ID NO: 5319519 - DNA, 25 bp, Homo sapien
tacatcagggccaacgtggctaaat

SEQ ID NO: 5319520 - DNA, 25 bp, Homo sapien
gaaaatgtgctggactctctgcggc

SEQ ID NO: 5319521 - DNA, 25 bp, Homo sapien
gacacatgtgtaagcaataccaccc

SEQ ID NO: 5319522 - DNA, 25 bp, Homo sapien
aaatcttcgtaagccgaggaccagc

SEQ ID NO: 5319523 - DNA, 25 bp, Homo sapien
aagaaggaaatcttcgtaagccgag

SEQ ID NO: 5319524 - DNA, 25 bp, Homo sapien
ttcgtaagccgaggaccagctcagc

SEQ ID NO: 5319525 - DNA, 25 bp, Homo sapien
tcaggattctccctaacagaacgca

SEQ ID NO: 5319526 - DNA, 25 bp, Homo sapien
ttcacacatagggtcaggattctcc

SEQ ID NO: 5319527 - DNA, 25 bp, Homo sapien
taacagaacgcagatgggagagtct

SEQ ID NO: 5319528 - DNA, 25 bp, Homo sapien
tgctccttcacacatagggtcagga

SEQ ID NO: 5319529 - DNA, 25 bp, Homo sapien
catgtcttgtccagacatcagcatc

SEQ ID NO: 5319530 - DNA, 25 bp, Homo sapien
atcagcatcactatttccatatgaa

SEQ ID NO: 5319531 - DNA, 25 bp, Homo sapien
ctttgttcggctttttcccacatca

SEQ ID NO: 5319532 - DNA, 25 bp, Homo sapien
tttgttcggctttttcccacatcag

SEQ ID NO: 5319533 - DNA, 25 bp, Homo sapien
ttcccacatcagtagtgaccttgat

SEQ ID NO: 5319534 - DNA, 25 bp, Homo sapien
cacatcagtagtgaccttgatccca

SEQ ID NO: 5319535 - DNA, 25 bp, Homo sapien
gtcatgaaccctttgattcacagct

SEQ ID NO: 5319536 - DNA, 25 bp, Homo sapien
ggttgtcggcataggtgtcatgaac

SEQ ID NO: 5319537 - DNA, 25 bp, Homo sapien
agccctggaaggagggttgtcggca

SEQ ID NO: 5319538 - DNA, 25 bp, Homo sapien
ggcataggtgtcatgaaccctttga

SEQ ID NO: 5319539 - DNA, 25 bp, Homo sapien
tcaggcatccattaagattccagga

SEQ ID NO: 5319540 - DNA, 25 bp, Homo sapien
tatgatagaattcccacaatagcta

SEQ ID NO: 5319541 - DNA, 25 bp, Homo sapien
tccaggaattcctgctagatttcag

SEQ ID NO: 5319542 - DNA, 25 bp, Homo sapien
gaccaccaggaagttttatcagatg

SEQ ID NO: 5319543 - DNA, 25 bp, Homo sapien
cttcagtgtggcaccttcagtgccc

SEQ ID NO: 5319544 - DNA, 25 bp, Homo sapien
tgattaaagggggatagaaatcaga

SEQ ID NO: 5319545 - DNA, 25 bp, Homo sapien
gcccctttgttgtggaccaggcaga

SEQ ID NO: 5319546 - DNA, 25 bp, Homo sapien
tggtgtacattgcacgaatttcatc

SEQ ID NO: 5319547 - DNA, 25 bp, Homo sapien
tggaccaggcagaaatgattaaagg

SEQ ID NO: 5319548 - DNA, 25 bp, Homo sapien
tgtagtaacactgcatatcctctcc

SEQ ID NO: 5319549 - DNA, 25 bp, Homo sapien
agtactacagaaacccatcagaagg

SEQ ID NO: 5319550 - DNA, 25 bp, Homo sapien
ggtccggcctccttgatcattgttg

SEQ ID NO: 5319551 - DNA, 25 bp, Homo sapien
gacatcattacagctcacacatgga

SEQ ID NO: 5319552 - DNA, 25 bp, Homo sapien
tgtgatctgcagaggaaaatgttac

SEQ ID NO: 5319553 - DNA, 25 bp, Homo sapien
ggtatgcatgtgttctccctccgtc

SEQ ID NO: 5319554 - DNA, 25 bp, Homo sapien
tccgtcgtcgttcacctctgagcag

SEQ ID NO: 5319555 - DNA, 25 bp, Homo sapien
cagatgttcagggtgaaccaggcag

SEQ ID NO: 5319556 - DNA, 25 bp, Homo sapien
agcttatagcagactcccaccactt

SEQ ID NO: 5319557 - DNA, 25 bp, Homo sapien
aacaagggctagaagccgcaccact

SEQ ID NO: 5319558 - DNA, 25 bp, Homo sapien
aaacaaaggcaagcttatagcagac

SEQ ID NO: 5319559 - DNA, 25 bp, Homo sapien
agtgaaggttcttaatgcagacggc

SEQ ID NO: 5319560 - DNA, 25 bp, Homo sapien
gatacttgtccgtgactattatccc

SEQ ID NO: 5319561 - DNA, 25 bp, Homo sapien
atattgagtatttgttttctggagc

SEQ ID NO: 5319562 - DNA, 25 bp, Homo sapien
cttcaatggtttccatggaatatgt

SEQ ID NO: 5319563 - DNA, 25 bp, Homo sapien
ggctgccaggattctagactgaaga

SEQ ID NO: 5319564 - DNA, 25 bp, Homo sapien
aaattgccagatggttacaagctcc

SEQ ID NO: 5319565 - DNA, 25 bp, Homo sapien
tctgcaaggtaagtagtcctacagg

SEQ ID NO: 5319566 - DNA, 25 bp, Homo sapien
tgaatcagcaccttattctgcaagg

SEQ ID NO: 5319567 - DNA, 25 bp, Homo sapien
tcctacaggataccagcaaattgcc

SEQ ID NO: 5319568 - DNA, 25 bp, Homo sapien
gggcactctgcactggactcctgtc

SEQ ID NO: 5319569 - DNA, 25 bp, Homo sapien
cccacgaacgtgagttgtgtgatgg

SEQ ID NO: 5319570 - DNA, 25 bp, Homo sapien
aggtttcccacgaacgtgagttgtg

SEQ ID NO: 5319571 - DNA, 25 bp, Homo sapien
gactcctgtccaggcgcccggcgtg

SEQ ID NO: 5319572 - DNA, 25 bp, Homo sapien
cagttcacaccacgaagcctacatt

SEQ ID NO: 5319573 - DNA, 25 bp, Homo sapien
tgtacaccaacacattagataacct

SEQ ID NO: 5319574 - DNA, 25 bp, Homo sapien
aatttaataacattccacagagaaa

SEQ ID NO: 5319575 - DNA, 25 bp, Homo sapien
cctacatagaattgacaaattccta

SEQ ID NO: 5319576 - DNA, 25 bp, Homo sapien
tcaggtcggggaagtttgtcatccc

SEQ ID NO: 5319577 - DNA, 25 bp, Homo sapien
gtctccttaaatctatcaggtcggg

SEQ ID NO: 5319578 - DNA, 25 bp, Homo sapien
tcggggaagtttgtcatcccctgaa

SEQ ID NO: 5319579 - DNA, 25 bp, Homo sapien
cttagtctccttaaatctatcaggt

SEQ ID NO: 5319580 - DNA, 25 bp, Homo sapien
atggaagctccaagccactggccat

SEQ ID NO: 5319581 - DNA, 25 bp, Homo sapien
tcaccatcacacctattgcacaatg

SEQ ID NO: 5319582 - DNA, 25 bp, Homo sapien
tctggcagaatatccatcaggaggg

SEQ ID NO: 5319583 - DNA, 25 bp, Homo sapien
tccatcaggagggtttaatattccc

SEQ ID NO: 5319584 - DNA, 25 bp, Homo sapien
gcattattatagaacagactgggaa

SEQ ID NO: 5319585 - DNA, 25 bp, Homo sapien
gactatcacaagtgaacctccacgt

SEQ ID NO: 5319586 - DNA, 25 bp, Homo sapien
cgtgaataccagctacatcatgagg

SEQ ID NO: 5319587 - DNA, 25 bp, Homo sapien
tattaccaggaatcaatatgccctc

SEQ ID NO: 5319588 - DNA, 25 bp, Homo sapien
ttatgcttcagcttctagccactgt

SEQ ID NO: 5319589 - DNA, 25 bp, Homo sapien
agcttctagccactgtgatgttata

SEQ ID NO: 5319590 - DNA, 25 bp, Homo sapien
tccgaattatctgaagagcacaaat

SEQ ID NO: 5319591 - DNA, 25 bp, Homo sapien
ctgtgatgttatattccgaattatc

SEQ ID NO: 5319592 - DNA, 25 bp, Homo sapien
caggttcgctgatgttgtcaaacag

SEQ ID NO: 5319593 - DNA, 25 bp, Homo sapien
gcaactttcaatgtgtgcaccgctt

SEQ ID NO: 5319594 - DNA, 25 bp, Homo sapien
ttcaatgtgtgcaccgcttctgaca

SEQ ID NO: 5319595 - DNA, 25 bp, Homo sapien
actttcaatgtgtgcaccgcttctg

SEQ ID NO: 5319596 - DNA, 25 bp, Homo sapien
gaagcaactttcaatgtgtgcaccg

SEQ ID NO: 5319597 - DNA, 25 bp, Homo sapien
attatgaatacagcacagtaggagc

SEQ ID NO: 5319598 - DNA, 25 bp, Homo sapien
cacagtaggagcatgcagtttccca

SEQ ID NO: 5319599 - DNA, 25 bp, Homo sapien
caaaggacactaatttgattatgaa

SEQ ID NO: 5319600 - DNA, 25 bp, Homo sapien
ttgattatgaatacagcacagtagg

SEQ ID NO: 5319601 - DNA, 25 bp, Homo sapien
atactgagaaagtgttcggaatttc

SEQ ID NO: 5319602 - DNA, 25 bp, Homo sapien
tactgagaaagtgttcggaatttca

SEQ ID NO: 5319603 - DNA, 25 bp, Homo sapien
actgagaaagtgttcggaatttcac

SEQ ID NO: 5319604 - DNA, 25 bp, Homo sapien
ggagccaagacagcgatggctggta

SEQ ID NO: 5319605 - DNA, 25 bp, Homo sapien
tggagccaagacagcgatggctggt

SEQ ID NO: 5319606 - DNA, 25 bp, Homo sapien
gagccaagacagcgatggctggtat

SEQ ID NO: 5319607 - DNA, 25 bp, Homo sapien
gtggagccaagacagcgatggctgg

SEQ ID NO: 5319608 - DNA, 25 bp, Homo sapien
acacggctaacatatgtatcgacac

SEQ ID NO: 5319609 - DNA, 25 bp, Homo sapien
ctacacggctaacatatgtatcgac

SEQ ID NO: 5319610 - DNA, 25 bp, Homo sapien
tacacggctaacatatgtatcgaca

SEQ ID NO: 5319611 - DNA, 25 bp, Homo sapien
tgccacgtctccaggacctcgctcg

SEQ ID NO: 5319612 - DNA, 25 bp, Homo sapien
ctgccacgtctccaggacctcgctc

SEQ ID NO: 5319613 - DNA, 25 bp, Homo sapien
gccacgtctccaggacctcgctcgc

SEQ ID NO: 5319614 - DNA, 25 bp, Homo sapien
ctaatggctgccttgctgctgaagc

SEQ ID NO: 5319615 - DNA, 25 bp, Homo sapien
tgctgaagctggccaagtttttcat

SEQ ID NO: 5319616 - DNA, 25 bp, Homo sapien
tttgctccttggtcaccaagggtta

SEQ ID NO: 5319617 - DNA, 25 bp, Homo sapien
ccaagggttaattttctaatggctg

SEQ ID NO: 5319618 - DNA, 25 bp, Homo sapien
gcagagcaccacaagctgtgatttg

SEQ ID NO: 5319619 - DNA, 25 bp, Homo sapien
cctgcagagcaccacaagctgtgat

SEQ ID NO: 5319620 - DNA, 25 bp, Homo sapien
tgcagagcaccacaagctgtgattt

SEQ ID NO: 5319621 - DNA, 25 bp, Homo sapien
cgcctgcagagcaccacaagctgtg

SEQ ID NO: 5319622 - DNA, 25 bp, Homo sapien
ccacgtcttcagagttgcggaattt

SEQ ID NO: 5319623 - DNA, 25 bp, Homo sapien
attggggcggaatacagtttttatg

SEQ ID NO: 5319624 - DNA, 25 bp, Homo sapien
caaggcctctgatattggggcggaa

SEQ ID NO: 5319625 - DNA, 25 bp, Homo sapien
agagttgcggaatttccaaggcctc

SEQ ID NO: 5319626 - DNA, 25 bp, Homo sapien
taggaattgagtcccaaggccatcc

SEQ ID NO: 5319627 - DNA, 25 bp, Homo sapien
tatacacacacttccaaagctgcag

SEQ ID NO: 5319628 - DNA, 25 bp, Homo sapien
tctgcaaagacggactggcctttct

SEQ ID NO: 5319629 - DNA, 25 bp, Homo sapien
gcctttcttaggctgataatgccag

SEQ ID NO: 5319630 - DNA, 25 bp, Homo sapien
gccagcttaatccaagcactgcacg

SEQ ID NO: 5319631 - DNA, 25 bp, Homo sapien
gcttaatccaagcactgcacgaagt

SEQ ID NO: 5319632 - DNA, 25 bp, Homo sapien
gcactgcacgaagtaaattaattca

SEQ ID NO: 5319633 - DNA, 25 bp, Homo sapien
tccaagcactgcacgaagtaaatta

SEQ ID NO: 5319634 - DNA, 25 bp, Homo sapien
ccaaggcaggggtgataaacaaatg

SEQ ID NO: 5319635 - DNA, 25 bp, Homo sapien
tggtgtgacaactggggataatccc

SEQ ID NO: 5319636 - DNA, 25 bp, Homo sapien
ggggataatcccctgccaaggcagg

SEQ ID NO: 5319637 - DNA, 25 bp, Homo sapien
gccatttaagtccacgggcacctca

SEQ ID NO: 5319638 - DNA, 25 bp, Homo sapien
tgacattcccctttctgttgcctgc

SEQ ID NO: 5319639 - DNA, 25 bp, Homo sapien
ctgacattcccctttctgttgcctg

SEQ ID NO: 5319640 - DNA, 25 bp, Homo sapien
tgccaacagttaacaaggccagcat

SEQ ID NO: 5319641 - DNA, 25 bp, Homo sapien
tgcttttttgccaacagttaacaag

SEQ ID NO: 5319642 - DNA, 25 bp, Homo sapien
atttcatgcatcacagttccgttca

SEQ ID NO: 5319643 - DNA, 25 bp, Homo sapien
aggtaggcgggctaggagcacaggc

SEQ ID NO: 5319644 - DNA, 25 bp, Homo sapien
cagttccgttcaccgggctgtagcc

SEQ ID NO: 5319645 - DNA, 25 bp, Homo sapien
atgcatcacagttccgttcaccggg

SEQ ID NO: 5319646 - DNA, 25 bp, Homo sapien
aatttatctctctcatacctcctgg

SEQ ID NO: 5319647 - DNA, 25 bp, Homo sapien
tgccagccatttgccaatgtctgca

SEQ ID NO: 5319648 - DNA, 25 bp, Homo sapien
ctgcattcaccccatacttctgccc

SEQ ID NO: 5319649 - DNA, 25 bp, Homo sapien
cctggcacacagactgaaagcctgt

SEQ ID NO: 5319650 - DNA, 25 bp, Homo sapien
cgtccaaaagctcacttgtcagtgt

SEQ ID NO: 5319651 - DNA, 25 bp, Homo sapien
tgtctggcatcctgggaaggactca

SEQ ID NO: 5319652 - DNA, 25 bp, Homo sapien
caaggtcagtacctctagtgaaacc

SEQ ID NO: 5319653 - DNA, 25 bp, Homo sapien
gaggaccgttcatctatttagtgac

SEQ ID NO: 5319654 - DNA, 25 bp, Homo sapien
cgtgtaattgtcattcagtgtgaaa

SEQ ID NO: 5319655 - DNA, 25 bp, Homo sapien
caatcatgtcaatataccagtcagc

SEQ ID NO: 5319656 - DNA, 25 bp, Homo sapien
catggggcatgcgtgtaattgtcat

SEQ ID NO: 5319657 - DNA, 25 bp, Homo sapien
gctggaggtatcacaatcatgtcaa

SEQ ID NO: 5319658 - DNA, 25 bp, Homo sapien
gctccaggaattcgaaggccgaaaa

SEQ ID NO: 5319659 - DNA, 25 bp, Homo sapien
ccaggaattcgaaggccgaaaactg

SEQ ID NO: 5319660 - DNA, 25 bp, Homo sapien
aagctccaggaattcgaaggccgaa

SEQ ID NO: 5319661 - DNA, 25 bp, Homo sapien
tcaagctccaggaattcgaaggccg

SEQ ID NO: 5319662 - DNA, 25 bp, Homo sapien
cctaatggagtaggctccacagtga

SEQ ID NO: 5319663 - DNA, 25 bp, Homo sapien
tcactcttcaagaatcctaatggag

SEQ ID NO: 5319664 - DNA, 25 bp, Homo sapien
acgatgacctgcacagaggtctgcc

SEQ ID NO: 5319665 - DNA, 25 bp, Homo sapien
ccacacacagagcaagcacgatgac

SEQ ID NO: 5319666 - DNA, 25 bp, Homo sapien
taaaaagttattggtgtcagcactg

SEQ ID NO: 5319667 - DNA, 25 bp, Homo sapien
cctcgtaaaaagttattggtgtcag

SEQ ID NO: 5319668 - DNA, 25 bp, Homo sapien
ggtgtcagcactggtctaacaattg

SEQ ID NO: 5319669 - DNA, 25 bp, Homo sapien
gcactggtctaacaattgcctctcc

SEQ ID NO: 5319670 - DNA, 25 bp, Homo sapien
tctatgccacacatccaaattttgt

SEQ ID NO: 5319671 - DNA, 25 bp, Homo sapien
gaagcttatctgtttgtgctaagta

SEQ ID NO: 5319672 - DNA, 25 bp, Homo sapien
caaattttgttaactgctagatgca

SEQ ID NO: 5319673 - DNA, 25 bp, Homo sapien
gctagatgcactctatgtattatat

SEQ ID NO: 5319674 - DNA, 25 bp, Homo sapien
ttagtaataggtctgctgccctggc

SEQ ID NO: 5319675 - DNA, 25 bp, Homo sapien
gaaaaatgtgctgtatgttgtctat

SEQ ID NO: 5319676 - DNA, 25 bp, Homo sapien
ctttgtggagtatttgtgggttcag

SEQ ID NO: 5319677 - DNA, 25 bp, Homo sapien
gcgtgcctcagggattctaataaaa

SEQ ID NO: 5319678 - DNA, 25 bp, Homo sapien
tagccgtgtaagctgattcatgaat

SEQ ID NO: 5319679 - DNA, 25 bp, Homo sapien
gtaagctgattcatgaatttgctaa

SEQ ID NO: 5319680 - DNA, 25 bp, Homo sapien
gatagccgtgtaagctgattcatga

SEQ ID NO: 5319681 - DNA, 25 bp, Homo sapien
tcatgatagccgtgtaagctgattc

SEQ ID NO: 5319682 - DNA, 25 bp, Homo sapien
ttaactcaagcttggagtaagagtt

SEQ ID NO: 5319683 - DNA, 25 bp, Homo sapien
ctcaggaggatttaactcaagcttg

SEQ ID NO: 5319684 - DNA, 25 bp, Homo sapien
tcactggtctcaggaggatttaact

SEQ ID NO: 5319685 - DNA, 25 bp, Homo sapien
tggtctcaggaggatttaactcaag

SEQ ID NO: 5319686 - DNA, 25 bp, Homo sapien
tgccttgggccctccaataggtcat

SEQ ID NO: 5319687 - DNA, 25 bp, Homo sapien
ggtcatgttcggcttcctcgtccaa

SEQ ID NO: 5319688 - DNA, 25 bp, Homo sapien
tgggccctccaataggtcatgttcg

SEQ ID NO: 5319689 - DNA, 25 bp, Homo sapien
ggcttcctcgtccaacacaaaggga

SEQ ID NO: 5319690 - DNA, 25 bp, Homo sapien
tcagactcatgaagttcatttcggc

SEQ ID NO: 5319691 - DNA, 25 bp, Homo sapien
aaattgcacctaaggaagagtcctc

SEQ ID NO: 5319692 - DNA, 25 bp, Homo sapien
taaggaagagtcctcagactcatga

SEQ ID NO: 5319693 - DNA, 25 bp, Homo sapien
gagtcctcagactcatgaagttcat

SEQ ID NO: 5319694 - DNA, 25 bp, Homo sapien
caagggctagttccacagtatcagc

SEQ ID NO: 5319695 - DNA, 25 bp, Homo sapien
aagggctagttccacagtatcagca

SEQ ID NO: 5319696 - DNA, 25 bp, Homo sapien
gcacacaggcacagcgttcagagct

SEQ ID NO: 5319697 - DNA, 25 bp, Homo sapien
taaaggaactgtggagatagatgga

SEQ ID NO: 5319698 - DNA, 25 bp, Homo sapien
ttgcaaatgtgtgacaccctcacag

SEQ ID NO: 5319699 - DNA, 25 bp, Homo sapien
agagctgccagacctcccggtagag

SEQ ID NO: 5319700 - DNA, 25 bp, Homo sapien
gattgagctgcctgaaaactcgaag

SEQ ID NO: 5319701 - DNA, 25 bp, Homo sapien
tctgtctttgcaagattgaattgaa

SEQ ID NO: 5319702 - DNA, 25 bp, Homo sapien
tctgctccagcggagacccggtgct

SEQ ID NO: 5319703 - DNA, 25 bp, Homo sapien
cctaactgcgtatggttcccacaag

SEQ ID NO: 5319704 - DNA, 25 bp, Homo sapien
gatttatgtttatccacgttctcat

SEQ ID NO: 5319705 - DNA, 25 bp, Homo sapien
aggagatttatgtttatccacgttc

SEQ ID NO: 5319706 - DNA, 25 bp, Homo sapien
ggaggagatttatgtttatccacgt

SEQ ID NO: 5319707 - DNA, 25 bp, Homo sapien
ctggaggagatttatgtttatccac

SEQ ID NO: 5319708 - DNA, 25 bp, Homo sapien
gatataaccttgaaggttgggccat

SEQ ID NO: 5319709 - DNA, 25 bp, Homo sapien
taatcgatcgtctgaagatgatgat

SEQ ID NO: 5319710 - DNA, 25 bp, Homo sapien
ttcctgctagccttctgaaagccag

SEQ ID NO: 5319711 - DNA, 25 bp, Homo sapien
gagtgtcatgcccttaatcgatcgt

SEQ ID NO: 5319712 - DNA, 25 bp, Homo sapien
acattttcagtagtgccaagctgag

SEQ ID NO: 5319713 - DNA, 25 bp, Homo sapien
cttggggatattggaaagaccagtg

SEQ ID NO: 5319714 - DNA, 25 bp, Homo sapien
ttggggatattggaaagaccagtgg

SEQ ID NO: 5319715 - DNA, 25 bp, Homo sapien
catgtgatggacctcgttcttttaa

SEQ ID NO: 5319716 - DNA, 25 bp, Homo sapien
tgtcatgtgatggacctcgttcttt

SEQ ID NO: 5319717 - DNA, 25 bp, Homo sapien
tgatggacctcgttcttttaaagga

SEQ ID NO: 5319718 - DNA, 25 bp, Homo sapien
tgttgtcatgtgatggacctcgttc

SEQ ID NO: 5319719 - DNA, 25 bp, Homo sapien
ctaaagcagggactttcgtgtagct

SEQ ID NO: 5319720 - DNA, 25 bp, Homo sapien
cacaatggcattagcaaatggcact

SEQ ID NO: 5319721 - DNA, 25 bp, Homo sapien
cgtgtagctttgaaggaacctgtct

SEQ ID NO: 5319722 - DNA, 25 bp, Homo sapien
tgtggatgccgatgatccagaaata

SEQ ID NO: 5319723 - DNA, 25 bp, Homo sapien
ctgtggaggccttgtcattacattt

SEQ ID NO: 5319724 - DNA, 25 bp, Homo sapien
ttctctgtggaggccttgtcattac

SEQ ID NO: 5319725 - DNA, 25 bp, Homo sapien
ttcgctccttttgccacaacactga

SEQ ID NO: 5319726 - DNA, 25 bp, Homo sapien
gctccttttgccacaacactgaatt

SEQ ID NO: 5319727 - DNA, 25 bp, Homo sapien
tgttgttacttctctgagttgtttc

SEQ ID NO: 5319728 - DNA, 25 bp, Homo sapien
tgcccagagctttgctctcaaatgt

SEQ ID NO: 5319729 - DNA, 25 bp, Homo sapien
tgtgtggtctccattgcccagagct

SEQ ID NO: 5319730 - DNA, 25 bp, Homo sapien
gagttgtttctctcactgtgtggtc

SEQ ID NO: 5319731 - DNA, 25 bp, Homo sapien
tccccaacacgcatacatgttccac

SEQ ID NO: 5319732 - DNA, 25 bp, Homo sapien
cctgatattgagcacgactttcctc

SEQ ID NO: 5319733 - DNA, 25 bp, Homo sapien
tgatattgagcacgactttcctcat

SEQ ID NO: 5319734 - DNA, 25 bp, Homo sapien
tccctgatattgagcacgactttcc

SEQ ID NO: 5319735 - DNA, 25 bp, Homo sapien
tttcccatcatgctgtgcaaaacag

SEQ ID NO: 5319736 - DNA, 25 bp, Homo sapien
tatttatccaggtgcaatagaaggg

SEQ ID NO: 5319737 - DNA, 25 bp, Homo sapien
agtccattggagtattcacacaccc

SEQ ID NO: 5319738 - DNA, 25 bp, Homo sapien
ctgcagagcttgagagtggtccaaa

SEQ ID NO: 5319739 - DNA, 25 bp, Homo sapien
tgcagagtaatgtcaagagcttcgt

SEQ ID NO: 5319740 - DNA, 25 bp, Homo sapien
ttttcttcaaaaggcgcacttcgcc

SEQ ID NO: 5319741 - DNA, 25 bp, Homo sapien
tctactagtgcactgtgaaggcttc

SEQ ID NO: 5319742 - DNA, 25 bp, Homo sapien
gcacttcgccaacttgccacagaga

SEQ ID NO: 5319743 - DNA, 25 bp, Homo sapien
acttcccttcctatcagcacaggca

SEQ ID NO: 5319744 - DNA, 25 bp, Homo sapien
gaccacttcccttcctatcagcaca

SEQ ID NO: 5319745 - DNA, 25 bp, Homo sapien
cccttcctatcagcacaggcacaag

SEQ ID NO: 5319746 - DNA, 25 bp, Homo sapien
cttcctatcagcacaggcacaagct

SEQ ID NO: 5319747 - DNA, 25 bp, Homo sapien
ttctctttcctgttcctttatattc

SEQ ID NO: 5319748 - DNA, 25 bp, Homo sapien
cttctctttcctgttcctttatatt

SEQ ID NO: 5319749 - DNA, 25 bp, Homo sapien
ctctttcctgttcctttatattcac

SEQ ID NO: 5319750 - DNA, 25 bp, Homo sapien
tctctttcctgttcctttatattca

SEQ ID NO: 5319751 - DNA, 25 bp, Homo sapien
tgtgtcgatttcagcaggctactct

SEQ ID NO: 5319752 - DNA, 25 bp, Homo sapien
catgaatgcatttgcctcggtggta

SEQ ID NO: 5319753 - DNA, 25 bp, Homo sapien
gagaactgtagtttcctgccctatt

SEQ ID NO: 5319754 - DNA, 25 bp, Homo sapien
ggtgttcagaaatagccacttacaa

SEQ ID NO: 5319755 - DNA, 25 bp, Homo sapien
cacggagtcagcaccaaataaggtg

SEQ ID NO: 5319756 - DNA, 25 bp, Homo sapien
tgtgtgtttgcaaaacggatgtgct

SEQ ID NO: 5319757 - DNA, 25 bp, Homo sapien
aaatttggctcccacggagtcagca

SEQ ID NO: 5319758 - DNA, 25 bp, Homo sapien
attctgcaggtgtgagttggtagcc

SEQ ID NO: 5319759 - DNA, 25 bp, Homo sapien
aattctcaggcagttgaagactaag

SEQ ID NO: 5319760 - DNA, 25 bp, Homo sapien
gatgtgcaagcctgttgccacctac

SEQ ID NO: 5319761 - DNA, 25 bp, Homo sapien
tccacctactcgattctcctgcagc

SEQ ID NO: 5319762 - DNA, 25 bp, Homo sapien
gactaagaacaatctctccacctac

SEQ ID NO: 5319763 - DNA, 25 bp, Homo sapien
tagagcagataacccaatacggtgg

SEQ ID NO: 5319764 - DNA, 25 bp, Homo sapien
gggtacacagccaacgcaaaccaaa

SEQ ID NO: 5319765 - DNA, 25 bp, Homo sapien
tccatttggcttgtggaatgaatta

SEQ ID NO: 5319766 - DNA, 25 bp, Homo sapien
ccaactgcctgagctaatggtacag

SEQ ID NO: 5319767 - DNA, 25 bp, Homo sapien
gaaggcagtgtcaactacgtttggc

SEQ ID NO: 5319768 - DNA, 25 bp, Homo sapien
taatgaagtatccacctctagactg

SEQ ID NO: 5319769 - DNA, 25 bp, Homo sapien
taattgcctgtcctagaactaagaa

SEQ ID NO: 5319770 - DNA, 25 bp, Homo sapien
tctagactgtaagctgcaaggagag

SEQ ID NO: 5319771 - DNA, 25 bp, Homo sapien
tgatgtaatacatcggaaagccgaa

SEQ ID NO: 5319772 - DNA, 25 bp, Homo sapien
tctctctttaaacttgcagcggacg

SEQ ID NO: 5319773 - DNA, 25 bp, Homo sapien
tctattcactctatcattatgatgc

SEQ ID NO: 5319774 - DNA, 25 bp, Homo sapien
catcggaaagccgaaacgtgcgtgc

SEQ ID NO: 5319775 - DNA, 25 bp, Homo sapien
gagggttgagtgcttttaaattgga

SEQ ID NO: 5319776 - DNA, 25 bp, Homo sapien
tcaagcaatgtttgaaaatagaaat

SEQ ID NO: 5319777 - DNA, 25 bp, Homo sapien
ttctagcactgtgagggttgagtgc

SEQ ID NO: 5319778 - DNA, 25 bp, Homo sapien
tcattgttgcatgaatatatgcaaa

SEQ ID NO: 5319779 - DNA, 25 bp, Homo sapien
caggaaatggaatggaccattgcca

SEQ ID NO: 5319780 - DNA, 25 bp, Homo sapien
ctgatgagccaggatgacagtaatc

SEQ ID NO: 5319781 - DNA, 25 bp, Homo sapien
ggatgacagtaatctttgtcactgg

SEQ ID NO: 5319782 - DNA, 25 bp, Homo sapien
tggctgttgctaggctaccaggaaa

SEQ ID NO: 5319783 - DNA, 25 bp, Homo sapien
cctcttcttgcaagtttattgttga

SEQ ID NO: 5319784 - DNA, 25 bp, Homo sapien
taaataatttcctggtgcgatgtct

SEQ ID NO: 5319785 - DNA, 25 bp, Homo sapien
aaggagttgccattccctcttcttg

SEQ ID NO: 5319786 - DNA, 25 bp, Homo sapien
aagacttgcaaaacccatatgtaaa

SEQ ID NO: 5319787 - DNA, 25 bp, Homo sapien
gtccacatcctgacaaagaggctca

SEQ ID NO: 5319788 - DNA, 25 bp, Homo sapien
tccatgttgaacagtgttaccacac

SEQ ID NO: 5319789 - DNA, 25 bp, Homo sapien
tagtctgcattcgtactccatgttg

SEQ ID NO: 5319790 - DNA, 25 bp, Homo sapien
taactaaacaggatcgacgtgtggg

SEQ ID NO: 5319791 - DNA, 25 bp, Homo sapien
ctgatcacggtgtcacctgctccag

SEQ ID NO: 5319792 - DNA, 25 bp, Homo sapien
tccagctcgtccgacatgataaaac

SEQ ID NO: 5319793 - DNA, 25 bp, Homo sapien
cagctcgtccgacatgataaaacat

SEQ ID NO: 5319794 - DNA, 25 bp, Homo sapien
tgctccagctcgtccgacatgataa

SEQ ID NO: 5319795 - DNA, 25 bp, Homo sapien
catcaagcagaatgcaagaaacctt

SEQ ID NO: 5319796 - DNA, 25 bp, Homo sapien
ctgtcccatcaagcagaatgcaaga

SEQ ID NO: 5319797 - DNA, 25 bp, Homo sapien
tgcataagatgctgtcccatcaagc

SEQ ID NO: 5319798 - DNA, 25 bp, Homo sapien
gtgcataagatgctgtcccatcaag

SEQ ID NO: 5319799 - DNA, 25 bp, Homo sapien
tctttcactttgtctataaaactat

SEQ ID NO: 5319800 - DNA, 25 bp, Homo sapien
gaaataatagagtgggtattaaatg

SEQ ID NO: 5319801 - DNA, 25 bp, Homo sapien
accatggctttttgtcaatatgccc

SEQ ID NO: 5319802 - DNA, 25 bp, Homo sapien
ttttgtcaatatgccccgggtggaa

SEQ ID NO: 5319803 - DNA, 25 bp, Homo sapien
gatgaaaggagtaatgtgtatccag

SEQ ID NO: 5319804 - DNA, 25 bp, Homo sapien
tgtatccagcaataagtgaatatgc

SEQ ID NO: 5319805 - DNA, 25 bp, Homo sapien
tgattgttgctagcagatgaaagga

SEQ ID NO: 5319806 - DNA, 25 bp, Homo sapien
tggagaataaatccttccggacaaa

SEQ ID NO: 5319807 - DNA, 25 bp, Homo sapien
caggtcggcatgctgagagaaaaac

SEQ ID NO: 5319808 - DNA, 25 bp, Homo sapien
cggcatgctgagagaaaaacgacac

SEQ ID NO: 5319809 - DNA, 25 bp, Homo sapien
atgctgagagaaaaacgacacagac

SEQ ID NO: 5319810 - DNA, 25 bp, Homo sapien
ggtcggcatgctgagagaaaaacga

SEQ ID NO: 5319811 - DNA, 25 bp, Homo sapien
ggtttgccggcacatcctaatgagc

SEQ ID NO: 5319812 - DNA, 25 bp, Homo sapien
gccatatgcatatctggtgaaccag

SEQ ID NO: 5319813 - DNA, 25 bp, Homo sapien
taatgagcacgatggtcaaatgccc

SEQ ID NO: 5319814 - DNA, 25 bp, Homo sapien
ttctcacagcataaagacatggctt

SEQ ID NO: 5319815 - DNA, 25 bp, Homo sapien
gatgacaatactgcactaggcttgg

SEQ ID NO: 5319816 - DNA, 25 bp, Homo sapien
cagtagggtagcacacaatttgcct

SEQ ID NO: 5319817 - DNA, 25 bp, Homo sapien
tcgggagtcgtaaacagaaggcact

SEQ ID NO: 5319818 - DNA, 25 bp, Homo sapien
cactgtgcaccattttagtagcagc

SEQ ID NO: 5319819 - DNA, 25 bp, Homo sapien
tattctgtgataactgggccattag

SEQ ID NO: 5319820 - DNA, 25 bp, Homo sapien
ctccatctgactgatacctggcttt

SEQ ID NO: 5319821 - DNA, 25 bp, Homo sapien
aggcagtcctccatctgactgatac

SEQ ID NO: 5319822 - DNA, 25 bp, Homo sapien
tcagtgctacctcaagcaggcagtc

SEQ ID NO: 5319823 - DNA, 25 bp, Homo sapien
tgttgatgcctcctgatgagccagt

SEQ ID NO: 5319824 - DNA, 25 bp, Homo sapien
tgaggatgcagagatgaaccaaccg

SEQ ID NO: 5319825 - DNA, 25 bp, Homo sapien
gaatgaagacccctcctgacttgag

SEQ ID NO: 5319826 - DNA, 25 bp, Homo sapien
gtttagggaaaatctgagccatgcc

SEQ ID NO: 5319827 - DNA, 25 bp, Homo sapien
ccttgacacccactttcttagctga

SEQ ID NO: 5319828 - DNA, 25 bp, Homo sapien
tttcttagctgactccagctggtgc

SEQ ID NO: 5319829 - DNA, 25 bp, Homo sapien
tcacctctatcacccttgacaccca

SEQ ID NO: 5319830 - DNA, 25 bp, Homo sapien
tagctgactccagctggtgcttcat

SEQ ID NO: 5319831 - DNA, 25 bp, Homo sapien
tggaagtcttctcagcgagcaacca

SEQ ID NO: 5319832 - DNA, 25 bp, Homo sapien
gctctagtggataacaaatagttgg

SEQ ID NO: 5319833 - DNA, 25 bp, Homo sapien
accattgtatctggtttcaaattcc

SEQ ID NO: 5319834 - DNA, 25 bp, Homo sapien
aaacagcataatttgctctagtgga

SEQ ID NO: 5319835 - DNA, 25 bp, Homo sapien
gtgttgaatagtactgagtgtgcag

SEQ ID NO: 5319836 - DNA, 25 bp, Homo sapien
tcaaagtcgcaagtcaataaatcca

SEQ ID NO: 5319837 - DNA, 25 bp, Homo sapien
tcaggcaaagtgttgaatagtactg

SEQ ID NO: 5319838 - DNA, 25 bp, Homo sapien
atacacaggcccgagtcaaagtcgc

SEQ ID NO: 5319839 - DNA, 25 bp, Homo sapien
gaagccatgttctaaggtggtcttg

SEQ ID NO: 5319840 - DNA, 25 bp, Homo sapien
tcagtctcccctcaggcttagaaga

SEQ ID NO: 5319841 - DNA, 25 bp, Homo sapien
cctcaggcttagaagaaagctgcca

SEQ ID NO: 5319842 - DNA, 25 bp, Homo sapien
agaagaaaccacttctcagtctccc

SEQ ID NO: 5319843 - DNA, 25 bp, Homo sapien
tcaggactgtcaaaccttctggagc

SEQ ID NO: 5319844 - DNA, 25 bp, Homo sapien
tgttccttggctacatgctattatg

SEQ ID NO: 5319845 - DNA, 25 bp, Homo sapien
tgcttgcgttctggaatagagtctt

SEQ ID NO: 5319846 - DNA, 25 bp, Homo sapien
taaaactgtgagtgggagtgcttgc

SEQ ID NO: 5319847 - DNA, 25 bp, Homo sapien
tggctgtttctgtctacacaatacc

SEQ ID NO: 5319848 - DNA, 25 bp, Homo sapien
aagctttgatgtccccacacagcag

SEQ ID NO: 5319849 - DNA, 25 bp, Homo sapien
cagtgggcaccctttcaagagcagc

SEQ ID NO: 5319850 - DNA, 25 bp, Homo sapien
ccagaggttcctgtttgctgacaaa

SEQ ID NO: 5319851 - DNA, 25 bp, Homo sapien
gcagtgggcaccctttcaagagcag

SEQ ID NO: 5319852 - DNA, 25 bp, Homo sapien
tcataaaagttctgaaatgttggca

SEQ ID NO: 5319853 - DNA, 25 bp, Homo sapien
ctgcagctgtcactcccacctcatc

SEQ ID NO: 5319854 - DNA, 25 bp, Homo sapien
agctgtcactcccacctcatccaat

SEQ ID NO: 5319855 - DNA, 25 bp, Homo sapien
ccacctcatccaattcataaaagtt

SEQ ID NO: 5319856 - DNA, 25 bp, Homo sapien
gtgtatgacccgctaaggattatat

SEQ ID NO: 5319857 - DNA, 25 bp, Homo sapien
taactcccctgagagtggtttatca

SEQ ID NO: 5319858 - DNA, 25 bp, Homo sapien
taaaggcgatgtagtaaattcaaat

SEQ ID NO: 5319859 - DNA, 25 bp, Homo sapien
tcaaattaccattacaaatgtaagc

SEQ ID NO: 5319860 - DNA, 25 bp, Homo sapien
gcaccctagtcattttaacatggag

SEQ ID NO: 5319861 - DNA, 25 bp, Homo sapien
ttgttaccttcatcccaagaattac

SEQ ID NO: 5319862 - DNA, 25 bp, Homo sapien
catggagatgtaaattatcaaagtc

SEQ ID NO: 5319863 - DNA, 25 bp, Homo sapien
taacttggatcctttatctaattct

SEQ ID NO: 5319864 - DNA, 25 bp, Homo sapien
catagctaagttccatcagtgaacg

SEQ ID NO: 5319865 - DNA, 25 bp, Homo sapien
gttccatcagtgaacgcaagttcca

SEQ ID NO: 5319866 - DNA, 25 bp, Homo sapien
tgtaacagcattgctggcaagttct

SEQ ID NO: 5319867 - DNA, 25 bp, Homo sapien
gccatttgggcatacatagctaagt

SEQ ID NO: 5319868 - DNA, 25 bp, Homo sapien
agtgcattcacaagcatgacatccc

SEQ ID NO: 5319869 - DNA, 25 bp, Homo sapien
caggcacatgactgagcagtgcatt

SEQ ID NO: 5319870 - DNA, 25 bp, Homo sapien
gcaggcacatgactgagcagtgcat

SEQ ID NO: 5319871 - DNA, 25 bp, Homo sapien
agcagtgcattcacaagcatgacat

SEQ ID NO: 5319872 - DNA, 25 bp, Homo sapien
cgtttctggcctgccaccccctcca

SEQ ID NO: 5319873 - DNA, 25 bp, Homo sapien
tacgtttctggcctgccaccccctc

SEQ ID NO: 5319874 - DNA, 25 bp, Homo sapien
gtttctggcctgccaccccctccac

SEQ ID NO: 5319875 - DNA, 25 bp, Homo sapien
aaagcaagtttaactgcttcaagac

SEQ ID NO: 5319876 - DNA, 25 bp, Homo sapien
tgcttcaagactttgatggccagaa

SEQ ID NO: 5319877 - DNA, 25 bp, Homo sapien
gccagaagcacctgtttgggggatt

SEQ ID NO: 5319878 - DNA, 25 bp, Homo sapien
tgtttgggggatttgaaactgacca

SEQ ID NO: 5319879 - DNA, 25 bp, Homo sapien
caccccgtgtggatatggaagagga

SEQ ID NO: 5319880 - DNA, 25 bp, Homo sapien
gcattgcctgtcactgaattgagaa

SEQ ID NO: 5319881 - DNA, 25 bp, Homo sapien
tagctttacagagaggctcactggg

SEQ ID NO: 5319882 - DNA, 25 bp, Homo sapien
caggtggtatccctgagtgcctgac

SEQ ID NO: 5319883 - DNA, 25 bp, Homo sapien
taacatgatgggcaagagggcctga

SEQ ID NO: 5319884 - DNA, 25 bp, Homo sapien
cacattgaaagagggacgggtaaca

SEQ ID NO: 5319885 - DNA, 25 bp, Homo sapien
gcactctgcttgaggcaggttcagg

SEQ ID NO: 5319886 - DNA, 25 bp, Homo sapien
cttgataatgactctttgggctggc

SEQ ID NO: 5319887 - DNA, 25 bp, Homo sapien
aatgaggggctcgagtgtaaagact

SEQ ID NO: 5319888 - DNA, 25 bp, Homo sapien
tctggccccagacctcctggtgacg

SEQ ID NO: 5319889 - DNA, 25 bp, Homo sapien
tccagaaggctgatagattcttaag

SEQ ID NO: 5319890 - DNA, 25 bp, Homo sapien
ggtgacgacaccctctccagaaggc

SEQ ID NO: 5319891 - DNA, 25 bp, Homo sapien
cattgcctgtgttgcggacactcag

SEQ ID NO: 5319892 - DNA, 25 bp, Homo sapien
gggatgccggcattgcctgtgttgc

SEQ ID NO: 5319893 - DNA, 25 bp, Homo sapien
gtgttgcggacactcagtgcaatct

SEQ ID NO: 5319894 - DNA, 25 bp, Homo sapien
tgccggcattgcctgtgttgcggac

SEQ ID NO: 5319895 - DNA, 25 bp, Homo sapien
catatcttacaatatagtcaaaggc

SEQ ID NO: 5319896 - DNA, 25 bp, Homo sapien
tagcaataactagggcatgggccca

SEQ ID NO: 5319897 - DNA, 25 bp, Homo sapien
gtgacggaagctgggtacagttcat

SEQ ID NO: 5319898 - DNA, 25 bp, Homo sapien
tgggcccaagaaccacaagagatgg

SEQ ID NO: 5319899 - DNA, 25 bp, Homo sapien
ttcccttgtgatctcttggcactca

SEQ ID NO: 5319900 - DNA, 25 bp, Homo sapien
taaattcccttgtgatctcttggca

SEQ ID NO: 5319901 - DNA, 25 bp, Homo sapien
taactaaattcccttgtgatctctt

SEQ ID NO: 5319902 - DNA, 25 bp, Homo sapien
cttgtgatctcttggcactcacatc

SEQ ID NO: 5319903 - DNA, 25 bp, Homo sapien
aatctgtcttcaacacaactctcca

SEQ ID NO: 5319904 - DNA, 25 bp, Homo sapien
cctggagttgttgagctcccaacac

SEQ ID NO: 5319905 - DNA, 25 bp, Homo sapien
aggcaaaatctgtcttcaacacaac

SEQ ID NO: 5319906 - DNA, 25 bp, Homo sapien
caacacattgccacataggcaaaat

SEQ ID NO: 5319907 - DNA, 25 bp, Homo sapien
tgaactgtcattcctatgaaaggga

SEQ ID NO: 5319908 - DNA, 25 bp, Homo sapien
tcatagtgtacctacctcatcttag

SEQ ID NO: 5319909 - DNA, 25 bp, Homo sapien
tgaaagggatatggctcttcaacct

SEQ ID NO: 5319910 - DNA, 25 bp, Homo sapien
aattccattgaacaaggattcatag

SEQ ID NO: 5319911 - DNA, 25 bp, Homo sapien
gcgatgaggtatgttcgtattcttt

SEQ ID NO: 5319912 - DNA, 25 bp, Homo sapien
atggaaaggcagaagcgatgaggta

SEQ ID NO: 5319913 - DNA, 25 bp, Homo sapien
aaaggcagaagcgatgaggtatgtt

SEQ ID NO: 5319914 - DNA, 25 bp, Homo sapien
gcagaagcgatgaggtatgttcgta

SEQ ID NO: 5319915 - DNA, 25 bp, Homo sapien
caagcactaagggaaaaatgggctc

SEQ ID NO: 5319916 - DNA, 25 bp, Homo sapien
tgcgtcggactgaactctgggaccc

SEQ ID NO: 5319917 - DNA, 25 bp, Homo sapien
tctgggacccctaatgcaagcacta

SEQ ID NO: 5319918 - DNA, 25 bp, Homo sapien
taatttgtcaccagagctagcgcca

SEQ ID NO: 5319919 - DNA, 25 bp, Homo sapien
gagattaagattacaaagggtttgc

SEQ ID NO: 5319920 - DNA, 25 bp, Homo sapien
tggggggccagtataacataaaagc

SEQ ID NO: 5319921 - DNA, 25 bp, Homo sapien
ggtggtattctccaaacataacaca

SEQ ID NO: 5319922 - DNA, 25 bp, Homo sapien
ttgcaagtgtaaatgatgcggtggt

SEQ ID NO: 5319923 - DNA, 25 bp, Homo sapien
taaaaccaattgtaatcaggttgct

SEQ ID NO: 5319924 - DNA, 25 bp, Homo sapien
tcagctgcaagttgcaatggaagag

SEQ ID NO: 5319925 - DNA, 25 bp, Homo sapien
actgcctaagtcattctggtggtca

SEQ ID NO: 5319926 - DNA, 25 bp, Homo sapien
gctattttccagagtgtagattgta

SEQ ID NO: 5319927 - DNA, 25 bp, Homo sapien
agtcctctgatcagttttttgaagg

SEQ ID NO: 5319928 - DNA, 25 bp, Homo sapien
ttggtccacatggaaccccctgcag

SEQ ID NO: 5319929 - DNA, 25 bp, Homo sapien
ttaactgaattttggtccacatgga

SEQ ID NO: 5319930 - DNA, 25 bp, Homo sapien
catgacgccaggaacctcagacttc

SEQ ID NO: 5319931 - DNA, 25 bp, Homo sapien
tcaagccacgtgaagattggagtgt

SEQ ID NO: 5319932 - DNA, 25 bp, Homo sapien
ccatttcccagagccagcgttcaag

SEQ ID NO: 5319933 - DNA, 25 bp, Homo sapien
atttcccagagccagcgttcaagcc

SEQ ID NO: 5319934 - DNA, 25 bp, Homo sapien
cagcgttcaagccacgtgaagattg

SEQ ID NO: 5319935 - DNA, 25 bp, Homo sapien
tctcaggcaactaccaacaaagtgg

SEQ ID NO: 5319936 - DNA, 25 bp, Homo sapien
aagtggccacttggctcacatccaa

SEQ ID NO: 5319937 - DNA, 25 bp, Homo sapien
cagcaatcacattcactgtgtcggg

SEQ ID NO: 5319938 - DNA, 25 bp, Homo sapien
tgaagttctcggtaggctctgtgcc

SEQ ID NO: 5319939 - DNA, 25 bp, Homo sapien
tcttgccaggttctcatgaggctgt

SEQ ID NO: 5319940 - DNA, 25 bp, Homo sapien
agttcagccagcacggagtctcctt

SEQ ID NO: 5319941 - DNA, 25 bp, Homo sapien
tgtgggaatagatccagttcagcca

SEQ ID NO: 5319942 - DNA, 25 bp, Homo sapien
gaggtaacccttgtgtgagccaaca

SEQ ID NO: 5319943 - DNA, 25 bp, Homo sapien
gtcctatatcgttgatgatggtgat

SEQ ID NO: 5319944 - DNA, 25 bp, Homo sapien
taataaagtcctatatcgttgatga

SEQ ID NO: 5319945 - DNA, 25 bp, Homo sapien
ctaataaagtcctatatcgttgatg

SEQ ID NO: 5319946 - DNA, 25 bp, Homo sapien
taaagtcctatatcgttgatgatgg

SEQ ID NO: 5319947 - DNA, 25 bp, Homo sapien
tgttttccttacagttcctctcagg

SEQ ID NO: 5319948 - DNA, 25 bp, Homo sapien
ttccttacagttcctctcaggggag

SEQ ID NO: 5319949 - DNA, 25 bp, Homo sapien
agtgttttccttacagttcctctca

SEQ ID NO: 5319950 - DNA, 25 bp, Homo sapien
ccttacagttcctctcaggggagtc

SEQ ID NO: 5319951 - DNA, 25 bp, Homo sapien
cctcacaaagtaggtcatttctgtt

SEQ ID NO: 5319952 - DNA, 25 bp, Homo sapien
ggttgacatcctgagtaatttattg

SEQ ID NO: 5319953 - DNA, 25 bp, Homo sapien
atacacaagatcctcacaaagtagg

SEQ ID NO: 5319954 - DNA, 25 bp, Homo sapien
ctgtttcagcataaggttgacatcc

SEQ ID NO: 5319955 - DNA, 25 bp, Homo sapien
tgagcacgtctgattttgcacaagg

SEQ ID NO: 5319956 - DNA, 25 bp, Homo sapien
tgagaggtgaagtacttgacatttg

SEQ ID NO: 5319957 - DNA, 25 bp, Homo sapien
tctcctgcatggtgcacacttcagg

SEQ ID NO: 5319958 - DNA, 25 bp, Homo sapien
tgcacaaggcatgtggaaatcagaa

SEQ ID NO: 5319959 - DNA, 25 bp, Homo sapien
gatctggagagtggtcacaacttgc

SEQ ID NO: 5319960 - DNA, 25 bp, Homo sapien
gctgttcctcgttgcaaatatcttc

SEQ ID NO: 5319961 - DNA, 25 bp, Homo sapien
cacaggtgtcaacctctgtctgacg

SEQ ID NO: 5319962 - DNA, 25 bp, Homo sapien
tctgtctgacgggtacagatctgga

SEQ ID NO: 5319963 - DNA, 25 bp, Homo sapien
gcaaggcaacctctatcactgtcag

SEQ ID NO: 5319964 - DNA, 25 bp, Homo sapien
gcaatggcaaagtaggtcctggaaa

SEQ ID NO: 5319965 - DNA, 25 bp, Homo sapien
aattagcttatcaacactgggtcag

SEQ ID NO: 5319966 - DNA, 25 bp, Homo sapien
tcactgtcagccaggaatccgttag

SEQ ID NO: 5319967 - DNA, 25 bp, Homo sapien
ttgccattgggcatggccaccttac

SEQ ID NO: 5319968 - DNA, 25 bp, Homo sapien
attgggcatggccaccttactaaag

SEQ ID NO: 5319969 - DNA, 25 bp, Homo sapien
gaccccattgccattgggcatggcc

SEQ ID NO: 5319970 - DNA, 25 bp, Homo sapien
ggaccccattgccattgggcatggc

SEQ ID NO: 5319971 - DNA, 25 bp, Homo sapien
tgcatagaccccagaagcagagctc

SEQ ID NO: 5319972 - DNA, 25 bp, Homo sapien
ctaggagtccaactgcccaggacca

SEQ ID NO: 5319973 - DNA, 25 bp, Homo sapien
gcccaggaccagctgcatagacccc

SEQ ID NO: 5319974 - DNA, 25 bp, Homo sapien
taggagtccaactgcccaggaccag

SEQ ID NO: 5319975 - DNA, 25 bp, Homo sapien
gatcagcgattgattccacagagct

SEQ ID NO: 5319976 - DNA, 25 bp, Homo sapien
catgagcaaccttcttgtcgaggca

SEQ ID NO: 5319977 - DNA, 25 bp, Homo sapien
taattgcttgcgtaactccgagagg

SEQ ID NO: 5319978 - DNA, 25 bp, Homo sapien
tgtcgaggcatgaaaaggatcagcg

SEQ ID NO: 5319979 - DNA, 25 bp, Homo sapien
cctgagagcccacaaaggaatctca

SEQ ID NO: 5319980 - DNA, 25 bp, Homo sapien
agcctgagagcccacaaaggaatct

SEQ ID NO: 5319981 - DNA, 25 bp, Homo sapien
gagagcccacaaaggaatctcaccc

SEQ ID NO: 5319982 - DNA, 25 bp, Homo sapien
tgagagcccacaaaggaatctcacc

SEQ ID NO: 5319983 - DNA, 25 bp, Homo sapien
aataaaactgcacagagcagaaagc

SEQ ID NO: 5319984 - DNA, 25 bp, Homo sapien
tctggttgctgccaatacttccctg

SEQ ID NO: 5319985 - DNA, 25 bp, Homo sapien
tggaagccttggcaacaaccgaaag

SEQ ID NO: 5319986 - DNA, 25 bp, Homo sapien
ctgaaggatctcaagtctggttgct

SEQ ID NO: 5319987 - DNA, 25 bp, Homo sapien
gattaatccgcatcactatggctct

SEQ ID NO: 5319988 - DNA, 25 bp, Homo sapien
tggctctatggcaagtcacttgtgt

SEQ ID NO: 5319989 - DNA, 25 bp, Homo sapien
gggaatatgattaatccgcatcact

SEQ ID NO: 5319990 - DNA, 25 bp, Homo sapien
gcatcactatggctctatggcaagt

SEQ ID NO: 5319991 - DNA, 25 bp, Homo sapien
atgaccgacttgcactgtcctgaag

SEQ ID NO: 5319992 - DNA, 25 bp, Homo sapien
ctcaaagccatgaccgacttgcact

SEQ ID NO: 5319993 - DNA, 25 bp, Homo sapien
aaagccatgaccgacttgcactgtc

SEQ ID NO: 5319994 - DNA, 25 bp, Homo sapien
gccatgaccgacttgcactgtcctg

SEQ ID NO: 5319995 - DNA, 25 bp, Homo sapien
tgctaggccaaaggtcacactgcca

SEQ ID NO: 5319996 - DNA, 25 bp, Homo sapien
gggcttttaatcttcctgccgactc

SEQ ID NO: 5319997 - DNA, 25 bp, Homo sapien
atcttcctgccgactcctgagagca

SEQ ID NO: 5319998 - DNA, 25 bp, Homo sapien
gagagcaagggcctaggtttccttg

SEQ ID NO: 5319999 - DNA, 25 bp, Homo sapien
ggaatacgagactgatcccaaggag

SEQ ID NO: 5320000 - DNA, 25 bp, Homo sapien
tcaaaacaagcaggacagtcccttc

SEQ ID NO: 5320001 - DNA, 25 bp, Homo sapien
agcccaacaggatagttcacatcct

SEQ ID NO: 5320002 - DNA, 25 bp, Homo sapien
gtcccttccatggacagcccaacag

SEQ ID NO: 5320003 - DNA, 25 bp, Homo sapien
acgggtctaccatcaccttctgtga

SEQ ID NO: 5320004 - DNA, 25 bp, Homo sapien
cttctgtgaagtctctcacatttac

SEQ ID NO: 5320005 - DNA, 25 bp, Homo sapien
catttcacctttccctacaaggatc

SEQ ID NO: 5320006 - DNA, 25 bp, Homo sapien
gcttttgaaaaagattgccacatcc

SEQ ID NO: 5320007 - DNA, 25 bp, Homo sapien
cagggtcagactttcctgtggcaca

SEQ ID NO: 5320008 - DNA, 25 bp, Homo sapien
ctgtggcacatcgagtgacaactgc

SEQ ID NO: 5320009 - DNA, 25 bp, Homo sapien
ccttcacggaagcttagctcttcac

SEQ ID NO: 5320010 - DNA, 25 bp, Homo sapien
cttcacggaagcttagctcttcaca

SEQ ID NO: 5320011 - DNA, 25 bp, Homo sapien
gtgcgcttcccaacaaggccgcaga

SEQ ID NO: 5320012 - DNA, 25 bp, Homo sapien
gccgcagaccactccacggcccagc

SEQ ID NO: 5320013 - DNA, 25 bp, Homo sapien
agaccagtgcgcttcccaacaaggc

SEQ ID NO: 5320014 - DNA, 25 bp, Homo sapien
caacagaccagtgcgcttcccaaca

SEQ ID NO: 5320015 - DNA, 25 bp, Homo sapien
ttgctgcccaatttggaagttggaa

SEQ ID NO: 5320016 - DNA, 25 bp, Homo sapien
agggcgccatggccacccgactgga

SEQ ID NO: 5320017 - DNA, 25 bp, Homo sapien
gagaagttcggggtcatttgttcag

SEQ ID NO: 5320018 - DNA, 25 bp, Homo sapien
ggcttctaggaagttcaggccttga

SEQ ID NO: 5320019 - DNA, 25 bp, Homo sapien
tgacaactcctacgtgtagactcag

SEQ ID NO: 5320020 - DNA, 25 bp, Homo sapien
tgttcttctgttgacaactcctacg

SEQ ID NO: 5320021 - DNA, 25 bp, Homo sapien
aaccgtgatcgtgcccctagccatg

SEQ ID NO: 5320022 - DNA, 25 bp, Homo sapien
tgcccaattcccagaaccgtgatcg

SEQ ID NO: 5320023 - DNA, 25 bp, Homo sapien
ttgccattgccagtagcctcagtgt

SEQ ID NO: 5320024 - DNA, 25 bp, Homo sapien
cacagaactcccctgtttgccattg

SEQ ID NO: 5320025 - DNA, 25 bp, Homo sapien
tcagtgttctcatccttagaagtct

SEQ ID NO: 5320026 - DNA, 25 bp, Homo sapien
tcatccttagaagtctctttcatct

SEQ ID NO: 5320027 - DNA, 25 bp, Homo sapien
caaggagggagatagaagttgcaac

SEQ ID NO: 5320028 - DNA, 25 bp, Homo sapien
cacacctggacaggccttagatggg

SEQ ID NO: 5320029 - DNA, 25 bp, Homo sapien
gaagttgcaacaccgttctctccca

SEQ ID NO: 5320030 - DNA, 25 bp, Homo sapien
ggctgagtctgcctgcaccaccggc

SEQ ID NO: 5320031 - DNA, 25 bp, Homo sapien
taaatctatgtaacctccagtgaca

SEQ ID NO: 5320032 - DNA, 25 bp, Homo sapien
ggaaccagggcacgctcttcttcca

SEQ ID NO: 5320033 - DNA, 25 bp, Homo sapien
cagataaatctatgtaacctccagt

SEQ ID NO: 5320034 - DNA, 25 bp, Homo sapien
caggaaccagggcacgctcttcttc

SEQ ID NO: 5320035 - DNA, 25 bp, Homo sapien
tgtttccaccctctgtaattggaga

SEQ ID NO: 5320036 - DNA, 25 bp, Homo sapien
caaggctgtgcataattgtgttctc

SEQ ID NO: 5320037 - DNA, 25 bp, Homo sapien
atgttctgtccttgtcatattgtca

SEQ ID NO: 5320038 - DNA, 25 bp, Homo sapien
ctgtgccagcgttctatgttctgtc

SEQ ID NO: 5320039 - DNA, 25 bp, Homo sapien
gaagaagagcgcctttggactcaga

SEQ ID NO: 5320040 - DNA, 25 bp, Homo sapien
gccctgaatgtccagtgggcaccag

SEQ ID NO: 5320041 - DNA, 25 bp, Homo sapien
aacacgaggagggagtgtgtaccac

SEQ ID NO: 5320042 - DNA, 25 bp, Homo sapien
tgggcagcagaccaaagatggagca

SEQ ID NO: 5320043 - DNA, 25 bp, Homo sapien
acttcctgaagggacagaggcacct

SEQ ID NO: 5320044 - DNA, 25 bp, Homo sapien
gcagtggattcccatcagtgcttgc

SEQ ID NO: 5320045 - DNA, 25 bp, Homo sapien
agggtctgcagtggattcccatcag

SEQ ID NO: 5320046 - DNA, 25 bp, Homo sapien
gaggcacctggaacaatgctggccc

SEQ ID NO: 5320047 - DNA, 25 bp, Homo sapien
ctctgtctgaccttatcccaggctg

SEQ ID NO: 5320048 - DNA, 25 bp, Homo sapien
cctccggtgcagtctggtcacctgg

SEQ ID NO: 5320049 - DNA, 25 bp, Homo sapien
ctgggcctccggtgcagtctggtca

SEQ ID NO: 5320050 - DNA, 25 bp, Homo sapien
ctgaccttatcccaggctgacagct

SEQ ID NO: 5320051 - DNA, 25 bp, Homo sapien
gaagtccggtgccagaaattgttga

SEQ ID NO: 5320052 - DNA, 25 bp, Homo sapien
ggcagacacggcattgagacaacgg

SEQ ID NO: 5320053 - DNA, 25 bp, Homo sapien
tgtcaattttcccatcgagtcgcct

SEQ ID NO: 5320054 - DNA, 25 bp, Homo sapien
tcaggtggagcccattaccaggaag

SEQ ID NO: 5320055 - DNA, 25 bp, Homo sapien
gttgtgcttcccacaagaccgaatg

SEQ ID NO: 5320056 - DNA, 25 bp, Homo sapien
gtttgttgtgcttcccacaagaccg

SEQ ID NO: 5320057 - DNA, 25 bp, Homo sapien
gcaccgtttccgagggcctcctcta

SEQ ID NO: 5320058 - DNA, 25 bp, Homo sapien
acagcggcaccgtttccgagggcct

SEQ ID NO: 5320059 - DNA, 25 bp, Homo sapien
tactctcggccagttgccaggaaaa

SEQ ID NO: 5320060 - DNA, 25 bp, Homo sapien
taaattttcgtgagctcaggctgct

SEQ ID NO: 5320061 - DNA, 25 bp, Homo sapien
tctaactgaaagcaaacccaagcca

SEQ ID NO: 5320062 - DNA, 25 bp, Homo sapien
cagaagtctgcaatgtgtctggaca

SEQ ID NO: 5320063 - DNA, 25 bp, Homo sapien
agctcatcaaggcattgagtcagcc

SEQ ID NO: 5320064 - DNA, 25 bp, Homo sapien
tcatcaaggcattgagtcagccctc

SEQ ID NO: 5320065 - DNA, 25 bp, Homo sapien
cgggggtatatacttatcttcaagc

SEQ ID NO: 5320066 - DNA, 25 bp, Homo sapien
tcaaggcattgagtcagccctccat

SEQ ID NO: 5320067 - DNA, 25 bp, Homo sapien
ggagggcttcatgttaaacctgtgc

SEQ ID NO: 5320068 - DNA, 25 bp, Homo sapien
gcacagtcgtggatgttggaaagac

SEQ ID NO: 5320069 - DNA, 25 bp, Homo sapien
aaagatgattcattgcttacacgga

SEQ ID NO: 5320070 - DNA, 25 bp, Homo sapien
gaagccaccgtaagtcattgctgca

SEQ ID NO: 5320071 - DNA, 25 bp, Homo sapien
gaaagactgttctattcccgtcgcc

SEQ ID NO: 5320072 - DNA, 25 bp, Homo sapien
gaatgaacattaggcactgaccacc

SEQ ID NO: 5320073 - DNA, 25 bp, Homo sapien
ttctattcccgtcgccgtgaggaca

SEQ ID NO: 5320074 - DNA, 25 bp, Homo sapien
caaaggagacgcaggcatggaggtt

SEQ ID NO: 5320075 - DNA, 25 bp, Homo sapien
caagggcaggttaagtatgttcatc

SEQ ID NO: 5320076 - DNA, 25 bp, Homo sapien
aaaggctctcgtttaatttgccaag

SEQ ID NO: 5320077 - DNA, 25 bp, Homo sapien
gatatttagccaatgcagtaagaca

SEQ ID NO: 5320078 - DNA, 25 bp, Homo sapien
tttgccaagttagcataatgccaat

SEQ ID NO: 5320079 - DNA, 25 bp, Homo sapien
gaattaccctagaccttttgctagc

SEQ ID NO: 5320080 - DNA, 25 bp, Homo sapien
tggaccactgtgagagaccgaagaa

SEQ ID NO: 5320081 - DNA, 25 bp, Homo sapien
caagctgcttggtctggtggaaacg

SEQ ID NO: 5320082 - DNA, 25 bp, Homo sapien
caaagctgttattgtgcaagctgct

SEQ ID NO: 5320083 - DNA, 25 bp, Homo sapien
cagtattatactagaagtcatagcc

SEQ ID NO: 5320084 - DNA, 25 bp, Homo sapien
atgtagaaaaccttacggaatcaat

SEQ ID NO: 5320085 - DNA, 25 bp, Homo sapien
cggaatcaatttagcaagaccaaaa

SEQ ID NO: 5320086 - DNA, 25 bp, Homo sapien
caaaagttagaagagggaacatgtc

SEQ ID NO: 5320087 - DNA, 25 bp, Homo sapien
caccgggtggttgactcagttctct

SEQ ID NO: 5320088 - DNA, 25 bp, Homo sapien
tacccaccgatgtaggcttcaaggc

SEQ ID NO: 5320089 - DNA, 25 bp, Homo sapien
gcaagccactcaacacgtctcagag

SEQ ID NO: 5320090 - DNA, 25 bp, Homo sapien
cagccaagactctcgactcagggaa

SEQ ID NO: 5320091 - DNA, 25 bp, Homo sapien
tgagggtcgtttcggtggactccac

SEQ ID NO: 5320092 - DNA, 25 bp, Homo sapien
taggacccgtaagtcctgccttgca

SEQ ID NO: 5320093 - DNA, 25 bp, Homo sapien
ccaaaggacagcgaagccaaccaca

SEQ ID NO: 5320094 - DNA, 25 bp, Homo sapien
gccaaccacacactcttgaaatgct

SEQ ID NO: 5320095 - DNA, 25 bp, Homo sapien
caaacaccggtttcgggctccatgt

SEQ ID NO: 5320096 - DNA, 25 bp, Homo sapien
gactgtgcaaacaccggtttcgggc

SEQ ID NO: 5320097 - DNA, 25 bp, Homo sapien
tctgcccccttgagacgacaattca

SEQ ID NO: 5320098 - DNA, 25 bp, Homo sapien
ttcctcaaggactgtgcaaacaccg

SEQ ID NO: 5320099 - DNA, 25 bp, Homo sapien
tggtaaaggagacaacaaaacagcc

SEQ ID NO: 5320100 - DNA, 25 bp, Homo sapien
ctggtaaaggagacaacaaaacagc

SEQ ID NO: 5320101 - DNA, 25 bp, Homo sapien
tggcatccaaatcagtgccaaaacc

SEQ ID NO: 5320102 - DNA, 25 bp, Homo sapien
ttcccttgcatacttccttccctct

SEQ ID NO: 5320103 - DNA, 25 bp, Homo sapien
ttccttccctcttgactcctttctc

SEQ ID NO: 5320104 - DNA, 25 bp, Homo sapien
cccttgcatacttccttccctcttg

SEQ ID NO: 5320105 - DNA, 25 bp, Homo sapien
tccctcttgactcctttctccccca

SEQ ID NO: 5320106 - DNA, 25 bp, Homo sapien
gaggacagctgtcccttttatcacc

SEQ ID NO: 5320107 - DNA, 25 bp, Homo sapien
tgaggacagctgtcccttttatcac

SEQ ID NO: 5320108 - DNA, 25 bp, Homo sapien
gattcggctacccaaggcatttgca

SEQ ID NO: 5320109 - DNA, 25 bp, Homo sapien
ctacccaaggcatttgcatctttga

SEQ ID NO: 5320110 - DNA, 25 bp, Homo sapien
cccaaggcatttgcatctttgatca

SEQ ID NO: 5320111 - DNA, 25 bp, Homo sapien
attcggctacccaaggcatttgcat

SEQ ID NO: 5320112 - DNA, 25 bp, Homo sapien
atgattccagggtccttcgatggcc

SEQ ID NO: 5320113 - DNA, 25 bp, Homo sapien
tcagcgccaacagttctaatgattc

SEQ ID NO: 5320114 - DNA, 25 bp, Homo sapien
ttctctggtccacttagccctcgtc

SEQ ID NO: 5320115 - DNA, 25 bp, Homo sapien
gattccagggtccttcgatggccct

SEQ ID NO: 5320116 - DNA, 25 bp, Homo sapien
tctccctagctcaggatgtgtttgc

SEQ ID NO: 5320117 - DNA, 25 bp, Homo sapien
ggtgtaagcggaaacttggtgctct

SEQ ID NO: 5320118 - DNA, 25 bp, Homo sapien
gtccaaacccatagctgaaggccct

SEQ ID NO: 5320119 - DNA, 25 bp, Homo sapien
gtgctctttctggacaatgtccaaa

SEQ ID NO: 5320120 - DNA, 25 bp, Homo sapien
cttttggctcataaagagactcctc

SEQ ID NO: 5320121 - DNA, 25 bp, Homo sapien
tctgtagagacttggcaatacccaa

SEQ ID NO: 5320122 - DNA, 25 bp, Homo sapien
tagttctcaagtaacgaattagcag

SEQ ID NO: 5320123 - DNA, 25 bp, Homo sapien
gggcaatgtctagaaccattatcag

SEQ ID NO: 5320124 - DNA, 25 bp, Homo sapien
cagggattggggtcggccctccaca

SEQ ID NO: 5320125 - DNA, 25 bp, Homo sapien
gggcaaagttgacataccagcataa

SEQ ID NO: 5320126 - DNA, 25 bp, Homo sapien
agggtcctgcaggaggtcttgtttc

SEQ ID NO: 5320127 - DNA, 25 bp, Homo sapien
tcaggggggcctctgtttaaccaga

SEQ ID NO: 5320128 - DNA, 25 bp, Homo sapien
ccaaggcagggtcatgagattccta

SEQ ID NO: 5320129 - DNA, 25 bp, Homo sapien
caaagtctcgtcagggtggtcatct

SEQ ID NO: 5320130 - DNA, 25 bp, Homo sapien
caggtggtgccacgcagatgacaaa

SEQ ID NO: 5320131 - DNA, 25 bp, Homo sapien
taacaagtgattgggctaattagcc

SEQ ID NO: 5320132 - DNA, 25 bp, Homo sapien
tcatcccagagcagattggcattca

SEQ ID NO: 5320133 - DNA, 25 bp, Homo sapien
agttagccaaatcctcccggtacag

SEQ ID NO: 5320134 - DNA, 25 bp, Homo sapien
ggccagtgatccaagcccagttagc

SEQ ID NO: 5320135 - DNA, 25 bp, Homo sapien
cccggtacagtctgctgaagtcatt

SEQ ID NO: 5320136 - DNA, 25 bp, Homo sapien
cccaatgggttgagagagctactgt

SEQ ID NO: 5320137 - DNA, 25 bp, Homo sapien
gcagcatagggtaagtgtcagaact

SEQ ID NO: 5320138 - DNA, 25 bp, Homo sapien
gagtgaagcccagaacggcatgctc

SEQ ID NO: 5320139 - DNA, 25 bp, Homo sapien
tggcatgtaccatccacccaatggg

SEQ ID NO: 5320140 - DNA, 25 bp, Homo sapien
tgctgggcggacacaaagtaccttc

SEQ ID NO: 5320141 - DNA, 25 bp, Homo sapien
gggatgccatcaagggatcttttaa

SEQ ID NO: 5320142 - DNA, 25 bp, Homo sapien
cagcaactgcggcaaaccagggatc

SEQ ID NO: 5320143 - DNA, 25 bp, Homo sapien
cagctaagaaaatgtcagacttaac

SEQ ID NO: 5320144 - DNA, 25 bp, Homo sapien
taaacagggtgtcgagcattcatgc

SEQ ID NO: 5320145 - DNA, 25 bp, Homo sapien
gtcgagcattcatgctcgtcctggg

SEQ ID NO: 5320146 - DNA, 25 bp, Homo sapien
tggaaggattccataatgcatggag

SEQ ID NO: 5320147 - DNA, 25 bp, Homo sapien
ggtactgctcggtttctggaaggat

SEQ ID NO: 5320148 - DNA, 25 bp, Homo sapien
ttcaaggacacaggcacgaaatacg

SEQ ID NO: 5320149 - DNA, 25 bp, Homo sapien
gacacaggcacgaaatacgacacca

SEQ ID NO: 5320150 - DNA, 25 bp, Homo sapien
acaggcacgaaatacgacaccactc

SEQ ID NO: 5320151 - DNA, 25 bp, Homo sapien
gcatcctccagtcaatccccaaggc

SEQ ID NO: 5320152 - DNA, 25 bp, Homo sapien
aataccttcctctaaccaggactga

SEQ ID NO: 5320153 - DNA, 25 bp, Homo sapien
cctggatacaaaataccttcctcta

SEQ ID NO: 5320154 - DNA, 25 bp, Homo sapien
ctctaaccaggactgaacgtttgca

SEQ ID NO: 5320155 - DNA, 25 bp, Homo sapien
tcaaatctgaaatgtagatttggcc

SEQ ID NO: 5320156 - DNA, 25 bp, Homo sapien
tgcctggaggtatgcgatgaacaag

SEQ ID NO: 5320157 - DNA, 25 bp, Homo sapien
ccctccggggagtcagttctgtgac

SEQ ID NO: 5320158 - DNA, 25 bp, Homo sapien
aagttgcctggaggtatgcgatgaa

SEQ ID NO: 5320159 - DNA, 25 bp, Homo sapien
aggtatgcgatgaacaaggaccaga

SEQ ID NO: 5320160 - DNA, 25 bp, Homo sapien
cagctgtctgctggcgcatccattt

SEQ ID NO: 5320161 - DNA, 25 bp, Homo sapien
tgtctgctggcgcatccatttcctc

SEQ ID NO: 5320162 - DNA, 25 bp, Homo sapien
gctggcgcatccatttcctcagtta

SEQ ID NO: 5320163 - DNA, 25 bp, Homo sapien
tctgctggcgcatccatttcctcag

SEQ ID NO: 5320164 - DNA, 25 bp, Homo sapien
agctccccagcatgggccattaatc

SEQ ID NO: 5320165 - DNA, 25 bp, Homo sapien
cccagcatgggccattaatccacat

SEQ ID NO: 5320166 - DNA, 25 bp, Homo sapien
gctccccagcatgggccattaatcc

SEQ ID NO: 5320167 - DNA, 25 bp, Homo sapien
tccccagcatgggccattaatccac

SEQ ID NO: 5320168 - DNA, 25 bp, Homo sapien
ccaaggagaaccatactgtcttgtc

SEQ ID NO: 5320169 - DNA, 25 bp, Homo sapien
caaggagaaccatactgtcttgtct

SEQ ID NO: 5320170 - DNA, 25 bp, Homo sapien
gccacatttccatgcaaattgagtg

SEQ ID NO: 5320171 - DNA, 25 bp, Homo sapien
agtgaaagtgccacatttccatgca

SEQ ID NO: 5320172 - DNA, 25 bp, Homo sapien
agatcttttcggaagaaaagttgct

SEQ ID NO: 5320173 - DNA, 25 bp, Homo sapien
gatcttttcggaagaaaagttgctc

SEQ ID NO: 5320174 - DNA, 25 bp, Homo sapien
gcttgggagaccgtgtgagaaccaa

SEQ ID NO: 5320175 - DNA, 25 bp, Homo sapien
caggcatgaggtaagggcttgggag

SEQ ID NO: 5320176 - DNA, 25 bp, Homo sapien
gggttgtaactccactatcttgttg

SEQ ID NO: 5320177 - DNA, 25 bp, Homo sapien
cgaacagagaaatctaccggcaggg

SEQ ID NO: 5320178 - DNA, 25 bp, Homo sapien
ccttcgggaccgaacagagaaatct

SEQ ID NO: 5320179 - DNA, 25 bp, Homo sapien
gctgggttgtaactccactatcttg

SEQ ID NO: 5320180 - DNA, 25 bp, Homo sapien
catcattttaaaagcccctatttct

SEQ ID NO: 5320181 - DNA, 25 bp, Homo sapien
tttgttgggaatgctcccatcattt

SEQ ID NO: 5320182 - DNA, 25 bp, Homo sapien
ctcccatcattttaaaagcccctat

SEQ ID NO: 5320183 - DNA, 25 bp, Homo sapien
tgctcccatcattttaaaagcccct

SEQ ID NO: 5320184 - DNA, 25 bp, Homo sapien
atgagtctctggcggggagctccct

SEQ ID NO: 5320185 - DNA, 25 bp, Homo sapien
gagtctctggcggggagctcccttc

SEQ ID NO: 5320186 - DNA, 25 bp, Homo sapien
gtctctggcggggagctcccttcac

SEQ ID NO: 5320187 - DNA, 25 bp, Homo sapien
tgagtctctggcggggagctccctt

SEQ ID NO: 5320188 - DNA, 25 bp, Homo sapien
ggtgtcctcatctgtggagcccatg

SEQ ID NO: 5320189 - DNA, 25 bp, Homo sapien
acagagtgcatcctctcagtgacac

SEQ ID NO: 5320190 - DNA, 25 bp, Homo sapien
cctggagacacacagagtgcatcct

SEQ ID NO: 5320191 - DNA, 25 bp, Homo sapien
cacacagagtgcatcctctcagtga

SEQ ID NO: 5320192 - DNA, 25 bp, Homo sapien
aggggtccctgagagaggtccacga

SEQ ID NO: 5320193 - DNA, 25 bp, Homo sapien
gcttttccggcccctgctgagaggg

SEQ ID NO: 5320194 - DNA, 25 bp, Homo sapien
gaccagctcaagtgaagttcctgca

SEQ ID NO: 5320195 - DNA, 25 bp, Homo sapien
gggaagtgcgtcttctcctctccaa

SEQ ID NO: 5320196 - DNA, 25 bp, Homo sapien
ctaggtaatctagccagaaggtgga

SEQ ID NO: 5320197 - DNA, 25 bp, Homo sapien
tgccatctgataagcggtaacctag

SEQ ID NO: 5320198 - DNA, 25 bp, Homo sapien
ggatttaccgctcgcccagtgatgt

SEQ ID NO: 5320199 - DNA, 25 bp, Homo sapien
tcaaatcctgcatggtagccaccaa

SEQ ID NO: 5320200 - DNA, 25 bp, Homo sapien
cgcacaacggcttcttggaggctac

SEQ ID NO: 5320201 - DNA, 25 bp, Homo sapien
agggccagggcatcactcatgacag

SEQ ID NO: 5320202 - DNA, 25 bp, Homo sapien
taaaatggcgctgcaggcctaggct

SEQ ID NO: 5320203 - DNA, 25 bp, Homo sapien
gcaggactctgtcttcgcacaacgg

SEQ ID NO: 5320204 - DNA, 25 bp, Homo sapien
gctctcgagcttccatccgaaaact

SEQ ID NO: 5320205 - DNA, 25 bp, Homo sapien
cacacatcttgagctctctgggtac

SEQ ID NO: 5320206 - DNA, 25 bp, Homo sapien
cgaaaactgccacacatcttgagct

SEQ ID NO: 5320207 - DNA, 25 bp, Homo sapien
ctctctgggtactacgccgaatggg

SEQ ID NO: 5320208 - DNA, 25 bp, Homo sapien
gccactggcatcttaagcatgattt

SEQ ID NO: 5320209 - DNA, 25 bp, Homo sapien
aaaagtacaggtgtgacttggccca

SEQ ID NO: 5320210 - DNA, 25 bp, Homo sapien
tggcccaatgattttctgttctcta

SEQ ID NO: 5320211 - DNA, 25 bp, Homo sapien
aaccaaccacaggtcgagccactgg

SEQ ID NO: 5320212 - DNA, 25 bp, Homo sapien
tcaagttcaacgtcaaagcagccaa

SEQ ID NO: 5320213 - DNA, 25 bp, Homo sapien
tatgatagtcctaataaactcggga

SEQ ID NO: 5320214 - DNA, 25 bp, Homo sapien
gaggcgaacaaatctctgaagagaa

SEQ ID NO: 5320215 - DNA, 25 bp, Homo sapien
gaaacacttgcccttatgactgaga

SEQ ID NO: 5320216 - DNA, 25 bp, Homo sapien
tacgctaagagcagcatatactgag

SEQ ID NO: 5320217 - DNA, 25 bp, Homo sapien
ggatgcaaaacctaattacgctaag

SEQ ID NO: 5320218 - DNA, 25 bp, Homo sapien
aaacctacacagttgcactcatagc

SEQ ID NO: 5320219 - DNA, 25 bp, Homo sapien
tatcaccagatgtttgcactcctcc

SEQ ID NO: 5320220 - DNA, 25 bp, Homo sapien
aatagtgactcccatagtaaaagat

SEQ ID NO: 5320221 - DNA, 25 bp, Homo sapien
gaacaggttaatgcagacaactgcc

SEQ ID NO: 5320222 - DNA, 25 bp, Homo sapien
tccaatagaacttaacaaagaccag

SEQ ID NO: 5320223 - DNA, 25 bp, Homo sapien
gacaaaatgggtgtatgaacaggtt

SEQ ID NO: 5320224 - DNA, 25 bp, Homo sapien
ctaaagcgggctttctctttaatat

SEQ ID NO: 5320225 - DNA, 25 bp, Homo sapien
aagtattgactaaagcgggctttct

SEQ ID NO: 5320226 - DNA, 25 bp, Homo sapien
gccatttacaaaaaagtattgacta

SEQ ID NO: 5320227 - DNA, 25 bp, Homo sapien
acaggaatagaaaaggccaataaca

SEQ ID NO: 5320228 - DNA, 25 bp, Homo sapien
ggatatgtacaacccctatgacagc

SEQ ID NO: 5320229 - DNA, 25 bp, Homo sapien
aacgttattagcttgcagtactgca

SEQ ID NO: 5320230 - DNA, 25 bp, Homo sapien
catatgaaggtaagatgctggaatg

SEQ ID NO: 5320231 - DNA, 25 bp, Homo sapien
tatgacagccatccatgtgacattc

SEQ ID NO: 5320232 - DNA, 25 bp, Homo sapien
tgttgcgtccaagtaagtaagctca

SEQ ID NO: 5320233 - DNA, 25 bp, Homo sapien
tccttgcactgtagaagcgaaagca

SEQ ID NO: 5320234 - DNA, 25 bp, Homo sapien
gaagtacaacttttagggagcacag

SEQ ID NO: 5320235 - DNA, 25 bp, Homo sapien
tttgctcagcaacgaattagggaca

SEQ ID NO: 5320236 - DNA, 25 bp, Homo sapien
cagtttttatatcattattcaacac

SEQ ID NO: 5320237 - DNA, 25 bp, Homo sapien
tattcagtttttatatcattattca

SEQ ID NO: 5320238 - DNA, 25 bp, Homo sapien
ttcagtttttatatcattattcaac

SEQ ID NO: 5320239 - DNA, 25 bp, Homo sapien
ctattcagtttttatatcattattc

SEQ ID NO: 5320240 - DNA, 25 bp, Homo sapien
actctgggcacaggcatagttgcac

SEQ ID NO: 5320241 - DNA, 25 bp, Homo sapien
tcacatttgtaaacgtccttcccca

SEQ ID NO: 5320242 - DNA, 25 bp, Homo sapien
catgcgttttcatgtgcctggtgag

SEQ ID NO: 5320243 - DNA, 25 bp, Homo sapien
tactgtacacgctaaaaggcatctt

SEQ ID NO: 5320244 - DNA, 25 bp, Homo sapien
tctccgaagctaaggaagggatctt

SEQ ID NO: 5320245 - DNA, 25 bp, Homo sapien
aaaaggcgattgtctggagtctccg

SEQ ID NO: 5320246 - DNA, 25 bp, Homo sapien
ctccgacgaggaggcaaaaggcgat

SEQ ID NO: 5320247 - DNA, 25 bp, Homo sapien
taacagtgccatcgtctatgcggtc

SEQ ID NO: 5320248 - DNA, 25 bp, Homo sapien
gggcgcggctctcgtcgcccacgcc

SEQ ID NO: 5320249 - DNA, 25 bp, Homo sapien
ggcagggcgcggctctcgtcgccca

SEQ ID NO: 5320250 - DNA, 25 bp, Homo sapien
gcagggcgcggctctcgtcgcccac

SEQ ID NO: 5320251 - DNA, 25 bp, Homo sapien
tcgggcagggcgcggctctcgtcgc

SEQ ID NO: 5320252 - DNA, 25 bp, Homo sapien
ctcagcccgaagccgtagtccaccc

SEQ ID NO: 5320253 - DNA, 25 bp, Homo sapien
cgaagccgtagtccaccctctcgct

SEQ ID NO: 5320254 - DNA, 25 bp, Homo sapien
cccgaagccgtagtccaccctctcg

SEQ ID NO: 5320255 - DNA, 25 bp, Homo sapien
agcccgaagccgtagtccaccctct

SEQ ID NO: 5320256 - DNA, 25 bp, Homo sapien
ctcgtccccgttctccgggatcagg

SEQ ID NO: 5320257 - DNA, 25 bp, Homo sapien
gatcaggttggggtcgttctcgctc

SEQ ID NO: 5320258 - DNA, 25 bp, Homo sapien
caggttggggtcgttctcgctcttg

SEQ ID NO: 5320259 - DNA, 25 bp, Homo sapien
tcctcgtccccgttctccgggatca

SEQ ID NO: 5320260 - DNA, 25 bp, Homo sapien
cggacttgagcgcgctgctggcgct

SEQ ID NO: 5320261 - DNA, 25 bp, Homo sapien
acggacttgagcgcgctgctggcgc

SEQ ID NO: 5320262 - DNA, 25 bp, Homo sapien
ctcgcatgacttggacttgaccggg

SEQ ID NO: 5320263 - DNA, 25 bp, Homo sapien
cgtcgtcggacttgaccgtcatggg

SEQ ID NO: 5320264 - DNA, 25 bp, Homo sapien
tggagagaccgtcgtcggacttgac

SEQ ID NO: 5320265 - DNA, 25 bp, Homo sapien
ggtgcaccaccaggttgctctgaaa

SEQ ID NO: 5320266 - DNA, 25 bp, Homo sapien
acagcggtgggctagacgtgttccc

SEQ ID NO: 5320267 - DNA, 25 bp, Homo sapien
agtaacctttgcatagggctgggcc

SEQ ID NO: 5320268 - DNA, 25 bp, Homo sapien
tctcctagagaaatccatggcggga

SEQ ID NO: 5320269 - DNA, 25 bp, Homo sapien
tagccattggattcaaccgcagcac

SEQ ID NO: 5320270 - DNA, 25 bp, Homo sapien
tgtctgcaatatgaatcccatggag

SEQ ID NO: 5320271 - DNA, 25 bp, Homo sapien
cattctgcacctagtcctgaaggga

SEQ ID NO: 5320272 - DNA, 25 bp, Homo sapien
gccggaagcctctctcgatactgat

SEQ ID NO: 5320273 - DNA, 25 bp, Homo sapien
cctgtcaaaggcactcgggtgatgg

SEQ ID NO: 5320274 - DNA, 25 bp, Homo sapien
gacttccgtgttcgctttctaagta

SEQ ID NO: 5320275 - DNA, 25 bp, Homo sapien
gcaagttgtacatgtgtagctgctg

SEQ ID NO: 5320276 - DNA, 25 bp, Homo sapien
gaaaccatgcactggtgaatggctg

SEQ ID NO: 5320277 - DNA, 25 bp, Homo sapien
tgagtgttctgtgcgtgttgcaaga

SEQ ID NO: 5320278 - DNA, 25 bp, Homo sapien
ctgcaaaataatacaacaccaacat

SEQ ID NO: 5320279 - DNA, 25 bp, Homo sapien
tcattttactttatgggaaggaatg

SEQ ID NO: 5320280 - DNA, 25 bp, Homo sapien
cattttactttatgggaaggaatga

SEQ ID NO: 5320281 - DNA, 25 bp, Homo sapien
ctttatgggaaggaatgacccccat

SEQ ID NO: 5320282 - DNA, 25 bp, Homo sapien
caggcgtggggattagagctccatg

SEQ ID NO: 5320283 - DNA, 25 bp, Homo sapien
ggggattagagctccatgtgcagaa

SEQ ID NO: 5320284 - DNA, 25 bp, Homo sapien
attctgcactcatcccaggcgtggg

SEQ ID NO: 5320285 - DNA, 25 bp, Homo sapien
taccctgcggggcatattctgcact

SEQ ID NO: 5320286 - DNA, 25 bp, Homo sapien
aatcctgatgttctttaaaaagtgt

SEQ ID NO: 5320287 - DNA, 25 bp, Homo sapien
caaatcctgatgttctttaaaaagt

SEQ ID NO: 5320288 - DNA, 25 bp, Homo sapien
tcctgatgttctttaaaaagtgtat

SEQ ID NO: 5320289 - DNA, 25 bp, Homo sapien
cctgatgttctttaaaaagtgtatt

SEQ ID NO: 5320290 - DNA, 25 bp, Homo sapien
gagccttgattactcaaacaacagg

SEQ ID NO: 5320291 - DNA, 25 bp, Homo sapien
aaatgccagccaccaatctgtcagg

SEQ ID NO: 5320292 - DNA, 25 bp, Homo sapien
gagatgacattttgcgtgccccttt

SEQ ID NO: 5320293 - DNA, 25 bp, Homo sapien
gattccttgatacttcaccagtgac

SEQ ID NO: 5320294 - DNA, 25 bp, Homo sapien
actccatgaaggttcatctgttctg

SEQ ID NO: 5320295 - DNA, 25 bp, Homo sapien
accatgtggactcttgtgaaactcc

SEQ ID NO: 5320296 - DNA, 25 bp, Homo sapien
taagggacacaaccatgtggactct

SEQ ID NO: 5320297 - DNA, 25 bp, Homo sapien
agctttcacaagtgcgtattttcca

SEQ ID NO: 5320298 - DNA, 25 bp, Homo sapien
aggtattagcctcacctcccagtga

SEQ ID NO: 5320299 - DNA, 25 bp, Homo sapien
atcctgccccaacagtcgccctgtg

SEQ ID NO: 5320300 - DNA, 25 bp, Homo sapien
ccaaagtactctcctcacatcctgc

SEQ ID NO: 5320301 - DNA, 25 bp, Homo sapien
atgagggaaggtattagcctcacct

SEQ ID NO: 5320302 - DNA, 25 bp, Homo sapien
tcaggtctagcatttccacgcagtc

SEQ ID NO: 5320303 - DNA, 25 bp, Homo sapien
tccctgagcaaattggagatgcccg

SEQ ID NO: 5320304 - DNA, 25 bp, Homo sapien
gggactcagcctatggacacctggc

SEQ ID NO: 5320305 - DNA, 25 bp, Homo sapien
catttataccactgaccaatctgga

SEQ ID NO: 5320306 - DNA, 25 bp, Homo sapien
gctgcttttgttaaatcatactttg

SEQ ID NO: 5320307 - DNA, 25 bp, Homo sapien
tatggcctgcggctcttggctgact

SEQ ID NO: 5320308 - DNA, 25 bp, Homo sapien
aggaggccccactgagatgactgcc

SEQ ID NO: 5320309 - DNA, 25 bp, Homo sapien
tgtggagcaagctgtggacttcccc

SEQ ID NO: 5320310 - DNA, 25 bp, Homo sapien
cgggtggtttgagccacttaggaca

SEQ ID NO: 5320311 - DNA, 25 bp, Homo sapien
gagccacttaggacattttggacat

SEQ ID NO: 5320312 - DNA, 25 bp, Homo sapien
tgtcatttttggacctaacatccag

SEQ ID NO: 5320313 - DNA, 25 bp, Homo sapien
gcatctctcatgattctatcttgag

SEQ ID NO: 5320314 - DNA, 25 bp, Homo sapien
aattagaaagccctcagattttctg

SEQ ID NO: 5320315 - DNA, 25 bp, Homo sapien
agccctcagattttctgcaaatgca

SEQ ID NO: 5320316 - DNA, 25 bp, Homo sapien
cgcgtatgaggggtcttgtcgaaca

SEQ ID NO: 5320317 - DNA, 25 bp, Homo sapien
gaacagctttactctaatttagagc

SEQ ID NO: 5320318 - DNA, 25 bp, Homo sapien
gcttttgatgcttcgtctgtgacag

SEQ ID NO: 5320319 - DNA, 25 bp, Homo sapien
tcacaggaagttacacgcaaggtcc

SEQ ID NO: 5320320 - DNA, 25 bp, Homo sapien
gaaaatgcagtcaccacggctgctt

SEQ ID NO: 5320321 - DNA, 25 bp, Homo sapien
cagttgttgggttgcccttctagga

SEQ ID NO: 5320322 - DNA, 25 bp, Homo sapien
tgaaaatagctcgaattccaaccct

SEQ ID NO: 5320323 - DNA, 25 bp, Homo sapien
aatagctcgaattccaaccctctct

SEQ ID NO: 5320324 - DNA, 25 bp, Homo sapien
ctgaaaatagctcgaattccaaccc

SEQ ID NO: 5320325 - DNA, 25 bp, Homo sapien
aaaatagctcgaattccaaccctct

SEQ ID NO: 5320326 - DNA, 25 bp, Homo sapien
aacctcaaattatgggaattctcac

SEQ ID NO: 5320327 - DNA, 25 bp, Homo sapien
ggaacacctcattatggaacatatg

SEQ ID NO: 5320328 - DNA, 25 bp, Homo sapien
tgtgtaaacttgtgtgctccaaatt

SEQ ID NO: 5320329 - DNA, 25 bp, Homo sapien
tgcccttatcaccattccagtataa

SEQ ID NO: 5320330 - DNA, 25 bp, Homo sapien
tagcagatgctagtcccaggaatgt

SEQ ID NO: 5320331 - DNA, 25 bp, Homo sapien
catccaacgtcacgaagctgctgaa

SEQ ID NO: 5320332 - DNA, 25 bp, Homo sapien
ctgcaaaaacagaacggtgtgagcc

SEQ ID NO: 5320333 - DNA, 25 bp, Homo sapien
tgtcccagcaacctagatatgagaa

SEQ ID NO: 5320334 - DNA, 25 bp, Homo sapien
tgagaacaactctacctgagggagg

SEQ ID NO: 5320335 - DNA, 25 bp, Homo sapien
tatgggacaccacactaggctttgc

SEQ ID NO: 5320336 - DNA, 25 bp, Homo sapien
tttgcagcccgggtgaaaccagatg

SEQ ID NO: 5320337 - DNA, 25 bp, Homo sapien
cataggcaagggatgttagcacacc

SEQ ID NO: 5320338 - DNA, 25 bp, Homo sapien
gcaaactggccaaagagaagcgttg

SEQ ID NO: 5320339 - DNA, 25 bp, Homo sapien
ctatggcaaactggccaaagagaag

SEQ ID NO: 5320340 - DNA, 25 bp, Homo sapien
tactatggcaaactggccaaagaga

SEQ ID NO: 5320341 - DNA, 25 bp, Homo sapien
tggcaaactggccaaagagaagcgt

SEQ ID NO: 5320342 - DNA, 25 bp, Homo sapien
cggcattactctccctccattcttg

SEQ ID NO: 5320343 - DNA, 25 bp, Homo sapien
gggctgtgcagccaactgcgtttcc

SEQ ID NO: 5320344 - DNA, 25 bp, Homo sapien
ccaactgcgtttccaggcacactga

SEQ ID NO: 5320345 - DNA, 25 bp, Homo sapien
tactcatatccaatactgtgcaggg

SEQ ID NO: 5320346 - DNA, 25 bp, Homo sapien
ggtttcaggtacatccccatcatgc

SEQ ID NO: 5320347 - DNA, 25 bp, Homo sapien
actctcactaggtttcaggtacatc

SEQ ID NO: 5320348 - DNA, 25 bp, Homo sapien
tccccagagtcaggatgactctcac

SEQ ID NO: 5320349 - DNA, 25 bp, Homo sapien
tctgcagctgacacggctccaagat

SEQ ID NO: 5320350 - DNA, 25 bp, Homo sapien
agacttggagaacaagccatctgaa

SEQ ID NO: 5320351 - DNA, 25 bp, Homo sapien
cttggagaacaagccatctgaaaat

SEQ ID NO: 5320352 - DNA, 25 bp, Homo sapien
tggagaacaagccatctgaaaatag

SEQ ID NO: 5320353 - DNA, 25 bp, Homo sapien
gagaacaagccatctgaaaatagaa

SEQ ID NO: 5320354 - DNA, 25 bp, Homo sapien
caacacaatgaaagggtaaggcacc

SEQ ID NO: 5320355 - DNA, 25 bp, Homo sapien
ggaaataaacttgcccagcctcaca

SEQ ID NO: 5320356 - DNA, 25 bp, Homo sapien
cagtcaaagccacccaaaggaaagc

SEQ ID NO: 5320357 - DNA, 25 bp, Homo sapien
agtgttgcccagacctaaggatcct

SEQ ID NO: 5320358 - DNA, 25 bp, Homo sapien
agtgctttcaggcagggagaaagtg

SEQ ID NO: 5320359 - DNA, 25 bp, Homo sapien
tggtgggtggcggacagagatgtga

SEQ ID NO: 5320360 - DNA, 25 bp, Homo sapien
tgacacagacatgggggcttccaaa

SEQ ID NO: 5320361 - DNA, 25 bp, Homo sapien
gatcacccaactttccagcttcccc

SEQ ID NO: 5320362 - DNA, 25 bp, Homo sapien
caccaggctgcgctgaacaggaagt

SEQ ID NO: 5320363 - DNA, 25 bp, Homo sapien
caattcgagaaagatccaataaggg

SEQ ID NO: 5320364 - DNA, 25 bp, Homo sapien
taagggaatattctctgggcaccgc

SEQ ID NO: 5320365 - DNA, 25 bp, Homo sapien
ggattaccgagtcaccaccaggctg

SEQ ID NO: 5320366 - DNA, 25 bp, Homo sapien
ggcaagaaaggccactcactatatt

SEQ ID NO: 5320367 - DNA, 25 bp, Homo sapien
caagaaaggccactcactatatttc

SEQ ID NO: 5320368 - DNA, 25 bp, Homo sapien
agtgaggcaagaaaggccactcact

SEQ ID NO: 5320369 - DNA, 25 bp, Homo sapien
tgaggcaagaaaggccactcactat

SEQ ID NO: 5320370 - DNA, 25 bp, Homo sapien
cgataaaagcgtgggtgcaagttcc

SEQ ID NO: 5320371 - DNA, 25 bp, Homo sapien
cattccagccatcaccgataaaagc

SEQ ID NO: 5320372 - DNA, 25 bp, Homo sapien
gctccagttaagaaaagcattccag

SEQ ID NO: 5320373 - DNA, 25 bp, Homo sapien
ggttagcactgccacaaaagcacca

SEQ ID NO: 5320374 - DNA, 25 bp, Homo sapien
cattcaaggtgggtcctgaagccac

SEQ ID NO: 5320375 - DNA, 25 bp, Homo sapien
caaagatcaagaggcagtcgttcac

SEQ ID NO: 5320376 - DNA, 25 bp, Homo sapien
tccacatggtgttgctcgatgggca

SEQ ID NO: 5320377 - DNA, 25 bp, Homo sapien
taaaaatggcacatgggagggcatc

SEQ ID NO: 5320378 - DNA, 25 bp, Homo sapien
tcacaaataaagtcccgtattacca

SEQ ID NO: 5320379 - DNA, 25 bp, Homo sapien
gggtcatgttttggaggatcccttc

SEQ ID NO: 5320380 - DNA, 25 bp, Homo sapien
tgtaaagccaccttgcatgtcagcc

SEQ ID NO: 5320381 - DNA, 25 bp, Homo sapien
cttgcagtcctttgccctgttcagg

SEQ ID NO: 5320382 - DNA, 25 bp, Homo sapien
cccttccagtgaggttcaagactga

SEQ ID NO: 5320383 - DNA, 25 bp, Homo sapien
gttctcctggacggttctgcacaga

SEQ ID NO: 5320384 - DNA, 25 bp, Homo sapien
cctggacggttctgcacagaattca

SEQ ID NO: 5320385 - DNA, 25 bp, Homo sapien
ctggacggttctgcacagaattcat

SEQ ID NO: 5320386 - DNA, 25 bp, Homo sapien
tagaaatcatacgagcacacaggag

SEQ ID NO: 5320387 - DNA, 25 bp, Homo sapien
ggtgtaccacacaagactccagtaa

SEQ ID NO: 5320388 - DNA, 25 bp, Homo sapien
gagactccggaccacaggaactagt

SEQ ID NO: 5320389 - DNA, 25 bp, Homo sapien
cattgtgacacagctgaccgcatta

SEQ ID NO: 5320390 - DNA, 25 bp, Homo sapien
ggaaggtcttcatactacaggcaga

SEQ ID NO: 5320391 - DNA, 25 bp, Homo sapien
gattgcaaagatcgcatgtcccaga

SEQ ID NO: 5320392 - DNA, 25 bp, Homo sapien
gacaacctggatgtgaccgacaact

SEQ ID NO: 5320393 - DNA, 25 bp, Homo sapien
ggtgagccccattcagcaactagat

SEQ ID NO: 5320394 - DNA, 25 bp, Homo sapien
caagtgagcagagctcccatccgat

SEQ ID NO: 5320395 - DNA, 25 bp, Homo sapien
gcttctcaactaccaaatgattctg

SEQ ID NO: 5320396 - DNA, 25 bp, Homo sapien
gggcctccgcatgaagtaggcgctt

SEQ ID NO: 5320397 - DNA, 25 bp, Homo sapien
ccatccgatactcgccagtgctgag

SEQ ID NO: 5320398 - DNA, 25 bp, Homo sapien
tattaatagcgtcagggcagcctgt

SEQ ID NO: 5320399 - DNA, 25 bp, Homo sapien
gatcatatggagctgttgactgcag

SEQ ID NO: 5320400 - DNA, 25 bp, Homo sapien
gaaaacctcctcgaagcagattatg

SEQ ID NO: 5320401 - DNA, 25 bp, Homo sapien
taatccatctgcaacgaacctcagg

SEQ ID NO: 5320402 - DNA, 25 bp, Homo sapien
caacagctccgtgctccttcaatat

SEQ ID NO: 5320403 - DNA, 25 bp, Homo sapien
cccaacagctccgtgctccttcaat

SEQ ID NO: 5320404 - DNA, 25 bp, Homo sapien
aacagctccgtgctccttcaatatg

SEQ ID NO: 5320405 - DNA, 25 bp, Homo sapien
cagctccgtgctccttcaatatgcc

SEQ ID NO: 5320406 - DNA, 25 bp, Homo sapien
catggactctatgaggtaagggacc

SEQ ID NO: 5320407 - DNA, 25 bp, Homo sapien
gggagctgccaccagaaacataatg

SEQ ID NO: 5320408 - DNA, 25 bp, Homo sapien
caacagcaattctggaggtgcagcc

SEQ ID NO: 5320409 - DNA, 25 bp, Homo sapien
tcgtaaggcaacacacgtctatggg

SEQ ID NO: 5320410 - DNA, 25 bp, Homo sapien
cagtttgccacagtgagatggattc

SEQ ID NO: 5320411 - DNA, 25 bp, Homo sapien
caaagccacatgattttgaaggagc

SEQ ID NO: 5320412 - DNA, 25 bp, Homo sapien
agctaatgagattgtcccaccacca

SEQ ID NO: 5320413 - DNA, 25 bp, Homo sapien
cagaaccttggtatgtgaatggcga

SEQ ID NO: 5320414 - DNA, 25 bp, Homo sapien
tccatgctcacgtttttaactctaa

SEQ ID NO: 5320415 - DNA, 25 bp, Homo sapien
tcctggatagactgaataataaggc

SEQ ID NO: 5320416 - DNA, 25 bp, Homo sapien
ggaagttaaataaaccgacatggca

SEQ ID NO: 5320417 - DNA, 25 bp, Homo sapien
tagcagagtataaagcacagctcct

SEQ ID NO: 5320418 - DNA, 25 bp, Homo sapien
ttatgcatgcagttggccggagacc

SEQ ID NO: 5320419 - DNA, 25 bp, Homo sapien
cacaaataaaaagcccctggatctc

SEQ ID NO: 5320420 - DNA, 25 bp, Homo sapien
tcacggtagggcagtgctaggtccc

SEQ ID NO: 5320421 - DNA, 25 bp, Homo sapien
agagggcagaatcgctcgacacaca

SEQ ID NO: 5320422 - DNA, 25 bp, Homo sapien
caccagggcactcgtgtaccttgag

SEQ ID NO: 5320423 - DNA, 25 bp, Homo sapien
gcacaggttattcaacagcaaaggc

SEQ ID NO: 5320424 - DNA, 25 bp, Homo sapien
gatgaacatcaataatacagcacag

SEQ ID NO: 5320425 - DNA, 25 bp, Homo sapien
gattctgcttgttaaccagtgataa

SEQ ID NO: 5320426 - DNA, 25 bp, Homo sapien
tgtagttctgtagccttccctcctc

SEQ ID NO: 5320427 - DNA, 25 bp, Homo sapien
gggaggacacattgtagctcagagc

SEQ ID NO: 5320428 - DNA, 25 bp, Homo sapien
gcagctgaatgagaaaacttacttg

SEQ ID NO: 5320429 - DNA, 25 bp, Homo sapien
tctaaagaagaaacctaaagcattg

SEQ ID NO: 5320430 - DNA, 25 bp, Homo sapien
ccactgctagacccaaaagctctct

SEQ ID NO: 5320431 - DNA, 25 bp, Homo sapien
tccactgctagacccaaaagctctc

SEQ ID NO: 5320432 - DNA, 25 bp, Homo sapien
gtgtgatggagagaaactcacgaga

SEQ ID NO: 5320433 - DNA, 25 bp, Homo sapien
ggagagaaactcacgagatttaaga

SEQ ID NO: 5320434 - DNA, 25 bp, Homo sapien
gaaactcacgagatttaagatttaa

SEQ ID NO: 5320435 - DNA, 25 bp, Homo sapien
actggaaactgaaaggatcggggca

SEQ ID NO: 5320436 - DNA, 25 bp, Homo sapien
gatgcttagcaaaaagcttccttgt

SEQ ID NO: 5320437 - DNA, 25 bp, Homo sapien
tttatgcatcattacatattaagaa

SEQ ID NO: 5320438 - DNA, 25 bp, Homo sapien
tagaaaggcgaggtaggtatacaac

SEQ ID NO: 5320439 - DNA, 25 bp, Homo sapien
tcaaaaagcaaatagaaaggcgagg

SEQ ID NO: 5320440 - DNA, 25 bp, Homo sapien
tagctctggtgcatacgtcaatcgt

SEQ ID NO: 5320441 - DNA, 25 bp, Homo sapien
tgcactgcgcgttgccttagaggag

SEQ ID NO: 5320442 - DNA, 25 bp, Homo sapien
aagggtgtgcaaggcgccttctcgc

SEQ ID NO: 5320443 - DNA, 25 bp, Homo sapien
tcattgtgagtgaccaaaggtcccc

SEQ ID NO: 5320444 - DNA, 25 bp, Homo sapien
tctttaaaacctcaagcaatgtgga

SEQ ID NO: 5320445 - DNA, 25 bp, Homo sapien
taatggaattccagttgaaagttgt

SEQ ID NO: 5320446 - DNA, 25 bp, Homo sapien
cagctgttgattctgttaaaggaac

SEQ ID NO: 5320447 - DNA, 25 bp, Homo sapien
acctcaagcaatgtggactcaaaaa

SEQ ID NO: 5320448 - DNA, 25 bp, Homo sapien
tttacatgcgcccatctgagcggca

SEQ ID NO: 5320449 - DNA, 25 bp, Homo sapien
cctgctgggatcagaagtgacctca

SEQ ID NO: 5320450 - DNA, 25 bp, Homo sapien
tcctccaaggtgcagtaactgtgcg

SEQ ID NO: 5320451 - DNA, 25 bp, Homo sapien
gaagctcacctattccctgctggga

SEQ ID NO: 5320452 - DNA, 25 bp, Homo sapien
tagtctttggatagtggcctcacaa

SEQ ID NO: 5320453 - DNA, 25 bp, Homo sapien
tacagcttgtatataggactcccag

SEQ ID NO: 5320454 - DNA, 25 bp, Homo sapien
caattgtaggacacttctgcggctc

SEQ ID NO: 5320455 - DNA, 25 bp, Homo sapien
tagtaagtttagcagccatgcgggc

SEQ ID NO: 5320456 - DNA, 25 bp, Homo sapien
aaaagctaactttatgacagcccaa

SEQ ID NO: 5320457 - DNA, 25 bp, Homo sapien
taaagattcctatgtgcaataagcc

SEQ ID NO: 5320458 - DNA, 25 bp, Homo sapien
taccagctatactgtctaggcaaat

SEQ ID NO: 5320459 - DNA, 25 bp, Homo sapien
tcaacaggagcagactttactacat

SEQ ID NO: 5320460 - DNA, 25 bp, Homo sapien
cacatattgatgaactgggcccaca

SEQ ID NO: 5320461 - DNA, 25 bp, Homo sapien
tacagctcatatgtgtacgtggatg

SEQ ID NO: 5320462 - DNA, 25 bp, Homo sapien
tgggcccacacaacataagctgcta

SEQ ID NO: 5320463 - DNA, 25 bp, Homo sapien
tctgactgcaagtcaaaggctgctg

SEQ ID NO: 5320464 - DNA, 25 bp, Homo sapien
tactcaagatttaaagaactctgcc

SEQ ID NO: 5320465 - DNA, 25 bp, Homo sapien
tacccagcacgcttaaatgactacc

SEQ ID NO: 5320466 - DNA, 25 bp, Homo sapien
gactaccttttatgtggttgccaaa

SEQ ID NO: 5320467 - DNA, 25 bp, Homo sapien
tctgaaagtcccgaattctaagctt

SEQ ID NO: 5320468 - DNA, 25 bp, Homo sapien
ccagagcgtcggaatttatgtgcaa

SEQ ID NO: 5320469 - DNA, 25 bp, Homo sapien
ggctttggatctccgaagacgacaa

SEQ ID NO: 5320470 - DNA, 25 bp, Homo sapien
cagacgtgctttagagaaatgggct

SEQ ID NO: 5320471 - DNA, 25 bp, Homo sapien
caaccagggagttcaagcaaatatc

SEQ ID NO: 5320472 - DNA, 25 bp, Homo sapien
atcttcacctacatgtcacataagg

SEQ ID NO: 5320473 - DNA, 25 bp, Homo sapien
ctaaagggaaagtatctgagtgcta

SEQ ID NO: 5320474 - DNA, 25 bp, Homo sapien
caagaaatacactccacaaatgcag

SEQ ID NO: 5320475 - DNA, 25 bp, Homo sapien
taaatgtggtggattcaagaaatac

SEQ ID NO: 5320476 - DNA, 25 bp, Homo sapien
taagcatgtctgtgcgcttcagcaa

SEQ ID NO: 5320477 - DNA, 25 bp, Homo sapien
ccaatatggatccaaggctagccct

SEQ ID NO: 5320478 - DNA, 25 bp, Homo sapien
ggaagaaagcgatccaccaacaggc

SEQ ID NO: 5320479 - DNA, 25 bp, Homo sapien
tctggcctggccagtcgaaaatggc

SEQ ID NO: 5320480 - DNA, 25 bp, Homo sapien
tacagggctgtcatggacagtcaca

SEQ ID NO: 5320481 - DNA, 25 bp, Homo sapien
cattggctgaactgcaaatgcctat

SEQ ID NO: 5320482 - DNA, 25 bp, Homo sapien
caatggaagctggactaggtgtagt

SEQ ID NO: 5320483 - DNA, 25 bp, Homo sapien
ttggctacagcacctctgaaaatga

SEQ ID NO: 5320484 - DNA, 25 bp, Homo sapien
cacaggtgaggaggtcatgatcccc

SEQ ID NO: 5320485 - DNA, 25 bp, Homo sapien
caacgggccgtggtctggttcatca

SEQ ID NO: 5320486 - DNA, 25 bp, Homo sapien
tggatgccaacctccacgggattgg

SEQ ID NO: 5320487 - DNA, 25 bp, Homo sapien
taaacaatcgtcatcctctggcgtg

SEQ ID NO: 5320488 - DNA, 25 bp, Homo sapien
tgtgctcaagtaggacatctcataa

SEQ ID NO: 5320489 - DNA, 25 bp, Homo sapien
tcataatttctagcctctggtactc

SEQ ID NO: 5320490 - DNA, 25 bp, Homo sapien
gaaataatattgagagagccctgcc

SEQ ID NO: 5320491 - DNA, 25 bp, Homo sapien
tgcctagctgcacctgtgctcaagt

SEQ ID NO: 5320492 - DNA, 25 bp, Homo sapien
tgaaatacgtttaacatcggtctcc

SEQ ID NO: 5320493 - DNA, 25 bp, Homo sapien
tcggtctccttgcaaaacatttggc

SEQ ID NO: 5320494 - DNA, 25 bp, Homo sapien
acatttggctagtggtgttcagaga

SEQ ID NO: 5320495 - DNA, 25 bp, Homo sapien
taattcagaggttgctgattacacc

SEQ ID NO: 5320496 - DNA, 25 bp, Homo sapien
gactctgaggcacaaagcgagcagc

SEQ ID NO: 5320497 - DNA, 25 bp, Homo sapien
ctgaggcacaaagcgagcagcgtgc

SEQ ID NO: 5320498 - DNA, 25 bp, Homo sapien
ccgccgcgcttgctgcgaacacgtg

SEQ ID NO: 5320499 - DNA, 25 bp, Homo sapien
cgtgcagaaagtgaagttgggcgcg

SEQ ID NO: 5320500 - DNA, 25 bp, Homo sapien
tattgttgtgattccgagctccgag

SEQ ID NO: 5320501 - DNA, 25 bp, Homo sapien
cggcggctgcggttattcattatta

SEQ ID NO: 5320502 - DNA, 25 bp, Homo sapien
cattattaatgacgctgcctgcccg

SEQ ID NO: 5320503 - DNA, 25 bp, Homo sapien
aacccggctggttaacctggtgcag

SEQ ID NO: 5320504 - DNA, 25 bp, Homo sapien
gtaacttcacaccgccgcgcgccgc

SEQ ID NO: 5320505 - DNA, 25 bp, Homo sapien
tgtaacttcacaccgccgcgcgccg

SEQ ID NO: 5320506 - DNA, 25 bp, Homo sapien
ctggggtttgccttgcttgcggcga

SEQ ID NO: 5320507 - DNA, 25 bp, Homo sapien
cgagaattcccgtttgcttaagtgc

SEQ ID NO: 5320508 - DNA, 25 bp, Homo sapien
gcgagaattcccgtttgcttaagtg

SEQ ID NO: 5320509 - DNA, 25 bp, Homo sapien
gaattcccgtttgcttaagtgctgg

SEQ ID NO: 5320510 - DNA, 25 bp, Homo sapien
cgacggctcggttcacatcgggaga

SEQ ID NO: 5320511 - DNA, 25 bp, Homo sapien
acggctcggttcacatcgggagagc

SEQ ID NO: 5320512 - DNA, 25 bp, Homo sapien
ggcggacgacggctcggttcacatc

SEQ ID NO: 5320513 - DNA, 25 bp, Homo sapien
gacgacggctcggttcacatcggga

SEQ ID NO: 5320514 - DNA, 25 bp, Homo sapien
gaaggagactccagagaaaatatct

SEQ ID NO: 5320515 - DNA, 25 bp, Homo sapien
gagactccagagaaaatatcttcat

SEQ ID NO: 5320516 - DNA, 25 bp, Homo sapien
gactccagagaaaatatcttcatca

SEQ ID NO: 5320517 - DNA, 25 bp, Homo sapien
aagaaggagactccagagaaaatat

SEQ ID NO: 5320518 - DNA, 25 bp, Homo sapien
taatacaaagatggcgcagggaaga

SEQ ID NO: 5320519 - DNA, 25 bp, Homo sapien
aattgtgggagagccgtcatggctt

SEQ ID NO: 5320520 - DNA, 25 bp, Homo sapien
cccctgagctgcaagttcaagtgcg

SEQ ID NO: 5320521 - DNA, 25 bp, Homo sapien
gtgcggacgtgacgtccctgcgaac

SEQ ID NO: 5320522 - DNA, 25 bp, Homo sapien
aatgaaaaccagtcccgcggcggag

SEQ ID NO: 5320523 - DNA, 25 bp, Homo sapien
ggcggagagattattactgttggca

SEQ ID NO: 5320524 - DNA, 25 bp, Homo sapien
tcttaggatatgactgtggcagccc

SEQ ID NO: 5320525 - DNA, 25 bp, Homo sapien
gcattgagaggcacaaatgaaaacc

SEQ ID NO: 5320526 - DNA, 25 bp, Homo sapien
cccagacttcccggcataatttcct

SEQ ID NO: 5320527 - DNA, 25 bp, Homo sapien
cagacttcccggcataatttccttc

SEQ ID NO: 5320528 - DNA, 25 bp, Homo sapien
cttgagagaaggtccccagacttcc

SEQ ID NO: 5320529 - DNA, 25 bp, Homo sapien
gacttcccggcataatttccttctc

SEQ ID NO: 5320530 - DNA, 25 bp, Homo sapien
ttggagctcaaccacaatgaagatc

SEQ ID NO: 5320531 - DNA, 25 bp, Homo sapien
ggtgagctcctactctattttggga

SEQ ID NO: 5320532 - DNA, 25 bp, Homo sapien
gacacagctgtggatctgatatccc

SEQ ID NO: 5320533 - DNA, 25 bp, Homo sapien
cttttcgtaaagaaccaggtctctg

SEQ ID NO: 5320534 - DNA, 25 bp, Homo sapien
gggcccacttcggtcttgaccaagc

SEQ ID NO: 5320535 - DNA, 25 bp, Homo sapien
cttctcaaacaaggggcccacttcg

SEQ ID NO: 5320536 - DNA, 25 bp, Homo sapien
ttgctgccctgtaatttgattcttc

SEQ ID NO: 5320537 - DNA, 25 bp, Homo sapien
tgccctgtaatttgattcttcccct

SEQ ID NO: 5320538 - DNA, 25 bp, Homo sapien
cagagtttcatggggaatagccaac

SEQ ID NO: 5320539 - DNA, 25 bp, Homo sapien
tcagagtttcatggggaatagccaa

SEQ ID NO: 5320540 - DNA, 25 bp, Homo sapien
ttccaagacctgccttgtacttcct

SEQ ID NO: 5320541 - DNA, 25 bp, Homo sapien
tcatggagaaatgcttgcaaagggt

SEQ ID NO: 5320542 - DNA, 25 bp, Homo sapien
gaaatgcttgcaaagggtcaattcc

SEQ ID NO: 5320543 - DNA, 25 bp, Homo sapien
cgtgtcatggagaaatgcttgcaaa

SEQ ID NO: 5320544 - DNA, 25 bp, Homo sapien
gcaaagggtcaattccacccagcat

SEQ ID NO: 5320545 - DNA, 25 bp, Homo sapien
ggttccggtggagatatgaatcacc

SEQ ID NO: 5320546 - DNA, 25 bp, Homo sapien
tccggtggagatatgaatcaccatc

SEQ ID NO: 5320547 - DNA, 25 bp, Homo sapien
ccggtggagatatgaatcaccatca

SEQ ID NO: 5320548 - DNA, 25 bp, Homo sapien
gttccggtggagatatgaatcacca

SEQ ID NO: 5320549 - DNA, 25 bp, Homo sapien
tcataggatggtccgactgcacacc

SEQ ID NO: 5320550 - DNA, 25 bp, Homo sapien
ttatgggatctcataggatggtccg

SEQ ID NO: 5320551 - DNA, 25 bp, Homo sapien
ttggataggtctggagtgcaattac

SEQ ID NO: 5320552 - DNA, 25 bp, Homo sapien
caattacttgagtaaagagaagggt

SEQ ID NO: 5320553 - DNA, 25 bp, Homo sapien
aagaccacaggtacagtttgctaac

SEQ ID NO: 5320554 - DNA, 25 bp, Homo sapien
cagtttgctaacctccactagataa

SEQ ID NO: 5320555 - DNA, 25 bp, Homo sapien
catacagaggtcatgagaaaaagac

SEQ ID NO: 5320556 - DNA, 25 bp, Homo sapien
atttgacaatgcatcatgctccaag

SEQ ID NO: 5320557 - DNA, 25 bp, Homo sapien
gtacacaagaagatccccatcgcct

SEQ ID NO: 5320558 - DNA, 25 bp, Homo sapien
cacggcagaattgttcctggataaa

SEQ ID NO: 5320559 - DNA, 25 bp, Homo sapien
tctgcatgccagagacactcaaaag

SEQ ID NO: 5320560 - DNA, 25 bp, Homo sapien
gaatccttctcagtagtctcgtttc

SEQ ID NO: 5320561 - DNA, 25 bp, Homo sapien
ctcccacagtaatggcttcatggtc

SEQ ID NO: 5320562 - DNA, 25 bp, Homo sapien
tcccacagtaatggcttcatggtcc

SEQ ID NO: 5320563 - DNA, 25 bp, Homo sapien
tctcccacagtaatggcttcatggt

SEQ ID NO: 5320564 - DNA, 25 bp, Homo sapien
aaggtacccgccagttgctctttcg

SEQ ID NO: 5320565 - DNA, 25 bp, Homo sapien
tctaaatcttcttcggagaccccaa

SEQ ID NO: 5320566 - DNA, 25 bp, Homo sapien
cgccagttgctctttcgttcgagag

SEQ ID NO: 5320567 - DNA, 25 bp, Homo sapien
tttcgttcgagagccaaaatgagta

SEQ ID NO: 5320568 - DNA, 25 bp, Homo sapien
ggacaaccatctggcgctgcaagta

SEQ ID NO: 5320569 - DNA, 25 bp, Homo sapien
catttctgtaatgccgcaatcagta

SEQ ID NO: 5320570 - DNA, 25 bp, Homo sapien
tgcaagtaccaatcgccctgaagag

SEQ ID NO: 5320571 - DNA, 25 bp, Homo sapien
tgcagtgaaccctgaggacaaccat

SEQ ID NO: 5320572 - DNA, 25 bp, Homo sapien
tggttccaccaagaactttccctga

SEQ ID NO: 5320573 - DNA, 25 bp, Homo sapien
cccagtgcttggtggtgtaagttcc

SEQ ID NO: 5320574 - DNA, 25 bp, Homo sapien
ttccctgatactgaaagttttcagt

SEQ ID NO: 5320575 - DNA, 25 bp, Homo sapien
ccatcagctttgtgaatatgggttt

SEQ ID NO: 5320576 - DNA, 25 bp, Homo sapien
tccctcagatacttctcatatgtct

SEQ ID NO: 5320577 - DNA, 25 bp, Homo sapien
tgctctcaggtcttggctcattatc

SEQ ID NO: 5320578 - DNA, 25 bp, Homo sapien
tcagctttgaattgtctttctacca

SEQ ID NO: 5320579 - DNA, 25 bp, Homo sapien
tagggccggctataggtctgtttct

SEQ ID NO: 5320580 - DNA, 25 bp, Homo sapien
taccactcttttgtctagcctctga

SEQ ID NO: 5320581 - DNA, 25 bp, Homo sapien
aggtcacagccccaggtctttcctt

SEQ ID NO: 5320582 - DNA, 25 bp, Homo sapien
tgtctagcctctgacaggcctgagg

SEQ ID NO: 5320583 - DNA, 25 bp, Homo sapien
ttctcaatgtgatgcccgctaggca

SEQ ID NO: 5320584 - DNA, 25 bp, Homo sapien
ggccaagagtgggagagacatgcac

SEQ ID NO: 5320585 - DNA, 25 bp, Homo sapien
gccaagagtgggagagacatgcaca

SEQ ID NO: 5320586 - DNA, 25 bp, Homo sapien
agcagggccaagagtgggagagaca

SEQ ID NO: 5320587 - DNA, 25 bp, Homo sapien
agggccaagagtgggagagacatgc

SEQ ID NO: 5320588 - DNA, 25 bp, Homo sapien
gacagagtgacattgcaacatccca

SEQ ID NO: 5320589 - DNA, 25 bp, Homo sapien
tgtgtggattcttgccatgggctgc

SEQ ID NO: 5320590 - DNA, 25 bp, Homo sapien
acctttatccagtggtatgctcggg

SEQ ID NO: 5320591 - DNA, 25 bp, Homo sapien
cagggccccacagatctcttgtgag

SEQ ID NO: 5320592 - DNA, 25 bp, Homo sapien
cttttccttggcaatggccacggtg

SEQ ID NO: 5320593 - DNA, 25 bp, Homo sapien
ttttccttggcaatggccacggtgg

SEQ ID NO: 5320594 - DNA, 25 bp, Homo sapien
ccttggcaatggccacggtggtcat

SEQ ID NO: 5320595 - DNA, 25 bp, Homo sapien
ttccttggcaatggccacggtggtc

SEQ ID NO: 5320596 - DNA, 25 bp, Homo sapien
tgttgtggtcacacggatgcccagg

SEQ ID NO: 5320597 - DNA, 25 bp, Homo sapien
cagggcccgcaatggacagcgagta

SEQ ID NO: 5320598 - DNA, 25 bp, Homo sapien
agtacctgggcgctactgctggcct

SEQ ID NO: 5320599 - DNA, 25 bp, Homo sapien
tggaatattatcatagaactactgg

SEQ ID NO: 5320600 - DNA, 25 bp, Homo sapien
ttggcagtggaggcgtaggcctggg

SEQ ID NO: 5320601 - DNA, 25 bp, Homo sapien
agtcaggtcgccaaccatcttcctg

SEQ ID NO: 5320602 - DNA, 25 bp, Homo sapien
cgtaggcctgggccccagtcaggtc

SEQ ID NO: 5320603 - DNA, 25 bp, Homo sapien
cagtcaggtcgccaaccatcttcct

SEQ ID NO: 5320604 - DNA, 25 bp, Homo sapien
ctagacttcacggagtaggtgaatg

SEQ ID NO: 5320605 - DNA, 25 bp, Homo sapien
caattcatgaagagagtgttgaaca

SEQ ID NO: 5320606 - DNA, 25 bp, Homo sapien
atggcatcaattcatgaagagagtg

SEQ ID NO: 5320607 - DNA, 25 bp, Homo sapien
aagcccagatggcatcaattcatga

SEQ ID NO: 5320608 - DNA, 25 bp, Homo sapien
gaccagacgacatggctgggcacag

SEQ ID NO: 5320609 - DNA, 25 bp, Homo sapien
cagcgtggttcatcgtgtccaggga

SEQ ID NO: 5320610 - DNA, 25 bp, Homo sapien
cagggaagatcagttgtggtcggga

SEQ ID NO: 5320611 - DNA, 25 bp, Homo sapien
atcagttgtggtcgggatggtggga

SEQ ID NO: 5320612 - DNA, 25 bp, Homo sapien
acggtttggacagcgtggttcatcg

SEQ ID NO: 5320613 - DNA, 25 bp, Homo sapien
tgcatattccaatgcagtgactggt

SEQ ID NO: 5320614 - DNA, 25 bp, Homo sapien
taacgaaatgggagattgacaagca

SEQ ID NO: 5320615 - DNA, 25 bp, Homo sapien
tctttgagaatagccgaaatcaaga

SEQ ID NO: 5320616 - DNA, 25 bp, Homo sapien
cctgggttaagaatctggtcacggt

SEQ ID NO: 5320617 - DNA, 25 bp, Homo sapien
agagtgcagccaggaacccataaaa

SEQ ID NO: 5320618 - DNA, 25 bp, Homo sapien
gagtgcagccaggaacccataaaaa

SEQ ID NO: 5320619 - DNA, 25 bp, Homo sapien
ttcttcatcgtgtgcgcgcggacga

SEQ ID NO: 5320620 - DNA, 25 bp, Homo sapien
actcgagccgactgcagtgtttaaa

SEQ ID NO: 5320621 - DNA, 25 bp, Homo sapien
tgaataacagaagatcctcctagca

SEQ ID NO: 5320622 - DNA, 25 bp, Homo sapien
ctggactttctggtgactagcccca

SEQ ID NO: 5320623 - DNA, 25 bp, Homo sapien
cgaggacgccctcagaaaaggatga

SEQ ID NO: 5320624 - DNA, 25 bp, Homo sapien
gcaagaacaggactccagagcgata

SEQ ID NO: 5320625 - DNA, 25 bp, Homo sapien
gagaaattgtcggtcactcgcctgc

SEQ ID NO: 5320626 - DNA, 25 bp, Homo sapien
tactagcgaccggaggaaagtgaac

SEQ ID NO: 5320627 - DNA, 25 bp, Homo sapien
gtggcataatctcagctcactgcaa

SEQ ID NO: 5320628 - DNA, 25 bp, Homo sapien
caggcctgagccactttacccggcc

SEQ ID NO: 5320629 - DNA, 25 bp, Homo sapien
tgtagtggcataatctcagctcact

SEQ ID NO: 5320630 - DNA, 25 bp, Homo sapien
tagtggcataatctcagctcactgc

SEQ ID NO: 5320631 - DNA, 25 bp, Homo sapien
ggtttacttgagtgtagctttcata

SEQ ID NO: 5320632 - DNA, 25 bp, Homo sapien
gattcataggtaatatgctgtttgg

SEQ ID NO: 5320633 - DNA, 25 bp, Homo sapien
cacagaaatctactaacttgtcatt

SEQ ID NO: 5320634 - DNA, 25 bp, Homo sapien
gtcatttactacaatggcgttttaa

SEQ ID NO: 5320635 - DNA, 25 bp, Homo sapien
tactttagcattgaagccactttga

SEQ ID NO: 5320636 - DNA, 25 bp, Homo sapien
tcccatggaggcctttgaaatgcat

SEQ ID NO: 5320637 - DNA, 25 bp, Homo sapien
tagttaccagggaagattagtccag

SEQ ID NO: 5320638 - DNA, 25 bp, Homo sapien
gattacataagagttgggcaccata

SEQ ID NO: 5320639 - DNA, 25 bp, Homo sapien
gacagactcatctttatggatattt

SEQ ID NO: 5320640 - DNA, 25 bp, Homo sapien
tgttaagcgggaatctcggttccta

SEQ ID NO: 5320641 - DNA, 25 bp, Homo sapien
tctttatggatatttgttaagcggg

SEQ ID NO: 5320642 - DNA, 25 bp, Homo sapien
gatatttgttaagcgggaatctcgg

SEQ ID NO: 5320643 - DNA, 25 bp, Homo sapien
caatgagctgtattagtaataaggc

SEQ ID NO: 5320644 - DNA, 25 bp, Homo sapien
gaagagcccgtgcttggagcacact

SEQ ID NO: 5320645 - DNA, 25 bp, Homo sapien
ggagcacactcaaagccgctgtctt

SEQ ID NO: 5320646 - DNA, 25 bp, Homo sapien
gtggccttgactgtgaagagcccgt

SEQ ID NO: 5320647 - DNA, 25 bp, Homo sapien
ctcaggaaggcgatggggttttctg

SEQ ID NO: 5320648 - DNA, 25 bp, Homo sapien
cttgctgttggccgtacattctcag

SEQ ID NO: 5320649 - DNA, 25 bp, Homo sapien
agccttgctgttggccgtacattct

SEQ ID NO: 5320650 - DNA, 25 bp, Homo sapien
gctgttggccgtacattctcaggaa

SEQ ID NO: 5320651 - DNA, 25 bp, Homo sapien
gggtccacagttaccgccacggctc

SEQ ID NO: 5320652 - DNA, 25 bp, Homo sapien
agctccatttcttggccaagctcca

SEQ ID NO: 5320653 - DNA, 25 bp, Homo sapien
ttcttggccaagctccatttcagac

SEQ ID NO: 5320654 - DNA, 25 bp, Homo sapien
cagttaccgccacggctctgaagca

SEQ ID NO: 5320655 - DNA, 25 bp, Homo sapien
caaagtcagtgatcatcccctttgg

SEQ ID NO: 5320656 - DNA, 25 bp, Homo sapien
agtgatcatcccctttgggagcctg

SEQ ID NO: 5320657 - DNA, 25 bp, Homo sapien
cccaaagtcagtgatcatccccttt

SEQ ID NO: 5320658 - DNA, 25 bp, Homo sapien
aagtcagtgatcatcccctttggga

SEQ ID NO: 5320659 - DNA, 25 bp, Homo sapien
tttctttccattcgctcacaaggga

SEQ ID NO: 5320660 - DNA, 25 bp, Homo sapien
ctttctttccattcgctcacaaggg

SEQ ID NO: 5320661 - DNA, 25 bp, Homo sapien
tctttccattcgctcacaagggaag

SEQ ID NO: 5320662 - DNA, 25 bp, Homo sapien
tttccattcgctcacaagggaagac

SEQ ID NO: 5320663 - DNA, 25 bp, Homo sapien
tgattccatcagcttcttggtccat

SEQ ID NO: 5320664 - DNA, 25 bp, Homo sapien
atagcacattatagccggcattcct

SEQ ID NO: 5320665 - DNA, 25 bp, Homo sapien
tagcacattatagccggcattcctg

SEQ ID NO: 5320666 - DNA, 25 bp, Homo sapien
gtgcgatgctgctactgatcagctc

SEQ ID NO: 5320667 - DNA, 25 bp, Homo sapien
tgcgatgctgctactgatcagctcg

SEQ ID NO: 5320668 - DNA, 25 bp, Homo sapien
ggtctgaatgtgaggtcatccccat

SEQ ID NO: 5320669 - DNA, 25 bp, Homo sapien
ggagccctgcttcagccatctccct

SEQ ID NO: 5320670 - DNA, 25 bp, Homo sapien
ttgccttggtctgaatgtgaggtca

SEQ ID NO: 5320671 - DNA, 25 bp, Homo sapien
ccttggtctgaatgtgaggtcatcc

SEQ ID NO: 5320672 - DNA, 25 bp, Homo sapien
ggaaggagccgctagagaggagcta

SEQ ID NO: 5320673 - DNA, 25 bp, Homo sapien
tgaggcaggactttgctcgtgaagc

SEQ ID NO: 5320674 - DNA, 25 bp, Homo sapien
ttgacaagttgacagtgaagcaaag

SEQ ID NO: 5320675 - DNA, 25 bp, Homo sapien
caggactttgctcgtgaagcagggt

SEQ ID NO: 5320676 - DNA, 25 bp, Homo sapien
ggaaacacctttagatctagactag

SEQ ID NO: 5320677 - DNA, 25 bp, Homo sapien
tagaggcccgagttctgcttcacag

SEQ ID NO: 5320678 - DNA, 25 bp, Homo sapien
tagactagcagacgctagaggcccg

SEQ ID NO: 5320679 - DNA, 25 bp, Homo sapien
tcggtgcactgttgtggtctgcaga

SEQ ID NO: 5320680 - DNA, 25 bp, Homo sapien
ccatttaaggaagactagccaggcc

SEQ ID NO: 5320681 - DNA, 25 bp, Homo sapien
tagagaaatcggtgctgagacatcc

SEQ ID NO: 5320682 - DNA, 25 bp, Homo sapien
catccttcgcaaaaagagctcccgg

SEQ ID NO: 5320683 - DNA, 25 bp, Homo sapien
ggaatgcctgatccatgggaactgg

SEQ ID NO: 5320684 - DNA, 25 bp, Homo sapien
ccccattggcaacaattttgtacac

SEQ ID NO: 5320685 - DNA, 25 bp, Homo sapien
tccccattggcaacaattttgtaca

SEQ ID NO: 5320686 - DNA, 25 bp, Homo sapien
catccccattggcaacaattttgta

SEQ ID NO: 5320687 - DNA, 25 bp, Homo sapien
cacatccccattggcaacaattttg

SEQ ID NO: 5320688 - DNA, 25 bp, Homo sapien
aagcttaaggaacgggcacagggat

SEQ ID NO: 5320689 - DNA, 25 bp, Homo sapien
tagatgatgcgtacgtctaccacca

SEQ ID NO: 5320690 - DNA, 25 bp, Homo sapien
cagggatggagacttaagatacacc

SEQ ID NO: 5320691 - DNA, 25 bp, Homo sapien
tagggagccaaactggaccacatgg

SEQ ID NO: 5320692 - DNA, 25 bp, Homo sapien
ctgggttgtttgcagccagtgtcca

SEQ ID NO: 5320693 - DNA, 25 bp, Homo sapien
tgggttgtttgcagccagtgtccat

SEQ ID NO: 5320694 - DNA, 25 bp, Homo sapien
ccaggttagataattggtccaaaag

SEQ ID NO: 5320695 - DNA, 25 bp, Homo sapien
gaagatgaagtgagctgcagtgaac

SEQ ID NO: 5320696 - DNA, 25 bp, Homo sapien
ggccctttcagagaaggcacaggaa

SEQ ID NO: 5320697 - DNA, 25 bp, Homo sapien
caggcccaggttagataattggtcc

SEQ ID NO: 5320698 - DNA, 25 bp, Homo sapien
cctgggctgaggctgaacggtatga

SEQ ID NO: 5320699 - DNA, 25 bp, Homo sapien
tcttcatggactttaatatccttgg

SEQ ID NO: 5320700 - DNA, 25 bp, Homo sapien
aacggtatgagagtgcaggagatct

SEQ ID NO: 5320701 - DNA, 25 bp, Homo sapien
catggactttaatatccttggtctt

SEQ ID NO: 5320702 - DNA, 25 bp, Homo sapien
agagcagagtgatgcctcttgtcct

SEQ ID NO: 5320703 - DNA, 25 bp, Homo sapien
agggaatttcactggtaggagagca

SEQ ID NO: 5320704 - DNA, 25 bp, Homo sapien
tcagggaatttcactggtaggagag

SEQ ID NO: 5320705 - DNA, 25 bp, Homo sapien
tcactggtaggagagcagagtgatg

SEQ ID NO: 5320706 - DNA, 25 bp, Homo sapien
tgagacaacgaactccaagtgcgga

SEQ ID NO: 5320707 - DNA, 25 bp, Homo sapien
cagtgcactgcctaatgagacaacg

SEQ ID NO: 5320708 - DNA, 25 bp, Homo sapien
tgaagtaacttctctgaaccccgaa

SEQ ID NO: 5320709 - DNA, 25 bp, Homo sapien
gacaaccctggctttaaactgtgcc

SEQ ID NO: 5320710 - DNA, 25 bp, Homo sapien
gctagccgtcacctcccggctcccg

SEQ ID NO: 5320711 - DNA, 25 bp, Homo sapien
ttctcacgctgctagccgtcacctc

SEQ ID NO: 5320712 - DNA, 25 bp, Homo sapien
cttctcacgctgctagccgtcacct

SEQ ID NO: 5320713 - DNA, 25 bp, Homo sapien
acgctgctagccgtcacctcccggc

SEQ ID NO: 5320714 - DNA, 25 bp, Homo sapien
gtgagccgcaaacccagcggagggc

SEQ ID NO: 5320715 - DNA, 25 bp, Homo sapien
gggaaggtgtgagccgcaaacccag

SEQ ID NO: 5320716 - DNA, 25 bp, Homo sapien
aaggtgtgagccgcaaacccagcgg

SEQ ID NO: 5320717 - DNA, 25 bp, Homo sapien
aggtgtgagccgcaaacccagcgga

SEQ ID NO: 5320718 - DNA, 25 bp, Homo sapien
aatcagcggggcgtggtggcgcgcg

SEQ ID NO: 5320719 - DNA, 25 bp, Homo sapien
aatcgcttgaacctgggaggtggag

SEQ ID NO: 5320720 - DNA, 25 bp, Homo sapien
cctgtaatcccagctactcgggaag

SEQ ID NO: 5320721 - DNA, 25 bp, Homo sapien
gctactcgggaagctgaggcaggag

SEQ ID NO: 5320722 - DNA, 25 bp, Homo sapien
tttacaggaatctgtgtacttttcc

SEQ ID NO: 5320723 - DNA, 25 bp, Homo sapien
tccttaatctgttataaagacctta

SEQ ID NO: 5320724 - DNA, 25 bp, Homo sapien
taatctgttataaagaccttagaga

SEQ ID NO: 5320725 - DNA, 25 bp, Homo sapien
agttatttaaattgtaattcagttg

SEQ ID NO: 5320726 - DNA, 25 bp, Homo sapien
cttcttaccaactatttgtagtgtg

SEQ ID NO: 5320727 - DNA, 25 bp, Homo sapien
gaaatggaagtaagtgtgaggcaac

SEQ ID NO: 5320728 - DNA, 25 bp, Homo sapien
ttcttctgtgtcacacaataggaag

SEQ ID NO: 5320729 - DNA, 25 bp, Homo sapien
tggatagctacagtaaatgacttct

SEQ ID NO: 5320730 - DNA, 25 bp, Homo sapien
ggctaaagtgcaatggcgcaatctc

SEQ ID NO: 5320731 - DNA, 25 bp, Homo sapien
ccttgttgcctaggctaaagtgcaa

SEQ ID NO: 5320732 - DNA, 25 bp, Homo sapien
gctaaagtgcaatggcgcaatctcg

SEQ ID NO: 5320733 - DNA, 25 bp, Homo sapien
tgaagaacatgagcataagacagca

SEQ ID NO: 5320734 - DNA, 25 bp, Homo sapien
gcagacaaagtagcctccggttgca

SEQ ID NO: 5320735 - DNA, 25 bp, Homo sapien
caagtgccatgtgaagtttgaacaa

SEQ ID NO: 5320736 - DNA, 25 bp, Homo sapien
agttttgcttccttattcacgccca

SEQ ID NO: 5320737 - DNA, 25 bp, Homo sapien
taaccatgttgtgcagagatgaaag

SEQ ID NO: 5320738 - DNA, 25 bp, Homo sapien
tgcctgtcagtagtttttaaccatg

SEQ ID NO: 5320739 - DNA, 25 bp, Homo sapien
taaaatctacccgaatatgtcctgc

SEQ ID NO: 5320740 - DNA, 25 bp, Homo sapien
tatctgtcatgattcttgcctgtca

SEQ ID NO: 5320741 - DNA, 25 bp, Homo sapien
attagcaaatctggtagaccctacc

SEQ ID NO: 5320742 - DNA, 25 bp, Homo sapien
taaaatgttaagttgggcagaaggc

SEQ ID NO: 5320743 - DNA, 25 bp, Homo sapien
tctccaactcagtaaatggcaatgc

SEQ ID NO: 5320744 - DNA, 25 bp, Homo sapien
gaagaagtttccttggaccattcgc

SEQ ID NO: 5320745 - DNA, 25 bp, Homo sapien
ttcgtgacttttggtaattctggca

SEQ ID NO: 5320746 - DNA, 25 bp, Homo sapien
tgacattgtcaagctcattgcaact

SEQ ID NO: 5320747 - DNA, 25 bp, Homo sapien
gagaatcgtgtacattcaagtccag

SEQ ID NO: 5320748 - DNA, 25 bp, Homo sapien
gcaacttccagattgagtaacactt

SEQ ID NO: 5320749 - DNA, 25 bp, Homo sapien
tgaatttggtaacgtttctcctctg

SEQ ID NO: 5320750 - DNA, 25 bp, Homo sapien
tctgccaggctgtgtttactttatc

SEQ ID NO: 5320751 - DNA, 25 bp, Homo sapien
tagtatctgaggcactttttctgaa

SEQ ID NO: 5320752 - DNA, 25 bp, Homo sapien
gaactctacttgtgcactggatccc

SEQ ID NO: 5320753 - DNA, 25 bp, Homo sapien
gaatgtcctgataaactggctcgct

SEQ ID NO: 5320754 - DNA, 25 bp, Homo sapien
gatcttatcagagcccacaggttca

SEQ ID NO: 5320755 - DNA, 25 bp, Homo sapien
aaagatgagcggagactgcccgcct

SEQ ID NO: 5320756 - DNA, 25 bp, Homo sapien
gatttatttcccatgagtcttgacc

SEQ ID NO: 5320757 - DNA, 25 bp, Homo sapien
aaataacgccgcatatctacaacta

SEQ ID NO: 5320758 - DNA, 25 bp, Homo sapien
agagcccatatcgccaagtcaatcc

SEQ ID NO: 5320759 - DNA, 25 bp, Homo sapien
aaaaagagcccatatcgccaagtca

SEQ ID NO: 5320760 - DNA, 25 bp, Homo sapien
caaaaaagagcccatatcgccaagt

SEQ ID NO: 5320761 - DNA, 25 bp, Homo sapien
tccaggccgcctaatggcatcaaat

SEQ ID NO: 5320762 - DNA, 25 bp, Homo sapien
tttactcaggtaatacccagcctgc

SEQ ID NO: 5320763 - DNA, 25 bp, Homo sapien
tattgaaggatcaccacatgctttt

SEQ ID NO: 5320764 - DNA, 25 bp, Homo sapien
tagttatctaatacacagcagagtg

SEQ ID NO: 5320765 - DNA, 25 bp, Homo sapien
tgcccagctttggagagccttcttt

SEQ ID NO: 5320766 - DNA, 25 bp, Homo sapien
gcccagctttggagagccttctttt

SEQ ID NO: 5320767 - DNA, 25 bp, Homo sapien
cagctttggagagccttcttttggc

SEQ ID NO: 5320768 - DNA, 25 bp, Homo sapien
cccagctttggagagccttcttttg

SEQ ID NO: 5320769 - DNA, 25 bp, Homo sapien
tttggctgtgatgaatgtagatccc

SEQ ID NO: 5320770 - DNA, 25 bp, Homo sapien
cacaaagcttttgggtaaccagcgt

SEQ ID NO: 5320771 - DNA, 25 bp, Homo sapien
tgaccaggtgaaccctttagaagtg

SEQ ID NO: 5320772 - DNA, 25 bp, Homo sapien
gagacttcattggtgatacactcaa

SEQ ID NO: 5320773 - DNA, 25 bp, Homo sapien
cagaccagtgtcatggagctttttc

SEQ ID NO: 5320774 - DNA, 25 bp, Homo sapien
tcacacgtttgtaaaaaatcagctg

SEQ ID NO: 5320775 - DNA, 25 bp, Homo sapien
taggtcactgtcagttgagttttta

SEQ ID NO: 5320776 - DNA, 25 bp, Homo sapien
tttgggtcttagatttaggtcactg

SEQ ID NO: 5320777 - DNA, 25 bp, Homo sapien
ctatctaagataggcaaggctaaga

SEQ ID NO: 5320778 - DNA, 25 bp, Homo sapien
tcagcaacaaatcaaacatagtaca

SEQ ID NO: 5320779 - DNA, 25 bp, Homo sapien
ttcaaatttaaagtatcagcaacaa

SEQ ID NO: 5320780 - DNA, 25 bp, Homo sapien
aaatatgcacagcataactactatc

SEQ ID NO: 5320781 - DNA, 25 bp, Homo sapien
tcgcatgggctccagttgccgtcgt

SEQ ID NO: 5320782 - DNA, 25 bp, Homo sapien
tgatattgcagtccacttcgtcctg

SEQ ID NO: 5320783 - DNA, 25 bp, Homo sapien
cctggcattgatgaaggcgagcaac

SEQ ID NO: 5320784 - DNA, 25 bp, Homo sapien
tggtgcctccgttatgcctatagca

SEQ ID NO: 5320785 - DNA, 25 bp, Homo sapien
agtgatgtcagaaggaacactgccc

SEQ ID NO: 5320786 - DNA, 25 bp, Homo sapien
tgtgtgtgtgccaaagatttacttg

SEQ ID NO: 5320787 - DNA, 25 bp, Homo sapien
tgaattgaggcagcaatagattggt

SEQ ID NO: 5320788 - DNA, 25 bp, Homo sapien
ttggcctcgtttggtgaagggcttc

SEQ ID NO: 5320789 - DNA, 25 bp, Homo sapien
actccttgccatagttcgtaactac

SEQ ID NO: 5320790 - DNA, 25 bp, Homo sapien
cttgccatagttcgtaactactata

SEQ ID NO: 5320791 - DNA, 25 bp, Homo sapien
cctgagactccttgccatagttcgt

SEQ ID NO: 5320792 - DNA, 25 bp, Homo sapien
gccatagttcgtaactactatacaa

SEQ ID NO: 5320793 - DNA, 25 bp, Homo sapien
ctctgtcagttttacagaggcctac

SEQ ID NO: 5320794 - DNA, 25 bp, Homo sapien
tttacacggtttcccctctctgtca

SEQ ID NO: 5320795 - DNA, 25 bp, Homo sapien
cctctctgtcagttttacagaggcc

SEQ ID NO: 5320796 - DNA, 25 bp, Homo sapien
cccctctctgtcagttttacagagg

SEQ ID NO: 5320797 - DNA, 25 bp, Homo sapien
gcagctttgcaaatttcatatgcta

SEQ ID NO: 5320798 - DNA, 25 bp, Homo sapien
cgattcccctagtttctggtcatca

SEQ ID NO: 5320799 - DNA, 25 bp, Homo sapien
gcaaatttcatatgctaggccatca

SEQ ID NO: 5320800 - DNA, 25 bp, Homo sapien
ctttgcaaatttcatatgctaggcc

SEQ ID NO: 5320801 - DNA, 25 bp, Homo sapien
aatgtccattacacctccagcagca

SEQ ID NO: 5320802 - DNA, 25 bp, Homo sapien
tccagcagcactgccttcctcggcc

SEQ ID NO: 5320803 - DNA, 25 bp, Homo sapien
ctgtaaaacagtattaatgtccatt

SEQ ID NO: 5320804 - DNA, 25 bp, Homo sapien
cagcagcactgccttcctcggccat

SEQ ID NO: 5320805 - DNA, 25 bp, Homo sapien
gaagccggatcttgaatgcacccga

SEQ ID NO: 5320806 - DNA, 25 bp, Homo sapien
gagtgaagccggatcttgaatgcac

SEQ ID NO: 5320807 - DNA, 25 bp, Homo sapien
ccggatcttgaatgcacccgagact

SEQ ID NO: 5320808 - DNA, 25 bp, Homo sapien
atcttgaatgcacccgagactccgc

SEQ ID NO: 5320809 - DNA, 25 bp, Homo sapien
taaccataaaagtggagaagcctcg

SEQ ID NO: 5320810 - DNA, 25 bp, Homo sapien
gccactggccaaacgaacaaattac

SEQ ID NO: 5320811 - DNA, 25 bp, Homo sapien
taaaataagccacaagtccacatga

SEQ ID NO: 5320812 - DNA, 25 bp, Homo sapien
gaaagttggatgatctctctacaag

SEQ ID NO: 5320813 - DNA, 25 bp, Homo sapien
cataacttgcaaatgtaaccggttt

SEQ ID NO: 5320814 - DNA, 25 bp, Homo sapien
acttcacataacttgcaaatgtaac

SEQ ID NO: 5320815 - DNA, 25 bp, Homo sapien
ttcacataacttgcaaatgtaaccg

SEQ ID NO: 5320816 - DNA, 25 bp, Homo sapien
cacataacttgcaaatgtaaccggt

SEQ ID NO: 5320817 - DNA, 25 bp, Homo sapien
tccaggtattcagagttgatgtttt

SEQ ID NO: 5320818 - DNA, 25 bp, Homo sapien
ttgacttttccaggtattcagagtt

SEQ ID NO: 5320819 - DNA, 25 bp, Homo sapien
tcttttgacttttccaggtattcag

SEQ ID NO: 5320820 - DNA, 25 bp, Homo sapien
caggtattcagagttgatgtttttc

SEQ ID NO: 5320821 - DNA, 25 bp, Homo sapien
tacaggtccactagattcaaaggta

SEQ ID NO: 5320822 - DNA, 25 bp, Homo sapien
aataccatgcaaaagactgcctcct

SEQ ID NO: 5320823 - DNA, 25 bp, Homo sapien
taagaagtacaaagggctctttctc

SEQ ID NO: 5320824 - DNA, 25 bp, Homo sapien
caaaagggaaactatagtactctca

SEQ ID NO: 5320825 - DNA, 25 bp, Homo sapien
taatagcttgtttgaggcttcctgg

SEQ ID NO: 5320826 - DNA, 25 bp, Homo sapien
gcatgccttggctcctacggtttta

SEQ ID NO: 5320827 - DNA, 25 bp, Homo sapien
caccgttatggtgggtaaacagcca

SEQ ID NO: 5320828 - DNA, 25 bp, Homo sapien
tttatgaaaggctcctaccatggca

SEQ ID NO: 5320829 - DNA, 25 bp, Homo sapien
gagcaggtggccagtcaacatctac

SEQ ID NO: 5320830 - DNA, 25 bp, Homo sapien
ccagagcaggtggccagtcaacatc

SEQ ID NO: 5320831 - DNA, 25 bp, Homo sapien
atccagagcaggtggccagtcaaca

SEQ ID NO: 5320832 - DNA, 25 bp, Homo sapien
gtcatccagagcaggtggccagtca

SEQ ID NO: 5320833 - DNA, 25 bp, Homo sapien
tgccaatgtgcattccacaacaaaa

SEQ ID NO: 5320834 - DNA, 25 bp, Homo sapien
caatgtgcattccacaacaaaatgg

SEQ ID NO: 5320835 - DNA, 25 bp, Homo sapien
tgcattccacaacaaaatggtttac

SEQ ID NO: 5320836 - DNA, 25 bp, Homo sapien
tgtgcattccacaacaaaatggttt

SEQ ID NO: 5320837 - DNA, 25 bp, Homo sapien
ggttctcccgaagtctccatgtaca

SEQ ID NO: 5320838 - DNA, 25 bp, Homo sapien
tcatcagggacccaatgtttggctt

SEQ ID NO: 5320839 - DNA, 25 bp, Homo sapien
caatgtttggcttggttctcccgaa

SEQ ID NO: 5320840 - DNA, 25 bp, Homo sapien
agctccagaatgtctgcagtcacat

SEQ ID NO: 5320841 - DNA, 25 bp, Homo sapien
cacagagagtgatctcaatgatggc

SEQ ID NO: 5320842 - DNA, 25 bp, Homo sapien
aatagggtggaaggaataatgagac

SEQ ID NO: 5320843 - DNA, 25 bp, Homo sapien
tgtaacatgacccagaggcaatagg

SEQ ID NO: 5320844 - DNA, 25 bp, Homo sapien
gccagatggtaggtttccacagagc

SEQ ID NO: 5320845 - DNA, 25 bp, Homo sapien
acttttccaatagagttctggttcg

SEQ ID NO: 5320846 - DNA, 25 bp, Homo sapien
atagagttctggttcgatggcggca

SEQ ID NO: 5320847 - DNA, 25 bp, Homo sapien
tttccaatagagttctggttcgatg

SEQ ID NO: 5320848 - DNA, 25 bp, Homo sapien
caatagagttctggttcgatggcgg

SEQ ID NO: 5320849 - DNA, 25 bp, Homo sapien
gcggaagtggtgctcatccacgtac

SEQ ID NO: 5320850 - DNA, 25 bp, Homo sapien
aggcggaagtggtgctcatccacgt

SEQ ID NO: 5320851 - DNA, 25 bp, Homo sapien
cctgagttttcaagtggaggcggaa

SEQ ID NO: 5320852 - DNA, 25 bp, Homo sapien
gtgccagcctgagttttcaagtgga

SEQ ID NO: 5320853 - DNA, 25 bp, Homo sapien
ccttcggtgaaggacgcgcaaaggt

SEQ ID NO: 5320854 - DNA, 25 bp, Homo sapien
atgacgcgagctcgcacagccaggg

SEQ ID NO: 5320855 - DNA, 25 bp, Homo sapien
cgcgcaaaggtgttttctggtcgat

SEQ ID NO: 5320856 - DNA, 25 bp, Homo sapien
tgtctccatgaagtgaatgacgcga

SEQ ID NO: 5320857 - DNA, 25 bp, Homo sapien
caatgtttgttagcccagcttgcaa

SEQ ID NO: 5320858 - DNA, 25 bp, Homo sapien
tgagtgccggaaggcctgctaagaa

SEQ ID NO: 5320859 - DNA, 25 bp, Homo sapien
gatgtgcataataaaccgggacctt

SEQ ID NO: 5320860 - DNA, 25 bp, Homo sapien
taatttccatggttcttgagtgccg

SEQ ID NO: 5320861 - DNA, 25 bp, Homo sapien
tggaaataccacgagccacatgtct

SEQ ID NO: 5320862 - DNA, 25 bp, Homo sapien
caaagtggtgagtcaatggctcctc

SEQ ID NO: 5320863 - DNA, 25 bp, Homo sapien
gataagctgtctccataagatctga

SEQ ID NO: 5320864 - DNA, 25 bp, Homo sapien
tccactttagagaaacagcaggcct

SEQ ID NO: 5320865 - DNA, 25 bp, Homo sapien
cttctgtatcgctttatttgtccaa

SEQ ID NO: 5320866 - DNA, 25 bp, Homo sapien
tctgtatcgctttatttgtccaaat

SEQ ID NO: 5320867 - DNA, 25 bp, Homo sapien
ttgtccaaattaaggcactgtaggt

SEQ ID NO: 5320868 - DNA, 25 bp, Homo sapien
ggcactgtaggtctttgtcttttct

SEQ ID NO: 5320869 - DNA, 25 bp, Homo sapien
tgacaagctgcaagtcacgtacttg

SEQ ID NO: 5320870 - DNA, 25 bp, Homo sapien
ttgtgacaagctgcaagtcacgtac

SEQ ID NO: 5320871 - DNA, 25 bp, Homo sapien
caagctgcaagtcacgtacttggat

SEQ ID NO: 5320872 - DNA, 25 bp, Homo sapien
agctgcaagtcacgtacttggattt

SEQ ID NO: 5320873 - DNA, 25 bp, Homo sapien
cagaattgcagaaacatgacgattt

SEQ ID NO: 5320874 - DNA, 25 bp, Homo sapien
gaaacatgacgatttccatggcatg

SEQ ID NO: 5320875 - DNA, 25 bp, Homo sapien
aaacaattagcaagtctagctcagt

SEQ ID NO: 5320876 - DNA, 25 bp, Homo sapien
gtctagctcagttacagaattgcag

SEQ ID NO: 5320877 - DNA, 25 bp, Homo sapien
gaggattcaccagctcaattgcaaa

SEQ ID NO: 5320878 - DNA, 25 bp, Homo sapien
agtgaaatgtactctatgaggattc

SEQ ID NO: 5320879 - DNA, 25 bp, Homo sapien
gtgaagtgaaatgtactctatgagg

SEQ ID NO: 5320880 - DNA, 25 bp, Homo sapien
accagctcaattgcaaagggccttc

SEQ ID NO: 5320881 - DNA, 25 bp, Homo sapien
cacaccccgtcatgaaacagaaacg

SEQ ID NO: 5320882 - DNA, 25 bp, Homo sapien
accccgtcatgaaacagaaacgtgt

SEQ ID NO: 5320883 - DNA, 25 bp, Homo sapien
tggcagcacacaccccgtcatgaaa

SEQ ID NO: 5320884 - DNA, 25 bp, Homo sapien
agcacacaccccgtcatgaaacaga

SEQ ID NO: 5320885 - DNA, 25 bp, Homo sapien
caagagggttaggaggtgtgaaaag

SEQ ID NO: 5320886 - DNA, 25 bp, Homo sapien
ggaggtgtgaaaagtgggttgagct

SEQ ID NO: 5320887 - DNA, 25 bp, Homo sapien
taatgcaagagggttaggaggtgtg

SEQ ID NO: 5320888 - DNA, 25 bp, Homo sapien
ttaggaggtgtgaaaagtgggttga

SEQ ID NO: 5320889 - DNA, 25 bp, Homo sapien
ttcctaatgttctcacatctacatc

SEQ ID NO: 5320890 - DNA, 25 bp, Homo sapien
atgttctcacatctacatcttctct

SEQ ID NO: 5320891 - DNA, 25 bp, Homo sapien
atcttctcttccagaggatgaaaaa

SEQ ID NO: 5320892 - DNA, 25 bp, Homo sapien
ctaatgttctcacatctacatcttc

SEQ ID NO: 5320893 - DNA, 25 bp, Homo sapien
tttaaatactgccaacagatgatct

SEQ ID NO: 5320894 - DNA, 25 bp, Homo sapien
gccaacagatgatctgaaattaatt

SEQ ID NO: 5320895 - DNA, 25 bp, Homo sapien
ccatcaattatccaaggagtttgtg

SEQ ID NO: 5320896 - DNA, 25 bp, Homo sapien
tcctttctccatcaattatccaagg

SEQ ID NO: 5320897 - DNA, 25 bp, Homo sapien
aacagcgcatacagcctttggtgag

SEQ ID NO: 5320898 - DNA, 25 bp, Homo sapien
caatttcaagaacagcgcatacagc

SEQ ID NO: 5320899 - DNA, 25 bp, Homo sapien
caccatgagcacattcaatttcaag

SEQ ID NO: 5320900 - DNA, 25 bp, Homo sapien
cagcaccatgagcacattcaatttc

SEQ ID NO: 5320901 - DNA, 25 bp, Homo sapien
ttcctttatcttattcaaggctttc

SEQ ID NO: 5320902 - DNA, 25 bp, Homo sapien
tatcttattcaaggctttcataact

SEQ ID NO: 5320903 - DNA, 25 bp, Homo sapien
tattcaaggctttcataactgccat

SEQ ID NO: 5320904 - DNA, 25 bp, Homo sapien
cctttatcttattcaaggctttcat

SEQ ID NO: 5320905 - DNA, 25 bp, Homo sapien
ttcctagccagaggtgaaggttgaa

SEQ ID NO: 5320906 - DNA, 25 bp, Homo sapien
gtttgtgtgctacaacttcctagcc

SEQ ID NO: 5320907 - DNA, 25 bp, Homo sapien
tattcagctcagacaaaactcactc

SEQ ID NO: 5320908 - DNA, 25 bp, Homo sapien
gggaacaatctagacactacacaaa

SEQ ID NO: 5320909 - DNA, 25 bp, Homo sapien
cttaaaacaatctgggcatatcgca

SEQ ID NO: 5320910 - DNA, 25 bp, Homo sapien
ttaaaacaatctgggcatatcgcag

SEQ ID NO: 5320911 - DNA, 25 bp, Homo sapien
taaaacaatctgggcatatcgcagc

SEQ ID NO: 5320912 - DNA, 25 bp, Homo sapien
aaaacaatctgggcatatcgcagct

SEQ ID NO: 5320913 - DNA, 25 bp, Homo sapien
taaactcaggacatcaggagcagac

SEQ ID NO: 5320914 - DNA, 25 bp, Homo sapien
gagctatatcggtttgcccaggaac

SEQ ID NO: 5320915 - DNA, 25 bp, Homo sapien
caccattgacgttgtttacatggca

SEQ ID NO: 5320916 - DNA, 25 bp, Homo sapien
cccaggaactatgttcaaggacaca

SEQ ID NO: 5320917 - DNA, 25 bp, Homo sapien
aagtggcaatcctcaactgtttctg

SEQ ID NO: 5320918 - DNA, 25 bp, Homo sapien
gaagtggcaatcctcaactgtttct

SEQ ID NO: 5320919 - DNA, 25 bp, Homo sapien
agtggcaatcctcaactgtttctgg

SEQ ID NO: 5320920 - DNA, 25 bp, Homo sapien
aggaagtggcaatcctcaactgttt

SEQ ID NO: 5320921 - DNA, 25 bp, Homo sapien
gtttttcaatcccacgccactgaag

SEQ ID NO: 5320922 - DNA, 25 bp, Homo sapien
caatactcggtttacagaacagagc

SEQ ID NO: 5320923 - DNA, 25 bp, Homo sapien
tcttttcaactctagggactgtcag

SEQ ID NO: 5320924 - DNA, 25 bp, Homo sapien
tcaattagggcacctggtaccttca

SEQ ID NO: 5320925 - DNA, 25 bp, Homo sapien
agttatccatttgtaggcttctttt

SEQ ID NO: 5320926 - DNA, 25 bp, Homo sapien
gaacacccagttcctctgaaaacag

SEQ ID NO: 5320927 - DNA, 25 bp, Homo sapien
tcttcccagcgacagactctgcttt

SEQ ID NO: 5320928 - DNA, 25 bp, Homo sapien
tcttttagctgaactatatcatctc

SEQ ID NO: 5320929 - DNA, 25 bp, Homo sapien
tcagataagtgcttatgagggtgtc

SEQ ID NO: 5320930 - DNA, 25 bp, Homo sapien
aattcagtccccatttcatacttag

SEQ ID NO: 5320931 - DNA, 25 bp, Homo sapien
tatgagggtgtcagttgcaatcact

SEQ ID NO: 5320932 - DNA, 25 bp, Homo sapien
gagggactagtactcattaaagtaa

SEQ ID NO: 5320933 - DNA, 25 bp, Homo sapien
tgttttaccagcaaccatgcagcat

SEQ ID NO: 5320934 - DNA, 25 bp, Homo sapien
gttttaccagcaaccatgcagcatg

SEQ ID NO: 5320935 - DNA, 25 bp, Homo sapien
taggcaatttagtcacacccagaaa

SEQ ID NO: 5320936 - DNA, 25 bp, Homo sapien
tgtaggcaatttagtcacacccaga

SEQ ID NO: 5320937 - DNA, 25 bp, Homo sapien
gtaggcaatttagtcacacccagaa

SEQ ID NO: 5320938 - DNA, 25 bp, Homo sapien
caagaataggatcctatttttctaa

SEQ ID NO: 5320939 - DNA, 25 bp, Homo sapien
taagcaggcaacttgacatagaagg

SEQ ID NO: 5320940 - DNA, 25 bp, Homo sapien
ttctgtactcttcaatatgaccaac

SEQ ID NO: 5320941 - DNA, 25 bp, Homo sapien
cgcccaggctcaactgcttcttatt

SEQ ID NO: 5320942 - DNA, 25 bp, Homo sapien
taggtaaatctgtgaatattgactg

SEQ ID NO: 5320943 - DNA, 25 bp, Homo sapien
cacctggcctgacctatactttaaa

SEQ ID NO: 5320944 - DNA, 25 bp, Homo sapien
gcagaagaatataatcccagatgac

SEQ ID NO: 5320945 - DNA, 25 bp, Homo sapien
accaagcccagataactttcttcat

SEQ ID NO: 5320946 - DNA, 25 bp, Homo sapien
tataaggaagcccctcaaatattta

SEQ ID NO: 5320947 - DNA, 25 bp, Homo sapien
ccctaatgacgtgaaatctctggaa

SEQ ID NO: 5320948 - DNA, 25 bp, Homo sapien
tggaaacaatctatcctgttctgga

SEQ ID NO: 5320949 - DNA, 25 bp, Homo sapien
tagctcttgattctatccttgcagc

SEQ ID NO: 5320950 - DNA, 25 bp, Homo sapien
agatatataaccacattcagaaaat

SEQ ID NO: 5320951 - DNA, 25 bp, Homo sapien
aaactttcactaaagtgacagtcac

SEQ ID NO: 5320952 - DNA, 25 bp, Homo sapien
ctttcactaaagtgacagtcactca

SEQ ID NO: 5320953 - DNA, 25 bp, Homo sapien
cactaaagtgacagtcactcagctt

SEQ ID NO: 5320954 - DNA, 25 bp, Homo sapien
gttttatgcatgcaaatgaccttac

SEQ ID NO: 5320955 - DNA, 25 bp, Homo sapien
agttttatgcatgcaaatgacctta

SEQ ID NO: 5320956 - DNA, 25 bp, Homo sapien
ctctcttacagatagttgtggtggg

SEQ ID NO: 5320957 - DNA, 25 bp, Homo sapien
tctcttacagatagttgtggtggga

SEQ ID NO: 5320958 - DNA, 25 bp, Homo sapien
ctttttaatgaaatctttctcacag

SEQ ID NO: 5320959 - DNA, 25 bp, Homo sapien
tcttgaagaattcctaggcatacat

SEQ ID NO: 5320960 - DNA, 25 bp, Homo sapien
gaattcctaggcatacattacatac

SEQ ID NO: 5320961 - DNA, 25 bp, Homo sapien
gaagaattcctaggcatacattaca

SEQ ID NO: 5320962 - DNA, 25 bp, Homo sapien
gaagcagtgcttccaacatgactaa

SEQ ID NO: 5320963 - DNA, 25 bp, Homo sapien
acatgactaacagagatccttccct

SEQ ID NO: 5320964 - DNA, 25 bp, Homo sapien
tgcagtcgaattttcttgggaggtg

SEQ ID NO: 5320965 - DNA, 25 bp, Homo sapien
gattatcaatactatcttccagttc

SEQ ID NO: 5320966 - DNA, 25 bp, Homo sapien
aaaagtaatgacccactgacaatgt

SEQ ID NO: 5320967 - DNA, 25 bp, Homo sapien
tcatagcacaagtaccatttctggt

SEQ ID NO: 5320968 - DNA, 25 bp, Homo sapien
aactgaagctggaaagtggtggaac

SEQ ID NO: 5320969 - DNA, 25 bp, Homo sapien
tattgtcccttaaagtcctgtgagg

SEQ ID NO: 5320970 - DNA, 25 bp, Homo sapien
taagcagggttacacaaaaccagtc

SEQ ID NO: 5320971 - DNA, 25 bp, Homo sapien
tattgagcaacaactgggccacatg

SEQ ID NO: 5320972 - DNA, 25 bp, Homo sapien
tgtatggaagtttgtaaggtgcatg

SEQ ID NO: 5320973 - DNA, 25 bp, Homo sapien
aagtttgtaaggtgcatgaaaatcc

SEQ ID NO: 5320974 - DNA, 25 bp, Homo sapien
catcttggacaagtaccagtattga

SEQ ID NO: 5320975 - DNA, 25 bp, Homo sapien
gacgccggagcctgagatttaaccc

SEQ ID NO: 5320976 - DNA, 25 bp, Homo sapien
ccccagacgccggagcctgagattt

SEQ ID NO: 5320977 - DNA, 25 bp, Homo sapien
cgccggagcctgagatttaacccct

SEQ ID NO: 5320978 - DNA, 25 bp, Homo sapien
ccagacgccggagcctgagatttaa

SEQ ID NO: 5320979 - DNA, 25 bp, Homo sapien
gcacctattgcgtctagcaattctg

SEQ ID NO: 5320980 - DNA, 25 bp, Homo sapien
gcccgctctcgctaggactaagtga

SEQ ID NO: 5320981 - DNA, 25 bp, Homo sapien
gagtgcgtgcggctttactcccagc

SEQ ID NO: 5320982 - DNA, 25 bp, Homo sapien
gaagactaaagacaacgcacctatt

SEQ ID NO: 5320983 - DNA, 25 bp, Homo sapien
tccaggtgctggtctacgcgggcct

SEQ ID NO: 5320984 - DNA, 25 bp, Homo sapien
gacttggcaggaggcggttgtagcg

SEQ ID NO: 5320985 - DNA, 25 bp, Homo sapien
caggaggcggttgtagcggttgtta

SEQ ID NO: 5320986 - DNA, 25 bp, Homo sapien
ttcaggctgtgagtttagtgggccc

SEQ ID NO: 5320987 - DNA, 25 bp, Homo sapien
ctcacagctgtttctgacccggcag

SEQ ID NO: 5320988 - DNA, 25 bp, Homo sapien
ttctgacccggcagctctaatcagc

SEQ ID NO: 5320989 - DNA, 25 bp, Homo sapien
tgtctcacagctgtttctgacccgg

SEQ ID NO: 5320990 - DNA, 25 bp, Homo sapien
ctgacccggcagctctaatcagcaa

SEQ ID NO: 5320991 - DNA, 25 bp, Homo sapien
cacggcatcgacagggagcaaagtc

SEQ ID NO: 5320992 - DNA, 25 bp, Homo sapien
tttcactttgacagaatggcttctc

SEQ ID NO: 5320993 - DNA, 25 bp, Homo sapien
ggtgttaacctctcgagaagttgct

SEQ ID NO: 5320994 - DNA, 25 bp, Homo sapien
tagcagttgagagcggcatttgtcc

SEQ ID NO: 5320995 - DNA, 25 bp, Homo sapien
tttggtagtgctggacatcttaatt

SEQ ID NO: 5320996 - DNA, 25 bp, Homo sapien
agtgtttcgtggcctcgtgtggctt

SEQ ID NO: 5320997 - DNA, 25 bp, Homo sapien
gtagtgctggacatcttaattcaga

SEQ ID NO: 5320998 - DNA, 25 bp, Homo sapien
aatgtcaaatcacctactattgtag

SEQ ID NO: 5320999 - DNA, 25 bp, Homo sapien
tttggaacaaaatcggtcgtagaca

SEQ ID NO: 5321000 - DNA, 25 bp, Homo sapien
catgcacagtttggtacagtagaga

SEQ ID NO: 5321001 - DNA, 25 bp, Homo sapien
gagccacggttgctgattctttgga

SEQ ID NO: 5321002 - DNA, 25 bp, Homo sapien
caacactaactaaaggagccacggt

SEQ ID NO: 5321003 - DNA, 25 bp, Homo sapien
tagggagaagagtacagcacaaagt

SEQ ID NO: 5321004 - DNA, 25 bp, Homo sapien
tgctagaagtaaagtagaagtgacc

SEQ ID NO: 5321005 - DNA, 25 bp, Homo sapien
tacaggaaccaagtacatacccagc

SEQ ID NO: 5321006 - DNA, 25 bp, Homo sapien
taatagaaatcttgacccagtgcag

SEQ ID NO: 5321007 - DNA, 25 bp, Homo sapien
taaagtcagagagtagaatggcagc

SEQ ID NO: 5321008 - DNA, 25 bp, Homo sapien
gaattgggagttattggtcacggca

SEQ ID NO: 5321009 - DNA, 25 bp, Homo sapien
tttggctacgtgaatgaacctggag

SEQ ID NO: 5321010 - DNA, 25 bp, Homo sapien
agagatagctacattcttgtgttca

SEQ ID NO: 5321011 - DNA, 25 bp, Homo sapien
agcgcgggcggtgccgaccactgca

SEQ ID NO: 5321012 - DNA, 25 bp, Homo sapien
ggcggtgccgaccactgcaggtaac

SEQ ID NO: 5321013 - DNA, 25 bp, Homo sapien
cgagcgcgggcggtgccgaccactg

SEQ ID NO: 5321014 - DNA, 25 bp, Homo sapien
gcgggcggtgccgaccactgcaggt

SEQ ID NO: 5321015 - DNA, 25 bp, Homo sapien
ctgtggaggtgagcgagacgccgag

SEQ ID NO: 5321016 - DNA, 25 bp, Homo sapien
gggaagtgcggcatggggcggtacc

SEQ ID NO: 5321017 - DNA, 25 bp, Homo sapien
acagcctcagccggccgcgcctcga

SEQ ID NO: 5321018 - DNA, 25 bp, Homo sapien
ggtaccgctcacagccagccggctc

SEQ ID NO: 5321019 - DNA, 25 bp, Homo sapien
gcatggggcggtaccgctcacagcc

SEQ ID NO: 5321020 - DNA, 25 bp, Homo sapien
tacacgtacatgctactgtgctgag

SEQ ID NO: 5321021 - DNA, 25 bp, Homo sapien
cagcagcggcagagtattgatgtaa

SEQ ID NO: 5321022 - DNA, 25 bp, Homo sapien
caagagcttcaactgacacagtagt

SEQ ID NO: 5321023 - DNA, 25 bp, Homo sapien
tgatccctgtttgtacacaccacat

SEQ ID NO: 5321024 - DNA, 25 bp, Homo sapien
gaggaactctctcaacaagggccca

SEQ ID NO: 5321025 - DNA, 25 bp, Homo sapien
tcctggtgcagtactatagcttttc

SEQ ID NO: 5321026 - DNA, 25 bp, Homo sapien
tttaacctgttctcgctcagagtcc

SEQ ID NO: 5321027 - DNA, 25 bp, Homo sapien
caggccttgtgggaccacccttaat

SEQ ID NO: 5321028 - DNA, 25 bp, Homo sapien
aaacagtgctgtaatggtcacgact

SEQ ID NO: 5321029 - DNA, 25 bp, Homo sapien
ccctgggaggcctataccactgaat

SEQ ID NO: 5321030 - DNA, 25 bp, Homo sapien
catattatatgtaagtactctgtta

SEQ ID NO: 5321031 - DNA, 25 bp, Homo sapien
gatcatgtttctgcgctcctagcct

SEQ ID NO: 5321032 - DNA, 25 bp, Homo sapien
taccctatcaccgaggatcctgcat

SEQ ID NO: 5321033 - DNA, 25 bp, Homo sapien
gtgacctcatactatacatatcctc

SEQ ID NO: 5321034 - DNA, 25 bp, Homo sapien
tcaagtagacagaaaagtacagagg

SEQ ID NO: 5321035 - DNA, 25 bp, Homo sapien
ctgaatttgatgcttattatgccca

SEQ ID NO: 5321036 - DNA, 25 bp, Homo sapien
aaattacctgcttatatcctttgcc

SEQ ID NO: 5321037 - DNA, 25 bp, Homo sapien
caagctaggtaaatgctgcatggag

SEQ ID NO: 5321038 - DNA, 25 bp, Homo sapien
ctgggaagtctaagctcaagtaact

SEQ ID NO: 5321039 - DNA, 25 bp, Homo sapien
tcctcacagggcaaaagatggaaag

SEQ ID NO: 5321040 - DNA, 25 bp, Homo sapien
aaacagagatgtagctgggcatgat

SEQ ID NO: 5321041 - DNA, 25 bp, Homo sapien
gaaacagagatgtagctgggcatga

SEQ ID NO: 5321042 - DNA, 25 bp, Homo sapien
agaaacagagatgtagctgggcatg

SEQ ID NO: 5321043 - DNA, 25 bp, Homo sapien
aggtcaaggctgcaatgagcagaga

SEQ ID NO: 5321044 - DNA, 25 bp, Homo sapien
ggtcaaggctgcaatgagcagagat

SEQ ID NO: 5321045 - DNA, 25 bp, Homo sapien
tcaaggctgcaatgagcagagatcg

SEQ ID NO: 5321046 - DNA, 25 bp, Homo sapien
gaggtcaaggctgcaatgagcagag

SEQ ID NO: 5321047 - DNA, 25 bp, Homo sapien
gttactgctctcttaatacaaatgc

SEQ ID NO: 5321048 - DNA, 25 bp, Homo sapien
tgaagtccactggtatacccgtgcc

SEQ ID NO: 5321049 - DNA, 25 bp, Homo sapien
cttaagaacaaagtctgagtaccct

SEQ ID NO: 5321050 - DNA, 25 bp, Homo sapien
tatgaaactgaagatctgggaattg

SEQ ID NO: 5321051 - DNA, 25 bp, Homo sapien
catactttacaaaggccatcaatga

SEQ ID NO: 5321052 - DNA, 25 bp, Homo sapien
tctaacgcagaaattttatccaaag

SEQ ID NO: 5321053 - DNA, 25 bp, Homo sapien
tcatgagcaagtagttacaagcttt

SEQ ID NO: 5321054 - DNA, 25 bp, Homo sapien
tattcttacaacctactccaattgc

SEQ ID NO: 5321055 - DNA, 25 bp, Homo sapien
aaagacttaagacatggagtacatt

SEQ ID NO: 5321056 - DNA, 25 bp, Homo sapien
catggagtacattagtttagggaca

SEQ ID NO: 5321057 - DNA, 25 bp, Homo sapien
aggtctcctgatctagccggctcca

SEQ ID NO: 5321058 - DNA, 25 bp, Homo sapien
gccggctccaagcaggagtgagata

SEQ ID NO: 5321059 - DNA, 25 bp, Homo sapien
ggtccattttctgaactagccagtc

SEQ ID NO: 5321060 - DNA, 25 bp, Homo sapien
tgaactagccagtccactagaattt

SEQ ID NO: 5321061 - DNA, 25 bp, Homo sapien
ccagtccactagaattttgatgaag

SEQ ID NO: 5321062 - DNA, 25 bp, Homo sapien
tgaagcatctcatcaggtatggaca

SEQ ID NO: 5321063 - DNA, 25 bp, Homo sapien
tcaatgaaatacgtttaagaaataa

SEQ ID NO: 5321064 - DNA, 25 bp, Homo sapien
gaaagatggagcaactcaaagcagg

SEQ ID NO: 5321065 - DNA, 25 bp, Homo sapien
gttgactaagagtcaactctgtaaa

SEQ ID NO: 5321066 - DNA, 25 bp, Homo sapien
tgattatgacccgtgacacggccct

SEQ ID NO: 5321067 - DNA, 25 bp, Homo sapien
gtattaatgagttggtaggacccgc

SEQ ID NO: 5321068 - DNA, 25 bp, Homo sapien
taatggctacccttagagatgatag

SEQ ID NO: 5321069 - DNA, 25 bp, Homo sapien
cctgggatcaataggaagcacatgt

SEQ ID NO: 5321070 - DNA, 25 bp, Homo sapien
aatcaaagcttagtcctgaggcagc

SEQ ID NO: 5321071 - DNA, 25 bp, Homo sapien
tataaccagataccagacacacgag

SEQ ID NO: 5321072 - DNA, 25 bp, Homo sapien
tcatcaaccaaatcgggaaagccgc

SEQ ID NO: 5321073 - DNA, 25 bp, Homo sapien
cagagtgcggaaacatgactggcgc

SEQ ID NO: 5321074 - DNA, 25 bp, Homo sapien
gatttcaacgtctcacagagtgcgg

SEQ ID NO: 5321075 - DNA, 25 bp, Homo sapien
tgtttgagggccacaggaagacccc

SEQ ID NO: 5321076 - DNA, 25 bp, Homo sapien
cctcttcatagcagggatggtgcct

SEQ ID NO: 5321077 - DNA, 25 bp, Homo sapien
ggttagcggaagcagccttcaggtc

SEQ ID NO: 5321078 - DNA, 25 bp, Homo sapien
tctggacattttccgacagcaggga

SEQ ID NO: 5321079 - DNA, 25 bp, Homo sapien
ggttattggcaagaagccctagttc

SEQ ID NO: 5321080 - DNA, 25 bp, Homo sapien
catgtgagtcattccatgggctgct

SEQ ID NO: 5321081 - DNA, 25 bp, Homo sapien
tagtctaaagtaatctgaagactca

SEQ ID NO: 5321082 - DNA, 25 bp, Homo sapien
gctcagggtctttctagaggttgca

SEQ ID NO: 5321083 - DNA, 25 bp, Homo sapien
tgcacaaagttgaggctcccaggtc

SEQ ID NO: 5321084 - DNA, 25 bp, Homo sapien
gatttctggcgcatcatggtgagtc

SEQ ID NO: 5321085 - DNA, 25 bp, Homo sapien
aattcagtccaggtacattgtggca

SEQ ID NO: 5321086 - DNA, 25 bp, Homo sapien
gaagcttctcccttttgtggattag

SEQ ID NO: 5321087 - DNA, 25 bp, Homo sapien
tcagggctatagagagggatttcat

SEQ ID NO: 5321088 - DNA, 25 bp, Homo sapien
agaattccacagtgaagccttgagc

SEQ ID NO: 5321089 - DNA, 25 bp, Homo sapien
gtaatgccagctccatagaatgact

SEQ ID NO: 5321090 - DNA, 25 bp, Homo sapien
gctccatagaatgactagtaagtgt

SEQ ID NO: 5321091 - DNA, 25 bp, Homo sapien
agggggacgaacaggcaacagcctc

SEQ ID NO: 5321092 - DNA, 25 bp, Homo sapien
gaacaggcaacagcctcgtggttct

SEQ ID NO: 5321093 - DNA, 25 bp, Homo sapien
gacgaacaggcaacagcctcgtggt

SEQ ID NO: 5321094 - DNA, 25 bp, Homo sapien
aggcaacagcctcgtggttctccag

SEQ ID NO: 5321095 - DNA, 25 bp, Homo sapien
gctcgtttctgtcccctaaagtgag

SEQ ID NO: 5321096 - DNA, 25 bp, Homo sapien
tccagtgggcgagctagctagatcc

SEQ ID NO: 5321097 - DNA, 25 bp, Homo sapien
taggctttgcctatttccagtgggc

SEQ ID NO: 5321098 - DNA, 25 bp, Homo sapien
gacgatgtatatgcgaagacacttg

SEQ ID NO: 5321099 - DNA, 25 bp, Homo sapien
tgtcatggaccctggattaaaaacc

SEQ ID NO: 5321100 - DNA, 25 bp, Homo sapien
cacttaagacgggtaaagaaggcat

SEQ ID NO: 5321101 - DNA, 25 bp, Homo sapien
ggagtctggcacgtattatttcaca

SEQ ID NO: 5321102 - DNA, 25 bp, Homo sapien
gccatggaccacatcagcaatagga

SEQ ID NO: 5321103 - DNA, 25 bp, Homo sapien
cgtgagagcgcacatatagctggct

SEQ ID NO: 5321104 - DNA, 25 bp, Homo sapien
ggttgtcacttttcccgtgagagcg

SEQ ID NO: 5321105 - DNA, 25 bp, Homo sapien
ctaaattagagaagtgaggcaggca

SEQ ID NO: 5321106 - DNA, 25 bp, Homo sapien
gcagtggtcaccctcacgtgagaaa

SEQ ID NO: 5321107 - DNA, 25 bp, Homo sapien
tgtgttgcctcaaccttaacagcag

SEQ ID NO: 5321108 - DNA, 25 bp, Homo sapien
ccttgatgttactgctgttctgaga

SEQ ID NO: 5321109 - DNA, 25 bp, Homo sapien
taaagacaattatcagtggtgctga

SEQ ID NO: 5321110 - DNA, 25 bp, Homo sapien
gaacatcactggtgaatatctagga

SEQ ID NO: 5321111 - DNA, 25 bp, Homo sapien
tcctctggaaataggtaagtcctga

SEQ ID NO: 5321112 - DNA, 25 bp, Homo sapien
tgcagatagttgatgtttcccaagc

SEQ ID NO: 5321113 - DNA, 25 bp, Homo sapien
taagtattaacctgaccttccatcg

SEQ ID NO: 5321114 - DNA, 25 bp, Homo sapien
ttttgtaagcggaaaaagtgtcaca

SEQ ID NO: 5321115 - DNA, 25 bp, Homo sapien
cacaatcagtttaattaagtgcaca

SEQ ID NO: 5321116 - DNA, 25 bp, Homo sapien
tcacaatcagtttaattaagtgcac

SEQ ID NO: 5321117 - DNA, 25 bp, Homo sapien
aatcaatcagtcatgtcaataaaaa

SEQ ID NO: 5321118 - DNA, 25 bp, Homo sapien
gaatagcaatcaatcaatcagtcat

SEQ ID NO: 5321119 - DNA, 25 bp, Homo sapien
aatcaatcaatcagtcatgtcaata

SEQ ID NO: 5321120 - DNA, 25 bp, Homo sapien
tcaatcaatcagtcatgtcaataaa

SEQ ID NO: 5321121 - DNA, 25 bp, Homo sapien
ttacattgtacagggctaggcaacc

SEQ ID NO: 5321122 - DNA, 25 bp, Homo sapien
ctctataaggtacaaaactggcaca

SEQ ID NO: 5321123 - DNA, 25 bp, Homo sapien
cagaggacaccatatcatacacagt

SEQ ID NO: 5321124 - DNA, 25 bp, Homo sapien
tcatctggagttctgcctgaccaag

SEQ ID NO: 5321125 - DNA, 25 bp, Homo sapien
tgtagattcaatggtcctacacagg

SEQ ID NO: 5321126 - DNA, 25 bp, Homo sapien
ccttgtgacgacatggattgtagat

SEQ ID NO: 5321127 - DNA, 25 bp, Homo sapien
catggattgtagattcaatggtcct

SEQ ID NO: 5321128 - DNA, 25 bp, Homo sapien
tttcctttgccagatatccttgtga

SEQ ID NO: 5321129 - DNA, 25 bp, Homo sapien
cttggaacagtggaggtctttaaat

SEQ ID NO: 5321130 - DNA, 25 bp, Homo sapien
gctgtctacagtgtgctcctcatca

SEQ ID NO: 5321131 - DNA, 25 bp, Homo sapien
ctaacacgccgccttttaatgggag

SEQ ID NO: 5321132 - DNA, 25 bp, Homo sapien
ctcattgtcagaagtgctcgttggg

SEQ ID NO: 5321133 - DNA, 25 bp, Homo sapien
ttctgaaaacgaagatggaacttcc

SEQ ID NO: 5321134 - DNA, 25 bp, Homo sapien
ggttcagctgaacacacaactctta

SEQ ID NO: 5321135 - DNA, 25 bp, Homo sapien
tacaccaagtgtattactccctcct

SEQ ID NO: 5321136 - DNA, 25 bp, Homo sapien
tcttaaaccagttacaccaagtgta

SEQ ID NO: 5321137 - DNA, 25 bp, Homo sapien
ccctaaaggtaatgatagtagtcca

SEQ ID NO: 5321138 - DNA, 25 bp, Homo sapien
ttctctgttgcagacaagtcctgca

SEQ ID NO: 5321139 - DNA, 25 bp, Homo sapien
tagagctgggtttaactgtttggga

SEQ ID NO: 5321140 - DNA, 25 bp, Homo sapien
tgtactgacaggagcaaagcgagtg

SEQ ID NO: 5321141 - DNA, 25 bp, Homo sapien
agtgagtttctctgttgcagacaag

SEQ ID NO: 5321142 - DNA, 25 bp, Homo sapien
accagaaagccagtgttaagatact

SEQ ID NO: 5321143 - DNA, 25 bp, Homo sapien
tatgcccacgaaccagtaagtcaga

SEQ ID NO: 5321144 - DNA, 25 bp, Homo sapien
cagcctcattagttcttaaagtcac

SEQ ID NO: 5321145 - DNA, 25 bp, Homo sapien
ctacaaaaacccagataggaacatt

SEQ ID NO: 5321146 - DNA, 25 bp, Homo sapien
tggctgtcatgggagtctgcacaag

SEQ ID NO: 5321147 - DNA, 25 bp, Homo sapien
gagataagaccactaagatgttccc

SEQ ID NO: 5321148 - DNA, 25 bp, Homo sapien
tcagttacataggagccataggcag

SEQ ID NO: 5321149 - DNA, 25 bp, Homo sapien
tgataccagcttgtagcttccaagg

SEQ ID NO: 5321150 - DNA, 25 bp, Homo sapien
tcaaattggcacagtttgcttcaga

SEQ ID NO: 5321151 - DNA, 25 bp, Homo sapien
gactgtaggttctgatactggctta

SEQ ID NO: 5321152 - DNA, 25 bp, Homo sapien
tgctttggaaatttcaactcggttg

SEQ ID NO: 5321153 - DNA, 25 bp, Homo sapien
caagtttgtaataagagtgctgatc

SEQ ID NO: 5321154 - DNA, 25 bp, Homo sapien
aagaccagcataatgaaaccacaag

SEQ ID NO: 5321155 - DNA, 25 bp, Homo sapien
aaaagaccagcataatgaaaccaca

SEQ ID NO: 5321156 - DNA, 25 bp, Homo sapien
caaaagaccagcataatgaaaccac

SEQ ID NO: 5321157 - DNA, 25 bp, Homo sapien
agaccagcataatgaaaccacaagc

SEQ ID NO: 5321158 - DNA, 25 bp, Homo sapien
gtcatgaacgtgtagacaatgttgt

SEQ ID NO: 5321159 - DNA, 25 bp, Homo sapien
tatattctgcgaaaacaggatcttc

SEQ ID NO: 5321160 - DNA, 25 bp, Homo sapien
ctttcatccattaggatacatttaa

SEQ ID NO: 5321161 - DNA, 25 bp, Homo sapien
agaaggaaatgtgtcatgaacgtgt

SEQ ID NO: 5321162 - DNA, 25 bp, Homo sapien
gacactgatgccgaaactgaacaaa

SEQ ID NO: 5321163 - DNA, 25 bp, Homo sapien
tataggtaaccagagcatatgttgc

SEQ ID NO: 5321164 - DNA, 25 bp, Homo sapien
tgagcacttacggttgagcacggaa

SEQ ID NO: 5321165 - DNA, 25 bp, Homo sapien
taattatctcacacagaatcagtgg

SEQ ID NO: 5321166 - DNA, 25 bp, Homo sapien
ggcatagctcagtccaaagtttggg

SEQ ID NO: 5321167 - DNA, 25 bp, Homo sapien
tgagtctggcatagctcagtccaaa

SEQ ID NO: 5321168 - DNA, 25 bp, Homo sapien
tggcaaaccttcataggcaactagg

SEQ ID NO: 5321169 - DNA, 25 bp, Homo sapien
gatgaagtggcaaaccttcataggc

SEQ ID NO: 5321170 - DNA, 25 bp, Homo sapien
aaggtaccactctgcctattagata

SEQ ID NO: 5321171 - DNA, 25 bp, Homo sapien
aactctgcaggtacaatattacagc

SEQ ID NO: 5321172 - DNA, 25 bp, Homo sapien
cctgaaggatatgggacttaaatca

SEQ ID NO: 5321173 - DNA, 25 bp, Homo sapien
gaaaaagttactgcaagtggctcca

SEQ ID NO: 5321174 - DNA, 25 bp, Homo sapien
tacatttaagtaaatgcggccctta

SEQ ID NO: 5321175 - DNA, 25 bp, Homo sapien
gatcttctgagtggaccgcatctgg

SEQ ID NO: 5321176 - DNA, 25 bp, Homo sapien
aatgcggcccttaacaccagtttct

SEQ ID NO: 5321177 - DNA, 25 bp, Homo sapien
aggatcttctgagtggaccgcatct

SEQ ID NO: 5321178 - DNA, 25 bp, Homo sapien
tatgttacagagaccttgtggcctg

SEQ ID NO: 5321179 - DNA, 25 bp, Homo sapien
ggcctgtggagtctaaaatatatag

SEQ ID NO: 5321180 - DNA, 25 bp, Homo sapien
caaaaagagtctgctaacccactaa

SEQ ID NO: 5321181 - DNA, 25 bp, Homo sapien
tctaaaatatatagtgtcccctctt

SEQ ID NO: 5321182 - DNA, 25 bp, Homo sapien
gactgtatactacaatttctctagt

SEQ ID NO: 5321183 - DNA, 25 bp, Homo sapien
gggcaagcagactgtatactacaat

SEQ ID NO: 5321184 - DNA, 25 bp, Homo sapien
taaccctcttatgggcaagcagact

SEQ ID NO: 5321185 - DNA, 25 bp, Homo sapien
tcttatgggcaagcagactgtatac

SEQ ID NO: 5321186 - DNA, 25 bp, Homo sapien
ctcaagccgttctcccagctcagtc

SEQ ID NO: 5321187 - DNA, 25 bp, Homo sapien
tgggctcaagccgttctcccagctc

SEQ ID NO: 5321188 - DNA, 25 bp, Homo sapien
gctcagtctcctgagtagctgggac

SEQ ID NO: 5321189 - DNA, 25 bp, Homo sapien
gggactacaggtatgcaccaccatg

SEQ ID NO: 5321190 - DNA, 25 bp, Homo sapien
taccatagaggccttttatgatctc

SEQ ID NO: 5321191 - DNA, 25 bp, Homo sapien
gcatgttgcagtggcatcgtcttgg

SEQ ID NO: 5321192 - DNA, 25 bp, Homo sapien
cagctgcctcggttttacggagtgc

SEQ ID NO: 5321193 - DNA, 25 bp, Homo sapien
ttttccacaactaccaagaagccag

SEQ ID NO: 5321194 - DNA, 25 bp, Homo sapien
caatgttttccgcaacttcagtcca

SEQ ID NO: 5321195 - DNA, 25 bp, Homo sapien
gccatcgttttatcctaattttgcg

SEQ ID NO: 5321196 - DNA, 25 bp, Homo sapien
tcatcaattttgagagccatcgttt

SEQ ID NO: 5321197 - DNA, 25 bp, Homo sapien
tatagttaagactgtagtctacccc

SEQ ID NO: 5321198 - DNA, 25 bp, Homo sapien
cagcctgcctaatatggtgaaacct

SEQ ID NO: 5321199 - DNA, 25 bp, Homo sapien
aggcagaggcacacggatcacgagg

SEQ ID NO: 5321200 - DNA, 25 bp, Homo sapien
gcctgcctaatatggtgaaacctca

SEQ ID NO: 5321201 - DNA, 25 bp, Homo sapien
tcaggagttcgagaccagcctgcct

SEQ ID NO: 5321202 - DNA, 25 bp, Homo sapien
ggcattttcaccatgtagtattttc

SEQ ID NO: 5321203 - DNA, 25 bp, Homo sapien
tggcagtgttggctgtttatctgtt

SEQ ID NO: 5321204 - DNA, 25 bp, Homo sapien
ttatggcattttcaccatgtagtat

SEQ ID NO: 5321205 - DNA, 25 bp, Homo sapien
catcttaccaaatcctaaaaatttg

SEQ ID NO: 5321206 - DNA, 25 bp, Homo sapien
tttaccaagtaccatgacccaggtg

SEQ ID NO: 5321207 - DNA, 25 bp, Homo sapien
tacacctgattactgccaatgatgg

SEQ ID NO: 5321208 - DNA, 25 bp, Homo sapien
ggtgcataatcctgaaacggccaat

SEQ ID NO: 5321209 - DNA, 25 bp, Homo sapien
taaggtagggtcacatcttctgccc

SEQ ID NO: 5321210 - DNA, 25 bp, Homo sapien
ggcccatccctaatgaagtcaagag

SEQ ID NO: 5321211 - DNA, 25 bp, Homo sapien
tagttccgcaagtatttcacgtccc

SEQ ID NO: 5321212 - DNA, 25 bp, Homo sapien
tctatgtacagaagtgatcagccct

SEQ ID NO: 5321213 - DNA, 25 bp, Homo sapien
ggaggacacagacgcctagaactct

SEQ ID NO: 5321214 - DNA, 25 bp, Homo sapien
gaaaagaagtagtctagcagcatac

SEQ ID NO: 5321215 - DNA, 25 bp, Homo sapien
gcaactcggcataatagatggatga

SEQ ID NO: 5321216 - DNA, 25 bp, Homo sapien
ttttcacagttgattgcaactcggc

SEQ ID NO: 5321217 - DNA, 25 bp, Homo sapien
gatgaactgatgataagaaaagaag

SEQ ID NO: 5321218 - DNA, 25 bp, Homo sapien
tcttaggatccacaaaattggtcac

SEQ ID NO: 5321219 - DNA, 25 bp, Homo sapien
tactgaaaatccgaagatggcaagc

SEQ ID NO: 5321220 - DNA, 25 bp, Homo sapien
tatagcaacatggattttcctggca

SEQ ID NO: 5321221 - DNA, 25 bp, Homo sapien
gacccagttataatttagcctagtg

SEQ ID NO: 5321222 - DNA, 25 bp, Homo sapien
cacatattgagttcagggcgcggag

SEQ ID NO: 5321223 - DNA, 25 bp, Homo sapien
ttctcgacaagggaaataaggtcca

SEQ ID NO: 5321224 - DNA, 25 bp, Homo sapien
gcttttccctcctattagcttgata

SEQ ID NO: 5321225 - DNA, 25 bp, Homo sapien
gcgcggaggccgaatattgcttttc

SEQ ID NO: 5321226 - DNA, 25 bp, Homo sapien
agtgtgcagaacgattaaatgcgaa

SEQ ID NO: 5321227 - DNA, 25 bp, Homo sapien
taaatctccatgcttcagtgtgcag

SEQ ID NO: 5321228 - DNA, 25 bp, Homo sapien
aaaataaatctccatgcttcagtgt

SEQ ID NO: 5321229 - DNA, 25 bp, Homo sapien
tattaaaagtgtacagtaagaataa

SEQ ID NO: 5321230 - DNA, 25 bp, Homo sapien
atattgaagtactgtgctagataaa

SEQ ID NO: 5321231 - DNA, 25 bp, Homo sapien
gaaaatcatggggactcaaaagtac

SEQ ID NO: 5321232 - DNA, 25 bp, Homo sapien
agtacaatggttgtgttgtagaaag

SEQ ID NO: 5321233 - DNA, 25 bp, Homo sapien
tggtaagtacaatggttgtgttgta

SEQ ID NO: 5321234 - DNA, 25 bp, Homo sapien
catggggactcaaaagtacaagttc

SEQ ID NO: 5321235 - DNA, 25 bp, Homo sapien
cctagacctcccgaactgcatggat

SEQ ID NO: 5321236 - DNA, 25 bp, Homo sapien
taatgtacgttgattatgtgtctca

SEQ ID NO: 5321237 - DNA, 25 bp, Homo sapien
catgagccagcccagattatttaat

SEQ ID NO: 5321238 - DNA, 25 bp, Homo sapien
tagacctcccgaactgcatggatta

SEQ ID NO: 5321239 - DNA, 25 bp, Homo sapien
agttaacagtttatgggcaaattca

SEQ ID NO: 5321240 - DNA, 25 bp, Homo sapien
aaattcaattcgctcctgccactgg

SEQ ID NO: 5321241 - DNA, 25 bp, Homo sapien
gccactggattaatgcttgtttcac

SEQ ID NO: 5321242 - DNA, 25 bp, Homo sapien
agttctggaggactataggaattaa

SEQ ID NO: 5321243 - DNA, 25 bp, Homo sapien
cacatggcaagctgtagcttcgtga

SEQ ID NO: 5321244 - DNA, 25 bp, Homo sapien
tctctgaagataagggcgtgtagac

SEQ ID NO: 5321245 - DNA, 25 bp, Homo sapien
tactaaatctccagtcacatggcaa

SEQ ID NO: 5321246 - DNA, 25 bp, Homo sapien
gcgtgtagacttcaaaaccgaaaga

SEQ ID NO: 5321247 - DNA, 25 bp, Homo sapien
gactgtcagccatactcaaaagagt

SEQ ID NO: 5321248 - DNA, 25 bp, Homo sapien
tatcagactaaagggctcacgtacc

SEQ ID NO: 5321249 - DNA, 25 bp, Homo sapien
gaacctgcagcagtacctaatatga

SEQ ID NO: 5321250 - DNA, 25 bp, Homo sapien
tgcttactgagccacaaaatggtag

SEQ ID NO: 5321251 - DNA, 25 bp, Homo sapien
tgtcattagaatcaatcctcgatta

SEQ ID NO: 5321252 - DNA, 25 bp, Homo sapien
cagattctaatagtattctgaaggc

SEQ ID NO: 5321253 - DNA, 25 bp, Homo sapien
gaatcaatcctcgattaaatacaac

SEQ ID NO: 5321254 - DNA, 25 bp, Homo sapien
catcagattctaatagtattctgaa

SEQ ID NO: 5321255 - DNA, 25 bp, Homo sapien
gaagaaaacataaagttcagtttga

SEQ ID NO: 5321256 - DNA, 25 bp, Homo sapien
ctagaagaaaacataaagttcagtt

SEQ ID NO: 5321257 - DNA, 25 bp, Homo sapien
agaaaacataaagttcagtttgaga

SEQ ID NO: 5321258 - DNA, 25 bp, Homo sapien
aaaacataaagttcagtttgagaag

SEQ ID NO: 5321259 - DNA, 25 bp, Homo sapien
cagtgaagtcttcagtaaagtacca

SEQ ID NO: 5321260 - DNA, 25 bp, Homo sapien
caagtcatatagatcagaaagccag

SEQ ID NO: 5321261 - DNA, 25 bp, Homo sapien
tatatttgggctaaacagaatgcaa

SEQ ID NO: 5321262 - DNA, 25 bp, Homo sapien
taacagactcatccaaaggtgcaga

SEQ ID NO: 5321263 - DNA, 25 bp, Homo sapien
ctataaacagctgcatcaggttaaa

SEQ ID NO: 5321264 - DNA, 25 bp, Homo sapien
ttaaagtagtccagcaggagcggcc

SEQ ID NO: 5321265 - DNA, 25 bp, Homo sapien
taattcttcttctctcatatctggc

SEQ ID NO: 5321266 - DNA, 25 bp, Homo sapien
ggagcggccatctaagcaacgtaag

SEQ ID NO: 5321267 - DNA, 25 bp, Homo sapien
ggatacagataaaagagtatcaatt

SEQ ID NO: 5321268 - DNA, 25 bp, Homo sapien
gataaaagagtatcaattttactca

SEQ ID NO: 5321269 - DNA, 25 bp, Homo sapien
aaaacaggtatttccaatctatttg

SEQ ID NO: 5321270 - DNA, 25 bp, Homo sapien
ccaatctatttgaggatacagataa

SEQ ID NO: 5321271 - DNA, 25 bp, Homo sapien
gaagccagttgtcgtgtgaatgcag

SEQ ID NO: 5321272 - DNA, 25 bp, Homo sapien
cactggatgttctggtgagaagcca

SEQ ID NO: 5321273 - DNA, 25 bp, Homo sapien
tgtaagattcttaaaggcccactgg

SEQ ID NO: 5321274 - DNA, 25 bp, Homo sapien
ggcagcatcccacggttaaaaagca

SEQ ID NO: 5321275 - DNA, 25 bp, Homo sapien
tgaattgcttggtataagggacacc

SEQ ID NO: 5321276 - DNA, 25 bp, Homo sapien
gaattgcttggtataagggacacca

SEQ ID NO: 5321277 - DNA, 25 bp, Homo sapien
aattgcttggtataagggacaccag

SEQ ID NO: 5321278 - DNA, 25 bp, Homo sapien
ataagggacaccagaagataagctg

SEQ ID NO: 5321279 - DNA, 25 bp, Homo sapien
taaaatgtaaaacaaaactgtcaga

SEQ ID NO: 5321280 - DNA, 25 bp, Homo sapien
aaaatgtaaaacaaaactgtcagat

SEQ ID NO: 5321281 - DNA, 25 bp, Homo sapien
tataaaatgtaaaacaaaactgtca

SEQ ID NO: 5321282 - DNA, 25 bp, Homo sapien
aaatgtaaaacaaaactgtcagatc

SEQ ID NO: 5321283 - DNA, 25 bp, Homo sapien
aaaaaggcccatgggcagagtgccc

SEQ ID NO: 5321284 - DNA, 25 bp, Homo sapien
gactaaggaagcaacacaggtacat

SEQ ID NO: 5321285 - DNA, 25 bp, Homo sapien
tctctttgttaagagcgcacagctc

SEQ ID NO: 5321286 - DNA, 25 bp, Homo sapien
gagtgcccatgccaatccatgtgtt

SEQ ID NO: 5321287 - DNA, 25 bp, Homo sapien
cactttctgacactataggatattc

SEQ ID NO: 5321288 - DNA, 25 bp, Homo sapien
ctcaatgagtgaggaattaagctcc

SEQ ID NO: 5321289 - DNA, 25 bp, Homo sapien
tctctgacatacacccaccattttg

SEQ ID NO: 5321290 - DNA, 25 bp, Homo sapien
gaaagtcactaagctcatactcaat

SEQ ID NO: 5321291 - DNA, 25 bp, Homo sapien
caatgggcatgtcgtagttgcctaa

SEQ ID NO: 5321292 - DNA, 25 bp, Homo sapien
caacaatgggcatgtcgtagttgcc

SEQ ID NO: 5321293 - DNA, 25 bp, Homo sapien
ggcatgtcgtagttgcctaaaaaca

SEQ ID NO: 5321294 - DNA, 25 bp, Homo sapien
taaataaatggtttatgaaattcta

SEQ ID NO: 5321295 - DNA, 25 bp, Homo sapien
taattgtgagccaaaagaaaccgct

SEQ ID NO: 5321296 - DNA, 25 bp, Homo sapien
tgtctgcactgccaaccaatctaga

SEQ ID NO: 5321297 - DNA, 25 bp, Homo sapien
tctgtaagacccagctgtgtgccag

SEQ ID NO: 5321298 - DNA, 25 bp, Homo sapien
ccaatctagacactgagaaggattg

SEQ ID NO: 5321299 - DNA, 25 bp, Homo sapien
ttagcatagtcaacaacttaaagaa

SEQ ID NO: 5321300 - DNA, 25 bp, Homo sapien
agatgcaaagggaggcattcctgga

SEQ ID NO: 5321301 - DNA, 25 bp, Homo sapien
cagcaaactccattagcatagtcaa

SEQ ID NO: 5321302 - DNA, 25 bp, Homo sapien
aatataagatgcaaagggaggcatt

SEQ ID NO: 5321303 - DNA, 25 bp, Homo sapien
caggagtcaactttgctattgatgt

SEQ ID NO: 5321304 - DNA, 25 bp, Homo sapien
caactttgctattgatgtgaaaagc

SEQ ID NO: 5321305 - DNA, 25 bp, Homo sapien
gagtcaactttgctattgatgtgaa

SEQ ID NO: 5321306 - DNA, 25 bp, Homo sapien
ctcaggagtcaactttgctattgat

SEQ ID NO: 5321307 - DNA, 25 bp, Homo sapien
aagaggaggatttcaggatattctt

SEQ ID NO: 5321308 - DNA, 25 bp, Homo sapien
ctaaaacagaaagaggaggatttca

SEQ ID NO: 5321309 - DNA, 25 bp, Homo sapien
ggaggatttcaggatattcttgttt

SEQ ID NO: 5321310 - DNA, 25 bp, Homo sapien
cactacacccggctagatttttcta

SEQ ID NO: 5321311 - DNA, 25 bp, Homo sapien
ccatcacgaatatgttgaaacaaga

SEQ ID NO: 5321312 - DNA, 25 bp, Homo sapien
tattgatgccatcacgaatatgttg

SEQ ID NO: 5321313 - DNA, 25 bp, Homo sapien
tgttctgcaagtcgattattgtatc

SEQ ID NO: 5321314 - DNA, 25 bp, Homo sapien
gattattgtatcgacacaggctgaa

SEQ ID NO: 5321315 - DNA, 25 bp, Homo sapien
tgctgccatgtcagtctgtgataat

SEQ ID NO: 5321316 - DNA, 25 bp, Homo sapien
gttaatgctgccatgtcagtctgtg

SEQ ID NO: 5321317 - DNA, 25 bp, Homo sapien
aatgctgccatgtcagtctgtgata

SEQ ID NO: 5321318 - DNA, 25 bp, Homo sapien
taatgctgccatgtcagtctgtgat

SEQ ID NO: 5321319 - DNA, 25 bp, Homo sapien
ttccaggattggtaaatgaaagccc

SEQ ID NO: 5321320 - DNA, 25 bp, Homo sapien
caagtattccatcagtcagcttcaa

SEQ ID NO: 5321321 - DNA, 25 bp, Homo sapien
caagccactacacctagattgcata

SEQ ID NO: 5321322 - DNA, 25 bp, Homo sapien
tgacatgagacccttcaaaaccaaa

SEQ ID NO: 5321323 - DNA, 25 bp, Homo sapien
agttattaccgatgctcaaagctgt

SEQ ID NO: 5321324 - DNA, 25 bp, Homo sapien
cagtggtgacaactgcctagatcca

SEQ ID NO: 5321325 - DNA, 25 bp, Homo sapien
tttggttgccacgaagtatacttgc

SEQ ID NO: 5321326 - DNA, 25 bp, Homo sapien
gaaacctccgtaagttggctcttga

SEQ ID NO: 5321327 - DNA, 25 bp, Homo sapien
taccaaattattactactagggcaa

SEQ ID NO: 5321328 - DNA, 25 bp, Homo sapien
ttaacgtttaactcactgccaatag

SEQ ID NO: 5321329 - DNA, 25 bp, Homo sapien
tttccctataagtcatatcatggcc

SEQ ID NO: 5321330 - DNA, 25 bp, Homo sapien
atacacgattaagtttctgtgagcc

SEQ ID NO: 5321331 - DNA, 25 bp, Homo sapien
taggttaaagaacgaatgcacgctc

SEQ ID NO: 5321332 - DNA, 25 bp, Homo sapien
tacctggaaaggcatgtcaggcaac

SEQ ID NO: 5321333 - DNA, 25 bp, Homo sapien
gtgaatgactgcaaaagctccccga

SEQ ID NO: 5321334 - DNA, 25 bp, Homo sapien
tgttgccttgtttgaccttacctgg

SEQ ID NO: 5321335 - DNA, 25 bp, Homo sapien
gagcaactaaagctatcatcttttc

SEQ ID NO: 5321336 - DNA, 25 bp, Homo sapien
tctgatcgagactgttcaaccaaaa

SEQ ID NO: 5321337 - DNA, 25 bp, Homo sapien
tttcaagggcagctggcctgtattt

SEQ ID NO: 5321338 - DNA, 25 bp, Homo sapien
ctttctgatcgagactgttcaacca

SEQ ID NO: 5321339 - DNA, 25 bp, Homo sapien
cagagagaggatatcttcttcctcc

SEQ ID NO: 5321340 - DNA, 25 bp, Homo sapien
cctctgataacacttcaacttgagg

SEQ ID NO: 5321341 - DNA, 25 bp, Homo sapien
ccagagagaggatatcttcttcctc

SEQ ID NO: 5321342 - DNA, 25 bp, Homo sapien
gctcattggaagacaagtcacgata

SEQ ID NO: 5321343 - DNA, 25 bp, Homo sapien
ggaagacaagtcacgataaaaattg

SEQ ID NO: 5321344 - DNA, 25 bp, Homo sapien
aaattgcaagtatgataaaatagta

SEQ ID NO: 5321345 - DNA, 25 bp, Homo sapien
gacaagtcacgataaaaattgcaag

SEQ ID NO: 5321346 - DNA, 25 bp, Homo sapien
tttcaggtccttttgttcccatgta

SEQ ID NO: 5321347 - DNA, 25 bp, Homo sapien
tactgaggtatccatatcatctgac

SEQ ID NO: 5321348 - DNA, 25 bp, Homo sapien
cgaccaccaatatcttctactgagg

SEQ ID NO: 5321349 - DNA, 25 bp, Homo sapien
ttccataattaataacagggttctc

SEQ ID NO: 5321350 - DNA, 25 bp, Homo sapien
cagggttctcacaaagcgagtgaca

SEQ ID NO: 5321351 - DNA, 25 bp, Homo sapien
cagcctctgaatcacatggatacac

SEQ ID NO: 5321352 - DNA, 25 bp, Homo sapien
gcctctgaatcacatggatacacaa

SEQ ID NO: 5321353 - DNA, 25 bp, Homo sapien
tcagcctctgaatcacatggataca

SEQ ID NO: 5321354 - DNA, 25 bp, Homo sapien
tctcagcctctgaatcacatggata

SEQ ID NO: 5321355 - DNA, 25 bp, Homo sapien
gcacttaattagtatctgcattggc

SEQ ID NO: 5321356 - DNA, 25 bp, Homo sapien
tgcattggccaccagtcgtcatcag

SEQ ID NO: 5321357 - DNA, 25 bp, Homo sapien
catcagccatacgatctaaaaacca

SEQ ID NO: 5321358 - DNA, 25 bp, Homo sapien
ctgtctcacaatttgattagggcac

SEQ ID NO: 5321359 - DNA, 25 bp, Homo sapien
tgtttcgtcaacagttcaatccact

SEQ ID NO: 5321360 - DNA, 25 bp, Homo sapien
tattaaactgtttcgtcaacagttc

SEQ ID NO: 5321361 - DNA, 25 bp, Homo sapien
taaactgtttcgtcaacagttcaat

SEQ ID NO: 5321362 - DNA, 25 bp, Homo sapien
tcgtcaacagttcaatccactgaag

SEQ ID NO: 5321363 - DNA, 25 bp, Homo sapien
ttttctttagaatgaataaatgtct

SEQ ID NO: 5321364 - DNA, 25 bp, Homo sapien
cttttctttagaatgaataaatgtc

SEQ ID NO: 5321365 - DNA, 25 bp, Homo sapien
ttttgacagaattatttaaagttca

SEQ ID NO: 5321366 - DNA, 25 bp, Homo sapien
aagtagtaaattttgacagaattat

SEQ ID NO: 5321367 - DNA, 25 bp, Homo sapien
gcttcaatcattttaaagtagtaaa

SEQ ID NO: 5321368 - DNA, 25 bp, Homo sapien
gaaaagataaagcaaaaaagcttca

SEQ ID NO: 5321369 - DNA, 25 bp, Homo sapien
ggaatacaactacacaattgccaca

SEQ ID NO: 5321370 - DNA, 25 bp, Homo sapien
ctttgctgtcattaaggacacagct

SEQ ID NO: 5321371 - DNA, 25 bp, Homo sapien
ctgtcattaaggacacagctttagg

SEQ ID NO: 5321372 - DNA, 25 bp, Homo sapien
tttaggatctggtaatgtactggga

SEQ ID NO: 5321373 - DNA, 25 bp, Homo sapien
catttaaaattcacacgtaagattt

SEQ ID NO: 5321374 - DNA, 25 bp, Homo sapien
aaaatatctactatgaaatttacca

SEQ ID NO: 5321375 - DNA, 25 bp, Homo sapien
aaatatctactatgaaatttaccaa

SEQ ID NO: 5321376 - DNA, 25 bp, Homo sapien
tgtaaaatatctactatgaaattta

SEQ ID NO: 5321377 - DNA, 25 bp, Homo sapien
tcttgaagaaactgcatgttatcat

SEQ ID NO: 5321378 - DNA, 25 bp, Homo sapien
actgcatgttatcatgccaaatcca

SEQ ID NO: 5321379 - DNA, 25 bp, Homo sapien
tgtcttgaagaaactgcatgttatc

SEQ ID NO: 5321380 - DNA, 25 bp, Homo sapien
gaagaaactgcatgttatcatgcca

SEQ ID NO: 5321381 - DNA, 25 bp, Homo sapien
tacctaactgtccatcctcatcttg

SEQ ID NO: 5321382 - DNA, 25 bp, Homo sapien
ccagccttaccctagctattttcta

SEQ ID NO: 5321383 - DNA, 25 bp, Homo sapien
agctattttctacctaactgtccat

SEQ ID NO: 5321384 - DNA, 25 bp, Homo sapien
aggcaacgtgcccagccttacccta

SEQ ID NO: 5321385 - DNA, 25 bp, Homo sapien
catgtgcaggcaagatactagttaa

SEQ ID NO: 5321386 - DNA, 25 bp, Homo sapien
tacttcacaagtgggctaattgtca

SEQ ID NO: 5321387 - DNA, 25 bp, Homo sapien
tcagctgctaaatccaattcatgga

SEQ ID NO: 5321388 - DNA, 25 bp, Homo sapien
tatctttagggcaaaaggctgtgca

SEQ ID NO: 5321389 - DNA, 25 bp, Homo sapien
ttcaagggcttctctcgcctaggcc

SEQ ID NO: 5321390 - DNA, 25 bp, Homo sapien
tcaagggcttctctcgcctaggcct

SEQ ID NO: 5321391 - DNA, 25 bp, Homo sapien
tcctctggttccatgcgtttgtaaa

SEQ ID NO: 5321392 - DNA, 25 bp, Homo sapien
ggttccatgcgtttgtaaaacagca

SEQ ID NO: 5321393 - DNA, 25 bp, Homo sapien
aaaacagcatatatgcactgtgtgt

SEQ ID NO: 5321394 - DNA, 25 bp, Homo sapien
ctctagtaactctgacgaaacatca

SEQ ID NO: 5321395 - DNA, 25 bp, Homo sapien
tctgtaacagaatcataggtcttgg

SEQ ID NO: 5321396 - DNA, 25 bp, Homo sapien
ctgtaacagaatcataggtcttggt

SEQ ID NO: 5321397 - DNA, 25 bp, Homo sapien
gagaagtccataaatttatctgtaa

SEQ ID NO: 5321398 - DNA, 25 bp, Homo sapien
ttcaaaagagaagtccataaattta

SEQ ID NO: 5321399 - DNA, 25 bp, Homo sapien
gacaagaacaccgagaagcaataag

SEQ ID NO: 5321400 - DNA, 25 bp, Homo sapien
tttccattcagcagagtagacaaga

SEQ ID NO: 5321401 - DNA, 25 bp, Homo sapien
ggcgacacagcaagaatccgacttg

SEQ ID NO: 5321402 - DNA, 25 bp, Homo sapien
caatatctattgttggctaggtgcc

SEQ ID NO: 5321403 - DNA, 25 bp, Homo sapien
acattcagatgcaagttgagcagaa

SEQ ID NO: 5321404 - DNA, 25 bp, Homo sapien
aacattcagatgcaagttgagcaga

SEQ ID NO: 5321405 - DNA, 25 bp, Homo sapien
attcagatgcaagttgagcagaatc

SEQ ID NO: 5321406 - DNA, 25 bp, Homo sapien
tttacctcagcatcattaaaaagat

SEQ ID NO: 5321407 - DNA, 25 bp, Homo sapien
taagcaccttataatcagatagatc

SEQ ID NO: 5321408 - DNA, 25 bp, Homo sapien
aggaaaaggcaccatggacctgatg

SEQ ID NO: 5321409 - DNA, 25 bp, Homo sapien
tataacatgtaacgctattaggaaa

SEQ ID NO: 5321410 - DNA, 25 bp, Homo sapien
ccatttatgacctaggattaacaaa

SEQ ID NO: 5321411 - DNA, 25 bp, Homo sapien
taaagctataatagtgtccaccatc

SEQ ID NO: 5321412 - DNA, 25 bp, Homo sapien
gaacagtcactcctatcaagtcata

SEQ ID NO: 5321413 - DNA, 25 bp, Homo sapien
gctctctgagtcttttgaatgatca

SEQ ID NO: 5321414 - DNA, 25 bp, Homo sapien
accatctgccgttcctgtgtgaaca

SEQ ID NO: 5321415 - DNA, 25 bp, Homo sapien
cttagcctactaccataaaggacat

SEQ ID NO: 5321416 - DNA, 25 bp, Homo sapien
tttcccaatgtgacgagttacttag

SEQ ID NO: 5321417 - DNA, 25 bp, Homo sapien
tatctgctagtcattcaccatcctt

SEQ ID NO: 5321418 - DNA, 25 bp, Homo sapien
tacagaaataggcacaaatagttta

SEQ ID NO: 5321419 - DNA, 25 bp, Homo sapien
taaatgtgtatctcatagtattgaa

SEQ ID NO: 5321420 - DNA, 25 bp, Homo sapien
aaatcttctgtatagggcgtcatgt

SEQ ID NO: 5321421 - DNA, 25 bp, Homo sapien
catcatcgtgaccatattaaatgtg

SEQ ID NO: 5321422 - DNA, 25 bp, Homo sapien
catgtccaaacgtaatgggaaggaa

SEQ ID NO: 5321423 - DNA, 25 bp, Homo sapien
tttttcagctcgtactttcttccca

SEQ ID NO: 5321424 - DNA, 25 bp, Homo sapien
ttttcagctcgtactttcttcccac

SEQ ID NO: 5321425 - DNA, 25 bp, Homo sapien
cacctcacagtataaaactcttcag

SEQ ID NO: 5321426 - DNA, 25 bp, Homo sapien
taaatgttcttcatatcagccactt

SEQ ID NO: 5321427 - DNA, 25 bp, Homo sapien
cagccacttggcacctcacagtata

SEQ ID NO: 5321428 - DNA, 25 bp, Homo sapien
tcagcagtttgactaacatgttcac

SEQ ID NO: 5321429 - DNA, 25 bp, Homo sapien
aggatacaacattgtttgtaattac

SEQ ID NO: 5321430 - DNA, 25 bp, Homo sapien
aaggatacaacattgtttgtaatta

SEQ ID NO: 5321431 - DNA, 25 bp, Homo sapien
ggatacaacattgtttgtaattaca

SEQ ID NO: 5321432 - DNA, 25 bp, Homo sapien
caaggatacaacattgtttgtaatt

SEQ ID NO: 5321433 - DNA, 25 bp, Homo sapien
cgattttggtaattagatcagtaaa

SEQ ID NO: 5321434 - DNA, 25 bp, Homo sapien
gcttatccatggtgtatgttttaca

SEQ ID NO: 5321435 - DNA, 25 bp, Homo sapien
ggtctaggattatatgctttgcatt

SEQ ID NO: 5321436 - DNA, 25 bp, Homo sapien
catttcttcgattttggtaattaga

SEQ ID NO: 5321437 - DNA, 25 bp, Homo sapien
tcttgtgcttcatatcctctgaata

SEQ ID NO: 5321438 - DNA, 25 bp, Homo sapien
tgtaatcaaatttacttttattcac

SEQ ID NO: 5321439 - DNA, 25 bp, Homo sapien
attttttcaaacatttactacattg

SEQ ID NO: 5321440 - DNA, 25 bp, Homo sapien
tcaaacatttactacattgaaataa

SEQ ID NO: 5321441 - DNA, 25 bp, Homo sapien
tttcaaacatttactacattgaaat

SEQ ID NO: 5321442 - DNA, 25 bp, Homo sapien
tataaagttgctgaatagtagaagc

SEQ ID NO: 5321443 - DNA, 25 bp, Homo sapien
tcagcacggacatcttcatgaggcc

SEQ ID NO: 5321444 - DNA, 25 bp, Homo sapien
tagaagctaagtaacaagtagctcc

SEQ ID NO: 5321445 - DNA, 25 bp, Homo sapien
tagtaaggccaacaaatctacattc

SEQ ID NO: 5321446 - DNA, 25 bp, Homo sapien
tataatgttaaagtgtgtgaagagc

SEQ ID NO: 5321447 - DNA, 25 bp, Homo sapien
cagtgccctcaaaatcttatttctg

SEQ ID NO: 5321448 - DNA, 25 bp, Homo sapien
tttaataacaccctaccaataatca

SEQ ID NO: 5321449 - DNA, 25 bp, Homo sapien
tctacctccattagttacctcatta

SEQ ID NO: 5321450 - DNA, 25 bp, Homo sapien
aacccagttgtgtattagcctgtag

SEQ ID NO: 5321451 - DNA, 25 bp, Homo sapien
gccataacccagttgtgtattagcc

SEQ ID NO: 5321452 - DNA, 25 bp, Homo sapien
tattagcctgtagttctcaacagac

SEQ ID NO: 5321453 - DNA, 25 bp, Homo sapien
actgcatgtgttgtgccataaccca

SEQ ID NO: 5321454 - DNA, 25 bp, Homo sapien
taacaaatcgtaagcggcagctctt

SEQ ID NO: 5321455 - DNA, 25 bp, Homo sapien
tgtcggtcctttagacttggcaaca

SEQ ID NO: 5321456 - DNA, 25 bp, Homo sapien
tagacttggcaacaaaaacaggaga

SEQ ID NO: 5321457 - DNA, 25 bp, Homo sapien
gaatgtgatttgcactttggctgtt

SEQ ID NO: 5321458 - DNA, 25 bp, Homo sapien
gaaatcagggtatttggaatacctg

SEQ ID NO: 5321459 - DNA, 25 bp, Homo sapien
caatagtcatcctactatgctactg

SEQ ID NO: 5321460 - DNA, 25 bp, Homo sapien
gaggagacacctaggtttttcaaga

SEQ ID NO: 5321461 - DNA, 25 bp, Homo sapien
tctgctggcttgcaatccattacca

SEQ ID NO: 5321462 - DNA, 25 bp, Homo sapien
gatgacagattattatgcagctgca

SEQ ID NO: 5321463 - DNA, 25 bp, Homo sapien
gaggaggaagcagtagtagtgatag

SEQ ID NO: 5321464 - DNA, 25 bp, Homo sapien
ttaccaaattctgcatgaaattcag

SEQ ID NO: 5321465 - DNA, 25 bp, Homo sapien
tagcactactggaaaggtaaaagaa

SEQ ID NO: 5321466 - DNA, 25 bp, Homo sapien
aaattggctcagcttccacagacag

SEQ ID NO: 5321467 - DNA, 25 bp, Homo sapien
taatctcaggttgtaggtacagcca

SEQ ID NO: 5321468 - DNA, 25 bp, Homo sapien
gagaatctctttgcacctatcagac

SEQ ID NO: 5321469 - DNA, 25 bp, Homo sapien
taaacgtatactccatgaactagca

SEQ ID NO: 5321470 - DNA, 25 bp, Homo sapien
gactcagtcatgcacaactcgttta

SEQ ID NO: 5321471 - DNA, 25 bp, Homo sapien
tggccaagtgaagagtaagtgactc

SEQ ID NO: 5321472 - DNA, 25 bp, Homo sapien
aactcgtttaacctgtctatgcctc

SEQ ID NO: 5321473 - DNA, 25 bp, Homo sapien
taatggttaaaagcttggccaagtg

SEQ ID NO: 5321474 - DNA, 25 bp, Homo sapien
ttgctcggacttgcccggacttgcc

SEQ ID NO: 5321475 - DNA, 25 bp, Homo sapien
tataaggagaaaccgctttcgcttg

SEQ ID NO: 5321476 - DNA, 25 bp, Homo sapien
cggacttgccttccggcacgattgt

SEQ ID NO: 5321477 - DNA, 25 bp, Homo sapien
cacataagatgcgacttgctcggac

SEQ ID NO: 5321478 - DNA, 25 bp, Homo sapien
tacattaccatcctgatgatcaagg

SEQ ID NO: 5321479 - DNA, 25 bp, Homo sapien
aacaacacttgttgcaagccttagg

SEQ ID NO: 5321480 - DNA, 25 bp, Homo sapien
tcatcttctacattaccatcctgat

SEQ ID NO: 5321481 - DNA, 25 bp, Homo sapien
taggagtcctgtaagcccatcatct

SEQ ID NO: 5321482 - DNA, 25 bp, Homo sapien
atacacacaagcaagatagttcaca

SEQ ID NO: 5321483 - DNA, 25 bp, Homo sapien
tcttttatctttcctcgacaatata

SEQ ID NO: 5321484 - DNA, 25 bp, Homo sapien
ctttcctcgacaatataaatgtcaa

SEQ ID NO: 5321485 - DNA, 25 bp, Homo sapien
caagcaagatagttcacataattat

SEQ ID NO: 5321486 - DNA, 25 bp, Homo sapien
aggcatctaagtcgaggagcgttgt

SEQ ID NO: 5321487 - DNA, 25 bp, Homo sapien
tacagtcagccaaatgtcttgccaa

SEQ ID NO: 5321488 - DNA, 25 bp, Homo sapien
caaggcatctaagtcgaggagcgtt

SEQ ID NO: 5321489 - DNA, 25 bp, Homo sapien
caaatgtcttgccaaggcatctaag

SEQ ID NO: 5321490 - DNA, 25 bp, Homo sapien
atgtatgttgtcaactaatttgcat

SEQ ID NO: 5321491 - DNA, 25 bp, Homo sapien
agaaactagaggctttatgaaataa

SEQ ID NO: 5321492 - DNA, 25 bp, Homo sapien
cagaataaccaggcaaaaaaatgac

SEQ ID NO: 5321493 - DNA, 25 bp, Homo sapien
atcagaataaccaggcaaaaaaatg

SEQ ID NO: 5321494 - DNA, 25 bp, Homo sapien
agaacgattgattgagtctcctcca

SEQ ID NO: 5321495 - DNA, 25 bp, Homo sapien
cagccaatagcagaaaagaacgatt

SEQ ID NO: 5321496 - DNA, 25 bp, Homo sapien
gataacttatagagaccactgcatg

SEQ ID NO: 5321497 - DNA, 25 bp, Homo sapien
tgcatgattcatgacgaactgcagt

SEQ ID NO: 5321498 - DNA, 25 bp, Homo sapien
tcttgtaaatgatcgctatcagcaa

SEQ ID NO: 5321499 - DNA, 25 bp, Homo sapien
tttctttagccaatcttgtaaatga

SEQ ID NO: 5321500 - DNA, 25 bp, Homo sapien
aatgatcgctatcagcaaggctaga

SEQ ID NO: 5321501 - DNA, 25 bp, Homo sapien
gccaatcttgtaaatgatcgctatc

SEQ ID NO: 5321502 - DNA, 25 bp, Homo sapien
caagagccacattgaataatgtgaa

SEQ ID NO: 5321503 - DNA, 25 bp, Homo sapien
ctaaagaacagcaatgagcccaact

SEQ ID NO: 5321504 - DNA, 25 bp, Homo sapien
caccaagagccacattgaataatgt

SEQ ID NO: 5321505 - DNA, 25 bp, Homo sapien
aatgagcccaactcaccaagagcca

SEQ ID NO: 5321506 - DNA, 25 bp, Homo sapien
catgtctagacctgtgatcagactg

SEQ ID NO: 5321507 - DNA, 25 bp, Homo sapien
tctagacctgtgatcagactgagct

SEQ ID NO: 5321508 - DNA, 25 bp, Homo sapien
cttcatgtctagacctgtgatcaga

SEQ ID NO: 5321509 - DNA, 25 bp, Homo sapien
gacctgtgatcagactgagctttta

SEQ ID NO: 5321510 - DNA, 25 bp, Homo sapien
ctaggagccagattatcatacgtat

SEQ ID NO: 5321511 - DNA, 25 bp, Homo sapien
tatcatacgtataagcaacagacat

SEQ ID NO: 5321512 - DNA, 25 bp, Homo sapien
gcaacagacataagtcgctgaatca

SEQ ID NO: 5321513 - DNA, 25 bp, Homo sapien
ttccttggacaagaacaagaaatac

SEQ ID NO: 5321514 - DNA, 25 bp, Homo sapien
tggctttccgctataccagaccagg

SEQ ID NO: 5321515 - DNA, 25 bp, Homo sapien
tcagcaagcaagcaagacagtctag

SEQ ID NO: 5321516 - DNA, 25 bp, Homo sapien
gaagacccttagcatgatcaccagc

SEQ ID NO: 5321517 - DNA, 25 bp, Homo sapien
tcggatggatctactgcaaactggc

SEQ ID NO: 5321518 - DNA, 25 bp, Homo sapien
cctgctctttaggctctagaattcc

SEQ ID NO: 5321519 - DNA, 25 bp, Homo sapien
ctgctctttaggctctagaattcca

SEQ ID NO: 5321520 - DNA, 25 bp, Homo sapien
ttctaataactgttgaagccctcca

SEQ ID NO: 5321521 - DNA, 25 bp, Homo sapien
tttctaataactgttgaagccctcc

SEQ ID NO: 5321522 - DNA, 25 bp, Homo sapien
acttgaatcatctgaatctggataa

SEQ ID NO: 5321523 - DNA, 25 bp, Homo sapien
cttgaatcatctgaatctggataaa

SEQ ID NO: 5321524 - DNA, 25 bp, Homo sapien
cacttgaatcatctgaatctggata

SEQ ID NO: 5321525 - DNA, 25 bp, Homo sapien
ttgaatcatctgaatctggataaag

SEQ ID NO: 5321526 - DNA, 25 bp, Homo sapien
gttctttccaattaaatccatcatt

SEQ ID NO: 5321527 - DNA, 25 bp, Homo sapien
taatttccagagcatacaatagctt

SEQ ID NO: 5321528 - DNA, 25 bp, Homo sapien
tacaatagcttgtgggcgctcttaa

SEQ ID NO: 5321529 - DNA, 25 bp, Homo sapien
ggcgctcttaattttgagaagttct

SEQ ID NO: 5321530 - DNA, 25 bp, Homo sapien
gccatcaacatattaggacatgtag

SEQ ID NO: 5321531 - DNA, 25 bp, Homo sapien
tgtaggaagaagcatcagtagctcc

SEQ ID NO: 5321532 - DNA, 25 bp, Homo sapien
gatgaagttcttcacatcgtaagct

SEQ ID NO: 5321533 - DNA, 25 bp, Homo sapien
gacccgcctagacagattttctgca

SEQ ID NO: 5321534 - DNA, 25 bp, Homo sapien
aaaatccctgttatcaacctgccaa

SEQ ID NO: 5321535 - DNA, 25 bp, Homo sapien
taacacttgcgctatacttgaggaa

SEQ ID NO: 5321536 - DNA, 25 bp, Homo sapien
gagaagcaaccctcgagtaacactt

SEQ ID NO: 5321537 - DNA, 25 bp, Homo sapien
gtaactctcatcagggccaaaccta

SEQ ID NO: 5321538 - DNA, 25 bp, Homo sapien
tgcaagcatctctaataaatcaaaa

SEQ ID NO: 5321539 - DNA, 25 bp, Homo sapien
gcaaaagcattggaatgttgtcctt

SEQ ID NO: 5321540 - DNA, 25 bp, Homo sapien
gtgcacccaaagatacaaataccat

SEQ ID NO: 5321541 - DNA, 25 bp, Homo sapien
cctgagggtggtttaaatgatgcaa

SEQ ID NO: 5321542 - DNA, 25 bp, Homo sapien
tgttgttaactcgtgtccagatgaa

SEQ ID NO: 5321543 - DNA, 25 bp, Homo sapien
gatgaaatcatcctgacaggtccca

SEQ ID NO: 5321544 - DNA, 25 bp, Homo sapien
cataatctgttgttaactcgtgtcc

SEQ ID NO: 5321545 - DNA, 25 bp, Homo sapien
cttaaaaccaagctcatgaagtgct

SEQ ID NO: 5321546 - DNA, 25 bp, Homo sapien
tcagatgttcgcttatctccaaaag

SEQ ID NO: 5321547 - DNA, 25 bp, Homo sapien
tacaatattctgtacagagacatgc

SEQ ID NO: 5321548 - DNA, 25 bp, Homo sapien
tcccagaacttataatattgcttag

SEQ ID NO: 5321549 - DNA, 25 bp, Homo sapien
gacatgctatttcaatttactcaga

SEQ ID NO: 5321550 - DNA, 25 bp, Homo sapien
tgaagctgagcttgttgatttattt

SEQ ID NO: 5321551 - DNA, 25 bp, Homo sapien
tctgctacctggtcactaggataca

SEQ ID NO: 5321552 - DNA, 25 bp, Homo sapien
ggttgctttgaccaaactcctgaag

SEQ ID NO: 5321553 - DNA, 25 bp, Homo sapien
tcataccaatgagttacttcagccc

SEQ ID NO: 5321554 - DNA, 25 bp, Homo sapien
tggctggcatacaacccttagcggc

SEQ ID NO: 5321555 - DNA, 25 bp, Homo sapien
ccactgtctcagatgatatgcaaac

SEQ ID NO: 5321556 - DNA, 25 bp, Homo sapien
ccttagcggcagagactgtttgtca

SEQ ID NO: 5321557 - DNA, 25 bp, Homo sapien
tcaaatgactactaataccagtgcc

SEQ ID NO: 5321558 - DNA, 25 bp, Homo sapien
ggagtcctctttctataaccatgag

SEQ ID NO: 5321559 - DNA, 25 bp, Homo sapien
tcctgttcaagactgctagaagcta

SEQ ID NO: 5321560 - DNA, 25 bp, Homo sapien
tctcctaaacgcttccagatgtgtc

SEQ ID NO: 5321561 - DNA, 25 bp, Homo sapien
gaagctatcataagactctccatgc

SEQ ID NO: 5321562 - DNA, 25 bp, Homo sapien
gatagctgctcgactgacatcacca

SEQ ID NO: 5321563 - DNA, 25 bp, Homo sapien
aataggagttaatatactggatagc

SEQ ID NO: 5321564 - DNA, 25 bp, Homo sapien
gacatcaccagattgtgctcttaaa

SEQ ID NO: 5321565 - DNA, 25 bp, Homo sapien
aaagcaatgccccaaaattggtcca

SEQ ID NO: 5321566 - DNA, 25 bp, Homo sapien
gccagtcatgctaattgtttcaggt

SEQ ID NO: 5321567 - DNA, 25 bp, Homo sapien
tttgaacaaccatcataggcactgg

SEQ ID NO: 5321568 - DNA, 25 bp, Homo sapien
gagccaagttacagagatgctgaaa

SEQ ID NO: 5321569 - DNA, 25 bp, Homo sapien
taggcactggtagccaatcgagcca

SEQ ID NO: 5321570 - DNA, 25 bp, Homo sapien
aaccaatggagtgcatcatcataac

SEQ ID NO: 5321571 - DNA, 25 bp, Homo sapien
tagcatgttgatctttacttcgaac

SEQ ID NO: 5321572 - DNA, 25 bp, Homo sapien
agatgtttgtaggtttccataccca

SEQ ID NO: 5321573 - DNA, 25 bp, Homo sapien
gaatcttctactaaacaatgccata

SEQ ID NO: 5321574 - DNA, 25 bp, Homo sapien
tacacaagtcaagaattgaagacga

SEQ ID NO: 5321575 - DNA, 25 bp, Homo sapien
cttgaacttcagcactatggctgta

SEQ ID NO: 5321576 - DNA, 25 bp, Homo sapien
gaattgaagacgaacttgaacttca

SEQ ID NO: 5321577 - DNA, 25 bp, Homo sapien
ttgaacttcagcactatggctgtac

SEQ ID NO: 5321578 - DNA, 25 bp, Homo sapien
actctcagactataaggcaacccag

SEQ ID NO: 5321579 - DNA, 25 bp, Homo sapien
tagcagaggccttgagtacaaattc

SEQ ID NO: 5321580 - DNA, 25 bp, Homo sapien
gagttcactggacatgcctttgctg

SEQ ID NO: 5321581 - DNA, 25 bp, Homo sapien
caagaacagctagctcttaagggct

SEQ ID NO: 5321582 - DNA, 25 bp, Homo sapien
ttgtactcccacagtatagccccga

SEQ ID NO: 5321583 - DNA, 25 bp, Homo sapien
agggtcctatgggctgctgaaacca

SEQ ID NO: 5321584 - DNA, 25 bp, Homo sapien
cagtatagccccgatgctgcacttc

SEQ ID NO: 5321585 - DNA, 25 bp, Homo sapien
atagccccgatgctgcacttcaaag

SEQ ID NO: 5321586 - DNA, 25 bp, Homo sapien
gataagcttgtagaataaactgtca

SEQ ID NO: 5321587 - DNA, 25 bp, Homo sapien
tagattaataacctagagctaggtc

SEQ ID NO: 5321588 - DNA, 25 bp, Homo sapien
tagacagtccagaatactaagctga

SEQ ID NO: 5321589 - DNA, 25 bp, Homo sapien
tgtagataacctatgtgccaggtac

SEQ ID NO: 5321590 - DNA, 25 bp, Homo sapien
cttccttctctcacagtttgaatgt

SEQ ID NO: 5321591 - DNA, 25 bp, Homo sapien
attatcaaagaaaagcttcatcatg

SEQ ID NO: 5321592 - DNA, 25 bp, Homo sapien
tgtagtataccaaattatcaaagaa

SEQ ID NO: 5321593 - DNA, 25 bp, Homo sapien
tcacagtttgaatgtagtataccaa

SEQ ID NO: 5321594 - DNA, 25 bp, Homo sapien
tatcgtaactgctcccaaactgctg

SEQ ID NO: 5321595 - DNA, 25 bp, Homo sapien
gaagaagacgaagtgaaattactac

SEQ ID NO: 5321596 - DNA, 25 bp, Homo sapien
gaagacgaagtgaaattactactga

SEQ ID NO: 5321597 - DNA, 25 bp, Homo sapien
attgttatccagtgtgtatcgtaac

SEQ ID NO: 5321598 - DNA, 25 bp, Homo sapien
agacactgtacctggtcccttttgg

SEQ ID NO: 5321599 - DNA, 25 bp, Homo sapien
cactgtacctggtcccttttggatc

SEQ ID NO: 5321600 - DNA, 25 bp, Homo sapien
ctcattttaggaaaactgagtaaca

SEQ ID NO: 5321601 - DNA, 25 bp, Homo sapien
tcaaagtgttggacttacacgcgtg

SEQ ID NO: 5321602 - DNA, 25 bp, Homo sapien
gaaaataggacccttaatggctgca

SEQ ID NO: 5321603 - DNA, 25 bp, Homo sapien
gagcctctactgtgtcccattccaa

SEQ ID NO: 5321604 - DNA, 25 bp, Homo sapien
aacgaatcagtatcagcattccagg

SEQ ID NO: 5321605 - DNA, 25 bp, Homo sapien
gggcacagatctaagcgcacagctc

SEQ ID NO: 5321606 - DNA, 25 bp, Homo sapien
tggcttctttcttgcaacattgtgt

SEQ ID NO: 5321607 - DNA, 25 bp, Homo sapien
tgcatttgaatagctatgcaaagaa

SEQ ID NO: 5321608 - DNA, 25 bp, Homo sapien
agttgttccatgtagttgttcactg

SEQ ID NO: 5321609 - DNA, 25 bp, Homo sapien
caaagaatacgtagttatgttatgt

SEQ ID NO: 5321610 - DNA, 25 bp, Homo sapien
accacatctggatacttttatttgt

SEQ ID NO: 5321611 - DNA, 25 bp, Homo sapien
cacacaccaccacatctggatactt

SEQ ID NO: 5321612 - DNA, 25 bp, Homo sapien
caccaccacatctggatacttttat

SEQ ID NO: 5321613 - DNA, 25 bp, Homo sapien
ccacatctggatacttttatttgta

SEQ ID NO: 5321614 - DNA, 25 bp, Homo sapien
aaacaaagaatgaataccaaaggag

SEQ ID NO: 5321615 - DNA, 25 bp, Homo sapien
caacatactaacgaacaaagaagtt

SEQ ID NO: 5321616 - DNA, 25 bp, Homo sapien
tgaatctcattcgaatttgtctatc

SEQ ID NO: 5321617 - DNA, 25 bp, Homo sapien
aagttttcaaggcaaccttcaatga

SEQ ID NO: 5321618 - DNA, 25 bp, Homo sapien
tgtctatctgtaaaccaacatacta

SEQ ID NO: 5321619 - DNA, 25 bp, Homo sapien
catcttggactatatcccacaacaa

SEQ ID NO: 5321620 - DNA, 25 bp, Homo sapien
gtaacagcattactgttgaattgat

SEQ ID NO: 5321621 - DNA, 25 bp, Homo sapien
gcatcttcatcttggactatatccc

SEQ ID NO: 5321622 - DNA, 25 bp, Homo sapien
acagcattactgttgaattgatgtt

SEQ ID NO: 5321623 - DNA, 25 bp, Homo sapien
gggacgacaggtgcccgccatcaca

SEQ ID NO: 5321624 - DNA, 25 bp, Homo sapien
acgacaggtgcccgccatcacaccc

SEQ ID NO: 5321625 - DNA, 25 bp, Homo sapien
ggacgacaggtgcccgccatcacac

SEQ ID NO: 5321626 - DNA, 25 bp, Homo sapien
tcacacccagctgatttttgtattt

SEQ ID NO: 5321627 - DNA, 25 bp, Homo sapien
taggccagcatatgttgatgatacc

SEQ ID NO: 5321628 - DNA, 25 bp, Homo sapien
tgatgataccaaccaaacaagaggt

SEQ ID NO: 5321629 - DNA, 25 bp, Homo sapien
tggtcatgtcctattactttaagag

SEQ ID NO: 5321630 - DNA, 25 bp, Homo sapien
ggcctctttgcataaacgtaatcca

SEQ ID NO: 5321631 - DNA, 25 bp, Homo sapien
ggtgagatgtcagttccgcatgtga

SEQ ID NO: 5321632 - DNA, 25 bp, Homo sapien
tctgattttgcactaacctgggagc

SEQ ID NO: 5321633 - DNA, 25 bp, Homo sapien
ccgcatgtgaattaatctgaactag

SEQ ID NO: 5321634 - DNA, 25 bp, Homo sapien
gactaagatgttcatggtaaatgga

SEQ ID NO: 5321635 - DNA, 25 bp, Homo sapien
tttacatattattttatactcaaag

SEQ ID NO: 5321636 - DNA, 25 bp, Homo sapien
tgtttacatattattttatactcaa

SEQ ID NO: 5321637 - DNA, 25 bp, Homo sapien
gtttacatattattttatactcaaa

SEQ ID NO: 5321638 - DNA, 25 bp, Homo sapien
ttacatattattttatactcaaagt

SEQ ID NO: 5321639 - DNA, 25 bp, Homo sapien
gtggtggtggtggtgatgctgtgga

SEQ ID NO: 5321640 - DNA, 25 bp, Homo sapien
tggtggtggtggtgatgctgtggac

SEQ ID NO: 5321641 - DNA, 25 bp, Homo sapien
ccatcgtggtggtggtgatggtggt

SEQ ID NO: 5321642 - DNA, 25 bp, Homo sapien
ggaagtccccagttcgtgtgataca

SEQ ID NO: 5321643 - DNA, 25 bp, Homo sapien
tcgtgtgatacaagactcctgagac

SEQ ID NO: 5321644 - DNA, 25 bp, Homo sapien
ccagttcgtgtgatacaagactcct

SEQ ID NO: 5321645 - DNA, 25 bp, Homo sapien
gtcgacaattaaataattcattccc

SEQ ID NO: 5321646 - DNA, 25 bp, Homo sapien
cgcattcgattatctactgatggca

SEQ ID NO: 5321647 - DNA, 25 bp, Homo sapien
ttcagagtgtgaacaagcatccagc

SEQ ID NO: 5321648 - DNA, 25 bp, Homo sapien
gaaatatcatgttctgggtcttcag

SEQ ID NO: 5321649 - DNA, 25 bp, Homo sapien
tttctgacatgccttgggagtcccc

SEQ ID NO: 5321650 - DNA, 25 bp, Homo sapien
tgcttttgggaggattatgaccatg

SEQ ID NO: 5321651 - DNA, 25 bp, Homo sapien
tatgaccatgatcatcgtcttcatc

SEQ ID NO: 5321652 - DNA, 25 bp, Homo sapien
ggattatgaccatgatcatcgtctt

SEQ ID NO: 5321653 - DNA, 25 bp, Homo sapien
ctgtaccacaactgcttttgggagg

SEQ ID NO: 5321654 - DNA, 25 bp, Homo sapien
cattgctagatccatcactatgccc

SEQ ID NO: 5321655 - DNA, 25 bp, Homo sapien
ggctagaattaacctcattgctaga

SEQ ID NO: 5321656 - DNA, 25 bp, Homo sapien
actatgcccactactgctaccagga

SEQ ID NO: 5321657 - DNA, 25 bp, Homo sapien
gcagtttcgtcagaacttccctgca

SEQ ID NO: 5321658 - DNA, 25 bp, Homo sapien
ctctgtgtctgaaagtcgttgttgc

SEQ ID NO: 5321659 - DNA, 25 bp, Homo sapien
tggttctattaataagttgctcatc

SEQ ID NO: 5321660 - DNA, 25 bp, Homo sapien
tgtcactacctccactttgatgtgt

SEQ ID NO: 5321661 - DNA, 25 bp, Homo sapien
gatgtgtatcgctattatcactgct

SEQ ID NO: 5321662 - DNA, 25 bp, Homo sapien
gctgttcttctaagctcttcttcct

SEQ ID NO: 5321663 - DNA, 25 bp, Homo sapien
tgatggagctgttcttctaagctct

SEQ ID NO: 5321664 - DNA, 25 bp, Homo sapien
aaggtgatggagctgttcttctaag

SEQ ID NO: 5321665 - DNA, 25 bp, Homo sapien
gagctgttcttctaagctcttcttc

SEQ ID NO: 5321666 - DNA, 25 bp, Homo sapien
taactgagccttagctgctagtgcg

SEQ ID NO: 5321667 - DNA, 25 bp, Homo sapien
gctgctagtgcgttattccacagtg

SEQ ID NO: 5321668 - DNA, 25 bp, Homo sapien
taattaacatggatgccaagtacag

SEQ ID NO: 5321669 - DNA, 25 bp, Homo sapien
tgcaaaagaactctgtttagataac

SEQ ID NO: 5321670 - DNA, 25 bp, Homo sapien
tgttcagtatgaacacttggctcaa

SEQ ID NO: 5321671 - DNA, 25 bp, Homo sapien
ttaagtagatgtctaagtggtacgg

SEQ ID NO: 5321672 - DNA, 25 bp, Homo sapien
gggatccaaattcttgatgagtgaa

SEQ ID NO: 5321673 - DNA, 25 bp, Homo sapien
taagtcatgtatataccgactacaa

SEQ ID NO: 5321674 - DNA, 25 bp, Homo sapien
gccatgaagctgctaactactaaat

SEQ ID NO: 5321675 - DNA, 25 bp, Homo sapien
taaatcaagatagggtaataaacag

SEQ ID NO: 5321676 - DNA, 25 bp, Homo sapien
ggtaataaacagaagattagacaag

SEQ ID NO: 5321677 - DNA, 25 bp, Homo sapien
tgctaactactaaatcaagataggg

SEQ ID NO: 5321678 - DNA, 25 bp, Homo sapien
tctttcagggtaaatatgcacaacc

SEQ ID NO: 5321679 - DNA, 25 bp, Homo sapien
tgcaagttaagtatcccctatctga

SEQ ID NO: 5321680 - DNA, 25 bp, Homo sapien
ccacttttacaggtcttgactaaga

SEQ ID NO: 5321681 - DNA, 25 bp, Homo sapien
cacactttggagtatctgcattata

SEQ ID NO: 5321682 - DNA, 25 bp, Homo sapien
tcaaagatagtaagagtaaagacag

SEQ ID NO: 5321683 - DNA, 25 bp, Homo sapien
gatagactggatgctagaccacaag

SEQ ID NO: 5321684 - DNA, 25 bp, Homo sapien
taagccaaatagacctagcaggcat

SEQ ID NO: 5321685 - DNA, 25 bp, Homo sapien
tgggacatgttccaagatagactgg

SEQ ID NO: 5321686 - DNA, 25 bp, Homo sapien
tagcaggcatacacagaacactcca

SEQ ID NO: 5321687 - DNA, 25 bp, Homo sapien
aaaccttacaactccacaacaacag

SEQ ID NO: 5321688 - DNA, 25 bp, Homo sapien
gatgccccagtattaccactcctat

SEQ ID NO: 5321689 - DNA, 25 bp, Homo sapien
gcctaaagtgctcggctgggtgatc

SEQ ID NO: 5321690 - DNA, 25 bp, Homo sapien
gcaaggatgccccagtattaccact

SEQ ID NO: 5321691 - DNA, 25 bp, Homo sapien
caatatgttgagtactcagtcgccc

SEQ ID NO: 5321692 - DNA, 25 bp, Homo sapien
tgtgctgcagcccaaatacagtcaa

SEQ ID NO: 5321693 - DNA, 25 bp, Homo sapien
caaatacagtcaatatgttgagtac

SEQ ID NO: 5321694 - DNA, 25 bp, Homo sapien
tgagtactcagtcgcccttctgctg

SEQ ID NO: 5321695 - DNA, 25 bp, Homo sapien
atgctccaccacattgttgctaata

SEQ ID NO: 5321696 - DNA, 25 bp, Homo sapien
ctcaatatgtaaatttggtccaaat

SEQ ID NO: 5321697 - DNA, 25 bp, Homo sapien
caccacattgttgctaataagccag

SEQ ID NO: 5321698 - DNA, 25 bp, Homo sapien
tccaccacattgttgctaataagcc

SEQ ID NO: 5321699 - DNA, 25 bp, Homo sapien
cacatcattgaaggtatggagttga

SEQ ID NO: 5321700 - DNA, 25 bp, Homo sapien
tttctgtgtccgatactaatgattc

SEQ ID NO: 5321701 - DNA, 25 bp, Homo sapien
tgattcattattgcacacatcattg

SEQ ID NO: 5321702 - DNA, 25 bp, Homo sapien
tctgtgtccgatactaatgattcat

SEQ ID NO: 5321703 - DNA, 25 bp, Homo sapien
gactgtgctccacattaagtcagcc

SEQ ID NO: 5321704 - DNA, 25 bp, Homo sapien
caaagcataatgttgtatccaatgg

SEQ ID NO: 5321705 - DNA, 25 bp, Homo sapien
tcaaagtaggtgacataaagtactt

SEQ ID NO: 5321706 - DNA, 25 bp, Homo sapien
gtacttaaatgcaagatctaggctt

SEQ ID NO: 5321707 - DNA, 25 bp, Homo sapien
agctgcactctgtcgtaactcctga

SEQ ID NO: 5321708 - DNA, 25 bp, Homo sapien
tgtcgtaactcctgatccgagagct

SEQ ID NO: 5321709 - DNA, 25 bp, Homo sapien
cctgatccgagagcttgcataaata

SEQ ID NO: 5321710 - DNA, 25 bp, Homo sapien
gtaactcctgatccgagagcttgca

SEQ ID NO: 5321711 - DNA, 25 bp, Homo sapien
cctggctggctattgttgtaagcca

SEQ ID NO: 5321712 - DNA, 25 bp, Homo sapien
tgccagtgccatttaagtcccacag

SEQ ID NO: 5321713 - DNA, 25 bp, Homo sapien
caagttcatactcccaatttgccag

SEQ ID NO: 5321714 - DNA, 25 bp, Homo sapien
tcctgtatgctctcctcaggtgact

SEQ ID NO: 5321715 - DNA, 25 bp, Homo sapien
ctgattctttgcctgatactgtctc

SEQ ID NO: 5321716 - DNA, 25 bp, Homo sapien
attctttgcctgatactgtctccca

SEQ ID NO: 5321717 - DNA, 25 bp, Homo sapien
atctgattctttgcctgatactgtc

SEQ ID NO: 5321718 - DNA, 25 bp, Homo sapien
ctttgcctgatactgtctcccaaaa

SEQ ID NO: 5321719 - DNA, 25 bp, Homo sapien
tgctgcatgacagcgggaatatgta

SEQ ID NO: 5321720 - DNA, 25 bp, Homo sapien
cagcgggaatatgtagccatattct

SEQ ID NO: 5321721 - DNA, 25 bp, Homo sapien
gtgctgcatgacagcgggaatatgt

SEQ ID NO: 5321722 - DNA, 25 bp, Homo sapien
agcgggaatatgtagccatattcta

SEQ ID NO: 5321723 - DNA, 25 bp, Homo sapien
caagatacatcagagggcatagtta

SEQ ID NO: 5321724 - DNA, 25 bp, Homo sapien
ttccatctgcatggtgaaaacagac

SEQ ID NO: 5321725 - DNA, 25 bp, Homo sapien
cctgaggactcataaggtaggcttc

SEQ ID NO: 5321726 - DNA, 25 bp, Homo sapien
gaagaatgctgacacccatatgaac

SEQ ID NO: 5321727 - DNA, 25 bp, Homo sapien
tacataacgaagcaaatgcaatggt

SEQ ID NO: 5321728 - DNA, 25 bp, Homo sapien
caactgtaataaacgcatgtgctat

SEQ ID NO: 5321729 - DNA, 25 bp, Homo sapien
caaagtttcaggagttccatattca

SEQ ID NO: 5321730 - DNA, 25 bp, Homo sapien
caaagcaatccttcatgagagaaag

SEQ ID NO: 5321731 - DNA, 25 bp, Homo sapien
cacagaatgcccctaatatgttact

SEQ ID NO: 5321732 - DNA, 25 bp, Homo sapien
tcatatcacagaatgcccctaatat

SEQ ID NO: 5321733 - DNA, 25 bp, Homo sapien
atatcacagaatgcccctaatatgt

SEQ ID NO: 5321734 - DNA, 25 bp, Homo sapien
attcatatcacagaatgcccctaat

SEQ ID NO: 5321735 - DNA, 25 bp, Homo sapien
ctcaatagtagggtgagtattatgc

SEQ ID NO: 5321736 - DNA, 25 bp, Homo sapien
agggtgagtattatgcttgtaagca

SEQ ID NO: 5321737 - DNA, 25 bp, Homo sapien
gtaagcagtatataagggaaactga

SEQ ID NO: 5321738 - DNA, 25 bp, Homo sapien
tagtagggtgagtattatgcttgta

SEQ ID NO: 5321739 - DNA, 25 bp, Homo sapien
cataaactaaaaggatcagaactct

SEQ ID NO: 5321740 - DNA, 25 bp, Homo sapien
tctcatcttgccacgtggaatctat

SEQ ID NO: 5321741 - DNA, 25 bp, Homo sapien
tcctcctcagtcagattacaaattc

SEQ ID NO: 5321742 - DNA, 25 bp, Homo sapien
tcccggagcacttgaacttgggcaa

SEQ ID NO: 5321743 - DNA, 25 bp, Homo sapien
agtgcacacactacttgattaaaaa

SEQ ID NO: 5321744 - DNA, 25 bp, Homo sapien
ataagtgcacacactacttgattaa

SEQ ID NO: 5321745 - DNA, 25 bp, Homo sapien
tatattccttgaagcagcatagaca

SEQ ID NO: 5321746 - DNA, 25 bp, Homo sapien
tccaaatgcttatattccttgaagc

SEQ ID NO: 5321747 - DNA, 25 bp, Homo sapien
gctgatagctgtcatcttttgtccc

SEQ ID NO: 5321748 - DNA, 25 bp, Homo sapien
tttctgtcatccaaactatgctgat

SEQ ID NO: 5321749 - DNA, 25 bp, Homo sapien
ctttcactccgagttactatttgtc

SEQ ID NO: 5321750 - DNA, 25 bp, Homo sapien
ttatttctttcactccgagttacta

SEQ ID NO: 5321751 - DNA, 25 bp, Homo sapien
taagggtaggatagacatttcaggc

SEQ ID NO: 5321752 - DNA, 25 bp, Homo sapien
aacaagggctactgcttctccaaag

SEQ ID NO: 5321753 - DNA, 25 bp, Homo sapien
catttcaggcctggaaggtctaata

SEQ ID NO: 5321754 - DNA, 25 bp, Homo sapien
agaaaagatgtcctctacaacaagg

SEQ ID NO: 5321755 - DNA, 25 bp, Homo sapien
cagagggccatgaatggcgacatac

SEQ ID NO: 5321756 - DNA, 25 bp, Homo sapien
ccagagggccatgaatggcgacata

SEQ ID NO: 5321757 - DNA, 25 bp, Homo sapien
tccagagggccatgaatggcgacat

SEQ ID NO: 5321758 - DNA, 25 bp, Homo sapien
accatatcttcaaattcatcggcat

SEQ ID NO: 5321759 - DNA, 25 bp, Homo sapien
atcttcaaattcatcggcattgaac

SEQ ID NO: 5321760 - DNA, 25 bp, Homo sapien
catatcttcaaattcatcggcattg

SEQ ID NO: 5321761 - DNA, 25 bp, Homo sapien
ccaccatatcttcaaattcatcggc

SEQ ID NO: 5321762 - DNA, 25 bp, Homo sapien
cagatgtggatcttctggcagccgg

SEQ ID NO: 5321763 - DNA, 25 bp, Homo sapien
gatgtggatcttctggcagccgggg

SEQ ID NO: 5321764 - DNA, 25 bp, Homo sapien
cttccagatgtggatcttctggcag

SEQ ID NO: 5321765 - DNA, 25 bp, Homo sapien
tgtggatcttctggcagccggggaa

SEQ ID NO: 5321766 - DNA, 25 bp, Homo sapien
gagcaggacctcaatcacatgcgcc

SEQ ID NO: 5321767 - DNA, 25 bp, Homo sapien
agcaggacctcaatcacatgcgcct

SEQ ID NO: 5321768 - DNA, 25 bp, Homo sapien
ccataaggaaaggaattcagtcagc

SEQ ID NO: 5321769 - DNA, 25 bp, Homo sapien
aattcagtcagcttaattggctgca

SEQ ID NO: 5321770 - DNA, 25 bp, Homo sapien
agcaacctatacaacaaacaggccg

SEQ ID NO: 5321771 - DNA, 25 bp, Homo sapien
ctatacaacaaacaggccgcataca

SEQ ID NO: 5321772 - DNA, 25 bp, Homo sapien
gagtttatctccacgctaaggttca

SEQ ID NO: 5321773 - DNA, 25 bp, Homo sapien
tatggactcacttggtccacgggcc

SEQ ID NO: 5321774 - DNA, 25 bp, Homo sapien
gaacgacaatcttaatctaggccac

SEQ ID NO: 5321775 - DNA, 25 bp, Homo sapien
ccacgggccccaagttaagaatgca

SEQ ID NO: 5321776 - DNA, 25 bp, Homo sapien
tgtcatcatcactcgttcacaggtg

SEQ ID NO: 5321777 - DNA, 25 bp, Homo sapien
gtctatctagatccaaggccacttt

SEQ ID NO: 5321778 - DNA, 25 bp, Homo sapien
caggactagaatccatgtctatcta

SEQ ID NO: 5321779 - DNA, 25 bp, Homo sapien
tgagagtttacagaacttaactcat

SEQ ID NO: 5321780 - DNA, 25 bp, Homo sapien
catgttgccacctagctgtagttac

SEQ ID NO: 5321781 - DNA, 25 bp, Homo sapien
cagcaaatcattgtggactattaaa

SEQ ID NO: 5321782 - DNA, 25 bp, Homo sapien
tcaagattatgactcagacacaaca

SEQ ID NO: 5321783 - DNA, 25 bp, Homo sapien
taatgcaacagcaaccactcctaaa

SEQ ID NO: 5321784 - DNA, 25 bp, Homo sapien
aaatcacattgaggaacaggaatcc

SEQ ID NO: 5321785 - DNA, 25 bp, Homo sapien
cacataattatagaaacggaacaga

SEQ ID NO: 5321786 - DNA, 25 bp, Homo sapien
tagtcttcgaaatacctaaagatgc

SEQ ID NO: 5321787 - DNA, 25 bp, Homo sapien
taaaagtatcccctaccacaatgac

SEQ ID NO: 5321788 - DNA, 25 bp, Homo sapien
ctgtgtccaggaattgatataagta

SEQ ID NO: 5321789 - DNA, 25 bp, Homo sapien
gtaaatattttgagagtatgttcct

SEQ ID NO: 5321790 - DNA, 25 bp, Homo sapien
ttttgagagtatgttcctttctgag

SEQ ID NO: 5321791 - DNA, 25 bp, Homo sapien
ccatcaccaccttctacatctgata

SEQ ID NO: 5321792 - DNA, 25 bp, Homo sapien
acttggcaccattctgtccggccat

SEQ ID NO: 5321793 - DNA, 25 bp, Homo sapien
gcccagctgcaaacagtgattgcgg

SEQ ID NO: 5321794 - DNA, 25 bp, Homo sapien
catggaaggaacttgctctgctgca

SEQ ID NO: 5321795 - DNA, 25 bp, Homo sapien
tgcccagacaggacatcaggaggaa

SEQ ID NO: 5321796 - DNA, 25 bp, Homo sapien
ggaagcaggtcaatggctgctgtat

SEQ ID NO: 5321797 - DNA, 25 bp, Homo sapien
actgcttaagcctggaaagtagcgt

SEQ ID NO: 5321798 - DNA, 25 bp, Homo sapien
ttaagcctggaaagtagcgtttgca

SEQ ID NO: 5321799 - DNA, 25 bp, Homo sapien
ccagcatagacgacagagtaagacc

SEQ ID NO: 5321800 - DNA, 25 bp, Homo sapien
tggaaagtagcgtttgcagtgagcc

SEQ ID NO: 5321801 - DNA, 25 bp, Homo sapien
acactgatcctaccacatgcaggca

SEQ ID NO: 5321802 - DNA, 25 bp, Homo sapien
taaacactgatcctaccacatgcag

SEQ ID NO: 5321803 - DNA, 25 bp, Homo sapien
aaacactgatcctaccacatgcagg

SEQ ID NO: 5321804 - DNA, 25 bp, Homo sapien
aaataaacactgatcctaccacatg

SEQ ID NO: 5321805 - DNA, 25 bp, Homo sapien
taaattctagtcctacccctgctac

SEQ ID NO: 5321806 - DNA, 25 bp, Homo sapien
cacagtcagggtcctcttaaaaatt

SEQ ID NO: 5321807 - DNA, 25 bp, Homo sapien
gactcttacaaaggaagtaccttca

SEQ ID NO: 5321808 - DNA, 25 bp, Homo sapien
taatggtttcttatgagtttcccaa

SEQ ID NO: 5321809 - DNA, 25 bp, Homo sapien
tgaagatacataaaacacggtcagt

SEQ ID NO: 5321810 - DNA, 25 bp, Homo sapien
ggatgacagagtacctccctcaaag

SEQ ID NO: 5321811 - DNA, 25 bp, Homo sapien
tctgggattaagtcctgtggttcca

SEQ ID NO: 5321812 - DNA, 25 bp, Homo sapien
gccaactgaacagtggtgattcaga

SEQ ID NO: 5321813 - DNA, 25 bp, Homo sapien
agctccaaccactcatgttcattat

SEQ ID NO: 5321814 - DNA, 25 bp, Homo sapien
catgttcattatcatgctccatcat

SEQ ID NO: 5321815 - DNA, 25 bp, Homo sapien
catgctccatcatagccacggataa

SEQ ID NO: 5321816 - DNA, 25 bp, Homo sapien
ccatcatagccacggataagcaaag

SEQ ID NO: 5321817 - DNA, 25 bp, Homo sapien
ttaagtttatcatatcgtaaaccgc

SEQ ID NO: 5321818 - DNA, 25 bp, Homo sapien
cacacgacttgtatgtgagatataa

SEQ ID NO: 5321819 - DNA, 25 bp, Homo sapien
cacagtaagtattgaggatttaagt

SEQ ID NO: 5321820 - DNA, 25 bp, Homo sapien
tgagcgtaacaatcataatcacacg

SEQ ID NO: 5321821 - DNA, 25 bp, Homo sapien
tccaccaggtctgcgcagttctcgc

SEQ ID NO: 5321822 - DNA, 25 bp, Homo sapien
ccaggtctgcgcagttctcgcacat

SEQ ID NO: 5321823 - DNA, 25 bp, Homo sapien
acctccaccaggtctgcgcagttct

SEQ ID NO: 5321824 - DNA, 25 bp, Homo sapien
tttcatttaacacctccaccaggtc

SEQ ID NO: 5321825 - DNA, 25 bp, Homo sapien
tcccccgcttcggatcacactgact

SEQ ID NO: 5321826 - DNA, 25 bp, Homo sapien
cgcttcggatcacactgactgatcc

SEQ ID NO: 5321827 - DNA, 25 bp, Homo sapien
cctcccccgcttcggatcacactga

SEQ ID NO: 5321828 - DNA, 25 bp, Homo sapien
cccgcttcggatcacactgactgat

SEQ ID NO: 5321829 - DNA, 25 bp, Homo sapien
ttaggagcggacgagaggcgcctcg

SEQ ID NO: 5321830 - DNA, 25 bp, Homo sapien
gccattttaacagagcgctcgggct

SEQ ID NO: 5321831 - DNA, 25 bp, Homo sapien
ctctttccgcccgggcttaggagcg

SEQ ID NO: 5321832 - DNA, 25 bp, Homo sapien
cgctcgggctgcgctcggctctttc

SEQ ID NO: 5321833 - DNA, 25 bp, Homo sapien
taactgcatcggtgattatcgctac

SEQ ID NO: 5321834 - DNA, 25 bp, Homo sapien
tccttgacgtaactagaaatggcag

SEQ ID NO: 5321835 - DNA, 25 bp, Homo sapien
tctgagagtgaatcagcccagggcc

SEQ ID NO: 5321836 - DNA, 25 bp, Homo sapien
cctggagcagtaagatccttgacgt

SEQ ID NO: 5321837 - DNA, 25 bp, Homo sapien
gttacttgatgcttaaacacaaata

SEQ ID NO: 5321838 - DNA, 25 bp, Homo sapien
tgttacttgatgcttaaacacaaat

SEQ ID NO: 5321839 - DNA, 25 bp, Homo sapien
acacaaatacccactatcattaata

SEQ ID NO: 5321840 - DNA, 25 bp, Homo sapien
atgttacttgatgcttaaacacaaa

SEQ ID NO: 5321841 - DNA, 25 bp, Homo sapien
gaggtgctaacttcagacaatgcag

SEQ ID NO: 5321842 - DNA, 25 bp, Homo sapien
aaagatgcagcctattctaacagga

SEQ ID NO: 5321843 - DNA, 25 bp, Homo sapien
caaacgattcagtccaagaggtgct

SEQ ID NO: 5321844 - DNA, 25 bp, Homo sapien
caaaaagctgttgtcgacaagcgac

SEQ ID NO: 5321845 - DNA, 25 bp, Homo sapien
tcagcctgccgtagggctatttctc

SEQ ID NO: 5321846 - DNA, 25 bp, Homo sapien
tcttcatcagcctgccgtagggcta

SEQ ID NO: 5321847 - DNA, 25 bp, Homo sapien
tctcatgtggattaaagatgccagg

SEQ ID NO: 5321848 - DNA, 25 bp, Homo sapien
cagacatttgacgtttatgtttctc

SEQ ID NO: 5321849 - DNA, 25 bp, Homo sapien
ataaattatccataaagtggctggg

SEQ ID NO: 5321850 - DNA, 25 bp, Homo sapien
cagtatactacatagctgaatgaac

SEQ ID NO: 5321851 - DNA, 25 bp, Homo sapien
tgtcaacgcaataaacttcaacttg

SEQ ID NO: 5321852 - DNA, 25 bp, Homo sapien
atgaactgcaaacctgttaactggt

SEQ ID NO: 5321853 - DNA, 25 bp, Homo sapien
tgagcaactgcgcccagcctaggta

SEQ ID NO: 5321854 - DNA, 25 bp, Homo sapien
cctctcaagtagctgcgaatacagc

SEQ ID NO: 5321855 - DNA, 25 bp, Homo sapien
gcaactgcgcccagcctaggtaact

SEQ ID NO: 5321856 - DNA, 25 bp, Homo sapien
tcaagtagctgcgaatacagctgtg

SEQ ID NO: 5321857 - DNA, 25 bp, Homo sapien
ccaatattccattatacatttaaga

SEQ ID NO: 5321858 - DNA, 25 bp, Homo sapien
aatattccattatacatttaagact

SEQ ID NO: 5321859 - DNA, 25 bp, Homo sapien
caatattccattatacatttaagac

SEQ ID NO: 5321860 - DNA, 25 bp, Homo sapien
tattccattatacatttaagactac

SEQ ID NO: 5321861 - DNA, 25 bp, Homo sapien
agtggtcacatctacccctaatatt

SEQ ID NO: 5321862 - DNA, 25 bp, Homo sapien
taacataaaagtggtcacatctacc

SEQ ID NO: 5321863 - DNA, 25 bp, Homo sapien
ttggcatgacaaatcaagtgataaa

SEQ ID NO: 5321864 - DNA, 25 bp, Homo sapien
acagagattgtgtaaacgtattatc

SEQ ID NO: 5321865 - DNA, 25 bp, Homo sapien
tttgaactaggaaatctcttaaatg

SEQ ID NO: 5321866 - DNA, 25 bp, Homo sapien
ttgaactaggaaatctcttaaatgt

SEQ ID NO: 5321867 - DNA, 25 bp, Homo sapien
aagcaggaatatcttgatttaagct

SEQ ID NO: 5321868 - DNA, 25 bp, Homo sapien
ccttgaaagcaggaatatcttgatt

SEQ ID NO: 5321869 - DNA, 25 bp, Homo sapien
tgtcacaaagagctttacttgagca

SEQ ID NO: 5321870 - DNA, 25 bp, Homo sapien
ctgtcacaaagagctttacttgagc

SEQ ID NO: 5321871 - DNA, 25 bp, Homo sapien
ttgctcgtttaccaggttggagtac

SEQ ID NO: 5321872 - DNA, 25 bp, Homo sapien
tgctcgtttaccaggttggagtaca

SEQ ID NO: 5321873 - DNA, 25 bp, Homo sapien
tttgctcgtttaccaggttggagta

SEQ ID NO: 5321874 - DNA, 25 bp, Homo sapien
caggatgcaaacaaccctctcgcct

SEQ ID NO: 5321875 - DNA, 25 bp, Homo sapien
ccgaccaggaacattctacgtttat

SEQ ID NO: 5321876 - DNA, 25 bp, Homo sapien
gatgcataccacttctgactacttt

SEQ ID NO: 5321877 - DNA, 25 bp, Homo sapien
gcctctccaacagctggtcctacag

SEQ ID NO: 5321878 - DNA, 25 bp, Homo sapien
catatatgcaagaattgatgcatgc

SEQ ID NO: 5321879 - DNA, 25 bp, Homo sapien
gcaagaattgatgcatgcattgtta

SEQ ID NO: 5321880 - DNA, 25 bp, Homo sapien
cttaaggagattagccacatattcc

SEQ ID NO: 5321881 - DNA, 25 bp, Homo sapien
tcttgtaggtgagggaaggccgact

SEQ ID NO: 5321882 - DNA, 25 bp, Homo sapien
tataactatagatcttagcgttttt

SEQ ID NO: 5321883 - DNA, 25 bp, Homo sapien
gcacttaacatttaaatcgtattaa

SEQ ID NO: 5321884 - DNA, 25 bp, Homo sapien
tgtaatataactatagatcttagcg

SEQ ID NO: 5321885 - DNA, 25 bp, Homo sapien
acctcataatctccccgcctcgacc

SEQ ID NO: 5321886 - DNA, 25 bp, Homo sapien
gaaaagatatgctggagaatatcac

SEQ ID NO: 5321887 - DNA, 25 bp, Homo sapien
cttcttcttgtgcaacattttgtaa

SEQ ID NO: 5321888 - DNA, 25 bp, Homo sapien
gtgcaacattttgtaagagtgtaaa

SEQ ID NO: 5321889 - DNA, 25 bp, Homo sapien
aagatatgctggagaatatcacaaa

SEQ ID NO: 5321890 - DNA, 25 bp, Homo sapien
caatggaaagttactacagactgac

SEQ ID NO: 5321891 - DNA, 25 bp, Homo sapien
tattctgaatctaaccctgttctcc

SEQ ID NO: 5321892 - DNA, 25 bp, Homo sapien
aaagacatagaataccaatggaaag

SEQ ID NO: 5321893 - DNA, 25 bp, Homo sapien
cactcatgatagtatttagctctta

SEQ ID NO: 5321894 - DNA, 25 bp, Homo sapien
ccgtatctgcgacattcctcatagt

SEQ ID NO: 5321895 - DNA, 25 bp, Homo sapien
taaactgtgtaggtggaatagcaag

SEQ ID NO: 5321896 - DNA, 25 bp, Homo sapien
tgtttgaaagcccaaatgatggaat

SEQ ID NO: 5321897 - DNA, 25 bp, Homo sapien
gaattgacagcctgaagtagtaaga

SEQ ID NO: 5321898 - DNA, 25 bp, Homo sapien
ggcacccagcctaatctttgagtag

SEQ ID NO: 5321899 - DNA, 25 bp, Homo sapien
tacgttcataaaaggatgccccgac

SEQ ID NO: 5321900 - DNA, 25 bp, Homo sapien
gaaactgtcccgttacgcacatgag

SEQ ID NO: 5321901 - DNA, 25 bp, Homo sapien
gaatgcctcctgaaaggtaaaccca

SEQ ID NO: 5321902 - DNA, 25 bp, Homo sapien
cctaacttgttgacaattatggcca

SEQ ID NO: 5321903 - DNA, 25 bp, Homo sapien
atttcagctgttatatgtcccccta

SEQ ID NO: 5321904 - DNA, 25 bp, Homo sapien
gccatagtactaagcacttctggtt

SEQ ID NO: 5321905 - DNA, 25 bp, Homo sapien
tctgataatcaatgagaactgcatc

SEQ ID NO: 5321906 - DNA, 25 bp, Homo sapien
agcatgatcatctactgaaaacagg

SEQ ID NO: 5321907 - DNA, 25 bp, Homo sapien
cctgtctatgagatgtagcatgatc

SEQ ID NO: 5321908 - DNA, 25 bp, Homo sapien
agtgggtgtctccaacttaggtggc

SEQ ID NO: 5321909 - DNA, 25 bp, Homo sapien
tgaggctcaaaattcagtgggtgtc

SEQ ID NO: 5321910 - DNA, 25 bp, Homo sapien
taatacgcatgttcagaacctttcg

SEQ ID NO: 5321911 - DNA, 25 bp, Homo sapien
gagccaccgtgaaaagccaagacaa

SEQ ID NO: 5321912 - DNA, 25 bp, Homo sapien
ccgacacgtgctcaagcttcttgta

SEQ ID NO: 5321913 - DNA, 25 bp, Homo sapien
ggttagccaacttaagtattccaca

SEQ ID NO: 5321914 - DNA, 25 bp, Homo sapien
acttctaatcaatggttgctttgta

SEQ ID NO: 5321915 - DNA, 25 bp, Homo sapien
tccctttttacagttcgcatacttc

SEQ ID NO: 5321916 - DNA, 25 bp, Homo sapien
gatcggctcacccaaccagatatta

SEQ ID NO: 5321917 - DNA, 25 bp, Homo sapien
catctgtggatcattggatcggctc

SEQ ID NO: 5321918 - DNA, 25 bp, Homo sapien
tacaaaggggtgtccaacagctttg

SEQ ID NO: 5321919 - DNA, 25 bp, Homo sapien
tttcactgaggcacttgtatacatt

SEQ ID NO: 5321920 - DNA, 25 bp, Homo sapien
ttccaagctgaattacaaaggggtg

SEQ ID NO: 5321921 - DNA, 25 bp, Homo sapien
gaattacaaaggggtgtccaacagc

SEQ ID NO: 5321922 - DNA, 25 bp, Homo sapien
caccgagcccggcccagatttttca

SEQ ID NO: 5321923 - DNA, 25 bp, Homo sapien
gagcccggcccagatttttcattta

SEQ ID NO: 5321924 - DNA, 25 bp, Homo sapien
ccgagcccggcccagatttttcatt

SEQ ID NO: 5321925 - DNA, 25 bp, Homo sapien
cgagcccggcccagatttttcattt

SEQ ID NO: 5321926 - DNA, 25 bp, Homo sapien
cacttgattagggagtaacatgtac

SEQ ID NO: 5321927 - DNA, 25 bp, Homo sapien
gatctgtttgtgcaccaatcatgta

SEQ ID NO: 5321928 - DNA, 25 bp, Homo sapien
tgcctgctggattatactatcccac

SEQ ID NO: 5321929 - DNA, 25 bp, Homo sapien
ccacagcttcataaaacgtatgaac

SEQ ID NO: 5321930 - DNA, 25 bp, Homo sapien
gaggctgaagatcacaaataatagt

SEQ ID NO: 5321931 - DNA, 25 bp, Homo sapien
aaagtatcacaagccatatcctgga

SEQ ID NO: 5321932 - DNA, 25 bp, Homo sapien
tgcctgcggcatttttgggctattt

SEQ ID NO: 5321933 - DNA, 25 bp, Homo sapien
tgaacctgaacgaaatgcctgcggc

SEQ ID NO: 5321934 - DNA, 25 bp, Homo sapien
tattgacctactatgtacatgatat

SEQ ID NO: 5321935 - DNA, 25 bp, Homo sapien
gcaataatagctttattatctttgc

SEQ ID NO: 5321936 - DNA, 25 bp, Homo sapien
cagtgagctctcaaaaaacgtgggt

SEQ ID NO: 5321937 - DNA, 25 bp, Homo sapien
atgcatgaattcgaacagcttgtta

SEQ ID NO: 5321938 - DNA, 25 bp, Homo sapien
aatcgtttttcgtcctcttcatgca

SEQ ID NO: 5321939 - DNA, 25 bp, Homo sapien
gagcctattgcccaacacaatgtat

SEQ ID NO: 5321940 - DNA, 25 bp, Homo sapien
tgtaccattcacttgattgtgaagc

SEQ ID NO: 5321941 - DNA, 25 bp, Homo sapien
ttcatgcattgctccactaatggag

SEQ ID NO: 5321942 - DNA, 25 bp, Homo sapien
taatgagcagaattttattgatgag

SEQ ID NO: 5321943 - DNA, 25 bp, Homo sapien
ccaccccagaatagatttataaagg

SEQ ID NO: 5321944 - DNA, 25 bp, Homo sapien
caccccagaatagatttataaaggt

SEQ ID NO: 5321945 - DNA, 25 bp, Homo sapien
caaatgcaaataatgagcagaattt

SEQ ID NO: 5321946 - DNA, 25 bp, Homo sapien
caaatttatggaatctgtatccttc

SEQ ID NO: 5321947 - DNA, 25 bp, Homo sapien
ttatggaatctgtatccttcatgaa

SEQ ID NO: 5321948 - DNA, 25 bp, Homo sapien
cattcgactaaccattaataaacgg

SEQ ID NO: 5321949 - DNA, 25 bp, Homo sapien
tctctacaaccaatacttcctctgg

SEQ ID NO: 5321950 - DNA, 25 bp, Homo sapien
caatgttgatactgagagaaggacc

SEQ ID NO: 5321951 - DNA, 25 bp, Homo sapien
caagccagccatgtgtagggattca

SEQ ID NO: 5321952 - DNA, 25 bp, Homo sapien
attccaactattccggagggccgag

SEQ ID NO: 5321953 - DNA, 25 bp, Homo sapien
gagaaggaccacactcttgagaatc

SEQ ID NO: 5321954 - DNA, 25 bp, Homo sapien
tcctgggaggaacatcaaaatgttg

SEQ ID NO: 5321955 - DNA, 25 bp, Homo sapien
acttccagaaagcaacggagaggca

SEQ ID NO: 5321956 - DNA, 25 bp, Homo sapien
ttcttctacttcagataccaacaac

SEQ ID NO: 5321957 - DNA, 25 bp, Homo sapien
ctctctatagagttcagcagccaaa

SEQ ID NO: 5321958 - DNA, 25 bp, Homo sapien
ccttgggtgccaataagtggtatca

SEQ ID NO: 5321959 - DNA, 25 bp, Homo sapien
caaatagacagcaaactctggagta

SEQ ID NO: 5321960 - DNA, 25 bp, Homo sapien
ccaaatgtaccatcacagaggagag

SEQ ID NO: 5321961 - DNA, 25 bp, Homo sapien
taaagggtcaccttcgggtgatgaa

SEQ ID NO: 5321962 - DNA, 25 bp, Homo sapien
tgttccttaagaaaggtgcagagaa

SEQ ID NO: 5321963 - DNA, 25 bp, Homo sapien
tgagtacgcaagtcgaatattggta

SEQ ID NO: 5321964 - DNA, 25 bp, Homo sapien
tcttttccatttgagtacgcaagtc

SEQ ID NO: 5321965 - DNA, 25 bp, Homo sapien
ttttctataagttgatcatgttcct

SEQ ID NO: 5321966 - DNA, 25 bp, Homo sapien
gcaatctcagtgaggcacttcagag

SEQ ID NO: 5321967 - DNA, 25 bp, Homo sapien
tcttcatattggcttacactcacac

SEQ ID NO: 5321968 - DNA, 25 bp, Homo sapien
caatctcagtgaggcacttcagaga

SEQ ID NO: 5321969 - DNA, 25 bp, Homo sapien
tggcttacactcacaccagcaatct

SEQ ID NO: 5321970 - DNA, 25 bp, Homo sapien
gaatctgtgatatgacttttaggaa

SEQ ID NO: 5321971 - DNA, 25 bp, Homo sapien
gagaagataaacagttatcgtctgg

SEQ ID NO: 5321972 - DNA, 25 bp, Homo sapien
taaacatacctaataatctggtgat

SEQ ID NO: 5321973 - DNA, 25 bp, Homo sapien
cacaggacctaaaacttgtgattgc

SEQ ID NO: 5321974 - DNA, 25 bp, Homo sapien
ccagttcagaaatctgagcaatgtt

SEQ ID NO: 5321975 - DNA, 25 bp, Homo sapien
gtttccaaggttgcatgtacaagtg

SEQ ID NO: 5321976 - DNA, 25 bp, Homo sapien
tatcccaggggaatccagttcagaa

SEQ ID NO: 5321977 - DNA, 25 bp, Homo sapien
caatgtttccaaggttgcatgtaca

SEQ ID NO: 5321978 - DNA, 25 bp, Homo sapien
atatctgtgagaattcattgcacat

SEQ ID NO: 5321979 - DNA, 25 bp, Homo sapien
actgacacagttgaaatatctgtga

SEQ ID NO: 5321980 - DNA, 25 bp, Homo sapien
acacagttgaaatatctgtgagaat

SEQ ID NO: 5321981 - DNA, 25 bp, Homo sapien
gaatcaccatattattttgacagag

SEQ ID NO: 5321982 - DNA, 25 bp, Homo sapien
tcactcaagagtttaagaatcacca

SEQ ID NO: 5321983 - DNA, 25 bp, Homo sapien
gatttgacttgggttatctgtccac

SEQ ID NO: 5321984 - DNA, 25 bp, Homo sapien
tacttgctccaacaatatcactgat

SEQ ID NO: 5321985 - DNA, 25 bp, Homo sapien
ctgaacaaggatcatatttaatttt

SEQ ID NO: 5321986 - DNA, 25 bp, Homo sapien
catatttaattttccgatatacacc

SEQ ID NO: 5321987 - DNA, 25 bp, Homo sapien
atatttaattttccgatatacacct

SEQ ID NO: 5321988 - DNA, 25 bp, Homo sapien
aattaggttgtagtcagactcaata

SEQ ID NO: 5321989 - DNA, 25 bp, Homo sapien
taggttgtagtcagactcaatatct

SEQ ID NO: 5321990 - DNA, 25 bp, Homo sapien
ttaggttgtagtcagactcaatatc

SEQ ID NO: 5321991 - DNA, 25 bp, Homo sapien
gaattaggttgtagtcagactcaat

SEQ ID NO: 5321992 - DNA, 25 bp, Homo sapien
cagatgacgtcttgataatgaggcc

SEQ ID NO: 5321993 - DNA, 25 bp, Homo sapien
caagttgggtcagatgacgtcttga

SEQ ID NO: 5321994 - DNA, 25 bp, Homo sapien
ttgataatgaggccaacaacgtatt

SEQ ID NO: 5321995 - DNA, 25 bp, Homo sapien
ctctacacaagttgggtcagatgac

SEQ ID NO: 5321996 - DNA, 25 bp, Homo sapien
acaagccaacaagcccagcctataa

SEQ ID NO: 5321997 - DNA, 25 bp, Homo sapien
cagcctataacaaactgctattcca

SEQ ID NO: 5321998 - DNA, 25 bp, Homo sapien
aacaagcccagcctataacaaactg

SEQ ID NO: 5321999 - DNA, 25 bp, Homo sapien
aatcaatgaatttaatgtgctattc

SEQ ID NO: 5322000 - DNA, 25 bp, Homo sapien
ggctcactgacacggccgcctcctg

SEQ ID NO: 5322001 - DNA, 25 bp, Homo sapien
ctaggctcactgacacggccgcctc

SEQ ID NO: 5322002 - DNA, 25 bp, Homo sapien
tctaggctcactgacacggccgcct

SEQ ID NO: 5322003 - DNA, 25 bp, Homo sapien
taggctcactgacacggccgcctcc

SEQ ID NO: 5322004 - DNA, 25 bp, Homo sapien
tctcattgaagttgtgtgtctttga

SEQ ID NO: 5322005 - DNA, 25 bp, Homo sapien
gaagagaaagatgcattcctagtga

SEQ ID NO: 5322006 - DNA, 25 bp, Homo sapien
attcctagtgagctgaaatagtgcc

SEQ ID NO: 5322007 - DNA, 25 bp, Homo sapien
gtgacagatcaaggctccatatcat

SEQ ID NO: 5322008 - DNA, 25 bp, Homo sapien
taacttagaaggtacacaccatctg

SEQ ID NO: 5322009 - DNA, 25 bp, Homo sapien
tactcaatgatagcgtaaaaagcac

SEQ ID NO: 5322010 - DNA, 25 bp, Homo sapien
caagtcatagagttgtacatcagca

SEQ ID NO: 5322011 - DNA, 25 bp, Homo sapien
gtcatattcccatagaagcaactca

SEQ ID NO: 5322012 - DNA, 25 bp, Homo sapien
tcttacattatcctaccatggttta

SEQ ID NO: 5322013 - DNA, 25 bp, Homo sapien
gtgagacatcgcaccaggcattaag

SEQ ID NO: 5322014 - DNA, 25 bp, Homo sapien
caaaaaacgatttggaatgcctgtc

SEQ ID NO: 5322015 - DNA, 25 bp, Homo sapien
tgtcaactctctgagattagactga

SEQ ID NO: 5322016 - DNA, 25 bp, Homo sapien
tatcatctagttctgaaaacttccc

SEQ ID NO: 5322017 - DNA, 25 bp, Homo sapien
tccatagtcaacgaactatgaaaag

SEQ ID NO: 5322018 - DNA, 25 bp, Homo sapien
tgaattccatagtcaacgaactatg

SEQ ID NO: 5322019 - DNA, 25 bp, Homo sapien
tgctctgaattccatagtcaacgaa

SEQ ID NO: 5322020 - DNA, 25 bp, Homo sapien
tactcagcatatgtaagcacagggc

SEQ ID NO: 5322021 - DNA, 25 bp, Homo sapien
tgagactgacatgaccactttggaa

SEQ ID NO: 5322022 - DNA, 25 bp, Homo sapien
tataccaaatgtcagccgagatgtg

SEQ ID NO: 5322023 - DNA, 25 bp, Homo sapien
ccaaaacatccatatgggctgggcg

SEQ ID NO: 5322024 - DNA, 25 bp, Homo sapien
ccacttcagcctcacgaagtcctgg

SEQ ID NO: 5322025 - DNA, 25 bp, Homo sapien
tcccacttcagcctcacgaagtcct

SEQ ID NO: 5322026 - DNA, 25 bp, Homo sapien
tggccttaaatgaccctcccacttc

SEQ ID NO: 5322027 - DNA, 25 bp, Homo sapien
cttctggccttaaatgaccctccca

SEQ ID NO: 5322028 - DNA, 25 bp, Homo sapien
tttccaaaatttgtagtccatagta

SEQ ID NO: 5322029 - DNA, 25 bp, Homo sapien
attttccaaaatttgtagtccatag

SEQ ID NO: 5322030 - DNA, 25 bp, Homo sapien
ttcgcactggttccttggaagaatc

SEQ ID NO: 5322031 - DNA, 25 bp, Homo sapien
gaatcttccaccttgtttttatcac

SEQ ID NO: 5322032 - DNA, 25 bp, Homo sapien
tctctcccagacataaagactttgc

SEQ ID NO: 5322033 - DNA, 25 bp, Homo sapien
caactgtataaaggtagcataagct

SEQ ID NO: 5322034 - DNA, 25 bp, Homo sapien
gcccaggttaggtcaaaggaataca

SEQ ID NO: 5322035 - DNA, 25 bp, Homo sapien
ttgaagcagggagcccaataaatgc

SEQ ID NO: 5322036 - DNA, 25 bp, Homo sapien
gcatgaaatgatccctatggtagaa

SEQ ID NO: 5322037 - DNA, 25 bp, Homo sapien
tactgagcccttagaaatacttatt

SEQ ID NO: 5322038 - DNA, 25 bp, Homo sapien
ctgctgagttatgaagatgagggac

SEQ ID NO: 5322039 - DNA, 25 bp, Homo sapien
tgagggacagataacagcaaagact

SEQ ID NO: 5322040 - DNA, 25 bp, Homo sapien
gtcaaagcctagctgtgtcagttgc

SEQ ID NO: 5322041 - DNA, 25 bp, Homo sapien
gcctgccgtcaaagcctagctgtgt

SEQ ID NO: 5322042 - DNA, 25 bp, Homo sapien
tggaggcctgccgtcaaagcctagc

SEQ ID NO: 5322043 - DNA, 25 bp, Homo sapien
cttgtggaggcctgccgtcaaagcc

SEQ ID NO: 5322044 - DNA, 25 bp, Homo sapien
ccaaatgtcatagtgcataaattta

SEQ ID NO: 5322045 - DNA, 25 bp, Homo sapien
aagcaatcaacataatggaacatta

SEQ ID NO: 5322046 - DNA, 25 bp, Homo sapien
taaatttagcaccaaatcatttgta

SEQ ID NO: 5322047 - DNA, 25 bp, Homo sapien
atgattaatatcaggtagtgttaac

SEQ ID NO: 5322048 - DNA, 25 bp, Homo sapien
gtatatcaagtggaaacctttcgtg

SEQ ID NO: 5322049 - DNA, 25 bp, Homo sapien
cacaacttggtgtcagaggtgcctg

SEQ ID NO: 5322050 - DNA, 25 bp, Homo sapien
tagggttttaagctgtccacacaac

SEQ ID NO: 5322051 - DNA, 25 bp, Homo sapien
gagtgctgtcccattagaagcccaa

SEQ ID NO: 5322052 - DNA, 25 bp, Homo sapien
tcgactcttgtccaagcatcaggat

SEQ ID NO: 5322053 - DNA, 25 bp, Homo sapien
ttccaaaattgtgtcgactcttgtc

SEQ ID NO: 5322054 - DNA, 25 bp, Homo sapien
tgtgtcgactcttgtccaagcatca

SEQ ID NO: 5322055 - DNA, 25 bp, Homo sapien
aattgtgtcgactcttgtccaagca

SEQ ID NO: 5322056 - DNA, 25 bp, Homo sapien
ggcacaaattctaattggacagaga

SEQ ID NO: 5322057 - DNA, 25 bp, Homo sapien
tgagcaaggcacaaattctaattgg

SEQ ID NO: 5322058 - DNA, 25 bp, Homo sapien
ttctaattggacagagattctatta

SEQ ID NO: 5322059 - DNA, 25 bp, Homo sapien
aaactactgagcaaggcacaaattc

SEQ ID NO: 5322060 - DNA, 25 bp, Homo sapien
agtttttaagatccagccatgtcga

SEQ ID NO: 5322061 - DNA, 25 bp, Homo sapien
gatccagccatgtcgacattttatt

SEQ ID NO: 5322062 - DNA, 25 bp, Homo sapien
taagatccagccatgtcgacatttt

SEQ ID NO: 5322063 - DNA, 25 bp, Homo sapien
ttttaagatccagccatgtcgacat

SEQ ID NO: 5322064 - DNA, 25 bp, Homo sapien
aaaagcaatggcttaatctttttca

SEQ ID NO: 5322065 - DNA, 25 bp, Homo sapien
aattctattgacaaaaagcaatggc

SEQ ID NO: 5322066 - DNA, 25 bp, Homo sapien
caacagcttttaattctattgacaa

SEQ ID NO: 5322067 - DNA, 25 bp, Homo sapien
taccaacagcttttaattctattga

SEQ ID NO: 5322068 - DNA, 25 bp, Homo sapien
tacagagaacctttaatacctacaa

SEQ ID NO: 5322069 - DNA, 25 bp, Homo sapien
tagaagaatcgtattagtgccaaac

SEQ ID NO: 5322070 - DNA, 25 bp, Homo sapien
caacaactctgttacactgtcataa

SEQ ID NO: 5322071 - DNA, 25 bp, Homo sapien
tggctcttaaggacaaaacaagtat

SEQ ID NO: 5322072 - DNA, 25 bp, Homo sapien
gcagctgacgagctgcatggtctgc

SEQ ID NO: 5322073 - DNA, 25 bp, Homo sapien
agctgacgagctgcatggtctgcta

SEQ ID NO: 5322074 - DNA, 25 bp, Homo sapien
tccttctccatggtataagcaattc

SEQ ID NO: 5322075 - DNA, 25 bp, Homo sapien
taagcaattcaccacattatctaat

SEQ ID NO: 5322076 - DNA, 25 bp, Homo sapien
ttatggtcctaaaacgtgatacagt

SEQ ID NO: 5322077 - DNA, 25 bp, Homo sapien
tgtttagtttatacaccaggaagac

SEQ ID NO: 5322078 - DNA, 25 bp, Homo sapien
ttatttaaacgcatccactattagg

SEQ ID NO: 5322079 - DNA, 25 bp, Homo sapien
tcccaagtagggtcttctgaataac

SEQ ID NO: 5322080 - DNA, 25 bp, Homo sapien
gattctactctaagatgctggcaca

SEQ ID NO: 5322081 - DNA, 25 bp, Homo sapien
gctacttcgcctaaatatgcactgg

SEQ ID NO: 5322082 - DNA, 25 bp, Homo sapien
gatgcctgagactctgaggaaccaa

SEQ ID NO: 5322083 - DNA, 25 bp, Homo sapien
cattttaggaactttcgtggaccag

SEQ ID NO: 5322084 - DNA, 25 bp, Homo sapien
ccaaaagatgagtcacctatgattg

SEQ ID NO: 5322085 - DNA, 25 bp, Homo sapien
tgttacaacagattagaactccaaa

SEQ ID NO: 5322086 - DNA, 25 bp, Homo sapien
caccaagatccatgtatcaaaagtt

SEQ ID NO: 5322087 - DNA, 25 bp, Homo sapien
gatgagacttcaaaacgtttcgtag

SEQ ID NO: 5322088 - DNA, 25 bp, Homo sapien
caaacaagccatagtgcgagaggtg

SEQ ID NO: 5322089 - DNA, 25 bp, Homo sapien
taactatagcacacaggagcacgca

SEQ ID NO: 5322090 - DNA, 25 bp, Homo sapien
ggcaatcgcccgcttcattcaggaa

SEQ ID NO: 5322091 - DNA, 25 bp, Homo sapien
tagaccaggcgccttaagttcaccg

SEQ ID NO: 5322092 - DNA, 25 bp, Homo sapien
caggcggacgtttcaatgctgctgc

SEQ ID NO: 5322093 - DNA, 25 bp, Homo sapien
agagctttcgagtttccttgctgga

SEQ ID NO: 5322094 - DNA, 25 bp, Homo sapien
ttcacatgccactctgcaaaaccgg

SEQ ID NO: 5322095 - DNA, 25 bp, Homo sapien
ccacgtgatgcaggcggacgtttca

SEQ ID NO: 5322096 - DNA, 25 bp, Homo sapien
ccagagattgaaccaactgctcctt

SEQ ID NO: 5322097 - DNA, 25 bp, Homo sapien
cagagattgaaccaactgctccttc

SEQ ID NO: 5322098 - DNA, 25 bp, Homo sapien
ggaaaagggcaaaaagagctcaata

SEQ ID NO: 5322099 - DNA, 25 bp, Homo sapien
tgttcctcagcgactggtggttccc

SEQ ID NO: 5322100 - DNA, 25 bp, Homo sapien
gggaataaatgctcccgcccggctg

SEQ ID NO: 5322101 - DNA, 25 bp, Homo sapien
tatttactatttcagggacgcttcc

SEQ ID NO: 5322102 - DNA, 25 bp, Homo sapien
ctagtgcctcaaactcggaaccggt

SEQ ID NO: 5322103 - DNA, 25 bp, Homo sapien
aaagccgcgtggaggattcgttcga

SEQ ID NO: 5322104 - DNA, 25 bp, Homo sapien
ttggtcagttccagctacagccgcg

SEQ ID NO: 5322105 - DNA, 25 bp, Homo sapien
ggttgagttttcagcccatggcgcc

SEQ ID NO: 5322106 - DNA, 25 bp, Homo sapien
acaaagagcaatcatggttttttat

SEQ ID NO: 5322107 - DNA, 25 bp, Homo sapien
caaagagcaatcatggttttttatt

SEQ ID NO: 5322108 - DNA, 25 bp, Homo sapien
tatatccttcgcataccgatggaaa

SEQ ID NO: 5322109 - DNA, 25 bp, Homo sapien
atttctggatcagactgtgcaggtc

SEQ ID NO: 5322110 - DNA, 25 bp, Homo sapien
aaacctatatccttcgcataccgat

SEQ ID NO: 5322111 - DNA, 25 bp, Homo sapien
ttctggatcagactgtgcaggtctg

SEQ ID NO: 5322112 - DNA, 25 bp, Homo sapien
tgcaacgacgtaaaaggaaagccat

SEQ ID NO: 5322113 - DNA, 25 bp, Homo sapien
caggaatgcaacgacgtaaaaggaa

SEQ ID NO: 5322114 - DNA, 25 bp, Homo sapien
gaatgcaacgacgtaaaaggaaagc

SEQ ID NO: 5322115 - DNA, 25 bp, Homo sapien
ctcaggaatgcaacgacgtaaaagg

SEQ ID NO: 5322116 - DNA, 25 bp, Homo sapien
tcctacttcggaatgcagcaactcc

SEQ ID NO: 5322117 - DNA, 25 bp, Homo sapien
cagggcaagcgccttcagtcctact

SEQ ID NO: 5322118 - DNA, 25 bp, Homo sapien
tcagcacatatttggaactccatga

SEQ ID NO: 5322119 - DNA, 25 bp, Homo sapien
tatttggaactccatgaaaacagct

SEQ ID NO: 5322120 - DNA, 25 bp, Homo sapien
gaaaagaaccatatgtctcctgtga

SEQ ID NO: 5322121 - DNA, 25 bp, Homo sapien
tattaagtcaagagtggatgtcttg

SEQ ID NO: 5322122 - DNA, 25 bp, Homo sapien
ctgaaaatggactgttgagaaccaa

SEQ ID NO: 5322123 - DNA, 25 bp, Homo sapien
tccctgcttctggataaacaatgcc

SEQ ID NO: 5322124 - DNA, 25 bp, Homo sapien
tatagtccttttcaccacggcatgc

SEQ ID NO: 5322125 - DNA, 25 bp, Homo sapien
tttatagtccttttcaccacggcat

SEQ ID NO: 5322126 - DNA, 25 bp, Homo sapien
gtccttttcaccacggcatgcttaa

SEQ ID NO: 5322127 - DNA, 25 bp, Homo sapien
ttcaccacggcatgcttaaatataa

SEQ ID NO: 5322128 - DNA, 25 bp, Homo sapien
tctgagggccatggtaactgctgta

SEQ ID NO: 5322129 - DNA, 25 bp, Homo sapien
taattgctgctgttgctcatccaga

SEQ ID NO: 5322130 - DNA, 25 bp, Homo sapien
tgctttgctcaggagtggagatcca

SEQ ID NO: 5322131 - DNA, 25 bp, Homo sapien
tccagaacatgcatccaggtgagaa

SEQ ID NO: 5322132 - DNA, 25 bp, Homo sapien
ttccagcactcgatttttccctcag

SEQ ID NO: 5322133 - DNA, 25 bp, Homo sapien
agcttccagcactcgatttttccct

SEQ ID NO: 5322134 - DNA, 25 bp, Homo sapien
ccagcactcgatttttccctcagat

SEQ ID NO: 5322135 - DNA, 25 bp, Homo sapien
tgagcttccagcactcgatttttcc

SEQ ID NO: 5322136 - DNA, 25 bp, Homo sapien
ctgggactttagcagcaggtgcttt

SEQ ID NO: 5322137 - DNA, 25 bp, Homo sapien
gcattgaggtctacctgctgccagg

SEQ ID NO: 5322138 - DNA, 25 bp, Homo sapien
cattgaggtctacctgctgccaggc

SEQ ID NO: 5322139 - DNA, 25 bp, Homo sapien
tgcattgaggtctacctgctgccag

SEQ ID NO: 5322140 - DNA, 25 bp, Homo sapien
gcatttgaaagacacggcctgtccc

SEQ ID NO: 5322141 - DNA, 25 bp, Homo sapien
atttgaaagacacggcctgtcccat

SEQ ID NO: 5322142 - DNA, 25 bp, Homo sapien
gcatgcatttgaaagacacggcctg

SEQ ID NO: 5322143 - DNA, 25 bp, Homo sapien
tgaaagacacggcctgtcccattac

SEQ ID NO: 5322144 - DNA, 25 bp, Homo sapien
agctttccagcataaggtccaaagg

SEQ ID NO: 5322145 - DNA, 25 bp, Homo sapien
ctttccagcataaggtccaaaggag

SEQ ID NO: 5322146 - DNA, 25 bp, Homo sapien
atctacaactgcgaccagctttcca

SEQ ID NO: 5322147 - DNA, 25 bp, Homo sapien
tacaactgcgaccagctttccagca

SEQ ID NO: 5322148 - DNA, 25 bp, Homo sapien
caagagcattgattaggaattgcac

SEQ ID NO: 5322149 - DNA, 25 bp, Homo sapien
gaatctgctgatgatagccttacta

SEQ ID NO: 5322150 - DNA, 25 bp, Homo sapien
cagtggaatgacaggccagaagcca

SEQ ID NO: 5322151 - DNA, 25 bp, Homo sapien
ggaattgcacttggccacatgtaat

SEQ ID NO: 5322152 - DNA, 25 bp, Homo sapien
caagcatctgacaagggtcatccca

SEQ ID NO: 5322153 - DNA, 25 bp, Homo sapien
ggtggaagcaagcacattagacaga

SEQ ID NO: 5322154 - DNA, 25 bp, Homo sapien
gagcatagcacaagcatctgacaag

SEQ ID NO: 5322155 - DNA, 25 bp, Homo sapien
gcaagcacattagacagagagacaa

SEQ ID NO: 5322156 - DNA, 25 bp, Homo sapien
tcaatacctgaaaagtccaacaact

SEQ ID NO: 5322157 - DNA, 25 bp, Homo sapien
aaatgattctgtaggctggacccgg

SEQ ID NO: 5322158 - DNA, 25 bp, Homo sapien
caacttagggactggttgaacaaat

SEQ ID NO: 5322159 - DNA, 25 bp, Homo sapien
cattactgggagataacgcgcttac

SEQ ID NO: 5322160 - DNA, 25 bp, Homo sapien
gacagctcgtgacctcagaaggagg

SEQ ID NO: 5322161 - DNA, 25 bp, Homo sapien
aattctgggcatcggacggacagct

SEQ ID NO: 5322162 - DNA, 25 bp, Homo sapien
cacatcaggcctcggaattctgggc

SEQ ID NO: 5322163 - DNA, 25 bp, Homo sapien
tatgtactctcgaactactgctgct

SEQ ID NO: 5322164 - DNA, 25 bp, Homo sapien
tgccccgcggaaagccgtttctatg

SEQ ID NO: 5322165 - DNA, 25 bp, Homo sapien
tctaagggaacgtcggcgagtcgac

SEQ ID NO: 5322166 - DNA, 25 bp, Homo sapien
tcacacaggcgagacttggagtctg

SEQ ID NO: 5322167 - DNA, 25 bp, Homo sapien
tatgggtgacgacgtatggcaacgc

SEQ ID NO: 5322168 - DNA, 25 bp, Homo sapien
tacgataccaatcgcgtggcgggtg

SEQ ID NO: 5322169 - DNA, 25 bp, Homo sapien
taacgagtcgccgtggtcaaacaag

SEQ ID NO: 5322170 - DNA, 25 bp, Homo sapien
aaagttcggatcagctgccggccgt

SEQ ID NO: 5322171 - DNA, 25 bp, Homo sapien
tggtactgccgaacccgaggaatga

SEQ ID NO: 5322172 - DNA, 25 bp, Homo sapien
ccggtaccgtcgttagattgttgct

SEQ ID NO: 5322173 - DNA, 25 bp, Homo sapien
cattgcgtctgcatgcatgtaaaca

SEQ ID NO: 5322174 - DNA, 25 bp, Homo sapien
ttaccatgtctttaccaaacaggga

SEQ ID NO: 5322175 - DNA, 25 bp, Homo sapien
caagcatcgtgtccatgagtcaggc

SEQ ID NO: 5322176 - DNA, 25 bp, Homo sapien
cattctcggtcagatggcagacggt

SEQ ID NO: 5322177 - DNA, 25 bp, Homo sapien
gggcccttcgctttcttcgcatgga

SEQ ID NO: 5322178 - DNA, 25 bp, Homo sapien
gctgctcacatgatccattctcggt

SEQ ID NO: 5322179 - DNA, 25 bp, Homo sapien
taatatgtggtttgtcactggctgc

SEQ ID NO: 5322180 - DNA, 25 bp, Homo sapien
aagtaaacatttgcccctgatggag

SEQ ID NO: 5322181 - DNA, 25 bp, Homo sapien
gcataaattgccagtttggaaacac

SEQ ID NO: 5322182 - DNA, 25 bp, Homo sapien
gaacacaactgggtctagcagtgaa

SEQ ID NO: 5322183 - DNA, 25 bp, Homo sapien
gaaacactgctattacatacacctg

SEQ ID NO: 5322184 - DNA, 25 bp, Homo sapien
tacttttaaaaatggctcagagcag

SEQ ID NO: 5322185 - DNA, 25 bp, Homo sapien
ttttaaaaatggctcagagcagcaa

SEQ ID NO: 5322186 - DNA, 25 bp, Homo sapien
acttttaaaaatggctcagagcagc

SEQ ID NO: 5322187 - DNA, 25 bp, Homo sapien
ttaaaaatggctcagagcagcaaaa

SEQ ID NO: 5322188 - DNA, 25 bp, Homo sapien
tccttgtaagaatcctggctgttgg

SEQ ID NO: 5322189 - DNA, 25 bp, Homo sapien
aaatgaccaatcagctggattcagg

SEQ ID NO: 5322190 - DNA, 25 bp, Homo sapien
aacagccctgcacatatcagaagcg

SEQ ID NO: 5322191 - DNA, 25 bp, Homo sapien
tctaaacacaaatgcggctgctgac

SEQ ID NO: 5322192 - DNA, 25 bp, Homo sapien
caaactcatcagatattcctagtgc

SEQ ID NO: 5322193 - DNA, 25 bp, Homo sapien
ttgaaacaaactcatcagatattcc

SEQ ID NO: 5322194 - DNA, 25 bp, Homo sapien
ctcatcagatattcctagtgctttt

SEQ ID NO: 5322195 - DNA, 25 bp, Homo sapien
cagatattcctagtgcttttagggt

SEQ ID NO: 5322196 - DNA, 25 bp, Homo sapien
gaatataaccagagaagctcccaca

SEQ ID NO: 5322197 - DNA, 25 bp, Homo sapien
acatatgagtcccaagggaggacat

SEQ ID NO: 5322198 - DNA, 25 bp, Homo sapien
gataattaagttcagcagtcacagt

SEQ ID NO: 5322199 - DNA, 25 bp, Homo sapien
tgtttgaggataggtacacacactg

SEQ ID NO: 5322200 - DNA, 25 bp, Homo sapien
atttatcaaacttatgtgcttcatc

SEQ ID NO: 5322201 - DNA, 25 bp, Homo sapien
tttatcaaacttatgtgcttcatca

SEQ ID NO: 5322202 - DNA, 25 bp, Homo sapien
tatcaaacttatgtgcttcatcaaa

SEQ ID NO: 5322203 - DNA, 25 bp, Homo sapien
atcaaacttatgtgcttcatcaaaa

SEQ ID NO: 5322204 - DNA, 25 bp, Homo sapien
taaatttaggagctaaagctgtaaa

SEQ ID NO: 5322205 - DNA, 25 bp, Homo sapien
taagcaaaattactcattggctgat

SEQ ID NO: 5322206 - DNA, 25 bp, Homo sapien
caacaataatgtatctcaacagtta

SEQ ID NO: 5322207 - DNA, 25 bp, Homo sapien
tgatatgatgaagccaacacaaaca

SEQ ID NO: 5322208 - DNA, 25 bp, Homo sapien
atagcagtggcctcttttttaattt

SEQ ID NO: 5322209 - DNA, 25 bp, Homo sapien
ctgagcaactctttcaaatagcagt

SEQ ID NO: 5322210 - DNA, 25 bp, Homo sapien
gcaactctttcaaatagcagtggcc

SEQ ID NO: 5322211 - DNA, 25 bp, Homo sapien
aatagcagtggcctcttttttaatt

SEQ ID NO: 5322212 - DNA, 25 bp, Homo sapien
tctttcttctagttctcgttggtat

SEQ ID NO: 5322213 - DNA, 25 bp, Homo sapien
tagttctcgttggtattctctcatc

SEQ ID NO: 5322214 - DNA, 25 bp, Homo sapien
tctagttctcgttggtattctctca

SEQ ID NO: 5322215 - DNA, 25 bp, Homo sapien
tcttctagttctcgttggtattctc

SEQ ID NO: 5322216 - DNA, 25 bp, Homo sapien
tctataccggttaattctcatggaa

SEQ ID NO: 5322217 - DNA, 25 bp, Homo sapien
tttaagggacttcaaactgccctga

SEQ ID NO: 5322218 - DNA, 25 bp, Homo sapien
taagcacagttcacagtttacctcg

SEQ ID NO: 5322219 - DNA, 25 bp, Homo sapien
ttatgctctaggaatagtctggaca

SEQ ID NO: 5322220 - DNA, 25 bp, Homo sapien
gagtttatatgttggttctcaccat

SEQ ID NO: 5322221 - DNA, 25 bp, Homo sapien
ttaactaaggccacaatagaaaatg

SEQ ID NO: 5322222 - DNA, 25 bp, Homo sapien
tgtgctatcagatttcatccaaacc

SEQ ID NO: 5322223 - DNA, 25 bp, Homo sapien
catcaacatagcttcatggttctca

SEQ ID NO: 5322224 - DNA, 25 bp, Homo sapien
tcataagccttagcccgggttgtca

SEQ ID NO: 5322225 - DNA, 25 bp, Homo sapien
ttgcttctgtttagttaggatccga

SEQ ID NO: 5322226 - DNA, 25 bp, Homo sapien
cccgggttgtcaggagtttctgcaa

SEQ ID NO: 5322227 - DNA, 25 bp, Homo sapien
gatatttgagctaaactttgatgtg

SEQ ID NO: 5322228 - DNA, 25 bp, Homo sapien
aaggcacagggtttacacctgcaca

SEQ ID NO: 5322229 - DNA, 25 bp, Homo sapien
ggtttacacctgcacatcttactgg

SEQ ID NO: 5322230 - DNA, 25 bp, Homo sapien
ggcacgggagggttgcagttacaag

SEQ ID NO: 5322231 - DNA, 25 bp, Homo sapien
cctctggaagataccgtgggcacgg

SEQ ID NO: 5322232 - DNA, 25 bp, Homo sapien
tccggtactgtaattgtgggcaccc

SEQ ID NO: 5322233 - DNA, 25 bp, Homo sapien
catggaagccagtatctttacagcg

SEQ ID NO: 5322234 - DNA, 25 bp, Homo sapien
cagaggaggacacatacaaggagga

SEQ ID NO: 5322235 - DNA, 25 bp, Homo sapien
aaatcaggagttgggcacctaacct

SEQ ID NO: 5322236 - DNA, 25 bp, Homo sapien
tcattaatgagacagggtgatagga

SEQ ID NO: 5322237 - DNA, 25 bp, Homo sapien
taatgagacagggtgataggagttc

SEQ ID NO: 5322238 - DNA, 25 bp, Homo sapien
ggtgataggagttcttttctgatac

SEQ ID NO: 5322239 - DNA, 25 bp, Homo sapien
gacagggtgataggagttcttttct

SEQ ID NO: 5322240 - DNA, 25 bp, Homo sapien
gaagaataactatgttatactttca

SEQ ID NO: 5322241 - DNA, 25 bp, Homo sapien
actatgttatactttcagttgtatg

SEQ ID NO: 5322242 - DNA, 25 bp, Homo sapien
tactttcagttgtatgtgaccaaat

SEQ ID NO: 5322243 - DNA, 25 bp, Homo sapien
cagttgtatgtgaccaaatataaaa

SEQ ID NO: 5322244 - DNA, 25 bp, Homo sapien
ggaagagtcactaagagagtcttct

SEQ ID NO: 5322245 - DNA, 25 bp, Homo sapien
gaagagtcactaagagagtcttctc

SEQ ID NO: 5322246 - DNA, 25 bp, Homo sapien
aagagtcactaagagagtcttctct

SEQ ID NO: 5322247 - DNA, 25 bp, Homo sapien
tgcatgttcatccaccccagaaaag

SEQ ID NO: 5322248 - DNA, 25 bp, Homo sapien
cctcattagagtggtgaatatcagg

SEQ ID NO: 5322249 - DNA, 25 bp, Homo sapien
gaatatcaggaaagttcacaaagtc

SEQ ID NO: 5322250 - DNA, 25 bp, Homo sapien
caaagtcctcatagcttatcggtgc

SEQ ID NO: 5322251 - DNA, 25 bp, Homo sapien
gataaaggatggttcaattcccaga

SEQ ID NO: 5322252 - DNA, 25 bp, Homo sapien
taactgagatgaagaggaacacggt

SEQ ID NO: 5322253 - DNA, 25 bp, Homo sapien
aattcccagatcaaccaacaaaagg

SEQ ID NO: 5322254 - DNA, 25 bp, Homo sapien
gatattttaagaacgagagggagca

SEQ ID NO: 5322255 - DNA, 25 bp, Homo sapien
gaatccagtatgcagttttcactcg

SEQ ID NO: 5322256 - DNA, 25 bp, Homo sapien
cagcagcagttcgttttagtagcag

SEQ ID NO: 5322257 - DNA, 25 bp, Homo sapien
tctagcaacggttattcatctgggc

SEQ ID NO: 5322258 - DNA, 25 bp, Homo sapien
tcctgtcggcttgtgtcagtctagc

SEQ ID NO: 5322259 - DNA, 25 bp, Homo sapien
aggtctttatgtaaatgttgtcttc

SEQ ID NO: 5322260 - DNA, 25 bp, Homo sapien
tgttccctctccctaggatgccttt

SEQ ID NO: 5322261 - DNA, 25 bp, Homo sapien
gtctttatgtaaatgttgtcttctc

SEQ ID NO: 5322262 - DNA, 25 bp, Homo sapien
ccacatgacccacttgctcactcct

SEQ ID NO: 5322263 - DNA, 25 bp, Homo sapien
tcctcttcgtcctccaagatcgcct

SEQ ID NO: 5322264 - DNA, 25 bp, Homo sapien
ccagcttcgccactcggtgggaggt

SEQ ID NO: 5322265 - DNA, 25 bp, Homo sapien
cgctccagtgatgggatttaccggg

SEQ ID NO: 5322266 - DNA, 25 bp, Homo sapien
ggtcttcgcgttcgtactgggcgac

SEQ ID NO: 5322267 - DNA, 25 bp, Homo sapien
acgggaaagctggtgcggcccctgg

SEQ ID NO: 5322268 - DNA, 25 bp, Homo sapien
cgcctagctagggagccggttgcta

SEQ ID NO: 5322269 - DNA, 25 bp, Homo sapien
tgcgctggcccgggacgggaaagct

SEQ ID NO: 5322270 - DNA, 25 bp, Homo sapien
gccggttgctatgggcgccgtaact

SEQ ID NO: 5322271 - DNA, 25 bp, Homo sapien
caaaagtcacgcaaaatccactcag

SEQ ID NO: 5322272 - DNA, 25 bp, Homo sapien
tacaggagccgccagggaccaaaag

SEQ ID NO: 5322273 - DNA, 25 bp, Homo sapien
cgccagggaccaaaagtcacgcaaa

SEQ ID NO: 5322274 - DNA, 25 bp, Homo sapien
gaccaaaagtcacgcaaaatccact

SEQ ID NO: 5322275 - DNA, 25 bp, Homo sapien
ggacgcatcaaatggcgccttccct

SEQ ID NO: 5322276 - DNA, 25 bp, Homo sapien
cttcccactcgggatttggacgcat

SEQ ID NO: 5322277 - DNA, 25 bp, Homo sapien
tttggacgcatcaaatggcgccttc

SEQ ID NO: 5322278 - DNA, 25 bp, Homo sapien
tcgggatttggacgcatcaaatggc

SEQ ID NO: 5322279 - DNA, 25 bp, Homo sapien
ccaacacgcctagcaaatgttgtat

SEQ ID NO: 5322280 - DNA, 25 bp, Homo sapien
aaaaaacaatttgtgcattacagaa

SEQ ID NO: 5322281 - DNA, 25 bp, Homo sapien
attatctagagagtcaaataacaac

SEQ ID NO: 5322282 - DNA, 25 bp, Homo sapien
cagccaagttagacattataaaaga

SEQ ID NO: 5322283 - DNA, 25 bp, Homo sapien
catcttgggcctggcagaatggctc

SEQ ID NO: 5322284 - DNA, 25 bp, Homo sapien
tccatcttgggcctggcagaatggc

SEQ ID NO: 5322285 - DNA, 25 bp, Homo sapien
tcctttccatcttgggcctggcaga

SEQ ID NO: 5322286 - DNA, 25 bp, Homo sapien
cgtccctcatgttcttcctttccat

SEQ ID NO: 5322287 - DNA, 25 bp, Homo sapien
gtagtgacccaagaacacacttggg

SEQ ID NO: 5322288 - DNA, 25 bp, Homo sapien
cactagctcacatccatggagtggg

SEQ ID NO: 5322289 - DNA, 25 bp, Homo sapien
atgaagatgggcactccagatgtgt

SEQ ID NO: 5322290 - DNA, 25 bp, Homo sapien
gctctgtgggcattcaaagagattc

SEQ ID NO: 5322291 - DNA, 25 bp, Homo sapien
tatcatacttgctttagatggcgcc

SEQ ID NO: 5322292 - DNA, 25 bp, Homo sapien
tcattatcacagatgcgtctggctt

SEQ ID NO: 5322293 - DNA, 25 bp, Homo sapien
ggcgccattgatcccatcaagatga

SEQ ID NO: 5322294 - DNA, 25 bp, Homo sapien
tgcgtctggctttccttatcatact

SEQ ID NO: 5322295 - DNA, 25 bp, Homo sapien
tgagaagcttcccaagacgacatcc

SEQ ID NO: 5322296 - DNA, 25 bp, Homo sapien
gagtagctcgttgtcctcttgagaa

SEQ ID NO: 5322297 - DNA, 25 bp, Homo sapien
gaacagcagagtcaataaagtggcc

SEQ ID NO: 5322298 - DNA, 25 bp, Homo sapien
tgaaggattccaccaagccatagcg

SEQ ID NO: 5322299 - DNA, 25 bp, Homo sapien
tataagaaaaagttgtggttttgca

SEQ ID NO: 5322300 - DNA, 25 bp, Homo sapien
aagttgtggttttgcagctccacga

SEQ ID NO: 5322301 - DNA, 25 bp, Homo sapien
aagaaaaagttgtggttttgcagct

SEQ ID NO: 5322302 - DNA, 25 bp, Homo sapien
aaaagttgtggttttgcagctccac

SEQ ID NO: 5322303 - DNA, 25 bp, Homo sapien
gaacagaggagatactcttcttctc

SEQ ID NO: 5322304 - DNA, 25 bp, Homo sapien
attcttcacttcccaaacaaaggat

SEQ ID NO: 5322305 - DNA, 25 bp, Homo sapien
ccattcttcacttcccaaacaaagg

SEQ ID NO: 5322306 - DNA, 25 bp, Homo sapien
tcttcacttcccaaacaaaggattc

SEQ ID NO: 5322307 - DNA, 25 bp, Homo sapien
cattcttcacttcccaaacaaagga

SEQ ID NO: 5322308 - DNA, 25 bp, Homo sapien
catcaaagcacaggaaagggtctac

SEQ ID NO: 5322309 - DNA, 25 bp, Homo sapien
gaattaggatgataggataaaagga

SEQ ID NO: 5322310 - DNA, 25 bp, Homo sapien
tggatcattaacttttaagacagca

SEQ ID NO: 5322311 - DNA, 25 bp, Homo sapien
gttcagagaggtgccacttggatca

SEQ ID NO: 5322312 - DNA, 25 bp, Homo sapien
tacacttttatttgcagaaggaatc

SEQ ID NO: 5322313 - DNA, 25 bp, Homo sapien
tttttttcctcaacatgtaaactca

SEQ ID NO: 5322314 - DNA, 25 bp, Homo sapien
tcagaaataacagaatgttgggaga

SEQ ID NO: 5322315 - DNA, 25 bp, Homo sapien
gaaataacagaatgttgggagaaga

SEQ ID NO: 5322316 - DNA, 25 bp, Homo sapien
agtatcagaaataacagaatgttgg

SEQ ID NO: 5322317 - DNA, 25 bp, Homo sapien
ttcaaaagtatcagaaataacagaa

SEQ ID NO: 5322318 - DNA, 25 bp, Homo sapien
caacttcaggcaaatgccaactgga

SEQ ID NO: 5322319 - DNA, 25 bp, Homo sapien
ttaaattgtttcaatacaacttcag

SEQ ID NO: 5322320 - DNA, 25 bp, Homo sapien
atgccaactggaagaccaagcccag

SEQ ID NO: 5322321 - DNA, 25 bp, Homo sapien
cttccaaacaaggaacaccaaggtg

SEQ ID NO: 5322322 - DNA, 25 bp, Homo sapien
tcttccattccagccacaatactgg

SEQ ID NO: 5322323 - DNA, 25 bp, Homo sapien
ccattccagccacaatactggtgat

SEQ ID NO: 5322324 - DNA, 25 bp, Homo sapien
ttccattccagccacaatactggtg

SEQ ID NO: 5322325 - DNA, 25 bp, Homo sapien
ttcttccattccagccacaatactg

SEQ ID NO: 5322326 - DNA, 25 bp, Homo sapien
ataatggtgctagtcagttatccag

SEQ ID NO: 5322327 - DNA, 25 bp, Homo sapien
taatggtgctagtcagttatccaga

SEQ ID NO: 5322328 - DNA, 25 bp, Homo sapien
cataatggtgctagtcagttatcca

SEQ ID NO: 5322329 - DNA, 25 bp, Homo sapien
ctgtattaagaactgctgtcacctt

SEQ ID NO: 5322330 - DNA, 25 bp, Homo sapien
gctgtcaccttgatgactagcaaat

SEQ ID NO: 5322331 - DNA, 25 bp, Homo sapien
ctgataagagaaaaacttagatttc

SEQ ID NO: 5322332 - DNA, 25 bp, Homo sapien
cttagatttcaaaacctgtaatgac

SEQ ID NO: 5322333 - DNA, 25 bp, Homo sapien
aatgctccgaacagtttcagttgca

SEQ ID NO: 5322334 - DNA, 25 bp, Homo sapien
ggctggacaaccagttcctccaaaa

SEQ ID NO: 5322335 - DNA, 25 bp, Homo sapien
catctattttcagaatgctccgaac

SEQ ID NO: 5322336 - DNA, 25 bp, Homo sapien
gataccaacagaggctggacaacca

SEQ ID NO: 5322337 - DNA, 25 bp, Homo sapien
tctacactgtgggatgttatttcaa

SEQ ID NO: 5322338 - DNA, 25 bp, Homo sapien
gccacgtggttaccagtgtacctca

SEQ ID NO: 5322339 - DNA, 25 bp, Homo sapien
gtgtacctcaagacctaaatctagt

SEQ ID NO: 5322340 - DNA, 25 bp, Homo sapien
gtgataatacacatcagcagccacg

SEQ ID NO: 5322341 - DNA, 25 bp, Homo sapien
taatcccagctctacacaggtgaag

SEQ ID NO: 5322342 - DNA, 25 bp, Homo sapien
gctaaaagctagtcagtaagtggca

SEQ ID NO: 5322343 - DNA, 25 bp, Homo sapien
gaactgcttggtccttctcacctgt

SEQ ID NO: 5322344 - DNA, 25 bp, Homo sapien
tagctcatgctaactagggcaatga

SEQ ID NO: 5322345 - DNA, 25 bp, Homo sapien
tagattaattaacatgcagcaggcc

SEQ ID NO: 5322346 - DNA, 25 bp, Homo sapien
tccaagattatgcttttcattacag

SEQ ID NO: 5322347 - DNA, 25 bp, Homo sapien
ctcaatggcatagattaattaacat

SEQ ID NO: 5322348 - DNA, 25 bp, Homo sapien
cagcaggcctcatatttaaatccaa

SEQ ID NO: 5322349 - DNA, 25 bp, Homo sapien
ctttcggacattaatgcctgcagtt

SEQ ID NO: 5322350 - DNA, 25 bp, Homo sapien
ttcagttaatcgtagggccaactct

SEQ ID NO: 5322351 - DNA, 25 bp, Homo sapien
caaaagcacgaacgcagtaggattc

SEQ ID NO: 5322352 - DNA, 25 bp, Homo sapien
taggattccataccactcagtgttc

SEQ ID NO: 5322353 - DNA, 25 bp, Homo sapien
gattcaggccggcattttcagctag

SEQ ID NO: 5322354 - DNA, 25 bp, Homo sapien
ggcatcatgaatggagcgctcagct

SEQ ID NO: 5322355 - DNA, 25 bp, Homo sapien
gttagaaccacgaacaacaattgta

SEQ ID NO: 5322356 - DNA, 25 bp, Homo sapien
taaacaacgaataacacatagggca

SEQ ID NO: 5322357 - DNA, 25 bp, Homo sapien
tcagcttcttcaatcaccagtttgt

SEQ ID NO: 5322358 - DNA, 25 bp, Homo sapien
cgggtggctaacgaggtgaggagat

SEQ ID NO: 5322359 - DNA, 25 bp, Homo sapien
gaggcgggtggctaacgaggtgagg

SEQ ID NO: 5322360 - DNA, 25 bp, Homo sapien
caaattccaaattaagtatttgaag

SEQ ID NO: 5322361 - DNA, 25 bp, Homo sapien
tccaaattaagtatttgaagggtca

SEQ ID NO: 5322362 - DNA, 25 bp, Homo sapien
cagcagtaaattggtcaatatgagc

SEQ ID NO: 5322363 - DNA, 25 bp, Homo sapien
gccagaaccatttaaattgacctcc

SEQ ID NO: 5322364 - DNA, 25 bp, Homo sapien
cagcagaacccagcatgtcagcagt

SEQ ID NO: 5322365 - DNA, 25 bp, Homo sapien
aattggtcaatatgagcaactggct

SEQ ID NO: 5322366 - DNA, 25 bp, Homo sapien
tttatctaattatcagacattttcc

SEQ ID NO: 5322367 - DNA, 25 bp, Homo sapien
ttccacaaatacagatgttaatgtt

SEQ ID NO: 5322368 - DNA, 25 bp, Homo sapien
catttatctaattatcagacatttt

SEQ ID NO: 5322369 - DNA, 25 bp, Homo sapien
acaaatacagatgttaatgttttac

SEQ ID NO: 5322370 - DNA, 25 bp, Homo sapien
taatgcaagatcactaagagcatct

SEQ ID NO: 5322371 - DNA, 25 bp, Homo sapien
ttcaatatccttaatcaccatgatc

SEQ ID NO: 5322372 - DNA, 25 bp, Homo sapien
aagtgtaatgcaagatcactaagag

SEQ ID NO: 5322373 - DNA, 25 bp, Homo sapien
tcaatatccttaatcaccatgatct

SEQ ID NO: 5322374 - DNA, 25 bp, Homo sapien
atacaaaatcagtgattatgtcaat

SEQ ID NO: 5322375 - DNA, 25 bp, Homo sapien
gtttcttaaatggccaatcattatt

SEQ ID NO: 5322376 - DNA, 25 bp, Homo sapien
cagtgattatgtcaatgctagatta

SEQ ID NO: 5322377 - DNA, 25 bp, Homo sapien
atcagtgattatgtcaatgctagat

SEQ ID NO: 5322378 - DNA, 25 bp, Homo sapien
tgcagatttctggtggtttacccaa

SEQ ID NO: 5322379 - DNA, 25 bp, Homo sapien
tctggtggtttacccaactcaaatg

SEQ ID NO: 5322380 - DNA, 25 bp, Homo sapien
ggaagattacgcactttttatcaaa

SEQ ID NO: 5322381 - DNA, 25 bp, Homo sapien
cttttccagcttgtaactgcaagga

SEQ ID NO: 5322382 - DNA, 25 bp, Homo sapien
ttctcgcagcactcggtccatctgg

SEQ ID NO: 5322383 - DNA, 25 bp, Homo sapien
ctctcttctcgcagcactcggtcca

SEQ ID NO: 5322384 - DNA, 25 bp, Homo sapien
tcttctcgcagcactcggtccatct

SEQ ID NO: 5322385 - DNA, 25 bp, Homo sapien
tctcgcagcactcggtccatctggg

SEQ ID NO: 5322386 - DNA, 25 bp, Homo sapien
ctgaataagcccaatcttggccttt

SEQ ID NO: 5322387 - DNA, 25 bp, Homo sapien
tgaataagcccaatcttggcctttt

SEQ ID NO: 5322388 - DNA, 25 bp, Homo sapien
tggctgtggctgggtcaatcacttt

SEQ ID NO: 5322389 - DNA, 25 bp, Homo sapien
taatatctctaagatctacactggt

SEQ ID NO: 5322390 - DNA, 25 bp, Homo sapien
gcagacttgaatactgagaaaccac

SEQ ID NO: 5322391 - DNA, 25 bp, Homo sapien
ctaagatctacactggtggctgtgg

SEQ ID NO: 5322392 - DNA, 25 bp, Homo sapien
tctggaatgactcagaaatgatggt

SEQ ID NO: 5322393 - DNA, 25 bp, Homo sapien
gtcactcagttccacaggtcgagac

SEQ ID NO: 5322394 - DNA, 25 bp, Homo sapien
cgagacatgtcagtcaagatttcaa

SEQ ID NO: 5322395 - DNA, 25 bp, Homo sapien
tgactcagaaatgatggttggatga

SEQ ID NO: 5322396 - DNA, 25 bp, Homo sapien
actccttgggctcaattgttctgcc

SEQ ID NO: 5322397 - DNA, 25 bp, Homo sapien
cgcacctggccgatacttctcaaaa

SEQ ID NO: 5322398 - DNA, 25 bp, Homo sapien
tccttgggctcaattgttctgccag

SEQ ID NO: 5322399 - DNA, 25 bp, Homo sapien
ttgggctcaattgttctgccagcct

SEQ ID NO: 5322400 - DNA, 25 bp, Homo sapien
cttctttcttgtataagagtccaag

SEQ ID NO: 5322401 - DNA, 25 bp, Homo sapien
tagtcactactataattaaatacca

SEQ ID NO: 5322402 - DNA, 25 bp, Homo sapien
aaataagtgattggatagtcactac

SEQ ID NO: 5322403 - DNA, 25 bp, Homo sapien
tagtaatatttctaccactcatttc

SEQ ID NO: 5322404 - DNA, 25 bp, Homo sapien
tacaagaatctaagagggagccagc

SEQ ID NO: 5322405 - DNA, 25 bp, Homo sapien
caatgatgactactgatgtggtgcc

SEQ ID NO: 5322406 - DNA, 25 bp, Homo sapien
tatcttgagccttagacagctccac

SEQ ID NO: 5322407 - DNA, 25 bp, Homo sapien
tctgaagaagcttggtacaagaatc

SEQ ID NO: 5322408 - DNA, 25 bp, Homo sapien
tggcacaacatatgaagcctcagga

SEQ ID NO: 5322409 - DNA, 25 bp, Homo sapien
gcctcaggactatccaagaaaacag

SEQ ID NO: 5322410 - DNA, 25 bp, Homo sapien
tcttttcataactggtggatggcac

SEQ ID NO: 5322411 - DNA, 25 bp, Homo sapien
tagaccccttgtaagtataacctga

SEQ ID NO: 5322412 - DNA, 25 bp, Homo sapien
tctccttattcctcaatagtaccac

SEQ ID NO: 5322413 - DNA, 25 bp, Homo sapien
aaatagtatgtggtaattatacaaa

SEQ ID NO: 5322414 - DNA, 25 bp, Homo sapien
tagtaccacatactatttgtaaaat

SEQ ID NO: 5322415 - DNA, 25 bp, Homo sapien
gaagcaaagaccattaatatttgta

SEQ ID NO: 5322416 - DNA, 25 bp, Homo sapien
catctttacacaactcagagggatt

SEQ ID NO: 5322417 - DNA, 25 bp, Homo sapien
tctgtggacacatgaactgctatgc

SEQ ID NO: 5322418 - DNA, 25 bp, Homo sapien
tttgctcatatgacttgacaccagg

SEQ ID NO: 5322419 - DNA, 25 bp, Homo sapien
tccttattcctcgagtgtatgccaa

SEQ ID NO: 5322420 - DNA, 25 bp, Homo sapien
acagctcactacctcccctggactc

SEQ ID NO: 5322421 - DNA, 25 bp, Homo sapien
tcacagctcactacctcccctggac

SEQ ID NO: 5322422 - DNA, 25 bp, Homo sapien
atcacagctcactacctcccctgga

SEQ ID NO: 5322423 - DNA, 25 bp, Homo sapien
agctcactacctcccctggactcaa

SEQ ID NO: 5322424 - DNA, 25 bp, Homo sapien
tgttcagcacgaaaagtgttcatcg

SEQ ID NO: 5322425 - DNA, 25 bp, Homo sapien
tcccatgtcagcctatggagtggct

SEQ ID NO: 5322426 - DNA, 25 bp, Homo sapien
gttcatcgtgcttaaatatcatgtg

SEQ ID NO: 5322427 - DNA, 25 bp, Homo sapien
tgttaggcacacaatgtatcctaaa

SEQ ID NO: 5322428 - DNA, 25 bp, Homo sapien
cattctggctgctggatgtaatact

SEQ ID NO: 5322429 - DNA, 25 bp, Homo sapien
tgtaatggttacatcaccttttcca

SEQ ID NO: 5322430 - DNA, 25 bp, Homo sapien
ctggctgctggatgtaatacttgca

SEQ ID NO: 5322431 - DNA, 25 bp, Homo sapien
gtttcagaatggtagcaccatcatt

SEQ ID NO: 5322432 - DNA, 25 bp, Homo sapien
taagaatacgcaataacagtccaac

SEQ ID NO: 5322433 - DNA, 25 bp, Homo sapien
gtaccatgccatgcggtgaacacaa

SEQ ID NO: 5322434 - DNA, 25 bp, Homo sapien
gaaacacgatttccaccatggatgc

SEQ ID NO: 5322435 - DNA, 25 bp, Homo sapien
ggatgcccctaaagcagtaccatgc

SEQ ID NO: 5322436 - DNA, 25 bp, Homo sapien
cttgttctaatagcatcagcaaccg

SEQ ID NO: 5322437 - DNA, 25 bp, Homo sapien
tatccattccttttggtccaaggct

SEQ ID NO: 5322438 - DNA, 25 bp, Homo sapien
ggtccaaggcttgttctaatagcat

SEQ ID NO: 5322439 - DNA, 25 bp, Homo sapien
caaggcttgttctaatagcatcagc

SEQ ID NO: 5322440 - DNA, 25 bp, Homo sapien
tggtacaatctagttaggagctctg

SEQ ID NO: 5322441 - DNA, 25 bp, Homo sapien
tgaacatggtagataggtggcccgc

SEQ ID NO: 5322442 - DNA, 25 bp, Homo sapien
ctaaaatactgatggaggagtatcc

SEQ ID NO: 5322443 - DNA, 25 bp, Homo sapien
tccattcctaaaacaggacaagcag

SEQ ID NO: 5322444 - DNA, 25 bp, Homo sapien
agctgaaagatactgtgcattctac

SEQ ID NO: 5322445 - DNA, 25 bp, Homo sapien
taagcaataagcgacagccctcaag

SEQ ID NO: 5322446 - DNA, 25 bp, Homo sapien
tgaagactgcatgcaatcctcggca

SEQ ID NO: 5322447 - DNA, 25 bp, Homo sapien
caagcgtcagatccctagtgaagac

SEQ ID NO: 5322448 - DNA, 25 bp, Homo sapien
gcattttgaactgctttcggctcca

SEQ ID NO: 5322449 - DNA, 25 bp, Homo sapien
gggcaagtccaaaggcctccatact

SEQ ID NO: 5322450 - DNA, 25 bp, Homo sapien
ggcgatcatcggcagaaaaacagaa

SEQ ID NO: 5322451 - DNA, 25 bp, Homo sapien
acagaaataaggatccctccactgg

SEQ ID NO: 5322452 - DNA, 25 bp, Homo sapien
taagggagattaagatgcaaaatgg

SEQ ID NO: 5322453 - DNA, 25 bp, Homo sapien
cgcgggtcaggccatgagagtgata

SEQ ID NO: 5322454 - DNA, 25 bp, Homo sapien
tcaagcccacgatgagagcgcagag

SEQ ID NO: 5322455 - DNA, 25 bp, Homo sapien
ggaggacaagagaggatcacccgaa

SEQ ID NO: 5322456 - DNA, 25 bp, Homo sapien
gaggatcacccgaagaaatgggaaa

SEQ ID NO: 5322457 - DNA, 25 bp, Homo sapien
tccggggtgccacattctcgggcat

SEQ ID NO: 5322458 - DNA, 25 bp, Homo sapien
gcttgtcgcggtcctgataggcgcc

SEQ ID NO: 5322459 - DNA, 25 bp, Homo sapien
ctttggcggcggaaatgttgctgaa

SEQ ID NO: 5322460 - DNA, 25 bp, Homo sapien
agcggatctgggctggcttgtcgcg

SEQ ID NO: 5322461 - DNA, 25 bp, Homo sapien
taataacggtaagccctcactgcct

SEQ ID NO: 5322462 - DNA, 25 bp, Homo sapien
gcaaactccgctgtgtctgggttgg

SEQ ID NO: 5322463 - DNA, 25 bp, Homo sapien
gaaggacggatggacccggattctg

SEQ ID NO: 5322464 - DNA, 25 bp, Homo sapien
tggccggccgcagtgtaataacggt

SEQ ID NO: 5322465 - DNA, 25 bp, Homo sapien
gaaagcggcgccggcgtcgggagga

SEQ ID NO: 5322466 - DNA, 25 bp, Homo sapien
aagcggcgccggcgtcgggaggagg

SEQ ID NO: 5322467 - DNA, 25 bp, Homo sapien
agcggcgccggcgtcgggaggaggc

SEQ ID NO: 5322468 - DNA, 25 bp, Homo sapien
agaaagcggcgccggcgtcgggagg

SEQ ID NO: 5322469 - DNA, 25 bp, Homo sapien
cggcgctggcgtgacgtaggaggct

SEQ ID NO: 5322470 - DNA, 25 bp, Homo sapien
ggcgctggcgtgacgtaggaggctg

SEQ ID NO: 5322471 - DNA, 25 bp, Homo sapien
cgcgcggcgctggcgtgacgtagga

SEQ ID NO: 5322472 - DNA, 25 bp, Homo sapien
cgcggcgctggcgtgacgtaggagg

SEQ ID NO: 5322473 - DNA, 25 bp, Homo sapien
ggcgaggaggatgcgtgcggtgggc

SEQ ID NO: 5322474 - DNA, 25 bp, Homo sapien
tccgggctggcgagattgtacgccc

SEQ ID NO: 5322475 - DNA, 25 bp, Homo sapien
cgggcgaggaggatgcgtgcggtgg

SEQ ID NO: 5322476 - DNA, 25 bp, Homo sapien
ggctccgggctggcgagattgtacg

SEQ ID NO: 5322477 - DNA, 25 bp, Homo sapien
gagtggtgaggacatccgcatttcc

SEQ ID NO: 5322478 - DNA, 25 bp, Homo sapien
gaacctttacgcgaggcagcaatga

SEQ ID NO: 5322479 - DNA, 25 bp, Homo sapien
ttaaaggcgagtggtgaggacatcc

SEQ ID NO: 5322480 - DNA, 25 bp, Homo sapien
tgacaacgcgcgattttaaaggcga

SEQ ID NO: 5322481 - DNA, 25 bp, Homo sapien
ggtgggcgccggaataactctctaa

SEQ ID NO: 5322482 - DNA, 25 bp, Homo sapien
tctctaagggatatgactgagtctg

SEQ ID NO: 5322483 - DNA, 25 bp, Homo sapien
tttgcccggccacatagacctgcat

SEQ ID NO: 5322484 - DNA, 25 bp, Homo sapien
taactccggctggatctatccgcga

SEQ ID NO: 5322485 - DNA, 25 bp, Homo sapien
accgcccgcttgttctacactagtg

SEQ ID NO: 5322486 - DNA, 25 bp, Homo sapien
cactgactcttagggaacgtaaaca

SEQ ID NO: 5322487 - DNA, 25 bp, Homo sapien
tgacgtagccactgactcttaggga

SEQ ID NO: 5322488 - DNA, 25 bp, Homo sapien
tagtgtctcctgcatgacgtagcca

SEQ ID NO: 5322489 - DNA, 25 bp, Homo sapien
ccctgagcgggctgctgaatgcgct

SEQ ID NO: 5322490 - DNA, 25 bp, Homo sapien
gagttccgcccctttctggcaaaga

SEQ ID NO: 5322491 - DNA, 25 bp, Homo sapien
tagtctccggcttggagcagaaccc

SEQ ID NO: 5322492 - DNA, 25 bp, Homo sapien
tatatccagaggtgccacccgagga

SEQ ID NO: 5322493 - DNA, 25 bp, Homo sapien
gtagcagcaggtgcttataatccca

SEQ ID NO: 5322494 - DNA, 25 bp, Homo sapien
aaatttgtaactggttgtgataagc

SEQ ID NO: 5322495 - DNA, 25 bp, Homo sapien
aatggagaaggaacaaataaatttg

SEQ ID NO: 5322496 - DNA, 25 bp, Homo sapien
ataaatttgtaactggttgtgataa

SEQ ID NO: 5322497 - DNA, 25 bp, Homo sapien
atttgtaactggttgtgataagcta

SEQ ID NO: 5322498 - DNA, 25 bp, Homo sapien
gcttattgtgactgtcaaatatgta

SEQ ID NO: 5322499 - DNA, 25 bp, Homo sapien
agtaattaaagaaggataggctggg

SEQ ID NO: 5322500 - DNA, 25 bp, Homo sapien
tatatgctcgaactcatggcttatt

SEQ ID NO: 5322501 - DNA, 25 bp, Homo sapien
gcagtaattaaagaaggataggctg

SEQ ID NO: 5322502 - DNA, 25 bp, Homo sapien
ggtagcacttcctgtaccccatcaa

SEQ ID NO: 5322503 - DNA, 25 bp, Homo sapien
gtaggtttataacctgcttcatagg

SEQ ID NO: 5322504 - DNA, 25 bp, Homo sapien
aaaatgcctagatgacatattttgg

SEQ ID NO: 5322505 - DNA, 25 bp, Homo sapien
ccatataaggatagaattttcagtc

SEQ ID NO: 5322506 - DNA, 25 bp, Homo sapien
gtcttgaactccagagctcaggcaa

SEQ ID NO: 5322507 - DNA, 25 bp, Homo sapien
ttgaactccagagctcaggcaatct

SEQ ID NO: 5322508 - DNA, 25 bp, Homo sapien
ttttattagagaccaggttttgcca

SEQ ID NO: 5322509 - DNA, 25 bp, Homo sapien
tttattagagaccaggttttgccat

SEQ ID NO: 5322510 - DNA, 25 bp, Homo sapien
caataatagaacctagactggcagt

SEQ ID NO: 5322511 - DNA, 25 bp, Homo sapien
tatgtctatctgtgtaccccagggc

SEQ ID NO: 5322512 - DNA, 25 bp, Homo sapien
aagttgcttccaagaagggtgacca

SEQ ID NO: 5322513 - DNA, 25 bp, Homo sapien
tcacactgctgacattggatgagct

SEQ ID NO: 5322514 - DNA, 25 bp, Homo sapien
taactatacactgatctgcttttgt

SEQ ID NO: 5322515 - DNA, 25 bp, Homo sapien
tctatcatgttcacacaatgaatca

SEQ ID NO: 5322516 - DNA, 25 bp, Homo sapien
agaaggtatcctcatcgttaagcta

SEQ ID NO: 5322517 - DNA, 25 bp, Homo sapien
taagctatgcataactatacactga

SEQ ID NO: 5322518 - DNA, 25 bp, Homo sapien
ggagaggtgaattatcatacaacta

SEQ ID NO: 5322519 - DNA, 25 bp, Homo sapien
tttatataaaactcagcaacccatc

SEQ ID NO: 5322520 - DNA, 25 bp, Homo sapien
gctgtatgtattaggccgttctttc

SEQ ID NO: 5322521 - DNA, 25 bp, Homo sapien
ggatacactgttcttctacctactt

SEQ ID NO: 5322522 - DNA, 25 bp, Homo sapien
ctttgtagacatagcctgtcattgg

SEQ ID NO: 5322523 - DNA, 25 bp, Homo sapien
tagcctgtcattggtggttgtatac

SEQ ID NO: 5322524 - DNA, 25 bp, Homo sapien
gacatcagttctaatgttcgtgatg

SEQ ID NO: 5322525 - DNA, 25 bp, Homo sapien
ggtggttgtatacatagaccatcca

SEQ ID NO: 5322526 - DNA, 25 bp, Homo sapien
atgacattaactctttctaaccttg

SEQ ID NO: 5322527 - DNA, 25 bp, Homo sapien
taaccttgtatcaacttagtttgtc

SEQ ID NO: 5322528 - DNA, 25 bp, Homo sapien
tgaatcctgatcctactgtttgtag

SEQ ID NO: 5322529 - DNA, 25 bp, Homo sapien
agtgaatagacagttacagcaaaaa

SEQ ID NO: 5322530 - DNA, 25 bp, Homo sapien
ccagttactgtggaggctgatcact

SEQ ID NO: 5322531 - DNA, 25 bp, Homo sapien
agttttcattgattagggccaggca

SEQ ID NO: 5322532 - DNA, 25 bp, Homo sapien
tagaccccacaagttagaggcacag

SEQ ID NO: 5322533 - DNA, 25 bp, Homo sapien
ggcctgaaggacaaaccctcactgg

SEQ ID NO: 5322534 - DNA, 25 bp, Homo sapien
gggatttgtaagctgtagtgttgct

SEQ ID NO: 5322535 - DNA, 25 bp, Homo sapien
atggcgactacataggcagagcaga

SEQ ID NO: 5322536 - DNA, 25 bp, Homo sapien
gatttgtaagctgtagtgttgctgg

SEQ ID NO: 5322537 - DNA, 25 bp, Homo sapien
ttgtaagctgtagtgttgctggtga

SEQ ID NO: 5322538 - DNA, 25 bp, Homo sapien
aatgtgattagcctccttatcaagg

SEQ ID NO: 5322539 - DNA, 25 bp, Homo sapien
tcacaggacttgttaacagtggaca

SEQ ID NO: 5322540 - DNA, 25 bp, Homo sapien
tcaaatgcaaggaacgcctggtcct

SEQ ID NO: 5322541 - DNA, 25 bp, Homo sapien
tgtctccatagatataacatcctga

SEQ ID NO: 5322542 - DNA, 25 bp, Homo sapien
aaatctccataagcgtggtggacca

SEQ ID NO: 5322543 - DNA, 25 bp, Homo sapien
tacaatagacatgagcccgtgttgg

SEQ ID NO: 5322544 - DNA, 25 bp, Homo sapien
ttagtcatgaactcggcttgcccca

SEQ ID NO: 5322545 - DNA, 25 bp, Homo sapien
tatgtcccgttggatattagaggcc

SEQ ID NO: 5322546 - DNA, 25 bp, Homo sapien
tcttcattacatcctgatctgtatc

SEQ ID NO: 5322547 - DNA, 25 bp, Homo sapien
ggtgctgttccatataacactcttc

SEQ ID NO: 5322548 - DNA, 25 bp, Homo sapien
cctcggggaatgtttagaatggtgc

SEQ ID NO: 5322549 - DNA, 25 bp, Homo sapien
gtatcataccaaatgatatgggctt

SEQ ID NO: 5322550 - DNA, 25 bp, Homo sapien
ccgtggagaatatctgtggtacagt

SEQ ID NO: 5322551 - DNA, 25 bp, Homo sapien
ctttgcccaatctgtaaccgtggag

SEQ ID NO: 5322552 - DNA, 25 bp, Homo sapien
cacagaggcgattgcagagctctcc

SEQ ID NO: 5322553 - DNA, 25 bp, Homo sapien
cagaggcgattgcagagctctccat

SEQ ID NO: 5322554 - DNA, 25 bp, Homo sapien
cccagcccattagaattctttttga

SEQ ID NO: 5322555 - DNA, 25 bp, Homo sapien
gatgaagcttgttataggatagtaa

SEQ ID NO: 5322556 - DNA, 25 bp, Homo sapien
aatatgggttagcaatattcactgc

SEQ ID NO: 5322557 - DNA, 25 bp, Homo sapien
tgtactcctaagctcgagggatcca

SEQ ID NO: 5322558 - DNA, 25 bp, Homo sapien
ggcaggtataagacactgaattagt

SEQ ID NO: 5322559 - DNA, 25 bp, Homo sapien
cactattatttaaagctgaatcccc

SEQ ID NO: 5322560 - DNA, 25 bp, Homo sapien
tatttaaagctgaatccccattgtc

SEQ ID NO: 5322561 - DNA, 25 bp, Homo sapien
tgtctacaactatgcctggcaggta

SEQ ID NO: 5322562 - DNA, 25 bp, Homo sapien
ggtattcttccactagccgatgcat

SEQ ID NO: 5322563 - DNA, 25 bp, Homo sapien
tgtttggtgccctgtcatactcttc

SEQ ID NO: 5322564 - DNA, 25 bp, Homo sapien
tgtcacgcccagagcttggagggaa

SEQ ID NO: 5322565 - DNA, 25 bp, Homo sapien
gggaaggaacacacttgactctggt

SEQ ID NO: 5322566 - DNA, 25 bp, Homo sapien
caagcagtgtatgagaatatctaca

SEQ ID NO: 5322567 - DNA, 25 bp, Homo sapien
tctacagtcatgctccgcgtaacga

SEQ ID NO: 5322568 - DNA, 25 bp, Homo sapien
gcaaatagccctctaaagtagccca

SEQ ID NO: 5322569 - DNA, 25 bp, Homo sapien
tgttagctggtatgaagtggctcca

SEQ ID NO: 5322570 - DNA, 25 bp, Homo sapien
gcagccttccgggagccacggcttc

SEQ ID NO: 5322571 - DNA, 25 bp, Homo sapien
tggaaccttcgctaaccagatccag

SEQ ID NO: 5322572 - DNA, 25 bp, Homo sapien
gccacggcttcttgtggttactgac

SEQ ID NO: 5322573 - DNA, 25 bp, Homo sapien
ggccgcttcactcctggaaccttcg

SEQ ID NO: 5322574 - DNA, 25 bp, Homo sapien
aagcagatcattcacgctgggccaa

SEQ ID NO: 5322575 - DNA, 25 bp, Homo sapien
ggccaaatgacctccgctggcatac

SEQ ID NO: 5322576 - DNA, 25 bp, Homo sapien
gttgtgctaaaagagaatctatctc

SEQ ID NO: 5322577 - DNA, 25 bp, Homo sapien
gctggcatactcctgtgcccttgtt

SEQ ID NO: 5322578 - DNA, 25 bp, Homo sapien
gtcggaaggaccatgctttcccaaa

SEQ ID NO: 5322579 - DNA, 25 bp, Homo sapien
ttatattgtcggaaggaccatgctt

SEQ ID NO: 5322580 - DNA, 25 bp, Homo sapien
aaagaaagtattgtctcattctgga

SEQ ID NO: 5322581 - DNA, 25 bp, Homo sapien
agtccaaaattatattgtcggaagg

SEQ ID NO: 5322582 - DNA, 25 bp, Homo sapien
tgatagggcagcagctaggaagtca

SEQ ID NO: 5322583 - DNA, 25 bp, Homo sapien
aggcagcagcattaacatggcccag

SEQ ID NO: 5322584 - DNA, 25 bp, Homo sapien
cattaggaaaagatgatagggcagc

SEQ ID NO: 5322585 - DNA, 25 bp, Homo sapien
atctggtcccggtttgaggcagccc

SEQ ID NO: 5322586 - DNA, 25 bp, Homo sapien
catagtgggcctatgcagggtttct

SEQ ID NO: 5322587 - DNA, 25 bp, Homo sapien
aaaggccttcgcataggaagtcgaa

SEQ ID NO: 5322588 - DNA, 25 bp, Homo sapien
caaggagatggtaaccacagaggga

SEQ ID NO: 5322589 - DNA, 25 bp, Homo sapien
tggtgaatatgcctctcccaactct

SEQ ID NO: 5322590 - DNA, 25 bp, Homo sapien
cacccaccattagatagatgtatgt

SEQ ID NO: 5322591 - DNA, 25 bp, Homo sapien
ttagatagatgtatgtgtcatgaca

SEQ ID NO: 5322592 - DNA, 25 bp, Homo sapien
ctttcacccaccattagatagatgt

SEQ ID NO: 5322593 - DNA, 25 bp, Homo sapien
cattagatagatgtatgtgtcatga

SEQ ID NO: 5322594 - DNA, 25 bp, Homo sapien
ctgactttgagcctctgctggatcc

SEQ ID NO: 5322595 - DNA, 25 bp, Homo sapien
ccctctgagctaggtggtccacaga

SEQ ID NO: 5322596 - DNA, 25 bp, Homo sapien
ctgaagcttcaaacggctgactttg

SEQ ID NO: 5322597 - DNA, 25 bp, Homo sapien
ttccctgacacagcttcctgttagg

SEQ ID NO: 5322598 - DNA, 25 bp, Homo sapien
tctccttctagatgaaaagtgatgc

SEQ ID NO: 5322599 - DNA, 25 bp, Homo sapien
tccaggaaagccacgaaggcacaat

SEQ ID NO: 5322600 - DNA, 25 bp, Homo sapien
accacagctgaagccgtttgagaca

SEQ ID NO: 5322601 - DNA, 25 bp, Homo sapien
gagaaaacactaagcgatatccagg

SEQ ID NO: 5322602 - DNA, 25 bp, Homo sapien
ttaagtccagagacttagctggaga

SEQ ID NO: 5322603 - DNA, 25 bp, Homo sapien
tcttgaaggttctccatgaacggta

SEQ ID NO: 5322604 - DNA, 25 bp, Homo sapien
cagagacttagctggagagcatctt

SEQ ID NO: 5322605 - DNA, 25 bp, Homo sapien
tctccatgaacggtaggcgctgacc

SEQ ID NO: 5322606 - DNA, 25 bp, Homo sapien
caattgctgctttgcacggaaaatc

SEQ ID NO: 5322607 - DNA, 25 bp, Homo sapien
gcaatgtcttccctatgcaattgct

SEQ ID NO: 5322608 - DNA, 25 bp, Homo sapien
gcacggaaaatcacctttaagccaa

SEQ ID NO: 5322609 - DNA, 25 bp, Homo sapien
aatgtcttccctatgcaattgctgc

SEQ ID NO: 5322610 - DNA, 25 bp, Homo sapien
tcagcgtaatgttggaagattcatc

SEQ ID NO: 5322611 - DNA, 25 bp, Homo sapien
gagttgtgacaatggtatgctccca

SEQ ID NO: 5322612 - DNA, 25 bp, Homo sapien
tctgccaccatagataagttcttgc

SEQ ID NO: 5322613 - DNA, 25 bp, Homo sapien
tgtgctgtcgcatggatcctgcttc

SEQ ID NO: 5322614 - DNA, 25 bp, Homo sapien
gggcagatctttgttatgccccctg

SEQ ID NO: 5322615 - DNA, 25 bp, Homo sapien
ttacaactgagatggtttctaaacc

SEQ ID NO: 5322616 - DNA, 25 bp, Homo sapien
tgggcagatctttgttatgccccct

SEQ ID NO: 5322617 - DNA, 25 bp, Homo sapien
tttgtaacagttatgtttacaactg

SEQ ID NO: 5322618 - DNA, 25 bp, Homo sapien
gcaaaccgcagaccttgaaggctga

SEQ ID NO: 5322619 - DNA, 25 bp, Homo sapien
gcttatagatgtttgagttccaggg

SEQ ID NO: 5322620 - DNA, 25 bp, Homo sapien
tctggctgggcaaaaataccaggtg

SEQ ID NO: 5322621 - DNA, 25 bp, Homo sapien
tgctgaagatcagcccgtttcctca

SEQ ID NO: 5322622 - DNA, 25 bp, Homo sapien
ctcggaggagcacatgagtgtgact

SEQ ID NO: 5322623 - DNA, 25 bp, Homo sapien
gcagggctacaggagtgacaacacg

SEQ ID NO: 5322624 - DNA, 25 bp, Homo sapien
ccacctcggaggagcacatgagtgt

SEQ ID NO: 5322625 - DNA, 25 bp, Homo sapien
tggcagggctacaggagtgacaaca

SEQ ID NO: 5322626 - DNA, 25 bp, Homo sapien
ctccacgtcccataaatgctgttgt

SEQ ID NO: 5322627 - DNA, 25 bp, Homo sapien
cgtcccataaatgctgttgttcctt

SEQ ID NO: 5322628 - DNA, 25 bp, Homo sapien
ctgttgttcctttggggagactgtt

SEQ ID NO: 5322629 - DNA, 25 bp, Homo sapien
ccataaatgctgttgttcctttggg

SEQ ID NO: 5322630 - DNA, 25 bp, Homo sapien
tgtgcatccgcagcaacttggtctt

SEQ ID NO: 5322631 - DNA, 25 bp, Homo sapien
taacttctccatccggtatcgccag

SEQ ID NO: 5322632 - DNA, 25 bp, Homo sapien
tgaaagcagcatggtccgaagactg

SEQ ID NO: 5322633 - DNA, 25 bp, Homo sapien
gctaacagttaggagcgaagcgtcc

SEQ ID NO: 5322634 - DNA, 25 bp, Homo sapien
ccggagggtgcggtcagagtccggc

SEQ ID NO: 5322635 - DNA, 25 bp, Homo sapien
gtgtccggagggtgcggtcagagtc

SEQ ID NO: 5322636 - DNA, 25 bp, Homo sapien
tgtccggagggtgcggtcagagtcc

SEQ ID NO: 5322637 - DNA, 25 bp, Homo sapien
gagggtgcggtcagagtccggccct

SEQ ID NO: 5322638 - DNA, 25 bp, Homo sapien
cgagcgcccggcatcttgcgtttct

SEQ ID NO: 5322639 - DNA, 25 bp, Homo sapien
ccgcggcacgggttcgggccgagcg

SEQ ID NO: 5322640 - DNA, 25 bp, Homo sapien
taggccttgcctcggtatccgcctt

SEQ ID NO: 5322641 - DNA, 25 bp, Homo sapien
gccttgccccttgggccgcggcacg

SEQ ID NO: 5322642 - DNA, 25 bp, Homo sapien
tagcctcagacgaaccgcaagaggg

SEQ ID NO: 5322643 - DNA, 25 bp, Homo sapien
taggcgatgcgcctagtcccctagc

SEQ ID NO: 5322644 - DNA, 25 bp, Homo sapien
tagttccggttacaaactggacaga

SEQ ID NO: 5322645 - DNA, 25 bp, Homo sapien
gccactggagtctcgctaggcgatg

SEQ ID NO: 5322646 - DNA, 25 bp, Homo sapien
cctcgcactgcgccggcctcccgtg

SEQ ID NO: 5322647 - DNA, 25 bp, Homo sapien
tcgcactgcgccggcctcccgtgcc

SEQ ID NO: 5322648 - DNA, 25 bp, Homo sapien
ctcgcactgcgccggcctcccgtgc

SEQ ID NO: 5322649 - DNA, 25 bp, Homo sapien
cgtaatatccgatagcgaagccagt

SEQ ID NO: 5322650 - DNA, 25 bp, Homo sapien
cgaagccagttggtgaatatagaat

SEQ ID NO: 5322651 - DNA, 25 bp, Homo sapien
ataattatttgtgcctctggaggtg

SEQ ID NO: 5322652 - DNA, 25 bp, Homo sapien
tctggaggtggtaaacgaggtggcc

SEQ ID NO: 5322653 - DNA, 25 bp, Homo sapien
ctccggtgccggcttatagtcgcac

SEQ ID NO: 5322654 - DNA, 25 bp, Homo sapien
agtcgcacccatgcggatctgacag

SEQ ID NO: 5322655 - DNA, 25 bp, Homo sapien
tgccggcttatagtcgcacccatgc

SEQ ID NO: 5322656 - DNA, 25 bp, Homo sapien
ggcttatagtcgcacccatgcggat

SEQ ID NO: 5322657 - DNA, 25 bp, Homo sapien
agggcagggcagggcggtcacttcc

SEQ ID NO: 5322658 - DNA, 25 bp, Homo sapien
cagggcagggcagggcggtcacttc

SEQ ID NO: 5322659 - DNA, 25 bp, Homo sapien
gcagggcagggcggtcacttcccat

SEQ ID NO: 5322660 - DNA, 25 bp, Homo sapien
ccggagggaggaccggcagggcagg

SEQ ID NO: 5322661 - DNA, 25 bp, Homo sapien
tttgagtcttgatcagggaataaca

SEQ ID NO: 5322662 - DNA, 25 bp, Homo sapien
cactgggaagccgaatgatattttc

SEQ ID NO: 5322663 - DNA, 25 bp, Homo sapien
aacatccaactggttctccaaagta

SEQ ID NO: 5322664 - DNA, 25 bp, Homo sapien
gatcagggaataacacaattgtggt

SEQ ID NO: 5322665 - DNA, 25 bp, Homo sapien
ttattttcatctctaccccactcac

SEQ ID NO: 5322666 - DNA, 25 bp, Homo sapien
cagggtgatgattctttattttcat

SEQ ID NO: 5322667 - DNA, 25 bp, Homo sapien
tcagggtgatgattctttattttca

SEQ ID NO: 5322668 - DNA, 25 bp, Homo sapien
tctttattttcatctctaccccact

SEQ ID NO: 5322669 - DNA, 25 bp, Homo sapien
tcacaatggaccacagagtgggcag

SEQ ID NO: 5322670 - DNA, 25 bp, Homo sapien
aagcccgtggcactgggattgctgt

SEQ ID NO: 5322671 - DNA, 25 bp, Homo sapien
cagaccggcgagattggaagcccgt

SEQ ID NO: 5322672 - DNA, 25 bp, Homo sapien
ccatcaatttagagatagcggaggc

SEQ ID NO: 5322673 - DNA, 25 bp, Homo sapien
tccttttgggggatcctgagtgcca

SEQ ID NO: 5322674 - DNA, 25 bp, Homo sapien
catggtagccaggagagtggattcc

SEQ ID NO: 5322675 - DNA, 25 bp, Homo sapien
aggagaagaggatgaaatcgatgga

SEQ ID NO: 5322676 - DNA, 25 bp, Homo sapien
tggtactccttttgggggatcctga

SEQ ID NO: 5322677 - DNA, 25 bp, Homo sapien
ctggaagcactgctcaatcccacac

SEQ ID NO: 5322678 - DNA, 25 bp, Homo sapien
tggaagcactgctcaatcccacaca

SEQ ID NO: 5322679 - DNA, 25 bp, Homo sapien
ggaagcactgctcaatcccacacac

SEQ ID NO: 5322680 - DNA, 25 bp, Homo sapien
cccagtttacctcttcagatcttgc

SEQ ID NO: 5322681 - DNA, 25 bp, Homo sapien
gagggggcggctgtacttctcaccc

SEQ ID NO: 5322682 - DNA, 25 bp, Homo sapien
tgagtctgctgcctttggtggtctg

SEQ ID NO: 5322683 - DNA, 25 bp, Homo sapien
ttctcaccccagtttacctcttcag

SEQ ID NO: 5322684 - DNA, 25 bp, Homo sapien
cctggctagttactgtcgggcatct

SEQ ID NO: 5322685 - DNA, 25 bp, Homo sapien
cagccttggcacaggtcttgggtct

SEQ ID NO: 5322686 - DNA, 25 bp, Homo sapien
atttcacggttacaaggaggccttg

SEQ ID NO: 5322687 - DNA, 25 bp, Homo sapien
tattgctcgttctgtccctggctag

SEQ ID NO: 5322688 - DNA, 25 bp, Homo sapien
atgtactattgtgtaacatactttc

SEQ ID NO: 5322689 - DNA, 25 bp, Homo sapien
tcagatgggatactggggactataa

SEQ ID NO: 5322690 - DNA, 25 bp, Homo sapien
tagaattgaaggttcttatcagatg

SEQ ID NO: 5322691 - DNA, 25 bp, Homo sapien
tatgaactactagagtttaaaattc

SEQ ID NO: 5322692 - DNA, 25 bp, Homo sapien
ctagtggatatctgccctgtgctca

SEQ ID NO: 5322693 - DNA, 25 bp, Homo sapien
ccatcgtcattaggatcagagtgca

SEQ ID NO: 5322694 - DNA, 25 bp, Homo sapien
tctgactgcctttgggtgaggcccc

SEQ ID NO: 5322695 - DNA, 25 bp, Homo sapien
cgtgaatatctaaggtcggcacctc

SEQ ID NO: 5322696 - DNA, 25 bp, Homo sapien
tgcttccgagctgcagtcaaccagg

SEQ ID NO: 5322697 - DNA, 25 bp, Homo sapien
tgcagtcaaccaggaggccagagct

SEQ ID NO: 5322698 - DNA, 25 bp, Homo sapien
ccaggaggccagagctgtggctacc

SEQ ID NO: 5322699 - DNA, 25 bp, Homo sapien
caaccaggaggccagagctgtggct

SEQ ID NO: 5322700 - DNA, 25 bp, Homo sapien
agtctctaaaagtgagtcgccacgg

SEQ ID NO: 5322701 - DNA, 25 bp, Homo sapien
gagtgttgagcacttgtccctgcaa

SEQ ID NO: 5322702 - DNA, 25 bp, Homo sapien
ggaactttcccactcactgtcttga

SEQ ID NO: 5322703 - DNA, 25 bp, Homo sapien
ccagaagttggagagatgctaccta

SEQ ID NO: 5322704 - DNA, 25 bp, Homo sapien
ggaccagaacgcgtcctggagggac

SEQ ID NO: 5322705 - DNA, 25 bp, Homo sapien
tggaccagaacgcgtcctggaggga

SEQ ID NO: 5322706 - DNA, 25 bp, Homo sapien
catgaataatggatccaggtcagca

SEQ ID NO: 5322707 - DNA, 25 bp, Homo sapien
gacccatgaataatggatccaggtc

SEQ ID NO: 5322708 - DNA, 25 bp, Homo sapien
ggtcagcaggtgacagaacttgcac

SEQ ID NO: 5322709 - DNA, 25 bp, Homo sapien
gtcagcaggtgacagaacttgcact

SEQ ID NO: 5322710 - DNA, 25 bp, Homo sapien
actcctgggctttgtgagatcatcc

SEQ ID NO: 5322711 - DNA, 25 bp, Homo sapien
ccaggctggggtgcgtgtttattca

SEQ ID NO: 5322712 - DNA, 25 bp, Homo sapien
gctttgtgagatcatcctctctcgg

SEQ ID NO: 5322713 - DNA, 25 bp, Homo sapien
cgtgtttattcataggcatcatccc

SEQ ID NO: 5322714 - DNA, 25 bp, Homo sapien
cttgctggcccctagggttgctgac

SEQ ID NO: 5322715 - DNA, 25 bp, Homo sapien
caaagagggtatttggatgtgagac

SEQ ID NO: 5322716 - DNA, 25 bp, Homo sapien
cctgcccagtaaggtaggatgaata

SEQ ID NO: 5322717 - DNA, 25 bp, Homo sapien
tgctgacggtgagactcagcttcgg

SEQ ID NO: 5322718 - DNA, 25 bp, Homo sapien
tcaactctgtgtacttggctaaagc

SEQ ID NO: 5322719 - DNA, 25 bp, Homo sapien
tctgtgacaccttcaactctgtgta

SEQ ID NO: 5322720 - DNA, 25 bp, Homo sapien
ggattctgtgtgctcagtttctgtg

SEQ ID NO: 5322721 - DNA, 25 bp, Homo sapien
gctggtttccaataacagtcatcca

SEQ ID NO: 5322722 - DNA, 25 bp, Homo sapien
aggcctgcagaaggccgatggctca

SEQ ID NO: 5322723 - DNA, 25 bp, Homo sapien
attcccagggtgcagatcccccagt

SEQ ID NO: 5322724 - DNA, 25 bp, Homo sapien
agatcccccagtcatgaggcctgca

SEQ ID NO: 5322725 - DNA, 25 bp, Homo sapien
ccttctctagcctccttccaagcca

SEQ ID NO: 5322726 - DNA, 25 bp, Homo sapien
tctatattcccagatttctcctggc

SEQ ID NO: 5322727 - DNA, 25 bp, Homo sapien
agcagcagccccgtaagaagctagc

SEQ ID NO: 5322728 - DNA, 25 bp, Homo sapien
cgtaagaagctagctggtctgcatc

SEQ ID NO: 5322729 - DNA, 25 bp, Homo sapien
cagagtccctgctacctggcgatta

SEQ ID NO: 5322730 - DNA, 25 bp, Homo sapien
gcttcccttccttgaagtgtgcccg

SEQ ID NO: 5322731 - DNA, 25 bp, Homo sapien
agaggagctgcacgatacctgccct

SEQ ID NO: 5322732 - DNA, 25 bp, Homo sapien
gagtccgggtctgggagtagaggca

SEQ ID NO: 5322733 - DNA, 25 bp, Homo sapien
tgcccggtgaggtgtgaatccagca

SEQ ID NO: 5322734 - DNA, 25 bp, Homo sapien
cagacatgctgtggtttccggagcc

SEQ ID NO: 5322735 - DNA, 25 bp, Homo sapien
agcattccctcagggcggctttgct

SEQ ID NO: 5322736 - DNA, 25 bp, Homo sapien
tttagcattccctcagggcggcttt

SEQ ID NO: 5322737 - DNA, 25 bp, Homo sapien
agacatgctgtggtttccggagcct

SEQ ID NO: 5322738 - DNA, 25 bp, Homo sapien
gggaactggctggcaagaccccttc

SEQ ID NO: 5322739 - DNA, 25 bp, Homo sapien
ccacctgcactcagatgctgtcctg

SEQ ID NO: 5322740 - DNA, 25 bp, Homo sapien
tccacctgcactcagatgctgtcct

SEQ ID NO: 5322741 - DNA, 25 bp, Homo sapien
tggcaagaccccttccacccagctg

SEQ ID NO: 5322742 - DNA, 25 bp, Homo sapien
ctgctctgggctcgctttggagttc

SEQ ID NO: 5322743 - DNA, 25 bp, Homo sapien
tcgctttggagttcccctctgagca

SEQ ID NO: 5322744 - DNA, 25 bp, Homo sapien
tcccctctgagcagatagggctaac

SEQ ID NO: 5322745 - DNA, 25 bp, Homo sapien
gagcagatagggctaacgtgtccca

SEQ ID NO: 5322746 - DNA, 25 bp, Homo sapien
gtcatggcagttggaacagtgctca

SEQ ID NO: 5322747 - DNA, 25 bp, Homo sapien
ggcagttggaacagtgctcatgaaa

SEQ ID NO: 5322748 - DNA, 25 bp, Homo sapien
gcagttggaacagtgctcatgaaac

SEQ ID NO: 5322749 - DNA, 25 bp, Homo sapien
cagggagctggcaacacccaggctt

SEQ ID NO: 5322750 - DNA, 25 bp, Homo sapien
aggcttccctgcaagggcgggaggg

SEQ ID NO: 5322751 - DNA, 25 bp, Homo sapien
gggagctggcaacacccaggcttcc

SEQ ID NO: 5322752 - DNA, 25 bp, Homo sapien
gcttccctgcaagggcgggagggac

SEQ ID NO: 5322753 - DNA, 25 bp, Homo sapien
tgctgagggcattgctcacgccttt

SEQ ID NO: 5322754 - DNA, 25 bp, Homo sapien
tgagggcattgctcacgcctttgat

SEQ ID NO: 5322755 - DNA, 25 bp, Homo sapien
tcctgttactgccttggggaagctg

SEQ ID NO: 5322756 - DNA, 25 bp, Homo sapien
agctgctgagggcattgctcacgcc

SEQ ID NO: 5322757 - DNA, 25 bp, Homo sapien
gctgatgccattgcaagtcgtaaag

SEQ ID NO: 5322758 - DNA, 25 bp, Homo sapien
ttgcctcaagatcccctccgggtgg

SEQ ID NO: 5322759 - DNA, 25 bp, Homo sapien
tggtgccgtatctaccaagtggtca

SEQ ID NO: 5322760 - DNA, 25 bp, Homo sapien
tgagcaggtgcaaggtctaagtgac

SEQ ID NO: 5322761 - DNA, 25 bp, Homo sapien
gaattcctggaagtacatccaccct

SEQ ID NO: 5322762 - DNA, 25 bp, Homo sapien
caccctcacagtcactggtctcctg

SEQ ID NO: 5322763 - DNA, 25 bp, Homo sapien
cctttccaaattgccaagaattcct

SEQ ID NO: 5322764 - DNA, 25 bp, Homo sapien
ggaccttcccgtcattctggagaca

SEQ ID NO: 5322765 - DNA, 25 bp, Homo sapien
tctcccactcttggaatgcacaaat

SEQ ID NO: 5322766 - DNA, 25 bp, Homo sapien
ttcccaagatgaattcttctcccac

SEQ ID NO: 5322767 - DNA, 25 bp, Homo sapien
tgcataaccacagggcccattaaga

SEQ ID NO: 5322768 - DNA, 25 bp, Homo sapien
ctttgcataaccacagggcccatta

SEQ ID NO: 5322769 - DNA, 25 bp, Homo sapien
cccgcatctctggagtcatcgggct

SEQ ID NO: 5322770 - DNA, 25 bp, Homo sapien
atctctggagtcatcgggctgctgc

SEQ ID NO: 5322771 - DNA, 25 bp, Homo sapien
cgcatctctggagtcatcgggctgc

SEQ ID NO: 5322772 - DNA, 25 bp, Homo sapien
actgggtcctgatgtccctgtttca

SEQ ID NO: 5322773 - DNA, 25 bp, Homo sapien
gcccatcaacctgagtagttgcagg

SEQ ID NO: 5322774 - DNA, 25 bp, Homo sapien
agttgcaggctattggtgtcatttc

SEQ ID NO: 5322775 - DNA, 25 bp, Homo sapien
agtagttgcaggctattggtgtcat

SEQ ID NO: 5322776 - DNA, 25 bp, Homo sapien
ccatcaacctgagtagttgcaggct

SEQ ID NO: 5322777 - DNA, 25 bp, Homo sapien
ttccttccctgcccgacacatcatc

SEQ ID NO: 5322778 - DNA, 25 bp, Homo sapien
cttccttccctgcccgacacatcat

SEQ ID NO: 5322779 - DNA, 25 bp, Homo sapien
tcctcccacctatcatcactgctgc

SEQ ID NO: 5322780 - DNA, 25 bp, Homo sapien
acactccacagagaatgagtccatg

SEQ ID NO: 5322781 - DNA, 25 bp, Homo sapien
ctcccacctatcatcactgctgcca

SEQ ID NO: 5322782 - DNA, 25 bp, Homo sapien
gtcctcccacctatcatcactgctg

SEQ ID NO: 5322783 - DNA, 25 bp, Homo sapien
gcaagtgctacctatgagcccagtg

SEQ ID NO: 5322784 - DNA, 25 bp, Homo sapien
gcaggtacccatagcattctagagg

SEQ ID NO: 5322785 - DNA, 25 bp, Homo sapien
cagggaattctagggtcgcaggtac

SEQ ID NO: 5322786 - DNA, 25 bp, Homo sapien
tagctcagggacattagtgcaggga

SEQ ID NO: 5322787 - DNA, 25 bp, Homo sapien
ggaagctgcagtttacagggaaacc

SEQ ID NO: 5322788 - DNA, 25 bp, Homo sapien
tgaggaagctgcagtttacagggaa

SEQ ID NO: 5322789 - DNA, 25 bp, Homo sapien
aagctgcagtttacagggaaacctc

SEQ ID NO: 5322790 - DNA, 25 bp, Homo sapien
ctgcagtttacagggaaacctctga

SEQ ID NO: 5322791 - DNA, 25 bp, Homo sapien
agtgcagcagtgcatttctgtataa

SEQ ID NO: 5322792 - DNA, 25 bp, Homo sapien
gctggcagcacgcagttacttaggg

SEQ ID NO: 5322793 - DNA, 25 bp, Homo sapien
gcctgtgcctgagctatggtcagtg

SEQ ID NO: 5322794 - DNA, 25 bp, Homo sapien
tacttagggtgattaacgaatgcat

SEQ ID NO: 5322795 - DNA, 25 bp, Homo sapien
tggctgctccctgtcgacaaggtga

SEQ ID NO: 5322796 - DNA, 25 bp, Homo sapien
caaggtgaacacaagggtatcccct

SEQ ID NO: 5322797 - DNA, 25 bp, Homo sapien
tgggctgccggcacgggaagtactt

SEQ ID NO: 5322798 - DNA, 25 bp, Homo sapien
tgcggtgcttcaggaccagtgggct

SEQ ID NO: 5322799 - DNA, 25 bp, Homo sapien
gcactgtgggaggaccagatagtca

SEQ ID NO: 5322800 - DNA, 25 bp, Homo sapien
cagagaagcggggttgccacaggac

SEQ ID NO: 5322801 - DNA, 25 bp, Homo sapien
tgtgggaggaccagatagtcactgt

SEQ ID NO: 5322802 - DNA, 25 bp, Homo sapien
ggaccagatagtcactgtccctgtt

SEQ ID NO: 5322803 - DNA, 25 bp, Homo sapien
tggggtagggcagggggcctgagca

SEQ ID NO: 5322804 - DNA, 25 bp, Homo sapien
ggggcctgagcaggaaacctttatg

SEQ ID NO: 5322805 - DNA, 25 bp, Homo sapien
gggcagggggcctgagcaggaaacc

SEQ ID NO: 5322806 - DNA, 25 bp, Homo sapien
cagggggcctgagcaggaaaccttt

SEQ ID NO: 5322807 - DNA, 25 bp, Homo sapien
ctaggcttttggctgctttgtggcc

SEQ ID NO: 5322808 - DNA, 25 bp, Homo sapien
ctccagggctaggcttttggctgct

SEQ ID NO: 5322809 - DNA, 25 bp, Homo sapien
aggcttttggctgctttgtggccat

SEQ ID NO: 5322810 - DNA, 25 bp, Homo sapien
ccagggctaggcttttggctgcttt

SEQ ID NO: 5322811 - DNA, 25 bp, Homo sapien
ggaaactggtgttttctgacaacac

SEQ ID NO: 5322812 - DNA, 25 bp, Homo sapien
cctgaaagttggtgctagtgcccgc

SEQ ID NO: 5322813 - DNA, 25 bp, Homo sapien
cacataacaaaagggtcatgggctt

SEQ ID NO: 5322814 - DNA, 25 bp, Homo sapien
tgaaacacatcaggtgtcccaggag

SEQ ID NO: 5322815 - DNA, 25 bp, Homo sapien
tgagccccaggggagttatctaaac

SEQ ID NO: 5322816 - DNA, 25 bp, Homo sapien
cctgcaggagtgtagcctgtaggac

SEQ ID NO: 5322817 - DNA, 25 bp, Homo sapien
tcagctgccataggtacagagacaa

SEQ ID NO: 5322818 - DNA, 25 bp, Homo sapien
tctaaacctaaatgcaggcctgcag

SEQ ID NO: 5322819 - DNA, 25 bp, Homo sapien
tgttcagtcttgaatcttgggtgac

SEQ ID NO: 5322820 - DNA, 25 bp, Homo sapien
ttgttcagtcttgaatcttgggtga

SEQ ID NO: 5322821 - DNA, 25 bp, Homo sapien
tcagtcttgaatcttgggtgactgt

SEQ ID NO: 5322822 - DNA, 25 bp, Homo sapien
gttcagtcttgaatcttgggtgact

SEQ ID NO: 5322823 - DNA, 25 bp, Homo sapien
catggctgttgacataaggcacttg

SEQ ID NO: 5322824 - DNA, 25 bp, Homo sapien
tgagctagggttgctgccatctgaa

SEQ ID NO: 5322825 - DNA, 25 bp, Homo sapien
tagttggatgactgctcagggtgtc

SEQ ID NO: 5322826 - DNA, 25 bp, Homo sapien
gacctcgccattgagctgcttgagt

SEQ ID NO: 5322827 - DNA, 25 bp, Homo sapien
caaaggctatatgtagattttcaac

SEQ ID NO: 5322828 - DNA, 25 bp, Homo sapien
taatccccccaatgtgcaaaggtcg

SEQ ID NO: 5322829 - DNA, 25 bp, Homo sapien
cattgtcaatgttcccctcatttca

SEQ ID NO: 5322830 - DNA, 25 bp, Homo sapien
ggtcgagtgtatattccattgtcaa

SEQ ID NO: 5322831 - DNA, 25 bp, Homo sapien
tccactactggctgaatagcagtat

SEQ ID NO: 5322832 - DNA, 25 bp, Homo sapien
gggatccactactggctgaatagca

SEQ ID NO: 5322833 - DNA, 25 bp, Homo sapien
ttattgtttgtctttgaatgggatc

SEQ ID NO: 5322834 - DNA, 25 bp, Homo sapien
actactggctgaatagcagtatgag

SEQ ID NO: 5322835 - DNA, 25 bp, Homo sapien
ggtccatgggtgcaacctggtggtc

SEQ ID NO: 5322836 - DNA, 25 bp, Homo sapien
aggtccatgggtgcaacctggtggt

SEQ ID NO: 5322837 - DNA, 25 bp, Homo sapien
tggtggtcccacctccacatcctcc

SEQ ID NO: 5322838 - DNA, 25 bp, Homo sapien
cacctccacatcctccttccccact

SEQ ID NO: 5322839 - DNA, 25 bp, Homo sapien
tttcccagtcttagagagggtccca

SEQ ID NO: 5322840 - DNA, 25 bp, Homo sapien
tcccagtcttagagagggtcccaag

SEQ ID NO: 5322841 - DNA, 25 bp, Homo sapien
actgacagtcgcttgtttcccttct

SEQ ID NO: 5322842 - DNA, 25 bp, Homo sapien
ctactgacagtcgcttgtttccctt

SEQ ID NO: 5322843 - DNA, 25 bp, Homo sapien
gatgtcttgcccgattctgagtggg

SEQ ID NO: 5322844 - DNA, 25 bp, Homo sapien
ggccagtacgcaggtgaacattctt

SEQ ID NO: 5322845 - DNA, 25 bp, Homo sapien
agcccattgggttttcagtctgagg

SEQ ID NO: 5322846 - DNA, 25 bp, Homo sapien
ggtacagtgttcaccgaggaggcag

SEQ ID NO: 5322847 - DNA, 25 bp, Homo sapien
tcccacatatgaatagacctcgtct

SEQ ID NO: 5322848 - DNA, 25 bp, Homo sapien
tacttattaccgagtgctcccacat

SEQ ID NO: 5322849 - DNA, 25 bp, Homo sapien
ccgttcgtatgtctattgtgagtca

SEQ ID NO: 5322850 - DNA, 25 bp, Homo sapien
ctctggctgtacagcaaggtactta

SEQ ID NO: 5322851 - DNA, 25 bp, Homo sapien
agagagaacttcgtcttccagggcc

SEQ ID NO: 5322852 - DNA, 25 bp, Homo sapien
agagaacttcgtcttccagggccaa

SEQ ID NO: 5322853 - DNA, 25 bp, Homo sapien
tagagagaacttcgtcttccagggc

SEQ ID NO: 5322854 - DNA, 25 bp, Homo sapien
gagagaacttcgtcttccagggcca

SEQ ID NO: 5322855 - DNA, 25 bp, Homo sapien
gagaacagtcagaaccagatcccaa

SEQ ID NO: 5322856 - DNA, 25 bp, Homo sapien
ctggctttgcttcaagcacagggat

SEQ ID NO: 5322857 - DNA, 25 bp, Homo sapien
gggagcactgcgtaaggaagcttca

SEQ ID NO: 5322858 - DNA, 25 bp, Homo sapien
cgtaaggaagcttcagggccctgtg

SEQ ID NO: 5322859 - DNA, 25 bp, Homo sapien
ctaggggtgtgcaggcctgcgaggg

SEQ ID NO: 5322860 - DNA, 25 bp, Homo sapien
aggggtgtgcaggcctgcgaggggc

SEQ ID NO: 5322861 - DNA, 25 bp, Homo sapien
taggggtgtgcaggcctgcgagggg

SEQ ID NO: 5322862 - DNA, 25 bp, Homo sapien
gggtgtgcaggcctgcgaggggcac

SEQ ID NO: 5322863 - DNA, 25 bp, Homo sapien
gcttcccagataagcatgttatggg

SEQ ID NO: 5322864 - DNA, 25 bp, Homo sapien
caagccacgggccaggtccagaaca

SEQ ID NO: 5322865 - DNA, 25 bp, Homo sapien
agggagaagcaagattgtccctgga

SEQ ID NO: 5322866 - DNA, 25 bp, Homo sapien
tggaaagcaaggacccctggaacca

SEQ ID NO: 5322867 - DNA, 25 bp, Homo sapien
agggctctcatggtatttgcagtgt

SEQ ID NO: 5322868 - DNA, 25 bp, Homo sapien
ctccctgccatgagaaacagctctg

SEQ ID NO: 5322869 - DNA, 25 bp, Homo sapien
ctgtcacatctccagtgagggctct

SEQ ID NO: 5322870 - DNA, 25 bp, Homo sapien
aacagctctgccaaccactgtcaca

SEQ ID NO: 5322871 - DNA, 25 bp, Homo sapien
tagagagtaagagggtgtaggggta

SEQ ID NO: 5322872 - DNA, 25 bp, Homo sapien
gagagtaagagggtgtaggggtata

SEQ ID NO: 5322873 - DNA, 25 bp, Homo sapien
ctagagagtaagagggtgtaggggt

SEQ ID NO: 5322874 - DNA, 25 bp, Homo sapien
agagagtaagagggtgtaggggtat

SEQ ID NO: 5322875 - DNA, 25 bp, Homo sapien
caccagctggtgatggcacctcctg

SEQ ID NO: 5322876 - DNA, 25 bp, Homo sapien
gggcgtgccacactgtacttcctct

SEQ ID NO: 5322877 - DNA, 25 bp, Homo sapien
gaagccttgggcgtgccacactgta

SEQ ID NO: 5322878 - DNA, 25 bp, Homo sapien
gacttcaccagctggtgatggcacc

SEQ ID NO: 5322879 - DNA, 25 bp, Homo sapien
acaaattccagaggttgccgccttt

SEQ ID NO: 5322880 - DNA, 25 bp, Homo sapien
agaggttgccgccttttccttgtat

SEQ ID NO: 5322881 - DNA, 25 bp, Homo sapien
gttgccgccttttccttgtatttca

SEQ ID NO: 5322882 - DNA, 25 bp, Homo sapien
attccagaggttgccgccttttcct

SEQ ID NO: 5322883 - DNA, 25 bp, Homo sapien
cccgcaggagatcgcctttctttct

SEQ ID NO: 5322884 - DNA, 25 bp, Homo sapien
gggtcctgggctttcggctcatctt

SEQ ID NO: 5322885 - DNA, 25 bp, Homo sapien
gggctttcggctcatctttgtacaa

SEQ ID NO: 5322886 - DNA, 25 bp, Homo sapien
tctttgtacaacagtcccgcaggag

SEQ ID NO: 5322887 - DNA, 25 bp, Homo sapien
tggccactctgtccacggttgagtg

SEQ ID NO: 5322888 - DNA, 25 bp, Homo sapien
gcaggtgtatgaaatggctaagccc

SEQ ID NO: 5322889 - DNA, 25 bp, Homo sapien
cacacagctgggagaaggagcggat

SEQ ID NO: 5322890 - DNA, 25 bp, Homo sapien
ttgagtggagtggagcttgctacct

SEQ ID NO: 5322891 - DNA, 25 bp, Homo sapien
taagcatgaatgtggaaaggttacc

SEQ ID NO: 5322892 - DNA, 25 bp, Homo sapien
caacctcaggtatgggcaatggcca

SEQ ID NO: 5322893 - DNA, 25 bp, Homo sapien
acctcaggtctcaacctcaggtatg

SEQ ID NO: 5322894 - DNA, 25 bp, Homo sapien
gaaaggttacccaagtgcataaggc

SEQ ID NO: 5322895 - DNA, 25 bp, Homo sapien
tgcccggctgacttgaggaacttct

SEQ ID NO: 5322896 - DNA, 25 bp, Homo sapien
cggctgacttgaggaacttctgtaa

SEQ ID NO: 5322897 - DNA, 25 bp, Homo sapien
catgagtcagtatgcccggctgact

SEQ ID NO: 5322898 - DNA, 25 bp, Homo sapien
gcatgagtcagtatgcccggctgac

SEQ ID NO: 5322899 - DNA, 25 bp, Homo sapien
cagatcagaaatctgaaatcagttt

SEQ ID NO: 5322900 - DNA, 25 bp, Homo sapien
tctttcagttctgcagatcagaaat

SEQ ID NO: 5322901 - DNA, 25 bp, Homo sapien
attaaggggtaagcagagcctgcag

SEQ ID NO: 5322902 - DNA, 25 bp, Homo sapien
caaaattaaggggtaagcagagcct

SEQ ID NO: 5322903 - DNA, 25 bp, Homo sapien
agagctgcagtgtttgcattctttg

SEQ ID NO: 5322904 - DNA, 25 bp, Homo sapien
gctgcagtgtttgcattctttggct

SEQ ID NO: 5322905 - DNA, 25 bp, Homo sapien
gcagtgtttgcattctttggctctt

SEQ ID NO: 5322906 - DNA, 25 bp, Homo sapien
gagctgcagtgtttgcattctttgg

SEQ ID NO: 5322907 - DNA, 25 bp, Homo sapien
ctgcttcctttgtcatatggctttg

SEQ ID NO: 5322908 - DNA, 25 bp, Homo sapien
aataatccgggataatctccccact

SEQ ID NO: 5322909 - DNA, 25 bp, Homo sapien
gattacatttaagatccatctgaat

SEQ ID NO: 5322910 - DNA, 25 bp, Homo sapien
tgtcatatggctttgtttgtcttct

SEQ ID NO: 5322911 - DNA, 25 bp, Homo sapien
ctgtgaaatgcacgtggccccatca

SEQ ID NO: 5322912 - DNA, 25 bp, Homo sapien
gagggagaccagagccagtcatgct

SEQ ID NO: 5322913 - DNA, 25 bp, Homo sapien
atcattcagcccacccagtcagtaa

SEQ ID NO: 5322914 - DNA, 25 bp, Homo sapien
aagtcttctggaggtaggccctgga

SEQ ID NO: 5322915 - DNA, 25 bp, Homo sapien
gaaagctctgagaaggacatcccga

SEQ ID NO: 5322916 - DNA, 25 bp, Homo sapien
gatgtccgtttctttgtgcaccgaa

SEQ ID NO: 5322917 - DNA, 25 bp, Homo sapien
gcgctctcgctctagagaaggcaga

SEQ ID NO: 5322918 - DNA, 25 bp, Homo sapien
tagcatggtgaggaatagcggcctc

SEQ ID NO: 5322919 - DNA, 25 bp, Homo sapien
gtgcatctgattcggaagtcctcgt

SEQ ID NO: 5322920 - DNA, 25 bp, Homo sapien
gattcggaagtcctcgtggttctac

SEQ ID NO: 5322921 - DNA, 25 bp, Homo sapien
ctcgtggttctaccttcggaaggtg

SEQ ID NO: 5322922 - DNA, 25 bp, Homo sapien
attccaaagtgcatctgattcggaa

SEQ ID NO: 5322923 - DNA, 25 bp, Homo sapien
caaggaatagttgaggcctttgtcc

SEQ ID NO: 5322924 - DNA, 25 bp, Homo sapien
gcctttgtcctcaggttggcctggg

SEQ ID NO: 5322925 - DNA, 25 bp, Homo sapien
aaatccacatcacttgtttcttcgg

SEQ ID NO: 5322926 - DNA, 25 bp, Homo sapien
cctgattatcagcatggttcaagga

SEQ ID NO: 5322927 - DNA, 25 bp, Homo sapien
caaactgcgtgtccctttggttgaa

SEQ ID NO: 5322928 - DNA, 25 bp, Homo sapien
tgttctgcttagtctcattgaaaga

SEQ ID NO: 5322929 - DNA, 25 bp, Homo sapien
tcaggtgccaactgagcacttgtct

SEQ ID NO: 5322930 - DNA, 25 bp, Homo sapien
ggagccaaggcctcatagagataga

SEQ ID NO: 5322931 - DNA, 25 bp, Homo sapien
ccagtgtcgggctcgctgacagctg

SEQ ID NO: 5322932 - DNA, 25 bp, Homo sapien
cctttctcagagcctgtcaattgta

SEQ ID NO: 5322933 - DNA, 25 bp, Homo sapien
cttgaatgccagtgtcgggctcgct

SEQ ID NO: 5322934 - DNA, 25 bp, Homo sapien
gagcctgtcaattgtaaagaggaga

SEQ ID NO: 5322935 - DNA, 25 bp, Homo sapien
gccttcccactgggggcggtcagcc

SEQ ID NO: 5322936 - DNA, 25 bp, Homo sapien
agccttcccactgggggcggtcagc

SEQ ID NO: 5322937 - DNA, 25 bp, Homo sapien
cagccttcccactgggggcggtcag

SEQ ID NO: 5322938 - DNA, 25 bp, Homo sapien
gacctgcagactttaaggcactcat

SEQ ID NO: 5322939 - DNA, 25 bp, Homo sapien
ggccgcctgacctgcagactttaag

SEQ ID NO: 5322940 - DNA, 25 bp, Homo sapien
ttgaggggccgcctgacctgcagac

SEQ ID NO: 5322941 - DNA, 25 bp, Homo sapien
tgacctgcagactttaaggcactca

SEQ ID NO: 5322942 - DNA, 25 bp, Homo sapien
ttagccagtgttgcttgtaacgagt

SEQ ID NO: 5322943 - DNA, 25 bp, Homo sapien
ctcagggaagggagcaacatgtact

SEQ ID NO: 5322944 - DNA, 25 bp, Homo sapien
catgtgacaggatggaaatgcttcc

SEQ ID NO: 5322945 - DNA, 25 bp, Homo sapien
ttgtaacgagttccctgcagctcag

SEQ ID NO: 5322946 - DNA, 25 bp, Homo sapien
gactttcgttcagtttgtggcccac

SEQ ID NO: 5322947 - DNA, 25 bp, Homo sapien
cagtttgtggcccactaagaccctt

SEQ ID NO: 5322948 - DNA, 25 bp, Homo sapien
ctgctgactttcgttcagtttgtgg

SEQ ID NO: 5322949 - DNA, 25 bp, Homo sapien
cgttcagtttgtggcccactaagac

SEQ ID NO: 5322950 - DNA, 25 bp, Homo sapien
gctttgctgatctacaaggcagaca

SEQ ID NO: 5322951 - DNA, 25 bp, Homo sapien
tctttctcttgtggatgcgctttgc

SEQ ID NO: 5322952 - DNA, 25 bp, Homo sapien
gatgcgctttgctgatctacaaggc

SEQ ID NO: 5322953 - DNA, 25 bp, Homo sapien
tctcttgtggatgcgctttgctgat

SEQ ID NO: 5322954 - DNA, 25 bp, Homo sapien
cctctgcaactcgactaggaagctt

SEQ ID NO: 5322955 - DNA, 25 bp, Homo sapien
gcaactcgactaggaagcttaggaa

SEQ ID NO: 5322956 - DNA, 25 bp, Homo sapien
ctatgtggttctcccaataagctta

SEQ ID NO: 5322957 - DNA, 25 bp, Homo sapien
gtggttctcccaataagcttaattc

SEQ ID NO: 5322958 - DNA, 25 bp, Homo sapien
cagatatgctcttggtattgctcat

SEQ ID NO: 5322959 - DNA, 25 bp, Homo sapien
tattgctcatgttgttagctgcagc

SEQ ID NO: 5322960 - DNA, 25 bp, Homo sapien
ttggcatgtgtgcattcagatatgc

SEQ ID NO: 5322961 - DNA, 25 bp, Homo sapien
acatgttgactcatgactgcctgta

SEQ ID NO: 5322962 - DNA, 25 bp, Homo sapien
gaaatgtatacatctctagttaaag

SEQ ID NO: 5322963 - DNA, 25 bp, Homo sapien
catgtcaagaaacatggtcatatgt

SEQ ID NO: 5322964 - DNA, 25 bp, Homo sapien
cagacaagacatggataaccaacaa

SEQ ID NO: 5322965 - DNA, 25 bp, Homo sapien
acataggaacactgactggtatttc

SEQ ID NO: 5322966 - DNA, 25 bp, Homo sapien
ctaaccagaaatgctacgagagagc

SEQ ID NO: 5322967 - DNA, 25 bp, Homo sapien
gaaatgctacgagagagctggcaaa

SEQ ID NO: 5322968 - DNA, 25 bp, Homo sapien
cagaaatgctacgagagagctggca

SEQ ID NO: 5322969 - DNA, 25 bp, Homo sapien
aaccagaaatgctacgagagagctg

SEQ ID NO: 5322970 - DNA, 25 bp, Homo sapien
caaccttggaatttcagagtgagag

SEQ ID NO: 5322971 - DNA, 25 bp, Homo sapien
taagaaatttggcatcaggtggaca

SEQ ID NO: 5322972 - DNA, 25 bp, Homo sapien
ctcttacagtctctagaatgatctg

SEQ ID NO: 5322973 - DNA, 25 bp, Homo sapien
gatctgtcagattttcactcaacaa

SEQ ID NO: 5322974 - DNA, 25 bp, Homo sapien
tggaggtggaaacgaactgccaact

SEQ ID NO: 5322975 - DNA, 25 bp, Homo sapien
gatatgtatcgctttttccaagggc

SEQ ID NO: 5322976 - DNA, 25 bp, Homo sapien
ccttaaggtaagaaatgctgcaaca

SEQ ID NO: 5322977 - DNA, 25 bp, Homo sapien
tgcagagagccggtcaaagtcttgg

SEQ ID NO: 5322978 - DNA, 25 bp, Homo sapien
gaacctacattatgggctctgtgag

SEQ ID NO: 5322979 - DNA, 25 bp, Homo sapien
tggtaaccacaaatgcttaggcagc

SEQ ID NO: 5322980 - DNA, 25 bp, Homo sapien
caaaacctacagtaagacaggctgg

SEQ ID NO: 5322981 - DNA, 25 bp, Homo sapien
gattgggaatcagcacatcagcctg

SEQ ID NO: 5322982 - DNA, 25 bp, Homo sapien
cttctcctgtaggttacccacgtag

SEQ ID NO: 5322983 - DNA, 25 bp, Homo sapien
cgtagcccagatacaaccggatggc

SEQ ID NO: 5322984 - DNA, 25 bp, Homo sapien
gcttcaattaaggttattaggatga

SEQ ID NO: 5322985 - DNA, 25 bp, Homo sapien
caatgaatttgtagtagtcaggtaa

SEQ ID NO: 5322986 - DNA, 25 bp, Homo sapien
aagtgacatctgcagtgccaaactg

SEQ ID NO: 5322987 - DNA, 25 bp, Homo sapien
ccacagtgggaaatagtaggtatta

SEQ ID NO: 5322988 - DNA, 25 bp, Homo sapien
taaagtgacatctgcagtgccaaac

SEQ ID NO: 5322989 - DNA, 25 bp, Homo sapien
gaagcatcataatgctgctcaccca

SEQ ID NO: 5322990 - DNA, 25 bp, Homo sapien
gcctaggatcttttcgatagcaaca

SEQ ID NO: 5322991 - DNA, 25 bp, Homo sapien
cagcctaggatcttttcgatagcaa

SEQ ID NO: 5322992 - DNA, 25 bp, Homo sapien
taggatcttttcgatagcaacagta

SEQ ID NO: 5322993 - DNA, 25 bp, Homo sapien
tcttttcgatagcaacagtacaaag

SEQ ID NO: 5322994 - DNA, 25 bp, Homo sapien
ctcattggactctggaccggtccga

SEQ ID NO: 5322995 - DNA, 25 bp, Homo sapien
gctggcgcaccggatccggcagctc

SEQ ID NO: 5322996 - DNA, 25 bp, Homo sapien
gattggaatcactgaacacggcccg

SEQ ID NO: 5322997 - DNA, 25 bp, Homo sapien
acacggcccggctgaagtttcccag

SEQ ID NO: 5322998 - DNA, 25 bp, Homo sapien
tctgctttgagctcgaccatcctaa

SEQ ID NO: 5322999 - DNA, 25 bp, Homo sapien
tgtacaaaacggcagatcccttagt

SEQ ID NO: 5323000 - DNA, 25 bp, Homo sapien
ttggactgcgatacaaggagccctc

SEQ ID NO: 5323001 - DNA, 25 bp, Homo sapien
ctcagacacgggctagtctgcgggc

SEQ ID NO: 5323002 - DNA, 25 bp, Homo sapien
gcagctgctccatgcgtcaaccatg

SEQ ID NO: 5323003 - DNA, 25 bp, Homo sapien
tgggagatgggaacgtcaagccgag

SEQ ID NO: 5323004 - DNA, 25 bp, Homo sapien
catgcgtcaaccatgtgggagatgg

SEQ ID NO: 5323005 - DNA, 25 bp, Homo sapien
tcaagccgagggaagaaaatcagta

SEQ ID NO: 5323006 - DNA, 25 bp, Homo sapien
gcctgccggcgtgctggtacttgtc

SEQ ID NO: 5323007 - DNA, 25 bp, Homo sapien
ccaaactccgtgtcattctgcaggg

SEQ ID NO: 5323008 - DNA, 25 bp, Homo sapien
gccaaactccgtgtcattctgcagg

SEQ ID NO: 5323009 - DNA, 25 bp, Homo sapien
ggtacttgtcggtgcattcctctcg

SEQ ID NO: 5323010 - DNA, 25 bp, Homo sapien
ctagggaatagattccagcagctca

SEQ ID NO: 5323011 - DNA, 25 bp, Homo sapien
tcaggctccttcccattggttctca

SEQ ID NO: 5323012 - DNA, 25 bp, Homo sapien
caggctccttcccattggttctcac

SEQ ID NO: 5323013 - DNA, 25 bp, Homo sapien
agctcaggctccttcccattggttc

SEQ ID NO: 5323014 - DNA, 25 bp, Homo sapien
ctggtgctttagttgaacccaggta

SEQ ID NO: 5323015 - DNA, 25 bp, Homo sapien
gcaggctggtgctttagttgaaccc

SEQ ID NO: 5323016 - DNA, 25 bp, Homo sapien
ggctggtgctttagttgaacccagg

SEQ ID NO: 5323017 - DNA, 25 bp, Homo sapien
agcaggctggtgctttagttgaacc

SEQ ID NO: 5323018 - DNA, 25 bp, Homo sapien
catgctgggtaacattgtagactct

SEQ ID NO: 5323019 - DNA, 25 bp, Homo sapien
aatttgtttgtttacaacaatgcca

SEQ ID NO: 5323020 - DNA, 25 bp, Homo sapien
tatcacctttcttatagattcgcat

SEQ ID NO: 5323021 - DNA, 25 bp, Homo sapien
aagaatcttgcccttaatttgtttg

SEQ ID NO: 5323022 - DNA, 25 bp, Homo sapien
cgtggccaaagaacaactccatgtt

SEQ ID NO: 5323023 - DNA, 25 bp, Homo sapien
tacgtggccaaagaacaactccatg

SEQ ID NO: 5323024 - DNA, 25 bp, Homo sapien
atacgtggccaaagaacaactccat

SEQ ID NO: 5323025 - DNA, 25 bp, Homo sapien
tggccaaagaacaactccatgtttt

SEQ ID NO: 5323026 - DNA, 25 bp, Homo sapien
ggagaacttgccttcaactctgagg

SEQ ID NO: 5323027 - DNA, 25 bp, Homo sapien
cattgaagtttatggctgggctgag

SEQ ID NO: 5323028 - DNA, 25 bp, Homo sapien
ccatgagtgacactggaagatcttc

SEQ ID NO: 5323029 - DNA, 25 bp, Homo sapien
taacagtaaagtcgcattgcttccc

SEQ ID NO: 5323030 - DNA, 25 bp, Homo sapien
tcaagaatggagctgcggacttttg

SEQ ID NO: 5323031 - DNA, 25 bp, Homo sapien
gctcttgaagatgtcacggacccag

SEQ ID NO: 5323032 - DNA, 25 bp, Homo sapien
caggaaatggggtatcccacgtcag

SEQ ID NO: 5323033 - DNA, 25 bp, Homo sapien
gcggacttttgtgatgagtgttaca

SEQ ID NO: 5323034 - DNA, 25 bp, Homo sapien
ttacacatcgaagctgtaagggtga

SEQ ID NO: 5323035 - DNA, 25 bp, Homo sapien
tgaggttccaggtgttgaatctgga

SEQ ID NO: 5323036 - DNA, 25 bp, Homo sapien
caagtttagggtagctgatattcac

SEQ ID NO: 5323037 - DNA, 25 bp, Homo sapien
tcatttgtgcagcattacacatcga

SEQ ID NO: 5323038 - DNA, 25 bp, Homo sapien
gatgcttctgcagctttagctgacc

SEQ ID NO: 5323039 - DNA, 25 bp, Homo sapien
actgaactggccagacccaccttct

SEQ ID NO: 5323040 - DNA, 25 bp, Homo sapien
gacccaccttcttgcacaaaaatga

SEQ ID NO: 5323041 - DNA, 25 bp, Homo sapien
ggtttaaggggacagcactgaactg

SEQ ID NO: 5323042 - DNA, 25 bp, Homo sapien
tgggtttaaggggacagcactgaac

SEQ ID NO: 5323043 - DNA, 25 bp, Homo sapien
cttgtacagtagttgtttggaatgg

SEQ ID NO: 5323044 - DNA, 25 bp, Homo sapien
gaatggctaacaattcccacaccag

SEQ ID NO: 5323045 - DNA, 25 bp, Homo sapien
gctaacaattcccacaccagattct

SEQ ID NO: 5323046 - DNA, 25 bp, Homo sapien
cagtagttgtttggaatggctaaca

SEQ ID NO: 5323047 - DNA, 25 bp, Homo sapien
tgcagcagtcaagctcatctactat

SEQ ID NO: 5323048 - DNA, 25 bp, Homo sapien
ttgaccttcccatgagacgttagga

SEQ ID NO: 5323049 - DNA, 25 bp, Homo sapien
gagacgttaggaatctttgtggctg

SEQ ID NO: 5323050 - DNA, 25 bp, Homo sapien
agtcccactagtgccaataccttga

SEQ ID NO: 5323051 - DNA, 25 bp, Homo sapien
tccctgggccaggttcgtgtaagaa

SEQ ID NO: 5323052 - DNA, 25 bp, Homo sapien
tctgtggacagatgcaaagctgagc

SEQ ID NO: 5323053 - DNA, 25 bp, Homo sapien
gccaggcaagaccattaaatccagc

SEQ ID NO: 5323054 - DNA, 25 bp, Homo sapien
ccaagaagtttgatgggatggtaga

SEQ ID NO: 5323055 - DNA, 25 bp, Homo sapien
ttagtagttccaagtctccagaggg

SEQ ID NO: 5323056 - DNA, 25 bp, Homo sapien
catttaagtgaccttatgtaaaaag

SEQ ID NO: 5323057 - DNA, 25 bp, Homo sapien
tagttccaagtctccagagggcatt

SEQ ID NO: 5323058 - DNA, 25 bp, Homo sapien
taataatttagtagttccaagtctc

SEQ ID NO: 5323059 - DNA, 25 bp, Homo sapien
ctttgaagtttctgtagcgctttat

SEQ ID NO: 5323060 - DNA, 25 bp, Homo sapien
tttgaagtttctgtagcgctttatt

SEQ ID NO: 5323061 - DNA, 25 bp, Homo sapien
ttgaagtttctgtagcgctttattt

SEQ ID NO: 5323062 - DNA, 25 bp, Homo sapien
tctttgaagtttctgtagcgcttta

SEQ ID NO: 5323063 - DNA, 25 bp, Homo sapien
tcttcaactctctttattgcctcaa

SEQ ID NO: 5323064 - DNA, 25 bp, Homo sapien
ttcactacaaatttagcttggcgtt

SEQ ID NO: 5323065 - DNA, 25 bp, Homo sapien
tcaactctctttattgcctcaatag

SEQ ID NO: 5323066 - DNA, 25 bp, Homo sapien
ctgttcactacaaatttagcttggc

SEQ ID NO: 5323067 - DNA, 25 bp, Homo sapien
gatatttagagttacaaaatctgaa

SEQ ID NO: 5323068 - DNA, 25 bp, Homo sapien
gctctttatcagctgctttccagaa

SEQ ID NO: 5323069 - DNA, 25 bp, Homo sapien
ccaactttgcgaggattgcgcttct

SEQ ID NO: 5323070 - DNA, 25 bp, Homo sapien
tccacccaactttgcgaggattgcg

SEQ ID NO: 5323071 - DNA, 25 bp, Homo sapien
ttgcaattgttctggacaaacatca

SEQ ID NO: 5323072 - DNA, 25 bp, Homo sapien
tgcaattgttctggacaaacatcat

SEQ ID NO: 5323073 - DNA, 25 bp, Homo sapien
cttgcaattgttctggacaaacatc

SEQ ID NO: 5323074 - DNA, 25 bp, Homo sapien
tgtggccagggtagatggaccccga

SEQ ID NO: 5323075 - DNA, 25 bp, Homo sapien
gatggaccccgaacagaaataacac

SEQ ID NO: 5323076 - DNA, 25 bp, Homo sapien
gccagggtagatggaccccgaacag

SEQ ID NO: 5323077 - DNA, 25 bp, Homo sapien
cagaaataacacttctcgatacaca

SEQ ID NO: 5323078 - DNA, 25 bp, Homo sapien
aaatccttgtgactgaatcctctgg

SEQ ID NO: 5323079 - DNA, 25 bp, Homo sapien
ggagactatgtttaaaactggccat

SEQ ID NO: 5323080 - DNA, 25 bp, Homo sapien
gggctcacaaagttggagactatgt

SEQ ID NO: 5323081 - DNA, 25 bp, Homo sapien
aatccttgtgactgaatcctctggg

SEQ ID NO: 5323082 - DNA, 25 bp, Homo sapien
atttaagagctacaaagacaggcag

SEQ ID NO: 5323083 - DNA, 25 bp, Homo sapien
ttctcacataggatttgaggtgcct

SEQ ID NO: 5323084 - DNA, 25 bp, Homo sapien
ctcttgtagcgatagcaaacacttg

SEQ ID NO: 5323085 - DNA, 25 bp, Homo sapien
tgcctgagggcaagaatctgtgctc

SEQ ID NO: 5323086 - DNA, 25 bp, Homo sapien
tgtccaccttgggtaatagctgtcc

SEQ ID NO: 5323087 - DNA, 25 bp, Homo sapien
tcaactctgaccaaaatataggatc

SEQ ID NO: 5323088 - DNA, 25 bp, Homo sapien
tgtaagaacgtgtcagccgtgaggt

SEQ ID NO: 5323089 - DNA, 25 bp, Homo sapien
gctgtcctacaccaatcaactctga

SEQ ID NO: 5323090 - DNA, 25 bp, Homo sapien
gactgtactgtggaatcacatctgg

SEQ ID NO: 5323091 - DNA, 25 bp, Homo sapien
tctggacaagattttgctgtagttc

SEQ ID NO: 5323092 - DNA, 25 bp, Homo sapien
tcagggctgactgtactgtggaatc

SEQ ID NO: 5323093 - DNA, 25 bp, Homo sapien
gaatcacatctggacaagattttgc

SEQ ID NO: 5323094 - DNA, 25 bp, Homo sapien
tctgtcctggcgtgtgtacattgca

SEQ ID NO: 5323095 - DNA, 25 bp, Homo sapien
caactgtagaatttctgtcctggcg

SEQ ID NO: 5323096 - DNA, 25 bp, Homo sapien
cctggcgtgtgtacattgcagatca

SEQ ID NO: 5323097 - DNA, 25 bp, Homo sapien
actgtagaatttctgtcctggcgtg

SEQ ID NO: 5323098 - DNA, 25 bp, Homo sapien
tccacagctgattagacagcttcct

SEQ ID NO: 5323099 - DNA, 25 bp, Homo sapien
ctgttgttcctatcacttctccatt

SEQ ID NO: 5323100 - DNA, 25 bp, Homo sapien
gctgattagacagcttcctgtccat

SEQ ID NO: 5323101 - DNA, 25 bp, Homo sapien
ttctccattccacagctgattagac

SEQ ID NO: 5323102 - DNA, 25 bp, Homo sapien
tgggacattgttcgatgtgatgaaa

SEQ ID NO: 5323103 - DNA, 25 bp, Homo sapien
ttctttcagtaaccagaaatctgtg

SEQ ID NO: 5323104 - DNA, 25 bp, Homo sapien
taagagatgcagctccatcattgct

SEQ ID NO: 5323105 - DNA, 25 bp, Homo sapien
cctttcgttgttgccaagatgtggg

SEQ ID NO: 5323106 - DNA, 25 bp, Homo sapien
agctactcttggcttcatggaatca

SEQ ID NO: 5323107 - DNA, 25 bp, Homo sapien
agagctactcttggcttcatggaat

SEQ ID NO: 5323108 - DNA, 25 bp, Homo sapien
ttgaagagctactcttggcttcatg

SEQ ID NO: 5323109 - DNA, 25 bp, Homo sapien
gctactcttggcttcatggaatcac

SEQ ID NO: 5323110 - DNA, 25 bp, Homo sapien
aagtcaggtgaagagaatcatgtgc

SEQ ID NO: 5323111 - DNA, 25 bp, Homo sapien
catggacccatatatgaagtcaggt

SEQ ID NO: 5323112 - DNA, 25 bp, Homo sapien
aatcatgtgcttttctgtcattagg

SEQ ID NO: 5323113 - DNA, 25 bp, Homo sapien
ttctgtcattaggtcacagagagag

SEQ ID NO: 5323114 - DNA, 25 bp, Homo sapien
gtgattcaactttgacccaggtttg

SEQ ID NO: 5323115 - DNA, 25 bp, Homo sapien
attcaactttgacccaggtttgata

SEQ ID NO: 5323116 - DNA, 25 bp, Homo sapien
tgattcaactttgacccaggtttga

SEQ ID NO: 5323117 - DNA, 25 bp, Homo sapien
gattcaactttgacccaggtttgat

SEQ ID NO: 5323118 - DNA, 25 bp, Homo sapien
tcatctgtggacatgtgaaactaga

SEQ ID NO: 5323119 - DNA, 25 bp, Homo sapien
ccttgctggggcacaatttttcttc

SEQ ID NO: 5323120 - DNA, 25 bp, Homo sapien
ctaaatcaggtatgaatggatgagg

SEQ ID NO: 5323121 - DNA, 25 bp, Homo sapien
atcaggtatgaatggatgaggctct

SEQ ID NO: 5323122 - DNA, 25 bp, Homo sapien
gtcctgtgcaatcagcacaacgtca

SEQ ID NO: 5323123 - DNA, 25 bp, Homo sapien
tggactatatcatgacagaagttgg

SEQ ID NO: 5323124 - DNA, 25 bp, Homo sapien
cacaacgtcactgatagaatgggtc

SEQ ID NO: 5323125 - DNA, 25 bp, Homo sapien
gacttctagtatacgagcctctcat

SEQ ID NO: 5323126 - DNA, 25 bp, Homo sapien
tccgagaacatttaaggttatcaca

SEQ ID NO: 5323127 - DNA, 25 bp, Homo sapien
gacacaccgatatgttgcaagcaac

SEQ ID NO: 5323128 - DNA, 25 bp, Homo sapien
gcaagcaacttcataccaatcatag

SEQ ID NO: 5323129 - DNA, 25 bp, Homo sapien
tcatagtagaagtatcaaagttcgc

SEQ ID NO: 5323130 - DNA, 25 bp, Homo sapien
cttcactaggaaggtattactcttg

SEQ ID NO: 5323131 - DNA, 25 bp, Homo sapien
agtcatcttcactaggaaggtatta

SEQ ID NO: 5323132 - DNA, 25 bp, Homo sapien
tcttcactaggaaggtattactctt

SEQ ID NO: 5323133 - DNA, 25 bp, Homo sapien
catcttcactaggaaggtattactc

SEQ ID NO: 5323134 - DNA, 25 bp, Homo sapien
tgttcaggaagctgacactcacaaa

SEQ ID NO: 5323135 - DNA, 25 bp, Homo sapien
ctttttgctcttattgtcaaagtgt

SEQ ID NO: 5323136 - DNA, 25 bp, Homo sapien
tgacactcacaaactttgcctcctt

SEQ ID NO: 5323137 - DNA, 25 bp, Homo sapien
gctcttattgtcaaagtgttcagga

SEQ ID NO: 5323138 - DNA, 25 bp, Homo sapien
tggcccgagggagaagatgcttggg

SEQ ID NO: 5323139 - DNA, 25 bp, Homo sapien
gaccttcttatcagtgtctaagtag

SEQ ID NO: 5323140 - DNA, 25 bp, Homo sapien
aagtagtcatgccatagcttccaga

SEQ ID NO: 5323141 - DNA, 25 bp, Homo sapien
cttcagagcttagaagcagggactg

SEQ ID NO: 5323142 - DNA, 25 bp, Homo sapien
cagtgtctaagtagtcatgccatag

SEQ ID NO: 5323143 - DNA, 25 bp, Homo sapien
ggtccagattctcatacaggaaagt

SEQ ID NO: 5323144 - DNA, 25 bp, Homo sapien
tacaggaaagttcctccaaactcca

SEQ ID NO: 5323145 - DNA, 25 bp, Homo sapien
tttagacccttgtcccaggtccaga

SEQ ID NO: 5323146 - DNA, 25 bp, Homo sapien
tcctttagactctgctttagaccct

SEQ ID NO: 5323147 - DNA, 25 bp, Homo sapien
gctccatggattgttgctgggttga

SEQ ID NO: 5323148 - DNA, 25 bp, Homo sapien
ctgggttgattttggatcatcagca

SEQ ID NO: 5323149 - DNA, 25 bp, Homo sapien
tgtctggaaattgtgttgggcatcc

SEQ ID NO: 5323150 - DNA, 25 bp, Homo sapien
tcatcagcaaggactcttttggtct

SEQ ID NO: 5323151 - DNA, 25 bp, Homo sapien
cggggatggaggactcggtggcggc

SEQ ID NO: 5323152 - DNA, 25 bp, Homo sapien
gcggggatggaggactcggtggcgg

SEQ ID NO: 5323153 - DNA, 25 bp, Homo sapien
ggcggggatggaggactcggtggcg

SEQ ID NO: 5323154 - DNA, 25 bp, Homo sapien
tcctccctccgactgaaaaatagca

SEQ ID NO: 5323155 - DNA, 25 bp, Homo sapien
tttccctccggttggcagcgaagga

SEQ ID NO: 5323156 - DNA, 25 bp, Homo sapien
ggtggacattaaacagcatccctag

SEQ ID NO: 5323157 - DNA, 25 bp, Homo sapien
cacatattgtcggacttgaggctat

SEQ ID NO: 5323158 - DNA, 25 bp, Homo sapien
cgtcttcggtgtgaattgtaatttc

SEQ ID NO: 5323159 - DNA, 25 bp, Homo sapien
gctccacgtcttcggtgtgaattgt

SEQ ID NO: 5323160 - DNA, 25 bp, Homo sapien
cacgtcttcggtgtgaattgtaatt

SEQ ID NO: 5323161 - DNA, 25 bp, Homo sapien
tccacgtcttcggtgtgaattgtaa

SEQ ID NO: 5323162 - DNA, 25 bp, Homo sapien
ttcattgccacggagttgatgcagt

SEQ ID NO: 5323163 - DNA, 25 bp, Homo sapien
gagttgatgcagttgtcttccattg

SEQ ID NO: 5323164 - DNA, 25 bp, Homo sapien
gcgacaaatagtctcttgtgagagg

SEQ ID NO: 5323165 - DNA, 25 bp, Homo sapien
cctgcgacaaatagtctcttgtgag

SEQ ID NO: 5323166 - DNA, 25 bp, Homo sapien
aaaagtgagagcaatgtgttttagc

SEQ ID NO: 5323167 - DNA, 25 bp, Homo sapien
gtgagagcaatgtgttttagctgtg

SEQ ID NO: 5323168 - DNA, 25 bp, Homo sapien
aaagtgagagcaatgtgttttagct

SEQ ID NO: 5323169 - DNA, 25 bp, Homo sapien
aagtgagagcaatgtgttttagctg

SEQ ID NO: 5323170 - DNA, 25 bp, Homo sapien
cttgttaagtgcactattgagaaag

SEQ ID NO: 5323171 - DNA, 25 bp, Homo sapien
gacttgttaagtgcactattgagaa

SEQ ID NO: 5323172 - DNA, 25 bp, Homo sapien
tagacttgttaagtgcactattgag

SEQ ID NO: 5323173 - DNA, 25 bp, Homo sapien
tgttaagtgcactattgagaaaggg

SEQ ID NO: 5323174 - DNA, 25 bp, Homo sapien
tcctcagttaggactgctgactgcc

SEQ ID NO: 5323175 - DNA, 25 bp, Homo sapien
agtgctcccttgacatggctcctca

SEQ ID NO: 5323176 - DNA, 25 bp, Homo sapien
tatagccgtctgatacagtgctccc

SEQ ID NO: 5323177 - DNA, 25 bp, Homo sapien
tcgctgcttctggagtatagccgtc

SEQ ID NO: 5323178 - DNA, 25 bp, Homo sapien
tgaaggaatacctattttgctccat

SEQ ID NO: 5323179 - DNA, 25 bp, Homo sapien
ccaaatgaaggaatacctattttgc

SEQ ID NO: 5323180 - DNA, 25 bp, Homo sapien
aaatgaaggaatacctattttgctc

SEQ ID NO: 5323181 - DNA, 25 bp, Homo sapien
aatgaaggaatacctattttgctcc

SEQ ID NO: 5323182 - DNA, 25 bp, Homo sapien
aggaaagctcttgctactagcagca

SEQ ID NO: 5323183 - DNA, 25 bp, Homo sapien
aaaagttgtatctgccgctcttcag

SEQ ID NO: 5323184 - DNA, 25 bp, Homo sapien
caggaatccccttctggtcgaagga

SEQ ID NO: 5323185 - DNA, 25 bp, Homo sapien
gaaacagtatgcaagccctatgcca

SEQ ID NO: 5323186 - DNA, 25 bp, Homo sapien
tttgagatcaagtacaaggatggtc

SEQ ID NO: 5323187 - DNA, 25 bp, Homo sapien
cctctgtaagtaaagatctgcctgt

SEQ ID NO: 5323188 - DNA, 25 bp, Homo sapien
tatgtatcctggtattgaagcttcc

SEQ ID NO: 5323189 - DNA, 25 bp, Homo sapien
tgaagcttccatgcaggtattcctt

SEQ ID NO: 5323190 - DNA, 25 bp, Homo sapien
agatgcggaaaaagcctttgacaaa

SEQ ID NO: 5323191 - DNA, 25 bp, Homo sapien
tcaatagatgcggaaaaagcctttg

SEQ ID NO: 5323192 - DNA, 25 bp, Homo sapien
ttcaatatacgcaaatcaataaatg

SEQ ID NO: 5323193 - DNA, 25 bp, Homo sapien
aatagatgcggaaaaagcctttgac

SEQ ID NO: 5323194 - DNA, 25 bp, Homo sapien
agagaggtagggcaattctgatccc

SEQ ID NO: 5323195 - DNA, 25 bp, Homo sapien
caactcagagaatagtaacagtagc

SEQ ID NO: 5323196 - DNA, 25 bp, Homo sapien
gaaaccctaggatgagagactgacg

SEQ ID NO: 5323197 - DNA, 25 bp, Homo sapien
gagactgacgtcatcaggaatatat

SEQ ID NO: 5323198 - DNA, 25 bp, Homo sapien
aggacattcatgaacagctacagct

SEQ ID NO: 5323199 - DNA, 25 bp, Homo sapien
cctatatgagttcactaaggattta

SEQ ID NO: 5323200 - DNA, 25 bp, Homo sapien
tcaaagtacctatatgagttcacta

SEQ ID NO: 5323201 - DNA, 25 bp, Homo sapien
tatatagtcaattcaacagatgcag

SEQ ID NO: 5323202 - DNA, 25 bp, Homo sapien
tatatttgtcttgactggcttctgt

SEQ ID NO: 5323203 - DNA, 25 bp, Homo sapien
atatttgtcttgactggcttctgtt

SEQ ID NO: 5323204 - DNA, 25 bp, Homo sapien
ttatatttgtcttgactggcttctg

SEQ ID NO: 5323205 - DNA, 25 bp, Homo sapien
tgacaactgactgcggaggtggcaa

SEQ ID NO: 5323206 - DNA, 25 bp, Homo sapien
ttgatttctccacctattgcctgaa

SEQ ID NO: 5323207 - DNA, 25 bp, Homo sapien
tgacaactcagccagatgattgatt

SEQ ID NO: 5323208 - DNA, 25 bp, Homo sapien
ttcaaactgccccacaggcagctgt

SEQ ID NO: 5323209 - DNA, 25 bp, Homo sapien
attaaatcatgcgtggtggaaagcc

SEQ ID NO: 5323210 - DNA, 25 bp, Homo sapien
tctggagatactacaaagtgaaccc

SEQ ID NO: 5323211 - DNA, 25 bp, Homo sapien
caagtcagagaacgtaggcactgcc

SEQ ID NO: 5323212 - DNA, 25 bp, Homo sapien
taaatgcatcggaggaaaagaacag

SEQ ID NO: 5323213 - DNA, 25 bp, Homo sapien
tttcccatagatttaggcgtgcaag

SEQ ID NO: 5323214 - DNA, 25 bp, Homo sapien
actgatatatctcccagtgcctaga

SEQ ID NO: 5323215 - DNA, 25 bp, Homo sapien
tagaaccagtggttggcacttagta

SEQ ID NO: 5323216 - DNA, 25 bp, Homo sapien
cctagatcagaggaaatcatgtgtg

SEQ ID NO: 5323217 - DNA, 25 bp, Homo sapien
gtacttcaattttaatcccactgag

SEQ ID NO: 5323218 - DNA, 25 bp, Homo sapien
agttgttggataaagcttctatgga

SEQ ID NO: 5323219 - DNA, 25 bp, Homo sapien
ggtgcttgaaggatctccaacctta

SEQ ID NO: 5323220 - DNA, 25 bp, Homo sapien
ccttaaaccaatgcgagttagtgaa

SEQ ID NO: 5323221 - DNA, 25 bp, Homo sapien
taaaaccagtacttgtggctcacac

SEQ ID NO: 5323222 - DNA, 25 bp, Homo sapien
tctgcatggcacctagattctttaa

SEQ ID NO: 5323223 - DNA, 25 bp, Homo sapien
tcagagagtcacattaaatcctatg

SEQ ID NO: 5323224 - DNA, 25 bp, Homo sapien
tatacttgttgagatggaagctgca

SEQ ID NO: 5323225 - DNA, 25 bp, Homo sapien
tggcctcatgtccttgcaaatcctg

SEQ ID NO: 5323226 - DNA, 25 bp, Homo sapien
ggacaatgtccatgtactcagtaca

SEQ ID NO: 5323227 - DNA, 25 bp, Homo sapien
gcttactgtatctaaaatgtgccat

SEQ ID NO: 5323228 - DNA, 25 bp, Homo sapien
cagtacagttagctacttgtgagac

SEQ ID NO: 5323229 - DNA, 25 bp, Homo sapien
ttggcaatgtaaaccacatcccgtt

SEQ ID NO: 5323230 - DNA, 25 bp, Homo sapien
ggtaattaatgaacagtccttggca

SEQ ID NO: 5323231 - DNA, 25 bp, Homo sapien
tctgagtgtctttgatagcagtgaa

SEQ ID NO: 5323232 - DNA, 25 bp, Homo sapien
gtaatgtcatgcctccagcagtgat

SEQ ID NO: 5323233 - DNA, 25 bp, Homo sapien
aatgcattgatcgtggcatgtgtgc

SEQ ID NO: 5323234 - DNA, 25 bp, Homo sapien
tatcaaatgcattgatcgtggcatg

SEQ ID NO: 5323235 - DNA, 25 bp, Homo sapien
aagttctttgataacatgtacagtt

SEQ ID NO: 5323236 - DNA, 25 bp, Homo sapien
tcaaatgcattgatcgtggcatgtg

SEQ ID NO: 5323237 - DNA, 25 bp, Homo sapien
tttttgaatcacagagagttgcttt

SEQ ID NO: 5323238 - DNA, 25 bp, Homo sapien
tactaacggtgtatttggttctcta

SEQ ID NO: 5323239 - DNA, 25 bp, Homo sapien
ggttcaaagacaccagtcagtatgt

SEQ ID NO: 5323240 - DNA, 25 bp, Homo sapien
tgctttttggtactaagggtgatac

SEQ ID NO: 5323241 - DNA, 25 bp, Homo sapien
ttaccaagaagccagatccccagat

SEQ ID NO: 5323242 - DNA, 25 bp, Homo sapien
tttctcgtagaaggccatgggtagt

SEQ ID NO: 5323243 - DNA, 25 bp, Homo sapien
tactgcaggagagaatgtggctagc

SEQ ID NO: 5323244 - DNA, 25 bp, Homo sapien
gatatgaatctccttccagatggag

SEQ ID NO: 5323245 - DNA, 25 bp, Homo sapien
taattgagtataggagctgagtagg

SEQ ID NO: 5323246 - DNA, 25 bp, Homo sapien
gaagctttcctagatcatcccacca

SEQ ID NO: 5323247 - DNA, 25 bp, Homo sapien
aacatgcctaaaatacttggtaaca

SEQ ID NO: 5323248 - DNA, 25 bp, Homo sapien
gagaatacatttgacttgttctgga

SEQ ID NO: 5323249 - DNA, 25 bp, Homo sapien
aaactaatgtcatgtttccaggata

SEQ ID NO: 5323250 - DNA, 25 bp, Homo sapien
aactcaagtacatttccagttggag

SEQ ID NO: 5323251 - DNA, 25 bp, Homo sapien
ctcttctggatagtggaatgtctga

SEQ ID NO: 5323252 - DNA, 25 bp, Homo sapien
gataaagttcagatgtcctgtatga

SEQ ID NO: 5323253 - DNA, 25 bp, Homo sapien
tcaactccatttcttaccatatcca

SEQ ID NO: 5323254 - DNA, 25 bp, Homo sapien
gagtagtcaactccatttcttacca

SEQ ID NO: 5323255 - DNA, 25 bp, Homo sapien
caggagaataagagtagtcaactcc

SEQ ID NO: 5323256 - DNA, 25 bp, Homo sapien
tccatttcttaccatatccatccat

SEQ ID NO: 5323257 - DNA, 25 bp, Homo sapien
aaatctctcggccagtttccactgc

SEQ ID NO: 5323258 - DNA, 25 bp, Homo sapien
tgaagacagtgtcctctgagccaac

SEQ ID NO: 5323259 - DNA, 25 bp, Homo sapien
cactgtgaagatcagctctgtgaag

SEQ ID NO: 5323260 - DNA, 25 bp, Homo sapien
gagtggacacacattcagatgaata

SEQ ID NO: 5323261 - DNA, 25 bp, Homo sapien
tccatagattgattaggtacagcgg

SEQ ID NO: 5323262 - DNA, 25 bp, Homo sapien
ggtacagcggtagaatcctatcaaa

SEQ ID NO: 5323263 - DNA, 25 bp, Homo sapien
tagctttgttacacagtacagccac

SEQ ID NO: 5323264 - DNA, 25 bp, Homo sapien
cccacattgtagtttgtccaagcca

SEQ ID NO: 5323265 - DNA, 25 bp, Homo sapien
gacttttagcgaggaagccttcacc

SEQ ID NO: 5323266 - DNA, 25 bp, Homo sapien
ttctgctagatgagctggtggccct

SEQ ID NO: 5323267 - DNA, 25 bp, Homo sapien
gaaaactggctgtgatgcgatcgag

SEQ ID NO: 5323268 - DNA, 25 bp, Homo sapien
tatggcgcccagtgtgagatacatc

SEQ ID NO: 5323269 - DNA, 25 bp, Homo sapien
tgaaatagatttgcacagacacctt

SEQ ID NO: 5323270 - DNA, 25 bp, Homo sapien
tgttcttcagtagccatcagatcag

SEQ ID NO: 5323271 - DNA, 25 bp, Homo sapien
caaaacaaaggcaagatggccaaga

SEQ ID NO: 5323272 - DNA, 25 bp, Homo sapien
ttttccggtcctgccacatgtaaca

SEQ ID NO: 5323273 - DNA, 25 bp, Homo sapien
cagtggttgcgtttcactgtaagga

SEQ ID NO: 5323274 - DNA, 25 bp, Homo sapien
cagaggatggtcctttaacatagcc

SEQ ID NO: 5323275 - DNA, 25 bp, Homo sapien
agtggagtttttctgcagtggttgc

SEQ ID NO: 5323276 - DNA, 25 bp, Homo sapien
gataatggagttcctctcctctgct

SEQ ID NO: 5323277 - DNA, 25 bp, Homo sapien
tgtgaggatgggactaattgatatg

SEQ ID NO: 5323278 - DNA, 25 bp, Homo sapien
acttagggcaggatactgggctgca

SEQ ID NO: 5323279 - DNA, 25 bp, Homo sapien
aaatggtcctctggaacttagggca

SEQ ID NO: 5323280 - DNA, 25 bp, Homo sapien
tctatccgtaagacttttcatgtgg

SEQ ID NO: 5323281 - DNA, 25 bp, Homo sapien
ttaaacacggctgctactttcttgc

SEQ ID NO: 5323282 - DNA, 25 bp, Homo sapien
tgcatccggacatcgctgcgtggtg

SEQ ID NO: 5323283 - DNA, 25 bp, Homo sapien
gattcgaggaaccttcactcccgag

SEQ ID NO: 5323284 - DNA, 25 bp, Homo sapien
cagcgggcttgcttgggcacagtct

SEQ ID NO: 5323285 - DNA, 25 bp, Homo sapien
ccgcgctgcgggaaaagagactatc

SEQ ID NO: 5323286 - DNA, 25 bp, Homo sapien
ctaaacaaccgagcaagacaagcca

SEQ ID NO: 5323287 - DNA, 25 bp, Homo sapien
tcgcgttcacatacccggggagggc

SEQ ID NO: 5323288 - DNA, 25 bp, Homo sapien
tacgcactcgcctcgcgttcacata

SEQ ID NO: 5323289 - DNA, 25 bp, Homo sapien
gagggcagtagaaaggtgatcaatc

SEQ ID NO: 5323290 - DNA, 25 bp, Homo sapien
gcgtcgtcgctgagtacaccagctg

SEQ ID NO: 5323291 - DNA, 25 bp, Homo sapien
gtctggttcaagaaccgccgcgcca

SEQ ID NO: 5323292 - DNA, 25 bp, Homo sapien
gaagaagtcctctccagtgcgggag

SEQ ID NO: 5323293 - DNA, 25 bp, Homo sapien
tccgaaagcagtggccaattcacgc

SEQ ID NO: 5323294 - DNA, 25 bp, Homo sapien
gccctccgtggtcccgatcctgttg

SEQ ID NO: 5323295 - DNA, 25 bp, Homo sapien
tacctgcgccctccgtggtcccgat

SEQ ID NO: 5323296 - DNA, 25 bp, Homo sapien
ctccgtggtcccgatcctgttgctg

SEQ ID NO: 5323297 - DNA, 25 bp, Homo sapien
tgcgccctccgtggtcccgatcctg

SEQ ID NO: 5323298 - DNA, 25 bp, Homo sapien
cccgcgcgcctgtgtatcaattttg

SEQ ID NO: 5323299 - DNA, 25 bp, Homo sapien
tttttagtgcaccttcgttctccga

SEQ ID NO: 5323300 - DNA, 25 bp, Homo sapien
cttgttgaaatgtaaggcagtcccc

SEQ ID NO: 5323301 - DNA, 25 bp, Homo sapien
gccgcttcgtccagtaggtgggaaa

SEQ ID NO: 5323302 - DNA, 25 bp, Homo sapien
cagtgaataacaactctatgaaccc

SEQ ID NO: 5323303 - DNA, 25 bp, Homo sapien
ttcactaagctgcttgaagttcccc

SEQ ID NO: 5323304 - DNA, 25 bp, Homo sapien
gatattccttcactaagctgcttga

SEQ ID NO: 5323305 - DNA, 25 bp, Homo sapien
cactttaagatattccttcactaag

SEQ ID NO: 5323306 - DNA, 25 bp, Homo sapien
taagctgcttgaagttccccgaatc

SEQ ID NO: 5323307 - DNA, 25 bp, Homo sapien
cacatactgctgataagaccttaac

SEQ ID NO: 5323308 - DNA, 25 bp, Homo sapien
gtttctgttgtaactggactgaaca

SEQ ID NO: 5323309 - DNA, 25 bp, Homo sapien
taaaatcgattttttcacatactgc

SEQ ID NO: 5323310 - DNA, 25 bp, Homo sapien
aattatccttgttaacagtgactgg

SEQ ID NO: 5323311 - DNA, 25 bp, Homo sapien
ttggtgatcttcttgcctatggcac

SEQ ID NO: 5323312 - DNA, 25 bp, Homo sapien
cttttggtgatcttcttgcctatgg

SEQ ID NO: 5323313 - DNA, 25 bp, Homo sapien
tttggtgatcttcttgcctatggca

SEQ ID NO: 5323314 - DNA, 25 bp, Homo sapien
ttttggtgatcttcttgcctatggc

SEQ ID NO: 5323315 - DNA, 25 bp, Homo sapien
gttgtaggggtgatctgaagtgccg

SEQ ID NO: 5323316 - DNA, 25 bp, Homo sapien
ccagacaccagagatacggttgtag

SEQ ID NO: 5323317 - DNA, 25 bp, Homo sapien
agacaccagagatacggttgtaggg

SEQ ID NO: 5323318 - DNA, 25 bp, Homo sapien
taggggtgatctgaagtgccgtcat

SEQ ID NO: 5323319 - DNA, 25 bp, Homo sapien
cacgcccggtctgttctctgaagtc

SEQ ID NO: 5323320 - DNA, 25 bp, Homo sapien
catagatgcgtctttctgaggctgg

SEQ ID NO: 5323321 - DNA, 25 bp, Homo sapien
ggttgtgcaatgatgcctccacgat

SEQ ID NO: 5323322 - DNA, 25 bp, Homo sapien
tatagacctgcttcgctgaatacca

SEQ ID NO: 5323323 - DNA, 25 bp, Homo sapien
tttgcagaagctgtacaccagcagt

SEQ ID NO: 5323324 - DNA, 25 bp, Homo sapien
gttcacattccatgcctcctacttg

SEQ ID NO: 5323325 - DNA, 25 bp, Homo sapien
tgtgggccagctcaaactccacttg

SEQ ID NO: 5323326 - DNA, 25 bp, Homo sapien
gatcgcacacagtacccttcagctg

SEQ ID NO: 5323327 - DNA, 25 bp, Homo sapien
taggtgacacctggtgctagaaggc

SEQ ID NO: 5323328 - DNA, 25 bp, Homo sapien
tgttgtagcactgatcaaactctca

SEQ ID NO: 5323329 - DNA, 25 bp, Homo sapien
gaatccctatgtaggtacagggcta

SEQ ID NO: 5323330 - DNA, 25 bp, Homo sapien
gatgatgatgtatcttcctcactga

SEQ ID NO: 5323331 - DNA, 25 bp, Homo sapien
tcctaaaggacaacctgtgaacctg

SEQ ID NO: 5323332 - DNA, 25 bp, Homo sapien
aaagctcatgggtctattcctaaag

SEQ ID NO: 5323333 - DNA, 25 bp, Homo sapien
gatactacctagctgttcctgccta

SEQ ID NO: 5323334 - DNA, 25 bp, Homo sapien
gtcagtgctaggacagatactacct

SEQ ID NO: 5323335 - DNA, 25 bp, Homo sapien
taagagggctagatgacacctgcac

SEQ ID NO: 5323336 - DNA, 25 bp, Homo sapien
tgagccctattcctatagagcaatg

SEQ ID NO: 5323337 - DNA, 25 bp, Homo sapien
tcagttatctgctaaagaatgggtg

SEQ ID NO: 5323338 - DNA, 25 bp, Homo sapien
tgatagtaaccagggtatcggcatt

SEQ ID NO: 5323339 - DNA, 25 bp, Homo sapien
ctatttttgtagcacctaattaaca

SEQ ID NO: 5323340 - DNA, 25 bp, Homo sapien
tgcctcagcttcacaagcatgtacc

SEQ ID NO: 5323341 - DNA, 25 bp, Homo sapien
tattgaaaataagtaggttgaagac

SEQ ID NO: 5323342 - DNA, 25 bp, Homo sapien
acttttacttacgatcactttgctg

SEQ ID NO: 5323343 - DNA, 25 bp, Homo sapien
actcaactcaaaactcttaactaat

SEQ ID NO: 5323344 - DNA, 25 bp, Homo sapien
caaaactcttaactaatttatatga

SEQ ID NO: 5323345 - DNA, 25 bp, Homo sapien
atccacacgggggattttaagtctg

SEQ ID NO: 5323346 - DNA, 25 bp, Homo sapien
tttaagtctgtatcaggccatgaaa

SEQ ID NO: 5323347 - DNA, 25 bp, Homo sapien
caaagtgaatcattttgagagaacc

SEQ ID NO: 5323348 - DNA, 25 bp, Homo sapien
gttctctgccgtcttctctcagttc

SEQ ID NO: 5323349 - DNA, 25 bp, Homo sapien
tgttctctgccgtcttctctcagtt

SEQ ID NO: 5323350 - DNA, 25 bp, Homo sapien
acaggtattagtcatcaaaaatcca

SEQ ID NO: 5323351 - DNA, 25 bp, Homo sapien
tacaggtattagtcatcaaaaatcc

SEQ ID NO: 5323352 - DNA, 25 bp, Homo sapien
cttctgcattacaggtattagtcat

SEQ ID NO: 5323353 - DNA, 25 bp, Homo sapien
gcattacaggtattagtcatcaaaa

SEQ ID NO: 5323354 - DNA, 25 bp, Homo sapien
cccacttaattctagtatactatta

SEQ ID NO: 5323355 - DNA, 25 bp, Homo sapien
ttttgtcagacatgcgttttgtacc

SEQ ID NO: 5323356 - DNA, 25 bp, Homo sapien
cgttttgtaccagttgatttgatca

SEQ ID NO: 5323357 - DNA, 25 bp, Homo sapien
gtgcattcccaaggtaaatcccact

SEQ ID NO: 5323358 - DNA, 25 bp, Homo sapien
cctcacaggtccctcggttcatttt

SEQ ID NO: 5323359 - DNA, 25 bp, Homo sapien
tagaccttttggcattgcctcacag

SEQ ID NO: 5323360 - DNA, 25 bp, Homo sapien
tggatactttcaattgatctgtctt

SEQ ID NO: 5323361 - DNA, 25 bp, Homo sapien
tatcctctccttctacagctctaat

SEQ ID NO: 5323362 - DNA, 25 bp, Homo sapien
gacaacagaataattgtcagatttt

SEQ ID NO: 5323363 - DNA, 25 bp, Homo sapien
agacaacagaataattgtcagattt

SEQ ID NO: 5323364 - DNA, 25 bp, Homo sapien
ttagacaacagaataattgtcagat

SEQ ID NO: 5323365 - DNA, 25 bp, Homo sapien
tagacaacagaataattgtcagatt

SEQ ID NO: 5323366 - DNA, 25 bp, Homo sapien
tcctgaggcgtgttccaccacgcct

SEQ ID NO: 5323367 - DNA, 25 bp, Homo sapien
cactcttcctgaggcgtgttccacc

SEQ ID NO: 5323368 - DNA, 25 bp, Homo sapien
tattatattcactatctctatgagt

SEQ ID NO: 5323369 - DNA, 25 bp, Homo sapien
taggtaaacaatgtgtaataagcac

SEQ ID NO: 5323370 - DNA, 25 bp, Homo sapien
gaggtgagtccatttacatcaattg

SEQ ID NO: 5323371 - DNA, 25 bp, Homo sapien
tgaggaccaccaggttgcataaggt

SEQ ID NO: 5323372 - DNA, 25 bp, Homo sapien
catagctggatcttgctttatgagc

SEQ ID NO: 5323373 - DNA, 25 bp, Homo sapien
ccattgggtaccacactgagtttgg

SEQ ID NO: 5323374 - DNA, 25 bp, Homo sapien
ctctagtattcctcaagaagggttc

SEQ ID NO: 5323375 - DNA, 25 bp, Homo sapien
ggatgactatactatccttggttca

SEQ ID NO: 5323376 - DNA, 25 bp, Homo sapien
ttggctatacaaccatcagtgagct

SEQ ID NO: 5323377 - DNA, 25 bp, Homo sapien
tacttgaaggagatcatggatgact

SEQ ID NO: 5323378 - DNA, 25 bp, Homo sapien
agtggcataatcaggactcattgaa

SEQ ID NO: 5323379 - DNA, 25 bp, Homo sapien
tgaagccttaatgtttagggcccca

SEQ ID NO: 5323380 - DNA, 25 bp, Homo sapien
tctcatttgggtaccctgtaactta

SEQ ID NO: 5323381 - DNA, 25 bp, Homo sapien
ttattctcatttgggtaccctgtaa

SEQ ID NO: 5323382 - DNA, 25 bp, Homo sapien
cacatcaggtatttaataaggaact

SEQ ID NO: 5323383 - DNA, 25 bp, Homo sapien
gaatggacaacaaatttgaatagct

SEQ ID NO: 5323384 - DNA, 25 bp, Homo sapien
taacaacaaagaatgctaatgagca

SEQ ID NO: 5323385 - DNA, 25 bp, Homo sapien
taacaagacaactaaagaatggaca

SEQ ID NO: 5323386 - DNA, 25 bp, Homo sapien
cagtattctttgttgtaaaatatgt

SEQ ID NO: 5323387 - DNA, 25 bp, Homo sapien
gtgctaaagacaggccaataaatgc

SEQ ID NO: 5323388 - DNA, 25 bp, Homo sapien
tctccttgaggtgctaaagacaggc

SEQ ID NO: 5323389 - DNA, 25 bp, Homo sapien
tagcatatcccctctgtccaagggt

SEQ ID NO: 5323390 - DNA, 25 bp, Homo sapien
caagagggagggaggttatctggaa

SEQ ID NO: 5323391 - DNA, 25 bp, Homo sapien
tttgctggaatattctaatgaaggc

SEQ ID NO: 5323392 - DNA, 25 bp, Homo sapien
taatgaaggcatgaggtcttgggct

SEQ ID NO: 5323393 - DNA, 25 bp, Homo sapien
tggagtattggttactgatgcaatc

SEQ ID NO: 5323394 - DNA, 25 bp, Homo sapien
ctttaatagttgtaagtctgtccag

SEQ ID NO: 5323395 - DNA, 25 bp, Homo sapien
ggtggtaactgtgttgttgaagacc

SEQ ID NO: 5323396 - DNA, 25 bp, Homo sapien
gttctttatatagacctggaggtca

SEQ ID NO: 5323397 - DNA, 25 bp, Homo sapien
agtctggccatttagtgtaaccacc

SEQ ID NO: 5323398 - DNA, 25 bp, Homo sapien
tagagtgtacaataatagacactgg

SEQ ID NO: 5323399 - DNA, 25 bp, Homo sapien
tatgcaggttagacatttgtatgtt

SEQ ID NO: 5323400 - DNA, 25 bp, Homo sapien
gtattagccattatgacttgcgtga

SEQ ID NO: 5323401 - DNA, 25 bp, Homo sapien
tatttgcagttctatgagaaatctc

SEQ ID NO: 5323402 - DNA, 25 bp, Homo sapien
tgctgcctagaatggcagttctatt

SEQ ID NO: 5323403 - DNA, 25 bp, Homo sapien
agaggtgttcatggtagtctttgat

SEQ ID NO: 5323404 - DNA, 25 bp, Homo sapien
ctatgtgttcaatctcgggtggttt

SEQ ID NO: 5323405 - DNA, 25 bp, Homo sapien
gatgatcacttgtattgtggtatca

SEQ ID NO: 5323406 - DNA, 25 bp, Homo sapien
tcaactttattttatcaacgaacca

SEQ ID NO: 5323407 - DNA, 25 bp, Homo sapien
tctgtttgtgcaggagatctgtttc

SEQ ID NO: 5323408 - DNA, 25 bp, Homo sapien
tatagggttcgtctagtggtgataa

SEQ ID NO: 5323409 - DNA, 25 bp, Homo sapien
cagaatacaaaatctgtggttgaca

SEQ ID NO: 5323410 - DNA, 25 bp, Homo sapien
tatctgatataagcgtagatactcc

SEQ ID NO: 5323411 - DNA, 25 bp, Homo sapien
tctatgcagcatatcactggatcct

SEQ ID NO: 5323412 - DNA, 25 bp, Homo sapien
taaaagagtctctgatctgccgcct

SEQ ID NO: 5323413 - DNA, 25 bp, Homo sapien
atcttatatctggtggtcctatcca

SEQ ID NO: 5323414 - DNA, 25 bp, Homo sapien
catattagtatagatatccctgctg

SEQ ID NO: 5323415 - DNA, 25 bp, Homo sapien
atgtctggcacaaagccagtgctct

SEQ ID NO: 5323416 - DNA, 25 bp, Homo sapien
tgaaatgtctggcacaaagccagtg

SEQ ID NO: 5323417 - DNA, 25 bp, Homo sapien
tggcacaaagccagtgctcttccat

SEQ ID NO: 5323418 - DNA, 25 bp, Homo sapien
aaagccagtgctcttccatttcaac

SEQ ID NO: 5323419 - DNA, 25 bp, Homo sapien
agttcacttagttcacactttgttg

SEQ ID NO: 5323420 - DNA, 25 bp, Homo sapien
cttagttcacactttgttgtccttc

SEQ ID NO: 5323421 - DNA, 25 bp, Homo sapien
cttcaagttcacttagttcacactt

SEQ ID NO: 5323422 - DNA, 25 bp, Homo sapien
cactttgttgtccttccaaatacag

SEQ ID NO: 5323423 - DNA, 25 bp, Homo sapien
catagatgtctcaagtcatgttggc

SEQ ID NO: 5323424 - DNA, 25 bp, Homo sapien
gttgactatactcacattgatgggc

SEQ ID NO: 5323425 - DNA, 25 bp, Homo sapien
agctcttgacaaccaccactttgtt

SEQ ID NO: 5323426 - DNA, 25 bp, Homo sapien
tatgagttatgaccactgtagttac

SEQ ID NO: 5323427 - DNA, 25 bp, Homo sapien
tgtttctcccatgaagctgttgttg

SEQ ID NO: 5323428 - DNA, 25 bp, Homo sapien
ttctcccatgaagctgttgttgttg

SEQ ID NO: 5323429 - DNA, 25 bp, Homo sapien
gtttctcccatgaagctgttgttgt

SEQ ID NO: 5323430 - DNA, 25 bp, Homo sapien
tgtgtttctcccatgaagctgttgt

SEQ ID NO: 5323431 - DNA, 25 bp, Homo sapien
tggtgtgactgggtgcttacagcca

SEQ ID NO: 5323432 - DNA, 25 bp, Homo sapien
tctgctccataggaggtttataccc

SEQ ID NO: 5323433 - DNA, 25 bp, Homo sapien
gaagtaacagcccattagggcttgc

SEQ ID NO: 5323434 - DNA, 25 bp, Homo sapien
tatttcataggtatacctgcaccct

SEQ ID NO: 5323435 - DNA, 25 bp, Homo sapien
gagagacctatagttgctactgcca

SEQ ID NO: 5323436 - DNA, 25 bp, Homo sapien
cagtaggtaggaacagtaggaatct

SEQ ID NO: 5323437 - DNA, 25 bp, Homo sapien
gctttagggttccttgagagaccta

SEQ ID NO: 5323438 - DNA, 25 bp, Homo sapien
tggtcatccattcatgcgtgtcact

SEQ ID NO: 5323439 - DNA, 25 bp, Homo sapien
cacattgcttcaacacccactgtgg

SEQ ID NO: 5323440 - DNA, 25 bp, Homo sapien
gttggcattcagaggactgcacaga

SEQ ID NO: 5323441 - DNA, 25 bp, Homo sapien
attgcttcaacacccactgtggacc

SEQ ID NO: 5323442 - DNA, 25 bp, Homo sapien
gaaatcacattgcttcaacacccac

SEQ ID NO: 5323443 - DNA, 25 bp, Homo sapien
ctcagcaccacatcgcactttttcc

SEQ ID NO: 5323444 - DNA, 25 bp, Homo sapien
acagaaagttaacaaaattatccag

SEQ ID NO: 5323445 - DNA, 25 bp, Homo sapien
ttaacaaaattatccaggaattgaa

SEQ ID NO: 5323446 - DNA, 25 bp, Homo sapien
catcgcactttttccaaaattgacc

SEQ ID NO: 5323447 - DNA, 25 bp, Homo sapien
taatggaccagtgcacacattgatg

SEQ ID NO: 5323448 - DNA, 25 bp, Homo sapien
tgggtttagatgaaaagcgactgaa

SEQ ID NO: 5323449 - DNA, 25 bp, Homo sapien
gaaatttgaactattagctttctct

SEQ ID NO: 5323450 - DNA, 25 bp, Homo sapien
ggctttaaacatcgacttacaggtg

SEQ ID NO: 5323451 - DNA, 25 bp, Homo sapien
gattgattctatattcttttttcaa

SEQ ID NO: 5323452 - DNA, 25 bp, Homo sapien
gaattttttgattgattctatattc

SEQ ID NO: 5323453 - DNA, 25 bp, Homo sapien
tgattgattctatattcttttttca

SEQ ID NO: 5323454 - DNA, 25 bp, Homo sapien
cttcttctagaggaacgccaaaata

SEQ ID NO: 5323455 - DNA, 25 bp, Homo sapien
acttcttctagaggaacgccaaaat

SEQ ID NO: 5323456 - DNA, 25 bp, Homo sapien
tgctggaatggctttgagtccttca

SEQ ID NO: 5323457 - DNA, 25 bp, Homo sapien
caggtttagagctaccctgctggaa

SEQ ID NO: 5323458 - DNA, 25 bp, Homo sapien
gccctggtattcaggtttagagcta

SEQ ID NO: 5323459 - DNA, 25 bp, Homo sapien
gagtccttcagtaccaccttgaaga

SEQ ID NO: 5323460 - DNA, 25 bp, Homo sapien
aaccccagaggttattgattctgca

SEQ ID NO: 5323461 - DNA, 25 bp, Homo sapien
tgattctgcatcaatgtcactagct

SEQ ID NO: 5323462 - DNA, 25 bp, Homo sapien
tatctagtgcaaggtaatgaatatc

SEQ ID NO: 5323463 - DNA, 25 bp, Homo sapien
ttttcttgccacttcagctagtgcc

SEQ ID NO: 5323464 - DNA, 25 bp, Homo sapien
tgatcaccaagcaagtgcctaggag

SEQ ID NO: 5323465 - DNA, 25 bp, Homo sapien
tgcgccaatggccaaggtaattagg

SEQ ID NO: 5323466 - DNA, 25 bp, Homo sapien
ccaacagtatcatgccaagggaagg

SEQ ID NO: 5323467 - DNA, 25 bp, Homo sapien
tccaagctaggtttgagtcaacaga

SEQ ID NO: 5323468 - DNA, 25 bp, Homo sapien
tgaattttcaaaagcagaataatgt

SEQ ID NO: 5323469 - DNA, 25 bp, Homo sapien
ctgaattttcaaaagcagaataatg

SEQ ID NO: 5323470 - DNA, 25 bp, Homo sapien
gaattttcaaaagcagaataatgtc

SEQ ID NO: 5323471 - DNA, 25 bp, Homo sapien
ggcacaaatcttacaataatataat

SEQ ID NO: 5323472 - DNA, 25 bp, Homo sapien
tcttgtagacataattatcacaatg

SEQ ID NO: 5323473 - DNA, 25 bp, Homo sapien
ttttaaagcaacatacctatttaca

SEQ ID NO: 5323474 - DNA, 25 bp, Homo sapien
tctacctagaattcatactgcacca

SEQ ID NO: 5323475 - DNA, 25 bp, Homo sapien
tcccagtgagatcaacacagaaggt

SEQ ID NO: 5323476 - DNA, 25 bp, Homo sapien
tgtgacatatgggtggctggcaaga

SEQ ID NO: 5323477 - DNA, 25 bp, Homo sapien
agtgagatcaacacagaaggtgggt

SEQ ID NO: 5323478 - DNA, 25 bp, Homo sapien
gtgacatatgggtggctggcaagat

SEQ ID NO: 5323479 - DNA, 25 bp, Homo sapien
atgttccgcacatgtgtccaagaac

SEQ ID NO: 5323480 - DNA, 25 bp, Homo sapien
aagaggtcacgagcaccaacgtcaa

SEQ ID NO: 5323481 - DNA, 25 bp, Homo sapien
cataaagaggtcacgagcaccaacg

SEQ ID NO: 5323482 - DNA, 25 bp, Homo sapien
cgagcaccaacgtcaacagctagga

SEQ ID NO: 5323483 - DNA, 25 bp, Homo sapien
cgtcaacagctaggagaaatgcctt

SEQ ID NO: 5323484 - DNA, 25 bp, Homo sapien
acagatatccgattgttttagcacc

SEQ ID NO: 5323485 - DNA, 25 bp, Homo sapien
tactcatttgatgactaagctctga

SEQ ID NO: 5323486 - DNA, 25 bp, Homo sapien
gaaggtctacagtttcacctcttat

SEQ ID NO: 5323487 - DNA, 25 bp, Homo sapien
caggtacaaccacactcgacctatt

SEQ ID NO: 5323488 - DNA, 25 bp, Homo sapien
taatgtgttttggtattgatctttg

SEQ ID NO: 5323489 - DNA, 25 bp, Homo sapien
agtatctgttaacatactgaggatc

SEQ ID NO: 5323490 - DNA, 25 bp, Homo sapien
tactgaggatcccttctacatggat

SEQ ID NO: 5323491 - DNA, 25 bp, Homo sapien
tgtgttttggtattgatctttgagt

SEQ ID NO: 5323492 - DNA, 25 bp, Homo sapien
tgtggtcggtgaagtctccatttca

SEQ ID NO: 5323493 - DNA, 25 bp, Homo sapien
tttccgagaactagggcactccttc

SEQ ID NO: 5323494 - DNA, 25 bp, Homo sapien
tggtgacctaacagagatgccttta

SEQ ID NO: 5323495 - DNA, 25 bp, Homo sapien
agtcctccagaggtgtaaacccagg

SEQ ID NO: 5323496 - DNA, 25 bp, Homo sapien
tcccacctaggcttccaaagttctg

SEQ ID NO: 5323497 - DNA, 25 bp, Homo sapien
cactttgttgcatcagctggtcttg

SEQ ID NO: 5323498 - DNA, 25 bp, Homo sapien
tgaactagttgcctcaagcaatctt

SEQ ID NO: 5323499 - DNA, 25 bp, Homo sapien
gtgagccaccaggatggcctccaat

SEQ ID NO: 5323500 - DNA, 25 bp, Homo sapien
ggtggcaatgaaccgcgatcacatc

SEQ ID NO: 5323501 - DNA, 25 bp, Homo sapien
tagccccaaactggccacaaccaaa

SEQ ID NO: 5323502 - DNA, 25 bp, Homo sapien
aaattgtactttatggccgggcacg

SEQ ID NO: 5323503 - DNA, 25 bp, Homo sapien
ggaggtggcaatgaaccgcgatcac

SEQ ID NO: 5323504 - DNA, 25 bp, Homo sapien
tcttgatcaggagtatggtgggtct

SEQ ID NO: 5323505 - DNA, 25 bp, Homo sapien
taatccttgccaaactaaagagagc

SEQ ID NO: 5323506 - DNA, 25 bp, Homo sapien
gagccaagcttgctgacaagaagca

SEQ ID NO: 5323507 - DNA, 25 bp, Homo sapien
gaccatgttggtaaaggctgtcctc

SEQ ID NO: 5323508 - DNA, 25 bp, Homo sapien
tgctcaggtcaaaacacttgaagtc

SEQ ID NO: 5323509 - DNA, 25 bp, Homo sapien
tctttctggagtcttatcaatcttg

SEQ ID NO: 5323510 - DNA, 25 bp, Homo sapien
caaaacacttgaagtcatgcttgac

SEQ ID NO: 5323511 - DNA, 25 bp, Homo sapien
gagtcttatcaatcttgtcagtaac

SEQ ID NO: 5323512 - DNA, 25 bp, Homo sapien
tatatggatgtctgatacaacctcc

SEQ ID NO: 5323513 - DNA, 25 bp, Homo sapien
gcatttttggatgatctgaccagga

SEQ ID NO: 5323514 - DNA, 25 bp, Homo sapien
caggaagtatgctgtcccattcaag

SEQ ID NO: 5323515 - DNA, 25 bp, Homo sapien
tgccctccaggagaacgttgagttt

SEQ ID NO: 5323516 - DNA, 25 bp, Homo sapien
ttgtcaaatgatactactactttaa

SEQ ID NO: 5323517 - DNA, 25 bp, Homo sapien
tgatactactactttaacaggagtt

SEQ ID NO: 5323518 - DNA, 25 bp, Homo sapien
aatgatactactactttaacaggag

SEQ ID NO: 5323519 - DNA, 25 bp, Homo sapien
caaatgatactactactttaacagg

SEQ ID NO: 5323520 - DNA, 25 bp, Homo sapien
gaaacttgccacattatataagcag

SEQ ID NO: 5323521 - DNA, 25 bp, Homo sapien
gactgttaggaaacacatagcctta

SEQ ID NO: 5323522 - DNA, 25 bp, Homo sapien
tagtgcgagtagcacaattcagtta

SEQ ID NO: 5323523 - DNA, 25 bp, Homo sapien
tagtctgacgctaatcaatccaaac

SEQ ID NO: 5323524 - DNA, 25 bp, Homo sapien
tccaatatagtggaatccagaagtg

SEQ ID NO: 5323525 - DNA, 25 bp, Homo sapien
gctgatttgatctctatattccaat

SEQ ID NO: 5323526 - DNA, 25 bp, Homo sapien
ccagaagtggtcttgttggagcata

SEQ ID NO: 5323527 - DNA, 25 bp, Homo sapien
agaaggttccaaggcttgtctcaag

SEQ ID NO: 5323528 - DNA, 25 bp, Homo sapien
caatggcgctcatgctgataaagca

SEQ ID NO: 5323529 - DNA, 25 bp, Homo sapien
gaagatgatgtctatcaggcccagc

SEQ ID NO: 5323530 - DNA, 25 bp, Homo sapien
gagtgtcccagttcatgctgctcag

SEQ ID NO: 5323531 - DNA, 25 bp, Homo sapien
aggcccagctgtcctcgagtgaaga

SEQ ID NO: 5323532 - DNA, 25 bp, Homo sapien
tatcacaaaacatggaaaaccaggt

SEQ ID NO: 5323533 - DNA, 25 bp, Homo sapien
acaaaacatggaaaaccaggtgaat

SEQ ID NO: 5323534 - DNA, 25 bp, Homo sapien
tcacaaaacatggaaaaccaggtga

SEQ ID NO: 5323535 - DNA, 25 bp, Homo sapien
ctatcacaaaacatggaaaaccagg

SEQ ID NO: 5323536 - DNA, 25 bp, Homo sapien
ttccaaaggcttgcataacaagcat

SEQ ID NO: 5323537 - DNA, 25 bp, Homo sapien
ttttccaaaggcttgcataacaagc

SEQ ID NO: 5323538 - DNA, 25 bp, Homo sapien
tttccaaaggcttgcataacaagca

SEQ ID NO: 5323539 - DNA, 25 bp, Homo sapien
ccttcttgggaaaaagaggtgacag

SEQ ID NO: 5323540 - DNA, 25 bp, Homo sapien
ttgacttctattggataattctctt

SEQ ID NO: 5323541 - DNA, 25 bp, Homo sapien
tcttgggaaaaagaggtgacagcca

SEQ ID NO: 5323542 - DNA, 25 bp, Homo sapien
gacttctattggataattctcttcc

SEQ ID NO: 5323543 - DNA, 25 bp, Homo sapien
tggtgccaaagcgaacatccagtgg

SEQ ID NO: 5323544 - DNA, 25 bp, Homo sapien
ggagtgctccactgtgaacacctga

SEQ ID NO: 5323545 - DNA, 25 bp, Homo sapien
taagcggtcttcagccaacagttgg

SEQ ID NO: 5323546 - DNA, 25 bp, Homo sapien
cagccatgggctctttgtctacact

SEQ ID NO: 5323547 - DNA, 25 bp, Homo sapien
catgaccaagaacccgaagtcaaat

SEQ ID NO: 5323548 - DNA, 25 bp, Homo sapien
gaacccgaagtcaaatgcaataaaa

SEQ ID NO: 5323549 - DNA, 25 bp, Homo sapien
acattggaaaaatccctctggacat

SEQ ID NO: 5323550 - DNA, 25 bp, Homo sapien
cattggaaaaatccctctggacatt

SEQ ID NO: 5323551 - DNA, 25 bp, Homo sapien
tattgggccgggtatttcataatag

SEQ ID NO: 5323552 - DNA, 25 bp, Homo sapien
tagtcttccttgagcataacccagg

SEQ ID NO: 5323553 - DNA, 25 bp, Homo sapien
caagcatcatcgttgaccagtggcc

SEQ ID NO: 5323554 - DNA, 25 bp, Homo sapien
gatagctagatgtcgctctgttgtc

SEQ ID NO: 5323555 - DNA, 25 bp, Homo sapien
tccaaggctgagagtttttccagtc

SEQ ID NO: 5323556 - DNA, 25 bp, Homo sapien
tccagtcttttgtttacatcagaag

SEQ ID NO: 5323557 - DNA, 25 bp, Homo sapien
cttataatccaaggctgagagtttt

SEQ ID NO: 5323558 - DNA, 25 bp, Homo sapien
aatccaaggctgagagtttttccag

SEQ ID NO: 5323559 - DNA, 25 bp, Homo sapien
tgtgctaagagtttaatcctatgtt

SEQ ID NO: 5323560 - DNA, 25 bp, Homo sapien
tcctatgtttacatgatagaaacca

SEQ ID NO: 5323561 - DNA, 25 bp, Homo sapien
tagaaaccatccgaggataaagtgg

SEQ ID NO: 5323562 - DNA, 25 bp, Homo sapien
gttctctaccagtctatttatttaa

SEQ ID NO: 5323563 - DNA, 25 bp, Homo sapien
agcttattactatcagtaatgttgc

SEQ ID NO: 5323564 - DNA, 25 bp, Homo sapien
ccagcttattactatcagtaatgtt

SEQ ID NO: 5323565 - DNA, 25 bp, Homo sapien
ccccagcttattactatcagtaatg

SEQ ID NO: 5323566 - DNA, 25 bp, Homo sapien
cccagcttattactatcagtaatgt

SEQ ID NO: 5323567 - DNA, 25 bp, Homo sapien
gatggtgtctgagatgagcttcccc

SEQ ID NO: 5323568 - DNA, 25 bp, Homo sapien
aggcttctgtcaatcaccactttct

SEQ ID NO: 5323569 - DNA, 25 bp, Homo sapien
caggcttctgtcaatcaccactttc

SEQ ID NO: 5323570 - DNA, 25 bp, Homo sapien
ggcttctgtcaatcaccactttctc

SEQ ID NO: 5323571 - DNA, 25 bp, Homo sapien
gcttagagacaccagcacacctgaa

SEQ ID NO: 5323572 - DNA, 25 bp, Homo sapien
ccagaaaggcttagagacaccagca

SEQ ID NO: 5323573 - DNA, 25 bp, Homo sapien
gacaccagcacacctgaaccaaaaa

SEQ ID NO: 5323574 - DNA, 25 bp, Homo sapien
ccagcacacctgaaccaaaaaggag

SEQ ID NO: 5323575 - DNA, 25 bp, Homo sapien
gaaaggtggctaaaggatgcaacac

SEQ ID NO: 5323576 - DNA, 25 bp, Homo sapien
ggaatatagtagagcatccaggctt

SEQ ID NO: 5323577 - DNA, 25 bp, Homo sapien
gaaagcacatatgcagacataactg

SEQ ID NO: 5323578 - DNA, 25 bp, Homo sapien
tacatgcagaaacctaatttaggcc

SEQ ID NO: 5323579 - DNA, 25 bp, Homo sapien
gaaatatcaacattggaagaaattg

SEQ ID NO: 5323580 - DNA, 25 bp, Homo sapien
ttctgaaaggactatgcatatgcgt

SEQ ID NO: 5323581 - DNA, 25 bp, Homo sapien
gcttgttatctatgagattatgaaa

SEQ ID NO: 5323582 - DNA, 25 bp, Homo sapien
aagaaattgtttcaccttcaaggca

SEQ ID NO: 5323583 - DNA, 25 bp, Homo sapien
gatgaatcatggaataacatatggt

SEQ ID NO: 5323584 - DNA, 25 bp, Homo sapien
taaactaatcacaaacatgctagcc

SEQ ID NO: 5323585 - DNA, 25 bp, Homo sapien
gctagccaaattcaaagacaacttt

SEQ ID NO: 5323586 - DNA, 25 bp, Homo sapien
aaccaattgtcagtaaactaatcac

SEQ ID NO: 5323587 - DNA, 25 bp, Homo sapien
tgtcctagtcaccagaaagcttacc

SEQ ID NO: 5323588 - DNA, 25 bp, Homo sapien
cattttgcgttaatacctctacagg

SEQ ID NO: 5323589 - DNA, 25 bp, Homo sapien
cagggtaatataaagacagaccacc

SEQ ID NO: 5323590 - DNA, 25 bp, Homo sapien
tgaaagataagcagcatgagggacc

SEQ ID NO: 5323591 - DNA, 25 bp, Homo sapien
tgaggctgaggatacaactgactcc

SEQ ID NO: 5323592 - DNA, 25 bp, Homo sapien
ttctcagacgggcaattttagggac

SEQ ID NO: 5323593 - DNA, 25 bp, Homo sapien
tgatttggagactatggatcctgcc

SEQ ID NO: 5323594 - DNA, 25 bp, Homo sapien
ccttatggatgttggcttggccaca

SEQ ID NO: 5323595 - DNA, 25 bp, Homo sapien
ggtgatctctggctctccgattaca

SEQ ID NO: 5323596 - DNA, 25 bp, Homo sapien
gcattgtccctgattctattttctg

SEQ ID NO: 5323597 - DNA, 25 bp, Homo sapien
ttagttccatttacggcattgtccc

SEQ ID NO: 5323598 - DNA, 25 bp, Homo sapien
cattgtaaggaggttagttggcaca

SEQ ID NO: 5323599 - DNA, 25 bp, Homo sapien
agtgggaagagaactatgggctctc

SEQ ID NO: 5323600 - DNA, 25 bp, Homo sapien
gaagagaactatgggctctcagtcc

SEQ ID NO: 5323601 - DNA, 25 bp, Homo sapien
ctgagacaattttagagagccaagc

SEQ ID NO: 5323602 - DNA, 25 bp, Homo sapien
tgggaagagaactatgggctctcag

SEQ ID NO: 5323603 - DNA, 25 bp, Homo sapien
atcaatcctattgacactattccac

SEQ ID NO: 5323604 - DNA, 25 bp, Homo sapien
gtatcaatcctattgacactattcc

SEQ ID NO: 5323605 - DNA, 25 bp, Homo sapien
tatcaatcctattgacactattcca

SEQ ID NO: 5323606 - DNA, 25 bp, Homo sapien
gataacattggaagaacccctctag

SEQ ID NO: 5323607 - DNA, 25 bp, Homo sapien
ggaagaacccctctagacattggct

SEQ ID NO: 5323608 - DNA, 25 bp, Homo sapien
actataatacaaagccatagttacc

SEQ ID NO: 5323609 - DNA, 25 bp, Homo sapien
agttaccaaaacagcgtagtgctgg

SEQ ID NO: 5323610 - DNA, 25 bp, Homo sapien
cactgcaaaggcttgtcaaatcatt

SEQ ID NO: 5323611 - DNA, 25 bp, Homo sapien
atactgattaatgagcctggtggcc

SEQ ID NO: 5323612 - DNA, 25 bp, Homo sapien
ctgtgtcaatctgtctaatgttagc

SEQ ID NO: 5323613 - DNA, 25 bp, Homo sapien
gctccattggttaaacactgcaaag

SEQ ID NO: 5323614 - DNA, 25 bp, Homo sapien
agcacacaccgactgttttgcatca

SEQ ID NO: 5323615 - DNA, 25 bp, Homo sapien
gctcagcacacaccgactgttttgc

SEQ ID NO: 5323616 - DNA, 25 bp, Homo sapien
cacacaccgactgttttgcatcagc

SEQ ID NO: 5323617 - DNA, 25 bp, Homo sapien
ttgctcagcacacaccgactgtttt

SEQ ID NO: 5323618 - DNA, 25 bp, Homo sapien
tgtcattatcagttaaagtgcctct

SEQ ID NO: 5323619 - DNA, 25 bp, Homo sapien
agtgcctctgatttgcaagcaaaaa

SEQ ID NO: 5323620 - DNA, 25 bp, Homo sapien
agaaaaagagagagcgtagttggct

SEQ ID NO: 5323621 - DNA, 25 bp, Homo sapien
gcgtagttggctgtacacattgtca

SEQ ID NO: 5323622 - DNA, 25 bp, Homo sapien
ttgagcgtccaaggataatctcgtg

SEQ ID NO: 5323623 - DNA, 25 bp, Homo sapien
tctgggcgtctgtttttgagcgtcc

SEQ ID NO: 5323624 - DNA, 25 bp, Homo sapien
ccaactctttgagcgagtctcggag

SEQ ID NO: 5323625 - DNA, 25 bp, Homo sapien
tctcggagtttttctgggcgtctgt

SEQ ID NO: 5323626 - DNA, 25 bp, Homo sapien
ttttctaagttaccatgctctgtcg

SEQ ID NO: 5323627 - DNA, 25 bp, Homo sapien
tgcttcttttctaagttaccatgct

SEQ ID NO: 5323628 - DNA, 25 bp, Homo sapien
tcttttctaagttaccatgctctgt

SEQ ID NO: 5323629 - DNA, 25 bp, Homo sapien
ttcttttctaagttaccatgctctg

SEQ ID NO: 5323630 - DNA, 25 bp, Homo sapien
atactggtagatcccaatgtctcta

SEQ ID NO: 5323631 - DNA, 25 bp, Homo sapien
taatactggtagatcccaatgtctc

SEQ ID NO: 5323632 - DNA, 25 bp, Homo sapien
gtcataatactggtagatcccaatg

SEQ ID NO: 5323633 - DNA, 25 bp, Homo sapien
cataatactggtagatcccaatgtc

SEQ ID NO: 5323634 - DNA, 25 bp, Homo sapien
ccacaggtgcagttcagtcaagcag

SEQ ID NO: 5323635 - DNA, 25 bp, Homo sapien
tgcagttcagtcaagcagaaagaca

SEQ ID NO: 5323636 - DNA, 25 bp, Homo sapien
tcaaagaccacaggtgcagttcagt

SEQ ID NO: 5323637 - DNA, 25 bp, Homo sapien
aaggtattcttcaaagaccacaggt

SEQ ID NO: 5323638 - DNA, 25 bp, Homo sapien
caaacatcttgtttgctaatgctca

SEQ ID NO: 5323639 - DNA, 25 bp, Homo sapien
aaacatcttgtttgctaatgctcat

SEQ ID NO: 5323640 - DNA, 25 bp, Homo sapien
agcactttggctttgcaacattcca

SEQ ID NO: 5323641 - DNA, 25 bp, Homo sapien
tattagaagtgcaaccaggaatttt

SEQ ID NO: 5323642 - DNA, 25 bp, Homo sapien
tctattagaagtgcaaccaggaatt

SEQ ID NO: 5323643 - DNA, 25 bp, Homo sapien
ttttctattagaagtgcaaccagga

SEQ ID NO: 5323644 - DNA, 25 bp, Homo sapien
gaacagtgcaggacaatcttgccca

SEQ ID NO: 5323645 - DNA, 25 bp, Homo sapien
ccattagagcactccagcagagcgg

SEQ ID NO: 5323646 - DNA, 25 bp, Homo sapien
ggaattctggtagcaggaggcccca

SEQ ID NO: 5323647 - DNA, 25 bp, Homo sapien
ccagtgactcctagagacagggtga

SEQ ID NO: 5323648 - DNA, 25 bp, Homo sapien
ggcacagatccctataaccaagtct

SEQ ID NO: 5323649 - DNA, 25 bp, Homo sapien
cagcccttctatttaaggcacagat

SEQ ID NO: 5323650 - DNA, 25 bp, Homo sapien
agtcttgaagtttttgaggctctac

SEQ ID NO: 5323651 - DNA, 25 bp, Homo sapien
gatccctataaccaagtcttgaagt

SEQ ID NO: 5323652 - DNA, 25 bp, Homo sapien
attttaaagattccagaaagcagta

SEQ ID NO: 5323653 - DNA, 25 bp, Homo sapien
tgtttattccagttattcccagaga

SEQ ID NO: 5323654 - DNA, 25 bp, Homo sapien
tatttgggcactgttaaactgagca

SEQ ID NO: 5323655 - DNA, 25 bp, Homo sapien
ccaagtattctattatagtacccaa

SEQ ID NO: 5323656 - DNA, 25 bp, Homo sapien
tatatcaggaggcacacaatgtcaa

SEQ ID NO: 5323657 - DNA, 25 bp, Homo sapien
tgacatttctgatgcataaagctgg

SEQ ID NO: 5323658 - DNA, 25 bp, Homo sapien
aaatgatgccatgctcttctaggtt

SEQ ID NO: 5323659 - DNA, 25 bp, Homo sapien
ggttggcaacttatgtcacttggta

SEQ ID NO: 5323660 - DNA, 25 bp, Homo sapien
gcatctcccagatctaggcttgttg

SEQ ID NO: 5323661 - DNA, 25 bp, Homo sapien
catcgtgagtttgagttcggctaac

SEQ ID NO: 5323662 - DNA, 25 bp, Homo sapien
aggcttgttgtgaactatggaccca

SEQ ID NO: 5323663 - DNA, 25 bp, Homo sapien
tgcttttgggactctgctaacactg

SEQ ID NO: 5323664 - DNA, 25 bp, Homo sapien
tccagtgccttcagagagttgtggg

SEQ ID NO: 5323665 - DNA, 25 bp, Homo sapien
tcagtttatgcctgctatggtcact

SEQ ID NO: 5323666 - DNA, 25 bp, Homo sapien
cggtgatactccctctttccaagta

SEQ ID NO: 5323667 - DNA, 25 bp, Homo sapien
tccattcctcagatccaagtttcca

SEQ ID NO: 5323668 - DNA, 25 bp, Homo sapien
gcttgcaggcatccgcacagcggat

SEQ ID NO: 5323669 - DNA, 25 bp, Homo sapien
tcatactccgctcagaaaagggacc

SEQ ID NO: 5323670 - DNA, 25 bp, Homo sapien
accaaccgcattccggatcctaagg

SEQ ID NO: 5323671 - DNA, 25 bp, Homo sapien
gcacagcggataaaagcaaagcggg

SEQ ID NO: 5323672 - DNA, 25 bp, Homo sapien
actcccggccgctttggagtaggcg

SEQ ID NO: 5323673 - DNA, 25 bp, Homo sapien
gtaggcgtcccagcaaaactctcgc

SEQ ID NO: 5323674 - DNA, 25 bp, Homo sapien
cggccgctttggagtaggcgtccca

SEQ ID NO: 5323675 - DNA, 25 bp, Homo sapien
ttggagtaggcgtcccagcaaaact

SEQ ID NO: 5323676 - DNA, 25 bp, Homo sapien
ttacgcagcggaaggtctctttacc

SEQ ID NO: 5323677 - DNA, 25 bp, Homo sapien
agtttcctcaggtgctacaaagcag

SEQ ID NO: 5323678 - DNA, 25 bp, Homo sapien
tccgggtcgatccagctttacgcag

SEQ ID NO: 5323679 - DNA, 25 bp, Homo sapien
catgggaggatgcagtctcagtcac

SEQ ID NO: 5323680 - DNA, 25 bp, Homo sapien
taaggatctcgtattctaaagggaa

SEQ ID NO: 5323681 - DNA, 25 bp, Homo sapien
ttccttcaagcaaataccagagttc

SEQ ID NO: 5323682 - DNA, 25 bp, Homo sapien
ttttgatagttttacaggacccagc

SEQ ID NO: 5323683 - DNA, 25 bp, Homo sapien
tacaggacaggtgttgttctaggca

SEQ ID NO: 5323684 - DNA, 25 bp, Homo sapien
caaagcgtccttgttcgtgagaaat

SEQ ID NO: 5323685 - DNA, 25 bp, Homo sapien
gaggtaaagtactccttgcacagta

SEQ ID NO: 5323686 - DNA, 25 bp, Homo sapien
agtttaatagaaatccacaggtgcc

SEQ ID NO: 5323687 - DNA, 25 bp, Homo sapien
gccagcactgcactacttagagaca

SEQ ID NO: 5323688 - DNA, 25 bp, Homo sapien
cctattaatgatttctcacgtgaga

SEQ ID NO: 5323689 - DNA, 25 bp, Homo sapien
taaatgtcgtctttgactcaagtac

SEQ ID NO: 5323690 - DNA, 25 bp, Homo sapien
tcaaagctgaagaatctaaatgtcg

SEQ ID NO: 5323691 - DNA, 25 bp, Homo sapien
gatggatcttactgcaaaggaactg

SEQ ID NO: 5323692 - DNA, 25 bp, Homo sapien
gctggccatttagggagcacgcaaa

SEQ ID NO: 5323693 - DNA, 25 bp, Homo sapien
caatccatgttagttggctggccat

SEQ ID NO: 5323694 - DNA, 25 bp, Homo sapien
gatttcaagacttggagtacccaac

SEQ ID NO: 5323695 - DNA, 25 bp, Homo sapien
ttgggtcatgggtaacagatcatca

SEQ ID NO: 5323696 - DNA, 25 bp, Homo sapien
gataaagtacaatggagggagggca

SEQ ID NO: 5323697 - DNA, 25 bp, Homo sapien
taatgataaagtacaatggagggag

SEQ ID NO: 5323698 - DNA, 25 bp, Homo sapien
ctaagcctagctgtctgggttgctg

SEQ ID NO: 5323699 - DNA, 25 bp, Homo sapien
gggctaagcctagctgtctgggttg

SEQ ID NO: 5323700 - DNA, 25 bp, Homo sapien
ccttgctggcgaggtccttggcctt

SEQ ID NO: 5323701 - DNA, 25 bp, Homo sapien
gcttcttggtggccgccttgctggc

SEQ ID NO: 5323702 - DNA, 25 bp, Homo sapien
ctgccagtgccgtctcctctgcctt

SEQ ID NO: 5323703 - DNA, 25 bp, Homo sapien
ccttctctgtagctgccagtgccgt

SEQ ID NO: 5323704 - DNA, 25 bp, Homo sapien
aaggggcctcgccttgcagcttagt

SEQ ID NO: 5323705 - DNA, 25 bp, Homo sapien
gcctcgccttgcagcttagtcaaga

SEQ ID NO: 5323706 - DNA, 25 bp, Homo sapien
tcaagtgttttggaaggggcctcgc

SEQ ID NO: 5323707 - DNA, 25 bp, Homo sapien
ggtcacgttgcttttgaactgggca

SEQ ID NO: 5323708 - DNA, 25 bp, Homo sapien
aggaaatagttgcttggcccagcgt

SEQ ID NO: 5323709 - DNA, 25 bp, Homo sapien
tagttgcttggcccagcgtggcatt

SEQ ID NO: 5323710 - DNA, 25 bp, Homo sapien
aaatagttgcttggcccagcgtggc

SEQ ID NO: 5323711 - DNA, 25 bp, Homo sapien
ccagcgtggcattctgttggtcttg

SEQ ID NO: 5323712 - DNA, 25 bp, Homo sapien
cgtcctggccgaagtgggctcagca

SEQ ID NO: 5323713 - DNA, 25 bp, Homo sapien
tcctggccgaagtgggctcagcacc

SEQ ID NO: 5323714 - DNA, 25 bp, Homo sapien
cctgctgccaggctcgtagctcagt

SEQ ID NO: 5323715 - DNA, 25 bp, Homo sapien
ggggctcggcgcacacctgctgcca

SEQ ID NO: 5323716 - DNA, 25 bp, Homo sapien
gtggagaaccctgtagtgttcattg

SEQ ID NO: 5323717 - DNA, 25 bp, Homo sapien
tcaggaactcaatagccctgatgac

SEQ ID NO: 5323718 - DNA, 25 bp, Homo sapien
ttcattggtgccaaccccagcatcc

SEQ ID NO: 5323719 - DNA, 25 bp, Homo sapien
aggaactcaatagccctgatgacag

SEQ ID NO: 5323720 - DNA, 25 bp, Homo sapien
actggagggcaatgtgaaatggtgc

SEQ ID NO: 5323721 - DNA, 25 bp, Homo sapien
gactggagggcaatgtgaaatggtg

SEQ ID NO: 5323722 - DNA, 25 bp, Homo sapien
gctttctaacatgtctctagagacc

SEQ ID NO: 5323723 - DNA, 25 bp, Homo sapien
gattgcttgctgttaacatacagta

SEQ ID NO: 5323724 - DNA, 25 bp, Homo sapien
tacaaaaagctttctaacatgtctc

SEQ ID NO: 5323725 - DNA, 25 bp, Homo sapien
tagacttgtgtatgttcaacaatcc

SEQ ID NO: 5323726 - DNA, 25 bp, Homo sapien
ctgtttggctgccagtctctcgtct

SEQ ID NO: 5323727 - DNA, 25 bp, Homo sapien
tttggctgccagtctctcgtctctc

SEQ ID NO: 5323728 - DNA, 25 bp, Homo sapien
acttctctgtttggctgccagtctc

SEQ ID NO: 5323729 - DNA, 25 bp, Homo sapien
tctctgtttggctgccagtctctcg

SEQ ID NO: 5323730 - DNA, 25 bp, Homo sapien
gatgtctctccctggttatccttcc

SEQ ID NO: 5323731 - DNA, 25 bp, Homo sapien
cctcagggaggagaagttcatggtt

SEQ ID NO: 5323732 - DNA, 25 bp, Homo sapien
aaaccaatctgaatctgttactcac

SEQ ID NO: 5323733 - DNA, 25 bp, Homo sapien
catgaaaagatccaggatgtctctc

SEQ ID NO: 5323734 - DNA, 25 bp, Homo sapien
gggtagtggatagtgtgaacatcat

SEQ ID NO: 5323735 - DNA, 25 bp, Homo sapien
cagggtagtggatagtgtgaacatc

SEQ ID NO: 5323736 - DNA, 25 bp, Homo sapien
atcagggtagtggatagtgtgaaca

SEQ ID NO: 5323737 - DNA, 25 bp, Homo sapien
ggatcagggtagtggatagtgtgaa

SEQ ID NO: 5323738 - DNA, 25 bp, Homo sapien
tttctcaacttgtgggaaccagtgg

SEQ ID NO: 5323739 - DNA, 25 bp, Homo sapien
ttctcaacttgtgggaaccagtgga

SEQ ID NO: 5323740 - DNA, 25 bp, Homo sapien
cagggaggtactttctcaacttgtg

SEQ ID NO: 5323741 - DNA, 25 bp, Homo sapien
acagggaggtactttctcaacttgt

SEQ ID NO: 5323742 - DNA, 25 bp, Homo sapien
cctgcaacccctgatatgatttggg

SEQ ID NO: 5323743 - DNA, 25 bp, Homo sapien
tacggtgcccctagtcagtcaattc

SEQ ID NO: 5323744 - DNA, 25 bp, Homo sapien
gaaatggtccactctggtgaacaca

SEQ ID NO: 5323745 - DNA, 25 bp, Homo sapien
ttacatcatcccaaaatacggtgcc

SEQ ID NO: 5323746 - DNA, 25 bp, Homo sapien
tggaggtccttcttggtaaccatag

SEQ ID NO: 5323747 - DNA, 25 bp, Homo sapien
tgcaatgagaggtgcaatgcattgg

SEQ ID NO: 5323748 - DNA, 25 bp, Homo sapien
gaacaggagccatcattcacatgca

SEQ ID NO: 5323749 - DNA, 25 bp, Homo sapien
tcttatagtgatccttgggcaatct

SEQ ID NO: 5323750 - DNA, 25 bp, Homo sapien
cacaaggctgcaatgaaagtgtcat

SEQ ID NO: 5323751 - DNA, 25 bp, Homo sapien
catttaaagactcaactagggagga

SEQ ID NO: 5323752 - DNA, 25 bp, Homo sapien
ctagggaggatttacttctaagcct

SEQ ID NO: 5323753 - DNA, 25 bp, Homo sapien
tctcagactacagaattgaggcttc

SEQ ID NO: 5323754 - DNA, 25 bp, Homo sapien
gaaatgcgttgtctcatggttctca

SEQ ID NO: 5323755 - DNA, 25 bp, Homo sapien
gagctggacagaatcccttaggaga

SEQ ID NO: 5323756 - DNA, 25 bp, Homo sapien
gagtgatcaaacacattgccccagg

SEQ ID NO: 5323757 - DNA, 25 bp, Homo sapien
gatctgactctaggacttatgctct

SEQ ID NO: 5323758 - DNA, 25 bp, Homo sapien
gaggaacagggaatatatagggata

SEQ ID NO: 5323759 - DNA, 25 bp, Homo sapien
tttctctccctgttatcatgttttc

SEQ ID NO: 5323760 - DNA, 25 bp, Homo sapien
tggctttagctaatacttgctgcac

SEQ ID NO: 5323761 - DNA, 25 bp, Homo sapien
tatagggatagggtcccatgatatc

SEQ ID NO: 5323762 - DNA, 25 bp, Homo sapien
tgtcagtgggcactctctcagtccg

SEQ ID NO: 5323763 - DNA, 25 bp, Homo sapien
ctcccatgctcaaataaacccagtt

SEQ ID NO: 5323764 - DNA, 25 bp, Homo sapien
tgatgtaaacacttcggtgacctgg

SEQ ID NO: 5323765 - DNA, 25 bp, Homo sapien
tgacctggctagtcactcccatgct

SEQ ID NO: 5323766 - DNA, 25 bp, Homo sapien
taagtgcataaggtacctaagtgct

SEQ ID NO: 5323767 - DNA, 25 bp, Homo sapien
gaggagataccaaaccacttagaaa

SEQ ID NO: 5323768 - DNA, 25 bp, Homo sapien
tgtacaagtatgcagatgtgtgtgg

SEQ ID NO: 5323769 - DNA, 25 bp, Homo sapien
ttgactcctctaaacagaggccaag

SEQ ID NO: 5323770 - DNA, 25 bp, Homo sapien
gagatagccatcttccccttcaaga

SEQ ID NO: 5323771 - DNA, 25 bp, Homo sapien
tctttggcaatagctggctaggtta

SEQ ID NO: 5323772 - DNA, 25 bp, Homo sapien
aaaccttatgatcagatactctatg

SEQ ID NO: 5323773 - DNA, 25 bp, Homo sapien
aaagcattgcccaatacaacacaga

SEQ ID NO: 5323774 - DNA, 25 bp, Homo sapien
gacactactctggacgcaaagccat

SEQ ID NO: 5323775 - DNA, 25 bp, Homo sapien
taactataatcacctaatgcccaca

SEQ ID NO: 5323776 - DNA, 25 bp, Homo sapien
cgcaaagtgatagctgtcatgggca

SEQ ID NO: 5323777 - DNA, 25 bp, Homo sapien
gagatcctgctcttaaacgcaaggc

SEQ ID NO: 5323778 - DNA, 25 bp, Homo sapien
taaagtaggcccgatccaacatttc

SEQ ID NO: 5323779 - DNA, 25 bp, Homo sapien
cataattcagctgctcagtatcata

SEQ ID NO: 5323780 - DNA, 25 bp, Homo sapien
tcattgcttctgatgcctagtttct

SEQ ID NO: 5323781 - DNA, 25 bp, Homo sapien
tccagggcctattcaatcttccttg

SEQ ID NO: 5323782 - DNA, 25 bp, Homo sapien
taaagcagtttttgaggcgctggcc

SEQ ID NO: 5323783 - DNA, 25 bp, Homo sapien
cagagggacggttgttcccactaag

SEQ ID NO: 5323784 - DNA, 25 bp, Homo sapien
tggcctttgagctgggccttattaa

SEQ ID NO: 5323785 - DNA, 25 bp, Homo sapien
ggaactgagaggattcagagggacg

SEQ ID NO: 5323786 - DNA, 25 bp, Homo sapien
ccaaggttggaggatcgcttcagcc

SEQ ID NO: 5323787 - DNA, 25 bp, Homo sapien
caaggttggaggatcgcttcagccc

SEQ ID NO: 5323788 - DNA, 25 bp, Homo sapien
ggacaacatagtgagaccccatcta

SEQ ID NO: 5323789 - DNA, 25 bp, Homo sapien
ggagttccaggtcagcctggacaac

SEQ ID NO: 5323790 - DNA, 25 bp, Homo sapien
ttctgccaactagaatgtttttcag

SEQ ID NO: 5323791 - DNA, 25 bp, Homo sapien
tctgccaactagaatgtttttcagg

SEQ ID NO: 5323792 - DNA, 25 bp, Homo sapien
ctgacttctgccaactagaatgttt

SEQ ID NO: 5323793 - DNA, 25 bp, Homo sapien
tgccaactagaatgtttttcaggtt

SEQ ID NO: 5323794 - DNA, 25 bp, Homo sapien
tctgagaagctggtggacttgatga

SEQ ID NO: 5323795 - DNA, 25 bp, Homo sapien
gaagctggtggacttgatgagctct

SEQ ID NO: 5323796 - DNA, 25 bp, Homo sapien
gttagtaagcgtttctctgagaagc

SEQ ID NO: 5323797 - DNA, 25 bp, Homo sapien
tctgaagggacagtccacttctctg

SEQ ID NO: 5323798 - DNA, 25 bp, Homo sapien
tattcttgctgtccagcatgccagt

SEQ ID NO: 5323799 - DNA, 25 bp, Homo sapien
tgttgccacctgactcttggaaatg

SEQ ID NO: 5323800 - DNA, 25 bp, Homo sapien
gatgcgtaagaagcaggccagaatt

SEQ ID NO: 5323801 - DNA, 25 bp, Homo sapien
tgacctgatgcgtaagaagcaggcc

SEQ ID NO: 5323802 - DNA, 25 bp, Homo sapien
ggcaagatggtggcaggccaaatca

SEQ ID NO: 5323803 - DNA, 25 bp, Homo sapien
catgtgtactcccaaaacagttctc

SEQ ID NO: 5323804 - DNA, 25 bp, Homo sapien
tgtctcatgtgtactcccaaaacag

SEQ ID NO: 5323805 - DNA, 25 bp, Homo sapien
agggatgtctcatgtgtactcccaa

SEQ ID NO: 5323806 - DNA, 25 bp, Homo sapien
gtgtactcccaaaacagttctcttg

SEQ ID NO: 5323807 - DNA, 25 bp, Homo sapien
tgacacaaacaagctgcactctcca

SEQ ID NO: 5323808 - DNA, 25 bp, Homo sapien
gctggcaccaatattcatgacacaa

SEQ ID NO: 5323809 - DNA, 25 bp, Homo sapien
aagatattgatagtcctggagccaa

SEQ ID NO: 5323810 - DNA, 25 bp, Homo sapien
gctcaacttcaagggcatcaaagat

SEQ ID NO: 5323811 - DNA, 25 bp, Homo sapien
gtgagtctcaatatttcaggtgaaa

SEQ ID NO: 5323812 - DNA, 25 bp, Homo sapien
aaatcccttttacagcatgactcat

SEQ ID NO: 5323813 - DNA, 25 bp, Homo sapien
tcatctgacccgttttattcatttc

SEQ ID NO: 5323814 - DNA, 25 bp, Homo sapien
tactaactgcttggcctgtgagtct

SEQ ID NO: 5323815 - DNA, 25 bp, Homo sapien
gccagaatgcttatgacaaatgaga

SEQ ID NO: 5323816 - DNA, 25 bp, Homo sapien
tcctgtgcacatagatctgcttgat

SEQ ID NO: 5323817 - DNA, 25 bp, Homo sapien
tgcttgatatcagcccaatccagaa

SEQ ID NO: 5323818 - DNA, 25 bp, Homo sapien
taactaccacctagagcaagaaaga

SEQ ID NO: 5323819 - DNA, 25 bp, Homo sapien
gagtctgccttttggctccacagtc

SEQ ID NO: 5323820 - DNA, 25 bp, Homo sapien
ctgtatgagtctgccttttggctcc

SEQ ID NO: 5323821 - DNA, 25 bp, Homo sapien
tatgagtctgccttttggctccaca

SEQ ID NO: 5323822 - DNA, 25 bp, Homo sapien
ttctgtatgagtctgccttttggct

SEQ ID NO: 5323823 - DNA, 25 bp, Homo sapien
tgtctatccagcactaatactgtac

SEQ ID NO: 5323824 - DNA, 25 bp, Homo sapien
tgaaagctggtaggacaaactcatt

SEQ ID NO: 5323825 - DNA, 25 bp, Homo sapien
taactctagctgctatatagaaatg

SEQ ID NO: 5323826 - DNA, 25 bp, Homo sapien
gattctgtagatcaaattagggaca

SEQ ID NO: 5323827 - DNA, 25 bp, Homo sapien
cacaggtgtggccattcacacgacg

SEQ ID NO: 5323828 - DNA, 25 bp, Homo sapien
gggtgaagcactatccacctcttgt

SEQ ID NO: 5323829 - DNA, 25 bp, Homo sapien
gtgtggccattcacacgacggtatt

SEQ ID NO: 5323830 - DNA, 25 bp, Homo sapien
gtgaagcactatccacctcttgttt

SEQ ID NO: 5323831 - DNA, 25 bp, Homo sapien
ttcaatttttccatactgttcaaaa

SEQ ID NO: 5323832 - DNA, 25 bp, Homo sapien
aatcacttcaatttttccatactgt

SEQ ID NO: 5323833 - DNA, 25 bp, Homo sapien
ctgttcaaaataatctctcaggtga

SEQ ID NO: 5323834 - DNA, 25 bp, Homo sapien
tcaatcagtcataatttcaatcact

SEQ ID NO: 5323835 - DNA, 25 bp, Homo sapien
ttgagaaccttctcttgagatagcc

SEQ ID NO: 5323836 - DNA, 25 bp, Homo sapien
gaaccttctcttgagatagccctct

SEQ ID NO: 5323837 - DNA, 25 bp, Homo sapien
accttctcttgagatagccctcttt

SEQ ID NO: 5323838 - DNA, 25 bp, Homo sapien
gagaaccttctcttgagatagccct

SEQ ID NO: 5323839 - DNA, 25 bp, Homo sapien
tcaaagctcagccttccagtgaaga

SEQ ID NO: 5323840 - DNA, 25 bp, Homo sapien
ttgtttcaaagctcagccttccagt

SEQ ID NO: 5323841 - DNA, 25 bp, Homo sapien
tgtttcaaagctcagccttccagtg

SEQ ID NO: 5323842 - DNA, 25 bp, Homo sapien
tttcaaagctcagccttccagtgaa

SEQ ID NO: 5323843 - DNA, 25 bp, Homo sapien
aagaggtgtttcgaggaggccacaa

SEQ ID NO: 5323844 - DNA, 25 bp, Homo sapien
taagtactccgtggcagcaaagaag

SEQ ID NO: 5323845 - DNA, 25 bp, Homo sapien
taaagaagtctagggttggttcagc

SEQ ID NO: 5323846 - DNA, 25 bp, Homo sapien
cagtactaggtaaaattgttggcca

SEQ ID NO: 5323847 - DNA, 25 bp, Homo sapien
tactgggtttactactaggctctcc

SEQ ID NO: 5323848 - DNA, 25 bp, Homo sapien
acagccatcacccatccactcagtg

SEQ ID NO: 5323849 - DNA, 25 bp, Homo sapien
tattactgggtttactactaggctc

SEQ ID NO: 5323850 - DNA, 25 bp, Homo sapien
catccaatactctattattactggg

SEQ ID NO: 5323851 - DNA, 25 bp, Homo sapien
ggcaggagaagaggtaaatgtggga

SEQ ID NO: 5323852 - DNA, 25 bp, Homo sapien
gcaggagaagaggtaaatgtgggag

SEQ ID NO: 5323853 - DNA, 25 bp, Homo sapien
ccaaaccactaagtccaagtggtcg

SEQ ID NO: 5323854 - DNA, 25 bp, Homo sapien
agtccaagtggtcgggcaggagaag

SEQ ID NO: 5323855 - DNA, 25 bp, Homo sapien
tgatgactgactaaaattcctggac

SEQ ID NO: 5323856 - DNA, 25 bp, Homo sapien
taagtggtacattaaatccagctgg

SEQ ID NO: 5323857 - DNA, 25 bp, Homo sapien
cacagatggccagatctctagggaa

SEQ ID NO: 5323858 - DNA, 25 bp, Homo sapien
tccagctggcttcaaacggtacagg

SEQ ID NO: 5323859 - DNA, 25 bp, Homo sapien
caggtgtatctctgcataggcctct

SEQ ID NO: 5323860 - DNA, 25 bp, Homo sapien
tggaagatacaatggtaaacaggac

SEQ ID NO: 5323861 - DNA, 25 bp, Homo sapien
gctgcttatctaagagggagtccta

SEQ ID NO: 5323862 - DNA, 25 bp, Homo sapien
gagtcctaaactaggctaaggtagc

SEQ ID NO: 5323863 - DNA, 25 bp, Homo sapien
gattactttcctagcccagattctc

SEQ ID NO: 5323864 - DNA, 25 bp, Homo sapien
tagtggaaagggttctcgtgcaggt

SEQ ID NO: 5323865 - DNA, 25 bp, Homo sapien
tggaaagggttctcgtgcaggtctt

SEQ ID NO: 5323866 - DNA, 25 bp, Homo sapien
ctagtggaaagggttctcgtgcagg

SEQ ID NO: 5323867 - DNA, 25 bp, Homo sapien
agtggaaagggttctcgtgcaggtc

SEQ ID NO: 5323868 - DNA, 25 bp, Homo sapien
tgaaccaagctgaacattattatcc

SEQ ID NO: 5323869 - DNA, 25 bp, Homo sapien
tatagagaagtaggtatttttcctg

SEQ ID NO: 5323870 - DNA, 25 bp, Homo sapien
tctaagcacgtaactcccaaggaca

SEQ ID NO: 5323871 - DNA, 25 bp, Homo sapien
cagaaggataccctgttaatgaacc

SEQ ID NO: 5323872 - DNA, 25 bp, Homo sapien
tcccagtccaaatgccaggacttgg

SEQ ID NO: 5323873 - DNA, 25 bp, Homo sapien
gagcacgggcattccatgactggta

SEQ ID NO: 5323874 - DNA, 25 bp, Homo sapien
aatgccatgtaggtatttgctgagc

SEQ ID NO: 5323875 - DNA, 25 bp, Homo sapien
tgggttggctctaaaatgccatgta

SEQ ID NO: 5323876 - DNA, 25 bp, Homo sapien
gctgtttccaattctggacgtcact

SEQ ID NO: 5323877 - DNA, 25 bp, Homo sapien
ctgtttccaattctggacgtcactg

SEQ ID NO: 5323878 - DNA, 25 bp, Homo sapien
tctggacgtcactggggtctatcat

SEQ ID NO: 5323879 - DNA, 25 bp, Homo sapien
tccaattctggacgtcactggggtc

SEQ ID NO: 5323880 - DNA, 25 bp, Homo sapien
tcttgcacagtggaagtagcctttc

SEQ ID NO: 5323881 - DNA, 25 bp, Homo sapien
ttggaaagattactgcccatagcag

SEQ ID NO: 5323882 - DNA, 25 bp, Homo sapien
taaatatgtgggtcccctaggcaga

SEQ ID NO: 5323883 - DNA, 25 bp, Homo sapien
ttgtatagtgagtaacggagctccg

SEQ ID NO: 5323884 - DNA, 25 bp, Homo sapien
tccaagatggctcaaagaaatcagt

SEQ ID NO: 5323885 - DNA, 25 bp, Homo sapien
tccatagtgctcctttagtgtctca

SEQ ID NO: 5323886 - DNA, 25 bp, Homo sapien
aaggtggacccagcgggttcctgct

SEQ ID NO: 5323887 - DNA, 25 bp, Homo sapien
ataactttgcagtcaatctgtcagc

SEQ ID NO: 5323888 - DNA, 25 bp, Homo sapien
tatgctctgttagaatgtgggctcc

SEQ ID NO: 5323889 - DNA, 25 bp, Homo sapien
caatatgctctgttagaatgtgggc

SEQ ID NO: 5323890 - DNA, 25 bp, Homo sapien
gctctgttagaatgtgggctccctt

SEQ ID NO: 5323891 - DNA, 25 bp, Homo sapien
tgtcaatatgctctgttagaatgtg

SEQ ID NO: 5323892 - DNA, 25 bp, Homo sapien
tcctcttagacaggggtcagccttc

SEQ ID NO: 5323893 - DNA, 25 bp, Homo sapien
ttcctgagctacagacttcatatgt

SEQ ID NO: 5323894 - DNA, 25 bp, Homo sapien
gacttcatatgtcgctcatttaccc

SEQ ID NO: 5323895 - DNA, 25 bp, Homo sapien
ctctcctatgagagctcacagattt

SEQ ID NO: 5323896 - DNA, 25 bp, Homo sapien
ctctggcagttgcttttagtccctg

SEQ ID NO: 5323897 - DNA, 25 bp, Homo sapien
gttgcttttagtccctgagttgctc

SEQ ID NO: 5323898 - DNA, 25 bp, Homo sapien
tggcagttgcttttagtccctgagt

SEQ ID NO: 5323899 - DNA, 25 bp, Homo sapien
cagttgcttttagtccctgagttgc

SEQ ID NO: 5323900 - DNA, 25 bp, Homo sapien
tgcaaagatggttgcatcataacag

SEQ ID NO: 5323901 - DNA, 25 bp, Homo sapien
tgtgagaattaagggagataaaagc

SEQ ID NO: 5323902 - DNA, 25 bp, Homo sapien
catgatgtctgggacattaagagta

SEQ ID NO: 5323903 - DNA, 25 bp, Homo sapien
acttttttgaagtggatgtttgcaa

SEQ ID NO: 5323904 - DNA, 25 bp, Homo sapien
tagttcaatcaaaccagtgcacagg

SEQ ID NO: 5323905 - DNA, 25 bp, Homo sapien
cactgatcatggattctataataat

SEQ ID NO: 5323906 - DNA, 25 bp, Homo sapien
gaaagtgagctgagtctaccatctc

SEQ ID NO: 5323907 - DNA, 25 bp, Homo sapien
gcatattggccttattagtcacagc

SEQ ID NO: 5323908 - DNA, 25 bp, Homo sapien
cagaggcggatctcagttaaacggt

SEQ ID NO: 5323909 - DNA, 25 bp, Homo sapien
taggtaacatcactaagcagcaagg

SEQ ID NO: 5323910 - DNA, 25 bp, Homo sapien
taaaagtccatggatagcctgcaga

SEQ ID NO: 5323911 - DNA, 25 bp, Homo sapien
tgaggaatctctaggtcaatagctc

SEQ ID NO: 5323912 - DNA, 25 bp, Homo sapien
tatacttagtacctagaacggtgcc

SEQ ID NO: 5323913 - DNA, 25 bp, Homo sapien
gctccaactatttcctcagagaggg

SEQ ID NO: 5323914 - DNA, 25 bp, Homo sapien
ggtgcctaaggctcaaacatttgtt

SEQ ID NO: 5323915 - DNA, 25 bp, Homo sapien
tttttgcatgtcctagcactgcagc

SEQ ID NO: 5323916 - DNA, 25 bp, Homo sapien
tccctcttgtgagccttaaataatc

SEQ ID NO: 5323917 - DNA, 25 bp, Homo sapien
tgtcttcttcctattcaatccattg

SEQ ID NO: 5323918 - DNA, 25 bp, Homo sapien
tttgctaagcaatggtaagattgac

SEQ ID NO: 5323919 - DNA, 25 bp, Homo sapien
tgtgacaatgatacctaagattttt

SEQ ID NO: 5323920 - DNA, 25 bp, Homo sapien
tccttggctgtgctcagcacattgc

SEQ ID NO: 5323921 - DNA, 25 bp, Homo sapien
gaaactctgatttcgtagacatcgg

SEQ ID NO: 5323922 - DNA, 25 bp, Homo sapien
ttttcgttagcagctgaagtgccct

SEQ ID NO: 5323923 - DNA, 25 bp, Homo sapien
gtctgactgatccaacaatgcatgc

SEQ ID NO: 5323924 - DNA, 25 bp, Homo sapien
taccaggtgtgatttgacaagccgt

SEQ ID NO: 5323925 - DNA, 25 bp, Homo sapien
tgcaggctaagtaaccctacgtggc

SEQ ID NO: 5323926 - DNA, 25 bp, Homo sapien
gcacttaagagaaggcgctggcaaa

SEQ ID NO: 5323927 - DNA, 25 bp, Homo sapien
ttaccttggttgattagtgctgccc

SEQ ID NO: 5323928 - DNA, 25 bp, Homo sapien
cagctctacaggattaggaaccggg

SEQ ID NO: 5323929 - DNA, 25 bp, Homo sapien
aaaagtaaacgcctatcacagcagc

SEQ ID NO: 5323930 - DNA, 25 bp, Homo sapien
ggaaaaataaccagtcgtgctcagg

SEQ ID NO: 5323931 - DNA, 25 bp, Homo sapien
catctcttgaggagtaacttaggcc

SEQ ID NO: 5323932 - DNA, 25 bp, Homo sapien
gatatactggcgaggcttccctggc

SEQ ID NO: 5323933 - DNA, 25 bp, Homo sapien
tgactggcggctgcgcctgtcggtc

SEQ ID NO: 5323934 - DNA, 25 bp, Homo sapien
ggtatccccgcgtactgctcagtgc

SEQ ID NO: 5323935 - DNA, 25 bp, Homo sapien
tccgacgggctctcaagtgccgcaa

SEQ ID NO: 5323936 - DNA, 25 bp, Homo sapien
ggctgctccgaatggagggggaggg

SEQ ID NO: 5323937 - DNA, 25 bp, Homo sapien
ctgctccgaatggagggggagggga

SEQ ID NO: 5323938 - DNA, 25 bp, Homo sapien
gctgctccgaatggagggggagggg

SEQ ID NO: 5323939 - DNA, 25 bp, Homo sapien
ccgttagggaggggctcaaggtgtg

SEQ ID NO: 5323940 - DNA, 25 bp, Homo sapien
cagctgggctgcgaccgttagggag

SEQ ID NO: 5323941 - DNA, 25 bp, Homo sapien
gcagctgggctgcgaccgttaggga

SEQ ID NO: 5323942 - DNA, 25 bp, Homo sapien
ttagggaggggctcaaggtgtgcat

SEQ ID NO: 5323943 - DNA, 25 bp, Homo sapien
tccggcgaccccctggatgagtgtg

SEQ ID NO: 5323944 - DNA, 25 bp, Homo sapien
aggtgggtctcgctggcggcttgag

SEQ ID NO: 5323945 - DNA, 25 bp, Homo sapien
tgtggtctcggaggcggaatttggg

SEQ ID NO: 5323946 - DNA, 25 bp, Homo sapien
ctcgctggcccgctgtgtggtctcg

SEQ ID NO: 5323947 - DNA, 25 bp, Homo sapien
tgaaatagccgctgtaggtccgcct

SEQ ID NO: 5323948 - DNA, 25 bp, Homo sapien
cctaccgagaaaaagctgcggccgg

SEQ ID NO: 5323949 - DNA, 25 bp, Homo sapien
cagctggccctcatttgtgtccgga

SEQ ID NO: 5323950 - DNA, 25 bp, Homo sapien
tactaagcccctaaaatgtcgagat

SEQ ID NO: 5323951 - DNA, 25 bp, Homo sapien
ggctgctaattaatccttgttctct

SEQ ID NO: 5323952 - DNA, 25 bp, Homo sapien
caggatttttggctgctaattaatc

SEQ ID NO: 5323953 - DNA, 25 bp, Homo sapien
tacctgtgcgtgcacgcagacggga

SEQ ID NO: 5323954 - DNA, 25 bp, Homo sapien
tcctggtctgtgtcaaggtacctgt

SEQ ID NO: 5323955 - DNA, 25 bp, Homo sapien
tgacaccagtttgtagcatgagatt

SEQ ID NO: 5323956 - DNA, 25 bp, Homo sapien
gatttgccttctggtatgcaagtaa

SEQ ID NO: 5323957 - DNA, 25 bp, Homo sapien
tctggtatgcaagtaaactctttcc

SEQ ID NO: 5323958 - DNA, 25 bp, Homo sapien
gaaattggtgctggcataaaccttt

SEQ ID NO: 5323959 - DNA, 25 bp, Homo sapien
ggaggagccagttagggaaactgag

SEQ ID NO: 5323960 - DNA, 25 bp, Homo sapien
aaggaggagccagttagggaaactg

SEQ ID NO: 5323961 - DNA, 25 bp, Homo sapien
gatttaagattaagtgcgctctcca

SEQ ID NO: 5323962 - DNA, 25 bp, Homo sapien
gtttaaaggactgtagtgagcccag

SEQ ID NO: 5323963 - DNA, 25 bp, Homo sapien
tgaattggttgtaaatctagccggc

SEQ ID NO: 5323964 - DNA, 25 bp, Homo sapien
tctagccggcatagttcatatttcc

SEQ ID NO: 5323965 - DNA, 25 bp, Homo sapien
gaagtcattcggcaagagctagaat

SEQ ID NO: 5323966 - DNA, 25 bp, Homo sapien
tccaagaagtcattcggcaagagct

SEQ ID NO: 5323967 - DNA, 25 bp, Homo sapien
gaaaaaatactcaccacagcatcat

SEQ ID NO: 5323968 - DNA, 25 bp, Homo sapien
tagcaaagcaatgtctcaagatggt

SEQ ID NO: 5323969 - DNA, 25 bp, Homo sapien
cctggatggatttcggaagctattt

SEQ ID NO: 5323970 - DNA, 25 bp, Homo sapien
caaaaaagacctggatggatttcgg

SEQ ID NO: 5323971 - DNA, 25 bp, Homo sapien
tggatttcggaagctatttcataga

SEQ ID NO: 5323972 - DNA, 25 bp, Homo sapien
aagacctggatggatttcggaagct

SEQ ID NO: 5323973 - DNA, 25 bp, Homo sapien
cttgcatccagccagaactttctat

SEQ ID NO: 5323974 - DNA, 25 bp, Homo sapien
atacatatgattttggagttctgtt

SEQ ID NO: 5323975 - DNA, 25 bp, Homo sapien
tgtggatcaaagctgatttagcatg

SEQ ID NO: 5323976 - DNA, 25 bp, Homo sapien
ttaaggcagcaaggttgacatttgg

SEQ ID NO: 5323977 - DNA, 25 bp, Homo sapien
ccacatgctgcaggggaagcgatca

SEQ ID NO: 5323978 - DNA, 25 bp, Homo sapien
ctggaccacatgctgcaggggaagc

SEQ ID NO: 5323979 - DNA, 25 bp, Homo sapien
tgcaggggaagcgatcagtgtggtc

SEQ ID NO: 5323980 - DNA, 25 bp, Homo sapien
aggggaagcgatcagtgtggtctgc

SEQ ID NO: 5323981 - DNA, 25 bp, Homo sapien
tgtgaggaatgagaatacctttctg

SEQ ID NO: 5323982 - DNA, 25 bp, Homo sapien
ggtgtgaggaatgagaatacctttc

SEQ ID NO: 5323983 - DNA, 25 bp, Homo sapien
gaatgagaatacctttctggatctg

SEQ ID NO: 5323984 - DNA, 25 bp, Homo sapien
gtgtgaggaatgagaatacctttct

SEQ ID NO: 5323985 - DNA, 25 bp, Homo sapien
tgaactcttttaacacggatgaaga

SEQ ID NO: 5323986 - DNA, 25 bp, Homo sapien
cttttaacacggatgaagataccaa

SEQ ID NO: 5323987 - DNA, 25 bp, Homo sapien
ttaatgaactcttttaacacggatg

SEQ ID NO: 5323988 - DNA, 25 bp, Homo sapien
ttttaacacggatgaagataccaaa

SEQ ID NO: 5323989 - DNA, 25 bp, Homo sapien
gacatcttggaatgctaacctggtg

SEQ ID NO: 5323990 - DNA, 25 bp, Homo sapien
tgggaaagaaagagatccacccctg

SEQ ID NO: 5323991 - DNA, 25 bp, Homo sapien
tagataatctgggtgccacagtgga

SEQ ID NO: 5323992 - DNA, 25 bp, Homo sapien
tacagaagcttggtaccctccaggt

SEQ ID NO: 5323993 - DNA, 25 bp, Homo sapien
ttattccagttcaggttcactggtg

SEQ ID NO: 5323994 - DNA, 25 bp, Homo sapien
aaggcaggagccaaccctgcacagg

SEQ ID NO: 5323995 - DNA, 25 bp, Homo sapien
aatgtgagctgtacatacattgatt

SEQ ID NO: 5323996 - DNA, 25 bp, Homo sapien
actggtgaccagagcttatcccggc

SEQ ID NO: 5323997 - DNA, 25 bp, Homo sapien
gggtcacataggacaatctctagtg

SEQ ID NO: 5323998 - DNA, 25 bp, Homo sapien
gaatagaagcagtccaattccagta

SEQ ID NO: 5323999 - DNA, 25 bp, Homo sapien
caacacttgataggccataagaagg

SEQ ID NO: 5324000 - DNA, 25 bp, Homo sapien
tcagaatccgacctatccactaaag

SEQ ID NO: 5324001 - DNA, 25 bp, Homo sapien
tgttctctaggattctaaaataggc

SEQ ID NO: 5324002 - DNA, 25 bp, Homo sapien
tactttactatgttactgtaccctg

SEQ ID NO: 5324003 - DNA, 25 bp, Homo sapien
caaaagttagttcatcttaaagtgc

SEQ ID NO: 5324004 - DNA, 25 bp, Homo sapien
aagcacagatggagcaatactttcc

SEQ ID NO: 5324005 - DNA, 25 bp, Homo sapien
agagctctggaaggctttacccagt

SEQ ID NO: 5324006 - DNA, 25 bp, Homo sapien
taggcactctgacagggttaggcaa

SEQ ID NO: 5324007 - DNA, 25 bp, Homo sapien
caagattcttggtgtgaggtgaagc

SEQ ID NO: 5324008 - DNA, 25 bp, Homo sapien
cccagttgacatacggtggtagtag

SEQ ID NO: 5324009 - DNA, 25 bp, Homo sapien
ctttctacagaagttgactaagatt

SEQ ID NO: 5324010 - DNA, 25 bp, Homo sapien
accatcattaaataaggtgggacac

SEQ ID NO: 5324011 - DNA, 25 bp, Homo sapien
tcattaaataaggtgggacaccata

SEQ ID NO: 5324012 - DNA, 25 bp, Homo sapien
tctacagaagttgactaagatttta

SEQ ID NO: 5324013 - DNA, 25 bp, Homo sapien
gtatacagagcattctagtcaacta

SEQ ID NO: 5324014 - DNA, 25 bp, Homo sapien
tagtcaactacagctgtgttacagc

SEQ ID NO: 5324015 - DNA, 25 bp, Homo sapien
gctgtgttacagctatgtgttcttt

SEQ ID NO: 5324016 - DNA, 25 bp, Homo sapien
cagctatgtgttcttttggatttgg

SEQ ID NO: 5324017 - DNA, 25 bp, Homo sapien
caggttcaattctcgaatcacaggc

SEQ ID NO: 5324018 - DNA, 25 bp, Homo sapien
tcccatggtcagatgaactacccag

SEQ ID NO: 5324019 - DNA, 25 bp, Homo sapien
tcttcataacaaacacatcccatgg

SEQ ID NO: 5324020 - DNA, 25 bp, Homo sapien
cactgtaggatgcacaaaaatgaca

SEQ ID NO: 5324021 - DNA, 25 bp, Homo sapien
ctcttctgctcccaaatttcggcca

SEQ ID NO: 5324022 - DNA, 25 bp, Homo sapien
tcttctgctcccaaatttcggccat

SEQ ID NO: 5324023 - DNA, 25 bp, Homo sapien
cttctgctcccaaatttcggccata

SEQ ID NO: 5324024 - DNA, 25 bp, Homo sapien
tccagtgtaaaaagctacatctgct

SEQ ID NO: 5324025 - DNA, 25 bp, Homo sapien
aagatttccagtgtaaaaagctaca

SEQ ID NO: 5324026 - DNA, 25 bp, Homo sapien
gtgtaaaaagctacatctgctgtga

SEQ ID NO: 5324027 - DNA, 25 bp, Homo sapien
gtaaaaagctacatctgctgtgacc

SEQ ID NO: 5324028 - DNA, 25 bp, Homo sapien
ttaaatctcaaactttctattcaga

SEQ ID NO: 5324029 - DNA, 25 bp, Homo sapien
aatctcaaactttctattcagataa

SEQ ID NO: 5324030 - DNA, 25 bp, Homo sapien
tttaaatctcaaactttctattcag

SEQ ID NO: 5324031 - DNA, 25 bp, Homo sapien
tcaaactttctattcagataattaa

SEQ ID NO: 5324032 - DNA, 25 bp, Homo sapien
gattggttagcactagagtatggga

SEQ ID NO: 5324033 - DNA, 25 bp, Homo sapien
catctaaggcgttaaatacagacta

SEQ ID NO: 5324034 - DNA, 25 bp, Homo sapien
taaaccaatggctgttagagtcagt

SEQ ID NO: 5324035 - DNA, 25 bp, Homo sapien
cccatcagactagcaacaattagga

SEQ ID NO: 5324036 - DNA, 25 bp, Homo sapien
aatcagtaaaaatgcctagtagaaa

SEQ ID NO: 5324037 - DNA, 25 bp, Homo sapien
aacagactactaaacatatatcaac

SEQ ID NO: 5324038 - DNA, 25 bp, Homo sapien
tactgtacagcagtcaaaaacagac

SEQ ID NO: 5324039 - DNA, 25 bp, Homo sapien
tagaaagcaagctgcatatatgcaa

SEQ ID NO: 5324040 - DNA, 25 bp, Homo sapien
actgtgaagacactaagtgccactg

SEQ ID NO: 5324041 - DNA, 25 bp, Homo sapien
actagatagaggtggcggttacgca

SEQ ID NO: 5324042 - DNA, 25 bp, Homo sapien
ggcggttacgcatcactgtgaagac

SEQ ID NO: 5324043 - DNA, 25 bp, Homo sapien
gggagaaataggaagcagctgccta

SEQ ID NO: 5324044 - DNA, 25 bp, Homo sapien
tatgagcagggttaggccttaaaaa

SEQ ID NO: 5324045 - DNA, 25 bp, Homo sapien
gagcaggtctcttatgtatgtacca

SEQ ID NO: 5324046 - DNA, 25 bp, Homo sapien
gagagatatacacagcgtcaccaca

SEQ ID NO: 5324047 - DNA, 25 bp, Homo sapien
ttgaacagcctctttaaggtaccca

SEQ ID NO: 5324048 - DNA, 25 bp, Homo sapien
catttaagtgagataactgcttttt

SEQ ID NO: 5324049 - DNA, 25 bp, Homo sapien
caagtggagtttataacttgcatta

SEQ ID NO: 5324050 - DNA, 25 bp, Homo sapien
gagataactgctttttcaagtggag

SEQ ID NO: 5324051 - DNA, 25 bp, Homo sapien
gaggtcctccatcatttatcacatt

SEQ ID NO: 5324052 - DNA, 25 bp, Homo sapien
cctcagtgagtcccaaaggagttac

SEQ ID NO: 5324053 - DNA, 25 bp, Homo sapien
ctcagtgagtcccaaaggagttaca

SEQ ID NO: 5324054 - DNA, 25 bp, Homo sapien
tcagtgagtcccaaaggagttacat

SEQ ID NO: 5324055 - DNA, 25 bp, Homo sapien
agtgagtcccaaaggagttacatga

SEQ ID NO: 5324056 - DNA, 25 bp, Homo sapien
aatatagcttcgtgcatttttgtca

SEQ ID NO: 5324057 - DNA, 25 bp, Homo sapien
ggaaggagatcaaatatagcttcgt

SEQ ID NO: 5324058 - DNA, 25 bp, Homo sapien
gatcaaatatagcttcgtgcatttt

SEQ ID NO: 5324059 - DNA, 25 bp, Homo sapien
ggagatcaaatatagcttcgtgcat

SEQ ID NO: 5324060 - DNA, 25 bp, Homo sapien
gcctggccacttattagcttcttag

SEQ ID NO: 5324061 - DNA, 25 bp, Homo sapien
tagcttcttagaatcaacccatatg

SEQ ID NO: 5324062 - DNA, 25 bp, Homo sapien
tcagattagaacatgaaaggttaaa

SEQ ID NO: 5324063 - DNA, 25 bp, Homo sapien
catatgttattgtgtcatcctttcc

SEQ ID NO: 5324064 - DNA, 25 bp, Homo sapien
tgtgtgagtgaatggacaccacttt

SEQ ID NO: 5324065 - DNA, 25 bp, Homo sapien
tacaccagaggtgtagtgtagtctg

SEQ ID NO: 5324066 - DNA, 25 bp, Homo sapien
gaatgtagcttgtacttggcaccag

SEQ ID NO: 5324067 - DNA, 25 bp, Homo sapien
tctgggaagtaaaagccgctttcat

SEQ ID NO: 5324068 - DNA, 25 bp, Homo sapien
taggataaaaagcaaatcaaagttc

SEQ ID NO: 5324069 - DNA, 25 bp, Homo sapien
gaaggatgcaagtaggataaaaagc

SEQ ID NO: 5324070 - DNA, 25 bp, Homo sapien
aggatgcaagtaggataaaaagcaa

SEQ ID NO: 5324071 - DNA, 25 bp, Homo sapien
ctgaaggatgcaagtaggataaaaa

SEQ ID NO: 5324072 - DNA, 25 bp, Homo sapien
aacagcttgtcaaataagctatcca

SEQ ID NO: 5324073 - DNA, 25 bp, Homo sapien
ccattatcgctacaagcttagctga

SEQ ID NO: 5324074 - DNA, 25 bp, Homo sapien
gctacaagcttagctgatatttcag

SEQ ID NO: 5324075 - DNA, 25 bp, Homo sapien
taagctatccattatcgctacaagc

SEQ ID NO: 5324076 - DNA, 25 bp, Homo sapien
gtgatatgatcaaaatgcctaagca

SEQ ID NO: 5324077 - DNA, 25 bp, Homo sapien
tagtcgagcttcaaaatgagcccgg

SEQ ID NO: 5324078 - DNA, 25 bp, Homo sapien
tatattgcttaggtggtagtcgagc

SEQ ID NO: 5324079 - DNA, 25 bp, Homo sapien
ccggatcacaggaatgtagtgcaca

SEQ ID NO: 5324080 - DNA, 25 bp, Homo sapien
tagtccaacaacttgcagtgcacca

SEQ ID NO: 5324081 - DNA, 25 bp, Homo sapien
tttttagtccaacaacttgcagtgc

SEQ ID NO: 5324082 - DNA, 25 bp, Homo sapien
tcgtttttagtccaacaacttgcag

SEQ ID NO: 5324083 - DNA, 25 bp, Homo sapien
tatcgtttttagtccaacaacttgc

SEQ ID NO: 5324084 - DNA, 25 bp, Homo sapien
tcctggcaatgtgctattataaaaa

SEQ ID NO: 5324085 - DNA, 25 bp, Homo sapien
taaagcatttcctccgtactggtag

SEQ ID NO: 5324086 - DNA, 25 bp, Homo sapien
tggctaaaacatgacaactcaagtc

SEQ ID NO: 5324087 - DNA, 25 bp, Homo sapien
gaaagaatgatgcaagaaaaatctc

SEQ ID NO: 5324088 - DNA, 25 bp, Homo sapien
attttgtaaagttcagtgaattcct

SEQ ID NO: 5324089 - DNA, 25 bp, Homo sapien
ccatgcacatttgaagccagtccag

SEQ ID NO: 5324090 - DNA, 25 bp, Homo sapien
taagtggcctcagtcatgttcagca

SEQ ID NO: 5324091 - DNA, 25 bp, Homo sapien
cttagtgagatgaattttgtaaagt

SEQ ID NO: 5324092 - DNA, 25 bp, Homo sapien
taaatctgacagacgagtaagcatg

SEQ ID NO: 5324093 - DNA, 25 bp, Homo sapien
tccacacactggcaatattcaagga

SEQ ID NO: 5324094 - DNA, 25 bp, Homo sapien
gtaagcatgtcagtagtaacagatg

SEQ ID NO: 5324095 - DNA, 25 bp, Homo sapien
gtaacagatgggatgttatccacac

SEQ ID NO: 5324096 - DNA, 25 bp, Homo sapien
ggatcagcttgcacaacactgagaa

SEQ ID NO: 5324097 - DNA, 25 bp, Homo sapien
tactctgtgcaattgcaggatcagc

SEQ ID NO: 5324098 - DNA, 25 bp, Homo sapien
tctgattaccaacatagtaggtcct

SEQ ID NO: 5324099 - DNA, 25 bp, Homo sapien
tgacaatggagaagaccagcctgac

SEQ ID NO: 5324100 - DNA, 25 bp, Homo sapien
aactgcatactgttgtccctcgaca

SEQ ID NO: 5324101 - DNA, 25 bp, Homo sapien
ccaacaactgcatactgttgtccct

SEQ ID NO: 5324102 - DNA, 25 bp, Homo sapien
tactgttgtccctcgacaataagaa

SEQ ID NO: 5324103 - DNA, 25 bp, Homo sapien
ttgtccctcgacaataagaacttca

SEQ ID NO: 5324104 - DNA, 25 bp, Homo sapien
tcccatctgacagagaatcaacaag

SEQ ID NO: 5324105 - DNA, 25 bp, Homo sapien
ccagcgctcattgtctaagaggagg

SEQ ID NO: 5324106 - DNA, 25 bp, Homo sapien
ttccagcgctcattgtctaagagga

SEQ ID NO: 5324107 - DNA, 25 bp, Homo sapien
cccatctgacagagaatcaacaaga

SEQ ID NO: 5324108 - DNA, 25 bp, Homo sapien
gaagtgctccaagtaatgacgtgct

SEQ ID NO: 5324109 - DNA, 25 bp, Homo sapien
ccacagatctgttcggtgtctaaaa

SEQ ID NO: 5324110 - DNA, 25 bp, Homo sapien
tacaaacttaatagcttggctctga

SEQ ID NO: 5324111 - DNA, 25 bp, Homo sapien
ccatggaatttagcttctcaagaaa

SEQ ID NO: 5324112 - DNA, 25 bp, Homo sapien
aaatttgacagctcgatcatggcat

SEQ ID NO: 5324113 - DNA, 25 bp, Homo sapien
tttgccagctttcctagctctgagt

SEQ ID NO: 5324114 - DNA, 25 bp, Homo sapien
tcatggcatatatctgaggcactat

SEQ ID NO: 5324115 - DNA, 25 bp, Homo sapien
gaggcactatataataattcctgga

SEQ ID NO: 5324116 - DNA, 25 bp, Homo sapien
actgctgcagggctcactatttgga

SEQ ID NO: 5324117 - DNA, 25 bp, Homo sapien
gccttcatggattaaataagccacc

SEQ ID NO: 5324118 - DNA, 25 bp, Homo sapien
tataggtgttagctcaccctcaccg

SEQ ID NO: 5324119 - DNA, 25 bp, Homo sapien
gtagtacattctggctcggatacag

SEQ ID NO: 5324120 - DNA, 25 bp, Homo sapien
catgaagcccttcctagtcttggac

SEQ ID NO: 5324121 - DNA, 25 bp, Homo sapien
tgaaagaccttaaggctgacctacc

SEQ ID NO: 5324122 - DNA, 25 bp, Homo sapien
gaatctacatggttctagggaagca

SEQ ID NO: 5324123 - DNA, 25 bp, Homo sapien
gacctagaactgatgaagccaagag

SEQ ID NO: 5324124 - DNA, 25 bp, Homo sapien
caaatagtctattcctgtaatgtgg

SEQ ID NO: 5324125 - DNA, 25 bp, Homo sapien
taaatgacatctaatctgaccagct

SEQ ID NO: 5324126 - DNA, 25 bp, Homo sapien
tctccttgttctaggaagataaaag

SEQ ID NO: 5324127 - DNA, 25 bp, Homo sapien
tctttttgacatagctgagatcaca

SEQ ID NO: 5324128 - DNA, 25 bp, Homo sapien
tctgaatgatagattctgggagact

SEQ ID NO: 5324129 - DNA, 25 bp, Homo sapien
ttaagtgaaaccacgtacagcaggt

SEQ ID NO: 5324130 - DNA, 25 bp, Homo sapien
gacatagagccattccacatagtgg

SEQ ID NO: 5324131 - DNA, 25 bp, Homo sapien
cataagtactagtttaagtggtcca

SEQ ID NO: 5324132 - DNA, 25 bp, Homo sapien
ttaatgtaaagtaagagcatatttc

SEQ ID NO: 5324133 - DNA, 25 bp, Homo sapien
tgtcaaactctgaggtacctaaatt

SEQ ID NO: 5324134 - DNA, 25 bp, Homo sapien
actgtgttttattctagtttgagtc

SEQ ID NO: 5324135 - DNA, 25 bp, Homo sapien
gagaacaaaaaatcacgagaggaaa

SEQ ID NO: 5324136 - DNA, 25 bp, Homo sapien
attgtaaacttagagaaaatatcct

SEQ ID NO: 5324137 - DNA, 25 bp, Homo sapien
tgtaaacttagagaaaatatccttg

SEQ ID NO: 5324138 - DNA, 25 bp, Homo sapien
taaacttagagaaaatatccttgag

SEQ ID NO: 5324139 - DNA, 25 bp, Homo sapien
aacttagagaaaatatccttgagca

SEQ ID NO: 5324140 - DNA, 25 bp, Homo sapien
atttcttctgtttgtgaaactttat

SEQ ID NO: 5324141 - DNA, 25 bp, Homo sapien
ttcacaacaacatctgtgtctattt

SEQ ID NO: 5324142 - DNA, 25 bp, Homo sapien
tcacaacaacatctgtgtctatttc

SEQ ID NO: 5324143 - DNA, 25 bp, Homo sapien
ctgtttgtgaaactttattaatcac

SEQ ID NO: 5324144 - DNA, 25 bp, Homo sapien
caaatacaagagatattagtctttc

SEQ ID NO: 5324145 - DNA, 25 bp, Homo sapien
ttaaaagtccaaatacaagagatat

SEQ ID NO: 5324146 - DNA, 25 bp, Homo sapien
gtccaaatacaagagatattagtct

SEQ ID NO: 5324147 - DNA, 25 bp, Homo sapien
taataaccattttttcaccatagat

SEQ ID NO: 5324148 - DNA, 25 bp, Homo sapien
agccaatgcgcccaactatgatcac

SEQ ID NO: 5324149 - DNA, 25 bp, Homo sapien
aggcatggagccaatgcgcccaact

SEQ ID NO: 5324150 - DNA, 25 bp, Homo sapien
catggagccaatgcgcccaactatg

SEQ ID NO: 5324151 - DNA, 25 bp, Homo sapien
aatgcgcccaactatgatcactttt

SEQ ID NO: 5324152 - DNA, 25 bp, Homo sapien
gtggtctatttaagtcactgtgaga

SEQ ID NO: 5324153 - DNA, 25 bp, Homo sapien
ggtctatttaagtcactgtgagaat

SEQ ID NO: 5324154 - DNA, 25 bp, Homo sapien
cagtggtctatttaagtcactgtga

SEQ ID NO: 5324155 - DNA, 25 bp, Homo sapien
tccagtggtctatttaagtcactgt

SEQ ID NO: 5324156 - DNA, 25 bp, Homo sapien
aacatttgtgcctaccctgcgctag

SEQ ID NO: 5324157 - DNA, 25 bp, Homo sapien
ccagtgaacttagtatgggtcccat

SEQ ID NO: 5324158 - DNA, 25 bp, Homo sapien
gaatatcaatggtggtagctcccta

SEQ ID NO: 5324159 - DNA, 25 bp, Homo sapien
ggaactgctcaaacatagatgacta

SEQ ID NO: 5324160 - DNA, 25 bp, Homo sapien
cagccacccctaggaaactttaatg

SEQ ID NO: 5324161 - DNA, 25 bp, Homo sapien
cttgcggtagtatctcccattgaga

SEQ ID NO: 5324162 - DNA, 25 bp, Homo sapien
tgtactatggccctttgaagggtca

SEQ ID NO: 5324163 - DNA, 25 bp, Homo sapien
acctttcaagagtcaacatttgccc

SEQ ID NO: 5324164 - DNA, 25 bp, Homo sapien
gaacactgactagctatatttgaaa

SEQ ID NO: 5324165 - DNA, 25 bp, Homo sapien
gcactcaggtatgtgttacctcaag

SEQ ID NO: 5324166 - DNA, 25 bp, Homo sapien
tggaccctgattacaataaacacac

SEQ ID NO: 5324167 - DNA, 25 bp, Homo sapien
ttgagactaacaggaaaatctgaac

SEQ ID NO: 5324168 - DNA, 25 bp, Homo sapien
tgtatgttcaatacagtgacctctg

SEQ ID NO: 5324169 - DNA, 25 bp, Homo sapien
aatggaatctcacagtggccactga

SEQ ID NO: 5324170 - DNA, 25 bp, Homo sapien
tggtgaatctactgaaatgacaact

SEQ ID NO: 5324171 - DNA, 25 bp, Homo sapien
taagataaatctgctaacaccttgt

SEQ ID NO: 5324172 - DNA, 25 bp, Homo sapien
tataaacaaggtgttctgggagctc

SEQ ID NO: 5324173 - DNA, 25 bp, Homo sapien
tgctcaagccttaacctctagaaag

SEQ ID NO: 5324174 - DNA, 25 bp, Homo sapien
gatgtgtacaacatagctcttgtcc

SEQ ID NO: 5324175 - DNA, 25 bp, Homo sapien
ccaggcttctcaattatggtgcaca

SEQ ID NO: 5324176 - DNA, 25 bp, Homo sapien
tagtcctgcaactcgtgttgagagg

SEQ ID NO: 5324177 - DNA, 25 bp, Homo sapien
gatctggtgagcaatgtttacttcc

SEQ ID NO: 5324178 - DNA, 25 bp, Homo sapien
tgcttctgaacgtagagagatctgg

SEQ ID NO: 5324179 - DNA, 25 bp, Homo sapien
gaagttttcctgaggtagtcctgca

SEQ ID NO: 5324180 - DNA, 25 bp, Homo sapien
ggtcatcaaatctgtttccctaagg

SEQ ID NO: 5324181 - DNA, 25 bp, Homo sapien
ggtatatctctgactgaaaaactga

SEQ ID NO: 5324182 - DNA, 25 bp, Homo sapien
gcctcaaaatgctgaataatccaag

SEQ ID NO: 5324183 - DNA, 25 bp, Homo sapien
gattttttaacccacagctcagact

SEQ ID NO: 5324184 - DNA, 25 bp, Homo sapien
gaagctgcatcacgatttccttttc

SEQ ID NO: 5324185 - DNA, 25 bp, Homo sapien
cagcagtattaaaatgagaccatgg

SEQ ID NO: 5324186 - DNA, 25 bp, Homo sapien
gctgcatcacgatttccttttccac

SEQ ID NO: 5324187 - DNA, 25 bp, Homo sapien
ttgaggaagctgcatcacgatttcc

SEQ ID NO: 5324188 - DNA, 25 bp, Homo sapien
cgtggatcttgagtatgaatagcaa

SEQ ID NO: 5324189 - DNA, 25 bp, Homo sapien
tactcactcatgcagtcctacaggt

SEQ ID NO: 5324190 - DNA, 25 bp, Homo sapien
gagatggtcattctattactacatg

SEQ ID NO: 5324191 - DNA, 25 bp, Homo sapien
gataacagttgagttctttacacaa

SEQ ID NO: 5324192 - DNA, 25 bp, Homo sapien
tgctccagatctgtcctggatttat

SEQ ID NO: 5324193 - DNA, 25 bp, Homo sapien
tacttgctccagatctgtcctggat

SEQ ID NO: 5324194 - DNA, 25 bp, Homo sapien
cttaggtacttgctccagatctgtc

SEQ ID NO: 5324195 - DNA, 25 bp, Homo sapien
ggtacttgctccagatctgtcctgg

SEQ ID NO: 5324196 - DNA, 25 bp, Homo sapien
agagtcctttcgaaggtatctttag

SEQ ID NO: 5324197 - DNA, 25 bp, Homo sapien
agtatgtaaaagagtcctttcgaag

SEQ ID NO: 5324198 - DNA, 25 bp, Homo sapien
tgagtatgtaaaagagtcctttcga

SEQ ID NO: 5324199 - DNA, 25 bp, Homo sapien
catgagtatgtaaaagagtcctttc

SEQ ID NO: 5324200 - DNA, 25 bp, Homo sapien
tgatcctgttcttagtgggaagcat

SEQ ID NO: 5324201 - DNA, 25 bp, Homo sapien
ttgatcctgttcttagtgggaagca

SEQ ID NO: 5324202 - DNA, 25 bp, Homo sapien
cttgatcctgttcttagtgggaagc

SEQ ID NO: 5324203 - DNA, 25 bp, Homo sapien
caagtagctgaaatccccattgcaa

SEQ ID NO: 5324204 - DNA, 25 bp, Homo sapien
tacggtttaggagtcgagtcatgca

SEQ ID NO: 5324205 - DNA, 25 bp, Homo sapien
tccattcttgggcatagggtgaact

SEQ ID NO: 5324206 - DNA, 25 bp, Homo sapien
ttttgcagaccctgtactcgacgga

SEQ ID NO: 5324207 - DNA, 25 bp, Homo sapien
gagtgctctttcaagtcaggccagg

SEQ ID NO: 5324208 - DNA, 25 bp, Homo sapien
cctaagtgctaactgagcatcaccc

SEQ ID NO: 5324209 - DNA, 25 bp, Homo sapien
gtgctacaaatttctccctaagtgc

SEQ ID NO: 5324210 - DNA, 25 bp, Homo sapien
gaaatctccgtaattatgaatagct

SEQ ID NO: 5324211 - DNA, 25 bp, Homo sapien
tgctgctgggagatttactttggaa

SEQ ID NO: 5324212 - DNA, 25 bp, Homo sapien
gtgtccacaaagtccaatccccatg

SEQ ID NO: 5324213 - DNA, 25 bp, Homo sapien
tccccatgtttttgtgaagaagtca

SEQ ID NO: 5324214 - DNA, 25 bp, Homo sapien
tctaggatcgtttaatgctgctggg

SEQ ID NO: 5324215 - DNA, 25 bp, Homo sapien
gagatggggcaacatataaactatg

SEQ ID NO: 5324216 - DNA, 25 bp, Homo sapien
gatggggcaacatataaactatgtg

SEQ ID NO: 5324217 - DNA, 25 bp, Homo sapien
agagatggggcaacatataaactat

SEQ ID NO: 5324218 - DNA, 25 bp, Homo sapien
ggggcaacatataaactatgtgaat

SEQ ID NO: 5324219 - DNA, 25 bp, Homo sapien
tgtggcaccaagtaaaaacagacca

SEQ ID NO: 5324220 - DNA, 25 bp, Homo sapien
gaatgcatgtgtcaggtatctcaaa

SEQ ID NO: 5324221 - DNA, 25 bp, Homo sapien
tgattcactaacaccgaacttgtgg

SEQ ID NO: 5324222 - DNA, 25 bp, Homo sapien
gaaccactgcttgtagggaaactaa

SEQ ID NO: 5324223 - DNA, 25 bp, Homo sapien
cagtgatggcacaggtcgaatgtgt

SEQ ID NO: 5324224 - DNA, 25 bp, Homo sapien
tgacggatctacctctattttaaag

SEQ ID NO: 5324225 - DNA, 25 bp, Homo sapien
tccttgaggcactggtgaagaactg

SEQ ID NO: 5324226 - DNA, 25 bp, Homo sapien
cacaggtcgaatgtgttttgacgga

SEQ ID NO: 5324227 - DNA, 25 bp, Homo sapien
atttcttgaaccaacattttatagc

SEQ ID NO: 5324228 - DNA, 25 bp, Homo sapien
tcacattgttcagtgttggcatatg

SEQ ID NO: 5324229 - DNA, 25 bp, Homo sapien
agctttcactgtagagacttttcac

SEQ ID NO: 5324230 - DNA, 25 bp, Homo sapien
ctagctgttgtaaatctagctgttg

SEQ ID NO: 5324231 - DNA, 25 bp, Homo sapien
tcctctctgggtgaaatttgcttag

SEQ ID NO: 5324232 - DNA, 25 bp, Homo sapien
tattaaatgtctcgagttagtcctc

SEQ ID NO: 5324233 - DNA, 25 bp, Homo sapien
tagatttgccccttcaaggctactt

SEQ ID NO: 5324234 - DNA, 25 bp, Homo sapien
tactttctaaatcccgtaggtgtgc

SEQ ID NO: 5324235 - DNA, 25 bp, Homo sapien
gcaatgatagtttgtctactcagaa

SEQ ID NO: 5324236 - DNA, 25 bp, Homo sapien
cacagggaactactgatttctgata

SEQ ID NO: 5324237 - DNA, 25 bp, Homo sapien
gctctaagcactaaacacagggaac

SEQ ID NO: 5324238 - DNA, 25 bp, Homo sapien
aaatagctctacctttttcacatgg

SEQ ID NO: 5324239 - DNA, 25 bp, Homo sapien
tcttctggcgtccttttctttgctt

SEQ ID NO: 5324240 - DNA, 25 bp, Homo sapien
ctcctcttctggcgtccttttcttt

SEQ ID NO: 5324241 - DNA, 25 bp, Homo sapien
aaataaatgcaaactttaggatcct

SEQ ID NO: 5324242 - DNA, 25 bp, Homo sapien
taaatggtcagcaaacattaacatt

SEQ ID NO: 5324243 - DNA, 25 bp, Homo sapien
tcaagaaagtttgagcccaagaagt

SEQ ID NO: 5324244 - DNA, 25 bp, Homo sapien
cacctgtaacgtgggataaatatac

SEQ ID NO: 5324245 - DNA, 25 bp, Homo sapien
tactttggcgcatcattttagcact

SEQ ID NO: 5324246 - DNA, 25 bp, Homo sapien
ccaaaggagtaattgtgcacctgta

SEQ ID NO: 5324247 - DNA, 25 bp, Homo sapien
taaaatctgtctctagcatgtaaaa

SEQ ID NO: 5324248 - DNA, 25 bp, Homo sapien
ataaaatctgtctctagcatgtaaa

SEQ ID NO: 5324249 - DNA, 25 bp, Homo sapien
ccactgaacccggccaagtggtaca

SEQ ID NO: 5324250 - DNA, 25 bp, Homo sapien
cggccaagtggtacaccttaaatgg

SEQ ID NO: 5324251 - DNA, 25 bp, Homo sapien
ctgaacccggccaagtggtacacct

SEQ ID NO: 5324252 - DNA, 25 bp, Homo sapien
ccggccaagtggtacaccttaaatg

SEQ ID NO: 5324253 - DNA, 25 bp, Homo sapien
tcagtgccggtcagctgtgaccgaa

SEQ ID NO: 5324254 - DNA, 25 bp, Homo sapien
ctgtgaccgaaactcggtccgtttg

SEQ ID NO: 5324255 - DNA, 25 bp, Homo sapien
tcagctgtgaccgaaactcggtccg

SEQ ID NO: 5324256 - DNA, 25 bp, Homo sapien
gccggtcagctgtgaccgaaactcg

SEQ ID NO: 5324257 - DNA, 25 bp, Homo sapien
agcgaggcctagtgcatcgccgccg

SEQ ID NO: 5324258 - DNA, 25 bp, Homo sapien
tctcgagcccagcttcactcagggg

SEQ ID NO: 5324259 - DNA, 25 bp, Homo sapien
cagccgccctgagcgaggcctagtg

SEQ ID NO: 5324260 - DNA, 25 bp, Homo sapien
cctccacgtcgcaccgaggctgctg

SEQ ID NO: 5324261 - DNA, 25 bp, Homo sapien
gccgcgccacgaccactgcctctag

SEQ ID NO: 5324262 - DNA, 25 bp, Homo sapien
gcgccacgaccactgcctctagcgc

SEQ ID NO: 5324263 - DNA, 25 bp, Homo sapien
acgaccactgcctctagcgcttctg

SEQ ID NO: 5324264 - DNA, 25 bp, Homo sapien
gccacgaccactgcctctagcgctt

SEQ ID NO: 5324265 - DNA, 25 bp, Homo sapien
gcacttggactaaatgatagccgtc

SEQ ID NO: 5324266 - DNA, 25 bp, Homo sapien
atagccgtcagttgtctcccagaca

SEQ ID NO: 5324267 - DNA, 25 bp, Homo sapien
cttggactaaatgatagccgtcagt

SEQ ID NO: 5324268 - DNA, 25 bp, Homo sapien
tgtctcccagacactagaacaagac

SEQ ID NO: 5324269 - DNA, 25 bp, Homo sapien
tgtttcaggtggttagaccccaaga

SEQ ID NO: 5324270 - DNA, 25 bp, Homo sapien
tctgctggaagaacacaatggctag

SEQ ID NO: 5324271 - DNA, 25 bp, Homo sapien
caaagtggtccgtgtgtcacatagt

SEQ ID NO: 5324272 - DNA, 25 bp, Homo sapien
caaattaacatggtgggcaaagtgg

SEQ ID NO: 5324273 - DNA, 25 bp, Homo sapien
ttctatacagtaaaagtcactcatt

SEQ ID NO: 5324274 - DNA, 25 bp, Homo sapien
gtgctaggcctgctcccatttttgg

SEQ ID NO: 5324275 - DNA, 25 bp, Homo sapien
taggcctgctcccatttttggcctc

SEQ ID NO: 5324276 - DNA, 25 bp, Homo sapien
cttttatgcaatgagatagacactg

SEQ ID NO: 5324277 - DNA, 25 bp, Homo sapien
tctgagtttgggaaatgttcttcct

SEQ ID NO: 5324278 - DNA, 25 bp, Homo sapien
tgatgttttacagcaggtggcagcc

SEQ ID NO: 5324279 - DNA, 25 bp, Homo sapien
ggtcaagttcagacaccacatggca

SEQ ID NO: 5324280 - DNA, 25 bp, Homo sapien
caagtgattacctgaccctgaagtt

SEQ ID NO: 5324281 - DNA, 25 bp, Homo sapien
cacagagagacacggattggagcag

SEQ ID NO: 5324282 - DNA, 25 bp, Homo sapien
aagtggagtggctatagtattaaag

SEQ ID NO: 5324283 - DNA, 25 bp, Homo sapien
taagtggagtggctatagtattaaa

SEQ ID NO: 5324284 - DNA, 25 bp, Homo sapien
tggagtgtaatttaagtggagtggc

SEQ ID NO: 5324285 - DNA, 25 bp, Homo sapien
cttggagtgtaatttaagtggagtg

SEQ ID NO: 5324286 - DNA, 25 bp, Homo sapien
caccttccgggttgcctgtgagact

SEQ ID NO: 5324287 - DNA, 25 bp, Homo sapien
cctgggcagctgagcacttttggga

SEQ ID NO: 5324288 - DNA, 25 bp, Homo sapien
gatgtagctatcacctcctagatgg

SEQ ID NO: 5324289 - DNA, 25 bp, Homo sapien
taaagaagttcaccgaggttctgca

SEQ ID NO: 5324290 - DNA, 25 bp, Homo sapien
ctttgtgagacgttaaatcagtgta

SEQ ID NO: 5324291 - DNA, 25 bp, Homo sapien
tatttgcctgcccagtaagtctttg

SEQ ID NO: 5324292 - DNA, 25 bp, Homo sapien
ggctctgggaaccttatgctgatgt

SEQ ID NO: 5324293 - DNA, 25 bp, Homo sapien
gaaccttatgctgatgtaatggaga

SEQ ID NO: 5324294 - DNA, 25 bp, Homo sapien
cagtttttcaagacccgaatgacat

SEQ ID NO: 5324295 - DNA, 25 bp, Homo sapien
tggttctaggcccaaaagccggaga

SEQ ID NO: 5324296 - DNA, 25 bp, Homo sapien
gggccgtggctgtcagtagtggaaa

SEQ ID NO: 5324297 - DNA, 25 bp, Homo sapien
tggtccttgccactgagagccatgg

SEQ ID NO: 5324298 - DNA, 25 bp, Homo sapien
gtgttgggtaagctgtctgtcttgc

SEQ ID NO: 5324299 - DNA, 25 bp, Homo sapien
gtcttgcctttccagcgagcccatg

SEQ ID NO: 5324300 - DNA, 25 bp, Homo sapien
tcttgcctttccagcgagcccatga

SEQ ID NO: 5324301 - DNA, 25 bp, Homo sapien
tcccttcatttgtgtaggtgttggg

SEQ ID NO: 5324302 - DNA, 25 bp, Homo sapien
ctggcgggcagagtgggggtcacaa

SEQ ID NO: 5324303 - DNA, 25 bp, Homo sapien
ctctggcgggcagagtgggggtcac

SEQ ID NO: 5324304 - DNA, 25 bp, Homo sapien
tctctggcgggcagagtgggggtca

SEQ ID NO: 5324305 - DNA, 25 bp, Homo sapien
tctggcgggcagagtgggggtcaca

SEQ ID NO: 5324306 - DNA, 25 bp, Homo sapien
ggttacatcccaagagtcatatctt

SEQ ID NO: 5324307 - DNA, 25 bp, Homo sapien
tcatcataacaagtatcacttcaca

SEQ ID NO: 5324308 - DNA, 25 bp, Homo sapien
tgcatagtatacttgattcagggat

SEQ ID NO: 5324309 - DNA, 25 bp, Homo sapien
acttcacagttgtattacctttgca

SEQ ID NO: 5324310 - DNA, 25 bp, Homo sapien
taggcatggaagttctaataccaga

SEQ ID NO: 5324311 - DNA, 25 bp, Homo sapien
cagtaatcagttcatcctggccttc

SEQ ID NO: 5324312 - DNA, 25 bp, Homo sapien
tattggctgcttgttgtgcctttcc

SEQ ID NO: 5324313 - DNA, 25 bp, Homo sapien
caaaacgtggaaatataactgagtc

SEQ ID NO: 5324314 - DNA, 25 bp, Homo sapien
tggcgattattaggaaaactcgatc

SEQ ID NO: 5324315 - DNA, 25 bp, Homo sapien
tgtacgctgtggcttaatattcaca

SEQ ID NO: 5324316 - DNA, 25 bp, Homo sapien
tattcacacacatagccgagttgac

SEQ ID NO: 5324317 - DNA, 25 bp, Homo sapien
gctgtgaggaatgcttgtacgctgt

SEQ ID NO: 5324318 - DNA, 25 bp, Homo sapien
tagtttgaaccaacagtaccctcag

SEQ ID NO: 5324319 - DNA, 25 bp, Homo sapien
taagctaccattcacaccaagggtg

SEQ ID NO: 5324320 - DNA, 25 bp, Homo sapien
tgtagtcctgcaagacaatggtctg

SEQ ID NO: 5324321 - DNA, 25 bp, Homo sapien
taaacagaccatgcagtgcgtcact

SEQ ID NO: 5324322 - DNA, 25 bp, Homo sapien
cacacgggctaaacgcatgggttgg

SEQ ID NO: 5324323 - DNA, 25 bp, Homo sapien
agggccggcgtccacataaaatcca

SEQ ID NO: 5324324 - DNA, 25 bp, Homo sapien
tacatggccgcagtttagatatacc

SEQ ID NO: 5324325 - DNA, 25 bp, Homo sapien
aagtctgatgtagccttgttcacca

SEQ ID NO: 5324326 - DNA, 25 bp, Homo sapien
tctaaatgcttcacggtaggagtgt

SEQ ID NO: 5324327 - DNA, 25 bp, Homo sapien
tacagggcactgaggtcgtgctgca

SEQ ID NO: 5324328 - DNA, 25 bp, Homo sapien
tagtgtgttgaaccctacagggcac

SEQ ID NO: 5324329 - DNA, 25 bp, Homo sapien
tctgcagtacgccataacaatgttg

SEQ ID NO: 5324330 - DNA, 25 bp, Homo sapien
aagaaactgacagtagttatgaaaa

SEQ ID NO: 5324331 - DNA, 25 bp, Homo sapien
tctttttagccttatggtaaagaca

SEQ ID NO: 5324332 - DNA, 25 bp, Homo sapien
taaaacatctggctaatcaataagt

SEQ ID NO: 5324333 - DNA, 25 bp, Homo sapien
agtactccttactcaagaaatgagg

SEQ ID NO: 5324334 - DNA, 25 bp, Homo sapien
tctgtgttggcaatagatttaagag

SEQ ID NO: 5324335 - DNA, 25 bp, Homo sapien
cattcagttctactcatcctatgtg

SEQ ID NO: 5324336 - DNA, 25 bp, Homo sapien
cagtgtttgatagacttagtattct

SEQ ID NO: 5324337 - DNA, 25 bp, Homo sapien
aagagactgtcctctagtatagaat

SEQ ID NO: 5324338 - DNA, 25 bp, Homo sapien
ccgatctggtttcacgtaggctaaa

SEQ ID NO: 5324339 - DNA, 25 bp, Homo sapien
tgagccgatctggtttcacgtaggc

SEQ ID NO: 5324340 - DNA, 25 bp, Homo sapien
ttcacgtaggctaaatacatttcca

SEQ ID NO: 5324341 - DNA, 25 bp, Homo sapien
cctctctgctgagccgatctggttt

SEQ ID NO: 5324342 - DNA, 25 bp, Homo sapien
gaacccattgcgtggatgcatcaca

SEQ ID NO: 5324343 - DNA, 25 bp, Homo sapien
ccattagtggtcaagccatccatct

SEQ ID NO: 5324344 - DNA, 25 bp, Homo sapien
ggagtcttctgtgaacccattgcgt

SEQ ID NO: 5324345 - DNA, 25 bp, Homo sapien
tgcatcacaagaacaccattagtgg

SEQ ID NO: 5324346 - DNA, 25 bp, Homo sapien
cttgtaacttggaatgaaagctagt

SEQ ID NO: 5324347 - DNA, 25 bp, Homo sapien
taacttgtaacttggaatgaaagct

SEQ ID NO: 5324348 - DNA, 25 bp, Homo sapien
ttgtaacttgtaacttggaatgaaa

SEQ ID NO: 5324349 - DNA, 25 bp, Homo sapien
tgtaacttggaatgaaagctagtat

SEQ ID NO: 5324350 - DNA, 25 bp, Homo sapien
gcataaatccgtgctgtaaagggag

SEQ ID NO: 5324351 - DNA, 25 bp, Homo sapien
tttttgatgagtcaaatcctgcagc

SEQ ID NO: 5324352 - DNA, 25 bp, Homo sapien
ccgttcacatatgattctgcaggca

SEQ ID NO: 5324353 - DNA, 25 bp, Homo sapien
tgcaggcaaatcttgatatagtgct

SEQ ID NO: 5324354 - DNA, 25 bp, Homo sapien
caagaggtatacaaggctgctggtc

SEQ ID NO: 5324355 - DNA, 25 bp, Homo sapien
cagagagctgacatttcaactgggt

SEQ ID NO: 5324356 - DNA, 25 bp, Homo sapien
taaacccattcaaagagcacagtgg

SEQ ID NO: 5324357 - DNA, 25 bp, Homo sapien
tctggtgagagcctaagggatcctc

SEQ ID NO: 5324358 - DNA, 25 bp, Homo sapien
acatatcggtgttgctgtcatgagt

SEQ ID NO: 5324359 - DNA, 25 bp, Homo sapien
aagtatatgatatgctatgctggtc

SEQ ID NO: 5324360 - DNA, 25 bp, Homo sapien
tgagtatattcaaccaccacagtct

SEQ ID NO: 5324361 - DNA, 25 bp, Homo sapien
cagtctgggcccgagataaagtata

SEQ ID NO: 5324362 - DNA, 25 bp, Homo sapien
cagctgtgacagtagtttctcgggt

SEQ ID NO: 5324363 - DNA, 25 bp, Homo sapien
tctacagatgacaaatgttggccat

SEQ ID NO: 5324364 - DNA, 25 bp, Homo sapien
caaaaattagtaggcaggtcaatcc

SEQ ID NO: 5324365 - DNA, 25 bp, Homo sapien
tcactcataagccaagttaactggt

SEQ ID NO: 5324366 - DNA, 25 bp, Homo sapien
taccaaaggaaagggatgtaatgct

SEQ ID NO: 5324367 - DNA, 25 bp, Homo sapien
aaggaagtagaaatgggctgcataa

SEQ ID NO: 5324368 - DNA, 25 bp, Homo sapien
aagagaataattatatacagcaaag

SEQ ID NO: 5324369 - DNA, 25 bp, Homo sapien
aaatctagtcatcacacaaaggaag

SEQ ID NO: 5324370 - DNA, 25 bp, Homo sapien
gcaactaatctgtaatagataaagc

SEQ ID NO: 5324371 - DNA, 25 bp, Homo sapien
atttgcaactaatctgtaatagata

SEQ ID NO: 5324372 - DNA, 25 bp, Homo sapien
tgcaactaatctgtaatagataaag

SEQ ID NO: 5324373 - DNA, 25 bp, Homo sapien
tttgcaactaatctgtaatagataa

SEQ ID NO: 5324374 - DNA, 25 bp, Homo sapien
tgtcgcctaggttgcagtgcagtgg

SEQ ID NO: 5324375 - DNA, 25 bp, Homo sapien
gtcgcctaggttgcagtgcagtggt

SEQ ID NO: 5324376 - DNA, 25 bp, Homo sapien
gatgactgccagactaaatgcttaa

SEQ ID NO: 5324377 - DNA, 25 bp, Homo sapien
tctaagtactagataaagccctgtc

SEQ ID NO: 5324378 - DNA, 25 bp, Homo sapien
tcaaccagaggtagtattagcagtc

SEQ ID NO: 5324379 - DNA, 25 bp, Homo sapien
cagaggagtcctagtcaaggcctaa

SEQ ID NO: 5324380 - DNA, 25 bp, Homo sapien
tcctctatcgccatttgggagagac

SEQ ID NO: 5324381 - DNA, 25 bp, Homo sapien
gccatttgggagagacccattatac

SEQ ID NO: 5324382 - DNA, 25 bp, Homo sapien
atatgcacagtgctgggcttcaccc

SEQ ID NO: 5324383 - DNA, 25 bp, Homo sapien
gcctgaggagtacaagcaatatgca

SEQ ID NO: 5324384 - DNA, 25 bp, Homo sapien
cattgaggcatgagcagtagcttaa

SEQ ID NO: 5324385 - DNA, 25 bp, Homo sapien
tgttgatctccataccaggtgccag

SEQ ID NO: 5324386 - DNA, 25 bp, Homo sapien
gctgattaatggcatgtctgactcc

SEQ ID NO: 5324387 - DNA, 25 bp, Homo sapien
ggcttcattccaagtcacagagaac

SEQ ID NO: 5324388 - DNA, 25 bp, Homo sapien
tgggtttgatgatctaccatatgta

SEQ ID NO: 5324389 - DNA, 25 bp, Homo sapien
gggtttgatgatctaccatatgtag

SEQ ID NO: 5324390 - DNA, 25 bp, Homo sapien
ttgatgatctaccatatgtagttgg

SEQ ID NO: 5324391 - DNA, 25 bp, Homo sapien
gatctaccatatgtagttggtcaat

SEQ ID NO: 5324392 - DNA, 25 bp, Homo sapien
aaagcccttggtaatgttgctagcc

SEQ ID NO: 5324393 - DNA, 25 bp, Homo sapien
tgctagccttgctgtaagtccaaag

SEQ ID NO: 5324394 - DNA, 25 bp, Homo sapien
tactttgtattggagaaagcccttg

SEQ ID NO: 5324395 - DNA, 25 bp, Homo sapien
gagagtttactcaatgactgccata

SEQ ID NO: 5324396 - DNA, 25 bp, Homo sapien
cttgctctttagtcccacattgcgt

SEQ ID NO: 5324397 - DNA, 25 bp, Homo sapien
tgcgttcctgtagttcaaagctctt

SEQ ID NO: 5324398 - DNA, 25 bp, Homo sapien
caaagctcttttctaagcagcaaca

SEQ ID NO: 5324399 - DNA, 25 bp, Homo sapien
tagtcccacattgcgttcctgtagt

SEQ ID NO: 5324400 - DNA, 25 bp, Homo sapien
gagggttgagaagaaaaattatctg

SEQ ID NO: 5324401 - DNA, 25 bp, Homo sapien
ggttgagaagaaaaattatctgcat

SEQ ID NO: 5324402 - DNA, 25 bp, Homo sapien
tagagggttgagaagaaaaattatc

SEQ ID NO: 5324403 - DNA, 25 bp, Homo sapien
ctagagggttgagaagaaaaattat

SEQ ID NO: 5324404 - DNA, 25 bp, Homo sapien
gacaccaagtaccagacacagagac

SEQ ID NO: 5324405 - DNA, 25 bp, Homo sapien
cataggctaagactggcggtttaaa

SEQ ID NO: 5324406 - DNA, 25 bp, Homo sapien
tgctaatgattaactgaggaaccca

SEQ ID NO: 5324407 - DNA, 25 bp, Homo sapien
caagtaccagacacagagacaatta

SEQ ID NO: 5324408 - DNA, 25 bp, Homo sapien
catggatgaaattacgttaggagct

SEQ ID NO: 5324409 - DNA, 25 bp, Homo sapien
tgctgtcaccatacacatatacaac

SEQ ID NO: 5324410 - DNA, 25 bp, Homo sapien
tttttggtaaagtcagctgaggcaa

SEQ ID NO: 5324411 - DNA, 25 bp, Homo sapien
ctaagaagtagctaggtcctgggct

SEQ ID NO: 5324412 - DNA, 25 bp, Homo sapien
gattttcttgatcaggagaaaacat

SEQ ID NO: 5324413 - DNA, 25 bp, Homo sapien
ggatgattttcttgatcaggagaaa

SEQ ID NO: 5324414 - DNA, 25 bp, Homo sapien
tcaccatattttactggtgctttag

SEQ ID NO: 5324415 - DNA, 25 bp, Homo sapien
agatggatgattttcttgatcagga

SEQ ID NO: 5324416 - DNA, 25 bp, Homo sapien
caggagccttgggacaccttttgca

SEQ ID NO: 5324417 - DNA, 25 bp, Homo sapien
tctttctcaaatctttgttcactgg

SEQ ID NO: 5324418 - DNA, 25 bp, Homo sapien
ctttgttcactggtcaggagccttg

SEQ ID NO: 5324419 - DNA, 25 bp, Homo sapien
gagccttgggacaccttttgcatta

SEQ ID NO: 5324420 - DNA, 25 bp, Homo sapien
tcaggacccatggaatgacacggtg

SEQ ID NO: 5324421 - DNA, 25 bp, Homo sapien
gaatttgttaccagcagacccacta

SEQ ID NO: 5324422 - DNA, 25 bp, Homo sapien
aaacagagccttatagacccgtgcg

SEQ ID NO: 5324423 - DNA, 25 bp, Homo sapien
gccaactagggagccaggactttca

SEQ ID NO: 5324424 - DNA, 25 bp, Homo sapien
ccattataagctccattcaaaaggg

SEQ ID NO: 5324425 - DNA, 25 bp, Homo sapien
taaagtcgactactaatagagagaa

SEQ ID NO: 5324426 - DNA, 25 bp, Homo sapien
tctccaatattgtagtaaagtcgac

SEQ ID NO: 5324427 - DNA, 25 bp, Homo sapien
cctggaaatacaatcaaagacctca

SEQ ID NO: 5324428 - DNA, 25 bp, Homo sapien
tgcttcccagcattcggtaactgtc

SEQ ID NO: 5324429 - DNA, 25 bp, Homo sapien
ctgtcccatcccctgaagcagttct

SEQ ID NO: 5324430 - DNA, 25 bp, Homo sapien
gtcccatcccctgaagcagttctgt

SEQ ID NO: 5324431 - DNA, 25 bp, Homo sapien
tcccagcattcggtaactgtcccat

SEQ ID NO: 5324432 - DNA, 25 bp, Homo sapien
cgaaataaatctgcgcaggtaggct

SEQ ID NO: 5324433 - DNA, 25 bp, Homo sapien
ggtaggctgcttatatccaatgttg

SEQ ID NO: 5324434 - DNA, 25 bp, Homo sapien
ttaggttacagcgaaataaatctgc

SEQ ID NO: 5324435 - DNA, 25 bp, Homo sapien
ggctgcttatatccaatgttgatac

SEQ ID NO: 5324436 - DNA, 25 bp, Homo sapien
tggtgactcttaggtcacgttcctc

SEQ ID NO: 5324437 - DNA, 25 bp, Homo sapien
tccactccactggtgactcttaggt

SEQ ID NO: 5324438 - DNA, 25 bp, Homo sapien
tgactcttaggtcacgttcctccat

SEQ ID NO: 5324439 - DNA, 25 bp, Homo sapien
tccactggtgactcttaggtcacgt

SEQ ID NO: 5324440 - DNA, 25 bp, Homo sapien
ggcatttgctattctacagtacatt

SEQ ID NO: 5324441 - DNA, 25 bp, Homo sapien
aaattcacgcagatggcatttgcta

SEQ ID NO: 5324442 - DNA, 25 bp, Homo sapien
cccacaatgcaaattcacgcagatg

SEQ ID NO: 5324443 - DNA, 25 bp, Homo sapien
cagtacatttgtattgaatatcgaa

SEQ ID NO: 5324444 - DNA, 25 bp, Homo sapien
aggtctcataactcaataaaatata

SEQ ID NO: 5324445 - DNA, 25 bp, Homo sapien
aacattaagttctcatgtgactcag

SEQ ID NO: 5324446 - DNA, 25 bp, Homo sapien
aatgaccacttcaaacccatggcta

SEQ ID NO: 5324447 - DNA, 25 bp, Homo sapien
aatgaagacctatgtccacacacag

SEQ ID NO: 5324448 - DNA, 25 bp, Homo sapien
caagaccttgactgtgacaattgca

SEQ ID NO: 5324449 - DNA, 25 bp, Homo sapien
cctttaaccacactgttaggactga

SEQ ID NO: 5324450 - DNA, 25 bp, Homo sapien
ttttcctcacactatcagggagaag

SEQ ID NO: 5324451 - DNA, 25 bp, Homo sapien
ttaggactgaccactagacaggact

SEQ ID NO: 5324452 - DNA, 25 bp, Homo sapien
tatataactcagtaaactgcaatta

SEQ ID NO: 5324453 - DNA, 25 bp, Homo sapien
cagtaaactgcaattacaaccatat

SEQ ID NO: 5324454 - DNA, 25 bp, Homo sapien
taactcagtaaactgcaattacaac

SEQ ID NO: 5324455 - DNA, 25 bp, Homo sapien
aattacaaccatattcaaacaagtt

SEQ ID NO: 5324456 - DNA, 25 bp, Homo sapien
tattgatgatccacataaagtcaca

SEQ ID NO: 5324457 - DNA, 25 bp, Homo sapien
gattacctctccagagacacaatgt

SEQ ID NO: 5324458 - DNA, 25 bp, Homo sapien
aagtcacactgtatcttcaaaagcc

SEQ ID NO: 5324459 - DNA, 25 bp, Homo sapien
gttttcatgcaaatcactgattacc

SEQ ID NO: 5324460 - DNA, 25 bp, Homo sapien
taggagagaaccttcgttttcatgg

SEQ ID NO: 5324461 - DNA, 25 bp, Homo sapien
gaggccctgagtacctaggagagaa

SEQ ID NO: 5324462 - DNA, 25 bp, Homo sapien
tatagttacatatgaccctgtgcta

SEQ ID NO: 5324463 - DNA, 25 bp, Homo sapien
gccttttgggaacagatgtgctcat

SEQ ID NO: 5324464 - DNA, 25 bp, Homo sapien
taacttgaatgaccacctatgtcaa

SEQ ID NO: 5324465 - DNA, 25 bp, Homo sapien
ttaacttgaatgaccacctatgtca

SEQ ID NO: 5324466 - DNA, 25 bp, Homo sapien
aacttgaatgaccacctatgtcaag

SEQ ID NO: 5324467 - DNA, 25 bp, Homo sapien
gcaaaaaactgcatcctcctccgaa

SEQ ID NO: 5324468 - DNA, 25 bp, Homo sapien
tcctctccctttcaatattttgaag

SEQ ID NO: 5324469 - DNA, 25 bp, Homo sapien
gaggaagtaagaaacctcatgtatc

SEQ ID NO: 5324470 - DNA, 25 bp, Homo sapien
gtatccatatagcatctaccttcag

SEQ ID NO: 5324471 - DNA, 25 bp, Homo sapien
tcatatactcagacacgaggcgcgg

SEQ ID NO: 5324472 - DNA, 25 bp, Homo sapien
caatttgagagcttttcacgacctc

SEQ ID NO: 5324473 - DNA, 25 bp, Homo sapien
tggagaacgggttcttcctcataaa

SEQ ID NO: 5324474 - DNA, 25 bp, Homo sapien
cgcggtagaagatcaagcgtatcca

SEQ ID NO: 5324475 - DNA, 25 bp, Homo sapien
aattcgaccgcaccgcgggactagg

SEQ ID NO: 5324476 - DNA, 25 bp, Homo sapien
aagttgaccacggagccgagcgctg

SEQ ID NO: 5324477 - DNA, 25 bp, Homo sapien
cggtgtcgccgcaccgagaaggctc

SEQ ID NO: 5324478 - DNA, 25 bp, Homo sapien
cactgacatacactcgcaaggaggg

SEQ ID NO: 5324479 - DNA, 25 bp, Homo sapien
agcaccctaccaggctcgctctgca

SEQ ID NO: 5324480 - DNA, 25 bp, Homo sapien
tgcactgagcatgctcgagggcgag

SEQ ID NO: 5324481 - DNA, 25 bp, Homo sapien
accctaccaggctcgctctgcactg

SEQ ID NO: 5324482 - DNA, 25 bp, Homo sapien
gctcgagggcgaggtttggaccgcc

SEQ ID NO: 5324483 - DNA, 25 bp, Homo sapien
gattggtcccgtaatgataatcatg

SEQ ID NO: 5324484 - DNA, 25 bp, Homo sapien
gtattgatgattggtcccgtaatga

SEQ ID NO: 5324485 - DNA, 25 bp, Homo sapien
atgcatgtttaactccatttcctac

SEQ ID NO: 5324486 - DNA, 25 bp, Homo sapien
cactttccccatctatattactgta

SEQ ID NO: 5324487 - DNA, 25 bp, Homo sapien
gtagatatgttaaggattcctatat

SEQ ID NO: 5324488 - DNA, 25 bp, Homo sapien
catgttcatgagtagatatgttaag

SEQ ID NO: 5324489 - DNA, 25 bp, Homo sapien
tatgttaaggattcctatatttgta

SEQ ID NO: 5324490 - DNA, 25 bp, Homo sapien
gtgcatgttcatgagtagatatgtt

SEQ ID NO: 5324491 - DNA, 25 bp, Homo sapien
gataccatgtctttccctaggccta

SEQ ID NO: 5324492 - DNA, 25 bp, Homo sapien
cctaggcctatgtgtaaaatctcca

SEQ ID NO: 5324493 - DNA, 25 bp, Homo sapien
agtgagaactcttgggtcgacgcag

SEQ ID NO: 5324494 - DNA, 25 bp, Homo sapien
cacccacacgagacaagttgatacc

SEQ ID NO: 5324495 - DNA, 25 bp, Homo sapien
ccacatctgcagatcccctgaagct

SEQ ID NO: 5324496 - DNA, 25 bp, Homo sapien
tgaagcttctgaacgttatcgattg

SEQ ID NO: 5324497 - DNA, 25 bp, Homo sapien
tctgaacgttatcgattgtactgaa

SEQ ID NO: 5324498 - DNA, 25 bp, Homo sapien
acgttatcgattgtactgaattcaa

SEQ ID NO: 5324499 - DNA, 25 bp, Homo sapien
caagcttccatgatccaagtacaga

SEQ ID NO: 5324500 - DNA, 25 bp, Homo sapien
cagaatctgaggcagtatccagggc

SEQ ID NO: 5324501 - DNA, 25 bp, Homo sapien
gactgacatggctagtccctacaag

SEQ ID NO: 5324502 - DNA, 25 bp, Homo sapien
ctctgtcttcaaggtgggactgaca

SEQ ID NO: 5324503 - DNA, 25 bp, Homo sapien
gaggggcagcatgatagatgaaaca

SEQ ID NO: 5324504 - DNA, 25 bp, Homo sapien
tcaggttgaaaaagtccaagtatgt

SEQ ID NO: 5324505 - DNA, 25 bp, Homo sapien
ggttgaaaaagtccaagtatgttca

SEQ ID NO: 5324506 - DNA, 25 bp, Homo sapien
cagcatgatagatgaaacatcaggt

SEQ ID NO: 5324507 - DNA, 25 bp, Homo sapien
gggtcttaattagccaacagattgc

SEQ ID NO: 5324508 - DNA, 25 bp, Homo sapien
tccctagtggaaacgagcaatattt

SEQ ID NO: 5324509 - DNA, 25 bp, Homo sapien
tgctcagcaaatttgacagcagagt

SEQ ID NO: 5324510 - DNA, 25 bp, Homo sapien
gattgcagacttcctttcactttgt

SEQ ID NO: 5324511 - DNA, 25 bp, Homo sapien
ctaatgaatgcagcgtaggcatccc

SEQ ID NO: 5324512 - DNA, 25 bp, Homo sapien
tcttagtggaagcaccatctgaagg

SEQ ID NO: 5324513 - DNA, 25 bp, Homo sapien
taggcatcccacagctttcttagtg

SEQ ID NO: 5324514 - DNA, 25 bp, Homo sapien
catctgaaggtggactcagttgcag

SEQ ID NO: 5324515 - DNA, 25 bp, Homo sapien
tccttgcatccaggtggtcatcgat

SEQ ID NO: 5324516 - DNA, 25 bp, Homo sapien
cctgactccttgcatccaggtggtc

SEQ ID NO: 5324517 - DNA, 25 bp, Homo sapien
cgataaaatgtgacagaaggtgtgc

SEQ ID NO: 5324518 - DNA, 25 bp, Homo sapien
ccaggtggtcatcgataaaatgtga

SEQ ID NO: 5324519 - DNA, 25 bp, Homo sapien
tcgccaatggccagtgctcttctga

SEQ ID NO: 5324520 - DNA, 25 bp, Homo sapien
catttgctactccttctgcatttct

SEQ ID NO: 5324521 - DNA, 25 bp, Homo sapien
ctgggacttcgccaatggccagtgc

SEQ ID NO: 5324522 - DNA, 25 bp, Homo sapien
cacttctgggacttcgccaatggcc

SEQ ID NO: 5324523 - DNA, 25 bp, Homo sapien
atggaaagaatacttcttgagagta

SEQ ID NO: 5324524 - DNA, 25 bp, Homo sapien
atacttcttgagagtatgttgacag

SEQ ID NO: 5324525 - DNA, 25 bp, Homo sapien
gaaagaatacttcttgagagtatgt

SEQ ID NO: 5324526 - DNA, 25 bp, Homo sapien
gagtatgttgacagtctgtctagaa

SEQ ID NO: 5324527 - DNA, 25 bp, Homo sapien
gtgttgcggcattaattctcctggg

SEQ ID NO: 5324528 - DNA, 25 bp, Homo sapien
taattgtgactcatacagcagtggg

SEQ ID NO: 5324529 - DNA, 25 bp, Homo sapien
ttagcagcagctcgtttcaagaggc

SEQ ID NO: 5324530 - DNA, 25 bp, Homo sapien
tgattcacggagagctggttgcagc

SEQ ID NO: 5324531 - DNA, 25 bp, Homo sapien
gacttgttgctgctcttcatctggg

SEQ ID NO: 5324532 - DNA, 25 bp, Homo sapien
cacactgttgcccggagacttgttg

SEQ ID NO: 5324533 - DNA, 25 bp, Homo sapien
cactgttgcccggagacttgttgct

SEQ ID NO: 5324534 - DNA, 25 bp, Homo sapien
ctgttgcccggagacttgttgctgc

SEQ ID NO: 5324535 - DNA, 25 bp, Homo sapien
taatagatgagcgaaccaagcctcg

SEQ ID NO: 5324536 - DNA, 25 bp, Homo sapien
tatttgggatggatagaaacccctg

SEQ ID NO: 5324537 - DNA, 25 bp, Homo sapien
tgatgctagcaacaacctggaggag

SEQ ID NO: 5324538 - DNA, 25 bp, Homo sapien
tgattacgctaaacattccacagga

SEQ ID NO: 5324539 - DNA, 25 bp, Homo sapien
ggtgagtggagtaaatcttatttat

SEQ ID NO: 5324540 - DNA, 25 bp, Homo sapien
agctgtagctttattatggccaggg

SEQ ID NO: 5324541 - DNA, 25 bp, Homo sapien
caaactacctaactagtaagtcaag

SEQ ID NO: 5324542 - DNA, 25 bp, Homo sapien
gtgggtgagtggagtaaatcttatt

SEQ ID NO: 5324543 - DNA, 25 bp, Homo sapien
gctacctgtgtaccaagaacaactg

SEQ ID NO: 5324544 - DNA, 25 bp, Homo sapien
catcctggtatatgggagtttggca

SEQ ID NO: 5324545 - DNA, 25 bp, Homo sapien
agaacaactggttcagagggctctg

SEQ ID NO: 5324546 - DNA, 25 bp, Homo sapien
gctcttactgcatgaaatctggctc

SEQ ID NO: 5324547 - DNA, 25 bp, Homo sapien
cgtatccatcaactctttgactgtg

SEQ ID NO: 5324548 - DNA, 25 bp, Homo sapien
ttgttgcaggtgcattgggttgttt

SEQ ID NO: 5324549 - DNA, 25 bp, Homo sapien
cagctttccctgcagtactttttct

SEQ ID NO: 5324550 - DNA, 25 bp, Homo sapien
cattgggttgtttggtcctggaact

SEQ ID NO: 5324551 - DNA, 25 bp, Homo sapien
gtaataagcttgtctacctctgcag

SEQ ID NO: 5324552 - DNA, 25 bp, Homo sapien
tgcctccaatatggacatgcaagca

SEQ ID NO: 5324553 - DNA, 25 bp, Homo sapien
gctaggcatgtagctgttcagaaaa

SEQ ID NO: 5324554 - DNA, 25 bp, Homo sapien
gaagaaaccaacatactgtagcaga

SEQ ID NO: 5324555 - DNA, 25 bp, Homo sapien
attcctggctttcctcaacctgaag

SEQ ID NO: 5324556 - DNA, 25 bp, Homo sapien
tcctggctttcctcaacctgaagtc

SEQ ID NO: 5324557 - DNA, 25 bp, Homo sapien
tggctttcctcaacctgaagtcttc

SEQ ID NO: 5324558 - DNA, 25 bp, Homo sapien
tatattcctggctttcctcaacctg

SEQ ID NO: 5324559 - DNA, 25 bp, Homo sapien
tcattagcatcctgaatggagggcg

SEQ ID NO: 5324560 - DNA, 25 bp, Homo sapien
gagtgagctttcttcctaaggattc

SEQ ID NO: 5324561 - DNA, 25 bp, Homo sapien
ctgctctgctgtctgagactgtata

SEQ ID NO: 5324562 - DNA, 25 bp, Homo sapien
cagttgtgaatggagccactcctgc

SEQ ID NO: 5324563 - DNA, 25 bp, Homo sapien
ggacaacagccccagagttagctca

SEQ ID NO: 5324564 - DNA, 25 bp, Homo sapien
tattatctggaagcatccttccaca

SEQ ID NO: 5324565 - DNA, 25 bp, Homo sapien
taggcatccaagttctcgaccgctt

SEQ ID NO: 5324566 - DNA, 25 bp, Homo sapien
agcacccaggcagaatctaggcatc

SEQ ID NO: 5324567 - DNA, 25 bp, Homo sapien
gacatggtctcagccatacttgctg

SEQ ID NO: 5324568 - DNA, 25 bp, Homo sapien
tgaggtgtcattggcagtcacgctg

SEQ ID NO: 5324569 - DNA, 25 bp, Homo sapien
gattcccttggaagggtggctccac

SEQ ID NO: 5324570 - DNA, 25 bp, Homo sapien
aagagttgtttctatacccaagaga

SEQ ID NO: 5324571 - DNA, 25 bp, Homo sapien
ccactgagcaccttgcgacccccca

SEQ ID NO: 5324572 - DNA, 25 bp, Homo sapien
catcctggctcaaaaagcaccccca

SEQ ID NO: 5324573 - DNA, 25 bp, Homo sapien
tggctcaaaaagcacccccactgag

SEQ ID NO: 5324574 - DNA, 25 bp, Homo sapien
tgagcaccttgcgaccccccactcc

SEQ ID NO: 5324575 - DNA, 25 bp, Homo sapien
ccgttcctgttttaggttgctgctt

SEQ ID NO: 5324576 - DNA, 25 bp, Homo sapien
tgaatggagcccgttcctgttttag

SEQ ID NO: 5324577 - DNA, 25 bp, Homo sapien
ctgaatggagcccgttcctgtttta

SEQ ID NO: 5324578 - DNA, 25 bp, Homo sapien
agcccgttcctgttttaggttgctg

SEQ ID NO: 5324579 - DNA, 25 bp, Homo sapien
cagtattgcatctgcatcagtaagg

SEQ ID NO: 5324580 - DNA, 25 bp, Homo sapien
aacacccttgtcatctgtgctaggc

SEQ ID NO: 5324581 - DNA, 25 bp, Homo sapien
ttcactaggaggtttgtacatggac

SEQ ID NO: 5324582 - DNA, 25 bp, Homo sapien
tccatctgcagagtattgtcgagga

SEQ ID NO: 5324583 - DNA, 25 bp, Homo sapien
ctgtgagtctcttccagtagccagt

SEQ ID NO: 5324584 - DNA, 25 bp, Homo sapien
tgagtctcttccagtagccagttgc

SEQ ID NO: 5324585 - DNA, 25 bp, Homo sapien
agtctcttccagtagccagttgctc

SEQ ID NO: 5324586 - DNA, 25 bp, Homo sapien
tgtgagtctcttccagtagccagtt

SEQ ID NO: 5324587 - DNA, 25 bp, Homo sapien
tatacatagtcacaaactgcacaat

SEQ ID NO: 5324588 - DNA, 25 bp, Homo sapien
agtatgtcaattgccaggcttgtct

SEQ ID NO: 5324589 - DNA, 25 bp, Homo sapien
tgcacaatcaactccagcctgcaat

SEQ ID NO: 5324590 - DNA, 25 bp, Homo sapien
caactccagcctgcaatttgctgag

SEQ ID NO: 5324591 - DNA, 25 bp, Homo sapien
gacattatgatattcatggaaggct

SEQ ID NO: 5324592 - DNA, 25 bp, Homo sapien
aagaggacattatgatattcatgga

SEQ ID NO: 5324593 - DNA, 25 bp, Homo sapien
ggacattatgatattcatggaaggc

SEQ ID NO: 5324594 - DNA, 25 bp, Homo sapien
gaggacattatgatattcatggaag

SEQ ID NO: 5324595 - DNA, 25 bp, Homo sapien
ctggaagcataacagggggaggagg

SEQ ID NO: 5324596 - DNA, 25 bp, Homo sapien
cagatttgattcctagtgaggaccc

SEQ ID NO: 5324597 - DNA, 25 bp, Homo sapien
ccttgcaatgtctcacactgtggat

SEQ ID NO: 5324598 - DNA, 25 bp, Homo sapien
gggcaccaatctccttatgagggct

SEQ ID NO: 5324599 - DNA, 25 bp, Homo sapien
ggtagttgggctggtgttcacaaac

SEQ ID NO: 5324600 - DNA, 25 bp, Homo sapien
tctctgcatttctggaccctccctt

SEQ ID NO: 5324601 - DNA, 25 bp, Homo sapien
ggaccctcccttgcagtatgggaac

SEQ ID NO: 5324602 - DNA, 25 bp, Homo sapien
ggtgctctagctccagtctctcatg

SEQ ID NO: 5324603 - DNA, 25 bp, Homo sapien
ctagctccagtctctcatgagcctt

SEQ ID NO: 5324604 - DNA, 25 bp, Homo sapien
gtatgccccagtcctttccaagctg

SEQ ID NO: 5324605 - DNA, 25 bp, Homo sapien
ggctgattccgtaaacatgttggta

SEQ ID NO: 5324606 - DNA, 25 bp, Homo sapien
gagatttgaaactggatctattcca

SEQ ID NO: 5324607 - DNA, 25 bp, Homo sapien
caagctgtttccttgtgaggcgtga

SEQ ID NO: 5324608 - DNA, 25 bp, Homo sapien
gcctgcagctccgagtgactgcccc

SEQ ID NO: 5324609 - DNA, 25 bp, Homo sapien
cccttggtggcccttgtacaggagc

SEQ ID NO: 5324610 - DNA, 25 bp, Homo sapien
cctccccttggtggcccttgtacag

SEQ ID NO: 5324611 - DNA, 25 bp, Homo sapien
tggtggcccttgtacaggagcagat

SEQ ID NO: 5324612 - DNA, 25 bp, Homo sapien
aaagggtgtctcattcgaaagggtg

SEQ ID NO: 5324613 - DNA, 25 bp, Homo sapien
ccccgtagtagatagcctcaggcaa

SEQ ID NO: 5324614 - DNA, 25 bp, Homo sapien
tcattcgaaagggtgtctcattcat

SEQ ID NO: 5324615 - DNA, 25 bp, Homo sapien
cacagacaggagcagccttaggttc

SEQ ID NO: 5324616 - DNA, 25 bp, Homo sapien
cctcatgtcgcataaacctgtcaag

SEQ ID NO: 5324617 - DNA, 25 bp, Homo sapien
tgtcgcataaacctgtcaagaagct

SEQ ID NO: 5324618 - DNA, 25 bp, Homo sapien
ccagtcttgggaaacctccctcatt

SEQ ID NO: 5324619 - DNA, 25 bp, Homo sapien
ttttcctcctcatgtcgcataaacc

SEQ ID NO: 5324620 - DNA, 25 bp, Homo sapien
ttccttaagtcaaccgcagtggcct

SEQ ID NO: 5324621 - DNA, 25 bp, Homo sapien
gagaagacccgcttcctgtgagcag

SEQ ID NO: 5324622 - DNA, 25 bp, Homo sapien
cccaggtcgtgctctgcgcatttga

SEQ ID NO: 5324623 - DNA, 25 bp, Homo sapien
cctcgggtaggaggtaatgtagcct

SEQ ID NO: 5324624 - DNA, 25 bp, Homo sapien
ccaggcctgtagaaacctgctttgg

SEQ ID NO: 5324625 - DNA, 25 bp, Homo sapien
aggcctgtagaaacctgctttgggc

SEQ ID NO: 5324626 - DNA, 25 bp, Homo sapien
caggcctgtagaaacctgctttggg

SEQ ID NO: 5324627 - DNA, 25 bp, Homo sapien
ggcctgtagaaacctgctttgggca

SEQ ID NO: 5324628 - DNA, 25 bp, Homo sapien
tgccttggcactcctccattttgta

SEQ ID NO: 5324629 - DNA, 25 bp, Homo sapien
gccttggcactcctccattttgtac

SEQ ID NO: 5324630 - DNA, 25 bp, Homo sapien
acaacagttgcaagagtataaaaat

SEQ ID NO: 5324631 - DNA, 25 bp, Homo sapien
actacatacgcagtctcccaaacag

SEQ ID NO: 5324632 - DNA, 25 bp, Homo sapien
aaaaccatgataggtcaccactaca

SEQ ID NO: 5324633 - DNA, 25 bp, Homo sapien
cagacaaaccatactcataaagaag

SEQ ID NO: 5324634 - DNA, 25 bp, Homo sapien
tttctatgatcttcaaatcacttgc

SEQ ID NO: 5324635 - DNA, 25 bp, Homo sapien
cacagtcgatgatgtgataatgcac

SEQ ID NO: 5324636 - DNA, 25 bp, Homo sapien
aaagatgaaacgcatagcatggcaa

SEQ ID NO: 5324637 - DNA, 25 bp, Homo sapien
caaattggcgctgtgaaaaggcaga

SEQ ID NO: 5324638 - DNA, 25 bp, Homo sapien
agggacttggaagctggctcattga

SEQ ID NO: 5324639 - DNA, 25 bp, Homo sapien
atagcagttaagtgctgagaaggcc

SEQ ID NO: 5324640 - DNA, 25 bp, Homo sapien
gactggattggaccagccttgaaaa

SEQ ID NO: 5324641 - DNA, 25 bp, Homo sapien
tgctgggattgcgatgcatcgacct

SEQ ID NO: 5324642 - DNA, 25 bp, Homo sapien
aaaagtcagagtctgccagaatttc

SEQ ID NO: 5324643 - DNA, 25 bp, Homo sapien
cagaaaagtcagagtctgccagaat

SEQ ID NO: 5324644 - DNA, 25 bp, Homo sapien
cagagtctgccagaatttcctccca

SEQ ID NO: 5324645 - DNA, 25 bp, Homo sapien
agagtctgccagaatttcctcccac

SEQ ID NO: 5324646 - DNA, 25 bp, Homo sapien
gatagcgggacatgagcaagtccaa

SEQ ID NO: 5324647 - DNA, 25 bp, Homo sapien
acgggatagcgggacatgagcaagt

SEQ ID NO: 5324648 - DNA, 25 bp, Homo sapien
tgtgttctgccagcacgggatagcg

SEQ ID NO: 5324649 - DNA, 25 bp, Homo sapien
ctgccagcacgggatagcgggacat

SEQ ID NO: 5324650 - DNA, 25 bp, Homo sapien
gggtgacgacagccacagcggagag

SEQ ID NO: 5324651 - DNA, 25 bp, Homo sapien
ggagtgagggtgacgacagccacag

SEQ ID NO: 5324652 - DNA, 25 bp, Homo sapien
gggagtgagggtgacgacagccaca

SEQ ID NO: 5324653 - DNA, 25 bp, Homo sapien
cattgagtgataggtctgcaaagca

SEQ ID NO: 5324654 - DNA, 25 bp, Homo sapien
cccttggctgattgtctggactgag

SEQ ID NO: 5324655 - DNA, 25 bp, Homo sapien
cacgaggggaggacggccaacaaat

SEQ ID NO: 5324656 - DNA, 25 bp, Homo sapien
cagttgttcctggttatcccttggc

SEQ ID NO: 5324657 - DNA, 25 bp, Homo sapien
aggtctacctttgcagaccgaccag

SEQ ID NO: 5324658 - DNA, 25 bp, Homo sapien
tcttgtgcatagaatctggctctcc

SEQ ID NO: 5324659 - DNA, 25 bp, Homo sapien
cccttaggcccatcctgatgctgtt

SEQ ID NO: 5324660 - DNA, 25 bp, Homo sapien
caccaaagtgctttgctgggcagag

SEQ ID NO: 5324661 - DNA, 25 bp, Homo sapien
gcataaagatctgacagcagccttg

SEQ ID NO: 5324662 - DNA, 25 bp, Homo sapien
ttgcataaagatctgacagcagcct

SEQ ID NO: 5324663 - DNA, 25 bp, Homo sapien
tgcataaagatctgacagcagcctt

SEQ ID NO: 5324664 - DNA, 25 bp, Homo sapien
attgcataaagatctgacagcagcc

SEQ ID NO: 5324665 - DNA, 25 bp, Homo sapien
cagagaaacgaggaaccatcgagca

SEQ ID NO: 5324666 - DNA, 25 bp, Homo sapien
ggtccaaccattaggctcaaacttc

SEQ ID NO: 5324667 - DNA, 25 bp, Homo sapien
aaacgaggaaccatcgagcaaaggg

SEQ ID NO: 5324668 - DNA, 25 bp, Homo sapien
tattctttgtgtcctagaggtccaa

SEQ ID NO: 5324669 - DNA, 25 bp, Homo sapien
tctctgggcgtcatgcatctttgga

SEQ ID NO: 5324670 - DNA, 25 bp, Homo sapien
cagtctctgggcgtcatgcatcttt

SEQ ID NO: 5324671 - DNA, 25 bp, Homo sapien
gtctctgggcgtcatgcatctttgg

SEQ ID NO: 5324672 - DNA, 25 bp, Homo sapien
ctctgggcgtcatgcatctttggac

SEQ ID NO: 5324673 - DNA, 25 bp, Homo sapien
ctttaaggtcccagtgaatggaacg

SEQ ID NO: 5324674 - DNA, 25 bp, Homo sapien
tgtccccggctgcactaaatgagat

SEQ ID NO: 5324675 - DNA, 25 bp, Homo sapien
agctggtagcgtgtccccggctgca

SEQ ID NO: 5324676 - DNA, 25 bp, Homo sapien
atggaacggaatctgccccagctgg

SEQ ID NO: 5324677 - DNA, 25 bp, Homo sapien
gtgcgcacacgcagttttcaaaggc

SEQ ID NO: 5324678 - DNA, 25 bp, Homo sapien
cttgtctctgacagaagcgcttcag

SEQ ID NO: 5324679 - DNA, 25 bp, Homo sapien
gggccagtgggagaacgcattttct

SEQ ID NO: 5324680 - DNA, 25 bp, Homo sapien
atgacagaaagcaggcgcgtgcgca

SEQ ID NO: 5324681 - DNA, 25 bp, Homo sapien
tgagggtcaatgggcttcaggtgtt

SEQ ID NO: 5324682 - DNA, 25 bp, Homo sapien
ccttgtgagggtcaatgggcttcag

SEQ ID NO: 5324683 - DNA, 25 bp, Homo sapien
tggcttttgccttgtgagggtcaat

SEQ ID NO: 5324684 - DNA, 25 bp, Homo sapien
tttgccttgtgagggtcaatgggct

SEQ ID NO: 5324685 - DNA, 25 bp, Homo sapien
ctggccactgggtctttattggaaa

SEQ ID NO: 5324686 - DNA, 25 bp, Homo sapien
ccgccacctttaaagaaagtgcatc

SEQ ID NO: 5324687 - DNA, 25 bp, Homo sapien
tgcacaggatggatgccgtcctgga

SEQ ID NO: 5324688 - DNA, 25 bp, Homo sapien
tgcttctgcgtttcccgccaccttt

SEQ ID NO: 5324689 - DNA, 25 bp, Homo sapien
tgcttgtcctgtaggcagtagcaag

SEQ ID NO: 5324690 - DNA, 25 bp, Homo sapien
gtaggcagtagcaaggagcgggagt

SEQ ID NO: 5324691 - DNA, 25 bp, Homo sapien
cctgtaggcagtagcaaggagcggg

SEQ ID NO: 5324692 - DNA, 25 bp, Homo sapien
gacaaaaaaggagggctgcttgtcc

SEQ ID NO: 5324693 - DNA, 25 bp, Homo sapien
ctgggctccgcagagtaaagggcag

SEQ ID NO: 5324694 - DNA, 25 bp, Homo sapien
gccatgtgagagtttactgcagtag

SEQ ID NO: 5324695 - DNA, 25 bp, Homo sapien
cttcttggccatgtgagagtttact

SEQ ID NO: 5324696 - DNA, 25 bp, Homo sapien
tccgcagagtaaagggcaggtgtgt

SEQ ID NO: 5324697 - DNA, 25 bp, Homo sapien
gctttgggcaccaagtgcctggctg

SEQ ID NO: 5324698 - DNA, 25 bp, Homo sapien
gacgtccaggctctagatgtccagc

SEQ ID NO: 5324699 - DNA, 25 bp, Homo sapien
gtggttttccccaagctgacgtcca

SEQ ID NO: 5324700 - DNA, 25 bp, Homo sapien
ccagctggggtgtaatcaaaggctt

SEQ ID NO: 5324701 - DNA, 25 bp, Homo sapien
cttaagtccaaagttgccaggcact

SEQ ID NO: 5324702 - DNA, 25 bp, Homo sapien
tcttaagtccaaagttgccaggcac

SEQ ID NO: 5324703 - DNA, 25 bp, Homo sapien
cacggagacagcctgttccatggcc

SEQ ID NO: 5324704 - DNA, 25 bp, Homo sapien
ggagacagcctgttccatggcccat

SEQ ID NO: 5324705 - DNA, 25 bp, Homo sapien
acggagacagcctgttccatggccc

SEQ ID NO: 5324706 - DNA, 25 bp, Homo sapien
cggagacagcctgttccatggccca

SEQ ID NO: 5324707 - DNA, 25 bp, Homo sapien
tcagagagaggtcacctaggaaccg

SEQ ID NO: 5324708 - DNA, 25 bp, Homo sapien
ttctagctcacatccccacaagttt

SEQ ID NO: 5324709 - DNA, 25 bp, Homo sapien
gtcacctaggaaccggtgggcttca

SEQ ID NO: 5324710 - DNA, 25 bp, Homo sapien
agtttctgctcctcgggtcctcaga

SEQ ID NO: 5324711 - DNA, 25 bp, Homo sapien
tcctcaggtgggttgtttgtggtca

SEQ ID NO: 5324712 - DNA, 25 bp, Homo sapien
tcttctatccgcgaactgcctgaga

SEQ ID NO: 5324713 - DNA, 25 bp, Homo sapien
agtccccgagactatgttagaccca

SEQ ID NO: 5324714 - DNA, 25 bp, Homo sapien
tgcaaggaactaggagaactctggc

SEQ ID NO: 5324715 - DNA, 25 bp, Homo sapien
tacagttgctataccctcattatga

SEQ ID NO: 5324716 - DNA, 25 bp, Homo sapien
taacctagaggcttctgagcaagcg

SEQ ID NO: 5324717 - DNA, 25 bp, Homo sapien
agtcctgtttacctctaacctagag

SEQ ID NO: 5324718 - DNA, 25 bp, Homo sapien
tgcatgtttcctctctcagaccagg

SEQ ID NO: 5324719 - DNA, 25 bp, Homo sapien
aacagactttgaccacaaaaggaca

SEQ ID NO: 5324720 - DNA, 25 bp, Homo sapien
acagactttgaccacaaaaggacac

SEQ ID NO: 5324721 - DNA, 25 bp, Homo sapien
ttctgccagactctcttgctctctc

SEQ ID NO: 5324722 - DNA, 25 bp, Homo sapien
caccttctgccagactctcttgctc

SEQ ID NO: 5324723 - DNA, 25 bp, Homo sapien
agctggcttccattcggcctcgcag

SEQ ID NO: 5324724 - DNA, 25 bp, Homo sapien
tccattcggcctcgcagactcgttg

SEQ ID NO: 5324725 - DNA, 25 bp, Homo sapien
gttcttggtggtggctttaacatcc

SEQ ID NO: 5324726 - DNA, 25 bp, Homo sapien
tctggttcttggtggtggctttaac

SEQ ID NO: 5324727 - DNA, 25 bp, Homo sapien
gacatgtggatcttgttttttgtgt

SEQ ID NO: 5324728 - DNA, 25 bp, Homo sapien
tttgatctggttcttggtggtggct

SEQ ID NO: 5324729 - DNA, 25 bp, Homo sapien
tgacaggaatcttgctgttggagac

SEQ ID NO: 5324730 - DNA, 25 bp, Homo sapien
gaaattctgattagctcagggcagg

SEQ ID NO: 5324731 - DNA, 25 bp, Homo sapien
tggagacttctccagtacccgccaa

SEQ ID NO: 5324732 - DNA, 25 bp, Homo sapien
acagtacgtctaaatatgccttttg

SEQ ID NO: 5324733 - DNA, 25 bp, Homo sapien
agacgccagcatcattggtgctttg

SEQ ID NO: 5324734 - DNA, 25 bp, Homo sapien
gccagcatcattggtgctttgcctt

SEQ ID NO: 5324735 - DNA, 25 bp, Homo sapien
ctttgtttagctcagttcctattcg

SEQ ID NO: 5324736 - DNA, 25 bp, Homo sapien
cctattcggaatccttcacaatggg

SEQ ID NO: 5324737 - DNA, 25 bp, Homo sapien
gatgaagggaagtcttatcttccct

SEQ ID NO: 5324738 - DNA, 25 bp, Homo sapien
agcgggtagccagtgccgtgcacac

SEQ ID NO: 5324739 - DNA, 25 bp, Homo sapien
aagtcttatcttccctttggcagag

SEQ ID NO: 5324740 - DNA, 25 bp, Homo sapien
gtagccagtgccgtgcacactcagc

SEQ ID NO: 5324741 - DNA, 25 bp, Homo sapien
agcaggtgacacaggaattccgtag

SEQ ID NO: 5324742 - DNA, 25 bp, Homo sapien
cctgtgaggacgtcaaggcactgtg

SEQ ID NO: 5324743 - DNA, 25 bp, Homo sapien
tgaggacgtcaaggcactgtgagca

SEQ ID NO: 5324744 - DNA, 25 bp, Homo sapien
caggaattccgtagaatgaaaaagc

SEQ ID NO: 5324745 - DNA, 25 bp, Homo sapien
ttcctcattcccaaagctgtggcaa

SEQ ID NO: 5324746 - DNA, 25 bp, Homo sapien
tccctgtgcgatgccaggcatggtc

SEQ ID NO: 5324747 - DNA, 25 bp, Homo sapien
tctccctccctgtgcgatgccaggc

SEQ ID NO: 5324748 - DNA, 25 bp, Homo sapien
catggtctttgctggcgtccattct

SEQ ID NO: 5324749 - DNA, 25 bp, Homo sapien
gaagtacttttgtctttgcccattc

SEQ ID NO: 5324750 - DNA, 25 bp, Homo sapien
ctgcctagaagtacttttgtctttg

SEQ ID NO: 5324751 - DNA, 25 bp, Homo sapien
tagaagtacttttgtctttgcccat

SEQ ID NO: 5324752 - DNA, 25 bp, Homo sapien
tgcctagaagtacttttgtctttgc

SEQ ID NO: 5324753 - DNA, 25 bp, Homo sapien
atgtaaaccaccttcgggaagagtg

SEQ ID NO: 5324754 - DNA, 25 bp, Homo sapien
ttggtccaggatctgacccagaggg

SEQ ID NO: 5324755 - DNA, 25 bp, Homo sapien
tcagcctgagttagttcttccccgg

SEQ ID NO: 5324756 - DNA, 25 bp, Homo sapien
aagagtgtgcttttcatgacccaaa

SEQ ID NO: 5324757 - DNA, 25 bp, Homo sapien
agcttttcaagtgtctgggattccc

SEQ ID NO: 5324758 - DNA, 25 bp, Homo sapien
gaattggactccgactgtctgccac

SEQ ID NO: 5324759 - DNA, 25 bp, Homo sapien
aaccagtaaacaaggtgcagccaca

SEQ ID NO: 5324760 - DNA, 25 bp, Homo sapien
caagtagacctgtccagatatgcca

SEQ ID NO: 5324761 - DNA, 25 bp, Homo sapien
caaacatctccagtatataagaccg

SEQ ID NO: 5324762 - DNA, 25 bp, Homo sapien
acatttgctacccaaacatctccag

SEQ ID NO: 5324763 - DNA, 25 bp, Homo sapien
ctttccttgttgagtcctcatctag

SEQ ID NO: 5324764 - DNA, 25 bp, Homo sapien
tatataagaccgtgtagtctggaca

SEQ ID NO: 5324765 - DNA, 25 bp, Homo sapien
cttgaggtcatattgcctgggagtt

SEQ ID NO: 5324766 - DNA, 25 bp, Homo sapien
ctgtagtcaaggtgggactcatggc

SEQ ID NO: 5324767 - DNA, 25 bp, Homo sapien
cctgggagttgacaccatcagctct

SEQ ID NO: 5324768 - DNA, 25 bp, Homo sapien
gctctggcttaactctgtgctggga

SEQ ID NO: 5324769 - DNA, 25 bp, Homo sapien
ttcagcttcaacatgccgagggcct

SEQ ID NO: 5324770 - DNA, 25 bp, Homo sapien
catatctataatgacacagtgggca

SEQ ID NO: 5324771 - DNA, 25 bp, Homo sapien
taattctatgcgaggctgggctttc

SEQ ID NO: 5324772 - DNA, 25 bp, Homo sapien
agtcaatctggatagcaacacagcc

SEQ ID NO: 5324773 - DNA, 25 bp, Homo sapien
agggtggaagtggggagaggcccat

SEQ ID NO: 5324774 - DNA, 25 bp, Homo sapien
tagataggccatctaatctgatctg

SEQ ID NO: 5324775 - DNA, 25 bp, Homo sapien
gatcacagcagaaactagataggcc

SEQ ID NO: 5324776 - DNA, 25 bp, Homo sapien
gggtgtcttcttggagactataaga

SEQ ID NO: 5324777 - DNA, 25 bp, Homo sapien
taggccatctaatctgatctgaagg

SEQ ID NO: 5324778 - DNA, 25 bp, Homo sapien
gcatttatgtcattgggatgaactc

SEQ ID NO: 5324779 - DNA, 25 bp, Homo sapien
caacacttaggagctgaggaaagcc

SEQ ID NO: 5324780 - DNA, 25 bp, Homo sapien
taatatggctgtacccagtcacaac

SEQ ID NO: 5324781 - DNA, 25 bp, Homo sapien
gaaagcccagagtctattcttacac

SEQ ID NO: 5324782 - DNA, 25 bp, Homo sapien
tccagacatgaagtgtctacctggg

SEQ ID NO: 5324783 - DNA, 25 bp, Homo sapien
aaaagttcccccaaagtgatgatgc

SEQ ID NO: 5324784 - DNA, 25 bp, Homo sapien
gatgcttctcaagtacgtgaggtgc

SEQ ID NO: 5324785 - DNA, 25 bp, Homo sapien
catcatccacatttatgcattccag

SEQ ID NO: 5324786 - DNA, 25 bp, Homo sapien
taagcatggcagtggtgcgtaacca

SEQ ID NO: 5324787 - DNA, 25 bp, Homo sapien
gcagtggcttacacagacaagagaa

SEQ ID NO: 5324788 - DNA, 25 bp, Homo sapien
caatgtgacctgtggatgacgagtc

SEQ ID NO: 5324789 - DNA, 25 bp, Homo sapien
tcccatcattagaggagatccgcca

SEQ ID NO: 5324790 - DNA, 25 bp, Homo sapien
tggttaaacaacttacaagacaggc

SEQ ID NO: 5324791 - DNA, 25 bp, Homo sapien
tgtccggcagagttctaaaacgctg

SEQ ID NO: 5324792 - DNA, 25 bp, Homo sapien
gactgtagcacctttccatgaatta

SEQ ID NO: 5324793 - DNA, 25 bp, Homo sapien
tattggtccacgatagatttagtca

SEQ ID NO: 5324794 - DNA, 25 bp, Homo sapien
ctccaaacaatcttgggttcttcca

SEQ ID NO: 5324795 - DNA, 25 bp, Homo sapien
cagtatctccaaacaatcttgggtt

SEQ ID NO: 5324796 - DNA, 25 bp, Homo sapien
tctccaaacaatcttgggttcttcc

SEQ ID NO: 5324797 - DNA, 25 bp, Homo sapien
tatctccaaacaatcttgggttctt

SEQ ID NO: 5324798 - DNA, 25 bp, Homo sapien
ggaaagtgtgtctggaaacctgtta

SEQ ID NO: 5324799 - DNA, 25 bp, Homo sapien
caaaaagagccttacatacctcagg

SEQ ID NO: 5324800 - DNA, 25 bp, Homo sapien
gatttgatcttagcagatgctacaa

SEQ ID NO: 5324801 - DNA, 25 bp, Homo sapien
gcctgatgggagactaataattcac

SEQ ID NO: 5324802 - DNA, 25 bp, Homo sapien
ctctctcctgaatctcatctgggtt

SEQ ID NO: 5324803 - DNA, 25 bp, Homo sapien
tctgggttccccaggctagctgaat

SEQ ID NO: 5324804 - DNA, 25 bp, Homo sapien
tccaggaagtctgcactagaacttc

SEQ ID NO: 5324805 - DNA, 25 bp, Homo sapien
caggctagctgaatgaatcttctca

SEQ ID NO: 5324806 - DNA, 25 bp, Homo sapien
ggaaagacattaagtatggtgggaa

SEQ ID NO: 5324807 - DNA, 25 bp, Homo sapien
ctcttagtataacagtatgagtatg

SEQ ID NO: 5324808 - DNA, 25 bp, Homo sapien
aagacattaagtatggtgggaaagt

SEQ ID NO: 5324809 - DNA, 25 bp, Homo sapien
tagttttgtatgttggtctcttagt

SEQ ID NO: 5324810 - DNA, 25 bp, Homo sapien
gttcatcaagtggacaggcagagcc

SEQ ID NO: 5324811 - DNA, 25 bp, Homo sapien
cagggcagggctggtattttcttcc

SEQ ID NO: 5324812 - DNA, 25 bp, Homo sapien
cataggccacagttcagatctgctg

SEQ ID NO: 5324813 - DNA, 25 bp, Homo sapien
gaacttccctcgagagataagactg

SEQ ID NO: 5324814 - DNA, 25 bp, Homo sapien
caatgttatggcacctgtgatgctg

SEQ ID NO: 5324815 - DNA, 25 bp, Homo sapien
catagcggcatatgttgatgggaga

SEQ ID NO: 5324816 - DNA, 25 bp, Homo sapien
tactataggcagctatgtacctgct

SEQ ID NO: 5324817 - DNA, 25 bp, Homo sapien
taaatcagagcttttgccaacatag

SEQ ID NO: 5324818 - DNA, 25 bp, Homo sapien
tcccaggggttcatcagtggtgtac

SEQ ID NO: 5324819 - DNA, 25 bp, Homo sapien
cactgtgtatctcagcacacttaca

SEQ ID NO: 5324820 - DNA, 25 bp, Homo sapien
tcatcagtggtgtactctgacttca

SEQ ID NO: 5324821 - DNA, 25 bp, Homo sapien
gacttcagccttgcactgtgtatct

SEQ ID NO: 5324822 - DNA, 25 bp, Homo sapien
gcaattgagtgcacatatcataggg

SEQ ID NO: 5324823 - DNA, 25 bp, Homo sapien
atatcataggggaatgacaccacac

SEQ ID NO: 5324824 - DNA, 25 bp, Homo sapien
gcacatatcataggggaatgacacc

SEQ ID NO: 5324825 - DNA, 25 bp, Homo sapien
cagcaattgagtgcacatatcatag

SEQ ID NO: 5324826 - DNA, 25 bp, Homo sapien
actgaagacactgtgggtccatggc

SEQ ID NO: 5324827 - DNA, 25 bp, Homo sapien
tggcaaatgatgtttgagttcagcc

SEQ ID NO: 5324828 - DNA, 25 bp, Homo sapien
gatgtttgagttcagccatgccaaa

SEQ ID NO: 5324829 - DNA, 25 bp, Homo sapien
cactgtgggtccatggcaaatgatg

SEQ ID NO: 5324830 - DNA, 25 bp, Homo sapien
gccatttgccatcaaatccagagac

SEQ ID NO: 5324831 - DNA, 25 bp, Homo sapien
gctgccatttgccatcaaatccaga

SEQ ID NO: 5324832 - DNA, 25 bp, Homo sapien
tgccatttgccatcaaatccagaga

SEQ ID NO: 5324833 - DNA, 25 bp, Homo sapien
tgctgccatttgccatcaaatccag

SEQ ID NO: 5324834 - DNA, 25 bp, Homo sapien
tccagatacccaactcgggggcttg

SEQ ID NO: 5324835 - DNA, 25 bp, Homo sapien
agacaccacagtggtcctggcatcc

SEQ ID NO: 5324836 - DNA, 25 bp, Homo sapien
cttccagatacccaactcgggggct

SEQ ID NO: 5324837 - DNA, 25 bp, Homo sapien
cgcacactcagtccataggatcggg

SEQ ID NO: 5324838 - DNA, 25 bp, Homo sapien
gccagggattgcacttcctggctcc

SEQ ID NO: 5324839 - DNA, 25 bp, Homo sapien
gcagcccagccagggattgcacttc

SEQ ID NO: 5324840 - DNA, 25 bp, Homo sapien
taggcttaatggtttctgagacgtg

SEQ ID NO: 5324841 - DNA, 25 bp, Homo sapien
taggtggagctatgtcataccttct

SEQ ID NO: 5324842 - DNA, 25 bp, Homo sapien
gaagcaacttgggtgtccatcatgg

SEQ ID NO: 5324843 - DNA, 25 bp, Homo sapien
tggaatgtgatcagaagagacaggt

SEQ ID NO: 5324844 - DNA, 25 bp, Homo sapien
caggtgtcacttgcaggtcaagatg

SEQ ID NO: 5324845 - DNA, 25 bp, Homo sapien
tgtatactgcaatggaaggaaattc

SEQ ID NO: 5324846 - DNA, 25 bp, Homo sapien
ctgtaatgtgacaccaggttctgag

SEQ ID NO: 5324847 - DNA, 25 bp, Homo sapien
tggcattcaccctgtaatgtgacac

SEQ ID NO: 5324848 - DNA, 25 bp, Homo sapien
tgtaatgtgacaccaggttctgagg

SEQ ID NO: 5324849 - DNA, 25 bp, Homo sapien
cctggcattcaccctgtaatgtgac

SEQ ID NO: 5324850 - DNA, 25 bp, Homo sapien
ttcctgagatgtgggggttcctttg

SEQ ID NO: 5324851 - DNA, 25 bp, Homo sapien
gggccaaggtgagagaggttctaaa

SEQ ID NO: 5324852 - DNA, 25 bp, Homo sapien
ggttctaaagtcaaaactgttgtga

SEQ ID NO: 5324853 - DNA, 25 bp, Homo sapien
aactgttgtgaaatgccacaaagcc

SEQ ID NO: 5324854 - DNA, 25 bp, Homo sapien
gacttaggccatcacagaacacagg

SEQ ID NO: 5324855 - DNA, 25 bp, Homo sapien
aagaatgagaccagcccatcgagga

SEQ ID NO: 5324856 - DNA, 25 bp, Homo sapien
tttgaaaccggatgctacacagagc

SEQ ID NO: 5324857 - DNA, 25 bp, Homo sapien
gccagagcccttccattttccggag

SEQ ID NO: 5324858 - DNA, 25 bp, Homo sapien
aaatgatgcttttgagaaccaacag

SEQ ID NO: 5324859 - DNA, 25 bp, Homo sapien
agctctctgggcgttgagtaccagg

SEQ ID NO: 5324860 - DNA, 25 bp, Homo sapien
tcttttccgcagcagatctgacatc

SEQ ID NO: 5324861 - DNA, 25 bp, Homo sapien
gatgcccacatatgcagcccatttc

SEQ ID NO: 5324862 - DNA, 25 bp, Homo sapien
ggaactgtgcaaaaatgatgcccac

SEQ ID NO: 5324863 - DNA, 25 bp, Homo sapien
tacgctatctaagggtagactgcat

SEQ ID NO: 5324864 - DNA, 25 bp, Homo sapien
tgggaaataagatctacgctatcta

SEQ ID NO: 5324865 - DNA, 25 bp, Homo sapien
tatctaagggtagactgcatgtctg

SEQ ID NO: 5324866 - DNA, 25 bp, Homo sapien
taagatctacgctatctaagggtag

SEQ ID NO: 5324867 - DNA, 25 bp, Homo sapien
cagaatgctcgtgacatggatgtcc

SEQ ID NO: 5324868 - DNA, 25 bp, Homo sapien
tgaagtcaatcacccattcaggacc

SEQ ID NO: 5324869 - DNA, 25 bp, Homo sapien
tagctggtaagtgaacctggccaac

SEQ ID NO: 5324870 - DNA, 25 bp, Homo sapien
ggaagcttggtgctccagaatgtca

SEQ ID NO: 5324871 - DNA, 25 bp, Homo sapien
tggaagagacaagtgttctggaagc

SEQ ID NO: 5324872 - DNA, 25 bp, Homo sapien
gatactgaatccagctcttggaaga

SEQ ID NO: 5324873 - DNA, 25 bp, Homo sapien
tttgatactgaatccagctcttgga

SEQ ID NO: 5324874 - DNA, 25 bp, Homo sapien
cttttgatactgaatccagctcttg

SEQ ID NO: 5324875 - DNA, 25 bp, Homo sapien
gcaagatctgttgttggcctcatga

SEQ ID NO: 5324876 - DNA, 25 bp, Homo sapien
tgagaagtgactacaggaaggcagt

SEQ ID NO: 5324877 - DNA, 25 bp, Homo sapien
gaaatatgttatgctccggatacac

SEQ ID NO: 5324878 - DNA, 25 bp, Homo sapien
gctagacaatgaccctccacactta

SEQ ID NO: 5324879 - DNA, 25 bp, Homo sapien
ttatttctgcaagccttcagacctt

SEQ ID NO: 5324880 - DNA, 25 bp, Homo sapien
gcaagccttcagaccttccattctc

SEQ ID NO: 5324881 - DNA, 25 bp, Homo sapien
ctgcttcgttctttcaggtcacaca

SEQ ID NO: 5324882 - DNA, 25 bp, Homo sapien
tgcttcgttctttcaggtcacacat

SEQ ID NO: 5324883 - DNA, 25 bp, Homo sapien
caagactggctgtacattgaaaagc

SEQ ID NO: 5324884 - DNA, 25 bp, Homo sapien
taaccatattcagcctgttccgtgg

SEQ ID NO: 5324885 - DNA, 25 bp, Homo sapien
gatccaacttatggtggaagagccc

SEQ ID NO: 5324886 - DNA, 25 bp, Homo sapien
cagtgtttcagtaccaaagtctaaa

SEQ ID NO: 5324887 - DNA, 25 bp, Homo sapien
gcttccacaggaaagtattcgggta

SEQ ID NO: 5324888 - DNA, 25 bp, Homo sapien
gtgttatttctgaccagagccctag

SEQ ID NO: 5324889 - DNA, 25 bp, Homo sapien
ggcctgtaaggtctaaggtgagaat

SEQ ID NO: 5324890 - DNA, 25 bp, Homo sapien
gagccctagttctgcaataaccaaa

SEQ ID NO: 5324891 - DNA, 25 bp, Homo sapien
ttagtagcctgcatcaaagggctca

SEQ ID NO: 5324892 - DNA, 25 bp, Homo sapien
agcctgcatcaaagggctcagattc

SEQ ID NO: 5324893 - DNA, 25 bp, Homo sapien
gtagcctgcatcaaagggctcagat

SEQ ID NO: 5324894 - DNA, 25 bp, Homo sapien
tagtagcctgcatcaaagggctcag

SEQ ID NO: 5324895 - DNA, 25 bp, Homo sapien
acaagtgggatgtatgaatgaaaca

SEQ ID NO: 5324896 - DNA, 25 bp, Homo sapien
ctacaagtgggatgtatgaatgaaa

SEQ ID NO: 5324897 - DNA, 25 bp, Homo sapien
agtgggatgtatgaatgaaacagag

SEQ ID NO: 5324898 - DNA, 25 bp, Homo sapien
tacaagtgggatgtatgaatgaaac

SEQ ID NO: 5324899 - DNA, 25 bp, Homo sapien
caaacagacgagcaagttctgggtg

SEQ ID NO: 5324900 - DNA, 25 bp, Homo sapien
aacagacgagcaagttctgggtggc

SEQ ID NO: 5324901 - DNA, 25 bp, Homo sapien
accacggaatcatgctccagagacc

SEQ ID NO: 5324902 - DNA, 25 bp, Homo sapien
tgatggacaccacggaatcatgctc

SEQ ID NO: 5324903 - DNA, 25 bp, Homo sapien
ggtgcctgtgaagaactgaaagctc

SEQ ID NO: 5324904 - DNA, 25 bp, Homo sapien
gcctggggtcgcactctggagatga

SEQ ID NO: 5324905 - DNA, 25 bp, Homo sapien
ggtcctgcctgtagaaggtgcctgt

SEQ ID NO: 5324906 - DNA, 25 bp, Homo sapien
gcaaggcctggggtcgcactctgga

SEQ ID NO: 5324907 - DNA, 25 bp, Homo sapien
gggaaagggcactcgattctgaagt

SEQ ID NO: 5324908 - DNA, 25 bp, Homo sapien
caacgggctgaatagcagaacctgc

SEQ ID NO: 5324909 - DNA, 25 bp, Homo sapien
gaagttctgcagacgttctactggg

SEQ ID NO: 5324910 - DNA, 25 bp, Homo sapien
gacaggaggtcaagtccaacgggct

SEQ ID NO: 5324911 - DNA, 25 bp, Homo sapien
cccacactcccaagaagatgaacat

SEQ ID NO: 5324912 - DNA, 25 bp, Homo sapien
tgaacatttcacttcgtccactaaa

SEQ ID NO: 5324913 - DNA, 25 bp, Homo sapien
acccacactcccaagaagatgaaca

SEQ ID NO: 5324914 - DNA, 25 bp, Homo sapien
tcacttcgtccactaaatgacccat

SEQ ID NO: 5324915 - DNA, 25 bp, Homo sapien
caagggtggctgttggacaagtcct

SEQ ID NO: 5324916 - DNA, 25 bp, Homo sapien
gtggctgttggacaagtcctgctga

SEQ ID NO: 5324917 - DNA, 25 bp, Homo sapien
gttggacaagtcctgctgatgagtt

SEQ ID NO: 5324918 - DNA, 25 bp, Homo sapien
caagtcctgctgatgagtttgggtg

SEQ ID NO: 5324919 - DNA, 25 bp, Homo sapien
tgtgcctgaaggaagccgggcccct

SEQ ID NO: 5324920 - DNA, 25 bp, Homo sapien
ccctgtgggcacatgtgcctgaagg

SEQ ID NO: 5324921 - DNA, 25 bp, Homo sapien
tgcctgaaggaagccgggcccctgg

SEQ ID NO: 5324922 - DNA, 25 bp, Homo sapien
ctgtgggcacatgtgcctgaaggaa

SEQ ID NO: 5324923 - DNA, 25 bp, Homo sapien
gcagcgctgggttcagaaacatgga

SEQ ID NO: 5324924 - DNA, 25 bp, Homo sapien
agatgcacggagaggcacctgccct

SEQ ID NO: 5324925 - DNA, 25 bp, Homo sapien
tgaaggtaaagccttcagatgcacg

SEQ ID NO: 5324926 - DNA, 25 bp, Homo sapien
aagatcctgggtggaaaagcagaag

SEQ ID NO: 5324927 - DNA, 25 bp, Homo sapien
ctaagtaacgcatcctggaaaggcc

SEQ ID NO: 5324928 - DNA, 25 bp, Homo sapien
gagttgctccaagggaaacccagga

SEQ ID NO: 5324929 - DNA, 25 bp, Homo sapien
tcctgagaaccaagactaagtaacg

SEQ ID NO: 5324930 - DNA, 25 bp, Homo sapien
gaaaggtgagcaacaatagaaggaa

SEQ ID NO: 5324931 - DNA, 25 bp, Homo sapien
cattccaatagtcagctgtcaaaag

SEQ ID NO: 5324932 - DNA, 25 bp, Homo sapien
tgatggatatcagcacacatgttta

SEQ ID NO: 5324933 - DNA, 25 bp, Homo sapien
caacaatggtgtccttatcccttca

SEQ ID NO: 5324934 - DNA, 25 bp, Homo sapien
ttttacatggataaggccctgcaga

SEQ ID NO: 5324935 - DNA, 25 bp, Homo sapien
tcagtcagggtccagacagagatca

SEQ ID NO: 5324936 - DNA, 25 bp, Homo sapien
cttctgtattccgagtgtagcccac

SEQ ID NO: 5324937 - DNA, 25 bp, Homo sapien
gacaaacttattacccgtgcccaga

SEQ ID NO: 5324938 - DNA, 25 bp, Homo sapien
agtccctgttggagaggccactgga

SEQ ID NO: 5324939 - DNA, 25 bp, Homo sapien
gaggcaatatcagtggcagctggca

SEQ ID NO: 5324940 - DNA, 25 bp, Homo sapien
agttccgggtaaggactgctctgat

SEQ ID NO: 5324941 - DNA, 25 bp, Homo sapien
tcagttccgggtaaggactgctctg

SEQ ID NO: 5324942 - DNA, 25 bp, Homo sapien
cagttccgggtaaggactgctctga

SEQ ID NO: 5324943 - DNA, 25 bp, Homo sapien
tattgctccatatgtggtaagccca

SEQ ID NO: 5324944 - DNA, 25 bp, Homo sapien
ggaacgctggtcctcatgtagcaaa

SEQ ID NO: 5324945 - DNA, 25 bp, Homo sapien
ggctgaatttcacaacatagcaggt

SEQ ID NO: 5324946 - DNA, 25 bp, Homo sapien
ccatgagtgggtacaggttcagtcc

SEQ ID NO: 5324947 - DNA, 25 bp, Homo sapien
gctgaacgttaaccggctgaaagga

SEQ ID NO: 5324948 - DNA, 25 bp, Homo sapien
gacaaatgcgggtccattggagcgc

SEQ ID NO: 5324949 - DNA, 25 bp, Homo sapien
gagcattagggcactgtcttcggaa

SEQ ID NO: 5324950 - DNA, 25 bp, Homo sapien
ttgcacacgagctaaaccagcaggg

SEQ ID NO: 5324951 - DNA, 25 bp, Homo sapien
gggataagcgttctgtgacaccaat

SEQ ID NO: 5324952 - DNA, 25 bp, Homo sapien
cagctctatgactcgcaaggaagta

SEQ ID NO: 5324953 - DNA, 25 bp, Homo sapien
caaaatggcggtcggcgctctgcac

SEQ ID NO: 5324954 - DNA, 25 bp, Homo sapien
aaaaggaaagggcagcttgcccgca

SEQ ID NO: 5324955 - DNA, 25 bp, Homo sapien
cagcgcccggtcccgacctagccac

SEQ ID NO: 5324956 - DNA, 25 bp, Homo sapien
tgaaactccgggtgggcgtccatgg

SEQ ID NO: 5324957 - DNA, 25 bp, Homo sapien
gtcccgcggcagcggtgaaactccg

SEQ ID NO: 5324958 - DNA, 25 bp, Homo sapien
gaagagggcggagggtagtgggatg

SEQ ID NO: 5324959 - DNA, 25 bp, Homo sapien
ccggaagtgacgtgtcggcggcagc

SEQ ID NO: 5324960 - DNA, 25 bp, Homo sapien
tccgcgtcggaatagacggtccttc

SEQ ID NO: 5324961 - DNA, 25 bp, Homo sapien
gctctcaccagttccgcgtcggaat

SEQ ID NO: 5324962 - DNA, 25 bp, Homo sapien
agccgccccgaaggagccaggtaag

SEQ ID NO: 5324963 - DNA, 25 bp, Homo sapien
agggctgtgagcagccggccttccg

SEQ ID NO: 5324964 - DNA, 25 bp, Homo sapien
tccgcgctggctgcgttctccaggg

SEQ ID NO: 5324965 - DNA, 25 bp, Homo sapien
ggtctctgaagcaagcgaatttgga

SEQ ID NO: 5324966 - DNA, 25 bp, Homo sapien
tggccgcgacctgagtgtgctgctt

SEQ ID NO: 5324967 - DNA, 25 bp, Homo sapien
ccctccctcgtgacaggtgtaaaca

SEQ ID NO: 5324968 - DNA, 25 bp, Homo sapien
tatcagaagaatgtcaattggcaag

SEQ ID NO: 5324969 - DNA, 25 bp, Homo sapien
gcactgaacctgttgcaaaacttaa

SEQ ID NO: 5324970 - DNA, 25 bp, Homo sapien
cagctggtcctagccaagttgtaga

SEQ ID NO: 5324971 - DNA, 25 bp, Homo sapien
tcaagattcaatgagtgatgccact

SEQ ID NO: 5324972 - DNA, 25 bp, Homo sapien
aattttgtgtatgatgggtttcaga

SEQ ID NO: 5324973 - DNA, 25 bp, Homo sapien
gtgtatgatgggtttcagatctggc

SEQ ID NO: 5324974 - DNA, 25 bp, Homo sapien
ttcactgtctgtgaaatccccttca

SEQ ID NO: 5324975 - DNA, 25 bp, Homo sapien
actgtctgtgaaatccccttcagtc

SEQ ID NO: 5324976 - DNA, 25 bp, Homo sapien
aatgtgcatgcccaaggtcttttga

SEQ ID NO: 5324977 - DNA, 25 bp, Homo sapien
tatagggtatggatcattgtcagaa

SEQ ID NO: 5324978 - DNA, 25 bp, Homo sapien
catagattgctatggtttaggctgt

SEQ ID NO: 5324979 - DNA, 25 bp, Homo sapien
tcagtatgattcagagaaggaccaa

SEQ ID NO: 5324980 - DNA, 25 bp, Homo sapien
tcctgtgttgccaggggattacact

SEQ ID NO: 5324981 - DNA, 25 bp, Homo sapien
gattacactggccattggaacgctt

SEQ ID NO: 5324982 - DNA, 25 bp, Homo sapien
gcttgcctgagtgtaatgtaagtat

SEQ ID NO: 5324983 - DNA, 25 bp, Homo sapien
ctctgggaatgtgccagtggaactc

SEQ ID NO: 5324984 - DNA, 25 bp, Homo sapien
gctctccttttgaccagagctcatg

SEQ ID NO: 5324985 - DNA, 25 bp, Homo sapien
tctccttttgaccagagctcatgct

SEQ ID NO: 5324986 - DNA, 25 bp, Homo sapien
tgttgtcaactgtgacttcaaagcc

SEQ ID NO: 5324987 - DNA, 25 bp, Homo sapien
ttcaaagcctttcgcttgctcactc

SEQ ID NO: 5324988 - DNA, 25 bp, Homo sapien
acagcactgggatcgtcctctctgc

SEQ ID NO: 5324989 - DNA, 25 bp, Homo sapien
tccttggcaggttccacagcactgg

SEQ ID NO: 5324990 - DNA, 25 bp, Homo sapien
agcactgggatcgtcctctctgcat

SEQ ID NO: 5324991 - DNA, 25 bp, Homo sapien
ctctggacagtcagctccttggcag

SEQ ID NO: 5324992 - DNA, 25 bp, Homo sapien
agctctctgaatatgtccactcttg

SEQ ID NO: 5324993 - DNA, 25 bp, Homo sapien
ggtgggaagatctagctctatggcc

SEQ ID NO: 5324994 - DNA, 25 bp, Homo sapien
caaactgaactctgatgctataaac

SEQ ID NO: 5324995 - DNA, 25 bp, Homo sapien
ccaagattgtaggtgccaggattca

SEQ ID NO: 5324996 - DNA, 25 bp, Homo sapien
tgctgaagacaacgagcccacagaa

SEQ ID NO: 5324997 - DNA, 25 bp, Homo sapien
tagtcaggaaacaggtacggcggtc

SEQ ID NO: 5324998 - DNA, 25 bp, Homo sapien
tgggtacacctggaggacgtgcaac

SEQ ID NO: 5324999 - DNA, 25 bp, Homo sapien
gaaacgagagctctttagacgcgct

SEQ ID NO: 5325000 - DNA, 25 bp, Homo sapien
catgttgtaagagtgcatcccgggc

SEQ ID NO: 5325001 - DNA, 25 bp, Homo sapien
tacgatccagatgttagcgctccac

SEQ ID NO: 5325002 - DNA, 25 bp, Homo sapien
tgactcaggaaagcaaccagatggg

SEQ ID NO: 5325003 - DNA, 25 bp, Homo sapien
caagaaggccataaacagtttcggc

SEQ ID NO: 5325004 - DNA, 25 bp, Homo sapien
tctaaaaaggccgaattgccaagtc

SEQ ID NO: 5325005 - DNA, 25 bp, Homo sapien
tataccagggtagtaggtctctgag

SEQ ID NO: 5325006 - DNA, 25 bp, Homo sapien
tcaacctatacagggcaaaaatgcc

SEQ ID NO: 5325007 - DNA, 25 bp, Homo sapien
taaatgcaacacttacgaggagtag

SEQ ID NO: 5325008 - DNA, 25 bp, Homo sapien
tgctcaaagcaaaaactagtgtgat

SEQ ID NO: 5325009 - DNA, 25 bp, Homo sapien
actctgctcaaagcaaaaactagtg

SEQ ID NO: 5325010 - DNA, 25 bp, Homo sapien
ctccaactctgctcaaagcaaaaac

SEQ ID NO: 5325011 - DNA, 25 bp, Homo sapien
tcaaagcaaaaactagtgtgatcct

SEQ ID NO: 5325012 - DNA, 25 bp, Homo sapien
tctgggtgggcatagtcgctgggtc

SEQ ID NO: 5325013 - DNA, 25 bp, Homo sapien
gaaaaaggcaagcaagggtgcatgc

SEQ ID NO: 5325014 - DNA, 25 bp, Homo sapien
aactgtcagggttatgggaacgctc

SEQ ID NO: 5325015 - DNA, 25 bp, Homo sapien
gcatgcacagtgtggagaactgtca

SEQ ID NO: 5325016 - DNA, 25 bp, Homo sapien
taagacaccttggatggaccgtcac

SEQ ID NO: 5325017 - DNA, 25 bp, Homo sapien
tttgaggaggtcgtcggcagacaca

SEQ ID NO: 5325018 - DNA, 25 bp, Homo sapien
ggaggtccctttcacactgtcagtc

SEQ ID NO: 5325019 - DNA, 25 bp, Homo sapien
aaattcccaggcagagagtccatca

SEQ ID NO: 5325020 - DNA, 25 bp, Homo sapien
ttaagcacggagtctttctgcctgg

SEQ ID NO: 5325021 - DNA, 25 bp, Homo sapien
cctcattaagcacggagtctttctg

SEQ ID NO: 5325022 - DNA, 25 bp, Homo sapien
tcattaagcacggagtctttctgcc

SEQ ID NO: 5325023 - DNA, 25 bp, Homo sapien
ccttcctcattaagcacggagtctt

SEQ ID NO: 5325024 - DNA, 25 bp, Homo sapien
ccacagtgactgagccgccgccact

SEQ ID NO: 5325025 - DNA, 25 bp, Homo sapien
tgagccgccgccacttttcatttag

SEQ ID NO: 5325026 - DNA, 25 bp, Homo sapien
agtgactgagccgccgccacttttc

SEQ ID NO: 5325027 - DNA, 25 bp, Homo sapien
gactgagccgccgccacttttcatt

SEQ ID NO: 5325028 - DNA, 25 bp, Homo sapien
aacttcatccacacacagttatgtt

SEQ ID NO: 5325029 - DNA, 25 bp, Homo sapien
tgtttgaagacaactggattaattt

SEQ ID NO: 5325030 - DNA, 25 bp, Homo sapien
tatgtttgaagacaactggattaat

SEQ ID NO: 5325031 - DNA, 25 bp, Homo sapien
atgtttgaagacaactggattaatt

SEQ ID NO: 5325032 - DNA, 25 bp, Homo sapien
gagcggtacgtcgtgctccagcact

SEQ ID NO: 5325033 - DNA, 25 bp, Homo sapien
gaagctaagactccgccgttctctg

SEQ ID NO: 5325034 - DNA, 25 bp, Homo sapien
tgcgcgccccgagcattatacaatg

SEQ ID NO: 5325035 - DNA, 25 bp, Homo sapien
gctccacctgggaactaacgcatca

SEQ ID NO: 5325036 - DNA, 25 bp, Homo sapien
gattttctcgtaaggacgggctgaa

SEQ ID NO: 5325037 - DNA, 25 bp, Homo sapien
gcgcgaccgcaaatatgacaagcat

SEQ ID NO: 5325038 - DNA, 25 bp, Homo sapien
tacacactctagaagtgctcaggcg

SEQ ID NO: 5325039 - DNA, 25 bp, Homo sapien
tgctcaggcgaatgacgaagcggct

SEQ ID NO: 5325040 - DNA, 25 bp, Homo sapien
gagtggatggcagcaaataccctaa

SEQ ID NO: 5325041 - DNA, 25 bp, Homo sapien
tcatctgtagcacagacgcccactg

SEQ ID NO: 5325042 - DNA, 25 bp, Homo sapien
tgtacactttacaatcctgaacttg

SEQ ID NO: 5325043 - DNA, 25 bp, Homo sapien
caacaccacattaggtacacttgta

SEQ ID NO: 5325044 - DNA, 25 bp, Homo sapien
ggctgcatggaggaacagtttgcct

SEQ ID NO: 5325045 - DNA, 25 bp, Homo sapien
cagattcccgtttatgaactccttt

SEQ ID NO: 5325046 - DNA, 25 bp, Homo sapien
aagaagaaccagattcccgtttatg

SEQ ID NO: 5325047 - DNA, 25 bp, Homo sapien
ctgaggctgcatggaggaacagttt

SEQ ID NO: 5325048 - DNA, 25 bp, Homo sapien
tccatatgctcctttacccctccca

SEQ ID NO: 5325049 - DNA, 25 bp, Homo sapien
gaaatggctttggatttggttggta

SEQ ID NO: 5325050 - DNA, 25 bp, Homo sapien
cgcttttctccaaggatctccatat

SEQ ID NO: 5325051 - DNA, 25 bp, Homo sapien
cttggacttctgcatatagcgcttt

SEQ ID NO: 5325052 - DNA, 25 bp, Homo sapien
tctcatcaacgaggtttgctagcat

SEQ ID NO: 5325053 - DNA, 25 bp, Homo sapien
ctctcatcaacgaggtttgctagca

SEQ ID NO: 5325054 - DNA, 25 bp, Homo sapien
tttggtagaccatcattagcacggt

SEQ ID NO: 5325055 - DNA, 25 bp, Homo sapien
tatgtcaaactgcatctggcaccca

SEQ ID NO: 5325056 - DNA, 25 bp, Homo sapien
cagctaatgaaacctagcccaggag

SEQ ID NO: 5325057 - DNA, 25 bp, Homo sapien
tagagacacaatactgccgacagat

SEQ ID NO: 5325058 - DNA, 25 bp, Homo sapien
tcagcataattcgtccaggttgtag

SEQ ID NO: 5325059 - DNA, 25 bp, Homo sapien
tgctgagtagtgctgaaagtaccat

SEQ ID NO: 5325060 - DNA, 25 bp, Homo sapien
ccccaagggtgctatcttgcaaaag

SEQ ID NO: 5325061 - DNA, 25 bp, Homo sapien
caatcctgagagatactatgtcccc

SEQ ID NO: 5325062 - DNA, 25 bp, Homo sapien
gaatctacgaatgtccaatatgtgt

SEQ ID NO: 5325063 - DNA, 25 bp, Homo sapien
cataactaaacttctgactgacact

SEQ ID NO: 5325064 - DNA, 25 bp, Homo sapien
catttcttgcgaatggaatctacga

SEQ ID NO: 5325065 - DNA, 25 bp, Homo sapien
tatagtatctgaataacacctcgcc

SEQ ID NO: 5325066 - DNA, 25 bp, Homo sapien
gcacaatgcctacaagagtacaatg

SEQ ID NO: 5325067 - DNA, 25 bp, Homo sapien
cctacaaatgtaccccatggagaaa

SEQ ID NO: 5325068 - DNA, 25 bp, Homo sapien
taatgtacgttctgctagactcagc

SEQ ID NO: 5325069 - DNA, 25 bp, Homo sapien
gactacataacaatcagacgttggg

SEQ ID NO: 5325070 - DNA, 25 bp, Homo sapien
cctggaagataacttgggatatacc

SEQ ID NO: 5325071 - DNA, 25 bp, Homo sapien
tacgaattacaagtttgtagtacaa

SEQ ID NO: 5325072 - DNA, 25 bp, Homo sapien
agggattctcaaccctggctacgaa

SEQ ID NO: 5325073 - DNA, 25 bp, Homo sapien
gggatataccattttggacatagga

SEQ ID NO: 5325074 - DNA, 25 bp, Homo sapien
ttagttattaaggatctctttgggc

SEQ ID NO: 5325075 - DNA, 25 bp, Homo sapien
tatggcaaggaactctgccactctt

SEQ ID NO: 5325076 - DNA, 25 bp, Homo sapien
ctctgcattttcatgtcacattcag

SEQ ID NO: 5325077 - DNA, 25 bp, Homo sapien
tttgggcttccaactatggcaagga

SEQ ID NO: 5325078 - DNA, 25 bp, Homo sapien
tgctgccattcctgtaagaataggt

SEQ ID NO: 5325079 - DNA, 25 bp, Homo sapien
gatttctgcactgcattccacaagg

SEQ ID NO: 5325080 - DNA, 25 bp, Homo sapien
gacccggactggcatgcatgctgca

SEQ ID NO: 5325081 - DNA, 25 bp, Homo sapien
gcatgagtagcttacgtgcggcacg

SEQ ID NO: 5325082 - DNA, 25 bp, Homo sapien
ctctctgcacgcaccactccacgct

SEQ ID NO: 5325083 - DNA, 25 bp, Homo sapien
acgcaccactccacgctcacagcag

SEQ ID NO: 5325084 - DNA, 25 bp, Homo sapien
tgcacgggccgctctctgcacgcac

SEQ ID NO: 5325085 - DNA, 25 bp, Homo sapien
gggccgctctctgcacgcaccactc

SEQ ID NO: 5325086 - DNA, 25 bp, Homo sapien
gtgagctgctccaagttccgggcat

SEQ ID NO: 5325087 - DNA, 25 bp, Homo sapien
gctgctccaagttccgggcattcag

SEQ ID NO: 5325088 - DNA, 25 bp, Homo sapien
tgagctgctccaagttccgggcatt

SEQ ID NO: 5325089 - DNA, 25 bp, Homo sapien
gagctgctccaagttccgggcattc

SEQ ID NO: 5325090 - DNA, 25 bp, Homo sapien
catggctcccttgtgctatgaggtc

SEQ ID NO: 5325091 - DNA, 25 bp, Homo sapien
gcatgaaccagcgtgaggtcctact

SEQ ID NO: 5325092 - DNA, 25 bp, Homo sapien
caacttggcagatttcggtacagga

SEQ ID NO: 5325093 - DNA, 25 bp, Homo sapien
tggtggtaagattcaaactctggca

SEQ ID NO: 5325094 - DNA, 25 bp, Homo sapien
tgtggacaactagcccagaacttga

SEQ ID NO: 5325095 - DNA, 25 bp, Homo sapien
gaatgaactattaagaggcctttcc

SEQ ID NO: 5325096 - DNA, 25 bp, Homo sapien
gcctcatttgaatcttgtggacaac

SEQ ID NO: 5325097 - DNA, 25 bp, Homo sapien
caaaacatgtttggtttggcctcat

SEQ ID NO: 5325098 - DNA, 25 bp, Homo sapien
ctcgagtacaggacggtgagttcga

SEQ ID NO: 5325099 - DNA, 25 bp, Homo sapien
gggtgtctgtgcgtcactcgagtac

SEQ ID NO: 5325100 - DNA, 25 bp, Homo sapien
ccttctgcgaagaagtcggcaccca

SEQ ID NO: 5325101 - DNA, 25 bp, Homo sapien
cagtccagctccgagacgggtcggg

SEQ ID NO: 5325102 - DNA, 25 bp, Homo sapien
acccaccggcccctacgatctctgc

SEQ ID NO: 5325103 - DNA, 25 bp, Homo sapien
ggcccctacgatctctgccccagag

SEQ ID NO: 5325104 - DNA, 25 bp, Homo sapien
ccaataaatctctaaaacgacgagg

SEQ ID NO: 5325105 - DNA, 25 bp, Homo sapien
gatggagcgccccctccctaaaata

SEQ ID NO: 5325106 - DNA, 25 bp, Homo sapien
cagacagacagccatggatcagagg

SEQ ID NO: 5325107 - DNA, 25 bp, Homo sapien
ggaagcggctctgggtctatcccat

SEQ ID NO: 5325108 - DNA, 25 bp, Homo sapien
tgttacaccgtaacaagtacagaca

SEQ ID NO: 5325109 - DNA, 25 bp, Homo sapien
gggtctatcccatgcctttgcagtc

SEQ ID NO: 5325110 - DNA, 25 bp, Homo sapien
tcgggtcagtcacgcaaataacagt

SEQ ID NO: 5325111 - DNA, 25 bp, Homo sapien
ggctgtgctgcctactctgatccgg

SEQ ID NO: 5325112 - DNA, 25 bp, Homo sapien
tggctcctaactctgcgtgcaggcg

SEQ ID NO: 5325113 - DNA, 25 bp, Homo sapien
cacgcaaataacagtgtgagggccg

SEQ ID NO: 5325114 - DNA, 25 bp, Homo sapien
tccttctggcaagaggtcaagccaa

SEQ ID NO: 5325115 - DNA, 25 bp, Homo sapien
tcatctgggctccttaagacttggt

SEQ ID NO: 5325116 - DNA, 25 bp, Homo sapien
gatatgtgatcatggtaacaccaca

SEQ ID NO: 5325117 - DNA, 25 bp, Homo sapien
gagattcagctcatctcatctgggc

SEQ ID NO: 5325118 - DNA, 25 bp, Homo sapien
tcctaccgttcagggagagtcactg

SEQ ID NO: 5325119 - DNA, 25 bp, Homo sapien
cactgttcgaattttggttcctaag

SEQ ID NO: 5325120 - DNA, 25 bp, Homo sapien
tggtttgtacgatgaattctggagg

SEQ ID NO: 5325121 - DNA, 25 bp, Homo sapien
cactatggaggcttgcagtggaaag

SEQ ID NO: 5325122 - DNA, 25 bp, Homo sapien
tctgagaacagtgtgcttctacaca

SEQ ID NO: 5325123 - DNA, 25 bp, Homo sapien
cagacaggctgatactcagatagac

SEQ ID NO: 5325124 - DNA, 25 bp, Homo sapien
tattgcacagctgcgaccctaaatg

SEQ ID NO: 5325125 - DNA, 25 bp, Homo sapien
gatttagtgtctctgtaatggccaa

SEQ ID NO: 5325126 - DNA, 25 bp, Homo sapien
tgactggggccgttgtaaaaagtca

SEQ ID NO: 5325127 - DNA, 25 bp, Homo sapien
aaaagtcattatgaagtggtccagg

SEQ ID NO: 5325128 - DNA, 25 bp, Homo sapien
tgtaaaaagtcattatgaagtggtc

SEQ ID NO: 5325129 - DNA, 25 bp, Homo sapien
gtcattatgaagtggtccaggtgac

SEQ ID NO: 5325130 - DNA, 25 bp, Homo sapien
gtttcgtgtgcggttctctgggcat

SEQ ID NO: 5325131 - DNA, 25 bp, Homo sapien
tgttctgtttgtttcgtgtgcggtt

SEQ ID NO: 5325132 - DNA, 25 bp, Homo sapien
tttgtttcgtgtgcggttctctggg

SEQ ID NO: 5325133 - DNA, 25 bp, Homo sapien
tctgtttgtttcgtgtgcggttctc

SEQ ID NO: 5325134 - DNA, 25 bp, Homo sapien
gttcaacaaagtctgcccgttgtcc

SEQ ID NO: 5325135 - DNA, 25 bp, Homo sapien
tgcccgttgtccaatctgcggctct

SEQ ID NO: 5325136 - DNA, 25 bp, Homo sapien
gttgtccaatctgcggctctccagg

SEQ ID NO: 5325137 - DNA, 25 bp, Homo sapien
caaagtctgcccgttgtccaatctg

SEQ ID NO: 5325138 - DNA, 25 bp, Homo sapien
aagggataggaaaagggtgatagct

SEQ ID NO: 5325139 - DNA, 25 bp, Homo sapien
aaaagggtgatagctagagatggat

SEQ ID NO: 5325140 - DNA, 25 bp, Homo sapien
ggtgatagctagagatggatgcaga

SEQ ID NO: 5325141 - DNA, 25 bp, Homo sapien
attgcaggtagcttgttggtgaagg

SEQ ID NO: 5325142 - DNA, 25 bp, Homo sapien
caggaacaaaggaatcggtaactgc

SEQ ID NO: 5325143 - DNA, 25 bp, Homo sapien
gtaaacatcactacattccagccag

SEQ ID NO: 5325144 - DNA, 25 bp, Homo sapien
tggagcaggaacaaaggaatcggta

SEQ ID NO: 5325145 - DNA, 25 bp, Homo sapien
taaacatcactacattccagccagc

SEQ ID NO: 5325146 - DNA, 25 bp, Homo sapien
tccctgcaaaagtcgcccttctctg

SEQ ID NO: 5325147 - DNA, 25 bp, Homo sapien
tctctgctgggcgagtgctgttgct

SEQ ID NO: 5325148 - DNA, 25 bp, Homo sapien
tcataggcaattgttatcccaacct

SEQ ID NO: 5325149 - DNA, 25 bp, Homo sapien
atccttggaaggtgccctccctgca

SEQ ID NO: 5325150 - DNA, 25 bp, Homo sapien
gatcttgcataattccttggcccta

SEQ ID NO: 5325151 - DNA, 25 bp, Homo sapien
cctagtccatttgtagggagcacat

SEQ ID NO: 5325152 - DNA, 25 bp, Homo sapien
cagccagggtagcatgggaagttat

SEQ ID NO: 5325153 - DNA, 25 bp, Homo sapien
gaaacccctgcctgaaatggacaac

SEQ ID NO: 5325154 - DNA, 25 bp, Homo sapien
aagctttgccagaagcgtcactagg

SEQ ID NO: 5325155 - DNA, 25 bp, Homo sapien
tttactgtaccatcctcagcgcagg

SEQ ID NO: 5325156 - DNA, 25 bp, Homo sapien
tgtggtgtcacacgcgcacctctag

SEQ ID NO: 5325157 - DNA, 25 bp, Homo sapien
tcagcgcaggcctttagtcctcatg

SEQ ID NO: 5325158 - DNA, 25 bp, Homo sapien
ggacttcttcgtgcttgtctccaca

SEQ ID NO: 5325159 - DNA, 25 bp, Homo sapien
caacgtcgtgacagagcctggactt

SEQ ID NO: 5325160 - DNA, 25 bp, Homo sapien
gaagccagtcagcaacgtcgtgaca

SEQ ID NO: 5325161 - DNA, 25 bp, Homo sapien
tcgtgcttgtctccacatatccagc

SEQ ID NO: 5325162 - DNA, 25 bp, Homo sapien
tgaggaagaggatgatcccacaggc

SEQ ID NO: 5325163 - DNA, 25 bp, Homo sapien
ttgaggaagaggatgatcccacagg

SEQ ID NO: 5325164 - DNA, 25 bp, Homo sapien
aggaagaggatgatcccacaggcgc

SEQ ID NO: 5325165 - DNA, 25 bp, Homo sapien
gaagaggatgatcccacaggcgctg

SEQ ID NO: 5325166 - DNA, 25 bp, Homo sapien
tgtaggcttgtcaactaacacatca

SEQ ID NO: 5325167 - DNA, 25 bp, Homo sapien
tttcattgtaggcttgtcaactaac

SEQ ID NO: 5325168 - DNA, 25 bp, Homo sapien
caactaacacatcaatataattcct

SEQ ID NO: 5325169 - DNA, 25 bp, Homo sapien
ggcttgtcaactaacacatcaatat

SEQ ID NO: 5325170 - DNA, 25 bp, Homo sapien
ataacctttggtgtaacagacactt

SEQ ID NO: 5325171 - DNA, 25 bp, Homo sapien
cctttggtgtaacagacacttaaag

SEQ ID NO: 5325172 - DNA, 25 bp, Homo sapien
ttggtgtaacagacacttaaagtca

SEQ ID NO: 5325173 - DNA, 25 bp, Homo sapien
taacctttggtgtaacagacactta

SEQ ID NO: 5325174 - DNA, 25 bp, Homo sapien
aggtcagtccctccacagtaggaac

SEQ ID NO: 5325175 - DNA, 25 bp, Homo sapien
taaaattaagtagcctgagcacgtg

SEQ ID NO: 5325176 - DNA, 25 bp, Homo sapien
cttgtgtgagcctccaatggccgga

SEQ ID NO: 5325177 - DNA, 25 bp, Homo sapien
tgaattcactcataacacgcaactg

SEQ ID NO: 5325178 - DNA, 25 bp, Homo sapien
gactcagctacctatgttcccaagg

SEQ ID NO: 5325179 - DNA, 25 bp, Homo sapien
acattgctccaaccacgttggcctt

SEQ ID NO: 5325180 - DNA, 25 bp, Homo sapien
ggccttcacggtgtttcttaagcat

SEQ ID NO: 5325181 - DNA, 25 bp, Homo sapien
actcttccccagatcaccacatggc

SEQ ID NO: 5325182 - DNA, 25 bp, Homo sapien
tgaaaggagtccaacgccaaggtcc

SEQ ID NO: 5325183 - DNA, 25 bp, Homo sapien
tttctgtggtttcgtggctggcgcc

SEQ ID NO: 5325184 - DNA, 25 bp, Homo sapien
caacagtgggacactttgggaggaa

SEQ ID NO: 5325185 - DNA, 25 bp, Homo sapien
tggcgccgaagtcaagaacctaggg

SEQ ID NO: 5325186 - DNA, 25 bp, Homo sapien
ctttcggcttcccatcatctatctg

SEQ ID NO: 5325187 - DNA, 25 bp, Homo sapien
agaacccctgctttcggcttcccat

SEQ ID NO: 5325188 - DNA, 25 bp, Homo sapien
gagaacccctgctttcggcttccca

SEQ ID NO: 5325189 - DNA, 25 bp, Homo sapien
cctgctttcggcttcccatcatcta

SEQ ID NO: 5325190 - DNA, 25 bp, Homo sapien
ccccttcgtacgtgggtcctgcagg

SEQ ID NO: 5325191 - DNA, 25 bp, Homo sapien
ctctaggagtcctggtaggaaactc

SEQ ID NO: 5325192 - DNA, 25 bp, Homo sapien
cagggcacacgtgatggtgaaagct

SEQ ID NO: 5325193 - DNA, 25 bp, Homo sapien
ggctggtggccatccaaaccaatgg

SEQ ID NO: 5325194 - DNA, 25 bp, Homo sapien
cttcttcctccggagcgtcagaatg

SEQ ID NO: 5325195 - DNA, 25 bp, Homo sapien
cctccggagcgtcagaatgctcact

SEQ ID NO: 5325196 - DNA, 25 bp, Homo sapien
gccggtgcagtcttcttcctccgga

SEQ ID NO: 5325197 - DNA, 25 bp, Homo sapien
gtggccgcccctcgccggtgcagtc

SEQ ID NO: 5325198 - DNA, 25 bp, Homo sapien
agaatacatgttttgggccgggcgc

SEQ ID NO: 5325199 - DNA, 25 bp, Homo sapien
ccacgccatggctaggactttttaa

SEQ ID NO: 5325200 - DNA, 25 bp, Homo sapien
gaaactgggtgcataactcctcgct

SEQ ID NO: 5325201 - DNA, 25 bp, Homo sapien
gctttaggtagctcatgtaagtgga

SEQ ID NO: 5325202 - DNA, 25 bp, Homo sapien
acctgtgaggaagctaataaactgc

SEQ ID NO: 5325203 - DNA, 25 bp, Homo sapien
agagatttcagcagggcgagtccag

SEQ ID NO: 5325204 - DNA, 25 bp, Homo sapien
ggtgctacccaccatgacaggaata

SEQ ID NO: 5325205 - DNA, 25 bp, Homo sapien
tagtgctagccatgaaccaactgtg

SEQ ID NO: 5325206 - DNA, 25 bp, Homo sapien
ggtgaaatctgtcttgtaactagga

SEQ ID NO: 5325207 - DNA, 25 bp, Homo sapien
gttctgccaattgttagcgaggatg

SEQ ID NO: 5325208 - DNA, 25 bp, Homo sapien
gaggttctctatgttaggccagcat

SEQ ID NO: 5325209 - DNA, 25 bp, Homo sapien
cactgtcagagggactcaggtggat

SEQ ID NO: 5325210 - DNA, 25 bp, Homo sapien
agactcacgtctcaacagccgggag

SEQ ID NO: 5325211 - DNA, 25 bp, Homo sapien
tatccacttcttgtgctagcagggc

SEQ ID NO: 5325212 - DNA, 25 bp, Homo sapien
caagctgattcgtaagggcagccca

SEQ ID NO: 5325213 - DNA, 25 bp, Homo sapien
gatttggcttcaatgacagcgtcca

SEQ ID NO: 5325214 - DNA, 25 bp, Homo sapien
gaagccagagttttaaggccttaca

SEQ ID NO: 5325215 - DNA, 25 bp, Homo sapien
gctgtgagcctcggcagactcgcgt

SEQ ID NO: 5325216 - DNA, 25 bp, Homo sapien
tcagacacccggctacgaaggattt

SEQ ID NO: 5325217 - DNA, 25 bp, Homo sapien
ctcgcgtctcaacggcggggagttt

SEQ ID NO: 5325218 - DNA, 25 bp, Homo sapien
tggtacacaattacagaggtctccc

SEQ ID NO: 5325219 - DNA, 25 bp, Homo sapien
ggttctctccctatactgcaagaag

SEQ ID NO: 5325220 - DNA, 25 bp, Homo sapien
gaatattccacctcaagggctcgca

SEQ ID NO: 5325221 - DNA, 25 bp, Homo sapien
gagggcctgtgcaaggactgctacc

SEQ ID NO: 5325222 - DNA, 25 bp, Homo sapien
tcaagattcttggtcctccctcccc

SEQ ID NO: 5325223 - DNA, 25 bp, Homo sapien
cttgggagagtgctatgctgtaagc

SEQ ID NO: 5325224 - DNA, 25 bp, Homo sapien
ttcttgggagagtgctatgctgtaa

SEQ ID NO: 5325225 - DNA, 25 bp, Homo sapien
tcttgggagagtgctatgctgtaag

SEQ ID NO: 5325226 - DNA, 25 bp, Homo sapien
gagaaattaaatggagctgtcactt

SEQ ID NO: 5325227 - DNA, 25 bp, Homo sapien
aggaaaggagaaattaaatggagct

SEQ ID NO: 5325228 - DNA, 25 bp, Homo sapien
aaaggagaaattaaatggagctgtc

SEQ ID NO: 5325229 - DNA, 25 bp, Homo sapien
gaaattaaatggagctgtcacttcc

SEQ ID NO: 5325230 - DNA, 25 bp, Homo sapien
tcagtggccacttgagagcttgatg

SEQ ID NO: 5325231 - DNA, 25 bp, Homo sapien
gcttgatgagggttctctgtaactg

SEQ ID NO: 5325232 - DNA, 25 bp, Homo sapien
gatgagggttctctgtaactggggg

SEQ ID NO: 5325233 - DNA, 25 bp, Homo sapien
agagcttgatgagggttctctgtaa

SEQ ID NO: 5325234 - DNA, 25 bp, Homo sapien
tgaaatcccacccaatatagccggg

SEQ ID NO: 5325235 - DNA, 25 bp, Homo sapien
tcctgggaatggtggacaagacccc

SEQ ID NO: 5325236 - DNA, 25 bp, Homo sapien
ggatctctgaggaacacccaaaaca

SEQ ID NO: 5325237 - DNA, 25 bp, Homo sapien
gaggaattgccctccaccaaaggca

SEQ ID NO: 5325238 - DNA, 25 bp, Homo sapien
ccctttctcctatgggcaggaagct

SEQ ID NO: 5325239 - DNA, 25 bp, Homo sapien
caagggcaccaccttgtgattttac

SEQ ID NO: 5325240 - DNA, 25 bp, Homo sapien
tgagatttggagacaagggcaccac

SEQ ID NO: 5325241 - DNA, 25 bp, Homo sapien
cctttctcctatgggcaggaagctc

SEQ ID NO: 5325242 - DNA, 25 bp, Homo sapien
gaggggttgggggagagagagtgag

SEQ ID NO: 5325243 - DNA, 25 bp, Homo sapien
aggaggggttgggggagagagagtg

SEQ ID NO: 5325244 - DNA, 25 bp, Homo sapien
aggggttgggggagagagagtgaga

SEQ ID NO: 5325245 - DNA, 25 bp, Homo sapien
ggaggggttgggggagagagagtga

SEQ ID NO: 5325246 - DNA, 25 bp, Homo sapien
tcaaagccttgattatgatataaca

SEQ ID NO: 5325247 - DNA, 25 bp, Homo sapien
taatgccacatcaagttcaaagcct

SEQ ID NO: 5325248 - DNA, 25 bp, Homo sapien
gattatgatataacactgggcattc

SEQ ID NO: 5325249 - DNA, 25 bp, Homo sapien
ggaagaacatgtaatgccacatcaa

SEQ ID NO: 5325250 - DNA, 25 bp, Homo sapien
caccttgggcaagtctaagacgata

SEQ ID NO: 5325251 - DNA, 25 bp, Homo sapien
aaaacgactgttgccagattgcctg

SEQ ID NO: 5325252 - DNA, 25 bp, Homo sapien
tatcctggcatgtaacacctctgtg

SEQ ID NO: 5325253 - DNA, 25 bp, Homo sapien
cagtctctaactgcgacaccttggg

SEQ ID NO: 5325254 - DNA, 25 bp, Homo sapien
ccactgtgctgttgttggctctctc

SEQ ID NO: 5325255 - DNA, 25 bp, Homo sapien
gggccactgtgctgttgttggctct

SEQ ID NO: 5325256 - DNA, 25 bp, Homo sapien
tgtaggttccttcagtccaagggtc

SEQ ID NO: 5325257 - DNA, 25 bp, Homo sapien
caagggtcacggtccggggccactg

SEQ ID NO: 5325258 - DNA, 25 bp, Homo sapien
ctggaaaatagttgcgtccgttgga

SEQ ID NO: 5325259 - DNA, 25 bp, Homo sapien
gtagtgacagcttctagggctgatc

SEQ ID NO: 5325260 - DNA, 25 bp, Homo sapien
ttgagctcctgctcggacactgctg

SEQ ID NO: 5325261 - DNA, 25 bp, Homo sapien
ggcccaggagccagactgtaaatgg

SEQ ID NO: 5325262 - DNA, 25 bp, Homo sapien
taggagacaacacagcaggcagccc

SEQ ID NO: 5325263 - DNA, 25 bp, Homo sapien
ctaggagacaacacagcaggcagcc

SEQ ID NO: 5325264 - DNA, 25 bp, Homo sapien
caggcagcccaggacagttggctac

SEQ ID NO: 5325265 - DNA, 25 bp, Homo sapien
cagcaggcagcccaggacagttggc

SEQ ID NO: 5325266 - DNA, 25 bp, Homo sapien
cagaggtagcaatctatacaaatat

SEQ ID NO: 5325267 - DNA, 25 bp, Homo sapien
gggtcctgttctggggacagtccca

SEQ ID NO: 5325268 - DNA, 25 bp, Homo sapien
ggacagtcccagaggtagcaatcta

SEQ ID NO: 5325269 - DNA, 25 bp, Homo sapien
tacaaatataatgtatgactgcctt

SEQ ID NO: 5325270 - DNA, 25 bp, Homo sapien
aacacctaatggtcacagtgtgcta

SEQ ID NO: 5325271 - DNA, 25 bp, Homo sapien
gcacccccgctccacttagtgcaaa

SEQ ID NO: 5325272 - DNA, 25 bp, Homo sapien
gtggcacccccgctccacttagtgc

SEQ ID NO: 5325273 - DNA, 25 bp, Homo sapien
acctaatggtcacagtgtgctacag

SEQ ID NO: 5325274 - DNA, 25 bp, Homo sapien
aaacccagtcattatgcataactgc

SEQ ID NO: 5325275 - DNA, 25 bp, Homo sapien
atgtgctgacatataacaatgtttg

SEQ ID NO: 5325276 - DNA, 25 bp, Homo sapien
tgaaaacccagtcattatgcataac

SEQ ID NO: 5325277 - DNA, 25 bp, Homo sapien
tgctgacatataacaatgtttgagg

SEQ ID NO: 5325278 - DNA, 25 bp, Homo sapien
gtgagagttcccagcactggctggc

SEQ ID NO: 5325279 - DNA, 25 bp, Homo sapien
agtgtccctattctccggcccccag

SEQ ID NO: 5325280 - DNA, 25 bp, Homo sapien
cagtgtccctattctccggccccca

SEQ ID NO: 5325281 - DNA, 25 bp, Homo sapien
ccaggtgagagttcccagcactggc

SEQ ID NO: 5325282 - DNA, 25 bp, Homo sapien
ggcccggagactcgattcctcagag

SEQ ID NO: 5325283 - DNA, 25 bp, Homo sapien
tctgcagcgtcaccccggaagtctt

SEQ ID NO: 5325284 - DNA, 25 bp, Homo sapien
catctggctggggtacacgaatcaa

SEQ ID NO: 5325285 - DNA, 25 bp, Homo sapien
tgctggggtctctcgtccatagctg

SEQ ID NO: 5325286 - DNA, 25 bp, Homo sapien
gcctggacaccgatccaagcattca

SEQ ID NO: 5325287 - DNA, 25 bp, Homo sapien
ccgattactaagcacgaccgggcag

SEQ ID NO: 5325288 - DNA, 25 bp, Homo sapien
tttcctctcccgcagacttggagct

SEQ ID NO: 5325289 - DNA, 25 bp, Homo sapien
gaatttgagatttccgctgtctctg

SEQ ID NO: 5325290 - DNA, 25 bp, Homo sapien
cactggagacttcatggtagcaatt

SEQ ID NO: 5325291 - DNA, 25 bp, Homo sapien
acacagccataggaccccacaggac

SEQ ID NO: 5325292 - DNA, 25 bp, Homo sapien
tgtgggtgagtaacggagacttcac

SEQ ID NO: 5325293 - DNA, 25 bp, Homo sapien
ggaggggtctttatgtagcacagcc

SEQ ID NO: 5325294 - DNA, 25 bp, Homo sapien
caggcatagtcggattacaggatca

SEQ ID NO: 5325295 - DNA, 25 bp, Homo sapien
acaggatcagagcatagccatccag

SEQ ID NO: 5325296 - DNA, 25 bp, Homo sapien
tttggaaggtagatccacattcagg

SEQ ID NO: 5325297 - DNA, 25 bp, Homo sapien
gatcagagcatagccatccagattc

SEQ ID NO: 5325298 - DNA, 25 bp, Homo sapien
gactgttccgcaggaaggtggaacc

SEQ ID NO: 5325299 - DNA, 25 bp, Homo sapien
ccatgcaagctgatagacgactgtt

SEQ ID NO: 5325300 - DNA, 25 bp, Homo sapien
aggtggtccctgcttgtccatgcat

SEQ ID NO: 5325301 - DNA, 25 bp, Homo sapien
tcctagtggatagttcactgacctg

SEQ ID NO: 5325302 - DNA, 25 bp, Homo sapien
aacagaggaaggtgcgaggagtgct

SEQ ID NO: 5325303 - DNA, 25 bp, Homo sapien
gccagtttcttgtatggacaacaga

SEQ ID NO: 5325304 - DNA, 25 bp, Homo sapien
cacctgggagttggattcagcattc

SEQ ID NO: 5325305 - DNA, 25 bp, Homo sapien
ttggagcctctcacaaaaagtctgc

SEQ ID NO: 5325306 - DNA, 25 bp, Homo sapien
agcacatgggctgtcgtacacgcga

SEQ ID NO: 5325307 - DNA, 25 bp, Homo sapien
tcgtacacgcgaggggccagggttc

SEQ ID NO: 5325308 - DNA, 25 bp, Homo sapien
cacatgggctgtcgtacacgcgagg

SEQ ID NO: 5325309 - DNA, 25 bp, Homo sapien
caagcacatgggctgtcgtacacgc

SEQ ID NO: 5325310 - DNA, 25 bp, Homo sapien
ccatttgatcagaggcctggcactg

SEQ ID NO: 5325311 - DNA, 25 bp, Homo sapien
tgcttgcttcaatgccaactggccc

SEQ ID NO: 5325312 - DNA, 25 bp, Homo sapien
ctttgccttagcgttgccatgctgc

SEQ ID NO: 5325313 - DNA, 25 bp, Homo sapien
ggatgcggttcccagactggccttg

SEQ ID NO: 5325314 - DNA, 25 bp, Homo sapien
tgggcagaccaagaatgactacatg

SEQ ID NO: 5325315 - DNA, 25 bp, Homo sapien
actacatgtaggaatggaacctcag

SEQ ID NO: 5325316 - DNA, 25 bp, Homo sapien
tttaagtgcccagtatgcgtcaatc

SEQ ID NO: 5325317 - DNA, 25 bp, Homo sapien
cacagcagaggtgaaatgccccaga

SEQ ID NO: 5325318 - DNA, 25 bp, Homo sapien
tcagagagttcagatcccgagtgtg

SEQ ID NO: 5325319 - DNA, 25 bp, Homo sapien
cagcatggcccatctatcagagagt

SEQ ID NO: 5325320 - DNA, 25 bp, Homo sapien
ttggagctcccaacaaactctcagg

SEQ ID NO: 5325321 - DNA, 25 bp, Homo sapien
tctcaggcagcctcaagttggcagc

SEQ ID NO: 5325322 - DNA, 25 bp, Homo sapien
cattctttttgtcaaaaaattcctg

SEQ ID NO: 5325323 - DNA, 25 bp, Homo sapien
tctttttgtcaaaaaattcctgtga

SEQ ID NO: 5325324 - DNA, 25 bp, Homo sapien
tttgtcaaaaaattcctgtgatcac

SEQ ID NO: 5325325 - DNA, 25 bp, Homo sapien
tttttgtcaaaaaattcctgtgatc

SEQ ID NO: 5325326 - DNA, 25 bp, Homo sapien
agctgcatagcaagggggtcttcca

SEQ ID NO: 5325327 - DNA, 25 bp, Homo sapien
catttcccataggaagctgcatagc

SEQ ID NO: 5325328 - DNA, 25 bp, Homo sapien
gctgcatagcaagggggtcttccac

SEQ ID NO: 5325329 - DNA, 25 bp, Homo sapien
gggtcttcctgttccaagacgatga

SEQ ID NO: 5325330 - DNA, 25 bp, Homo sapien
tcttcctgttccaagacgatgatgg

SEQ ID NO: 5325331 - DNA, 25 bp, Homo sapien
gttccaagacgatgatgggatctgg

SEQ ID NO: 5325332 - DNA, 25 bp, Homo sapien
cctgttccaagacgatgatgggatc

SEQ ID NO: 5325333 - DNA, 25 bp, Homo sapien
gggaggaagagtgccacagaggcag

SEQ ID NO: 5325334 - DNA, 25 bp, Homo sapien
gtgccacagaggcagagacctgcac

SEQ ID NO: 5325335 - DNA, 25 bp, Homo sapien
gccacagaggcagagacctgcacac

SEQ ID NO: 5325336 - DNA, 25 bp, Homo sapien
cacagaggcagagacctgcacacac

SEQ ID NO: 5325337 - DNA, 25 bp, Homo sapien
gcagtgccccagggaccttaaggcc

SEQ ID NO: 5325338 - DNA, 25 bp, Homo sapien
gtttgcctgtgcctaggatcaggtt

SEQ ID NO: 5325339 - DNA, 25 bp, Homo sapien
gcctgtgcctaggatcaggttcctc

SEQ ID NO: 5325340 - DNA, 25 bp, Homo sapien
ggagcaactgcacggttggctgttt

SEQ ID NO: 5325341 - DNA, 25 bp, Homo sapien
aactgcacggttggctgtttgcctg

SEQ ID NO: 5325342 - DNA, 25 bp, Homo sapien
gcgtgagtcatcactagcacatatc

SEQ ID NO: 5325343 - DNA, 25 bp, Homo sapien
agtcatcactagcacatatctccag

SEQ ID NO: 5325344 - DNA, 25 bp, Homo sapien
agtacattcacattagcgtgagtca

SEQ ID NO: 5325345 - DNA, 25 bp, Homo sapien
tcacattagcgtgagtcatcactag

SEQ ID NO: 5325346 - DNA, 25 bp, Homo sapien
tatgagcatgagctatggcagagac

SEQ ID NO: 5325347 - DNA, 25 bp, Homo sapien
acaaagagctttacccctggatcca

SEQ ID NO: 5325348 - DNA, 25 bp, Homo sapien
tctgttgctatacaccacaaagagc

SEQ ID NO: 5325349 - DNA, 25 bp, Homo sapien
cctggatccacccatgtaaggtttc

SEQ ID NO: 5325350 - DNA, 25 bp, Homo sapien
tcttaactcatattcctgtaccttt

SEQ ID NO: 5325351 - DNA, 25 bp, Homo sapien
atacctatatcggtgtgtttctgga

SEQ ID NO: 5325352 - DNA, 25 bp, Homo sapien
tgtacctttagacctttctccagga

SEQ ID NO: 5325353 - DNA, 25 bp, Homo sapien
catagataccagtgcttgagtcata

SEQ ID NO: 5325354 - DNA, 25 bp, Homo sapien
tggcaacactcagaaacactcaggt

SEQ ID NO: 5325355 - DNA, 25 bp, Homo sapien
ttggatgataccacccacactgagg

SEQ ID NO: 5325356 - DNA, 25 bp, Homo sapien
cactgagggtgagtcttcttctccc

SEQ ID NO: 5325357 - DNA, 25 bp, Homo sapien
tctagccgtgctgaaagcctattgg

SEQ ID NO: 5325358 - DNA, 25 bp, Homo sapien
actctaaacgctgtgagggcaagcg

SEQ ID NO: 5325359 - DNA, 25 bp, Homo sapien
tggagacaccctgggttaacaggct

SEQ ID NO: 5325360 - DNA, 25 bp, Homo sapien
tcatgtccgtgggagaaaaattcaa

SEQ ID NO: 5325361 - DNA, 25 bp, Homo sapien
taacaggctaaggtgtaatgcagac

SEQ ID NO: 5325362 - DNA, 25 bp, Homo sapien
tctcacgcatgggtctgtgggttga

SEQ ID NO: 5325363 - DNA, 25 bp, Homo sapien
cacttagtccactagccaaggagct

SEQ ID NO: 5325364 - DNA, 25 bp, Homo sapien
gaacaatactttagcctatcacggg

SEQ ID NO: 5325365 - DNA, 25 bp, Homo sapien
caggagtccacatgcgattgtgtga

SEQ ID NO: 5325366 - DNA, 25 bp, Homo sapien
taaggaaccgttcaggatggccaaa

SEQ ID NO: 5325367 - DNA, 25 bp, Homo sapien
tcccttgtaactcgcgtggccaaag

SEQ ID NO: 5325368 - DNA, 25 bp, Homo sapien
tgttttctcgccagggctcaggcct

SEQ ID NO: 5325369 - DNA, 25 bp, Homo sapien
ggttacgtggcagaaaccaactgga

SEQ ID NO: 5325370 - DNA, 25 bp, Homo sapien
atccccgaactcctaggcttcagcg

SEQ ID NO: 5325371 - DNA, 25 bp, Homo sapien
ccccgaactcctaggcttcagcgat

SEQ ID NO: 5325372 - DNA, 25 bp, Homo sapien
cccgaactcctaggcttcagcgatc

SEQ ID NO: 5325373 - DNA, 25 bp, Homo sapien
tgcatccccgaactcctaggcttca

SEQ ID NO: 5325374 - DNA, 25 bp, Homo sapien
agaatcatagtctcttcctgagcag

SEQ ID NO: 5325375 - DNA, 25 bp, Homo sapien
aacaatgcttactggttgtgggaca

SEQ ID NO: 5325376 - DNA, 25 bp, Homo sapien
gactttcagaaccatgtgtgaccta

SEQ ID NO: 5325377 - DNA, 25 bp, Homo sapien
gaaatggttgggcaccaaagagaca

SEQ ID NO: 5325378 - DNA, 25 bp, Homo sapien
tggccctgcagtaagaagcgtgtct

SEQ ID NO: 5325379 - DNA, 25 bp, Homo sapien
gacttaagactcattggccgaccat

SEQ ID NO: 5325380 - DNA, 25 bp, Homo sapien
ggttttcagtccacagagtcggtag

SEQ ID NO: 5325381 - DNA, 25 bp, Homo sapien
tagctccaagccaagcaagtttgtg

SEQ ID NO: 5325382 - DNA, 25 bp, Homo sapien
gctgtactgtaagctccgggtcggt

SEQ ID NO: 5325383 - DNA, 25 bp, Homo sapien
gctagaggtgccacaaaagtgcgaa

SEQ ID NO: 5325384 - DNA, 25 bp, Homo sapien
gagcccaggcgattctatagtaaca

SEQ ID NO: 5325385 - DNA, 25 bp, Homo sapien
tatattcaaacgtcctgccatccgc

SEQ ID NO: 5325386 - DNA, 25 bp, Homo sapien
caccctgtggctaagtatcaaaaaa

SEQ ID NO: 5325387 - DNA, 25 bp, Homo sapien
tttctcctcagaatggccagttggc

SEQ ID NO: 5325388 - DNA, 25 bp, Homo sapien
gccagttggcctagaatcattaagc

SEQ ID NO: 5325389 - DNA, 25 bp, Homo sapien
cattaagccaaagtgtatgcctgac

SEQ ID NO: 5325390 - DNA, 25 bp, Homo sapien
tggattctagttattcacatgcttc

SEQ ID NO: 5325391 - DNA, 25 bp, Homo sapien
ggcatatcacgaaactcattttggg

SEQ ID NO: 5325392 - DNA, 25 bp, Homo sapien
tctttgggcacaaaaccatactcca

SEQ ID NO: 5325393 - DNA, 25 bp, Homo sapien
gcatctgccccaggccttaaaattc

SEQ ID NO: 5325394 - DNA, 25 bp, Homo sapien
tcataggctattggactgagggtct

SEQ ID NO: 5325395 - DNA, 25 bp, Homo sapien
caagtgggctgcagtctcacatgaa

SEQ ID NO: 5325396 - DNA, 25 bp, Homo sapien
tcctgctagtgaaccagagactcag

SEQ ID NO: 5325397 - DNA, 25 bp, Homo sapien
tgacagcacgtagtatgcagtggcc

SEQ ID NO: 5325398 - DNA, 25 bp, Homo sapien
taatccaccgtctccatagatttgc

SEQ ID NO: 5325399 - DNA, 25 bp, Homo sapien
caatcaaatttagttcattacccct

SEQ ID NO: 5325400 - DNA, 25 bp, Homo sapien
aaatgtccgtctacattctgtagca

SEQ ID NO: 5325401 - DNA, 25 bp, Homo sapien
cattagtggtcacttcctattcccc

SEQ ID NO: 5325402 - DNA, 25 bp, Homo sapien
ggccctagcgatcctaccatgttag

SEQ ID NO: 5325403 - DNA, 25 bp, Homo sapien
gggctgtattatttgacatactttt

SEQ ID NO: 5325404 - DNA, 25 bp, Homo sapien
cttgcatacatatataggagtggaa

SEQ ID NO: 5325405 - DNA, 25 bp, Homo sapien
ataatgctgcaataaccaatcatgt

SEQ ID NO: 5325406 - DNA, 25 bp, Homo sapien
cctgggcaacacagcaagaccccat

SEQ ID NO: 5325407 - DNA, 25 bp, Homo sapien
gttcaagcccagcctgggcaacaca

SEQ ID NO: 5325408 - DNA, 25 bp, Homo sapien
gcgggaggatcgtctgagtccagga

SEQ ID NO: 5325409 - DNA, 25 bp, Homo sapien
cgaggcgggaggatcgtctgagtcc

SEQ ID NO: 5325410 - DNA, 25 bp, Homo sapien
tgaacgaatgtacgcatgactcctg

SEQ ID NO: 5325411 - DNA, 25 bp, Homo sapien
tcttgcagacgcgaatgtaaacaga

SEQ ID NO: 5325412 - DNA, 25 bp, Homo sapien
ttcggagagcctcgtgactgcggca

SEQ ID NO: 5325413 - DNA, 25 bp, Homo sapien
tggagcgaccttcacgagggaaagc

SEQ ID NO: 5325414 - DNA, 25 bp, Homo sapien
gactttggccacactactaacctag

SEQ ID NO: 5325415 - DNA, 25 bp, Homo sapien
ataatttgtttgcacccctcccttg

SEQ ID NO: 5325416 - DNA, 25 bp, Homo sapien
tatccagtctaagaaagtaactacc

SEQ ID NO: 5325417 - DNA, 25 bp, Homo sapien
aagatcgcaccctttagtgagaggt

SEQ ID NO: 5325418 - DNA, 25 bp, Homo sapien
tgattgagggtttcatctgccagga

SEQ ID NO: 5325419 - DNA, 25 bp, Homo sapien
tgaggctcgaagtcatacatctgga

SEQ ID NO: 5325420 - DNA, 25 bp, Homo sapien
tagtgttcagttaccactggcgtgt

SEQ ID NO: 5325421 - DNA, 25 bp, Homo sapien
tctcagaggtaagggactgttttcc

SEQ ID NO: 5325422 - DNA, 25 bp, Homo sapien
cagagccccttggaagtgtcagaca

SEQ ID NO: 5325423 - DNA, 25 bp, Homo sapien
tgatgacgagtatcttgccctcccc

SEQ ID NO: 5325424 - DNA, 25 bp, Homo sapien
cgaaggaccggctgactataggcaa

SEQ ID NO: 5325425 - DNA, 25 bp, Homo sapien
tccttgccagctaggttggaccggt

SEQ ID NO: 5325426 - DNA, 25 bp, Homo sapien
accacagagttgctactgccaatgc

SEQ ID NO: 5325427 - DNA, 25 bp, Homo sapien
aagacaccttggagacttaactggt

SEQ ID NO: 5325428 - DNA, 25 bp, Homo sapien
tctgcacaggtacacttttccagta

SEQ ID NO: 5325429 - DNA, 25 bp, Homo sapien
gttactgataactttgcaccaccac

SEQ ID NO: 5325430 - DNA, 25 bp, Homo sapien
gataaaataagacgtgttgccttcc

SEQ ID NO: 5325431 - DNA, 25 bp, Homo sapien
tcactcctagtctcccttggaagag

SEQ ID NO: 5325432 - DNA, 25 bp, Homo sapien
ttctccacaaagagcgtgtagcttt

SEQ ID NO: 5325433 - DNA, 25 bp, Homo sapien
taccaagggctggtaggagattccg

SEQ ID NO: 5325434 - DNA, 25 bp, Homo sapien
ctagtaagatgctgccagcagcatt

SEQ ID NO: 5325435 - DNA, 25 bp, Homo sapien
tagtaagatgctgccagcagcattt

SEQ ID NO: 5325436 - DNA, 25 bp, Homo sapien
catagaagcaaatcttaaggcatgc

SEQ ID NO: 5325437 - DNA, 25 bp, Homo sapien
taaaaatgaagtgcacggcatggca

SEQ ID NO: 5325438 - DNA, 25 bp, Homo sapien
tgaatagatccaccaagcacgccta

SEQ ID NO: 5325439 - DNA, 25 bp, Homo sapien
gtaatgtttccgctaactcaccaag

SEQ ID NO: 5325440 - DNA, 25 bp, Homo sapien
gaataccttagtttgcattgtgcac

SEQ ID NO: 5325441 - DNA, 25 bp, Homo sapien
gaagttggttaaatccctacacagc

SEQ ID NO: 5325442 - DNA, 25 bp, Homo sapien
ggaaacaacgtttgacctcagtcac

SEQ ID NO: 5325443 - DNA, 25 bp, Homo sapien
gaagcccctctaggtcatgttattg

SEQ ID NO: 5325444 - DNA, 25 bp, Homo sapien
cagaagactaaacctgacatctaaa

SEQ ID NO: 5325445 - DNA, 25 bp, Homo sapien
tataaaccagcacacaaaggtttaa

SEQ ID NO: 5325446 - DNA, 25 bp, Homo sapien
ttataaaccagcacacaaaggttta

SEQ ID NO: 5325447 - DNA, 25 bp, Homo sapien
tgacatctaaacatgccaatataaa

SEQ ID NO: 5325448 - DNA, 25 bp, Homo sapien
aatctgttgtagtgcagctacatac

SEQ ID NO: 5325449 - DNA, 25 bp, Homo sapien
gctgtcttgagtcaagggaataaaa

SEQ ID NO: 5325450 - DNA, 25 bp, Homo sapien
caatctctgacctttgtggagacgg

SEQ ID NO: 5325451 - DNA, 25 bp, Homo sapien
ctgaaaatgaagttagctgtcttga

SEQ ID NO: 5325452 - DNA, 25 bp, Homo sapien
ttgggttcagattgcaaattcattg

SEQ ID NO: 5325453 - DNA, 25 bp, Homo sapien
ctgtgagaaaaggatggaggcaaat

SEQ ID NO: 5325454 - DNA, 25 bp, Homo sapien
tgttgctccgggacccattcgcttt

SEQ ID NO: 5325455 - DNA, 25 bp, Homo sapien
gcattcttagcactggtttccaaaa

SEQ ID NO: 5325456 - DNA, 25 bp, Homo sapien
tctcagctgccatcgtcatgaaaga

SEQ ID NO: 5325457 - DNA, 25 bp, Homo sapien
gactgttctacattcgttgcattct

SEQ ID NO: 5325458 - DNA, 25 bp, Homo sapien
gaataatgaggcacaattaacactg

SEQ ID NO: 5325459 - DNA, 25 bp, Homo sapien
catccataatggagcgtgaggaact

SEQ ID NO: 5325460 - DNA, 25 bp, Homo sapien
gaactaagttcattggatccaaaca

SEQ ID NO: 5325461 - DNA, 25 bp, Homo sapien
cagatgctacacaaattgtcactgt

SEQ ID NO: 5325462 - DNA, 25 bp, Homo sapien
ctgcagaacccatacataattcaac

SEQ ID NO: 5325463 - DNA, 25 bp, Homo sapien
actgcagaacccatacataattcaa

SEQ ID NO: 5325464 - DNA, 25 bp, Homo sapien
taacgatctatttcctgcagccact

SEQ ID NO: 5325465 - DNA, 25 bp, Homo sapien
gacattttcactggcataacgatct

SEQ ID NO: 5325466 - DNA, 25 bp, Homo sapien
ttcactggcataacgatctatttcc

SEQ ID NO: 5325467 - DNA, 25 bp, Homo sapien
cctgcagccactgtttaacattatt

SEQ ID NO: 5325468 - DNA, 25 bp, Homo sapien
gccattgcagctggccgtaaacaga

SEQ ID NO: 5325469 - DNA, 25 bp, Homo sapien
gaaacatcgttcctgacctaacaga

SEQ ID NO: 5325470 - DNA, 25 bp, Homo sapien
taacaaagagctagtgagacaactc

SEQ ID NO: 5325471 - DNA, 25 bp, Homo sapien
taaactgcaacgcaggcaaacccaa

SEQ ID NO: 5325472 - DNA, 25 bp, Homo sapien
taacaccaagaacacagtataagcc

SEQ ID NO: 5325473 - DNA, 25 bp, Homo sapien
gacaagttctaattaccaggccata

SEQ ID NO: 5325474 - DNA, 25 bp, Homo sapien
cacttttggcaattctgatggacaa

SEQ ID NO: 5325475 - DNA, 25 bp, Homo sapien
gtataagccaagcaactcacgattc

SEQ ID NO: 5325476 - DNA, 25 bp, Homo sapien
tcatacacaactatgatgccatggg

SEQ ID NO: 5325477 - DNA, 25 bp, Homo sapien
cacaactatgatgccatgggctcct

SEQ ID NO: 5325478 - DNA, 25 bp, Homo sapien
ggtgattgttcgaaatctttcctgg

SEQ ID NO: 5325479 - DNA, 25 bp, Homo sapien
actggaggtgattgttcgaaatctt

SEQ ID NO: 5325480 - DNA, 25 bp, Homo sapien
tgtgtttaggaatgccactggccga

SEQ ID NO: 5325481 - DNA, 25 bp, Homo sapien
taaattgcacggtaataagcacctg

SEQ ID NO: 5325482 - DNA, 25 bp, Homo sapien
taaaagcactggagggacctaattc

SEQ ID NO: 5325483 - DNA, 25 bp, Homo sapien
tggccgaaagcccttgaacacagaa

SEQ ID NO: 5325484 - DNA, 25 bp, Homo sapien
ccaccatgcctggctgaattttgtg

SEQ ID NO: 5325485 - DNA, 25 bp, Homo sapien
cctgagtaccttgaactacagggac

SEQ ID NO: 5325486 - DNA, 25 bp, Homo sapien
cctggctgaattttgtgtttttggt

SEQ ID NO: 5325487 - DNA, 25 bp, Homo sapien
gagtaccttgaactacagggacaca

SEQ ID NO: 5325488 - DNA, 25 bp, Homo sapien
acgacgcccggacagccactgcgcc

SEQ ID NO: 5325489 - DNA, 25 bp, Homo sapien
cacgacgcccggacagccactgcgc

SEQ ID NO: 5325490 - DNA, 25 bp, Homo sapien
agcgtgaaccacgacgcccggacag

SEQ ID NO: 5325491 - DNA, 25 bp, Homo sapien
ataagcgtgaaccacgacgcccgga

SEQ ID NO: 5325492 - DNA, 25 bp, Homo sapien
tggaactagctatttcgaaaaaatg

SEQ ID NO: 5325493 - DNA, 25 bp, Homo sapien
tgtgtaaaatggaactagctatttc

SEQ ID NO: 5325494 - DNA, 25 bp, Homo sapien
gcaacatgcctagctgaagttatgt

SEQ ID NO: 5325495 - DNA, 25 bp, Homo sapien
gcctagctgaagttatgtgtaaaat

SEQ ID NO: 5325496 - DNA, 25 bp, Homo sapien
gagactgtacttatatcgtgggaaa

SEQ ID NO: 5325497 - DNA, 25 bp, Homo sapien
gaaaactaaatccttgcaagtccta

SEQ ID NO: 5325498 - DNA, 25 bp, Homo sapien
cagacaaagatgaaagacagtgtcc

SEQ ID NO: 5325499 - DNA, 25 bp, Homo sapien
caaaatgaggccttcaggcatggaa

SEQ ID NO: 5325500 - DNA, 25 bp, Homo sapien
ttttccccagagacacaaacccatg

SEQ ID NO: 5325501 - DNA, 25 bp, Homo sapien
ctgggtctcagggttacttcggcct

SEQ ID NO: 5325502 - DNA, 25 bp, Homo sapien
caaagggctttcacacgtattgtca

SEQ ID NO: 5325503 - DNA, 25 bp, Homo sapien
tagtaaatcaggtgtcatcacacac

SEQ ID NO: 5325504 - DNA, 25 bp, Homo sapien
tgaagaatctcttcctagggttcct

SEQ ID NO: 5325505 - DNA, 25 bp, Homo sapien
tagggttcctttaatgttccatgca

SEQ ID NO: 5325506 - DNA, 25 bp, Homo sapien
tgcagtgtaggacaaggtaaacttg

SEQ ID NO: 5325507 - DNA, 25 bp, Homo sapien
tctacagagttggtgcacactatct

SEQ ID NO: 5325508 - DNA, 25 bp, Homo sapien
caaaaaaattactagccaagtcact

SEQ ID NO: 5325509 - DNA, 25 bp, Homo sapien
ttttgttagcatagtaaatatatac

SEQ ID NO: 5325510 - DNA, 25 bp, Homo sapien
acattcaattttgttagcatagtaa

SEQ ID NO: 5325511 - DNA, 25 bp, Homo sapien
tcaaaaaaattactagccaagtcac

SEQ ID NO: 5325512 - DNA, 25 bp, Homo sapien
ttcccgtctaactctatagttctta

SEQ ID NO: 5325513 - DNA, 25 bp, Homo sapien
accaattgtgctgatgtagctttct

SEQ ID NO: 5325514 - DNA, 25 bp, Homo sapien
caattgtgctgatgtagctttctgt

SEQ ID NO: 5325515 - DNA, 25 bp, Homo sapien
gattgttttcccgtctaactctata

SEQ ID NO: 5325516 - DNA, 25 bp, Homo sapien
taatcagcaaaactcttgcgaccca

SEQ ID NO: 5325517 - DNA, 25 bp, Homo sapien
aagtcacccttttgaagtggacaat

SEQ ID NO: 5325518 - DNA, 25 bp, Homo sapien
cagtggtccttatacattcacaagg

SEQ ID NO: 5325519 - DNA, 25 bp, Homo sapien
gcaaactacaaccacgaattccagg

SEQ ID NO: 5325520 - DNA, 25 bp, Homo sapien
caggcgacaaggcatgtctctgtct

SEQ ID NO: 5325521 - DNA, 25 bp, Homo sapien
tccagcccaggcgacaaggcatgtc

SEQ ID NO: 5325522 - DNA, 25 bp, Homo sapien
agcccaggcgacaaggcatgtctct

SEQ ID NO: 5325523 - DNA, 25 bp, Homo sapien
aggcgacaaggcatgtctctgtctc

SEQ ID NO: 5325524 - DNA, 25 bp, Homo sapien
tactattcgtctgcccaaaagcctc

SEQ ID NO: 5325525 - DNA, 25 bp, Homo sapien
tgcctgagccgttactattcgtctg

SEQ ID NO: 5325526 - DNA, 25 bp, Homo sapien
gcccaaaagcctcagttatctctct

SEQ ID NO: 5325527 - DNA, 25 bp, Homo sapien
aaaagcctcagttatctctctctgc

SEQ ID NO: 5325528 - DNA, 25 bp, Homo sapien
cttcattaatatcggcactcatcag

SEQ ID NO: 5325529 - DNA, 25 bp, Homo sapien
aatgcttgcagctacttcccttgaa

SEQ ID NO: 5325530 - DNA, 25 bp, Homo sapien
aaccaagattaaagagccacctatg

SEQ ID NO: 5325531 - DNA, 25 bp, Homo sapien
taggatactgtcaagtggtaaactc

SEQ ID NO: 5325532 - DNA, 25 bp, Homo sapien
gttgataaagactatgaaggacact

SEQ ID NO: 5325533 - DNA, 25 bp, Homo sapien
taaagactatgaaggacactgtgga

SEQ ID NO: 5325534 - DNA, 25 bp, Homo sapien
aaaagtcctttatctgtcagcttca

SEQ ID NO: 5325535 - DNA, 25 bp, Homo sapien
acactgtggattctgttaagtcaaa

SEQ ID NO: 5325536 - DNA, 25 bp, Homo sapien
gacattctgactttataaccatact

SEQ ID NO: 5325537 - DNA, 25 bp, Homo sapien
tcatcaagtcgctttcaacacaggc

SEQ ID NO: 5325538 - DNA, 25 bp, Homo sapien
tgactctgaccaaaagtattagaca

SEQ ID NO: 5325539 - DNA, 25 bp, Homo sapien
taacttgctgcctatattggaactg

SEQ ID NO: 5325540 - DNA, 25 bp, Homo sapien
tgagtcgccaatcagaagtaacttg

SEQ ID NO: 5325541 - DNA, 25 bp, Homo sapien
ctaagaagaaggcaagactttccaa

SEQ ID NO: 5325542 - DNA, 25 bp, Homo sapien
ctgagtcgccaatcagaagtaactt

SEQ ID NO: 5325543 - DNA, 25 bp, Homo sapien
aggcaagactttccaacccctgagt

SEQ ID NO: 5325544 - DNA, 25 bp, Homo sapien
tcatctacgtatacaaggatctagc

SEQ ID NO: 5325545 - DNA, 25 bp, Homo sapien
gacatagctatctgtgggtgtggaa

SEQ ID NO: 5325546 - DNA, 25 bp, Homo sapien
caggcctctttcgttgtgagataca

SEQ ID NO: 5325547 - DNA, 25 bp, Homo sapien
gatgacagcacctcatgttaaaagg

SEQ ID NO: 5325548 - DNA, 25 bp, Homo sapien
gaattgaggctctactgcataccag

SEQ ID NO: 5325549 - DNA, 25 bp, Homo sapien
agcaagtgtgccctctacagcaaga

SEQ ID NO: 5325550 - DNA, 25 bp, Homo sapien
tggacctggaagacccgtacttgaa

SEQ ID NO: 5325551 - DNA, 25 bp, Homo sapien
caaagcctgcatgggtttggacctg

SEQ ID NO: 5325552 - DNA, 25 bp, Homo sapien
aactttctgtctggtgggaactcag

SEQ ID NO: 5325553 - DNA, 25 bp, Homo sapien
ttgtagtgggacatccaagcctttg

SEQ ID NO: 5325554 - DNA, 25 bp, Homo sapien
cacatgtagtaaagcagaaacagcc

SEQ ID NO: 5325555 - DNA, 25 bp, Homo sapien
tctgttaacagaaattataggcccc

SEQ ID NO: 5325556 - DNA, 25 bp, Homo sapien
tcttaatgtgctgaaataatcactg

SEQ ID NO: 5325557 - DNA, 25 bp, Homo sapien
tttcttaatgtgctgaaataatcac

SEQ ID NO: 5325558 - DNA, 25 bp, Homo sapien
catttcttaatgtgctgaaataatc

SEQ ID NO: 5325559 - DNA, 25 bp, Homo sapien
taagcatttcttaatgtgctgaaat

SEQ ID NO: 5325560 - DNA, 25 bp, Homo sapien
tgtgacctcccctaataaaatatcc

SEQ ID NO: 5325561 - DNA, 25 bp, Homo sapien
tatagtaggccagatacccatgtat

SEQ ID NO: 5325562 - DNA, 25 bp, Homo sapien
taacttaaggaacatctggagtaca

SEQ ID NO: 5325563 - DNA, 25 bp, Homo sapien
tattaagataacatactggaagcag

SEQ ID NO: 5325564 - DNA, 25 bp, Homo sapien
ttgtaagcattttgcaagagccatg

SEQ ID NO: 5325565 - DNA, 25 bp, Homo sapien
tatgacagtcagctaaactggtggg

SEQ ID NO: 5325566 - DNA, 25 bp, Homo sapien
gtcactacaagaacactaccctcaa

SEQ ID NO: 5325567 - DNA, 25 bp, Homo sapien
tgcaaaagatttcagcttcaagcca

SEQ ID NO: 5325568 - DNA, 25 bp, Homo sapien
ctttcaacttgacagcaagcttcct

SEQ ID NO: 5325569 - DNA, 25 bp, Homo sapien
agatctatcataggtcccgttcgtt

SEQ ID NO: 5325570 - DNA, 25 bp, Homo sapien
atcataggtcccgttcgtttctctt

SEQ ID NO: 5325571 - DNA, 25 bp, Homo sapien
tctatcataggtcccgttcgtttct

SEQ ID NO: 5325572 - DNA, 25 bp, Homo sapien
tttataggagggcaatggacccggc

SEQ ID NO: 5325573 - DNA, 25 bp, Homo sapien
taaacaactcctccaagacacaact

SEQ ID NO: 5325574 - DNA, 25 bp, Homo sapien
ggcgagctcttaaacaactcctcca

SEQ ID NO: 5325575 - DNA, 25 bp, Homo sapien
cccaggtttttataggagggcaatg

SEQ ID NO: 5325576 - DNA, 25 bp, Homo sapien
aatcccacgcagtcccgaaaagcat

SEQ ID NO: 5325577 - DNA, 25 bp, Homo sapien
gaaaagcatccatattacctgaaac

SEQ ID NO: 5325578 - DNA, 25 bp, Homo sapien
cgcagtcccgaaaagcatccatatt

SEQ ID NO: 5325579 - DNA, 25 bp, Homo sapien
tcccgaaaagcatccatattacctg

SEQ ID NO: 5325580 - DNA, 25 bp, Homo sapien
agctggtttctaccccgaagatcct

SEQ ID NO: 5325581 - DNA, 25 bp, Homo sapien
tgacagctccgcagagtgcgggcgc

SEQ ID NO: 5325582 - DNA, 25 bp, Homo sapien
ttctaccccgaagatcctgacagct

SEQ ID NO: 5325583 - DNA, 25 bp, Homo sapien
gctcaggatttacaagtaaagctgg

SEQ ID NO: 5325584 - DNA, 25 bp, Homo sapien
tccgcgccacgggtaatcgaaagaa

SEQ ID NO: 5325585 - DNA, 25 bp, Homo sapien
tgttccgggagagcaaacgtcttcc

SEQ ID NO: 5325586 - DNA, 25 bp, Homo sapien
tcagctatcgcttccacccaaaatg

SEQ ID NO: 5325587 - DNA, 25 bp, Homo sapien
tacgcgagctgaggacagacagtgc

SEQ ID NO: 5325588 - DNA, 25 bp, Homo sapien
tgaagggttgtcgcccgccccattc

SEQ ID NO: 5325589 - DNA, 25 bp, Homo sapien
ctgaagggttgtcgcccgccccatt

SEQ ID NO: 5325590 - DNA, 25 bp, Homo sapien
gctcctgcctccgttgcggctgttg

SEQ ID NO: 5325591 - DNA, 25 bp, Homo sapien
gtgtcggctcctgcctccgttgcgg

SEQ ID NO: 5325592 - DNA, 25 bp, Homo sapien
tgcctccgttgcggctgttgctgac

SEQ ID NO: 5325593 - DNA, 25 bp, Homo sapien
gagcgtgtcggctcctgcctccgtt

SEQ ID NO: 5325594 - DNA, 25 bp, Homo sapien
ttgcgccaccctggtggcgctggtt

SEQ ID NO: 5325595 - DNA, 25 bp, Homo sapien
tggacggcacggagcggttcttctc

SEQ ID NO: 5325596 - DNA, 25 bp, Homo sapien
gctggtaggaggacgtccgctctaa

SEQ ID NO: 5325597 - DNA, 25 bp, Homo sapien
gacgtccgctctaagaacagaaggg

SEQ ID NO: 5325598 - DNA, 25 bp, Homo sapien
tctttcgtcgtaaatattattcata

SEQ ID NO: 5325599 - DNA, 25 bp, Homo sapien
cataaaatagggtatctgcagcttc

SEQ ID NO: 5325600 - DNA, 25 bp, Homo sapien
cctgtccacagctgacataaaatag

SEQ ID NO: 5325601 - DNA, 25 bp, Homo sapien
aaaatagggtatctgcagcttcagg

SEQ ID NO: 5325602 - DNA, 25 bp, Homo sapien
agaaactaccatttcctagacttgt

SEQ ID NO: 5325603 - DNA, 25 bp, Homo sapien
ctcatctttcagccatgcaccaagt

SEQ ID NO: 5325604 - DNA, 25 bp, Homo sapien
aaactaccatttcctagacttgtgt

SEQ ID NO: 5325605 - DNA, 25 bp, Homo sapien
atctttcagccatgcaccaagttca

SEQ ID NO: 5325606 - DNA, 25 bp, Homo sapien
gctgcatagtgagtttcccttgttg

SEQ ID NO: 5325607 - DNA, 25 bp, Homo sapien
tcttccccagtaacaaagcatctag

SEQ ID NO: 5325608 - DNA, 25 bp, Homo sapien
caaagcatctagagttgatgtgaaa

SEQ ID NO: 5325609 - DNA, 25 bp, Homo sapien
ccgttgcatggagacacttcccttt

SEQ ID NO: 5325610 - DNA, 25 bp, Homo sapien
ctgtgccaggcccactatttatcca

SEQ ID NO: 5325611 - DNA, 25 bp, Homo sapien
tgtgccaggcccactatttatccat

SEQ ID NO: 5325612 - DNA, 25 bp, Homo sapien
ttatgactattatgctcctatggcc

SEQ ID NO: 5325613 - DNA, 25 bp, Homo sapien
actattatgctcctatggccatcca

SEQ ID NO: 5325614 - DNA, 25 bp, Homo sapien
gtacacaaagatttcactactaaag

SEQ ID NO: 5325615 - DNA, 25 bp, Homo sapien
taaagatgcttattgcaatgttgct

SEQ ID NO: 5325616 - DNA, 25 bp, Homo sapien
taaatcattatgatcttttgatcca

SEQ ID NO: 5325617 - DNA, 25 bp, Homo sapien
ccagtgcgcccgacccattatttct

SEQ ID NO: 5325618 - DNA, 25 bp, Homo sapien
gccagagatattttcaacaaaggat

SEQ ID NO: 5325619 - DNA, 25 bp, Homo sapien
tcttgcagtggcgtggaattttcaa

SEQ ID NO: 5325620 - DNA, 25 bp, Homo sapien
aaagctgccagagatattttcaaca

SEQ ID NO: 5325621 - DNA, 25 bp, Homo sapien
ggttggtgaaactggatgtgaaaac

SEQ ID NO: 5325622 - DNA, 25 bp, Homo sapien
gggtcctcactacgttgtctgggct

SEQ ID NO: 5325623 - DNA, 25 bp, Homo sapien
cataatggctcatggtgttgaacct

SEQ ID NO: 5325624 - DNA, 25 bp, Homo sapien
gagtgtatcgtttcataggctgacc

SEQ ID NO: 5325625 - DNA, 25 bp, Homo sapien
tatggtaagtgcacatcagttgtac

SEQ ID NO: 5325626 - DNA, 25 bp, Homo sapien
tcatcaccaaactacaagtatatat

SEQ ID NO: 5325627 - DNA, 25 bp, Homo sapien
gagaggttgatttccttccttggga

SEQ ID NO: 5325628 - DNA, 25 bp, Homo sapien
acatcagaaaatctattgtgtgtgt

SEQ ID NO: 5325629 - DNA, 25 bp, Homo sapien
tgttcttgctatcactaattcatca

SEQ ID NO: 5325630 - DNA, 25 bp, Homo sapien
ccttctatgtttatgattttagctc

SEQ ID NO: 5325631 - DNA, 25 bp, Homo sapien
aacatttatacctatcccttctatg

SEQ ID NO: 5325632 - DNA, 25 bp, Homo sapien
tctgtagatgatgtgaggtgagaga

SEQ ID NO: 5325633 - DNA, 25 bp, Homo sapien
taaaaatctattgcctaatctgaag

SEQ ID NO: 5325634 - DNA, 25 bp, Homo sapien
gttctgtccgctgaaaaggcctaga

SEQ ID NO: 5325635 - DNA, 25 bp, Homo sapien
cactttagggagaaagccgcagcac

SEQ ID NO: 5325636 - DNA, 25 bp, Homo sapien
ttcagctaaatgacgggcggagccc

SEQ ID NO: 5325637 - DNA, 25 bp, Homo sapien
cacagcactagcattggaggccaca

SEQ ID NO: 5325638 - DNA, 25 bp, Homo sapien
caagaccgcctggtcaacatgatga

SEQ ID NO: 5325639 - DNA, 25 bp, Homo sapien
atgcctgtaatccgagctactcagg

SEQ ID NO: 5325640 - DNA, 25 bp, Homo sapien
caaaaatatgctggcgtggtggcac

SEQ ID NO: 5325641 - DNA, 25 bp, Homo sapien
catgatgaaaccccgtctttactaa

SEQ ID NO: 5325642 - DNA, 25 bp, Homo sapien
cagctttacttagaacgagttttga

SEQ ID NO: 5325643 - DNA, 25 bp, Homo sapien
acgagttttgaagggtgatgtggaa

SEQ ID NO: 5325644 - DNA, 25 bp, Homo sapien
cttagaacgagttttgaagggtgat

SEQ ID NO: 5325645 - DNA, 25 bp, Homo sapien
tagaacgagttttgaagggtgatgt

SEQ ID NO: 5325646 - DNA, 25 bp, Homo sapien
tcaactggagtacgtagaggaactt

SEQ ID NO: 5325647 - DNA, 25 bp, Homo sapien
ccaagaaaagggtgtccgtgtgcta

SEQ ID NO: 5325648 - DNA, 25 bp, Homo sapien
ttaagatccgcattgaagacccacc

SEQ ID NO: 5325649 - DNA, 25 bp, Homo sapien
gacaacttttggatgacccgacaag

SEQ ID NO: 5325650 - DNA, 25 bp, Homo sapien
gctggacatgcctcagaaccctgaa

SEQ ID NO: 5325651 - DNA, 25 bp, Homo sapien
tagggcccgtacctactggcagttg

SEQ ID NO: 5325652 - DNA, 25 bp, Homo sapien
tgggattgacttggccttcaggctc

SEQ ID NO: 5325653 - DNA, 25 bp, Homo sapien
tgaatagcccgtactagatcttggg

SEQ ID NO: 5325654 - DNA, 25 bp, Homo sapien
cggagtcccagacagcgaacgtaag

SEQ ID NO: 5325655 - DNA, 25 bp, Homo sapien
cgaacgtaagggttgtctctggtgt

SEQ ID NO: 5325656 - DNA, 25 bp, Homo sapien
ccttcttcgtggacttgtatgtgca

SEQ ID NO: 5325657 - DNA, 25 bp, Homo sapien
tcattgcccgcttcagggccggagt

SEQ ID NO: 5325658 - DNA, 25 bp, Homo sapien
caaagaatcaattaaggaggctgtc

SEQ ID NO: 5325659 - DNA, 25 bp, Homo sapien
taatattcaacctctaagttccctg

SEQ ID NO: 5325660 - DNA, 25 bp, Homo sapien
caacttggaattctaaaggagtctc

SEQ ID NO: 5325661 - DNA, 25 bp, Homo sapien
agttccctgcttacacaacttggaa

SEQ ID NO: 5325662 - DNA, 25 bp, Homo sapien
cctgtgctctgagtcaggcctccct

SEQ ID NO: 5325663 - DNA, 25 bp, Homo sapien
cttaaaagctggtgaatgggacgta

SEQ ID NO: 5325664 - DNA, 25 bp, Homo sapien
tgtgctctgagtcaggcctccctct

SEQ ID NO: 5325665 - DNA, 25 bp, Homo sapien
taggggcccgcaagcatgcagggag

SEQ ID NO: 5325666 - DNA, 25 bp, Homo sapien
aataccccagataatgctcaccagg

SEQ ID NO: 5325667 - DNA, 25 bp, Homo sapien
gaagatccaactgtaggctggctca

SEQ ID NO: 5325668 - DNA, 25 bp, Homo sapien
gctcaaagaagcgatgtaaactaca

SEQ ID NO: 5325669 - DNA, 25 bp, Homo sapien
agggtgctaagagtggccgctcaaa

SEQ ID NO: 5325670 - DNA, 25 bp, Homo sapien
acctgaccttagacagatatgttgt

SEQ ID NO: 5325671 - DNA, 25 bp, Homo sapien
gatactctgccaaaactcataggta

SEQ ID NO: 5325672 - DNA, 25 bp, Homo sapien
gcagataacctagggtcggaagttc

SEQ ID NO: 5325673 - DNA, 25 bp, Homo sapien
ttttgagagatccttgtaggtagtc

SEQ ID NO: 5325674 - DNA, 25 bp, Homo sapien
caacagtgccctttaggagctcagc

SEQ ID NO: 5325675 - DNA, 25 bp, Homo sapien
cattggcgggcactttcacaagcct

SEQ ID NO: 5325676 - DNA, 25 bp, Homo sapien
cacgaatcggaaagaccaacgggct

SEQ ID NO: 5325677 - DNA, 25 bp, Homo sapien
tacaactggtatctggttctacaag

SEQ ID NO: 5325678 - DNA, 25 bp, Homo sapien
caagatctgccaacgctctagcatc

SEQ ID NO: 5325679 - DNA, 25 bp, Homo sapien
tgaaaaaacagaccggtgtccacat

SEQ ID NO: 5325680 - DNA, 25 bp, Homo sapien
tgtccttcggcacaggaagccctgt

SEQ ID NO: 5325681 - DNA, 25 bp, Homo sapien
tgtatgcgggaactccaagatctgc

SEQ ID NO: 5325682 - DNA, 25 bp, Homo sapien
gaaggtggtctctcgacagcactgg

SEQ ID NO: 5325683 - DNA, 25 bp, Homo sapien
tgctagcgtaactcttaaaagggtg

SEQ ID NO: 5325684 - DNA, 25 bp, Homo sapien
tatacgtggagtaagatctgctagc

SEQ ID NO: 5325685 - DNA, 25 bp, Homo sapien
gcaaagctgactgggaaaatactac

SEQ ID NO: 5325686 - DNA, 25 bp, Homo sapien
ccatgaaggtgagcacagctagcac

SEQ ID NO: 5325687 - DNA, 25 bp, Homo sapien
cccaatatgattggcagactggaaa

SEQ ID NO: 5325688 - DNA, 25 bp, Homo sapien
taagcacactgggtatttacaccgg

SEQ ID NO: 5325689 - DNA, 25 bp, Homo sapien
tgtggacgagctggaaacagcccca

SEQ ID NO: 5325690 - DNA, 25 bp, Homo sapien
cagaaagatcgtggcgggaagaaca

SEQ ID NO: 5325691 - DNA, 25 bp, Homo sapien
ccctggtccaagaggatgcaatgca

SEQ ID NO: 5325692 - DNA, 25 bp, Homo sapien
gttggctgacctaaccacctgtgca

SEQ ID NO: 5325693 - DNA, 25 bp, Homo sapien
agctaattagaagcctcctccgtgg

SEQ ID NO: 5325694 - DNA, 25 bp, Homo sapien
ttctgtcgggtttcatcattctcac

SEQ ID NO: 5325695 - DNA, 25 bp, Homo sapien
ccatttccgctgaaccagatgcttg

SEQ ID NO: 5325696 - DNA, 25 bp, Homo sapien
ctgagatacttctgtcgggtttcat

SEQ ID NO: 5325697 - DNA, 25 bp, Homo sapien
attctcacatcccatttccgctgaa

SEQ ID NO: 5325698 - DNA, 25 bp, Homo sapien
gacaggcaaggtgaaccaagagaaa

SEQ ID NO: 5325699 - DNA, 25 bp, Homo sapien
ctagcgacaggcaaggtgaaccaag

SEQ ID NO: 5325700 - DNA, 25 bp, Homo sapien
agagaaagagagtcttcgacgctct

SEQ ID NO: 5325701 - DNA, 25 bp, Homo sapien
gtcttcgacgctcttggaaaaatca

SEQ ID NO: 5325702 - DNA, 25 bp, Homo sapien
cagttccaattgcagactcctttga

SEQ ID NO: 5325703 - DNA, 25 bp, Homo sapien
aatcagcagttccaattgcagactc

SEQ ID NO: 5325704 - DNA, 25 bp, Homo sapien
cgaaaatcagcagttccaattgcag

SEQ ID NO: 5325705 - DNA, 25 bp, Homo sapien
cagcagttccaattgcagactcctt

SEQ ID NO: 5325706 - DNA, 25 bp, Homo sapien
tacaggagtctgtggcgaaggttcc

SEQ ID NO: 5325707 - DNA, 25 bp, Homo sapien
caggaaatcaacacatggatgagac

SEQ ID NO: 5325708 - DNA, 25 bp, Homo sapien
cagttagcttggttacagattgtta

SEQ ID NO: 5325709 - DNA, 25 bp, Homo sapien
tccttcctcagaacactgtgcgagc

SEQ ID NO: 5325710 - DNA, 25 bp, Homo sapien
ctggaatggtgcctcgaggtaccag

SEQ ID NO: 5325711 - DNA, 25 bp, Homo sapien
tcctcgctccttggagtggaaggga

SEQ ID NO: 5325712 - DNA, 25 bp, Homo sapien
tatgtaagagacgagttcccctgtg

SEQ ID NO: 5325713 - DNA, 25 bp, Homo sapien
gagaagatgagagtatgtaagagac

SEQ ID NO: 5325714 - DNA, 25 bp, Homo sapien
tggagggagaagggagggaaactga

SEQ ID NO: 5325715 - DNA, 25 bp, Homo sapien
gcggatggagggagaagggagggaa

SEQ ID NO: 5325716 - DNA, 25 bp, Homo sapien
atggagggagaagggagggaaactg

SEQ ID NO: 5325717 - DNA, 25 bp, Homo sapien
ctgcggatggagggagaagggaggg

SEQ ID NO: 5325718 - DNA, 25 bp, Homo sapien
acctgcacatcactccgcagtggta

SEQ ID NO: 5325719 - DNA, 25 bp, Homo sapien
cgcggccgctttgtgcttcccgcca

SEQ ID NO: 5325720 - DNA, 25 bp, Homo sapien
ccgaaggggcaggtaacagcacata

SEQ ID NO: 5325721 - DNA, 25 bp, Homo sapien
ctccgcagtggtagcaggcccgaag

SEQ ID NO: 5325722 - DNA, 25 bp, Homo sapien
taagagccatccaccggaggcaaaa

SEQ ID NO: 5325723 - DNA, 25 bp, Homo sapien
aaaacttctcgtcgctagtatcgca

SEQ ID NO: 5325724 - DNA, 25 bp, Homo sapien
agtgatagagcatgctgtccgcgca

SEQ ID NO: 5325725 - DNA, 25 bp, Homo sapien
tagtatcgcacgagcaagggtctgt

SEQ ID NO: 5325726 - DNA, 25 bp, Homo sapien
ttctcacggagtcgggcgcgtcctg

SEQ ID NO: 5325727 - DNA, 25 bp, Homo sapien
cgtggttgaacatgtccctgcagta

SEQ ID NO: 5325728 - DNA, 25 bp, Homo sapien
ccggcggatgcaagttctcacggag

SEQ ID NO: 5325729 - DNA, 25 bp, Homo sapien
cggttctcctcgtggttgaacatgt

SEQ ID NO: 5325730 - DNA, 25 bp, Homo sapien
ggtcctcgcctaggccaaagtctga

SEQ ID NO: 5325731 - DNA, 25 bp, Homo sapien
ggttgatgcgcacgatctcctcgtc

SEQ ID NO: 5325732 - DNA, 25 bp, Homo sapien
caaagtctgaggagtccacgtaggg

SEQ ID NO: 5325733 - DNA, 25 bp, Homo sapien
tcacctggcggtagggccttggcat

SEQ ID NO: 5325734 - DNA, 25 bp, Homo sapien
caggatctcacaaatagtgagtggc

SEQ ID NO: 5325735 - DNA, 25 bp, Homo sapien
gagatgcggacaggagaaggataga

SEQ ID NO: 5325736 - DNA, 25 bp, Homo sapien
tagtgagtggccagaccaagagcca

SEQ ID NO: 5325737 - DNA, 25 bp, Homo sapien
tccggaaactgaagtttcactcctg

SEQ ID NO: 5325738 - DNA, 25 bp, Homo sapien
ataggacattttaatcccaaaatat

SEQ ID NO: 5325739 - DNA, 25 bp, Homo sapien
tgcacctggccaataatgtgatttt

SEQ ID NO: 5325740 - DNA, 25 bp, Homo sapien
tttaatcccaaaatattaggaagca

SEQ ID NO: 5325741 - DNA, 25 bp, Homo sapien
tgtgatttttaaataggacatttta

SEQ ID NO: 5325742 - DNA, 25 bp, Homo sapien
gaggtggcccagggtataaatcctc

SEQ ID NO: 5325743 - DNA, 25 bp, Homo sapien
aggagattgtccgagtaggttgctc

SEQ ID NO: 5325744 - DNA, 25 bp, Homo sapien
tccggtgctcacaggatgtgggaga

SEQ ID NO: 5325745 - DNA, 25 bp, Homo sapien
ctgatcgaggtgatagtggtctgtg

SEQ ID NO: 5325746 - DNA, 25 bp, Homo sapien
ctgagaggaattagaagaactgtct

SEQ ID NO: 5325747 - DNA, 25 bp, Homo sapien
tgagaggaattagaagaactgtctg

SEQ ID NO: 5325748 - DNA, 25 bp, Homo sapien
ggcgtatcttgagtactggatttcc

SEQ ID NO: 5325749 - DNA, 25 bp, Homo sapien
gagcaagacttggaggtcactttaa

SEQ ID NO: 5325750 - DNA, 25 bp, Homo sapien
ggagagtctcagaggtaaggatacc

SEQ ID NO: 5325751 - DNA, 25 bp, Homo sapien
taaggataccgctggctggcgtatc

SEQ ID NO: 5325752 - DNA, 25 bp, Homo sapien
catgtcacacactggcactaaggga

SEQ ID NO: 5325753 - DNA, 25 bp, Homo sapien
caggccctgagctacttgtggacac

SEQ ID NO: 5325754 - DNA, 25 bp, Homo sapien
tgtggacacggttcctcagcatggc

SEQ ID NO: 5325755 - DNA, 25 bp, Homo sapien
cactaagggactctgagagatggtg

SEQ ID NO: 5325756 - DNA, 25 bp, Homo sapien
ttcctaggactcattagtcgatcag

SEQ ID NO: 5325757 - DNA, 25 bp, Homo sapien
gactcattagtcgatcagaaatgct

SEQ ID NO: 5325758 - DNA, 25 bp, Homo sapien
gtagaaagtccttctgagaaatgag

SEQ ID NO: 5325759 - DNA, 25 bp, Homo sapien
gagaaatgaggcacatccggctttt

SEQ ID NO: 5325760 - DNA, 25 bp, Homo sapien
gcaagaaggccagaagacctcgaga

SEQ ID NO: 5325761 - DNA, 25 bp, Homo sapien
tgtgagactgagaaaggccttatct

SEQ ID NO: 5325762 - DNA, 25 bp, Homo sapien
gaaggccagaagacctcgagaggca

SEQ ID NO: 5325763 - DNA, 25 bp, Homo sapien
gatgacgaatttctacagtgaagca

SEQ ID NO: 5325764 - DNA, 25 bp, Homo sapien
tcaacgttcacatttcgcaggtctt

SEQ ID NO: 5325765 - DNA, 25 bp, Homo sapien
ggtcttttcagtactatgcgcatcc

SEQ ID NO: 5325766 - DNA, 25 bp, Homo sapien
tgcgcatcccttcaagtcctctagg

SEQ ID NO: 5325767 - DNA, 25 bp, Homo sapien
cttcaagtcctctaggttttcctgc

SEQ ID NO: 5325768 - DNA, 25 bp, Homo sapien
caaggaggcaacagttggcaaaaag

SEQ ID NO: 5325769 - DNA, 25 bp, Homo sapien
aggaggcaacagttggcaaaaagtg

SEQ ID NO: 5325770 - DNA, 25 bp, Homo sapien
gacaaggaggcaacagttggcaaaa

SEQ ID NO: 5325771 - DNA, 25 bp, Homo sapien
aggacaaggaggcaacagttggcaa

SEQ ID NO: 5325772 - DNA, 25 bp, Homo sapien
ccccaatcccttaatgctaaagata

SEQ ID NO: 5325773 - DNA, 25 bp, Homo sapien
tgccccaatcccttaatgctaaaga

SEQ ID NO: 5325774 - DNA, 25 bp, Homo sapien
aaagataatgacaccagaaaatatt

SEQ ID NO: 5325775 - DNA, 25 bp, Homo sapien
ctctgccccaatcccttaatgctaa

SEQ ID NO: 5325776 - DNA, 25 bp, Homo sapien
ctgaaacttagttggataacgattt

SEQ ID NO: 5325777 - DNA, 25 bp, Homo sapien
tgaaacttagttggataacgatttc

SEQ ID NO: 5325778 - DNA, 25 bp, Homo sapien
tgtcattagacacaactgcgctgag

SEQ ID NO: 5325779 - DNA, 25 bp, Homo sapien
caacactggtagatctgccctcagc

SEQ ID NO: 5325780 - DNA, 25 bp, Homo sapien
gcaaatacccaaaagcccatctagg

SEQ ID NO: 5325781 - DNA, 25 bp, Homo sapien
cagtcacgtatccaggagtccagtg

SEQ ID NO: 5325782 - DNA, 25 bp, Homo sapien
tgtgctaaaaccaggacagacttgg

SEQ ID NO: 5325783 - DNA, 25 bp, Homo sapien
tttcctgcgttagcacacttgggcc

SEQ ID NO: 5325784 - DNA, 25 bp, Homo sapien
tccaaatagggcaagcgattgtcct

SEQ ID NO: 5325785 - DNA, 25 bp, Homo sapien
taagacaaccttggacagacctggg

SEQ ID NO: 5325786 - DNA, 25 bp, Homo sapien
tgtaaaaacgtcatcatcgccaagc

SEQ ID NO: 5325787 - DNA, 25 bp, Homo sapien
aaacgtcatcatcgccaagctcagc

SEQ ID NO: 5325788 - DNA, 25 bp, Homo sapien
atggtggaagatgacgttgttgaac

SEQ ID NO: 5325789 - DNA, 25 bp, Homo sapien
gctcagcttcattatggatggtgga

SEQ ID NO: 5325790 - DNA, 25 bp, Homo sapien
tcccaattaatctctcaaacttctg

SEQ ID NO: 5325791 - DNA, 25 bp, Homo sapien
ccaggatgctccctaaattaacttt

SEQ ID NO: 5325792 - DNA, 25 bp, Homo sapien
tgctgttgttcccaattaatctctc

SEQ ID NO: 5325793 - DNA, 25 bp, Homo sapien
gctccctaaattaactttgcctgct

SEQ ID NO: 5325794 - DNA, 25 bp, Homo sapien
ttccttttcagtggcagctgtacac

SEQ ID NO: 5325795 - DNA, 25 bp, Homo sapien
cctgggcctctgattacaggaggac

SEQ ID NO: 5325796 - DNA, 25 bp, Homo sapien
gcctaaaccgaaccagggctccaga

SEQ ID NO: 5325797 - DNA, 25 bp, Homo sapien
ttctgggcccgccagaatccattct

SEQ ID NO: 5325798 - DNA, 25 bp, Homo sapien
cactaagaatgcagcgacaagttca

SEQ ID NO: 5325799 - DNA, 25 bp, Homo sapien
actaagaatgcagcgacaagttcaa

SEQ ID NO: 5325800 - DNA, 25 bp, Homo sapien
cccactaagaatgcagcgacaagtt

SEQ ID NO: 5325801 - DNA, 25 bp, Homo sapien
aagaatgcagcgacaagttcaatac

SEQ ID NO: 5325802 - DNA, 25 bp, Homo sapien
aaggctcgggcatcagcagggcttt

SEQ ID NO: 5325803 - DNA, 25 bp, Homo sapien
cttactcccctgtcaaaggctcggg

SEQ ID NO: 5325804 - DNA, 25 bp, Homo sapien
cgttggattggctttggtgtagacc

SEQ ID NO: 5325805 - DNA, 25 bp, Homo sapien
cctattatcgaccttccagtgatga

SEQ ID NO: 5325806 - DNA, 25 bp, Homo sapien
cacacaggctggttactagtggaac

SEQ ID NO: 5325807 - DNA, 25 bp, Homo sapien
aaacacacaggctggttactagtgg

SEQ ID NO: 5325808 - DNA, 25 bp, Homo sapien
cacaggctggttactagtggaacag

SEQ ID NO: 5325809 - DNA, 25 bp, Homo sapien
ggctggttactagtggaacagccat

SEQ ID NO: 5325810 - DNA, 25 bp, Homo sapien
actgtcctggttgtaccccttcact

SEQ ID NO: 5325811 - DNA, 25 bp, Homo sapien
ctcttcatcacggttattcctcttc

SEQ ID NO: 5325812 - DNA, 25 bp, Homo sapien
tgctgaccatccgatcttcgctgct

SEQ ID NO: 5325813 - DNA, 25 bp, Homo sapien
ggaggctttgcttggctgctgacca

SEQ ID NO: 5325814 - DNA, 25 bp, Homo sapien
tcccatgtgggcgcatggtctccag

SEQ ID NO: 5325815 - DNA, 25 bp, Homo sapien
agctcccatgtgggcgcatggtctc

SEQ ID NO: 5325816 - DNA, 25 bp, Homo sapien
ctcccatgtgggcgcatggtctcca

SEQ ID NO: 5325817 - DNA, 25 bp, Homo sapien
gctcccatgtgggcgcatggtctcc

SEQ ID NO: 5325818 - DNA, 25 bp, Homo sapien
tcaattacaattatacaggctgctg

SEQ ID NO: 5325819 - DNA, 25 bp, Homo sapien
caaaacaggccactaagaacaagga

SEQ ID NO: 5325820 - DNA, 25 bp, Homo sapien
tgagagatctaaccgaagggctgga

SEQ ID NO: 5325821 - DNA, 25 bp, Homo sapien
gagaatcaaatactggttccaggcc

SEQ ID NO: 5325822 - DNA, 25 bp, Homo sapien
tcacagctcagtacaatgtgattca

SEQ ID NO: 5325823 - DNA, 25 bp, Homo sapien
ctaagcatctcggataaagcgtgtg

SEQ ID NO: 5325824 - DNA, 25 bp, Homo sapien
gaatacctttttacaatgatagaca

SEQ ID NO: 5325825 - DNA, 25 bp, Homo sapien
tataagtagcctaatgtcagatgac

SEQ ID NO: 5325826 - DNA, 25 bp, Homo sapien
ccacgagttgtatgtctgccattac

SEQ ID NO: 5325827 - DNA, 25 bp, Homo sapien
gggtgcatgaccttacagaccccga

SEQ ID NO: 5325828 - DNA, 25 bp, Homo sapien
gccttgacacgcacaatatagctgt

SEQ ID NO: 5325829 - DNA, 25 bp, Homo sapien
gtttgtctttctgtcgttcaccatg

SEQ ID NO: 5325830 - DNA, 25 bp, Homo sapien
ccatggatgagaaagccgcttcgtc

SEQ ID NO: 5325831 - DNA, 25 bp, Homo sapien
gacaagaagaagaagcacagggcat

SEQ ID NO: 5325832 - DNA, 25 bp, Homo sapien
aaacgacaagaagaagaagcacagg

SEQ ID NO: 5325833 - DNA, 25 bp, Homo sapien
ctaaaacgacaagaagaagaagcac

SEQ ID NO: 5325834 - DNA, 25 bp, Homo sapien
acgacaagaagaagaagcacagggc

SEQ ID NO: 5325835 - DNA, 25 bp, Homo sapien
gatccctggcccgattcttgataat

SEQ ID NO: 5325836 - DNA, 25 bp, Homo sapien
cctagatgtgggtatggtgcttgcc

SEQ ID NO: 5325837 - DNA, 25 bp, Homo sapien
tatgaatggcataaaatttcccgct

SEQ ID NO: 5325838 - DNA, 25 bp, Homo sapien
cattattgacatggaggattcctcc

SEQ ID NO: 5325839 - DNA, 25 bp, Homo sapien
tctttctggaaagaattaaacaaca

SEQ ID NO: 5325840 - DNA, 25 bp, Homo sapien
ctttctggaaagaattaaacaacat

SEQ ID NO: 5325841 - DNA, 25 bp, Homo sapien
aggagtgggtttcgactgcctgccc

SEQ ID NO: 5325842 - DNA, 25 bp, Homo sapien
gagtgggtttcgactgcctgccctt

SEQ ID NO: 5325843 - DNA, 25 bp, Homo sapien
gcagttttaaacatgggcaacgaag

SEQ ID NO: 5325844 - DNA, 25 bp, Homo sapien
cagaccacgtgtaattgggacacaa

SEQ ID NO: 5325845 - DNA, 25 bp, Homo sapien
gcaacgaagtgttcgctgaagtaaa

SEQ ID NO: 5325846 - DNA, 25 bp, Homo sapien
ttgtcaatatgttcttcttgtgcaa

SEQ ID NO: 5325847 - DNA, 25 bp, Homo sapien
gcccaggagaaggaaagcccagcag

SEQ ID NO: 5325848 - DNA, 25 bp, Homo sapien
ctggcccaggagaaggaaagcccag

SEQ ID NO: 5325849 - DNA, 25 bp, Homo sapien
ccagcagagggctgaggtcaggcct

SEQ ID NO: 5325850 - DNA, 25 bp, Homo sapien
ccaggagaaggaaagcccagcagag

SEQ ID NO: 5325851 - DNA, 25 bp, Homo sapien
tgtctacaacaccagcaacagaata

SEQ ID NO: 5325852 - DNA, 25 bp, Homo sapien
agcaacagaatacaccaaaatattt

SEQ ID NO: 5325853 - DNA, 25 bp, Homo sapien
caccagcaacagaatacaccaaaat

SEQ ID NO: 5325854 - DNA, 25 bp, Homo sapien
aatgtctacaacaccagcaacagaa

SEQ ID NO: 5325855 - DNA, 25 bp, Homo sapien
taattaaatgttgctaccaaatccc

SEQ ID NO: 5325856 - DNA, 25 bp, Homo sapien
aatgttgctaccaaatccccactac

SEQ ID NO: 5325857 - DNA, 25 bp, Homo sapien
tgtgaacgctataattaaatgttgc

SEQ ID NO: 5325858 - DNA, 25 bp, Homo sapien
cagatcatgtgaacgctataattaa

SEQ ID NO: 5325859 - DNA, 25 bp, Homo sapien
tattgctactataaagcttccgata

SEQ ID NO: 5325860 - DNA, 25 bp, Homo sapien
taaagcttccgataaaaatggatcg

SEQ ID NO: 5325861 - DNA, 25 bp, Homo sapien
ctgggtattagcattattgctacta

SEQ ID NO: 5325862 - DNA, 25 bp, Homo sapien
taaaaatggatcgtctcttgctgac

SEQ ID NO: 5325863 - DNA, 25 bp, Homo sapien
tactgcattgtaccggatgagtcat

SEQ ID NO: 5325864 - DNA, 25 bp, Homo sapien
ccatatatgattcagtctccttgac

SEQ ID NO: 5325865 - DNA, 25 bp, Homo sapien
gatgagtcatccgagggttagtccg

SEQ ID NO: 5325866 - DNA, 25 bp, Homo sapien
ccgcattttataggcctgttgtgtc

SEQ ID NO: 5325867 - DNA, 25 bp, Homo sapien
ggcacatggtaaacccacggtagac

SEQ ID NO: 5325868 - DNA, 25 bp, Homo sapien
catggtaaacccacggtagactggg

SEQ ID NO: 5325869 - DNA, 25 bp, Homo sapien
ccacggtagactgggtttcttcatt

SEQ ID NO: 5325870 - DNA, 25 bp, Homo sapien
cccacggtagactgggtttcttcat

SEQ ID NO: 5325871 - DNA, 25 bp, Homo sapien
tccacagtatgtgaggcacgtttgc

SEQ ID NO: 5325872 - DNA, 25 bp, Homo sapien
taagagtcttacaggcatccacagt

SEQ ID NO: 5325873 - DNA, 25 bp, Homo sapien
tctaggcagacgaatgtaagagtct

SEQ ID NO: 5325874 - DNA, 25 bp, Homo sapien
cgtacttttcgccactgagatccat

SEQ ID NO: 5325875 - DNA, 25 bp, Homo sapien
ctggagataagactgcatagagcca

SEQ ID NO: 5325876 - DNA, 25 bp, Homo sapien
gtccttccatcagaacacaagtcct

SEQ ID NO: 5325877 - DNA, 25 bp, Homo sapien
taagactgcatagagccatctgcac

SEQ ID NO: 5325878 - DNA, 25 bp, Homo sapien
ccctcctttcctggtcatcgtctga

SEQ ID NO: 5325879 - DNA, 25 bp, Homo sapien
ccagtaaacatcagctgagccaaat

SEQ ID NO: 5325880 - DNA, 25 bp, Homo sapien
tcttttcagaagtgcatatgcatcg

SEQ ID NO: 5325881 - DNA, 25 bp, Homo sapien
aacatgtcaagatcccaccagaagg

SEQ ID NO: 5325882 - DNA, 25 bp, Homo sapien
gaggagagagcccatccagtaaaca

SEQ ID NO: 5325883 - DNA, 25 bp, Homo sapien
agtatggcccccactttctctcttt

SEQ ID NO: 5325884 - DNA, 25 bp, Homo sapien
aagtatggcccccactttctctctt

SEQ ID NO: 5325885 - DNA, 25 bp, Homo sapien
ccaagtatggcccccactttctctc

SEQ ID NO: 5325886 - DNA, 25 bp, Homo sapien
tgccaagtatggcccccactttctc

SEQ ID NO: 5325887 - DNA, 25 bp, Homo sapien
tatatgtctgcgcttgagtaaccac

SEQ ID NO: 5325888 - DNA, 25 bp, Homo sapien
gaactggtctaaaagagtggcttcc

SEQ ID NO: 5325889 - DNA, 25 bp, Homo sapien
tgtacttctcaaagcaggagtttcc

SEQ ID NO: 5325890 - DNA, 25 bp, Homo sapien
ctaaaatgccagcttgacattagga

SEQ ID NO: 5325891 - DNA, 25 bp, Homo sapien
ttttaaaaataccaccggcatgcta

SEQ ID NO: 5325892 - DNA, 25 bp, Homo sapien
taccaccggcatgctagcttggcgt

SEQ ID NO: 5325893 - DNA, 25 bp, Homo sapien
ttaaaaataccaccggcatgctagc

SEQ ID NO: 5325894 - DNA, 25 bp, Homo sapien
aaataccaccggcatgctagcttgg

SEQ ID NO: 5325895 - DNA, 25 bp, Homo sapien
gtggtgttatcagcctccctcggtg

SEQ ID NO: 5325896 - DNA, 25 bp, Homo sapien
tgaagctctcgatactgacaaaaac

SEQ ID NO: 5325897 - DNA, 25 bp, Homo sapien
tctcggtgtctatcccagcgtggtg

SEQ ID NO: 5325898 - DNA, 25 bp, Homo sapien
taaagtcagatgttcccaagcttga

SEQ ID NO: 5325899 - DNA, 25 bp, Homo sapien
ctcttcctcactccagtgaaactca

SEQ ID NO: 5325900 - DNA, 25 bp, Homo sapien
tcttcctcactccagtgaaactcat

SEQ ID NO: 5325901 - DNA, 25 bp, Homo sapien
ttggagggcgtctgaacaggaactt

SEQ ID NO: 5325902 - DNA, 25 bp, Homo sapien
gagggcgtctgaacaggaacttcca

SEQ ID NO: 5325903 - DNA, 25 bp, Homo sapien
tgaactgggctacccagacacaaag

SEQ ID NO: 5325904 - DNA, 25 bp, Homo sapien
ggaacttccattaaccgccattgtg

SEQ ID NO: 5325905 - DNA, 25 bp, Homo sapien
ttggcagttgcttcacaggtaacca

SEQ ID NO: 5325906 - DNA, 25 bp, Homo sapien
ttgtctttggcagttgcttcacagg

SEQ ID NO: 5325907 - DNA, 25 bp, Homo sapien
gttgtctttggcagttgcttcacag

SEQ ID NO: 5325908 - DNA, 25 bp, Homo sapien
tctttggcagttgcttcacaggtaa

SEQ ID NO: 5325909 - DNA, 25 bp, Homo sapien
gaagagacagatgatgatccccact

SEQ ID NO: 5325910 - DNA, 25 bp, Homo sapien
tttcagggaaaatgcttatgggctc

SEQ ID NO: 5325911 - DNA, 25 bp, Homo sapien
tgttaactgatcatgcccatgggag

SEQ ID NO: 5325912 - DNA, 25 bp, Homo sapien
cactcccctaataaatgcagacctg

SEQ ID NO: 5325913 - DNA, 25 bp, Homo sapien
cagtcattgctctctagtgatgccc

SEQ ID NO: 5325914 - DNA, 25 bp, Homo sapien
tcatttgtaacacggatcagctggt

SEQ ID NO: 5325915 - DNA, 25 bp, Homo sapien
tctctttagggaatacagtcattgc

SEQ ID NO: 5325916 - DNA, 25 bp, Homo sapien
gaattctacattgctgaccggaaca

SEQ ID NO: 5325917 - DNA, 25 bp, Homo sapien
cacgcccagcggagaacgaatttct

SEQ ID NO: 5325918 - DNA, 25 bp, Homo sapien
gcagctcgcgtcttcagcttcagca

SEQ ID NO: 5325919 - DNA, 25 bp, Homo sapien
gaatttctaaaaaccaccacgatgc

SEQ ID NO: 5325920 - DNA, 25 bp, Homo sapien
tgcagccatgcagctcgcgtcttca

SEQ ID NO: 5325921 - DNA, 25 bp, Homo sapien
tcatgagtgaggaatgctggtgccc

SEQ ID NO: 5325922 - DNA, 25 bp, Homo sapien
taagggaacaccttgccttgggaga

SEQ ID NO: 5325923 - DNA, 25 bp, Homo sapien
ctgtgccagtgtgaggaatccatct

SEQ ID NO: 5325924 - DNA, 25 bp, Homo sapien
tttagcttaagcatcccagtcccca

SEQ ID NO: 5325925 - DNA, 25 bp, Homo sapien
caaatccagattctgtcaagggctg

SEQ ID NO: 5325926 - DNA, 25 bp, Homo sapien
tcccgacaggtggaagatgtttcct

SEQ ID NO: 5325927 - DNA, 25 bp, Homo sapien
caaaagcatttagagcactgtgggc

SEQ ID NO: 5325928 - DNA, 25 bp, Homo sapien
tgtaaggtcaaaggcagtcctggca

SEQ ID NO: 5325929 - DNA, 25 bp, Homo sapien
tgaagtccgcttccgatcacagtga

SEQ ID NO: 5325930 - DNA, 25 bp, Homo sapien
tacacactacatcttggcaccaggc

SEQ ID NO: 5325931 - DNA, 25 bp, Homo sapien
tacaagagatatccggtggccagga

SEQ ID NO: 5325932 - DNA, 25 bp, Homo sapien
tacggtacgaagattgctaggagcc

SEQ ID NO: 5325933 - DNA, 25 bp, Homo sapien
gcactgcagggtatacacaggtata

SEQ ID NO: 5325934 - DNA, 25 bp, Homo sapien
tctccaatgaagttactgatactca

SEQ ID NO: 5325935 - DNA, 25 bp, Homo sapien
tggccttaactggaaactattattc

SEQ ID NO: 5325936 - DNA, 25 bp, Homo sapien
ccccaacaaagtacctgagctagtc

SEQ ID NO: 5325937 - DNA, 25 bp, Homo sapien
gaaggattctgacttcacagctaat

SEQ ID NO: 5325938 - DNA, 25 bp, Homo sapien
gattgtcttcatcaagtcaagattc

SEQ ID NO: 5325939 - DNA, 25 bp, Homo sapien
gccatgagagctgcaatcaagaagg

SEQ ID NO: 5325940 - DNA, 25 bp, Homo sapien
cacagctaatgtgaactgacaatga

SEQ ID NO: 5325941 - DNA, 25 bp, Homo sapien
tagagaggcattccctaataggcca

SEQ ID NO: 5325942 - DNA, 25 bp, Homo sapien
tgatcacccggcatgtattaggcac

SEQ ID NO: 5325943 - DNA, 25 bp, Homo sapien
tattaggcacctcaaacatgtcaga

SEQ ID NO: 5325944 - DNA, 25 bp, Homo sapien
tgtatgtataatcccagtcgccagc

SEQ ID NO: 5325945 - DNA, 25 bp, Homo sapien
cacttggcaagcaggtacctatctg

SEQ ID NO: 5325946 - DNA, 25 bp, Homo sapien
ggatgctgacaatcttgctcaaggc

SEQ ID NO: 5325947 - DNA, 25 bp, Homo sapien
tctgctttagacttggtatccacat

SEQ ID NO: 5325948 - DNA, 25 bp, Homo sapien
cagacaaggtgctaactccaagagt

SEQ ID NO: 5325949 - DNA, 25 bp, Homo sapien
tcatgggcctcctagcattcaccga

SEQ ID NO: 5325950 - DNA, 25 bp, Homo sapien
ggcctcctagcattcaccgagaact

SEQ ID NO: 5325951 - DNA, 25 bp, Homo sapien
gatggatctcatgggcctcctagca

SEQ ID NO: 5325952 - DNA, 25 bp, Homo sapien
tcctagcattcaccgagaactttct

SEQ ID NO: 5325953 - DNA, 25 bp, Homo sapien
tgtacctcaaagctggaagtcctgc

SEQ ID NO: 5325954 - DNA, 25 bp, Homo sapien
tgagaagcacggctacaggatcctc

SEQ ID NO: 5325955 - DNA, 25 bp, Homo sapien
catctttttattagggtctggacaa

SEQ ID NO: 5325956 - DNA, 25 bp, Homo sapien
gatacctctcagtgtatgatcacca

SEQ ID NO: 5325957 - DNA, 25 bp, Homo sapien
gcagagattctcctacagaggcata

SEQ ID NO: 5325958 - DNA, 25 bp, Homo sapien
tgttaagactccagcagaaccctgc

SEQ ID NO: 5325959 - DNA, 25 bp, Homo sapien
tgggcaacgttaagaagacctcacc

SEQ ID NO: 5325960 - DNA, 25 bp, Homo sapien
gaaaggctgcgagctctgagtcaga

SEQ ID NO: 5325961 - DNA, 25 bp, Homo sapien
tcttaagtagcaaaccctgcctggt

SEQ ID NO: 5325962 - DNA, 25 bp, Homo sapien
tctccagtttgatgccaccagttct

SEQ ID NO: 5325963 - DNA, 25 bp, Homo sapien
gggaccattatcaacaagagcaaag

SEQ ID NO: 5325964 - DNA, 25 bp, Homo sapien
cagatcaaattcacccaaagtagga

SEQ ID NO: 5325965 - DNA, 25 bp, Homo sapien
gcttcatgctgaacttgctctgaga

SEQ ID NO: 5325966 - DNA, 25 bp, Homo sapien
atggagctattctttcctcgctggt

SEQ ID NO: 5325967 - DNA, 25 bp, Homo sapien
tgctgaacttgctctgagagcctga

SEQ ID NO: 5325968 - DNA, 25 bp, Homo sapien
ctcgctggtgatcccactcgaaatc

SEQ ID NO: 5325969 - DNA, 25 bp, Homo sapien
gactgaaaacgcctcagaccaggga

SEQ ID NO: 5325970 - DNA, 25 bp, Homo sapien
cgtgtgccggccacaagcgcgtgca

SEQ ID NO: 5325971 - DNA, 25 bp, Homo sapien
caaactggacccctggaccgcgagg

SEQ ID NO: 5325972 - DNA, 25 bp, Homo sapien
gcataagacttgaggcgtcgggccc

SEQ ID NO: 5325973 - DNA, 25 bp, Homo sapien
cgtctgggtgtgtttcttcggtcat

SEQ ID NO: 5325974 - DNA, 25 bp, Homo sapien
tcgtctgggtgtgtttcttcggtca

SEQ ID NO: 5325975 - DNA, 25 bp, Homo sapien
ccgctcgccccccttcttcacatct

SEQ ID NO: 5325976 - DNA, 25 bp, Homo sapien
tgtccgctcgccccccttcttcaca

SEQ ID NO: 5325977 - DNA, 25 bp, Homo sapien
cacctagacgcctgtcccgcggcgg

SEQ ID NO: 5325978 - DNA, 25 bp, Homo sapien
tttcttgttcacctagacgcctgtc

SEQ ID NO: 5325979 - DNA, 25 bp, Homo sapien
ggctagagatgaagagggcgccgca

SEQ ID NO: 5325980 - DNA, 25 bp, Homo sapien
ggagaaaaacaagcgcgcctcggag

SEQ ID NO: 5325981 - DNA, 25 bp, Homo sapien
tgcgcggggagtgaacgccgcagcg

SEQ ID NO: 5325982 - DNA, 25 bp, Homo sapien
agcagggcgcgggatagggtttggg

SEQ ID NO: 5325983 - DNA, 25 bp, Homo sapien
gaggtgcgcctgggaggcggtgcag

SEQ ID NO: 5325984 - DNA, 25 bp, Homo sapien
gtccgagccccatctctcgactcca

SEQ ID NO: 5325985 - DNA, 25 bp, Homo sapien
tcgactccaccgatttactccatat

SEQ ID NO: 5325986 - DNA, 25 bp, Homo sapien
agggcgccccgtccgagccccatct

SEQ ID NO: 5325987 - DNA, 25 bp, Homo sapien
tagggcggaagcgatgacgtcttcc

SEQ ID NO: 5325988 - DNA, 25 bp, Homo sapien
cgatgacgtcttcccagcggccaga

SEQ ID NO: 5325989 - DNA, 25 bp, Homo sapien
ggaagtagggcggaagcgatgacgt

SEQ ID NO: 5325990 - DNA, 25 bp, Homo sapien
gaggtggtggagtgcaaaaagcttc

SEQ ID NO: 5325991 - DNA, 25 bp, Homo sapien
agatggagaagcacgatgagcagtt

SEQ ID NO: 5325992 - DNA, 25 bp, Homo sapien
gagaagcacgatgagcagttgctgc

SEQ ID NO: 5325993 - DNA, 25 bp, Homo sapien
tggagaagcacgatgagcagttgct

SEQ ID NO: 5325994 - DNA, 25 bp, Homo sapien
tcaagatggagaagcacgatgagca

SEQ ID NO: 5325995 - DNA, 25 bp, Homo sapien
gaggtgggccagctcgtctctgctc

SEQ ID NO: 5325996 - DNA, 25 bp, Homo sapien
tgatctgttatcctccaacaggcca

SEQ ID NO: 5325997 - DNA, 25 bp, Homo sapien
atggcctcgctgatgtatgtcgtgt

SEQ ID NO: 5325998 - DNA, 25 bp, Homo sapien
ttggcaagctgattgctctggtagg

SEQ ID NO: 5325999 - DNA, 25 bp, Homo sapien
gagagatagcagtggagatggtgat

SEQ ID NO: 5326000 - DNA, 25 bp, Homo sapien
atagtgacggtgattttggaaatga

SEQ ID NO: 5326001 - DNA, 25 bp, Homo sapien
tttgatgacgacagaggtggtgctc

SEQ ID NO: 5326002 - DNA, 25 bp, Homo sapien
tggtggaaggatctgagatagacac

SEQ ID NO: 5326003 - DNA, 25 bp, Homo sapien
tgcttgggaggctaaagcaggggaa

SEQ ID NO: 5326004 - DNA, 25 bp, Homo sapien
attagccggccatgctggtgcatgc

SEQ ID NO: 5326005 - DNA, 25 bp, Homo sapien
agccggccatgctggtgcatgcctg

SEQ ID NO: 5326006 - DNA, 25 bp, Homo sapien
acactccagcctggaaactgagcga

SEQ ID NO: 5326007 - DNA, 25 bp, Homo sapien
aatttaactgagtactggtgttagg

SEQ ID NO: 5326008 - DNA, 25 bp, Homo sapien
tggcttgtcacttaacagggctgac

SEQ ID NO: 5326009 - DNA, 25 bp, Homo sapien
catcagtgacttctgtaaccccaac

SEQ ID NO: 5326010 - DNA, 25 bp, Homo sapien
gtcaggtcacttcatctgattgcca

SEQ ID NO: 5326011 - DNA, 25 bp, Homo sapien
catctatgattatgaggacagaagg

SEQ ID NO: 5326012 - DNA, 25 bp, Homo sapien
tggatgtggagcaatcatctatgat

SEQ ID NO: 5326013 - DNA, 25 bp, Homo sapien
gaagtagcacgggtcttgatggctt

SEQ ID NO: 5326014 - DNA, 25 bp, Homo sapien
aagtagcacgggtcttgatggcttc

SEQ ID NO: 5326015 - DNA, 25 bp, Homo sapien
catcaggtaggtgcctcatcatctg

SEQ ID NO: 5326016 - DNA, 25 bp, Homo sapien
ctcctaagtagtttctgaatccatc

SEQ ID NO: 5326017 - DNA, 25 bp, Homo sapien
tgttcccctaacaaactgctatcca

SEQ ID NO: 5326018 - DNA, 25 bp, Homo sapien
tgatcaccatactctcctatgtaaa

SEQ ID NO: 5326019 - DNA, 25 bp, Homo sapien
tgtaaagtactatactcatgtcagg

SEQ ID NO: 5326020 - DNA, 25 bp, Homo sapien
caggtaggatgttattactatagat

SEQ ID NO: 5326021 - DNA, 25 bp, Homo sapien
ccaaatggtatgaaagaattgtaaa

SEQ ID NO: 5326022 - DNA, 25 bp, Homo sapien
tgagactgccgttgagctcatagaa

SEQ ID NO: 5326023 - DNA, 25 bp, Homo sapien
catcctcttgtctatcaaagtcaac

SEQ ID NO: 5326024 - DNA, 25 bp, Homo sapien
cacaaacatcctcttgtctatcaaa

SEQ ID NO: 5326025 - DNA, 25 bp, Homo sapien
caaacagtcatcatggtgcaccaga

SEQ ID NO: 5326026 - DNA, 25 bp, Homo sapien
caaagtcaacttccaaacagtcatc

SEQ ID NO: 5326027 - DNA, 25 bp, Homo sapien
gctgatttctttgtccatttaagcc

SEQ ID NO: 5326028 - DNA, 25 bp, Homo sapien
atttctttgtccatttaagcctctt

SEQ ID NO: 5326029 - DNA, 25 bp, Homo sapien
cacgtgctgatttctttgtccattt

SEQ ID NO: 5326030 - DNA, 25 bp, Homo sapien
ctttgtccatttaagcctcttccct

SEQ ID NO: 5326031 - DNA, 25 bp, Homo sapien
actcaaggagtcctcgggagcctgc

SEQ ID NO: 5326032 - DNA, 25 bp, Homo sapien
tcctcgggagcctgctcatggtcac

SEQ ID NO: 5326033 - DNA, 25 bp, Homo sapien
cctctgacactcacagctctgtgag

SEQ ID NO: 5326034 - DNA, 25 bp, Homo sapien
gtccaggggtagacactgctcctcc

SEQ ID NO: 5326035 - DNA, 25 bp, Homo sapien
ctcatttggaagatgctcagaacca

SEQ ID NO: 5326036 - DNA, 25 bp, Homo sapien
tcatttggaagatgctcagaaccat

SEQ ID NO: 5326037 - DNA, 25 bp, Homo sapien
ttgaaccatggtttccctcctggta

SEQ ID NO: 5326038 - DNA, 25 bp, Homo sapien
cttgaaccatggtttccctcctggt

SEQ ID NO: 5326039 - DNA, 25 bp, Homo sapien
cctttgactccccagttgttctgac

SEQ ID NO: 5326040 - DNA, 25 bp, Homo sapien
cccctttgactccccagttgttctg

SEQ ID NO: 5326041 - DNA, 25 bp, Homo sapien
tcaatcaccccctttgactccccag

SEQ ID NO: 5326042 - DNA, 25 bp, Homo sapien
atcaccccctttgactccccagttg

SEQ ID NO: 5326043 - DNA, 25 bp, Homo sapien
aatccttgggcatccgaggtcctga

SEQ ID NO: 5326044 - DNA, 25 bp, Homo sapien
ctcagatgctccttctacgagcggg

SEQ ID NO: 5326045 - DNA, 25 bp, Homo sapien
gaggtcctgaccgtggattacccca

SEQ ID NO: 5326046 - DNA, 25 bp, Homo sapien
tgaccgtggattaccccagctggtc

SEQ ID NO: 5326047 - DNA, 25 bp, Homo sapien
aggattcctggtgaaaagaaaagat

SEQ ID NO: 5326048 - DNA, 25 bp, Homo sapien
tccaatgcattcagaagcatacaaa

SEQ ID NO: 5326049 - DNA, 25 bp, Homo sapien
ctttttgtgattgccttccaatgca

SEQ ID NO: 5326050 - DNA, 25 bp, Homo sapien
caatgcattcagaagcatacaaata

SEQ ID NO: 5326051 - DNA, 25 bp, Homo sapien
tctccaggaatttcatagtttggac

SEQ ID NO: 5326052 - DNA, 25 bp, Homo sapien
aaaaattctccaggaatttcatagt

SEQ ID NO: 5326053 - DNA, 25 bp, Homo sapien
caaaaattctccaggaatttcatag

SEQ ID NO: 5326054 - DNA, 25 bp, Homo sapien
aattctccaggaatttcatagtttg

SEQ ID NO: 5326055 - DNA, 25 bp, Homo sapien
tgcagggaggcctgatcctgtgaca

SEQ ID NO: 5326056 - DNA, 25 bp, Homo sapien
agggaggcctgatcctgtgacagct

SEQ ID NO: 5326057 - DNA, 25 bp, Homo sapien
cagggaggcctgatcctgtgacagc

SEQ ID NO: 5326058 - DNA, 25 bp, Homo sapien
ggaggcctgatcctgtgacagctgg

SEQ ID NO: 5326059 - DNA, 25 bp, Homo sapien
agtagcggcctcggtacagcaagcc

SEQ ID NO: 5326060 - DNA, 25 bp, Homo sapien
caaagtagcggcctcggtacagcaa

SEQ ID NO: 5326061 - DNA, 25 bp, Homo sapien
gtagcggcctcggtacagcaagcct

SEQ ID NO: 5326062 - DNA, 25 bp, Homo sapien
cacattcggtttgactgtttggagg

SEQ ID NO: 5326063 - DNA, 25 bp, Homo sapien
cattcggtttgactgtttggaggct

SEQ ID NO: 5326064 - DNA, 25 bp, Homo sapien
tataatcatctttcacattcggttt

SEQ ID NO: 5326065 - DNA, 25 bp, Homo sapien
ttcacattcggtttgactgtttgga

SEQ ID NO: 5326066 - DNA, 25 bp, Homo sapien
agtcttgggctcagactgtagggtg

SEQ ID NO: 5326067 - DNA, 25 bp, Homo sapien
ggtggactggagaccatgagctggc

SEQ ID NO: 5326068 - DNA, 25 bp, Homo sapien
tagggtggactggagaccatgagct

SEQ ID NO: 5326069 - DNA, 25 bp, Homo sapien
tcttgggctcagactgtagggtgga

SEQ ID NO: 5326070 - DNA, 25 bp, Homo sapien
gcctttgctggtaggtatagcgcat

SEQ ID NO: 5326071 - DNA, 25 bp, Homo sapien
ctgcctttgctggtaggtatagcgc

SEQ ID NO: 5326072 - DNA, 25 bp, Homo sapien
cctttgctggtaggtatagcgcatg

SEQ ID NO: 5326073 - DNA, 25 bp, Homo sapien
ctttgctggtaggtatagcgcatgc

SEQ ID NO: 5326074 - DNA, 25 bp, Homo sapien
ggagatgtcagcctcaaagccgtgg

SEQ ID NO: 5326075 - DNA, 25 bp, Homo sapien
tccccatgacgatgctggacctgac

SEQ ID NO: 5326076 - DNA, 25 bp, Homo sapien
gatgtcagcctcaaagccgtggtgg

SEQ ID NO: 5326077 - DNA, 25 bp, Homo sapien
atgtcagcctcaaagccgtggtgga

SEQ ID NO: 5326078 - DNA, 25 bp, Homo sapien
gtggtgccaggtgcatggttcttgt

SEQ ID NO: 5326079 - DNA, 25 bp, Homo sapien
tggtgccaggtgcatggttcttgtc

SEQ ID NO: 5326080 - DNA, 25 bp, Homo sapien
tccaggatctcataataatccttac

SEQ ID NO: 5326081 - DNA, 25 bp, Homo sapien
cttgacccttttcacagctgcaact

SEQ ID NO: 5326082 - DNA, 25 bp, Homo sapien
acattgcttgacccttttcacagct

SEQ ID NO: 5326083 - DNA, 25 bp, Homo sapien
ctcataataatccttacattgcttg

SEQ ID NO: 5326084 - DNA, 25 bp, Homo sapien
tgcagtgtagcctttggtgctctct

SEQ ID NO: 5326085 - DNA, 25 bp, Homo sapien
cagtgtagcctttggtgctctctcc

SEQ ID NO: 5326086 - DNA, 25 bp, Homo sapien
ctgcagtgtagcctttggtgctctc

SEQ ID NO: 5326087 - DNA, 25 bp, Homo sapien
gtgtagcctttggtgctctctcctc

SEQ ID NO: 5326088 - DNA, 25 bp, Homo sapien
gattacatggcagaaccagagcatg

SEQ ID NO: 5326089 - DNA, 25 bp, Homo sapien
actcgcggcattgggtacagccact

SEQ ID NO: 5326090 - DNA, 25 bp, Homo sapien
gttgggctggttgcactggatggct

SEQ ID NO: 5326091 - DNA, 25 bp, Homo sapien
ccagagcatggaacctgctgttgac

SEQ ID NO: 5326092 - DNA, 25 bp, Homo sapien
gcactttcttcagggagggacttgc

SEQ ID NO: 5326093 - DNA, 25 bp, Homo sapien
gagggacttgccgtttggtaactga

SEQ ID NO: 5326094 - DNA, 25 bp, Homo sapien
gccgtttggtaactgacacccctca

SEQ ID NO: 5326095 - DNA, 25 bp, Homo sapien
tcttcagggagggacttgccgtttg

SEQ ID NO: 5326096 - DNA, 25 bp, Homo sapien
acctgtgggaggctgcattcaagtt

SEQ ID NO: 5326097 - DNA, 25 bp, Homo sapien
ctgcattcaagttcacagaaaaggg

SEQ ID NO: 5326098 - DNA, 25 bp, Homo sapien
ttttgtccaaacctgtgggaggctg

SEQ ID NO: 5326099 - DNA, 25 bp, Homo sapien
gtgggaggctgcattcaagttcaca

SEQ ID NO: 5326100 - DNA, 25 bp, Homo sapien
tttctgtaggccagagaagtgactt

SEQ ID NO: 5326101 - DNA, 25 bp, Homo sapien
ttctgtaggccagagaagtgacttc

SEQ ID NO: 5326102 - DNA, 25 bp, Homo sapien
tgcctcttcatggtctatgatgcta

SEQ ID NO: 5326103 - DNA, 25 bp, Homo sapien
ctcttcatggtctatgatgctagct

SEQ ID NO: 5326104 - DNA, 25 bp, Homo sapien
gcctcttcatggtctatgatgctag

SEQ ID NO: 5326105 - DNA, 25 bp, Homo sapien
cctcttcatggtctatgatgctagc

SEQ ID NO: 5326106 - DNA, 25 bp, Homo sapien
tgagttcatggcctctcttttcagc

SEQ ID NO: 5326107 - DNA, 25 bp, Homo sapien
gaatcccgctgatcagggactggga

SEQ ID NO: 5326108 - DNA, 25 bp, Homo sapien
cagatacctggagtacactacaaca

SEQ ID NO: 5326109 - DNA, 25 bp, Homo sapien
acaagtgggccactactgtgctggc

SEQ ID NO: 5326110 - DNA, 25 bp, Homo sapien
tctgagttcctatgaaaaaccctga

SEQ ID NO: 5326111 - DNA, 25 bp, Homo sapien
tggtgaccgcagcaacactgggtcc

SEQ ID NO: 5326112 - DNA, 25 bp, Homo sapien
caggcgtcatgatttcagagtccac

SEQ ID NO: 5326113 - DNA, 25 bp, Homo sapien
gcgctatcccagtgtgccgtcagta

SEQ ID NO: 5326114 - DNA, 25 bp, Homo sapien
ggtccacatcattttcagcttcgag

SEQ ID NO: 5326115 - DNA, 25 bp, Homo sapien
ttagtttgcatatagctcgttcatc

SEQ ID NO: 5326116 - DNA, 25 bp, Homo sapien
tttaactctaatttcatgatcaatg

SEQ ID NO: 5326117 - DNA, 25 bp, Homo sapien
gcatatagctcgttcatccactcat

SEQ ID NO: 5326118 - DNA, 25 bp, Homo sapien
tagctcgttcatccactcatttaac

SEQ ID NO: 5326119 - DNA, 25 bp, Homo sapien
ctgggcttcctttctctgaccggca

SEQ ID NO: 5326120 - DNA, 25 bp, Homo sapien
gcttcctttctctgaccggcatcat

SEQ ID NO: 5326121 - DNA, 25 bp, Homo sapien
tcctgggcttcctttctctgaccgg

SEQ ID NO: 5326122 - DNA, 25 bp, Homo sapien
tgggcttcctttctctgaccggcat

SEQ ID NO: 5326123 - DNA, 25 bp, Homo sapien
tattgatgacaaacctactgtagat

SEQ ID NO: 5326124 - DNA, 25 bp, Homo sapien
ggtacactctgcctaggcaacctgg

SEQ ID NO: 5326125 - DNA, 25 bp, Homo sapien
tgtagatacctgatcggcgtggtgc

SEQ ID NO: 5326126 - DNA, 25 bp, Homo sapien
gcgtggtgcaccgtagcctagaact

SEQ ID NO: 5326127 - DNA, 25 bp, Homo sapien
atccacagtgcccttctggacttgg

SEQ ID NO: 5326128 - DNA, 25 bp, Homo sapien
gctctctggcctttggcacctcagt

SEQ ID NO: 5326129 - DNA, 25 bp, Homo sapien
ccttctggacttggagagatcttct

SEQ ID NO: 5326130 - DNA, 25 bp, Homo sapien
tctggttcccattgacgctgtgtcc

SEQ ID NO: 5326131 - DNA, 25 bp, Homo sapien
ctgttagagcggtccagcaggtcca

SEQ ID NO: 5326132 - DNA, 25 bp, Homo sapien
cctgttagagcggtccagcaggtcc

SEQ ID NO: 5326133 - DNA, 25 bp, Homo sapien
ctcctgttagagcggtccagcaggt

SEQ ID NO: 5326134 - DNA, 25 bp, Homo sapien
tcctgttagagcggtccagcaggtc

SEQ ID NO: 5326135 - DNA, 25 bp, Homo sapien
atctagctcttgacttcctctctga

SEQ ID NO: 5326136 - DNA, 25 bp, Homo sapien
gaaacatctagctcttgacttcctc

SEQ ID NO: 5326137 - DNA, 25 bp, Homo sapien
tgtagggttggccaaaatacagaaa

SEQ ID NO: 5326138 - DNA, 25 bp, Homo sapien
aatacagaaacatctagctcttgac

SEQ ID NO: 5326139 - DNA, 25 bp, Homo sapien
gactgggtctgaggaatgtcttcgt

SEQ ID NO: 5326140 - DNA, 25 bp, Homo sapien
ggtaactgggactgggtctgaggaa

SEQ ID NO: 5326141 - DNA, 25 bp, Homo sapien
gaggaatgtcttcgtgtcacagtca

SEQ ID NO: 5326142 - DNA, 25 bp, Homo sapien
gtgtcacagtcaactcaggcaagag

SEQ ID NO: 5326143 - DNA, 25 bp, Homo sapien
tgtcatttctgcaggtgacccgagt

SEQ ID NO: 5326144 - DNA, 25 bp, Homo sapien
tcatttctgcaggtgacccgagtcc

SEQ ID NO: 5326145 - DNA, 25 bp, Homo sapien
caggtgacccgagtccctgggcttt

SEQ ID NO: 5326146 - DNA, 25 bp, Homo sapien
ttctgcaggtgacccgagtccctgg

SEQ ID NO: 5326147 - DNA, 25 bp, Homo sapien
tatggttcagtacgggagagttcac

SEQ ID NO: 5326148 - DNA, 25 bp, Homo sapien
ggaagacgcgcatctacacagctct

SEQ ID NO: 5326149 - DNA, 25 bp, Homo sapien
tcaaaggtgactaagagaggccgga

SEQ ID NO: 5326150 - DNA, 25 bp, Homo sapien
ggcaaacttccctgtaggacctgta

SEQ ID NO: 5326151 - DNA, 25 bp, Homo sapien
caccaagtacatcttcctactggcc

SEQ ID NO: 5326152 - DNA, 25 bp, Homo sapien
tcaaaatatttagggcttccagtct

SEQ ID NO: 5326153 - DNA, 25 bp, Homo sapien
aacctgatatcccacctgctttaca

SEQ ID NO: 5326154 - DNA, 25 bp, Homo sapien
gtcccgaggcctgaatccagagcgt

SEQ ID NO: 5326155 - DNA, 25 bp, Homo sapien
cctcttgtggagaatagggagaaaa

SEQ ID NO: 5326156 - DNA, 25 bp, Homo sapien
cggagaagccgtggcccaaacagga

SEQ ID NO: 5326157 - DNA, 25 bp, Homo sapien
aagggatgtgaggagcggagaagcc

SEQ ID NO: 5326158 - DNA, 25 bp, Homo sapien
gtttaccgcccgcaggttctgatcc

SEQ ID NO: 5326159 - DNA, 25 bp, Homo sapien
gctctcttcccgctggtgtaactgg

SEQ ID NO: 5326160 - DNA, 25 bp, Homo sapien
gagctcctgcgcatttgcctggtgg

SEQ ID NO: 5326161 - DNA, 25 bp, Homo sapien
aataggccagactgggatgctctgc

SEQ ID NO: 5326162 - DNA, 25 bp, Homo sapien
tcccgctggtgtaactgggccaagg

SEQ ID NO: 5326163 - DNA, 25 bp, Homo sapien
ccataagggagacccctctgctgtc

SEQ ID NO: 5326164 - DNA, 25 bp, Homo sapien
caacctcggcgcactgagcgtgtgt

SEQ ID NO: 5326165 - DNA, 25 bp, Homo sapien
tgggatcccaataccactgagcctg

SEQ ID NO: 5326166 - DNA, 25 bp, Homo sapien
agtgtcatcaacatcaggccctgct

SEQ ID NO: 5326167 - DNA, 25 bp, Homo sapien
cactgggactgccatggcctcttta

SEQ ID NO: 5326168 - DNA, 25 bp, Homo sapien
gatgcattagggtaaggccccagcc

SEQ ID NO: 5326169 - DNA, 25 bp, Homo sapien
tgcgtattaaggctatagccacagc

SEQ ID NO: 5326170 - DNA, 25 bp, Homo sapien
ggcaaaatgctctcctatacactcc

SEQ ID NO: 5326171 - DNA, 25 bp, Homo sapien
acaatctgccgccttgctagggagg

SEQ ID NO: 5326172 - DNA, 25 bp, Homo sapien
tcactggcatagaagggcctgaacc

SEQ ID NO: 5326173 - DNA, 25 bp, Homo sapien
caaggcctgctctcagatctggttg

SEQ ID NO: 5326174 - DNA, 25 bp, Homo sapien
tagccgagggcagacctcatctctg

SEQ ID NO: 5326175 - DNA, 25 bp, Homo sapien
gccacaggcttgtgcggctagtgaa

SEQ ID NO: 5326176 - DNA, 25 bp, Homo sapien
aagatgcccacgctgctgtctctgg

SEQ ID NO: 5326177 - DNA, 25 bp, Homo sapien
agtctgcgctgtaaagatgcccacg

SEQ ID NO: 5326178 - DNA, 25 bp, Homo sapien
cggctagtgaagtctgcgctgtaaa

SEQ ID NO: 5326179 - DNA, 25 bp, Homo sapien
tatttcatttgccatgaaaacactc

SEQ ID NO: 5326180 - DNA, 25 bp, Homo sapien
ggaacttttcacagggtatatttca

SEQ ID NO: 5326181 - DNA, 25 bp, Homo sapien
aaacactcagttgagtgtgtgcatg

SEQ ID NO: 5326182 - DNA, 25 bp, Homo sapien
catttgccatgaaaacactcagttg

SEQ ID NO: 5326183 - DNA, 25 bp, Homo sapien
tcttttgttccgctggcagatgggc

SEQ ID NO: 5326184 - DNA, 25 bp, Homo sapien
tagctctgacttcggaagaagatcc

SEQ ID NO: 5326185 - DNA, 25 bp, Homo sapien
tctggacatgtgattccggctgtgg

SEQ ID NO: 5326186 - DNA, 25 bp, Homo sapien
gcgtgttcagtgctggtctggacat

SEQ ID NO: 5326187 - DNA, 25 bp, Homo sapien
gggtcaaccccatgtacatagggtc

SEQ ID NO: 5326188 - DNA, 25 bp, Homo sapien
ccccatgtacatagggtcggtggtt

SEQ ID NO: 5326189 - DNA, 25 bp, Homo sapien
caggaaagggggtgctagacttcat

SEQ ID NO: 5326190 - DNA, 25 bp, Homo sapien
tgtacatagggtcggtggttgccca

SEQ ID NO: 5326191 - DNA, 25 bp, Homo sapien
gccccttcgcgcagagtatctcggt

SEQ ID NO: 5326192 - DNA, 25 bp, Homo sapien
tgagccaccggcaaatggctcgctc

SEQ ID NO: 5326193 - DNA, 25 bp, Homo sapien
gagtatctcggtgcattcttccaat

SEQ ID NO: 5326194 - DNA, 25 bp, Homo sapien
ttcttccaattgctggtctgagcca

SEQ ID NO: 5326195 - DNA, 25 bp, Homo sapien
ccttggataaggtgcagcagagggt

SEQ ID NO: 5326196 - DNA, 25 bp, Homo sapien
tcattttatggtgggccttggataa

SEQ ID NO: 5326197 - DNA, 25 bp, Homo sapien
gctgagagagccatcagaccacata

SEQ ID NO: 5326198 - DNA, 25 bp, Homo sapien
ttcaatcccagttggcttttaggag

SEQ ID NO: 5326199 - DNA, 25 bp, Homo sapien
tcttgatgggtggatagaatggcgc

SEQ ID NO: 5326200 - DNA, 25 bp, Homo sapien
tgcttcatgacttccggctgctggg

SEQ ID NO: 5326201 - DNA, 25 bp, Homo sapien
tagaatggcgcagcagagcgtagct

SEQ ID NO: 5326202 - DNA, 25 bp, Homo sapien
caggcaggttgactgcttcatgact

SEQ ID NO: 5326203 - DNA, 25 bp, Homo sapien
gctcttccagtgtcatcccctcttc

SEQ ID NO: 5326204 - DNA, 25 bp, Homo sapien
agacggttgggctcttccagtgtca

SEQ ID NO: 5326205 - DNA, 25 bp, Homo sapien
gggctcttccagtgtcatcccctct

SEQ ID NO: 5326206 - DNA, 25 bp, Homo sapien
cttagacggttgggctcttccagtg

SEQ ID NO: 5326207 - DNA, 25 bp, Homo sapien
tatacttctttgtagagaggatcgt

SEQ ID NO: 5326208 - DNA, 25 bp, Homo sapien
catagaattaagtcaggttatataa

SEQ ID NO: 5326209 - DNA, 25 bp, Homo sapien
ttttcacttgacttacatagaatta

SEQ ID NO: 5326210 - DNA, 25 bp, Homo sapien
gatcgtgaactgctttaagtctggt

SEQ ID NO: 5326211 - DNA, 25 bp, Homo sapien
tcccgcgactggattgggcggcaca

SEQ ID NO: 5326212 - DNA, 25 bp, Homo sapien
agtgtgaagggcctctctgaaagca

SEQ ID NO: 5326213 - DNA, 25 bp, Homo sapien
taactagaggccacggattggcccg

SEQ ID NO: 5326214 - DNA, 25 bp, Homo sapien
tcaccaacggctggcaaatcgagcc

SEQ ID NO: 5326215 - DNA, 25 bp, Homo sapien
gtactctggaatcttcaagagcttc

SEQ ID NO: 5326216 - DNA, 25 bp, Homo sapien
aaacgattttctgtactctggaatc

SEQ ID NO: 5326217 - DNA, 25 bp, Homo sapien
ctgtgtggggtataggagaaacgat

SEQ ID NO: 5326218 - DNA, 25 bp, Homo sapien
ggtataggagaaacgattttctgta

SEQ ID NO: 5326219 - DNA, 25 bp, Homo sapien
cttatttcctggtccaggtgtgaca

SEQ ID NO: 5326220 - DNA, 25 bp, Homo sapien
tacatttcggtgttttcctgcatag

SEQ ID NO: 5326221 - DNA, 25 bp, Homo sapien
gacagtcgataagcagactttacat

SEQ ID NO: 5326222 - DNA, 25 bp, Homo sapien
tcctgcatagtaggtacaatcggtg

SEQ ID NO: 5326223 - DNA, 25 bp, Homo sapien
gggaagcgataagaaaaatgggaca

SEQ ID NO: 5326224 - DNA, 25 bp, Homo sapien
caaatactcttgcagcctgtggatc

SEQ ID NO: 5326225 - DNA, 25 bp, Homo sapien
acaaatactcttgcagcctgtggat

SEQ ID NO: 5326226 - DNA, 25 bp, Homo sapien
gggcacactcgagcagtggcccaaa

SEQ ID NO: 5326227 - DNA, 25 bp, Homo sapien
agagggcacactcgagcagtggccc

SEQ ID NO: 5326228 - DNA, 25 bp, Homo sapien
gagggcacactcgagcagtggccca

SEQ ID NO: 5326229 - DNA, 25 bp, Homo sapien
agggcacactcgagcagtggcccaa

SEQ ID NO: 5326230 - DNA, 25 bp, Homo sapien
ctgaaagagtatagggttgagagct

SEQ ID NO: 5326231 - DNA, 25 bp, Homo sapien
tcatccacatgctctgggctgaggg

SEQ ID NO: 5326232 - DNA, 25 bp, Homo sapien
gaaagagtatagggttgagagctgg

SEQ ID NO: 5326233 - DNA, 25 bp, Homo sapien
catccacatgctctgggctgagggt

SEQ ID NO: 5326234 - DNA, 25 bp, Homo sapien
gccattttatgaatacctcctcact

SEQ ID NO: 5326235 - DNA, 25 bp, Homo sapien
attcctcatctccctcaagctttat

SEQ ID NO: 5326236 - DNA, 25 bp, Homo sapien
tcatctccctcaagctttatctcca

SEQ ID NO: 5326237 - DNA, 25 bp, Homo sapien
ggcactgccattttatgaatacctc

SEQ ID NO: 5326238 - DNA, 25 bp, Homo sapien
tgccacctttgtgtccagacatggc

SEQ ID NO: 5326239 - DNA, 25 bp, Homo sapien
tggcaatatgaaggagccctcactc

SEQ ID NO: 5326240 - DNA, 25 bp, Homo sapien
tcttcatggttctgtctagattgga

SEQ ID NO: 5326241 - DNA, 25 bp, Homo sapien
cagagatgccgtgtccgtgggagtt

SEQ ID NO: 5326242 - DNA, 25 bp, Homo sapien
tggtttctcagcaagtttaactggc

SEQ ID NO: 5326243 - DNA, 25 bp, Homo sapien
ggttggagtctgaccagaacattcc

SEQ ID NO: 5326244 - DNA, 25 bp, Homo sapien
tgcagcagggagtcctgttagcagc

SEQ ID NO: 5326245 - DNA, 25 bp, Homo sapien
tctgaccagaacattcctcgctcat

SEQ ID NO: 5326246 - DNA, 25 bp, Homo sapien
gcagcagggagtcctgttagcagct

SEQ ID NO: 5326247 - DNA, 25 bp, Homo sapien
aaatcacatctcttatcttcaggac

SEQ ID NO: 5326248 - DNA, 25 bp, Homo sapien
caaacatctaggagcaggtggagag

SEQ ID NO: 5326249 - DNA, 25 bp, Homo sapien
taaattcctcaataggttcccttgc

SEQ ID NO: 5326250 - DNA, 25 bp, Homo sapien
ctatcaaaactggtcctccagagag

SEQ ID NO: 5326251 - DNA, 25 bp, Homo sapien
ctggctgcaggatcccgtcacagca

SEQ ID NO: 5326252 - DNA, 25 bp, Homo sapien
aggatcccgtcacagcaggtggacc

SEQ ID NO: 5326253 - DNA, 25 bp, Homo sapien
ggaccttaagctgataaatcctgaa

SEQ ID NO: 5326254 - DNA, 25 bp, Homo sapien
cagcaggtggaccttaagctgataa

SEQ ID NO: 5326255 - DNA, 25 bp, Homo sapien
aactccgtctgtggatccctgtggt

SEQ ID NO: 5326256 - DNA, 25 bp, Homo sapien
taaggaaaaactccgtctgtggatc

SEQ ID NO: 5326257 - DNA, 25 bp, Homo sapien
caatgaaaaggcctgccagattcat

SEQ ID NO: 5326258 - DNA, 25 bp, Homo sapien
gattcatcatcgataaatcatcttg

SEQ ID NO: 5326259 - DNA, 25 bp, Homo sapien
gacttattaaattcggcacctcctg

SEQ ID NO: 5326260 - DNA, 25 bp, Homo sapien
ttcacaccagtgtcaaaatgactta

SEQ ID NO: 5326261 - DNA, 25 bp, Homo sapien
atgcttagaatgtctgcctgtctgt

SEQ ID NO: 5326262 - DNA, 25 bp, Homo sapien
gctgatctgttcgtttcacaccagt

SEQ ID NO: 5326263 - DNA, 25 bp, Homo sapien
ttaaattgagcaatgctaaagagct

SEQ ID NO: 5326264 - DNA, 25 bp, Homo sapien
ggcccatggaagctcttttcgctta

SEQ ID NO: 5326265 - DNA, 25 bp, Homo sapien
tctgaactcttccagatcaacatgt

SEQ ID NO: 5326266 - DNA, 25 bp, Homo sapien
catcaaaatgaatgagggcaatggg

SEQ ID NO: 5326267 - DNA, 25 bp, Homo sapien
gaatgaactaatttttgcatctcag

SEQ ID NO: 5326268 - DNA, 25 bp, Homo sapien
gcatctcagtaccaagatttggaac

SEQ ID NO: 5326269 - DNA, 25 bp, Homo sapien
cacatagatgtattcgaacataaaa

SEQ ID NO: 5326270 - DNA, 25 bp, Homo sapien
gatttggaacttcacatagatgtat

SEQ ID NO: 5326271 - DNA, 25 bp, Homo sapien
gttgttcatttagttccctggctat

SEQ ID NO: 5326272 - DNA, 25 bp, Homo sapien
tcttcagggtaaagctcgtgaaaag

SEQ ID NO: 5326273 - DNA, 25 bp, Homo sapien
ctttaaacagatgtgatctcacagc

SEQ ID NO: 5326274 - DNA, 25 bp, Homo sapien
gatgtgatctcacagcatagaattc

SEQ ID NO: 5326275 - DNA, 25 bp, Homo sapien
cagacaggctgtaaagttctagatt

SEQ ID NO: 5326276 - DNA, 25 bp, Homo sapien
atttctcttcagtgtagaacagcat

SEQ ID NO: 5326277 - DNA, 25 bp, Homo sapien
gacaggctgtaaagttctagatttt

SEQ ID NO: 5326278 - DNA, 25 bp, Homo sapien
acaggctgtaaagttctagattttg

SEQ ID NO: 5326279 - DNA, 25 bp, Homo sapien
gctagattttgcaggcttgactcca

SEQ ID NO: 5326280 - DNA, 25 bp, Homo sapien
tgccaagatgggaaaacctgagatg

SEQ ID NO: 5326281 - DNA, 25 bp, Homo sapien
tcagttcgtctgtgttcaggcaaaa

SEQ ID NO: 5326282 - DNA, 25 bp, Homo sapien
gcagtgcagttgtagaaacaagcca

SEQ ID NO: 5326283 - DNA, 25 bp, Homo sapien
catttctgagcaaagaggtacagct

SEQ ID NO: 5326284 - DNA, 25 bp, Homo sapien
tcatttctgagcaaagaggtacagc

SEQ ID NO: 5326285 - DNA, 25 bp, Homo sapien
tctgagcaaagaggtacagctctcg

SEQ ID NO: 5326286 - DNA, 25 bp, Homo sapien
agcaaagaggtacagctctcggcac

SEQ ID NO: 5326287 - DNA, 25 bp, Homo sapien
aggccagaccgcaggcagagtgcct

SEQ ID NO: 5326288 - DNA, 25 bp, Homo sapien
tcctggatcctgacacttcttgagc

SEQ ID NO: 5326289 - DNA, 25 bp, Homo sapien
aagtcctggatcctgacacttcttg

SEQ ID NO: 5326290 - DNA, 25 bp, Homo sapien
gatcctgacacttcttgagcttctt

SEQ ID NO: 5326291 - DNA, 25 bp, Homo sapien
tggatcctgacacttcttgagcttc

SEQ ID NO: 5326292 - DNA, 25 bp, Homo sapien
gtgtgagcggttgagctcccccagt

SEQ ID NO: 5326293 - DNA, 25 bp, Homo sapien
aggtgtgagcggttgagctccccca

SEQ ID NO: 5326294 - DNA, 25 bp, Homo sapien
ctagccctgtagctttttagaatta

SEQ ID NO: 5326295 - DNA, 25 bp, Homo sapien
cttcttggaggtgtgagcggttgag

SEQ ID NO: 5326296 - DNA, 25 bp, Homo sapien
ggcctctggggcgaggtctgcaggt

SEQ ID NO: 5326297 - DNA, 25 bp, Homo sapien
cctctggggcgaggtctgcaggtgg

SEQ ID NO: 5326298 - DNA, 25 bp, Homo sapien
aggtctgcaggtgggctctttagca

SEQ ID NO: 5326299 - DNA, 25 bp, Homo sapien
ctgcaggtgggctctttagcagtga

SEQ ID NO: 5326300 - DNA, 25 bp, Homo sapien
tcagggaaccttcctggaactgacc

SEQ ID NO: 5326301 - DNA, 25 bp, Homo sapien
ggaaccttcctggaactgaccggca

SEQ ID NO: 5326302 - DNA, 25 bp, Homo sapien
accttcctggaactgaccggcacag

SEQ ID NO: 5326303 - DNA, 25 bp, Homo sapien
tggccttgcctatgagggaggctca

SEQ ID NO: 5326304 - DNA, 25 bp, Homo sapien
ggagaacaaacagatcccactggaa

SEQ ID NO: 5326305 - DNA, 25 bp, Homo sapien
tttactgtcctgcatctgaggtgga

SEQ ID NO: 5326306 - DNA, 25 bp, Homo sapien
gacaattcgaggctcatggccagat

SEQ ID NO: 5326307 - DNA, 25 bp, Homo sapien
agtagataaggacccctcactgcca

SEQ ID NO: 5326308 - DNA, 25 bp, Homo sapien
gaaagtgcttcatcataggggtgag

SEQ ID NO: 5326309 - DNA, 25 bp, Homo sapien
tgagattcaggacttccatgacaaa

SEQ ID NO: 5326310 - DNA, 25 bp, Homo sapien
ggacttccatgacaaactgttaggg

SEQ ID NO: 5326311 - DNA, 25 bp, Homo sapien
catcataggggtgagattcaggact

SEQ ID NO: 5326312 - DNA, 25 bp, Homo sapien
tcagcggcaccatcgctgaatgacc

SEQ ID NO: 5326313 - DNA, 25 bp, Homo sapien
tttgggcaacaaggtcctcagcggc

SEQ ID NO: 5326314 - DNA, 25 bp, Homo sapien
gaccagacttgatggcagggcagtt

SEQ ID NO: 5326315 - DNA, 25 bp, Homo sapien
cacagtagcgtggaaaatctggctc

SEQ ID NO: 5326316 - DNA, 25 bp, Homo sapien
ctgtgacaccaatccatcccatgac

SEQ ID NO: 5326317 - DNA, 25 bp, Homo sapien
gacaccaatccatcccatgacttga

SEQ ID NO: 5326318 - DNA, 25 bp, Homo sapien
tccatcccatgacttgaactagccc

SEQ ID NO: 5326319 - DNA, 25 bp, Homo sapien
tgtgacaccaatccatcccatgact

SEQ ID NO: 5326320 - DNA, 25 bp, Homo sapien
tgttttggtgctaatcttcagtgtg

SEQ ID NO: 5326321 - DNA, 25 bp, Homo sapien
tatttagctaagtgacttcatggct

SEQ ID NO: 5326322 - DNA, 25 bp, Homo sapien
ggcatctgacttggactactaatca

SEQ ID NO: 5326323 - DNA, 25 bp, Homo sapien
tctgaatctatacctccagctagca

SEQ ID NO: 5326324 - DNA, 25 bp, Homo sapien
ttttctgatgtcattgttctagaca

SEQ ID NO: 5326325 - DNA, 25 bp, Homo sapien
tgttcgccaactcctacttttctag

SEQ ID NO: 5326326 - DNA, 25 bp, Homo sapien
ttttccacccatattcaggctgatg

SEQ ID NO: 5326327 - DNA, 25 bp, Homo sapien
tctagcgaaggaacatctatcgaca

SEQ ID NO: 5326328 - DNA, 25 bp, Homo sapien
cccagtgagattaaaggaaccttct

SEQ ID NO: 5326329 - DNA, 25 bp, Homo sapien
tctttgaacttgtaaacccagacac

SEQ ID NO: 5326330 - DNA, 25 bp, Homo sapien
tgtgctgcacagtaagtcattttca

SEQ ID NO: 5326331 - DNA, 25 bp, Homo sapien
tctggccgagatattcagtatcaac

SEQ ID NO: 5326332 - DNA, 25 bp, Homo sapien
tcattttcacaaggatctggccgag

SEQ ID NO: 5326333 - DNA, 25 bp, Homo sapien
ggaaggtctgatggcttcagaccac

SEQ ID NO: 5326334 - DNA, 25 bp, Homo sapien
cacctttctgcactgtacccgttgg

SEQ ID NO: 5326335 - DNA, 25 bp, Homo sapien
tcaacaacttagcttaagaattcca

SEQ ID NO: 5326336 - DNA, 25 bp, Homo sapien
gtcaggtgtgagaagcgtccgtgcc

SEQ ID NO: 5326337 - DNA, 25 bp, Homo sapien
gaattgggccctttgtaacctcgca

SEQ ID NO: 5326338 - DNA, 25 bp, Homo sapien
acactgaagttagaattgggccctt

SEQ ID NO: 5326339 - DNA, 25 bp, Homo sapien
tgaagttagaattgggccctttgta

SEQ ID NO: 5326340 - DNA, 25 bp, Homo sapien
gggccctttgtaacctcgcatatgc

SEQ ID NO: 5326341 - DNA, 25 bp, Homo sapien
gtttataatgcccatcaaccaggct

SEQ ID NO: 5326342 - DNA, 25 bp, Homo sapien
cagagaggacgggtgactgtggaga

SEQ ID NO: 5326343 - DNA, 25 bp, Homo sapien
tgactgtggagaatgctgagggctg

SEQ ID NO: 5326344 - DNA, 25 bp, Homo sapien
ccagatgtggtccacataaacactg

SEQ ID NO: 5326345 - DNA, 25 bp, Homo sapien
gggctgccagatgtggtccacataa

SEQ ID NO: 5326346 - DNA, 25 bp, Homo sapien
gcccataggatatgtaggaagcctg

SEQ ID NO: 5326347 - DNA, 25 bp, Homo sapien
tgctagactccgtagatggcccata

SEQ ID NO: 5326348 - DNA, 25 bp, Homo sapien
gggctattgacacggccttgctaga

SEQ ID NO: 5326349 - DNA, 25 bp, Homo sapien
ccaggtgtgttgtaggtcttaccag

SEQ ID NO: 5326350 - DNA, 25 bp, Homo sapien
tattcttttaggacattggttctca

SEQ ID NO: 5326351 - DNA, 25 bp, Homo sapien
ctccatattcttttaggacattggt

SEQ ID NO: 5326352 - DNA, 25 bp, Homo sapien
ccatattcttttaggacattggttc

SEQ ID NO: 5326353 - DNA, 25 bp, Homo sapien
catattcttttaggacattggttct

SEQ ID NO: 5326354 - DNA, 25 bp, Homo sapien
cttaaccatgtatctttcacacctt

SEQ ID NO: 5326355 - DNA, 25 bp, Homo sapien
tcttgccttcctgtagagcaaggct

SEQ ID NO: 5326356 - DNA, 25 bp, Homo sapien
taaccatgtatctttcacaccttct

SEQ ID NO: 5326357 - DNA, 25 bp, Homo sapien
tgccttcctgtagagcaaggctcat

SEQ ID NO: 5326358 - DNA, 25 bp, Homo sapien
tgaatgcatgaatggtgaccggtgc

SEQ ID NO: 5326359 - DNA, 25 bp, Homo sapien
tgaccggtgcaatgggggttctccc

SEQ ID NO: 5326360 - DNA, 25 bp, Homo sapien
ggagtcatgtctgctctcaatggtg

SEQ ID NO: 5326361 - DNA, 25 bp, Homo sapien
tgtctgctctcaatggtgggtgttt

SEQ ID NO: 5326362 - DNA, 25 bp, Homo sapien
gaaattgagttgggagacaccccaa

SEQ ID NO: 5326363 - DNA, 25 bp, Homo sapien
acatctttacttctggacgactgaa

SEQ ID NO: 5326364 - DNA, 25 bp, Homo sapien
tgtactttacatagcgttttcaaat

SEQ ID NO: 5326365 - DNA, 25 bp, Homo sapien
ttgagagcctagattccaataatag

SEQ ID NO: 5326366 - DNA, 25 bp, Homo sapien
caaatatattcactcgacgctgagg

SEQ ID NO: 5326367 - DNA, 25 bp, Homo sapien
ggtttaccgccagactgtgatggtg

SEQ ID NO: 5326368 - DNA, 25 bp, Homo sapien
tgagcagcgctctccaccgtaatac

SEQ ID NO: 5326369 - DNA, 25 bp, Homo sapien
tgaaacctgggcttccgacttgctg

SEQ ID NO: 5326370 - DNA, 25 bp, Homo sapien
accgtaatacggctgcctgcggaac

SEQ ID NO: 5326371 - DNA, 25 bp, Homo sapien
tccaaggtgatcttcctaggaatgt

SEQ ID NO: 5326372 - DNA, 25 bp, Homo sapien
ggactgacaggctccaaggtgatct

SEQ ID NO: 5326373 - DNA, 25 bp, Homo sapien
tgatcttcctaggaatgtccacaga

SEQ ID NO: 5326374 - DNA, 25 bp, Homo sapien
gaatgtccacagagtgtgggacctg

SEQ ID NO: 5326375 - DNA, 25 bp, Homo sapien
gataattccctctcacaatctgcag

SEQ ID NO: 5326376 - DNA, 25 bp, Homo sapien
caatctgcagcgactgttttctgtt

SEQ ID NO: 5326377 - DNA, 25 bp, Homo sapien
ttggtttggtgataattccctctca

SEQ ID NO: 5326378 - DNA, 25 bp, Homo sapien
cctctcacaatctgcagcgactgtt

SEQ ID NO: 5326379 - DNA, 25 bp, Homo sapien
gaggctttgctctgaaagcagactg

SEQ ID NO: 5326380 - DNA, 25 bp, Homo sapien
tcgctgaacaagcattggctgagtt

SEQ ID NO: 5326381 - DNA, 25 bp, Homo sapien
gctgaggctggtcgctgaacaagca

SEQ ID NO: 5326382 - DNA, 25 bp, Homo sapien
tgagttcaggcatacgctgggggtc

SEQ ID NO: 5326383 - DNA, 25 bp, Homo sapien
gctgctgactgggccactctgaaaa

SEQ ID NO: 5326384 - DNA, 25 bp, Homo sapien
tcaatgcccatttggagagggatgc

SEQ ID NO: 5326385 - DNA, 25 bp, Homo sapien
tgactgggccactctgaaaatcctc

SEQ ID NO: 5326386 - DNA, 25 bp, Homo sapien
ctctctccagtggaaaaacaagtac

SEQ ID NO: 5326387 - DNA, 25 bp, Homo sapien
aaaggctggctttctgtgtcaaatc

SEQ ID NO: 5326388 - DNA, 25 bp, Homo sapien
tctgtgtcaaatctcacttcagctg

SEQ ID NO: 5326389 - DNA, 25 bp, Homo sapien
ctgcctccagcaaaggctggctttc

SEQ ID NO: 5326390 - DNA, 25 bp, Homo sapien
tgtgtcaaatctcacttcagctgtg

SEQ ID NO: 5326391 - DNA, 25 bp, Homo sapien
ttataccttgcctcaatttctttaa

SEQ ID NO: 5326392 - DNA, 25 bp, Homo sapien
ttcttgacaaggcatctgagggttg

SEQ ID NO: 5326393 - DNA, 25 bp, Homo sapien
tcaatttctttaagcagttgtaaca

SEQ ID NO: 5326394 - DNA, 25 bp, Homo sapien
tctgagggttgaaggtcatattttt

SEQ ID NO: 5326395 - DNA, 25 bp, Homo sapien
taagctaaggcccacagatgttaag

SEQ ID NO: 5326396 - DNA, 25 bp, Homo sapien
tcatagagcaccttccatggaggca

SEQ ID NO: 5326397 - DNA, 25 bp, Homo sapien
tactaggttacaggtgtcccactga

SEQ ID NO: 5326398 - DNA, 25 bp, Homo sapien
aaaggattttctagaccatggaggc

SEQ ID NO: 5326399 - DNA, 25 bp, Homo sapien
gtggtatttcccagtagaggtccat

SEQ ID NO: 5326400 - DNA, 25 bp, Homo sapien
ttcccagtagaggtccataccaggc

SEQ ID NO: 5326401 - DNA, 25 bp, Homo sapien
gtaaggaccaaactcgtccactata

SEQ ID NO: 5326402 - DNA, 25 bp, Homo sapien
caaactcgtccactataaggtggta

SEQ ID NO: 5326403 - DNA, 25 bp, Homo sapien
ggtctggtcattgcctggactctcc

SEQ ID NO: 5326404 - DNA, 25 bp, Homo sapien
gagtggcctggttgttgaagcagat

SEQ ID NO: 5326405 - DNA, 25 bp, Homo sapien
aagcagatggtctggtcattgcctg

SEQ ID NO: 5326406 - DNA, 25 bp, Homo sapien
gactctccaaacagtaggccttctg

SEQ ID NO: 5326407 - DNA, 25 bp, Homo sapien
cactggctgccgatcgacatgcaaa

SEQ ID NO: 5326408 - DNA, 25 bp, Homo sapien
ctatagacacggctgggaatgcact

SEQ ID NO: 5326409 - DNA, 25 bp, Homo sapien
ccttttagtgtgcagcggaatgtcc

SEQ ID NO: 5326410 - DNA, 25 bp, Homo sapien
taatctgagggctgctacactggct

SEQ ID NO: 5326411 - DNA, 25 bp, Homo sapien
ggctggcttggcagtggggatcgtg

SEQ ID NO: 5326412 - DNA, 25 bp, Homo sapien
gctggcttggcagtggggatcgtgt

SEQ ID NO: 5326413 - DNA, 25 bp, Homo sapien
tgaggaatattaaccttgtccgtaa

SEQ ID NO: 5326414 - DNA, 25 bp, Homo sapien
cgtgtcaacatctgggataaactcc

SEQ ID NO: 5326415 - DNA, 25 bp, Homo sapien
ttttctcaggtctgcttgcaatcga

SEQ ID NO: 5326416 - DNA, 25 bp, Homo sapien
tggaacagccagtactgcgtgtcaa

SEQ ID NO: 5326417 - DNA, 25 bp, Homo sapien
tattagacagatgtatttgcaccat

SEQ ID NO: 5326418 - DNA, 25 bp, Homo sapien
attttgaacagcaatattagacaga

SEQ ID NO: 5326419 - DNA, 25 bp, Homo sapien
ggaattttattcaatgcagtggcat

SEQ ID NO: 5326420 - DNA, 25 bp, Homo sapien
ttttacagcatggaattttattcaa

SEQ ID NO: 5326421 - DNA, 25 bp, Homo sapien
catttcatgtacactctcagaggcc

SEQ ID NO: 5326422 - DNA, 25 bp, Homo sapien
aatagaggattatcttttgagcacc

SEQ ID NO: 5326423 - DNA, 25 bp, Homo sapien
ggccgctctatgacggaagtgtctt

SEQ ID NO: 5326424 - DNA, 25 bp, Homo sapien
gccaaagtcatcaagctagctaagg

SEQ ID NO: 5326425 - DNA, 25 bp, Homo sapien
gagctttaaacaataccacctggga

SEQ ID NO: 5326426 - DNA, 25 bp, Homo sapien
tccgggtgacccatatgaaggcttt

SEQ ID NO: 5326427 - DNA, 25 bp, Homo sapien
tcaaccctggtagcacactggaatc

SEQ ID NO: 5326428 - DNA, 25 bp, Homo sapien
gcagggcatagctccaaaggtctag

SEQ ID NO: 5326429 - DNA, 25 bp, Homo sapien
tgcaagaagaatgccgtcgcctttc

SEQ ID NO: 5326430 - DNA, 25 bp, Homo sapien
tcccacattgttctcgacaagaaaa

SEQ ID NO: 5326431 - DNA, 25 bp, Homo sapien
tctgccatatgttggaaaaagatct

SEQ ID NO: 5326432 - DNA, 25 bp, Homo sapien
cattcttccctcgtgaagtaaagct

SEQ ID NO: 5326433 - DNA, 25 bp, Homo sapien
gatctcccaatagttgtgactaccc

SEQ ID NO: 5326434 - DNA, 25 bp, Homo sapien
gcacttaatggtatgtttctcagca

SEQ ID NO: 5326435 - DNA, 25 bp, Homo sapien
gaaggtacaagatctctgggagcac

SEQ ID NO: 5326436 - DNA, 25 bp, Homo sapien
ggagagcatcaaaccccagatagaa

SEQ ID NO: 5326437 - DNA, 25 bp, Homo sapien
ctgagacagctccgcggtgcttcct

SEQ ID NO: 5326438 - DNA, 25 bp, Homo sapien
tctgtaactgaagctcctcgccact

SEQ ID NO: 5326439 - DNA, 25 bp, Homo sapien
agctccgcggtgcttcctgtccctg

SEQ ID NO: 5326440 - DNA, 25 bp, Homo sapien
gtaactgaagctcctcgccactgag

SEQ ID NO: 5326441 - DNA, 25 bp, Homo sapien
gagcatggctatggcgaaccttgaa

SEQ ID NO: 5326442 - DNA, 25 bp, Homo sapien
actttgacgtttacatatccactgc

SEQ ID NO: 5326443 - DNA, 25 bp, Homo sapien
ccttgtttctggtgcggcgggacaa

SEQ ID NO: 5326444 - DNA, 25 bp, Homo sapien
gatcaatgtttctcagagcatggct

SEQ ID NO: 5326445 - DNA, 25 bp, Homo sapien
ggcgagattctcagtagaggagcca

SEQ ID NO: 5326446 - DNA, 25 bp, Homo sapien
gatgtctctcccaggggcgagattc

SEQ ID NO: 5326447 - DNA, 25 bp, Homo sapien
gagattctcagtagaggagccagct

SEQ ID NO: 5326448 - DNA, 25 bp, Homo sapien
tcccaggggcgagattctcagtaga

SEQ ID NO: 5326449 - DNA, 25 bp, Homo sapien
gtcaaaacttgatacctgctagtag

SEQ ID NO: 5326450 - DNA, 25 bp, Homo sapien
ctgctagtagtttgatcttcggtat

SEQ ID NO: 5326451 - DNA, 25 bp, Homo sapien
tctttccttctaagcctaaaggcag

SEQ ID NO: 5326452 - DNA, 25 bp, Homo sapien
taaaggcagaactcttcccttcttc

SEQ ID NO: 5326453 - DNA, 25 bp, Homo sapien
ttttgcacatctctctcagcggcca

SEQ ID NO: 5326454 - DNA, 25 bp, Homo sapien
ctattttgcacatctctctcagcgg

SEQ ID NO: 5326455 - DNA, 25 bp, Homo sapien
tttgcacatctctctcagcggccat

SEQ ID NO: 5326456 - DNA, 25 bp, Homo sapien
tattttgcacatctctctcagcggc

SEQ ID NO: 5326457 - DNA, 25 bp, Homo sapien
tcaagatggctgagagtttgttccc

SEQ ID NO: 5326458 - DNA, 25 bp, Homo sapien
tcaagcagttgtagagcacggacag

SEQ ID NO: 5326459 - DNA, 25 bp, Homo sapien
aattgctgctcaatgtggcacgtgc

SEQ ID NO: 5326460 - DNA, 25 bp, Homo sapien
agtttgttcccatcagtctgcgagg

SEQ ID NO: 5326461 - DNA, 25 bp, Homo sapien
tgtggggcttaagagaaattaggta

SEQ ID NO: 5326462 - DNA, 25 bp, Homo sapien
gatgatgtggggcttaagagaaatt

SEQ ID NO: 5326463 - DNA, 25 bp, Homo sapien
tgatgtggggcttaagagaaattag

SEQ ID NO: 5326464 - DNA, 25 bp, Homo sapien
agagatgatgtggggcttaagagaa

SEQ ID NO: 5326465 - DNA, 25 bp, Homo sapien
tctcatgatagcttgagcttagaac

SEQ ID NO: 5326466 - DNA, 25 bp, Homo sapien
tgagcttagaaccaatttgtacttg

SEQ ID NO: 5326467 - DNA, 25 bp, Homo sapien
caatttgtacttgtagaactctctg

SEQ ID NO: 5326468 - DNA, 25 bp, Homo sapien
ccacattgagtttacgattcttggg

SEQ ID NO: 5326469 - DNA, 25 bp, Homo sapien
gatcacggtattggtaaacagctcc

SEQ ID NO: 5326470 - DNA, 25 bp, Homo sapien
ttaattagctgcagtagcaacggca

SEQ ID NO: 5326471 - DNA, 25 bp, Homo sapien
gatgactgaggtctgtgtacttgac

SEQ ID NO: 5326472 - DNA, 25 bp, Homo sapien
cagcatccgagagcgggaagatgac

SEQ ID NO: 5326473 - DNA, 25 bp, Homo sapien
agtgagcagctcatgcgctctctcc

SEQ ID NO: 5326474 - DNA, 25 bp, Homo sapien
gtgagcagctcatgcgctctctcct

SEQ ID NO: 5326475 - DNA, 25 bp, Homo sapien
agctcatgcgctctctcctcagaga

SEQ ID NO: 5326476 - DNA, 25 bp, Homo sapien
tcatgcgctctctcctcagagatgg

SEQ ID NO: 5326477 - DNA, 25 bp, Homo sapien
gatgagccccctcttgcgatctgtc

SEQ ID NO: 5326478 - DNA, 25 bp, Homo sapien
cgatgagccccctcttgcgatctgt

SEQ ID NO: 5326479 - DNA, 25 bp, Homo sapien
cctcttgcgatctgtcactctggcc

SEQ ID NO: 5326480 - DNA, 25 bp, Homo sapien
gcgatctgtcactctggcccctgag

SEQ ID NO: 5326481 - DNA, 25 bp, Homo sapien
ggccttagttcatcatctatcgtta

SEQ ID NO: 5326482 - DNA, 25 bp, Homo sapien
ttcaggccttagttcatcatctatc

SEQ ID NO: 5326483 - DNA, 25 bp, Homo sapien
tagttcatcatctatcgttagtgaa

SEQ ID NO: 5326484 - DNA, 25 bp, Homo sapien
catctatcgttagtgaaatactcat

SEQ ID NO: 5326485 - DNA, 25 bp, Homo sapien
gagctcaggatgtttagatcaaagc

SEQ ID NO: 5326486 - DNA, 25 bp, Homo sapien
tcatgtacttctcggcatgtcagca

SEQ ID NO: 5326487 - DNA, 25 bp, Homo sapien
cttgaccctccagtttacaagtttg

SEQ ID NO: 5326488 - DNA, 25 bp, Homo sapien
gatcaaagcattgcaattccttggc

SEQ ID NO: 5326489 - DNA, 25 bp, Homo sapien
tgctcagattaagaagatcccgcag

SEQ ID NO: 5326490 - DNA, 25 bp, Homo sapien
caactgctgctcagattaagaagat

SEQ ID NO: 5326491 - DNA, 25 bp, Homo sapien
gattaagaagatcccgcagcatccc

SEQ ID NO: 5326492 - DNA, 25 bp, Homo sapien
tgctgctcagattaagaagatcccg

SEQ ID NO: 5326493 - DNA, 25 bp, Homo sapien
cacagtggcagctatcttctgagtt

SEQ ID NO: 5326494 - DNA, 25 bp, Homo sapien
cttaggatgtggagtcagctttaac

SEQ ID NO: 5326495 - DNA, 25 bp, Homo sapien
tgatccacagagctatcagggacat

SEQ ID NO: 5326496 - DNA, 25 bp, Homo sapien
ttggtcccttaggatgtggagtcag

SEQ ID NO: 5326497 - DNA, 25 bp, Homo sapien
ccacagagctatcagggacatcatt

SEQ ID NO: 5326498 - DNA, 25 bp, Homo sapien
agacatggggctcggccgggaaggc

SEQ ID NO: 5326499 - DNA, 25 bp, Homo sapien
tgtagtagtggtccaagagacatgg

SEQ ID NO: 5326500 - DNA, 25 bp, Homo sapien
agagacatggggctcggccgggaag

SEQ ID NO: 5326501 - DNA, 25 bp, Homo sapien
atggggctcggccgggaaggcttct

SEQ ID NO: 5326502 - DNA, 25 bp, Homo sapien
cccaatgtaatcagtggccagtctt

SEQ ID NO: 5326503 - DNA, 25 bp, Homo sapien
tctgcatgtcccttccaggcatcca

SEQ ID NO: 5326504 - DNA, 25 bp, Homo sapien
caggaggtacccaatgtaatcagtg

SEQ ID NO: 5326505 - DNA, 25 bp, Homo sapien
gttggctcggcttctgtgctctggt

SEQ ID NO: 5326506 - DNA, 25 bp, Homo sapien
agtgctcccacaactgaaggcttca

SEQ ID NO: 5326507 - DNA, 25 bp, Homo sapien
caatcaaggaggcagccattagtga

SEQ ID NO: 5326508 - DNA, 25 bp, Homo sapien
cattagtgattcgatgcaggcctcc

SEQ ID NO: 5326509 - DNA, 25 bp, Homo sapien
ggtgattgcctgatctgtttcttgg

SEQ ID NO: 5326510 - DNA, 25 bp, Homo sapien
tcctatgcgctttggaaagttaaaa

SEQ ID NO: 5326511 - DNA, 25 bp, Homo sapien
gtgaaatggatggtatatgcttttc

SEQ ID NO: 5326512 - DNA, 25 bp, Homo sapien
tctccacgtctcctatgcgctttgg

SEQ ID NO: 5326513 - DNA, 25 bp, Homo sapien
ccagctggcgattagaggtggctct

SEQ ID NO: 5326514 - DNA, 25 bp, Homo sapien
tgaagtgcctgaacccttgcatggg

SEQ ID NO: 5326515 - DNA, 25 bp, Homo sapien
agtggccagaggaccgggacctgaa

SEQ ID NO: 5326516 - DNA, 25 bp, Homo sapien
gagaggcaccataaccgagtggcca

SEQ ID NO: 5326517 - DNA, 25 bp, Homo sapien
tcagagtagggttaacagagaggca

SEQ ID NO: 5326518 - DNA, 25 bp, Homo sapien
cacacagggctgcagacctgggctt

SEQ ID NO: 5326519 - DNA, 25 bp, Homo sapien
aattgagcttcacacacagggctgc

SEQ ID NO: 5326520 - DNA, 25 bp, Homo sapien
ttcacacacagggctgcagacctgg

SEQ ID NO: 5326521 - DNA, 25 bp, Homo sapien
ctgcagacctgggctttgctgagcc

SEQ ID NO: 5326522 - DNA, 25 bp, Homo sapien
tctctgggtctcgacaataatgtac

SEQ ID NO: 5326523 - DNA, 25 bp, Homo sapien
ccagagcactggaagtgtttcacac

SEQ ID NO: 5326524 - DNA, 25 bp, Homo sapien
aaggaggctgattatgttgactgaa

SEQ ID NO: 5326525 - DNA, 25 bp, Homo sapien
caataatgtacctcgaaaaggaggc

SEQ ID NO: 5326526 - DNA, 25 bp, Homo sapien
cttaatgttgctttgctcccatctg

SEQ ID NO: 5326527 - DNA, 25 bp, Homo sapien
gctcccatctgtagcctaaattatt

SEQ ID NO: 5326528 - DNA, 25 bp, Homo sapien
tacatccctgcgttgtgaattgcca

SEQ ID NO: 5326529 - DNA, 25 bp, Homo sapien
tagaacggtttcaagatcaagatcc

SEQ ID NO: 5326530 - DNA, 25 bp, Homo sapien
ctttctgtgcaaatacttcatatct

SEQ ID NO: 5326531 - DNA, 25 bp, Homo sapien
attttactttctgtgcaaatacttc

SEQ ID NO: 5326532 - DNA, 25 bp, Homo sapien
tactttctgtgcaaatacttcatat

SEQ ID NO: 5326533 - DNA, 25 bp, Homo sapien
attttgatagtttttcaaacactga

SEQ ID NO: 5326534 - DNA, 25 bp, Homo sapien
accgggctcatttagttcctcctca

SEQ ID NO: 5326535 - DNA, 25 bp, Homo sapien
catctccaagtttaccgggctcatt

SEQ ID NO: 5326536 - DNA, 25 bp, Homo sapien
ttgtccactgtaccacgtgatgcat

SEQ ID NO: 5326537 - DNA, 25 bp, Homo sapien
actgtaccacgtgatgcatctccaa

SEQ ID NO: 5326538 - DNA, 25 bp, Homo sapien
tggggcaacagggtcgggttgacaa

SEQ ID NO: 5326539 - DNA, 25 bp, Homo sapien
ctgaggtgcagagtatcagtgcctg

SEQ ID NO: 5326540 - DNA, 25 bp, Homo sapien
ctggggcaacagggtcgggttgaca

SEQ ID NO: 5326541 - DNA, 25 bp, Homo sapien
tcctggggcaacagggtcgggttga

SEQ ID NO: 5326542 - DNA, 25 bp, Homo sapien
agtggaggctcaaggcaggaagcat

SEQ ID NO: 5326543 - DNA, 25 bp, Homo sapien
ctgcagtaggaagcagtggaggctc

SEQ ID NO: 5326544 - DNA, 25 bp, Homo sapien
aactgcagtaggaagcagtggaggc

SEQ ID NO: 5326545 - DNA, 25 bp, Homo sapien
tgcaactgcagtaggaagcagtgga

SEQ ID NO: 5326546 - DNA, 25 bp, Homo sapien
aatctcttaaaggcaatgacagcca

SEQ ID NO: 5326547 - DNA, 25 bp, Homo sapien
aggtggcctccaggctcaaatctct

SEQ ID NO: 5326548 - DNA, 25 bp, Homo sapien
tggcctccaggctcaaatctcttaa

SEQ ID NO: 5326549 - DNA, 25 bp, Homo sapien
ggctcaaatctcttaaaggcaatga

SEQ ID NO: 5326550 - DNA, 25 bp, Homo sapien
tgcatggcttgaattctatttcaca

SEQ ID NO: 5326551 - DNA, 25 bp, Homo sapien
catggcttgaattctatttcacaca

SEQ ID NO: 5326552 - DNA, 25 bp, Homo sapien
ttccacagagctcctcttcaatcca

SEQ ID NO: 5326553 - DNA, 25 bp, Homo sapien
gcatggcttgaattctatttcacac

SEQ ID NO: 5326554 - DNA, 25 bp, Homo sapien
gaaaatgctgtggtgtagataaagc

SEQ ID NO: 5326555 - DNA, 25 bp, Homo sapien
tgtggtgtagataaagcccattcca

SEQ ID NO: 5326556 - DNA, 25 bp, Homo sapien
tctgttcagaatggaaaatgctgtg

SEQ ID NO: 5326557 - DNA, 25 bp, Homo sapien
cagaatggaaaatgctgtggtgtag

SEQ ID NO: 5326558 - DNA, 25 bp, Homo sapien
ttgccgtgctcagttctgtctgaag

SEQ ID NO: 5326559 - DNA, 25 bp, Homo sapien
cagcctgggaccgtgtagatactac

SEQ ID NO: 5326560 - DNA, 25 bp, Homo sapien
tactaccctgtgagcgttgccgtgc

SEQ ID NO: 5326561 - DNA, 25 bp, Homo sapien
ccgtgtagatactaccctgtgagcg

SEQ ID NO: 5326562 - DNA, 25 bp, Homo sapien
cttgtttggaaagcaagagctgaac

SEQ ID NO: 5326563 - DNA, 25 bp, Homo sapien
aggatgataccctgcttgtttggaa

SEQ ID NO: 5326564 - DNA, 25 bp, Homo sapien
cattataatcacaataaggatgata

SEQ ID NO: 5326565 - DNA, 25 bp, Homo sapien
ctgagcatgaatgactgttgtcatc

SEQ ID NO: 5326566 - DNA, 25 bp, Homo sapien
tcgccaatgcaggaccataggctaa

SEQ ID NO: 5326567 - DNA, 25 bp, Homo sapien
aatgcaggaccataggctaacagca

SEQ ID NO: 5326568 - DNA, 25 bp, Homo sapien
tttcctccagacatcgccaatgcag

SEQ ID NO: 5326569 - DNA, 25 bp, Homo sapien
tccagacatcgccaatgcaggacca

SEQ ID NO: 5326570 - DNA, 25 bp, Homo sapien
gggctgagcggcaacgttgttctgg

SEQ ID NO: 5326571 - DNA, 25 bp, Homo sapien
gagcggcaacgttgttctgggcacc

SEQ ID NO: 5326572 - DNA, 25 bp, Homo sapien
gcggcaacgttgttctgggcaccag

SEQ ID NO: 5326573 - DNA, 25 bp, Homo sapien
ctgagcggcaacgttgttctgggca

SEQ ID NO: 5326574 - DNA, 25 bp, Homo sapien
taatgttgaagagtggtggtctcca

SEQ ID NO: 5326575 - DNA, 25 bp, Homo sapien
acatcgatttctgaggcaccatggg

SEQ ID NO: 5326576 - DNA, 25 bp, Homo sapien
tcttaataattagtggcaataatgt

SEQ ID NO: 5326577 - DNA, 25 bp, Homo sapien
taaagcgcaaaagcatcactcccat

SEQ ID NO: 5326578 - DNA, 25 bp, Homo sapien
tgtctgatgctgtttccgctaatgg

SEQ ID NO: 5326579 - DNA, 25 bp, Homo sapien
ccttctgtctgatgctgtttccgct

SEQ ID NO: 5326580 - DNA, 25 bp, Homo sapien
ttctgtctgatgctgtttccgctaa

SEQ ID NO: 5326581 - DNA, 25 bp, Homo sapien
agttggctacattttggctccttct

SEQ ID NO: 5326582 - DNA, 25 bp, Homo sapien
ggagacaccaaaatacttcgcaatg

SEQ ID NO: 5326583 - DNA, 25 bp, Homo sapien
cataggaaacaccaacctggcttgg

SEQ ID NO: 5326584 - DNA, 25 bp, Homo sapien
ggtctccagtagagtaagccagtgg

SEQ ID NO: 5326585 - DNA, 25 bp, Homo sapien
cagctcggtctccagtagagtaagc

SEQ ID NO: 5326586 - DNA, 25 bp, Homo sapien
gtgggctcttgggcatcctgcttct

SEQ ID NO: 5326587 - DNA, 25 bp, Homo sapien
gcttctctgtagcaacagggaagcc

SEQ ID NO: 5326588 - DNA, 25 bp, Homo sapien
tgcttctctgtagcaacagggaagc

SEQ ID NO: 5326589 - DNA, 25 bp, Homo sapien
tcagattgcataaggtgggtgtttg

SEQ ID NO: 5326590 - DNA, 25 bp, Homo sapien
ttgccgccatcgagctgcatatatc

SEQ ID NO: 5326591 - DNA, 25 bp, Homo sapien
tgcatatatcttccatgcaaagaac

SEQ ID NO: 5326592 - DNA, 25 bp, Homo sapien
gagctgcatatatcttccatgcaaa

SEQ ID NO: 5326593 - DNA, 25 bp, Homo sapien
gccatcgagctgcatatatcttcca

SEQ ID NO: 5326594 - DNA, 25 bp, Homo sapien
attaacacatacagaggagatatac

SEQ ID NO: 5326595 - DNA, 25 bp, Homo sapien
cacatacagaggagatatacgaggg

SEQ ID NO: 5326596 - DNA, 25 bp, Homo sapien
aacacatacagaggagatatacgag

SEQ ID NO: 5326597 - DNA, 25 bp, Homo sapien
taacacatacagaggagatatacga

SEQ ID NO: 5326598 - DNA, 25 bp, Homo sapien
ttctctcaggagaggaacctcgccc

SEQ ID NO: 5326599 - DNA, 25 bp, Homo sapien
cacactgtgtgtctggactgtgcat

SEQ ID NO: 5326600 - DNA, 25 bp, Homo sapien
ttcatgttgagagagaggcattctc

SEQ ID NO: 5326601 - DNA, 25 bp, Homo sapien
tctgaaggccaaaactcttcgtgtt

SEQ ID NO: 5326602 - DNA, 25 bp, Homo sapien
aagatgcaggaagaattgtccccat

SEQ ID NO: 5326603 - DNA, 25 bp, Homo sapien
tgcaggaagaattgtccccattgtt

SEQ ID NO: 5326604 - DNA, 25 bp, Homo sapien
tgtactttggacgtacatttgaagt

SEQ ID NO: 5326605 - DNA, 25 bp, Homo sapien
ttggacgtacatttgaagtttccag

SEQ ID NO: 5326606 - DNA, 25 bp, Homo sapien
ggtcctgtagaggtgtagcatggcc

SEQ ID NO: 5326607 - DNA, 25 bp, Homo sapien
tcctgtagaggtgtagcatggccca

SEQ ID NO: 5326608 - DNA, 25 bp, Homo sapien
cctgtagaggtgtagcatggcccat

SEQ ID NO: 5326609 - DNA, 25 bp, Homo sapien
tgtagaggtgtagcatggcccataa

SEQ ID NO: 5326610 - DNA, 25 bp, Homo sapien
tcagaagacatggatggagcatgct

SEQ ID NO: 5326611 - DNA, 25 bp, Homo sapien
tctgttgggccatagtggaaggcac

SEQ ID NO: 5326612 - DNA, 25 bp, Homo sapien
ggctgcccctgtaggcattttcgta

SEQ ID NO: 5326613 - DNA, 25 bp, Homo sapien
gcttggttgtgggatccatgagtca

SEQ ID NO: 5326614 - DNA, 25 bp, Homo sapien
gggtggattggaaatcaggccatcc

SEQ ID NO: 5326615 - DNA, 25 bp, Homo sapien
gaagctagtgggtgcttccacagca

SEQ ID NO: 5326616 - DNA, 25 bp, Homo sapien
tgaagctagtgggtgcttccacagc

SEQ ID NO: 5326617 - DNA, 25 bp, Homo sapien
gggtgggagggtggattggaaatca

SEQ ID NO: 5326618 - DNA, 25 bp, Homo sapien
cagattgaagacaaacagacctgct

SEQ ID NO: 5326619 - DNA, 25 bp, Homo sapien
gattgaagacaaacagacctgctca

SEQ ID NO: 5326620 - DNA, 25 bp, Homo sapien
attgaagacaaacagacctgctcat

SEQ ID NO: 5326621 - DNA, 25 bp, Homo sapien
agattgaagacaaacagacctgctc

SEQ ID NO: 5326622 - DNA, 25 bp, Homo sapien
taagtaagtgtctctggcagaggaa

SEQ ID NO: 5326623 - DNA, 25 bp, Homo sapien
gctaagtgaattaacctactgccag

SEQ ID NO: 5326624 - DNA, 25 bp, Homo sapien
ctgccagaattatggatccaatgac

SEQ ID NO: 5326625 - DNA, 25 bp, Homo sapien
tagtgctctattatcacccatggag

SEQ ID NO: 5326626 - DNA, 25 bp, Homo sapien
ggtcaatttcaacacagcccctctg

SEQ ID NO: 5326627 - DNA, 25 bp, Homo sapien
tgagaggcggtcctttctgcggttg

SEQ ID NO: 5326628 - DNA, 25 bp, Homo sapien
tctgcggttgggtggatgtgggtca

SEQ ID NO: 5326629 - DNA, 25 bp, Homo sapien
tgcttccggaagtacatgcatcccc

SEQ ID NO: 5326630 - DNA, 25 bp, Homo sapien
tccctctggttgcccttaacatttc

SEQ ID NO: 5326631 - DNA, 25 bp, Homo sapien
ccctctggttgcccttaacatttct

SEQ ID NO: 5326632 - DNA, 25 bp, Homo sapien
cctctggttgcccttaacatttctt

SEQ ID NO: 5326633 - DNA, 25 bp, Homo sapien
acattcctggctgggaactatgcca

SEQ ID NO: 5326634 - DNA, 25 bp, Homo sapien
tcagtgtcaatagcaaatcctctta

SEQ ID NO: 5326635 - DNA, 25 bp, Homo sapien
catgtacatagaaggccaagccagt

SEQ ID NO: 5326636 - DNA, 25 bp, Homo sapien
gtcatttggcggctcacattcaaga

SEQ ID NO: 5326637 - DNA, 25 bp, Homo sapien
tatgcaacgctgaatatttgtctgc

SEQ ID NO: 5326638 - DNA, 25 bp, Homo sapien
caaaggtcaaaggatggttgtccca

SEQ ID NO: 5326639 - DNA, 25 bp, Homo sapien
catcgtatgttgttatgtctctatg

SEQ ID NO: 5326640 - DNA, 25 bp, Homo sapien
caaaagtctccatgtcatcgtatgt

SEQ ID NO: 5326641 - DNA, 25 bp, Homo sapien
attcctgttccacatagcctgctgt

SEQ ID NO: 5326642 - DNA, 25 bp, Homo sapien
agcctgctgtggaactggcaaaagg

SEQ ID NO: 5326643 - DNA, 25 bp, Homo sapien
ttattcctgttccacatagcctgct

SEQ ID NO: 5326644 - DNA, 25 bp, Homo sapien
tgctgtggaactggcaaaaggattc

SEQ ID NO: 5326645 - DNA, 25 bp, Homo sapien
aatgtggtaattgcccctggtcacc

SEQ ID NO: 5326646 - DNA, 25 bp, Homo sapien
gacagttacaacagcacgagtgccc

SEQ ID NO: 5326647 - DNA, 25 bp, Homo sapien
gcctggatccgatgaggactaacaa

SEQ ID NO: 5326648 - DNA, 25 bp, Homo sapien
tgatcagagcgccaagaagggacta

SEQ ID NO: 5326649 - DNA, 25 bp, Homo sapien
tactcattatcaggaccattggagc

SEQ ID NO: 5326650 - DNA, 25 bp, Homo sapien
tgctctttcttatgggtcccatcag

SEQ ID NO: 5326651 - DNA, 25 bp, Homo sapien
ggccatccaaaggaattatagacga

SEQ ID NO: 5326652 - DNA, 25 bp, Homo sapien
ttggagcacgtggtagatttaaggc

SEQ ID NO: 5326653 - DNA, 25 bp, Homo sapien
cataaagtgtgtctgctgatgatcc

SEQ ID NO: 5326654 - DNA, 25 bp, Homo sapien
gcaattcagtaggttttcaagacgc

SEQ ID NO: 5326655 - DNA, 25 bp, Homo sapien
tacagtccgtgtcactccaaagagg

SEQ ID NO: 5326656 - DNA, 25 bp, Homo sapien
tgtcaggctacaacacttgcagagg

SEQ ID NO: 5326657 - DNA, 25 bp, Homo sapien
gcatctacaaggtaattccgcacac

SEQ ID NO: 5326658 - DNA, 25 bp, Homo sapien
tacaaggtaattccgcacactcagc

SEQ ID NO: 5326659 - DNA, 25 bp, Homo sapien
tcctccccttggcatctacaaggta

SEQ ID NO: 5326660 - DNA, 25 bp, Homo sapien
ccccttggcatctacaaggtaattc

SEQ ID NO: 5326661 - DNA, 25 bp, Homo sapien
gaataagggtctggtaaatgaacta

SEQ ID NO: 5326662 - DNA, 25 bp, Homo sapien
taaagtccattcaccccagaataag

SEQ ID NO: 5326663 - DNA, 25 bp, Homo sapien
atgaactatttgcagaaagccaggc

SEQ ID NO: 5326664 - DNA, 25 bp, Homo sapien
tttcaatgggcaagaggacacgatg

SEQ ID NO: 5326665 - DNA, 25 bp, Homo sapien
gggtacattagttgaagtggctacg

SEQ ID NO: 5326666 - DNA, 25 bp, Homo sapien
aagtggctacggcagctggtggctc

SEQ ID NO: 5326667 - DNA, 25 bp, Homo sapien
ctccggggtacattagttgaagtgg

SEQ ID NO: 5326668 - DNA, 25 bp, Homo sapien
cattagttgaagtggctacggcagc

SEQ ID NO: 5326669 - DNA, 25 bp, Homo sapien
gaccacaaccaattggctccataga

SEQ ID NO: 5326670 - DNA, 25 bp, Homo sapien
gaatggctccaatttccagctttcc

SEQ ID NO: 5326671 - DNA, 25 bp, Homo sapien
ggctccatagagaatggctccaatt

SEQ ID NO: 5326672 - DNA, 25 bp, Homo sapien
ggatcagaccacaaccaattggctc

SEQ ID NO: 5326673 - DNA, 25 bp, Homo sapien
cactgtgacagctgacgaaagccag

SEQ ID NO: 5326674 - DNA, 25 bp, Homo sapien
ctggccaggcatcagagcactgcca

SEQ ID NO: 5326675 - DNA, 25 bp, Homo sapien
gtgacagctgacgaaagccagctct

SEQ ID NO: 5326676 - DNA, 25 bp, Homo sapien
tctttgatgcgctggccaggcatca

SEQ ID NO: 5326677 - DNA, 25 bp, Homo sapien
gtctgttagtatttggcagtttctt

SEQ ID NO: 5326678 - DNA, 25 bp, Homo sapien
aactgtctgttagtatttggcagtt

SEQ ID NO: 5326679 - DNA, 25 bp, Homo sapien
ctgtctgttagtatttggcagtttc

SEQ ID NO: 5326680 - DNA, 25 bp, Homo sapien
gaactgtctgttagtatttggcagt

SEQ ID NO: 5326681 - DNA, 25 bp, Homo sapien
ctcaaccaattggcttcctcaaaac

SEQ ID NO: 5326682 - DNA, 25 bp, Homo sapien
cttcctcaaaacttggtaacttcat

SEQ ID NO: 5326683 - DNA, 25 bp, Homo sapien
caattggcttcctcaaaacttggta

SEQ ID NO: 5326684 - DNA, 25 bp, Homo sapien
gcttcctcaaaacttggtaacttca

SEQ ID NO: 5326685 - DNA, 25 bp, Homo sapien
ggctgctccaccagccatttctcca

SEQ ID NO: 5326686 - DNA, 25 bp, Homo sapien
tgggctgctccaccagccatttctc

SEQ ID NO: 5326687 - DNA, 25 bp, Homo sapien
gctgctccaccagccatttctccat

SEQ ID NO: 5326688 - DNA, 25 bp, Homo sapien
ctgggctgctccaccagccatttct

SEQ ID NO: 5326689 - DNA, 25 bp, Homo sapien
tgtccacatgtttctgcctcgcagt

SEQ ID NO: 5326690 - DNA, 25 bp, Homo sapien
tgcctttgtgtgaccgccagctggc

SEQ ID NO: 5326691 - DNA, 25 bp, Homo sapien
cctgcactgtgtatttggaatgcac

SEQ ID NO: 5326692 - DNA, 25 bp, Homo sapien
gctggcaatgactggaaccgtgaca

SEQ ID NO: 5326693 - DNA, 25 bp, Homo sapien
tgagagtctatacatctatggccaa

SEQ ID NO: 5326694 - DNA, 25 bp, Homo sapien
caatagaataaagcacgacccctac

SEQ ID NO: 5326695 - DNA, 25 bp, Homo sapien
tggatcaaagacctacgtacaagag

SEQ ID NO: 5326696 - DNA, 25 bp, Homo sapien
tcaacagaatgctgggtcagctaag

SEQ ID NO: 5326697 - DNA, 25 bp, Homo sapien
tgcttgttttctgcggaggttgtca

SEQ ID NO: 5326698 - DNA, 25 bp, Homo sapien
ttcttccctttaatcgactcgccag

SEQ ID NO: 5326699 - DNA, 25 bp, Homo sapien
tctccgggggctccatctgacagtg

SEQ ID NO: 5326700 - DNA, 25 bp, Homo sapien
aaaggttgtcagtgctttctccggg

SEQ ID NO: 5326701 - DNA, 25 bp, Homo sapien
gattgagtgttgtggtgccttcatc

SEQ ID NO: 5326702 - DNA, 25 bp, Homo sapien
tctgttctgacatcaggccatgggc

SEQ ID NO: 5326703 - DNA, 25 bp, Homo sapien
tctctgttctgacatcaggccatgg

SEQ ID NO: 5326704 - DNA, 25 bp, Homo sapien
tgcctgtggactaaacactgcttgt

SEQ ID NO: 5326705 - DNA, 25 bp, Homo sapien
gggaagtgaagagtaccatgagtca

SEQ ID NO: 5326706 - DNA, 25 bp, Homo sapien
gtgaagagtaccatgagtcaccctc

SEQ ID NO: 5326707 - DNA, 25 bp, Homo sapien
gacagccgccctttgaagccagctc

SEQ ID NO: 5326708 - DNA, 25 bp, Homo sapien
agtcaccctccgacagccgcccttt

SEQ ID NO: 5326709 - DNA, 25 bp, Homo sapien
cgatgtctcccagagagcacatcca

SEQ ID NO: 5326710 - DNA, 25 bp, Homo sapien
tagaaaacttaactcgacccatgag

SEQ ID NO: 5326711 - DNA, 25 bp, Homo sapien
ctgcaggccgatgtctcccagagag

SEQ ID NO: 5326712 - DNA, 25 bp, Homo sapien
catgagcacaagtgtcacctgcagg

SEQ ID NO: 5326713 - DNA, 25 bp, Homo sapien
tgagtctccaaactccaatatatca

SEQ ID NO: 5326714 - DNA, 25 bp, Homo sapien
tatgctcattagtggggatttctga

SEQ ID NO: 5326715 - DNA, 25 bp, Homo sapien
cctttgagtctccaaactccaatat

SEQ ID NO: 5326716 - DNA, 25 bp, Homo sapien
tatgtttggttatctattcctgagt

SEQ ID NO: 5326717 - DNA, 25 bp, Homo sapien
gaatggccccgtagaactaagatga

SEQ ID NO: 5326718 - DNA, 25 bp, Homo sapien
gcagccaactgtagcttcaatgaag

SEQ ID NO: 5326719 - DNA, 25 bp, Homo sapien
actaagatgatttgaaatggttcct

SEQ ID NO: 5326720 - DNA, 25 bp, Homo sapien
gcttcaatgaagctgtgcctctttt

SEQ ID NO: 5326721 - DNA, 25 bp, Homo sapien
atcatttgagtatgagccatgtggg

SEQ ID NO: 5326722 - DNA, 25 bp, Homo sapien
tagacactggaatcatttgagtatg

SEQ ID NO: 5326723 - DNA, 25 bp, Homo sapien
tacaattacacagtttctctgttcc

SEQ ID NO: 5326724 - DNA, 25 bp, Homo sapien
gccacaaggaggttttacaattaca

SEQ ID NO: 5326725 - DNA, 25 bp, Homo sapien
tctatgaagcctatgaggtcccctc

SEQ ID NO: 5326726 - DNA, 25 bp, Homo sapien
ccaccaaggaactaataggagctat

SEQ ID NO: 5326727 - DNA, 25 bp, Homo sapien
tttagggtgagaacaccaccaagga

SEQ ID NO: 5326728 - DNA, 25 bp, Homo sapien
tgaacaactgtctatctcccaggga

SEQ ID NO: 5326729 - DNA, 25 bp, Homo sapien
tctctgagagggatgatatggaatc

SEQ ID NO: 5326730 - DNA, 25 bp, Homo sapien
gatgagatgtcacgtataaggcact

SEQ ID NO: 5326731 - DNA, 25 bp, Homo sapien
tagaatatcccacaacaactctttg

SEQ ID NO: 5326732 - DNA, 25 bp, Homo sapien
ccagagtaagtcatcagtcctaaca

SEQ ID NO: 5326733 - DNA, 25 bp, Homo sapien
tgcctggtggagtgtgaaccttgcc

SEQ ID NO: 5326734 - DNA, 25 bp, Homo sapien
cctataatatagttgtcacctgaac

SEQ ID NO: 5326735 - DNA, 25 bp, Homo sapien
tgttccatttgcctggtggagtgtg

SEQ ID NO: 5326736 - DNA, 25 bp, Homo sapien
ctaagtgccagtgagataaacagac

SEQ ID NO: 5326737 - DNA, 25 bp, Homo sapien
gaacaattgattcagctgctccatg

SEQ ID NO: 5326738 - DNA, 25 bp, Homo sapien
tcatccggaaccactgaatccgcag

SEQ ID NO: 5326739 - DNA, 25 bp, Homo sapien
atccggaaccactgaatccgcagtg

SEQ ID NO: 5326740 - DNA, 25 bp, Homo sapien
gatcattgaacaattgattcagctg

SEQ ID NO: 5326741 - DNA, 25 bp, Homo sapien
gaattgtcacttcgatgagcaaagc

SEQ ID NO: 5326742 - DNA, 25 bp, Homo sapien
ttcgatgagcaaagccccactgatg

SEQ ID NO: 5326743 - DNA, 25 bp, Homo sapien
tgtcacttcgatgagcaaagcccca

SEQ ID NO: 5326744 - DNA, 25 bp, Homo sapien
ccagaattgtcacttcgatgagcaa

SEQ ID NO: 5326745 - DNA, 25 bp, Homo sapien
gtgcaccacaagattatatcccaca

SEQ ID NO: 5326746 - DNA, 25 bp, Homo sapien
cggtgcaccacaagattatatccca

SEQ ID NO: 5326747 - DNA, 25 bp, Homo sapien
aaaaaacggtgcaccacaagattat

SEQ ID NO: 5326748 - DNA, 25 bp, Homo sapien
aacggtgcaccacaagattatatcc

SEQ ID NO: 5326749 - DNA, 25 bp, Homo sapien
taacattattaccatggacagcatg

SEQ ID NO: 5326750 - DNA, 25 bp, Homo sapien
tactgggagcccactaatcttctca

SEQ ID NO: 5326751 - DNA, 25 bp, Homo sapien
tcatttcacaagctcggtgcagttg

SEQ ID NO: 5326752 - DNA, 25 bp, Homo sapien
gagtctttgttaagccttcccattg

SEQ ID NO: 5326753 - DNA, 25 bp, Homo sapien
gagtattattcctcagtcccataag

SEQ ID NO: 5326754 - DNA, 25 bp, Homo sapien
tctccatttgtcacactccacgtgt

SEQ ID NO: 5326755 - DNA, 25 bp, Homo sapien
cacgtgtgtcactcaactggtacct

SEQ ID NO: 5326756 - DNA, 25 bp, Homo sapien
tcttcgaatgccgatatttctccat

SEQ ID NO: 5326757 - DNA, 25 bp, Homo sapien
cacagcagcatcaggtaaggtgtgg

SEQ ID NO: 5326758 - DNA, 25 bp, Homo sapien
cagcagcatcaggtaaggtgtggta

SEQ ID NO: 5326759 - DNA, 25 bp, Homo sapien
agcagcatcaggtaaggtgtggtac

SEQ ID NO: 5326760 - DNA, 25 bp, Homo sapien
acagcagcatcaggtaaggtgtggt

SEQ ID NO: 5326761 - DNA, 25 bp, Homo sapien
tcccatctccactgagacaaacaaa

SEQ ID NO: 5326762 - DNA, 25 bp, Homo sapien
tgatatttcatgcacatgaactggc

SEQ ID NO: 5326763 - DNA, 25 bp, Homo sapien
ggctatgaagacaatcacctttgat

SEQ ID NO: 5326764 - DNA, 25 bp, Homo sapien
tatgatcaagccactatacactgta

SEQ ID NO: 5326765 - DNA, 25 bp, Homo sapien
ttaatccttttcctactggccactg

SEQ ID NO: 5326766 - DNA, 25 bp, Homo sapien
tgtagttgagtcagggaaacattgc

SEQ ID NO: 5326767 - DNA, 25 bp, Homo sapien
cactattgggaaatcttgactggga

SEQ ID NO: 5326768 - DNA, 25 bp, Homo sapien
gcccatcagtgactaagctaaaatt

SEQ ID NO: 5326769 - DNA, 25 bp, Homo sapien
cctgtttagactccaagaagctgct

SEQ ID NO: 5326770 - DNA, 25 bp, Homo sapien
tattcttgcaaagagtatggtagcc

SEQ ID NO: 5326771 - DNA, 25 bp, Homo sapien
cttatcataaaagctaggctaggac

SEQ ID NO: 5326772 - DNA, 25 bp, Homo sapien
taatcctggagtaaataaggccttc

SEQ ID NO: 5326773 - DNA, 25 bp, Homo sapien
catggttaaagcatgcagtcgtcta

SEQ ID NO: 5326774 - DNA, 25 bp, Homo sapien
gcaagccccaactgtaataactgtt

SEQ ID NO: 5326775 - DNA, 25 bp, Homo sapien
ccttatccagaatgaggtttgggca

SEQ ID NO: 5326776 - DNA, 25 bp, Homo sapien
tttaaggtaatctggcacatcatgg

SEQ ID NO: 5326777 - DNA, 25 bp, Homo sapien
caggtataccccgaagtcggctggg

SEQ ID NO: 5326778 - DNA, 25 bp, Homo sapien
gggtcgcagactgccggcccagctt

SEQ ID NO: 5326779 - DNA, 25 bp, Homo sapien
ccgcgagcagccatcggaaggcgct

SEQ ID NO: 5326780 - DNA, 25 bp, Homo sapien
agactgccggcccagcttagtcctt

SEQ ID NO: 5326781 - DNA, 25 bp, Homo sapien
ggatgtgaggtttccagccactggt

SEQ ID NO: 5326782 - DNA, 25 bp, Homo sapien
gggaaaaatcctctcggagccgagc

SEQ ID NO: 5326783 - DNA, 25 bp, Homo sapien
ttttctgcgaggtttcagctggagg

SEQ ID NO: 5326784 - DNA, 25 bp, Homo sapien
gagctcattttccagtcgaccgcag

SEQ ID NO: 5326785 - DNA, 25 bp, Homo sapien
tgccgaggagcctacttgctgcagc

SEQ ID NO: 5326786 - DNA, 25 bp, Homo sapien
ctacttccgggttctagcattctgg

SEQ ID NO: 5326787 - DNA, 25 bp, Homo sapien
ccaatgcattgtgtaagacgcgacc

SEQ ID NO: 5326788 - DNA, 25 bp, Homo sapien
aagcgggcagcatcgatcgtggctc

SEQ ID NO: 5326789 - DNA, 25 bp, Homo sapien
tatgctcagtgactcgggcgctttg

SEQ ID NO: 5326790 - DNA, 25 bp, Homo sapien
ccgatggcgcaaagggtacgtatta

SEQ ID NO: 5326791 - DNA, 25 bp, Homo sapien
ggcgctttgcttcaggtcccgtaga

SEQ ID NO: 5326792 - DNA, 25 bp, Homo sapien
tgaaacgtggccgaaagacactgct

SEQ ID NO: 5326793 - DNA, 25 bp, Homo sapien
agcatgggctcctctgtcaatgacg

SEQ ID NO: 5326794 - DNA, 25 bp, Homo sapien
tatataagctcggtgccttgccgtt

SEQ ID NO: 5326795 - DNA, 25 bp, Homo sapien
tggaaggacccagctgtattgacct

SEQ ID NO: 5326796 - DNA, 25 bp, Homo sapien
gatgcaaggccaccgaattccgggt

SEQ ID NO: 5326797 - DNA, 25 bp, Homo sapien
gctgagacaagcgacatctaggccc

SEQ ID NO: 5326798 - DNA, 25 bp, Homo sapien
aaatgttgccaatttctccggccag

SEQ ID NO: 5326799 - DNA, 25 bp, Homo sapien
ctcagataccgtccatggctcaggg

SEQ ID NO: 5326800 - DNA, 25 bp, Homo sapien
taggtgcagcccgttgacagtcggc

SEQ ID NO: 5326801 - DNA, 25 bp, Homo sapien
cagaaagcaaacgtggagagctcac

SEQ ID NO: 5326802 - DNA, 25 bp, Homo sapien
tccccgagagccgtagttgctagta

SEQ ID NO: 5326803 - DNA, 25 bp, Homo sapien
aataaaatcaagaacaccacggttg

SEQ ID NO: 5326804 - DNA, 25 bp, Homo sapien
cacggttgtagctgctgtggactcg

SEQ ID NO: 5326805 - DNA, 25 bp, Homo sapien
tggactcggcggtctgagcagcctc

SEQ ID NO: 5326806 - DNA, 25 bp, Homo sapien
ttttcttctaatccagaactggata

SEQ ID NO: 5326807 - DNA, 25 bp, Homo sapien
tccagaactggataacttggtaaga

SEQ ID NO: 5326808 - DNA, 25 bp, Homo sapien
tctcacttgtatttagattcgcgca

SEQ ID NO: 5326809 - DNA, 25 bp, Homo sapien
agattcgcgcagaaaaacctctatt

SEQ ID NO: 5326810 - DNA, 25 bp, Homo sapien
ctttgagagccctgagatttctaga

SEQ ID NO: 5326811 - DNA, 25 bp, Homo sapien
tccaacgccctcagctttgctttga

SEQ ID NO: 5326812 - DNA, 25 bp, Homo sapien
ttctagaccggtcttcccgtgcctg

SEQ ID NO: 5326813 - DNA, 25 bp, Homo sapien
ccgtgcctgcaggttggctgcaaat

SEQ ID NO: 5326814 - DNA, 25 bp, Homo sapien
tctaagtcccatcacgagggcagcc

SEQ ID NO: 5326815 - DNA, 25 bp, Homo sapien
gctgcgcagctctaatcagcgcggg

SEQ ID NO: 5326816 - DNA, 25 bp, Homo sapien
tgcttaaactttgcggacttcctag

SEQ ID NO: 5326817 - DNA, 25 bp, Homo sapien
tttgcaatgggaaaagccacagttt

SEQ ID NO: 5326818 - DNA, 25 bp, Homo sapien
gaagttcagccttctgatacatttg

SEQ ID NO: 5326819 - DNA, 25 bp, Homo sapien
tctttctggtaattagtgtcaaggc

SEQ ID NO: 5326820 - DNA, 25 bp, Homo sapien
ggagggttccgaatggctgaagttc

SEQ ID NO: 5326821 - DNA, 25 bp, Homo sapien
aggccaatcttagcgtccatttctc

SEQ ID NO: 5326822 - DNA, 25 bp, Homo sapien
gcatcccagctgatgtttcgaatgc

SEQ ID NO: 5326823 - DNA, 25 bp, Homo sapien
ctttgtgtaaatagttgcaattctg

SEQ ID NO: 5326824 - DNA, 25 bp, Homo sapien
cgccctagccttgtgttcattctta

SEQ ID NO: 5326825 - DNA, 25 bp, Homo sapien
aaatagttgcaattctgtgcatccc

SEQ ID NO: 5326826 - DNA, 25 bp, Homo sapien
atcctcttccttctcttctttgcta

SEQ ID NO: 5326827 - DNA, 25 bp, Homo sapien
ctctgttgtctcttctcatcctctt

SEQ ID NO: 5326828 - DNA, 25 bp, Homo sapien
tctgttgtctcttctcatcctcttc

SEQ ID NO: 5326829 - DNA, 25 bp, Homo sapien
ctcttccttctcttctttgctacct

SEQ ID NO: 5326830 - DNA, 25 bp, Homo sapien
cctctataataatgggagtgttaac

SEQ ID NO: 5326831 - DNA, 25 bp, Homo sapien
taactgccagtgaccgcctctgatt

SEQ ID NO: 5326832 - DNA, 25 bp, Homo sapien
aatgggagtgttaactgccagtgac

SEQ ID NO: 5326833 - DNA, 25 bp, Homo sapien
ccagtgaccgcctctgattgtaggg

SEQ ID NO: 5326834 - DNA, 25 bp, Homo sapien
ttaggaataaatccaagataggtgg

SEQ ID NO: 5326835 - DNA, 25 bp, Homo sapien
tttattaggaataaatccaagatag

SEQ ID NO: 5326836 - DNA, 25 bp, Homo sapien
tattaggaataaatccaagataggt

SEQ ID NO: 5326837 - DNA, 25 bp, Homo sapien
taggaataaatccaagataggtggt

SEQ ID NO: 5326838 - DNA, 25 bp, Homo sapien
gctggtatgtgctctgggccctctg

SEQ ID NO: 5326839 - DNA, 25 bp, Homo sapien
tgtcttgtcagttttcctcggccga

SEQ ID NO: 5326840 - DNA, 25 bp, Homo sapien
gctctcaactgagggccttggcttg

SEQ ID NO: 5326841 - DNA, 25 bp, Homo sapien
ggcccttcttccgatgcgttactaa

SEQ ID NO: 5326842 - DNA, 25 bp, Homo sapien
tcgaagctttggctgagctcgtggc

SEQ ID NO: 5326843 - DNA, 25 bp, Homo sapien
cgctgttggcctatgcgcctgggct

SEQ ID NO: 5326844 - DNA, 25 bp, Homo sapien
tgagaatctgacttctggtccccgc

SEQ ID NO: 5326845 - DNA, 25 bp, Homo sapien
ttaatataatatcatggagctcccc

SEQ ID NO: 5326846 - DNA, 25 bp, Homo sapien
tgaacccctagtgcggcgtcctggg

SEQ ID NO: 5326847 - DNA, 25 bp, Homo sapien
agctgaggcgcgacgaatgaagcac

SEQ ID NO: 5326848 - DNA, 25 bp, Homo sapien
gcaaagcgctggacgcatgcggtac

SEQ ID NO: 5326849 - DNA, 25 bp, Homo sapien
caagtttcagctggtcggaggacag

SEQ ID NO: 5326850 - DNA, 25 bp, Homo sapien
gccagtttgagcctccgcagagggt

SEQ ID NO: 5326851 - DNA, 25 bp, Homo sapien
ccagccagtttgagcctccgcagag

SEQ ID NO: 5326852 - DNA, 25 bp, Homo sapien
ttgagcctccgcagagggtgcgctc

SEQ ID NO: 5326853 - DNA, 25 bp, Homo sapien
cagtttgagcctccgcagagggtgc

SEQ ID NO: 5326854 - DNA, 25 bp, Homo sapien
ctgttttcctcggagggcgcgaaga

SEQ ID NO: 5326855 - DNA, 25 bp, Homo sapien
gctaagtcggcggaaatccacttga

SEQ ID NO: 5326856 - DNA, 25 bp, Homo sapien
atactaggcggtatcccggagggct

SEQ ID NO: 5326857 - DNA, 25 bp, Homo sapien
gggacctgggatcgacgactttgat

SEQ ID NO: 5326858 - DNA, 25 bp, Homo sapien
cagtagaagctgtaatcccgttcct

SEQ ID NO: 5326859 - DNA, 25 bp, Homo sapien
tagaagctgtaatcccgttccttcc

SEQ ID NO: 5326860 - DNA, 25 bp, Homo sapien
agtagaagctgtaatcccgttcctt

SEQ ID NO: 5326861 - DNA, 25 bp, Homo sapien
gtagaagctgtaatcccgttccttc

SEQ ID NO: 5326862 - DNA, 25 bp, Homo sapien
cactttggcgggcgcaagcctcctg

SEQ ID NO: 5326863 - DNA, 25 bp, Homo sapien
ttggcgggcgcaagcctcctgggcg

SEQ ID NO: 5326864 - DNA, 25 bp, Homo sapien
agagagccactttggcgggcgcaag

SEQ ID NO: 5326865 - DNA, 25 bp, Homo sapien
agccactttggcgggcgcaagcctc

SEQ ID NO: 5326866 - DNA, 25 bp, Homo sapien
tcccagaggctaggggaagcgaggg

SEQ ID NO: 5326867 - DNA, 25 bp, Homo sapien
cggcttggctgttccgggctcccag

SEQ ID NO: 5326868 - DNA, 25 bp, Homo sapien
ctcggctcggcttggctgttccggg

SEQ ID NO: 5326869 - DNA, 25 bp, Homo sapien
cgaggtcccggctgcgaccccggag

SEQ ID NO: 5326870 - DNA, 25 bp, Homo sapien
cggggggtcctcgtctgaatctgca

SEQ ID NO: 5326871 - DNA, 25 bp, Homo sapien
agctcctgggcgaaggctgtcgggc

SEQ ID NO: 5326872 - DNA, 25 bp, Homo sapien
tcaacagcagctctccggggggtcc

SEQ ID NO: 5326873 - DNA, 25 bp, Homo sapien
gctgtcgggctgcacaggacgccct

SEQ ID NO: 5326874 - DNA, 25 bp, Homo sapien
tgcaatgaatcggaatgcctcacag

SEQ ID NO: 5326875 - DNA, 25 bp, Homo sapien
catgaattcctgtataatgtggcga

SEQ ID NO: 5326876 - DNA, 25 bp, Homo sapien
ggtggaatccaacatttcttgcatg

SEQ ID NO: 5326877 - DNA, 25 bp, Homo sapien
aagaggagcccagcatctaaggccc

SEQ ID NO: 5326878 - DNA, 25 bp, Homo sapien
agcctcccacatgtcttgctggtct

SEQ ID NO: 5326879 - DNA, 25 bp, Homo sapien
tcactcgcaggatctcatgcatcct

SEQ ID NO: 5326880 - DNA, 25 bp, Homo sapien
agtgggatttgtagcacatagaaaa

SEQ ID NO: 5326881 - DNA, 25 bp, Homo sapien
tccttttacatgtcgaggcaccggg

SEQ ID NO: 5326882 - DNA, 25 bp, Homo sapien
ccacaccagcttttgtgtgagtcca

SEQ ID NO: 5326883 - DNA, 25 bp, Homo sapien
aatagttgcagtgcctcccactgcc

SEQ ID NO: 5326884 - DNA, 25 bp, Homo sapien
caccagcttttgtgtgagtccaggc

SEQ ID NO: 5326885 - DNA, 25 bp, Homo sapien
tatcaatagttgcagtgcctcccac

SEQ ID NO: 5326886 - DNA, 25 bp, Homo sapien
attatggctcggcttaagtgttgcc

SEQ ID NO: 5326887 - DNA, 25 bp, Homo sapien
tttgggctgcagttccccttgacct

SEQ ID NO: 5326888 - DNA, 25 bp, Homo sapien
ttgacctttgccctttattgaccaa

SEQ ID NO: 5326889 - DNA, 25 bp, Homo sapien
catacttccaattatggctcggctt

SEQ ID NO: 5326890 - DNA, 25 bp, Homo sapien
caaatgtgagtaacagtgttctggt

SEQ ID NO: 5326891 - DNA, 25 bp, Homo sapien
atgtgagtaacagtgttctggtttc

SEQ ID NO: 5326892 - DNA, 25 bp, Homo sapien
cttttattgactcatcaaatgtgag

SEQ ID NO: 5326893 - DNA, 25 bp, Homo sapien
atcaaatgtgagtaacagtgttctg

SEQ ID NO: 5326894 - DNA, 25 bp, Homo sapien
ggtgggttcgcctcattctccagtc

SEQ ID NO: 5326895 - DNA, 25 bp, Homo sapien
tggaaccagagagattcaggtaaac

SEQ ID NO: 5326896 - DNA, 25 bp, Homo sapien
tattttgatgtgagccaaggtgctg

SEQ ID NO: 5326897 - DNA, 25 bp, Homo sapien
taaacaatggttagaatggagatgc

SEQ ID NO: 5326898 - DNA, 25 bp, Homo sapien
cagagggtagtggagtgcaaaggct

SEQ ID NO: 5326899 - DNA, 25 bp, Homo sapien
ctacacagactacaggtcccactgg

SEQ ID NO: 5326900 - DNA, 25 bp, Homo sapien
ggtttcagaagactgactacacaga

SEQ ID NO: 5326901 - DNA, 25 bp, Homo sapien
tggcttttctcctacacccttgctg

SEQ ID NO: 5326902 - DNA, 25 bp, Homo sapien
cctcaaagaaggctccggctccgtg

SEQ ID NO: 5326903 - DNA, 25 bp, Homo sapien
ggatggcttgcagaaatcctgctaa

SEQ ID NO: 5326904 - DNA, 25 bp, Homo sapien
ctgttcctgaggatggcttgcagaa

SEQ ID NO: 5326905 - DNA, 25 bp, Homo sapien
tgctttccctcaaagaaggctccgg

SEQ ID NO: 5326906 - DNA, 25 bp, Homo sapien
tggtacttagtgtgtctacattgaa

SEQ ID NO: 5326907 - DNA, 25 bp, Homo sapien
gtacttagtgtgtctacattgaaag

SEQ ID NO: 5326908 - DNA, 25 bp, Homo sapien
ctggtacttagtgtgtctacattga

SEQ ID NO: 5326909 - DNA, 25 bp, Homo sapien
ggtacttagtgtgtctacattgaaa

SEQ ID NO: 5326910 - DNA, 25 bp, Homo sapien
tgtgctgagatagcttttggatcac

SEQ ID NO: 5326911 - DNA, 25 bp, Homo sapien
tgctgagatagcttttggatcacct

SEQ ID NO: 5326912 - DNA, 25 bp, Homo sapien
gctgagatagcttttggatcacctg

SEQ ID NO: 5326913 - DNA, 25 bp, Homo sapien
ctgagatagcttttggatcacctgt

SEQ ID NO: 5326914 - DNA, 25 bp, Homo sapien
tgatggctgaattgatttctgtgca

SEQ ID NO: 5326915 - DNA, 25 bp, Homo sapien
taaacggtggcctagattcttgccc

SEQ ID NO: 5326916 - DNA, 25 bp, Homo sapien
ttttgatgcatagtgtagtgatggc

SEQ ID NO: 5326917 - DNA, 25 bp, Homo sapien
tgatttctgtgcataaacggtggcc

SEQ ID NO: 5326918 - DNA, 25 bp, Homo sapien
cccattgctatgtagccagctccca

SEQ ID NO: 5326919 - DNA, 25 bp, Homo sapien
ctaagcccccattgctatgtagcca

SEQ ID NO: 5326920 - DNA, 25 bp, Homo sapien
cattgctatgtagccagctcccagg

SEQ ID NO: 5326921 - DNA, 25 bp, Homo sapien
cccaggccactttgtgggaaagctt

SEQ ID NO: 5326922 - DNA, 25 bp, Homo sapien
tctggacttatctgggttgagcttc

SEQ ID NO: 5326923 - DNA, 25 bp, Homo sapien
agccagctaaagctaatccaggttc

SEQ ID NO: 5326924 - DNA, 25 bp, Homo sapien
tgggttgagcttcagccagctaaag

SEQ ID NO: 5326925 - DNA, 25 bp, Homo sapien
cagcattgctctggacttatctggg

SEQ ID NO: 5326926 - DNA, 25 bp, Homo sapien
ctatttcagaggagcaaaatgacag

SEQ ID NO: 5326927 - DNA, 25 bp, Homo sapien
aacttggtgggccatcaagattttc

SEQ ID NO: 5326928 - DNA, 25 bp, Homo sapien
gattttcactcttataggactccct

SEQ ID NO: 5326929 - DNA, 25 bp, Homo sapien
catcactctgaaatgttccacaggt

SEQ ID NO: 5326930 - DNA, 25 bp, Homo sapien
acagagggcattgtaaacttggtgg

SEQ ID NO: 5326931 - DNA, 25 bp, Homo sapien
ttgcatctttatctctccggttcat

SEQ ID NO: 5326932 - DNA, 25 bp, Homo sapien
ttggagactcctacagcagaggccc

SEQ ID NO: 5326933 - DNA, 25 bp, Homo sapien
cccctgagaagtccttggttgtttg

SEQ ID NO: 5326934 - DNA, 25 bp, Homo sapien
tcaggagtatgcaaaagcttgtttc

SEQ ID NO: 5326935 - DNA, 25 bp, Homo sapien
gatgcacaggtattccacatgggtg

SEQ ID NO: 5326936 - DNA, 25 bp, Homo sapien
tggaggatcccggaggaagttctcc

SEQ ID NO: 5326937 - DNA, 25 bp, Homo sapien
gccttgaaaggcacgagatagcaca

SEQ ID NO: 5326938 - DNA, 25 bp, Homo sapien
gcatgcttaaataggcgactcggga

SEQ ID NO: 5326939 - DNA, 25 bp, Homo sapien
gatagcacagtctaaatgcctgggc

SEQ ID NO: 5326940 - DNA, 25 bp, Homo sapien
ggtcacctgccttgctccgtaggga

SEQ ID NO: 5326941 - DNA, 25 bp, Homo sapien
aatggcccacgctgaaaggtttgac

SEQ ID NO: 5326942 - DNA, 25 bp, Homo sapien
ttgaaagggcaaatggcccacgctg

SEQ ID NO: 5326943 - DNA, 25 bp, Homo sapien
cccacgctgaaaggtttgacagttt

SEQ ID NO: 5326944 - DNA, 25 bp, Homo sapien
gggcaaatggcccacgctgaaaggt

SEQ ID NO: 5326945 - DNA, 25 bp, Homo sapien
gctcggaaactgaaaagtgtggcca

SEQ ID NO: 5326946 - DNA, 25 bp, Homo sapien
tctgacaggcaatgagtctgctcca

SEQ ID NO: 5326947 - DNA, 25 bp, Homo sapien
gagtcttataatgcccgagcctgtg

SEQ ID NO: 5326948 - DNA, 25 bp, Homo sapien
tattgccaattaaggagccattccg

SEQ ID NO: 5326949 - DNA, 25 bp, Homo sapien
aaagcgtggcatctttcccaaagta

SEQ ID NO: 5326950 - DNA, 25 bp, Homo sapien
caaaaagcgtcacaaaaagcgtggc

SEQ ID NO: 5326951 - DNA, 25 bp, Homo sapien
caaatatcatgagggcgtggctgtt

SEQ ID NO: 5326952 - DNA, 25 bp, Homo sapien
tgacgatgatgaccctgataaggac

SEQ ID NO: 5326953 - DNA, 25 bp, Homo sapien
tattagatgaaaagtgccctgcggg

SEQ ID NO: 5326954 - DNA, 25 bp, Homo sapien
cttccaggttgagaatagcgtttcc

SEQ ID NO: 5326955 - DNA, 25 bp, Homo sapien
caatgcgagaggttgtagaatcttc

SEQ ID NO: 5326956 - DNA, 25 bp, Homo sapien
ggtccgccactctaaggacggagta

SEQ ID NO: 5326957 - DNA, 25 bp, Homo sapien
tactccacctgtctgtatgaataga

SEQ ID NO: 5326958 - DNA, 25 bp, Homo sapien
ttctccctgtgcgtataatgctggc

SEQ ID NO: 5326959 - DNA, 25 bp, Homo sapien
taatgctggcaaatctacatgcaga

SEQ ID NO: 5326960 - DNA, 25 bp, Homo sapien
tgtaaaatggtacctgaccccgctg

SEQ ID NO: 5326961 - DNA, 25 bp, Homo sapien
ttccaggagtgtcacctcaggttca

SEQ ID NO: 5326962 - DNA, 25 bp, Homo sapien
tccctctagtaatgtcacccatcgt

SEQ ID NO: 5326963 - DNA, 25 bp, Homo sapien
cagtggctgtgtttagttgttgata

SEQ ID NO: 5326964 - DNA, 25 bp, Homo sapien
taatgtcacccatcgtacaatattt

SEQ ID NO: 5326965 - DNA, 25 bp, Homo sapien
cacaactggtgttttcgtgtttaat

SEQ ID NO: 5326966 - DNA, 25 bp, Homo sapien
gagtaattagatgaagccagggctt

SEQ ID NO: 5326967 - DNA, 25 bp, Homo sapien
gtttaattgaacaaggaatgagtag

SEQ ID NO: 5326968 - DNA, 25 bp, Homo sapien
tttgacttctttcacacaactggtg

SEQ ID NO: 5326969 - DNA, 25 bp, Homo sapien
gatgatgtattttgagctgacgtgt

SEQ ID NO: 5326970 - DNA, 25 bp, Homo sapien
ttgaagtgaatatgctcaacagcac

SEQ ID NO: 5326971 - DNA, 25 bp, Homo sapien
cataacgctgtagttggaaggtgaa

SEQ ID NO: 5326972 - DNA, 25 bp, Homo sapien
catttatactggaagattagttgct

SEQ ID NO: 5326973 - DNA, 25 bp, Homo sapien
tgggagtgccacgtacacggttaca

SEQ ID NO: 5326974 - DNA, 25 bp, Homo sapien
tgtattgcggacatttctgcccttg

SEQ ID NO: 5326975 - DNA, 25 bp, Homo sapien
tacacaacgcataaaggcgagggtc

SEQ ID NO: 5326976 - DNA, 25 bp, Homo sapien
caactccctggtagctggtgtattg

SEQ ID NO: 5326977 - DNA, 25 bp, Homo sapien
ttggctgcggacgaaggccctgtgt

SEQ ID NO: 5326978 - DNA, 25 bp, Homo sapien
tgctgattggctgcggacgaaggcc

SEQ ID NO: 5326979 - DNA, 25 bp, Homo sapien
ctgattggctgcggacgaaggccct

SEQ ID NO: 5326980 - DNA, 25 bp, Homo sapien
atctgctgattggctgcggacgaag

SEQ ID NO: 5326981 - DNA, 25 bp, Homo sapien
tgtatagaatgagggcaacattacc

SEQ ID NO: 5326982 - DNA, 25 bp, Homo sapien
gggatcacccttctcaaagtcttaa

SEQ ID NO: 5326983 - DNA, 25 bp, Homo sapien
tgtatatcttgccatgtgtccactc

SEQ ID NO: 5326984 - DNA, 25 bp, Homo sapien
gcttcagtagagtgtaaagacaact

SEQ ID NO: 5326985 - DNA, 25 bp, Homo sapien
catctaagatattccatgaacattt

SEQ ID NO: 5326986 - DNA, 25 bp, Homo sapien
aagtccacatctgtgccggcatccg

SEQ ID NO: 5326987 - DNA, 25 bp, Homo sapien
ttggtgacaggtcgagccttctccc

SEQ ID NO: 5326988 - DNA, 25 bp, Homo sapien
ccttctcccactcatctaagatatt

SEQ ID NO: 5326989 - DNA, 25 bp, Homo sapien
gagagccatattactaccctttgaa

SEQ ID NO: 5326990 - DNA, 25 bp, Homo sapien
tgacctaccatagacaagggtttag

SEQ ID NO: 5326991 - DNA, 25 bp, Homo sapien
gacagagtgctgagcctccatagct

SEQ ID NO: 5326992 - DNA, 25 bp, Homo sapien
tgaggctgcctagcaattatgctgc

SEQ ID NO: 5326993 - DNA, 25 bp, Homo sapien
tatgagtctatgaagggcatgacag

SEQ ID NO: 5326994 - DNA, 25 bp, Homo sapien
taagtaatgggttgtcaggtgtcag

SEQ ID NO: 5326995 - DNA, 25 bp, Homo sapien
gcatgagttttataggtcagcagaa

SEQ ID NO: 5326996 - DNA, 25 bp, Homo sapien
gcatgacagataataggctcgaaat

SEQ ID NO: 5326997 - DNA, 25 bp, Homo sapien
taaccgttaagcacggaagcgcagt

SEQ ID NO: 5326998 - DNA, 25 bp, Homo sapien
tgtgcacgccgaggagctttctgta

SEQ ID NO: 5326999 - DNA, 25 bp, Homo sapien
gctttctgtagacgctgagggttat

SEQ ID NO: 5327000 - DNA, 25 bp, Homo sapien
tccgagggcaaacgttggtcttaga

SEQ ID NO: 5327001 - DNA, 25 bp, Homo sapien
gatggacttcttatgatttgaccaa

SEQ ID NO: 5327002 - DNA, 25 bp, Homo sapien
taattaccttcctcaactgtggtag

SEQ ID NO: 5327003 - DNA, 25 bp, Homo sapien
gatcctggaggaggttaagaaacta

SEQ ID NO: 5327004 - DNA, 25 bp, Homo sapien
caatcttggaactgttggatcctgg

SEQ ID NO: 5327005 - DNA, 25 bp, Homo sapien
taattggtcatgcagtgaaggcagc

SEQ ID NO: 5327006 - DNA, 25 bp, Homo sapien
cacaaaagcagggaggatgagacac

SEQ ID NO: 5327007 - DNA, 25 bp, Homo sapien
gaattgcttacagtaccccaaggag

SEQ ID NO: 5327008 - DNA, 25 bp, Homo sapien
catctagtacctgtgggcagttggc

SEQ ID NO: 5327009 - DNA, 25 bp, Homo sapien
tataggattgtcatagccaggacca

SEQ ID NO: 5327010 - DNA, 25 bp, Homo sapien
tgcatacgtacattcctggacaccc

SEQ ID NO: 5327011 - DNA, 25 bp, Homo sapien
caggagacccaacaatgagtggaca

SEQ ID NO: 5327012 - DNA, 25 bp, Homo sapien
cttacagggctgcaaagtatgccag

SEQ ID NO: 5327013 - DNA, 25 bp, Homo sapien
taatcagctgttgcaggcagtgtct

SEQ ID NO: 5327014 - DNA, 25 bp, Homo sapien
cccagttgtagtcgtttgagtgcag

SEQ ID NO: 5327015 - DNA, 25 bp, Homo sapien
gattgtataataacgccaagcccag

SEQ ID NO: 5327016 - DNA, 25 bp, Homo sapien
gcatggaaaccaaaaggccgtgtgt

SEQ ID NO: 5327017 - DNA, 25 bp, Homo sapien
gaaggttattgaggacacttatccg

SEQ ID NO: 5327018 - DNA, 25 bp, Homo sapien
gaggcaaataatagaggtgctgaga

SEQ ID NO: 5327019 - DNA, 25 bp, Homo sapien
gacacttatccgaaagaggcaaata

SEQ ID NO: 5327020 - DNA, 25 bp, Homo sapien
aatttcagagccagctcgaaggtta

SEQ ID NO: 5327021 - DNA, 25 bp, Homo sapien
aacttcgtagtgaagtcgaaggatt

SEQ ID NO: 5327022 - DNA, 25 bp, Homo sapien
cagcaaacttcgtagtgaagtcgaa

SEQ ID NO: 5327023 - DNA, 25 bp, Homo sapien
caaacttcgtagtgaagtcgaagga

SEQ ID NO: 5327024 - DNA, 25 bp, Homo sapien
gcaaacttcgtagtgaagtcgaagg

SEQ ID NO: 5327025 - DNA, 25 bp, Homo sapien
cagactccagagtcccatagtggcc

SEQ ID NO: 5327026 - DNA, 25 bp, Homo sapien
tcctaatagactttgccacatcggg

SEQ ID NO: 5327027 - DNA, 25 bp, Homo sapien
tttcctcggaacctcacggagtgct

SEQ ID NO: 5327028 - DNA, 25 bp, Homo sapien
tgctttgtagtagcctggagacttc

SEQ ID NO: 5327029 - DNA, 25 bp, Homo sapien
tctttggaagacggaaaagagtgaa

SEQ ID NO: 5327030 - DNA, 25 bp, Homo sapien
tgtttccttggcgactgtgttcagc

SEQ ID NO: 5327031 - DNA, 25 bp, Homo sapien
tggaagacggaaaagagtgaaaggc

SEQ ID NO: 5327032 - DNA, 25 bp, Homo sapien
tcttttggtgccgtttgggatgtca

SEQ ID NO: 5327033 - DNA, 25 bp, Homo sapien
ccttgcagccccttattgatgtttg

SEQ ID NO: 5327034 - DNA, 25 bp, Homo sapien
tgatcaatgaaaccgagccgtgcat

SEQ ID NO: 5327035 - DNA, 25 bp, Homo sapien
ttgcattatctcataaaggaggatg

SEQ ID NO: 5327036 - DNA, 25 bp, Homo sapien
caccgcataatgattccccttgcag

SEQ ID NO: 5327037 - DNA, 25 bp, Homo sapien
taactaacagttgcgcgcaggaggc

SEQ ID NO: 5327038 - DNA, 25 bp, Homo sapien
gaggttttaatgaccgcggacgcag

SEQ ID NO: 5327039 - DNA, 25 bp, Homo sapien
gtctgggaacctttcaggacgcctc

SEQ ID NO: 5327040 - DNA, 25 bp, Homo sapien
gcaaggctctggctccgaacagatt

SEQ ID NO: 5327041 - DNA, 25 bp, Homo sapien
gggtctcctggaccctgcgttgctc

SEQ ID NO: 5327042 - DNA, 25 bp, Homo sapien
gcgttgctccctttttcctagcggc

SEQ ID NO: 5327043 - DNA, 25 bp, Homo sapien
ttcctagcggccccgtagctggctg

SEQ ID NO: 5327044 - DNA, 25 bp, Homo sapien
ctgcgttgctccctttttcctagcg

SEQ ID NO: 5327045 - DNA, 25 bp, Homo sapien
aatttccgcaggagtggcgccgtga

SEQ ID NO: 5327046 - DNA, 25 bp, Homo sapien
cggaggaacatacacggaatatgaa

SEQ ID NO: 5327047 - DNA, 25 bp, Homo sapien
ggagtggcgccgtgattccttccct

SEQ ID NO: 5327048 - DNA, 25 bp, Homo sapien
tacacggaatatgaatttccgcagg

SEQ ID NO: 5327049 - DNA, 25 bp, Homo sapien
agaacttcctttgatctgtttggcc

SEQ ID NO: 5327050 - DNA, 25 bp, Homo sapien
agagccagacgcgtggggcgaggga

SEQ ID NO: 5327051 - DNA, 25 bp, Homo sapien
tcggggggaaacacctgacagtgaa

SEQ ID NO: 5327052 - DNA, 25 bp, Homo sapien
tgaagaactgcgatgaaaaagaggg

SEQ ID NO: 5327053 - DNA, 25 bp, Homo sapien
ttagtaacaataacaggtaatgtac

SEQ ID NO: 5327054 - DNA, 25 bp, Homo sapien
aggtccgctttagtaacaataacag

SEQ ID NO: 5327055 - DNA, 25 bp, Homo sapien
ctgtaaggtccgctttagtaacaat

SEQ ID NO: 5327056 - DNA, 25 bp, Homo sapien
tccgctttagtaacaataacaggta

SEQ ID NO: 5327057 - DNA, 25 bp, Homo sapien
atattagtggcccatagctttcttc

SEQ ID NO: 5327058 - DNA, 25 bp, Homo sapien
gctcttagtttcagtggggtccacg

SEQ ID NO: 5327059 - DNA, 25 bp, Homo sapien
ctttcatattagtggcccatagctt

SEQ ID NO: 5327060 - DNA, 25 bp, Homo sapien
caaaaagctggatatagctcttagt

SEQ ID NO: 5327061 - DNA, 25 bp, Homo sapien
ggatattctgaaaagtcgtccttta

SEQ ID NO: 5327062 - DNA, 25 bp, Homo sapien
tgtaacttctacagtattatctttg

SEQ ID NO: 5327063 - DNA, 25 bp, Homo sapien
ttattcctcacataatggaaccaag

SEQ ID NO: 5327064 - DNA, 25 bp, Homo sapien
gtattatctttgtgggtggtatgct

SEQ ID NO: 5327065 - DNA, 25 bp, Homo sapien
ggtaggtagattcactgaggacatg

SEQ ID NO: 5327066 - DNA, 25 bp, Homo sapien
tttcaggatgagcatcgaggaaaga

SEQ ID NO: 5327067 - DNA, 25 bp, Homo sapien
gaggatagccaggaaacttgattaa

SEQ ID NO: 5327068 - DNA, 25 bp, Homo sapien
tgagcatcgaggaaagaggatagcc

SEQ ID NO: 5327069 - DNA, 25 bp, Homo sapien
gattgtgaaaaagacgatgtagagg

SEQ ID NO: 5327070 - DNA, 25 bp, Homo sapien
aaagagtctcgtaggttgattgtga

SEQ ID NO: 5327071 - DNA, 25 bp, Homo sapien
ggaactcatgaaagagtctcgtagg

SEQ ID NO: 5327072 - DNA, 25 bp, Homo sapien
aaagacgatgtagaggaattccaga

SEQ ID NO: 5327073 - DNA, 25 bp, Homo sapien
gacagtcagcaccacgcttgaagcc

SEQ ID NO: 5327074 - DNA, 25 bp, Homo sapien
gcaactgctcgatggggttctcact

SEQ ID NO: 5327075 - DNA, 25 bp, Homo sapien
tctcactgtgagacagtcagcacca

SEQ ID NO: 5327076 - DNA, 25 bp, Homo sapien
ctcatggcaactgctcgatggggtt

SEQ ID NO: 5327077 - DNA, 25 bp, Homo sapien
tgtcaacagcagacctacacttgat

SEQ ID NO: 5327078 - DNA, 25 bp, Homo sapien
tcattaatagtgtcagtggatttct

SEQ ID NO: 5327079 - DNA, 25 bp, Homo sapien
tgtggatttcctgtcatatctctct

SEQ ID NO: 5327080 - DNA, 25 bp, Homo sapien
tctctccttatttagggactcatca

SEQ ID NO: 5327081 - DNA, 25 bp, Homo sapien
gaccttgcactaaccctcttgctat

SEQ ID NO: 5327082 - DNA, 25 bp, Homo sapien
ttgcttgaccttgcactaaccctct

SEQ ID NO: 5327083 - DNA, 25 bp, Homo sapien
tgcactaaccctcttgctatcaatt

SEQ ID NO: 5327084 - DNA, 25 bp, Homo sapien
taaccctcttgctatcaatttcaga

SEQ ID NO: 5327085 - DNA, 25 bp, Homo sapien
tgaaacctatgaaatccattctggg

SEQ ID NO: 5327086 - DNA, 25 bp, Homo sapien
gattctcaagatcctgtagctcaga

SEQ ID NO: 5327087 - DNA, 25 bp, Homo sapien
tgagaagagcccttgtctaatgaaa

SEQ ID NO: 5327088 - DNA, 25 bp, Homo sapien
gctgacatccagcacgcttgaggat

SEQ ID NO: 5327089 - DNA, 25 bp, Homo sapien
ctacgagaatagagatgcaaaggca

SEQ ID NO: 5327090 - DNA, 25 bp, Homo sapien
gaatgagaggaagtaggtatttgac

SEQ ID NO: 5327091 - DNA, 25 bp, Homo sapien
gaggaagtaggtatttgaccattac

SEQ ID NO: 5327092 - DNA, 25 bp, Homo sapien
tgagaggaagtaggtatttgaccat

SEQ ID NO: 5327093 - DNA, 25 bp, Homo sapien
aaggtaggtttatggaatgagagga

SEQ ID NO: 5327094 - DNA, 25 bp, Homo sapien
catcgagtgttacttctccaaccag

SEQ ID NO: 5327095 - DNA, 25 bp, Homo sapien
gagtcttactctccacatcgagtgt

SEQ ID NO: 5327096 - DNA, 25 bp, Homo sapien
ccagaagaatcgctttgtgaaataa

SEQ ID NO: 5327097 - DNA, 25 bp, Homo sapien
tgtcaaaaggtaatgcggacttctt

SEQ ID NO: 5327098 - DNA, 25 bp, Homo sapien
ctccctctccttcggctcttttcct

SEQ ID NO: 5327099 - DNA, 25 bp, Homo sapien
tctccttcggctcttttccttcacc

SEQ ID NO: 5327100 - DNA, 25 bp, Homo sapien
tccttcggctcttttccttcaccca

SEQ ID NO: 5327101 - DNA, 25 bp, Homo sapien
cctctccttcggctcttttccttca

SEQ ID NO: 5327102 - DNA, 25 bp, Homo sapien
tccaggcggcttaaccctgcaaagt

SEQ ID NO: 5327103 - DNA, 25 bp, Homo sapien
ttgtcttccaggcggcttaaccctg

SEQ ID NO: 5327104 - DNA, 25 bp, Homo sapien
ggcttaaccctgcaaagtacattac

SEQ ID NO: 5327105 - DNA, 25 bp, Homo sapien
ggcggcttaaccctgcaaagtacat

SEQ ID NO: 5327106 - DNA, 25 bp, Homo sapien
agatgcttttttagggagtaggaga

SEQ ID NO: 5327107 - DNA, 25 bp, Homo sapien
acaaaggctctgcaaagggagatgc

SEQ ID NO: 5327108 - DNA, 25 bp, Homo sapien
caaagggagatgcttttttagggag

SEQ ID NO: 5327109 - DNA, 25 bp, Homo sapien
ggcttccacaaaggctctgcaaagg

SEQ ID NO: 5327110 - DNA, 25 bp, Homo sapien
agattttactttgtccatgccagga

SEQ ID NO: 5327111 - DNA, 25 bp, Homo sapien
gaataattctgagatgtgagacacc

SEQ ID NO: 5327112 - DNA, 25 bp, Homo sapien
ccttgggaccacaaccgatgatctg

SEQ ID NO: 5327113 - DNA, 25 bp, Homo sapien
aatgatagaagtatagcagcaccct

SEQ ID NO: 5327114 - DNA, 25 bp, Homo sapien
gaatacaggactttggcctaatgct

SEQ ID NO: 5327115 - DNA, 25 bp, Homo sapien
taatgcttcacctttagtgcaggcc

SEQ ID NO: 5327116 - DNA, 25 bp, Homo sapien
caattacacagccattgtggaagga

SEQ ID NO: 5327117 - DNA, 25 bp, Homo sapien
gaacttattttagcaggttcatttg

SEQ ID NO: 5327118 - DNA, 25 bp, Homo sapien
ctgtggtagagtggcgataaatccc

SEQ ID NO: 5327119 - DNA, 25 bp, Homo sapien
tctgcatcggcgtggcctattggaa

SEQ ID NO: 5327120 - DNA, 25 bp, Homo sapien
gaaaaaagaatctgcatcggcgtgg

SEQ ID NO: 5327121 - DNA, 25 bp, Homo sapien
tctgtcaaggtaaacggttgtcggc

SEQ ID NO: 5327122 - DNA, 25 bp, Homo sapien
tttcctcttcagattgcattcttac

SEQ ID NO: 5327123 - DNA, 25 bp, Homo sapien
ctgttatttgctgatattcttcctc

SEQ ID NO: 5327124 - DNA, 25 bp, Homo sapien
tttttcctcttcagattgcattctt

SEQ ID NO: 5327125 - DNA, 25 bp, Homo sapien
tactgttatttgctgatattcttcc

SEQ ID NO: 5327126 - DNA, 25 bp, Homo sapien
tcgtgattgcctgctttgcggcttt

SEQ ID NO: 5327127 - DNA, 25 bp, Homo sapien
tgctttgcggctttggggtaagtcc

SEQ ID NO: 5327128 - DNA, 25 bp, Homo sapien
cttcgtgattgcctgctttgcggct

SEQ ID NO: 5327129 - DNA, 25 bp, Homo sapien
tgattgcctgctttgcggctttggg

SEQ ID NO: 5327130 - DNA, 25 bp, Homo sapien
aaatcaaggatttcattaactgctg

SEQ ID NO: 5327131 - DNA, 25 bp, Homo sapien
tagtcttgtccataatgtctatcta

SEQ ID NO: 5327132 - DNA, 25 bp, Homo sapien
ctggtagccagtttaaattgtagtc

SEQ ID NO: 5327133 - DNA, 25 bp, Homo sapien
gatttcattaactgctggtagccag

SEQ ID NO: 5327134 - DNA, 25 bp, Homo sapien
agcccacttctttcagacagggaca

SEQ ID NO: 5327135 - DNA, 25 bp, Homo sapien
aggtttgattcgtttcaagcccact

SEQ ID NO: 5327136 - DNA, 25 bp, Homo sapien
ttccccctctatgacaggttcacag

SEQ ID NO: 5327137 - DNA, 25 bp, Homo sapien
aagagcaaaggtttgattcgtttca

SEQ ID NO: 5327138 - DNA, 25 bp, Homo sapien
tgtatttaatgacatattagactca

SEQ ID NO: 5327139 - DNA, 25 bp, Homo sapien
ggcgagtcttctaaggtgcctttcc

SEQ ID NO: 5327140 - DNA, 25 bp, Homo sapien
agaggcacatcgataagaactggac

SEQ ID NO: 5327141 - DNA, 25 bp, Homo sapien
tgcaagctgcaaaatggcgagtctt

SEQ ID NO: 5327142 - DNA, 25 bp, Homo sapien
cctcatcttagaatgagcagaggca

SEQ ID NO: 5327143 - DNA, 25 bp, Homo sapien
caaagccaggcaattcttgagccaa

SEQ ID NO: 5327144 - DNA, 25 bp, Homo sapien
tattatcagaggagaagccatcagg

SEQ ID NO: 5327145 - DNA, 25 bp, Homo sapien
tgagctgcactcaacagtgacaggc

SEQ ID NO: 5327146 - DNA, 25 bp, Homo sapien
gataatcctcctcttgcacgggagc

SEQ ID NO: 5327147 - DNA, 25 bp, Homo sapien
gccacggatactttgtcaacagtca

SEQ ID NO: 5327148 - DNA, 25 bp, Homo sapien
tacaccacgctgataacaatgcata

SEQ ID NO: 5327149 - DNA, 25 bp, Homo sapien
tcttgattacaatccgccacacttc

SEQ ID NO: 5327150 - DNA, 25 bp, Homo sapien
tgcgctcattcgcactgccacggat

SEQ ID NO: 5327151 - DNA, 25 bp, Homo sapien
tgccatatttgccagaatcctcaaa

SEQ ID NO: 5327152 - DNA, 25 bp, Homo sapien
ccagataaatgttgattcactttta

SEQ ID NO: 5327153 - DNA, 25 bp, Homo sapien
tttttatcctagttgcttgttgcag

SEQ ID NO: 5327154 - DNA, 25 bp, Homo sapien
tcaaaacatcacaggacatagaaga

SEQ ID NO: 5327155 - DNA, 25 bp, Homo sapien
gacagttcattaagctgtgccacat

SEQ ID NO: 5327156 - DNA, 25 bp, Homo sapien
tatagataatgtgctccgagagcag

SEQ ID NO: 5327157 - DNA, 25 bp, Homo sapien
tcagagtcgcaatgaaagcaattga

SEQ ID NO: 5327158 - DNA, 25 bp, Homo sapien
gaagatgagccatatggtacttcta

SEQ ID NO: 5327159 - DNA, 25 bp, Homo sapien
gacaatggtctattgcaatgtaaaa

SEQ ID NO: 5327160 - DNA, 25 bp, Homo sapien
aacacgctggaggataaaaaggtgc

SEQ ID NO: 5327161 - DNA, 25 bp, Homo sapien
cgctggaggataaaaaggtgctttt

SEQ ID NO: 5327162 - DNA, 25 bp, Homo sapien
gcatgctccactgggttgcaatgac

SEQ ID NO: 5327163 - DNA, 25 bp, Homo sapien
ctgttcatcttcgagctgcaggcag

SEQ ID NO: 5327164 - DNA, 25 bp, Homo sapien
gctgttcatcttcgagctgcaggca

SEQ ID NO: 5327165 - DNA, 25 bp, Homo sapien
aagctgttcatcttcgagctgcagg

SEQ ID NO: 5327166 - DNA, 25 bp, Homo sapien
agctgttcatcttcgagctgcaggc

SEQ ID NO: 5327167 - DNA, 25 bp, Homo sapien
aatctgaagtggatcaaccaggccc

SEQ ID NO: 5327168 - DNA, 25 bp, Homo sapien
gagtctcttcccctataaatgggca

SEQ ID NO: 5327169 - DNA, 25 bp, Homo sapien
tgcgttctgctcattaaggcctccc

SEQ ID NO: 5327170 - DNA, 25 bp, Homo sapien
aaactggttccttagctgtcggtgg

SEQ ID NO: 5327171 - DNA, 25 bp, Homo sapien
cttcttgaaattttcagtgactcct

SEQ ID NO: 5327172 - DNA, 25 bp, Homo sapien
tctgttggattttcacttcttgaaa

SEQ ID NO: 5327173 - DNA, 25 bp, Homo sapien
cagtcttccaggcttctattttatt

SEQ ID NO: 5327174 - DNA, 25 bp, Homo sapien
gcttctattttattcctgggttcaa

SEQ ID NO: 5327175 - DNA, 25 bp, Homo sapien
tgtcagggaaccttggactgggtct

SEQ ID NO: 5327176 - DNA, 25 bp, Homo sapien
gacccacctctattgagctatgtga

SEQ ID NO: 5327177 - DNA, 25 bp, Homo sapien
gccatctgtggtgagtgggccatat

SEQ ID NO: 5327178 - DNA, 25 bp, Homo sapien
tccaggctgaggacaaggtgaatgt

SEQ ID NO: 5327179 - DNA, 25 bp, Homo sapien
ttaagtcacactgccaagtcctcta

SEQ ID NO: 5327180 - DNA, 25 bp, Homo sapien
gccaagtcctctaaggcctgatgaa

SEQ ID NO: 5327181 - DNA, 25 bp, Homo sapien
ctgccaagtcctctaaggcctgatg

SEQ ID NO: 5327182 - DNA, 25 bp, Homo sapien
caagtcctctaaggcctgatgaaag

SEQ ID NO: 5327183 - DNA, 25 bp, Homo sapien
tggtaaaaccaaatgtgctcttggg

SEQ ID NO: 5327184 - DNA, 25 bp, Homo sapien
tggactatctaactggtacctggac

SEQ ID NO: 5327185 - DNA, 25 bp, Homo sapien
cagtgtatctggtacctggactatc

SEQ ID NO: 5327186 - DNA, 25 bp, Homo sapien
aaaatcacatctactcgtcttccag

SEQ ID NO: 5327187 - DNA, 25 bp, Homo sapien
gaaagtgccacctgagttttgagag

SEQ ID NO: 5327188 - DNA, 25 bp, Homo sapien
gagaggctgtcaattttatttccat

SEQ ID NO: 5327189 - DNA, 25 bp, Homo sapien
cccacagagtctggtttattaggta

SEQ ID NO: 5327190 - DNA, 25 bp, Homo sapien
caaggagtcgcaagaagccatgtaa

SEQ ID NO: 5327191 - DNA, 25 bp, Homo sapien
agtggtagccccctcctcaaagagc

SEQ ID NO: 5327192 - DNA, 25 bp, Homo sapien
ttggtgtctagtggtagccccctcc

SEQ ID NO: 5327193 - DNA, 25 bp, Homo sapien
tagtggtagccccctcctcaaagag

SEQ ID NO: 5327194 - DNA, 25 bp, Homo sapien
tgtctagtggtagccccctcctcaa

SEQ ID NO: 5327195 - DNA, 25 bp, Homo sapien
ccaggctattccttcaagtcctttc

SEQ ID NO: 5327196 - DNA, 25 bp, Homo sapien
tattccttcaagtcctttcattagg

SEQ ID NO: 5327197 - DNA, 25 bp, Homo sapien
ctctctgctgtagacccatcatgag

SEQ ID NO: 5327198 - DNA, 25 bp, Homo sapien
cattaggcttgggtgaataggtagc

SEQ ID NO: 5327199 - DNA, 25 bp, Homo sapien
ttaagaaatcttccgtgattggttg

SEQ ID NO: 5327200 - DNA, 25 bp, Homo sapien
gcatagattaggttgatgtaccaat

SEQ ID NO: 5327201 - DNA, 25 bp, Homo sapien
ccgtgattggttgagcatgaggaat

SEQ ID NO: 5327202 - DNA, 25 bp, Homo sapien
ggttgatgtaccaatctctttcttc

SEQ ID NO: 5327203 - DNA, 25 bp, Homo sapien
ggcaataaacttataaatagctcaa

SEQ ID NO: 5327204 - DNA, 25 bp, Homo sapien
ctggcaataaacttataaatagctc

SEQ ID NO: 5327205 - DNA, 25 bp, Homo sapien
ctgtcctctggcaataaacttataa

SEQ ID NO: 5327206 - DNA, 25 bp, Homo sapien
cctctggcaataaacttataaatag

SEQ ID NO: 5327207 - DNA, 25 bp, Homo sapien
ttaagccctgcatgcgttacgtatt

SEQ ID NO: 5327208 - DNA, 25 bp, Homo sapien
ccctgcatgcgttacgtatttgtcc

SEQ ID NO: 5327209 - DNA, 25 bp, Homo sapien
agccctgcatgcgttacgtatttgt

SEQ ID NO: 5327210 - DNA, 25 bp, Homo sapien
tgcatgcgttacgtatttgtcctaa

SEQ ID NO: 5327211 - DNA, 25 bp, Homo sapien
gatgagcaaaatcgaaaagctagaa

SEQ ID NO: 5327212 - DNA, 25 bp, Homo sapien
ccagcaagatgagcaaaatcgaaaa

SEQ ID NO: 5327213 - DNA, 25 bp, Homo sapien
gctagaaatgcatgtcaggtactta

SEQ ID NO: 5327214 - DNA, 25 bp, Homo sapien
tcaggtacttatggttcttgagaag

SEQ ID NO: 5327215 - DNA, 25 bp, Homo sapien
ctctagctgtcttgtacttccaacc

SEQ ID NO: 5327216 - DNA, 25 bp, Homo sapien
gctctagctgtcttgtacttccaac

SEQ ID NO: 5327217 - DNA, 25 bp, Homo sapien
tccctgcaaagaacatgatctctct

SEQ ID NO: 5327218 - DNA, 25 bp, Homo sapien
ccctgcaaagaacatgatctctctc

SEQ ID NO: 5327219 - DNA, 25 bp, Homo sapien
aagttttgtaattccatcctctgga

SEQ ID NO: 5327220 - DNA, 25 bp, Homo sapien
taggagcaaaaacgatgaaattggt

SEQ ID NO: 5327221 - DNA, 25 bp, Homo sapien
ggtttttagctctgaactatgaatt

SEQ ID NO: 5327222 - DNA, 25 bp, Homo sapien
agaaataggagcaaaaacgatgaaa

SEQ ID NO: 5327223 - DNA, 25 bp, Homo sapien
caatttcaatgcacctaaggtgtcc

SEQ ID NO: 5327224 - DNA, 25 bp, Homo sapien
tgtcagtataatggacagggagtcc

SEQ ID NO: 5327225 - DNA, 25 bp, Homo sapien
ggcaagtgactgctatgctccatga

SEQ ID NO: 5327226 - DNA, 25 bp, Homo sapien
ttcatagtgaatgccaatggcctgc

SEQ ID NO: 5327227 - DNA, 25 bp, Homo sapien
ctcttttgactagtgcccatggcca

SEQ ID NO: 5327228 - DNA, 25 bp, Homo sapien
taatcatcatggaattcgaataaaa

SEQ ID NO: 5327229 - DNA, 25 bp, Homo sapien
cacttccttggcattaatcatcatg

SEQ ID NO: 5327230 - DNA, 25 bp, Homo sapien
cagatgtagtagttctggtgtgcag

SEQ ID NO: 5327231 - DNA, 25 bp, Homo sapien
ttctgtatgatggttcgggtatccc

SEQ ID NO: 5327232 - DNA, 25 bp, Homo sapien
cacagcatgcccacaatgatggcgt

SEQ ID NO: 5327233 - DNA, 25 bp, Homo sapien
gatgtgcatgatcctcccctggtgc

SEQ ID NO: 5327234 - DNA, 25 bp, Homo sapien
tcattgcagagaatgggccccactc

SEQ ID NO: 5327235 - DNA, 25 bp, Homo sapien
catatcaatcccgtcaaaaagagac

SEQ ID NO: 5327236 - DNA, 25 bp, Homo sapien
accaggagcctcatatcaatcccgt

SEQ ID NO: 5327237 - DNA, 25 bp, Homo sapien
caatcccgtcaaaaagagacagcac

SEQ ID NO: 5327238 - DNA, 25 bp, Homo sapien
ggagcctcatatcaatcccgtcaaa

SEQ ID NO: 5327239 - DNA, 25 bp, Homo sapien
ggatcttccttaatggtcacctggg

SEQ ID NO: 5327240 - DNA, 25 bp, Homo sapien
tgcccttgtgttcacacatgtagca

SEQ ID NO: 5327241 - DNA, 25 bp, Homo sapien
agctgagagggccagtcatcccgcc

SEQ ID NO: 5327242 - DNA, 25 bp, Homo sapien
caggcgagtagacttccagagggtc

SEQ ID NO: 5327243 - DNA, 25 bp, Homo sapien
ctggcccaaccaagaggtctataca

SEQ ID NO: 5327244 - DNA, 25 bp, Homo sapien
ggtctatacactccacgcaaaagca

SEQ ID NO: 5327245 - DNA, 25 bp, Homo sapien
caagaggtctatacactccacgcaa

SEQ ID NO: 5327246 - DNA, 25 bp, Homo sapien
aaccaagaggtctatacactccacg

SEQ ID NO: 5327247 - DNA, 25 bp, Homo sapien
cagcagttgttccagcacatgagca

SEQ ID NO: 5327248 - DNA, 25 bp, Homo sapien
cagcagaactgatagccttcttcat

SEQ ID NO: 5327249 - DNA, 25 bp, Homo sapien
agcagaactgatagccttcttcatc

SEQ ID NO: 5327250 - DNA, 25 bp, Homo sapien
gcagaactgatagccttcttcatca

SEQ ID NO: 5327251 - DNA, 25 bp, Homo sapien
ctggtatgcatattccaggaagcag

SEQ ID NO: 5327252 - DNA, 25 bp, Homo sapien
ggtatgcatattccaggaagcagtt

SEQ ID NO: 5327253 - DNA, 25 bp, Homo sapien
tggtatgcatattccaggaagcagt

SEQ ID NO: 5327254 - DNA, 25 bp, Homo sapien
taaacttctttgctgggattcttct

SEQ ID NO: 5327255 - DNA, 25 bp, Homo sapien
gcacctctgtatccttggcagtgtc

SEQ ID NO: 5327256 - DNA, 25 bp, Homo sapien
tggaaccccccaaaggtccatctga

SEQ ID NO: 5327257 - DNA, 25 bp, Homo sapien
catctgaatatctgcttgctctgca

SEQ ID NO: 5327258 - DNA, 25 bp, Homo sapien
ggcaggacttcgtagatggctttgt

SEQ ID NO: 5327259 - DNA, 25 bp, Homo sapien
ccaccggcaggacttcgtagatggc

SEQ ID NO: 5327260 - DNA, 25 bp, Homo sapien
gccaccggcaggacttcgtagatgg

SEQ ID NO: 5327261 - DNA, 25 bp, Homo sapien
agccacatgacacagtgggtgcctt

SEQ ID NO: 5327262 - DNA, 25 bp, Homo sapien
gtcatccaccaagacacaatgcggc

SEQ ID NO: 5327263 - DNA, 25 bp, Homo sapien
cagctgtccttgtactctggttcat

SEQ ID NO: 5327264 - DNA, 25 bp, Homo sapien
tccccattgccaaagccccagctgt

SEQ ID NO: 5327265 - DNA, 25 bp, Homo sapien
ccccagctgtccttgtactctggtt

SEQ ID NO: 5327266 - DNA, 25 bp, Homo sapien
ctccccattgccaaagccccagctg

SEQ ID NO: 5327267 - DNA, 25 bp, Homo sapien
cctgctttgatgtacttgttcccag

SEQ ID NO: 5327268 - DNA, 25 bp, Homo sapien
caggctcaggtgtggtaacgacagt

SEQ ID NO: 5327269 - DNA, 25 bp, Homo sapien
cgtcacctgctttgatgtacttgtt

SEQ ID NO: 5327270 - DNA, 25 bp, Homo sapien
cacaggctcaggtgtggtaacgaca

SEQ ID NO: 5327271 - DNA, 25 bp, Homo sapien
ctagctctactcaggacttctgact

SEQ ID NO: 5327272 - DNA, 25 bp, Homo sapien
ggtcatttagcttctgccctgaatg

SEQ ID NO: 5327273 - DNA, 25 bp, Homo sapien
ctctgggcccatggtcatttagctt

SEQ ID NO: 5327274 - DNA, 25 bp, Homo sapien
gacttctgacttgccaaaggcctct

SEQ ID NO: 5327275 - DNA, 25 bp, Homo sapien
acttatcatagactcagtacagttc

SEQ ID NO: 5327276 - DNA, 25 bp, Homo sapien
tgaatgttatttacttccacgaaga

SEQ ID NO: 5327277 - DNA, 25 bp, Homo sapien
tggaacttatcatagactcagtaca

SEQ ID NO: 5327278 - DNA, 25 bp, Homo sapien
gaatgttatttacttccacgaagaa

SEQ ID NO: 5327279 - DNA, 25 bp, Homo sapien
atctacctgattgggatggatttgg

SEQ ID NO: 5327280 - DNA, 25 bp, Homo sapien
tgggcgataattcaggctgggttca

SEQ ID NO: 5327281 - DNA, 25 bp, Homo sapien
atatctgttccagcctattagccag

SEQ ID NO: 5327282 - DNA, 25 bp, Homo sapien
gatttggtgtgggaatatctgttcc

SEQ ID NO: 5327283 - DNA, 25 bp, Homo sapien
tagtgtagtggttgtgacttttggc

SEQ ID NO: 5327284 - DNA, 25 bp, Homo sapien
tggtggtgatgccttaagactgaga

SEQ ID NO: 5327285 - DNA, 25 bp, Homo sapien
tctttgggggcagttgatttacatc

SEQ ID NO: 5327286 - DNA, 25 bp, Homo sapien
gatttacatccctcatgattggtgg

SEQ ID NO: 5327287 - DNA, 25 bp, Homo sapien
cacgcaagtcagcaattgtctctaa

SEQ ID NO: 5327288 - DNA, 25 bp, Homo sapien
gcaattgtctctaattcctccaact

SEQ ID NO: 5327289 - DNA, 25 bp, Homo sapien
agcccaagtgtaggtatccacgcaa

SEQ ID NO: 5327290 - DNA, 25 bp, Homo sapien
taggtatccacgcaagtcagcaatt

SEQ ID NO: 5327291 - DNA, 25 bp, Homo sapien
ctttggcagtcaaataccaggctta

SEQ ID NO: 5327292 - DNA, 25 bp, Homo sapien
ttggcagtcaaataccaggcttact

SEQ ID NO: 5327293 - DNA, 25 bp, Homo sapien
agtcaaataccaggcttactagcat

SEQ ID NO: 5327294 - DNA, 25 bp, Homo sapien
ggcagtcaaataccaggcttactag

SEQ ID NO: 5327295 - DNA, 25 bp, Homo sapien
tgtagtcccagcatagagtctcatg

SEQ ID NO: 5327296 - DNA, 25 bp, Homo sapien
gagtctcatggatccccgaggcatg

SEQ ID NO: 5327297 - DNA, 25 bp, Homo sapien
catgactggtctggttagcctctcc

SEQ ID NO: 5327298 - DNA, 25 bp, Homo sapien
gaagttctgcccgaatggttagtag

SEQ ID NO: 5327299 - DNA, 25 bp, Homo sapien
gcaccttctccatacgctggtaatg

SEQ ID NO: 5327300 - DNA, 25 bp, Homo sapien
accttctccatacgctggtaatgta

SEQ ID NO: 5327301 - DNA, 25 bp, Homo sapien
ttctccatacgctggtaatgtacac

SEQ ID NO: 5327302 - DNA, 25 bp, Homo sapien
cttctccatacgctggtaatgtaca

SEQ ID NO: 5327303 - DNA, 25 bp, Homo sapien
tgtgactctcattgtgatgtacgtc

SEQ ID NO: 5327304 - DNA, 25 bp, Homo sapien
atttctttgggtgatcgtttgtgac

SEQ ID NO: 5327305 - DNA, 25 bp, Homo sapien
gggtgatcgtttgtgactctcattg

SEQ ID NO: 5327306 - DNA, 25 bp, Homo sapien
cgtttgtgactctcattgtgatgta

SEQ ID NO: 5327307 - DNA, 25 bp, Homo sapien
gggaggcagatgagctcccacactc

SEQ ID NO: 5327308 - DNA, 25 bp, Homo sapien
agtcagatgtgggaggcagatgagc

SEQ ID NO: 5327309 - DNA, 25 bp, Homo sapien
tcagatgtgggaggcagatgagctc

SEQ ID NO: 5327310 - DNA, 25 bp, Homo sapien
gaggcagatgagctcccacactcct

SEQ ID NO: 5327311 - DNA, 25 bp, Homo sapien
tgccatgtgaaagctgacagctgcc

SEQ ID NO: 5327312 - DNA, 25 bp, Homo sapien
gcttgcttgccaggagcgagtgcca

SEQ ID NO: 5327313 - DNA, 25 bp, Homo sapien
atgacaaggatttggctgccactgg

SEQ ID NO: 5327314 - DNA, 25 bp, Homo sapien
gatttggctgccactggacttgctt

SEQ ID NO: 5327315 - DNA, 25 bp, Homo sapien
cattcccggtgactagaaaggatcc

SEQ ID NO: 5327316 - DNA, 25 bp, Homo sapien
gattatgtctgtcattcccggtgac

SEQ ID NO: 5327317 - DNA, 25 bp, Homo sapien
ttgctgcaaaaagctgctttgatgc

SEQ ID NO: 5327318 - DNA, 25 bp, Homo sapien
tcctggctaactgttgattatgtct

SEQ ID NO: 5327319 - DNA, 25 bp, Homo sapien
cgaataatcaggttccttctggcta

SEQ ID NO: 5327320 - DNA, 25 bp, Homo sapien
gaataatcaggttccttctggctac

SEQ ID NO: 5327321 - DNA, 25 bp, Homo sapien
ctggaaaatgcagaatcaaacacct

SEQ ID NO: 5327322 - DNA, 25 bp, Homo sapien
tgtggtgagctctgggcctgccacc

SEQ ID NO: 5327323 - DNA, 25 bp, Homo sapien
ctgtttaagtagatgtggtgagctc

SEQ ID NO: 5327324 - DNA, 25 bp, Homo sapien
tgcagaatcaaacacctgtttaagt

SEQ ID NO: 5327325 - DNA, 25 bp, Homo sapien
gctttacttagcatgaggtgggagc

SEQ ID NO: 5327326 - DNA, 25 bp, Homo sapien
tgcacgacataacattcaccagctg

SEQ ID NO: 5327327 - DNA, 25 bp, Homo sapien
caccagctgctttacttagcatgag

SEQ ID NO: 5327328 - DNA, 25 bp, Homo sapien
ggagcacgacgctttgatgaaagca

SEQ ID NO: 5327329 - DNA, 25 bp, Homo sapien
gcttggctaagccagcatttggatt

SEQ ID NO: 5327330 - DNA, 25 bp, Homo sapien
gtggcttggctaagccagcatttgg

SEQ ID NO: 5327331 - DNA, 25 bp, Homo sapien
cttcgggagcagactgtggcttggc

SEQ ID NO: 5327332 - DNA, 25 bp, Homo sapien
tcgggctgcagcaatccttcttcgg

SEQ ID NO: 5327333 - DNA, 25 bp, Homo sapien
cagttcatgtttatcgtgggtgaca

SEQ ID NO: 5327334 - DNA, 25 bp, Homo sapien
ttgtcacagcagttcatgtttatcg

SEQ ID NO: 5327335 - DNA, 25 bp, Homo sapien
tccgcttcccattgtcacagcagtt

SEQ ID NO: 5327336 - DNA, 25 bp, Homo sapien
ttccgcttcccattgtcacagcagt

SEQ ID NO: 5327337 - DNA, 25 bp, Homo sapien
gaggctctatttttccagtgccata

SEQ ID NO: 5327338 - DNA, 25 bp, Homo sapien
tccagtgccatacaaggcaagattg

SEQ ID NO: 5327339 - DNA, 25 bp, Homo sapien
ctgtgagatctgagcaagggatgac

SEQ ID NO: 5327340 - DNA, 25 bp, Homo sapien
gagaagacttcatctgaagaaagag

SEQ ID NO: 5327341 - DNA, 25 bp, Homo sapien
cagcatccttgcctgatgttgccaa

SEQ ID NO: 5327342 - DNA, 25 bp, Homo sapien
tgttgccaaatctccaaagttcgca

SEQ ID NO: 5327343 - DNA, 25 bp, Homo sapien
gcctgatgttgccaaatctccaaag

SEQ ID NO: 5327344 - DNA, 25 bp, Homo sapien
tccttgcctgatgttgccaaatctc

SEQ ID NO: 5327345 - DNA, 25 bp, Homo sapien
ccctctcaagaataacaggaatcat

SEQ ID NO: 5327346 - DNA, 25 bp, Homo sapien
ggttgaatacttgcaagccctctca

SEQ ID NO: 5327347 - DNA, 25 bp, Homo sapien
gactttgagggttgaatacttgcaa

SEQ ID NO: 5327348 - DNA, 25 bp, Homo sapien
gggaaacttccttgttgatttatca

SEQ ID NO: 5327349 - DNA, 25 bp, Homo sapien
tgtgcttcagcctgcgcattcgctt

SEQ ID NO: 5327350 - DNA, 25 bp, Homo sapien
tgcagaggtttccaagaaaatggtg

SEQ ID NO: 5327351 - DNA, 25 bp, Homo sapien
cttttgtgcttcagcctgcgcattc

SEQ ID NO: 5327352 - DNA, 25 bp, Homo sapien
ttgtgcttcagcctgcgcattcgct

SEQ ID NO: 5327353 - DNA, 25 bp, Homo sapien
attcttaaatccaatttgaacctca

SEQ ID NO: 5327354 - DNA, 25 bp, Homo sapien
ccctcaactctagcttttttattct

SEQ ID NO: 5327355 - DNA, 25 bp, Homo sapien
tctagcttttttattcttaaatcca

SEQ ID NO: 5327356 - DNA, 25 bp, Homo sapien
tcaactctagcttttttattcttaa

SEQ ID NO: 5327357 - DNA, 25 bp, Homo sapien
tagtcttcagagcacactttcagtt

SEQ ID NO: 5327358 - DNA, 25 bp, Homo sapien
tctgtttaatgcttaggtagtcttc

SEQ ID NO: 5327359 - DNA, 25 bp, Homo sapien
tcagagcacactttcagttcttcct

SEQ ID NO: 5327360 - DNA, 25 bp, Homo sapien
taggtagtcttcagagcacactttc

SEQ ID NO: 5327361 - DNA, 25 bp, Homo sapien
ccatgggtcctgtggcaagactcca

SEQ ID NO: 5327362 - DNA, 25 bp, Homo sapien
tccagaactttgaaggtcctcagct

SEQ ID NO: 5327363 - DNA, 25 bp, Homo sapien
tgttccacacccaaatgagcatctg

SEQ ID NO: 5327364 - DNA, 25 bp, Homo sapien
tctaagaactgttcccagaggccat

SEQ ID NO: 5327365 - DNA, 25 bp, Homo sapien
tacatcaatggagggagtcaccttt

SEQ ID NO: 5327366 - DNA, 25 bp, Homo sapien
tagtatcatttggtgggaggtaatc

SEQ ID NO: 5327367 - DNA, 25 bp, Homo sapien
tatacccaaggtgaagcatggcagc

SEQ ID NO: 5327368 - DNA, 25 bp, Homo sapien
ggtaatcatggcgaaatacatcaat

SEQ ID NO: 5327369 - DNA, 25 bp, Homo sapien
gaacatatctagtgcaacctgacaa

SEQ ID NO: 5327370 - DNA, 25 bp, Homo sapien
tgccaatacaggagtgatatcagcc

SEQ ID NO: 5327371 - DNA, 25 bp, Homo sapien
taaaaacaggccatcgctctagagg

SEQ ID NO: 5327372 - DNA, 25 bp, Homo sapien
gctggtccagcagggtagacttatg

SEQ ID NO: 5327373 - DNA, 25 bp, Homo sapien
gcagatacggtcctaccattcaaag

SEQ ID NO: 5327374 - DNA, 25 bp, Homo sapien
tggcacagctgtatttcaaaaactg

SEQ ID NO: 5327375 - DNA, 25 bp, Homo sapien
cacatggcacagctgtatttcaaaa

SEQ ID NO: 5327376 - DNA, 25 bp, Homo sapien
tcaaaaactgaatagcagatacggt

SEQ ID NO: 5327377 - DNA, 25 bp, Homo sapien
ctgaggacataaactcatagattat

SEQ ID NO: 5327378 - DNA, 25 bp, Homo sapien
tgaggacataaactcatagattatt

SEQ ID NO: 5327379 - DNA, 25 bp, Homo sapien
caggtattatgcctttttgtgggtg

SEQ ID NO: 5327380 - DNA, 25 bp, Homo sapien
cctccaaaacattgagctcatagct

SEQ ID NO: 5327381 - DNA, 25 bp, Homo sapien
aaacacttcaattctagaggactgc

SEQ ID NO: 5327382 - DNA, 25 bp, Homo sapien
cactgctatagaagggatttcctcc

SEQ ID NO: 5327383 - DNA, 25 bp, Homo sapien
cacctatatcctgtggcagccactg

SEQ ID NO: 5327384 - DNA, 25 bp, Homo sapien
gtgtaggctccagtgagtttccagt

SEQ ID NO: 5327385 - DNA, 25 bp, Homo sapien
gcaggtgtggagtttctttactgat

SEQ ID NO: 5327386 - DNA, 25 bp, Homo sapien
taggtacggttttgcttcaggccca

SEQ ID NO: 5327387 - DNA, 25 bp, Homo sapien
acttcaagcacttataataatgttt

SEQ ID NO: 5327388 - DNA, 25 bp, Homo sapien
gggaacatgaagccctgaacttcaa

SEQ ID NO: 5327389 - DNA, 25 bp, Homo sapien
caagcaaagagctctggtcaaattt

SEQ ID NO: 5327390 - DNA, 25 bp, Homo sapien
taatgtttaacaacaagcaaagagc

SEQ ID NO: 5327391 - DNA, 25 bp, Homo sapien
tctggtttcctcctgcaacttgggt

SEQ ID NO: 5327392 - DNA, 25 bp, Homo sapien
gagcaataccccttggagtaataaa

SEQ ID NO: 5327393 - DNA, 25 bp, Homo sapien
acagcttgttgttgggcagggcatt

SEQ ID NO: 5327394 - DNA, 25 bp, Homo sapien
cagttgaatgattagagcaataccc

SEQ ID NO: 5327395 - DNA, 25 bp, Homo sapien
tcttccatcagctgccacagtccca

SEQ ID NO: 5327396 - DNA, 25 bp, Homo sapien
tcagctccctcttccatcagctgcc

SEQ ID NO: 5327397 - DNA, 25 bp, Homo sapien
ctcttccatcagctgccacagtccc

SEQ ID NO: 5327398 - DNA, 25 bp, Homo sapien
gctccctcttccatcagctgccaca

SEQ ID NO: 5327399 - DNA, 25 bp, Homo sapien
tcttctaattgggacagagtccctg

SEQ ID NO: 5327400 - DNA, 25 bp, Homo sapien
ttagaaccatttaaggctagtcttc

SEQ ID NO: 5327401 - DNA, 25 bp, Homo sapien
taaggctagtcttctaattgggaca

SEQ ID NO: 5327402 - DNA, 25 bp, Homo sapien
catttaaggctagtcttctaattgg

SEQ ID NO: 5327403 - DNA, 25 bp, Homo sapien
ctttttgtttctgctgcacctcaat

SEQ ID NO: 5327404 - DNA, 25 bp, Homo sapien
gcagatgttgaaagcccctgccacc

SEQ ID NO: 5327405 - DNA, 25 bp, Homo sapien
tgctgcacctcaataacactggggc

SEQ ID NO: 5327406 - DNA, 25 bp, Homo sapien
ataacactggggcagatgttgaaag

SEQ ID NO: 5327407 - DNA, 25 bp, Homo sapien
ccttggctggatgctacaggccact

SEQ ID NO: 5327408 - DNA, 25 bp, Homo sapien
ttttatatgtagatgtcttagagag

SEQ ID NO: 5327409 - DNA, 25 bp, Homo sapien
tgtaggaagtgaactaccttggctg

SEQ ID NO: 5327410 - DNA, 25 bp, Homo sapien
tagatgtcttagagagttaatctgg

SEQ ID NO: 5327411 - DNA, 25 bp, Homo sapien
tgggatgctcctgttagagcaaaac

SEQ ID NO: 5327412 - DNA, 25 bp, Homo sapien
ttccccagggaaagtacagtcttca

SEQ ID NO: 5327413 - DNA, 25 bp, Homo sapien
gattaatatgcaacacaagggaaga

SEQ ID NO: 5327414 - DNA, 25 bp, Homo sapien
tcttcacagatgagtgagttcccta

SEQ ID NO: 5327415 - DNA, 25 bp, Homo sapien
gcctctcaactctagcttgtacctg

SEQ ID NO: 5327416 - DNA, 25 bp, Homo sapien
ctctcaactctagcttgtacctgct

SEQ ID NO: 5327417 - DNA, 25 bp, Homo sapien
tgcctctcaactctagcttgtacct

SEQ ID NO: 5327418 - DNA, 25 bp, Homo sapien
ttgcctctcaactctagcttgtacc

SEQ ID NO: 5327419 - DNA, 25 bp, Homo sapien
ttctccagatcacatgagaggtgct

SEQ ID NO: 5327420 - DNA, 25 bp, Homo sapien
gattcatgggagacacgcttgcatc

SEQ ID NO: 5327421 - DNA, 25 bp, Homo sapien
actcagaaagtgcaggccagtctct

SEQ ID NO: 5327422 - DNA, 25 bp, Homo sapien
caggagatcatattggacagaaccc

SEQ ID NO: 5327423 - DNA, 25 bp, Homo sapien
taaaatgaatcgagtgtagcttcgg

SEQ ID NO: 5327424 - DNA, 25 bp, Homo sapien
tgtagcttcggttgcactgtgataa

SEQ ID NO: 5327425 - DNA, 25 bp, Homo sapien
aatttagttcacttctgaacttgac

SEQ ID NO: 5327426 - DNA, 25 bp, Homo sapien
cggttgcactgtgataatttagttc

SEQ ID NO: 5327427 - DNA, 25 bp, Homo sapien
tacatgtgcatgtcgaatttgatga

SEQ ID NO: 5327428 - DNA, 25 bp, Homo sapien
ttacatgtgcatgtcgaatttgatg

SEQ ID NO: 5327429 - DNA, 25 bp, Homo sapien
gtttacatgtgcatgtcgaatttga

SEQ ID NO: 5327430 - DNA, 25 bp, Homo sapien
agtttacatgtgcatgtcgaatttg

SEQ ID NO: 5327431 - DNA, 25 bp, Homo sapien
catctgcgagcctagaatctggagc

SEQ ID NO: 5327432 - DNA, 25 bp, Homo sapien
caggcagtactgaagatcccctttg

SEQ ID NO: 5327433 - DNA, 25 bp, Homo sapien
aggcagtactgaagatcccctttga

SEQ ID NO: 5327434 - DNA, 25 bp, Homo sapien
agcatcaccatctgcgagcctagaa

SEQ ID NO: 5327435 - DNA, 25 bp, Homo sapien
tccaagttttctcagtctcataaaa

SEQ ID NO: 5327436 - DNA, 25 bp, Homo sapien
tgaatgaggcagtggtgccatgaaa

SEQ ID NO: 5327437 - DNA, 25 bp, Homo sapien
ctgaatgaggcagtggtgccatgaa

SEQ ID NO: 5327438 - DNA, 25 bp, Homo sapien
aaatggccccacagcataaggttcc

SEQ ID NO: 5327439 - DNA, 25 bp, Homo sapien
acattaggacgaaaaaatgatgcat

SEQ ID NO: 5327440 - DNA, 25 bp, Homo sapien
cccaaatatccgtaagtgatagact

SEQ ID NO: 5327441 - DNA, 25 bp, Homo sapien
ccgtaagtgatagactcaataaaga

SEQ ID NO: 5327442 - DNA, 25 bp, Homo sapien
ggagaacattaggacgaaaaaatga

SEQ ID NO: 5327443 - DNA, 25 bp, Homo sapien
gaattttggttctgagtatctgagc

SEQ ID NO: 5327444 - DNA, 25 bp, Homo sapien
tcctgagaattttggttctgagtat

SEQ ID NO: 5327445 - DNA, 25 bp, Homo sapien
tctctgatggtatttaaatttgcca

SEQ ID NO: 5327446 - DNA, 25 bp, Homo sapien
ggctggcagacatagtaacaatatt

SEQ ID NO: 5327447 - DNA, 25 bp, Homo sapien
tcttaaacttcggacctgtcttgtc

SEQ ID NO: 5327448 - DNA, 25 bp, Homo sapien
ctgaattgacttccaagaggcttct

SEQ ID NO: 5327449 - DNA, 25 bp, Homo sapien
tgaattgacttccaagaggcttctc

SEQ ID NO: 5327450 - DNA, 25 bp, Homo sapien
tatactcttaaacttcggacctgtc

SEQ ID NO: 5327451 - DNA, 25 bp, Homo sapien
ataagcatcaggaagattggagggt

SEQ ID NO: 5327452 - DNA, 25 bp, Homo sapien
tcaggaagattggagggtgtagagg

SEQ ID NO: 5327453 - DNA, 25 bp, Homo sapien
agcatcaggaagattggagggtgta

SEQ ID NO: 5327454 - DNA, 25 bp, Homo sapien
tgataagcatcaggaagattggagg

SEQ ID NO: 5327455 - DNA, 25 bp, Homo sapien
tcggagccgtttgcagcattttggg

SEQ ID NO: 5327456 - DNA, 25 bp, Homo sapien
actactgaaaaggaatcggagccgt

SEQ ID NO: 5327457 - DNA, 25 bp, Homo sapien
tgattccgggctgatgcatgttcat

SEQ ID NO: 5327458 - DNA, 25 bp, Homo sapien
gcttggcagacacattgattccggg

SEQ ID NO: 5327459 - DNA, 25 bp, Homo sapien
ttagcactgagagggcttggcatga

SEQ ID NO: 5327460 - DNA, 25 bp, Homo sapien
ttggcatgagggaggcaagtttctt

SEQ ID NO: 5327461 - DNA, 25 bp, Homo sapien
cttagcactgagagggcttggcatg

SEQ ID NO: 5327462 - DNA, 25 bp, Homo sapien
gagagggcttggcatgagggaggca

SEQ ID NO: 5327463 - DNA, 25 bp, Homo sapien
ccagacccaagtcaccatgatttca

SEQ ID NO: 5327464 - DNA, 25 bp, Homo sapien
cgaaccaccagagaatgttcataca

SEQ ID NO: 5327465 - DNA, 25 bp, Homo sapien
gttcatacaatattgagtaccttcc

SEQ ID NO: 5327466 - DNA, 25 bp, Homo sapien
gtcaccatgatttcacgaaccacca

SEQ ID NO: 5327467 - DNA, 25 bp, Homo sapien
gctgaaaataccttgctcaatcaaa

SEQ ID NO: 5327468 - DNA, 25 bp, Homo sapien
aaagccataatgcattccggtcccc

SEQ ID NO: 5327469 - DNA, 25 bp, Homo sapien
tagtaataactgttcattttaccaa

SEQ ID NO: 5327470 - DNA, 25 bp, Homo sapien
aagctgaaaataccttgctcaatca

SEQ ID NO: 5327471 - DNA, 25 bp, Homo sapien
gtaaagtaagtgcctccaaatagcc

SEQ ID NO: 5327472 - DNA, 25 bp, Homo sapien
gagaataagctctccatttagagat

SEQ ID NO: 5327473 - DNA, 25 bp, Homo sapien
tgtacgacagcaggtaaagtaagtg

SEQ ID NO: 5327474 - DNA, 25 bp, Homo sapien
ctgtttgctgcccttgtacgacagc

SEQ ID NO: 5327475 - DNA, 25 bp, Homo sapien
cctggagtaatcttctcaacttgtg

SEQ ID NO: 5327476 - DNA, 25 bp, Homo sapien
ttattccactgatcataaggttctc

SEQ ID NO: 5327477 - DNA, 25 bp, Homo sapien
caatctggggtcatgaaattcacct

SEQ ID NO: 5327478 - DNA, 25 bp, Homo sapien
tctcctgcattaggcggtggtctgg

SEQ ID NO: 5327479 - DNA, 25 bp, Homo sapien
tagtgactcttaggtgtacagctgc

SEQ ID NO: 5327480 - DNA, 25 bp, Homo sapien
cacaaatggaacttgaaccgcagag

SEQ ID NO: 5327481 - DNA, 25 bp, Homo sapien
gttctcatgtacaggtcctcttcca

SEQ ID NO: 5327482 - DNA, 25 bp, Homo sapien
ggtcctcttccaacaattaacataa

SEQ ID NO: 5327483 - DNA, 25 bp, Homo sapien
aaaacactattcctgcttcatattg

SEQ ID NO: 5327484 - DNA, 25 bp, Homo sapien
ctattcctgcttcatattgagttga

SEQ ID NO: 5327485 - DNA, 25 bp, Homo sapien
ctaattacactattgatctttgaaa

SEQ ID NO: 5327486 - DNA, 25 bp, Homo sapien
ttttttagcacaactgagctaagcc

SEQ ID NO: 5327487 - DNA, 25 bp, Homo sapien
cacatttcagtcaggatacagtcag

SEQ ID NO: 5327488 - DNA, 25 bp, Homo sapien
caaaaggttcacatagggcatgtgc

SEQ ID NO: 5327489 - DNA, 25 bp, Homo sapien
ggaactctggaactcagcttgatca

SEQ ID NO: 5327490 - DNA, 25 bp, Homo sapien
cagggatttccctaggtacataaag

SEQ ID NO: 5327491 - DNA, 25 bp, Homo sapien
tctcaggaaggtgctaaaagtgttg

SEQ ID NO: 5327492 - DNA, 25 bp, Homo sapien
gagtctgtatttccacaaccaccga

SEQ ID NO: 5327493 - DNA, 25 bp, Homo sapien
gactctgtcaagatagccaagcccc

SEQ ID NO: 5327494 - DNA, 25 bp, Homo sapien
cccatttagtcaagtcatggaacta

SEQ ID NO: 5327495 - DNA, 25 bp, Homo sapien
aaaggagagccgtggcattgactga

SEQ ID NO: 5327496 - DNA, 25 bp, Homo sapien
ccgtggcattgactgagagaggaca

SEQ ID NO: 5327497 - DNA, 25 bp, Homo sapien
ttaatgaaaggagagccgtggcatt

SEQ ID NO: 5327498 - DNA, 25 bp, Homo sapien
cgtggcattgactgagagaggacat

SEQ ID NO: 5327499 - DNA, 25 bp, Homo sapien
tagtgctgcaaaaagcattcgtgtg

SEQ ID NO: 5327500 - DNA, 25 bp, Homo sapien
gctgcaaaaagcattcgtgtgcatg

SEQ ID NO: 5327501 - DNA, 25 bp, Homo sapien
ttctttagccagtcatcattggtgg

SEQ ID NO: 5327502 - DNA, 25 bp, Homo sapien
ccagtcatcattggtgggcatctgg

SEQ ID NO: 5327503 - DNA, 25 bp, Homo sapien
tcactgccactaataccagtgcatt

SEQ ID NO: 5327504 - DNA, 25 bp, Homo sapien
aaggtcttttcactgccactaatac

SEQ ID NO: 5327505 - DNA, 25 bp, Homo sapien
tgatacctattactcttattaaaag

SEQ ID NO: 5327506 - DNA, 25 bp, Homo sapien
tcataactgatacctattactctta

SEQ ID NO: 5327507 - DNA, 25 bp, Homo sapien
tgtgtccacatgttgctccaaaagc

SEQ ID NO: 5327508 - DNA, 25 bp, Homo sapien
ctccatcttggcgtggggcatccca

SEQ ID NO: 5327509 - DNA, 25 bp, Homo sapien
aaagcaatggccactgatgcctcca

SEQ ID NO: 5327510 - DNA, 25 bp, Homo sapien
gggcatcccacgttggctgccattt

SEQ ID NO: 5327511 - DNA, 25 bp, Homo sapien
ttctgctcatggcattaaaagcatg

SEQ ID NO: 5327512 - DNA, 25 bp, Homo sapien
taaaagcatgaacactagggagaaa

SEQ ID NO: 5327513 - DNA, 25 bp, Homo sapien
tctataacatgatccgtgacagatg

SEQ ID NO: 5327514 - DNA, 25 bp, Homo sapien
agatgtaccacttaggaggccctgg

SEQ ID NO: 5327515 - DNA, 25 bp, Homo sapien
ctagaaacaatacttcttttaggct

SEQ ID NO: 5327516 - DNA, 25 bp, Homo sapien
ttatgtctatatctcctagaaacaa

SEQ ID NO: 5327517 - DNA, 25 bp, Homo sapien
tatctcctagaaacaatacttcttt

SEQ ID NO: 5327518 - DNA, 25 bp, Homo sapien
tgtctatatctcctagaaacaatac

SEQ ID NO: 5327519 - DNA, 25 bp, Homo sapien
cctatagacaatccagcactgaaga

SEQ ID NO: 5327520 - DNA, 25 bp, Homo sapien
tttgcctatagacaatccagcactg

SEQ ID NO: 5327521 - DNA, 25 bp, Homo sapien
caggaattttgcctatagacaatcc

SEQ ID NO: 5327522 - DNA, 25 bp, Homo sapien
gaattttgcctatagacaatccagc

SEQ ID NO: 5327523 - DNA, 25 bp, Homo sapien
tctgtccagacaccacaggatgtgt

SEQ ID NO: 5327524 - DNA, 25 bp, Homo sapien
cattgaggtctgtgttgcacagggt

SEQ ID NO: 5327525 - DNA, 25 bp, Homo sapien
aagaagatatcagggtccattgagg

SEQ ID NO: 5327526 - DNA, 25 bp, Homo sapien
ctctgtccagacaccacaggatgtg

SEQ ID NO: 5327527 - DNA, 25 bp, Homo sapien
cagtgattgctacatagaagccatc

SEQ ID NO: 5327528 - DNA, 25 bp, Homo sapien
tatttaccatctataagcaatgcct

SEQ ID NO: 5327529 - DNA, 25 bp, Homo sapien
tctggtttatctgacaatcccagca

SEQ ID NO: 5327530 - DNA, 25 bp, Homo sapien
tgcctccttagggaaagaccaagtc

SEQ ID NO: 5327531 - DNA, 25 bp, Homo sapien
tgttccaggataaccccacacaccc

SEQ ID NO: 5327532 - DNA, 25 bp, Homo sapien
tgctgttccaggataaccccacaca

SEQ ID NO: 5327533 - DNA, 25 bp, Homo sapien
cctgctgttccaggataaccccaca

SEQ ID NO: 5327534 - DNA, 25 bp, Homo sapien
catcctggatcatgctctcctgctg

SEQ ID NO: 5327535 - DNA, 25 bp, Homo sapien
tgacctttatctaggactgacccag

SEQ ID NO: 5327536 - DNA, 25 bp, Homo sapien
cctttatctaggactgacccagcac

SEQ ID NO: 5327537 - DNA, 25 bp, Homo sapien
tatctaggactgacccagcactctc

SEQ ID NO: 5327538 - DNA, 25 bp, Homo sapien
cattgacctttatctaggactgacc

SEQ ID NO: 5327539 - DNA, 25 bp, Homo sapien
acggcagccatggactggtgtggag

SEQ ID NO: 5327540 - DNA, 25 bp, Homo sapien
cagccatggactggtgtggagagca

SEQ ID NO: 5327541 - DNA, 25 bp, Homo sapien
cctgaatcattgacaccacggcagc

SEQ ID NO: 5327542 - DNA, 25 bp, Homo sapien
aaaacagtcctgaatcattgacacc

SEQ ID NO: 5327543 - DNA, 25 bp, Homo sapien
aatctgctggcgccttgatcttaaa

SEQ ID NO: 5327544 - DNA, 25 bp, Homo sapien
caaatctgctggcgccttgatctta

SEQ ID NO: 5327545 - DNA, 25 bp, Homo sapien
tctgctggcgccttgatcttaaact

SEQ ID NO: 5327546 - DNA, 25 bp, Homo sapien
tgatcttaaacttcccagcttctga

SEQ ID NO: 5327547 - DNA, 25 bp, Homo sapien
attaaatcgaaaccgtccaaagctg

SEQ ID NO: 5327548 - DNA, 25 bp, Homo sapien
gaaaccgtccaaagctgttgcacac

SEQ ID NO: 5327549 - DNA, 25 bp, Homo sapien
cagtgttggaacatattaactgaga

SEQ ID NO: 5327550 - DNA, 25 bp, Homo sapien
actgagattttagtgggatacccca

SEQ ID NO: 5327551 - DNA, 25 bp, Homo sapien
tcatttcaaatggagtttcctttta

SEQ ID NO: 5327552 - DNA, 25 bp, Homo sapien
aatatcacagcagttgtgctagaat

SEQ ID NO: 5327553 - DNA, 25 bp, Homo sapien
ttctcttactaagctctgatttaaa

SEQ ID NO: 5327554 - DNA, 25 bp, Homo sapien
tttgaagttaatcacaagtaactca

SEQ ID NO: 5327555 - DNA, 25 bp, Homo sapien
ttatctacactaagcaggacatgag

SEQ ID NO: 5327556 - DNA, 25 bp, Homo sapien
gattagggactcgtattccatccag

SEQ ID NO: 5327557 - DNA, 25 bp, Homo sapien
ttaaaccctagtgccatgacatgga

SEQ ID NO: 5327558 - DNA, 25 bp, Homo sapien
gctagtggaccatggctaatgaacc

SEQ ID NO: 5327559 - DNA, 25 bp, Homo sapien
tatatatttctgaagttactgtggt

SEQ ID NO: 5327560 - DNA, 25 bp, Homo sapien
taggtgatttccttcatatccacgg

SEQ ID NO: 5327561 - DNA, 25 bp, Homo sapien
tacatgacatattccaagtatatat

SEQ ID NO: 5327562 - DNA, 25 bp, Homo sapien
tcttcttaatattctcccataggtg

SEQ ID NO: 5327563 - DNA, 25 bp, Homo sapien
tactcagggacaggtaggtttagca

SEQ ID NO: 5327564 - DNA, 25 bp, Homo sapien
ggtttagcagtgcaacatccccaga

SEQ ID NO: 5327565 - DNA, 25 bp, Homo sapien
caaaacaattgccactctgagtcag

SEQ ID NO: 5327566 - DNA, 25 bp, Homo sapien
tcacaggagacaccagtgcaaaagg

SEQ ID NO: 5327567 - DNA, 25 bp, Homo sapien
tgttgtagttgttgcagactgggca

SEQ ID NO: 5327568 - DNA, 25 bp, Homo sapien
ttatgatctagtttgttgtggtggt

SEQ ID NO: 5327569 - DNA, 25 bp, Homo sapien
tgatctagtttgttgtggtggtgtt

SEQ ID NO: 5327570 - DNA, 25 bp, Homo sapien
ggtgttgtagttgttgcagactggg

SEQ ID NO: 5327571 - DNA, 25 bp, Homo sapien
aataagataggcaatggtcacagag

SEQ ID NO: 5327572 - DNA, 25 bp, Homo sapien
caatggtcacagaggaatataattt

SEQ ID NO: 5327573 - DNA, 25 bp, Homo sapien
acatcttgtcttcttgttgggaaat

SEQ ID NO: 5327574 - DNA, 25 bp, Homo sapien
tgaactcggaagttgaaatccccaa

SEQ ID NO: 5327575 - DNA, 25 bp, Homo sapien
caagggcctgcataccaaagggcag

SEQ ID NO: 5327576 - DNA, 25 bp, Homo sapien
gggtttgagacgcagttctgcaaaa

SEQ ID NO: 5327577 - DNA, 25 bp, Homo sapien
gcaagggcctgcataccaaagggca

SEQ ID NO: 5327578 - DNA, 25 bp, Homo sapien
ttctgcaaaagctggtgtcctaagc

SEQ ID NO: 5327579 - DNA, 25 bp, Homo sapien
tattgccgaattcttattccctgcc

SEQ ID NO: 5327580 - DNA, 25 bp, Homo sapien
tgccgaattcttattccctgccctg

SEQ ID NO: 5327581 - DNA, 25 bp, Homo sapien
ccgaattcttattccctgccctgca

SEQ ID NO: 5327582 - DNA, 25 bp, Homo sapien
attgccgaattcttattccctgccc

SEQ ID NO: 5327583 - DNA, 25 bp, Homo sapien
ccttaggcaaccaggcttcattagt

SEQ ID NO: 5327584 - DNA, 25 bp, Homo sapien
tacttgttttaattagagggatgaa

SEQ ID NO: 5327585 - DNA, 25 bp, Homo sapien
tcattagttcaggtgctagcctcag

SEQ ID NO: 5327586 - DNA, 25 bp, Homo sapien
ttccctgagtgagatccttaggcaa

SEQ ID NO: 5327587 - DNA, 25 bp, Homo sapien
ttatccaggtgaagagctatcgagc

SEQ ID NO: 5327588 - DNA, 25 bp, Homo sapien
aaattgcacactgtctgtcctccaa

SEQ ID NO: 5327589 - DNA, 25 bp, Homo sapien
aaccaaattgcacactgtctgtcct

SEQ ID NO: 5327590 - DNA, 25 bp, Homo sapien
gctatcgagctctttctccaaccaa

SEQ ID NO: 5327591 - DNA, 25 bp, Homo sapien
ttgcctccagggcgctcctaattct

SEQ ID NO: 5327592 - DNA, 25 bp, Homo sapien
tccagggcgctcctaattcttgttg

SEQ ID NO: 5327593 - DNA, 25 bp, Homo sapien
gcctccagggcgctcctaattcttg

SEQ ID NO: 5327594 - DNA, 25 bp, Homo sapien
gggcgctcctaattcttgttgttat

SEQ ID NO: 5327595 - DNA, 25 bp, Homo sapien
ttctcaacctcacctgaatttcctt

SEQ ID NO: 5327596 - DNA, 25 bp, Homo sapien
tggtcttctcaacctcacctgaatt

SEQ ID NO: 5327597 - DNA, 25 bp, Homo sapien
ctttggtcttctcaacctcacctga

SEQ ID NO: 5327598 - DNA, 25 bp, Homo sapien
gtcttctcaacctcacctgaatttc

SEQ ID NO: 5327599 - DNA, 25 bp, Homo sapien
ttccctcagtcagcttcctcactcc

SEQ ID NO: 5327600 - DNA, 25 bp, Homo sapien
agtcagcttcctcactccagcagag

SEQ ID NO: 5327601 - DNA, 25 bp, Homo sapien
attttggcagccttctggttcttcc

SEQ ID NO: 5327602 - DNA, 25 bp, Homo sapien
tggcagccttctggttcttccctca

SEQ ID NO: 5327603 - DNA, 25 bp, Homo sapien
ataatccatcgcacaggctccagct

SEQ ID NO: 5327604 - DNA, 25 bp, Homo sapien
gctctcaggtgaaggcctcaggtga

SEQ ID NO: 5327605 - DNA, 25 bp, Homo sapien
cctgtccagataatccatcgcacag

SEQ ID NO: 5327606 - DNA, 25 bp, Homo sapien
cagataatccatcgcacaggctcca

SEQ ID NO: 5327607 - DNA, 25 bp, Homo sapien
ttcaaatccttgtcttgccatgtca

SEQ ID NO: 5327608 - DNA, 25 bp, Homo sapien
catgagatgctgcaacaggctgaca

SEQ ID NO: 5327609 - DNA, 25 bp, Homo sapien
ggctgacattttccacatgtaaatc

SEQ ID NO: 5327610 - DNA, 25 bp, Homo sapien
ggtaacacgatccatcatgagatgc

SEQ ID NO: 5327611 - DNA, 25 bp, Homo sapien
catccaggtccttgcttaaggctcc

SEQ ID NO: 5327612 - DNA, 25 bp, Homo sapien
tttgctctctgaacccatccaggtc

SEQ ID NO: 5327613 - DNA, 25 bp, Homo sapien
aatctttatgggtgaccatttttag

SEQ ID NO: 5327614 - DNA, 25 bp, Homo sapien
ttttagcatgccctttaccctttgc

SEQ ID NO: 5327615 - DNA, 25 bp, Homo sapien
ctaagagcagtagggggagaaagtg

SEQ ID NO: 5327616 - DNA, 25 bp, Homo sapien
aagagcagtagggggagaaagtgaa

SEQ ID NO: 5327617 - DNA, 25 bp, Homo sapien
gagcagtagggggagaaagtgaaaa

SEQ ID NO: 5327618 - DNA, 25 bp, Homo sapien
cagtagggggagaaagtgaaaactg

SEQ ID NO: 5327619 - DNA, 25 bp, Homo sapien
cagaaacagcagaaggacaagtggc

SEQ ID NO: 5327620 - DNA, 25 bp, Homo sapien
aaaatggacacttctgctgagacag

SEQ ID NO: 5327621 - DNA, 25 bp, Homo sapien
aggagcagaaaaatggacacttctg

SEQ ID NO: 5327622 - DNA, 25 bp, Homo sapien
cagcagaaggacaagtggcaaaagg

SEQ ID NO: 5327623 - DNA, 25 bp, Homo sapien
ctggaccagaaccaagagctgttgt

SEQ ID NO: 5327624 - DNA, 25 bp, Homo sapien
ctaggaagggcaagctgctgagacc

SEQ ID NO: 5327625 - DNA, 25 bp, Homo sapien
tagtccctggaccagaaccaagagc

SEQ ID NO: 5327626 - DNA, 25 bp, Homo sapien
acctcctctagtccctggaccagaa

SEQ ID NO: 5327627 - DNA, 25 bp, Homo sapien
cctccaccagatgtgttgcttcttt

SEQ ID NO: 5327628 - DNA, 25 bp, Homo sapien
gttgcttcttttctcacacctctga

SEQ ID NO: 5327629 - DNA, 25 bp, Homo sapien
ccataaaaccctccaccagatgtgt

SEQ ID NO: 5327630 - DNA, 25 bp, Homo sapien
tgtaagcccataaaaccctccacca

SEQ ID NO: 5327631 - DNA, 25 bp, Homo sapien
catcagctagagttggaatgtccaa

SEQ ID NO: 5327632 - DNA, 25 bp, Homo sapien
tggcacaaatatctcaccctcagct

SEQ ID NO: 5327633 - DNA, 25 bp, Homo sapien
tacctagctcccttataatgtggca

SEQ ID NO: 5327634 - DNA, 25 bp, Homo sapien
aatttagggagtgttcagcagggcc

SEQ ID NO: 5327635 - DNA, 25 bp, Homo sapien
gaaaaatggaactgctagctgggtg

SEQ ID NO: 5327636 - DNA, 25 bp, Homo sapien
atgacacctgtcagagtatgatgaa

SEQ ID NO: 5327637 - DNA, 25 bp, Homo sapien
tagagctgctgtcggattgaatgac

SEQ ID NO: 5327638 - DNA, 25 bp, Homo sapien
tcaggtgaggcccattaatcttcat

SEQ ID NO: 5327639 - DNA, 25 bp, Homo sapien
gctctatgtcgtcatcctcccaaga

SEQ ID NO: 5327640 - DNA, 25 bp, Homo sapien
tcctgctctatgtcgtcatcctccc

SEQ ID NO: 5327641 - DNA, 25 bp, Homo sapien
atatatgccattgagggcaaggttg

SEQ ID NO: 5327642 - DNA, 25 bp, Homo sapien
ctgctctatgtcgtcatcctcccaa

SEQ ID NO: 5327643 - DNA, 25 bp, Homo sapien
cacagtggttcctaggtgctcccag

SEQ ID NO: 5327644 - DNA, 25 bp, Homo sapien
ttcctaggtgctcccagtttcttct

SEQ ID NO: 5327645 - DNA, 25 bp, Homo sapien
gggcacagtggttcctaggtgctcc

SEQ ID NO: 5327646 - DNA, 25 bp, Homo sapien
atgcagagggcccactgtgggcaca

SEQ ID NO: 5327647 - DNA, 25 bp, Homo sapien
gaaaactggctcgtacatcctcaat

SEQ ID NO: 5327648 - DNA, 25 bp, Homo sapien
ggtaactccaacattgccctctggg

SEQ ID NO: 5327649 - DNA, 25 bp, Homo sapien
gctcgtacatcctcaatgtctgaca

SEQ ID NO: 5327650 - DNA, 25 bp, Homo sapien
tttctggaaaactggctcgtacatc

SEQ ID NO: 5327651 - DNA, 25 bp, Homo sapien
tggcagccagtcttgcacagggaga

SEQ ID NO: 5327652 - DNA, 25 bp, Homo sapien
cagccagtcttgcacagggagagcc

SEQ ID NO: 5327653 - DNA, 25 bp, Homo sapien
agtggcagccagtcttgcacaggga

SEQ ID NO: 5327654 - DNA, 25 bp, Homo sapien
gcagccagtcttgcacagggagagc

SEQ ID NO: 5327655 - DNA, 25 bp, Homo sapien
tagagaggtccgctgacacagtgac

SEQ ID NO: 5327656 - DNA, 25 bp, Homo sapien
gagaggtccgctgacacagtgacag

SEQ ID NO: 5327657 - DNA, 25 bp, Homo sapien
atggcatagagaggtccgctgacac

SEQ ID NO: 5327658 - DNA, 25 bp, Homo sapien
gcatagagaggtccgctgacacagt

SEQ ID NO: 5327659 - DNA, 25 bp, Homo sapien
ctgtatcacctttttgcctcctcat

SEQ ID NO: 5327660 - DNA, 25 bp, Homo sapien
actaatttcctctgtatcacctttt

SEQ ID NO: 5327661 - DNA, 25 bp, Homo sapien
caagacactaatttcctctgtatca

SEQ ID NO: 5327662 - DNA, 25 bp, Homo sapien
atttcctctgtatcacctttttgcc

SEQ ID NO: 5327663 - DNA, 25 bp, Homo sapien
cccgtggcagaaggatgcgttcata

SEQ ID NO: 5327664 - DNA, 25 bp, Homo sapien
aatgctatagttcacagcgaaaccc

SEQ ID NO: 5327665 - DNA, 25 bp, Homo sapien
gcctgccttgccctgaatgctatag

SEQ ID NO: 5327666 - DNA, 25 bp, Homo sapien
tcctgttaacggtagcataatcccg

SEQ ID NO: 5327667 - DNA, 25 bp, Homo sapien
ggtcccaccgtcctcacattcacat

SEQ ID NO: 5327668 - DNA, 25 bp, Homo sapien
gtcccaccgtcctcacattcacatt

SEQ ID NO: 5327669 - DNA, 25 bp, Homo sapien
cattttttatggatgatgcgtcatt

SEQ ID NO: 5327670 - DNA, 25 bp, Homo sapien
tcccaccgtcctcacattcacattt

SEQ ID NO: 5327671 - DNA, 25 bp, Homo sapien
tcccaaggggtgatgtttcctcatc

SEQ ID NO: 5327672 - DNA, 25 bp, Homo sapien
gattacgttatttccaactgggaca

SEQ ID NO: 5327673 - DNA, 25 bp, Homo sapien
aagtggtgagattacgttatttcca

SEQ ID NO: 5327674 - DNA, 25 bp, Homo sapien
aactgggacaagtgccccttccatg

SEQ ID NO: 5327675 - DNA, 25 bp, Homo sapien
ctgtgtccgattcctactctttctg

SEQ ID NO: 5327676 - DNA, 25 bp, Homo sapien
gccatctcacctccaggtgagttct

SEQ ID NO: 5327677 - DNA, 25 bp, Homo sapien
tgtcccaagcatgggagagctcctc

SEQ ID NO: 5327678 - DNA, 25 bp, Homo sapien
ttccctgtgtccgattcctactctt

SEQ ID NO: 5327679 - DNA, 25 bp, Homo sapien
aaattggggatcaacagagtatgta

SEQ ID NO: 5327680 - DNA, 25 bp, Homo sapien
tttgctacaataattagtgtcttct

SEQ ID NO: 5327681 - DNA, 25 bp, Homo sapien
tcagactaaattggggatcaacaga

SEQ ID NO: 5327682 - DNA, 25 bp, Homo sapien
tttgaggggtggtagtgatgtgctt

SEQ ID NO: 5327683 - DNA, 25 bp, Homo sapien
gccagtgatgtgttgtgaagacctc

SEQ ID NO: 5327684 - DNA, 25 bp, Homo sapien
gctagctcttctacggtgctctcgg

SEQ ID NO: 5327685 - DNA, 25 bp, Homo sapien
gccagtagggcttataccccattga

SEQ ID NO: 5327686 - DNA, 25 bp, Homo sapien
tatgcatggccttccagtctgccag

SEQ ID NO: 5327687 - DNA, 25 bp, Homo sapien
gctctgcactccaaatcaagtcagc

SEQ ID NO: 5327688 - DNA, 25 bp, Homo sapien
tttggatatgggagttttttgctct

SEQ ID NO: 5327689 - DNA, 25 bp, Homo sapien
gcactccaaatcaagtcagcctctg

SEQ ID NO: 5327690 - DNA, 25 bp, Homo sapien
cctatttggatatgggagttttttg

SEQ ID NO: 5327691 - DNA, 25 bp, Homo sapien
atgaggccctcaacagatgcaactg

SEQ ID NO: 5327692 - DNA, 25 bp, Homo sapien
tgatccccaatgtggcaatgttagg

SEQ ID NO: 5327693 - DNA, 25 bp, Homo sapien
cactctcaagaatggataagttcct

SEQ ID NO: 5327694 - DNA, 25 bp, Homo sapien
taaatggatagactcaaaagcttgc

SEQ ID NO: 5327695 - DNA, 25 bp, Homo sapien
catgaggcctaaagccacacttgca

SEQ ID NO: 5327696 - DNA, 25 bp, Homo sapien
taaaagtggctacgtgtcacagttc

SEQ ID NO: 5327697 - DNA, 25 bp, Homo sapien
aaacatgaaattgcaggagccttgc

SEQ ID NO: 5327698 - DNA, 25 bp, Homo sapien
agaaaatggcgtttagtggactcac

SEQ ID NO: 5327699 - DNA, 25 bp, Homo sapien
tcggcgaaggaaacatgatgacagc

SEQ ID NO: 5327700 - DNA, 25 bp, Homo sapien
gaaaacgccgcacaaaacagtggcg

SEQ ID NO: 5327701 - DNA, 25 bp, Homo sapien
cctgtgcagtaaaagtaaccccgag

SEQ ID NO: 5327702 - DNA, 25 bp, Homo sapien
taaccccgagggtgagacgtcggca

SEQ ID NO: 5327703 - DNA, 25 bp, Homo sapien
gaatccaggcagcatttcagtgcag

SEQ ID NO: 5327704 - DNA, 25 bp, Homo sapien
ctccaagatttttaggtgccacaaa

SEQ ID NO: 5327705 - DNA, 25 bp, Homo sapien
aataattccgaacatggagccaaac

SEQ ID NO: 5327706 - DNA, 25 bp, Homo sapien
tagctcacaaatagataagccaatg

SEQ ID NO: 5327707 - DNA, 25 bp, Homo sapien
gtgttacttttaggatgcccataac

SEQ ID NO: 5327708 - DNA, 25 bp, Homo sapien
cctaaagccgtgcataagtatgtaa

SEQ ID NO: 5327709 - DNA, 25 bp, Homo sapien
gcaaacgcatttccacctcaattat

SEQ ID NO: 5327710 - DNA, 25 bp, Homo sapien
tacttacctaaagccgtgcataagt

SEQ ID NO: 5327711 - DNA, 25 bp, Homo sapien
taggtctttgaaggtttatgctcac

SEQ ID NO: 5327712 - DNA, 25 bp, Homo sapien
acctgtaggtctttgaaggtttatg

SEQ ID NO: 5327713 - DNA, 25 bp, Homo sapien
cctgtaggtctttgaaggtttatgc

SEQ ID NO: 5327714 - DNA, 25 bp, Homo sapien
tgtaggtctttgaaggtttatgctc

SEQ ID NO: 5327715 - DNA, 25 bp, Homo sapien
tatcatacttaaggagcttatattg

SEQ ID NO: 5327716 - DNA, 25 bp, Homo sapien
ttagttatcatacttaaggagctta

SEQ ID NO: 5327717 - DNA, 25 bp, Homo sapien
agttatcatacttaaggagcttata

SEQ ID NO: 5327718 - DNA, 25 bp, Homo sapien
tcatacttaaggagcttatattgca

SEQ ID NO: 5327719 - DNA, 25 bp, Homo sapien
tccaggagtgtggatcaattcagaa

SEQ ID NO: 5327720 - DNA, 25 bp, Homo sapien
ctccaggagtgtggatcaattcaga

SEQ ID NO: 5327721 - DNA, 25 bp, Homo sapien
aggcaatggtactagtgcttgtgtg

SEQ ID NO: 5327722 - DNA, 25 bp, Homo sapien
gcaatggtactagtgcttgtgtggt

SEQ ID NO: 5327723 - DNA, 25 bp, Homo sapien
tcaggcaatggtactagtgcttgtg

SEQ ID NO: 5327724 - DNA, 25 bp, Homo sapien
caatggtactagtgcttgtgtggta

SEQ ID NO: 5327725 - DNA, 25 bp, Homo sapien
gatgattgggatcccaacacgatgc

SEQ ID NO: 5327726 - DNA, 25 bp, Homo sapien
agaattagatgattgggatcccaac

SEQ ID NO: 5327727 - DNA, 25 bp, Homo sapien
gatcccaacacgatgcatctgtcag

SEQ ID NO: 5327728 - DNA, 25 bp, Homo sapien
tcagcagcattgattcatcatcact

SEQ ID NO: 5327729 - DNA, 25 bp, Homo sapien
ctgtgacttctactggcctttccca

SEQ ID NO: 5327730 - DNA, 25 bp, Homo sapien
ctctgtgacttctactggcctttcc

SEQ ID NO: 5327731 - DNA, 25 bp, Homo sapien
tgtgacttctactggcctttcccat

SEQ ID NO: 5327732 - DNA, 25 bp, Homo sapien
tctgtgacttctactggcctttccc

SEQ ID NO: 5327733 - DNA, 25 bp, Homo sapien
gcacctggctagactatgttttatt

SEQ ID NO: 5327734 - DNA, 25 bp, Homo sapien
actgcacctggctagactatgtttt

SEQ ID NO: 5327735 - DNA, 25 bp, Homo sapien
acctggctagactatgttttattct

SEQ ID NO: 5327736 - DNA, 25 bp, Homo sapien
ctgcacctggctagactatgtttta

SEQ ID NO: 5327737 - DNA, 25 bp, Homo sapien
caggcattgctaatagttcaacagt

SEQ ID NO: 5327738 - DNA, 25 bp, Homo sapien
acaccagactcaggcattgctaata

SEQ ID NO: 5327739 - DNA, 25 bp, Homo sapien
ttggaatattaataggacatgtcat

SEQ ID NO: 5327740 - DNA, 25 bp, Homo sapien
gactcaggcattgctaatagttcaa

SEQ ID NO: 5327741 - DNA, 25 bp, Homo sapien
taacatcaccacgtcaatactgcca

SEQ ID NO: 5327742 - DNA, 25 bp, Homo sapien
taccagttagcctcgataaagacaa

SEQ ID NO: 5327743 - DNA, 25 bp, Homo sapien
gatgacacccagtcttgggacagcc

SEQ ID NO: 5327744 - DNA, 25 bp, Homo sapien
caacttgtatgtgctgatgacaccc

SEQ ID NO: 5327745 - DNA, 25 bp, Homo sapien
aaaccttttcatggttagtgactgg

SEQ ID NO: 5327746 - DNA, 25 bp, Homo sapien
catggttagtgactggaccatgggt

SEQ ID NO: 5327747 - DNA, 25 bp, Homo sapien
tgactggaccatgggttggtttgtt

SEQ ID NO: 5327748 - DNA, 25 bp, Homo sapien
ccttttcatggttagtgactggacc

SEQ ID NO: 5327749 - DNA, 25 bp, Homo sapien
tttggacagtggcagtttctacatc

SEQ ID NO: 5327750 - DNA, 25 bp, Homo sapien
ttttggacagtggcagtttctacat

SEQ ID NO: 5327751 - DNA, 25 bp, Homo sapien
cttttggacagtggcagtttctaca

SEQ ID NO: 5327752 - DNA, 25 bp, Homo sapien
ggacagccttaggtgcacaacactg

SEQ ID NO: 5327753 - DNA, 25 bp, Homo sapien
cctctcacagggtgatatgtagccc

SEQ ID NO: 5327754 - DNA, 25 bp, Homo sapien
taatttccttttgcacaggtgtctg

SEQ ID NO: 5327755 - DNA, 25 bp, Homo sapien
tccgaagggaacatcagtgcagggt

SEQ ID NO: 5327756 - DNA, 25 bp, Homo sapien
caaatccagtcttctggtctcgagg

SEQ ID NO: 5327757 - DNA, 25 bp, Homo sapien
tgcactgagcatccaattgtcctcc

SEQ ID NO: 5327758 - DNA, 25 bp, Homo sapien
ggaaggcagggctcttgttccaact

SEQ ID NO: 5327759 - DNA, 25 bp, Homo sapien
tcctccgattggttgaaaaatgaaa

SEQ ID NO: 5327760 - DNA, 25 bp, Homo sapien
ttttctcaaatctctcttcgggcat

SEQ ID NO: 5327761 - DNA, 25 bp, Homo sapien
gcaaaacaaaggcagagcaagtaat

SEQ ID NO: 5327762 - DNA, 25 bp, Homo sapien
aacaaaggcagagcaagtaattttc

SEQ ID NO: 5327763 - DNA, 25 bp, Homo sapien
caaaacaaaggcagagcaagtaatt

SEQ ID NO: 5327764 - DNA, 25 bp, Homo sapien
aaattctcattgtatacccaagtga

SEQ ID NO: 5327765 - DNA, 25 bp, Homo sapien
gtacttcttaagcaagctacattga

SEQ ID NO: 5327766 - DNA, 25 bp, Homo sapien
tctgcatcatttctcggctgaggtg

SEQ ID NO: 5327767 - DNA, 25 bp, Homo sapien
tgaagacttagcaattatttgcata

SEQ ID NO: 5327768 - DNA, 25 bp, Homo sapien
gcttgcaccttttgtgggcactatg

SEQ ID NO: 5327769 - DNA, 25 bp, Homo sapien
tgggtgcttgcaccttttgtgggca

SEQ ID NO: 5327770 - DNA, 25 bp, Homo sapien
ccagatagtccagccgatgattcct

SEQ ID NO: 5327771 - DNA, 25 bp, Homo sapien
gacatcctgttatcatggaggtggg

SEQ ID NO: 5327772 - DNA, 25 bp, Homo sapien
gagagtgaatgatgccaagacatcc

SEQ ID NO: 5327773 - DNA, 25 bp, Homo sapien
gttggcaggatccacacttagcatt

SEQ ID NO: 5327774 - DNA, 25 bp, Homo sapien
acttagcattacagcctcttctggg

SEQ ID NO: 5327775 - DNA, 25 bp, Homo sapien
gtttcaagctgccaaatgaacatcc

SEQ ID NO: 5327776 - DNA, 25 bp, Homo sapien
tcttgagcctcagaagcactcgtga

SEQ ID NO: 5327777 - DNA, 25 bp, Homo sapien
agagtccccgacctactccatggag

SEQ ID NO: 5327778 - DNA, 25 bp, Homo sapien
gccggtctgctatcaggtcgtcatg

SEQ ID NO: 5327779 - DNA, 25 bp, Homo sapien
tcccctgacaatgatctagcctaag

SEQ ID NO: 5327780 - DNA, 25 bp, Homo sapien
ttccaataatgatcagggccaatat

SEQ ID NO: 5327781 - DNA, 25 bp, Homo sapien
tcagggccaatatgagtcaccaaaa

SEQ ID NO: 5327782 - DNA, 25 bp, Homo sapien
caaaagctgattcagtacactgagg

SEQ ID NO: 5327783 - DNA, 25 bp, Homo sapien
aatgatcagggccaatatgagtcac

SEQ ID NO: 5327784 - DNA, 25 bp, Homo sapien
tcatacagtctatctcagaaaatgt

SEQ ID NO: 5327785 - DNA, 25 bp, Homo sapien
tgtcaattcgtgattgtttggcctt

SEQ ID NO: 5327786 - DNA, 25 bp, Homo sapien
gatccaaagatcgttcaggagcagg

SEQ ID NO: 5327787 - DNA, 25 bp, Homo sapien
ttagcactataaactccccacatag

SEQ ID NO: 5327788 - DNA, 25 bp, Homo sapien
gttattactatgttttgacgccagt

SEQ ID NO: 5327789 - DNA, 25 bp, Homo sapien
cgccagtggacatattgaacttctt

SEQ ID NO: 5327790 - DNA, 25 bp, Homo sapien
tgtcagcaggatcaaaggtgtgtgt

SEQ ID NO: 5327791 - DNA, 25 bp, Homo sapien
ctttccttagtgccattgatgtcag

SEQ ID NO: 5327792 - DNA, 25 bp, Homo sapien
gcatcacaggaggtgagacagatga

SEQ ID NO: 5327793 - DNA, 25 bp, Homo sapien
acaggaggtgagacagatgaaacag

SEQ ID NO: 5327794 - DNA, 25 bp, Homo sapien
acaggcatcacaggaggtgagacag

SEQ ID NO: 5327795 - DNA, 25 bp, Homo sapien
ctgcacaggcatcacaggaggtgag

SEQ ID NO: 5327796 - DNA, 25 bp, Homo sapien
cctgaccgcagcatagctgttgctg

SEQ ID NO: 5327797 - DNA, 25 bp, Homo sapien
agctgttgctgattccttactgccc

SEQ ID NO: 5327798 - DNA, 25 bp, Homo sapien
agcatagctgttgctgattccttac

SEQ ID NO: 5327799 - DNA, 25 bp, Homo sapien
gttgctgattccttactgcccaggc

SEQ ID NO: 5327800 - DNA, 25 bp, Homo sapien
aaatgcatggatacagcacagaaac

SEQ ID NO: 5327801 - DNA, 25 bp, Homo sapien
caaatgcatggatacagcacagaaa

SEQ ID NO: 5327802 - DNA, 25 bp, Homo sapien
gtttttaatattggatctttctctg

SEQ ID NO: 5327803 - DNA, 25 bp, Homo sapien
gcaaatgcatggatacagcacagaa

SEQ ID NO: 5327804 - DNA, 25 bp, Homo sapien
aagtaactgatgagaccatcaacta

SEQ ID NO: 5327805 - DNA, 25 bp, Homo sapien
cagattcatcaggaattgagtaaga

SEQ ID NO: 5327806 - DNA, 25 bp, Homo sapien
gaccatcaactatactttctacagc

SEQ ID NO: 5327807 - DNA, 25 bp, Homo sapien
ttcagattcatcaggaattgagtaa

SEQ ID NO: 5327808 - DNA, 25 bp, Homo sapien
cagttgcaaggacatctggaagaca

SEQ ID NO: 5327809 - DNA, 25 bp, Homo sapien
tttgggcagaactgtatcatatggc

SEQ ID NO: 5327810 - DNA, 25 bp, Homo sapien
tgggcagaactgtatcatatggcac

SEQ ID NO: 5327811 - DNA, 25 bp, Homo sapien
ctccagttgcaaggacatctggaag

SEQ ID NO: 5327812 - DNA, 25 bp, Homo sapien
tgagcgatgaactggccaaattaca

SEQ ID NO: 5327813 - DNA, 25 bp, Homo sapien
gatgaactggccaaattacagttct

SEQ ID NO: 5327814 - DNA, 25 bp, Homo sapien
gggaatgagcgatgaactggccaaa

SEQ ID NO: 5327815 - DNA, 25 bp, Homo sapien
cccctttgggaatgagcgatgaact

SEQ ID NO: 5327816 - DNA, 25 bp, Homo sapien
ctttagtctgaaaggtacaaatcag

SEQ ID NO: 5327817 - DNA, 25 bp, Homo sapien
cattctggaaagtacctttagtctg

SEQ ID NO: 5327818 - DNA, 25 bp, Homo sapien
cagccagaaggacccgtccattctg

SEQ ID NO: 5327819 - DNA, 25 bp, Homo sapien
acaaatcagaactttcaccacattc

SEQ ID NO: 5327820 - DNA, 25 bp, Homo sapien
gcagcagtgtgttacactcttgtca

SEQ ID NO: 5327821 - DNA, 25 bp, Homo sapien
tttccctagtgcatttccaggtctc

SEQ ID NO: 5327822 - DNA, 25 bp, Homo sapien
catggaggtatggatggagaatccc

SEQ ID NO: 5327823 - DNA, 25 bp, Homo sapien
ttcaatgtggttcatcccatggagg

SEQ ID NO: 5327824 - DNA, 25 bp, Homo sapien
ttactcaactccttttgggcaatta

SEQ ID NO: 5327825 - DNA, 25 bp, Homo sapien
tcaactccttttgggcaattaagag

SEQ ID NO: 5327826 - DNA, 25 bp, Homo sapien
ccactggacttggcatcatcaccaa

SEQ ID NO: 5327827 - DNA, 25 bp, Homo sapien
ccttttgggcaattaagagttccat

SEQ ID NO: 5327828 - DNA, 25 bp, Homo sapien
tcaaagtcccttgccgaagagaggt

SEQ ID NO: 5327829 - DNA, 25 bp, Homo sapien
tggatataaatgagccctaactgtg

SEQ ID NO: 5327830 - DNA, 25 bp, Homo sapien
tcccttgccgaagagaggttgaaag

SEQ ID NO: 5327831 - DNA, 25 bp, Homo sapien
aacacagatgtcaggcctttcatcc

SEQ ID NO: 5327832 - DNA, 25 bp, Homo sapien
gattcagtttgcctgcaaagaagac

SEQ ID NO: 5327833 - DNA, 25 bp, Homo sapien
cagtttgcctgcaaagaagaccttc

SEQ ID NO: 5327834 - DNA, 25 bp, Homo sapien
ggattcagtttgcctgcaaagaaga

SEQ ID NO: 5327835 - DNA, 25 bp, Homo sapien
ttcagtttgcctgcaaagaagacct

SEQ ID NO: 5327836 - DNA, 25 bp, Homo sapien
agagggcagttcagccagatctgct

SEQ ID NO: 5327837 - DNA, 25 bp, Homo sapien
tgatcctcctgagaacacgcccacc

SEQ ID NO: 5327838 - DNA, 25 bp, Homo sapien
tgaagagggcagttcagccagatct

SEQ ID NO: 5327839 - DNA, 25 bp, Homo sapien
ccacagctgactgcggcccttcctg

SEQ ID NO: 5327840 - DNA, 25 bp, Homo sapien
aatgagctttaatatctctgacagc

SEQ ID NO: 5327841 - DNA, 25 bp, Homo sapien
tgactgagtaataattcgtgagtgt

SEQ ID NO: 5327842 - DNA, 25 bp, Homo sapien
gaagcttggtctacaaattgtcacc

SEQ ID NO: 5327843 - DNA, 25 bp, Homo sapien
taattcgtgagtgtttcttacaaga

SEQ ID NO: 5327844 - DNA, 25 bp, Homo sapien
gaggagctcccctcattcttggttt

SEQ ID NO: 5327845 - DNA, 25 bp, Homo sapien
tggctcttctgtcaatcccttatac

SEQ ID NO: 5327846 - DNA, 25 bp, Homo sapien
catcctccagtctcttgtgcccatt

SEQ ID NO: 5327847 - DNA, 25 bp, Homo sapien
tctgtcaatcccttatactcagcct

SEQ ID NO: 5327848 - DNA, 25 bp, Homo sapien
ggtgggtagtaccaatgtgtggctg

SEQ ID NO: 5327849 - DNA, 25 bp, Homo sapien
tgggtagtaccaatgtgtggctgag

SEQ ID NO: 5327850 - DNA, 25 bp, Homo sapien
cctgaaggtgggtagtaccaatgtg

SEQ ID NO: 5327851 - DNA, 25 bp, Homo sapien
acagaacagctctcaataggagagg

SEQ ID NO: 5327852 - DNA, 25 bp, Homo sapien
cagcaataccgaatacaaagaaaat

SEQ ID NO: 5327853 - DNA, 25 bp, Homo sapien
tattcttgtcatcagtgataggtgc

SEQ ID NO: 5327854 - DNA, 25 bp, Homo sapien
tgccatcagtaatgggtgttcgacc

SEQ ID NO: 5327855 - DNA, 25 bp, Homo sapien
aatgggtgttcgacctcttcacagc

SEQ ID NO: 5327856 - DNA, 25 bp, Homo sapien
catcgagtccttggcactgaactag

SEQ ID NO: 5327857 - DNA, 25 bp, Homo sapien
gggaggctgccacccctgtagaata

SEQ ID NO: 5327858 - DNA, 25 bp, Homo sapien
cacccctgtagaatacccatcgagt

SEQ ID NO: 5327859 - DNA, 25 bp, Homo sapien
gaatacccatcgagtccttggcact

SEQ ID NO: 5327860 - DNA, 25 bp, Homo sapien
tcgggctgaagcttgaggtcatcct

SEQ ID NO: 5327861 - DNA, 25 bp, Homo sapien
cagaactgaccctcgggctgaagct

SEQ ID NO: 5327862 - DNA, 25 bp, Homo sapien
caaaggcacattgggtgaggatctc

SEQ ID NO: 5327863 - DNA, 25 bp, Homo sapien
cagaaagcctttagagtcacagaac

SEQ ID NO: 5327864 - DNA, 25 bp, Homo sapien
gaagagtttggcttgagggcctcat

SEQ ID NO: 5327865 - DNA, 25 bp, Homo sapien
cttgtttcacaagccaacgtgccct

SEQ ID NO: 5327866 - DNA, 25 bp, Homo sapien
gctcagctcagcaagacgatgtttt

SEQ ID NO: 5327867 - DNA, 25 bp, Homo sapien
gctattagaatgtcctgccttacag

SEQ ID NO: 5327868 - DNA, 25 bp, Homo sapien
gaattgtctgaatgagtccatttca

SEQ ID NO: 5327869 - DNA, 25 bp, Homo sapien
ggaactgtctctaatactggctgga

SEQ ID NO: 5327870 - DNA, 25 bp, Homo sapien
gaaggaactgtctctaatactggct

SEQ ID NO: 5327871 - DNA, 25 bp, Homo sapien
tctcatagtctgagtggccagccac

SEQ ID NO: 5327872 - DNA, 25 bp, Homo sapien
gggacagaagtgaaacacaagttca

SEQ ID NO: 5327873 - DNA, 25 bp, Homo sapien
ggacagaagtgaaacacaagttcaa

SEQ ID NO: 5327874 - DNA, 25 bp, Homo sapien
cagaagtgaaacacaagttcaaaat

SEQ ID NO: 5327875 - DNA, 25 bp, Homo sapien
gacagaagtgaaacacaagttcaaa

SEQ ID NO: 5327876 - DNA, 25 bp, Homo sapien
tacaagcctgattggtgctgtccac

SEQ ID NO: 5327877 - DNA, 25 bp, Homo sapien
ccacatccaacgagggccttgggaa

SEQ ID NO: 5327878 - DNA, 25 bp, Homo sapien
ccattgggataaggcagggccgaca

SEQ ID NO: 5327879 - DNA, 25 bp, Homo sapien
gctgaaacaaatcagggcccctgtt

SEQ ID NO: 5327880 - DNA, 25 bp, Homo sapien
cacttccctgtatgccattgcttac

SEQ ID NO: 5327881 - DNA, 25 bp, Homo sapien
ccaggtctgttcaactctcactgtg

SEQ ID NO: 5327882 - DNA, 25 bp, Homo sapien
cttcccatataggaatctgcccagg

SEQ ID NO: 5327883 - DNA, 25 bp, Homo sapien
cattgcttactggtgtccctctcct

SEQ ID NO: 5327884 - DNA, 25 bp, Homo sapien
gcatgctccaaacgcacatctgctt

SEQ ID NO: 5327885 - DNA, 25 bp, Homo sapien
tcacattcggctccttcggatggtt

SEQ ID NO: 5327886 - DNA, 25 bp, Homo sapien
aaaccagcatgctccaaacgcacat

SEQ ID NO: 5327887 - DNA, 25 bp, Homo sapien
cattcggctccttcggatggttggt

SEQ ID NO: 5327888 - DNA, 25 bp, Homo sapien
gaacgtcacattaggtctcatttcc

SEQ ID NO: 5327889 - DNA, 25 bp, Homo sapien
aggtctcatttccatgtcttctctc

SEQ ID NO: 5327890 - DNA, 25 bp, Homo sapien
cagaacgtcacattaggtctcattt

SEQ ID NO: 5327891 - DNA, 25 bp, Homo sapien
gtctcatttccatgtcttctctcat

SEQ ID NO: 5327892 - DNA, 25 bp, Homo sapien
ggctccctcgtgctgaaagaggcca

SEQ ID NO: 5327893 - DNA, 25 bp, Homo sapien
gcaaaggctccctcgtgctgaaaga

SEQ ID NO: 5327894 - DNA, 25 bp, Homo sapien
caaaggctccctcgtgctgaaagag

SEQ ID NO: 5327895 - DNA, 25 bp, Homo sapien
aaggctccctcgtgctgaaagaggc

SEQ ID NO: 5327896 - DNA, 25 bp, Homo sapien
gatccacacttatcatagaacaaag

SEQ ID NO: 5327897 - DNA, 25 bp, Homo sapien
gaacaaaggaaatatgcccctgtgg

SEQ ID NO: 5327898 - DNA, 25 bp, Homo sapien
tggtactccttgacacctactgctg

SEQ ID NO: 5327899 - DNA, 25 bp, Homo sapien
tgagcgcacagtagattggtactcc

SEQ ID NO: 5327900 - DNA, 25 bp, Homo sapien
tgtaaggactatcctcttaaggtca

SEQ ID NO: 5327901 - DNA, 25 bp, Homo sapien
gaagtcagttctgcacgattctgaa

SEQ ID NO: 5327902 - DNA, 25 bp, Homo sapien
cacgattctgaacaagggcctgtct

SEQ ID NO: 5327903 - DNA, 25 bp, Homo sapien
tcttaaggtcaatagaagtcagttc

SEQ ID NO: 5327904 - DNA, 25 bp, Homo sapien
tagaagtctgcaggctctataaaaa

SEQ ID NO: 5327905 - DNA, 25 bp, Homo sapien
ctgagcagggaaatttgttggtggc

SEQ ID NO: 5327906 - DNA, 25 bp, Homo sapien
ggtcttagaagtctgcaggctctat

SEQ ID NO: 5327907 - DNA, 25 bp, Homo sapien
agtctgcaggctctataaaaaggaa

SEQ ID NO: 5327908 - DNA, 25 bp, Homo sapien
gccttccctgctccatcatttttat

SEQ ID NO: 5327909 - DNA, 25 bp, Homo sapien
tccctgctccatcatttttatccat

SEQ ID NO: 5327910 - DNA, 25 bp, Homo sapien
ttcctgagccttccctgctccatca

SEQ ID NO: 5327911 - DNA, 25 bp, Homo sapien
gagccttccctgctccatcattttt

SEQ ID NO: 5327912 - DNA, 25 bp, Homo sapien
gaaaccctgggagtaggcctagcaa

SEQ ID NO: 5327913 - DNA, 25 bp, Homo sapien
tctttgccaatagtaaggtcgggtc

SEQ ID NO: 5327914 - DNA, 25 bp, Homo sapien
gagccctttgatcaatctgtaacag

SEQ ID NO: 5327915 - DNA, 25 bp, Homo sapien
tcaaaactggtccatgcaagcagca

SEQ ID NO: 5327916 - DNA, 25 bp, Homo sapien
cataactacttattggtcggaaagg

SEQ ID NO: 5327917 - DNA, 25 bp, Homo sapien
catatggataagctagatactatac

SEQ ID NO: 5327918 - DNA, 25 bp, Homo sapien
gacatattagtcaccattctgaatg

SEQ ID NO: 5327919 - DNA, 25 bp, Homo sapien
taggaaatctaaagacaggaagttg

SEQ ID NO: 5327920 - DNA, 25 bp, Homo sapien
agctttggtgcatccctgatcttgc

SEQ ID NO: 5327921 - DNA, 25 bp, Homo sapien
aaggttcaaagcctgccatgtgttg

SEQ ID NO: 5327922 - DNA, 25 bp, Homo sapien
gttgtagtctaagctcttctctccc

SEQ ID NO: 5327923 - DNA, 25 bp, Homo sapien
ttagctttggtgcatccctgatctt

SEQ ID NO: 5327924 - DNA, 25 bp, Homo sapien
tttggcttcgggcgccgtgcacaag

SEQ ID NO: 5327925 - DNA, 25 bp, Homo sapien
tggtagaatgatcagaccactacag

SEQ ID NO: 5327926 - DNA, 25 bp, Homo sapien
cacagtcatggccttggtagaatga

SEQ ID NO: 5327927 - DNA, 25 bp, Homo sapien
cgtgcacaagccggctccggtgagc

SEQ ID NO: 5327928 - DNA, 25 bp, Homo sapien
ttaatttggtcaccagattcaaata

SEQ ID NO: 5327929 - DNA, 25 bp, Homo sapien
atgcagaagtaaggcctcccaaact

SEQ ID NO: 5327930 - DNA, 25 bp, Homo sapien
tttggtcaccagattcaaatatgca

SEQ ID NO: 5327931 - DNA, 25 bp, Homo sapien
cagaagtaaggcctcccaaactcaa

SEQ ID NO: 5327932 - DNA, 25 bp, Homo sapien
tcagcttgtgggcttaaagcaagat

SEQ ID NO: 5327933 - DNA, 25 bp, Homo sapien
tcggtaatagcgtgcaccagaccct

SEQ ID NO: 5327934 - DNA, 25 bp, Homo sapien
tctgtctgcccaagagagtcctcaa

SEQ ID NO: 5327935 - DNA, 25 bp, Homo sapien
aaagcaagatggcaccctcggtaat

SEQ ID NO: 5327936 - DNA, 25 bp, Homo sapien
ctttctctcatacacttcccctgca

SEQ ID NO: 5327937 - DNA, 25 bp, Homo sapien
tcttccttttaaagctcatcgcact

SEQ ID NO: 5327938 - DNA, 25 bp, Homo sapien
ctctcatacacttcccctgcatcct

SEQ ID NO: 5327939 - DNA, 25 bp, Homo sapien
cctgcatcctgatcttcttcctttt

SEQ ID NO: 5327940 - DNA, 25 bp, Homo sapien
ctgaacacccagaaccagctctaga

SEQ ID NO: 5327941 - DNA, 25 bp, Homo sapien
tctagagcaaaagctcctgcagcaa

SEQ ID NO: 5327942 - DNA, 25 bp, Homo sapien
gcaaacttgctacagttcctactat

SEQ ID NO: 5327943 - DNA, 25 bp, Homo sapien
gaaccagctctagagcaaaagctcc

SEQ ID NO: 5327944 - DNA, 25 bp, Homo sapien
tggtgtcctcgcatttcagcagccg

SEQ ID NO: 5327945 - DNA, 25 bp, Homo sapien
gaaagcactgctggtttgaagccaa

SEQ ID NO: 5327946 - DNA, 25 bp, Homo sapien
gtgaaagaactccaaactgccggcc

SEQ ID NO: 5327947 - DNA, 25 bp, Homo sapien
tcagcagccgtaacgtgtggagatt

SEQ ID NO: 5327948 - DNA, 25 bp, Homo sapien
tgtgaatcagcatagaccaacagac

SEQ ID NO: 5327949 - DNA, 25 bp, Homo sapien
aagcaattcctctgctcattagcag

SEQ ID NO: 5327950 - DNA, 25 bp, Homo sapien
caacagacagcgtttccaggagcta

SEQ ID NO: 5327951 - DNA, 25 bp, Homo sapien
taatcccagcattgtattcgcaagc

SEQ ID NO: 5327952 - DNA, 25 bp, Homo sapien
gggagagggtgatcaaaatttgacc

SEQ ID NO: 5327953 - DNA, 25 bp, Homo sapien
gaaagtgagcctaacctcagtctac

SEQ ID NO: 5327954 - DNA, 25 bp, Homo sapien
ttgtatacaataggagaaactctca

SEQ ID NO: 5327955 - DNA, 25 bp, Homo sapien
gactcagcatatggtgagatcagca

SEQ ID NO: 5327956 - DNA, 25 bp, Homo sapien
ccattataattaaagtgattgatgc

SEQ ID NO: 5327957 - DNA, 25 bp, Homo sapien
gttccattataattaaagtgattga

SEQ ID NO: 5327958 - DNA, 25 bp, Homo sapien
attataattaaagtgattgatgcac

SEQ ID NO: 5327959 - DNA, 25 bp, Homo sapien
tccattataattaaagtgattgatg

SEQ ID NO: 5327960 - DNA, 25 bp, Homo sapien
tcaaaaggcacgtaatttgaggtta

SEQ ID NO: 5327961 - DNA, 25 bp, Homo sapien
gaacttgagtcaaaaggcacgtaat

SEQ ID NO: 5327962 - DNA, 25 bp, Homo sapien
cttgagtcaaaaggcacgtaatttg

SEQ ID NO: 5327963 - DNA, 25 bp, Homo sapien
agcaaacagttaatatggaacttga

SEQ ID NO: 5327964 - DNA, 25 bp, Homo sapien
ctctttccaaccatagaaggacttt

SEQ ID NO: 5327965 - DNA, 25 bp, Homo sapien
ggctgggttacatctaggttatctc

SEQ ID NO: 5327966 - DNA, 25 bp, Homo sapien
tccactgtcaattaggtatggcaca

SEQ ID NO: 5327967 - DNA, 25 bp, Homo sapien
tccatacccaggttagggtcaagaa

SEQ ID NO: 5327968 - DNA, 25 bp, Homo sapien
tagcgcctccacaggtggatgacca

SEQ ID NO: 5327969 - DNA, 25 bp, Homo sapien
ggcaccactccattgctcattagcg

SEQ ID NO: 5327970 - DNA, 25 bp, Homo sapien
gctcattagcgcctccacaggtgga

SEQ ID NO: 5327971 - DNA, 25 bp, Homo sapien
ctggcaccactccattgctcattag

SEQ ID NO: 5327972 - DNA, 25 bp, Homo sapien
ccctgtcttgctgttcctctcttaa

SEQ ID NO: 5327973 - DNA, 25 bp, Homo sapien
tgctgttcctctcttaactctgctt

SEQ ID NO: 5327974 - DNA, 25 bp, Homo sapien
gtgaagaggacacccctgtcttgct

SEQ ID NO: 5327975 - DNA, 25 bp, Homo sapien
tggttttgtgaagaggacacccctg

SEQ ID NO: 5327976 - DNA, 25 bp, Homo sapien
ctctgggcaccaggttaccatttgg

SEQ ID NO: 5327977 - DNA, 25 bp, Homo sapien
tcttggtcatgggagtcacataatc

SEQ ID NO: 5327978 - DNA, 25 bp, Homo sapien
caggttaccatttggccctcacatt

SEQ ID NO: 5327979 - DNA, 25 bp, Homo sapien
ggagtcacataatcctctgaatggg

SEQ ID NO: 5327980 - DNA, 25 bp, Homo sapien
actgggagtttaaatgcagagattt

SEQ ID NO: 5327981 - DNA, 25 bp, Homo sapien
gagtttaaatgcagagatttctgcc

SEQ ID NO: 5327982 - DNA, 25 bp, Homo sapien
gggagtttaaatgcagagatttctg

SEQ ID NO: 5327983 - DNA, 25 bp, Homo sapien
ctgggagtttaaatgcagagatttc

SEQ ID NO: 5327984 - DNA, 25 bp, Homo sapien
gggcatggctcttggtgtggtcatc

SEQ ID NO: 5327985 - DNA, 25 bp, Homo sapien
gggacatcagagggcacgaaccctg

SEQ ID NO: 5327986 - DNA, 25 bp, Homo sapien
agagggcacgaaccctgcttgcctc

SEQ ID NO: 5327987 - DNA, 25 bp, Homo sapien
catccaccatgcattgggcatggct

SEQ ID NO: 5327988 - DNA, 25 bp, Homo sapien
ctgatccccctttaccactgagact

SEQ ID NO: 5327989 - DNA, 25 bp, Homo sapien
ccccgctggactcaactctgatccc

SEQ ID NO: 5327990 - DNA, 25 bp, Homo sapien
actgagactgcagcggctgctctcc

SEQ ID NO: 5327991 - DNA, 25 bp, Homo sapien
ctccaggtgtagacacgtaccctcc

SEQ ID NO: 5327992 - DNA, 25 bp, Homo sapien
gttgtgtgtaacaaattttactgaa

SEQ ID NO: 5327993 - DNA, 25 bp, Homo sapien
tgtaacaaattttactgaaggttca

SEQ ID NO: 5327994 - DNA, 25 bp, Homo sapien
catgagcaggcagatgttgtgtgta

SEQ ID NO: 5327995 - DNA, 25 bp, Homo sapien
ttactgaaggttcaggaatgagtag

SEQ ID NO: 5327996 - DNA, 25 bp, Homo sapien
gcacagtaatttgccaggctttcat

SEQ ID NO: 5327997 - DNA, 25 bp, Homo sapien
cttttgcacagtaatttgccaggct

SEQ ID NO: 5327998 - DNA, 25 bp, Homo sapien
cagtaatttgccaggctttcatctg

SEQ ID NO: 5327999 - DNA, 25 bp, Homo sapien
cagcagccagcatttgatagaaata

SEQ ID NO: 5328000 - DNA, 25 bp, Homo sapien
tcattgtggcatttactgtatcctg

SEQ ID NO: 5328001 - DNA, 25 bp, Homo sapien
gctgaagcattagcatcggctgatt

SEQ ID NO: 5328002 - DNA, 25 bp, Homo sapien
gcagagtaaatgtcaatgcattcag

SEQ ID NO: 5328003 - DNA, 25 bp, Homo sapien
tcttaaacagcttcatcattgtggc

SEQ ID NO: 5328004 - DNA, 25 bp, Homo sapien
gctggggagtctattacatccccaa

SEQ ID NO: 5328005 - DNA, 25 bp, Homo sapien
gggagtctattacatccccaaactc

SEQ ID NO: 5328006 - DNA, 25 bp, Homo sapien
gagtctattacatccccaaactcag

SEQ ID NO: 5328007 - DNA, 25 bp, Homo sapien
cctgctggggagtctattacatccc

SEQ ID NO: 5328008 - DNA, 25 bp, Homo sapien
gagcacttcttaatttgtgaataag

SEQ ID NO: 5328009 - DNA, 25 bp, Homo sapien
tgagcacttcttaatttgtgaataa

SEQ ID NO: 5328010 - DNA, 25 bp, Homo sapien
ttgtgaataagttctgtgtcaatca

SEQ ID NO: 5328011 - DNA, 25 bp, Homo sapien
tcttaatttgtgaataagttctgtg

SEQ ID NO: 5328012 - DNA, 25 bp, Homo sapien
gaagcagccccttacacatggtcct

SEQ ID NO: 5328013 - DNA, 25 bp, Homo sapien
caatgaccatacagtgaagcagccc

SEQ ID NO: 5328014 - DNA, 25 bp, Homo sapien
tctagggtgttgagaagaccctgct

SEQ ID NO: 5328015 - DNA, 25 bp, Homo sapien
tcagcctgatcttgcgcacggctcg

SEQ ID NO: 5328016 - DNA, 25 bp, Homo sapien
ggctggcatccagccgcaactccct

SEQ ID NO: 5328017 - DNA, 25 bp, Homo sapien
tggcatccagccgcaactcccttac

SEQ ID NO: 5328018 - DNA, 25 bp, Homo sapien
ctggcatccagccgcaactccctta

SEQ ID NO: 5328019 - DNA, 25 bp, Homo sapien
gctggcatccagccgcaactccctt

SEQ ID NO: 5328020 - DNA, 25 bp, Homo sapien
tgcattcgaacaggggcagcatggt

SEQ ID NO: 5328021 - DNA, 25 bp, Homo sapien
cagaaagcgcaggacctggaagcgt

SEQ ID NO: 5328022 - DNA, 25 bp, Homo sapien
aaggcagggacgcagtccagcatga

SEQ ID NO: 5328023 - DNA, 25 bp, Homo sapien
acctggaagcgtgacaggccctgct

SEQ ID NO: 5328024 - DNA, 25 bp, Homo sapien
agggctcttatcaggacaggagaca

SEQ ID NO: 5328025 - DNA, 25 bp, Homo sapien
ctggccagggctcttatcaggacag

SEQ ID NO: 5328026 - DNA, 25 bp, Homo sapien
ccagggctcttatcaggacaggaga

SEQ ID NO: 5328027 - DNA, 25 bp, Homo sapien
ggccagggctcttatcaggacagga

SEQ ID NO: 5328028 - DNA, 25 bp, Homo sapien
ctgactccttcaaggattgggccat

SEQ ID NO: 5328029 - DNA, 25 bp, Homo sapien
cttcgctgcgttcaaaactcagctc

SEQ ID NO: 5328030 - DNA, 25 bp, Homo sapien
aaactcagctctctggacaaaagca

SEQ ID NO: 5328031 - DNA, 25 bp, Homo sapien
atggtacaccttaaaggcaacacta

SEQ ID NO: 5328032 - DNA, 25 bp, Homo sapien
gaatatagggaaagatagatgttta

SEQ ID NO: 5328033 - DNA, 25 bp, Homo sapien
ttatgttcacgtcacattgatataa

SEQ ID NO: 5328034 - DNA, 25 bp, Homo sapien
gagttttagatcagaatatagggaa

SEQ ID NO: 5328035 - DNA, 25 bp, Homo sapien
ttgtaaattatgttcacgtcacatt

SEQ ID NO: 5328036 - DNA, 25 bp, Homo sapien
gcaggttttctaactatgctatgaa

SEQ ID NO: 5328037 - DNA, 25 bp, Homo sapien
caaatttagctattacatgaggctg

SEQ ID NO: 5328038 - DNA, 25 bp, Homo sapien
caatacgctgtccatttttgaagtc

SEQ ID NO: 5328039 - DNA, 25 bp, Homo sapien
tctccagtgacctacttaagaaaaa

SEQ ID NO: 5328040 - DNA, 25 bp, Homo sapien
tttagtacaagattaatagactata

SEQ ID NO: 5328041 - DNA, 25 bp, Homo sapien
gtacaagattaatagactataattc

SEQ ID NO: 5328042 - DNA, 25 bp, Homo sapien
tcccaccttacaactatgaacaaga

SEQ ID NO: 5328043 - DNA, 25 bp, Homo sapien
aggatttcccaccttacaactatga

SEQ ID NO: 5328044 - DNA, 25 bp, Homo sapien
tagagcagactatcatgtggaacaa

SEQ ID NO: 5328045 - DNA, 25 bp, Homo sapien
cgtctttggaacgttgcacctagca

SEQ ID NO: 5328046 - DNA, 25 bp, Homo sapien
tataaagataggataaaggccgtag

SEQ ID NO: 5328047 - DNA, 25 bp, Homo sapien
tattttaacaagaactgcaccatag

SEQ ID NO: 5328048 - DNA, 25 bp, Homo sapien
gaaagtgcacctctacgttctgtta

SEQ ID NO: 5328049 - DNA, 25 bp, Homo sapien
aagtcactgatagacgcagaaggtc

SEQ ID NO: 5328050 - DNA, 25 bp, Homo sapien
tgccacttaagcagatgagaagtcc

SEQ ID NO: 5328051 - DNA, 25 bp, Homo sapien
tacttagcacgtaataaggagctga

SEQ ID NO: 5328052 - DNA, 25 bp, Homo sapien
tttgttcctgatgcatggtgtccac

SEQ ID NO: 5328053 - DNA, 25 bp, Homo sapien
tgaactctttctatgacacatgaag

SEQ ID NO: 5328054 - DNA, 25 bp, Homo sapien
ggacttctcatctgcttaagtggca

SEQ ID NO: 5328055 - DNA, 25 bp, Homo sapien
aagaccttctgcgtctatcagtgac

SEQ ID NO: 5328056 - DNA, 25 bp, Homo sapien
taacagaacgtagaggtgcactttc

SEQ ID NO: 5328057 - DNA, 25 bp, Homo sapien
caaagacaggtacactacacttgat

SEQ ID NO: 5328058 - DNA, 25 bp, Homo sapien
gtggacaccatgcatcaggaacaaa

SEQ ID NO: 5328059 - DNA, 25 bp, Homo sapien
tcatgtgtcatagaaagagttcaac

SEQ ID NO: 5328060 - DNA, 25 bp, Homo sapien
tatgaagtatgctatctgtaggctg

SEQ ID NO: 5328061 - DNA, 25 bp, Homo sapien
ctttcctctccaaagatcattatct

SEQ ID NO: 5328062 - DNA, 25 bp, Homo sapien
gatgaattttggcatgatgactgta

SEQ ID NO: 5328063 - DNA, 25 bp, Homo sapien
catctgttttcactatatgatatta

SEQ ID NO: 5328064 - DNA, 25 bp, Homo sapien
tacattctcattaactttagatggg

SEQ ID NO: 5328065 - DNA, 25 bp, Homo sapien
tgaataatgaccttatgaagtatgc

SEQ ID NO: 5328066 - DNA, 25 bp, Homo sapien
tcccatctaaagttaatgagaatgt

SEQ ID NO: 5328067 - DNA, 25 bp, Homo sapien
agataatgatctttggagaggaaag

SEQ ID NO: 5328068 - DNA, 25 bp, Homo sapien
gcatacttcataaggtcattattca

SEQ ID NO: 5328069 - DNA, 25 bp, Homo sapien
tcagcctacagatagcatacttcat

SEQ ID NO: 5328070 - DNA, 25 bp, Homo sapien
tacagtcatcatgccaaaattcatc

SEQ ID NO: 5328071 - DNA, 25 bp, Homo sapien
taatatcatatagtgaaaacagatg

SEQ ID NO: 5328072 - DNA, 25 bp, Homo sapien
cgcaaaataattctgtggcagggca

SEQ ID NO: 5328073 - DNA, 25 bp, Homo sapien
tggcagggcaaggtttaaatgtgtt

SEQ ID NO: 5328074 - DNA, 25 bp, Homo sapien
cagggcaaggtttaaatgtgtttct

SEQ ID NO: 5328075 - DNA, 25 bp, Homo sapien
caaaataattctgtggcagggcaag

SEQ ID NO: 5328076 - DNA, 25 bp, Homo sapien
ccccgcaaaataattctgtggcagg

SEQ ID NO: 5328077 - DNA, 25 bp, Homo sapien
ccgcaaaataattctgtggcagggc

SEQ ID NO: 5328078 - DNA, 25 bp, Homo sapien
tgccctgccacagaattattttgcg

SEQ ID NO: 5328079 - DNA, 25 bp, Homo sapien
agaaacacatttaaaccttgccctg

SEQ ID NO: 5328080 - DNA, 25 bp, Homo sapien
cttgccctgccacagaattattttg

SEQ ID NO: 5328081 - DNA, 25 bp, Homo sapien
gccctgccacagaattattttgcgg

SEQ ID NO: 5328082 - DNA, 25 bp, Homo sapien
gaaacacatttaaaccttgccctgc

SEQ ID NO: 5328083 - DNA, 25 bp, Homo sapien
aacacatttaaaccttgccctgcca

SEQ ID NO: 5328084 - DNA, 25 bp, Homo sapien
ctttttggttttgatgtacacatat

SEQ ID NO: 5328085 - DNA, 25 bp, Homo sapien
ttgatgtacacatattcaaaaagta

SEQ ID NO: 5328086 - DNA, 25 bp, Homo sapien
gatgtacacatattcaaaaagtaca

SEQ ID NO: 5328087 - DNA, 25 bp, Homo sapien
ttggttttgatgtacacatattcaa

SEQ ID NO: 5328088 - DNA, 25 bp, Homo sapien
tttggttttgatgtacacatattca

SEQ ID NO: 5328089 - DNA, 25 bp, Homo sapien
tgatgtacacatattcaaaaagtac

SEQ ID NO: 5328090 - DNA, 25 bp, Homo sapien
gtactttttgaatatgtgtacatca

SEQ ID NO: 5328091 - DNA, 25 bp, Homo sapien
gaatatgtgtacatcaaaaccaaaa

SEQ ID NO: 5328092 - DNA, 25 bp, Homo sapien
atatgtgtacatcaaaaccaaaaag

SEQ ID NO: 5328093 - DNA, 25 bp, Homo sapien
tactttttgaatatgtgtacatcaa

SEQ ID NO: 5328094 - DNA, 25 bp, Homo sapien
ttgaatatgtgtacatcaaaaccaa

SEQ ID NO: 5328095 - DNA, 25 bp, Homo sapien
tgaatatgtgtacatcaaaaccaaa

SEQ ID NO: 5328096 - DNA, 25 bp, Homo sapien
atatgaacagagtcaaggaaataac

SEQ ID NO: 5328097 - DNA, 25 bp, Homo sapien
tcagagtatatatgaacagagtcaa

SEQ ID NO: 5328098 - DNA, 25 bp, Homo sapien
aaaggctggcaagctggacagaggt

SEQ ID NO: 5328099 - DNA, 25 bp, Homo sapien
gagtatatatgaacagagtcaagga

SEQ ID NO: 5328100 - DNA, 25 bp, Homo sapien
gaatcagagtatatatgaacagagt

SEQ ID NO: 5328101 - DNA, 25 bp, Homo sapien
aaaaaggctggcaagctggacagag

SEQ ID NO: 5328102 - DNA, 25 bp, Homo sapien
ctctgtccagcttgccagccttttt

SEQ ID NO: 5328103 - DNA, 25 bp, Homo sapien
gttatttccttgactctgttcatat

SEQ ID NO: 5328104 - DNA, 25 bp, Homo sapien
acctctgtccagcttgccagccttt

SEQ ID NO: 5328105 - DNA, 25 bp, Homo sapien
tccttgactctgttcatatatactc

SEQ ID NO: 5328106 - DNA, 25 bp, Homo sapien
ttgactctgttcatatatactctga

SEQ ID NO: 5328107 - DNA, 25 bp, Homo sapien
gactctgttcatatatactctgatt

SEQ ID NO: 5328108 - DNA, 25 bp, Homo sapien
tatttggcaacccaaggagttaatc

SEQ ID NO: 5328109 - DNA, 25 bp, Homo sapien
tggcaacccaaggagttaatcctaa

SEQ ID NO: 5328110 - DNA, 25 bp, Homo sapien
tcctaaggaacatccagtaaaacag

SEQ ID NO: 5328111 - DNA, 25 bp, Homo sapien
gagttaatcctaaggaacatccagt

SEQ ID NO: 5328112 - DNA, 25 bp, Homo sapien
ccaaggagttaatcctaaggaacat

SEQ ID NO: 5328113 - DNA, 25 bp, Homo sapien
ggaacatccagtaaaacaggaattg

SEQ ID NO: 5328114 - DNA, 25 bp, Homo sapien
caattcctgttttactggatgttcc

SEQ ID NO: 5328115 - DNA, 25 bp, Homo sapien
gattaactccttgggttgccaaata

SEQ ID NO: 5328116 - DNA, 25 bp, Homo sapien
tactggatgttccttaggattaact

SEQ ID NO: 5328117 - DNA, 25 bp, Homo sapien
ctgttttactggatgttccttagga

SEQ ID NO: 5328118 - DNA, 25 bp, Homo sapien
gatgttccttaggattaactccttg

SEQ ID NO: 5328119 - DNA, 25 bp, Homo sapien
ttaggattaactccttgggttgcca

SEQ ID NO: 5328120 - DNA, 25 bp, Homo sapien
ttggatccacttgaacaagcaaaag

SEQ ID NO: 5328121 - DNA, 25 bp, Homo sapien
agtggatttggtttctgcatacaca

SEQ ID NO: 5328122 - DNA, 25 bp, Homo sapien
gatccacttgaacaagcaaaagtgg

SEQ ID NO: 5328123 - DNA, 25 bp, Homo sapien
tacacattaaattcaatgttttggg

SEQ ID NO: 5328124 - DNA, 25 bp, Homo sapien
ggtttctgcatacacattaaattca

SEQ ID NO: 5328125 - DNA, 25 bp, Homo sapien
cttgaacaagcaaaagtggatttgg

SEQ ID NO: 5328126 - DNA, 25 bp, Homo sapien
tgtgtatgcagaaaccaaatccact

SEQ ID NO: 5328127 - DNA, 25 bp, Homo sapien
ccaaatccacttttgcttgttcaag

SEQ ID NO: 5328128 - DNA, 25 bp, Homo sapien
tgaatttaatgtgtatgcagaaacc

SEQ ID NO: 5328129 - DNA, 25 bp, Homo sapien
taatgtgtatgcagaaaccaaatcc

SEQ ID NO: 5328130 - DNA, 25 bp, Homo sapien
cccaaaacattgaatttaatgtgta

SEQ ID NO: 5328131 - DNA, 25 bp, Homo sapien
acttttgcttgttcaagtggatcca

SEQ ID NO: 5328132 - DNA, 25 bp, Homo sapien
cgtttgagaattccattggtgctgt

SEQ ID NO: 5328133 - DNA, 25 bp, Homo sapien
cagcgtttgagaattccattggtgc

SEQ ID NO: 5328134 - DNA, 25 bp, Homo sapien
cgagtatttgtcagcgtttgagaat

SEQ ID NO: 5328135 - DNA, 25 bp, Homo sapien
gtatttgtcagcgtttgagaattcc

SEQ ID NO: 5328136 - DNA, 25 bp, Homo sapien
tgtcagcgtttgagaattccattgg

SEQ ID NO: 5328137 - DNA, 25 bp, Homo sapien
cacgagtatttgtcagcgtttgaga

SEQ ID NO: 5328138 - DNA, 25 bp, Homo sapien
tctcaaacgctgacaaatactcgtg

SEQ ID NO: 5328139 - DNA, 25 bp, Homo sapien
ccaatggaattctcaaacgctgaca

SEQ ID NO: 5328140 - DNA, 25 bp, Homo sapien
tcaaacgctgacaaatactcgtgaa

SEQ ID NO: 5328141 - DNA, 25 bp, Homo sapien
acagcaccaatggaattctcaaacg

SEQ ID NO: 5328142 - DNA, 25 bp, Homo sapien
ggaattctcaaacgctgacaaatac

SEQ ID NO: 5328143 - DNA, 25 bp, Homo sapien
gcaccaatggaattctcaaacgctg

SEQ ID NO: 5328144 - DNA, 25 bp, Homo sapien
tgcctttgaaatacatgatatgacc

SEQ ID NO: 5328145 - DNA, 25 bp, Homo sapien
tgtgatacgtattttagacctaaga

SEQ ID NO: 5328146 - DNA, 25 bp, Homo sapien
tgtgcatagcattagtgggcttcgg

SEQ ID NO: 5328147 - DNA, 25 bp, Homo sapien
gtggtgattgcactatcctgggcga

SEQ ID NO: 5328148 - DNA, 25 bp, Homo sapien
gaatataatatgctcctagatcaac

SEQ ID NO: 5328149 - DNA, 25 bp, Homo sapien
ggcttcggttggttcttcttccaca

SEQ ID NO: 5328150 - DNA, 25 bp, Homo sapien
ggtcatatcatgtatttcaaaggca

SEQ ID NO: 5328151 - DNA, 25 bp, Homo sapien
taaatagatcccctaatgattgctg

SEQ ID NO: 5328152 - DNA, 25 bp, Homo sapien
tgtggaagaagaaccaaccgaagcc

SEQ ID NO: 5328153 - DNA, 25 bp, Homo sapien
gaagcccactaatgctatgcacacc

SEQ ID NO: 5328154 - DNA, 25 bp, Homo sapien
catgatgaccaaacatgagatagca

SEQ ID NO: 5328155 - DNA, 25 bp, Homo sapien
tcgcccaggatagtgcaatcaccac

SEQ ID NO: 5328156 - DNA, 25 bp, Homo sapien
ttatcgccttaactgctggttgcac

SEQ ID NO: 5328157 - DNA, 25 bp, Homo sapien
gaggccaagagagattcaatgattt

SEQ ID NO: 5328158 - DNA, 25 bp, Homo sapien
ggatgagcggcaagtgcatattttc

SEQ ID NO: 5328159 - DNA, 25 bp, Homo sapien
gtctcagtggaatatactcattcag

SEQ ID NO: 5328160 - DNA, 25 bp, Homo sapien
agatcattagaccagctgccttatt

SEQ ID NO: 5328161 - DNA, 25 bp, Homo sapien
ctggttgcacagtagttggatagta

SEQ ID NO: 5328162 - DNA, 25 bp, Homo sapien
tgctgttctccttacctatgtgata

SEQ ID NO: 5328163 - DNA, 25 bp, Homo sapien
ttctccttacctatgtgataaagga

SEQ ID NO: 5328164 - DNA, 25 bp, Homo sapien
gcaatgctatttgctgtcatacaca

SEQ ID NO: 5328165 - DNA, 25 bp, Homo sapien
tttacttccattctgcaatgctatt

SEQ ID NO: 5328166 - DNA, 25 bp, Homo sapien
tgttctccttacctatgtgataaag

SEQ ID NO: 5328167 - DNA, 25 bp, Homo sapien
tatttgctgtcatacacattcatgc

SEQ ID NO: 5328168 - DNA, 25 bp, Homo sapien
tatcacataggtaaggagaacagca

SEQ ID NO: 5328169 - DNA, 25 bp, Homo sapien
tgtatgacagcaaatagcattgcag

SEQ ID NO: 5328170 - DNA, 25 bp, Homo sapien
cctttatcacataggtaaggagaac

SEQ ID NO: 5328171 - DNA, 25 bp, Homo sapien
gcatgaatgtgtatgacagcaaata

SEQ ID NO: 5328172 - DNA, 25 bp, Homo sapien
aatagcattgcagaatggaagtaaa

SEQ ID NO: 5328173 - DNA, 25 bp, Homo sapien
tgtgtatgacagcaaatagcattgc

SEQ ID NO: 5328174 - DNA, 25 bp, Homo sapien
tgcaaccagcagttaaggcgataag

SEQ ID NO: 5328175 - DNA, 25 bp, Homo sapien
gaaaatatgcacttgccgctcatcc

SEQ ID NO: 5328176 - DNA, 25 bp, Homo sapien
aataaggcagctggtctaatgatct

SEQ ID NO: 5328177 - DNA, 25 bp, Homo sapien
tactatccaactactgtgcaaccag

SEQ ID NO: 5328178 - DNA, 25 bp, Homo sapien
tgaatgagtatattccactgagaca

SEQ ID NO: 5328179 - DNA, 25 bp, Homo sapien
aaatcattgaatctctcttggcctc

SEQ ID NO: 5328180 - DNA, 25 bp, Homo sapien
ttttcagcgcttatggctctgttct

SEQ ID NO: 5328181 - DNA, 25 bp, Homo sapien
tatacttatacctttatctaggcaa

SEQ ID NO: 5328182 - DNA, 25 bp, Homo sapien
aagtcttctttgcagtatatcccta

SEQ ID NO: 5328183 - DNA, 25 bp, Homo sapien
cctgtttgcagtctgatcccatttg

SEQ ID NO: 5328184 - DNA, 25 bp, Homo sapien
aaattaggttagctattttcagcgc

SEQ ID NO: 5328185 - DNA, 25 bp, Homo sapien
taaatgctagagctgtcctttcaca

SEQ ID NO: 5328186 - DNA, 25 bp, Homo sapien
tgtgaaaggacagctctagcattta

SEQ ID NO: 5328187 - DNA, 25 bp, Homo sapien
tgcctagataaaggtataagtatag

SEQ ID NO: 5328188 - DNA, 25 bp, Homo sapien
aagaacagagccataagcgctgaaa

SEQ ID NO: 5328189 - DNA, 25 bp, Homo sapien
caaatgggatcagactgcaaacagg

SEQ ID NO: 5328190 - DNA, 25 bp, Homo sapien
taagcgctgaaaatagctaacctaa

SEQ ID NO: 5328191 - DNA, 25 bp, Homo sapien
tatagggatatactgcaaagaagac

SEQ ID NO: 5328192 - DNA, 25 bp, Homo sapien
ttagaaggagtatgtggaagggcaa

SEQ ID NO: 5328193 - DNA, 25 bp, Homo sapien
ctatagaaccccggaggagggtgag

SEQ ID NO: 5328194 - DNA, 25 bp, Homo sapien
ccagtgttttagaaggagtatgtgg

SEQ ID NO: 5328195 - DNA, 25 bp, Homo sapien
cagtgttttagaaggagtatgtgga

SEQ ID NO: 5328196 - DNA, 25 bp, Homo sapien
gaagggcaaggagtacctatagaac

SEQ ID NO: 5328197 - DNA, 25 bp, Homo sapien
ccccggaggagggtgaggagcagag

SEQ ID NO: 5328198 - DNA, 25 bp, Homo sapien
ttgcccttccacatactccttctaa

SEQ ID NO: 5328199 - DNA, 25 bp, Homo sapien
ccacatactccttctaaaacactgg

SEQ ID NO: 5328200 - DNA, 25 bp, Homo sapien
gttctataggtactccttgcccttc

SEQ ID NO: 5328201 - DNA, 25 bp, Homo sapien
tctataggtactccttgcccttcca

SEQ ID NO: 5328202 - DNA, 25 bp, Homo sapien
tataggtactccttgcccttccaca

SEQ ID NO: 5328203 - DNA, 25 bp, Homo sapien
tccacatactccttctaaaacactg

SEQ ID NO: 5328204 - DNA, 25 bp, Homo sapien
agtggcagtaacatctgttagggtt

SEQ ID NO: 5328205 - DNA, 25 bp, Homo sapien
gggttactgggcagcatccccgcaa

SEQ ID NO: 5328206 - DNA, 25 bp, Homo sapien
tgttagggttactgggcagcatccc

SEQ ID NO: 5328207 - DNA, 25 bp, Homo sapien
cccgcaacccaggtactcagtctca

SEQ ID NO: 5328208 - DNA, 25 bp, Homo sapien
taacatctgttagggttactgggca

SEQ ID NO: 5328209 - DNA, 25 bp, Homo sapien
gttttctcatgccctctccgtctgt

SEQ ID NO: 5328210 - DNA, 25 bp, Homo sapien
gggatgctgcccagtaaccctaaca

SEQ ID NO: 5328211 - DNA, 25 bp, Homo sapien
tgagactgagtacctgggttgcggg

SEQ ID NO: 5328212 - DNA, 25 bp, Homo sapien
acagacggagagggcatgagaaaac

SEQ ID NO: 5328213 - DNA, 25 bp, Homo sapien
cagaggtagagacagacggagaggg

SEQ ID NO: 5328214 - DNA, 25 bp, Homo sapien
gctgcccagtaaccctaacagatgt

SEQ ID NO: 5328215 - DNA, 25 bp, Homo sapien
taaccctaacagatgttactgccac

SEQ ID NO: 5328216 - DNA, 25 bp, Homo sapien
ctgactggtgcaaagggtaactcct

SEQ ID NO: 5328217 - DNA, 25 bp, Homo sapien
tgatggcaagctgaaacaacaggcg

SEQ ID NO: 5328218 - DNA, 25 bp, Homo sapien
gcctgccctatgtaaaccagtttct

SEQ ID NO: 5328219 - DNA, 25 bp, Homo sapien
agtaagggtcagagaacttgcattg

SEQ ID NO: 5328220 - DNA, 25 bp, Homo sapien
caacaggcgtaaggtggaactgtct

SEQ ID NO: 5328221 - DNA, 25 bp, Homo sapien
tggaactgtcttgggcaaattgaga

SEQ ID NO: 5328222 - DNA, 25 bp, Homo sapien
tagtgttttaagtgacatgacagct

SEQ ID NO: 5328223 - DNA, 25 bp, Homo sapien
taagtgacatgacagcttatagttg

SEQ ID NO: 5328224 - DNA, 25 bp, Homo sapien
aaggagagcatgcagagaagtcttc

SEQ ID NO: 5328225 - DNA, 25 bp, Homo sapien
tcttcactggccgaactggaaccta

SEQ ID NO: 5328226 - DNA, 25 bp, Homo sapien
tagttgttgtatttgtccagacaga

SEQ ID NO: 5328227 - DNA, 25 bp, Homo sapien
ttgtccagacagagagcatagaagg

SEQ ID NO: 5328228 - DNA, 25 bp, Homo sapien
tgaagacttctctgcatgctctcct

SEQ ID NO: 5328229 - DNA, 25 bp, Homo sapien
caactataagctgtcatgtcactta

SEQ ID NO: 5328230 - DNA, 25 bp, Homo sapien
gctgtcatgtcacttaaaacactat

SEQ ID NO: 5328231 - DNA, 25 bp, Homo sapien
tctgtctggacaaatacaacaacta

SEQ ID NO: 5328232 - DNA, 25 bp, Homo sapien
ccttctatgctctctgtctggacaa

SEQ ID NO: 5328233 - DNA, 25 bp, Homo sapien
taggttccagttcggccagtgaaga

SEQ ID NO: 5328234 - DNA, 25 bp, Homo sapien
agaaactggtttacatagggcaggc

SEQ ID NO: 5328235 - DNA, 25 bp, Homo sapien
tctcaatttgcccaagacagttcca

SEQ ID NO: 5328236 - DNA, 25 bp, Homo sapien
caatgcaagttctctgacccttact

SEQ ID NO: 5328237 - DNA, 25 bp, Homo sapien
gacagttccaccttacgcctgttgt

SEQ ID NO: 5328238 - DNA, 25 bp, Homo sapien
gcctgttgtttcagcttgccatcaa

SEQ ID NO: 5328239 - DNA, 25 bp, Homo sapien
ggagttaccctttgcaccagtcagg

SEQ ID NO: 5328240 - DNA, 25 bp, Homo sapien
ctgcgtagccttccaggaatgcagt

SEQ ID NO: 5328241 - DNA, 25 bp, Homo sapien
tctctcacagctcttcgttggggca

SEQ ID NO: 5328242 - DNA, 25 bp, Homo sapien
ctgagaaaatcggagtttggctgcg

SEQ ID NO: 5328243 - DNA, 25 bp, Homo sapien
ggctgcgtagccttccaggaatgca

SEQ ID NO: 5328244 - DNA, 25 bp, Homo sapien
gagtttggctgcgtagccttccagg

SEQ ID NO: 5328245 - DNA, 25 bp, Homo sapien
aaaatcggagtttggctgcgtagcc

SEQ ID NO: 5328246 - DNA, 25 bp, Homo sapien
actgcattcctggaaggctacgcag

SEQ ID NO: 5328247 - DNA, 25 bp, Homo sapien
ggctacgcagccaaactccgatttt

SEQ ID NO: 5328248 - DNA, 25 bp, Homo sapien
tgcattcctggaaggctacgcagcc

SEQ ID NO: 5328249 - DNA, 25 bp, Homo sapien
gccccaacgaagagctgtgagagac

SEQ ID NO: 5328250 - DNA, 25 bp, Homo sapien
acaatgctgccccaacgaagagctg

SEQ ID NO: 5328251 - DNA, 25 bp, Homo sapien
tggaaggctacgcagccaaactccg

SEQ ID NO: 5328252 - DNA, 25 bp, Homo sapien
catcgttgcccgaccgctttccggg

SEQ ID NO: 5328253 - DNA, 25 bp, Homo sapien
gtcattgtcgtcatcgttgcccgac

SEQ ID NO: 5328254 - DNA, 25 bp, Homo sapien
tgtcgtcatcgttgcccgaccgctt

SEQ ID NO: 5328255 - DNA, 25 bp, Homo sapien
cattgtcgtcatcgttgcccgaccg

SEQ ID NO: 5328256 - DNA, 25 bp, Homo sapien
attgtcgtcatcgttgcccgaccgc

SEQ ID NO: 5328257 - DNA, 25 bp, Homo sapien
gtcgtcatcgttgcccgaccgcttt

SEQ ID NO: 5328258 - DNA, 25 bp, Homo sapien
cccggaaagcggtcgggcaacgatg

SEQ ID NO: 5328259 - DNA, 25 bp, Homo sapien
gcggtcgggcaacgatgacgacaat

SEQ ID NO: 5328260 - DNA, 25 bp, Homo sapien
aagcggtcgggcaacgatgacgaca

SEQ ID NO: 5328261 - DNA, 25 bp, Homo sapien
ggtcgggcaacgatgacgacaatga

SEQ ID NO: 5328262 - DNA, 25 bp, Homo sapien
gtcgggcaacgatgacgacaatgac

SEQ ID NO: 5328263 - DNA, 25 bp, Homo sapien
aaagcggtcgggcaacgatgacgac

SEQ ID NO: 5328264 - DNA, 25 bp, Homo sapien
ctgttcttctctatgcatctcatat

SEQ ID NO: 5328265 - DNA, 25 bp, Homo sapien
tgttcttctctatgcatctcatatg

SEQ ID NO: 5328266 - DNA, 25 bp, Homo sapien
tctgttcttctctatgcatctcata

SEQ ID NO: 5328267 - DNA, 25 bp, Homo sapien
cttctctatgcatctcatatgttgt

SEQ ID NO: 5328268 - DNA, 25 bp, Homo sapien
tccttgtcataatcctcgtagattt

SEQ ID NO: 5328269 - DNA, 25 bp, Homo sapien
tcatctctgcagaaatatgtgaagg

SEQ ID NO: 5328270 - DNA, 25 bp, Homo sapien
gcagaaatatgtgaaggctgtacca

SEQ ID NO: 5328271 - DNA, 25 bp, Homo sapien
ctttcttgaaagcacacaatccttg

SEQ ID NO: 5328272 - DNA, 25 bp, Homo sapien
tttgacaaacatgtagaccatccca

SEQ ID NO: 5328273 - DNA, 25 bp, Homo sapien
tctattactgtagattgatactgcc

SEQ ID NO: 5328274 - DNA, 25 bp, Homo sapien
aataggcactattttgtctgtcttc

SEQ ID NO: 5328275 - DNA, 25 bp, Homo sapien
cagttctagaacttcacgtaaatag

SEQ ID NO: 5328276 - DNA, 25 bp, Homo sapien
cattgatgatccaacaggccagggc

SEQ ID NO: 5328277 - DNA, 25 bp, Homo sapien
caaagccaggctataaatcgcagag

SEQ ID NO: 5328278 - DNA, 25 bp, Homo sapien
gaatttctatgcagctcaacatggg

SEQ ID NO: 5328279 - DNA, 25 bp, Homo sapien
cacatggtccgtagtagtcctgggc

SEQ ID NO: 5328280 - DNA, 25 bp, Homo sapien
gcaagcaaatgcacatgaagccagt

SEQ ID NO: 5328281 - DNA, 25 bp, Homo sapien
tgaagccagtgactatgaagtcggt

SEQ ID NO: 5328282 - DNA, 25 bp, Homo sapien
aagtcttcaagcgtgaagcattgca

SEQ ID NO: 5328283 - DNA, 25 bp, Homo sapien
agcattgcaaaccttcgagtgtaca

SEQ ID NO: 5328284 - DNA, 25 bp, Homo sapien
gatgaccctgttgagacctaacctg

SEQ ID NO: 5328285 - DNA, 25 bp, Homo sapien
tggtgccaacacacttactacagaa

SEQ ID NO: 5328286 - DNA, 25 bp, Homo sapien
gaaggctgttctgctgcatgaagcg

SEQ ID NO: 5328287 - DNA, 25 bp, Homo sapien
ttaaaataggatgtcaggatgaccc

SEQ ID NO: 5328288 - DNA, 25 bp, Homo sapien
agagtccacagtaagagccacgggt

SEQ ID NO: 5328289 - DNA, 25 bp, Homo sapien
tgtgctccacttgcatgcaatggca

SEQ ID NO: 5328290 - DNA, 25 bp, Homo sapien
ccacgggtgtgaaagcagaatacat

SEQ ID NO: 5328291 - DNA, 25 bp, Homo sapien
tgcaagtctctgcaagaggccgggt

SEQ ID NO: 5328292 - DNA, 25 bp, Homo sapien
cattaaggaccaaagaaagccatcc

SEQ ID NO: 5328293 - DNA, 25 bp, Homo sapien
gccagatctgctgagccctaaagca

SEQ ID NO: 5328294 - DNA, 25 bp, Homo sapien
ggtctgtcagacaagcccttgatgc

SEQ ID NO: 5328295 - DNA, 25 bp, Homo sapien
tgagccctaaagcaaggaaaattct

SEQ ID NO: 5328296 - DNA, 25 bp, Homo sapien
tcatgtgctgtagactgtcaccgca

SEQ ID NO: 5328297 - DNA, 25 bp, Homo sapien
tcagtgcaaccaggtaggtgggctt

SEQ ID NO: 5328298 - DNA, 25 bp, Homo sapien
ggtgggcttgtacattgactcctca

SEQ ID NO: 5328299 - DNA, 25 bp, Homo sapien
catttttggctcagatcatctaggg

SEQ ID NO: 5328300 - DNA, 25 bp, Homo sapien
gcctgacaagtaagttccgagttcc

SEQ ID NO: 5328301 - DNA, 25 bp, Homo sapien
taagttccgagttccacaccaaatc

SEQ ID NO: 5328302 - DNA, 25 bp, Homo sapien
ggtgatgggtgttgtagatagtgcc

SEQ ID NO: 5328303 - DNA, 25 bp, Homo sapien
gatagtgcctgacaagtaagttccg

SEQ ID NO: 5328304 - DNA, 25 bp, Homo sapien
ccccaggcttctcggagggatcaga

SEQ ID NO: 5328305 - DNA, 25 bp, Homo sapien
tcagcctccggtgtgagggagaact

SEQ ID NO: 5328306 - DNA, 25 bp, Homo sapien
gagtgttgagcaactcctcagggag

SEQ ID NO: 5328307 - DNA, 25 bp, Homo sapien
gacgttctgactggccatgaaagcc

SEQ ID NO: 5328308 - DNA, 25 bp, Homo sapien
gccgttcatgttctactgcgcgtga

SEQ ID NO: 5328309 - DNA, 25 bp, Homo sapien
tttatggacacgcatgaggtaagct

SEQ ID NO: 5328310 - DNA, 25 bp, Homo sapien
gcatgaggtaagctgcgccgttcat

SEQ ID NO: 5328311 - DNA, 25 bp, Homo sapien
tactgcgcgtgactttgtactgccc

SEQ ID NO: 5328312 - DNA, 25 bp, Homo sapien
aacatagctagcagatgccaacgcc

SEQ ID NO: 5328313 - DNA, 25 bp, Homo sapien
ttagaaattgccatcgacagtgagc

SEQ ID NO: 5328314 - DNA, 25 bp, Homo sapien
cggaagccctgtactaccagcgtgg

SEQ ID NO: 5328315 - DNA, 25 bp, Homo sapien
aactccaccgtgttcttagaaattg

SEQ ID NO: 5328316 - DNA, 25 bp, Homo sapien
atagcaaacgctggacccaacacag

SEQ ID NO: 5328317 - DNA, 25 bp, Homo sapien
agcaagatcaccatcgctgactgtg

SEQ ID NO: 5328318 - DNA, 25 bp, Homo sapien
ccagcaagatcaccatcgctgactg

SEQ ID NO: 5328319 - DNA, 25 bp, Homo sapien
agaccagcaagatcaccatcgctga

SEQ ID NO: 5328320 - DNA, 25 bp, Homo sapien
gcaagatcaccatcgctgactgtgg

SEQ ID NO: 5328321 - DNA, 25 bp, Homo sapien
tcacagtttcatcataccagcctag

SEQ ID NO: 5328322 - DNA, 25 bp, Homo sapien
taatagtctcctgtttatgtggttc

SEQ ID NO: 5328323 - DNA, 25 bp, Homo sapien
agaataatagtctcctgtttatgtg

SEQ ID NO: 5328324 - DNA, 25 bp, Homo sapien
caaagcccagtgtgtcattctcatg

SEQ ID NO: 5328325 - DNA, 25 bp, Homo sapien
tgttcaatgagggtcagaggactcc

SEQ ID NO: 5328326 - DNA, 25 bp, Homo sapien
actggccctggagatagtttacttg

SEQ ID NO: 5328327 - DNA, 25 bp, Homo sapien
ttggtgcttctgatacccacgtgca

SEQ ID NO: 5328328 - DNA, 25 bp, Homo sapien
tagaccaaccgtgccgttttgagag

SEQ ID NO: 5328329 - DNA, 25 bp, Homo sapien
tgagctttgtaacgatcagtactct

SEQ ID NO: 5328330 - DNA, 25 bp, Homo sapien
agctttgtaacgatcagtactctca

SEQ ID NO: 5328331 - DNA, 25 bp, Homo sapien
tattgagctttgtaacgatcagtac

SEQ ID NO: 5328332 - DNA, 25 bp, Homo sapien
ttattgagctttgtaacgatcagta

SEQ ID NO: 5328333 - DNA, 25 bp, Homo sapien
caaacttgaaatgggctgggtggac

SEQ ID NO: 5328334 - DNA, 25 bp, Homo sapien
aaatgaactacagacgcagagaccc

SEQ ID NO: 5328335 - DNA, 25 bp, Homo sapien
gaaggcttacagaacctgcgactcc

SEQ ID NO: 5328336 - DNA, 25 bp, Homo sapien
ctgggtggacaacgtaacattctgc

SEQ ID NO: 5328337 - DNA, 25 bp, Homo sapien
tggtaagagcgcataaatcttagct

SEQ ID NO: 5328338 - DNA, 25 bp, Homo sapien
tcaatcctatcccaaaacacgtcat

SEQ ID NO: 5328339 - DNA, 25 bp, Homo sapien
tctcagttggttactgggactaata

SEQ ID NO: 5328340 - DNA, 25 bp, Homo sapien
taaaagtcatttctgctcaacgtgt

SEQ ID NO: 5328341 - DNA, 25 bp, Homo sapien
tatagattgctggatatcacaggca

SEQ ID NO: 5328342 - DNA, 25 bp, Homo sapien
caaaggcaatggctgtaagtaacat

SEQ ID NO: 5328343 - DNA, 25 bp, Homo sapien
tgatgccagcttctaaccctcgagc

SEQ ID NO: 5328344 - DNA, 25 bp, Homo sapien
taccatttctatgggaaggcgtcac

SEQ ID NO: 5328345 - DNA, 25 bp, Homo sapien
actgggactagttcttcaagcgagc

SEQ ID NO: 5328346 - DNA, 25 bp, Homo sapien
caagcgagcagcctaaagagtttgg

SEQ ID NO: 5328347 - DNA, 25 bp, Homo sapien
gcattactaccaagacagactggca

SEQ ID NO: 5328348 - DNA, 25 bp, Homo sapien
cgaaagtgttcgtgtgcctcatgga

SEQ ID NO: 5328349 - DNA, 25 bp, Homo sapien
tgtcagcggtatccctgcacacagt

SEQ ID NO: 5328350 - DNA, 25 bp, Homo sapien
tttcctggagaccaatcagcagcct

SEQ ID NO: 5328351 - DNA, 25 bp, Homo sapien
tatctgtgatgttagcgcccttggg

SEQ ID NO: 5328352 - DNA, 25 bp, Homo sapien
ggccaaccctgagcaatgatatcag

SEQ ID NO: 5328353 - DNA, 25 bp, Homo sapien
gaaagagctccctgttctgcggcag

SEQ ID NO: 5328354 - DNA, 25 bp, Homo sapien
gcgcctccagctgtcagaaagagct

SEQ ID NO: 5328355 - DNA, 25 bp, Homo sapien
tgcggcaggtgtcggacctgccaca

SEQ ID NO: 5328356 - DNA, 25 bp, Homo sapien
cggcgcctccagctgtcagaaagag

SEQ ID NO: 5328357 - DNA, 25 bp, Homo sapien
tgttagcacctcaaaagcagccagt

SEQ ID NO: 5328358 - DNA, 25 bp, Homo sapien
ggaccatgaggacttacagacaatg

SEQ ID NO: 5328359 - DNA, 25 bp, Homo sapien
gggctggctatcgtggtacaccaca

SEQ ID NO: 5328360 - DNA, 25 bp, Homo sapien
gaaatttaactaacagctcccagag

SEQ ID NO: 5328361 - DNA, 25 bp, Homo sapien
cctggaagaaaccttggtgactaat

SEQ ID NO: 5328362 - DNA, 25 bp, Homo sapien
gctcccttcacataaagacctggaa

SEQ ID NO: 5328363 - DNA, 25 bp, Homo sapien
gggaagtactctttgcacagaaaaa

SEQ ID NO: 5328364 - DNA, 25 bp, Homo sapien
tatacttattaggaaacaccaggct

SEQ ID NO: 5328365 - DNA, 25 bp, Homo sapien
acagaggcaaaacctttggttggat

SEQ ID NO: 5328366 - DNA, 25 bp, Homo sapien
tggatgctgtgttctcatgtcaaaa

SEQ ID NO: 5328367 - DNA, 25 bp, Homo sapien
ttttctgtcaaactccaagctacac

SEQ ID NO: 5328368 - DNA, 25 bp, Homo sapien
gctgtgttctcatgtcaaaaacatg

SEQ ID NO: 5328369 - DNA, 25 bp, Homo sapien
aatgccatatttctgagatcaaata

SEQ ID NO: 5328370 - DNA, 25 bp, Homo sapien
gtttgtctcccaccgtaatgccata

SEQ ID NO: 5328371 - DNA, 25 bp, Homo sapien
tgtcatagccagcacaaacaacacg

SEQ ID NO: 5328372 - DNA, 25 bp, Homo sapien
caaatagtttgatatccccattgtc

SEQ ID NO: 5328373 - DNA, 25 bp, Homo sapien
aatgccacagtccaacagtctctct

SEQ ID NO: 5328374 - DNA, 25 bp, Homo sapien
aattcctagtccacctatgccatct

SEQ ID NO: 5328375 - DNA, 25 bp, Homo sapien
tcctagtccacctatgccatctatg

SEQ ID NO: 5328376 - DNA, 25 bp, Homo sapien
tagtccacctatgccatctatggca

SEQ ID NO: 5328377 - DNA, 25 bp, Homo sapien
ccaattcctagtccacctatgccat

SEQ ID NO: 5328378 - DNA, 25 bp, Homo sapien
ccaaactgcgtgtgtgaaaataagc

SEQ ID NO: 5328379 - DNA, 25 bp, Homo sapien
aaactatcaaataaattgcctatct

SEQ ID NO: 5328380 - DNA, 25 bp, Homo sapien
cgttctgcagtgctaaatctcttgc

SEQ ID NO: 5328381 - DNA, 25 bp, Homo sapien
aatgctagcaccaaactgcgtgtgt

SEQ ID NO: 5328382 - DNA, 25 bp, Homo sapien
atctccagtagctaaatatctctgc

SEQ ID NO: 5328383 - DNA, 25 bp, Homo sapien
tgttccacatttaataggtttggcc

SEQ ID NO: 5328384 - DNA, 25 bp, Homo sapien
caccaaaatctccagtagctaaata

SEQ ID NO: 5328385 - DNA, 25 bp, Homo sapien
tctctgctgtaaagatgttgcacca

SEQ ID NO: 5328386 - DNA, 25 bp, Homo sapien
tacgtggccaagtctaaaagcactc

SEQ ID NO: 5328387 - DNA, 25 bp, Homo sapien
taaaagaccctattgatgagaagca

SEQ ID NO: 5328388 - DNA, 25 bp, Homo sapien
gcacaagtggactgagatggcatca

SEQ ID NO: 5328389 - DNA, 25 bp, Homo sapien
gaaatcagccacgtacagtaacatg

SEQ ID NO: 5328390 - DNA, 25 bp, Homo sapien
gagggtttctgtgattcctaggcca

SEQ ID NO: 5328391 - DNA, 25 bp, Homo sapien
cacagcaatgtggttccaggagaca

SEQ ID NO: 5328392 - DNA, 25 bp, Homo sapien
catctattgacccaattctctggga

SEQ ID NO: 5328393 - DNA, 25 bp, Homo sapien
gaatctcaaactatactcctggaac

SEQ ID NO: 5328394 - DNA, 25 bp, Homo sapien
gatctcgtacagctgaatgacgccg

SEQ ID NO: 5328395 - DNA, 25 bp, Homo sapien
ggtccccgtgctggatctcgtacag

SEQ ID NO: 5328396 - DNA, 25 bp, Homo sapien
aatgacgccggtgccccgtgcgaag

SEQ ID NO: 5328397 - DNA, 25 bp, Homo sapien
gttgcccatggtcacaaatttggcg

SEQ ID NO: 5328398 - DNA, 25 bp, Homo sapien
gtcaaacaccgtgtagttgaagccc

SEQ ID NO: 5328399 - DNA, 25 bp, Homo sapien
gatatgggcgatgatctgaggcttc

SEQ ID NO: 5328400 - DNA, 25 bp, Homo sapien
tctgaggcttctcgaaggccgacat

SEQ ID NO: 5328401 - DNA, 25 bp, Homo sapien
gaagcccttctggatatgggcgatg

SEQ ID NO: 5328402 - DNA, 25 bp, Homo sapien
cagccaatttcagctacggcaaccg

SEQ ID NO: 5328403 - DNA, 25 bp, Homo sapien
gataatgccagatgcgctcctgcga

SEQ ID NO: 5328404 - DNA, 25 bp, Homo sapien
tcctgcgatcgcacagaatgttcct

SEQ ID NO: 5328405 - DNA, 25 bp, Homo sapien
catgttggctgtagttatccccgga

SEQ ID NO: 5328406 - DNA, 25 bp, Homo sapien
cgggcgaagaaacgacaggctgaac

SEQ ID NO: 5328407 - DNA, 25 bp, Homo sapien
tgtttcagccggcagcgctttaaga

SEQ ID NO: 5328408 - DNA, 25 bp, Homo sapien
gatggaatccgaaatggaaacgcag

SEQ ID NO: 5328409 - DNA, 25 bp, Homo sapien
ggctgaacagctgtccgcagcagga

SEQ ID NO: 5328410 - DNA, 25 bp, Homo sapien
ccaatgttgggtatacagatgcttc

SEQ ID NO: 5328411 - DNA, 25 bp, Homo sapien
catcagtaagagctcatcttggaac

SEQ ID NO: 5328412 - DNA, 25 bp, Homo sapien
gcctggccttgatgtgtgaatattt

SEQ ID NO: 5328413 - DNA, 25 bp, Homo sapien
taggtccagataagcccactgtgag

SEQ ID NO: 5328414 - DNA, 25 bp, Homo sapien
gttaaaagcatcatttcaactgcga

SEQ ID NO: 5328415 - DNA, 25 bp, Homo sapien
gaatcgactttcaaggaatggagga

SEQ ID NO: 5328416 - DNA, 25 bp, Homo sapien
gcacttggactgaattgaaccattg

SEQ ID NO: 5328417 - DNA, 25 bp, Homo sapien
agcgtttgtatctcctgttccccag

SEQ ID NO: 5328418 - DNA, 25 bp, Homo sapien
gcaaggacaccaagcaccgggattt

SEQ ID NO: 5328419 - DNA, 25 bp, Homo sapien
gaacagttcaaaccactggctggga

SEQ ID NO: 5328420 - DNA, 25 bp, Homo sapien
ttctaaagatcccacaacatgacgt

SEQ ID NO: 5328421 - DNA, 25 bp, Homo sapien
ctcagttgaaggaacagcgatggca

SEQ ID NO: 5328422 - DNA, 25 bp, Homo sapien
tatagattagcaagatttctcacac

SEQ ID NO: 5328423 - DNA, 25 bp, Homo sapien
taagtagttacatgatcacttcagg

SEQ ID NO: 5328424 - DNA, 25 bp, Homo sapien
tcaatcatgattgcctcagacagct

SEQ ID NO: 5328425 - DNA, 25 bp, Homo sapien
tatgcatgctctatccctcgtggta

SEQ ID NO: 5328426 - DNA, 25 bp, Homo sapien
cacttagttggcttcatgaggctca

SEQ ID NO: 5328427 - DNA, 25 bp, Homo sapien
gctcagcaatgagaagtagtccctg

SEQ ID NO: 5328428 - DNA, 25 bp, Homo sapien
aaaatagctggcctaacacccggct

SEQ ID NO: 5328429 - DNA, 25 bp, Homo sapien
gaagcagctataagccctgtgcagt

SEQ ID NO: 5328430 - DNA, 25 bp, Homo sapien
ccaccatctttttgtggatatctag

SEQ ID NO: 5328431 - DNA, 25 bp, Homo sapien
caccatctttttgtggatatctagg

SEQ ID NO: 5328432 - DNA, 25 bp, Homo sapien
tgtggatatctaggccacctacaac

SEQ ID NO: 5328433 - DNA, 25 bp, Homo sapien
tgtcctcacaatcaaatatgcgtgt

SEQ ID NO: 5328434 - DNA, 25 bp, Homo sapien
tatgcgtgtcactctcagtctgttc

SEQ ID NO: 5328435 - DNA, 25 bp, Homo sapien
caagggccagtcttgcaggctacat

SEQ ID NO: 5328436 - DNA, 25 bp, Homo sapien
cataaacaggctatgggcaggatct

SEQ ID NO: 5328437 - DNA, 25 bp, Homo sapien
gaaatgggacgatcgcttgaagcta

SEQ ID NO: 5328438 - DNA, 25 bp, Homo sapien
caatgaagccagttacaagcgcttg

SEQ ID NO: 5328439 - DNA, 25 bp, Homo sapien
cactgttatagcttgagaagtcaac

SEQ ID NO: 5328440 - DNA, 25 bp, Homo sapien
tacaaatactggtggccagacacag

SEQ ID NO: 5328441 - DNA, 25 bp, Homo sapien
gagttccccattggaaatatagcca

SEQ ID NO: 5328442 - DNA, 25 bp, Homo sapien
tccatgtcatagatacggaaagcaa

SEQ ID NO: 5328443 - DNA, 25 bp, Homo sapien
tgtctacaatttgctgtaactgtgt

SEQ ID NO: 5328444 - DNA, 25 bp, Homo sapien
tgctgtaactgtgtatctttcagat

SEQ ID NO: 5328445 - DNA, 25 bp, Homo sapien
cactgaactgagagacgccctcaat

SEQ ID NO: 5328446 - DNA, 25 bp, Homo sapien
tgaactgagagacgccctcaatgaa

SEQ ID NO: 5328447 - DNA, 25 bp, Homo sapien
actgaactgagagacgccctcaatg

SEQ ID NO: 5328448 - DNA, 25 bp, Homo sapien
aactgagagacgccctcaatgaatt

SEQ ID NO: 5328449 - DNA, 25 bp, Homo sapien
cattcccatctgtgtcgaatatatc

SEQ ID NO: 5328450 - DNA, 25 bp, Homo sapien
gacatgaactcttccacactcaaag

SEQ ID NO: 5328451 - DNA, 25 bp, Homo sapien
gaaccagaattgtccaaatcaagct

SEQ ID NO: 5328452 - DNA, 25 bp, Homo sapien
tactcgctgtactaaaggattctgt

SEQ ID NO: 5328453 - DNA, 25 bp, Homo sapien
aatctaacagttatccaatagttta

SEQ ID NO: 5328454 - DNA, 25 bp, Homo sapien
agtacagcataaatacttgtatttg

SEQ ID NO: 5328455 - DNA, 25 bp, Homo sapien
actaatttattctaatagagtaagt

SEQ ID NO: 5328456 - DNA, 25 bp, Homo sapien
aagaggtatatattatgttaactaa

SEQ ID NO: 5328457 - DNA, 25 bp, Homo sapien
ctttctgtttgtttgcacctgccat

SEQ ID NO: 5328458 - DNA, 25 bp, Homo sapien
tgagtctcaagatattccaggccgg

SEQ ID NO: 5328459 - DNA, 25 bp, Homo sapien
tccaggccggataatgctaagctga

SEQ ID NO: 5328460 - DNA, 25 bp, Homo sapien
caatgctaagctgatcacggaggtt

SEQ ID NO: 5328461 - DNA, 25 bp, Homo sapien
gctaagctgatcatggaggtcacaa

SEQ ID NO: 5328462 - DNA, 25 bp, Homo sapien
tcttgaaacaacaggtttaagctat

SEQ ID NO: 5328463 - DNA, 25 bp, Homo sapien
gccagtttcctaaatattcttccag

SEQ ID NO: 5328464 - DNA, 25 bp, Homo sapien
cagtgtcaggtctcttatataaatt

SEQ ID NO: 5328465 - DNA, 25 bp, Homo sapien
attcttccagagatactttgcaagt

SEQ ID NO: 5328466 - DNA, 25 bp, Homo sapien
gcaaatgttatactgcccatgagta

SEQ ID NO: 5328467 - DNA, 25 bp, Homo sapien
atcctcactgtaagaacttaaaaat

SEQ ID NO: 5328468 - DNA, 25 bp, Homo sapien
gaaaagagtacaaatacaagctgtt

SEQ ID NO: 5328469 - DNA, 25 bp, Homo sapien
tatatgtattatggcccacaacact

SEQ ID NO: 5328470 - DNA, 25 bp, Homo sapien
cggttctcacggataaatgtaaaat

SEQ ID NO: 5328471 - DNA, 25 bp, Homo sapien
ctcgatcaattgcactctgacggtt

SEQ ID NO: 5328472 - DNA, 25 bp, Homo sapien
tctgacggttctcacggataaatgt

SEQ ID NO: 5328473 - DNA, 25 bp, Homo sapien
aattgcactctgacggttctcacgg

SEQ ID NO: 5328474 - DNA, 25 bp, Homo sapien
aaactctgacctaattttggcatcc

SEQ ID NO: 5328475 - DNA, 25 bp, Homo sapien
tagtacatgaattaaaatccaatac

SEQ ID NO: 5328476 - DNA, 25 bp, Homo sapien
agactgtgcaaatactcttttctcc

SEQ ID NO: 5328477 - DNA, 25 bp, Homo sapien
gccacatttattaccgtggtatttg

SEQ ID NO: 5328478 - DNA, 25 bp, Homo sapien
tctccaatctcttttgtacagcaag

SEQ ID NO: 5328479 - DNA, 25 bp, Homo sapien
tactactccaatacaggatcccgga

SEQ ID NO: 5328480 - DNA, 25 bp, Homo sapien
caaggcttatcccaactatacgtac

SEQ ID NO: 5328481 - DNA, 25 bp, Homo sapien
tatacgtactatttctaagacacga

SEQ ID NO: 5328482 - DNA, 25 bp, Homo sapien
tacagtaggtactcgcgtctatctt

SEQ ID NO: 5328483 - DNA, 25 bp, Homo sapien
tttgttcctttatactgcagagcag

SEQ ID NO: 5328484 - DNA, 25 bp, Homo sapien
tatacctatggaagcatcactacca

SEQ ID NO: 5328485 - DNA, 25 bp, Homo sapien
tatgcaaaaactcggtatcaccacc

SEQ ID NO: 5328486 - DNA, 25 bp, Homo sapien
caatggcgtccaaagatgtcacaaa

SEQ ID NO: 5328487 - DNA, 25 bp, Homo sapien
tagaactcattcacccaatggcgtc

SEQ ID NO: 5328488 - DNA, 25 bp, Homo sapien
gaaaagccatgtaacgtaagcagtc

SEQ ID NO: 5328489 - DNA, 25 bp, Homo sapien
acccaaggagtgaggtaagctgctc

SEQ ID NO: 5328490 - DNA, 25 bp, Homo sapien
tgaaggcctgtgtattattgttttt

SEQ ID NO: 5328491 - DNA, 25 bp, Homo sapien
gcctatggcatagttgttatcctga

SEQ ID NO: 5328492 - DNA, 25 bp, Homo sapien
tctggattagaaactccgaactttg

SEQ ID NO: 5328493 - DNA, 25 bp, Homo sapien
tgtgaagaagtccaatgccagcgga

SEQ ID NO: 5328494 - DNA, 25 bp, Homo sapien
cactggtgtgttagttaggaattcc

SEQ ID NO: 5328495 - DNA, 25 bp, Homo sapien
ttacgggcacccacaaccatgcccg

SEQ ID NO: 5328496 - DNA, 25 bp, Homo sapien
cttgcctcggtctcccaaagtgctg

SEQ ID NO: 5328497 - DNA, 25 bp, Homo sapien
gtgcaatgacacagactcggctcac

SEQ ID NO: 5328498 - DNA, 25 bp, Homo sapien
ggagtgcaatgacacagactcggct

SEQ ID NO: 5328499 - DNA, 25 bp, Homo sapien
gcctaaagcctaattacagacctct

SEQ ID NO: 5328500 - DNA, 25 bp, Homo sapien
ggaataattcacgtcacatgctcaa

SEQ ID NO: 5328501 - DNA, 25 bp, Homo sapien
aaaacagactcattgcagggcgcag

SEQ ID NO: 5328502 - DNA, 25 bp, Homo sapien
tgagtggaactctttcaattctaga

SEQ ID NO: 5328503 - DNA, 25 bp, Homo sapien
caacttgcaagttatggagatggct

SEQ ID NO: 5328504 - DNA, 25 bp, Homo sapien
gctgtgctgccatttaggctttgtt

SEQ ID NO: 5328505 - DNA, 25 bp, Homo sapien
cacttgctgcttcaacttgcaagtt

SEQ ID NO: 5328506 - DNA, 25 bp, Homo sapien
gaattgctctgcactaggctttggc

SEQ ID NO: 5328507 - DNA, 25 bp, Homo sapien
tagagagcagtgtagggttattaac

SEQ ID NO: 5328508 - DNA, 25 bp, Homo sapien
tgtgggaatggccagtcagtacagc

SEQ ID NO: 5328509 - DNA, 25 bp, Homo sapien
catgtcttggctaattgtgtggcac

SEQ ID NO: 5328510 - DNA, 25 bp, Homo sapien
cagaacacagacaactggactaagt

SEQ ID NO: 5328511 - DNA, 25 bp, Homo sapien
gtgagcacatttccaaaggataact

SEQ ID NO: 5328512 - DNA, 25 bp, Homo sapien
ccaaaggataacttgcctcatttcc

SEQ ID NO: 5328513 - DNA, 25 bp, Homo sapien
gcacatttccaaaggataacttgcc

SEQ ID NO: 5328514 - DNA, 25 bp, Homo sapien
catttccaaaggataacttgcctca

SEQ ID NO: 5328515 - DNA, 25 bp, Homo sapien
aagtgttatgtggtggtttcaagca

SEQ ID NO: 5328516 - DNA, 25 bp, Homo sapien
tccacaagacctaagaaccaaccag

SEQ ID NO: 5328517 - DNA, 25 bp, Homo sapien
tactaaaatttgcactgtcactgtg

SEQ ID NO: 5328518 - DNA, 25 bp, Homo sapien
gactctcaagagcataccggtattt

SEQ ID NO: 5328519 - DNA, 25 bp, Homo sapien
tattgatccctgaacctaatgcata

SEQ ID NO: 5328520 - DNA, 25 bp, Homo sapien
tgaactttcacagcaagaatgtctt

SEQ ID NO: 5328521 - DNA, 25 bp, Homo sapien
tccagtctagggttgggaaatacta

SEQ ID NO: 5328522 - DNA, 25 bp, Homo sapien
cacgttcagtcttcctcatgcttag

SEQ ID NO: 5328523 - DNA, 25 bp, Homo sapien
tgaaccagccttgcacccataaaac

SEQ ID NO: 5328524 - DNA, 25 bp, Homo sapien
gtctacagtgatgtcccctatttca

SEQ ID NO: 5328525 - DNA, 25 bp, Homo sapien
ctgcatctacactgacatgaggatg

SEQ ID NO: 5328526 - DNA, 25 bp, Homo sapien
ggaaacagggctactcaaattctat

SEQ ID NO: 5328527 - DNA, 25 bp, Homo sapien
tttctagggtaagtctgctggtgac

SEQ ID NO: 5328528 - DNA, 25 bp, Homo sapien
tctcgtgctgatttcaagacttgtc

SEQ ID NO: 5328529 - DNA, 25 bp, Homo sapien
tgaagtgtaatttctctcgtgctga

SEQ ID NO: 5328530 - DNA, 25 bp, Homo sapien
ccttctgattagaaacctgctatca

SEQ ID NO: 5328531 - DNA, 25 bp, Homo sapien
gattcatgctaaggtaccatcaagt

SEQ ID NO: 5328532 - DNA, 25 bp, Homo sapien
aattttgacctcatgtgctccctag

SEQ ID NO: 5328533 - DNA, 25 bp, Homo sapien
gggatccccaagtatccatgaacca

SEQ ID NO: 5328534 - DNA, 25 bp, Homo sapien
tcagcttacaaatcacacaagtgct

SEQ ID NO: 5328535 - DNA, 25 bp, Homo sapien
gatgtttccacacatggcatcagtt

SEQ ID NO: 5328536 - DNA, 25 bp, Homo sapien
aattactttggctacgaatgagaca

SEQ ID NO: 5328537 - DNA, 25 bp, Homo sapien
tttggctacgaatgagacaagattc

SEQ ID NO: 5328538 - DNA, 25 bp, Homo sapien
gctacgaatgagacaagattctatc

SEQ ID NO: 5328539 - DNA, 25 bp, Homo sapien
gatttgagttagcaatgagaacaga

SEQ ID NO: 5328540 - DNA, 25 bp, Homo sapien
caagctttggcttgctggtcaataa

SEQ ID NO: 5328541 - DNA, 25 bp, Homo sapien
caaaagcctgtatctactggcagtc

SEQ ID NO: 5328542 - DNA, 25 bp, Homo sapien
cagataaagaatggcttagcaggaa

SEQ ID NO: 5328543 - DNA, 25 bp, Homo sapien
tgatggaaagtaacctagggccagg

SEQ ID NO: 5328544 - DNA, 25 bp, Homo sapien
gaacagctatgctccgcttgaaaga

SEQ ID NO: 5328545 - DNA, 25 bp, Homo sapien
gcaacagactgtatggctcccaagc

SEQ ID NO: 5328546 - DNA, 25 bp, Homo sapien
tatcatatggcctagactctggtga

SEQ ID NO: 5328547 - DNA, 25 bp, Homo sapien
gaacgatgtggcctgaaaaatacga

SEQ ID NO: 5328548 - DNA, 25 bp, Homo sapien
actaaacggacagtatacagtaccg

SEQ ID NO: 5328549 - DNA, 25 bp, Homo sapien
gaagtgccactgaaaactgccttaa

SEQ ID NO: 5328550 - DNA, 25 bp, Homo sapien
cagtaagcagaactatggactggag

SEQ ID NO: 5328551 - DNA, 25 bp, Homo sapien
gattctgagagctatcccatacgca

SEQ ID NO: 5328552 - DNA, 25 bp, Homo sapien
tgagcttcagtcaatcgcaggcaac

SEQ ID NO: 5328553 - DNA, 25 bp, Homo sapien
tgactcaaataagacaaacgacctg

SEQ ID NO: 5328554 - DNA, 25 bp, Homo sapien
tactagaccacgttgcttgttggag

SEQ ID NO: 5328555 - DNA, 25 bp, Homo sapien
tctcatgctggtaattagaagatta

SEQ ID NO: 5328556 - DNA, 25 bp, Homo sapien
gattactgacaatgtggccgggcac

SEQ ID NO: 5328557 - DNA, 25 bp, Homo sapien
gaaggccaactgtatatgtcacaat

SEQ ID NO: 5328558 - DNA, 25 bp, Homo sapien
tgcactaaataaggtctagagagct

SEQ ID NO: 5328559 - DNA, 25 bp, Homo sapien
aattcaatgtctcactacctcctgg

SEQ ID NO: 5328560 - DNA, 25 bp, Homo sapien
taagactcccttcaatctggcatca

SEQ ID NO: 5328561 - DNA, 25 bp, Homo sapien
catcatgctatgctgctcatttccc

SEQ ID NO: 5328562 - DNA, 25 bp, Homo sapien
aattctctagctttcaccctctctg

SEQ ID NO: 5328563 - DNA, 25 bp, Homo sapien
tcctaggccatgacatgtatgtagc

SEQ ID NO: 5328564 - DNA, 25 bp, Homo sapien
caattacctgttggccataatcacc

SEQ ID NO: 5328565 - DNA, 25 bp, Homo sapien
gaatcactgttcaaacacatgtgcc

SEQ ID NO: 5328566 - DNA, 25 bp, Homo sapien
tcttgagcccaagatccatctgcct

SEQ ID NO: 5328567 - DNA, 25 bp, Homo sapien
gatctttttagacccagctagctca

SEQ ID NO: 5328568 - DNA, 25 bp, Homo sapien
tatgatctagtgtcaatccaccaga

SEQ ID NO: 5328569 - DNA, 25 bp, Homo sapien
tggttcgggaaccatcagtgctcca

SEQ ID NO: 5328570 - DNA, 25 bp, Homo sapien
cagaagctctctatgtggtgtgccc

SEQ ID NO: 5328571 - DNA, 25 bp, Homo sapien
taactgaatcgcatgatggagtatc

SEQ ID NO: 5328572 - DNA, 25 bp, Homo sapien
tatacgcggaatagcactctgaact

SEQ ID NO: 5328573 - DNA, 25 bp, Homo sapien
ttctgacaactgttcaaagactttt

SEQ ID NO: 5328574 - DNA, 25 bp, Homo sapien
cgtcaaccagtttaagtcttctgac

SEQ ID NO: 5328575 - DNA, 25 bp, Homo sapien
ctcggagaagtgttgcgctcaggct

SEQ ID NO: 5328576 - DNA, 25 bp, Homo sapien
ggactcactgcagcggctcgcgctg

SEQ ID NO: 5328577 - DNA, 25 bp, Homo sapien
taaggtcgagattcagagccggaga

SEQ ID NO: 5328578 - DNA, 25 bp, Homo sapien
cgccggagccgtgacggactcactg

SEQ ID NO: 5328579 - DNA, 25 bp, Homo sapien
cgtgtaccgacttggatccactaca

SEQ ID NO: 5328580 - DNA, 25 bp, Homo sapien
gaaaaatccaagtcctgcgagaggc

SEQ ID NO: 5328581 - DNA, 25 bp, Homo sapien
aggtatctgtgcatccgtgtaccga

SEQ ID NO: 5328582 - DNA, 25 bp, Homo sapien
ttgcacggcccatcaggactgctgt

SEQ ID NO: 5328583 - DNA, 25 bp, Homo sapien
gaagggatacttcccactcgcagaa

SEQ ID NO: 5328584 - DNA, 25 bp, Homo sapien
cagactcccctttggcggagtccat

SEQ ID NO: 5328585 - DNA, 25 bp, Homo sapien
tgcattcccataaaccgtccagact

SEQ ID NO: 5328586 - DNA, 25 bp, Homo sapien
ggcaaacgaggagaagggatacttc

SEQ ID NO: 5328587 - DNA, 25 bp, Homo sapien
agaacgcagggatgcaagctagccc

SEQ ID NO: 5328588 - DNA, 25 bp, Homo sapien
tagttccataccacaagattccctt

SEQ ID NO: 5328589 - DNA, 25 bp, Homo sapien
cttttttgtaatgaggagaacgcag

SEQ ID NO: 5328590 - DNA, 25 bp, Homo sapien
cagggtgtggttgagaaagggctcc

SEQ ID NO: 5328591 - DNA, 25 bp, Homo sapien
ttcttgaggaaatttgtctatacat

SEQ ID NO: 5328592 - DNA, 25 bp, Homo sapien
ctgttcagtgcccacttttcttgag

SEQ ID NO: 5328593 - DNA, 25 bp, Homo sapien
ttttcttgaggaaatttgtctatac

SEQ ID NO: 5328594 - DNA, 25 bp, Homo sapien
acttttcttgaggaaatttgtctat

SEQ ID NO: 5328595 - DNA, 25 bp, Homo sapien
caaaagcatatattgggaaaggaac

SEQ ID NO: 5328596 - DNA, 25 bp, Homo sapien
caaaaactttgccagacattggcct

SEQ ID NO: 5328597 - DNA, 25 bp, Homo sapien
gccaactggtcttcaacaagattga

SEQ ID NO: 5328598 - DNA, 25 bp, Homo sapien
aagccaattacctacagccaactgg

SEQ ID NO: 5328599 - DNA, 25 bp, Homo sapien
tgttcctgctacaatcgacactgag

SEQ ID NO: 5328600 - DNA, 25 bp, Homo sapien
ggaactgcgccactgagactcaata

SEQ ID NO: 5328601 - DNA, 25 bp, Homo sapien
tgctagtagtaccagagccctatgg

SEQ ID NO: 5328602 - DNA, 25 bp, Homo sapien
gagctctatgcagttccaggaggga

SEQ ID NO: 5328603 - DNA, 25 bp, Homo sapien
cattttaacaagcatccccgataat

SEQ ID NO: 5328604 - DNA, 25 bp, Homo sapien
tgataagaatcacctaaagtgctta

SEQ ID NO: 5328605 - DNA, 25 bp, Homo sapien
ccgataattctgatggcctgtgaga

SEQ ID NO: 5328606 - DNA, 25 bp, Homo sapien
gatgctttggatttactctcagaga

SEQ ID NO: 5328607 - DNA, 25 bp, Homo sapien
tcatatgtaagagagatctcttggg

SEQ ID NO: 5328608 - DNA, 25 bp, Homo sapien
tcacattcatatgtaagagagatct

SEQ ID NO: 5328609 - DNA, 25 bp, Homo sapien
ctcttggggtcgttgttccaggcac

SEQ ID NO: 5328610 - DNA, 25 bp, Homo sapien
agatctcttggggtcgttgttccag

SEQ ID NO: 5328611 - DNA, 25 bp, Homo sapien
gctgttttcactaatacactgcatt

SEQ ID NO: 5328612 - DNA, 25 bp, Homo sapien
tagcagctttaagcctgtcttccct

SEQ ID NO: 5328613 - DNA, 25 bp, Homo sapien
ggatgttctccaagcattttagcag

SEQ ID NO: 5328614 - DNA, 25 bp, Homo sapien
acactgcatttctgtcaagcttctc

SEQ ID NO: 5328615 - DNA, 25 bp, Homo sapien
ttgggccacggtctcccttgggatg

SEQ ID NO: 5328616 - DNA, 25 bp, Homo sapien
ccacggtctcccttgggatggtcat

SEQ ID NO: 5328617 - DNA, 25 bp, Homo sapien
ctcttgggccacggtctcccttggg

SEQ ID NO: 5328618 - DNA, 25 bp, Homo sapien
gccacggtctcccttgggatggtca

SEQ ID NO: 5328619 - DNA, 25 bp, Homo sapien
atacgaacgtgacaaggcaaattca

SEQ ID NO: 5328620 - DNA, 25 bp, Homo sapien
cttaggactatcattaataatacga

SEQ ID NO: 5328621 - DNA, 25 bp, Homo sapien
cattaataatacgaacgtgacaagg

SEQ ID NO: 5328622 - DNA, 25 bp, Homo sapien
gactatcattaataatacgaacgtg

SEQ ID NO: 5328623 - DNA, 25 bp, Homo sapien
taaggcctgcgctggtttatctaaa

SEQ ID NO: 5328624 - DNA, 25 bp, Homo sapien
gaatggtcaagagcaggacaagcct

SEQ ID NO: 5328625 - DNA, 25 bp, Homo sapien
tatgaccgagaacaactggatgcag

SEQ ID NO: 5328626 - DNA, 25 bp, Homo sapien
tagggatgccatcaatgtgcgtgtc

SEQ ID NO: 5328627 - DNA, 25 bp, Homo sapien
actggcagtgatcccgcttgtggta

SEQ ID NO: 5328628 - DNA, 25 bp, Homo sapien
cactgtctcgaaggtcccaatgtct

SEQ ID NO: 5328629 - DNA, 25 bp, Homo sapien
tgttcacccacatcagactgcgtgt

SEQ ID NO: 5328630 - DNA, 25 bp, Homo sapien
gactgcgtgtctcgttgggcttgca

SEQ ID NO: 5328631 - DNA, 25 bp, Homo sapien
tgagagctaacattagtgatgtagc

SEQ ID NO: 5328632 - DNA, 25 bp, Homo sapien
cattagtgatgtagctcctggataa

SEQ ID NO: 5328633 - DNA, 25 bp, Homo sapien
cacgagcaatagatgagagctaaca

SEQ ID NO: 5328634 - DNA, 25 bp, Homo sapien
ctcattctgccacgagcaatagatg

SEQ ID NO: 5328635 - DNA, 25 bp, Homo sapien
gcaaggctcggaaggctttccttta

SEQ ID NO: 5328636 - DNA, 25 bp, Homo sapien
gaaggctttcctttagtggtctagc

SEQ ID NO: 5328637 - DNA, 25 bp, Homo sapien
tggtctgcaaggctcggaaggcttt

SEQ ID NO: 5328638 - DNA, 25 bp, Homo sapien
agtggtctagctccctcctttatga

SEQ ID NO: 5328639 - DNA, 25 bp, Homo sapien
aaggtaggccctgtaaatcactgca

SEQ ID NO: 5328640 - DNA, 25 bp, Homo sapien
taaaggtgtgagtacattcaggccc

SEQ ID NO: 5328641 - DNA, 25 bp, Homo sapien
tacttataagtcaggagtccatgcc

SEQ ID NO: 5328642 - DNA, 25 bp, Homo sapien
tcttgcagctgagaagagtacctgg

SEQ ID NO: 5328643 - DNA, 25 bp, Homo sapien
tcaagatcacgtagaaatccattgg

SEQ ID NO: 5328644 - DNA, 25 bp, Homo sapien
cgagtgtacttctttctattcacca

SEQ ID NO: 5328645 - DNA, 25 bp, Homo sapien
ccactggcatagaatctcgagtgta

SEQ ID NO: 5328646 - DNA, 25 bp, Homo sapien
accatgccacctacttctactgcag

SEQ ID NO: 5328647 - DNA, 25 bp, Homo sapien
gaaagtcagattctcgaatactgtc

SEQ ID NO: 5328648 - DNA, 25 bp, Homo sapien
cagattctcgaatactgtcatttac

SEQ ID NO: 5328649 - DNA, 25 bp, Homo sapien
tcgaatactgtcatttacaatcaca

SEQ ID NO: 5328650 - DNA, 25 bp, Homo sapien
tactgtcatttacaatcacaccaaa

SEQ ID NO: 5328651 - DNA, 25 bp, Homo sapien
taattgtattaggacactgtgggca

SEQ ID NO: 5328652 - DNA, 25 bp, Homo sapien
aactgacctttggagaagcatagat

SEQ ID NO: 5328653 - DNA, 25 bp, Homo sapien
gacaaactatacctagtgcagagag

SEQ ID NO: 5328654 - DNA, 25 bp, Homo sapien
gaaaaggctaacatgtttgactaca

SEQ ID NO: 5328655 - DNA, 25 bp, Homo sapien
ctggcactacaggtgtggtatcacc

SEQ ID NO: 5328656 - DNA, 25 bp, Homo sapien
ggtgtggtatcaccacacccggtta

SEQ ID NO: 5328657 - DNA, 25 bp, Homo sapien
tgcccaggctcacacatatatattc

SEQ ID NO: 5328658 - DNA, 25 bp, Homo sapien
gttgcccaggctcacacatatatat

SEQ ID NO: 5328659 - DNA, 25 bp, Homo sapien
cattggatgcaaagggatgagctgc

SEQ ID NO: 5328660 - DNA, 25 bp, Homo sapien
tcctataaagctagagggcagacag

SEQ ID NO: 5328661 - DNA, 25 bp, Homo sapien
tactgagctaagatcactggagagg

SEQ ID NO: 5328662 - DNA, 25 bp, Homo sapien
gcccagtttgcaagcagcagtttag

SEQ ID NO: 5328663 - DNA, 25 bp, Homo sapien
cagatgcttgaaggaaatccacaac

SEQ ID NO: 5328664 - DNA, 25 bp, Homo sapien
gggtcagtctgtcatgcaaaagagc

SEQ ID NO: 5328665 - DNA, 25 bp, Homo sapien
tagactataactgggaaaatggcaa

SEQ ID NO: 5328666 - DNA, 25 bp, Homo sapien
gaatattgtggcctacttggaatca

SEQ ID NO: 5328667 - DNA, 25 bp, Homo sapien
tgatctggatgggttgccgttctcc

SEQ ID NO: 5328668 - DNA, 25 bp, Homo sapien
tagacttcagttccagtgggacaag

SEQ ID NO: 5328669 - DNA, 25 bp, Homo sapien
tatgtacccgtataaacaactctgt

SEQ ID NO: 5328670 - DNA, 25 bp, Homo sapien
tccccatcaggctctttagacttca

SEQ ID NO: 5328671 - DNA, 25 bp, Homo sapien
ttccgggtaggctactgcatgctcc

SEQ ID NO: 5328672 - DNA, 25 bp, Homo sapien
gggtaggctactgcatgctcccaca

SEQ ID NO: 5328673 - DNA, 25 bp, Homo sapien
cagttcttccgggtaggctactgca

SEQ ID NO: 5328674 - DNA, 25 bp, Homo sapien
cacccgcagttcttccgggtaggct

SEQ ID NO: 5328675 - DNA, 25 bp, Homo sapien
tactgggtgcattatccagcggtcg

SEQ ID NO: 5328676 - DNA, 25 bp, Homo sapien
tttcccgccagaggtctactgggtg

SEQ ID NO: 5328677 - DNA, 25 bp, Homo sapien
cgtccctgccatggataaaccaaaa

SEQ ID NO: 5328678 - DNA, 25 bp, Homo sapien
agcggtcgctggcaagaaatcgtcc

SEQ ID NO: 5328679 - DNA, 25 bp, Homo sapien
aaggcggacagggagtgacctcttc

SEQ ID NO: 5328680 - DNA, 25 bp, Homo sapien
gggcggccgctctcttactagtgtc

SEQ ID NO: 5328681 - DNA, 25 bp, Homo sapien
gaaaaccgtgaaactaggccagaga

SEQ ID NO: 5328682 - DNA, 25 bp, Homo sapien
tttaaagaacccactgaggtcactg

SEQ ID NO: 5328683 - DNA, 25 bp, Homo sapien
gacctgcagcgtgctgggtttaatc

SEQ ID NO: 5328684 - DNA, 25 bp, Homo sapien
cctgcagcgtgctgggtttaatctt

SEQ ID NO: 5328685 - DNA, 25 bp, Homo sapien
ctgcagcgtgctgggtttaatcttc

SEQ ID NO: 5328686 - DNA, 25 bp, Homo sapien
tcgacctgcagcgtgctgggtttaa

SEQ ID NO: 5328687 - DNA, 25 bp, Homo sapien
gcagcttgatggtgcggttctggcc

SEQ ID NO: 5328688 - DNA, 25 bp, Homo sapien
gcttgatggtgcggttctggccgaa

SEQ ID NO: 5328689 - DNA, 25 bp, Homo sapien
tctggccgaagcgctgcccgtccac

SEQ ID NO: 5328690 - DNA, 25 bp, Homo sapien
ttgatggtgcggttctggccgaagc

SEQ ID NO: 5328691 - DNA, 25 bp, Homo sapien
cattaggctggatgcgcagcgcgat

SEQ ID NO: 5328692 - DNA, 25 bp, Homo sapien
tgcgcagcgcgatggagaggcgcac

SEQ ID NO: 5328693 - DNA, 25 bp, Homo sapien
agaggcgcacgaggcccggcaggtc

SEQ ID NO: 5328694 - DNA, 25 bp, Homo sapien
aaagaccgggccgtcattaggctgg

SEQ ID NO: 5328695 - DNA, 25 bp, Homo sapien
tctgggcgagggtctggcgcggcgg

SEQ ID NO: 5328696 - DNA, 25 bp, Homo sapien
gtctgggcgagggtctggcgcggcg

SEQ ID NO: 5328697 - DNA, 25 bp, Homo sapien
ccactcggcgaggaagcgggcccaa

SEQ ID NO: 5328698 - DNA, 25 bp, Homo sapien
gagcagctccttaggctgtggcccc

SEQ ID NO: 5328699 - DNA, 25 bp, Homo sapien
cgtccgcccgggcttttgaggagca

SEQ ID NO: 5328700 - DNA, 25 bp, Homo sapien
gagacggctccaaggccgcgcgctt

SEQ ID NO: 5328701 - DNA, 25 bp, Homo sapien
ccgaaggctcgctctggcccgcagg

SEQ ID NO: 5328702 - DNA, 25 bp, Homo sapien
caggccgccgcgcagatccgcgcag

SEQ ID NO: 5328703 - DNA, 25 bp, Homo sapien
cccgcaggccgccgcgcagatccgc

SEQ ID NO: 5328704 - DNA, 25 bp, Homo sapien
tggcccgcaggccgccgcgcagatc

SEQ ID NO: 5328705 - DNA, 25 bp, Homo sapien
gagggagttaatcctgtttacgcac

SEQ ID NO: 5328706 - DNA, 25 bp, Homo sapien
cgagggagttaatcctgtttacgca

SEQ ID NO: 5328707 - DNA, 25 bp, Homo sapien
ctgggggcgagggagttaatcctgt

SEQ ID NO: 5328708 - DNA, 25 bp, Homo sapien
gcgagggagttaatcctgtttacgc

SEQ ID NO: 5328709 - DNA, 25 bp, Homo sapien
tcggccagctacgtgaggtggacac

SEQ ID NO: 5328710 - DNA, 25 bp, Homo sapien
gggaagcggacatttaggctcctcc

SEQ ID NO: 5328711 - DNA, 25 bp, Homo sapien
taagcgaccactatgccaaggagcg

SEQ ID NO: 5328712 - DNA, 25 bp, Homo sapien
gaaggcgctggagttaagcgaccac

SEQ ID NO: 5328713 - DNA, 25 bp, Homo sapien
ggaagtcctatcagttcttcacaag

SEQ ID NO: 5328714 - DNA, 25 bp, Homo sapien
catagtttactcagttgctccggta

SEQ ID NO: 5328715 - DNA, 25 bp, Homo sapien
tatctcagtaagaggcatcatagtt

SEQ ID NO: 5328716 - DNA, 25 bp, Homo sapien
tcttcacaagcaagctgtttccagg

SEQ ID NO: 5328717 - DNA, 25 bp, Homo sapien
caaacaagggccatttcccgagtct

SEQ ID NO: 5328718 - DNA, 25 bp, Homo sapien
cccgagtctcctgtgatggatccaa

SEQ ID NO: 5328719 - DNA, 25 bp, Homo sapien
gatgctgacgttttgattactgagg

SEQ ID NO: 5328720 - DNA, 25 bp, Homo sapien
gattcaggttgcttaccatgtgccc

SEQ ID NO: 5328721 - DNA, 25 bp, Homo sapien
ctctgctcattgtgaactccttctt

SEQ ID NO: 5328722 - DNA, 25 bp, Homo sapien
tcattgtgaactccttcttctcctt

SEQ ID NO: 5328723 - DNA, 25 bp, Homo sapien
tcttctccttcctctgaagacccag

SEQ ID NO: 5328724 - DNA, 25 bp, Homo sapien
tgctcattgtgaactccttcttctc

SEQ ID NO: 5328725 - DNA, 25 bp, Homo sapien
cctggtcagtgtgctggagtctcca

SEQ ID NO: 5328726 - DNA, 25 bp, Homo sapien
tctgctagatcagccaagtgctggg

SEQ ID NO: 5328727 - DNA, 25 bp, Homo sapien
ggaagattgaggagaggatttctct

SEQ ID NO: 5328728 - DNA, 25 bp, Homo sapien
ctgggctactgctgcgtactgtgat

SEQ ID NO: 5328729 - DNA, 25 bp, Homo sapien
tggcagaaccagcatgaacatccca

SEQ ID NO: 5328730 - DNA, 25 bp, Homo sapien
cttgtccacattgaaaggtttgtca

SEQ ID NO: 5328731 - DNA, 25 bp, Homo sapien
tccacattgaaaggtttgtcatcat

SEQ ID NO: 5328732 - DNA, 25 bp, Homo sapien
agaaccagcatgaacatcccaggag

SEQ ID NO: 5328733 - DNA, 25 bp, Homo sapien
gcaactgaatgagtggggccacttg

SEQ ID NO: 5328734 - DNA, 25 bp, Homo sapien
caggcaagacctagcgcagggagtg

SEQ ID NO: 5328735 - DNA, 25 bp, Homo sapien
tgggcctggggcaactgaatgagtg

SEQ ID NO: 5328736 - DNA, 25 bp, Homo sapien
agacctagcgcagggagtgctgtcc

SEQ ID NO: 5328737 - DNA, 25 bp, Homo sapien
tcaggcgcctggtacatactaaaca

SEQ ID NO: 5328738 - DNA, 25 bp, Homo sapien
caatggcgatgttcagcagattcac

SEQ ID NO: 5328739 - DNA, 25 bp, Homo sapien
cagattcacaaatgccggaggttcc

SEQ ID NO: 5328740 - DNA, 25 bp, Homo sapien
cactaggtgtcgctaagtaggcgcg

SEQ ID NO: 5328741 - DNA, 25 bp, Homo sapien
taggaatgtttcctgttcaaccagt

SEQ ID NO: 5328742 - DNA, 25 bp, Homo sapien
agcgtggtagcacatagaatgttgg

SEQ ID NO: 5328743 - DNA, 25 bp, Homo sapien
tcctgttcaaccagttgggttgaaa

SEQ ID NO: 5328744 - DNA, 25 bp, Homo sapien
caccggctacctgctcatcttagga

SEQ ID NO: 5328745 - DNA, 25 bp, Homo sapien
gacagcacccattgaagcagatatg

SEQ ID NO: 5328746 - DNA, 25 bp, Homo sapien
ttttgaccctgaccactaactagtg

SEQ ID NO: 5328747 - DNA, 25 bp, Homo sapien
aatgatattgcgttcgtgcctcagc

SEQ ID NO: 5328748 - DNA, 25 bp, Homo sapien
gaactactggccagctcactggatg

SEQ ID NO: 5328749 - DNA, 25 bp, Homo sapien
cttcccattgcagacaagcaggata

SEQ ID NO: 5328750 - DNA, 25 bp, Homo sapien
gcttcccattgcagacaagcaggat

SEQ ID NO: 5328751 - DNA, 25 bp, Homo sapien
gcagaggaaatggctgcactggaat

SEQ ID NO: 5328752 - DNA, 25 bp, Homo sapien
ggcttcccattgcagacaagcagga

SEQ ID NO: 5328753 - DNA, 25 bp, Homo sapien
gggaaatagagaagacctcgccaca

SEQ ID NO: 5328754 - DNA, 25 bp, Homo sapien
ggaaatagagaagacctcgccacat

SEQ ID NO: 5328755 - DNA, 25 bp, Homo sapien
aatctccacaaatgtctatttttct

SEQ ID NO: 5328756 - DNA, 25 bp, Homo sapien
tctgaaatctccacaaatgtctatt

SEQ ID NO: 5328757 - DNA, 25 bp, Homo sapien
tctccacaaatgtctatttttcttc

SEQ ID NO: 5328758 - DNA, 25 bp, Homo sapien
gaaatctccacaaatgtctattttt

SEQ ID NO: 5328759 - DNA, 25 bp, Homo sapien
tgttgtcaaagttggccttgtagag

SEQ ID NO: 5328760 - DNA, 25 bp, Homo sapien
gaaggttatgttgtcaaagttggcc

SEQ ID NO: 5328761 - DNA, 25 bp, Homo sapien
cttcaggtagaaggttatgttgtca

SEQ ID NO: 5328762 - DNA, 25 bp, Homo sapien
aggtgggggactcaactgcgctgct

SEQ ID NO: 5328763 - DNA, 25 bp, Homo sapien
ttaacatggcactttcaggaacaga

SEQ ID NO: 5328764 - DNA, 25 bp, Homo sapien
tctttaacatggcactttcaggaac

SEQ ID NO: 5328765 - DNA, 25 bp, Homo sapien
taacatggcactttcaggaacagac

SEQ ID NO: 5328766 - DNA, 25 bp, Homo sapien
tttaacatggcactttcaggaacag

SEQ ID NO: 5328767 - DNA, 25 bp, Homo sapien
gctacatcccacactcgatgctgga

SEQ ID NO: 5328768 - DNA, 25 bp, Homo sapien
tcccacactcgatgctggaatgaca

SEQ ID NO: 5328769 - DNA, 25 bp, Homo sapien
aaagctacatcccacactcgatgct

SEQ ID NO: 5328770 - DNA, 25 bp, Homo sapien
catcccacactcgatgctggaatga

SEQ ID NO: 5328771 - DNA, 25 bp, Homo sapien
aactggaagatgtatcccacagcaa

SEQ ID NO: 5328772 - DNA, 25 bp, Homo sapien
tgcaggtgctcagaagcaccacccg

SEQ ID NO: 5328773 - DNA, 25 bp, Homo sapien
aagatgtatcccacagcaatgcagg

SEQ ID NO: 5328774 - DNA, 25 bp, Homo sapien
gtgctcagaagcaccacccggttct

SEQ ID NO: 5328775 - DNA, 25 bp, Homo sapien
agaacgcaatcctggacgcggcaaa

SEQ ID NO: 5328776 - DNA, 25 bp, Homo sapien
gaacgcaatcctggacgcggcaaac

SEQ ID NO: 5328777 - DNA, 25 bp, Homo sapien
cagaacgcaatcctggacgcggcaa

SEQ ID NO: 5328778 - DNA, 25 bp, Homo sapien
tccgcggactcttggagactgtgga

SEQ ID NO: 5328779 - DNA, 25 bp, Homo sapien
ggacctggaggtccgcggactcttg

SEQ ID NO: 5328780 - DNA, 25 bp, Homo sapien
aagttggcggccgcttctgtactcc

SEQ ID NO: 5328781 - DNA, 25 bp, Homo sapien
ggtgacagaagtgaagttggcggcc

SEQ ID NO: 5328782 - DNA, 25 bp, Homo sapien
aggcaggaggactcaatgctgcggg

SEQ ID NO: 5328783 - DNA, 25 bp, Homo sapien
cacaaactgtgtgcccgaggcagga

SEQ ID NO: 5328784 - DNA, 25 bp, Homo sapien
agttcacaaactgtgtgcccgaggc

SEQ ID NO: 5328785 - DNA, 25 bp, Homo sapien
tgggcaacatggagatgtagttcac

SEQ ID NO: 5328786 - DNA, 25 bp, Homo sapien
tcaggatgcacagccacgtctaata

SEQ ID NO: 5328787 - DNA, 25 bp, Homo sapien
aggatgcacagccacgtctaatagc

SEQ ID NO: 5328788 - DNA, 25 bp, Homo sapien
atcaggatgcacagccacgtctaat

SEQ ID NO: 5328789 - DNA, 25 bp, Homo sapien
gatgcacagccacgtctaatagcat

SEQ ID NO: 5328790 - DNA, 25 bp, Homo sapien
gtgctgcagctccagtcggccgcat

SEQ ID NO: 5328791 - DNA, 25 bp, Homo sapien
tgcagctccagtcggccgcatccgt

SEQ ID NO: 5328792 - DNA, 25 bp, Homo sapien
ggtgctgcagctccagtcggccgca

SEQ ID NO: 5328793 - DNA, 25 bp, Homo sapien
gctccagtcggccgcatccgtgtgg

SEQ ID NO: 5328794 - DNA, 25 bp, Homo sapien
cgaagaggagacgcctccagacttg

SEQ ID NO: 5328795 - DNA, 25 bp, Homo sapien
ctccagacttgtcagccaccaagac

SEQ ID NO: 5328796 - DNA, 25 bp, Homo sapien
aagaggagacgcctccagacttgtc

SEQ ID NO: 5328797 - DNA, 25 bp, Homo sapien
gcctccagacttgtcagccaccaag

SEQ ID NO: 5328798 - DNA, 25 bp, Homo sapien
caggtccgtacacctccttgtcatg

SEQ ID NO: 5328799 - DNA, 25 bp, Homo sapien
ggtcaggtccgtacacctccttgtc

SEQ ID NO: 5328800 - DNA, 25 bp, Homo sapien
tgtgaaggtcaggtccgtacacctc

SEQ ID NO: 5328801 - DNA, 25 bp, Homo sapien
cttctcttcggaggctgtgaaggtc

SEQ ID NO: 5328802 - DNA, 25 bp, Homo sapien
aaggtggaccgacaattgcaccgct

SEQ ID NO: 5328803 - DNA, 25 bp, Homo sapien
ggtggaccgacaattgcaccgctcc

SEQ ID NO: 5328804 - DNA, 25 bp, Homo sapien
gaaggtggaccgacaattgcaccgc

SEQ ID NO: 5328805 - DNA, 25 bp, Homo sapien
gagaaggtggaccgacaattgcacc

SEQ ID NO: 5328806 - DNA, 25 bp, Homo sapien
gtggtctggaaccggctgctcccct

SEQ ID NO: 5328807 - DNA, 25 bp, Homo sapien
ggaggtggtctggaaccggctgctc

SEQ ID NO: 5328808 - DNA, 25 bp, Homo sapien
gtctggaaccggctgctcccctgca

SEQ ID NO: 5328809 - DNA, 25 bp, Homo sapien
aggtggtctggaaccggctgctccc

SEQ ID NO: 5328810 - DNA, 25 bp, Homo sapien
ccgcacaacgccagccccgcagagt

SEQ ID NO: 5328811 - DNA, 25 bp, Homo sapien
gcagagtctgccttgtgcctacccg

SEQ ID NO: 5328812 - DNA, 25 bp, Homo sapien
agccccgcagagtctgccttgtgcc

SEQ ID NO: 5328813 - DNA, 25 bp, Homo sapien
cccgcagagtctgccttgtgcctac

SEQ ID NO: 5328814 - DNA, 25 bp, Homo sapien
agaacggacttctgctgtatgttcc

SEQ ID NO: 5328815 - DNA, 25 bp, Homo sapien
catttgatgatttcgtgacagaacg

SEQ ID NO: 5328816 - DNA, 25 bp, Homo sapien
tgatttcgtgacagaacggacttct

SEQ ID NO: 5328817 - DNA, 25 bp, Homo sapien
gtgttgaaagccacaaacacatttg

SEQ ID NO: 5328818 - DNA, 25 bp, Homo sapien
gattgaggtataggagtcttccttc

SEQ ID NO: 5328819 - DNA, 25 bp, Homo sapien
cacaatcggggattgaggtatagga

SEQ ID NO: 5328820 - DNA, 25 bp, Homo sapien
tcttagcacaatcggggattgaggt

SEQ ID NO: 5328821 - DNA, 25 bp, Homo sapien
agttttcttagcacaatcggggatt

SEQ ID NO: 5328822 - DNA, 25 bp, Homo sapien
tcggctgtgaggctcctttgctgtg

SEQ ID NO: 5328823 - DNA, 25 bp, Homo sapien
tggtttaggctctcaatcccacggc

SEQ ID NO: 5328824 - DNA, 25 bp, Homo sapien
tgtggctactgttactctaaagaca

SEQ ID NO: 5328825 - DNA, 25 bp, Homo sapien
gcagcaacctctattgggctcttgg

SEQ ID NO: 5328826 - DNA, 25 bp, Homo sapien
gaagttatggattgtttccaggcca

SEQ ID NO: 5328827 - DNA, 25 bp, Homo sapien
tatagagcatctagtgtgtgccagg

SEQ ID NO: 5328828 - DNA, 25 bp, Homo sapien
gattactccaggtatatcaaacagc

SEQ ID NO: 5328829 - DNA, 25 bp, Homo sapien
gaccacatcattaaaggccctatgg

SEQ ID NO: 5328830 - DNA, 25 bp, Homo sapien
cagattaagactgactggtgaggaa

SEQ ID NO: 5328831 - DNA, 25 bp, Homo sapien
caacagtttcaaccatatggagtga

SEQ ID NO: 5328832 - DNA, 25 bp, Homo sapien
tgggcaacgaaaccacatcaggtgg

SEQ ID NO: 5328833 - DNA, 25 bp, Homo sapien
ttaacaagtagaatgcatccagtgg

SEQ ID NO: 5328834 - DNA, 25 bp, Homo sapien
agtgagtagcatataatctgttttt

SEQ ID NO: 5328835 - DNA, 25 bp, Homo sapien
atagtgagtagcatataatctgttt

SEQ ID NO: 5328836 - DNA, 25 bp, Homo sapien
tagtgagtagcatataatctgtttt

SEQ ID NO: 5328837 - DNA, 25 bp, Homo sapien
tatagtgagtagcatataatctgtt

SEQ ID NO: 5328838 - DNA, 25 bp, Homo sapien
ggacaaactttagccctgagatgac

SEQ ID NO: 5328839 - DNA, 25 bp, Homo sapien
ttcagctcctgagagccgttccagg

SEQ ID NO: 5328840 - DNA, 25 bp, Homo sapien
agagttttaccaggctagtgtggca

SEQ ID NO: 5328841 - DNA, 25 bp, Homo sapien
ttagctagtcttcccatgagcctag

SEQ ID NO: 5328842 - DNA, 25 bp, Homo sapien
aagatatcgcttttgcaacctaaga

SEQ ID NO: 5328843 - DNA, 25 bp, Homo sapien
ctttcaaagacctgagatttgtgat

SEQ ID NO: 5328844 - DNA, 25 bp, Homo sapien
tgcaacctaagagtcatttaagttt

SEQ ID NO: 5328845 - DNA, 25 bp, Homo sapien
caaaatgaacgaataaagatatcgc

SEQ ID NO: 5328846 - DNA, 25 bp, Homo sapien
ttccagttctgcttctagaatttcc

SEQ ID NO: 5328847 - DNA, 25 bp, Homo sapien
ttatctttccagttctgcttctaga

SEQ ID NO: 5328848 - DNA, 25 bp, Homo sapien
ccagttctgcttctagaatttcccc

SEQ ID NO: 5328849 - DNA, 25 bp, Homo sapien
atctttccagttctgcttctagaat

SEQ ID NO: 5328850 - DNA, 25 bp, Homo sapien
gtatctgccacttagccattcgtgt

SEQ ID NO: 5328851 - DNA, 25 bp, Homo sapien
tctggtaggctaatgggagaacaaa

SEQ ID NO: 5328852 - DNA, 25 bp, Homo sapien
gagaacaaatgttgctgtatctgcc

SEQ ID NO: 5328853 - DNA, 25 bp, Homo sapien
catgtatctgcatccattgggtaca

SEQ ID NO: 5328854 - DNA, 25 bp, Homo sapien
tgcacagactccgaatgtccagctg

SEQ ID NO: 5328855 - DNA, 25 bp, Homo sapien
gcatgtcaatgaagccctgcacaga

SEQ ID NO: 5328856 - DNA, 25 bp, Homo sapien
catctatttctcttcggcacacagc

SEQ ID NO: 5328857 - DNA, 25 bp, Homo sapien
gaataaccactttctagatcatcat

SEQ ID NO: 5328858 - DNA, 25 bp, Homo sapien
tcagcatccacagagttcgcttctg

SEQ ID NO: 5328859 - DNA, 25 bp, Homo sapien
ccacagagttcgcttctgtgtgaga

SEQ ID NO: 5328860 - DNA, 25 bp, Homo sapien
agcatccacagagttcgcttctgtg

SEQ ID NO: 5328861 - DNA, 25 bp, Homo sapien
catccacagagttcgcttctgtgtg

SEQ ID NO: 5328862 - DNA, 25 bp, Homo sapien
gttttaagttatcctcatatgtaac

SEQ ID NO: 5328863 - DNA, 25 bp, Homo sapien
taaaatgggccaatgctgccgctct

SEQ ID NO: 5328864 - DNA, 25 bp, Homo sapien
tactttaagtcagatgctttttggg

SEQ ID NO: 5328865 - DNA, 25 bp, Homo sapien
catgctcagtctccaaataggagta

SEQ ID NO: 5328866 - DNA, 25 bp, Homo sapien
tcttgcaaggattaacagtgatagt

SEQ ID NO: 5328867 - DNA, 25 bp, Homo sapien
gaaagcatgactgggtacatcacca

SEQ ID NO: 5328868 - DNA, 25 bp, Homo sapien
tactcagctatgttttcggacttgc

SEQ ID NO: 5328869 - DNA, 25 bp, Homo sapien
tggtgtaggcttcccaaatcagttg

SEQ ID NO: 5328870 - DNA, 25 bp, Homo sapien
gaccacggtggctcccattcatgat

SEQ ID NO: 5328871 - DNA, 25 bp, Homo sapien
atagctcttcgcatcccgcccacct

SEQ ID NO: 5328872 - DNA, 25 bp, Homo sapien
cgcgatttaaatccaccggaattcg

SEQ ID NO: 5328873 - DNA, 25 bp, Homo sapien
ggaattcgaatccttccccatagct

SEQ ID NO: 5328874 - DNA, 25 bp, Homo sapien
taggccgcggtagcttctcctcccg

SEQ ID NO: 5328875 - DNA, 25 bp, Homo sapien
tcctcctaggaaacaagatagcaaa

SEQ ID NO: 5328876 - DNA, 25 bp, Homo sapien
taactgcttgttgcagaatcctggc

SEQ ID NO: 5328877 - DNA, 25 bp, Homo sapien
taggcttcagtatagactcttcagg

SEQ ID NO: 5328878 - DNA, 25 bp, Homo sapien
gacctggcagctctatacttttaac

SEQ ID NO: 5328879 - DNA, 25 bp, Homo sapien
cagagctctcagatagcggacttca

SEQ ID NO: 5328880 - DNA, 25 bp, Homo sapien
agttgagtttatctcaagacctaag

SEQ ID NO: 5328881 - DNA, 25 bp, Homo sapien
tttattttgcagagctctcagatag

SEQ ID NO: 5328882 - DNA, 25 bp, Homo sapien
tttgcagagctctcagatagcggac

SEQ ID NO: 5328883 - DNA, 25 bp, Homo sapien
ccaagttacctaaattctctggact

SEQ ID NO: 5328884 - DNA, 25 bp, Homo sapien
ttggagagtgacctacccaagttac

SEQ ID NO: 5328885 - DNA, 25 bp, Homo sapien
ttggagtgctgcctacttggagagt

SEQ ID NO: 5328886 - DNA, 25 bp, Homo sapien
gtgttaataatagctatggcaatgt

SEQ ID NO: 5328887 - DNA, 25 bp, Homo sapien
caaatacattttccgcattctctct

SEQ ID NO: 5328888 - DNA, 25 bp, Homo sapien
atacattttccgcattctctctata

SEQ ID NO: 5328889 - DNA, 25 bp, Homo sapien
aaatacattttccgcattctctcta

SEQ ID NO: 5328890 - DNA, 25 bp, Homo sapien
acattttccgcattctctctatacc

SEQ ID NO: 5328891 - DNA, 25 bp, Homo sapien
taaatatatttaggcaaaggctttc

SEQ ID NO: 5328892 - DNA, 25 bp, Homo sapien
tccagttatctctgttctttcagcc

SEQ ID NO: 5328893 - DNA, 25 bp, Homo sapien
tcataactcttaggttaggatactc

SEQ ID NO: 5328894 - DNA, 25 bp, Homo sapien
gccttccaggccacaagactaatca

SEQ ID NO: 5328895 - DNA, 25 bp, Homo sapien
tggaactctcctgatctgggcctga

SEQ ID NO: 5328896 - DNA, 25 bp, Homo sapien
tcatggaactctcctgatctgggcc

SEQ ID NO: 5328897 - DNA, 25 bp, Homo sapien
gatgcctgcttttagtagttgataa

SEQ ID NO: 5328898 - DNA, 25 bp, Homo sapien
ctgatgcctgcttttagtagttgat

SEQ ID NO: 5328899 - DNA, 25 bp, Homo sapien
catcttattttggaagggattctga

SEQ ID NO: 5328900 - DNA, 25 bp, Homo sapien
taacaccctcatgttcttacgcatg

SEQ ID NO: 5328901 - DNA, 25 bp, Homo sapien
tgttcttacgcatgttgccctgctg

SEQ ID NO: 5328902 - DNA, 25 bp, Homo sapien
aagcttagccggtgggggcctctca

SEQ ID NO: 5328903 - DNA, 25 bp, Homo sapien
tttctcctcctaagcagctgtctta

SEQ ID NO: 5328904 - DNA, 25 bp, Homo sapien
agacacagcctcataagggtgccgt

SEQ ID NO: 5328905 - DNA, 25 bp, Homo sapien
aggagtgggaaacagccaaagagtc

SEQ ID NO: 5328906 - DNA, 25 bp, Homo sapien
acacagcctcataagggtgccgtcc

SEQ ID NO: 5328907 - DNA, 25 bp, Homo sapien
taagggtgccgtcccacctgcctgg

SEQ ID NO: 5328908 - DNA, 25 bp, Homo sapien
tcacggacaagacgagcaggttgcc

SEQ ID NO: 5328909 - DNA, 25 bp, Homo sapien
gagcaggttgccgatggcatggcca

SEQ ID NO: 5328910 - DNA, 25 bp, Homo sapien
aggagccgcggggtgagcccggcca

SEQ ID NO: 5328911 - DNA, 25 bp, Homo sapien
ccgcggggtgagcccggccagctgg

SEQ ID NO: 5328912 - DNA, 25 bp, Homo sapien
ctgcggcggaaccaggaacaaaata

SEQ ID NO: 5328913 - DNA, 25 bp, Homo sapien
caggaacaaaatacgcttagtgagt

SEQ ID NO: 5328914 - DNA, 25 bp, Homo sapien
gaacaaaatacgcttagtgagttgt

SEQ ID NO: 5328915 - DNA, 25 bp, Homo sapien
aaaatacgcttagtgagttgtccat

SEQ ID NO: 5328916 - DNA, 25 bp, Homo sapien
ctccagtgcctctgtgccgcctgga

SEQ ID NO: 5328917 - DNA, 25 bp, Homo sapien
ctctccagtgcctctgtgccgcctg

SEQ ID NO: 5328918 - DNA, 25 bp, Homo sapien
gggcctctccagtgcctctgtgccg

SEQ ID NO: 5328919 - DNA, 25 bp, Homo sapien
gcctctccagtgcctctgtgccgcc

SEQ ID NO: 5328920 - DNA, 25 bp, Homo sapien
aaggataccacctctacttggcagg

SEQ ID NO: 5328921 - DNA, 25 bp, Homo sapien
taggtaccctagatgttgtcttcca

SEQ ID NO: 5328922 - DNA, 25 bp, Homo sapien
tagcctattagcctactacccatgc

SEQ ID NO: 5328923 - DNA, 25 bp, Homo sapien
ttttcccgacttttatgtgagaggc

SEQ ID NO: 5328924 - DNA, 25 bp, Homo sapien
tagtaccttagatgtgagctttgca

SEQ ID NO: 5328925 - DNA, 25 bp, Homo sapien
ccaaatgggtactgaaaatagattc

SEQ ID NO: 5328926 - DNA, 25 bp, Homo sapien
gattcaactaggctgtagaagagaa

SEQ ID NO: 5328927 - DNA, 25 bp, Homo sapien
agagaaatgttcaccatgtagggaa

SEQ ID NO: 5328928 - DNA, 25 bp, Homo sapien
cacactctaacatcgtcttctaagt

SEQ ID NO: 5328929 - DNA, 25 bp, Homo sapien
tcacactctaacatcgtcttctaag

SEQ ID NO: 5328930 - DNA, 25 bp, Homo sapien
ctctaacatcgtcttctaagtcact

SEQ ID NO: 5328931 - DNA, 25 bp, Homo sapien
cactctaacatcgtcttctaagtca

SEQ ID NO: 5328932 - DNA, 25 bp, Homo sapien
tagagggtggctggtagttgaagtc

SEQ ID NO: 5328933 - DNA, 25 bp, Homo sapien
ctcggtaattaatatccagctttgg

SEQ ID NO: 5328934 - DNA, 25 bp, Homo sapien
gctggtagttgaagtcactcggtaa

SEQ ID NO: 5328935 - DNA, 25 bp, Homo sapien
ttcacagcggacttctagagggtgg

SEQ ID NO: 5328936 - DNA, 25 bp, Homo sapien
catggctgaagaaaagccctaagcc

SEQ ID NO: 5328937 - DNA, 25 bp, Homo sapien
tagagtcgacacatgcaacaggact

SEQ ID NO: 5328938 - DNA, 25 bp, Homo sapien
caacaggacttgcatggctgaagaa

SEQ ID NO: 5328939 - DNA, 25 bp, Homo sapien
aaggccctccttgaatcgagtttct

SEQ ID NO: 5328940 - DNA, 25 bp, Homo sapien
ccgtcccagccttctaagcagacat

SEQ ID NO: 5328941 - DNA, 25 bp, Homo sapien
cccagccttctaagcagacatccct

SEQ ID NO: 5328942 - DNA, 25 bp, Homo sapien
ccagccttctaagcagacatccctg

SEQ ID NO: 5328943 - DNA, 25 bp, Homo sapien
cctggtgtccgttcaggctggccca

SEQ ID NO: 5328944 - DNA, 25 bp, Homo sapien
ggtcctttgcaagctcgcggctgag

SEQ ID NO: 5328945 - DNA, 25 bp, Homo sapien
ccttgtttgctctccagaaagcact

SEQ ID NO: 5328946 - DNA, 25 bp, Homo sapien
tcttttacggagaggtagggcagct

SEQ ID NO: 5328947 - DNA, 25 bp, Homo sapien
catttcctttgatcggatttcccca

SEQ ID NO: 5328948 - DNA, 25 bp, Homo sapien
cttcagttgaggaccaggcttcgtg

SEQ ID NO: 5328949 - DNA, 25 bp, Homo sapien
cgtgcatttcctttgatcggatttc

SEQ ID NO: 5328950 - DNA, 25 bp, Homo sapien
tgaggaccaggcttcgtgcatttcc

SEQ ID NO: 5328951 - DNA, 25 bp, Homo sapien
aatattatggctcctgcatccagag

SEQ ID NO: 5328952 - DNA, 25 bp, Homo sapien
tagctggtaagcagtccatctctgt

SEQ ID NO: 5328953 - DNA, 25 bp, Homo sapien
aagctgtcttttctgtgcggcacag

SEQ ID NO: 5328954 - DNA, 25 bp, Homo sapien
tgtgtcacatagattccctgttggg

SEQ ID NO: 5328955 - DNA, 25 bp, Homo sapien
tggcttcctgactattgtctcatgg

SEQ ID NO: 5328956 - DNA, 25 bp, Homo sapien
ttttgtatcttgcacggcaagttta

SEQ ID NO: 5328957 - DNA, 25 bp, Homo sapien
ctcatgggtcgcctttcctgggatg

SEQ ID NO: 5328958 - DNA, 25 bp, Homo sapien
ttcctgggatgccacccaagcagag

SEQ ID NO: 5328959 - DNA, 25 bp, Homo sapien
tatttaatcgttcacttaattgttc

SEQ ID NO: 5328960 - DNA, 25 bp, Homo sapien
ttaatcgttcacttaattgttcttc

SEQ ID NO: 5328961 - DNA, 25 bp, Homo sapien
aatcgttcacttaattgttcttctc

SEQ ID NO: 5328962 - DNA, 25 bp, Homo sapien
tcgttcacttaattgttcttctccc

SEQ ID NO: 5328963 - DNA, 25 bp, Homo sapien
cagagggaagtgtcaactgggatat

SEQ ID NO: 5328964 - DNA, 25 bp, Homo sapien
ggaagtgtcaactgggatatttctg

SEQ ID NO: 5328965 - DNA, 25 bp, Homo sapien
ggagctttgcttcccatgacgcaga

SEQ ID NO: 5328966 - DNA, 25 bp, Homo sapien
cccatgacgcagagggaagtgtcaa

SEQ ID NO: 5328967 - DNA, 25 bp, Homo sapien
aaagtcacagaacttcctgaatctg

SEQ ID NO: 5328968 - DNA, 25 bp, Homo sapien
tccactaccatgagtctgacagatt

SEQ ID NO: 5328969 - DNA, 25 bp, Homo sapien
ctgacagattttcatgcagtgatga

SEQ ID NO: 5328970 - DNA, 25 bp, Homo sapien
ctgagtccactaccatgagtctgac

SEQ ID NO: 5328971 - DNA, 25 bp, Homo sapien
tgtagcatccaatgggagaactctg

SEQ ID NO: 5328972 - DNA, 25 bp, Homo sapien
agaactctgtggagactccaccagc

SEQ ID NO: 5328973 - DNA, 25 bp, Homo sapien
ccttttgagtaaggcccactatggg

SEQ ID NO: 5328974 - DNA, 25 bp, Homo sapien
ccagctggaatgtgatccttttgag

SEQ ID NO: 5328975 - DNA, 25 bp, Homo sapien
aggaagctgagctaaatatgaaata

SEQ ID NO: 5328976 - DNA, 25 bp, Homo sapien
gaagctgagctaaatatgaaatatg

SEQ ID NO: 5328977 - DNA, 25 bp, Homo sapien
gtgttctctttgtcttggctgccag

SEQ ID NO: 5328978 - DNA, 25 bp, Homo sapien
tgccaggaagctgagctaaatatga

SEQ ID NO: 5328979 - DNA, 25 bp, Homo sapien
tagggcatacagttcagtgggggca

SEQ ID NO: 5328980 - DNA, 25 bp, Homo sapien
gggcatacagttcagtgggggcaga

SEQ ID NO: 5328981 - DNA, 25 bp, Homo sapien
atacagttcagtgggggcagagaca

SEQ ID NO: 5328982 - DNA, 25 bp, Homo sapien
ctgtagggcatacagttcagtgggg

SEQ ID NO: 5328983 - DNA, 25 bp, Homo sapien
ctgctgcacactggagacttcagcc

SEQ ID NO: 5328984 - DNA, 25 bp, Homo sapien
ctgcacactggagacttcagccaca

SEQ ID NO: 5328985 - DNA, 25 bp, Homo sapien
acactggagacttcagccacatcct

SEQ ID NO: 5328986 - DNA, 25 bp, Homo sapien
tgcacactggagacttcagccacat

SEQ ID NO: 5328987 - DNA, 25 bp, Homo sapien
catttcccgtcttgcagttttcatg

SEQ ID NO: 5328988 - DNA, 25 bp, Homo sapien
ctccctttcaagcctagattccact

SEQ ID NO: 5328989 - DNA, 25 bp, Homo sapien
accatttcccgtcttgcagttttca

SEQ ID NO: 5328990 - DNA, 25 bp, Homo sapien
ccctttcaagcctagattccactgt

SEQ ID NO: 5328991 - DNA, 25 bp, Homo sapien
gcaccccagtgcttgcgagtgtcga

SEQ ID NO: 5328992 - DNA, 25 bp, Homo sapien
tgagcaccccagtgcttgcgagtgt

SEQ ID NO: 5328993 - DNA, 25 bp, Homo sapien
accccagtgcttgcgagtgtcgata

SEQ ID NO: 5328994 - DNA, 25 bp, Homo sapien
gtgagcaccccagtgcttgcgagtg

SEQ ID NO: 5328995 - DNA, 25 bp, Homo sapien
tccactgtgagaggcgtctgtgtgt

SEQ ID NO: 5328996 - DNA, 25 bp, Homo sapien
tgtggtttgagtgccctgaattagt

SEQ ID NO: 5328997 - DNA, 25 bp, Homo sapien
tgagtgccctgaattagttaaaggc

SEQ ID NO: 5328998 - DNA, 25 bp, Homo sapien
agaccggactgtctgtgattctgca

SEQ ID NO: 5328999 - DNA, 25 bp, Homo sapien
tcaatgtctttcacttgtacacagt

SEQ ID NO: 5329000 - DNA, 25 bp, Homo sapien
ctgtggagtatcctagaaggacttg

SEQ ID NO: 5329001 - DNA, 25 bp, Homo sapien
tttttggaataacattgcagactcc

SEQ ID NO: 5329002 - DNA, 25 bp, Homo sapien
aaattgtctaccatttctgactctt

SEQ ID NO: 5329003 - DNA, 25 bp, Homo sapien
taagtaatcctgtaataattagtct

SEQ ID NO: 5329004 - DNA, 25 bp, Homo sapien
ttaagtaatcctgtaataattagtc

SEQ ID NO: 5329005 - DNA, 25 bp, Homo sapien
aatcctgtaataattagtcttcctg

SEQ ID NO: 5329006 - DNA, 25 bp, Homo sapien
gtaatcctgtaataattagtcttcc

SEQ ID NO: 5329007 - DNA, 25 bp, Homo sapien
tagatggcggcaaactcagccaagt

SEQ ID NO: 5329008 - DNA, 25 bp, Homo sapien
tttggcatgggcttccgttggcgct

SEQ ID NO: 5329009 - DNA, 25 bp, Homo sapien
aactggcaagctgtgcaggttcctg

SEQ ID NO: 5329010 - DNA, 25 bp, Homo sapien
taaactgacgctgggagtggccact

SEQ ID NO: 5329011 - DNA, 25 bp, Homo sapien
ggctccctccggtttctgctgccct

SEQ ID NO: 5329012 - DNA, 25 bp, Homo sapien
ttccctcacagaccacccttgggct

SEQ ID NO: 5329013 - DNA, 25 bp, Homo sapien
tacaggaaatactatccatactggc

SEQ ID NO: 5329014 - DNA, 25 bp, Homo sapien
gcctcagtaagtccctcagttcttc

SEQ ID NO: 5329015 - DNA, 25 bp, Homo sapien
tgcagggatatggaggcggatctgt

SEQ ID NO: 5329016 - DNA, 25 bp, Homo sapien
ctgataaagtgacagtgcagggata

SEQ ID NO: 5329017 - DNA, 25 bp, Homo sapien
cagtgcagggatatggaggcggatc

SEQ ID NO: 5329018 - DNA, 25 bp, Homo sapien
taaagtgacagtgcagggatatgga

SEQ ID NO: 5329019 - DNA, 25 bp, Homo sapien
gtacgtaagtggtataacatctgtg

SEQ ID NO: 5329020 - DNA, 25 bp, Homo sapien
gtggtataacatctgtgtagtgtca

SEQ ID NO: 5329021 - DNA, 25 bp, Homo sapien
agggaatgtgtacgtaagtggtata

SEQ ID NO: 5329022 - DNA, 25 bp, Homo sapien
tctgtgtagtgtcattccgctgtgc

SEQ ID NO: 5329023 - DNA, 25 bp, Homo sapien
tgagaattgttcttccttacactaa

SEQ ID NO: 5329024 - DNA, 25 bp, Homo sapien
ctgatgagaattgttcttccttaca

SEQ ID NO: 5329025 - DNA, 25 bp, Homo sapien
gaattgttcttccttacactaacgc

SEQ ID NO: 5329026 - DNA, 25 bp, Homo sapien
tgatgagaattgttcttccttacac

SEQ ID NO: 5329027 - DNA, 25 bp, Homo sapien
ccatgaatgggtctcccagatccat

SEQ ID NO: 5329028 - DNA, 25 bp, Homo sapien
gggagcgcttctggaactgataccc

SEQ ID NO: 5329029 - DNA, 25 bp, Homo sapien
cgcttctggaactgataccctggga

SEQ ID NO: 5329030 - DNA, 25 bp, Homo sapien
aaggaggtatcagtgctgagcgggc

SEQ ID NO: 5329031 - DNA, 25 bp, Homo sapien
tatcagtgctgagcgggcaggcaca

SEQ ID NO: 5329032 - DNA, 25 bp, Homo sapien
gggctgcatctgctgaagcgagaac

SEQ ID NO: 5329033 - DNA, 25 bp, Homo sapien
gtggaacagctcaccttgtcagaca

SEQ ID NO: 5329034 - DNA, 25 bp, Homo sapien
agtcctcatccatggagtgctgtgt

SEQ ID NO: 5329035 - DNA, 25 bp, Homo sapien
ctgaagcgagaaccccattctgcca

SEQ ID NO: 5329036 - DNA, 25 bp, Homo sapien
caggcacatatccttgtgttctccc

SEQ ID NO: 5329037 - DNA, 25 bp, Homo sapien
ttctgccaggcacatatccttgtgt

SEQ ID NO: 5329038 - DNA, 25 bp, Homo sapien
tgtgttctcccacggattcctcaca

SEQ ID NO: 5329039 - DNA, 25 bp, Homo sapien
tgccaggcacatatccttgtgttct

SEQ ID NO: 5329040 - DNA, 25 bp, Homo sapien
cctaaaactctgctcaaaggcctgt

SEQ ID NO: 5329041 - DNA, 25 bp, Homo sapien
taaaactctgctcaaaggcctgtcc

SEQ ID NO: 5329042 - DNA, 25 bp, Homo sapien
caacttcctaaaactctgctcaaag

SEQ ID NO: 5329043 - DNA, 25 bp, Homo sapien
aaactctgctcaaaggcctgtcccc

SEQ ID NO: 5329044 - DNA, 25 bp, Homo sapien
caactgctggctggattccacgggc

SEQ ID NO: 5329045 - DNA, 25 bp, Homo sapien
gaacgccctgtaaacttccacattc

SEQ ID NO: 5329046 - DNA, 25 bp, Homo sapien
cagaaaagcacgaagccggagattc

SEQ ID NO: 5329047 - DNA, 25 bp, Homo sapien
tctgggccagaagatgcgtgtacac

SEQ ID NO: 5329048 - DNA, 25 bp, Homo sapien
gattcagtgattcttgtggttcttg

SEQ ID NO: 5329049 - DNA, 25 bp, Homo sapien
cttgctttctctccaagggttcttt

SEQ ID NO: 5329050 - DNA, 25 bp, Homo sapien
ccatgattcagtgattcttgtggtt

SEQ ID NO: 5329051 - DNA, 25 bp, Homo sapien
tcttgctttctctccaagggttctt

SEQ ID NO: 5329052 - DNA, 25 bp, Homo sapien
cacgtgggctgactgtttccaaaac

SEQ ID NO: 5329053 - DNA, 25 bp, Homo sapien
tttccaaaacactcctggtgggtca

SEQ ID NO: 5329054 - DNA, 25 bp, Homo sapien
cactcctggtgggtcagcgagcaga

SEQ ID NO: 5329055 - DNA, 25 bp, Homo sapien
gaggaggacactgggatgtcttcag

SEQ ID NO: 5329056 - DNA, 25 bp, Homo sapien
tagaatacagctcccaaagaatgtg

SEQ ID NO: 5329057 - DNA, 25 bp, Homo sapien
tatttactcgagcagtcactctggt

SEQ ID NO: 5329058 - DNA, 25 bp, Homo sapien
tattgggcccagtgatgtgtacatc

SEQ ID NO: 5329059 - DNA, 25 bp, Homo sapien
aaaccagtatcctcagaattccagc

SEQ ID NO: 5329060 - DNA, 25 bp, Homo sapien
acatttaaatagtcaagagcccagg

SEQ ID NO: 5329061 - DNA, 25 bp, Homo sapien
tatacgtggttttggtaatgacagc

SEQ ID NO: 5329062 - DNA, 25 bp, Homo sapien
ccaggcatgggtatggtcacaagca

SEQ ID NO: 5329063 - DNA, 25 bp, Homo sapien
gaagtttgagttcacagcgccatgg

SEQ ID NO: 5329064 - DNA, 25 bp, Homo sapien
tatgcagagcctatcaggtaaggca

SEQ ID NO: 5329065 - DNA, 25 bp, Homo sapien
aaagagagttatgcagagcctatca

SEQ ID NO: 5329066 - DNA, 25 bp, Homo sapien
tgcagagcctatcaggtaaggcaga

SEQ ID NO: 5329067 - DNA, 25 bp, Homo sapien
gagttatgcagagcctatcaggtaa

SEQ ID NO: 5329068 - DNA, 25 bp, Homo sapien
ggttagaaaccccacagagagaatc

SEQ ID NO: 5329069 - DNA, 25 bp, Homo sapien
tggcccagaggttagaaaccccaca

SEQ ID NO: 5329070 - DNA, 25 bp, Homo sapien
cccagaggttagaaaccccacagag

SEQ ID NO: 5329071 - DNA, 25 bp, Homo sapien
agaggttagaaaccccacagagaga

SEQ ID NO: 5329072 - DNA, 25 bp, Homo sapien
tccaggttcctttagtagaacctgc

SEQ ID NO: 5329073 - DNA, 25 bp, Homo sapien
tcctttagtagaacctgctaccacg

SEQ ID NO: 5329074 - DNA, 25 bp, Homo sapien
caggttcctttagtagaacctgcta

SEQ ID NO: 5329075 - DNA, 25 bp, Homo sapien
gttcctttagtagaacctgctacca

SEQ ID NO: 5329076 - DNA, 25 bp, Homo sapien
tgatgatactgttgcaggagccagc

SEQ ID NO: 5329077 - DNA, 25 bp, Homo sapien
aatgtaggtgccagtcagggtcatc

SEQ ID NO: 5329078 - DNA, 25 bp, Homo sapien
aataggctactatggatgaaagggc

SEQ ID NO: 5329079 - DNA, 25 bp, Homo sapien
tggcctactcactgcacaagaccgt

SEQ ID NO: 5329080 - DNA, 25 bp, Homo sapien
acgacacaaagccactacgggaagt

SEQ ID NO: 5329081 - DNA, 25 bp, Homo sapien
tctaggcctctgacgcagactgaga

SEQ ID NO: 5329082 - DNA, 25 bp, Homo sapien
aaaatgggctgtgacgacacaaagc

SEQ ID NO: 5329083 - DNA, 25 bp, Homo sapien
gagggtccatgccatagtgagagcc

SEQ ID NO: 5329084 - DNA, 25 bp, Homo sapien
cgagcttccggtgcagcaatgagct

SEQ ID NO: 5329085 - DNA, 25 bp, Homo sapien
aatgagctgacacaaaccgtggcgg

SEQ ID NO: 5329086 - DNA, 25 bp, Homo sapien
caatgtgcacattccgagcttccgg

SEQ ID NO: 5329087 - DNA, 25 bp, Homo sapien
aaccgtggcggcctgaagacctgga

SEQ ID NO: 5329088 - DNA, 25 bp, Homo sapien
tgcctttcaggacccgtgttcacac

SEQ ID NO: 5329089 - DNA, 25 bp, Homo sapien
tttgcctttcaggacccgtgttcac

SEQ ID NO: 5329090 - DNA, 25 bp, Homo sapien
cgtgttcacaccagcacttagtttg

SEQ ID NO: 5329091 - DNA, 25 bp, Homo sapien
ccagcacttagtttggaggaagcac

SEQ ID NO: 5329092 - DNA, 25 bp, Homo sapien
gagaaaagcccctgcaatgtggaga

SEQ ID NO: 5329093 - DNA, 25 bp, Homo sapien
tcctaagtcctggaggcatccatgg

SEQ ID NO: 5329094 - DNA, 25 bp, Homo sapien
tctggtatactataagcctggctgt

SEQ ID NO: 5329095 - DNA, 25 bp, Homo sapien
taaacttccctcctgctaactgagg

SEQ ID NO: 5329096 - DNA, 25 bp, Homo sapien
ctgagtgacagtgagtggccactga

SEQ ID NO: 5329097 - DNA, 25 bp, Homo sapien
aggaggtggacaaaaaacctgagtg

SEQ ID NO: 5329098 - DNA, 25 bp, Homo sapien
caaggaaacaggacaactctggtaa

SEQ ID NO: 5329099 - DNA, 25 bp, Homo sapien
agtggccactgatcagaagactcag

SEQ ID NO: 5329100 - DNA, 25 bp, Homo sapien
aatttctggtgtgccagctctgttg

SEQ ID NO: 5329101 - DNA, 25 bp, Homo sapien
tgttggactctactaggctttggga

SEQ ID NO: 5329102 - DNA, 25 bp, Homo sapien
tgttccaatcctccaaatttctggt

SEQ ID NO: 5329103 - DNA, 25 bp, Homo sapien
actgtgggacactcattgctaaagg

SEQ ID NO: 5329104 - DNA, 25 bp, Homo sapien
tatggaaatctctcgttctgctgct

SEQ ID NO: 5329105 - DNA, 25 bp, Homo sapien
catagtatctcccatatggaaatct

SEQ ID NO: 5329106 - DNA, 25 bp, Homo sapien
ctcaagtgacagctgtggatccaaa

SEQ ID NO: 5329107 - DNA, 25 bp, Homo sapien
tttgtttgtcaagccagttaaggaa

SEQ ID NO: 5329108 - DNA, 25 bp, Homo sapien
cagggatgaaggctgtgcttccctc

SEQ ID NO: 5329109 - DNA, 25 bp, Homo sapien
gtccctatgcccttcaaattccaca

SEQ ID NO: 5329110 - DNA, 25 bp, Homo sapien
agagattttattctacctggggctg

SEQ ID NO: 5329111 - DNA, 25 bp, Homo sapien
gacactggaggcgtcccctcaaaaa

SEQ ID NO: 5329112 - DNA, 25 bp, Homo sapien
aaaagactctgaaggtacacatttg

SEQ ID NO: 5329113 - DNA, 25 bp, Homo sapien
tacttaaaaagactctgaaggtaca

SEQ ID NO: 5329114 - DNA, 25 bp, Homo sapien
agactctgaaggtacacatttggtt

SEQ ID NO: 5329115 - DNA, 25 bp, Homo sapien
ttaaaaagactctgaaggtacacat

SEQ ID NO: 5329116 - DNA, 25 bp, Homo sapien
caacaaacagttattccatgatggg

SEQ ID NO: 5329117 - DNA, 25 bp, Homo sapien
gcaccatatgtgagcttgcagaact

SEQ ID NO: 5329118 - DNA, 25 bp, Homo sapien
catgaccgtgcatcagctgattcgg

SEQ ID NO: 5329119 - DNA, 25 bp, Homo sapien
tgaacaggttttaccccagaacatg

SEQ ID NO: 5329120 - DNA, 25 bp, Homo sapien
cagaagactctctatccaaaaggga

SEQ ID NO: 5329121 - DNA, 25 bp, Homo sapien
ggcaagattccttaaaccaatagaa

SEQ ID NO: 5329122 - DNA, 25 bp, Homo sapien
caaaattatggcaagctatggcaag

SEQ ID NO: 5329123 - DNA, 25 bp, Homo sapien
tgtgagccatactctgaagcccaga

SEQ ID NO: 5329124 - DNA, 25 bp, Homo sapien
tagaccatgtaggagcgtttgcagc

SEQ ID NO: 5329125 - DNA, 25 bp, Homo sapien
tagtatcagggtgctaatgtcagcg

SEQ ID NO: 5329126 - DNA, 25 bp, Homo sapien
gagtatgaaggatgcaccacgttcc

SEQ ID NO: 5329127 - DNA, 25 bp, Homo sapien
tactaaatgtcagcggtgtgccagc

SEQ ID NO: 5329128 - DNA, 25 bp, Homo sapien
gccagtactcatggccttgctttcc

SEQ ID NO: 5329129 - DNA, 25 bp, Homo sapien
tgcacaaagcccagaatatgcttgc

SEQ ID NO: 5329130 - DNA, 25 bp, Homo sapien
gacacatctgaggatagcctctgag

SEQ ID NO: 5329131 - DNA, 25 bp, Homo sapien
tctcaggaacagatttcatgctggt

SEQ ID NO: 5329132 - DNA, 25 bp, Homo sapien
gcatttcctacaacaaactgacctg

SEQ ID NO: 5329133 - DNA, 25 bp, Homo sapien
taatctcattaaataggaacaccaa

SEQ ID NO: 5329134 - DNA, 25 bp, Homo sapien
taggaacaccaaatatacacattta

SEQ ID NO: 5329135 - DNA, 25 bp, Homo sapien
tgaaggcagcaagcctctattactg

SEQ ID NO: 5329136 - DNA, 25 bp, Homo sapien
tacagccacattcggagacggccat

SEQ ID NO: 5329137 - DNA, 25 bp, Homo sapien
tcataggcttcgtatccaggcggag

SEQ ID NO: 5329138 - DNA, 25 bp, Homo sapien
tatttaaacttgtaggtgacgacgc

SEQ ID NO: 5329139 - DNA, 25 bp, Homo sapien
catacgatccctttgcaccagtgtg

SEQ ID NO: 5329140 - DNA, 25 bp, Homo sapien
acagtgtcaggaccagagagcccat

SEQ ID NO: 5329141 - DNA, 25 bp, Homo sapien
catggaggtccgatctgttgcaaat

SEQ ID NO: 5329142 - DNA, 25 bp, Homo sapien
caacatgtactctggtgggtccacc

SEQ ID NO: 5329143 - DNA, 25 bp, Homo sapien
tcgacaccgtcttgctctgagaaaa

SEQ ID NO: 5329144 - DNA, 25 bp, Homo sapien
gaacgtaaatgtctcctgtcactgg

SEQ ID NO: 5329145 - DNA, 25 bp, Homo sapien
gctcgagctcctaggccaagccagg

SEQ ID NO: 5329146 - DNA, 25 bp, Homo sapien
ggcagttttatcttgtggaacgtaa

SEQ ID NO: 5329147 - DNA, 25 bp, Homo sapien
caagccaggaaggtttagcttccct

SEQ ID NO: 5329148 - DNA, 25 bp, Homo sapien
tttgatgatgctcctctgcaggcca

SEQ ID NO: 5329149 - DNA, 25 bp, Homo sapien
tggtggcagccagcaatcaactacc

SEQ ID NO: 5329150 - DNA, 25 bp, Homo sapien
tgtcatctggcacaaaacaggtttc

SEQ ID NO: 5329151 - DNA, 25 bp, Homo sapien
gacattcttcatcatcgaggcctgt

SEQ ID NO: 5329152 - DNA, 25 bp, Homo sapien
tagctgggtggttctcactagagta

SEQ ID NO: 5329153 - DNA, 25 bp, Homo sapien
tcactagagtagctcattgggtttt

SEQ ID NO: 5329154 - DNA, 25 bp, Homo sapien
gggttttagtcaagatgttgcccag

SEQ ID NO: 5329155 - DNA, 25 bp, Homo sapien
tgctcttatcagaaggcctcagttt

SEQ ID NO: 5329156 - DNA, 25 bp, Homo sapien
agtatatcccgtggtcagacaggca

SEQ ID NO: 5329157 - DNA, 25 bp, Homo sapien
gacaggcagcattgcatttgctgtc

SEQ ID NO: 5329158 - DNA, 25 bp, Homo sapien
gtttggcagggctgtgattactcca

SEQ ID NO: 5329159 - DNA, 25 bp, Homo sapien
ctatcactagtgagatctgaaccag

SEQ ID NO: 5329160 - DNA, 25 bp, Homo sapien
cacagccctgggacgtccggatctg

SEQ ID NO: 5329161 - DNA, 25 bp, Homo sapien
ccagttccgcactccggagccacag

SEQ ID NO: 5329162 - DNA, 25 bp, Homo sapien
ggacgtccggatctgctcacagctc

SEQ ID NO: 5329163 - DNA, 25 bp, Homo sapien
tgctgaagcactgggcccagttccg

SEQ ID NO: 5329164 - DNA, 25 bp, Homo sapien
ctgggggattcaaacagctcccacg

SEQ ID NO: 5329165 - DNA, 25 bp, Homo sapien
ccggaatgcactcaagtggagcaaa

SEQ ID NO: 5329166 - DNA, 25 bp, Homo sapien
ggaatgcactcaagtggagcaaagc

SEQ ID NO: 5329167 - DNA, 25 bp, Homo sapien
gccggaatgcactcaagtggagcaa

SEQ ID NO: 5329168 - DNA, 25 bp, Homo sapien
cggaatgcactcaagtggagcaaag

SEQ ID NO: 5329169 - DNA, 25 bp, Homo sapien
atttgacttttgagtgtaaaccaag

SEQ ID NO: 5329170 - DNA, 25 bp, Homo sapien
ctcaaaattagttggggcattggga

SEQ ID NO: 5329171 - DNA, 25 bp, Homo sapien
taaaccaaggatgtatttctttgaa

SEQ ID NO: 5329172 - DNA, 25 bp, Homo sapien
gactgaatctcaaaattagttgggg

SEQ ID NO: 5329173 - DNA, 25 bp, Homo sapien
ctgcacagattgaaattcccaagat

SEQ ID NO: 5329174 - DNA, 25 bp, Homo sapien
atgtctgcacagattgaaattccca

SEQ ID NO: 5329175 - DNA, 25 bp, Homo sapien
gaatgtctgcacagattgaaattcc

SEQ ID NO: 5329176 - DNA, 25 bp, Homo sapien
gtctgcacagattgaaattcccaag

SEQ ID NO: 5329177 - DNA, 25 bp, Homo sapien
tccctggagacgtttaattcatttc

SEQ ID NO: 5329178 - DNA, 25 bp, Homo sapien
gcacaatttacacacatggcatgta

SEQ ID NO: 5329179 - DNA, 25 bp, Homo sapien
gaactgagtactgttcccatttatt

SEQ ID NO: 5329180 - DNA, 25 bp, Homo sapien
acttggcacccaacagagcacctgg

SEQ ID NO: 5329181 - DNA, 25 bp, Homo sapien
tgcagagtttctcaatgggtgaccc

SEQ ID NO: 5329182 - DNA, 25 bp, Homo sapien
cccttatacaaagggatatgtttgc

SEQ ID NO: 5329183 - DNA, 25 bp, Homo sapien
tgtacttgacccaggtgtatttgct

SEQ ID NO: 5329184 - DNA, 25 bp, Homo sapien
acttgacccaggtgtatttgctgga

SEQ ID NO: 5329185 - DNA, 25 bp, Homo sapien
ctcttcgggagagcaccctggatgc

SEQ ID NO: 5329186 - DNA, 25 bp, Homo sapien
tccatcttcaggataaagcaggctc

SEQ ID NO: 5329187 - DNA, 25 bp, Homo sapien
cagaggagggatgttctgatggtcc

SEQ ID NO: 5329188 - DNA, 25 bp, Homo sapien
agatgtaccattggagattgttcag

SEQ ID NO: 5329189 - DNA, 25 bp, Homo sapien
catggatgttaatgatggcggtatt

SEQ ID NO: 5329190 - DNA, 25 bp, Homo sapien
tagtcaaaaattgtggtagaagagc

SEQ ID NO: 5329191 - DNA, 25 bp, Homo sapien
gaacattgccaccattgttgcttgg

SEQ ID NO: 5329192 - DNA, 25 bp, Homo sapien
gaagagcatgatcctgcatggatgt

SEQ ID NO: 5329193 - DNA, 25 bp, Homo sapien
tatccatgagattgtatcccaaaga

SEQ ID NO: 5329194 - DNA, 25 bp, Homo sapien
ctcgtatccatgagattgtatccca

SEQ ID NO: 5329195 - DNA, 25 bp, Homo sapien
atgagattgtatcccaaagatggtc

SEQ ID NO: 5329196 - DNA, 25 bp, Homo sapien
tccatgagattgtatcccaaagatg

SEQ ID NO: 5329197 - DNA, 25 bp, Homo sapien
ggtagtcattgagtgtgggacagga

SEQ ID NO: 5329198 - DNA, 25 bp, Homo sapien
ctgaaaaacagacccaccacatcca

SEQ ID NO: 5329199 - DNA, 25 bp, Homo sapien
tctttatagggtagtcattgagtgt

SEQ ID NO: 5329200 - DNA, 25 bp, Homo sapien
gaaaaacagacccaccacatccatt

SEQ ID NO: 5329201 - DNA, 25 bp, Homo sapien
aagatgtggatatctctttttcaaa

SEQ ID NO: 5329202 - DNA, 25 bp, Homo sapien
ttgaagatgtggatatctctttttc

SEQ ID NO: 5329203 - DNA, 25 bp, Homo sapien
tatcctttatatgggcttgaagatg

SEQ ID NO: 5329204 - DNA, 25 bp, Homo sapien
gaagatgtggatatctctttttcaa

SEQ ID NO: 5329205 - DNA, 25 bp, Homo sapien
ttttacaatatttctctgaagcaca

SEQ ID NO: 5329206 - DNA, 25 bp, Homo sapien
tatttttacaatatttctctgaagc

SEQ ID NO: 5329207 - DNA, 25 bp, Homo sapien
cttaaatcctctatttttacaatat

SEQ ID NO: 5329208 - DNA, 25 bp, Homo sapien
cctctatttttacaatatttctctg

SEQ ID NO: 5329209 - DNA, 25 bp, Homo sapien
taagccctagaaagtgccgatcatc

SEQ ID NO: 5329210 - DNA, 25 bp, Homo sapien
gcagggtaagcagttcctaagccct

SEQ ID NO: 5329211 - DNA, 25 bp, Homo sapien
ctagaaagtgccgatcatccctcat

SEQ ID NO: 5329212 - DNA, 25 bp, Homo sapien
taagcagttcctaagccctagaaag

SEQ ID NO: 5329213 - DNA, 25 bp, Homo sapien
ggtctggttctgacgctgaaatctg

SEQ ID NO: 5329214 - DNA, 25 bp, Homo sapien
tgtggcccacaattgaatcagaaca

SEQ ID NO: 5329215 - DNA, 25 bp, Homo sapien
tgccgtcccctaaacagaaggtctg

SEQ ID NO: 5329216 - DNA, 25 bp, Homo sapien
cctggaagactcctcgatggctgcc

SEQ ID NO: 5329217 - DNA, 25 bp, Homo sapien
ctgaaacttgtgattgtcagacacg

SEQ ID NO: 5329218 - DNA, 25 bp, Homo sapien
cagacacgaggttaaggttgaacac

SEQ ID NO: 5329219 - DNA, 25 bp, Homo sapien
attgccaaggtttggctcctggtgc

SEQ ID NO: 5329220 - DNA, 25 bp, Homo sapien
tgcattgccaaggtttggctcctgg

SEQ ID NO: 5329221 - DNA, 25 bp, Homo sapien
ggaccattaaagcaactgacacccc

SEQ ID NO: 5329222 - DNA, 25 bp, Homo sapien
tgcttggaacaagtgtcaaagccca

SEQ ID NO: 5329223 - DNA, 25 bp, Homo sapien
cctgcacacctattactcttgaaaa

SEQ ID NO: 5329224 - DNA, 25 bp, Homo sapien
gtcatgggcagagtcagaccttgcc

SEQ ID NO: 5329225 - DNA, 25 bp, Homo sapien
ggcaattgttgagctgctgatgtct

SEQ ID NO: 5329226 - DNA, 25 bp, Homo sapien
gaccctgaagctgaggaacgggagg

SEQ ID NO: 5329227 - DNA, 25 bp, Homo sapien
ctgatgtctctgtctttggtctggc

SEQ ID NO: 5329228 - DNA, 25 bp, Homo sapien
tgtgataggcctgtggtgaccctga

SEQ ID NO: 5329229 - DNA, 25 bp, Homo sapien
tccctcttcgtgttggtcctgtctc

SEQ ID NO: 5329230 - DNA, 25 bp, Homo sapien
aaaaaggcttttagcattagcttag

SEQ ID NO: 5329231 - DNA, 25 bp, Homo sapien
ctttcacttcaaagtggggaaggtg

SEQ ID NO: 5329232 - DNA, 25 bp, Homo sapien
cagagttccctcttcgtgttggtcc

SEQ ID NO: 5329233 - DNA, 25 bp, Homo sapien
tgtcactagccacaattctgcccca

SEQ ID NO: 5329234 - DNA, 25 bp, Homo sapien
cttgtcactagccacaattctgccc

SEQ ID NO: 5329235 - DNA, 25 bp, Homo sapien
actagccacaattctgccccaagcc

SEQ ID NO: 5329236 - DNA, 25 bp, Homo sapien
tcactagccacaattctgccccaag

SEQ ID NO: 5329237 - DNA, 25 bp, Homo sapien
tccacattcaagctctttcctattc

SEQ ID NO: 5329238 - DNA, 25 bp, Homo sapien
ccataaacactctctccatcacatt

SEQ ID NO: 5329239 - DNA, 25 bp, Homo sapien
tattccttgccaatcccataaacac

SEQ ID NO: 5329240 - DNA, 25 bp, Homo sapien
tgctttcccttacccatctgatttc

SEQ ID NO: 5329241 - DNA, 25 bp, Homo sapien
tgtgttctcacgacatggcagtggg

SEQ ID NO: 5329242 - DNA, 25 bp, Homo sapien
tgtccaagatgggtcactcacaatg

SEQ ID NO: 5329243 - DNA, 25 bp, Homo sapien
cattttggaggcaggtcagtgctac

SEQ ID NO: 5329244 - DNA, 25 bp, Homo sapien
cagtgggctctcctacagtgagtga

SEQ ID NO: 5329245 - DNA, 25 bp, Homo sapien
aaatttatacgcgaagcctggaagc

SEQ ID NO: 5329246 - DNA, 25 bp, Homo sapien
atttatacgcgaagcctggaagcgc

SEQ ID NO: 5329247 - DNA, 25 bp, Homo sapien
caaggaaatttatacgcgaagcctg

SEQ ID NO: 5329248 - DNA, 25 bp, Homo sapien
aggaaatttatacgcgaagcctgga

SEQ ID NO: 5329249 - DNA, 25 bp, Homo sapien
cagaaacagcatcggagcggaaacc

SEQ ID NO: 5329250 - DNA, 25 bp, Homo sapien
cctgctacggcggatttgacctgta

SEQ ID NO: 5329251 - DNA, 25 bp, Homo sapien
cattttggacaagtaagtgccgcga

SEQ ID NO: 5329252 - DNA, 25 bp, Homo sapien
ttccattgcaaaagctcggcgcggc

SEQ ID NO: 5329253 - DNA, 25 bp, Homo sapien
tcttagatcctttcgctggcaagac

SEQ ID NO: 5329254 - DNA, 25 bp, Homo sapien
gcttcttagatcctttcgctggcaa

SEQ ID NO: 5329255 - DNA, 25 bp, Homo sapien
gatcctttcgctggcaagacactgt

SEQ ID NO: 5329256 - DNA, 25 bp, Homo sapien
tgggcttcttagatcctttcgctgg

SEQ ID NO: 5329257 - DNA, 25 bp, Homo sapien
taggggactgaatccaccattcttc

SEQ ID NO: 5329258 - DNA, 25 bp, Homo sapien
ttcccctgcaactggttctcttttc

SEQ ID NO: 5329259 - DNA, 25 bp, Homo sapien
tgaaaccgagggatcataggggact

SEQ ID NO: 5329260 - DNA, 25 bp, Homo sapien
tccttcttcccctgcaactggttct

SEQ ID NO: 5329261 - DNA, 25 bp, Homo sapien
tgctccttccccgtaagacctccga

SEQ ID NO: 5329262 - DNA, 25 bp, Homo sapien
catgtgctccttccccgtaagacct

SEQ ID NO: 5329263 - DNA, 25 bp, Homo sapien
atgtgctccttccccgtaagacctc

SEQ ID NO: 5329264 - DNA, 25 bp, Homo sapien
tgtgctccttccccgtaagacctcc

SEQ ID NO: 5329265 - DNA, 25 bp, Homo sapien
tcttccactgtacaaagggattcca

SEQ ID NO: 5329266 - DNA, 25 bp, Homo sapien
ttcttccactgtacaaagggattcc

SEQ ID NO: 5329267 - DNA, 25 bp, Homo sapien
atcagcatcatgcagtggcagctgc

SEQ ID NO: 5329268 - DNA, 25 bp, Homo sapien
agtgaggagcccctagaataatccc

SEQ ID NO: 5329269 - DNA, 25 bp, Homo sapien
gagagatgagaaccatccccttgga

SEQ ID NO: 5329270 - DNA, 25 bp, Homo sapien
gaataatcccagatctggaagtgag

SEQ ID NO: 5329271 - DNA, 25 bp, Homo sapien
gaatctggcgagtgtgaggaatgga

SEQ ID NO: 5329272 - DNA, 25 bp, Homo sapien
ttctgggggatgcaaagtggctact

SEQ ID NO: 5329273 - DNA, 25 bp, Homo sapien
gaggaatggagccgcagctgtgcat

SEQ ID NO: 5329274 - DNA, 25 bp, Homo sapien
cgacgatgttgacccatcccccttt

SEQ ID NO: 5329275 - DNA, 25 bp, Homo sapien
gttactaacccattgtctgtattct

SEQ ID NO: 5329276 - DNA, 25 bp, Homo sapien
ggttactaacccattgtctgtattc

SEQ ID NO: 5329277 - DNA, 25 bp, Homo sapien
ttgggttactaacccattgtctgta

SEQ ID NO: 5329278 - DNA, 25 bp, Homo sapien
gtctgtattcttaacaacagtgctt

SEQ ID NO: 5329279 - DNA, 25 bp, Homo sapien
gctgctgaacatgtctgtatccttc

SEQ ID NO: 5329280 - DNA, 25 bp, Homo sapien
atgcgcctgaagctgctgaacatgt

SEQ ID NO: 5329281 - DNA, 25 bp, Homo sapien
tgtatccttccaggattgggaccca

SEQ ID NO: 5329282 - DNA, 25 bp, Homo sapien
cttccaggattgggacccaagtggg

SEQ ID NO: 5329283 - DNA, 25 bp, Homo sapien
aaacccaggctgtttatccaagcca

SEQ ID NO: 5329284 - DNA, 25 bp, Homo sapien
ttcacgtaagtcacgggaattggcg

SEQ ID NO: 5329285 - DNA, 25 bp, Homo sapien
attggcgagagccatctgagtccca

SEQ ID NO: 5329286 - DNA, 25 bp, Homo sapien
caaggcagaatagttgaggttcagt

SEQ ID NO: 5329287 - DNA, 25 bp, Homo sapien
gctgtcctggaaagcggagattcct

SEQ ID NO: 5329288 - DNA, 25 bp, Homo sapien
cctgcgtccttgtggtggcctttcc

SEQ ID NO: 5329289 - DNA, 25 bp, Homo sapien
ttcctttggcacacccgtgcggtgg

SEQ ID NO: 5329290 - DNA, 25 bp, Homo sapien
gcctaagttgctgtgtgtcccatca

SEQ ID NO: 5329291 - DNA, 25 bp, Homo sapien
tatgtcagtaaaaatccatcaaagg

SEQ ID NO: 5329292 - DNA, 25 bp, Homo sapien
tatgagtatctacgtggttctagcc

SEQ ID NO: 5329293 - DNA, 25 bp, Homo sapien
tatatcaagttccaaaggccccatt

SEQ ID NO: 5329294 - DNA, 25 bp, Homo sapien
aacacaatacagagtaaagccaggg

SEQ ID NO: 5329295 - DNA, 25 bp, Homo sapien
cagcaaactgagctctgggcgaggc

SEQ ID NO: 5329296 - DNA, 25 bp, Homo sapien
gcgaggcagcgagataatgacaaca

SEQ ID NO: 5329297 - DNA, 25 bp, Homo sapien
taatggtgggaccaatccctagaca

SEQ ID NO: 5329298 - DNA, 25 bp, Homo sapien
tagcacaggcctttatatgttgggc

SEQ ID NO: 5329299 - DNA, 25 bp, Homo sapien
cacaaaaatgcataagacttagtcc

SEQ ID NO: 5329300 - DNA, 25 bp, Homo sapien
tatgcaccaacccacatgaaaatgt

SEQ ID NO: 5329301 - DNA, 25 bp, Homo sapien
tatgaaactcacagttcactctggg

SEQ ID NO: 5329302 - DNA, 25 bp, Homo sapien
ttcctcctttcatcgattcttagtg

SEQ ID NO: 5329303 - DNA, 25 bp, Homo sapien
gattccaaatatgaggataacctcc

SEQ ID NO: 5329304 - DNA, 25 bp, Homo sapien
agtagttccctgttgcgcttagaaa

SEQ ID NO: 5329305 - DNA, 25 bp, Homo sapien
aaagcttcatcatggcctatgtggc

SEQ ID NO: 5329306 - DNA, 25 bp, Homo sapien
taattttactcaatacagcgtcacc

SEQ ID NO: 5329307 - DNA, 25 bp, Homo sapien
gtgccttctcgtcttaaaagagagg

SEQ ID NO: 5329308 - DNA, 25 bp, Homo sapien
aatgtatacctttgagaacagtgcc

SEQ ID NO: 5329309 - DNA, 25 bp, Homo sapien
gataccgtatcatccagaggcctgg

SEQ ID NO: 5329310 - DNA, 25 bp, Homo sapien
gaggtcctcattttgtgagttggga

SEQ ID NO: 5329311 - DNA, 25 bp, Homo sapien
tcagtgctaaggaatgcaaacccac

SEQ ID NO: 5329312 - DNA, 25 bp, Homo sapien
gctgtcagtgctaaggaatgcaaac

SEQ ID NO: 5329313 - DNA, 25 bp, Homo sapien
ctaaggaatgcaaacccacccttct

SEQ ID NO: 5329314 - DNA, 25 bp, Homo sapien
gtgctaaggaatgcaaacccaccct

SEQ ID NO: 5329315 - DNA, 25 bp, Homo sapien
tgttgggcacatctgtgtagactcc

SEQ ID NO: 5329316 - DNA, 25 bp, Homo sapien
tccccagaacacagagcgggatcaa

SEQ ID NO: 5329317 - DNA, 25 bp, Homo sapien
gccagcaggtgttgggcacatctgt

SEQ ID NO: 5329318 - DNA, 25 bp, Homo sapien
cgggatcaactgtgccagcaggtgt

SEQ ID NO: 5329319 - DNA, 25 bp, Homo sapien
cactttgggaaatgcgggactgact

SEQ ID NO: 5329320 - DNA, 25 bp, Homo sapien
actgcctgcccacacaaggtgtgtt

SEQ ID NO: 5329321 - DNA, 25 bp, Homo sapien
gccaacatgcattgggaatctccaa

SEQ ID NO: 5329322 - DNA, 25 bp, Homo sapien
gcatcacttgggactaacagtctgt

SEQ ID NO: 5329323 - DNA, 25 bp, Homo sapien
aaagaccagcggtcttgccagagct

SEQ ID NO: 5329324 - DNA, 25 bp, Homo sapien
ccagttctgttgatgtagttacctt

SEQ ID NO: 5329325 - DNA, 25 bp, Homo sapien
ttaccttccgcaaagaccagcggtc

SEQ ID NO: 5329326 - DNA, 25 bp, Homo sapien
ctgttgatgtagttaccttccgcaa

SEQ ID NO: 5329327 - DNA, 25 bp, Homo sapien
tgccagcagccttgggacgtatgtg

SEQ ID NO: 5329328 - DNA, 25 bp, Homo sapien
attgccagcagccttgggacgtatg

SEQ ID NO: 5329329 - DNA, 25 bp, Homo sapien
ttacaagtcgcaagtggatgaccat

SEQ ID NO: 5329330 - DNA, 25 bp, Homo sapien
agtcgcaagtggatgaccatgcccc

SEQ ID NO: 5329331 - DNA, 25 bp, Homo sapien
cctgaacatccataacagcctggtc

SEQ ID NO: 5329332 - DNA, 25 bp, Homo sapien
ctgaacatccataacagcctggtcc

SEQ ID NO: 5329333 - DNA, 25 bp, Homo sapien
tgaacatccataacagcctggtcca

SEQ ID NO: 5329334 - DNA, 25 bp, Homo sapien
aacctgaacatccataacagcctgg

SEQ ID NO: 5329335 - DNA, 25 bp, Homo sapien
tggagctcttttgggatcttccttc

SEQ ID NO: 5329336 - DNA, 25 bp, Homo sapien
tccttggagctcttttgggatcttc

SEQ ID NO: 5329337 - DNA, 25 bp, Homo sapien
cttggagctcttttgggatcttcct

SEQ ID NO: 5329338 - DNA, 25 bp, Homo sapien
ccttggagctcttttgggatcttcc

SEQ ID NO: 5329339 - DNA, 25 bp, Homo sapien
gcatggatgggcgaacccaattgca

SEQ ID NO: 5329340 - DNA, 25 bp, Homo sapien
tggatgggcgaacccaattgcagcc

SEQ ID NO: 5329341 - DNA, 25 bp, Homo sapien
gatgggcgaacccaattgcagcccc

SEQ ID NO: 5329342 - DNA, 25 bp, Homo sapien
aggacgcatggatgggcgaacccaa

SEQ ID NO: 5329343 - DNA, 25 bp, Homo sapien
tatgagtccaacaaccatttcttcc

SEQ ID NO: 5329344 - DNA, 25 bp, Homo sapien
ttcttcccagatcatacagaacacg

SEQ ID NO: 5329345 - DNA, 25 bp, Homo sapien
tcctcttacagtctcaatatgagtc

SEQ ID NO: 5329346 - DNA, 25 bp, Homo sapien
atacagaacacgagctcagcccagc

SEQ ID NO: 5329347 - DNA, 25 bp, Homo sapien
agcatcatttactgcctcttgaagc

SEQ ID NO: 5329348 - DNA, 25 bp, Homo sapien
tgggtcaccactcagcatgatttgc

SEQ ID NO: 5329349 - DNA, 25 bp, Homo sapien
caatatttaggatgtgccacactgg

SEQ ID NO: 5329350 - DNA, 25 bp, Homo sapien
tagtgagacccatccaaaatgttga

SEQ ID NO: 5329351 - DNA, 25 bp, Homo sapien
cagagccagtccctgtttagtgaca

SEQ ID NO: 5329352 - DNA, 25 bp, Homo sapien
tagcctgacttcagaatcgggagag

SEQ ID NO: 5329353 - DNA, 25 bp, Homo sapien
cacaagtgtgtaaataggcaaaaac

SEQ ID NO: 5329354 - DNA, 25 bp, Homo sapien
taggatgtcataggctcagcttaca

SEQ ID NO: 5329355 - DNA, 25 bp, Homo sapien
ttttcaaccttgagctacccactgg

SEQ ID NO: 5329356 - DNA, 25 bp, Homo sapien
cacagtgggggccacgcagaagctc

SEQ ID NO: 5329357 - DNA, 25 bp, Homo sapien
gcagaagctctgagcttgcccctcc

SEQ ID NO: 5329358 - DNA, 25 bp, Homo sapien
cccctctggctgctcgatgagagct

SEQ ID NO: 5329359 - DNA, 25 bp, Homo sapien
cgatgagagctctgggcttttgtgc

SEQ ID NO: 5329360 - DNA, 25 bp, Homo sapien
caggctggacaccacaggataactt

SEQ ID NO: 5329361 - DNA, 25 bp, Homo sapien
ggctggacaccacaggataacttcc

SEQ ID NO: 5329362 - DNA, 25 bp, Homo sapien
ctcgttcaggctggacaccacagga

SEQ ID NO: 5329363 - DNA, 25 bp, Homo sapien
tcaggctggacaccacaggataact

SEQ ID NO: 5329364 - DNA, 25 bp, Homo sapien
tagaacctcagctgttaaccaaggg

SEQ ID NO: 5329365 - DNA, 25 bp, Homo sapien
tagaacagagatataagggcctggg

SEQ ID NO: 5329366 - DNA, 25 bp, Homo sapien
tataatcacttgctaaacactgggc

SEQ ID NO: 5329367 - DNA, 25 bp, Homo sapien
catcacccagggataaaaacagaga

SEQ ID NO: 5329368 - DNA, 25 bp, Homo sapien
tgcaccctccagtgagacacaagat

SEQ ID NO: 5329369 - DNA, 25 bp, Homo sapien
tataccatgctataggagactgggc

SEQ ID NO: 5329370 - DNA, 25 bp, Homo sapien
gacgagacccttgtttgcacagcat

SEQ ID NO: 5329371 - DNA, 25 bp, Homo sapien
gactgggcaaaacctgtacaatgac

SEQ ID NO: 5329372 - DNA, 25 bp, Homo sapien
atccaccagtgtcccttggtgcttc

SEQ ID NO: 5329373 - DNA, 25 bp, Homo sapien
atcaggaggtgggactccttctcca

SEQ ID NO: 5329374 - DNA, 25 bp, Homo sapien
aaaggagccactatcctggcagggt

SEQ ID NO: 5329375 - DNA, 25 bp, Homo sapien
tccacgatgcggtcaagtgatccac

SEQ ID NO: 5329376 - DNA, 25 bp, Homo sapien
gctgatctccagctatgtgctagga

SEQ ID NO: 5329377 - DNA, 25 bp, Homo sapien
tgatctccagctatgtgctaggaac

SEQ ID NO: 5329378 - DNA, 25 bp, Homo sapien
ttgctgatctccagctatgtgctag

SEQ ID NO: 5329379 - DNA, 25 bp, Homo sapien
atgtgctaggaactgtcccacactt

SEQ ID NO: 5329380 - DNA, 25 bp, Homo sapien
agttgaagagttagaagatggaagt

SEQ ID NO: 5329381 - DNA, 25 bp, Homo sapien
tgcagagttgtggcaatgacaggct

SEQ ID NO: 5329382 - DNA, 25 bp, Homo sapien
gttgaagagttagaagatggaagtg

SEQ ID NO: 5329383 - DNA, 25 bp, Homo sapien
catgcagagttgtggcaatgacagg

SEQ ID NO: 5329384 - DNA, 25 bp, Homo sapien
gatagaagccagaatcagatgcctg

SEQ ID NO: 5329385 - DNA, 25 bp, Homo sapien
gagttcagtcctgcaattgctccag

SEQ ID NO: 5329386 - DNA, 25 bp, Homo sapien
taggagggttccacattagtctgct

SEQ ID NO: 5329387 - DNA, 25 bp, Homo sapien
tagggtaaaccctgcctgcagaaag

SEQ ID NO: 5329388 - DNA, 25 bp, Homo sapien
ctcagaggagtgtcagggaatagct

SEQ ID NO: 5329389 - DNA, 25 bp, Homo sapien
gaatcccctggcttttaagtgggca

SEQ ID NO: 5329390 - DNA, 25 bp, Homo sapien
ggatagaatccagaagagaggcaga

SEQ ID NO: 5329391 - DNA, 25 bp, Homo sapien
gaatagctgtactgcctagggttga

SEQ ID NO: 5329392 - DNA, 25 bp, Homo sapien
ccagggtctttttagaggctgccta

SEQ ID NO: 5329393 - DNA, 25 bp, Homo sapien
tattgaaccaaagaactcagctcct

SEQ ID NO: 5329394 - DNA, 25 bp, Homo sapien
caagcccttcatgtggttattggca

SEQ ID NO: 5329395 - DNA, 25 bp, Homo sapien
tctgaactggtgtagctgggtcctt

SEQ ID NO: 5329396 - DNA, 25 bp, Homo sapien
catatgagttgatgcctaaattcac

SEQ ID NO: 5329397 - DNA, 25 bp, Homo sapien
accatcttgagtgaagcaaatgccc

SEQ ID NO: 5329398 - DNA, 25 bp, Homo sapien
gaatctgaacgcagatgttccaggc

SEQ ID NO: 5329399 - DNA, 25 bp, Homo sapien
tatccctgaaggtaactgcgaagcc

SEQ ID NO: 5329400 - DNA, 25 bp, Homo sapien
aggaatgcactgagctcccgacatc

SEQ ID NO: 5329401 - DNA, 25 bp, Homo sapien
cccgtgcgcggctgatacccgagtg

SEQ ID NO: 5329402 - DNA, 25 bp, Homo sapien
tggatgaaccccactgtcaagtgtc

SEQ ID NO: 5329403 - DNA, 25 bp, Homo sapien
tgatacccgagtgcgctgatagcag

SEQ ID NO: 5329404 - DNA, 25 bp, Homo sapien
ttacagggccttggagaaaagcctc

SEQ ID NO: 5329405 - DNA, 25 bp, Homo sapien
tggagaaaagcctcctcatcccctt

SEQ ID NO: 5329406 - DNA, 25 bp, Homo sapien
ctcctcatccccttgcccagaatac

SEQ ID NO: 5329407 - DNA, 25 bp, Homo sapien
gggccttggagaaaagcctcctcat

SEQ ID NO: 5329408 - DNA, 25 bp, Homo sapien
tggaccacacacgaccagttcttct

SEQ ID NO: 5329409 - DNA, 25 bp, Homo sapien
cgtgctgacacgatgcagaggccag

SEQ ID NO: 5329410 - DNA, 25 bp, Homo sapien
gttcttctaagacagcaggctgagc

SEQ ID NO: 5329411 - DNA, 25 bp, Homo sapien
agaagggacagcagcgtccctcttc

SEQ ID NO: 5329412 - DNA, 25 bp, Homo sapien
gcaagaagccggcataagtgggacc

SEQ ID NO: 5329413 - DNA, 25 bp, Homo sapien
taagtgggacctcgaggtccaaagc

SEQ ID NO: 5329414 - DNA, 25 bp, Homo sapien
ggacctcgaggtccaaagcgacctc

SEQ ID NO: 5329415 - DNA, 25 bp, Homo sapien
caaagcgacctcaacatcaaagaat

SEQ ID NO: 5329416 - DNA, 25 bp, Homo sapien
agggaaacaacccagcctcgctgac

SEQ ID NO: 5329417 - DNA, 25 bp, Homo sapien
tttctggtccctaatgcgctgtgga

SEQ ID NO: 5329418 - DNA, 25 bp, Homo sapien
tctggtccctaatgcgctgtggaca

SEQ ID NO: 5329419 - DNA, 25 bp, Homo sapien
gcgctgtggacagggaaacaaccca

SEQ ID NO: 5329420 - DNA, 25 bp, Homo sapien
gccaggaacccgcttcccagccgct

SEQ ID NO: 5329421 - DNA, 25 bp, Homo sapien
tgggcgcagctctcccggaccacgg

SEQ ID NO: 5329422 - DNA, 25 bp, Homo sapien
agccgctccccctcacgcaggaagc

SEQ ID NO: 5329423 - DNA, 25 bp, Homo sapien
tcacgcaggaagccgggactctggg

SEQ ID NO: 5329424 - DNA, 25 bp, Homo sapien
tacggaggcagaaagaagccacaga

SEQ ID NO: 5329425 - DNA, 25 bp, Homo sapien
cggaggcagaaagaagccacagaaa

SEQ ID NO: 5329426 - DNA, 25 bp, Homo sapien
ggaggcagaaagaagccacagaaac

SEQ ID NO: 5329427 - DNA, 25 bp, Homo sapien
ctacggaggcagaaagaagccacag

SEQ ID NO: 5329428 - DNA, 25 bp, Homo sapien
agatgccccgctggcccgactgtgg

SEQ ID NO: 5329429 - DNA, 25 bp, Homo sapien
gtgagcaccgccccttctgttgtct

SEQ ID NO: 5329430 - DNA, 25 bp, Homo sapien
ggaaagacgccggtcccgtgagcac

SEQ ID NO: 5329431 - DNA, 25 bp, Homo sapien
ctgagggtggaagcgtgaacatccg

SEQ ID NO: 5329432 - DNA, 25 bp, Homo sapien
caaagtagcatttttctggttcggc

SEQ ID NO: 5329433 - DNA, 25 bp, Homo sapien
cacaaagtagcatttttctggttcg

SEQ ID NO: 5329434 - DNA, 25 bp, Homo sapien
tagcatttttctggttcggctccac

SEQ ID NO: 5329435 - DNA, 25 bp, Homo sapien
aagtagcatttttctggttcggctc

SEQ ID NO: 5329436 - DNA, 25 bp, Homo sapien
tccaaccaattaccaagtagttcag

SEQ ID NO: 5329437 - DNA, 25 bp, Homo sapien
ctctcttcccggtgctctcagtgct

SEQ ID NO: 5329438 - DNA, 25 bp, Homo sapien
cacaaagcctggctgctccacgctc

SEQ ID NO: 5329439 - DNA, 25 bp, Homo sapien
ctgactcggctgtcctcaaatcccc

SEQ ID NO: 5329440 - DNA, 25 bp, Homo sapien
cctgtcgttatgaaggaccccaaag

SEQ ID NO: 5329441 - DNA, 25 bp, Homo sapien
tgctggcgatattcacaggaggtca

SEQ ID NO: 5329442 - DNA, 25 bp, Homo sapien
aatatggacccacagattggctgct

SEQ ID NO: 5329443 - DNA, 25 bp, Homo sapien
ggatcattggagtcccgatgccatg

SEQ ID NO: 5329444 - DNA, 25 bp, Homo sapien
aggaacccagatcccattggctcca

SEQ ID NO: 5329445 - DNA, 25 bp, Homo sapien
gaacccagatcccattggctccagg

SEQ ID NO: 5329446 - DNA, 25 bp, Homo sapien
ggaacccagatcccattggctccag

SEQ ID NO: 5329447 - DNA, 25 bp, Homo sapien
aacccagatcccattggctccaggt

SEQ ID NO: 5329448 - DNA, 25 bp, Homo sapien
tagggcggcttgtctccgcaacagg

SEQ ID NO: 5329449 - DNA, 25 bp, Homo sapien
ccgataggacctgcatcacctctgt

SEQ ID NO: 5329450 - DNA, 25 bp, Homo sapien
gaacaaatccactgccagacgtagg

SEQ ID NO: 5329451 - DNA, 25 bp, Homo sapien
tgcaagggccttgcctcctaggagg

SEQ ID NO: 5329452 - DNA, 25 bp, Homo sapien
tccgcattaagcttcctcctgtggc

SEQ ID NO: 5329453 - DNA, 25 bp, Homo sapien
aggtggcccttctccgcattaagct

SEQ ID NO: 5329454 - DNA, 25 bp, Homo sapien
ctccccacaagaagtcttttgggtg

SEQ ID NO: 5329455 - DNA, 25 bp, Homo sapien
caagaagtcttttgggtggccaggc

SEQ ID NO: 5329456 - DNA, 25 bp, Homo sapien
ctgtatccacttagccccaagtggg

SEQ ID NO: 5329457 - DNA, 25 bp, Homo sapien
caacctctccatccgagagagccca

SEQ ID NO: 5329458 - DNA, 25 bp, Homo sapien
tctccatccgagagagcccattcaa

SEQ ID NO: 5329459 - DNA, 25 bp, Homo sapien
gtccaagcacatctgtatccactta

SEQ ID NO: 5329460 - DNA, 25 bp, Homo sapien
ccgagaagccaagctgggcctgagc

SEQ ID NO: 5329461 - DNA, 25 bp, Homo sapien
cgagaagccaagctgggcctgagct

SEQ ID NO: 5329462 - DNA, 25 bp, Homo sapien
tgccgagaagccaagctgggcctga

SEQ ID NO: 5329463 - DNA, 25 bp, Homo sapien
ctgccgagaagccaagctgggcctg

SEQ ID NO: 5329464 - DNA, 25 bp, Homo sapien
tacacatgttacctatattgcagca

SEQ ID NO: 5329465 - DNA, 25 bp, Homo sapien
cacatttctaactcaacccagggta

SEQ ID NO: 5329466 - DNA, 25 bp, Homo sapien
cagcctgatatggaaccagacctgc

SEQ ID NO: 5329467 - DNA, 25 bp, Homo sapien
cagacctgcagagatactgtgatgt

SEQ ID NO: 5329468 - DNA, 25 bp, Homo sapien
gaccagaagtccgaagtcagtatga

SEQ ID NO: 5329469 - DNA, 25 bp, Homo sapien
caaactgtaatggatgccctaggca

SEQ ID NO: 5329470 - DNA, 25 bp, Homo sapien
tatggcagctctatgggaaaaatct

SEQ ID NO: 5329471 - DNA, 25 bp, Homo sapien
ccctaggcagcactgtagagcaatt

SEQ ID NO: 5329472 - DNA, 25 bp, Homo sapien
tcagctatgatttggagtgtatcag

SEQ ID NO: 5329473 - DNA, 25 bp, Homo sapien
gcctctggtaatctctaatttactt

SEQ ID NO: 5329474 - DNA, 25 bp, Homo sapien
taatatttgttcgttaatgtctggc

SEQ ID NO: 5329475 - DNA, 25 bp, Homo sapien
ggagtgtatcaggacttcattcctc

SEQ ID NO: 5329476 - DNA, 25 bp, Homo sapien
aatgagctatgacagattaacagga

SEQ ID NO: 5329477 - DNA, 25 bp, Homo sapien
tctacagattgcagagatggaagta

SEQ ID NO: 5329478 - DNA, 25 bp, Homo sapien
aatttcatatgcacatggacatggg

SEQ ID NO: 5329479 - DNA, 25 bp, Homo sapien
catgggaatcccacaaatatgagac

SEQ ID NO: 5329480 - DNA, 25 bp, Homo sapien
gacgcatcttggtggcgcagcctta

SEQ ID NO: 5329481 - DNA, 25 bp, Homo sapien
gaagcctctggaaaaaatgacgcat

SEQ ID NO: 5329482 - DNA, 25 bp, Homo sapien
taacctaaaagggagctactggcag

SEQ ID NO: 5329483 - DNA, 25 bp, Homo sapien
caaatttgatatgtctgggcaggac

SEQ ID NO: 5329484 - DNA, 25 bp, Homo sapien
aacaaagcaaagatgatcctaaaat

SEQ ID NO: 5329485 - DNA, 25 bp, Homo sapien
cactggacttaacgacatgaggaag

SEQ ID NO: 5329486 - DNA, 25 bp, Homo sapien
ggaagaaatgaccaactggctcagt

SEQ ID NO: 5329487 - DNA, 25 bp, Homo sapien
tttattcacagttcaggcttactca

SEQ ID NO: 5329488 - DNA, 25 bp, Homo sapien
gggccacacgctagatgacagacat

SEQ ID NO: 5329489 - DNA, 25 bp, Homo sapien
cactggttttaattgggcatgctca

SEQ ID NO: 5329490 - DNA, 25 bp, Homo sapien
taataatcacttactgggccacacg

SEQ ID NO: 5329491 - DNA, 25 bp, Homo sapien
aaaagggctcaaaggaactctcagt

SEQ ID NO: 5329492 - DNA, 25 bp, Homo sapien
gaagatctggccagaaaagctccat

SEQ ID NO: 5329493 - DNA, 25 bp, Homo sapien
tgcacccggcagagaatccatgttt

SEQ ID NO: 5329494 - DNA, 25 bp, Homo sapien
gaaatgacactatacacacgctagc

SEQ ID NO: 5329495 - DNA, 25 bp, Homo sapien
aaagatcaggtttctagtcaccatg

SEQ ID NO: 5329496 - DNA, 25 bp, Homo sapien
ggtcagcgacctgcaaatcttccaa

SEQ ID NO: 5329497 - DNA, 25 bp, Homo sapien
gaaattcttcctcgtgacaaagttg

SEQ ID NO: 5329498 - DNA, 25 bp, Homo sapien
gagcttagcctaccacatatactta

SEQ ID NO: 5329499 - DNA, 25 bp, Homo sapien
tggtgcctatcagtgtaaagcatac

SEQ ID NO: 5329500 - DNA, 25 bp, Homo sapien
tcaaagtcctccacaaattactggg

SEQ ID NO: 5329501 - DNA, 25 bp, Homo sapien
ggtccagaaatgcaacacccagcat

SEQ ID NO: 5329502 - DNA, 25 bp, Homo sapien
tatgagcatacactgccactggctt

SEQ ID NO: 5329503 - DNA, 25 bp, Homo sapien
aatatgttaaggattgagacccacc

SEQ ID NO: 5329504 - DNA, 25 bp, Homo sapien
gatttggcaagattccgtgggaaat

SEQ ID NO: 5329505 - DNA, 25 bp, Homo sapien
tttggcaagattccgtgggaaatca

SEQ ID NO: 5329506 - DNA, 25 bp, Homo sapien
acagatttggcaagattccgtggga

SEQ ID NO: 5329507 - DNA, 25 bp, Homo sapien
tggcaagattccgtgggaaatcaac

SEQ ID NO: 5329508 - DNA, 25 bp, Homo sapien
cacagcaaggtggaaagccagcaac

SEQ ID NO: 5329509 - DNA, 25 bp, Homo sapien
gggcaccttgatcgttctttttgtg

SEQ ID NO: 5329510 - DNA, 25 bp, Homo sapien
caactgtaaagggatcacgctgaga

SEQ ID NO: 5329511 - DNA, 25 bp, Homo sapien
tatcctccttatcacaaattaccac

SEQ ID NO: 5329512 - DNA, 25 bp, Homo sapien
cagagggccatgtttcaattcacca

SEQ ID NO: 5329513 - DNA, 25 bp, Homo sapien
gccttcagagtgcatataagtaatt

SEQ ID NO: 5329514 - DNA, 25 bp, Homo sapien
aatttatccaccaaagccagagggc

SEQ ID NO: 5329515 - DNA, 25 bp, Homo sapien
gcataagtgtgatctctcatgatga

SEQ ID NO: 5329516 - DNA, 25 bp, Homo sapien
gaatttcgtcatccatgctcagtac

SEQ ID NO: 5329517 - DNA, 25 bp, Homo sapien
tatcagaactgacttctgatgataa

SEQ ID NO: 5329518 - DNA, 25 bp, Homo sapien
gtgccccttcaagacaagtagcata

SEQ ID NO: 5329519 - DNA, 25 bp, Homo sapien
gtagcataatgatagcctcgtccca

SEQ ID NO: 5329520 - DNA, 25 bp, Homo sapien
aggcagccgtttcaatccaagcatg

SEQ ID NO: 5329521 - DNA, 25 bp, Homo sapien
catcataagggcaaacatcacaagg

SEQ ID NO: 5329522 - DNA, 25 bp, Homo sapien
ggagatccgatcatcacacatcata

SEQ ID NO: 5329523 - DNA, 25 bp, Homo sapien
tcacaagggatacaaactggctggt

SEQ ID NO: 5329524 - DNA, 25 bp, Homo sapien
tattatattccaccagcagactgga

SEQ ID NO: 5329525 - DNA, 25 bp, Homo sapien
cacaaaacatactaccaggccagag

SEQ ID NO: 5329526 - DNA, 25 bp, Homo sapien
taaagtgaatttggagtcctctgcc

SEQ ID NO: 5329527 - DNA, 25 bp, Homo sapien
tgtgcgcgcgcggattatatgctga

SEQ ID NO: 5329528 - DNA, 25 bp, Homo sapien
tgccaactgtgtttgtgatccccac

SEQ ID NO: 5329529 - DNA, 25 bp, Homo sapien
tgtctcccgtgatatggaactgcca

SEQ ID NO: 5329530 - DNA, 25 bp, Homo sapien
gaagacccatcaaagtatctgctgt

SEQ ID NO: 5329531 - DNA, 25 bp, Homo sapien
tgatccccacagttaaagctcctct

SEQ ID NO: 5329532 - DNA, 25 bp, Homo sapien
catcatctcgaaagactggtgtgtt

SEQ ID NO: 5329533 - DNA, 25 bp, Homo sapien
ttctgtccaggaagtcacttgctag

SEQ ID NO: 5329534 - DNA, 25 bp, Homo sapien
accatcacaggcaactcagtcagct

SEQ ID NO: 5329535 - DNA, 25 bp, Homo sapien
aggaagtcacttgctagttccacca

SEQ ID NO: 5329536 - DNA, 25 bp, Homo sapien
agagaaaatatgacttggtcacaga

SEQ ID NO: 5329537 - DNA, 25 bp, Homo sapien
cagagaaaatatgacttggtcacag

SEQ ID NO: 5329538 - DNA, 25 bp, Homo sapien
ttctgtttaggaccatataattttg

SEQ ID NO: 5329539 - DNA, 25 bp, Homo sapien
caacattacatagactttctgttta

SEQ ID NO: 5329540 - DNA, 25 bp, Homo sapien
tttagacctctacccttcaacatta

SEQ ID NO: 5329541 - DNA, 25 bp, Homo sapien
ctgtttaggaccatataattttggg

SEQ ID NO: 5329542 - DNA, 25 bp, Homo sapien
gcctttcatgaagtccgttgcagga

SEQ ID NO: 5329543 - DNA, 25 bp, Homo sapien
gaggtctatctgtatatctagggac

SEQ ID NO: 5329544 - DNA, 25 bp, Homo sapien
gaccttttctacagatcttccatgg

SEQ ID NO: 5329545 - DNA, 25 bp, Homo sapien
taggctacaagtctaggacagtaca

SEQ ID NO: 5329546 - DNA, 25 bp, Homo sapien
gatctcctttatgtgatccttcaaa

SEQ ID NO: 5329547 - DNA, 25 bp, Homo sapien
tcaaacgccggcatctctggatctc

SEQ ID NO: 5329548 - DNA, 25 bp, Homo sapien
tatgtgatccttcaaaccacccaaa

SEQ ID NO: 5329549 - DNA, 25 bp, Homo sapien
catggtaacttgttccacaagcaat

SEQ ID NO: 5329550 - DNA, 25 bp, Homo sapien
tatcttagttagttatactataaaa

SEQ ID NO: 5329551 - DNA, 25 bp, Homo sapien
ttatcttagttagttatactataaa

SEQ ID NO: 5329552 - DNA, 25 bp, Homo sapien
tttgaataattatatgttctccgtt

SEQ ID NO: 5329553 - DNA, 25 bp, Homo sapien
taaaaaggaggtcagactggtctag

SEQ ID NO: 5329554 - DNA, 25 bp, Homo sapien
ggaggtcagactggtctagaattcc

SEQ ID NO: 5329555 - DNA, 25 bp, Homo sapien
cccgctttgggttcccaaagcgctg

SEQ ID NO: 5329556 - DNA, 25 bp, Homo sapien
aggctcttcagtagccagggctaca

SEQ ID NO: 5329557 - DNA, 25 bp, Homo sapien
tcctctcattgtgttcacgacagac

SEQ ID NO: 5329558 - DNA, 25 bp, Homo sapien
ttgtgttcacgacagactctggctg

SEQ ID NO: 5329559 - DNA, 25 bp, Homo sapien
tagtcatcaaagttgactcttcctc

SEQ ID NO: 5329560 - DNA, 25 bp, Homo sapien
tcattgtgttcacgacagactctgg

SEQ ID NO: 5329561 - DNA, 25 bp, Homo sapien
tcttccagaaagatgacgcgattgg

SEQ ID NO: 5329562 - DNA, 25 bp, Homo sapien
cctgcagttcgtttaattcgatgga

SEQ ID NO: 5329563 - DNA, 25 bp, Homo sapien
gaaagacgtccatccactactgctg

SEQ ID NO: 5329564 - DNA, 25 bp, Homo sapien
tcgtccggggtgatctcctgcagtt

SEQ ID NO: 5329565 - DNA, 25 bp, Homo sapien
agtaatactccactgctttttcttc

SEQ ID NO: 5329566 - DNA, 25 bp, Homo sapien
tgtgctgtccacacgagagagattg

SEQ ID NO: 5329567 - DNA, 25 bp, Homo sapien
ctgtccacacgagagagattgcagc

SEQ ID NO: 5329568 - DNA, 25 bp, Homo sapien
aggttgtgctgtccacacgagagag

SEQ ID NO: 5329569 - DNA, 25 bp, Homo sapien
gtgatccccaccgtgtgaattttga

SEQ ID NO: 5329570 - DNA, 25 bp, Homo sapien
ccaccgtgtgaattttgatccaatc

SEQ ID NO: 5329571 - DNA, 25 bp, Homo sapien
tgtgaattttgatccaatctgagtc

SEQ ID NO: 5329572 - DNA, 25 bp, Homo sapien
ccctgtgatccccaccgtgtgaatt

SEQ ID NO: 5329573 - DNA, 25 bp, Homo sapien
ggaatgtgatcagtagaaagtttat

SEQ ID NO: 5329574 - DNA, 25 bp, Homo sapien
tttatgttcactccgtacaccaatc

SEQ ID NO: 5329575 - DNA, 25 bp, Homo sapien
tacaccaatcaacagagggctacct

SEQ ID NO: 5329576 - DNA, 25 bp, Homo sapien
gagtataggaatgtgatcagtagaa

SEQ ID NO: 5329577 - DNA, 25 bp, Homo sapien
aggcatgtgctaccacacccggcta

SEQ ID NO: 5329578 - DNA, 25 bp, Homo sapien
actgaaacctcttgcctcctgggtt

SEQ ID NO: 5329579 - DNA, 25 bp, Homo sapien
ctcactgaaacctcttgcctcctgg

SEQ ID NO: 5329580 - DNA, 25 bp, Homo sapien
gggttcaagcggttctccttgcctc

SEQ ID NO: 5329581 - DNA, 25 bp, Homo sapien
ttaaatggaagagtggtaagcaaca

SEQ ID NO: 5329582 - DNA, 25 bp, Homo sapien
tttcttcagggattctgttaaatgg

SEQ ID NO: 5329583 - DNA, 25 bp, Homo sapien
taaatggaagagtggtaagcaacag

SEQ ID NO: 5329584 - DNA, 25 bp, Homo sapien
ttgctttcttcagggattctgttaa

SEQ ID NO: 5329585 - DNA, 25 bp, Homo sapien
ctgcttgcccgggaaaatgaacact

SEQ ID NO: 5329586 - DNA, 25 bp, Homo sapien
tgcttgcccgggaaaatgaacactt

SEQ ID NO: 5329587 - DNA, 25 bp, Homo sapien
aactgcttgcccgggaaaatgaaca

SEQ ID NO: 5329588 - DNA, 25 bp, Homo sapien
ccaactgcttgcccgggaaaatgaa

SEQ ID NO: 5329589 - DNA, 25 bp, Homo sapien
taaccaagcctacacccaaaatatg

SEQ ID NO: 5329590 - DNA, 25 bp, Homo sapien
gccctagtaattgtacaccactgtt

SEQ ID NO: 5329591 - DNA, 25 bp, Homo sapien
gaacgacagaattagaaaagatcct

SEQ ID NO: 5329592 - DNA, 25 bp, Homo sapien
tatgaattatcagaggaacgacaga

SEQ ID NO: 5329593 - DNA, 25 bp, Homo sapien
tcagattcgaagtcatagcctttgc

SEQ ID NO: 5329594 - DNA, 25 bp, Homo sapien
caattgttggataactctctccacc

SEQ ID NO: 5329595 - DNA, 25 bp, Homo sapien
tctccaccaaggtagtaaagctggt

SEQ ID NO: 5329596 - DNA, 25 bp, Homo sapien
catacatatacttaacgagcttggc

SEQ ID NO: 5329597 - DNA, 25 bp, Homo sapien
tggtgatgattccattgtgaataac

SEQ ID NO: 5329598 - DNA, 25 bp, Homo sapien
tgtagttggtgatgattccattgtg

SEQ ID NO: 5329599 - DNA, 25 bp, Homo sapien
gatgattccattgtgaataacgata

SEQ ID NO: 5329600 - DNA, 25 bp, Homo sapien
gattccattgtgaataacgataaat

SEQ ID NO: 5329601 - DNA, 25 bp, Homo sapien
tagcgactgctggtacataaaaact

SEQ ID NO: 5329602 - DNA, 25 bp, Homo sapien
caagagttgacaatatcattatttg

SEQ ID NO: 5329603 - DNA, 25 bp, Homo sapien
aaaactaccaatccggctgagcacg

SEQ ID NO: 5329604 - DNA, 25 bp, Homo sapien
tatcattatttgtagcgactgctgg

SEQ ID NO: 5329605 - DNA, 25 bp, Homo sapien
gtacatcaaattctatatccaaatc

SEQ ID NO: 5329606 - DNA, 25 bp, Homo sapien
tatttttatcagagcgctgggggtg

SEQ ID NO: 5329607 - DNA, 25 bp, Homo sapien
gagctattccaaggtgtacatcaaa

SEQ ID NO: 5329608 - DNA, 25 bp, Homo sapien
catgtgttgcccaacgggtatgagc

SEQ ID NO: 5329609 - DNA, 25 bp, Homo sapien
agaaaaatttcaatattaaatcatg

SEQ ID NO: 5329610 - DNA, 25 bp, Homo sapien
ctgaagaatatgaaaagaaaaattt

SEQ ID NO: 5329611 - DNA, 25 bp, Homo sapien
gaagaatatgaaaagaaaaatttca

SEQ ID NO: 5329612 - DNA, 25 bp, Homo sapien
gaatatgaaaagaaaaatttcaata

SEQ ID NO: 5329613 - DNA, 25 bp, Homo sapien
gcaggcattggcttcccaatcttta

SEQ ID NO: 5329614 - DNA, 25 bp, Homo sapien
ctttatcattgcctccatcaaatcc

SEQ ID NO: 5329615 - DNA, 25 bp, Homo sapien
ttttgcaggcattggcttcccaatc

SEQ ID NO: 5329616 - DNA, 25 bp, Homo sapien
ttatcattgcctccatcaaatccca

SEQ ID NO: 5329617 - DNA, 25 bp, Homo sapien
tctaggaagaaacttgtaggaggcc

SEQ ID NO: 5329618 - DNA, 25 bp, Homo sapien
ggcctagaatacagcttgggagata

SEQ ID NO: 5329619 - DNA, 25 bp, Homo sapien
cttgtaggaggcctagaatacagct

SEQ ID NO: 5329620 - DNA, 25 bp, Homo sapien
taaaatatcatggtctatctaggaa

SEQ ID NO: 5329621 - DNA, 25 bp, Homo sapien
ttaccaacatatattaacagaaggc

SEQ ID NO: 5329622 - DNA, 25 bp, Homo sapien
attaacagaaggctgatgggccagg

SEQ ID NO: 5329623 - DNA, 25 bp, Homo sapien
acatatattaacagaaggctgatgg

SEQ ID NO: 5329624 - DNA, 25 bp, Homo sapien
atatattaacagaaggctgatgggc

SEQ ID NO: 5329625 - DNA, 25 bp, Homo sapien
cccagagttcgagactgtagtgagc

SEQ ID NO: 5329626 - DNA, 25 bp, Homo sapien
gaatttagagtaagaccttcacgaa

SEQ ID NO: 5329627 - DNA, 25 bp, Homo sapien
ccacataaatggtaacactgttgag

SEQ ID NO: 5329628 - DNA, 25 bp, Homo sapien
tgtgtcaaagcatgaaatcaatgga

SEQ ID NO: 5329629 - DNA, 25 bp, Homo sapien
tctccaggatttctcgtctcgttcg

SEQ ID NO: 5329630 - DNA, 25 bp, Homo sapien
gcagaatcatatcctctgtactcca

SEQ ID NO: 5329631 - DNA, 25 bp, Homo sapien
gaacatggtagtttaagtaagcaaa

SEQ ID NO: 5329632 - DNA, 25 bp, Homo sapien
ggcctttgattagggtctccaggat

SEQ ID NO: 5329633 - DNA, 25 bp, Homo sapien
tgcaaataaacaaatatttaatgaa

SEQ ID NO: 5329634 - DNA, 25 bp, Homo sapien
ctgcaaataaacaaatatttaatga

SEQ ID NO: 5329635 - DNA, 25 bp, Homo sapien
gcaaataaacaaatatttaatgaaa

SEQ ID NO: 5329636 - DNA, 25 bp, Homo sapien
caaagaagcttataaagctggctac

SEQ ID NO: 5329637 - DNA, 25 bp, Homo sapien
tgacaaccacataacaacccttgaa

SEQ ID NO: 5329638 - DNA, 25 bp, Homo sapien
ggccctaaaatctgtaccaatgaga

SEQ ID NO: 5329639 - DNA, 25 bp, Homo sapien
tatgtcctatatacagagcatttcg

SEQ ID NO: 5329640 - DNA, 25 bp, Homo sapien
gccataacatacatgctgatcacca

SEQ ID NO: 5329641 - DNA, 25 bp, Homo sapien
agccataacatacatgctgatcacc

SEQ ID NO: 5329642 - DNA, 25 bp, Homo sapien
ccataacatacatgctgatcaccat

SEQ ID NO: 5329643 - DNA, 25 bp, Homo sapien
tacttgtggtctatgacatggcaat

SEQ ID NO: 5329644 - DNA, 25 bp, Homo sapien
tcattctacttgtggtctatgacat

SEQ ID NO: 5329645 - DNA, 25 bp, Homo sapien
ttctacttgtggtctatgacatggc

SEQ ID NO: 5329646 - DNA, 25 bp, Homo sapien
tctacttgtggtctatgacatggca

SEQ ID NO: 5329647 - DNA, 25 bp, Homo sapien
aaggcaactctcttattttagtcat

SEQ ID NO: 5329648 - DNA, 25 bp, Homo sapien
gaaggcaactctcttattttagtca

SEQ ID NO: 5329649 - DNA, 25 bp, Homo sapien
gcagagtgccaagtataaagccatc

SEQ ID NO: 5329650 - DNA, 25 bp, Homo sapien
ttctaacactttctaggcacctgaa

SEQ ID NO: 5329651 - DNA, 25 bp, Homo sapien
gttttatgaccaatcctagcagcca

SEQ ID NO: 5329652 - DNA, 25 bp, Homo sapien
gaacactatttcaccggatgctaaa

SEQ ID NO: 5329653 - DNA, 25 bp, Homo sapien
gaaccaagttattgattagcaatgg

SEQ ID NO: 5329654 - DNA, 25 bp, Homo sapien
agaggatcaggtctaagcccatgaa

SEQ ID NO: 5329655 - DNA, 25 bp, Homo sapien
gatcaggtctaagcccatgaaccaa

SEQ ID NO: 5329656 - DNA, 25 bp, Homo sapien
taagcccatgaaccaagttattgat

SEQ ID NO: 5329657 - DNA, 25 bp, Homo sapien
cacgagcttcggtgggcaatctgcg

SEQ ID NO: 5329658 - DNA, 25 bp, Homo sapien
gatcgggggtgcacacacgagcttc

SEQ ID NO: 5329659 - DNA, 25 bp, Homo sapien
gatgccggagacacggcccgcgagg

SEQ ID NO: 5329660 - DNA, 25 bp, Homo sapien
ggtgcacacacgagcttcggtgggc

SEQ ID NO: 5329661 - DNA, 25 bp, Homo sapien
acggccaaggcaacgacagccttct

SEQ ID NO: 5329662 - DNA, 25 bp, Homo sapien
atgcgacggccaaggcaacgacagc

SEQ ID NO: 5329663 - DNA, 25 bp, Homo sapien
cgacggccaaggcaacgacagcctt

SEQ ID NO: 5329664 - DNA, 25 bp, Homo sapien
aaggcaacgacagccttctccgcct

SEQ ID NO: 5329665 - DNA, 25 bp, Homo sapien
catctctttatgtaagtccatttcc

SEQ ID NO: 5329666 - DNA, 25 bp, Homo sapien
gattcagtcccattggatctgatgg

SEQ ID NO: 5329667 - DNA, 25 bp, Homo sapien
tgttcgtagattcagtcccattgga

SEQ ID NO: 5329668 - DNA, 25 bp, Homo sapien
tccatttccctgttcgtagattcag

SEQ ID NO: 5329669 - DNA, 25 bp, Homo sapien
tctacagtgtaccaagcaggaagaa

SEQ ID NO: 5329670 - DNA, 25 bp, Homo sapien
cagtttactggccagagctaggtca

SEQ ID NO: 5329671 - DNA, 25 bp, Homo sapien
gacctactgagagtgccttccttaa

SEQ ID NO: 5329672 - DNA, 25 bp, Homo sapien
tggctacccacagactaatgactgg

SEQ ID NO: 5329673 - DNA, 25 bp, Homo sapien
ggataaaatccacgtgtacagaaga

SEQ ID NO: 5329674 - DNA, 25 bp, Homo sapien
ccatacccggacatttttgatttct

SEQ ID NO: 5329675 - DNA, 25 bp, Homo sapien
tcatatgaggtaaagcaaacatgca

SEQ ID NO: 5329676 - DNA, 25 bp, Homo sapien
taaactccttcacacatatgcaaag

SEQ ID NO: 5329677 - DNA, 25 bp, Homo sapien
atcttcaagttcctcagcatattaa

SEQ ID NO: 5329678 - DNA, 25 bp, Homo sapien
tctgactgttatgcccaaagaaaat

SEQ ID NO: 5329679 - DNA, 25 bp, Homo sapien
tatatattatcaacaagtctgactg

SEQ ID NO: 5329680 - DNA, 25 bp, Homo sapien
caagtctgactgttatgcccaaaga

SEQ ID NO: 5329681 - DNA, 25 bp, Homo sapien
tgagtttgcttctttttcatctgat

SEQ ID NO: 5329682 - DNA, 25 bp, Homo sapien
tttcatctgattcatcatccataac

SEQ ID NO: 5329683 - DNA, 25 bp, Homo sapien
ttaaggtgagtttgcttctttttca

SEQ ID NO: 5329684 - DNA, 25 bp, Homo sapien
gtttgcttctttttcatctgattca

SEQ ID NO: 5329685 - DNA, 25 bp, Homo sapien
gcagagtctcagctgggcagaaaag

SEQ ID NO: 5329686 - DNA, 25 bp, Homo sapien
tcaaagaggctacccatagcagagt

SEQ ID NO: 5329687 - DNA, 25 bp, Homo sapien
tatcaacagccccaaagaacaaggt

SEQ ID NO: 5329688 - DNA, 25 bp, Homo sapien
tggtgatagagcactccagcttggt

SEQ ID NO: 5329689 - DNA, 25 bp, Homo sapien
cactgcagtgagactcattattact

SEQ ID NO: 5329690 - DNA, 25 bp, Homo sapien
ttcactccttgataatctctctcca

SEQ ID NO: 5329691 - DNA, 25 bp, Homo sapien
ctctccataaggccatgctttttgg

SEQ ID NO: 5329692 - DNA, 25 bp, Homo sapien
tttctaatttccacacatcccttca

SEQ ID NO: 5329693 - DNA, 25 bp, Homo sapien
aaatctagactgtcatataatattg

SEQ ID NO: 5329694 - DNA, 25 bp, Homo sapien
ctagactgtcatataatattggcat

SEQ ID NO: 5329695 - DNA, 25 bp, Homo sapien
atctagactgtcatataatattggc

SEQ ID NO: 5329696 - DNA, 25 bp, Homo sapien
agactgtcatataatattggcatac

SEQ ID NO: 5329697 - DNA, 25 bp, Homo sapien
caaagcctttgtagattacatcccc

SEQ ID NO: 5329698 - DNA, 25 bp, Homo sapien
ggagtttcagctgtacaatgccatc

SEQ ID NO: 5329699 - DNA, 25 bp, Homo sapien
cagctggtacaagaaccctggagtt

SEQ ID NO: 5329700 - DNA, 25 bp, Homo sapien
tgttctacgccttctacctccggaa

SEQ ID NO: 5329701 - DNA, 25 bp, Homo sapien
gcccagccactatttgatcatcttt

SEQ ID NO: 5329702 - DNA, 25 bp, Homo sapien
attttctactgacttaaattccagt

SEQ ID NO: 5329703 - DNA, 25 bp, Homo sapien
ttgaaatatgtaggccgggagcggt

SEQ ID NO: 5329704 - DNA, 25 bp, Homo sapien
taaattccagtatactaatcttctc

SEQ ID NO: 5329705 - DNA, 25 bp, Homo sapien
ttcaactatgtccaatctaatgagt

SEQ ID NO: 5329706 - DNA, 25 bp, Homo sapien
gagccaccacacccagccacaattt

SEQ ID NO: 5329707 - DNA, 25 bp, Homo sapien
ccacctacctccgcctcccaaacag

SEQ ID NO: 5329708 - DNA, 25 bp, Homo sapien
acctacctccgcctcccaaacagct

SEQ ID NO: 5329709 - DNA, 25 bp, Homo sapien
cgtgagccaccacacccagccacaa

SEQ ID NO: 5329710 - DNA, 25 bp, Homo sapien
atatcaaatctaaattgagactgtg

SEQ ID NO: 5329711 - DNA, 25 bp, Homo sapien
taaattcaattgtcacggctacctg

SEQ ID NO: 5329712 - DNA, 25 bp, Homo sapien
gaaaatctactataatctcatggcc

SEQ ID NO: 5329713 - DNA, 25 bp, Homo sapien
tgttgtggtttacattaacttgcac

SEQ ID NO: 5329714 - DNA, 25 bp, Homo sapien
cgtattctagtatctaacaattcct

SEQ ID NO: 5329715 - DNA, 25 bp, Homo sapien
tctagtatctaacaattccttaatc

SEQ ID NO: 5329716 - DNA, 25 bp, Homo sapien
tctaacaattccttaatcattgcca

SEQ ID NO: 5329717 - DNA, 25 bp, Homo sapien
tccttaatcattgccacaacttcat

SEQ ID NO: 5329718 - DNA, 25 bp, Homo sapien
aataattacatataaaaacatcaag

SEQ ID NO: 5329719 - DNA, 25 bp, Homo sapien
gaaataattacatataaaaacatca

SEQ ID NO: 5329720 - DNA, 25 bp, Homo sapien
ctagaaataattacatataaaaaca

SEQ ID NO: 5329721 - DNA, 25 bp, Homo sapien
ataattacatataaaaacatcaaga

SEQ ID NO: 5329722 - DNA, 25 bp, Homo sapien
caagatggtcattaaatttacaagg

SEQ ID NO: 5329723 - DNA, 25 bp, Homo sapien
aggaaagactgggataattgattac

SEQ ID NO: 5329724 - DNA, 25 bp, Homo sapien
tcttagaaaaagacccatgtataat

SEQ ID NO: 5329725 - DNA, 25 bp, Homo sapien
taaagtgagcagactaccagaaagt

SEQ ID NO: 5329726 - DNA, 25 bp, Homo sapien
tgcaaagaagtccatgattgttgca

SEQ ID NO: 5329727 - DNA, 25 bp, Homo sapien
gcaaagaagtccatgattgttgcat

SEQ ID NO: 5329728 - DNA, 25 bp, Homo sapien
caaagaagtccatgattgttgcata

SEQ ID NO: 5329729 - DNA, 25 bp, Homo sapien
aagaagtccatgattgttgcataaa

SEQ ID NO: 5329730 - DNA, 25 bp, Homo sapien
tcctgtttaaacgaatttcagaaga

SEQ ID NO: 5329731 - DNA, 25 bp, Homo sapien
ggcaaccacttctggagaatatata

SEQ ID NO: 5329732 - DNA, 25 bp, Homo sapien
tacacactatacctatgcaatggca

SEQ ID NO: 5329733 - DNA, 25 bp, Homo sapien
tccacatcttaaagggtcctgttta

SEQ ID NO: 5329734 - DNA, 25 bp, Homo sapien
aaacaggcgattgctgaagacattc

SEQ ID NO: 5329735 - DNA, 25 bp, Homo sapien
aatgtgatagtccatgatgagaaac

SEQ ID NO: 5329736 - DNA, 25 bp, Homo sapien
tattaaataccaacgtgggccaggc

SEQ ID NO: 5329737 - DNA, 25 bp, Homo sapien
gggcagcatataagctgcaaatata

SEQ ID NO: 5329738 - DNA, 25 bp, Homo sapien
aaatctggtccaaagaagacacttt

SEQ ID NO: 5329739 - DNA, 25 bp, Homo sapien
ctttgtgacagtgatgaaatctggt

SEQ ID NO: 5329740 - DNA, 25 bp, Homo sapien
tactccttcaatcctaaataactgc

SEQ ID NO: 5329741 - DNA, 25 bp, Homo sapien
gtgacagtgatgaaatctggtccaa

SEQ ID NO: 5329742 - DNA, 25 bp, Homo sapien
ggtgggaaaatccatggtccttgtc

SEQ ID NO: 5329743 - DNA, 25 bp, Homo sapien
cctggtataaactttaagctgtttg

SEQ ID NO: 5329744 - DNA, 25 bp, Homo sapien
tggtccttgtctcaagaactggttt

SEQ ID NO: 5329745 - DNA, 25 bp, Homo sapien
cagaggggagcgaaatgctgcagct

SEQ ID NO: 5329746 - DNA, 25 bp, Homo sapien
ccaaaatacagattagtggtgctta

SEQ ID NO: 5329747 - DNA, 25 bp, Homo sapien
taataggtacctaaggaggtagatg

SEQ ID NO: 5329748 - DNA, 25 bp, Homo sapien
attatgcttggtactaataggtacc

SEQ ID NO: 5329749 - DNA, 25 bp, Homo sapien
ccatgccagcctattttttcctatt

SEQ ID NO: 5329750 - DNA, 25 bp, Homo sapien
ctgggtgataaaaggctgcaggtag

SEQ ID NO: 5329751 - DNA, 25 bp, Homo sapien
tggtctttgtacaaactgatgcaga

SEQ ID NO: 5329752 - DNA, 25 bp, Homo sapien
cttaatggtgtatggattcttcaac

SEQ ID NO: 5329753 - DNA, 25 bp, Homo sapien
tgtttcttaatggtgtatggattct

SEQ ID NO: 5329754 - DNA, 25 bp, Homo sapien
ttcggagctccaggctcgtcaccta

SEQ ID NO: 5329755 - DNA, 25 bp, Homo sapien
gagggtctgcaaggcggcgaccgct

SEQ ID NO: 5329756 - DNA, 25 bp, Homo sapien
gcgaccgctccgctggctaagccca

SEQ ID NO: 5329757 - DNA, 25 bp, Homo sapien
agcggcacacctattcggagctcca

SEQ ID NO: 5329758 - DNA, 25 bp, Homo sapien
gcgcagcccggcggcaacagccgca

SEQ ID NO: 5329759 - DNA, 25 bp, Homo sapien
cgcagcccggcggcaacagccgcag

SEQ ID NO: 5329760 - DNA, 25 bp, Homo sapien
agaaccacgaaagatctgcgcagcc

SEQ ID NO: 5329761 - DNA, 25 bp, Homo sapien
aagggtctccctgacagaaccacga

SEQ ID NO: 5329762 - DNA, 25 bp, Homo sapien
cctacgcgccgaggtttgcaggcta

SEQ ID NO: 5329763 - DNA, 25 bp, Homo sapien
ttagtccggagtgcctaagggtctc

SEQ ID NO: 5329764 - DNA, 25 bp, Homo sapien
tgttctaagagttttgtcatccaca

SEQ ID NO: 5329765 - DNA, 25 bp, Homo sapien
ctgttctaagagttttgtcatccac

SEQ ID NO: 5329766 - DNA, 25 bp, Homo sapien
ggctgttctaagagttttgtcatcc

SEQ ID NO: 5329767 - DNA, 25 bp, Homo sapien
gctgttctaagagttttgtcatcca

SEQ ID NO: 5329768 - DNA, 25 bp, Homo sapien
tcaggatcagtctaggtaaaagcaa

SEQ ID NO: 5329769 - DNA, 25 bp, Homo sapien
gatatgtaggcctgagtaatccctg

SEQ ID NO: 5329770 - DNA, 25 bp, Homo sapien
acaaaaaggctatagggcatggtcc

SEQ ID NO: 5329771 - DNA, 25 bp, Homo sapien
tgggtggccccgagcttgatatgta

SEQ ID NO: 5329772 - DNA, 25 bp, Homo sapien
tatgctgtaactcttacaaaaaagt

SEQ ID NO: 5329773 - DNA, 25 bp, Homo sapien
gatgttacccaatcagctttctttc

SEQ ID NO: 5329774 - DNA, 25 bp, Homo sapien
gacaaggaagtcctcctatgctgta

SEQ ID NO: 5329775 - DNA, 25 bp, Homo sapien
agattccagcatgacaaggaagtcc

SEQ ID NO: 5329776 - DNA, 25 bp, Homo sapien
caaagaaggtatgtagagtctccac

SEQ ID NO: 5329777 - DNA, 25 bp, Homo sapien
ggcgtatgacctagactccctgggt

SEQ ID NO: 5329778 - DNA, 25 bp, Homo sapien
tgcattccgggaaaagtacctctgg

SEQ ID NO: 5329779 - DNA, 25 bp, Homo sapien
tccaaatagtcagcagagggagttc

SEQ ID NO: 5329780 - DNA, 25 bp, Homo sapien
gattttatcctgatttgcaccttga

SEQ ID NO: 5329781 - DNA, 25 bp, Homo sapien
aaatagtcacttgattagaagggaa

SEQ ID NO: 5329782 - DNA, 25 bp, Homo sapien
ggatacaagctcatacttgacgaag

SEQ ID NO: 5329783 - DNA, 25 bp, Homo sapien
cttgacgaagtattcaactatgtag

SEQ ID NO: 5329784 - DNA, 25 bp, Homo sapien
tctgcccaccttggcctcccaaagt

SEQ ID NO: 5329785 - DNA, 25 bp, Homo sapien
aattttattttttagactcgctctg

SEQ ID NO: 5329786 - DNA, 25 bp, Homo sapien
ttttattttttagactcgctctgtc

SEQ ID NO: 5329787 - DNA, 25 bp, Homo sapien
tgcccaccttggcctcccaaagtgc

SEQ ID NO: 5329788 - DNA, 25 bp, Homo sapien
tgagaggccggaactgtaacaaggt

SEQ ID NO: 5329789 - DNA, 25 bp, Homo sapien
tcaagtcagttaggcgagcaaacac

SEQ ID NO: 5329790 - DNA, 25 bp, Homo sapien
catagacagtcatgcacgagagcca

SEQ ID NO: 5329791 - DNA, 25 bp, Homo sapien
ggcatttagcccacatactgagagg

SEQ ID NO: 5329792 - DNA, 25 bp, Homo sapien
cgcagggaattgaaatataagaact

SEQ ID NO: 5329793 - DNA, 25 bp, Homo sapien
tgggagtgccatggcgggtattgag

SEQ ID NO: 5329794 - DNA, 25 bp, Homo sapien
tctgacgcagggaattgaaatataa

SEQ ID NO: 5329795 - DNA, 25 bp, Homo sapien
cgggtattgagggtgggatagagac

SEQ ID NO: 5329796 - DNA, 25 bp, Homo sapien
aaggagctctcaaaaacacgtctga

SEQ ID NO: 5329797 - DNA, 25 bp, Homo sapien
tctgactgaggagaccggtctgtgc

SEQ ID NO: 5329798 - DNA, 25 bp, Homo sapien
gatgtgatagaaacagacccagcta

SEQ ID NO: 5329799 - DNA, 25 bp, Homo sapien
tctgggctatagtgacgggaatact

SEQ ID NO: 5329800 - DNA, 25 bp, Homo sapien
catttggaacccttgagctcctgaa

SEQ ID NO: 5329801 - DNA, 25 bp, Homo sapien
tcctgaagggagctatggcaaaaac

SEQ ID NO: 5329802 - DNA, 25 bp, Homo sapien
cactgtctttgcttgctcaggagag

SEQ ID NO: 5329803 - DNA, 25 bp, Homo sapien
cagtccagcatgtctccttcaaggt

SEQ ID NO: 5329804 - DNA, 25 bp, Homo sapien
tacagttattacaggacagggattg

SEQ ID NO: 5329805 - DNA, 25 bp, Homo sapien
ttacaggacagggattggactccct

SEQ ID NO: 5329806 - DNA, 25 bp, Homo sapien
taaagtgctctacagttattacagg

SEQ ID NO: 5329807 - DNA, 25 bp, Homo sapien
taacacccagtgattctttaaagtg

SEQ ID NO: 5329808 - DNA, 25 bp, Homo sapien
tatgtgcagctacatggtgatacga

SEQ ID NO: 5329809 - DNA, 25 bp, Homo sapien
tacgaaagcatcagtcagtggacag

SEQ ID NO: 5329810 - DNA, 25 bp, Homo sapien
ctgtactggtgccaaatggctttca

SEQ ID NO: 5329811 - DNA, 25 bp, Homo sapien
gggaaaccagtcacttagagacatt

SEQ ID NO: 5329812 - DNA, 25 bp, Homo sapien
tagctgcattaaaacccacgactgg

SEQ ID NO: 5329813 - DNA, 25 bp, Homo sapien
tagtgagggccatcagaatgctccc

SEQ ID NO: 5329814 - DNA, 25 bp, Homo sapien
caggttaggcacgttgacactttca

SEQ ID NO: 5329815 - DNA, 25 bp, Homo sapien
caagaactcacatgcttcagggaag

SEQ ID NO: 5329816 - DNA, 25 bp, Homo sapien
tctaattcaggaagagcgaagtcca

SEQ ID NO: 5329817 - DNA, 25 bp, Homo sapien
tcttgtttcagccagcacgggaagt

SEQ ID NO: 5329818 - DNA, 25 bp, Homo sapien
tcagggatgatgctctaaaccaagg

SEQ ID NO: 5329819 - DNA, 25 bp, Homo sapien
taatttgcttaacccggcacactgg

SEQ ID NO: 5329820 - DNA, 25 bp, Homo sapien
ccagattgtgtccagcttgtcagca

SEQ ID NO: 5329821 - DNA, 25 bp, Homo sapien
gaaatcacggttcaatggaagccag

SEQ ID NO: 5329822 - DNA, 25 bp, Homo sapien
gaggccattcctagcaagaacgaga

SEQ ID NO: 5329823 - DNA, 25 bp, Homo sapien
cagaaagctggacgaatgctgggca

SEQ ID NO: 5329824 - DNA, 25 bp, Homo sapien
ctacaggtctatgagctgatccacc

SEQ ID NO: 5329825 - DNA, 25 bp, Homo sapien
agctgatccaccagcagtaaagacc

SEQ ID NO: 5329826 - DNA, 25 bp, Homo sapien
tacaggtctatgagctgatccacca

SEQ ID NO: 5329827 - DNA, 25 bp, Homo sapien
ggttaaggtttagatgtgcagagca

SEQ ID NO: 5329828 - DNA, 25 bp, Homo sapien
ttaaggtttagatgtgcagagcaag

SEQ ID NO: 5329829 - DNA, 25 bp, Homo sapien
cagtacaaaacatagagggttaagg

SEQ ID NO: 5329830 - DNA, 25 bp, Homo sapien
agtggagagataggaattcagtaca

SEQ ID NO: 5329831 - DNA, 25 bp, Homo sapien
catgtaagttagctgtccaccacct

SEQ ID NO: 5329832 - DNA, 25 bp, Homo sapien
cacagtataggtaggacatcttgca

SEQ ID NO: 5329833 - DNA, 25 bp, Homo sapien
tggtccagcctacaatgattctcat

SEQ ID NO: 5329834 - DNA, 25 bp, Homo sapien
cacagctgttaatctctttgggaaa

SEQ ID NO: 5329835 - DNA, 25 bp, Homo sapien
gagatgagattactatcttctgcag

SEQ ID NO: 5329836 - DNA, 25 bp, Homo sapien
ccaccttgtccgagccctcagggac

SEQ ID NO: 5329837 - DNA, 25 bp, Homo sapien
caatacaggaatagggtcaaactca

SEQ ID NO: 5329838 - DNA, 25 bp, Homo sapien
tgggtttttggttatcaatacagga

SEQ ID NO: 5329839 - DNA, 25 bp, Homo sapien
cagagattgctgtgggggcaaactc

SEQ ID NO: 5329840 - DNA, 25 bp, Homo sapien
agagcagagagcaatcaagcaggga

SEQ ID NO: 5329841 - DNA, 25 bp, Homo sapien
aagcagggaatcttccccggtgaga

SEQ ID NO: 5329842 - DNA, 25 bp, Homo sapien
tcttccagaaggtcagtagtagggt

SEQ ID NO: 5329843 - DNA, 25 bp, Homo sapien
cagcatcccaggtcagtgatggcat

SEQ ID NO: 5329844 - DNA, 25 bp, Homo sapien
agattaacagcatcccaggtcagtg

SEQ ID NO: 5329845 - DNA, 25 bp, Homo sapien
gattaacagcatcccaggtcagtga

SEQ ID NO: 5329846 - DNA, 25 bp, Homo sapien
taacagcatcccaggtcagtgatgg

SEQ ID NO: 5329847 - DNA, 25 bp, Homo sapien
cagtcctggtatgagactctcaaca

SEQ ID NO: 5329848 - DNA, 25 bp, Homo sapien
ggctccagtcctggtatgagactct

SEQ ID NO: 5329849 - DNA, 25 bp, Homo sapien
acagattccgtctgagatgggaggc

SEQ ID NO: 5329850 - DNA, 25 bp, Homo sapien
tgtgcgattcgaggtcacagattcc

SEQ ID NO: 5329851 - DNA, 25 bp, Homo sapien
aacagagcattaagaagaggaaagg

SEQ ID NO: 5329852 - DNA, 25 bp, Homo sapien
gagcattaagaagaggaaagggtaa

SEQ ID NO: 5329853 - DNA, 25 bp, Homo sapien
ttcgtaacagagcattaagaagagg

SEQ ID NO: 5329854 - DNA, 25 bp, Homo sapien
cgtaacagagcattaagaagaggaa

SEQ ID NO: 5329855 - DNA, 25 bp, Homo sapien
gcaaggttaaatactgtggccagtc

SEQ ID NO: 5329856 - DNA, 25 bp, Homo sapien
gtggccagtctcactaatgatcagt

SEQ ID NO: 5329857 - DNA, 25 bp, Homo sapien
gccagtctcaggcaaggtggaaaga

SEQ ID NO: 5329858 - DNA, 25 bp, Homo sapien
tgggaggccttttgcaccacgtgac

SEQ ID NO: 5329859 - DNA, 25 bp, Homo sapien
tctaggactttctgcccaaaggcat

SEQ ID NO: 5329860 - DNA, 25 bp, Homo sapien
tattaggtgcctcatgattggaccc

SEQ ID NO: 5329861 - DNA, 25 bp, Homo sapien
caaggtcatggcacttctgagttct

SEQ ID NO: 5329862 - DNA, 25 bp, Homo sapien
catgattggaccctcctggagtaca

SEQ ID NO: 5329863 - DNA, 25 bp, Homo sapien
taagagatccactctagaaatctcc

SEQ ID NO: 5329864 - DNA, 25 bp, Homo sapien
ctgcagctggatgtacatgggcctt

SEQ ID NO: 5329865 - DNA, 25 bp, Homo sapien
attcctcctcattcataagagatcc

SEQ ID NO: 5329866 - DNA, 25 bp, Homo sapien
gaaatctccagatatcaagaaaggc

SEQ ID NO: 5329867 - DNA, 25 bp, Homo sapien
ggatctgtcataggcaagaggtcag

SEQ ID NO: 5329868 - DNA, 25 bp, Homo sapien
tacttgtcattcttgaaacaggcac

SEQ ID NO: 5329869 - DNA, 25 bp, Homo sapien
gaagtgctaccaaaaggatctgtca

SEQ ID NO: 5329870 - DNA, 25 bp, Homo sapien
gatgatgactttaccaattacagca

SEQ ID NO: 5329871 - DNA, 25 bp, Homo sapien
cattcatatcattaccactgaaatg

SEQ ID NO: 5329872 - DNA, 25 bp, Homo sapien
cctgagaaaattccttcataaccct

SEQ ID NO: 5329873 - DNA, 25 bp, Homo sapien
tgtacaatgtggttagtctggacaa

SEQ ID NO: 5329874 - DNA, 25 bp, Homo sapien
tgcctttgagatgaaagtcatccgt

SEQ ID NO: 5329875 - DNA, 25 bp, Homo sapien
tcacagattagacatggtagagcct

SEQ ID NO: 5329876 - DNA, 25 bp, Homo sapien
gactatgagaatgtgcaacttgccc

SEQ ID NO: 5329877 - DNA, 25 bp, Homo sapien
gacagctgtgcgaaaagctacttgg

SEQ ID NO: 5329878 - DNA, 25 bp, Homo sapien
gagcacaggccatgtctatgtaagg

SEQ ID NO: 5329879 - DNA, 25 bp, Homo sapien
cgagtatctggcattataggcgcct

SEQ ID NO: 5329880 - DNA, 25 bp, Homo sapien
ataggcgcctgccaccacgcccagc

SEQ ID NO: 5329881 - DNA, 25 bp, Homo sapien
cctcaggcgatccacccaactcagc

SEQ ID NO: 5329882 - DNA, 25 bp, Homo sapien
ggcctcaggcgatccacccaactca

SEQ ID NO: 5329883 - DNA, 25 bp, Homo sapien
ctggcctcaggcgatccacccaact

SEQ ID NO: 5329884 - DNA, 25 bp, Homo sapien
tgttacccagtctcatctcaaactc

SEQ ID NO: 5329885 - DNA, 25 bp, Homo sapien
tgtttcctaatgcatacagaaggca

SEQ ID NO: 5329886 - DNA, 25 bp, Homo sapien
tgagcatcagtgaaatactctgaga

SEQ ID NO: 5329887 - DNA, 25 bp, Homo sapien
tactctgagactcactagccatgca

SEQ ID NO: 5329888 - DNA, 25 bp, Homo sapien
taaaatgctggtactacttatagct

SEQ ID NO: 5329889 - DNA, 25 bp, Homo sapien
tggcttaattggtattaaagtgtat

SEQ ID NO: 5329890 - DNA, 25 bp, Homo sapien
gatctttccaccgaaacccaagaga

SEQ ID NO: 5329891 - DNA, 25 bp, Homo sapien
aacccaagagaggtcttggcttaat

SEQ ID NO: 5329892 - DNA, 25 bp, Homo sapien
aagagaggtcttggcttaattggta

SEQ ID NO: 5329893 - DNA, 25 bp, Homo sapien
tcttcaaccctgatccagaggactc

SEQ ID NO: 5329894 - DNA, 25 bp, Homo sapien
gctgaagccgatttcctgagccacc

SEQ ID NO: 5329895 - DNA, 25 bp, Homo sapien
aggatgaaagaagcatggaggacca

SEQ ID NO: 5329896 - DNA, 25 bp, Homo sapien
gacgcatttccacaagctgaagccg

SEQ ID NO: 5329897 - DNA, 25 bp, Homo sapien
gacaagtttactcctcttattgaga

SEQ ID NO: 5329898 - DNA, 25 bp, Homo sapien
ggtctcctgacgcacattccctatt

SEQ ID NO: 5329899 - DNA, 25 bp, Homo sapien
cagcagcctattattagggcttgga

SEQ ID NO: 5329900 - DNA, 25 bp, Homo sapien
tgttctttccaatacagaggcccct

SEQ ID NO: 5329901 - DNA, 25 bp, Homo sapien
aaggatcagacacgcttagaagcgg

SEQ ID NO: 5329902 - DNA, 25 bp, Homo sapien
acacgcttagaagcgggaggccaga

SEQ ID NO: 5329903 - DNA, 25 bp, Homo sapien
cagacacgcttagaagcgggaggcc

SEQ ID NO: 5329904 - DNA, 25 bp, Homo sapien
tgaaaggatcagacacgcttagaag

SEQ ID NO: 5329905 - DNA, 25 bp, Homo sapien
aagactagccagaggtaggatcaga

SEQ ID NO: 5329906 - DNA, 25 bp, Homo sapien
tgcctattccaaggttagacaagcc

SEQ ID NO: 5329907 - DNA, 25 bp, Homo sapien
tatacaccctatggaataacagagc

SEQ ID NO: 5329908 - DNA, 25 bp, Homo sapien
taacagagcttgacgtggtctcaga

SEQ ID NO: 5329909 - DNA, 25 bp, Homo sapien
gcatttcagtattcagtttgttcgt

SEQ ID NO: 5329910 - DNA, 25 bp, Homo sapien
acagtcctgtgaacccttcaaccag

SEQ ID NO: 5329911 - DNA, 25 bp, Homo sapien
tatataaactgtagcctgagatcac

SEQ ID NO: 5329912 - DNA, 25 bp, Homo sapien
tgagatcaccgactccagcacagta

SEQ ID NO: 5329913 - DNA, 25 bp, Homo sapien
tctctgaatcttggtctctctccag

SEQ ID NO: 5329914 - DNA, 25 bp, Homo sapien
ggtctctctccagttctgcctctgg

SEQ ID NO: 5329915 - DNA, 25 bp, Homo sapien
gtctctgaatcttggtctctctcca

SEQ ID NO: 5329916 - DNA, 25 bp, Homo sapien
ctctctccagttctgcctctggcat

SEQ ID NO: 5329917 - DNA, 25 bp, Homo sapien
gatgctctggggtctactgggcagc

SEQ ID NO: 5329918 - DNA, 25 bp, Homo sapien
tgctctggggtctactgggcagctg

SEQ ID NO: 5329919 - DNA, 25 bp, Homo sapien
gctctggggtctactgggcagctgt

SEQ ID NO: 5329920 - DNA, 25 bp, Homo sapien
atgctctggggtctactgggcagct

SEQ ID NO: 5329921 - DNA, 25 bp, Homo sapien
ccaccccacccacctctattccaca

SEQ ID NO: 5329922 - DNA, 25 bp, Homo sapien
ttccaccccacccacctctattcca

SEQ ID NO: 5329923 - DNA, 25 bp, Homo sapien
caccccacccacctctattccacat

SEQ ID NO: 5329924 - DNA, 25 bp, Homo sapien
tccaccccacccacctctattccac

SEQ ID NO: 5329925 - DNA, 25 bp, Homo sapien
tgattgaaagcctgggatcaaactc

SEQ ID NO: 5329926 - DNA, 25 bp, Homo sapien
tgggatcaaactctcagctgagcct

SEQ ID NO: 5329927 - DNA, 25 bp, Homo sapien
agaaaatgaggtcgtagcaaaagca

SEQ ID NO: 5329928 - DNA, 25 bp, Homo sapien
gaggtcgtagcaaaagcatcacctt

SEQ ID NO: 5329929 - DNA, 25 bp, Homo sapien
cttcagctgtgagtttggagaaatt

SEQ ID NO: 5329930 - DNA, 25 bp, Homo sapien
agtccttgtttagcagttcttcagc

SEQ ID NO: 5329931 - DNA, 25 bp, Homo sapien
ggagaaattatcgtcatcaaaggga

SEQ ID NO: 5329932 - DNA, 25 bp, Homo sapien
ttccccaagcttggcaaagtccttg

SEQ ID NO: 5329933 - DNA, 25 bp, Homo sapien
agagcctgatggagtggtggttgca

SEQ ID NO: 5329934 - DNA, 25 bp, Homo sapien
aggattataaacgttttgttgagag

SEQ ID NO: 5329935 - DNA, 25 bp, Homo sapien
acgttttgttgagaggtccgaggag

SEQ ID NO: 5329936 - DNA, 25 bp, Homo sapien
ttgagaggtccgaggagagcctgat

SEQ ID NO: 5329937 - DNA, 25 bp, Homo sapien
ggttgatttgctggcagggacccca

SEQ ID NO: 5329938 - DNA, 25 bp, Homo sapien
tttctgcccctggacggcaggaggt

SEQ ID NO: 5329939 - DNA, 25 bp, Homo sapien
agactgcactgtgggttacgtcact

SEQ ID NO: 5329940 - DNA, 25 bp, Homo sapien
tcactgagaatacgcctgtgcccag

SEQ ID NO: 5329941 - DNA, 25 bp, Homo sapien
taagaatgcagaagctattccagct

SEQ ID NO: 5329942 - DNA, 25 bp, Homo sapien
gacaatctgtgctgcaactttgaga

SEQ ID NO: 5329943 - DNA, 25 bp, Homo sapien
tttcaaagggcaagcaatagatcct

SEQ ID NO: 5329944 - DNA, 25 bp, Homo sapien
gactgataacaacatggtatttgcc

SEQ ID NO: 5329945 - DNA, 25 bp, Homo sapien
tgatgtgggccattttcaaaacagg

SEQ ID NO: 5329946 - DNA, 25 bp, Homo sapien
tcactgatgggatgggtatataaga

SEQ ID NO: 5329947 - DNA, 25 bp, Homo sapien
tgagctaataatacaaggactcttg

SEQ ID NO: 5329948 - DNA, 25 bp, Homo sapien
aggccaaactgccaccacagaacaa

SEQ ID NO: 5329949 - DNA, 25 bp, Homo sapien
tgtatagtttttccgtaatttcaca

SEQ ID NO: 5329950 - DNA, 25 bp, Homo sapien
tttcatactgttgtacagactttat

SEQ ID NO: 5329951 - DNA, 25 bp, Homo sapien
atacaactagatacaatccttatct

SEQ ID NO: 5329952 - DNA, 25 bp, Homo sapien
ttcatactgttgtacagactttata

SEQ ID NO: 5329953 - DNA, 25 bp, Homo sapien
agaaattctgcattagctgctgttg

SEQ ID NO: 5329954 - DNA, 25 bp, Homo sapien
tgctgccatagtgggcttttgctgc

SEQ ID NO: 5329955 - DNA, 25 bp, Homo sapien
agcaattgctggtttctgggttgct

SEQ ID NO: 5329956 - DNA, 25 bp, Homo sapien
gaaattctgcattagctgctgttga

SEQ ID NO: 5329957 - DNA, 25 bp, Homo sapien
tgaacaggatgaagcaatgatgaca

SEQ ID NO: 5329958 - DNA, 25 bp, Homo sapien
ctgaacaggatgaagcaatgatgac

SEQ ID NO: 5329959 - DNA, 25 bp, Homo sapien
gggcctgctgctgctggtaaaacgt

SEQ ID NO: 5329960 - DNA, 25 bp, Homo sapien
ctgctgagtctgggcctgctgctgc

SEQ ID NO: 5329961 - DNA, 25 bp, Homo sapien
ctgggcctgctgctgctggtaaaac

SEQ ID NO: 5329962 - DNA, 25 bp, Homo sapien
gcctgctgctgctggtaaaacgtgc

SEQ ID NO: 5329963 - DNA, 25 bp, Homo sapien
gctgtgctggcggtggctgttgctg

SEQ ID NO: 5329964 - DNA, 25 bp, Homo sapien
ctgctgtgctggcggtggctgttgc

SEQ ID NO: 5329965 - DNA, 25 bp, Homo sapien
ctgctgttgctgcttgaggaagagt

SEQ ID NO: 5329966 - DNA, 25 bp, Homo sapien
tgctgctgtgctggcggtggctgtt

SEQ ID NO: 5329967 - DNA, 25 bp, Homo sapien
tgctgctggtgctggggtgtggcct

SEQ ID NO: 5329968 - DNA, 25 bp, Homo sapien
gtggcctgggcctgagcgggcagac

SEQ ID NO: 5329969 - DNA, 25 bp, Homo sapien
gtgtggcctgggcctgagcgggcag

SEQ ID NO: 5329970 - DNA, 25 bp, Homo sapien
gggtgtggcctgggcctgagcgggc

SEQ ID NO: 5329971 - DNA, 25 bp, Homo sapien
agtagaaggcgtctgctgtggagtg

SEQ ID NO: 5329972 - DNA, 25 bp, Homo sapien
tggcctgagtttgcggcagaggctg

SEQ ID NO: 5329973 - DNA, 25 bp, Homo sapien
gggcctgagtagaaggcgtctgctg

SEQ ID NO: 5329974 - DNA, 25 bp, Homo sapien
ttggggaacactggctaaaaggcca

SEQ ID NO: 5329975 - DNA, 25 bp, Homo sapien
tgtaggctgggaggcaaatgaataa

SEQ ID NO: 5329976 - DNA, 25 bp, Homo sapien
ctggactgaactcaacactttggaa

SEQ ID NO: 5329977 - DNA, 25 bp, Homo sapien
gcccatttcaatgtcccaaagttta

SEQ ID NO: 5329978 - DNA, 25 bp, Homo sapien
taaaataatgctttctacccaatca

SEQ ID NO: 5329979 - DNA, 25 bp, Homo sapien
aggattcctgggttcggctgagtct

SEQ ID NO: 5329980 - DNA, 25 bp, Homo sapien
tgcccagctttaggcctctggcggg

SEQ ID NO: 5329981 - DNA, 25 bp, Homo sapien
tctggcggggtgcaattgaagtctc

SEQ ID NO: 5329982 - DNA, 25 bp, Homo sapien
ctcttccggggtgtcagcgctggct

SEQ ID NO: 5329983 - DNA, 25 bp, Homo sapien
gatgccattgttactagaccttctg

SEQ ID NO: 5329984 - DNA, 25 bp, Homo sapien
gaaagtaggcttggtgggcaaatac

SEQ ID NO: 5329985 - DNA, 25 bp, Homo sapien
catgtgcgaatatgcaaggacaatc

SEQ ID NO: 5329986 - DNA, 25 bp, Homo sapien
taatcgatgcttcccaaagaatctc

SEQ ID NO: 5329987 - DNA, 25 bp, Homo sapien
tttgcactggcaacctgttagaggg

SEQ ID NO: 5329988 - DNA, 25 bp, Homo sapien
ggcccagaaactttgcactggcaac

SEQ ID NO: 5329989 - DNA, 25 bp, Homo sapien
gatataaaggctatcacatcttggg

SEQ ID NO: 5329990 - DNA, 25 bp, Homo sapien
ttagagggatgctcttgtgccggtt

SEQ ID NO: 5329991 - DNA, 25 bp, Homo sapien
tacaggtgttatttgactgttcaat

SEQ ID NO: 5329992 - DNA, 25 bp, Homo sapien
ccagggtactttgttgacgcagttt

SEQ ID NO: 5329993 - DNA, 25 bp, Homo sapien
gacgcagtttgctgctagcacttac

SEQ ID NO: 5329994 - DNA, 25 bp, Homo sapien
aaagtctcactactttagaggcaca

SEQ ID NO: 5329995 - DNA, 25 bp, Homo sapien
tctcctgcgctacctctagaatctg

SEQ ID NO: 5329996 - DNA, 25 bp, Homo sapien
ataaatatctcctgcgctacctcta

SEQ ID NO: 5329997 - DNA, 25 bp, Homo sapien
ggtggcagccatgcgaaagtgcttt

SEQ ID NO: 5329998 - DNA, 25 bp, Homo sapien
tgcgctacctctagaatctgccatt

SEQ ID NO: 5329999 - DNA, 25 bp, Homo sapien
tgcagcactaaatgcagcactgctg

SEQ ID NO: 5330000 - DNA, 25 bp, Homo sapien
tacagggagcataaaaccccaatgc

SEQ ID NO: 5330001 - DNA, 25 bp, Homo sapien
tccaacccacaggaattcctaggag

SEQ ID NO: 5330002 - DNA, 25 bp, Homo sapien
tgagggactatctgctggctgactg

SEQ ID NO: 5330003 - DNA, 25 bp, Homo sapien
tcactggctttcactggttcaggaa

SEQ ID NO: 5330004 - DNA, 25 bp, Homo sapien
tggctgggtcttttttgcagctgcc

SEQ ID NO: 5330005 - DNA, 25 bp, Homo sapien
cctcactggctttcactggttcagg

SEQ ID NO: 5330006 - DNA, 25 bp, Homo sapien
tgcctcactggctttcactggttca

SEQ ID NO: 5330007 - DNA, 25 bp, Homo sapien
ttctgtaccatggtgagtcactggg

SEQ ID NO: 5330008 - DNA, 25 bp, Homo sapien
tcccaacatgtgaggcactactcag

SEQ ID NO: 5330009 - DNA, 25 bp, Homo sapien
tgtgcagcacacattcccggattat

SEQ ID NO: 5330010 - DNA, 25 bp, Homo sapien
tcaatgtgtcaaaccagggtgcact

SEQ ID NO: 5330011 - DNA, 25 bp, Homo sapien
gcccagccgtactagcaacatttga

SEQ ID NO: 5330012 - DNA, 25 bp, Homo sapien
caggtgactacaacaggcatgtggc

SEQ ID NO: 5330013 - DNA, 25 bp, Homo sapien
agaggagcagcacccttaagtccca

SEQ ID NO: 5330014 - DNA, 25 bp, Homo sapien
ttgcctcgggaaagtagcctgcctg

SEQ ID NO: 5330015 - DNA, 25 bp, Homo sapien
tgggcactctttcttgagtagctta

SEQ ID NO: 5330016 - DNA, 25 bp, Homo sapien
gagtagcttaaatgagaagtaggac

SEQ ID NO: 5330017 - DNA, 25 bp, Homo sapien
tgagtagcttaaatgagaagtagga

SEQ ID NO: 5330018 - DNA, 25 bp, Homo sapien
gtagcttaaatgagaagtaggacac

SEQ ID NO: 5330019 - DNA, 25 bp, Homo sapien
atcacaaattgccacctgactttcc

SEQ ID NO: 5330020 - DNA, 25 bp, Homo sapien
ttgccacctgactttccccaaatgg

SEQ ID NO: 5330021 - DNA, 25 bp, Homo sapien
tcgagaattatcaggaattgtgaag

SEQ ID NO: 5330022 - DNA, 25 bp, Homo sapien
taattaggcagtgcatgtcttgaga

SEQ ID NO: 5330023 - DNA, 25 bp, Homo sapien
gaccatgatatggtacagtagccac

SEQ ID NO: 5330024 - DNA, 25 bp, Homo sapien
tgagttttagaacccaacaccactg

SEQ ID NO: 5330025 - DNA, 25 bp, Homo sapien
gcgctgtgtgcattaaccttgggaa

SEQ ID NO: 5330026 - DNA, 25 bp, Homo sapien
gtagccaccatgctatagcgctgtg

SEQ ID NO: 5330027 - DNA, 25 bp, Homo sapien
gccttcgtagtgatgattttgccac

SEQ ID NO: 5330028 - DNA, 25 bp, Homo sapien
tctggtgctcgataggacagcgttg

SEQ ID NO: 5330029 - DNA, 25 bp, Homo sapien
caaatgtctgccttcgtagtgatga

SEQ ID NO: 5330030 - DNA, 25 bp, Homo sapien
tttgccactgtacaggttgaccatt

SEQ ID NO: 5330031 - DNA, 25 bp, Homo sapien
aatcaagagattcattttttattaa

SEQ ID NO: 5330032 - DNA, 25 bp, Homo sapien
gattcattttttattaaatatgtca

SEQ ID NO: 5330033 - DNA, 25 bp, Homo sapien
caagagattcattttttattaaata

SEQ ID NO: 5330034 - DNA, 25 bp, Homo sapien
cattttttattaaatatgtcaatac

SEQ ID NO: 5330035 - DNA, 25 bp, Homo sapien
tcagggccttgggtcgatcaggttc

SEQ ID NO: 5330036 - DNA, 25 bp, Homo sapien
cagatgggacacgtctaggcatccc

SEQ ID NO: 5330037 - DNA, 25 bp, Homo sapien
aagtagtataagcacgtcctcgaag

SEQ ID NO: 5330038 - DNA, 25 bp, Homo sapien
gatgctttagtctctagatcccaga

SEQ ID NO: 5330039 - DNA, 25 bp, Homo sapien
taggctctgtgacatcataaatcaa

SEQ ID NO: 5330040 - DNA, 25 bp, Homo sapien
tgaccttctcatccataagctgaag

SEQ ID NO: 5330041 - DNA, 25 bp, Homo sapien
taagctgaaggtaaagttgctcatc

SEQ ID NO: 5330042 - DNA, 25 bp, Homo sapien
ccacaggaccactgataaagtgctc

SEQ ID NO: 5330043 - DNA, 25 bp, Homo sapien
actgcattgactccctcagtttgtg

SEQ ID NO: 5330044 - DNA, 25 bp, Homo sapien
gacatagtggcctcggtcatgcaag

SEQ ID NO: 5330045 - DNA, 25 bp, Homo sapien
ggtggcgcttccaaagtcacacagg

SEQ ID NO: 5330046 - DNA, 25 bp, Homo sapien
gattctggaatttgttggtggcgct

SEQ ID NO: 5330047 - DNA, 25 bp, Homo sapien
acattccccaaccacccattccaag

SEQ ID NO: 5330048 - DNA, 25 bp, Homo sapien
ccccaaccacccattccaagatatc

SEQ ID NO: 5330049 - DNA, 25 bp, Homo sapien
tccccaaccacccattccaagatat

SEQ ID NO: 5330050 - DNA, 25 bp, Homo sapien
attccccaaccacccattccaagat

SEQ ID NO: 5330051 - DNA, 25 bp, Homo sapien
gaacttactgtcaatagcagaggct

SEQ ID NO: 5330052 - DNA, 25 bp, Homo sapien
ggctgatttgttcgatgtctcctaa

SEQ ID NO: 5330053 - DNA, 25 bp, Homo sapien
catgcccacttgttacttaccctaa

SEQ ID NO: 5330054 - DNA, 25 bp, Homo sapien
cagttgtaactcctcagaaaaacct

SEQ ID NO: 5330055 - DNA, 25 bp, Homo sapien
aatgtattgccactgcaaaatttga

SEQ ID NO: 5330056 - DNA, 25 bp, Homo sapien
taagaggctacctcctactgacctc

SEQ ID NO: 5330057 - DNA, 25 bp, Homo sapien
gctttagcaaaaagatctaagaggc

SEQ ID NO: 5330058 - DNA, 25 bp, Homo sapien
tttgaaggattagatgaatgcaggt

SEQ ID NO: 5330059 - DNA, 25 bp, Homo sapien
tattgagtagaatgcccgtaatgaa

SEQ ID NO: 5330060 - DNA, 25 bp, Homo sapien
gggcagacagaaaatattgagtaga

SEQ ID NO: 5330061 - DNA, 25 bp, Homo sapien
gaatgcccgtaatgaaagagtgtgg

SEQ ID NO: 5330062 - DNA, 25 bp, Homo sapien
cagaaaatattgagtagaatgcccg

SEQ ID NO: 5330063 - DNA, 25 bp, Homo sapien
gttcatcaggtttaccacctggcca

SEQ ID NO: 5330064 - DNA, 25 bp, Homo sapien
cattctctgtaaagcctgtttgcag

SEQ ID NO: 5330065 - DNA, 25 bp, Homo sapien
caggcgctggttcatcaggtttacc

SEQ ID NO: 5330066 - DNA, 25 bp, Homo sapien
actgatgcaggcgggcaacagcttc

SEQ ID NO: 5330067 - DNA, 25 bp, Homo sapien
tagtctaagagaatgaacggcgtcc

SEQ ID NO: 5330068 - DNA, 25 bp, Homo sapien
taaggtaacagagctgaccactgac

SEQ ID NO: 5330069 - DNA, 25 bp, Homo sapien
gatggcacaataggtccagggagca

SEQ ID NO: 5330070 - DNA, 25 bp, Homo sapien
gatgcctggatgctcctactgcctg

SEQ ID NO: 5330071 - DNA, 25 bp, Homo sapien
catacatcaccgctactcacgttgt

SEQ ID NO: 5330072 - DNA, 25 bp, Homo sapien
aaagtccatcagaatgagcacttcc

SEQ ID NO: 5330073 - DNA, 25 bp, Homo sapien
tactcacgttgttgatactagaatc

SEQ ID NO: 5330074 - DNA, 25 bp, Homo sapien
tctacaaaagtccatcagaatgagc

SEQ ID NO: 5330075 - DNA, 25 bp, Homo sapien
catttcatcccattgcttgtcctca

SEQ ID NO: 5330076 - DNA, 25 bp, Homo sapien
catgcgtttcaaggcacatttcatc

SEQ ID NO: 5330077 - DNA, 25 bp, Homo sapien
cattgttgacaaacatgcgtttcaa

SEQ ID NO: 5330078 - DNA, 25 bp, Homo sapien
tgtcctcaccagaaatacaatagca

SEQ ID NO: 5330079 - DNA, 25 bp, Homo sapien
ggactgtgataatgatttaccagag

SEQ ID NO: 5330080 - DNA, 25 bp, Homo sapien
cttcagttccgaatgtggactgtga

SEQ ID NO: 5330081 - DNA, 25 bp, Homo sapien
tgtggactgtgataatgatttacca

SEQ ID NO: 5330082 - DNA, 25 bp, Homo sapien
agaaatttaatgggcttcagttccg

SEQ ID NO: 5330083 - DNA, 25 bp, Homo sapien
tccagtaagcacaatggctgacaag

SEQ ID NO: 5330084 - DNA, 25 bp, Homo sapien
catgcaatccagtaagcacaatggc

SEQ ID NO: 5330085 - DNA, 25 bp, Homo sapien
taagcacaatggctgacaagagcca

SEQ ID NO: 5330086 - DNA, 25 bp, Homo sapien
acaatggctgacaagagccagccca

SEQ ID NO: 5330087 - DNA, 25 bp, Homo sapien
gaaaatgttttcacccttccatcat

SEQ ID NO: 5330088 - DNA, 25 bp, Homo sapien
ggggcacaccaatgcctgtctgctc

SEQ ID NO: 5330089 - DNA, 25 bp, Homo sapien
aatgcctgtctgctctaatgccagc

SEQ ID NO: 5330090 - DNA, 25 bp, Homo sapien
cccttccatcatggtcagggcagtg

SEQ ID NO: 5330091 - DNA, 25 bp, Homo sapien
ggactatcccagtacattatgtagg

SEQ ID NO: 5330092 - DNA, 25 bp, Homo sapien
caatggcacatgtgatctgtggatc

SEQ ID NO: 5330093 - DNA, 25 bp, Homo sapien
ggctggtcttattgagttcctctgc

SEQ ID NO: 5330094 - DNA, 25 bp, Homo sapien
tgaaagaactgctaccaaaaaggca

SEQ ID NO: 5330095 - DNA, 25 bp, Homo sapien
tttccagaaaatcggcttagtttgc

SEQ ID NO: 5330096 - DNA, 25 bp, Homo sapien
agtttgcccactacagccactctgc

SEQ ID NO: 5330097 - DNA, 25 bp, Homo sapien
gcttagtttgcccactacagccact

SEQ ID NO: 5330098 - DNA, 25 bp, Homo sapien
aaatcggcttagtttgcccactaca

SEQ ID NO: 5330099 - DNA, 25 bp, Homo sapien
tttacagacaataccttcactttgc

SEQ ID NO: 5330100 - DNA, 25 bp, Homo sapien
gagcattcaaactgctctcatcaaa

SEQ ID NO: 5330101 - DNA, 25 bp, Homo sapien
tggatgtgcttctggagtatgagac

SEQ ID NO: 5330102 - DNA, 25 bp, Homo sapien
gtgcttctggagtatgagacaattt

SEQ ID NO: 5330103 - DNA, 25 bp, Homo sapien
tattaaccatcggtgaatctgggtg

SEQ ID NO: 5330104 - DNA, 25 bp, Homo sapien
ggacctcttgttatgatgcacctag

SEQ ID NO: 5330105 - DNA, 25 bp, Homo sapien
tacaacgggcacgactgggacaatt

SEQ ID NO: 5330106 - DNA, 25 bp, Homo sapien
cctagaaagacacaccattgcagta

SEQ ID NO: 5330107 - DNA, 25 bp, Homo sapien
gctcattgctaactcaccctcttac

SEQ ID NO: 5330108 - DNA, 25 bp, Homo sapien
tgctcattgctaactcaccctctta

SEQ ID NO: 5330109 - DNA, 25 bp, Homo sapien
ttcttgccccaccatagtatcagtg

SEQ ID NO: 5330110 - DNA, 25 bp, Homo sapien
agctcgcaaggtttaaagtcatcac

SEQ ID NO: 5330111 - DNA, 25 bp, Homo sapien
ggacaaaatccacaagctcgcaagg

SEQ ID NO: 5330112 - DNA, 25 bp, Homo sapien
catcacctctattctgaagcagaca

SEQ ID NO: 5330113 - DNA, 25 bp, Homo sapien
tgaaggaacatacgagctgacacag

SEQ ID NO: 5330114 - DNA, 25 bp, Homo sapien
aatacgtctctagctctggcactgc

SEQ ID NO: 5330115 - DNA, 25 bp, Homo sapien
gactttaaaaacatgctgaggatga

SEQ ID NO: 5330116 - DNA, 25 bp, Homo sapien
gggctgcaccttagggtccaatacg

SEQ ID NO: 5330117 - DNA, 25 bp, Homo sapien
gacctcagcagtttgatcccacaga

SEQ ID NO: 5330118 - DNA, 25 bp, Homo sapien
gaccacgatccaattgaacacaagg

SEQ ID NO: 5330119 - DNA, 25 bp, Homo sapien
cacaggattattgggtgtccatgtc

SEQ ID NO: 5330120 - DNA, 25 bp, Homo sapien
gatgagacttccaggctagtacctc

SEQ ID NO: 5330121 - DNA, 25 bp, Homo sapien
tacactgggcggtaaaggacagcct

SEQ ID NO: 5330122 - DNA, 25 bp, Homo sapien
ggacagcctctatgaagtgggattt

SEQ ID NO: 5330123 - DNA, 25 bp, Homo sapien
tgaatgacaaaaagccaaccaaggg

SEQ ID NO: 5330124 - DNA, 25 bp, Homo sapien
tgctacacggtgaaataaaacagga

SEQ ID NO: 5330125 - DNA, 25 bp, Homo sapien
tcctaatttactgcaggccaatgcc

SEQ ID NO: 5330126 - DNA, 25 bp, Homo sapien
taagcgaggtgaagtcctcaaacac

SEQ ID NO: 5330127 - DNA, 25 bp, Homo sapien
gctggacctggagccaatctatgca

SEQ ID NO: 5330128 - DNA, 25 bp, Homo sapien
ggccaatgccaatcatcaactagaa

SEQ ID NO: 5330129 - DNA, 25 bp, Homo sapien
ctccaataccaagattccaaggctt

SEQ ID NO: 5330130 - DNA, 25 bp, Homo sapien
ttctctacagccaaaaagcccaatg

SEQ ID NO: 5330131 - DNA, 25 bp, Homo sapien
agccaaaaagcccaatgaaattatt

SEQ ID NO: 5330132 - DNA, 25 bp, Homo sapien
tggtcaagccaagatttttctctac

SEQ ID NO: 5330133 - DNA, 25 bp, Homo sapien
ccctgggccactagtagattatcgc

SEQ ID NO: 5330134 - DNA, 25 bp, Homo sapien
cctgggccactagtagattatcgct

SEQ ID NO: 5330135 - DNA, 25 bp, Homo sapien
gccctgggccactagtagattatcg

SEQ ID NO: 5330136 - DNA, 25 bp, Homo sapien
agccctgggccactagtagattatc

SEQ ID NO: 5330137 - DNA, 25 bp, Homo sapien
taagtaggctcagaaggcatgcatc

SEQ ID NO: 5330138 - DNA, 25 bp, Homo sapien
tctacatggcgttttagctaccagg

SEQ ID NO: 5330139 - DNA, 25 bp, Homo sapien
caaaagtcacgtgaaactgctgctc

SEQ ID NO: 5330140 - DNA, 25 bp, Homo sapien
caagatgaaggtggtactagtcccc

SEQ ID NO: 5330141 - DNA, 25 bp, Homo sapien
tagatttggctatatttagcaaagc

SEQ ID NO: 5330142 - DNA, 25 bp, Homo sapien
gctatatttagcaaagctacaaccg

SEQ ID NO: 5330143 - DNA, 25 bp, Homo sapien
aaccgtcatcatgcccaaagccagg

SEQ ID NO: 5330144 - DNA, 25 bp, Homo sapien
aaagctacaaccgtcatcatgccca

SEQ ID NO: 5330145 - DNA, 25 bp, Homo sapien
ctaaaaaaccagacttcccagcagg

SEQ ID NO: 5330146 - DNA, 25 bp, Homo sapien
aaaaaaccagacttcccagcaggca

SEQ ID NO: 5330147 - DNA, 25 bp, Homo sapien
taaaaaaccagacttcccagcaggc

SEQ ID NO: 5330148 - DNA, 25 bp, Homo sapien
gaagaaagtgagtagcaagcacctc

SEQ ID NO: 5330149 - DNA, 25 bp, Homo sapien
tcattctaccactccgtgtcctctg

SEQ ID NO: 5330150 - DNA, 25 bp, Homo sapien
tgagtagcaagcacctccagggagc

SEQ ID NO: 5330151 - DNA, 25 bp, Homo sapien
gaaagtgagtagcaagcacctccag

SEQ ID NO: 5330152 - DNA, 25 bp, Homo sapien
ccttggggttcttgcaattccttat

SEQ ID NO: 5330153 - DNA, 25 bp, Homo sapien
gggttcttgcaattccttatgaaaa

SEQ ID NO: 5330154 - DNA, 25 bp, Homo sapien
tatgaaaaagcacagaccaataccc

SEQ ID NO: 5330155 - DNA, 25 bp, Homo sapien
gaaaaagcacagaccaatacccacg

SEQ ID NO: 5330156 - DNA, 25 bp, Homo sapien
aactgtagataagtcagcactcggg

SEQ ID NO: 5330157 - DNA, 25 bp, Homo sapien
aaacaactctggctagaactgtaga

SEQ ID NO: 5330158 - DNA, 25 bp, Homo sapien
agggaaggagcatggctacccaaaa

SEQ ID NO: 5330159 - DNA, 25 bp, Homo sapien
cgtctgttaagcctttaaggagctg

SEQ ID NO: 5330160 - DNA, 25 bp, Homo sapien
acttggagaacatgcaccgcttagg

SEQ ID NO: 5330161 - DNA, 25 bp, Homo sapien
gcagcatcatccgtgatgagacaac

SEQ ID NO: 5330162 - DNA, 25 bp, Homo sapien
catgcaccgcttagggcagcatcat

SEQ ID NO: 5330163 - DNA, 25 bp, Homo sapien
cctagctgaacaaaacgctcgtggg

SEQ ID NO: 5330164 - DNA, 25 bp, Homo sapien
ctgtcgcccgatgccgaagactctt

SEQ ID NO: 5330165 - DNA, 25 bp, Homo sapien
gatgccgaagactcttccgatgtag

SEQ ID NO: 5330166 - DNA, 25 bp, Homo sapien
agactcttccgatgtagccactgcc

SEQ ID NO: 5330167 - DNA, 25 bp, Homo sapien
cactgtgacctgctgtcgcccgatg

SEQ ID NO: 5330168 - DNA, 25 bp, Homo sapien
gcagcaaagcaaaataccgatggtt

SEQ ID NO: 5330169 - DNA, 25 bp, Homo sapien
cctcctccagaaagcgattcgtgta

SEQ ID NO: 5330170 - DNA, 25 bp, Homo sapien
tatgcgtgtcaatcgcgcagcgggt

SEQ ID NO: 5330171 - DNA, 25 bp, Homo sapien
tctcagatttcacctcggagaggag

SEQ ID NO: 5330172 - DNA, 25 bp, Homo sapien
ctgagggaggatgcctataggaata

SEQ ID NO: 5330173 - DNA, 25 bp, Homo sapien
tcagtaacacgcttaaaaattcaac

SEQ ID NO: 5330174 - DNA, 25 bp, Homo sapien
ttcatgtattttcccggcgagaaaa

SEQ ID NO: 5330175 - DNA, 25 bp, Homo sapien
aaaattcaaccgctgagtcctaggg

SEQ ID NO: 5330176 - DNA, 25 bp, Homo sapien
catcatcctggggaaacgcttcatg

SEQ ID NO: 5330177 - DNA, 25 bp, Homo sapien
gcctgcgacgcagagaagaggcggc

SEQ ID NO: 5330178 - DNA, 25 bp, Homo sapien
gagcgccgggcggagactgacccgc

SEQ ID NO: 5330179 - DNA, 25 bp, Homo sapien
taccagccccgcgacattgtcacgg

SEQ ID NO: 5330180 - DNA, 25 bp, Homo sapien
gcccgccagctgatcccgggagcgc

SEQ ID NO: 5330181 - DNA, 25 bp, Homo sapien
ctgttgatatcacccgagccgcagg

SEQ ID NO: 5330182 - DNA, 25 bp, Homo sapien
cacagtccggctgctggactacaaa

SEQ ID NO: 5330183 - DNA, 25 bp, Homo sapien
caagctgggaaaggtagctcggcac

SEQ ID NO: 5330184 - DNA, 25 bp, Homo sapien
ggtctcagtgcagacagagttctgg

SEQ ID NO: 5330185 - DNA, 25 bp, Homo sapien
tctgcggtcagctctgagctaggcg

SEQ ID NO: 5330186 - DNA, 25 bp, Homo sapien
agctgcttttgcgtctcgatgttat

SEQ ID NO: 5330187 - DNA, 25 bp, Homo sapien
gagctaggcgctgtgagaacgctca

SEQ ID NO: 5330188 - DNA, 25 bp, Homo sapien
tcgatgttattgagagccggctctg

SEQ ID NO: 5330189 - DNA, 25 bp, Homo sapien
tgataccgtccaagtgctgagggcg

SEQ ID NO: 5330190 - DNA, 25 bp, Homo sapien
cagaaaatttggaaggtcagttggt

SEQ ID NO: 5330191 - DNA, 25 bp, Homo sapien
cagttggtacacttttccgacctag

SEQ ID NO: 5330192 - DNA, 25 bp, Homo sapien
cacttttccgacctagatttcctga

SEQ ID NO: 5330193 - DNA, 25 bp, Homo sapien
gggatagggagagtgggtcccgtca

SEQ ID NO: 5330194 - DNA, 25 bp, Homo sapien
ccgtcacacattcccccagctggct

SEQ ID NO: 5330195 - DNA, 25 bp, Homo sapien
tagggagagtgggtcccgtcacaca

SEQ ID NO: 5330196 - DNA, 25 bp, Homo sapien
cctacacgaggctttggggtgaagg

SEQ ID NO: 5330197 - DNA, 25 bp, Homo sapien
actgtctggtgcaaaggaggtatac

SEQ ID NO: 5330198 - DNA, 25 bp, Homo sapien
tgcaaaggaggtatacgaaatgtgt

SEQ ID NO: 5330199 - DNA, 25 bp, Homo sapien
cctcggtgaacactgtctggtgcaa

SEQ ID NO: 5330200 - DNA, 25 bp, Homo sapien
accctgcgtgcctcggtgaacactg

SEQ ID NO: 5330201 - DNA, 25 bp, Homo sapien
aaatagctgcatggtgaagtggtgt

SEQ ID NO: 5330202 - DNA, 25 bp, Homo sapien
tgaaaatagctgcatggtgaagtgg

SEQ ID NO: 5330203 - DNA, 25 bp, Homo sapien
gacatgaaaatagctgcatggtgaa

SEQ ID NO: 5330204 - DNA, 25 bp, Homo sapien
ctgggaggacatgaaaatagctgca

SEQ ID NO: 5330205 - DNA, 25 bp, Homo sapien
gcctgcaatgcagttcggaagaaca

SEQ ID NO: 5330206 - DNA, 25 bp, Homo sapien
ggtgcagttctttgaagagtcctca

SEQ ID NO: 5330207 - DNA, 25 bp, Homo sapien
gagtcctcatctgtgtttagtgagg

SEQ ID NO: 5330208 - DNA, 25 bp, Homo sapien
aacatagagttggtcggtgcagttc

SEQ ID NO: 5330209 - DNA, 25 bp, Homo sapien
cctccatttccttggctggcctctt

SEQ ID NO: 5330210 - DNA, 25 bp, Homo sapien
ccatgaggtgcagatagtgggagcc

SEQ ID NO: 5330211 - DNA, 25 bp, Homo sapien
gcttttattcattgagaaggccaga

SEQ ID NO: 5330212 - DNA, 25 bp, Homo sapien
cagatagtgggagcctagggcggca

SEQ ID NO: 5330213 - DNA, 25 bp, Homo sapien
tgaggtggacttgatactcctaaaa

SEQ ID NO: 5330214 - DNA, 25 bp, Homo sapien
gaggtggacttgatactcctaaaac

SEQ ID NO: 5330215 - DNA, 25 bp, Homo sapien
cacttgaggtggacttgatactcct

SEQ ID NO: 5330216 - DNA, 25 bp, Homo sapien
cttgaggtggacttgatactcctaa

SEQ ID NO: 5330217 - DNA, 25 bp, Homo sapien
cttgggtgacacatcaaggctgtct

SEQ ID NO: 5330218 - DNA, 25 bp, Homo sapien
aaattaaaaatgtcggatgtggtga

SEQ ID NO: 5330219 - DNA, 25 bp, Homo sapien
atgtggtgaagcatgcttatagtcc

SEQ ID NO: 5330220 - DNA, 25 bp, Homo sapien
agcttgggtgacacatcaaggctgt

SEQ ID NO: 5330221 - DNA, 25 bp, Homo sapien
tgccatgaaaccccttttcagaccc

SEQ ID NO: 5330222 - DNA, 25 bp, Homo sapien
ctgctgccatgaaaccccttttcag

SEQ ID NO: 5330223 - DNA, 25 bp, Homo sapien
catctgctgccatgaaacccctttt

SEQ ID NO: 5330224 - DNA, 25 bp, Homo sapien
gctgccatgaaaccccttttcagac

SEQ ID NO: 5330225 - DNA, 25 bp, Homo sapien
ttggggcacctaactctcttaacag

SEQ ID NO: 5330226 - DNA, 25 bp, Homo sapien
acataacgagttgggtctcagctcc

SEQ ID NO: 5330227 - DNA, 25 bp, Homo sapien
ctttgtggggttcctcatccatcct

SEQ ID NO: 5330228 - DNA, 25 bp, Homo sapien
ggatccagcaacacacaacccgtaa

SEQ ID NO: 5330229 - DNA, 25 bp, Homo sapien
tgcctgagtcggtcagcaggacgtt

SEQ ID NO: 5330230 - DNA, 25 bp, Homo sapien
gtggatacctcatcagatctgttca

SEQ ID NO: 5330231 - DNA, 25 bp, Homo sapien
tgcccattcttggttaaccttgtgt

SEQ ID NO: 5330232 - DNA, 25 bp, Homo sapien
tcggtcagcaggacgttgggcaggt

SEQ ID NO: 5330233 - DNA, 25 bp, Homo sapien
gacacagtgaagtcaagtaacagat

SEQ ID NO: 5330234 - DNA, 25 bp, Homo sapien
agggtgacacagtgaagtcaagtaa

SEQ ID NO: 5330235 - DNA, 25 bp, Homo sapien
cagtgaagtcaagtaacagatgtgg

SEQ ID NO: 5330236 - DNA, 25 bp, Homo sapien
gaagtcaagtaacagatgtggagat

SEQ ID NO: 5330237 - DNA, 25 bp, Homo sapien
cgctgcatctttctgttaccgccat

SEQ ID NO: 5330238 - DNA, 25 bp, Homo sapien
gtcgctgcatctttctgttaccgcc

SEQ ID NO: 5330239 - DNA, 25 bp, Homo sapien
ccgtcgctgcatctttctgttaccg

SEQ ID NO: 5330240 - DNA, 25 bp, Homo sapien
tcgctgcatctttctgttaccgcca

SEQ ID NO: 5330241 - DNA, 25 bp, Homo sapien
acgacctgccgttgggagacgaacg

SEQ ID NO: 5330242 - DNA, 25 bp, Homo sapien
aagcgcggatttgccgcgggactcc

SEQ ID NO: 5330243 - DNA, 25 bp, Homo sapien
acgggctcggcacgacctgccgttg

SEQ ID NO: 5330244 - DNA, 25 bp, Homo sapien
ctcggcacgacctgccgttgggaga

SEQ ID NO: 5330245 - DNA, 25 bp, Homo sapien
gcaggcgcagggaggaactggcgag

SEQ ID NO: 5330246 - DNA, 25 bp, Homo sapien
ccgggctcggccctccgagggtgtg

SEQ ID NO: 5330247 - DNA, 25 bp, Homo sapien
tccgagggtgtggagcgcccgggaa

SEQ ID NO: 5330248 - DNA, 25 bp, Homo sapien
gaggaactggcgaggtggcccgggc

SEQ ID NO: 5330249 - DNA, 25 bp, Homo sapien
agcggggctggcgatactggggaca

SEQ ID NO: 5330250 - DNA, 25 bp, Homo sapien
cggggctggcgatactggggacact

SEQ ID NO: 5330251 - DNA, 25 bp, Homo sapien
caggagcggggctggcgatactggg

SEQ ID NO: 5330252 - DNA, 25 bp, Homo sapien
ggctggcgatactggggacactgtc

SEQ ID NO: 5330253 - DNA, 25 bp, Homo sapien
aagacccgctgtctggccctgagta

SEQ ID NO: 5330254 - DNA, 25 bp, Homo sapien
cgagcgcggtgcttaaccgctggca

SEQ ID NO: 5330255 - DNA, 25 bp, Homo sapien
atccgtcccggataagacccgctgt

SEQ ID NO: 5330256 - DNA, 25 bp, Homo sapien
agagtgggtgctcgccgccggcttg

SEQ ID NO: 5330257 - DNA, 25 bp, Homo sapien
cttctcgtgtgtctaatgccctcgg

SEQ ID NO: 5330258 - DNA, 25 bp, Homo sapien
tgtctaatgccctcggcacagtgcc

SEQ ID NO: 5330259 - DNA, 25 bp, Homo sapien
cggagtctgattattatagggtcca

SEQ ID NO: 5330260 - DNA, 25 bp, Homo sapien
agtgcccggcacatcggagtctgat

SEQ ID NO: 5330261 - DNA, 25 bp, Homo sapien
gacttgagttggctggtggcgcagt

SEQ ID NO: 5330262 - DNA, 25 bp, Homo sapien
acttgagttggctggtggcgcagtc

SEQ ID NO: 5330263 - DNA, 25 bp, Homo sapien
tcatgactttgaccagctggagact

SEQ ID NO: 5330264 - DNA, 25 bp, Homo sapien
tgactttgaccagctggagactttg

SEQ ID NO: 5330265 - DNA, 25 bp, Homo sapien
gtcatgactttgaccagctggagac

SEQ ID NO: 5330266 - DNA, 25 bp, Homo sapien
catgactttgaccagctggagactt

SEQ ID NO: 5330267 - DNA, 25 bp, Homo sapien
gaggcagctcagaaccttggcgtag

SEQ ID NO: 5330268 - DNA, 25 bp, Homo sapien
ccttctgggatcaagacttagggca

SEQ ID NO: 5330269 - DNA, 25 bp, Homo sapien
cttagggcagcatctaaaggcaggg

SEQ ID NO: 5330270 - DNA, 25 bp, Homo sapien
tgcatcatgactctggtggcccatc

SEQ ID NO: 5330271 - DNA, 25 bp, Homo sapien
cagacctccaatattcatcttcgac

SEQ ID NO: 5330272 - DNA, 25 bp, Homo sapien
gacctccaatattcatcttcgacat

SEQ ID NO: 5330273 - DNA, 25 bp, Homo sapien
tgtccagacctccaatattcatctt

SEQ ID NO: 5330274 - DNA, 25 bp, Homo sapien
tccagacctccaatattcatcttcg

SEQ ID NO: 5330275 - DNA, 25 bp, Homo sapien
ctcacgtgaatcagaaatccactgt

SEQ ID NO: 5330276 - DNA, 25 bp, Homo sapien
tgctgcatcagaaatagtaagttcc

SEQ ID NO: 5330277 - DNA, 25 bp, Homo sapien
tccctgtgccttcacgagaatcttg

SEQ ID NO: 5330278 - DNA, 25 bp, Homo sapien
tcttctgccggaatcagcttgaatt

SEQ ID NO: 5330279 - DNA, 25 bp, Homo sapien
ctgtaatagtttaccaatggtgttt

SEQ ID NO: 5330280 - DNA, 25 bp, Homo sapien
tgaacatgaaattaagcgatctttc

SEQ ID NO: 5330281 - DNA, 25 bp, Homo sapien
gaacatgaaattaagcgatctttca

SEQ ID NO: 5330282 - DNA, 25 bp, Homo sapien
gatataaccctaaccatgcttgaca

SEQ ID NO: 5330283 - DNA, 25 bp, Homo sapien
gatgagccatcgtttcttttaagga

SEQ ID NO: 5330284 - DNA, 25 bp, Homo sapien
tttggactttgccttagagtgggcg

SEQ ID NO: 5330285 - DNA, 25 bp, Homo sapien
tgatggataacagcagcgtgcttcc

SEQ ID NO: 5330286 - DNA, 25 bp, Homo sapien
tgtttcgacactggattcagatacc

SEQ ID NO: 5330287 - DNA, 25 bp, Homo sapien
caggctgtactttgggaactttgct

SEQ ID NO: 5330288 - DNA, 25 bp, Homo sapien
gatgcatcagtagtctctgaagcag

SEQ ID NO: 5330289 - DNA, 25 bp, Homo sapien
gataccccgaagtcatgatgcatca

SEQ ID NO: 5330290 - DNA, 25 bp, Homo sapien
tatcacctattactgagtgacctgg

SEQ ID NO: 5330291 - DNA, 25 bp, Homo sapien
taaaggtctctaaagacaggcagac

SEQ ID NO: 5330292 - DNA, 25 bp, Homo sapien
cagtccactggaaaataatagggca

SEQ ID NO: 5330293 - DNA, 25 bp, Homo sapien
aaagcctctagaattgtcatctgcc

SEQ ID NO: 5330294 - DNA, 25 bp, Homo sapien
agagaggatgactggaagctgggag

SEQ ID NO: 5330295 - DNA, 25 bp, Homo sapien
ctgtggaggagtgagcgcagggcca

SEQ ID NO: 5330296 - DNA, 25 bp, Homo sapien
cagagagaggatgactggaagctgg

SEQ ID NO: 5330297 - DNA, 25 bp, Homo sapien
gggccagagagaggatgactggaag

SEQ ID NO: 5330298 - DNA, 25 bp, Homo sapien
taaatgtgtcgtctatctctcctgg

SEQ ID NO: 5330299 - DNA, 25 bp, Homo sapien
gcattatctctatcagtgcctggag

SEQ ID NO: 5330300 - DNA, 25 bp, Homo sapien
taaatctacacagtccatgagtcac

SEQ ID NO: 5330301 - DNA, 25 bp, Homo sapien
cctggtagactataaatgccttgac

SEQ ID NO: 5330302 - DNA, 25 bp, Homo sapien
ccaagtggtagtaaaattgtcaggg

SEQ ID NO: 5330303 - DNA, 25 bp, Homo sapien
cccattctctgaccacatagatgga

SEQ ID NO: 5330304 - DNA, 25 bp, Homo sapien
atgagcagaggaggtcttatcctcc

SEQ ID NO: 5330305 - DNA, 25 bp, Homo sapien
ttttaaatcagctcttatcccattc

SEQ ID NO: 5330306 - DNA, 25 bp, Homo sapien
gactcactttaccctaaatgtctac

SEQ ID NO: 5330307 - DNA, 25 bp, Homo sapien
ttctgcctcctataacatatttccc

SEQ ID NO: 5330308 - DNA, 25 bp, Homo sapien
tttcccccctcaggaatgaaatcca

SEQ ID NO: 5330309 - DNA, 25 bp, Homo sapien
tctgcctcctataacatatttcccc

SEQ ID NO: 5330310 - DNA, 25 bp, Homo sapien
catatttcccccctcaggaatgaaa

SEQ ID NO: 5330311 - DNA, 25 bp, Homo sapien
ctgggtgacgatttcttctggctac

SEQ ID NO: 5330312 - DNA, 25 bp, Homo sapien
ggaaactgggtgacgatttcttctg

SEQ ID NO: 5330313 - DNA, 25 bp, Homo sapien
ggtccctcgtaggagggcagtttca

SEQ ID NO: 5330314 - DNA, 25 bp, Homo sapien
tccctcgtaggagggcagtttcatt

SEQ ID NO: 5330315 - DNA, 25 bp, Homo sapien
tacctgtgagccattcagatgggtt

SEQ ID NO: 5330316 - DNA, 25 bp, Homo sapien
gaatataggttctaaatatgagtat

SEQ ID NO: 5330317 - DNA, 25 bp, Homo sapien
gataaacttcacaaggaggtttaga

SEQ ID NO: 5330318 - DNA, 25 bp, Homo sapien
cactataggccgtaaccatgacaac

SEQ ID NO: 5330319 - DNA, 25 bp, Homo sapien
ttctacaggaattaggcagagagac

SEQ ID NO: 5330320 - DNA, 25 bp, Homo sapien
aacttgttaaagtcccatggcttga

SEQ ID NO: 5330321 - DNA, 25 bp, Homo sapien
taataagcaagcatagccagaagac

SEQ ID NO: 5330322 - DNA, 25 bp, Homo sapien
gttgcttccgtatgttcccaggtgc

SEQ ID NO: 5330323 - DNA, 25 bp, Homo sapien
tgcagatccctttagcagcaaagct

SEQ ID NO: 5330324 - DNA, 25 bp, Homo sapien
gcaaagcttggtatttgaggaggca

SEQ ID NO: 5330325 - DNA, 25 bp, Homo sapien
aggttttcagctggactgcagatcc

SEQ ID NO: 5330326 - DNA, 25 bp, Homo sapien
gaggaggcaattgtttgtcagccag

SEQ ID NO: 5330327 - DNA, 25 bp, Homo sapien
tactgaggttcttggtcacacgacc

SEQ ID NO: 5330328 - DNA, 25 bp, Homo sapien
cccagacgagccctcaaaatgaagc

SEQ ID NO: 5330329 - DNA, 25 bp, Homo sapien
tgcacacacacatcgagtgagtttg

SEQ ID NO: 5330330 - DNA, 25 bp, Homo sapien
cacacgaccagatattgaggtcaag

SEQ ID NO: 5330331 - DNA, 25 bp, Homo sapien
tcaggtacacagttgctagaaggca

SEQ ID NO: 5330332 - DNA, 25 bp, Homo sapien
ctagaatttcaagaggcagagacgt

SEQ ID NO: 5330333 - DNA, 25 bp, Homo sapien
tgattcagaggcagttcctgggcct

SEQ ID NO: 5330334 - DNA, 25 bp, Homo sapien
tacatgccaaaggagaggcgcatag

SEQ ID NO: 5330335 - DNA, 25 bp, Homo sapien
aggttgatcaatgtagatttgccag

SEQ ID NO: 5330336 - DNA, 25 bp, Homo sapien
tggcagaggttgatcaatgtagatt

SEQ ID NO: 5330337 - DNA, 25 bp, Homo sapien
catcccgacccccttttggcagagg

SEQ ID NO: 5330338 - DNA, 25 bp, Homo sapien
tggaactacatgcacatcccgaccc

SEQ ID NO: 5330339 - DNA, 25 bp, Homo sapien
ttcttaaccaatacataaccataat

SEQ ID NO: 5330340 - DNA, 25 bp, Homo sapien
ttggttccattcagtttgtgaggta

SEQ ID NO: 5330341 - DNA, 25 bp, Homo sapien
ccatagacccagtattcttaaccaa

SEQ ID NO: 5330342 - DNA, 25 bp, Homo sapien
atacataaccataatgagggattgg

SEQ ID NO: 5330343 - DNA, 25 bp, Homo sapien
cattatctcagaatgcttatttcca

SEQ ID NO: 5330344 - DNA, 25 bp, Homo sapien
gcctcctagaatatagactgtctgt

SEQ ID NO: 5330345 - DNA, 25 bp, Homo sapien
gaaggacaggaggattctcaacact

SEQ ID NO: 5330346 - DNA, 25 bp, Homo sapien
ttaaaacgcctacagctgcctccta

SEQ ID NO: 5330347 - DNA, 25 bp, Homo sapien
taagcttcaaactaggtattctggg

SEQ ID NO: 5330348 - DNA, 25 bp, Homo sapien
agtttttcatgggagacttccttca

SEQ ID NO: 5330349 - DNA, 25 bp, Homo sapien
gtcagtaagaatgcccatccagttt

SEQ ID NO: 5330350 - DNA, 25 bp, Homo sapien
taggttttgtccatagcatcagttg

SEQ ID NO: 5330351 - DNA, 25 bp, Homo sapien
tagtaaattttgctagggcctcctg

SEQ ID NO: 5330352 - DNA, 25 bp, Homo sapien
gagtccatcacaagagctgctacta

SEQ ID NO: 5330353 - DNA, 25 bp, Homo sapien
ggttccattcacgtctacagcaggg

SEQ ID NO: 5330354 - DNA, 25 bp, Homo sapien
tggtgccagaccctattcggacatc

SEQ ID NO: 5330355 - DNA, 25 bp, Homo sapien
cattttgtagtgtatgaagtaactt

SEQ ID NO: 5330356 - DNA, 25 bp, Homo sapien
cattttgtagtatatgaagtaacga

SEQ ID NO: 5330357 - DNA, 25 bp, Homo sapien
tgagctatttaatggaattcagaac

SEQ ID NO: 5330358 - DNA, 25 bp, Homo sapien
tgagctatttaatggaattgagaac

SEQ ID NO: 5330359 - DNA, 25 bp, Homo sapien
ctactcttattctcggtcgtgttga

SEQ ID NO: 5330360 - DNA, 25 bp, Homo sapien
gaagcaaattctcctactataccac

SEQ ID NO: 5330361 - DNA, 25 bp, Homo sapien
ccagcctatgtttgcctttgtatta

SEQ ID NO: 5330362 - DNA, 25 bp, Homo sapien
cctactactcttattgtggccataa

SEQ ID NO: 5330363 - DNA, 25 bp, Homo sapien
atcagccctgatcacggtgttgatc

SEQ ID NO: 5330364 - DNA, 25 bp, Homo sapien
ccctgatcacggtgttgatcttggc

SEQ ID NO: 5330365 - DNA, 25 bp, Homo sapien
gccctgatcacggtgttgatcttgg

SEQ ID NO: 5330366 - DNA, 25 bp, Homo sapien
cagccctgatcacggtgttgatctt

SEQ ID NO: 5330367 - DNA, 25 bp, Homo sapien
tgatcttatgctttttgacctcgac

SEQ ID NO: 5330368 - DNA, 25 bp, Homo sapien
ttttgacctcgacatccacaatgaa

SEQ ID NO: 5330369 - DNA, 25 bp, Homo sapien
agtgcattgttgtcctctgtcttct

SEQ ID NO: 5330370 - DNA, 25 bp, Homo sapien
acaagtgcattgttgtcctctgtct

SEQ ID NO: 5330371 - DNA, 25 bp, Homo sapien
gaacttgttggtcgcatagtggtca

SEQ ID NO: 5330372 - DNA, 25 bp, Homo sapien
ctgggagaacttgttggtcgcatag

SEQ ID NO: 5330373 - DNA, 25 bp, Homo sapien
gagaacttgttggtcgcatagtggt

SEQ ID NO: 5330374 - DNA, 25 bp, Homo sapien
cttgttggtcgcatagtggtcaggc

SEQ ID NO: 5330375 - DNA, 25 bp, Homo sapien
gaagcgggactccaaatgggtcgca

SEQ ID NO: 5330376 - DNA, 25 bp, Homo sapien
cgcaactcgttttgacgttttctgg

SEQ ID NO: 5330377 - DNA, 25 bp, Homo sapien
ttgcacagttgtttccgggaagcgg

SEQ ID NO: 5330378 - DNA, 25 bp, Homo sapien
gccctcccggaagttgttgcacagt

SEQ ID NO: 5330379 - DNA, 25 bp, Homo sapien
aatgttttctggctaccagccccat

SEQ ID NO: 5330380 - DNA, 25 bp, Homo sapien
ttcgtaatgttttctggctaccagc

SEQ ID NO: 5330381 - DNA, 25 bp, Homo sapien
gtaatgttttctggctaccagcccc

SEQ ID NO: 5330382 - DNA, 25 bp, Homo sapien
tcgtaatgttttctggctaccagcc

SEQ ID NO: 5330383 - DNA, 25 bp, Homo sapien
gaaagtccctaagaaactggtcgca

SEQ ID NO: 5330384 - DNA, 25 bp, Homo sapien
tccacatcccgggagagagaacgca

SEQ ID NO: 5330385 - DNA, 25 bp, Homo sapien
taagggcagaaaataagccaagagt

SEQ ID NO: 5330386 - DNA, 25 bp, Homo sapien
tgcattagaacgtaggcgttcccgg

SEQ ID NO: 5330387 - DNA, 25 bp, Homo sapien
acggaatgactcgtggttctgtgga

SEQ ID NO: 5330388 - DNA, 25 bp, Homo sapien
tatacggaatgactcgtggttctgt

SEQ ID NO: 5330389 - DNA, 25 bp, Homo sapien
tttgctatacggaatgactcgtggt

SEQ ID NO: 5330390 - DNA, 25 bp, Homo sapien
tgctatacggaatgactcgtggttc

SEQ ID NO: 5330391 - DNA, 25 bp, Homo sapien
gtgctgattgatacaaagttgatat

SEQ ID NO: 5330392 - DNA, 25 bp, Homo sapien
tatatctgtgctgattgatacaaag

SEQ ID NO: 5330393 - DNA, 25 bp, Homo sapien
ctcatgtatatctgtgctgattgat

SEQ ID NO: 5330394 - DNA, 25 bp, Homo sapien
tctgtgctgattgatacaaagttga

SEQ ID NO: 5330395 - DNA, 25 bp, Homo sapien
tgtggcaggcgtcaaccccatttta

SEQ ID NO: 5330396 - DNA, 25 bp, Homo sapien
tatttcctcagggtccgtacttaga

SEQ ID NO: 5330397 - DNA, 25 bp, Homo sapien
tattggtaaacattggcttgcctcc

SEQ ID NO: 5330398 - DNA, 25 bp, Homo sapien
ggttctctccgcaagtataaaagca

SEQ ID NO: 5330399 - DNA, 25 bp, Homo sapien
ccaccgtgctcagcctcaatttttg

SEQ ID NO: 5330400 - DNA, 25 bp, Homo sapien
accgtgctcagcctcaatttttgta

SEQ ID NO: 5330401 - DNA, 25 bp, Homo sapien
caccgtgctcagcctcaatttttgt

SEQ ID NO: 5330402 - DNA, 25 bp, Homo sapien
ccgtgctcagcctcaatttttgtat

SEQ ID NO: 5330403 - DNA, 25 bp, Homo sapien
tatcatttgtggcaagcgtctttct

SEQ ID NO: 5330404 - DNA, 25 bp, Homo sapien
actcaacactgtgccttagggatct

SEQ ID NO: 5330405 - DNA, 25 bp, Homo sapien
aacatcgtgacaaagctaaactcct

SEQ ID NO: 5330406 - DNA, 25 bp, Homo sapien
taaactcctttcgaacagtactcag

SEQ ID NO: 5330407 - DNA, 25 bp, Homo sapien
agtgtgaccaaccagcgagaggagc

SEQ ID NO: 5330408 - DNA, 25 bp, Homo sapien
ttctgtcactgtgtcggcggtgccc

SEQ ID NO: 5330409 - DNA, 25 bp, Homo sapien
gagcccgggccttgtcaagtgtgac

SEQ ID NO: 5330410 - DNA, 25 bp, Homo sapien
cctctcttgtcgagcgtggttgcca

SEQ ID NO: 5330411 - DNA, 25 bp, Homo sapien
acttggcataagtgataggatctca

SEQ ID NO: 5330412 - DNA, 25 bp, Homo sapien
ttttctataagtcaaaatgctggac

SEQ ID NO: 5330413 - DNA, 25 bp, Homo sapien
cacattaaagtacctgacttggcat

SEQ ID NO: 5330414 - DNA, 25 bp, Homo sapien
aaatctgtggaagcttcaagtgaga

SEQ ID NO: 5330415 - DNA, 25 bp, Homo sapien
catctggtctggcatgagaaatcaa

SEQ ID NO: 5330416 - DNA, 25 bp, Homo sapien
tgaccaagtcccttatatgggaagg

SEQ ID NO: 5330417 - DNA, 25 bp, Homo sapien
cctgagttgtggtatgcattgcatc

SEQ ID NO: 5330418 - DNA, 25 bp, Homo sapien
gattacaggtccctatagttgttcc

SEQ ID NO: 5330419 - DNA, 25 bp, Homo sapien
gttaatgctacttgtctctggaaca

SEQ ID NO: 5330420 - DNA, 25 bp, Homo sapien
tctgctatctcgaggcacattctcc

SEQ ID NO: 5330421 - DNA, 25 bp, Homo sapien
tgggacctcgctgtgttctgctatc

SEQ ID NO: 5330422 - DNA, 25 bp, Homo sapien
ttttgtgcgatgttcttgggacctc

SEQ ID NO: 5330423 - DNA, 25 bp, Homo sapien
tgatgctgaagcagagtgtgtcaca

SEQ ID NO: 5330424 - DNA, 25 bp, Homo sapien
taagtggtctccgactttgtagcat

SEQ ID NO: 5330425 - DNA, 25 bp, Homo sapien
actgcgacctaagggctcaacggct

SEQ ID NO: 5330426 - DNA, 25 bp, Homo sapien
tactaaaatccacggacgcactgcg

SEQ ID NO: 5330427 - DNA, 25 bp, Homo sapien
gatagtgttcaaagagccagttcag

SEQ ID NO: 5330428 - DNA, 25 bp, Homo sapien
gatatgtctgcactttgaggtccct

SEQ ID NO: 5330429 - DNA, 25 bp, Homo sapien
tgcgggacagcatcaaaagctcaag

SEQ ID NO: 5330430 - DNA, 25 bp, Homo sapien
tgctacatccaagcgcctcacaagt

SEQ ID NO: 5330431 - DNA, 25 bp, Homo sapien
tttttcatgaaccacacaggagact

SEQ ID NO: 5330432 - DNA, 25 bp, Homo sapien
tgagaattcataaggcacccaatgt

SEQ ID NO: 5330433 - DNA, 25 bp, Homo sapien
caaagacccttttcgatgaggtggt

SEQ ID NO: 5330434 - DNA, 25 bp, Homo sapien
catcaggtagtaaaaggctaaacgc

SEQ ID NO: 5330435 - DNA, 25 bp, Homo sapien
tagcctgctgggaaagatatgcaca

SEQ ID NO: 5330436 - DNA, 25 bp, Homo sapien
tgtaagcactgccaagacttctgca

SEQ ID NO: 5330437 - DNA, 25 bp, Homo sapien
tcagcccttggagcctgtgatgagg

SEQ ID NO: 5330438 - DNA, 25 bp, Homo sapien
aaggaaagaccttgtggattgcaca

SEQ ID NO: 5330439 - DNA, 25 bp, Homo sapien
gggcttttctaggatgctcttggcc

SEQ ID NO: 5330440 - DNA, 25 bp, Homo sapien
caggcgaaccatcttatccaaaggg

SEQ ID NO: 5330441 - DNA, 25 bp, Homo sapien
cagacggcagggcaggctctaactg

SEQ ID NO: 5330442 - DNA, 25 bp, Homo sapien
ggtattggagctagagaggcccact

SEQ ID NO: 5330443 - DNA, 25 bp, Homo sapien
tcacacggacctctgccggagcaga

SEQ ID NO: 5330444 - DNA, 25 bp, Homo sapien
ccctgcggctctgacccaatgccca

SEQ ID NO: 5330445 - DNA, 25 bp, Homo sapien
ctgcttgatgttcacacggacctct

SEQ ID NO: 5330446 - DNA, 25 bp, Homo sapien
ttgatgttcacacggacctctgccg

SEQ ID NO: 5330447 - DNA, 25 bp, Homo sapien
tctcctcagtgtagaggaccaggtg

SEQ ID NO: 5330448 - DNA, 25 bp, Homo sapien
ggtggcgtcatgtctgacagctgcc

SEQ ID NO: 5330449 - DNA, 25 bp, Homo sapien
gcaacggtggactcaatacaggagc

SEQ ID NO: 5330450 - DNA, 25 bp, Homo sapien
ggcagaccaggtcacctccctggag

SEQ ID NO: 5330451 - DNA, 25 bp, Homo sapien
catcctcaatcaacacattacatgg

SEQ ID NO: 5330452 - DNA, 25 bp, Homo sapien
ttgtctttgatgctgactccctctc

SEQ ID NO: 5330453 - DNA, 25 bp, Homo sapien
tcagtagacatgtgaatctcccttg

SEQ ID NO: 5330454 - DNA, 25 bp, Homo sapien
ttatacctccagctaggcactcagt

SEQ ID NO: 5330455 - DNA, 25 bp, Homo sapien
tacgattgtacaggtggaaaggctc

SEQ ID NO: 5330456 - DNA, 25 bp, Homo sapien
taagacaggctttgaggacctgaga

SEQ ID NO: 5330457 - DNA, 25 bp, Homo sapien
caagcatttctagcttccttgggag

SEQ ID NO: 5330458 - DNA, 25 bp, Homo sapien
ggacctgagagtgaccaagccatac

SEQ ID NO: 5330459 - DNA, 25 bp, Homo sapien
tccccttgagatagtagcccttacc

SEQ ID NO: 5330460 - DNA, 25 bp, Homo sapien
caaagtccaggatagcattgtggtc

SEQ ID NO: 5330461 - DNA, 25 bp, Homo sapien
gacacccaggatcttcatttcagca

SEQ ID NO: 5330462 - DNA, 25 bp, Homo sapien
tcagggtgcatgtgcggtgctcaaa

SEQ ID NO: 5330463 - DNA, 25 bp, Homo sapien
cagaggtttgggacgacattggccc

SEQ ID NO: 5330464 - DNA, 25 bp, Homo sapien
tgagcctattgtagacacccagggc

SEQ ID NO: 5330465 - DNA, 25 bp, Homo sapien
cattggccccatcaaaaggttccgg

SEQ ID NO: 5330466 - DNA, 25 bp, Homo sapien
aagacgatctctttgggcaggtggc

SEQ ID NO: 5330467 - DNA, 25 bp, Homo sapien
gcagagtggggatgacttgcccggc

SEQ ID NO: 5330468 - DNA, 25 bp, Homo sapien
ctggaaaacggggcctctcgaagca

SEQ ID NO: 5330469 - DNA, 25 bp, Homo sapien
agtgctgtggcctgttcactctgca

SEQ ID NO: 5330470 - DNA, 25 bp, Homo sapien
tctgcagagcctttttgatgcctag

SEQ ID NO: 5330471 - DNA, 25 bp, Homo sapien
agcaggcgcggtcggctggctgact

SEQ ID NO: 5330472 - DNA, 25 bp, Homo sapien
ttgatgcctaggctggcccctgggc

SEQ ID NO: 5330473 - DNA, 25 bp, Homo sapien
gccggactagcaggatgggtgcctc

SEQ ID NO: 5330474 - DNA, 25 bp, Homo sapien
tgccagcatccggccggactagcag

SEQ ID NO: 5330475 - DNA, 25 bp, Homo sapien
cggactagcaggatgggtgcctcac

SEQ ID NO: 5330476 - DNA, 25 bp, Homo sapien
agcatccggccggactagcaggatg

SEQ ID NO: 5330477 - DNA, 25 bp, Homo sapien
agaaaggccagcctctgttgaaggg

SEQ ID NO: 5330478 - DNA, 25 bp, Homo sapien
caagaaaggccagcctctgttgaag

SEQ ID NO: 5330479 - DNA, 25 bp, Homo sapien
ccagcctctgttgaagggggactac

SEQ ID NO: 5330480 - DNA, 25 bp, Homo sapien
tctgttgaagggggactaccctgta

SEQ ID NO: 5330481 - DNA, 25 bp, Homo sapien
gtatttgtcatcagccagtgaagga

SEQ ID NO: 5330482 - DNA, 25 bp, Homo sapien
tccagaataacagatgaggacacgg

SEQ ID NO: 5330483 - DNA, 25 bp, Homo sapien
gatgtgatgacattcaggtatttgt

SEQ ID NO: 5330484 - DNA, 25 bp, Homo sapien
ggaccagacgcccatcagctcagag

SEQ ID NO: 5330485 - DNA, 25 bp, Homo sapien
gggttccagcataaagaatgcacag

SEQ ID NO: 5330486 - DNA, 25 bp, Homo sapien
tggcctccccaacaagtgactactt

SEQ ID NO: 5330487 - DNA, 25 bp, Homo sapien
cattctaaagcaggtatgggatcct

SEQ ID NO: 5330488 - DNA, 25 bp, Homo sapien
catcttacatggactcaactgctgc

SEQ ID NO: 5330489 - DNA, 25 bp, Homo sapien
gtaggccccatactgcactccatga

SEQ ID NO: 5330490 - DNA, 25 bp, Homo sapien
tcatttgtggaaagatcacgggaaa

SEQ ID NO: 5330491 - DNA, 25 bp, Homo sapien
ccactccccaagctggtcatttgtg

SEQ ID NO: 5330492 - DNA, 25 bp, Homo sapien
tggccaagcaactctgggtaggccc

SEQ ID NO: 5330493 - DNA, 25 bp, Homo sapien
aaaatgtccactatgttggtgatgc

SEQ ID NO: 5330494 - DNA, 25 bp, Homo sapien
gacatccagtcgtctacagaggaca

SEQ ID NO: 5330495 - DNA, 25 bp, Homo sapien
taaagggtagcacgggaggacatcc

SEQ ID NO: 5330496 - DNA, 25 bp, Homo sapien
tgtccccattcaaaggtcactccat

SEQ ID NO: 5330497 - DNA, 25 bp, Homo sapien
atgccatgcatcacccagtgcctgg

SEQ ID NO: 5330498 - DNA, 25 bp, Homo sapien
aagtctgcctcttgctatgaaccag

SEQ ID NO: 5330499 - DNA, 25 bp, Homo sapien
gaggaagactcgatggcacacctgt

SEQ ID NO: 5330500 - DNA, 25 bp, Homo sapien
ggtccccaaccacaatgcaagactg

SEQ ID NO: 5330501 - DNA, 25 bp, Homo sapien
tcagtgagccagcagagaggcagtt

SEQ ID NO: 5330502 - DNA, 25 bp, Homo sapien
agcagagaggcagttgggtcaacac

SEQ ID NO: 5330503 - DNA, 25 bp, Homo sapien
tgagccagcagagaggcagttgggt

SEQ ID NO: 5330504 - DNA, 25 bp, Homo sapien
ccagcagagaggcagttgggtcaac

SEQ ID NO: 5330505 - DNA, 25 bp, Homo sapien
ctttctgcagatggacttttgcaga

SEQ ID NO: 5330506 - DNA, 25 bp, Homo sapien
ttttgcagatagcttcccagctgct

SEQ ID NO: 5330507 - DNA, 25 bp, Homo sapien
gaagactgtataatgaaaaacctgc

SEQ ID NO: 5330508 - DNA, 25 bp, Homo sapien
aatggagtcaccgagaaggtgttga

SEQ ID NO: 5330509 - DNA, 25 bp, Homo sapien
tccatgaggagtataacaacctggg

SEQ ID NO: 5330510 - DNA, 25 bp, Homo sapien
catgaggagtataacaacctgggaa

SEQ ID NO: 5330511 - DNA, 25 bp, Homo sapien
gaggagtataacaacctgggaagaa

SEQ ID NO: 5330512 - DNA, 25 bp, Homo sapien
cctgggaagaagaccagctccgctc

SEQ ID NO: 5330513 - DNA, 25 bp, Homo sapien
acctccacaacagaaacacgcaggg

SEQ ID NO: 5330514 - DNA, 25 bp, Homo sapien
cagatggcccttcgggctgtgtctg

SEQ ID NO: 5330515 - DNA, 25 bp, Homo sapien
gacctccacaacagaaacacgcagg

SEQ ID NO: 5330516 - DNA, 25 bp, Homo sapien
gctgtggcttgaggcagatggccct

SEQ ID NO: 5330517 - DNA, 25 bp, Homo sapien
aaggagttggcatcagcctctggcc

SEQ ID NO: 5330518 - DNA, 25 bp, Homo sapien
cagcctctggccgagtctgggagtc

SEQ ID NO: 5330519 - DNA, 25 bp, Homo sapien
tctggccgagtctgggagtctgtct

SEQ ID NO: 5330520 - DNA, 25 bp, Homo sapien
tggcatcagcctctggccgagtctg

SEQ ID NO: 5330521 - DNA, 25 bp, Homo sapien
ggactctcccctgcagcatgggcgt

SEQ ID NO: 5330522 - DNA, 25 bp, Homo sapien
caaattctcactctccgtgggttcc

SEQ ID NO: 5330523 - DNA, 25 bp, Homo sapien
gcctttatccaaattagcactcatg

SEQ ID NO: 5330524 - DNA, 25 bp, Homo sapien
tcctgggccgtctgcatgggcctga

SEQ ID NO: 5330525 - DNA, 25 bp, Homo sapien
taggtcttctctgcgcctttggttt

SEQ ID NO: 5330526 - DNA, 25 bp, Homo sapien
aaggactctggccttctgaagccct

SEQ ID NO: 5330527 - DNA, 25 bp, Homo sapien
acattggcggttccccgaggctgca

SEQ ID NO: 5330528 - DNA, 25 bp, Homo sapien
gatactcacagatgtggctccctga

SEQ ID NO: 5330529 - DNA, 25 bp, Homo sapien
gctgccatgttggtggagggcttcg

SEQ ID NO: 5330530 - DNA, 25 bp, Homo sapien
ttggtggagggcttcgccattcacc

SEQ ID NO: 5330531 - DNA, 25 bp, Homo sapien
tctatcagcgaaactgaactcattt

SEQ ID NO: 5330532 - DNA, 25 bp, Homo sapien
tatttttcagatctatcagcgaaac

SEQ ID NO: 5330533 - DNA, 25 bp, Homo sapien
ggtggcaggagttgtggatgagaac

SEQ ID NO: 5330534 - DNA, 25 bp, Homo sapien
gaatttgccaagagactttgccacc

SEQ ID NO: 5330535 - DNA, 25 bp, Homo sapien
gaaagcacccagaattacttgagga

SEQ ID NO: 5330536 - DNA, 25 bp, Homo sapien
gaggcgaagtccatgggtttctccc

SEQ ID NO: 5330537 - DNA, 25 bp, Homo sapien
tggcttcaccgggaaaatgtgggcc

SEQ ID NO: 5330538 - DNA, 25 bp, Homo sapien
aggtgggcaaagccttccgttccag

SEQ ID NO: 5330539 - DNA, 25 bp, Homo sapien
gctgccctcccatgagatcccaatc

SEQ ID NO: 5330540 - DNA, 25 bp, Homo sapien
ctgccctcccatgagatcccaatct

SEQ ID NO: 5330541 - DNA, 25 bp, Homo sapien
gcgatgcagaccgcagtcttcaccg

SEQ ID NO: 5330542 - DNA, 25 bp, Homo sapien
ggaggcgatgcagaccgcagtcttc

SEQ ID NO: 5330543 - DNA, 25 bp, Homo sapien
gaggcgatgcagaccgcagtcttca

SEQ ID NO: 5330544 - DNA, 25 bp, Homo sapien
aggcgatgcagaccgcagtcttcac

SEQ ID NO: 5330545 - DNA, 25 bp, Homo sapien
aagagtcttcggagaaaatgagaac

SEQ ID NO: 5330546 - DNA, 25 bp, Homo sapien
agtctctgagggaagagtcttcgga

SEQ ID NO: 5330547 - DNA, 25 bp, Homo sapien
tgggcactaggagtcgtcaagcaga

SEQ ID NO: 5330548 - DNA, 25 bp, Homo sapien
cactgggcactaggagtcgtcaagc

SEQ ID NO: 5330549 - DNA, 25 bp, Homo sapien
aggacactgggcactaggagtcgtc

SEQ ID NO: 5330550 - DNA, 25 bp, Homo sapien
actaggagtcgtcaagcagagcagg

SEQ ID NO: 5330551 - DNA, 25 bp, Homo sapien
agcaaaccactaggccaatcgccat

SEQ ID NO: 5330552 - DNA, 25 bp, Homo sapien
accagacacagaagccgcgatgttc

SEQ ID NO: 5330553 - DNA, 25 bp, Homo sapien
agggaacagccggaacgaagatgca

SEQ ID NO: 5330554 - DNA, 25 bp, Homo sapien
ggttctttcactacagcaccagaca

SEQ ID NO: 5330555 - DNA, 25 bp, Homo sapien
aggatcacaggaaacccacggtggg

SEQ ID NO: 5330556 - DNA, 25 bp, Homo sapien
cacggtgggctatccttggcccctg

SEQ ID NO: 5330557 - DNA, 25 bp, Homo sapien
ctcttgactcttatctttgccctgg

SEQ ID NO: 5330558 - DNA, 25 bp, Homo sapien
tatccttggcccctgacacttcagt

SEQ ID NO: 5330559 - DNA, 25 bp, Homo sapien
gatggttacatgatattgtaaatat

SEQ ID NO: 5330560 - DNA, 25 bp, Homo sapien
ggttacatgatattgtaaatatact

SEQ ID NO: 5330561 - DNA, 25 bp, Homo sapien
atgtttggtgggtagtgggagttag

SEQ ID NO: 5330562 - DNA, 25 bp, Homo sapien
tgttgatggttacatgatattgtaa

SEQ ID NO: 5330563 - DNA, 25 bp, Homo sapien
tgccccagacgagagcttataacga

SEQ ID NO: 5330564 - DNA, 25 bp, Homo sapien
ctgagttgccccagacgagagctta

SEQ ID NO: 5330565 - DNA, 25 bp, Homo sapien
cgagagcttataacgaagagtagtg

SEQ ID NO: 5330566 - DNA, 25 bp, Homo sapien
acgaagagtagtgttaactctgcca

SEQ ID NO: 5330567 - DNA, 25 bp, Homo sapien
tatggaaacggcacctgattttggc

SEQ ID NO: 5330568 - DNA, 25 bp, Homo sapien
taaacagcctgatgagcacgggaaa

SEQ ID NO: 5330569 - DNA, 25 bp, Homo sapien
gaaatgcttctgagccacgtcatgg

SEQ ID NO: 5330570 - DNA, 25 bp, Homo sapien
tcatggtttcagaggcactggcccg

SEQ ID NO: 5330571 - DNA, 25 bp, Homo sapien
agatcccttctgaggtgtaccctgg

SEQ ID NO: 5330572 - DNA, 25 bp, Homo sapien
agactgtgtagaccctcctttggca

SEQ ID NO: 5330573 - DNA, 25 bp, Homo sapien
cacaccggcactcatctcagatggg

SEQ ID NO: 5330574 - DNA, 25 bp, Homo sapien
caccttcatacgcagcctctaagat

SEQ ID NO: 5330575 - DNA, 25 bp, Homo sapien
tcttgctccaaacagaccaataagg

SEQ ID NO: 5330576 - DNA, 25 bp, Homo sapien
tatcacagccaaggcatcaggcagt

SEQ ID NO: 5330577 - DNA, 25 bp, Homo sapien
caaacaactttggtgctgaccagga

SEQ ID NO: 5330578 - DNA, 25 bp, Homo sapien
taattctagacttcggtccttctgg

SEQ ID NO: 5330579 - DNA, 25 bp, Homo sapien
tcaacagcatcttattcatccagag

SEQ ID NO: 5330580 - DNA, 25 bp, Homo sapien
aaaggtggcccatagtccctaatga

SEQ ID NO: 5330581 - DNA, 25 bp, Homo sapien
cagagtcactgaggttcccatcaat

SEQ ID NO: 5330582 - DNA, 25 bp, Homo sapien
tcatgtgggtgaacaaaggagtcca

SEQ ID NO: 5330583 - DNA, 25 bp, Homo sapien
tatgtgtggccctgctagatgagca

SEQ ID NO: 5330584 - DNA, 25 bp, Homo sapien
tagatgagcagcgttggtgagaccc

SEQ ID NO: 5330585 - DNA, 25 bp, Homo sapien
caagactcacttgcacgtggaatgc

SEQ ID NO: 5330586 - DNA, 25 bp, Homo sapien
ggcacttggttcagacgcagggatt

SEQ ID NO: 5330587 - DNA, 25 bp, Homo sapien
tcaagagaggtgagatgtgcagcct

SEQ ID NO: 5330588 - DNA, 25 bp, Homo sapien
cccattaagagggatgagatcaaga

SEQ ID NO: 5330589 - DNA, 25 bp, Homo sapien
cctggcatccttctcttacgtgtct

SEQ ID NO: 5330590 - DNA, 25 bp, Homo sapien
tacgtgtctagtgtgttctatagac

SEQ ID NO: 5330591 - DNA, 25 bp, Homo sapien
caagggtccaaagaaagccaccatc

SEQ ID NO: 5330592 - DNA, 25 bp, Homo sapien
gatgtcggacggtcagatactgtcc

SEQ ID NO: 5330593 - DNA, 25 bp, Homo sapien
aagggttaagcacctctgtcaagga

SEQ ID NO: 5330594 - DNA, 25 bp, Homo sapien
gatactgtccctaaccggaggtgct

SEQ ID NO: 5330595 - DNA, 25 bp, Homo sapien
gccaagagccatagcagtaacagca

SEQ ID NO: 5330596 - DNA, 25 bp, Homo sapien
ttgatggcagtcagcagtcgggcac

SEQ ID NO: 5330597 - DNA, 25 bp, Homo sapien
ggaaaccccaacacagtgggcttga

SEQ ID NO: 5330598 - DNA, 25 bp, Homo sapien
gcacaggccaagagccatagcagta

SEQ ID NO: 5330599 - DNA, 25 bp, Homo sapien
aagaggccagacaactgcctctttt

SEQ ID NO: 5330600 - DNA, 25 bp, Homo sapien
gaagaggccagacaactgcctcttt

SEQ ID NO: 5330601 - DNA, 25 bp, Homo sapien
ggaagaggccagacaactgcctctt

SEQ ID NO: 5330602 - DNA, 25 bp, Homo sapien
agcccagccggccatgacggctgcc

SEQ ID NO: 5330603 - DNA, 25 bp, Homo sapien
ttgggtgttgagagagcccagccgg

SEQ ID NO: 5330604 - DNA, 25 bp, Homo sapien
cagccggccatgacggctgccagag

SEQ ID NO: 5330605 - DNA, 25 bp, Homo sapien
tgggtgttgagagagcccagccggc

SEQ ID NO: 5330606 - DNA, 25 bp, Homo sapien
ggttggccaaggctccaattcttgg

SEQ ID NO: 5330607 - DNA, 25 bp, Homo sapien
cacaaacggagtcttctaagggtga

SEQ ID NO: 5330608 - DNA, 25 bp, Homo sapien
caaacggagtcttctaagggtgagg

SEQ ID NO: 5330609 - DNA, 25 bp, Homo sapien
gggagagccatctgccacaaacgga

SEQ ID NO: 5330610 - DNA, 25 bp, Homo sapien
ttcagtctgtgcaagagaatcctca

SEQ ID NO: 5330611 - DNA, 25 bp, Homo sapien
tgatgagccactcagcaaatcctgg

SEQ ID NO: 5330612 - DNA, 25 bp, Homo sapien
catctgtctagttggctggtgggca

SEQ ID NO: 5330613 - DNA, 25 bp, Homo sapien
caaatcctggagttgccctaaatgc

SEQ ID NO: 5330614 - DNA, 25 bp, Homo sapien
tggccgtgtccagcaaaactgatag

SEQ ID NO: 5330615 - DNA, 25 bp, Homo sapien
ccacggctctataaggcaatgcagg

SEQ ID NO: 5330616 - DNA, 25 bp, Homo sapien
gctataggagtgtccgtgactccca

SEQ ID NO: 5330617 - DNA, 25 bp, Homo sapien
atctgtagggcgaagccccacggct

SEQ ID NO: 5330618 - DNA, 25 bp, Homo sapien
tacatggggtgtggtaggggcaaag

SEQ ID NO: 5330619 - DNA, 25 bp, Homo sapien
acatggggtgtggtaggggcaaagg

SEQ ID NO: 5330620 - DNA, 25 bp, Homo sapien
ctacatggggtgtggtaggggcaaa

SEQ ID NO: 5330621 - DNA, 25 bp, Homo sapien
catggggtgtggtaggggcaaaggg

SEQ ID NO: 5330622 - DNA, 25 bp, Homo sapien
ccctggggatgcccaaaatgctcat

SEQ ID NO: 5330623 - DNA, 25 bp, Homo sapien
cttgtccactagcacaggagagtca

SEQ ID NO: 5330624 - DNA, 25 bp, Homo sapien
ctgcaggcagtggtgaagctcacaa

SEQ ID NO: 5330625 - DNA, 25 bp, Homo sapien
tctaaggacgtgataagggcacaag

SEQ ID NO: 5330626 - DNA, 25 bp, Homo sapien
cacaagtggaaaagctctaaggacg

SEQ ID NO: 5330627 - DNA, 25 bp, Homo sapien
caagagtccaggtgtgtgtacaggt

SEQ ID NO: 5330628 - DNA, 25 bp, Homo sapien
catatacagaggtttcgcagggcaa

SEQ ID NO: 5330629 - DNA, 25 bp, Homo sapien
cagaggtactggaagcaatcccaca

SEQ ID NO: 5330630 - DNA, 25 bp, Homo sapien
gacccaactatatgtggcctatgaa

SEQ ID NO: 5330631 - DNA, 25 bp, Homo sapien
tcgtgaacaatagccagacaaggac

SEQ ID NO: 5330632 - DNA, 25 bp, Homo sapien
aggaatggacctcaacacagtaagg

SEQ ID NO: 5330633 - DNA, 25 bp, Homo sapien
gaatggacctcaacacagtaagggt

SEQ ID NO: 5330634 - DNA, 25 bp, Homo sapien
acacagtaagggtcatgtacgataa

SEQ ID NO: 5330635 - DNA, 25 bp, Homo sapien
ggtcatgtacgataagcccacagct

SEQ ID NO: 5330636 - DNA, 25 bp, Homo sapien
atcacgccactccagcttgggctac

SEQ ID NO: 5330637 - DNA, 25 bp, Homo sapien
acgccactccagcttgggctacaga

SEQ ID NO: 5330638 - DNA, 25 bp, Homo sapien
gatcacgccactccagcttgggcta

SEQ ID NO: 5330639 - DNA, 25 bp, Homo sapien
gagatcacgccactccagcttgggc

SEQ ID NO: 5330640 - DNA, 25 bp, Homo sapien
tggccaacaggaatctgaaaaggtg

SEQ ID NO: 5330641 - DNA, 25 bp, Homo sapien
aaatggccaacaggaatctgaaaag

SEQ ID NO: 5330642 - DNA, 25 bp, Homo sapien
ccaacaggaatctgaaaaggtgctg

SEQ ID NO: 5330643 - DNA, 25 bp, Homo sapien
aacaggaatctgaaaaggtgctgaa

SEQ ID NO: 5330644 - DNA, 25 bp, Homo sapien
gaaatgttgttcagccatgaagagg

SEQ ID NO: 5330645 - DNA, 25 bp, Homo sapien
acacagggagatgtgctatatgatt

SEQ ID NO: 5330646 - DNA, 25 bp, Homo sapien
tcacaatagcaagcaaggtacaagc

SEQ ID NO: 5330647 - DNA, 25 bp, Homo sapien
aacatttaagatgttgtgggccggg

SEQ ID NO: 5330648 - DNA, 25 bp, Homo sapien
ccacagaatacagaatcataaaatc

SEQ ID NO: 5330649 - DNA, 25 bp, Homo sapien
cttctccacagaatacagaatcata

SEQ ID NO: 5330650 - DNA, 25 bp, Homo sapien
ttcccctcccatgcttctccacaga

SEQ ID NO: 5330651 - DNA, 25 bp, Homo sapien
ccatgcttctccacagaatacagaa

SEQ ID NO: 5330652 - DNA, 25 bp, Homo sapien
gcagaagtgatatactaggatctcc

SEQ ID NO: 5330653 - DNA, 25 bp, Homo sapien
tcataaagtgcaaacccgtcaaggc

SEQ ID NO: 5330654 - DNA, 25 bp, Homo sapien
agtaagtcgttcattagttgcagtc

SEQ ID NO: 5330655 - DNA, 25 bp, Homo sapien
tcaaggcagtcagaactagtaagtc

SEQ ID NO: 5330656 - DNA, 25 bp, Homo sapien
ggaatctagcatcagagaactaaaa

SEQ ID NO: 5330657 - DNA, 25 bp, Homo sapien
tatggattggaatctagcatcagag

SEQ ID NO: 5330658 - DNA, 25 bp, Homo sapien
tctggtaagaatatggattggaatc

SEQ ID NO: 5330659 - DNA, 25 bp, Homo sapien
gcctctggtaagaatatggattgga

SEQ ID NO: 5330660 - DNA, 25 bp, Homo sapien
caggaaaaggattactacagcacaa

SEQ ID NO: 5330661 - DNA, 25 bp, Homo sapien
tgtcctcgggccaccttttactgct

SEQ ID NO: 5330662 - DNA, 25 bp, Homo sapien
taaaccattggtaatcgtcacttgc

SEQ ID NO: 5330663 - DNA, 25 bp, Homo sapien
caagtgacctccagccaaaagtgct

SEQ ID NO: 5330664 - DNA, 25 bp, Homo sapien
tcagggttagactagcttaaggcac

SEQ ID NO: 5330665 - DNA, 25 bp, Homo sapien
gaggatctgaataaccacatggcca

SEQ ID NO: 5330666 - DNA, 25 bp, Homo sapien
gaaaggctgatccacattttgcaag

SEQ ID NO: 5330667 - DNA, 25 bp, Homo sapien
tgaatgccacataccagactaggtg

SEQ ID NO: 5330668 - DNA, 25 bp, Homo sapien
ccactgatctctatcgtcctcaaag

SEQ ID NO: 5330669 - DNA, 25 bp, Homo sapien
gttaagactacgagataaattcttc

SEQ ID NO: 5330670 - DNA, 25 bp, Homo sapien
aatggagactgcatgctgggcagtc

SEQ ID NO: 5330671 - DNA, 25 bp, Homo sapien
aaagtttggaattacagtggatgtt

SEQ ID NO: 5330672 - DNA, 25 bp, Homo sapien
tgcattcactctggtcctccctcag

SEQ ID NO: 5330673 - DNA, 25 bp, Homo sapien
ctaaggaatgagcaagagtggtttg

SEQ ID NO: 5330674 - DNA, 25 bp, Homo sapien
gaatgagcaagagtggtttgttcag

SEQ ID NO: 5330675 - DNA, 25 bp, Homo sapien
gatagtgattggagttaatatttgc

SEQ ID NO: 5330676 - DNA, 25 bp, Homo sapien
ttgcactaagcagggattgcgccac

SEQ ID NO: 5330677 - DNA, 25 bp, Homo sapien
gtggacgttgcactaagcagggatt

SEQ ID NO: 5330678 - DNA, 25 bp, Homo sapien
gaggtggacgttgcactaagcaggg

SEQ ID NO: 5330679 - DNA, 25 bp, Homo sapien
gacgttgcactaagcagggattgcg

SEQ ID NO: 5330680 - DNA, 25 bp, Homo sapien
agaattatgggctttgagttggtgt

SEQ ID NO: 5330681 - DNA, 25 bp, Homo sapien
gaattatgggctttgagttggtgtg

SEQ ID NO: 5330682 - DNA, 25 bp, Homo sapien
cagaattatgggctttgagttggtg

SEQ ID NO: 5330683 - DNA, 25 bp, Homo sapien
tacccttgtagagagtgtaacttcc

SEQ ID NO: 5330684 - DNA, 25 bp, Homo sapien
gctttacccttgtagagagtgtaac

SEQ ID NO: 5330685 - DNA, 25 bp, Homo sapien
aggcaggaccaggtgacaggcccca

SEQ ID NO: 5330686 - DNA, 25 bp, Homo sapien
tgtagagagtgtaacttccagcagg

SEQ ID NO: 5330687 - DNA, 25 bp, Homo sapien
atcacaaatggcatacagccagagg

SEQ ID NO: 5330688 - DNA, 25 bp, Homo sapien
gccctctctgggcgagatccaggtt

SEQ ID NO: 5330689 - DNA, 25 bp, Homo sapien
gatgtgccagagaagttccggattt

SEQ ID NO: 5330690 - DNA, 25 bp, Homo sapien
tttagaatccaagcaatgagaagga

SEQ ID NO: 5330691 - DNA, 25 bp, Homo sapien
gaggtgaagagcctcctacagcgga

SEQ ID NO: 5330692 - DNA, 25 bp, Homo sapien
gatgttcagaaatctcaagtagtgc

SEQ ID NO: 5330693 - DNA, 25 bp, Homo sapien
taatatcctagtgatcagcagatcc

SEQ ID NO: 5330694 - DNA, 25 bp, Homo sapien
ggagacactggctctaatatcctag

SEQ ID NO: 5330695 - DNA, 25 bp, Homo sapien
actagacctcgtgtatgaggctgca

SEQ ID NO: 5330696 - DNA, 25 bp, Homo sapien
tctaagagctgatctaatcacactg

SEQ ID NO: 5330697 - DNA, 25 bp, Homo sapien
tcctaaaccctactgaagctgccat

SEQ ID NO: 5330698 - DNA, 25 bp, Homo sapien
taatggtgaagctctcctaaaggac

SEQ ID NO: 5330699 - DNA, 25 bp, Homo sapien
cctggtatcctcaagctatcaaagc

SEQ ID NO: 5330700 - DNA, 25 bp, Homo sapien
ttcccctgcaagcacagcctctttc

SEQ ID NO: 5330701 - DNA, 25 bp, Homo sapien
gcaagcacagcctctttcactctct

SEQ ID NO: 5330702 - DNA, 25 bp, Homo sapien
cttttcccctgcaagcacagcctct

SEQ ID NO: 5330703 - DNA, 25 bp, Homo sapien
cctgcaagcacagcctctttcactc

SEQ ID NO: 5330704 - DNA, 25 bp, Homo sapien
tttggactcaagcaacaggatctga

SEQ ID NO: 5330705 - DNA, 25 bp, Homo sapien
ggaggcctggaccttacttctagca

SEQ ID NO: 5330706 - DNA, 25 bp, Homo sapien
caggcaggattactcaacagcatgt

SEQ ID NO: 5330707 - DNA, 25 bp, Homo sapien
gacttgtctcttagtgatccaggaa

SEQ ID NO: 5330708 - DNA, 25 bp, Homo sapien
acaggggagacagccactgtggtgg

SEQ ID NO: 5330709 - DNA, 25 bp, Homo sapien
caatgccaccatgaaactgcccgtt

SEQ ID NO: 5330710 - DNA, 25 bp, Homo sapien
aattcatcaatgtaagtgccctcac

SEQ ID NO: 5330711 - DNA, 25 bp, Homo sapien
ccactgtggtgggttgaattcatca

SEQ ID NO: 5330712 - DNA, 25 bp, Homo sapien
cagagccattccttagtttgcagca

SEQ ID NO: 5330713 - DNA, 25 bp, Homo sapien
ttatcagcaatccttggagggccag

SEQ ID NO: 5330714 - DNA, 25 bp, Homo sapien
gcagtttaggaagctacaagtttga

SEQ ID NO: 5330715 - DNA, 25 bp, Homo sapien
tatgacaacaccagtcactagacag

SEQ ID NO: 5330716 - DNA, 25 bp, Homo sapien
gagttctgaaataagctgactagca

SEQ ID NO: 5330717 - DNA, 25 bp, Homo sapien
tagctgctgccaaaaggatatgtgg

SEQ ID NO: 5330718 - DNA, 25 bp, Homo sapien
tacagagcaccaaccttataagaag

SEQ ID NO: 5330719 - DNA, 25 bp, Homo sapien
tactattcaattcggtacagagcac

SEQ ID NO: 5330720 - DNA, 25 bp, Homo sapien
gaattagggacagctacccaaactg

SEQ ID NO: 5330721 - DNA, 25 bp, Homo sapien
aaagcagtccccttgttaggatctg

SEQ ID NO: 5330722 - DNA, 25 bp, Homo sapien
gagctagagcacatgtttattacca

SEQ ID NO: 5330723 - DNA, 25 bp, Homo sapien
gactgtgagttctgatcccaaactg

SEQ ID NO: 5330724 - DNA, 25 bp, Homo sapien
tctaaacattggtctagtagcagaa

SEQ ID NO: 5330725 - DNA, 25 bp, Homo sapien
caagggaagagattttctgactacc

SEQ ID NO: 5330726 - DNA, 25 bp, Homo sapien
ggaaaaaatgtgtaggcaaggtgca

SEQ ID NO: 5330727 - DNA, 25 bp, Homo sapien
gatagtcgacatgttaactcttaca

SEQ ID NO: 5330728 - DNA, 25 bp, Homo sapien
tgctatcattatccctacttaaccg

SEQ ID NO: 5330729 - DNA, 25 bp, Homo sapien
cattcctaatgagtgctatgtttca

SEQ ID NO: 5330730 - DNA, 25 bp, Homo sapien
ggtccaaaatacctctgaaaattca

SEQ ID NO: 5330731 - DNA, 25 bp, Homo sapien
tacttaaccgagatgaaactgaggg

SEQ ID NO: 5330732 - DNA, 25 bp, Homo sapien
actgtgttacaagaccacgtctcac

SEQ ID NO: 5330733 - DNA, 25 bp, Homo sapien
accactgtgttacaagaccacgtct

SEQ ID NO: 5330734 - DNA, 25 bp, Homo sapien
cactgtgttacaagaccacgtctca

SEQ ID NO: 5330735 - DNA, 25 bp, Homo sapien
ccactgtgttacaagaccacgtctc

SEQ ID NO: 5330736 - DNA, 25 bp, Homo sapien
caagcctggctcatcatatggaggt

SEQ ID NO: 5330737 - DNA, 25 bp, Homo sapien
agagctctacccttggcacacaagg

SEQ ID NO: 5330738 - DNA, 25 bp, Homo sapien
gactccctattttcatcccctacaa

SEQ ID NO: 5330739 - DNA, 25 bp, Homo sapien
acaaaacccaagatgccctgcaggg

SEQ ID NO: 5330740 - DNA, 25 bp, Homo sapien
atctcaagtccccaacacacttggt

SEQ ID NO: 5330741 - DNA, 25 bp, Homo sapien
catcacactcatgtacgcatctcaa

SEQ ID NO: 5330742 - DNA, 25 bp, Homo sapien
cacactcatgtacgcatctcaagtc

SEQ ID NO: 5330743 - DNA, 25 bp, Homo sapien
aacatcacactcatgtacgcatctc

SEQ ID NO: 5330744 - DNA, 25 bp, Homo sapien
gaaatgggtaccacatgaggtagac

SEQ ID NO: 5330745 - DNA, 25 bp, Homo sapien
cgtattatgctcatcactacaggat

SEQ ID NO: 5330746 - DNA, 25 bp, Homo sapien
gaagaaattccctgctagaaatggg

SEQ ID NO: 5330747 - DNA, 25 bp, Homo sapien
caggatataagagatgcctcctgcc

SEQ ID NO: 5330748 - DNA, 25 bp, Homo sapien
aggataggtcaataggtgcagcaaa

SEQ ID NO: 5330749 - DNA, 25 bp, Homo sapien
accaccatggcacacgtacagctat

SEQ ID NO: 5330750 - DNA, 25 bp, Homo sapien
ggataggtcaataggtgcagcaaac

SEQ ID NO: 5330751 - DNA, 25 bp, Homo sapien
accatggcacacgtacagctatgta

SEQ ID NO: 5330752 - DNA, 25 bp, Homo sapien
aggttgggtgtgatagcacatgccc

SEQ ID NO: 5330753 - DNA, 25 bp, Homo sapien
atcaggttgggtgtgatagcacatg

SEQ ID NO: 5330754 - DNA, 25 bp, Homo sapien
aaaggcaatgtatcaggttgggtgt

SEQ ID NO: 5330755 - DNA, 25 bp, Homo sapien
taaaggcaatgtatcaggttgggtg

SEQ ID NO: 5330756 - DNA, 25 bp, Homo sapien
catggtgagcacaacataagcttac

SEQ ID NO: 5330757 - DNA, 25 bp, Homo sapien
gaagggtgttctaggcacaatgaag

SEQ ID NO: 5330758 - DNA, 25 bp, Homo sapien
caatgaagagcacacgcaaaggcct

SEQ ID NO: 5330759 - DNA, 25 bp, Homo sapien
taggagatatccaggcagtggcaga

SEQ ID NO: 5330760 - DNA, 25 bp, Homo sapien
aattacttaactctacttgcctctg

SEQ ID NO: 5330761 - DNA, 25 bp, Homo sapien
taaaactagcagcttaacaaggaaa

SEQ ID NO: 5330762 - DNA, 25 bp, Homo sapien
tcattatgtgtacccaagcctcaac

SEQ ID NO: 5330763 - DNA, 25 bp, Homo sapien
gaatgaaacctaaatgtgcggcttg

SEQ ID NO: 5330764 - DNA, 25 bp, Homo sapien
tttccttcatgtaatacaggataag

SEQ ID NO: 5330765 - DNA, 25 bp, Homo sapien
ccgggaagcagaggttgcagtgagc

SEQ ID NO: 5330766 - DNA, 25 bp, Homo sapien
gcaggagaatcacttgaacccggga

SEQ ID NO: 5330767 - DNA, 25 bp, Homo sapien
cactccatcctggtgacacagcaag

SEQ ID NO: 5330768 - DNA, 25 bp, Homo sapien
gtagtgccagctactcgggttgctg

SEQ ID NO: 5330769 - DNA, 25 bp, Homo sapien
aaaatgggtggtgtggaattcactc

SEQ ID NO: 5330770 - DNA, 25 bp, Homo sapien
cgagtcatgtgtgaggctccaggca

SEQ ID NO: 5330771 - DNA, 25 bp, Homo sapien
gaattcactcaggtatccacaagat

SEQ ID NO: 5330772 - DNA, 25 bp, Homo sapien
cagtcaattgctccatgtctcagtg

SEQ ID NO: 5330773 - DNA, 25 bp, Homo sapien
cagtaaggaaatctggaggtccatc

SEQ ID NO: 5330774 - DNA, 25 bp, Homo sapien
aggaaatctggaggtccatccccga

SEQ ID NO: 5330775 - DNA, 25 bp, Homo sapien
tccatccccgacattgtgtgacctt

SEQ ID NO: 5330776 - DNA, 25 bp, Homo sapien
aggtccatccccgacattgtgtgac

SEQ ID NO: 5330777 - DNA, 25 bp, Homo sapien
taaagatagaatacggtgaactgcc

SEQ ID NO: 5330778 - DNA, 25 bp, Homo sapien
gctggcactggccaatgcacaataa

SEQ ID NO: 5330779 - DNA, 25 bp, Homo sapien
gagagagagataagaacacctacct

SEQ ID NO: 5330780 - DNA, 25 bp, Homo sapien
tgaactgccttgcatcggatgtgct

SEQ ID NO: 5330781 - DNA, 25 bp, Homo sapien
tctctccagcacaacagcccatgct

SEQ ID NO: 5330782 - DNA, 25 bp, Homo sapien
tcagaggcactgtagtctcttcgta

SEQ ID NO: 5330783 - DNA, 25 bp, Homo sapien
gaggcactgtagtctcttcgtagct

SEQ ID NO: 5330784 - DNA, 25 bp, Homo sapien
tgtagtctcttcgtagctctcgttc

SEQ ID NO: 5330785 - DNA, 25 bp, Homo sapien
tctcattccttaaattaaacagagg

SEQ ID NO: 5330786 - DNA, 25 bp, Homo sapien
taaacagaggtttctaaatgctttg

SEQ ID NO: 5330787 - DNA, 25 bp, Homo sapien
gatactgcccccctattatccacta

SEQ ID NO: 5330788 - DNA, 25 bp, Homo sapien
ggacccaaattatcccttgatactg

SEQ ID NO: 5330789 - DNA, 25 bp, Homo sapien
acagtcattcgcgttcccgtttcaa

SEQ ID NO: 5330790 - DNA, 25 bp, Homo sapien
ttacagtcattcgcgttcccgtttc

SEQ ID NO: 5330791 - DNA, 25 bp, Homo sapien
attttacagtcattcgcgttcccgt

SEQ ID NO: 5330792 - DNA, 25 bp, Homo sapien
agtcattcgcgttcccgtttcaaat

SEQ ID NO: 5330793 - DNA, 25 bp, Homo sapien
gcattctagagctttcgggccgacc

SEQ ID NO: 5330794 - DNA, 25 bp, Homo sapien
tttctcgttggcgacgaatgctaac

SEQ ID NO: 5330795 - DNA, 25 bp, Homo sapien
ttaagtcataaaactcgcggaggtg

SEQ ID NO: 5330796 - DNA, 25 bp, Homo sapien
gaccccaatttctcgttggcgacga

SEQ ID NO: 5330797 - DNA, 25 bp, Homo sapien
acgtgtcgccattttgtgttcagga

SEQ ID NO: 5330798 - DNA, 25 bp, Homo sapien
cacgttagccgctttccctgagaga

SEQ ID NO: 5330799 - DNA, 25 bp, Homo sapien
tctggtctggcttagcccaaggagg

SEQ ID NO: 5330800 - DNA, 25 bp, Homo sapien
gagattgtgaagcacgttgcgcacg

SEQ ID NO: 5330801 - DNA, 25 bp, Homo sapien
gaaagccgcagaaacgtcctgaagc

SEQ ID NO: 5330802 - DNA, 25 bp, Homo sapien
tttaggaccacgtttctagcacgcc

SEQ ID NO: 5330803 - DNA, 25 bp, Homo sapien
ttcctcagcgggaagaaccggcaaa

SEQ ID NO: 5330804 - DNA, 25 bp, Homo sapien
ttctaatgtcggaaaagggtgccgc

SEQ ID NO: 5330805 - DNA, 25 bp, Homo sapien
gggtgggggatccatgcagggcgcc

SEQ ID NO: 5330806 - DNA, 25 bp, Homo sapien
gggatccatgcagggcgcccggacg

SEQ ID NO: 5330807 - DNA, 25 bp, Homo sapien
tgggggatccatgcagggcgcccgg

SEQ ID NO: 5330808 - DNA, 25 bp, Homo sapien
ggtgggggatccatgcagggcgccc

SEQ ID NO: 5330809 - DNA, 25 bp, Homo sapien
cgctccgcaggcctcgcctcgccgc

SEQ ID NO: 5330810 - DNA, 25 bp, Homo sapien
ccgctccgcaggcctcgcctcgccg

SEQ ID NO: 5330811 - DNA, 25 bp, Homo sapien
tccgcaagggagagtcatgaccatt

SEQ ID NO: 5330812 - DNA, 25 bp, Homo sapien
cttaattggctgcataatcgggcgc

SEQ ID NO: 5330813 - DNA, 25 bp, Homo sapien
tatgatcatcgacaagctggaggaa

SEQ ID NO: 5330814 - DNA, 25 bp, Homo sapien
gatcaaagagatccgcgagagtacg

SEQ ID NO: 5330815 - DNA, 25 bp, Homo sapien
agctgaacgttaaagatacaggtaa

SEQ ID NO: 5330816 - DNA, 25 bp, Homo sapien
taagctgaacgttaaagatacaggt

SEQ ID NO: 5330817 - DNA, 25 bp, Homo sapien
gataataaggaaccaatagtaagct

SEQ ID NO: 5330818 - DNA, 25 bp, Homo sapien
ataaggaaccaatagtaagctgaac

SEQ ID NO: 5330819 - DNA, 25 bp, Homo sapien
ggacttgcatctcagaattcctctc

SEQ ID NO: 5330820 - DNA, 25 bp, Homo sapien
gatgaggcccctatgcagttgctga

SEQ ID NO: 5330821 - DNA, 25 bp, Homo sapien
gcctccagctgttaggccatagcca

SEQ ID NO: 5330822 - DNA, 25 bp, Homo sapien
tagccatagtctgttggactgctgg

SEQ ID NO: 5330823 - DNA, 25 bp, Homo sapien
ctgttgtgtcatagccatagtattt

SEQ ID NO: 5330824 - DNA, 25 bp, Homo sapien
tagccatagtatttgtatcatgtgt

SEQ ID NO: 5330825 - DNA, 25 bp, Homo sapien
tgccccactcaaatatagacacaca

SEQ ID NO: 5330826 - DNA, 25 bp, Homo sapien
ctcccttgccccactcaaatataga

SEQ ID NO: 5330827 - DNA, 25 bp, Homo sapien
tgaatcaccactcttgggttcaccc

SEQ ID NO: 5330828 - DNA, 25 bp, Homo sapien
ttgggttcacccctagagcagctac

SEQ ID NO: 5330829 - DNA, 25 bp, Homo sapien
gtagtttggacagtgaatcaccact

SEQ ID NO: 5330830 - DNA, 25 bp, Homo sapien
tagagcagctacttactccctgtga

SEQ ID NO: 5330831 - DNA, 25 bp, Homo sapien
ccaggcccttgaacatctgttcccc

SEQ ID NO: 5330832 - DNA, 25 bp, Homo sapien
cccaaactgttcagcacagttttcc

SEQ ID NO: 5330833 - DNA, 25 bp, Homo sapien
caaactgttcagcacagttttccag

SEQ ID NO: 5330834 - DNA, 25 bp, Homo sapien
agaaaacccaaactgttcagcacag

SEQ ID NO: 5330835 - DNA, 25 bp, Homo sapien
agtgcaaggcctaacaagtctcctg

SEQ ID NO: 5330836 - DNA, 25 bp, Homo sapien
cagtgcaaggcctaacaagtctcct

SEQ ID NO: 5330837 - DNA, 25 bp, Homo sapien
aggcctaacaagtctcctgccacta

SEQ ID NO: 5330838 - DNA, 25 bp, Homo sapien
gcaaggcctaacaagtctcctgcca

SEQ ID NO: 5330839 - DNA, 25 bp, Homo sapien
ccccaaagtcattctgtgtgggcat

SEQ ID NO: 5330840 - DNA, 25 bp, Homo sapien
ccatacaaaataactggcagtcccc

SEQ ID NO: 5330841 - DNA, 25 bp, Homo sapien
ataactggcagtccccccaaagtca

SEQ ID NO: 5330842 - DNA, 25 bp, Homo sapien
tcagccttccatacaaaataactgg

SEQ ID NO: 5330843 - DNA, 25 bp, Homo sapien
tctgatcctggctgtgctcttcttc

SEQ ID NO: 5330844 - DNA, 25 bp, Homo sapien
ctgtgggacatcattgtttcttcac

SEQ ID NO: 5330845 - DNA, 25 bp, Homo sapien
tttgagcatcaacattctgcaagga

SEQ ID NO: 5330846 - DNA, 25 bp, Homo sapien
tcctgttctttgagcatcaacattc

SEQ ID NO: 5330847 - DNA, 25 bp, Homo sapien
aacaagactgtccttaagaagcgct

SEQ ID NO: 5330848 - DNA, 25 bp, Homo sapien
ttcaaaaacaagactgtccttaaga

SEQ ID NO: 5330849 - DNA, 25 bp, Homo sapien
actgtccttaagaagcgctgcaagg

SEQ ID NO: 5330850 - DNA, 25 bp, Homo sapien
taagaagcgctgcaaggactgttac

SEQ ID NO: 5330851 - DNA, 25 bp, Homo sapien
tccagagtcacgcacatactcgtca

SEQ ID NO: 5330852 - DNA, 25 bp, Homo sapien
ccatccgaggcacaagcagagacag

SEQ ID NO: 5330853 - DNA, 25 bp, Homo sapien
gggtcagtggtacgtctactgtaaa

SEQ ID NO: 5330854 - DNA, 25 bp, Homo sapien
actgtaaaacccatccgaggcacaa

SEQ ID NO: 5330855 - DNA, 25 bp, Homo sapien
cgcgtctcttgggagaatggttgta

SEQ ID NO: 5330856 - DNA, 25 bp, Homo sapien
gcgtctcttgggagaatggttgtat

SEQ ID NO: 5330857 - DNA, 25 bp, Homo sapien
caaccaccagtgacagctcattttt

SEQ ID NO: 5330858 - DNA, 25 bp, Homo sapien
ttctctctggagccccttgcacttc

SEQ ID NO: 5330859 - DNA, 25 bp, Homo sapien
cccaaccaccagtgacagctcattt

SEQ ID NO: 5330860 - DNA, 25 bp, Homo sapien
caccagtgacagctcatttttgtcc

SEQ ID NO: 5330861 - DNA, 25 bp, Homo sapien
tgacaataacataggacagcagccg

SEQ ID NO: 5330862 - DNA, 25 bp, Homo sapien
ggacagagttctcagatccaagtag

SEQ ID NO: 5330863 - DNA, 25 bp, Homo sapien
gggactgacattcatcgcggcagtt

SEQ ID NO: 5330864 - DNA, 25 bp, Homo sapien
cccatctgggaaagcaggcacggat

SEQ ID NO: 5330865 - DNA, 25 bp, Homo sapien
tatagtctctccgttctttgttaaa

SEQ ID NO: 5330866 - DNA, 25 bp, Homo sapien
tcacgcggctaggatgacgcccgtg

SEQ ID NO: 5330867 - DNA, 25 bp, Homo sapien
taaataaagacggtgagacacggac

SEQ ID NO: 5330868 - DNA, 25 bp, Homo sapien
tctgctcagggtcatttatagtctc

SEQ ID NO: 5330869 - DNA, 25 bp, Homo sapien
ttttccagtgagttgcacagggcag

SEQ ID NO: 5330870 - DNA, 25 bp, Homo sapien
ttagacatctttggagggcagtctg

SEQ ID NO: 5330871 - DNA, 25 bp, Homo sapien
aggacaccctggcagctctaaggat

SEQ ID NO: 5330872 - DNA, 25 bp, Homo sapien
agctctaaggatggcttcagcacag

SEQ ID NO: 5330873 - DNA, 25 bp, Homo sapien
aattcactgggcacacggagcagag

SEQ ID NO: 5330874 - DNA, 25 bp, Homo sapien
cttcccttgagcgttgttcaattca

SEQ ID NO: 5330875 - DNA, 25 bp, Homo sapien
tgggccagaacatgtcttcccttga

SEQ ID NO: 5330876 - DNA, 25 bp, Homo sapien
atatactccccagagaatgctgggc

SEQ ID NO: 5330877 - DNA, 25 bp, Homo sapien
caattctgatcaggtcccaggctca

SEQ ID NO: 5330878 - DNA, 25 bp, Homo sapien
aagggcgccccaaggtaatgtgtgc

SEQ ID NO: 5330879 - DNA, 25 bp, Homo sapien
aactaatcagttcagggatgggccc

SEQ ID NO: 5330880 - DNA, 25 bp, Homo sapien
aactaagtgtgcgaagcggatcccg

SEQ ID NO: 5330881 - DNA, 25 bp, Homo sapien
ccggtgacgtcaccaccctccggcg

SEQ ID NO: 5330882 - DNA, 25 bp, Homo sapien
ggtgacgtcaccaccctccggcgct

SEQ ID NO: 5330883 - DNA, 25 bp, Homo sapien
gtgacgtcaccaccctccggcgctc

SEQ ID NO: 5330884 - DNA, 25 bp, Homo sapien
cggtgacgtcaccaccctccggcgc

SEQ ID NO: 5330885 - DNA, 25 bp, Homo sapien
gaaggtggtgacgtgtcccgtgcgc

SEQ ID NO: 5330886 - DNA, 25 bp, Homo sapien
attggcaactgagcgtcctgcggcg

SEQ ID NO: 5330887 - DNA, 25 bp, Homo sapien
tctccagaaaagacgcgaaggtggt

SEQ ID NO: 5330888 - DNA, 25 bp, Homo sapien
attcccgcgctctccagaaaagacg

SEQ ID NO: 5330889 - DNA, 25 bp, Homo sapien
ggagccagaattcctactaggggag

SEQ ID NO: 5330890 - DNA, 25 bp, Homo sapien
aaatgtctccccctctgttaggcca

SEQ ID NO: 5330891 - DNA, 25 bp, Homo sapien
cttttggatcagagagtggagcagt

SEQ ID NO: 5330892 - DNA, 25 bp, Homo sapien
gaggggttctgccttttggatcaga

SEQ ID NO: 5330893 - DNA, 25 bp, Homo sapien
ctagctccacaggtcccgaggccca

SEQ ID NO: 5330894 - DNA, 25 bp, Homo sapien
agtgtggttgtctagctctgcttta

SEQ ID NO: 5330895 - DNA, 25 bp, Homo sapien
cctagctccacaggtcccgaggccc

SEQ ID NO: 5330896 - DNA, 25 bp, Homo sapien
gctctgctttagtgtccacaagcca

SEQ ID NO: 5330897 - DNA, 25 bp, Homo sapien
gcagtttaccaaggaacagggccat

SEQ ID NO: 5330898 - DNA, 25 bp, Homo sapien
taacattctgccctaaccagggtgt

SEQ ID NO: 5330899 - DNA, 25 bp, Homo sapien
taaagagcgtggctggaactctgcc

SEQ ID NO: 5330900 - DNA, 25 bp, Homo sapien
gaaataaacgctaaagatgagtccg

SEQ ID NO: 5330901 - DNA, 25 bp, Homo sapien
cactcgatgatgaaaggtgttggct

SEQ ID NO: 5330902 - DNA, 25 bp, Homo sapien
cattccggtggtggccatactcaaa

SEQ ID NO: 5330903 - DNA, 25 bp, Homo sapien
tactcaaacttgatccgcagctcgc

SEQ ID NO: 5330904 - DNA, 25 bp, Homo sapien
aaggatatctgggatccactcgatg

SEQ ID NO: 5330905 - DNA, 25 bp, Homo sapien
ctgaattcttgatgactgcaaaggg

SEQ ID NO: 5330906 - DNA, 25 bp, Homo sapien
acttggaggagagtaggtgcattta

SEQ ID NO: 5330907 - DNA, 25 bp, Homo sapien
ttgatgactgcaaaggggacttgga

SEQ ID NO: 5330908 - DNA, 25 bp, Homo sapien
ggagagtaggtgcatttaaggtgaa

SEQ ID NO: 5330909 - DNA, 25 bp, Homo sapien
gctcataagtcccatctcggttctg

SEQ ID NO: 5330910 - DNA, 25 bp, Homo sapien
tgctttctacttccactttagggca

SEQ ID NO: 5330911 - DNA, 25 bp, Homo sapien
tttttagttccaagggtcgcagcac

SEQ ID NO: 5330912 - DNA, 25 bp, Homo sapien
tacgaccgtaggtttctgctatgct

SEQ ID NO: 5330913 - DNA, 25 bp, Homo sapien
gcaaaatgcagttaatgccagggca

SEQ ID NO: 5330914 - DNA, 25 bp, Homo sapien
ttcctttgttcatagcacctgcagc

SEQ ID NO: 5330915 - DNA, 25 bp, Homo sapien
tgcctgacagtgagaagctccatga

SEQ ID NO: 5330916 - DNA, 25 bp, Homo sapien
catactgtccttgggactgagccaa

SEQ ID NO: 5330917 - DNA, 25 bp, Homo sapien
aatgccaacacagcccttttctagg

SEQ ID NO: 5330918 - DNA, 25 bp, Homo sapien
ggagttcctcaagtgtttttaatgc

SEQ ID NO: 5330919 - DNA, 25 bp, Homo sapien
taatgccaacacagcccttttctag

SEQ ID NO: 5330920 - DNA, 25 bp, Homo sapien
taagaggcaaggtcgctaggagtgg

SEQ ID NO: 5330921 - DNA, 25 bp, Homo sapien
gatctacttgaaaaacatacataca

SEQ ID NO: 5330922 - DNA, 25 bp, Homo sapien
ttctacataattctattactgtagg

SEQ ID NO: 5330923 - DNA, 25 bp, Homo sapien
aaactccatctcagattttcaggat

SEQ ID NO: 5330924 - DNA, 25 bp, Homo sapien
gattttcaggatctacttgaaaaac

SEQ ID NO: 5330925 - DNA, 25 bp, Homo sapien
gctggaagaggcagattacacctgt

SEQ ID NO: 5330926 - DNA, 25 bp, Homo sapien
ggaagaggcagattacacctgtaat

SEQ ID NO: 5330927 - DNA, 25 bp, Homo sapien
aaaacataaaatgtctagtgtggct

SEQ ID NO: 5330928 - DNA, 25 bp, Homo sapien
cataaaatgtctagtgtggctggaa

SEQ ID NO: 5330929 - DNA, 25 bp, Homo sapien
aggatattagtgatatgccaagtat

SEQ ID NO: 5330930 - DNA, 25 bp, Homo sapien
gtggcaaggcatctttccgaacaaa

SEQ ID NO: 5330931 - DNA, 25 bp, Homo sapien
ggcaaggcatctttccgaacaaaag

SEQ ID NO: 5330932 - DNA, 25 bp, Homo sapien
gatattagtgatatgccaagtatac

SEQ ID NO: 5330933 - DNA, 25 bp, Homo sapien
catgtgagtagaagtcctaactctg

SEQ ID NO: 5330934 - DNA, 25 bp, Homo sapien
ggttttggtgacaaatcagttgatg

SEQ ID NO: 5330935 - DNA, 25 bp, Homo sapien
aattgatatgctgatcattgaaggc

SEQ ID NO: 5330936 - DNA, 25 bp, Homo sapien
tccttatagattctcagcactttta

SEQ ID NO: 5330937 - DNA, 25 bp, Homo sapien
cataattctctatgttcgagacatc

SEQ ID NO: 5330938 - DNA, 25 bp, Homo sapien
ttctctatgttcgagacatccatca

SEQ ID NO: 5330939 - DNA, 25 bp, Homo sapien
tgttcgagacatccatcactatacc

SEQ ID NO: 5330940 - DNA, 25 bp, Homo sapien
gagacatccatcactataccaaagg

SEQ ID NO: 5330941 - DNA, 25 bp, Homo sapien
ttctttgttgcagggcatcaaaaaa

SEQ ID NO: 5330942 - DNA, 25 bp, Homo sapien
agggcatcaaaaaatgactgaggaa

SEQ ID NO: 5330943 - DNA, 25 bp, Homo sapien
ttgcacttcctatagatattctttg

SEQ ID NO: 5330944 - DNA, 25 bp, Homo sapien
gaggaatgtggaacaccaatggttc

SEQ ID NO: 5330945 - DNA, 25 bp, Homo sapien
tattatttgctatgttttttctctt

SEQ ID NO: 5330946 - DNA, 25 bp, Homo sapien
attatttgctatgttttttctcttc

SEQ ID NO: 5330947 - DNA, 25 bp, Homo sapien
ctcttctgtctctaaattataataa

SEQ ID NO: 5330948 - DNA, 25 bp, Homo sapien
tttctcttctgtctctaaattataa

SEQ ID NO: 5330949 - DNA, 25 bp, Homo sapien
tgcatggtttgatggatgcgttctg

SEQ ID NO: 5330950 - DNA, 25 bp, Homo sapien
tggatgcgttctgtgacactggcca

SEQ ID NO: 5330951 - DNA, 25 bp, Homo sapien
gcctcatctaacagctgaccacagg

SEQ ID NO: 5330952 - DNA, 25 bp, Homo sapien
tggccagccagtcttggaaggataa

SEQ ID NO: 5330953 - DNA, 25 bp, Homo sapien
tcttgaggcagtagtgaactgttca

SEQ ID NO: 5330954 - DNA, 25 bp, Homo sapien
tactgctcactgcatcttgaggcag

SEQ ID NO: 5330955 - DNA, 25 bp, Homo sapien
ctttttaacgaggaagcaaccacag

SEQ ID NO: 5330956 - DNA, 25 bp, Homo sapien
aggccacttttccttagattactgc

SEQ ID NO: 5330957 - DNA, 25 bp, Homo sapien
ggcagtagactcacaagcagatact

SEQ ID NO: 5330958 - DNA, 25 bp, Homo sapien
cagatactgttgattctgaatggca

SEQ ID NO: 5330959 - DNA, 25 bp, Homo sapien
cctcttctttgacttagaggcagta

SEQ ID NO: 5330960 - DNA, 25 bp, Homo sapien
tggcaacctaactggggtacaataa

SEQ ID NO: 5330961 - DNA, 25 bp, Homo sapien
gctcagctgagtgatgatcgtccca

SEQ ID NO: 5330962 - DNA, 25 bp, Homo sapien
acaaagcatcggtaatcagggcccc

SEQ ID NO: 5330963 - DNA, 25 bp, Homo sapien
caccgtagcggaatatggttccaca

SEQ ID NO: 5330964 - DNA, 25 bp, Homo sapien
aacactaggctgcttgcgtgcaccg

SEQ ID NO: 5330965 - DNA, 25 bp, Homo sapien
gactaatgataactgcttaacccaa

SEQ ID NO: 5330966 - DNA, 25 bp, Homo sapien
caatgttccgcaaataagattccca

SEQ ID NO: 5330967 - DNA, 25 bp, Homo sapien
gaaaacacgatcatttgcagactaa

SEQ ID NO: 5330968 - DNA, 25 bp, Homo sapien
taccagctgccaaggcatctggaaa

SEQ ID NO: 5330969 - DNA, 25 bp, Homo sapien
acacaacttgtaaagaacgtggatt

SEQ ID NO: 5330970 - DNA, 25 bp, Homo sapien
caacttgtaaagaacgtggatttga

SEQ ID NO: 5330971 - DNA, 25 bp, Homo sapien
tagagactctatatcgaaagcatat

SEQ ID NO: 5330972 - DNA, 25 bp, Homo sapien
gcatatacaaacaattaacacaact

SEQ ID NO: 5330973 - DNA, 25 bp, Homo sapien
tgtactgcccacacgatcctgtgag

SEQ ID NO: 5330974 - DNA, 25 bp, Homo sapien
taaaactagctgagtacactgcgtg

SEQ ID NO: 5330975 - DNA, 25 bp, Homo sapien
gatttgacggaagcgtcacagccag

SEQ ID NO: 5330976 - DNA, 25 bp, Homo sapien
tgttggaagcgttaacccgcgatgg

SEQ ID NO: 5330977 - DNA, 25 bp, Homo sapien
tgcagtcaacggagcggccgcccga

SEQ ID NO: 5330978 - DNA, 25 bp, Homo sapien
ggaggatggagcacatcagccctca

SEQ ID NO: 5330979 - DNA, 25 bp, Homo sapien
ctcggaacagcggaggaagaccgcc

SEQ ID NO: 5330980 - DNA, 25 bp, Homo sapien
tggcttgccaaaccacaagtgggag

SEQ ID NO: 5330981 - DNA, 25 bp, Homo sapien
cccgcgcgagcgctcacttccggtc

SEQ ID NO: 5330982 - DNA, 25 bp, Homo sapien
cttccgggatgggtctgcagcgaca

SEQ ID NO: 5330983 - DNA, 25 bp, Homo sapien
gatgggtctgcagcgacacacacat

SEQ ID NO: 5330984 - DNA, 25 bp, Homo sapien
ggtctgcagcgacacacacatatcc

SEQ ID NO: 5330985 - DNA, 25 bp, Homo sapien
ggcccttagctgacgaccgccctca

SEQ ID NO: 5330986 - DNA, 25 bp, Homo sapien
gagccccggggcccttagctgacga

SEQ ID NO: 5330987 - DNA, 25 bp, Homo sapien
ccgcgagccccggggcccttagctg

SEQ ID NO: 5330988 - DNA, 25 bp, Homo sapien
gggcccttagctgacgaccgccctc

SEQ ID NO: 5330989 - DNA, 25 bp, Homo sapien
ctcttctctcttcgcctgccgcggc

SEQ ID NO: 5330990 - DNA, 25 bp, Homo sapien
caaacggggccaaactgttcgctgt

SEQ ID NO: 5330991 - DNA, 25 bp, Homo sapien
aaactgttcgctgtaacgacaatcg

SEQ ID NO: 5330992 - DNA, 25 bp, Homo sapien
gtaacgacaatcgttattggtcaga

SEQ ID NO: 5330993 - DNA, 25 bp, Homo sapien
tatggaaagtgcatgcccagtccct

SEQ ID NO: 5330994 - DNA, 25 bp, Homo sapien
tgataccgaggaggaagaacccctg

SEQ ID NO: 5330995 - DNA, 25 bp, Homo sapien
cagtcaagagtaggccaaggtaaac

SEQ ID NO: 5330996 - DNA, 25 bp, Homo sapien
taaacatctggtgcagcgtgacaca

SEQ ID NO: 5330997 - DNA, 25 bp, Homo sapien
tcaggaccactgtacagcacttagt

SEQ ID NO: 5330998 - DNA, 25 bp, Homo sapien
taattcaactgtaacctcaggacca

SEQ ID NO: 5330999 - DNA, 25 bp, Homo sapien
catcactctcatttgaaaggtttgc

SEQ ID NO: 5331000 - DNA, 25 bp, Homo sapien
ggaagatgtacaagcacagggacaa

SEQ ID NO: 5331001 - DNA, 25 bp, Homo sapien
ctcacacacaataatcactgcaaga

SEQ ID NO: 5331002 - DNA, 25 bp, Homo sapien
acaatatggatagaccaaaaagaaa

SEQ ID NO: 5331003 - DNA, 25 bp, Homo sapien
aaaaaatacctgagtgaatataaca

SEQ ID NO: 5331004 - DNA, 25 bp, Homo sapien
cacacacaataatcactgcaagaag

SEQ ID NO: 5331005 - DNA, 25 bp, Homo sapien
acttcaggttctttacagtaccaga

SEQ ID NO: 5331006 - DNA, 25 bp, Homo sapien
taaagaatactggattaatcaccca

SEQ ID NO: 5331007 - DNA, 25 bp, Homo sapien
tttgtgcaataagccaatatgctgg

SEQ ID NO: 5331008 - DNA, 25 bp, Homo sapien
gcccaaataatttaccctgcagtcc

SEQ ID NO: 5331009 - DNA, 25 bp, Homo sapien
gaacaatgagggtcctaaagtagaa

SEQ ID NO: 5331010 - DNA, 25 bp, Homo sapien
agagaacaatgagggtcctaaagta

SEQ ID NO: 5331011 - DNA, 25 bp, Homo sapien
ataagagaacaatgagggtcctaaa

SEQ ID NO: 5331012 - DNA, 25 bp, Homo sapien
caatgagggtcctaaagtagaaaca

SEQ ID NO: 5331013 - DNA, 25 bp, Homo sapien
tttaagctgcttttggttgcatgcc

SEQ ID NO: 5331014 - DNA, 25 bp, Homo sapien
ggttgcatgccctgatctgtagaag

SEQ ID NO: 5331015 - DNA, 25 bp, Homo sapien
gcttttggttgcatgccctgatctg

SEQ ID NO: 5331016 - DNA, 25 bp, Homo sapien
cctgatctgtagaagttaacaagga

SEQ ID NO: 5331017 - DNA, 25 bp, Homo sapien
taagggtattggcttagagaccagc

SEQ ID NO: 5331018 - DNA, 25 bp, Homo sapien
tctaggtaaaatgcagggagctccc

SEQ ID NO: 5331019 - DNA, 25 bp, Homo sapien
gaaatgcaggccaggaaacttaaga

SEQ ID NO: 5331020 - DNA, 25 bp, Homo sapien
cacaactgcatagaattgagctcca

SEQ ID NO: 5331021 - DNA, 25 bp, Homo sapien
gaactgcacactacttcagtggaaa

SEQ ID NO: 5331022 - DNA, 25 bp, Homo sapien
gacaaacaacttctagactctgcac

SEQ ID NO: 5331023 - DNA, 25 bp, Homo sapien
caaggatctgagaaactttatcaaa

SEQ ID NO: 5331024 - DNA, 25 bp, Homo sapien
agtggcagcaatccctgcatttgtg

SEQ ID NO: 5331025 - DNA, 25 bp, Homo sapien
ggctttactacactccctgtagcct

SEQ ID NO: 5331026 - DNA, 25 bp, Homo sapien
gtagcctcaagccactggctttaga

SEQ ID NO: 5331027 - DNA, 25 bp, Homo sapien
caacggctttactacactccctgta

SEQ ID NO: 5331028 - DNA, 25 bp, Homo sapien
acatttgcactgactgatttgataa

SEQ ID NO: 5331029 - DNA, 25 bp, Homo sapien
tgccactcgatacccagaaggctga

SEQ ID NO: 5331030 - DNA, 25 bp, Homo sapien
acatgctgccattttgcccttgagg

SEQ ID NO: 5331031 - DNA, 25 bp, Homo sapien
ggcggttgcactccataatttggtc

SEQ ID NO: 5331032 - DNA, 25 bp, Homo sapien
agaaggctgattgggcaacatgctg

SEQ ID NO: 5331033 - DNA, 25 bp, Homo sapien
taaatccttgctggttccatgcctg

SEQ ID NO: 5331034 - DNA, 25 bp, Homo sapien
caaccattaggcatatactggccaa

SEQ ID NO: 5331035 - DNA, 25 bp, Homo sapien
tatgcaggaacttgccaaccattag

SEQ ID NO: 5331036 - DNA, 25 bp, Homo sapien
tgttgtgcatttccataccactggc

SEQ ID NO: 5331037 - DNA, 25 bp, Homo sapien
taactctacgtgatactctgaatgg

SEQ ID NO: 5331038 - DNA, 25 bp, Homo sapien
gtttgaaccactaaagctgcctgga

SEQ ID NO: 5331039 - DNA, 25 bp, Homo sapien
gagcatgagtcaattgaggcggtca

SEQ ID NO: 5331040 - DNA, 25 bp, Homo sapien
tgcaatccatgaaacaccattctgg

SEQ ID NO: 5331041 - DNA, 25 bp, Homo sapien
caatggtagtaccattaacagaaac

SEQ ID NO: 5331042 - DNA, 25 bp, Homo sapien
tagcatttcacaacatgaccttcaa

SEQ ID NO: 5331043 - DNA, 25 bp, Homo sapien
caagagtttctttgccccaatagca

SEQ ID NO: 5331044 - DNA, 25 bp, Homo sapien
gttgcacgggatttatcatatcaag

SEQ ID NO: 5331045 - DNA, 25 bp, Homo sapien
ctggttttccagttacattaccaag

SEQ ID NO: 5331046 - DNA, 25 bp, Homo sapien
tggttttccagttacattaccaaga

SEQ ID NO: 5331047 - DNA, 25 bp, Homo sapien
tctggttttccagttacattaccaa

SEQ ID NO: 5331048 - DNA, 25 bp, Homo sapien
caaatggtgaaaaagtctgacgcat

SEQ ID NO: 5331049 - DNA, 25 bp, Homo sapien
gaaaaagtctgacgcattagttgtt

SEQ ID NO: 5331050 - DNA, 25 bp, Homo sapien
atgaatatcctttatctggaaagac

SEQ ID NO: 5331051 - DNA, 25 bp, Homo sapien
cgaacaaatgaatatcctttatctg

SEQ ID NO: 5331052 - DNA, 25 bp, Homo sapien
tacagtacagttgcttggactagac

SEQ ID NO: 5331053 - DNA, 25 bp, Homo sapien
cctcatcatatgatagctgtttggt

SEQ ID NO: 5331054 - DNA, 25 bp, Homo sapien
tggactagactgatttacaacctca

SEQ ID NO: 5331055 - DNA, 25 bp, Homo sapien
tgttagcccagaagtaacacctcca

SEQ ID NO: 5331056 - DNA, 25 bp, Homo sapien
taaaggtaacattaaccttgatcaa

SEQ ID NO: 5331057 - DNA, 25 bp, Homo sapien
tatttaataggagacttgacattag

SEQ ID NO: 5331058 - DNA, 25 bp, Homo sapien
tacttcagttcagaattaaacctcc

SEQ ID NO: 5331059 - DNA, 25 bp, Homo sapien
aagagaaaagtagcattcactacac

SEQ ID NO: 5331060 - DNA, 25 bp, Homo sapien
tttttgaatagtagtcttgatttgc

SEQ ID NO: 5331061 - DNA, 25 bp, Homo sapien
tttctgcaataagtctccgggaaca

SEQ ID NO: 5331062 - DNA, 25 bp, Homo sapien
tcatctatttctgcaataagtctcc

SEQ ID NO: 5331063 - DNA, 25 bp, Homo sapien
aatagtagtcttgatttgcttctca

SEQ ID NO: 5331064 - DNA, 25 bp, Homo sapien
ttaaaatctagcgtatttttctcca

SEQ ID NO: 5331065 - DNA, 25 bp, Homo sapien
attccacatttccttttcttctcca

SEQ ID NO: 5331066 - DNA, 25 bp, Homo sapien
catttccttttcttctccaatacac

SEQ ID NO: 5331067 - DNA, 25 bp, Homo sapien
cacatttccttttcttctccaatac

SEQ ID NO: 5331068 - DNA, 25 bp, Homo sapien
ttcgggttgcccagttagttctgat

SEQ ID NO: 5331069 - DNA, 25 bp, Homo sapien
cactggccacccatctgttgaatgg

SEQ ID NO: 5331070 - DNA, 25 bp, Homo sapien
catctgttgaatggcgttttcagca

SEQ ID NO: 5331071 - DNA, 25 bp, Homo sapien
gtactctttggagcgggaggctttc

SEQ ID NO: 5331072 - DNA, 25 bp, Homo sapien
tcactattagttgatgttaaacaac

SEQ ID NO: 5331073 - DNA, 25 bp, Homo sapien
aaagaagtcactattagttgatgtt

SEQ ID NO: 5331074 - DNA, 25 bp, Homo sapien
ctgttccgtacaacattagaaacaa

SEQ ID NO: 5331075 - DNA, 25 bp, Homo sapien
cattagaaacaataaagaagtcact

SEQ ID NO: 5331076 - DNA, 25 bp, Homo sapien
tcatctgaaaaggtcgtgagcccga

SEQ ID NO: 5331077 - DNA, 25 bp, Homo sapien
gtgagcccgacagccctaatgaggt

SEQ ID NO: 5331078 - DNA, 25 bp, Homo sapien
tatgggcacaaggatctactacaga

SEQ ID NO: 5331079 - DNA, 25 bp, Homo sapien
catgcggttaagagctagggacaca

SEQ ID NO: 5331080 - DNA, 25 bp, Homo sapien
cagtccgaactccatgagacgctta

SEQ ID NO: 5331081 - DNA, 25 bp, Homo sapien
gatatgaagtcctataccctggtat

SEQ ID NO: 5331082 - DNA, 25 bp, Homo sapien
tgtgatggaaagatcacctaagcct

SEQ ID NO: 5331083 - DNA, 25 bp, Homo sapien
tgtgtccctcaaaacgatatgaagt

SEQ ID NO: 5331084 - DNA, 25 bp, Homo sapien
ataaaactactcactcaaaaaagtg

SEQ ID NO: 5331085 - DNA, 25 bp, Homo sapien
gtttatgatactttgatacagctcc

SEQ ID NO: 5331086 - DNA, 25 bp, Homo sapien
tttatgatactttgatacagctcct

SEQ ID NO: 5331087 - DNA, 25 bp, Homo sapien
agtagagaaggaatagagtgatgac

SEQ ID NO: 5331088 - DNA, 25 bp, Homo sapien
cctaggttgatgagaatgatccagt

SEQ ID NO: 5331089 - DNA, 25 bp, Homo sapien
aagagagatcctaggttgatgagaa

SEQ ID NO: 5331090 - DNA, 25 bp, Homo sapien
gagtgatgacacagaatagcagtaa

SEQ ID NO: 5331091 - DNA, 25 bp, Homo sapien
catgtagaacataggaagagaggct

SEQ ID NO: 5331092 - DNA, 25 bp, Homo sapien
ggcagcataggctcaaagtccttga

SEQ ID NO: 5331093 - DNA, 25 bp, Homo sapien
tgtagcactgcgtaacagagccaag

SEQ ID NO: 5331094 - DNA, 25 bp, Homo sapien
tgtgcccggccacactgtatacttg

SEQ ID NO: 5331095 - DNA, 25 bp, Homo sapien
cggagtgtttccattctttactctt

SEQ ID NO: 5331096 - DNA, 25 bp, Homo sapien
ttaagcattatccatgcacttctca

SEQ ID NO: 5331097 - DNA, 25 bp, Homo sapien
gcattatccatgcacttctcactga

SEQ ID NO: 5331098 - DNA, 25 bp, Homo sapien
acggagtgtttccattctttactct

SEQ ID NO: 5331099 - DNA, 25 bp, Homo sapien
gccatgtcttttaccactcgggcat

SEQ ID NO: 5331100 - DNA, 25 bp, Homo sapien
catgtcttttaccactcgggcatct

SEQ ID NO: 5331101 - DNA, 25 bp, Homo sapien
gttgccatgtcttttaccactcggg

SEQ ID NO: 5331102 - DNA, 25 bp, Homo sapien
tgccatgtcttttaccactcgggca

SEQ ID NO: 5331103 - DNA, 25 bp, Homo sapien
tcagaagtttaggtttgcaaactat

SEQ ID NO: 5331104 - DNA, 25 bp, Homo sapien
cagaagtttaggtttgcaaactatc

SEQ ID NO: 5331105 - DNA, 25 bp, Homo sapien
aaatattaagcatggtgaaagcagc

SEQ ID NO: 5331106 - DNA, 25 bp, Homo sapien
tgaacctttaatgcaaattcacctt

SEQ ID NO: 5331107 - DNA, 25 bp, Homo sapien
gaaaaatactagacacacacaagtt

SEQ ID NO: 5331108 - DNA, 25 bp, Homo sapien
gcagctactcacatgaactacttaa

SEQ ID NO: 5331109 - DNA, 25 bp, Homo sapien
accgtagcttgtagttagccagggc

SEQ ID NO: 5331110 - DNA, 25 bp, Homo sapien
atccactgtgaaccgtagcttgtag

SEQ ID NO: 5331111 - DNA, 25 bp, Homo sapien
tgtgaaccgtagcttgtagttagcc

SEQ ID NO: 5331112 - DNA, 25 bp, Homo sapien
cactgtgaaccgtagcttgtagtta

SEQ ID NO: 5331113 - DNA, 25 bp, Homo sapien
tagagatttagagcccttgagaggc

SEQ ID NO: 5331114 - DNA, 25 bp, Homo sapien
taagtccagatattcgaaagcaagc

SEQ ID NO: 5331115 - DNA, 25 bp, Homo sapien
gagattgagtaaaaacccagccatg

SEQ ID NO: 5331116 - DNA, 25 bp, Homo sapien
gaggccaaaggctaagactgtctaa

SEQ ID NO: 5331117 - DNA, 25 bp, Homo sapien
cagttgtaatttctgggctgagatc

SEQ ID NO: 5331118 - DNA, 25 bp, Homo sapien
agttgtaatttctgggctgagatca

SEQ ID NO: 5331119 - DNA, 25 bp, Homo sapien
tcagttgtaatttctgggctgagat

SEQ ID NO: 5331120 - DNA, 25 bp, Homo sapien
gactagatttgcctcagttaacaca

SEQ ID NO: 5331121 - DNA, 25 bp, Homo sapien
cacaatttactgaagctagctacat

SEQ ID NO: 5331122 - DNA, 25 bp, Homo sapien
tagtggtactgtgaattatgtagac

SEQ ID NO: 5331123 - DNA, 25 bp, Homo sapien
aattctcctgaaacgactgtgatac

SEQ ID NO: 5331124 - DNA, 25 bp, Homo sapien
gaatccatgtgcaagtgaactaaga

SEQ ID NO: 5331125 - DNA, 25 bp, Homo sapien
tggttgcccagacattacaccattc

SEQ ID NO: 5331126 - DNA, 25 bp, Homo sapien
gcattgcaacagtttgatgttaaag

SEQ ID NO: 5331127 - DNA, 25 bp, Homo sapien
gttttggttgcccagacattacacc

SEQ ID NO: 5331128 - DNA, 25 bp, Homo sapien
ttgaactagcaccaaagtagcggac

SEQ ID NO: 5331129 - DNA, 25 bp, Homo sapien
tatacttggtcaacactgagaaggg

SEQ ID NO: 5331130 - DNA, 25 bp, Homo sapien
aaagtagttctaaggcatcagctgc

SEQ ID NO: 5331131 - DNA, 25 bp, Homo sapien
catcagctgctaccaaacgggtcag

SEQ ID NO: 5331132 - DNA, 25 bp, Homo sapien
tgaacgctgtgtgctgacaacggta

SEQ ID NO: 5331133 - DNA, 25 bp, Homo sapien
cgctgtgtgctgacaacggtactac

SEQ ID NO: 5331134 - DNA, 25 bp, Homo sapien
tgtgaacgctgtgtgctgacaacgg

SEQ ID NO: 5331135 - DNA, 25 bp, Homo sapien
aacgctgtgtgctgacaacggtact

SEQ ID NO: 5331136 - DNA, 25 bp, Homo sapien
tcaatcatatcttaggataacgatc

SEQ ID NO: 5331137 - DNA, 25 bp, Homo sapien
ctgatgacaaagattagatttgttc

SEQ ID NO: 5331138 - DNA, 25 bp, Homo sapien
aaacacattcaatcatatcttagga

SEQ ID NO: 5331139 - DNA, 25 bp, Homo sapien
ggataacgatcaaaacattactgca

SEQ ID NO: 5331140 - DNA, 25 bp, Homo sapien
tgactgctaggggttgttgcccaat

SEQ ID NO: 5331141 - DNA, 25 bp, Homo sapien
ttcttttgactgctaggggttgttg

SEQ ID NO: 5331142 - DNA, 25 bp, Homo sapien
tgctaggggttgttgcccaattcac

SEQ ID NO: 5331143 - DNA, 25 bp, Homo sapien
ggttgttgcccaattcactttgact

SEQ ID NO: 5331144 - DNA, 25 bp, Homo sapien
cactgaaggagataccagctctggt

SEQ ID NO: 5331145 - DNA, 25 bp, Homo sapien
taatcttctgacctacatttaggca

SEQ ID NO: 5331146 - DNA, 25 bp, Homo sapien
gaaaatactaacataggctgctggc

SEQ ID NO: 5331147 - DNA, 25 bp, Homo sapien
catccaagcttgagtaattcagcaa

SEQ ID NO: 5331148 - DNA, 25 bp, Homo sapien
ttacccattatcttccgtccattca

SEQ ID NO: 5331149 - DNA, 25 bp, Homo sapien
gctgcatgacgatgctcatgaaact

SEQ ID NO: 5331150 - DNA, 25 bp, Homo sapien
gctgcagctgcatgacgatgctcat

SEQ ID NO: 5331151 - DNA, 25 bp, Homo sapien
tatcttccgtccattcatagcagct

SEQ ID NO: 5331152 - DNA, 25 bp, Homo sapien
tttgcagtttttacaaggtccaatc

SEQ ID NO: 5331153 - DNA, 25 bp, Homo sapien
gagttgcagaattagagcttctgtc

SEQ ID NO: 5331154 - DNA, 25 bp, Homo sapien
gtccaatctggctaaagagttgcag

SEQ ID NO: 5331155 - DNA, 25 bp, Homo sapien
agaattagagcttctgtcacatctc

SEQ ID NO: 5331156 - DNA, 25 bp, Homo sapien
ttcactaggtaaaccagcttgaaca

SEQ ID NO: 5331157 - DNA, 25 bp, Homo sapien
tagttgggacctccttcactaggta

SEQ ID NO: 5331158 - DNA, 25 bp, Homo sapien
aaccagcttgaacaaatgtattcaa

SEQ ID NO: 5331159 - DNA, 25 bp, Homo sapien
cctccttcactaggtaaaccagctt

SEQ ID NO: 5331160 - DNA, 25 bp, Homo sapien
ttaagtggtcagatacttctgcagt

SEQ ID NO: 5331161 - DNA, 25 bp, Homo sapien
aagttaagtggtcagatacttctgc

SEQ ID NO: 5331162 - DNA, 25 bp, Homo sapien
gttaagtggtcagatacttctgcag

SEQ ID NO: 5331163 - DNA, 25 bp, Homo sapien
aaaagttaagtggtcagatacttct

SEQ ID NO: 5331164 - DNA, 25 bp, Homo sapien
tgagtacaagcaccctcgaggagga

SEQ ID NO: 5331165 - DNA, 25 bp, Homo sapien
cataggacaaaaggaaggttcgacg

SEQ ID NO: 5331166 - DNA, 25 bp, Homo sapien
gattaattgagagggttgagccccg

SEQ ID NO: 5331167 - DNA, 25 bp, Homo sapien
tatcgcggtgtccacggagaacaat

SEQ ID NO: 5331168 - DNA, 25 bp, Homo sapien
agagtcttgggcatctcgtcctcca

SEQ ID NO: 5331169 - DNA, 25 bp, Homo sapien
gagtcttgggcatctcgtcctccat

SEQ ID NO: 5331170 - DNA, 25 bp, Homo sapien
tcctccggcggcaattacactaaac

SEQ ID NO: 5331171 - DNA, 25 bp, Homo sapien
tcgtttaagcggttatggctacagg

SEQ ID NO: 5331172 - DNA, 25 bp, Homo sapien
tctcggctgaccagaggttactccg

SEQ ID NO: 5331173 - DNA, 25 bp, Homo sapien
gaaaccccaatacaagatggcggcg

SEQ ID NO: 5331174 - DNA, 25 bp, Homo sapien
ttgcatgataccactacaccagcgg

SEQ ID NO: 5331175 - DNA, 25 bp, Homo sapien
acccgggtcgcaagaatgggaatct

SEQ ID NO: 5331176 - DNA, 25 bp, Homo sapien
cccgggtcgcaagaatgggaatctt

SEQ ID NO: 5331177 - DNA, 25 bp, Homo sapien
gaatgggaatcttgcatgataccac

SEQ ID NO: 5331178 - DNA, 25 bp, Homo sapien
ggaaaacacgtcgaactctccagat

SEQ ID NO: 5331179 - DNA, 25 bp, Homo sapien
aaccaatgcgttcataacagattcg

SEQ ID NO: 5331180 - DNA, 25 bp, Homo sapien
taacagattcggagaggaaaacacg

SEQ ID NO: 5331181 - DNA, 25 bp, Homo sapien
aacccagccaaccaatgcgttcata

SEQ ID NO: 5331182 - DNA, 25 bp, Homo sapien
ttatttccagttttcatccgaatcc

SEQ ID NO: 5331183 - DNA, 25 bp, Homo sapien
ttatagacccagcttggttcttctc

SEQ ID NO: 5331184 - DNA, 25 bp, Homo sapien
tagacccagcttggttcttctccaa

SEQ ID NO: 5331185 - DNA, 25 bp, Homo sapien
tttatttccagttttcatccgaatc

SEQ ID NO: 5331186 - DNA, 25 bp, Homo sapien
tgggcaggaatcacttaatcctgaa

SEQ ID NO: 5331187 - DNA, 25 bp, Homo sapien
cttgggcaggaatcacttaatcctg

SEQ ID NO: 5331188 - DNA, 25 bp, Homo sapien
gcaggaatcacttaatcctgaaagt

SEQ ID NO: 5331189 - DNA, 25 bp, Homo sapien
ggcaggaatcacttaatcctgaaag

SEQ ID NO: 5331190 - DNA, 25 bp, Homo sapien
taaaaacatgtacgtcacgtattca

SEQ ID NO: 5331191 - DNA, 25 bp, Homo sapien
agaccagggaaatgagcaaatctcc

SEQ ID NO: 5331192 - DNA, 25 bp, Homo sapien
ctccaagaggtagctttgaattcag

SEQ ID NO: 5331193 - DNA, 25 bp, Homo sapien
cacgtattcaaaagagagaccaggg

SEQ ID NO: 5331194 - DNA, 25 bp, Homo sapien
tacgtatcaaccacttaagggtgtg

SEQ ID NO: 5331195 - DNA, 25 bp, Homo sapien
tccattaatggaaaagcagtttgct

SEQ ID NO: 5331196 - DNA, 25 bp, Homo sapien
tactgtttggattcacacttgcgca

SEQ ID NO: 5331197 - DNA, 25 bp, Homo sapien
gctactgcgctccaaaattgaagtc

SEQ ID NO: 5331198 - DNA, 25 bp, Homo sapien
agcggcattatcacagttcactgcg

SEQ ID NO: 5331199 - DNA, 25 bp, Homo sapien
ttaagagacactgtcactgtctggc

SEQ ID NO: 5331200 - DNA, 25 bp, Homo sapien
ttttaagagacactgtcactgtctg

SEQ ID NO: 5331201 - DNA, 25 bp, Homo sapien
cggcattatcacagttcactgcggc

SEQ ID NO: 5331202 - DNA, 25 bp, Homo sapien
tccaaatggtaattaacaggcagca

SEQ ID NO: 5331203 - DNA, 25 bp, Homo sapien
cacctgtagggttttaaagcatcca

SEQ ID NO: 5331204 - DNA, 25 bp, Homo sapien
caggcagcaaaacttcagaactagt

SEQ ID NO: 5331205 - DNA, 25 bp, Homo sapien
aattacaaaggcctagaccagcctg

SEQ ID NO: 5331206 - DNA, 25 bp, Homo sapien
gaagacaatttgtaaagtaatactg

SEQ ID NO: 5331207 - DNA, 25 bp, Homo sapien
caaaaaccagtttaggctgggtatg

SEQ ID NO: 5331208 - DNA, 25 bp, Homo sapien
tacttataataccaatttaggctgg

SEQ ID NO: 5331209 - DNA, 25 bp, Homo sapien
ccatcatttgtagacttgttttgca

SEQ ID NO: 5331210 - DNA, 25 bp, Homo sapien
gttaaaacatcgctaggctccaccc

SEQ ID NO: 5331211 - DNA, 25 bp, Homo sapien
gaacctgctactctgggcgcattag

SEQ ID NO: 5331212 - DNA, 25 bp, Homo sapien
gagtaacagtgtatgggacttcaca

SEQ ID NO: 5331213 - DNA, 25 bp, Homo sapien
gagcatgcatcagttaccttaaggg

SEQ ID NO: 5331214 - DNA, 25 bp, Homo sapien
gtgggccatacaattcattaactag

SEQ ID NO: 5331215 - DNA, 25 bp, Homo sapien
tacttgggaaagtcaggctagatca

SEQ ID NO: 5331216 - DNA, 25 bp, Homo sapien
gaatacattgtggacagcatcctca

SEQ ID NO: 5331217 - DNA, 25 bp, Homo sapien
ctctcgtttgagcttgtgggccata

SEQ ID NO: 5331218 - DNA, 25 bp, Homo sapien
tcaatgtcaaccaggaaaattcatg

SEQ ID NO: 5331219 - DNA, 25 bp, Homo sapien
cactttaatgcataaaaccctttga

SEQ ID NO: 5331220 - DNA, 25 bp, Homo sapien
aactggaatgagagctgatattcta

SEQ ID NO: 5331221 - DNA, 25 bp, Homo sapien
taagattctttcactttaatgcata

SEQ ID NO: 5331222 - DNA, 25 bp, Homo sapien
tcatagtaaaacaggccctatggag

SEQ ID NO: 5331223 - DNA, 25 bp, Homo sapien
acaggccctatggagagaggacatg

SEQ ID NO: 5331224 - DNA, 25 bp, Homo sapien
tttacatcatagtaaaacaggccct

SEQ ID NO: 5331225 - DNA, 25 bp, Homo sapien
gtaaaacaggccctatggagagagg

SEQ ID NO: 5331226 - DNA, 25 bp, Homo sapien
ttatactcgttccaaggcttctaac

SEQ ID NO: 5331227 - DNA, 25 bp, Homo sapien
tactcgttccaaggcttctaacatg

SEQ ID NO: 5331228 - DNA, 25 bp, Homo sapien
taacatgatgatactatttcctcgt

SEQ ID NO: 5331229 - DNA, 25 bp, Homo sapien
tgatgatactatttcctcgtattac

SEQ ID NO: 5331230 - DNA, 25 bp, Homo sapien
tattacatgtcggtttgcaaagctt

SEQ ID NO: 5331231 - DNA, 25 bp, Homo sapien
ttgaaaagaacaactcaggtaacag

SEQ ID NO: 5331232 - DNA, 25 bp, Homo sapien
taagccctttatacgacagacatct

SEQ ID NO: 5331233 - DNA, 25 bp, Homo sapien
gattctaatgccaagtctccaatga

SEQ ID NO: 5331234 - DNA, 25 bp, Homo sapien
ggctaaatggtgaactttgtcccac

SEQ ID NO: 5331235 - DNA, 25 bp, Homo sapien
tcccagcaacagacatccgtaagtt

SEQ ID NO: 5331236 - DNA, 25 bp, Homo sapien
ttcttagcagtgtgatgatacctca

SEQ ID NO: 5331237 - DNA, 25 bp, Homo sapien
aaagcaagaaaagctagccttcctg

SEQ ID NO: 5331238 - DNA, 25 bp, Homo sapien
taactgccgtatgcaactaaaaagg

SEQ ID NO: 5331239 - DNA, 25 bp, Homo sapien
tctaatgaaggaccaactatgagcc

SEQ ID NO: 5331240 - DNA, 25 bp, Homo sapien
tatttcaagcgctaggaccttaggt

SEQ ID NO: 5331241 - DNA, 25 bp, Homo sapien
ggtaaccaggatattactacagctg

SEQ ID NO: 5331242 - DNA, 25 bp, Homo sapien
ccaatattgttctgttgtccactag

SEQ ID NO: 5331243 - DNA, 25 bp, Homo sapien
aatattgttctgttgtccactagtc

SEQ ID NO: 5331244 - DNA, 25 bp, Homo sapien
tgttctgttgtccactagtcgccat

SEQ ID NO: 5331245 - DNA, 25 bp, Homo sapien
tattgttctgttgtccactagtcgc

SEQ ID NO: 5331246 - DNA, 25 bp, Homo sapien
caaatccccgcaatattccttggac

SEQ ID NO: 5331247 - DNA, 25 bp, Homo sapien
gggatcaaatccccgcaatattcct

SEQ ID NO: 5331248 - DNA, 25 bp, Homo sapien
cataaagggatcaaatccccgcaat

SEQ ID NO: 5331249 - DNA, 25 bp, Homo sapien
gttcataaagggatcaaatccccgc

SEQ ID NO: 5331250 - DNA, 25 bp, Homo sapien
ttcctggcctcgaaaaatatactcc

SEQ ID NO: 5331251 - DNA, 25 bp, Homo sapien
taaatgttcagggtagtcctcaaca

SEQ ID NO: 5331252 - DNA, 25 bp, Homo sapien
gcaaacagtaatcaaatcatatcca

SEQ ID NO: 5331253 - DNA, 25 bp, Homo sapien
ccaaaactaagttgtaaagacagca

SEQ ID NO: 5331254 - DNA, 25 bp, Homo sapien
agtattagcagctagaaggtttggt

SEQ ID NO: 5331255 - DNA, 25 bp, Homo sapien
gtattagcagctagaaggtttggtg

SEQ ID NO: 5331256 - DNA, 25 bp, Homo sapien
tactgggtgtgtagaaaaaacttca

SEQ ID NO: 5331257 - DNA, 25 bp, Homo sapien
cagcatcaggaagtataagcaaaac

SEQ ID NO: 5331258 - DNA, 25 bp, Homo sapien
caaagctttacgttgagtcctacct

SEQ ID NO: 5331259 - DNA, 25 bp, Homo sapien
tgctacgccagaaaaaactgatccc

SEQ ID NO: 5331260 - DNA, 25 bp, Homo sapien
tagccgtctatctagaacatgatac

SEQ ID NO: 5331261 - DNA, 25 bp, Homo sapien
ctaaagtggctttcggattctgatg

SEQ ID NO: 5331262 - DNA, 25 bp, Homo sapien
catttgctaagactaaagtggcttt

SEQ ID NO: 5331263 - DNA, 25 bp, Homo sapien
gatgcctcacgtagttttaaaaaca

SEQ ID NO: 5331264 - DNA, 25 bp, Homo sapien
tgttcaacaaaaggtagcactggag

SEQ ID NO: 5331265 - DNA, 25 bp, Homo sapien
atcttcaaggaacgagggacagcgc

SEQ ID NO: 5331266 - DNA, 25 bp, Homo sapien
agaccgcgggacctggagactagtc

SEQ ID NO: 5331267 - DNA, 25 bp, Homo sapien
gcactggagatcttcaaggaacgag

SEQ ID NO: 5331268 - DNA, 25 bp, Homo sapien
caactcgggagggtgagctttgctc

SEQ ID NO: 5331269 - DNA, 25 bp, Homo sapien
actcgggagggtgagctttgctcat

SEQ ID NO: 5331270 - DNA, 25 bp, Homo sapien
ttcaactcgggagggtgagctttgc

SEQ ID NO: 5331271 - DNA, 25 bp, Homo sapien
tttcaactcgggagggtgagctttg

SEQ ID NO: 5331272 - DNA, 25 bp, Homo sapien
cgtcttgcgtctggcgtcatcgacc

SEQ ID NO: 5331273 - DNA, 25 bp, Homo sapien
tggaacgcaacgcacggctttcctc

SEQ ID NO: 5331274 - DNA, 25 bp, Homo sapien
ccgctgtaggcccggcgtcttgcgt

SEQ ID NO: 5331275 - DNA, 25 bp, Homo sapien
ggaacgcaacgcacggctttcctca

SEQ ID NO: 5331276 - DNA, 25 bp, Homo sapien
atttcacctcgcgatatctcagcgc

SEQ ID NO: 5331277 - DNA, 25 bp, Homo sapien
acctcgcgatatctcagcgcctcgg

SEQ ID NO: 5331278 - DNA, 25 bp, Homo sapien
ctcgcgatatctcagcgcctcggtc

SEQ ID NO: 5331279 - DNA, 25 bp, Homo sapien
cgcgatatctcagcgcctcggtcat

SEQ ID NO: 5331280 - DNA, 25 bp, Homo sapien
gacatatgccttacgcttgtggcca

SEQ ID NO: 5331281 - DNA, 25 bp, Homo sapien
ggtgacacttttggtaaacaggatg

SEQ ID NO: 5331282 - DNA, 25 bp, Homo sapien
tctggtaccttggagggctctggct

SEQ ID NO: 5331283 - DNA, 25 bp, Homo sapien
tatccaaactagtctacctcccagt

SEQ ID NO: 5331284 - DNA, 25 bp, Homo sapien
tccaattgataagagagcctccttc

SEQ ID NO: 5331285 - DNA, 25 bp, Homo sapien
ttttccaattgataagagagcctcc

SEQ ID NO: 5331286 - DNA, 25 bp, Homo sapien
ttattttccaattgataagagagcc

SEQ ID NO: 5331287 - DNA, 25 bp, Homo sapien
tttccaattgataagagagcctcct

SEQ ID NO: 5331288 - DNA, 25 bp, Homo sapien
ttggctttgtcgttgcaatgcatgg

SEQ ID NO: 5331289 - DNA, 25 bp, Homo sapien
tcgttgcaatgcatggtgcaccggg

SEQ ID NO: 5331290 - DNA, 25 bp, Homo sapien
caatgcatggtgcaccgggccaggc

SEQ ID NO: 5331291 - DNA, 25 bp, Homo sapien
tggtcacacaactgtccagctgctg

SEQ ID NO: 5331292 - DNA, 25 bp, Homo sapien
caccgtgcctgaacattatttattt

SEQ ID NO: 5331293 - DNA, 25 bp, Homo sapien
tggagcgcaatggcatgcgatcttg

SEQ ID NO: 5331294 - DNA, 25 bp, Homo sapien
gagcgcaatggcatgcgatcttggc

SEQ ID NO: 5331295 - DNA, 25 bp, Homo sapien
agccaccgtgcctgaacattattta

SEQ ID NO: 5331296 - DNA, 25 bp, Homo sapien
agctcactggtgaccaaagcctggg

SEQ ID NO: 5331297 - DNA, 25 bp, Homo sapien
gcacctgcttcatggaggcctggct

SEQ ID NO: 5331298 - DNA, 25 bp, Homo sapien
ctgcttcatggaggcctggctgtcc

SEQ ID NO: 5331299 - DNA, 25 bp, Homo sapien
agaggcacatggcagcgctcgatgc

SEQ ID NO: 5331300 - DNA, 25 bp, Homo sapien
gactatggagcactacaggagttag

SEQ ID NO: 5331301 - DNA, 25 bp, Homo sapien
gggacagagatgactatggagcact

SEQ ID NO: 5331302 - DNA, 25 bp, Homo sapien
tacaggagttagaaggccacgtgga

SEQ ID NO: 5331303 - DNA, 25 bp, Homo sapien
gagaggttaggtaggaaagtctctg

SEQ ID NO: 5331304 - DNA, 25 bp, Homo sapien
tgagaatagacaccaggaccttaaa

SEQ ID NO: 5331305 - DNA, 25 bp, Homo sapien
gctgctagctcatcggcacctgttg

SEQ ID NO: 5331306 - DNA, 25 bp, Homo sapien
gggcagccgacccactaatcaatga

SEQ ID NO: 5331307 - DNA, 25 bp, Homo sapien
gcacctgttgcaccgatggttgggt

SEQ ID NO: 5331308 - DNA, 25 bp, Homo sapien
gctgtgtgaagcgaggttgggcgca

SEQ ID NO: 5331309 - DNA, 25 bp, Homo sapien
gaggttgggcgcaagagaagcaggc

SEQ ID NO: 5331310 - DNA, 25 bp, Homo sapien
acagtgtagaaacccgcgctgtgtg

SEQ ID NO: 5331311 - DNA, 25 bp, Homo sapien
cacacagaggcattgcggggctcag

SEQ ID NO: 5331312 - DNA, 25 bp, Homo sapien
gcctttctggtctttcacgttggca

SEQ ID NO: 5331313 - DNA, 25 bp, Homo sapien
gaggccggaagtcctcgcctttctg

SEQ ID NO: 5331314 - DNA, 25 bp, Homo sapien
gtctttcacgttggcagcgcctctg

SEQ ID NO: 5331315 - DNA, 25 bp, Homo sapien
gccggaagtcctcgcctttctggtc

SEQ ID NO: 5331316 - DNA, 25 bp, Homo sapien
agaggggaaggtggtggggcgagcg

SEQ ID NO: 5331317 - DNA, 25 bp, Homo sapien
ggtggtggggcgagcgcctgccacc

SEQ ID NO: 5331318 - DNA, 25 bp, Homo sapien
tggggcgagcgcctgccaccagggg

SEQ ID NO: 5331319 - DNA, 25 bp, Homo sapien
ctgcggaaggggccgcgtaagaggg

SEQ ID NO: 5331320 - DNA, 25 bp, Homo sapien
gcttccgaagtcctgtccgaggccg

SEQ ID NO: 5331321 - DNA, 25 bp, Homo sapien
aaggggcggaaaacagcctcgcgca

SEQ ID NO: 5331322 - DNA, 25 bp, Homo sapien
atccgatccgccaaagcttccgaag

SEQ ID NO: 5331323 - DNA, 25 bp, Homo sapien
acggcaagggcacacggatttcatc

SEQ ID NO: 5331324 - DNA, 25 bp, Homo sapien
cgctgagaagggggtcctggttcgg

SEQ ID NO: 5331325 - DNA, 25 bp, Homo sapien
gctgagaagggggtcctggttcggc

SEQ ID NO: 5331326 - DNA, 25 bp, Homo sapien
ccgctgagaagggggtcctggttcg

SEQ ID NO: 5331327 - DNA, 25 bp, Homo sapien
tcctggttcggccccagccccgcta

SEQ ID NO: 5331328 - DNA, 25 bp, Homo sapien
atcttccggatgttctctctttcca

SEQ ID NO: 5331329 - DNA, 25 bp, Homo sapien
gactccaccgcctcctgcacccgga

SEQ ID NO: 5331330 - DNA, 25 bp, Homo sapien
ctgcatcttccggatgttctctctt

SEQ ID NO: 5331331 - DNA, 25 bp, Homo sapien
agactcttcaccatggactccaccg

SEQ ID NO: 5331332 - DNA, 25 bp, Homo sapien
cgcgccggcgcccatatggaatcgg

SEQ ID NO: 5331333 - DNA, 25 bp, Homo sapien
cggcgcccatatggaatcggcgtac

SEQ ID NO: 5331334 - DNA, 25 bp, Homo sapien
gcgccggcgcccatatggaatcggc

SEQ ID NO: 5331335 - DNA, 25 bp, Homo sapien
gccggcgcccatatggaatcggcgt

SEQ ID NO: 5331336 - DNA, 25 bp, Homo sapien
agggctgaatgtggacactaggctc

SEQ ID NO: 5331337 - DNA, 25 bp, Homo sapien
tgtggacagttagagggctgaatgt

SEQ ID NO: 5331338 - DNA, 25 bp, Homo sapien
tcaaagttgtggacagttagagggc

SEQ ID NO: 5331339 - DNA, 25 bp, Homo sapien
gagggctgaatgtggacactaggct

SEQ ID NO: 5331340 - DNA, 25 bp, Homo sapien
caaaggaggtgggacgcatttcttc

SEQ ID NO: 5331341 - DNA, 25 bp, Homo sapien
tggctccaccgaacaccaaaggagg

SEQ ID NO: 5331342 - DNA, 25 bp, Homo sapien
ttctcctgacttgaggttatgctgg

SEQ ID NO: 5331343 - DNA, 25 bp, Homo sapien
gaacccaagagaggcaagaccatca

SEQ ID NO: 5331344 - DNA, 25 bp, Homo sapien
tgctgctcctcccagcaacccagag

SEQ ID NO: 5331345 - DNA, 25 bp, Homo sapien
gctcctcccagcaacccagaggtac

SEQ ID NO: 5331346 - DNA, 25 bp, Homo sapien
ctgctcctcccagcaacccagaggt

SEQ ID NO: 5331347 - DNA, 25 bp, Homo sapien
ttaagttactgctgctcctcccagc

SEQ ID NO: 5331348 - DNA, 25 bp, Homo sapien
actttgtggctcaagcttgatgtta

SEQ ID NO: 5331349 - DNA, 25 bp, Homo sapien
gtagagactgctgcttagggccagc

SEQ ID NO: 5331350 - DNA, 25 bp, Homo sapien
tttgtggctcaagcttgatgttagt

SEQ ID NO: 5331351 - DNA, 25 bp, Homo sapien
cttcttcggcggcagtgtagagact

SEQ ID NO: 5331352 - DNA, 25 bp, Homo sapien
ttccaggactgaaaaaaccgtctgc

SEQ ID NO: 5331353 - DNA, 25 bp, Homo sapien
gggtcaccaagatggacagggctgg

SEQ ID NO: 5331354 - DNA, 25 bp, Homo sapien
tggggtcaccaagatggacagggct

SEQ ID NO: 5331355 - DNA, 25 bp, Homo sapien
ctgggtgccttccaggactgaaaaa

SEQ ID NO: 5331356 - DNA, 25 bp, Homo sapien
tttaggaccaccaaatatatttgat

SEQ ID NO: 5331357 - DNA, 25 bp, Homo sapien
ctgcgtgaaggagcttggagtttat

SEQ ID NO: 5331358 - DNA, 25 bp, Homo sapien
cctcacggtgtgacttttaggacca

SEQ ID NO: 5331359 - DNA, 25 bp, Homo sapien
agggccagaccataccggcctgcag

SEQ ID NO: 5331360 - DNA, 25 bp, Homo sapien
tgaagggagggaagcgtaatcattt

SEQ ID NO: 5331361 - DNA, 25 bp, Homo sapien
ggaatgagctttaatgggggtattc

SEQ ID NO: 5331362 - DNA, 25 bp, Homo sapien
taatcatttggggttgatagtcttc

SEQ ID NO: 5331363 - DNA, 25 bp, Homo sapien
ttaatgggggtattcatagcagcac

SEQ ID NO: 5331364 - DNA, 25 bp, Homo sapien
caaccaatgccaacctgtgggcttt

SEQ ID NO: 5331365 - DNA, 25 bp, Homo sapien
tatgtaaggttataaccagggtgcc

SEQ ID NO: 5331366 - DNA, 25 bp, Homo sapien
cctgaagttggcaccatagttttgc

SEQ ID NO: 5331367 - DNA, 25 bp, Homo sapien
tgagtgagggcttaggcaagtccct

SEQ ID NO: 5331368 - DNA, 25 bp, Homo sapien
ccctggctgtaagaagtacccaact

SEQ ID NO: 5331369 - DNA, 25 bp, Homo sapien
caggtcccctggctgtaagaagtac

SEQ ID NO: 5331370 - DNA, 25 bp, Homo sapien
gtcccctggctgtaagaagtaccca

SEQ ID NO: 5331371 - DNA, 25 bp, Homo sapien
taggtggcatccttcatctggccca

SEQ ID NO: 5331372 - DNA, 25 bp, Homo sapien
ctatgctctctcttcctggtggagg

SEQ ID NO: 5331373 - DNA, 25 bp, Homo sapien
tccagaatttctggatcactggatt

SEQ ID NO: 5331374 - DNA, 25 bp, Homo sapien
tatgctctctcttcctggtggaggc

SEQ ID NO: 5331375 - DNA, 25 bp, Homo sapien
aatttctggatcactggatttaggg

SEQ ID NO: 5331376 - DNA, 25 bp, Homo sapien
tgggcactgctactggcttcccctt

SEQ ID NO: 5331377 - DNA, 25 bp, Homo sapien
tagggaacttgtcttgaagctgcaa

SEQ ID NO: 5331378 - DNA, 25 bp, Homo sapien
gcaattgcagggttttgcaccgagt

SEQ ID NO: 5331379 - DNA, 25 bp, Homo sapien
caccgagtgttttaggaggtggctt

SEQ ID NO: 5331380 - DNA, 25 bp, Homo sapien
gagatggggagaaccatggctgcca

SEQ ID NO: 5331381 - DNA, 25 bp, Homo sapien
agagatggggagaaccatggctgcc

SEQ ID NO: 5331382 - DNA, 25 bp, Homo sapien
agatggggagaaccatggctgccac

SEQ ID NO: 5331383 - DNA, 25 bp, Homo sapien
gatggggagaaccatggctgccacc

SEQ ID NO: 5331384 - DNA, 25 bp, Homo sapien
tgttcaaggacttccaagaacctag

SEQ ID NO: 5331385 - DNA, 25 bp, Homo sapien
taagcatctgaggaccaggtctcat

SEQ ID NO: 5331386 - DNA, 25 bp, Homo sapien
attgttcaaggacttccaagaacct

SEQ ID NO: 5331387 - DNA, 25 bp, Homo sapien
aacctagaataagcatctgaggacc

SEQ ID NO: 5331388 - DNA, 25 bp, Homo sapien
tgtgacccttttaccgagagatgca

SEQ ID NO: 5331389 - DNA, 25 bp, Homo sapien
cctgtgacccttttaccgagagatg

SEQ ID NO: 5331390 - DNA, 25 bp, Homo sapien
tctcctgtgacccttttaccgagag

SEQ ID NO: 5331391 - DNA, 25 bp, Homo sapien
gtgacccttttaccgagagatgcat

SEQ ID NO: 5331392 - DNA, 25 bp, Homo sapien
ggtgacaagagcagccttctgtcct

SEQ ID NO: 5331393 - DNA, 25 bp, Homo sapien
tgcctctcggagaaggatgagctca

SEQ ID NO: 5331394 - DNA, 25 bp, Homo sapien
ggtgaaatttcgctttcttattgcc

SEQ ID NO: 5331395 - DNA, 25 bp, Homo sapien
caagagcagccttctgtccttcctg

SEQ ID NO: 5331396 - DNA, 25 bp, Homo sapien
ggtacattacatcccttgcagctcc

SEQ ID NO: 5331397 - DNA, 25 bp, Homo sapien
tcatccaggtggtacattacatccc

SEQ ID NO: 5331398 - DNA, 25 bp, Homo sapien
ggtggtacattacatcccttgcagc

SEQ ID NO: 5331399 - DNA, 25 bp, Homo sapien
caggtggtacattacatcccttgca

SEQ ID NO: 5331400 - DNA, 25 bp, Homo sapien
cagctcccattacggtgggaatgga

SEQ ID NO: 5331401 - DNA, 25 bp, Homo sapien
cagtaggcagctcccattacggtgg

SEQ ID NO: 5331402 - DNA, 25 bp, Homo sapien
agcagtaggcagctcccattacggt

SEQ ID NO: 5331403 - DNA, 25 bp, Homo sapien
taggcagctcccattacggtgggaa

SEQ ID NO: 5331404 - DNA, 25 bp, Homo sapien
tcctttagcaaggaattcaggacct

SEQ ID NO: 5331405 - DNA, 25 bp, Homo sapien
tccaccatggttaggtatgctctga

SEQ ID NO: 5331406 - DNA, 25 bp, Homo sapien
tggaattgcagagtagccctggcct

SEQ ID NO: 5331407 - DNA, 25 bp, Homo sapien
ttcaggacctttgggtgaagatctg

SEQ ID NO: 5331408 - DNA, 25 bp, Homo sapien
tcgcagtgacaaccgtgatatcagt

SEQ ID NO: 5331409 - DNA, 25 bp, Homo sapien
tcttgatatcgcagtgacaaccgtg

SEQ ID NO: 5331410 - DNA, 25 bp, Homo sapien
ccgtgatatcagttacagagtattt

SEQ ID NO: 5331411 - DNA, 25 bp, Homo sapien
tctttattctctcttgatatcgcag

SEQ ID NO: 5331412 - DNA, 25 bp, Homo sapien
cttgaattctccagaggtgatgagg

SEQ ID NO: 5331413 - DNA, 25 bp, Homo sapien
gatgaggatctccccttctgagctg

SEQ ID NO: 5331414 - DNA, 25 bp, Homo sapien
gaagggtataatgaattctggcttg

SEQ ID NO: 5331415 - DNA, 25 bp, Homo sapien
attctggcttgatgcctcattcttg

SEQ ID NO: 5331416 - DNA, 25 bp, Homo sapien
tcttagtggccttcaggagagggct

SEQ ID NO: 5331417 - DNA, 25 bp, Homo sapien
cttagtggccttcaggagagggctg

SEQ ID NO: 5331418 - DNA, 25 bp, Homo sapien
gtcttagtggccttcaggagagggc

SEQ ID NO: 5331419 - DNA, 25 bp, Homo sapien
gaaacctactggaagtccctggtca

SEQ ID NO: 5331420 - DNA, 25 bp, Homo sapien
tggtcagagtttctacccaacactt

SEQ ID NO: 5331421 - DNA, 25 bp, Homo sapien
gtgtgtggtcagagtttctacccaa

SEQ ID NO: 5331422 - DNA, 25 bp, Homo sapien
cctctgggcaatcccgtccactcat

SEQ ID NO: 5331423 - DNA, 25 bp, Homo sapien
tctggtgtgtgtggtcagagtttct

SEQ ID NO: 5331424 - DNA, 25 bp, Homo sapien
cagtataggattgggacttcctgtc

SEQ ID NO: 5331425 - DNA, 25 bp, Homo sapien
ggccctggtagaatgttctcaccca

SEQ ID NO: 5331426 - DNA, 25 bp, Homo sapien
cagtctggattgctttctgatagtc

SEQ ID NO: 5331427 - DNA, 25 bp, Homo sapien
tagtccccggcattaatctcctctt

SEQ ID NO: 5331428 - DNA, 25 bp, Homo sapien
tttctggggttgtgcgatcccgaca

SEQ ID NO: 5331429 - DNA, 25 bp, Homo sapien
atggtagagccccaggaattaattt

SEQ ID NO: 5331430 - DNA, 25 bp, Homo sapien
tatagccctctcctatggtagagcc

SEQ ID NO: 5331431 - DNA, 25 bp, Homo sapien
tggattgtcatatctatagccctct

SEQ ID NO: 5331432 - DNA, 25 bp, Homo sapien
actgttcctgtgtggatacagaggc

SEQ ID NO: 5331433 - DNA, 25 bp, Homo sapien
taaatgctctgctagcgatgctcat

SEQ ID NO: 5331434 - DNA, 25 bp, Homo sapien
agccggacacgcagaactgttcctg

SEQ ID NO: 5331435 - DNA, 25 bp, Homo sapien
gctgccccttgcaggaaccacaggg

SEQ ID NO: 5331436 - DNA, 25 bp, Homo sapien
tttgaatggtgatatctaagtccaa

SEQ ID NO: 5331437 - DNA, 25 bp, Homo sapien
gaatggtgatatctaagtccaatac

SEQ ID NO: 5331438 - DNA, 25 bp, Homo sapien
tgaatggtgatatctaagtccaata

SEQ ID NO: 5331439 - DNA, 25 bp, Homo sapien
ttttgaatggtgatatctaagtcca

SEQ ID NO: 5331440 - DNA, 25 bp, Homo sapien
cttttcagcctctgggtaagcatca

SEQ ID NO: 5331441 - DNA, 25 bp, Homo sapien
acttttcagcctctgggtaagcatc

SEQ ID NO: 5331442 - DNA, 25 bp, Homo sapien
ccctggtttggtcccatttgctact

SEQ ID NO: 5331443 - DNA, 25 bp, Homo sapien
cccatttgctactggctctatgaaa

SEQ ID NO: 5331444 - DNA, 25 bp, Homo sapien
ctgaaatcatcaccccctggtttgg

SEQ ID NO: 5331445 - DNA, 25 bp, Homo sapien
tggaaaagtgatgtcctgaaatcat

SEQ ID NO: 5331446 - DNA, 25 bp, Homo sapien
cttgggatgaagaattccttgagtt

SEQ ID NO: 5331447 - DNA, 25 bp, Homo sapien
gagcttgggatgaagaattccttga

SEQ ID NO: 5331448 - DNA, 25 bp, Homo sapien
gggagcttgggatgaagaattcctt

SEQ ID NO: 5331449 - DNA, 25 bp, Homo sapien
tttccatctttctgcaagtttggct

SEQ ID NO: 5331450 - DNA, 25 bp, Homo sapien
tatgggcttgtaagatccggttgac

SEQ ID NO: 5331451 - DNA, 25 bp, Homo sapien
taagatccggttgacagttttagaa

SEQ ID NO: 5331452 - DNA, 25 bp, Homo sapien
ttgtaagatccggttgacagtttta

SEQ ID NO: 5331453 - DNA, 25 bp, Homo sapien
agatccggttgacagttttagaaca

SEQ ID NO: 5331454 - DNA, 25 bp, Homo sapien
aattgcgtcttatattgctcactac

SEQ ID NO: 5331455 - DNA, 25 bp, Homo sapien
cttccaaataaggtacagtacaact

SEQ ID NO: 5331456 - DNA, 25 bp, Homo sapien
gctaatcacattaacacattacaga

SEQ ID NO: 5331457 - DNA, 25 bp, Homo sapien
aaggaaaataactgctaatcacatt

SEQ ID NO: 5331458 - DNA, 25 bp, Homo sapien
ccttctgtgactgggcaggttggaa

SEQ ID NO: 5331459 - DNA, 25 bp, Homo sapien
ttagagcctcattagtccatcccgg

SEQ ID NO: 5331460 - DNA, 25 bp, Homo sapien
tcccggccaaattgactgaaaaagc

SEQ ID NO: 5331461 - DNA, 25 bp, Homo sapien
cacaatcccttgagaagctccagaa

SEQ ID NO: 5331462 - DNA, 25 bp, Homo sapien
agtgtgggtgggtgagtggcaatcc

SEQ ID NO: 5331463 - DNA, 25 bp, Homo sapien
ttctcagggaaaagaactctagggc

SEQ ID NO: 5331464 - DNA, 25 bp, Homo sapien
tctcagggaaaagaactctagggcc

SEQ ID NO: 5331465 - DNA, 25 bp, Homo sapien
tgggtgagtggcaatcccatctttt

SEQ ID NO: 5331466 - DNA, 25 bp, Homo sapien
ttggttccacgtgtgtccagccggg

SEQ ID NO: 5331467 - DNA, 25 bp, Homo sapien
ccataagagtattggaggcctttta

SEQ ID NO: 5331468 - DNA, 25 bp, Homo sapien
gctgtctatctttccatgtagaaga

SEQ ID NO: 5331469 - DNA, 25 bp, Homo sapien
aaagtcacagcctgtagagcagtgg

SEQ ID NO: 5331470 - DNA, 25 bp, Homo sapien
aatgattctctaattgtagtgaaca

SEQ ID NO: 5331471 - DNA, 25 bp, Homo sapien
atgattctctaattgtagtgaacaa

SEQ ID NO: 5331472 - DNA, 25 bp, Homo sapien
aaatgattctctaattgtagtgaac

SEQ ID NO: 5331473 - DNA, 25 bp, Homo sapien
gacctgctggtttccaaaggactga

SEQ ID NO: 5331474 - DNA, 25 bp, Homo sapien
gaaggcacttctagggaggcgtata

SEQ ID NO: 5331475 - DNA, 25 bp, Homo sapien
cactatgtatttgaagggacccact

SEQ ID NO: 5331476 - DNA, 25 bp, Homo sapien
taagcaggatgctacagtcaagcct

SEQ ID NO: 5331477 - DNA, 25 bp, Homo sapien
catcatctccaagggtggcgatagc

SEQ ID NO: 5331478 - DNA, 25 bp, Homo sapien
ccttagctgtcttgaagaggccaga

SEQ ID NO: 5331479 - DNA, 25 bp, Homo sapien
taccggctttgtggcttcaatggca

SEQ ID NO: 5331480 - DNA, 25 bp, Homo sapien
taaacatacttaccgagggctcacg

SEQ ID NO: 5331481 - DNA, 25 bp, Homo sapien
taacaagtcttgaaatcgtggtccg

SEQ ID NO: 5331482 - DNA, 25 bp, Homo sapien
gtcacactgaataaccccaagcaga

SEQ ID NO: 5331483 - DNA, 25 bp, Homo sapien
gtggtccgctgatttcttctctagg

SEQ ID NO: 5331484 - DNA, 25 bp, Homo sapien
gcagacggagttcttgacagagttt

SEQ ID NO: 5331485 - DNA, 25 bp, Homo sapien
ttattgatctgccacagtccacctg

SEQ ID NO: 5331486 - DNA, 25 bp, Homo sapien
gcctttctttattgatctgccacag

SEQ ID NO: 5331487 - DNA, 25 bp, Homo sapien
tctctggcagtgctgtcctgaagaa

SEQ ID NO: 5331488 - DNA, 25 bp, Homo sapien
cagtgctgtcctgaagaagcctttc

SEQ ID NO: 5331489 - DNA, 25 bp, Homo sapien
ggccacaccctggccacgttgggaa

SEQ ID NO: 5331490 - DNA, 25 bp, Homo sapien
aaaacaggttaagcactgtgggcca

SEQ ID NO: 5331491 - DNA, 25 bp, Homo sapien
caggttaagcactgtgggccacacc

SEQ ID NO: 5331492 - DNA, 25 bp, Homo sapien
cacaccctggccacgttgggaaaat

SEQ ID NO: 5331493 - DNA, 25 bp, Homo sapien
gccaatgtcaccaagttctctcggg

SEQ ID NO: 5331494 - DNA, 25 bp, Homo sapien
gcagttaggcccgagtccaaattct

SEQ ID NO: 5331495 - DNA, 25 bp, Homo sapien
gccaaaggaagctagagagactgat

SEQ ID NO: 5331496 - DNA, 25 bp, Homo sapien
gctggttcagtctcagggaccgcaa

SEQ ID NO: 5331497 - DNA, 25 bp, Homo sapien
cagagccactgatgctccgaggagg

SEQ ID NO: 5331498 - DNA, 25 bp, Homo sapien
tacgatgggctctcttggtcaaaat

SEQ ID NO: 5331499 - DNA, 25 bp, Homo sapien
aagctggccggtgtgagacttttcc

SEQ ID NO: 5331500 - DNA, 25 bp, Homo sapien
tgacccactatgtcctcaagaagaa

SEQ ID NO: 5331501 - DNA, 25 bp, Homo sapien
gagggcccggcaccactcacagtgt

SEQ ID NO: 5331502 - DNA, 25 bp, Homo sapien
acagtgttttcggacctggcagcag

SEQ ID NO: 5331503 - DNA, 25 bp, Homo sapien
ctgagtggcagcaagcggttcttcc

SEQ ID NO: 5331504 - DNA, 25 bp, Homo sapien
ttctcgtgccggcagatgagggccc

SEQ ID NO: 5331505 - DNA, 25 bp, Homo sapien
tggtcctccactcggctttcttgat

SEQ ID NO: 5331506 - DNA, 25 bp, Homo sapien
agaaccaggtgggtaattccacaag

SEQ ID NO: 5331507 - DNA, 25 bp, Homo sapien
cagctgtcagagagaactggtcctc

SEQ ID NO: 5331508 - DNA, 25 bp, Homo sapien
tgggtaattccacaagtgtaatggc

SEQ ID NO: 5331509 - DNA, 25 bp, Homo sapien
tggcccagtctgaaccagagctact

SEQ ID NO: 5331510 - DNA, 25 bp, Homo sapien
ggctgtggcccagtctgaaccagag

SEQ ID NO: 5331511 - DNA, 25 bp, Homo sapien
gaaccagagctacttgtcttctccc

SEQ ID NO: 5331512 - DNA, 25 bp, Homo sapien
tggcagcccactagcttgctcctgc

SEQ ID NO: 5331513 - DNA, 25 bp, Homo sapien
ggttgtggctactgtcaacaagctg

SEQ ID NO: 5331514 - DNA, 25 bp, Homo sapien
caggttgtggctactgtcaacaagc

SEQ ID NO: 5331515 - DNA, 25 bp, Homo sapien
agctggggctctaacgggtgcctca

SEQ ID NO: 5331516 - DNA, 25 bp, Homo sapien
gagcaggttgtggctactgtcaaca

SEQ ID NO: 5331517 - DNA, 25 bp, Homo sapien
gcagtccagtcaggagatgtgggca

SEQ ID NO: 5331518 - DNA, 25 bp, Homo sapien
cagtccagtcaggagatgtgggcaa

SEQ ID NO: 5331519 - DNA, 25 bp, Homo sapien
agcagtccagtcaggagatgtgggc

SEQ ID NO: 5331520 - DNA, 25 bp, Homo sapien
cagcaacaatggccctcgacatgta

SEQ ID NO: 5331521 - DNA, 25 bp, Homo sapien
ttcctggaagatacaacacagcaac

SEQ ID NO: 5331522 - DNA, 25 bp, Homo sapien
caatggccctcgacatgtatttgca

SEQ ID NO: 5331523 - DNA, 25 bp, Homo sapien
gcaacaatggccctcgacatgtatt

SEQ ID NO: 5331524 - DNA, 25 bp, Homo sapien
cacatgtgatgataaggacagccag

SEQ ID NO: 5331525 - DNA, 25 bp, Homo sapien
caccaaggcggtgatggcctgcttc

SEQ ID NO: 5331526 - DNA, 25 bp, Homo sapien
agccagggccacgatggagaccacc

SEQ ID NO: 5331527 - DNA, 25 bp, Homo sapien
aggaggtccgcatgctcacagcgtg

SEQ ID NO: 5331528 - DNA, 25 bp, Homo sapien
caccgctgcttatgtggagaaggga

SEQ ID NO: 5331529 - DNA, 25 bp, Homo sapien
tatcatctgcggaggcaagctacgg

SEQ ID NO: 5331530 - DNA, 25 bp, Homo sapien
gctacggctgaagcaatccatgact

SEQ ID NO: 5331531 - DNA, 25 bp, Homo sapien
gccagcttttgcaattggagggaaa

SEQ ID NO: 5331532 - DNA, 25 bp, Homo sapien
aaatgaatcacacttgatccagctg

SEQ ID NO: 5331533 - DNA, 25 bp, Homo sapien
cctttgcctcaggtaggcgttggtt

SEQ ID NO: 5331534 - DNA, 25 bp, Homo sapien
aggtaggcgttggttctcacctggc

SEQ ID NO: 5331535 - DNA, 25 bp, Homo sapien
aatgaatcacacttgatccagctgc

SEQ ID NO: 5331536 - DNA, 25 bp, Homo sapien
tcgagtaccaacaagaaaactgccc

SEQ ID NO: 5331537 - DNA, 25 bp, Homo sapien
aatcctaatctctggggaggcgcca

SEQ ID NO: 5331538 - DNA, 25 bp, Homo sapien
aactgcccccaatcctaatctctgg

SEQ ID NO: 5331539 - DNA, 25 bp, Homo sapien
ctgatggatctatgtaagggggctc

SEQ ID NO: 5331540 - DNA, 25 bp, Homo sapien
ctgatggtggtcaggtctcttcggg

SEQ ID NO: 5331541 - DNA, 25 bp, Homo sapien
gtttaactctgttcagattccactg

SEQ ID NO: 5331542 - DNA, 25 bp, Homo sapien
cacaggcagccagttatgaactgat

SEQ ID NO: 5331543 - DNA, 25 bp, Homo sapien
ccttggctgacaggaatttgctttc

SEQ ID NO: 5331544 - DNA, 25 bp, Homo sapien
tcaccgaggagcatttgggacaggt

SEQ ID NO: 5331545 - DNA, 25 bp, Homo sapien
agttgggtcaccgaggagcatttgg

SEQ ID NO: 5331546 - DNA, 25 bp, Homo sapien
ttgggtcaccgaggagcatttggga

SEQ ID NO: 5331547 - DNA, 25 bp, Homo sapien
gggagttgggtcaccgaggagcatt

SEQ ID NO: 5331548 - DNA, 25 bp, Homo sapien
gacctcagggtatgtcaggcttatt

SEQ ID NO: 5331549 - DNA, 25 bp, Homo sapien
gataaggtgtggttctgtcttccca

SEQ ID NO: 5331550 - DNA, 25 bp, Homo sapien
tcgagactagaatcctggctccctg

SEQ ID NO: 5331551 - DNA, 25 bp, Homo sapien
caggcttattgaccaggatgtgtgt

SEQ ID NO: 5331552 - DNA, 25 bp, Homo sapien
ggtcccacggatggcaaagtgagcc

SEQ ID NO: 5331553 - DNA, 25 bp, Homo sapien
catcagggggtaaggagtgccgtca

SEQ ID NO: 5331554 - DNA, 25 bp, Homo sapien
gccccaaggggtcccacggatggca

SEQ ID NO: 5331555 - DNA, 25 bp, Homo sapien
gctgaacacatgcaagccccaaggg

SEQ ID NO: 5331556 - DNA, 25 bp, Homo sapien
ttaagagtttgtggtcagggaactg

SEQ ID NO: 5331557 - DNA, 25 bp, Homo sapien
cttgttaagagtttgtggtcaggga

SEQ ID NO: 5331558 - DNA, 25 bp, Homo sapien
gatgaccctggcctttctcaggagg

SEQ ID NO: 5331559 - DNA, 25 bp, Homo sapien
cagggaactgggcttggggatgacc

SEQ ID NO: 5331560 - DNA, 25 bp, Homo sapien
gttccatggaagcagaactgagtgt

SEQ ID NO: 5331561 - DNA, 25 bp, Homo sapien
caggttccatggaagcagaactgag

SEQ ID NO: 5331562 - DNA, 25 bp, Homo sapien
gtcattaaaatgggacaccactgct

SEQ ID NO: 5331563 - DNA, 25 bp, Homo sapien
cctgcaggttccatggaagcagaac

SEQ ID NO: 5331564 - DNA, 25 bp, Homo sapien
cttgagtggttgaggaacaggccca

SEQ ID NO: 5331565 - DNA, 25 bp, Homo sapien
ttggcttgagtggttgaggaacagg

SEQ ID NO: 5331566 - DNA, 25 bp, Homo sapien
gcttgagtggttgaggaacaggccc

SEQ ID NO: 5331567 - DNA, 25 bp, Homo sapien
actggctaacagtagacgctggatg

SEQ ID NO: 5331568 - DNA, 25 bp, Homo sapien
gctgtagtttgcataactggcttct

SEQ ID NO: 5331569 - DNA, 25 bp, Homo sapien
gtctgctgtagtttgcataactggc

SEQ ID NO: 5331570 - DNA, 25 bp, Homo sapien
tgctgtagtttgcataactggcttc

SEQ ID NO: 5331571 - DNA, 25 bp, Homo sapien
ctgtagtttgcataactggcttctc

SEQ ID NO: 5331572 - DNA, 25 bp, Homo sapien
tttggcagctttgtagcttgtcaca

SEQ ID NO: 5331573 - DNA, 25 bp, Homo sapien
aggggatgtgattcacacttgagac

SEQ ID NO: 5331574 - DNA, 25 bp, Homo sapien
gcttgtcacaggttttctgataggg

SEQ ID NO: 5331575 - DNA, 25 bp, Homo sapien
caccatgtgcagaacgggttcctct

SEQ ID NO: 5331576 - DNA, 25 bp, Homo sapien
gaagagggtctggaatagcaattga

SEQ ID NO: 5331577 - DNA, 25 bp, Homo sapien
gggaaatcccccatccaattcacag

SEQ ID NO: 5331578 - DNA, 25 bp, Homo sapien
caattcacaggaggggtctccgtag

SEQ ID NO: 5331579 - DNA, 25 bp, Homo sapien
aagagggtctggaatagcaattgag

SEQ ID NO: 5331580 - DNA, 25 bp, Homo sapien
tggacagctcctcccaacagccctg

SEQ ID NO: 5331581 - DNA, 25 bp, Homo sapien
gacagctcctcccaacagccctgct

SEQ ID NO: 5331582 - DNA, 25 bp, Homo sapien
ctggacagctcctcccaacagccct

SEQ ID NO: 5331583 - DNA, 25 bp, Homo sapien
agctcctcccaacagccctgctccc

SEQ ID NO: 5331584 - DNA, 25 bp, Homo sapien
catccacacccctgagcgcaatcac

SEQ ID NO: 5331585 - DNA, 25 bp, Homo sapien
atccacacccctgagcgcaatcacc

SEQ ID NO: 5331586 - DNA, 25 bp, Homo sapien
gcatccacacccctgagcgcaatca

SEQ ID NO: 5331587 - DNA, 25 bp, Homo sapien
ccacacccctgagcgcaatcacccc

SEQ ID NO: 5331588 - DNA, 25 bp, Homo sapien
aaagcagccctaattggacttcatg

SEQ ID NO: 5331589 - DNA, 25 bp, Homo sapien
ttttgtcttcagatactacaatggc

SEQ ID NO: 5331590 - DNA, 25 bp, Homo sapien
atattttgtcttcagatactacaat

SEQ ID NO: 5331591 - DNA, 25 bp, Homo sapien
attttgtcttcagatactacaatgg

SEQ ID NO: 5331592 - DNA, 25 bp, Homo sapien
tattttgtcttcagatactacaatg

SEQ ID NO: 5331593 - DNA, 25 bp, Homo sapien
atgctactgacctttgcagagagag

SEQ ID NO: 5331594 - DNA, 25 bp, Homo sapien
tgtcagcatctagtgtggcaatgct

SEQ ID NO: 5331595 - DNA, 25 bp, Homo sapien
tttgtgaatgatcccgaagaggaag

SEQ ID NO: 5331596 - DNA, 25 bp, Homo sapien
tttttgtgaatgatcccgaagagga

SEQ ID NO: 5331597 - DNA, 25 bp, Homo sapien
gaagactggccttgaggaatctaga

SEQ ID NO: 5331598 - DNA, 25 bp, Homo sapien
ggtctctatggacagaaacctcaca

SEQ ID NO: 5331599 - DNA, 25 bp, Homo sapien
tgtttggtaagagatgacctcgggc

SEQ ID NO: 5331600 - DNA, 25 bp, Homo sapien
tgcaaaagataaagtgtgggccaga

SEQ ID NO: 5331601 - DNA, 25 bp, Homo sapien
gctgcaaaatcttaaatcgatacca

SEQ ID NO: 5331602 - DNA, 25 bp, Homo sapien
gatctgctttcgtgtagcatcatgg

SEQ ID NO: 5331603 - DNA, 25 bp, Homo sapien
tggccagcgatttcttgcatcatca

SEQ ID NO: 5331604 - DNA, 25 bp, Homo sapien
catcatggggagttaatttgggctt

SEQ ID NO: 5331605 - DNA, 25 bp, Homo sapien
ctttcttgtggccagcgatttcttg

SEQ ID NO: 5331606 - DNA, 25 bp, Homo sapien
gtagaagcaggagacaacaggtaca

SEQ ID NO: 5331607 - DNA, 25 bp, Homo sapien
gggaagtttaactgtagcgccttca

SEQ ID NO: 5331608 - DNA, 25 bp, Homo sapien
tattttggggctagataaagacaga

SEQ ID NO: 5331609 - DNA, 25 bp, Homo sapien
taagaaatctatttggtagaagcag

SEQ ID NO: 5331610 - DNA, 25 bp, Homo sapien
gtcctttcttaaggcattggcagga

SEQ ID NO: 5331611 - DNA, 25 bp, Homo sapien
gtgagagctgactgagtttgtcact

SEQ ID NO: 5331612 - DNA, 25 bp, Homo sapien
tcatgccatgccagtagtgagagct

SEQ ID NO: 5331613 - DNA, 25 bp, Homo sapien
attgtggccttgactgtgtcctttc

SEQ ID NO: 5331614 - DNA, 25 bp, Homo sapien
gtgattctgctcctgacaatcctgt

SEQ ID NO: 5331615 - DNA, 25 bp, Homo sapien
tcttccagaggagtgattgttggac

SEQ ID NO: 5331616 - DNA, 25 bp, Homo sapien
gattgttggactagggtaggagggc

SEQ ID NO: 5331617 - DNA, 25 bp, Homo sapien
tggccttccaaggttgggctgtttg

SEQ ID NO: 5331618 - DNA, 25 bp, Homo sapien
aaggagaaatgttgggggattccag

SEQ ID NO: 5331619 - DNA, 25 bp, Homo sapien
tccagaaacaccagggtcattttac

SEQ ID NO: 5331620 - DNA, 25 bp, Homo sapien
atgttgggggattccagaaacacca

SEQ ID NO: 5331621 - DNA, 25 bp, Homo sapien
gggattccagaaacaccagggtcat

SEQ ID NO: 5331622 - DNA, 25 bp, Homo sapien
ttctccaagccatactggttcagaa

SEQ ID NO: 5331623 - DNA, 25 bp, Homo sapien
gtttctccaagccatactggttcag

SEQ ID NO: 5331624 - DNA, 25 bp, Homo sapien
gccatactggttcagaagcaaagac

SEQ ID NO: 5331625 - DNA, 25 bp, Homo sapien
caagccatactggttcagaagcaaa

SEQ ID NO: 5331626 - DNA, 25 bp, Homo sapien
ctcctggtatccacagccttgtgaa

SEQ ID NO: 5331627 - DNA, 25 bp, Homo sapien
cctggtatccacagccttgtgaagt

SEQ ID NO: 5331628 - DNA, 25 bp, Homo sapien
gtatccacagccttgtgaagtcccc

SEQ ID NO: 5331629 - DNA, 25 bp, Homo sapien
cacagccttgtgaagtcccctccca

SEQ ID NO: 5331630 - DNA, 25 bp, Homo sapien
ggcttggatcatggtcaatcgagca

SEQ ID NO: 5331631 - DNA, 25 bp, Homo sapien
gaggactctagagcaggaattaatg

SEQ ID NO: 5331632 - DNA, 25 bp, Homo sapien
ggtcaatcgagcatggccctgacat

SEQ ID NO: 5331633 - DNA, 25 bp, Homo sapien
gcaggaattaatgggctctggcttg

SEQ ID NO: 5331634 - DNA, 25 bp, Homo sapien
atttgtggcagtttgtgcgtgcttc

SEQ ID NO: 5331635 - DNA, 25 bp, Homo sapien
gcgtgcttccttgatatatactcat

SEQ ID NO: 5331636 - DNA, 25 bp, Homo sapien
aggagcctggctgccgtggagatct

SEQ ID NO: 5331637 - DNA, 25 bp, Homo sapien
gctgaatactgcaaagctgctgcca

SEQ ID NO: 5331638 - DNA, 25 bp, Homo sapien
ctgaagcttggacactgctttccag

SEQ ID NO: 5331639 - DNA, 25 bp, Homo sapien
gaggtggtgttaccagagcagtatc

SEQ ID NO: 5331640 - DNA, 25 bp, Homo sapien
gcttggacactgctttccagttgct

SEQ ID NO: 5331641 - DNA, 25 bp, Homo sapien
cagagcagtatcactgttatctgaa

SEQ ID NO: 5331642 - DNA, 25 bp, Homo sapien
agtggtcactgcctacaaggagctg

SEQ ID NO: 5331643 - DNA, 25 bp, Homo sapien
ccagccctgctaacttctgattaag

SEQ ID NO: 5331644 - DNA, 25 bp, Homo sapien
caaggagctgaggtccttgagcatc

SEQ ID NO: 5331645 - DNA, 25 bp, Homo sapien
tttgggcacattgcatcccagccct

SEQ ID NO: 5331646 - DNA, 25 bp, Homo sapien
acagtggtggcctgtgatctgctgc

SEQ ID NO: 5331647 - DNA, 25 bp, Homo sapien
tgtgatctgctgcttgacataaaac

SEQ ID NO: 5331648 - DNA, 25 bp, Homo sapien
ccaggctggtgggtaggataagaga

SEQ ID NO: 5331649 - DNA, 25 bp, Homo sapien
gataagagaaagtggcctccaggtt

SEQ ID NO: 5331650 - DNA, 25 bp, Homo sapien
acccaagggcaatgactgtccttgg

SEQ ID NO: 5331651 - DNA, 25 bp, Homo sapien
caagggcaatgactgtccttggttc

SEQ ID NO: 5331652 - DNA, 25 bp, Homo sapien
atgcccagtacagccctctgcagta

SEQ ID NO: 5331653 - DNA, 25 bp, Homo sapien
gcaatgactgtccttggttcatctc

SEQ ID NO: 5331654 - DNA, 25 bp, Homo sapien
gagtttggatgaatattcccagact

SEQ ID NO: 5331655 - DNA, 25 bp, Homo sapien
caaaaatgggtgtccctcatgcaag

SEQ ID NO: 5331656 - DNA, 25 bp, Homo sapien
tccagacagcaaaggtcctgtgagt

SEQ ID NO: 5331657 - DNA, 25 bp, Homo sapien
tgctctagaaacagccgtactgcct

SEQ ID NO: 5331658 - DNA, 25 bp, Homo sapien
cacaggatttcagccctgtgcggtg

SEQ ID NO: 5331659 - DNA, 25 bp, Homo sapien
aggatttcagccctgtgcggtgatg

SEQ ID NO: 5331660 - DNA, 25 bp, Homo sapien
tttcagccctgtgcggtgatgagag

SEQ ID NO: 5331661 - DNA, 25 bp, Homo sapien
ggtgggaaggcctaccagggcctga

SEQ ID NO: 5331662 - DNA, 25 bp, Homo sapien
ggctcttggcctaccaggtcttaga

SEQ ID NO: 5331663 - DNA, 25 bp, Homo sapien
cagtggagaacatggctcttggcct

SEQ ID NO: 5331664 - DNA, 25 bp, Homo sapien
cttagagtgtgaatcaggaggagca

SEQ ID NO: 5331665 - DNA, 25 bp, Homo sapien
tgcaacttgtcacctgattcagtgg

SEQ ID NO: 5331666 - DNA, 25 bp, Homo sapien
gcatcaaggataacagtagcaaggg

SEQ ID NO: 5331667 - DNA, 25 bp, Homo sapien
aaagcacgacacagagtgggacagg

SEQ ID NO: 5331668 - DNA, 25 bp, Homo sapien
gactggcagtgtcgcctccagtggg

SEQ ID NO: 5331669 - DNA, 25 bp, Homo sapien
ccaagtggcttaggcaccttaaggg

SEQ ID NO: 5331670 - DNA, 25 bp, Homo sapien
ggcagtttgtaccaagggtcataaa

SEQ ID NO: 5331671 - DNA, 25 bp, Homo sapien
attcactcggaaagctatctggcag

SEQ ID NO: 5331672 - DNA, 25 bp, Homo sapien
gagaaatcagcaccattcactcgga

SEQ ID NO: 5331673 - DNA, 25 bp, Homo sapien
tcctgtttccggagacacatgctga

SEQ ID NO: 5331674 - DNA, 25 bp, Homo sapien
cgatgagggttcagaaatctgggtt

SEQ ID NO: 5331675 - DNA, 25 bp, Homo sapien
tgagggttcagaaatctgggttcta

SEQ ID NO: 5331676 - DNA, 25 bp, Homo sapien
gagggttcagaaatctgggttctac

SEQ ID NO: 5331677 - DNA, 25 bp, Homo sapien
gatgagggttcagaaatctgggttc

SEQ ID NO: 5331678 - DNA, 25 bp, Homo sapien
gcaggccctgttttggcacacttgc

SEQ ID NO: 5331679 - DNA, 25 bp, Homo sapien
ttgcccacaggaattgtctgaacag

SEQ ID NO: 5331680 - DNA, 25 bp, Homo sapien
acttgcccacaggaattgtctgaac

SEQ ID NO: 5331681 - DNA, 25 bp, Homo sapien
ttcaggtggactattacgagagtgg

SEQ ID NO: 5331682 - DNA, 25 bp, Homo sapien
agaccttccagtgagcgcctcctcg

SEQ ID NO: 5331683 - DNA, 25 bp, Homo sapien
agaggactccgggacaggcgtgtgc

SEQ ID NO: 5331684 - DNA, 25 bp, Homo sapien
ctgaagagagacacgtaggggaggc

SEQ ID NO: 5331685 - DNA, 25 bp, Homo sapien
gagagacacgtaggggaggcccctg

SEQ ID NO: 5331686 - DNA, 25 bp, Homo sapien
cactcagcggggacgtgctgttctc

SEQ ID NO: 5331687 - DNA, 25 bp, Homo sapien
tcagcggggacgtgctgttctccaa

SEQ ID NO: 5331688 - DNA, 25 bp, Homo sapien
ctcagcggggacgtgctgttctcca

SEQ ID NO: 5331689 - DNA, 25 bp, Homo sapien
cagcggggacgtgctgttctccaag

SEQ ID NO: 5331690 - DNA, 25 bp, Homo sapien
agtcagccagtgactcataatagtg

SEQ ID NO: 5331691 - DNA, 25 bp, Homo sapien
cagtgactcataatagtgttcaagg

SEQ ID NO: 5331692 - DNA, 25 bp, Homo sapien
catccttggctaaagtcagccagtg

SEQ ID NO: 5331693 - DNA, 25 bp, Homo sapien
tagtgttcaaggatgacaccgggga

SEQ ID NO: 5331694 - DNA, 25 bp, Homo sapien
cccaagttagtccaaacaacagact

SEQ ID NO: 5331695 - DNA, 25 bp, Homo sapien
cagtcacaaaccccaagttagtcca

SEQ ID NO: 5331696 - DNA, 25 bp, Homo sapien
aagttagtccaaacaacagactctg

SEQ ID NO: 5331697 - DNA, 25 bp, Homo sapien
caagttagtccaaacaacagactct

SEQ ID NO: 5331698 - DNA, 25 bp, Homo sapien
ctggccacacgactgtgcttagaaa

SEQ ID NO: 5331699 - DNA, 25 bp, Homo sapien
accttccagaaacatgtggccttgg

SEQ ID NO: 5331700 - DNA, 25 bp, Homo sapien
cttccagaaacatgtggccttggca

SEQ ID NO: 5331701 - DNA, 25 bp, Homo sapien
ctctggccacacgactgtgcttaga

SEQ ID NO: 5331702 - DNA, 25 bp, Homo sapien
cagcaggtccttttggatgaaggat

SEQ ID NO: 5331703 - DNA, 25 bp, Homo sapien
ctgtttgggatcctctaagccagac

SEQ ID NO: 5331704 - DNA, 25 bp, Homo sapien
gaaggatgttctggattcagacgag

SEQ ID NO: 5331705 - DNA, 25 bp, Homo sapien
cagacttcctgcatgaagggatgaa

SEQ ID NO: 5331706 - DNA, 25 bp, Homo sapien
caggtcctaaggaacaggaagtagt

SEQ ID NO: 5331707 - DNA, 25 bp, Homo sapien
caggaagtagttagtggtacgtaga

SEQ ID NO: 5331708 - DNA, 25 bp, Homo sapien
tacgtagacggtgggaatcctgctg

SEQ ID NO: 5331709 - DNA, 25 bp, Homo sapien
tagtggtacgtagacggtgggaatc

SEQ ID NO: 5331710 - DNA, 25 bp, Homo sapien
gaacccagggccagatagtataggt

SEQ ID NO: 5331711 - DNA, 25 bp, Homo sapien
ccagggccagatagtataggttcat

SEQ ID NO: 5331712 - DNA, 25 bp, Homo sapien
cccagggccagatagtataggttca

SEQ ID NO: 5331713 - DNA, 25 bp, Homo sapien
acccagggccagatagtataggttc

SEQ ID NO: 5331714 - DNA, 25 bp, Homo sapien
tgaatcaccaacaggctctaccagg

SEQ ID NO: 5331715 - DNA, 25 bp, Homo sapien
gatgctatagctatccacagggccc

SEQ ID NO: 5331716 - DNA, 25 bp, Homo sapien
gaggcactctgaaaacctgttccag

SEQ ID NO: 5331717 - DNA, 25 bp, Homo sapien
taccagggccgagttctgaggttgc

SEQ ID NO: 5331718 - DNA, 25 bp, Homo sapien
tgtgaaccagctgagcagagggcac

SEQ ID NO: 5331719 - DNA, 25 bp, Homo sapien
tgaaccagctgagcagagggcacct

SEQ ID NO: 5331720 - DNA, 25 bp, Homo sapien
aaccagctgagcagagggcacctgg

SEQ ID NO: 5331721 - DNA, 25 bp, Homo sapien
gtgaaccagctgagcagagggcacc

SEQ ID NO: 5331722 - DNA, 25 bp, Homo sapien
ctgacaagaagtacaggaaccaaac

SEQ ID NO: 5331723 - DNA, 25 bp, Homo sapien
caaacaccacctctggaaggatcca

SEQ ID NO: 5331724 - DNA, 25 bp, Homo sapien
caagaagtacaggaaccaaacacca

SEQ ID NO: 5331725 - DNA, 25 bp, Homo sapien
aaacaccacctctggaaggatccat

SEQ ID NO: 5331726 - DNA, 25 bp, Homo sapien
acactgcaaactggcagaatctcta

SEQ ID NO: 5331727 - DNA, 25 bp, Homo sapien
ctgacagcaacccaagctcagaggt

SEQ ID NO: 5331728 - DNA, 25 bp, Homo sapien
gaggtgaagggtccacaaggaccaa

SEQ ID NO: 5331729 - DNA, 25 bp, Homo sapien
caaggaccaaagcaaacaggctcgg

SEQ ID NO: 5331730 - DNA, 25 bp, Homo sapien
tcggtgctggcctggtaccagagca

SEQ ID NO: 5331731 - DNA, 25 bp, Homo sapien
acaggactccgtagtgattctccat

SEQ ID NO: 5331732 - DNA, 25 bp, Homo sapien
ctgggaagccaatcctgtctaacag

SEQ ID NO: 5331733 - DNA, 25 bp, Homo sapien
cctgtctaacaggactccgtagtga

SEQ ID NO: 5331734 - DNA, 25 bp, Homo sapien
tgggaagccaatcctgtctaacagg

SEQ ID NO: 5331735 - DNA, 25 bp, Homo sapien
aatttaaagtttgtggcatctatcc

SEQ ID NO: 5331736 - DNA, 25 bp, Homo sapien
tttaaagtttgtggcatctatccaa

SEQ ID NO: 5331737 - DNA, 25 bp, Homo sapien
ccatgaaccacacccgtagaagaca

SEQ ID NO: 5331738 - DNA, 25 bp, Homo sapien
atcaataaacctacaatggcctctc

SEQ ID NO: 5331739 - DNA, 25 bp, Homo sapien
acagggcgagctgtccagccgaggg

SEQ ID NO: 5331740 - DNA, 25 bp, Homo sapien
cgagctgtccagccgaggggaccat

SEQ ID NO: 5331741 - DNA, 25 bp, Homo sapien
cgaacagggcgagctgtccagccga

SEQ ID NO: 5331742 - DNA, 25 bp, Homo sapien
ccagagcgaacagggcgagctgtcc

SEQ ID NO: 5331743 - DNA, 25 bp, Homo sapien
gaaaaagacgcagactaggcagggc

SEQ ID NO: 5331744 - DNA, 25 bp, Homo sapien
ataggaaggcggctaccgtcacctc

SEQ ID NO: 5331745 - DNA, 25 bp, Homo sapien
ggcggagggaggaccgagcgcctct

SEQ ID NO: 5331746 - DNA, 25 bp, Homo sapien
aagacgcagactaggcagggcctgc

SEQ ID NO: 5331747 - DNA, 25 bp, Homo sapien
gtgcggcagcggactccagcgtgcg

SEQ ID NO: 5331748 - DNA, 25 bp, Homo sapien
ccgcagtggcggcttccaggctcta

SEQ ID NO: 5331749 - DNA, 25 bp, Homo sapien
tagccggattgtcctgggccgcagt

SEQ ID NO: 5331750 - DNA, 25 bp, Homo sapien
caggaagcgcctgacttcagacacc

SEQ ID NO: 5331751 - DNA, 25 bp, Homo sapien
ggaagacattctgggcgaagagtgg

SEQ ID NO: 5331752 - DNA, 25 bp, Homo sapien
tggaagatccataggttcctcggtg

SEQ ID NO: 5331753 - DNA, 25 bp, Homo sapien
aagatccataggttcctcggtgacc

SEQ ID NO: 5331754 - DNA, 25 bp, Homo sapien
aagagtggaagatccataggttcct

SEQ ID NO: 5331755 - DNA, 25 bp, Homo sapien
gttctccaggtacccggagctcacg

SEQ ID NO: 5331756 - DNA, 25 bp, Homo sapien
gctccgggtagatccactttccttg

SEQ ID NO: 5331757 - DNA, 25 bp, Homo sapien
aggtacccggagctcacggactgac

SEQ ID NO: 5331758 - DNA, 25 bp, Homo sapien
tcctctggcctacgtgctccgggta

SEQ ID NO: 5331759 - DNA, 25 bp, Homo sapien
gatactgctcgttcctggaacaagg

SEQ ID NO: 5331760 - DNA, 25 bp, Homo sapien
ctgtgatgggccgatactgctcgtt

SEQ ID NO: 5331761 - DNA, 25 bp, Homo sapien
gtcttccactgtccaacacaaagga

SEQ ID NO: 5331762 - DNA, 25 bp, Homo sapien
tccactgtccaacacaaaggacaga

SEQ ID NO: 5331763 - DNA, 25 bp, Homo sapien
cacttctgtcttgtaggaccggctc

SEQ ID NO: 5331764 - DNA, 25 bp, Homo sapien
gccatgagctaaagaaaagtcatca

SEQ ID NO: 5331765 - DNA, 25 bp, Homo sapien
ctgccatgagctaaagaaaagtcat

SEQ ID NO: 5331766 - DNA, 25 bp, Homo sapien
tgtcttgtaggaccggctcttcagg

SEQ ID NO: 5331767 - DNA, 25 bp, Homo sapien
cttgccgctttcaggtacgggaatc

SEQ ID NO: 5331768 - DNA, 25 bp, Homo sapien
gtacgggaatcttgacaccaaacat

SEQ ID NO: 5331769 - DNA, 25 bp, Homo sapien
cgctttcaggtacgggaatcttgac

SEQ ID NO: 5331770 - DNA, 25 bp, Homo sapien
tcaggtacgggaatcttgacaccaa

SEQ ID NO: 5331771 - DNA, 25 bp, Homo sapien
ctctcactggattctcttggccttg

SEQ ID NO: 5331772 - DNA, 25 bp, Homo sapien
tggccttgcaggcatcttggggtgg

SEQ ID NO: 5331773 - DNA, 25 bp, Homo sapien
tctcactggattctcttggccttgc

SEQ ID NO: 5331774 - DNA, 25 bp, Homo sapien
gtggtcagtggaaggatccccagaa

SEQ ID NO: 5331775 - DNA, 25 bp, Homo sapien
ctgtgaggtttttgtacaccagggc

SEQ ID NO: 5331776 - DNA, 25 bp, Homo sapien
ggaccaaggcccgagaacacattta

SEQ ID NO: 5331777 - DNA, 25 bp, Homo sapien
catttatccagtgaaagcgctgtga

SEQ ID NO: 5331778 - DNA, 25 bp, Homo sapien
tccccttgcagttctgatatttgaa

SEQ ID NO: 5331779 - DNA, 25 bp, Homo sapien
gaggcccagaggactaattacagta

SEQ ID NO: 5331780 - DNA, 25 bp, Homo sapien
ccagagcagagctggtagccatagt

SEQ ID NO: 5331781 - DNA, 25 bp, Homo sapien
gtgagtgaaataagagctgaggccc

SEQ ID NO: 5331782 - DNA, 25 bp, Homo sapien
acagctcgggtatccacagtttggg

SEQ ID NO: 5331783 - DNA, 25 bp, Homo sapien
tctggctgctaccaatagtcttgtt

SEQ ID NO: 5331784 - DNA, 25 bp, Homo sapien
agctggtgaccaggcactggaacac

SEQ ID NO: 5331785 - DNA, 25 bp, Homo sapien
gcacaactgcctcttagcccatgaa

SEQ ID NO: 5331786 - DNA, 25 bp, Homo sapien
tgccgtgggtcgagaagttactgct

SEQ ID NO: 5331787 - DNA, 25 bp, Homo sapien
ctgaaatttgctgagtctttggatc

SEQ ID NO: 5331788 - DNA, 25 bp, Homo sapien
agccacattggagcctgctgattct

SEQ ID NO: 5331789 - DNA, 25 bp, Homo sapien
aatttgctgagtctttggatccaca

SEQ ID NO: 5331790 - DNA, 25 bp, Homo sapien
cacagagcttctaaccctgctggag

SEQ ID NO: 5331791 - DNA, 25 bp, Homo sapien
cttctggctcagtgaagacatgaca

SEQ ID NO: 5331792 - DNA, 25 bp, Homo sapien
caaggcttgagtggcctttaggtta

SEQ ID NO: 5331793 - DNA, 25 bp, Homo sapien
cgcttctggctcagtgaagacatga

SEQ ID NO: 5331794 - DNA, 25 bp, Homo sapien
ggcaaggcttgagtggcctttaggt

SEQ ID NO: 5331795 - DNA, 25 bp, Homo sapien
ctcttcaatttacagcctccaggat

SEQ ID NO: 5331796 - DNA, 25 bp, Homo sapien
ggcatttggagggtgtctaaccaca

SEQ ID NO: 5331797 - DNA, 25 bp, Homo sapien
tcttcaatttacagcctccaggatc

SEQ ID NO: 5331798 - DNA, 25 bp, Homo sapien
atttggagggtgtctaaccacagac

SEQ ID NO: 5331799 - DNA, 25 bp, Homo sapien
catgcccaggcatgtctgctactga

SEQ ID NO: 5331800 - DNA, 25 bp, Homo sapien
tgctactgacgtcctcatccatgaa

SEQ ID NO: 5331801 - DNA, 25 bp, Homo sapien
cctcatccatgaaattcccaatatc

SEQ ID NO: 5331802 - DNA, 25 bp, Homo sapien
acgtgcgtggtagcaggtggtctgc

SEQ ID NO: 5331803 - DNA, 25 bp, Homo sapien
gaatcatctcttaggttgccaagac

SEQ ID NO: 5331804 - DNA, 25 bp, Homo sapien
tgtaggaactcctgccaactcagct

SEQ ID NO: 5331805 - DNA, 25 bp, Homo sapien
tcagctcttggcttggtgacccgag

SEQ ID NO: 5331806 - DNA, 25 bp, Homo sapien
tatatttcactgcttgggcaccgaa

SEQ ID NO: 5331807 - DNA, 25 bp, Homo sapien
ctttggggtaccagagtggcacgtc

SEQ ID NO: 5331808 - DNA, 25 bp, Homo sapien
aaccctgagcaaagacttcacgctg

SEQ ID NO: 5331809 - DNA, 25 bp, Homo sapien
cctgcaatctgcttgtaaccctgag

SEQ ID NO: 5331810 - DNA, 25 bp, Homo sapien
agggcctggtgctggtccccttggc

SEQ ID NO: 5331811 - DNA, 25 bp, Homo sapien
gatgttctgcttaacccttcccaat

SEQ ID NO: 5331812 - DNA, 25 bp, Homo sapien
tgatgttctgcttaacccttcccaa

SEQ ID NO: 5331813 - DNA, 25 bp, Homo sapien
atgatgttctgcttaacccttccca

SEQ ID NO: 5331814 - DNA, 25 bp, Homo sapien
gctgccacgtctgtaacgatgctgc

SEQ ID NO: 5331815 - DNA, 25 bp, Homo sapien
tgtaacgatgctgccacgtctgtaa

SEQ ID NO: 5331816 - DNA, 25 bp, Homo sapien
tctgtaacgatgctgccacgtctgt

SEQ ID NO: 5331817 - DNA, 25 bp, Homo sapien
tgctgccacgtctgtaacgatgctg

SEQ ID NO: 5331818 - DNA, 25 bp, Homo sapien
tagtcctgtatagcccaagtccggt

SEQ ID NO: 5331819 - DNA, 25 bp, Homo sapien
tacagtactaccaaaggttccagag

SEQ ID NO: 5331820 - DNA, 25 bp, Homo sapien
ctagcaaggctaggagatccagagg

SEQ ID NO: 5331821 - DNA, 25 bp, Homo sapien
ggttccagagatccataaagcacta

SEQ ID NO: 5331822 - DNA, 25 bp, Homo sapien
cagcatggaatgcatgggggcactc

SEQ ID NO: 5331823 - DNA, 25 bp, Homo sapien
cctcgcttctgggtgccctgtgcgt

SEQ ID NO: 5331824 - DNA, 25 bp, Homo sapien
gccctgtgcgttttgttctcctgca

SEQ ID NO: 5331825 - DNA, 25 bp, Homo sapien
catgggggcactcctcgcttctggg

SEQ ID NO: 5331826 - DNA, 25 bp, Homo sapien
atgacagaaagataaagtgtatctt

SEQ ID NO: 5331827 - DNA, 25 bp, Homo sapien
ttcagagaggacctcagatgactgt

SEQ ID NO: 5331828 - DNA, 25 bp, Homo sapien
cagaaagataaagtgtatcttttca

SEQ ID NO: 5331829 - DNA, 25 bp, Homo sapien
gagaggacctcagatgactgtggca

SEQ ID NO: 5331830 - DNA, 25 bp, Homo sapien
agactccagtaaaatgatggtgaag

SEQ ID NO: 5331831 - DNA, 25 bp, Homo sapien
ctgagactccagtaaaatgatggtg

SEQ ID NO: 5331832 - DNA, 25 bp, Homo sapien
tgagactccagtaaaatgatggtga

SEQ ID NO: 5331833 - DNA, 25 bp, Homo sapien
gagactccagtaaaatgatggtgaa

SEQ ID NO: 5331834 - DNA, 25 bp, Homo sapien
tgcaatgtcaggaccactgtcctct

SEQ ID NO: 5331835 - DNA, 25 bp, Homo sapien
cctgcctctgagaagatgcaatgtc

SEQ ID NO: 5331836 - DNA, 25 bp, Homo sapien
tgagaagatgcaatgtcaggaccac

SEQ ID NO: 5331837 - DNA, 25 bp, Homo sapien
aagatgcaatgtcaggaccactgtc

SEQ ID NO: 5331838 - DNA, 25 bp, Homo sapien
tcaagggcccagtgaagtggccaca

SEQ ID NO: 5331839 - DNA, 25 bp, Homo sapien
cagagccttttgtatgaagagggcc

SEQ ID NO: 5331840 - DNA, 25 bp, Homo sapien
tagacatgctgggtaatgacatcct

SEQ ID NO: 5331841 - DNA, 25 bp, Homo sapien
agatgcagggaaaccgtcatgcgct

SEQ ID NO: 5331842 - DNA, 25 bp, Homo sapien
tcagagctttctccccctaagcagg

SEQ ID NO: 5331843 - DNA, 25 bp, Homo sapien
tgctgggcaccgggctgagcaccat

SEQ ID NO: 5331844 - DNA, 25 bp, Homo sapien
caccatggttacactgggtggagga

SEQ ID NO: 5331845 - DNA, 25 bp, Homo sapien
tgagccatgggagaccacacttgca

SEQ ID NO: 5331846 - DNA, 25 bp, Homo sapien
gccttctcatgatataacatgccca

SEQ ID NO: 5331847 - DNA, 25 bp, Homo sapien
ttctcatgatataacatgcccagga

SEQ ID NO: 5331848 - DNA, 25 bp, Homo sapien
tgcaggcaggttctttacccggaag

SEQ ID NO: 5331849 - DNA, 25 bp, Homo sapien
gacaggccagcacgtagtggtacca

SEQ ID NO: 5331850 - DNA, 25 bp, Homo sapien
tgacaagaagagaccaaggtttgtg

SEQ ID NO: 5331851 - DNA, 25 bp, Homo sapien
ccaaggtttgtgatggtactgctgg

SEQ ID NO: 5331852 - DNA, 25 bp, Homo sapien
gctgggggctgcctgtcagaaaaag

SEQ ID NO: 5331853 - DNA, 25 bp, Homo sapien
ttgctggtgacaagaagagaccaag

SEQ ID NO: 5331854 - DNA, 25 bp, Homo sapien
gactcaatctgaaaccctcccttaa

SEQ ID NO: 5331855 - DNA, 25 bp, Homo sapien
ccagtctcaggtaatctgtttagca

SEQ ID NO: 5331856 - DNA, 25 bp, Homo sapien
cagcttccagatgtgagagaaataa

SEQ ID NO: 5331857 - DNA, 25 bp, Homo sapien
gaaagaaggcttcaccaaatgctgg

SEQ ID NO: 5331858 - DNA, 25 bp, Homo sapien
ggaagaggggctctacccttggata

SEQ ID NO: 5331859 - DNA, 25 bp, Homo sapien
ggctctacccttggatacaggcagt

SEQ ID NO: 5331860 - DNA, 25 bp, Homo sapien
ccttgtttccaagtttacaggagct

SEQ ID NO: 5331861 - DNA, 25 bp, Homo sapien
ttacaggagctgtggaaacttcagg

SEQ ID NO: 5331862 - DNA, 25 bp, Homo sapien
gatttactagggtcatgtctgcagg

SEQ ID NO: 5331863 - DNA, 25 bp, Homo sapien
tagactgggttcctgcttgcctgca

SEQ ID NO: 5331864 - DNA, 25 bp, Homo sapien
tacagaaattcacgggcagagatgc

SEQ ID NO: 5331865 - DNA, 25 bp, Homo sapien
tcacagctggcctcagttcgggaca

SEQ ID NO: 5331866 - DNA, 25 bp, Homo sapien
cattcagccaccaaagggattttcc

SEQ ID NO: 5331867 - DNA, 25 bp, Homo sapien
tatcaatagaaagtgggcccatggc

SEQ ID NO: 5331868 - DNA, 25 bp, Homo sapien
tcaaaaaggcctcatagctcccatg

SEQ ID NO: 5331869 - DNA, 25 bp, Homo sapien
gaaacatcgtgtaaagcaggccatc

SEQ ID NO: 5331870 - DNA, 25 bp, Homo sapien
catcaagggattggcttttaaaggc

SEQ ID NO: 5331871 - DNA, 25 bp, Homo sapien
gcatgagtgggttgtccctcctaaa

SEQ ID NO: 5331872 - DNA, 25 bp, Homo sapien
ggtgctcagtggatccttaacaaat

SEQ ID NO: 5331873 - DNA, 25 bp, Homo sapien
aatgatggctctctttcaacgtcag

SEQ ID NO: 5331874 - DNA, 25 bp, Homo sapien
aggctcttgcctctcctttgtcaga

SEQ ID NO: 5331875 - DNA, 25 bp, Homo sapien
aatagccaactatggatggtatttc

SEQ ID NO: 5331876 - DNA, 25 bp, Homo sapien
caactatggatggtatttcccgccc

SEQ ID NO: 5331877 - DNA, 25 bp, Homo sapien
tatggatggtatttcccgccccaac

SEQ ID NO: 5331878 - DNA, 25 bp, Homo sapien
tgccctaggctcagattggtggaca

SEQ ID NO: 5331879 - DNA, 25 bp, Homo sapien
gatctttctagccaagtcagctggg

SEQ ID NO: 5331880 - DNA, 25 bp, Homo sapien
caaggtgccaagagtaagatgccag

SEQ ID NO: 5331881 - DNA, 25 bp, Homo sapien
ttccgaatgtggtccagggtcctac

SEQ ID NO: 5331882 - DNA, 25 bp, Homo sapien
tgtccttagaggtatcaacatccgt

SEQ ID NO: 5331883 - DNA, 25 bp, Homo sapien
ctgtggtggcggctttgcttgtttc

SEQ ID NO: 5331884 - DNA, 25 bp, Homo sapien
ggcctttgctgaggatttcctctgc

SEQ ID NO: 5331885 - DNA, 25 bp, Homo sapien
tgaccgactcggttttgtccttaga

SEQ ID NO: 5331886 - DNA, 25 bp, Homo sapien
ctagaaaaagatcaaaagatatgac

SEQ ID NO: 5331887 - DNA, 25 bp, Homo sapien
cttccacctggggctaacagaacca

SEQ ID NO: 5331888 - DNA, 25 bp, Homo sapien
tgtaagatttcattcaggtgacagc

SEQ ID NO: 5331889 - DNA, 25 bp, Homo sapien
agatttcattcaggtgacagcttcc

SEQ ID NO: 5331890 - DNA, 25 bp, Homo sapien
ttccacctggggctaacagaaccat

SEQ ID NO: 5331891 - DNA, 25 bp, Homo sapien
ccaagtgaggtcagatgaaggctca

SEQ ID NO: 5331892 - DNA, 25 bp, Homo sapien
gacattggacaatgagctcgccttc

SEQ ID NO: 5331893 - DNA, 25 bp, Homo sapien
tgtttactgctgctgacgtctgcca

SEQ ID NO: 5331894 - DNA, 25 bp, Homo sapien
tcaacagaggatgccttgtatcagc

SEQ ID NO: 5331895 - DNA, 25 bp, Homo sapien
gtggccgtgcactggggtaaagaca

SEQ ID NO: 5331896 - DNA, 25 bp, Homo sapien
tggccgtgcactggggtaaagacat

SEQ ID NO: 5331897 - DNA, 25 bp, Homo sapien
ctcttctgtggccgtgcactggggt

SEQ ID NO: 5331898 - DNA, 25 bp, Homo sapien
ttctgtggccgtgcactggggtaaa

SEQ ID NO: 5331899 - DNA, 25 bp, Homo sapien
tgctgacgcgcttctgaacacaagg

SEQ ID NO: 5331900 - DNA, 25 bp, Homo sapien
gaagccctctctttgcagcagggaa

SEQ ID NO: 5331901 - DNA, 25 bp, Homo sapien
caaggtcaatcagatggatcctgac

SEQ ID NO: 5331902 - DNA, 25 bp, Homo sapien
gctgacatctcaggctcaaacacat

SEQ ID NO: 5331903 - DNA, 25 bp, Homo sapien
aactggtcactgccatgtacagctt

SEQ ID NO: 5331904 - DNA, 25 bp, Homo sapien
agaactggtcactgccatgtacagc

SEQ ID NO: 5331905 - DNA, 25 bp, Homo sapien
ttgaaaaggcagtgccacaccattg

SEQ ID NO: 5331906 - DNA, 25 bp, Homo sapien
cttgaaaaggcagtgccacaccatt

SEQ ID NO: 5331907 - DNA, 25 bp, Homo sapien
atagtttgcttgtggagggagctca

SEQ ID NO: 5331908 - DNA, 25 bp, Homo sapien
tgggggattctatcagaatccacac

SEQ ID NO: 5331909 - DNA, 25 bp, Homo sapien
tgcacaggaggcaatagtttgcttg

SEQ ID NO: 5331910 - DNA, 25 bp, Homo sapien
agcagacgggtttcttctggcaaca

SEQ ID NO: 5331911 - DNA, 25 bp, Homo sapien
attccaataggccaccagatttctg

SEQ ID NO: 5331912 - DNA, 25 bp, Homo sapien
aagattccaataggccaccagattt

SEQ ID NO: 5331913 - DNA, 25 bp, Homo sapien
caataggccaccagatttctgctct

SEQ ID NO: 5331914 - DNA, 25 bp, Homo sapien
tccaataggccaccagatttctgct

SEQ ID NO: 5331915 - DNA, 25 bp, Homo sapien
ctttgcaggtgagccaggctcttct

SEQ ID NO: 5331916 - DNA, 25 bp, Homo sapien
tgcaggtgagccaggctcttctggg

SEQ ID NO: 5331917 - DNA, 25 bp, Homo sapien
ttgcaggtgagccaggctcttctgg

SEQ ID NO: 5331918 - DNA, 25 bp, Homo sapien
gcaggtgcagactttgcaggtgagc

SEQ ID NO: 5331919 - DNA, 25 bp, Homo sapien
caatatgttactccagatgtggagg

SEQ ID NO: 5331920 - DNA, 25 bp, Homo sapien
ctgaagaactcgcacacggccggac

SEQ ID NO: 5331921 - DNA, 25 bp, Homo sapien
atgtggagggcaacgctgaagaact

SEQ ID NO: 5331922 - DNA, 25 bp, Homo sapien
gagcctggctctcgttcctgtcctg

SEQ ID NO: 5331923 - DNA, 25 bp, Homo sapien
catcaagttctagtttcttcctctc

SEQ ID NO: 5331924 - DNA, 25 bp, Homo sapien
tcaagttctagtttcttcctctcca

SEQ ID NO: 5331925 - DNA, 25 bp, Homo sapien
atcaagttctagtttcttcctctcc

SEQ ID NO: 5331926 - DNA, 25 bp, Homo sapien
caagttctagtttcttcctctccac

SEQ ID NO: 5331927 - DNA, 25 bp, Homo sapien
caccgtctcctctgaatcgtctttg

SEQ ID NO: 5331928 - DNA, 25 bp, Homo sapien
ctgaaggggttgggcaccgtctcct

SEQ ID NO: 5331929 - DNA, 25 bp, Homo sapien
ctcctggtcagtgagttggctgaag

SEQ ID NO: 5331930 - DNA, 25 bp, Homo sapien
ggtatcctcgtctcccttggacatc

SEQ ID NO: 5331931 - DNA, 25 bp, Homo sapien
gagggtgtgtcgctctctgaacgcc

SEQ ID NO: 5331932 - DNA, 25 bp, Homo sapien
ctgaaagttaaccacagagggtgtg

SEQ ID NO: 5331933 - DNA, 25 bp, Homo sapien
ttccttttagattcatgtggctgca

SEQ ID NO: 5331934 - DNA, 25 bp, Homo sapien
tcgctctctgaacgccgcagttggg

SEQ ID NO: 5331935 - DNA, 25 bp, Homo sapien
tttgacccctctagcccaagatagg

SEQ ID NO: 5331936 - DNA, 25 bp, Homo sapien
ttccatggcaggaggtacggaagcc

SEQ ID NO: 5331937 - DNA, 25 bp, Homo sapien
tagggaatcatggagtcaaccgaga

SEQ ID NO: 5331938 - DNA, 25 bp, Homo sapien
aatacagttggtggcccaaagccag

SEQ ID NO: 5331939 - DNA, 25 bp, Homo sapien
ggcaaacacgtttccccgccagtca

SEQ ID NO: 5331940 - DNA, 25 bp, Homo sapien
cacgtttccccgccagtcaggggca

SEQ ID NO: 5331941 - DNA, 25 bp, Homo sapien
gcaaacacgtttccccgccagtcag

SEQ ID NO: 5331942 - DNA, 25 bp, Homo sapien
tttccccgccagtcaggggcagcct

SEQ ID NO: 5331943 - DNA, 25 bp, Homo sapien
gctgggactgaggccccgctgactt

SEQ ID NO: 5331944 - DNA, 25 bp, Homo sapien
cacatcttgtcggttttgttctcga

SEQ ID NO: 5331945 - DNA, 25 bp, Homo sapien
tcttctcggcaatgacgctcgccag

SEQ ID NO: 5331946 - DNA, 25 bp, Homo sapien
gaggccccgctgacttcacatcttg

SEQ ID NO: 5331947 - DNA, 25 bp, Homo sapien
tgtggaaaggggagaggaagagtga

SEQ ID NO: 5331948 - DNA, 25 bp, Homo sapien
gtggaaaggggagaggaagagtgag

SEQ ID NO: 5331949 - DNA, 25 bp, Homo sapien
gtgtggaaaggggagaggaagagtg

SEQ ID NO: 5331950 - DNA, 25 bp, Homo sapien
ctgtgtggaaaggggagaggaagag

SEQ ID NO: 5331951 - DNA, 25 bp, Homo sapien
gggtcagtatagagaggcacaaatt

SEQ ID NO: 5331952 - DNA, 25 bp, Homo sapien
gctggatttctccacctcgtcagcc

SEQ ID NO: 5331953 - DNA, 25 bp, Homo sapien
ttggtttgggttttcgatgcgaatc

SEQ ID NO: 5331954 - DNA, 25 bp, Homo sapien
tgcgaatcggcatgccactgctgga

SEQ ID NO: 5331955 - DNA, 25 bp, Homo sapien
gaagtcccaatgttaaatgctcctc

SEQ ID NO: 5331956 - DNA, 25 bp, Homo sapien
tgggcttgcatcagatctgaagtcc

SEQ ID NO: 5331957 - DNA, 25 bp, Homo sapien
ggcttgcatcagatctgaagtccca

SEQ ID NO: 5331958 - DNA, 25 bp, Homo sapien
gtcccaatgttaaatgctcctccct

SEQ ID NO: 5331959 - DNA, 25 bp, Homo sapien
cctcaaacacgaaggctgtgaccgt

SEQ ID NO: 5331960 - DNA, 25 bp, Homo sapien
atcggccacattgacccgcaggtag

SEQ ID NO: 5331961 - DNA, 25 bp, Homo sapien
gggtggcgatacgtgtaacctgttc

SEQ ID NO: 5331962 - DNA, 25 bp, Homo sapien
cgtattgagccagcgggtcttctcc

SEQ ID NO: 5331963 - DNA, 25 bp, Homo sapien
ccactcttctggtatatttcagaac

SEQ ID NO: 5331964 - DNA, 25 bp, Homo sapien
tttccactcttctggtatatttcag

SEQ ID NO: 5331965 - DNA, 25 bp, Homo sapien
ttccttccgtctgcttaaaggactc

SEQ ID NO: 5331966 - DNA, 25 bp, Homo sapien
tccttccgtctgcttaaaggactct

SEQ ID NO: 5331967 - DNA, 25 bp, Homo sapien
gacttttcatagaggacactgcaga

SEQ ID NO: 5331968 - DNA, 25 bp, Homo sapien
caaatttcccatcaatgaggcttca

SEQ ID NO: 5331969 - DNA, 25 bp, Homo sapien
cacagcacttagttgtgggtggcaa

SEQ ID NO: 5331970 - DNA, 25 bp, Homo sapien
gcccggcctggactacgacttttca

SEQ ID NO: 5331971 - DNA, 25 bp, Homo sapien
tggttccagggggctaagcctcaat

SEQ ID NO: 5331972 - DNA, 25 bp, Homo sapien
ttccagggggctaagcctcaatgga

SEQ ID NO: 5331973 - DNA, 25 bp, Homo sapien
ccagggggctaagcctcaatggact

SEQ ID NO: 5331974 - DNA, 25 bp, Homo sapien
ggttccagggggctaagcctcaatg

SEQ ID NO: 5331975 - DNA, 25 bp, Homo sapien
ccactgcacggagcccacctcatgg

SEQ ID NO: 5331976 - DNA, 25 bp, Homo sapien
ggaggatgaggttctccactccccc

SEQ ID NO: 5331977 - DNA, 25 bp, Homo sapien
ccccagccgactcttctgcataggc

SEQ ID NO: 5331978 - DNA, 25 bp, Homo sapien
tgcataggcccaaaggtgctcccgg

SEQ ID NO: 5331979 - DNA, 25 bp, Homo sapien
actccatggtttcttagcaccagga

SEQ ID NO: 5331980 - DNA, 25 bp, Homo sapien
taaaatgcctcctctaccgtgtcac

SEQ ID NO: 5331981 - DNA, 25 bp, Homo sapien
cttgtaaaatgcctcctctaccgtg

SEQ ID NO: 5331982 - DNA, 25 bp, Homo sapien
cacccagagcaaccactccatggtt

SEQ ID NO: 5331983 - DNA, 25 bp, Homo sapien
ccttttaatgttcaaccacagaaga

SEQ ID NO: 5331984 - DNA, 25 bp, Homo sapien
aactattcccataatgaagtctgtg

SEQ ID NO: 5331985 - DNA, 25 bp, Homo sapien
caccttctggagtcaatcgatcctc

SEQ ID NO: 5331986 - DNA, 25 bp, Homo sapien
ttactatatattgctgagggaaaac

SEQ ID NO: 5331987 - DNA, 25 bp, Homo sapien
tgcaggtgggtccaaggcacttctg

SEQ ID NO: 5331988 - DNA, 25 bp, Homo sapien
aggaggccccacttcatggccgaca

SEQ ID NO: 5331989 - DNA, 25 bp, Homo sapien
tgaagtcataataggccatgtcccc

SEQ ID NO: 5331990 - DNA, 25 bp, Homo sapien
gcacttctgcaggttgatccgatcg

SEQ ID NO: 5331991 - DNA, 25 bp, Homo sapien
tgtgttttgctgagaaaacgggctg

SEQ ID NO: 5331992 - DNA, 25 bp, Homo sapien
ttcacatcttagtccaaattctgga

SEQ ID NO: 5331993 - DNA, 25 bp, Homo sapien
tgagaaaacgggctgatgacaagtc

SEQ ID NO: 5331994 - DNA, 25 bp, Homo sapien
acgggctgatgacaagtcagcctac

SEQ ID NO: 5331995 - DNA, 25 bp, Homo sapien
tgccgtctttccaagtgacatcgca

SEQ ID NO: 5331996 - DNA, 25 bp, Homo sapien
gtctttccaagtgacatcgcagtgt

SEQ ID NO: 5331997 - DNA, 25 bp, Homo sapien
cgtctttccaagtgacatcgcagtg

SEQ ID NO: 5331998 - DNA, 25 bp, Homo sapien
gccgtctttccaagtgacatcgcag

SEQ ID NO: 5331999 - DNA, 25 bp, Homo sapien
tacacatggagaaatgatcagaggg

SEQ ID NO: 5332000 - DNA, 25 bp, Homo sapien
taggtacacatggagaaatgatcag

SEQ ID NO: 5332001 - DNA, 25 bp, Homo sapien
cagagggggacaacctgctcattga

SEQ ID NO: 5332002 - DNA, 25 bp, Homo sapien
cctgctcattgagtctcttctttgt

SEQ ID NO: 5332003 - DNA, 25 bp, Homo sapien
gggatgcgatggaacagacattcca

SEQ ID NO: 5332004 - DNA, 25 bp, Homo sapien
actgacctgagtagaaacttagcag

SEQ ID NO: 5332005 - DNA, 25 bp, Homo sapien
cctgagctatgggaaaacgggcaca

SEQ ID NO: 5332006 - DNA, 25 bp, Homo sapien
cactaactggttgtcctctgtcaag

SEQ ID NO: 5332007 - DNA, 25 bp, Homo sapien
ggcctgagttctagatctttccaga

SEQ ID NO: 5332008 - DNA, 25 bp, Homo sapien
acttcagtagtcagaaagatggaga

SEQ ID NO: 5332009 - DNA, 25 bp, Homo sapien
tgggagttctctcgcttcaccttgg

SEQ ID NO: 5332010 - DNA, 25 bp, Homo sapien
tttccagactgttttaagtgacgag

SEQ ID NO: 5332011 - DNA, 25 bp, Homo sapien
cttgggtggctgagaaggagtccac

SEQ ID NO: 5332012 - DNA, 25 bp, Homo sapien
ggtggctgagaaggagtccactcac

SEQ ID NO: 5332013 - DNA, 25 bp, Homo sapien
ccttgggtggctgagaaggagtcca

SEQ ID NO: 5332014 - DNA, 25 bp, Homo sapien
tgggtggctgagaaggagtccactc

SEQ ID NO: 5332015 - DNA, 25 bp, Homo sapien
atggccgagtgcagacagaagcctg

SEQ ID NO: 5332016 - DNA, 25 bp, Homo sapien
gcacgtcgggcctcgctgcatagat

SEQ ID NO: 5332017 - DNA, 25 bp, Homo sapien
ctcgctgcatagatggccgagtgca

SEQ ID NO: 5332018 - DNA, 25 bp, Homo sapien
atgatgcagcgcacgtcgggcctcg

SEQ ID NO: 5332019 - DNA, 25 bp, Homo sapien
tcccttagggctgatcaggaagtgg

SEQ ID NO: 5332020 - DNA, 25 bp, Homo sapien
cttagggctgatcaggaagtggtcc

SEQ ID NO: 5332021 - DNA, 25 bp, Homo sapien
gaaactcccttagggctgatcagga

SEQ ID NO: 5332022 - DNA, 25 bp, Homo sapien
caagaaactcccttagggctgatca

SEQ ID NO: 5332023 - DNA, 25 bp, Homo sapien
gagtcggtagacactgctgatcttg

SEQ ID NO: 5332024 - DNA, 25 bp, Homo sapien
tggaggtcattgataggcgtcatca

SEQ ID NO: 5332025 - DNA, 25 bp, Homo sapien
ggcccagccatagaggtccaggagt

SEQ ID NO: 5332026 - DNA, 25 bp, Homo sapien
tgagccgctcccctttggccaggtt

SEQ ID NO: 5332027 - DNA, 25 bp, Homo sapien
gaagatgggcactgaatcaaagcaa

SEQ ID NO: 5332028 - DNA, 25 bp, Homo sapien
agatgggcactgaatcaaagcaaga

SEQ ID NO: 5332029 - DNA, 25 bp, Homo sapien
taaactctgaagatgggcactgaat

SEQ ID NO: 5332030 - DNA, 25 bp, Homo sapien
tctgaagatgggcactgaatcaaag

SEQ ID NO: 5332031 - DNA, 25 bp, Homo sapien
tctgtgaaacttgctgcagtacgat

SEQ ID NO: 5332032 - DNA, 25 bp, Homo sapien
tctacaaaagcgagggcggacgatg

SEQ ID NO: 5332033 - DNA, 25 bp, Homo sapien
gcagtacgatgtatatcctgcatcg

SEQ ID NO: 5332034 - DNA, 25 bp, Homo sapien
gcggacgatgtatgtcctgcatcga

SEQ ID NO: 5332035 - DNA, 25 bp, Homo sapien
cacaagggccttgccaaccagaggt

SEQ ID NO: 5332036 - DNA, 25 bp, Homo sapien
cagaggtgatacacctccagggcag

SEQ ID NO: 5332037 - DNA, 25 bp, Homo sapien
gcagagtaggccttgaatcacccat

SEQ ID NO: 5332038 - DNA, 25 bp, Homo sapien
tgtcaggaaacgcacacaagggcct

SEQ ID NO: 5332039 - DNA, 25 bp, Homo sapien
tagcctggcaaccagatgcttcttg

SEQ ID NO: 5332040 - DNA, 25 bp, Homo sapien
ccaaggcctgataacacaatgggct

SEQ ID NO: 5332041 - DNA, 25 bp, Homo sapien
tcctctcagccctcatctgtggagt

SEQ ID NO: 5332042 - DNA, 25 bp, Homo sapien
tatgggcagagcataacagcccagg

SEQ ID NO: 5332043 - DNA, 25 bp, Homo sapien
tggcagctccccagacaccacatac

SEQ ID NO: 5332044 - DNA, 25 bp, Homo sapien
gctcctggcagctccccagacacca

SEQ ID NO: 5332045 - DNA, 25 bp, Homo sapien
cctggcagctccccagacaccacat

SEQ ID NO: 5332046 - DNA, 25 bp, Homo sapien
ctctgctcctggcagctccccagac

SEQ ID NO: 5332047 - DNA, 25 bp, Homo sapien
tgaagtccgcgatctgtcgcagggc

SEQ ID NO: 5332048 - DNA, 25 bp, Homo sapien
aagatgtcgggaagactgcgtggga

SEQ ID NO: 5332049 - DNA, 25 bp, Homo sapien
tccgcgatctgtcgcagggcccaga

SEQ ID NO: 5332050 - DNA, 25 bp, Homo sapien
tgctggccatgaagtccgcgatctg

SEQ ID NO: 5332051 - DNA, 25 bp, Homo sapien
tctgctcctggatgaggccttccag

SEQ ID NO: 5332052 - DNA, 25 bp, Homo sapien
catctgctcctggatgaggccttcc

SEQ ID NO: 5332053 - DNA, 25 bp, Homo sapien
gctcctggatgaggccttccagctc

SEQ ID NO: 5332054 - DNA, 25 bp, Homo sapien
tcatctgctcctggatgaggccttc

SEQ ID NO: 5332055 - DNA, 25 bp, Homo sapien
cccggttgcgaaggcgcatgtactc

SEQ ID NO: 5332056 - DNA, 25 bp, Homo sapien
ccgcccggttgcgaaggcgcatgta

SEQ ID NO: 5332057 - DNA, 25 bp, Homo sapien
tactcggggtcgtcctctgagaagc

SEQ ID NO: 5332058 - DNA, 25 bp, Homo sapien
ggatcatggtgacgcgcttcttctg

SEQ ID NO: 5332059 - DNA, 25 bp, Homo sapien
ccggtgggtttgcaattcgctcctg

SEQ ID NO: 5332060 - DNA, 25 bp, Homo sapien
ggtgggtttgcaattcgctcctgga

SEQ ID NO: 5332061 - DNA, 25 bp, Homo sapien
tgggtttgcaattcgctcctggaac

SEQ ID NO: 5332062 - DNA, 25 bp, Homo sapien
ttcccggtgggtttgcaattcgctc

SEQ ID NO: 5332063 - DNA, 25 bp, Homo sapien
gagcatattcttgttgtccctgagc

SEQ ID NO: 5332064 - DNA, 25 bp, Homo sapien
tcagaagctcattacaaaggaggct

SEQ ID NO: 5332065 - DNA, 25 bp, Homo sapien
gagaatgatgccatagataagcttg

SEQ ID NO: 5332066 - DNA, 25 bp, Homo sapien
tgctgatgtccagtagagcatattc

SEQ ID NO: 5332067 - DNA, 25 bp, Homo sapien
gacggagatgaagggtcggaggtag

SEQ ID NO: 5332068 - DNA, 25 bp, Homo sapien
aatatttgataataggggacggaga

SEQ ID NO: 5332069 - DNA, 25 bp, Homo sapien
cggagatgaagggtcggaggtaggg

SEQ ID NO: 5332070 - DNA, 25 bp, Homo sapien
tatttgataataggggacggagatg

SEQ ID NO: 5332071 - DNA, 25 bp, Homo sapien
atggaagccctgactccatcaccat

SEQ ID NO: 5332072 - DNA, 25 bp, Homo sapien
gggtggtgtaggacatggaagccct

SEQ ID NO: 5332073 - DNA, 25 bp, Homo sapien
tgccttcccttcttagagccctgcc

SEQ ID NO: 5332074 - DNA, 25 bp, Homo sapien
gttgctccagaggtactccgatggg

SEQ ID NO: 5332075 - DNA, 25 bp, Homo sapien
tcagtctgcaccccctagctccact

SEQ ID NO: 5332076 - DNA, 25 bp, Homo sapien
ccaaggctccttctgttcactgctc

SEQ ID NO: 5332077 - DNA, 25 bp, Homo sapien
tccaaggctccttctgttcactgct

SEQ ID NO: 5332078 - DNA, 25 bp, Homo sapien
cccctagctccactctcaagggtgc

SEQ ID NO: 5332079 - DNA, 25 bp, Homo sapien
tcttgcctaatttgagacagaaccc

SEQ ID NO: 5332080 - DNA, 25 bp, Homo sapien
gacagaccctgaagggtaaggtgct

SEQ ID NO: 5332081 - DNA, 25 bp, Homo sapien
tatataactgagtggctggcccctc

SEQ ID NO: 5332082 - DNA, 25 bp, Homo sapien
gagctgggccagcttaatgaagcag

SEQ ID NO: 5332083 - DNA, 25 bp, Homo sapien
atccctaaatgagactcccacaagt

SEQ ID NO: 5332084 - DNA, 25 bp, Homo sapien
cgatccctaaatgagactcccacaa

SEQ ID NO: 5332085 - DNA, 25 bp, Homo sapien
gatccctaaatgagactcccacaag

SEQ ID NO: 5332086 - DNA, 25 bp, Homo sapien
ttggattctccttgacttgggcccc

SEQ ID NO: 5332087 - DNA, 25 bp, Homo sapien
gttgctgctggccacggctgtgctt

SEQ ID NO: 5332088 - DNA, 25 bp, Homo sapien
tgacgcagaggcgaggcactgtact

SEQ ID NO: 5332089 - DNA, 25 bp, Homo sapien
tcaggccaggttgcatggctccctg

SEQ ID NO: 5332090 - DNA, 25 bp, Homo sapien
ttttgactgctccagttcatcactc

SEQ ID NO: 5332091 - DNA, 25 bp, Homo sapien
gtcaaccaagaagtagtctcatcct

SEQ ID NO: 5332092 - DNA, 25 bp, Homo sapien
ccaggcagtgctaatgagttttgac

SEQ ID NO: 5332093 - DNA, 25 bp, Homo sapien
cagttcatcactccctaacagggtc

SEQ ID NO: 5332094 - DNA, 25 bp, Homo sapien
ttactccagacaaagcccataccag

SEQ ID NO: 5332095 - DNA, 25 bp, Homo sapien
ccagcagaactttccccttcctcat

SEQ ID NO: 5332096 - DNA, 25 bp, Homo sapien
atgaaacgcttactccagacaaagc

SEQ ID NO: 5332097 - DNA, 25 bp, Homo sapien
aacactccccaacatgtgaccctgc

SEQ ID NO: 5332098 - DNA, 25 bp, Homo sapien
tggacaaaattacatcaaatatact

SEQ ID NO: 5332099 - DNA, 25 bp, Homo sapien
agtatatttgatgtaattttgtcca

SEQ ID NO: 5332100 - DNA, 25 bp, Homo sapien
ccaatcctttgattaagagtctgat

SEQ ID NO: 5332101 - DNA, 25 bp, Homo sapien
cctttgattaagagtctgatgtgca

SEQ ID NO: 5332102 - DNA, 25 bp, Homo sapien
tgtgcagaagagcttcgtgttagtg

SEQ ID NO: 5332103 - DNA, 25 bp, Homo sapien
cagaagagcttcgtgttagtggtgc

SEQ ID NO: 5332104 - DNA, 25 bp, Homo sapien
ggtgaaacatcaagtcaggctcaac

SEQ ID NO: 5332105 - DNA, 25 bp, Homo sapien
tatgacgatatctgcaatcaaagtg

SEQ ID NO: 5332106 - DNA, 25 bp, Homo sapien
aaaagaaatggactgctggttgaag

SEQ ID NO: 5332107 - DNA, 25 bp, Homo sapien
caaagtgatggagctcaaggtgaaa

SEQ ID NO: 5332108 - DNA, 25 bp, Homo sapien
gagataaattgagtccaacccctgt

SEQ ID NO: 5332109 - DNA, 25 bp, Homo sapien
catccaaagccagactatagcctca

SEQ ID NO: 5332110 - DNA, 25 bp, Homo sapien
ggaacagtagattgcttgcccctct

SEQ ID NO: 5332111 - DNA, 25 bp, Homo sapien
tgtgaggtggtatccaaggacaaca

SEQ ID NO: 5332112 - DNA, 25 bp, Homo sapien
taggcatcattgttatccaaatgtc

SEQ ID NO: 5332113 - DNA, 25 bp, Homo sapien
cactctggcaagatagcaacagccc

SEQ ID NO: 5332114 - DNA, 25 bp, Homo sapien
ctgggctaagtgctgagagacagca

SEQ ID NO: 5332115 - DNA, 25 bp, Homo sapien
tttggatagatttacttaggcatca

SEQ ID NO: 5332116 - DNA, 25 bp, Homo sapien
tctctttcagtaacattggcaaagc

SEQ ID NO: 5332117 - DNA, 25 bp, Homo sapien
ctctttcagtaacattggcaaagct

SEQ ID NO: 5332118 - DNA, 25 bp, Homo sapien
gcagacaccgactcccgcctccggg

SEQ ID NO: 5332119 - DNA, 25 bp, Homo sapien
aataagcagacaccgactcccgcct

SEQ ID NO: 5332120 - DNA, 25 bp, Homo sapien
aaataagcagacaccgactcccgcc

SEQ ID NO: 5332121 - DNA, 25 bp, Homo sapien
taagcagacaccgactcccgcctcc

SEQ ID NO: 5332122 - DNA, 25 bp, Homo sapien
gccggttgccccgatctcaatgtag

SEQ ID NO: 5332123 - DNA, 25 bp, Homo sapien
cgcgcagccagcgatcgcgaggccc

SEQ ID NO: 5332124 - DNA, 25 bp, Homo sapien
ccgatctcaatgtaggcggctgccg

SEQ ID NO: 5332125 - DNA, 25 bp, Homo sapien
gttgccccgatctcaatgtaggcgg

SEQ ID NO: 5332126 - DNA, 25 bp, Homo sapien
tcaggcgttacgctccgggcgaggg

SEQ ID NO: 5332127 - DNA, 25 bp, Homo sapien
caggcgttacgctccgggcgagggt

SEQ ID NO: 5332128 - DNA, 25 bp, Homo sapien
agcctcggatgctacatcatcacca

SEQ ID NO: 5332129 - DNA, 25 bp, Homo sapien
ctaagagcctcggatgctacatcat

SEQ ID NO: 5332130 - DNA, 25 bp, Homo sapien
taagagcctcggatgctacatcatc

SEQ ID NO: 5332131 - DNA, 25 bp, Homo sapien
agagcctcggatgctacatcatcac

SEQ ID NO: 5332132 - DNA, 25 bp, Homo sapien
taggcgcaaaacacaccgctgccgg

SEQ ID NO: 5332133 - DNA, 25 bp, Homo sapien
ctttaggcgcaaaacacaccgctgc

SEQ ID NO: 5332134 - DNA, 25 bp, Homo sapien
tttaggcgcaaaacacaccgctgcc

SEQ ID NO: 5332135 - DNA, 25 bp, Homo sapien
gcgcaaaacacaccgctgccggcca

SEQ ID NO: 5332136 - DNA, 25 bp, Homo sapien
catttcccgcacgaggctgggagga

SEQ ID NO: 5332137 - DNA, 25 bp, Homo sapien
ggtgcgcttaaaaaatccacccagc

SEQ ID NO: 5332138 - DNA, 25 bp, Homo sapien
gccctgccgtcagaattaaagccat

SEQ ID NO: 5332139 - DNA, 25 bp, Homo sapien
accgacgccgcagttccttgacaaa

SEQ ID NO: 5332140 - DNA, 25 bp, Homo sapien
tatttgtctctagaaggtaaccctg

SEQ ID NO: 5332141 - DNA, 25 bp, Homo sapien
tgtctctagaaggtaaccctgggcc

SEQ ID NO: 5332142 - DNA, 25 bp, Homo sapien
aactttcaagactgcatttatttgt

SEQ ID NO: 5332143 - DNA, 25 bp, Homo sapien
catttatttgtctctagaaggtaac

SEQ ID NO: 5332144 - DNA, 25 bp, Homo sapien
tgtgactcagcagttctacttctgg

SEQ ID NO: 5332145 - DNA, 25 bp, Homo sapien
gactcagcagttctacttctgggaa

SEQ ID NO: 5332146 - DNA, 25 bp, Homo sapien
cagcagttctacttctgggaatcta

SEQ ID NO: 5332147 - DNA, 25 bp, Homo sapien
ctgtgactcagcagttctacttctg

SEQ ID NO: 5332148 - DNA, 25 bp, Homo sapien
aagttttaccatcgtatagagccac

SEQ ID NO: 5332149 - DNA, 25 bp, Homo sapien
tagaagttttaccatcgtatagagc

SEQ ID NO: 5332150 - DNA, 25 bp, Homo sapien
ttttaccatcgtatagagccactac

SEQ ID NO: 5332151 - DNA, 25 bp, Homo sapien
gaagttttaccatcgtatagagcca

SEQ ID NO: 5332152 - DNA, 25 bp, Homo sapien
gaaatcttatatctcaagtggtcag

SEQ ID NO: 5332153 - DNA, 25 bp, Homo sapien
gaaaatctacactgagcatatgcac

SEQ ID NO: 5332154 - DNA, 25 bp, Homo sapien
gaattctgtctcctatgggttgact

SEQ ID NO: 5332155 - DNA, 25 bp, Homo sapien
cctatgggttgactggccagcgaaa

SEQ ID NO: 5332156 - DNA, 25 bp, Homo sapien
aaaatgactcatatctcaaagtata

SEQ ID NO: 5332157 - DNA, 25 bp, Homo sapien
attttaaggttctgatatctgtatg

SEQ ID NO: 5332158 - DNA, 25 bp, Homo sapien
tctgtatgggtatttaagaaggaat

SEQ ID NO: 5332159 - DNA, 25 bp, Homo sapien
aatgactcatatctcaaagtataca

SEQ ID NO: 5332160 - DNA, 25 bp, Homo sapien
cactgtggcgacaagcgtgtgctgg

SEQ ID NO: 5332161 - DNA, 25 bp, Homo sapien
tggcgacaagcgtgtgctggctcac

SEQ ID NO: 5332162 - DNA, 25 bp, Homo sapien
tttcagtcgtagacatcacactgtg

SEQ ID NO: 5332163 - DNA, 25 bp, Homo sapien
gggagataatttcagtcgtagacat

SEQ ID NO: 5332164 - DNA, 25 bp, Homo sapien
cagctgatatgttgggtgatgtttc

SEQ ID NO: 5332165 - DNA, 25 bp, Homo sapien
actgttgttactatagctctgctca

SEQ ID NO: 5332166 - DNA, 25 bp, Homo sapien
tcttcaagccgaaagcacagctgat

SEQ ID NO: 5332167 - DNA, 25 bp, Homo sapien
tcttgccgaggatgtatgtgattca

SEQ ID NO: 5332168 - DNA, 25 bp, Homo sapien
gatcactgagaacctgtatatattc

SEQ ID NO: 5332169 - DNA, 25 bp, Homo sapien
gggaagaaatggcacaagtgccttc

SEQ ID NO: 5332170 - DNA, 25 bp, Homo sapien
tctggcaaaaccacggttgagattt

SEQ ID NO: 5332171 - DNA, 25 bp, Homo sapien
ggcacaagtgccttcaatctggcaa

SEQ ID NO: 5332172 - DNA, 25 bp, Homo sapien
cttcaatctggcaaaaccacggttg

SEQ ID NO: 5332173 - DNA, 25 bp, Homo sapien
caaccaaacccgtagactgcaaacg

SEQ ID NO: 5332174 - DNA, 25 bp, Homo sapien
tctcctggattcgcctctgctgcaa

SEQ ID NO: 5332175 - DNA, 25 bp, Homo sapien
tggattcgcctctgctgcaaccaaa

SEQ ID NO: 5332176 - DNA, 25 bp, Homo sapien
tgcaaccaaacccgtagactgcaaa

SEQ ID NO: 5332177 - DNA, 25 bp, Homo sapien
ttggcgttggccacacgccgccgct

SEQ ID NO: 5332178 - DNA, 25 bp, Homo sapien
ttgagccggcagacagcggccagct

SEQ ID NO: 5332179 - DNA, 25 bp, Homo sapien
gttttcagtggacgagtagccgccc

SEQ ID NO: 5332180 - DNA, 25 bp, Homo sapien
cgctcacgctccttggcgttggcca

SEQ ID NO: 5332181 - DNA, 25 bp, Homo sapien
ggcgcggggatctaggacgccgggc

SEQ ID NO: 5332182 - DNA, 25 bp, Homo sapien
cggggatctaggacgccgggcgcgg

SEQ ID NO: 5332183 - DNA, 25 bp, Homo sapien
gcgcggggatctaggacgccgggcg

SEQ ID NO: 5332184 - DNA, 25 bp, Homo sapien
gcgcggcgcggggatctaggacgcc

SEQ ID NO: 5332185 - DNA, 25 bp, Homo sapien
gccgctgaggccgggctttcacctg

SEQ ID NO: 5332186 - DNA, 25 bp, Homo sapien
aggccgctgaggccgggctttcacc

SEQ ID NO: 5332187 - DNA, 25 bp, Homo sapien
ctgaggccgggctttcacctgcgca

SEQ ID NO: 5332188 - DNA, 25 bp, Homo sapien
cgctgaggccgggctttcacctgcg

SEQ ID NO: 5332189 - DNA, 25 bp, Homo sapien
ccattgttgactcctacctgaatca

SEQ ID NO: 5332190 - DNA, 25 bp, Homo sapien
ccagcactacaattagaggcaaatg

SEQ ID NO: 5332191 - DNA, 25 bp, Homo sapien
gatactccttctcatccattgttga

SEQ ID NO: 5332192 - DNA, 25 bp, Homo sapien
attttgtgaggagatactccttctc

SEQ ID NO: 5332193 - DNA, 25 bp, Homo sapien
tgctgcttacacaaccatcagaggg

SEQ ID NO: 5332194 - DNA, 25 bp, Homo sapien
ctgtccccttagaggcctctgcagg

SEQ ID NO: 5332195 - DNA, 25 bp, Homo sapien
ctcagtgtaggctcagaagctcttc

SEQ ID NO: 5332196 - DNA, 25 bp, Homo sapien
gctattctaagcagatgccaaagga

SEQ ID NO: 5332197 - DNA, 25 bp, Homo sapien
ccaccccaaaattcaaatgatctct

SEQ ID NO: 5332198 - DNA, 25 bp, Homo sapien
actactacatgaacagtatggggaa

SEQ ID NO: 5332199 - DNA, 25 bp, Homo sapien
cactactacatgaacagtatgggga

SEQ ID NO: 5332200 - DNA, 25 bp, Homo sapien
tcaaatgatctctcactgggtcccc

SEQ ID NO: 5332201 - DNA, 25 bp, Homo sapien
cactgggtcactcgaggtaagcatg

SEQ ID NO: 5332202 - DNA, 25 bp, Homo sapien
gggctgaatcaaagaacaaggcagg

SEQ ID NO: 5332203 - DNA, 25 bp, Homo sapien
agctcagaggctccgaaggcatcga

SEQ ID NO: 5332204 - DNA, 25 bp, Homo sapien
ggctcttcccttgagaagccactga

SEQ ID NO: 5332205 - DNA, 25 bp, Homo sapien
tcttgcacacccactgatagggggt

SEQ ID NO: 5332206 - DNA, 25 bp, Homo sapien
tagggggtgtcacaggtcatgtcat

SEQ ID NO: 5332207 - DNA, 25 bp, Homo sapien
cagttgtcagactgattcttttccc

SEQ ID NO: 5332208 - DNA, 25 bp, Homo sapien
gtctgcccattcttgtgccgccagt

SEQ ID NO: 5332209 - DNA, 25 bp, Homo sapien
gatgggtccttcatcccctagtggc

SEQ ID NO: 5332210 - DNA, 25 bp, Homo sapien
ctcctagggagctgacatgggatga

SEQ ID NO: 5332211 - DNA, 25 bp, Homo sapien
ccctagtggccctaggatgaggaca

SEQ ID NO: 5332212 - DNA, 25 bp, Homo sapien
catgggatgagtctagggagctgac

SEQ ID NO: 5332213 - DNA, 25 bp, Homo sapien
gaagctgcaagctcccatcccagaa

SEQ ID NO: 5332214 - DNA, 25 bp, Homo sapien
tatgaagctgcaagctcccatccca

SEQ ID NO: 5332215 - DNA, 25 bp, Homo sapien
gtgtctatgaagctgcaagctccca

SEQ ID NO: 5332216 - DNA, 25 bp, Homo sapien
gggtgtctatgaagctgcaagctcc

SEQ ID NO: 5332217 - DNA, 25 bp, Homo sapien
cggcgttgaatggtgtcccatctgt

SEQ ID NO: 5332218 - DNA, 25 bp, Homo sapien
ggcggcgttgaatggtgtcccatct

SEQ ID NO: 5332219 - DNA, 25 bp, Homo sapien
gttctgggcggcgttgaatggtgtc

SEQ ID NO: 5332220 - DNA, 25 bp, Homo sapien
gctttgttctgggcggcgttgaatg

SEQ ID NO: 5332221 - DNA, 25 bp, Homo sapien
ccagtagtacactttacttgtgaac

SEQ ID NO: 5332222 - DNA, 25 bp, Homo sapien
ccctgtcagtgagaccgatccagta

SEQ ID NO: 5332223 - DNA, 25 bp, Homo sapien
ctctgtgcccctgtcagtgagaccg

SEQ ID NO: 5332224 - DNA, 25 bp, Homo sapien
tgagaccgatccagtagtacacttt

SEQ ID NO: 5332225 - DNA, 25 bp, Homo sapien
aatatacagcttatgaataacttaa

SEQ ID NO: 5332226 - DNA, 25 bp, Homo sapien
tgaatatacagcttatgaataactt

SEQ ID NO: 5332227 - DNA, 25 bp, Homo sapien
tatacagcttatgaataacttaaaa

SEQ ID NO: 5332228 - DNA, 25 bp, Homo sapien
gaatatacagcttatgaataactta

SEQ ID NO: 5332229 - DNA, 25 bp, Homo sapien
gattgatgtgtctaaaatgatatat

SEQ ID NO: 5332230 - DNA, 25 bp, Homo sapien
caaatttaataaaccaatggcacaa

SEQ ID NO: 5332231 - DNA, 25 bp, Homo sapien
catcacaaatttaataaaccaatgg

SEQ ID NO: 5332232 - DNA, 25 bp, Homo sapien
cacaaatttaataaaccaatggcac

SEQ ID NO: 5332233 - DNA, 25 bp, Homo sapien
tcacaaatttaataaaccaatggca

SEQ ID NO: 5332234 - DNA, 25 bp, Homo sapien
tctacggcatactgattttggtgtc

SEQ ID NO: 5332235 - DNA, 25 bp, Homo sapien
tgtaaattctacggcatactgattt

SEQ ID NO: 5332236 - DNA, 25 bp, Homo sapien
taaattctacggcatactgattttg

SEQ ID NO: 5332237 - DNA, 25 bp, Homo sapien
aattctacggcatactgattttggt

SEQ ID NO: 5332238 - DNA, 25 bp, Homo sapien
caattagctcaaggcacaattgtct

SEQ ID NO: 5332239 - DNA, 25 bp, Homo sapien
aagtccaattagctcaaggcacaat

SEQ ID NO: 5332240 - DNA, 25 bp, Homo sapien
tgtcttaaatgtcatacttccatac

SEQ ID NO: 5332241 - DNA, 25 bp, Homo sapien
gtccaattagctcaaggcacaattg

SEQ ID NO: 5332242 - DNA, 25 bp, Homo sapien
atagactgttgagcagctagtgtac

SEQ ID NO: 5332243 - DNA, 25 bp, Homo sapien
ttgaatagactgttgagcagctagt

SEQ ID NO: 5332244 - DNA, 25 bp, Homo sapien
gaatagactgttgagcagctagtgt

SEQ ID NO: 5332245 - DNA, 25 bp, Homo sapien
tagactgttgagcagctagtgtact

SEQ ID NO: 5332246 - DNA, 25 bp, Homo sapien
ccaacaacaccccatgctcgcagct

SEQ ID NO: 5332247 - DNA, 25 bp, Homo sapien
ttccacaccaattccaccaacaaca

SEQ ID NO: 5332248 - DNA, 25 bp, Homo sapien
aacaccccatgctcgcagctctgac

SEQ ID NO: 5332249 - DNA, 25 bp, Homo sapien
caaagtcccttattccacaccaatt

SEQ ID NO: 5332250 - DNA, 25 bp, Homo sapien
gctccctgggacacgcagaactgct

SEQ ID NO: 5332251 - DNA, 25 bp, Homo sapien
ctccctgggacacgcagaactgctc

SEQ ID NO: 5332252 - DNA, 25 bp, Homo sapien
taagcttccaccattgaacttccag

SEQ ID NO: 5332253 - DNA, 25 bp, Homo sapien
aaaataatataagcttccaccattg

SEQ ID NO: 5332254 - DNA, 25 bp, Homo sapien
cagccttgcaggaccatctggagaa

SEQ ID NO: 5332255 - DNA, 25 bp, Homo sapien
ttccaccattgaacttccagccttg

SEQ ID NO: 5332256 - DNA, 25 bp, Homo sapien
atctccatccacttgcactgccaca

SEQ ID NO: 5332257 - DNA, 25 bp, Homo sapien
gtcttcatctccatccacttgcact

SEQ ID NO: 5332258 - DNA, 25 bp, Homo sapien
cttgtcttcatctccatccacttgc

SEQ ID NO: 5332259 - DNA, 25 bp, Homo sapien
tccatccacttgcactgccacaccc

SEQ ID NO: 5332260 - DNA, 25 bp, Homo sapien
tgtgccctccccaaacgcgactccc

SEQ ID NO: 5332261 - DNA, 25 bp, Homo sapien
ggatttctactacccaggcactgga

SEQ ID NO: 5332262 - DNA, 25 bp, Homo sapien
tctgcttagcacgtggagctcaatg

SEQ ID NO: 5332263 - DNA, 25 bp, Homo sapien
cgtctggaaagttaaagcatctgcc

SEQ ID NO: 5332264 - DNA, 25 bp, Homo sapien
tgtttcccagatgatcaccgagcac

SEQ ID NO: 5332265 - DNA, 25 bp, Homo sapien
ggtaactaacactggacctcagctg

SEQ ID NO: 5332266 - DNA, 25 bp, Homo sapien
ccagtgttacatagggcaagggtcc

SEQ ID NO: 5332267 - DNA, 25 bp, Homo sapien
tttgtacaccaagcatagagcctct

SEQ ID NO: 5332268 - DNA, 25 bp, Homo sapien
aacctgagtaaaaggccttgcgctg

SEQ ID NO: 5332269 - DNA, 25 bp, Homo sapien
ttgcacaggcttcggaacaggtctt

SEQ ID NO: 5332270 - DNA, 25 bp, Homo sapien
tgtctcccagaattacggcttgcac

SEQ ID NO: 5332271 - DNA, 25 bp, Homo sapien
tcaaaaggtaaatgcccagtaatgt

SEQ ID NO: 5332272 - DNA, 25 bp, Homo sapien
gcccagtaatgttgtctcccagaat

SEQ ID NO: 5332273 - DNA, 25 bp, Homo sapien
gcctgggaggatacgctgtcccaca

SEQ ID NO: 5332274 - DNA, 25 bp, Homo sapien
cccacacagaggtagagttccagaa

SEQ ID NO: 5332275 - DNA, 25 bp, Homo sapien
ggagatagcagcaaagaccctccca

SEQ ID NO: 5332276 - DNA, 25 bp, Homo sapien
ccagggtttccctcatgaacctcag

SEQ ID NO: 5332277 - DNA, 25 bp, Homo sapien
agagaaagttagtgagatttgggtc

SEQ ID NO: 5332278 - DNA, 25 bp, Homo sapien
agttagtgagatttgggtcacctgg

SEQ ID NO: 5332279 - DNA, 25 bp, Homo sapien
aggtggaatgatctttctgggagca

SEQ ID NO: 5332280 - DNA, 25 bp, Homo sapien
aatgatctttctgggagcagagagg

SEQ ID NO: 5332281 - DNA, 25 bp, Homo sapien
cctgaacgagcctcggtatcttggg

SEQ ID NO: 5332282 - DNA, 25 bp, Homo sapien
aggagccattgccacagagtccacc

SEQ ID NO: 5332283 - DNA, 25 bp, Homo sapien
aaggtcacagccataaatgccgggg

SEQ ID NO: 5332284 - DNA, 25 bp, Homo sapien
taaatgccggggtagcctgaacgag

SEQ ID NO: 5332285 - DNA, 25 bp, Homo sapien
agggagacacactggttatctgtgc

SEQ ID NO: 5332286 - DNA, 25 bp, Homo sapien
gtgcagaagcggactgcctcaccgt

SEQ ID NO: 5332287 - DNA, 25 bp, Homo sapien
gagacacactggttatctgtgcaga

SEQ ID NO: 5332288 - DNA, 25 bp, Homo sapien
ctggttatctgtgcagaagcggact

SEQ ID NO: 5332289 - DNA, 25 bp, Homo sapien
cttgatcctccagcactgctcccag

SEQ ID NO: 5332290 - DNA, 25 bp, Homo sapien
ccagcactgctcccagccactggct

SEQ ID NO: 5332291 - DNA, 25 bp, Homo sapien
gatcctccagcactgctcccagcca

SEQ ID NO: 5332292 - DNA, 25 bp, Homo sapien
cagcactgctcccagccactggctc

SEQ ID NO: 5332293 - DNA, 25 bp, Homo sapien
ggccgtcccgtggaccaatggcagt

SEQ ID NO: 5332294 - DNA, 25 bp, Homo sapien
gccgtcccgtggaccaatggcagtg

SEQ ID NO: 5332295 - DNA, 25 bp, Homo sapien
agggccgtcccgtggaccaatggca

SEQ ID NO: 5332296 - DNA, 25 bp, Homo sapien
gggccgtcccgtggaccaatggcag

SEQ ID NO: 5332297 - DNA, 25 bp, Homo sapien
ttttcacctgacaatggaaaaatcc

SEQ ID NO: 5332298 - DNA, 25 bp, Homo sapien
ttcacctgacaatggaaaaatcccc

SEQ ID NO: 5332299 - DNA, 25 bp, Homo sapien
acttttcacctgacaatggaaaaat

SEQ ID NO: 5332300 - DNA, 25 bp, Homo sapien
cacctgacaatggaaaaatccccag

SEQ ID NO: 5332301 - DNA, 25 bp, Homo sapien
gggtccatgatacgaggagctgccc

SEQ ID NO: 5332302 - DNA, 25 bp, Homo sapien
ccaggtattgataacaccccaagac

SEQ ID NO: 5332303 - DNA, 25 bp, Homo sapien
ggagctgcccaggtattgataacac

SEQ ID NO: 5332304 - DNA, 25 bp, Homo sapien
gtccatgatacgaggagctgcccag

SEQ ID NO: 5332305 - DNA, 25 bp, Homo sapien
gactagagcactatcaatggtggga

SEQ ID NO: 5332306 - DNA, 25 bp, Homo sapien
gacaggactagagcactatcaatgg

SEQ ID NO: 5332307 - DNA, 25 bp, Homo sapien
tatcaatggtgggacttcctgggcg

SEQ ID NO: 5332308 - DNA, 25 bp, Homo sapien
tgctagagacaggactagagcacta

SEQ ID NO: 5332309 - DNA, 25 bp, Homo sapien
caggcagcattttattctgaggaag

SEQ ID NO: 5332310 - DNA, 25 bp, Homo sapien
aggcagcattttattctgaggaagc

SEQ ID NO: 5332311 - DNA, 25 bp, Homo sapien
gcagcattttattctgaggaagctg

SEQ ID NO: 5332312 - DNA, 25 bp, Homo sapien
cccaggcagcattttattctgagga

SEQ ID NO: 5332313 - DNA, 25 bp, Homo sapien
aggaggtgccggagaggtgaggaca

SEQ ID NO: 5332314 - DNA, 25 bp, Homo sapien
catgcacaagacacaggaagatagg

SEQ ID NO: 5332315 - DNA, 25 bp, Homo sapien
tggatggacgctgggtggaaggcag

SEQ ID NO: 5332316 - DNA, 25 bp, Homo sapien
ggacgctgggtggaaggcagggctc

SEQ ID NO: 5332317 - DNA, 25 bp, Homo sapien
ccccagggtgttatgccggattacg

SEQ ID NO: 5332318 - DNA, 25 bp, Homo sapien
aattaacgtgcaaagtcatcctgga

SEQ ID NO: 5332319 - DNA, 25 bp, Homo sapien
gatacaagtccgtgtcagccactga

SEQ ID NO: 5332320 - DNA, 25 bp, Homo sapien
gatcctccttagcagggcaattgga

SEQ ID NO: 5332321 - DNA, 25 bp, Homo sapien
ggttctgatgggacatagggtcgct

SEQ ID NO: 5332322 - DNA, 25 bp, Homo sapien
tcacggttctgatgggacatagggt

SEQ ID NO: 5332323 - DNA, 25 bp, Homo sapien
tctgatgggacatagggtcgcttac

SEQ ID NO: 5332324 - DNA, 25 bp, Homo sapien
cacggttctgatgggacatagggtc

SEQ ID NO: 5332325 - DNA, 25 bp, Homo sapien
aaacgttttgtcacatggggcatca

SEQ ID NO: 5332326 - DNA, 25 bp, Homo sapien
tgttgggctcacctggaatccagaa

SEQ ID NO: 5332327 - DNA, 25 bp, Homo sapien
gggagcctttatattgccacagtgt

SEQ ID NO: 5332328 - DNA, 25 bp, Homo sapien
gccacagtgttcattgttcccagca

SEQ ID NO: 5332329 - DNA, 25 bp, Homo sapien
ttccatccctgctttagtcaggcca

SEQ ID NO: 5332330 - DNA, 25 bp, Homo sapien
gagtccccccgctgttttatacaga

SEQ ID NO: 5332331 - DNA, 25 bp, Homo sapien
tagtcaggccaatccagtagatgag

SEQ ID NO: 5332332 - DNA, 25 bp, Homo sapien
ttgaatggcgtgtcatccacccagg

SEQ ID NO: 5332333 - DNA, 25 bp, Homo sapien
tgctcactctctgaggtcaccgagg

SEQ ID NO: 5332334 - DNA, 25 bp, Homo sapien
gaagtacttccagccttgagaaacc

SEQ ID NO: 5332335 - DNA, 25 bp, Homo sapien
tgctcggcactataccaggtctttg

SEQ ID NO: 5332336 - DNA, 25 bp, Homo sapien
gccttgagaaaccacctgtagaata

SEQ ID NO: 5332337 - DNA, 25 bp, Homo sapien
ccctggagtgcccggatctttgtat

SEQ ID NO: 5332338 - DNA, 25 bp, Homo sapien
tggagtgcccggatctttgtattta

SEQ ID NO: 5332339 - DNA, 25 bp, Homo sapien
gtttgagcaacttgctcatattctc

SEQ ID NO: 5332340 - DNA, 25 bp, Homo sapien
tttgtcgtttgagcaacttgctcat

SEQ ID NO: 5332341 - DNA, 25 bp, Homo sapien
cttcccaacttcttgttaagatctg

SEQ ID NO: 5332342 - DNA, 25 bp, Homo sapien
caacttcttgttaagatctggatct

SEQ ID NO: 5332343 - DNA, 25 bp, Homo sapien
tttgggcatttaaggtactgacttc

SEQ ID NO: 5332344 - DNA, 25 bp, Homo sapien
catttaaggtactgacttcttccca

SEQ ID NO: 5332345 - DNA, 25 bp, Homo sapien
gcaactggacattggtctttacatc

SEQ ID NO: 5332346 - DNA, 25 bp, Homo sapien
gcctccatgccgtcactattctttt

SEQ ID NO: 5332347 - DNA, 25 bp, Homo sapien
tgtccacacgacctttcagcaactg

SEQ ID NO: 5332348 - DNA, 25 bp, Homo sapien
tcaccatctggatctgaacgccagc

SEQ ID NO: 5332349 - DNA, 25 bp, Homo sapien
ggaccagagatggaccggacttggg

SEQ ID NO: 5332350 - DNA, 25 bp, Homo sapien
cagattaatgcagcacggactgtgg

SEQ ID NO: 5332351 - DNA, 25 bp, Homo sapien
gagatggaccggacttgggaggagg

SEQ ID NO: 5332352 - DNA, 25 bp, Homo sapien
acggaggcgaccaggaccagcgtca

SEQ ID NO: 5332353 - DNA, 25 bp, Homo sapien
aggttctcagcagcgatgtggcttg

SEQ ID NO: 5332354 - DNA, 25 bp, Homo sapien
caggttctcagcagcgatgtggctt

SEQ ID NO: 5332355 - DNA, 25 bp, Homo sapien
cagagggagatgttctgtttgtcca

SEQ ID NO: 5332356 - DNA, 25 bp, Homo sapien
tgaagtgcgcatcaggggcctcctt

SEQ ID NO: 5332357 - DNA, 25 bp, Homo sapien
tgtttgtccacagtgaagtgcgcat

SEQ ID NO: 5332358 - DNA, 25 bp, Homo sapien
gccagagggagatgttctgtttgtc

SEQ ID NO: 5332359 - DNA, 25 bp, Homo sapien
cctgggagcacaggtgcttctggct

SEQ ID NO: 5332360 - DNA, 25 bp, Homo sapien
tggctgcctgtctctccaagggctc

SEQ ID NO: 5332361 - DNA, 25 bp, Homo sapien
ccttatcctgggagcacaggtgctt

SEQ ID NO: 5332362 - DNA, 25 bp, Homo sapien
tgcctgtctctccaagggctcttat

SEQ ID NO: 5332363 - DNA, 25 bp, Homo sapien
aagccttagcggctgggcccatggc

SEQ ID NO: 5332364 - DNA, 25 bp, Homo sapien
tgtccatttccgctcggtcaggaag

SEQ ID NO: 5332365 - DNA, 25 bp, Homo sapien
tatgagttatactttatagagcccc

SEQ ID NO: 5332366 - DNA, 25 bp, Homo sapien
gcctgggaagtgtcttgtccatttc

SEQ ID NO: 5332367 - DNA, 25 bp, Homo sapien
aaggctgttccagcatgaggaagct

SEQ ID NO: 5332368 - DNA, 25 bp, Homo sapien
ggctgttccagcatgaggaagctga

SEQ ID NO: 5332369 - DNA, 25 bp, Homo sapien
gctgttccagcatgaggaagctgag

SEQ ID NO: 5332370 - DNA, 25 bp, Homo sapien
agtcccaaaccataggaagtttcat

SEQ ID NO: 5332371 - DNA, 25 bp, Homo sapien
ttcctattatcatgctcatctacag

SEQ ID NO: 5332372 - DNA, 25 bp, Homo sapien
cttcctattatcatgctcatctaca

SEQ ID NO: 5332373 - DNA, 25 bp, Homo sapien
tcctattatcatgctcatctacagg

SEQ ID NO: 5332374 - DNA, 25 bp, Homo sapien
taaccagagaaattagacacgcggc

SEQ ID NO: 5332375 - DNA, 25 bp, Homo sapien
catttctggaccctagggagccata

SEQ ID NO: 5332376 - DNA, 25 bp, Homo sapien
tactcagggagtattccgggagcat

SEQ ID NO: 5332377 - DNA, 25 bp, Homo sapien
gagcgaaacccctcggtgctgtaag

SEQ ID NO: 5332378 - DNA, 25 bp, Homo sapien
acactgtcgttaccgccgccttcct

SEQ ID NO: 5332379 - DNA, 25 bp, Homo sapien
aggacactgtcgttaccgccgcctt

SEQ ID NO: 5332380 - DNA, 25 bp, Homo sapien
tgtcgttaccgccgccttcctccat

SEQ ID NO: 5332381 - DNA, 25 bp, Homo sapien
caggacactgtcgttaccgccgcct

SEQ ID NO: 5332382 - DNA, 25 bp, Homo sapien
atagcgggtcactcccaaacaggct

SEQ ID NO: 5332383 - DNA, 25 bp, Homo sapien
aatgtcaatccttccctagcagcgg

SEQ ID NO: 5332384 - DNA, 25 bp, Homo sapien
cccattcctgcatgatggctgagca

SEQ ID NO: 5332385 - DNA, 25 bp, Homo sapien
gaggctttctgccaactcacttatg

SEQ ID NO: 5332386 - DNA, 25 bp, Homo sapien
tgaaccggatactgaaggctctgcc

SEQ ID NO: 5332387 - DNA, 25 bp, Homo sapien
ggatggcctctttacccgacttcag

SEQ ID NO: 5332388 - DNA, 25 bp, Homo sapien
tggcagtgaaggacagaacggctcc

SEQ ID NO: 5332389 - DNA, 25 bp, Homo sapien
tcacattgccgaccctagagagggc

SEQ ID NO: 5332390 - DNA, 25 bp, Homo sapien
ctaccggcccgagcggatttctttg

SEQ ID NO: 5332391 - DNA, 25 bp, Homo sapien
aggccactggcggtaatggctcccc

SEQ ID NO: 5332392 - DNA, 25 bp, Homo sapien
agcgccagcctttcgcaatgccaag

SEQ ID NO: 5332393 - DNA, 25 bp, Homo sapien
cctccatctggactgcgaccgatta

SEQ ID NO: 5332394 - DNA, 25 bp, Homo sapien
tttgtaccctaaggcctgagaaggc

SEQ ID NO: 5332395 - DNA, 25 bp, Homo sapien
cgctccacacctccgcgtgcacagt

SEQ ID NO: 5332396 - DNA, 25 bp, Homo sapien
gcgatcctcccatttgtaccctaag

SEQ ID NO: 5332397 - DNA, 25 bp, Homo sapien
ctcccatttgtaccctaaggcctga

SEQ ID NO: 5332398 - DNA, 25 bp, Homo sapien
cgcgatcgatgctccacctgcacgc

SEQ ID NO: 5332399 - DNA, 25 bp, Homo sapien
aaccccgcgatcgatgctccacctg

SEQ ID NO: 5332400 - DNA, 25 bp, Homo sapien
ccccgcgatcgatgctccacctgca

SEQ ID NO: 5332401 - DNA, 25 bp, Homo sapien
ctacaaccccgcgatcgatgctcca

SEQ ID NO: 5332402 - DNA, 25 bp, Homo sapien
tacagacaatgcgtggcgtccgttc

SEQ ID NO: 5332403 - DNA, 25 bp, Homo sapien
gatagatccgggaaattctgtccac

SEQ ID NO: 5332404 - DNA, 25 bp, Homo sapien
ttcccaaattaatccagacgcgaat

SEQ ID NO: 5332405 - DNA, 25 bp, Homo sapien
taacgaccgattttgatagatccgg

SEQ ID NO: 5332406 - DNA, 25 bp, Homo sapien
ccaaagcggcctctctgggctgaca

SEQ ID NO: 5332407 - DNA, 25 bp, Homo sapien
ctctgggctgacagccacccctgcg

SEQ ID NO: 5332408 - DNA, 25 bp, Homo sapien
tgggctgacagccacccctgcgggt

SEQ ID NO: 5332409 - DNA, 25 bp, Homo sapien
gcctctctgggctgacagccacccc

SEQ ID NO: 5332410 - DNA, 25 bp, Homo sapien
cttgaagaagtgactcgctgcaacc

SEQ ID NO: 5332411 - DNA, 25 bp, Homo sapien
gtgggatgactgcaggatcccttga

SEQ ID NO: 5332412 - DNA, 25 bp, Homo sapien
cctgtgtctgggagcagtagggtgg

SEQ ID NO: 5332413 - DNA, 25 bp, Homo sapien
cagcaaaaacgctttcacccgggag

SEQ ID NO: 5332414 - DNA, 25 bp, Homo sapien
ctgaggggacgcgtgaagcccaggc

SEQ ID NO: 5332415 - DNA, 25 bp, Homo sapien
catggatgcgcggatggctgggggc

SEQ ID NO: 5332416 - DNA, 25 bp, Homo sapien
ttgggctgggcgattcccgccgtgg

SEQ ID NO: 5332417 - DNA, 25 bp, Homo sapien
ggctgggcgattcccgccgtgggac

SEQ ID NO: 5332418 - DNA, 25 bp, Homo sapien
gagtccagtccttcggagaatccgc

SEQ ID NO: 5332419 - DNA, 25 bp, Homo sapien
caagtccgaactcgtacacacagca

SEQ ID NO: 5332420 - DNA, 25 bp, Homo sapien
acacagcacaatggcgtgcagccgc

SEQ ID NO: 5332421 - DNA, 25 bp, Homo sapien
gcagtcgggacccacgctccggaaa

SEQ ID NO: 5332422 - DNA, 25 bp, Homo sapien
ggaccacaggactttagtctcaata

SEQ ID NO: 5332423 - DNA, 25 bp, Homo sapien
gctcgctttctgcttggattaccaa

SEQ ID NO: 5332424 - DNA, 25 bp, Homo sapien
gctgagcaggcgtttagtaaggacc

SEQ ID NO: 5332425 - DNA, 25 bp, Homo sapien
gctctggctgggaggttactgcagg

SEQ ID NO: 5332426 - DNA, 25 bp, Homo sapien
tcagggatggtcccccaggtagctt

SEQ ID NO: 5332427 - DNA, 25 bp, Homo sapien
cttcagggatggtcccccaggtagc

SEQ ID NO: 5332428 - DNA, 25 bp, Homo sapien
ttcagggatggtcccccaggtagct

SEQ ID NO: 5332429 - DNA, 25 bp, Homo sapien
agcccggacaaggagtgggtacctg

SEQ ID NO: 5332430 - DNA, 25 bp, Homo sapien
tggaagcccggacaaggagtgggta

SEQ ID NO: 5332431 - DNA, 25 bp, Homo sapien
ctttggaagcccggacaaggagtgg

SEQ ID NO: 5332432 - DNA, 25 bp, Homo sapien
ccttggagagccagtagccggttac

SEQ ID NO: 5332433 - DNA, 25 bp, Homo sapien
ttctgtaccccagttcaagatactc

SEQ ID NO: 5332434 - DNA, 25 bp, Homo sapien
aagacaccaacgctgcatgggcctg

SEQ ID NO: 5332435 - DNA, 25 bp, Homo sapien
ttcaagatactctgatagaagacac

SEQ ID NO: 5332436 - DNA, 25 bp, Homo sapien
tgatagaagacaccaacgctgcatg

SEQ ID NO: 5332437 - DNA, 25 bp, Homo sapien
acattcagcactgcagaaagaggta

SEQ ID NO: 5332438 - DNA, 25 bp, Homo sapien
ctcccactgttggtggatgctgact

SEQ ID NO: 5332439 - DNA, 25 bp, Homo sapien
tggggacattcagcactgcagaaag

SEQ ID NO: 5332440 - DNA, 25 bp, Homo sapien
tctcccactgttggtggatgctgac

SEQ ID NO: 5332441 - DNA, 25 bp, Homo sapien
tggagacattgactttcagagcccc

SEQ ID NO: 5332442 - DNA, 25 bp, Homo sapien
tctttagcgtcttgctggagacatt

SEQ ID NO: 5332443 - DNA, 25 bp, Homo sapien
cagttgacgccacggtttctttagc

SEQ ID NO: 5332444 - DNA, 25 bp, Homo sapien
gcagcccacggctggagccaaaaat

SEQ ID NO: 5332445 - DNA, 25 bp, Homo sapien
ggaagcttccaaaggacagtgcacc

SEQ ID NO: 5332446 - DNA, 25 bp, Homo sapien
gagtgtagccatcggaggccactga

SEQ ID NO: 5332447 - DNA, 25 bp, Homo sapien
agcttccaaaggacagtgcacccag

SEQ ID NO: 5332448 - DNA, 25 bp, Homo sapien
caggctctgagtgtagccatcggag

SEQ ID NO: 5332449 - DNA, 25 bp, Homo sapien
catggagtcatctctagggcctgtt

SEQ ID NO: 5332450 - DNA, 25 bp, Homo sapien
cagggacacctccttagtgggaata

SEQ ID NO: 5332451 - DNA, 25 bp, Homo sapien
gagggagatcccctgctctggcaaa

SEQ ID NO: 5332452 - DNA, 25 bp, Homo sapien
gggaaggacccactatgaaggaagc

SEQ ID NO: 5332453 - DNA, 25 bp, Homo sapien
cagactccatccccaatgtctgtgg

SEQ ID NO: 5332454 - DNA, 25 bp, Homo sapien
gactccatccccaatgtctgtggct

SEQ ID NO: 5332455 - DNA, 25 bp, Homo sapien
agactccatccccaatgtctgtggc

SEQ ID NO: 5332456 - DNA, 25 bp, Homo sapien
tctctgctcactgcatccttcttct

SEQ ID NO: 5332457 - DNA, 25 bp, Homo sapien
cacgatctctgctcactgcatcctt

SEQ ID NO: 5332458 - DNA, 25 bp, Homo sapien
acgatctctgctcactgcatccttc

SEQ ID NO: 5332459 - DNA, 25 bp, Homo sapien
gatctctgctcactgcatccttctt

SEQ ID NO: 5332460 - DNA, 25 bp, Homo sapien
tgaggttgaaacagccctccgtcac

SEQ ID NO: 5332461 - DNA, 25 bp, Homo sapien
aacgagccgggacgtgtgttccacg

SEQ ID NO: 5332462 - DNA, 25 bp, Homo sapien
ccagggagatgacaaataatgaggc

SEQ ID NO: 5332463 - DNA, 25 bp, Homo sapien
gaggcagggcccgtttcgtatcgaa

SEQ ID NO: 5332464 - DNA, 25 bp, Homo sapien
tactagcacatgtgaaggaatctct

SEQ ID NO: 5332465 - DNA, 25 bp, Homo sapien
gcagcagttctaacacaatttcggg

SEQ ID NO: 5332466 - DNA, 25 bp, Homo sapien
tacatggcatcagggacttcatagc

SEQ ID NO: 5332467 - DNA, 25 bp, Homo sapien
tgcttcccaaggaacttgagaagtt

SEQ ID NO: 5332468 - DNA, 25 bp, Homo sapien
aatgttttgaagaacagccagctgc

SEQ ID NO: 5332469 - DNA, 25 bp, Homo sapien
gaacactgtcattaccacgaaaaga

SEQ ID NO: 5332470 - DNA, 25 bp, Homo sapien
tctctcaggtagataactagcagtg

SEQ ID NO: 5332471 - DNA, 25 bp, Homo sapien
cattcctgtgaaagttgttatgagg

SEQ ID NO: 5332472 - DNA, 25 bp, Homo sapien
agccctccacaaaaggtggtggagt

SEQ ID NO: 5332473 - DNA, 25 bp, Homo sapien
ctgaagtacagcgtcacagggagat

SEQ ID NO: 5332474 - DNA, 25 bp, Homo sapien
agtacagcgtcacagggagatgttt

SEQ ID NO: 5332475 - DNA, 25 bp, Homo sapien
ccaccaagagggcagagatcggtag

SEQ ID NO: 5332476 - DNA, 25 bp, Homo sapien
tattgagtgctttctaggtgccagg

SEQ ID NO: 5332477 - DNA, 25 bp, Homo sapien
tttattgagtgctttctaggtgcca

SEQ ID NO: 5332478 - DNA, 25 bp, Homo sapien
ttgagtgctttctaggtgccaggca

SEQ ID NO: 5332479 - DNA, 25 bp, Homo sapien
agtgctttctaggtgccaggcacca

SEQ ID NO: 5332480 - DNA, 25 bp, Homo sapien
agatgaccattaggcaggcaagtga

SEQ ID NO: 5332481 - DNA, 25 bp, Homo sapien
agtctactggggagatgaccattag

SEQ ID NO: 5332482 - DNA, 25 bp, Homo sapien
gagatgaccattaggcaggcaagtg

SEQ ID NO: 5332483 - DNA, 25 bp, Homo sapien
tactggggagatgaccattaggcag

SEQ ID NO: 5332484 - DNA, 25 bp, Homo sapien
tgaattgtctgtgcacctagagggc

SEQ ID NO: 5332485 - DNA, 25 bp, Homo sapien
tcatcaaggtgagggaccaagcagc

SEQ ID NO: 5332486 - DNA, 25 bp, Homo sapien
tcactttgaggtatagaacatggcc

SEQ ID NO: 5332487 - DNA, 25 bp, Homo sapien
gtaggacaactagccacagaggtgc

SEQ ID NO: 5332488 - DNA, 25 bp, Homo sapien
gcgaagctttattcaaacggaaatc

SEQ ID NO: 5332489 - DNA, 25 bp, Homo sapien
caccgttcaacagcaaaaactattt

SEQ ID NO: 5332490 - DNA, 25 bp, Homo sapien
aaacggaaatctgcacttggacaga

SEQ ID NO: 5332491 - DNA, 25 bp, Homo sapien
ggacagaaatcaccgttcaacagca

SEQ ID NO: 5332492 - DNA, 25 bp, Homo sapien
cttggtgccctctgaggttacagcc

SEQ ID NO: 5332493 - DNA, 25 bp, Homo sapien
tgccctctgaggttacagcctcttg

SEQ ID NO: 5332494 - DNA, 25 bp, Homo sapien
tctgaggttacagcctcttgaagca

SEQ ID NO: 5332495 - DNA, 25 bp, Homo sapien
gccagggcaggtggtaggtgccttc

SEQ ID NO: 5332496 - DNA, 25 bp, Homo sapien
cagtatatcttctgacgactgggta

SEQ ID NO: 5332497 - DNA, 25 bp, Homo sapien
gacaaccaggatccctaagcgtttg

SEQ ID NO: 5332498 - DNA, 25 bp, Homo sapien
cgactgggtagaatggcctctttga

SEQ ID NO: 5332499 - DNA, 25 bp, Homo sapien
gcttgcctttggtgaaataattgga

SEQ ID NO: 5332500 - DNA, 25 bp, Homo sapien
tgggccccttacaaatcccttctca

SEQ ID NO: 5332501 - DNA, 25 bp, Homo sapien
ctcctggctgcatggtagagggcag

SEQ ID NO: 5332502 - DNA, 25 bp, Homo sapien
tagagggcaggacgttctccccggc

SEQ ID NO: 5332503 - DNA, 25 bp, Homo sapien
ttctccccggccgaaagtgacacaa

SEQ ID NO: 5332504 - DNA, 25 bp, Homo sapien
ggccgaaagtgacacaaaaaacgca

SEQ ID NO: 5332505 - DNA, 25 bp, Homo sapien
tgagaagagggtgccccggaggtgc

SEQ ID NO: 5332506 - DNA, 25 bp, Homo sapien
tgactgcgtgttggtcaagagtgca

SEQ ID NO: 5332507 - DNA, 25 bp, Homo sapien
ctgagaagagggtgccccggaggtg

SEQ ID NO: 5332508 - DNA, 25 bp, Homo sapien
ctgcgtgttggtcaagagtgcacag

SEQ ID NO: 5332509 - DNA, 25 bp, Homo sapien
gaacgccaccctcagacatggaaat

SEQ ID NO: 5332510 - DNA, 25 bp, Homo sapien
ttggtcgctaggacaagcaactccc

SEQ ID NO: 5332511 - DNA, 25 bp, Homo sapien
gcctgggaagcagggaacgccaccc

SEQ ID NO: 5332512 - DNA, 25 bp, Homo sapien
aaaggtggaggctgaaaatgactga

SEQ ID NO: 5332513 - DNA, 25 bp, Homo sapien
tataaagtaaaccatgcaagttccc

SEQ ID NO: 5332514 - DNA, 25 bp, Homo sapien
gggacccaaaggactcactgaggaa

SEQ ID NO: 5332515 - DNA, 25 bp, Homo sapien
tgccctgtgaggactgtgtcagaga

SEQ ID NO: 5332516 - DNA, 25 bp, Homo sapien
tgacctcaggatgacccctcgaggg

SEQ ID NO: 5332517 - DNA, 25 bp, Homo sapien
gaaatgctaggtaatgattcaccac

SEQ ID NO: 5332518 - DNA, 25 bp, Homo sapien
ctgaaatgctaggtaatgattcacc

SEQ ID NO: 5332519 - DNA, 25 bp, Homo sapien
tgaaatgctaggtaatgattcacca

SEQ ID NO: 5332520 - DNA, 25 bp, Homo sapien
cctgccggttcccatggtgaggtga

SEQ ID NO: 5332521 - DNA, 25 bp, Homo sapien
tcaagagacagtcatccctgccggt

SEQ ID NO: 5332522 - DNA, 25 bp, Homo sapien
agggcacgtgtgcatatcctggaca

SEQ ID NO: 5332523 - DNA, 25 bp, Homo sapien
gaggctctactccaaactcgcagca

SEQ ID NO: 5332524 - DNA, 25 bp, Homo sapien
taggcccactccaatcatgctggtg

SEQ ID NO: 5332525 - DNA, 25 bp, Homo sapien
gctcaaagacgtagaggccaatcag

SEQ ID NO: 5332526 - DNA, 25 bp, Homo sapien
ggccaatcagtacagcggtggagaa

SEQ ID NO: 5332527 - DNA, 25 bp, Homo sapien
gacgaggttggtgaataggcccact

SEQ ID NO: 5332528 - DNA, 25 bp, Homo sapien
gtggccactgtgtattcttctatca

SEQ ID NO: 5332529 - DNA, 25 bp, Homo sapien
tctgccaggtaatagagtccagccg

SEQ ID NO: 5332530 - DNA, 25 bp, Homo sapien
ctggtggccactgtgtattcttcta

SEQ ID NO: 5332531 - DNA, 25 bp, Homo sapien
tcagttctgccaggtaatagagtcc

SEQ ID NO: 5332532 - DNA, 25 bp, Homo sapien
tgccggagcggactctgtgacacct

SEQ ID NO: 5332533 - DNA, 25 bp, Homo sapien
aactgaggccgaatgggaaccagcc

SEQ ID NO: 5332534 - DNA, 25 bp, Homo sapien
ccctgtggacttcccggaaaagatg

SEQ ID NO: 5332535 - DNA, 25 bp, Homo sapien
gggcggcactcgagtcaccctttct

SEQ ID NO: 5332536 - DNA, 25 bp, Homo sapien
acctggatgaagagcgacagccagc

SEQ ID NO: 5332537 - DNA, 25 bp, Homo sapien
cgacagccagcgtgatgaaggccac

SEQ ID NO: 5332538 - DNA, 25 bp, Homo sapien
cctggatgaagagcgacagccagct

SEQ ID NO: 5332539 - DNA, 25 bp, Homo sapien
agccagcgtgatgaaggccacctgg

SEQ ID NO: 5332540 - DNA, 25 bp, Homo sapien
ccgccgagaggagcccggccctagc

SEQ ID NO: 5332541 - DNA, 25 bp, Homo sapien
accgggacgggcctgcgcgcttcgg

SEQ ID NO: 5332542 - DNA, 25 bp, Homo sapien
cggacgacaggacgacggtgcgccg

SEQ ID NO: 5332543 - DNA, 25 bp, Homo sapien
cgcgcttcggctccggcgacacaca

SEQ ID NO: 5332544 - DNA, 25 bp, Homo sapien
cttgtcatcaggtgccatttggcca

SEQ ID NO: 5332545 - DNA, 25 bp, Homo sapien
tacacacatctagcacaggcgatac

SEQ ID NO: 5332546 - DNA, 25 bp, Homo sapien
tgtagggtgaaggaccaactccgta

SEQ ID NO: 5332547 - DNA, 25 bp, Homo sapien
tccgtatatttcatgagagggttct

SEQ ID NO: 5332548 - DNA, 25 bp, Homo sapien
cccttgccgggctgtgttggctgct

SEQ ID NO: 5332549 - DNA, 25 bp, Homo sapien
ccccttgccgggctgtgttggctgc

SEQ ID NO: 5332550 - DNA, 25 bp, Homo sapien
cctgtggaagctgcagcaagcccac

SEQ ID NO: 5332551 - DNA, 25 bp, Homo sapien
gttgcacatgggacctcctgtggaa

SEQ ID NO: 5332552 - DNA, 25 bp, Homo sapien
cggttgcacatgggacctcctgtgg

SEQ ID NO: 5332553 - DNA, 25 bp, Homo sapien
tgcacatgggacctcctgtggaagc

SEQ ID NO: 5332554 - DNA, 25 bp, Homo sapien
tgtgttgggccgtgggtcatcgctc

SEQ ID NO: 5332555 - DNA, 25 bp, Homo sapien
aattggctctgtgttgggccgtggg

SEQ ID NO: 5332556 - DNA, 25 bp, Homo sapien
attgtggtggctgctaattggctct

SEQ ID NO: 5332557 - DNA, 25 bp, Homo sapien
cgtgggtcatcgctcggtcagccat

SEQ ID NO: 5332558 - DNA, 25 bp, Homo sapien
atagcggagtcatctcttatgcgga

SEQ ID NO: 5332559 - DNA, 25 bp, Homo sapien
ctgaggaacctcctcatcagcctgg

SEQ ID NO: 5332560 - DNA, 25 bp, Homo sapien
ggagtcatctcttatgcggactgcc

SEQ ID NO: 5332561 - DNA, 25 bp, Homo sapien
gcggagtcatctcttatgcggactg

SEQ ID NO: 5332562 - DNA, 25 bp, Homo sapien
gtggcgtcagtgacgtatgctgtgg

SEQ ID NO: 5332563 - DNA, 25 bp, Homo sapien
gtgtggtggcgtcagtgacgtatgc

SEQ ID NO: 5332564 - DNA, 25 bp, Homo sapien
tggtggcgtcagtgacgtatgctgt

SEQ ID NO: 5332565 - DNA, 25 bp, Homo sapien
gtcagtgacgtatgctgtggtcacc

SEQ ID NO: 5332566 - DNA, 25 bp, Homo sapien
gatccagaatggcagctggtccttg

SEQ ID NO: 5332567 - DNA, 25 bp, Homo sapien
agtgtgatggcctctgaccgctttg

SEQ ID NO: 5332568 - DNA, 25 bp, Homo sapien
tggtccttgctgggttgttcctgtc

SEQ ID NO: 5332569 - DNA, 25 bp, Homo sapien
tggaagagagacacgctcctgagtg

SEQ ID NO: 5332570 - DNA, 25 bp, Homo sapien
tgggaagtattaggccttctcctcc

SEQ ID NO: 5332571 - DNA, 25 bp, Homo sapien
tcactctgaccacgagtcgaaccca

SEQ ID NO: 5332572 - DNA, 25 bp, Homo sapien
ccgcggtggatgagagcgccgaatc

SEQ ID NO: 5332573 - DNA, 25 bp, Homo sapien
gccgcggtggatgagagcgccgaat

SEQ ID NO: 5332574 - DNA, 25 bp, Homo sapien
gagtcgaacccaggccgcggtggat

SEQ ID NO: 5332575 - DNA, 25 bp, Homo sapien
tctgttacaggtccatgggcgcagg

SEQ ID NO: 5332576 - DNA, 25 bp, Homo sapien
gagcgcagggcaacaatctgagcga

SEQ ID NO: 5332577 - DNA, 25 bp, Homo sapien
tccgtacattcacacgagcgcaggg

SEQ ID NO: 5332578 - DNA, 25 bp, Homo sapien
gatgtgtcctaagggtccgaccgac

SEQ ID NO: 5332579 - DNA, 25 bp, Homo sapien
aagcccctcaacaaatcactgggag

SEQ ID NO: 5332580 - DNA, 25 bp, Homo sapien
gggctggtcccatatcgtcttttat

SEQ ID NO: 5332581 - DNA, 25 bp, Homo sapien
taaataggcaagtcagctcaggatc

SEQ ID NO: 5332582 - DNA, 25 bp, Homo sapien
caaagaaatgatagggctcagagca

SEQ ID NO: 5332583 - DNA, 25 bp, Homo sapien
ccaatgtagcatggatggtttcact

SEQ ID NO: 5332584 - DNA, 25 bp, Homo sapien
gcctaacaaaggcagcacgatcttt

SEQ ID NO: 5332585 - DNA, 25 bp, Homo sapien
gatgcttcaaaagtcctgatgtgta

SEQ ID NO: 5332586 - DNA, 25 bp, Homo sapien
gctgagattccctgtccagtctggg

SEQ ID NO: 5332587 - DNA, 25 bp, Homo sapien
ccataacaagttcaatgtctacata

SEQ ID NO: 5332588 - DNA, 25 bp, Homo sapien
ggatattatacttgtcttccataac

SEQ ID NO: 5332589 - DNA, 25 bp, Homo sapien
ttccatccactatgcattcaatgca

SEQ ID NO: 5332590 - DNA, 25 bp, Homo sapien
atccactcatccatgaacttgttag

SEQ ID NO: 5332591 - DNA, 25 bp, Homo sapien
ttgtacacagctaacacattacatt

SEQ ID NO: 5332592 - DNA, 25 bp, Homo sapien
tacacagctaacacattacattcaa

SEQ ID NO: 5332593 - DNA, 25 bp, Homo sapien
ccttgtacacagctaacacattaca

SEQ ID NO: 5332594 - DNA, 25 bp, Homo sapien
acccttgtacacagctaacacatta

SEQ ID NO: 5332595 - DNA, 25 bp, Homo sapien
ctatatgattttaataatgttccct

SEQ ID NO: 5332596 - DNA, 25 bp, Homo sapien
ccctaagtaattagtaatcaagatt

SEQ ID NO: 5332597 - DNA, 25 bp, Homo sapien
atgttccctaagtaattagtaatca

SEQ ID NO: 5332598 - DNA, 25 bp, Homo sapien
tatatgattttaataatgttcccta

SEQ ID NO: 5332599 - DNA, 25 bp, Homo sapien
tatttgataggctttttcaggtcaa

SEQ ID NO: 5332600 - DNA, 25 bp, Homo sapien
gaacttttacatgatggaagcagtg

SEQ ID NO: 5332601 - DNA, 25 bp, Homo sapien
ggactcaatgtcatagtacattttg

SEQ ID NO: 5332602 - DNA, 25 bp, Homo sapien
tcagtctttaactgtgaacttttac

SEQ ID NO: 5332603 - DNA, 25 bp, Homo sapien
ccaccacagtctttaggatggagaa

SEQ ID NO: 5332604 - DNA, 25 bp, Homo sapien
cactggttttccatgtgctcctatt

SEQ ID NO: 5332605 - DNA, 25 bp, Homo sapien
ctcttcacttagactgcggatcttc

SEQ ID NO: 5332606 - DNA, 25 bp, Homo sapien
ccatgtgctcctattttgacctctt

SEQ ID NO: 5332607 - DNA, 25 bp, Homo sapien
ttgaacacatttgagatcataaaaa

SEQ ID NO: 5332608 - DNA, 25 bp, Homo sapien
caacttatagtatcataagacttag

SEQ ID NO: 5332609 - DNA, 25 bp, Homo sapien
gaacacatttgagatcataaaaata

SEQ ID NO: 5332610 - DNA, 25 bp, Homo sapien
aaaaataccaacttatagtatcata

SEQ ID NO: 5332611 - DNA, 25 bp, Homo sapien
gaggagcagatgtgtctctctatac

SEQ ID NO: 5332612 - DNA, 25 bp, Homo sapien
ttatggacactctaggaggagcaga

SEQ ID NO: 5332613 - DNA, 25 bp, Homo sapien
gatgtgtctctctatacttgacgga

SEQ ID NO: 5332614 - DNA, 25 bp, Homo sapien
tatacttgacggagaaatgatctgc

SEQ ID NO: 5332615 - DNA, 25 bp, Homo sapien
tagatatgtcaaagtcacacgtgcc

SEQ ID NO: 5332616 - DNA, 25 bp, Homo sapien
tctaaaaccagtcaaacagctaatg

SEQ ID NO: 5332617 - DNA, 25 bp, Homo sapien
agcacagagactagtttaacaccca

SEQ ID NO: 5332618 - DNA, 25 bp, Homo sapien
ggccacattcctaggcagtcataaa

SEQ ID NO: 5332619 - DNA, 25 bp, Homo sapien
accttgtgatgtgcccgcctctgac

SEQ ID NO: 5332620 - DNA, 25 bp, Homo sapien
ttgtgatgtgcccgcctctgactcc

SEQ ID NO: 5332621 - DNA, 25 bp, Homo sapien
gagccactgcacctgcctttttttt

SEQ ID NO: 5332622 - DNA, 25 bp, Homo sapien
gaccttgtgatgtgcccgcctctga

SEQ ID NO: 5332623 - DNA, 25 bp, Homo sapien
gccctacttggggttgctgactttc

SEQ ID NO: 5332624 - DNA, 25 bp, Homo sapien
ccctacttggggttgctgactttct

SEQ ID NO: 5332625 - DNA, 25 bp, Homo sapien
tgttgtcctggctcagtagggcaag

SEQ ID NO: 5332626 - DNA, 25 bp, Homo sapien
tgaacaacgaagtagatggatggct

SEQ ID NO: 5332627 - DNA, 25 bp, Homo sapien
taatggattagagctggagacgtca

SEQ ID NO: 5332628 - DNA, 25 bp, Homo sapien
gtagggcaagaaccaatgacacacc

SEQ ID NO: 5332629 - DNA, 25 bp, Homo sapien
gatgacgtgtagcaagagcttgaaa

SEQ ID NO: 5332630 - DNA, 25 bp, Homo sapien
tcttagagacccaaactgagtaagg

SEQ ID NO: 5332631 - DNA, 25 bp, Homo sapien
tatgagctgtgtatagatggtgcca

SEQ ID NO: 5332632 - DNA, 25 bp, Homo sapien
cctgggtgatgaaagtactgacatg

SEQ ID NO: 5332633 - DNA, 25 bp, Homo sapien
gagtttatcttgattctgccccttc

SEQ ID NO: 5332634 - DNA, 25 bp, Homo sapien
tgccccttcacctgcaaattaagag

SEQ ID NO: 5332635 - DNA, 25 bp, Homo sapien
ctcccaagtagtaggtgcccgccac

SEQ ID NO: 5332636 - DNA, 25 bp, Homo sapien
ggattgtcacaatcagaattcaaaa

SEQ ID NO: 5332637 - DNA, 25 bp, Homo sapien
tcttcaggtacatctcataacctct

SEQ ID NO: 5332638 - DNA, 25 bp, Homo sapien
ctgaaaatggcaatacaatcttgtt

SEQ ID NO: 5332639 - DNA, 25 bp, Homo sapien
tgaaaatggcaatacaatcttgttt

SEQ ID NO: 5332640 - DNA, 25 bp, Homo sapien
aaaatggcaatacaatcttgtttat

SEQ ID NO: 5332641 - DNA, 25 bp, Homo sapien
gaaaatggcaatacaatcttgttta

SEQ ID NO: 5332642 - DNA, 25 bp, Homo sapien
agcctgttactttgaagttataaat

SEQ ID NO: 5332643 - DNA, 25 bp, Homo sapien
ctcaggtggacgctcttctcaacat

SEQ ID NO: 5332644 - DNA, 25 bp, Homo sapien
caggtggacgctcttctcaacatcc

SEQ ID NO: 5332645 - DNA, 25 bp, Homo sapien
gcccctcaggtggacgctcttctca

SEQ ID NO: 5332646 - DNA, 25 bp, Homo sapien
ccctcaggtggacgctcttctcaac

SEQ ID NO: 5332647 - DNA, 25 bp, Homo sapien
tgtgctgtctggctaagttctccag

SEQ ID NO: 5332648 - DNA, 25 bp, Homo sapien
gtctggctaagttctccagagaaag

SEQ ID NO: 5332649 - DNA, 25 bp, Homo sapien
gccatcgcaggcagcagttaggagc

SEQ ID NO: 5332650 - DNA, 25 bp, Homo sapien
cccctcttgccatcgcaggcagcag

SEQ ID NO: 5332651 - DNA, 25 bp, Homo sapien
tcactgctaaatcccaagtacttgg

SEQ ID NO: 5332652 - DNA, 25 bp, Homo sapien
aagccatgtcgaggcataagccacc

SEQ ID NO: 5332653 - DNA, 25 bp, Homo sapien
gaatacacattatagggtctcatac

SEQ ID NO: 5332654 - DNA, 25 bp, Homo sapien
gcaactcaatctgccaggagcaatc

SEQ ID NO: 5332655 - DNA, 25 bp, Homo sapien
gtcacgtcccaatggatgaagcagt

SEQ ID NO: 5332656 - DNA, 25 bp, Homo sapien
gaaaacctgcaattggactgtcacg

SEQ ID NO: 5332657 - DNA, 25 bp, Homo sapien
aagcagttccatcttggtatttccc

SEQ ID NO: 5332658 - DNA, 25 bp, Homo sapien
aaacaacagatactccatgttcagg

SEQ ID NO: 5332659 - DNA, 25 bp, Homo sapien
caaatctggcactgctatggctaca

SEQ ID NO: 5332660 - DNA, 25 bp, Homo sapien
tataaaatgctgcagccttttccaa

SEQ ID NO: 5332661 - DNA, 25 bp, Homo sapien
ctgggcccccagaatattcttataa

SEQ ID NO: 5332662 - DNA, 25 bp, Homo sapien
catggttgagtcgacccaggttcca

SEQ ID NO: 5332663 - DNA, 25 bp, Homo sapien
tcttactgttggaatgggagcttga

SEQ ID NO: 5332664 - DNA, 25 bp, Homo sapien
cttactgttggaatgggagcttgaa

SEQ ID NO: 5332665 - DNA, 25 bp, Homo sapien
tactgttggaatgggagcttgaagt

SEQ ID NO: 5332666 - DNA, 25 bp, Homo sapien
ttactgttggaatgggagcttgaag

SEQ ID NO: 5332667 - DNA, 25 bp, Homo sapien
caagtggattacaaccgagtacaca

SEQ ID NO: 5332668 - DNA, 25 bp, Homo sapien
gaaatccaagtggattacaaccgag

SEQ ID NO: 5332669 - DNA, 25 bp, Homo sapien
tacaaccgagtacacatatacataa

SEQ ID NO: 5332670 - DNA, 25 bp, Homo sapien
tgtacaattgaaactaaattgcaaa

SEQ ID NO: 5332671 - DNA, 25 bp, Homo sapien
gttcccaacagaaagctggtcacgc

SEQ ID NO: 5332672 - DNA, 25 bp, Homo sapien
accgatccgcttctatttacttctg

SEQ ID NO: 5332673 - DNA, 25 bp, Homo sapien
cagtctctttattggtgcgcggtaa

SEQ ID NO: 5332674 - DNA, 25 bp, Homo sapien
ctggtcacgcttggagttcggccga

SEQ ID NO: 5332675 - DNA, 25 bp, Homo sapien
tcccgcccacatactggaaggtgca

SEQ ID NO: 5332676 - DNA, 25 bp, Homo sapien
gctactaagcggtggcgcttctgga

SEQ ID NO: 5332677 - DNA, 25 bp, Homo sapien
gaaatgggactcatgcacaaggcaa

SEQ ID NO: 5332678 - DNA, 25 bp, Homo sapien
cacagctctcggatggaaatgggac

SEQ ID NO: 5332679 - DNA, 25 bp, Homo sapien
gggaggacattagatcaaggtgctt

SEQ ID NO: 5332680 - DNA, 25 bp, Homo sapien
gacattagatcaaggtgctttggcc

SEQ ID NO: 5332681 - DNA, 25 bp, Homo sapien
ggaggacattagatcaaggtgcttt

SEQ ID NO: 5332682 - DNA, 25 bp, Homo sapien
ttagatcaaggtgctttggccacgc

SEQ ID NO: 5332683 - DNA, 25 bp, Homo sapien
tccctgtcccatggcgaaggtcgcc

SEQ ID NO: 5332684 - DNA, 25 bp, Homo sapien
gaaggtcgccggtgcccggtattca

SEQ ID NO: 5332685 - DNA, 25 bp, Homo sapien
ctgtcccatggcgaaggtcgccggt

SEQ ID NO: 5332686 - DNA, 25 bp, Homo sapien
tcccatggcgaaggtcgccggtgcc

SEQ ID NO: 5332687 - DNA, 25 bp, Homo sapien
ctacggcattcgcggctgcagcctt

SEQ ID NO: 5332688 - DNA, 25 bp, Homo sapien
ctgcagccttcagcacccgcgccat

SEQ ID NO: 5332689 - DNA, 25 bp, Homo sapien
gctgcagccttcagcacccgcgcca

SEQ ID NO: 5332690 - DNA, 25 bp, Homo sapien
cggcattcgcggctgcagccttcag

SEQ ID NO: 5332691 - DNA, 25 bp, Homo sapien
tttggaaagcaacccgccacgtcaa

SEQ ID NO: 5332692 - DNA, 25 bp, Homo sapien
aaaagattaggaatactgcagatgt

SEQ ID NO: 5332693 - DNA, 25 bp, Homo sapien
cattgttgtcttttaaaagttagag

SEQ ID NO: 5332694 - DNA, 25 bp, Homo sapien
aaaggctggcattttatacactgaa

SEQ ID NO: 5332695 - DNA, 25 bp, Homo sapien
tatttggagaggaaaccgaatggat

SEQ ID NO: 5332696 - DNA, 25 bp, Homo sapien
aaaagccatttacgattcccaccag

SEQ ID NO: 5332697 - DNA, 25 bp, Homo sapien
gatgccactgtgaaactgaagaact

SEQ ID NO: 5332698 - DNA, 25 bp, Homo sapien
gcaatccaaggtggtagctgaagga

SEQ ID NO: 5332699 - DNA, 25 bp, Homo sapien
taatgaatgcccctcagttagcaac

SEQ ID NO: 5332700 - DNA, 25 bp, Homo sapien
aggggagagtcgagatggccaggga

SEQ ID NO: 5332701 - DNA, 25 bp, Homo sapien
ggagagtcgagatggccagggacca

SEQ ID NO: 5332702 - DNA, 25 bp, Homo sapien
gcccttgtgcaactgacccccatgg

SEQ ID NO: 5332703 - DNA, 25 bp, Homo sapien
ctgggcccttgtgcaactgaccccc

SEQ ID NO: 5332704 - DNA, 25 bp, Homo sapien
gtggtgtcagaatccgcagctccca

SEQ ID NO: 5332705 - DNA, 25 bp, Homo sapien
gatgctcctagtgcacttgctgcct

SEQ ID NO: 5332706 - DNA, 25 bp, Homo sapien
aagactgctccgagctctccagagg

SEQ ID NO: 5332707 - DNA, 25 bp, Homo sapien
tctgcaatactagaggaggctggat

SEQ ID NO: 5332708 - DNA, 25 bp, Homo sapien
agtgaagggagatggattatcatta

SEQ ID NO: 5332709 - DNA, 25 bp, Homo sapien
tcagtgaagggagatggattatcat

SEQ ID NO: 5332710 - DNA, 25 bp, Homo sapien
tgaagggagatggattatcattagt

SEQ ID NO: 5332711 - DNA, 25 bp, Homo sapien
agtgaagttaagagcaatgttttgc

SEQ ID NO: 5332712 - DNA, 25 bp, Homo sapien
aagatggtgtcatccatggctgctc

SEQ ID NO: 5332713 - DNA, 25 bp, Homo sapien
ccagtctcccagaccactggggatg

SEQ ID NO: 5332714 - DNA, 25 bp, Homo sapien
ctgggctgcctgcaaagatggtgtc

SEQ ID NO: 5332715 - DNA, 25 bp, Homo sapien
tcccagaccactggggatgacctgg

SEQ ID NO: 5332716 - DNA, 25 bp, Homo sapien
gtggaccccaacaggcaaatctgac

SEQ ID NO: 5332717 - DNA, 25 bp, Homo sapien
aactgctgccttaattctggatcca

SEQ ID NO: 5332718 - DNA, 25 bp, Homo sapien
ctccatctccctctcagtccagccc

SEQ ID NO: 5332719 - DNA, 25 bp, Homo sapien
ctctggacctagctggaactgctgc

SEQ ID NO: 5332720 - DNA, 25 bp, Homo sapien
gctttcatattgccccttggacatc

SEQ ID NO: 5332721 - DNA, 25 bp, Homo sapien
tttttagaggaaattgtgctatctg

SEQ ID NO: 5332722 - DNA, 25 bp, Homo sapien
gagccttttcatagttgtccccctg

SEQ ID NO: 5332723 - DNA, 25 bp, Homo sapien
gccccaagtgcagagccttttcata

SEQ ID NO: 5332724 - DNA, 25 bp, Homo sapien
agtgcagagccttttcatagttgtc

SEQ ID NO: 5332725 - DNA, 25 bp, Homo sapien
tagttgtccccctgcccattggcag

SEQ ID NO: 5332726 - DNA, 25 bp, Homo sapien
agcccatgttttctactttgcaacc

SEQ ID NO: 5332727 - DNA, 25 bp, Homo sapien
ccatgagacaacttatgtgtgagac

SEQ ID NO: 5332728 - DNA, 25 bp, Homo sapien
cagtgacccaaccttaggcaaaagg

SEQ ID NO: 5332729 - DNA, 25 bp, Homo sapien
caactaagattatgacccatgagac

SEQ ID NO: 5332730 - DNA, 25 bp, Homo sapien
ggaggctcataatcaacaggacaga

SEQ ID NO: 5332731 - DNA, 25 bp, Homo sapien
taacattgggaccagccagattggc

SEQ ID NO: 5332732 - DNA, 25 bp, Homo sapien
agttggactacaagaggaaccgccg

SEQ ID NO: 5332733 - DNA, 25 bp, Homo sapien
aatgacgtccgcgttatcccagagg

SEQ ID NO: 5332734 - DNA, 25 bp, Homo sapien
gcttgacagcacattggttatccga

SEQ ID NO: 5332735 - DNA, 25 bp, Homo sapien
tgaggtggcagatcaaccctagtgc

SEQ ID NO: 5332736 - DNA, 25 bp, Homo sapien
tacacaccgcggaacacttctgatg

SEQ ID NO: 5332737 - DNA, 25 bp, Homo sapien
ggtcaggtacacagtcacatgggtc

SEQ ID NO: 5332738 - DNA, 25 bp, Homo sapien
gcatctgggttcaggttacttttgc

SEQ ID NO: 5332739 - DNA, 25 bp, Homo sapien
catctgggttcaggttacttttgct

SEQ ID NO: 5332740 - DNA, 25 bp, Homo sapien
cttggtgaaaaccagggtactccat

SEQ ID NO: 5332741 - DNA, 25 bp, Homo sapien
catctttctgtactctctttggttc

SEQ ID NO: 5332742 - DNA, 25 bp, Homo sapien
caggctggataccacaatctctatt

SEQ ID NO: 5332743 - DNA, 25 bp, Homo sapien
agggtactccatcagaccaggctgg

SEQ ID NO: 5332744 - DNA, 25 bp, Homo sapien
gcatctcttggaagcagcggtccaa

SEQ ID NO: 5332745 - DNA, 25 bp, Homo sapien
gtctcgtgagggaataaaccagtct

SEQ ID NO: 5332746 - DNA, 25 bp, Homo sapien
catttaactgctgttgcaactgtcc

SEQ ID NO: 5332747 - DNA, 25 bp, Homo sapien
tccaagaagtcttgctcctgcagtt

SEQ ID NO: 5332748 - DNA, 25 bp, Homo sapien
gttcccatttgaggcatgccatgct

SEQ ID NO: 5332749 - DNA, 25 bp, Homo sapien
cccgagttcccatttgaggcatgcc

SEQ ID NO: 5332750 - DNA, 25 bp, Homo sapien
gagttcccatttgaggcatgccatg

SEQ ID NO: 5332751 - DNA, 25 bp, Homo sapien
aatctacacccaataacacagggca

SEQ ID NO: 5332752 - DNA, 25 bp, Homo sapien
tggcttctaatagccctggtgcaat

SEQ ID NO: 5332753 - DNA, 25 bp, Homo sapien
gagcatgtcagtgagtgttaacaaa

SEQ ID NO: 5332754 - DNA, 25 bp, Homo sapien
gagtttgctaaactcttgaatgtag

SEQ ID NO: 5332755 - DNA, 25 bp, Homo sapien
tgcaatcctgatcactggggttaag

SEQ ID NO: 5332756 - DNA, 25 bp, Homo sapien
cctctttggattttacactcggtga

SEQ ID NO: 5332757 - DNA, 25 bp, Homo sapien
ttccttttcatcgtgcccacttaac

SEQ ID NO: 5332758 - DNA, 25 bp, Homo sapien
ttttacactcggtgatgtatttgcc

SEQ ID NO: 5332759 - DNA, 25 bp, Homo sapien
ctcggtgatgtatttgccatattgg

SEQ ID NO: 5332760 - DNA, 25 bp, Homo sapien
agaaaatatgcccaaagcttccaga

SEQ ID NO: 5332761 - DNA, 25 bp, Homo sapien
tacataaatcgggttaagaggctga

SEQ ID NO: 5332762 - DNA, 25 bp, Homo sapien
gccccagatgacagattgactgcaa

SEQ ID NO: 5332763 - DNA, 25 bp, Homo sapien
tgtaagagtctcaagcacaggcacc

SEQ ID NO: 5332764 - DNA, 25 bp, Homo sapien
ggccacaagtgactggaccagggct

SEQ ID NO: 5332765 - DNA, 25 bp, Homo sapien
ccacaagtgactggaccagggctca

SEQ ID NO: 5332766 - DNA, 25 bp, Homo sapien
gccacaagtgactggaccagggctc

SEQ ID NO: 5332767 - DNA, 25 bp, Homo sapien
ttgccaaactccctgttctgcgtat

SEQ ID NO: 5332768 - DNA, 25 bp, Homo sapien
tgccaaactccctgttctgcgtatt

SEQ ID NO: 5332769 - DNA, 25 bp, Homo sapien
cttgccaaactccctgttctgcgta

SEQ ID NO: 5332770 - DNA, 25 bp, Homo sapien
ccaaactccctgttctgcgtattct

SEQ ID NO: 5332771 - DNA, 25 bp, Homo sapien
agagaagtggcgaacgtctcccagg

SEQ ID NO: 5332772 - DNA, 25 bp, Homo sapien
ctcccaggcaaatgaggcatgaaga

SEQ ID NO: 5332773 - DNA, 25 bp, Homo sapien
cgcaaggcacaagagaagtggcgaa

SEQ ID NO: 5332774 - DNA, 25 bp, Homo sapien
ccaggcaaatgaggcatgaagaatg

SEQ ID NO: 5332775 - DNA, 25 bp, Homo sapien
gcctttagtaccaaaacgtgaagca

SEQ ID NO: 5332776 - DNA, 25 bp, Homo sapien
agaagcccctccttcagatcgtact

SEQ ID NO: 5332777 - DNA, 25 bp, Homo sapien
gccacaacagtctcggcctttagta

SEQ ID NO: 5332778 - DNA, 25 bp, Homo sapien
tcctccgagagcttaagccgttgcc

SEQ ID NO: 5332779 - DNA, 25 bp, Homo sapien
ttattaccaggatagcaatgggatg

SEQ ID NO: 5332780 - DNA, 25 bp, Homo sapien
cggtgtatgatgagagaaagtttac

SEQ ID NO: 5332781 - DNA, 25 bp, Homo sapien
cctgaattggccttccggtgtatga

SEQ ID NO: 5332782 - DNA, 25 bp, Homo sapien
gagcagtcagaaatactccttgagg

SEQ ID NO: 5332783 - DNA, 25 bp, Homo sapien
gtcatgtagcagtaaggtgtaggat

SEQ ID NO: 5332784 - DNA, 25 bp, Homo sapien
tgtcatgtagcagtaaggtgtagga

SEQ ID NO: 5332785 - DNA, 25 bp, Homo sapien
atgtcatgtagcagtaaggtgtagg

SEQ ID NO: 5332786 - DNA, 25 bp, Homo sapien
gatgtcatgtagcagtaaggtgtag

SEQ ID NO: 5332787 - DNA, 25 bp, Homo sapien
catttagcaattatagctgtcagca

SEQ ID NO: 5332788 - DNA, 25 bp, Homo sapien
tagcaattatagctgtcagcacagc

SEQ ID NO: 5332789 - DNA, 25 bp, Homo sapien
tgtttctgggcagcgagcccttggc

SEQ ID NO: 5332790 - DNA, 25 bp, Homo sapien
ctgtttctgggcagcgagcccttgg

SEQ ID NO: 5332791 - DNA, 25 bp, Homo sapien
tcagtaagcagtccttgagctaact

SEQ ID NO: 5332792 - DNA, 25 bp, Homo sapien
ttagtgcagagtgaagagaaatatg

SEQ ID NO: 5332793 - DNA, 25 bp, Homo sapien
cagagtgaagagaaatatgagttcc

SEQ ID NO: 5332794 - DNA, 25 bp, Homo sapien
tagtgcagagtgaagagaaatatga

SEQ ID NO: 5332795 - DNA, 25 bp, Homo sapien
gtgcagagtgaagagaaatatgagt

SEQ ID NO: 5332796 - DNA, 25 bp, Homo sapien
tccagcatgcttatgctccttccca

SEQ ID NO: 5332797 - DNA, 25 bp, Homo sapien
ccagcatgcttatgctccttcccat

SEQ ID NO: 5332798 - DNA, 25 bp, Homo sapien
tctcctcttcacctatcacaaacat

SEQ ID NO: 5332799 - DNA, 25 bp, Homo sapien
gctggtctcaacgtcaggcaataca

SEQ ID NO: 5332800 - DNA, 25 bp, Homo sapien
tccctaatggccagtaatgctgtac

SEQ ID NO: 5332801 - DNA, 25 bp, Homo sapien
gaagagtctgttcaagtccactgcc

SEQ ID NO: 5332802 - DNA, 25 bp, Homo sapien
tatttccaccagtaacatgtcagag

SEQ ID NO: 5332803 - DNA, 25 bp, Homo sapien
caaataaccaaatggcagagagggc

SEQ ID NO: 5332804 - DNA, 25 bp, Homo sapien
aatacaatgttgtgctctagaggcc

SEQ ID NO: 5332805 - DNA, 25 bp, Homo sapien
ttctcagtaaagcagtaaatagggc

SEQ ID NO: 5332806 - DNA, 25 bp, Homo sapien
tactaggagtgtttagagcaaggcc

SEQ ID NO: 5332807 - DNA, 25 bp, Homo sapien
gttctcatggagatctcttaacatt

SEQ ID NO: 5332808 - DNA, 25 bp, Homo sapien
ggttctcatggagatctcttaacat

SEQ ID NO: 5332809 - DNA, 25 bp, Homo sapien
gaacgaacctctttatgaccagagc

SEQ ID NO: 5332810 - DNA, 25 bp, Homo sapien
gatgactatccataaatcttccgat

SEQ ID NO: 5332811 - DNA, 25 bp, Homo sapien
tcttagaggtttcttaccaagatca

SEQ ID NO: 5332812 - DNA, 25 bp, Homo sapien
gatctcaactcttcgtttttccagg

SEQ ID NO: 5332813 - DNA, 25 bp, Homo sapien
ttacatgtataggccgagaagtcga

SEQ ID NO: 5332814 - DNA, 25 bp, Homo sapien
gatccagatcccgttcaccatatcg

SEQ ID NO: 5332815 - DNA, 25 bp, Homo sapien
tcaccatatcgaattagaaatccat

SEQ ID NO: 5332816 - DNA, 25 bp, Homo sapien
tgtataggccgagaagtcgaagtcc

SEQ ID NO: 5332817 - DNA, 25 bp, Homo sapien
cttcttctacaatgaaagaaaccat

SEQ ID NO: 5332818 - DNA, 25 bp, Homo sapien
gctggattgtatggttgatcctatt

SEQ ID NO: 5332819 - DNA, 25 bp, Homo sapien
ctcataaccatccttcgactttctg

SEQ ID NO: 5332820 - DNA, 25 bp, Homo sapien
cagttgttttagagcccacaaattg

SEQ ID NO: 5332821 - DNA, 25 bp, Homo sapien
agttcagttgttttagagcccacaa

SEQ ID NO: 5332822 - DNA, 25 bp, Homo sapien
tcctgtaaagtggcttgagttcctt

SEQ ID NO: 5332823 - DNA, 25 bp, Homo sapien
tacctagcaccctggagcactttag

SEQ ID NO: 5332824 - DNA, 25 bp, Homo sapien
ttattgccgggatggatgagtcctc

SEQ ID NO: 5332825 - DNA, 25 bp, Homo sapien
gctaggtctggtccaaaggctcctt

SEQ ID NO: 5332826 - DNA, 25 bp, Homo sapien
tagcccatggtagtgagacttgcca

SEQ ID NO: 5332827 - DNA, 25 bp, Homo sapien
cagcgtggggcaatacgatgaaacc

SEQ ID NO: 5332828 - DNA, 25 bp, Homo sapien
cacgatggagaggtagcactgagct

SEQ ID NO: 5332829 - DNA, 25 bp, Homo sapien
aaaacatagttcgttggctggtggc

SEQ ID NO: 5332830 - DNA, 25 bp, Homo sapien
cttgagcccacacgatggagaggta

SEQ ID NO: 5332831 - DNA, 25 bp, Homo sapien
cctaacgaatatgcgtgtcatcctt

SEQ ID NO: 5332832 - DNA, 25 bp, Homo sapien
gaatgcctaacgaatatgcgtgtca

SEQ ID NO: 5332833 - DNA, 25 bp, Homo sapien
atatggaatgcctaacgaatatgcg

SEQ ID NO: 5332834 - DNA, 25 bp, Homo sapien
tggaatgcctaacgaatatgcgtgt

SEQ ID NO: 5332835 - DNA, 25 bp, Homo sapien
cttaataggtcgcaggcaaggtact

SEQ ID NO: 5332836 - DNA, 25 bp, Homo sapien
cattctacttctagcaaccagtgga

SEQ ID NO: 5332837 - DNA, 25 bp, Homo sapien
gaactttggaagatagcctcctgac

SEQ ID NO: 5332838 - DNA, 25 bp, Homo sapien
tattatacacgttgttgcccagagg

SEQ ID NO: 5332839 - DNA, 25 bp, Homo sapien
tttcatagatgctgtattctcttga

SEQ ID NO: 5332840 - DNA, 25 bp, Homo sapien
tcatagatgctgtattctcttgaat

SEQ ID NO: 5332841 - DNA, 25 bp, Homo sapien
ttcatagatgctgtattctcttgaa

SEQ ID NO: 5332842 - DNA, 25 bp, Homo sapien
tctgcttaaacccacaagtgccagg

SEQ ID NO: 5332843 - DNA, 25 bp, Homo sapien
gaagtgattagctccgctgctgtag

SEQ ID NO: 5332844 - DNA, 25 bp, Homo sapien
taccactgttgggaataggacctga

SEQ ID NO: 5332845 - DNA, 25 bp, Homo sapien
gttaactgaagggtacatggccacc

SEQ ID NO: 5332846 - DNA, 25 bp, Homo sapien
cctcaaacaggaacgcttggtaact

SEQ ID NO: 5332847 - DNA, 25 bp, Homo sapien
gaagagctacctttgaatgagtcag

SEQ ID NO: 5332848 - DNA, 25 bp, Homo sapien
tcagtggctgaagaacaagatctcc

SEQ ID NO: 5332849 - DNA, 25 bp, Homo sapien
gatgttactgttctgtcagtggctg

SEQ ID NO: 5332850 - DNA, 25 bp, Homo sapien
caagtcatggtcaagtgggtattcc

SEQ ID NO: 5332851 - DNA, 25 bp, Homo sapien
cagaatttctgtatggtagggcaac

SEQ ID NO: 5332852 - DNA, 25 bp, Homo sapien
gcaatcagcttgcttagaactgcct

SEQ ID NO: 5332853 - DNA, 25 bp, Homo sapien
tctttgataaccaagctataggtgg

SEQ ID NO: 5332854 - DNA, 25 bp, Homo sapien
gaaaggatgttcattcctgccatcg

SEQ ID NO: 5332855 - DNA, 25 bp, Homo sapien
gggctggttcaatactggaaagtcc

SEQ ID NO: 5332856 - DNA, 25 bp, Homo sapien
cctgccatcgttaggcaacaaactt

SEQ ID NO: 5332857 - DNA, 25 bp, Homo sapien
gttttccagccactgcaattctagg

SEQ ID NO: 5332858 - DNA, 25 bp, Homo sapien
ggatttccatgcaggcatatgtctt

SEQ ID NO: 5332859 - DNA, 25 bp, Homo sapien
aaggatttccatgcaggcatatgtc

SEQ ID NO: 5332860 - DNA, 25 bp, Homo sapien
aggatttccatgcaggcatatgtct

SEQ ID NO: 5332861 - DNA, 25 bp, Homo sapien
gatttccatgcaggcatatgtcttc

SEQ ID NO: 5332862 - DNA, 25 bp, Homo sapien
cttgcagctcagcagataggccgct

SEQ ID NO: 5332863 - DNA, 25 bp, Homo sapien
tgttcacattagtcccagagctgcg

SEQ ID NO: 5332864 - DNA, 25 bp, Homo sapien
tcctttccattgtatcagcagccat

SEQ ID NO: 5332865 - DNA, 25 bp, Homo sapien
actccctgctcaagaggagtgaggg

SEQ ID NO: 5332866 - DNA, 25 bp, Homo sapien
tacatgaaaacgtgggacacagact

SEQ ID NO: 5332867 - DNA, 25 bp, Homo sapien
aaggaggcaaccgatttggcgcagc

SEQ ID NO: 5332868 - DNA, 25 bp, Homo sapien
tcctgtccaagagcgagatctgggc

SEQ ID NO: 5332869 - DNA, 25 bp, Homo sapien
gacacagactgcattctacactcag

SEQ ID NO: 5332870 - DNA, 25 bp, Homo sapien
tccgcagccggagcattagattaca

SEQ ID NO: 5332871 - DNA, 25 bp, Homo sapien
gatgcctactgctccgcggtgtttg

SEQ ID NO: 5332872 - DNA, 25 bp, Homo sapien
aatgccgtgtcattgggagactccg

SEQ ID NO: 5332873 - DNA, 25 bp, Homo sapien
tacacgcgccaagcatgctgagggt

SEQ ID NO: 5332874 - DNA, 25 bp, Homo sapien
gattggtgctagagaagaagcctga

SEQ ID NO: 5332875 - DNA, 25 bp, Homo sapien
acatgtgctatacagtgattggtgc

SEQ ID NO: 5332876 - DNA, 25 bp, Homo sapien
gagggaacagctgacagagaccctg

SEQ ID NO: 5332877 - DNA, 25 bp, Homo sapien
ggttggtctcactggagttgatatc

SEQ ID NO: 5332878 - DNA, 25 bp, Homo sapien
agttgagattttgcgcagcagtgcg

SEQ ID NO: 5332879 - DNA, 25 bp, Homo sapien
gaccctagttctccagggaacgcag

SEQ ID NO: 5332880 - DNA, 25 bp, Homo sapien
taataagcgaaacgactgtcaccgt

SEQ ID NO: 5332881 - DNA, 25 bp, Homo sapien
tgggaagacggacagtgccctgaca

SEQ ID NO: 5332882 - DNA, 25 bp, Homo sapien
tggtttccccgaagacacactctcg

SEQ ID NO: 5332883 - DNA, 25 bp, Homo sapien
tcaccctttcgtcgagcgcacaggg

SEQ ID NO: 5332884 - DNA, 25 bp, Homo sapien
tggagccttggtcaccggaggcccc

SEQ ID NO: 5332885 - DNA, 25 bp, Homo sapien
cacggcgccttgtgcgctctcggag

SEQ ID NO: 5332886 - DNA, 25 bp, Homo sapien
agcaacctccccagtgcgaagaagg

SEQ ID NO: 5332887 - DNA, 25 bp, Homo sapien
cctgactttccgaggtgagagcccc

SEQ ID NO: 5332888 - DNA, 25 bp, Homo sapien
gcgaccctgtcgcaagcctgacttt

SEQ ID NO: 5332889 - DNA, 25 bp, Homo sapien
aaggcgacagctctcttggcgcggc

SEQ ID NO: 5332890 - DNA, 25 bp, Homo sapien
aactggctgagtcactcagtctaga

SEQ ID NO: 5332891 - DNA, 25 bp, Homo sapien
atgcccagccgattttgactaccct

SEQ ID NO: 5332892 - DNA, 25 bp, Homo sapien
tttttgtaactggctgagtcactca

SEQ ID NO: 5332893 - DNA, 25 bp, Homo sapien
tgtaactggctgagtcactcagtct

SEQ ID NO: 5332894 - DNA, 25 bp, Homo sapien
gagatcagctacctcttttgggaga

SEQ ID NO: 5332895 - DNA, 25 bp, Homo sapien
taaggcatggtgtttgccgccagaa

SEQ ID NO: 5332896 - DNA, 25 bp, Homo sapien
tcacagcatggttagggagcaccaa

SEQ ID NO: 5332897 - DNA, 25 bp, Homo sapien
tagaagcacactgctacacggctgt

SEQ ID NO: 5332898 - DNA, 25 bp, Homo sapien
gtaatgcagacagagggtcacctca

SEQ ID NO: 5332899 - DNA, 25 bp, Homo sapien
gatagtttctaaggagggctgtctc

SEQ ID NO: 5332900 - DNA, 25 bp, Homo sapien
tcttggtatggaaggaacctcgtct

SEQ ID NO: 5332901 - DNA, 25 bp, Homo sapien
gaacaatctgttccgggatgtggcc

SEQ ID NO: 5332902 - DNA, 25 bp, Homo sapien
gatcctcgttgccggagcccttggc

SEQ ID NO: 5332903 - DNA, 25 bp, Homo sapien
ctggagtcaccctccgatattggat

SEQ ID NO: 5332904 - DNA, 25 bp, Homo sapien
tcacggtctctcctgttacgggggc

SEQ ID NO: 5332905 - DNA, 25 bp, Homo sapien
gctcggggcgccttttccctgcttg

SEQ ID NO: 5332906 - DNA, 25 bp, Homo sapien
atgtccagcaacttgtgtttctgcc

SEQ ID NO: 5332907 - DNA, 25 bp, Homo sapien
gatgtccagcaacttgtgtttctgc

SEQ ID NO: 5332908 - DNA, 25 bp, Homo sapien
ttgtgtttctgcccgctagggtctt

SEQ ID NO: 5332909 - DNA, 25 bp, Homo sapien
cgatgtccagcaacttgtgtttctg

SEQ ID NO: 5332910 - DNA, 25 bp, Homo sapien
caaggtctgaggatgagttgcatgt

SEQ ID NO: 5332911 - DNA, 25 bp, Homo sapien
gagtatcaaagaaggagtgcccact

SEQ ID NO: 5332912 - DNA, 25 bp, Homo sapien
agttgcatgtgactctttgccttcc

SEQ ID NO: 5332913 - DNA, 25 bp, Homo sapien
ttccatagctcccagcacggtgggg

SEQ ID NO: 5332914 - DNA, 25 bp, Homo sapien
gagagttgcagggattcctggattc

SEQ ID NO: 5332915 - DNA, 25 bp, Homo sapien
gagttgcagggattcctggattccc

SEQ ID NO: 5332916 - DNA, 25 bp, Homo sapien
ttccctacaccagtcagatcatggg

SEQ ID NO: 5332917 - DNA, 25 bp, Homo sapien
ttcctggattccctacaccagtcag

SEQ ID NO: 5332918 - DNA, 25 bp, Homo sapien
ttgattgcataagaatgcccagagg

SEQ ID NO: 5332919 - DNA, 25 bp, Homo sapien
tgaggtggtgtgagtggtcagtcgg

SEQ ID NO: 5332920 - DNA, 25 bp, Homo sapien
ggtctttgaattgggcttgattgca

SEQ ID NO: 5332921 - DNA, 25 bp, Homo sapien
aattggaggagattcgatttgctgt

SEQ ID NO: 5332922 - DNA, 25 bp, Homo sapien
ctcctatctgcaccaggtaagggag

SEQ ID NO: 5332923 - DNA, 25 bp, Homo sapien
tccctcctatctgcaccaggtaagg

SEQ ID NO: 5332924 - DNA, 25 bp, Homo sapien
tttccctcctatctgcaccaggtaa

SEQ ID NO: 5332925 - DNA, 25 bp, Homo sapien
ccaggacgagccctcctctccaccc

SEQ ID NO: 5332926 - DNA, 25 bp, Homo sapien
tggaagccttgagggccaagggacc

SEQ ID NO: 5332927 - DNA, 25 bp, Homo sapien
ccctggatcacagggggcagttccc

SEQ ID NO: 5332928 - DNA, 25 bp, Homo sapien
ggcagttccccatgaagggaggctt

SEQ ID NO: 5332929 - DNA, 25 bp, Homo sapien
aaggggaaagtgattggtgactgga

SEQ ID NO: 5332930 - DNA, 25 bp, Homo sapien
cagccaaggcttgcagaagcatctc

SEQ ID NO: 5332931 - DNA, 25 bp, Homo sapien
gcatcttgagagacccctgtgtggt

SEQ ID NO: 5332932 - DNA, 25 bp, Homo sapien
ccatgtagaatcctgggcggcatct

SEQ ID NO: 5332933 - DNA, 25 bp, Homo sapien
tgcagaagcatctcagggtctttcc

SEQ ID NO: 5332934 - DNA, 25 bp, Homo sapien
gggcgaaggaagagtcctttcacca

SEQ ID NO: 5332935 - DNA, 25 bp, Homo sapien
agagtgtgcagggaactctccatgg

SEQ ID NO: 5332936 - DNA, 25 bp, Homo sapien
tgatctcgactgtgaggctcagagt

SEQ ID NO: 5332937 - DNA, 25 bp, Homo sapien
gggcttgtttgatctcgactgtgag

SEQ ID NO: 5332938 - DNA, 25 bp, Homo sapien
aggatccctgccatcgtggccacag

SEQ ID NO: 5332939 - DNA, 25 bp, Homo sapien
catgatgtagcagagtgagctccaa

SEQ ID NO: 5332940 - DNA, 25 bp, Homo sapien
tgagctccaagatgccaagcccttc

SEQ ID NO: 5332941 - DNA, 25 bp, Homo sapien
ttgcctgcccctcggaatggcacct

SEQ ID NO: 5332942 - DNA, 25 bp, Homo sapien
agatccctgtccgggaccctggcgg

SEQ ID NO: 5332943 - DNA, 25 bp, Homo sapien
tgaggatggagcatacgtttggatc

SEQ ID NO: 5332944 - DNA, 25 bp, Homo sapien
gatctggactgtgtacgaggaagcc

SEQ ID NO: 5332945 - DNA, 25 bp, Homo sapien
ctgagccctcgagggtccgaagatc

SEQ ID NO: 5332946 - DNA, 25 bp, Homo sapien
agatcatagtagttgatctggatcc

SEQ ID NO: 5332947 - DNA, 25 bp, Homo sapien
ggccctaagatcatagtagttgatc

SEQ ID NO: 5332948 - DNA, 25 bp, Homo sapien
ttggccctaagatcatagtagttga

SEQ ID NO: 5332949 - DNA, 25 bp, Homo sapien
atcatagtagttgatctggatccct

SEQ ID NO: 5332950 - DNA, 25 bp, Homo sapien
gcctggaggctgaatgatggacagc

SEQ ID NO: 5332951 - DNA, 25 bp, Homo sapien
agccctcagtgggataaccctccat

SEQ ID NO: 5332952 - DNA, 25 bp, Homo sapien
atggacagccctcagtgggataacc

SEQ ID NO: 5332953 - DNA, 25 bp, Homo sapien
tgcatttcagttgcagccttgcctg

SEQ ID NO: 5332954 - DNA, 25 bp, Homo sapien
acgctggcagagcatcggtttgtct

SEQ ID NO: 5332955 - DNA, 25 bp, Homo sapien
gctggcagagcatcggtttgtctgc

SEQ ID NO: 5332956 - DNA, 25 bp, Homo sapien
tccaggagacgctggcagagcatcg

SEQ ID NO: 5332957 - DNA, 25 bp, Homo sapien
agacgctggcagagcatcggtttgt

SEQ ID NO: 5332958 - DNA, 25 bp, Homo sapien
ggtgcatcgctgatcctgtttcaac

SEQ ID NO: 5332959 - DNA, 25 bp, Homo sapien
ctgtttcaacttctcgcaggctcag

SEQ ID NO: 5332960 - DNA, 25 bp, Homo sapien
ttcaacttctcgcaggctcagaaag

SEQ ID NO: 5332961 - DNA, 25 bp, Homo sapien
gcaggtcatccaggtgcatcgctga

SEQ ID NO: 5332962 - DNA, 25 bp, Homo sapien
ggtcttccagagcacgcccacgtaa

SEQ ID NO: 5332963 - DNA, 25 bp, Homo sapien
ccgtaagtgttgaaccaaacaccag

SEQ ID NO: 5332964 - DNA, 25 bp, Homo sapien
agagcacgcccacgtaacaggcacg

SEQ ID NO: 5332965 - DNA, 25 bp, Homo sapien
cacgtaacaggcacgccgtaagtgt

SEQ ID NO: 5332966 - DNA, 25 bp, Homo sapien
tgagcactcctggttggcgttggaa

SEQ ID NO: 5332967 - DNA, 25 bp, Homo sapien
cactcctggttggcgttggaaggca

SEQ ID NO: 5332968 - DNA, 25 bp, Homo sapien
aagggtgagcactcctggttggcgt

SEQ ID NO: 5332969 - DNA, 25 bp, Homo sapien
ggtggtgaagggtgagcactcctgg

SEQ ID NO: 5332970 - DNA, 25 bp, Homo sapien
gaaacaccgcatggaagttggagcc

SEQ ID NO: 5332971 - DNA, 25 bp, Homo sapien
cctgtggtgagcagattccggattc

SEQ ID NO: 5332972 - DNA, 25 bp, Homo sapien
cacagtgctttacggtgctgacacc

SEQ ID NO: 5332973 - DNA, 25 bp, Homo sapien
caccggccaggatttagtgggtcca

SEQ ID NO: 5332974 - DNA, 25 bp, Homo sapien
tcttccgagtcctcagcatagctga

SEQ ID NO: 5332975 - DNA, 25 bp, Homo sapien
ccgagtcctcagcatagctgagtgt

SEQ ID NO: 5332976 - DNA, 25 bp, Homo sapien
gctcggttcccaagcttgagggaag

SEQ ID NO: 5332977 - DNA, 25 bp, Homo sapien
gaataaggggctagaaactgccgtg

SEQ ID NO: 5332978 - DNA, 25 bp, Homo sapien
gagggagagcctgtgcccatgtgct

SEQ ID NO: 5332979 - DNA, 25 bp, Homo sapien
agggagagcctgtgcccatgtgctg

SEQ ID NO: 5332980 - DNA, 25 bp, Homo sapien
atccacagatctgggtccctggatc

SEQ ID NO: 5332981 - DNA, 25 bp, Homo sapien
agccagaatccacatccacagatct

SEQ ID NO: 5332982 - DNA, 25 bp, Homo sapien
tctcaagccagaatccacatccaca

SEQ ID NO: 5332983 - DNA, 25 bp, Homo sapien
gatctgggtccctggatccttttcc

SEQ ID NO: 5332984 - DNA, 25 bp, Homo sapien
taagaaggcatagtaggcacctggg

SEQ ID NO: 5332985 - DNA, 25 bp, Homo sapien
aatcagtaagaaggcatagtaggca

SEQ ID NO: 5332986 - DNA, 25 bp, Homo sapien
cagtaagaaggcatagtaggcacct

SEQ ID NO: 5332987 - DNA, 25 bp, Homo sapien
tcagtaagaaggcatagtaggcacc

SEQ ID NO: 5332988 - DNA, 25 bp, Homo sapien
gacagatggactcatgactctccca

SEQ ID NO: 5332989 - DNA, 25 bp, Homo sapien
tgaccctgggaatgatgattgtacc

SEQ ID NO: 5332990 - DNA, 25 bp, Homo sapien
taaccaaaagagttgggcttgagca

SEQ ID NO: 5332991 - DNA, 25 bp, Homo sapien
tttagaggaaaaggattgacgcagc

SEQ ID NO: 5332992 - DNA, 25 bp, Homo sapien
cttgccctgtttagaatacccaagg

SEQ ID NO: 5332993 - DNA, 25 bp, Homo sapien
tagaatacccaagggcaataaaagc

SEQ ID NO: 5332994 - DNA, 25 bp, Homo sapien
ctgtttagaatacccaagggcaata

SEQ ID NO: 5332995 - DNA, 25 bp, Homo sapien
tgccctgtttagaatacccaagggc

SEQ ID NO: 5332996 - DNA, 25 bp, Homo sapien
cactggtcgcatgacatattgtggc

SEQ ID NO: 5332997 - DNA, 25 bp, Homo sapien
catacctattaaggcctaggtaggg

SEQ ID NO: 5332998 - DNA, 25 bp, Homo sapien
tgttgattctcagccgccaagtgtt

SEQ ID NO: 5332999 - DNA, 25 bp, Homo sapien
tattgtggccgagctaggctgttga

SEQ ID NO: 5333000 - DNA, 25 bp, Homo sapien
gtcttcagtagaccctctaactgtt

SEQ ID NO: 5333001 - DNA, 25 bp, Homo sapien
tgttacatctatggcccctatccac

SEQ ID NO: 5333002 - DNA, 25 bp, Homo sapien
tctaactgttacatctatggcccct

SEQ ID NO: 5333003 - DNA, 25 bp, Homo sapien
gaccctctaactgttacatctatgg

SEQ ID NO: 5333004 - DNA, 25 bp, Homo sapien
gttagaaacttcctctgttggcttc

SEQ ID NO: 5333005 - DNA, 25 bp, Homo sapien
tcctctttccacgtacctggttggc

SEQ ID NO: 5333006 - DNA, 25 bp, Homo sapien
aggatcagccgaggctcagacttgg

SEQ ID NO: 5333007 - DNA, 25 bp, Homo sapien
tctttccacgtacctggttggcttc

SEQ ID NO: 5333008 - DNA, 25 bp, Homo sapien
gcttccaggatcagccgaggctcag

SEQ ID NO: 5333009 - DNA, 25 bp, Homo sapien
tgttccagccgaaattcccttgcac

SEQ ID NO: 5333010 - DNA, 25 bp, Homo sapien
gttccagccgaaattcccttgcacc

SEQ ID NO: 5333011 - DNA, 25 bp, Homo sapien
aattcccttgcaccgtggaaagagg

SEQ ID NO: 5333012 - DNA, 25 bp, Homo sapien
tcccttgcaccgtggaaagaggaaa

SEQ ID NO: 5333013 - DNA, 25 bp, Homo sapien
tcatccctcgagttagggcacggtg

SEQ ID NO: 5333014 - DNA, 25 bp, Homo sapien
tgtgtgatcttgcagagtgcccttg

SEQ ID NO: 5333015 - DNA, 25 bp, Homo sapien
tatcgctgccactcaaaacctggag

SEQ ID NO: 5333016 - DNA, 25 bp, Homo sapien
gagggaccacgacagaccggcttta

SEQ ID NO: 5333017 - DNA, 25 bp, Homo sapien
tgctgcctcctgatcagagtccagc

SEQ ID NO: 5333018 - DNA, 25 bp, Homo sapien
atgctgcctcctgatcagagtccag

SEQ ID NO: 5333019 - DNA, 25 bp, Homo sapien
gatgctgcctcctgatcagagtcca

SEQ ID NO: 5333020 - DNA, 25 bp, Homo sapien
ccgtggaaacaatgtgggtctggca

SEQ ID NO: 5333021 - DNA, 25 bp, Homo sapien
ggtctggcaaaagctcgctggccat

SEQ ID NO: 5333022 - DNA, 25 bp, Homo sapien
cacaacctggaaatagggagcggcc

SEQ ID NO: 5333023 - DNA, 25 bp, Homo sapien
atgcccaggctagagatgggctggg

SEQ ID NO: 5333024 - DNA, 25 bp, Homo sapien
aagggccatccaccatgttccctga

SEQ ID NO: 5333025 - DNA, 25 bp, Homo sapien
caccatgttccctgacggtttttat

SEQ ID NO: 5333026 - DNA, 25 bp, Homo sapien
gccatccaccatgttccctgacggt

SEQ ID NO: 5333027 - DNA, 25 bp, Homo sapien
catgttccctgacggtttttattat

SEQ ID NO: 5333028 - DNA, 25 bp, Homo sapien
ggtcctcacgaacctgggagagctg

SEQ ID NO: 5333029 - DNA, 25 bp, Homo sapien
tgaagcgctagtcctgatgggtcct

SEQ ID NO: 5333030 - DNA, 25 bp, Homo sapien
ccgatgtctcggcttcttgttctct

SEQ ID NO: 5333031 - DNA, 25 bp, Homo sapien
tcttgttctctgtttgaagcgctag

SEQ ID NO: 5333032 - DNA, 25 bp, Homo sapien
acactggtctttctctgtcatctgg

SEQ ID NO: 5333033 - DNA, 25 bp, Homo sapien
tttctctgtcatctggagctttgtc

SEQ ID NO: 5333034 - DNA, 25 bp, Homo sapien
tgtcatctggagctttgtcctctgt

SEQ ID NO: 5333035 - DNA, 25 bp, Homo sapien
ctctgtcatctggagctttgtcctc

SEQ ID NO: 5333036 - DNA, 25 bp, Homo sapien
acagctcttgccctgatcccgacag

SEQ ID NO: 5333037 - DNA, 25 bp, Homo sapien
ctgatcccgacagcaccccactcac

SEQ ID NO: 5333038 - DNA, 25 bp, Homo sapien
ttgccaagttgcccctgatgcccat

SEQ ID NO: 5333039 - DNA, 25 bp, Homo sapien
caagttgcccctgatgcccattgca

SEQ ID NO: 5333040 - DNA, 25 bp, Homo sapien
tcccttggcaatgaccagagttctg

SEQ ID NO: 5333041 - DNA, 25 bp, Homo sapien
ttctgcaacagcttgtggcataact

SEQ ID NO: 5333042 - DNA, 25 bp, Homo sapien
ggaagtgtgacccagatgacctcat

SEQ ID NO: 5333043 - DNA, 25 bp, Homo sapien
caggaagtgtgacccagatgacctc

SEQ ID NO: 5333044 - DNA, 25 bp, Homo sapien
tcccctcagcgatgtaaaaatatgt

SEQ ID NO: 5333045 - DNA, 25 bp, Homo sapien
actagggaggtcattacttcaaaga

SEQ ID NO: 5333046 - DNA, 25 bp, Homo sapien
tgtttcaaggcactaactagggagg

SEQ ID NO: 5333047 - DNA, 25 bp, Homo sapien
cagggcccacctgtgaaaatactgc

SEQ ID NO: 5333048 - DNA, 25 bp, Homo sapien
taaaatagttgacttaagcatctgc

SEQ ID NO: 5333049 - DNA, 25 bp, Homo sapien
tttattaaaatagttgacttaagca

SEQ ID NO: 5333050 - DNA, 25 bp, Homo sapien
ttaacaactggtaatcaatttatta

SEQ ID NO: 5333051 - DNA, 25 bp, Homo sapien
taacaactggtaatcaatttattaa

SEQ ID NO: 5333052 - DNA, 25 bp, Homo sapien
ctcagaaggaccgtgcaaatcaatg

SEQ ID NO: 5333053 - DNA, 25 bp, Homo sapien
accgtgcaaatcaatgagtcgcttg

SEQ ID NO: 5333054 - DNA, 25 bp, Homo sapien
gaaggaccgtgcaaatcaatgagtc

SEQ ID NO: 5333055 - DNA, 25 bp, Homo sapien
ggaccgtgcaaatcaatgagtcgct

SEQ ID NO: 5333056 - DNA, 25 bp, Homo sapien
ttgctggagtagaggctgaactgca

SEQ ID NO: 5333057 - DNA, 25 bp, Homo sapien
taaggccatgccaaaggaggtgtcc

SEQ ID NO: 5333058 - DNA, 25 bp, Homo sapien
tccccgcgtgctacttgtcactaag

SEQ ID NO: 5333059 - DNA, 25 bp, Homo sapien
tggattccggcctgccttgctggag

SEQ ID NO: 5333060 - DNA, 25 bp, Homo sapien
ccttattctcatgacttgctaggag

SEQ ID NO: 5333061 - DNA, 25 bp, Homo sapien
ggtctatatgttggcaccatctctg

SEQ ID NO: 5333062 - DNA, 25 bp, Homo sapien
cataaaattgctcaggaaggacttc

SEQ ID NO: 5333063 - DNA, 25 bp, Homo sapien
gatatctactactgaaccagacttg

SEQ ID NO: 5333064 - DNA, 25 bp, Homo sapien
taatgactttgctgatagagtattt

SEQ ID NO: 5333065 - DNA, 25 bp, Homo sapien
gctgatagagtatttgatctgaaat

SEQ ID NO: 5333066 - DNA, 25 bp, Homo sapien
tcctgggattgaatactgaaatcaa

SEQ ID NO: 5333067 - DNA, 25 bp, Homo sapien
tgtgtcctgggattgaatactgaaa

SEQ ID NO: 5333068 - DNA, 25 bp, Homo sapien
ttccttcaagaaaggagtactctcc

SEQ ID NO: 5333069 - DNA, 25 bp, Homo sapien
cacggcgggcagaactggtggagtg

SEQ ID NO: 5333070 - DNA, 25 bp, Homo sapien
agtgaggtgggaagccacggcgggc

SEQ ID NO: 5333071 - DNA, 25 bp, Homo sapien
ttgaacagacaagctgtggccaagt

SEQ ID NO: 5333072 - DNA, 25 bp, Homo sapien
gaatgtgacaaatgccattcacctt

SEQ ID NO: 5333073 - DNA, 25 bp, Homo sapien
caaagcctgccaaccattgtgtgcg

SEQ ID NO: 5333074 - DNA, 25 bp, Homo sapien
aaactcctcgggcagaaggccgatc

SEQ ID NO: 5333075 - DNA, 25 bp, Homo sapien
tcattagggagtgggaattcacccc

SEQ ID NO: 5333076 - DNA, 25 bp, Homo sapien
ctcgggggcacctctgtagaggggt

SEQ ID NO: 5333077 - DNA, 25 bp, Homo sapien
ggctgctcagcaagggcagtggtct

SEQ ID NO: 5333078 - DNA, 25 bp, Homo sapien
cagcaagggcagtggtcttgagact

SEQ ID NO: 5333079 - DNA, 25 bp, Homo sapien
cctcgggggcacctctgtagagggg

SEQ ID NO: 5333080 - DNA, 25 bp, Homo sapien
tcccccgtggccagcgacacagcca

SEQ ID NO: 5333081 - DNA, 25 bp, Homo sapien
ctttcctccaagctctgacgtcccc

SEQ ID NO: 5333082 - DNA, 25 bp, Homo sapien
tccccctcccccgtggccagcgaca

SEQ ID NO: 5333083 - DNA, 25 bp, Homo sapien
tgtgaaacggcccttctttcctcca

SEQ ID NO: 5333084 - DNA, 25 bp, Homo sapien
ggcagttacgctgcagacacggccg

SEQ ID NO: 5333085 - DNA, 25 bp, Homo sapien
aggccagcctgagacagtccatggg

SEQ ID NO: 5333086 - DNA, 25 bp, Homo sapien
gagggagagtgtgctgaaaccacct

SEQ ID NO: 5333087 - DNA, 25 bp, Homo sapien
ttggagataccatcaggcagttacg

SEQ ID NO: 5333088 - DNA, 25 bp, Homo sapien
tggtaactccataattccttcccag

SEQ ID NO: 5333089 - DNA, 25 bp, Homo sapien
ccagaaggaacaggtctcttctcaa

SEQ ID NO: 5333090 - DNA, 25 bp, Homo sapien
agccttcgtgaggactccagcccat

SEQ ID NO: 5333091 - DNA, 25 bp, Homo sapien
gagaacttgtccgtgacctcagggt

SEQ ID NO: 5333092 - DNA, 25 bp, Homo sapien
tcctgcagccaagtcatcctgtcca

SEQ ID NO: 5333093 - DNA, 25 bp, Homo sapien
ctcctgcagccaagtcatcctgtcc

SEQ ID NO: 5333094 - DNA, 25 bp, Homo sapien
cctgcagccaagtcatcctgtccat

SEQ ID NO: 5333095 - DNA, 25 bp, Homo sapien
cctcctgcagccaagtcatcctgtc

SEQ ID NO: 5333096 - DNA, 25 bp, Homo sapien
tcaggctctcaggagctccctcaga

SEQ ID NO: 5333097 - DNA, 25 bp, Homo sapien
aggctctcaggagctccctcagagc

SEQ ID NO: 5333098 - DNA, 25 bp, Homo sapien
gctctcaggagctccctcagagcca

SEQ ID NO: 5333099 - DNA, 25 bp, Homo sapien
ccctcagagccaggcccagccacac

SEQ ID NO: 5333100 - DNA, 25 bp, Homo sapien
cgggtctgagtcaccagcagccctc

SEQ ID NO: 5333101 - DNA, 25 bp, Homo sapien
tctctgctcccacttcccccagccc

SEQ ID NO: 5333102 - DNA, 25 bp, Homo sapien
tgaggttctccggtcaccctcttct

SEQ ID NO: 5333103 - DNA, 25 bp, Homo sapien
ttctctgctcccacttcccccagcc

SEQ ID NO: 5333104 - DNA, 25 bp, Homo sapien
ccttgaggttctccggtcaccctct

SEQ ID NO: 5333105 - DNA, 25 bp, Homo sapien
gctgtgcagttgtcctcgagactgt

SEQ ID NO: 5333106 - DNA, 25 bp, Homo sapien
ttgtgatagcctccacggagctgct

SEQ ID NO: 5333107 - DNA, 25 bp, Homo sapien
ggcactcaacccactcaaggcttct

SEQ ID NO: 5333108 - DNA, 25 bp, Homo sapien
atattcttgtgatagcctccacgga

SEQ ID NO: 5333109 - DNA, 25 bp, Homo sapien
ttcttccggctttctcagggcccaa

SEQ ID NO: 5333110 - DNA, 25 bp, Homo sapien
ttccggctttctcagggcccaagga

SEQ ID NO: 5333111 - DNA, 25 bp, Homo sapien
tgctctgtccccttgttcagctcct

SEQ ID NO: 5333112 - DNA, 25 bp, Homo sapien
gcaggaagctgcacttcttccggct

SEQ ID NO: 5333113 - DNA, 25 bp, Homo sapien
cagcgttggacccacagaccgcaac

SEQ ID NO: 5333114 - DNA, 25 bp, Homo sapien
tggacccacagaccgcaacactgtg

SEQ ID NO: 5333115 - DNA, 25 bp, Homo sapien
gttggacccacagaccgcaacactg

SEQ ID NO: 5333116 - DNA, 25 bp, Homo sapien
gggccagcgttggacccacagaccg

SEQ ID NO: 5333117 - DNA, 25 bp, Homo sapien
aaagtgtgtggtgataggattgggc

SEQ ID NO: 5333118 - DNA, 25 bp, Homo sapien
gttggaaagtgtgtggtgataggat

SEQ ID NO: 5333119 - DNA, 25 bp, Homo sapien
attctcttatctcttaatccattca

SEQ ID NO: 5333120 - DNA, 25 bp, Homo sapien
gtgtggtgataggattgggctggcc

SEQ ID NO: 5333121 - DNA, 25 bp, Homo sapien
gccacatctgacttaacttcactct

SEQ ID NO: 5333122 - DNA, 25 bp, Homo sapien
tcattgggccacatctgacttaact

SEQ ID NO: 5333123 - DNA, 25 bp, Homo sapien
ctccactctctcttcaaactggtgg

SEQ ID NO: 5333124 - DNA, 25 bp, Homo sapien
cttcaaactggtggaggaccttggg

SEQ ID NO: 5333125 - DNA, 25 bp, Homo sapien
cctctagagtaacattggtctccat

SEQ ID NO: 5333126 - DNA, 25 bp, Homo sapien
ttcctctagagtaacattggtctcc

SEQ ID NO: 5333127 - DNA, 25 bp, Homo sapien
tcctctagagtaacattggtctcca

SEQ ID NO: 5333128 - DNA, 25 bp, Homo sapien
ggagcctggtaccctcagctgggcc

SEQ ID NO: 5333129 - DNA, 25 bp, Homo sapien
agggagcctggtaccctcagctggg

SEQ ID NO: 5333130 - DNA, 25 bp, Homo sapien
cagggagcctggtaccctcagctgg

SEQ ID NO: 5333131 - DNA, 25 bp, Homo sapien
gggagcctggtaccctcagctgggc

SEQ ID NO: 5333132 - DNA, 25 bp, Homo sapien
gcctatagaagagccacattgagta

SEQ ID NO: 5333133 - DNA, 25 bp, Homo sapien
cccacggtttattctagaagcctat

SEQ ID NO: 5333134 - DNA, 25 bp, Homo sapien
tattctagaagcctatagaagagcc

SEQ ID NO: 5333135 - DNA, 25 bp, Homo sapien
gaagagccacattgagtatttccaa

SEQ ID NO: 5333136 - DNA, 25 bp, Homo sapien
tctgtgtggtatgggcccgttccta

SEQ ID NO: 5333137 - DNA, 25 bp, Homo sapien
ccgtggcatagggaagggcaatctc

SEQ ID NO: 5333138 - DNA, 25 bp, Homo sapien
tcacagaagtctcgccaggacagct

SEQ ID NO: 5333139 - DNA, 25 bp, Homo sapien
gacacctttttcagggcggagggca

SEQ ID NO: 5333140 - DNA, 25 bp, Homo sapien
caaagaacttgacgctgaggccatc

SEQ ID NO: 5333141 - DNA, 25 bp, Homo sapien
tagactgtggcgctcagcatggcct

SEQ ID NO: 5333142 - DNA, 25 bp, Homo sapien
tcacgtctttgaacacgggcgctgt

SEQ ID NO: 5333143 - DNA, 25 bp, Homo sapien
cgtctccggcaggatctcgttctgg

SEQ ID NO: 5333144 - DNA, 25 bp, Homo sapien
tgatgacgcagtccaggtagcgcag

SEQ ID NO: 5333145 - DNA, 25 bp, Homo sapien
tcaagctcgaaggtctgcagcacag

SEQ ID NO: 5333146 - DNA, 25 bp, Homo sapien
aaatgggcgtgaacaggcgcatgac

SEQ ID NO: 5333147 - DNA, 25 bp, Homo sapien
cactgagcgtgtccaggcgcagtgt

SEQ ID NO: 5333148 - DNA, 25 bp, Homo sapien
tggccgtggtggcataggccgcaaa

SEQ ID NO: 5333149 - DNA, 25 bp, Homo sapien
cgtggtggcataggccgcaaagatc

SEQ ID NO: 5333150 - DNA, 25 bp, Homo sapien
tggcataggccgcaaagatcagctc

SEQ ID NO: 5333151 - DNA, 25 bp, Homo sapien
gcataggccgcaaagatcagctcca

SEQ ID NO: 5333152 - DNA, 25 bp, Homo sapien
tccagggcgtccaagtagtccttgc

SEQ ID NO: 5333153 - DNA, 25 bp, Homo sapien
tctgcaggatctgccgagcctgaat

SEQ ID NO: 5333154 - DNA, 25 bp, Homo sapien
ttctgcaggatctgccgagcctgaa

SEQ ID NO: 5333155 - DNA, 25 bp, Homo sapien
gggcgtccaagtagtccttgccctg

SEQ ID NO: 5333156 - DNA, 25 bp, Homo sapien
tagacctcaaagaggtgcccaaggt

SEQ ID NO: 5333157 - DNA, 25 bp, Homo sapien
aggtaactctccagggcctcgtggc

SEQ ID NO: 5333158 - DNA, 25 bp, Homo sapien
gcagcacccggatggccatgcggaa

SEQ ID NO: 5333159 - DNA, 25 bp, Homo sapien
tgcggaaggtcagcttctgcgcctc

SEQ ID NO: 5333160 - DNA, 25 bp, Homo sapien
cacaggacggaagtgccctggagaa

SEQ ID NO: 5333161 - DNA, 25 bp, Homo sapien
gcagaagcccatttcggaatcccgg

SEQ ID NO: 5333162 - DNA, 25 bp, Homo sapien
acttcagcttccacacaacagcaaa

SEQ ID NO: 5333163 - DNA, 25 bp, Homo sapien
aatgtgactggagagaacttcagct

SEQ ID NO: 5333164 - DNA, 25 bp, Homo sapien
ggttctgtcacgaagagtgcagggt

SEQ ID NO: 5333165 - DNA, 25 bp, Homo sapien
taggggttctgtcacgaagagtgca

SEQ ID NO: 5333166 - DNA, 25 bp, Homo sapien
caggcccagccaaagtcgaagctgg

SEQ ID NO: 5333167 - DNA, 25 bp, Homo sapien
cccagccaaagtcgaagctggtggg

SEQ ID NO: 5333168 - DNA, 25 bp, Homo sapien
gggttccatttcctgcgccctctag

SEQ ID NO: 5333169 - DNA, 25 bp, Homo sapien
tttcctgcgccctctagcgatggct

SEQ ID NO: 5333170 - DNA, 25 bp, Homo sapien
tgccctgccccgtgggttccatttc

SEQ ID NO: 5333171 - DNA, 25 bp, Homo sapien
tctagcgatggctggttgaactgct

SEQ ID NO: 5333172 - DNA, 25 bp, Homo sapien
tgggaaggtgccggggagcggctcc

SEQ ID NO: 5333173 - DNA, 25 bp, Homo sapien
tcaggactcgggcacactgggaagg

SEQ ID NO: 5333174 - DNA, 25 bp, Homo sapien
gctggggtcaggactcgggcacact

SEQ ID NO: 5333175 - DNA, 25 bp, Homo sapien
ggactcgggcacactgggaaggtgc

SEQ ID NO: 5333176 - DNA, 25 bp, Homo sapien
ccagtgactcagactgggaggaatg

SEQ ID NO: 5333177 - DNA, 25 bp, Homo sapien
ggaggaatggaagcggctgcccagg

SEQ ID NO: 5333178 - DNA, 25 bp, Homo sapien
tcagactgggaggaatggaagcggc

SEQ ID NO: 5333179 - DNA, 25 bp, Homo sapien
ccaggccagtgactcagactgggag

SEQ ID NO: 5333180 - DNA, 25 bp, Homo sapien
aagtcctgaactccctgcctcccac

SEQ ID NO: 5333181 - DNA, 25 bp, Homo sapien
agaagtcctgaactccctgcctccc

SEQ ID NO: 5333182 - DNA, 25 bp, Homo sapien
cagaagtcctgaactccctgcctcc

SEQ ID NO: 5333183 - DNA, 25 bp, Homo sapien
gaagtcctgaactccctgcctccca

SEQ ID NO: 5333184 - DNA, 25 bp, Homo sapien
tacggtgaagtccactctgagggtg

SEQ ID NO: 5333185 - DNA, 25 bp, Homo sapien
gctctgaatttatcaaagggtcctg

SEQ ID NO: 5333186 - DNA, 25 bp, Homo sapien
tggtcccggcatgtctcagggtcct

SEQ ID NO: 5333187 - DNA, 25 bp, Homo sapien
cgccactctggtgtggtcccggcat

SEQ ID NO: 5333188 - DNA, 25 bp, Homo sapien
gggaacccaggacagatacagcagc

SEQ ID NO: 5333189 - DNA, 25 bp, Homo sapien
gaacccaggacagatacagcagcca

SEQ ID NO: 5333190 - DNA, 25 bp, Homo sapien
ggaacccaggacagatacagcagcc

SEQ ID NO: 5333191 - DNA, 25 bp, Homo sapien
aacccaggacagatacagcagccag

SEQ ID NO: 5333192 - DNA, 25 bp, Homo sapien
caaatgcgtcttgaacacgttgcca

SEQ ID NO: 5333193 - DNA, 25 bp, Homo sapien
tggtgctcgcccatgaggatcttgc

SEQ ID NO: 5333194 - DNA, 25 bp, Homo sapien
cgcttgttgcggtggatgtcgccaa

SEQ ID NO: 5333195 - DNA, 25 bp, Homo sapien
caatggaattggacaccgtgttggg

SEQ ID NO: 5333196 - DNA, 25 bp, Homo sapien
gcgggagccacacccgggtctctct

SEQ ID NO: 5333197 - DNA, 25 bp, Homo sapien
cccgggtctctctcagggtgcactt

SEQ ID NO: 5333198 - DNA, 25 bp, Homo sapien
ctgcgggagccacacccgggtctct

SEQ ID NO: 5333199 - DNA, 25 bp, Homo sapien
acacccgggtctctctcagggtgca

SEQ ID NO: 5333200 - DNA, 25 bp, Homo sapien
ctgcagagggcccgcgagggagggg

SEQ ID NO: 5333201 - DNA, 25 bp, Homo sapien
cagagggcccgcgagggaggggcgg

SEQ ID NO: 5333202 - DNA, 25 bp, Homo sapien
gcagagggcccgcgagggaggggcg

SEQ ID NO: 5333203 - DNA, 25 bp, Homo sapien
tgcagagggcccgcgagggaggggc

SEQ ID NO: 5333204 - DNA, 25 bp, Homo sapien
cccctctccccaccaaacacactca

SEQ ID NO: 5333205 - DNA, 25 bp, Homo sapien
ctgccccctctccccaccaaacaca

SEQ ID NO: 5333206 - DNA, 25 bp, Homo sapien
tgccccctctccccaccaaacacac

SEQ ID NO: 5333207 - DNA, 25 bp, Homo sapien
ccctctccccaccaaacacactcac

SEQ ID NO: 5333208 - DNA, 25 bp, Homo sapien
gtgcacaagaactgcgaagtagggc

SEQ ID NO: 5333209 - DNA, 25 bp, Homo sapien
gacgagcacgcaggttttatttttc

SEQ ID NO: 5333210 - DNA, 25 bp, Homo sapien
tttatttttcatagcgtgcacaaga

SEQ ID NO: 5333211 - DNA, 25 bp, Homo sapien
cagacgagcacgcaggttttatttt

SEQ ID NO: 5333212 - DNA, 25 bp, Homo sapien
gcccagagccgcgattttcctaatg

SEQ ID NO: 5333213 - DNA, 25 bp, Homo sapien
ggcccagagccgcgattttcctaat

SEQ ID NO: 5333214 - DNA, 25 bp, Homo sapien
ccagagccgcgattttcctaatgca

SEQ ID NO: 5333215 - DNA, 25 bp, Homo sapien
agagccgcgattttcctaatgcatt

SEQ ID NO: 5333216 - DNA, 25 bp, Homo sapien
ttgtgggattcggagaaaaggtcat

SEQ ID NO: 5333217 - DNA, 25 bp, Homo sapien
ctcttgtgggattcggagaaaaggt

SEQ ID NO: 5333218 - DNA, 25 bp, Homo sapien
gggctcttgtgggattcggagaaaa

SEQ ID NO: 5333219 - DNA, 25 bp, Homo sapien
tcttgtgggattcggagaaaaggtc

SEQ ID NO: 5333220 - DNA, 25 bp, Homo sapien
gccctggattctcatttttccttgg

SEQ ID NO: 5333221 - DNA, 25 bp, Homo sapien
ccgaaagcctagagccctggattct

SEQ ID NO: 5333222 - DNA, 25 bp, Homo sapien
gcctagagccctggattctcatttt

SEQ ID NO: 5333223 - DNA, 25 bp, Homo sapien
ttccccgaaagcctagagccctgga

SEQ ID NO: 5333224 - DNA, 25 bp, Homo sapien
cgcggaccgcggaccagggacactg

SEQ ID NO: 5333225 - DNA, 25 bp, Homo sapien
gcgcggaccgcggaccagggacact

SEQ ID NO: 5333226 - DNA, 25 bp, Homo sapien
cagacacactcgcgcggaccgcgga

SEQ ID NO: 5333227 - DNA, 25 bp, Homo sapien
gcggaccgcggaccagggacactgt

SEQ ID NO: 5333228 - DNA, 25 bp, Homo sapien
gcgccgcaggaacacagttttaaat

SEQ ID NO: 5333229 - DNA, 25 bp, Homo sapien
cgactcaattttcggctcccagcga

SEQ ID NO: 5333230 - DNA, 25 bp, Homo sapien
caattttcggctcccagcgacacag

SEQ ID NO: 5333231 - DNA, 25 bp, Homo sapien
aatcggcaattcaagctgccaccag

SEQ ID NO: 5333232 - DNA, 25 bp, Homo sapien
ccccctgaacctgcgccgcgggcgc

SEQ ID NO: 5333233 - DNA, 25 bp, Homo sapien
cagccccctgaacctgcgccgcggg

SEQ ID NO: 5333234 - DNA, 25 bp, Homo sapien
cggaaccgcgctgccggcgggctgg

SEQ ID NO: 5333235 - DNA, 25 bp, Homo sapien
agccccctgaacctgcgccgcgggc

SEQ ID NO: 5333236 - DNA, 25 bp, Homo sapien
agcgtcacggacaccaggcacgcgg

SEQ ID NO: 5333237 - DNA, 25 bp, Homo sapien
gggcagcttgcagctcttgtcgcga

SEQ ID NO: 5333238 - DNA, 25 bp, Homo sapien
acagctgctgcgacacggccagcag

SEQ ID NO: 5333239 - DNA, 25 bp, Homo sapien
cgatgagcgggaagcccatggatcc

SEQ ID NO: 5333240 - DNA, 25 bp, Homo sapien
taaataaacatgctgggtgagcacg

SEQ ID NO: 5333241 - DNA, 25 bp, Homo sapien
catgagtgtgtctgcgcatccgtgc

SEQ ID NO: 5333242 - DNA, 25 bp, Homo sapien
gagaagacgggcacaaacgttcatt

SEQ ID NO: 5333243 - DNA, 25 bp, Homo sapien
atactggtccggcaagtgtcctgcg

SEQ ID NO: 5333244 - DNA, 25 bp, Homo sapien
gctgtgccctgatggatggtcctca

SEQ ID NO: 5333245 - DNA, 25 bp, Homo sapien
cctgactaatgtgactgtggtggca

SEQ ID NO: 5333246 - DNA, 25 bp, Homo sapien
ccagtctccatggaggtgtgcggta

SEQ ID NO: 5333247 - DNA, 25 bp, Homo sapien
ggcatattgcattagacacccataa

SEQ ID NO: 5333248 - DNA, 25 bp, Homo sapien
taaggaaagactagaatgatccctg

SEQ ID NO: 5333249 - DNA, 25 bp, Homo sapien
tagtatatggcaggagacaggatct

SEQ ID NO: 5333250 - DNA, 25 bp, Homo sapien
gggtactggattacatttggagaca

SEQ ID NO: 5333251 - DNA, 25 bp, Homo sapien
cagacccatgtattgcaaagcagtg

SEQ ID NO: 5333252 - DNA, 25 bp, Homo sapien
ccttttgcatcaaggatactgtcaa

SEQ ID NO: 5333253 - DNA, 25 bp, Homo sapien
ggatctaaaatccagactatctgaa

SEQ ID NO: 5333254 - DNA, 25 bp, Homo sapien
ttcttgactttggattaagcagttc

SEQ ID NO: 5333255 - DNA, 25 bp, Homo sapien
tgaaaagacccatagaataggttaa

SEQ ID NO: 5333256 - DNA, 25 bp, Homo sapien
gcccaaaataagtgccaaaaatcca

SEQ ID NO: 5333257 - DNA, 25 bp, Homo sapien
gtgagttacgtctcaataaatacaa

SEQ ID NO: 5333258 - DNA, 25 bp, Homo sapien
ccatataagttcatactaatataaa

SEQ ID NO: 5333259 - DNA, 25 bp, Homo sapien
tatgttgtgagttacgtctcaataa

SEQ ID NO: 5333260 - DNA, 25 bp, Homo sapien
caaatgctgccttaactagtgatga

SEQ ID NO: 5333261 - DNA, 25 bp, Homo sapien
ggaaactctctaccactttgcaact

SEQ ID NO: 5333262 - DNA, 25 bp, Homo sapien
gacactaaggagatatgacagctaa

SEQ ID NO: 5333263 - DNA, 25 bp, Homo sapien
tatagtatcctacactgaatcctgg

SEQ ID NO: 5333264 - DNA, 25 bp, Homo sapien
caatttctgaattgccagtaaggga

SEQ ID NO: 5333265 - DNA, 25 bp, Homo sapien
tcccattaggtcagattttgcacca

SEQ ID NO: 5333266 - DNA, 25 bp, Homo sapien
taattctactagatacaggtccaca

SEQ ID NO: 5333267 - DNA, 25 bp, Homo sapien
ggatctgtaacaccaagcttctctg

SEQ ID NO: 5333268 - DNA, 25 bp, Homo sapien
tgacgagtaaatggacagggccttt

SEQ ID NO: 5333269 - DNA, 25 bp, Homo sapien
tcatgacaccataaagaaaatccag

SEQ ID NO: 5333270 - DNA, 25 bp, Homo sapien
gaaaaggctggatccctatcatgct

SEQ ID NO: 5333271 - DNA, 25 bp, Homo sapien
tatctgggaacattctgaaagagga

SEQ ID NO: 5333272 - DNA, 25 bp, Homo sapien
tcagaggcctgatgaggaaggtcat

SEQ ID NO: 5333273 - DNA, 25 bp, Homo sapien
tgcggcccatctgtatcagtagctt

SEQ ID NO: 5333274 - DNA, 25 bp, Homo sapien
aggagctttcccctaaccatgcggc

SEQ ID NO: 5333275 - DNA, 25 bp, Homo sapien
caattgcagtcaagagaggagtcct

SEQ ID NO: 5333276 - DNA, 25 bp, Homo sapien
caaagatgagagcttggcgatgcca

SEQ ID NO: 5333277 - DNA, 25 bp, Homo sapien
gactgacctcatagcaaagcccttg

SEQ ID NO: 5333278 - DNA, 25 bp, Homo sapien
catctatgtggtgaatgggcatcca

SEQ ID NO: 5333279 - DNA, 25 bp, Homo sapien
caatggcattactggaggaggctaa

SEQ ID NO: 5333280 - DNA, 25 bp, Homo sapien
tagtgtagtaataacttcccctgag

SEQ ID NO: 5333281 - DNA, 25 bp, Homo sapien
aatgttatgtgaatactgcacaggg

SEQ ID NO: 5333282 - DNA, 25 bp, Homo sapien
taccaccatctctaagataacacag

SEQ ID NO: 5333283 - DNA, 25 bp, Homo sapien
tcatgtacttgcttattcttgtgcc

SEQ ID NO: 5333284 - DNA, 25 bp, Homo sapien
tgttcttgcggctagtatccttcat

SEQ ID NO: 5333285 - DNA, 25 bp, Homo sapien
tggctgctgatgagtcctcggagct

SEQ ID NO: 5333286 - DNA, 25 bp, Homo sapien
tggccacggtgtcaatgagtttctg

SEQ ID NO: 5333287 - DNA, 25 bp, Homo sapien
tccgaaactgtgcaaacatgttgtt

SEQ ID NO: 5333288 - DNA, 25 bp, Homo sapien
gtttcgccctgctaagaagggccag

SEQ ID NO: 5333289 - DNA, 25 bp, Homo sapien
tgtctttctgtttcgccctgctaag

SEQ ID NO: 5333290 - DNA, 25 bp, Homo sapien
agtcaagatctgatggtagaactgg

SEQ ID NO: 5333291 - DNA, 25 bp, Homo sapien
aaggagagtcaagatctgatggtag

SEQ ID NO: 5333292 - DNA, 25 bp, Homo sapien
tggccaacgctccagaatggtaggg

SEQ ID NO: 5333293 - DNA, 25 bp, Homo sapien
caattcctatgaggctgggagatac

SEQ ID NO: 5333294 - DNA, 25 bp, Homo sapien
ttcaggccccacactagcaagagta

SEQ ID NO: 5333295 - DNA, 25 bp, Homo sapien
gaactgtgggattaagccttgcctc

SEQ ID NO: 5333296 - DNA, 25 bp, Homo sapien
catagtcagcaaggtaggttgacca

SEQ ID NO: 5333297 - DNA, 25 bp, Homo sapien
agcagtcactgggtttacccggagg

SEQ ID NO: 5333298 - DNA, 25 bp, Homo sapien
cagcaaggtaggttgaccaatccca

SEQ ID NO: 5333299 - DNA, 25 bp, Homo sapien
tacccggaggtacttgcagttgggc

SEQ ID NO: 5333300 - DNA, 25 bp, Homo sapien
atttctggttaatgacacatgggaa

SEQ ID NO: 5333301 - DNA, 25 bp, Homo sapien
ggttaatgacacatgggaagtcact

SEQ ID NO: 5333302 - DNA, 25 bp, Homo sapien
atgacacatgggaagtcactagtgg

SEQ ID NO: 5333303 - DNA, 25 bp, Homo sapien
tctggttaatgacacatgggaagtc

SEQ ID NO: 5333304 - DNA, 25 bp, Homo sapien
ttgcgctgaacttgtacgcctgctc

SEQ ID NO: 5333305 - DNA, 25 bp, Homo sapien
cttgcgctgaacttgtacgcctgct

SEQ ID NO: 5333306 - DNA, 25 bp, Homo sapien
tggcagctatcccaaagggggctgt

SEQ ID NO: 5333307 - DNA, 25 bp, Homo sapien
gtcattacaatctccagaaggttgt

SEQ ID NO: 5333308 - DNA, 25 bp, Homo sapien
ctgagtcattacaatctccagaagg

SEQ ID NO: 5333309 - DNA, 25 bp, Homo sapien
ttacaatctccagaaggttgtacag

SEQ ID NO: 5333310 - DNA, 25 bp, Homo sapien
caatgccattgatgggagattccca

SEQ ID NO: 5333311 - DNA, 25 bp, Homo sapien
cacatgattgtggtaacccaagccc

SEQ ID NO: 5333312 - DNA, 25 bp, Homo sapien
tactttccacttatcagctgatctg

SEQ ID NO: 5333313 - DNA, 25 bp, Homo sapien
gcttttccaaaaggttgatgctatg

SEQ ID NO: 5333314 - DNA, 25 bp, Homo sapien
taaagaggccactcaataagggtcc

SEQ ID NO: 5333315 - DNA, 25 bp, Homo sapien
cataaacgcatttgtggatgtgcac

SEQ ID NO: 5333316 - DNA, 25 bp, Homo sapien
taagggtcccagaacataatatgtg

SEQ ID NO: 5333317 - DNA, 25 bp, Homo sapien
tagcgttcaagtcatcagcaaggtg

SEQ ID NO: 5333318 - DNA, 25 bp, Homo sapien
atttgttcccagaacctcttctttg

SEQ ID NO: 5333319 - DNA, 25 bp, Homo sapien
ttcatttgttcccagaacctcttct

SEQ ID NO: 5333320 - DNA, 25 bp, Homo sapien
gataagttttcatttgttcccagaa

SEQ ID NO: 5333321 - DNA, 25 bp, Homo sapien
attgataagttttcatttgttccca

SEQ ID NO: 5333322 - DNA, 25 bp, Homo sapien
taaatctgtaggactgagtccctgg

SEQ ID NO: 5333323 - DNA, 25 bp, Homo sapien
gattgaatgcaacgaggtatcctca

SEQ ID NO: 5333324 - DNA, 25 bp, Homo sapien
tctcgccacaccctaagaaacagtg

SEQ ID NO: 5333325 - DNA, 25 bp, Homo sapien
tatagtactacagcaacaaccgcgt

SEQ ID NO: 5333326 - DNA, 25 bp, Homo sapien
gcagctggagaatagggcagtaata

SEQ ID NO: 5333327 - DNA, 25 bp, Homo sapien
taatattgggccactaatacacaag

SEQ ID NO: 5333328 - DNA, 25 bp, Homo sapien
ttttctccgagcttagaaaatgacc

SEQ ID NO: 5333329 - DNA, 25 bp, Homo sapien
cacaagacgagattaaatggtttga

SEQ ID NO: 5333330 - DNA, 25 bp, Homo sapien
tcatctgctggataagataaggcac

SEQ ID NO: 5333331 - DNA, 25 bp, Homo sapien
cttaccagacctcttaataggagtg

SEQ ID NO: 5333332 - DNA, 25 bp, Homo sapien
tgagcccggatgttagcgaaaaatt

SEQ ID NO: 5333333 - DNA, 25 bp, Homo sapien
ggtcagacccctggcctacaatcat

SEQ ID NO: 5333334 - DNA, 25 bp, Homo sapien
cagatatgagcatatttggcaagaa

SEQ ID NO: 5333335 - DNA, 25 bp, Homo sapien
tacagttcctcttactcatcacttg

SEQ ID NO: 5333336 - DNA, 25 bp, Homo sapien
ctgcacctagccagatatgagcata

SEQ ID NO: 5333337 - DNA, 25 bp, Homo sapien
agtcagatctctgtaagcaataaat

SEQ ID NO: 5333338 - DNA, 25 bp, Homo sapien
tttgcggcaagtgatagaaaaagcc

SEQ ID NO: 5333339 - DNA, 25 bp, Homo sapien
attaaacacaattcagggccaggcg

SEQ ID NO: 5333340 - DNA, 25 bp, Homo sapien
caatgatgggtatccttaaaagcag

SEQ ID NO: 5333341 - DNA, 25 bp, Homo sapien
gtagacccctgaacccaatgatggg

SEQ ID NO: 5333342 - DNA, 25 bp, Homo sapien
ttaaagagtctagcagcattttgcc

SEQ ID NO: 5333343 - DNA, 25 bp, Homo sapien
taaagagtctagcagcattttgcca

SEQ ID NO: 5333344 - DNA, 25 bp, Homo sapien
aaagagtctagcagcattttgccaa

SEQ ID NO: 5333345 - DNA, 25 bp, Homo sapien
ttttgccagtctaaagcagtgacca

SEQ ID NO: 5333346 - DNA, 25 bp, Homo sapien
aataatcttctaggccactatcagg

SEQ ID NO: 5333347 - DNA, 25 bp, Homo sapien
gcagtgaccagctgtcatgagtgac

SEQ ID NO: 5333348 - DNA, 25 bp, Homo sapien
tggagttcaagcaacacttcatggc

SEQ ID NO: 5333349 - DNA, 25 bp, Homo sapien
gtggtggtctacatggagtaaattt

SEQ ID NO: 5333350 - DNA, 25 bp, Homo sapien
tggtggtctacatggagtaaatttc

SEQ ID NO: 5333351 - DNA, 25 bp, Homo sapien
ggtggtggtctacatggagtaaatt

SEQ ID NO: 5333352 - DNA, 25 bp, Homo sapien
ggtggtctacatggagtaaatttct

SEQ ID NO: 5333353 - DNA, 25 bp, Homo sapien
caagatctgccccaggagaaactag

SEQ ID NO: 5333354 - DNA, 25 bp, Homo sapien
ttcttaacaagatctgccccaggag

SEQ ID NO: 5333355 - DNA, 25 bp, Homo sapien
gccccaggagaaactagtcaaccaa

SEQ ID NO: 5333356 - DNA, 25 bp, Homo sapien
tctgccccaggagaaactagtcaac

SEQ ID NO: 5333357 - DNA, 25 bp, Homo sapien
tgagcaaaggcaaagcaatggaaca

SEQ ID NO: 5333358 - DNA, 25 bp, Homo sapien
aactaggcaaatagatcaaagcaac

SEQ ID NO: 5333359 - DNA, 25 bp, Homo sapien
aactgtacaatcacatgaacgaaag

SEQ ID NO: 5333360 - DNA, 25 bp, Homo sapien
aagatagacctctgatgagcaaagg

SEQ ID NO: 5333361 - DNA, 25 bp, Homo sapien
gatgggggtttcatctataagtctc

SEQ ID NO: 5333362 - DNA, 25 bp, Homo sapien
ttccgcccagttggaacttcctggc

SEQ ID NO: 5333363 - DNA, 25 bp, Homo sapien
cttgctgagctgtggtgggttccgc

SEQ ID NO: 5333364 - DNA, 25 bp, Homo sapien
tctggccgcagtggccttgctgagc

SEQ ID NO: 5333365 - DNA, 25 bp, Homo sapien
ttgccttagttgtgtcccagggatt

SEQ ID NO: 5333366 - DNA, 25 bp, Homo sapien
gatgttaggtggttagttgagatct

SEQ ID NO: 5333367 - DNA, 25 bp, Homo sapien
tttcattgccttagttgtgtcccag

SEQ ID NO: 5333368 - DNA, 25 bp, Homo sapien
taggtggttagttgagatctttcta

SEQ ID NO: 5333369 - DNA, 25 bp, Homo sapien
gccggttgttatgccagcttatttg

SEQ ID NO: 5333370 - DNA, 25 bp, Homo sapien
tgttgttagccggttgttatgccag

SEQ ID NO: 5333371 - DNA, 25 bp, Homo sapien
aagtgggtctggtgataccagaccc

SEQ ID NO: 5333372 - DNA, 25 bp, Homo sapien
ggtgataccagaccccctcagcatt

SEQ ID NO: 5333373 - DNA, 25 bp, Homo sapien
aagaaccttgttggagaagtagtgt

SEQ ID NO: 5333374 - DNA, 25 bp, Homo sapien
gccaactcaacttgattaagaacct

SEQ ID NO: 5333375 - DNA, 25 bp, Homo sapien
catttgaaggacataagacattctg

SEQ ID NO: 5333376 - DNA, 25 bp, Homo sapien
tggtcatctgtgttcctatccatat

SEQ ID NO: 5333377 - DNA, 25 bp, Homo sapien
tatgactgcctcaacctttttaagg

SEQ ID NO: 5333378 - DNA, 25 bp, Homo sapien
tcccaggtgggcgtttatcctgcct

SEQ ID NO: 5333379 - DNA, 25 bp, Homo sapien
cttccgtgaggtgagtgttctgtgc

SEQ ID NO: 5333380 - DNA, 25 bp, Homo sapien
gggttcagactagcccctgatcctg

SEQ ID NO: 5333381 - DNA, 25 bp, Homo sapien
taacagaagcaagattcaaactcag

SEQ ID NO: 5333382 - DNA, 25 bp, Homo sapien
aactcagctctgtctaaatgcacag

SEQ ID NO: 5333383 - DNA, 25 bp, Homo sapien
ttgcagttgtagaattgagatcccc

SEQ ID NO: 5333384 - DNA, 25 bp, Homo sapien
gatatgtttccttgctcatgtggat

SEQ ID NO: 5333385 - DNA, 25 bp, Homo sapien
ctgggtgacaagttacggaggaaca

SEQ ID NO: 5333386 - DNA, 25 bp, Homo sapien
cggaggaacatttatcagcaggtat

SEQ ID NO: 5333387 - DNA, 25 bp, Homo sapien
tctctccgtaccaaatgtatcatca

SEQ ID NO: 5333388 - DNA, 25 bp, Homo sapien
gacagagactttggcacctggctca

SEQ ID NO: 5333389 - DNA, 25 bp, Homo sapien
ttagtgtgaaacaggaagctcctgt

SEQ ID NO: 5333390 - DNA, 25 bp, Homo sapien
tattgtcctactgattatggcctgt

SEQ ID NO: 5333391 - DNA, 25 bp, Homo sapien
aaaggcagaatcatggagaccagtt

SEQ ID NO: 5333392 - DNA, 25 bp, Homo sapien
gaccagttaaaaagctattgcgaga

SEQ ID NO: 5333393 - DNA, 25 bp, Homo sapien
gccctatcatttcatcaagcaggca

SEQ ID NO: 5333394 - DNA, 25 bp, Homo sapien
caatagcaagggcataaaacagatc

SEQ ID NO: 5333395 - DNA, 25 bp, Homo sapien
aaatagagtttcatactttgcagaa

SEQ ID NO: 5333396 - DNA, 25 bp, Homo sapien
tcgatacctccctctaactaaatta

SEQ ID NO: 5333397 - DNA, 25 bp, Homo sapien
tcttaagataggacacacagagcgt

SEQ ID NO: 5333398 - DNA, 25 bp, Homo sapien
taggaaacagacctttgtgaccttg

SEQ ID NO: 5333399 - DNA, 25 bp, Homo sapien
cacagagcgtgagacatgaaaaaag

SEQ ID NO: 5333400 - DNA, 25 bp, Homo sapien
tggcctgttgaccagaacatataaa

SEQ ID NO: 5333401 - DNA, 25 bp, Homo sapien
tgattcttacttcattcacactttc

SEQ ID NO: 5333402 - DNA, 25 bp, Homo sapien
tacttcattcacactttctatccaa

SEQ ID NO: 5333403 - DNA, 25 bp, Homo sapien
cacactttctatccaaccccatcca

SEQ ID NO: 5333404 - DNA, 25 bp, Homo sapien
tcagtcattgattcttacttcattc

SEQ ID NO: 5333405 - DNA, 25 bp, Homo sapien
cgaccacttagttacccatggctga

SEQ ID NO: 5333406 - DNA, 25 bp, Homo sapien
cacttagttacccatggctgacaac

SEQ ID NO: 5333407 - DNA, 25 bp, Homo sapien
cttagttacccatggctgacaacat

SEQ ID NO: 5333408 - DNA, 25 bp, Homo sapien
aacgaccacttagttacccatggct

SEQ ID NO: 5333409 - DNA, 25 bp, Homo sapien
ttgtctcaagtcgatgaaggccaac

SEQ ID NO: 5333410 - DNA, 25 bp, Homo sapien
ctggaacccaggcaccgggccggat

SEQ ID NO: 5333411 - DNA, 25 bp, Homo sapien
cgatgaaggccaactgcagcgtgtc

SEQ ID NO: 5333412 - DNA, 25 bp, Homo sapien
caagtcgatgaaggccaactgcagc

SEQ ID NO: 5333413 - DNA, 25 bp, Homo sapien
ctgaatgcttgggagctggctacac

SEQ ID NO: 5333414 - DNA, 25 bp, Homo sapien
gggagctggctacacattcttgaat

SEQ ID NO: 5333415 - DNA, 25 bp, Homo sapien
atgcttgggagctggctacacattc

SEQ ID NO: 5333416 - DNA, 25 bp, Homo sapien
tggctacacattcttgaatctcctt

SEQ ID NO: 5333417 - DNA, 25 bp, Homo sapien
taggtcacatgtgttttttcgtggg

SEQ ID NO: 5333418 - DNA, 25 bp, Homo sapien
cacatgtgttttttcgtgggaatga

SEQ ID NO: 5333419 - DNA, 25 bp, Homo sapien
tgttgttgctgtattaacataacgg

SEQ ID NO: 5333420 - DNA, 25 bp, Homo sapien
taacggtttcctggtatctggctcc

SEQ ID NO: 5333421 - DNA, 25 bp, Homo sapien
cctgtaatatatgggacatgcttat

SEQ ID NO: 5333422 - DNA, 25 bp, Homo sapien
catttggcttaacaatagcgacgta

SEQ ID NO: 5333423 - DNA, 25 bp, Homo sapien
ttaaacggttcatagtcatttggct

SEQ ID NO: 5333424 - DNA, 25 bp, Homo sapien
tcaactgcaatctggtttacaccac

SEQ ID NO: 5333425 - DNA, 25 bp, Homo sapien
tgtctctaccagaataccacagtgc

SEQ ID NO: 5333426 - DNA, 25 bp, Homo sapien
taaggcagactatatgagagagtcc

SEQ ID NO: 5333427 - DNA, 25 bp, Homo sapien
ggactgcctagctaacatgttgtac

SEQ ID NO: 5333428 - DNA, 25 bp, Homo sapien
gagagagtcccaacttaaagaatca

SEQ ID NO: 5333429 - DNA, 25 bp, Homo sapien
tcaggacagccatagaagtttcaca

SEQ ID NO: 5333430 - DNA, 25 bp, Homo sapien
cttttcaggacagccatagaagttt

SEQ ID NO: 5333431 - DNA, 25 bp, Homo sapien
tggatcatacttttcaggacagcca

SEQ ID NO: 5333432 - DNA, 25 bp, Homo sapien
catacttttcaggacagccatagaa

SEQ ID NO: 5333433 - DNA, 25 bp, Homo sapien
tagtacagccattaagagaaacagt

SEQ ID NO: 5333434 - DNA, 25 bp, Homo sapien
aaattgttagggtgaagagtagctc

SEQ ID NO: 5333435 - DNA, 25 bp, Homo sapien
tatgcatatggccaacaggaatatg

SEQ ID NO: 5333436 - DNA, 25 bp, Homo sapien
gagaaacagtatgggaattcctcaa

SEQ ID NO: 5333437 - DNA, 25 bp, Homo sapien
tacagcaactgactgcctttgagaa

SEQ ID NO: 5333438 - DNA, 25 bp, Homo sapien
ttttgaagcctttggaccaatcagg

SEQ ID NO: 5333439 - DNA, 25 bp, Homo sapien
tgtctattaaatgcacgcctccctt

SEQ ID NO: 5333440 - DNA, 25 bp, Homo sapien
gagtctaagcacttctgggagttca

SEQ ID NO: 5333441 - DNA, 25 bp, Homo sapien
gataaacaagcacagggatggtcac

SEQ ID NO: 5333442 - DNA, 25 bp, Homo sapien
ataaacaagcacagggatggtcact

SEQ ID NO: 5333443 - DNA, 25 bp, Homo sapien
gtttgctggtaagataaacaagcac

SEQ ID NO: 5333444 - DNA, 25 bp, Homo sapien
cagaaatgagtttgctggtaagata

SEQ ID NO: 5333445 - DNA, 25 bp, Homo sapien
taatgctcccaaggtgagctgccgc

SEQ ID NO: 5333446 - DNA, 25 bp, Homo sapien
aagctgacatacacgctgtctgggc

SEQ ID NO: 5333447 - DNA, 25 bp, Homo sapien
caaaagttgcatcaaggatgtggct

SEQ ID NO: 5333448 - DNA, 25 bp, Homo sapien
cacattctctgacgtccaagttgaa

SEQ ID NO: 5333449 - DNA, 25 bp, Homo sapien
tagttgctaatttctactaatacaa

SEQ ID NO: 5333450 - DNA, 25 bp, Homo sapien
cattaattctcctctatacgtcagt

SEQ ID NO: 5333451 - DNA, 25 bp, Homo sapien
tgtgtgtatgagcatataagcattt

SEQ ID NO: 5333452 - DNA, 25 bp, Homo sapien
aaatattgaatatattgagcatgtg

SEQ ID NO: 5333453 - DNA, 25 bp, Homo sapien
ctgagctttacatcttctacctcca

SEQ ID NO: 5333454 - DNA, 25 bp, Homo sapien
aacagctgagctttacatcttctac

SEQ ID NO: 5333455 - DNA, 25 bp, Homo sapien
gctgagctttacatcttctacctcc

SEQ ID NO: 5333456 - DNA, 25 bp, Homo sapien
cagctgagctttacatcttctacct

SEQ ID NO: 5333457 - DNA, 25 bp, Homo sapien
agaggaaacctgaaagactgccttg

SEQ ID NO: 5333458 - DNA, 25 bp, Homo sapien
atcacagtgcatctgtgtgaaagca

SEQ ID NO: 5333459 - DNA, 25 bp, Homo sapien
tgctatcaaagaactcattaaaagg

SEQ ID NO: 5333460 - DNA, 25 bp, Homo sapien
tgcatctgtgtgaaagcaccaaaat

SEQ ID NO: 5333461 - DNA, 25 bp, Homo sapien
gagatgagttccatataagaaaatg

SEQ ID NO: 5333462 - DNA, 25 bp, Homo sapien
ttatgttaatgagctccaagtggaa

SEQ ID NO: 5333463 - DNA, 25 bp, Homo sapien
ccaagtggaaggacctcaaagagat

SEQ ID NO: 5333464 - DNA, 25 bp, Homo sapien
caccaaaaagatacctacgttcata

SEQ ID NO: 5333465 - DNA, 25 bp, Homo sapien
ggcagcacaaagtgaaatttctgac

SEQ ID NO: 5333466 - DNA, 25 bp, Homo sapien
tgtgatgatcggacttagatccaag

SEQ ID NO: 5333467 - DNA, 25 bp, Homo sapien
tatgcattgacctcatcacaaagcg

SEQ ID NO: 5333468 - DNA, 25 bp, Homo sapien
ccatgcaagcataaaagccaactga

SEQ ID NO: 5333469 - DNA, 25 bp, Homo sapien
tgttacacgtcagctgtcagtcaag

SEQ ID NO: 5333470 - DNA, 25 bp, Homo sapien
acacagccaagctagatgtcactgg

SEQ ID NO: 5333471 - DNA, 25 bp, Homo sapien
tcactgtgacttacaactacaaggg

SEQ ID NO: 5333472 - DNA, 25 bp, Homo sapien
tcaagagagccagcaaataattggg

SEQ ID NO: 5333473 - DNA, 25 bp, Homo sapien
taacaggtagaggtagataagctcc

SEQ ID NO: 5333474 - DNA, 25 bp, Homo sapien
gaattttcttgcagcaattcagcat

SEQ ID NO: 5333475 - DNA, 25 bp, Homo sapien
tttgccctcttatttctatgattgg

SEQ ID NO: 5333476 - DNA, 25 bp, Homo sapien
ctcatcaatattgtgcaagattgac

SEQ ID NO: 5333477 - DNA, 25 bp, Homo sapien
tcctgcttgagagtcttgctatagg

SEQ ID NO: 5333478 - DNA, 25 bp, Homo sapien
tcaggtcctgcttgagagtcttgct

SEQ ID NO: 5333479 - DNA, 25 bp, Homo sapien
ttaacatcttaaacttcaactcact

SEQ ID NO: 5333480 - DNA, 25 bp, Homo sapien
ttcaactcacttttaatgcactctt

SEQ ID NO: 5333481 - DNA, 25 bp, Homo sapien
aaagctgcagatgtttcaattcaga

SEQ ID NO: 5333482 - DNA, 25 bp, Homo sapien
aagctgcagatgtttcaattcagaa

SEQ ID NO: 5333483 - DNA, 25 bp, Homo sapien
taaaagctgcagatgtttcaattca

SEQ ID NO: 5333484 - DNA, 25 bp, Homo sapien
gctgcagatgtttcaattcagaaaa

SEQ ID NO: 5333485 - DNA, 25 bp, Homo sapien
tttaatgaatatcacattatatgaa

SEQ ID NO: 5333486 - DNA, 25 bp, Homo sapien
taatgaatatcacattatatgaata

SEQ ID NO: 5333487 - DNA, 25 bp, Homo sapien
atttaatgaatatcacattatatga

SEQ ID NO: 5333488 - DNA, 25 bp, Homo sapien
ttaatgaatatcacattatatgaat

SEQ ID NO: 5333489 - DNA, 25 bp, Homo sapien
taaaaccaggcagagactaactact

SEQ ID NO: 5333490 - DNA, 25 bp, Homo sapien
catttgaggaacgtagacaagggca

SEQ ID NO: 5333491 - DNA, 25 bp, Homo sapien
gaattctaaagctaaacggctgagg

SEQ ID NO: 5333492 - DNA, 25 bp, Homo sapien
tactgttcaatctatggtggccact

SEQ ID NO: 5333493 - DNA, 25 bp, Homo sapien
gagccatatcctaccaacaagggca

SEQ ID NO: 5333494 - DNA, 25 bp, Homo sapien
aaacatgaaccttttctggtggaag

SEQ ID NO: 5333495 - DNA, 25 bp, Homo sapien
tggaagataacaccacctggaatct

SEQ ID NO: 5333496 - DNA, 25 bp, Homo sapien
ccatgatggtactaaggtggtcagc

SEQ ID NO: 5333497 - DNA, 25 bp, Homo sapien
gtaggaactggtcaatcttctggtt

SEQ ID NO: 5333498 - DNA, 25 bp, Homo sapien
tttgttgcccaaatctccggtcatc

SEQ ID NO: 5333499 - DNA, 25 bp, Homo sapien
caggtaatcactagctttgttgccc

SEQ ID NO: 5333500 - DNA, 25 bp, Homo sapien
ggtcatccagtcatagtctgccagc

SEQ ID NO: 5333501 - DNA, 25 bp, Homo sapien
tgtatctgagtatagctatgcctgc

SEQ ID NO: 5333502 - DNA, 25 bp, Homo sapien
gtgccacaattttattatatcagag

SEQ ID NO: 5333503 - DNA, 25 bp, Homo sapien
tggatttggtgttacatcctcttgc

SEQ ID NO: 5333504 - DNA, 25 bp, Homo sapien
caatgacctgtttagtgctggcagt

SEQ ID NO: 5333505 - DNA, 25 bp, Homo sapien
cttggtagtgtgaactgtctctgga

SEQ ID NO: 5333506 - DNA, 25 bp, Homo sapien
cttaaaagttgtggtgccatagagc

SEQ ID NO: 5333507 - DNA, 25 bp, Homo sapien
tcttccaagtacttacaggatttct

SEQ ID NO: 5333508 - DNA, 25 bp, Homo sapien
tctggaagcacattagtgatgttgg

SEQ ID NO: 5333509 - DNA, 25 bp, Homo sapien
gctgccttcattaggagcaggttta

SEQ ID NO: 5333510 - DNA, 25 bp, Homo sapien
ctcggctgccttcattaggagcagg

SEQ ID NO: 5333511 - DNA, 25 bp, Homo sapien
ctgccttcattaggagcaggtttac

SEQ ID NO: 5333512 - DNA, 25 bp, Homo sapien
cggctgccttcattaggagcaggtt

SEQ ID NO: 5333513 - DNA, 25 bp, Homo sapien
tagcaacaggtttgttgatttccga

SEQ ID NO: 5333514 - DNA, 25 bp, Homo sapien
gatttccgaatcatgtcatcaactt

SEQ ID NO: 5333515 - DNA, 25 bp, Homo sapien
ttacattctgcagagagttgctcag

SEQ ID NO: 5333516 - DNA, 25 bp, Homo sapien
ttctgcagagagttgctcagagtcc

SEQ ID NO: 5333517 - DNA, 25 bp, Homo sapien
tcagacaagcgtagataaattcttt

SEQ ID NO: 5333518 - DNA, 25 bp, Homo sapien
cttcagacaagcgtagataaattct

SEQ ID NO: 5333519 - DNA, 25 bp, Homo sapien
cagacaagcgtagataaattcttta

SEQ ID NO: 5333520 - DNA, 25 bp, Homo sapien
aaacttcagacaagcgtagataaat

SEQ ID NO: 5333521 - DNA, 25 bp, Homo sapien
atcttgaaatgggaattgtcctacc

SEQ ID NO: 5333522 - DNA, 25 bp, Homo sapien
tctatatcttgaaatgggaattgtc

SEQ ID NO: 5333523 - DNA, 25 bp, Homo sapien
tatatcttgaaatgggaattgtcct

SEQ ID NO: 5333524 - DNA, 25 bp, Homo sapien
tgaaatgggaattgtcctaccacct

SEQ ID NO: 5333525 - DNA, 25 bp, Homo sapien
tgtagttgtcagaatcaagtatgtt

SEQ ID NO: 5333526 - DNA, 25 bp, Homo sapien
tactggtataggactgtagttgtca

SEQ ID NO: 5333527 - DNA, 25 bp, Homo sapien
actgtagttgtcagaatcaagtatg

SEQ ID NO: 5333528 - DNA, 25 bp, Homo sapien
ctcttcacttgttactggtatagga

SEQ ID NO: 5333529 - DNA, 25 bp, Homo sapien
cacttctttagcagagtttcactat

SEQ ID NO: 5333530 - DNA, 25 bp, Homo sapien
acttctttagcagagtttcactata

SEQ ID NO: 5333531 - DNA, 25 bp, Homo sapien
aaatacctgcccacttctttagcag

SEQ ID NO: 5333532 - DNA, 25 bp, Homo sapien
gaggttcttcaaatctaacacaagg

SEQ ID NO: 5333533 - DNA, 25 bp, Homo sapien
ctgaagtgtgtcagcaaaaagcaca

SEQ ID NO: 5333534 - DNA, 25 bp, Homo sapien
aatctaacacaaggtttggatcaga

SEQ ID NO: 5333535 - DNA, 25 bp, Homo sapien
agtgtgtcagcaaaaagcacaatga

SEQ ID NO: 5333536 - DNA, 25 bp, Homo sapien
gctgagtacagcaagttcaataacc

SEQ ID NO: 5333537 - DNA, 25 bp, Homo sapien
taacaccaggttcagccagggaaca

SEQ ID NO: 5333538 - DNA, 25 bp, Homo sapien
tagaaataattcaacacttccctgg

SEQ ID NO: 5333539 - DNA, 25 bp, Homo sapien
cttccctggtacaaggtaacaccag

SEQ ID NO: 5333540 - DNA, 25 bp, Homo sapien
aaagatttctctcagtctgtagcta

SEQ ID NO: 5333541 - DNA, 25 bp, Homo sapien
cattctcctattgtccttaatttgt

SEQ ID NO: 5333542 - DNA, 25 bp, Homo sapien
tttgtatccacctaaatactgagac

SEQ ID NO: 5333543 - DNA, 25 bp, Homo sapien
tttaattttaagacgtcattgtata

SEQ ID NO: 5333544 - DNA, 25 bp, Homo sapien
cgagtgggtacggagtgctgcgatg

SEQ ID NO: 5333545 - DNA, 25 bp, Homo sapien
gagtgctgcgatggtttttgaaagt

SEQ ID NO: 5333546 - DNA, 25 bp, Homo sapien
acggagtgctgcgatggtttttgaa

SEQ ID NO: 5333547 - DNA, 25 bp, Homo sapien
gctgcgatggtttttgaaagtgcca

SEQ ID NO: 5333548 - DNA, 25 bp, Homo sapien
atacttcctgtagccatctaaagtt

SEQ ID NO: 5333549 - DNA, 25 bp, Homo sapien
tgattaaaatacttcctgtagccat

SEQ ID NO: 5333550 - DNA, 25 bp, Homo sapien
tttgattaaaatacttcctgtagcc

SEQ ID NO: 5333551 - DNA, 25 bp, Homo sapien
tcctgtagccatctaaagtttcatg

SEQ ID NO: 5333552 - DNA, 25 bp, Homo sapien
aacgagcctgttttcgcctctgttt

SEQ ID NO: 5333553 - DNA, 25 bp, Homo sapien
tgttttcggtagtaattctcaaatg

SEQ ID NO: 5333554 - DNA, 25 bp, Homo sapien
gaggttgaagtaccaaacgagcctg

SEQ ID NO: 5333555 - DNA, 25 bp, Homo sapien
catgttagatggaggttgaagtacc

SEQ ID NO: 5333556 - DNA, 25 bp, Homo sapien
gattgttggtttgagttataagaat

SEQ ID NO: 5333557 - DNA, 25 bp, Homo sapien
tctagattgttggtttgagttataa

SEQ ID NO: 5333558 - DNA, 25 bp, Homo sapien
ctctagattgttggtttgagttata

SEQ ID NO: 5333559 - DNA, 25 bp, Homo sapien
tagattgttggtttgagttataaga

SEQ ID NO: 5333560 - DNA, 25 bp, Homo sapien
cagaaaaacaggtcatcagcttgcc

SEQ ID NO: 5333561 - DNA, 25 bp, Homo sapien
taacagaaaaacaggtcatcagctt

SEQ ID NO: 5333562 - DNA, 25 bp, Homo sapien
ccctaacagaaaaacaggtcatcag

SEQ ID NO: 5333563 - DNA, 25 bp, Homo sapien
gaaaaacaggtcatcagcttgccat

SEQ ID NO: 5333564 - DNA, 25 bp, Homo sapien
tgttacaatacatgaactcctgacc

SEQ ID NO: 5333565 - DNA, 25 bp, Homo sapien
gcttggccccatctataagaccatg

SEQ ID NO: 5333566 - DNA, 25 bp, Homo sapien
tcctgacctactgataaggctggca

SEQ ID NO: 5333567 - DNA, 25 bp, Homo sapien
cgaaatctgacctcctgttacaata

SEQ ID NO: 5333568 - DNA, 25 bp, Homo sapien
taaaattgatggatgtgattacatg

SEQ ID NO: 5333569 - DNA, 25 bp, Homo sapien
taaagtaaatactctgtgacagcag

SEQ ID NO: 5333570 - DNA, 25 bp, Homo sapien
aagtccccttatatacaatgatgaa

SEQ ID NO: 5333571 - DNA, 25 bp, Homo sapien
tgggttaagatgaaaatctaaatgg

SEQ ID NO: 5333572 - DNA, 25 bp, Homo sapien
tttctgtgtatctatgtgtctgcat

SEQ ID NO: 5333573 - DNA, 25 bp, Homo sapien
tatctatgtgtctgcatgtgagtgt

SEQ ID NO: 5333574 - DNA, 25 bp, Homo sapien
ctgtgtatctatgtgtctgcatgtg

SEQ ID NO: 5333575 - DNA, 25 bp, Homo sapien
atctatgtgtctgcatgtgagtgta

SEQ ID NO: 5333576 - DNA, 25 bp, Homo sapien
tgtagacatcgataaactggagaga

SEQ ID NO: 5333577 - DNA, 25 bp, Homo sapien
gtagacatcgataaactggagagaa

SEQ ID NO: 5333578 - DNA, 25 bp, Homo sapien
atatgtagacatcgataaactggag

SEQ ID NO: 5333579 - DNA, 25 bp, Homo sapien
tatatatgtagacatcgataaactg

SEQ ID NO: 5333580 - DNA, 25 bp, Homo sapien
gttttaaggtccacatcttgatctc

SEQ ID NO: 5333581 - DNA, 25 bp, Homo sapien
ggtccacatcttgatctccatttaa

SEQ ID NO: 5333582 - DNA, 25 bp, Homo sapien
ggttgttttaaggtccacatcttga

SEQ ID NO: 5333583 - DNA, 25 bp, Homo sapien
atgggttgttttaaggtccacatct

SEQ ID NO: 5333584 - DNA, 25 bp, Homo sapien
caagtcattaaaatgtaccaggcat

SEQ ID NO: 5333585 - DNA, 25 bp, Homo sapien
tcaagtcattaaaatgtaccaggca

SEQ ID NO: 5333586 - DNA, 25 bp, Homo sapien
agtcattaaaatgtaccaggcattt

SEQ ID NO: 5333587 - DNA, 25 bp, Homo sapien
tcattaaaatgtaccaggcattttt

SEQ ID NO: 5333588 - DNA, 25 bp, Homo sapien
gtagcaggtgtatttcttagctctg

SEQ ID NO: 5333589 - DNA, 25 bp, Homo sapien
gggtatacctaatgcccatgttagt

SEQ ID NO: 5333590 - DNA, 25 bp, Homo sapien
tagaagtactagctttaactcgtga

SEQ ID NO: 5333591 - DNA, 25 bp, Homo sapien
taagtctacacattaatgtagcagg

SEQ ID NO: 5333592 - DNA, 25 bp, Homo sapien
gggtggatccacatcttaataagcc

SEQ ID NO: 5333593 - DNA, 25 bp, Homo sapien
catgagtcattaggccaatagttgg

SEQ ID NO: 5333594 - DNA, 25 bp, Homo sapien
caggtactgtattatccaagggcac

SEQ ID NO: 5333595 - DNA, 25 bp, Homo sapien
ctgaaagtttgtcctccagggtgga

SEQ ID NO: 5333596 - DNA, 25 bp, Homo sapien
gatttcctcttgctacctattctgg

SEQ ID NO: 5333597 - DNA, 25 bp, Homo sapien
ttcggactagtactttctatctctg

SEQ ID NO: 5333598 - DNA, 25 bp, Homo sapien
gaatcctgttcagacttcggactag

SEQ ID NO: 5333599 - DNA, 25 bp, Homo sapien
gggttgttgcaagacgatgttatcc

SEQ ID NO: 5333600 - DNA, 25 bp, Homo sapien
tccagagatttgaatcaatggacat

SEQ ID NO: 5333601 - DNA, 25 bp, Homo sapien
ttccagagatttgaatcaatggaca

SEQ ID NO: 5333602 - DNA, 25 bp, Homo sapien
attccagagatttgaatcaatggac

SEQ ID NO: 5333603 - DNA, 25 bp, Homo sapien
caagcagatctccaagttcctcaag

SEQ ID NO: 5333604 - DNA, 25 bp, Homo sapien
taggcatacctctgggcacttggtg

SEQ ID NO: 5333605 - DNA, 25 bp, Homo sapien
gacaaggagtttgggttgcctccac

SEQ ID NO: 5333606 - DNA, 25 bp, Homo sapien
taaagttctcatagttacccgaggc

SEQ ID NO: 5333607 - DNA, 25 bp, Homo sapien
ctcaggttcagaatagttactgctc

SEQ ID NO: 5333608 - DNA, 25 bp, Homo sapien
tcaggttcagaatagttactgctca

SEQ ID NO: 5333609 - DNA, 25 bp, Homo sapien
caggttcagaatagttactgctcat

SEQ ID NO: 5333610 - DNA, 25 bp, Homo sapien
gaagtattccaacagagctgaccct

SEQ ID NO: 5333611 - DNA, 25 bp, Homo sapien
cactggtaagtgctttgcggcccac

SEQ ID NO: 5333612 - DNA, 25 bp, Homo sapien
tcagagcctgggtaaaagccttttc

SEQ ID NO: 5333613 - DNA, 25 bp, Homo sapien
tggttcctatgctccccgtgtgtaa

SEQ ID NO: 5333614 - DNA, 25 bp, Homo sapien
tacagactctcaacagatggttcaa

SEQ ID NO: 5333615 - DNA, 25 bp, Homo sapien
ggaggtctatgattgcctcttagtt

SEQ ID NO: 5333616 - DNA, 25 bp, Homo sapien
tgtttcaccccattcgggaggtcta

SEQ ID NO: 5333617 - DNA, 25 bp, Homo sapien
cctcttagttgttcagtaagacatc

SEQ ID NO: 5333618 - DNA, 25 bp, Homo sapien
cagagaaaggacggcttccccgcag

SEQ ID NO: 5333619 - DNA, 25 bp, Homo sapien
gagaaaggacggcttccccgcagga

SEQ ID NO: 5333620 - DNA, 25 bp, Homo sapien
agagaaaggacggcttccccgcagg

SEQ ID NO: 5333621 - DNA, 25 bp, Homo sapien
acagagaaaggacggcttccccgca

SEQ ID NO: 5333622 - DNA, 25 bp, Homo sapien
aatatgggtaggacaactgaaactc

SEQ ID NO: 5333623 - DNA, 25 bp, Homo sapien
tatccagtccagctctttaagttct

SEQ ID NO: 5333624 - DNA, 25 bp, Homo sapien
actgaaactcaaatagccgtcttgg

SEQ ID NO: 5333625 - DNA, 25 bp, Homo sapien
gccgtcttggaactggaggtagtac

SEQ ID NO: 5333626 - DNA, 25 bp, Homo sapien
gccatcatgcccgaccaagcagaaa

SEQ ID NO: 5333627 - DNA, 25 bp, Homo sapien
ccatcatgcccgaccaagcagaaag

SEQ ID NO: 5333628 - DNA, 25 bp, Homo sapien
taaactggcaggtcaaacatcaaaa

SEQ ID NO: 5333629 - DNA, 25 bp, Homo sapien
tcaagcagctaaatgccttaaactg

SEQ ID NO: 5333630 - DNA, 25 bp, Homo sapien
taagatcccctgacgcagtttcaag

SEQ ID NO: 5333631 - DNA, 25 bp, Homo sapien
tctttacagctcataagatcccctg

SEQ ID NO: 5333632 - DNA, 25 bp, Homo sapien
tcctggattgactcctagacctaag

SEQ ID NO: 5333633 - DNA, 25 bp, Homo sapien
tagcaatggtgaccagtcaagggaa

SEQ ID NO: 5333634 - DNA, 25 bp, Homo sapien
tcaagggaaggctgcacggattaga

SEQ ID NO: 5333635 - DNA, 25 bp, Homo sapien
caatgcttggctggaaacaatgatt

SEQ ID NO: 5333636 - DNA, 25 bp, Homo sapien
gaagaaagaggcactcactaggatt

SEQ ID NO: 5333637 - DNA, 25 bp, Homo sapien
ctacaaaagcccaagagaggaaact

SEQ ID NO: 5333638 - DNA, 25 bp, Homo sapien
gaaaaacagattatcaactccccta

SEQ ID NO: 5333639 - DNA, 25 bp, Homo sapien
ggcaagtcctatttgacccaactaa

SEQ ID NO: 5333640 - DNA, 25 bp, Homo sapien
tggaagaggcattcacaggcagatc

SEQ ID NO: 5333641 - DNA, 25 bp, Homo sapien
tgtatatacacatggccggagtcac

SEQ ID NO: 5333642 - DNA, 25 bp, Homo sapien
gacaaccacgtatgaaaagccaaag

SEQ ID NO: 5333643 - DNA, 25 bp, Homo sapien
caaatgttcaatgggaatggagcac

SEQ ID NO: 5333644 - DNA, 25 bp, Homo sapien
tgggagagccatatgtttagtagac

SEQ ID NO: 5333645 - DNA, 25 bp, Homo sapien
ggaacatcccagaatatactactga

SEQ ID NO: 5333646 - DNA, 25 bp, Homo sapien
gattctgacattgatacggacctta

SEQ ID NO: 5333647 - DNA, 25 bp, Homo sapien
tctagagggctctcacaagaacata

SEQ ID NO: 5333648 - DNA, 25 bp, Homo sapien
gaatattttcatcggccactggctg

SEQ ID NO: 5333649 - DNA, 25 bp, Homo sapien
ggccactggctgaatctgtggattt

SEQ ID NO: 5333650 - DNA, 25 bp, Homo sapien
tcggccactggctgaatctgtggat

SEQ ID NO: 5333651 - DNA, 25 bp, Homo sapien
ttttctacgaatattttcatcggcc

SEQ ID NO: 5333652 - DNA, 25 bp, Homo sapien
gctgggacaagaggacataaggaat

SEQ ID NO: 5333653 - DNA, 25 bp, Homo sapien
cagactatggcctcgtggaatggat

SEQ ID NO: 5333654 - DNA, 25 bp, Homo sapien
gcctaggacgacattcagactatgg

SEQ ID NO: 5333655 - DNA, 25 bp, Homo sapien
tcatcagctgaaactctgccttgga

SEQ ID NO: 5333656 - DNA, 25 bp, Homo sapien
gtgaacaattggtaccaccaccgtg

SEQ ID NO: 5333657 - DNA, 25 bp, Homo sapien
ttgctgagagcacaacaatcctatg

SEQ ID NO: 5333658 - DNA, 25 bp, Homo sapien
gagaaacacaatcaccaggctcatg

SEQ ID NO: 5333659 - DNA, 25 bp, Homo sapien
tgccagaggacaagactaaagcact

SEQ ID NO: 5333660 - DNA, 25 bp, Homo sapien
tatctttctaggctatatgatagca

SEQ ID NO: 5333661 - DNA, 25 bp, Homo sapien
tatgatagcaggttatagcagagac

SEQ ID NO: 5333662 - DNA, 25 bp, Homo sapien
gccaatactgtgattgtcagactaa

SEQ ID NO: 5333663 - DNA, 25 bp, Homo sapien
aagcaagagacgtggaagatattta

SEQ ID NO: 5333664 - DNA, 25 bp, Homo sapien
caggtaggtatgctctagatgttcc

SEQ ID NO: 5333665 - DNA, 25 bp, Homo sapien
tagatgttccagagttttcagtgca

SEQ ID NO: 5333666 - DNA, 25 bp, Homo sapien
cgatagtggcttacttgaggcaggt

SEQ ID NO: 5333667 - DNA, 25 bp, Homo sapien
catcaccttgcagaatcgatagtgg

SEQ ID NO: 5333668 - DNA, 25 bp, Homo sapien
gagtctgctaagtactaggacaggc

SEQ ID NO: 5333669 - DNA, 25 bp, Homo sapien
gctcaggaaagttgattcagcttga

SEQ ID NO: 5333670 - DNA, 25 bp, Homo sapien
aagaactgcagaaatttacacaggg

SEQ ID NO: 5333671 - DNA, 25 bp, Homo sapien
aaagttgacttctaggtcatgggca

SEQ ID NO: 5333672 - DNA, 25 bp, Homo sapien
ctatgctgctgttgggaagataaaa

SEQ ID NO: 5333673 - DNA, 25 bp, Homo sapien
gaagataaaaaggtgcaggtgcttt

SEQ ID NO: 5333674 - DNA, 25 bp, Homo sapien
tggctaggctatgcagaaattggaa

SEQ ID NO: 5333675 - DNA, 25 bp, Homo sapien
ttggaaacatctatgctgctgttgg

SEQ ID NO: 5333676 - DNA, 25 bp, Homo sapien
caactgatgaaaaggtaactaaagc

SEQ ID NO: 5333677 - DNA, 25 bp, Homo sapien
atatacaatgagagagtattcagcc

SEQ ID NO: 5333678 - DNA, 25 bp, Homo sapien
aaactgaaagcatatgctcacacaa

SEQ ID NO: 5333679 - DNA, 25 bp, Homo sapien
accaaatgtttaccatgcgacccag

SEQ ID NO: 5333680 - DNA, 25 bp, Homo sapien
ttagttttcatctggtccctcagtt

SEQ ID NO: 5333681 - DNA, 25 bp, Homo sapien
ttcatctggtccctcagtttgctgt

SEQ ID NO: 5333682 - DNA, 25 bp, Homo sapien
tcatctggtccctcagtttgctgta

SEQ ID NO: 5333683 - DNA, 25 bp, Homo sapien
ggaagacacagcattaatttatcaa

SEQ ID NO: 5333684 - DNA, 25 bp, Homo sapien
gttgtagtcgacactgcttcagctc

SEQ ID NO: 5333685 - DNA, 25 bp, Homo sapien
tctgttgtagtcgacactgcttcag

SEQ ID NO: 5333686 - DNA, 25 bp, Homo sapien
atttctctgttgtagtcgacactgc

SEQ ID NO: 5333687 - DNA, 25 bp, Homo sapien
tgttgtagttttctattagtatccg

SEQ ID NO: 5333688 - DNA, 25 bp, Homo sapien
ttctattagtatccgtcacttgatt

SEQ ID NO: 5333689 - DNA, 25 bp, Homo sapien
gtagttttctattagtatccgtcac

SEQ ID NO: 5333690 - DNA, 25 bp, Homo sapien
tccctcatgttgtagttttctatta

SEQ ID NO: 5333691 - DNA, 25 bp, Homo sapien
cacaaagccctggtaatgaaagttg

SEQ ID NO: 5333692 - DNA, 25 bp, Homo sapien
ttcagttatagagtccacaaagccc

SEQ ID NO: 5333693 - DNA, 25 bp, Homo sapien
caatttctcggtcgtgattacggat

SEQ ID NO: 5333694 - DNA, 25 bp, Homo sapien
gatacgagtttcaagcttctccatg

SEQ ID NO: 5333695 - DNA, 25 bp, Homo sapien
ctgctgcctgtaaggccctacataa

SEQ ID NO: 5333696 - DNA, 25 bp, Homo sapien
ctcctgacagtctccattctgcact

SEQ ID NO: 5333697 - DNA, 25 bp, Homo sapien
tcttatactagtaatgctcatcccc

SEQ ID NO: 5333698 - DNA, 25 bp, Homo sapien
tctgcactttccatctactccaccc

SEQ ID NO: 5333699 - DNA, 25 bp, Homo sapien
aacaatctcttcctcctcaccgtcc

SEQ ID NO: 5333700 - DNA, 25 bp, Homo sapien
caatctcttcctcctcaccgtccat

SEQ ID NO: 5333701 - DNA, 25 bp, Homo sapien
ctttgaacaatctcttcctcctcac

SEQ ID NO: 5333702 - DNA, 25 bp, Homo sapien
tgaacaatctcttcctcctcaccgt

SEQ ID NO: 5333703 - DNA, 25 bp, Homo sapien
tcagcagtagccatagatgaaagga

SEQ ID NO: 5333704 - DNA, 25 bp, Homo sapien
tacctctataacagtgccagacagg

SEQ ID NO: 5333705 - DNA, 25 bp, Homo sapien
gccagacaggtagtagacaataagt

SEQ ID NO: 5333706 - DNA, 25 bp, Homo sapien
tctgggtactggatcactatgctga

SEQ ID NO: 5333707 - DNA, 25 bp, Homo sapien
aaatgagcatgtagacaagttaatt

SEQ ID NO: 5333708 - DNA, 25 bp, Homo sapien
tgaaatgagcatgtagacaagttaa

SEQ ID NO: 5333709 - DNA, 25 bp, Homo sapien
atgagcatgtagacaagttaattta

SEQ ID NO: 5333710 - DNA, 25 bp, Homo sapien
ctgaaatgagcatgtagacaagtta

SEQ ID NO: 5333711 - DNA, 25 bp, Homo sapien
gacccattcagctatcagaactagg

SEQ ID NO: 5333712 - DNA, 25 bp, Homo sapien
taaaagggatgagataatgcctacc

SEQ ID NO: 5333713 - DNA, 25 bp, Homo sapien
tagttaagaacaaagactctctagg

SEQ ID NO: 5333714 - DNA, 25 bp, Homo sapien
gggcctagcacaaagtaagtagtaa

SEQ ID NO: 5333715 - DNA, 25 bp, Homo sapien
cagcatcagtgtttcaattagcaac

SEQ ID NO: 5333716 - DNA, 25 bp, Homo sapien
tcagtgtttcaattagcaacattct

SEQ ID NO: 5333717 - DNA, 25 bp, Homo sapien
gtgtttcaattagcaacattctgga

SEQ ID NO: 5333718 - DNA, 25 bp, Homo sapien
gcatcagtgtttcaattagcaacat

SEQ ID NO: 5333719 - DNA, 25 bp, Homo sapien
ataaggctaccacactcagagaaat

SEQ ID NO: 5333720 - DNA, 25 bp, Homo sapien
tgctcacagatttcccccataaggc

SEQ ID NO: 5333721 - DNA, 25 bp, Homo sapien
cccataaggctaccacactcagaga

SEQ ID NO: 5333722 - DNA, 25 bp, Homo sapien
gctcacagatttcccccataaggct

SEQ ID NO: 5333723 - DNA, 25 bp, Homo sapien
gctttcaacttactctaggctccca

SEQ ID NO: 5333724 - DNA, 25 bp, Homo sapien
tcaacacttcaactgcagggagaat

SEQ ID NO: 5333725 - DNA, 25 bp, Homo sapien
tgtgagtttctacaaaccaagtggc

SEQ ID NO: 5333726 - DNA, 25 bp, Homo sapien
gtttctggaacctgaagcagtccca

SEQ ID NO: 5333727 - DNA, 25 bp, Homo sapien
acaaggaattcataaacctgctcag

SEQ ID NO: 5333728 - DNA, 25 bp, Homo sapien
tcataaacctgctcaggaaacaaac

SEQ ID NO: 5333729 - DNA, 25 bp, Homo sapien
ggaattcataaacctgctcaggaaa

SEQ ID NO: 5333730 - DNA, 25 bp, Homo sapien
ataaacctgctcaggaaacaaacgt

SEQ ID NO: 5333731 - DNA, 25 bp, Homo sapien
gtgatgattcttgctcgtttagata

SEQ ID NO: 5333732 - DNA, 25 bp, Homo sapien
gattcttgctcgtttagatatttca

SEQ ID NO: 5333733 - DNA, 25 bp, Homo sapien
agtagaaattggtttgcactgtgat

SEQ ID NO: 5333734 - DNA, 25 bp, Homo sapien
ggtttgcactgtgatgattcttgct

SEQ ID NO: 5333735 - DNA, 25 bp, Homo sapien
aacaaatcagcataacctccactgg

SEQ ID NO: 5333736 - DNA, 25 bp, Homo sapien
cagtttgcttgataactcaatgagg

SEQ ID NO: 5333737 - DNA, 25 bp, Homo sapien
cagagcccattgctagctaactgaa

SEQ ID NO: 5333738 - DNA, 25 bp, Homo sapien
tttgacagcactacaaagaacactg

SEQ ID NO: 5333739 - DNA, 25 bp, Homo sapien
cccttagatatgtgggaccaggaaa

SEQ ID NO: 5333740 - DNA, 25 bp, Homo sapien
gaccaatgcctagcaggtaccatgg

SEQ ID NO: 5333741 - DNA, 25 bp, Homo sapien
gagtatatcacaatcacctgaaggg

SEQ ID NO: 5333742 - DNA, 25 bp, Homo sapien
agtccacatagcaaacccaagggta

SEQ ID NO: 5333743 - DNA, 25 bp, Homo sapien
agaggcacatcccaagtaaggcatg

SEQ ID NO: 5333744 - DNA, 25 bp, Homo sapien
tcatgatagtgatgaaaaacaggag

SEQ ID NO: 5333745 - DNA, 25 bp, Homo sapien
gataatgacaatagaggcacatccc

SEQ ID NO: 5333746 - DNA, 25 bp, Homo sapien
gatagtgatgaaaaacaggagataa

SEQ ID NO: 5333747 - DNA, 25 bp, Homo sapien
tgggcccgatgcaggccgtgtcagt

SEQ ID NO: 5333748 - DNA, 25 bp, Homo sapien
atcttaccccgctccatagactggg

SEQ ID NO: 5333749 - DNA, 25 bp, Homo sapien
atctctcgcaggatccgctcgtgct

SEQ ID NO: 5333750 - DNA, 25 bp, Homo sapien
gtgtcagtgctctcgatctctcgca

SEQ ID NO: 5333751 - DNA, 25 bp, Homo sapien
ccacaatgccgctcccaccacaggc

SEQ ID NO: 5333752 - DNA, 25 bp, Homo sapien
tcggctcggctcaccttttccctgc

SEQ ID NO: 5333753 - DNA, 25 bp, Homo sapien
ctccgtcggctcggctcaccttttc

SEQ ID NO: 5333754 - DNA, 25 bp, Homo sapien
tttccctgccccacaatgccgctcc

SEQ ID NO: 5333755 - DNA, 25 bp, Homo sapien
ttgtctctcactttttcaacaggcc

SEQ ID NO: 5333756 - DNA, 25 bp, Homo sapien
actttttcaacaggcctaccatcca

SEQ ID NO: 5333757 - DNA, 25 bp, Homo sapien
catcattaagtcctcattttccctc

SEQ ID NO: 5333758 - DNA, 25 bp, Homo sapien
caggcctaccatccatcattaagtc

SEQ ID NO: 5333759 - DNA, 25 bp, Homo sapien
agatccatggactggttgccttgtg

SEQ ID NO: 5333760 - DNA, 25 bp, Homo sapien
gagcagatccatggactggttgcct

SEQ ID NO: 5333761 - DNA, 25 bp, Homo sapien
ctgagcagatccatggactggttgc

SEQ ID NO: 5333762 - DNA, 25 bp, Homo sapien
tggactggttgccttgtgccaacat

SEQ ID NO: 5333763 - DNA, 25 bp, Homo sapien
agtgcatcaattgcatcaatactcc

SEQ ID NO: 5333764 - DNA, 25 bp, Homo sapien
cagggatgattctatgctggcagaa

SEQ ID NO: 5333765 - DNA, 25 bp, Homo sapien
atggtatccagggatgattctatgc

SEQ ID NO: 5333766 - DNA, 25 bp, Homo sapien
ctaggtgcagtgcatcaattgcatc

SEQ ID NO: 5333767 - DNA, 25 bp, Homo sapien
ttttccctatccagccttaagcaac

SEQ ID NO: 5333768 - DNA, 25 bp, Homo sapien
cattgggacaaaatccacatgtcat

SEQ ID NO: 5333769 - DNA, 25 bp, Homo sapien
agtttcaccaagttgtatcagtact

SEQ ID NO: 5333770 - DNA, 25 bp, Homo sapien
ttattcatttgttcgctgatgggca

SEQ ID NO: 5333771 - DNA, 25 bp, Homo sapien
cattttatcgtagtggggtgaagtg

SEQ ID NO: 5333772 - DNA, 25 bp, Homo sapien
cagcaatgcatgaggattccagtgt

SEQ ID NO: 5333773 - DNA, 25 bp, Homo sapien
gggtgaagtggtgtttcatagtgaa

SEQ ID NO: 5333774 - DNA, 25 bp, Homo sapien
ccagtgtttccctatcttcaccaac

SEQ ID NO: 5333775 - DNA, 25 bp, Homo sapien
tgtaaactacacatcctgcccttgg

SEQ ID NO: 5333776 - DNA, 25 bp, Homo sapien
gatctgcgaccaagatttaacagta

SEQ ID NO: 5333777 - DNA, 25 bp, Homo sapien
cagaaacgtctcatatgaaggtcac

SEQ ID NO: 5333778 - DNA, 25 bp, Homo sapien
gaaggtcaccaatgacttccatgtt

SEQ ID NO: 5333779 - DNA, 25 bp, Homo sapien
gataggacgcctagaaatctaaagc

SEQ ID NO: 5333780 - DNA, 25 bp, Homo sapien
gctgcttatcaacaacgcgggtaag

SEQ ID NO: 5333781 - DNA, 25 bp, Homo sapien
tgtcccacttggcacggactgggct

SEQ ID NO: 5333782 - DNA, 25 bp, Homo sapien
gaggaaattcgagcatgcgtcccag

SEQ ID NO: 5333783 - DNA, 25 bp, Homo sapien
acctgcactggggccagcagctggc

SEQ ID NO: 5333784 - DNA, 25 bp, Homo sapien
atacacctgcactggggccagcagc

SEQ ID NO: 5333785 - DNA, 25 bp, Homo sapien
ttaatacacctgcactggggccagc

SEQ ID NO: 5333786 - DNA, 25 bp, Homo sapien
acacctgcactggggccagcagctg

SEQ ID NO: 5333787 - DNA, 25 bp, Homo sapien
tcatccatggtaactccatcttcag

SEQ ID NO: 5333788 - DNA, 25 bp, Homo sapien
cctaagagcccttcgtgtgagccag

SEQ ID NO: 5333789 - DNA, 25 bp, Homo sapien
tcttcagccctaagagcccttcgtg

SEQ ID NO: 5333790 - DNA, 25 bp, Homo sapien
cttcgtgtgagccaggagagtcccg

SEQ ID NO: 5333791 - DNA, 25 bp, Homo sapien
tgggtttgggtgtatagctgtacat

SEQ ID NO: 5333792 - DNA, 25 bp, Homo sapien
caaatgtgggtttgggtgtatagct

SEQ ID NO: 5333793 - DNA, 25 bp, Homo sapien
gtgcaaatgtgggtttgggtgtata

SEQ ID NO: 5333794 - DNA, 25 bp, Homo sapien
tgtgggtttgggtgtatagctgtac

SEQ ID NO: 5333795 - DNA, 25 bp, Homo sapien
tttcagaagaaagggatatttgctc

SEQ ID NO: 5333796 - DNA, 25 bp, Homo sapien
gcaaaaatgaggcatccgttgaagt

SEQ ID NO: 5333797 - DNA, 25 bp, Homo sapien
tagccaattattgggcaggctccca

SEQ ID NO: 5333798 - DNA, 25 bp, Homo sapien
gaatttatagtccttcccactcaag

SEQ ID NO: 5333799 - DNA, 25 bp, Homo sapien
gcgctcaggccgctagaatggaccc

SEQ ID NO: 5333800 - DNA, 25 bp, Homo sapien
gcttttcggagcagtcgagtggaaa

SEQ ID NO: 5333801 - DNA, 25 bp, Homo sapien
aaaaactggccggagcagagtcgtc

SEQ ID NO: 5333802 - DNA, 25 bp, Homo sapien
tcacagcctgtcgtgagaactgccc

SEQ ID NO: 5333803 - DNA, 25 bp, Homo sapien
tcgtgttccccgaggccatgaacca

SEQ ID NO: 5333804 - DNA, 25 bp, Homo sapien
tcggccaccgcttccagggtgagtg

SEQ ID NO: 5333805 - DNA, 25 bp, Homo sapien
agtgtccacgctgtgcccgccgagg

SEQ ID NO: 5333806 - DNA, 25 bp, Homo sapien
gctcgctctacggtgggcccgagct

SEQ ID NO: 5333807 - DNA, 25 bp, Homo sapien
aggaggcatcaaggcgctctggcta

SEQ ID NO: 5333808 - DNA, 25 bp, Homo sapien
tcaaggcgctctggctaagtgaacc

SEQ ID NO: 5333809 - DNA, 25 bp, Homo sapien
acacgtgctgggaccgcttcccagg

SEQ ID NO: 5333810 - DNA, 25 bp, Homo sapien
ctctggctaagtgaaccgggctctg

SEQ ID NO: 5333811 - DNA, 25 bp, Homo sapien
cattagtattacacaaatcacatag

SEQ ID NO: 5333812 - DNA, 25 bp, Homo sapien
gaggttaaaaagacgctgcaaaggc

SEQ ID NO: 5333813 - DNA, 25 bp, Homo sapien
aatcccgtatttattgcccaaagct

SEQ ID NO: 5333814 - DNA, 25 bp, Homo sapien
atcacatagattgagaaattttctg

SEQ ID NO: 5333815 - DNA, 25 bp, Homo sapien
gctgcatttgggagcatgacggaaa

SEQ ID NO: 5333816 - DNA, 25 bp, Homo sapien
caaagaagtcggctcataaccaggt

SEQ ID NO: 5333817 - DNA, 25 bp, Homo sapien
caggcgtggcttgtgttctcgcaca

SEQ ID NO: 5333818 - DNA, 25 bp, Homo sapien
tgagttatgagatgctgaggccaca

SEQ ID NO: 5333819 - DNA, 25 bp, Homo sapien
cctagttcaggcctagagaccagca

SEQ ID NO: 5333820 - DNA, 25 bp, Homo sapien
gcttttcaaaagacgacccagacat

SEQ ID NO: 5333821 - DNA, 25 bp, Homo sapien
gttttggtcccaagataaagtgcac

SEQ ID NO: 5333822 - DNA, 25 bp, Homo sapien
tcacattatggtgggattggctcaa

SEQ ID NO: 5333823 - DNA, 25 bp, Homo sapien
cctttgtacagcttgctcttccttc

SEQ ID NO: 5333824 - DNA, 25 bp, Homo sapien
ttccctttgtacagcttgctcttcc

SEQ ID NO: 5333825 - DNA, 25 bp, Homo sapien
tctgcttccctttgtacagcttgct

SEQ ID NO: 5333826 - DNA, 25 bp, Homo sapien
aggctctgcttccctttgtacagct

SEQ ID NO: 5333827 - DNA, 25 bp, Homo sapien
gtttggcaaaggtcaactgctcccg

SEQ ID NO: 5333828 - DNA, 25 bp, Homo sapien
taaaatgtgaatgggtcagtctccc

SEQ ID NO: 5333829 - DNA, 25 bp, Homo sapien
gaatcagttagagctccacgaaggg

SEQ ID NO: 5333830 - DNA, 25 bp, Homo sapien
tcactggacttcactcagagggact

SEQ ID NO: 5333831 - DNA, 25 bp, Homo sapien
tcgtggcctgggctatctccggctc

SEQ ID NO: 5333832 - DNA, 25 bp, Homo sapien
tccggctctaattgggatgtttcaa

SEQ ID NO: 5333833 - DNA, 25 bp, Homo sapien
ggctatctccggctctaattgggat

SEQ ID NO: 5333834 - DNA, 25 bp, Homo sapien
gtacaccactgtccggctgctcgtg

SEQ ID NO: 5333835 - DNA, 25 bp, Homo sapien
gtgcctggccttagactgtcttaga

SEQ ID NO: 5333836 - DNA, 25 bp, Homo sapien
cgtgcctggccttagactgtcttag

SEQ ID NO: 5333837 - DNA, 25 bp, Homo sapien
gccttagactgtcttagaaaggtct

SEQ ID NO: 5333838 - DNA, 25 bp, Homo sapien
gactgtcttagaaaggtctctcttg

SEQ ID NO: 5333839 - DNA, 25 bp, Homo sapien
gggcacccaagagccagtcaacagg

SEQ ID NO: 5333840 - DNA, 25 bp, Homo sapien
tccccgggcacccaagagccagtca

SEQ ID NO: 5333841 - DNA, 25 bp, Homo sapien
ttccatctggtaggctcctccccgg

SEQ ID NO: 5333842 - DNA, 25 bp, Homo sapien
tggaatccgtgggcccatcatctct

SEQ ID NO: 5333843 - DNA, 25 bp, Homo sapien
tagtggaggttctggtacccactga

SEQ ID NO: 5333844 - DNA, 25 bp, Homo sapien
cagggctggtaagagggtagagata

SEQ ID NO: 5333845 - DNA, 25 bp, Homo sapien
catacagggagggtatgcctctctg

SEQ ID NO: 5333846 - DNA, 25 bp, Homo sapien
tggtacccactgagggtacccacat

SEQ ID NO: 5333847 - DNA, 25 bp, Homo sapien
cataaacactgattccaaaaggtcc

SEQ ID NO: 5333848 - DNA, 25 bp, Homo sapien
ctgggttggaaaagacataaacact

SEQ ID NO: 5333849 - DNA, 25 bp, Homo sapien
tgttggccctttagcctccctccag

SEQ ID NO: 5333850 - DNA, 25 bp, Homo sapien
gctctgggttggaaaagacataaac

SEQ ID NO: 5333851 - DNA, 25 bp, Homo sapien
ctttgaatcgcccaagtcctcagct

SEQ ID NO: 5333852 - DNA, 25 bp, Homo sapien
cccctcctctttgaatcgcccaagt

SEQ ID NO: 5333853 - DNA, 25 bp, Homo sapien
ttgaatcgcccaagtcctcagcttc

SEQ ID NO: 5333854 - DNA, 25 bp, Homo sapien
tcctctttgaatcgcccaagtcctc

SEQ ID NO: 5333855 - DNA, 25 bp, Homo sapien
gctgccaggcacacgaggctttgca

SEQ ID NO: 5333856 - DNA, 25 bp, Homo sapien
gggaagaggctgatggccagcggca

SEQ ID NO: 5333857 - DNA, 25 bp, Homo sapien
cagccgggggcgtgcctgcaggaga

SEQ ID NO: 5333858 - DNA, 25 bp, Homo sapien
ctctgacatttgcgggaagaggctg

SEQ ID NO: 5333859 - DNA, 25 bp, Homo sapien
gtgttcatcggagcttcctgttttg

SEQ ID NO: 5333860 - DNA, 25 bp, Homo sapien
gcttcctgttttgctcaatacagca

SEQ ID NO: 5333861 - DNA, 25 bp, Homo sapien
ggagcttcctgttttgctcaataca

SEQ ID NO: 5333862 - DNA, 25 bp, Homo sapien
catcggagcttcctgttttgctcaa

SEQ ID NO: 5333863 - DNA, 25 bp, Homo sapien
catgctcaggtacccccagagcctc

SEQ ID NO: 5333864 - DNA, 25 bp, Homo sapien
ctcaggtacccccagagcctccgcc

SEQ ID NO: 5333865 - DNA, 25 bp, Homo sapien
catgccatgcccatgctcaggtacc

SEQ ID NO: 5333866 - DNA, 25 bp, Homo sapien
tgctcaggtacccccagagcctccg

SEQ ID NO: 5333867 - DNA, 25 bp, Homo sapien
tgggcaggaccactcgcgtcagcgc

SEQ ID NO: 5333868 - DNA, 25 bp, Homo sapien
gggggtagcaccaggatgggcatgg

SEQ ID NO: 5333869 - DNA, 25 bp, Homo sapien
acatgacgatcgggggtagcaccag

SEQ ID NO: 5333870 - DNA, 25 bp, Homo sapien
gcatggacatgacgatcgggggtag

SEQ ID NO: 5333871 - DNA, 25 bp, Homo sapien
ccacgaggttgccatcgctgtccag

SEQ ID NO: 5333872 - DNA, 25 bp, Homo sapien
ctgcgatcttggaggagcccacgag

SEQ ID NO: 5333873 - DNA, 25 bp, Homo sapien
cgtaccgcatcaggaccacattgca

SEQ ID NO: 5333874 - DNA, 25 bp, Homo sapien
accacattgcagatattggcactgg

SEQ ID NO: 5333875 - DNA, 25 bp, Homo sapien
accccgaggcctgatgttccaccat

SEQ ID NO: 5333876 - DNA, 25 bp, Homo sapien
tgggagggctctctgacctgaagtc

SEQ ID NO: 5333877 - DNA, 25 bp, Homo sapien
ccagggcaagcccactaggcaggca

SEQ ID NO: 5333878 - DNA, 25 bp, Homo sapien
gcaagcccactaggcaggcaaagtg

SEQ ID NO: 5333879 - DNA, 25 bp, Homo sapien
tcttcgagcatctctcctgcttcca

SEQ ID NO: 5333880 - DNA, 25 bp, Homo sapien
cgacgctcagtgcagtggaaaccat

SEQ ID NO: 5333881 - DNA, 25 bp, Homo sapien
tgccccacaacaggcatgctcacct

SEQ ID NO: 5333882 - DNA, 25 bp, Homo sapien
cattttcagtgattgtgatctaggg

SEQ ID NO: 5333883 - DNA, 25 bp, Homo sapien
ggggtaggccctccagacttgggca

SEQ ID NO: 5333884 - DNA, 25 bp, Homo sapien
tgacctgggggtaggccctccagac

SEQ ID NO: 5333885 - DNA, 25 bp, Homo sapien
taggccctccagacttgggcagcac

SEQ ID NO: 5333886 - DNA, 25 bp, Homo sapien
ggtaggccctccagacttgggcagc

SEQ ID NO: 5333887 - DNA, 25 bp, Homo sapien
gacctgcagtgaaccccgggcagga

SEQ ID NO: 5333888 - DNA, 25 bp, Homo sapien
ctcggagacctgcagtgaaccccgg

SEQ ID NO: 5333889 - DNA, 25 bp, Homo sapien
tggtgcagcttagggatactctggc

SEQ ID NO: 5333890 - DNA, 25 bp, Homo sapien
ggagacctgcagtgaaccccgggca

SEQ ID NO: 5333891 - DNA, 25 bp, Homo sapien
gctggggtgaacttgttggctttct

SEQ ID NO: 5333892 - DNA, 25 bp, Homo sapien
caaacctctggatgagaaggcgggt

SEQ ID NO: 5333893 - DNA, 25 bp, Homo sapien
ctacagcagggaacggcacaaacct

SEQ ID NO: 5333894 - DNA, 25 bp, Homo sapien
gaacggcacaaacctctggatgaga

SEQ ID NO: 5333895 - DNA, 25 bp, Homo sapien
cgccccagcacctaggacagccacg

SEQ ID NO: 5333896 - DNA, 25 bp, Homo sapien
gccccagcacctaggacagccacgg

SEQ ID NO: 5333897 - DNA, 25 bp, Homo sapien
ccccagcacctaggacagccacggc

SEQ ID NO: 5333898 - DNA, 25 bp, Homo sapien
ggcttcgggcactgacaggtcttca

SEQ ID NO: 5333899 - DNA, 25 bp, Homo sapien
ctctggagtcggctatagaaggcca

SEQ ID NO: 5333900 - DNA, 25 bp, Homo sapien
tcatcacaaggaacaaggaggaggt

SEQ ID NO: 5333901 - DNA, 25 bp, Homo sapien
gacgtgtgacaccagtaaggccata

SEQ ID NO: 5333902 - DNA, 25 bp, Homo sapien
ctgcaatgctgagcggggtggcccc

SEQ ID NO: 5333903 - DNA, 25 bp, Homo sapien
tgcaatgctgagcggggtggcccca

SEQ ID NO: 5333904 - DNA, 25 bp, Homo sapien
ctggatgaacttggatgcaggtgaa

SEQ ID NO: 5333905 - DNA, 25 bp, Homo sapien
agcaatggagacggcgctgatgaca

SEQ ID NO: 5333906 - DNA, 25 bp, Homo sapien
agacggcgctgatgacagctcccag

SEQ ID NO: 5333907 - DNA, 25 bp, Homo sapien
acagctcccaggtatccctggatga

SEQ ID NO: 5333908 - DNA, 25 bp, Homo sapien
ggtcgcattgcggtttgcatagttg

SEQ ID NO: 5333909 - DNA, 25 bp, Homo sapien
ggtttgcatagttgacacaggcatt

SEQ ID NO: 5333910 - DNA, 25 bp, Homo sapien
cattgcggtttgcatagttgacaca

SEQ ID NO: 5333911 - DNA, 25 bp, Homo sapien
cttggtcgcattgcggtttgcatag

SEQ ID NO: 5333912 - DNA, 25 bp, Homo sapien
gccctgtttgctgcgagactgttac

SEQ ID NO: 5333913 - DNA, 25 bp, Homo sapien
agccctgtttgctgcgagactgtta

SEQ ID NO: 5333914 - DNA, 25 bp, Homo sapien
gagccctgtttgctgcgagactgtt

SEQ ID NO: 5333915 - DNA, 25 bp, Homo sapien
tggatgccagtgtctggttgggcaa

SEQ ID NO: 5333916 - DNA, 25 bp, Homo sapien
agaagacagtggatgccagtgtctg

SEQ ID NO: 5333917 - DNA, 25 bp, Homo sapien
cagaagacagtggatgccagtgtct

SEQ ID NO: 5333918 - DNA, 25 bp, Homo sapien
cagtgtctggttgggcaagagaaga

SEQ ID NO: 5333919 - DNA, 25 bp, Homo sapien
catccccatgtgatctctggcagaa

SEQ ID NO: 5333920 - DNA, 25 bp, Homo sapien
taagacctagacttgctgaccgtgt

SEQ ID NO: 5333921 - DNA, 25 bp, Homo sapien
cactgcatatgggaaaaatgtgcac

SEQ ID NO: 5333922 - DNA, 25 bp, Homo sapien
tgattttgacactggccaagccttg

SEQ ID NO: 5333923 - DNA, 25 bp, Homo sapien
tcgtaagatacagcccaatagcact

SEQ ID NO: 5333924 - DNA, 25 bp, Homo sapien
tacagcccaatagcactcactgcat

SEQ ID NO: 5333925 - DNA, 25 bp, Homo sapien
ccctcgaactgtacttggaccacca

SEQ ID NO: 5333926 - DNA, 25 bp, Homo sapien
gaccaccaggaacatcgtaagatac

SEQ ID NO: 5333927 - DNA, 25 bp, Homo sapien
tgcccgtgacaccacagggttccct

SEQ ID NO: 5333928 - DNA, 25 bp, Homo sapien
cgtgacaccacagggttccctttat

SEQ ID NO: 5333929 - DNA, 25 bp, Homo sapien
tgacaccacagggttccctttataa

SEQ ID NO: 5333930 - DNA, 25 bp, Homo sapien
ctgcccgtgacaccacagggttccc

SEQ ID NO: 5333931 - DNA, 25 bp, Homo sapien
gaactgtgcctctgaataactggtg

SEQ ID NO: 5333932 - DNA, 25 bp, Homo sapien
ggaactgtgcctctgaataactggt

SEQ ID NO: 5333933 - DNA, 25 bp, Homo sapien
aactgtgcctctgaataactggtgt

SEQ ID NO: 5333934 - DNA, 25 bp, Homo sapien
cacttgatttatctttagtggcaag

SEQ ID NO: 5333935 - DNA, 25 bp, Homo sapien
caaaccaaactagtatttgggctat

SEQ ID NO: 5333936 - DNA, 25 bp, Homo sapien
aacctcctaccctaacatgggtctg

SEQ ID NO: 5333937 - DNA, 25 bp, Homo sapien
tgtgcccaaacctcacttctggctt

SEQ ID NO: 5333938 - DNA, 25 bp, Homo sapien
tacccgtgagcaataacataaagtt

SEQ ID NO: 5333939 - DNA, 25 bp, Homo sapien
gagaaaacttccctatgactagcag

SEQ ID NO: 5333940 - DNA, 25 bp, Homo sapien
caacgctggatttaagtcatcaggc

SEQ ID NO: 5333941 - DNA, 25 bp, Homo sapien
tagcaggtgctaatgacaacagtgg

SEQ ID NO: 5333942 - DNA, 25 bp, Homo sapien
cgtggcatccccagtggcgcagtag

SEQ ID NO: 5333943 - DNA, 25 bp, Homo sapien
cagagcttcttaaatccgtggcatc

SEQ ID NO: 5333944 - DNA, 25 bp, Homo sapien
taagtgccagagcttcttaaatccg

SEQ ID NO: 5333945 - DNA, 25 bp, Homo sapien
taaatccgtggcatccccagtggcg

SEQ ID NO: 5333946 - DNA, 25 bp, Homo sapien
ccatggttctcatacccacttctct

SEQ ID NO: 5333947 - DNA, 25 bp, Homo sapien
agccatggttctcatacccacttct

SEQ ID NO: 5333948 - DNA, 25 bp, Homo sapien
tgagccatggttctcatacccactt

SEQ ID NO: 5333949 - DNA, 25 bp, Homo sapien
gtgagccatggttctcatacccact

SEQ ID NO: 5333950 - DNA, 25 bp, Homo sapien
tctcattggtgtccggatgtagaat

SEQ ID NO: 5333951 - DNA, 25 bp, Homo sapien
cattctaaatggcatgaagatcttc

SEQ ID NO: 5333952 - DNA, 25 bp, Homo sapien
cttctcattggtgtccggatgtaga

SEQ ID NO: 5333953 - DNA, 25 bp, Homo sapien
cattggtgtccggatgtagaatagc

SEQ ID NO: 5333954 - DNA, 25 bp, Homo sapien
tgcttgattttctgtgcactccaga

SEQ ID NO: 5333955 - DNA, 25 bp, Homo sapien
gcttgattttctgtgcactccagag

SEQ ID NO: 5333956 - DNA, 25 bp, Homo sapien
ctgcttgattttctgtgcactccag

SEQ ID NO: 5333957 - DNA, 25 bp, Homo sapien
gcccgaaagaagctcgggctatcct

SEQ ID NO: 5333958 - DNA, 25 bp, Homo sapien
gaagctcgggctatccttgccagcc

SEQ ID NO: 5333959 - DNA, 25 bp, Homo sapien
ctccgaaagcccgaaagaagctcgg

SEQ ID NO: 5333960 - DNA, 25 bp, Homo sapien
ccagctccgaaagcccgaaagaagc

SEQ ID NO: 5333961 - DNA, 25 bp, Homo sapien
tcagccatgaagatagcacgacgcc

SEQ ID NO: 5333962 - DNA, 25 bp, Homo sapien
catcaagttgtgaggcaggactccg

SEQ ID NO: 5333963 - DNA, 25 bp, Homo sapien
aattctagatctcccgcttgctggc

SEQ ID NO: 5333964 - DNA, 25 bp, Homo sapien
catgaaatgagttcttggccaccca

SEQ ID NO: 5333965 - DNA, 25 bp, Homo sapien
gggtcccatgcttatagtcctccag

SEQ ID NO: 5333966 - DNA, 25 bp, Homo sapien
tgttcattggtgacccccgggcgca

SEQ ID NO: 5333967 - DNA, 25 bp, Homo sapien
cagggtcccatgcttatagtcctcc

SEQ ID NO: 5333968 - DNA, 25 bp, Homo sapien
gcgcagggtcccatgcttatagtcc

SEQ ID NO: 5333969 - DNA, 25 bp, Homo sapien
ggggttgcagtgagcctgggggaca

SEQ ID NO: 5333970 - DNA, 25 bp, Homo sapien
tgcagtgagcctgggggacagtgca

SEQ ID NO: 5333971 - DNA, 25 bp, Homo sapien
gttgcagtgagcctgggggacagtg

SEQ ID NO: 5333972 - DNA, 25 bp, Homo sapien
gggttgcagtgagcctgggggacag

SEQ ID NO: 5333973 - DNA, 25 bp, Homo sapien
caaaggccgaggggctgaggctcca

SEQ ID NO: 5333974 - DNA, 25 bp, Homo sapien
acctctgtcaaaggccgaggggctg

SEQ ID NO: 5333975 - DNA, 25 bp, Homo sapien
aggccgaggggctgaggctccaggc

SEQ ID NO: 5333976 - DNA, 25 bp, Homo sapien
aacctctgtcaaaggccgaggggct

SEQ ID NO: 5333977 - DNA, 25 bp, Homo sapien
agcttgaccattactagagtcgcct

SEQ ID NO: 5333978 - DNA, 25 bp, Homo sapien
tagagtcgcctccaagcagtgggtc

SEQ ID NO: 5333979 - DNA, 25 bp, Homo sapien
ggcaaagtcccaagcctttctcttg

SEQ ID NO: 5333980 - DNA, 25 bp, Homo sapien
caagcagtgggtctcggaggcccaa

SEQ ID NO: 5333981 - DNA, 25 bp, Homo sapien
tcagtagccccaaaagtcagtcatt

SEQ ID NO: 5333982 - DNA, 25 bp, Homo sapien
ttttgtatgggacacatttcagcca

SEQ ID NO: 5333983 - DNA, 25 bp, Homo sapien
taggtatggatgagacccaaaggtg

SEQ ID NO: 5333984 - DNA, 25 bp, Homo sapien
ggaaggctgtgtactcaacagaaca

SEQ ID NO: 5333985 - DNA, 25 bp, Homo sapien
tagcaacacttgcagcctcagacct

SEQ ID NO: 5333986 - DNA, 25 bp, Homo sapien
gatctgggtgctacatgtgttcata

SEQ ID NO: 5333987 - DNA, 25 bp, Homo sapien
tcaaattgtcccaatgcagccagtg

SEQ ID NO: 5333988 - DNA, 25 bp, Homo sapien
ctgtggtgtcaaaagttctaggccc

SEQ ID NO: 5333989 - DNA, 25 bp, Homo sapien
ctgaagctttgttcaaggcattctt

SEQ ID NO: 5333990 - DNA, 25 bp, Homo sapien
tcatctcagtatcatgctctccttc

SEQ ID NO: 5333991 - DNA, 25 bp, Homo sapien
cctcattgtggcatttctttattgg

SEQ ID NO: 5333992 - DNA, 25 bp, Homo sapien
ggtctttcagctcatctcagtatca

SEQ ID NO: 5333993 - DNA, 25 bp, Homo sapien
tggagatgaccttgctaaataacct

SEQ ID NO: 5333994 - DNA, 25 bp, Homo sapien
ccagagtttgtggagcctagaagat

SEQ ID NO: 5333995 - DNA, 25 bp, Homo sapien
ccaatgaggagtatggccgctatct

SEQ ID NO: 5333996 - DNA, 25 bp, Homo sapien
aaataacctgcctagacgagagcca

SEQ ID NO: 5333997 - DNA, 25 bp, Homo sapien
tggaacatcctttcaatgggacact

SEQ ID NO: 5333998 - DNA, 25 bp, Homo sapien
agaagggattaactactaatacatg

SEQ ID NO: 5333999 - DNA, 25 bp, Homo sapien
acatcctttcaatgggacactactc

SEQ ID NO: 5334000 - DNA, 25 bp, Homo sapien
cagcagtaagaagggattaactact

SEQ ID NO: 5334001 - DNA, 25 bp, Homo sapien
tgattgcccatatggtttgcttctg

SEQ ID NO: 5334002 - DNA, 25 bp, Homo sapien
aatgcttcacatcttgattgcccat

SEQ ID NO: 5334003 - DNA, 25 bp, Homo sapien
atctgatggtttgtaagtgctcaga

SEQ ID NO: 5334004 - DNA, 25 bp, Homo sapien
aaagaggtatgagagaacatgtagg

SEQ ID NO: 5334005 - DNA, 25 bp, Homo sapien
agagaatttgttaccttcctctcac

SEQ ID NO: 5334006 - DNA, 25 bp, Homo sapien
ttgtgagatccaaatgatataatgt

SEQ ID NO: 5334007 - DNA, 25 bp, Homo sapien
tacagcacaatgtatcaactcagat

SEQ ID NO: 5334008 - DNA, 25 bp, Homo sapien
aacagacagctacaggtagagagaa

SEQ ID NO: 5334009 - DNA, 25 bp, Homo sapien
cgagggtcgatgatatccaagaagt

SEQ ID NO: 5334010 - DNA, 25 bp, Homo sapien
tatccaagaagtgcctgaagcggcc

SEQ ID NO: 5334011 - DNA, 25 bp, Homo sapien
tcagtgacaaagagtgtgcgagggt

SEQ ID NO: 5334012 - DNA, 25 bp, Homo sapien
gcctgaagcggccatagaaggacgt

SEQ ID NO: 5334013 - DNA, 25 bp, Homo sapien
gaagagtgaatggatcagctgctgc

SEQ ID NO: 5334014 - DNA, 25 bp, Homo sapien
agagaagagtgaatggatcagctgc

SEQ ID NO: 5334015 - DNA, 25 bp, Homo sapien
gagaagagtgaatggatcagctgct

SEQ ID NO: 5334016 - DNA, 25 bp, Homo sapien
agagagaagagtgaatggatcagct

SEQ ID NO: 5334017 - DNA, 25 bp, Homo sapien
tgagctcacaatcctcaggccctcc

SEQ ID NO: 5334018 - DNA, 25 bp, Homo sapien
caagggcagctcaagcctaaaagca

SEQ ID NO: 5334019 - DNA, 25 bp, Homo sapien
caagcctaaaagcactgagctcaca

SEQ ID NO: 5334020 - DNA, 25 bp, Homo sapien
gatccccaagggcagctcaagccta

SEQ ID NO: 5334021 - DNA, 25 bp, Homo sapien
tgcctggccatgtgggggaatcttg

SEQ ID NO: 5334022 - DNA, 25 bp, Homo sapien
tagtggttaaatgcatagactttaa

SEQ ID NO: 5334023 - DNA, 25 bp, Homo sapien
gaggaaatgaccagaaaaggaagag

SEQ ID NO: 5334024 - DNA, 25 bp, Homo sapien
tccctttcactaggcagctggagta

SEQ ID NO: 5334025 - DNA, 25 bp, Homo sapien
gaattctacagggacgaacaactgc

SEQ ID NO: 5334026 - DNA, 25 bp, Homo sapien
ctgatgaaccttacactgtcaaaca

SEQ ID NO: 5334027 - DNA, 25 bp, Homo sapien
aaacatgacaccacttgcaattttg

SEQ ID NO: 5334028 - DNA, 25 bp, Homo sapien
cactgtcaaacatgacaccacttgc

SEQ ID NO: 5334029 - DNA, 25 bp, Homo sapien
agacaccccaactctgggatgtctc

SEQ ID NO: 5334030 - DNA, 25 bp, Homo sapien
cagggccagactagaactttgcgtc

SEQ ID NO: 5334031 - DNA, 25 bp, Homo sapien
tcctcagcccgagatggagagcagg

SEQ ID NO: 5334032 - DNA, 25 bp, Homo sapien
ccagcagctcgaaaggaacgtcagt

SEQ ID NO: 5334033 - DNA, 25 bp, Homo sapien
taataaattccgtctcattggtgcg

SEQ ID NO: 5334034 - DNA, 25 bp, Homo sapien
atgctgtagtcgctgtatccgccat

SEQ ID NO: 5334035 - DNA, 25 bp, Homo sapien
gttggaaaggaggtgcatcgctcga

SEQ ID NO: 5334036 - DNA, 25 bp, Homo sapien
ctcgaggcgctagcggcactagccg

SEQ ID NO: 5334037 - DNA, 25 bp, Homo sapien
ccgccgccgatgctgtagtcgctgt

SEQ ID NO: 5334038 - DNA, 25 bp, Homo sapien
gagcgggaggcgcaaggcgttgtgg

SEQ ID NO: 5334039 - DNA, 25 bp, Homo sapien
gattggccctaatcaaccgcagcga

SEQ ID NO: 5334040 - DNA, 25 bp, Homo sapien
tgacgcccgcaatctccggcccttt

SEQ ID NO: 5334041 - DNA, 25 bp, Homo sapien
acagctgcctctcccgattggccct

SEQ ID NO: 5334042 - DNA, 25 bp, Homo sapien
aacaggcagcgtggtcattgtccca

SEQ ID NO: 5334043 - DNA, 25 bp, Homo sapien
taagtataggtgtctcccaaaggca

SEQ ID NO: 5334044 - DNA, 25 bp, Homo sapien
aagaaacatcaacaaggaccctggg

SEQ ID NO: 5334045 - DNA, 25 bp, Homo sapien
tagacatggaggcttgatccccaaa

SEQ ID NO: 5334046 - DNA, 25 bp, Homo sapien
tcatcgtgggtcaggtggtagtact

SEQ ID NO: 5334047 - DNA, 25 bp, Homo sapien
cagcgtgggtgaggtctccatgatc

SEQ ID NO: 5334048 - DNA, 25 bp, Homo sapien
tgcacatgctcgtcccgctggctca

SEQ ID NO: 5334049 - DNA, 25 bp, Homo sapien
agcagccggtcgatgtagctctcca

SEQ ID NO: 5334050 - DNA, 25 bp, Homo sapien
accatctggccagcctggggggcct

SEQ ID NO: 5334051 - DNA, 25 bp, Homo sapien
ttcagccttttggtgtccaccatct

SEQ ID NO: 5334052 - DNA, 25 bp, Homo sapien
tccaccatctggccagcctgggggg

SEQ ID NO: 5334053 - DNA, 25 bp, Homo sapien
cttcagccttttggtgtccaccatc

SEQ ID NO: 5334054 - DNA, 25 bp, Homo sapien
gctatgctcagactggagcgggact

SEQ ID NO: 5334055 - DNA, 25 bp, Homo sapien
agatgtgactgttttgagcttctcc

SEQ ID NO: 5334056 - DNA, 25 bp, Homo sapien
gctcagggctatgctcagactggag

SEQ ID NO: 5334057 - DNA, 25 bp, Homo sapien
tcagggctatgctcagactggagcg

SEQ ID NO: 5334058 - DNA, 25 bp, Homo sapien
gccctccacaggggcggcactgagg

SEQ ID NO: 5334059 - DNA, 25 bp, Homo sapien
ccacaggggcggcactgaggggctt

SEQ ID NO: 5334060 - DNA, 25 bp, Homo sapien
cacaggggcggcactgaggggcttc

SEQ ID NO: 5334061 - DNA, 25 bp, Homo sapien
ctccacaggggcggcactgaggggc

SEQ ID NO: 5334062 - DNA, 25 bp, Homo sapien
tgtggctcctcagctggtcgtgtct

SEQ ID NO: 5334063 - DNA, 25 bp, Homo sapien
cctcagctggtcgtgtctccaaggg

SEQ ID NO: 5334064 - DNA, 25 bp, Homo sapien
ggcagaagcacaagcggggaggctg

SEQ ID NO: 5334065 - DNA, 25 bp, Homo sapien
agggcagaagcacaagcggggaggc

SEQ ID NO: 5334066 - DNA, 25 bp, Homo sapien
gaatgaatagaagattccctcgacc

SEQ ID NO: 5334067 - DNA, 25 bp, Homo sapien
tggctcccctggtggtgcagaggag

SEQ ID NO: 5334068 - DNA, 25 bp, Homo sapien
tcttctggaccagaatgaatagaag

SEQ ID NO: 5334069 - DNA, 25 bp, Homo sapien
ccaggcttcagacaggggagagcat

SEQ ID NO: 5334070 - DNA, 25 bp, Homo sapien
aggatctcggctcccctgaaacaag

SEQ ID NO: 5334071 - DNA, 25 bp, Homo sapien
tctcggctcccctgaaacaagaagg

SEQ ID NO: 5334072 - DNA, 25 bp, Homo sapien
caagaaggggttcaaggcatcttcc

SEQ ID NO: 5334073 - DNA, 25 bp, Homo sapien
ggaggatctcggctcccctgaaaca

SEQ ID NO: 5334074 - DNA, 25 bp, Homo sapien
catcagcctgctgggaggtggctga

SEQ ID NO: 5334075 - DNA, 25 bp, Homo sapien
acatcagcctgctgggaggtggctg

SEQ ID NO: 5334076 - DNA, 25 bp, Homo sapien
atcagcctgctgggaggtggctgac

SEQ ID NO: 5334077 - DNA, 25 bp, Homo sapien
tcttgagggtgtgaagaggcgcggt

SEQ ID NO: 5334078 - DNA, 25 bp, Homo sapien
agactcctccgactcacgcttctct

SEQ ID NO: 5334079 - DNA, 25 bp, Homo sapien
gggaccgacaaccagtgcacttggg

SEQ ID NO: 5334080 - DNA, 25 bp, Homo sapien
cactcgggtttaggctcgggctccg

SEQ ID NO: 5334081 - DNA, 25 bp, Homo sapien
atagagatgtcccactgtctgccgg

SEQ ID NO: 5334082 - DNA, 25 bp, Homo sapien
tgtctcgacgtcagggcaaagctga

SEQ ID NO: 5334083 - DNA, 25 bp, Homo sapien
gactctccccgaaagactagtgagg

SEQ ID NO: 5334084 - DNA, 25 bp, Homo sapien
caaagctgattttcgcctcgggagg

SEQ ID NO: 5334085 - DNA, 25 bp, Homo sapien
tggtggttcggtcccaagtccagag

SEQ ID NO: 5334086 - DNA, 25 bp, Homo sapien
gcgctctggtggttcggtcccaagt

SEQ ID NO: 5334087 - DNA, 25 bp, Homo sapien
gccagcccctaccgacccgaggagc

SEQ ID NO: 5334088 - DNA, 25 bp, Homo sapien
agctgccttcgcagtcatggcccca

SEQ ID NO: 5334089 - DNA, 25 bp, Homo sapien
ttgaaggtgttgtcccactcaggca

SEQ ID NO: 5334090 - DNA, 25 bp, Homo sapien
caaagacgttgaaggtgttgtccca

SEQ ID NO: 5334091 - DNA, 25 bp, Homo sapien
ctggcagcaaagacgttgaaggtgt

SEQ ID NO: 5334092 - DNA, 25 bp, Homo sapien
gacgttgaaggtgttgtcccactca

SEQ ID NO: 5334093 - DNA, 25 bp, Homo sapien
aaggagagtttagtgctatgtcggc

SEQ ID NO: 5334094 - DNA, 25 bp, Homo sapien
tggtaagacccaataatccaggtgg

SEQ ID NO: 5334095 - DNA, 25 bp, Homo sapien
gtgctatgtcggctatgagctcctc

SEQ ID NO: 5334096 - DNA, 25 bp, Homo sapien
gctcctcgaagaaggggttgctctg

SEQ ID NO: 5334097 - DNA, 25 bp, Homo sapien
tgcagtctttcagcaacctggctgg

SEQ ID NO: 5334098 - DNA, 25 bp, Homo sapien
gcagtctttcagcaacctggctggc

SEQ ID NO: 5334099 - DNA, 25 bp, Homo sapien
agtcctttcttccaggccagccttc

SEQ ID NO: 5334100 - DNA, 25 bp, Homo sapien
gggaagcgccaacagtcctttcttc

SEQ ID NO: 5334101 - DNA, 25 bp, Homo sapien
gtcctttcttccaggccagccttcc

SEQ ID NO: 5334102 - DNA, 25 bp, Homo sapien
cctctggggaagcgccaacagtcct

SEQ ID NO: 5334103 - DNA, 25 bp, Homo sapien
tgagctctggtgagtaggggcgggg

SEQ ID NO: 5334104 - DNA, 25 bp, Homo sapien
gagctctggtgagtaggggcggggc

SEQ ID NO: 5334105 - DNA, 25 bp, Homo sapien
gggtccttggcttctctcaagccaa

SEQ ID NO: 5334106 - DNA, 25 bp, Homo sapien
caaaccagctactcttggccttttc

SEQ ID NO: 5334107 - DNA, 25 bp, Homo sapien
gagagcttcggcgacccaactcgct

SEQ ID NO: 5334108 - DNA, 25 bp, Homo sapien
tctgagtcgggtccttggcttctct

SEQ ID NO: 5334109 - DNA, 25 bp, Homo sapien
catccggggcttgcgttcctccttc

SEQ ID NO: 5334110 - DNA, 25 bp, Homo sapien
ccatccggggcttgcgttcctcctt

SEQ ID NO: 5334111 - DNA, 25 bp, Homo sapien
tcctcttatgggtgaacagcttggg

SEQ ID NO: 5334112 - DNA, 25 bp, Homo sapien
tgctgttgctacgactgcctctggg

SEQ ID NO: 5334113 - DNA, 25 bp, Homo sapien
cattgacacagagcgaagagcggga

SEQ ID NO: 5334114 - DNA, 25 bp, Homo sapien
tcggagaaccgggaagagacagctt

SEQ ID NO: 5334115 - DNA, 25 bp, Homo sapien
ccaggtcaggatcctctatggcgct

SEQ ID NO: 5334116 - DNA, 25 bp, Homo sapien
tccgagcccagcgaggtgttggact

SEQ ID NO: 5334117 - DNA, 25 bp, Homo sapien
caggtcaaacatactggcgctcagg

SEQ ID NO: 5334118 - DNA, 25 bp, Homo sapien
tggtgacttcaatctcgccgcgttc

SEQ ID NO: 5334119 - DNA, 25 bp, Homo sapien
gccactgatagcctctccccaaagg

SEQ ID NO: 5334120 - DNA, 25 bp, Homo sapien
aggcagaactcagtcacgggcccag

SEQ ID NO: 5334121 - DNA, 25 bp, Homo sapien
tccaaaacatttccatgatggagaa

SEQ ID NO: 5334122 - DNA, 25 bp, Homo sapien
ctcctcgggtgccaccaggtagggc

SEQ ID NO: 5334123 - DNA, 25 bp, Homo sapien
ctcccaccccaggaccttctcctgg

SEQ ID NO: 5334124 - DNA, 25 bp, Homo sapien
tggtgctcagagacctctcctctgc

SEQ ID NO: 5334125 - DNA, 25 bp, Homo sapien
ctggtgctcagagacctctcctctg

SEQ ID NO: 5334126 - DNA, 25 bp, Homo sapien
ccaggaccttctcctggtgctcaga

SEQ ID NO: 5334127 - DNA, 25 bp, Homo sapien
caagacaacaggctgagttacccaa

SEQ ID NO: 5334128 - DNA, 25 bp, Homo sapien
gacgcatccagctttgtgaacagag

SEQ ID NO: 5334129 - DNA, 25 bp, Homo sapien
gagaagatgcccaaccagatgtggg

SEQ ID NO: 5334130 - DNA, 25 bp, Homo sapien
taagaatctcactaacttccctggg

SEQ ID NO: 5334131 - DNA, 25 bp, Homo sapien
gctggcttttatattgagaactata

SEQ ID NO: 5334132 - DNA, 25 bp, Homo sapien
tactttgcaatgctgtatatttaaa

SEQ ID NO: 5334133 - DNA, 25 bp, Homo sapien
acaccattggtgtactttgcaatgc

SEQ ID NO: 5334134 - DNA, 25 bp, Homo sapien
gagaactatacttcaacaccattgg

SEQ ID NO: 5334135 - DNA, 25 bp, Homo sapien
caggcatgctactcaaaaatcaggt

SEQ ID NO: 5334136 - DNA, 25 bp, Homo sapien
ttctaccgcgggacagtgatatgcc

SEQ ID NO: 5334137 - DNA, 25 bp, Homo sapien
tcttctaaaagcgaaagcagggcac

SEQ ID NO: 5334138 - DNA, 25 bp, Homo sapien
cttagagctagtacaaacgggagac

SEQ ID NO: 5334139 - DNA, 25 bp, Homo sapien
ctggagagataatcatcaatggata

SEQ ID NO: 5334140 - DNA, 25 bp, Homo sapien
tgccccagtgaccaaacagtgagag

SEQ ID NO: 5334141 - DNA, 25 bp, Homo sapien
cagtgagagagaaagctcgtcctta

SEQ ID NO: 5334142 - DNA, 25 bp, Homo sapien
tgggcttcctgctggtatagaagaa

SEQ ID NO: 5334143 - DNA, 25 bp, Homo sapien
tcacagcactgaggtggcagcagtg

SEQ ID NO: 5334144 - DNA, 25 bp, Homo sapien
ggcagcagtgacaagtggggcgggc

SEQ ID NO: 5334145 - DNA, 25 bp, Homo sapien
agcagtgacaagtggggcgggcagc

SEQ ID NO: 5334146 - DNA, 25 bp, Homo sapien
cagcagagaaggacagccctcaagg

SEQ ID NO: 5334147 - DNA, 25 bp, Homo sapien
tcaccgggatgtggctctgctgagc

SEQ ID NO: 5334148 - DNA, 25 bp, Homo sapien
gctgagctgtgccttgcagccagct

SEQ ID NO: 5334149 - DNA, 25 bp, Homo sapien
tgagctgtgccttgcagccagctgc

SEQ ID NO: 5334150 - DNA, 25 bp, Homo sapien
tctgctgagctgtgccttgcagcca

SEQ ID NO: 5334151 - DNA, 25 bp, Homo sapien
tgtctgctggtaagtcacagaacgg

SEQ ID NO: 5334152 - DNA, 25 bp, Homo sapien
ggaagtgggataagtaacctgtctg

SEQ ID NO: 5334153 - DNA, 25 bp, Homo sapien
ttgagagcttctatgtatccagaac

SEQ ID NO: 5334154 - DNA, 25 bp, Homo sapien
ccagaactacattaaggcttttaca

SEQ ID NO: 5334155 - DNA, 25 bp, Homo sapien
tcagtcttggtagcccacaccaggg

SEQ ID NO: 5334156 - DNA, 25 bp, Homo sapien
ataccaccaggaatgaccactacag

SEQ ID NO: 5334157 - DNA, 25 bp, Homo sapien
actcagtcttggtagcccacaccag

SEQ ID NO: 5334158 - DNA, 25 bp, Homo sapien
aatgaccactacagccagaggtggg

SEQ ID NO: 5334159 - DNA, 25 bp, Homo sapien
gacgtactgtacttctcgcggccca

SEQ ID NO: 5334160 - DNA, 25 bp, Homo sapien
agcgagcggtgcatggtggtgagca

SEQ ID NO: 5334161 - DNA, 25 bp, Homo sapien
tcgaaggagcactcctcacgccact

SEQ ID NO: 5334162 - DNA, 25 bp, Homo sapien
ggaacttgtcgacgccgatgagcga

SEQ ID NO: 5334163 - DNA, 25 bp, Homo sapien
tggacgtgcgtgggcagccagcggg

SEQ ID NO: 5334164 - DNA, 25 bp, Homo sapien
gacgtgcgtgggcagccagcgggaa

SEQ ID NO: 5334165 - DNA, 25 bp, Homo sapien
acgtgcgtgggcagccagcgggaag

SEQ ID NO: 5334166 - DNA, 25 bp, Homo sapien
ctggacgtgcgtgggcagccagcgg

SEQ ID NO: 5334167 - DNA, 25 bp, Homo sapien
tggtgacaaacccggccgcggcaga

SEQ ID NO: 5334168 - DNA, 25 bp, Homo sapien
gaggtctggccgagccggtgcagac

SEQ ID NO: 5334169 - DNA, 25 bp, Homo sapien
ggccgcggcagaaggcggtcaggaa

SEQ ID NO: 5334170 - DNA, 25 bp, Homo sapien
agaaggcggtcaggaaccaactctg

SEQ ID NO: 5334171 - DNA, 25 bp, Homo sapien
agccagaatggtaggttctaacctg

SEQ ID NO: 5334172 - DNA, 25 bp, Homo sapien
cactgacccaccaaagagagactta

SEQ ID NO: 5334173 - DNA, 25 bp, Homo sapien
tccagaattctgaactaactcccag

SEQ ID NO: 5334174 - DNA, 25 bp, Homo sapien
gacttaatagagaattagatacttt

SEQ ID NO: 5334175 - DNA, 25 bp, Homo sapien
tgactgcaaagcatgacgtccctgc

SEQ ID NO: 5334176 - DNA, 25 bp, Homo sapien
gatatagtcagtaccaaccgagtga

SEQ ID NO: 5334177 - DNA, 25 bp, Homo sapien
gagtgactggagctatctgaggcca

SEQ ID NO: 5334178 - DNA, 25 bp, Homo sapien
gaataacacaggtactgctcttggc

SEQ ID NO: 5334179 - DNA, 25 bp, Homo sapien
aaaaacaaatatatttggctgggag

SEQ ID NO: 5334180 - DNA, 25 bp, Homo sapien
aagaaaaacaaatatatttggctgg

SEQ ID NO: 5334181 - DNA, 25 bp, Homo sapien
aaacaaatatatttggctgggagtg

SEQ ID NO: 5334182 - DNA, 25 bp, Homo sapien
gaaaaacaaatatatttggctggga

SEQ ID NO: 5334183 - DNA, 25 bp, Homo sapien
aagacaagggagcagatagctactg

SEQ ID NO: 5334184 - DNA, 25 bp, Homo sapien
taggaccttgtcagctctcatgtgg

SEQ ID NO: 5334185 - DNA, 25 bp, Homo sapien
tgacatgatctgactctctttacca

SEQ ID NO: 5334186 - DNA, 25 bp, Homo sapien
ggagtcactggagggtcttaagcct

SEQ ID NO: 5334187 - DNA, 25 bp, Homo sapien
tcgagtcccctttctcggtcgaggc

SEQ ID NO: 5334188 - DNA, 25 bp, Homo sapien
gagtcccctttctcggtcgaggcca

SEQ ID NO: 5334189 - DNA, 25 bp, Homo sapien
gcttcgagtcccctttctcggtcga

SEQ ID NO: 5334190 - DNA, 25 bp, Homo sapien
gtcccctttctcggtcgaggccatc

SEQ ID NO: 5334191 - DNA, 25 bp, Homo sapien
ctaaaaagtcagtgagggtttattg

SEQ ID NO: 5334192 - DNA, 25 bp, Homo sapien
tcagagtcacttatggctggaatgt

SEQ ID NO: 5334193 - DNA, 25 bp, Homo sapien
aattccaagtagcaaaattcctggg

SEQ ID NO: 5334194 - DNA, 25 bp, Homo sapien
tcttgtagcatgagacacccttggg

SEQ ID NO: 5334195 - DNA, 25 bp, Homo sapien
cattgactgggatggaaatgatggc

SEQ ID NO: 5334196 - DNA, 25 bp, Homo sapien
gtgacattgactgggatggaaatga

SEQ ID NO: 5334197 - DNA, 25 bp, Homo sapien
atggaaatgatggcccatggcagcc

SEQ ID NO: 5334198 - DNA, 25 bp, Homo sapien
ctggtgacattgactgggatggaaa

SEQ ID NO: 5334199 - DNA, 25 bp, Homo sapien
gctgtgcgctgggtactgtcctgga

SEQ ID NO: 5334200 - DNA, 25 bp, Homo sapien
gcgctgggtactgtcctggatcatc

SEQ ID NO: 5334201 - DNA, 25 bp, Homo sapien
tgtgcgctgggtactgtcctggatc

SEQ ID NO: 5334202 - DNA, 25 bp, Homo sapien
tgcgctgggtactgtcctggatcat

SEQ ID NO: 5334203 - DNA, 25 bp, Homo sapien
ccctctccaccagagcaatctggtc

SEQ ID NO: 5334204 - DNA, 25 bp, Homo sapien
cccctctccaccagagcaatctggt

SEQ ID NO: 5334205 - DNA, 25 bp, Homo sapien
ggtgaatctgctcataccttgtgtg

SEQ ID NO: 5334206 - DNA, 25 bp, Homo sapien
gaagatgtatcgaatgtccccagga

SEQ ID NO: 5334207 - DNA, 25 bp, Homo sapien
ttgaaagtacaaataatcatggata

SEQ ID NO: 5334208 - DNA, 25 bp, Homo sapien
gtccccaggactcagcacttgaaag

SEQ ID NO: 5334209 - DNA, 25 bp, Homo sapien
gtgtggctgtgaagatgtatcgaat

SEQ ID NO: 5334210 - DNA, 25 bp, Homo sapien
ctactcccacgccaccctacttcca

SEQ ID NO: 5334211 - DNA, 25 bp, Homo sapien
tacctgactctttcctagtcatcct

SEQ ID NO: 5334212 - DNA, 25 bp, Homo sapien
ctcccatacccattcaaatgtactt

SEQ ID NO: 5334213 - DNA, 25 bp, Homo sapien
ccttcaggtcacaccttaaatgtca

SEQ ID NO: 5334214 - DNA, 25 bp, Homo sapien
cggggagccagagcacgagacaaca

SEQ ID NO: 5334215 - DNA, 25 bp, Homo sapien
agccagagcacgagacaacaccagc

SEQ ID NO: 5334216 - DNA, 25 bp, Homo sapien
ggccgcgacgcacgcggggagccag

SEQ ID NO: 5334217 - DNA, 25 bp, Homo sapien
ggagccagagcacgagacaacacca

SEQ ID NO: 5334218 - DNA, 25 bp, Homo sapien
gcgtcgctcgcaggacttcagcctg

SEQ ID NO: 5334219 - DNA, 25 bp, Homo sapien
tctcgccgcgggctggacgacggga

SEQ ID NO: 5334220 - DNA, 25 bp, Homo sapien
aggctcaaggctgattggctctgac

SEQ ID NO: 5334221 - DNA, 25 bp, Homo sapien
gacgacgggaacgaggctcaaggct

SEQ ID NO: 5334222 - DNA, 25 bp, Homo sapien
taagaagcacgaccgaaatgcggcg

SEQ ID NO: 5334223 - DNA, 25 bp, Homo sapien
ccaaaatgatggtgagtggcgtctc

SEQ ID NO: 5334224 - DNA, 25 bp, Homo sapien
taatgaacgcccctcactagagagt

SEQ ID NO: 5334225 - DNA, 25 bp, Homo sapien
ggcgggccgctgaataagcttccaa

SEQ ID NO: 5334226 - DNA, 25 bp, Homo sapien
tgtgagagaacctagcagtaatgct

SEQ ID NO: 5334227 - DNA, 25 bp, Homo sapien
tggacccagtgccaccctagtttag

SEQ ID NO: 5334228 - DNA, 25 bp, Homo sapien
gctatgattagctggacaaactcaa

SEQ ID NO: 5334229 - DNA, 25 bp, Homo sapien
agtactcctgagttcagttgctgga

SEQ ID NO: 5334230 - DNA, 25 bp, Homo sapien
catcatgatcgtcaggagggccatc

SEQ ID NO: 5334231 - DNA, 25 bp, Homo sapien
aaataggtcatcctgccttgaaagc

SEQ ID NO: 5334232 - DNA, 25 bp, Homo sapien
tgtactgtttaatcctgggcatagg

SEQ ID NO: 5334233 - DNA, 25 bp, Homo sapien
agacttgttcttttagccgggcgtg

SEQ ID NO: 5334234 - DNA, 25 bp, Homo sapien
ggtgcacttaccctccttggcttgg

SEQ ID NO: 5334235 - DNA, 25 bp, Homo sapien
tcgactgtggatgctcccacagcag

SEQ ID NO: 5334236 - DNA, 25 bp, Homo sapien
gcttggttacttcattttacaagga

SEQ ID NO: 5334237 - DNA, 25 bp, Homo sapien
aggggtagtaattggcccactctct

SEQ ID NO: 5334238 - DNA, 25 bp, Homo sapien
tcaaggcgtttcctctggatacaca

SEQ ID NO: 5334239 - DNA, 25 bp, Homo sapien
ctgccctgttgtactggttttgtcc

SEQ ID NO: 5334240 - DNA, 25 bp, Homo sapien
tcagaaatgatgtatctcaaggcgt

SEQ ID NO: 5334241 - DNA, 25 bp, Homo sapien
tgaaggtagtctctcctagctgaga

SEQ ID NO: 5334242 - DNA, 25 bp, Homo sapien
gccacataccatttacctctctggg

SEQ ID NO: 5334243 - DNA, 25 bp, Homo sapien
gcagaaagaccatgataacacagat

SEQ ID NO: 5334244 - DNA, 25 bp, Homo sapien
taacacagatgataagtgtggccac

SEQ ID NO: 5334245 - DNA, 25 bp, Homo sapien
gctgcagaaagaccatgataacaca

SEQ ID NO: 5334246 - DNA, 25 bp, Homo sapien
ttttattggatacagagccataaat

SEQ ID NO: 5334247 - DNA, 25 bp, Homo sapien
attggatacagagccataaattctc

SEQ ID NO: 5334248 - DNA, 25 bp, Homo sapien
tttttattggatacagagccataaa

SEQ ID NO: 5334249 - DNA, 25 bp, Homo sapien
ttattggatacagagccataaattc

SEQ ID NO: 5334250 - DNA, 25 bp, Homo sapien
caaagggcatcttacgggtgacatg

SEQ ID NO: 5334251 - DNA, 25 bp, Homo sapien
aaagggcatcttacgggtgacatgg

SEQ ID NO: 5334252 - DNA, 25 bp, Homo sapien
gctggggaagctaccctctcactca

SEQ ID NO: 5334253 - DNA, 25 bp, Homo sapien
ctcactcaggcccattatagcctag

SEQ ID NO: 5334254 - DNA, 25 bp, Homo sapien
ggtacaggcaccacttcagaaacaa

SEQ ID NO: 5334255 - DNA, 25 bp, Homo sapien
accaaaaattgctctccacccctct

SEQ ID NO: 5334256 - DNA, 25 bp, Homo sapien
ctgtgtaggaaggtagggcctaagg

SEQ ID NO: 5334257 - DNA, 25 bp, Homo sapien
cctaagggccagttatggaggttgc

SEQ ID NO: 5334258 - DNA, 25 bp, Homo sapien
aggtagggcctaagggccagttatg

SEQ ID NO: 5334259 - DNA, 25 bp, Homo sapien
agggccagttatggaggttgcccac

SEQ ID NO: 5334260 - DNA, 25 bp, Homo sapien
tgcccactagaaccaagcctgctgg

SEQ ID NO: 5334261 - DNA, 25 bp, Homo sapien
cagtggtgcccactagaaccaagcc

SEQ ID NO: 5334262 - DNA, 25 bp, Homo sapien
agcaagcctgggtcacctcaggcct

SEQ ID NO: 5334263 - DNA, 25 bp, Homo sapien
tctgccctggatacaagacccttgt

SEQ ID NO: 5334264 - DNA, 25 bp, Homo sapien
gacaggtcccatgggttcgagttaa

SEQ ID NO: 5334265 - DNA, 25 bp, Homo sapien
ggaaataggcaggacccaaaggcaa

SEQ ID NO: 5334266 - DNA, 25 bp, Homo sapien
gccccaaagataagagaccaggagt

SEQ ID NO: 5334267 - DNA, 25 bp, Homo sapien
caaaccttggagtagcaggccttgg

SEQ ID NO: 5334268 - DNA, 25 bp, Homo sapien
tgcagggatgcatataagtgcacct

SEQ ID NO: 5334269 - DNA, 25 bp, Homo sapien
cagggatgcatataagtgcaccttc

SEQ ID NO: 5334270 - DNA, 25 bp, Homo sapien
ggatgcatataagtgcaccttcatt

SEQ ID NO: 5334271 - DNA, 25 bp, Homo sapien
tgcatataagtgcaccttcatttcc

SEQ ID NO: 5334272 - DNA, 25 bp, Homo sapien
aaaggattgggcctgctcacacaca

SEQ ID NO: 5334273 - DNA, 25 bp, Homo sapien
caggcagaagggtatcttgttcacc

SEQ ID NO: 5334274 - DNA, 25 bp, Homo sapien
gaagtgcttctagggatagccaggc

SEQ ID NO: 5334275 - DNA, 25 bp, Homo sapien
cagccctagctgtatggtcaccaaa

SEQ ID NO: 5334276 - DNA, 25 bp, Homo sapien
cctagagccttgtattcagggatgg

SEQ ID NO: 5334277 - DNA, 25 bp, Homo sapien
agagccttgtattcagggatggaag

SEQ ID NO: 5334278 - DNA, 25 bp, Homo sapien
tgcctagagccttgtattcagggat

SEQ ID NO: 5334279 - DNA, 25 bp, Homo sapien
cagagagaagttgcctagagccttg

SEQ ID NO: 5334280 - DNA, 25 bp, Homo sapien
gaatgtaggtatagaaacgtgcgcc

SEQ ID NO: 5334281 - DNA, 25 bp, Homo sapien
gcaaggttgaggagaagagccctcc

SEQ ID NO: 5334282 - DNA, 25 bp, Homo sapien
gagttgccagcatgacacccttggt

SEQ ID NO: 5334283 - DNA, 25 bp, Homo sapien
ggagggtcttcatgtccaagccagg

SEQ ID NO: 5334284 - DNA, 25 bp, Homo sapien
actggctgtgccagaggctactcca

SEQ ID NO: 5334285 - DNA, 25 bp, Homo sapien
ccaggtgatgacaccaggcgctggt

SEQ ID NO: 5334286 - DNA, 25 bp, Homo sapien
ctgggtggttattgcagatcctcca

SEQ ID NO: 5334287 - DNA, 25 bp, Homo sapien
gccactgggtggttattgcagatcc

SEQ ID NO: 5334288 - DNA, 25 bp, Homo sapien
acaggagacttgacagtccccctcc

SEQ ID NO: 5334289 - DNA, 25 bp, Homo sapien
gccagggataacactcggcctccaa

SEQ ID NO: 5334290 - DNA, 25 bp, Homo sapien
agggtccctctgaggtccaaagaga

SEQ ID NO: 5334291 - DNA, 25 bp, Homo sapien
cagggtccctctgaggtccaaagag

SEQ ID NO: 5334292 - DNA, 25 bp, Homo sapien
gtgcagaatcttagagaagccgggc

SEQ ID NO: 5334293 - DNA, 25 bp, Homo sapien
tccaccttgatgtgcagaatcttag

SEQ ID NO: 5334294 - DNA, 25 bp, Homo sapien
caccttgatgtgcagaatcttagag

SEQ ID NO: 5334295 - DNA, 25 bp, Homo sapien
tgatgtgcagaatcttagagaagcc

SEQ ID NO: 5334296 - DNA, 25 bp, Homo sapien
tctttgaaataatccgcaatcccaa

SEQ ID NO: 5334297 - DNA, 25 bp, Homo sapien
tgaaataatccgcaatcccaatctg

SEQ ID NO: 5334298 - DNA, 25 bp, Homo sapien
aataatccgcaatcccaatctggac

SEQ ID NO: 5334299 - DNA, 25 bp, Homo sapien
tgggctctttgaaataatccgcaat

SEQ ID NO: 5334300 - DNA, 25 bp, Homo sapien
acaatggacttgaggttccggcaga

SEQ ID NO: 5334301 - DNA, 25 bp, Homo sapien
atggacttgaggttccggcagatgc

SEQ ID NO: 5334302 - DNA, 25 bp, Homo sapien
caatggacttgaggttccggcagat

SEQ ID NO: 5334303 - DNA, 25 bp, Homo sapien
cacaatggacttgaggttccggcag

SEQ ID NO: 5334304 - DNA, 25 bp, Homo sapien
gggccccgtggcaggtgatagtcgt

SEQ ID NO: 5334305 - DNA, 25 bp, Homo sapien
gccccgtggcaggtgatagtcgtac

SEQ ID NO: 5334306 - DNA, 25 bp, Homo sapien
tgacagggccccgtggcaggtgata

SEQ ID NO: 5334307 - DNA, 25 bp, Homo sapien
tgctgacagggccccgtggcaggtg

SEQ ID NO: 5334308 - DNA, 25 bp, Homo sapien
cctgcccctcattcccccagtgctc

SEQ ID NO: 5334309 - DNA, 25 bp, Homo sapien
tgcccctcattcccccagtgctcac

SEQ ID NO: 5334310 - DNA, 25 bp, Homo sapien
ctgcccctcattcccccagtgctca

SEQ ID NO: 5334311 - DNA, 25 bp, Homo sapien
tgacacgtggtcaagctccaggacc

SEQ ID NO: 5334312 - DNA, 25 bp, Homo sapien
gtcccttcaggccttcccggcagac

SEQ ID NO: 5334313 - DNA, 25 bp, Homo sapien
acctcctgggtgatctctgacacgt

SEQ ID NO: 5334314 - DNA, 25 bp, Homo sapien
gggtgacgggagtcgccgtgagcac

SEQ ID NO: 5334315 - DNA, 25 bp, Homo sapien
ggttactgaagcgtgtgggctgctg

SEQ ID NO: 5334316 - DNA, 25 bp, Homo sapien
gaccaatcatctgcaggcagcggtt

SEQ ID NO: 5334317 - DNA, 25 bp, Homo sapien
ctgcaggcagcggttactgaagcgt

SEQ ID NO: 5334318 - DNA, 25 bp, Homo sapien
gggccaacagcgaccaatcatctgc

SEQ ID NO: 5334319 - DNA, 25 bp, Homo sapien
cacttggagggagacgatctctctg

SEQ ID NO: 5334320 - DNA, 25 bp, Homo sapien
atggcccacggggtctgtggcactc

SEQ ID NO: 5334321 - DNA, 25 bp, Homo sapien
caaatgacctcatggcccacggggt

SEQ ID NO: 5334322 - DNA, 25 bp, Homo sapien
ttggagggagacgatctctctgcag

SEQ ID NO: 5334323 - DNA, 25 bp, Homo sapien
gccagccagagcgagcggtcggtga

SEQ ID NO: 5334324 - DNA, 25 bp, Homo sapien
agatgcgcaggatcagcaggttccc

SEQ ID NO: 5334325 - DNA, 25 bp, Homo sapien
agcggtcggtgaggatgtttggaca

SEQ ID NO: 5334326 - DNA, 25 bp, Homo sapien
tggacagtgggagatgcgcaggatc

SEQ ID NO: 5334327 - DNA, 25 bp, Homo sapien
ccgctgccggggcttcaagttctgc

SEQ ID NO: 5334328 - DNA, 25 bp, Homo sapien
ttctgcagcgtcagagagtgggcct

SEQ ID NO: 5334329 - DNA, 25 bp, Homo sapien
gagtgggcctgggtgcaccactgag

SEQ ID NO: 5334330 - DNA, 25 bp, Homo sapien
gtgcaccactgagccagcattgcca

SEQ ID NO: 5334331 - DNA, 25 bp, Homo sapien
gcattctcaagcagcacccttgtcc

SEQ ID NO: 5334332 - DNA, 25 bp, Homo sapien
ttctcaagcagcacccttgtccaga

SEQ ID NO: 5334333 - DNA, 25 bp, Homo sapien
gcagcacccttgtccagactgcggg

SEQ ID NO: 5334334 - DNA, 25 bp, Homo sapien
tcaagcagcacccttgtccagactg

SEQ ID NO: 5334335 - DNA, 25 bp, Homo sapien
gggcagctcgcatcttcaggatctc

SEQ ID NO: 5334336 - DNA, 25 bp, Homo sapien
gacctcggcagcatgcagcagtgtg

SEQ ID NO: 5334337 - DNA, 25 bp, Homo sapien
tgatgacctcattggagcgtgaggg

SEQ ID NO: 5334338 - DNA, 25 bp, Homo sapien
gcagtgtgcgcgtgtccaggtaggt

SEQ ID NO: 5334339 - DNA, 25 bp, Homo sapien
gagccaacgtcggagacatcaccct

SEQ ID NO: 5334340 - DNA, 25 bp, Homo sapien
gactcagtggttcgggagccaacgt

SEQ ID NO: 5334341 - DNA, 25 bp, Homo sapien
tctgcgctgccagttctggatggcc

SEQ ID NO: 5334342 - DNA, 25 bp, Homo sapien
tgctcaatggcccagccatagcagg

SEQ ID NO: 5334343 - DNA, 25 bp, Homo sapien
gctccagactgtcactgtcatagca

SEQ ID NO: 5334344 - DNA, 25 bp, Homo sapien
tcggagaggagccatgccgtgacac

SEQ ID NO: 5334345 - DNA, 25 bp, Homo sapien
atatgtgttaggcacggccgggccc

SEQ ID NO: 5334346 - DNA, 25 bp, Homo sapien
ctgcatatgtgttaggcacggccgg

SEQ ID NO: 5334347 - DNA, 25 bp, Homo sapien
ccatgccgtgacactgcatatgtgt

SEQ ID NO: 5334348 - DNA, 25 bp, Homo sapien
tgccgctcggcacggtcagcccgct

SEQ ID NO: 5334349 - DNA, 25 bp, Homo sapien
cggtcagcccgctcaaggagctcct

SEQ ID NO: 5334350 - DNA, 25 bp, Homo sapien
gctcggcacggtcagcccgctcaag

SEQ ID NO: 5334351 - DNA, 25 bp, Homo sapien
aggctggcgctgggcgtgctgccac

SEQ ID NO: 5334352 - DNA, 25 bp, Homo sapien
ggccagcagctctacgctcacgtcc

SEQ ID NO: 5334353 - DNA, 25 bp, Homo sapien
gggagagctcagacgcgcgctcctc

SEQ ID NO: 5334354 - DNA, 25 bp, Homo sapien
tgccgcgcagtctccagttcggccg

SEQ ID NO: 5334355 - DNA, 25 bp, Homo sapien
tcacgtccacctggcgggagagctc

SEQ ID NO: 5334356 - DNA, 25 bp, Homo sapien
caggcggcggcgtcgagcacgccga

SEQ ID NO: 5334357 - DNA, 25 bp, Homo sapien
gcggcgtcgagcacgccgaggacgc

SEQ ID NO: 5334358 - DNA, 25 bp, Homo sapien
ttcgtaggccacatcagcgggtgag

SEQ ID NO: 5334359 - DNA, 25 bp, Homo sapien
cttcgtaggccacatcagcgggtga

SEQ ID NO: 5334360 - DNA, 25 bp, Homo sapien
cccggctcggccaactcctcacagg

SEQ ID NO: 5334361 - DNA, 25 bp, Homo sapien
tcgatctcgcgcagcgcatagcgcg

SEQ ID NO: 5334362 - DNA, 25 bp, Homo sapien
gctgcggcgggcacaaggcccggct

SEQ ID NO: 5334363 - DNA, 25 bp, Homo sapien
ggacttgcgggcgaacagctccccc

SEQ ID NO: 5334364 - DNA, 25 bp, Homo sapien
agaggatgtagagcgtctcgtaggt

SEQ ID NO: 5334365 - DNA, 25 bp, Homo sapien
gctcgggagccagcgggaaccccga

SEQ ID NO: 5334366 - DNA, 25 bp, Homo sapien
ctggaaggaagtgctctcgaagacc

SEQ ID NO: 5334367 - DNA, 25 bp, Homo sapien
cggcgccgtcgcagatgctgttggt

SEQ ID NO: 5334368 - DNA, 25 bp, Homo sapien
gcagcggtacggcaggtccagcgag

SEQ ID NO: 5334369 - DNA, 25 bp, Homo sapien
caggctccggaagcgcttgtgctcc

SEQ ID NO: 5334370 - DNA, 25 bp, Homo sapien
ggtacggcaggtccagcgaggccat

SEQ ID NO: 5334371 - DNA, 25 bp, Homo sapien
cgcgcagcgacgacaggctccggaa

SEQ ID NO: 5334372 - DNA, 25 bp, Homo sapien
cttaggaagagggtatcgctgctcc

SEQ ID NO: 5334373 - DNA, 25 bp, Homo sapien
gggcaggcgcgtaatcacttttatt

SEQ ID NO: 5334374 - DNA, 25 bp, Homo sapien
tgtatgtgtgcaagagacagcgaga

SEQ ID NO: 5334375 - DNA, 25 bp, Homo sapien
ccatcaatggtagaacggttaaact

SEQ ID NO: 5334376 - DNA, 25 bp, Homo sapien
tgctttgaccatagggaaccatcct

SEQ ID NO: 5334377 - DNA, 25 bp, Homo sapien
gagccccaggactgttctggaatga

SEQ ID NO: 5334378 - DNA, 25 bp, Homo sapien
catagacctggcaaatcagtcgtgg

SEQ ID NO: 5334379 - DNA, 25 bp, Homo sapien
catagagcaccaaagttgagccagt

SEQ ID NO: 5334380 - DNA, 25 bp, Homo sapien
gtgtctttccaacggcctcagtaag

SEQ ID NO: 5334381 - DNA, 25 bp, Homo sapien
tcagtaaggtccaacaagcaagaga

SEQ ID NO: 5334382 - DNA, 25 bp, Homo sapien
gagacacactctggttgaaaggagc

SEQ ID NO: 5334383 - DNA, 25 bp, Homo sapien
tgtagaaaaatgtcaggatgttggg

SEQ ID NO: 5334384 - DNA, 25 bp, Homo sapien
ttcttccagctatacagttttctct

SEQ ID NO: 5334385 - DNA, 25 bp, Homo sapien
catgtggaccacggtccaggttttt

SEQ ID NO: 5334386 - DNA, 25 bp, Homo sapien
gccaggcccagcggcccagggctgg

SEQ ID NO: 5334387 - DNA, 25 bp, Homo sapien
ctcctccaccccgcggcgaggccag

SEQ ID NO: 5334388 - DNA, 25 bp, Homo sapien
gaggccaggcccagcggcccagggc

SEQ ID NO: 5334389 - DNA, 25 bp, Homo sapien
ggcgaggccaggcccagcggcccag

SEQ ID NO: 5334390 - DNA, 25 bp, Homo sapien
ccatcaggtgatactcttggagtgt

SEQ ID NO: 5334391 - DNA, 25 bp, Homo sapien
taacaaaagattggtctccatcagg

SEQ ID NO: 5334392 - DNA, 25 bp, Homo sapien
catgagatgtgctgtgactaacccc

SEQ ID NO: 5334393 - DNA, 25 bp, Homo sapien
ggcatattgcttgtttgtcctgacc

SEQ ID NO: 5334394 - DNA, 25 bp, Homo sapien
taaacattgccctctgcaggctact

SEQ ID NO: 5334395 - DNA, 25 bp, Homo sapien
tgcctgacagtccacaatttgagcc

SEQ ID NO: 5334396 - DNA, 25 bp, Homo sapien
tggcccatgcctaataagtgaaagg

SEQ ID NO: 5334397 - DNA, 25 bp, Homo sapien
gaatctaccacttatcacagtgcct

SEQ ID NO: 5334398 - DNA, 25 bp, Homo sapien
tgctattaagtttaggtgtctccat

SEQ ID NO: 5334399 - DNA, 25 bp, Homo sapien
ctttccaatcagtgctattaagttt

SEQ ID NO: 5334400 - DNA, 25 bp, Homo sapien
cagtgctattaagtttaggtgtctc

SEQ ID NO: 5334401 - DNA, 25 bp, Homo sapien
caatcagtgctattaagtttaggtg

SEQ ID NO: 5334402 - DNA, 25 bp, Homo sapien
ggctgctggataagacactgctgta

SEQ ID NO: 5334403 - DNA, 25 bp, Homo sapien
gggcgtgtgccagttacaaaagact

SEQ ID NO: 5334404 - DNA, 25 bp, Homo sapien
aagactgtcttgaatcccagggtag

SEQ ID NO: 5334405 - DNA, 25 bp, Homo sapien
caaaacgttacatccaatggctgct

SEQ ID NO: 5334406 - DNA, 25 bp, Homo sapien
aaggagaggcccagcgagtaaaagc

SEQ ID NO: 5334407 - DNA, 25 bp, Homo sapien
agtaaaagccgaggcccttgagccg

SEQ ID NO: 5334408 - DNA, 25 bp, Homo sapien
gcgcgcgccttctgcttgaggtgca

SEQ ID NO: 5334409 - DNA, 25 bp, Homo sapien
ctcggcgcgcgccttctgcttgagg

SEQ ID NO: 5334410 - DNA, 25 bp, Homo sapien
tgcctgaatgaagaagctaccgctg

SEQ ID NO: 5334411 - DNA, 25 bp, Homo sapien
gaaagctgaggctgcgtactggcca

SEQ ID NO: 5334412 - DNA, 25 bp, Homo sapien
cgcacacgtcgcaagcaaaaggctt

SEQ ID NO: 5334413 - DNA, 25 bp, Homo sapien
ggatgtccgccaccagaggtttagg

SEQ ID NO: 5334414 - DNA, 25 bp, Homo sapien
acgtgcacaggcaaaagggcgctcc

SEQ ID NO: 5334415 - DNA, 25 bp, Homo sapien
gcatacgtcccaaggagcacataga

SEQ ID NO: 5334416 - DNA, 25 bp, Homo sapien
tacaaaactcttggtgcccacggat

SEQ ID NO: 5334417 - DNA, 25 bp, Homo sapien
ggcgctccgataaccgcacaggttc

SEQ ID NO: 5334418 - DNA, 25 bp, Homo sapien
ttctcatagctccaatgtcccagtc

SEQ ID NO: 5334419 - DNA, 25 bp, Homo sapien
ctggttctcaggtatggtgcgcccc

SEQ ID NO: 5334420 - DNA, 25 bp, Homo sapien
gcgctgcgccgtcgtcgtctgagca

SEQ ID NO: 5334421 - DNA, 25 bp, Homo sapien
gggtgcgcaccccaggactcctaag

SEQ ID NO: 5334422 - DNA, 25 bp, Homo sapien
gacgaggagcgcgtcgggttcggaa

SEQ ID NO: 5334423 - DNA, 25 bp, Homo sapien
tcagtggacttgacgaggagcgcgt

SEQ ID NO: 5334424 - DNA, 25 bp, Homo sapien
ctgggttcggcgcaacagccttcag

SEQ ID NO: 5334425 - DNA, 25 bp, Homo sapien
ggtggccgcgggagcgtccctggca

SEQ ID NO: 5334426 - DNA, 25 bp, Homo sapien
gcgcggcgccggctgtggggcgccc

SEQ ID NO: 5334427 - DNA, 25 bp, Homo sapien
gcggcgccggctgtggggcgcccgg

SEQ ID NO: 5334428 - DNA, 25 bp, Homo sapien
cggcgccggctgtggggcgcccggg

SEQ ID NO: 5334429 - DNA, 25 bp, Homo sapien
tccccgcagcgcacagacctaggcg

SEQ ID NO: 5334430 - DNA, 25 bp, Homo sapien
gcgcacagacctaggcgcccgggct

SEQ ID NO: 5334431 - DNA, 25 bp, Homo sapien
gtaggggttccccgcagcgcacaga

SEQ ID NO: 5334432 - DNA, 25 bp, Homo sapien
gggttccccgcagcgcacagaccta

SEQ ID NO: 5334433 - DNA, 25 bp, Homo sapien
ccacttatatagctgcggcggcgct

SEQ ID NO: 5334434 - DNA, 25 bp, Homo sapien
cgcctctccaaagcgctgccgggct

SEQ ID NO: 5334435 - DNA, 25 bp, Homo sapien
ggcttccgactccccgggccactgc

SEQ ID NO: 5334436 - DNA, 25 bp, Homo sapien
gctcctcgcctctccaaagcgctgc

SEQ ID NO: 5334437 - DNA, 25 bp, Homo sapien
ccgccgtgacgtaaatgcccaaaca

SEQ ID NO: 5334438 - DNA, 25 bp, Homo sapien
cggccctgccgccgtgacgtaaatg

SEQ ID NO: 5334439 - DNA, 25 bp, Homo sapien
tggacacaggatgtgtgccggggac

SEQ ID NO: 5334440 - DNA, 25 bp, Homo sapien
ctgccgccgtgacgtaaatgcccaa

SEQ ID NO: 5334441 - DNA, 25 bp, Homo sapien
ctcgagctgtgacgttgttgttgtc

SEQ ID NO: 5334442 - DNA, 25 bp, Homo sapien
gaaagctcgagctgtgacgttgttg

SEQ ID NO: 5334443 - DNA, 25 bp, Homo sapien
ctgtgacgttgttgttgtcgccgcc

SEQ ID NO: 5334444 - DNA, 25 bp, Homo sapien
aaaggaaagctcgagctgtgacgtt

SEQ ID NO: 5334445 - DNA, 25 bp, Homo sapien
cgtgcgcgcgcgctccccaggcgtg

SEQ ID NO: 5334446 - DNA, 25 bp, Homo sapien
cgcgcgcgctccccaggcgtggagc

SEQ ID NO: 5334447 - DNA, 25 bp, Homo sapien
ctgcgtgcgcgcgcgctccccaggc

SEQ ID NO: 5334448 - DNA, 25 bp, Homo sapien
gcgcgcgctccccaggcgtggagcg

SEQ ID NO: 5334449 - DNA, 25 bp, Homo sapien
gggccgaccgtccggtagatgcgct

SEQ ID NO: 5334450 - DNA, 25 bp, Homo sapien
cgggccgaccgtccggtagatgcgc

SEQ ID NO: 5334451 - DNA, 25 bp, Homo sapien
ggccgaccgtccggtagatgcgctt

SEQ ID NO: 5334452 - DNA, 25 bp, Homo sapien
tcaaatccactctggcatcctactg

SEQ ID NO: 5334453 - DNA, 25 bp, Homo sapien
gatccagggtttgattctaatccaa

SEQ ID NO: 5334454 - DNA, 25 bp, Homo sapien
cacacatgtctcaaatccactctgg

SEQ ID NO: 5334455 - DNA, 25 bp, Homo sapien
caagcacgattttccttatactcta

SEQ ID NO: 5334456 - DNA, 25 bp, Homo sapien
ttcctggggccatggagatgcaggg

SEQ ID NO: 5334457 - DNA, 25 bp, Homo sapien
ctggggccatggagatgcaggggca

SEQ ID NO: 5334458 - DNA, 25 bp, Homo sapien
gccatggagatgcaggggcactgca

SEQ ID NO: 5334459 - DNA, 25 bp, Homo sapien
ccatggagatgcaggggcactgcat

SEQ ID NO: 5334460 - DNA, 25 bp, Homo sapien
acaacatagttgctgggttacaagg

SEQ ID NO: 5334461 - DNA, 25 bp, Homo sapien
cacattgaatcagttggaggggttc

SEQ ID NO: 5334462 - DNA, 25 bp, Homo sapien
tccaagagggcccatgcatacaggt

SEQ ID NO: 5334463 - DNA, 25 bp, Homo sapien
cttttccaggcgacctgggcttcct

SEQ ID NO: 5334464 - DNA, 25 bp, Homo sapien
tgctggtaaccttgctacatcctgg

SEQ ID NO: 5334465 - DNA, 25 bp, Homo sapien
ttgctacatcctggctttggaggtc

SEQ ID NO: 5334466 - DNA, 25 bp, Homo sapien
gtaaccttgctacatcctggctttg

SEQ ID NO: 5334467 - DNA, 25 bp, Homo sapien
ctgctgctggtaaccttgctacatc

SEQ ID NO: 5334468 - DNA, 25 bp, Homo sapien
tctttccttaaccatttattctcca

SEQ ID NO: 5334469 - DNA, 25 bp, Homo sapien
cagacttctgtctaagaaaatttcc

SEQ ID NO: 5334470 - DNA, 25 bp, Homo sapien
gtttcagacttctgtctaagaaaat

SEQ ID NO: 5334471 - DNA, 25 bp, Homo sapien
tattctccatgctagtttcagactt

SEQ ID NO: 5334472 - DNA, 25 bp, Homo sapien
actttgctgcctatatccatggtcc

SEQ ID NO: 5334473 - DNA, 25 bp, Homo sapien
tgtggaggccattttgacaccgtgc

SEQ ID NO: 5334474 - DNA, 25 bp, Homo sapien
tatcatcgtggtcttggcaaggaga

SEQ ID NO: 5334475 - DNA, 25 bp, Homo sapien
tgtggccatcacaactgcgttatca

SEQ ID NO: 5334476 - DNA, 25 bp, Homo sapien
ccagagccttgttgttgaggccaaa

SEQ ID NO: 5334477 - DNA, 25 bp, Homo sapien
gaattcacccagctgttgggcgcca

SEQ ID NO: 5334478 - DNA, 25 bp, Homo sapien
gaagacccagatgtcctacaggcct

SEQ ID NO: 5334479 - DNA, 25 bp, Homo sapien
ggttgattcgctttcccagacagtg

SEQ ID NO: 5334480 - DNA, 25 bp, Homo sapien
aatggaccccagaatctggagcctg

SEQ ID NO: 5334481 - DNA, 25 bp, Homo sapien
cagaatggaccccagaatctggagc

SEQ ID NO: 5334482 - DNA, 25 bp, Homo sapien
tcagaatggaccccagaatctggag

SEQ ID NO: 5334483 - DNA, 25 bp, Homo sapien
tggagcctgggagcaggatgaacag

SEQ ID NO: 5334484 - DNA, 25 bp, Homo sapien
tccccaaggcaggtaattggtacag

SEQ ID NO: 5334485 - DNA, 25 bp, Homo sapien
ggcaggtaattggtacaggggagga

SEQ ID NO: 5334486 - DNA, 25 bp, Homo sapien
caggtaattggtacaggggaggaga

SEQ ID NO: 5334487 - DNA, 25 bp, Homo sapien
cccaaggcaggtaattggtacaggg

SEQ ID NO: 5334488 - DNA, 25 bp, Homo sapien
ttccatgcatctcaggtcttttgcc

SEQ ID NO: 5334489 - DNA, 25 bp, Homo sapien
ccatgcatctcaggtcttttgccat

SEQ ID NO: 5334490 - DNA, 25 bp, Homo sapien
cactggatagcctatttggttgtga

SEQ ID NO: 5334491 - DNA, 25 bp, Homo sapien
actggatagcctatttggttgtgac

SEQ ID NO: 5334492 - DNA, 25 bp, Homo sapien
tgtctcagtagtcacgtattccacg

SEQ ID NO: 5334493 - DNA, 25 bp, Homo sapien
agtggatcctccagtgtcaaagtca

SEQ ID NO: 5334494 - DNA, 25 bp, Homo sapien
tcatcttcattgtcccgatattgga

SEQ ID NO: 5334495 - DNA, 25 bp, Homo sapien
ggtagttcaagatacagttccaggg

SEQ ID NO: 5334496 - DNA, 25 bp, Homo sapien
gcagaatccaaccatgatgacatcc

SEQ ID NO: 5334497 - DNA, 25 bp, Homo sapien
ggcaggtactatagtctaaatgtct

SEQ ID NO: 5334498 - DNA, 25 bp, Homo sapien
ccactgggaggtggtcaggccatga

SEQ ID NO: 5334499 - DNA, 25 bp, Homo sapien
tttagtcccttagaccatgtgagga

SEQ ID NO: 5334500 - DNA, 25 bp, Homo sapien
cagactccaattagttcagccaagt

SEQ ID NO: 5334501 - DNA, 25 bp, Homo sapien
gcggaaatccctccaactcatagaa

SEQ ID NO: 5334502 - DNA, 25 bp, Homo sapien
tcccaaagaagagtgggcgtaaagc

SEQ ID NO: 5334503 - DNA, 25 bp, Homo sapien
tgtcaacaacatcctgcggaaatcc

SEQ ID NO: 5334504 - DNA, 25 bp, Homo sapien
gtctgtaaaaagtagtggtgtggga

SEQ ID NO: 5334505 - DNA, 25 bp, Homo sapien
tgtctgtaaaaagtagtggtgtggg

SEQ ID NO: 5334506 - DNA, 25 bp, Homo sapien
tctgtaaaaagtagtggtgtgggac

SEQ ID NO: 5334507 - DNA, 25 bp, Homo sapien
aaagtagtggtgtgggaccctccat

SEQ ID NO: 5334508 - DNA, 25 bp, Homo sapien
gattgggtgtttctcctggctgcat

SEQ ID NO: 5334509 - DNA, 25 bp, Homo sapien
ggattgggtgtttctcctggctgca

SEQ ID NO: 5334510 - DNA, 25 bp, Homo sapien
ggtgggattgggtgtttctcctggc

SEQ ID NO: 5334511 - DNA, 25 bp, Homo sapien
tgggattgggtgtttctcctggctg

SEQ ID NO: 5334512 - DNA, 25 bp, Homo sapien
taatcttaggtgtcactttgagtag

SEQ ID NO: 5334513 - DNA, 25 bp, Homo sapien
gctaatccagacttcatccccattt

SEQ ID NO: 5334514 - DNA, 25 bp, Homo sapien
tcatccccatttgtgatggttaatc

SEQ ID NO: 5334515 - DNA, 25 bp, Homo sapien
tcactttgagtagattaaggaatgc

SEQ ID NO: 5334516 - DNA, 25 bp, Homo sapien
tttagtttctggtcaaaatctccca

SEQ ID NO: 5334517 - DNA, 25 bp, Homo sapien
cttgagccatttaaactccagtatt

SEQ ID NO: 5334518 - DNA, 25 bp, Homo sapien
actctagtctccaagtgctccttct

SEQ ID NO: 5334519 - DNA, 25 bp, Homo sapien
tcccttttgagccatcttgtgcact

SEQ ID NO: 5334520 - DNA, 25 bp, Homo sapien
catagtccatttagaggtgttcaac

SEQ ID NO: 5334521 - DNA, 25 bp, Homo sapien
tacagtaataggtctccggcaagga

SEQ ID NO: 5334522 - DNA, 25 bp, Homo sapien
gaaatgtgtgtcctcttactggaga

SEQ ID NO: 5334523 - DNA, 25 bp, Homo sapien
tgttcaacagaactccaagactggg

SEQ ID NO: 5334524 - DNA, 25 bp, Homo sapien
catactgagtcagccacttactagg

SEQ ID NO: 5334525 - DNA, 25 bp, Homo sapien
acagaaccgtgagcatctaatgagt

SEQ ID NO: 5334526 - DNA, 25 bp, Homo sapien
agggcaattcctacactaacagagg

SEQ ID NO: 5334527 - DNA, 25 bp, Homo sapien
aacagaggacctgggatggcatact

SEQ ID NO: 5334528 - DNA, 25 bp, Homo sapien
agtacagttcgcaaggtcccggccg

SEQ ID NO: 5334529 - DNA, 25 bp, Homo sapien
acagttcgcaaggtcccggccggtg

SEQ ID NO: 5334530 - DNA, 25 bp, Homo sapien
cagttcgcaaggtcccggccggtga

SEQ ID NO: 5334531 - DNA, 25 bp, Homo sapien
gcgcccagtcgtagttctattttta

SEQ ID NO: 5334532 - DNA, 25 bp, Homo sapien
ccaccgcgcccagtcgtagttctat

SEQ ID NO: 5334533 - DNA, 25 bp, Homo sapien
cgcgcccagtcgtagttctattttt

SEQ ID NO: 5334534 - DNA, 25 bp, Homo sapien
tcctcccaccgtgtttggattacag

SEQ ID NO: 5334535 - DNA, 25 bp, Homo sapien
agtgaatgcttcagtaggtcccatg

SEQ ID NO: 5334536 - DNA, 25 bp, Homo sapien
tgcgtgcaccaagtttggcccctct

SEQ ID NO: 5334537 - DNA, 25 bp, Homo sapien
tagcatcgccgccacgaagaaagtg

SEQ ID NO: 5334538 - DNA, 25 bp, Homo sapien
atgaatcggcccagcccttgcgtgc

SEQ ID NO: 5334539 - DNA, 25 bp, Homo sapien
tcttgttttggccatttagctctaa

SEQ ID NO: 5334540 - DNA, 25 bp, Homo sapien
taaacattgggaagataaacgaatc

SEQ ID NO: 5334541 - DNA, 25 bp, Homo sapien
cacctttggagacctagttgcctgt

SEQ ID NO: 5334542 - DNA, 25 bp, Homo sapien
tagactgacttgtagagttcctgag

SEQ ID NO: 5334543 - DNA, 25 bp, Homo sapien
ttattgctgtatgtagaacagtgcc

SEQ ID NO: 5334544 - DNA, 25 bp, Homo sapien
taccaatttattgtcagcctcctcc

SEQ ID NO: 5334545 - DNA, 25 bp, Homo sapien
aggtagggattattgtctgtttatt

SEQ ID NO: 5334546 - DNA, 25 bp, Homo sapien
tctgttgcagtcacttactttacac

SEQ ID NO: 5334547 - DNA, 25 bp, Homo sapien
tagacaaacaggactgcatctaatt

SEQ ID NO: 5334548 - DNA, 25 bp, Homo sapien
cagaaaacaacttatagctacagcg

SEQ ID NO: 5334549 - DNA, 25 bp, Homo sapien
tagctacagcgaaagcaatttaaaa

SEQ ID NO: 5334550 - DNA, 25 bp, Homo sapien
ctgaactggtaatctatggaatagg

SEQ ID NO: 5334551 - DNA, 25 bp, Homo sapien
aggaattgtgaataatggaaagaca

SEQ ID NO: 5334552 - DNA, 25 bp, Homo sapien
tgtaattgaagaatggagttgattt

SEQ ID NO: 5334553 - DNA, 25 bp, Homo sapien
gctggggtgagctacaatatgattt

SEQ ID NO: 5334554 - DNA, 25 bp, Homo sapien
gaagctggggtgagctacaatatga

SEQ ID NO: 5334555 - DNA, 25 bp, Homo sapien
gacggagtcgtcctgggctgtagtg

SEQ ID NO: 5334556 - DNA, 25 bp, Homo sapien
acggagtcgtcctgggctgtagtgc

SEQ ID NO: 5334557 - DNA, 25 bp, Homo sapien
ttgttgttgcgactgctttatattt

SEQ ID NO: 5334558 - DNA, 25 bp, Homo sapien
cctggcctgcccatcttttagttag

SEQ ID NO: 5334559 - DNA, 25 bp, Homo sapien
ctggcctgcccatcttttagttagg

SEQ ID NO: 5334560 - DNA, 25 bp, Homo sapien
tgttgttgttgcgactgctttatat

SEQ ID NO: 5334561 - DNA, 25 bp, Homo sapien
ggagttcgagaccagcctggccaac

SEQ ID NO: 5334562 - DNA, 25 bp, Homo sapien
atggtgaaactccatctctactcaa

SEQ ID NO: 5334563 - DNA, 25 bp, Homo sapien
cgaggtgtgcagatcacatgaggtt

SEQ ID NO: 5334564 - DNA, 25 bp, Homo sapien
tcagtaggctgagccgggaggatct

SEQ ID NO: 5334565 - DNA, 25 bp, Homo sapien
cattggacacttgctttaataagaa

SEQ ID NO: 5334566 - DNA, 25 bp, Homo sapien
aatagtttcttagttggcataatgc

SEQ ID NO: 5334567 - DNA, 25 bp, Homo sapien
gacttttttaggcattcattggaca

SEQ ID NO: 5334568 - DNA, 25 bp, Homo sapien
gaatgccagagaataaggttgactt

SEQ ID NO: 5334569 - DNA, 25 bp, Homo sapien
gctaccacttgtcagccaggcacag

SEQ ID NO: 5334570 - DNA, 25 bp, Homo sapien
agctaccacttgtcagccaggcaca

SEQ ID NO: 5334571 - DNA, 25 bp, Homo sapien
gaagctaccacttgtcagccaggca

SEQ ID NO: 5334572 - DNA, 25 bp, Homo sapien
aagctaccacttgtcagccaggcac

SEQ ID NO: 5334573 - DNA, 25 bp, Homo sapien
cccgaaagtcatggccaaattcaca

SEQ ID NO: 5334574 - DNA, 25 bp, Homo sapien
tcctttgatccctgatgccatctca

SEQ ID NO: 5334575 - DNA, 25 bp, Homo sapien
tacactaagtccaggaacctcaagg

SEQ ID NO: 5334576 - DNA, 25 bp, Homo sapien
tcatcacagtgttcgtctggcctca

SEQ ID NO: 5334577 - DNA, 25 bp, Homo sapien
tagagaagtgtccatagtagggctg

SEQ ID NO: 5334578 - DNA, 25 bp, Homo sapien
ggtggacaacctgtggactggactt

SEQ ID NO: 5334579 - DNA, 25 bp, Homo sapien
tgaaagccagcatctagacctggag

SEQ ID NO: 5334580 - DNA, 25 bp, Homo sapien
gaatccctgtcaagtggtgaaagcc

SEQ ID NO: 5334581 - DNA, 25 bp, Homo sapien
gtttggggaagatgcaacacatgca

SEQ ID NO: 5334582 - DNA, 25 bp, Homo sapien
gatgcaacacatgcaggggtttgaa

SEQ ID NO: 5334583 - DNA, 25 bp, Homo sapien
ctctgcaatttccttgaaaccatgc

SEQ ID NO: 5334584 - DNA, 25 bp, Homo sapien
caatttccttgaaaccatgcctgag

SEQ ID NO: 5334585 - DNA, 25 bp, Homo sapien
tgaaaggtcattgcagtgaaaggtt

SEQ ID NO: 5334586 - DNA, 25 bp, Homo sapien
ttggggattgcttgctgctacagct

SEQ ID NO: 5334587 - DNA, 25 bp, Homo sapien
aactgtatgaagagccactagcctg

SEQ ID NO: 5334588 - DNA, 25 bp, Homo sapien
gatgaaatgaactgtatgaagagcc

SEQ ID NO: 5334589 - DNA, 25 bp, Homo sapien
tatgaagagccactagcctggccca

SEQ ID NO: 5334590 - DNA, 25 bp, Homo sapien
gaggtggtagatgaaatgaactgta

SEQ ID NO: 5334591 - DNA, 25 bp, Homo sapien
ggcttttgctatcccctgacgacgg

SEQ ID NO: 5334592 - DNA, 25 bp, Homo sapien
ctcactcaggtaggatttggtaatg

SEQ ID NO: 5334593 - DNA, 25 bp, Homo sapien
tgtccacatactccgtccagggttt

SEQ ID NO: 5334594 - DNA, 25 bp, Homo sapien
tgtctgtgcacaatgtcatgtccac

SEQ ID NO: 5334595 - DNA, 25 bp, Homo sapien
ccccaagtaagagtatgagggttcg

SEQ ID NO: 5334596 - DNA, 25 bp, Homo sapien
aagagtatgagggttcgaggcagct

SEQ ID NO: 5334597 - DNA, 25 bp, Homo sapien
agtatgagggttcgaggcagcttca

SEQ ID NO: 5334598 - DNA, 25 bp, Homo sapien
ccaagtaagagtatgagggttcgag

SEQ ID NO: 5334599 - DNA, 25 bp, Homo sapien
tctgtgtctgaaatctctaagtcca

SEQ ID NO: 5334600 - DNA, 25 bp, Homo sapien
ggcctccctgcacgcctttacgtca

SEQ ID NO: 5334601 - DNA, 25 bp, Homo sapien
ggagacagagctaggcctccctgca

SEQ ID NO: 5334602 - DNA, 25 bp, Homo sapien
aatctctaagtccaggagacagagc

SEQ ID NO: 5334603 - DNA, 25 bp, Homo sapien
aaaatcatgtgagtgcctgcatggc

SEQ ID NO: 5334604 - DNA, 25 bp, Homo sapien
gagagagaaaatcatgtgagtgcct

SEQ ID NO: 5334605 - DNA, 25 bp, Homo sapien
catgtgagtgcctgcatggctccca

SEQ ID NO: 5334606 - DNA, 25 bp, Homo sapien
gagaaaatcatgtgagtgcctgcat

SEQ ID NO: 5334607 - DNA, 25 bp, Homo sapien
gggaccatacatcgcaaaaattctc

SEQ ID NO: 5334608 - DNA, 25 bp, Homo sapien
aggccacacgtgcaacccttttgtc

SEQ ID NO: 5334609 - DNA, 25 bp, Homo sapien
ggcaggccacacgtgcaaccctttt

SEQ ID NO: 5334610 - DNA, 25 bp, Homo sapien
tctctgtccaacacaagtttcagga

SEQ ID NO: 5334611 - DNA, 25 bp, Homo sapien
agcttcagctctcagccgctcactg

SEQ ID NO: 5334612 - DNA, 25 bp, Homo sapien
tggcatccaggagataccgtctggg

SEQ ID NO: 5334613 - DNA, 25 bp, Homo sapien
ctggcatccaggagataccgtctgg

SEQ ID NO: 5334614 - DNA, 25 bp, Homo sapien
agctctcagccgctcactggcatcc

SEQ ID NO: 5334615 - DNA, 25 bp, Homo sapien
tggtacccaacaccacctccgagga

SEQ ID NO: 5334616 - DNA, 25 bp, Homo sapien
agatctttggtacccaacaccacct

SEQ ID NO: 5334617 - DNA, 25 bp, Homo sapien
gatctttggtacccaacaccacctc

SEQ ID NO: 5334618 - DNA, 25 bp, Homo sapien
ccagatctttggtacccaacaccac

SEQ ID NO: 5334619 - DNA, 25 bp, Homo sapien
ccagaagagcagtctgacctccaca

SEQ ID NO: 5334620 - DNA, 25 bp, Homo sapien
gaagagcagtctgacctccacatag

SEQ ID NO: 5334621 - DNA, 25 bp, Homo sapien
agagcagtctgacctccacatagag

SEQ ID NO: 5334622 - DNA, 25 bp, Homo sapien
agcagtctgacctccacatagagcc

SEQ ID NO: 5334623 - DNA, 25 bp, Homo sapien
aatggacaataagcttttattgcac

SEQ ID NO: 5334624 - DNA, 25 bp, Homo sapien
ttaatggacaataagcttttattgc

SEQ ID NO: 5334625 - DNA, 25 bp, Homo sapien
atggacaataagcttttattgcaca

SEQ ID NO: 5334626 - DNA, 25 bp, Homo sapien
taatggacaataagcttttattgca

SEQ ID NO: 5334627 - DNA, 25 bp, Homo sapien
ttgcttgctgctacagccgaatgga

SEQ ID NO: 5334628 - DNA, 25 bp, Homo sapien
gggattgcttgctgctacagccgaa

SEQ ID NO: 5334629 - DNA, 25 bp, Homo sapien
tattctgaccaatacagaaggaaag

SEQ ID NO: 5334630 - DNA, 25 bp, Homo sapien
atggattctattctgaccaatacag

SEQ ID NO: 5334631 - DNA, 25 bp, Homo sapien
tagacgccctgcctgagcagaaggg

SEQ ID NO: 5334632 - DNA, 25 bp, Homo sapien
catagacgccctgcctgagcagaag

SEQ ID NO: 5334633 - DNA, 25 bp, Homo sapien
tcatagacgccctgcctgagcagaa

SEQ ID NO: 5334634 - DNA, 25 bp, Homo sapien
atagacgccctgcctgagcagaagg

SEQ ID NO: 5334635 - DNA, 25 bp, Homo sapien
ccatggcagagagctggatgttgct

SEQ ID NO: 5334636 - DNA, 25 bp, Homo sapien
cccatggcagagagctggatgttgc

SEQ ID NO: 5334637 - DNA, 25 bp, Homo sapien
agctctggtagaggcccatggcaga

SEQ ID NO: 5334638 - DNA, 25 bp, Homo sapien
cccaagctctggtagaggcccatgg

SEQ ID NO: 5334639 - DNA, 25 bp, Homo sapien
tcaacgggcagagctcctactgtgc

SEQ ID NO: 5334640 - DNA, 25 bp, Homo sapien
tcatcaacgggcagagctcctactg

SEQ ID NO: 5334641 - DNA, 25 bp, Homo sapien
cagggcttttgctatcccctgacca

SEQ ID NO: 5334642 - DNA, 25 bp, Homo sapien
cacggtgctcattgtccacagagag

SEQ ID NO: 5334643 - DNA, 25 bp, Homo sapien
tgctatgtctacataccgcgtccag

SEQ ID NO: 5334644 - DNA, 25 bp, Homo sapien
tgtctacataccgcgtccagggttt

SEQ ID NO: 5334645 - DNA, 25 bp, Homo sapien
tatgtctacataccgcgtccagggt

SEQ ID NO: 5334646 - DNA, 25 bp, Homo sapien
gtctgtgcgcaatgctatgtctaca

SEQ ID NO: 5334647 - DNA, 25 bp, Homo sapien
tatgagggttcgaggcagcttcagt

SEQ ID NO: 5334648 - DNA, 25 bp, Homo sapien
gaacacgagggccagaatccaggag

SEQ ID NO: 5334649 - DNA, 25 bp, Homo sapien
gagggttcgaggcagcttcagtaat

SEQ ID NO: 5334650 - DNA, 25 bp, Homo sapien
cgagggccagaatccaggagccaga

SEQ ID NO: 5334651 - DNA, 25 bp, Homo sapien
ccccgggagagcaagcccacgacct

SEQ ID NO: 5334652 - DNA, 25 bp, Homo sapien
ccgggagagcaagcccacgacctac

SEQ ID NO: 5334653 - DNA, 25 bp, Homo sapien
cccgggagagcaagcccacgaccta

SEQ ID NO: 5334654 - DNA, 25 bp, Homo sapien
ctggtatttgcggatgtgataagga

SEQ ID NO: 5334655 - DNA, 25 bp, Homo sapien
tggtatttgcggatgtgataaggag

SEQ ID NO: 5334656 - DNA, 25 bp, Homo sapien
cctggtatttgcggatgtgataagg

SEQ ID NO: 5334657 - DNA, 25 bp, Homo sapien
agagctaggcctccctgcacgcctt

SEQ ID NO: 5334658 - DNA, 25 bp, Homo sapien
ctaggcctccctgcacgcctttacg

SEQ ID NO: 5334659 - DNA, 25 bp, Homo sapien
acagagctaggcctccctgcacgcc

SEQ ID NO: 5334660 - DNA, 25 bp, Homo sapien
agctaggcctccctgcacgccttta

SEQ ID NO: 5334661 - DNA, 25 bp, Homo sapien
cttggtgcattgagagagtacctac

SEQ ID NO: 5334662 - DNA, 25 bp, Homo sapien
tgcttaagggtgtgtctttccgcgt

SEQ ID NO: 5334663 - DNA, 25 bp, Homo sapien
ccactgggagaaggtagcatgagaa

SEQ ID NO: 5334664 - DNA, 25 bp, Homo sapien
tccgcgtttgcccatgaggaagcag

SEQ ID NO: 5334665 - DNA, 25 bp, Homo sapien
ggcaggccacatgcccaaccctttg

SEQ ID NO: 5334666 - DNA, 25 bp, Homo sapien
ccagggaccatacatcgcagaaatc

SEQ ID NO: 5334667 - DNA, 25 bp, Homo sapien
cttctccagggaccatacatcgcag

SEQ ID NO: 5334668 - DNA, 25 bp, Homo sapien
aggccacatgcccaaccctttggtg

SEQ ID NO: 5334669 - DNA, 25 bp, Homo sapien
ctgtgaccaagcacaagtttcagga

SEQ ID NO: 5334670 - DNA, 25 bp, Homo sapien
ctgtcaccacaagagccttgagtgt

SEQ ID NO: 5334671 - DNA, 25 bp, Homo sapien
agctgatcccaaacactgacacatg

SEQ ID NO: 5334672 - DNA, 25 bp, Homo sapien
agagaaagttgtattcgatttggcc

SEQ ID NO: 5334673 - DNA, 25 bp, Homo sapien
cgtggagctgatcccaaacactgac

SEQ ID NO: 5334674 - DNA, 25 bp, Homo sapien
agttgtattcgatttggccaaagca

SEQ ID NO: 5334675 - DNA, 25 bp, Homo sapien
tgtggcttcctcaaaacacagcgac

SEQ ID NO: 5334676 - DNA, 25 bp, Homo sapien
acacagcgacctcacttgacattca

SEQ ID NO: 5334677 - DNA, 25 bp, Homo sapien
tggcttcctcaaaacacagcgacct

SEQ ID NO: 5334678 - DNA, 25 bp, Homo sapien
tcaaaacacagcgacctcacttgac

SEQ ID NO: 5334679 - DNA, 25 bp, Homo sapien
gagggttgaacttgacagttaggac

SEQ ID NO: 5334680 - DNA, 25 bp, Homo sapien
tggtggagacatcacatccggaata

SEQ ID NO: 5334681 - DNA, 25 bp, Homo sapien
cacatccggaataactttgttagga

SEQ ID NO: 5334682 - DNA, 25 bp, Homo sapien
ttatgttgcacttgttgaaaagcca

SEQ ID NO: 5334683 - DNA, 25 bp, Homo sapien
aaaggtgtctgcgatcccagaaggt

SEQ ID NO: 5334684 - DNA, 25 bp, Homo sapien
ttcaaaggtgtctgcgatcccagaa

SEQ ID NO: 5334685 - DNA, 25 bp, Homo sapien
tgcgatcccagaaggttgggaacta

SEQ ID NO: 5334686 - DNA, 25 bp, Homo sapien
tgtctgcgatcccagaaggttggga

SEQ ID NO: 5334687 - DNA, 25 bp, Homo sapien
tgcagacagtgcctgaagtgcaaac

SEQ ID NO: 5334688 - DNA, 25 bp, Homo sapien
ctgaagtgcaaacccaaaggtgcgt

SEQ ID NO: 5334689 - DNA, 25 bp, Homo sapien
caaaggtgcgtagatctgggctgca

SEQ ID NO: 5334690 - DNA, 25 bp, Homo sapien
tctgggctgcatgtgaaagctttca

SEQ ID NO: 5334691 - DNA, 25 bp, Homo sapien
gccatcagtcaggtccctgcacagg

SEQ ID NO: 5334692 - DNA, 25 bp, Homo sapien
ctgaagccatcagtcaggtccctgc

SEQ ID NO: 5334693 - DNA, 25 bp, Homo sapien
catcagtcaggtccctgcacaggag

SEQ ID NO: 5334694 - DNA, 25 bp, Homo sapien
agtcaggtccctgcacaggagccac

SEQ ID NO: 5334695 - DNA, 25 bp, Homo sapien
tgactgccggcaggacttggggttt

SEQ ID NO: 5334696 - DNA, 25 bp, Homo sapien
tttcccacttggcatctaaatcgaa

SEQ ID NO: 5334697 - DNA, 25 bp, Homo sapien
cacttggcatctaaatcgaaatcct

SEQ ID NO: 5334698 - DNA, 25 bp, Homo sapien
gcatctaaatcgaaatcctttaccc

SEQ ID NO: 5334699 - DNA, 25 bp, Homo sapien
gattccaaaagcttgggaactatta

SEQ ID NO: 5334700 - DNA, 25 bp, Homo sapien
ttcaaaggtctctgtgattccaaaa

SEQ ID NO: 5334701 - DNA, 25 bp, Homo sapien
ggcctggaactgagcacttgctgca

SEQ ID NO: 5334702 - DNA, 25 bp, Homo sapien
taaagggatgagtcttggagcttct

SEQ ID NO: 5334703 - DNA, 25 bp, Homo sapien
ccctgtgttgggctcggaagaactg

SEQ ID NO: 5334704 - DNA, 25 bp, Homo sapien
tgctctcggaaactgttagggcaat

SEQ ID NO: 5334705 - DNA, 25 bp, Homo sapien
gaactggtggcttaactgaggagtc

SEQ ID NO: 5334706 - DNA, 25 bp, Homo sapien
ggagtcacggaacactgctctcgga

SEQ ID NO: 5334707 - DNA, 25 bp, Homo sapien
ggtaattagcaaacgcaggtggtca

SEQ ID NO: 5334708 - DNA, 25 bp, Homo sapien
tggacccactggctagataagcgtg

SEQ ID NO: 5334709 - DNA, 25 bp, Homo sapien
gagtttagaacccatgcctaggcct

SEQ ID NO: 5334710 - DNA, 25 bp, Homo sapien
tgcacctccgaagaagggagactgg

SEQ ID NO: 5334711 - DNA, 25 bp, Homo sapien
aaaacagaaacaataaccagctggg

SEQ ID NO: 5334712 - DNA, 25 bp, Homo sapien
ctttgggaggcgcagcagaagcatc

SEQ ID NO: 5334713 - DNA, 25 bp, Homo sapien
gtgaactgaggatataaaatcacca

SEQ ID NO: 5334714 - DNA, 25 bp, Homo sapien
agaaacaataaccagctgggctcag

SEQ ID NO: 5334715 - DNA, 25 bp, Homo sapien
taataccattctgtgatttaaactt

SEQ ID NO: 5334716 - DNA, 25 bp, Homo sapien
aaacttttctataatgcacaattag

SEQ ID NO: 5334717 - DNA, 25 bp, Homo sapien
tgcacaattagttttatagtcagga

SEQ ID NO: 5334718 - DNA, 25 bp, Homo sapien
tataatgcacaattagttttatagt

SEQ ID NO: 5334719 - DNA, 25 bp, Homo sapien
caatgttttctttaatgctgagaat

SEQ ID NO: 5334720 - DNA, 25 bp, Homo sapien
caaatgatagcatccaataatgtcc

SEQ ID NO: 5334721 - DNA, 25 bp, Homo sapien
gatagcatccaataatgtcccaata

SEQ ID NO: 5334722 - DNA, 25 bp, Homo sapien
gacattctacaaatgatagcatcca

SEQ ID NO: 5334723 - DNA, 25 bp, Homo sapien
cttttgttgacattctacaaatgat

SEQ ID NO: 5334724 - DNA, 25 bp, Homo sapien
aaaaaacaaggagctctggtgatca

SEQ ID NO: 5334725 - DNA, 25 bp, Homo sapien
taggcaaacggcatcagcattattg

SEQ ID NO: 5334726 - DNA, 25 bp, Homo sapien
tggagaatggttatgtcagctgagt

SEQ ID NO: 5334727 - DNA, 25 bp, Homo sapien
gcattattgctcatctatcacactc

SEQ ID NO: 5334728 - DNA, 25 bp, Homo sapien
caattagaattgaagtgtcatttgc

SEQ ID NO: 5334729 - DNA, 25 bp, Homo sapien
cctgatgaccttctacttgagatat

SEQ ID NO: 5334730 - DNA, 25 bp, Homo sapien
tgtaaacaattagaattgaagtgtc

SEQ ID NO: 5334731 - DNA, 25 bp, Homo sapien
gatttttcagagaaacctgatgacc

SEQ ID NO: 5334732 - DNA, 25 bp, Homo sapien
ggtacgccttgttcctatggaatca

SEQ ID NO: 5334733 - DNA, 25 bp, Homo sapien
ttggcgctgcacaaaaacacctcct

SEQ ID NO: 5334734 - DNA, 25 bp, Homo sapien
acatggatcccaccctcaaggagtt

SEQ ID NO: 5334735 - DNA, 25 bp, Homo sapien
ttctgcccctagaactgtaaatgga

SEQ ID NO: 5334736 - DNA, 25 bp, Homo sapien
caagtatctgaaatggatcaacaat

SEQ ID NO: 5334737 - DNA, 25 bp, Homo sapien
tttcccagtttgtagaggtgaactg

SEQ ID NO: 5334738 - DNA, 25 bp, Homo sapien
aatttcagtagatagagttcttgtc

SEQ ID NO: 5334739 - DNA, 25 bp, Homo sapien
ggtgaactgctttgtttgctgccac

SEQ ID NO: 5334740 - DNA, 25 bp, Homo sapien
ttcaaaactattatcccggctgggc

SEQ ID NO: 5334741 - DNA, 25 bp, Homo sapien
cagtgcctgaaaacacatggtaact

SEQ ID NO: 5334742 - DNA, 25 bp, Homo sapien
ggttaactccagtgtcaagctgttt

SEQ ID NO: 5334743 - DNA, 25 bp, Homo sapien
caattcttacggtctgtattttcaa

SEQ ID NO: 5334744 - DNA, 25 bp, Homo sapien
taaataacattaattgagggctaat

SEQ ID NO: 5334745 - DNA, 25 bp, Homo sapien
gagggctaatattatgggcatgatc

SEQ ID NO: 5334746 - DNA, 25 bp, Homo sapien
ttttaaagctgcaaggaacttatgc

SEQ ID NO: 5334747 - DNA, 25 bp, Homo sapien
gcctgggtagtcaggaaatcacaga

SEQ ID NO: 5334748 - DNA, 25 bp, Homo sapien
gcctttcttctcaagtctcccgcat

SEQ ID NO: 5334749 - DNA, 25 bp, Homo sapien
cactgtaggatttatcagtgatcca

SEQ ID NO: 5334750 - DNA, 25 bp, Homo sapien
aagtctcccgcattttttacatctt

SEQ ID NO: 5334751 - DNA, 25 bp, Homo sapien
gatccatcgatggtgccttccatgg

SEQ ID NO: 5334752 - DNA, 25 bp, Homo sapien
tgcattcgggaaataggtccagctg

SEQ ID NO: 5334753 - DNA, 25 bp, Homo sapien
cattcgggaaataggtccagctgat

SEQ ID NO: 5334754 - DNA, 25 bp, Homo sapien
cctgcattcgggaaataggtccagc

SEQ ID NO: 5334755 - DNA, 25 bp, Homo sapien
tcgggaaataggtccagctgatgtg

SEQ ID NO: 5334756 - DNA, 25 bp, Homo sapien
tatatctaatccgtaaagtcctgaa

SEQ ID NO: 5334757 - DNA, 25 bp, Homo sapien
taggtcacatcgctcatctacagca

SEQ ID NO: 5334758 - DNA, 25 bp, Homo sapien
gaaacttggaatcatcgttgagacc

SEQ ID NO: 5334759 - DNA, 25 bp, Homo sapien
tactcactcaggtcagaaacttgga

SEQ ID NO: 5334760 - DNA, 25 bp, Homo sapien
ggcccccagtgcgtctcggaagagc

SEQ ID NO: 5334761 - DNA, 25 bp, Homo sapien
cccagtgcgtctcggaagagctccc

SEQ ID NO: 5334762 - DNA, 25 bp, Homo sapien
agtgcgtctcggaagagctcccgct

SEQ ID NO: 5334763 - DNA, 25 bp, Homo sapien
atccggcccccagtgcgtctcggaa

SEQ ID NO: 5334764 - DNA, 25 bp, Homo sapien
aatccccgtcttcttcgagccagtt

SEQ ID NO: 5334765 - DNA, 25 bp, Homo sapien
ggccatctgtttccgggtcctggta

SEQ ID NO: 5334766 - DNA, 25 bp, Homo sapien
acttccggaagcgatggccaatccc

SEQ ID NO: 5334767 - DNA, 25 bp, Homo sapien
gccagtttccggataggccggctcg

SEQ ID NO: 5334768 - DNA, 25 bp, Homo sapien
tcccgcccattcttccgcctcccca

SEQ ID NO: 5334769 - DNA, 25 bp, Homo sapien
tccctttctgtgacgggccacgttg

SEQ ID NO: 5334770 - DNA, 25 bp, Homo sapien
acgttgtgcatgtgggttcctctca

SEQ ID NO: 5334771 - DNA, 25 bp, Homo sapien
atcaaccaggatgcatgtgacttcc

SEQ ID NO: 5334772 - DNA, 25 bp, Homo sapien
ccgtgccatacagcccaagacattt

SEQ ID NO: 5334773 - DNA, 25 bp, Homo sapien
caaggctcaagaaagctaccgaggg

SEQ ID NO: 5334774 - DNA, 25 bp, Homo sapien
gaagcccggaattcattgtgagcca

SEQ ID NO: 5334775 - DNA, 25 bp, Homo sapien
gaactgggcgagtctaaggtgacct

SEQ ID NO: 5334776 - DNA, 25 bp, Homo sapien
tggtagcaagcatcggtaatcccag

SEQ ID NO: 5334777 - DNA, 25 bp, Homo sapien
ggtatatccacagcatactcagcaa

SEQ ID NO: 5334778 - DNA, 25 bp, Homo sapien
gctacaaaatgccatgagggaattt

SEQ ID NO: 5334779 - DNA, 25 bp, Homo sapien
gaaaggctacatactctgttattcc

SEQ ID NO: 5334780 - DNA, 25 bp, Homo sapien
ttgatctactcagcaacatggagga

SEQ ID NO: 5334781 - DNA, 25 bp, Homo sapien
acacacggcggggaacatcattcac

SEQ ID NO: 5334782 - DNA, 25 bp, Homo sapien
acggcggggaacatcattcaccggg

SEQ ID NO: 5334783 - DNA, 25 bp, Homo sapien
ggacacacggcggggaacatcattc

SEQ ID NO: 5334784 - DNA, 25 bp, Homo sapien
cacggcggggaacatcattcaccgg

SEQ ID NO: 5334785 - DNA, 25 bp, Homo sapien
tacttagccgaacacatttgccaga

SEQ ID NO: 5334786 - DNA, 25 bp, Homo sapien
cattgccttaaacctgtcagcagaa

SEQ ID NO: 5334787 - DNA, 25 bp, Homo sapien
tgtaatgcattacctcaccgcaggc

SEQ ID NO: 5334788 - DNA, 25 bp, Homo sapien
tctggaaggcatgcaaggcaaaacc

SEQ ID NO: 5334789 - DNA, 25 bp, Homo sapien
gaaatatagcaatgtgaccaagcct

SEQ ID NO: 5334790 - DNA, 25 bp, Homo sapien
tcccaagtgggctttcatgatgtat

SEQ ID NO: 5334791 - DNA, 25 bp, Homo sapien
gatgagccttcatgacgtactctac

SEQ ID NO: 5334792 - DNA, 25 bp, Homo sapien
gactaggtggatttccatgtctgcc

SEQ ID NO: 5334793 - DNA, 25 bp, Homo sapien
taactgtaacgctgcttggcctcaa

SEQ ID NO: 5334794 - DNA, 25 bp, Homo sapien
ccagagagtagcatcattggctgca

SEQ ID NO: 5334795 - DNA, 25 bp, Homo sapien
tctgcttgcattgtgaagagggccc

SEQ ID NO: 5334796 - DNA, 25 bp, Homo sapien
gaagggtaagtcactgcggtgcaca

SEQ ID NO: 5334797 - DNA, 25 bp, Homo sapien
taggaaccgaagggacatagtgagt

SEQ ID NO: 5334798 - DNA, 25 bp, Homo sapien
gataggaaccgaagggacatagtga

SEQ ID NO: 5334799 - DNA, 25 bp, Homo sapien
catagtgagtgagaagtgatcagaa

SEQ ID NO: 5334800 - DNA, 25 bp, Homo sapien
tagtgagtgagaagtgatcagaaga

SEQ ID NO: 5334801 - DNA, 25 bp, Homo sapien
gaactgactgaagactgattgccta

SEQ ID NO: 5334802 - DNA, 25 bp, Homo sapien
tccgagcagtggctgcaacttgcaa

SEQ ID NO: 5334803 - DNA, 25 bp, Homo sapien
tggatactggctgacctctgagagg

SEQ ID NO: 5334804 - DNA, 25 bp, Homo sapien
tgggtgtcctaactcaaagcttggg

SEQ ID NO: 5334805 - DNA, 25 bp, Homo sapien
gctaatcacgtacagccaagaacag

SEQ ID NO: 5334806 - DNA, 25 bp, Homo sapien
tttggcttactgtgcaccgggtaca

SEQ ID NO: 5334807 - DNA, 25 bp, Homo sapien
atttgactggccaagggacacgagc

SEQ ID NO: 5334808 - DNA, 25 bp, Homo sapien
gacacgagcagctttgatcatcagg

SEQ ID NO: 5334809 - DNA, 25 bp, Homo sapien
tgagccatcaaaggtttctggcttc

SEQ ID NO: 5334810 - DNA, 25 bp, Homo sapien
taccctccccaatgaagggtctgtg

SEQ ID NO: 5334811 - DNA, 25 bp, Homo sapien
gatgatgagacacttctttgagcca

SEQ ID NO: 5334812 - DNA, 25 bp, Homo sapien
ctatgtgttatgatgatgagacact

SEQ ID NO: 5334813 - DNA, 25 bp, Homo sapien
cacgcatatcacaagtctagtcaga

SEQ ID NO: 5334814 - DNA, 25 bp, Homo sapien
tctggtctccaggtagaattccagg

SEQ ID NO: 5334815 - DNA, 25 bp, Homo sapien
gatggcctttgggtcaataacagaa

SEQ ID NO: 5334816 - DNA, 25 bp, Homo sapien
aaataatttgcaagggaagttctca

SEQ ID NO: 5334817 - DNA, 25 bp, Homo sapien
gataggagagtctggagtaattata

SEQ ID NO: 5334818 - DNA, 25 bp, Homo sapien
ggagagtctggagtaattataagga

SEQ ID NO: 5334819 - DNA, 25 bp, Homo sapien
ccattcccaacaggctggataggag

SEQ ID NO: 5334820 - DNA, 25 bp, Homo sapien
ctggataggagagtctggagtaatt

SEQ ID NO: 5334821 - DNA, 25 bp, Homo sapien
gggagatggtgtctctggtaaacat

SEQ ID NO: 5334822 - DNA, 25 bp, Homo sapien
tggcattgggcttcacattccaaga

SEQ ID NO: 5334823 - DNA, 25 bp, Homo sapien
attccaagaatacctcctgtgtgaa

SEQ ID NO: 5334824 - DNA, 25 bp, Homo sapien
ggagatggtgtctctggtaaacatg

SEQ ID NO: 5334825 - DNA, 25 bp, Homo sapien
tggcacaccgtggattcccagaagc

SEQ ID NO: 5334826 - DNA, 25 bp, Homo sapien
tctctcccaaagtctggcagggttg

SEQ ID NO: 5334827 - DNA, 25 bp, Homo sapien
tactgagaacagatatctgcttcca

SEQ ID NO: 5334828 - DNA, 25 bp, Homo sapien
acctttccctacagagataaatgca

SEQ ID NO: 5334829 - DNA, 25 bp, Homo sapien
aaactgttgctaaactggctgggcg

SEQ ID NO: 5334830 - DNA, 25 bp, Homo sapien
tgcgtaggtaccatccaataggctg

SEQ ID NO: 5334831 - DNA, 25 bp, Homo sapien
tggactgagtgggaggatccaccct

SEQ ID NO: 5334832 - DNA, 25 bp, Homo sapien
caagtgcataagctgataccccgaa

SEQ ID NO: 5334833 - DNA, 25 bp, Homo sapien
aaaaaacgaagaattcctcatcagt

SEQ ID NO: 5334834 - DNA, 25 bp, Homo sapien
aaaaaaacgaagaattcctcatcag

SEQ ID NO: 5334835 - DNA, 25 bp, Homo sapien
aaaaacgaagaattcctcatcagta

SEQ ID NO: 5334836 - DNA, 25 bp, Homo sapien
tcataatgtgttttcattaactata

SEQ ID NO: 5334837 - DNA, 25 bp, Homo sapien
taatgtgttttcattaactatagta

SEQ ID NO: 5334838 - DNA, 25 bp, Homo sapien
cataatgtgttttcattaactatag

SEQ ID NO: 5334839 - DNA, 25 bp, Homo sapien
tgtgttttcattaactatagtatta

SEQ ID NO: 5334840 - DNA, 25 bp, Homo sapien
tgacctgggtacactggaattccaa

SEQ ID NO: 5334841 - DNA, 25 bp, Homo sapien
catgagatgtgctgagtcttcaaaa

SEQ ID NO: 5334842 - DNA, 25 bp, Homo sapien
gatgtagattatacctaggtccttg

SEQ ID NO: 5334843 - DNA, 25 bp, Homo sapien
acaggcttattgtggactggttgca

SEQ ID NO: 5334844 - DNA, 25 bp, Homo sapien
tttctgataggaccattctgaaggt

SEQ ID NO: 5334845 - DNA, 25 bp, Homo sapien
gaaggtcttcaatgtagttttgtct

SEQ ID NO: 5334846 - DNA, 25 bp, Homo sapien
caatgtccccggcacctattgaata

SEQ ID NO: 5334847 - DNA, 25 bp, Homo sapien
ttctaagcaatgtccccggcaccta

SEQ ID NO: 5334848 - DNA, 25 bp, Homo sapien
cacgccttctacatcaatcaaatat

SEQ ID NO: 5334849 - DNA, 25 bp, Homo sapien
attgcatcatctggcctcacgcctt

SEQ ID NO: 5334850 - DNA, 25 bp, Homo sapien
tggcctcacgccttctacatcaatc

SEQ ID NO: 5334851 - DNA, 25 bp, Homo sapien
ctcacgccttctacatcaatcaaat

SEQ ID NO: 5334852 - DNA, 25 bp, Homo sapien
gaaacttgggagtcaccatcactgt

SEQ ID NO: 5334853 - DNA, 25 bp, Homo sapien
ggtccaatccaccattatgcctcag

SEQ ID NO: 5334854 - DNA, 25 bp, Homo sapien
tagagacttccttaatatgacagag

SEQ ID NO: 5334855 - DNA, 25 bp, Homo sapien
tactgtataaccaacagaatgggcc

SEQ ID NO: 5334856 - DNA, 25 bp, Homo sapien
aaaagaataaggagtctggccaggc

SEQ ID NO: 5334857 - DNA, 25 bp, Homo sapien
cagtgtggcaacatccataaaaagc

SEQ ID NO: 5334858 - DNA, 25 bp, Homo sapien
tgtgcaaagaacaacgcaggcctta

SEQ ID NO: 5334859 - DNA, 25 bp, Homo sapien
aaacataactcagtacagtgtggca

SEQ ID NO: 5334860 - DNA, 25 bp, Homo sapien
accatgggtacagtggacaccaata

SEQ ID NO: 5334861 - DNA, 25 bp, Homo sapien
atgaggtagccagtcctgtttaaac

SEQ ID NO: 5334862 - DNA, 25 bp, Homo sapien
ggtacagtggacaccaataagttta

SEQ ID NO: 5334863 - DNA, 25 bp, Homo sapien
ctgcaaatgaggtagccagtcctgt

SEQ ID NO: 5334864 - DNA, 25 bp, Homo sapien
cgtcccattcttaatctttgccctt

SEQ ID NO: 5334865 - DNA, 25 bp, Homo sapien
ggggcaattccactggtgcactctt

SEQ ID NO: 5334866 - DNA, 25 bp, Homo sapien
ttcttgtctctttcacataactcta

SEQ ID NO: 5334867 - DNA, 25 bp, Homo sapien
tgcttctaggggtccgtcccattct

SEQ ID NO: 5334868 - DNA, 25 bp, Homo sapien
cattaacagcgtgtttgaatttaaa

SEQ ID NO: 5334869 - DNA, 25 bp, Homo sapien
cttgatgtccaactgtaaaaatttt

SEQ ID NO: 5334870 - DNA, 25 bp, Homo sapien
ggcacttgatgtccaactgtaaaaa

SEQ ID NO: 5334871 - DNA, 25 bp, Homo sapien
aaacccattaacagcgtgtttgaat

SEQ ID NO: 5334872 - DNA, 25 bp, Homo sapien
tcttcattttgttctcggattttgt

SEQ ID NO: 5334873 - DNA, 25 bp, Homo sapien
ctctggtttataatagcgttgagta

SEQ ID NO: 5334874 - DNA, 25 bp, Homo sapien
ggggaaaagcattcttctggagcaa

SEQ ID NO: 5334875 - DNA, 25 bp, Homo sapien
aatagcgttgagtatatgttaaatc

SEQ ID NO: 5334876 - DNA, 25 bp, Homo sapien
actactgctacttcatcagcacagg

SEQ ID NO: 5334877 - DNA, 25 bp, Homo sapien
tgagcttagtgcagaataagcactc

SEQ ID NO: 5334878 - DNA, 25 bp, Homo sapien
tataacatgtatccacccttagagt

SEQ ID NO: 5334879 - DNA, 25 bp, Homo sapien
aatgtgttaatatacgtgaagccct

SEQ ID NO: 5334880 - DNA, 25 bp, Homo sapien
gcaaaggaactttgaaagcaatgaa

SEQ ID NO: 5334881 - DNA, 25 bp, Homo sapien
gcaatgaaacgagtcccaggcatcc

SEQ ID NO: 5334882 - DNA, 25 bp, Homo sapien
tccaactgggagatagtctttccac

SEQ ID NO: 5334883 - DNA, 25 bp, Homo sapien
ccaggcatccgctgtccaactggga

SEQ ID NO: 5334884 - DNA, 25 bp, Homo sapien
gctgaggagcgtcctgaaaagtcgc

SEQ ID NO: 5334885 - DNA, 25 bp, Homo sapien
gatgtggtttccgcccttcttcttg

SEQ ID NO: 5334886 - DNA, 25 bp, Homo sapien
tcttcttggctgaggagcgtcctga

SEQ ID NO: 5334887 - DNA, 25 bp, Homo sapien
tgaaaagtcgcgtctccggccccag

SEQ ID NO: 5334888 - DNA, 25 bp, Homo sapien
ggcgccctcaatgccaggataagac

SEQ ID NO: 5334889 - DNA, 25 bp, Homo sapien
agtccggcgccctcaatgccaggat

SEQ ID NO: 5334890 - DNA, 25 bp, Homo sapien
aagtcggccaaaagcgccagtccgg

SEQ ID NO: 5334891 - DNA, 25 bp, Homo sapien
agaagccgcccacccaatgccaagt

SEQ ID NO: 5334892 - DNA, 25 bp, Homo sapien
gctccagcgtctcgctattgcgcat

SEQ ID NO: 5334893 - DNA, 25 bp, Homo sapien
acctacgccgcgctccagcgtctcg

SEQ ID NO: 5334894 - DNA, 25 bp, Homo sapien
actcggcagccacctacgccgcgct

SEQ ID NO: 5334895 - DNA, 25 bp, Homo sapien
cgccgcgctccagcgtctcgctatt

SEQ ID NO: 5334896 - DNA, 25 bp, Homo sapien
tatatttttagtaatctttgcaacc

SEQ ID NO: 5334897 - DNA, 25 bp, Homo sapien
ttagtaatctttgcaaccatttcag

SEQ ID NO: 5334898 - DNA, 25 bp, Homo sapien
atttttagtaatctttgcaaccatt

SEQ ID NO: 5334899 - DNA, 25 bp, Homo sapien
agtaatctttgcaaccatttcagag

SEQ ID NO: 5334900 - DNA, 25 bp, Homo sapien
acaaaacccatcaggtcaccatagt

SEQ ID NO: 5334901 - DNA, 25 bp, Homo sapien
cacaaaacccatcaggtcaccatag

SEQ ID NO: 5334902 - DNA, 25 bp, Homo sapien
tcatgaggagagtccgttttccaca

SEQ ID NO: 5334903 - DNA, 25 bp, Homo sapien
tctcatgaggagagtccgttttcca

SEQ ID NO: 5334904 - DNA, 25 bp, Homo sapien
ctcatgaggagagtccgttttccac

SEQ ID NO: 5334905 - DNA, 25 bp, Homo sapien
tatacagtccacagctagcaagcag

SEQ ID NO: 5334906 - DNA, 25 bp, Homo sapien
tagtgcttggtcataattcaggccc

SEQ ID NO: 5334907 - DNA, 25 bp, Homo sapien
tcttggagatgagagagaccagtct

SEQ ID NO: 5334908 - DNA, 25 bp, Homo sapien
gcctaatgccttaaacagtgtcggg

SEQ ID NO: 5334909 - DNA, 25 bp, Homo sapien
cttagcttgctaattggttccactt

SEQ ID NO: 5334910 - DNA, 25 bp, Homo sapien
ggactgtctaggattcatattgtaa

SEQ ID NO: 5334911 - DNA, 25 bp, Homo sapien
gaaagtatgcggaagaatggactgt

SEQ ID NO: 5334912 - DNA, 25 bp, Homo sapien
tgtcaccagacattatctgatgttc

SEQ ID NO: 5334913 - DNA, 25 bp, Homo sapien
tggagaaatgggactgctattgtct

SEQ ID NO: 5334914 - DNA, 25 bp, Homo sapien
aacacagaggttagcaccaatcccc

SEQ ID NO: 5334915 - DNA, 25 bp, Homo sapien
gcaaataaatacagctgacccctga

SEQ ID NO: 5334916 - DNA, 25 bp, Homo sapien
aaaaatatacatatggtcaggcaca

SEQ ID NO: 5334917 - DNA, 25 bp, Homo sapien
tcccccatgcaatcaaaaatataca

SEQ ID NO: 5334918 - DNA, 25 bp, Homo sapien
gcgtggtggcccacgtctacaatcc

SEQ ID NO: 5334919 - DNA, 25 bp, Homo sapien
cgtggtggcccacgtctacaatccc

SEQ ID NO: 5334920 - DNA, 25 bp, Homo sapien
tatgtacacatctacaggtacattc

SEQ ID NO: 5334921 - DNA, 25 bp, Homo sapien
ggtatgtacacatctacaggtacat

SEQ ID NO: 5334922 - DNA, 25 bp, Homo sapien
tggtatgtacacatctacaggtaca

SEQ ID NO: 5334923 - DNA, 25 bp, Homo sapien
gtggtatgtacacatctacaggtac

SEQ ID NO: 5334924 - DNA, 25 bp, Homo sapien
catttggaccatttgcttcataatc

SEQ ID NO: 5334925 - DNA, 25 bp, Homo sapien
ttatggacatttggaccatttgctt

SEQ ID NO: 5334926 - DNA, 25 bp, Homo sapien
ttgcatagctttagggtcttatgga

SEQ ID NO: 5334927 - DNA, 25 bp, Homo sapien
caggataagggggttgcatagcttt

SEQ ID NO: 5334928 - DNA, 25 bp, Homo sapien
gacttcaagataaaagtagtagtct

SEQ ID NO: 5334929 - DNA, 25 bp, Homo sapien
aaacatcgagattacaaatctgctg

SEQ ID NO: 5334930 - DNA, 25 bp, Homo sapien
taccaaaacatcgagattacaaatc

SEQ ID NO: 5334931 - DNA, 25 bp, Homo sapien
tgagaaactaccaaaacatcgagat

SEQ ID NO: 5334932 - DNA, 25 bp, Homo sapien
tgccattagaatgagatccctactc

SEQ ID NO: 5334933 - DNA, 25 bp, Homo sapien
gctccttacagctgtggcccaagat

SEQ ID NO: 5334934 - DNA, 25 bp, Homo sapien
tgaataattaaagcctactattttc

SEQ ID NO: 5334935 - DNA, 25 bp, Homo sapien
ccaagattggagaagacactttaca

SEQ ID NO: 5334936 - DNA, 25 bp, Homo sapien
ctttacagttcccacaatcgatgga

SEQ ID NO: 5334937 - DNA, 25 bp, Homo sapien
gttagccagtgccaacactgcccgg

SEQ ID NO: 5334938 - DNA, 25 bp, Homo sapien
agtggcttaatgttgctcctccagg

SEQ ID NO: 5334939 - DNA, 25 bp, Homo sapien
cagggctcagtggtcgcagactatt

SEQ ID NO: 5334940 - DNA, 25 bp, Homo sapien
catagagggattcatcttcacaggg

SEQ ID NO: 5334941 - DNA, 25 bp, Homo sapien
ggaaacacgttttagacaatcttga

SEQ ID NO: 5334942 - DNA, 25 bp, Homo sapien
tatgcccaatgagccaacaatggag

SEQ ID NO: 5334943 - DNA, 25 bp, Homo sapien
tcaataaggttggagtctaggtctg

SEQ ID NO: 5334944 - DNA, 25 bp, Homo sapien
cttgtccatggatgcccatcatgac

SEQ ID NO: 5334945 - DNA, 25 bp, Homo sapien
ttgtccatggatgcccatcatgaca

SEQ ID NO: 5334946 - DNA, 25 bp, Homo sapien
caagctgcacaagtaccatacttag

SEQ ID NO: 5334947 - DNA, 25 bp, Homo sapien
tcttgcaagctgcacaagtaccata

SEQ ID NO: 5334948 - DNA, 25 bp, Homo sapien
tccactcttgcaagctgcacaagta

SEQ ID NO: 5334949 - DNA, 25 bp, Homo sapien
tgcaagctgcacaagtaccatactt

SEQ ID NO: 5334950 - DNA, 25 bp, Homo sapien
gaccagagtagatgttgttccctag

SEQ ID NO: 5334951 - DNA, 25 bp, Homo sapien
agtgaaagtctggtgaatcctgcaa

SEQ ID NO: 5334952 - DNA, 25 bp, Homo sapien
tcaaacatgtgagcccagagtagaa

SEQ ID NO: 5334953 - DNA, 25 bp, Homo sapien
taaccccacctgagtttggagacca

SEQ ID NO: 5334954 - DNA, 25 bp, Homo sapien
tctatatgcatatgaggcctacgtt

SEQ ID NO: 5334955 - DNA, 25 bp, Homo sapien
catacagctagaggaatctttgggc

SEQ ID NO: 5334956 - DNA, 25 bp, Homo sapien
ttagcactagctaggctttgactcc

SEQ ID NO: 5334957 - DNA, 25 bp, Homo sapien
aatgggatcagtctaatatgcctac

SEQ ID NO: 5334958 - DNA, 25 bp, Homo sapien
tttccagccgccaggagggatggtt

SEQ ID NO: 5334959 - DNA, 25 bp, Homo sapien
tggccaacagcgaatttaatgggtg

SEQ ID NO: 5334960 - DNA, 25 bp, Homo sapien
aagaagatgtgcctgcatagaaggc

SEQ ID NO: 5334961 - DNA, 25 bp, Homo sapien
tgaatttgactcagcatcatatgct

SEQ ID NO: 5334962 - DNA, 25 bp, Homo sapien
aacccgttcaacataaaccttgctg

SEQ ID NO: 5334963 - DNA, 25 bp, Homo sapien
agctctttggacaaaacgtggtgag

SEQ ID NO: 5334964 - DNA, 25 bp, Homo sapien
gttcaacataaaccttgctgcaaga

SEQ ID NO: 5334965 - DNA, 25 bp, Homo sapien
tcaacataaaccttgctgcaagaac

SEQ ID NO: 5334966 - DNA, 25 bp, Homo sapien
tgatctgtagcctttctttctgtcc

SEQ ID NO: 5334967 - DNA, 25 bp, Homo sapien
actaacatcagaggtttttgatctg

SEQ ID NO: 5334968 - DNA, 25 bp, Homo sapien
taggtaacaactaacatcagaggtt

SEQ ID NO: 5334969 - DNA, 25 bp, Homo sapien
ttgatctgtagcctttctttctgtc

SEQ ID NO: 5334970 - DNA, 25 bp, Homo sapien
aatagacaaactattttattcacag

SEQ ID NO: 5334971 - DNA, 25 bp, Homo sapien
aattatgtgccttaaggccgggcac

SEQ ID NO: 5334972 - DNA, 25 bp, Homo sapien
attatgtgccttaaggccgggcaca

SEQ ID NO: 5334973 - DNA, 25 bp, Homo sapien
gtgacaacatgtgaactctttaaag

SEQ ID NO: 5334974 - DNA, 25 bp, Homo sapien
atatatataatcttgtgtgccttaa

SEQ ID NO: 5334975 - DNA, 25 bp, Homo sapien
cataattctaaagtatgtttgcaga

SEQ ID NO: 5334976 - DNA, 25 bp, Homo sapien
aatgtcctcaaattaatttataggc

SEQ ID NO: 5334977 - DNA, 25 bp, Homo sapien
atgaaggaagacataatgtaataaa

SEQ ID NO: 5334978 - DNA, 25 bp, Homo sapien
aggtttactgcattatacagtctgc

SEQ ID NO: 5334979 - DNA, 25 bp, Homo sapien
tacagtctgctagctaccatcttca

SEQ ID NO: 5334980 - DNA, 25 bp, Homo sapien
cttcattgggtgttttacttgggca

SEQ ID NO: 5334981 - DNA, 25 bp, Homo sapien
acctagcccttaaactgatactctg

SEQ ID NO: 5334982 - DNA, 25 bp, Homo sapien
tctgctccagaagagctaggccgtg

SEQ ID NO: 5334983 - DNA, 25 bp, Homo sapien
tgtcagatcagggatgggcatcatc

SEQ ID NO: 5334984 - DNA, 25 bp, Homo sapien
ttgaatgcaagctagcagcaccctg

SEQ ID NO: 5334985 - DNA, 25 bp, Homo sapien
gttaagccgcctagagacaaagtca

SEQ ID NO: 5334986 - DNA, 25 bp, Homo sapien
tctgttctctgagtaagacttggcg

SEQ ID NO: 5334987 - DNA, 25 bp, Homo sapien
gacttggcgagtatgtgaaacttga

SEQ ID NO: 5334988 - DNA, 25 bp, Homo sapien
tctgtttccggccaactttattgaa

SEQ ID NO: 5334989 - DNA, 25 bp, Homo sapien
caaacgttcacgcttcttataggct

SEQ ID NO: 5334990 - DNA, 25 bp, Homo sapien
attttccaaatttgtagccgagatc

SEQ ID NO: 5334991 - DNA, 25 bp, Homo sapien
ttttccaaatttgtagccgagatca

SEQ ID NO: 5334992 - DNA, 25 bp, Homo sapien
tttccaaatttgtagccgagatcat

SEQ ID NO: 5334993 - DNA, 25 bp, Homo sapien
tctcttttcctcgaaagtgttggtg

SEQ ID NO: 5334994 - DNA, 25 bp, Homo sapien
gtgtccccaaggtacccttggctca

SEQ ID NO: 5334995 - DNA, 25 bp, Homo sapien
tcagccctcacttaaatagcagttt

SEQ ID NO: 5334996 - DNA, 25 bp, Homo sapien
tacatttgatgcctccccttctgct

SEQ ID NO: 5334997 - DNA, 25 bp, Homo sapien
ggccttgaccttcttgacatagacc

SEQ ID NO: 5334998 - DNA, 25 bp, Homo sapien
gccttgaccttcttgacatagacca

SEQ ID NO: 5334999 - DNA, 25 bp, Homo sapien
gaatgaaagttgtctggagacatct

SEQ ID NO: 5335000 - DNA, 25 bp, Homo sapien
ggagacatctctttgatgtccttgg

SEQ ID NO: 5335001 - DNA, 25 bp, Homo sapien
tctcttatccaatactaaccaggcc

SEQ ID NO: 5335002 - DNA, 25 bp, Homo sapien
gatgagatcaggtgcattcagggtg

SEQ ID NO: 5335003 - DNA, 25 bp, Homo sapien
tgcattcagggtggcatgacagtag

SEQ ID NO: 5335004 - DNA, 25 bp, Homo sapien
cgaccctgcttaacttccaagatca

SEQ ID NO: 5335005 - DNA, 25 bp, Homo sapien
gtcaaggatattccactgatcaaaa

SEQ ID NO: 5335006 - DNA, 25 bp, Homo sapien
tgtcaaggatattccactgatcaaa

SEQ ID NO: 5335007 - DNA, 25 bp, Homo sapien
ttgtcaaggatattccactgatcaa

SEQ ID NO: 5335008 - DNA, 25 bp, Homo sapien
gttgtcaaggatattccactgatca

SEQ ID NO: 5335009 - DNA, 25 bp, Homo sapien
ctgaggaggttagtcacatcaatca

SEQ ID NO: 5335010 - DNA, 25 bp, Homo sapien
tgaggaggttagtcacatcaatcac

SEQ ID NO: 5335011 - DNA, 25 bp, Homo sapien
gcatccaacagtgttagttccacgt

SEQ ID NO: 5335012 - DNA, 25 bp, Homo sapien
cccgtgcggaatcaacttcagctca

SEQ ID NO: 5335013 - DNA, 25 bp, Homo sapien
taggaaagcctccttatttcgcacc

SEQ ID NO: 5335014 - DNA, 25 bp, Homo sapien
catgctccaggcatccagggaaatg

SEQ ID NO: 5335015 - DNA, 25 bp, Homo sapien
tgtgcgcgtgtatgtcagagaccca

SEQ ID NO: 5335016 - DNA, 25 bp, Homo sapien
gctaagctgttagctgcagccgggc

SEQ ID NO: 5335017 - DNA, 25 bp, Homo sapien
aacttggcctgcacaacaggtgagg

SEQ ID NO: 5335018 - DNA, 25 bp, Homo sapien
tcccctgcaaccgaggtaggtggaa

SEQ ID NO: 5335019 - DNA, 25 bp, Homo sapien
gggcgagcacgtgccgcggtgcgcg

SEQ ID NO: 5335020 - DNA, 25 bp, Homo sapien
gggagtccccgggcgagcacgtgcc

SEQ ID NO: 5335021 - DNA, 25 bp, Homo sapien
tcccgcggacgccttcattgctgct

SEQ ID NO: 5335022 - DNA, 25 bp, Homo sapien
tccccgggcgagcacgtgccgcggt

SEQ ID NO: 5335023 - DNA, 25 bp, Homo sapien
tgaaagctcagctccctagggaggg

SEQ ID NO: 5335024 - DNA, 25 bp, Homo sapien
tgggcaggacctcaattgagcaagc

SEQ ID NO: 5335025 - DNA, 25 bp, Homo sapien
gagtgatgcgcttcccctttctgtc

SEQ ID NO: 5335026 - DNA, 25 bp, Homo sapien
gacacgtgaaagttgtccctgagcc

SEQ ID NO: 5335027 - DNA, 25 bp, Homo sapien
tacctgctcaactcatgcctgggtc

SEQ ID NO: 5335028 - DNA, 25 bp, Homo sapien
cacacccctacctgctcaactcatg

SEQ ID NO: 5335029 - DNA, 25 bp, Homo sapien
ccctacctgctcaactcatgcctgg

SEQ ID NO: 5335030 - DNA, 25 bp, Homo sapien
tgctcaactcatgcctgggtccagg

SEQ ID NO: 5335031 - DNA, 25 bp, Homo sapien
tacggagtccgatcagactgctgca

SEQ ID NO: 5335032 - DNA, 25 bp, Homo sapien
ggccaagatgatcccttttctgagg

SEQ ID NO: 5335033 - DNA, 25 bp, Homo sapien
agccacttgccttcacccttgtaga

SEQ ID NO: 5335034 - DNA, 25 bp, Homo sapien
agaagaggcatccatccacgagact

SEQ ID NO: 5335035 - DNA, 25 bp, Homo sapien
ccgtgtggcagagggaacatgtccc

SEQ ID NO: 5335036 - DNA, 25 bp, Homo sapien
gagtcactgtctagggtataccaca

SEQ ID NO: 5335037 - DNA, 25 bp, Homo sapien
cattagatcttagcagccgtgtggc

SEQ ID NO: 5335038 - DNA, 25 bp, Homo sapien
catttaacgggcatatctgtggcat

SEQ ID NO: 5335039 - DNA, 25 bp, Homo sapien
ctttcttctattctggctgccttag

SEQ ID NO: 5335040 - DNA, 25 bp, Homo sapien
ctggaacttttacgcccttggtgct

SEQ ID NO: 5335041 - DNA, 25 bp, Homo sapien
tacgcccttggtgcttaagtaattg

SEQ ID NO: 5335042 - DNA, 25 bp, Homo sapien
taattggatttctcaaccccgcctc

SEQ ID NO: 5335043 - DNA, 25 bp, Homo sapien
ggtgcttaagtaattggatttctca

SEQ ID NO: 5335044 - DNA, 25 bp, Homo sapien
cccacagccaccaccggcacaggca

SEQ ID NO: 5335045 - DNA, 25 bp, Homo sapien
ccacagccaccaccggcacaggcag

SEQ ID NO: 5335046 - DNA, 25 bp, Homo sapien
cacccccacagccaccaccggcaca

SEQ ID NO: 5335047 - DNA, 25 bp, Homo sapien
agccaccaccggcacaggcaggacc

SEQ ID NO: 5335048 - DNA, 25 bp, Homo sapien
tggtgatgtctacctgccttggagg

SEQ ID NO: 5335049 - DNA, 25 bp, Homo sapien
tctggggcatgccaattcactctgt

SEQ ID NO: 5335050 - DNA, 25 bp, Homo sapien
tgttcaagggcttgagggctatgcc

SEQ ID NO: 5335051 - DNA, 25 bp, Homo sapien
caggaacaagggaactcccacctct

SEQ ID NO: 5335052 - DNA, 25 bp, Homo sapien
gtggccctgaggctccccatgaggc

SEQ ID NO: 5335053 - DNA, 25 bp, Homo sapien
gcctctgagtctccccagccaggtg

SEQ ID NO: 5335054 - DNA, 25 bp, Homo sapien
gggcctctgagtctccccagccagg

SEQ ID NO: 5335055 - DNA, 25 bp, Homo sapien
gccccagctgcatccacagctgcat

SEQ ID NO: 5335056 - DNA, 25 bp, Homo sapien
tactgttaggtcagaggacatgaac

SEQ ID NO: 5335057 - DNA, 25 bp, Homo sapien
gacatgaacaaagtcctgtgcttct

SEQ ID NO: 5335058 - DNA, 25 bp, Homo sapien
gagtcacgtagagacttttcctggt

SEQ ID NO: 5335059 - DNA, 25 bp, Homo sapien
ttcttcctcgaacccacattagtta

SEQ ID NO: 5335060 - DNA, 25 bp, Homo sapien
gggtggttcctcgtgcacggccctc

SEQ ID NO: 5335061 - DNA, 25 bp, Homo sapien
cacggccctctattaaggccaggga

SEQ ID NO: 5335062 - DNA, 25 bp, Homo sapien
aatgggtgatgcagcgtagctacac

SEQ ID NO: 5335063 - DNA, 25 bp, Homo sapien
attttagcaggctctgagctatggg

SEQ ID NO: 5335064 - DNA, 25 bp, Homo sapien
taacaatcagatgaccgctataggc

SEQ ID NO: 5335065 - DNA, 25 bp, Homo sapien
tataggcaagttcctgagcttccgg

SEQ ID NO: 5335066 - DNA, 25 bp, Homo sapien
cttccgggtgccttgagtaagagct

SEQ ID NO: 5335067 - DNA, 25 bp, Homo sapien
gtaagagctgagaaccggcctgctg

SEQ ID NO: 5335068 - DNA, 25 bp, Homo sapien
caaacaaagcaagtcgagaaggcag

SEQ ID NO: 5335069 - DNA, 25 bp, Homo sapien
gataggcattctcatagccagggac

SEQ ID NO: 5335070 - DNA, 25 bp, Homo sapien
tccatgagggtctgatacctgcagg

SEQ ID NO: 5335071 - DNA, 25 bp, Homo sapien
cctttctgtgatcgggagtgggcct

SEQ ID NO: 5335072 - DNA, 25 bp, Homo sapien
tacttggcttccaatggaggtgaac

SEQ ID NO: 5335073 - DNA, 25 bp, Homo sapien
gcaatgtctcaaggcaataggatgt

SEQ ID NO: 5335074 - DNA, 25 bp, Homo sapien
tattggtttgcctcctgagctaccc

SEQ ID NO: 5335075 - DNA, 25 bp, Homo sapien
aacaagggcaggtcgtataatggca

SEQ ID NO: 5335076 - DNA, 25 bp, Homo sapien
cagaaatagtcagcttctgagccag

SEQ ID NO: 5335077 - DNA, 25 bp, Homo sapien
ttctccagaaatagtcagcttctga

SEQ ID NO: 5335078 - DNA, 25 bp, Homo sapien
tccagaaatagtcagcttctgagcc

SEQ ID NO: 5335079 - DNA, 25 bp, Homo sapien
tctccagaaatagtcagcttctgag

SEQ ID NO: 5335080 - DNA, 25 bp, Homo sapien
gaccgcagactcgtcgggctgcttt

SEQ ID NO: 5335081 - DNA, 25 bp, Homo sapien
taacaaacaattgccggctgcgacc

SEQ ID NO: 5335082 - DNA, 25 bp, Homo sapien
ttgctgctctccaacaacgtctgga

SEQ ID NO: 5335083 - DNA, 25 bp, Homo sapien
tgcgaccattttgcaggacaggcat

SEQ ID NO: 5335084 - DNA, 25 bp, Homo sapien
aattaacatctaaatagattataca

SEQ ID NO: 5335085 - DNA, 25 bp, Homo sapien
tcatccaaggtcttaagcagcagca

SEQ ID NO: 5335086 - DNA, 25 bp, Homo sapien
aagttcatccaaggtcttaagcagc

SEQ ID NO: 5335087 - DNA, 25 bp, Homo sapien
gttcatccaaggtcttaagcagcag

SEQ ID NO: 5335088 - DNA, 25 bp, Homo sapien
atccaaggtcttaagcagcagcatc

SEQ ID NO: 5335089 - DNA, 25 bp, Homo sapien
gggacagaggtaaatatccgcaatc

SEQ ID NO: 5335090 - DNA, 25 bp, Homo sapien
aatatccgcaatccatgcatctctt

SEQ ID NO: 5335091 - DNA, 25 bp, Homo sapien
cagaggtaaatatccgcaatccatg

SEQ ID NO: 5335092 - DNA, 25 bp, Homo sapien
gtaaatatccgcaatccatgcatct

SEQ ID NO: 5335093 - DNA, 25 bp, Homo sapien
acagttctcttctccttaaattctt

SEQ ID NO: 5335094 - DNA, 25 bp, Homo sapien
ctgattaaccatctggtgctgctgg

SEQ ID NO: 5335095 - DNA, 25 bp, Homo sapien
gattaaccatctggtgctgctggac

SEQ ID NO: 5335096 - DNA, 25 bp, Homo sapien
ggtgctgctggacagttctcttctc

SEQ ID NO: 5335097 - DNA, 25 bp, Homo sapien
caattttaatttcatacatcgcccc

SEQ ID NO: 5335098 - DNA, 25 bp, Homo sapien
ttttaatttcatacatcgccccaca

SEQ ID NO: 5335099 - DNA, 25 bp, Homo sapien
ttaatttcatacatcgccccacaac

SEQ ID NO: 5335100 - DNA, 25 bp, Homo sapien
aattttaatttcatacatcgcccca

SEQ ID NO: 5335101 - DNA, 25 bp, Homo sapien
tagctgtagctcgtggaaacttttc

SEQ ID NO: 5335102 - DNA, 25 bp, Homo sapien
atagctgtagctcgtggaaactttt

SEQ ID NO: 5335103 - DNA, 25 bp, Homo sapien
tcatcttagcggatctgtgggcagc

SEQ ID NO: 5335104 - DNA, 25 bp, Homo sapien
ttacaatgatggaagcaccgggcac

SEQ ID NO: 5335105 - DNA, 25 bp, Homo sapien
taaccagatggcagacagaatcggc

SEQ ID NO: 5335106 - DNA, 25 bp, Homo sapien
tcatgggaccaaagtaacctgcagg

SEQ ID NO: 5335107 - DNA, 25 bp, Homo sapien
cggatcccgcggaggagaggcgctg

SEQ ID NO: 5335108 - DNA, 25 bp, Homo sapien
ccgcggccgggctccatgcagccat

SEQ ID NO: 5335109 - DNA, 25 bp, Homo sapien
cccgcggatcccgcggaggagaggc

SEQ ID NO: 5335110 - DNA, 25 bp, Homo sapien
gagaggcgctgccgcggccgggctc

SEQ ID NO: 5335111 - DNA, 25 bp, Homo sapien
cgacgtgacccgccgcccgaggtca

SEQ ID NO: 5335112 - DNA, 25 bp, Homo sapien
cggccgacgtgacccgccgcccgag

SEQ ID NO: 5335113 - DNA, 25 bp, Homo sapien
gacgtgacccgccgcccgaggtcac

SEQ ID NO: 5335114 - DNA, 25 bp, Homo sapien
acgtgacccgccgcccgaggtcact

SEQ ID NO: 5335115 - DNA, 25 bp, Homo sapien
ccactccctactctggcagtctagc

SEQ ID NO: 5335116 - DNA, 25 bp, Homo sapien
caagcagggtagtaatggtgaacca

SEQ ID NO: 5335117 - DNA, 25 bp, Homo sapien
gtttggagtatgaacgaatccgtcc

SEQ ID NO: 5335118 - DNA, 25 bp, Homo sapien
gcatggtttagatgaggcgcaccta

SEQ ID NO: 5335119 - DNA, 25 bp, Homo sapien
tcagagactggtttagggtcggccc

SEQ ID NO: 5335120 - DNA, 25 bp, Homo sapien
ctcagaaaattcattaggtaggaac

SEQ ID NO: 5335121 - DNA, 25 bp, Homo sapien
gatcactcatagctttcatacacat

SEQ ID NO: 5335122 - DNA, 25 bp, Homo sapien
gtgaaatgcatttagtcccaggaaa

SEQ ID NO: 5335123 - DNA, 25 bp, Homo sapien
tgctgtgacctcgagattctcttgt

SEQ ID NO: 5335124 - DNA, 25 bp, Homo sapien
atagaaatgtgtgttgatatacata

SEQ ID NO: 5335125 - DNA, 25 bp, Homo sapien
ttattctgacgaagttacaaaagta

SEQ ID NO: 5335126 - DNA, 25 bp, Homo sapien
tacacaaactatttttgatgtagaa

SEQ ID NO: 5335127 - DNA, 25 bp, Homo sapien
gttctataataagaagtctgtagca

SEQ ID NO: 5335128 - DNA, 25 bp, Homo sapien
gaagtacagttaactgacttagaaa

SEQ ID NO: 5335129 - DNA, 25 bp, Homo sapien
taggacttacgctctttgggcctga

SEQ ID NO: 5335130 - DNA, 25 bp, Homo sapien
ttagtactaccaccaagattgttcc

SEQ ID NO: 5335131 - DNA, 25 bp, Homo sapien
ggcaggctcctaaaacaaggcggta

SEQ ID NO: 5335132 - DNA, 25 bp, Homo sapien
ccatgactagggctgctttaaaaca

SEQ ID NO: 5335133 - DNA, 25 bp, Homo sapien
agattgatttctataggccgggcac

SEQ ID NO: 5335134 - DNA, 25 bp, Homo sapien
tcaaactgttatcaaaggttggccc

SEQ ID NO: 5335135 - DNA, 25 bp, Homo sapien
tcagtgcactgttggttaagccaga

SEQ ID NO: 5335136 - DNA, 25 bp, Homo sapien
tggaacaggcaaaccttgggcatgg

SEQ ID NO: 5335137 - DNA, 25 bp, Homo sapien
tcctaagtgatacctagaaacctgc

SEQ ID NO: 5335138 - DNA, 25 bp, Homo sapien
tgaggaaagtacaagcctagctgag

SEQ ID NO: 5335139 - DNA, 25 bp, Homo sapien
ctttatcaaagccatcgaggaggtt

SEQ ID NO: 5335140 - DNA, 25 bp, Homo sapien
tctctcaagaataggtagcacacca

SEQ ID NO: 5335141 - DNA, 25 bp, Homo sapien
tccttattaggatgaagttcatgca

SEQ ID NO: 5335142 - DNA, 25 bp, Homo sapien
cactactcttaactaaggctcaaga

SEQ ID NO: 5335143 - DNA, 25 bp, Homo sapien
tcaagtactctgagtattttcctcc

SEQ ID NO: 5335144 - DNA, 25 bp, Homo sapien
taagatgtgtacaccttcatggttt

SEQ ID NO: 5335145 - DNA, 25 bp, Homo sapien
ataactttggttgctcccacccaca

SEQ ID NO: 5335146 - DNA, 25 bp, Homo sapien
cctggaagaccatccttagaagaca

SEQ ID NO: 5335147 - DNA, 25 bp, Homo sapien
tcagccaaaagctactatctgaatt

SEQ ID NO: 5335148 - DNA, 25 bp, Homo sapien
gtcatatgatgatttaaactgcaat

SEQ ID NO: 5335149 - DNA, 25 bp, Homo sapien
ggtcacacagtacttaagatttggc

SEQ ID NO: 5335150 - DNA, 25 bp, Homo sapien
gataacaacaagagtggtcacacag

SEQ ID NO: 5335151 - DNA, 25 bp, Homo sapien
tcagtagacacaggcaatgggtatc

SEQ ID NO: 5335152 - DNA, 25 bp, Homo sapien
taaggtcttactcggaaactatcac

SEQ ID NO: 5335153 - DNA, 25 bp, Homo sapien
gaggtgccagctcacgcctatcaat

SEQ ID NO: 5335154 - DNA, 25 bp, Homo sapien
gaagaggtgccagctcacgcctatc

SEQ ID NO: 5335155 - DNA, 25 bp, Homo sapien
gctcacgcctatcaatcagattaaa

SEQ ID NO: 5335156 - DNA, 25 bp, Homo sapien
gccagctcacgcctatcaatcagat

SEQ ID NO: 5335157 - DNA, 25 bp, Homo sapien
tcaccagagtgctaagagtatcttg

SEQ ID NO: 5335158 - DNA, 25 bp, Homo sapien
aaacccttgttggaatcaccagagt

SEQ ID NO: 5335159 - DNA, 25 bp, Homo sapien
ctggaggctcctataaagcttcagg

SEQ ID NO: 5335160 - DNA, 25 bp, Homo sapien
taagagtatcttgtatgctaatgag

SEQ ID NO: 5335161 - DNA, 25 bp, Homo sapien
gagctctcaaacttgtaggatctga

SEQ ID NO: 5335162 - DNA, 25 bp, Homo sapien
gaaccaactctaggtatcagtatga

SEQ ID NO: 5335163 - DNA, 25 bp, Homo sapien
ccatgtttggtcacagaagcgttct

SEQ ID NO: 5335164 - DNA, 25 bp, Homo sapien
ggagagagcatggaagccccttctc

SEQ ID NO: 5335165 - DNA, 25 bp, Homo sapien
taaaccctgaacagacgctttagaa

SEQ ID NO: 5335166 - DNA, 25 bp, Homo sapien
aaagtgctggtgataaatatgggca

SEQ ID NO: 5335167 - DNA, 25 bp, Homo sapien
cctgaacagacgctttagaatagtc

SEQ ID NO: 5335168 - DNA, 25 bp, Homo sapien
tgcttaaaggaggtgttgaggtggg

SEQ ID NO: 5335169 - DNA, 25 bp, Homo sapien
catacatacgcactctctcaatgag

SEQ ID NO: 5335170 - DNA, 25 bp, Homo sapien
tctaaagaaattacactggctccgt

SEQ ID NO: 5335171 - DNA, 25 bp, Homo sapien
agaggccgtagtggacagattgcct

SEQ ID NO: 5335172 - DNA, 25 bp, Homo sapien
tctcaatgaggactggaaactctcc

SEQ ID NO: 5335173 - DNA, 25 bp, Homo sapien
cagagccacagtcaccaacgtgtgg

SEQ ID NO: 5335174 - DNA, 25 bp, Homo sapien
caacgtgtggaatttctataggaac

SEQ ID NO: 5335175 - DNA, 25 bp, Homo sapien
tataatcttgaagcagggaaaagct

SEQ ID NO: 5335176 - DNA, 25 bp, Homo sapien
tgttgtgcacataagataatcaggg

SEQ ID NO: 5335177 - DNA, 25 bp, Homo sapien
aagctgatcttgaacccaagtcatc

SEQ ID NO: 5335178 - DNA, 25 bp, Homo sapien
taatattagtaccatctgcccagtg

SEQ ID NO: 5335179 - DNA, 25 bp, Homo sapien
tattagtaccatctgcccagtgata

SEQ ID NO: 5335180 - DNA, 25 bp, Homo sapien
tgtattttggtgcagaacatttgat

SEQ ID NO: 5335181 - DNA, 25 bp, Homo sapien
atataacatgttgatctggttaaag

SEQ ID NO: 5335182 - DNA, 25 bp, Homo sapien
gtaatagttccatataacatgttga

SEQ ID NO: 5335183 - DNA, 25 bp, Homo sapien
catactgatgagatccttcagggat

SEQ ID NO: 5335184 - DNA, 25 bp, Homo sapien
gcaacataacagcttgtctcagatt

SEQ ID NO: 5335185 - DNA, 25 bp, Homo sapien
cttcagggatattcttctttggttt

SEQ ID NO: 5335186 - DNA, 25 bp, Homo sapien
tgcatgttttaagagttcatactga

SEQ ID NO: 5335187 - DNA, 25 bp, Homo sapien
tgatgatcacaatacaagaatgctt

SEQ ID NO: 5335188 - DNA, 25 bp, Homo sapien
ttttcccctgcctgtaaaagcaaga

SEQ ID NO: 5335189 - DNA, 25 bp, Homo sapien
gcaattttactatgccctctgaaga

SEQ ID NO: 5335190 - DNA, 25 bp, Homo sapien
tctggtacagagaaacatcctggat

SEQ ID NO: 5335191 - DNA, 25 bp, Homo sapien
gagggcttctgtaactcgttaagaa

SEQ ID NO: 5335192 - DNA, 25 bp, Homo sapien
gatgaactggataatagagggcttc

SEQ ID NO: 5335193 - DNA, 25 bp, Homo sapien
acattaaatgtggactagggtaggg

SEQ ID NO: 5335194 - DNA, 25 bp, Homo sapien
tcaatgagcatgagaaaaactgttc

SEQ ID NO: 5335195 - DNA, 25 bp, Homo sapien
gagattctaaggtatgcctatcaag

SEQ ID NO: 5335196 - DNA, 25 bp, Homo sapien
tctgcaatgggactatgaatttgtt

SEQ ID NO: 5335197 - DNA, 25 bp, Homo sapien
aaaatggcaatactgtgtttctgca

SEQ ID NO: 5335198 - DNA, 25 bp, Homo sapien
aatgtcaagcatgtggattacatcc

SEQ ID NO: 5335199 - DNA, 25 bp, Homo sapien
tggacagaacgatccgactccaagg

SEQ ID NO: 5335200 - DNA, 25 bp, Homo sapien
aagcttctcaaactgcggcaacgca

SEQ ID NO: 5335201 - DNA, 25 bp, Homo sapien
caaggccagcatcttaacttcaagc

SEQ ID NO: 5335202 - DNA, 25 bp, Homo sapien
gggcggcatttaacaccgacaataa

SEQ ID NO: 5335203 - DNA, 25 bp, Homo sapien
ttacttcgaccttcatctctgtcgg

SEQ ID NO: 5335204 - DNA, 25 bp, Homo sapien
tagagggagcggaccgtccttagct

SEQ ID NO: 5335205 - DNA, 25 bp, Homo sapien
ctggatcaggattcggagctggcta

SEQ ID NO: 5335206 - DNA, 25 bp, Homo sapien
tgcgagcctttgcaaacctcggcgc

SEQ ID NO: 5335207 - DNA, 25 bp, Homo sapien
gtccttagctcacgggcagcggaag

SEQ ID NO: 5335208 - DNA, 25 bp, Homo sapien
tgcggaaccaacaaaatctcgcgag

SEQ ID NO: 5335209 - DNA, 25 bp, Homo sapien
ctcgtcctagaactcggccaatcat

SEQ ID NO: 5335210 - DNA, 25 bp, Homo sapien
tcgcgagctaaggtttcgctgcgcc

SEQ ID NO: 5335211 - DNA, 25 bp, Homo sapien
tcgctgcgccgggagggacttgtcg

SEQ ID NO: 5335212 - DNA, 25 bp, Homo sapien
gcctaggctcctttaatggagaaca

SEQ ID NO: 5335213 - DNA, 25 bp, Homo sapien
tctgtaaccgtttttaggagactca

SEQ ID NO: 5335214 - DNA, 25 bp, Homo sapien
gattaagatctactagtgtgttcca

SEQ ID NO: 5335215 - DNA, 25 bp, Homo sapien
tggagctgtcaagagtacaagcaat

SEQ ID NO: 5335216 - DNA, 25 bp, Homo sapien
gagctaagcttttgcgccaactgga

SEQ ID NO: 5335217 - DNA, 25 bp, Homo sapien
gacgagctcttactggttcaactaa

SEQ ID NO: 5335218 - DNA, 25 bp, Homo sapien
ggtccctgggaagagcacattgcca

SEQ ID NO: 5335219 - DNA, 25 bp, Homo sapien
cctagagattgttgcccttggcgtc

SEQ ID NO: 5335220 - DNA, 25 bp, Homo sapien
aaacatgttgattagttcttcaggg

SEQ ID NO: 5335221 - DNA, 25 bp, Homo sapien
tgaagttagacaagaatctgacagg

SEQ ID NO: 5335222 - DNA, 25 bp, Homo sapien
gaataaatagagttcacgatcctgt

SEQ ID NO: 5335223 - DNA, 25 bp, Homo sapien
tccaggtattccaaatctgatcaca

SEQ ID NO: 5335224 - DNA, 25 bp, Homo sapien
actgcgcccagtcagtatgcttttc

SEQ ID NO: 5335225 - DNA, 25 bp, Homo sapien
ctgcgcccagtcagtatgcttttcc

SEQ ID NO: 5335226 - DNA, 25 bp, Homo sapien
atacccctgaaatactagaatatac

SEQ ID NO: 5335227 - DNA, 25 bp, Homo sapien
ggagagcagttataaacttttcagg

SEQ ID NO: 5335228 - DNA, 25 bp, Homo sapien
gcacctggccttagtaggcttttca

SEQ ID NO: 5335229 - DNA, 25 bp, Homo sapien
gttttatcatagtgatggagagcag

SEQ ID NO: 5335230 - DNA, 25 bp, Homo sapien
cagtacctcaccagggagcattcca

SEQ ID NO: 5335231 - DNA, 25 bp, Homo sapien
tccagtatcatgcagggtcctgtga

SEQ ID NO: 5335232 - DNA, 25 bp, Homo sapien
tctgcagtacctcaccagggagcat

SEQ ID NO: 5335233 - DNA, 25 bp, Homo sapien
cagggagcattccagtatcatgcag

SEQ ID NO: 5335234 - DNA, 25 bp, Homo sapien
tctgtgatgtatgtatcctgttgac

SEQ ID NO: 5335235 - DNA, 25 bp, Homo sapien
tatacatgtgtgttgtcatatttgg

SEQ ID NO: 5335236 - DNA, 25 bp, Homo sapien
tgggcagcttgggtaagtacgcaac

SEQ ID NO: 5335237 - DNA, 25 bp, Homo sapien
aggattcttttctacattatacatg

SEQ ID NO: 5335238 - DNA, 25 bp, Homo sapien
tgccagctggcgttattcttttgat

SEQ ID NO: 5335239 - DNA, 25 bp, Homo sapien
tatgtctctaatccatgcctgctta

SEQ ID NO: 5335240 - DNA, 25 bp, Homo sapien
taagtgacgtatagcttatgtctct

SEQ ID NO: 5335241 - DNA, 25 bp, Homo sapien
gatagtttgctggagatgtttttgt

SEQ ID NO: 5335242 - DNA, 25 bp, Homo sapien
gacggactccctctgtttgataaag

SEQ ID NO: 5335243 - DNA, 25 bp, Homo sapien
cattgaaaatttgcagggaggaccc

SEQ ID NO: 5335244 - DNA, 25 bp, Homo sapien
gagaagttaagaccctcccagtgaa

SEQ ID NO: 5335245 - DNA, 25 bp, Homo sapien
aaagttctattccagatcagccagg

SEQ ID NO: 5335246 - DNA, 25 bp, Homo sapien
agtctgactccatctctatcttcac

SEQ ID NO: 5335247 - DNA, 25 bp, Homo sapien
tcatagtctgactccatctctatct

SEQ ID NO: 5335248 - DNA, 25 bp, Homo sapien
tagtctgactccatctctatcttca

SEQ ID NO: 5335249 - DNA, 25 bp, Homo sapien
catagtctgactccatctctatctt

SEQ ID NO: 5335250 - DNA, 25 bp, Homo sapien
gcaccatgaacactgggttccgtga

SEQ ID NO: 5335251 - DNA, 25 bp, Homo sapien
catgaacactgggttccgtgagtag

SEQ ID NO: 5335252 - DNA, 25 bp, Homo sapien
caccatgaacactgggttccgtgag

SEQ ID NO: 5335253 - DNA, 25 bp, Homo sapien
gtggcaccatgaacactgggttccg

SEQ ID NO: 5335254 - DNA, 25 bp, Homo sapien
caggatattttgaagtgcaaggtga

SEQ ID NO: 5335255 - DNA, 25 bp, Homo sapien
ctggacaggatattttgaagtgcaa

SEQ ID NO: 5335256 - DNA, 25 bp, Homo sapien
gacaggatattttgaagtgcaaggt

SEQ ID NO: 5335257 - DNA, 25 bp, Homo sapien
ggatattttgaagtgcaaggtgatg

SEQ ID NO: 5335258 - DNA, 25 bp, Homo sapien
ttcagtgatattacacttaagccat

SEQ ID NO: 5335259 - DNA, 25 bp, Homo sapien
gatattacacttaagccatgcctag

SEQ ID NO: 5335260 - DNA, 25 bp, Homo sapien
gtgatattacacttaagccatgcct

SEQ ID NO: 5335261 - DNA, 25 bp, Homo sapien
ttacacttaagccatgcctagtttt

SEQ ID NO: 5335262 - DNA, 25 bp, Homo sapien
ttcccggccatttcctagtctctta

SEQ ID NO: 5335263 - DNA, 25 bp, Homo sapien
gcttgggaaatcctagaccctccac

SEQ ID NO: 5335264 - DNA, 25 bp, Homo sapien
gacagctagcttgggaaatcctaga

SEQ ID NO: 5335265 - DNA, 25 bp, Homo sapien
agcaagggccttctactgagaggac

SEQ ID NO: 5335266 - DNA, 25 bp, Homo sapien
cggtcaagttctgtgtcactgaagg

SEQ ID NO: 5335267 - DNA, 25 bp, Homo sapien
caagttctgtgtcactgaaggaaga

SEQ ID NO: 5335268 - DNA, 25 bp, Homo sapien
cttcggtcaagttctgtgtcactga

SEQ ID NO: 5335269 - DNA, 25 bp, Homo sapien
tcaagttctgtgtcactgaaggaag

SEQ ID NO: 5335270 - DNA, 25 bp, Homo sapien
gagtgagtaactccaactggaagat

SEQ ID NO: 5335271 - DNA, 25 bp, Homo sapien
gagtaactccaactggaagatcttt

SEQ ID NO: 5335272 - DNA, 25 bp, Homo sapien
agagtgagtaactccaactggaaga

SEQ ID NO: 5335273 - DNA, 25 bp, Homo sapien
gtgagtaactccaactggaagatct

SEQ ID NO: 5335274 - DNA, 25 bp, Homo sapien
ggtttgagcaccatatttctccggg

SEQ ID NO: 5335275 - DNA, 25 bp, Homo sapien
ggagcaggtttgagcaccatatttc

SEQ ID NO: 5335276 - DNA, 25 bp, Homo sapien
agatgtggagcaggtttgagcacca

SEQ ID NO: 5335277 - DNA, 25 bp, Homo sapien
gagcaccatatttctccgggcttcc

SEQ ID NO: 5335278 - DNA, 25 bp, Homo sapien
ccatgtttggactgatgtggtctga

SEQ ID NO: 5335279 - DNA, 25 bp, Homo sapien
gatgtggtctgaaacaacatagaag

SEQ ID NO: 5335280 - DNA, 25 bp, Homo sapien
atgtttggactgatgtggtctgaaa

SEQ ID NO: 5335281 - DNA, 25 bp, Homo sapien
atgtggtctgaaacaacatagaaga

SEQ ID NO: 5335282 - DNA, 25 bp, Homo sapien
catgggaatctttataaccgaggga

SEQ ID NO: 5335283 - DNA, 25 bp, Homo sapien
taccgttttggggatctgattggac

SEQ ID NO: 5335284 - DNA, 25 bp, Homo sapien
tggcaatgcagtggataccgttttg

SEQ ID NO: 5335285 - DNA, 25 bp, Homo sapien
gattggacactttccatgggaatct

SEQ ID NO: 5335286 - DNA, 25 bp, Homo sapien
taccctaggcaaaggcgcaagcaaa

SEQ ID NO: 5335287 - DNA, 25 bp, Homo sapien
catgcattatgggactcttcctgga

SEQ ID NO: 5335288 - DNA, 25 bp, Homo sapien
aaatcacgagaacaggacagggtgg

SEQ ID NO: 5335289 - DNA, 25 bp, Homo sapien
ttgggaaccaagcacagcattagga

SEQ ID NO: 5335290 - DNA, 25 bp, Homo sapien
catcacagtcctcgtgggccccttt

SEQ ID NO: 5335291 - DNA, 25 bp, Homo sapien
tcatcacagtcctcgtgggcccctt

SEQ ID NO: 5335292 - DNA, 25 bp, Homo sapien
atcacagtcctcgtgggcccctttt

SEQ ID NO: 5335293 - DNA, 25 bp, Homo sapien
tccagaagccttcgaacgatgatga

SEQ ID NO: 5335294 - DNA, 25 bp, Homo sapien
aagccttcgaacgatgatgaggccc

SEQ ID NO: 5335295 - DNA, 25 bp, Homo sapien
tgaaatccagaagccttcgaacgat

SEQ ID NO: 5335296 - DNA, 25 bp, Homo sapien
agatgaaatccagaagccttcgaac

SEQ ID NO: 5335297 - DNA, 25 bp, Homo sapien
gccaccgtggatttgaggatccaga

SEQ ID NO: 5335298 - DNA, 25 bp, Homo sapien
tgcttggctggcatcaggaagagct

SEQ ID NO: 5335299 - DNA, 25 bp, Homo sapien
ggaagagcttgcagcgttcccagaa

SEQ ID NO: 5335300 - DNA, 25 bp, Homo sapien
agcaccgccaggcagaggatctgca

SEQ ID NO: 5335301 - DNA, 25 bp, Homo sapien
gagtcagcttcttctggattttgaa

SEQ ID NO: 5335302 - DNA, 25 bp, Homo sapien
tggagtcagcttcttctggattttg

SEQ ID NO: 5335303 - DNA, 25 bp, Homo sapien
tggattttgaattctgaccctccgg

SEQ ID NO: 5335304 - DNA, 25 bp, Homo sapien
tgaattctgaccctccggtccccat

SEQ ID NO: 5335305 - DNA, 25 bp, Homo sapien
ggaggccacgcccatgtagaggaag

SEQ ID NO: 5335306 - DNA, 25 bp, Homo sapien
aagactccgtacagcaccggcaggg

SEQ ID NO: 5335307 - DNA, 25 bp, Homo sapien
gggaggccacgcccatgtagaggaa

SEQ ID NO: 5335308 - DNA, 25 bp, Homo sapien
acgatgatgccggttactctctgtt

SEQ ID NO: 5335309 - DNA, 25 bp, Homo sapien
atgaagacgatgatgccggttactc

SEQ ID NO: 5335310 - DNA, 25 bp, Homo sapien
gaagacagagattcccgtcaggatg

SEQ ID NO: 5335311 - DNA, 25 bp, Homo sapien
aagacagagattcccgtcaggatga

SEQ ID NO: 5335312 - DNA, 25 bp, Homo sapien
ggtccagatggtagccggcagcctt

SEQ ID NO: 5335313 - DNA, 25 bp, Homo sapien
agccacgtaccaggggagccccata

SEQ ID NO: 5335314 - DNA, 25 bp, Homo sapien
gagccccataaaggagcacaaagcc

SEQ ID NO: 5335315 - DNA, 25 bp, Homo sapien
cttgaggctgtcgatgtgggcgatg

SEQ ID NO: 5335316 - DNA, 25 bp, Homo sapien
gggagccagttcctcctggatgcaa

SEQ ID NO: 5335317 - DNA, 25 bp, Homo sapien
ccagttcctcctggatgcaaccatt

SEQ ID NO: 5335318 - DNA, 25 bp, Homo sapien
agtttctggggagccagttcctcct

SEQ ID NO: 5335319 - DNA, 25 bp, Homo sapien
ttctggggagccagttcctcctgga

SEQ ID NO: 5335320 - DNA, 25 bp, Homo sapien
aggatgcttgctgggtatacccacc

SEQ ID NO: 5335321 - DNA, 25 bp, Homo sapien
tgacaatgacggcagtgatctgctg

SEQ ID NO: 5335322 - DNA, 25 bp, Homo sapien
tcagtttgttctccttccggttgac

SEQ ID NO: 5335323 - DNA, 25 bp, Homo sapien
gggccacgaaccagcctcggtcagg

SEQ ID NO: 5335324 - DNA, 25 bp, Homo sapien
gtcccagggcacttgtcgcctggcc

SEQ ID NO: 5335325 - DNA, 25 bp, Homo sapien
ggcacttgtcgcctggcctgctgtc

SEQ ID NO: 5335326 - DNA, 25 bp, Homo sapien
cagggcacttgtcgcctggcctgct

SEQ ID NO: 5335327 - DNA, 25 bp, Homo sapien
ccagggcacttgtcgcctggcctgc

SEQ ID NO: 5335328 - DNA, 25 bp, Homo sapien
aggcatcgattccacagaacatcag

SEQ ID NO: 5335329 - DNA, 25 bp, Homo sapien
cttgatgacactgggcacatgcagc

SEQ ID NO: 5335330 - DNA, 25 bp, Homo sapien
gtttctaggccaaaacaggcatcga

SEQ ID NO: 5335331 - DNA, 25 bp, Homo sapien
catgcagcttgggagtttctaggcc

SEQ ID NO: 5335332 - DNA, 25 bp, Homo sapien
caagagtctcttgttccgctgtttc

SEQ ID NO: 5335333 - DNA, 25 bp, Homo sapien
gggatcattggctacactcagacct

SEQ ID NO: 5335334 - DNA, 25 bp, Homo sapien
ccagaagtctcaggacagatggtcc

SEQ ID NO: 5335335 - DNA, 25 bp, Homo sapien
tggaggcccttcctagaccaagttc

SEQ ID NO: 5335336 - DNA, 25 bp, Homo sapien
gttccgtaaacacatggcttgtgtg

SEQ ID NO: 5335337 - DNA, 25 bp, Homo sapien
cttgttccgtaaacacatggcttgt

SEQ ID NO: 5335338 - DNA, 25 bp, Homo sapien
ctttccattgtcgaagctgagaaca

SEQ ID NO: 5335339 - DNA, 25 bp, Homo sapien
cattgtcgaagctgagaacaatcat

SEQ ID NO: 5335340 - DNA, 25 bp, Homo sapien
cttggtaggaaaatagcggctgaat

SEQ ID NO: 5335341 - DNA, 25 bp, Homo sapien
aaatagcggctgaatttgaacttct

SEQ ID NO: 5335342 - DNA, 25 bp, Homo sapien
ggtaggaaaatagcggctgaatttg

SEQ ID NO: 5335343 - DNA, 25 bp, Homo sapien
ggaaaatagcggctgaatttgaact

SEQ ID NO: 5335344 - DNA, 25 bp, Homo sapien
acttgcaggaattcccaagcaggcg

SEQ ID NO: 5335345 - DNA, 25 bp, Homo sapien
ccaggtctgggataaacttgcagga

SEQ ID NO: 5335346 - DNA, 25 bp, Homo sapien
gatgaaggacatgagcgccaggtct

SEQ ID NO: 5335347 - DNA, 25 bp, Homo sapien
catggagtatgtcccaaagaaaagg

SEQ ID NO: 5335348 - DNA, 25 bp, Homo sapien
ccaagcacaggagagaatgggtcag

SEQ ID NO: 5335349 - DNA, 25 bp, Homo sapien
gcacaggagagaatgggtcagcatc

SEQ ID NO: 5335350 - DNA, 25 bp, Homo sapien
tggagaccaagcacaggagagaatg

SEQ ID NO: 5335351 - DNA, 25 bp, Homo sapien
cttggagaccaagcacaggagagaa

SEQ ID NO: 5335352 - DNA, 25 bp, Homo sapien
ggaaaggcagaccataccttaggcc

SEQ ID NO: 5335353 - DNA, 25 bp, Homo sapien
cttcatctggaattgaacttctatc

SEQ ID NO: 5335354 - DNA, 25 bp, Homo sapien
tatcattaagccacttaggctggga

SEQ ID NO: 5335355 - DNA, 25 bp, Homo sapien
tgctggctcctgaagaccactgtca

SEQ ID NO: 5335356 - DNA, 25 bp, Homo sapien
cagagaagcgttggtgtctggtgcc

SEQ ID NO: 5335357 - DNA, 25 bp, Homo sapien
agaagcgttggtgtctggtgccaat

SEQ ID NO: 5335358 - DNA, 25 bp, Homo sapien
gagaagcgttggtgtctggtgccaa

SEQ ID NO: 5335359 - DNA, 25 bp, Homo sapien
agcgttggtgtctggtgccaatggg

SEQ ID NO: 5335360 - DNA, 25 bp, Homo sapien
cagttccttagagccaaggcctggc

SEQ ID NO: 5335361 - DNA, 25 bp, Homo sapien
gggctgggagctgcattcccaaccc

SEQ ID NO: 5335362 - DNA, 25 bp, Homo sapien
tgagcacatgacacggggcagggtc

SEQ ID NO: 5335363 - DNA, 25 bp, Homo sapien
ctcactttgccccagttagggaagg

SEQ ID NO: 5335364 - DNA, 25 bp, Homo sapien
gaagctctaccaacccagaggtttg

SEQ ID NO: 5335365 - DNA, 25 bp, Homo sapien
tagagaactcctggctgacgcttga

SEQ ID NO: 5335366 - DNA, 25 bp, Homo sapien
tactcacttgggattgaaagcagcc

SEQ ID NO: 5335367 - DNA, 25 bp, Homo sapien
gccaaatcagtgtgtgcagcattca

SEQ ID NO: 5335368 - DNA, 25 bp, Homo sapien
ccagccagagtttccgattcagcag

SEQ ID NO: 5335369 - DNA, 25 bp, Homo sapien
catgaccccaaagaatgaggtgaca

SEQ ID NO: 5335370 - DNA, 25 bp, Homo sapien
gtaggaggctacgaatttgtatttc

SEQ ID NO: 5335371 - DNA, 25 bp, Homo sapien
gaaccatgacaatagcatgacccca

SEQ ID NO: 5335372 - DNA, 25 bp, Homo sapien
cagccttggtgcttggagatgtgtg

SEQ ID NO: 5335373 - DNA, 25 bp, Homo sapien
ggacctcagtttgctctctgtgagt

SEQ ID NO: 5335374 - DNA, 25 bp, Homo sapien
tggacctcagtttgctctctgtgag

SEQ ID NO: 5335375 - DNA, 25 bp, Homo sapien
gtgcttggagatgtgtgcatagacc

SEQ ID NO: 5335376 - DNA, 25 bp, Homo sapien
gctcatcgtatcatgacttgatgga

SEQ ID NO: 5335377 - DNA, 25 bp, Homo sapien
cttacacggtatgtggccacacggg

SEQ ID NO: 5335378 - DNA, 25 bp, Homo sapien
tcttggggagagctcatcgtatcat

SEQ ID NO: 5335379 - DNA, 25 bp, Homo sapien
ttacacggtatgtggccacacgggc

SEQ ID NO: 5335380 - DNA, 25 bp, Homo sapien
gcgacacactcgcacttgtaggtag

SEQ ID NO: 5335381 - DNA, 25 bp, Homo sapien
tctgtggccactaggataaggcact

SEQ ID NO: 5335382 - DNA, 25 bp, Homo sapien
cagaggcggaactccatgtagtcca

SEQ ID NO: 5335383 - DNA, 25 bp, Homo sapien
gacagctgagtgtaggccaatccag

SEQ ID NO: 5335384 - DNA, 25 bp, Homo sapien
gaagtcgaagaggagcttctcaaag

SEQ ID NO: 5335385 - DNA, 25 bp, Homo sapien
tgctgaagtcgaagaggagcttctc

SEQ ID NO: 5335386 - DNA, 25 bp, Homo sapien
ctgaagtcgaagaggagcttctcaa

SEQ ID NO: 5335387 - DNA, 25 bp, Homo sapien
gctgagaatgatgagaggctgtccc

SEQ ID NO: 5335388 - DNA, 25 bp, Homo sapien
gccatgtggacatgcccaaaaggca

SEQ ID NO: 5335389 - DNA, 25 bp, Homo sapien
taagggacgcaatgtcagctgtgtg

SEQ ID NO: 5335390 - DNA, 25 bp, Homo sapien
tagacagctgggtgaaccacggtat

SEQ ID NO: 5335391 - DNA, 25 bp, Homo sapien
caatggctctactttgaaggcctcc

SEQ ID NO: 5335392 - DNA, 25 bp, Homo sapien
catagaagtcacttgggaaccaggg

SEQ ID NO: 5335393 - DNA, 25 bp, Homo sapien
gcccaccaaaggtgatcgcgttggt

SEQ ID NO: 5335394 - DNA, 25 bp, Homo sapien
gatacagccgaggtagatgaatagg

SEQ ID NO: 5335395 - DNA, 25 bp, Homo sapien
tgataattgtcggtggcatccccca

SEQ ID NO: 5335396 - DNA, 25 bp, Homo sapien
ctgctcaagacaggcccaggggctg

SEQ ID NO: 5335397 - DNA, 25 bp, Homo sapien
gacaggcccaggggctgctttctca

SEQ ID NO: 5335398 - DNA, 25 bp, Homo sapien
tcaagacaggcccaggggctgcttt

SEQ ID NO: 5335399 - DNA, 25 bp, Homo sapien
aggcccaggggctgctttctcacca

SEQ ID NO: 5335400 - DNA, 25 bp, Homo sapien
catttagggccagggatgaattcct

SEQ ID NO: 5335401 - DNA, 25 bp, Homo sapien
attcctgtaggactgagtttgtggt

SEQ ID NO: 5335402 - DNA, 25 bp, Homo sapien
gaaaggaacttgaccagggtggatg

SEQ ID NO: 5335403 - DNA, 25 bp, Homo sapien
cccacattgggaagggtggacatag

SEQ ID NO: 5335404 - DNA, 25 bp, Homo sapien
atccccgctgcttgttccgccggcc

SEQ ID NO: 5335405 - DNA, 25 bp, Homo sapien
catcatccccgctgcttgttccgcc

SEQ ID NO: 5335406 - DNA, 25 bp, Homo sapien
tcatccccgctgcttgttccgccgg

SEQ ID NO: 5335407 - DNA, 25 bp, Homo sapien
tcctgtccagataagttcctccccg

SEQ ID NO: 5335408 - DNA, 25 bp, Homo sapien
ctctgctagggagaacacagatttc

SEQ ID NO: 5335409 - DNA, 25 bp, Homo sapien
gaggaaggacgatgacctcatccag

SEQ ID NO: 5335410 - DNA, 25 bp, Homo sapien
gctttgtaggccacgtcactgaaga

SEQ ID NO: 5335411 - DNA, 25 bp, Homo sapien
tgcgatcagatcttcccgattgcgg

SEQ ID NO: 5335412 - DNA, 25 bp, Homo sapien
caatccggatatttgggtcccattc

SEQ ID NO: 5335413 - DNA, 25 bp, Homo sapien
ggcacggccaatttcattgtaggat

SEQ ID NO: 5335414 - DNA, 25 bp, Homo sapien
tttcattgtaggattttgctctccc

SEQ ID NO: 5335415 - DNA, 25 bp, Homo sapien
gggttgcaatggcacggccaatttc

SEQ ID NO: 5335416 - DNA, 25 bp, Homo sapien
cagaaggtcccagtagtataaacag

SEQ ID NO: 5335417 - DNA, 25 bp, Homo sapien
gctgcccaagcttacctgacaactt

SEQ ID NO: 5335418 - DNA, 25 bp, Homo sapien
tgcccaagcttacctgacaacttct

SEQ ID NO: 5335419 - DNA, 25 bp, Homo sapien
ttgctgcccaagcttacctgacaac

SEQ ID NO: 5335420 - DNA, 25 bp, Homo sapien
ctctcctagttgttgcctccttctc

SEQ ID NO: 5335421 - DNA, 25 bp, Homo sapien
tggctggtctaggaagtccacctcg

SEQ ID NO: 5335422 - DNA, 25 bp, Homo sapien
cgagcacgttggacgcttctgagtc

SEQ ID NO: 5335423 - DNA, 25 bp, Homo sapien
cccagcatggccgactggatgaggc

SEQ ID NO: 5335424 - DNA, 25 bp, Homo sapien
cacgaacgcgatgaatggctggtct

SEQ ID NO: 5335425 - DNA, 25 bp, Homo sapien
actgcagtctttcccgcgggcacag

SEQ ID NO: 5335426 - DNA, 25 bp, Homo sapien
ggagcatgctagtgttccaaccaac

SEQ ID NO: 5335427 - DNA, 25 bp, Homo sapien
gatgtgggcttgtataaccagggcc

SEQ ID NO: 5335428 - DNA, 25 bp, Homo sapien
gcttgtataaccagggccctgctga

SEQ ID NO: 5335429 - DNA, 25 bp, Homo sapien
aatctggctctgcactgcagagtca

SEQ ID NO: 5335430 - DNA, 25 bp, Homo sapien
aggctcctcgccaagtctcaggttt

SEQ ID NO: 5335431 - DNA, 25 bp, Homo sapien
gctcctcgccaagtctcaggtttcc

SEQ ID NO: 5335432 - DNA, 25 bp, Homo sapien
tcctcgccaagtctcaggtttcctt

SEQ ID NO: 5335433 - DNA, 25 bp, Homo sapien
ggctcctcgccaagtctcaggtttc

SEQ ID NO: 5335434 - DNA, 25 bp, Homo sapien
tgtaggagtggaactctgcccatag

SEQ ID NO: 5335435 - DNA, 25 bp, Homo sapien
cccataggggatccctgctcctgaa

SEQ ID NO: 5335436 - DNA, 25 bp, Homo sapien
gccctccattgcagctaagtgcagg

SEQ ID NO: 5335437 - DNA, 25 bp, Homo sapien
gggatcttcctggaactcccactcc

SEQ ID NO: 5335438 - DNA, 25 bp, Homo sapien
atgtcattcatgcttctgctctggg

SEQ ID NO: 5335439 - DNA, 25 bp, Homo sapien
gaaatgtcattcatgcttctgctct

SEQ ID NO: 5335440 - DNA, 25 bp, Homo sapien
actgggcatccctatgtggcataac

SEQ ID NO: 5335441 - DNA, 25 bp, Homo sapien
ggttcccacccctaagcagtgtcag

SEQ ID NO: 5335442 - DNA, 25 bp, Homo sapien
tgataactgagtggaaggtcttccc

SEQ ID NO: 5335443 - DNA, 25 bp, Homo sapien
cattcgtgcctcttgtcccagtggt

SEQ ID NO: 5335444 - DNA, 25 bp, Homo sapien
gcatgagactgccacccagtgatgg

SEQ ID NO: 5335445 - DNA, 25 bp, Homo sapien
ctccatggtggcatgagactgccac

SEQ ID NO: 5335446 - DNA, 25 bp, Homo sapien
aaaacagggttaatgtcagtttgat

SEQ ID NO: 5335447 - DNA, 25 bp, Homo sapien
cagggttaatgtcagtttgatgaag

SEQ ID NO: 5335448 - DNA, 25 bp, Homo sapien
aatttgcactctgccgcatccgcag

SEQ ID NO: 5335449 - DNA, 25 bp, Homo sapien
acagacgtccgtaatttgcactctg

SEQ ID NO: 5335450 - DNA, 25 bp, Homo sapien
tcttccgtggagtggtgtagactcg

SEQ ID NO: 5335451 - DNA, 25 bp, Homo sapien
gcaggtcttccgtggagtggtgtag

SEQ ID NO: 5335452 - DNA, 25 bp, Homo sapien
tgcatgtcccatgcctaccagcgta

SEQ ID NO: 5335453 - DNA, 25 bp, Homo sapien
ggcctgatactggccctgcatgtcc

SEQ ID NO: 5335454 - DNA, 25 bp, Homo sapien
ccatgcctaccagcgtaaggcctga

SEQ ID NO: 5335455 - DNA, 25 bp, Homo sapien
gcctaccagcgtaaggcctgactca

SEQ ID NO: 5335456 - DNA, 25 bp, Homo sapien
tggccgcaggagaccatcctcaatc

SEQ ID NO: 5335457 - DNA, 25 bp, Homo sapien
cctcctcaggaggacgtaactgacc

SEQ ID NO: 5335458 - DNA, 25 bp, Homo sapien
gactgacttcccaatgtcagctaag

SEQ ID NO: 5335459 - DNA, 25 bp, Homo sapien
tcttggtttggtggcggtgcctcct

SEQ ID NO: 5335460 - DNA, 25 bp, Homo sapien
tacggagctcgaagaggctgtgcag

SEQ ID NO: 5335461 - DNA, 25 bp, Homo sapien
gctgtgcagggatagtgtggacacg

SEQ ID NO: 5335462 - DNA, 25 bp, Homo sapien
cgtccccgtctgcaggcaggtacgg

SEQ ID NO: 5335463 - DNA, 25 bp, Homo sapien
ctatgatctgtggtaaggagccact

SEQ ID NO: 5335464 - DNA, 25 bp, Homo sapien
tacatttccctaaagtctcccagac

SEQ ID NO: 5335465 - DNA, 25 bp, Homo sapien
gatttcctcttcacgtaactgtata

SEQ ID NO: 5335466 - DNA, 25 bp, Homo sapien
tccagaaagcttatgtcagtgccca

SEQ ID NO: 5335467 - DNA, 25 bp, Homo sapien
gcccactgccaccaatgagatctta

SEQ ID NO: 5335468 - DNA, 25 bp, Homo sapien
catacctcctacctctgatctgggt

SEQ ID NO: 5335469 - DNA, 25 bp, Homo sapien
tgggtcccagtgatagggcaatcaa

SEQ ID NO: 5335470 - DNA, 25 bp, Homo sapien
ggcaatcaaagttggacagatcaga

SEQ ID NO: 5335471 - DNA, 25 bp, Homo sapien
gatgtgctctctaggatatagcgag

SEQ ID NO: 5335472 - DNA, 25 bp, Homo sapien
cttgagtagggtggatgtgaacatg

SEQ ID NO: 5335473 - DNA, 25 bp, Homo sapien
gagtagggtggatgtgaacatggaa

SEQ ID NO: 5335474 - DNA, 25 bp, Homo sapien
tgagtagggtggatgtgaacatgga

SEQ ID NO: 5335475 - DNA, 25 bp, Homo sapien
ttgagtagggtggatgtgaacatgg

SEQ ID NO: 5335476 - DNA, 25 bp, Homo sapien
ctgaggattggccaaaggcagggac

SEQ ID NO: 5335477 - DNA, 25 bp, Homo sapien
tgaggattggccaaaggcagggaca

SEQ ID NO: 5335478 - DNA, 25 bp, Homo sapien
cttgatccaggttctgattcatata

SEQ ID NO: 5335479 - DNA, 25 bp, Homo sapien
ttgatccaggttctgattcatataa

SEQ ID NO: 5335480 - DNA, 25 bp, Homo sapien
tgatccaggttctgattcatataaa

SEQ ID NO: 5335481 - DNA, 25 bp, Homo sapien
ataagcctcaagtgtcagtgttgga

SEQ ID NO: 5335482 - DNA, 25 bp, Homo sapien
ctcttgggagcattgggcactgctg

SEQ ID NO: 5335483 - DNA, 25 bp, Homo sapien
tgaacagtccagttaagtcccaagg

SEQ ID NO: 5335484 - DNA, 25 bp, Homo sapien
gaacagtccagttaagtcccaaggc

SEQ ID NO: 5335485 - DNA, 25 bp, Homo sapien
cagtttctgctctccgtatatatgg

SEQ ID NO: 5335486 - DNA, 25 bp, Homo sapien
tgctccacacgcttttctccatggc

SEQ ID NO: 5335487 - DNA, 25 bp, Homo sapien
tcccttggctcctgcgacttctccg

SEQ ID NO: 5335488 - DNA, 25 bp, Homo sapien
gtctaccccagcctgcttgttactt

SEQ ID NO: 5335489 - DNA, 25 bp, Homo sapien
actccatctggtctccgtcatgctg

SEQ ID NO: 5335490 - DNA, 25 bp, Homo sapien
cgtcatgctgcagagtatccatctc

SEQ ID NO: 5335491 - DNA, 25 bp, Homo sapien
tggtctccgtcatgctgcagagtat

SEQ ID NO: 5335492 - DNA, 25 bp, Homo sapien
tatccatctctgtaaagagggtggg

SEQ ID NO: 5335493 - DNA, 25 bp, Homo sapien
cttcatggacctctactcttttctt

SEQ ID NO: 5335494 - DNA, 25 bp, Homo sapien
tcttcatggacctctactcttttct

SEQ ID NO: 5335495 - DNA, 25 bp, Homo sapien
tgggtctctgagttagctgggcctt

SEQ ID NO: 5335496 - DNA, 25 bp, Homo sapien
tcctgatggtttctgggagacagag

SEQ ID NO: 5335497 - DNA, 25 bp, Homo sapien
caatgaattggagcaggaatggttc

SEQ ID NO: 5335498 - DNA, 25 bp, Homo sapien
ctggccacaatgaattggagcagga

SEQ ID NO: 5335499 - DNA, 25 bp, Homo sapien
cacagcagggcagaactccatacct

SEQ ID NO: 5335500 - DNA, 25 bp, Homo sapien
tgccttaaacgaccaattttgagga

SEQ ID NO: 5335501 - DNA, 25 bp, Homo sapien
ctatgtgccttaaacgaccaatttt

SEQ ID NO: 5335502 - DNA, 25 bp, Homo sapien
gggcagaactccatacctgggcttt

SEQ ID NO: 5335503 - DNA, 25 bp, Homo sapien
cactccctgggccagtcagttcctg

SEQ ID NO: 5335504 - DNA, 25 bp, Homo sapien
agcccaatgtggataggagggcatt

SEQ ID NO: 5335505 - DNA, 25 bp, Homo sapien
tgctgataagatccatgctgctgtc

SEQ ID NO: 5335506 - DNA, 25 bp, Homo sapien
cccagtggactttttgcaggcctga

SEQ ID NO: 5335507 - DNA, 25 bp, Homo sapien
caggggaggcagggttactgaaaat

SEQ ID NO: 5335508 - DNA, 25 bp, Homo sapien
aggcagggttactgaaaattggcat

SEQ ID NO: 5335509 - DNA, 25 bp, Homo sapien
gaggcagggttactgaaaattggca

SEQ ID NO: 5335510 - DNA, 25 bp, Homo sapien
ggaggcagggttactgaaaattggc

SEQ ID NO: 5335511 - DNA, 25 bp, Homo sapien
ccatccactatccagtgggtagtgt

SEQ ID NO: 5335512 - DNA, 25 bp, Homo sapien
catccactatccagtgggtagtgtt

SEQ ID NO: 5335513 - DNA, 25 bp, Homo sapien
gtgggtagtgttcttttggatgatt

SEQ ID NO: 5335514 - DNA, 25 bp, Homo sapien
ggtagtgttcttttggatgatttgc

SEQ ID NO: 5335515 - DNA, 25 bp, Homo sapien
gactgtacgtctcagtttcatgagc

SEQ ID NO: 5335516 - DNA, 25 bp, Homo sapien
gtttcccaagctgaccttcagattt

SEQ ID NO: 5335517 - DNA, 25 bp, Homo sapien
tacttgtctggctcctctcggctct

SEQ ID NO: 5335518 - DNA, 25 bp, Homo sapien
aggctgtttcccaagctgaccttca

SEQ ID NO: 5335519 - DNA, 25 bp, Homo sapien
gctggtaatctgggcttgtaggtct

SEQ ID NO: 5335520 - DNA, 25 bp, Homo sapien
gctcctcgagagcctcgatctctgt

SEQ ID NO: 5335521 - DNA, 25 bp, Homo sapien
tggtaatctgggcttgtaggtcttt

SEQ ID NO: 5335522 - DNA, 25 bp, Homo sapien
gaagagcagctcctcgagagcctcg

SEQ ID NO: 5335523 - DNA, 25 bp, Homo sapien
tggagcccacggatgtcgctctcta

SEQ ID NO: 5335524 - DNA, 25 bp, Homo sapien
tgtggagcccacggatgtcgctctc

SEQ ID NO: 5335525 - DNA, 25 bp, Homo sapien
agcccacggatgtcgctctctacag

SEQ ID NO: 5335526 - DNA, 25 bp, Homo sapien
gagcccacggatgtcgctctctaca

SEQ ID NO: 5335527 - DNA, 25 bp, Homo sapien
tccagcttcctgttatcagtctcca

SEQ ID NO: 5335528 - DNA, 25 bp, Homo sapien
agatctgagcgctcatgtcctcaat

SEQ ID NO: 5335529 - DNA, 25 bp, Homo sapien
aagtcattggcagcaagatgggcac

SEQ ID NO: 5335530 - DNA, 25 bp, Homo sapien
gggcactgtcgatctgcacaatgtg

SEQ ID NO: 5335531 - DNA, 25 bp, Homo sapien
tggagcaggacacagagatccagga

SEQ ID NO: 5335532 - DNA, 25 bp, Homo sapien
atccaggaaccagagcccccggcac

SEQ ID NO: 5335533 - DNA, 25 bp, Homo sapien
gagcaggacacagagatccaggaac

SEQ ID NO: 5335534 - DNA, 25 bp, Homo sapien
tggtggagcaggacacagagatcca

SEQ ID NO: 5335535 - DNA, 25 bp, Homo sapien
cacactgctgaccagccaggcgccg

SEQ ID NO: 5335536 - DNA, 25 bp, Homo sapien
acactgctgaccagccaggcgccgt

SEQ ID NO: 5335537 - DNA, 25 bp, Homo sapien
agccaggcgccgtagctgggtggct

SEQ ID NO: 5335538 - DNA, 25 bp, Homo sapien
accagccaggcgccgtagctgggtg

SEQ ID NO: 5335539 - DNA, 25 bp, Homo sapien
acgatggcagtagccgcccatctga

SEQ ID NO: 5335540 - DNA, 25 bp, Homo sapien
gggtaacgatggcagtagccgccca

SEQ ID NO: 5335541 - DNA, 25 bp, Homo sapien
tctgattgccttttcataagcccca

SEQ ID NO: 5335542 - DNA, 25 bp, Homo sapien
agtagccgcccatctgattgccttt

SEQ ID NO: 5335543 - DNA, 25 bp, Homo sapien
ctttctgatccggaaatctcctcct

SEQ ID NO: 5335544 - DNA, 25 bp, Homo sapien
cctcctgtggttagtgtggtccagc

SEQ ID NO: 5335545 - DNA, 25 bp, Homo sapien
gtgtggtccagctttcctaccccag

SEQ ID NO: 5335546 - DNA, 25 bp, Homo sapien
tgatccggaaatctcctcctgtggt

SEQ ID NO: 5335547 - DNA, 25 bp, Homo sapien
gatccaaatcccagggaggccagaa

SEQ ID NO: 5335548 - DNA, 25 bp, Homo sapien
tgtgttcttagctctggaaaccagg

SEQ ID NO: 5335549 - DNA, 25 bp, Homo sapien
cagggaggccagaaccacttgctct

SEQ ID NO: 5335550 - DNA, 25 bp, Homo sapien
tggaaaccaggatccaaatcccagg

SEQ ID NO: 5335551 - DNA, 25 bp, Homo sapien
attggagattgacttctgaggctca

SEQ ID NO: 5335552 - DNA, 25 bp, Homo sapien
tgttgggtggcaagaagggctctct

SEQ ID NO: 5335553 - DNA, 25 bp, Homo sapien
cagtggcggccagccatgtgaccaa

SEQ ID NO: 5335554 - DNA, 25 bp, Homo sapien
gagattgacttctgaggctcagtgg

SEQ ID NO: 5335555 - DNA, 25 bp, Homo sapien
tcttcttttcaacctgccctaggaa

SEQ ID NO: 5335556 - DNA, 25 bp, Homo sapien
tcaacctgccctaggaagggcaggt

SEQ ID NO: 5335557 - DNA, 25 bp, Homo sapien
aagggcaggttcttgcgttgtggga

SEQ ID NO: 5335558 - DNA, 25 bp, Homo sapien
caggttcttgcgttgtgggataggg

SEQ ID NO: 5335559 - DNA, 25 bp, Homo sapien
tcctcctgcacaaagtactcttttg

SEQ ID NO: 5335560 - DNA, 25 bp, Homo sapien
caaaatcagtccattcgttaacttt

SEQ ID NO: 5335561 - DNA, 25 bp, Homo sapien
cctcttattcctgccctgccaatct

SEQ ID NO: 5335562 - DNA, 25 bp, Homo sapien
cattgatactcataacctcttattc

SEQ ID NO: 5335563 - DNA, 25 bp, Homo sapien
catgtccagggttgagaagggaaca

SEQ ID NO: 5335564 - DNA, 25 bp, Homo sapien
caggtggtacaatattggctgcccc

SEQ ID NO: 5335565 - DNA, 25 bp, Homo sapien
tgtgccaagctttggcaggtggtac

SEQ ID NO: 5335566 - DNA, 25 bp, Homo sapien
acagtatgtgcaatttttggcttcc

SEQ ID NO: 5335567 - DNA, 25 bp, Homo sapien
aggaactcgttcttcagacagatcc

SEQ ID NO: 5335568 - DNA, 25 bp, Homo sapien
cagacagatccccaaatggacccag

SEQ ID NO: 5335569 - DNA, 25 bp, Homo sapien
cgttcttcagacagatccccaaatg

SEQ ID NO: 5335570 - DNA, 25 bp, Homo sapien
gatccccaaatggacccagaaacag

SEQ ID NO: 5335571 - DNA, 25 bp, Homo sapien
tctggaaggttatcttacactccca

SEQ ID NO: 5335572 - DNA, 25 bp, Homo sapien
ttatctggaaggttatcttacactc

SEQ ID NO: 5335573 - DNA, 25 bp, Homo sapien
tagcagcaactctttatctggaagg

SEQ ID NO: 5335574 - DNA, 25 bp, Homo sapien
gcagcaactctttatctggaaggtt

SEQ ID NO: 5335575 - DNA, 25 bp, Homo sapien
gctcatgagctcacagctgaattcc

SEQ ID NO: 5335576 - DNA, 25 bp, Homo sapien
agtgcagtggcctgtggctcctggg

SEQ ID NO: 5335577 - DNA, 25 bp, Homo sapien
tgcagtggcctgtggctcctgggcc

SEQ ID NO: 5335578 - DNA, 25 bp, Homo sapien
cccagtgcagtggcctgtggctcct

SEQ ID NO: 5335579 - DNA, 25 bp, Homo sapien
cagtggcctgtggctcctgggccct

SEQ ID NO: 5335580 - DNA, 25 bp, Homo sapien
gatgtttctatgtgcttgagtctgt

SEQ ID NO: 5335581 - DNA, 25 bp, Homo sapien
aacctgatagtaggccccgtgccca

SEQ ID NO: 5335582 - DNA, 25 bp, Homo sapien
tgtaaaattatgtaccctgtaccca

SEQ ID NO: 5335583 - DNA, 25 bp, Homo sapien
caggaaggtttaatacgatgtgtgt

SEQ ID NO: 5335584 - DNA, 25 bp, Homo sapien
tcatccctcaaaccactgtgttctg

SEQ ID NO: 5335585 - DNA, 25 bp, Homo sapien
atccctcaaaccactgtgttctgat

SEQ ID NO: 5335586 - DNA, 25 bp, Homo sapien
catccctcaaaccactgtgttctga

SEQ ID NO: 5335587 - DNA, 25 bp, Homo sapien
ccttactggtcacagacatttctgt

SEQ ID NO: 5335588 - DNA, 25 bp, Homo sapien
gatctttgcttgatagacctctcta

SEQ ID NO: 5335589 - DNA, 25 bp, Homo sapien
ttgccaagtggacaattagacagtg

SEQ ID NO: 5335590 - DNA, 25 bp, Homo sapien
tcagatctttgcttgatagacctct

SEQ ID NO: 5335591 - DNA, 25 bp, Homo sapien
caattagacagtggacacttttcag

SEQ ID NO: 5335592 - DNA, 25 bp, Homo sapien
gaactccttggattggcactaatgg

SEQ ID NO: 5335593 - DNA, 25 bp, Homo sapien
aatacggccacattgttttccagag

SEQ ID NO: 5335594 - DNA, 25 bp, Homo sapien
cagagtggctgtagcacttcacaca

SEQ ID NO: 5335595 - DNA, 25 bp, Homo sapien
aattgccagtagcttcccaatgcag

SEQ ID NO: 5335596 - DNA, 25 bp, Homo sapien
gatctctttcaatgggtgacttcac

SEQ ID NO: 5335597 - DNA, 25 bp, Homo sapien
catagaaataacaggcatgccatac

SEQ ID NO: 5335598 - DNA, 25 bp, Homo sapien
gacttttatggccagcttctctggg

SEQ ID NO: 5335599 - DNA, 25 bp, Homo sapien
gatgctaggtctcaccaagatggtg

SEQ ID NO: 5335600 - DNA, 25 bp, Homo sapien
ctttcatcggcattggcttcacaga

SEQ ID NO: 5335601 - DNA, 25 bp, Homo sapien
tcgggcaccagtagaacaatacgct

SEQ ID NO: 5335602 - DNA, 25 bp, Homo sapien
caggagagctctttgctcgggcacc

SEQ ID NO: 5335603 - DNA, 25 bp, Homo sapien
gacagtgaaagattacagcttctac

SEQ ID NO: 5335604 - DNA, 25 bp, Homo sapien
caaggaatgatgagcttcagccagg

SEQ ID NO: 5335605 - DNA, 25 bp, Homo sapien
cagaccatcaagttgagtaatggga

SEQ ID NO: 5335606 - DNA, 25 bp, Homo sapien
tgggaacattacaaccaaggaatga

SEQ ID NO: 5335607 - DNA, 25 bp, Homo sapien
gaaatgaacactcatcccaggttgg

SEQ ID NO: 5335608 - DNA, 25 bp, Homo sapien
gaaaccacttttgtagttcagaata

SEQ ID NO: 5335609 - DNA, 25 bp, Homo sapien
cagattttgtgtgcatttagctatg

SEQ ID NO: 5335610 - DNA, 25 bp, Homo sapien
tccttatctaaaaccatatgtggct

SEQ ID NO: 5335611 - DNA, 25 bp, Homo sapien
atcactgcacttagcttataaggat

SEQ ID NO: 5335612 - DNA, 25 bp, Homo sapien
ctttcttaacctattgataccagga

SEQ ID NO: 5335613 - DNA, 25 bp, Homo sapien
tctttaagaggctagaaactccttc

SEQ ID NO: 5335614 - DNA, 25 bp, Homo sapien
tcccttcccagaactacaattacta

SEQ ID NO: 5335615 - DNA, 25 bp, Homo sapien
gaccttgggagcaggaatctttaag

SEQ ID NO: 5335616 - DNA, 25 bp, Homo sapien
tatgatacaaaggtgttggtagcac

SEQ ID NO: 5335617 - DNA, 25 bp, Homo sapien
ctatgatacaaaggtgttggtagca

SEQ ID NO: 5335618 - DNA, 25 bp, Homo sapien
gggatgttctaagttatattctaga

SEQ ID NO: 5335619 - DNA, 25 bp, Homo sapien
ttcagccagtgggtatggcttagat

SEQ ID NO: 5335620 - DNA, 25 bp, Homo sapien
gttcaaggggatgttctaagttata

SEQ ID NO: 5335621 - DNA, 25 bp, Homo sapien
tggcttagatgaaggaagttcaagg

SEQ ID NO: 5335622 - DNA, 25 bp, Homo sapien
taagaagaacgtatataaagcaaac

SEQ ID NO: 5335623 - DNA, 25 bp, Homo sapien
gacatctatttgtagtgtattgtct

SEQ ID NO: 5335624 - DNA, 25 bp, Homo sapien
cagtgactaagtactgggagcctat

SEQ ID NO: 5335625 - DNA, 25 bp, Homo sapien
ctcaatcttcctccatattgtgtta

SEQ ID NO: 5335626 - DNA, 25 bp, Homo sapien
gaatgtaggccaaacgtcccaggct

SEQ ID NO: 5335627 - DNA, 25 bp, Homo sapien
cactggtacccgttatttgagcaag

SEQ ID NO: 5335628 - DNA, 25 bp, Homo sapien
caatacctgtttcgggtggcacgga

SEQ ID NO: 5335629 - DNA, 25 bp, Homo sapien
ggtgccctgggcctatacttgacag

SEQ ID NO: 5335630 - DNA, 25 bp, Homo sapien
cataaagtagcgtagtaggagcaca

SEQ ID NO: 5335631 - DNA, 25 bp, Homo sapien
tcgcagtggccaagaaatatcatcc

SEQ ID NO: 5335632 - DNA, 25 bp, Homo sapien
tccaacatgggcaagtgactagctg

SEQ ID NO: 5335633 - DNA, 25 bp, Homo sapien
cagatcagagattagaaaccttgcc

SEQ ID NO: 5335634 - DNA, 25 bp, Homo sapien
aaaaggtcggtatcttttgctgcct

SEQ ID NO: 5335635 - DNA, 25 bp, Homo sapien
gatggcattgccagagctatcttaa

SEQ ID NO: 5335636 - DNA, 25 bp, Homo sapien
tcaagaagaggagcacctaacaggc

SEQ ID NO: 5335637 - DNA, 25 bp, Homo sapien
gccatagggattggaaatttcctga

SEQ ID NO: 5335638 - DNA, 25 bp, Homo sapien
actaaagctgaaccacctggcacat

SEQ ID NO: 5335639 - DNA, 25 bp, Homo sapien
gttcactaaagctgaaccacctggc

SEQ ID NO: 5335640 - DNA, 25 bp, Homo sapien
gggttcactaaagctgaaccacctg

SEQ ID NO: 5335641 - DNA, 25 bp, Homo sapien
ccacctggcacatcgggagaggctg

SEQ ID NO: 5335642 - DNA, 25 bp, Homo sapien
gagaatataaaggagctagccaact

SEQ ID NO: 5335643 - DNA, 25 bp, Homo sapien
tggactaaagagcagtggaagctac

SEQ ID NO: 5335644 - DNA, 25 bp, Homo sapien
aatattccctctgagagaccccagg

SEQ ID NO: 5335645 - DNA, 25 bp, Homo sapien
gaccccaggtcttatgggaagactg

SEQ ID NO: 5335646 - DNA, 25 bp, Homo sapien
tcttctggtcactacgaagaggaga

SEQ ID NO: 5335647 - DNA, 25 bp, Homo sapien
agaggagacctcaaatttgatacag

SEQ ID NO: 5335648 - DNA, 25 bp, Homo sapien
ttaatggcccaagtcccactctcaa

SEQ ID NO: 5335649 - DNA, 25 bp, Homo sapien
tgtgagcttaatggcccaagtccca

SEQ ID NO: 5335650 - DNA, 25 bp, Homo sapien
tttaatcaaggggtgaagtcctcaa

SEQ ID NO: 5335651 - DNA, 25 bp, Homo sapien
gacgctgaaagggtgggagtgaagc

SEQ ID NO: 5335652 - DNA, 25 bp, Homo sapien
caaggggtgaagtcctcaatcaagg

SEQ ID NO: 5335653 - DNA, 25 bp, Homo sapien
gcaggaagagcttaacccacgtttc

SEQ ID NO: 5335654 - DNA, 25 bp, Homo sapien
ctgtgcatcgggcagagcggcacca

SEQ ID NO: 5335655 - DNA, 25 bp, Homo sapien
gcatcgggcagagcggcaccagagg

SEQ ID NO: 5335656 - DNA, 25 bp, Homo sapien
tgcatcgggcagagcggcaccagag

SEQ ID NO: 5335657 - DNA, 25 bp, Homo sapien
gtggctgtgcatcgggcagagcggc

SEQ ID NO: 5335658 - DNA, 25 bp, Homo sapien
aggggacagcaggggaaaggagtgc

SEQ ID NO: 5335659 - DNA, 25 bp, Homo sapien
tgagggtcgaaggggacagcagggg

SEQ ID NO: 5335660 - DNA, 25 bp, Homo sapien
tcgaaggggacagcaggggaaagga

SEQ ID NO: 5335661 - DNA, 25 bp, Homo sapien
cgaaggggacagcaggggaaaggag

SEQ ID NO: 5335662 - DNA, 25 bp, Homo sapien
ttaggagatgaggcgactgtgaagc

SEQ ID NO: 5335663 - DNA, 25 bp, Homo sapien
gatgaggcgactgtgaagctggtgc

SEQ ID NO: 5335664 - DNA, 25 bp, Homo sapien
aggcgactgtgaagctggtgcagct

SEQ ID NO: 5335665 - DNA, 25 bp, Homo sapien
gagatgaggcgactgtgaagctggt

SEQ ID NO: 5335666 - DNA, 25 bp, Homo sapien
catgtagactgtgtcatcctgctgc

SEQ ID NO: 5335667 - DNA, 25 bp, Homo sapien
tagactgtgtcatcctgctgctcct

SEQ ID NO: 5335668 - DNA, 25 bp, Homo sapien
gagaaggtcactttgcccatgtaga

SEQ ID NO: 5335669 - DNA, 25 bp, Homo sapien
gctgtccaaaaccagccgcacatga

SEQ ID NO: 5335670 - DNA, 25 bp, Homo sapien
ccaggtcaggggctcacttgagctg

SEQ ID NO: 5335671 - DNA, 25 bp, Homo sapien
ggctcacttgagctgtgggccactg

SEQ ID NO: 5335672 - DNA, 25 bp, Homo sapien
tgtgggccactgaaggggtccctga

SEQ ID NO: 5335673 - DNA, 25 bp, Homo sapien
tggttgatgaggagaaaaagactcc

SEQ ID NO: 5335674 - DNA, 25 bp, Homo sapien
ctccagggcgctgagatactgtctc

SEQ ID NO: 5335675 - DNA, 25 bp, Homo sapien
ccagggcgctgagatactgtctcct

SEQ ID NO: 5335676 - DNA, 25 bp, Homo sapien
aaagtcagtgggtactgtggctcca

SEQ ID NO: 5335677 - DNA, 25 bp, Homo sapien
tggcaaagtcagtgggtactgtggc

SEQ ID NO: 5335678 - DNA, 25 bp, Homo sapien
taagttgggccgacgggctcttggc

SEQ ID NO: 5335679 - DNA, 25 bp, Homo sapien
gagccacttgctccataagttgggc

SEQ ID NO: 5335680 - DNA, 25 bp, Homo sapien
gcttctcgacggtgtcactcaggga

SEQ ID NO: 5335681 - DNA, 25 bp, Homo sapien
cttgagcttctcgacggtgtcactc

SEQ ID NO: 5335682 - DNA, 25 bp, Homo sapien
gcaggcaggcagttctactggatta

SEQ ID NO: 5335683 - DNA, 25 bp, Homo sapien
tctctaacagaacaagtacttgaga

SEQ ID NO: 5335684 - DNA, 25 bp, Homo sapien
gggtgcaggtataagactctctaac

SEQ ID NO: 5335685 - DNA, 25 bp, Homo sapien
gagagagagtgggtgaatcaaacaa

SEQ ID NO: 5335686 - DNA, 25 bp, Homo sapien
gagtgatgtctactacgtgcgtgtg

SEQ ID NO: 5335687 - DNA, 25 bp, Homo sapien
gggccctcatgggatagctttgcaa

SEQ ID NO: 5335688 - DNA, 25 bp, Homo sapien
tacgatacagcgctccagctggtaa

SEQ ID NO: 5335689 - DNA, 25 bp, Homo sapien
tgctcaattgattcaatgtctccag

SEQ ID NO: 5335690 - DNA, 25 bp, Homo sapien
cttgaggatgctgttctcatgctgg

SEQ ID NO: 5335691 - DNA, 25 bp, Homo sapien
ctgttctcatgctggagctgggaga

SEQ ID NO: 5335692 - DNA, 25 bp, Homo sapien
tgctgaagcagcagtggtgagtcct

SEQ ID NO: 5335693 - DNA, 25 bp, Homo sapien
ctgggagatgtgcagcctcatggca

SEQ ID NO: 5335694 - DNA, 25 bp, Homo sapien
ctgggcctggcacagaccctggagc

SEQ ID NO: 5335695 - DNA, 25 bp, Homo sapien
gggcctggcacagaccctggagcct

SEQ ID NO: 5335696 - DNA, 25 bp, Homo sapien
cctggagcctgcccagggatggctc

SEQ ID NO: 5335697 - DNA, 25 bp, Homo sapien
agaccctggagcctgcccagggatg

SEQ ID NO: 5335698 - DNA, 25 bp, Homo sapien
ttgaaaattgggctccattcctact

SEQ ID NO: 5335699 - DNA, 25 bp, Homo sapien
ctcccttagctccaactcccaccag

SEQ ID NO: 5335700 - DNA, 25 bp, Homo sapien
ctgtggggaccataaaaaatctcat

SEQ ID NO: 5335701 - DNA, 25 bp, Homo sapien
tcagccccaagtggaaagggttgaa

SEQ ID NO: 5335702 - DNA, 25 bp, Homo sapien
gcatgttcctggctgaatacccggg

SEQ ID NO: 5335703 - DNA, 25 bp, Homo sapien
tgtaccacaagagcctaaagtcaag

SEQ ID NO: 5335704 - DNA, 25 bp, Homo sapien
gaaaaactctaggtgaggagccctg

SEQ ID NO: 5335705 - DNA, 25 bp, Homo sapien
caatcaagagcaggtatcgggcagg

SEQ ID NO: 5335706 - DNA, 25 bp, Homo sapien
ccagctggtcgatgtcagcctggag

SEQ ID NO: 5335707 - DNA, 25 bp, Homo sapien
tttggactggctgttcagacgctgc

SEQ ID NO: 5335708 - DNA, 25 bp, Homo sapien
ccagcaatgccagagaccagagtag

SEQ ID NO: 5335709 - DNA, 25 bp, Homo sapien
cggagtccctcaatcgtgcgtttgg

SEQ ID NO: 5335710 - DNA, 25 bp, Homo sapien
tgtgaaagagaatctgggctttggc

SEQ ID NO: 5335711 - DNA, 25 bp, Homo sapien
ctgtgaaagagaatctgggctttgg

SEQ ID NO: 5335712 - DNA, 25 bp, Homo sapien
aagagaatctgggctttggcagtgt

SEQ ID NO: 5335713 - DNA, 25 bp, Homo sapien
tgaaagagaatctgggctttggcag

SEQ ID NO: 5335714 - DNA, 25 bp, Homo sapien
attcagtcctgagaggtccttggaa

SEQ ID NO: 5335715 - DNA, 25 bp, Homo sapien
cttggaatagccctgccagtgagaa

SEQ ID NO: 5335716 - DNA, 25 bp, Homo sapien
tctctaaagcactccttgactattc

SEQ ID NO: 5335717 - DNA, 25 bp, Homo sapien
aaagcactccttgactattcagtcc

SEQ ID NO: 5335718 - DNA, 25 bp, Homo sapien
gcagtgggaggattagaggaagcaa

SEQ ID NO: 5335719 - DNA, 25 bp, Homo sapien
agcagtgggaggattagaggaagca

SEQ ID NO: 5335720 - DNA, 25 bp, Homo sapien
agtgggaggattagaggaagcaagg

SEQ ID NO: 5335721 - DNA, 25 bp, Homo sapien
cagtgggaggattagaggaagcaag

SEQ ID NO: 5335722 - DNA, 25 bp, Homo sapien
tccaggaggctcagccgcacattgg

SEQ ID NO: 5335723 - DNA, 25 bp, Homo sapien
tccttctttcgcagcagtgcctggg

SEQ ID NO: 5335724 - DNA, 25 bp, Homo sapien
ccagccgagtctggactttctcgat

SEQ ID NO: 5335725 - DNA, 25 bp, Homo sapien
cacattggcctcacttagctcctct

SEQ ID NO: 5335726 - DNA, 25 bp, Homo sapien
ggacaaggacagaacttctagatcc

SEQ ID NO: 5335727 - DNA, 25 bp, Homo sapien
tggacaaggacagaacttctagatc

SEQ ID NO: 5335728 - DNA, 25 bp, Homo sapien
caaggacagaacttctagatccctg

SEQ ID NO: 5335729 - DNA, 25 bp, Homo sapien
gacaaggacagaacttctagatccc

SEQ ID NO: 5335730 - DNA, 25 bp, Homo sapien
tccttaataactgtctctcgatctt

SEQ ID NO: 5335731 - DNA, 25 bp, Homo sapien
ctcgatcttcgagcttcaaacccag

SEQ ID NO: 5335732 - DNA, 25 bp, Homo sapien
ttcaactccttaataactgtctctc

SEQ ID NO: 5335733 - DNA, 25 bp, Homo sapien
atctgtgatctctgcacgaagggca

SEQ ID NO: 5335734 - DNA, 25 bp, Homo sapien
ggtggagagaagagatcatcactgt

SEQ ID NO: 5335735 - DNA, 25 bp, Homo sapien
actgtgctccttacagagagatcca

SEQ ID NO: 5335736 - DNA, 25 bp, Homo sapien
gatggtgctctccagatgccttcct

SEQ ID NO: 5335737 - DNA, 25 bp, Homo sapien
gctccttacagagagatccagttac

SEQ ID NO: 5335738 - DNA, 25 bp, Homo sapien
cagacactcataggggctgctggag

SEQ ID NO: 5335739 - DNA, 25 bp, Homo sapien
catgactggcgcagacactcatagg

SEQ ID NO: 5335740 - DNA, 25 bp, Homo sapien
atgaggatgttgcatgactggcgca

SEQ ID NO: 5335741 - DNA, 25 bp, Homo sapien
tgttgcatgactggcgcagacactc

SEQ ID NO: 5335742 - DNA, 25 bp, Homo sapien
tggtcactaactctccccacacctt

SEQ ID NO: 5335743 - DNA, 25 bp, Homo sapien
tccccacaccttctacccagccatc

SEQ ID NO: 5335744 - DNA, 25 bp, Homo sapien
acactggtcactaactctccccaca

SEQ ID NO: 5335745 - DNA, 25 bp, Homo sapien
ccccacactggtcactaactctccc

SEQ ID NO: 5335746 - DNA, 25 bp, Homo sapien
acaagtagcccctcattctctgcca

SEQ ID NO: 5335747 - DNA, 25 bp, Homo sapien
tgcagtctaggagcgtgtcagatac

SEQ ID NO: 5335748 - DNA, 25 bp, Homo sapien
gctttgaaagccagttcctccagag

SEQ ID NO: 5335749 - DNA, 25 bp, Homo sapien
cacgacccacgtcaagtgtttcctg

SEQ ID NO: 5335750 - DNA, 25 bp, Homo sapien
tctgtccctggcattcgccttcgga

SEQ ID NO: 5335751 - DNA, 25 bp, Homo sapien
tgaagtttccagatcccggagcagg

SEQ ID NO: 5335752 - DNA, 25 bp, Homo sapien
gagcaggagggcaatatctgtagcc

SEQ ID NO: 5335753 - DNA, 25 bp, Homo sapien
tcttgcagaactggcggatgtcact

SEQ ID NO: 5335754 - DNA, 25 bp, Homo sapien
aagaaggcacgcagccgtcctacct

SEQ ID NO: 5335755 - DNA, 25 bp, Homo sapien
ctccacactcatgcagtccagagca

SEQ ID NO: 5335756 - DNA, 25 bp, Homo sapien
ctgcaagaaggcacgcagccgtcct

SEQ ID NO: 5335757 - DNA, 25 bp, Homo sapien
cacactcatgcagtccagagcactc

SEQ ID NO: 5335758 - DNA, 25 bp, Homo sapien
gctgcatagtacagtcctcaggctg

SEQ ID NO: 5335759 - DNA, 25 bp, Homo sapien
tagtacagtcctcaggctgttcggc

SEQ ID NO: 5335760 - DNA, 25 bp, Homo sapien
ggtcagccagctgcatagtacagtc

SEQ ID NO: 5335761 - DNA, 25 bp, Homo sapien
tcctcaggctgttcggcaaggtgga

SEQ ID NO: 5335762 - DNA, 25 bp, Homo sapien
gatagtacttgatggccttggtgag

SEQ ID NO: 5335763 - DNA, 25 bp, Homo sapien
ctcatctcagggtacaggctgccca

SEQ ID NO: 5335764 - DNA, 25 bp, Homo sapien
aaggagcgctcatgggcactcatct

SEQ ID NO: 5335765 - DNA, 25 bp, Homo sapien
tggtgagaggctccacattgacagt

SEQ ID NO: 5335766 - DNA, 25 bp, Homo sapien
ctcatagcggtgtagcgtggcctgc

SEQ ID NO: 5335767 - DNA, 25 bp, Homo sapien
tgcagcaggctcagcgagtacacca

SEQ ID NO: 5335768 - DNA, 25 bp, Homo sapien
ctcacttagttcaaacttctcctgg

SEQ ID NO: 5335769 - DNA, 25 bp, Homo sapien
ggccgctctgaacagttctcactta

SEQ ID NO: 5335770 - DNA, 25 bp, Homo sapien
ggttcatggcaagttcactagattt

SEQ ID NO: 5335771 - DNA, 25 bp, Homo sapien
ggaacatgtgattgattggccatac

SEQ ID NO: 5335772 - DNA, 25 bp, Homo sapien
tgtcttcactcagcatcttcaatgc

SEQ ID NO: 5335773 - DNA, 25 bp, Homo sapien
tcttcaatgcctggttcatggcaag

SEQ ID NO: 5335774 - DNA, 25 bp, Homo sapien
acatgtgtcgattggcctgggccac

SEQ ID NO: 5335775 - DNA, 25 bp, Homo sapien
agaacgcagtcatggtccccacctg

SEQ ID NO: 5335776 - DNA, 25 bp, Homo sapien
cacctggccgaaggaagctgtcagg

SEQ ID NO: 5335777 - DNA, 25 bp, Homo sapien
cttgcaaatgagacgaggcatgagc

SEQ ID NO: 5335778 - DNA, 25 bp, Homo sapien
attttgaagtcaaaggtctctggag

SEQ ID NO: 5335779 - DNA, 25 bp, Homo sapien
ttttgaagtcaaaggtctctggagg

SEQ ID NO: 5335780 - DNA, 25 bp, Homo sapien
gattttgaagtcaaaggtctctgga

SEQ ID NO: 5335781 - DNA, 25 bp, Homo sapien
atgggcggtcagctggcggtacttc

SEQ ID NO: 5335782 - DNA, 25 bp, Homo sapien
ggtctgctggtagtctgcaaccgtc

SEQ ID NO: 5335783 - DNA, 25 bp, Homo sapien
cttctgggcctcacgaacccgcgcg

SEQ ID NO: 5335784 - DNA, 25 bp, Homo sapien
gctggtagtctgcaaccgtctcctg

SEQ ID NO: 5335785 - DNA, 25 bp, Homo sapien
acagtctccctcaactcgcgcactt

SEQ ID NO: 5335786 - DNA, 25 bp, Homo sapien
cctcaactcgcgcactttctcttcc

SEQ ID NO: 5335787 - DNA, 25 bp, Homo sapien
cttccagattcaggttccgatctgt

SEQ ID NO: 5335788 - DNA, 25 bp, Homo sapien
tcaggttccgatctgtcagcatctc

SEQ ID NO: 5335789 - DNA, 25 bp, Homo sapien
tgcagacgctcccgctgttgcctca

SEQ ID NO: 5335790 - DNA, 25 bp, Homo sapien
tctctgaggaagaaagatcccgcat

SEQ ID NO: 5335791 - DNA, 25 bp, Homo sapien
tcatcaatggtgctctctgcctggc

SEQ ID NO: 5335792 - DNA, 25 bp, Homo sapien
gagctcatcaatggtgctctctgcc

SEQ ID NO: 5335793 - DNA, 25 bp, Homo sapien
tcaagctgcttgagctgataactgg

SEQ ID NO: 5335794 - DNA, 25 bp, Homo sapien
gggcatccttcaggcgggcattctg

SEQ ID NO: 5335795 - DNA, 25 bp, Homo sapien
gcattctgctcctcaagctgcttga

SEQ ID NO: 5335796 - DNA, 25 bp, Homo sapien
taactggatgcagcgccatctgagc

SEQ ID NO: 5335797 - DNA, 25 bp, Homo sapien
cgtttggcccccagcagctgtgggc

SEQ ID NO: 5335798 - DNA, 25 bp, Homo sapien
ctgaccgtttggcccccagcagctg

SEQ ID NO: 5335799 - DNA, 25 bp, Homo sapien
accgtttggcccccagcagctgtgg

SEQ ID NO: 5335800 - DNA, 25 bp, Homo sapien
tgaccgtttggcccccagcagctgt

SEQ ID NO: 5335801 - DNA, 25 bp, Homo sapien
caatctcagccttgaggatctctaa

SEQ ID NO: 5335802 - DNA, 25 bp, Homo sapien
atatagcgttcctttgcctccagcg

SEQ ID NO: 5335803 - DNA, 25 bp, Homo sapien
taagtcagtagtgagctcgtccacc

SEQ ID NO: 5335804 - DNA, 25 bp, Homo sapien
gactcagcccgctcttcagccatct

SEQ ID NO: 5335805 - DNA, 25 bp, Homo sapien
gcacagagatgccccaggcctttct

SEQ ID NO: 5335806 - DNA, 25 bp, Homo sapien
cagagatgccccaggcctttctcac

SEQ ID NO: 5335807 - DNA, 25 bp, Homo sapien
acagagatgccccaggcctttctca

SEQ ID NO: 5335808 - DNA, 25 bp, Homo sapien
cagcacagagatgccccaggccttt

SEQ ID NO: 5335809 - DNA, 25 bp, Homo sapien
tagtttccagcatgcttccttaggt

SEQ ID NO: 5335810 - DNA, 25 bp, Homo sapien
ctccagtctagtttccagcatgctt

SEQ ID NO: 5335811 - DNA, 25 bp, Homo sapien
cagtctagtttccagcatgcttcct

SEQ ID NO: 5335812 - DNA, 25 bp, Homo sapien
gtctagtttccagcatgcttcctta

SEQ ID NO: 5335813 - DNA, 25 bp, Homo sapien
caggtcccgcacctgagcccttagt

SEQ ID NO: 5335814 - DNA, 25 bp, Homo sapien
ctcgcctccttgaggcgccgctgca

SEQ ID NO: 5335815 - DNA, 25 bp, Homo sapien
gctgcaggtcggcctgctgctcctg

SEQ ID NO: 5335816 - DNA, 25 bp, Homo sapien
cgtttcagtctcagggtctctagtt

SEQ ID NO: 5335817 - DNA, 25 bp, Homo sapien
ctgtgcacagcccactcctcctctc

SEQ ID NO: 5335818 - DNA, 25 bp, Homo sapien
gtctgtgcacagcccactcctcctc

SEQ ID NO: 5335819 - DNA, 25 bp, Homo sapien
aaagtgtgcaaacatcacccagccc

SEQ ID NO: 5335820 - DNA, 25 bp, Homo sapien
ccaacagtcagtggcataagaacat

SEQ ID NO: 5335821 - DNA, 25 bp, Homo sapien
ggtggccaacagtcagtggcataag

SEQ ID NO: 5335822 - DNA, 25 bp, Homo sapien
ccccagggtggccaacagtcagtgg

SEQ ID NO: 5335823 - DNA, 25 bp, Homo sapien
gctgccagcggagtctgagccgggg

SEQ ID NO: 5335824 - DNA, 25 bp, Homo sapien
ggaagcggggggactgctccaggag

SEQ ID NO: 5335825 - DNA, 25 bp, Homo sapien
ggaaggaagcggggggactgctcca

SEQ ID NO: 5335826 - DNA, 25 bp, Homo sapien
gagaggtgaggaccggcgtggggat

SEQ ID NO: 5335827 - DNA, 25 bp, Homo sapien
accccagtactggctgggcgcgtgg

SEQ ID NO: 5335828 - DNA, 25 bp, Homo sapien
ccccagtactggctgggcgcgtggg

SEQ ID NO: 5335829 - DNA, 25 bp, Homo sapien
cgatctggcaacactatccatgccc

SEQ ID NO: 5335830 - DNA, 25 bp, Homo sapien
ttgaaacaactcttcgtcatctccc

SEQ ID NO: 5335831 - DNA, 25 bp, Homo sapien
ctagactcccccttgaaacaactct

SEQ ID NO: 5335832 - DNA, 25 bp, Homo sapien
atctcccccgatctggcaacactat

SEQ ID NO: 5335833 - DNA, 25 bp, Homo sapien
ttttgtccaatccttgcaggcctca

SEQ ID NO: 5335834 - DNA, 25 bp, Homo sapien
gaaataacaggaatggggctacagt

SEQ ID NO: 5335835 - DNA, 25 bp, Homo sapien
gaatcactgtattcctacttcagga

SEQ ID NO: 5335836 - DNA, 25 bp, Homo sapien
tggacaggcaacaggagccagaaga

SEQ ID NO: 5335837 - DNA, 25 bp, Homo sapien
cccttcagacaccccagaaatccca

SEQ ID NO: 5335838 - DNA, 25 bp, Homo sapien
ccttcagacaccccagaaatcccag

SEQ ID NO: 5335839 - DNA, 25 bp, Homo sapien
tccccgaccaggtagacagatgaag

SEQ ID NO: 5335840 - DNA, 25 bp, Homo sapien
ccccgaccaggtagacagatgaagt

SEQ ID NO: 5335841 - DNA, 25 bp, Homo sapien
ccgaccaggtagacagatgaagtca

SEQ ID NO: 5335842 - DNA, 25 bp, Homo sapien
gcctccccgaccaggtagacagatg

SEQ ID NO: 5335843 - DNA, 25 bp, Homo sapien
ccaccattgccctggcaacccagca

SEQ ID NO: 5335844 - DNA, 25 bp, Homo sapien
ccattgccctggcaacccagcagca

SEQ ID NO: 5335845 - DNA, 25 bp, Homo sapien
caccattgccctggcaacccagcag

SEQ ID NO: 5335846 - DNA, 25 bp, Homo sapien
cctggcaacccagcagcaggacgag

SEQ ID NO: 5335847 - DNA, 25 bp, Homo sapien
agacgtgcagctggatcgccaggct

SEQ ID NO: 5335848 - DNA, 25 bp, Homo sapien
gcggagacaggagattagtgcatca

SEQ ID NO: 5335849 - DNA, 25 bp, Homo sapien
ccagcttaggctgatggcagcctca

SEQ ID NO: 5335850 - DNA, 25 bp, Homo sapien
cagaggaggatagacaaacacacgg

SEQ ID NO: 5335851 - DNA, 25 bp, Homo sapien
gtctttgcagttgtatcagttccct

SEQ ID NO: 5335852 - DNA, 25 bp, Homo sapien
gtctctggggaagtagtatctgctc

SEQ ID NO: 5335853 - DNA, 25 bp, Homo sapien
ttttgaggacttttgaagcagaaga

SEQ ID NO: 5335854 - DNA, 25 bp, Homo sapien
gggaagtagtatctgctccatcttc

SEQ ID NO: 5335855 - DNA, 25 bp, Homo sapien
tttgaggacttttgaagcagaagaa

SEQ ID NO: 5335856 - DNA, 25 bp, Homo sapien
tagtttcaatatagccagatcaagg

SEQ ID NO: 5335857 - DNA, 25 bp, Homo sapien
caaaccaagagtacagggcagcttc

SEQ ID NO: 5335858 - DNA, 25 bp, Homo sapien
tcaaggacggctgtaatatgggccc

SEQ ID NO: 5335859 - DNA, 25 bp, Homo sapien
catgctcaggaaaacgaagtaccaa

SEQ ID NO: 5335860 - DNA, 25 bp, Homo sapien
caaagatgccatgcccttcatcaca

SEQ ID NO: 5335861 - DNA, 25 bp, Homo sapien
agatgccatgcccttcatcacaagt

SEQ ID NO: 5335862 - DNA, 25 bp, Homo sapien
cacaagtgaagtacttcctgccttg

SEQ ID NO: 5335863 - DNA, 25 bp, Homo sapien
gtgaagtacttcctgccttgaacag

SEQ ID NO: 5335864 - DNA, 25 bp, Homo sapien
gaatcacgcctacccatttgccagt

SEQ ID NO: 5335865 - DNA, 25 bp, Homo sapien
gcttgcctccgcactcatcctgctg

SEQ ID NO: 5335866 - DNA, 25 bp, Homo sapien
tttgccagtggcaaacagtgtggct

SEQ ID NO: 5335867 - DNA, 25 bp, Homo sapien
tttccaatcacctctacacgggagc

SEQ ID NO: 5335868 - DNA, 25 bp, Homo sapien
ggctgtacacgtgcctcttgctctg

SEQ ID NO: 5335869 - DNA, 25 bp, Homo sapien
ccggctgtacacgtgcctcttgctc

SEQ ID NO: 5335870 - DNA, 25 bp, Homo sapien
acacgtgcctcttgctctgtgccat

SEQ ID NO: 5335871 - DNA, 25 bp, Homo sapien
gtacacgtgcctcttgctctgtgcc

SEQ ID NO: 5335872 - DNA, 25 bp, Homo sapien
gaaactaagggctgggcatacgcca

SEQ ID NO: 5335873 - DNA, 25 bp, Homo sapien
tcaggaaccgtgctagcctctgggt

SEQ ID NO: 5335874 - DNA, 25 bp, Homo sapien
tcttgaatacactgtcctagggctg

SEQ ID NO: 5335875 - DNA, 25 bp, Homo sapien
tcagcaggcccataagcatcaagtg

SEQ ID NO: 5335876 - DNA, 25 bp, Homo sapien
ggatttctaatccattttcctctcc

SEQ ID NO: 5335877 - DNA, 25 bp, Homo sapien
cctctccaatgatattaaataccac

SEQ ID NO: 5335878 - DNA, 25 bp, Homo sapien
ttttcctctccaatgatattaaata

SEQ ID NO: 5335879 - DNA, 25 bp, Homo sapien
ctcttggatttctaatccattttcc

SEQ ID NO: 5335880 - DNA, 25 bp, Homo sapien
ggcggagcagacggttggcagagtc

SEQ ID NO: 5335881 - DNA, 25 bp, Homo sapien
ggttggcagagtcgcgcctccgtac

SEQ ID NO: 5335882 - DNA, 25 bp, Homo sapien
gaacacgtagggggccggcggagca

SEQ ID NO: 5335883 - DNA, 25 bp, Homo sapien
acgtagggggccggcggagcagacg

SEQ ID NO: 5335884 - DNA, 25 bp, Homo sapien
gagtgaaccctcttttcccgcagtc

SEQ ID NO: 5335885 - DNA, 25 bp, Homo sapien
tccagccctgactgaaaactgcgca

SEQ ID NO: 5335886 - DNA, 25 bp, Homo sapien
ttacatcaatcaggcacaaagctgg

SEQ ID NO: 5335887 - DNA, 25 bp, Homo sapien
taggaccataagaaatcggcgtgtc

SEQ ID NO: 5335888 - DNA, 25 bp, Homo sapien
ttgaacataatgacattccaatgtg

SEQ ID NO: 5335889 - DNA, 25 bp, Homo sapien
tttaagttcagtggcactcagaaca

SEQ ID NO: 5335890 - DNA, 25 bp, Homo sapien
aatgtgagcaggcatatctctagga

SEQ ID NO: 5335891 - DNA, 25 bp, Homo sapien
tacaatcttgcaatgaatcactttg

SEQ ID NO: 5335892 - DNA, 25 bp, Homo sapien
taggataacccagaacgaccataaa

SEQ ID NO: 5335893 - DNA, 25 bp, Homo sapien
taaaaagtacaatggcgaccaagga

SEQ ID NO: 5335894 - DNA, 25 bp, Homo sapien
aactgtgtgataagaagaatccaca

SEQ ID NO: 5335895 - DNA, 25 bp, Homo sapien
aagaatccacaatgtaggataaccc

SEQ ID NO: 5335896 - DNA, 25 bp, Homo sapien
gactgaggcattccagaggctctgg

SEQ ID NO: 5335897 - DNA, 25 bp, Homo sapien
actaggcttgtcagtcggactgagg

SEQ ID NO: 5335898 - DNA, 25 bp, Homo sapien
acgggaagagttatcacacaggaac

SEQ ID NO: 5335899 - DNA, 25 bp, Homo sapien
ctcaagtagaggactgggagtacac

SEQ ID NO: 5335900 - DNA, 25 bp, Homo sapien
atgtatacaacaccgggctccacag

SEQ ID NO: 5335901 - DNA, 25 bp, Homo sapien
atccccatgtatacaacaccgggct

SEQ ID NO: 5335902 - DNA, 25 bp, Homo sapien
catgtatacaacaccgggctccaca

SEQ ID NO: 5335903 - DNA, 25 bp, Homo sapien
ataatccccatgtatacaacaccgg

SEQ ID NO: 5335904 - DNA, 25 bp, Homo sapien
gtacccaagccagtaaggaaggatg

SEQ ID NO: 5335905 - DNA, 25 bp, Homo sapien
taatggtacccaagccagtaaggaa

SEQ ID NO: 5335906 - DNA, 25 bp, Homo sapien
cttaatggtacccaagccagtaagg

SEQ ID NO: 5335907 - DNA, 25 bp, Homo sapien
gaaggatgggtattggaagtgttgg

SEQ ID NO: 5335908 - DNA, 25 bp, Homo sapien
cagtcatagttttggttaaaggtca

SEQ ID NO: 5335909 - DNA, 25 bp, Homo sapien
tccttgaagtctctgggcaagctct

SEQ ID NO: 5335910 - DNA, 25 bp, Homo sapien
tgtacccatgtgcatgccgaacgga

SEQ ID NO: 5335911 - DNA, 25 bp, Homo sapien
ggtgcccctcatcaatgtacccatg

SEQ ID NO: 5335912 - DNA, 25 bp, Homo sapien
gcagaaagggcccaacatagttagt

SEQ ID NO: 5335913 - DNA, 25 bp, Homo sapien
cccaacatagttagtgacaaaggtg

SEQ ID NO: 5335914 - DNA, 25 bp, Homo sapien
cttggagtagatttgtgagcagaaa

SEQ ID NO: 5335915 - DNA, 25 bp, Homo sapien
gaaagggcccaacatagttagtgac

SEQ ID NO: 5335916 - DNA, 25 bp, Homo sapien
caccgagctaggtcctgggatacaa

SEQ ID NO: 5335917 - DNA, 25 bp, Homo sapien
tagaggtcatggagctaaggtccac

SEQ ID NO: 5335918 - DNA, 25 bp, Homo sapien
cctgctctgacaagtaaggatcact

SEQ ID NO: 5335919 - DNA, 25 bp, Homo sapien
gattctcctgtagaagcctccgggc

SEQ ID NO: 5335920 - DNA, 25 bp, Homo sapien
cagtcactatggctattttcccagt

SEQ ID NO: 5335921 - DNA, 25 bp, Homo sapien
gccccagtcactatggctattttcc

SEQ ID NO: 5335922 - DNA, 25 bp, Homo sapien
ggccccagtcactatggctattttc

SEQ ID NO: 5335923 - DNA, 25 bp, Homo sapien
cccagtcactatggctattttccca

SEQ ID NO: 5335924 - DNA, 25 bp, Homo sapien
gcgccccagaccaggatgctgagtg

SEQ ID NO: 5335925 - DNA, 25 bp, Homo sapien
tcccagggatgagacttctgccaga

SEQ ID NO: 5335926 - DNA, 25 bp, Homo sapien
ctgccagagctgcacatgtagttga

SEQ ID NO: 5335927 - DNA, 25 bp, Homo sapien
cagcgccccagaccaggatgctgag

SEQ ID NO: 5335928 - DNA, 25 bp, Homo sapien
gttactactgccagaggctcaggga

SEQ ID NO: 5335929 - DNA, 25 bp, Homo sapien
tcttcattagctgtgctacggtcac

SEQ ID NO: 5335930 - DNA, 25 bp, Homo sapien
tttatttctggctagcagagggagg

SEQ ID NO: 5335931 - DNA, 25 bp, Homo sapien
cagcaggcttagaggagcgtgacca

SEQ ID NO: 5335932 - DNA, 25 bp, Homo sapien
tgctcaacgggaggaaaggtgctac

SEQ ID NO: 5335933 - DNA, 25 bp, Homo sapien
ctggatgggatgttgctcaacggga

SEQ ID NO: 5335934 - DNA, 25 bp, Homo sapien
gatgggatgttgctcaacgggagga

SEQ ID NO: 5335935 - DNA, 25 bp, Homo sapien
gatgttgctcaacgggaggaaaggt

SEQ ID NO: 5335936 - DNA, 25 bp, Homo sapien
tctttgtcctcttgttcaggcacac

SEQ ID NO: 5335937 - DNA, 25 bp, Homo sapien
cttctttgtcctcttgttcaggcac

SEQ ID NO: 5335938 - DNA, 25 bp, Homo sapien
ttctttgtcctcttgttcaggcaca

SEQ ID NO: 5335939 - DNA, 25 bp, Homo sapien
ggcttctggcagcaacacgggcttc

SEQ ID NO: 5335940 - DNA, 25 bp, Homo sapien
ctggcagcaacacgggcttccacat

SEQ ID NO: 5335941 - DNA, 25 bp, Homo sapien
tggttcgaggccatctgccaggatc

SEQ ID NO: 5335942 - DNA, 25 bp, Homo sapien
agtggcttcaaggaccgggggtgtg

SEQ ID NO: 5335943 - DNA, 25 bp, Homo sapien
gccagctccagaccctgtggaggca

SEQ ID NO: 5335944 - DNA, 25 bp, Homo sapien
gtctgccagctccagaccctgtgga

SEQ ID NO: 5335945 - DNA, 25 bp, Homo sapien
ctccctgtctgccagctccagaccc

SEQ ID NO: 5335946 - DNA, 25 bp, Homo sapien
tggccctccctgtctgccagctcca

SEQ ID NO: 5335947 - DNA, 25 bp, Homo sapien
tttgactcgagggatggcgacgata

SEQ ID NO: 5335948 - DNA, 25 bp, Homo sapien
gcggctgcgggccacatcagggagc

SEQ ID NO: 5335949 - DNA, 25 bp, Homo sapien
ccacatcagggagcaccgggtgtgt

SEQ ID NO: 5335950 - DNA, 25 bp, Homo sapien
cctcccaaccgctgggccacctgac

SEQ ID NO: 5335951 - DNA, 25 bp, Homo sapien
gagtccaagtcacggaaaggaatgc

SEQ ID NO: 5335952 - DNA, 25 bp, Homo sapien
atttaaagtggggaacaggagtgcg

SEQ ID NO: 5335953 - DNA, 25 bp, Homo sapien
gtccaagtcacggaaaggaatgcct

SEQ ID NO: 5335954 - DNA, 25 bp, Homo sapien
gcccgagtccaagtcacggaaagga

SEQ ID NO: 5335955 - DNA, 25 bp, Homo sapien
cttccaaggggcgtgtttgagagtc

SEQ ID NO: 5335956 - DNA, 25 bp, Homo sapien
ctggcgtccgcggtaggcttccaag

SEQ ID NO: 5335957 - DNA, 25 bp, Homo sapien
ttccaaggggcgtgtttgagagtct

SEQ ID NO: 5335958 - DNA, 25 bp, Homo sapien
ccgctggcgtccgcggtaggcttcc

SEQ ID NO: 5335959 - DNA, 25 bp, Homo sapien
ctcagccagagggcgcacccagtgg

SEQ ID NO: 5335960 - DNA, 25 bp, Homo sapien
gcacgggagcctcgcagggtccagg

SEQ ID NO: 5335961 - DNA, 25 bp, Homo sapien
acccagtggcacgggagcctcgcag

SEQ ID NO: 5335962 - DNA, 25 bp, Homo sapien
agccagagggcgcacccagtggcac

SEQ ID NO: 5335963 - DNA, 25 bp, Homo sapien
tgggcgctcagccgcacatccgagt

SEQ ID NO: 5335964 - DNA, 25 bp, Homo sapien
ggtgggcgctcagccgcacatccga

SEQ ID NO: 5335965 - DNA, 25 bp, Homo sapien
cttgcggcgcatcctgtggtggtgg

SEQ ID NO: 5335966 - DNA, 25 bp, Homo sapien
tgcggcgcatcctgtggtggtgggc

SEQ ID NO: 5335967 - DNA, 25 bp, Homo sapien
acagttggaagctcgcgctcaagga

SEQ ID NO: 5335968 - DNA, 25 bp, Homo sapien
gagaaggctcccaagattccatctg

SEQ ID NO: 5335969 - DNA, 25 bp, Homo sapien
ggctaccaggtacggatccagagaa

SEQ ID NO: 5335970 - DNA, 25 bp, Homo sapien
ggcatgcaacagtagaggtcttcca

SEQ ID NO: 5335971 - DNA, 25 bp, Homo sapien
ctggggaaatgcactcgggcagtga

SEQ ID NO: 5335972 - DNA, 25 bp, Homo sapien
cactcgggcagtgagatgtcggaaa

SEQ ID NO: 5335973 - DNA, 25 bp, Homo sapien
aatgcactcgggcagtgagatgtcg

SEQ ID NO: 5335974 - DNA, 25 bp, Homo sapien
caggagcaatggcagaggagtccgg

SEQ ID NO: 5335975 - DNA, 25 bp, Homo sapien
ccctccgaggtggacgcgtgcagca

SEQ ID NO: 5335976 - DNA, 25 bp, Homo sapien
gtcgtgcatgccgaaggctcctcgt

SEQ ID NO: 5335977 - DNA, 25 bp, Homo sapien
gacgcgtgcagcacgggcactgaac

SEQ ID NO: 5335978 - DNA, 25 bp, Homo sapien
gagcccaggagtccgtcgtgcatgc

SEQ ID NO: 5335979 - DNA, 25 bp, Homo sapien
aggaagcgccactcggtgatctgca

SEQ ID NO: 5335980 - DNA, 25 bp, Homo sapien
gattctccctcgtcccgggccagga

SEQ ID NO: 5335981 - DNA, 25 bp, Homo sapien
tgtggggtcctcagctactgcagat

SEQ ID NO: 5335982 - DNA, 25 bp, Homo sapien
ccatgtggggtcctcagctactgca

SEQ ID NO: 5335983 - DNA, 25 bp, Homo sapien
cgggagagggagacgagtctgaagg

SEQ ID NO: 5335984 - DNA, 25 bp, Homo sapien
ctgcggaggcgagagaggatctcag

SEQ ID NO: 5335985 - DNA, 25 bp, Homo sapien
acgagtctgaaggacccggatcccg

SEQ ID NO: 5335986 - DNA, 25 bp, Homo sapien
gagggagacgagtctgaaggacccg

SEQ ID NO: 5335987 - DNA, 25 bp, Homo sapien
gcggccgcactttttccgccttgga

SEQ ID NO: 5335988 - DNA, 25 bp, Homo sapien
cctcctcgagggctgtaagcgccat

SEQ ID NO: 5335989 - DNA, 25 bp, Homo sapien
tcgagccagcaagtcggccaagatg

SEQ ID NO: 5335990 - DNA, 25 bp, Homo sapien
aagcagagtccatgactcgagccag

SEQ ID NO: 5335991 - DNA, 25 bp, Homo sapien
acatggcaatcagagcaggaaacca

SEQ ID NO: 5335992 - DNA, 25 bp, Homo sapien
gccaattgacgaagagcctactatg

SEQ ID NO: 5335993 - DNA, 25 bp, Homo sapien
cagcccactaaccacaattgacaga

SEQ ID NO: 5335994 - DNA, 25 bp, Homo sapien
ccaagaagtggaacggaagagtagc

SEQ ID NO: 5335995 - DNA, 25 bp, Homo sapien
tcttctccacgaagagtaacctggg

SEQ ID NO: 5335996 - DNA, 25 bp, Homo sapien
catcctaggggagtagtcagtcacc

SEQ ID NO: 5335997 - DNA, 25 bp, Homo sapien
ccaagtggtagaagcaaagtagggt

SEQ ID NO: 5335998 - DNA, 25 bp, Homo sapien
ctccctgacagacccgggggagcag

SEQ ID NO: 5335999 - DNA, 25 bp, Homo sapien
cagagaagtggctcccaaaccaaaa

SEQ ID NO: 5336000 - DNA, 25 bp, Homo sapien
tcagatcccaggcagacggtaaggg

SEQ ID NO: 5336001 - DNA, 25 bp, Homo sapien
actcacacccctcccgctttcctgt

SEQ ID NO: 5336002 - DNA, 25 bp, Homo sapien
ccctctatgggaagccagaggcaac

SEQ ID NO: 5336003 - DNA, 25 bp, Homo sapien
gactccctaccagcgctgtcctggg

SEQ ID NO: 5336004 - DNA, 25 bp, Homo sapien
cctaccagcgctgtcctgggactca

SEQ ID NO: 5336005 - DNA, 25 bp, Homo sapien
aggtgttggcacttcgctgagctcc

SEQ ID NO: 5336006 - DNA, 25 bp, Homo sapien
gtggttttcccggtcttggcagcac

SEQ ID NO: 5336007 - DNA, 25 bp, Homo sapien
gtgccgtcctttttctgcttggagg

SEQ ID NO: 5336008 - DNA, 25 bp, Homo sapien
tgcttgcgcggcctgccacggcccc

SEQ ID NO: 5336009 - DNA, 25 bp, Homo sapien
ccacggccccgcttctcagtgccgt

SEQ ID NO: 5336010 - DNA, 25 bp, Homo sapien
tggctggacttcgagctcgactcgc

SEQ ID NO: 5336011 - DNA, 25 bp, Homo sapien
catgctccggtttgccgggagcagc

SEQ ID NO: 5336012 - DNA, 25 bp, Homo sapien
gctggcctgcggtgcatgctccggt

SEQ ID NO: 5336013 - DNA, 25 bp, Homo sapien
gctgggatgggcgaactcggccgct

SEQ ID NO: 5336014 - DNA, 25 bp, Homo sapien
cttctctaaggactagttggaaaag

SEQ ID NO: 5336015 - DNA, 25 bp, Homo sapien
gcccctggtcgcaaatgcggatgcc

SEQ ID NO: 5336016 - DNA, 25 bp, Homo sapien
cgcccctggtcgcaaatgcggatgc

SEQ ID NO: 5336017 - DNA, 25 bp, Homo sapien
ccgcagccgcccctggtcgcaaatg

SEQ ID NO: 5336018 - DNA, 25 bp, Homo sapien
agccgcccctggtcgcaaatgcgga

SEQ ID NO: 5336019 - DNA, 25 bp, Homo sapien
tattctccaacaaattctctgcggt

SEQ ID NO: 5336020 - DNA, 25 bp, Homo sapien
ttagtgtgataccatgctgcaacag

SEQ ID NO: 5336021 - DNA, 25 bp, Homo sapien
ccagcttgggctatattgcaataaa

SEQ ID NO: 5336022 - DNA, 25 bp, Homo sapien
gctgcaacagtatgcatgaagacat

SEQ ID NO: 5336023 - DNA, 25 bp, Homo sapien
atgagccattgagaccggccccgtt

SEQ ID NO: 5336024 - DNA, 25 bp, Homo sapien
gactttcaagtgcagtctctgaatt

SEQ ID NO: 5336025 - DNA, 25 bp, Homo sapien
ttaaaattgattggctcttaaacaa

SEQ ID NO: 5336026 - DNA, 25 bp, Homo sapien
cctcttgaaattctcgaaatagatt

SEQ ID NO: 5336027 - DNA, 25 bp, Homo sapien
tctcgggctctacaccacccactga

SEQ ID NO: 5336028 - DNA, 25 bp, Homo sapien
tccacttcctgttctcgggctctac

SEQ ID NO: 5336029 - DNA, 25 bp, Homo sapien
cacccactgaccctttccctcatgg

SEQ ID NO: 5336030 - DNA, 25 bp, Homo sapien
cattagctgtttcaaaatccacttc

SEQ ID NO: 5336031 - DNA, 25 bp, Homo sapien
aaagcgtttgagtgggcaccgtgca

SEQ ID NO: 5336032 - DNA, 25 bp, Homo sapien
taacaaagcgtttgagtgggcaccg

SEQ ID NO: 5336033 - DNA, 25 bp, Homo sapien
tgtaacaaagcgtttgagtgggcac

SEQ ID NO: 5336034 - DNA, 25 bp, Homo sapien
cttgagtgtaacaaagcgtttgagt

SEQ ID NO: 5336035 - DNA, 25 bp, Homo sapien
gacgtggcttccttggtcatctaaa

SEQ ID NO: 5336036 - DNA, 25 bp, Homo sapien
gtcatctaaactcccgcgcggtggg

SEQ ID NO: 5336037 - DNA, 25 bp, Homo sapien
tggtcatctaaactcccgcgcggtg

SEQ ID NO: 5336038 - DNA, 25 bp, Homo sapien
tgcccgagtaccgacgtggcttcct

SEQ ID NO: 5336039 - DNA, 25 bp, Homo sapien
aacggccgaccctggctctggcgca

SEQ ID NO: 5336040 - DNA, 25 bp, Homo sapien
ggccgaccctggctctggcgcatcc

SEQ ID NO: 5336041 - DNA, 25 bp, Homo sapien
tggctctggcgcatccccagctgaa

SEQ ID NO: 5336042 - DNA, 25 bp, Homo sapien
gaccctggctctggcgcatccccag

SEQ ID NO: 5336043 - DNA, 25 bp, Homo sapien
ccaacgcggtcgcagcaacgctggt

SEQ ID NO: 5336044 - DNA, 25 bp, Homo sapien
tcgcagcaacgctggtgtttctgct

SEQ ID NO: 5336045 - DNA, 25 bp, Homo sapien
cggtcgcagcaacgctggtgtttct

SEQ ID NO: 5336046 - DNA, 25 bp, Homo sapien
aacgcggtcgcagcaacgctggtgt

SEQ ID NO: 5336047 - DNA, 25 bp, Homo sapien
ccgggccgcgtaagccacctaacag

SEQ ID NO: 5336048 - DNA, 25 bp, Homo sapien
cgggccgcgtaagccacctaacagt

SEQ ID NO: 5336049 - DNA, 25 bp, Homo sapien
caggctatgggaacggacaagtgca

SEQ ID NO: 5336050 - DNA, 25 bp, Homo sapien
tattgacccgcattccaggatttgg

SEQ ID NO: 5336051 - DNA, 25 bp, Homo sapien
tgtacctggcatagggctaggccca

SEQ ID NO: 5336052 - DNA, 25 bp, Homo sapien
tgttgagagaacaccacaggcttgt

SEQ ID NO: 5336053 - DNA, 25 bp, Homo sapien
ttactcagtatcacagtcatgtttc

SEQ ID NO: 5336054 - DNA, 25 bp, Homo sapien
gctccagggatgatgtgaggcaggt

SEQ ID NO: 5336055 - DNA, 25 bp, Homo sapien
acagtcatgtttcacagctggtgaa

SEQ ID NO: 5336056 - DNA, 25 bp, Homo sapien
tgctccagggatgatgtgaggcagg

SEQ ID NO: 5336057 - DNA, 25 bp, Homo sapien
taaataactttaatggttgatgtgg

SEQ ID NO: 5336058 - DNA, 25 bp, Homo sapien
actttaatggttgatgtgggagtca

SEQ ID NO: 5336059 - DNA, 25 bp, Homo sapien
taactttaatggttgatgtgggagt

SEQ ID NO: 5336060 - DNA, 25 bp, Homo sapien
aataactttaatggttgatgtggga

SEQ ID NO: 5336061 - DNA, 25 bp, Homo sapien
cctcaaagctggttagtgcagggag

SEQ ID NO: 5336062 - DNA, 25 bp, Homo sapien
gaggtagggcagagttggttccagt

SEQ ID NO: 5336063 - DNA, 25 bp, Homo sapien
tgctccaagggttcttcagtgccat

SEQ ID NO: 5336064 - DNA, 25 bp, Homo sapien
atgagtccctcggtaccatggcaac

SEQ ID NO: 5336065 - DNA, 25 bp, Homo sapien
gactggccaacttgctatagacagc

SEQ ID NO: 5336066 - DNA, 25 bp, Homo sapien
tcttctgggcagatcctatgccagc

SEQ ID NO: 5336067 - DNA, 25 bp, Homo sapien
tatccagagcccaactgcgcatggg

SEQ ID NO: 5336068 - DNA, 25 bp, Homo sapien
ttgctatagacagcgccgtatccag

SEQ ID NO: 5336069 - DNA, 25 bp, Homo sapien
ggagccaagtgcgaggttggccttt

SEQ ID NO: 5336070 - DNA, 25 bp, Homo sapien
tggagccaagtgcgaggttggcctt

SEQ ID NO: 5336071 - DNA, 25 bp, Homo sapien
gagccaagtgcgaggttggcctttg

SEQ ID NO: 5336072 - DNA, 25 bp, Homo sapien
agccaagtgcgaggttggcctttgc

SEQ ID NO: 5336073 - DNA, 25 bp, Homo sapien
gtcaccgctgcgatgtcatccagcg

SEQ ID NO: 5336074 - DNA, 25 bp, Homo sapien
tcccgctgggtcaggatgtctgtca

SEQ ID NO: 5336075 - DNA, 25 bp, Homo sapien
ggatgtctgtcaccgctgcgatgtc

SEQ ID NO: 5336076 - DNA, 25 bp, Homo sapien
tgcgccctcccgctgggtcaggatg

SEQ ID NO: 5336077 - DNA, 25 bp, Homo sapien
gggggagggttgggctagtcagagc

SEQ ID NO: 5336078 - DNA, 25 bp, Homo sapien
gggttgggctagtcagagctcaggc

SEQ ID NO: 5336079 - DNA, 25 bp, Homo sapien
gggagggttgggctagtcagagctc

SEQ ID NO: 5336080 - DNA, 25 bp, Homo sapien
gagggttgggctagtcagagctcag

SEQ ID NO: 5336081 - DNA, 25 bp, Homo sapien
gtggagattgcgttatcctgcagga

SEQ ID NO: 5336082 - DNA, 25 bp, Homo sapien
cctggggctacaggctctgataaga

SEQ ID NO: 5336083 - DNA, 25 bp, Homo sapien
ggccccctggggctacaggctctga

SEQ ID NO: 5336084 - DNA, 25 bp, Homo sapien
tgggccccctggggctacaggctct

SEQ ID NO: 5336085 - DNA, 25 bp, Homo sapien
cccctggggctacaggctctgataa

SEQ ID NO: 5336086 - DNA, 25 bp, Homo sapien
attgggtgagacttgggtccccaga

SEQ ID NO: 5336087 - DNA, 25 bp, Homo sapien
aacacacaagattgggtgagacttg

SEQ ID NO: 5336088 - DNA, 25 bp, Homo sapien
tggttctaaaaagagttggagagga

SEQ ID NO: 5336089 - DNA, 25 bp, Homo sapien
ccagagatctggtgtagcccagagt

SEQ ID NO: 5336090 - DNA, 25 bp, Homo sapien
gacccctgctttgccagtgcttggg

SEQ ID NO: 5336091 - DNA, 25 bp, Homo sapien
catggtacaaggacccctgctttgc

SEQ ID NO: 5336092 - DNA, 25 bp, Homo sapien
ccatctcatggtacaaggacccctg

SEQ ID NO: 5336093 - DNA, 25 bp, Homo sapien
tacaaggacccctgctttgccagtg

SEQ ID NO: 5336094 - DNA, 25 bp, Homo sapien
ttcatcacagcactgcttccattgg

SEQ ID NO: 5336095 - DNA, 25 bp, Homo sapien
tttcatcacagcactgcttccattg

SEQ ID NO: 5336096 - DNA, 25 bp, Homo sapien
tcatcacagcactgcttccattggc

SEQ ID NO: 5336097 - DNA, 25 bp, Homo sapien
gatttcatcacagcactgcttccat

SEQ ID NO: 5336098 - DNA, 25 bp, Homo sapien
cagctctgcagtgcttcccgacttt

SEQ ID NO: 5336099 - DNA, 25 bp, Homo sapien
actggttactgatgcttagggtgaa

SEQ ID NO: 5336100 - DNA, 25 bp, Homo sapien
tgtctgaagggtgtgtgtcacctca

SEQ ID NO: 5336101 - DNA, 25 bp, Homo sapien
tgaagggccgtcctagagcctggtc

SEQ ID NO: 5336102 - DNA, 25 bp, Homo sapien
aagttggcagtgacaatcaggcagc

SEQ ID NO: 5336103 - DNA, 25 bp, Homo sapien
gatcacgcctgccttagaagaatga

SEQ ID NO: 5336104 - DNA, 25 bp, Homo sapien
gaatgggacgatcctctcacagtga

SEQ ID NO: 5336105 - DNA, 25 bp, Homo sapien
cccctgaagctggatgtggcactgt

SEQ ID NO: 5336106 - DNA, 25 bp, Homo sapien
gacagcaatagtaagcagcggctct

SEQ ID NO: 5336107 - DNA, 25 bp, Homo sapien
acagcaatagtaagcagcggctctt

SEQ ID NO: 5336108 - DNA, 25 bp, Homo sapien
aatagtaagcagcggctcttcccca

SEQ ID NO: 5336109 - DNA, 25 bp, Homo sapien
tttcagaactccatgcacttgtgcc

SEQ ID NO: 5336110 - DNA, 25 bp, Homo sapien
taacagaagaggtttgtgcctttca

SEQ ID NO: 5336111 - DNA, 25 bp, Homo sapien
cagaagaggtttgtgcctttcagaa

SEQ ID NO: 5336112 - DNA, 25 bp, Homo sapien
ctttcagaactccatgcacttgtgc

SEQ ID NO: 5336113 - DNA, 25 bp, Homo sapien
cggcaacacacgctaccataaaggg

SEQ ID NO: 5336114 - DNA, 25 bp, Homo sapien
aggctgagctgccagacggcaacac

SEQ ID NO: 5336115 - DNA, 25 bp, Homo sapien
gagggtaccacttgcagtgggctga

SEQ ID NO: 5336116 - DNA, 25 bp, Homo sapien
cagacggcaacacacgctaccataa

SEQ ID NO: 5336117 - DNA, 25 bp, Homo sapien
gtgaggtcatgtgtgcggaatccat

SEQ ID NO: 5336118 - DNA, 25 bp, Homo sapien
tgagccaagaggtggtaacgaggac

SEQ ID NO: 5336119 - DNA, 25 bp, Homo sapien
tcatgtgtgcggaatccatcttgca

SEQ ID NO: 5336120 - DNA, 25 bp, Homo sapien
tgtgcggaatccatcttgcactgct

SEQ ID NO: 5336121 - DNA, 25 bp, Homo sapien
gctacgtggccactgctcattcata

SEQ ID NO: 5336122 - DNA, 25 bp, Homo sapien
ttgctgctgctaaaaaggtaagacc

SEQ ID NO: 5336123 - DNA, 25 bp, Homo sapien
tgtctgcacatcctggcagcaatgc

SEQ ID NO: 5336124 - DNA, 25 bp, Homo sapien
ttcccactggtcttctggactggct

SEQ ID NO: 5336125 - DNA, 25 bp, Homo sapien
cacaggccccatacagctctaaccg

SEQ ID NO: 5336126 - DNA, 25 bp, Homo sapien
gctctaaccgcagttcaaagtctgg

SEQ ID NO: 5336127 - DNA, 25 bp, Homo sapien
gatgcccggacacgcctccctgagg

SEQ ID NO: 5336128 - DNA, 25 bp, Homo sapien
ctgtccagcgatgcccggacacgcc

SEQ ID NO: 5336129 - DNA, 25 bp, Homo sapien
gtcctgtccactaggatcatctctg

SEQ ID NO: 5336130 - DNA, 25 bp, Homo sapien
ggagatgtctgtgagggtcctgtcc

SEQ ID NO: 5336131 - DNA, 25 bp, Homo sapien
gtccactaggatcatctctgtgtcc

SEQ ID NO: 5336132 - DNA, 25 bp, Homo sapien
tgagggtcctgtccactaggatcat

SEQ ID NO: 5336133 - DNA, 25 bp, Homo sapien
gtccttccacatgagtggaatccgg

SEQ ID NO: 5336134 - DNA, 25 bp, Homo sapien
ttccacatgagtggaatccggaggt

SEQ ID NO: 5336135 - DNA, 25 bp, Homo sapien
ccttccacatgagtggaatccggag

SEQ ID NO: 5336136 - DNA, 25 bp, Homo sapien
cttccacatgagtggaatccggagg

SEQ ID NO: 5336137 - DNA, 25 bp, Homo sapien
gggggagcgctcagcgggcgggcca

SEQ ID NO: 5336138 - DNA, 25 bp, Homo sapien
ggggagcgctcagcgggcgggccac

SEQ ID NO: 5336139 - DNA, 25 bp, Homo sapien
cagggggagcgctcagcgggcgggc

SEQ ID NO: 5336140 - DNA, 25 bp, Homo sapien
agggggagcgctcagcgggcgggcc

SEQ ID NO: 5336141 - DNA, 25 bp, Homo sapien
ccaggcttggggacaccagggacac

SEQ ID NO: 5336142 - DNA, 25 bp, Homo sapien
agggacactcaagccacattaactc

SEQ ID NO: 5336143 - DNA, 25 bp, Homo sapien
cagggctgagggactataagggaaa

SEQ ID NO: 5336144 - DNA, 25 bp, Homo sapien
gccacattaactcacacataaggca

SEQ ID NO: 5336145 - DNA, 25 bp, Homo sapien
tcctggcctgatatggtgtacccta

SEQ ID NO: 5336146 - DNA, 25 bp, Homo sapien
tgttcaaaggaaaatcaccaatagg

SEQ ID NO: 5336147 - DNA, 25 bp, Homo sapien
gaaagctgcttatttcccaccatcc

SEQ ID NO: 5336148 - DNA, 25 bp, Homo sapien
ccaatagggaagagttacgttccat

SEQ ID NO: 5336149 - DNA, 25 bp, Homo sapien
accatgtgtccctttcctgaagcga

SEQ ID NO: 5336150 - DNA, 25 bp, Homo sapien
gctaaatgatgtggcactaatggca

SEQ ID NO: 5336151 - DNA, 25 bp, Homo sapien
gcaatgtgtttagctgccaggcact

SEQ ID NO: 5336152 - DNA, 25 bp, Homo sapien
gaagcgactgccagttcatctgtac

SEQ ID NO: 5336153 - DNA, 25 bp, Homo sapien
tcctctagcttcatgggatagccat

SEQ ID NO: 5336154 - DNA, 25 bp, Homo sapien
gctggaatgggcaccatacctgtga

SEQ ID NO: 5336155 - DNA, 25 bp, Homo sapien
cagcctcagtggagtaagtaggcca

SEQ ID NO: 5336156 - DNA, 25 bp, Homo sapien
gactatttcccctagcagcctcagt

SEQ ID NO: 5336157 - DNA, 25 bp, Homo sapien
tggctactcacaaatgcgcctctgg

SEQ ID NO: 5336158 - DNA, 25 bp, Homo sapien
cagtcttactggatcacagacaggg

SEQ ID NO: 5336159 - DNA, 25 bp, Homo sapien
cgcctctgggcaacacacagtggtg

SEQ ID NO: 5336160 - DNA, 25 bp, Homo sapien
cagacagggcttagcaaattagtgc

SEQ ID NO: 5336161 - DNA, 25 bp, Homo sapien
ggatctcatggtctagcttcctctg

SEQ ID NO: 5336162 - DNA, 25 bp, Homo sapien
cactagcaggctcttggtggcctcc

SEQ ID NO: 5336163 - DNA, 25 bp, Homo sapien
cgcccatgtagctgaggatgcggct

SEQ ID NO: 5336164 - DNA, 25 bp, Homo sapien
ggatgcggctgttgcacactagcag

SEQ ID NO: 5336165 - DNA, 25 bp, Homo sapien
ctggcctaacttttgtattcttagt

SEQ ID NO: 5336166 - DNA, 25 bp, Homo sapien
cttagtagagacagggtttcgccat

SEQ ID NO: 5336167 - DNA, 25 bp, Homo sapien
gcctggcctaacttttgtattctta

SEQ ID NO: 5336168 - DNA, 25 bp, Homo sapien
caattcttctgcctagcctccggag

SEQ ID NO: 5336169 - DNA, 25 bp, Homo sapien
tgagggactgtggataagggccagc

SEQ ID NO: 5336170 - DNA, 25 bp, Homo sapien
gtccaggaatgagggactgtggata

SEQ ID NO: 5336171 - DNA, 25 bp, Homo sapien
gaatgagggactgtggataagggcc

SEQ ID NO: 5336172 - DNA, 25 bp, Homo sapien
ggactgtggataagggccagctgag

SEQ ID NO: 5336173 - DNA, 25 bp, Homo sapien
tcttttgaggacctgctgaacttgg

SEQ ID NO: 5336174 - DNA, 25 bp, Homo sapien
cctgaaacatcaatgggtctctctt

SEQ ID NO: 5336175 - DNA, 25 bp, Homo sapien
tgagaaagaacacagcaccctcagc

SEQ ID NO: 5336176 - DNA, 25 bp, Homo sapien
tactcttccacgactatctcttttg

SEQ ID NO: 5336177 - DNA, 25 bp, Homo sapien
gtagagcatattcaggtcctccagg

SEQ ID NO: 5336178 - DNA, 25 bp, Homo sapien
cctccaggatgtgcaatctgtcctg

SEQ ID NO: 5336179 - DNA, 25 bp, Homo sapien
tccaggctgagtgccatctgccgaa

SEQ ID NO: 5336180 - DNA, 25 bp, Homo sapien
ccaggatgtgcaatctgtcctgcat

SEQ ID NO: 5336181 - DNA, 25 bp, Homo sapien
aggggggacagataggtaccacact

SEQ ID NO: 5336182 - DNA, 25 bp, Homo sapien
ctccagaggggggacagataggtac

SEQ ID NO: 5336183 - DNA, 25 bp, Homo sapien
cagaggggggacagataggtaccac

SEQ ID NO: 5336184 - DNA, 25 bp, Homo sapien
gaggggggacagataggtaccacac

SEQ ID NO: 5336185 - DNA, 25 bp, Homo sapien
tgacaaattttcctcgcccactgct

SEQ ID NO: 5336186 - DNA, 25 bp, Homo sapien
tgcactcctgttaaacccctctggc

SEQ ID NO: 5336187 - DNA, 25 bp, Homo sapien
aaagaaagcgaagtgaggataagtg

SEQ ID NO: 5336188 - DNA, 25 bp, Homo sapien
tgcccttatccctctgcactcctgt

SEQ ID NO: 5336189 - DNA, 25 bp, Homo sapien
ccagcttagtttgagaaagttggga

SEQ ID NO: 5336190 - DNA, 25 bp, Homo sapien
aaaggccctttcattccgactctgg

SEQ ID NO: 5336191 - DNA, 25 bp, Homo sapien
gggcagggaaacgacgcctcatgca

SEQ ID NO: 5336192 - DNA, 25 bp, Homo sapien
gggaatctgtgtgcggagagggcag

SEQ ID NO: 5336193 - DNA, 25 bp, Homo sapien
ttccagacaggaaaccagccccgat

SEQ ID NO: 5336194 - DNA, 25 bp, Homo sapien
gagtcacacttcactcggcggccgc

SEQ ID NO: 5336195 - DNA, 25 bp, Homo sapien
attccgagccagctgcagcctagcg

SEQ ID NO: 5336196 - DNA, 25 bp, Homo sapien
acgccaggcccacggagtcacactt

SEQ ID NO: 5336197 - DNA, 25 bp, Homo sapien
ccaggtccactagcttctgagtcag

SEQ ID NO: 5336198 - DNA, 25 bp, Homo sapien
gggtgtgaaagagcctctttgttct

SEQ ID NO: 5336199 - DNA, 25 bp, Homo sapien
gacgccgggacaagggtgtgaaaga

SEQ ID NO: 5336200 - DNA, 25 bp, Homo sapien
cacgcgggttcctcgggcccagtcg

SEQ ID NO: 5336201 - DNA, 25 bp, Homo sapien
gggctctccttgggcgagtgtgagt

SEQ ID NO: 5336202 - DNA, 25 bp, Homo sapien
tctccttgggcgagtgtgagtctga

SEQ ID NO: 5336203 - DNA, 25 bp, Homo sapien
ctccttgggcgagtgtgagtctgac

SEQ ID NO: 5336204 - DNA, 25 bp, Homo sapien
gctctccttgggcgagtgtgagtct

SEQ ID NO: 5336205 - DNA, 25 bp, Homo sapien
agtcggaagcggccgcgtttgaact

SEQ ID NO: 5336206 - DNA, 25 bp, Homo sapien
aggctgagtcggaagcggccgcgtt

SEQ ID NO: 5336207 - DNA, 25 bp, Homo sapien
tgaagaggctgagtcggaagcggcc

SEQ ID NO: 5336208 - DNA, 25 bp, Homo sapien
ggaagcggccgcgtttgaactccat

SEQ ID NO: 5336209 - DNA, 25 bp, Homo sapien
ctccagggcggagcccctggccacg

SEQ ID NO: 5336210 - DNA, 25 bp, Homo sapien
ggcggagcccctggccacggtgacc

SEQ ID NO: 5336211 - DNA, 25 bp, Homo sapien
agcccctggccacggtgacccggct

SEQ ID NO: 5336212 - DNA, 25 bp, Homo sapien
tggccacggtgacccggctccggtg

SEQ ID NO: 5336213 - DNA, 25 bp, Homo sapien
gcttctgtctctcgacgctcgtccg

SEQ ID NO: 5336214 - DNA, 25 bp, Homo sapien
actgcacctcgcgagcactgtggga

SEQ ID NO: 5336215 - DNA, 25 bp, Homo sapien
tgtgggagcgcgttctccctgcccg

SEQ ID NO: 5336216 - DNA, 25 bp, Homo sapien
tgcgactttgcctgctcagtgcgct

SEQ ID NO: 5336217 - DNA, 25 bp, Homo sapien
ctctggctctactcgggccctggga

SEQ ID NO: 5336218 - DNA, 25 bp, Homo sapien
acttgggacggaccgagaagccctg

SEQ ID NO: 5336219 - DNA, 25 bp, Homo sapien
agggatcgccgcgtagcacgctctg

SEQ ID NO: 5336220 - DNA, 25 bp, Homo sapien
tgaaaaccccgtggctcagggatcg

SEQ ID NO: 5336221 - DNA, 25 bp, Homo sapien
acctaggctcctctgcgaggctatc

SEQ ID NO: 5336222 - DNA, 25 bp, Homo sapien
tccccacctaggctcctctgcgagg

SEQ ID NO: 5336223 - DNA, 25 bp, Homo sapien
ttcaacatcccacagtcccaaatgt

SEQ ID NO: 5336224 - DNA, 25 bp, Homo sapien
tcaacatcccacagtcccaaatgtt

SEQ ID NO: 5336225 - DNA, 25 bp, Homo sapien
aatagactctggattcacattcacc

SEQ ID NO: 5336226 - DNA, 25 bp, Homo sapien
aaaatagactctggattcacattca

SEQ ID NO: 5336227 - DNA, 25 bp, Homo sapien
gaaaaatagactctggattcacatt

SEQ ID NO: 5336228 - DNA, 25 bp, Homo sapien
tagaaaaatagactctggattcaca

SEQ ID NO: 5336229 - DNA, 25 bp, Homo sapien
gggcaaaagccagaagcctttgtcc

SEQ ID NO: 5336230 - DNA, 25 bp, Homo sapien
gcatgagtgtcttggctcccctcct

SEQ ID NO: 5336231 - DNA, 25 bp, Homo sapien
ggcatgagtgtcttggctcccctcc

SEQ ID NO: 5336232 - DNA, 25 bp, Homo sapien
gaattactggtatccaaggggctgg

SEQ ID NO: 5336233 - DNA, 25 bp, Homo sapien
gccatggccagtaagacaaggctgg

SEQ ID NO: 5336234 - DNA, 25 bp, Homo sapien
ttcagccatggccagtaagacaagg

SEQ ID NO: 5336235 - DNA, 25 bp, Homo sapien
ccatggccagtaagacaaggctggt

SEQ ID NO: 5336236 - DNA, 25 bp, Homo sapien
cagccatggccagtaagacaaggct

SEQ ID NO: 5336237 - DNA, 25 bp, Homo sapien
tgcccatagtggtggagtgctccca

SEQ ID NO: 5336238 - DNA, 25 bp, Homo sapien
gccaggtagttgacattgagccaca

SEQ ID NO: 5336239 - DNA, 25 bp, Homo sapien
gatcatgctctgaattgcgctggcc

SEQ ID NO: 5336240 - DNA, 25 bp, Homo sapien
caaagaaagcctgtagcctggtact

SEQ ID NO: 5336241 - DNA, 25 bp, Homo sapien
taccagcccttgtccgtagaagtag

SEQ ID NO: 5336242 - DNA, 25 bp, Homo sapien
aatgggaattttcagggtcacctgc

SEQ ID NO: 5336243 - DNA, 25 bp, Homo sapien
cgtggactgctcgttgtactaggaa

SEQ ID NO: 5336244 - DNA, 25 bp, Homo sapien
caaaggaagcctcgtgggaagaatg

SEQ ID NO: 5336245 - DNA, 25 bp, Homo sapien
tcctggcaagccgaggtagcgttca

SEQ ID NO: 5336246 - DNA, 25 bp, Homo sapien
taggcgactctttaccatctctgtc

SEQ ID NO: 5336247 - DNA, 25 bp, Homo sapien
ggttggaggtccagaagacattgta

SEQ ID NO: 5336248 - DNA, 25 bp, Homo sapien
gaaaccagctatttaggcgactctt

SEQ ID NO: 5336249 - DNA, 25 bp, Homo sapien
gcagtgggcattataaagagaaata

SEQ ID NO: 5336250 - DNA, 25 bp, Homo sapien
gataaataggaaatattattcaaga

SEQ ID NO: 5336251 - DNA, 25 bp, Homo sapien
taggaaatattattcaagagaaggc

SEQ ID NO: 5336252 - DNA, 25 bp, Homo sapien
atattattcaagagaaggcagtggg

SEQ ID NO: 5336253 - DNA, 25 bp, Homo sapien
ggggacatggagactggtgaaaatg

SEQ ID NO: 5336254 - DNA, 25 bp, Homo sapien
caggggacatggagactggtgaaaa

SEQ ID NO: 5336255 - DNA, 25 bp, Homo sapien
aggcaggggacatggagactggtga

SEQ ID NO: 5336256 - DNA, 25 bp, Homo sapien
caccccttccatcccccaacattct

SEQ ID NO: 5336257 - DNA, 25 bp, Homo sapien
ttggccccaacctctggtagtagga

SEQ ID NO: 5336258 - DNA, 25 bp, Homo sapien
ccaagttcactggtgtgcccactga

SEQ ID NO: 5336259 - DNA, 25 bp, Homo sapien
caaaagtgtaaagcggaagtcacca

SEQ ID NO: 5336260 - DNA, 25 bp, Homo sapien
gggctgtatcccctggactggttgg

SEQ ID NO: 5336261 - DNA, 25 bp, Homo sapien
tgtcaccacatagaagaacagggag

SEQ ID NO: 5336262 - DNA, 25 bp, Homo sapien
ctgtcaccacatagaagaacaggga

SEQ ID NO: 5336263 - DNA, 25 bp, Homo sapien
gggtcactgagggtaaccaggtaca

SEQ ID NO: 5336264 - DNA, 25 bp, Homo sapien
tgagtgaccaacgaggacagaaaag

SEQ ID NO: 5336265 - DNA, 25 bp, Homo sapien
ccaagcgggatgagataaagagcct

SEQ ID NO: 5336266 - DNA, 25 bp, Homo sapien
tgtaaacaacatacgtctggcagta

SEQ ID NO: 5336267 - DNA, 25 bp, Homo sapien
ggcaggatttaagccaggcagccag

SEQ ID NO: 5336268 - DNA, 25 bp, Homo sapien
aggcaggatttaagccaggcagcca

SEQ ID NO: 5336269 - DNA, 25 bp, Homo sapien
ttagagatggtaaatagaaatggtt

SEQ ID NO: 5336270 - DNA, 25 bp, Homo sapien
gttatacaggcagttgtttaaggca

SEQ ID NO: 5336271 - DNA, 25 bp, Homo sapien
tctccagctccagtcccctccgtgc

SEQ ID NO: 5336272 - DNA, 25 bp, Homo sapien
gaggctctacagtcactctccagct

SEQ ID NO: 5336273 - DNA, 25 bp, Homo sapien
ctgaggctctacagtcactctccag

SEQ ID NO: 5336274 - DNA, 25 bp, Homo sapien
tccagctccagtcccctccgtgctg

SEQ ID NO: 5336275 - DNA, 25 bp, Homo sapien
ccatcctggatgtgttggcgcccga

SEQ ID NO: 5336276 - DNA, 25 bp, Homo sapien
ggcctcttgacgaactcagtggtga

SEQ ID NO: 5336277 - DNA, 25 bp, Homo sapien
tcgtggaactcccagccatagggac

SEQ ID NO: 5336278 - DNA, 25 bp, Homo sapien
ggtgagccttaaggccccatcctgg

SEQ ID NO: 5336279 - DNA, 25 bp, Homo sapien
tgagggcggtaggttccccagaaga

SEQ ID NO: 5336280 - DNA, 25 bp, Homo sapien
ttcatgccgaagtagacgtgagggc

SEQ ID NO: 5336281 - DNA, 25 bp, Homo sapien
ttcgggctgcgggtcttcatgccga

SEQ ID NO: 5336282 - DNA, 25 bp, Homo sapien
ggtcttcatgccgaagtagacgtga

SEQ ID NO: 5336283 - DNA, 25 bp, Homo sapien
tggaggagtcggcaggcaacacagg

SEQ ID NO: 5336284 - DNA, 25 bp, Homo sapien
agggccaaagacaggaccacgacgg

SEQ ID NO: 5336285 - DNA, 25 bp, Homo sapien
gaggcgcggagtgcagcgtgaccgc

SEQ ID NO: 5336286 - DNA, 25 bp, Homo sapien
actcctccagccgtgctacgcggcc

SEQ ID NO: 5336287 - DNA, 25 bp, Homo sapien
tccgcgtcacaagagctcggagagg

SEQ ID NO: 5336288 - DNA, 25 bp, Homo sapien
agagctcggagaggcggcagtggag

SEQ ID NO: 5336289 - DNA, 25 bp, Homo sapien
cctggcactgaggtccgcgtcacaa

SEQ ID NO: 5336290 - DNA, 25 bp, Homo sapien
actgaggtccgcgtcacaagagctc

SEQ ID NO: 5336291 - DNA, 25 bp, Homo sapien
ccggttagcgacacctgccagccag

SEQ ID NO: 5336292 - DNA, 25 bp, Homo sapien
tctcgccctggcgaccaccgtccgg

SEQ ID NO: 5336293 - DNA, 25 bp, Homo sapien
ggcgaccaccgtccggttagcgaca

SEQ ID NO: 5336294 - DNA, 25 bp, Homo sapien
cgcctctcgccctggcgaccaccgt

SEQ ID NO: 5336295 - DNA, 25 bp, Homo sapien
tgtcctagtccacgctaaaatcatc

SEQ ID NO: 5336296 - DNA, 25 bp, Homo sapien
attttgcgctccgtgacccttcaga

SEQ ID NO: 5336297 - DNA, 25 bp, Homo sapien
catcttgttggtctctttggcgctg

SEQ ID NO: 5336298 - DNA, 25 bp, Homo sapien
actcttcttaggttaagtgtcctag

SEQ ID NO: 5336299 - DNA, 25 bp, Homo sapien
tttccagagcggtgagatgagcgcc

SEQ ID NO: 5336300 - DNA, 25 bp, Homo sapien
gaggcgaaggcggtgagcatttcca

SEQ ID NO: 5336301 - DNA, 25 bp, Homo sapien
cgaccagtatcagcgcccggcttgt

SEQ ID NO: 5336302 - DNA, 25 bp, Homo sapien
tgagcgccgcgcataatcaggcgat

SEQ ID NO: 5336303 - DNA, 25 bp, Homo sapien
gtccacgcagggctcggagccgtca

SEQ ID NO: 5336304 - DNA, 25 bp, Homo sapien
cagttgagattagtggagcggacct

SEQ ID NO: 5336305 - DNA, 25 bp, Homo sapien
ggctcggagccgtcatgcctcacgt

SEQ ID NO: 5336306 - DNA, 25 bp, Homo sapien
ttctcactgctcaccgtctgcagga

SEQ ID NO: 5336307 - DNA, 25 bp, Homo sapien
cgtcgattccacgtttttctcgaag

SEQ ID NO: 5336308 - DNA, 25 bp, Homo sapien
gtttttctcgaagggacagaactga

SEQ ID NO: 5336309 - DNA, 25 bp, Homo sapien
gaactgaacccgaacctgtttgaca

SEQ ID NO: 5336310 - DNA, 25 bp, Homo sapien
agaccaagccgagccaaggcagctg

SEQ ID NO: 5336311 - DNA, 25 bp, Homo sapien
tgtcgcattgcgtgaggccgtgaat

SEQ ID NO: 5336312 - DNA, 25 bp, Homo sapien
gccggctgcttagcaggcctgcgaa

SEQ ID NO: 5336313 - DNA, 25 bp, Homo sapien
ctcgtgcaggcggaagtgtcgcatt

SEQ ID NO: 5336314 - DNA, 25 bp, Homo sapien
tggctgcgcttctgcgggatagact

SEQ ID NO: 5336315 - DNA, 25 bp, Homo sapien
gagagcactaacacaagccgggatg

SEQ ID NO: 5336316 - DNA, 25 bp, Homo sapien
catgaattagcgtagctcccaggac

SEQ ID NO: 5336317 - DNA, 25 bp, Homo sapien
gaaagaggtggtttcggcacaacgc

SEQ ID NO: 5336318 - DNA, 25 bp, Homo sapien
tgaatagtcctctcatacgacggtg

SEQ ID NO: 5336319 - DNA, 25 bp, Homo sapien
tattctccagtatgctttcctccaa

SEQ ID NO: 5336320 - DNA, 25 bp, Homo sapien
attctccagtatgctttcctccaag

SEQ ID NO: 5336321 - DNA, 25 bp, Homo sapien
ttcctccaagcttccagttctgggc

SEQ ID NO: 5336322 - DNA, 25 bp, Homo sapien
ttattctccagtatgctttcctcca

SEQ ID NO: 5336323 - DNA, 25 bp, Homo sapien
ccaggcaggaaaaaaacggcaggtg

SEQ ID NO: 5336324 - DNA, 25 bp, Homo sapien
tcaggactggttcccaggcaggaaa

SEQ ID NO: 5336325 - DNA, 25 bp, Homo sapien
ttaggattcaggactggttcccagg

SEQ ID NO: 5336326 - DNA, 25 bp, Homo sapien
ggcaggtgccaacggggtcgctggt

SEQ ID NO: 5336327 - DNA, 25 bp, Homo sapien
ggcaagccaggcctgctgatttccc

SEQ ID NO: 5336328 - DNA, 25 bp, Homo sapien
agggcaagccaggcctgctgatttc

SEQ ID NO: 5336329 - DNA, 25 bp, Homo sapien
ctgagggcaagccaggcctgctgat

SEQ ID NO: 5336330 - DNA, 25 bp, Homo sapien
tgagggcaagccaggcctgctgatt

SEQ ID NO: 5336331 - DNA, 25 bp, Homo sapien
gtccccttcctcctagtgtgctttg

SEQ ID NO: 5336332 - DNA, 25 bp, Homo sapien
ttcctcctagtgtgctttgcagctg

SEQ ID NO: 5336333 - DNA, 25 bp, Homo sapien
cccttcctcctagtgtgctttgcag

SEQ ID NO: 5336334 - DNA, 25 bp, Homo sapien
cctcctagtgtgctttgcagctgac

SEQ ID NO: 5336335 - DNA, 25 bp, Homo sapien
ggcaatttcgtggtctggacctcct

SEQ ID NO: 5336336 - DNA, 25 bp, Homo sapien
gctgggcaatttcgtggtctggacc

SEQ ID NO: 5336337 - DNA, 25 bp, Homo sapien
tgggcaatttcgtggtctggacctc

SEQ ID NO: 5336338 - DNA, 25 bp, Homo sapien
ctgctgggcaatttcgtggtctgga

SEQ ID NO: 5336339 - DNA, 25 bp, Homo sapien
ctggtaaggcaggagtggaaggtag

SEQ ID NO: 5336340 - DNA, 25 bp, Homo sapien
gagtggaaggtaggtggctgctggg

SEQ ID NO: 5336341 - DNA, 25 bp, Homo sapien
gcaggagtggaaggtaggtggctgc

SEQ ID NO: 5336342 - DNA, 25 bp, Homo sapien
aaggcaggagtggaaggtaggtggc

SEQ ID NO: 5336343 - DNA, 25 bp, Homo sapien
gacacacaaagcagtgagcgaaggg

SEQ ID NO: 5336344 - DNA, 25 bp, Homo sapien
gggacacacaaagcagtgagcgaag

SEQ ID NO: 5336345 - DNA, 25 bp, Homo sapien
cagtgagcgaaggggagtaactcac

SEQ ID NO: 5336346 - DNA, 25 bp, Homo sapien
ggacacacaaagcagtgagcgaagg

SEQ ID NO: 5336347 - DNA, 25 bp, Homo sapien
cactccaaagtcttgtttgagctgc

SEQ ID NO: 5336348 - DNA, 25 bp, Homo sapien
gaccactccaaagtcttgtttgagc

SEQ ID NO: 5336349 - DNA, 25 bp, Homo sapien
cctgaccactccaaagtcttgtttg

SEQ ID NO: 5336350 - DNA, 25 bp, Homo sapien
actccctgaccactccaaagtcttg

SEQ ID NO: 5336351 - DNA, 25 bp, Homo sapien
tactcactaggagcactgggaggtt

SEQ ID NO: 5336352 - DNA, 25 bp, Homo sapien
gtaagaatgtggtcaagccaggcac

SEQ ID NO: 5336353 - DNA, 25 bp, Homo sapien
cggtgcggaccactaaaccagcata

SEQ ID NO: 5336354 - DNA, 25 bp, Homo sapien
gaggtggcaacccttgcaatccttg

SEQ ID NO: 5336355 - DNA, 25 bp, Homo sapien
tttggaagggctgagacactattac

SEQ ID NO: 5336356 - DNA, 25 bp, Homo sapien
ttcaggagggaagggtacagaagct

SEQ ID NO: 5336357 - DNA, 25 bp, Homo sapien
cagaatataaggctgtggagatcca

SEQ ID NO: 5336358 - DNA, 25 bp, Homo sapien
cattgaacccctaaatggagtgttt

SEQ ID NO: 5336359 - DNA, 25 bp, Homo sapien
aggagaagctgggatgaggagttac

SEQ ID NO: 5336360 - DNA, 25 bp, Homo sapien
ggaaggagaagctgggatgaggagt

SEQ ID NO: 5336361 - DNA, 25 bp, Homo sapien
ccccttggaactctggaaggagaag

SEQ ID NO: 5336362 - DNA, 25 bp, Homo sapien
cccttggaactctggaaggagaagc

SEQ ID NO: 5336363 - DNA, 25 bp, Homo sapien
gaaaccttgcatggcttgtttatga

SEQ ID NO: 5336364 - DNA, 25 bp, Homo sapien
gagcttgaaaccttgcatggcttgt

SEQ ID NO: 5336365 - DNA, 25 bp, Homo sapien
agagacgaagccgccagtaccgacc

SEQ ID NO: 5336366 - DNA, 25 bp, Homo sapien
agtaccgaccccgtggcatgtagag

SEQ ID NO: 5336367 - DNA, 25 bp, Homo sapien
agatacatttagcagagactccaag

SEQ ID NO: 5336368 - DNA, 25 bp, Homo sapien
acagaacatagggtcttacactgcc

SEQ ID NO: 5336369 - DNA, 25 bp, Homo sapien
tactgagatgttctactcttcccac

SEQ ID NO: 5336370 - DNA, 25 bp, Homo sapien
catagggtcttacactgccactgtt

SEQ ID NO: 5336371 - DNA, 25 bp, Homo sapien
tgctccacttccagagctaagcttt

SEQ ID NO: 5336372 - DNA, 25 bp, Homo sapien
gagctaagctttcctctgaggccag

SEQ ID NO: 5336373 - DNA, 25 bp, Homo sapien
agcttctggatctccaggcccagct

SEQ ID NO: 5336374 - DNA, 25 bp, Homo sapien
ggatctgtgcagtcagcttctggat

SEQ ID NO: 5336375 - DNA, 25 bp, Homo sapien
aaagcttctgcctcatgcaacagag

SEQ ID NO: 5336376 - DNA, 25 bp, Homo sapien
ctatacaaagcttctgcctcatgca

SEQ ID NO: 5336377 - DNA, 25 bp, Homo sapien
caaagcttctgcctcatgcaacaga

SEQ ID NO: 5336378 - DNA, 25 bp, Homo sapien
tacaaagcttctgcctcatgcaaca

SEQ ID NO: 5336379 - DNA, 25 bp, Homo sapien
tgggtggaaacagggagtgagggct

SEQ ID NO: 5336380 - DNA, 25 bp, Homo sapien
ggtggaaacagggagtgagggctca

SEQ ID NO: 5336381 - DNA, 25 bp, Homo sapien
gggtggaaacagggagtgagggctc

SEQ ID NO: 5336382 - DNA, 25 bp, Homo sapien
taagtccttttggatcaggagcagg

SEQ ID NO: 5336383 - DNA, 25 bp, Homo sapien
caaggtggtctgaagggtacagaga

SEQ ID NO: 5336384 - DNA, 25 bp, Homo sapien
aggtaagtccttttggatcaggagc

SEQ ID NO: 5336385 - DNA, 25 bp, Homo sapien
atgctgccaagtactgctgagctct

SEQ ID NO: 5336386 - DNA, 25 bp, Homo sapien
gatatcctcaactgctctgtgtccc

SEQ ID NO: 5336387 - DNA, 25 bp, Homo sapien
gaggcagatttcagaacagagtgaa

SEQ ID NO: 5336388 - DNA, 25 bp, Homo sapien
gggtcatggagtacctttgggaaga

SEQ ID NO: 5336389 - DNA, 25 bp, Homo sapien
cagagtgagtatcttaggggtcatg

SEQ ID NO: 5336390 - DNA, 25 bp, Homo sapien
tctcgaagggcatccaagagaggag

SEQ ID NO: 5336391 - DNA, 25 bp, Homo sapien
ggctggcagaaaatccgtcgtaacc

SEQ ID NO: 5336392 - DNA, 25 bp, Homo sapien
gtaacctgggctctcgaagggcatc

SEQ ID NO: 5336393 - DNA, 25 bp, Homo sapien
tgctgcaaaagttcagcagtgccag

SEQ ID NO: 5336394 - DNA, 25 bp, Homo sapien
tgagagagtatagtgtggtggggaa

SEQ ID NO: 5336395 - DNA, 25 bp, Homo sapien
gatgagagagtatagtgtggtgggg

SEQ ID NO: 5336396 - DNA, 25 bp, Homo sapien
gagagagtatagtgtggtggggaag

SEQ ID NO: 5336397 - DNA, 25 bp, Homo sapien
gaagcggtaacctgggacttatgtc

SEQ ID NO: 5336398 - DNA, 25 bp, Homo sapien
tctgtgacacaaagatgccagctcc

SEQ ID NO: 5336399 - DNA, 25 bp, Homo sapien
gtcccagctccagataagcgactga

SEQ ID NO: 5336400 - DNA, 25 bp, Homo sapien
gatgaagtagtctgtgacacaaaga

SEQ ID NO: 5336401 - DNA, 25 bp, Homo sapien
cagctccagataagcgactgatgaa

SEQ ID NO: 5336402 - DNA, 25 bp, Homo sapien
cagaagctatagtctgaacccaggg

SEQ ID NO: 5336403 - DNA, 25 bp, Homo sapien
tgcttttgccttcaggatggcaggt

SEQ ID NO: 5336404 - DNA, 25 bp, Homo sapien
gatggcaggtcagtgagttggccaa

SEQ ID NO: 5336405 - DNA, 25 bp, Homo sapien
cctgcccactcaatgatgaggcaag

SEQ ID NO: 5336406 - DNA, 25 bp, Homo sapien
acagcagggtccagtattggctcca

SEQ ID NO: 5336407 - DNA, 25 bp, Homo sapien
tgactcagctgttgcgctgttgccc

SEQ ID NO: 5336408 - DNA, 25 bp, Homo sapien
gatttaggtccagactctgagcaca

SEQ ID NO: 5336409 - DNA, 25 bp, Homo sapien
cagtgcctgactcagctgttgcgct

SEQ ID NO: 5336410 - DNA, 25 bp, Homo sapien
agagcgcgaagctgcatctcgatga

SEQ ID NO: 5336411 - DNA, 25 bp, Homo sapien
tcttggcaccgcctgcggagctggt

SEQ ID NO: 5336412 - DNA, 25 bp, Homo sapien
tagcagcagcggctcgagagtctcc

SEQ ID NO: 5336413 - DNA, 25 bp, Homo sapien
tcatgagtcgcacagccgactgtag

SEQ ID NO: 5336414 - DNA, 25 bp, Homo sapien
caggctacctgagcgagacgcctgg

SEQ ID NO: 5336415 - DNA, 25 bp, Homo sapien
ccagcagtgaacctcccagcgaaga

SEQ ID NO: 5336416 - DNA, 25 bp, Homo sapien
caggccgcagcatcagcctcgtagt

SEQ ID NO: 5336417 - DNA, 25 bp, Homo sapien
gataacgagtggaggcaggctacct

SEQ ID NO: 5336418 - DNA, 25 bp, Homo sapien
gaccttcatggactctctcgtgctc

SEQ ID NO: 5336419 - DNA, 25 bp, Homo sapien
tctcgtgctccgtaatgggaggctt

SEQ ID NO: 5336420 - DNA, 25 bp, Homo sapien
tccagaacgaacctaacgattccca

SEQ ID NO: 5336421 - DNA, 25 bp, Homo sapien
ttcgccccatcgcaagagccgtttt

SEQ ID NO: 5336422 - DNA, 25 bp, Homo sapien
ggtctgtcaacatctaagcctcagt

SEQ ID NO: 5336423 - DNA, 25 bp, Homo sapien
aatttcacgtctaagatcctggcag

SEQ ID NO: 5336424 - DNA, 25 bp, Homo sapien
tgtgagaaaatacctcccaagtgcc

SEQ ID NO: 5336425 - DNA, 25 bp, Homo sapien
gggtcaccttggatgggtctgtcaa

SEQ ID NO: 5336426 - DNA, 25 bp, Homo sapien
tattgggaaagtagcctggacaaca

SEQ ID NO: 5336427 - DNA, 25 bp, Homo sapien
accgggaaaggtgagcgtctggact

SEQ ID NO: 5336428 - DNA, 25 bp, Homo sapien
gtgagcggtgatcgctccacggcac

SEQ ID NO: 5336429 - DNA, 25 bp, Homo sapien
ggcagagtctcgactttattctcaa

SEQ ID NO: 5336430 - DNA, 25 bp, Homo sapien
tccagcacctgttgcgcggtgaacg

SEQ ID NO: 5336431 - DNA, 25 bp, Homo sapien
tacttctggaagacgaagcgccgct

SEQ ID NO: 5336432 - DNA, 25 bp, Homo sapien
ttctggaaccaagtgaccacctgcg

SEQ ID NO: 5336433 - DNA, 25 bp, Homo sapien
tgaacgcagtgcgtgacttgcgccg

SEQ ID NO: 5336434 - DNA, 25 bp, Homo sapien
gtttccagcctccgggaatcaggct

SEQ ID NO: 5336435 - DNA, 25 bp, Homo sapien
ctgtagggatagggagggggtcagt

SEQ ID NO: 5336436 - DNA, 25 bp, Homo sapien
gatagggagggggtcagtttccagc

SEQ ID NO: 5336437 - DNA, 25 bp, Homo sapien
agtttccagcctccgggaatcaggc

SEQ ID NO: 5336438 - DNA, 25 bp, Homo sapien
tcccctcgagaagagagtggcttgg

SEQ ID NO: 5336439 - DNA, 25 bp, Homo sapien
cctccggccccaaagggagataatg

SEQ ID NO: 5336440 - DNA, 25 bp, Homo sapien
tggtcacccggaaagactcgactct

SEQ ID NO: 5336441 - DNA, 25 bp, Homo sapien
agaaaaggcagagtgcggaatcccg

SEQ ID NO: 5336442 - DNA, 25 bp, Homo sapien
tcctgcctttctctatcgcgattgc

SEQ ID NO: 5336443 - DNA, 25 bp, Homo sapien
taccgcctgcggctgaagccttttg

SEQ ID NO: 5336444 - DNA, 25 bp, Homo sapien
tcgtttaccgcctgcggctgaagcc

SEQ ID NO: 5336445 - DNA, 25 bp, Homo sapien
cgcctgcggctgaagccttttgtct

SEQ ID NO: 5336446 - DNA, 25 bp, Homo sapien
cagttggcgacggtctgcccttttc

SEQ ID NO: 5336447 - DNA, 25 bp, Homo sapien
gcaacaggtcgctcagttggcgacg

SEQ ID NO: 5336448 - DNA, 25 bp, Homo sapien
gcactggcggccttccggagccgcc

SEQ ID NO: 5336449 - DNA, 25 bp, Homo sapien
tacaaggaacagagcaacaggtcgc

SEQ ID NO: 5336450 - DNA, 25 bp, Homo sapien
cgcgcgtcaagtccgcggaaagttt

SEQ ID NO: 5336451 - DNA, 25 bp, Homo sapien
ccgcggaaagttttactagtcagct

SEQ ID NO: 5336452 - DNA, 25 bp, Homo sapien
cacagcggcgacgttggacccggac

SEQ ID NO: 5336453 - DNA, 25 bp, Homo sapien
gctgcagagcgcgcgcgtcaagtcc

SEQ ID NO: 5336454 - DNA, 25 bp, Homo sapien
gttcggggctcgcgtcccgagttca

SEQ ID NO: 5336455 - DNA, 25 bp, Homo sapien
tgttcggggctcgcgtcccgagttc

SEQ ID NO: 5336456 - DNA, 25 bp, Homo sapien
ttcggggctcgcgtcccgagttcat

SEQ ID NO: 5336457 - DNA, 25 bp, Homo sapien
gtccggctgtccgttgcgctaggct

SEQ ID NO: 5336458 - DNA, 25 bp, Homo sapien
ggctctgggcccgagtcccgtgtgc

SEQ ID NO: 5336459 - DNA, 25 bp, Homo sapien
gatctggagctcctagatgtccggg

SEQ ID NO: 5336460 - DNA, 25 bp, Homo sapien
cccgggccgcggtggatctggagct

SEQ ID NO: 5336461 - DNA, 25 bp, Homo sapien
ctgacggctggaagtgattagtgct

SEQ ID NO: 5336462 - DNA, 25 bp, Homo sapien
agcacaggtgaatggacccgaggct

SEQ ID NO: 5336463 - DNA, 25 bp, Homo sapien
gggatgccacgaagaagcaagcaca

SEQ ID NO: 5336464 - DNA, 25 bp, Homo sapien
cggagcgactgcaactgggaatagt

SEQ ID NO: 5336465 - DNA, 25 bp, Homo sapien
tccgtcccgcacacttctgggattg

SEQ ID NO: 5336466 - DNA, 25 bp, Homo sapien
ggtggacaaggacaatctcagcgaa

SEQ ID NO: 5336467 - DNA, 25 bp, Homo sapien
attgccggcccggacattccactga

SEQ ID NO: 5336468 - DNA, 25 bp, Homo sapien
gctactgcggagtgaaccggtcctt

SEQ ID NO: 5336469 - DNA, 25 bp, Homo sapien
cgccctggacgctgttttgcaaaga

SEQ ID NO: 5336470 - DNA, 25 bp, Homo sapien
tttgcaaagatctctgcgcgcccac

SEQ ID NO: 5336471 - DNA, 25 bp, Homo sapien
gggcggcaggcctgtgagttgtttt

SEQ ID NO: 5336472 - DNA, 25 bp, Homo sapien
agccagcggtgggaaactccgacgc

SEQ ID NO: 5336473 - DNA, 25 bp, Homo sapien
caaaggcgggagcaaatcctggtgc

SEQ ID NO: 5336474 - DNA, 25 bp, Homo sapien
gtgctgtcgcctttggatgtgagtc

SEQ ID NO: 5336475 - DNA, 25 bp, Homo sapien
tgccaaaggcgggagcaaatcctgg

SEQ ID NO: 5336476 - DNA, 25 bp, Homo sapien
ctctgtgccaaaggcgggagcaaat

SEQ ID NO: 5336477 - DNA, 25 bp, Homo sapien
ctggcacagacggagacccgagtga

SEQ ID NO: 5336478 - DNA, 25 bp, Homo sapien
caaggtttggccctcaggcgagaac

SEQ ID NO: 5336479 - DNA, 25 bp, Homo sapien
aggcgagaaccgacgccttgtcccg

SEQ ID NO: 5336480 - DNA, 25 bp, Homo sapien
tctcagtcgcgcgaagccagagagg

SEQ ID NO: 5336481 - DNA, 25 bp, Homo sapien
tgctcggcctcaaggcgtgagtcac

SEQ ID NO: 5336482 - DNA, 25 bp, Homo sapien
gggtctccggcctcggcacattaat

SEQ ID NO: 5336483 - DNA, 25 bp, Homo sapien
gccgctgctgacagacaagaccaag

SEQ ID NO: 5336484 - DNA, 25 bp, Homo sapien
tcaccaagggcaagtcccgtgactt

SEQ ID NO: 5336485 - DNA, 25 bp, Homo sapien
gaaacagtgtccgactgtggcaccc

SEQ ID NO: 5336486 - DNA, 25 bp, Homo sapien
caggcctttcccgcaagtctggagt

SEQ ID NO: 5336487 - DNA, 25 bp, Homo sapien
ccagagcgtccaatgcgagctcagg

SEQ ID NO: 5336488 - DNA, 25 bp, Homo sapien
cactcgagctcttcttcggcgtctg

SEQ ID NO: 5336489 - DNA, 25 bp, Homo sapien
ttatttcaaaaaataaagctgcagt

SEQ ID NO: 5336490 - DNA, 25 bp, Homo sapien
tttcaaaaaataaagctgcagttca

SEQ ID NO: 5336491 - DNA, 25 bp, Homo sapien
tcaaaaaataaagctgcagttcatt

SEQ ID NO: 5336492 - DNA, 25 bp, Homo sapien
atttcaaaaaataaagctgcagttc

SEQ ID NO: 5336493 - DNA, 25 bp, Homo sapien
tcctcttctctttcacactgtattg

SEQ ID NO: 5336494 - DNA, 25 bp, Homo sapien
cactgtattgtaaaagcaaagggga

SEQ ID NO: 5336495 - DNA, 25 bp, Homo sapien
ctcttctctttcacactgtattgta

SEQ ID NO: 5336496 - DNA, 25 bp, Homo sapien
tgtattgtaaaagcaaaggggatgg

SEQ ID NO: 5336497 - DNA, 25 bp, Homo sapien
gaatgaggaagtagtagtcagtggg

SEQ ID NO: 5336498 - DNA, 25 bp, Homo sapien
gggaatgttcttatattattcaaag

SEQ ID NO: 5336499 - DNA, 25 bp, Homo sapien
aagtagtagtcagtggggaatgttc

SEQ ID NO: 5336500 - DNA, 25 bp, Homo sapien
atgttcttatattattcaaagggcc

SEQ ID NO: 5336501 - DNA, 25 bp, Homo sapien
ttgtcatgtgatcagggagaacttc

SEQ ID NO: 5336502 - DNA, 25 bp, Homo sapien
cttgccgaaccagcgggagagccat

SEQ ID NO: 5336503 - DNA, 25 bp, Homo sapien
ggagagccatatctgcttcattgtc

SEQ ID NO: 5336504 - DNA, 25 bp, Homo sapien
tgtgatcagggagaacttcattgtc

SEQ ID NO: 5336505 - DNA, 25 bp, Homo sapien
gtttagcatcaagcggtgacacagg

SEQ ID NO: 5336506 - DNA, 25 bp, Homo sapien
gagggtttagcatcaagcggtgaca

SEQ ID NO: 5336507 - DNA, 25 bp, Homo sapien
acacaggaccctccggagatggcgt

SEQ ID NO: 5336508 - DNA, 25 bp, Homo sapien
tgctgagggtttagcatcaagcggt

SEQ ID NO: 5336509 - DNA, 25 bp, Homo sapien
taacagaacatcggacatacttgtt

SEQ ID NO: 5336510 - DNA, 25 bp, Homo sapien
ctaacagaacatcggacatacttgt

SEQ ID NO: 5336511 - DNA, 25 bp, Homo sapien
ggtgagtctccttagagaggccctc

SEQ ID NO: 5336512 - DNA, 25 bp, Homo sapien
aaggaccatgggaggtgagtctcct

SEQ ID NO: 5336513 - DNA, 25 bp, Homo sapien
gaagagggcaaggtgtgtgagggaa

SEQ ID NO: 5336514 - DNA, 25 bp, Homo sapien
tgagtctccttagagaggccctccc

SEQ ID NO: 5336515 - DNA, 25 bp, Homo sapien
cgcttttattcttgtctttgccaga

SEQ ID NO: 5336516 - DNA, 25 bp, Homo sapien
ctgcaggacgcttttattcttgtct

SEQ ID NO: 5336517 - DNA, 25 bp, Homo sapien
gcttttattcttgtctttgccagaa

SEQ ID NO: 5336518 - DNA, 25 bp, Homo sapien
ggacgcttttattcttgtctttgcc

SEQ ID NO: 5336519 - DNA, 25 bp, Homo sapien
agccatgatatactctcttcaaggg

SEQ ID NO: 5336520 - DNA, 25 bp, Homo sapien
cacccagagccatgatatactctct

SEQ ID NO: 5336521 - DNA, 25 bp, Homo sapien
caggttagggaatcctatctttcct

SEQ ID NO: 5336522 - DNA, 25 bp, Homo sapien
ttcaaggggataggcactcactcac

SEQ ID NO: 5336523 - DNA, 25 bp, Homo sapien
gctttagagtggtcaaagctgctga

SEQ ID NO: 5336524 - DNA, 25 bp, Homo sapien
tagtagtgggctttagagtggtcaa

SEQ ID NO: 5336525 - DNA, 25 bp, Homo sapien
ttagagtggtcaaagctgctgaagg

SEQ ID NO: 5336526 - DNA, 25 bp, Homo sapien
tcatcatagcgatagtagtgggctt

SEQ ID NO: 5336527 - DNA, 25 bp, Homo sapien
ggtggctggtggcacacattccata

SEQ ID NO: 5336528 - DNA, 25 bp, Homo sapien
ctggtggcacacattccatactcct

SEQ ID NO: 5336529 - DNA, 25 bp, Homo sapien
tggctggtggcacacattccatact

SEQ ID NO: 5336530 - DNA, 25 bp, Homo sapien
gaaagatagggtagtgaggtggctg

SEQ ID NO: 5336531 - DNA, 25 bp, Homo sapien
gtctttactgtcccgcggccaagga

SEQ ID NO: 5336532 - DNA, 25 bp, Homo sapien
tggggtctttactgtcccgcggcca

SEQ ID NO: 5336533 - DNA, 25 bp, Homo sapien
tactgtcccgcggccaaggacatac

SEQ ID NO: 5336534 - DNA, 25 bp, Homo sapien
tctggggtctttactgtcccgcggc

SEQ ID NO: 5336535 - DNA, 25 bp, Homo sapien
gaattcccgaatccgtttctcttca

SEQ ID NO: 5336536 - DNA, 25 bp, Homo sapien
atgagaataaagtattagcccttcg

SEQ ID NO: 5336537 - DNA, 25 bp, Homo sapien
tgagaataaagtattagcccttcgg

SEQ ID NO: 5336538 - DNA, 25 bp, Homo sapien
tacgtgagtcctaccaaacccgtca

SEQ ID NO: 5336539 - DNA, 25 bp, Homo sapien
aggcccctcaaagtcaggttggtga

SEQ ID NO: 5336540 - DNA, 25 bp, Homo sapien
ctttggccttctgcctacgtgagtc

SEQ ID NO: 5336541 - DNA, 25 bp, Homo sapien
gaataaagtattagcccttcctcac

SEQ ID NO: 5336542 - DNA, 25 bp, Homo sapien
gtctcgtggatcttaatgttgcaca

SEQ ID NO: 5336543 - DNA, 25 bp, Homo sapien
cccggtccagtttgaggttgagcag

SEQ ID NO: 5336544 - DNA, 25 bp, Homo sapien
cttgctagtttggaggtacttcaca

SEQ ID NO: 5336545 - DNA, 25 bp, Homo sapien
gccaggcaccagcttatacacgatg

SEQ ID NO: 5336546 - DNA, 25 bp, Homo sapien
atgcgtgaggcaggccgcacagaag

SEQ ID NO: 5336547 - DNA, 25 bp, Homo sapien
agactagggactggaagaactaggc

SEQ ID NO: 5336548 - DNA, 25 bp, Homo sapien
tctggaaactggattcatgggctgg

SEQ ID NO: 5336549 - DNA, 25 bp, Homo sapien
agaagctggcagtcagcttggtgaa

SEQ ID NO: 5336550 - DNA, 25 bp, Homo sapien
agtatgaagacactctgtgatggtg

SEQ ID NO: 5336551 - DNA, 25 bp, Homo sapien
tggtggtggcatccacgaagtagcc

SEQ ID NO: 5336552 - DNA, 25 bp, Homo sapien
atccacgaagtagccggcgcatagg

SEQ ID NO: 5336553 - DNA, 25 bp, Homo sapien
atgaagacactctgtgatggtggtg

SEQ ID NO: 5336554 - DNA, 25 bp, Homo sapien
tgaagatacaccctccgtcaccaat

SEQ ID NO: 5336555 - DNA, 25 bp, Homo sapien
tccttcatcacactagacggccaag

SEQ ID NO: 5336556 - DNA, 25 bp, Homo sapien
catcagccggggattagctcctggg

SEQ ID NO: 5336557 - DNA, 25 bp, Homo sapien
gtcaccaatcatccaccctcaaacc

SEQ ID NO: 5336558 - DNA, 25 bp, Homo sapien
ttcccaggggagactacacaacgtc

SEQ ID NO: 5336559 - DNA, 25 bp, Homo sapien
gggagactacacaacgtcggcgaca

SEQ ID NO: 5336560 - DNA, 25 bp, Homo sapien
actacacaacgtcggcgacacaacg

SEQ ID NO: 5336561 - DNA, 25 bp, Homo sapien
cgtcggcgacacaacgcgcaggcgt

SEQ ID NO: 5336562 - DNA, 25 bp, Homo sapien
tccgtagcgggtccatcttgtacac

SEQ ID NO: 5336563 - DNA, 25 bp, Homo sapien
ctcgttccgtagcgggtccatcttg

SEQ ID NO: 5336564 - DNA, 25 bp, Homo sapien
gttccgtagcgggtccatcttgtac

SEQ ID NO: 5336565 - DNA, 25 bp, Homo sapien
cgttccgtagcgggtccatcttgta

SEQ ID NO: 5336566 - DNA, 25 bp, Homo sapien
ctgaggagacgccatcttaaaggct

SEQ ID NO: 5336567 - DNA, 25 bp, Homo sapien
catcttaaaggctgatcccagccgg

SEQ ID NO: 5336568 - DNA, 25 bp, Homo sapien
gacgccatcttaaaggctgatccca

SEQ ID NO: 5336569 - DNA, 25 bp, Homo sapien
ttaaaggctgatcccagccggccac

SEQ ID NO: 5336570 - DNA, 25 bp, Homo sapien
gcagggcgggacttgtctcccagca

SEQ ID NO: 5336571 - DNA, 25 bp, Homo sapien
cagggcgggacttgtctcccagcaa

SEQ ID NO: 5336572 - DNA, 25 bp, Homo sapien
gggcgggacttgtctcccagcaacg

SEQ ID NO: 5336573 - DNA, 25 bp, Homo sapien
agggcgggacttgtctcccagcaac

SEQ ID NO: 5336574 - DNA, 25 bp, Homo sapien
tcggattcgctcaccctctgtaagg

SEQ ID NO: 5336575 - DNA, 25 bp, Homo sapien
gcgacctcaagactaactttcggag

SEQ ID NO: 5336576 - DNA, 25 bp, Homo sapien
cacagggaagggtcttatctcttca

SEQ ID NO: 5336577 - DNA, 25 bp, Homo sapien
gctcaatccgtaattaaggagtggg

SEQ ID NO: 5336578 - DNA, 25 bp, Homo sapien
cctgtagtagcataggcccagtccc

SEQ ID NO: 5336579 - DNA, 25 bp, Homo sapien
ttctgtgacgacgaccctgctgaag

SEQ ID NO: 5336580 - DNA, 25 bp, Homo sapien
cgtagcggagcttcgtccagatggc

SEQ ID NO: 5336581 - DNA, 25 bp, Homo sapien
tgatttaatcatcggcgcctgcgga

SEQ ID NO: 5336582 - DNA, 25 bp, Homo sapien
atgaaagtcaaagtctcagagtggt

SEQ ID NO: 5336583 - DNA, 25 bp, Homo sapien
aagggcctgcatagtctcttcagat

SEQ ID NO: 5336584 - DNA, 25 bp, Homo sapien
taggtatccaaaatggctccctcct

SEQ ID NO: 5336585 - DNA, 25 bp, Homo sapien
ccaacttgaaatgcttaggtatcca

SEQ ID NO: 5336586 - DNA, 25 bp, Homo sapien
cacacctgtaactctagatactcag

SEQ ID NO: 5336587 - DNA, 25 bp, Homo sapien
ccgcgcctagccaatcttgaatata

SEQ ID NO: 5336588 - DNA, 25 bp, Homo sapien
ctctagatactcagggggtcaaagt

SEQ ID NO: 5336589 - DNA, 25 bp, Homo sapien
cctttccccgtgaatcagagacaag

SEQ ID NO: 5336590 - DNA, 25 bp, Homo sapien
ggagaatcagtttgaagatcagtgc

SEQ ID NO: 5336591 - DNA, 25 bp, Homo sapien
ctggagaatcagtttgaagatcagt

SEQ ID NO: 5336592 - DNA, 25 bp, Homo sapien
caaatatcattcctggttcccaggg

SEQ ID NO: 5336593 - DNA, 25 bp, Homo sapien
gcccaaatatcattcctggttccca

SEQ ID NO: 5336594 - DNA, 25 bp, Homo sapien
tgagggactcgaaattctccggcgg

SEQ ID NO: 5336595 - DNA, 25 bp, Homo sapien
tgggccgaggacaacaaagtggctt

SEQ ID NO: 5336596 - DNA, 25 bp, Homo sapien
gttacgccctcgctggaacctgagg

SEQ ID NO: 5336597 - DNA, 25 bp, Homo sapien
gctgcctgcgtccatggtctagtgg

SEQ ID NO: 5336598 - DNA, 25 bp, Homo sapien
tccaatcaataagagaaggctaagg

SEQ ID NO: 5336599 - DNA, 25 bp, Homo sapien
tcacaagggagtacaagaatgggtt

SEQ ID NO: 5336600 - DNA, 25 bp, Homo sapien
cctatgtagactgtggtttacccca

SEQ ID NO: 5336601 - DNA, 25 bp, Homo sapien
tctaatgtgatgagatgaacccagc

SEQ ID NO: 5336602 - DNA, 25 bp, Homo sapien
gacacagggatctctgaactcctgg

SEQ ID NO: 5336603 - DNA, 25 bp, Homo sapien
acacagggatctctgaactcctggg

SEQ ID NO: 5336604 - DNA, 25 bp, Homo sapien
ggacacagggatctctgaactcctg

SEQ ID NO: 5336605 - DNA, 25 bp, Homo sapien
aggaagtatggaggggccaattcca

SEQ ID NO: 5336606 - DNA, 25 bp, Homo sapien
gaagtatggaggggccaattccacc

SEQ ID NO: 5336607 - DNA, 25 bp, Homo sapien
aagtatggaggggccaattccacca

SEQ ID NO: 5336608 - DNA, 25 bp, Homo sapien
ggaagtatggaggggccaattccac

SEQ ID NO: 5336609 - DNA, 25 bp, Homo sapien
aattgtggtagagcacccatggtgg

SEQ ID NO: 5336610 - DNA, 25 bp, Homo sapien
catgcttatgggttaggagaaggta

SEQ ID NO: 5336611 - DNA, 25 bp, Homo sapien
gagctctgcggcttcggtagcagca

SEQ ID NO: 5336612 - DNA, 25 bp, Homo sapien
aaggtaatttccagtcccgtctgtg

SEQ ID NO: 5336613 - DNA, 25 bp, Homo sapien
ttttgctcctttgatcaccctcacc

SEQ ID NO: 5336614 - DNA, 25 bp, Homo sapien
aatatttgttctctttgccttttgc

SEQ ID NO: 5336615 - DNA, 25 bp, Homo sapien
ttgctcctttgatcaccctcacccc

SEQ ID NO: 5336616 - DNA, 25 bp, Homo sapien
gccttttgctcctttgatcaccctc

SEQ ID NO: 5336617 - DNA, 25 bp, Homo sapien
gaaggtctctgcgattctgctcaga

SEQ ID NO: 5336618 - DNA, 25 bp, Homo sapien
tgcccaattcagacctcgagcctgg

SEQ ID NO: 5336619 - DNA, 25 bp, Homo sapien
tatgggcttggcacaatgctgccca

SEQ ID NO: 5336620 - DNA, 25 bp, Homo sapien
ctcagagccaaaggctggtagggac

SEQ ID NO: 5336621 - DNA, 25 bp, Homo sapien
tctgtcagctggctgcataaaattt

SEQ ID NO: 5336622 - DNA, 25 bp, Homo sapien
ctgtcagctggctgcataaaatttc

SEQ ID NO: 5336623 - DNA, 25 bp, Homo sapien
tctgcactgagtggaggacgggtaa

SEQ ID NO: 5336624 - DNA, 25 bp, Homo sapien
gtcaccatccgtgtgttccagggcc

SEQ ID NO: 5336625 - DNA, 25 bp, Homo sapien
agggcccgacgcagggcagcttctt

SEQ ID NO: 5336626 - DNA, 25 bp, Homo sapien
tataaaggcttcatacacctggatc

SEQ ID NO: 5336627 - DNA, 25 bp, Homo sapien
cagggctgccagatagtctaaatct

SEQ ID NO: 5336628 - DNA, 25 bp, Homo sapien
ggaattctgatagtatgacacccag

SEQ ID NO: 5336629 - DNA, 25 bp, Homo sapien
agccagggtgagcatctcgtccaca

SEQ ID NO: 5336630 - DNA, 25 bp, Homo sapien
gtcaaactcgcatgaggccagcagg

SEQ ID NO: 5336631 - DNA, 25 bp, Homo sapien
accctgggttgtggcaatggtggag

SEQ ID NO: 5336632 - DNA, 25 bp, Homo sapien
gggagctcagattctcctcacacac

SEQ ID NO: 5336633 - DNA, 25 bp, Homo sapien
ggttgtggcaatggtggagcttcta

SEQ ID NO: 5336634 - DNA, 25 bp, Homo sapien
ttttagtagtaacaccagggagctc

SEQ ID NO: 5336635 - DNA, 25 bp, Homo sapien
cttaggatacaggcagaggcaggat

SEQ ID NO: 5336636 - DNA, 25 bp, Homo sapien
ttaggatacaggcagaggcaggatc

SEQ ID NO: 5336637 - DNA, 25 bp, Homo sapien
ctcagggcttgcatgttggtgactc

SEQ ID NO: 5336638 - DNA, 25 bp, Homo sapien
ctgtagatttctcagggcttgcatg

SEQ ID NO: 5336639 - DNA, 25 bp, Homo sapien
catgttggtgactcttgggtttttt

SEQ ID NO: 5336640 - DNA, 25 bp, Homo sapien
gatttctcagggcttgcatgttggt

SEQ ID NO: 5336641 - DNA, 25 bp, Homo sapien
ttgctgattggcctcaacacttgga

SEQ ID NO: 5336642 - DNA, 25 bp, Homo sapien
cttgctcgcaatcgtcttgcctctg

SEQ ID NO: 5336643 - DNA, 25 bp, Homo sapien
cttggaattctgctcggatcctagg

SEQ ID NO: 5336644 - DNA, 25 bp, Homo sapien
tggtgggaaccctcttgctcgcaat

SEQ ID NO: 5336645 - DNA, 25 bp, Homo sapien
tttactaccccaccgctatctctct

SEQ ID NO: 5336646 - DNA, 25 bp, Homo sapien
tctgtctttactaccccaccgctat

SEQ ID NO: 5336647 - DNA, 25 bp, Homo sapien
gagtgggccatttctgtctttacta

SEQ ID NO: 5336648 - DNA, 25 bp, Homo sapien
atcagagtgggccatttctgtcttt

SEQ ID NO: 5336649 - DNA, 25 bp, Homo sapien
tcatacacagcctgaacggctcgtc

SEQ ID NO: 5336650 - DNA, 25 bp, Homo sapien
tgagtcgatgacatgttggatggaa

SEQ ID NO: 5336651 - DNA, 25 bp, Homo sapien
cagtgagtgaccacaacctttcggg

SEQ ID NO: 5336652 - DNA, 25 bp, Homo sapien
acttcggagctccagtcctgagtcg

SEQ ID NO: 5336653 - DNA, 25 bp, Homo sapien
agaagcaaggactctacctccctgg

SEQ ID NO: 5336654 - DNA, 25 bp, Homo sapien
gagaagcaaggactctacctccctg

SEQ ID NO: 5336655 - DNA, 25 bp, Homo sapien
tggagaagcaaggactctacctccc

SEQ ID NO: 5336656 - DNA, 25 bp, Homo sapien
agcaaggactctacctccctggaca

SEQ ID NO: 5336657 - DNA, 25 bp, Homo sapien
taagaggcattgctcccattcccat

SEQ ID NO: 5336658 - DNA, 25 bp, Homo sapien
taaatactgcaactctactgttcct

SEQ ID NO: 5336659 - DNA, 25 bp, Homo sapien
tctctgggaccccaacggagagtaa

SEQ ID NO: 5336660 - DNA, 25 bp, Homo sapien
gaccccaacggagagtaaatactgc

SEQ ID NO: 5336661 - DNA, 25 bp, Homo sapien
cttttgcaggctcattttgcaggct

SEQ ID NO: 5336662 - DNA, 25 bp, Homo sapien
tgcaggctcattttgcaggctgttt

SEQ ID NO: 5336663 - DNA, 25 bp, Homo sapien
ccttttgcaggctcattttgcaggc

SEQ ID NO: 5336664 - DNA, 25 bp, Homo sapien
tttgcaggctcattttgcaggctgt

SEQ ID NO: 5336665 - DNA, 25 bp, Homo sapien
ctggcatcttgcagtagcccctgga

SEQ ID NO: 5336666 - DNA, 25 bp, Homo sapien
gaacactagcacatctcctggaagc

SEQ ID NO: 5336667 - DNA, 25 bp, Homo sapien
caggctctctgggtatatgcacaat

SEQ ID NO: 5336668 - DNA, 25 bp, Homo sapien
gaggattgccccagaaagctcggag

SEQ ID NO: 5336669 - DNA, 25 bp, Homo sapien
gggatgctgtatccaacctcatgac

SEQ ID NO: 5336670 - DNA, 25 bp, Homo sapien
ctgagcagggtgttgggccccgtgc

SEQ ID NO: 5336671 - DNA, 25 bp, Homo sapien
tgggggatgctgtatccaacctcat

SEQ ID NO: 5336672 - DNA, 25 bp, Homo sapien
gatgctgtatccaacctcatgaccc

SEQ ID NO: 5336673 - DNA, 25 bp, Homo sapien
aaccctctggccagcgcaaactctg

SEQ ID NO: 5336674 - DNA, 25 bp, Homo sapien
ggtagggctgagtaacagtaacctg

SEQ ID NO: 5336675 - DNA, 25 bp, Homo sapien
ctcatcagcaacccgcagagccagg

SEQ ID NO: 5336676 - DNA, 25 bp, Homo sapien
ggctccgggctgcaagagggtaggg

SEQ ID NO: 5336677 - DNA, 25 bp, Homo sapien
gaagcccatcaaaggggttcacagc

SEQ ID NO: 5336678 - DNA, 25 bp, Homo sapien
atgggcaaggcttggcgctgcttca

SEQ ID NO: 5336679 - DNA, 25 bp, Homo sapien
ttcagcagctcatagtagcgggaag

SEQ ID NO: 5336680 - DNA, 25 bp, Homo sapien
ccaagaaggtaaagcgagcagccca

SEQ ID NO: 5336681 - DNA, 25 bp, Homo sapien
ctgagactattaccccgttggcagg

SEQ ID NO: 5336682 - DNA, 25 bp, Homo sapien
gtgagacctagtaacctgtgggaaa

SEQ ID NO: 5336683 - DNA, 25 bp, Homo sapien
ctattaccccgttggcaggtagtag

SEQ ID NO: 5336684 - DNA, 25 bp, Homo sapien
cagtagaaattatgtgagacctagt

SEQ ID NO: 5336685 - DNA, 25 bp, Homo sapien
cctgaccgtgtgaagtacaaaggta

SEQ ID NO: 5336686 - DNA, 25 bp, Homo sapien
ggctctacctcagggatgggctcaa

SEQ ID NO: 5336687 - DNA, 25 bp, Homo sapien
gatgggctcaaacttcaaatcctga

SEQ ID NO: 5336688 - DNA, 25 bp, Homo sapien
ttgcagctctaggacgtgtcaggac

SEQ ID NO: 5336689 - DNA, 25 bp, Homo sapien
cccacccatccagcctgttgtgagt

SEQ ID NO: 5336690 - DNA, 25 bp, Homo sapien
catccagcctgttgtgagttgggtg

SEQ ID NO: 5336691 - DNA, 25 bp, Homo sapien
acccatccagcctgttgtgagttgg

SEQ ID NO: 5336692 - DNA, 25 bp, Homo sapien
cccagtctccgtcctgcggctctgg

SEQ ID NO: 5336693 - DNA, 25 bp, Homo sapien
gcctcctgggctcgtctctctgtga

SEQ ID NO: 5336694 - DNA, 25 bp, Homo sapien
ctcctgggctcgtctctctgtgaat

SEQ ID NO: 5336695 - DNA, 25 bp, Homo sapien
cctcctgggctcgtctctctgtgaa

SEQ ID NO: 5336696 - DNA, 25 bp, Homo sapien
cagcctcctgggctcgtctctctgt

SEQ ID NO: 5336697 - DNA, 25 bp, Homo sapien
catagggagagatattattcaggct

SEQ ID NO: 5336698 - DNA, 25 bp, Homo sapien
tagctccataattccattctccaat

SEQ ID NO: 5336699 - DNA, 25 bp, Homo sapien
tattaattgtcctctaaccccctca

SEQ ID NO: 5336700 - DNA, 25 bp, Homo sapien
ctgtgggacatagggagagatatta

SEQ ID NO: 5336701 - DNA, 25 bp, Homo sapien
gggcccaggaagacttggcaaatgt

SEQ ID NO: 5336702 - DNA, 25 bp, Homo sapien
tcttgcgtattcatatagtgcttgc

SEQ ID NO: 5336703 - DNA, 25 bp, Homo sapien
tatagtgcttgcttgcgctcctgca

SEQ ID NO: 5336704 - DNA, 25 bp, Homo sapien
gacttggcaaatgttagggctgttg

SEQ ID NO: 5336705 - DNA, 25 bp, Homo sapien
tcatcattaaacacgcatcgaatgc

SEQ ID NO: 5336706 - DNA, 25 bp, Homo sapien
tcagagggcttgcggagtcatcatc

SEQ ID NO: 5336707 - DNA, 25 bp, Homo sapien
gtcatcatcattaaacacgcatcga

SEQ ID NO: 5336708 - DNA, 25 bp, Homo sapien
gggcttgcggagtcatcatcattaa

SEQ ID NO: 5336709 - DNA, 25 bp, Homo sapien
ctttgcaagagaggcactatgctag

SEQ ID NO: 5336710 - DNA, 25 bp, Homo sapien
ttgcaagagaggcactatgctaggg

SEQ ID NO: 5336711 - DNA, 25 bp, Homo sapien
tgcaagagaggcactatgctagggt

SEQ ID NO: 5336712 - DNA, 25 bp, Homo sapien
tttgcaagagaggcactatgctagg

SEQ ID NO: 5336713 - DNA, 25 bp, Homo sapien
aagggagtacatagcctgcccccaa

SEQ ID NO: 5336714 - DNA, 25 bp, Homo sapien
gggagtacatagcctgcccccaact

SEQ ID NO: 5336715 - DNA, 25 bp, Homo sapien
ataagggagtacatagcctgccccc

SEQ ID NO: 5336716 - DNA, 25 bp, Homo sapien
gataagggagtacatagcctgcccc

SEQ ID NO: 5336717 - DNA, 25 bp, Homo sapien
aggctgtgggtagggactgagttcc

SEQ ID NO: 5336718 - DNA, 25 bp, Homo sapien
caagcagattagtgatagtcaagtc

SEQ ID NO: 5336719 - DNA, 25 bp, Homo sapien
tacggccccctcaagcagattagtg

SEQ ID NO: 5336720 - DNA, 25 bp, Homo sapien
ttagtgatagtcaagtctacacagc

SEQ ID NO: 5336721 - DNA, 25 bp, Homo sapien
gtcaagtctacacagccagtcttgg

SEQ ID NO: 5336722 - DNA, 25 bp, Homo sapien
gagaagggagtccactccctactta

SEQ ID NO: 5336723 - DNA, 25 bp, Homo sapien
gtgcccatctcccagtgtggggcca

SEQ ID NO: 5336724 - DNA, 25 bp, Homo sapien
tgcccatctcccagtgtggggccac

SEQ ID NO: 5336725 - DNA, 25 bp, Homo sapien
tgtgcccatctcccagtgtggggcc

SEQ ID NO: 5336726 - DNA, 25 bp, Homo sapien
gagttgccagttgcacatcaggaga

SEQ ID NO: 5336727 - DNA, 25 bp, Homo sapien
aaccccaaaagctgtaatgtataga

SEQ ID NO: 5336728 - DNA, 25 bp, Homo sapien
ctagcacagaaataggggaggaatc

SEQ ID NO: 5336729 - DNA, 25 bp, Homo sapien
gaaggagaggctaactagcacagaa

SEQ ID NO: 5336730 - DNA, 25 bp, Homo sapien
tctggtaagtagagaactagaagga

SEQ ID NO: 5336731 - DNA, 25 bp, Homo sapien
gtctttgtcgcttcatgtgctctgc

SEQ ID NO: 5336732 - DNA, 25 bp, Homo sapien
tctggcccaattccttggccaccag

SEQ ID NO: 5336733 - DNA, 25 bp, Homo sapien
cctgtctggcccaattccttggcca

SEQ ID NO: 5336734 - DNA, 25 bp, Homo sapien
gcgcaatctggggtgtctttgtcgc

SEQ ID NO: 5336735 - DNA, 25 bp, Homo sapien
gtgtcaagatctcaagctttcctcc

SEQ ID NO: 5336736 - DNA, 25 bp, Homo sapien
ctggaagtgtcaagatctcaagctt

SEQ ID NO: 5336737 - DNA, 25 bp, Homo sapien
gaattggaagactggaagtgtcaag

SEQ ID NO: 5336738 - DNA, 25 bp, Homo sapien
tctcctcctaagcagggaccccgcc

SEQ ID NO: 5336739 - DNA, 25 bp, Homo sapien
ttggcgatgaacaggacgaagccac

SEQ ID NO: 5336740 - DNA, 25 bp, Homo sapien
cggagtgcaaactcctcattcgctt

SEQ ID NO: 5336741 - DNA, 25 bp, Homo sapien
acggagtgcaaactcctcattcgct

SEQ ID NO: 5336742 - DNA, 25 bp, Homo sapien
cccctagttggcgatgaacaggacg

SEQ ID NO: 5336743 - DNA, 25 bp, Homo sapien
caatccagggctatgttgtgggcac

SEQ ID NO: 5336744 - DNA, 25 bp, Homo sapien
gaaccttgatataaagatctacaaa

SEQ ID NO: 5336745 - DNA, 25 bp, Homo sapien
tgtgttgcctctgtggtagaacctt

SEQ ID NO: 5336746 - DNA, 25 bp, Homo sapien
cctctttgcatggtgggtgggaaaa

SEQ ID NO: 5336747 - DNA, 25 bp, Homo sapien
ctctccccagcgaccaaaatgtgag

SEQ ID NO: 5336748 - DNA, 25 bp, Homo sapien
tccttgaccttgaggtgagcctctc

SEQ ID NO: 5336749 - DNA, 25 bp, Homo sapien
agggcagaggccactaattccttga

SEQ ID NO: 5336750 - DNA, 25 bp, Homo sapien
tccccagcgaccaaaatgtgaggac

SEQ ID NO: 5336751 - DNA, 25 bp, Homo sapien
tgaaagggacgaaaagtgaccacag

SEQ ID NO: 5336752 - DNA, 25 bp, Homo sapien
tgatacaccgtgaaagggacgaaaa

SEQ ID NO: 5336753 - DNA, 25 bp, Homo sapien
ttgatacaccgtgaaagggacgaaa

SEQ ID NO: 5336754 - DNA, 25 bp, Homo sapien
gtgaaagggacgaaaagtgaccaca

SEQ ID NO: 5336755 - DNA, 25 bp, Homo sapien
tctctgaacttgcagggtaagaggt

SEQ ID NO: 5336756 - DNA, 25 bp, Homo sapien
gggtctctgaacttgcagggtaaga

SEQ ID NO: 5336757 - DNA, 25 bp, Homo sapien
aagaggttgtaccacatcttggata

SEQ ID NO: 5336758 - DNA, 25 bp, Homo sapien
cagggtaagaggttgtaccacatct

SEQ ID NO: 5336759 - DNA, 25 bp, Homo sapien
gcagctcacacctgccttataacag

SEQ ID NO: 5336760 - DNA, 25 bp, Homo sapien
aaggagaaagtaggatgggaatcca

SEQ ID NO: 5336761 - DNA, 25 bp, Homo sapien
tctacaagcacataattgaagaatg

SEQ ID NO: 5336762 - DNA, 25 bp, Homo sapien
actcaagggcccacaagcttgacca

SEQ ID NO: 5336763 - DNA, 25 bp, Homo sapien
ctgaagcgcaggagcccctcccggc

SEQ ID NO: 5336764 - DNA, 25 bp, Homo sapien
cagaatctcttgagtgactccacca

SEQ ID NO: 5336765 - DNA, 25 bp, Homo sapien
gaatctcttgagtgactccaccaac

SEQ ID NO: 5336766 - DNA, 25 bp, Homo sapien
ggaagcctcgtggaagcacagaatc

SEQ ID NO: 5336767 - DNA, 25 bp, Homo sapien
gaccagcacacaaagctggggggac

SEQ ID NO: 5336768 - DNA, 25 bp, Homo sapien
accagcacacaaagctggggggact

SEQ ID NO: 5336769 - DNA, 25 bp, Homo sapien
ccagcacacaaagctggggggacta

SEQ ID NO: 5336770 - DNA, 25 bp, Homo sapien
agctggggggactattgagtagagg

SEQ ID NO: 5336771 - DNA, 25 bp, Homo sapien
aactgacatgttgggtagaggatcg

SEQ ID NO: 5336772 - DNA, 25 bp, Homo sapien
aaactgacatgttgggtagaggatc

SEQ ID NO: 5336773 - DNA, 25 bp, Homo sapien
ctgacatgttgggtagaggatcggg

SEQ ID NO: 5336774 - DNA, 25 bp, Homo sapien
aaaaactgacatgttgggtagagga

SEQ ID NO: 5336775 - DNA, 25 bp, Homo sapien
ggtaaggctcagtatcctccatggg

SEQ ID NO: 5336776 - DNA, 25 bp, Homo sapien
ggaaccgccccgtggcgctctcggc

SEQ ID NO: 5336777 - DNA, 25 bp, Homo sapien
gccccgtggcgctctcggcctcgct

SEQ ID NO: 5336778 - DNA, 25 bp, Homo sapien
ttaggggtaaggctcagtatcctcc

SEQ ID NO: 5336779 - DNA, 25 bp, Homo sapien
ctacaggtggtaagcaaattgacta

SEQ ID NO: 5336780 - DNA, 25 bp, Homo sapien
tgaggaccctgacactgtgatcccg

SEQ ID NO: 5336781 - DNA, 25 bp, Homo sapien
tgtgatcccggagtccggagtcctc

SEQ ID NO: 5336782 - DNA, 25 bp, Homo sapien
ctatgttgtggtcgaaaggtgtcac

SEQ ID NO: 5336783 - DNA, 25 bp, Homo sapien
agctctgacactccccgaacgcccg

SEQ ID NO: 5336784 - DNA, 25 bp, Homo sapien
gtggtgactgtgtggcctcgggcca

SEQ ID NO: 5336785 - DNA, 25 bp, Homo sapien
ctctgacactccccgaacgcccgcg

SEQ ID NO: 5336786 - DNA, 25 bp, Homo sapien
tgacactccccgaacgcccgcgtcg

SEQ ID NO: 5336787 - DNA, 25 bp, Homo sapien
aggcagaacccgactggcgcgtaga

SEQ ID NO: 5336788 - DNA, 25 bp, Homo sapien
caggaagacgtggatcccgagaaag

SEQ ID NO: 5336789 - DNA, 25 bp, Homo sapien
cagcagcacgagcagtaggaagcag

SEQ ID NO: 5336790 - DNA, 25 bp, Homo sapien
atcccgagaaagaggcgcaggacga

SEQ ID NO: 5336791 - DNA, 25 bp, Homo sapien
gagtcaaagagccgctccggccccg

SEQ ID NO: 5336792 - DNA, 25 bp, Homo sapien
tgcgagtcaaagagccgctccggcc

SEQ ID NO: 5336793 - DNA, 25 bp, Homo sapien
cggtgcgagtcaaagagccgctccg

SEQ ID NO: 5336794 - DNA, 25 bp, Homo sapien
agtcaaagagccgctccggccccgg

SEQ ID NO: 5336795 - DNA, 25 bp, Homo sapien
gccgccattttcgcgcccggccgca

SEQ ID NO: 5336796 - DNA, 25 bp, Homo sapien
gctgcttcaggagcgcccggccgtc

SEQ ID NO: 5336797 - DNA, 25 bp, Homo sapien
ccgccattttcgcgcccggccgcag

SEQ ID NO: 5336798 - DNA, 25 bp, Homo sapien
tgcttcaggagcgcccggccgtcgc

SEQ ID NO: 5336799 - DNA, 25 bp, Homo sapien
gaagggctagcggtcccagcatacc

SEQ ID NO: 5336800 - DNA, 25 bp, Homo sapien
acccgaagtcctgaggcgcgccgga

SEQ ID NO: 5336801 - DNA, 25 bp, Homo sapien
cttgggccgtctcacaactcgcgtc

SEQ ID NO: 5336802 - DNA, 25 bp, Homo sapien
gccccttgggccgtctcacaactcg

SEQ ID NO: 5336803 - DNA, 25 bp, Homo sapien
cattaacttggcatttaagggccat

SEQ ID NO: 5336804 - DNA, 25 bp, Homo sapien
tcagatccatccttttaggctcaac

SEQ ID NO: 5336805 - DNA, 25 bp, Homo sapien
tctagacctggctgtaataccttcc

SEQ ID NO: 5336806 - DNA, 25 bp, Homo sapien
cccaggtatgagctttagggacagt

SEQ ID NO: 5336807 - DNA, 25 bp, Homo sapien
catttggtgccctcatgtggtgtac

SEQ ID NO: 5336808 - DNA, 25 bp, Homo sapien
actgaccttatatgtgacccctgag

SEQ ID NO: 5336809 - DNA, 25 bp, Homo sapien
ttctctatagggctggtctgcggcc

SEQ ID NO: 5336810 - DNA, 25 bp, Homo sapien
tgaagctgttcgaacccaatcccag

SEQ ID NO: 5336811 - DNA, 25 bp, Homo sapien
gacccctgccattaggggccagtgg

SEQ ID NO: 5336812 - DNA, 25 bp, Homo sapien
ggtaatggcagcctcagacccctgc

SEQ ID NO: 5336813 - DNA, 25 bp, Homo sapien
ctgaggtaatggcagcctcagaccc

SEQ ID NO: 5336814 - DNA, 25 bp, Homo sapien
ccagtggtggtttgcagagggcagt

SEQ ID NO: 5336815 - DNA, 25 bp, Homo sapien
tagcgttcaaacctcctgttggcct

SEQ ID NO: 5336816 - DNA, 25 bp, Homo sapien
ggtctggccagggtagcgttcaaac

SEQ ID NO: 5336817 - DNA, 25 bp, Homo sapien
tagataatctggttgctggtctggc

SEQ ID NO: 5336818 - DNA, 25 bp, Homo sapien
gataatctggttgctggtctggcca

SEQ ID NO: 5336819 - DNA, 25 bp, Homo sapien
tatttgcagttacatttcattgcat

SEQ ID NO: 5336820 - DNA, 25 bp, Homo sapien
gattctatgtccatcatatttgcag

SEQ ID NO: 5336821 - DNA, 25 bp, Homo sapien
tttcattgcattgttggtaaagtca

SEQ ID NO: 5336822 - DNA, 25 bp, Homo sapien
gtgcacccagattctatgtccatca

SEQ ID NO: 5336823 - DNA, 25 bp, Homo sapien
atctggaagccccagactccaggta

SEQ ID NO: 5336824 - DNA, 25 bp, Homo sapien
catctggaagccccagactccaggt

SEQ ID NO: 5336825 - DNA, 25 bp, Homo sapien
tctggaagccccagactccaggtac

SEQ ID NO: 5336826 - DNA, 25 bp, Homo sapien
ccatctggaagccccagactccagg

SEQ ID NO: 5336827 - DNA, 25 bp, Homo sapien
tccactgacagtcaatgtcatgccg

SEQ ID NO: 5336828 - DNA, 25 bp, Homo sapien
tcacatccgtgatgtcaatccactg

SEQ ID NO: 5336829 - DNA, 25 bp, Homo sapien
gttggcacactcataccgcttggag

SEQ ID NO: 5336830 - DNA, 25 bp, Homo sapien
agtttcctggcttcacatccgtgat

SEQ ID NO: 5336831 - DNA, 25 bp, Homo sapien
acactcagtgtcttcgagacagaaa

SEQ ID NO: 5336832 - DNA, 25 bp, Homo sapien
gtgaggatatcatagtgagtgaaga

SEQ ID NO: 5336833 - DNA, 25 bp, Homo sapien
agtgtcttcgagacagaaactagct

SEQ ID NO: 5336834 - DNA, 25 bp, Homo sapien
accttggtgccatttggggtgagga

SEQ ID NO: 5336835 - DNA, 25 bp, Homo sapien
tgaagtcagctcgtcccaggttgtg

SEQ ID NO: 5336836 - DNA, 25 bp, Homo sapien
ctgagtgcagcaacagatctgatgc

SEQ ID NO: 5336837 - DNA, 25 bp, Homo sapien
cggtcttcgatgtaggcggtctcct

SEQ ID NO: 5336838 - DNA, 25 bp, Homo sapien
ccggtgaccatagggccagttggct

SEQ ID NO: 5336839 - DNA, 25 bp, Homo sapien
gcagtgaagcgggtccctgtcctct

SEQ ID NO: 5336840 - DNA, 25 bp, Homo sapien
atgtgggtgccatgatgggcacact

SEQ ID NO: 5336841 - DNA, 25 bp, Homo sapien
tcagtccctgtgcagcgcactccac

SEQ ID NO: 5336842 - DNA, 25 bp, Homo sapien
tctcagaacagatgactccagcagt

SEQ ID NO: 5336843 - DNA, 25 bp, Homo sapien
caccacctctgttatattcccagag

SEQ ID NO: 5336844 - DNA, 25 bp, Homo sapien
cacctctgttatattcccagagtcc

SEQ ID NO: 5336845 - DNA, 25 bp, Homo sapien
acctctgttatattcccagagtccc

SEQ ID NO: 5336846 - DNA, 25 bp, Homo sapien
ttcccagagtcccagtaccaggtct

SEQ ID NO: 5336847 - DNA, 25 bp, Homo sapien
gtagcccagacccagttgcctacag

SEQ ID NO: 5336848 - DNA, 25 bp, Homo sapien
ctgcaggccgtggttggcgtagccc

SEQ ID NO: 5336849 - DNA, 25 bp, Homo sapien
ggctgcggcccccactgagtcggat

SEQ ID NO: 5336850 - DNA, 25 bp, Homo sapien
gactcgcccctcatgttggctgcgg

SEQ ID NO: 5336851 - DNA, 25 bp, Homo sapien
tcactcaggtggatagcacccatgc

SEQ ID NO: 5336852 - DNA, 25 bp, Homo sapien
tccagagcagcgaacttcactcagg

SEQ ID NO: 5336853 - DNA, 25 bp, Homo sapien
cggaccccggcatcctggctatgtg

SEQ ID NO: 5336854 - DNA, 25 bp, Homo sapien
cagtgtaaggtaggttgcaccggac

SEQ ID NO: 5336855 - DNA, 25 bp, Homo sapien
agcttctcgagcactcccgaagccc

SEQ ID NO: 5336856 - DNA, 25 bp, Homo sapien
catgcgagcgccactcagagcttct

SEQ ID NO: 5336857 - DNA, 25 bp, Homo sapien
tgccccatgcgagcgccactcagag

SEQ ID NO: 5336858 - DNA, 25 bp, Homo sapien
gcgagcgccactcagagcttctcga

SEQ ID NO: 5336859 - DNA, 25 bp, Homo sapien
gtgggcgccgccctttagacggaca

SEQ ID NO: 5336860 - DNA, 25 bp, Homo sapien
tcaggacttctacccggccctctcc

SEQ ID NO: 5336861 - DNA, 25 bp, Homo sapien
tggccttcaggacttctacccggcc

SEQ ID NO: 5336862 - DNA, 25 bp, Homo sapien
tgggcgccgccctttagacggacac

SEQ ID NO: 5336863 - DNA, 25 bp, Homo sapien
tcattggcacgatagaactccaggg

SEQ ID NO: 5336864 - DNA, 25 bp, Homo sapien
cagaccaaaggagtgttgctgccgt

SEQ ID NO: 5336865 - DNA, 25 bp, Homo sapien
gttgcttcttctggccactggatgc

SEQ ID NO: 5336866 - DNA, 25 bp, Homo sapien
cccctgaggcttcgactgttgttgc

SEQ ID NO: 5336867 - DNA, 25 bp, Homo sapien
ggaaagaccctttgtgggcagcatg

SEQ ID NO: 5336868 - DNA, 25 bp, Homo sapien
gaagattttccgcatccaccgtctg

SEQ ID NO: 5336869 - DNA, 25 bp, Homo sapien
tgattggtccgcaaaaaggagaagg

SEQ ID NO: 5336870 - DNA, 25 bp, Homo sapien
catatgtggcgcaggaaaggtacag

SEQ ID NO: 5336871 - DNA, 25 bp, Homo sapien
gagaccttggccgctcgcttcctca

SEQ ID NO: 5336872 - DNA, 25 bp, Homo sapien
ggcttggggtgtcgggctgagacct

SEQ ID NO: 5336873 - DNA, 25 bp, Homo sapien
ccaaggggcttggggtgtcgggctg

SEQ ID NO: 5336874 - DNA, 25 bp, Homo sapien
agaccttggccgctcgcttcctcaa

SEQ ID NO: 5336875 - DNA, 25 bp, Homo sapien
ttaaagtggtttgagtgtccaggcc

SEQ ID NO: 5336876 - DNA, 25 bp, Homo sapien
tgtccaggccagataaagtaccgaa

SEQ ID NO: 5336877 - DNA, 25 bp, Homo sapien
tcaaataatgcttccaccgtggcct

SEQ ID NO: 5336878 - DNA, 25 bp, Homo sapien
tgaaagtaaagaggcacagcacgtt

SEQ ID NO: 5336879 - DNA, 25 bp, Homo sapien
cagctgatgattagaagcttgatga

SEQ ID NO: 5336880 - DNA, 25 bp, Homo sapien
ggcaaagctgccatgtctgttcagc

SEQ ID NO: 5336881 - DNA, 25 bp, Homo sapien
gcttgatgaaaatctacaggaacat

SEQ ID NO: 5336882 - DNA, 25 bp, Homo sapien
tcttcccagttggtggaaggaacat

SEQ ID NO: 5336883 - DNA, 25 bp, Homo sapien
ccaacggcgggtcgaattcgcacct

SEQ ID NO: 5336884 - DNA, 25 bp, Homo sapien
tccagcctttgtcgcacacttgcga

SEQ ID NO: 5336885 - DNA, 25 bp, Homo sapien
acacttgcgaccagccgtcaggaag

SEQ ID NO: 5336886 - DNA, 25 bp, Homo sapien
ccacgtggctgttgtgggcgctcca

SEQ ID NO: 5336887 - DNA, 25 bp, Homo sapien
cagtggcacctttcatgtgtcccgc

SEQ ID NO: 5336888 - DNA, 25 bp, Homo sapien
gtggcacctttcatgtgtcccgccg

SEQ ID NO: 5336889 - DNA, 25 bp, Homo sapien
atcccagtggcacctttcatgtgtc

SEQ ID NO: 5336890 - DNA, 25 bp, Homo sapien
tcccagtggcacctttcatgtgtcc

SEQ ID NO: 5336891 - DNA, 25 bp, Homo sapien
acattcagtcacactctgctcggtc

SEQ ID NO: 5336892 - DNA, 25 bp, Homo sapien
agccccgggaggcacattcagtcac

SEQ ID NO: 5336893 - DNA, 25 bp, Homo sapien
ccagcatcctcatcgtgcgtacagt

SEQ ID NO: 5336894 - DNA, 25 bp, Homo sapien
gctcaagttgtccagccagatgcgg

SEQ ID NO: 5336895 - DNA, 25 bp, Homo sapien
accagctcgctgtatctccacgcgg

SEQ ID NO: 5336896 - DNA, 25 bp, Homo sapien
gccatatttggcactgtgggtccag

SEQ ID NO: 5336897 - DNA, 25 bp, Homo sapien
gtcatcatcgcagatggtgccccat

SEQ ID NO: 5336898 - DNA, 25 bp, Homo sapien
agccagccggaaccgaagcccctgg

SEQ ID NO: 5336899 - DNA, 25 bp, Homo sapien
actgccagacactgacaggtcgcat

SEQ ID NO: 5336900 - DNA, 25 bp, Homo sapien
gggctccactgccagacactgacag

SEQ ID NO: 5336901 - DNA, 25 bp, Homo sapien
gctccactgccagacactgacaggt

SEQ ID NO: 5336902 - DNA, 25 bp, Homo sapien
tccactgccagacactgacaggtcg

SEQ ID NO: 5336903 - DNA, 25 bp, Homo sapien
gacccagagataagagacaactatg

SEQ ID NO: 5336904 - DNA, 25 bp, Homo sapien
caactatgagagatcgagagtcaga

SEQ ID NO: 5336905 - DNA, 25 bp, Homo sapien
gatagagactgagcaagagacacgt

SEQ ID NO: 5336906 - DNA, 25 bp, Homo sapien
ggcacaggtcatagaggcacagcct

SEQ ID NO: 5336907 - DNA, 25 bp, Homo sapien
tccatcccctactcattccctctgc

SEQ ID NO: 5336908 - DNA, 25 bp, Homo sapien
tcccctactcattccctctgcggtt

SEQ ID NO: 5336909 - DNA, 25 bp, Homo sapien
actcattccctctgcggttagcgtg

SEQ ID NO: 5336910 - DNA, 25 bp, Homo sapien
gtggcttcccctcgactccatccca

SEQ ID NO: 5336911 - DNA, 25 bp, Homo sapien
ttggccgagcaggaccctaagggct

SEQ ID NO: 5336912 - DNA, 25 bp, Homo sapien
gatcagtcctaggacttccaaaaaa

SEQ ID NO: 5336913 - DNA, 25 bp, Homo sapien
cttggccgagcaggaccctaagggc

SEQ ID NO: 5336914 - DNA, 25 bp, Homo sapien
ggagatcagtcctaggacttccaaa

SEQ ID NO: 5336915 - DNA, 25 bp, Homo sapien
tctacctgagaaggacggcaaggct

SEQ ID NO: 5336916 - DNA, 25 bp, Homo sapien
cctttatgatctgcctcgggagccc

SEQ ID NO: 5336917 - DNA, 25 bp, Homo sapien
gggctctctagagtagggactgaca

SEQ ID NO: 5336918 - DNA, 25 bp, Homo sapien
cctgaacctggtactgcaactggca

SEQ ID NO: 5336919 - DNA, 25 bp, Homo sapien
cactcacagaggctcaggcggatag

SEQ ID NO: 5336920 - DNA, 25 bp, Homo sapien
cactttgcatgtaggtaccaagcac

SEQ ID NO: 5336921 - DNA, 25 bp, Homo sapien
ggtgtgtcgcttccagacttgagga

SEQ ID NO: 5336922 - DNA, 25 bp, Homo sapien
tattctgtggatggagggagcaaca

SEQ ID NO: 5336923 - DNA, 25 bp, Homo sapien
gggccacagtagctcgagctcggtt

SEQ ID NO: 5336924 - DNA, 25 bp, Homo sapien
gtagctcgagctcggttggtctgca

SEQ ID NO: 5336925 - DNA, 25 bp, Homo sapien
gctcgagctcggttggtctgcaact

SEQ ID NO: 5336926 - DNA, 25 bp, Homo sapien
cacagtagctcgagctcggttggtc

SEQ ID NO: 5336927 - DNA, 25 bp, Homo sapien
tcacgaggactgtggttatagttcc

SEQ ID NO: 5336928 - DNA, 25 bp, Homo sapien
tgtggttatagttcctgtgtagcca

SEQ ID NO: 5336929 - DNA, 25 bp, Homo sapien
tttctttcacgaggactgtggttat

SEQ ID NO: 5336930 - DNA, 25 bp, Homo sapien
ggactgtggttatagttcctgtgta

SEQ ID NO: 5336931 - DNA, 25 bp, Homo sapien
agtgtgggtggagccgcccctgagg

SEQ ID NO: 5336932 - DNA, 25 bp, Homo sapien
ctttgaacatgcaaggggttgtagg

SEQ ID NO: 5336933 - DNA, 25 bp, Homo sapien
cccctgaggcttggcatagatgctg

SEQ ID NO: 5336934 - DNA, 25 bp, Homo sapien
tggctttgaacatgcaaggggttgt

SEQ ID NO: 5336935 - DNA, 25 bp, Homo sapien
tgaggaaaagagaggaggggcctca

SEQ ID NO: 5336936 - DNA, 25 bp, Homo sapien
ctgaggaaaagagaggaggggcctc

SEQ ID NO: 5336937 - DNA, 25 bp, Homo sapien
gctcccttttctccttcacagccac

SEQ ID NO: 5336938 - DNA, 25 bp, Homo sapien
tgtgatgctcccttttctccttcac

SEQ ID NO: 5336939 - DNA, 25 bp, Homo sapien
tctgtgatgctcccttttctccttc

SEQ ID NO: 5336940 - DNA, 25 bp, Homo sapien
tgatgctcccttttctccttcacag

SEQ ID NO: 5336941 - DNA, 25 bp, Homo sapien
gtcctccaggatggctctaattccc

SEQ ID NO: 5336942 - DNA, 25 bp, Homo sapien
attcctcagatttcaggtccgtgtg

SEQ ID NO: 5336943 - DNA, 25 bp, Homo sapien
tcccagtcatcactgatgccaatat

SEQ ID NO: 5336944 - DNA, 25 bp, Homo sapien
tgtgcatgtcgtgtgtcctccagga

SEQ ID NO: 5336945 - DNA, 25 bp, Homo sapien
ttctatttcactccttaccctgctg

SEQ ID NO: 5336946 - DNA, 25 bp, Homo sapien
taccctgctgccataatctaagtgt

SEQ ID NO: 5336947 - DNA, 25 bp, Homo sapien
attctatttcactccttaccctgct

SEQ ID NO: 5336948 - DNA, 25 bp, Homo sapien
tccttaccctgctgccataatctaa

SEQ ID NO: 5336949 - DNA, 25 bp, Homo sapien
tagatctgtcccatgagatctgggc

SEQ ID NO: 5336950 - DNA, 25 bp, Homo sapien
ttctcaaactccattcgcttctaga

SEQ ID NO: 5336951 - DNA, 25 bp, Homo sapien
ctagatctgtcccatgagatctggg

SEQ ID NO: 5336952 - DNA, 25 bp, Homo sapien
actccattcgcttctagatctgtcc

SEQ ID NO: 5336953 - DNA, 25 bp, Homo sapien
attcttaaggctatcatcatgtggg

SEQ ID NO: 5336954 - DNA, 25 bp, Homo sapien
atcatgtgggtcctcaggtagcagg

SEQ ID NO: 5336955 - DNA, 25 bp, Homo sapien
aaggtgctgggcagcatcagttccc

SEQ ID NO: 5336956 - DNA, 25 bp, Homo sapien
tcctcaggtagcagggggaaggtgc

SEQ ID NO: 5336957 - DNA, 25 bp, Homo sapien
tgtgagggagtgtgacggcatgatc

SEQ ID NO: 5336958 - DNA, 25 bp, Homo sapien
gtggttcccccttggctaacagcag

SEQ ID NO: 5336959 - DNA, 25 bp, Homo sapien
gagtgtgacggcatgatcacataga

SEQ ID NO: 5336960 - DNA, 25 bp, Homo sapien
cggcatgatcacatagaaggtgctg

SEQ ID NO: 5336961 - DNA, 25 bp, Homo sapien
ctgggtggagtaaatagtaaactga

SEQ ID NO: 5336962 - DNA, 25 bp, Homo sapien
agaaattcctcccatgtgatgtatc

SEQ ID NO: 5336963 - DNA, 25 bp, Homo sapien
aattcctcccatgtgatgtatcatc

SEQ ID NO: 5336964 - DNA, 25 bp, Homo sapien
cctcccatgtgatgtatcatctcag

SEQ ID NO: 5336965 - DNA, 25 bp, Homo sapien
gttacaacggctccgttgtctctgc

SEQ ID NO: 5336966 - DNA, 25 bp, Homo sapien
taacagttacaacggctccgttgtc

SEQ ID NO: 5336967 - DNA, 25 bp, Homo sapien
acagttacaacggctccgttgtctc

SEQ ID NO: 5336968 - DNA, 25 bp, Homo sapien
ctaacagttacaacggctccgttgt

SEQ ID NO: 5336969 - DNA, 25 bp, Homo sapien
ggagatgggtgttcttcagacagga

SEQ ID NO: 5336970 - DNA, 25 bp, Homo sapien
ggaaacaggaactcagtgggtggac

SEQ ID NO: 5336971 - DNA, 25 bp, Homo sapien
gagatgggtgttcttcagacaggaa

SEQ ID NO: 5336972 - DNA, 25 bp, Homo sapien
ggttgaggcagatttaggattgggc

SEQ ID NO: 5336973 - DNA, 25 bp, Homo sapien
gcagatttaggattgggcagagtta

SEQ ID NO: 5336974 - DNA, 25 bp, Homo sapien
gggcagagttagttagctgcttttc

SEQ ID NO: 5336975 - DNA, 25 bp, Homo sapien
taggattgggcagagttagttagct

SEQ ID NO: 5336976 - DNA, 25 bp, Homo sapien
ttgctgatttgtctccagctcatcc

SEQ ID NO: 5336977 - DNA, 25 bp, Homo sapien
agtccagctgccaacagcttgtagg

SEQ ID NO: 5336978 - DNA, 25 bp, Homo sapien
cagcaggctgtgacacaaagcatgg

SEQ ID NO: 5336979 - DNA, 25 bp, Homo sapien
gaaatgttgctgatttgtctccagc

SEQ ID NO: 5336980 - DNA, 25 bp, Homo sapien
aatgactcgcagagcccgctagatt

SEQ ID NO: 5336981 - DNA, 25 bp, Homo sapien
gcagagcccgctagattttaaagcc

SEQ ID NO: 5336982 - DNA, 25 bp, Homo sapien
tccatatgtcaatgactcgcagagc

SEQ ID NO: 5336983 - DNA, 25 bp, Homo sapien
gaggatgaacgggagtccatatgtc

SEQ ID NO: 5336984 - DNA, 25 bp, Homo sapien
gaggccgatgactgggaagccatct

SEQ ID NO: 5336985 - DNA, 25 bp, Homo sapien
atgagaggccgatgactgggaagcc

SEQ ID NO: 5336986 - DNA, 25 bp, Homo sapien
gatgaagtctcctttagggtcatcc

SEQ ID NO: 5336987 - DNA, 25 bp, Homo sapien
gaagccatctggtagagtgtgatga

SEQ ID NO: 5336988 - DNA, 25 bp, Homo sapien
gagcagtcgctcttggagatcacat

SEQ ID NO: 5336989 - DNA, 25 bp, Homo sapien
agtcgctcttggagatcacatttca

SEQ ID NO: 5336990 - DNA, 25 bp, Homo sapien
ccagcgagtagggatgggcagagca

SEQ ID NO: 5336991 - DNA, 25 bp, Homo sapien
gagccgtcagctgtgccagcgagta

SEQ ID NO: 5336992 - DNA, 25 bp, Homo sapien
cttcaagagtctgacatgatcttta

SEQ ID NO: 5336993 - DNA, 25 bp, Homo sapien
ttcaagagtctgacatgatctttac

SEQ ID NO: 5336994 - DNA, 25 bp, Homo sapien
tgggctggctgagcagttgtctcat

SEQ ID NO: 5336995 - DNA, 25 bp, Homo sapien
tgttttacttctgggctggctgagc

SEQ ID NO: 5336996 - DNA, 25 bp, Homo sapien
ttctgggctggctgagcagttgtct

SEQ ID NO: 5336997 - DNA, 25 bp, Homo sapien
ttgttttacttctgggctggctgag

SEQ ID NO: 5336998 - DNA, 25 bp, Homo sapien
gcggtaaccccagtgagtcgtgtca

SEQ ID NO: 5336999 - DNA, 25 bp, Homo sapien
gctgattagactgatagatgggccc

SEQ ID NO: 5337000 - DNA, 25 bp, Homo sapien
gggcaccagccctcctaatgaaaga

SEQ ID NO: 5337001 - DNA, 25 bp, Homo sapien
ggaagagacttgacggccatcccta

SEQ ID NO: 5337002 - DNA, 25 bp, Homo sapien
agaagatggatttgttcttggtctg

SEQ ID NO: 5337003 - DNA, 25 bp, Homo sapien
gatatcattgtctatagtctgaagg

SEQ ID NO: 5337004 - DNA, 25 bp, Homo sapien
tagtctgaaggtcaatgtcagttcc

SEQ ID NO: 5337005 - DNA, 25 bp, Homo sapien
ggtcaatgtcagttcccagaataga

SEQ ID NO: 5337006 - DNA, 25 bp, Homo sapien
aaaatctccatgctgacgatatcat

SEQ ID NO: 5337007 - DNA, 25 bp, Homo sapien
gatccattgactgtatctctagaca

SEQ ID NO: 5337008 - DNA, 25 bp, Homo sapien
tataggcacttgtcactggcccagc

SEQ ID NO: 5337009 - DNA, 25 bp, Homo sapien
cattcttgagcagtacacaaaggca

SEQ ID NO: 5337010 - DNA, 25 bp, Homo sapien
ggaagcagttcaaatcccctcaata

SEQ ID NO: 5337011 - DNA, 25 bp, Homo sapien
gattgcctcaacctgggtcatgacc

SEQ ID NO: 5337012 - DNA, 25 bp, Homo sapien
ggaactatgattgcctcaacctggg

SEQ ID NO: 5337013 - DNA, 25 bp, Homo sapien
actatgattgcctcaacctgggtca

SEQ ID NO: 5337014 - DNA, 25 bp, Homo sapien
ctagggaactatgattgcctcaacc

SEQ ID NO: 5337015 - DNA, 25 bp, Homo sapien
actacgtaggaccactccacacttt

SEQ ID NO: 5337016 - DNA, 25 bp, Homo sapien
tttttcagtacgtaaatatcaagga

SEQ ID NO: 5337017 - DNA, 25 bp, Homo sapien
gggaaagatcactacgtaggaccac

SEQ ID NO: 5337018 - DNA, 25 bp, Homo sapien
tgtcattaaggtacagagtgactgg

SEQ ID NO: 5337019 - DNA, 25 bp, Homo sapien
ggtatcctcaacaggagacgctgag

SEQ ID NO: 5337020 - DNA, 25 bp, Homo sapien
gacgctgagtccacgtgctctagga

SEQ ID NO: 5337021 - DNA, 25 bp, Homo sapien
gaaacctcctgactctggctaggtc

SEQ ID NO: 5337022 - DNA, 25 bp, Homo sapien
taggattccctttgtgacctcaacg

SEQ ID NO: 5337023 - DNA, 25 bp, Homo sapien
catgcggagttctgagatgcaggtc

SEQ ID NO: 5337024 - DNA, 25 bp, Homo sapien
gaggtataggtcagagctgcccttg

SEQ ID NO: 5337025 - DNA, 25 bp, Homo sapien
tgtattgtttgaattgctggagccc

SEQ ID NO: 5337026 - DNA, 25 bp, Homo sapien
gatgcaggtctgcaacctagcaaag

SEQ ID NO: 5337027 - DNA, 25 bp, Homo sapien
tgagtgatatctgtaatgcacataa

SEQ ID NO: 5337028 - DNA, 25 bp, Homo sapien
tctgtaatgcacataaaatccatga

SEQ ID NO: 5337029 - DNA, 25 bp, Homo sapien
atatctgtaatgcacataaaatcca

SEQ ID NO: 5337030 - DNA, 25 bp, Homo sapien
agtgatatctgtaatgcacataaaa

SEQ ID NO: 5337031 - DNA, 25 bp, Homo sapien
tcttgactgagtagattttcttgtc

SEQ ID NO: 5337032 - DNA, 25 bp, Homo sapien
ctctgccactcttgtgacaatgtct

SEQ ID NO: 5337033 - DNA, 25 bp, Homo sapien
gggaaaagcgtcatttcctctgcca

SEQ ID NO: 5337034 - DNA, 25 bp, Homo sapien
tcatctatagcagaaccatgggccc

SEQ ID NO: 5337035 - DNA, 25 bp, Homo sapien
ccgcggcaacatgctgtccaaacag

SEQ ID NO: 5337036 - DNA, 25 bp, Homo sapien
attcttgcctatgccagctcagcca

SEQ ID NO: 5337037 - DNA, 25 bp, Homo sapien
tcagccacgtaaggaaagaattagt

SEQ ID NO: 5337038 - DNA, 25 bp, Homo sapien
tcagtgccttgagaatcacttccgc

SEQ ID NO: 5337039 - DNA, 25 bp, Homo sapien
tgctaaccagtttactctgaaggag

SEQ ID NO: 5337040 - DNA, 25 bp, Homo sapien
tgaaggagaacaaggcactaaaggc

SEQ ID NO: 5337041 - DNA, 25 bp, Homo sapien
aatatcacccaaagcactgcacaga

SEQ ID NO: 5337042 - DNA, 25 bp, Homo sapien
ggcatctgctaacaccatacccatg

SEQ ID NO: 5337043 - DNA, 25 bp, Homo sapien
tgtgactccaccaacataggccaac

SEQ ID NO: 5337044 - DNA, 25 bp, Homo sapien
cagttttattatcttgagaggaaga

SEQ ID NO: 5337045 - DNA, 25 bp, Homo sapien
gagaggaagactttctagattcaaa

SEQ ID NO: 5337046 - DNA, 25 bp, Homo sapien
ttcagcttctgacacagttttatta

SEQ ID NO: 5337047 - DNA, 25 bp, Homo sapien
aatcgtcatcatacaggcaataaag

SEQ ID NO: 5337048 - DNA, 25 bp, Homo sapien
acaagataatcgtcatcatacaggc

SEQ ID NO: 5337049 - DNA, 25 bp, Homo sapien
cgtcatcatacaggcaataaagctg

SEQ ID NO: 5337050 - DNA, 25 bp, Homo sapien
gataatcgtcatcatacaggcaata

SEQ ID NO: 5337051 - DNA, 25 bp, Homo sapien
caattagtgaaacatctgcagtgtc

SEQ ID NO: 5337052 - DNA, 25 bp, Homo sapien
gaataagtggaaaacgataccactg

SEQ ID NO: 5337053 - DNA, 25 bp, Homo sapien
agaataagtggaaaacgataccact

SEQ ID NO: 5337054 - DNA, 25 bp, Homo sapien
tcctcttctgcatcaattagtgaaa

SEQ ID NO: 5337055 - DNA, 25 bp, Homo sapien
tgtttttgcatagttagggctttct

SEQ ID NO: 5337056 - DNA, 25 bp, Homo sapien
ctagggggcagtttcacctgagtct

SEQ ID NO: 5337057 - DNA, 25 bp, Homo sapien
cacctgagtctatgtggaatgtaga

SEQ ID NO: 5337058 - DNA, 25 bp, Homo sapien
ttttgcatagttagggctttctgag

SEQ ID NO: 5337059 - DNA, 25 bp, Homo sapien
cagatgtcagcccaggacggtagag

SEQ ID NO: 5337060 - DNA, 25 bp, Homo sapien
caatgtgcacaatgagaagccgtgg

SEQ ID NO: 5337061 - DNA, 25 bp, Homo sapien
tataaactgaacagggacatgcggc

SEQ ID NO: 5337062 - DNA, 25 bp, Homo sapien
ttaccagtagttcgcccaggatgca

SEQ ID NO: 5337063 - DNA, 25 bp, Homo sapien
ccagagggggaactgtagccaccag

SEQ ID NO: 5337064 - DNA, 25 bp, Homo sapien
agcaaaaccagagggggaactgtag

SEQ ID NO: 5337065 - DNA, 25 bp, Homo sapien
gggaactgtagccaccagctggata

SEQ ID NO: 5337066 - DNA, 25 bp, Homo sapien
ctgtagccaccagctggatattctt

SEQ ID NO: 5337067 - DNA, 25 bp, Homo sapien
tcccaagggtagagaacctgtcttg

SEQ ID NO: 5337068 - DNA, 25 bp, Homo sapien
tgtctcaaagtaagctatctgccct

SEQ ID NO: 5337069 - DNA, 25 bp, Homo sapien
tgtttgcctatcatgtaagcctgag

SEQ ID NO: 5337070 - DNA, 25 bp, Homo sapien
gactgcctctcccactatattgtaa

SEQ ID NO: 5337071 - DNA, 25 bp, Homo sapien
gccctaaagttctgcttgtgccttc

SEQ ID NO: 5337072 - DNA, 25 bp, Homo sapien
ctggccctaaagttctgcttgtgcc

SEQ ID NO: 5337073 - DNA, 25 bp, Homo sapien
tggccctaaagttctgcttgtgcct

SEQ ID NO: 5337074 - DNA, 25 bp, Homo sapien
cctaaagttctgcttgtgccttctg

SEQ ID NO: 5337075 - DNA, 25 bp, Homo sapien
ctcccctgcccgcaccccgggagat

SEQ ID NO: 5337076 - DNA, 25 bp, Homo sapien
ctcacactaggccctcccctgcccg

SEQ ID NO: 5337077 - DNA, 25 bp, Homo sapien
tcacactaggccctcccctgcccgc

SEQ ID NO: 5337078 - DNA, 25 bp, Homo sapien
cctgcccgcaccccgggagatccac

SEQ ID NO: 5337079 - DNA, 25 bp, Homo sapien
cctctgcggatgttctgttccgtgc

SEQ ID NO: 5337080 - DNA, 25 bp, Homo sapien
ggatgttctgttccgtgctgagcat

SEQ ID NO: 5337081 - DNA, 25 bp, Homo sapien
ctctcacagatcggcttctcgctgt

SEQ ID NO: 5337082 - DNA, 25 bp, Homo sapien
tgtgtctgcctctgcggatgttctg

SEQ ID NO: 5337083 - DNA, 25 bp, Homo sapien
tgcctggcggatcagcagcccggcc

SEQ ID NO: 5337084 - DNA, 25 bp, Homo sapien
gtgcctggcggatcagcagcccggc

SEQ ID NO: 5337085 - DNA, 25 bp, Homo sapien
cgtgcctggcggatcagcagcccgg

SEQ ID NO: 5337086 - DNA, 25 bp, Homo sapien
gcctggcggatcagcagcccggccc

SEQ ID NO: 5337087 - DNA, 25 bp, Homo sapien
tcttcggaagacggaggccccctca

SEQ ID NO: 5337088 - DNA, 25 bp, Homo sapien
cggaagacggaggccccctcacctg

SEQ ID NO: 5337089 - DNA, 25 bp, Homo sapien
gcggagccaaagatgccggcctctg

SEQ ID NO: 5337090 - DNA, 25 bp, Homo sapien
accgagccgagaggacccgagtggg

SEQ ID NO: 5337091 - DNA, 25 bp, Homo sapien
ctcaggctgagccggaccgagccga

SEQ ID NO: 5337092 - DNA, 25 bp, Homo sapien
gcagaggccgtagcttgcgccgcac

SEQ ID NO: 5337093 - DNA, 25 bp, Homo sapien
tatacatcatccgagcctcttggcc

SEQ ID NO: 5337094 - DNA, 25 bp, Homo sapien
tcttaacttcctcagtgttcctcgc

SEQ ID NO: 5337095 - DNA, 25 bp, Homo sapien
ccctacattgaatattggtaaacca

SEQ ID NO: 5337096 - DNA, 25 bp, Homo sapien
tattggatccacgttaactctctta

SEQ ID NO: 5337097 - DNA, 25 bp, Homo sapien
cacttgtggcaccttcgcttttgat

SEQ ID NO: 5337098 - DNA, 25 bp, Homo sapien
ccccaggacgaatgtcacaattttg

SEQ ID NO: 5337099 - DNA, 25 bp, Homo sapien
cacaattttgtccagattctcgcca

SEQ ID NO: 5337100 - DNA, 25 bp, Homo sapien
gagagggtgcctgcaccagtgtgag

SEQ ID NO: 5337101 - DNA, 25 bp, Homo sapien
actgccaacctcattgtatatgggc

SEQ ID NO: 5337102 - DNA, 25 bp, Homo sapien
ctaatgtaatatctgctggccccat

SEQ ID NO: 5337103 - DNA, 25 bp, Homo sapien
ccactaatgtaatatctgctggccc

SEQ ID NO: 5337104 - DNA, 25 bp, Homo sapien
tgccaacctcattgtatatgggctg

SEQ ID NO: 5337105 - DNA, 25 bp, Homo sapien
cactggaacggagtgaccactgaga

SEQ ID NO: 5337106 - DNA, 25 bp, Homo sapien
tttctgcagcaaatcagggcttccc

SEQ ID NO: 5337107 - DNA, 25 bp, Homo sapien
agcgacggcgacagagggaacttct

SEQ ID NO: 5337108 - DNA, 25 bp, Homo sapien
ccatctagagctgggcaaatgacca

SEQ ID NO: 5337109 - DNA, 25 bp, Homo sapien
caatcagtgactactcagggtgaca

SEQ ID NO: 5337110 - DNA, 25 bp, Homo sapien
catagtgttcataagagacctggcc

SEQ ID NO: 5337111 - DNA, 25 bp, Homo sapien
tgactgggccgatgcttaggaatat

SEQ ID NO: 5337112 - DNA, 25 bp, Homo sapien
tctggctggagtgtaggctgtaccc

SEQ ID NO: 5337113 - DNA, 25 bp, Homo sapien
ctggaagactgttgtggcctctcag

SEQ ID NO: 5337114 - DNA, 25 bp, Homo sapien
cctggaacagggtgatttgctggaa

SEQ ID NO: 5337115 - DNA, 25 bp, Homo sapien
ggaagctgagctctatgtgtatttg

SEQ ID NO: 5337116 - DNA, 25 bp, Homo sapien
ggagttaccactgagatgccaaagg

SEQ ID NO: 5337117 - DNA, 25 bp, Homo sapien
gaatgtgcctcgttcatccctggtg

SEQ ID NO: 5337118 - DNA, 25 bp, Homo sapien
gaccactcgcacatggctctaggct

SEQ ID NO: 5337119 - DNA, 25 bp, Homo sapien
gatcttcggcaagtaacctaaccta

SEQ ID NO: 5337120 - DNA, 25 bp, Homo sapien
tcaagctccagtcaatgatccagtc

SEQ ID NO: 5337121 - DNA, 25 bp, Homo sapien
tgatctcctttgcacaacctcagag

SEQ ID NO: 5337122 - DNA, 25 bp, Homo sapien
ggacttttgtcgtcctcagccttgc

SEQ ID NO: 5337123 - DNA, 25 bp, Homo sapien
caattgcagagctggtgtcttatac

SEQ ID NO: 5337124 - DNA, 25 bp, Homo sapien
ctctccaaatgtagcagagcagttg

SEQ ID NO: 5337125 - DNA, 25 bp, Homo sapien
caattgttgtgctctttgggcgtaa

SEQ ID NO: 5337126 - DNA, 25 bp, Homo sapien
agtgggccgcccaacttgagttcgc

SEQ ID NO: 5337127 - DNA, 25 bp, Homo sapien
gaatatccgctaccctgtcctgaaa

SEQ ID NO: 5337128 - DNA, 25 bp, Homo sapien
attccaggatttccagtaatctgga

SEQ ID NO: 5337129 - DNA, 25 bp, Homo sapien
caggtggcagcacgagtgccgatcg

SEQ ID NO: 5337130 - DNA, 25 bp, Homo sapien
gcaggtggcagcacgagtgccgatc

SEQ ID NO: 5337131 - DNA, 25 bp, Homo sapien
gatcacatgaactccgacttcggat

SEQ ID NO: 5337132 - DNA, 25 bp, Homo sapien
gagccgaagagagtaatttagggat

SEQ ID NO: 5337133 - DNA, 25 bp, Homo sapien
tagaggtgagaacggagttagacac

SEQ ID NO: 5337134 - DNA, 25 bp, Homo sapien
ctcgagccgagctcaactggaaact

SEQ ID NO: 5337135 - DNA, 25 bp, Homo sapien
ccccgccaccgaggacctgagcccg

SEQ ID NO: 5337136 - DNA, 25 bp, Homo sapien
accgaggacctgagcccgccggccg

SEQ ID NO: 5337137 - DNA, 25 bp, Homo sapien
gctctcccgcctggggactgcgagc

SEQ ID NO: 5337138 - DNA, 25 bp, Homo sapien
gccggccgccctcccgcgctctccc

SEQ ID NO: 5337139 - DNA, 25 bp, Homo sapien
ctgccttcccccgtactgctgtccc

SEQ ID NO: 5337140 - DNA, 25 bp, Homo sapien
gggggacgcctgcggactccaccaa

SEQ ID NO: 5337141 - DNA, 25 bp, Homo sapien
ggacgcctgcggactccaccaagct

SEQ ID NO: 5337142 - DNA, 25 bp, Homo sapien
gctgccttcccccgtactgctgtcc

SEQ ID NO: 5337143 - DNA, 25 bp, Homo sapien
ctgtgggagcagaggaatccgaccc

SEQ ID NO: 5337144 - DNA, 25 bp, Homo sapien
tgggagcagaggaatccgacccagg

SEQ ID NO: 5337145 - DNA, 25 bp, Homo sapien
gggagcagaggaatccgacccaggt

SEQ ID NO: 5337146 - DNA, 25 bp, Homo sapien
tgtgggagcagaggaatccgaccca

SEQ ID NO: 5337147 - DNA, 25 bp, Homo sapien
tgctcagggacctgtcctcctccgt

SEQ ID NO: 5337148 - DNA, 25 bp, Homo sapien
ctttcctgctcagggacctgtcctc

SEQ ID NO: 5337149 - DNA, 25 bp, Homo sapien
ttcctgctcagggacctgtcctcct

SEQ ID NO: 5337150 - DNA, 25 bp, Homo sapien
cctgctcagggacctgtcctcctcc

SEQ ID NO: 5337151 - DNA, 25 bp, Homo sapien
ggacggtagtggctccaaagaaatg

SEQ ID NO: 5337152 - DNA, 25 bp, Homo sapien
tggatgagccaccagtgggacggta

SEQ ID NO: 5337153 - DNA, 25 bp, Homo sapien
cactgtctgatattcttggcaccaa

SEQ ID NO: 5337154 - DNA, 25 bp, Homo sapien
caattcctttctcaggtggggagaa

SEQ ID NO: 5337155 - DNA, 25 bp, Homo sapien
tgttagcatgttattcctagaggaa

SEQ ID NO: 5337156 - DNA, 25 bp, Homo sapien
gtggaggaagttgtgttgttagcat

SEQ ID NO: 5337157 - DNA, 25 bp, Homo sapien
ttggaaggcaggtaacagagggagt

SEQ ID NO: 5337158 - DNA, 25 bp, Homo sapien
tttctcacatgtgcacgcccgtgaa

SEQ ID NO: 5337159 - DNA, 25 bp, Homo sapien
gaggccctgactgactatctcttga

SEQ ID NO: 5337160 - DNA, 25 bp, Homo sapien
atggtcaggccacggtagccagagt

SEQ ID NO: 5337161 - DNA, 25 bp, Homo sapien
gattttgccacaggttatctgaggg

SEQ ID NO: 5337162 - DNA, 25 bp, Homo sapien
gctgtaagaattgctggtgtagaca

SEQ ID NO: 5337163 - DNA, 25 bp, Homo sapien
ctgtggagtcacaaaaagtcatgta

SEQ ID NO: 5337164 - DNA, 25 bp, Homo sapien
aaaagtcatgtaagatacctctgag

SEQ ID NO: 5337165 - DNA, 25 bp, Homo sapien
cctctgagaatttaggtttgttcat

SEQ ID NO: 5337166 - DNA, 25 bp, Homo sapien
tgtaagatacctctgagaatttagg

SEQ ID NO: 5337167 - DNA, 25 bp, Homo sapien
agcaggtgcacgcaggctactgtga

SEQ ID NO: 5337168 - DNA, 25 bp, Homo sapien
gggtcattcttgctagggctgtatg

SEQ ID NO: 5337169 - DNA, 25 bp, Homo sapien
caggctactgtgaagtgcggaacca

SEQ ID NO: 5337170 - DNA, 25 bp, Homo sapien
agtgcggaaccacttggctggcagc

SEQ ID NO: 5337171 - DNA, 25 bp, Homo sapien
actgccaaagggttcattccgcctc

SEQ ID NO: 5337172 - DNA, 25 bp, Homo sapien
tatctccactgccaaagggttcatt

SEQ ID NO: 5337173 - DNA, 25 bp, Homo sapien
gtcagatatctccactgccaaaggg

SEQ ID NO: 5337174 - DNA, 25 bp, Homo sapien
tccatggtcagatatctccactgcc

SEQ ID NO: 5337175 - DNA, 25 bp, Homo sapien
ttcccatctgtgtttgcatccactc

SEQ ID NO: 5337176 - DNA, 25 bp, Homo sapien
tcccatctgtgtttgcatccactcc

SEQ ID NO: 5337177 - DNA, 25 bp, Homo sapien
cttcccatctgtgtttgcatccact

SEQ ID NO: 5337178 - DNA, 25 bp, Homo sapien
tcctccatggtaactgagtacttga

SEQ ID NO: 5337179 - DNA, 25 bp, Homo sapien
gagtacttgattgtccgtggcattt

SEQ ID NO: 5337180 - DNA, 25 bp, Homo sapien
ggctgacattttaccacccaaggac

SEQ ID NO: 5337181 - DNA, 25 bp, Homo sapien
tccctctgaagtactccaggtagaa

SEQ ID NO: 5337182 - DNA, 25 bp, Homo sapien
tgtggcaacttctctgactacccag

SEQ ID NO: 5337183 - DNA, 25 bp, Homo sapien
aggtggcacaaactggctgcatgca

SEQ ID NO: 5337184 - DNA, 25 bp, Homo sapien
gagggtacatactgcccagtccagc

SEQ ID NO: 5337185 - DNA, 25 bp, Homo sapien
gcacctttggccagttacctctgtg

SEQ ID NO: 5337186 - DNA, 25 bp, Homo sapien
ctgggatcacttgtttcatgctagg

SEQ ID NO: 5337187 - DNA, 25 bp, Homo sapien
tgaaagcagagcttctatgctggga

SEQ ID NO: 5337188 - DNA, 25 bp, Homo sapien
tgtgccacaaatggattgccaaagg

SEQ ID NO: 5337189 - DNA, 25 bp, Homo sapien
caaaggatgtgaggtttttgcacac

SEQ ID NO: 5337190 - DNA, 25 bp, Homo sapien
cctaagggtgaaattgggcttgctt

SEQ ID NO: 5337191 - DNA, 25 bp, Homo sapien
aagggtgaaattgggcttgcttcag

SEQ ID NO: 5337192 - DNA, 25 bp, Homo sapien
gggtgaaattgggcttgcttcagac

SEQ ID NO: 5337193 - DNA, 25 bp, Homo sapien
ctaagggtgaaattgggcttgcttc

SEQ ID NO: 5337194 - DNA, 25 bp, Homo sapien
aaactgtcgtgctcagacaagtcca

SEQ ID NO: 5337195 - DNA, 25 bp, Homo sapien
attgaataaactgtcgtgctcagac

SEQ ID NO: 5337196 - DNA, 25 bp, Homo sapien
agggatgacacagtggaatgttgtt

SEQ ID NO: 5337197 - DNA, 25 bp, Homo sapien
gacacagtggaatgttgttcgttac

SEQ ID NO: 5337198 - DNA, 25 bp, Homo sapien
ctgaaccttgttggctgtcgctgct

SEQ ID NO: 5337199 - DNA, 25 bp, Homo sapien
catagattctgaaccttgttggctg

SEQ ID NO: 5337200 - DNA, 25 bp, Homo sapien
aatacatagattctgaaccttgttg

SEQ ID NO: 5337201 - DNA, 25 bp, Homo sapien
gattctgaaccttgttggctgtcgc

SEQ ID NO: 5337202 - DNA, 25 bp, Homo sapien
tgtgatattcctgaatgtgatgtga

SEQ ID NO: 5337203 - DNA, 25 bp, Homo sapien
ggcccatcgcctgcatgcaacagtg

SEQ ID NO: 5337204 - DNA, 25 bp, Homo sapien
tgtgatgtgaatgtgtaattgcaac

SEQ ID NO: 5337205 - DNA, 25 bp, Homo sapien
gtaattgcaactggaatgtcctgcc

SEQ ID NO: 5337206 - DNA, 25 bp, Homo sapien
tattaggcttaatcaagaaggcatg

SEQ ID NO: 5337207 - DNA, 25 bp, Homo sapien
tctaatcacggcttgggctttttgg

SEQ ID NO: 5337208 - DNA, 25 bp, Homo sapien
tgtactttggcgacttttattaggc

SEQ ID NO: 5337209 - DNA, 25 bp, Homo sapien
tggttattaattcaacctctagccc

SEQ ID NO: 5337210 - DNA, 25 bp, Homo sapien
cactgtttagctcttcactcaaaga

SEQ ID NO: 5337211 - DNA, 25 bp, Homo sapien
gaaccaatccatattgattctcctc

SEQ ID NO: 5337212 - DNA, 25 bp, Homo sapien
gtgggtcctgtgaaccaatccatat

SEQ ID NO: 5337213 - DNA, 25 bp, Homo sapien
tcagacatcaccactgtttagctct

SEQ ID NO: 5337214 - DNA, 25 bp, Homo sapien
gacagcagaaatcccccagaagtta

SEQ ID NO: 5337215 - DNA, 25 bp, Homo sapien
acagcagaaatcccccagaagttaa

SEQ ID NO: 5337216 - DNA, 25 bp, Homo sapien
ctatttaaagacagcagaaatcccc

SEQ ID NO: 5337217 - DNA, 25 bp, Homo sapien
aaagacagcagaaatcccccagaag

SEQ ID NO: 5337218 - DNA, 25 bp, Homo sapien
attcccatcggccatgcgggcgaac

SEQ ID NO: 5337219 - DNA, 25 bp, Homo sapien
cattcccatcggccatgcgggcgaa

SEQ ID NO: 5337220 - DNA, 25 bp, Homo sapien
tttacattgcggatgatggaccggc

SEQ ID NO: 5337221 - DNA, 25 bp, Homo sapien
cggctcgtgacgtccatgaatttca

SEQ ID NO: 5337222 - DNA, 25 bp, Homo sapien
atgatggaccggctcgtgacgtcca

SEQ ID NO: 5337223 - DNA, 25 bp, Homo sapien
tgacgtccatgaatttcacgcgcac

SEQ ID NO: 5337224 - DNA, 25 bp, Homo sapien
cctggccagcttgataggctgcaca

SEQ ID NO: 5337225 - DNA, 25 bp, Homo sapien
gccggtcctgcccaggaccttggtg

SEQ ID NO: 5337226 - DNA, 25 bp, Homo sapien
ataggctgcacacggctggtgttca

SEQ ID NO: 5337227 - DNA, 25 bp, Homo sapien
tgtgcactgtccctgagagccggtc

SEQ ID NO: 5337228 - DNA, 25 bp, Homo sapien
tttgtcctagaatagtatttggcac

SEQ ID NO: 5337229 - DNA, 25 bp, Homo sapien
gatatagtcatccaggtagaaacag

SEQ ID NO: 5337230 - DNA, 25 bp, Homo sapien
tcctgttgtaggaactctgatccat

SEQ ID NO: 5337231 - DNA, 25 bp, Homo sapien
caaggacagatacactgggctgacc

SEQ ID NO: 5337232 - DNA, 25 bp, Homo sapien
gatttccacaatcctgtggtactca

SEQ ID NO: 5337233 - DNA, 25 bp, Homo sapien
tttcttgcgttaggatcttcatgga

SEQ ID NO: 5337234 - DNA, 25 bp, Homo sapien
tggaggagcacagatttccacaatc

SEQ ID NO: 5337235 - DNA, 25 bp, Homo sapien
tcatatgtccggtagagcatcacct

SEQ ID NO: 5337236 - DNA, 25 bp, Homo sapien
acatcagtgcatataactctcctcc

SEQ ID NO: 5337237 - DNA, 25 bp, Homo sapien
tcagtgcatataactctcctcccat

SEQ ID NO: 5337238 - DNA, 25 bp, Homo sapien
gaaacatcagtgcatataactctcc

SEQ ID NO: 5337239 - DNA, 25 bp, Homo sapien
aatgaaacatcagtgcatataactc

SEQ ID NO: 5337240 - DNA, 25 bp, Homo sapien
gatgggcagatgccagcccttgctg

SEQ ID NO: 5337241 - DNA, 25 bp, Homo sapien
gcatgaatgactatccataaagcat

SEQ ID NO: 5337242 - DNA, 25 bp, Homo sapien
ggcttctgcatgaatgactatccat

SEQ ID NO: 5337243 - DNA, 25 bp, Homo sapien
ccaggcttctgcatgaatgactatc

SEQ ID NO: 5337244 - DNA, 25 bp, Homo sapien
tgatggagggataacagcagtagaa

SEQ ID NO: 5337245 - DNA, 25 bp, Homo sapien
ggaagacttgagtatgttcaggtga

SEQ ID NO: 5337246 - DNA, 25 bp, Homo sapien
tgctgctgtttgctaaacgcttggg

SEQ ID NO: 5337247 - DNA, 25 bp, Homo sapien
tatgttcaggtgatggagggataac

SEQ ID NO: 5337248 - DNA, 25 bp, Homo sapien
cttccctgagatggacgaggtaagg

SEQ ID NO: 5337249 - DNA, 25 bp, Homo sapien
ctccttccctgagatggacgaggta

SEQ ID NO: 5337250 - DNA, 25 bp, Homo sapien
gatggacgaggtaaggggaggattc

SEQ ID NO: 5337251 - DNA, 25 bp, Homo sapien
tggacgaggtaaggggaggattcat

SEQ ID NO: 5337252 - DNA, 25 bp, Homo sapien
cattcttcccactgtagttgagcac

SEQ ID NO: 5337253 - DNA, 25 bp, Homo sapien
attcttcccactgtagttgagcact

SEQ ID NO: 5337254 - DNA, 25 bp, Homo sapien
ccattcttcccactgtagttgagca

SEQ ID NO: 5337255 - DNA, 25 bp, Homo sapien
gcagcacgtagctgctacggcaggc

SEQ ID NO: 5337256 - DNA, 25 bp, Homo sapien
aggcagcacgtagctgctacggcag

SEQ ID NO: 5337257 - DNA, 25 bp, Homo sapien
agcacgtagctgctacggcaggcat

SEQ ID NO: 5337258 - DNA, 25 bp, Homo sapien
ccaggcagcacgtagctgctacggc

SEQ ID NO: 5337259 - DNA, 25 bp, Homo sapien
cactggttttgatggaccgacaggt

SEQ ID NO: 5337260 - DNA, 25 bp, Homo sapien
tccctccactggttttgatggaccg

SEQ ID NO: 5337261 - DNA, 25 bp, Homo sapien
tccactggttttgatggaccgacag

SEQ ID NO: 5337262 - DNA, 25 bp, Homo sapien
tggttttgatggaccgacaggtttg

SEQ ID NO: 5337263 - DNA, 25 bp, Homo sapien
tgaggtcaaaagcaggtgctgtata

SEQ ID NO: 5337264 - DNA, 25 bp, Homo sapien
tggctaggctggcattgcaatagca

SEQ ID NO: 5337265 - DNA, 25 bp, Homo sapien
gctaggctggcattgcaatagcaat

SEQ ID NO: 5337266 - DNA, 25 bp, Homo sapien
aaaagcaggtgctgtataaaccagg

SEQ ID NO: 5337267 - DNA, 25 bp, Homo sapien
tgaggtttccacttcagcagtacac

SEQ ID NO: 5337268 - DNA, 25 bp, Homo sapien
gcagggcctagtaggcaaagtgaat

SEQ ID NO: 5337269 - DNA, 25 bp, Homo sapien
ggtttccacttcagcagtacactcc

SEQ ID NO: 5337270 - DNA, 25 bp, Homo sapien
gcaaagtgaataatgaggtttccac

SEQ ID NO: 5337271 - DNA, 25 bp, Homo sapien
ccacaggcttcctttctaccccaag

SEQ ID NO: 5337272 - DNA, 25 bp, Homo sapien
cacaggcttcctttctaccccaaga

SEQ ID NO: 5337273 - DNA, 25 bp, Homo sapien
aaaagcgttgtcttggagtcttcca

SEQ ID NO: 5337274 - DNA, 25 bp, Homo sapien
cgttcaggctacctcttacattttc

SEQ ID NO: 5337275 - DNA, 25 bp, Homo sapien
cactcaatcacttcatgtgtcccgt

SEQ ID NO: 5337276 - DNA, 25 bp, Homo sapien
tgagtctagtagaggcctccagcat

SEQ ID NO: 5337277 - DNA, 25 bp, Homo sapien
aattttaaggctgtacacattgcag

SEQ ID NO: 5337278 - DNA, 25 bp, Homo sapien
tttaaggctgtacacattgcagaca

SEQ ID NO: 5337279 - DNA, 25 bp, Homo sapien
caatgagtattgattacttatataa

SEQ ID NO: 5337280 - DNA, 25 bp, Homo sapien
gacagcaccccactgtttgaaaaac

SEQ ID NO: 5337281 - DNA, 25 bp, Homo sapien
tgtcacccagctaagaaaatccgcg

SEQ ID NO: 5337282 - DNA, 25 bp, Homo sapien
tagtacaatcagcagctaaggcggc

SEQ ID NO: 5337283 - DNA, 25 bp, Homo sapien
gaagttagcgccttgacgtgggaca

SEQ ID NO: 5337284 - DNA, 25 bp, Homo sapien
cattgttgcatgaaactccggcgca

SEQ ID NO: 5337285 - DNA, 25 bp, Homo sapien
gccaccgcacgaggcctgcccttgc

SEQ ID NO: 5337286 - DNA, 25 bp, Homo sapien
gcctgcccttgccatttttgtggcc

SEQ ID NO: 5337287 - DNA, 25 bp, Homo sapien
agccaccgcacgaggcctgcccttg

SEQ ID NO: 5337288 - DNA, 25 bp, Homo sapien
cttgccatttttgtggccctgaact

SEQ ID NO: 5337289 - DNA, 25 bp, Homo sapien
ctttcggcagattgggtgaggttcc

SEQ ID NO: 5337290 - DNA, 25 bp, Homo sapien
catcctgggatttggcagtcagctc

SEQ ID NO: 5337291 - DNA, 25 bp, Homo sapien
tttgcccctcatatacagaccctgg

SEQ ID NO: 5337292 - DNA, 25 bp, Homo sapien
gggctgttgagtgtgttccttcctg

SEQ ID NO: 5337293 - DNA, 25 bp, Homo sapien
ccctggatgcttggaggtggtccat

SEQ ID NO: 5337294 - DNA, 25 bp, Homo sapien
cttggaggtggtccatgttcttaaa

SEQ ID NO: 5337295 - DNA, 25 bp, Homo sapien
ttggaggtggtccatgttcttaaaa

SEQ ID NO: 5337296 - DNA, 25 bp, Homo sapien
tccagcaagtggaccgctggcagca

SEQ ID NO: 5337297 - DNA, 25 bp, Homo sapien
ccagaggtatttgatccagcaagtg

SEQ ID NO: 5337298 - DNA, 25 bp, Homo sapien
caagtggaccgctggcagcagacag

SEQ ID NO: 5337299 - DNA, 25 bp, Homo sapien
tatttgatccagcaagtggaccgct

SEQ ID NO: 5337300 - DNA, 25 bp, Homo sapien
tcctggaggagtggcccgtatgcct

SEQ ID NO: 5337301 - DNA, 25 bp, Homo sapien
ggaggagtggcccgtatgcctccct

SEQ ID NO: 5337302 - DNA, 25 bp, Homo sapien
aggagtggcccgtatgcctccctgg

SEQ ID NO: 5337303 - DNA, 25 bp, Homo sapien
gatcctggaggagtggcccgtatgc

SEQ ID NO: 5337304 - DNA, 25 bp, Homo sapien
agtgtgtcagagctggcattggcct

SEQ ID NO: 5337305 - DNA, 25 bp, Homo sapien
gtgtgtcagagctggcattggcctg

SEQ ID NO: 5337306 - DNA, 25 bp, Homo sapien
ctgaagaagtggcataggagatctg

SEQ ID NO: 5337307 - DNA, 25 bp, Homo sapien
ggcgaggacaagttccttgtcccat

SEQ ID NO: 5337308 - DNA, 25 bp, Homo sapien
cataggagatctgagtttcggttca

SEQ ID NO: 5337309 - DNA, 25 bp, Homo sapien
ggctgccctggcgaggacaagttcc

SEQ ID NO: 5337310 - DNA, 25 bp, Homo sapien
agtgccacctttctcagaacattcg

SEQ ID NO: 5337311 - DNA, 25 bp, Homo sapien
cacagaaggctcgaggccttttctc

SEQ ID NO: 5337312 - DNA, 25 bp, Homo sapien
caccccagtgaagtgctgcgaggaa

SEQ ID NO: 5337313 - DNA, 25 bp, Homo sapien
ggtgaagttgtgttagcgattcccc

SEQ ID NO: 5337314 - DNA, 25 bp, Homo sapien
ggcacacccaagtcattccgaggaa

SEQ ID NO: 5337315 - DNA, 25 bp, Homo sapien
agacaaatttgccagccagaccatg

SEQ ID NO: 5337316 - DNA, 25 bp, Homo sapien
caaattgtcatccatggtagccctg

SEQ ID NO: 5337317 - DNA, 25 bp, Homo sapien
gatcatactggttgtgtctgccatg

SEQ ID NO: 5337318 - DNA, 25 bp, Homo sapien
gtggccactacccagagagttcctg

SEQ ID NO: 5337319 - DNA, 25 bp, Homo sapien
caagacagataggtggcatcagaac

SEQ ID NO: 5337320 - DNA, 25 bp, Homo sapien
tttgggatcattggcagaaactggc

SEQ ID NO: 5337321 - DNA, 25 bp, Homo sapien
cctgcacttggagtaggaaggccct

SEQ ID NO: 5337322 - DNA, 25 bp, Homo sapien
gatagatgttccacaagggtgctgt

SEQ ID NO: 5337323 - DNA, 25 bp, Homo sapien
catgatctatgcttagcccagtacc

SEQ ID NO: 5337324 - DNA, 25 bp, Homo sapien
agggcctcggagtgcatcctgcttc

SEQ ID NO: 5337325 - DNA, 25 bp, Homo sapien
tcagctgcgtggtgcttatgagccc

SEQ ID NO: 5337326 - DNA, 25 bp, Homo sapien
aagccaggagttgacgcatcctgca

SEQ ID NO: 5337327 - DNA, 25 bp, Homo sapien
tctgggcaatgaaaccaaagccagg

SEQ ID NO: 5337328 - DNA, 25 bp, Homo sapien
aatcaaggaatcctgagtctgggca

SEQ ID NO: 5337329 - DNA, 25 bp, Homo sapien
agttgacgcatcctgcagttgggcc

SEQ ID NO: 5337330 - DNA, 25 bp, Homo sapien
tgagctggcattggtctgctgacct

SEQ ID NO: 5337331 - DNA, 25 bp, Homo sapien
tgtccatgtgcttccctaggctgag

SEQ ID NO: 5337332 - DNA, 25 bp, Homo sapien
tctgaatctgaaagcccgcctctgt

SEQ ID NO: 5337333 - DNA, 25 bp, Homo sapien
tggtgtatttgagccctcccagcaa

SEQ ID NO: 5337334 - DNA, 25 bp, Homo sapien
gggctggtccttctcgtttgctcta

SEQ ID NO: 5337335 - DNA, 25 bp, Homo sapien
caaaacgtgggtatttcctgctaca

SEQ ID NO: 5337336 - DNA, 25 bp, Homo sapien
gtgtaattaggtgaaaacagcccag

SEQ ID NO: 5337337 - DNA, 25 bp, Homo sapien
tttagttcactaaagggtgcccaca

SEQ ID NO: 5337338 - DNA, 25 bp, Homo sapien
tccttgagcactcagtctagtgaag

SEQ ID NO: 5337339 - DNA, 25 bp, Homo sapien
aatcatctcaaatccttgagcactc

SEQ ID NO: 5337340 - DNA, 25 bp, Homo sapien
cactcagtctagtgaagatgttgtc

SEQ ID NO: 5337341 - DNA, 25 bp, Homo sapien
tcaaatccttgagcactcagtctag

SEQ ID NO: 5337342 - DNA, 25 bp, Homo sapien
tactcagtgcagttttggtgccacc

SEQ ID NO: 5337343 - DNA, 25 bp, Homo sapien
tggtgttcaccagccttagccaggc

SEQ ID NO: 5337344 - DNA, 25 bp, Homo sapien
tggcgcaattaggaaagtaaccggc

SEQ ID NO: 5337345 - DNA, 25 bp, Homo sapien
ttgctgaattctggtagaggcctca

SEQ ID NO: 5337346 - DNA, 25 bp, Homo sapien
agtctcacatccaggttatggtgat

SEQ ID NO: 5337347 - DNA, 25 bp, Homo sapien
aagtctcacatccaggttatggtga

SEQ ID NO: 5337348 - DNA, 25 bp, Homo sapien
caagtctcacatccaggttatggtg

SEQ ID NO: 5337349 - DNA, 25 bp, Homo sapien
caggtgtcagcatcgcagggaatcc

SEQ ID NO: 5337350 - DNA, 25 bp, Homo sapien
tcaggtgtcagcatcgcagggaatc

SEQ ID NO: 5337351 - DNA, 25 bp, Homo sapien
ctgtgggatgtggtccaggctctca

SEQ ID NO: 5337352 - DNA, 25 bp, Homo sapien
cgcagggaatcccacaaacctatcc

SEQ ID NO: 5337353 - DNA, 25 bp, Homo sapien
agcccatgtggtcccctgatttctg

SEQ ID NO: 5337354 - DNA, 25 bp, Homo sapien
caagtggcctcttggagggctccca

SEQ ID NO: 5337355 - DNA, 25 bp, Homo sapien
tgcgacccctgtgctcaggtatcca

SEQ ID NO: 5337356 - DNA, 25 bp, Homo sapien
accccacttcgcaccagatgctgac

SEQ ID NO: 5337357 - DNA, 25 bp, Homo sapien
ggatcccgacaactctggctgtgct

SEQ ID NO: 5337358 - DNA, 25 bp, Homo sapien
gtttccagcaggatcccgacaactc

SEQ ID NO: 5337359 - DNA, 25 bp, Homo sapien
ctgttccaacgggagcatgtgcctg

SEQ ID NO: 5337360 - DNA, 25 bp, Homo sapien
aaaagcagctgatgccttcctgttc

SEQ ID NO: 5337361 - DNA, 25 bp, Homo sapien
tgaggactctcaactgaccgttgga

SEQ ID NO: 5337362 - DNA, 25 bp, Homo sapien
tattcggagttgtaaacgtgaggcc

SEQ ID NO: 5337363 - DNA, 25 bp, Homo sapien
tttgaacgcattaggcatccacgtg

SEQ ID NO: 5337364 - DNA, 25 bp, Homo sapien
ttttggacatgctacgtttgaacgc

SEQ ID NO: 5337365 - DNA, 25 bp, Homo sapien
aaatttcatatgtgagagaaggacc

SEQ ID NO: 5337366 - DNA, 25 bp, Homo sapien
gcacttaggaacacgcagcactcgt

SEQ ID NO: 5337367 - DNA, 25 bp, Homo sapien
aatggtgagtacaggcacacgtgta

SEQ ID NO: 5337368 - DNA, 25 bp, Homo sapien
ccaattgatgaagcgatgttcttgc

SEQ ID NO: 5337369 - DNA, 25 bp, Homo sapien
cagctcagtgcgatggaagggctct

SEQ ID NO: 5337370 - DNA, 25 bp, Homo sapien
tggctccttcagctcagtgcgatgg

SEQ ID NO: 5337371 - DNA, 25 bp, Homo sapien
taaagctagctggaatttatcaggc

SEQ ID NO: 5337372 - DNA, 25 bp, Homo sapien
ctgctctgtagcgactagaatttaa

SEQ ID NO: 5337373 - DNA, 25 bp, Homo sapien
gtcgccagagcctaacacacagtgg

SEQ ID NO: 5337374 - DNA, 25 bp, Homo sapien
cacgctattaatgccctgggaaaca

SEQ ID NO: 5337375 - DNA, 25 bp, Homo sapien
gatatcttgtcactaagcctggcaa

SEQ ID NO: 5337376 - DNA, 25 bp, Homo sapien
ggcctgtcccgtaattctaagcttg

SEQ ID NO: 5337377 - DNA, 25 bp, Homo sapien
taaatgcagatctcgagggagcctc

SEQ ID NO: 5337378 - DNA, 25 bp, Homo sapien
aggacccgtcgcctcctaaatgcag

SEQ ID NO: 5337379 - DNA, 25 bp, Homo sapien
tggcggtgacctcaggactgacgca

SEQ ID NO: 5337380 - DNA, 25 bp, Homo sapien
gctccaggcctcgataaatgtttaa

SEQ ID NO: 5337381 - DNA, 25 bp, Homo sapien
gtgggcaacacctaagccgcggtgt

SEQ ID NO: 5337382 - DNA, 25 bp, Homo sapien
cctaagccgcggtgtttactggtga

SEQ ID NO: 5337383 - DNA, 25 bp, Homo sapien
tgtttactggtgagggagtcggctg

SEQ ID NO: 5337384 - DNA, 25 bp, Homo sapien
tccggtgcccggtgggcaacaccta

SEQ ID NO: 5337385 - DNA, 25 bp, Homo sapien
agcagggctaccatccgtgttccag

SEQ ID NO: 5337386 - DNA, 25 bp, Homo sapien
caggcggtctataccagagctggca

SEQ ID NO: 5337387 - DNA, 25 bp, Homo sapien
gatggtccatttagcagtagcagag

SEQ ID NO: 5337388 - DNA, 25 bp, Homo sapien
gagcccatgacgaaggccggctaat

SEQ ID NO: 5337389 - DNA, 25 bp, Homo sapien
cgctcttgttatgggtttttctggg

SEQ ID NO: 5337390 - DNA, 25 bp, Homo sapien
ccgctcttgttatgggtttttctgg

SEQ ID NO: 5337391 - DNA, 25 bp, Homo sapien
caatgactgagaatctgtcttcagg

SEQ ID NO: 5337392 - DNA, 25 bp, Homo sapien
ctggaccaggtggtgtggttgacaa

SEQ ID NO: 5337393 - DNA, 25 bp, Homo sapien
gtggttgacaatgactgagaatctg

SEQ ID NO: 5337394 - DNA, 25 bp, Homo sapien
tgtcttcagggatccctgcagaggc

SEQ ID NO: 5337395 - DNA, 25 bp, Homo sapien
tcaccccttgctttttgattgtgct

SEQ ID NO: 5337396 - DNA, 25 bp, Homo sapien
caccatgcccgatcaccccttgctt

SEQ ID NO: 5337397 - DNA, 25 bp, Homo sapien
accatgcccgatcaccccttgcttt

SEQ ID NO: 5337398 - DNA, 25 bp, Homo sapien
atcaccccttgctttttgattgtgc

SEQ ID NO: 5337399 - DNA, 25 bp, Homo sapien
cctccatcatgtcttgctggaatcc

SEQ ID NO: 5337400 - DNA, 25 bp, Homo sapien
ccctgagacttctgtctaaggaagc

SEQ ID NO: 5337401 - DNA, 25 bp, Homo sapien
tcccgggggcttatgcaggcctgaa

SEQ ID NO: 5337402 - DNA, 25 bp, Homo sapien
tctgacacgggatgcttttgctggg

SEQ ID NO: 5337403 - DNA, 25 bp, Homo sapien
caatagggactgatgtttgcctcag

SEQ ID NO: 5337404 - DNA, 25 bp, Homo sapien
tgggcttatttggtggctggcagct

SEQ ID NO: 5337405 - DNA, 25 bp, Homo sapien
gcttgaaggtttctccctctagggc

SEQ ID NO: 5337406 - DNA, 25 bp, Homo sapien
gaagtgagccttgtgggcttatttg

SEQ ID NO: 5337407 - DNA, 25 bp, Homo sapien
ttagtggagatattctggccaaaac

SEQ ID NO: 5337408 - DNA, 25 bp, Homo sapien
ctggagacccagtatgagaaacaaa

SEQ ID NO: 5337409 - DNA, 25 bp, Homo sapien
tgcttggtgacctgcctactttgcc

SEQ ID NO: 5337410 - DNA, 25 bp, Homo sapien
tgacctgcctactttgcccaagaaa

SEQ ID NO: 5337411 - DNA, 25 bp, Homo sapien
ctcgggaaatgcccaggtcaggctg

SEQ ID NO: 5337412 - DNA, 25 bp, Homo sapien
cgggaaatgcccaggtcaggctgca

SEQ ID NO: 5337413 - DNA, 25 bp, Homo sapien
gggaaatgcccaggtcaggctgcat

SEQ ID NO: 5337414 - DNA, 25 bp, Homo sapien
tcgggaaatgcccaggtcaggctgc

SEQ ID NO: 5337415 - DNA, 25 bp, Homo sapien
aagcaaaggacaccaatgctgggtg

SEQ ID NO: 5337416 - DNA, 25 bp, Homo sapien
gagctcagggacaaagtgaaagcaa

SEQ ID NO: 5337417 - DNA, 25 bp, Homo sapien
aggagctcagggacaaagtgaaagc

SEQ ID NO: 5337418 - DNA, 25 bp, Homo sapien
aaggacaccaatgctgggtgcttgg

SEQ ID NO: 5337419 - DNA, 25 bp, Homo sapien
ggaaccctgctgaaactcagttgct

SEQ ID NO: 5337420 - DNA, 25 bp, Homo sapien
tatttgtcattatcgagtctgccag

SEQ ID NO: 5337421 - DNA, 25 bp, Homo sapien
gaaaccacaagttggtgaacaaggc

SEQ ID NO: 5337422 - DNA, 25 bp, Homo sapien
tgtcctgtcaccacggaaaccacaa

SEQ ID NO: 5337423 - DNA, 25 bp, Homo sapien
gagcctcacaagacagagaaccagg

SEQ ID NO: 5337424 - DNA, 25 bp, Homo sapien
caatgggcacttaggatgatcaggg

SEQ ID NO: 5337425 - DNA, 25 bp, Homo sapien
ttggctgttggcaaggacctctgac

SEQ ID NO: 5337426 - DNA, 25 bp, Homo sapien
aatccagagtccagttctaggcacg

SEQ ID NO: 5337427 - DNA, 25 bp, Homo sapien
tcaccagaatggtgccgatgcactg

SEQ ID NO: 5337428 - DNA, 25 bp, Homo sapien
gacaaaatgaggatcccctggaggg

SEQ ID NO: 5337429 - DNA, 25 bp, Homo sapien
tagggctggctcagctatggcagac

SEQ ID NO: 5337430 - DNA, 25 bp, Homo sapien
catacagggacatacatggacactg

SEQ ID NO: 5337431 - DNA, 25 bp, Homo sapien
catcgtgagtgacaacaatgttgcc

SEQ ID NO: 5337432 - DNA, 25 bp, Homo sapien
ggttccaaaagctatgacatcgtga

SEQ ID NO: 5337433 - DNA, 25 bp, Homo sapien
tacctcactggagtaagtgcaagcg

SEQ ID NO: 5337434 - DNA, 25 bp, Homo sapien
gatatttcccggatctgaacaggaa

SEQ ID NO: 5337435 - DNA, 25 bp, Homo sapien
tcacttagctggtgggaaggcaaag

SEQ ID NO: 5337436 - DNA, 25 bp, Homo sapien
cctgacatctcagtcacttagctgg

SEQ ID NO: 5337437 - DNA, 25 bp, Homo sapien
gagaggagccctgacatctcagtca

SEQ ID NO: 5337438 - DNA, 25 bp, Homo sapien
aggatgtccttagagaggagccctg

SEQ ID NO: 5337439 - DNA, 25 bp, Homo sapien
gcatagttggttccggagtcagaaa

SEQ ID NO: 5337440 - DNA, 25 bp, Homo sapien
ttggttccggagtcagaaagaccca

SEQ ID NO: 5337441 - DNA, 25 bp, Homo sapien
cagcagtagaggcatagttggttcc

SEQ ID NO: 5337442 - DNA, 25 bp, Homo sapien
tagaggcatagttggttccggagtc

SEQ ID NO: 5337443 - DNA, 25 bp, Homo sapien
aacttgacacgaagaaaaaagagca

SEQ ID NO: 5337444 - DNA, 25 bp, Homo sapien
acttgacacgaagaaaaaagagcag

SEQ ID NO: 5337445 - DNA, 25 bp, Homo sapien
gatttcccttattaaagtctgatgt

SEQ ID NO: 5337446 - DNA, 25 bp, Homo sapien
cagtggaaacttgacacgaagaaaa

SEQ ID NO: 5337447 - DNA, 25 bp, Homo sapien
ggctgggtccctggaccgaattctg

SEQ ID NO: 5337448 - DNA, 25 bp, Homo sapien
tccctggaccgaattctgacactct

SEQ ID NO: 5337449 - DNA, 25 bp, Homo sapien
ggaccgaattctgacactctaagtg

SEQ ID NO: 5337450 - DNA, 25 bp, Homo sapien
tgggtccctggaccgaattctgaca

SEQ ID NO: 5337451 - DNA, 25 bp, Homo sapien
ttttattagaatgttggccatcttg

SEQ ID NO: 5337452 - DNA, 25 bp, Homo sapien
gatagaggtagtgattatgatgcca

SEQ ID NO: 5337453 - DNA, 25 bp, Homo sapien
tattagaatgttggccatcttgaat

SEQ ID NO: 5337454 - DNA, 25 bp, Homo sapien
ctattttgatagaggtagtgattat

SEQ ID NO: 5337455 - DNA, 25 bp, Homo sapien
gataatgccaagatcggtagagaaa

SEQ ID NO: 5337456 - DNA, 25 bp, Homo sapien
caagggtagtacagataatctgcct

SEQ ID NO: 5337457 - DNA, 25 bp, Homo sapien
tattgtaaccagagagataatgcca

SEQ ID NO: 5337458 - DNA, 25 bp, Homo sapien
tctatgggctttgatcttggtaggc

SEQ ID NO: 5337459 - DNA, 25 bp, Homo sapien
tctgtctgtagtcttagatgctcag

SEQ ID NO: 5337460 - DNA, 25 bp, Homo sapien
gcttgtatctctgacgctcagctgc

SEQ ID NO: 5337461 - DNA, 25 bp, Homo sapien
gatggtgcgagaagaagatctttgc

SEQ ID NO: 5337462 - DNA, 25 bp, Homo sapien
ctgtctgaagttagccacatctgtc

SEQ ID NO: 5337463 - DNA, 25 bp, Homo sapien
tactccagtatggtagatggcaagc

SEQ ID NO: 5337464 - DNA, 25 bp, Homo sapien
tacagaaatagctggaacggttaca

SEQ ID NO: 5337465 - DNA, 25 bp, Homo sapien
gcctgccgcatggtaggataacaag

SEQ ID NO: 5337466 - DNA, 25 bp, Homo sapien
tcagtgtgattttaggcctgccgca

SEQ ID NO: 5337467 - DNA, 25 bp, Homo sapien
aatccttcattggtggcagcctgct

SEQ ID NO: 5337468 - DNA, 25 bp, Homo sapien
cctgctggccatacctactccttga

SEQ ID NO: 5337469 - DNA, 25 bp, Homo sapien
cttgaggccttcaatttaattccct

SEQ ID NO: 5337470 - DNA, 25 bp, Homo sapien
tctccccggttagcaaatcacttga

SEQ ID NO: 5337471 - DNA, 25 bp, Homo sapien
gacttggcttcccacgtaactctgt

SEQ ID NO: 5337472 - DNA, 25 bp, Homo sapien
tgacttggcttcccacgtaactctg

SEQ ID NO: 5337473 - DNA, 25 bp, Homo sapien
cttttccaagcaacagtttgatgct

SEQ ID NO: 5337474 - DNA, 25 bp, Homo sapien
ttcagtaatgcatactgagccttcc

SEQ ID NO: 5337475 - DNA, 25 bp, Homo sapien
cttggccttcagtaatgcatactga

SEQ ID NO: 5337476 - DNA, 25 bp, Homo sapien
gccttcagtaatgcatactgagcct

SEQ ID NO: 5337477 - DNA, 25 bp, Homo sapien
cagtaatgcatactgagccttccag

SEQ ID NO: 5337478 - DNA, 25 bp, Homo sapien
tgagattattaatgttaccatgaag

SEQ ID NO: 5337479 - DNA, 25 bp, Homo sapien
atgaaggggctctttggagacagct

SEQ ID NO: 5337480 - DNA, 25 bp, Homo sapien
accatgaaggggctctttggagaca

SEQ ID NO: 5337481 - DNA, 25 bp, Homo sapien
agattattaatgttaccatgaaggg

SEQ ID NO: 5337482 - DNA, 25 bp, Homo sapien
aggaagctggacagccggcagcaca

SEQ ID NO: 5337483 - DNA, 25 bp, Homo sapien
tagtgttatgatgaagtccagtcca

SEQ ID NO: 5337484 - DNA, 25 bp, Homo sapien
cagggcagcttactgctgaccagca

SEQ ID NO: 5337485 - DNA, 25 bp, Homo sapien
taagcaggaaggctaaataagcaga

SEQ ID NO: 5337486 - DNA, 25 bp, Homo sapien
attccataccctgcaggtgaggcac

SEQ ID NO: 5337487 - DNA, 25 bp, Homo sapien
accacggagatcacccctgtgtggg

SEQ ID NO: 5337488 - DNA, 25 bp, Homo sapien
tatgcatatggatattccataccct

SEQ ID NO: 5337489 - DNA, 25 bp, Homo sapien
caggtgaggcaccacggagatcacc

SEQ ID NO: 5337490 - DNA, 25 bp, Homo sapien
tctcttcacattccaccctctcttc

SEQ ID NO: 5337491 - DNA, 25 bp, Homo sapien
ttactggtgttcgcttctcttcaca

SEQ ID NO: 5337492 - DNA, 25 bp, Homo sapien
tgttcgcttctcttcacattccacc

SEQ ID NO: 5337493 - DNA, 25 bp, Homo sapien
tcttcacattccaccctctcttctc

SEQ ID NO: 5337494 - DNA, 25 bp, Homo sapien
gaaccatggcaactgggagagccat

SEQ ID NO: 5337495 - DNA, 25 bp, Homo sapien
tgaaccatggcaactgggagagcca

SEQ ID NO: 5337496 - DNA, 25 bp, Homo sapien
ctgaaccatggcaactgggagagcc

SEQ ID NO: 5337497 - DNA, 25 bp, Homo sapien
gtgcgccatctgctgagtttcaggc

SEQ ID NO: 5337498 - DNA, 25 bp, Homo sapien
gattagctttctctgtccaattccc

SEQ ID NO: 5337499 - DNA, 25 bp, Homo sapien
caaccacttcttcccggctgattag

SEQ ID NO: 5337500 - DNA, 25 bp, Homo sapien
tgctcaccagctgggaactgtgcgc

SEQ ID NO: 5337501 - DNA, 25 bp, Homo sapien
tgttggtgtgcaaggctcacaccta

SEQ ID NO: 5337502 - DNA, 25 bp, Homo sapien
gtgtgttggtgtgcaaggctcacac

SEQ ID NO: 5337503 - DNA, 25 bp, Homo sapien
tgtgttggtgtgcaaggctcacacc

SEQ ID NO: 5337504 - DNA, 25 bp, Homo sapien
gttggtgtgcaaggctcacacctat

SEQ ID NO: 5337505 - DNA, 25 bp, Homo sapien
aagccagaggtagcatactgcctgg

SEQ ID NO: 5337506 - DNA, 25 bp, Homo sapien
accttcttatcccatcgtgtccttg

SEQ ID NO: 5337507 - DNA, 25 bp, Homo sapien
cttgcacccttagcacagggttcaa

SEQ ID NO: 5337508 - DNA, 25 bp, Homo sapien
tgtccttgcacccttagcacagggt

SEQ ID NO: 5337509 - DNA, 25 bp, Homo sapien
gttgggcatcatttcaacactcggg

SEQ ID NO: 5337510 - DNA, 25 bp, Homo sapien
gtgaagcccacctgaagattctcaa

SEQ ID NO: 5337511 - DNA, 25 bp, Homo sapien
tgtttttctcgtgctgctgtcccgg

SEQ ID NO: 5337512 - DNA, 25 bp, Homo sapien
aatgggtgacatcctgttgggcatc

SEQ ID NO: 5337513 - DNA, 25 bp, Homo sapien
cccagaagaggtgatgcaataggta

SEQ ID NO: 5337514 - DNA, 25 bp, Homo sapien
tgatgcaataggtatcctaaaatgt

SEQ ID NO: 5337515 - DNA, 25 bp, Homo sapien
taggatcttgtagcaagggtactcc

SEQ ID NO: 5337516 - DNA, 25 bp, Homo sapien
ttaggatcttgtagcaagggtactc

SEQ ID NO: 5337517 - DNA, 25 bp, Homo sapien
atcctcagcccttgctcccacgcac

SEQ ID NO: 5337518 - DNA, 25 bp, Homo sapien
tttaccatcctcagcccttgctccc

SEQ ID NO: 5337519 - DNA, 25 bp, Homo sapien
taccatcctcagcccttgctcccac

SEQ ID NO: 5337520 - DNA, 25 bp, Homo sapien
ccatcctcagcccttgctcccacgc

SEQ ID NO: 5337521 - DNA, 25 bp, Homo sapien
tctggacagcgtccacggtcagaca

SEQ ID NO: 5337522 - DNA, 25 bp, Homo sapien
ggacagcgtccacggtcagacacaa

SEQ ID NO: 5337523 - DNA, 25 bp, Homo sapien
ctatctctggacagcgtccacggtc

SEQ ID NO: 5337524 - DNA, 25 bp, Homo sapien
tctctggacagcgtccacggtcaga

SEQ ID NO: 5337525 - DNA, 25 bp, Homo sapien
tggtagaattagagccagcagggct

SEQ ID NO: 5337526 - DNA, 25 bp, Homo sapien
tgttcaccctgtcaagcgtaggctg

SEQ ID NO: 5337527 - DNA, 25 bp, Homo sapien
ggaaaatgagtcttccgggtccgca

SEQ ID NO: 5337528 - DNA, 25 bp, Homo sapien
cccttaatgttatggatgcggcaca

SEQ ID NO: 5337529 - DNA, 25 bp, Homo sapien
tgaagagcagttggaggtcaggtcc

SEQ ID NO: 5337530 - DNA, 25 bp, Homo sapien
ggcagcaccggaaggcatgcttgaa

SEQ ID NO: 5337531 - DNA, 25 bp, Homo sapien
gagataccgggtggatttcatttcc

SEQ ID NO: 5337532 - DNA, 25 bp, Homo sapien
catggtcttggagtcacttcgtgaa

SEQ ID NO: 5337533 - DNA, 25 bp, Homo sapien
cattcctggatggtgataatcagcc

SEQ ID NO: 5337534 - DNA, 25 bp, Homo sapien
tcacagctgggtttactcatttagg

SEQ ID NO: 5337535 - DNA, 25 bp, Homo sapien
gatgataagttagctgcagtcccca

SEQ ID NO: 5337536 - DNA, 25 bp, Homo sapien
ctcatttaggatggccgcttggcca

SEQ ID NO: 5337537 - DNA, 25 bp, Homo sapien
ccacatgatggccaggtagacctgc

SEQ ID NO: 5337538 - DNA, 25 bp, Homo sapien
gtgcacaccacgacaatcatcattt

SEQ ID NO: 5337539 - DNA, 25 bp, Homo sapien
cagccagcagatggcgaaggtgcac

SEQ ID NO: 5337540 - DNA, 25 bp, Homo sapien
gctggataaacttcttcaggtagag

SEQ ID NO: 5337541 - DNA, 25 bp, Homo sapien
ggtgtatgcatagccaatcaccagc

SEQ ID NO: 5337542 - DNA, 25 bp, Homo sapien
tggcccatagtgtgattcccactac

SEQ ID NO: 5337543 - DNA, 25 bp, Homo sapien
ggaggaagtagatcagcacagtcac

SEQ ID NO: 5337544 - DNA, 25 bp, Homo sapien
cagagacttgctcgtggtagcggtc

SEQ ID NO: 5337545 - DNA, 25 bp, Homo sapien
aggtaaacaggaaaggtcagtatga

SEQ ID NO: 5337546 - DNA, 25 bp, Homo sapien
ctgaattgtcgcctcctttgggagc

SEQ ID NO: 5337547 - DNA, 25 bp, Homo sapien
cctctgaattgtcgcctcctttggg

SEQ ID NO: 5337548 - DNA, 25 bp, Homo sapien
aaagccctctgaattgtcgcctcct

SEQ ID NO: 5337549 - DNA, 25 bp, Homo sapien
ttgtcgcctcctttgggagcctcag

SEQ ID NO: 5337550 - DNA, 25 bp, Homo sapien
cccagagccccctttgcattgaggg

SEQ ID NO: 5337551 - DNA, 25 bp, Homo sapien
cccctttgcattgagggcttttgag

SEQ ID NO: 5337552 - DNA, 25 bp, Homo sapien
aaggtgaccatgaacctgctgttcc

SEQ ID NO: 5337553 - DNA, 25 bp, Homo sapien
gtgaccatgaacctgctgttcccca

SEQ ID NO: 5337554 - DNA, 25 bp, Homo sapien
gtggaagcagtaggtgtagattcca

SEQ ID NO: 5337555 - DNA, 25 bp, Homo sapien
aagtggaagcagtaggtgtagattc

SEQ ID NO: 5337556 - DNA, 25 bp, Homo sapien
tggaagcagtaggtgtagattccat

SEQ ID NO: 5337557 - DNA, 25 bp, Homo sapien
agtggaagcagtaggtgtagattcc

SEQ ID NO: 5337558 - DNA, 25 bp, Homo sapien
cccagatacggaaatgtgaggcagg

SEQ ID NO: 5337559 - DNA, 25 bp, Homo sapien
gccggcacctggaccaaccagtatt

SEQ ID NO: 5337560 - DNA, 25 bp, Homo sapien
tccagcctggcaagatgatatcagt

SEQ ID NO: 5337561 - DNA, 25 bp, Homo sapien
ggaccaaccagtattcattaggcat

SEQ ID NO: 5337562 - DNA, 25 bp, Homo sapien
tttcattgtaaaggtgtttctggag

SEQ ID NO: 5337563 - DNA, 25 bp, Homo sapien
agtttcattgtaaaggtgtttctgg

SEQ ID NO: 5337564 - DNA, 25 bp, Homo sapien
gtttcattgtaaaggtgtttctgga

SEQ ID NO: 5337565 - DNA, 25 bp, Homo sapien
taacaatgttctggagtattgatcc

SEQ ID NO: 5337566 - DNA, 25 bp, Homo sapien
catcctctgagagattgctctgcag

SEQ ID NO: 5337567 - DNA, 25 bp, Homo sapien
taaaccagtcgtaacaatgttctgg

SEQ ID NO: 5337568 - DNA, 25 bp, Homo sapien
gatcccatgttggtctttggagtta

SEQ ID NO: 5337569 - DNA, 25 bp, Homo sapien
tctttattcccgtggcttgggttga

SEQ ID NO: 5337570 - DNA, 25 bp, Homo sapien
ccgtggcttgggttgattctcctca

SEQ ID NO: 5337571 - DNA, 25 bp, Homo sapien
taggcggatcggtgacaaggaaggg

SEQ ID NO: 5337572 - DNA, 25 bp, Homo sapien
ccttcgcccctgaatcttgaatcat

SEQ ID NO: 5337573 - DNA, 25 bp, Homo sapien
tttagctgcgtgtggttgtcttcct

SEQ ID NO: 5337574 - DNA, 25 bp, Homo sapien
tgctttagctgcgtgtggttgtctt

SEQ ID NO: 5337575 - DNA, 25 bp, Homo sapien
atctgctttagctgcgtgtggttgt

SEQ ID NO: 5337576 - DNA, 25 bp, Homo sapien
ctttagctgcgtgtggttgtcttcc

SEQ ID NO: 5337577 - DNA, 25 bp, Homo sapien
tggctctgtgacttatctgctgtat

SEQ ID NO: 5337578 - DNA, 25 bp, Homo sapien
gcagtgccgtgcactcttggggctc

SEQ ID NO: 5337579 - DNA, 25 bp, Homo sapien
ggcagtgccgtgcactcttggggct

SEQ ID NO: 5337580 - DNA, 25 bp, Homo sapien
tatctgctgtatgggcagtgccgtg

SEQ ID NO: 5337581 - DNA, 25 bp, Homo sapien
tctctttgggcagtctttggggtta

SEQ ID NO: 5337582 - DNA, 25 bp, Homo sapien
ctggtaacttagaagaatgattcag

SEQ ID NO: 5337583 - DNA, 25 bp, Homo sapien
cttagaagaatgattcagagagatg

SEQ ID NO: 5337584 - DNA, 25 bp, Homo sapien
ggtaacttagaagaatgattcagag

SEQ ID NO: 5337585 - DNA, 25 bp, Homo sapien
aacttagaagaatgattcagagaga

SEQ ID NO: 5337586 - DNA, 25 bp, Homo sapien
attttcgtggctgtaacccagttca

SEQ ID NO: 5337587 - DNA, 25 bp, Homo sapien
caggtaatcagccagagatgctagc

SEQ ID NO: 5337588 - DNA, 25 bp, Homo sapien
gatgctagcattgtatactgctctc

SEQ ID NO: 5337589 - DNA, 25 bp, Homo sapien
catattttggtcagccttcaggtaa

SEQ ID NO: 5337590 - DNA, 25 bp, Homo sapien
gactgcagacatatgagacactccc

SEQ ID NO: 5337591 - DNA, 25 bp, Homo sapien
gaattcagttgagctggcacaaacc

SEQ ID NO: 5337592 - DNA, 25 bp, Homo sapien
gaagcttaaactcgcctgttgggta

SEQ ID NO: 5337593 - DNA, 25 bp, Homo sapien
tcctaggttatccagcagccacatg

SEQ ID NO: 5337594 - DNA, 25 bp, Homo sapien
aaatttcttcagttactgagcagct

SEQ ID NO: 5337595 - DNA, 25 bp, Homo sapien
gagaccaaactgaaggaggatctgg

SEQ ID NO: 5337596 - DNA, 25 bp, Homo sapien
tgagaccaaactgaaggaggatctg

SEQ ID NO: 5337597 - DNA, 25 bp, Homo sapien
catctttgggatgtacaatcggcat

SEQ ID NO: 5337598 - DNA, 25 bp, Homo sapien
tcatctttgggatgtacaatcggca

SEQ ID NO: 5337599 - DNA, 25 bp, Homo sapien
tatttggagacatgaaccgtaatga

SEQ ID NO: 5337600 - DNA, 25 bp, Homo sapien
cgcggtaagaaactgacagctcgcg

SEQ ID NO: 5337601 - DNA, 25 bp, Homo sapien
cgcgggccaatgtgcacttcccatt

SEQ ID NO: 5337602 - DNA, 25 bp, Homo sapien
ttgaatatttggagacatgaaccgt

SEQ ID NO: 5337603 - DNA, 25 bp, Homo sapien
atgcctaagaattcacccagaaacc

SEQ ID NO: 5337604 - DNA, 25 bp, Homo sapien
tagtaagggacacggaaagtacaca

SEQ ID NO: 5337605 - DNA, 25 bp, Homo sapien
gtttcatcagaaatgcctaagaatt

SEQ ID NO: 5337606 - DNA, 25 bp, Homo sapien
acacaatttatgtgtagcagtaact

SEQ ID NO: 5337607 - DNA, 25 bp, Homo sapien
ttctttctcccgctgggaccttgct

SEQ ID NO: 5337608 - DNA, 25 bp, Homo sapien
aaaccttctggcttgaacatgttca

SEQ ID NO: 5337609 - DNA, 25 bp, Homo sapien
ttctggcttgaacatgttcacaggt

SEQ ID NO: 5337610 - DNA, 25 bp, Homo sapien
ctgtatggcttgtaaagctgtgttc

SEQ ID NO: 5337611 - DNA, 25 bp, Homo sapien
cataaatcttgttcggatgctctgg

SEQ ID NO: 5337612 - DNA, 25 bp, Homo sapien
tctctgtggttgagtagtagccctg

SEQ ID NO: 5337613 - DNA, 25 bp, Homo sapien
acacagatgaccactttggtggctg

SEQ ID NO: 5337614 - DNA, 25 bp, Homo sapien
gatcatgcacacgactctgctgggc

SEQ ID NO: 5337615 - DNA, 25 bp, Homo sapien
acaaagttctgatctggtcaccaaa

SEQ ID NO: 5337616 - DNA, 25 bp, Homo sapien
aagaacaaagttctgatctggtcac

SEQ ID NO: 5337617 - DNA, 25 bp, Homo sapien
gaacaaagttctgatctggtcacca

SEQ ID NO: 5337618 - DNA, 25 bp, Homo sapien
agaaagaacaaagttctgatctggt

SEQ ID NO: 5337619 - DNA, 25 bp, Homo sapien
tgccaacatgcgtaagaaaagccag

SEQ ID NO: 5337620 - DNA, 25 bp, Homo sapien
taaaagattagcagtcctacctcgg

SEQ ID NO: 5337621 - DNA, 25 bp, Homo sapien
agaaagacggtctccacctgctgag

SEQ ID NO: 5337622 - DNA, 25 bp, Homo sapien
gacaggacagccaagtacaggtaag

SEQ ID NO: 5337623 - DNA, 25 bp, Homo sapien
gacactcaagccctggaatggcagg

SEQ ID NO: 5337624 - DNA, 25 bp, Homo sapien
gcttcgacaggtgtgctggatttgg

SEQ ID NO: 5337625 - DNA, 25 bp, Homo sapien
gaatggcaggtggtctactggaggg

SEQ ID NO: 5337626 - DNA, 25 bp, Homo sapien
gggagctgcggagacactcaagccc

SEQ ID NO: 5337627 - DNA, 25 bp, Homo sapien
actctctaccgttctttagtgtagg

SEQ ID NO: 5337628 - DNA, 25 bp, Homo sapien
ggaacgcacttcagttaactctcta

SEQ ID NO: 5337629 - DNA, 25 bp, Homo sapien
gattgcaccagcgtattggcactgt

SEQ ID NO: 5337630 - DNA, 25 bp, Homo sapien
attgcaatttgggaacgcacttcag

SEQ ID NO: 5337631 - DNA, 25 bp, Homo sapien
agtaaggtggtctacggccagtcat

SEQ ID NO: 5337632 - DNA, 25 bp, Homo sapien
cagtgagtaaggtggtctacggcca

SEQ ID NO: 5337633 - DNA, 25 bp, Homo sapien
agatgggaactcattgggtagataa

SEQ ID NO: 5337634 - DNA, 25 bp, Homo sapien
gaactcattgggtagataactcctg

SEQ ID NO: 5337635 - DNA, 25 bp, Homo sapien
gcagttgcaagctggcggctccact

SEQ ID NO: 5337636 - DNA, 25 bp, Homo sapien
gatgtgccagctgatgtttgaccaa

SEQ ID NO: 5337637 - DNA, 25 bp, Homo sapien
aagagccttacacaactggtaaaag

SEQ ID NO: 5337638 - DNA, 25 bp, Homo sapien
tggtaaaagtttgcctggatgtgcc

SEQ ID NO: 5337639 - DNA, 25 bp, Homo sapien
cagctgcatattgggcctcctccag

SEQ ID NO: 5337640 - DNA, 25 bp, Homo sapien
ctcctccagagtttgctggaatgaa

SEQ ID NO: 5337641 - DNA, 25 bp, Homo sapien
acacccagcagctgcatattgggcc

SEQ ID NO: 5337642 - DNA, 25 bp, Homo sapien
tcctccagagtttgctggaatgaat

SEQ ID NO: 5337643 - DNA, 25 bp, Homo sapien
gaggaggagcctgattcaccctctc

SEQ ID NO: 5337644 - DNA, 25 bp, Homo sapien
cttaagacctagctttcctgtggag

SEQ ID NO: 5337645 - DNA, 25 bp, Homo sapien
tgttagaggctcactagggacacca

SEQ ID NO: 5337646 - DNA, 25 bp, Homo sapien
tcaccatcgttttgcaaatctcact

SEQ ID NO: 5337647 - DNA, 25 bp, Homo sapien
ttgcacaggcggagaaaagcacctc

SEQ ID NO: 5337648 - DNA, 25 bp, Homo sapien
accaggaactagtgggtcattgcca

SEQ ID NO: 5337649 - DNA, 25 bp, Homo sapien
gaatggctcagtcacagattttagc

SEQ ID NO: 5337650 - DNA, 25 bp, Homo sapien
cagcagttacatagtagagatggga

SEQ ID NO: 5337651 - DNA, 25 bp, Homo sapien
tgtgagtgttccatagtgcagaggc

SEQ ID NO: 5337652 - DNA, 25 bp, Homo sapien
cattgtcccttgacgacaggtgagg

SEQ ID NO: 5337653 - DNA, 25 bp, Homo sapien
attattttcctagtttccacgatca

SEQ ID NO: 5337654 - DNA, 25 bp, Homo sapien
ttattttcctagtttccacgatcat

SEQ ID NO: 5337655 - DNA, 25 bp, Homo sapien
tcaggtcctgacaaacaagcatcat

SEQ ID NO: 5337656 - DNA, 25 bp, Homo sapien
tcataacgacctacgaagacaggat

SEQ ID NO: 5337657 - DNA, 25 bp, Homo sapien
gggccaggactgtgacaaatactca

SEQ ID NO: 5337658 - DNA, 25 bp, Homo sapien
tcacccacctatggaagcaaggctt

SEQ ID NO: 5337659 - DNA, 25 bp, Homo sapien
taaagctatgcccactctaggtact

SEQ ID NO: 5337660 - DNA, 25 bp, Homo sapien
ggaaactccgagaattcctcagtga

SEQ ID NO: 5337661 - DNA, 25 bp, Homo sapien
gaatttccactagccaaagttctga

SEQ ID NO: 5337662 - DNA, 25 bp, Homo sapien
gacatgtgaaaaggaggctactggt

SEQ ID NO: 5337663 - DNA, 25 bp, Homo sapien
tcatgctgattcgtatgtctccagg

SEQ ID NO: 5337664 - DNA, 25 bp, Homo sapien
tccagagagcttcatatttcccctt

SEQ ID NO: 5337665 - DNA, 25 bp, Homo sapien
atccagagagcttcatatttcccct

SEQ ID NO: 5337666 - DNA, 25 bp, Homo sapien
tgattcgtatgtctccaggtcatca

SEQ ID NO: 5337667 - DNA, 25 bp, Homo sapien
ttaggccagagaagggtccataaga

SEQ ID NO: 5337668 - DNA, 25 bp, Homo sapien
tggtatgcttgggtagacgggaggt

SEQ ID NO: 5337669 - DNA, 25 bp, Homo sapien
acgggaggtaagatggtaatgataa

SEQ ID NO: 5337670 - DNA, 25 bp, Homo sapien
ataagcacctcctccaatcggaagt

SEQ ID NO: 5337671 - DNA, 25 bp, Homo sapien
tgagggtggcaaggtgtgggtcagg

SEQ ID NO: 5337672 - DNA, 25 bp, Homo sapien
ggtcaggtatcctgtggggctcagt

SEQ ID NO: 5337673 - DNA, 25 bp, Homo sapien
caggtatcctgtggggctcagtcaa

SEQ ID NO: 5337674 - DNA, 25 bp, Homo sapien
aggtgtgggtcaggtatcctgtggg

SEQ ID NO: 5337675 - DNA, 25 bp, Homo sapien
cacaacagtagagaaatgactacgt

SEQ ID NO: 5337676 - DNA, 25 bp, Homo sapien
cacaggaaggtgttattaaagtctt

SEQ ID NO: 5337677 - DNA, 25 bp, Homo sapien
tcacataatagaatagtatgaagcc

SEQ ID NO: 5337678 - DNA, 25 bp, Homo sapien
tagaatctaacctcaattatgtagt

SEQ ID NO: 5337679 - DNA, 25 bp, Homo sapien
tcactcccactttgagtaattggtt

SEQ ID NO: 5337680 - DNA, 25 bp, Homo sapien
ggtgtacctcactttcagcaaactg

SEQ ID NO: 5337681 - DNA, 25 bp, Homo sapien
tctgaaaaccagtgtagtacaaaag

SEQ ID NO: 5337682 - DNA, 25 bp, Homo sapien
gagattaaaggagcatgtcaatgca

SEQ ID NO: 5337683 - DNA, 25 bp, Homo sapien
tgactacaggagctaaaaaagactt

SEQ ID NO: 5337684 - DNA, 25 bp, Homo sapien
cagtatttggacaccactgcaaagg

SEQ ID NO: 5337685 - DNA, 25 bp, Homo sapien
gagacctaagatactcacaaaggag

SEQ ID NO: 5337686 - DNA, 25 bp, Homo sapien
ggagacaataccaacagagctgtgc

SEQ ID NO: 5337687 - DNA, 25 bp, Homo sapien
aataccatccccagtgtttgaaatg

SEQ ID NO: 5337688 - DNA, 25 bp, Homo sapien
tccagaataccatccccagtgtttg

SEQ ID NO: 5337689 - DNA, 25 bp, Homo sapien
tcattccagaataccatccccagtg

SEQ ID NO: 5337690 - DNA, 25 bp, Homo sapien
gaataccatccccagtgtttgaaat

SEQ ID NO: 5337691 - DNA, 25 bp, Homo sapien
tgttggttgccggaacagaagagct

SEQ ID NO: 5337692 - DNA, 25 bp, Homo sapien
cggaacagaagagctctcaaatgcc

SEQ ID NO: 5337693 - DNA, 25 bp, Homo sapien
cctaacctgttggttgccggaacag

SEQ ID NO: 5337694 - DNA, 25 bp, Homo sapien
ttttcactttcagtcagctttggga

SEQ ID NO: 5337695 - DNA, 25 bp, Homo sapien
ttttacattgcaggagaaatttaga

SEQ ID NO: 5337696 - DNA, 25 bp, Homo sapien
ccgtggagtttcttaaggatagcat

SEQ ID NO: 5337697 - DNA, 25 bp, Homo sapien
ttcctggatccctatccgtggagtt

SEQ ID NO: 5337698 - DNA, 25 bp, Homo sapien
acacctcttgggtaagcttcctgga

SEQ ID NO: 5337699 - DNA, 25 bp, Homo sapien
aaccctaggtattgtttgcagcctg

SEQ ID NO: 5337700 - DNA, 25 bp, Homo sapien
tccagggtctagtcctttgaccaaa

SEQ ID NO: 5337701 - DNA, 25 bp, Homo sapien
gaatcctctaggtgtacttaaaaca

SEQ ID NO: 5337702 - DNA, 25 bp, Homo sapien
caacaacaaactggagagttgcagt

SEQ ID NO: 5337703 - DNA, 25 bp, Homo sapien
tggccaatcttccacttgacccata

SEQ ID NO: 5337704 - DNA, 25 bp, Homo sapien
tacataagatgaagttccccatcaa

SEQ ID NO: 5337705 - DNA, 25 bp, Homo sapien
caaatgactcagttgatcagtaaaa

SEQ ID NO: 5337706 - DNA, 25 bp, Homo sapien
tggtcctctatgagcactttctcgc

SEQ ID NO: 5337707 - DNA, 25 bp, Homo sapien
gtagaacaggccgtagtaccattcg

SEQ ID NO: 5337708 - DNA, 25 bp, Homo sapien
gccaggctggttgcacgaactgatt

SEQ ID NO: 5337709 - DNA, 25 bp, Homo sapien
tgtattgaatgcagccatggaggcc

SEQ ID NO: 5337710 - DNA, 25 bp, Homo sapien
aatgaccgtgtaggcagctgcccaa

SEQ ID NO: 5337711 - DNA, 25 bp, Homo sapien
ggcggtaaagccctactatctgtac

SEQ ID NO: 5337712 - DNA, 25 bp, Homo sapien
cgaagctaggcggtaaagccctact

SEQ ID NO: 5337713 - DNA, 25 bp, Homo sapien
aaagccctactatctgtacacaacc

SEQ ID NO: 5337714 - DNA, 25 bp, Homo sapien
gctaggcggtaaagccctactatct

SEQ ID NO: 5337715 - DNA, 25 bp, Homo sapien
ccgcggtggctctgaattcctccac

SEQ ID NO: 5337716 - DNA, 25 bp, Homo sapien
tataaacgcttctggatgcactgcc

SEQ ID NO: 5337717 - DNA, 25 bp, Homo sapien
aaggctttttctgggcagcactctt

SEQ ID NO: 5337718 - DNA, 25 bp, Homo sapien
tgaaagctgaactggcgctcagaat

SEQ ID NO: 5337719 - DNA, 25 bp, Homo sapien
gaaattccaccggtcacagttctag

SEQ ID NO: 5337720 - DNA, 25 bp, Homo sapien
agcatctctcttgcggtaaactgaa

SEQ ID NO: 5337721 - DNA, 25 bp, Homo sapien
ctctcttgcggtaaactgaaaaagg

SEQ ID NO: 5337722 - DNA, 25 bp, Homo sapien
gaagcaagagatcccccgcatttat

SEQ ID NO: 5337723 - DNA, 25 bp, Homo sapien
tcgggttgctcagctcgcgagttag

SEQ ID NO: 5337724 - DNA, 25 bp, Homo sapien
cattgcagcgcgacctgtaaaagtt

SEQ ID NO: 5337725 - DNA, 25 bp, Homo sapien
ttctgagcctatggccaggattctg

SEQ ID NO: 5337726 - DNA, 25 bp, Homo sapien
gagttagctgcgcacgaggctttta

SEQ ID NO: 5337727 - DNA, 25 bp, Homo sapien
ctgcagagacgtcactgggaagggg

SEQ ID NO: 5337728 - DNA, 25 bp, Homo sapien
agagacgtcactgggaaggggcagt

SEQ ID NO: 5337729 - DNA, 25 bp, Homo sapien
gcagagacgtcactgggaaggggca

SEQ ID NO: 5337730 - DNA, 25 bp, Homo sapien
agacgtcactgggaaggggcagtac

SEQ ID NO: 5337731 - DNA, 25 bp, Homo sapien
taactgacacagatgcggtccgcag

SEQ ID NO: 5337732 - DNA, 25 bp, Homo sapien
gctggagtggaggacaatcaacttc

SEQ ID NO: 5337733 - DNA, 25 bp, Homo sapien
tacttgccgtgggagtctgcgagcc

SEQ ID NO: 5337734 - DNA, 25 bp, Homo sapien
tgcctgtggcaatgggaaacggtca

SEQ ID NO: 5337735 - DNA, 25 bp, Homo sapien
gggggcgatgtgccagcgccgcgct

SEQ ID NO: 5337736 - DNA, 25 bp, Homo sapien
tgtgggggcgatgtgccagcgccgc

SEQ ID NO: 5337737 - DNA, 25 bp, Homo sapien
gtgggggcgatgtgccagcgccgcg

SEQ ID NO: 5337738 - DNA, 25 bp, Homo sapien
gtgtgggggcgatgtgccagcgccg

SEQ ID NO: 5337739 - DNA, 25 bp, Homo sapien
agaagctccatttgagccctccacc

SEQ ID NO: 5337740 - DNA, 25 bp, Homo sapien
agctccatttgagccctccacctga

SEQ ID NO: 5337741 - DNA, 25 bp, Homo sapien
ttgagccctccacctgacccctctg

SEQ ID NO: 5337742 - DNA, 25 bp, Homo sapien
atttgagccctccacctgacccctc

SEQ ID NO: 5337743 - DNA, 25 bp, Homo sapien
cataggcagcttgtcgctcagacgc

SEQ ID NO: 5337744 - DNA, 25 bp, Homo sapien
cgaatcttggtgagcgcaggagcca

SEQ ID NO: 5337745 - DNA, 25 bp, Homo sapien
ccagcaatcactgcggcgctgcgtt

SEQ ID NO: 5337746 - DNA, 25 bp, Homo sapien
ggtggcatcggtggtccttctccct

SEQ ID NO: 5337747 - DNA, 25 bp, Homo sapien
gaggcagggcaaagactcgccagtc

SEQ ID NO: 5337748 - DNA, 25 bp, Homo sapien
ccatttcaaacggtagaactggtgc

SEQ ID NO: 5337749 - DNA, 25 bp, Homo sapien
agactcgccagtccgtataaaccct

SEQ ID NO: 5337750 - DNA, 25 bp, Homo sapien
ttgaggcctcgtatcccagtccaag

SEQ ID NO: 5337751 - DNA, 25 bp, Homo sapien
gactgcccacctatgagcctgcagg

SEQ ID NO: 5337752 - DNA, 25 bp, Homo sapien
agagccaggctgacgttttcaaaag

SEQ ID NO: 5337753 - DNA, 25 bp, Homo sapien
gaggccacctaacctaaacaatgag

SEQ ID NO: 5337754 - DNA, 25 bp, Homo sapien
gaacaagcacttacagtatggagga

SEQ ID NO: 5337755 - DNA, 25 bp, Homo sapien
cttccaggtttgcatagggactgga

SEQ ID NO: 5337756 - DNA, 25 bp, Homo sapien
tgcatagggactggagcgcaggtca

SEQ ID NO: 5337757 - DNA, 25 bp, Homo sapien
gactggagcgcaggtcagcccgcct

SEQ ID NO: 5337758 - DNA, 25 bp, Homo sapien
tggagcgcaggtcagcccgccttct

SEQ ID NO: 5337759 - DNA, 25 bp, Homo sapien
gcctagccctcggctaactttgagg

SEQ ID NO: 5337760 - DNA, 25 bp, Homo sapien
cctgcctagccctcggctaactttg

SEQ ID NO: 5337761 - DNA, 25 bp, Homo sapien
ctgcctagccctcggctaactttga

SEQ ID NO: 5337762 - DNA, 25 bp, Homo sapien
tgcctagccctcggctaactttgag

SEQ ID NO: 5337763 - DNA, 25 bp, Homo sapien
actctgatgtgttgatgagtctgac

SEQ ID NO: 5337764 - DNA, 25 bp, Homo sapien
tcaactctgatgtgttgatgagtct

SEQ ID NO: 5337765 - DNA, 25 bp, Homo sapien
tgatgtgttgatgagtctgacttgg

SEQ ID NO: 5337766 - DNA, 25 bp, Homo sapien
ctggccttcaactctgatgtgttga

SEQ ID NO: 5337767 - DNA, 25 bp, Homo sapien
tgagacccctctgtactggaggtgg

SEQ ID NO: 5337768 - DNA, 25 bp, Homo sapien
tttacgtactgagcggtgagacccc

SEQ ID NO: 5337769 - DNA, 25 bp, Homo sapien
cagtgtggtctgctcagccagagta

SEQ ID NO: 5337770 - DNA, 25 bp, Homo sapien
cagaggctatgatctgtccgaagag

SEQ ID NO: 5337771 - DNA, 25 bp, Homo sapien
aattaatggctggaaaccaatatcc

SEQ ID NO: 5337772 - DNA, 25 bp, Homo sapien
gaaacagacacctacagtaacagag

SEQ ID NO: 5337773 - DNA, 25 bp, Homo sapien
ccgagtataacgacttacattgata

SEQ ID NO: 5337774 - DNA, 25 bp, Homo sapien
gaaccagtcacctattggatcccat

SEQ ID NO: 5337775 - DNA, 25 bp, Homo sapien
atccactgtggctttgggtcttagt

SEQ ID NO: 5337776 - DNA, 25 bp, Homo sapien
cactgtggctttgggtcttagttct

SEQ ID NO: 5337777 - DNA, 25 bp, Homo sapien
tgtggctttgggtcttagttcttac

SEQ ID NO: 5337778 - DNA, 25 bp, Homo sapien
tcatccactgtggctttgggtctta

SEQ ID NO: 5337779 - DNA, 25 bp, Homo sapien
aatggagcattgaggagtatttctc

SEQ ID NO: 5337780 - DNA, 25 bp, Homo sapien
catctaaatggagcattgaggagta

SEQ ID NO: 5337781 - DNA, 25 bp, Homo sapien
gcattgaggagtatttctccttgag

SEQ ID NO: 5337782 - DNA, 25 bp, Homo sapien
ttcatggtcacatctaaatggagca

SEQ ID NO: 5337783 - DNA, 25 bp, Homo sapien
gagaaggtcttgagtgtctattgaa

SEQ ID NO: 5337784 - DNA, 25 bp, Homo sapien
agaaggtcttgagtgtctattgaaa

SEQ ID NO: 5337785 - DNA, 25 bp, Homo sapien
gatggaaaatacaggcagaagtgcc

SEQ ID NO: 5337786 - DNA, 25 bp, Homo sapien
cactgagcatcaggagtcaaggcct

SEQ ID NO: 5337787 - DNA, 25 bp, Homo sapien
taatgagaagttgaagatccccacc

SEQ ID NO: 5337788 - DNA, 25 bp, Homo sapien
aaatagggtgcttatcagtgtcaac

SEQ ID NO: 5337789 - DNA, 25 bp, Homo sapien
gatggtttatcccagccattggaac

SEQ ID NO: 5337790 - DNA, 25 bp, Homo sapien
cttgtcccatgtggtggttatgtga

SEQ ID NO: 5337791 - DNA, 25 bp, Homo sapien
tatagttttccgatattccctctaa

SEQ ID NO: 5337792 - DNA, 25 bp, Homo sapien
catacaggagatttgcaatgttcta

SEQ ID NO: 5337793 - DNA, 25 bp, Homo sapien
tgcccactgttcgaaaaagccagag

SEQ ID NO: 5337794 - DNA, 25 bp, Homo sapien
gcccactgttcgaaaaagccagagc

SEQ ID NO: 5337795 - DNA, 25 bp, Homo sapien
gcatgctcatgctctgcatggctgt

SEQ ID NO: 5337796 - DNA, 25 bp, Homo sapien
catgctcatgctctgcatggctgta

SEQ ID NO: 5337797 - DNA, 25 bp, Homo sapien
attcttcaacccattgctcagtctt

SEQ ID NO: 5337798 - DNA, 25 bp, Homo sapien
tcttcaacccattgctcagtcttct

SEQ ID NO: 5337799 - DNA, 25 bp, Homo sapien
caacccattgctcagtcttcttggt

SEQ ID NO: 5337800 - DNA, 25 bp, Homo sapien
ttcaacccattgctcagtcttcttg

SEQ ID NO: 5337801 - DNA, 25 bp, Homo sapien
tttctatcttcaggggttcaattgc

SEQ ID NO: 5337802 - DNA, 25 bp, Homo sapien
cctcatgctctactacccttttcag

SEQ ID NO: 5337803 - DNA, 25 bp, Homo sapien
tcatgctctactacccttttcagcc

SEQ ID NO: 5337804 - DNA, 25 bp, Homo sapien
cccctcatgctctactacccttttc

SEQ ID NO: 5337805 - DNA, 25 bp, Homo sapien
atcatgtgatcccactttctttatt

SEQ ID NO: 5337806 - DNA, 25 bp, Homo sapien
ctcaccagcacctatctaacttttg

SEQ ID NO: 5337807 - DNA, 25 bp, Homo sapien
cagcacctatctaacttttggataa

SEQ ID NO: 5337808 - DNA, 25 bp, Homo sapien
catgtgatcccactttctttattaa

SEQ ID NO: 5337809 - DNA, 25 bp, Homo sapien
gtggccactgaggagatattgtcca

SEQ ID NO: 5337810 - DNA, 25 bp, Homo sapien
gaggagatattgtccataacaggga

SEQ ID NO: 5337811 - DNA, 25 bp, Homo sapien
tattgtccataacagggagctgcag

SEQ ID NO: 5337812 - DNA, 25 bp, Homo sapien
tccataacagggagctgcagttgga

SEQ ID NO: 5337813 - DNA, 25 bp, Homo sapien
ccctttctttaaagcctaattcatg

SEQ ID NO: 5337814 - DNA, 25 bp, Homo sapien
tctttaaagcctaattcatgtttca

SEQ ID NO: 5337815 - DNA, 25 bp, Homo sapien
aaagcctaattcatgtttcaaatgc

SEQ ID NO: 5337816 - DNA, 25 bp, Homo sapien
aattcatgtttcaaatgctccacca

SEQ ID NO: 5337817 - DNA, 25 bp, Homo sapien
gcctttggcatagattttaggtctg

SEQ ID NO: 5337818 - DNA, 25 bp, Homo sapien
gtttgcctttggcatagattttagg

SEQ ID NO: 5337819 - DNA, 25 bp, Homo sapien
tagagtttgcctttggcatagattt

SEQ ID NO: 5337820 - DNA, 25 bp, Homo sapien
ctttggcatagattttaggtctgac

SEQ ID NO: 5337821 - DNA, 25 bp, Homo sapien
cgtgaagaacattgtagtaagaggt

SEQ ID NO: 5337822 - DNA, 25 bp, Homo sapien
ttttatgtaattgttgaagggtgtc

SEQ ID NO: 5337823 - DNA, 25 bp, Homo sapien
ctgatagatttgaacgtgaagaaca

SEQ ID NO: 5337824 - DNA, 25 bp, Homo sapien
tgtaattgttgaagggtgtcagaag

SEQ ID NO: 5337825 - DNA, 25 bp, Homo sapien
gggcagagtgatctggccaatagca

SEQ ID NO: 5337826 - DNA, 25 bp, Homo sapien
gccaatagcaggtgtgcaggaggca

SEQ ID NO: 5337827 - DNA, 25 bp, Homo sapien
caggggttccctgtatggccagtgt

SEQ ID NO: 5337828 - DNA, 25 bp, Homo sapien
cagcagcctgcagtatccggggaca

SEQ ID NO: 5337829 - DNA, 25 bp, Homo sapien
cattgacattagcatccttgtaggg

SEQ ID NO: 5337830 - DNA, 25 bp, Homo sapien
cctgttgtatcttcacgatacacat

SEQ ID NO: 5337831 - DNA, 25 bp, Homo sapien
tagcatccttgtagggtagcagcat

SEQ ID NO: 5337832 - DNA, 25 bp, Homo sapien
ttcacgatacacattgacattagca

SEQ ID NO: 5337833 - DNA, 25 bp, Homo sapien
caagcaggcagataaccaggtgaga

SEQ ID NO: 5337834 - DNA, 25 bp, Homo sapien
tgagttcttagccacgacaaagcag

SEQ ID NO: 5337835 - DNA, 25 bp, Homo sapien
cttacattcggcgttcgcagggcct

SEQ ID NO: 5337836 - DNA, 25 bp, Homo sapien
cagtttttgctacctccaatggcca

SEQ ID NO: 5337837 - DNA, 25 bp, Homo sapien
tctttctccttctattattacgcgg

SEQ ID NO: 5337838 - DNA, 25 bp, Homo sapien
ctaagttggacaagggcttgtttct

SEQ ID NO: 5337839 - DNA, 25 bp, Homo sapien
tattacgcgggctaagttggacaag

SEQ ID NO: 5337840 - DNA, 25 bp, Homo sapien
ccttctattattacgcgggctaagt

SEQ ID NO: 5337841 - DNA, 25 bp, Homo sapien
ccagttgccagatcttcacgtcgct

SEQ ID NO: 5337842 - DNA, 25 bp, Homo sapien
gccagatcttcacgtcgctgcagca

SEQ ID NO: 5337843 - DNA, 25 bp, Homo sapien
tggctgtgtccaccccagttgccag

SEQ ID NO: 5337844 - DNA, 25 bp, Homo sapien
gttgccagatcttcacgtcgctgca

SEQ ID NO: 5337845 - DNA, 25 bp, Homo sapien
tctagagaattgtaggggatatctt

SEQ ID NO: 5337846 - DNA, 25 bp, Homo sapien
ctttagggaacaactctcttgagat

SEQ ID NO: 5337847 - DNA, 25 bp, Homo sapien
gtaggggatatctttctcctgtttc

SEQ ID NO: 5337848 - DNA, 25 bp, Homo sapien
tttagggaacaactctcttgagatt

SEQ ID NO: 5337849 - DNA, 25 bp, Homo sapien
ttccccgctttctgcctcacaagtt

SEQ ID NO: 5337850 - DNA, 25 bp, Homo sapien
ctggcccagatactggggcctgacc

SEQ ID NO: 5337851 - DNA, 25 bp, Homo sapien
ggactgagaggcaattttgatgagt

SEQ ID NO: 5337852 - DNA, 25 bp, Homo sapien
gggctttccccgctttctgcctcac

SEQ ID NO: 5337853 - DNA, 25 bp, Homo sapien
ttttgtgtatgtggcgcctgaacct

SEQ ID NO: 5337854 - DNA, 25 bp, Homo sapien
gaaccttcatggaacatatcccaga

SEQ ID NO: 5337855 - DNA, 25 bp, Homo sapien
tgaaggaggagtatcagctattcat

SEQ ID NO: 5337856 - DNA, 25 bp, Homo sapien
agatcgcagtgtgccacagccagat

SEQ ID NO: 5337857 - DNA, 25 bp, Homo sapien
aaggccaggcagttcaacaggaatc

SEQ ID NO: 5337858 - DNA, 25 bp, Homo sapien
tataggacgtcaggcacaggtcagt

SEQ ID NO: 5337859 - DNA, 25 bp, Homo sapien
gcagcaggaatattcagggccacca

SEQ ID NO: 5337860 - DNA, 25 bp, Homo sapien
aagaacccataaagccatgctgagg

SEQ ID NO: 5337861 - DNA, 25 bp, Homo sapien
tccattcacaattgagacccagttc

SEQ ID NO: 5337862 - DNA, 25 bp, Homo sapien
tgcttgcccacatagagggtggatc

SEQ ID NO: 5337863 - DNA, 25 bp, Homo sapien
tctgggctcctagctgattagatgg

SEQ ID NO: 5337864 - DNA, 25 bp, Homo sapien
gacccagttcaaagtgattgttcct

SEQ ID NO: 5337865 - DNA, 25 bp, Homo sapien
cttgcttgagcagttggaataggtt

SEQ ID NO: 5337866 - DNA, 25 bp, Homo sapien
ctgcatttaatgtacttgcttgagc

SEQ ID NO: 5337867 - DNA, 25 bp, Homo sapien
cttgagcagttggaataggtttaaa

SEQ ID NO: 5337868 - DNA, 25 bp, Homo sapien
tggtctgcatttaatgtacttgctt

SEQ ID NO: 5337869 - DNA, 25 bp, Homo sapien
gagacttgcccctggaaatggatga

SEQ ID NO: 5337870 - DNA, 25 bp, Homo sapien
gatgatctggcaggtacgcaaggcc

SEQ ID NO: 5337871 - DNA, 25 bp, Homo sapien
taagtccagtatgcacgctgacaat

SEQ ID NO: 5337872 - DNA, 25 bp, Homo sapien
ggatatctacaagagagcccatgtc

SEQ ID NO: 5337873 - DNA, 25 bp, Homo sapien
gcttcttaccgtcccttatcaagcg

SEQ ID NO: 5337874 - DNA, 25 bp, Homo sapien
tcttaccgtcccttatcaagcgctg

SEQ ID NO: 5337875 - DNA, 25 bp, Homo sapien
tatcaagcgctgttgtgtggggggg

SEQ ID NO: 5337876 - DNA, 25 bp, Homo sapien
ctgtgcttcttaccgtcccttatca

SEQ ID NO: 5337877 - DNA, 25 bp, Homo sapien
tgtacagatgtcgtaataagatgtg

SEQ ID NO: 5337878 - DNA, 25 bp, Homo sapien
aatgtacagatgtcgtaataagatg

SEQ ID NO: 5337879 - DNA, 25 bp, Homo sapien
tacagatgtcgtaataagatgtgag

SEQ ID NO: 5337880 - DNA, 25 bp, Homo sapien
gtaatgtacagatgtcgtaataaga

SEQ ID NO: 5337881 - DNA, 25 bp, Homo sapien
cttaaagactgaatgcagctcctca

SEQ ID NO: 5337882 - DNA, 25 bp, Homo sapien
tcattctccataataaccacctcca

SEQ ID NO: 5337883 - DNA, 25 bp, Homo sapien
ttcttaaagactgaatgcagctcct

SEQ ID NO: 5337884 - DNA, 25 bp, Homo sapien
ccacctccacttggccctgttctac

SEQ ID NO: 5337885 - DNA, 25 bp, Homo sapien
aatgcaactgctgtcagctagagca

SEQ ID NO: 5337886 - DNA, 25 bp, Homo sapien
ccttggttgagtcggtgcaaatgca

SEQ ID NO: 5337887 - DNA, 25 bp, Homo sapien
tgtcagctagagcagttctttctgt

SEQ ID NO: 5337888 - DNA, 25 bp, Homo sapien
tgccttggttgagtcggtgcaaatg

SEQ ID NO: 5337889 - DNA, 25 bp, Homo sapien
gaaacttgtggaatgatctgtggca

SEQ ID NO: 5337890 - DNA, 25 bp, Homo sapien
ttataatagggtgtactctctcagg

SEQ ID NO: 5337891 - DNA, 25 bp, Homo sapien
tcatcaacttcagcttgtctgcact

SEQ ID NO: 5337892 - DNA, 25 bp, Homo sapien
ttagggtatcttaatgggactctta

SEQ ID NO: 5337893 - DNA, 25 bp, Homo sapien
tcagtggatagatggttaaacaaac

SEQ ID NO: 5337894 - DNA, 25 bp, Homo sapien
ttacgacgagtggagaaaaacagcc

SEQ ID NO: 5337895 - DNA, 25 bp, Homo sapien
gggagaatgacgaaaaaagcctcaa

SEQ ID NO: 5337896 - DNA, 25 bp, Homo sapien
tatggatacactcaacaacctggat

SEQ ID NO: 5337897 - DNA, 25 bp, Homo sapien
ggtggtctgacccagtgtctctcag

SEQ ID NO: 5337898 - DNA, 25 bp, Homo sapien
caaggtcacacaccaatggttcttt

SEQ ID NO: 5337899 - DNA, 25 bp, Homo sapien
ccccagaatttagtagcttaagaca

SEQ ID NO: 5337900 - DNA, 25 bp, Homo sapien
agtgtcctgattacatggcagacgg

SEQ ID NO: 5337901 - DNA, 25 bp, Homo sapien
cagggtggccatgagtttgctggtg

SEQ ID NO: 5337902 - DNA, 25 bp, Homo sapien
agggtggccatgagtttgctggtgc

SEQ ID NO: 5337903 - DNA, 25 bp, Homo sapien
tgaaggagtggtcatatatcttatg

SEQ ID NO: 5337904 - DNA, 25 bp, Homo sapien
cttgaaggagtggtcatatatctta

SEQ ID NO: 5337905 - DNA, 25 bp, Homo sapien
tggcaacacttatccaaccgactgc

SEQ ID NO: 5337906 - DNA, 25 bp, Homo sapien
ggcagatacttggtgacaactcgtc

SEQ ID NO: 5337907 - DNA, 25 bp, Homo sapien
tcaacatgatgtgtcatggcaacac

SEQ ID NO: 5337908 - DNA, 25 bp, Homo sapien
tgcaatgaaaaagctgacaacggtc

SEQ ID NO: 5337909 - DNA, 25 bp, Homo sapien
agactcagggcctccgtgcaagcac

SEQ ID NO: 5337910 - DNA, 25 bp, Homo sapien
gcctccgtgcaagcaccatctcttg

SEQ ID NO: 5337911 - DNA, 25 bp, Homo sapien
ctcagactcagggcctccgtgcaag

SEQ ID NO: 5337912 - DNA, 25 bp, Homo sapien
gggcctccgtgcaagcaccatctct

SEQ ID NO: 5337913 - DNA, 25 bp, Homo sapien
aggagtcttggaagtactgacagag

SEQ ID NO: 5337914 - DNA, 25 bp, Homo sapien
ggagtcttggaagtactgacagaga

SEQ ID NO: 5337915 - DNA, 25 bp, Homo sapien
gttcagactcaagttcagactcagg

SEQ ID NO: 5337916 - DNA, 25 bp, Homo sapien
tcacaattatctagagtcataataa

SEQ ID NO: 5337917 - DNA, 25 bp, Homo sapien
tttggctttaatccttacctctcat

SEQ ID NO: 5337918 - DNA, 25 bp, Homo sapien
aaatcacaattatctagagtcataa

SEQ ID NO: 5337919 - DNA, 25 bp, Homo sapien
tcccatcctaactttggctttaatc

SEQ ID NO: 5337920 - DNA, 25 bp, Homo sapien
tcatgctatttgaatcagaatcacc

SEQ ID NO: 5337921 - DNA, 25 bp, Homo sapien
cagttaaaatggacgaggttgccct

SEQ ID NO: 5337922 - DNA, 25 bp, Homo sapien
cagaatcacctccatagcatgaagt

SEQ ID NO: 5337923 - DNA, 25 bp, Homo sapien
ggattttaatccctgaggtgccagt

SEQ ID NO: 5337924 - DNA, 25 bp, Homo sapien
tgcagacgctctcctttccaggcgg

SEQ ID NO: 5337925 - DNA, 25 bp, Homo sapien
tcacaatattagcagagctgggttc

SEQ ID NO: 5337926 - DNA, 25 bp, Homo sapien
ttttcagcaccattccgagacctgg

SEQ ID NO: 5337927 - DNA, 25 bp, Homo sapien
gttaagttcaccctgctattcccag

SEQ ID NO: 5337928 - DNA, 25 bp, Homo sapien
tctccgcacggagagatcggacacg

SEQ ID NO: 5337929 - DNA, 25 bp, Homo sapien
gatgcacacgccagaaacaaagtac

SEQ ID NO: 5337930 - DNA, 25 bp, Homo sapien
ttcaaagtcctctcgaagcggcggt

SEQ ID NO: 5337931 - DNA, 25 bp, Homo sapien
taatagtagcgattcaggctcctgg

SEQ ID NO: 5337932 - DNA, 25 bp, Homo sapien
aggaaataatgaccagaacagccca

SEQ ID NO: 5337933 - DNA, 25 bp, Homo sapien
tgaactccacaccaatctgcattta

SEQ ID NO: 5337934 - DNA, 25 bp, Homo sapien
ggaaataatgaccagaacagcccat

SEQ ID NO: 5337935 - DNA, 25 bp, Homo sapien
gcccatgaactccacaccaatctgc

SEQ ID NO: 5337936 - DNA, 25 bp, Homo sapien
tcagcaggcgagctcccgtgattgg

SEQ ID NO: 5337937 - DNA, 25 bp, Homo sapien
caaagtcttgtcctctgtctcctac

SEQ ID NO: 5337938 - DNA, 25 bp, Homo sapien
tgaggatgatccttcagaccaaagt

SEQ ID NO: 5337939 - DNA, 25 bp, Homo sapien
gagctcccgtgattggcactgtaca

SEQ ID NO: 5337940 - DNA, 25 bp, Homo sapien
ggggctcagccctcccagtaagtgt

SEQ ID NO: 5337941 - DNA, 25 bp, Homo sapien
ctaagaggacctttgttgcgggaag

SEQ ID NO: 5337942 - DNA, 25 bp, Homo sapien
agcccaaaacggcccttcagaattg

SEQ ID NO: 5337943 - DNA, 25 bp, Homo sapien
ctgatcagagcctcacacctcaggg

SEQ ID NO: 5337944 - DNA, 25 bp, Homo sapien
caaggttaccaagcaccttagacac

SEQ ID NO: 5337945 - DNA, 25 bp, Homo sapien
catctctcccacaaggttaccaagc

SEQ ID NO: 5337946 - DNA, 25 bp, Homo sapien
tcccacaaggttaccaagcacctta

SEQ ID NO: 5337947 - DNA, 25 bp, Homo sapien
cacaaggttaccaagcaccttagac

SEQ ID NO: 5337948 - DNA, 25 bp, Homo sapien
aggaataggccgctaggatgttgct

SEQ ID NO: 5337949 - DNA, 25 bp, Homo sapien
gacaaaggaataggccgctaggatg

SEQ ID NO: 5337950 - DNA, 25 bp, Homo sapien
ggccgctaggatgttgctgagcaaa

SEQ ID NO: 5337951 - DNA, 25 bp, Homo sapien
gaataggccgctaggatgttgctga

SEQ ID NO: 5337952 - DNA, 25 bp, Homo sapien
aggtgcttggctgaatcaacgtggc

SEQ ID NO: 5337953 - DNA, 25 bp, Homo sapien
ggaggtgcttggctgaatcaacgtg

SEQ ID NO: 5337954 - DNA, 25 bp, Homo sapien
ggtgcttggctgaatcaacgtggcc

SEQ ID NO: 5337955 - DNA, 25 bp, Homo sapien
gaggtgcttggctgaatcaacgtgg

SEQ ID NO: 5337956 - DNA, 25 bp, Homo sapien
taaagaaagaccagcgagctctccc

SEQ ID NO: 5337957 - DNA, 25 bp, Homo sapien
tggctttcaaggaagtagaaactcc

SEQ ID NO: 5337958 - DNA, 25 bp, Homo sapien
cactatagagctaaggaaattatcc

SEQ ID NO: 5337959 - DNA, 25 bp, Homo sapien
aattgcttgtgaaaactatgcttgc

SEQ ID NO: 5337960 - DNA, 25 bp, Homo sapien
ctttatttgattctccctggttcac

SEQ ID NO: 5337961 - DNA, 25 bp, Homo sapien
ttgattctccctggttcacctttga

SEQ ID NO: 5337962 - DNA, 25 bp, Homo sapien
ttatttgattctccctggttcacct

SEQ ID NO: 5337963 - DNA, 25 bp, Homo sapien
atttgattctccctggttcaccttt

SEQ ID NO: 5337964 - DNA, 25 bp, Homo sapien
actcttcctgttgcctaaatgcccc

SEQ ID NO: 5337965 - DNA, 25 bp, Homo sapien
tgttgcctaaatgccccccttctct

SEQ ID NO: 5337966 - DNA, 25 bp, Homo sapien
acactcttcctgttgcctaaatgcc

SEQ ID NO: 5337967 - DNA, 25 bp, Homo sapien
cctgttgcctaaatgccccccttct

SEQ ID NO: 5337968 - DNA, 25 bp, Homo sapien
cttgtttggccccagttggcttctc

SEQ ID NO: 5337969 - DNA, 25 bp, Homo sapien
catctctgatgatgttggcatcagc

SEQ ID NO: 5337970 - DNA, 25 bp, Homo sapien
ctggtaagaacagttcatctctgat

SEQ ID NO: 5337971 - DNA, 25 bp, Homo sapien
tgtttggccccagttggcttctcag

SEQ ID NO: 5337972 - DNA, 25 bp, Homo sapien
aacagtccttatatcaccggctggg

SEQ ID NO: 5337973 - DNA, 25 bp, Homo sapien
atcaggcactgaccctaggacagtc

SEQ ID NO: 5337974 - DNA, 25 bp, Homo sapien
tacactggtgaaaactatcaggcac

SEQ ID NO: 5337975 - DNA, 25 bp, Homo sapien
gaaaaacagtccttatatcaccggc

SEQ ID NO: 5337976 - DNA, 25 bp, Homo sapien
ttgctcagtacttcttgatgctgcc

SEQ ID NO: 5337977 - DNA, 25 bp, Homo sapien
tcagtacttcttgatgctgccacgt

SEQ ID NO: 5337978 - DNA, 25 bp, Homo sapien
gctcagtacttcttgatgctgccac

SEQ ID NO: 5337979 - DNA, 25 bp, Homo sapien
tgctcagtacttcttgatgctgcca

SEQ ID NO: 5337980 - DNA, 25 bp, Homo sapien
aaagcattgttggtaaggtggccat

SEQ ID NO: 5337981 - DNA, 25 bp, Homo sapien
tccagcatggagactatgagctcct

SEQ ID NO: 5337982 - DNA, 25 bp, Homo sapien
gcttctaacgattgctccagcatgg

SEQ ID NO: 5337983 - DNA, 25 bp, Homo sapien
ggtggccatagtgaaacaatcagct

SEQ ID NO: 5337984 - DNA, 25 bp, Homo sapien
cccaatgattgactcatagtgcttc

SEQ ID NO: 5337985 - DNA, 25 bp, Homo sapien
ctctgtgcccaatgattgactcata

SEQ ID NO: 5337986 - DNA, 25 bp, Homo sapien
tgtgcccaatgattgactcatagtg

SEQ ID NO: 5337987 - DNA, 25 bp, Homo sapien
gtgcccaatgattgactcatagtgc

SEQ ID NO: 5337988 - DNA, 25 bp, Homo sapien
aatgaataatccagaaatgagcaaa

SEQ ID NO: 5337989 - DNA, 25 bp, Homo sapien
gcaaatgtggtcagcgatctaccta

SEQ ID NO: 5337990 - DNA, 25 bp, Homo sapien
atgagcaaatgtggtcagcgatcta

SEQ ID NO: 5337991 - DNA, 25 bp, Homo sapien
gtggtcagcgatctacctacctgca

SEQ ID NO: 5337992 - DNA, 25 bp, Homo sapien
ctgctggacatctcatacttcctgg

SEQ ID NO: 5337993 - DNA, 25 bp, Homo sapien
tgtgatattgaatgtgaagtaggat

SEQ ID NO: 5337994 - DNA, 25 bp, Homo sapien
cgcatggtgtgatattgaatgtgaa

SEQ ID NO: 5337995 - DNA, 25 bp, Homo sapien
gagtcactcgcatggtgtgatattg

SEQ ID NO: 5337996 - DNA, 25 bp, Homo sapien
cagggaaccttcaagctggaaatgt

SEQ ID NO: 5337997 - DNA, 25 bp, Homo sapien
ggccttttggattcaggatggtgcc

SEQ ID NO: 5337998 - DNA, 25 bp, Homo sapien
cagccaaagggactctgcacatgcc

SEQ ID NO: 5337999 - DNA, 25 bp, Homo sapien
gggtccggcagggatgatccttcct

SEQ ID NO: 5338000 - DNA, 25 bp, Homo sapien
ctgaatttgacatggtctggactta

SEQ ID NO: 5338001 - DNA, 25 bp, Homo sapien
gacatggtctggacttaacaacaag

SEQ ID NO: 5338002 - DNA, 25 bp, Homo sapien
tttgacatggtctggacttaacaac

SEQ ID NO: 5338003 - DNA, 25 bp, Homo sapien
catggtctggacttaacaacaagtg

SEQ ID NO: 5338004 - DNA, 25 bp, Homo sapien
tccaactatcaacatggaagccatc

SEQ ID NO: 5338005 - DNA, 25 bp, Homo sapien
ctgaaacacctgtccagaatttctt

SEQ ID NO: 5338006 - DNA, 25 bp, Homo sapien
cagaatttctttaatgatatccaac

SEQ ID NO: 5338007 - DNA, 25 bp, Homo sapien
actgggcattgtgaaagacattttc

SEQ ID NO: 5338008 - DNA, 25 bp, Homo sapien
cccttcacaggctgacttcctttgt

SEQ ID NO: 5338009 - DNA, 25 bp, Homo sapien
acaggctgacttcctttgtccccag

SEQ ID NO: 5338010 - DNA, 25 bp, Homo sapien
cttgccccttcacaggctgacttcc

SEQ ID NO: 5338011 - DNA, 25 bp, Homo sapien
ttcacaggctgacttcctttgtccc

SEQ ID NO: 5338012 - DNA, 25 bp, Homo sapien
gcagcccttttgatcaaagtcccct

SEQ ID NO: 5338013 - DNA, 25 bp, Homo sapien
gctgctatggcctgtcttgtcttga

SEQ ID NO: 5338014 - DNA, 25 bp, Homo sapien
gaaagacagctttaggcagcccttt

SEQ ID NO: 5338015 - DNA, 25 bp, Homo sapien
aagtccccttgcagaaacaagatcc

SEQ ID NO: 5338016 - DNA, 25 bp, Homo sapien
tttttgaaccccagaacaaagagca

SEQ ID NO: 5338017 - DNA, 25 bp, Homo sapien
ttttgaaccccagaacaaagagcat

SEQ ID NO: 5338018 - DNA, 25 bp, Homo sapien
ccttggtgatcaaagagggggcaag

SEQ ID NO: 5338019 - DNA, 25 bp, Homo sapien
caaagtgcaggctgccttggtgatc

SEQ ID NO: 5338020 - DNA, 25 bp, Homo sapien
cttaacttctagtctcaaagattga

SEQ ID NO: 5338021 - DNA, 25 bp, Homo sapien
gaatgatgcttcacccaaaaggaga

SEQ ID NO: 5338022 - DNA, 25 bp, Homo sapien
agggcagggagcaacaaaatggtct

SEQ ID NO: 5338023 - DNA, 25 bp, Homo sapien
tctgtaggaactgaagaatgatgct

SEQ ID NO: 5338024 - DNA, 25 bp, Homo sapien
agcacgtacatttctggcaggtccg

SEQ ID NO: 5338025 - DNA, 25 bp, Homo sapien
tccaaaagcaaagcgtcccactggg

SEQ ID NO: 5338026 - DNA, 25 bp, Homo sapien
gacctcccagatagagcagcgtgga

SEQ ID NO: 5338027 - DNA, 25 bp, Homo sapien
caggtaaatagtccacggtgcagca

SEQ ID NO: 5338028 - DNA, 25 bp, Homo sapien
cagagttcagggagcgctctcgggc

SEQ ID NO: 5338029 - DNA, 25 bp, Homo sapien
gctgcttcaggtcagaagtgctctg

SEQ ID NO: 5338030 - DNA, 25 bp, Homo sapien
agggagcgctctcgggcacctctta

SEQ ID NO: 5338031 - DNA, 25 bp, Homo sapien
gaaaagagggcgcttcggagaagcc

SEQ ID NO: 5338032 - DNA, 25 bp, Homo sapien
ccccggcgcgcacttccggggactg

SEQ ID NO: 5338033 - DNA, 25 bp, Homo sapien
cccggcgcgcacttccggggactgc

SEQ ID NO: 5338034 - DNA, 25 bp, Homo sapien
ccggcgcgcacttccggggactgcg

SEQ ID NO: 5338035 - DNA, 25 bp, Homo sapien
aggggcggacacgacaaagcgctgc

SEQ ID NO: 5338036 - DNA, 25 bp, Homo sapien
cggacacgacaaagcgctgcccggg

SEQ ID NO: 5338037 - DNA, 25 bp, Homo sapien
ggacacgacaaagcgctgcccgggt

SEQ ID NO: 5338038 - DNA, 25 bp, Homo sapien
tgaggggcggacacgacaaagcgct

SEQ ID NO: 5338039 - DNA, 25 bp, Homo sapien
gcctgggtgctcacggacggcggcg

SEQ ID NO: 5338040 - DNA, 25 bp, Homo sapien
ggtgctcacggacggcggcgccaag

SEQ ID NO: 5338041 - DNA, 25 bp, Homo sapien
tgggtgctcacggacggcggcgcca

SEQ ID NO: 5338042 - DNA, 25 bp, Homo sapien
cggcctgggtgctcacggacggcgg

SEQ ID NO: 5338043 - DNA, 25 bp, Homo sapien
ctgcaggagcccgagtcagtgggag

SEQ ID NO: 5338044 - DNA, 25 bp, Homo sapien
caggagcccgagtcagtgggaggaa

SEQ ID NO: 5338045 - DNA, 25 bp, Homo sapien
tgcaggagcccgagtcagtgggagg

SEQ ID NO: 5338046 - DNA, 25 bp, Homo sapien
gcaggagcccgagtcagtgggagga

SEQ ID NO: 5338047 - DNA, 25 bp, Homo sapien
catccatcctctcattcctgtcccg

SEQ ID NO: 5338048 - DNA, 25 bp, Homo sapien
gcatccatcctctcattcctgtccc

SEQ ID NO: 5338049 - DNA, 25 bp, Homo sapien
agaacttttcatggaactaagacct

SEQ ID NO: 5338050 - DNA, 25 bp, Homo sapien
agcacacgtcagtcgttcaaaagaa

SEQ ID NO: 5338051 - DNA, 25 bp, Homo sapien
ctgtacaaaggaatatgagaggatg

SEQ ID NO: 5338052 - DNA, 25 bp, Homo sapien
ccaggagcacacgtcagtcgttcaa

SEQ ID NO: 5338053 - DNA, 25 bp, Homo sapien
ttgcttaaaccagtgtccgcgacca

SEQ ID NO: 5338054 - DNA, 25 bp, Homo sapien
gcaaccagtcggtctcctgtgtctg

SEQ ID NO: 5338055 - DNA, 25 bp, Homo sapien
gtccccagtgcccaaatcggagtga

SEQ ID NO: 5338056 - DNA, 25 bp, Homo sapien
cacatctgatggagtttgggatcta

SEQ ID NO: 5338057 - DNA, 25 bp, Homo sapien
taactggctttgcttggtaacagac

SEQ ID NO: 5338058 - DNA, 25 bp, Homo sapien
tctttaactggctttgcttggtaac

SEQ ID NO: 5338059 - DNA, 25 bp, Homo sapien
ctaaaatgcttcaggggttgcccac

SEQ ID NO: 5338060 - DNA, 25 bp, Homo sapien
gacacatctgttcgcatcactaaaa

SEQ ID NO: 5338061 - DNA, 25 bp, Homo sapien
aatcaggtctccatagcatgggctg

SEQ ID NO: 5338062 - DNA, 25 bp, Homo sapien
attcagtaccaacccatcttctgct

SEQ ID NO: 5338063 - DNA, 25 bp, Homo sapien
cagggtcagccgctacatatctctc

SEQ ID NO: 5338064 - DNA, 25 bp, Homo sapien
tgggctgcaacgtccttcagggtca

SEQ ID NO: 5338065 - DNA, 25 bp, Homo sapien
tcagttattactggggcatgtcccc

SEQ ID NO: 5338066 - DNA, 25 bp, Homo sapien
catgacgcagagcatgcaaagagac

SEQ ID NO: 5338067 - DNA, 25 bp, Homo sapien
aaccctgaggcaagttcttctaagg

SEQ ID NO: 5338068 - DNA, 25 bp, Homo sapien
tccccagagtcagacggaagtccag

SEQ ID NO: 5338069 - DNA, 25 bp, Homo sapien
actaagcctaatcctccttctcgtt

SEQ ID NO: 5338070 - DNA, 25 bp, Homo sapien
tcgccactaagcctaatcctccttc

SEQ ID NO: 5338071 - DNA, 25 bp, Homo sapien
cagccctcgccactaagcctaatcc

SEQ ID NO: 5338072 - DNA, 25 bp, Homo sapien
cctcgccactaagcctaatcctcct

SEQ ID NO: 5338073 - DNA, 25 bp, Homo sapien
ctgacgcagggtatttgcagcagct

SEQ ID NO: 5338074 - DNA, 25 bp, Homo sapien
tgcccagcctgtgagaaaactgaaa

SEQ ID NO: 5338075 - DNA, 25 bp, Homo sapien
tagaagttacaggtcatgagctgag

SEQ ID NO: 5338076 - DNA, 25 bp, Homo sapien
tatttgagctgctgacttgagctgc

SEQ ID NO: 5338077 - DNA, 25 bp, Homo sapien
tgatgctaagctgagcacaggtaat

SEQ ID NO: 5338078 - DNA, 25 bp, Homo sapien
ggtgatgcagggagtctatggaagt

SEQ ID NO: 5338079 - DNA, 25 bp, Homo sapien
caatgaagcatgtatgtgctacgca

SEQ ID NO: 5338080 - DNA, 25 bp, Homo sapien
cacaggtaatctcgcacagacttgg

SEQ ID NO: 5338081 - DNA, 25 bp, Homo sapien
attatagaactggtatcaacaagct

SEQ ID NO: 5338082 - DNA, 25 bp, Homo sapien
caccttcggtgttgttaattataga

SEQ ID NO: 5338083 - DNA, 25 bp, Homo sapien
gaactggtatcaacaagctgagtca

SEQ ID NO: 5338084 - DNA, 25 bp, Homo sapien
cagtctcaattcaccttcggtgttg

SEQ ID NO: 5338085 - DNA, 25 bp, Homo sapien
ataacacattgactgagatatacag

SEQ ID NO: 5338086 - DNA, 25 bp, Homo sapien
ggcaggatcagaaaatagaggcctt

SEQ ID NO: 5338087 - DNA, 25 bp, Homo sapien
gagaaattaaggactgctcgccaag

SEQ ID NO: 5338088 - DNA, 25 bp, Homo sapien
gaaattaccccaggatcaaataaca

SEQ ID NO: 5338089 - DNA, 25 bp, Homo sapien
gaaacgccctgcagtccatgacccc

SEQ ID NO: 5338090 - DNA, 25 bp, Homo sapien
ctgcagtccatgacccccgccctcc

SEQ ID NO: 5338091 - DNA, 25 bp, Homo sapien
cgccctgcagtccatgacccccgcc

SEQ ID NO: 5338092 - DNA, 25 bp, Homo sapien
ccctgcagtccatgacccccgccct

SEQ ID NO: 5338093 - DNA, 25 bp, Homo sapien
agaatgcctactcgctgccctccaa

SEQ ID NO: 5338094 - DNA, 25 bp, Homo sapien
tactcgctgccctccaactaccagc

SEQ ID NO: 5338095 - DNA, 25 bp, Homo sapien
tgcggtgccccgcagaagcagccac

SEQ ID NO: 5338096 - DNA, 25 bp, Homo sapien
ggcgcccaattataagccccaggtc

SEQ ID NO: 5338097 - DNA, 25 bp, Homo sapien
tcataagcaaaacgtgtaaccagtg

SEQ ID NO: 5338098 - DNA, 25 bp, Homo sapien
actcataagcaaaacgtgtaaccag

SEQ ID NO: 5338099 - DNA, 25 bp, Homo sapien
catgggcaataactcataagcaaaa

SEQ ID NO: 5338100 - DNA, 25 bp, Homo sapien
cttgccctttctcatgggcaataac

SEQ ID NO: 5338101 - DNA, 25 bp, Homo sapien
tggctgcaggtctcaccagtgcttg

SEQ ID NO: 5338102 - DNA, 25 bp, Homo sapien
gaagatgtgtactctgtggacaaca

SEQ ID NO: 5338103 - DNA, 25 bp, Homo sapien
ggcggctggccccaacatcttgtaa

SEQ ID NO: 5338104 - DNA, 25 bp, Homo sapien
gacaacacttgtatggacatgcagg

SEQ ID NO: 5338105 - DNA, 25 bp, Homo sapien
tctcacaaggaaatctcctatctgg

SEQ ID NO: 5338106 - DNA, 25 bp, Homo sapien
caggggctgcacgtcagatccattt

SEQ ID NO: 5338107 - DNA, 25 bp, Homo sapien
tatcatttgtcgaaacttgaaatct

SEQ ID NO: 5338108 - DNA, 25 bp, Homo sapien
tccattttcatgactgacatattca

SEQ ID NO: 5338109 - DNA, 25 bp, Homo sapien
tttcctggtaagaatagcgccagct

SEQ ID NO: 5338110 - DNA, 25 bp, Homo sapien
tcccctttcctggtaagaatagcgc

SEQ ID NO: 5338111 - DNA, 25 bp, Homo sapien
atctgtagtcccctttcctggtaag

SEQ ID NO: 5338112 - DNA, 25 bp, Homo sapien
cctggtaagaatagcgccagcttct

SEQ ID NO: 5338113 - DNA, 25 bp, Homo sapien
ctgtgcggggatacggacaaaagcc

SEQ ID NO: 5338114 - DNA, 25 bp, Homo sapien
accgtccaacggcgccaccgtgtgg

SEQ ID NO: 5338115 - DNA, 25 bp, Homo sapien
tgagtctcgaggagatgctggtttt

SEQ ID NO: 5338116 - DNA, 25 bp, Homo sapien
acacacctggaccttctaagacagg

SEQ ID NO: 5338117 - DNA, 25 bp, Homo sapien
ccccacttatgggtcaatgcacaca

SEQ ID NO: 5338118 - DNA, 25 bp, Homo sapien
gcagagtcgtgacaggaaacttata

SEQ ID NO: 5338119 - DNA, 25 bp, Homo sapien
ctatgatggtagagttgcagagtcg

SEQ ID NO: 5338120 - DNA, 25 bp, Homo sapien
caaggaagacgagtacagaaacagc

SEQ ID NO: 5338121 - DNA, 25 bp, Homo sapien
catggcattgttgggtagtttcatc

SEQ ID NO: 5338122 - DNA, 25 bp, Homo sapien
caactcgccccatgtcagaatgaca

SEQ ID NO: 5338123 - DNA, 25 bp, Homo sapien
cagaaactccacaggttaagaacaa

SEQ ID NO: 5338124 - DNA, 25 bp, Homo sapien
tctagtccctagtgtaatgttttac

SEQ ID NO: 5338125 - DNA, 25 bp, Homo sapien
tgagcttaagacctcgagaggccag

SEQ ID NO: 5338126 - DNA, 25 bp, Homo sapien
cttctgtatgtgagcttaagacctc

SEQ ID NO: 5338127 - DNA, 25 bp, Homo sapien
tcctttttctgaatgcacccgggcc

SEQ ID NO: 5338128 - DNA, 25 bp, Homo sapien
ttttctgaatgcacccgggcccact

SEQ ID NO: 5338129 - DNA, 25 bp, Homo sapien
aacaaatggatttctgcctctttac

SEQ ID NO: 5338130 - DNA, 25 bp, Homo sapien
agaagccaggaagaaacaaatggat

SEQ ID NO: 5338131 - DNA, 25 bp, Homo sapien
tacagagaagccaggaagaaacaaa

SEQ ID NO: 5338132 - DNA, 25 bp, Homo sapien
tggatttctgcctctttacactcac

SEQ ID NO: 5338133 - DNA, 25 bp, Homo sapien
tccagtgcccctccaagactcccaa

SEQ ID NO: 5338134 - DNA, 25 bp, Homo sapien
ccaaaggttctgcttctacatgatg

SEQ ID NO: 5338135 - DNA, 25 bp, Homo sapien
tccaaaggttctgcttctacatgat

SEQ ID NO: 5338136 - DNA, 25 bp, Homo sapien
ttccaggattcgtcattcaccccaa

SEQ ID NO: 5338137 - DNA, 25 bp, Homo sapien
aacccaagccaatccacaaggcttt

SEQ ID NO: 5338138 - DNA, 25 bp, Homo sapien
cccatttccaggattcgtcattcac

SEQ ID NO: 5338139 - DNA, 25 bp, Homo sapien
tgggatagtggagatgtatgtcacc

SEQ ID NO: 5338140 - DNA, 25 bp, Homo sapien
agttccatgcagtatctagctacat

SEQ ID NO: 5338141 - DNA, 25 bp, Homo sapien
tccacatatccgtgcctcccttctc

SEQ ID NO: 5338142 - DNA, 25 bp, Homo sapien
cacttccactgtgggaggttgagtt

SEQ ID NO: 5338143 - DNA, 25 bp, Homo sapien
cactgtgggaggttgagttccatgc

SEQ ID NO: 5338144 - DNA, 25 bp, Homo sapien
tcagatcaccccaatggctccggtg

SEQ ID NO: 5338145 - DNA, 25 bp, Homo sapien
ggtggctctaatttgtcctttcaca

SEQ ID NO: 5338146 - DNA, 25 bp, Homo sapien
ttctagcaccacttgcggaaggaga

SEQ ID NO: 5338147 - DNA, 25 bp, Homo sapien
acatccctgagtccttgaacagaac

SEQ ID NO: 5338148 - DNA, 25 bp, Homo sapien
gtctgggctgatcttgactctccat

SEQ ID NO: 5338149 - DNA, 25 bp, Homo sapien
aaattcagtaacactggagccttca

SEQ ID NO: 5338150 - DNA, 25 bp, Homo sapien
ttggcaagccgagtaaaaattcagt

SEQ ID NO: 5338151 - DNA, 25 bp, Homo sapien
tgggccctccctgatatggagctga

SEQ ID NO: 5338152 - DNA, 25 bp, Homo sapien
tggagccttcacaacccatgtctct

SEQ ID NO: 5338153 - DNA, 25 bp, Homo sapien
aatttttatctttcaatcatgtctc

SEQ ID NO: 5338154 - DNA, 25 bp, Homo sapien
ttttaattaggtgaaggatatgtta

SEQ ID NO: 5338155 - DNA, 25 bp, Homo sapien
tctttcaatcatgtctcagtaaagt

SEQ ID NO: 5338156 - DNA, 25 bp, Homo sapien
ttaattagctaaactgtgataatca

SEQ ID NO: 5338157 - DNA, 25 bp, Homo sapien
tctggcaggattatactgggtagct

SEQ ID NO: 5338158 - DNA, 25 bp, Homo sapien
gagtgttgttgctgatccatgcagc

SEQ ID NO: 5338159 - DNA, 25 bp, Homo sapien
gagagtttacagaggccaattttga

SEQ ID NO: 5338160 - DNA, 25 bp, Homo sapien
ggctcaccacaaggtatctggcagg

SEQ ID NO: 5338161 - DNA, 25 bp, Homo sapien
gggctgtctttaggattatctgaat

SEQ ID NO: 5338162 - DNA, 25 bp, Homo sapien
gctgagataacctctcaaaagaacc

SEQ ID NO: 5338163 - DNA, 25 bp, Homo sapien
tagtcatctaactactgtcaacaag

SEQ ID NO: 5338164 - DNA, 25 bp, Homo sapien
tcttcttatggttgaaagagggact

SEQ ID NO: 5338165 - DNA, 25 bp, Homo sapien
gggattatagttaacatcctacact

SEQ ID NO: 5338166 - DNA, 25 bp, Homo sapien
ttggagctatagtctcttgtagaca

SEQ ID NO: 5338167 - DNA, 25 bp, Homo sapien
ttgtagacagcatatcactatcttg

SEQ ID NO: 5338168 - DNA, 25 bp, Homo sapien
tagtgaactagtctgattctctttc

SEQ ID NO: 5338169 - DNA, 25 bp, Homo sapien
tatgtttgaacatcataacgtggtg

SEQ ID NO: 5338170 - DNA, 25 bp, Homo sapien
tgttcagatcaactgttgaactcct

SEQ ID NO: 5338171 - DNA, 25 bp, Homo sapien
ggtggccctgaaaatcagatattcc

SEQ ID NO: 5338172 - DNA, 25 bp, Homo sapien
aacgtctgtgtctttattgatattc

SEQ ID NO: 5338173 - DNA, 25 bp, Homo sapien
tatgactatgtcttctagaacaatg

SEQ ID NO: 5338174 - DNA, 25 bp, Homo sapien
ggatgtctggccaactaatgactat

SEQ ID NO: 5338175 - DNA, 25 bp, Homo sapien
aaggctcctatgtgccgatgctgta

SEQ ID NO: 5338176 - DNA, 25 bp, Homo sapien
tttacaacaagcttgttgccaaggc

SEQ ID NO: 5338177 - DNA, 25 bp, Homo sapien
cagtatatgataaaaaccttaacgt

SEQ ID NO: 5338178 - DNA, 25 bp, Homo sapien
taacgttcaaactccaggtataatg

SEQ ID NO: 5338179 - DNA, 25 bp, Homo sapien
tttgttcttgctagttgtgttcccc

SEQ ID NO: 5338180 - DNA, 25 bp, Homo sapien
tgtatcatatatggcatttctgagg

SEQ ID NO: 5338181 - DNA, 25 bp, Homo sapien
gataatttgacaatcggcacatgcc

SEQ ID NO: 5338182 - DNA, 25 bp, Homo sapien
ggccaaacatggttgctcaagcctg

SEQ ID NO: 5338183 - DNA, 25 bp, Homo sapien
gggaaacacgttgagctcttaaagc

SEQ ID NO: 5338184 - DNA, 25 bp, Homo sapien
gctggtagggattcattggcactca

SEQ ID NO: 5338185 - DNA, 25 bp, Homo sapien
aaaggaactgagtgtaactatatta

SEQ ID NO: 5338186 - DNA, 25 bp, Homo sapien
aaggaactgagtgtaactatattaa

SEQ ID NO: 5338187 - DNA, 25 bp, Homo sapien
aggaactgagtgtaactatattaaa

SEQ ID NO: 5338188 - DNA, 25 bp, Homo sapien
aagaattatttcttcgacttcatcc

SEQ ID NO: 5338189 - DNA, 25 bp, Homo sapien
tagtgatttaagatggtctaggtga

SEQ ID NO: 5338190 - DNA, 25 bp, Homo sapien
gatgctctcctatgaaggattctgc

SEQ ID NO: 5338191 - DNA, 25 bp, Homo sapien
atgaaggattctgcttgattcaaag

SEQ ID NO: 5338192 - DNA, 25 bp, Homo sapien
ccttaagccaatatctaaagtagca

SEQ ID NO: 5338193 - DNA, 25 bp, Homo sapien
gaacagcggtcaattcagaacctga

SEQ ID NO: 5338194 - DNA, 25 bp, Homo sapien
tactgtaaaaggtagaaaagcatat

SEQ ID NO: 5338195 - DNA, 25 bp, Homo sapien
gatcattagtggatgtattctggca

SEQ ID NO: 5338196 - DNA, 25 bp, Homo sapien
tgtggaatagatgtcctcatggcag

SEQ ID NO: 5338197 - DNA, 25 bp, Homo sapien
gtggaatagatgtcctcatggcaga

SEQ ID NO: 5338198 - DNA, 25 bp, Homo sapien
gctgtggaatagatgtcctcatggc

SEQ ID NO: 5338199 - DNA, 25 bp, Homo sapien
ctgtggaatagatgtcctcatggca

SEQ ID NO: 5338200 - DNA, 25 bp, Homo sapien
ggtgtggcattgagaagtgctataa

SEQ ID NO: 5338201 - DNA, 25 bp, Homo sapien
aataaggtaacgatttagcagcttc

SEQ ID NO: 5338202 - DNA, 25 bp, Homo sapien
ttagcagcttccctagtcctagttc

SEQ ID NO: 5338203 - DNA, 25 bp, Homo sapien
ccctagtcctagttcttgcaaggtg

SEQ ID NO: 5338204 - DNA, 25 bp, Homo sapien
ctgtaaggagtccattccaaagaag

SEQ ID NO: 5338205 - DNA, 25 bp, Homo sapien
ccattccaaagaagaatattgcgga

SEQ ID NO: 5338206 - DNA, 25 bp, Homo sapien
tccaaagaagaatattgcggaagag

SEQ ID NO: 5338207 - DNA, 25 bp, Homo sapien
cattccaaagaagaatattgcggaa

SEQ ID NO: 5338208 - DNA, 25 bp, Homo sapien
gactgtttttgtgctacagcggcag

SEQ ID NO: 5338209 - DNA, 25 bp, Homo sapien
taattcgacagagaccatgtgacca

SEQ ID NO: 5338210 - DNA, 25 bp, Homo sapien
tatagcttgtgggttaaatccatcc

SEQ ID NO: 5338211 - DNA, 25 bp, Homo sapien
tatagggtccgtgagctaagaatgg

SEQ ID NO: 5338212 - DNA, 25 bp, Homo sapien
aactgtctttcttggaactttgaat

SEQ ID NO: 5338213 - DNA, 25 bp, Homo sapien
ctttaggcctgaccagaactgtctt

SEQ ID NO: 5338214 - DNA, 25 bp, Homo sapien
ctttgaatgaggtgatgttttgttt

SEQ ID NO: 5338215 - DNA, 25 bp, Homo sapien
tttaggcctgaccagaactgtcttt

SEQ ID NO: 5338216 - DNA, 25 bp, Homo sapien
attagaaacaaacgaaagagaagag

SEQ ID NO: 5338217 - DNA, 25 bp, Homo sapien
ctaagccttaatggaatataaatag

SEQ ID NO: 5338218 - DNA, 25 bp, Homo sapien
caaccaaactaagccttaatggaat

SEQ ID NO: 5338219 - DNA, 25 bp, Homo sapien
gaaaatgcaaagaactattagtctt

SEQ ID NO: 5338220 - DNA, 25 bp, Homo sapien
cacggctttatgtaagtcactgaga

SEQ ID NO: 5338221 - DNA, 25 bp, Homo sapien
ttgaaaacactatagttggccgggc

SEQ ID NO: 5338222 - DNA, 25 bp, Homo sapien
tctaagcgccaagataaagcacggc

SEQ ID NO: 5338223 - DNA, 25 bp, Homo sapien
aggtgcagtttctcgttcctcagca

SEQ ID NO: 5338224 - DNA, 25 bp, Homo sapien
catcatcttctactgcctttttcat

SEQ ID NO: 5338225 - DNA, 25 bp, Homo sapien
gaataaaaacatcatcttctactgc

SEQ ID NO: 5338226 - DNA, 25 bp, Homo sapien
tctttggatacagaggaataaaaac

SEQ ID NO: 5338227 - DNA, 25 bp, Homo sapien
tacagaggaataaaaacatcatctt

SEQ ID NO: 5338228 - DNA, 25 bp, Homo sapien
tcttgaaacaatggatttaagtaaa

SEQ ID NO: 5338229 - DNA, 25 bp, Homo sapien
ttgaaacaatggatttaagtaaatc

SEQ ID NO: 5338230 - DNA, 25 bp, Homo sapien
cttgaaacaatggatttaagtaaat

SEQ ID NO: 5338231 - DNA, 25 bp, Homo sapien
gagatgttacatcgctccagtgaat

SEQ ID NO: 5338232 - DNA, 25 bp, Homo sapien
tcttttatatactccagctgtgggt

SEQ ID NO: 5338233 - DNA, 25 bp, Homo sapien
caattatagtgggtatgcagtcata

SEQ ID NO: 5338234 - DNA, 25 bp, Homo sapien
ggcaagccgttttgcaaagtaccta

SEQ ID NO: 5338235 - DNA, 25 bp, Homo sapien
taggtagccaatgccctactggcca

SEQ ID NO: 5338236 - DNA, 25 bp, Homo sapien
tattaccaggcattagcttacagca

SEQ ID NO: 5338237 - DNA, 25 bp, Homo sapien
tactaacagactccccataggtagc

SEQ ID NO: 5338238 - DNA, 25 bp, Homo sapien
ttttaaacgcatgggtgggacatgc

SEQ ID NO: 5338239 - DNA, 25 bp, Homo sapien
ttcacaagtggaatgttcttcaaga

SEQ ID NO: 5338240 - DNA, 25 bp, Homo sapien
tgtctgtgaggttgacaaaggatcc

SEQ ID NO: 5338241 - DNA, 25 bp, Homo sapien
cttcaagaatcactctgcaatgtgt

SEQ ID NO: 5338242 - DNA, 25 bp, Homo sapien
tgttattaaacttgttgtctgtgag

SEQ ID NO: 5338243 - DNA, 25 bp, Homo sapien
tctccctctcacctagatgattact

SEQ ID NO: 5338244 - DNA, 25 bp, Homo sapien
ttcataccttctcccctctccgtta

SEQ ID NO: 5338245 - DNA, 25 bp, Homo sapien
cttctcccctctccgttatctctct

SEQ ID NO: 5338246 - DNA, 25 bp, Homo sapien
tctcacctagatgattacttcatac

SEQ ID NO: 5338247 - DNA, 25 bp, Homo sapien
gccggtttatgcctcacagtgtaaa

SEQ ID NO: 5338248 - DNA, 25 bp, Homo sapien
caccgggaagttcgacctgggcaga

SEQ ID NO: 5338249 - DNA, 25 bp, Homo sapien
gatgcttcagcttggtaggcggagg

SEQ ID NO: 5338250 - DNA, 25 bp, Homo sapien
gctgaggcttcagtagccggtttat

SEQ ID NO: 5338251 - DNA, 25 bp, Homo sapien
accagaatgcccgttcttcaaagaa

SEQ ID NO: 5338252 - DNA, 25 bp, Homo sapien
gcatctggcggatgaccctctgaga

SEQ ID NO: 5338253 - DNA, 25 bp, Homo sapien
tggcggatgaccctctgagacgaag

SEQ ID NO: 5338254 - DNA, 25 bp, Homo sapien
tgtaccctaagagaccccatctgaa

SEQ ID NO: 5338255 - DNA, 25 bp, Homo sapien
gattgcagacaagacttttttatct

SEQ ID NO: 5338256 - DNA, 25 bp, Homo sapien
tgatgattgcagacaagactttttt

SEQ ID NO: 5338257 - DNA, 25 bp, Homo sapien
gacaagacttttttatctgaactac

SEQ ID NO: 5338258 - DNA, 25 bp, Homo sapien
gcagacaagacttttttatctgaac

SEQ ID NO: 5338259 - DNA, 25 bp, Homo sapien
gatttgaaccatggcatctctttta

SEQ ID NO: 5338260 - DNA, 25 bp, Homo sapien
ttgttaggcacttgaaacagccatg

SEQ ID NO: 5338261 - DNA, 25 bp, Homo sapien
catggcaagtactctgcttggagca

SEQ ID NO: 5338262 - DNA, 25 bp, Homo sapien
ggagcctttagaccctaccacatgg

SEQ ID NO: 5338263 - DNA, 25 bp, Homo sapien
caactacctagtgtgtgccggagcc

SEQ ID NO: 5338264 - DNA, 25 bp, Homo sapien
cagtaccttatactttctgggagga

SEQ ID NO: 5338265 - DNA, 25 bp, Homo sapien
taatgcctaacacaatagtaaggga

SEQ ID NO: 5338266 - DNA, 25 bp, Homo sapien
gaaaagaagaatgtagccgaaagca

SEQ ID NO: 5338267 - DNA, 25 bp, Homo sapien
taaatttcagctccgactctaaggg

SEQ ID NO: 5338268 - DNA, 25 bp, Homo sapien
gctttggtatgcataaactaatgaa

SEQ ID NO: 5338269 - DNA, 25 bp, Homo sapien
gaaagcttcataataggagtcagga

SEQ ID NO: 5338270 - DNA, 25 bp, Homo sapien
tcaatcaactgaactcgtattaggg

SEQ ID NO: 5338271 - DNA, 25 bp, Homo sapien
ggaaacttttctcgccattgctgaa

SEQ ID NO: 5338272 - DNA, 25 bp, Homo sapien
ctctgctgaaggcagttcatcatca

SEQ ID NO: 5338273 - DNA, 25 bp, Homo sapien
tgaaggcagttcatcatcactagat

SEQ ID NO: 5338274 - DNA, 25 bp, Homo sapien
ttcctgatggttacaattcccagaa

SEQ ID NO: 5338275 - DNA, 25 bp, Homo sapien
tttttggaagtcaatcatctctgct

SEQ ID NO: 5338276 - DNA, 25 bp, Homo sapien
gttaatgacatcatgtggttaatta

SEQ ID NO: 5338277 - DNA, 25 bp, Homo sapien
tcaatgatgctttctttaaatcttc

SEQ ID NO: 5338278 - DNA, 25 bp, Homo sapien
ttctttaaatcttcactttatatag

SEQ ID NO: 5338279 - DNA, 25 bp, Homo sapien
gatgctttctttaaatcttcacttt

SEQ ID NO: 5338280 - DNA, 25 bp, Homo sapien
ttaaatcttcactttatataggtac

SEQ ID NO: 5338281 - DNA, 25 bp, Homo sapien
agtttccacttgtggatgtctcatc

SEQ ID NO: 5338282 - DNA, 25 bp, Homo sapien
tccacttgtggatgtctcatctttg

SEQ ID NO: 5338283 - DNA, 25 bp, Homo sapien
ccacttgtggatgtctcatctttgc

SEQ ID NO: 5338284 - DNA, 25 bp, Homo sapien
tttccacttgtggatgtctcatctt

SEQ ID NO: 5338285 - DNA, 25 bp, Homo sapien
gcctccagaattatgtgaacttgtc

SEQ ID NO: 5338286 - DNA, 25 bp, Homo sapien
gaagttagacttctgacagagcctc

SEQ ID NO: 5338287 - DNA, 25 bp, Homo sapien
tgtatggaacacgaaaaacactaac

SEQ ID NO: 5338288 - DNA, 25 bp, Homo sapien
aacattctctaaatggctatgtaca

SEQ ID NO: 5338289 - DNA, 25 bp, Homo sapien
ttgtaaatacgttgattcatgtttt

SEQ ID NO: 5338290 - DNA, 25 bp, Homo sapien
acgttgattcatgttttaattcatc

SEQ ID NO: 5338291 - DNA, 25 bp, Homo sapien
aatacgttgattcatgttttaattc

SEQ ID NO: 5338292 - DNA, 25 bp, Homo sapien
tgattcatgttttaattcatcttgc

SEQ ID NO: 5338293 - DNA, 25 bp, Homo sapien
ctgcgtttcataaaggtcatagctt

SEQ ID NO: 5338294 - DNA, 25 bp, Homo sapien
tttaaaaggagtgcatgcatggatg

SEQ ID NO: 5338295 - DNA, 25 bp, Homo sapien
gttttaaaaggagtgcatgcatgga

SEQ ID NO: 5338296 - DNA, 25 bp, Homo sapien
cgtttcataaaggtcatagcttgtt

SEQ ID NO: 5338297 - DNA, 25 bp, Homo sapien
aacagacaactgaaggcctgcccca

SEQ ID NO: 5338298 - DNA, 25 bp, Homo sapien
gacaaaactggtaagttcacattaa

SEQ ID NO: 5338299 - DNA, 25 bp, Homo sapien
tgccccaatgtaaaaacttagtatg

SEQ ID NO: 5338300 - DNA, 25 bp, Homo sapien
tcacattaagtaggataaaacatta

SEQ ID NO: 5338301 - DNA, 25 bp, Homo sapien
actctctaggttctggatggtactc

SEQ ID NO: 5338302 - DNA, 25 bp, Homo sapien
agcttgatttgatgaactctctagg

SEQ ID NO: 5338303 - DNA, 25 bp, Homo sapien
ccctcaggtgtgagcggtgagtttc

SEQ ID NO: 5338304 - DNA, 25 bp, Homo sapien
cgtatttttcatactccctcaggtg

SEQ ID NO: 5338305 - DNA, 25 bp, Homo sapien
tagtatttaattgcttctttataat

SEQ ID NO: 5338306 - DNA, 25 bp, Homo sapien
ttaattgcttctttataatttctaa

SEQ ID NO: 5338307 - DNA, 25 bp, Homo sapien
ctagtatttaattgcttctttataa

SEQ ID NO: 5338308 - DNA, 25 bp, Homo sapien
aattgcttctttataatttctaaat

SEQ ID NO: 5338309 - DNA, 25 bp, Homo sapien
cattgccacaggaaagatctatgtc

SEQ ID NO: 5338310 - DNA, 25 bp, Homo sapien
atccattgccacaggaaagatctat

SEQ ID NO: 5338311 - DNA, 25 bp, Homo sapien
tgccacaggaaagatctatgtctct

SEQ ID NO: 5338312 - DNA, 25 bp, Homo sapien
gatccattgccacaggaaagatcta

SEQ ID NO: 5338313 - DNA, 25 bp, Homo sapien
tctacgcatatctacaaaatctcca

SEQ ID NO: 5338314 - DNA, 25 bp, Homo sapien
cttgatattttgcagtcaataaccc

SEQ ID NO: 5338315 - DNA, 25 bp, Homo sapien
catccagctctacgcatatctacaa

SEQ ID NO: 5338316 - DNA, 25 bp, Homo sapien
caataacccattcaaatatcaccac

SEQ ID NO: 5338317 - DNA, 25 bp, Homo sapien
gttcccaagtatcttgcttttcatc

SEQ ID NO: 5338318 - DNA, 25 bp, Homo sapien
tctatgattttaactgctttcctca

SEQ ID NO: 5338319 - DNA, 25 bp, Homo sapien
taactgctttcctcatttgctgttg

SEQ ID NO: 5338320 - DNA, 25 bp, Homo sapien
tcatttgctgttgttcccaagtatc

SEQ ID NO: 5338321 - DNA, 25 bp, Homo sapien
ctcacatgtaaacgtttagtatttt

SEQ ID NO: 5338322 - DNA, 25 bp, Homo sapien
aagctcacatgtaaacgtttagtat

SEQ ID NO: 5338323 - DNA, 25 bp, Homo sapien
aaagctcacatgtaaacgtttagta

SEQ ID NO: 5338324 - DNA, 25 bp, Homo sapien
gctcacatgtaaacgtttagtattt

SEQ ID NO: 5338325 - DNA, 25 bp, Homo sapien
agaggaaattttttattacagcagg

SEQ ID NO: 5338326 - DNA, 25 bp, Homo sapien
gtagaggaaattttttattacagca

SEQ ID NO: 5338327 - DNA, 25 bp, Homo sapien
tagaggaaattttttattacagcag

SEQ ID NO: 5338328 - DNA, 25 bp, Homo sapien
tcttttagaggtcacaatatcatgg

SEQ ID NO: 5338329 - DNA, 25 bp, Homo sapien
catggaccaaatcgatgttaaaaac

SEQ ID NO: 5338330 - DNA, 25 bp, Homo sapien
ggtgggaggtcaggcattaataaac

SEQ ID NO: 5338331 - DNA, 25 bp, Homo sapien
gctttgaaagtaagatactgcacat

SEQ ID NO: 5338332 - DNA, 25 bp, Homo sapien
taatcttcatatattggtaaatcca

SEQ ID NO: 5338333 - DNA, 25 bp, Homo sapien
tcttcatatattggtaaatccatac

SEQ ID NO: 5338334 - DNA, 25 bp, Homo sapien
ctaatcttcatatattggtaaatcc

SEQ ID NO: 5338335 - DNA, 25 bp, Homo sapien
aatcttcatatattggtaaatccat

SEQ ID NO: 5338336 - DNA, 25 bp, Homo sapien
taaatggtattctcttttcatggtc

SEQ ID NO: 5338337 - DNA, 25 bp, Homo sapien
tttgtctaagtgtttgaggtcttag

SEQ ID NO: 5338338 - DNA, 25 bp, Homo sapien
cctttgtctaagtgtttgaggtctt

SEQ ID NO: 5338339 - DNA, 25 bp, Homo sapien
atcctttgtctaagtgtttgaggtc

SEQ ID NO: 5338340 - DNA, 25 bp, Homo sapien
tctcagggtcatcttcgctctctct

SEQ ID NO: 5338341 - DNA, 25 bp, Homo sapien
ggtcatcttcgctctctctcttcat

SEQ ID NO: 5338342 - DNA, 25 bp, Homo sapien
gggtcatcttcgctctctctcttca

SEQ ID NO: 5338343 - DNA, 25 bp, Homo sapien
cagggtcatcttcgctctctctctt

SEQ ID NO: 5338344 - DNA, 25 bp, Homo sapien
ctggccaattcacgttttctgcggg

SEQ ID NO: 5338345 - DNA, 25 bp, Homo sapien
aatatagtcatcttgggccctggcc

SEQ ID NO: 5338346 - DNA, 25 bp, Homo sapien
gaggtatgttgtacatccaaagaaa

SEQ ID NO: 5338347 - DNA, 25 bp, Homo sapien
tttctgcgggctgcctgaataaaag

SEQ ID NO: 5338348 - DNA, 25 bp, Homo sapien
cacaagttgacccaaattctttgag

SEQ ID NO: 5338349 - DNA, 25 bp, Homo sapien
taaaaagatgtcaagctactgaggc

SEQ ID NO: 5338350 - DNA, 25 bp, Homo sapien
gaaacagcgagagaaattttcacca

SEQ ID NO: 5338351 - DNA, 25 bp, Homo sapien
ttaaaacgagtttcttcatgcatga

SEQ ID NO: 5338352 - DNA, 25 bp, Homo sapien
gatgggcaattcactgcgctgaact

SEQ ID NO: 5338353 - DNA, 25 bp, Homo sapien
gaggcagttattcatcggaacacaa

SEQ ID NO: 5338354 - DNA, 25 bp, Homo sapien
tcttcgccagccaataagtccttcg

SEQ ID NO: 5338355 - DNA, 25 bp, Homo sapien
gatatgcaatcatctagggctgaga

SEQ ID NO: 5338356 - DNA, 25 bp, Homo sapien
tgattaagaagaatacaggctccag

SEQ ID NO: 5338357 - DNA, 25 bp, Homo sapien
gaatcctagccctgctacttataag

SEQ ID NO: 5338358 - DNA, 25 bp, Homo sapien
tacttataagctgtctgacctgtgc

SEQ ID NO: 5338359 - DNA, 25 bp, Homo sapien
tcaagtatcaatgtcaatcacccag

SEQ ID NO: 5338360 - DNA, 25 bp, Homo sapien
aaccctgatcatccttactttctga

SEQ ID NO: 5338361 - DNA, 25 bp, Homo sapien
gatcatccttactttctgaggagtg

SEQ ID NO: 5338362 - DNA, 25 bp, Homo sapien
gacaaaccctgatcatccttacttt

SEQ ID NO: 5338363 - DNA, 25 bp, Homo sapien
gaagacaaaccctgatcatccttac

SEQ ID NO: 5338364 - DNA, 25 bp, Homo sapien
caaaaggcagatgcagatagcgggc

SEQ ID NO: 5338365 - DNA, 25 bp, Homo sapien
agagcctcccaactgtacacgattg

SEQ ID NO: 5338366 - DNA, 25 bp, Homo sapien
actgatggagtcaactgatggtgaa

SEQ ID NO: 5338367 - DNA, 25 bp, Homo sapien
tgatggtgaaaacgaagagcctccc

SEQ ID NO: 5338368 - DNA, 25 bp, Homo sapien
ggtcggcagcaagttatagaacccc

SEQ ID NO: 5338369 - DNA, 25 bp, Homo sapien
aggatccagagaccccgcggcccct

SEQ ID NO: 5338370 - DNA, 25 bp, Homo sapien
cagcatggcttgtggtcggcagcaa

SEQ ID NO: 5338371 - DNA, 25 bp, Homo sapien
atagaacccccagagaaggatccag

SEQ ID NO: 5338372 - DNA, 25 bp, Homo sapien
ctgagccttcgtccgcgcggggagc

SEQ ID NO: 5338373 - DNA, 25 bp, Homo sapien
acgccgggagctcgcccagacccgg

SEQ ID NO: 5338374 - DNA, 25 bp, Homo sapien
gggagccgctttggtggcacgccgg

SEQ ID NO: 5338375 - DNA, 25 bp, Homo sapien
ggcggctcttcctccgcagaacccg

SEQ ID NO: 5338376 - DNA, 25 bp, Homo sapien
ccgcgcgctgccgaaaagtcctttt

SEQ ID NO: 5338377 - DNA, 25 bp, Homo sapien
gcgcgctgccgaaaagtccttttcg

SEQ ID NO: 5338378 - DNA, 25 bp, Homo sapien
tgtcgctggaatcagccgcgcgctg

SEQ ID NO: 5338379 - DNA, 25 bp, Homo sapien
catcgctgtcgctggaatcagccgc

SEQ ID NO: 5338380 - DNA, 25 bp, Homo sapien
ttagagattttcacggcctatccgg

SEQ ID NO: 5338381 - DNA, 25 bp, Homo sapien
ccaggttaggttgcgtggactgaca

SEQ ID NO: 5338382 - DNA, 25 bp, Homo sapien
ccctggatctggtaggccgagttct

SEQ ID NO: 5338383 - DNA, 25 bp, Homo sapien
tatccggtctgagtcccacggagag

SEQ ID NO: 5338384 - DNA, 25 bp, Homo sapien
ctgctggcctaagagtgacattttc

SEQ ID NO: 5338385 - DNA, 25 bp, Homo sapien
ctgtctgctggcctaagagtgacat

SEQ ID NO: 5338386 - DNA, 25 bp, Homo sapien
cctgatttctgtctgctggcctaag

SEQ ID NO: 5338387 - DNA, 25 bp, Homo sapien
tttctgtctgctggcctaagagtga

SEQ ID NO: 5338388 - DNA, 25 bp, Homo sapien
catggagctgtttcaaattcacaga

SEQ ID NO: 5338389 - DNA, 25 bp, Homo sapien
ggagctgtttcaaattcacagagtc

SEQ ID NO: 5338390 - DNA, 25 bp, Homo sapien
tggagctgtttcaaattcacagagt

SEQ ID NO: 5338391 - DNA, 25 bp, Homo sapien
tcatggagctgtttcaaattcacag

SEQ ID NO: 5338392 - DNA, 25 bp, Homo sapien
ttaaaatgactggcgatgaatcctt

SEQ ID NO: 5338393 - DNA, 25 bp, Homo sapien
taaaatgactggcgatgaatccttc

SEQ ID NO: 5338394 - DNA, 25 bp, Homo sapien
cagaaatgaaagggcggaaaggtgg

SEQ ID NO: 5338395 - DNA, 25 bp, Homo sapien
ccagaaatgaaagggcggaaaggtg

SEQ ID NO: 5338396 - DNA, 25 bp, Homo sapien
ctgggaagaaagcagtcggcaggtc

SEQ ID NO: 5338397 - DNA, 25 bp, Homo sapien
agaaagcagtcggcaggtccctgtg

SEQ ID NO: 5338398 - DNA, 25 bp, Homo sapien
ggaagaaagcagtcggcaggtccct

SEQ ID NO: 5338399 - DNA, 25 bp, Homo sapien
gaagaaagcagtcggcaggtccctg

SEQ ID NO: 5338400 - DNA, 25 bp, Homo sapien
tgggagtcctacacacggaattctg

SEQ ID NO: 5338401 - DNA, 25 bp, Homo sapien
tactggagcactaaagaactcctta

SEQ ID NO: 5338402 - DNA, 25 bp, Homo sapien
gcttgcagataatcctccaggtaac

SEQ ID NO: 5338403 - DNA, 25 bp, Homo sapien
tcatcagaggcagctaagcttgcag

SEQ ID NO: 5338404 - DNA, 25 bp, Homo sapien
tctcggtgccttccttggtagtttg

SEQ ID NO: 5338405 - DNA, 25 bp, Homo sapien
tctctgtgagtatctcggtgccttc

SEQ ID NO: 5338406 - DNA, 25 bp, Homo sapien
ctacatctctgtgagtatctcggtg

SEQ ID NO: 5338407 - DNA, 25 bp, Homo sapien
gagtatctcggtgccttccttggta

SEQ ID NO: 5338408 - DNA, 25 bp, Homo sapien
tcctagtcgtttggtaatagctaca

SEQ ID NO: 5338409 - DNA, 25 bp, Homo sapien
tgggtcctgtcctagtcgtttggta

SEQ ID NO: 5338410 - DNA, 25 bp, Homo sapien
gtcctgtcctagtcgtttggtaata

SEQ ID NO: 5338411 - DNA, 25 bp, Homo sapien
cctgtcctagtcgtttggtaatagc

SEQ ID NO: 5338412 - DNA, 25 bp, Homo sapien
gcctctaattcgtgagttttagcta

SEQ ID NO: 5338413 - DNA, 25 bp, Homo sapien
aattcgtgagttttagctacagcag

SEQ ID NO: 5338414 - DNA, 25 bp, Homo sapien
gatttgcaaacacccaggcatttct

SEQ ID NO: 5338415 - DNA, 25 bp, Homo sapien
tttgcaaacacccaggcatttcttt

SEQ ID NO: 5338416 - DNA, 25 bp, Homo sapien
agggtaatttctgcctggtgtgttc

SEQ ID NO: 5338417 - DNA, 25 bp, Homo sapien
tccagggtaatttctgcctggtgtg

SEQ ID NO: 5338418 - DNA, 25 bp, Homo sapien
aggactccagggtaatttctgcctg

SEQ ID NO: 5338419 - DNA, 25 bp, Homo sapien
tgtgttcagtgccttttacccccat

SEQ ID NO: 5338420 - DNA, 25 bp, Homo sapien
tactgtagatgctgttttgctgcca

SEQ ID NO: 5338421 - DNA, 25 bp, Homo sapien
ctggcacctccaccagtgttgtcat

SEQ ID NO: 5338422 - DNA, 25 bp, Homo sapien
gtactgtagatgctgttttgctgcc

SEQ ID NO: 5338423 - DNA, 25 bp, Homo sapien
ctgtagatgctgttttgctgccaaa

SEQ ID NO: 5338424 - DNA, 25 bp, Homo sapien
tgcactaggcatacatgtgaaccag

SEQ ID NO: 5338425 - DNA, 25 bp, Homo sapien
gctacataagaagtatggtgccagc

SEQ ID NO: 5338426 - DNA, 25 bp, Homo sapien
catctggtcagttgctagcgagacc

SEQ ID NO: 5338427 - DNA, 25 bp, Homo sapien
caaccagctctggtgtgaagtcaaa

SEQ ID NO: 5338428 - DNA, 25 bp, Homo sapien
cttcaccacaggagtatatgttccc

SEQ ID NO: 5338429 - DNA, 25 bp, Homo sapien
gttcttcaccacaggagtatatgtt

SEQ ID NO: 5338430 - DNA, 25 bp, Homo sapien
tgttcttcaccacaggagtatatgt

SEQ ID NO: 5338431 - DNA, 25 bp, Homo sapien
tcttcaccacaggagtatatgttcc

SEQ ID NO: 5338432 - DNA, 25 bp, Homo sapien
tcctcaccgacaatccgactccgac

SEQ ID NO: 5338433 - DNA, 25 bp, Homo sapien
ctttgcctcctcaccgacaatccga

SEQ ID NO: 5338434 - DNA, 25 bp, Homo sapien
cctcctcaccgacaatccgactccg

SEQ ID NO: 5338435 - DNA, 25 bp, Homo sapien
tgcctcctcaccgacaatccgactc

SEQ ID NO: 5338436 - DNA, 25 bp, Homo sapien
aatccagctgcctgattcttgaagc

SEQ ID NO: 5338437 - DNA, 25 bp, Homo sapien
tgggctgtcaccagttcaccagact

SEQ ID NO: 5338438 - DNA, 25 bp, Homo sapien
aaaaataactccactgtgcttgggc

SEQ ID NO: 5338439 - DNA, 25 bp, Homo sapien
gctcctgtctgtgatgtcgcattca

SEQ ID NO: 5338440 - DNA, 25 bp, Homo sapien
taaattgggttgagagtgaagcaca

SEQ ID NO: 5338441 - DNA, 25 bp, Homo sapien
cctgtgacctgagaaagcatgatat

SEQ ID NO: 5338442 - DNA, 25 bp, Homo sapien
cagagatctaggtagtggaaactcc

SEQ ID NO: 5338443 - DNA, 25 bp, Homo sapien
cataaagcttccagtcacctgtgac

SEQ ID NO: 5338444 - DNA, 25 bp, Homo sapien
gaggacttgcctgggtatatgggca

SEQ ID NO: 5338445 - DNA, 25 bp, Homo sapien
cagcagcttgtggaggacttgcctg

SEQ ID NO: 5338446 - DNA, 25 bp, Homo sapien
ttgcctgggtatatgggcagctcat

SEQ ID NO: 5338447 - DNA, 25 bp, Homo sapien
gacttgcctgggtatatgggcagct

SEQ ID NO: 5338448 - DNA, 25 bp, Homo sapien
tctgtgatttaggatagtgtcctca

SEQ ID NO: 5338449 - DNA, 25 bp, Homo sapien
gtgtttatcatttcttgacttgtaa

SEQ ID NO: 5338450 - DNA, 25 bp, Homo sapien
ccgatctttctgtgtttatcatttc

SEQ ID NO: 5338451 - DNA, 25 bp, Homo sapien
aagctctgtgatttaggatagtgtc

SEQ ID NO: 5338452 - DNA, 25 bp, Homo sapien
tgcctctgccatctgaaatcaagct

SEQ ID NO: 5338453 - DNA, 25 bp, Homo sapien
ctgccatctgaaatcaagctccaca

SEQ ID NO: 5338454 - DNA, 25 bp, Homo sapien
gccatctgaaatcaagctccacatc

SEQ ID NO: 5338455 - DNA, 25 bp, Homo sapien
ctctgccatctgaaatcaagctcca

SEQ ID NO: 5338456 - DNA, 25 bp, Homo sapien
tgggtgaacttatacatacctctac

SEQ ID NO: 5338457 - DNA, 25 bp, Homo sapien
gcttatcaccttctttgggtgaact

SEQ ID NO: 5338458 - DNA, 25 bp, Homo sapien
tatgtccttcaccatagcgctgctc

SEQ ID NO: 5338459 - DNA, 25 bp, Homo sapien
gctctgagcagagttgcttatcacc

SEQ ID NO: 5338460 - DNA, 25 bp, Homo sapien
tgggtgaatttcaattaccgatggt

SEQ ID NO: 5338461 - DNA, 25 bp, Homo sapien
tcaacgtttgtacaagaactcccaa

SEQ ID NO: 5338462 - DNA, 25 bp, Homo sapien
tgaaagcattatcatcacacatggg

SEQ ID NO: 5338463 - DNA, 25 bp, Homo sapien
gatggtgccaccaattcagtgttct

SEQ ID NO: 5338464 - DNA, 25 bp, Homo sapien
gttgtgagtttatacacaggagttt

SEQ ID NO: 5338465 - DNA, 25 bp, Homo sapien
gatacttctcggtacagtccatagg

SEQ ID NO: 5338466 - DNA, 25 bp, Homo sapien
gtccataggtaaagaacctggcatg

SEQ ID NO: 5338467 - DNA, 25 bp, Homo sapien
tcaagatgacgctgctttgttcaga

SEQ ID NO: 5338468 - DNA, 25 bp, Homo sapien
agatcacaattacagtcttcgcaca

SEQ ID NO: 5338469 - DNA, 25 bp, Homo sapien
tagatcacaattacagtcttcgcac

SEQ ID NO: 5338470 - DNA, 25 bp, Homo sapien
tgaagtgataagcataagtgattct

SEQ ID NO: 5338471 - DNA, 25 bp, Homo sapien
agtgataagcataagtgattctgtt

SEQ ID NO: 5338472 - DNA, 25 bp, Homo sapien
gaagtgataagcataagtgattctg

SEQ ID NO: 5338473 - DNA, 25 bp, Homo sapien
tgataagcataagtgattctgttac

SEQ ID NO: 5338474 - DNA, 25 bp, Homo sapien
cctattgtggttatagccaaaccag

SEQ ID NO: 5338475 - DNA, 25 bp, Homo sapien
atctgtttggagtctctttatgaag

SEQ ID NO: 5338476 - DNA, 25 bp, Homo sapien
tcttatacctattgtggttatagcc

SEQ ID NO: 5338477 - DNA, 25 bp, Homo sapien
gatggactgtagcactaacatgagc

SEQ ID NO: 5338478 - DNA, 25 bp, Homo sapien
gtgttattgagatgtggcttagctt

SEQ ID NO: 5338479 - DNA, 25 bp, Homo sapien
gccagtgttattgagatgtggctta

SEQ ID NO: 5338480 - DNA, 25 bp, Homo sapien
cagtgttattgagatgtggcttagc

SEQ ID NO: 5338481 - DNA, 25 bp, Homo sapien
gttattgagatgtggcttagcttca

SEQ ID NO: 5338482 - DNA, 25 bp, Homo sapien
caaagatcttctggcgatagactga

SEQ ID NO: 5338483 - DNA, 25 bp, Homo sapien
ctggcgatagactgaattagaatca

SEQ ID NO: 5338484 - DNA, 25 bp, Homo sapien
ctgtagatcaaagatcttctggcga

SEQ ID NO: 5338485 - DNA, 25 bp, Homo sapien
gatcttctggcgatagactgaatta

SEQ ID NO: 5338486 - DNA, 25 bp, Homo sapien
tgtgttgtagttcagaaaaagattg

SEQ ID NO: 5338487 - DNA, 25 bp, Homo sapien
ttgtgttgtagttcagaaaaagatt

SEQ ID NO: 5338488 - DNA, 25 bp, Homo sapien
tgttgtagttcagaaaaagattgta

SEQ ID NO: 5338489 - DNA, 25 bp, Homo sapien
tggttgtgttgtagttcagaaaaag

SEQ ID NO: 5338490 - DNA, 25 bp, Homo sapien
gccacagaatccacaatagtagatg

SEQ ID NO: 5338491 - DNA, 25 bp, Homo sapien
aatcttatattctgtgcaagccgga

SEQ ID NO: 5338492 - DNA, 25 bp, Homo sapien
ttatattctgtgcaagccggagagc

SEQ ID NO: 5338493 - DNA, 25 bp, Homo sapien
cagaatccacaatagtagatggaaa

SEQ ID NO: 5338494 - DNA, 25 bp, Homo sapien
tatgattggctcatgcactggagga

SEQ ID NO: 5338495 - DNA, 25 bp, Homo sapien
cattcttacccttgtgatttatcaa

SEQ ID NO: 5338496 - DNA, 25 bp, Homo sapien
tctaattagtacatcccctaaggaa

SEQ ID NO: 5338497 - DNA, 25 bp, Homo sapien
caaggcttctctaattagtacatcc

SEQ ID NO: 5338498 - DNA, 25 bp, Homo sapien
gtctaccttctgcttgtacacacct

SEQ ID NO: 5338499 - DNA, 25 bp, Homo sapien
tctaccttctgcttgtacacacctg

SEQ ID NO: 5338500 - DNA, 25 bp, Homo sapien
gatgtttttgtagtctaccttctgc

SEQ ID NO: 5338501 - DNA, 25 bp, Homo sapien
ttgtacacacctgtgcactttgtaa

SEQ ID NO: 5338502 - DNA, 25 bp, Homo sapien
acatagatgctcatcgtagacaacc

SEQ ID NO: 5338503 - DNA, 25 bp, Homo sapien
aacatagatgctcatcgtagacaac

SEQ ID NO: 5338504 - DNA, 25 bp, Homo sapien
ccaagaacatagatgctcatcgtag

SEQ ID NO: 5338505 - DNA, 25 bp, Homo sapien
ttccaagaacatagatgctcatcgt

SEQ ID NO: 5338506 - DNA, 25 bp, Homo sapien
ttacttcttgcagagttcagattct

SEQ ID NO: 5338507 - DNA, 25 bp, Homo sapien
aggttttacttcttgcagagttcag

SEQ ID NO: 5338508 - DNA, 25 bp, Homo sapien
tttacttcttgcagagttcagattc

SEQ ID NO: 5338509 - DNA, 25 bp, Homo sapien
gttttacttcttgcagagttcagat

SEQ ID NO: 5338510 - DNA, 25 bp, Homo sapien
agcttcatagtcaaactctttttgc

SEQ ID NO: 5338511 - DNA, 25 bp, Homo sapien
tttatgattgtcagtagatctgtct

SEQ ID NO: 5338512 - DNA, 25 bp, Homo sapien
gatctgtctccagtaattctctaag

SEQ ID NO: 5338513 - DNA, 25 bp, Homo sapien
tctctgcaggacatttcagaacaca

SEQ ID NO: 5338514 - DNA, 25 bp, Homo sapien
gttactgtaacaacctcagacctgg

SEQ ID NO: 5338515 - DNA, 25 bp, Homo sapien
tgcttgtaaagattgcaggctaggg

SEQ ID NO: 5338516 - DNA, 25 bp, Homo sapien
gacctgtggagtgccaaagacattt

SEQ ID NO: 5338517 - DNA, 25 bp, Homo sapien
gctagaggatattgggcagtataac

SEQ ID NO: 5338518 - DNA, 25 bp, Homo sapien
tctccaaagtgtggcctaagcaccc

SEQ ID NO: 5338519 - DNA, 25 bp, Homo sapien
atgtgagcagcagacgggctttgct

SEQ ID NO: 5338520 - DNA, 25 bp, Homo sapien
tcagattctgggatattccagcatg

SEQ ID NO: 5338521 - DNA, 25 bp, Homo sapien
tccttttgttgtgccgtggtcaatg

SEQ ID NO: 5338522 - DNA, 25 bp, Homo sapien
caggtggacatttgtttgaggtagg

SEQ ID NO: 5338523 - DNA, 25 bp, Homo sapien
agcaggtggacatttgtttgaggta

SEQ ID NO: 5338524 - DNA, 25 bp, Homo sapien
gcaggtggacatttgtttgaggtag

SEQ ID NO: 5338525 - DNA, 25 bp, Homo sapien
aagcaggtggacatttgtttgaggt

SEQ ID NO: 5338526 - DNA, 25 bp, Homo sapien
ggatgaagataactgccggtcattt

SEQ ID NO: 5338527 - DNA, 25 bp, Homo sapien
gctgtagaactgacccataggctgc

SEQ ID NO: 5338528 - DNA, 25 bp, Homo sapien
tgccattgttatcacagcttccagg

SEQ ID NO: 5338529 - DNA, 25 bp, Homo sapien
gcctagaaggtatctcagcacacat

SEQ ID NO: 5338530 - DNA, 25 bp, Homo sapien
caggtatgacatccaagcaggaagc

SEQ ID NO: 5338531 - DNA, 25 bp, Homo sapien
cagttgtaggcatcagacgtggcag

SEQ ID NO: 5338532 - DNA, 25 bp, Homo sapien
gagcaggtacccatcatacaagtag

SEQ ID NO: 5338533 - DNA, 25 bp, Homo sapien
gacgtggcaggaaaatgaactccaa

SEQ ID NO: 5338534 - DNA, 25 bp, Homo sapien
ggccaccaagatgtttccacccaga

SEQ ID NO: 5338535 - DNA, 25 bp, Homo sapien
ccaagagtttcacagtggccaggac

SEQ ID NO: 5338536 - DNA, 25 bp, Homo sapien
gccaggacttgatgatagtgtcaca

SEQ ID NO: 5338537 - DNA, 25 bp, Homo sapien
ggtgtaaaggcattccaagagtttc

SEQ ID NO: 5338538 - DNA, 25 bp, Homo sapien
cttctatcagttgataaaacatcac

SEQ ID NO: 5338539 - DNA, 25 bp, Homo sapien
gttgatttccagatgtagctctcca

SEQ ID NO: 5338540 - DNA, 25 bp, Homo sapien
ttccagatgtagctctccagtaaga

SEQ ID NO: 5338541 - DNA, 25 bp, Homo sapien
gatttccagatgtagctctccagta

SEQ ID NO: 5338542 - DNA, 25 bp, Homo sapien
actggttgatttccagatgtagctc

SEQ ID NO: 5338543 - DNA, 25 bp, Homo sapien
gaatccctggatcttcatgtctgtg

SEQ ID NO: 5338544 - DNA, 25 bp, Homo sapien
atccctggatcttcatgtctgtgca

SEQ ID NO: 5338545 - DNA, 25 bp, Homo sapien
aatccctggatcttcatgtctgtgc

SEQ ID NO: 5338546 - DNA, 25 bp, Homo sapien
agacacagggacagccattagagac

SEQ ID NO: 5338547 - DNA, 25 bp, Homo sapien
ggcaccagggaagctagcccttgca

SEQ ID NO: 5338548 - DNA, 25 bp, Homo sapien
ggagaaggctcctcagagctaggct

SEQ ID NO: 5338549 - DNA, 25 bp, Homo sapien
ccagggaagctagcccttgcagagg

SEQ ID NO: 5338550 - DNA, 25 bp, Homo sapien
gttcactgagccctttgatagcact

SEQ ID NO: 5338551 - DNA, 25 bp, Homo sapien
actgagccctttgatagcactgcca

SEQ ID NO: 5338552 - DNA, 25 bp, Homo sapien
gagccctttgatagcactgccaaca

SEQ ID NO: 5338553 - DNA, 25 bp, Homo sapien
atgagttcactgagccctttgatag

SEQ ID NO: 5338554 - DNA, 25 bp, Homo sapien
taatcctaatagtaaatgtcacaac

SEQ ID NO: 5338555 - DNA, 25 bp, Homo sapien
tgtcacaactgggaccaattgttta

SEQ ID NO: 5338556 - DNA, 25 bp, Homo sapien
gtctctgaaatcaccagtccgcttc

SEQ ID NO: 5338557 - DNA, 25 bp, Homo sapien
ccagtccgcttctgcataagcacta

SEQ ID NO: 5338558 - DNA, 25 bp, Homo sapien
taagattctgcattgtatacacaag

SEQ ID NO: 5338559 - DNA, 25 bp, Homo sapien
tgtatacacaagctgtagtttgcat

SEQ ID NO: 5338560 - DNA, 25 bp, Homo sapien
ctgccaagaaaggagtttggcatct

SEQ ID NO: 5338561 - DNA, 25 bp, Homo sapien
ttggcatctgggaagtaagattctg

SEQ ID NO: 5338562 - DNA, 25 bp, Homo sapien
cccacgggattagaattggctcttt

SEQ ID NO: 5338563 - DNA, 25 bp, Homo sapien
gggattagaattggctcttttcctg

SEQ ID NO: 5338564 - DNA, 25 bp, Homo sapien
cacgggattagaattggctcttttc

SEQ ID NO: 5338565 - DNA, 25 bp, Homo sapien
aacccacgggattagaattggctct

SEQ ID NO: 5338566 - DNA, 25 bp, Homo sapien
tatttccaatgctatctttggccat

SEQ ID NO: 5338567 - DNA, 25 bp, Homo sapien
caatatttccaatgctatctttggc

SEQ ID NO: 5338568 - DNA, 25 bp, Homo sapien
aatatttccaatgctatctttggcc

SEQ ID NO: 5338569 - DNA, 25 bp, Homo sapien
atatttccaatgctatctttggcca

SEQ ID NO: 5338570 - DNA, 25 bp, Homo sapien
gccttaggactgtctccagcacctt

SEQ ID NO: 5338571 - DNA, 25 bp, Homo sapien
cttttctgccttaggactgtctcca

SEQ ID NO: 5338572 - DNA, 25 bp, Homo sapien
tctgccttaggactgtctccagcac

SEQ ID NO: 5338573 - DNA, 25 bp, Homo sapien
aggactgtctccagcaccttaggag

SEQ ID NO: 5338574 - DNA, 25 bp, Homo sapien
ctctctcaattggtaaataagtcca

SEQ ID NO: 5338575 - DNA, 25 bp, Homo sapien
tctctctcaattggtaaataagtcc

SEQ ID NO: 5338576 - DNA, 25 bp, Homo sapien
ctctcaattggtaaataagtccaaa

SEQ ID NO: 5338577 - DNA, 25 bp, Homo sapien
ttgcaggattttgtgttatagattc

SEQ ID NO: 5338578 - DNA, 25 bp, Homo sapien
aatgcgctggcatgattatggttca

SEQ ID NO: 5338579 - DNA, 25 bp, Homo sapien
tatctatctatcaagacagggctgc

SEQ ID NO: 5338580 - DNA, 25 bp, Homo sapien
taaagagcttgcagcatttaacaga

SEQ ID NO: 5338581 - DNA, 25 bp, Homo sapien
gactgatctcagattcatgggctga

SEQ ID NO: 5338582 - DNA, 25 bp, Homo sapien
taaagccgtaacctggagccagaga

SEQ ID NO: 5338583 - DNA, 25 bp, Homo sapien
ccagagacagttgcgggaatatcat

SEQ ID NO: 5338584 - DNA, 25 bp, Homo sapien
aggaaccaaggatggaggatgtaaa

SEQ ID NO: 5338585 - DNA, 25 bp, Homo sapien
gagccagagacagttgcgggaatat

SEQ ID NO: 5338586 - DNA, 25 bp, Homo sapien
gctgtttgaacaaaaggtgtctttc

SEQ ID NO: 5338587 - DNA, 25 bp, Homo sapien
tttgaacaaaaggtgtctttcttgc

SEQ ID NO: 5338588 - DNA, 25 bp, Homo sapien
taaggcagtgggaggtacaagggag

SEQ ID NO: 5338589 - DNA, 25 bp, Homo sapien
gacaaaccatttggacatgaccagc

SEQ ID NO: 5338590 - DNA, 25 bp, Homo sapien
ccttccatgatctaccctgcaggga

SEQ ID NO: 5338591 - DNA, 25 bp, Homo sapien
tcttgtcccacaactgagaggaatg

SEQ ID NO: 5338592 - DNA, 25 bp, Homo sapien
tcagtgagttccgagttcttgtccc

SEQ ID NO: 5338593 - DNA, 25 bp, Homo sapien
aagcctcctaagaccttctccaatg

SEQ ID NO: 5338594 - DNA, 25 bp, Homo sapien
gaggagtgtgcccactgctatcagg

SEQ ID NO: 5338595 - DNA, 25 bp, Homo sapien
tcaggcaagcctcctaagaccttct

SEQ ID NO: 5338596 - DNA, 25 bp, Homo sapien
tctccaatggaagcttgaggagtgt

SEQ ID NO: 5338597 - DNA, 25 bp, Homo sapien
ttccagccactgctggattgcttgt

SEQ ID NO: 5338598 - DNA, 25 bp, Homo sapien
gcttgtactgcttcctatatgcaag

SEQ ID NO: 5338599 - DNA, 25 bp, Homo sapien
ctgcttcctatatgcaagagtcaac

SEQ ID NO: 5338600 - DNA, 25 bp, Homo sapien
ccagccactgctggattgcttgtac

SEQ ID NO: 5338601 - DNA, 25 bp, Homo sapien
tgatacctgcaagctgatgagcacc

SEQ ID NO: 5338602 - DNA, 25 bp, Homo sapien
gagcatctactaggagcaaggcaat

SEQ ID NO: 5338603 - DNA, 25 bp, Homo sapien
gatgagcacccagctaggtagagag

SEQ ID NO: 5338604 - DNA, 25 bp, Homo sapien
cctgaacagaaaggaactctgcaaa

SEQ ID NO: 5338605 - DNA, 25 bp, Homo sapien
cttcgaccgagcgcgcagcttcggg

SEQ ID NO: 5338606 - DNA, 25 bp, Homo sapien
ctcgtgtacccttgaccgaagtccg

SEQ ID NO: 5338607 - DNA, 25 bp, Homo sapien
ctcttcgaccgagcgcgcagcttcg

SEQ ID NO: 5338608 - DNA, 25 bp, Homo sapien
ctactcgtgtacccttgaccgaagt

SEQ ID NO: 5338609 - DNA, 25 bp, Homo sapien
tccatcactggtgaattgttttctc

SEQ ID NO: 5338610 - DNA, 25 bp, Homo sapien
gccttccatcactggtgaattgttt

SEQ ID NO: 5338611 - DNA, 25 bp, Homo sapien
tgggccttccatcactggtgaattg

SEQ ID NO: 5338612 - DNA, 25 bp, Homo sapien
cttccatcactggtgaattgttttc

SEQ ID NO: 5338613 - DNA, 25 bp, Homo sapien
ttggctctaaattgccggacaacca

SEQ ID NO: 5338614 - DNA, 25 bp, Homo sapien
caaaggatgcgtttcttggctctaa

SEQ ID NO: 5338615 - DNA, 25 bp, Homo sapien
tccctgagacatatgaggcaggcaa

SEQ ID NO: 5338616 - DNA, 25 bp, Homo sapien
gagtctcttgataccctgtcctgga

SEQ ID NO: 5338617 - DNA, 25 bp, Homo sapien
aggtcacaccattccacttttcagc

SEQ ID NO: 5338618 - DNA, 25 bp, Homo sapien
taggtcacaccattccacttttcag

SEQ ID NO: 5338619 - DNA, 25 bp, Homo sapien
taaatcccatacctcttcaacatcc

SEQ ID NO: 5338620 - DNA, 25 bp, Homo sapien
tcccatacctcttcaacatcctgaa

SEQ ID NO: 5338621 - DNA, 25 bp, Homo sapien
cttgttggttgtgtattatcttttg

SEQ ID NO: 5338622 - DNA, 25 bp, Homo sapien
taattttcttccgtgtgacatctgc

SEQ ID NO: 5338623 - DNA, 25 bp, Homo sapien
tcttccgtgtgacatctgctgttga

SEQ ID NO: 5338624 - DNA, 25 bp, Homo sapien
ttttgatttcctcctgcagatcttt

SEQ ID NO: 5338625 - DNA, 25 bp, Homo sapien
ttccatcccaagaataatttccttc

SEQ ID NO: 5338626 - DNA, 25 bp, Homo sapien
tccatcccaagaataatttccttca

SEQ ID NO: 5338627 - DNA, 25 bp, Homo sapien
tcataatgggtcattttatagactc

SEQ ID NO: 5338628 - DNA, 25 bp, Homo sapien
tatagactctttctgagttctgaca

SEQ ID NO: 5338629 - DNA, 25 bp, Homo sapien
tttccaaatctcctttaatcttctc

SEQ ID NO: 5338630 - DNA, 25 bp, Homo sapien
tctctctccaccctcctgcctccat

SEQ ID NO: 5338631 - DNA, 25 bp, Homo sapien
tccaaatctcctttaatcttctctc

SEQ ID NO: 5338632 - DNA, 25 bp, Homo sapien
caaatctcctttaatcttctctctc

SEQ ID NO: 5338633 - DNA, 25 bp, Homo sapien
gaaaagcttctgaagacgtttgttg

SEQ ID NO: 5338634 - DNA, 25 bp, Homo sapien
tttcttggacctacagcctctggtg

SEQ ID NO: 5338635 - DNA, 25 bp, Homo sapien
tccattttcttggacctacagcctc

SEQ ID NO: 5338636 - DNA, 25 bp, Homo sapien
aaaagcttctgaagacgtttgttgc

SEQ ID NO: 5338637 - DNA, 25 bp, Homo sapien
gcagttccagtgagacgagtaccct

SEQ ID NO: 5338638 - DNA, 25 bp, Homo sapien
tttgtagacattgaggcagttccag

SEQ ID NO: 5338639 - DNA, 25 bp, Homo sapien
tctgataagaaatactcatagtggt

SEQ ID NO: 5338640 - DNA, 25 bp, Homo sapien
ctcatagtggttcttggcaatggta

SEQ ID NO: 5338641 - DNA, 25 bp, Homo sapien
tggtcttacgggaaacacaggcacc

SEQ ID NO: 5338642 - DNA, 25 bp, Homo sapien
aaagttctaaccaagagctcccctg

SEQ ID NO: 5338643 - DNA, 25 bp, Homo sapien
aatgcaacctccatgtggccctgaa

SEQ ID NO: 5338644 - DNA, 25 bp, Homo sapien
gctggtctacatgtactccactcgg

SEQ ID NO: 5338645 - DNA, 25 bp, Homo sapien
tttctatgaatagctccctggacag

SEQ ID NO: 5338646 - DNA, 25 bp, Homo sapien
ccatttctatgaatagctccctgga

SEQ ID NO: 5338647 - DNA, 25 bp, Homo sapien
catttctatgaatagctccctggac

SEQ ID NO: 5338648 - DNA, 25 bp, Homo sapien
tctatgaatagctccctggacagtt

SEQ ID NO: 5338649 - DNA, 25 bp, Homo sapien
gctacacatgtacctttgactgaag

SEQ ID NO: 5338650 - DNA, 25 bp, Homo sapien
gtgagcacagctacacatgtacctt

SEQ ID NO: 5338651 - DNA, 25 bp, Homo sapien
gattgtcttcttcaactgactgcac

SEQ ID NO: 5338652 - DNA, 25 bp, Homo sapien
atgcacatggatttgtgaggaagga

SEQ ID NO: 5338653 - DNA, 25 bp, Homo sapien
tccattacattttccttccatgaac

SEQ ID NO: 5338654 - DNA, 25 bp, Homo sapien
cattacattttccttccatgaacat

SEQ ID NO: 5338655 - DNA, 25 bp, Homo sapien
cacgacatgcaaagtcctccatgat

SEQ ID NO: 5338656 - DNA, 25 bp, Homo sapien
gacatgcaaagtcctccatgatcca

SEQ ID NO: 5338657 - DNA, 25 bp, Homo sapien
taaagtctggcggtagaaacccaga

SEQ ID NO: 5338658 - DNA, 25 bp, Homo sapien
catgcaatggctttccggcaggaca

SEQ ID NO: 5338659 - DNA, 25 bp, Homo sapien
tcctatcagaagagaccgtacacgc

SEQ ID NO: 5338660 - DNA, 25 bp, Homo sapien
tagtgctgttagatcatcccagggc

SEQ ID NO: 5338661 - DNA, 25 bp, Homo sapien
tgtaagcgtaagacttgttgctttg

SEQ ID NO: 5338662 - DNA, 25 bp, Homo sapien
tgctttgttgttcatttcgaaatgc

SEQ ID NO: 5338663 - DNA, 25 bp, Homo sapien
aaatgaagattgtaagcgtaagact

SEQ ID NO: 5338664 - DNA, 25 bp, Homo sapien
gattgtaagcgtaagacttgttgct

SEQ ID NO: 5338665 - DNA, 25 bp, Homo sapien
tgtagcagaagcactgagaatgaca

SEQ ID NO: 5338666 - DNA, 25 bp, Homo sapien
cactcacgataggaaaaggcttgtt

SEQ ID NO: 5338667 - DNA, 25 bp, Homo sapien
tcaacccatggcttatgcccaagag

SEQ ID NO: 5338668 - DNA, 25 bp, Homo sapien
gaatgacactcacactcacgatagg

SEQ ID NO: 5338669 - DNA, 25 bp, Homo sapien
tctgcatcatcagcgtatttcatca

SEQ ID NO: 5338670 - DNA, 25 bp, Homo sapien
catcaaaggaaccatgatctttctg

SEQ ID NO: 5338671 - DNA, 25 bp, Homo sapien
gcgtatttcatcaaaggaaccatga

SEQ ID NO: 5338672 - DNA, 25 bp, Homo sapien
acagtctctgcatcatcagcgtatt

SEQ ID NO: 5338673 - DNA, 25 bp, Homo sapien
tggctgctggaatgatggacgtatc

SEQ ID NO: 5338674 - DNA, 25 bp, Homo sapien
gacgtatccgaatgtgtagacctgg

SEQ ID NO: 5338675 - DNA, 25 bp, Homo sapien
gtccaacttatcttgagagccattg

SEQ ID NO: 5338676 - DNA, 25 bp, Homo sapien
gacaggacatatatttggctgctgg

SEQ ID NO: 5338677 - DNA, 25 bp, Homo sapien
tgagactcatgatgccacactgatg

SEQ ID NO: 5338678 - DNA, 25 bp, Homo sapien
ttttgagactcatgatgccacactg

SEQ ID NO: 5338679 - DNA, 25 bp, Homo sapien
tcggggccaaaagcaataaatctgt

SEQ ID NO: 5338680 - DNA, 25 bp, Homo sapien
gagactcatgatgccacactgatga

SEQ ID NO: 5338681 - DNA, 25 bp, Homo sapien
ttgagtgttggtggaagtcccctca

SEQ ID NO: 5338682 - DNA, 25 bp, Homo sapien
tttgagtgttggtggaagtcccctc

SEQ ID NO: 5338683 - DNA, 25 bp, Homo sapien
tgagtgttggtggaagtcccctcac

SEQ ID NO: 5338684 - DNA, 25 bp, Homo sapien
cttgcaggactcagggcaccgtcag

SEQ ID NO: 5338685 - DNA, 25 bp, Homo sapien
ggaccaattcgcagctcttcattca

SEQ ID NO: 5338686 - DNA, 25 bp, Homo sapien
gcaccgtcaggaccaattcgcagct

SEQ ID NO: 5338687 - DNA, 25 bp, Homo sapien
gaatttaattctaagccacacagct

SEQ ID NO: 5338688 - DNA, 25 bp, Homo sapien
tgtcaccagaacagcacaggggtaa

SEQ ID NO: 5338689 - DNA, 25 bp, Homo sapien
accagaacagcacaggggtaaccac

SEQ ID NO: 5338690 - DNA, 25 bp, Homo sapien
tatgagaactgagctaagggggaag

SEQ ID NO: 5338691 - DNA, 25 bp, Homo sapien
gaagtatgagaactgagctaagggg

SEQ ID NO: 5338692 - DNA, 25 bp, Homo sapien
tctcaggcatcctacacagtgaggg

SEQ ID NO: 5338693 - DNA, 25 bp, Homo sapien
tcgattgcgcgattgtggacaccca

SEQ ID NO: 5338694 - DNA, 25 bp, Homo sapien
tgtggtcaactttctccgtggtccg

SEQ ID NO: 5338695 - DNA, 25 bp, Homo sapien
aaagaaagttctgcagtcctcccgg

SEQ ID NO: 5338696 - DNA, 25 bp, Homo sapien
catagcccttggtgacatggagtgg

SEQ ID NO: 5338697 - DNA, 25 bp, Homo sapien
ctctaggtagatggccggtgctgcc

SEQ ID NO: 5338698 - DNA, 25 bp, Homo sapien
tgggcctggcagtacccgatcacag

SEQ ID NO: 5338699 - DNA, 25 bp, Homo sapien
tcatagctgtaatatggcaagggct

SEQ ID NO: 5338700 - DNA, 25 bp, Homo sapien
ttacaatttgacactcttgatgaac

SEQ ID NO: 5338701 - DNA, 25 bp, Homo sapien
tgttctcatgctagaatatttctca

SEQ ID NO: 5338702 - DNA, 25 bp, Homo sapien
atatttctcatacttgcgagttaca

SEQ ID NO: 5338703 - DNA, 25 bp, Homo sapien
tcatacttgcgagttacaatttgac

SEQ ID NO: 5338704 - DNA, 25 bp, Homo sapien
catttggcatccctatttcccgtac

SEQ ID NO: 5338705 - DNA, 25 bp, Homo sapien
tggcatccctatttcccgtacaaac

SEQ ID NO: 5338706 - DNA, 25 bp, Homo sapien
aaaactcaggttactgaatttatga

SEQ ID NO: 5338707 - DNA, 25 bp, Homo sapien
ttggcatccctatttcccgtacaaa

SEQ ID NO: 5338708 - DNA, 25 bp, Homo sapien
tcagcttcatctgggaactttgcca

SEQ ID NO: 5338709 - DNA, 25 bp, Homo sapien
acttcagcttcatctgggaactttg

SEQ ID NO: 5338710 - DNA, 25 bp, Homo sapien
ctcaacttcagcttcatctgggaac

SEQ ID NO: 5338711 - DNA, 25 bp, Homo sapien
caacttcagcttcatctgggaactt

SEQ ID NO: 5338712 - DNA, 25 bp, Homo sapien
cttcaaagagtaactcgaacaccat

SEQ ID NO: 5338713 - DNA, 25 bp, Homo sapien
tctgctctagtgacctctctctttt

SEQ ID NO: 5338714 - DNA, 25 bp, Homo sapien
tgctctagtgacctctctcttttcc

SEQ ID NO: 5338715 - DNA, 25 bp, Homo sapien
caacttcaaagagtaactcgaacac

SEQ ID NO: 5338716 - DNA, 25 bp, Homo sapien
aaaatgagtggcacttcacactcac

SEQ ID NO: 5338717 - DNA, 25 bp, Homo sapien
ccaattcttgattacgtcttaaggg

SEQ ID NO: 5338718 - DNA, 25 bp, Homo sapien
taatcactatattcccaacatcttg

SEQ ID NO: 5338719 - DNA, 25 bp, Homo sapien
tcactaactgatgaacaattctcct

SEQ ID NO: 5338720 - DNA, 25 bp, Homo sapien
ttaatgagaacgtcctgcatttgtc

SEQ ID NO: 5338721 - DNA, 25 bp, Homo sapien
ctgtgctgctctatgaaagtctgca

SEQ ID NO: 5338722 - DNA, 25 bp, Homo sapien
ctgctctatgaaagtctgcagggct

SEQ ID NO: 5338723 - DNA, 25 bp, Homo sapien
gagaacgtcctgcatttgtctctcc

SEQ ID NO: 5338724 - DNA, 25 bp, Homo sapien
gctgactgctcatcacaagtatcca

SEQ ID NO: 5338725 - DNA, 25 bp, Homo sapien
gactatgcatctcaccgacatctga

SEQ ID NO: 5338726 - DNA, 25 bp, Homo sapien
cagaactaaggtcccctagtgccca

SEQ ID NO: 5338727 - DNA, 25 bp, Homo sapien
gaagtataattattgacccctgtcc

SEQ ID NO: 5338728 - DNA, 25 bp, Homo sapien
tctccctgttcctcctggggcatcc

SEQ ID NO: 5338729 - DNA, 25 bp, Homo sapien
cagtgagacacctctctctccctgt

SEQ ID NO: 5338730 - DNA, 25 bp, Homo sapien
tctctccctgttcctcctggggcat

SEQ ID NO: 5338731 - DNA, 25 bp, Homo sapien
ccctgttcctcctggggcatcctca

SEQ ID NO: 5338732 - DNA, 25 bp, Homo sapien
gatgacagctagattagggtgcaag

SEQ ID NO: 5338733 - DNA, 25 bp, Homo sapien
catgttaaccatagcttgtgggtca

SEQ ID NO: 5338734 - DNA, 25 bp, Homo sapien
cattaattaaaagccagcgatgaca

SEQ ID NO: 5338735 - DNA, 25 bp, Homo sapien
aatgagcttatctccatacctagag

SEQ ID NO: 5338736 - DNA, 25 bp, Homo sapien
tctctcctggaataacatccagaaa

SEQ ID NO: 5338737 - DNA, 25 bp, Homo sapien
catccagaaacatgtaaaaatgcat

SEQ ID NO: 5338738 - DNA, 25 bp, Homo sapien
tgtgttctgaaatggtacagccagt

SEQ ID NO: 5338739 - DNA, 25 bp, Homo sapien
aaatggtacagccagtttcttttct

SEQ ID NO: 5338740 - DNA, 25 bp, Homo sapien
tactcttaaacgtagaatgacactt

SEQ ID NO: 5338741 - DNA, 25 bp, Homo sapien
gaggatttgagtaaagaagcattga

SEQ ID NO: 5338742 - DNA, 25 bp, Homo sapien
gctttactcttaaacgtagaatgac

SEQ ID NO: 5338743 - DNA, 25 bp, Homo sapien
ttataactccaaattggagcacggc

SEQ ID NO: 5338744 - DNA, 25 bp, Homo sapien
tagttgtctccaaggaatctgctct

SEQ ID NO: 5338745 - DNA, 25 bp, Homo sapien
catagagaagcaccaatatgggaac

SEQ ID NO: 5338746 - DNA, 25 bp, Homo sapien
tatgggaacacctactgagagagag

SEQ ID NO: 5338747 - DNA, 25 bp, Homo sapien
gagcatttactgacttgggatacca

SEQ ID NO: 5338748 - DNA, 25 bp, Homo sapien
ccccactgtttctcgcaaatcccca

SEQ ID NO: 5338749 - DNA, 25 bp, Homo sapien
ctgacccccactgtttctcgcaaat

SEQ ID NO: 5338750 - DNA, 25 bp, Homo sapien
cactgtttctcgcaaatccccatct

SEQ ID NO: 5338751 - DNA, 25 bp, Homo sapien
tttctcgcaaatccccatctcagga

SEQ ID NO: 5338752 - DNA, 25 bp, Homo sapien
ctgaaagatatttgcgaaaatcatc

SEQ ID NO: 5338753 - DNA, 25 bp, Homo sapien
gaaagatatttgcgaaaatcatcat

SEQ ID NO: 5338754 - DNA, 25 bp, Homo sapien
tgaaagatatttgcgaaaatcatca

SEQ ID NO: 5338755 - DNA, 25 bp, Homo sapien
aaagatatttgcgaaaatcatcatc

SEQ ID NO: 5338756 - DNA, 25 bp, Homo sapien
ttgtaatcacttgaaactttcacac

SEQ ID NO: 5338757 - DNA, 25 bp, Homo sapien
gtaatcacttgaaactttcacactg

SEQ ID NO: 5338758 - DNA, 25 bp, Homo sapien
tgtaatcacttgaaactttcacact

SEQ ID NO: 5338759 - DNA, 25 bp, Homo sapien
caaactcttcaggttgcgcaactaa

SEQ ID NO: 5338760 - DNA, 25 bp, Homo sapien
gtccatgatctacccataaatccag

SEQ ID NO: 5338761 - DNA, 25 bp, Homo sapien
cttgaactctagatctgtccatgat

SEQ ID NO: 5338762 - DNA, 25 bp, Homo sapien
ctaagacaacaatctgtgccttcat

SEQ ID NO: 5338763 - DNA, 25 bp, Homo sapien
cacacacacgcgatatggttaatat

SEQ ID NO: 5338764 - DNA, 25 bp, Homo sapien
gctcttttgatgtaagtacaatcca

SEQ ID NO: 5338765 - DNA, 25 bp, Homo sapien
ctgtaattagtaaacgtgtctgtgc

SEQ ID NO: 5338766 - DNA, 25 bp, Homo sapien
tgatgctcaggtgcgtgtgcacgca

SEQ ID NO: 5338767 - DNA, 25 bp, Homo sapien
cttcaagtcagtggctaagacgtcg

SEQ ID NO: 5338768 - DNA, 25 bp, Homo sapien
gaaacaccagctttagagtcagcca

SEQ ID NO: 5338769 - DNA, 25 bp, Homo sapien
gaataccagcatttagatccagtcg

SEQ ID NO: 5338770 - DNA, 25 bp, Homo sapien
tatgacagtaatgtgactagggaca

SEQ ID NO: 5338771 - DNA, 25 bp, Homo sapien
tgtgtaaagcccaaaagggactgtc

SEQ ID NO: 5338772 - DNA, 25 bp, Homo sapien
ggaaaacgcttgtgtagagcttgtg

SEQ ID NO: 5338773 - DNA, 25 bp, Homo sapien
caaacaccaccacccaagtatcttg

SEQ ID NO: 5338774 - DNA, 25 bp, Homo sapien
tccaggcttgttacttggaaaacgc

SEQ ID NO: 5338775 - DNA, 25 bp, Homo sapien
gaatgtagatttttcgttgtcgttg

SEQ ID NO: 5338776 - DNA, 25 bp, Homo sapien
aatgtagatttttcgttgtcgttgt

SEQ ID NO: 5338777 - DNA, 25 bp, Homo sapien
actaactggcacagctatcctggca

SEQ ID NO: 5338778 - DNA, 25 bp, Homo sapien
ctgcaagagctaaatcagaagccct

SEQ ID NO: 5338779 - DNA, 25 bp, Homo sapien
tttggctgcaggaaatttagcactg

SEQ ID NO: 5338780 - DNA, 25 bp, Homo sapien
taatgaaagcccagaactaactggc

SEQ ID NO: 5338781 - DNA, 25 bp, Homo sapien
tacaatataaatcatctcgtccctc

SEQ ID NO: 5338782 - DNA, 25 bp, Homo sapien
atataaatcatctcgtccctcttgt

SEQ ID NO: 5338783 - DNA, 25 bp, Homo sapien
cctacaatataaatcatctcgtccc

SEQ ID NO: 5338784 - DNA, 25 bp, Homo sapien
caatataaatcatctcgtccctctt

SEQ ID NO: 5338785 - DNA, 25 bp, Homo sapien
ggtctcaccgataatatatgaacag

SEQ ID NO: 5338786 - DNA, 25 bp, Homo sapien
taaagtgtgtaactaaggtctcacc

SEQ ID NO: 5338787 - DNA, 25 bp, Homo sapien
gaaaacttgcggaaactttcaatga

SEQ ID NO: 5338788 - DNA, 25 bp, Homo sapien
tcaagtagtcttagattccgacact

SEQ ID NO: 5338789 - DNA, 25 bp, Homo sapien
taaatgggtatcacacagaacagcc

SEQ ID NO: 5338790 - DNA, 25 bp, Homo sapien
cagaacagcctgaagcaatcgcgtc

SEQ ID NO: 5338791 - DNA, 25 bp, Homo sapien
tgttgagtgcaaccccagagatgca

SEQ ID NO: 5338792 - DNA, 25 bp, Homo sapien
cacgtttcaagggtgtcagaccaca

SEQ ID NO: 5338793 - DNA, 25 bp, Homo sapien
aagtgctgggacgtagtactgactt

SEQ ID NO: 5338794 - DNA, 25 bp, Homo sapien
tgctgggacgtagtactgacttttt

SEQ ID NO: 5338795 - DNA, 25 bp, Homo sapien
aaagtgctgggacgtagtactgact

SEQ ID NO: 5338796 - DNA, 25 bp, Homo sapien
agtgctgggacgtagtactgacttt

SEQ ID NO: 5338797 - DNA, 25 bp, Homo sapien
tgattcaaagggaaaggttgccctg

SEQ ID NO: 5338798 - DNA, 25 bp, Homo sapien
ggttgccctgtttataaatacagtg

SEQ ID NO: 5338799 - DNA, 25 bp, Homo sapien
ggaaactcaattaactcaaggcatt

SEQ ID NO: 5338800 - DNA, 25 bp, Homo sapien
tcaaggcattctcaccaagaagaaa

SEQ ID NO: 5338801 - DNA, 25 bp, Homo sapien
gaaagaaaggatcagtcgagccagt

SEQ ID NO: 5338802 - DNA, 25 bp, Homo sapien
tacattttgttgctggacggaacgc

SEQ ID NO: 5338803 - DNA, 25 bp, Homo sapien
aagctaacatacgagggagaatttc

SEQ ID NO: 5338804 - DNA, 25 bp, Homo sapien
gcccatgcccacagaacggctttgt

SEQ ID NO: 5338805 - DNA, 25 bp, Homo sapien
agtgttgtacttcctgaaccttgtc

SEQ ID NO: 5338806 - DNA, 25 bp, Homo sapien
gtgttctttttgactaggtatgtcc

SEQ ID NO: 5338807 - DNA, 25 bp, Homo sapien
taggtatgtcctccctgaaaatcag

SEQ ID NO: 5338808 - DNA, 25 bp, Homo sapien
cttcttcagtgttgtacttcctgaa

SEQ ID NO: 5338809 - DNA, 25 bp, Homo sapien
ttgactgtagtccaatttccctagg

SEQ ID NO: 5338810 - DNA, 25 bp, Homo sapien
tttccctaggtagatgacattagcc

SEQ ID NO: 5338811 - DNA, 25 bp, Homo sapien
tattgtacaaccagggattcagaat

SEQ ID NO: 5338812 - DNA, 25 bp, Homo sapien
gaatggctaactggactttcgtaat

SEQ ID NO: 5338813 - DNA, 25 bp, Homo sapien
taacttgatatacttgcggtcagag

SEQ ID NO: 5338814 - DNA, 25 bp, Homo sapien
gaaatcctagtaacacagagtcatc

SEQ ID NO: 5338815 - DNA, 25 bp, Homo sapien
tcagtaaggtgtcaaaaactgggca

SEQ ID NO: 5338816 - DNA, 25 bp, Homo sapien
gggcctggctcaacttcttactaaa

SEQ ID NO: 5338817 - DNA, 25 bp, Homo sapien
tatcttacaaatcaaatgtagctgg

SEQ ID NO: 5338818 - DNA, 25 bp, Homo sapien
tctccctgcttgtcttttagtaatc

SEQ ID NO: 5338819 - DNA, 25 bp, Homo sapien
tcatatagtctgataaattttgcta

SEQ ID NO: 5338820 - DNA, 25 bp, Homo sapien
ttttgctattaagacaagcagtttg

SEQ ID NO: 5338821 - DNA, 25 bp, Homo sapien
catagttaaacgataacccagcatt

SEQ ID NO: 5338822 - DNA, 25 bp, Homo sapien
taagctataggcatagttaaacgat

SEQ ID NO: 5338823 - DNA, 25 bp, Homo sapien
acagacttttctgctaagctatagg

SEQ ID NO: 5338824 - DNA, 25 bp, Homo sapien
gacttttctgctaagctataggcat

SEQ ID NO: 5338825 - DNA, 25 bp, Homo sapien
gatgcaacgtgaccttttgacctcc

SEQ ID NO: 5338826 - DNA, 25 bp, Homo sapien
caaaaaataccatgggcccccagag

SEQ ID NO: 5338827 - DNA, 25 bp, Homo sapien
cacacccgatgttggttctgatcac

SEQ ID NO: 5338828 - DNA, 25 bp, Homo sapien
catgatagccccttggtcctacttt

SEQ ID NO: 5338829 - DNA, 25 bp, Homo sapien
ccacggcagcttccagaaattatca

SEQ ID NO: 5338830 - DNA, 25 bp, Homo sapien
taagtcagtcctgtgctaaccagga

SEQ ID NO: 5338831 - DNA, 25 bp, Homo sapien
gatggcgtgaggaacaaacaattta

SEQ ID NO: 5338832 - DNA, 25 bp, Homo sapien
caatcgctaagaccccactggtgaa

SEQ ID NO: 5338833 - DNA, 25 bp, Homo sapien
tgcagcaagcttagaagacaccctg

SEQ ID NO: 5338834 - DNA, 25 bp, Homo sapien
tgaaatgttagcaatcccacttggc

SEQ ID NO: 5338835 - DNA, 25 bp, Homo sapien
tgtcttgtgataagggtgctgctcc

SEQ ID NO: 5338836 - DNA, 25 bp, Homo sapien
tccagtgtcgttcttcggatgaaat

SEQ ID NO: 5338837 - DNA, 25 bp, Homo sapien
attttggtctccatccaccagatgc

SEQ ID NO: 5338838 - DNA, 25 bp, Homo sapien
tttggtctccatccaccagatgcat

SEQ ID NO: 5338839 - DNA, 25 bp, Homo sapien
ttttggtctccatccaccagatgca

SEQ ID NO: 5338840 - DNA, 25 bp, Homo sapien
acctgggtaacatgagcaggatcct

SEQ ID NO: 5338841 - DNA, 25 bp, Homo sapien
aggacctgggtaacatgagcaggat

SEQ ID NO: 5338842 - DNA, 25 bp, Homo sapien
gacctgggtaacatgagcaggatcc

SEQ ID NO: 5338843 - DNA, 25 bp, Homo sapien
ggacctgggtaacatgagcaggatc

SEQ ID NO: 5338844 - DNA, 25 bp, Homo sapien
tagtgataagatcagggtaataggc

SEQ ID NO: 5338845 - DNA, 25 bp, Homo sapien
actttaggcagttcaccatggctca

SEQ ID NO: 5338846 - DNA, 25 bp, Homo sapien
taaagggcactatgagaacattgaa

SEQ ID NO: 5338847 - DNA, 25 bp, Homo sapien
tatcataggacatcaaaataggacc

SEQ ID NO: 5338848 - DNA, 25 bp, Homo sapien
gattgcatctcccaagcaaactgag

SEQ ID NO: 5338849 - DNA, 25 bp, Homo sapien
actatgcagcataggtcaccctttg

SEQ ID NO: 5338850 - DNA, 25 bp, Homo sapien
cccatgttatgaaccaaagattgca

SEQ ID NO: 5338851 - DNA, 25 bp, Homo sapien
tagcaatcctagacctgaaacgatg

SEQ ID NO: 5338852 - DNA, 25 bp, Homo sapien
gtatctttgacaacttttggtagca

SEQ ID NO: 5338853 - DNA, 25 bp, Homo sapien
gcatcacatgtactaagtctactag

SEQ ID NO: 5338854 - DNA, 25 bp, Homo sapien
tgtcaaagaaaccttgcatcacatg

SEQ ID NO: 5338855 - DNA, 25 bp, Homo sapien
tctactagatcatggtgaattagct

SEQ ID NO: 5338856 - DNA, 25 bp, Homo sapien
tataacttgatattagtctgttcag

SEQ ID NO: 5338857 - DNA, 25 bp, Homo sapien
ctttgcataactggtagaatttggc

SEQ ID NO: 5338858 - DNA, 25 bp, Homo sapien
ttataacttgatattagtctgttca

SEQ ID NO: 5338859 - DNA, 25 bp, Homo sapien
tgtccgtgaatgttgatcagtactt

SEQ ID NO: 5338860 - DNA, 25 bp, Homo sapien
gcaatgaataagagattaagtttgc

SEQ ID NO: 5338861 - DNA, 25 bp, Homo sapien
ccatacttatgtccgtgaatgttga

SEQ ID NO: 5338862 - DNA, 25 bp, Homo sapien
aaattcaccatacttatgtccgtga

SEQ ID NO: 5338863 - DNA, 25 bp, Homo sapien
tacgactgtccttgttccactagcc

SEQ ID NO: 5338864 - DNA, 25 bp, Homo sapien
actttggctcaaaaccatgagactt

SEQ ID NO: 5338865 - DNA, 25 bp, Homo sapien
cactagcctgcatagtgtgcccttt

SEQ ID NO: 5338866 - DNA, 25 bp, Homo sapien
ccttgttccactagcctgcatagtg

SEQ ID NO: 5338867 - DNA, 25 bp, Homo sapien
ggcatggcagaatgataagtgttat

SEQ ID NO: 5338868 - DNA, 25 bp, Homo sapien
atacctttagcctttcaagaatggg

SEQ ID NO: 5338869 - DNA, 25 bp, Homo sapien
tgacttcactattacggtaaaagaa

SEQ ID NO: 5338870 - DNA, 25 bp, Homo sapien
gctttggtaataaggcaatttgcag

SEQ ID NO: 5338871 - DNA, 25 bp, Homo sapien
gagaattctgctggagtatataggt

SEQ ID NO: 5338872 - DNA, 25 bp, Homo sapien
tcaagttgcctcaatcttgcttcca

SEQ ID NO: 5338873 - DNA, 25 bp, Homo sapien
tcttgcttccatcatgagaattctg

SEQ ID NO: 5338874 - DNA, 25 bp, Homo sapien
gctggagtatataggttaaaatcca

SEQ ID NO: 5338875 - DNA, 25 bp, Homo sapien
tgtgggttacacaacgcagcatctc

SEQ ID NO: 5338876 - DNA, 25 bp, Homo sapien
cagcatctctgcataggtaagcccg

SEQ ID NO: 5338877 - DNA, 25 bp, Homo sapien
tcagggagagaactagcacttgtgt

SEQ ID NO: 5338878 - DNA, 25 bp, Homo sapien
taagcccgtgtaggttactgaggag

SEQ ID NO: 5338879 - DNA, 25 bp, Homo sapien
gataccatatgcatgaattggacct

SEQ ID NO: 5338880 - DNA, 25 bp, Homo sapien
catcaatatgtgaaaggagtttaca

SEQ ID NO: 5338881 - DNA, 25 bp, Homo sapien
aatgtctatatgtatagctgtatcc

SEQ ID NO: 5338882 - DNA, 25 bp, Homo sapien
cagtttgccctttgcaatattttga

SEQ ID NO: 5338883 - DNA, 25 bp, Homo sapien
cctgatatgttgttcatgcctcctt

SEQ ID NO: 5338884 - DNA, 25 bp, Homo sapien
ctccttagtgccctgtgatcttcca

SEQ ID NO: 5338885 - DNA, 25 bp, Homo sapien
tagaatttgcgcttttccgagttgc

SEQ ID NO: 5338886 - DNA, 25 bp, Homo sapien
gagttgcatcagctccctgatatgt

SEQ ID NO: 5338887 - DNA, 25 bp, Homo sapien
taaagatatagatagttaggagctc

SEQ ID NO: 5338888 - DNA, 25 bp, Homo sapien
taggagctcttacgtttgtcaccac

SEQ ID NO: 5338889 - DNA, 25 bp, Homo sapien
gtcaccacgtttatgcccacattag

SEQ ID NO: 5338890 - DNA, 25 bp, Homo sapien
acagtaccctcttatattatattgg

SEQ ID NO: 5338891 - DNA, 25 bp, Homo sapien
cttacctgtgtcatggatattgctt

SEQ ID NO: 5338892 - DNA, 25 bp, Homo sapien
ttcaggaattgcactccccagagtg

SEQ ID NO: 5338893 - DNA, 25 bp, Homo sapien
ctcacatgaatgtagaacgatgccc

SEQ ID NO: 5338894 - DNA, 25 bp, Homo sapien
tcctgtccacttttctcgttctgag

SEQ ID NO: 5338895 - DNA, 25 bp, Homo sapien
tgagacacagggagattcctttctg

SEQ ID NO: 5338896 - DNA, 25 bp, Homo sapien
aaacagtatacaagaaggtttacat

SEQ ID NO: 5338897 - DNA, 25 bp, Homo sapien
tacaagaaggtttacataacgtata

SEQ ID NO: 5338898 - DNA, 25 bp, Homo sapien
tagaagatgatgcataaaatcgttt

SEQ ID NO: 5338899 - DNA, 25 bp, Homo sapien
tagctataacatttgtactaatctt

SEQ ID NO: 5338900 - DNA, 25 bp, Homo sapien
ttgtactaatctttaatgctactat

SEQ ID NO: 5338901 - DNA, 25 bp, Homo sapien
ctttcattagaactgctatcatagc

SEQ ID NO: 5338902 - DNA, 25 bp, Homo sapien
atagctataacatttgtactaatct

SEQ ID NO: 5338903 - DNA, 25 bp, Homo sapien
acacagcctctttgtgtatgaggag

SEQ ID NO: 5338904 - DNA, 25 bp, Homo sapien
gattcaagagttcctcaaaggcatg

SEQ ID NO: 5338905 - DNA, 25 bp, Homo sapien
gctctctaaagcacgaatactggga

SEQ ID NO: 5338906 - DNA, 25 bp, Homo sapien
tatcacagggttgcaagtaaaaata

SEQ ID NO: 5338907 - DNA, 25 bp, Homo sapien
gaaagccattttgcatggcatgggt

SEQ ID NO: 5338908 - DNA, 25 bp, Homo sapien
caatgtcaggataaagcagtctgtc

SEQ ID NO: 5338909 - DNA, 25 bp, Homo sapien
aaagaggaatacaacttagcaaagt

SEQ ID NO: 5338910 - DNA, 25 bp, Homo sapien
aaagggctactttgtgtgaagacaa

SEQ ID NO: 5338911 - DNA, 25 bp, Homo sapien
tccctctataatattcccagaaaaa

SEQ ID NO: 5338912 - DNA, 25 bp, Homo sapien
tcctaaagcggttaacctgagacca

SEQ ID NO: 5338913 - DNA, 25 bp, Homo sapien
gttaacctgagaccaattagtgata

SEQ ID NO: 5338914 - DNA, 25 bp, Homo sapien
caaatgattattcagcttttgctgc

SEQ ID NO: 5338915 - DNA, 25 bp, Homo sapien
taaatccttaatatcgctctcctct

SEQ ID NO: 5338916 - DNA, 25 bp, Homo sapien
gctgtgcttttctcattatatttat

SEQ ID NO: 5338917 - DNA, 25 bp, Homo sapien
tatatttatccatccaatatttcat

SEQ ID NO: 5338918 - DNA, 25 bp, Homo sapien
gcttttctcattatatttatccatc

SEQ ID NO: 5338919 - DNA, 25 bp, Homo sapien
cagctgtgcttttctcattatattt

SEQ ID NO: 5338920 - DNA, 25 bp, Homo sapien
ccataaactgttgaaacatgtggtg

SEQ ID NO: 5338921 - DNA, 25 bp, Homo sapien
tttgtcatccctcaatattggagtg

SEQ ID NO: 5338922 - DNA, 25 bp, Homo sapien
tgcagtaaagccactagaagaagtg

SEQ ID NO: 5338923 - DNA, 25 bp, Homo sapien
ttctaaatggatatgaggcaaagca

SEQ ID NO: 5338924 - DNA, 25 bp, Homo sapien
tgatagagatttggtataaccattc

SEQ ID NO: 5338925 - DNA, 25 bp, Homo sapien
tgagtggttagcacagacgcctctt

SEQ ID NO: 5338926 - DNA, 25 bp, Homo sapien
acagacgcctcttatttgatctgag

SEQ ID NO: 5338927 - DNA, 25 bp, Homo sapien
gaagtcacacaaatgaggtcaagtg

SEQ ID NO: 5338928 - DNA, 25 bp, Homo sapien
gactacagtcaatatggccagtgca

SEQ ID NO: 5338929 - DNA, 25 bp, Homo sapien
gattatcgtaaacactaaatagaaa

SEQ ID NO: 5338930 - DNA, 25 bp, Homo sapien
tgttatacctaaaattagatgacag

SEQ ID NO: 5338931 - DNA, 25 bp, Homo sapien
gacagtatttgatgttgttcacaca

SEQ ID NO: 5338932 - DNA, 25 bp, Homo sapien
caaaactttcatagaactgctgcag

SEQ ID NO: 5338933 - DNA, 25 bp, Homo sapien
cacaacaccttgaaaaagcaaactc

SEQ ID NO: 5338934 - DNA, 25 bp, Homo sapien
caaagtcaacatttatggacttcac

SEQ ID NO: 5338935 - DNA, 25 bp, Homo sapien
catttatggacttcacaacaccttg

SEQ ID NO: 5338936 - DNA, 25 bp, Homo sapien
gcctaggggagtaagtggttcagga

SEQ ID NO: 5338937 - DNA, 25 bp, Homo sapien
ggagcctaggggagtaagtggttca

SEQ ID NO: 5338938 - DNA, 25 bp, Homo sapien
tgccttcagcttatccttatgtccc

SEQ ID NO: 5338939 - DNA, 25 bp, Homo sapien
tcagcttatccttatgtccccttct

SEQ ID NO: 5338940 - DNA, 25 bp, Homo sapien
taatagacaatggtaatggaaggag

SEQ ID NO: 5338941 - DNA, 25 bp, Homo sapien
aatagacaatggtaatggaaggaga

SEQ ID NO: 5338942 - DNA, 25 bp, Homo sapien
atagacaatggtaatggaaggagaa

SEQ ID NO: 5338943 - DNA, 25 bp, Homo sapien
ctaatagacaatggtaatggaagga

SEQ ID NO: 5338944 - DNA, 25 bp, Homo sapien
gagattcccctctgcatattgaaat

SEQ ID NO: 5338945 - DNA, 25 bp, Homo sapien
ctggtggttactagaaatggatgca

SEQ ID NO: 5338946 - DNA, 25 bp, Homo sapien
tggatgcatttcaatctttctgtcc

SEQ ID NO: 5338947 - DNA, 25 bp, Homo sapien
ttctctcttgcatgctgacagagat

SEQ ID NO: 5338948 - DNA, 25 bp, Homo sapien
aattagaaaggtctcccatacaggg

SEQ ID NO: 5338949 - DNA, 25 bp, Homo sapien
ccaggttgttacctgattctcgcat

SEQ ID NO: 5338950 - DNA, 25 bp, Homo sapien
aggaattagaaaggtctcccataca

SEQ ID NO: 5338951 - DNA, 25 bp, Homo sapien
ccatacaggggacattagaaaatcc

SEQ ID NO: 5338952 - DNA, 25 bp, Homo sapien
gtcatagcaaccttgccagctttgg

SEQ ID NO: 5338953 - DNA, 25 bp, Homo sapien
tccatggagaatcctgaagcttgct

SEQ ID NO: 5338954 - DNA, 25 bp, Homo sapien
ccagctttggatgtgattgctgaca

SEQ ID NO: 5338955 - DNA, 25 bp, Homo sapien
gaagcttgctgttcgggttgacatt

SEQ ID NO: 5338956 - DNA, 25 bp, Homo sapien
tcctatttagggatttcgggctgca

SEQ ID NO: 5338957 - DNA, 25 bp, Homo sapien
cataactcagcaggtgatttattcc

SEQ ID NO: 5338958 - DNA, 25 bp, Homo sapien
gaagttacacaggactcttcacata

SEQ ID NO: 5338959 - DNA, 25 bp, Homo sapien
aagtgctgtcgttgggagaagttac

SEQ ID NO: 5338960 - DNA, 25 bp, Homo sapien
tctgtgaaatagcacacttgatttg

SEQ ID NO: 5338961 - DNA, 25 bp, Homo sapien
ataaataaatgtcacttgaagagga

SEQ ID NO: 5338962 - DNA, 25 bp, Homo sapien
cacacttgatttggctggaaccttg

SEQ ID NO: 5338963 - DNA, 25 bp, Homo sapien
ccttggatgatagagtaactggctc

SEQ ID NO: 5338964 - DNA, 25 bp, Homo sapien
gattataaatgtcaaatcactaaaa

SEQ ID NO: 5338965 - DNA, 25 bp, Homo sapien
ccagtaatatcaggaggtgggcaga

SEQ ID NO: 5338966 - DNA, 25 bp, Homo sapien
tagcagccacttataataaaaactc

SEQ ID NO: 5338967 - DNA, 25 bp, Homo sapien
aagtatagcagccacttataataaa

SEQ ID NO: 5338968 - DNA, 25 bp, Homo sapien
tattttattatgagtagtcatgaca

SEQ ID NO: 5338969 - DNA, 25 bp, Homo sapien
cttcatttttgtttagataatggaa

SEQ ID NO: 5338970 - DNA, 25 bp, Homo sapien
attttattatgagtagtcatgacac

SEQ ID NO: 5338971 - DNA, 25 bp, Homo sapien
tcatttttgtttagataatggaagt

SEQ ID NO: 5338972 - DNA, 25 bp, Homo sapien
atattagggcttagggcaattgtgt

SEQ ID NO: 5338973 - DNA, 25 bp, Homo sapien
ggccaacacatactcttttatttaa

SEQ ID NO: 5338974 - DNA, 25 bp, Homo sapien
tattagggcttagggcaattgtgta

SEQ ID NO: 5338975 - DNA, 25 bp, Homo sapien
ctttgtaattttctccccaatccat

SEQ ID NO: 5338976 - DNA, 25 bp, Homo sapien
ttccgccccatgaacagtaatctgg

SEQ ID NO: 5338977 - DNA, 25 bp, Homo sapien
gttaaactatgatcacaagctggtg

SEQ ID NO: 5338978 - DNA, 25 bp, Homo sapien
cgtcttttgtcccagagaagcccat

SEQ ID NO: 5338979 - DNA, 25 bp, Homo sapien
tccgtgttaccccaatctgttcaga

SEQ ID NO: 5338980 - DNA, 25 bp, Homo sapien
catcctggtatggtttactgagctt

SEQ ID NO: 5338981 - DNA, 25 bp, Homo sapien
ttatgtcctttaaggaatcagggcc

SEQ ID NO: 5338982 - DNA, 25 bp, Homo sapien
cagggccacgcataattgcatgtat

SEQ ID NO: 5338983 - DNA, 25 bp, Homo sapien
cagtggtggtaatttcccttatgtc

SEQ ID NO: 5338984 - DNA, 25 bp, Homo sapien
cagcaagggagcaaattgctttaac

SEQ ID NO: 5338985 - DNA, 25 bp, Homo sapien
ttacagaagtcaatgggctttccac

SEQ ID NO: 5338986 - DNA, 25 bp, Homo sapien
gaaaaaggagcagccgtataacagc

SEQ ID NO: 5338987 - DNA, 25 bp, Homo sapien
gatgatatcattaaccaagccaaat

SEQ ID NO: 5338988 - DNA, 25 bp, Homo sapien
tattatcactgatggtgtgtttaat

SEQ ID NO: 5338989 - DNA, 25 bp, Homo sapien
tatattatcactgatggtgtgttta

SEQ ID NO: 5338990 - DNA, 25 bp, Homo sapien
aatatattatcactgatggtgtgtt

SEQ ID NO: 5338991 - DNA, 25 bp, Homo sapien
ctttgttctctcagcaaatatatta

SEQ ID NO: 5338992 - DNA, 25 bp, Homo sapien
agtggagcactgaaataatctagtc

SEQ ID NO: 5338993 - DNA, 25 bp, Homo sapien
aatgggccggttggtgaaggacgag

SEQ ID NO: 5338994 - DNA, 25 bp, Homo sapien
cgagccatacgaaaatccacatcct

SEQ ID NO: 5338995 - DNA, 25 bp, Homo sapien
catctcttaagcatttgctatttaa

SEQ ID NO: 5338996 - DNA, 25 bp, Homo sapien
ttctcatacctttcttatacgtgtt

SEQ ID NO: 5338997 - DNA, 25 bp, Homo sapien
tgttttggatctaaatatccggatg

SEQ ID NO: 5338998 - DNA, 25 bp, Homo sapien
ctcatacctttcttatacgtgttcc

SEQ ID NO: 5338999 - DNA, 25 bp, Homo sapien
aatatccggatgatctttcttctac

SEQ ID NO: 5339000 - DNA, 25 bp, Homo sapien
cagttataaccggagttatgttaat

SEQ ID NO: 5339001 - DNA, 25 bp, Homo sapien
atatgctatagcaaacccacaaata

SEQ ID NO: 5339002 - DNA, 25 bp, Homo sapien
acaaatatgctatagcaaacccaca

SEQ ID NO: 5339003 - DNA, 25 bp, Homo sapien
aaatatgctatagcaaacccacaaa

SEQ ID NO: 5339004 - DNA, 25 bp, Homo sapien
catttacataaggaacaatattacc

SEQ ID NO: 5339005 - DNA, 25 bp, Homo sapien
gagaaatgctgtgatcgaaagttgg

SEQ ID NO: 5339006 - DNA, 25 bp, Homo sapien
tcgcatttgaagactaaaataccaa

SEQ ID NO: 5339007 - DNA, 25 bp, Homo sapien
caaatagtgttgaagttagatgcat

SEQ ID NO: 5339008 - DNA, 25 bp, Homo sapien
gtgggaagcaatccaccatggactt

SEQ ID NO: 5339009 - DNA, 25 bp, Homo sapien
tgtgggaagcaatccaccatggact

SEQ ID NO: 5339010 - DNA, 25 bp, Homo sapien
gactgtgggaagcaatccaccatgg

SEQ ID NO: 5339011 - DNA, 25 bp, Homo sapien
actgtgggaagcaatccaccatgga

SEQ ID NO: 5339012 - DNA, 25 bp, Homo sapien
cctgagagtgtgatgcaggactgag

SEQ ID NO: 5339013 - DNA, 25 bp, Homo sapien
tcattgcgtggtaaattgatttgcc

SEQ ID NO: 5339014 - DNA, 25 bp, Homo sapien
ggaaaagtcagattagttacttcaa

SEQ ID NO: 5339015 - DNA, 25 bp, Homo sapien
ggactgaggaacatgaccatcttca

SEQ ID NO: 5339016 - DNA, 25 bp, Homo sapien
atttctctacggcagacattcaaaa

SEQ ID NO: 5339017 - DNA, 25 bp, Homo sapien
tggaaaagatcttataactacaagg

SEQ ID NO: 5339018 - DNA, 25 bp, Homo sapien
atattatttctctacggcagacatt

SEQ ID NO: 5339019 - DNA, 25 bp, Homo sapien
aactacaaggccagcatattatttc

SEQ ID NO: 5339020 - DNA, 25 bp, Homo sapien
attttgatcttagctggatgttttc

SEQ ID NO: 5339021 - DNA, 25 bp, Homo sapien
atcaaatcattcatagtcctattaa

SEQ ID NO: 5339022 - DNA, 25 bp, Homo sapien
gttttctgtaagtcttgaccatctt

SEQ ID NO: 5339023 - DNA, 25 bp, Homo sapien
tagtactgattcagtttggtgtaaa

SEQ ID NO: 5339024 - DNA, 25 bp, Homo sapien
taagttttgtgataaggtagaacag

SEQ ID NO: 5339025 - DNA, 25 bp, Homo sapien
aagctaaataagttttgtgataagg

SEQ ID NO: 5339026 - DNA, 25 bp, Homo sapien
tttgtgataaggtagaacagttaaa

SEQ ID NO: 5339027 - DNA, 25 bp, Homo sapien
caccaaagataaagctaaataagtt

SEQ ID NO: 5339028 - DNA, 25 bp, Homo sapien
ttggcaagtaggagtctcaccaggg

SEQ ID NO: 5339029 - DNA, 25 bp, Homo sapien
tcccacggcatagagtctaccaggc

SEQ ID NO: 5339030 - DNA, 25 bp, Homo sapien
taccaggcagactagagagtagaaa

SEQ ID NO: 5339031 - DNA, 25 bp, Homo sapien
gacaattgcagtcctattcgacaac

SEQ ID NO: 5339032 - DNA, 25 bp, Homo sapien
tgattttcattcttaagtggtccac

SEQ ID NO: 5339033 - DNA, 25 bp, Homo sapien
atcagctactctcctttgattttca

SEQ ID NO: 5339034 - DNA, 25 bp, Homo sapien
cattcttaagtggtccacttttctt

SEQ ID NO: 5339035 - DNA, 25 bp, Homo sapien
tttgattttcattcttaagtggtcc

SEQ ID NO: 5339036 - DNA, 25 bp, Homo sapien
tctccaactgtctgttaacagtctt

SEQ ID NO: 5339037 - DNA, 25 bp, Homo sapien
tttgatctgagtgtagcttttgaag

SEQ ID NO: 5339038 - DNA, 25 bp, Homo sapien
gatctgagtgtagcttttgaagaaa

SEQ ID NO: 5339039 - DNA, 25 bp, Homo sapien
ccaactgtctgttaacagtcttgct

SEQ ID NO: 5339040 - DNA, 25 bp, Homo sapien
attacagcaactggaccactgactg

SEQ ID NO: 5339041 - DNA, 25 bp, Homo sapien
gcaactggaccactgactgctatgt

SEQ ID NO: 5339042 - DNA, 25 bp, Homo sapien
ggaccactgactgctatgttcatcc

SEQ ID NO: 5339043 - DNA, 25 bp, Homo sapien
cactgactgctatgttcatccacat

SEQ ID NO: 5339044 - DNA, 25 bp, Homo sapien
ggaaattccaacaccaagtcagcag

SEQ ID NO: 5339045 - DNA, 25 bp, Homo sapien
tttgaagtacaaataactggctaag

SEQ ID NO: 5339046 - DNA, 25 bp, Homo sapien
ctatagcagccttttagtaggttca

SEQ ID NO: 5339047 - DNA, 25 bp, Homo sapien
gacaagctaggtgaacccttcatta

SEQ ID NO: 5339048 - DNA, 25 bp, Homo sapien
tggagcacagattcaggccccttct

SEQ ID NO: 5339049 - DNA, 25 bp, Homo sapien
ttgaagagaacattcaggaaaggct

SEQ ID NO: 5339050 - DNA, 25 bp, Homo sapien
ttcctggagcacagattcaggcccc

SEQ ID NO: 5339051 - DNA, 25 bp, Homo sapien
gaagagaacattcaggaaaggcttc

SEQ ID NO: 5339052 - DNA, 25 bp, Homo sapien
caagcgttttgcaagcagctaccag

SEQ ID NO: 5339053 - DNA, 25 bp, Homo sapien
caaagactagcagatggtgggataa

SEQ ID NO: 5339054 - DNA, 25 bp, Homo sapien
gggcagcattttagttcgcagtaca

SEQ ID NO: 5339055 - DNA, 25 bp, Homo sapien
tgcattattcgtaagggcctccaag

SEQ ID NO: 5339056 - DNA, 25 bp, Homo sapien
gcgagtgagaactattctgttgaca

SEQ ID NO: 5339057 - DNA, 25 bp, Homo sapien
tattccacactttaccagcgagtga

SEQ ID NO: 5339058 - DNA, 25 bp, Homo sapien
tctactctacatccctgaggtttca

SEQ ID NO: 5339059 - DNA, 25 bp, Homo sapien
ctggccacaagagtattaagaggga

SEQ ID NO: 5339060 - DNA, 25 bp, Homo sapien
taaaaagaacatgagtaggtctggc

SEQ ID NO: 5339061 - DNA, 25 bp, Homo sapien
tcaaatgaggtcactgagatccatg

SEQ ID NO: 5339062 - DNA, 25 bp, Homo sapien
ggctttagttgctgcgaaggctcaa

SEQ ID NO: 5339063 - DNA, 25 bp, Homo sapien
taaccaattagctgtagcagtccca

SEQ ID NO: 5339064 - DNA, 25 bp, Homo sapien
tgtgacatgatctgattagttggta

SEQ ID NO: 5339065 - DNA, 25 bp, Homo sapien
taatatgtttgtatatcaaagatac

SEQ ID NO: 5339066 - DNA, 25 bp, Homo sapien
ataatatgtttgtatatcaaagata

SEQ ID NO: 5339067 - DNA, 25 bp, Homo sapien
ctatgtgacatgatctgattagttg

SEQ ID NO: 5339068 - DNA, 25 bp, Homo sapien
gcaagtttttcataatatactccat

SEQ ID NO: 5339069 - DNA, 25 bp, Homo sapien
tcgcaagtttttcataatatactcc

SEQ ID NO: 5339070 - DNA, 25 bp, Homo sapien
tttggcattcgcaagtttttcataa

SEQ ID NO: 5339071 - DNA, 25 bp, Homo sapien
tttttggcattcgcaagtttttcat

SEQ ID NO: 5339072 - DNA, 25 bp, Homo sapien
ctagggcacagtgctgtgatttctg

SEQ ID NO: 5339073 - DNA, 25 bp, Homo sapien
actagggcacagtgctgtgatttct

SEQ ID NO: 5339074 - DNA, 25 bp, Homo sapien
tagggcacagtgctgtgatttctgc

SEQ ID NO: 5339075 - DNA, 25 bp, Homo sapien
tatggatcactacattaattctact

SEQ ID NO: 5339076 - DNA, 25 bp, Homo sapien
aataaggactcttagtccacagtac

SEQ ID NO: 5339077 - DNA, 25 bp, Homo sapien
gcttgggacctagttaatatctgag

SEQ ID NO: 5339078 - DNA, 25 bp, Homo sapien
cacagtacagttatggatcactaca

SEQ ID NO: 5339079 - DNA, 25 bp, Homo sapien
gagcaatatgagttttgcagattaa

SEQ ID NO: 5339080 - DNA, 25 bp, Homo sapien
gaaagaatatgggagaacactgtgg

SEQ ID NO: 5339081 - DNA, 25 bp, Homo sapien
tagtttgaaaccaagttttagagca

SEQ ID NO: 5339082 - DNA, 25 bp, Homo sapien
ccatcagctggccatagggaaagaa

SEQ ID NO: 5339083 - DNA, 25 bp, Homo sapien
ggcaattgagctccaatgtgggcaa

SEQ ID NO: 5339084 - DNA, 25 bp, Homo sapien
aagaactcacggagctgtgtagggt

SEQ ID NO: 5339085 - DNA, 25 bp, Homo sapien
ccagatacggaataatcgattataa

SEQ ID NO: 5339086 - DNA, 25 bp, Homo sapien
ctgtgtagggtaagacgaatggcaa

SEQ ID NO: 5339087 - DNA, 25 bp, Homo sapien
cagattcaggacactaaaactttta

SEQ ID NO: 5339088 - DNA, 25 bp, Homo sapien
cctgcagattcaggacactaaaact

SEQ ID NO: 5339089 - DNA, 25 bp, Homo sapien
tacattcatgaagtactcctgcaga

SEQ ID NO: 5339090 - DNA, 25 bp, Homo sapien
tcaatatctttatccctccttacat

SEQ ID NO: 5339091 - DNA, 25 bp, Homo sapien
gaactgggaagttcatttacataat

SEQ ID NO: 5339092 - DNA, 25 bp, Homo sapien
tcatctgatgtgttataatgggaga

SEQ ID NO: 5339093 - DNA, 25 bp, Homo sapien
atcatctgatgtgttataatgggag

SEQ ID NO: 5339094 - DNA, 25 bp, Homo sapien
catcatctgatgtgttataatggga

SEQ ID NO: 5339095 - DNA, 25 bp, Homo sapien
tgtcttaaggaaagattacacagtt

SEQ ID NO: 5339096 - DNA, 25 bp, Homo sapien
tgttgattccaagtcattggataga

SEQ ID NO: 5339097 - DNA, 25 bp, Homo sapien
cataatgatcaatgctatttgacaa

SEQ ID NO: 5339098 - DNA, 25 bp, Homo sapien
gctacagtgcccagactcttcttga

SEQ ID NO: 5339099 - DNA, 25 bp, Homo sapien
agcatggagtaacaagggagctata

SEQ ID NO: 5339100 - DNA, 25 bp, Homo sapien
caagggagctatagccagaaagggc

SEQ ID NO: 5339101 - DNA, 25 bp, Homo sapien
aaagggcagagacatagtgtttcac

SEQ ID NO: 5339102 - DNA, 25 bp, Homo sapien
gagtaacaagggagctatagccaga

SEQ ID NO: 5339103 - DNA, 25 bp, Homo sapien
gagccagttgtagcactgccttgtt

SEQ ID NO: 5339104 - DNA, 25 bp, Homo sapien
cttgccaatggaacctgagaagcag

SEQ ID NO: 5339105 - DNA, 25 bp, Homo sapien
ggtcagtggcactctttagagctgg

SEQ ID NO: 5339106 - DNA, 25 bp, Homo sapien
cagcactgtggcagggttgtcccgt

SEQ ID NO: 5339107 - DNA, 25 bp, Homo sapien
aagtatctgggcgtcaagtccccat

SEQ ID NO: 5339108 - DNA, 25 bp, Homo sapien
tatcctgccagtgacgatgatgtgg

SEQ ID NO: 5339109 - DNA, 25 bp, Homo sapien
tatagttccctatgtcagctaaggg

SEQ ID NO: 5339110 - DNA, 25 bp, Homo sapien
gagaatgacgtcttcatcaaaacca

SEQ ID NO: 5339111 - DNA, 25 bp, Homo sapien
gattttcaataaagttactgccagg

SEQ ID NO: 5339112 - DNA, 25 bp, Homo sapien
taagccaaaacatctgcctgacagc

SEQ ID NO: 5339113 - DNA, 25 bp, Homo sapien
gggagtaagaagtgatagttgacca

SEQ ID NO: 5339114 - DNA, 25 bp, Homo sapien
tgccaggggtatttaagccaaaaca

SEQ ID NO: 5339115 - DNA, 25 bp, Homo sapien
tcaactgcatcagccagggttaatg

SEQ ID NO: 5339116 - DNA, 25 bp, Homo sapien
tatttatccgattttaatgtgttag

SEQ ID NO: 5339117 - DNA, 25 bp, Homo sapien
tccatggaaagtcatcaactgcatc

SEQ ID NO: 5339118 - DNA, 25 bp, Homo sapien
tgttcaactcggcattgtgaaggca

SEQ ID NO: 5339119 - DNA, 25 bp, Homo sapien
tttttccaatatgattttgccaatc

SEQ ID NO: 5339120 - DNA, 25 bp, Homo sapien
atagaggattctcactaatttgaag

SEQ ID NO: 5339121 - DNA, 25 bp, Homo sapien
catagaggattctcactaatttgaa

SEQ ID NO: 5339122 - DNA, 25 bp, Homo sapien
ttgaagttgctggtgcttttttcca

SEQ ID NO: 5339123 - DNA, 25 bp, Homo sapien
gagttgctgctgatctaagaagtaa

SEQ ID NO: 5339124 - DNA, 25 bp, Homo sapien
aaagcatctcacatcaactgccaga

SEQ ID NO: 5339125 - DNA, 25 bp, Homo sapien
gctaaaactttgaactgcgtctgaa

SEQ ID NO: 5339126 - DNA, 25 bp, Homo sapien
aagctcgatgctggacacaatagtc

SEQ ID NO: 5339127 - DNA, 25 bp, Homo sapien
tgtgagccttaaactcaattggaag

SEQ ID NO: 5339128 - DNA, 25 bp, Homo sapien
gtgagccttaaactcaattggaaga

SEQ ID NO: 5339129 - DNA, 25 bp, Homo sapien
ctgtgagccttaaactcaattggaa

SEQ ID NO: 5339130 - DNA, 25 bp, Homo sapien
ttcaccccttgatctaaccactgga

SEQ ID NO: 5339131 - DNA, 25 bp, Homo sapien
caacacgtgtttctacatcagggag

SEQ ID NO: 5339132 - DNA, 25 bp, Homo sapien
gagagtctgcttcaaatctaagacc

SEQ ID NO: 5339133 - DNA, 25 bp, Homo sapien
tatggtgaccatactaaaaaagact

SEQ ID NO: 5339134 - DNA, 25 bp, Homo sapien
ctctgaggtctgaattcagtaaaca

SEQ ID NO: 5339135 - DNA, 25 bp, Homo sapien
ccaaattgaggcaatgagagaggaa

SEQ ID NO: 5339136 - DNA, 25 bp, Homo sapien
gaagacaacataccttacaagttat

SEQ ID NO: 5339137 - DNA, 25 bp, Homo sapien
caagttatggtgtacagacatccca

SEQ ID NO: 5339138 - DNA, 25 bp, Homo sapien
aacattatgccaagcttcacaagct

SEQ ID NO: 5339139 - DNA, 25 bp, Homo sapien
tagcagcactgttagcactatagga

SEQ ID NO: 5339140 - DNA, 25 bp, Homo sapien
gctaatatataaaggccgctgctac

SEQ ID NO: 5339141 - DNA, 25 bp, Homo sapien
gaatgaagcaactttatatccctgg

SEQ ID NO: 5339142 - DNA, 25 bp, Homo sapien
taactagcattagaaagggcaacat

SEQ ID NO: 5339143 - DNA, 25 bp, Homo sapien
ggccttagtagtcagtctttgcaca

SEQ ID NO: 5339144 - DNA, 25 bp, Homo sapien
taaggattccattttgactcaacag

SEQ ID NO: 5339145 - DNA, 25 bp, Homo sapien
aatgtccatgtttgagggcacagaa

SEQ ID NO: 5339146 - DNA, 25 bp, Homo sapien
tagttaccagggacaaagccaaagc

SEQ ID NO: 5339147 - DNA, 25 bp, Homo sapien
tagtgattagagacacctctagggc

SEQ ID NO: 5339148 - DNA, 25 bp, Homo sapien
ccttaggagcctgatacaattacac

SEQ ID NO: 5339149 - DNA, 25 bp, Homo sapien
caagtaacatgggtgtgagatccct

SEQ ID NO: 5339150 - DNA, 25 bp, Homo sapien
tgcagggcccagatccattaaccga

SEQ ID NO: 5339151 - DNA, 25 bp, Homo sapien
ttaggtcccgcacatatcatggtgc

SEQ ID NO: 5339152 - DNA, 25 bp, Homo sapien
tcaccctggatgtgcttaggtcccg

SEQ ID NO: 5339153 - DNA, 25 bp, Homo sapien
ggctgggtagcgtttccaagacaca

SEQ ID NO: 5339154 - DNA, 25 bp, Homo sapien
catataagctggttaaggccggcaa

SEQ ID NO: 5339155 - DNA, 25 bp, Homo sapien
taagccttgtgaccctccagaaatg

SEQ ID NO: 5339156 - DNA, 25 bp, Homo sapien
gagcacccgtgagcataacaagcag

SEQ ID NO: 5339157 - DNA, 25 bp, Homo sapien
aatgtgcccggctcaattccttgga

SEQ ID NO: 5339158 - DNA, 25 bp, Homo sapien
cttatttggtctcttgtgcggaaac

SEQ ID NO: 5339159 - DNA, 25 bp, Homo sapien
tatttggtctcttgtgcggaaacca

SEQ ID NO: 5339160 - DNA, 25 bp, Homo sapien
gtctcttgtgcggaaaccaccacca

SEQ ID NO: 5339161 - DNA, 25 bp, Homo sapien
ttggtctcttgtgcggaaaccacca

SEQ ID NO: 5339162 - DNA, 25 bp, Homo sapien
cttcatgacacagtgcggctgtcat

SEQ ID NO: 5339163 - DNA, 25 bp, Homo sapien
acaccattctgatcccgcatgtgag

SEQ ID NO: 5339164 - DNA, 25 bp, Homo sapien
gcggctgtcattcacaccattctga

SEQ ID NO: 5339165 - DNA, 25 bp, Homo sapien
catgtgagctagtagccccatacaa

SEQ ID NO: 5339166 - DNA, 25 bp, Homo sapien
gagaccccagtttaaaagctatgca

SEQ ID NO: 5339167 - DNA, 25 bp, Homo sapien
ggaggcagcccttgtctaattcaga

SEQ ID NO: 5339168 - DNA, 25 bp, Homo sapien
cctcctgtgctgtatgagaccccag

SEQ ID NO: 5339169 - DNA, 25 bp, Homo sapien
cttgaagcaagtaggcctcctgtgc

SEQ ID NO: 5339170 - DNA, 25 bp, Homo sapien
ggtggctaactgataaagtaacatt

SEQ ID NO: 5339171 - DNA, 25 bp, Homo sapien
aatgtcttgccataccaactaaaac

SEQ ID NO: 5339172 - DNA, 25 bp, Homo sapien
tcaaaaatgtaaaggtggctaactg

SEQ ID NO: 5339173 - DNA, 25 bp, Homo sapien
gaatgaatttactaatgaacattac

SEQ ID NO: 5339174 - DNA, 25 bp, Homo sapien
gttgtgctccatgatgaacacttct

SEQ ID NO: 5339175 - DNA, 25 bp, Homo sapien
tattatcctcctgtagttgtgctcc

SEQ ID NO: 5339176 - DNA, 25 bp, Homo sapien
aagtgagatttgtgcatggagaaac

SEQ ID NO: 5339177 - DNA, 25 bp, Homo sapien
tacaggaaagacagattcaggtagt

SEQ ID NO: 5339178 - DNA, 25 bp, Homo sapien
ggtctagtatgcctgggttgtgcct

SEQ ID NO: 5339179 - DNA, 25 bp, Homo sapien
gtttattttatttgggcaggatgga

SEQ ID NO: 5339180 - DNA, 25 bp, Homo sapien
taaaagccatcagaaatgacatcaa

SEQ ID NO: 5339181 - DNA, 25 bp, Homo sapien
gttttcttgctttacacaccacatc

SEQ ID NO: 5339182 - DNA, 25 bp, Homo sapien
catgttcttgaatgtggaatactaa

SEQ ID NO: 5339183 - DNA, 25 bp, Homo sapien
tctccctctgtaatcagactttgca

SEQ ID NO: 5339184 - DNA, 25 bp, Homo sapien
taatcagactttgcattgcatgttc

SEQ ID NO: 5339185 - DNA, 25 bp, Homo sapien
ttgcatgttcttgaatgtggaatac

SEQ ID NO: 5339186 - DNA, 25 bp, Homo sapien
tataagatgactggactcatggagt

SEQ ID NO: 5339187 - DNA, 25 bp, Homo sapien
gagagcatacccacaatggctcctt

SEQ ID NO: 5339188 - DNA, 25 bp, Homo sapien
tggcaaatacgttatgctgcctgct

SEQ ID NO: 5339189 - DNA, 25 bp, Homo sapien
tcatgaccgagctctagtaatttgc

SEQ ID NO: 5339190 - DNA, 25 bp, Homo sapien
atagccacagctgatctacagatcg

SEQ ID NO: 5339191 - DNA, 25 bp, Homo sapien
tacagatcgtagagttccctggaag

SEQ ID NO: 5339192 - DNA, 25 bp, Homo sapien
ctgatctacagatcgtagagttccc

SEQ ID NO: 5339193 - DNA, 25 bp, Homo sapien
ccacagctgatctacagatcgtaga

SEQ ID NO: 5339194 - DNA, 25 bp, Homo sapien
tgccatatctctaggccaacagttg

SEQ ID NO: 5339195 - DNA, 25 bp, Homo sapien
taaattcaactgaagtgtctctgct

SEQ ID NO: 5339196 - DNA, 25 bp, Homo sapien
ctctgcttctaatctgggaaagcct

SEQ ID NO: 5339197 - DNA, 25 bp, Homo sapien
aaagccttcatcatgtgccatatct

SEQ ID NO: 5339198 - DNA, 25 bp, Homo sapien
cttccattatgtctttcagattcac

SEQ ID NO: 5339199 - DNA, 25 bp, Homo sapien
ctccttccattatgtctttcagatt

SEQ ID NO: 5339200 - DNA, 25 bp, Homo sapien
ctctccttccattatgtctttcaga

SEQ ID NO: 5339201 - DNA, 25 bp, Homo sapien
ccattatgtctttcagattcaccat

SEQ ID NO: 5339202 - DNA, 25 bp, Homo sapien
ttcttctacctcataatttggaaac

SEQ ID NO: 5339203 - DNA, 25 bp, Homo sapien
tcttctacctcataatttggaaacc

SEQ ID NO: 5339204 - DNA, 25 bp, Homo sapien
tctgctttgcacaaaaatgttctca

SEQ ID NO: 5339205 - DNA, 25 bp, Homo sapien
tttcttctacctcataatttggaaa

SEQ ID NO: 5339206 - DNA, 25 bp, Homo sapien
gctgtgaagtggcccttttcatcac

SEQ ID NO: 5339207 - DNA, 25 bp, Homo sapien
ttaaagtttgacacagcaaatacct

SEQ ID NO: 5339208 - DNA, 25 bp, Homo sapien
cacagtccgatgaaaggatgccaaa

SEQ ID NO: 5339209 - DNA, 25 bp, Homo sapien
agttcgcctcgtcgccatgcctcgg

SEQ ID NO: 5339210 - DNA, 25 bp, Homo sapien
tcaaaaagtatgtgcataaacagag

SEQ ID NO: 5339211 - DNA, 25 bp, Homo sapien
gcagataaactgtagtccctgcccc

SEQ ID NO: 5339212 - DNA, 25 bp, Homo sapien
aggcagataaactgtagtccctgcc

SEQ ID NO: 5339213 - DNA, 25 bp, Homo sapien
ataaactgtagtccctgccccctgg

SEQ ID NO: 5339214 - DNA, 25 bp, Homo sapien
agataaactgtagtccctgccccct

SEQ ID NO: 5339215 - DNA, 25 bp, Homo sapien
cattcaaaagcctcttctctcgttt

SEQ ID NO: 5339216 - DNA, 25 bp, Homo sapien
cgtttgtgcatatactgctaagcac

SEQ ID NO: 5339217 - DNA, 25 bp, Homo sapien
cttctctcgtttgtgcatatactgc

SEQ ID NO: 5339218 - DNA, 25 bp, Homo sapien
aaaagcctcttctctcgtttgtgca

SEQ ID NO: 5339219 - DNA, 25 bp, Homo sapien
agctagcgcacccatcctaaaatag

SEQ ID NO: 5339220 - DNA, 25 bp, Homo sapien
gatattccctccttattgcagtaag

SEQ ID NO: 5339221 - DNA, 25 bp, Homo sapien
gactctgtaactatcctccaatttg

SEQ ID NO: 5339222 - DNA, 25 bp, Homo sapien
caagactaacagattgctcaagact

SEQ ID NO: 5339223 - DNA, 25 bp, Homo sapien
tgcatgtttggaaggtttattcaca

SEQ ID NO: 5339224 - DNA, 25 bp, Homo sapien
gtgcatgtttggaaggtttattcac

SEQ ID NO: 5339225 - DNA, 25 bp, Homo sapien
gcatgtttggaaggtttattcacat

SEQ ID NO: 5339226 - DNA, 25 bp, Homo sapien
tcttttactctctggctaccctcct

SEQ ID NO: 5339227 - DNA, 25 bp, Homo sapien
ttcttttactctctggctaccctcc

SEQ ID NO: 5339228 - DNA, 25 bp, Homo sapien
cttcttttactctctggctaccctc

SEQ ID NO: 5339229 - DNA, 25 bp, Homo sapien
tcaaataaatggtatcgctgcaaca

SEQ ID NO: 5339230 - DNA, 25 bp, Homo sapien
gctgcaacaagatatccataggcca

SEQ ID NO: 5339231 - DNA, 25 bp, Homo sapien
aaatctttgtaaccgcagttaggca

SEQ ID NO: 5339232 - DNA, 25 bp, Homo sapien
aaagtcttgaccttaacctcatgcc

SEQ ID NO: 5339233 - DNA, 25 bp, Homo sapien
ggatgatgttccctaatctactcat

SEQ ID NO: 5339234 - DNA, 25 bp, Homo sapien
taaggtttcctcaagcataggttag

SEQ ID NO: 5339235 - DNA, 25 bp, Homo sapien
aagagggctggctgtaagttaagct

SEQ ID NO: 5339236 - DNA, 25 bp, Homo sapien
tctaaactctttatgctgatactgc

SEQ ID NO: 5339237 - DNA, 25 bp, Homo sapien
cacagggttttgaagcaacttgtac

SEQ ID NO: 5339238 - DNA, 25 bp, Homo sapien
tcacagggttttgaagcaacttgta

SEQ ID NO: 5339239 - DNA, 25 bp, Homo sapien
cagggttttgaagcaacttgtactt

SEQ ID NO: 5339240 - DNA, 25 bp, Homo sapien
acagggttttgaagcaacttgtact

SEQ ID NO: 5339241 - DNA, 25 bp, Homo sapien
agaggctatctgaccccatctttgg

SEQ ID NO: 5339242 - DNA, 25 bp, Homo sapien
tccaaatggcaagaggctatctgac

SEQ ID NO: 5339243 - DNA, 25 bp, Homo sapien
ggcaagaggctatctgaccccatct

SEQ ID NO: 5339244 - DNA, 25 bp, Homo sapien
caatggtgctgacaatgttggggat

SEQ ID NO: 5339245 - DNA, 25 bp, Homo sapien
tgtttcttactgactatcaggcaac

SEQ ID NO: 5339246 - DNA, 25 bp, Homo sapien
tcaggcaacatatgtaccaccaaag

SEQ ID NO: 5339247 - DNA, 25 bp, Homo sapien
tattttgaaatcatagcctttacag

SEQ ID NO: 5339248 - DNA, 25 bp, Homo sapien
aaagtgtgccccataagtgcacaca

SEQ ID NO: 5339249 - DNA, 25 bp, Homo sapien
agtacttgccctgggcttgtgatgg

SEQ ID NO: 5339250 - DNA, 25 bp, Homo sapien
taagggtgttatcttcttctggaga

SEQ ID NO: 5339251 - DNA, 25 bp, Homo sapien
agccctctagcagtacttgccctgg

SEQ ID NO: 5339252 - DNA, 25 bp, Homo sapien
tcctggtgagcttaaccttcagagt

SEQ ID NO: 5339253 - DNA, 25 bp, Homo sapien
cagcgacgaagaggatacagtccga

SEQ ID NO: 5339254 - DNA, 25 bp, Homo sapien
aagtgggatcaacagcgacgaagag

SEQ ID NO: 5339255 - DNA, 25 bp, Homo sapien
aagaggatacagtccgaggcaaagg

SEQ ID NO: 5339256 - DNA, 25 bp, Homo sapien
agcggccgacggcacaggagactga

SEQ ID NO: 5339257 - DNA, 25 bp, Homo sapien
ccctgacgtcacccagtccccaggg

SEQ ID NO: 5339258 - DNA, 25 bp, Homo sapien
cctgacgtcacccagtccccagggc

SEQ ID NO: 5339259 - DNA, 25 bp, Homo sapien
ccagggccagggagggccctgcgtt

SEQ ID NO: 5339260 - DNA, 25 bp, Homo sapien
ggccagggagggccctgcgttccat

SEQ ID NO: 5339261 - DNA, 25 bp, Homo sapien
tatcttcactgactttatgttgggc

SEQ ID NO: 5339262 - DNA, 25 bp, Homo sapien
tcactgactttatgttgggcttgcc

SEQ ID NO: 5339263 - DNA, 25 bp, Homo sapien
cattatcttcactgactttatgttg

SEQ ID NO: 5339264 - DNA, 25 bp, Homo sapien
cataccaggggttttctagtgtcta

SEQ ID NO: 5339265 - DNA, 25 bp, Homo sapien
tttattcaaagtcccgtgacaccca

SEQ ID NO: 5339266 - DNA, 25 bp, Homo sapien
tttatttcaggaacaatatcattca

SEQ ID NO: 5339267 - DNA, 25 bp, Homo sapien
cccttccgggaatcactacaatcta

SEQ ID NO: 5339268 - DNA, 25 bp, Homo sapien
taaggctgtggcattcccttccggg

SEQ ID NO: 5339269 - DNA, 25 bp, Homo sapien
gaaaccatacttctgctactagctg

SEQ ID NO: 5339270 - DNA, 25 bp, Homo sapien
tgcctagagaacaactcagagaaac

SEQ ID NO: 5339271 - DNA, 25 bp, Homo sapien
tgaaaatacctctgacatggaaagg

SEQ ID NO: 5339272 - DNA, 25 bp, Homo sapien
tgaatgcccatattgcttccaacat

SEQ ID NO: 5339273 - DNA, 25 bp, Homo sapien
catagatatcaatatccagtttatg

SEQ ID NO: 5339274 - DNA, 25 bp, Homo sapien
atatccagtttatggcagccatgtt

SEQ ID NO: 5339275 - DNA, 25 bp, Homo sapien
tcatagatatcaatatccagtttat

SEQ ID NO: 5339276 - DNA, 25 bp, Homo sapien
tatcaatatccagtttatggcagcc

SEQ ID NO: 5339277 - DNA, 25 bp, Homo sapien
cagagtttacagtaagcagagctca

SEQ ID NO: 5339278 - DNA, 25 bp, Homo sapien
taggcgcagagtttacagtaagcag

SEQ ID NO: 5339279 - DNA, 25 bp, Homo sapien
gtaagcagagctcacaccactacac

SEQ ID NO: 5339280 - DNA, 25 bp, Homo sapien
gggttaggcgcagagtttacagtaa

SEQ ID NO: 5339281 - DNA, 25 bp, Homo sapien
tcccaacttagacctccaagttgct

SEQ ID NO: 5339282 - DNA, 25 bp, Homo sapien
ctgagacccacctatctaccttttt

SEQ ID NO: 5339283 - DNA, 25 bp, Homo sapien
acttagacctccaagttgctgagac

SEQ ID NO: 5339284 - DNA, 25 bp, Homo sapien
tcatgggccattatgactggcccag

SEQ ID NO: 5339285 - DNA, 25 bp, Homo sapien
gctcattgctctgatgcagcacaca

SEQ ID NO: 5339286 - DNA, 25 bp, Homo sapien
gatatggcaggtttgggccaagaac

SEQ ID NO: 5339287 - DNA, 25 bp, Homo sapien
tggttcaatggtcatgccaaacacc

SEQ ID NO: 5339288 - DNA, 25 bp, Homo sapien
ccaagaacagctgatcaaagatgac

SEQ ID NO: 5339289 - DNA, 25 bp, Homo sapien
gatgtagggcctcaaatcattataa

SEQ ID NO: 5339290 - DNA, 25 bp, Homo sapien
tgttagccatttgacctgtaagaga

SEQ ID NO: 5339291 - DNA, 25 bp, Homo sapien
tgctacaataaagggagttcagtct

SEQ ID NO: 5339292 - DNA, 25 bp, Homo sapien
gaactgtgacacttctatcctgaag

SEQ ID NO: 5339293 - DNA, 25 bp, Homo sapien
ggagatgaagatgcattgagctata

SEQ ID NO: 5339294 - DNA, 25 bp, Homo sapien
gagatgaagatgcattgagctataa

SEQ ID NO: 5339295 - DNA, 25 bp, Homo sapien
tgataatttagcagatccagtggcc

SEQ ID NO: 5339296 - DNA, 25 bp, Homo sapien
cttgataatttagcagatccagtgg

SEQ ID NO: 5339297 - DNA, 25 bp, Homo sapien
cccttgataatttagcagatccagt

SEQ ID NO: 5339298 - DNA, 25 bp, Homo sapien
ataatttagcagatccagtggccaa

SEQ ID NO: 5339299 - DNA, 25 bp, Homo sapien
ccaaattgctgagacgtccaatgca

SEQ ID NO: 5339300 - DNA, 25 bp, Homo sapien
tgtacctttccggattgaggatggg

SEQ ID NO: 5339301 - DNA, 25 bp, Homo sapien
gctgtttagattgtacctttccgga

SEQ ID NO: 5339302 - DNA, 25 bp, Homo sapien
catccagcctatattgcagtggcac

SEQ ID NO: 5339303 - DNA, 25 bp, Homo sapien
attcttccagtctccttctttcttc

SEQ ID NO: 5339304 - DNA, 25 bp, Homo sapien
tcttccagtctccttctttcttcat

SEQ ID NO: 5339305 - DNA, 25 bp, Homo sapien
ttcttccagtctccttctttcttca

SEQ ID NO: 5339306 - DNA, 25 bp, Homo sapien
gttgctgtatttgagtagtttataa

SEQ ID NO: 5339307 - DNA, 25 bp, Homo sapien
aagggttgagggtgaatgggatgat

SEQ ID NO: 5339308 - DNA, 25 bp, Homo sapien
ttaagggttgagggtgaatgggatg

SEQ ID NO: 5339309 - DNA, 25 bp, Homo sapien
aagttgctgtatttgagtagtttat

SEQ ID NO: 5339310 - DNA, 25 bp, Homo sapien
taggttgactatcagtttgaatttc

SEQ ID NO: 5339311 - DNA, 25 bp, Homo sapien
ttgaatttcttggtaggattgtgtt

SEQ ID NO: 5339312 - DNA, 25 bp, Homo sapien
acactttttgtaggttgactatcag

SEQ ID NO: 5339313 - DNA, 25 bp, Homo sapien
atttcttggtaggattgtgttttca

SEQ ID NO: 5339314 - DNA, 25 bp, Homo sapien
agtgatgggccttcaataaacttcc

SEQ ID NO: 5339315 - DNA, 25 bp, Homo sapien
aaacttccgagattgcttgatgtgc

SEQ ID NO: 5339316 - DNA, 25 bp, Homo sapien
gatgtgcttaacctgcggtttaaaa

SEQ ID NO: 5339317 - DNA, 25 bp, Homo sapien
cttgatgtgcttaacctgcggttta

SEQ ID NO: 5339318 - DNA, 25 bp, Homo sapien
ctcctccttacgctcttctgtgaat

SEQ ID NO: 5339319 - DNA, 25 bp, Homo sapien
tgctcctccttacgctcttctgtga

SEQ ID NO: 5339320 - DNA, 25 bp, Homo sapien
tcctccttacgctcttctgtgaatg

SEQ ID NO: 5339321 - DNA, 25 bp, Homo sapien
ctccttacgctcttctgtgaatgta

SEQ ID NO: 5339322 - DNA, 25 bp, Homo sapien
ttacttggattaatggctgttgtca

SEQ ID NO: 5339323 - DNA, 25 bp, Homo sapien
tacttggattaatggctgttgtcag

SEQ ID NO: 5339324 - DNA, 25 bp, Homo sapien
gttacttggattaatggctgttgtc

SEQ ID NO: 5339325 - DNA, 25 bp, Homo sapien
gacttaacttcatcggtataaccat

SEQ ID NO: 5339326 - DNA, 25 bp, Homo sapien
gttgtagcatgtagctgagacttaa

SEQ ID NO: 5339327 - DNA, 25 bp, Homo sapien
tagcatgtagctgagacttaacttc

SEQ ID NO: 5339328 - DNA, 25 bp, Homo sapien
agacttaacttcatcggtataacca

SEQ ID NO: 5339329 - DNA, 25 bp, Homo sapien
cctgaattgtcacgggcttctccat

SEQ ID NO: 5339330 - DNA, 25 bp, Homo sapien
tattcacctgaattgtcacgggctt

SEQ ID NO: 5339331 - DNA, 25 bp, Homo sapien
tattccttattcacctgaattgtca

SEQ ID NO: 5339332 - DNA, 25 bp, Homo sapien
tccttattcacctgaattgtcacgg

SEQ ID NO: 5339333 - DNA, 25 bp, Homo sapien
catatactccattaagaactcccat

SEQ ID NO: 5339334 - DNA, 25 bp, Homo sapien
tactccattaagaactcccattttc

SEQ ID NO: 5339335 - DNA, 25 bp, Homo sapien
atatactccattaagaactcccatt

SEQ ID NO: 5339336 - DNA, 25 bp, Homo sapien
tatactccattaagaactcccattt

SEQ ID NO: 5339337 - DNA, 25 bp, Homo sapien
ttgggtgatgagcacactagaagcc

SEQ ID NO: 5339338 - DNA, 25 bp, Homo sapien
gaaaatctaccaataatgaggaagg

SEQ ID NO: 5339339 - DNA, 25 bp, Homo sapien
tattcatctagtgcccatgtaacaa

SEQ ID NO: 5339340 - DNA, 25 bp, Homo sapien
aagaaaaggccaggatcaggtacct

SEQ ID NO: 5339341 - DNA, 25 bp, Homo sapien
caaaaaacaccttgtagatatagca

SEQ ID NO: 5339342 - DNA, 25 bp, Homo sapien
caccttgtagatatagcaagttatt

SEQ ID NO: 5339343 - DNA, 25 bp, Homo sapien
aaaacaccttgtagatatagcaagt

SEQ ID NO: 5339344 - DNA, 25 bp, Homo sapien
aacaccttgtagatatagcaagtta

SEQ ID NO: 5339345 - DNA, 25 bp, Homo sapien
cctaagaagggtgctctatcatgca

SEQ ID NO: 5339346 - DNA, 25 bp, Homo sapien
cataatcaatagcaaaaaggttctt

SEQ ID NO: 5339347 - DNA, 25 bp, Homo sapien
ggttctttcaatccatatcatacag

SEQ ID NO: 5339348 - DNA, 25 bp, Homo sapien
tgcatgccacccattacaaaaaggt

SEQ ID NO: 5339349 - DNA, 25 bp, Homo sapien
cacaccaacactaattcgtttggga

SEQ ID NO: 5339350 - DNA, 25 bp, Homo sapien
caaaagtctacacgtatttcaccaa

SEQ ID NO: 5339351 - DNA, 25 bp, Homo sapien
aaaattcatcagaacaagcttcaga

SEQ ID NO: 5339352 - DNA, 25 bp, Homo sapien
agttcttatcaggtaatgctcacag

SEQ ID NO: 5339353 - DNA, 25 bp, Homo sapien
cacagtggtttacaactgaaatccc

SEQ ID NO: 5339354 - DNA, 25 bp, Homo sapien
tggttacatgaattgtgatacatcc

SEQ ID NO: 5339355 - DNA, 25 bp, Homo sapien
ccagacataggtgtgtgtacccatt

SEQ ID NO: 5339356 - DNA, 25 bp, Homo sapien
ttgtgcccaggagatccactctgca

SEQ ID NO: 5339357 - DNA, 25 bp, Homo sapien
tttgagatttctcagggcaggtcaa

SEQ ID NO: 5339358 - DNA, 25 bp, Homo sapien
gaattaagaagatgtagccgggcgc

SEQ ID NO: 5339359 - DNA, 25 bp, Homo sapien
gaaacctgaagctgtacaacttcta

SEQ ID NO: 5339360 - DNA, 25 bp, Homo sapien
tctcactggattatacctaaaaatg

SEQ ID NO: 5339361 - DNA, 25 bp, Homo sapien
ttattgaatgtaactgctctgtcgt

SEQ ID NO: 5339362 - DNA, 25 bp, Homo sapien
ggagcttttacctcactggatgcag

SEQ ID NO: 5339363 - DNA, 25 bp, Homo sapien
gagacacgggacagagtacagaggc

SEQ ID NO: 5339364 - DNA, 25 bp, Homo sapien
gctctgtcgttttgattgaggctgt

SEQ ID NO: 5339365 - DNA, 25 bp, Homo sapien
taaaggaccggagaatggcattcat

SEQ ID NO: 5339366 - DNA, 25 bp, Homo sapien
ataaaggaccggagaatggcattca

SEQ ID NO: 5339367 - DNA, 25 bp, Homo sapien
gatatttttgccctgtcttaactga

SEQ ID NO: 5339368 - DNA, 25 bp, Homo sapien
tttctattgccctagtggatgaaaa

SEQ ID NO: 5339369 - DNA, 25 bp, Homo sapien
tgcccacttttgtatcaggttatct

SEQ ID NO: 5339370 - DNA, 25 bp, Homo sapien
gtagtgctatgccactataatttca

SEQ ID NO: 5339371 - DNA, 25 bp, Homo sapien
aaagcatgctaactctatctgaaag

SEQ ID NO: 5339372 - DNA, 25 bp, Homo sapien
gctcatattagctacagacacggaa

SEQ ID NO: 5339373 - DNA, 25 bp, Homo sapien
gacacggaacttatatcttcccatg

SEQ ID NO: 5339374 - DNA, 25 bp, Homo sapien
gaattggcttatcaacagtgtcagt

SEQ ID NO: 5339375 - DNA, 25 bp, Homo sapien
tgtctctgcacaatacgactttcag

SEQ ID NO: 5339376 - DNA, 25 bp, Homo sapien
agtaagccatttctgttatacacag

SEQ ID NO: 5339377 - DNA, 25 bp, Homo sapien
tcctgttagtctacaatggcaatag

SEQ ID NO: 5339378 - DNA, 25 bp, Homo sapien
gctgtaagacttaatatactgtggc

SEQ ID NO: 5339379 - DNA, 25 bp, Homo sapien
ggattctgcaaatgctccatcactg

SEQ ID NO: 5339380 - DNA, 25 bp, Homo sapien
ttctgcaaatgctccatcactgtat

SEQ ID NO: 5339381 - DNA, 25 bp, Homo sapien
ctgcaaatgctccatcactgtatcc

SEQ ID NO: 5339382 - DNA, 25 bp, Homo sapien
gattctgcaaatgctccatcactgt

SEQ ID NO: 5339383 - DNA, 25 bp, Homo sapien
tctttttcatcactggtgcaatgaa

SEQ ID NO: 5339384 - DNA, 25 bp, Homo sapien
ctcccttttaggcactgggcacact

SEQ ID NO: 5339385 - DNA, 25 bp, Homo sapien
tttctcaacgtcacccacatttcat

SEQ ID NO: 5339386 - DNA, 25 bp, Homo sapien
aaagttcctgctctgaagccggatg

SEQ ID NO: 5339387 - DNA, 25 bp, Homo sapien
agagccagcaactctgtgttataat

SEQ ID NO: 5339388 - DNA, 25 bp, Homo sapien
acataaatgtatatgcggtggctca

SEQ ID NO: 5339389 - DNA, 25 bp, Homo sapien
gccagcaactctgtgttataatata

SEQ ID NO: 5339390 - DNA, 25 bp, Homo sapien
tacataaatgtatatgcggtggctc

SEQ ID NO: 5339391 - DNA, 25 bp, Homo sapien
ctgaaagtctcagggtctcaaggtt

SEQ ID NO: 5339392 - DNA, 25 bp, Homo sapien
ctcagggtctcaaggttttcctcct

SEQ ID NO: 5339393 - DNA, 25 bp, Homo sapien
cagctttggtaactgtgaataagtt

SEQ ID NO: 5339394 - DNA, 25 bp, Homo sapien
ttctgaaagtctcagggtctcaagg

SEQ ID NO: 5339395 - DNA, 25 bp, Homo sapien
tggatttgcagtttgccctcacctc

SEQ ID NO: 5339396 - DNA, 25 bp, Homo sapien
gctgtacatgctctccaagatgctt

SEQ ID NO: 5339397 - DNA, 25 bp, Homo sapien
gaaaatgccgatcgtctatcaacaa

SEQ ID NO: 5339398 - DNA, 25 bp, Homo sapien
cctgatctgactggagcacatctag

SEQ ID NO: 5339399 - DNA, 25 bp, Homo sapien
cccaggtagcaatgagggatgtgat

SEQ ID NO: 5339400 - DNA, 25 bp, Homo sapien
tgatgcaagttgctgcagcaggacc

SEQ ID NO: 5339401 - DNA, 25 bp, Homo sapien
gggtctcttccaacaatttcggctg

SEQ ID NO: 5339402 - DNA, 25 bp, Homo sapien
gaaagcaacactctggtcgatccag

SEQ ID NO: 5339403 - DNA, 25 bp, Homo sapien
cgaaaggacgtaaagaatggcggag

SEQ ID NO: 5339404 - DNA, 25 bp, Homo sapien
aggacgtaaagaatggcggagggag

SEQ ID NO: 5339405 - DNA, 25 bp, Homo sapien
gacgtaaagaatggcggagggagga

SEQ ID NO: 5339406 - DNA, 25 bp, Homo sapien
aagttgctatggtgatatgctcatc

SEQ ID NO: 5339407 - DNA, 25 bp, Homo sapien
atgctcatctccatggcaattgatc

SEQ ID NO: 5339408 - DNA, 25 bp, Homo sapien
tgtaagttgctatggtgatatgctc

SEQ ID NO: 5339409 - DNA, 25 bp, Homo sapien
ccatggcaattgatcattttatttc

SEQ ID NO: 5339410 - DNA, 25 bp, Homo sapien
cacacttcctgacaatctgcatgac

SEQ ID NO: 5339411 - DNA, 25 bp, Homo sapien
aaggccctgggagctagctggtctc

SEQ ID NO: 5339412 - DNA, 25 bp, Homo sapien
ccgcaggtaaaagcaaatctctagc

SEQ ID NO: 5339413 - DNA, 25 bp, Homo sapien
tcacaggaattcttcgggagggcag

SEQ ID NO: 5339414 - DNA, 25 bp, Homo sapien
cgtgcgcgcgtgcgtttttggtaag

SEQ ID NO: 5339415 - DNA, 25 bp, Homo sapien
gcgcgcgtgcgtttttggtaagaac

SEQ ID NO: 5339416 - DNA, 25 bp, Homo sapien
cgcgcgtgcgtttttggtaagaact

SEQ ID NO: 5339417 - DNA, 25 bp, Homo sapien
tgcgcgcgtgcgtttttggtaagaa

SEQ ID NO: 5339418 - DNA, 25 bp, Homo sapien
gttttccgactcagccagtttgtgg

SEQ ID NO: 5339419 - DNA, 25 bp, Homo sapien
gaacaatgactatatccccttccag

SEQ ID NO: 5339420 - DNA, 25 bp, Homo sapien
gttgtgtaggctctggatgtttctg

SEQ ID NO: 5339421 - DNA, 25 bp, Homo sapien
ccagtactaactttgtgagaggtga

SEQ ID NO: 5339422 - DNA, 25 bp, Homo sapien
cttggtattgtgagagcatttttta

SEQ ID NO: 5339423 - DNA, 25 bp, Homo sapien
tggtattgtgagagcattttttact

SEQ ID NO: 5339424 - DNA, 25 bp, Homo sapien
ttcttggtattgtgagagcattttt

SEQ ID NO: 5339425 - DNA, 25 bp, Homo sapien
ggtattgtgagagcattttttactt

SEQ ID NO: 5339426 - DNA, 25 bp, Homo sapien
ttttcatcattttaccaccagaaat

SEQ ID NO: 5339427 - DNA, 25 bp, Homo sapien
ttcttttcattctgactagatggca

SEQ ID NO: 5339428 - DNA, 25 bp, Homo sapien
tcttttcattctgactagatggcat

SEQ ID NO: 5339429 - DNA, 25 bp, Homo sapien
cattttaccaccagaaattaatagt

SEQ ID NO: 5339430 - DNA, 25 bp, Homo sapien
tggcaccttctaacaacttatgcat

SEQ ID NO: 5339431 - DNA, 25 bp, Homo sapien
ggattttctacttcattggcacctt

SEQ ID NO: 5339432 - DNA, 25 bp, Homo sapien
tggattttctacttcattggcacct

SEQ ID NO: 5339433 - DNA, 25 bp, Homo sapien
tcattggcaccttctaacaacttat

SEQ ID NO: 5339434 - DNA, 25 bp, Homo sapien
tgaaatatcataggtgcctgatagc

SEQ ID NO: 5339435 - DNA, 25 bp, Homo sapien
gaaatgaaatatcataggtgcctga

SEQ ID NO: 5339436 - DNA, 25 bp, Homo sapien
aagcaactgtattttcgacctgaaa

SEQ ID NO: 5339437 - DNA, 25 bp, Homo sapien
tgtattttcgacctgaaatgaaata

SEQ ID NO: 5339438 - DNA, 25 bp, Homo sapien
ttcccatggatgggctggctttggc

SEQ ID NO: 5339439 - DNA, 25 bp, Homo sapien
tgagcctgagaatctagagtcttct

SEQ ID NO: 5339440 - DNA, 25 bp, Homo sapien
gaatctagagtcttcttccatgatg

SEQ ID NO: 5339441 - DNA, 25 bp, Homo sapien
cccatggatgggctggctttggcat

SEQ ID NO: 5339442 - DNA, 25 bp, Homo sapien
tcatctttactcaacgtggcatttg

SEQ ID NO: 5339443 - DNA, 25 bp, Homo sapien
agccagttaccctcggcttcacagt

SEQ ID NO: 5339444 - DNA, 25 bp, Homo sapien
catttgcagcaggttgagactttga

SEQ ID NO: 5339445 - DNA, 25 bp, Homo sapien
agcaggttgagactttgaaaattcc

SEQ ID NO: 5339446 - DNA, 25 bp, Homo sapien
ttgctcggaatgcaaccaactctgc

SEQ ID NO: 5339447 - DNA, 25 bp, Homo sapien
aaacaatctctgaagctctagccaa

SEQ ID NO: 5339448 - DNA, 25 bp, Homo sapien
tccccaaacacagtgtaagaccaat

SEQ ID NO: 5339449 - DNA, 25 bp, Homo sapien
ccaagtagcattgctcggaatgcaa

SEQ ID NO: 5339450 - DNA, 25 bp, Homo sapien
tcccagtgtgattttgaacgcatgc

SEQ ID NO: 5339451 - DNA, 25 bp, Homo sapien
ggcagaaactatctgaacgcagaaa

SEQ ID NO: 5339452 - DNA, 25 bp, Homo sapien
tgtcactgggcagaaactatctgaa

SEQ ID NO: 5339453 - DNA, 25 bp, Homo sapien
ttttgaacgcatgccactggatgtc

SEQ ID NO: 5339454 - DNA, 25 bp, Homo sapien
aagagtgaaaccaccaccgggaatg

SEQ ID NO: 5339455 - DNA, 25 bp, Homo sapien
caaccccagagccaacgaagagtga

SEQ ID NO: 5339456 - DNA, 25 bp, Homo sapien
accccagagccaacgaagagtgaaa

SEQ ID NO: 5339457 - DNA, 25 bp, Homo sapien
agagtgaaaccaccaccgggaatgc

SEQ ID NO: 5339458 - DNA, 25 bp, Homo sapien
catatgactctccactcctctgtct

SEQ ID NO: 5339459 - DNA, 25 bp, Homo sapien
acgtaatgtacagccctttcagtca

SEQ ID NO: 5339460 - DNA, 25 bp, Homo sapien
ctttcagtcatgtctacaggcagct

SEQ ID NO: 5339461 - DNA, 25 bp, Homo sapien
tatccagctcaaagttcacgtaatg

SEQ ID NO: 5339462 - DNA, 25 bp, Homo sapien
ttcagtcatgtctacaggcagcttc

SEQ ID NO: 5339463 - DNA, 25 bp, Homo sapien
gattaacccatctgacaatctctgg

SEQ ID NO: 5339464 - DNA, 25 bp, Homo sapien
ggagtacattctatgattaacccat

SEQ ID NO: 5339465 - DNA, 25 bp, Homo sapien
gattggaaggaatagtgagaactcc

SEQ ID NO: 5339466 - DNA, 25 bp, Homo sapien
ccttttcttggcaatggagtacatt

SEQ ID NO: 5339467 - DNA, 25 bp, Homo sapien
cattactcctactgctttcatggca

SEQ ID NO: 5339468 - DNA, 25 bp, Homo sapien
ggcagaaaacacgtcatcaaactgt

SEQ ID NO: 5339469 - DNA, 25 bp, Homo sapien
caaactgtcggaacgtcactgaatt

SEQ ID NO: 5339470 - DNA, 25 bp, Homo sapien
tcctctcatctcgattgaacatcta

SEQ ID NO: 5339471 - DNA, 25 bp, Homo sapien
agcagggtcagccttaccaccagtc

SEQ ID NO: 5339472 - DNA, 25 bp, Homo sapien
tttaattcaaagatgccagcagggt

SEQ ID NO: 5339473 - DNA, 25 bp, Homo sapien
aaaagataatcatggcctaggatac

SEQ ID NO: 5339474 - DNA, 25 bp, Homo sapien
tcatggcctaggatacgaacaagga

SEQ ID NO: 5339475 - DNA, 25 bp, Homo sapien
ggatacgaacaaggatattgccacc

SEQ ID NO: 5339476 - DNA, 25 bp, Homo sapien
tgccaccattgcttagagctgacat

SEQ ID NO: 5339477 - DNA, 25 bp, Homo sapien
gcctaggggcaacatgagcctttgc

SEQ ID NO: 5339478 - DNA, 25 bp, Homo sapien
gagactatgttaccttgcacggcaa

SEQ ID NO: 5339479 - DNA, 25 bp, Homo sapien
acaaagatgtccaggtgctaaccgc

SEQ ID NO: 5339480 - DNA, 25 bp, Homo sapien
tgctaaccgccagaacctgagacta

SEQ ID NO: 5339481 - DNA, 25 bp, Homo sapien
acccttttgtatgaggctgatccta

SEQ ID NO: 5339482 - DNA, 25 bp, Homo sapien
tagcgttccatctttgctaacttgg

SEQ ID NO: 5339483 - DNA, 25 bp, Homo sapien
gcagagagctgtagcgttccatctt

SEQ ID NO: 5339484 - DNA, 25 bp, Homo sapien
tagtcttcgcatcaacaggagagca

SEQ ID NO: 5339485 - DNA, 25 bp, Homo sapien
agtcttcgcatcaacaggagagcag

SEQ ID NO: 5339486 - DNA, 25 bp, Homo sapien
gcacacagctccgacaatggcagga

SEQ ID NO: 5339487 - DNA, 25 bp, Homo sapien
ccaagacagagcaggcaaagaagac

SEQ ID NO: 5339488 - DNA, 25 bp, Homo sapien
cttagctccagcaaggatgggatcc

SEQ ID NO: 5339489 - DNA, 25 bp, Homo sapien
ttggtggccctactggaatgcccag

SEQ ID NO: 5339490 - DNA, 25 bp, Homo sapien
tcagataagaaatttttgacatcat

SEQ ID NO: 5339491 - DNA, 25 bp, Homo sapien
ctatagcaatgaataactcagacct

SEQ ID NO: 5339492 - DNA, 25 bp, Homo sapien
aaaaccttcagtgattttcagataa

SEQ ID NO: 5339493 - DNA, 25 bp, Homo sapien
atgaataactcagaccttcctccaa

SEQ ID NO: 5339494 - DNA, 25 bp, Homo sapien
caatgcagttgatgtatggcagagg

SEQ ID NO: 5339495 - DNA, 25 bp, Homo sapien
gatccaagggtattcagaaggactt

SEQ ID NO: 5339496 - DNA, 25 bp, Homo sapien
gcgtggcaatgcaaccaggtctttt

SEQ ID NO: 5339497 - DNA, 25 bp, Homo sapien
gcagaggatgaagtgtgacagcaca

SEQ ID NO: 5339498 - DNA, 25 bp, Homo sapien
tgggattgggtggagaccctcaatt

SEQ ID NO: 5339499 - DNA, 25 bp, Homo sapien
ttaggtggataacacaggtgaagaa

SEQ ID NO: 5339500 - DNA, 25 bp, Homo sapien
aaacagaggtgatgcggtctgatgg

SEQ ID NO: 5339501 - DNA, 25 bp, Homo sapien
tccctttgattttaggtggataaca

SEQ ID NO: 5339502 - DNA, 25 bp, Homo sapien
agctgtgagcagcatactgagtgtc

SEQ ID NO: 5339503 - DNA, 25 bp, Homo sapien
aatgcaaaataagtgtacacaggcg

SEQ ID NO: 5339504 - DNA, 25 bp, Homo sapien
tcatctatgggacatgctctatggg

SEQ ID NO: 5339505 - DNA, 25 bp, Homo sapien
ccaagccctacactcaagctgtgag

SEQ ID NO: 5339506 - DNA, 25 bp, Homo sapien
cttcacatccttggcactggatata

SEQ ID NO: 5339507 - DNA, 25 bp, Homo sapien
cagacatctggactaactcgccatt

SEQ ID NO: 5339508 - DNA, 25 bp, Homo sapien
ttgtctcgtttggttgcaatccaca

SEQ ID NO: 5339509 - DNA, 25 bp, Homo sapien
ctggatatagaacaagctactggaa

SEQ ID NO: 5339510 - DNA, 25 bp, Homo sapien
agtgccaggcacagccgagatcgcc

SEQ ID NO: 5339511 - DNA, 25 bp, Homo sapien
ctgtgcataatcaatgacttcagaa

SEQ ID NO: 5339512 - DNA, 25 bp, Homo sapien
agatcgccacattcctcccaactct

SEQ ID NO: 5339513 - DNA, 25 bp, Homo sapien
gccgagatcgccacattcctcccaa

SEQ ID NO: 5339514 - DNA, 25 bp, Homo sapien
cctggtgctgaccatttgccagcat

SEQ ID NO: 5339515 - DNA, 25 bp, Homo sapien
ggtgctgaccatttgccagcataag

SEQ ID NO: 5339516 - DNA, 25 bp, Homo sapien
tgctgaccatttgccagcataagct

SEQ ID NO: 5339517 - DNA, 25 bp, Homo sapien
tcctggtgctgaccatttgccagca

SEQ ID NO: 5339518 - DNA, 25 bp, Homo sapien
cattttcatgggcacctgagatggc

SEQ ID NO: 5339519 - DNA, 25 bp, Homo sapien
agtcattttcatgggcacctgagat

SEQ ID NO: 5339520 - DNA, 25 bp, Homo sapien
tcatgggcacctgagatggctacag

SEQ ID NO: 5339521 - DNA, 25 bp, Homo sapien
atggctacagctggggaacggtcca

SEQ ID NO: 5339522 - DNA, 25 bp, Homo sapien
gaaactcggcggtccattctgtggc

SEQ ID NO: 5339523 - DNA, 25 bp, Homo sapien
tttgtttccattccggccccataga

SEQ ID NO: 5339524 - DNA, 25 bp, Homo sapien
tctaagcgccctagaaggactctgc

SEQ ID NO: 5339525 - DNA, 25 bp, Homo sapien
tatttctgcgctttaccaaacggcc

SEQ ID NO: 5339526 - DNA, 25 bp, Homo sapien
agatcagggccgctctctgtccttc

SEQ ID NO: 5339527 - DNA, 25 bp, Homo sapien
ctccttgtgatgtcgcagcagtcct

SEQ ID NO: 5339528 - DNA, 25 bp, Homo sapien
acaggtccggttgctggtcccgtgc

SEQ ID NO: 5339529 - DNA, 25 bp, Homo sapien
gcagcagtcctaggcctcctcgtgt

SEQ ID NO: 5339530 - DNA, 25 bp, Homo sapien
accacatctattggactcctcctgt

SEQ ID NO: 5339531 - DNA, 25 bp, Homo sapien
acctggggactgattagtggaagcc

SEQ ID NO: 5339532 - DNA, 25 bp, Homo sapien
atctcccaatttgaaaccacatcta

SEQ ID NO: 5339533 - DNA, 25 bp, Homo sapien
tgaagtctaaaacctggggactgat

SEQ ID NO: 5339534 - DNA, 25 bp, Homo sapien
ttgcagaagccccaaatgctttcag

SEQ ID NO: 5339535 - DNA, 25 bp, Homo sapien
aaaacatgacacttggcattcaaat

SEQ ID NO: 5339536 - DNA, 25 bp, Homo sapien
gctttcagagttggggccaacttcc

SEQ ID NO: 5339537 - DNA, 25 bp, Homo sapien
aacatgacacttggcattcaaatgc

SEQ ID NO: 5339538 - DNA, 25 bp, Homo sapien
tcttgcttgcacttcaactctggtg

SEQ ID NO: 5339539 - DNA, 25 bp, Homo sapien
gtcttttccatagagccagtgtgtg

SEQ ID NO: 5339540 - DNA, 25 bp, Homo sapien
caaggtgtacatgtctctgagtctt

SEQ ID NO: 5339541 - DNA, 25 bp, Homo sapien
tctggcaaggtgcaactgttgacaa

SEQ ID NO: 5339542 - DNA, 25 bp, Homo sapien
ttctggtggctaaagaggcatggct

SEQ ID NO: 5339543 - DNA, 25 bp, Homo sapien
ttgtctggacatggagtgttctggt

SEQ ID NO: 5339544 - DNA, 25 bp, Homo sapien
gggttagcttggctcctaccaatgg

SEQ ID NO: 5339545 - DNA, 25 bp, Homo sapien
agaggcatggctgcccctgttcagt

SEQ ID NO: 5339546 - DNA, 25 bp, Homo sapien
tcccttttatcacaacactctccac

SEQ ID NO: 5339547 - DNA, 25 bp, Homo sapien
ccttttatcacaacactctccactt

SEQ ID NO: 5339548 - DNA, 25 bp, Homo sapien
ggtcccttttatcacaacactctcc

SEQ ID NO: 5339549 - DNA, 25 bp, Homo sapien
tggtcccttttatcacaacactctc

SEQ ID NO: 5339550 - DNA, 25 bp, Homo sapien
tgccaacctggcaagcagagagacc

SEQ ID NO: 5339551 - DNA, 25 bp, Homo sapien
gagtggttcatcatccagatgccaa

SEQ ID NO: 5339552 - DNA, 25 bp, Homo sapien
ggccaccacttccatattatgtcag

SEQ ID NO: 5339553 - DNA, 25 bp, Homo sapien
tcagtcagcagtttgcacagatgca

SEQ ID NO: 5339554 - DNA, 25 bp, Homo sapien
ggctcttgccgtctcatcacaaaag

SEQ ID NO: 5339555 - DNA, 25 bp, Homo sapien
tgctgttacagtctctgagcagacg

SEQ ID NO: 5339556 - DNA, 25 bp, Homo sapien
tctctgagcagacgcactttgcttt

SEQ ID NO: 5339557 - DNA, 25 bp, Homo sapien
catcaacagtgatggatataagatt

SEQ ID NO: 5339558 - DNA, 25 bp, Homo sapien
caagggtttatctcaatgcacccaa

SEQ ID NO: 5339559 - DNA, 25 bp, Homo sapien
gcgtatagctaagttgcacgaggaa

SEQ ID NO: 5339560 - DNA, 25 bp, Homo sapien
tgcacccaagattaagcgtatagct

SEQ ID NO: 5339561 - DNA, 25 bp, Homo sapien
agggtttatctcaatgcacccaaga

SEQ ID NO: 5339562 - DNA, 25 bp, Homo sapien
tctttgagggataagtcaaggacca

SEQ ID NO: 5339563 - DNA, 25 bp, Homo sapien
ccaatgtggcataaatagagaaagt

SEQ ID NO: 5339564 - DNA, 25 bp, Homo sapien
tggaaaagttcttccatttgaagga

SEQ ID NO: 5339565 - DNA, 25 bp, Homo sapien
tactcaagttcatattctgctcctc

SEQ ID NO: 5339566 - DNA, 25 bp, Homo sapien
caatgtgaataacagcctttctgct

SEQ ID NO: 5339567 - DNA, 25 bp, Homo sapien
gtttacattcttggcaggcaatgtg

SEQ ID NO: 5339568 - DNA, 25 bp, Homo sapien
cctcttgtttacattcttggcaggc

SEQ ID NO: 5339569 - DNA, 25 bp, Homo sapien
ggcaggcaatgtgaataacagcctt

SEQ ID NO: 5339570 - DNA, 25 bp, Homo sapien
ggtcacacaagaggtcccttccaca

SEQ ID NO: 5339571 - DNA, 25 bp, Homo sapien
gtcacacaagaggtcccttccacaa

SEQ ID NO: 5339572 - DNA, 25 bp, Homo sapien
ttttataagggtagtggatccttga

SEQ ID NO: 5339573 - DNA, 25 bp, Homo sapien
tttataagggtagtggatccttgaa

SEQ ID NO: 5339574 - DNA, 25 bp, Homo sapien
cttttataagggtagtggatccttg

SEQ ID NO: 5339575 - DNA, 25 bp, Homo sapien
ttataagggtagtggatccttgaat

SEQ ID NO: 5339576 - DNA, 25 bp, Homo sapien
tgagacaggtgaaggtactgaagat

SEQ ID NO: 5339577 - DNA, 25 bp, Homo sapien
gatcagcgatgcaaactcattaggg

SEQ ID NO: 5339578 - DNA, 25 bp, Homo sapien
atttttcagggctctagagactgag

SEQ ID NO: 5339579 - DNA, 25 bp, Homo sapien
cagggctctagagactgagacaggt

SEQ ID NO: 5339580 - DNA, 25 bp, Homo sapien
ttcatagtaattgcaggaccagttc

SEQ ID NO: 5339581 - DNA, 25 bp, Homo sapien
ttgacttcatagtaattgcaggacc

SEQ ID NO: 5339582 - DNA, 25 bp, Homo sapien
catagtaattgcaggaccagttcta

SEQ ID NO: 5339583 - DNA, 25 bp, Homo sapien
gacttcatagtaattgcaggaccag

SEQ ID NO: 5339584 - DNA, 25 bp, Homo sapien
caaacaaaggagaacttcttctcac

SEQ ID NO: 5339585 - DNA, 25 bp, Homo sapien
acttcttctcacaagattcatcctt

SEQ ID NO: 5339586 - DNA, 25 bp, Homo sapien
ttttgaacttgcaaacaaaggagaa

SEQ ID NO: 5339587 - DNA, 25 bp, Homo sapien
aaggagaacttcttctcacaagatt

SEQ ID NO: 5339588 - DNA, 25 bp, Homo sapien
tatggtacaatgagaagtgtcagac

SEQ ID NO: 5339589 - DNA, 25 bp, Homo sapien
catagaggatcagaaggagtgtagc

SEQ ID NO: 5339590 - DNA, 25 bp, Homo sapien
agaaggagtgtagcccctcctcaac

SEQ ID NO: 5339591 - DNA, 25 bp, Homo sapien
gaagtgtcagacatagaggatcaga

SEQ ID NO: 5339592 - DNA, 25 bp, Homo sapien
cccagagataagtgggaaggaaatg

SEQ ID NO: 5339593 - DNA, 25 bp, Homo sapien
aatggcaacaggtggatagattgtc

SEQ ID NO: 5339594 - DNA, 25 bp, Homo sapien
ctctatcccagtccccatgttcatc

SEQ ID NO: 5339595 - DNA, 25 bp, Homo sapien
caacaggtggatagattgtctgcct

SEQ ID NO: 5339596 - DNA, 25 bp, Homo sapien
catgaagtcaggcttgcacagtagc

SEQ ID NO: 5339597 - DNA, 25 bp, Homo sapien
agaccagggacccactactccagtg

SEQ ID NO: 5339598 - DNA, 25 bp, Homo sapien
tgtcccaggacttgtaggagaccag

SEQ ID NO: 5339599 - DNA, 25 bp, Homo sapien
tgctcggggatccagtgtcccagga

SEQ ID NO: 5339600 - DNA, 25 bp, Homo sapien
gctgtcatcagtgctactctcctta

SEQ ID NO: 5339601 - DNA, 25 bp, Homo sapien
tctccttaatcagtgaggccacgaa

SEQ ID NO: 5339602 - DNA, 25 bp, Homo sapien
agcacagacaccaggttgcctgaat

SEQ ID NO: 5339603 - DNA, 25 bp, Homo sapien
acgaaggcaccctccgcctgggtga

SEQ ID NO: 5339604 - DNA, 25 bp, Homo sapien
aagtagtagcagtaggagcgatagg

SEQ ID NO: 5339605 - DNA, 25 bp, Homo sapien
agtaggagcgataggcattggtgcc

SEQ ID NO: 5339606 - DNA, 25 bp, Homo sapien
cagtaggagcgataggcattggtgc

SEQ ID NO: 5339607 - DNA, 25 bp, Homo sapien
agtagcagtaggagcgataggcatt

SEQ ID NO: 5339608 - DNA, 25 bp, Homo sapien
gatcagcatgaagaacgagttggtc

SEQ ID NO: 5339609 - DNA, 25 bp, Homo sapien
cagggaggagatcagcatgaagaac

SEQ ID NO: 5339610 - DNA, 25 bp, Homo sapien
catgaagaacgagttggtctgagcc

SEQ ID NO: 5339611 - DNA, 25 bp, Homo sapien
agagacaggaacatcagggaggaga

SEQ ID NO: 5339612 - DNA, 25 bp, Homo sapien
tcttgcttaaggagcaaatcagcaa

SEQ ID NO: 5339613 - DNA, 25 bp, Homo sapien
agtgccttgtccacttgaggtggct

SEQ ID NO: 5339614 - DNA, 25 bp, Homo sapien
ctgttggtaagtgccttgtccactt

SEQ ID NO: 5339615 - DNA, 25 bp, Homo sapien
tggtaagtgccttgtccacttgagg

SEQ ID NO: 5339616 - DNA, 25 bp, Homo sapien
taagtgccttgtccacttgaggtgg

SEQ ID NO: 5339617 - DNA, 25 bp, Homo sapien
tggcaaactgtccaagttgatgttg

SEQ ID NO: 5339618 - DNA, 25 bp, Homo sapien
aacaggttggcaaactgtccaagtt

SEQ ID NO: 5339619 - DNA, 25 bp, Homo sapien
ggttggcaaactgtccaagttgatg

SEQ ID NO: 5339620 - DNA, 25 bp, Homo sapien
caaactgtccaagttgatgttgagc

SEQ ID NO: 5339621 - DNA, 25 bp, Homo sapien
cattaggtggggaaatagcagacac

SEQ ID NO: 5339622 - DNA, 25 bp, Homo sapien
tacaatcactgccatcccaactacc

SEQ ID NO: 5339623 - DNA, 25 bp, Homo sapien
cccaactacccaggcattaggtggg

SEQ ID NO: 5339624 - DNA, 25 bp, Homo sapien
taggtggggaaatagcagacacaga

SEQ ID NO: 5339625 - DNA, 25 bp, Homo sapien
tactccatagtaactggtagaccaa

SEQ ID NO: 5339626 - DNA, 25 bp, Homo sapien
gtttagggctccagaaattgaggta

SEQ ID NO: 5339627 - DNA, 25 bp, Homo sapien
gagatggtccagattgatatggaga

SEQ ID NO: 5339628 - DNA, 25 bp, Homo sapien
ggtagaccaattctagacgtccatt

SEQ ID NO: 5339629 - DNA, 25 bp, Homo sapien
tccttacaagaatcatccttccatt

SEQ ID NO: 5339630 - DNA, 25 bp, Homo sapien
aggagaacttctccttacaagaatc

SEQ ID NO: 5339631 - DNA, 25 bp, Homo sapien
tacaattgcctccagtatttgaact

SEQ ID NO: 5339632 - DNA, 25 bp, Homo sapien
attgcctccagtatttgaacttgca

SEQ ID NO: 5339633 - DNA, 25 bp, Homo sapien
agtccccggtcgatcctcagagata

SEQ ID NO: 5339634 - DNA, 25 bp, Homo sapien
aataagtgtgtggattctgtgcctc

SEQ ID NO: 5339635 - DNA, 25 bp, Homo sapien
gagtgtattaccctcctggctgcag

SEQ ID NO: 5339636 - DNA, 25 bp, Homo sapien
aaataggagaggatggcaataagtg

SEQ ID NO: 5339637 - DNA, 25 bp, Homo sapien
ttgaagtcaggctagcacagtaggc

SEQ ID NO: 5339638 - DNA, 25 bp, Homo sapien
agtaggcagtattggcacagcttgg

SEQ ID NO: 5339639 - DNA, 25 bp, Homo sapien
cagggacccactactccactgataa

SEQ ID NO: 5339640 - DNA, 25 bp, Homo sapien
gcttggggatccaatgtcccaggat

SEQ ID NO: 5339641 - DNA, 25 bp, Homo sapien
gtgtcctgccaaacgataagtgttc

SEQ ID NO: 5339642 - DNA, 25 bp, Homo sapien
cacctggtttgtgttcgcactcaga

SEQ ID NO: 5339643 - DNA, 25 bp, Homo sapien
gaggccccaaaagttcatatccagc

SEQ ID NO: 5339644 - DNA, 25 bp, Homo sapien
tatccagcatagcattagatggcca

SEQ ID NO: 5339645 - DNA, 25 bp, Homo sapien
cccaattgccagcagtagattctcc

SEQ ID NO: 5339646 - DNA, 25 bp, Homo sapien
tctatatggtctacagaaggctctt

SEQ ID NO: 5339647 - DNA, 25 bp, Homo sapien
taatctttttctatatggtctacag

SEQ ID NO: 5339648 - DNA, 25 bp, Homo sapien
cttgcggttcccaattgccagcagt

SEQ ID NO: 5339649 - DNA, 25 bp, Homo sapien
taacacaatagataagaggtacata

SEQ ID NO: 5339650 - DNA, 25 bp, Homo sapien
ctataacagagatgataacacaata

SEQ ID NO: 5339651 - DNA, 25 bp, Homo sapien
acataatagatacataaagatgcta

SEQ ID NO: 5339652 - DNA, 25 bp, Homo sapien
tgataacacaatagataagaggtac

SEQ ID NO: 5339653 - DNA, 25 bp, Homo sapien
tcgaagaacctatggagaaccttga

SEQ ID NO: 5339654 - DNA, 25 bp, Homo sapien
tgcttgaggtgccagacatcagacc

SEQ ID NO: 5339655 - DNA, 25 bp, Homo sapien
ttatctgtgaatgcctgaaacacac

SEQ ID NO: 5339656 - DNA, 25 bp, Homo sapien
cagctttaagcttatctcgaagaac

SEQ ID NO: 5339657 - DNA, 25 bp, Homo sapien
tctctttaatcagcgaagccacaaa

SEQ ID NO: 5339658 - DNA, 25 bp, Homo sapien
ctttaatcagcgaagccacaaaggc

SEQ ID NO: 5339659 - DNA, 25 bp, Homo sapien
actctctttaatcagcgaagccaca

SEQ ID NO: 5339660 - DNA, 25 bp, Homo sapien
attgctatccttggtgccactctct

SEQ ID NO: 5339661 - DNA, 25 bp, Homo sapien
ctgaattcatgttctggcagtagag

SEQ ID NO: 5339662 - DNA, 25 bp, Homo sapien
gcataaacccaggtctcatgctctt

SEQ ID NO: 5339663 - DNA, 25 bp, Homo sapien
tcttcattaaagtagtagcagtggg

SEQ ID NO: 5339664 - DNA, 25 bp, Homo sapien
tctgcataaacccaggtctcatgct

SEQ ID NO: 5339665 - DNA, 25 bp, Homo sapien
gctcttcattaaagtagtagcagtg

SEQ ID NO: 5339666 - DNA, 25 bp, Homo sapien
ttaggcactggtgccttctgggcag

SEQ ID NO: 5339667 - DNA, 25 bp, Homo sapien
gtgccttctgggcagctgatctggg

SEQ ID NO: 5339668 - DNA, 25 bp, Homo sapien
ccttctgggcagctgatctgggcct

SEQ ID NO: 5339669 - DNA, 25 bp, Homo sapien
ttctgggcagctgatctgggccttg

SEQ ID NO: 5339670 - DNA, 25 bp, Homo sapien
aggcaggagatcagcatgaagcatg

SEQ ID NO: 5339671 - DNA, 25 bp, Homo sapien
aacatcaggcaggagatcagcatga

SEQ ID NO: 5339672 - DNA, 25 bp, Homo sapien
ggctcagagacaggaacatcaggca

SEQ ID NO: 5339673 - DNA, 25 bp, Homo sapien
atgaagcatgagttggtctgagcca

SEQ ID NO: 5339674 - DNA, 25 bp, Homo sapien
tcttgcttaaggagcaaatcagcaa

SEQ ID NO: 5339675 - DNA, 25 bp, Homo sapien
gaatgggagggcagtaagtacgcgg

SEQ ID NO: 5339676 - DNA, 25 bp, Homo sapien
gtaagtacgcgggagagaaatgtcc

SEQ ID NO: 5339677 - DNA, 25 bp, Homo sapien
aatcctacatgagcaggacccacac

SEQ ID NO: 5339678 - DNA, 25 bp, Homo sapien
tcaggtttgggctacgggaatggga

SEQ ID NO: 5339679 - DNA, 25 bp, Homo sapien
gggaattaagcgaatattctcttcc

SEQ ID NO: 5339680 - DNA, 25 bp, Homo sapien
gccttaggccgtatgacaaaatgaa

SEQ ID NO: 5339681 - DNA, 25 bp, Homo sapien
agaaagataagaatgaggtggtcag

SEQ ID NO: 5339682 - DNA, 25 bp, Homo sapien
catgatgagttgcacaccaaacaca

SEQ ID NO: 5339683 - DNA, 25 bp, Homo sapien
tcagtgaacttgcagacatagggta

SEQ ID NO: 5339684 - DNA, 25 bp, Homo sapien
gaacttgcagacatagggtaacctc

SEQ ID NO: 5339685 - DNA, 25 bp, Homo sapien
gtgaacttgcagacatagggtaacc

SEQ ID NO: 5339686 - DNA, 25 bp, Homo sapien
acttgcagacatagggtaacctcac

SEQ ID NO: 5339687 - DNA, 25 bp, Homo sapien
agttataatctttccacctcagaaa

SEQ ID NO: 5339688 - DNA, 25 bp, Homo sapien
ttataatctttccacctcagaaatg

SEQ ID NO: 5339689 - DNA, 25 bp, Homo sapien
acagttataatctttccacctcaga

SEQ ID NO: 5339690 - DNA, 25 bp, Homo sapien
attacagttataatctttccacctc

SEQ ID NO: 5339691 - DNA, 25 bp, Homo sapien
tccaggagagagattcaaagaaagt

SEQ ID NO: 5339692 - DNA, 25 bp, Homo sapien
gaggagataagagaagacacactaa

SEQ ID NO: 5339693 - DNA, 25 bp, Homo sapien
tgtcccaatccaggagagagattca

SEQ ID NO: 5339694 - DNA, 25 bp, Homo sapien
gagaggagataagagaagacacact

SEQ ID NO: 5339695 - DNA, 25 bp, Homo sapien
aagaggcagctcctctgtttcttac

SEQ ID NO: 5339696 - DNA, 25 bp, Homo sapien
ctgaaggtcagacccaggaatgggg

SEQ ID NO: 5339697 - DNA, 25 bp, Homo sapien
aatgggggatgagatggaaaacact

SEQ ID NO: 5339698 - DNA, 25 bp, Homo sapien
agatggaaaacactgggaagaggca

SEQ ID NO: 5339699 - DNA, 25 bp, Homo sapien
ccatgcaaagtaattcatcacatca

SEQ ID NO: 5339700 - DNA, 25 bp, Homo sapien
ctcccatgcaaagtaattcatcaca

SEQ ID NO: 5339701 - DNA, 25 bp, Homo sapien
tcccatgcaaagtaattcatcacat

SEQ ID NO: 5339702 - DNA, 25 bp, Homo sapien
tctcccatgcaaagtaattcatcac

SEQ ID NO: 5339703 - DNA, 25 bp, Homo sapien
cagatgctgccggtgagtaggaaac

SEQ ID NO: 5339704 - DNA, 25 bp, Homo sapien
cataagacctttggaacaactcaag

SEQ ID NO: 5339705 - DNA, 25 bp, Homo sapien
tccccagcatgaggaaagttggtct

SEQ ID NO: 5339706 - DNA, 25 bp, Homo sapien
cctcattgctattggaaaattccag

SEQ ID NO: 5339707 - DNA, 25 bp, Homo sapien
ccccaaatattccccagaatctgag

SEQ ID NO: 5339708 - DNA, 25 bp, Homo sapien
ggcaacaatagcaccttgagaggta

SEQ ID NO: 5339709 - DNA, 25 bp, Homo sapien
tcagatcttcagatgcttcatggcc

SEQ ID NO: 5339710 - DNA, 25 bp, Homo sapien
tccccagaatctgagctccagtgct

SEQ ID NO: 5339711 - DNA, 25 bp, Homo sapien
tccagacgtatgagtagctgttacc

SEQ ID NO: 5339712 - DNA, 25 bp, Homo sapien
aacaaagagaatgagagggagcctg

SEQ ID NO: 5339713 - DNA, 25 bp, Homo sapien
caaagagaatgagagggagcctgag

SEQ ID NO: 5339714 - DNA, 25 bp, Homo sapien
ctttgagggcaacaaagagaatgag

SEQ ID NO: 5339715 - DNA, 25 bp, Homo sapien
aagagaatgagagggagcctgagac

SEQ ID NO: 5339716 - DNA, 25 bp, Homo sapien
tggtgacaaaaacaaggcatagcag

SEQ ID NO: 5339717 - DNA, 25 bp, Homo sapien
ttttggtgacaaaaacaaggcatag

SEQ ID NO: 5339718 - DNA, 25 bp, Homo sapien
gagccataggccttggagcctttgg

SEQ ID NO: 5339719 - DNA, 25 bp, Homo sapien
tttggtgacaaaaacaaggcatagc

SEQ ID NO: 5339720 - DNA, 25 bp, Homo sapien
cattccactgttagtggaccaccat

SEQ ID NO: 5339721 - DNA, 25 bp, Homo sapien
cactgttagtggaccaccatggagc

SEQ ID NO: 5339722 - DNA, 25 bp, Homo sapien
ccactgttagtggaccaccatggag

SEQ ID NO: 5339723 - DNA, 25 bp, Homo sapien
ttccactgttagtggaccaccatgg

SEQ ID NO: 5339724 - DNA, 25 bp, Homo sapien
ttgaacctgagacagcagcatgagg

SEQ ID NO: 5339725 - DNA, 25 bp, Homo sapien
cttgaacctgagacagcagcatgag

SEQ ID NO: 5339726 - DNA, 25 bp, Homo sapien
cctgagacagcagcatgaggcagga

SEQ ID NO: 5339727 - DNA, 25 bp, Homo sapien
agacagcagcatgaggcaggaaagc

SEQ ID NO: 5339728 - DNA, 25 bp, Homo sapien
tgggcagggccatgggaggcagcat

SEQ ID NO: 5339729 - DNA, 25 bp, Homo sapien
ccaagatacactgggcagggccatg

SEQ ID NO: 5339730 - DNA, 25 bp, Homo sapien
acactgggcagggccatgggaggca

SEQ ID NO: 5339731 - DNA, 25 bp, Homo sapien
actgggcagggccatgggaggcagc

SEQ ID NO: 5339732 - DNA, 25 bp, Homo sapien
tgtgctccctgaggaagggaccctc

SEQ ID NO: 5339733 - DNA, 25 bp, Homo sapien
cttgctgagtctcagagttcctgtg

SEQ ID NO: 5339734 - DNA, 25 bp, Homo sapien
tcccctaggactaaagtgatcttgg

SEQ ID NO: 5339735 - DNA, 25 bp, Homo sapien
ctgaatgagttgtgaatctgtgtac

SEQ ID NO: 5339736 - DNA, 25 bp, Homo sapien
tatggtttgtctggtcaggaaagag

SEQ ID NO: 5339737 - DNA, 25 bp, Homo sapien
aggaaagagtgggattttataagag

SEQ ID NO: 5339738 - DNA, 25 bp, Homo sapien
ggtttgtctggtcaggaaagagtgg

SEQ ID NO: 5339739 - DNA, 25 bp, Homo sapien
tttgtctggtcaggaaagagtggga

SEQ ID NO: 5339740 - DNA, 25 bp, Homo sapien
cacagtgaggtttcctctaagttac

SEQ ID NO: 5339741 - DNA, 25 bp, Homo sapien
gcatttgggtcatccacgggttacc

SEQ ID NO: 5339742 - DNA, 25 bp, Homo sapien
gtctcagtgttttcaggctatgcct

SEQ ID NO: 5339743 - DNA, 25 bp, Homo sapien
gctcacagtgaggtttcctctaagt

SEQ ID NO: 5339744 - DNA, 25 bp, Homo sapien
gagagcagcagccttgtggctatgc

SEQ ID NO: 5339745 - DNA, 25 bp, Homo sapien
ctgagagcagcagccttgtggctat

SEQ ID NO: 5339746 - DNA, 25 bp, Homo sapien
aatacagctcctaaggcagcctggc

SEQ ID NO: 5339747 - DNA, 25 bp, Homo sapien
tcataatacagctcctaaggcagcc

SEQ ID NO: 5339748 - DNA, 25 bp, Homo sapien
gctggacttcccacgacaccacctt

SEQ ID NO: 5339749 - DNA, 25 bp, Homo sapien
ctggacttcccacgacaccaccttt

SEQ ID NO: 5339750 - DNA, 25 bp, Homo sapien
atcacagtcataaatctggcttctt

SEQ ID NO: 5339751 - DNA, 25 bp, Homo sapien
tggcttcttctgcacaaggggccat

SEQ ID NO: 5339752 - DNA, 25 bp, Homo sapien
tcctcctttccaatcacagtcataa

SEQ ID NO: 5339753 - DNA, 25 bp, Homo sapien
tcataaatctggcttcttctgcaca

SEQ ID NO: 5339754 - DNA, 25 bp, Homo sapien
agaagaagctatatctgtatcatta

SEQ ID NO: 5339755 - DNA, 25 bp, Homo sapien
agaagctatatctgtatcattattt

SEQ ID NO: 5339756 - DNA, 25 bp, Homo sapien
tagaagaagctatatctgtatcatt

SEQ ID NO: 5339757 - DNA, 25 bp, Homo sapien
gaagaagctatatctgtatcattat

SEQ ID NO: 5339758 - DNA, 25 bp, Homo sapien
acagtgaccccacctattgctggaa

SEQ ID NO: 5339759 - DNA, 25 bp, Homo sapien
tcctaaattggtcgtgctgagattc

SEQ ID NO: 5339760 - DNA, 25 bp, Homo sapien
tctggcttcatggtaggaagaggca

SEQ ID NO: 5339761 - DNA, 25 bp, Homo sapien
gctccactagcacagttagcacagt

SEQ ID NO: 5339762 - DNA, 25 bp, Homo sapien
gagggatgtgtcatatcatctgaaa

SEQ ID NO: 5339763 - DNA, 25 bp, Homo sapien
atctcagaatcctcctcacacaaag

SEQ ID NO: 5339764 - DNA, 25 bp, Homo sapien
aaaggagcaagttttatcatctcag

SEQ ID NO: 5339765 - DNA, 25 bp, Homo sapien
cctcacacaaagcaaggcccggcat

SEQ ID NO: 5339766 - DNA, 25 bp, Homo sapien
ttcttccctccagtacaaatcccag

SEQ ID NO: 5339767 - DNA, 25 bp, Homo sapien
aatccccgtattcccaagagatgat

SEQ ID NO: 5339768 - DNA, 25 bp, Homo sapien
gagatgatgtaacttgcccctaaat

SEQ ID NO: 5339769 - DNA, 25 bp, Homo sapien
gctcccagagattccgatgtgtccc

SEQ ID NO: 5339770 - DNA, 25 bp, Homo sapien
aggaaccagtcatctggatgtgtac

SEQ ID NO: 5339771 - DNA, 25 bp, Homo sapien
agtggaggtcacaagatgctcagta

SEQ ID NO: 5339772 - DNA, 25 bp, Homo sapien
gaaccagtcatctggatgtgtacgt

SEQ ID NO: 5339773 - DNA, 25 bp, Homo sapien
gcgggcaggagtggaggtcacaaga

SEQ ID NO: 5339774 - DNA, 25 bp, Homo sapien
acgtggcttaggaggaatcttgggc

SEQ ID NO: 5339775 - DNA, 25 bp, Homo sapien
cctgcacagatgggacgtggcttag

SEQ ID NO: 5339776 - DNA, 25 bp, Homo sapien
gggtcctgcacagatgggacgtggc

SEQ ID NO: 5339777 - DNA, 25 bp, Homo sapien
cgtggcttaggaggaatcttgggct

SEQ ID NO: 5339778 - DNA, 25 bp, Homo sapien
gttttctctctcacttggctcaact

SEQ ID NO: 5339779 - DNA, 25 bp, Homo sapien
tcatggtttcttctgctctgttttc

SEQ ID NO: 5339780 - DNA, 25 bp, Homo sapien
ctgttttctctctcacttggctcaa

SEQ ID NO: 5339781 - DNA, 25 bp, Homo sapien
tttctctctcacttggctcaactca

SEQ ID NO: 5339782 - DNA, 25 bp, Homo sapien
ctcgcttggtcccaaagacatttga

SEQ ID NO: 5339783 - DNA, 25 bp, Homo sapien
aatttttggcttcaggtccaatgtg

SEQ ID NO: 5339784 - DNA, 25 bp, Homo sapien
gcttggtcccaaagacatttgaatt

SEQ ID NO: 5339785 - DNA, 25 bp, Homo sapien
gtccaatgtgtgtagacgttgctcc

SEQ ID NO: 5339786 - DNA, 25 bp, Homo sapien
ctccaaatgtctgggagccaaagat

SEQ ID NO: 5339787 - DNA, 25 bp, Homo sapien
tccaaatgtctgggagccaaagatg

SEQ ID NO: 5339788 - DNA, 25 bp, Homo sapien
tccccatagacacccagcaagtttg

SEQ ID NO: 5339789 - DNA, 25 bp, Homo sapien
gaacattacattcgttatccccata

SEQ ID NO: 5339790 - DNA, 25 bp, Homo sapien
tcctagtcacttgggtttgctgaac

SEQ ID NO: 5339791 - DNA, 25 bp, Homo sapien
taagataattctagagccacagtgt

SEQ ID NO: 5339792 - DNA, 25 bp, Homo sapien
tggtgccccgggtggttagagttga

SEQ ID NO: 5339793 - DNA, 25 bp, Homo sapien
ggttagagttgaaagtgctgagttc

SEQ ID NO: 5339794 - DNA, 25 bp, Homo sapien
ctgtgaaggaatttctggtgccccg

SEQ ID NO: 5339795 - DNA, 25 bp, Homo sapien
tgtgaaggaatttctggtgccccgg

SEQ ID NO: 5339796 - DNA, 25 bp, Homo sapien
tggttgattggctgttgttcagctc

SEQ ID NO: 5339797 - DNA, 25 bp, Homo sapien
ggttgattggctgttgttcagctca

SEQ ID NO: 5339798 - DNA, 25 bp, Homo sapien
gttgattggctgttgttcagctcat

SEQ ID NO: 5339799 - DNA, 25 bp, Homo sapien
catgcaggtggccatcgatgacatc

SEQ ID NO: 5339800 - DNA, 25 bp, Homo sapien
caatggttttgcagtattgagccac

SEQ ID NO: 5339801 - DNA, 25 bp, Homo sapien
gcagtattgagccacattttggatt

SEQ ID NO: 5339802 - DNA, 25 bp, Homo sapien
catcgatgacatcaatggttttgca

SEQ ID NO: 5339803 - DNA, 25 bp, Homo sapien
agctgactcttgactggttactgtg

SEQ ID NO: 5339804 - DNA, 25 bp, Homo sapien
ttaaatgaatgtaagagcagatgtc

SEQ ID NO: 5339805 - DNA, 25 bp, Homo sapien
tgtccaaggccaagctgactcttga

SEQ ID NO: 5339806 - DNA, 25 bp, Homo sapien
tggttactgtgtagagctcttgtgc

SEQ ID NO: 5339807 - DNA, 25 bp, Homo sapien
tggctcaggttcctcctattcattc

SEQ ID NO: 5339808 - DNA, 25 bp, Homo sapien
gtcattctctttagtactgcagcat

SEQ ID NO: 5339809 - DNA, 25 bp, Homo sapien
caggactgttggcatagaagttctc

SEQ ID NO: 5339810 - DNA, 25 bp, Homo sapien
gaagttctcgttatgttgggtccag

SEQ ID NO: 5339811 - DNA, 25 bp, Homo sapien
gagagaaccagaaatcccgtagaaa

SEQ ID NO: 5339812 - DNA, 25 bp, Homo sapien
ttgttggtttccaagcactggctcc

SEQ ID NO: 5339813 - DNA, 25 bp, Homo sapien
gttggtttccaagcactggctccac

SEQ ID NO: 5339814 - DNA, 25 bp, Homo sapien
cagttcactttgaattaagaaacat

SEQ ID NO: 5339815 - DNA, 25 bp, Homo sapien
tcactttgaattaagaaacattgat

SEQ ID NO: 5339816 - DNA, 25 bp, Homo sapien
caaagtaggagacagccttgtagat

SEQ ID NO: 5339817 - DNA, 25 bp, Homo sapien
gtaggagacagccttgtagatgttg

SEQ ID NO: 5339818 - DNA, 25 bp, Homo sapien
taggagacagccttgtagatgttgg

SEQ ID NO: 5339819 - DNA, 25 bp, Homo sapien
aagtaggagacagccttgtagatgt

SEQ ID NO: 5339820 - DNA, 25 bp, Homo sapien
aagaggagcagtgtagaggataaac

SEQ ID NO: 5339821 - DNA, 25 bp, Homo sapien
catcacaggcattggggtattttcc

SEQ ID NO: 5339822 - DNA, 25 bp, Homo sapien
gggtattttcccatgctaggaataa

SEQ ID NO: 5339823 - DNA, 25 bp, Homo sapien
caggatttggtgctgtcctgtccca

SEQ ID NO: 5339824 - DNA, 25 bp, Homo sapien
agtcctccattatggtgtctatggg

SEQ ID NO: 5339825 - DNA, 25 bp, Homo sapien
cctccattatggtgtctatgggatg

SEQ ID NO: 5339826 - DNA, 25 bp, Homo sapien
ggagtcctccattatggtgtctatg

SEQ ID NO: 5339827 - DNA, 25 bp, Homo sapien
tgtctatgggatgtttatccagcat

SEQ ID NO: 5339828 - DNA, 25 bp, Homo sapien
catgttggtactcttgggatgcaaa

SEQ ID NO: 5339829 - DNA, 25 bp, Homo sapien
ctgcagatcctctcatgttggtact

SEQ ID NO: 5339830 - DNA, 25 bp, Homo sapien
aaaatctgtagccattctaccttgg

SEQ ID NO: 5339831 - DNA, 25 bp, Homo sapien
tagccattctaccttgggagtattt

SEQ ID NO: 5339832 - DNA, 25 bp, Homo sapien
gaaagccagggaatgatgcttctgg

SEQ ID NO: 5339833 - DNA, 25 bp, Homo sapien
atcagaaagccagggaatgatgctt

SEQ ID NO: 5339834 - DNA, 25 bp, Homo sapien
gcagtgggtggcattatcatcagaa

SEQ ID NO: 5339835 - DNA, 25 bp, Homo sapien
cagaaagccagggaatgatgcttct

SEQ ID NO: 5339836 - DNA, 25 bp, Homo sapien
gagtagaacctatcacagaactttc

SEQ ID NO: 5339837 - DNA, 25 bp, Homo sapien
cacagaactttcctagaactaaact

SEQ ID NO: 5339838 - DNA, 25 bp, Homo sapien
aatctgagagtagaacctatcacag

SEQ ID NO: 5339839 - DNA, 25 bp, Homo sapien
gaagagttattcatgacaaccagag

SEQ ID NO: 5339840 - DNA, 25 bp, Homo sapien
agctgattaagggtatggataaggc

SEQ ID NO: 5339841 - DNA, 25 bp, Homo sapien
atcaacaccgtccaagaagcagtcc

SEQ ID NO: 5339842 - DNA, 25 bp, Homo sapien
taaatcaacaccgtccaagaagcag

SEQ ID NO: 5339843 - DNA, 25 bp, Homo sapien
caacaccgtccaagaagcagtccag

SEQ ID NO: 5339844 - DNA, 25 bp, Homo sapien
aatcaacaccgtccaagaagcagtc

SEQ ID NO: 5339845 - DNA, 25 bp, Homo sapien
ccagacttatgaggcggaagagaaa

SEQ ID NO: 5339846 - DNA, 25 bp, Homo sapien
ccggtgagggttaatgttcagttca

SEQ ID NO: 5339847 - DNA, 25 bp, Homo sapien
tgcgatggattgtaattgctgcaca

SEQ ID NO: 5339848 - DNA, 25 bp, Homo sapien
tcatgagggcttctcaaggttaccc

SEQ ID NO: 5339849 - DNA, 25 bp, Homo sapien
ttctgggctaaatttcatggttctc

SEQ ID NO: 5339850 - DNA, 25 bp, Homo sapien
tgtcaccacatcctgtcctggacat

SEQ ID NO: 5339851 - DNA, 25 bp, Homo sapien
acagtgtcaccacatcctgtcctgg

SEQ ID NO: 5339852 - DNA, 25 bp, Homo sapien
tcttctgggctaaatttcatggttc

SEQ ID NO: 5339853 - DNA, 25 bp, Homo sapien
tctgagtttgtgactcgccgggaga

SEQ ID NO: 5339854 - DNA, 25 bp, Homo sapien
aacagtgtgggctctttatgttcct

SEQ ID NO: 5339855 - DNA, 25 bp, Homo sapien
tcccagtgtctgagtttgtgactcg

SEQ ID NO: 5339856 - DNA, 25 bp, Homo sapien
tcgccgggagattgtctgttcctgc

SEQ ID NO: 5339857 - DNA, 25 bp, Homo sapien
tccccggtataacttgtcaagatga

SEQ ID NO: 5339858 - DNA, 25 bp, Homo sapien
taatccccggtataacttgtcaaga

SEQ ID NO: 5339859 - DNA, 25 bp, Homo sapien
ccccggtataacttgtcaagatgat

SEQ ID NO: 5339860 - DNA, 25 bp, Homo sapien
aatccccggtataacttgtcaagat

SEQ ID NO: 5339861 - DNA, 25 bp, Homo sapien
tagcagcatcatatccaatttgacc

SEQ ID NO: 5339862 - DNA, 25 bp, Homo sapien
ttaagcagccatagcagcatcatat

SEQ ID NO: 5339863 - DNA, 25 bp, Homo sapien
tcatatccaatttgaccttgggaac

SEQ ID NO: 5339864 - DNA, 25 bp, Homo sapien
cttgggaactatttcctgaattcca

SEQ ID NO: 5339865 - DNA, 25 bp, Homo sapien
ttaatcaaatactgccagtcctttg

SEQ ID NO: 5339866 - DNA, 25 bp, Homo sapien
atcaaatactgccagtcctttgctg

SEQ ID NO: 5339867 - DNA, 25 bp, Homo sapien
taatcaaatactgccagtcctttgc

SEQ ID NO: 5339868 - DNA, 25 bp, Homo sapien
tcaaatactgccagtcctttgctga

SEQ ID NO: 5339869 - DNA, 25 bp, Homo sapien
aatggtacataagaaaccctgtctt

SEQ ID NO: 5339870 - DNA, 25 bp, Homo sapien
aaccctgtcttatgtttgcatggca

SEQ ID NO: 5339871 - DNA, 25 bp, Homo sapien
tgacagcagcaaggaacaactgtta

SEQ ID NO: 5339872 - DNA, 25 bp, Homo sapien
tttgcatggcatgcctattgacagc

SEQ ID NO: 5339873 - DNA, 25 bp, Homo sapien
acttcttcatgagtattagcaggta

SEQ ID NO: 5339874 - DNA, 25 bp, Homo sapien
ttagttcaattgctgacaggaatcc

SEQ ID NO: 5339875 - DNA, 25 bp, Homo sapien
caattgctgacaggaatcccattat

SEQ ID NO: 5339876 - DNA, 25 bp, Homo sapien
aatcccattatctgagtgccacttc

SEQ ID NO: 5339877 - DNA, 25 bp, Homo sapien
ccattatctgagtgccacttcccat

SEQ ID NO: 5339878 - DNA, 25 bp, Homo sapien
ttggaacaaagacgagaataagcag

SEQ ID NO: 5339879 - DNA, 25 bp, Homo sapien
tgaaaagggcaattacagatcaagt

SEQ ID NO: 5339880 - DNA, 25 bp, Homo sapien
ggaacatctagtagtcactgggaac

SEQ ID NO: 5339881 - DNA, 25 bp, Homo sapien
aagtgcttgacaggatgaaaagggc

SEQ ID NO: 5339882 - DNA, 25 bp, Homo sapien
cactcggtctctcggctacctttgc

SEQ ID NO: 5339883 - DNA, 25 bp, Homo sapien
tttttgctagccactcggtctctcg

SEQ ID NO: 5339884 - DNA, 25 bp, Homo sapien
tcggtctctcggctacctttgccat

SEQ ID NO: 5339885 - DNA, 25 bp, Homo sapien
ttgctagccactcggtctctcggct

SEQ ID NO: 5339886 - DNA, 25 bp, Homo sapien
gattatccatcatcaaccagtggga

SEQ ID NO: 5339887 - DNA, 25 bp, Homo sapien
tctaaccaagacaaagaggcaaaag

SEQ ID NO: 5339888 - DNA, 25 bp, Homo sapien
gcctcaatatcagaagcaaaggtac

SEQ ID NO: 5339889 - DNA, 25 bp, Homo sapien
actccagggttaagcctctaaaatg

SEQ ID NO: 5339890 - DNA, 25 bp, Homo sapien
cgaaataatatggttgtttggaggt

SEQ ID NO: 5339891 - DNA, 25 bp, Homo sapien
gaacttgctgcttatgtatcctgat

SEQ ID NO: 5339892 - DNA, 25 bp, Homo sapien
gttaagaatcgttgctaacgaaata

SEQ ID NO: 5339893 - DNA, 25 bp, Homo sapien
ctttatgagctgatattccttgttc

SEQ ID NO: 5339894 - DNA, 25 bp, Homo sapien
atgtagataccacatcctcttggac

SEQ ID NO: 5339895 - DNA, 25 bp, Homo sapien
agataccacatcctcttggacaaga

SEQ ID NO: 5339896 - DNA, 25 bp, Homo sapien
catgtacacgtatatctttcctcct

SEQ ID NO: 5339897 - DNA, 25 bp, Homo sapien
aaatggttcagccaccacatgtaca

SEQ ID NO: 5339898 - DNA, 25 bp, Homo sapien
tccaccctctgtgagtacataatca

SEQ ID NO: 5339899 - DNA, 25 bp, Homo sapien
gaacgttcaatttaagccaatccag

SEQ ID NO: 5339900 - DNA, 25 bp, Homo sapien
tatactgtagacctcagtgaaggct

SEQ ID NO: 5339901 - DNA, 25 bp, Homo sapien
taatccaacacaatctgacatcctg

SEQ ID NO: 5339902 - DNA, 25 bp, Homo sapien
catcatgttttctacccactcagag

SEQ ID NO: 5339903 - DNA, 25 bp, Homo sapien
agcaccatacacttgccatcatgtt

SEQ ID NO: 5339904 - DNA, 25 bp, Homo sapien
cttttaccttgattcagcaccatac

SEQ ID NO: 5339905 - DNA, 25 bp, Homo sapien
tacacttgccatcatgttttctacc

SEQ ID NO: 5339906 - DNA, 25 bp, Homo sapien
tgtctaaactagctaccctagcagg

SEQ ID NO: 5339907 - DNA, 25 bp, Homo sapien
gggttactgctaatccatgacatgc

SEQ ID NO: 5339908 - DNA, 25 bp, Homo sapien
tcttctgggctctgattacaccgtt

SEQ ID NO: 5339909 - DNA, 25 bp, Homo sapien
taacaaggctcctgaattagacctc

SEQ ID NO: 5339910 - DNA, 25 bp, Homo sapien
gatttgtaggaaaaagctggaccat

SEQ ID NO: 5339911 - DNA, 25 bp, Homo sapien
gctggaccatatgaggagaaatcca

SEQ ID NO: 5339912 - DNA, 25 bp, Homo sapien
aaggctacatattgcatgaccccaa

SEQ ID NO: 5339913 - DNA, 25 bp, Homo sapien
gatgaccttctgtaggtgagtggat

SEQ ID NO: 5339914 - DNA, 25 bp, Homo sapien
aagaactgagggagaccaagggtct

SEQ ID NO: 5339915 - DNA, 25 bp, Homo sapien
caatcagattcacaagcagactcaa

SEQ ID NO: 5339916 - DNA, 25 bp, Homo sapien
tttccatagggtagacagggttgag

SEQ ID NO: 5339917 - DNA, 25 bp, Homo sapien
tggtgactgaaacccattgcctgag

SEQ ID NO: 5339918 - DNA, 25 bp, Homo sapien
agtcactacctttgcagcactctgg

SEQ ID NO: 5339919 - DNA, 25 bp, Homo sapien
acattccagcaacatcgagtcccag

SEQ ID NO: 5339920 - DNA, 25 bp, Homo sapien
cctctcagaggacgaacatttttgg

SEQ ID NO: 5339921 - DNA, 25 bp, Homo sapien
gaatcacaatgccttccacggagaa

SEQ ID NO: 5339922 - DNA, 25 bp, Homo sapien
ttcgcttccagccccgagtgaggcg

SEQ ID NO: 5339923 - DNA, 25 bp, Homo sapien
tgccgctcgcgcttgggcaggacgc

SEQ ID NO: 5339924 - DNA, 25 bp, Homo sapien
cagccccgagtgaggcggagaccca

SEQ ID NO: 5339925 - DNA, 25 bp, Homo sapien
ccctagcggcgatccgggccgctgc

SEQ ID NO: 5339926 - DNA, 25 bp, Homo sapien
gattcggtcaaggtaatgaggcact

SEQ ID NO: 5339927 - DNA, 25 bp, Homo sapien
gaagaagattcggtcaaggtaatga

SEQ ID NO: 5339928 - DNA, 25 bp, Homo sapien
cggtcaaggtaatgaggcactgatt

SEQ ID NO: 5339929 - DNA, 25 bp, Homo sapien
gaagattcggtcaaggtaatgaggc

SEQ ID NO: 5339930 - DNA, 25 bp, Homo sapien
gtttgccttttgttcttcactcagg

SEQ ID NO: 5339931 - DNA, 25 bp, Homo sapien
tttgccttttgttcttcactcaggg

SEQ ID NO: 5339932 - DNA, 25 bp, Homo sapien
gacttgcatgtatgatgggccagct

SEQ ID NO: 5339933 - DNA, 25 bp, Homo sapien
ctgacttgcatgtatgatgggccag

SEQ ID NO: 5339934 - DNA, 25 bp, Homo sapien
tgacttgcatgtatgatgggccagc

SEQ ID NO: 5339935 - DNA, 25 bp, Homo sapien
cttgcatgtatgatgggccagctgc

SEQ ID NO: 5339936 - DNA, 25 bp, Homo sapien
gattctggatccaatgtctgttaga

SEQ ID NO: 5339937 - DNA, 25 bp, Homo sapien
cattgccaggccataggatgtttca

SEQ ID NO: 5339938 - DNA, 25 bp, Homo sapien
tagattttcaaggttcctacaggaa

SEQ ID NO: 5339939 - DNA, 25 bp, Homo sapien
tttcaaaaagcccaatgattctgga

SEQ ID NO: 5339940 - DNA, 25 bp, Homo sapien
tagaaagttgatgcagtaagagatg

SEQ ID NO: 5339941 - DNA, 25 bp, Homo sapien
actcctctctcagtgtgcggtccag

SEQ ID NO: 5339942 - DNA, 25 bp, Homo sapien
caaagcgagagtcctcctagctggt

SEQ ID NO: 5339943 - DNA, 25 bp, Homo sapien
aatggacgaacttcctgaggcccca

SEQ ID NO: 5339944 - DNA, 25 bp, Homo sapien
gataccagcgccaaaaatgtaacta

SEQ ID NO: 5339945 - DNA, 25 bp, Homo sapien
agtcacttaagtgtggtatttgcac

SEQ ID NO: 5339946 - DNA, 25 bp, Homo sapien
actaccaaagtcacttaagtgtggt

SEQ ID NO: 5339947 - DNA, 25 bp, Homo sapien
agcagcaatgtaggacttgatacca

SEQ ID NO: 5339948 - DNA, 25 bp, Homo sapien
cacttttgtcttgatcaaaacactc

SEQ ID NO: 5339949 - DNA, 25 bp, Homo sapien
tccataccgcttatgaactcttcat

SEQ ID NO: 5339950 - DNA, 25 bp, Homo sapien
aaacactctatacggcatttccttg

SEQ ID NO: 5339951 - DNA, 25 bp, Homo sapien
cttcattagcgtcagactggaaatc

SEQ ID NO: 5339952 - DNA, 25 bp, Homo sapien
gacagacacttgtccatcaccttgg

SEQ ID NO: 5339953 - DNA, 25 bp, Homo sapien
ttgctgctgcacatcgcaatactca

SEQ ID NO: 5339954 - DNA, 25 bp, Homo sapien
ggaattgctgctgtctctatgccca

SEQ ID NO: 5339955 - DNA, 25 bp, Homo sapien
gctgcttgatgtaggcctgtctttt

SEQ ID NO: 5339956 - DNA, 25 bp, Homo sapien
taagttgtctccactattgtccttt

SEQ ID NO: 5339957 - DNA, 25 bp, Homo sapien
gttttaagttgtctccactattgtc

SEQ ID NO: 5339958 - DNA, 25 bp, Homo sapien
tttaagttgtctccactattgtcct

SEQ ID NO: 5339959 - DNA, 25 bp, Homo sapien
atgttttaagttgtctccactattg

SEQ ID NO: 5339960 - DNA, 25 bp, Homo sapien
agcctttgcttgaccatctcctgag

SEQ ID NO: 5339961 - DNA, 25 bp, Homo sapien
tgtagtatcttgctctgaccacagc

SEQ ID NO: 5339962 - DNA, 25 bp, Homo sapien
tcctgagcctgggatacattgctac

SEQ ID NO: 5339963 - DNA, 25 bp, Homo sapien
tacctctaggctggtcaattcctcc

SEQ ID NO: 5339964 - DNA, 25 bp, Homo sapien
gtgaacacccataggcatcccaaat

SEQ ID NO: 5339965 - DNA, 25 bp, Homo sapien
tatttctatcttagtggatgcctgc

SEQ ID NO: 5339966 - DNA, 25 bp, Homo sapien
tatcaacccaaatagcccagggcga

SEQ ID NO: 5339967 - DNA, 25 bp, Homo sapien
tattcagcatacaagcccctgttga

SEQ ID NO: 5339968 - DNA, 25 bp, Homo sapien
gagtaggagtacatgtaaggcccca

SEQ ID NO: 5339969 - DNA, 25 bp, Homo sapien
agtgccagaacatctatctatattc

SEQ ID NO: 5339970 - DNA, 25 bp, Homo sapien
gagagaaaatggagtaggagtacat

SEQ ID NO: 5339971 - DNA, 25 bp, Homo sapien
tattcacttcgtaattctgaaatcc

SEQ ID NO: 5339972 - DNA, 25 bp, Homo sapien
tcttccccgagaccatgataatctt

SEQ ID NO: 5339973 - DNA, 25 bp, Homo sapien
ttccccgagaccatgataatcttct

SEQ ID NO: 5339974 - DNA, 25 bp, Homo sapien
ttgcttgtcattcttccccgagacc

SEQ ID NO: 5339975 - DNA, 25 bp, Homo sapien
tttgcttgtcattcttccccgagac

SEQ ID NO: 5339976 - DNA, 25 bp, Homo sapien
gaagctggagttccatggagagaaa

SEQ ID NO: 5339977 - DNA, 25 bp, Homo sapien
tgggtggtccccttggcaactggaa

SEQ ID NO: 5339978 - DNA, 25 bp, Homo sapien
cagaggtaggtgaattatctccaca

SEQ ID NO: 5339979 - DNA, 25 bp, Homo sapien
taaagcttcgtggagtttgatggca

SEQ ID NO: 5339980 - DNA, 25 bp, Homo sapien
cacgaactcccagtttacactgttg

SEQ ID NO: 5339981 - DNA, 25 bp, Homo sapien
gaatctcctggaacatgttagttaa

SEQ ID NO: 5339982 - DNA, 25 bp, Homo sapien
taaatgtactatggagccctgtggt

SEQ ID NO: 5339983 - DNA, 25 bp, Homo sapien
tggctcctatcagaccactttggta

SEQ ID NO: 5339984 - DNA, 25 bp, Homo sapien
caaggtattggatcagctgtctcac

SEQ ID NO: 5339985 - DNA, 25 bp, Homo sapien
tcaaggtattggatcagctgtctca

SEQ ID NO: 5339986 - DNA, 25 bp, Homo sapien
tctgtgctgagttggtccttgggct

SEQ ID NO: 5339987 - DNA, 25 bp, Homo sapien
tcatattacaatggctgactgagca

SEQ ID NO: 5339988 - DNA, 25 bp, Homo sapien
tgagcacatgctatagcctccctct

SEQ ID NO: 5339989 - DNA, 25 bp, Homo sapien
catccgtaggtgagggcatcctgag

SEQ ID NO: 5339990 - DNA, 25 bp, Homo sapien
tctgtatccagttgagagcagcaag

SEQ ID NO: 5339991 - DNA, 25 bp, Homo sapien
gagagcagcaagtgtaggagcttgg

SEQ ID NO: 5339992 - DNA, 25 bp, Homo sapien
agagcagcaagtgtaggagcttggt

SEQ ID NO: 5339993 - DNA, 25 bp, Homo sapien
ttctgtatccagttgagagcagcaa

SEQ ID NO: 5339994 - DNA, 25 bp, Homo sapien
tccttcaggctacggagtcctgtga

SEQ ID NO: 5339995 - DNA, 25 bp, Homo sapien
taaagccgtcctaatcttaaatgac

SEQ ID NO: 5339996 - DNA, 25 bp, Homo sapien
tccactgagtcccttctttggactc

SEQ ID NO: 5339997 - DNA, 25 bp, Homo sapien
ggaatctgccaagcctattgcctgt

SEQ ID NO: 5339998 - DNA, 25 bp, Homo sapien
cctggcagatcccaggtggctcaca

SEQ ID NO: 5339999 - DNA, 25 bp, Homo sapien
cgagcccttttttatcccctggcag

SEQ ID NO: 5340000 - DNA, 25 bp, Homo sapien
ttttttatcccctggcagatcccag

SEQ ID NO: 5340001 - DNA, 25 bp, Homo sapien
gcccttttttatcccctggcagatc

SEQ ID NO: 5340002 - DNA, 25 bp, Homo sapien
gctgtaaaccgccccatgctggagc

SEQ ID NO: 5340003 - DNA, 25 bp, Homo sapien
ggagttagggtgaacgtttgtcgca

SEQ ID NO: 5340004 - DNA, 25 bp, Homo sapien
gagttagggtgaacgtttgtcgcat

SEQ ID NO: 5340005 - DNA, 25 bp, Homo sapien
atgcagctgtaaaccgccccatgct

SEQ ID NO: 5340006 - DNA, 25 bp, Homo sapien
gacataggatctgctgtcactgaag

SEQ ID NO: 5340007 - DNA, 25 bp, Homo sapien
tgaaggagagacttgttcgtagcac

SEQ ID NO: 5340008 - DNA, 25 bp, Homo sapien
cactgtgccctattgctaatctttc

SEQ ID NO: 5340009 - DNA, 25 bp, Homo sapien
cctattgctaatctttcctactcca

SEQ ID NO: 5340010 - DNA, 25 bp, Homo sapien
ttaaagcaatgactgagcaatgaga

SEQ ID NO: 5340011 - DNA, 25 bp, Homo sapien
agaagctgagaagagcttcgggcag

SEQ ID NO: 5340012 - DNA, 25 bp, Homo sapien
aagagcttcgggcagtttcactgat

SEQ ID NO: 5340013 - DNA, 25 bp, Homo sapien
taaagcaatgactgagcaatgagaa

SEQ ID NO: 5340014 - DNA, 25 bp, Homo sapien
gtaaagggcagtcttctactagcct

SEQ ID NO: 5340015 - DNA, 25 bp, Homo sapien
gatcctcctatgtgatgaaattgag

SEQ ID NO: 5340016 - DNA, 25 bp, Homo sapien
tctcagcaatacagcagtaaagggc

SEQ ID NO: 5340017 - DNA, 25 bp, Homo sapien
cacactttggccctgataaacataa

SEQ ID NO: 5340018 - DNA, 25 bp, Homo sapien
tcccttcttccccaatatcagccat

SEQ ID NO: 5340019 - DNA, 25 bp, Homo sapien
ctccagtcccttcttccccaatatc

SEQ ID NO: 5340020 - DNA, 25 bp, Homo sapien
cagtcccttcttccccaatatcagc

SEQ ID NO: 5340021 - DNA, 25 bp, Homo sapien
catacagaaatggccatctccagtc

SEQ ID NO: 5340022 - DNA, 25 bp, Homo sapien
gcttctggtggccttaacttccttc

SEQ ID NO: 5340023 - DNA, 25 bp, Homo sapien
ttggctctgggtttggtctagtatg

SEQ ID NO: 5340024 - DNA, 25 bp, Homo sapien
ggtctagtatgcttgttcatattgt

SEQ ID NO: 5340025 - DNA, 25 bp, Homo sapien
gggtttggtctagtatgcttgttca

SEQ ID NO: 5340026 - DNA, 25 bp, Homo sapien
tagtggaggcttggtaaggatttta

SEQ ID NO: 5340027 - DNA, 25 bp, Homo sapien
tctggctggttgtccgtgaggttca

SEQ ID NO: 5340028 - DNA, 25 bp, Homo sapien
tagtgagtggaaaatctggctggtt

SEQ ID NO: 5340029 - DNA, 25 bp, Homo sapien
tgcgtgtgagtggatagaaatagaa

SEQ ID NO: 5340030 - DNA, 25 bp, Homo sapien
gtgtcataatttactaaagccatta

SEQ ID NO: 5340031 - DNA, 25 bp, Homo sapien
aaaatgtctatactagtgtcataat

SEQ ID NO: 5340032 - DNA, 25 bp, Homo sapien
agtttgaaatctgacgtgaaaaact

SEQ ID NO: 5340033 - DNA, 25 bp, Homo sapien
tgaaatctgacgtgaaaaacttcag

SEQ ID NO: 5340034 - DNA, 25 bp, Homo sapien
ctctcatgtaagcttttggatggca

SEQ ID NO: 5340035 - DNA, 25 bp, Homo sapien
gagagatggactgaacatccttaag

SEQ ID NO: 5340036 - DNA, 25 bp, Homo sapien
tctctcctggcttatctgctttaat

SEQ ID NO: 5340037 - DNA, 25 bp, Homo sapien
ctgctttaatgtagagtggttggtg

SEQ ID NO: 5340038 - DNA, 25 bp, Homo sapien
tattcttgtaggttgtggttaggaa

SEQ ID NO: 5340039 - DNA, 25 bp, Homo sapien
gctagagcaaagttgagtattcttg

SEQ ID NO: 5340040 - DNA, 25 bp, Homo sapien
gagtattcttgtaggttgtggttag

SEQ ID NO: 5340041 - DNA, 25 bp, Homo sapien
tggggctagagcaaagttgagtatt

SEQ ID NO: 5340042 - DNA, 25 bp, Homo sapien
actgatctttagtatatcttggttc

SEQ ID NO: 5340043 - DNA, 25 bp, Homo sapien
gtggatccatgggacaaggtagtca

SEQ ID NO: 5340044 - DNA, 25 bp, Homo sapien
tccatgggacaaggtagtcattttc

SEQ ID NO: 5340045 - DNA, 25 bp, Homo sapien
gaggtagtaggtggatccatgggac

SEQ ID NO: 5340046 - DNA, 25 bp, Homo sapien
cagcactggatgttggttctcctag

SEQ ID NO: 5340047 - DNA, 25 bp, Homo sapien
gctcaatactcagaggtacttccat

SEQ ID NO: 5340048 - DNA, 25 bp, Homo sapien
ggttctcctagctcaatactcagag

SEQ ID NO: 5340049 - DNA, 25 bp, Homo sapien
gatgttggttctcctagctcaatac

SEQ ID NO: 5340050 - DNA, 25 bp, Homo sapien
atactttttctctggttctcaggct

SEQ ID NO: 5340051 - DNA, 25 bp, Homo sapien
ctttttctctggttctcaggctcac

SEQ ID NO: 5340052 - DNA, 25 bp, Homo sapien
ctttttctcccatactttttctctg

SEQ ID NO: 5340053 - DNA, 25 bp, Homo sapien
ttctcccatactttttctctggttc

SEQ ID NO: 5340054 - DNA, 25 bp, Homo sapien
tggcttctacaatacctcctttccc

SEQ ID NO: 5340055 - DNA, 25 bp, Homo sapien
tgctttgagtcattgggttcaactc

SEQ ID NO: 5340056 - DNA, 25 bp, Homo sapien
catcacataaagttgagctcccgcc

SEQ ID NO: 5340057 - DNA, 25 bp, Homo sapien
tcaactcttcgttaaacctggatgt

SEQ ID NO: 5340058 - DNA, 25 bp, Homo sapien
tgatttatgcaggttggccgactcg

SEQ ID NO: 5340059 - DNA, 25 bp, Homo sapien
gccgactcgtgtatgtgagacctgc

SEQ ID NO: 5340060 - DNA, 25 bp, Homo sapien
cttgggctccagctgcggttaaaca

SEQ ID NO: 5340061 - DNA, 25 bp, Homo sapien
aaacatgtctgtgggaccagtagcc

SEQ ID NO: 5340062 - DNA, 25 bp, Homo sapien
agtacttaattgttcggtctctaca

SEQ ID NO: 5340063 - DNA, 25 bp, Homo sapien
ggtctctacataagaatcactttgc

SEQ ID NO: 5340064 - DNA, 25 bp, Homo sapien
taattgttcggtctctacataagaa

SEQ ID NO: 5340065 - DNA, 25 bp, Homo sapien
taagaatcactttgctgaacaatga

SEQ ID NO: 5340066 - DNA, 25 bp, Homo sapien
tcagctctcaacaagagttgtctct

SEQ ID NO: 5340067 - DNA, 25 bp, Homo sapien
tctgtgcatgctgatggaggttctt

SEQ ID NO: 5340068 - DNA, 25 bp, Homo sapien
agagttgtctcttgaatatttagaa

SEQ ID NO: 5340069 - DNA, 25 bp, Homo sapien
catgctgatggaggttctttaactt

SEQ ID NO: 5340070 - DNA, 25 bp, Homo sapien
aatcatcaaaacttccaggtatcag

SEQ ID NO: 5340071 - DNA, 25 bp, Homo sapien
tagtgaccagggcataatagtataa

SEQ ID NO: 5340072 - DNA, 25 bp, Homo sapien
ttttgaatacagatattgcttccat

SEQ ID NO: 5340073 - DNA, 25 bp, Homo sapien
ccaggtatcagtgctcttttgaata

SEQ ID NO: 5340074 - DNA, 25 bp, Homo sapien
cagttgaccattgagaatgtgagga

SEQ ID NO: 5340075 - DNA, 25 bp, Homo sapien
atatggagccgtgcggttgattttc

SEQ ID NO: 5340076 - DNA, 25 bp, Homo sapien
aggctccctcttcagttgaccattg

SEQ ID NO: 5340077 - DNA, 25 bp, Homo sapien
tgtgaggatatggagccgtgcggtt

SEQ ID NO: 5340078 - DNA, 25 bp, Homo sapien
gctcctgtcttgtggaagatgaccg

SEQ ID NO: 5340079 - DNA, 25 bp, Homo sapien
tcttgtggaagatgaccggtgtctt

SEQ ID NO: 5340080 - DNA, 25 bp, Homo sapien
gcagctcctgtcttgtggaagatga

SEQ ID NO: 5340081 - DNA, 25 bp, Homo sapien
gcccaccagcaacagatcacgtcca

SEQ ID NO: 5340082 - DNA, 25 bp, Homo sapien
gaggatggcgaaagagaggggctcc

SEQ ID NO: 5340083 - DNA, 25 bp, Homo sapien
tggcgaaagagaggggctccagctc

SEQ ID NO: 5340084 - DNA, 25 bp, Homo sapien
tgtgatgggagcctgctagagtaca

SEQ ID NO: 5340085 - DNA, 25 bp, Homo sapien
tagaggtatgtgatgggagcctgct

SEQ ID NO: 5340086 - DNA, 25 bp, Homo sapien
tgtccgcaggtgacttagacttccc

SEQ ID NO: 5340087 - DNA, 25 bp, Homo sapien
cctcattgtccgcaggtgacttaga

SEQ ID NO: 5340088 - DNA, 25 bp, Homo sapien
ctgtcccctcattgtccgcaggtga

SEQ ID NO: 5340089 - DNA, 25 bp, Homo sapien
caggtgacttagacttccctgccat

SEQ ID NO: 5340090 - DNA, 25 bp, Homo sapien
aaccattggctggaagtctactcct

SEQ ID NO: 5340091 - DNA, 25 bp, Homo sapien
taccatttcgcatattgggcttcaa

SEQ ID NO: 5340092 - DNA, 25 bp, Homo sapien
taataagcctcattacttccaaggt

SEQ ID NO: 5340093 - DNA, 25 bp, Homo sapien
ccaattatattgcaccatcgatgta

SEQ ID NO: 5340094 - DNA, 25 bp, Homo sapien
tatcatgcctgaagcatgggtcacc

SEQ ID NO: 5340095 - DNA, 25 bp, Homo sapien
tcatagggtgtttttcaagagcatc

SEQ ID NO: 5340096 - DNA, 25 bp, Homo sapien
tagaaccacgtcttgtatttcccag

SEQ ID NO: 5340097 - DNA, 25 bp, Homo sapien
taaatgaatgtatccgtgggctgtg

SEQ ID NO: 5340098 - DNA, 25 bp, Homo sapien
cacaagtgtaatcacctccaaacac

SEQ ID NO: 5340099 - DNA, 25 bp, Homo sapien
caacaagggctctgtgtgtaggctt

SEQ ID NO: 5340100 - DNA, 25 bp, Homo sapien
tgaacggcctgtgtcgcctatggcc

SEQ ID NO: 5340101 - DNA, 25 bp, Homo sapien
tctcatctatcacacttggcacagt

SEQ ID NO: 5340102 - DNA, 25 bp, Homo sapien
caacttcaatctcatctatcacact

SEQ ID NO: 5340103 - DNA, 25 bp, Homo sapien
ttggcacagttctgaaatggactga

SEQ ID NO: 5340104 - DNA, 25 bp, Homo sapien
gatggtgccgctaagacagatggaa

SEQ ID NO: 5340105 - DNA, 25 bp, Homo sapien
tcacccatcggctttgaagcagtag

SEQ ID NO: 5340106 - DNA, 25 bp, Homo sapien
agagcccctcgttctggcaagacct

SEQ ID NO: 5340107 - DNA, 25 bp, Homo sapien
aaggagtcgttctaggccctccaga

SEQ ID NO: 5340108 - DNA, 25 bp, Homo sapien
tccaggtgagacgatgcggatcgcc

SEQ ID NO: 5340109 - DNA, 25 bp, Homo sapien
gcggatcgcctcctccgagtttgca

SEQ ID NO: 5340110 - DNA, 25 bp, Homo sapien
agatgacccttgctcgtcggtaaag

SEQ ID NO: 5340111 - DNA, 25 bp, Homo sapien
taaagcgcggcaccatggtacgggc

SEQ ID NO: 5340112 - DNA, 25 bp, Homo sapien
agatgtcatgagacttttatcccat

SEQ ID NO: 5340113 - DNA, 25 bp, Homo sapien
cagatgtcatgagacttttatccca

SEQ ID NO: 5340114 - DNA, 25 bp, Homo sapien
cttgtcccactaacccatagaacac

SEQ ID NO: 5340115 - DNA, 25 bp, Homo sapien
tctctgggtgggcacatacttgtcc

SEQ ID NO: 5340116 - DNA, 25 bp, Homo sapien
cactaacccatagaacaccattcta

SEQ ID NO: 5340117 - DNA, 25 bp, Homo sapien
gaacaccattctatgtgccttgctt

SEQ ID NO: 5340118 - DNA, 25 bp, Homo sapien
gctgtgttgtggaaggccctgtcag

SEQ ID NO: 5340119 - DNA, 25 bp, Homo sapien
ttttccgcagcaacttatattcatg

SEQ ID NO: 5340120 - DNA, 25 bp, Homo sapien
aatcacaggcaaatgtcgttcagcc

SEQ ID NO: 5340121 - DNA, 25 bp, Homo sapien
gccaggttgatgaagaatagtcact

SEQ ID NO: 5340122 - DNA, 25 bp, Homo sapien
gaatagtcacttgagtaatcacagg

SEQ ID NO: 5340123 - DNA, 25 bp, Homo sapien
caaattatacaatggcaaatactcc

SEQ ID NO: 5340124 - DNA, 25 bp, Homo sapien
tcaaattatacaatggcaaatactc

SEQ ID NO: 5340125 - DNA, 25 bp, Homo sapien
atttgtaggaactatagatacagcc

SEQ ID NO: 5340126 - DNA, 25 bp, Homo sapien
tattttctcgcttgttggagcctgt

SEQ ID NO: 5340127 - DNA, 25 bp, Homo sapien
ttttcctctagctcttgagcctctg

SEQ ID NO: 5340128 - DNA, 25 bp, Homo sapien
tctgtatatttcttgctcaggatgg

SEQ ID NO: 5340129 - DNA, 25 bp, Homo sapien
caggcccacgtgcactggccttttt

SEQ ID NO: 5340130 - DNA, 25 bp, Homo sapien
ctttgtgccttttgtctcccgagcg

SEQ ID NO: 5340131 - DNA, 25 bp, Homo sapien
ttgtgccttttgtctcccgagcggc

SEQ ID NO: 5340132 - DNA, 25 bp, Homo sapien
tgccttttgtctcccgagcggcttc

SEQ ID NO: 5340133 - DNA, 25 bp, Homo sapien
tggacagcacaattgatcttctcgg

SEQ ID NO: 5340134 - DNA, 25 bp, Homo sapien
tctggacagcacatacctggacagc

SEQ ID NO: 5340135 - DNA, 25 bp, Homo sapien
ggatctctcgttcccgaatggcttg

SEQ ID NO: 5340136 - DNA, 25 bp, Homo sapien
cacaaaattgtcagggagagcagca

SEQ ID NO: 5340137 - DNA, 25 bp, Homo sapien
gattcagttcgaaaattgttacact

SEQ ID NO: 5340138 - DNA, 25 bp, Homo sapien
tgattcagttcgaaaattgttacac

SEQ ID NO: 5340139 - DNA, 25 bp, Homo sapien
ttgattcagttcgaaaattgttaca

SEQ ID NO: 5340140 - DNA, 25 bp, Homo sapien
cttgattcagttcgaaaattgttac

SEQ ID NO: 5340141 - DNA, 25 bp, Homo sapien
ccactggctgaataaatcaggctgt

SEQ ID NO: 5340142 - DNA, 25 bp, Homo sapien
ggctgaataaatcaggctgttcata

SEQ ID NO: 5340143 - DNA, 25 bp, Homo sapien
gaataaatcaggctgttcatatttt

SEQ ID NO: 5340144 - DNA, 25 bp, Homo sapien
ctggctgaataaatcaggctgttca

SEQ ID NO: 5340145 - DNA, 25 bp, Homo sapien
atgggtgatacagatgatagaggtg

SEQ ID NO: 5340146 - DNA, 25 bp, Homo sapien
tttccaatcagcctgaagccagttt

SEQ ID NO: 5340147 - DNA, 25 bp, Homo sapien
ttccaatcagcctgaagccagtttc

SEQ ID NO: 5340148 - DNA, 25 bp, Homo sapien
tgaagtacaaccaccaactgataca

SEQ ID NO: 5340149 - DNA, 25 bp, Homo sapien
caaggacttggctttgaactctgag

SEQ ID NO: 5340150 - DNA, 25 bp, Homo sapien
tgactggagcgataagcaaggactt

SEQ ID NO: 5340151 - DNA, 25 bp, Homo sapien
gtataagtcgtttctctggcccgtg

SEQ ID NO: 5340152 - DNA, 25 bp, Homo sapien
tgtatttgtaggagctcccagttca

SEQ ID NO: 5340153 - DNA, 25 bp, Homo sapien
catgtatttgtaggagctcccagtt

SEQ ID NO: 5340154 - DNA, 25 bp, Homo sapien
taaaggacaggcatgtatttgtagg

SEQ ID NO: 5340155 - DNA, 25 bp, Homo sapien
ttaaaggacaggcatgtatttgtag

SEQ ID NO: 5340156 - DNA, 25 bp, Homo sapien
ctttccctggccagctagcaaaatt

SEQ ID NO: 5340157 - DNA, 25 bp, Homo sapien
aaatttttaattcatccagataagt

SEQ ID NO: 5340158 - DNA, 25 bp, Homo sapien
tttccctggccagctagcaaaattt

SEQ ID NO: 5340159 - DNA, 25 bp, Homo sapien
tttttaattcatccagataagtgac

SEQ ID NO: 5340160 - DNA, 25 bp, Homo sapien
atttaaaggcatccttgactgctat

SEQ ID NO: 5340161 - DNA, 25 bp, Homo sapien
aatttaaaggcatccttgactgcta

SEQ ID NO: 5340162 - DNA, 25 bp, Homo sapien
taatttaaaggcatccttgactgct

SEQ ID NO: 5340163 - DNA, 25 bp, Homo sapien
ataatttaaaggcatccttgactgc

SEQ ID NO: 5340164 - DNA, 25 bp, Homo sapien
ttcacaataactagctcttcgtctg

SEQ ID NO: 5340165 - DNA, 25 bp, Homo sapien
aaattcacaataactagctcttcgt

SEQ ID NO: 5340166 - DNA, 25 bp, Homo sapien
cacaataactagctcttcgtctgtt

SEQ ID NO: 5340167 - DNA, 25 bp, Homo sapien
caataactagctcttcgtctgttac

SEQ ID NO: 5340168 - DNA, 25 bp, Homo sapien
gaatcccatctaagctcgtaatttt

SEQ ID NO: 5340169 - DNA, 25 bp, Homo sapien
tcccatctaagctcgtaattttcat

SEQ ID NO: 5340170 - DNA, 25 bp, Homo sapien
catctaagctcgtaattttcatatc

SEQ ID NO: 5340171 - DNA, 25 bp, Homo sapien
ctgaatcccatctaagctcgtaatt

SEQ ID NO: 5340172 - DNA, 25 bp, Homo sapien
gactatcatcaagggacactactcc

SEQ ID NO: 5340173 - DNA, 25 bp, Homo sapien
aatgactatcatcaagggacactac

SEQ ID NO: 5340174 - DNA, 25 bp, Homo sapien
ttgttctctggccacgggtaccata

SEQ ID NO: 5340175 - DNA, 25 bp, Homo sapien
tggccacgggtaccatataataatg

SEQ ID NO: 5340176 - DNA, 25 bp, Homo sapien
tgtctccacattgagcaagttagtg

SEQ ID NO: 5340177 - DNA, 25 bp, Homo sapien
ctgtctccacattgagcaagttagt

SEQ ID NO: 5340178 - DNA, 25 bp, Homo sapien
cacttacacacttccaaaatcactg

SEQ ID NO: 5340179 - DNA, 25 bp, Homo sapien
gaaatccaggaccatattcgggaca

SEQ ID NO: 5340180 - DNA, 25 bp, Homo sapien
tagcaataatgcagcttcccctggc

SEQ ID NO: 5340181 - DNA, 25 bp, Homo sapien
cttaactgccaacagtatccctgga

SEQ ID NO: 5340182 - DNA, 25 bp, Homo sapien
gatgccactcttgcatacctcaatg

SEQ ID NO: 5340183 - DNA, 25 bp, Homo sapien
ggcaactaacattcgctgttcttca

SEQ ID NO: 5340184 - DNA, 25 bp, Homo sapien
tggcaactaacattcgctgttcttc

SEQ ID NO: 5340185 - DNA, 25 bp, Homo sapien
gcaactaacattcgctgttcttcat

SEQ ID NO: 5340186 - DNA, 25 bp, Homo sapien
gagtccttctgacttcttattttga

SEQ ID NO: 5340187 - DNA, 25 bp, Homo sapien
tgacatactgtgtggtctggaaaca

SEQ ID NO: 5340188 - DNA, 25 bp, Homo sapien
cagccttatgtaaagtccctgctcc

SEQ ID NO: 5340189 - DNA, 25 bp, Homo sapien
catggggctctatgacccagatcta

SEQ ID NO: 5340190 - DNA, 25 bp, Homo sapien
actgcatatccttgcaggatctgca

SEQ ID NO: 5340191 - DNA, 25 bp, Homo sapien
tatccttgcaggatctgcagtaaat

SEQ ID NO: 5340192 - DNA, 25 bp, Homo sapien
gtatatggtacttttataactgcat

SEQ ID NO: 5340193 - DNA, 25 bp, Homo sapien
tggtacttttataactgcatatcct

SEQ ID NO: 5340194 - DNA, 25 bp, Homo sapien
tttggttgccttggctcttagcaca

SEQ ID NO: 5340195 - DNA, 25 bp, Homo sapien
gttttggttgccttggctcttagca

SEQ ID NO: 5340196 - DNA, 25 bp, Homo sapien
cagttttggttgccttggctcttag

SEQ ID NO: 5340197 - DNA, 25 bp, Homo sapien
ccttctgcagaacagttttggttgc

SEQ ID NO: 5340198 - DNA, 25 bp, Homo sapien
gtctccaattacagttgtttctcca

SEQ ID NO: 5340199 - DNA, 25 bp, Homo sapien
ttgggactcatcaaagaccacctta

SEQ ID NO: 5340200 - DNA, 25 bp, Homo sapien
gaatgcagtcttgggactcatcaaa

SEQ ID NO: 5340201 - DNA, 25 bp, Homo sapien
attggtaggattgtaagtggtgtgc

SEQ ID NO: 5340202 - DNA, 25 bp, Homo sapien
tgtgcagaagaatgcagtcttggga

SEQ ID NO: 5340203 - DNA, 25 bp, Homo sapien
cactgatgagagcttaagcatggct

SEQ ID NO: 5340204 - DNA, 25 bp, Homo sapien
ccatgggttgctttcgcagcaaaac

SEQ ID NO: 5340205 - DNA, 25 bp, Homo sapien
tagatgccaggtggaacgcagtctc

SEQ ID NO: 5340206 - DNA, 25 bp, Homo sapien
tgaaaagcctagacttccaaattgg

SEQ ID NO: 5340207 - DNA, 25 bp, Homo sapien
aataggaaactaggactctggccca

SEQ ID NO: 5340208 - DNA, 25 bp, Homo sapien
agtttcacttgctagcaccttgcag

SEQ ID NO: 5340209 - DNA, 25 bp, Homo sapien
taatggatactatgactactactgc

SEQ ID NO: 5340210 - DNA, 25 bp, Homo sapien
cgattactactactgcatttgagca

SEQ ID NO: 5340211 - DNA, 25 bp, Homo sapien
ggtctcctagcttcacgacagaaag

SEQ ID NO: 5340212 - DNA, 25 bp, Homo sapien
acagaaagagaaccttaggtcattt

SEQ ID NO: 5340213 - DNA, 25 bp, Homo sapien
tctcctagcttcacgacagaaagag

SEQ ID NO: 5340214 - DNA, 25 bp, Homo sapien
ctagcttcacgacagaaagagaacc

SEQ ID NO: 5340215 - DNA, 25 bp, Homo sapien
taggtgcacatttcttgatgaaggg

SEQ ID NO: 5340216 - DNA, 25 bp, Homo sapien
gagagaacttaggacagcctgggat

SEQ ID NO: 5340217 - DNA, 25 bp, Homo sapien
tgaagggcttactgagttgtaaaag

SEQ ID NO: 5340218 - DNA, 25 bp, Homo sapien
ggaccaagggaccagtttaggtgca

SEQ ID NO: 5340219 - DNA, 25 bp, Homo sapien
cttgggaattcagggcattagggtt

SEQ ID NO: 5340220 - DNA, 25 bp, Homo sapien
ctgtatcgaatcatcagtcaccttc

SEQ ID NO: 5340221 - DNA, 25 bp, Homo sapien
tcaacctcgacagtcactattgtgg

SEQ ID NO: 5340222 - DNA, 25 bp, Homo sapien
gcgggtttgattgccagttgttaaa

SEQ ID NO: 5340223 - DNA, 25 bp, Homo sapien
gccgaagcgggtttgattgccagtt

SEQ ID NO: 5340224 - DNA, 25 bp, Homo sapien
cactattgtggctgccgaagcgggt

SEQ ID NO: 5340225 - DNA, 25 bp, Homo sapien
cctttgccaggcaccaggttttgtg

SEQ ID NO: 5340226 - DNA, 25 bp, Homo sapien
tttgccaggcaccaggttttgtggc

SEQ ID NO: 5340227 - DNA, 25 bp, Homo sapien
caggttttgtggcaccatttcttct

SEQ ID NO: 5340228 - DNA, 25 bp, Homo sapien
gttttgtggcaccatttcttctggc

SEQ ID NO: 5340229 - DNA, 25 bp, Homo sapien
catgcctttggcattatttcttggc

SEQ ID NO: 5340230 - DNA, 25 bp, Homo sapien
tcatgcctttggcattatttcttgg

SEQ ID NO: 5340231 - DNA, 25 bp, Homo sapien
ttgaggtatactggtagcagaagag

SEQ ID NO: 5340232 - DNA, 25 bp, Homo sapien
caatagtggctttttactgaagtac

SEQ ID NO: 5340233 - DNA, 25 bp, Homo sapien
ctgttatctggcaatagtggctttt

SEQ ID NO: 5340234 - DNA, 25 bp, Homo sapien
gcagaagagattacctgttatctgg

SEQ ID NO: 5340235 - DNA, 25 bp, Homo sapien
tgttaattaaaagagaaagtctcaa

SEQ ID NO: 5340236 - DNA, 25 bp, Homo sapien
atgttaattaaaagagaaagtctca

SEQ ID NO: 5340237 - DNA, 25 bp, Homo sapien
atctgggcccagtacttccatctct

SEQ ID NO: 5340238 - DNA, 25 bp, Homo sapien
tgatgatgacccttgccctttgcat

SEQ ID NO: 5340239 - DNA, 25 bp, Homo sapien
tgcatctgggcccagtacttccatc

SEQ ID NO: 5340240 - DNA, 25 bp, Homo sapien
cagctctgatgatgacccttgccct

SEQ ID NO: 5340241 - DNA, 25 bp, Homo sapien
atggctaaaggcggacacagctgga

SEQ ID NO: 5340242 - DNA, 25 bp, Homo sapien
ggctaaaggcggacacagctggaga

SEQ ID NO: 5340243 - DNA, 25 bp, Homo sapien
tagatggctaaaggcggacacagct

SEQ ID NO: 5340244 - DNA, 25 bp, Homo sapien
catagatggctaaaggcggacacag

SEQ ID NO: 5340245 - DNA, 25 bp, Homo sapien
ggtaccacatgtaatgtctgctgca

SEQ ID NO: 5340246 - DNA, 25 bp, Homo sapien
tgctgcagacataacagaggaattc

SEQ ID NO: 5340247 - DNA, 25 bp, Homo sapien
catttggtggcaaaggtggtaccac

SEQ ID NO: 5340248 - DNA, 25 bp, Homo sapien
tacttggtaacagatgagctcatcg

SEQ ID NO: 5340249 - DNA, 25 bp, Homo sapien
ctgatcaaacaacctgagtcctgta

SEQ ID NO: 5340250 - DNA, 25 bp, Homo sapien
catttgtgtattagacgctgcttaa

SEQ ID NO: 5340251 - DNA, 25 bp, Homo sapien
cagtgaccatttgtgtattagacgc

SEQ ID NO: 5340252 - DNA, 25 bp, Homo sapien
cagtggtgattctcagagctcttcc

SEQ ID NO: 5340253 - DNA, 25 bp, Homo sapien
tctttaccaaagtctacactgtatt

SEQ ID NO: 5340254 - DNA, 25 bp, Homo sapien
ttcctatattataccaggcttcttt

SEQ ID NO: 5340255 - DNA, 25 bp, Homo sapien
tatattataccaggcttctttacca

SEQ ID NO: 5340256 - DNA, 25 bp, Homo sapien
ggcttctttaccaaagtctacactg

SEQ ID NO: 5340257 - DNA, 25 bp, Homo sapien
atccaagggactcttttcccagtgt

SEQ ID NO: 5340258 - DNA, 25 bp, Homo sapien
gatccaagggactcttttcccagtg

SEQ ID NO: 5340259 - DNA, 25 bp, Homo sapien
ttctcatcagaccttgctttaggga

SEQ ID NO: 5340260 - DNA, 25 bp, Homo sapien
ctgctgtctctgagggtgatatggt

SEQ ID NO: 5340261 - DNA, 25 bp, Homo sapien
tgctgtctctgagggtgatatggtg

SEQ ID NO: 5340262 - DNA, 25 bp, Homo sapien
ttcatccagtctccggtcatctttc

SEQ ID NO: 5340263 - DNA, 25 bp, Homo sapien
ctctggggataagttcatccagtct

SEQ ID NO: 5340264 - DNA, 25 bp, Homo sapien
ccctatgatgtgtcattcacagagc

SEQ ID NO: 5340265 - DNA, 25 bp, Homo sapien
cctcagataggcacttgagaaccat

SEQ ID NO: 5340266 - DNA, 25 bp, Homo sapien
agatgtcccacgtctcttttctgcc

SEQ ID NO: 5340267 - DNA, 25 bp, Homo sapien
cattgtacacttttgcccttgactg

SEQ ID NO: 5340268 - DNA, 25 bp, Homo sapien
gaaaatactagtgtctgtcccatag

SEQ ID NO: 5340269 - DNA, 25 bp, Homo sapien
tagctattggaaaggtgaatcgccc

SEQ ID NO: 5340270 - DNA, 25 bp, Homo sapien
tttttgaagagctactgctaccggg

SEQ ID NO: 5340271 - DNA, 25 bp, Homo sapien
cacaatgccgggagctaagttccag

SEQ ID NO: 5340272 - DNA, 25 bp, Homo sapien
gaagtagcacttaaaggcttcatga

SEQ ID NO: 5340273 - DNA, 25 bp, Homo sapien
aaaaggaacagtacgaacgctgtgg

SEQ ID NO: 5340274 - DNA, 25 bp, Homo sapien
tgtacagtctccattacatgtgtct

SEQ ID NO: 5340275 - DNA, 25 bp, Homo sapien
gtgtctttgtacacattctgggcac

SEQ ID NO: 5340276 - DNA, 25 bp, Homo sapien
tgaattaactaaaataccagtagcc

SEQ ID NO: 5340277 - DNA, 25 bp, Homo sapien
tcaaagggcctaaaatgaccctata

SEQ ID NO: 5340278 - DNA, 25 bp, Homo sapien
cttcataaaaccctgaggtgaaagg

SEQ ID NO: 5340279 - DNA, 25 bp, Homo sapien
tagccattttagactgtcaacctgg

SEQ ID NO: 5340280 - DNA, 25 bp, Homo sapien
tctgttatcatagtcatggctccag

SEQ ID NO: 5340281 - DNA, 25 bp, Homo sapien
gtgtcgagatgagcgccattttcca

SEQ ID NO: 5340282 - DNA, 25 bp, Homo sapien
cgagatgagcgccattttccatctc

SEQ ID NO: 5340283 - DNA, 25 bp, Homo sapien
ttagtgtcgagatgagcgccatttt

SEQ ID NO: 5340284 - DNA, 25 bp, Homo sapien
ctgtaatgatggtcagacccatgat

SEQ ID NO: 5340285 - DNA, 25 bp, Homo sapien
cgctgttcccggctataatgtctat

SEQ ID NO: 5340286 - DNA, 25 bp, Homo sapien
tcagacccatgatcagtgtaacgct

SEQ ID NO: 5340287 - DNA, 25 bp, Homo sapien
tgatcagtgtaacgctgttcccggc

SEQ ID NO: 5340288 - DNA, 25 bp, Homo sapien
tctgactttacgctgtgatgatggt

SEQ ID NO: 5340289 - DNA, 25 bp, Homo sapien
agaattcattctgactttacgctgt

SEQ ID NO: 5340290 - DNA, 25 bp, Homo sapien
actttacgctgtgatgatggtgtac

SEQ ID NO: 5340291 - DNA, 25 bp, Homo sapien
ttcattctgactttacgctgtgatg

SEQ ID NO: 5340292 - DNA, 25 bp, Homo sapien
aattttccaccatatgacatttgtc

SEQ ID NO: 5340293 - DNA, 25 bp, Homo sapien
gacatttgtctcaaagcactgttca

SEQ ID NO: 5340294 - DNA, 25 bp, Homo sapien
aaactatgactgtgtgattgaactg

SEQ ID NO: 5340295 - DNA, 25 bp, Homo sapien
gaaaatcctgattgatccagaggtg

SEQ ID NO: 5340296 - DNA, 25 bp, Homo sapien
atctgtgctgatgaagtcatgttat

SEQ ID NO: 5340297 - DNA, 25 bp, Homo sapien
tctgtgctgatgaagtcatgttatc

SEQ ID NO: 5340298 - DNA, 25 bp, Homo sapien
ctgtgctgatgaagtcatgttatcc

SEQ ID NO: 5340299 - DNA, 25 bp, Homo sapien
ggaggtagggcttgaatttccaaca

SEQ ID NO: 5340300 - DNA, 25 bp, Homo sapien
ggcaaactgacatcttgcgaggcat

SEQ ID NO: 5340301 - DNA, 25 bp, Homo sapien
gatattggggatatggcaaactgac

SEQ ID NO: 5340302 - DNA, 25 bp, Homo sapien
gatatggcaaactgacatcttgcga

SEQ ID NO: 5340303 - DNA, 25 bp, Homo sapien
ccattaagtagattcattgcataag

SEQ ID NO: 5340304 - DNA, 25 bp, Homo sapien
cacaaacgcaaactgctttggttta

SEQ ID NO: 5340305 - DNA, 25 bp, Homo sapien
taaattgaattttgataggccttcc

SEQ ID NO: 5340306 - DNA, 25 bp, Homo sapien
gataggccttccataaagtttgatt

SEQ ID NO: 5340307 - DNA, 25 bp, Homo sapien
tctttgattccttctccatgcttac

SEQ ID NO: 5340308 - DNA, 25 bp, Homo sapien
cacatctttgattccttctccatgc

SEQ ID NO: 5340309 - DNA, 25 bp, Homo sapien
tcacatctttgattccttctccatg

SEQ ID NO: 5340310 - DNA, 25 bp, Homo sapien
catctttgattccttctccatgctt

SEQ ID NO: 5340311 - DNA, 25 bp, Homo sapien
gatcctgagactttggcagccatcg

SEQ ID NO: 5340312 - DNA, 25 bp, Homo sapien
tccacaggacagtagcattgagttc

SEQ ID NO: 5340313 - DNA, 25 bp, Homo sapien
ggatcacattgtctaagcctattat

SEQ ID NO: 5340314 - DNA, 25 bp, Homo sapien
cattgagttcctagtagccttcagg

SEQ ID NO: 5340315 - DNA, 25 bp, Homo sapien
ggtggcaggctggaccagataaccg

SEQ ID NO: 5340316 - DNA, 25 bp, Homo sapien
ggcaggctggaccagataaccgcat

SEQ ID NO: 5340317 - DNA, 25 bp, Homo sapien
tgcagaagtggtccagtggtggcag

SEQ ID NO: 5340318 - DNA, 25 bp, Homo sapien
ctgcagaagtggtccagtggtggca

SEQ ID NO: 5340319 - DNA, 25 bp, Homo sapien
cccaaagtgcttggaagaggattta

SEQ ID NO: 5340320 - DNA, 25 bp, Homo sapien
gaggatttatgttgactatattcat

SEQ ID NO: 5340321 - DNA, 25 bp, Homo sapien
ggcttattgcccgtgatgtcattgc

SEQ ID NO: 5340322 - DNA, 25 bp, Homo sapien
tactaattttatgacccctatccca

SEQ ID NO: 5340323 - DNA, 25 bp, Homo sapien
gcacatatagggaagatccttgtat

SEQ ID NO: 5340324 - DNA, 25 bp, Homo sapien
ccttgtatttgtaagatgctatcac

SEQ ID NO: 5340325 - DNA, 25 bp, Homo sapien
gatgctatcacatcacatccaatgt

SEQ ID NO: 5340326 - DNA, 25 bp, Homo sapien
tatatgacttgcacatatagggaag

SEQ ID NO: 5340327 - DNA, 25 bp, Homo sapien
agaaattctgcatctcagtctcggg

SEQ ID NO: 5340328 - DNA, 25 bp, Homo sapien
gagcatttagggctgagacctcgcg

SEQ ID NO: 5340329 - DNA, 25 bp, Homo sapien
caggcagaaattctgcatctcagtc

SEQ ID NO: 5340330 - DNA, 25 bp, Homo sapien
ttagggctgagacctcgcgtaccat

SEQ ID NO: 5340331 - DNA, 25 bp, Homo sapien
cctgtaactgtaaaagttcacgatt

SEQ ID NO: 5340332 - DNA, 25 bp, Homo sapien
gcagtataccaaggatactgctggg

SEQ ID NO: 5340333 - DNA, 25 bp, Homo sapien
caaaggatactgaatgcagtatacc

SEQ ID NO: 5340334 - DNA, 25 bp, Homo sapien
ttcacgatttaaatgaattcctttg

SEQ ID NO: 5340335 - DNA, 25 bp, Homo sapien
ggaaggctttgccattccccaccac

SEQ ID NO: 5340336 - DNA, 25 bp, Homo sapien
ctggcatcactctgatttgactggt

SEQ ID NO: 5340337 - DNA, 25 bp, Homo sapien
tgcggcactggcatcactctgattt

SEQ ID NO: 5340338 - DNA, 25 bp, Homo sapien
tatgctgtacacagacagccatgct

SEQ ID NO: 5340339 - DNA, 25 bp, Homo sapien
tgaggcagtgcgtggcttatatgct

SEQ ID NO: 5340340 - DNA, 25 bp, Homo sapien
agagtttggctccatctccccagat

SEQ ID NO: 5340341 - DNA, 25 bp, Homo sapien
tctaagtgtcaactcaaacaatggc

SEQ ID NO: 5340342 - DNA, 25 bp, Homo sapien
gctagatggagcagaatagctatgc

SEQ ID NO: 5340343 - DNA, 25 bp, Homo sapien
ctgaacagcagtctggcccgagctg

SEQ ID NO: 5340344 - DNA, 25 bp, Homo sapien
agggagcagcaaagggccagaaaca

SEQ ID NO: 5340345 - DNA, 25 bp, Homo sapien
agaggcggagggagcagcaaagggc

SEQ ID NO: 5340346 - DNA, 25 bp, Homo sapien
gcggagggagcagcaaagggccaga

SEQ ID NO: 5340347 - DNA, 25 bp, Homo sapien
gagagaggcggagggagcagcaaag

SEQ ID NO: 5340348 - DNA, 25 bp, Homo sapien
tcccagatctaaccatcctcagcat

SEQ ID NO: 5340349 - DNA, 25 bp, Homo sapien
atcccagatctaaccatcctcagca

SEQ ID NO: 5340350 - DNA, 25 bp, Homo sapien
tatcccagatctaaccatcctcagc

SEQ ID NO: 5340351 - DNA, 25 bp, Homo sapien
ttagtagaaagagcctgcagtgccc

SEQ ID NO: 5340352 - DNA, 25 bp, Homo sapien
tgcttttatttctacagagagtaac

SEQ ID NO: 5340353 - DNA, 25 bp, Homo sapien
tccatcatcagcaggctcttccaga

SEQ ID NO: 5340354 - DNA, 25 bp, Homo sapien
gaagaaaaggtgatgatgtggtttc

SEQ ID NO: 5340355 - DNA, 25 bp, Homo sapien
aacacaaagaaagggccagagtcca

SEQ ID NO: 5340356 - DNA, 25 bp, Homo sapien
aggcaaggcaaaccaaaacacaaag

SEQ ID NO: 5340357 - DNA, 25 bp, Homo sapien
ccaaaacacaaagaaagggccagag

SEQ ID NO: 5340358 - DNA, 25 bp, Homo sapien
tggaaggcaaggcaaaccaaaacac

SEQ ID NO: 5340359 - DNA, 25 bp, Homo sapien
tctccttttatttatccttcctctg

SEQ ID NO: 5340360 - DNA, 25 bp, Homo sapien
tccttttatttatccttcctctgac

SEQ ID NO: 5340361 - DNA, 25 bp, Homo sapien
ttttatttatccttcctctgaccat

SEQ ID NO: 5340362 - DNA, 25 bp, Homo sapien
cttttatttatccttcctctgacca

SEQ ID NO: 5340363 - DNA, 25 bp, Homo sapien
ttccaagctttgtccccaatattgc

SEQ ID NO: 5340364 - DNA, 25 bp, Homo sapien
ctttgcgaagggagctcttagggaa

SEQ ID NO: 5340365 - DNA, 25 bp, Homo sapien
gctcttagggaatgaatcaaagaca

SEQ ID NO: 5340366 - DNA, 25 bp, Homo sapien
cccaatattgctttgcgaagggagc

SEQ ID NO: 5340367 - DNA, 25 bp, Homo sapien
tttctacaggtgatataacttctcc

SEQ ID NO: 5340368 - DNA, 25 bp, Homo sapien
taagtctagccacgatctgatccat

SEQ ID NO: 5340369 - DNA, 25 bp, Homo sapien
ctctttgttattggatgattgctca

SEQ ID NO: 5340370 - DNA, 25 bp, Homo sapien
gatctgatccatttggctctggctc

SEQ ID NO: 5340371 - DNA, 25 bp, Homo sapien
tatgcaagctcacgaggttacaaga

SEQ ID NO: 5340372 - DNA, 25 bp, Homo sapien
ctcacgaggttacaagaggacttgt

SEQ ID NO: 5340373 - DNA, 25 bp, Homo sapien
tataatagaagttatgcaagctcac

SEQ ID NO: 5340374 - DNA, 25 bp, Homo sapien
cttgtaggcggcgacttgtttgcaa

SEQ ID NO: 5340375 - DNA, 25 bp, Homo sapien
agcttgctgaaatttgcattgaaga

SEQ ID NO: 5340376 - DNA, 25 bp, Homo sapien
cattgattctcagaaaaagcttgct

SEQ ID NO: 5340377 - DNA, 25 bp, Homo sapien
tgaaatttgcattgaagagggctag

SEQ ID NO: 5340378 - DNA, 25 bp, Homo sapien
atgcttctgcccacattgattctca

SEQ ID NO: 5340379 - DNA, 25 bp, Homo sapien
caagcttctagggttatcctgagca

SEQ ID NO: 5340380 - DNA, 25 bp, Homo sapien
aagcttctagggttatcctgagcag

SEQ ID NO: 5340381 - DNA, 25 bp, Homo sapien
gcttctagggttatcctgagcaggt

SEQ ID NO: 5340382 - DNA, 25 bp, Homo sapien
tcaagcttctagggttatcctgagc

SEQ ID NO: 5340383 - DNA, 25 bp, Homo sapien
gatagatgttcgtctttccactgat

SEQ ID NO: 5340384 - DNA, 25 bp, Homo sapien
cttcctgtgtcgatagatgttcgtc

SEQ ID NO: 5340385 - DNA, 25 bp, Homo sapien
actgatctgtgtttgagcaaattga

SEQ ID NO: 5340386 - DNA, 25 bp, Homo sapien
tgtcgatagatgttcgtctttccac

SEQ ID NO: 5340387 - DNA, 25 bp, Homo sapien
aacactccctcataggctctgtatt

SEQ ID NO: 5340388 - DNA, 25 bp, Homo sapien
gggctctatctagccagcaacactc

SEQ ID NO: 5340389 - DNA, 25 bp, Homo sapien
cactgatgggtgtgttagtagctcc

SEQ ID NO: 5340390 - DNA, 25 bp, Homo sapien
caaaaatatatacacgggctctatc

SEQ ID NO: 5340391 - DNA, 25 bp, Homo sapien
tctggtatatattgcaactctgcct

SEQ ID NO: 5340392 - DNA, 25 bp, Homo sapien
cgcgctctggtatatattgcaactc

SEQ ID NO: 5340393 - DNA, 25 bp, Homo sapien
caagcactcgcgctctggtatatat

SEQ ID NO: 5340394 - DNA, 25 bp, Homo sapien
tatattgcaactctgccttcggcat

SEQ ID NO: 5340395 - DNA, 25 bp, Homo sapien
ggactaccaggattggcaggacctt

SEQ ID NO: 5340396 - DNA, 25 bp, Homo sapien
tggattcctctactggacaaaggga

SEQ ID NO: 5340397 - DNA, 25 bp, Homo sapien
catattgagtttggcaggactacca

SEQ ID NO: 5340398 - DNA, 25 bp, Homo sapien
tagacacaaccctggtcggaaggca

SEQ ID NO: 5340399 - DNA, 25 bp, Homo sapien
tatgcaggggctgtaagcccacaga

SEQ ID NO: 5340400 - DNA, 25 bp, Homo sapien
ccagcctgagagttggaatggcagc

SEQ ID NO: 5340401 - DNA, 25 bp, Homo sapien
gccagacatggctgtgctcatagcc

SEQ ID NO: 5340402 - DNA, 25 bp, Homo sapien
ctaccagcctgagagttggaatggc

SEQ ID NO: 5340403 - DNA, 25 bp, Homo sapien
gagcaatgagaatcttctggtattt

SEQ ID NO: 5340404 - DNA, 25 bp, Homo sapien
gctggtgctgatagtaataattcat

SEQ ID NO: 5340405 - DNA, 25 bp, Homo sapien
aatcctggagtatgtgctggtgctg

SEQ ID NO: 5340406 - DNA, 25 bp, Homo sapien
tccaggatttgagcaatgagaatct

SEQ ID NO: 5340407 - DNA, 25 bp, Homo sapien
tgtagaatgagaaaagcgagtacat

SEQ ID NO: 5340408 - DNA, 25 bp, Homo sapien
ttttcttgggcaaatcagatttgta

SEQ ID NO: 5340409 - DNA, 25 bp, Homo sapien
tttgtagaatgagaaaagcgagtac

SEQ ID NO: 5340410 - DNA, 25 bp, Homo sapien
caaatcagatttgtagaatgagaaa

SEQ ID NO: 5340411 - DNA, 25 bp, Homo sapien
gttttcttccaggggatccatggag

SEQ ID NO: 5340412 - DNA, 25 bp, Homo sapien
tcttccaggggatccatggagaggt

SEQ ID NO: 5340413 - DNA, 25 bp, Homo sapien
tctgttttcttccaggggatccatg

SEQ ID NO: 5340414 - DNA, 25 bp, Homo sapien
gatccatggagaggtgaatggtcat

SEQ ID NO: 5340415 - DNA, 25 bp, Homo sapien
cactgatggtgacgatactgacgat

SEQ ID NO: 5340416 - DNA, 25 bp, Homo sapien
tatgtgcccagcatgtgcaaaatgt

SEQ ID NO: 5340417 - DNA, 25 bp, Homo sapien
gagtcgtttgctctgcatcacacag

SEQ ID NO: 5340418 - DNA, 25 bp, Homo sapien
cacacagctgttgttcggtagaact

SEQ ID NO: 5340419 - DNA, 25 bp, Homo sapien
gaacactgtttctcatgggccgaca

SEQ ID NO: 5340420 - DNA, 25 bp, Homo sapien
tatatgctgcggatgagaggtctgc

SEQ ID NO: 5340421 - DNA, 25 bp, Homo sapien
caacgcgtgcacttttaagatggga

SEQ ID NO: 5340422 - DNA, 25 bp, Homo sapien
tgtgagggttcagaaaaacaacgcg

SEQ ID NO: 5340423 - DNA, 25 bp, Homo sapien
caccgatcagtgtcctactaggatt

SEQ ID NO: 5340424 - DNA, 25 bp, Homo sapien
caaatctgcggatgcagtggactga

SEQ ID NO: 5340425 - DNA, 25 bp, Homo sapien
tgtctcttgggtgtcgtggagtctc

SEQ ID NO: 5340426 - DNA, 25 bp, Homo sapien
aatccccggagtagaattatcacca

SEQ ID NO: 5340427 - DNA, 25 bp, Homo sapien
cctctattggcagagtcctgcattg

SEQ ID NO: 5340428 - DNA, 25 bp, Homo sapien
agagtcctgcattgcccaattacca

SEQ ID NO: 5340429 - DNA, 25 bp, Homo sapien
gggtcggactgaatgtactggccat

SEQ ID NO: 5340430 - DNA, 25 bp, Homo sapien
aaacaagtcatggtcagaattcctg

SEQ ID NO: 5340431 - DNA, 25 bp, Homo sapien
gcattcaacaagaatgtgttgagca

SEQ ID NO: 5340432 - DNA, 25 bp, Homo sapien
ggcattcaacaagaatgtgttgagc

SEQ ID NO: 5340433 - DNA, 25 bp, Homo sapien
cattcaacaagaatgtgttgagcat

SEQ ID NO: 5340434 - DNA, 25 bp, Homo sapien
gacattctgtcaatggcagacccaa

SEQ ID NO: 5340435 - DNA, 25 bp, Homo sapien
cacaatgcccaggacgagacgtgaa

SEQ ID NO: 5340436 - DNA, 25 bp, Homo sapien
aatgagattagcaccctctgtggga

SEQ ID NO: 5340437 - DNA, 25 bp, Homo sapien
gaaatgatgtgagctaaattcccgt

SEQ ID NO: 5340438 - DNA, 25 bp, Homo sapien
catctgatgaaggagccctccgtcc

SEQ ID NO: 5340439 - DNA, 25 bp, Homo sapien
catccatgacagtttatttcaatca

SEQ ID NO: 5340440 - DNA, 25 bp, Homo sapien
cactctttagttcaatagaaactga

SEQ ID NO: 5340441 - DNA, 25 bp, Homo sapien
ctgaaatctcaatgatggacctgga

SEQ ID NO: 5340442 - DNA, 25 bp, Homo sapien
gaaatttaagatagactgtcctgaa

SEQ ID NO: 5340443 - DNA, 25 bp, Homo sapien
tgtcaagtctctgggagagatcccc

SEQ ID NO: 5340444 - DNA, 25 bp, Homo sapien
taaagtttcagtcaaggagcatatc

SEQ ID NO: 5340445 - DNA, 25 bp, Homo sapien
gattcctgaatatggacagatcttc

SEQ ID NO: 5340446 - DNA, 25 bp, Homo sapien
cagcttgttgtacgagaggtccacg

SEQ ID NO: 5340447 - DNA, 25 bp, Homo sapien
tgagctgcattaaccccgtgaactg

SEQ ID NO: 5340448 - DNA, 25 bp, Homo sapien
tatccgatgtcgagaaacttgaggc

SEQ ID NO: 5340449 - DNA, 25 bp, Homo sapien
taatcaacgtagtattcctgggcag

SEQ ID NO: 5340450 - DNA, 25 bp, Homo sapien
ggttgagcgcctcgcagtacagcag

SEQ ID NO: 5340451 - DNA, 25 bp, Homo sapien
gaggttgagcgcctcgcagtacagc

SEQ ID NO: 5340452 - DNA, 25 bp, Homo sapien
cggtgaggttgagcgcctcgcagta

SEQ ID NO: 5340453 - DNA, 25 bp, Homo sapien
ttgagcgcctcgcagtacagcagcc

SEQ ID NO: 5340454 - DNA, 25 bp, Homo sapien
cagagaccgagcagcaggaaatcca

SEQ ID NO: 5340455 - DNA, 25 bp, Homo sapien
agccagtatagacagagaccgagca

SEQ ID NO: 5340456 - DNA, 25 bp, Homo sapien
gtatagacagagaccgagcagcagg

SEQ ID NO: 5340457 - DNA, 25 bp, Homo sapien
agacagagaccgagcagcaggaaat

SEQ ID NO: 5340458 - DNA, 25 bp, Homo sapien
ctggagaatgtccattggaagcgct

SEQ ID NO: 5340459 - DNA, 25 bp, Homo sapien
ccattggaagcgctcggtcagaaat

SEQ ID NO: 5340460 - DNA, 25 bp, Homo sapien
gagaatgtccattggaagcgctcgg

SEQ ID NO: 5340461 - DNA, 25 bp, Homo sapien
tgtccattggaagcgctcggtcaga

SEQ ID NO: 5340462 - DNA, 25 bp, Homo sapien
ggcagcatagaaagttcacagccac

SEQ ID NO: 5340463 - DNA, 25 bp, Homo sapien
gctgggcagcatagaaagttcacag

SEQ ID NO: 5340464 - DNA, 25 bp, Homo sapien
tgggcagcatagaaagttcacagcc

SEQ ID NO: 5340465 - DNA, 25 bp, Homo sapien
agcatagaaagttcacagccacgga

SEQ ID NO: 5340466 - DNA, 25 bp, Homo sapien
gagagtgacaacctccattcagctg

SEQ ID NO: 5340467 - DNA, 25 bp, Homo sapien
gcggatctggcaggcgcacaatgtc

SEQ ID NO: 5340468 - DNA, 25 bp, Homo sapien
tatatgcagggcgagagaagacccc

SEQ ID NO: 5340469 - DNA, 25 bp, Homo sapien
ctccctttgtgtgcaggctaattat

SEQ ID NO: 5340470 - DNA, 25 bp, Homo sapien
gaggcgacttctaggacccgcaagt

SEQ ID NO: 5340471 - DNA, 25 bp, Homo sapien
gcaagtttcccaactacgtgccgga

SEQ ID NO: 5340472 - DNA, 25 bp, Homo sapien
tctgacagtctggttaatgtccgtc

SEQ ID NO: 5340473 - DNA, 25 bp, Homo sapien
tccctctgcagttcggactgtgacg

SEQ ID NO: 5340474 - DNA, 25 bp, Homo sapien
cagcctgccattcgcgccccgggca

SEQ ID NO: 5340475 - DNA, 25 bp, Homo sapien
ccttttactccgcggaaacagcctg

SEQ ID NO: 5340476 - DNA, 25 bp, Homo sapien
ttttactccgcggaaacagcctgcc

SEQ ID NO: 5340477 - DNA, 25 bp, Homo sapien
tactccgcggaaacagcctgccatt

SEQ ID NO: 5340478 - DNA, 25 bp, Homo sapien
cgggctcactcatgctttgcgggcg

SEQ ID NO: 5340479 - DNA, 25 bp, Homo sapien
gcagagagcgggctcactcatgctt

SEQ ID NO: 5340480 - DNA, 25 bp, Homo sapien
ggctcactcatgctttgcgggcggc

SEQ ID NO: 5340481 - DNA, 25 bp, Homo sapien
agagcgggctcactcatgctttgcg

SEQ ID NO: 5340482 - DNA, 25 bp, Homo sapien
caatctcttcttcccgggtgaccat

SEQ ID NO: 5340483 - DNA, 25 bp, Homo sapien
caatgtagctattgcatgtactgga

SEQ ID NO: 5340484 - DNA, 25 bp, Homo sapien
catagatttctgttggcaaacttct

SEQ ID NO: 5340485 - DNA, 25 bp, Homo sapien
caaatgttgtatattggataagaga

SEQ ID NO: 5340486 - DNA, 25 bp, Homo sapien
gattgtagggttccaagagcagcaa

SEQ ID NO: 5340487 - DNA, 25 bp, Homo sapien
aaggagaagtcccagtgcgcaaaca

SEQ ID NO: 5340488 - DNA, 25 bp, Homo sapien
tcacagggatggcaattggcagcct

SEQ ID NO: 5340489 - DNA, 25 bp, Homo sapien
tggctgggactcaactaactttagg

SEQ ID NO: 5340490 - DNA, 25 bp, Homo sapien
cagcgcagtgtacaatcacatcaaa

SEQ ID NO: 5340491 - DNA, 25 bp, Homo sapien
gggtctgaaagtacagcgcagtgta

SEQ ID NO: 5340492 - DNA, 25 bp, Homo sapien
aatgccttatcctgtaggtagcttc

SEQ ID NO: 5340493 - DNA, 25 bp, Homo sapien
cacatcaaaatagtttgggtagagc

SEQ ID NO: 5340494 - DNA, 25 bp, Homo sapien
tctcaaattttccagaccaattggt

SEQ ID NO: 5340495 - DNA, 25 bp, Homo sapien
tctgggagaggttattcctgcctac

SEQ ID NO: 5340496 - DNA, 25 bp, Homo sapien
gaccaattggtctgggagaggttat

SEQ ID NO: 5340497 - DNA, 25 bp, Homo sapien
gagaggttattcctgcctactgtat

SEQ ID NO: 5340498 - DNA, 25 bp, Homo sapien
tgctgtaagagctaattgacagtgt

SEQ ID NO: 5340499 - DNA, 25 bp, Homo sapien
tgaacttggtgaactggaacttgaa

SEQ ID NO: 5340500 - DNA, 25 bp, Homo sapien
acagtgtcgtcagattggctttgcc

SEQ ID NO: 5340501 - DNA, 25 bp, Homo sapien
cagggagcaagcagtcatggtcatc

SEQ ID NO: 5340502 - DNA, 25 bp, Homo sapien
cagtaaatagtctttgctatctgtg

SEQ ID NO: 5340503 - DNA, 25 bp, Homo sapien
cctgtcttgattaaaggctgcagag

SEQ ID NO: 5340504 - DNA, 25 bp, Homo sapien
gggatcctgtcttgattaaaggctg

SEQ ID NO: 5340505 - DNA, 25 bp, Homo sapien
tacagtaaatagtctttgctatctg

SEQ ID NO: 5340506 - DNA, 25 bp, Homo sapien
aagctatcctcctctatttgcgtga

SEQ ID NO: 5340507 - DNA, 25 bp, Homo sapien
catggaattcatcaccttcgtggtg

SEQ ID NO: 5340508 - DNA, 25 bp, Homo sapien
tgatgaatcattggtgaggccctaa

SEQ ID NO: 5340509 - DNA, 25 bp, Homo sapien
tgcatatgggtagcaggtatacaca

SEQ ID NO: 5340510 - DNA, 25 bp, Homo sapien
ggagatgtcaaattttccttttgtg

SEQ ID NO: 5340511 - DNA, 25 bp, Homo sapien
agtgattagcaattcccttcgagga

SEQ ID NO: 5340512 - DNA, 25 bp, Homo sapien
tgatatgccaagtgagggtgactga

SEQ ID NO: 5340513 - DNA, 25 bp, Homo sapien
aatagaatccactcttgatgcttgg

SEQ ID NO: 5340514 - DNA, 25 bp, Homo sapien
ccctctttctggcagttacaggtgc

SEQ ID NO: 5340515 - DNA, 25 bp, Homo sapien
ggtaaatgttgccttagaaccctga

SEQ ID NO: 5340516 - DNA, 25 bp, Homo sapien
aagagattctatcacccactgagtt

SEQ ID NO: 5340517 - DNA, 25 bp, Homo sapien
cctgattttatatgtggccatgatg

SEQ ID NO: 5340518 - DNA, 25 bp, Homo sapien
ccttgaaagtgttgtatgaacgctg

SEQ ID NO: 5340519 - DNA, 25 bp, Homo sapien
gctgaaacaattgggttagcatggc

SEQ ID NO: 5340520 - DNA, 25 bp, Homo sapien
aaacaattgggttagcatggccaca

SEQ ID NO: 5340521 - DNA, 25 bp, Homo sapien
ctgcagctgaaacaattgggttagc

SEQ ID NO: 5340522 - DNA, 25 bp, Homo sapien
cattcactaattgttgactgtgaca

SEQ ID NO: 5340523 - DNA, 25 bp, Homo sapien
gaggatttgtgaggccttccaactc

SEQ ID NO: 5340524 - DNA, 25 bp, Homo sapien
gcctctattagacctttccacttca

SEQ ID NO: 5340525 - DNA, 25 bp, Homo sapien
cttcacagagtcaatacctgttttc

SEQ ID NO: 5340526 - DNA, 25 bp, Homo sapien
ggtatatctgaggatttgtgaggcc

SEQ ID NO: 5340527 - DNA, 25 bp, Homo sapien
ttttctgcccttgaattttgccttg

SEQ ID NO: 5340528 - DNA, 25 bp, Homo sapien
gacttcacagactctgtctgacctt

SEQ ID NO: 5340529 - DNA, 25 bp, Homo sapien
tgcccttgaattttgccttgaggac

SEQ ID NO: 5340530 - DNA, 25 bp, Homo sapien
gatgcagctctaattcataagttaa

SEQ ID NO: 5340531 - DNA, 25 bp, Homo sapien
tgcctgctgcatcaactacagccag

SEQ ID NO: 5340532 - DNA, 25 bp, Homo sapien
gactactttcgggtcttttgcctgc

SEQ ID NO: 5340533 - DNA, 25 bp, Homo sapien
tactttcgggtcttttgcctgctgc

SEQ ID NO: 5340534 - DNA, 25 bp, Homo sapien
gctgcatcaactacagccaggtcat

SEQ ID NO: 5340535 - DNA, 25 bp, Homo sapien
ttgaaagaagaactagacagatagc

SEQ ID NO: 5340536 - DNA, 25 bp, Homo sapien
gaatgttctcccgaatatttgtggt

SEQ ID NO: 5340537 - DNA, 25 bp, Homo sapien
tgtggtaaagtctccgataactaaa

SEQ ID NO: 5340538 - DNA, 25 bp, Homo sapien
aactcaacaaatcagagcctttatt

SEQ ID NO: 5340539 - DNA, 25 bp, Homo sapien
tcttgctttaataacacctttccag

SEQ ID NO: 5340540 - DNA, 25 bp, Homo sapien
tttggcccaatcactgacgccttct

SEQ ID NO: 5340541 - DNA, 25 bp, Homo sapien
tcttttctaatttggcccaatcact

SEQ ID NO: 5340542 - DNA, 25 bp, Homo sapien
tgctttaataacacctttccaggaa

SEQ ID NO: 5340543 - DNA, 25 bp, Homo sapien
tccatagaaaactctggattaagtc

SEQ ID NO: 5340544 - DNA, 25 bp, Homo sapien
cctcttctcttaatgcaaagctatg

SEQ ID NO: 5340545 - DNA, 25 bp, Homo sapien
tgcattggtttatacatatctcctc

SEQ ID NO: 5340546 - DNA, 25 bp, Homo sapien
caaaccttgatttacagaacactag

SEQ ID NO: 5340547 - DNA, 25 bp, Homo sapien
ctcccatgtgattttgtgccacggt

SEQ ID NO: 5340548 - DNA, 25 bp, Homo sapien
aatatctggtgcattatcctttgtg

SEQ ID NO: 5340549 - DNA, 25 bp, Homo sapien
cacggtgtgtaggtgattaagagtc

SEQ ID NO: 5340550 - DNA, 25 bp, Homo sapien
ttatcctttgtgtggccttctcccc

SEQ ID NO: 5340551 - DNA, 25 bp, Homo sapien
tgagccatatggcaagcccctgatg

SEQ ID NO: 5340552 - DNA, 25 bp, Homo sapien
tctcatggggctgattgccaaaatg

SEQ ID NO: 5340553 - DNA, 25 bp, Homo sapien
gctggctggcatcctcacaaatgca

SEQ ID NO: 5340554 - DNA, 25 bp, Homo sapien
ttctaacgccgctgacaaactgacc

SEQ ID NO: 5340555 - DNA, 25 bp, Homo sapien
cagacacccttccaactcccttgtc

SEQ ID NO: 5340556 - DNA, 25 bp, Homo sapien
gtcagacacccttccaactcccttg

SEQ ID NO: 5340557 - DNA, 25 bp, Homo sapien
taaaagtcagacacccttccaactc

SEQ ID NO: 5340558 - DNA, 25 bp, Homo sapien
gacacccttccaactcccttgtctc

SEQ ID NO: 5340559 - DNA, 25 bp, Homo sapien
atgatgtgccgacatccctcagcca

SEQ ID NO: 5340560 - DNA, 25 bp, Homo sapien
tcttggagatgatgtgccgacatcc

SEQ ID NO: 5340561 - DNA, 25 bp, Homo sapien
tggagatgatgtgccgacatccctc

SEQ ID NO: 5340562 - DNA, 25 bp, Homo sapien
tgtacttctgacaatcatctccttt

SEQ ID NO: 5340563 - DNA, 25 bp, Homo sapien
ctgtaggagccagtgatccaaaggt

SEQ ID NO: 5340564 - DNA, 25 bp, Homo sapien
ggtaaaggaggcacagtctctacta

SEQ ID NO: 5340565 - DNA, 25 bp, Homo sapien
ctactgtaggagccagtgatccaaa

SEQ ID NO: 5340566 - DNA, 25 bp, Homo sapien
aggtaaaggaggcacagtctctact

SEQ ID NO: 5340567 - DNA, 25 bp, Homo sapien
tgaaaggaaggatgctttcccaatt

SEQ ID NO: 5340568 - DNA, 25 bp, Homo sapien
tgaatgaaataaagtttgtgtccat

SEQ ID NO: 5340569 - DNA, 25 bp, Homo sapien
cattcacggggttggattcccacaa

SEQ ID NO: 5340570 - DNA, 25 bp, Homo sapien
cattaggtaccagattttcatgtac

SEQ ID NO: 5340571 - DNA, 25 bp, Homo sapien
gtgttgagggttgaatgcccaagaa

SEQ ID NO: 5340572 - DNA, 25 bp, Homo sapien
aagactgggacccaagaaggcccat

SEQ ID NO: 5340573 - DNA, 25 bp, Homo sapien
agactgggacccaagaaggcccatt

SEQ ID NO: 5340574 - DNA, 25 bp, Homo sapien
tgttgagggttgaatgcccaagaaa

SEQ ID NO: 5340575 - DNA, 25 bp, Homo sapien
cagtgaaagctccagactctggcat

SEQ ID NO: 5340576 - DNA, 25 bp, Homo sapien
gcagatgttccacaaagagcagtta

SEQ ID NO: 5340577 - DNA, 25 bp, Homo sapien
ccagacatgtagcagatgttccaca

SEQ ID NO: 5340578 - DNA, 25 bp, Homo sapien
cagttaaagaggtatatgtgggcat

SEQ ID NO: 5340579 - DNA, 25 bp, Homo sapien
caaagagcagttaaagaggtatatg

SEQ ID NO: 5340580 - DNA, 25 bp, Homo sapien
gtaatcacagtggtctgctgctgcc

SEQ ID NO: 5340581 - DNA, 25 bp, Homo sapien
catggaggaagtatgtaagttgccc

SEQ ID NO: 5340582 - DNA, 25 bp, Homo sapien
ttcccaccaagaatttgccttgtct

SEQ ID NO: 5340583 - DNA, 25 bp, Homo sapien
tgctggccccagtccttgaccttat

SEQ ID NO: 5340584 - DNA, 25 bp, Homo sapien
attaatcttgtgtaactgtatacct

SEQ ID NO: 5340585 - DNA, 25 bp, Homo sapien
gggaatcctgccacaaaatggtgct

SEQ ID NO: 5340586 - DNA, 25 bp, Homo sapien
tgtctagagccgagagtaatattgg

SEQ ID NO: 5340587 - DNA, 25 bp, Homo sapien
tgtagagagaatgtctagagccgag

SEQ ID NO: 5340588 - DNA, 25 bp, Homo sapien
gctcaggacaagttttgggccacat

SEQ ID NO: 5340589 - DNA, 25 bp, Homo sapien
cctacactgccagagtttgtcagta

SEQ ID NO: 5340590 - DNA, 25 bp, Homo sapien
ctgcttccacattgattcggtgaaa

SEQ ID NO: 5340591 - DNA, 25 bp, Homo sapien
aaagctggctgcattaggattggcc

SEQ ID NO: 5340592 - DNA, 25 bp, Homo sapien
tgattcggtgaaaagctggctgcat

SEQ ID NO: 5340593 - DNA, 25 bp, Homo sapien
tggtgtggaatgatccaaggtcctg

SEQ ID NO: 5340594 - DNA, 25 bp, Homo sapien
tgatccaaggtcctgttcaagaggg

SEQ ID NO: 5340595 - DNA, 25 bp, Homo sapien
tgtggaatgatccaaggtcctgttc

SEQ ID NO: 5340596 - DNA, 25 bp, Homo sapien
ggaatgatccaaggtcctgttcaag

SEQ ID NO: 5340597 - DNA, 25 bp, Homo sapien
tgtgcattctctggttctgaacaaa

SEQ ID NO: 5340598 - DNA, 25 bp, Homo sapien
tgtgttgtgcattctctggttctga

SEQ ID NO: 5340599 - DNA, 25 bp, Homo sapien
ttctctggttctgaacaaaggtcat

SEQ ID NO: 5340600 - DNA, 25 bp, Homo sapien
tctcttaagtgtgttgtgcattctc

SEQ ID NO: 5340601 - DNA, 25 bp, Homo sapien
tgtgcaagtgctctttaggtgacat

SEQ ID NO: 5340602 - DNA, 25 bp, Homo sapien
ggtgtgcaagtgctctttaggtgac

SEQ ID NO: 5340603 - DNA, 25 bp, Homo sapien
aaacaggtgtgcaagtgctctttag

SEQ ID NO: 5340604 - DNA, 25 bp, Homo sapien
caggtgtgcaagtgctctttaggtg

SEQ ID NO: 5340605 - DNA, 25 bp, Homo sapien
cagctggagtctcatagggcaggtc

SEQ ID NO: 5340606 - DNA, 25 bp, Homo sapien
caagagagaatccttgcctggcagc

SEQ ID NO: 5340607 - DNA, 25 bp, Homo sapien
ctttcaatctgaatgatctggattt

SEQ ID NO: 5340608 - DNA, 25 bp, Homo sapien
tgtgttggtgatgccctccccagtg

SEQ ID NO: 5340609 - DNA, 25 bp, Homo sapien
tgcagttctaatcccaaaagcatgc

SEQ ID NO: 5340610 - DNA, 25 bp, Homo sapien
gctgtccagtagaatggtatccaca

SEQ ID NO: 5340611 - DNA, 25 bp, Homo sapien
cagtagaatggtatccacacttgta

SEQ ID NO: 5340612 - DNA, 25 bp, Homo sapien
attatatttgaagcagaggtggggc

SEQ ID NO: 5340613 - DNA, 25 bp, Homo sapien
ccaggctctaacatccttcattcaa

SEQ ID NO: 5340614 - DNA, 25 bp, Homo sapien
gctctaacatccttcattcaagtca

SEQ ID NO: 5340615 - DNA, 25 bp, Homo sapien
gtcaataccaaattcacacaccttt

SEQ ID NO: 5340616 - DNA, 25 bp, Homo sapien
attcaagtcaataccaaattcacac

SEQ ID NO: 5340617 - DNA, 25 bp, Homo sapien
ttctttggcaaatctcttttgcaac

SEQ ID NO: 5340618 - DNA, 25 bp, Homo sapien
actctggctagatgtcctgtcaaat

SEQ ID NO: 5340619 - DNA, 25 bp, Homo sapien
gaacaacctgtctcttgacctcttt

SEQ ID NO: 5340620 - DNA, 25 bp, Homo sapien
gataatgaaattgactggaactctg

SEQ ID NO: 5340621 - DNA, 25 bp, Homo sapien
tgatgaatgcatctgcagattgttc

SEQ ID NO: 5340622 - DNA, 25 bp, Homo sapien
tctgcagattgttcttttggaatgc

SEQ ID NO: 5340623 - DNA, 25 bp, Homo sapien
cttgtcttccatgatgaatgcatct

SEQ ID NO: 5340624 - DNA, 25 bp, Homo sapien
gaatgcatctgcagattgttctttt

SEQ ID NO: 5340625 - DNA, 25 bp, Homo sapien
tcaatcttttgtgctaagaagctaa

SEQ ID NO: 5340626 - DNA, 25 bp, Homo sapien
tctcaatcttttgtgctaagaagct

SEQ ID NO: 5340627 - DNA, 25 bp, Homo sapien
ttttctcaatcttttgtgctaagaa

SEQ ID NO: 5340628 - DNA, 25 bp, Homo sapien
aatcttttgtgctaagaagctaaac

SEQ ID NO: 5340629 - DNA, 25 bp, Homo sapien
tgctgagggagctccgatcgggagt

SEQ ID NO: 5340630 - DNA, 25 bp, Homo sapien
gattcctccatggtgagtaaattga

SEQ ID NO: 5340631 - DNA, 25 bp, Homo sapien
gactttctaatctaatgtctttcat

SEQ ID NO: 5340632 - DNA, 25 bp, Homo sapien
agctccgatcgggagtggaagcagt

SEQ ID NO: 5340633 - DNA, 25 bp, Homo sapien
tttcaagagacatagagggcagaga

SEQ ID NO: 5340634 - DNA, 25 bp, Homo sapien
tatttaagtggtcgaagtcaatttc

SEQ ID NO: 5340635 - DNA, 25 bp, Homo sapien
tcagtgtttatttaagtggtcgaag

SEQ ID NO: 5340636 - DNA, 25 bp, Homo sapien
ggtcgaagtcaatttcaagagacat

SEQ ID NO: 5340637 - DNA, 25 bp, Homo sapien
gatgtcgttactgcttgttgaggtt

SEQ ID NO: 5340638 - DNA, 25 bp, Homo sapien
agcccactcttctgatgtcgttact

SEQ ID NO: 5340639 - DNA, 25 bp, Homo sapien
ggctgatggtcaggtcagcccactc

SEQ ID NO: 5340640 - DNA, 25 bp, Homo sapien
aggctgatggtcaggtcagcccact

SEQ ID NO: 5340641 - DNA, 25 bp, Homo sapien
tgagattcgtttttgtccacagaga

SEQ ID NO: 5340642 - DNA, 25 bp, Homo sapien
ttacaacctaccagggatatctgga

SEQ ID NO: 5340643 - DNA, 25 bp, Homo sapien
ccagatgccttgtttactgtcatag

SEQ ID NO: 5340644 - DNA, 25 bp, Homo sapien
actctgcgagaatatggatttgcct

SEQ ID NO: 5340645 - DNA, 25 bp, Homo sapien
caacggtggacagggcattccttcc

SEQ ID NO: 5340646 - DNA, 25 bp, Homo sapien
tatcaacggtggacagggcattcct

SEQ ID NO: 5340647 - DNA, 25 bp, Homo sapien
ttttatcaacggtggacagggcatt

SEQ ID NO: 5340648 - DNA, 25 bp, Homo sapien
tttatcaacggtggacagggcattc

SEQ ID NO: 5340649 - DNA, 25 bp, Homo sapien
tgatccttggcagctatctgctcag

SEQ ID NO: 5340650 - DNA, 25 bp, Homo sapien
tccatggccagcttcgtaactgact

SEQ ID NO: 5340651 - DNA, 25 bp, Homo sapien
cctctgctgtccaaggtctcatagt

SEQ ID NO: 5340652 - DNA, 25 bp, Homo sapien
catagtcatgactcccttgccacat

SEQ ID NO: 5340653 - DNA, 25 bp, Homo sapien
tgaactacgtgtgcataataattgt

SEQ ID NO: 5340654 - DNA, 25 bp, Homo sapien
taattgttgctggaggtatgccagg

SEQ ID NO: 5340655 - DNA, 25 bp, Homo sapien
tcaatccacccttgaactacgtgtg

SEQ ID NO: 5340656 - DNA, 25 bp, Homo sapien
cgtgtgcataataattgttgctgga

SEQ ID NO: 5340657 - DNA, 25 bp, Homo sapien
acatagatgacctaatgatgtattg

SEQ ID NO: 5340658 - DNA, 25 bp, Homo sapien
agctttgcatgtgagggtctttgca

SEQ ID NO: 5340659 - DNA, 25 bp, Homo sapien
tgttgtagttatgcccgttgggtaa

SEQ ID NO: 5340660 - DNA, 25 bp, Homo sapien
ttttctagctgttgtagttatgccc

SEQ ID NO: 5340661 - DNA, 25 bp, Homo sapien
ctgaagtggattccatggaagacct

SEQ ID NO: 5340662 - DNA, 25 bp, Homo sapien
cactgaagtggattccatggaagac

SEQ ID NO: 5340663 - DNA, 25 bp, Homo sapien
agtggattccatggaagacctttga

SEQ ID NO: 5340664 - DNA, 25 bp, Homo sapien
gaagtggattccatggaagaccttt

SEQ ID NO: 5340665 - DNA, 25 bp, Homo sapien
gcaatcatcttgcaaacatttgaga

SEQ ID NO: 5340666 - DNA, 25 bp, Homo sapien
tagaaaaagaatactgcaatcatct

SEQ ID NO: 5340667 - DNA, 25 bp, Homo sapien
aaagaatactgcaatcatcttgcaa

SEQ ID NO: 5340668 - DNA, 25 bp, Homo sapien
gaatactgcaatcatcttgcaaaca

SEQ ID NO: 5340669 - DNA, 25 bp, Homo sapien
tgattttacgctggtggaaagcaac

SEQ ID NO: 5340670 - DNA, 25 bp, Homo sapien
gcagagcagcgagaggcaatggaat

SEQ ID NO: 5340671 - DNA, 25 bp, Homo sapien
aacctccaaccaacttagtcacagt

SEQ ID NO: 5340672 - DNA, 25 bp, Homo sapien
ggaatgatggtgttacaacctccaa

SEQ ID NO: 5340673 - DNA, 25 bp, Homo sapien
tactttgcattatcgcagcattgaa

SEQ ID NO: 5340674 - DNA, 25 bp, Homo sapien
gaacagcagtggtgagagtctctct

SEQ ID NO: 5340675 - DNA, 25 bp, Homo sapien
cctgatgacaggttatggcatggtc

SEQ ID NO: 5340676 - DNA, 25 bp, Homo sapien
ccagaaaggaacaattgtgatttca

SEQ ID NO: 5340677 - DNA, 25 bp, Homo sapien
caacagctagatgatgacttcttac

SEQ ID NO: 5340678 - DNA, 25 bp, Homo sapien
tttgcctcacgaaagatggatgtct

SEQ ID NO: 5340679 - DNA, 25 bp, Homo sapien
aaactgggcaatgtggaaggtagct

SEQ ID NO: 5340680 - DNA, 25 bp, Homo sapien
caaagatagaacaaatggatccatg

SEQ ID NO: 5340681 - DNA, 25 bp, Homo sapien
tggtacttcggtggagggagttggc

SEQ ID NO: 5340682 - DNA, 25 bp, Homo sapien
tcggtggagggagttggccttagca

SEQ ID NO: 5340683 - DNA, 25 bp, Homo sapien
gtggagggagttggccttagcagac

SEQ ID NO: 5340684 - DNA, 25 bp, Homo sapien
ctataggacttctccaggggaaggt

SEQ ID NO: 5340685 - DNA, 25 bp, Homo sapien
ccagtataaaccatattgtgaaaag

SEQ ID NO: 5340686 - DNA, 25 bp, Homo sapien
cactatgattccgaggttctgcctt

SEQ ID NO: 5340687 - DNA, 25 bp, Homo sapien
atttccaaaacccactatgattccg

SEQ ID NO: 5340688 - DNA, 25 bp, Homo sapien
tttctggcagcctttccagtataaa

SEQ ID NO: 5340689 - DNA, 25 bp, Homo sapien
tagagcggtcactgttgtctaagcg

SEQ ID NO: 5340690 - DNA, 25 bp, Homo sapien
gatctctagtgaaagtcccaaaata

SEQ ID NO: 5340691 - DNA, 25 bp, Homo sapien
tgtctaagcgtgtgggattttcagg

SEQ ID NO: 5340692 - DNA, 25 bp, Homo sapien
ccaaaataatgctcagggatactga

SEQ ID NO: 5340693 - DNA, 25 bp, Homo sapien
cattcattcacactgtcaggaccag

SEQ ID NO: 5340694 - DNA, 25 bp, Homo sapien
caggaccaggttcagaaacacctcc

SEQ ID NO: 5340695 - DNA, 25 bp, Homo sapien
cactgtcaggaccaggttcagaaac

SEQ ID NO: 5340696 - DNA, 25 bp, Homo sapien
ttcacactgtcaggaccaggttcag

SEQ ID NO: 5340697 - DNA, 25 bp, Homo sapien
tctgtagacgttgctgggccttccc

SEQ ID NO: 5340698 - DNA, 25 bp, Homo sapien
ccccaatattaggattcggtgggct

SEQ ID NO: 5340699 - DNA, 25 bp, Homo sapien
gactgtgcttctgtagacgttgctg

SEQ ID NO: 5340700 - DNA, 25 bp, Homo sapien
ccttccccaatattaggattcggtg

SEQ ID NO: 5340701 - DNA, 25 bp, Homo sapien
tgccacagacagcaattggaaaatc

SEQ ID NO: 5340702 - DNA, 25 bp, Homo sapien
gcaactctatttgctgctgtataat

SEQ ID NO: 5340703 - DNA, 25 bp, Homo sapien
caactctatttgctgctgtataata

SEQ ID NO: 5340704 - DNA, 25 bp, Homo sapien
ggacatccactgttggagttcaaaa

SEQ ID NO: 5340705 - DNA, 25 bp, Homo sapien
tttagtggcttgcattggacatcca

SEQ ID NO: 5340706 - DNA, 25 bp, Homo sapien
gcacaggcctttatgccctcatagt

SEQ ID NO: 5340707 - DNA, 25 bp, Homo sapien
cctcatagtaatctttgacattagc

SEQ ID NO: 5340708 - DNA, 25 bp, Homo sapien
tcagtgttccgagggtgtcggctcc

SEQ ID NO: 5340709 - DNA, 25 bp, Homo sapien
ctcttctcagtgttccgagggtgtc

SEQ ID NO: 5340710 - DNA, 25 bp, Homo sapien
agtgttccgagggtgtcggctcctc

SEQ ID NO: 5340711 - DNA, 25 bp, Homo sapien
tctcagtgttccgagggtgtcggct

SEQ ID NO: 5340712 - DNA, 25 bp, Homo sapien
ccttcagagtgatccctatgcccat

SEQ ID NO: 5340713 - DNA, 25 bp, Homo sapien
gctttcaacatccacgagggccttt

SEQ ID NO: 5340714 - DNA, 25 bp, Homo sapien
gctgctttggcttgccttggagaac

SEQ ID NO: 5340715 - DNA, 25 bp, Homo sapien
tttcccttcagagtgatccctatgc

SEQ ID NO: 5340716 - DNA, 25 bp, Homo sapien
ccagagaatatgacataagagatca

SEQ ID NO: 5340717 - DNA, 25 bp, Homo sapien
ttaaactgtggtaaaccagctctgg

SEQ ID NO: 5340718 - DNA, 25 bp, Homo sapien
taagtaggtagacccacggaggtga

SEQ ID NO: 5340719 - DNA, 25 bp, Homo sapien
gaggtgagacaggactccagcattt

SEQ ID NO: 5340720 - DNA, 25 bp, Homo sapien
atgtggacaacacaggatgcgagat

SEQ ID NO: 5340721 - DNA, 25 bp, Homo sapien
tctttgtcaagactggcgtgataaa

SEQ ID NO: 5340722 - DNA, 25 bp, Homo sapien
aaaaaacagcatgcctctttgtcaa

SEQ ID NO: 5340723 - DNA, 25 bp, Homo sapien
actggcgtgataaatggaaagggac

SEQ ID NO: 5340724 - DNA, 25 bp, Homo sapien
gcctccatctacaagcagtgacttt

SEQ ID NO: 5340725 - DNA, 25 bp, Homo sapien
tacttttcatctgtgctagtccagc

SEQ ID NO: 5340726 - DNA, 25 bp, Homo sapien
caagaacaacgacaacacgtatgtg

SEQ ID NO: 5340727 - DNA, 25 bp, Homo sapien
cacaaagagtaaagttggtggaata

SEQ ID NO: 5340728 - DNA, 25 bp, Homo sapien
tccctgagaataggagaaataacag

SEQ ID NO: 5340729 - DNA, 25 bp, Homo sapien
gatatgcttagaacatagaagccct

SEQ ID NO: 5340730 - DNA, 25 bp, Homo sapien
tcaagagaaagcatcctgccaccac

SEQ ID NO: 5340731 - DNA, 25 bp, Homo sapien
catgcgtgcagtctcgaatatgtga

SEQ ID NO: 5340732 - DNA, 25 bp, Homo sapien
tcttccgtgcctagaattgtgctta

SEQ ID NO: 5340733 - DNA, 25 bp, Homo sapien
gaggtcagatcttggagaattcaga

SEQ ID NO: 5340734 - DNA, 25 bp, Homo sapien
gacaaaggagattagtaagcactgg

SEQ ID NO: 5340735 - DNA, 25 bp, Homo sapien
gactatggtgattatgacagctgct

SEQ ID NO: 5340736 - DNA, 25 bp, Homo sapien
ccaggtggtcaaaacaaacaggcac

SEQ ID NO: 5340737 - DNA, 25 bp, Homo sapien
ggaactgaccacatagcttattttg

SEQ ID NO: 5340738 - DNA, 25 bp, Homo sapien
tagttcctgccagcattcaccatgc

SEQ ID NO: 5340739 - DNA, 25 bp, Homo sapien
tgtacacgtggcttgcaaaaagaag

SEQ ID NO: 5340740 - DNA, 25 bp, Homo sapien
gtacagcgatatcaactctccttat

SEQ ID NO: 5340741 - DNA, 25 bp, Homo sapien
ggccagtacagcgatatcaactctc

SEQ ID NO: 5340742 - DNA, 25 bp, Homo sapien
cagtacagcgatatcaactctcctt

SEQ ID NO: 5340743 - DNA, 25 bp, Homo sapien
tgctggccagtacagcgatatcaac

SEQ ID NO: 5340744 - DNA, 25 bp, Homo sapien
aagcctttgaagtagttcccactat

SEQ ID NO: 5340745 - DNA, 25 bp, Homo sapien
tttgaagtagttcccactatctcga

SEQ ID NO: 5340746 - DNA, 25 bp, Homo sapien
cactatctcgaacatcataaacatc

SEQ ID NO: 5340747 - DNA, 25 bp, Homo sapien
gtagttcccactatctcgaacatca

SEQ ID NO: 5340748 - DNA, 25 bp, Homo sapien
aaccataaggccacaaaagtagctc

SEQ ID NO: 5340749 - DNA, 25 bp, Homo sapien
cagggacttattgtttatttccttg

SEQ ID NO: 5340750 - DNA, 25 bp, Homo sapien
gccacaaaagtagctctcactctgt

SEQ ID NO: 5340751 - DNA, 25 bp, Homo sapien
tctctctaaaccataaggccacaaa

SEQ ID NO: 5340752 - DNA, 25 bp, Homo sapien
caactgtgcagtaatgtgttgcaaa

SEQ ID NO: 5340753 - DNA, 25 bp, Homo sapien
acaactgtgcagtaatgtgttgcaa

SEQ ID NO: 5340754 - DNA, 25 bp, Homo sapien
tacaactgtgcagtaatgtgttgca

SEQ ID NO: 5340755 - DNA, 25 bp, Homo sapien
tttacaactgtgcagtaatgtgttg

SEQ ID NO: 5340756 - DNA, 25 bp, Homo sapien
caagagacgtgttttacctcctcga

SEQ ID NO: 5340757 - DNA, 25 bp, Homo sapien
agacaagagacgtgttttacctcct

SEQ ID NO: 5340758 - DNA, 25 bp, Homo sapien
ccccggcatggtcttctcctcccgc

SEQ ID NO: 5340759 - DNA, 25 bp, Homo sapien
tcagatagaagctgccacgtgtgcc

SEQ ID NO: 5340760 - DNA, 25 bp, Homo sapien
ccgcaccgcggcaacaacataaagt

SEQ ID NO: 5340761 - DNA, 25 bp, Homo sapien
gcagtcatcccgcaccgcggcaaca

SEQ ID NO: 5340762 - DNA, 25 bp, Homo sapien
cgcggcaacaacataaagtcgtcgt

SEQ ID NO: 5340763 - DNA, 25 bp, Homo sapien
gcagccctcgcctgcaacctgcagt

SEQ ID NO: 5340764 - DNA, 25 bp, Homo sapien
agggcacgtcgttcacgcacaggga

SEQ ID NO: 5340765 - DNA, 25 bp, Homo sapien
cacgtagaaggagggcacgtcgttc

SEQ ID NO: 5340766 - DNA, 25 bp, Homo sapien
aggagggcacgtcgttcacgcacag

SEQ ID NO: 5340767 - DNA, 25 bp, Homo sapien
tagaaggagggcacgtcgttcacgc

SEQ ID NO: 5340768 - DNA, 25 bp, Homo sapien
ctagtgcccagcggggtccagcttc

SEQ ID NO: 5340769 - DNA, 25 bp, Homo sapien
ccagcggggtccagcttctgcactt

SEQ ID NO: 5340770 - DNA, 25 bp, Homo sapien
agcggggtccagcttctgcactttc

SEQ ID NO: 5340771 - DNA, 25 bp, Homo sapien
tgcccagcggggtccagcttctgca

SEQ ID NO: 5340772 - DNA, 25 bp, Homo sapien
catcctctgcatggcgtttagggcc

SEQ ID NO: 5340773 - DNA, 25 bp, Homo sapien
actccatcctctgcatggcgtttag

SEQ ID NO: 5340774 - DNA, 25 bp, Homo sapien
tccatcctctgcatggcgtttaggg

SEQ ID NO: 5340775 - DNA, 25 bp, Homo sapien
cctctgcatggcgtttagggccgcg

SEQ ID NO: 5340776 - DNA, 25 bp, Homo sapien
gtgagcaggtcttcatgcggttgta

SEQ ID NO: 5340777 - DNA, 25 bp, Homo sapien
tgagcaggtcttcatgcggttgtac

SEQ ID NO: 5340778 - DNA, 25 bp, Homo sapien
cggtcgcgcactgacttgttctcgt

SEQ ID NO: 5340779 - DNA, 25 bp, Homo sapien
cataggacatatcagcttctactgc

SEQ ID NO: 5340780 - DNA, 25 bp, Homo sapien
tatcagcttctactgctcgatgctg

SEQ ID NO: 5340781 - DNA, 25 bp, Homo sapien
ctgcagacgtagcttttcccggacc

SEQ ID NO: 5340782 - DNA, 25 bp, Homo sapien
ggttggcgatgatcctggctgccca

SEQ ID NO: 5340783 - DNA, 25 bp, Homo sapien
gtagatggcgtccagcttgatggcg

SEQ ID NO: 5340784 - DNA, 25 bp, Homo sapien
gagagacttgccgtccaggagatag

SEQ ID NO: 5340785 - DNA, 25 bp, Homo sapien
tggcgtgatgcagcacagaatcttg

SEQ ID NO: 5340786 - DNA, 25 bp, Homo sapien
gacgtattcggcgtaccactgggtc

SEQ ID NO: 5340787 - DNA, 25 bp, Homo sapien
cagttggcactgttcagggcgaacg

SEQ ID NO: 5340788 - DNA, 25 bp, Homo sapien
gcgaacgggtgtgggctccatgctg

SEQ ID NO: 5340789 - DNA, 25 bp, Homo sapien
ggcttctgggtcgatgccgcaggga

SEQ ID NO: 5340790 - DNA, 25 bp, Homo sapien
gcttctgcctccgtagcttctagag

SEQ ID NO: 5340791 - DNA, 25 bp, Homo sapien
ttagccactaaagcggaaacatccc

SEQ ID NO: 5340792 - DNA, 25 bp, Homo sapien
gacggctgctccttagccactaaag

SEQ ID NO: 5340793 - DNA, 25 bp, Homo sapien
cagtgacggctgctccttagccact

SEQ ID NO: 5340794 - DNA, 25 bp, Homo sapien
tgctccttagccactaaagcggaaa

SEQ ID NO: 5340795 - DNA, 25 bp, Homo sapien
gggcccctggagggatcttttctga

SEQ ID NO: 5340796 - DNA, 25 bp, Homo sapien
cacaggggcccctggagggatcttt

SEQ ID NO: 5340797 - DNA, 25 bp, Homo sapien
cccctggagggatcttttctgaagg

SEQ ID NO: 5340798 - DNA, 25 bp, Homo sapien
gggatcttttctgaaggagcaagac

SEQ ID NO: 5340799 - DNA, 25 bp, Homo sapien
tgggacatctttagtctgcaaggga

SEQ ID NO: 5340800 - DNA, 25 bp, Homo sapien
aacatctgggacatctttagtctgc

SEQ ID NO: 5340801 - DNA, 25 bp, Homo sapien
tctgggacatctttagtctgcaagg

SEQ ID NO: 5340802 - DNA, 25 bp, Homo sapien
agggaagctccggcagtgagaagga

SEQ ID NO: 5340803 - DNA, 25 bp, Homo sapien
cggctccacctggcggagggtagac

SEQ ID NO: 5340804 - DNA, 25 bp, Homo sapien
catcggctccacctggcggagggta

SEQ ID NO: 5340805 - DNA, 25 bp, Homo sapien
ggcatcggctccacctggcggaggg

SEQ ID NO: 5340806 - DNA, 25 bp, Homo sapien
tcggctccacctggcggagggtaga

SEQ ID NO: 5340807 - DNA, 25 bp, Homo sapien
atgtccagcagagattccggaagtg

SEQ ID NO: 5340808 - DNA, 25 bp, Homo sapien
tgtctttgacatcctccagtcctgg

SEQ ID NO: 5340809 - DNA, 25 bp, Homo sapien
tggcggggatggcttccaccctgtc

SEQ ID NO: 5340810 - DNA, 25 bp, Homo sapien
ccagcagagattccggaagtgactt

SEQ ID NO: 5340811 - DNA, 25 bp, Homo sapien
gggagtccgcggagcagaagtattc

SEQ ID NO: 5340812 - DNA, 25 bp, Homo sapien
agtccgcggagcagaagtattctgg

SEQ ID NO: 5340813 - DNA, 25 bp, Homo sapien
gagggagtccgcggagcagaagtat

SEQ ID NO: 5340814 - DNA, 25 bp, Homo sapien
ggagtccgcggagcagaagtattct

SEQ ID NO: 5340815 - DNA, 25 bp, Homo sapien
agaggcgctcccgatcaggctggaa

SEQ ID NO: 5340816 - DNA, 25 bp, Homo sapien
gcccactcgacaggctcctcagtga

SEQ ID NO: 5340817 - DNA, 25 bp, Homo sapien
tggaagcgagggcctgctcggcggg

SEQ ID NO: 5340818 - DNA, 25 bp, Homo sapien
cgctcccgatcaggctggaagcgag

SEQ ID NO: 5340819 - DNA, 25 bp, Homo sapien
gatgggggctgtagcctgctggtcc

SEQ ID NO: 5340820 - DNA, 25 bp, Homo sapien
ctccggggggatgatgggggctgta

SEQ ID NO: 5340821 - DNA, 25 bp, Homo sapien
tcttccagcggctccaggtagctgg

SEQ ID NO: 5340822 - DNA, 25 bp, Homo sapien
ctggtcctcggtggcgtccaggtgc

SEQ ID NO: 5340823 - DNA, 25 bp, Homo sapien
ttgcttgtaaatttgagaagacgcc

SEQ ID NO: 5340824 - DNA, 25 bp, Homo sapien
cttcgagggaaggaaccagcagctt

SEQ ID NO: 5340825 - DNA, 25 bp, Homo sapien
gcttgtaaatttgagaagacgccct

SEQ ID NO: 5340826 - DNA, 25 bp, Homo sapien
aaggaaccagcagcttatctctggg

SEQ ID NO: 5340827 - DNA, 25 bp, Homo sapien
ggcgccctgtcttccgtctagtgcg

SEQ ID NO: 5340828 - DNA, 25 bp, Homo sapien
gctgaattcctcctagggagtcctc

SEQ ID NO: 5340829 - DNA, 25 bp, Homo sapien
aagctgaattcctcctagggagtcc

SEQ ID NO: 5340830 - DNA, 25 bp, Homo sapien
tctagtgcggcagggtaaagtcgta

SEQ ID NO: 5340831 - DNA, 25 bp, Homo sapien
gtaaaagtttatggagagaggcttg

SEQ ID NO: 5340832 - DNA, 25 bp, Homo sapien
gcaggcaggcactggagggagcagt

SEQ ID NO: 5340833 - DNA, 25 bp, Homo sapien
aggcactggagggagcagtgggcac

SEQ ID NO: 5340834 - DNA, 25 bp, Homo sapien
gcaggcactggagggagcagtgggc

SEQ ID NO: 5340835 - DNA, 25 bp, Homo sapien
ctgtcaaaaaaggaggcaggcaggc

SEQ ID NO: 5340836 - DNA, 25 bp, Homo sapien
acacaaggtccgtgtagtcatcggt

SEQ ID NO: 5340837 - DNA, 25 bp, Homo sapien
ggggagtgggcgcagtcgaacacaa

SEQ ID NO: 5340838 - DNA, 25 bp, Homo sapien
aaggtccgtgtagtcatcggtgctg

SEQ ID NO: 5340839 - DNA, 25 bp, Homo sapien
cacaaggtccgtgtagtcatcggtg

SEQ ID NO: 5340840 - DNA, 25 bp, Homo sapien
agcaccgacgtaggggtgggcacac

SEQ ID NO: 5340841 - DNA, 25 bp, Homo sapien
gaggcaggacagcaccgacgtaggg

SEQ ID NO: 5340842 - DNA, 25 bp, Homo sapien
gacagcaccgacgtaggggtgggca

SEQ ID NO: 5340843 - DNA, 25 bp, Homo sapien
caggacagcaccgacgtaggggtgg

SEQ ID NO: 5340844 - DNA, 25 bp, Homo sapien
ggtcaggcctaggagatgcaggtag

SEQ ID NO: 5340845 - DNA, 25 bp, Homo sapien
tcaggcctaggagatgcaggtagga

SEQ ID NO: 5340846 - DNA, 25 bp, Homo sapien
ctggtcaggcctaggagatgcaggt

SEQ ID NO: 5340847 - DNA, 25 bp, Homo sapien
caggcctaggagatgcaggtaggac

SEQ ID NO: 5340848 - DNA, 25 bp, Homo sapien
cctgcgagccagtctttggagtctg

SEQ ID NO: 5340849 - DNA, 25 bp, Homo sapien
ctctttcatgtgaggccctgcgagc

SEQ ID NO: 5340850 - DNA, 25 bp, Homo sapien
gcgagccagtctttggagtctgcac

SEQ ID NO: 5340851 - DNA, 25 bp, Homo sapien
ggccctgcgagccagtctttggagt

SEQ ID NO: 5340852 - DNA, 25 bp, Homo sapien
tgattatcatcatgtcgccatcccc

SEQ ID NO: 5340853 - DNA, 25 bp, Homo sapien
tgagcctcgggtcctcatccctgga

SEQ ID NO: 5340854 - DNA, 25 bp, Homo sapien
tcctgggcgtggcttattttcggca

SEQ ID NO: 5340855 - DNA, 25 bp, Homo sapien
tggatggcgatactttatcatcccc

SEQ ID NO: 5340856 - DNA, 25 bp, Homo sapien
tgatgccgcaggagccagtctgcat

SEQ ID NO: 5340857 - DNA, 25 bp, Homo sapien
gtgatgccgcaggagccagtctgca

SEQ ID NO: 5340858 - DNA, 25 bp, Homo sapien
ctgtgatgccgcaggagccagtctg

SEQ ID NO: 5340859 - DNA, 25 bp, Homo sapien
tgtgatgccgcaggagccagtctgc

SEQ ID NO: 5340860 - DNA, 25 bp, Homo sapien
tttatttagcctatcttctatgaca

SEQ ID NO: 5340861 - DNA, 25 bp, Homo sapien
gtaagaaactccataagcaaccatc

SEQ ID NO: 5340862 - DNA, 25 bp, Homo sapien
gcctatcttctatgacagctttcat

SEQ ID NO: 5340863 - DNA, 25 bp, Homo sapien
aaactccataagcaaccatctccag

SEQ ID NO: 5340864 - DNA, 25 bp, Homo sapien
agtctgtgcagctgtcagaggagac

SEQ ID NO: 5340865 - DNA, 25 bp, Homo sapien
cagtctgtgcagctgtcagaggaga

SEQ ID NO: 5340866 - DNA, 25 bp, Homo sapien
tcagtctgtgcagctgtcagaggag

SEQ ID NO: 5340867 - DNA, 25 bp, Homo sapien
tcttcagcagactgtttcttttcag

SEQ ID NO: 5340868 - DNA, 25 bp, Homo sapien
actggagtcgtctctgtactcatgg

SEQ ID NO: 5340869 - DNA, 25 bp, Homo sapien
tatcactggagtcgtctctgtactc

SEQ ID NO: 5340870 - DNA, 25 bp, Homo sapien
tgattttatcactggagtcgtctct

SEQ ID NO: 5340871 - DNA, 25 bp, Homo sapien
ggagtccactgaagctctttccgtc

SEQ ID NO: 5340872 - DNA, 25 bp, Homo sapien
gagtccactgaagctctttccgtcc

SEQ ID NO: 5340873 - DNA, 25 bp, Homo sapien
tgtggagtccactgaagctctttcc

SEQ ID NO: 5340874 - DNA, 25 bp, Homo sapien
tggagtccactgaagctctttccgt

SEQ ID NO: 5340875 - DNA, 25 bp, Homo sapien
cttttttatctgtcacaccgtcagc

SEQ ID NO: 5340876 - DNA, 25 bp, Homo sapien
tttttatctgtcacaccgtcagcag

SEQ ID NO: 5340877 - DNA, 25 bp, Homo sapien
tctggtactctttaaccttcttctc

SEQ ID NO: 5340878 - DNA, 25 bp, Homo sapien
ttttttatctgtcacaccgtcagca

SEQ ID NO: 5340879 - DNA, 25 bp, Homo sapien
tctcttctgtgaatacgtctgcgac

SEQ ID NO: 5340880 - DNA, 25 bp, Homo sapien
ccccatgtagttgtctttgtcatcc

SEQ ID NO: 5340881 - DNA, 25 bp, Homo sapien
gatcttgaacctactccccatgtag

SEQ ID NO: 5340882 - DNA, 25 bp, Homo sapien
catcctctgtaagtcgctggcctct

SEQ ID NO: 5340883 - DNA, 25 bp, Homo sapien
aaaacatttatcaaattctctgtcc

SEQ ID NO: 5340884 - DNA, 25 bp, Homo sapien
acatttatcaaattctctgtccttc

SEQ ID NO: 5340885 - DNA, 25 bp, Homo sapien
atttatcaaattctctgtccttctg

SEQ ID NO: 5340886 - DNA, 25 bp, Homo sapien
aaacatttatcaaattctctgtcct

SEQ ID NO: 5340887 - DNA, 25 bp, Homo sapien
tcttctcttgcactgggtcttgcag

SEQ ID NO: 5340888 - DNA, 25 bp, Homo sapien
aggcccttcccaaaatcgcagtcag

SEQ ID NO: 5340889 - DNA, 25 bp, Homo sapien
tgcactgggtcttgcagttcccacg

SEQ ID NO: 5340890 - DNA, 25 bp, Homo sapien
ctttccttatcaaggccgtccttct

SEQ ID NO: 5340891 - DNA, 25 bp, Homo sapien
ttttgtcctggctggcctctacgga

SEQ ID NO: 5340892 - DNA, 25 bp, Homo sapien
tcctcgcggtgtgcggtgtgcctcc

SEQ ID NO: 5340893 - DNA, 25 bp, Homo sapien
ttgaagacactctggtagcctcact

SEQ ID NO: 5340894 - DNA, 25 bp, Homo sapien
tcactgaagagtcccagctgtctcc

SEQ ID NO: 5340895 - DNA, 25 bp, Homo sapien
aagcagaatcttccctataaacctt

SEQ ID NO: 5340896 - DNA, 25 bp, Homo sapien
aagatctgctgatatctttgttcat

SEQ ID NO: 5340897 - DNA, 25 bp, Homo sapien
ttcttggaaagatctgctgatatct

SEQ ID NO: 5340898 - DNA, 25 bp, Homo sapien
tcttggaaagatctgctgatatctt

SEQ ID NO: 5340899 - DNA, 25 bp, Homo sapien
tggaaagatctgctgatatctttgt

SEQ ID NO: 5340900 - DNA, 25 bp, Homo sapien
tctttggagaccttaatgatctcat

SEQ ID NO: 5340901 - DNA, 25 bp, Homo sapien
atctttggagaccttaatgatctca

SEQ ID NO: 5340902 - DNA, 25 bp, Homo sapien
ccagcggggaacacttgaggcagct

SEQ ID NO: 5340903 - DNA, 25 bp, Homo sapien
gcttggtgtgctggtttgtattgtt

SEQ ID NO: 5340904 - DNA, 25 bp, Homo sapien
ccccagaggagtaatcagactggct

SEQ ID NO: 5340905 - DNA, 25 bp, Homo sapien
cagagcccccatgagatgaggtgga

SEQ ID NO: 5340906 - DNA, 25 bp, Homo sapien
ggagtccctgtcatcctccccactc

SEQ ID NO: 5340907 - DNA, 25 bp, Homo sapien
gagtccctgtcatcctccccactct

SEQ ID NO: 5340908 - DNA, 25 bp, Homo sapien
ttctctcctgtgtccccatggtgac

SEQ ID NO: 5340909 - DNA, 25 bp, Homo sapien
cctgtgtccccatggtgacactcac

SEQ ID NO: 5340910 - DNA, 25 bp, Homo sapien
tctcctgtgtccccatggtgacact

SEQ ID NO: 5340911 - DNA, 25 bp, Homo sapien
tctctcctgtgtccccatggtgaca

SEQ ID NO: 5340912 - DNA, 25 bp, Homo sapien
gtctgacagaatatgatgggatgct

SEQ ID NO: 5340913 - DNA, 25 bp, Homo sapien
tgacagaatatgatgggatgctttc

SEQ ID NO: 5340914 - DNA, 25 bp, Homo sapien
acagaatatgatgggatgctttctt

SEQ ID NO: 5340915 - DNA, 25 bp, Homo sapien
tctgacagaatatgatgggatgctt

SEQ ID NO: 5340916 - DNA, 25 bp, Homo sapien
gcttcttttaagtcaagccgtgttg

SEQ ID NO: 5340917 - DNA, 25 bp, Homo sapien
tcgcctaactaggaaaacagtcatc

SEQ ID NO: 5340918 - DNA, 25 bp, Homo sapien
ttaagtcaagccgtgttgttcgcct

SEQ ID NO: 5340919 - DNA, 25 bp, Homo sapien
caagccgtgttgttcgcctaactag

SEQ ID NO: 5340920 - DNA, 25 bp, Homo sapien
aaatgggacacgtcaggagaggttt

SEQ ID NO: 5340921 - DNA, 25 bp, Homo sapien
ggtttgcaactgctttaccagacac

SEQ ID NO: 5340922 - DNA, 25 bp, Homo sapien
tcagcggtagcttggcagtgaaatg

SEQ ID NO: 5340923 - DNA, 25 bp, Homo sapien
ccttggtagagtaggcctttcacag

SEQ ID NO: 5340924 - DNA, 25 bp, Homo sapien
cccacagaaaccattgtcaggctta

SEQ ID NO: 5340925 - DNA, 25 bp, Homo sapien
cagaaaccattgtcaggcttaaaga

SEQ ID NO: 5340926 - DNA, 25 bp, Homo sapien
gaaaccattgtcaggcttaaagatt

SEQ ID NO: 5340927 - DNA, 25 bp, Homo sapien
tacccacagaaaccattgtcaggct

SEQ ID NO: 5340928 - DNA, 25 bp, Homo sapien
tttcattgctttccagtgatataag

SEQ ID NO: 5340929 - DNA, 25 bp, Homo sapien
gctttccagtgatataagcgtatat

SEQ ID NO: 5340930 - DNA, 25 bp, Homo sapien
gcagcagtaagatgcttgcaattca

SEQ ID NO: 5340931 - DNA, 25 bp, Homo sapien
attcaaacctgttggagagttttgt

SEQ ID NO: 5340932 - DNA, 25 bp, Homo sapien
taccagtatggctgcagatgtgtag

SEQ ID NO: 5340933 - DNA, 25 bp, Homo sapien
tttgaccattgatgccagtgttagg

SEQ ID NO: 5340934 - DNA, 25 bp, Homo sapien
tgatgccagtgttaggccataccag

SEQ ID NO: 5340935 - DNA, 25 bp, Homo sapien
taggccataccagtatggctgcaga

SEQ ID NO: 5340936 - DNA, 25 bp, Homo sapien
aatatgatactgtggcaactgtatc

SEQ ID NO: 5340937 - DNA, 25 bp, Homo sapien
gatactgtggcaactgtatcatatg

SEQ ID NO: 5340938 - DNA, 25 bp, Homo sapien
tataatatgatactgtggcaactgt

SEQ ID NO: 5340939 - DNA, 25 bp, Homo sapien
tgatactgtggcaactgtatcatat

SEQ ID NO: 5340940 - DNA, 25 bp, Homo sapien
ctgaaggatgatcagtattaacagt

SEQ ID NO: 5340941 - DNA, 25 bp, Homo sapien
ttcatgttgaattgtctgctccaga

SEQ ID NO: 5340942 - DNA, 25 bp, Homo sapien
gtggatgatgttctatcagtttgtg

SEQ ID NO: 5340943 - DNA, 25 bp, Homo sapien
tgctgaaactctagggtggatgatg

SEQ ID NO: 5340944 - DNA, 25 bp, Homo sapien
tctttgaaagtctgttctcaatgct

SEQ ID NO: 5340945 - DNA, 25 bp, Homo sapien
ggaagtccaagaaaatgtcactggc

SEQ ID NO: 5340946 - DNA, 25 bp, Homo sapien
tgggaagtccaagaaaatgtcactg

SEQ ID NO: 5340947 - DNA, 25 bp, Homo sapien
gggaagtccaagaaaatgtcactgg

SEQ ID NO: 5340948 - DNA, 25 bp, Homo sapien
ttatctgtcagaataaagaactgtg

SEQ ID NO: 5340949 - DNA, 25 bp, Homo sapien
tctcttgaacgatttatctgtcaga

SEQ ID NO: 5340950 - DNA, 25 bp, Homo sapien
ctttctcttgaacgatttatctgtc

SEQ ID NO: 5340951 - DNA, 25 bp, Homo sapien
taaagaactgtgttcaccacattct

SEQ ID NO: 5340952 - DNA, 25 bp, Homo sapien
ttccctttagcagccagtggcagtc

SEQ ID NO: 5340953 - DNA, 25 bp, Homo sapien
cagggcaggaggtacgctggaattc

SEQ ID NO: 5340954 - DNA, 25 bp, Homo sapien
gtgaagtggtcacactctagatgtg

SEQ ID NO: 5340955 - DNA, 25 bp, Homo sapien
ttctgtgaagtggtcacactctaga

SEQ ID NO: 5340956 - DNA, 25 bp, Homo sapien
catgtagtcttctaacttcaggcag

SEQ ID NO: 5340957 - DNA, 25 bp, Homo sapien
gagcagacagacattgatttgaagc

SEQ ID NO: 5340958 - DNA, 25 bp, Homo sapien
tcaagaagaaccaagctcaaagcaa

SEQ ID NO: 5340959 - DNA, 25 bp, Homo sapien
gtttcagacatacgttctactggca

SEQ ID NO: 5340960 - DNA, 25 bp, Homo sapien
ccaaaagatggtgggcatttccagc

SEQ ID NO: 5340961 - DNA, 25 bp, Homo sapien
tacgttggcaacctctttactctag

SEQ ID NO: 5340962 - DNA, 25 bp, Homo sapien
aacgtggacgtgttgcttccagaag

SEQ ID NO: 5340963 - DNA, 25 bp, Homo sapien
tctagcccattgaacaaacgtggac

SEQ ID NO: 5340964 - DNA, 25 bp, Homo sapien
attggaccgagagacccggcggcca

SEQ ID NO: 5340965 - DNA, 25 bp, Homo sapien
acccaaagtcgctgagtcctcgcgg

SEQ ID NO: 5340966 - DNA, 25 bp, Homo sapien
tcgctgagtcctcgcggctcggcag

SEQ ID NO: 5340967 - DNA, 25 bp, Homo sapien
gggctttgtctaggcccgacaggat

SEQ ID NO: 5340968 - DNA, 25 bp, Homo sapien
aaatccgacacttcagcttcagcca

SEQ ID NO: 5340969 - DNA, 25 bp, Homo sapien
atccatctgtaaatccgacacttca

SEQ ID NO: 5340970 - DNA, 25 bp, Homo sapien
tgtaaatccgacacttcagcttcag

SEQ ID NO: 5340971 - DNA, 25 bp, Homo sapien
catccatctgtaaatccgacacttc

SEQ ID NO: 5340972 - DNA, 25 bp, Homo sapien
atcactccctttgcctctgctaaag

SEQ ID NO: 5340973 - DNA, 25 bp, Homo sapien
ctttgcctctgctaaagttgttcat

SEQ ID NO: 5340974 - DNA, 25 bp, Homo sapien
tttgctgccatcactccctttgcct

SEQ ID NO: 5340975 - DNA, 25 bp, Homo sapien
actccctttgcctctgctaaagttg

SEQ ID NO: 5340976 - DNA, 25 bp, Homo sapien
atagtagctctatcagaactgcagc

SEQ ID NO: 5340977 - DNA, 25 bp, Homo sapien
gtagctctatcagaactgcagcaag

SEQ ID NO: 5340978 - DNA, 25 bp, Homo sapien
tagtagctctatcagaactgcagca

SEQ ID NO: 5340979 - DNA, 25 bp, Homo sapien
ttaatagtagctctatcagaactgc

SEQ ID NO: 5340980 - DNA, 25 bp, Homo sapien
cattcagggtggtatggctgtagac

SEQ ID NO: 5340981 - DNA, 25 bp, Homo sapien
gatcagacgagatagggcgcattca

SEQ ID NO: 5340982 - DNA, 25 bp, Homo sapien
gagatcagacgagatagggcgcatt

SEQ ID NO: 5340983 - DNA, 25 bp, Homo sapien
tcagacgagatagggcgcattcagg

SEQ ID NO: 5340984 - DNA, 25 bp, Homo sapien
ttttctcgagaacaagggctagctt

SEQ ID NO: 5340985 - DNA, 25 bp, Homo sapien
caagggctagctttgtgcaaggatt

SEQ ID NO: 5340986 - DNA, 25 bp, Homo sapien
aagctgcagctttcatgaggttttc

SEQ ID NO: 5340987 - DNA, 25 bp, Homo sapien
catgaggttttctcgagaacaaggg

SEQ ID NO: 5340988 - DNA, 25 bp, Homo sapien
taccctgggaattcgagataggctg

SEQ ID NO: 5340989 - DNA, 25 bp, Homo sapien
tccaagactagaggccagatttcag

SEQ ID NO: 5340990 - DNA, 25 bp, Homo sapien
tagtgtagctactcatgccctcttc

SEQ ID NO: 5340991 - DNA, 25 bp, Homo sapien
gcagtgagaagcctgcacatcgccc

SEQ ID NO: 5340992 - DNA, 25 bp, Homo sapien
actgtaatacatcagtagctgaaca

SEQ ID NO: 5340993 - DNA, 25 bp, Homo sapien
ggtgccaactgtaatacatcagtag

SEQ ID NO: 5340994 - DNA, 25 bp, Homo sapien
acaggtgccaactgtaatacatcag

SEQ ID NO: 5340995 - DNA, 25 bp, Homo sapien
gccaactgtaatacatcagtagctg

SEQ ID NO: 5340996 - DNA, 25 bp, Homo sapien
cacacgaaggtcttaattctcctat

SEQ ID NO: 5340997 - DNA, 25 bp, Homo sapien
tacttgcagacgtcataaaggatgt

SEQ ID NO: 5340998 - DNA, 25 bp, Homo sapien
tagctctcatatgtagcatacttgc

SEQ ID NO: 5340999 - DNA, 25 bp, Homo sapien
tcataaaggatgtcacacgaaggtc

SEQ ID NO: 5341000 - DNA, 25 bp, Homo sapien
tgtgttcaggaattttatcatcctc

SEQ ID NO: 5341001 - DNA, 25 bp, Homo sapien
gtgttcaggaattttatcatcctca

SEQ ID NO: 5341002 - DNA, 25 bp, Homo sapien
ctgaaacaatgaaagataaatgtgt

SEQ ID NO: 5341003 - DNA, 25 bp, Homo sapien
acaatgaaagataaatgtgttcagg

SEQ ID NO: 5341004 - DNA, 25 bp, Homo sapien
gctcaagaaagtgcctatgagctgc

SEQ ID NO: 5341005 - DNA, 25 bp, Homo sapien
tttagctcaagaaagtgcctatgag

SEQ ID NO: 5341006 - DNA, 25 bp, Homo sapien
tagctcaagaaagtgcctatgagct

SEQ ID NO: 5341007 - DNA, 25 bp, Homo sapien
tatttagctcaagaaagtgcctatg

SEQ ID NO: 5341008 - DNA, 25 bp, Homo sapien
ttctttttctcccgaaggttgctca

SEQ ID NO: 5341009 - DNA, 25 bp, Homo sapien
tctttttctcccgaaggttgctcat

SEQ ID NO: 5341010 - DNA, 25 bp, Homo sapien
catgaagtcattgagggtcccagat

SEQ ID NO: 5341011 - DNA, 25 bp, Homo sapien
tgaagtcattgagggtcccagatcc

SEQ ID NO: 5341012 - DNA, 25 bp, Homo sapien
gagtttctgtatcatgaagtcattg

SEQ ID NO: 5341013 - DNA, 25 bp, Homo sapien
cttggggtgagtttctgtatcatga

SEQ ID NO: 5341014 - DNA, 25 bp, Homo sapien
tattggtttaaccataccagtgtcc

SEQ ID NO: 5341015 - DNA, 25 bp, Homo sapien
gctctcagtaaaaaggtggtcttga

SEQ ID NO: 5341016 - DNA, 25 bp, Homo sapien
aggtggtcttgaggtgtctgtcttc

SEQ ID NO: 5341017 - DNA, 25 bp, Homo sapien
gtttaaccataccagtgtccctgca

SEQ ID NO: 5341018 - DNA, 25 bp, Homo sapien
caaactggctgcatataagtcttga

SEQ ID NO: 5341019 - DNA, 25 bp, Homo sapien
tttccaaaagactgtgcccaaactg

SEQ ID NO: 5341020 - DNA, 25 bp, Homo sapien
aaagactgtgcccaaactggctgca

SEQ ID NO: 5341021 - DNA, 25 bp, Homo sapien
tgtgcccaaactggctgcatataag

SEQ ID NO: 5341022 - DNA, 25 bp, Homo sapien
tctgtgctcccgaacagccattttc

SEQ ID NO: 5341023 - DNA, 25 bp, Homo sapien
atcaactgaacaatagcgatcaaca

SEQ ID NO: 5341024 - DNA, 25 bp, Homo sapien
gccattttcagctccggaatccttg

SEQ ID NO: 5341025 - DNA, 25 bp, Homo sapien
gaacaatagcgatcaacaaacaaat

SEQ ID NO: 5341026 - DNA, 25 bp, Homo sapien
tcaatcataagcacgctcagctgtc

SEQ ID NO: 5341027 - DNA, 25 bp, Homo sapien
agcacgctcagctgtctggaacaaa

SEQ ID NO: 5341028 - DNA, 25 bp, Homo sapien
cataagcacgctcagctgtctggaa

SEQ ID NO: 5341029 - DNA, 25 bp, Homo sapien
gcacgctcagctgtctggaacaaag

SEQ ID NO: 5341030 - DNA, 25 bp, Homo sapien
caggttactgtgctagcttgtttcc

SEQ ID NO: 5341031 - DNA, 25 bp, Homo sapien
tccctgctctgctcggtagggcaaa

SEQ ID NO: 5341032 - DNA, 25 bp, Homo sapien
gatgcagtagtttgctactttcctc

SEQ ID NO: 5341033 - DNA, 25 bp, Homo sapien
tgcgtaaacctgaggcttaattccc

SEQ ID NO: 5341034 - DNA, 25 bp, Homo sapien
tgtggctggaagcaatttgtctcct

SEQ ID NO: 5341035 - DNA, 25 bp, Homo sapien
tttgtgcgtgtacattctgaagccc

SEQ ID NO: 5341036 - DNA, 25 bp, Homo sapien
ttgtggctggaagcaatttgtctcc

SEQ ID NO: 5341037 - DNA, 25 bp, Homo sapien
agcccatttgtgtgagtggcatctc

SEQ ID NO: 5341038 - DNA, 25 bp, Homo sapien
tcagatatcagacgaggagaggtat

SEQ ID NO: 5341039 - DNA, 25 bp, Homo sapien
gtggccctgaaatcactctgaagaa

SEQ ID NO: 5341040 - DNA, 25 bp, Homo sapien
tggtggccctgaaatcactctgaag

SEQ ID NO: 5341041 - DNA, 25 bp, Homo sapien
tattttgaggactgaagagtgtgtc

SEQ ID NO: 5341042 - DNA, 25 bp, Homo sapien
atgtgatctggtttatcattcaggg

SEQ ID NO: 5341043 - DNA, 25 bp, Homo sapien
gtaggtttatgtgatctggtttatc

SEQ ID NO: 5341044 - DNA, 25 bp, Homo sapien
aaccttccatgttagtaggtttatg

SEQ ID NO: 5341045 - DNA, 25 bp, Homo sapien
cagggcatttcctcgtttgaacttc

SEQ ID NO: 5341046 - DNA, 25 bp, Homo sapien
tgctacattctcttggcatttgaga

SEQ ID NO: 5341047 - DNA, 25 bp, Homo sapien
ttctacaacttaacacctgtccttg

SEQ ID NO: 5341048 - DNA, 25 bp, Homo sapien
cacctgtccttgatctgctacattc

SEQ ID NO: 5341049 - DNA, 25 bp, Homo sapien
catttgagaacctttgacgtagtta

SEQ ID NO: 5341050 - DNA, 25 bp, Homo sapien
tatttcacaggaaccacctgtgttt

SEQ ID NO: 5341051 - DNA, 25 bp, Homo sapien
tcaaatatttcacaggaaccacctg

SEQ ID NO: 5341052 - DNA, 25 bp, Homo sapien
gggtcctgagattcaaatatttcac

SEQ ID NO: 5341053 - DNA, 25 bp, Homo sapien
aggaaccacctgtgtttgcattttc

SEQ ID NO: 5341054 - DNA, 25 bp, Homo sapien
ggaacaaatacgtatccaatcagag

SEQ ID NO: 5341055 - DNA, 25 bp, Homo sapien
tggaacaaatacgtatccaatcaga

SEQ ID NO: 5341056 - DNA, 25 bp, Homo sapien
catttgaatgactgctgcagacaat

SEQ ID NO: 5341057 - DNA, 25 bp, Homo sapien
tttctacatttgaatgactgctgca

SEQ ID NO: 5341058 - DNA, 25 bp, Homo sapien
tacatttgaatgactgctgcagaca

SEQ ID NO: 5341059 - DNA, 25 bp, Homo sapien
ttgaatgactgctgcagacaatcat

SEQ ID NO: 5341060 - DNA, 25 bp, Homo sapien
cactgaatccgaaagcctaatattc

SEQ ID NO: 5341061 - DNA, 25 bp, Homo sapien
gaatccgaaagcctaatattccgta

SEQ ID NO: 5341062 - DNA, 25 bp, Homo sapien
ctaacactgaatccgaaagcctaat

SEQ ID NO: 5341063 - DNA, 25 bp, Homo sapien
aaactaacactgaatccgaaagcct

SEQ ID NO: 5341064 - DNA, 25 bp, Homo sapien
ttactgccttagtgaattttgcatt

SEQ ID NO: 5341065 - DNA, 25 bp, Homo sapien
tgggttttattgtgactaatgccag

SEQ ID NO: 5341066 - DNA, 25 bp, Homo sapien
gacaactgggttttattgtgactaa

SEQ ID NO: 5341067 - DNA, 25 bp, Homo sapien
aaagtgacaactgggttttattgtg

SEQ ID NO: 5341068 - DNA, 25 bp, Homo sapien
ttattgtgactaatgccagctttag

SEQ ID NO: 5341069 - DNA, 25 bp, Homo sapien
ccttttgatcattgcattcaaccag

SEQ ID NO: 5341070 - DNA, 25 bp, Homo sapien
cagaacattcttaggtctcattagc

SEQ ID NO: 5341071 - DNA, 25 bp, Homo sapien
gcattcaaccagaacattcttaggt

SEQ ID NO: 5341072 - DNA, 25 bp, Homo sapien
tcacagagcaatacagcccttttga

SEQ ID NO: 5341073 - DNA, 25 bp, Homo sapien
aggagcacccccattgcttggtaaa

SEQ ID NO: 5341074 - DNA, 25 bp, Homo sapien
tggtggtcactctcttcagccactg

SEQ ID NO: 5341075 - DNA, 25 bp, Homo sapien
ttgcttggtaaatactctctgaaca

SEQ ID NO: 5341076 - DNA, 25 bp, Homo sapien
aatactctctgaacatctgtgcccc

SEQ ID NO: 5341077 - DNA, 25 bp, Homo sapien
tatacttctcatgcaaagtgcctcc

SEQ ID NO: 5341078 - DNA, 25 bp, Homo sapien
tctcatgcaaagtgcctccttagca

SEQ ID NO: 5341079 - DNA, 25 bp, Homo sapien
ttgttggttccaggtatacttctca

SEQ ID NO: 5341080 - DNA, 25 bp, Homo sapien
aagtgcctccttagcattatgaaga

SEQ ID NO: 5341081 - DNA, 25 bp, Homo sapien
tctggttatgcttctgatgctcata

SEQ ID NO: 5341082 - DNA, 25 bp, Homo sapien
tatgcttctgatgctcatagttgct

SEQ ID NO: 5341083 - DNA, 25 bp, Homo sapien
gcttaactgcattatgtccctgttt

SEQ ID NO: 5341084 - DNA, 25 bp, Homo sapien
gctcatagttgctctgcttaactgc

SEQ ID NO: 5341085 - DNA, 25 bp, Homo sapien
ctgtgtcacattgtccaatggtaga

SEQ ID NO: 5341086 - DNA, 25 bp, Homo sapien
gtcacattgtccaatggtagaacat

SEQ ID NO: 5341087 - DNA, 25 bp, Homo sapien
tgtcacattgtccaatggtagaaca

SEQ ID NO: 5341088 - DNA, 25 bp, Homo sapien
tgtgtcacattgtccaatggtagaa

SEQ ID NO: 5341089 - DNA, 25 bp, Homo sapien
taattgctagaatatctaatggact

SEQ ID NO: 5341090 - DNA, 25 bp, Homo sapien
tagaatatctaatggactatttcct

SEQ ID NO: 5341091 - DNA, 25 bp, Homo sapien
ctcaataattgctagaatatctaat

SEQ ID NO: 5341092 - DNA, 25 bp, Homo sapien
ttgctagaatatctaatggactatt

SEQ ID NO: 5341093 - DNA, 25 bp, Homo sapien
tccttccctctcagtaaatcgaatt

SEQ ID NO: 5341094 - DNA, 25 bp, Homo sapien
tgatactgatcaagattgcacatct

SEQ ID NO: 5341095 - DNA, 25 bp, Homo sapien
catctttgcaattcaggacccttgt

SEQ ID NO: 5341096 - DNA, 25 bp, Homo sapien
cgaattgtgtgatggtgttacagac

SEQ ID NO: 5341097 - DNA, 25 bp, Homo sapien
tccatagcatgtaaggcggtactgc

SEQ ID NO: 5341098 - DNA, 25 bp, Homo sapien
tcaatcccattgcttccagtggtat

SEQ ID NO: 5341099 - DNA, 25 bp, Homo sapien
gctactacttccattctatcaatcc

SEQ ID NO: 5341100 - DNA, 25 bp, Homo sapien
catgtaaggcggtactgcaggttct

SEQ ID NO: 5341101 - DNA, 25 bp, Homo sapien
tttctgaaaagaattccggctggaa

SEQ ID NO: 5341102 - DNA, 25 bp, Homo sapien
ggaattctgatgaagtcagactaag

SEQ ID NO: 5341103 - DNA, 25 bp, Homo sapien
tgtttcccaggaatagctttcttga

SEQ ID NO: 5341104 - DNA, 25 bp, Homo sapien
taaaaccagagcattcttcaattca

SEQ ID NO: 5341105 - DNA, 25 bp, Homo sapien
tccagaacttatcaattgcttttgt

SEQ ID NO: 5341106 - DNA, 25 bp, Homo sapien
ttttcttccagaacttatcaattgc

SEQ ID NO: 5341107 - DNA, 25 bp, Homo sapien
tgtggcagcttttggctcagggaca

SEQ ID NO: 5341108 - DNA, 25 bp, Homo sapien
acttatcaattgcttttgtggcagc

SEQ ID NO: 5341109 - DNA, 25 bp, Homo sapien
tgcactggcctctgatctgagagta

SEQ ID NO: 5341110 - DNA, 25 bp, Homo sapien
gatgccccaggcaagtaactcaatt

SEQ ID NO: 5341111 - DNA, 25 bp, Homo sapien
cagggccaagattagggtgattcaa

SEQ ID NO: 5341112 - DNA, 25 bp, Homo sapien
gattcaagtgaggacaagttgctac

SEQ ID NO: 5341113 - DNA, 25 bp, Homo sapien
gttctgttagcaagatctacattcc

SEQ ID NO: 5341114 - DNA, 25 bp, Homo sapien
gtatgtcaggagagatgatactcaa

SEQ ID NO: 5341115 - DNA, 25 bp, Homo sapien
tcttttttacacaggctcgaggtat

SEQ ID NO: 5341116 - DNA, 25 bp, Homo sapien
ccttgatttgggaagagcagagcac

SEQ ID NO: 5341117 - DNA, 25 bp, Homo sapien
tacagagaggataggttccaggacc

SEQ ID NO: 5341118 - DNA, 25 bp, Homo sapien
tagtggatccatgcaattcaactgt

SEQ ID NO: 5341119 - DNA, 25 bp, Homo sapien
caacgatccctcgatatacagagag

SEQ ID NO: 5341120 - DNA, 25 bp, Homo sapien
gagctgaacaaagttgaccaaccct

SEQ ID NO: 5341121 - DNA, 25 bp, Homo sapien
cagtgttttacaacatctgctgctg

SEQ ID NO: 5341122 - DNA, 25 bp, Homo sapien
ctgctgctgctcttttcacacccat

SEQ ID NO: 5341123 - DNA, 25 bp, Homo sapien
tgttttacaacatctgctgctgctc

SEQ ID NO: 5341124 - DNA, 25 bp, Homo sapien
tctgctgctgctcttttcacaccca

SEQ ID NO: 5341125 - DNA, 25 bp, Homo sapien
ggtcaaagtatccacttccagctta

SEQ ID NO: 5341126 - DNA, 25 bp, Homo sapien
aaaatataagtgtgactaccctaag

SEQ ID NO: 5341127 - DNA, 25 bp, Homo sapien
tccctctctatttcacaagtgctgc

SEQ ID NO: 5341128 - DNA, 25 bp, Homo sapien
gcattgccctttcacggtcaaagta

SEQ ID NO: 5341129 - DNA, 25 bp, Homo sapien
aagaaggaactgtcaatgatttata

SEQ ID NO: 5341130 - DNA, 25 bp, Homo sapien
gtaggcatcttctttacaaggcaac

SEQ ID NO: 5341131 - DNA, 25 bp, Homo sapien
caaaccgtatcattcaattcctggc

SEQ ID NO: 5341132 - DNA, 25 bp, Homo sapien
taattcacagtctggcatagctggg

SEQ ID NO: 5341133 - DNA, 25 bp, Homo sapien
cttttttcagcaacactaacagttc

SEQ ID NO: 5341134 - DNA, 25 bp, Homo sapien
acttttctagccatctccaacagct

SEQ ID NO: 5341135 - DNA, 25 bp, Homo sapien
caacactaacagttctctttgctac

SEQ ID NO: 5341136 - DNA, 25 bp, Homo sapien
cttttctagccatctccaacagctt

SEQ ID NO: 5341137 - DNA, 25 bp, Homo sapien
gagaatgctatagtaaagtcatctt

SEQ ID NO: 5341138 - DNA, 25 bp, Homo sapien
atgctatagtaaagtcatcttcatc

SEQ ID NO: 5341139 - DNA, 25 bp, Homo sapien
gaatgctatagtaaagtcatcttca

SEQ ID NO: 5341140 - DNA, 25 bp, Homo sapien
agagaatgctatagtaaagtcatct

SEQ ID NO: 5341141 - DNA, 25 bp, Homo sapien
ctattgatacggtttcatgtgtgtc

SEQ ID NO: 5341142 - DNA, 25 bp, Homo sapien
tgtagactgtactgcatgcttgtga

SEQ ID NO: 5341143 - DNA, 25 bp, Homo sapien
aggctttcaagaccataactctggg

SEQ ID NO: 5341144 - DNA, 25 bp, Homo sapien
aagtcttacttggtactggctcgag

SEQ ID NO: 5341145 - DNA, 25 bp, Homo sapien
gattttgaatcgtttgctgcatgtg

SEQ ID NO: 5341146 - DNA, 25 bp, Homo sapien
gctgtgaggggcatcaacaagtgaa

SEQ ID NO: 5341147 - DNA, 25 bp, Homo sapien
tgctgtgaggggcatcaacaagtga

SEQ ID NO: 5341148 - DNA, 25 bp, Homo sapien
ctgtgaggggcatcaacaagtgaaa

SEQ ID NO: 5341149 - DNA, 25 bp, Homo sapien
aagaactgtaatactgtgagggtct

SEQ ID NO: 5341150 - DNA, 25 bp, Homo sapien
agaagaaactgtggatacatctgaa

SEQ ID NO: 5341151 - DNA, 25 bp, Homo sapien
ctgtaatactgtgagggtctgcggc

SEQ ID NO: 5341152 - DNA, 25 bp, Homo sapien
gaaagaagaaactgtggatacatct

SEQ ID NO: 5341153 - DNA, 25 bp, Homo sapien
gtgggtccctccacgtccgtcatct

SEQ ID NO: 5341154 - DNA, 25 bp, Homo sapien
ctccacgtccgtcatctgatttcct

SEQ ID NO: 5341155 - DNA, 25 bp, Homo sapien
gtccctccacgtccgtcatctgatt

SEQ ID NO: 5341156 - DNA, 25 bp, Homo sapien
gggtccctccacgtccgtcatctga

SEQ ID NO: 5341157 - DNA, 25 bp, Homo sapien
tctctgaagtgtaaggttacaagaa

SEQ ID NO: 5341158 - DNA, 25 bp, Homo sapien
tctgaagtgtaaggttacaagaata

SEQ ID NO: 5341159 - DNA, 25 bp, Homo sapien
tctctctgaagtgtaaggttacaag

SEQ ID NO: 5341160 - DNA, 25 bp, Homo sapien
ttctctctgaagtgtaaggttacaa

SEQ ID NO: 5341161 - DNA, 25 bp, Homo sapien
gaggcatcaagggtcttgcattcct

SEQ ID NO: 5341162 - DNA, 25 bp, Homo sapien
tgcattccttgccagctgtgctgct

SEQ ID NO: 5341163 - DNA, 25 bp, Homo sapien
tcttttgggtcaagtgtcactgtgt

SEQ ID NO: 5341164 - DNA, 25 bp, Homo sapien
agtggcattttgtgtgaatgtcagc

SEQ ID NO: 5341165 - DNA, 25 bp, Homo sapien
gtgtagttcgatgtcaagtttatga

SEQ ID NO: 5341166 - DNA, 25 bp, Homo sapien
tttgctgtgggagtatgtgtagttc

SEQ ID NO: 5341167 - DNA, 25 bp, Homo sapien
tgggagtatgtgtagttcgatgtca

SEQ ID NO: 5341168 - DNA, 25 bp, Homo sapien
attttgctgtgggagtatgtgtagt

SEQ ID NO: 5341169 - DNA, 25 bp, Homo sapien
tttgaataaacctgtccagcctctg

SEQ ID NO: 5341170 - DNA, 25 bp, Homo sapien
cattgtcacaccaatcattatcttg

SEQ ID NO: 5341171 - DNA, 25 bp, Homo sapien
caccaatcattatcttgaacaattc

SEQ ID NO: 5341172 - DNA, 25 bp, Homo sapien
tcagatattaaatgaatccctcata

SEQ ID NO: 5341173 - DNA, 25 bp, Homo sapien
taatgtattctgagtggagtcagca

SEQ ID NO: 5341174 - DNA, 25 bp, Homo sapien
aatgtattctgagtggagtcagcaa

SEQ ID NO: 5341175 - DNA, 25 bp, Homo sapien
taatgtcacctaccctaaacagttg

SEQ ID NO: 5341176 - DNA, 25 bp, Homo sapien
tggcattccgctctgtctgacacct

SEQ ID NO: 5341177 - DNA, 25 bp, Homo sapien
taatgagacatggagactttaccaa

SEQ ID NO: 5341178 - DNA, 25 bp, Homo sapien
catattctaagaggatttcccactg

SEQ ID NO: 5341179 - DNA, 25 bp, Homo sapien
gcagtgcagactgggtctcagtggg

SEQ ID NO: 5341180 - DNA, 25 bp, Homo sapien
gactgggtctcagtgggatttccat

SEQ ID NO: 5341181 - DNA, 25 bp, Homo sapien
tggccaaagaccgaggcccatgatg

SEQ ID NO: 5341182 - DNA, 25 bp, Homo sapien
gccaaagaccgaggcccatgatggg

SEQ ID NO: 5341183 - DNA, 25 bp, Homo sapien
tcttgctattgccatggagatggag

SEQ ID NO: 5341184 - DNA, 25 bp, Homo sapien
gctttcatttgttatcccatttcca

SEQ ID NO: 5341185 - DNA, 25 bp, Homo sapien
catacatttgtattccagggaagag

SEQ ID NO: 5341186 - DNA, 25 bp, Homo sapien
tcttctcacaacactccacatgcag

SEQ ID NO: 5341187 - DNA, 25 bp, Homo sapien
cattgggtatgatgacatacgcgtt

SEQ ID NO: 5341188 - DNA, 25 bp, Homo sapien
gatgacatacgcgtttattggaaag

SEQ ID NO: 5341189 - DNA, 25 bp, Homo sapien
ttatttcagcgagtcattgggtatg

SEQ ID NO: 5341190 - DNA, 25 bp, Homo sapien
tattggaaagtatgtttgctctgta

SEQ ID NO: 5341191 - DNA, 25 bp, Homo sapien
cttgttggcacattgaagttcgcat

SEQ ID NO: 5341192 - DNA, 25 bp, Homo sapien
gacttgttggcacattgaagttcgc

SEQ ID NO: 5341193 - DNA, 25 bp, Homo sapien
acttgttggcacattgaagttcgca

SEQ ID NO: 5341194 - DNA, 25 bp, Homo sapien
cattcagccatggattctggtagag

SEQ ID NO: 5341195 - DNA, 25 bp, Homo sapien
tgtattctgtaagcgtctgctggca

SEQ ID NO: 5341196 - DNA, 25 bp, Homo sapien
gatgggatttggctttagtcagaga

SEQ ID NO: 5341197 - DNA, 25 bp, Homo sapien
cttggctgaggatagagcatgtgta

SEQ ID NO: 5341198 - DNA, 25 bp, Homo sapien
ttgaggcttaagtaattgtttcatg

SEQ ID NO: 5341199 - DNA, 25 bp, Homo sapien
gaggcttaagtaattgtttcatgtc

SEQ ID NO: 5341200 - DNA, 25 bp, Homo sapien
gcttaagtaattgtttcatgtcatc

SEQ ID NO: 5341201 - DNA, 25 bp, Homo sapien
taagtaattgtttcatgtcatcatc

SEQ ID NO: 5341202 - DNA, 25 bp, Homo sapien
agatgcctctatagtctcttgtggg

SEQ ID NO: 5341203 - DNA, 25 bp, Homo sapien
tgagttccatcaggcactctaattc

SEQ ID NO: 5341204 - DNA, 25 bp, Homo sapien
tcaagtgtgccgatagttacaatgt

SEQ ID NO: 5341205 - DNA, 25 bp, Homo sapien
tcttgtggggtcttgagttccatca

SEQ ID NO: 5341206 - DNA, 25 bp, Homo sapien
tttctcaaagactaggccacctcat

SEQ ID NO: 5341207 - DNA, 25 bp, Homo sapien
cattaagccattgaaagttgtctca

SEQ ID NO: 5341208 - DNA, 25 bp, Homo sapien
tgctgtcactacaagcacacttctg

SEQ ID NO: 5341209 - DNA, 25 bp, Homo sapien
ggtccgtacgtttatatatttcagc

SEQ ID NO: 5341210 - DNA, 25 bp, Homo sapien
cttttccacgaatggtagtccttca

SEQ ID NO: 5341211 - DNA, 25 bp, Homo sapien
cacgaatggtagtccttcaatgggc

SEQ ID NO: 5341212 - DNA, 25 bp, Homo sapien
tccacgaatggtagtccttcaatgg

SEQ ID NO: 5341213 - DNA, 25 bp, Homo sapien
cgaatggtagtccttcaatgggcat

SEQ ID NO: 5341214 - DNA, 25 bp, Homo sapien
cagtcttgagcagcaaagctctctt

SEQ ID NO: 5341215 - DNA, 25 bp, Homo sapien
cttgtacagtcttgagcagcaaagc

SEQ ID NO: 5341216 - DNA, 25 bp, Homo sapien
ccctgagtcccaacatgaccatata

SEQ ID NO: 5341217 - DNA, 25 bp, Homo sapien
cccaacatgaccatataaatatact

SEQ ID NO: 5341218 - DNA, 25 bp, Homo sapien
aatacatcagctttggtcctgttac

SEQ ID NO: 5341219 - DNA, 25 bp, Homo sapien
aattcagccaatacatcagctttgg

SEQ ID NO: 5341220 - DNA, 25 bp, Homo sapien
attcaattcagccaatacatcagct

SEQ ID NO: 5341221 - DNA, 25 bp, Homo sapien
gccaatacatcagctttggtcctgt

SEQ ID NO: 5341222 - DNA, 25 bp, Homo sapien
gctgtaagcaccactaccctcagac

SEQ ID NO: 5341223 - DNA, 25 bp, Homo sapien
aagcaccactaccctcagaccggcc

SEQ ID NO: 5341224 - DNA, 25 bp, Homo sapien
tcaattagctgtaagcaccactacc

SEQ ID NO: 5341225 - DNA, 25 bp, Homo sapien
attagctgtaagcaccactaccctc

SEQ ID NO: 5341226 - DNA, 25 bp, Homo sapien
ctaattgcttattgcttctgatttt

SEQ ID NO: 5341227 - DNA, 25 bp, Homo sapien
catcttgcagttggaatgctccttc

SEQ ID NO: 5341228 - DNA, 25 bp, Homo sapien
cttgcagttggaatgctccttccga

SEQ ID NO: 5341229 - DNA, 25 bp, Homo sapien
ttccatcttgcagttggaatgctcc

SEQ ID NO: 5341230 - DNA, 25 bp, Homo sapien
agtcttgaatctcaaaactgtgcat

SEQ ID NO: 5341231 - DNA, 25 bp, Homo sapien
ttggccctgacagataagcctatct

SEQ ID NO: 5341232 - DNA, 25 bp, Homo sapien
tctgatgtaagtggtattaggccgc

SEQ ID NO: 5341233 - DNA, 25 bp, Homo sapien
aaataccttttgctcacgatgttgg

SEQ ID NO: 5341234 - DNA, 25 bp, Homo sapien
tatgcaaggctgcttgcaatcttta

SEQ ID NO: 5341235 - DNA, 25 bp, Homo sapien
tctaagtgtatgcaaggctgcttgc

SEQ ID NO: 5341236 - DNA, 25 bp, Homo sapien
agcatctaagtgtatgcaaggctgc

SEQ ID NO: 5341237 - DNA, 25 bp, Homo sapien
ggctgcttgcaatctttacgtttca

SEQ ID NO: 5341238 - DNA, 25 bp, Homo sapien
ttttcttcatggctgcactttcgac

SEQ ID NO: 5341239 - DNA, 25 bp, Homo sapien
tcttcatggctgcactttcgacctc

SEQ ID NO: 5341240 - DNA, 25 bp, Homo sapien
gctgcactttcgacctccttttgtt

SEQ ID NO: 5341241 - DNA, 25 bp, Homo sapien
tcatggctgcactttcgacctcctt

SEQ ID NO: 5341242 - DNA, 25 bp, Homo sapien
tgcctctctttttatgtcagtcctc

SEQ ID NO: 5341243 - DNA, 25 bp, Homo sapien
taggtgaaacacaaagggttacata

SEQ ID NO: 5341244 - DNA, 25 bp, Homo sapien
aagttagtatctttccatgatgtca

SEQ ID NO: 5341245 - DNA, 25 bp, Homo sapien
tgaaagtgaatatgacagactccaa

SEQ ID NO: 5341246 - DNA, 25 bp, Homo sapien
tattgccacgccaactatggctgtg

SEQ ID NO: 5341247 - DNA, 25 bp, Homo sapien
cacagatcgttttctattgccacgc

SEQ ID NO: 5341248 - DNA, 25 bp, Homo sapien
gctgtgtctattaaaggtctcactc

SEQ ID NO: 5341249 - DNA, 25 bp, Homo sapien
cttatgcacatcagcaatatcagca

SEQ ID NO: 5341250 - DNA, 25 bp, Homo sapien
tgtaaggctgagtatcacttctctg

SEQ ID NO: 5341251 - DNA, 25 bp, Homo sapien
ggctaaggagcatgttaatttccac

SEQ ID NO: 5341252 - DNA, 25 bp, Homo sapien
tgtatacttaaccactgagcattcc

SEQ ID NO: 5341253 - DNA, 25 bp, Homo sapien
ccaaagaaaacttcaccaggatgta

SEQ ID NO: 5341254 - DNA, 25 bp, Homo sapien
gaagcgctagtccacatgactggtg

SEQ ID NO: 5341255 - DNA, 25 bp, Homo sapien
gctagtgtgtgacacaggtgcctga

SEQ ID NO: 5341256 - DNA, 25 bp, Homo sapien
gctgtggcaacgatgcccgtgtctg

SEQ ID NO: 5341257 - DNA, 25 bp, Homo sapien
ctggtgcaaatgctgtggcaacgat

SEQ ID NO: 5341258 - DNA, 25 bp, Homo sapien
cttgggatggggcacagaaatatct

SEQ ID NO: 5341259 - DNA, 25 bp, Homo sapien
tggggcacagaaatatcttcagttc

SEQ ID NO: 5341260 - DNA, 25 bp, Homo sapien
tgggatggggcacagaaatatcttc

SEQ ID NO: 5341261 - DNA, 25 bp, Homo sapien
ggatggggcacagaaatatcttcag

SEQ ID NO: 5341262 - DNA, 25 bp, Homo sapien
gtgaaactttctctgtagttattct

SEQ ID NO: 5341263 - DNA, 25 bp, Homo sapien
cagtgaaactttctctgtagttatt

SEQ ID NO: 5341264 - DNA, 25 bp, Homo sapien
aactttctctgtagttattctccat

SEQ ID NO: 5341265 - DNA, 25 bp, Homo sapien
gaaactttctctgtagttattctcc

SEQ ID NO: 5341266 - DNA, 25 bp, Homo sapien
taatcttcattagaaggcacaatgg

SEQ ID NO: 5341267 - DNA, 25 bp, Homo sapien
aatcttcattagaaggcacaatgga

SEQ ID NO: 5341268 - DNA, 25 bp, Homo sapien
atccagtggcacatcggtacctcaa

SEQ ID NO: 5341269 - DNA, 25 bp, Homo sapien
tcggtacctcaaccccttgcatcat

SEQ ID NO: 5341270 - DNA, 25 bp, Homo sapien
tttcatgatccagtggcacatcggt

SEQ ID NO: 5341271 - DNA, 25 bp, Homo sapien
tcatgatccagtggcacatcggtac

SEQ ID NO: 5341272 - DNA, 25 bp, Homo sapien
tctcttacttcacccaatacccatc

SEQ ID NO: 5341273 - DNA, 25 bp, Homo sapien
ttacttcacccaatacccatctcac

SEQ ID NO: 5341274 - DNA, 25 bp, Homo sapien
ttctcttacttcacccaatacccat

SEQ ID NO: 5341275 - DNA, 25 bp, Homo sapien
tcttacttcacccaatacccatctc

SEQ ID NO: 5341276 - DNA, 25 bp, Homo sapien
ccttgcagcatggtgctgctccatt

SEQ ID NO: 5341277 - DNA, 25 bp, Homo sapien
tgctgctccatttcagggtcatgcc

SEQ ID NO: 5341278 - DNA, 25 bp, Homo sapien
catggtgctgctccatttcagggtc

SEQ ID NO: 5341279 - DNA, 25 bp, Homo sapien
ctccatttcagggtcatgccttctg

SEQ ID NO: 5341280 - DNA, 25 bp, Homo sapien
tgaggacataagagctatcactctc

SEQ ID NO: 5341281 - DNA, 25 bp, Homo sapien
gagctatcactctccaagttctcag

SEQ ID NO: 5341282 - DNA, 25 bp, Homo sapien
ttgtcctgaggacataagagctatc

SEQ ID NO: 5341283 - DNA, 25 bp, Homo sapien
gacataagagctatcactctccaag

SEQ ID NO: 5341284 - DNA, 25 bp, Homo sapien
gcttctcattaactggccgtttctc

SEQ ID NO: 5341285 - DNA, 25 bp, Homo sapien
ggtcagcttctcattaactggccgt

SEQ ID NO: 5341286 - DNA, 25 bp, Homo sapien
gactttgggataccaatggtcagct

SEQ ID NO: 5341287 - DNA, 25 bp, Homo sapien
ctttgggataccaatggtcagcttc

SEQ ID NO: 5341288 - DNA, 25 bp, Homo sapien
gtgcaactaccaccaatctccccag

SEQ ID NO: 5341289 - DNA, 25 bp, Homo sapien
cacattatttcgactaagattagga

SEQ ID NO: 5341290 - DNA, 25 bp, Homo sapien
cgtctttttatgtagtgtgcaacta

SEQ ID NO: 5341291 - DNA, 25 bp, Homo sapien
gaataaatcccactgaagtatcacc

SEQ ID NO: 5341292 - DNA, 25 bp, Homo sapien
taacgccttagggaacagccttctc

SEQ ID NO: 5341293 - DNA, 25 bp, Homo sapien
gccacggagattgttgcatttcacc

SEQ ID NO: 5341294 - DNA, 25 bp, Homo sapien
tgtgactatggaagtgctgagcagc

SEQ ID NO: 5341295 - DNA, 25 bp, Homo sapien
tctgggccctcttcgtgggtgtgac

SEQ ID NO: 5341296 - DNA, 25 bp, Homo sapien
aactcagaaatgcttgatatgatga

SEQ ID NO: 5341297 - DNA, 25 bp, Homo sapien
aatgaagatagaatcaaagagagaa

SEQ ID NO: 5341298 - DNA, 25 bp, Homo sapien
tgaagatagaatcaaagagagaagc

SEQ ID NO: 5341299 - DNA, 25 bp, Homo sapien
cagaaatgcttgatatgatgaaaaa

SEQ ID NO: 5341300 - DNA, 25 bp, Homo sapien
gcaattctgtccagtagtcttgcac

SEQ ID NO: 5341301 - DNA, 25 bp, Homo sapien
tgtccagtagtcttgcaccagaata

SEQ ID NO: 5341302 - DNA, 25 bp, Homo sapien
ctgtgtactgaacgcacatctgcaa

SEQ ID NO: 5341303 - DNA, 25 bp, Homo sapien
gctgtaagtgcttcagctgtgacct

SEQ ID NO: 5341304 - DNA, 25 bp, Homo sapien
tggaccagctgtccggtgcaatctg

SEQ ID NO: 5341305 - DNA, 25 bp, Homo sapien
tggattggaccagctgtccggtgca

SEQ ID NO: 5341306 - DNA, 25 bp, Homo sapien
accagctgtccggtgcaatctgagg

SEQ ID NO: 5341307 - DNA, 25 bp, Homo sapien
agctgtccggtgcaatctgagggct

SEQ ID NO: 5341308 - DNA, 25 bp, Homo sapien
ggtctttctatgatcagatggaagc

SEQ ID NO: 5341309 - DNA, 25 bp, Homo sapien
agcctcataatctggtctttctatg

SEQ ID NO: 5341310 - DNA, 25 bp, Homo sapien
ttctatgatcagatggaagctcctt

SEQ ID NO: 5341311 - DNA, 25 bp, Homo sapien
tctggtctttctatgatcagatgga

SEQ ID NO: 5341312 - DNA, 25 bp, Homo sapien
gacctttccggatatctgataaata

SEQ ID NO: 5341313 - DNA, 25 bp, Homo sapien
ggcataagccaggtcgatcattgac

SEQ ID NO: 5341314 - DNA, 25 bp, Homo sapien
gatcattgacctttccggatatctg

SEQ ID NO: 5341315 - DNA, 25 bp, Homo sapien
gctgtaggacagtcccgttgttctg

SEQ ID NO: 5341316 - DNA, 25 bp, Homo sapien
gaattcagcatcccaataccacaga

SEQ ID NO: 5341317 - DNA, 25 bp, Homo sapien
ggttcactaactactgaattcagca

SEQ ID NO: 5341318 - DNA, 25 bp, Homo sapien
ctctgcgataattggcaatgaagga

SEQ ID NO: 5341319 - DNA, 25 bp, Homo sapien
caatgaaggaattaaatggttcact

SEQ ID NO: 5341320 - DNA, 25 bp, Homo sapien
tttccttcagagattgctctcatca

SEQ ID NO: 5341321 - DNA, 25 bp, Homo sapien
tgctctcatcagagctacatctttc

SEQ ID NO: 5341322 - DNA, 25 bp, Homo sapien
ctgtatgcttttggccgtgggcaaa

SEQ ID NO: 5341323 - DNA, 25 bp, Homo sapien
tgcttttggccgtgggcaaaatgta

SEQ ID NO: 5341324 - DNA, 25 bp, Homo sapien
gcttttggccgtgggcaaaatgtag

SEQ ID NO: 5341325 - DNA, 25 bp, Homo sapien
aagctgtatgcttttggccgtgggc

SEQ ID NO: 5341326 - DNA, 25 bp, Homo sapien
tatcaacacttaggaccatgaatac

SEQ ID NO: 5341327 - DNA, 25 bp, Homo sapien
gcttaacttctcacataataagtac

SEQ ID NO: 5341328 - DNA, 25 bp, Homo sapien
aatgtatcacaatctgggttatcaa

SEQ ID NO: 5341329 - DNA, 25 bp, Homo sapien
cataataagtacttgttgtgcatct

SEQ ID NO: 5341330 - DNA, 25 bp, Homo sapien
tggactgtagccataattaatgaat

SEQ ID NO: 5341331 - DNA, 25 bp, Homo sapien
cacatggactgtagccataattaat

SEQ ID NO: 5341332 - DNA, 25 bp, Homo sapien
gactgtagccataattaatgaatga

SEQ ID NO: 5341333 - DNA, 25 bp, Homo sapien
attcccacatggactgtagccataa

SEQ ID NO: 5341334 - DNA, 25 bp, Homo sapien
tccggggtttcatccaactccaaca

SEQ ID NO: 5341335 - DNA, 25 bp, Homo sapien
catccaactccaacaaaattaccat

SEQ ID NO: 5341336 - DNA, 25 bp, Homo sapien
tcgtgaaacaggatctaataaccct

SEQ ID NO: 5341337 - DNA, 25 bp, Homo sapien
ctttcatgccttcgtgaaacaggat

SEQ ID NO: 5341338 - DNA, 25 bp, Homo sapien
gccatcaggtagacagcatctatta

SEQ ID NO: 5341339 - DNA, 25 bp, Homo sapien
agccagtcaaatacccttttattgc

SEQ ID NO: 5341340 - DNA, 25 bp, Homo sapien
tcaggtagacagcatctattatgta

SEQ ID NO: 5341341 - DNA, 25 bp, Homo sapien
ttttattgccatcaggtagacagca

SEQ ID NO: 5341342 - DNA, 25 bp, Homo sapien
aagctgaaattctaattattcccta

SEQ ID NO: 5341343 - DNA, 25 bp, Homo sapien
gaaaaagtatcccacttcaccgtca

SEQ ID NO: 5341344 - DNA, 25 bp, Homo sapien
ctcagggaaaaagtatcccacttca

SEQ ID NO: 5341345 - DNA, 25 bp, Homo sapien
ttcaccgtcaacacccaaagctgaa

SEQ ID NO: 5341346 - DNA, 25 bp, Homo sapien
ttttatccgataaagtatatgatca

SEQ ID NO: 5341347 - DNA, 25 bp, Homo sapien
caactatgcaccctgacatctcaga

SEQ ID NO: 5341348 - DNA, 25 bp, Homo sapien
tcagaagagggtaaattagcattct

SEQ ID NO: 5341349 - DNA, 25 bp, Homo sapien
atatgatcaactatgcaccctgaca

SEQ ID NO: 5341350 - DNA, 25 bp, Homo sapien
taaaaattgtaactccagccatgct

SEQ ID NO: 5341351 - DNA, 25 bp, Homo sapien
gcttatatgtattgcaatctttaga

SEQ ID NO: 5341352 - DNA, 25 bp, Homo sapien
ttaatttgggctcatgctaggcaga

SEQ ID NO: 5341353 - DNA, 25 bp, Homo sapien
tgtactgcattctctctatagtgct

SEQ ID NO: 5341354 - DNA, 25 bp, Homo sapien
atttgattgagaagttccagttctg

SEQ ID NO: 5341355 - DNA, 25 bp, Homo sapien
ttgattgagaagttccagttctgaa

SEQ ID NO: 5341356 - DNA, 25 bp, Homo sapien
ttgccgctttaatttgattgagaag

SEQ ID NO: 5341357 - DNA, 25 bp, Homo sapien
ttaatttgattgagaagttccagtt

SEQ ID NO: 5341358 - DNA, 25 bp, Homo sapien
tcaaaagtctcagtagatacaacac

SEQ ID NO: 5341359 - DNA, 25 bp, Homo sapien
ttaatcccgtatgtgagctagctgt

SEQ ID NO: 5341360 - DNA, 25 bp, Homo sapien
ttgactggcgtttgcatttctctag

SEQ ID NO: 5341361 - DNA, 25 bp, Homo sapien
cacacgcagcaggagcttcaatgaa

SEQ ID NO: 5341362 - DNA, 25 bp, Homo sapien
catgcgaaatcattggatgatgtct

SEQ ID NO: 5341363 - DNA, 25 bp, Homo sapien
cccaagtatccttttccggatacat

SEQ ID NO: 5341364 - DNA, 25 bp, Homo sapien
tccttttccggatacatgcgaaatc

SEQ ID NO: 5341365 - DNA, 25 bp, Homo sapien
ccggatacatgcgaaatcattggat

SEQ ID NO: 5341366 - DNA, 25 bp, Homo sapien
tattcattggtgttatatagtggcc

SEQ ID NO: 5341367 - DNA, 25 bp, Homo sapien
taagaccagtcatttcagacacagt

SEQ ID NO: 5341368 - DNA, 25 bp, Homo sapien
ggttaaaagcaagcctattcattgg

SEQ ID NO: 5341369 - DNA, 25 bp, Homo sapien
cacttgttaagcacaccagtttata

SEQ ID NO: 5341370 - DNA, 25 bp, Homo sapien
ttttcatgttgactatctaaaacaa

SEQ ID NO: 5341371 - DNA, 25 bp, Homo sapien
tcatgttgactatctaaaacaatca

SEQ ID NO: 5341372 - DNA, 25 bp, Homo sapien
ttcatgttgactatctaaaacaatc

SEQ ID NO: 5341373 - DNA, 25 bp, Homo sapien
catgttgactatctaaaacaatcat

SEQ ID NO: 5341374 - DNA, 25 bp, Homo sapien
caacaactatgaggtgctacagtgc

SEQ ID NO: 5341375 - DNA, 25 bp, Homo sapien
tcggctgactttgggtgcgaaaagc

SEQ ID NO: 5341376 - DNA, 25 bp, Homo sapien
gaataacaacactagcgacactgcc

SEQ ID NO: 5341377 - DNA, 25 bp, Homo sapien
cacacacaggaaacgcttcggctga

SEQ ID NO: 5341378 - DNA, 25 bp, Homo sapien
cagtggcattatgtagctaggagac

SEQ ID NO: 5341379 - DNA, 25 bp, Homo sapien
tggcttgccagaccctaagaaaggg

SEQ ID NO: 5341380 - DNA, 25 bp, Homo sapien
gaaaggctcagtgctgcaaatcctg

SEQ ID NO: 5341381 - DNA, 25 bp, Homo sapien
gatatgcaacattattggcctgggt

SEQ ID NO: 5341382 - DNA, 25 bp, Homo sapien
atttgaacaccattagcaactgtag

SEQ ID NO: 5341383 - DNA, 25 bp, Homo sapien
cctgtaaatctgctggtttccatct

SEQ ID NO: 5341384 - DNA, 25 bp, Homo sapien
gttgttattatagcctgtaaatctg

SEQ ID NO: 5341385 - DNA, 25 bp, Homo sapien
ctgtagctgctgtgcggtacccgta

SEQ ID NO: 5341386 - DNA, 25 bp, Homo sapien
cgtctctgactctcaaagttacaca

SEQ ID NO: 5341387 - DNA, 25 bp, Homo sapien
catctatcaaacttgtgggcaggag

SEQ ID NO: 5341388 - DNA, 25 bp, Homo sapien
cacttgtaatctgactgacccattg

SEQ ID NO: 5341389 - DNA, 25 bp, Homo sapien
tgcaaatgtattctcactaagcctg

SEQ ID NO: 5341390 - DNA, 25 bp, Homo sapien
agttacactgattcccccagcatgg

SEQ ID NO: 5341391 - DNA, 25 bp, Homo sapien
taaatatagtagctcttgggtccca

SEQ ID NO: 5341392 - DNA, 25 bp, Homo sapien
ttctactggcaaacgcttctgagca

SEQ ID NO: 5341393 - DNA, 25 bp, Homo sapien
ctgtgttgctctgaattctactggc

SEQ ID NO: 5341394 - DNA, 25 bp, Homo sapien
tggagtaccacttccaagtatgaag

SEQ ID NO: 5341395 - DNA, 25 bp, Homo sapien
tctaatgtgctgaccaatctcctct

SEQ ID NO: 5341396 - DNA, 25 bp, Homo sapien
atctctaatgtgctgaccaatctcc

SEQ ID NO: 5341397 - DNA, 25 bp, Homo sapien
agtcttcccgtgatctctaatgtgc

SEQ ID NO: 5341398 - DNA, 25 bp, Homo sapien
tctcctgaatagtcttcccgtgatc

SEQ ID NO: 5341399 - DNA, 25 bp, Homo sapien
ttggtgacagcagtatcattggagt

SEQ ID NO: 5341400 - DNA, 25 bp, Homo sapien
tggtgacagcagtatcattggagtg

SEQ ID NO: 5341401 - DNA, 25 bp, Homo sapien
gtgacagcagtatcattggagtggt

SEQ ID NO: 5341402 - DNA, 25 bp, Homo sapien
acagcagtatcattggagtggtgag

SEQ ID NO: 5341403 - DNA, 25 bp, Homo sapien
ggtggtttttacacttagctgcagt

SEQ ID NO: 5341404 - DNA, 25 bp, Homo sapien
ccacggtggtttttacacttagctg

SEQ ID NO: 5341405 - DNA, 25 bp, Homo sapien
acggtggtttttacacttagctgca

SEQ ID NO: 5341406 - DNA, 25 bp, Homo sapien
cacggtggtttttacacttagctgc

SEQ ID NO: 5341407 - DNA, 25 bp, Homo sapien
gatctcttgcttctctcgctgacac

SEQ ID NO: 5341408 - DNA, 25 bp, Homo sapien
ctcttgcttctctcgctgacactgg

SEQ ID NO: 5341409 - DNA, 25 bp, Homo sapien
ctaagtgctgctgatctcttgcttc

SEQ ID NO: 5341410 - DNA, 25 bp, Homo sapien
aagtgctgctgatctcttgcttctc

SEQ ID NO: 5341411 - DNA, 25 bp, Homo sapien
cactaagatcttggcaattgaattt

SEQ ID NO: 5341412 - DNA, 25 bp, Homo sapien
tgcaaagatgagagttgaatcacta

SEQ ID NO: 5341413 - DNA, 25 bp, Homo sapien
tgaatcactaagatcttggcaattg

SEQ ID NO: 5341414 - DNA, 25 bp, Homo sapien
caaagatgagagttgaatcactaag

SEQ ID NO: 5341415 - DNA, 25 bp, Homo sapien
gcatatcctggactgtgacctacat

SEQ ID NO: 5341416 - DNA, 25 bp, Homo sapien
gctggaccgctggtgttcccaaaca

SEQ ID NO: 5341417 - DNA, 25 bp, Homo sapien
ttctccacgtaggaatgggctccag

SEQ ID NO: 5341418 - DNA, 25 bp, Homo sapien
tgttcccaaggtaaacatgcgctgg

SEQ ID NO: 5341419 - DNA, 25 bp, Homo sapien
ggcatccgaagagcttatgtgttca

SEQ ID NO: 5341420 - DNA, 25 bp, Homo sapien
tgtatggcatccgaagagcttatgt

SEQ ID NO: 5341421 - DNA, 25 bp, Homo sapien
caatatggactgtatggcatccgaa

SEQ ID NO: 5341422 - DNA, 25 bp, Homo sapien
gactgtatggcatccgaagagctta

SEQ ID NO: 5341423 - DNA, 25 bp, Homo sapien
tacattcctacaaaattggttcctg

SEQ ID NO: 5341424 - DNA, 25 bp, Homo sapien
tgcaaggcccaagttacaaatttcc

SEQ ID NO: 5341425 - DNA, 25 bp, Homo sapien
gatccccatagttactgccaagtag

SEQ ID NO: 5341426 - DNA, 25 bp, Homo sapien
gagctctagggatccccatagttac

SEQ ID NO: 5341427 - DNA, 25 bp, Homo sapien
catcttggcgttctaaggtatcaga

SEQ ID NO: 5341428 - DNA, 25 bp, Homo sapien
tatcagattcagaccaccaaacact

SEQ ID NO: 5341429 - DNA, 25 bp, Homo sapien
gcagcaggcattcgtagcatccatt

SEQ ID NO: 5341430 - DNA, 25 bp, Homo sapien
gcacagaaatagcatcttggcgttc

SEQ ID NO: 5341431 - DNA, 25 bp, Homo sapien
tcatgaacagcaaatatagcatcag

SEQ ID NO: 5341432 - DNA, 25 bp, Homo sapien
cagcaaatatagcatcagcttcctt

SEQ ID NO: 5341433 - DNA, 25 bp, Homo sapien
ccttcctgagccttgtgattgttct

SEQ ID NO: 5341434 - DNA, 25 bp, Homo sapien
agtgtgagcccatcatcacatcatg

SEQ ID NO: 5341435 - DNA, 25 bp, Homo sapien
tattttcaagtaggtctactcggca

SEQ ID NO: 5341436 - DNA, 25 bp, Homo sapien
ggtatccactgatgagaacagttgg

SEQ ID NO: 5341437 - DNA, 25 bp, Homo sapien
tgctcccaaccgtagttattttcaa

SEQ ID NO: 5341438 - DNA, 25 bp, Homo sapien
tggtgaaataaagatcatgctccca

SEQ ID NO: 5341439 - DNA, 25 bp, Homo sapien
caggtttagtggcatatgcaactct

SEQ ID NO: 5341440 - DNA, 25 bp, Homo sapien
tcctctaatgtagatatcagcaggt

SEQ ID NO: 5341441 - DNA, 25 bp, Homo sapien
caactctaacaaggatgaaaacact

SEQ ID NO: 5341442 - DNA, 25 bp, Homo sapien
tctagcaggaatcctctaatgtaga

SEQ ID NO: 5341443 - DNA, 25 bp, Homo sapien
ataatgtttcctccacttttgtctg

SEQ ID NO: 5341444 - DNA, 25 bp, Homo sapien
tccacttttgtctgaacagcaatct

SEQ ID NO: 5341445 - DNA, 25 bp, Homo sapien
gcgagcttagcacaaacattaggat

SEQ ID NO: 5341446 - DNA, 25 bp, Homo sapien
ctagccaacaatgagggtattgtaa

SEQ ID NO: 5341447 - DNA, 25 bp, Homo sapien
tctcctaaaatggttggatagtaac

SEQ ID NO: 5341448 - DNA, 25 bp, Homo sapien
ttaggataatagaaaagagatgatg

SEQ ID NO: 5341449 - DNA, 25 bp, Homo sapien
ctgggttagagatagcaacacccag

SEQ ID NO: 5341450 - DNA, 25 bp, Homo sapien
ggttagagatagcaacacccaggga

SEQ ID NO: 5341451 - DNA, 25 bp, Homo sapien
ttccactcttctggagacaattcta

SEQ ID NO: 5341452 - DNA, 25 bp, Homo sapien
gtctgggttagagatagcaacaccc

SEQ ID NO: 5341453 - DNA, 25 bp, Homo sapien
ttttcatcgatgagtaggtattcca

SEQ ID NO: 5341454 - DNA, 25 bp, Homo sapien
cataattgagcttttgactcagccc

SEQ ID NO: 5341455 - DNA, 25 bp, Homo sapien
gcccttgccaggtcaaacagtagtt

SEQ ID NO: 5341456 - DNA, 25 bp, Homo sapien
taaggaaattacataggcctctatt

SEQ ID NO: 5341457 - DNA, 25 bp, Homo sapien
caatagccaggtcacacaatttggg

SEQ ID NO: 5341458 - DNA, 25 bp, Homo sapien
tttcctgcgtagcaacagccctctt

SEQ ID NO: 5341459 - DNA, 25 bp, Homo sapien
tatgagtgcttataatgccaacaga

SEQ ID NO: 5341460 - DNA, 25 bp, Homo sapien
taactgcacatacgcgctttcctgc

SEQ ID NO: 5341461 - DNA, 25 bp, Homo sapien
gctgttcctcgaattccaaaggttg

SEQ ID NO: 5341462 - DNA, 25 bp, Homo sapien
cagattcccgggttgccagtgtatg

SEQ ID NO: 5341463 - DNA, 25 bp, Homo sapien
gaagcaattttcacgatttagcaac

SEQ ID NO: 5341464 - DNA, 25 bp, Homo sapien
tagggtaatactggctggagattgt

SEQ ID NO: 5341465 - DNA, 25 bp, Homo sapien
ccattgctggtttagagtcatcagt

SEQ ID NO: 5341466 - DNA, 25 bp, Homo sapien
tgaagccaaacctggacatgtgtag

SEQ ID NO: 5341467 - DNA, 25 bp, Homo sapien
gctgactctgattggaatatagaag

SEQ ID NO: 5341468 - DNA, 25 bp, Homo sapien
tagagtcatcagtttgaagccaaac

SEQ ID NO: 5341469 - DNA, 25 bp, Homo sapien
ctgatagatccacagcttgcccctg

SEQ ID NO: 5341470 - DNA, 25 bp, Homo sapien
gcaatgagaagtgctgcggctgcca

SEQ ID NO: 5341471 - DNA, 25 bp, Homo sapien
gtgttacttttagctgatagatcca

SEQ ID NO: 5341472 - DNA, 25 bp, Homo sapien
cacgtccatatcttctgacaactct

SEQ ID NO: 5341473 - DNA, 25 bp, Homo sapien
cagaagcatactgttgaagtttggg

SEQ ID NO: 5341474 - DNA, 25 bp, Homo sapien
gaagcatactgttgaagtttgggaa

SEQ ID NO: 5341475 - DNA, 25 bp, Homo sapien
agcatactgttgaagtttgggaatc

SEQ ID NO: 5341476 - DNA, 25 bp, Homo sapien
tcacagaagcatactgttgaagttt

SEQ ID NO: 5341477 - DNA, 25 bp, Homo sapien
aactctctaacatatctcttttcag

SEQ ID NO: 5341478 - DNA, 25 bp, Homo sapien
caactctctaacatatctcttttca

SEQ ID NO: 5341479 - DNA, 25 bp, Homo sapien
acaactctctaacatatctcttttc

SEQ ID NO: 5341480 - DNA, 25 bp, Homo sapien
caacaactctctaacatatctcttt

SEQ ID NO: 5341481 - DNA, 25 bp, Homo sapien
ggagtttgtgcactcagatccttct

SEQ ID NO: 5341482 - DNA, 25 bp, Homo sapien
tcttcagtgtaggagtttgtgcact

SEQ ID NO: 5341483 - DNA, 25 bp, Homo sapien
tgggctcttcagtgtaggagtttgt

SEQ ID NO: 5341484 - DNA, 25 bp, Homo sapien
tgtaggagtttgtgcactcagatcc

SEQ ID NO: 5341485 - DNA, 25 bp, Homo sapien
tttactgtggacatagaatcccatt

SEQ ID NO: 5341486 - DNA, 25 bp, Homo sapien
cagtgccttgcttgaagtaaattga

SEQ ID NO: 5341487 - DNA, 25 bp, Homo sapien
tgtggacatagaatcccattctttc

SEQ ID NO: 5341488 - DNA, 25 bp, Homo sapien
tctcagtgccttgcttgaagtaaat

SEQ ID NO: 5341489 - DNA, 25 bp, Homo sapien
aaatgcccaacattgtcaatctgct

SEQ ID NO: 5341490 - DNA, 25 bp, Homo sapien
aacattgtcaatctgctttcccaac

SEQ ID NO: 5341491 - DNA, 25 bp, Homo sapien
tgcccaacattgtcaatctgctttc

SEQ ID NO: 5341492 - DNA, 25 bp, Homo sapien
ccaacattgtcaatctgctttccca

SEQ ID NO: 5341493 - DNA, 25 bp, Homo sapien
gttgatgctgtcatccatagcacct

SEQ ID NO: 5341494 - DNA, 25 bp, Homo sapien
tagaagctgatattaatggccacag

SEQ ID NO: 5341495 - DNA, 25 bp, Homo sapien
tagcacctctaccaatgcttctggc

SEQ ID NO: 5341496 - DNA, 25 bp, Homo sapien
tattgctaacatggacaatcgtgcc

SEQ ID NO: 5341497 - DNA, 25 bp, Homo sapien
ctgccaatgccggttagtacctgtg

SEQ ID NO: 5341498 - DNA, 25 bp, Homo sapien
acagcactgccaatgccggttagta

SEQ ID NO: 5341499 - DNA, 25 bp, Homo sapien
agcactgccaatgccggttagtacc

SEQ ID NO: 5341500 - DNA, 25 bp, Homo sapien
aatgccggttagtacctgtgtaatc

SEQ ID NO: 5341501 - DNA, 25 bp, Homo sapien
ccaggatgaggtccagaaggtattg

SEQ ID NO: 5341502 - DNA, 25 bp, Homo sapien
gaggtccagaaggtattgaatatca

SEQ ID NO: 5341503 - DNA, 25 bp, Homo sapien
ccagaaggtattgaatatcagagat

SEQ ID NO: 5341504 - DNA, 25 bp, Homo sapien
agcataaaccaggatgaggtccaga

SEQ ID NO: 5341505 - DNA, 25 bp, Homo sapien
gtgcattttcggctatcccctggtg

SEQ ID NO: 5341506 - DNA, 25 bp, Homo sapien
cagtgcattttcggctatcccctgg

SEQ ID NO: 5341507 - DNA, 25 bp, Homo sapien
attttcggctatcccctggtgcctc

SEQ ID NO: 5341508 - DNA, 25 bp, Homo sapien
gcattttcggctatcccctggtgcc

SEQ ID NO: 5341509 - DNA, 25 bp, Homo sapien
tcctctcatcaatacctgtctcatt

SEQ ID NO: 5341510 - DNA, 25 bp, Homo sapien
tggctgctgtgattaccagctctgc

SEQ ID NO: 5341511 - DNA, 25 bp, Homo sapien
aatcctctcatcaatacctgtctca

SEQ ID NO: 5341512 - DNA, 25 bp, Homo sapien
ctgctgtgattaccagctctgcatg

SEQ ID NO: 5341513 - DNA, 25 bp, Homo sapien
ctagcatgcaaaggtaaggacaagg

SEQ ID NO: 5341514 - DNA, 25 bp, Homo sapien
catgcaaaggtaaggacaaggctca

SEQ ID NO: 5341515 - DNA, 25 bp, Homo sapien
aaggtaaggacaaggctcagaaatg

SEQ ID NO: 5341516 - DNA, 25 bp, Homo sapien
aggtaaggacaaggctcagaaatga

SEQ ID NO: 5341517 - DNA, 25 bp, Homo sapien
ggatatcagccctagcatagagcat

SEQ ID NO: 5341518 - DNA, 25 bp, Homo sapien
gaataaagtgatgtcctgtcctcga

SEQ ID NO: 5341519 - DNA, 25 bp, Homo sapien
catagagcatcctatgactgctgaa

SEQ ID NO: 5341520 - DNA, 25 bp, Homo sapien
tgtgaggccattctactttaatacc

SEQ ID NO: 5341521 - DNA, 25 bp, Homo sapien
agcacacattgtatcaccactgtgg

SEQ ID NO: 5341522 - DNA, 25 bp, Homo sapien
cactgtggctctaagtgttaccacc

SEQ ID NO: 5341523 - DNA, 25 bp, Homo sapien
caagaggtagaataactgcagtgcc

SEQ ID NO: 5341524 - DNA, 25 bp, Homo sapien
tggctaccctgacaagcacaagagg

SEQ ID NO: 5341525 - DNA, 25 bp, Homo sapien
gacttagaattggttttcttctcca

SEQ ID NO: 5341526 - DNA, 25 bp, Homo sapien
ttgacttagaattggttttcttctc

SEQ ID NO: 5341527 - DNA, 25 bp, Homo sapien
tgacttagaattggttttcttctcc

SEQ ID NO: 5341528 - DNA, 25 bp, Homo sapien
acttagaattggttttcttctccat

SEQ ID NO: 5341529 - DNA, 25 bp, Homo sapien
agtactcaacttcaactgccttgca

SEQ ID NO: 5341530 - DNA, 25 bp, Homo sapien
gagaccatgtattttcagcaccttg

SEQ ID NO: 5341531 - DNA, 25 bp, Homo sapien
ttgcacctagagatacttctggcgg

SEQ ID NO: 5341532 - DNA, 25 bp, Homo sapien
gattggaggtatcacacacatggat

SEQ ID NO: 5341533 - DNA, 25 bp, Homo sapien
gagtcataatggtaggtggactggt

SEQ ID NO: 5341534 - DNA, 25 bp, Homo sapien
tcatgagtcataatggtaggtggac

SEQ ID NO: 5341535 - DNA, 25 bp, Homo sapien
atgagtcataatggtaggtggactg

SEQ ID NO: 5341536 - DNA, 25 bp, Homo sapien
tttcatgagtcataatggtaggtgg

SEQ ID NO: 5341537 - DNA, 25 bp, Homo sapien
cacatgctcaaatgtgactgttttc

SEQ ID NO: 5341538 - DNA, 25 bp, Homo sapien
gttattgagttcacgtgtgtgtgca

SEQ ID NO: 5341539 - DNA, 25 bp, Homo sapien
cagctctgtgttacggcagttattg

SEQ ID NO: 5341540 - DNA, 25 bp, Homo sapien
tacggcagttattgagttcacgtgt

SEQ ID NO: 5341541 - DNA, 25 bp, Homo sapien
ctttaactcatcaggaacaatttca

SEQ ID NO: 5341542 - DNA, 25 bp, Homo sapien
acaatttcatcagttacatgacttc

SEQ ID NO: 5341543 - DNA, 25 bp, Homo sapien
tacatgacttctgaaaaataagtga

SEQ ID NO: 5341544 - DNA, 25 bp, Homo sapien
ctgaaaaataagtgattaacaatca

SEQ ID NO: 5341545 - DNA, 25 bp, Homo sapien
caggaaaggtctcggaagtcatgat

SEQ ID NO: 5341546 - DNA, 25 bp, Homo sapien
gactggtaggattccacatatggca

SEQ ID NO: 5341547 - DNA, 25 bp, Homo sapien
tacacagcacaacttgactggtagg

SEQ ID NO: 5341548 - DNA, 25 bp, Homo sapien
catgatgggtgcaacagaatataca

SEQ ID NO: 5341549 - DNA, 25 bp, Homo sapien
ggtccaagggtatctcgggactgcc

SEQ ID NO: 5341550 - DNA, 25 bp, Homo sapien
tattttcgtcttgctaccaggatca

SEQ ID NO: 5341551 - DNA, 25 bp, Homo sapien
tcttgtaaaacatagatgggaaggt

SEQ ID NO: 5341552 - DNA, 25 bp, Homo sapien
acagctggtgccctattttcccgga

SEQ ID NO: 5341553 - DNA, 25 bp, Homo sapien
aatgtaatcaagttgttaacaatct

SEQ ID NO: 5341554 - DNA, 25 bp, Homo sapien
ccctaagtgatggagatagttcagc

SEQ ID NO: 5341555 - DNA, 25 bp, Homo sapien
tctatgagagcagcgagggctgcca

SEQ ID NO: 5341556 - DNA, 25 bp, Homo sapien
gcaaccacagggatgtactccaagg

SEQ ID NO: 5341557 - DNA, 25 bp, Homo sapien
tcagaaagcgctaaatgccgcaacc

SEQ ID NO: 5341558 - DNA, 25 bp, Homo sapien
tacaggtgtggcacgcttatatgga

SEQ ID NO: 5341559 - DNA, 25 bp, Homo sapien
ctgtgctacaggtgtggcacgctta

SEQ ID NO: 5341560 - DNA, 25 bp, Homo sapien
ggtgtggcacgcttatatggatgct

SEQ ID NO: 5341561 - DNA, 25 bp, Homo sapien
cacgctgtgctacaggtgtggcacg

SEQ ID NO: 5341562 - DNA, 25 bp, Homo sapien
gggaggtcttccgagggctgcacag

SEQ ID NO: 5341563 - DNA, 25 bp, Homo sapien
agaggaactgctactaagggaggtc

SEQ ID NO: 5341564 - DNA, 25 bp, Homo sapien
tgctactaagggaggtcttccgagg

SEQ ID NO: 5341565 - DNA, 25 bp, Homo sapien
agggagaggaactgctactaaggga

SEQ ID NO: 5341566 - DNA, 25 bp, Homo sapien
gattgcagcaattgtgcaacttctg

SEQ ID NO: 5341567 - DNA, 25 bp, Homo sapien
tgtggattgcagcaattgtgcaact

SEQ ID NO: 5341568 - DNA, 25 bp, Homo sapien
ccctgtggattgcagcaattgtgca

SEQ ID NO: 5341569 - DNA, 25 bp, Homo sapien
tggattgcagcaattgtgcaacttc

SEQ ID NO: 5341570 - DNA, 25 bp, Homo sapien
ggattgaggaggctaagtcggataa

SEQ ID NO: 5341571 - DNA, 25 bp, Homo sapien
tgctcatatagtcctccatctacac

SEQ ID NO: 5341572 - DNA, 25 bp, Homo sapien
ggctgactggattgaggaggctaag

SEQ ID NO: 5341573 - DNA, 25 bp, Homo sapien
ctgactggattgaggaggctaagtc

SEQ ID NO: 5341574 - DNA, 25 bp, Homo sapien
ctttgatcatacaggaagcaaagtg

SEQ ID NO: 5341575 - DNA, 25 bp, Homo sapien
ttgatcatacaggaagcaaagtgca

SEQ ID NO: 5341576 - DNA, 25 bp, Homo sapien
ggaaagctatgggtgcctggcaccc

SEQ ID NO: 5341577 - DNA, 25 bp, Homo sapien
gcctgggaagagaattttagatcta

SEQ ID NO: 5341578 - DNA, 25 bp, Homo sapien
ggttggcgtgtctcgagagccaatt

SEQ ID NO: 5341579 - DNA, 25 bp, Homo sapien
ggagccagcgagattggtcgtctaa

SEQ ID NO: 5341580 - DNA, 25 bp, Homo sapien
gattggtcgtctaaggtatattgcg

SEQ ID NO: 5341581 - DNA, 25 bp, Homo sapien
gaggttgtgcaggaggcaccctaaa

SEQ ID NO: 5341582 - DNA, 25 bp, Homo sapien
tatattgcggccaggcaaccatgca

SEQ ID NO: 5341583 - DNA, 25 bp, Homo sapien
aggtgcagcaggcttatatggatgc

SEQ ID NO: 5341584 - DNA, 25 bp, Homo sapien
tccaatgagagagcttataaccgta

SEQ ID NO: 5341585 - DNA, 25 bp, Homo sapien
cacaaaggctatagttaaattattt

SEQ ID NO: 5341586 - DNA, 25 bp, Homo sapien
gagagcttataaccgtaggattgat

SEQ ID NO: 5341587 - DNA, 25 bp, Homo sapien
tttctctttgccaatcacaaaggct

SEQ ID NO: 5341588 - DNA, 25 bp, Homo sapien
tgtctccttaagaaccaagcatgct

SEQ ID NO: 5341589 - DNA, 25 bp, Homo sapien
cttaagaaccaagcatgctagaaag

SEQ ID NO: 5341590 - DNA, 25 bp, Homo sapien
cttatctgtctccttaagaaccaag

SEQ ID NO: 5341591 - DNA, 25 bp, Homo sapien
gaaccaagcatgctagaaagcagag

SEQ ID NO: 5341592 - DNA, 25 bp, Homo sapien
gatttgctctattgattccaaattc

SEQ ID NO: 5341593 - DNA, 25 bp, Homo sapien
tactcatggtcctaaaccatggaat

SEQ ID NO: 5341594 - DNA, 25 bp, Homo sapien
ccatggaatgagactattgaagact

SEQ ID NO: 5341595 - DNA, 25 bp, Homo sapien
cgacaggtctggcatataagcgtac

SEQ ID NO: 5341596 - DNA, 25 bp, Homo sapien
ccttagcagactcaacaggcccttg

SEQ ID NO: 5341597 - DNA, 25 bp, Homo sapien
gcagactcaacaggcccttgcacaa

SEQ ID NO: 5341598 - DNA, 25 bp, Homo sapien
gatggggcccacagcaaggttggat

SEQ ID NO: 5341599 - DNA, 25 bp, Homo sapien
ttagcagactcaacaggcccttgca

SEQ ID NO: 5341600 - DNA, 25 bp, Homo sapien
gtgctataattataagcaaagggag

SEQ ID NO: 5341601 - DNA, 25 bp, Homo sapien
tgctataattataagcaaagggaga

SEQ ID NO: 5341602 - DNA, 25 bp, Homo sapien
agataccaccaacatagcatcagct

SEQ ID NO: 5341603 - DNA, 25 bp, Homo sapien
agtagataccaccaacatagcatca

SEQ ID NO: 5341604 - DNA, 25 bp, Homo sapien
tagataccaccaacatagcatcagc

SEQ ID NO: 5341605 - DNA, 25 bp, Homo sapien
gtagataccaccaacatagcatcag

SEQ ID NO: 5341606 - DNA, 25 bp, Homo sapien
taagtccatgagagccataagcagt

SEQ ID NO: 5341607 - DNA, 25 bp, Homo sapien
accttgagataagtccatgagagcc

SEQ ID NO: 5341608 - DNA, 25 bp, Homo sapien
ataagcagttcccaaccaccagcgt

SEQ ID NO: 5341609 - DNA, 25 bp, Homo sapien
gagataagtccatgagagccataag

SEQ ID NO: 5341610 - DNA, 25 bp, Homo sapien
aattgtaatcattaggtctactacc

SEQ ID NO: 5341611 - DNA, 25 bp, Homo sapien
tcctcctttgtccaaggcaaaattg

SEQ ID NO: 5341612 - DNA, 25 bp, Homo sapien
taattatagtatttgtctcctcctt

SEQ ID NO: 5341613 - DNA, 25 bp, Homo sapien
ttaggtctactacccaaggctgcta

SEQ ID NO: 5341614 - DNA, 25 bp, Homo sapien
tgtcaagtcgaagcatggcgtctgg

SEQ ID NO: 5341615 - DNA, 25 bp, Homo sapien
aagtcgaagcatggcgtctggagaa

SEQ ID NO: 5341616 - DNA, 25 bp, Homo sapien
aggaatgtcaagtcgaagcatggcg

SEQ ID NO: 5341617 - DNA, 25 bp, Homo sapien
tcgaagcatggcgtctggagaaaga

SEQ ID NO: 5341618 - DNA, 25 bp, Homo sapien
cctcttgtgacgaggaaatagtcag

SEQ ID NO: 5341619 - DNA, 25 bp, Homo sapien
cttgtgacgaggaaatagtcaggct

SEQ ID NO: 5341620 - DNA, 25 bp, Homo sapien
ttgtgacgaggaaatagtcaggctt

SEQ ID NO: 5341621 - DNA, 25 bp, Homo sapien
tcttgtgacgaggaaatagtcaggc

SEQ ID NO: 5341622 - DNA, 25 bp, Homo sapien
tggcctttcccacttgcaaatggaa

SEQ ID NO: 5341623 - DNA, 25 bp, Homo sapien
atgatggcctttcccacttgcaaat

SEQ ID NO: 5341624 - DNA, 25 bp, Homo sapien
gatggcctttcccacttgcaaatgg

SEQ ID NO: 5341625 - DNA, 25 bp, Homo sapien
cctttcccacttgcaaatggaaagc

SEQ ID NO: 5341626 - DNA, 25 bp, Homo sapien
tgcataaacaccaacccaaactgct

SEQ ID NO: 5341627 - DNA, 25 bp, Homo sapien
caacccaaactgctatgattttagc

SEQ ID NO: 5341628 - DNA, 25 bp, Homo sapien
gtgcacatgtgcataaacaccaacc

SEQ ID NO: 5341629 - DNA, 25 bp, Homo sapien
cccaaactgctatgattttagcaat

SEQ ID NO: 5341630 - DNA, 25 bp, Homo sapien
cattggagaagcttagggaataatc

SEQ ID NO: 5341631 - DNA, 25 bp, Homo sapien
ccactttggtaaccaagaactcact

SEQ ID NO: 5341632 - DNA, 25 bp, Homo sapien
agaactcactatcattggagaagct

SEQ ID NO: 5341633 - DNA, 25 bp, Homo sapien
cagagtttctcagaagtcaattgtc

SEQ ID NO: 5341634 - DNA, 25 bp, Homo sapien
ccaccttggtgcacggaatgcagta

SEQ ID NO: 5341635 - DNA, 25 bp, Homo sapien
tcactgaaaccgcagaaggaggtct

SEQ ID NO: 5341636 - DNA, 25 bp, Homo sapien
aagacatagtcgtgggcttcgatgc

SEQ ID NO: 5341637 - DNA, 25 bp, Homo sapien
caaagccttctctgtcagtaccagg

SEQ ID NO: 5341638 - DNA, 25 bp, Homo sapien
cctgatgttcatagacaagagcccg

SEQ ID NO: 5341639 - DNA, 25 bp, Homo sapien
ccactgttgactgaagtagtgggct

SEQ ID NO: 5341640 - DNA, 25 bp, Homo sapien
agagcccgtacaaagtggtcccact

SEQ ID NO: 5341641 - DNA, 25 bp, Homo sapien
tatacctaactgaagaaggcccaaa

SEQ ID NO: 5341642 - DNA, 25 bp, Homo sapien
gctttgctggtcctcagtatcttcc

SEQ ID NO: 5341643 - DNA, 25 bp, Homo sapien
cagctatccaaaatggtggctttgc

SEQ ID NO: 5341644 - DNA, 25 bp, Homo sapien
gacttctccagaacaaagcagctat

SEQ ID NO: 5341645 - DNA, 25 bp, Homo sapien
tcatccgtggggcagtcaaagactt

SEQ ID NO: 5341646 - DNA, 25 bp, Homo sapien
aagaatgacatataagaagttccaa

SEQ ID NO: 5341647 - DNA, 25 bp, Homo sapien
gaatgacatataagaagttccaaac

SEQ ID NO: 5341648 - DNA, 25 bp, Homo sapien
atttcatgcctccatagcaagaatg

SEQ ID NO: 5341649 - DNA, 25 bp, Homo sapien
cagtatttcatgcctccatagcaag

SEQ ID NO: 5341650 - DNA, 25 bp, Homo sapien
tttggagaaatccacttatttcctg

SEQ ID NO: 5341651 - DNA, 25 bp, Homo sapien
gtgcattgttgatacatagtgtcac

SEQ ID NO: 5341652 - DNA, 25 bp, Homo sapien
acatagtgtcactattccataatgg

SEQ ID NO: 5341653 - DNA, 25 bp, Homo sapien
ctttttgcgtatgaatgctgtgtgt

SEQ ID NO: 5341654 - DNA, 25 bp, Homo sapien
tttttgcgtatgaatgctgtgtgtc

SEQ ID NO: 5341655 - DNA, 25 bp, Homo sapien
cagtattgaattgaccaatcactgt

SEQ ID NO: 5341656 - DNA, 25 bp, Homo sapien
tattgaattgaccaatcactgtttg

SEQ ID NO: 5341657 - DNA, 25 bp, Homo sapien
agtattgaattgaccaatcactgtt

SEQ ID NO: 5341658 - DNA, 25 bp, Homo sapien
gtattgaattgaccaatcactgttt

SEQ ID NO: 5341659 - DNA, 25 bp, Homo sapien
gagagttcccgtctgaatcttcagc

SEQ ID NO: 5341660 - DNA, 25 bp, Homo sapien
gaggcttgttatcgacttccagatc

SEQ ID NO: 5341661 - DNA, 25 bp, Homo sapien
cggcacacgcgaacatttataaaaa

SEQ ID NO: 5341662 - DNA, 25 bp, Homo sapien
tccaccttcactctgtgagagttcc

SEQ ID NO: 5341663 - DNA, 25 bp, Homo sapien
tatcttgttcacacgctcctagttt

SEQ ID NO: 5341664 - DNA, 25 bp, Homo sapien
tatcaaccaaaggatttacacagct

SEQ ID NO: 5341665 - DNA, 25 bp, Homo sapien
cagtctagggcgtttatcttgttca

SEQ ID NO: 5341666 - DNA, 25 bp, Homo sapien
tcaggatcctgggtagcttcttcag

SEQ ID NO: 5341667 - DNA, 25 bp, Homo sapien
cttctgttgcagacgtggagaaaca

SEQ ID NO: 5341668 - DNA, 25 bp, Homo sapien
cccaggatttccctgaagccaagag

SEQ ID NO: 5341669 - DNA, 25 bp, Homo sapien
caagagtctgcccaattcctctctg

SEQ ID NO: 5341670 - DNA, 25 bp, Homo sapien
tagtgaagacagctgtcaggcacat

SEQ ID NO: 5341671 - DNA, 25 bp, Homo sapien
ccagtggcttttctactaacaagct

SEQ ID NO: 5341672 - DNA, 25 bp, Homo sapien
tgaacaggctctttcactccacctg

SEQ ID NO: 5341673 - DNA, 25 bp, Homo sapien
tactaacaagctgccaagtctggaa

SEQ ID NO: 5341674 - DNA, 25 bp, Homo sapien
ttctgttttagctgacaaccaaaac

SEQ ID NO: 5341675 - DNA, 25 bp, Homo sapien
tacatttgtgtctcgtggcctctgg

SEQ ID NO: 5341676 - DNA, 25 bp, Homo sapien
cagtgagtgcgtatcttctaccagg

SEQ ID NO: 5341677 - DNA, 25 bp, Homo sapien
taagcgaaccttccatccggtgcag

SEQ ID NO: 5341678 - DNA, 25 bp, Homo sapien
taaagagcaggaatgcgggttccct

SEQ ID NO: 5341679 - DNA, 25 bp, Homo sapien
agtaaaaacagcttcctgcaccagc

SEQ ID NO: 5341680 - DNA, 25 bp, Homo sapien
taccaaagtaaaaacagcttcctgc

SEQ ID NO: 5341681 - DNA, 25 bp, Homo sapien
ctaccaaagtaaaaacagcttcctg

SEQ ID NO: 5341682 - DNA, 25 bp, Homo sapien
caaagtaaaaacagcttcctgcacc

SEQ ID NO: 5341683 - DNA, 25 bp, Homo sapien
tatgacagactggttgcaaaatgcc

SEQ ID NO: 5341684 - DNA, 25 bp, Homo sapien
tcccattctgattttgtgctctatg

SEQ ID NO: 5341685 - DNA, 25 bp, Homo sapien
ttgtgctctatgacagactggttgc

SEQ ID NO: 5341686 - DNA, 25 bp, Homo sapien
ctggttgcaaaatgcccataaccat

SEQ ID NO: 5341687 - DNA, 25 bp, Homo sapien
ccgaaaagtatagcgtggcaaccca

SEQ ID NO: 5341688 - DNA, 25 bp, Homo sapien
gcaagactagctcaccgaaatggcc

SEQ ID NO: 5341689 - DNA, 25 bp, Homo sapien
aaatggccgcgtccagtcaaggaaa

SEQ ID NO: 5341690 - DNA, 25 bp, Homo sapien
cactggatggtgcacgggttttata

SEQ ID NO: 5341691 - DNA, 25 bp, Homo sapien
taacacaggtctggcatccacaatg

SEQ ID NO: 5341692 - DNA, 25 bp, Homo sapien
tagatgaaagaatggattggatcca

SEQ ID NO: 5341693 - DNA, 25 bp, Homo sapien
agcagccctgattcagtattctctg

SEQ ID NO: 5341694 - DNA, 25 bp, Homo sapien
cagatctcagggtgcataacacagg

SEQ ID NO: 5341695 - DNA, 25 bp, Homo sapien
ggtccacagtcattggtcctgagcc

SEQ ID NO: 5341696 - DNA, 25 bp, Homo sapien
cctgagcctatgcagggttgggtct

SEQ ID NO: 5341697 - DNA, 25 bp, Homo sapien
cattggtcctgagcctatgcagggt

SEQ ID NO: 5341698 - DNA, 25 bp, Homo sapien
acccaggtccacagtcattggtcct

SEQ ID NO: 5341699 - DNA, 25 bp, Homo sapien
gtacatggaagatttcataatagcc

SEQ ID NO: 5341700 - DNA, 25 bp, Homo sapien
tcataatagccaagaggtcctaacc

SEQ ID NO: 5341701 - DNA, 25 bp, Homo sapien
tggacaaaacggaggctttcatctc

SEQ ID NO: 5341702 - DNA, 25 bp, Homo sapien
gaatcacacttgttaagtacatgga

SEQ ID NO: 5341703 - DNA, 25 bp, Homo sapien
gcaatgtagtgtacagagggaccca

SEQ ID NO: 5341704 - DNA, 25 bp, Homo sapien
ccacaggagggaaagaccagtgaca

SEQ ID NO: 5341705 - DNA, 25 bp, Homo sapien
gtccaaggcaaagcactgtgtcatg

SEQ ID NO: 5341706 - DNA, 25 bp, Homo sapien
aatctggttctttgaggtccaaggc

SEQ ID NO: 5341707 - DNA, 25 bp, Homo sapien
caagccaaacctgtccaattagagg

SEQ ID NO: 5341708 - DNA, 25 bp, Homo sapien
tccaattagaggactgcttctgtgt

SEQ ID NO: 5341709 - DNA, 25 bp, Homo sapien
cccaagccaaacctgtccaattaga

SEQ ID NO: 5341710 - DNA, 25 bp, Homo sapien
gggtggccgactggaccacatgcag

SEQ ID NO: 5341711 - DNA, 25 bp, Homo sapien
gggagccgcaccacaaatgcttgtt

SEQ ID NO: 5341712 - DNA, 25 bp, Homo sapien
tctgccacgtcagaaagcaagccaa

SEQ ID NO: 5341713 - DNA, 25 bp, Homo sapien
ctccgagagagcatctgccacgtca

SEQ ID NO: 5341714 - DNA, 25 bp, Homo sapien
agggagccgcaccacaaatgcttgt

SEQ ID NO: 5341715 - DNA, 25 bp, Homo sapien
tccctatcccatggacatgtgtctg

SEQ ID NO: 5341716 - DNA, 25 bp, Homo sapien
ccctatcccatggacatgtgtctgc

SEQ ID NO: 5341717 - DNA, 25 bp, Homo sapien
tcacttctagcagcgattactccag

SEQ ID NO: 5341718 - DNA, 25 bp, Homo sapien
cagcgattactccaggttcagggca

SEQ ID NO: 5341719 - DNA, 25 bp, Homo sapien
ggttcagggcacacagcagaattca

SEQ ID NO: 5341720 - DNA, 25 bp, Homo sapien
gattactccaggttcagggcacaca

SEQ ID NO: 5341721 - DNA, 25 bp, Homo sapien
gactccccaaataatcaagttccaa

SEQ ID NO: 5341722 - DNA, 25 bp, Homo sapien
ttccaaatcaccttggccccacagg

SEQ ID NO: 5341723 - DNA, 25 bp, Homo sapien
acaggctgcagacctcatttaatcc

SEQ ID NO: 5341724 - DNA, 25 bp, Homo sapien
ttgtaaatattctgactccccaaat

SEQ ID NO: 5341725 - DNA, 25 bp, Homo sapien
tatctaacatctagtttctccccaa

SEQ ID NO: 5341726 - DNA, 25 bp, Homo sapien
cacagtatctaacatctagtttctc

SEQ ID NO: 5341727 - DNA, 25 bp, Homo sapien
ctcccacagtatctaacatctagtt

SEQ ID NO: 5341728 - DNA, 25 bp, Homo sapien
atggacctgctgctacactggccat

SEQ ID NO: 5341729 - DNA, 25 bp, Homo sapien
aagtaggagatgcaaagccagaagg

SEQ ID NO: 5341730 - DNA, 25 bp, Homo sapien
caaagtaggagatgcaaagccagaa

SEQ ID NO: 5341731 - DNA, 25 bp, Homo sapien
ctaatgtccataccaagagtcagac

SEQ ID NO: 5341732 - DNA, 25 bp, Homo sapien
tccataccaagagtcagaccaggaa

SEQ ID NO: 5341733 - DNA, 25 bp, Homo sapien
cagtaagtgctaaaggctctaccga

SEQ ID NO: 5341734 - DNA, 25 bp, Homo sapien
taattgtgattgttgagtgttaatg

SEQ ID NO: 5341735 - DNA, 25 bp, Homo sapien
gattgttgagtgttaatgtgtttaa

SEQ ID NO: 5341736 - DNA, 25 bp, Homo sapien
aggctctaccgaggaaataaaagtg

SEQ ID NO: 5341737 - DNA, 25 bp, Homo sapien
gataagatcatgaccaagtggcaat

SEQ ID NO: 5341738 - DNA, 25 bp, Homo sapien
taaaagtaaacaaggctgtgcatag

SEQ ID NO: 5341739 - DNA, 25 bp, Homo sapien
gttgatccatcaatgtacgacaagg

SEQ ID NO: 5341740 - DNA, 25 bp, Homo sapien
caagaagataaagatcaatacccct

SEQ ID NO: 5341741 - DNA, 25 bp, Homo sapien
gattaatcagtggacaacagaagca

SEQ ID NO: 5341742 - DNA, 25 bp, Homo sapien
tgcaagaccagtgtcaggcacatag

SEQ ID NO: 5341743 - DNA, 25 bp, Homo sapien
tgtctacgtgatccattccacagtt

SEQ ID NO: 5341744 - DNA, 25 bp, Homo sapien
aactgctgctgggttacatgtctac

SEQ ID NO: 5341745 - DNA, 25 bp, Homo sapien
catagcatcttcctcttttcaaatt

SEQ ID NO: 5341746 - DNA, 25 bp, Homo sapien
tcatagcatcttcctcttttcaaat

SEQ ID NO: 5341747 - DNA, 25 bp, Homo sapien
atagcatcttcctcttttcaaattc

SEQ ID NO: 5341748 - DNA, 25 bp, Homo sapien
gcctgaatttcacgaaacagatgca

SEQ ID NO: 5341749 - DNA, 25 bp, Homo sapien
gaagaaaaatgtaccaggatgaggg

SEQ ID NO: 5341750 - DNA, 25 bp, Homo sapien
tctgtagtgctatatacatgaaccc

SEQ ID NO: 5341751 - DNA, 25 bp, Homo sapien
gaacccttctaagaaggcaatggaa

SEQ ID NO: 5341752 - DNA, 25 bp, Homo sapien
ggtacctattttcagcatgcttaag

SEQ ID NO: 5341753 - DNA, 25 bp, Homo sapien
ggagagagagccttaaatgatcact

SEQ ID NO: 5341754 - DNA, 25 bp, Homo sapien
catagtgttatattccaagagcagg

SEQ ID NO: 5341755 - DNA, 25 bp, Homo sapien
gcaaagaagaccaccaaatcaggat

SEQ ID NO: 5341756 - DNA, 25 bp, Homo sapien
tccaggtatccagtgtggccacaca

SEQ ID NO: 5341757 - DNA, 25 bp, Homo sapien
tgcaggagacatactgaccacaact

SEQ ID NO: 5341758 - DNA, 25 bp, Homo sapien
taaaccagcaatgaaggacactaca

SEQ ID NO: 5341759 - DNA, 25 bp, Homo sapien
cccaggaggagcagttaaaccagca

SEQ ID NO: 5341760 - DNA, 25 bp, Homo sapien
gaccacaactcctgcactctgaagg

SEQ ID NO: 5341761 - DNA, 25 bp, Homo sapien
taacaaaagctgcacgaccttggac

SEQ ID NO: 5341762 - DNA, 25 bp, Homo sapien
tccattaagagataccataggccag

SEQ ID NO: 5341763 - DNA, 25 bp, Homo sapien
tggaacctgagagctttcacttagg

SEQ ID NO: 5341764 - DNA, 25 bp, Homo sapien
gattgatgcccaaaagccctttcca

SEQ ID NO: 5341765 - DNA, 25 bp, Homo sapien
tcttctgcattaccaccaatttcac

SEQ ID NO: 5341766 - DNA, 25 bp, Homo sapien
aatcaatatgatgccttctgtggca

SEQ ID NO: 5341767 - DNA, 25 bp, Homo sapien
tctgtggcagaatcgttcaaaaaga

SEQ ID NO: 5341768 - DNA, 25 bp, Homo sapien
tcaaaaagatttcgaggcagtcaat

SEQ ID NO: 5341769 - DNA, 25 bp, Homo sapien
gtgagtgacagtgagtaccctgact

SEQ ID NO: 5341770 - DNA, 25 bp, Homo sapien
tctagggctgtaacgaagacaaccc

SEQ ID NO: 5341771 - DNA, 25 bp, Homo sapien
taccctgactgctcgtgttctggat

SEQ ID NO: 5341772 - DNA, 25 bp, Homo sapien
acaagttttaagacacaagtgccag

SEQ ID NO: 5341773 - DNA, 25 bp, Homo sapien
gattgatttctttcttttcactgca

SEQ ID NO: 5341774 - DNA, 25 bp, Homo sapien
tgagggcaggattgatttctttctt

SEQ ID NO: 5341775 - DNA, 25 bp, Homo sapien
tgatttctttcttttcactgcatct

SEQ ID NO: 5341776 - DNA, 25 bp, Homo sapien
ggattgatttctttcttttcactgc

SEQ ID NO: 5341777 - DNA, 25 bp, Homo sapien
tggaagaagagaaccggcatttatt

SEQ ID NO: 5341778 - DNA, 25 bp, Homo sapien
tattaagtgccaaccgtgtgtcaag

SEQ ID NO: 5341779 - DNA, 25 bp, Homo sapien
gaaggaatcggtaagcctgtttcaa

SEQ ID NO: 5341780 - DNA, 25 bp, Homo sapien
tatgctttggcacacgttagatctg

SEQ ID NO: 5341781 - DNA, 25 bp, Homo sapien
ataaggctctaacagtacaattttc

SEQ ID NO: 5341782 - DNA, 25 bp, Homo sapien
caataaggctctaacagtacaattt

SEQ ID NO: 5341783 - DNA, 25 bp, Homo sapien
taaggctctaacagtacaattttcc

SEQ ID NO: 5341784 - DNA, 25 bp, Homo sapien
cagtacaattttccagctcagaggc

SEQ ID NO: 5341785 - DNA, 25 bp, Homo sapien
gcactgatgaacataatggcaatga

SEQ ID NO: 5341786 - DNA, 25 bp, Homo sapien
gatcgtaacatccttttcataagag

SEQ ID NO: 5341787 - DNA, 25 bp, Homo sapien
ttcttcagagcaatcaaaccaagtg

SEQ ID NO: 5341788 - DNA, 25 bp, Homo sapien
gcttcgggagccacgtgttccaaga

SEQ ID NO: 5341789 - DNA, 25 bp, Homo sapien
aagtcagggtgccagatctggacac

SEQ ID NO: 5341790 - DNA, 25 bp, Homo sapien
tggtgaactgcttcataagtcaggg

SEQ ID NO: 5341791 - DNA, 25 bp, Homo sapien
aacttgcgttgtttggtgaactgct

SEQ ID NO: 5341792 - DNA, 25 bp, Homo sapien
aaagactgccccaatccaacttgcg

SEQ ID NO: 5341793 - DNA, 25 bp, Homo sapien
tctttatgaagaagctagtatcagt

SEQ ID NO: 5341794 - DNA, 25 bp, Homo sapien
tgccatcaaaatcaatagtatcttc

SEQ ID NO: 5341795 - DNA, 25 bp, Homo sapien
ctaaattaccaaacacttcgagtga

SEQ ID NO: 5341796 - DNA, 25 bp, Homo sapien
aggaaaggcttaaattcaagcaggg

SEQ ID NO: 5341797 - DNA, 25 bp, Homo sapien
acatctggattaggtgtgcgccgag

SEQ ID NO: 5341798 - DNA, 25 bp, Homo sapien
aaactcctgccttggagcaactctg

SEQ ID NO: 5341799 - DNA, 25 bp, Homo sapien
cagggtgtccatggtttactttcct

SEQ ID NO: 5341800 - DNA, 25 bp, Homo sapien
tgcttggctgagcttccagaaaggt

SEQ ID NO: 5341801 - DNA, 25 bp, Homo sapien
cagggcaggtagaattcttgtcaac

SEQ ID NO: 5341802 - DNA, 25 bp, Homo sapien
taagttacctcaacttccgtgctac

SEQ ID NO: 5341803 - DNA, 25 bp, Homo sapien
ttcaaagaatggtgtgtacgtaact

SEQ ID NO: 5341804 - DNA, 25 bp, Homo sapien
tactaatgcgtactaagtgtgtgac

SEQ ID NO: 5341805 - DNA, 25 bp, Homo sapien
caataacttcaggttctacatacca

SEQ ID NO: 5341806 - DNA, 25 bp, Homo sapien
tctaaggagactacctgctggcctg

SEQ ID NO: 5341807 - DNA, 25 bp, Homo sapien
actgccttgggatggaacgaacaca

SEQ ID NO: 5341808 - DNA, 25 bp, Homo sapien
aagacagtgcctccgatcaacagct

SEQ ID NO: 5341809 - DNA, 25 bp, Homo sapien
gaatggcctacagcaacctacaggt

SEQ ID NO: 5341810 - DNA, 25 bp, Homo sapien
gcaaggctgtagagaaactggatca

SEQ ID NO: 5341811 - DNA, 25 bp, Homo sapien
cttaaactggatagcaattcagcag

SEQ ID NO: 5341812 - DNA, 25 bp, Homo sapien
gctacactggatagcaatttagcag

SEQ ID NO: 5341813 - DNA, 25 bp, Homo sapien
ttgctggtagacatggaaaatggca

SEQ ID NO: 5341814 - DNA, 25 bp, Homo sapien
ggcacgtgactagaaaagggtaaca

SEQ ID NO: 5341815 - DNA, 25 bp, Homo sapien
cagctgtaattgtaataggccaaac

SEQ ID NO: 5341816 - DNA, 25 bp, Homo sapien
cattgatacacaacaagctggatga

SEQ ID NO: 5341817 - DNA, 25 bp, Homo sapien
tctgactataaataggcaatcccag

SEQ ID NO: 5341818 - DNA, 25 bp, Homo sapien
tggccaggcatgatgccaattttac

SEQ ID NO: 5341819 - DNA, 25 bp, Homo sapien
tccttttttgtgaatatggccaggc

SEQ ID NO: 5341820 - DNA, 25 bp, Homo sapien
ccaggcatgatgccaattttacatt

SEQ ID NO: 5341821 - DNA, 25 bp, Homo sapien
caatccttccttttttgtgaatatg

SEQ ID NO: 5341822 - DNA, 25 bp, Homo sapien
tcaaagctgtttagccttgtgagag

SEQ ID NO: 5341823 - DNA, 25 bp, Homo sapien
ccttgtgagaggcttaatctgagtt

SEQ ID NO: 5341824 - DNA, 25 bp, Homo sapien
tgagaggcttaatctgagtttcttt

SEQ ID NO: 5341825 - DNA, 25 bp, Homo sapien
caaagctgtttagccttgtgagagg

SEQ ID NO: 5341826 - DNA, 25 bp, Homo sapien
ttgactcgtaccatgtcctgctggg

SEQ ID NO: 5341827 - DNA, 25 bp, Homo sapien
cataaatgacagaagccgttgctcc

SEQ ID NO: 5341828 - DNA, 25 bp, Homo sapien
cagcaaaaggcggaggaacataaat

SEQ ID NO: 5341829 - DNA, 25 bp, Homo sapien
ttcagtgatacacacaaccaaggga

SEQ ID NO: 5341830 - DNA, 25 bp, Homo sapien
tggtgccatattccaatgcctgctg

SEQ ID NO: 5341831 - DNA, 25 bp, Homo sapien
ctccttcacagtattaaagacaggt

SEQ ID NO: 5341832 - DNA, 25 bp, Homo sapien
gacaggtaagcccagatgtgtctgg

SEQ ID NO: 5341833 - DNA, 25 bp, Homo sapien
ggttcctccaacgagtttggtgcca

SEQ ID NO: 5341834 - DNA, 25 bp, Homo sapien
gtcccaggccatcatcccagagaaa

SEQ ID NO: 5341835 - DNA, 25 bp, Homo sapien
catcatcccagagaaagtataagat

SEQ ID NO: 5341836 - DNA, 25 bp, Homo sapien
aaagagtatgagagaatgaatataa

SEQ ID NO: 5341837 - DNA, 25 bp, Homo sapien
tctcagtatccatgagcctctctgg

SEQ ID NO: 5341838 - DNA, 25 bp, Homo sapien
ttgccagtgaaaccctggcaaataa

SEQ ID NO: 5341839 - DNA, 25 bp, Homo sapien
catagagatgttgccgagaagctgt

SEQ ID NO: 5341840 - DNA, 25 bp, Homo sapien
aggaacaatgccgaattccattctg

SEQ ID NO: 5341841 - DNA, 25 bp, Homo sapien
tgttgccgagaagctgtgtaggaac

SEQ ID NO: 5341842 - DNA, 25 bp, Homo sapien
gaatgctgtagttgccacatcctag

SEQ ID NO: 5341843 - DNA, 25 bp, Homo sapien
catcatcgcaggaatcagacaggcc

SEQ ID NO: 5341844 - DNA, 25 bp, Homo sapien
cagcttaaccttgggactgcgtccc

SEQ ID NO: 5341845 - DNA, 25 bp, Homo sapien
tacatttgtaaaggcgcagccctca

SEQ ID NO: 5341846 - DNA, 25 bp, Homo sapien
gaccagtaccatgctcctaaccaat

SEQ ID NO: 5341847 - DNA, 25 bp, Homo sapien
tctatggtcaaagagcacctgccca

SEQ ID NO: 5341848 - DNA, 25 bp, Homo sapien
ggagagactcaaaccatgggccttg

SEQ ID NO: 5341849 - DNA, 25 bp, Homo sapien
tactggtcctctttaccacagatag

SEQ ID NO: 5341850 - DNA, 25 bp, Homo sapien
caccgtgccaggccacttttccttt

SEQ ID NO: 5341851 - DNA, 25 bp, Homo sapien
ccaccgtgccaggccacttttcctt

SEQ ID NO: 5341852 - DNA, 25 bp, Homo sapien
tcagcgtgtctcaaagactagcaac

SEQ ID NO: 5341853 - DNA, 25 bp, Homo sapien
aagactagcaaccttgggtactaag

SEQ ID NO: 5341854 - DNA, 25 bp, Homo sapien
tgtctcaaagactagcaaccttggg

SEQ ID NO: 5341855 - DNA, 25 bp, Homo sapien
ttttccatagtcagcgtgtctcaaa

SEQ ID NO: 5341856 - DNA, 25 bp, Homo sapien
gaagctgcgcgacaggagacgggcg

SEQ ID NO: 5341857 - DNA, 25 bp, Homo sapien
ggaggaagctgcgcgacaggagacg

SEQ ID NO: 5341858 - DNA, 25 bp, Homo sapien
aggaagctgcgcgacaggagacggg

SEQ ID NO: 5341859 - DNA, 25 bp, Homo sapien
agctgcgcgacaggagacgggcggc

SEQ ID NO: 5341860 - DNA, 25 bp, Homo sapien
gtcatacgccaatgacactcccagg

SEQ ID NO: 5341861 - DNA, 25 bp, Homo sapien
gcaagggttgcggtcatacgccaat

SEQ ID NO: 5341862 - DNA, 25 bp, Homo sapien
gtagcgatgtcagcggcagcggcaa

SEQ ID NO: 5341863 - DNA, 25 bp, Homo sapien
gttgcggtcatacgccaatgacact

SEQ ID NO: 5341864 - DNA, 25 bp, Homo sapien
tgaagacaaagaggcatcctatcgg

SEQ ID NO: 5341865 - DNA, 25 bp, Homo sapien
tggccacagcagtcgcctgaacaaa

SEQ ID NO: 5341866 - DNA, 25 bp, Homo sapien
ctgaacaaatttccctttacagagg

SEQ ID NO: 5341867 - DNA, 25 bp, Homo sapien
tcttcacgaaacagcgggaatggca

SEQ ID NO: 5341868 - DNA, 25 bp, Homo sapien
gcgagactggccagcgcgtggcatt

SEQ ID NO: 5341869 - DNA, 25 bp, Homo sapien
ttgtgggcaatgtagtctgacggcc

SEQ ID NO: 5341870 - DNA, 25 bp, Homo sapien
ctggttcgtagcttttgagtgaggc

SEQ ID NO: 5341871 - DNA, 25 bp, Homo sapien
tctgacggccgcgactggttcgtag

SEQ ID NO: 5341872 - DNA, 25 bp, Homo sapien
tgccgctggggacgggaattcgaac

SEQ ID NO: 5341873 - DNA, 25 bp, Homo sapien
gggacgggaattcgaactggcactg

SEQ ID NO: 5341874 - DNA, 25 bp, Homo sapien
acgggaattcgaactggcactggtg

SEQ ID NO: 5341875 - DNA, 25 bp, Homo sapien
ctggacccggaagggttgccgctgg

SEQ ID NO: 5341876 - DNA, 25 bp, Homo sapien
gtgaccccccattctaccagaatgt

SEQ ID NO: 5341877 - DNA, 25 bp, Homo sapien
tttgtgaccccccattctaccagaa

SEQ ID NO: 5341878 - DNA, 25 bp, Homo sapien
ttttgtgaccccccattctaccaga

SEQ ID NO: 5341879 - DNA, 25 bp, Homo sapien
tgattttttgtgaccccccattcta

SEQ ID NO: 5341880 - DNA, 25 bp, Homo sapien
ccttctatctggtccttagctgtgg

SEQ ID NO: 5341881 - DNA, 25 bp, Homo sapien
ctatctggtccttagctgtggtcca

SEQ ID NO: 5341882 - DNA, 25 bp, Homo sapien
ttctatctggtccttagctgtggtc

SEQ ID NO: 5341883 - DNA, 25 bp, Homo sapien
tccttctatctggtccttagctgtg

SEQ ID NO: 5341884 - DNA, 25 bp, Homo sapien
aacctttcagcctccgtgggctaca

SEQ ID NO: 5341885 - DNA, 25 bp, Homo sapien
gtgggctacaagaaacatccccgct

SEQ ID NO: 5341886 - DNA, 25 bp, Homo sapien
gcctccgtgggctacaagaaacatc

SEQ ID NO: 5341887 - DNA, 25 bp, Homo sapien
aaacatccccgctcgccaaaacata

SEQ ID NO: 5341888 - DNA, 25 bp, Homo sapien
gctctgacatgcactcttgctgtct

SEQ ID NO: 5341889 - DNA, 25 bp, Homo sapien
catcttgccaccagtttgcatcctt

SEQ ID NO: 5341890 - DNA, 25 bp, Homo sapien
gcatcttgccaccagtttgcatcct

SEQ ID NO: 5341891 - DNA, 25 bp, Homo sapien
ctgacatgcactcttgctgtcttgc

SEQ ID NO: 5341892 - DNA, 25 bp, Homo sapien
aagacttgtgtgtacttgtagggcc

SEQ ID NO: 5341893 - DNA, 25 bp, Homo sapien
gtcttggatcctctagcaaacacat

SEQ ID NO: 5341894 - DNA, 25 bp, Homo sapien
tccttcaataagagaatgtctctgt

SEQ ID NO: 5341895 - DNA, 25 bp, Homo sapien
gactaacggattggaaagacttgtg

SEQ ID NO: 5341896 - DNA, 25 bp, Homo sapien
cggtctatgccactctggcacaaag

SEQ ID NO: 5341897 - DNA, 25 bp, Homo sapien
gtagaagcctgcattctcaggcagc

SEQ ID NO: 5341898 - DNA, 25 bp, Homo sapien
agttagaggtgacagagattaggcc

SEQ ID NO: 5341899 - DNA, 25 bp, Homo sapien
atgccactctggcacaaagagttag

SEQ ID NO: 5341900 - DNA, 25 bp, Homo sapien
ctacatggctgtttgcctttcccat

SEQ ID NO: 5341901 - DNA, 25 bp, Homo sapien
tggcagtcttccaggtctacatggc

SEQ ID NO: 5341902 - DNA, 25 bp, Homo sapien
tccaggtctacatggctgtttgcct

SEQ ID NO: 5341903 - DNA, 25 bp, Homo sapien
agtcttccaggtctacatggctgtt

SEQ ID NO: 5341904 - DNA, 25 bp, Homo sapien
acactgagggaagggctgtctttgt

SEQ ID NO: 5341905 - DNA, 25 bp, Homo sapien
ttttgcaggttttccctgtcagcca

SEQ ID NO: 5341906 - DNA, 25 bp, Homo sapien
gacagaatggacagagtgagatcag

SEQ ID NO: 5341907 - DNA, 25 bp, Homo sapien
gcagcagttgcgttttgcaggtttt

SEQ ID NO: 5341908 - DNA, 25 bp, Homo sapien
cccgcttcatcagacacttcagcat

SEQ ID NO: 5341909 - DNA, 25 bp, Homo sapien
ccccgcttcatcagacacttcagca

SEQ ID NO: 5341910 - DNA, 25 bp, Homo sapien
tccccgcttcatcagacacttcagc

SEQ ID NO: 5341911 - DNA, 25 bp, Homo sapien
aattttaccctcttgacctgcctgg

SEQ ID NO: 5341912 - DNA, 25 bp, Homo sapien
tgtagacaatacctcaccactctgg

SEQ ID NO: 5341913 - DNA, 25 bp, Homo sapien
ggttcctgcacagaggtacgtagca

SEQ ID NO: 5341914 - DNA, 25 bp, Homo sapien
tagattaaaacaaggactcgactcc

SEQ ID NO: 5341915 - DNA, 25 bp, Homo sapien
tgactcaccttcgaaaaacagttct

SEQ ID NO: 5341916 - DNA, 25 bp, Homo sapien
ttctgactcaccttcgaaaaacagt

SEQ ID NO: 5341917 - DNA, 25 bp, Homo sapien
gccccagccatgagccaagctttct

SEQ ID NO: 5341918 - DNA, 25 bp, Homo sapien
tctgactcaccttcgaaaaacagtt

SEQ ID NO: 5341919 - DNA, 25 bp, Homo sapien
catacaataatgatgcgaagccagt

SEQ ID NO: 5341920 - DNA, 25 bp, Homo sapien
ggtgagctgcgctgaaaattcacaa

SEQ ID NO: 5341921 - DNA, 25 bp, Homo sapien
gggaggacctgttgactttcagaca

SEQ ID NO: 5341922 - DNA, 25 bp, Homo sapien
tactcgagaattcaatccgacttgg

SEQ ID NO: 5341923 - DNA, 25 bp, Homo sapien
ccatacatatgtccctgagactcag

SEQ ID NO: 5341924 - DNA, 25 bp, Homo sapien
cagaagactctagaagaacccctac

SEQ ID NO: 5341925 - DNA, 25 bp, Homo sapien
tactctagtactacagtgtccaagg

SEQ ID NO: 5341926 - DNA, 25 bp, Homo sapien
tgcaggctcttacctaggaaaggaa

SEQ ID NO: 5341927 - DNA, 25 bp, Homo sapien
atacaggcacactggaatctccacg

SEQ ID NO: 5341928 - DNA, 25 bp, Homo sapien
tctcaaccacctacttgtgaacctc

SEQ ID NO: 5341929 - DNA, 25 bp, Homo sapien
ttccactgttacttatctgtatcag

SEQ ID NO: 5341930 - DNA, 25 bp, Homo sapien
tcagggagacatcagcaacattcac

SEQ ID NO: 5341931 - DNA, 25 bp, Homo sapien
caagccacataggtcaagatatcca

SEQ ID NO: 5341932 - DNA, 25 bp, Homo sapien
caggtaacggaatcgggctgaatcc

SEQ ID NO: 5341933 - DNA, 25 bp, Homo sapien
taatgggtgaactcccagcccttcc

SEQ ID NO: 5341934 - DNA, 25 bp, Homo sapien
cagtttttggggaagccacttatct

SEQ ID NO: 5341935 - DNA, 25 bp, Homo sapien
gaatttaaagatgttcacgttaggc

SEQ ID NO: 5341936 - DNA, 25 bp, Homo sapien
aatttaaagatgttcacgttaggct

SEQ ID NO: 5341937 - DNA, 25 bp, Homo sapien
taaagatgttcacgttaggctggac

SEQ ID NO: 5341938 - DNA, 25 bp, Homo sapien
tttaaagatgttcacgttaggctgg

SEQ ID NO: 5341939 - DNA, 25 bp, Homo sapien
atgcccaagcagtgataatgaccag

SEQ ID NO: 5341940 - DNA, 25 bp, Homo sapien
cacatgcccaagcagtgataatgac

SEQ ID NO: 5341941 - DNA, 25 bp, Homo sapien
tccctcttgctcacatgcccaagca

SEQ ID NO: 5341942 - DNA, 25 bp, Homo sapien
catgcccaagcagtgataatgacca

SEQ ID NO: 5341943 - DNA, 25 bp, Homo sapien
ctaattctcaatgtaggaatttagc

SEQ ID NO: 5341944 - DNA, 25 bp, Homo sapien
tcagcatattgtgtctctcttttca

SEQ ID NO: 5341945 - DNA, 25 bp, Homo sapien
caatgtaggaatttagcactataaa

SEQ ID NO: 5341946 - DNA, 25 bp, Homo sapien
aggctgtactgtggtggagtgatca

SEQ ID NO: 5341947 - DNA, 25 bp, Homo sapien
gaatggccattcttcaagtccgagg

SEQ ID NO: 5341948 - DNA, 25 bp, Homo sapien
ctggattgggcccaacaaggctaga

SEQ ID NO: 5341949 - DNA, 25 bp, Homo sapien
gagaagaatcaacactgggccgctt

SEQ ID NO: 5341950 - DNA, 25 bp, Homo sapien
tgggccgctttttcaagagcagtct

SEQ ID NO: 5341951 - DNA, 25 bp, Homo sapien
gtgggaatgcccacggcgagggagc

SEQ ID NO: 5341952 - DNA, 25 bp, Homo sapien
cgagggagccgcagttcagtggaga

SEQ ID NO: 5341953 - DNA, 25 bp, Homo sapien
acagggacctggagttgcgggacta

SEQ ID NO: 5341954 - DNA, 25 bp, Homo sapien
ttcagtggagatgtgcctgtccagg

SEQ ID NO: 5341955 - DNA, 25 bp, Homo sapien
tgagtgccctgaggatacggcttct

SEQ ID NO: 5341956 - DNA, 25 bp, Homo sapien
tctggtgccggtacttccagggtag

SEQ ID NO: 5341957 - DNA, 25 bp, Homo sapien
tcactgggcgtgtcggcacttccag

SEQ ID NO: 5341958 - DNA, 25 bp, Homo sapien
ggcggacccacagatcgctgaattg

SEQ ID NO: 5341959 - DNA, 25 bp, Homo sapien
gaagaaggaaacaggtatccctcca

SEQ ID NO: 5341960 - DNA, 25 bp, Homo sapien
ctgaacaggagctcctttggagacc

SEQ ID NO: 5341961 - DNA, 25 bp, Homo sapien
agaaggaaacaggtatccctccact

SEQ ID NO: 5341962 - DNA, 25 bp, Homo sapien
aggacagtgcgttgaaccccaggcc

SEQ ID NO: 5341963 - DNA, 25 bp, Homo sapien
gacagtgcgttgaaccccaggccag

SEQ ID NO: 5341964 - DNA, 25 bp, Homo sapien
taaggacagtgcgttgaaccccagg

SEQ ID NO: 5341965 - DNA, 25 bp, Homo sapien
cctaaggacagtgcgttgaacccca

SEQ ID NO: 5341966 - DNA, 25 bp, Homo sapien
tcatagccttcacgccgcaaaacat

SEQ ID NO: 5341967 - DNA, 25 bp, Homo sapien
cagcaggggcgtgttctacctcata

SEQ ID NO: 5341968 - DNA, 25 bp, Homo sapien
gcactgtgttgttgcccatgaaatg

SEQ ID NO: 5341969 - DNA, 25 bp, Homo sapien
cactgtgttgttgcccatgaaatga

SEQ ID NO: 5341970 - DNA, 25 bp, Homo sapien
gagcttctggaatcaggcctgccaa

SEQ ID NO: 5341971 - DNA, 25 bp, Homo sapien
cagggcagcatcagtagcatttcag

SEQ ID NO: 5341972 - DNA, 25 bp, Homo sapien
gacatcaaactgcaacctggtaaga

SEQ ID NO: 5341973 - DNA, 25 bp, Homo sapien
gtacagcaaataggccccgagaagg

SEQ ID NO: 5341974 - DNA, 25 bp, Homo sapien
cagtacaaatgtgcacacggtgccc

SEQ ID NO: 5341975 - DNA, 25 bp, Homo sapien
cctgccacgggacatacgggaagtt

SEQ ID NO: 5341976 - DNA, 25 bp, Homo sapien
ttttgggagctcacctaagtctggc

SEQ ID NO: 5341977 - DNA, 25 bp, Homo sapien
gatccccatgacaaaagtcgctgct

SEQ ID NO: 5341978 - DNA, 25 bp, Homo sapien
catccttttaacgtatgccagtcgg

SEQ ID NO: 5341979 - DNA, 25 bp, Homo sapien
tatgattttgtgactggctgttttc

SEQ ID NO: 5341980 - DNA, 25 bp, Homo sapien
aacattttcatcgttttgaccccag

SEQ ID NO: 5341981 - DNA, 25 bp, Homo sapien
catgcaatcatgaccactatctaat

SEQ ID NO: 5341982 - DNA, 25 bp, Homo sapien
gactcccgttaggtatacattggca

SEQ ID NO: 5341983 - DNA, 25 bp, Homo sapien
tttagcaccacaacaataggactcc

SEQ ID NO: 5341984 - DNA, 25 bp, Homo sapien
gacagtttggctatgacacgccttg

SEQ ID NO: 5341985 - DNA, 25 bp, Homo sapien
tgagggtgtctcacaggtatctgaa

SEQ ID NO: 5341986 - DNA, 25 bp, Homo sapien
gaagaagcctttgtcagggaactcc

SEQ ID NO: 5341987 - DNA, 25 bp, Homo sapien
tctctcattccgcttgtagatcagc

SEQ ID NO: 5341988 - DNA, 25 bp, Homo sapien
cagctcccggcgtaagtagctgtca

SEQ ID NO: 5341989 - DNA, 25 bp, Homo sapien
tgtagatcagctcccggcgtaagta

SEQ ID NO: 5341990 - DNA, 25 bp, Homo sapien
tgaggtggtagcgtggcattaataa

SEQ ID NO: 5341991 - DNA, 25 bp, Homo sapien
gcgtggcattaataaaattgggaac

SEQ ID NO: 5341992 - DNA, 25 bp, Homo sapien
tagcgtggcattaataaaattggga

SEQ ID NO: 5341993 - DNA, 25 bp, Homo sapien
tggtagcgtggcattaataaaattg

SEQ ID NO: 5341994 - DNA, 25 bp, Homo sapien
tcatttatgtaagatcccctgccca

SEQ ID NO: 5341995 - DNA, 25 bp, Homo sapien
ccttttgcgacggcctcgaaatgat

SEQ ID NO: 5341996 - DNA, 25 bp, Homo sapien
tccatcttatggataacagatctcc

SEQ ID NO: 5341997 - DNA, 25 bp, Homo sapien
cattttcaaatcgacagccttcatc

SEQ ID NO: 5341998 - DNA, 25 bp, Homo sapien
cagcacattccctgacctcctgtag

SEQ ID NO: 5341999 - DNA, 25 bp, Homo sapien
gtgacagcacattccctgacctcct

SEQ ID NO: 5342000 - DNA, 25 bp, Homo sapien
gcacattccctgacctcctgtaggg

SEQ ID NO: 5342001 - DNA, 25 bp, Homo sapien
acattccctgacctcctgtaggggc

SEQ ID NO: 5342002 - DNA, 25 bp, Homo sapien
tgatgagatcctccgtcgtgtaggg

SEQ ID NO: 5342003 - DNA, 25 bp, Homo sapien
gaggtccccgcagttatagtgtttg

SEQ ID NO: 5342004 - DNA, 25 bp, Homo sapien
tcatggctgaggatgacggagctga

SEQ ID NO: 5342005 - DNA, 25 bp, Homo sapien
gatctgaagactgcctgctcgcagg

SEQ ID NO: 5342006 - DNA, 25 bp, Homo sapien
gcctgtgatgcaaccttaaccaaag

SEQ ID NO: 5342007 - DNA, 25 bp, Homo sapien
gtccttataaagaggagccttcatg

SEQ ID NO: 5342008 - DNA, 25 bp, Homo sapien
gcatcctcacatggaagaagacaga

SEQ ID NO: 5342009 - DNA, 25 bp, Homo sapien
gcaagctaactgaatggctgcatga

SEQ ID NO: 5342010 - DNA, 25 bp, Homo sapien
agtctctctggaaggcgtctcccca

SEQ ID NO: 5342011 - DNA, 25 bp, Homo sapien
ggtaccctctagaccatactgtgtt

SEQ ID NO: 5342012 - DNA, 25 bp, Homo sapien
atagcctcttctgtcttggtaccct

SEQ ID NO: 5342013 - DNA, 25 bp, Homo sapien
tctccccaaggttctgcacaatagc

SEQ ID NO: 5342014 - DNA, 25 bp, Homo sapien
agccagagcaggtaacaaatctgct

SEQ ID NO: 5342015 - DNA, 25 bp, Homo sapien
ctctattggtcacaagccagagcag

SEQ ID NO: 5342016 - DNA, 25 bp, Homo sapien
agcaggtaacaaatctgcttggtca

SEQ ID NO: 5342017 - DNA, 25 bp, Homo sapien
catccctctattggtcacaagccag

SEQ ID NO: 5342018 - DNA, 25 bp, Homo sapien
cagcacctgggggaaaagcacaatc

SEQ ID NO: 5342019 - DNA, 25 bp, Homo sapien
gcacctgggggaaaagcacaatccc

SEQ ID NO: 5342020 - DNA, 25 bp, Homo sapien
aacagcacctgggggaaaagcacaa

SEQ ID NO: 5342021 - DNA, 25 bp, Homo sapien
tgtcaatctttcaacagcacctggg

SEQ ID NO: 5342022 - DNA, 25 bp, Homo sapien
tgtgacaactgcaaagatgacccat

SEQ ID NO: 5342023 - DNA, 25 bp, Homo sapien
gcccagtgatgagacctttatctcc

SEQ ID NO: 5342024 - DNA, 25 bp, Homo sapien
catatgcccaatgtaggagcagcca

SEQ ID NO: 5342025 - DNA, 25 bp, Homo sapien
tctccattgtgcagagtgacagctc

SEQ ID NO: 5342026 - DNA, 25 bp, Homo sapien
tctctgccttgtaggcaatggcgcc

SEQ ID NO: 5342027 - DNA, 25 bp, Homo sapien
cttgtaggcaatggcgcctgctttc

SEQ ID NO: 5342028 - DNA, 25 bp, Homo sapien
tctcctctctgccttgtaggcaatg

SEQ ID NO: 5342029 - DNA, 25 bp, Homo sapien
taggaatgtgaagggttgacaggat

SEQ ID NO: 5342030 - DNA, 25 bp, Homo sapien
cgtgttctcactttttctcgcatgg

SEQ ID NO: 5342031 - DNA, 25 bp, Homo sapien
gatccaccaagcaggtgtcaaggaa

SEQ ID NO: 5342032 - DNA, 25 bp, Homo sapien
tagacgtgtcattgggctgatccac

SEQ ID NO: 5342033 - DNA, 25 bp, Homo sapien
gctgctagggtttcaaaggagctct

SEQ ID NO: 5342034 - DNA, 25 bp, Homo sapien
caattactcctctaagtctggcagt

SEQ ID NO: 5342035 - DNA, 25 bp, Homo sapien
caagcgattgggattctcctgtcca

SEQ ID NO: 5342036 - DNA, 25 bp, Homo sapien
catggaccacacaagggattgaggc

SEQ ID NO: 5342037 - DNA, 25 bp, Homo sapien
gcagcattcagtgtaggtgcacctg

SEQ ID NO: 5342038 - DNA, 25 bp, Homo sapien
catggcactgatgtgagaatatgca

SEQ ID NO: 5342039 - DNA, 25 bp, Homo sapien
gttcttaagacccatggcactgatg

SEQ ID NO: 5342040 - DNA, 25 bp, Homo sapien
cactgatgtgagaatatgcagaaac

SEQ ID NO: 5342041 - DNA, 25 bp, Homo sapien
ccaggggttgttcttaagacccatg

SEQ ID NO: 5342042 - DNA, 25 bp, Homo sapien
aaggagaacaggagtcataacttga

SEQ ID NO: 5342043 - DNA, 25 bp, Homo sapien
aagcaggcatgaacttcaggtgaag

SEQ ID NO: 5342044 - DNA, 25 bp, Homo sapien
tcataacttgattcgataccgaggg

SEQ ID NO: 5342045 - DNA, 25 bp, Homo sapien
gcaggcatgaacttcaggtgaagga

SEQ ID NO: 5342046 - DNA, 25 bp, Homo sapien
tcagggagttgaccatgagcatcac

SEQ ID NO: 5342047 - DNA, 25 bp, Homo sapien
tgaagaggtagtctgcgtagagccc

SEQ ID NO: 5342048 - DNA, 25 bp, Homo sapien
tgggcaaggaacaggtctaagacag

SEQ ID NO: 5342049 - DNA, 25 bp, Homo sapien
cccagtttccggcaatagcattgaa

SEQ ID NO: 5342050 - DNA, 25 bp, Homo sapien
ccaaagaagtaagatggtgggtctc

SEQ ID NO: 5342051 - DNA, 25 bp, Homo sapien
caaactcgggtgtacgggacatgga

SEQ ID NO: 5342052 - DNA, 25 bp, Homo sapien
gggtctcgcttaatggtccacaaga

SEQ ID NO: 5342053 - DNA, 25 bp, Homo sapien
tgagcttgacatactccaggtggcg

SEQ ID NO: 5342054 - DNA, 25 bp, Homo sapien
tcaatcacagagatctggatgatct

SEQ ID NO: 5342055 - DNA, 25 bp, Homo sapien
tgatctctgctggatggattctctc

SEQ ID NO: 5342056 - DNA, 25 bp, Homo sapien
tggatgatctctgctggatggattc

SEQ ID NO: 5342057 - DNA, 25 bp, Homo sapien
gagatctggatgatctctgctggat

SEQ ID NO: 5342058 - DNA, 25 bp, Homo sapien
cgccgcggtgctaggtgaaagccca

SEQ ID NO: 5342059 - DNA, 25 bp, Homo sapien
ccgaaagctcgcgaaaatggctggc

SEQ ID NO: 5342060 - DNA, 25 bp, Homo sapien
tgcccaagttcctggtccggtactc

SEQ ID NO: 5342061 - DNA, 25 bp, Homo sapien
aatggctggcgagaccccagaggct

SEQ ID NO: 5342062 - DNA, 25 bp, Homo sapien
gagctcgcagttggcggtgccgggc

SEQ ID NO: 5342063 - DNA, 25 bp, Homo sapien
cccgcgccgcgaagctgcgcccgtg

SEQ ID NO: 5342064 - DNA, 25 bp, Homo sapien
ttggggcttgagctcgcagttggcg

SEQ ID NO: 5342065 - DNA, 25 bp, Homo sapien
catcctcctcaaggcggctccgagg

SEQ ID NO: 5342066 - DNA, 25 bp, Homo sapien
aggtcagccccgcgcctaggcggca

SEQ ID NO: 5342067 - DNA, 25 bp, Homo sapien
cagcggccacgtggggccgggcctc

SEQ ID NO: 5342068 - DNA, 25 bp, Homo sapien
tcagccccgcgcctaggcggcagcg

SEQ ID NO: 5342069 - DNA, 25 bp, Homo sapien
gcggccacgtggggccgggcctcga

SEQ ID NO: 5342070 - DNA, 25 bp, Homo sapien
gttccagcgctgtcctaaattcaac

SEQ ID NO: 5342071 - DNA, 25 bp, Homo sapien
gcaagaggggtaaagtgaagttcca

SEQ ID NO: 5342072 - DNA, 25 bp, Homo sapien
gcattggttcctgcgtttacgtctg

SEQ ID NO: 5342073 - DNA, 25 bp, Homo sapien
taaattcaacctaaaatcgcattgg

SEQ ID NO: 5342074 - DNA, 25 bp, Homo sapien
atgcctgagcgcactttaccaccac

SEQ ID NO: 5342075 - DNA, 25 bp, Homo sapien
cttttaaagtccagacgtctgcgcc

SEQ ID NO: 5342076 - DNA, 25 bp, Homo sapien
taacttcggagtggtgttcgcagga

SEQ ID NO: 5342077 - DNA, 25 bp, Homo sapien
gctttaagtcgctgtccattttgag

SEQ ID NO: 5342078 - DNA, 25 bp, Homo sapien
tggctgcccattgccagagccctga

SEQ ID NO: 5342079 - DNA, 25 bp, Homo sapien
ccattgccagagccctgaattgctt

SEQ ID NO: 5342080 - DNA, 25 bp, Homo sapien
tgcccattgccagagccctgaattg

SEQ ID NO: 5342081 - DNA, 25 bp, Homo sapien
tgccagagccctgaattgcttctga

SEQ ID NO: 5342082 - DNA, 25 bp, Homo sapien
gaagtctccttcacttgtgtggtta

SEQ ID NO: 5342083 - DNA, 25 bp, Homo sapien
gattttctcacaacttggaggcatc

SEQ ID NO: 5342084 - DNA, 25 bp, Homo sapien
aatttcagcagggacaactcatctc

SEQ ID NO: 5342085 - DNA, 25 bp, Homo sapien
gctggaatgccgacatgtggccttt

SEQ ID NO: 5342086 - DNA, 25 bp, Homo sapien
ggactgccaaattctccggtttgcc

SEQ ID NO: 5342087 - DNA, 25 bp, Homo sapien
tgaacctgggcactccgcgccgatg

SEQ ID NO: 5342088 - DNA, 25 bp, Homo sapien
gtcctcttcgagaccccagtcgtga

SEQ ID NO: 5342089 - DNA, 25 bp, Homo sapien
agatggacacgagccacaagctgca

SEQ ID NO: 5342090 - DNA, 25 bp, Homo sapien
gcagcaaagcccctcgatggagtag

SEQ ID NO: 5342091 - DNA, 25 bp, Homo sapien
tccccaggttgcgttggaaaatgct

SEQ ID NO: 5342092 - DNA, 25 bp, Homo sapien
catggctggcgtggtctgagtcttt

SEQ ID NO: 5342093 - DNA, 25 bp, Homo sapien
gatggagtagagttcctgccgcaaa

SEQ ID NO: 5342094 - DNA, 25 bp, Homo sapien
tcatgagaggatctgatgactcagg

SEQ ID NO: 5342095 - DNA, 25 bp, Homo sapien
ctcagggagcaatttcttgagccca

SEQ ID NO: 5342096 - DNA, 25 bp, Homo sapien
tgactcagggagcaatttcttgagc

SEQ ID NO: 5342097 - DNA, 25 bp, Homo sapien
agaggatctgatgactcagggagca

SEQ ID NO: 5342098 - DNA, 25 bp, Homo sapien
ctggatcttgaatgagatgaagacg

SEQ ID NO: 5342099 - DNA, 25 bp, Homo sapien
gagtccgggccacacgtcagctgga

SEQ ID NO: 5342100 - DNA, 25 bp, Homo sapien
gggccacacgtcagctggatcttga

SEQ ID NO: 5342101 - DNA, 25 bp, Homo sapien
tccgggccacacgtcagctggatct

SEQ ID NO: 5342102 - DNA, 25 bp, Homo sapien
ctaagaggggtgtgccgccagcctc

SEQ ID NO: 5342103 - DNA, 25 bp, Homo sapien
gcctctgatccctctcaccggcggg

SEQ ID NO: 5342104 - DNA, 25 bp, Homo sapien
cagctgcacccatatgcgtagcttc

SEQ ID NO: 5342105 - DNA, 25 bp, Homo sapien
tgtgtgaccctgcaggatagtgggg

SEQ ID NO: 5342106 - DNA, 25 bp, Homo sapien
taaataattgatatcactgaaccag

SEQ ID NO: 5342107 - DNA, 25 bp, Homo sapien
cactgcccatattcagtactcaatt

SEQ ID NO: 5342108 - DNA, 25 bp, Homo sapien
ccaagcatgtctcgggatatgtccc

SEQ ID NO: 5342109 - DNA, 25 bp, Homo sapien
cacagacttgctcttttacacaggc

SEQ ID NO: 5342110 - DNA, 25 bp, Homo sapien
ttggctcccttctaaagaaactgag

SEQ ID NO: 5342111 - DNA, 25 bp, Homo sapien
tccagagttcatgattagtctatgc

SEQ ID NO: 5342112 - DNA, 25 bp, Homo sapien
tcaccctgatggtatgtggcaaagc

SEQ ID NO: 5342113 - DNA, 25 bp, Homo sapien
gattcaactcaggtcttactccaga

SEQ ID NO: 5342114 - DNA, 25 bp, Homo sapien
aaaacattgaagttgctctcatccc

SEQ ID NO: 5342115 - DNA, 25 bp, Homo sapien
cgcccggctgggaatgtgatttatt

SEQ ID NO: 5342116 - DNA, 25 bp, Homo sapien
gcccggctgggaatgtgatttatta

SEQ ID NO: 5342117 - DNA, 25 bp, Homo sapien
atctttgagccccatccttcagaga

SEQ ID NO: 5342118 - DNA, 25 bp, Homo sapien
cacttagtgaggtggttctacaact

SEQ ID NO: 5342119 - DNA, 25 bp, Homo sapien
tccccacgggtgttctttcaaatgc

SEQ ID NO: 5342120 - DNA, 25 bp, Homo sapien
cagagatcctgatccggttgatcta

SEQ ID NO: 5342121 - DNA, 25 bp, Homo sapien
catgaggcatgaataccacagcttc

SEQ ID NO: 5342122 - DNA, 25 bp, Homo sapien
acagcttcctgacctacccaaatgg

SEQ ID NO: 5342123 - DNA, 25 bp, Homo sapien
taccctacgctctaagaaaatgaag

SEQ ID NO: 5342124 - DNA, 25 bp, Homo sapien
tacaaacttatgaggcacagaggca

SEQ ID NO: 5342125 - DNA, 25 bp, Homo sapien
aaatctattgctcttgaaacctacc

SEQ ID NO: 5342126 - DNA, 25 bp, Homo sapien
ggaatgcttgtaacaagtcatattc

SEQ ID NO: 5342127 - DNA, 25 bp, Homo sapien
tgacatcaggctgtacatacataat

SEQ ID NO: 5342128 - DNA, 25 bp, Homo sapien
agtcatattcctttcttgacatcct

SEQ ID NO: 5342129 - DNA, 25 bp, Homo sapien
gtggaagtacgatattgtttttcag

SEQ ID NO: 5342130 - DNA, 25 bp, Homo sapien
tctgttaggatgtgctgtttgctga

SEQ ID NO: 5342131 - DNA, 25 bp, Homo sapien
ccactatctagtaacagaacacatt

SEQ ID NO: 5342132 - DNA, 25 bp, Homo sapien
cagtaataaacccactatctagtaa

SEQ ID NO: 5342133 - DNA, 25 bp, Homo sapien
ccaaggcgctgggacaaagtttgcg

SEQ ID NO: 5342134 - DNA, 25 bp, Homo sapien
tcaaggcagggcattcacggtgagc

SEQ ID NO: 5342135 - DNA, 25 bp, Homo sapien
aattccatggccgatccgtcttgac

SEQ ID NO: 5342136 - DNA, 25 bp, Homo sapien
taacggagatggttcgcaaggaatc

SEQ ID NO: 5342137 - DNA, 25 bp, Homo sapien
tactttacctctgccctagactggc

SEQ ID NO: 5342138 - DNA, 25 bp, Homo sapien
tacagacccttagtggagatggcag

SEQ ID NO: 5342139 - DNA, 25 bp, Homo sapien
gagatggcagtaccctacatttttc

SEQ ID NO: 5342140 - DNA, 25 bp, Homo sapien
agactgaaccagctcctccgtactt

SEQ ID NO: 5342141 - DNA, 25 bp, Homo sapien
tttcaagccggttgcagtgatgtgc

SEQ ID NO: 5342142 - DNA, 25 bp, Homo sapien
tcaagccggttgcagtgatgtgcac

SEQ ID NO: 5342143 - DNA, 25 bp, Homo sapien
tgattttgggtaaaattgtttgaga

SEQ ID NO: 5342144 - DNA, 25 bp, Homo sapien
tctttctgggctacttttgattttg

SEQ ID NO: 5342145 - DNA, 25 bp, Homo sapien
tacatacccgtttgcctcgcttcaa

SEQ ID NO: 5342146 - DNA, 25 bp, Homo sapien
accttacaggcccaagataactggg

SEQ ID NO: 5342147 - DNA, 25 bp, Homo sapien
tagggtcaagtacaggaccttacag

SEQ ID NO: 5342148 - DNA, 25 bp, Homo sapien
gttctgtcatctagtattttaactg

SEQ ID NO: 5342149 - DNA, 25 bp, Homo sapien
tccacccatctcaggcgtgagccac

SEQ ID NO: 5342150 - DNA, 25 bp, Homo sapien
tgatccacccatctcaggcgtgagc

SEQ ID NO: 5342151 - DNA, 25 bp, Homo sapien
ggtgatccacccatctcaggcgtga

SEQ ID NO: 5342152 - DNA, 25 bp, Homo sapien
gatccacccatctcaggcgtgagcc

SEQ ID NO: 5342153 - DNA, 25 bp, Homo sapien
agtattgttctctgtatagttctca

SEQ ID NO: 5342154 - DNA, 25 bp, Homo sapien
gatcctcttctaagggttgcacaat

SEQ ID NO: 5342155 - DNA, 25 bp, Homo sapien
aaaagtcacacttggagagatgcaa

SEQ ID NO: 5342156 - DNA, 25 bp, Homo sapien
tatatagcctatatgatacacaccg

SEQ ID NO: 5342157 - DNA, 25 bp, Homo sapien
aaaaaccctctgtagcatgcctgcc

SEQ ID NO: 5342158 - DNA, 25 bp, Homo sapien
tatgttgtaagaaaccctgctgtaa

SEQ ID NO: 5342159 - DNA, 25 bp, Homo sapien
gacaatgggctactgttgagaaact

SEQ ID NO: 5342160 - DNA, 25 bp, Homo sapien
acagaaggaattaaaggacagagct

SEQ ID NO: 5342161 - DNA, 25 bp, Homo sapien
tagctaggtaagaccagaagcacgt

SEQ ID NO: 5342162 - DNA, 25 bp, Homo sapien
tgagtcacataatcaggacagctga

SEQ ID NO: 5342163 - DNA, 25 bp, Homo sapien
cagaggaaagaatctgaccaccttc

SEQ ID NO: 5342164 - DNA, 25 bp, Homo sapien
ccaggtaatgtcagagtacaggaat

SEQ ID NO: 5342165 - DNA, 25 bp, Homo sapien
tgaaagtggacaacaactatcttgg

SEQ ID NO: 5342166 - DNA, 25 bp, Homo sapien
ctttgatgacatcccaattcgcaga

SEQ ID NO: 5342167 - DNA, 25 bp, Homo sapien
ggtctgtcactcttgttacattgtg

SEQ ID NO: 5342168 - DNA, 25 bp, Homo sapien
caggtaaatgtaggtagcagtgcag

SEQ ID NO: 5342169 - DNA, 25 bp, Homo sapien
gaactgtgaagtccatgttcatcca

SEQ ID NO: 5342170 - DNA, 25 bp, Homo sapien
gacttttaaaaaggtgcgcacagct

SEQ ID NO: 5342171 - DNA, 25 bp, Homo sapien
atacagacttgaacacccctccggt

SEQ ID NO: 5342172 - DNA, 25 bp, Homo sapien
taatcatgtctcgttccagttctct

SEQ ID NO: 5342173 - DNA, 25 bp, Homo sapien
tcagtcattacggtattccaaagcc

SEQ ID NO: 5342174 - DNA, 25 bp, Homo sapien
tccctgtgcttatcggcttcaactg

SEQ ID NO: 5342175 - DNA, 25 bp, Homo sapien
gtgcttacacaacgtttgtttctaa

SEQ ID NO: 5342176 - DNA, 25 bp, Homo sapien
tgtttctaattcgtactcttgcctc

SEQ ID NO: 5342177 - DNA, 25 bp, Homo sapien
tgaaaaaagtcagtcgcaaaacgcc

SEQ ID NO: 5342178 - DNA, 25 bp, Homo sapien
tgtactgacgcatgctgcaacttgg

SEQ ID NO: 5342179 - DNA, 25 bp, Homo sapien
caaaacctcctacattcatgctcag

SEQ ID NO: 5342180 - DNA, 25 bp, Homo sapien
gaattagataatggcgacggttgca

SEQ ID NO: 5342181 - DNA, 25 bp, Homo sapien
taaaagtgcgtgtcagggaccagct

SEQ ID NO: 5342182 - DNA, 25 bp, Homo sapien
tgacctgcgtcttggtggaacaccc

SEQ ID NO: 5342183 - DNA, 25 bp, Homo sapien
tgcatcgctgccgtgagtggtctca

SEQ ID NO: 5342184 - DNA, 25 bp, Homo sapien
cgttaagtggccctgtgcatcgctg

SEQ ID NO: 5342185 - DNA, 25 bp, Homo sapien
gtttgtcggcaaggagatggcttca

SEQ ID NO: 5342186 - DNA, 25 bp, Homo sapien
gaagctcgcctaatccttggaacaa

SEQ ID NO: 5342187 - DNA, 25 bp, Homo sapien
gatcggccacagtgaattggctcca

SEQ ID NO: 5342188 - DNA, 25 bp, Homo sapien
tgcccccttagtctgtgaggctggt

SEQ ID NO: 5342189 - DNA, 25 bp, Homo sapien
taaagtggcccagttagcaaccggc

SEQ ID NO: 5342190 - DNA, 25 bp, Homo sapien
ccacccgcttttgagagagaggcac

SEQ ID NO: 5342191 - DNA, 25 bp, Homo sapien
cgtgtgacgttggagcagctgctta

SEQ ID NO: 5342192 - DNA, 25 bp, Homo sapien
tgagggcggtggactaacatgaaac

SEQ ID NO: 5342193 - DNA, 25 bp, Homo sapien
gcctaacaccaggtcatgatgtttt

SEQ ID NO: 5342194 - DNA, 25 bp, Homo sapien
ccacgcccagtgcttttcattttct

SEQ ID NO: 5342195 - DNA, 25 bp, Homo sapien
tatttgcctaacaccaggtcatgat

SEQ ID NO: 5342196 - DNA, 25 bp, Homo sapien
agaattatttgcctaacaccaggtc

SEQ ID NO: 5342197 - DNA, 25 bp, Homo sapien
tcacaggatgagcgtagagcctgga

SEQ ID NO: 5342198 - DNA, 25 bp, Homo sapien
ctcacaggatgagcgtagagcctgg

SEQ ID NO: 5342199 - DNA, 25 bp, Homo sapien
catttagcttagttatgagtcatct

SEQ ID NO: 5342200 - DNA, 25 bp, Homo sapien
ccatttagcttagttatgagtcatc

SEQ ID NO: 5342201 - DNA, 25 bp, Homo sapien
ataccatttagcttagttatgagtc

SEQ ID NO: 5342202 - DNA, 25 bp, Homo sapien
tttagcttagttatgagtcatctgc

SEQ ID NO: 5342203 - DNA, 25 bp, Homo sapien
tatgcaggattctcttttgaatgtc

SEQ ID NO: 5342204 - DNA, 25 bp, Homo sapien
aatgtcttgtacatttagagaggcc

SEQ ID NO: 5342205 - DNA, 25 bp, Homo sapien
gtctcctattttccatacaggacaa

SEQ ID NO: 5342206 - DNA, 25 bp, Homo sapien
gaggccactgtgcaaagtctcctat

SEQ ID NO: 5342207 - DNA, 25 bp, Homo sapien
gacaacgacatctccctggacaaaa

SEQ ID NO: 5342208 - DNA, 25 bp, Homo sapien
acaacgacatctccctggacaaaaa

SEQ ID NO: 5342209 - DNA, 25 bp, Homo sapien
aacgacatctccctggacaaaaagc

SEQ ID NO: 5342210 - DNA, 25 bp, Homo sapien
caacgacatctccctggacaaaaag

SEQ ID NO: 5342211 - DNA, 25 bp, Homo sapien
tctcccaagatcatatttaaatgtt

SEQ ID NO: 5342212 - DNA, 25 bp, Homo sapien
tctcattttcacataaattctctca

SEQ ID NO: 5342213 - DNA, 25 bp, Homo sapien
ctcattttcacataaattctctcac

SEQ ID NO: 5342214 - DNA, 25 bp, Homo sapien
ttctcattttcacataaattctctc

SEQ ID NO: 5342215 - DNA, 25 bp, Homo sapien
gggctcctctacagtgttggtagtt

SEQ ID NO: 5342216 - DNA, 25 bp, Homo sapien
gttgctggtctacttcgtccgccat

SEQ ID NO: 5342217 - DNA, 25 bp, Homo sapien
tagtttgttgctggtctacttcgtc

SEQ ID NO: 5342218 - DNA, 25 bp, Homo sapien
ctaggctgagcctgataaaatccag

SEQ ID NO: 5342219 - DNA, 25 bp, Homo sapien
cctaggcctcgggagtagatggaac

SEQ ID NO: 5342220 - DNA, 25 bp, Homo sapien
gaatggcttcggagatcactggaca

SEQ ID NO: 5342221 - DNA, 25 bp, Homo sapien
tctgtacaaggttgaaaacctgggc

SEQ ID NO: 5342222 - DNA, 25 bp, Homo sapien
tacttaggtatgaggctggttgagc

SEQ ID NO: 5342223 - DNA, 25 bp, Homo sapien
atcatgaaactccaccgggcacagt

SEQ ID NO: 5342224 - DNA, 25 bp, Homo sapien
tagaaatcatgaaactccaccgggc

SEQ ID NO: 5342225 - DNA, 25 bp, Homo sapien
gttagaaatcatgaaactccaccgg

SEQ ID NO: 5342226 - DNA, 25 bp, Homo sapien
aaatcatgaaactccaccgggcaca

SEQ ID NO: 5342227 - DNA, 25 bp, Homo sapien
gggttttcgggtctgcagccattgc

SEQ ID NO: 5342228 - DNA, 25 bp, Homo sapien
ttgtccctaagaggccctgagctat

SEQ ID NO: 5342229 - DNA, 25 bp, Homo sapien
tctgcagccattgcttaggaggcct

SEQ ID NO: 5342230 - DNA, 25 bp, Homo sapien
gaggccctgagctattgaacccatg

SEQ ID NO: 5342231 - DNA, 25 bp, Homo sapien
cagggaccagttgtgcaggcactgt

SEQ ID NO: 5342232 - DNA, 25 bp, Homo sapien
tcagggaccagttgtgcaggcactg

SEQ ID NO: 5342233 - DNA, 25 bp, Homo sapien
gcatgcccagtgaaaccttctgcag

SEQ ID NO: 5342234 - DNA, 25 bp, Homo sapien
tgcagaaaggaccaggaagggcaca

SEQ ID NO: 5342235 - DNA, 25 bp, Homo sapien
caggaagggcacacattggctgcct

SEQ ID NO: 5342236 - DNA, 25 bp, Homo sapien
ttgtggtggttgtctgcatgcccag

SEQ ID NO: 5342237 - DNA, 25 bp, Homo sapien
tggccctttgacctactggagatgg

SEQ ID NO: 5342238 - DNA, 25 bp, Homo sapien
tcctttgcttgtggtactggccctt

SEQ ID NO: 5342239 - DNA, 25 bp, Homo sapien
gaaattcaagatcgccttcaggctt

SEQ ID NO: 5342240 - DNA, 25 bp, Homo sapien
aaggcttgcgccctgggatgcttag

SEQ ID NO: 5342241 - DNA, 25 bp, Homo sapien
gtaggtttcacaggcacctgggaca

SEQ ID NO: 5342242 - DNA, 25 bp, Homo sapien
ctgtaggtttcacaggcacctggga

SEQ ID NO: 5342243 - DNA, 25 bp, Homo sapien
tgtaggtttcacaggcacctgggac

SEQ ID NO: 5342244 - DNA, 25 bp, Homo sapien
cacgtgaagctcaaggagcacagaa

SEQ ID NO: 5342245 - DNA, 25 bp, Homo sapien
gcctgcgggtttgtggtgattaact

SEQ ID NO: 5342246 - DNA, 25 bp, Homo sapien
tatctttgtgcagttttggtccagg

SEQ ID NO: 5342247 - DNA, 25 bp, Homo sapien
tgcactctagggtcatccacttggt

SEQ ID NO: 5342248 - DNA, 25 bp, Homo sapien
aaggacatgagttgtggtacgcccc

SEQ ID NO: 5342249 - DNA, 25 bp, Homo sapien
cccgttttgtgtagcagctgtcagt

SEQ ID NO: 5342250 - DNA, 25 bp, Homo sapien
tctgccgcagggacactgataagga

SEQ ID NO: 5342251 - DNA, 25 bp, Homo sapien
agcttctagaagtctgggcatttgg

SEQ ID NO: 5342252 - DNA, 25 bp, Homo sapien
ttgatgttttagtgaaagggagaaa

SEQ ID NO: 5342253 - DNA, 25 bp, Homo sapien
tgatgttttagtgaaagggagaaaa

SEQ ID NO: 5342254 - DNA, 25 bp, Homo sapien
aattgatgttttagtgaaagggaga

SEQ ID NO: 5342255 - DNA, 25 bp, Homo sapien
tgaattgatgttttagtgaaaggga

SEQ ID NO: 5342256 - DNA, 25 bp, Homo sapien
atagccagtaaagggcgccgtagac

SEQ ID NO: 5342257 - DNA, 25 bp, Homo sapien
gctgttcatccgaattactcatcca

SEQ ID NO: 5342258 - DNA, 25 bp, Homo sapien
gaattactcatccacacatagccag

SEQ ID NO: 5342259 - DNA, 25 bp, Homo sapien
cattccccgctgttcatccgaatta

SEQ ID NO: 5342260 - DNA, 25 bp, Homo sapien
cctggcttctgggtacactcagagg

SEQ ID NO: 5342261 - DNA, 25 bp, Homo sapien
ttgcctgtcagcgttcagcacgaac

SEQ ID NO: 5342262 - DNA, 25 bp, Homo sapien
aattcccctaatttcctcacagtgg

SEQ ID NO: 5342263 - DNA, 25 bp, Homo sapien
caaattgctcaaaacaccggagccc

SEQ ID NO: 5342264 - DNA, 25 bp, Homo sapien
caggtaggtgttggcccacagcctg

SEQ ID NO: 5342265 - DNA, 25 bp, Homo sapien
ctggagacaggcaggaggcagaaaa

SEQ ID NO: 5342266 - DNA, 25 bp, Homo sapien
gagacaggcaggaggcagaaaaaca

SEQ ID NO: 5342267 - DNA, 25 bp, Homo sapien
ggcagaaaaacagaaacagcaccat

SEQ ID NO: 5342268 - DNA, 25 bp, Homo sapien
agacaggcaggaggcagaaaaacag

SEQ ID NO: 5342269 - DNA, 25 bp, Homo sapien
tgtgcacccaagtctccagaaggag

SEQ ID NO: 5342270 - DNA, 25 bp, Homo sapien
gcttctgcaggcgttgttgtctttt

SEQ ID NO: 5342271 - DNA, 25 bp, Homo sapien
tctgcaggcgttgttgtcttttgct

SEQ ID NO: 5342272 - DNA, 25 bp, Homo sapien
ctggcttctgcaggcgttgttgtct

SEQ ID NO: 5342273 - DNA, 25 bp, Homo sapien
ctgcaggcgttgttgtcttttgctc

SEQ ID NO: 5342274 - DNA, 25 bp, Homo sapien
cagtggaatcttccacaccacctgg

SEQ ID NO: 5342275 - DNA, 25 bp, Homo sapien
ctttcacgttcttcagaggctagtg

SEQ ID NO: 5342276 - DNA, 25 bp, Homo sapien
tccttgcctttcacgttcttcagag

SEQ ID NO: 5342277 - DNA, 25 bp, Homo sapien
ccacctggctcatgatggtctctgc

SEQ ID NO: 5342278 - DNA, 25 bp, Homo sapien
ctgctgactggagcagtcaactgtt

SEQ ID NO: 5342279 - DNA, 25 bp, Homo sapien
ggtggccttcccctggcatccagag

SEQ ID NO: 5342280 - DNA, 25 bp, Homo sapien
ctctgctgactggagcagtcaactg

SEQ ID NO: 5342281 - DNA, 25 bp, Homo sapien
acggtggccttcccctggcatccag

SEQ ID NO: 5342282 - DNA, 25 bp, Homo sapien
tcaaaactgagcttgttcgtcagat

SEQ ID NO: 5342283 - DNA, 25 bp, Homo sapien
tgggagatggacatccaagcctctc

SEQ ID NO: 5342284 - DNA, 25 bp, Homo sapien
caggcagagtccctgatactcactc

SEQ ID NO: 5342285 - DNA, 25 bp, Homo sapien
ggcacggtctgttctgcagtcatag

SEQ ID NO: 5342286 - DNA, 25 bp, Homo sapien
gagagctccgcagaagatgatctca

SEQ ID NO: 5342287 - DNA, 25 bp, Homo sapien
agaagatgatctcatcaacctaccc

SEQ ID NO: 5342288 - DNA, 25 bp, Homo sapien
gatgatctcatcaacctaccctttt

SEQ ID NO: 5342289 - DNA, 25 bp, Homo sapien
ctggagagctccgcagaagatgatc

SEQ ID NO: 5342290 - DNA, 25 bp, Homo sapien
ctagccctctaaggcttctccatgt

SEQ ID NO: 5342291 - DNA, 25 bp, Homo sapien
ggctcagatccccatcctgctctta

SEQ ID NO: 5342292 - DNA, 25 bp, Homo sapien
atttctgcctctagccctctaaggc

SEQ ID NO: 5342293 - DNA, 25 bp, Homo sapien
ggcgcccttcagggcctttggctca

SEQ ID NO: 5342294 - DNA, 25 bp, Homo sapien
ttgaaaagtggagaagtcttcacac

SEQ ID NO: 5342295 - DNA, 25 bp, Homo sapien
gatgccattgaaaagtggagaagtc

SEQ ID NO: 5342296 - DNA, 25 bp, Homo sapien
cattgaaaagtggagaagtcttcac

SEQ ID NO: 5342297 - DNA, 25 bp, Homo sapien
gccattgaaaagtggagaagtcttc

SEQ ID NO: 5342298 - DNA, 25 bp, Homo sapien
gtgtgatcaccttactgaaaagact

SEQ ID NO: 5342299 - DNA, 25 bp, Homo sapien
ccccaggcacactgatgtactttac

SEQ ID NO: 5342300 - DNA, 25 bp, Homo sapien
gcacactgatgtactttactgtcct

SEQ ID NO: 5342301 - DNA, 25 bp, Homo sapien
tgcctcttggggtgtgatcacctta

SEQ ID NO: 5342302 - DNA, 25 bp, Homo sapien
ctcttaggtcaaggagagtagactt

SEQ ID NO: 5342303 - DNA, 25 bp, Homo sapien
ggaagttgccgtagaacagagtgct

SEQ ID NO: 5342304 - DNA, 25 bp, Homo sapien
aagttgccgtagaacagagtgctga

SEQ ID NO: 5342305 - DNA, 25 bp, Homo sapien
gagagtagactttgagatcttggag

SEQ ID NO: 5342306 - DNA, 25 bp, Homo sapien
gggaacctctggcacctgatgactg

SEQ ID NO: 5342307 - DNA, 25 bp, Homo sapien
ggaacctctggcacctgatgactga

SEQ ID NO: 5342308 - DNA, 25 bp, Homo sapien
tgacttgtccaatctgcgtagacag

SEQ ID NO: 5342309 - DNA, 25 bp, Homo sapien
ttagttgtaactccgctgactgacc

SEQ ID NO: 5342310 - DNA, 25 bp, Homo sapien
gcgtagacagtaacagttccccatc

SEQ ID NO: 5342311 - DNA, 25 bp, Homo sapien
ccttttattctcgtgggtgatggcg

SEQ ID NO: 5342312 - DNA, 25 bp, Homo sapien
tggggctgtttgaccacaaaatgtg

SEQ ID NO: 5342313 - DNA, 25 bp, Homo sapien
tggctcttgaccagagacgctctgc

SEQ ID NO: 5342314 - DNA, 25 bp, Homo sapien
tggtggccatcttgtgtgttggctc

SEQ ID NO: 5342315 - DNA, 25 bp, Homo sapien
cactgggttagtggttttatgccaa

SEQ ID NO: 5342316 - DNA, 25 bp, Homo sapien
attcgggtacatgcatgagatggaa

SEQ ID NO: 5342317 - DNA, 25 bp, Homo sapien
catgagatggaaaggcttagctgac

SEQ ID NO: 5342318 - DNA, 25 bp, Homo sapien
ctattcgggtacatgcatgagatgg

SEQ ID NO: 5342319 - DNA, 25 bp, Homo sapien
tcgggtacatgcatgagatggaaag

SEQ ID NO: 5342320 - DNA, 25 bp, Homo sapien
cccgttgcttatgctctgaaaaggc

SEQ ID NO: 5342321 - DNA, 25 bp, Homo sapien
gaaaaggcactgtttgaaacctcaa

SEQ ID NO: 5342322 - DNA, 25 bp, Homo sapien
tgcagccctttccaaactaggtgtt

SEQ ID NO: 5342323 - DNA, 25 bp, Homo sapien
cagtgccagtacttgctgggaatcc

SEQ ID NO: 5342324 - DNA, 25 bp, Homo sapien
ttcaggacggtgagacgaacccgct

SEQ ID NO: 5342325 - DNA, 25 bp, Homo sapien
gtgcacgtcagtatcttggacccct

SEQ ID NO: 5342326 - DNA, 25 bp, Homo sapien
tgtttctgtgtgagttgcaaatggg

SEQ ID NO: 5342327 - DNA, 25 bp, Homo sapien
ggaaggatgtcatcacccccaggtt

SEQ ID NO: 5342328 - DNA, 25 bp, Homo sapien
tccagatttctgaattaaaggctgg

SEQ ID NO: 5342329 - DNA, 25 bp, Homo sapien
tgtccagatttctgaattaaaggct

SEQ ID NO: 5342330 - DNA, 25 bp, Homo sapien
agatttctgaattaaaggctggatc

SEQ ID NO: 5342331 - DNA, 25 bp, Homo sapien
cagatttctgaattaaaggctggat

SEQ ID NO: 5342332 - DNA, 25 bp, Homo sapien
cctgaaccgtgtcagggaacccagg

SEQ ID NO: 5342333 - DNA, 25 bp, Homo sapien
gggaacccaggcattccagcctgtg

SEQ ID NO: 5342334 - DNA, 25 bp, Homo sapien
tgtgagggatgatcggggagtgcca

SEQ ID NO: 5342335 - DNA, 25 bp, Homo sapien
gggagtgccatgctcagcagcctga

SEQ ID NO: 5342336 - DNA, 25 bp, Homo sapien
tctgctgagaaggtatgtgactgtg

SEQ ID NO: 5342337 - DNA, 25 bp, Homo sapien
cgacagcccacttgccatctgggaa

SEQ ID NO: 5342338 - DNA, 25 bp, Homo sapien
gctgtgcttggagttttcggaaacg

SEQ ID NO: 5342339 - DNA, 25 bp, Homo sapien
caaaatgcaatttgcccgtttccgc

SEQ ID NO: 5342340 - DNA, 25 bp, Homo sapien
cagtgagcaattggtgatattaagt

SEQ ID NO: 5342341 - DNA, 25 bp, Homo sapien
ccagtgagcaattggtgatattaag

SEQ ID NO: 5342342 - DNA, 25 bp, Homo sapien
gtgagcaattggtgatattaagtta

SEQ ID NO: 5342343 - DNA, 25 bp, Homo sapien
ttccagtgagcaattggtgatatta

SEQ ID NO: 5342344 - DNA, 25 bp, Homo sapien
acatacagagaaggggggagcacat

SEQ ID NO: 5342345 - DNA, 25 bp, Homo sapien
caccagactgagttacatacagaga

SEQ ID NO: 5342346 - DNA, 25 bp, Homo sapien
ctgacaggacactaggaagaggcac

SEQ ID NO: 5342347 - DNA, 25 bp, Homo sapien
gagcacattcagaggggtcatcacc

SEQ ID NO: 5342348 - DNA, 25 bp, Homo sapien
tgtcttgaaatcttggtcccctcag

SEQ ID NO: 5342349 - DNA, 25 bp, Homo sapien
cctttggaacatctgcaagtatctt

SEQ ID NO: 5342350 - DNA, 25 bp, Homo sapien
caagtatcttgcagatgaacgaggt

SEQ ID NO: 5342351 - DNA, 25 bp, Homo sapien
aacgaggttactaagctggccagca

SEQ ID NO: 5342352 - DNA, 25 bp, Homo sapien
tgggtctgttagagagccccaggct

SEQ ID NO: 5342353 - DNA, 25 bp, Homo sapien
cctgagtagctctagaagacctaag

SEQ ID NO: 5342354 - DNA, 25 bp, Homo sapien
tgtagggttgcccacctgactcagc

SEQ ID NO: 5342355 - DNA, 25 bp, Homo sapien
tgaaactgggcttttcactcctgag

SEQ ID NO: 5342356 - DNA, 25 bp, Homo sapien
ttccggcacccatgttgtaaaatcg

SEQ ID NO: 5342357 - DNA, 25 bp, Homo sapien
cagggagtatgctggccactgaagc

SEQ ID NO: 5342358 - DNA, 25 bp, Homo sapien
gaagcagcttcgtttttccggcacc

SEQ ID NO: 5342359 - DNA, 25 bp, Homo sapien
cgctggtgtatccaagatcaggaca

SEQ ID NO: 5342360 - DNA, 25 bp, Homo sapien
tcacctcttgagaagtcttggacca

SEQ ID NO: 5342361 - DNA, 25 bp, Homo sapien
caaaagattgatttcacgaattccc

SEQ ID NO: 5342362 - DNA, 25 bp, Homo sapien
cctggtaagttacagatggtactgc

SEQ ID NO: 5342363 - DNA, 25 bp, Homo sapien
cactctgattttaaaggttgtggaa

SEQ ID NO: 5342364 - DNA, 25 bp, Homo sapien
atagctcaattgtgtgtaagtggct

SEQ ID NO: 5342365 - DNA, 25 bp, Homo sapien
cctgggctcccagtaatagctcaat

SEQ ID NO: 5342366 - DNA, 25 bp, Homo sapien
caccatactgttaaccactggtacc

SEQ ID NO: 5342367 - DNA, 25 bp, Homo sapien
tctgtgtgctggatgaataggcctc

SEQ ID NO: 5342368 - DNA, 25 bp, Homo sapien
tgtgaccatgggcacatttcctcat

SEQ ID NO: 5342369 - DNA, 25 bp, Homo sapien
aagaggaaggccccgtgctgggagc

SEQ ID NO: 5342370 - DNA, 25 bp, Homo sapien
tggtgtgaccatgggcacatttcct

SEQ ID NO: 5342371 - DNA, 25 bp, Homo sapien
gtgaccatgggcacatttcctcatc

SEQ ID NO: 5342372 - DNA, 25 bp, Homo sapien
agaagcctcgcggagctcaactagg

SEQ ID NO: 5342373 - DNA, 25 bp, Homo sapien
gaagcctcgcggagctcaactagga

SEQ ID NO: 5342374 - DNA, 25 bp, Homo sapien
gcaaacagcggggagcattgtccat

SEQ ID NO: 5342375 - DNA, 25 bp, Homo sapien
tccccggggatgattgtctgagttg

SEQ ID NO: 5342376 - DNA, 25 bp, Homo sapien
tctgagttggtggatgttaatctgc

SEQ ID NO: 5342377 - DNA, 25 bp, Homo sapien
aatgggaggttaatgtgcaaacagc

SEQ ID NO: 5342378 - DNA, 25 bp, Homo sapien
taggaaatcttagtgctcgctgctg

SEQ ID NO: 5342379 - DNA, 25 bp, Homo sapien
aactgctctgtcagtaagcgccccg

SEQ ID NO: 5342380 - DNA, 25 bp, Homo sapien
aacttggatagagaccctttgagcc

SEQ ID NO: 5342381 - DNA, 25 bp, Homo sapien
gaaatgctggtagagagccttgaaa

SEQ ID NO: 5342382 - DNA, 25 bp, Homo sapien
caagtgcttacagcgaaccagatgc

SEQ ID NO: 5342383 - DNA, 25 bp, Homo sapien
ggcaaacactgcttcatccacaatg

SEQ ID NO: 5342384 - DNA, 25 bp, Homo sapien
gcaaattgcagcacctggaactaag

SEQ ID NO: 5342385 - DNA, 25 bp, Homo sapien
tggaactaagacatccctggagggc

SEQ ID NO: 5342386 - DNA, 25 bp, Homo sapien
atgaggttgatgggcgcatcttcac

SEQ ID NO: 5342387 - DNA, 25 bp, Homo sapien
taacaaggttcgtatactcattaaa

SEQ ID NO: 5342388 - DNA, 25 bp, Homo sapien
tcttccgcatcatctaataacaagg

SEQ ID NO: 5342389 - DNA, 25 bp, Homo sapien
gccctggccatggtatgccatggtg

SEQ ID NO: 5342390 - DNA, 25 bp, Homo sapien
tacccagggtggtagtccagtcact

SEQ ID NO: 5342391 - DNA, 25 bp, Homo sapien
tgggccaatgaccaaaggtacccag

SEQ ID NO: 5342392 - DNA, 25 bp, Homo sapien
cttcacttgggccaatgaccaaagg

SEQ ID NO: 5342393 - DNA, 25 bp, Homo sapien
tccatgtgcaactggggaaagctgc

SEQ ID NO: 5342394 - DNA, 25 bp, Homo sapien
tttcgaggcataggccaaggttctg

SEQ ID NO: 5342395 - DNA, 25 bp, Homo sapien
cagagaacaccagctttcgaggcat

SEQ ID NO: 5342396 - DNA, 25 bp, Homo sapien
aaggttctgaggagcggctggagga

SEQ ID NO: 5342397 - DNA, 25 bp, Homo sapien
gctgaggggcctcttaggaaaaaga

SEQ ID NO: 5342398 - DNA, 25 bp, Homo sapien
ccagcgtatgttgcccaggaaccat

SEQ ID NO: 5342399 - DNA, 25 bp, Homo sapien
tggccccagcgtatgttgcccagga

SEQ ID NO: 5342400 - DNA, 25 bp, Homo sapien
tgaaggcttccaaacggctgaggtc

SEQ ID NO: 5342401 - DNA, 25 bp, Homo sapien
gcttccaaacggctgaggtcacatt

SEQ ID NO: 5342402 - DNA, 25 bp, Homo sapien
gcagcaggtatccttgtccagggcc

SEQ ID NO: 5342403 - DNA, 25 bp, Homo sapien
ctttgtttcccgctggtcattggtc

SEQ ID NO: 5342404 - DNA, 25 bp, Homo sapien
ttcagtgcagcaggtatccttgtcc

SEQ ID NO: 5342405 - DNA, 25 bp, Homo sapien
cattggtccagcatgcttccggtgg

SEQ ID NO: 5342406 - DNA, 25 bp, Homo sapien
ggtccccagtggcagcggactttcc

SEQ ID NO: 5342407 - DNA, 25 bp, Homo sapien
tccccagtggcagcggactttccca

SEQ ID NO: 5342408 - DNA, 25 bp, Homo sapien
gtccccagtggcagcggactttccc

SEQ ID NO: 5342409 - DNA, 25 bp, Homo sapien
ttaatctccgtagctcattggcagt

SEQ ID NO: 5342410 - DNA, 25 bp, Homo sapien
taatctccgtagctcattggcagtc

SEQ ID NO: 5342411 - DNA, 25 bp, Homo sapien
cagctgttttacatcacgaagattt

SEQ ID NO: 5342412 - DNA, 25 bp, Homo sapien
tacatcacgaagatttgtgtgttgg

SEQ ID NO: 5342413 - DNA, 25 bp, Homo sapien
tcatcagtctaagcagacacagaag

SEQ ID NO: 5342414 - DNA, 25 bp, Homo sapien
gcaaccgtaaagcagtgaggccaaa

SEQ ID NO: 5342415 - DNA, 25 bp, Homo sapien
caagtctagcccagctgtgggccgt

SEQ ID NO: 5342416 - DNA, 25 bp, Homo sapien
tagggtcacgataaggcccacagga

SEQ ID NO: 5342417 - DNA, 25 bp, Homo sapien
gtaagtgcacactctgggcagagga

SEQ ID NO: 5342418 - DNA, 25 bp, Homo sapien
tggtcagcccgggacaactatgtaa

SEQ ID NO: 5342419 - DNA, 25 bp, Homo sapien
agcggcagcttcactcgcagctcta

SEQ ID NO: 5342420 - DNA, 25 bp, Homo sapien
gcagaggacgctcagaccccaggaa

SEQ ID NO: 5342421 - DNA, 25 bp, Homo sapien
tggagaaagcggtcctctgaaatgg

SEQ ID NO: 5342422 - DNA, 25 bp, Homo sapien
tgtgaggccatcaccatgtgagaag

SEQ ID NO: 5342423 - DNA, 25 bp, Homo sapien
tttaaagggactcaaggtgcctgcc

SEQ ID NO: 5342424 - DNA, 25 bp, Homo sapien
tcatcgtctgctcaataccgtgggt

SEQ ID NO: 5342425 - DNA, 25 bp, Homo sapien
aatttgccgcctggaatgacattca

SEQ ID NO: 5342426 - DNA, 25 bp, Homo sapien
aaaccctgtgttagactttcgcaga

SEQ ID NO: 5342427 - DNA, 25 bp, Homo sapien
tctcaaatgtgcatgggccagtcag

SEQ ID NO: 5342428 - DNA, 25 bp, Homo sapien
tcagtgtccatgactgagctgcaaa

SEQ ID NO: 5342429 - DNA, 25 bp, Homo sapien
cctagatggtgtacacacctaggct

SEQ ID NO: 5342430 - DNA, 25 bp, Homo sapien
catcatagagtgtagttagaaaaac

SEQ ID NO: 5342431 - DNA, 25 bp, Homo sapien
gctacaagcctgtacagcatatgct

SEQ ID NO: 5342432 - DNA, 25 bp, Homo sapien
tgaatactgtaggtgactgtgacac

SEQ ID NO: 5342433 - DNA, 25 bp, Homo sapien
tgggaactgacactgtcctggccag

SEQ ID NO: 5342434 - DNA, 25 bp, Homo sapien
gacttctttgtatgactggcagtgc

SEQ ID NO: 5342435 - DNA, 25 bp, Homo sapien
ctgagagacaagatcaaaactctgt

SEQ ID NO: 5342436 - DNA, 25 bp, Homo sapien
tgggtggctccaccaatgccagcct

SEQ ID NO: 5342437 - DNA, 25 bp, Homo sapien
cacatgcattggcatccctctggag

SEQ ID NO: 5342438 - DNA, 25 bp, Homo sapien
gatgtcacactaagaatcatgcatg

SEQ ID NO: 5342439 - DNA, 25 bp, Homo sapien
tccgtgactgcataaaagttcatcc

SEQ ID NO: 5342440 - DNA, 25 bp, Homo sapien
cctgaaatcaggctggtaatgagct

SEQ ID NO: 5342441 - DNA, 25 bp, Homo sapien
ggcaatggaatcactgtttccagct

SEQ ID NO: 5342442 - DNA, 25 bp, Homo sapien
gggcaatggaatcactgtttccagc

SEQ ID NO: 5342443 - DNA, 25 bp, Homo sapien
ggggcaatggaatcactgtttccag

SEQ ID NO: 5342444 - DNA, 25 bp, Homo sapien
tcaggtggcaagagagttggtcagg

SEQ ID NO: 5342445 - DNA, 25 bp, Homo sapien
tgaaggaaggctcaaaaggcataaa

SEQ ID NO: 5342446 - DNA, 25 bp, Homo sapien
ccagctactgaaagcaggcagccag

SEQ ID NO: 5342447 - DNA, 25 bp, Homo sapien
tgcaatttactggtacatgtgtgtg

SEQ ID NO: 5342448 - DNA, 25 bp, Homo sapien
tcaggttaccctgtacagtcaacgg

SEQ ID NO: 5342449 - DNA, 25 bp, Homo sapien
cagtcaacggccatagaagtcgcca

SEQ ID NO: 5342450 - DNA, 25 bp, Homo sapien
cttagctgactataggaggtgcctc

SEQ ID NO: 5342451 - DNA, 25 bp, Homo sapien
tcagcacatgtgtcactggaagcca

SEQ ID NO: 5342452 - DNA, 25 bp, Homo sapien
ttgacagacagagaccgaagtgagt

SEQ ID NO: 5342453 - DNA, 25 bp, Homo sapien
gaagtcctaaggaaggtcaccatga

SEQ ID NO: 5342454 - DNA, 25 bp, Homo sapien
aaatctgggtgcatacgaaggtgga

SEQ ID NO: 5342455 - DNA, 25 bp, Homo sapien
tggactccgtgacaaaatgtacgcg

SEQ ID NO: 5342456 - DNA, 25 bp, Homo sapien
agttttcccctaggtctgcagagag

SEQ ID NO: 5342457 - DNA, 25 bp, Homo sapien
tatgctcggtacaactaagtggaag

SEQ ID NO: 5342458 - DNA, 25 bp, Homo sapien
gacccgccactaaattctagaggag

SEQ ID NO: 5342459 - DNA, 25 bp, Homo sapien
caagaagatctcatgctagacaggt

SEQ ID NO: 5342460 - DNA, 25 bp, Homo sapien
gagcagcacaatccattggtgacgt

SEQ ID NO: 5342461 - DNA, 25 bp, Homo sapien
tcaaagctgaaacgagagcagcaca

SEQ ID NO: 5342462 - DNA, 25 bp, Homo sapien
gaaacgagagcagcacaatccattg

SEQ ID NO: 5342463 - DNA, 25 bp, Homo sapien
gctgaaacgagagcagcacaatcca

SEQ ID NO: 5342464 - DNA, 25 bp, Homo sapien
ttttccagaggaatataccattctg

SEQ ID NO: 5342465 - DNA, 25 bp, Homo sapien
atctttttccagaggaatataccat

SEQ ID NO: 5342466 - DNA, 25 bp, Homo sapien
tcatctttttccagaggaatatacc

SEQ ID NO: 5342467 - DNA, 25 bp, Homo sapien
ctttttccagaggaatataccattc

SEQ ID NO: 5342468 - DNA, 25 bp, Homo sapien
tttaggaggtgcagggaaaacattc

SEQ ID NO: 5342469 - DNA, 25 bp, Homo sapien
ggaggtgcagggaaaacattcagaa

SEQ ID NO: 5342470 - DNA, 25 bp, Homo sapien
ttaggaggtgcagggaaaacattca

SEQ ID NO: 5342471 - DNA, 25 bp, Homo sapien
cttttaggaggtgcagggaaaacat

SEQ ID NO: 5342472 - DNA, 25 bp, Homo sapien
tgaaatgaaacctaacactagaaag

SEQ ID NO: 5342473 - DNA, 25 bp, Homo sapien
gatatacacttgatggagagagagg

SEQ ID NO: 5342474 - DNA, 25 bp, Homo sapien
cactagaaagatatacacttgatgg

SEQ ID NO: 5342475 - DNA, 25 bp, Homo sapien
gaaagatatacacttgatggagaga

SEQ ID NO: 5342476 - DNA, 25 bp, Homo sapien
cacctcggcttcctcagtagtagct

SEQ ID NO: 5342477 - DNA, 25 bp, Homo sapien
tcggcttcctcagtagtagctggga

SEQ ID NO: 5342478 - DNA, 25 bp, Homo sapien
tagctgggattaccatgcccagcta

SEQ ID NO: 5342479 - DNA, 25 bp, Homo sapien
cccacctcggcttcctcagtagtag

SEQ ID NO: 5342480 - DNA, 25 bp, Homo sapien
tctttgccaatgtcctggctgttgc

SEQ ID NO: 5342481 - DNA, 25 bp, Homo sapien
atggttctttgccaatgtcctggct

SEQ ID NO: 5342482 - DNA, 25 bp, Homo sapien
tcatagttgggccaccaatggttct

SEQ ID NO: 5342483 - DNA, 25 bp, Homo sapien
tgccaatgtcctggctgttgctatg

SEQ ID NO: 5342484 - DNA, 25 bp, Homo sapien
tggcaaatgcaagcccactactggg

SEQ ID NO: 5342485 - DNA, 25 bp, Homo sapien
taaaaagggcgaatgcaacagcaac

SEQ ID NO: 5342486 - DNA, 25 bp, Homo sapien
aaggtctctgctagctctaacgtca

SEQ ID NO: 5342487 - DNA, 25 bp, Homo sapien
taaagtttatggagcgctggcagaa

SEQ ID NO: 5342488 - DNA, 25 bp, Homo sapien
ctatccctcccatggacctggctcc

SEQ ID NO: 5342489 - DNA, 25 bp, Homo sapien
ctcccatggacctggctcctccttc

SEQ ID NO: 5342490 - DNA, 25 bp, Homo sapien
ccctcccatggacctggctcctcct

SEQ ID NO: 5342491 - DNA, 25 bp, Homo sapien
atccctcccatggacctggctcctc

SEQ ID NO: 5342492 - DNA, 25 bp, Homo sapien
cttctggtccaaacgttggtagtca

SEQ ID NO: 5342493 - DNA, 25 bp, Homo sapien
tccaaacgttggtagtcactggcct

SEQ ID NO: 5342494 - DNA, 25 bp, Homo sapien
tttggccgccgggtgactttagatc

SEQ ID NO: 5342495 - DNA, 25 bp, Homo sapien
tggccgccgggtgactttagatctt

SEQ ID NO: 5342496 - DNA, 25 bp, Homo sapien
tgatgagcgatatagaggacagcca

SEQ ID NO: 5342497 - DNA, 25 bp, Homo sapien
cagtcaccagatatgcaaagaagtg

SEQ ID NO: 5342498 - DNA, 25 bp, Homo sapien
ggtcatccttctcgctacccgtgga

SEQ ID NO: 5342499 - DNA, 25 bp, Homo sapien
tccagaaccgttcggataaaggtca

SEQ ID NO: 5342500 - DNA, 25 bp, Homo sapien
gagaaagcttccctttgtcagcaag

SEQ ID NO: 5342501 - DNA, 25 bp, Homo sapien
ttgtcagcaagctggtttgtgtcag

SEQ ID NO: 5342502 - DNA, 25 bp, Homo sapien
tccccagattcggttttgaaagcat

SEQ ID NO: 5342503 - DNA, 25 bp, Homo sapien
ccttgttatcagaagggttggagat

SEQ ID NO: 5342504 - DNA, 25 bp, Homo sapien
tctgcaccggacttgttagagccgt

SEQ ID NO: 5342505 - DNA, 25 bp, Homo sapien
tagggctgtcttttgaggtctgctc

SEQ ID NO: 5342506 - DNA, 25 bp, Homo sapien
cgacttgctggagccgtcttttggg

SEQ ID NO: 5342507 - DNA, 25 bp, Homo sapien
tgcttctccgcacccgacttgttag

SEQ ID NO: 5342508 - DNA, 25 bp, Homo sapien
ttgggtctttgcctccgcacccgac

SEQ ID NO: 5342509 - DNA, 25 bp, Homo sapien
tttgggtctttgcctccgcacccga

SEQ ID NO: 5342510 - DNA, 25 bp, Homo sapien
cccgacttgctagtgctgccttttt

SEQ ID NO: 5342511 - DNA, 25 bp, Homo sapien
aacccgacttgctagtgctgccttt

SEQ ID NO: 5342512 - DNA, 25 bp, Homo sapien
cgaacccgacttgctagtgctgcct

SEQ ID NO: 5342513 - DNA, 25 bp, Homo sapien
tccgaacccgacttgctagtgctgc

SEQ ID NO: 5342514 - DNA, 25 bp, Homo sapien
ttgcctccgcacccgacttgttggg

SEQ ID NO: 5342515 - DNA, 25 bp, Homo sapien
tcttgcttgacgctttcggtggcca

SEQ ID NO: 5342516 - DNA, 25 bp, Homo sapien
tccggatgcgacttggtagagcctc

SEQ ID NO: 5342517 - DNA, 25 bp, Homo sapien
gagacgtttcctgcagaaggccgta

SEQ ID NO: 5342518 - DNA, 25 bp, Homo sapien
ctagggctgtcttttggagtctgcg

SEQ ID NO: 5342519 - DNA, 25 bp, Homo sapien
aacgagttagcaccggagaagggca

SEQ ID NO: 5342520 - DNA, 25 bp, Homo sapien
gtcgggtagggaagaagcgagccta

SEQ ID NO: 5342521 - DNA, 25 bp, Homo sapien
gggcgggagacgatggcgagcggag

SEQ ID NO: 5342522 - DNA, 25 bp, Homo sapien
gcgagcggagaggtgggtcgggtag

SEQ ID NO: 5342523 - DNA, 25 bp, Homo sapien
tgcgacgttcaggaggaccaaggca

SEQ ID NO: 5342524 - DNA, 25 bp, Homo sapien
ccgccgctgcgacgttcaggaggac

SEQ ID NO: 5342525 - DNA, 25 bp, Homo sapien
ttcaggaggaccaaggcaaccacga

SEQ ID NO: 5342526 - DNA, 25 bp, Homo sapien
ggaccaaggcaaccacgaaccgcat

SEQ ID NO: 5342527 - DNA, 25 bp, Homo sapien
cggatagcgcttccgccctctaatg

SEQ ID NO: 5342528 - DNA, 25 bp, Homo sapien
cgccaagacgaagggcgggatttag

SEQ ID NO: 5342529 - DNA, 25 bp, Homo sapien
ctgatgtcggcgctcgccttcggct

SEQ ID NO: 5342530 - DNA, 25 bp, Homo sapien
ctctaatgctctcgcgagatccgcg

SEQ ID NO: 5342531 - DNA, 25 bp, Homo sapien
catccgatcacctgcaaagcgttgc

SEQ ID NO: 5342532 - DNA, 25 bp, Homo sapien
cactggccgcggaagtgaggtcact

SEQ ID NO: 5342533 - DNA, 25 bp, Homo sapien
cgtacttccgagaccttacaggcag

SEQ ID NO: 5342534 - DNA, 25 bp, Homo sapien
tcccatgtgggaataaatccatccg

SEQ ID NO: 5342535 - DNA, 25 bp, Homo sapien
aatacaaagtgtagtgatactaatg

SEQ ID NO: 5342536 - DNA, 25 bp, Homo sapien
ttaatacaaagtgtagtgatactaa

SEQ ID NO: 5342537 - DNA, 25 bp, Homo sapien
atacaaagtgtagtgatactaatgt

SEQ ID NO: 5342538 - DNA, 25 bp, Homo sapien
tattaatacaaagtgtagtgatact

SEQ ID NO: 5342539 - DNA, 25 bp, Homo sapien
attatacatgcaacactgaactggg

SEQ ID NO: 5342540 - DNA, 25 bp, Homo sapien
ctattatacatgcaacactgaactg

SEQ ID NO: 5342541 - DNA, 25 bp, Homo sapien
cagagtgagtgagtaaaattataaa

SEQ ID NO: 5342542 - DNA, 25 bp, Homo sapien
accatctgactggtcaggtctcacc

SEQ ID NO: 5342543 - DNA, 25 bp, Homo sapien
taaaccagccagacatagcggtgga

SEQ ID NO: 5342544 - DNA, 25 bp, Homo sapien
aaaccagccagacatagcggtggag

SEQ ID NO: 5342545 - DNA, 25 bp, Homo sapien
taaatgctggtgggtctattcttaa

SEQ ID NO: 5342546 - DNA, 25 bp, Homo sapien
ctaaatgctggtgggtctattctta

SEQ ID NO: 5342547 - DNA, 25 bp, Homo sapien
aaatgctggtgggtctattcttaac

SEQ ID NO: 5342548 - DNA, 25 bp, Homo sapien
gtgctgtgaccgctcgtccatttct

SEQ ID NO: 5342549 - DNA, 25 bp, Homo sapien
agcaggtgctgtgaccgctcgtcca

SEQ ID NO: 5342550 - DNA, 25 bp, Homo sapien
tgtgaccgctcgtccatttctcgca

SEQ ID NO: 5342551 - DNA, 25 bp, Homo sapien
tgaccgctcgtccatttctcgcagg

SEQ ID NO: 5342552 - DNA, 25 bp, Homo sapien
tgcgggcggcaacagcgacatggag

SEQ ID NO: 5342553 - DNA, 25 bp, Homo sapien
aggtgcgggcggcaacagcgacatg

SEQ ID NO: 5342554 - DNA, 25 bp, Homo sapien
gcaacagcgacatggagagctcagc

SEQ ID NO: 5342555 - DNA, 25 bp, Homo sapien
cgggcggcaacagcgacatggagag

SEQ ID NO: 5342556 - DNA, 25 bp, Homo sapien
tgcaaatgccatcacaataatagtt

SEQ ID NO: 5342557 - DNA, 25 bp, Homo sapien
aaatgccatcacaataatagttttg

SEQ ID NO: 5342558 - DNA, 25 bp, Homo sapien
gcttattttggtgttattcagtata

SEQ ID NO: 5342559 - DNA, 25 bp, Homo sapien
gtgttttactgagcttctgcaaatg

SEQ ID NO: 5342560 - DNA, 25 bp, Homo sapien
gctgccaccccgatgataaggaaga

SEQ ID NO: 5342561 - DNA, 25 bp, Homo sapien
gagcgccgctcgtcatgagacatca

SEQ ID NO: 5342562 - DNA, 25 bp, Homo sapien
gacatgcaccctactaactgatgga

SEQ ID NO: 5342563 - DNA, 25 bp, Homo sapien
tgaacccagcacaaaagagatctag

SEQ ID NO: 5342564 - DNA, 25 bp, Homo sapien
gaatcaagattcttaaggtctgagt

SEQ ID NO: 5342565 - DNA, 25 bp, Homo sapien
tgtgcccggatcctagaatcaagat

SEQ ID NO: 5342566 - DNA, 25 bp, Homo sapien
gcccggatcctagaatcaagattct

SEQ ID NO: 5342567 - DNA, 25 bp, Homo sapien
cttctgtgcccggatcctagaatca

SEQ ID NO: 5342568 - DNA, 25 bp, Homo sapien
caaggaggccatcacacaagggtgc

SEQ ID NO: 5342569 - DNA, 25 bp, Homo sapien
ggctctgggccctcaaggaggccat

SEQ ID NO: 5342570 - DNA, 25 bp, Homo sapien
atcacacaagggtgcaggcggccca

SEQ ID NO: 5342571 - DNA, 25 bp, Homo sapien
ggccctcaaggaggccatcacacaa

SEQ ID NO: 5342572 - DNA, 25 bp, Homo sapien
aactggttggtgagtggggatcctg

SEQ ID NO: 5342573 - DNA, 25 bp, Homo sapien
tttcccttcagctccgcctgccact

SEQ ID NO: 5342574 - DNA, 25 bp, Homo sapien
gtttttgaaggtctcatagtcactg

SEQ ID NO: 5342575 - DNA, 25 bp, Homo sapien
ggtctcatagtcactgccccgcttt

SEQ ID NO: 5342576 - DNA, 25 bp, Homo sapien
tgaaggtctcatagtcactgccccg

SEQ ID NO: 5342577 - DNA, 25 bp, Homo sapien
gctgatgggaaagcgaagaagagaa

SEQ ID NO: 5342578 - DNA, 25 bp, Homo sapien
ggaatcggtcctcccaggtcggatc

SEQ ID NO: 5342579 - DNA, 25 bp, Homo sapien
tgatgggaaagcgaagaagagaaga

SEQ ID NO: 5342580 - DNA, 25 bp, Homo sapien
tgggaatcggtcctcccaggtcgga

SEQ ID NO: 5342581 - DNA, 25 bp, Homo sapien
ccgtgtcatagtaaacatagtagtt

SEQ ID NO: 5342582 - DNA, 25 bp, Homo sapien
acatagtagttggtggacggcagat

SEQ ID NO: 5342583 - DNA, 25 bp, Homo sapien
aacagaggtcatgcctaagccgggc

SEQ ID NO: 5342584 - DNA, 25 bp, Homo sapien
tccttggtgcctcgcaggcagatga

SEQ ID NO: 5342585 - DNA, 25 bp, Homo sapien
cttaaggacaatcagagggccggcc

SEQ ID NO: 5342586 - DNA, 25 bp, Homo sapien
aagaagaggagaagcatgacccaca

SEQ ID NO: 5342587 - DNA, 25 bp, Homo sapien
cacacggagcaggttggctccagaa

SEQ ID NO: 5342588 - DNA, 25 bp, Homo sapien
cttgttgcttaaggacaatcagagg

SEQ ID NO: 5342589 - DNA, 25 bp, Homo sapien
caagaggggcagtgcagacccgcct

SEQ ID NO: 5342590 - DNA, 25 bp, Homo sapien
gaggggcagtgcagacccgcctttt

SEQ ID NO: 5342591 - DNA, 25 bp, Homo sapien
agaggggcagtgcagacccgccttt

SEQ ID NO: 5342592 - DNA, 25 bp, Homo sapien
ggggcagtgcagacccgccttttac

SEQ ID NO: 5342593 - DNA, 25 bp, Homo sapien
ttcataggtgttgaacagtcctgcg

SEQ ID NO: 5342594 - DNA, 25 bp, Homo sapien
tagatgttcaccagctcatgcccct

SEQ ID NO: 5342595 - DNA, 25 bp, Homo sapien
cagtcctgcgttggagaccacgatg

SEQ ID NO: 5342596 - DNA, 25 bp, Homo sapien
ggcgttccccggcagtaggtgttca

SEQ ID NO: 5342597 - DNA, 25 bp, Homo sapien
agcctcctttcatgtagtggttgac

SEQ ID NO: 5342598 - DNA, 25 bp, Homo sapien
agtggcctttgtgaggacagcgccc

SEQ ID NO: 5342599 - DNA, 25 bp, Homo sapien
ttcatgtagtggttgaccagcaggg

SEQ ID NO: 5342600 - DNA, 25 bp, Homo sapien
gtggcctttgtgaggacagcgcccc

SEQ ID NO: 5342601 - DNA, 25 bp, Homo sapien
aaaggcactgtggttgggggtgaca

SEQ ID NO: 5342602 - DNA, 25 bp, Homo sapien
gaaaaggcactgtggttgggggtga

SEQ ID NO: 5342603 - DNA, 25 bp, Homo sapien
aaggcactgtggttgggggtgacac

SEQ ID NO: 5342604 - DNA, 25 bp, Homo sapien
gaagatgtagctgagtactgcctgg

SEQ ID NO: 5342605 - DNA, 25 bp, Homo sapien
aatggagagaaacgagtcagcagcc

SEQ ID NO: 5342606 - DNA, 25 bp, Homo sapien
agcccacacctgtcgaggagctgaa

SEQ ID NO: 5342607 - DNA, 25 bp, Homo sapien
cacgggcaatgggaggaatttcaac

SEQ ID NO: 5342608 - DNA, 25 bp, Homo sapien
tgatctggtccaagataaaacggcc

SEQ ID NO: 5342609 - DNA, 25 bp, Homo sapien
tgtcaatgatagcttcctcctgtgg

SEQ ID NO: 5342610 - DNA, 25 bp, Homo sapien
cattgggcccttccagtaccatgat

SEQ ID NO: 5342611 - DNA, 25 bp, Homo sapien
taccatgatgtcaaaaggagaggac

SEQ ID NO: 5342612 - DNA, 25 bp, Homo sapien
gctttagctagaattgcagctgcag

SEQ ID NO: 5342613 - DNA, 25 bp, Homo sapien
caccaggactcgcttgccagcttta

SEQ ID NO: 5342614 - DNA, 25 bp, Homo sapien
caaattcaaggccattctttccaaa

SEQ ID NO: 5342615 - DNA, 25 bp, Homo sapien
tctccggcacttggttggctgaaaa

SEQ ID NO: 5342616 - DNA, 25 bp, Homo sapien
ttttatgttttatagagccaaagtc

SEQ ID NO: 5342617 - DNA, 25 bp, Homo sapien
cctattttatgttttatagagccaa

SEQ ID NO: 5342618 - DNA, 25 bp, Homo sapien
atgttttatagagccaaagtcttgc

SEQ ID NO: 5342619 - DNA, 25 bp, Homo sapien
caccgcgccccgcctattttatgtt

SEQ ID NO: 5342620 - DNA, 25 bp, Homo sapien
gggccgtttgacatcttcggagaaa

SEQ ID NO: 5342621 - DNA, 25 bp, Homo sapien
cgctgggggccgtttgacatcttcg

SEQ ID NO: 5342622 - DNA, 25 bp, Homo sapien
tccttgtcagttaccaggggcgctg

SEQ ID NO: 5342623 - DNA, 25 bp, Homo sapien
tgacatcttcggagaaaggattcgg

SEQ ID NO: 5342624 - DNA, 25 bp, Homo sapien
gaatagtcccaagtaaactttgcag

SEQ ID NO: 5342625 - DNA, 25 bp, Homo sapien
tgccagagaatagtcccaagtaaac

SEQ ID NO: 5342626 - DNA, 25 bp, Homo sapien
ccagagaatagtcccaagtaaactt

SEQ ID NO: 5342627 - DNA, 25 bp, Homo sapien
gagaatagtcccaagtaaactttgc

SEQ ID NO: 5342628 - DNA, 25 bp, Homo sapien
gttctgtccaaaggctgctcacagc

SEQ ID NO: 5342629 - DNA, 25 bp, Homo sapien
tatgcgaaagttctgtccaaaggct

SEQ ID NO: 5342630 - DNA, 25 bp, Homo sapien
aattgagctctctgttacctgcgca

SEQ ID NO: 5342631 - DNA, 25 bp, Homo sapien
ctgtctgactggttgtcatgatgaa

SEQ ID NO: 5342632 - DNA, 25 bp, Homo sapien
gtaactgtccctactgaaggcccca

SEQ ID NO: 5342633 - DNA, 25 bp, Homo sapien
gaagagccctcctgagattgctatt

SEQ ID NO: 5342634 - DNA, 25 bp, Homo sapien
gattgctattaccatacccgcctgt

SEQ ID NO: 5342635 - DNA, 25 bp, Homo sapien
tcacgattctatgctacttggttca

SEQ ID NO: 5342636 - DNA, 25 bp, Homo sapien
aggaacaaacttaggctcataagcc

SEQ ID NO: 5342637 - DNA, 25 bp, Homo sapien
ataggaacaaacttaggctcataag

SEQ ID NO: 5342638 - DNA, 25 bp, Homo sapien
taggaacaaacttaggctcataagc

SEQ ID NO: 5342639 - DNA, 25 bp, Homo sapien
ggtatctccagagttcatccttttt

SEQ ID NO: 5342640 - DNA, 25 bp, Homo sapien
tactgggaaaagttgcaacatttac

SEQ ID NO: 5342641 - DNA, 25 bp, Homo sapien
cacagagcagaaatccaaataccac

SEQ ID NO: 5342642 - DNA, 25 bp, Homo sapien
cagtattcattatggttggtatctc

SEQ ID NO: 5342643 - DNA, 25 bp, Homo sapien
atgggacttcacattcgtatttgtc

SEQ ID NO: 5342644 - DNA, 25 bp, Homo sapien
gggacttcacattcgtatttgtctt

SEQ ID NO: 5342645 - DNA, 25 bp, Homo sapien
tggaatgggacttcacattcgtatt

SEQ ID NO: 5342646 - DNA, 25 bp, Homo sapien
gaatgggacttcacattcgtatttg

SEQ ID NO: 5342647 - DNA, 25 bp, Homo sapien
ttaggcaagactaggatctaatgac

SEQ ID NO: 5342648 - DNA, 25 bp, Homo sapien
taggaccgatttgctttataatact

SEQ ID NO: 5342649 - DNA, 25 bp, Homo sapien
acattaggcaagactaggatctaat

SEQ ID NO: 5342650 - DNA, 25 bp, Homo sapien
atggtaggaccgatttgctttataa

SEQ ID NO: 5342651 - DNA, 25 bp, Homo sapien
agatttggcaggacatagggctggg

SEQ ID NO: 5342652 - DNA, 25 bp, Homo sapien
aaaaagatttggcaggacatagggc

SEQ ID NO: 5342653 - DNA, 25 bp, Homo sapien
ttggcaggacatagggctgggtgca

SEQ ID NO: 5342654 - DNA, 25 bp, Homo sapien
aaaaaagatttggcaggacataggg

SEQ ID NO: 5342655 - DNA, 25 bp, Homo sapien
tatacgtacaggtttgggcccagag

SEQ ID NO: 5342656 - DNA, 25 bp, Homo sapien
catggaaaggactctaggttttacg

SEQ ID NO: 5342657 - DNA, 25 bp, Homo sapien
ccatctggatttatacgtacaggtt

SEQ ID NO: 5342658 - DNA, 25 bp, Homo sapien
gagaggtggtcgtagatgatgggcc

SEQ ID NO: 5342659 - DNA, 25 bp, Homo sapien
gaaccactcagttggaatcttcagg

SEQ ID NO: 5342660 - DNA, 25 bp, Homo sapien
ggtttctaagcccaaacgtgaggca

SEQ ID NO: 5342661 - DNA, 25 bp, Homo sapien
tgtttctgaacaaagccatagctcc

SEQ ID NO: 5342662 - DNA, 25 bp, Homo sapien
cagcagccgcagaagatactctggt

SEQ ID NO: 5342663 - DNA, 25 bp, Homo sapien
caagtgcccaccagtacacctagct

SEQ ID NO: 5342664 - DNA, 25 bp, Homo sapien
tgttaatacctacttgggccaggtg

SEQ ID NO: 5342665 - DNA, 25 bp, Homo sapien
aaatctgtctcataaggccaggcgc

SEQ ID NO: 5342666 - DNA, 25 bp, Homo sapien
cagctacccatgttgaggcaagtat

SEQ ID NO: 5342667 - DNA, 25 bp, Homo sapien
gcatcaatggtgttctcagctaccc

SEQ ID NO: 5342668 - DNA, 25 bp, Homo sapien
ccgagatgaatggaggcttaaaggc

SEQ ID NO: 5342669 - DNA, 25 bp, Homo sapien
cactcatccgaaggcgtatggctga

SEQ ID NO: 5342670 - DNA, 25 bp, Homo sapien
tggctgatctgacctccgagatgaa

SEQ ID NO: 5342671 - DNA, 25 bp, Homo sapien
gcacagaagtgctatgggccagaag

SEQ ID NO: 5342672 - DNA, 25 bp, Homo sapien
caatgtgcctacgaagtaataagcc

SEQ ID NO: 5342673 - DNA, 25 bp, Homo sapien
tgaacacccggatgcaactgatcct

SEQ ID NO: 5342674 - DNA, 25 bp, Homo sapien
taaatggaactgcatcccaagccca

SEQ ID NO: 5342675 - DNA, 25 bp, Homo sapien
ggctgggactcctctgtcatgcaaa

SEQ ID NO: 5342676 - DNA, 25 bp, Homo sapien
cacttgtctcctttattgaacatct

SEQ ID NO: 5342677 - DNA, 25 bp, Homo sapien
ttgtctcctttattgaacatctgca

SEQ ID NO: 5342678 - DNA, 25 bp, Homo sapien
tctcctttattgaacatctgcaggg

SEQ ID NO: 5342679 - DNA, 25 bp, Homo sapien
gcacttgtctcctttattgaacatc

SEQ ID NO: 5342680 - DNA, 25 bp, Homo sapien
gagcatggggcaggaagacgcccac

SEQ ID NO: 5342681 - DNA, 25 bp, Homo sapien
cagccagagaagcaagcaggcaggt

SEQ ID NO: 5342682 - DNA, 25 bp, Homo sapien
tctgcactgaccaggcagccagaga

SEQ ID NO: 5342683 - DNA, 25 bp, Homo sapien
ggcacctctgcactgaccaggcagc

SEQ ID NO: 5342684 - DNA, 25 bp, Homo sapien
gaaaaattgcttgaagatgggactc

SEQ ID NO: 5342685 - DNA, 25 bp, Homo sapien
aattgcttgaagatgggactctcat

SEQ ID NO: 5342686 - DNA, 25 bp, Homo sapien
tttccagtccttgaaaaattgcttg

SEQ ID NO: 5342687 - DNA, 25 bp, Homo sapien
gcttgaagatgggactctcatggcc

SEQ ID NO: 5342688 - DNA, 25 bp, Homo sapien
ccgctccttctcattcgcttttcgc

SEQ ID NO: 5342689 - DNA, 25 bp, Homo sapien
tgttcggggcgtactgcatgcgcga

SEQ ID NO: 5342690 - DNA, 25 bp, Homo sapien
tgcgcgagatgaagccctcggccac

SEQ ID NO: 5342691 - DNA, 25 bp, Homo sapien
cgctccttctcattcgcttttcgcc

SEQ ID NO: 5342692 - DNA, 25 bp, Homo sapien
ctcttgaattcatcaagccttttct

SEQ ID NO: 5342693 - DNA, 25 bp, Homo sapien
ttgaattcatcaagccttttctgaa

SEQ ID NO: 5342694 - DNA, 25 bp, Homo sapien
tcttgaattcatcaagccttttctg

SEQ ID NO: 5342695 - DNA, 25 bp, Homo sapien
gaattcatcaagccttttctgaaaa

SEQ ID NO: 5342696 - DNA, 25 bp, Homo sapien
cttccagatatagatcttgccacag

SEQ ID NO: 5342697 - DNA, 25 bp, Homo sapien
accttggtcaggttcatctgtccag

SEQ ID NO: 5342698 - DNA, 25 bp, Homo sapien
caaagcagtcatcagatatcagcag

SEQ ID NO: 5342699 - DNA, 25 bp, Homo sapien
gatatcagcagttcaagggcaaatg

SEQ ID NO: 5342700 - DNA, 25 bp, Homo sapien
agctgcggcctgggcatttgccttg

SEQ ID NO: 5342701 - DNA, 25 bp, Homo sapien
tcagggttgccctccttcagagcag

SEQ ID NO: 5342702 - DNA, 25 bp, Homo sapien
ttcctcagggttgccctccttcaga

SEQ ID NO: 5342703 - DNA, 25 bp, Homo sapien
gaggtcttcctcagggttgccctcc

SEQ ID NO: 5342704 - DNA, 25 bp, Homo sapien
ctggatcatctcagcaggctcctcc

SEQ ID NO: 5342705 - DNA, 25 bp, Homo sapien
cccatcagtgacaatctccacctgg

SEQ ID NO: 5342706 - DNA, 25 bp, Homo sapien
catcagtgacaatctccacctgggc

SEQ ID NO: 5342707 - DNA, 25 bp, Homo sapien
tccccatcagtgacaatctccacct

SEQ ID NO: 5342708 - DNA, 25 bp, Homo sapien
ccctgtcgctcactgtcccggatgg

SEQ ID NO: 5342709 - DNA, 25 bp, Homo sapien
ttgccctgtcgctcactgtcccgga

SEQ ID NO: 5342710 - DNA, 25 bp, Homo sapien
tgtcgctcactgtcccggatggcca

SEQ ID NO: 5342711 - DNA, 25 bp, Homo sapien
ctgtcgctcactgtcccggatggcc

SEQ ID NO: 5342712 - DNA, 25 bp, Homo sapien
cttgttgcgttccaggatgttggac

SEQ ID NO: 5342713 - DNA, 25 bp, Homo sapien
ttgcgttccaggatgttggactttc

SEQ ID NO: 5342714 - DNA, 25 bp, Homo sapien
tgttgcgttccaggatgttggactt

SEQ ID NO: 5342715 - DNA, 25 bp, Homo sapien
tgcgttccaggatgttggactttcc

SEQ ID NO: 5342716 - DNA, 25 bp, Homo sapien
ctcggtggcacggatgttcttcttc

SEQ ID NO: 5342717 - DNA, 25 bp, Homo sapien
gctgtcccagttcagtgcccgctcg

SEQ ID NO: 5342718 - DNA, 25 bp, Homo sapien
ccgctcggtggcacggatgttcttc

SEQ ID NO: 5342719 - DNA, 25 bp, Homo sapien
gtggcacggatgttcttcttcccct

SEQ ID NO: 5342720 - DNA, 25 bp, Homo sapien
ggaggtcttgtgaaatgctgactcc

SEQ ID NO: 5342721 - DNA, 25 bp, Homo sapien
ctggtagagtttcttgatggcagct

SEQ ID NO: 5342722 - DNA, 25 bp, Homo sapien
ttgtgaaatgctgactccacaccac

SEQ ID NO: 5342723 - DNA, 25 bp, Homo sapien
ggctcctgtggaggtcttgtgaaat

SEQ ID NO: 5342724 - DNA, 25 bp, Homo sapien
gacggcccatctgagtggactgaca

SEQ ID NO: 5342725 - DNA, 25 bp, Homo sapien
gagtggactgacaggagacccagag

SEQ ID NO: 5342726 - DNA, 25 bp, Homo sapien
gcccagacggcccatctgagtggac

SEQ ID NO: 5342727 - DNA, 25 bp, Homo sapien
cagacggcccatctgagtggactga

SEQ ID NO: 5342728 - DNA, 25 bp, Homo sapien
ctggtacttgaggccccgtgggaag

SEQ ID NO: 5342729 - DNA, 25 bp, Homo sapien
agtagctcatgaagaggtcagactc

SEQ ID NO: 5342730 - DNA, 25 bp, Homo sapien
aagaggtcagactcattgccctgca

SEQ ID NO: 5342731 - DNA, 25 bp, Homo sapien
ttgaggccccgtgggaagtagctca

SEQ ID NO: 5342732 - DNA, 25 bp, Homo sapien
tcccagcagcgtgttgaggtgcaca

SEQ ID NO: 5342733 - DNA, 25 bp, Homo sapien
cgcggtgctgcacaggccgctctcc

SEQ ID NO: 5342734 - DNA, 25 bp, Homo sapien
ccagcagcgtgttgaggtgcacagc

SEQ ID NO: 5342735 - DNA, 25 bp, Homo sapien
agcagcgtgttgaggtgcacagcca

SEQ ID NO: 5342736 - DNA, 25 bp, Homo sapien
cctgctcatcccgggatgactgctg

SEQ ID NO: 5342737 - DNA, 25 bp, Homo sapien
ctgctcatcccgggatgactgctgg

SEQ ID NO: 5342738 - DNA, 25 bp, Homo sapien
ccctgctcatcccgggatgactgct

SEQ ID NO: 5342739 - DNA, 25 bp, Homo sapien
tgctcatcccgggatgactgctggc

SEQ ID NO: 5342740 - DNA, 25 bp, Homo sapien
gcaaggcccttgtgatccataccag

SEQ ID NO: 5342741 - DNA, 25 bp, Homo sapien
ctgggcccaaccttcccccatccag

SEQ ID NO: 5342742 - DNA, 25 bp, Homo sapien
gtgatccataccagccccctccctc

SEQ ID NO: 5342743 - DNA, 25 bp, Homo sapien
aaggcccttgtgatccataccagcc

SEQ ID NO: 5342744 - DNA, 25 bp, Homo sapien
tctcttgcgccacaggcaccggctt

SEQ ID NO: 5342745 - DNA, 25 bp, Homo sapien
aacctcttctgggccattgtgcagc

SEQ ID NO: 5342746 - DNA, 25 bp, Homo sapien
tgtgcagcactaggtaggagtcccc

SEQ ID NO: 5342747 - DNA, 25 bp, Homo sapien
gaagaagacgccctggttctcttgc

SEQ ID NO: 5342748 - DNA, 25 bp, Homo sapien
gcctggacccacttgcccaagcaca

SEQ ID NO: 5342749 - DNA, 25 bp, Homo sapien
ggcctggcgactgcagtctggggat

SEQ ID NO: 5342750 - DNA, 25 bp, Homo sapien
gaaggggaagttgtgaaaggagatg

SEQ ID NO: 5342751 - DNA, 25 bp, Homo sapien
cctggcgactgcagtctggggatga

SEQ ID NO: 5342752 - DNA, 25 bp, Homo sapien
tggctgcttcacatctcaactggag

SEQ ID NO: 5342753 - DNA, 25 bp, Homo sapien
ccctgggagcacatactttagcctg

SEQ ID NO: 5342754 - DNA, 25 bp, Homo sapien
caggacattaagtggcctccgcctt

SEQ ID NO: 5342755 - DNA, 25 bp, Homo sapien
aactggagcaaggacacacctgatg

SEQ ID NO: 5342756 - DNA, 25 bp, Homo sapien
tagaccctcagccaaggtcttccag

SEQ ID NO: 5342757 - DNA, 25 bp, Homo sapien
cctagaccctcagccaaggtcttcc

SEQ ID NO: 5342758 - DNA, 25 bp, Homo sapien
ccacctagaccctcagccaaggtct

SEQ ID NO: 5342759 - DNA, 25 bp, Homo sapien
gaccctcagccaaggtcttccagag

SEQ ID NO: 5342760 - DNA, 25 bp, Homo sapien
cagtgggtatgccaggccgtctcct

SEQ ID NO: 5342761 - DNA, 25 bp, Homo sapien
ggagggcatctctgagtctgagacc

SEQ ID NO: 5342762 - DNA, 25 bp, Homo sapien
tcgtaggttcgtcttccttccagcc

SEQ ID NO: 5342763 - DNA, 25 bp, Homo sapien
gcaggtcacagccaaggcaaatcag

SEQ ID NO: 5342764 - DNA, 25 bp, Homo sapien
ttctcattcaccagatgtttatcat

SEQ ID NO: 5342765 - DNA, 25 bp, Homo sapien
cctttggtctgcttctcattcacca

SEQ ID NO: 5342766 - DNA, 25 bp, Homo sapien
gatcaatgggaatcactgttcctca

SEQ ID NO: 5342767 - DNA, 25 bp, Homo sapien
tcctcacactcagctgtctaggcta

SEQ ID NO: 5342768 - DNA, 25 bp, Homo sapien
taagttctggactctgtgacccacg

SEQ ID NO: 5342769 - DNA, 25 bp, Homo sapien
cccacggagggaacaaggatcaatg

SEQ ID NO: 5342770 - DNA, 25 bp, Homo sapien
ctaagcccgttcgacccctacatgg

SEQ ID NO: 5342771 - DNA, 25 bp, Homo sapien
cccctaagagaggaccccggctgtg

SEQ ID NO: 5342772 - DNA, 25 bp, Homo sapien
ttttcttacaggaagccaggagacg

SEQ ID NO: 5342773 - DNA, 25 bp, Homo sapien
tactgcttagtttgtcccaaatgaa

SEQ ID NO: 5342774 - DNA, 25 bp, Homo sapien
gggcgctgtctcagccgccccccgc

SEQ ID NO: 5342775 - DNA, 25 bp, Homo sapien
gcgctgtctcagccgccccccgccc

SEQ ID NO: 5342776 - DNA, 25 bp, Homo sapien
ctgccaacgccttgctccgaggccc

SEQ ID NO: 5342777 - DNA, 25 bp, Homo sapien
ggcgctgtctcagccgccccccgcc

SEQ ID NO: 5342778 - DNA, 25 bp, Homo sapien
tacatctcagggtcggcagaaagtg

SEQ ID NO: 5342779 - DNA, 25 bp, Homo sapien
ccgcaggcgtggcgggtacatctca

SEQ ID NO: 5342780 - DNA, 25 bp, Homo sapien
tccagggctcacgagaaaaacgagg

SEQ ID NO: 5342781 - DNA, 25 bp, Homo sapien
ggagcccagccggagttgagggcct

SEQ ID NO: 5342782 - DNA, 25 bp, Homo sapien
ctcggtaggatgagctgtgctgagg

SEQ ID NO: 5342783 - DNA, 25 bp, Homo sapien
gtccggcctgctcggtaggatgagc

SEQ ID NO: 5342784 - DNA, 25 bp, Homo sapien
gggtccggcctgctcggtaggatga

SEQ ID NO: 5342785 - DNA, 25 bp, Homo sapien
caggaactcagggtccggcctgctc

SEQ ID NO: 5342786 - DNA, 25 bp, Homo sapien
ttaagaatgccctcttggtcgagtg

SEQ ID NO: 5342787 - DNA, 25 bp, Homo sapien
cctgggaaacaatggagggactggg

SEQ ID NO: 5342788 - DNA, 25 bp, Homo sapien
gtcatattctgtaaagattgagtaa

SEQ ID NO: 5342789 - DNA, 25 bp, Homo sapien
ggacacagaatggtctgcctgggcc

SEQ ID NO: 5342790 - DNA, 25 bp, Homo sapien
gtggaatgccttccggaaaaacaga

SEQ ID NO: 5342791 - DNA, 25 bp, Homo sapien
gagacaaactacacaccagactttt

SEQ ID NO: 5342792 - DNA, 25 bp, Homo sapien
gaagaactagtggaatgccttccgg

SEQ ID NO: 5342793 - DNA, 25 bp, Homo sapien
ccagcctaaccctaggagaacctga

SEQ ID NO: 5342794 - DNA, 25 bp, Homo sapien
ctgtcccgagtcagctgagtcagca

SEQ ID NO: 5342795 - DNA, 25 bp, Homo sapien
cacagctgtcccgagtcagctgagt

SEQ ID NO: 5342796 - DNA, 25 bp, Homo sapien
cagctgtcccgagtcagctgagtca

SEQ ID NO: 5342797 - DNA, 25 bp, Homo sapien
tcccgagtcagctgagtcagcagac

SEQ ID NO: 5342798 - DNA, 25 bp, Homo sapien
cactccactcacaccacgggtcccg

SEQ ID NO: 5342799 - DNA, 25 bp, Homo sapien
tcttcctccttgcaatgaatcccac

SEQ ID NO: 5342800 - DNA, 25 bp, Homo sapien
ccactcacaccacgggtcccggcta

SEQ ID NO: 5342801 - DNA, 25 bp, Homo sapien
cacaccacgggtcccggctacactt

SEQ ID NO: 5342802 - DNA, 25 bp, Homo sapien
gcttaagtgagacatgccacgtaaa

SEQ ID NO: 5342803 - DNA, 25 bp, Homo sapien
tggacggtctccgtcagtgccggct

SEQ ID NO: 5342804 - DNA, 25 bp, Homo sapien
ggaaccgtcatttcttgcctgtaat

SEQ ID NO: 5342805 - DNA, 25 bp, Homo sapien
gaagataatcgtccctacgtaatcg

SEQ ID NO: 5342806 - DNA, 25 bp, Homo sapien
gccggccagactctagaaaattcta

SEQ ID NO: 5342807 - DNA, 25 bp, Homo sapien
tgaaaacacgggcagaaggacccaa

SEQ ID NO: 5342808 - DNA, 25 bp, Homo sapien
gccttttggtgaagaagcccgtgta

SEQ ID NO: 5342809 - DNA, 25 bp, Homo sapien
aaaattctaggcagggtcaccgact

SEQ ID NO: 5342810 - DNA, 25 bp, Homo sapien
tagggtggatctgaggacaccactg

SEQ ID NO: 5342811 - DNA, 25 bp, Homo sapien
ggacccatgaaccagaggggctctg

SEQ ID NO: 5342812 - DNA, 25 bp, Homo sapien
ccatgaaccagaggggctctgactt

SEQ ID NO: 5342813 - DNA, 25 bp, Homo sapien
acaccactggggtgagagactccgg

SEQ ID NO: 5342814 - DNA, 25 bp, Homo sapien
ctaacacctgggaccccttcctgct

SEQ ID NO: 5342815 - DNA, 25 bp, Homo sapien
gaactcatctgttctaacacctggg

SEQ ID NO: 5342816 - DNA, 25 bp, Homo sapien
atctgttctaacacctgggacccct

SEQ ID NO: 5342817 - DNA, 25 bp, Homo sapien
caaagaactcatctgttctaacacc

SEQ ID NO: 5342818 - DNA, 25 bp, Homo sapien
tccccagagaccaaagctctactgt

SEQ ID NO: 5342819 - DNA, 25 bp, Homo sapien
cagagaccaaagctctactgtggct

SEQ ID NO: 5342820 - DNA, 25 bp, Homo sapien
cccagagaccaaagctctactgtgg

SEQ ID NO: 5342821 - DNA, 25 bp, Homo sapien
aggctccccagagaccaaagctcta

SEQ ID NO: 5342822 - DNA, 25 bp, Homo sapien
aggagtttgatctgtgactgtgaac

SEQ ID NO: 5342823 - DNA, 25 bp, Homo sapien
acaaggagtttgatctgtgactgtg

SEQ ID NO: 5342824 - DNA, 25 bp, Homo sapien
caagtgcagtaatgagaagggagaa

SEQ ID NO: 5342825 - DNA, 25 bp, Homo sapien
cagtaatgagaagggagaaaagagt

SEQ ID NO: 5342826 - DNA, 25 bp, Homo sapien
cagacccactgaatgagctctcttc

SEQ ID NO: 5342827 - DNA, 25 bp, Homo sapien
cccttgggtgtccaatggagatggt

SEQ ID NO: 5342828 - DNA, 25 bp, Homo sapien
tagagatcaggtataacctcccttg

SEQ ID NO: 5342829 - DNA, 25 bp, Homo sapien
tgtaatggcaatgtccatacagtgc

SEQ ID NO: 5342830 - DNA, 25 bp, Homo sapien
tgtaggaggccagtggtcagccctg

SEQ ID NO: 5342831 - DNA, 25 bp, Homo sapien
ggtcagccctgggaccagtaaccac

SEQ ID NO: 5342832 - DNA, 25 bp, Homo sapien
tggtcagccctgggaccagtaacca

SEQ ID NO: 5342833 - DNA, 25 bp, Homo sapien
ctatgtaggaggccagtggtcagcc

SEQ ID NO: 5342834 - DNA, 25 bp, Homo sapien
acagccaaccagctagtattcctgg

SEQ ID NO: 5342835 - DNA, 25 bp, Homo sapien
cagccaaccagctagtattcctgga

SEQ ID NO: 5342836 - DNA, 25 bp, Homo sapien
ccaaccagctagtattcctggagga

SEQ ID NO: 5342837 - DNA, 25 bp, Homo sapien
gccaaccagctagtattcctggagg

SEQ ID NO: 5342838 - DNA, 25 bp, Homo sapien
caatagaagcttctccagatttatg

SEQ ID NO: 5342839 - DNA, 25 bp, Homo sapien
tgctccaaatatcgtaaaagtttcc

SEQ ID NO: 5342840 - DNA, 25 bp, Homo sapien
ctgccaatagaagcttctccagatt

SEQ ID NO: 5342841 - DNA, 25 bp, Homo sapien
atcagtgctccaaatatcgtaaaag

SEQ ID NO: 5342842 - DNA, 25 bp, Homo sapien
tatgtcctctgggtctgcgggactt

SEQ ID NO: 5342843 - DNA, 25 bp, Homo sapien
atgtcctctgggtctgcgggacttc

SEQ ID NO: 5342844 - DNA, 25 bp, Homo sapien
ccaggatgactaattgggatctcat

SEQ ID NO: 5342845 - DNA, 25 bp, Homo sapien
agctgccaggatgactaattgggat

SEQ ID NO: 5342846 - DNA, 25 bp, Homo sapien
gctgccaggatgactaattgggatc

SEQ ID NO: 5342847 - DNA, 25 bp, Homo sapien
tgccaggatgactaattgggatctc

SEQ ID NO: 5342848 - DNA, 25 bp, Homo sapien
ggtcgaaccttttcttgctgcctgc

SEQ ID NO: 5342849 - DNA, 25 bp, Homo sapien
ctattgtctcttttgtggtcgaacc

SEQ ID NO: 5342850 - DNA, 25 bp, Homo sapien
cgaccgtggatgtggtcactgagtc

SEQ ID NO: 5342851 - DNA, 25 bp, Homo sapien
gctgcctgctttgagcgaccgtgga

SEQ ID NO: 5342852 - DNA, 25 bp, Homo sapien
taggagcaggccgttccctgagaac

SEQ ID NO: 5342853 - DNA, 25 bp, Homo sapien
gaatgcaccttgttctactgccgcc

SEQ ID NO: 5342854 - DNA, 25 bp, Homo sapien
ctgagaacctcattaaacccggcgt

SEQ ID NO: 5342855 - DNA, 25 bp, Homo sapien
aagtacatcccatgctaggagcagg

SEQ ID NO: 5342856 - DNA, 25 bp, Homo sapien
gagccattcaccaggaaacgactag

SEQ ID NO: 5342857 - DNA, 25 bp, Homo sapien
tattgggcaaaactgggacaaacgc

SEQ ID NO: 5342858 - DNA, 25 bp, Homo sapien
gattgtttaaatcgatggcagcacc

SEQ ID NO: 5342859 - DNA, 25 bp, Homo sapien
tgctttccggccatcttcagcagag

SEQ ID NO: 5342860 - DNA, 25 bp, Homo sapien
catgaacggacagctcaacggcttc

SEQ ID NO: 5342861 - DNA, 25 bp, Homo sapien
cgttcatcgaggagggcacattcct

SEQ ID NO: 5342862 - DNA, 25 bp, Homo sapien
gggcgctgctctataaataccgggc

SEQ ID NO: 5342863 - DNA, 25 bp, Homo sapien
gctacgagtagaacgctgtccgcag

SEQ ID NO: 5342864 - DNA, 25 bp, Homo sapien
aactggaatgatccttcttgctggg

SEQ ID NO: 5342865 - DNA, 25 bp, Homo sapien
caggatcctgatgccaaagtagctt

SEQ ID NO: 5342866 - DNA, 25 bp, Homo sapien
tacagatagtaacagggagggagct

SEQ ID NO: 5342867 - DNA, 25 bp, Homo sapien
ccagaaagtggttcgtgaagctgtt

SEQ ID NO: 5342868 - DNA, 25 bp, Homo sapien
ttcagctcctgaccagttgcagtca

SEQ ID NO: 5342869 - DNA, 25 bp, Homo sapien
gggggactgtaagttgggcttgcta

SEQ ID NO: 5342870 - DNA, 25 bp, Homo sapien
cagttgcagtcactctagtcaatga

SEQ ID NO: 5342871 - DNA, 25 bp, Homo sapien
gtcactctagtcaatgacatgaatt

SEQ ID NO: 5342872 - DNA, 25 bp, Homo sapien
tgtaactgcctagaaacaacactgt

SEQ ID NO: 5342873 - DNA, 25 bp, Homo sapien
gaaattgaacctttgtgccctatca

SEQ ID NO: 5342874 - DNA, 25 bp, Homo sapien
tgaaaatgtccttgtgatgtgcacg

SEQ ID NO: 5342875 - DNA, 25 bp, Homo sapien
gaatttagtgagcataggtgatcca

SEQ ID NO: 5342876 - DNA, 25 bp, Homo sapien
cctgagggtctgtaggttgcacact

SEQ ID NO: 5342877 - DNA, 25 bp, Homo sapien
tcagctgtcttttggaggacgtacg

SEQ ID NO: 5342878 - DNA, 25 bp, Homo sapien
aacgcaagttcccagttggagctcc

SEQ ID NO: 5342879 - DNA, 25 bp, Homo sapien
tatgcatggtttcagcactagccaa

SEQ ID NO: 5342880 - DNA, 25 bp, Homo sapien
ggcgtaagtacagagaagccatcac

SEQ ID NO: 5342881 - DNA, 25 bp, Homo sapien
taggccaaggtgtcctacagaaaaa

SEQ ID NO: 5342882 - DNA, 25 bp, Homo sapien
gaacagctggtgtagctacagagaa

SEQ ID NO: 5342883 - DNA, 25 bp, Homo sapien
tattccatgactgcttgccctaagc

SEQ ID NO: 5342884 - DNA, 25 bp, Homo sapien
gcatgcagatcacgagaccatcctg

SEQ ID NO: 5342885 - DNA, 25 bp, Homo sapien
caggttgtgtagaaaatccgcagac

SEQ ID NO: 5342886 - DNA, 25 bp, Homo sapien
tcaatccctagacccagtgggtggg

SEQ ID NO: 5342887 - DNA, 25 bp, Homo sapien
gaccacactgctcttgaacctagga

SEQ ID NO: 5342888 - DNA, 25 bp, Homo sapien
ccagtcaagtaggtacagtgagttt

SEQ ID NO: 5342889 - DNA, 25 bp, Homo sapien
ttgacaactaacatgtcggccctgt

SEQ ID NO: 5342890 - DNA, 25 bp, Homo sapien
ggcaaacaacatagtggcaaagtat

SEQ ID NO: 5342891 - DNA, 25 bp, Homo sapien
ggagggtggcaatctgcttgacaac

SEQ ID NO: 5342892 - DNA, 25 bp, Homo sapien
gacctatacgtctagggcacaggaa

SEQ ID NO: 5342893 - DNA, 25 bp, Homo sapien
caaggctgatgacctagagataaca

SEQ ID NO: 5342894 - DNA, 25 bp, Homo sapien
ggaaatcctggagtagacacaatca

SEQ ID NO: 5342895 - DNA, 25 bp, Homo sapien
gaaacctagcatcgttggaaatcct

SEQ ID NO: 5342896 - DNA, 25 bp, Homo sapien
gaaaattacaagtggcagggtgcag

SEQ ID NO: 5342897 - DNA, 25 bp, Homo sapien
cactagctgtatgtcttcgggcaaa

SEQ ID NO: 5342898 - DNA, 25 bp, Homo sapien
cacgcggtgtgttgcacatagcaaa

SEQ ID NO: 5342899 - DNA, 25 bp, Homo sapien
taatgcaggtaacactgctcacgcg

SEQ ID NO: 5342900 - DNA, 25 bp, Homo sapien
tcctaggaggacagtttcacattgc

SEQ ID NO: 5342901 - DNA, 25 bp, Homo sapien
ccttatcctaggaggacagtttcac

SEQ ID NO: 5342902 - DNA, 25 bp, Homo sapien
attgcgtctaacctcttcctggcct

SEQ ID NO: 5342903 - DNA, 25 bp, Homo sapien
ggacagtttcacattgcgtctaacc

SEQ ID NO: 5342904 - DNA, 25 bp, Homo sapien
tccttggttcctctaagttgtaatc

SEQ ID NO: 5342905 - DNA, 25 bp, Homo sapien
cattgcatagaatgggtctgtgact

SEQ ID NO: 5342906 - DNA, 25 bp, Homo sapien
gtccattgcatagaatgggtctgtg

SEQ ID NO: 5342907 - DNA, 25 bp, Homo sapien
tgtaatctcggagttaaaaacagct

SEQ ID NO: 5342908 - DNA, 25 bp, Homo sapien
gaagaatccgtgtttgagggattca

SEQ ID NO: 5342909 - DNA, 25 bp, Homo sapien
tcagaactctgagtggacaggatca

SEQ ID NO: 5342910 - DNA, 25 bp, Homo sapien
gacaggatcaggatttgactcagga

SEQ ID NO: 5342911 - DNA, 25 bp, Homo sapien
gattagaatgtgaagaatccgtgtt

SEQ ID NO: 5342912 - DNA, 25 bp, Homo sapien
gggtctcaagtttgcataagtcacc

SEQ ID NO: 5342913 - DNA, 25 bp, Homo sapien
gggaaggacggcctaatatcagatt

SEQ ID NO: 5342914 - DNA, 25 bp, Homo sapien
tgcctcaaagggtctcaagtttgca

SEQ ID NO: 5342915 - DNA, 25 bp, Homo sapien
cagatttcgaagtgagatacaagtc

SEQ ID NO: 5342916 - DNA, 25 bp, Homo sapien
taagaaaggtctgaaccagaggtgt

SEQ ID NO: 5342917 - DNA, 25 bp, Homo sapien
ttcgccggcgttcaatctcctggag

SEQ ID NO: 5342918 - DNA, 25 bp, Homo sapien
catggaaaggagtatttcgccggcg

SEQ ID NO: 5342919 - DNA, 25 bp, Homo sapien
gacatagagctttcgcaacaagaag

SEQ ID NO: 5342920 - DNA, 25 bp, Homo sapien
taattcttgcagatatgccaggtct

SEQ ID NO: 5342921 - DNA, 25 bp, Homo sapien
tagacgtacatgtagcaagaagggc

SEQ ID NO: 5342922 - DNA, 25 bp, Homo sapien
tacaccttatggtactcaccagcag

SEQ ID NO: 5342923 - DNA, 25 bp, Homo sapien
tgctccagtgcaagctctgtagtgt

SEQ ID NO: 5342924 - DNA, 25 bp, Homo sapien
gtgttgcccaggtcttcactcacaa

SEQ ID NO: 5342925 - DNA, 25 bp, Homo sapien
tgcccaggtcttcactcacaaaatt

SEQ ID NO: 5342926 - DNA, 25 bp, Homo sapien
ccctctcgaagagtctggttcttct

SEQ ID NO: 5342927 - DNA, 25 bp, Homo sapien
gctagtgttgcccaggtcttcactc

SEQ ID NO: 5342928 - DNA, 25 bp, Homo sapien
tctgcaatgaagaccacctcagtgt

SEQ ID NO: 5342929 - DNA, 25 bp, Homo sapien
tgcacgatgtccacacgagggtcaa

SEQ ID NO: 5342930 - DNA, 25 bp, Homo sapien
tcaagagtggttgcacccaggatgt

SEQ ID NO: 5342931 - DNA, 25 bp, Homo sapien
cgctgaaagggtgaccaagcggcct

SEQ ID NO: 5342932 - DNA, 25 bp, Homo sapien
catgttctaaggacatcacagccac

SEQ ID NO: 5342933 - DNA, 25 bp, Homo sapien
ttctaaggacatcacagccacccac

SEQ ID NO: 5342934 - DNA, 25 bp, Homo sapien
tgttctaaggacatcacagccaccc

SEQ ID NO: 5342935 - DNA, 25 bp, Homo sapien
ccatgttctaaggacatcacagcca

SEQ ID NO: 5342936 - DNA, 25 bp, Homo sapien
accagaacttccagttctctccctt

SEQ ID NO: 5342937 - DNA, 25 bp, Homo sapien
gaacttccagttctctccctttcat

SEQ ID NO: 5342938 - DNA, 25 bp, Homo sapien
agttctctccctttcatcatcattc

SEQ ID NO: 5342939 - DNA, 25 bp, Homo sapien
ttccagttctctccctttcatcatc

SEQ ID NO: 5342940 - DNA, 25 bp, Homo sapien
gctatgcccacaaccagatcaaggg

SEQ ID NO: 5342941 - DNA, 25 bp, Homo sapien
tcagcatgttattgccagtccaggg

SEQ ID NO: 5342942 - DNA, 25 bp, Homo sapien
ttaagcaagacaataccaggaagca

SEQ ID NO: 5342943 - DNA, 25 bp, Homo sapien
gacatgcactagaggaaggacagct

SEQ ID NO: 5342944 - DNA, 25 bp, Homo sapien
gacattatacttgggaagcaggcgg

SEQ ID NO: 5342945 - DNA, 25 bp, Homo sapien
cattgatggagacccaaatatcaaa

SEQ ID NO: 5342946 - DNA, 25 bp, Homo sapien
tcaggcaagtggcatattgcttcag

SEQ ID NO: 5342947 - DNA, 25 bp, Homo sapien
tgtctgcatgatccttccatcgccg

SEQ ID NO: 5342948 - DNA, 25 bp, Homo sapien
catgcactgccaatggcacaacgag

SEQ ID NO: 5342949 - DNA, 25 bp, Homo sapien
ccatattagtcccacctcatcatta

SEQ ID NO: 5342950 - DNA, 25 bp, Homo sapien
cttccaagacatgtcatgcactgcc

SEQ ID NO: 5342951 - DNA, 25 bp, Homo sapien
aacttccaagacatgtcatgcactg

SEQ ID NO: 5342952 - DNA, 25 bp, Homo sapien
ttaaggtagcccagttcgccagtgc

SEQ ID NO: 5342953 - DNA, 25 bp, Homo sapien
agtgcggccatcacggtaggtgatc

SEQ ID NO: 5342954 - DNA, 25 bp, Homo sapien
gcaccatcatgtcccaggaatagcc

SEQ ID NO: 5342955 - DNA, 25 bp, Homo sapien
catcacggtaggtgatcttcacgtg

SEQ ID NO: 5342956 - DNA, 25 bp, Homo sapien
tggcttctggccacttttgccccgg

SEQ ID NO: 5342957 - DNA, 25 bp, Homo sapien
agcagggtgaaggcagctcccagct

SEQ ID NO: 5342958 - DNA, 25 bp, Homo sapien
ctcccagctgatggcgcagccctgg

SEQ ID NO: 5342959 - DNA, 25 bp, Homo sapien
tagggcaggaatagctgctccagga

SEQ ID NO: 5342960 - DNA, 25 bp, Homo sapien
gccagcatgacgtaggagaacatac

SEQ ID NO: 5342961 - DNA, 25 bp, Homo sapien
cttcgggggcagtaggacaccagct

SEQ ID NO: 5342962 - DNA, 25 bp, Homo sapien
gcttccgaggccactcaggggagca

SEQ ID NO: 5342963 - DNA, 25 bp, Homo sapien
cagttgttgcaaccttcgggggcag

SEQ ID NO: 5342964 - DNA, 25 bp, Homo sapien
tggctgggcctcttcaaccccgttc

SEQ ID NO: 5342965 - DNA, 25 bp, Homo sapien
cttaggagacttctcccaggtgttc

SEQ ID NO: 5342966 - DNA, 25 bp, Homo sapien
ccaggtgttccactgaaaaggaaag

SEQ ID NO: 5342967 - DNA, 25 bp, Homo sapien
aggagtttggctgggcctcttcaac

SEQ ID NO: 5342968 - DNA, 25 bp, Homo sapien
tcatgcagtggaagtaggacacaaa

SEQ ID NO: 5342969 - DNA, 25 bp, Homo sapien
gtccaatggatcttgagacatcaaa

SEQ ID NO: 5342970 - DNA, 25 bp, Homo sapien
agtgcacgaccagcaggctagtcag

SEQ ID NO: 5342971 - DNA, 25 bp, Homo sapien
ctgagaggtcaagcagcagcccacc

SEQ ID NO: 5342972 - DNA, 25 bp, Homo sapien
acccgcaatgaagtacacaatgaag

SEQ ID NO: 5342973 - DNA, 25 bp, Homo sapien
atccagctttttcacacccgcaatg

SEQ ID NO: 5342974 - DNA, 25 bp, Homo sapien
tattccatggaatagccttcaaccc

SEQ ID NO: 5342975 - DNA, 25 bp, Homo sapien
agagccagtgccgggacaaatattc

SEQ ID NO: 5342976 - DNA, 25 bp, Homo sapien
catagttccaaaggggcacgtgggc

SEQ ID NO: 5342977 - DNA, 25 bp, Homo sapien
ggcattcagcagaccgtccacagac

SEQ ID NO: 5342978 - DNA, 25 bp, Homo sapien
cattcctcctatgggcattcagcag

SEQ ID NO: 5342979 - DNA, 25 bp, Homo sapien
cacgtgggcattcctcctatgggca

SEQ ID NO: 5342980 - DNA, 25 bp, Homo sapien
catactcatgttattgacacctatt

SEQ ID NO: 5342981 - DNA, 25 bp, Homo sapien
actcatgttattgacacctatttta

SEQ ID NO: 5342982 - DNA, 25 bp, Homo sapien
ttttccccatactcatgttattgac

SEQ ID NO: 5342983 - DNA, 25 bp, Homo sapien
tccccatactcatgttattgacacc

SEQ ID NO: 5342984 - DNA, 25 bp, Homo sapien
gaaaggccaacaacccatacagata

SEQ ID NO: 5342985 - DNA, 25 bp, Homo sapien
ccatgaatgttagctgaaaggccaa

SEQ ID NO: 5342986 - DNA, 25 bp, Homo sapien
catacagataggagtggttgttcca

SEQ ID NO: 5342987 - DNA, 25 bp, Homo sapien
gaataacacacagcttatccggtag

SEQ ID NO: 5342988 - DNA, 25 bp, Homo sapien
gtgacacacaggtcaacagcatgaa

SEQ ID NO: 5342989 - DNA, 25 bp, Homo sapien
gccaaagactttgaccattcaccag

SEQ ID NO: 5342990 - DNA, 25 bp, Homo sapien
gcatgaaattgatcacagcagaagt

SEQ ID NO: 5342991 - DNA, 25 bp, Homo sapien
gcaggccagtcaatatttcccacag

SEQ ID NO: 5342992 - DNA, 25 bp, Homo sapien
gtgggcgtagggcatccagcaaggg

SEQ ID NO: 5342993 - DNA, 25 bp, Homo sapien
caagatacatccagtcaagtggcag

SEQ ID NO: 5342994 - DNA, 25 bp, Homo sapien
aggtatttccggtccagagagctga

SEQ ID NO: 5342995 - DNA, 25 bp, Homo sapien
ggcacacatccagcccatcaaggta

SEQ ID NO: 5342996 - DNA, 25 bp, Homo sapien
gctcccacccataaactggactcac

SEQ ID NO: 5342997 - DNA, 25 bp, Homo sapien
ccactctcaaccaaattgctcccac

SEQ ID NO: 5342998 - DNA, 25 bp, Homo sapien
aaaaatagagattgtcattctccac

SEQ ID NO: 5342999 - DNA, 25 bp, Homo sapien
aaaatagagattgtcattctccact

SEQ ID NO: 5343000 - DNA, 25 bp, Homo sapien
gaaaacgaaagacagctaagcttgc

SEQ ID NO: 5343001 - DNA, 25 bp, Homo sapien
caagagtttccctattcggctgtcc

SEQ ID NO: 5343002 - DNA, 25 bp, Homo sapien
ccgttggtcgattcagcagggtcac

SEQ ID NO: 5343003 - DNA, 25 bp, Homo sapien
tgggccctgagatcagttcagcctt

SEQ ID NO: 5343004 - DNA, 25 bp, Homo sapien
gagctgggcgaggtccgcgcggacc

SEQ ID NO: 5343005 - DNA, 25 bp, Homo sapien
aggtccgcgcggacccggcagacac

SEQ ID NO: 5343006 - DNA, 25 bp, Homo sapien
gctgggcgaggtccgcgcggacccg

SEQ ID NO: 5343007 - DNA, 25 bp, Homo sapien
gcgaggtccgcgcggacccggcaga

SEQ ID NO: 5343008 - DNA, 25 bp, Homo sapien
tgccgcgtctgaacggaggccgcca

SEQ ID NO: 5343009 - DNA, 25 bp, Homo sapien
acggaggccgccaggagaatttgct

SEQ ID NO: 5343010 - DNA, 25 bp, Homo sapien
gtcacagctgccgcgtctgaacgga

SEQ ID NO: 5343011 - DNA, 25 bp, Homo sapien
cagctgccgcgtctgaacggaggcc

SEQ ID NO: 5343012 - DNA, 25 bp, Homo sapien
aaggagccttggagcggggcaaagg

SEQ ID NO: 5343013 - DNA, 25 bp, Homo sapien
ccggcggcgccggattccttgcttg

SEQ ID NO: 5343014 - DNA, 25 bp, Homo sapien
cgccggattccttgcttggcggcag

SEQ ID NO: 5343015 - DNA, 25 bp, Homo sapien
gcagggggcggaacaaggagccttg

SEQ ID NO: 5343016 - DNA, 25 bp, Homo sapien
tagtgccgttgatctccaggggcat

SEQ ID NO: 5343017 - DNA, 25 bp, Homo sapien
cccttagtgccgttgatctccaggg

SEQ ID NO: 5343018 - DNA, 25 bp, Homo sapien
ccttagtgccgttgatctccagggg

SEQ ID NO: 5343019 - DNA, 25 bp, Homo sapien
cttagtgccgttgatctccaggggc

SEQ ID NO: 5343020 - DNA, 25 bp, Homo sapien
cgggaggtcaccataataatgttga

SEQ ID NO: 5343021 - DNA, 25 bp, Homo sapien
cttagtgcagatacccgatgggcat

SEQ ID NO: 5343022 - DNA, 25 bp, Homo sapien
gcagatacccgatgggcatagcaca

SEQ ID NO: 5343023 - DNA, 25 bp, Homo sapien
gtgcagatacccgatgggcatagca

SEQ ID NO: 5343024 - DNA, 25 bp, Homo sapien
tacagagaatgctgctcggtcctcc

SEQ ID NO: 5343025 - DNA, 25 bp, Homo sapien
ataaatgtgtgccaagagggtctcc

SEQ ID NO: 5343026 - DNA, 25 bp, Homo sapien
catttcttgggtccttagagtgggc

SEQ ID NO: 5343027 - DNA, 25 bp, Homo sapien
tgtatgccccagaaggtaccttggt

SEQ ID NO: 5343028 - DNA, 25 bp, Homo sapien
taggaaatgtaacgacctcgtcagc

SEQ ID NO: 5343029 - DNA, 25 bp, Homo sapien
cattctcctgaagcaaagcggttaa

SEQ ID NO: 5343030 - DNA, 25 bp, Homo sapien
cagccctttccgcagctgtgaggag

SEQ ID NO: 5343031 - DNA, 25 bp, Homo sapien
gagcctccttttccgcgtctgtgaa

SEQ ID NO: 5343032 - DNA, 25 bp, Homo sapien
cgaacgaggtgacggaaattatgcg

SEQ ID NO: 5343033 - DNA, 25 bp, Homo sapien
caacttcggcaaggtcctggagcgt

SEQ ID NO: 5343034 - DNA, 25 bp, Homo sapien
cctggagcgtggtgtgaagctggcc

SEQ ID NO: 5343035 - DNA, 25 bp, Homo sapien
agcagcgttcagaccaactcctgga

SEQ ID NO: 5343036 - DNA, 25 bp, Homo sapien
tcaacaagactacacagaacctggc

SEQ ID NO: 5343037 - DNA, 25 bp, Homo sapien
ccttcaacaagactacacagaacct

SEQ ID NO: 5343038 - DNA, 25 bp, Homo sapien
aacaagactacacagaacctggccc

SEQ ID NO: 5343039 - DNA, 25 bp, Homo sapien
ctcaaccttcaacaagactacacag

SEQ ID NO: 5343040 - DNA, 25 bp, Homo sapien
tgggaactgacccagctggtcctga

SEQ ID NO: 5343041 - DNA, 25 bp, Homo sapien
caccccagtgagtgccaaagggcag

SEQ ID NO: 5343042 - DNA, 25 bp, Homo sapien
aaatggctgcactggccgattctgg

SEQ ID NO: 5343043 - DNA, 25 bp, Homo sapien
gctggtcgtctttctccctcagagc

SEQ ID NO: 5343044 - DNA, 25 bp, Homo sapien
tagattgcttagaggcccagaaggg

SEQ ID NO: 5343045 - DNA, 25 bp, Homo sapien
caactctccagaacaggctacaaac

SEQ ID NO: 5343046 - DNA, 25 bp, Homo sapien
aaaagctgataaactagcctgcacc

SEQ ID NO: 5343047 - DNA, 25 bp, Homo sapien
tgagattatcagaccaagttagttc

SEQ ID NO: 5343048 - DNA, 25 bp, Homo sapien
ttccgtaggctaaggcgtgcccact

SEQ ID NO: 5343049 - DNA, 25 bp, Homo sapien
tcctccatggcacaggtgggcatgg

SEQ ID NO: 5343050 - DNA, 25 bp, Homo sapien
tctgctgtgttatttgccctaaagg

SEQ ID NO: 5343051 - DNA, 25 bp, Homo sapien
cagtgcagctcagtgggcccagaaa

SEQ ID NO: 5343052 - DNA, 25 bp, Homo sapien
tgccccaaactcgtagctgaaggtg

SEQ ID NO: 5343053 - DNA, 25 bp, Homo sapien
aaatgaggatatcgatgacacacac

SEQ ID NO: 5343054 - DNA, 25 bp, Homo sapien
tgccatagaaaatgaggatatcgat

SEQ ID NO: 5343055 - DNA, 25 bp, Homo sapien
gatcatagcgatgctctcgggggca

SEQ ID NO: 5343056 - DNA, 25 bp, Homo sapien
tgaggaccagggtgataaaggcgat

SEQ ID NO: 5343057 - DNA, 25 bp, Homo sapien
gtgataaaggcgatgacagccagca

SEQ ID NO: 5343058 - DNA, 25 bp, Homo sapien
cagggtgataaaggcgatgacagcc

SEQ ID NO: 5343059 - DNA, 25 bp, Homo sapien
gaccagggtgataaaggcgatgaca

SEQ ID NO: 5343060 - DNA, 25 bp, Homo sapien
ttcgcagataggccacagccaggtc

SEQ ID NO: 5343061 - DNA, 25 bp, Homo sapien
caacgtagtgcagagacctggcatg

SEQ ID NO: 5343062 - DNA, 25 bp, Homo sapien
ccttggtaggagagagcacagtgca

SEQ ID NO: 5343063 - DNA, 25 bp, Homo sapien
ggaaggccacgccagctccaacgta

SEQ ID NO: 5343064 - DNA, 25 bp, Homo sapien
tgcccgtagcgcaggaggcagatca

SEQ ID NO: 5343065 - DNA, 25 bp, Homo sapien
cctgtgatgagtgccgtggtgttaa

SEQ ID NO: 5343066 - DNA, 25 bp, Homo sapien
ccaagaggcccgcagcgttggtgca

SEQ ID NO: 5343067 - DNA, 25 bp, Homo sapien
gtgccgtggtgttaacccaagagtg

SEQ ID NO: 5343068 - DNA, 25 bp, Homo sapien
atgaggctgaagaggcagctttctg

SEQ ID NO: 5343069 - DNA, 25 bp, Homo sapien
ttgccaatgaggctgaagaggcagc

SEQ ID NO: 5343070 - DNA, 25 bp, Homo sapien
gctttctgggggataggagccacac

SEQ ID NO: 5343071 - DNA, 25 bp, Homo sapien
atgaaagcacccatgttgccaatga

SEQ ID NO: 5343072 - DNA, 25 bp, Homo sapien
cagggtccctcatgaacaactggtt

SEQ ID NO: 5343073 - DNA, 25 bp, Homo sapien
tatccttgagccagaacacgggctg

SEQ ID NO: 5343074 - DNA, 25 bp, Homo sapien
caggtgcctccgcttattagctgtg

SEQ ID NO: 5343075 - DNA, 25 bp, Homo sapien
tgacactctttgctgagccctgcgg

SEQ ID NO: 5343076 - DNA, 25 bp, Homo sapien
agggggacatcgtccagggtgcagc

SEQ ID NO: 5343077 - DNA, 25 bp, Homo sapien
aggagggcaggactcgttgtaggac

SEQ ID NO: 5343078 - DNA, 25 bp, Homo sapien
gacagaagatcccactccccagtgc

SEQ ID NO: 5343079 - DNA, 25 bp, Homo sapien
agtgcccgcctgaagcagtaaccaa

SEQ ID NO: 5343080 - DNA, 25 bp, Homo sapien
tagcctcaggcctcaaagaggactc

SEQ ID NO: 5343081 - DNA, 25 bp, Homo sapien
caggcccttggcctatagcctcagg

SEQ ID NO: 5343082 - DNA, 25 bp, Homo sapien
gaggctcagggttgcagtctggctc

SEQ ID NO: 5343083 - DNA, 25 bp, Homo sapien
cagggttgcagtctggctcgtggca

SEQ ID NO: 5343084 - DNA, 25 bp, Homo sapien
ttgcagtctggctcgtggcagcctc

SEQ ID NO: 5343085 - DNA, 25 bp, Homo sapien
cagtgaggctcagggttgcagtctg

SEQ ID NO: 5343086 - DNA, 25 bp, Homo sapien
gtggttcatcacagccatggcatac

SEQ ID NO: 5343087 - DNA, 25 bp, Homo sapien
ggtggttcatcacagccatggcata

SEQ ID NO: 5343088 - DNA, 25 bp, Homo sapien
ggccctctggaaattgccctggcta

SEQ ID NO: 5343089 - DNA, 25 bp, Homo sapien
gactcaagttgaggtccctaaggct

SEQ ID NO: 5343090 - DNA, 25 bp, Homo sapien
agaagtatatttgtcagggccaccc

SEQ ID NO: 5343091 - DNA, 25 bp, Homo sapien
agcagtggtgccagcttgtcccaag

SEQ ID NO: 5343092 - DNA, 25 bp, Homo sapien
tatgccagtgatggagaacgctgac

SEQ ID NO: 5343093 - DNA, 25 bp, Homo sapien
atgccagtgatggagaacgctgaca

SEQ ID NO: 5343094 - DNA, 25 bp, Homo sapien
ccatatgccagtgatggagaacgct

SEQ ID NO: 5343095 - DNA, 25 bp, Homo sapien
gagaacgctgacaggctgacaggca

SEQ ID NO: 5343096 - DNA, 25 bp, Homo sapien
gatgtttctgccacaaccatcagct

SEQ ID NO: 5343097 - DNA, 25 bp, Homo sapien
aagtgggggcggaccagctaccttg

SEQ ID NO: 5343098 - DNA, 25 bp, Homo sapien
tgggggcggaccagctaccttgaga

SEQ ID NO: 5343099 - DNA, 25 bp, Homo sapien
gggaggacaagaggtagatggggaa

SEQ ID NO: 5343100 - DNA, 25 bp, Homo sapien
gatcaaagtccaggagtgggtaact

SEQ ID NO: 5343101 - DNA, 25 bp, Homo sapien
tcccgttgggtctctgagcgtccaa

SEQ ID NO: 5343102 - DNA, 25 bp, Homo sapien
aacgtgaacaccctctggcactggg

SEQ ID NO: 5343103 - DNA, 25 bp, Homo sapien
tgagcccacggcagaacgtgaacac

SEQ ID NO: 5343104 - DNA, 25 bp, Homo sapien
cgtccaaagtttgggctgagcccac

SEQ ID NO: 5343105 - DNA, 25 bp, Homo sapien
gaccgtaacatctggaagggagtta

SEQ ID NO: 5343106 - DNA, 25 bp, Homo sapien
cggaccgtaacatctggaagggagt

SEQ ID NO: 5343107 - DNA, 25 bp, Homo sapien
gacgcaggcggaccgtaacatctgg

SEQ ID NO: 5343108 - DNA, 25 bp, Homo sapien
caggcggaccgtaacatctggaagg

SEQ ID NO: 5343109 - DNA, 25 bp, Homo sapien
gagaagggctggacaaccgaagagg

SEQ ID NO: 5343110 - DNA, 25 bp, Homo sapien
tgggtgccggcccagtggagcggtg

SEQ ID NO: 5343111 - DNA, 25 bp, Homo sapien
ggctggacaaccgaagaggccacgc

SEQ ID NO: 5343112 - DNA, 25 bp, Homo sapien
agcggtggcgagtcggcggcgcgca

SEQ ID NO: 5343113 - DNA, 25 bp, Homo sapien
tggggccggaccctgcggccggcga

SEQ ID NO: 5343114 - DNA, 25 bp, Homo sapien
cccaggtgattcctggaagcccgga

SEQ ID NO: 5343115 - DNA, 25 bp, Homo sapien
cccgggacgcgagagtccccaggtg

SEQ ID NO: 5343116 - DNA, 25 bp, Homo sapien
gcgggttcacgcggaaagcccagcc

SEQ ID NO: 5343117 - DNA, 25 bp, Homo sapien
gctcggccccctcgtggcgccgact

SEQ ID NO: 5343118 - DNA, 25 bp, Homo sapien
ccgactctagctgcggccctcggag

SEQ ID NO: 5343119 - DNA, 25 bp, Homo sapien
cctcgtggcgccgactctagctgcg

SEQ ID NO: 5343120 - DNA, 25 bp, Homo sapien
tcgtggcgccgactctagctgcggc

SEQ ID NO: 5343121 - DNA, 25 bp, Homo sapien
ggaggagcgtctctccgccactgcg

SEQ ID NO: 5343122 - DNA, 25 bp, Homo sapien
ggctggaggagcgtctctccgccac

SEQ ID NO: 5343123 - DNA, 25 bp, Homo sapien
tgcaccggccaacggtgagtcctct

SEQ ID NO: 5343124 - DNA, 25 bp, Homo sapien
tctaggaagctctctcaacgtggcg

SEQ ID NO: 5343125 - DNA, 25 bp, Homo sapien
ggtgactctccccaaaaatctagtg

SEQ ID NO: 5343126 - DNA, 25 bp, Homo sapien
tagcatctccgataggccagctctg

SEQ ID NO: 5343127 - DNA, 25 bp, Homo sapien
aagacttccgtgcttgccagctgga

SEQ ID NO: 5343128 - DNA, 25 bp, Homo sapien
gacatcacccattgtggccgaggaa

SEQ ID NO: 5343129 - DNA, 25 bp, Homo sapien
gaggacagtctgttcacggctagga

SEQ ID NO: 5343130 - DNA, 25 bp, Homo sapien
aaataacaaacgtggctcatggagc

SEQ ID NO: 5343131 - DNA, 25 bp, Homo sapien
tatcaggctgggcaaatgggtcaac

SEQ ID NO: 5343132 - DNA, 25 bp, Homo sapien
gagaaagcaccatgttgcacgaggc

SEQ ID NO: 5343133 - DNA, 25 bp, Homo sapien
tctcctcctggatacgcaacttgag

SEQ ID NO: 5343134 - DNA, 25 bp, Homo sapien
ttctcgcatgggtggatccagaggc

SEQ ID NO: 5343135 - DNA, 25 bp, Homo sapien
cagtgttggctctggcgctttgcaa

SEQ ID NO: 5343136 - DNA, 25 bp, Homo sapien
gcgtgtgtgccgacaccttctcact

SEQ ID NO: 5343137 - DNA, 25 bp, Homo sapien
ggagcagacgcttcccattgggggt

SEQ ID NO: 5343138 - DNA, 25 bp, Homo sapien
gagcagacgcttcccattgggggtc

SEQ ID NO: 5343139 - DNA, 25 bp, Homo sapien
tggagcagacgcttcccattggggg

SEQ ID NO: 5343140 - DNA, 25 bp, Homo sapien
tgtggagcagacgcttcccattggg

SEQ ID NO: 5343141 - DNA, 25 bp, Homo sapien
ctgatagacgataactgatgtgacc

SEQ ID NO: 5343142 - DNA, 25 bp, Homo sapien
tccactgtctgcctcgtattctaag

SEQ ID NO: 5343143 - DNA, 25 bp, Homo sapien
tactgctgctttcaccggactcttc

SEQ ID NO: 5343144 - DNA, 25 bp, Homo sapien
ctgatggccagaaggctccagctca

SEQ ID NO: 5343145 - DNA, 25 bp, Homo sapien
gccatttactgggttcattccgcaa

SEQ ID NO: 5343146 - DNA, 25 bp, Homo sapien
tgtctagcaaaaagtactggaaagc

SEQ ID NO: 5343147 - DNA, 25 bp, Homo sapien
caattatgtgctggtcgctcatcgc

SEQ ID NO: 5343148 - DNA, 25 bp, Homo sapien
tctttgctaggtagcggagcacctt

SEQ ID NO: 5343149 - DNA, 25 bp, Homo sapien
tactctgacagcgatgcttaactgg

SEQ ID NO: 5343150 - DNA, 25 bp, Homo sapien
tcttggtgagaatcattcagcggag

SEQ ID NO: 5343151 - DNA, 25 bp, Homo sapien
gcttatgagtcgtcccagttcttgg

SEQ ID NO: 5343152 - DNA, 25 bp, Homo sapien
aaacttcttgctggctccccgatac

SEQ ID NO: 5343153 - DNA, 25 bp, Homo sapien
ctatagagaaggggagtgcgttgca

SEQ ID NO: 5343154 - DNA, 25 bp, Homo sapien
agagaaggggagtgcgttgcaggaa

SEQ ID NO: 5343155 - DNA, 25 bp, Homo sapien
tagagaaggggagtgcgttgcagga

SEQ ID NO: 5343156 - DNA, 25 bp, Homo sapien
tatagagaaggggagtgcgttgcag

SEQ ID NO: 5343157 - DNA, 25 bp, Homo sapien
ctcggtgtcgcggcaggtacacctg

SEQ ID NO: 5343158 - DNA, 25 bp, Homo sapien
cggtgtcgcggcaggtacacctgca

SEQ ID NO: 5343159 - DNA, 25 bp, Homo sapien
tgtcgcggcaggtacacctgcaggt

SEQ ID NO: 5343160 - DNA, 25 bp, Homo sapien
gcgtcggcgcgggcgtgtgccgcct

SEQ ID NO: 5343161 - DNA, 25 bp, Homo sapien
ctccttggccgcctgcttcaccttc

SEQ ID NO: 5343162 - DNA, 25 bp, Homo sapien
ttctccttggccgcctgcttcacct

SEQ ID NO: 5343163 - DNA, 25 bp, Homo sapien
cggggagccgagcgggagtcaggga

SEQ ID NO: 5343164 - DNA, 25 bp, Homo sapien
ctgtcgggccgggccaggccaggcc

SEQ ID NO: 5343165 - DNA, 25 bp, Homo sapien
aggagtggtggcggcggcggcgcag

SEQ ID NO: 5343166 - DNA, 25 bp, Homo sapien
gcggcggcggcgcagggcggggcgg

SEQ ID NO: 5343167 - DNA, 25 bp, Homo sapien
gcggcggcgcagggcggggcggtac

SEQ ID NO: 5343168 - DNA, 25 bp, Homo sapien
tggttccgtcggatatggtgcacga

SEQ ID NO: 5343169 - DNA, 25 bp, Homo sapien
tatggtgcacgaagccgtggttcat

SEQ ID NO: 5343170 - DNA, 25 bp, Homo sapien
cgagcgatctggttccgtcggatat

SEQ ID NO: 5343171 - DNA, 25 bp, Homo sapien
cgtcggatatggtgcacgaagccgt

SEQ ID NO: 5343172 - DNA, 25 bp, Homo sapien
ggccggggatgcggccccgcctcca

SEQ ID NO: 5343173 - DNA, 25 bp, Homo sapien
ccaggcttgcagcagtgccccggcc

SEQ ID NO: 5343174 - DNA, 25 bp, Homo sapien
ggcttgcagcagtgccccggccggg

SEQ ID NO: 5343175 - DNA, 25 bp, Homo sapien
gccggggatgcggccccgcctccat

SEQ ID NO: 5343176 - DNA, 25 bp, Homo sapien
gccgcctcgacggccccaacaacag

SEQ ID NO: 5343177 - DNA, 25 bp, Homo sapien
agccggggacgcagagtcgccgccg

SEQ ID NO: 5343178 - DNA, 25 bp, Homo sapien
gagccggggacgcagagtcgccgcc

SEQ ID NO: 5343179 - DNA, 25 bp, Homo sapien
tcgacggccccaacaacagccaccc

SEQ ID NO: 5343180 - DNA, 25 bp, Homo sapien
ttctggtaataggatgctgtgcaat

SEQ ID NO: 5343181 - DNA, 25 bp, Homo sapien
tttctggtaataggatgctgtgcaa

SEQ ID NO: 5343182 - DNA, 25 bp, Homo sapien
tctggtaataggatgctgtgcaatc

SEQ ID NO: 5343183 - DNA, 25 bp, Homo sapien
gccacttagcttcaacgttttccac

SEQ ID NO: 5343184 - DNA, 25 bp, Homo sapien
aatgccaaccagtgcatggtttaag

SEQ ID NO: 5343185 - DNA, 25 bp, Homo sapien
taagttaactctaatgccacttagc

SEQ ID NO: 5343186 - DNA, 25 bp, Homo sapien
caggagatggcgttgactttctgtc

SEQ ID NO: 5343187 - DNA, 25 bp, Homo sapien
ctgcccaaagtgctaggattataga

SEQ ID NO: 5343188 - DNA, 25 bp, Homo sapien
ctcaggtgatctgcccaaagtgcta

SEQ ID NO: 5343189 - DNA, 25 bp, Homo sapien
tgcccaaagtgctaggattatagat

SEQ ID NO: 5343190 - DNA, 25 bp, Homo sapien
aggtgatctgcccaaagtgctagga

SEQ ID NO: 5343191 - DNA, 25 bp, Homo sapien
caagccttgggattcttggagcaag

SEQ ID NO: 5343192 - DNA, 25 bp, Homo sapien
tatgggttctggctacaccagagca

SEQ ID NO: 5343193 - DNA, 25 bp, Homo sapien
taggccagcccagcttgtatgggtt

SEQ ID NO: 5343194 - DNA, 25 bp, Homo sapien
taacttcgctctgttagaggtggag

SEQ ID NO: 5343195 - DNA, 25 bp, Homo sapien
cttgcttccaccacggctgtctggg

SEQ ID NO: 5343196 - DNA, 25 bp, Homo sapien
caaagctgatcccagcatgcccttc

SEQ ID NO: 5343197 - DNA, 25 bp, Homo sapien
gcccttcctcttttggagacctcaa

SEQ ID NO: 5343198 - DNA, 25 bp, Homo sapien
gagctgaccgtcatatcctgtgtga

SEQ ID NO: 5343199 - DNA, 25 bp, Homo sapien
atcttgtccagagccaattctgact

SEQ ID NO: 5343200 - DNA, 25 bp, Homo sapien
accacatcacactgggaacactctg

SEQ ID NO: 5343201 - DNA, 25 bp, Homo sapien
tcacactgggaacactctgtgaggc

SEQ ID NO: 5343202 - DNA, 25 bp, Homo sapien
gactgcctctcggtctgtgggttga

SEQ ID NO: 5343203 - DNA, 25 bp, Homo sapien
gtaatggaaacaatggctttaagga

SEQ ID NO: 5343204 - DNA, 25 bp, Homo sapien
tctttctggcgcttgaacggtggag

SEQ ID NO: 5343205 - DNA, 25 bp, Homo sapien
aatgaattgtgtgtctcatccccag

SEQ ID NO: 5343206 - DNA, 25 bp, Homo sapien
gctttaaggacagtagttagctata

SEQ ID NO: 5343207 - DNA, 25 bp, Homo sapien
gattgtgggtgtcacatgcttccct

SEQ ID NO: 5343208 - DNA, 25 bp, Homo sapien
ccaagctcagtgtcaaaacacacac

SEQ ID NO: 5343209 - DNA, 25 bp, Homo sapien
acaccctgccgtagctctctcctgg

SEQ ID NO: 5343210 - DNA, 25 bp, Homo sapien
gagaagatggaaaaagccccaagct

SEQ ID NO: 5343211 - DNA, 25 bp, Homo sapien
gagaggagctatggacgtctgcttc

SEQ ID NO: 5343212 - DNA, 25 bp, Homo sapien
catactgcagcactttaaaggacgg

SEQ ID NO: 5343213 - DNA, 25 bp, Homo sapien
ggtttttggtgtcctcatgacctaa

SEQ ID NO: 5343214 - DNA, 25 bp, Homo sapien
taacctcatcccagtgagtagagac

SEQ ID NO: 5343215 - DNA, 25 bp, Homo sapien
taggactttattagcattggtgcag

SEQ ID NO: 5343216 - DNA, 25 bp, Homo sapien
aagagaataggactttattagcatt

SEQ ID NO: 5343217 - DNA, 25 bp, Homo sapien
gagaataggactttattagcattgg

SEQ ID NO: 5343218 - DNA, 25 bp, Homo sapien
gaataggactttattagcattggtg

SEQ ID NO: 5343219 - DNA, 25 bp, Homo sapien
ttgtattacacaggaatgggtccct

SEQ ID NO: 5343220 - DNA, 25 bp, Homo sapien
gaatcaccctaggactttcaatcaa

SEQ ID NO: 5343221 - DNA, 25 bp, Homo sapien
tgcacaaccccagctgagctttcag

SEQ ID NO: 5343222 - DNA, 25 bp, Homo sapien
gaatgggtccctagcttgcacaacc

SEQ ID NO: 5343223 - DNA, 25 bp, Homo sapien
aagcaatagctctcaagcagcagag

SEQ ID NO: 5343224 - DNA, 25 bp, Homo sapien
caaagcaatagctctcaagcagcag

SEQ ID NO: 5343225 - DNA, 25 bp, Homo sapien
taacaaagcaatagctctcaagcag

SEQ ID NO: 5343226 - DNA, 25 bp, Homo sapien
atcttaacaaagcaatagctctcaa

SEQ ID NO: 5343227 - DNA, 25 bp, Homo sapien
gagcgtgcagtgtccacccttgact

SEQ ID NO: 5343228 - DNA, 25 bp, Homo sapien
cccatcatgccagagcgtgcagtgt

SEQ ID NO: 5343229 - DNA, 25 bp, Homo sapien
cttgactacgctggggaattgctga

SEQ ID NO: 5343230 - DNA, 25 bp, Homo sapien
aggaagaaagcttgcccggtcgcca

SEQ ID NO: 5343231 - DNA, 25 bp, Homo sapien
agcttcaaccccctgtcctgtaaag

SEQ ID NO: 5343232 - DNA, 25 bp, Homo sapien
caagtagctgtaaaatccaatcttt

SEQ ID NO: 5343233 - DNA, 25 bp, Homo sapien
caaccccctgtcctgtaaagcagtg

SEQ ID NO: 5343234 - DNA, 25 bp, Homo sapien
ccagccctgggaggtcgtggtaggt

SEQ ID NO: 5343235 - DNA, 25 bp, Homo sapien
tgggggcccgtggtccaccagtgga

SEQ ID NO: 5343236 - DNA, 25 bp, Homo sapien
gaagtgggctctggtgtcagactgt

SEQ ID NO: 5343237 - DNA, 25 bp, Homo sapien
gtgggctctggtgtcagactgtggt

SEQ ID NO: 5343238 - DNA, 25 bp, Homo sapien
acagacaaggccgacacagggctgg

SEQ ID NO: 5343239 - DNA, 25 bp, Homo sapien
tgtgggagctgaggcttcttttcag

SEQ ID NO: 5343240 - DNA, 25 bp, Homo sapien
tcttttcagcctggcagctggcgag

SEQ ID NO: 5343241 - DNA, 25 bp, Homo sapien
ccatggtcccagagcccgtctcact

SEQ ID NO: 5343242 - DNA, 25 bp, Homo sapien
gggaagagcctggtcaccatggtcc

SEQ ID NO: 5343243 - DNA, 25 bp, Homo sapien
ctgaggaggatgagggccagagagg

SEQ ID NO: 5343244 - DNA, 25 bp, Homo sapien
gccagagagggactgtgtgtatgtc

SEQ ID NO: 5343245 - DNA, 25 bp, Homo sapien
gggccagagagggactgtgtgtatg

SEQ ID NO: 5343246 - DNA, 25 bp, Homo sapien
cagagagggactgtgtgtatgtcct

SEQ ID NO: 5343247 - DNA, 25 bp, Homo sapien
gactgcccgggtcctgggtgactcc

SEQ ID NO: 5343248 - DNA, 25 bp, Homo sapien
gacacattaaactggtccctgtggg

SEQ ID NO: 5343249 - DNA, 25 bp, Homo sapien
ggcttccccgcctcagatggaagaa

SEQ ID NO: 5343250 - DNA, 25 bp, Homo sapien
cagccaggtgatagcagaggtggtt

SEQ ID NO: 5343251 - DNA, 25 bp, Homo sapien
tgctctcaaggtcaccttaagccca

SEQ ID NO: 5343252 - DNA, 25 bp, Homo sapien
tctgaacagaattgtaaagtgggcc

SEQ ID NO: 5343253 - DNA, 25 bp, Homo sapien
aaagtgggccaagcttgctctcaag

SEQ ID NO: 5343254 - DNA, 25 bp, Homo sapien
taaatgaccaccatgttaggggctg

SEQ ID NO: 5343255 - DNA, 25 bp, Homo sapien
gaatacattgaaccctgagggccag

SEQ ID NO: 5343256 - DNA, 25 bp, Homo sapien
gagtcagatgatcacggccttcctg

SEQ ID NO: 5343257 - DNA, 25 bp, Homo sapien
cagcttcgggtagcaaagtgtgatt

SEQ ID NO: 5343258 - DNA, 25 bp, Homo sapien
aagtgtgattttccctgagccccag

SEQ ID NO: 5343259 - DNA, 25 bp, Homo sapien
ggaaagggtgttttcctgatggcca

SEQ ID NO: 5343260 - DNA, 25 bp, Homo sapien
ggttctgggcggggcagtgctcggg

SEQ ID NO: 5343261 - DNA, 25 bp, Homo sapien
cagtgctcggggtccggaaagggtg

SEQ ID NO: 5343262 - DNA, 25 bp, Homo sapien
atggccagccagaagccctcaggag

SEQ ID NO: 5343263 - DNA, 25 bp, Homo sapien
ggatggagcagccggcaggagtggc

SEQ ID NO: 5343264 - DNA, 25 bp, Homo sapien
tggagcagccggcaggagtggccgc

SEQ ID NO: 5343265 - DNA, 25 bp, Homo sapien
cagccggcaggagtggccgcctctt

SEQ ID NO: 5343266 - DNA, 25 bp, Homo sapien
gagcagccggcaggagtggccgcct

SEQ ID NO: 5343267 - DNA, 25 bp, Homo sapien
ggagcagaagggcctcccatgccct

SEQ ID NO: 5343268 - DNA, 25 bp, Homo sapien
gagcagaagggcctcccatgccctg

SEQ ID NO: 5343269 - DNA, 25 bp, Homo sapien
gcagaagggcctcccatgccctgat

SEQ ID NO: 5343270 - DNA, 25 bp, Homo sapien
agcagaagggcctcccatgccctga

SEQ ID NO: 5343271 - DNA, 25 bp, Homo sapien
ctggacatggtcccacacaccccga

SEQ ID NO: 5343272 - DNA, 25 bp, Homo sapien
gacatggtcccacacaccccgaggg

SEQ ID NO: 5343273 - DNA, 25 bp, Homo sapien
tggacatggtcccacacaccccgag

SEQ ID NO: 5343274 - DNA, 25 bp, Homo sapien
acatggtcccacacaccccgagggc

SEQ ID NO: 5343275 - DNA, 25 bp, Homo sapien
gtgtgctgctccacaaattgcttgc

SEQ ID NO: 5343276 - DNA, 25 bp, Homo sapien
ggcgtgtgctgctccacaaattgct

SEQ ID NO: 5343277 - DNA, 25 bp, Homo sapien
gggcgtgtgctgctccacaaattgc

SEQ ID NO: 5343278 - DNA, 25 bp, Homo sapien
agctggggcgtgtgctgctccacaa

SEQ ID NO: 5343279 - DNA, 25 bp, Homo sapien
tctggctgcagttgaaacccttaac

SEQ ID NO: 5343280 - DNA, 25 bp, Homo sapien
gaacacctctggctgcagttgaaac

SEQ ID NO: 5343281 - DNA, 25 bp, Homo sapien
tggctgcagttgaaacccttaacaa

SEQ ID NO: 5343282 - DNA, 25 bp, Homo sapien
cacctctggctgcagttgaaaccct

SEQ ID NO: 5343283 - DNA, 25 bp, Homo sapien
aggtggcactcagagtctcgcggca

SEQ ID NO: 5343284 - DNA, 25 bp, Homo sapien
tgtggtatggcctgctcgctgctgt

SEQ ID NO: 5343285 - DNA, 25 bp, Homo sapien
cactcagagtctcgcggcagccatt

SEQ ID NO: 5343286 - DNA, 25 bp, Homo sapien
aacacaggcctggagcattgcctgt

SEQ ID NO: 5343287 - DNA, 25 bp, Homo sapien
atgtgagcattagggggaaagcagg

SEQ ID NO: 5343288 - DNA, 25 bp, Homo sapien
gagatgtgagcattagggggaaagc

SEQ ID NO: 5343289 - DNA, 25 bp, Homo sapien
gatgtgagcattagggggaaagcag

SEQ ID NO: 5343290 - DNA, 25 bp, Homo sapien
ctggagatgtgagcattagggggaa

SEQ ID NO: 5343291 - DNA, 25 bp, Homo sapien
cagcagcgtgtcgagcaggatgacg

SEQ ID NO: 5343292 - DNA, 25 bp, Homo sapien
aggacgaggcggcagaccagctggg

SEQ ID NO: 5343293 - DNA, 25 bp, Homo sapien
caggatgacggagtagcgctcagcc

SEQ ID NO: 5343294 - DNA, 25 bp, Homo sapien
catccatggagcaccggaggacgag

SEQ ID NO: 5343295 - DNA, 25 bp, Homo sapien
tcatttgggccccaatttgggcaag

SEQ ID NO: 5343296 - DNA, 25 bp, Homo sapien
gcaaccctatctgggaaaggctgag

SEQ ID NO: 5343297 - DNA, 25 bp, Homo sapien
tggtggcccacgcaaccctatctgg

SEQ ID NO: 5343298 - DNA, 25 bp, Homo sapien
catttgggccccaatttgggcaagg

SEQ ID NO: 5343299 - DNA, 25 bp, Homo sapien
ggaatcatggcttggatccgcttga

SEQ ID NO: 5343300 - DNA, 25 bp, Homo sapien
gatccgcttgatcagagccctgcag

SEQ ID NO: 5343301 - DNA, 25 bp, Homo sapien
catggcttggatccgcttgatcaga

SEQ ID NO: 5343302 - DNA, 25 bp, Homo sapien
cttgggaatcatggcttggatccgc

SEQ ID NO: 5343303 - DNA, 25 bp, Homo sapien
agcacagggaggacgagcttgtcca

SEQ ID NO: 5343304 - DNA, 25 bp, Homo sapien
agagggtcccgcagaggtttgggca

SEQ ID NO: 5343305 - DNA, 25 bp, Homo sapien
cacagggaggacgagcttgtccagc

SEQ ID NO: 5343306 - DNA, 25 bp, Homo sapien
agggtcccgcagaggtttgggcagg

SEQ ID NO: 5343307 - DNA, 25 bp, Homo sapien
tctggctgccgggatttgcacaggc

SEQ ID NO: 5343308 - DNA, 25 bp, Homo sapien
ggtgcatacagatgccgtttgagtc

SEQ ID NO: 5343309 - DNA, 25 bp, Homo sapien
caggtgcatacagatgccgtttgag

SEQ ID NO: 5343310 - DNA, 25 bp, Homo sapien
tgccgggatttgcacaggcccaggt

SEQ ID NO: 5343311 - DNA, 25 bp, Homo sapien
gtatgtgtctggatagggtgctgtg

SEQ ID NO: 5343312 - DNA, 25 bp, Homo sapien
tatgtgtctggatagggtgctgtgt

SEQ ID NO: 5343313 - DNA, 25 bp, Homo sapien
tcgtcaagcacttggttgcactggg

SEQ ID NO: 5343314 - DNA, 25 bp, Homo sapien
cagcttcaaggggaggacgttgcac

SEQ ID NO: 5343315 - DNA, 25 bp, Homo sapien
gaggacgttgcactcctgctccagg

SEQ ID NO: 5343316 - DNA, 25 bp, Homo sapien
tctggttctggaagtagtcgatgac

SEQ ID NO: 5343317 - DNA, 25 bp, Homo sapien
cctcacactcttggcataggtcatc

SEQ ID NO: 5343318 - DNA, 25 bp, Homo sapien
tgtcctcacactcttggcataggtc

SEQ ID NO: 5343319 - DNA, 25 bp, Homo sapien
ggatgtggacgatgtcctcacactc

SEQ ID NO: 5343320 - DNA, 25 bp, Homo sapien
catcttgttaaggatgtggacgatg

SEQ ID NO: 5343321 - DNA, 25 bp, Homo sapien
caatggggaggttctcttaggaaga

SEQ ID NO: 5343322 - DNA, 25 bp, Homo sapien
cccagctccaatggggaggttctct

SEQ ID NO: 5343323 - DNA, 25 bp, Homo sapien
gctccaatggggaggttctcttagg

SEQ ID NO: 5343324 - DNA, 25 bp, Homo sapien
tcccagctccaatggggaggttctc

SEQ ID NO: 5343325 - DNA, 25 bp, Homo sapien
tctgcactgcaatgcttgctccagg

SEQ ID NO: 5343326 - DNA, 25 bp, Homo sapien
acatgtccccagacttcctgtaggc

SEQ ID NO: 5343327 - DNA, 25 bp, Homo sapien
ctgcaatgcttgctccaggctttgg

SEQ ID NO: 5343328 - DNA, 25 bp, Homo sapien
tccccagacttcctgtaggcaatgc

SEQ ID NO: 5343329 - DNA, 25 bp, Homo sapien
gccactgcagcaggtgtgactcagc

SEQ ID NO: 5343330 - DNA, 25 bp, Homo sapien
cactgcagcaggtgtgactcagcca

SEQ ID NO: 5343331 - DNA, 25 bp, Homo sapien
cagccactgcagcaggtgtgactca

SEQ ID NO: 5343332 - DNA, 25 bp, Homo sapien
ctgggccacagagcgtgggcagcag

SEQ ID NO: 5343333 - DNA, 25 bp, Homo sapien
gcctgggtaccctgcttggtgcatg

SEQ ID NO: 5343334 - DNA, 25 bp, Homo sapien
tgcatggccccttatagctgggcgg

SEQ ID NO: 5343335 - DNA, 25 bp, Homo sapien
gggtaccctgcttggtgcatggccc

SEQ ID NO: 5343336 - DNA, 25 bp, Homo sapien
tggtgcatggccccttatagctggg

SEQ ID NO: 5343337 - DNA, 25 bp, Homo sapien
gaaaaatcttctggttctatggaca

SEQ ID NO: 5343338 - DNA, 25 bp, Homo sapien
tcttctggttctatggacacatggt

SEQ ID NO: 5343339 - DNA, 25 bp, Homo sapien
tggttctatggacacatggtttgca

SEQ ID NO: 5343340 - DNA, 25 bp, Homo sapien
aaaatcttctggttctatggacaca

SEQ ID NO: 5343341 - DNA, 25 bp, Homo sapien
cactggaaatgaataaagaaacatt

SEQ ID NO: 5343342 - DNA, 25 bp, Homo sapien
ctgcttctcactggaaatgaataaa

SEQ ID NO: 5343343 - DNA, 25 bp, Homo sapien
ctcactggaaatgaataaagaaaca

SEQ ID NO: 5343344 - DNA, 25 bp, Homo sapien
gcttctcactggaaatgaataaaga

SEQ ID NO: 5343345 - DNA, 25 bp, Homo sapien
taagaggcctcaagtggagtcctga

SEQ ID NO: 5343346 - DNA, 25 bp, Homo sapien
taaaattgcacctgttggctgtagc

SEQ ID NO: 5343347 - DNA, 25 bp, Homo sapien
ccctgaacaggtgcaaagtatggag

SEQ ID NO: 5343348 - DNA, 25 bp, Homo sapien
taaggagataagaagccacacaggc

SEQ ID NO: 5343349 - DNA, 25 bp, Homo sapien
cccagctctgcatccctggcagaga

SEQ ID NO: 5343350 - DNA, 25 bp, Homo sapien
ctaggggacacagcccagctctgca

SEQ ID NO: 5343351 - DNA, 25 bp, Homo sapien
agctctgcatccctggcagagatgg

SEQ ID NO: 5343352 - DNA, 25 bp, Homo sapien
gcagagatggccacatccagcaggc

SEQ ID NO: 5343353 - DNA, 25 bp, Homo sapien
catcaggtatgagtcaaacgccagg

SEQ ID NO: 5343354 - DNA, 25 bp, Homo sapien
tcaggtatgagtcaaacgccaggac

SEQ ID NO: 5343355 - DNA, 25 bp, Homo sapien
acaggggtgtggtaaaggtcaggca

SEQ ID NO: 5343356 - DNA, 25 bp, Homo sapien
tcacatcaggtatgagtcaaacgcc

SEQ ID NO: 5343357 - DNA, 25 bp, Homo sapien
gaagccagcagacaagtgaggctgc

SEQ ID NO: 5343358 - DNA, 25 bp, Homo sapien
agaagccagcagacaagtgaggctg

SEQ ID NO: 5343359 - DNA, 25 bp, Homo sapien
gcaatggtgagcctcgcactgggaa

SEQ ID NO: 5343360 - DNA, 25 bp, Homo sapien
acctccggggtgcaatggtgagcct

SEQ ID NO: 5343361 - DNA, 25 bp, Homo sapien
aacacaggggtctgcacctccgggg

SEQ ID NO: 5343362 - DNA, 25 bp, Homo sapien
tggtgagcctcgcactgggaaaacc

SEQ ID NO: 5343363 - DNA, 25 bp, Homo sapien
ggactcctcgcgcactggggttaaa

SEQ ID NO: 5343364 - DNA, 25 bp, Homo sapien
ctcctcgcgcactggggttaaaatg

SEQ ID NO: 5343365 - DNA, 25 bp, Homo sapien
atccccggactcctcgcgcactggg

SEQ ID NO: 5343366 - DNA, 25 bp, Homo sapien
tgtccatccccggactcctcgcgca

SEQ ID NO: 5343367 - DNA, 25 bp, Homo sapien
ggctcagctcgagttctgtccagtg

SEQ ID NO: 5343368 - DNA, 25 bp, Homo sapien
tgtgcctttgacatgaccaactctg

SEQ ID NO: 5343369 - DNA, 25 bp, Homo sapien
caggtcttggtccaaacagaggagt

SEQ ID NO: 5343370 - DNA, 25 bp, Homo sapien
tactagggattgttctagcggctgg

SEQ ID NO: 5343371 - DNA, 25 bp, Homo sapien
ccaggttcccagcaatggagggaca

SEQ ID NO: 5343372 - DNA, 25 bp, Homo sapien
ggccggaagcctaaacagccagtct

SEQ ID NO: 5343373 - DNA, 25 bp, Homo sapien
ttcatagcagccacgaacatccgag

SEQ ID NO: 5343374 - DNA, 25 bp, Homo sapien
gaggcacccataaggttctgctgag

SEQ ID NO: 5343375 - DNA, 25 bp, Homo sapien
tggtacgtgacaaggtgaagatccc

SEQ ID NO: 5343376 - DNA, 25 bp, Homo sapien
catccaaaggtgtgagtagggccaa

SEQ ID NO: 5343377 - DNA, 25 bp, Homo sapien
gtcttcagctacacccaagtctggg

SEQ ID NO: 5343378 - DNA, 25 bp, Homo sapien
gaccgcagtgttgtgtgcagtccca

SEQ ID NO: 5343379 - DNA, 25 bp, Homo sapien
tttcccgctccagcaagtgagagtg

SEQ ID NO: 5343380 - DNA, 25 bp, Homo sapien
tgtgacttaggcgttgttctccgaa

SEQ ID NO: 5343381 - DNA, 25 bp, Homo sapien
taggtctgcctaaatccgaagcttc

SEQ ID NO: 5343382 - DNA, 25 bp, Homo sapien
aaatcccggtttagcagggcgcctg

SEQ ID NO: 5343383 - DNA, 25 bp, Homo sapien
cggcggcggcccgggcagccccacg

SEQ ID NO: 5343384 - DNA, 25 bp, Homo sapien
gcggcggcccgggcagccccacgcc

SEQ ID NO: 5343385 - DNA, 25 bp, Homo sapien
tcctcggcgctgagcgcggcggcgg

SEQ ID NO: 5343386 - DNA, 25 bp, Homo sapien
ggcccgggcagccccacgcccctgc

SEQ ID NO: 5343387 - DNA, 25 bp, Homo sapien
ggattcctccgcgtcgcctaggaaa

SEQ ID NO: 5343388 - DNA, 25 bp, Homo sapien
atcagcgcagccttcgaggcgctca

SEQ ID NO: 5343389 - DNA, 25 bp, Homo sapien
tcaggaagcaggtacccgctcgccg

SEQ ID NO: 5343390 - DNA, 25 bp, Homo sapien
aaacgaccgggcgaagcgactgccg

SEQ ID NO: 5343391 - DNA, 25 bp, Homo sapien
gttaagtcgcctggcggcctttggc

SEQ ID NO: 5343392 - DNA, 25 bp, Homo sapien
cccagctttgtgccgccggcgagga

SEQ ID NO: 5343393 - DNA, 25 bp, Homo sapien
gactgacaccaggttaagtcgcctg

SEQ ID NO: 5343394 - DNA, 25 bp, Homo sapien
ccggcgaggactgacaccaggttaa

SEQ ID NO: 5343395 - DNA, 25 bp, Homo sapien
cttctgggatatgtctgcctggaac

SEQ ID NO: 5343396 - DNA, 25 bp, Homo sapien
aagccttctgggatatgtctgcctg

SEQ ID NO: 5343397 - DNA, 25 bp, Homo sapien
ctgctgccgccaaagccttctggga

SEQ ID NO: 5343398 - DNA, 25 bp, Homo sapien
cgccaaagccttctgggatatgtct

SEQ ID NO: 5343399 - DNA, 25 bp, Homo sapien
gggcagggccggcaactggaagcca

SEQ ID NO: 5343400 - DNA, 25 bp, Homo sapien
gcagggccggcaactggaagccagc

SEQ ID NO: 5343401 - DNA, 25 bp, Homo sapien
ggcagggccggcaactggaagccag

SEQ ID NO: 5343402 - DNA, 25 bp, Homo sapien
cccagcagtggaaaaagcccgtcat

SEQ ID NO: 5343403 - DNA, 25 bp, Homo sapien
aaagcccgtcattgacacggctgtg

SEQ ID NO: 5343404 - DNA, 25 bp, Homo sapien
tggaaaaagcccgtcattgacacgg

SEQ ID NO: 5343405 - DNA, 25 bp, Homo sapien
cccgtcattgacacggctgtgggtg

SEQ ID NO: 5343406 - DNA, 25 bp, Homo sapien
catctttacacaggctcctgcacct

SEQ ID NO: 5343407 - DNA, 25 bp, Homo sapien
ctttacacaggctcctgcacctcat

SEQ ID NO: 5343408 - DNA, 25 bp, Homo sapien
tctttacacaggctcctgcacctca

SEQ ID NO: 5343409 - DNA, 25 bp, Homo sapien
ttcatctttacacaggctcctgcac

SEQ ID NO: 5343410 - DNA, 25 bp, Homo sapien
agttgtcaagaggaagctaaagtac

SEQ ID NO: 5343411 - DNA, 25 bp, Homo sapien
cagggaccttggaattgtgtgtgca

SEQ ID NO: 5343412 - DNA, 25 bp, Homo sapien
tgttcgtggacttgaccttgagttg

SEQ ID NO: 5343413 - DNA, 25 bp, Homo sapien
ctaaagtacatccagtaatgtcggg

SEQ ID NO: 5343414 - DNA, 25 bp, Homo sapien
tggttggttggtgcccatcaatccc

SEQ ID NO: 5343415 - DNA, 25 bp, Homo sapien
actgtgatctctgcaaaggcttgct

SEQ ID NO: 5343416 - DNA, 25 bp, Homo sapien
cccagtggtcctgaagtatccacag

SEQ ID NO: 5343417 - DNA, 25 bp, Homo sapien
ggcttgctggccagcactttggtgt

SEQ ID NO: 5343418 - DNA, 25 bp, Homo sapien
gaccaatgggcgtcctccactgggt

SEQ ID NO: 5343419 - DNA, 25 bp, Homo sapien
gggaataaatcagacctaggctaga

SEQ ID NO: 5343420 - DNA, 25 bp, Homo sapien
tatccctcggccagagctgattggt

SEQ ID NO: 5343421 - DNA, 25 bp, Homo sapien
tatgaagaggtatcattggcatctt

SEQ ID NO: 5343422 - DNA, 25 bp, Homo sapien
aggccctccacgtcgtggtttggct

SEQ ID NO: 5343423 - DNA, 25 bp, Homo sapien
gcctgtggttagcaggccctccacg

SEQ ID NO: 5343424 - DNA, 25 bp, Homo sapien
ggccctccacgtcgtggtttggctc

SEQ ID NO: 5343425 - DNA, 25 bp, Homo sapien
cctccacgtcgtggtttggctccat

SEQ ID NO: 5343426 - DNA, 25 bp, Homo sapien
gagaagcaatattactccctcccct

SEQ ID NO: 5343427 - DNA, 25 bp, Homo sapien
gggccctaagcatcaccagaaggga

SEQ ID NO: 5343428 - DNA, 25 bp, Homo sapien
gcacgtggcctgaggaaggagtaga

SEQ ID NO: 5343429 - DNA, 25 bp, Homo sapien
tacctatgggtctttgcttccccag

SEQ ID NO: 5343430 - DNA, 25 bp, Homo sapien
aactccacaggacacttggtcctgc

SEQ ID NO: 5343431 - DNA, 25 bp, Homo sapien
ggctgacagctcagtgttggtgcca

SEQ ID NO: 5343432 - DNA, 25 bp, Homo sapien
gacagctcagtgttggtgccatctg

SEQ ID NO: 5343433 - DNA, 25 bp, Homo sapien
cacaggacacttggtcctgctggac

SEQ ID NO: 5343434 - DNA, 25 bp, Homo sapien
acaggtcctgttcctacaaggagct

SEQ ID NO: 5343435 - DNA, 25 bp, Homo sapien
tggacacgctgtccgaacaactgcc

SEQ ID NO: 5343436 - DNA, 25 bp, Homo sapien
ctggacacgctgtccgaacaactgc

SEQ ID NO: 5343437 - DNA, 25 bp, Homo sapien
cctgttcctacaaggagctggacac

SEQ ID NO: 5343438 - DNA, 25 bp, Homo sapien
gaagtgggaacgttgtcctcagcct

SEQ ID NO: 5343439 - DNA, 25 bp, Homo sapien
gcttggccctgatgcaaagtccaca

SEQ ID NO: 5343440 - DNA, 25 bp, Homo sapien
caaagtccacatgttttttcatcat

SEQ ID NO: 5343441 - DNA, 25 bp, Homo sapien
ctcttatatagagcatagcttcctg

SEQ ID NO: 5343442 - DNA, 25 bp, Homo sapien
tttctcctcctaccttgatgggcat

SEQ ID NO: 5343443 - DNA, 25 bp, Homo sapien
cagaggcttcaggttccctcctttt

SEQ ID NO: 5343444 - DNA, 25 bp, Homo sapien
ggcttttctcctcctaccttgatgg

SEQ ID NO: 5343445 - DNA, 25 bp, Homo sapien
caggttccctcctttttgcactggc

SEQ ID NO: 5343446 - DNA, 25 bp, Homo sapien
gctgtctacagcctggtattctggt

SEQ ID NO: 5343447 - DNA, 25 bp, Homo sapien
ctggtattctggtagcacagaaggc

SEQ ID NO: 5343448 - DNA, 25 bp, Homo sapien
ggaacagaggctgtctacagcctgg

SEQ ID NO: 5343449 - DNA, 25 bp, Homo sapien
tggtagcacagaaggctcctggaaa

SEQ ID NO: 5343450 - DNA, 25 bp, Homo sapien
gagtgcagttatttgcatgcctgta

SEQ ID NO: 5343451 - DNA, 25 bp, Homo sapien
tgcagttatttgcatgcctgtaact

SEQ ID NO: 5343452 - DNA, 25 bp, Homo sapien
tgcctgtaactgaagaacggtcctc

SEQ ID NO: 5343453 - DNA, 25 bp, Homo sapien
gtgcagttatttgcatgcctgtaac

SEQ ID NO: 5343454 - DNA, 25 bp, Homo sapien
gctaataatattcaggacctcttta

SEQ ID NO: 5343455 - DNA, 25 bp, Homo sapien
gctaccctagcagacatgaagtgat

SEQ ID NO: 5343456 - DNA, 25 bp, Homo sapien
ttgtatttctcccatggctaataat

SEQ ID NO: 5343457 - DNA, 25 bp, Homo sapien
tattctagatacaagcaacttatta

SEQ ID NO: 5343458 - DNA, 25 bp, Homo sapien
ggtcagtagaatgcctatagtttac

SEQ ID NO: 5343459 - DNA, 25 bp, Homo sapien
tcatgttatctgcagcaagatggat

SEQ ID NO: 5343460 - DNA, 25 bp, Homo sapien
cacatgttctcattcctatgtagga

SEQ ID NO: 5343461 - DNA, 25 bp, Homo sapien
cacatggaccctcaaaatatgcaca

SEQ ID NO: 5343462 - DNA, 25 bp, Homo sapien
tattcaatgtgcagtgtaaacgagc

SEQ ID NO: 5343463 - DNA, 25 bp, Homo sapien
gcccagggtggcttcacagttgtca

SEQ ID NO: 5343464 - DNA, 25 bp, Homo sapien
tggaaagggtgtactctcccatgac

SEQ ID NO: 5343465 - DNA, 25 bp, Homo sapien
tacggagcacgtcatcctgggagtg

SEQ ID NO: 5343466 - DNA, 25 bp, Homo sapien
aaattcacgatcaatgcctccactg

SEQ ID NO: 5343467 - DNA, 25 bp, Homo sapien
cacgatcaatgcctccactgagatc

SEQ ID NO: 5343468 - DNA, 25 bp, Homo sapien
tcaaaattcacgatcaatgcctcca

SEQ ID NO: 5343469 - DNA, 25 bp, Homo sapien
ttcacgatcaatgcctccactgaga

SEQ ID NO: 5343470 - DNA, 25 bp, Homo sapien
caacggcaatgacaccgattgtggg

SEQ ID NO: 5343471 - DNA, 25 bp, Homo sapien
ctgtcgaagtagtgcaaaggtgttc

SEQ ID NO: 5343472 - DNA, 25 bp, Homo sapien
catcgcacagatgtgtggctaagac

SEQ ID NO: 5343473 - DNA, 25 bp, Homo sapien
catagcagccatgcattgactgtcg

SEQ ID NO: 5343474 - DNA, 25 bp, Homo sapien
tctaggctctaaaacatggtctgtg

SEQ ID NO: 5343475 - DNA, 25 bp, Homo sapien
ggtattacacatgctacgcagagtc

SEQ ID NO: 5343476 - DNA, 25 bp, Homo sapien
tctccatttaagtcaggaatctagg

SEQ ID NO: 5343477 - DNA, 25 bp, Homo sapien
aggtattccccttctaggccaggtg

SEQ ID NO: 5343478 - DNA, 25 bp, Homo sapien
cgcccagcctagtgttttgtatgtt

SEQ ID NO: 5343479 - DNA, 25 bp, Homo sapien
gctgttaatgctatagtgtacatcc

SEQ ID NO: 5343480 - DNA, 25 bp, Homo sapien
tacattcctgccaaacaaggacatt

SEQ ID NO: 5343481 - DNA, 25 bp, Homo sapien
aaagtgccagctgatcattctacct

SEQ ID NO: 5343482 - DNA, 25 bp, Homo sapien
agaatctctactgcaataaacagcc

SEQ ID NO: 5343483 - DNA, 25 bp, Homo sapien
gcaagtaataaaggcatgcacaccc

SEQ ID NO: 5343484 - DNA, 25 bp, Homo sapien
tagagcacaaagttcccaaattagg

SEQ ID NO: 5343485 - DNA, 25 bp, Homo sapien
gttattcagatcaagaagccgcaag

SEQ ID NO: 5343486 - DNA, 25 bp, Homo sapien
cccagaaccttgactgaggctctga

SEQ ID NO: 5343487 - DNA, 25 bp, Homo sapien
aaggatgtcaaaggcagtctctttg

SEQ ID NO: 5343488 - DNA, 25 bp, Homo sapien
aaaagaagagtcgtacccagaatgg

SEQ ID NO: 5343489 - DNA, 25 bp, Homo sapien
gaggctctgagtactgaaggatgtc

SEQ ID NO: 5343490 - DNA, 25 bp, Homo sapien
tctacaaagagagtgatcatcattt

SEQ ID NO: 5343491 - DNA, 25 bp, Homo sapien
aagaattgctgaggggtttctacaa

SEQ ID NO: 5343492 - DNA, 25 bp, Homo sapien
agaattgctgaggggtttctacaaa

SEQ ID NO: 5343493 - DNA, 25 bp, Homo sapien
gcttgaagccagttgaaatcaacac

SEQ ID NO: 5343494 - DNA, 25 bp, Homo sapien
taaaacagcaacaaataagtcattg

SEQ ID NO: 5343495 - DNA, 25 bp, Homo sapien
tgttctgaatatccctcaactggtg

SEQ ID NO: 5343496 - DNA, 25 bp, Homo sapien
agtggtgcgccctctggataagtca

SEQ ID NO: 5343497 - DNA, 25 bp, Homo sapien
ggaaaatctagtccaccatgcctgg

SEQ ID NO: 5343498 - DNA, 25 bp, Homo sapien
tctgggtgccagtaaaatatcctca

SEQ ID NO: 5343499 - DNA, 25 bp, Homo sapien
gcagcctttagtacttgagcgaaca

SEQ ID NO: 5343500 - DNA, 25 bp, Homo sapien
tctaggatttcgaggaatgcagcct

SEQ ID NO: 5343501 - DNA, 25 bp, Homo sapien
caaacgttaagtcccttgtgggcag

SEQ ID NO: 5343502 - DNA, 25 bp, Homo sapien
tagggtcagtatgacagtttggagc

SEQ ID NO: 5343503 - DNA, 25 bp, Homo sapien
ggagcatccaaccattttgtgtttt

SEQ ID NO: 5343504 - DNA, 25 bp, Homo sapien
agcagcatgctcctccaacttaggg

SEQ ID NO: 5343505 - DNA, 25 bp, Homo sapien
ggagtaagtccacgctatacctgtg

SEQ ID NO: 5343506 - DNA, 25 bp, Homo sapien
caaaaggaggatcgtacttggactc

SEQ ID NO: 5343507 - DNA, 25 bp, Homo sapien
tcttggcaaacttgggacgacattc

SEQ ID NO: 5343508 - DNA, 25 bp, Homo sapien
tgtggcccagttctaatccgtgcag

SEQ ID NO: 5343509 - DNA, 25 bp, Homo sapien
agacttgctgagcatatttctgagc

SEQ ID NO: 5343510 - DNA, 25 bp, Homo sapien
caagacttgctgagcatatttctga

SEQ ID NO: 5343511 - DNA, 25 bp, Homo sapien
gcaagacttgctgagcatatttctg

SEQ ID NO: 5343512 - DNA, 25 bp, Homo sapien
ctgcaagacttgctgagcatatttc

SEQ ID NO: 5343513 - DNA, 25 bp, Homo sapien
ctggaatgaaatcacaccaatctgg

SEQ ID NO: 5343514 - DNA, 25 bp, Homo sapien
ggaatgaaatcacaccaatctgggt

SEQ ID NO: 5343515 - DNA, 25 bp, Homo sapien
tgaaatcacaccaatctgggtttta

SEQ ID NO: 5343516 - DNA, 25 bp, Homo sapien
gaatgaaatcacaccaatctgggtt

SEQ ID NO: 5343517 - DNA, 25 bp, Homo sapien
ccaggagctgcgtgaatgcaacaaa

SEQ ID NO: 5343518 - DNA, 25 bp, Homo sapien
tcgagtgatcctcaacctggaaggt

SEQ ID NO: 5343519 - DNA, 25 bp, Homo sapien
tatgatgtctgatgtagctcccgtg

SEQ ID NO: 5343520 - DNA, 25 bp, Homo sapien
ggcaaagcaagaaggactcccgcct

SEQ ID NO: 5343521 - DNA, 25 bp, Homo sapien
gacactatggcaccttgcaagacga

SEQ ID NO: 5343522 - DNA, 25 bp, Homo sapien
tcttggagcctcagaaacgctgctg

SEQ ID NO: 5343523 - DNA, 25 bp, Homo sapien
gatgctccgggtgcttaatgccaag

SEQ ID NO: 5343524 - DNA, 25 bp, Homo sapien
tgtctacatccgaagaatctggccc

SEQ ID NO: 5343525 - DNA, 25 bp, Homo sapien
tttctagactgtgggtagggcacat

SEQ ID NO: 5343526 - DNA, 25 bp, Homo sapien
ctagactgtgggtagggcacatttc

SEQ ID NO: 5343527 - DNA, 25 bp, Homo sapien
taattttctagactgtgggtagggc

SEQ ID NO: 5343528 - DNA, 25 bp, Homo sapien
cagcccaaacttaattttctagact

SEQ ID NO: 5343529 - DNA, 25 bp, Homo sapien
tacatgtcctggcaacgtctaaagc

SEQ ID NO: 5343530 - DNA, 25 bp, Homo sapien
aaagtgcctcaaggcgagtgccgca

SEQ ID NO: 5343531 - DNA, 25 bp, Homo sapien
taagtaagttgaaccggcatctgct

SEQ ID NO: 5343532 - DNA, 25 bp, Homo sapien
tcctgcgcctaagtgacagtggatg

SEQ ID NO: 5343533 - DNA, 25 bp, Homo sapien
aagcggggagcagcactaaggagag

SEQ ID NO: 5343534 - DNA, 25 bp, Homo sapien
agactcggtttgaagatgctggtgc

SEQ ID NO: 5343535 - DNA, 25 bp, Homo sapien
agaaaagactcggtttgaagatgct

SEQ ID NO: 5343536 - DNA, 25 bp, Homo sapien
ggagagaaaagactcggtttgaaga

SEQ ID NO: 5343537 - DNA, 25 bp, Homo sapien
tgcttcctttaaaggcacggtgtag

SEQ ID NO: 5343538 - DNA, 25 bp, Homo sapien
ccctgcttcctttaaaggcacggtg

SEQ ID NO: 5343539 - DNA, 25 bp, Homo sapien
tgaatgcttcagcagggagggccct

SEQ ID NO: 5343540 - DNA, 25 bp, Homo sapien
gagggccctgcttcctttaaaggca

SEQ ID NO: 5343541 - DNA, 25 bp, Homo sapien
cagagtccgagagaagacgatgaag

SEQ ID NO: 5343542 - DNA, 25 bp, Homo sapien
ctgcagagtccgagagaagacgatg

SEQ ID NO: 5343543 - DNA, 25 bp, Homo sapien
aagacgatgaagaagcggctgagtc

SEQ ID NO: 5343544 - DNA, 25 bp, Homo sapien
gacgatgaagaagcggctgagtcca

SEQ ID NO: 5343545 - DNA, 25 bp, Homo sapien
gaaactgacatcaacgtgccctcgt

SEQ ID NO: 5343546 - DNA, 25 bp, Homo sapien
tggaaccaacagagctaacagggcc

SEQ ID NO: 5343547 - DNA, 25 bp, Homo sapien
gagagggccaagttcaaaatgctgc

SEQ ID NO: 5343548 - DNA, 25 bp, Homo sapien
tcatagccactcagaacacgaggac

SEQ ID NO: 5343549 - DNA, 25 bp, Homo sapien
cctgccatgtggagttgtaactaca

SEQ ID NO: 5343550 - DNA, 25 bp, Homo sapien
cagggaaaggctctaggcagcaaag

SEQ ID NO: 5343551 - DNA, 25 bp, Homo sapien
taagatgttaagcacacagcccctg

SEQ ID NO: 5343552 - DNA, 25 bp, Homo sapien
cacagagggacgatcagggatagcc

SEQ ID NO: 5343553 - DNA, 25 bp, Homo sapien
ctgggtgacagcgtgaggccctgct

SEQ ID NO: 5343554 - DNA, 25 bp, Homo sapien
aaagaaaagaagctgggctcagtgg

SEQ ID NO: 5343555 - DNA, 25 bp, Homo sapien
agcgtgaggccctgctgaaaagaaa

SEQ ID NO: 5343556 - DNA, 25 bp, Homo sapien
aaaaataggcacgtatggtggtgca

SEQ ID NO: 5343557 - DNA, 25 bp, Homo sapien
tgaagcgccgtggaattgcaaagga

SEQ ID NO: 5343558 - DNA, 25 bp, Homo sapien
agcgccgtggaattgcaaaggactg

SEQ ID NO: 5343559 - DNA, 25 bp, Homo sapien
caagagagctgtgaagcgccgtgga

SEQ ID NO: 5343560 - DNA, 25 bp, Homo sapien
ctgtgaagcgccgtggaattgcaaa

SEQ ID NO: 5343561 - DNA, 25 bp, Homo sapien
cacacagtagactaatgatattata

SEQ ID NO: 5343562 - DNA, 25 bp, Homo sapien
tatagtttgagcatatgcttggcaa

SEQ ID NO: 5343563 - DNA, 25 bp, Homo sapien
catttaaaccacaccaatgggatat

SEQ ID NO: 5343564 - DNA, 25 bp, Homo sapien
tatatttgtcacacagtagactaat

SEQ ID NO: 5343565 - DNA, 25 bp, Homo sapien
gaggatataaaggatccacactcca

SEQ ID NO: 5343566 - DNA, 25 bp, Homo sapien
catggtcagggtccacataatgcat

SEQ ID NO: 5343567 - DNA, 25 bp, Homo sapien
ctttacatggtcagggtccacataa

SEQ ID NO: 5343568 - DNA, 25 bp, Homo sapien
gtataatttaacttgaggatataaa

SEQ ID NO: 5343569 - DNA, 25 bp, Homo sapien
tgtcttttaataacaagctgggcct

SEQ ID NO: 5343570 - DNA, 25 bp, Homo sapien
gatgtcttttaataacaagctgggc

SEQ ID NO: 5343571 - DNA, 25 bp, Homo sapien
ggatgtcttttaataacaagctggg

SEQ ID NO: 5343572 - DNA, 25 bp, Homo sapien
tcttttaataacaagctgggccttc

SEQ ID NO: 5343573 - DNA, 25 bp, Homo sapien
gtgtaccattgcagggaaggcctcg

SEQ ID NO: 5343574 - DNA, 25 bp, Homo sapien
tcacataggtgtactcacttggcat

SEQ ID NO: 5343575 - DNA, 25 bp, Homo sapien
cttgctttgagctcgggtgtaccat

SEQ ID NO: 5343576 - DNA, 25 bp, Homo sapien
gaaggcctcgagcaatcacttctca

SEQ ID NO: 5343577 - DNA, 25 bp, Homo sapien
cccctgacttggtgaagctttggat

SEQ ID NO: 5343578 - DNA, 25 bp, Homo sapien
caggcaagggaaggtgtctacatgt

SEQ ID NO: 5343579 - DNA, 25 bp, Homo sapien
gatcctaggatgtgctggtgaaaga

SEQ ID NO: 5343580 - DNA, 25 bp, Homo sapien
ctttggatagcagtagtagcaggca

SEQ ID NO: 5343581 - DNA, 25 bp, Homo sapien
acaggataatggttgcccatgctat

SEQ ID NO: 5343582 - DNA, 25 bp, Homo sapien
gcgagacaggataatggttgcccat

SEQ ID NO: 5343583 - DNA, 25 bp, Homo sapien
cctgggtggcggcgagacaggataa

SEQ ID NO: 5343584 - DNA, 25 bp, Homo sapien
tcctgggtggcggcgagacaggata

SEQ ID NO: 5343585 - DNA, 25 bp, Homo sapien
aattataggcgtagaggcatctgga

SEQ ID NO: 5343586 - DNA, 25 bp, Homo sapien
aagagtgttcacgtagccataggta

SEQ ID NO: 5343587 - DNA, 25 bp, Homo sapien
gcacccagccggcaattatactttt

SEQ ID NO: 5343588 - DNA, 25 bp, Homo sapien
aacaaaaaacgatcagactgcaggg

SEQ ID NO: 5343589 - DNA, 25 bp, Homo sapien
tgaaactattttcacttagggagga

SEQ ID NO: 5343590 - DNA, 25 bp, Homo sapien
gaggaaatccttaagctacgattga

SEQ ID NO: 5343591 - DNA, 25 bp, Homo sapien
catacattaccagttctatttttga

SEQ ID NO: 5343592 - DNA, 25 bp, Homo sapien
aaatatttttaggatcccttgatca

SEQ ID NO: 5343593 - DNA, 25 bp, Homo sapien
tgatctgttctggcactgcagcttc

SEQ ID NO: 5343594 - DNA, 25 bp, Homo sapien
ctgatctgttctggcactgcagctt

SEQ ID NO: 5343595 - DNA, 25 bp, Homo sapien
atctgttctggcactgcagcttcag

SEQ ID NO: 5343596 - DNA, 25 bp, Homo sapien
gatctgttctggcactgcagcttca

SEQ ID NO: 5343597 - DNA, 25 bp, Homo sapien
gatattcctgtatgcatgctttctt

SEQ ID NO: 5343598 - DNA, 25 bp, Homo sapien
gattccatgcaagcaggggtctctg

SEQ ID NO: 5343599 - DNA, 25 bp, Homo sapien
aattgcttatgtggatattcctgta

SEQ ID NO: 5343600 - DNA, 25 bp, Homo sapien
gaattacacgtttgtcttgtctccc

SEQ ID NO: 5343601 - DNA, 25 bp, Homo sapien
tgaagaaatataagggcaaatttgg

SEQ ID NO: 5343602 - DNA, 25 bp, Homo sapien
tctagttactttgaattacacaaca

SEQ ID NO: 5343603 - DNA, 25 bp, Homo sapien
attcttaaggccctaatgaagaaat

SEQ ID NO: 5343604 - DNA, 25 bp, Homo sapien
aattactgtttactataggcaccct

SEQ ID NO: 5343605 - DNA, 25 bp, Homo sapien
aattactggtgcatgagtaaggcac

SEQ ID NO: 5343606 - DNA, 25 bp, Homo sapien
taaagcagtacatgatgaattgcca

SEQ ID NO: 5343607 - DNA, 25 bp, Homo sapien
tattgagagggataagccgacatat

SEQ ID NO: 5343608 - DNA, 25 bp, Homo sapien
gccgacatatgatctagtgaaccta

SEQ ID NO: 5343609 - DNA, 25 bp, Homo sapien
tggaacaagaggagggtatttgtaa

SEQ ID NO: 5343610 - DNA, 25 bp, Homo sapien
tctaaaatagtgaagtcacaccagg

SEQ ID NO: 5343611 - DNA, 25 bp, Homo sapien
tataggctaatatggccagcagagc

SEQ ID NO: 5343612 - DNA, 25 bp, Homo sapien
caccagggcacagacggttataaac

SEQ ID NO: 5343613 - DNA, 25 bp, Homo sapien
aggaactcctctttgcgaattctta

SEQ ID NO: 5343614 - DNA, 25 bp, Homo sapien
ctttgcgaattcttataagcagacc

SEQ ID NO: 5343615 - DNA, 25 bp, Homo sapien
gtggaggttgagagacaggaaattc

SEQ ID NO: 5343616 - DNA, 25 bp, Homo sapien
ttataagcagacctacccacaaagc

SEQ ID NO: 5343617 - DNA, 25 bp, Homo sapien
cagacactgaaaagccctatggtgg

SEQ ID NO: 5343618 - DNA, 25 bp, Homo sapien
cctgatggtaccagaggagacaaaa

SEQ ID NO: 5343619 - DNA, 25 bp, Homo sapien
ctataatgaccacggaaagggcaga

SEQ ID NO: 5343620 - DNA, 25 bp, Homo sapien
cctatggtggcttctgatgctagac

SEQ ID NO: 5343621 - DNA, 25 bp, Homo sapien
acatgcgggcagagtgtcagatgat

SEQ ID NO: 5343622 - DNA, 25 bp, Homo sapien
cagaccaagaatctgtctaaaaaga

SEQ ID NO: 5343623 - DNA, 25 bp, Homo sapien
acttatctatgttggacatgcgggc

SEQ ID NO: 5343624 - DNA, 25 bp, Homo sapien
gagaaccagttgctcctgggaggct

SEQ ID NO: 5343625 - DNA, 25 bp, Homo sapien
gatcaccctcgccaatttcaccagt

SEQ ID NO: 5343626 - DNA, 25 bp, Homo sapien
tctctcaggcccctaagatcaccct

SEQ ID NO: 5343627 - DNA, 25 bp, Homo sapien
gccatctctcaggcccctaagatca

SEQ ID NO: 5343628 - DNA, 25 bp, Homo sapien
ggcccctaagatcaccctcgccaat

SEQ ID NO: 5343629 - DNA, 25 bp, Homo sapien
aatgctgatcataacccagaatatc

SEQ ID NO: 5343630 - DNA, 25 bp, Homo sapien
tcgcctagacgaagaaatgctgatc

SEQ ID NO: 5343631 - DNA, 25 bp, Homo sapien
ttttctcgcctagacgaagaaatgc

SEQ ID NO: 5343632 - DNA, 25 bp, Homo sapien
gcatccatataacaggcacatgggt

SEQ ID NO: 5343633 - DNA, 25 bp, Homo sapien
atcaaaaggtcgccaaaacctgtct

SEQ ID NO: 5343634 - DNA, 25 bp, Homo sapien
aggtcgccaaaacctgtcttctccg

SEQ ID NO: 5343635 - DNA, 25 bp, Homo sapien
gccaaaacctgtcttctccgcaagg

SEQ ID NO: 5343636 - DNA, 25 bp, Homo sapien
aaacctgtcttctccgcaaggctgg

SEQ ID NO: 5343637 - DNA, 25 bp, Homo sapien
cagccggcccgggaagagacaagtc

SEQ ID NO: 5343638 - DNA, 25 bp, Homo sapien
ccgggctcgcctgagggtgtcgtgc

SEQ ID NO: 5343639 - DNA, 25 bp, Homo sapien
ctaccgcgtacacacctgcgtggga

SEQ ID NO: 5343640 - DNA, 25 bp, Homo sapien
gttcgaggcggaaacgccgcgccca

SEQ ID NO: 5343641 - DNA, 25 bp, Homo sapien
gcgcagcccgccgccttcgtccgca

SEQ ID NO: 5343642 - DNA, 25 bp, Homo sapien
cgcagcccgccgccttcgtccgcat

SEQ ID NO: 5343643 - DNA, 25 bp, Homo sapien
ctaatgagggggcgccggccggccg

SEQ ID NO: 5343644 - DNA, 25 bp, Homo sapien
gcgccggccggccgccagcccggta

SEQ ID NO: 5343645 - DNA, 25 bp, Homo sapien
gagggggcgccggccggccgccagc

SEQ ID NO: 5343646 - DNA, 25 bp, Homo sapien
atgagggggcgccggccggccgcca

SEQ ID NO: 5343647 - DNA, 25 bp, Homo sapien
cgcccattcagctgggggccgccgc

SEQ ID NO: 5343648 - DNA, 25 bp, Homo sapien
cgcgcccattcagctgggggccgcc

SEQ ID NO: 5343649 - DNA, 25 bp, Homo sapien
tgggggccgccgctcccccgctcag

SEQ ID NO: 5343650 - DNA, 25 bp, Homo sapien
ctcgcgcccattcagctgggggccg

SEQ ID NO: 5343651 - DNA, 25 bp, Homo sapien
taggttgacccacttgggcagcaag

SEQ ID NO: 5343652 - DNA, 25 bp, Homo sapien
attaggttgacccacttgggcagca

SEQ ID NO: 5343653 - DNA, 25 bp, Homo sapien
acaagcaggcctgcaaacttccttt

SEQ ID NO: 5343654 - DNA, 25 bp, Homo sapien
cacagagacatcctcagctattatt

SEQ ID NO: 5343655 - DNA, 25 bp, Homo sapien
tgagacgttgtctcttccgcaggcc

SEQ ID NO: 5343656 - DNA, 25 bp, Homo sapien
ttttatgttggacttctgtctggtc

SEQ ID NO: 5343657 - DNA, 25 bp, Homo sapien
gctgtagccaacagaacacaggctc

SEQ ID NO: 5343658 - DNA, 25 bp, Homo sapien
gaagcacaaaggaagttggtctctt

SEQ ID NO: 5343659 - DNA, 25 bp, Homo sapien
tctcacagtttaagtcaggtacagt

SEQ ID NO: 5343660 - DNA, 25 bp, Homo sapien
caaggagataggagaacagtttcaa

SEQ ID NO: 5343661 - DNA, 25 bp, Homo sapien
caggtacagtatagctggattctcc

SEQ ID NO: 5343662 - DNA, 25 bp, Homo sapien
tttagtctgttgctacagccaagga

SEQ ID NO: 5343663 - DNA, 25 bp, Homo sapien
tttatctttccatcctgttgcttag

SEQ ID NO: 5343664 - DNA, 25 bp, Homo sapien
ctttccatcctgttgcttaggagag

SEQ ID NO: 5343665 - DNA, 25 bp, Homo sapien
ttccatcctgttgcttaggagaggc

SEQ ID NO: 5343666 - DNA, 25 bp, Homo sapien
tatctttccatcctgttgcttagga

SEQ ID NO: 5343667 - DNA, 25 bp, Homo sapien
gaaagtcccaccacaaggaccttga

SEQ ID NO: 5343668 - DNA, 25 bp, Homo sapien
tggcagtaccgcaaacccagttgtg

SEQ ID NO: 5343669 - DNA, 25 bp, Homo sapien
tgcagaagccagagaactgcgccca

SEQ ID NO: 5343670 - DNA, 25 bp, Homo sapien
cagctgctgccgtgttctggtgtac

SEQ ID NO: 5343671 - DNA, 25 bp, Homo sapien
ttttgcctgaaatcctggtaatatt

SEQ ID NO: 5343672 - DNA, 25 bp, Homo sapien
gaaatcctggtaatattcaacactt

SEQ ID NO: 5343673 - DNA, 25 bp, Homo sapien
cctgaaatcctggtaatattcaaca

SEQ ID NO: 5343674 - DNA, 25 bp, Homo sapien
tgcctgaaatcctggtaatattcaa

SEQ ID NO: 5343675 - DNA, 25 bp, Homo sapien
cacggctgtgacactccgtaaaatc

SEQ ID NO: 5343676 - DNA, 25 bp, Homo sapien
gggcacagaccacggctgtgacact

SEQ ID NO: 5343677 - DNA, 25 bp, Homo sapien
ctcagggcacagaccacggctgtga

SEQ ID NO: 5343678 - DNA, 25 bp, Homo sapien
cagaccacggctgtgacactccgta

SEQ ID NO: 5343679 - DNA, 25 bp, Homo sapien
tgcagaagagcatgagggaaagttt

SEQ ID NO: 5343680 - DNA, 25 bp, Homo sapien
gaaatatgttatgtcatggctctgg

SEQ ID NO: 5343681 - DNA, 25 bp, Homo sapien
agagagcagatcagcggtttccagg

SEQ ID NO: 5343682 - DNA, 25 bp, Homo sapien
ctagagaaggcgaaattacagtgac

SEQ ID NO: 5343683 - DNA, 25 bp, Homo sapien
ctttgttgatgatctatagaggccc

SEQ ID NO: 5343684 - DNA, 25 bp, Homo sapien
tgttgatgatctatagaggcccctc

SEQ ID NO: 5343685 - DNA, 25 bp, Homo sapien
ctatagaggcccctcctctttaagc

SEQ ID NO: 5343686 - DNA, 25 bp, Homo sapien
tgatgatctatagaggcccctcctc

SEQ ID NO: 5343687 - DNA, 25 bp, Homo sapien
tattccaagggaccagtaagaggac

SEQ ID NO: 5343688 - DNA, 25 bp, Homo sapien
tgagcgcactgacctgagattctga

SEQ ID NO: 5343689 - DNA, 25 bp, Homo sapien
tgaccgagctctgttgggaggacct

SEQ ID NO: 5343690 - DNA, 25 bp, Homo sapien
tatgtgtgttcgagcacctggcacc

SEQ ID NO: 5343691 - DNA, 25 bp, Homo sapien
acagaagatccttgtgtacctctca

SEQ ID NO: 5343692 - DNA, 25 bp, Homo sapien
tcttgaaggtacctgctgaccccag

SEQ ID NO: 5343693 - DNA, 25 bp, Homo sapien
cacggtcgcaccctagaactgtcat

SEQ ID NO: 5343694 - DNA, 25 bp, Homo sapien
catctcgatccttgaggactttgag

SEQ ID NO: 5343695 - DNA, 25 bp, Homo sapien
tggatttgccttggtgaacctcacc

SEQ ID NO: 5343696 - DNA, 25 bp, Homo sapien
tgctcacctgtagacaaaactgttt

SEQ ID NO: 5343697 - DNA, 25 bp, Homo sapien
tccttagccaatgtagattcacagt

SEQ ID NO: 5343698 - DNA, 25 bp, Homo sapien
gattcacagttgatcatgacagaac

SEQ ID NO: 5343699 - DNA, 25 bp, Homo sapien
tcaaataagggcaactccagatgct

SEQ ID NO: 5343700 - DNA, 25 bp, Homo sapien
ttctaactctcaaataagggcaact

SEQ ID NO: 5343701 - DNA, 25 bp, Homo sapien
agggcaactccagatgctcagacaa

SEQ ID NO: 5343702 - DNA, 25 bp, Homo sapien
aactctcaaataagggcaactccag

SEQ ID NO: 5343703 - DNA, 25 bp, Homo sapien
ccactctgaggtgggaggccgacag

SEQ ID NO: 5343704 - DNA, 25 bp, Homo sapien
tccactctgaggtgggaggccgaca

SEQ ID NO: 5343705 - DNA, 25 bp, Homo sapien
ggtgggaggccgacagggtgtgggc

SEQ ID NO: 5343706 - DNA, 25 bp, Homo sapien
ctgaggtgggaggccgacagggtgt

SEQ ID NO: 5343707 - DNA, 25 bp, Homo sapien
aaactggggcgctgacaggagctgc

SEQ ID NO: 5343708 - DNA, 25 bp, Homo sapien
acgcccagcccgcttgcgggtcaaa

SEQ ID NO: 5343709 - DNA, 25 bp, Homo sapien
cagcccgcttgcgggtcaaactggg

SEQ ID NO: 5343710 - DNA, 25 bp, Homo sapien
gggcctctggggctatttccacaaa

SEQ ID NO: 5343711 - DNA, 25 bp, Homo sapien
tattgacttgtgctttgatttgggc

SEQ ID NO: 5343712 - DNA, 25 bp, Homo sapien
tgacttgtgctttgatttgggccat

SEQ ID NO: 5343713 - DNA, 25 bp, Homo sapien
caaactcttcaatattgacttgtgc

SEQ ID NO: 5343714 - DNA, 25 bp, Homo sapien
ctcaaactcttcaatattgacttgt

SEQ ID NO: 5343715 - DNA, 25 bp, Homo sapien
agaggcatttggtgccctcacatct

SEQ ID NO: 5343716 - DNA, 25 bp, Homo sapien
gcctggagaggcatttggtgccctc

SEQ ID NO: 5343717 - DNA, 25 bp, Homo sapien
aggcatttggtgccctcacatctac

SEQ ID NO: 5343718 - DNA, 25 bp, Homo sapien
gggcctggagaggcatttggtgccc

SEQ ID NO: 5343719 - DNA, 25 bp, Homo sapien
gaaggcagcagatcgtgtgagctca

SEQ ID NO: 5343720 - DNA, 25 bp, Homo sapien
aaggttttacacaatgcagggactg

SEQ ID NO: 5343721 - DNA, 25 bp, Homo sapien
gactgtgctgaattctttacctggc

SEQ ID NO: 5343722 - DNA, 25 bp, Homo sapien
caaaggatacaaataggcagttctc

SEQ ID NO: 5343723 - DNA, 25 bp, Homo sapien
tttgattggctgaacgcacgtggaa

SEQ ID NO: 5343724 - DNA, 25 bp, Homo sapien
ttgtcacatgggaggctacaggccc

SEQ ID NO: 5343725 - DNA, 25 bp, Homo sapien
gcttggctcccgtgaaaacactgca

SEQ ID NO: 5343726 - DNA, 25 bp, Homo sapien
tctgagtaaggaagaccccagcttg

SEQ ID NO: 5343727 - DNA, 25 bp, Homo sapien
tactgcacgtgcactcacttgaggg

SEQ ID NO: 5343728 - DNA, 25 bp, Homo sapien
tgcagaaacctagggccagtgactc

SEQ ID NO: 5343729 - DNA, 25 bp, Homo sapien
caacttgcgcgaagatagtcactgg

SEQ ID NO: 5343730 - DNA, 25 bp, Homo sapien
tttaagtggaaacctctcatggagc

SEQ ID NO: 5343731 - DNA, 25 bp, Homo sapien
taaactacacaacctcaagggcagg

SEQ ID NO: 5343732 - DNA, 25 bp, Homo sapien
ggtgcagaacacttaagggtcccaa

SEQ ID NO: 5343733 - DNA, 25 bp, Homo sapien
tctgaaagaactcatagctctggcc

SEQ ID NO: 5343734 - DNA, 25 bp, Homo sapien
tacacatgaggaggtatcagcagcc

SEQ ID NO: 5343735 - DNA, 25 bp, Homo sapien
gagtccctgctcatcaggatgtgca

SEQ ID NO: 5343736 - DNA, 25 bp, Homo sapien
tctcagaggcttccgagcatagaga

SEQ ID NO: 5343737 - DNA, 25 bp, Homo sapien
agaaccaccaaagtgagcgtgtaat

SEQ ID NO: 5343738 - DNA, 25 bp, Homo sapien
gtaattccctaaggccaccacagtg

SEQ ID NO: 5343739 - DNA, 25 bp, Homo sapien
ctgcccaggaaccatgtggatgggt

SEQ ID NO: 5343740 - DNA, 25 bp, Homo sapien
agacatgctgtcttaatactcatcc

SEQ ID NO: 5343741 - DNA, 25 bp, Homo sapien
tgtcttaatactcatccatcaggaa

SEQ ID NO: 5343742 - DNA, 25 bp, Homo sapien
tgctgtcttaatactcatccatcag

SEQ ID NO: 5343743 - DNA, 25 bp, Homo sapien
ggtcacagccctgccaatatgcagg

SEQ ID NO: 5343744 - DNA, 25 bp, Homo sapien
gggtctgatctaagtgcgatggtca

SEQ ID NO: 5343745 - DNA, 25 bp, Homo sapien
cccaacacaggtcgggggtctgatc

SEQ ID NO: 5343746 - DNA, 25 bp, Homo sapien
gggcttgctccttcgcctctgcgcc

SEQ ID NO: 5343747 - DNA, 25 bp, Homo sapien
gaatgaatgtcttaccctgcaggct

SEQ ID NO: 5343748 - DNA, 25 bp, Homo sapien
agagggacccaagacctgactgtgc

SEQ ID NO: 5343749 - DNA, 25 bp, Homo sapien
taaggcctcagacaagaaagcacag

SEQ ID NO: 5343750 - DNA, 25 bp, Homo sapien
ggctttccccagtgtaggcctagga

SEQ ID NO: 5343751 - DNA, 25 bp, Homo sapien
tactgtcacttggaactgccctgga

SEQ ID NO: 5343752 - DNA, 25 bp, Homo sapien
ggtggaggactatgctacgctgtac

SEQ ID NO: 5343753 - DNA, 25 bp, Homo sapien
tgtggtctagaaggacacctcgcca

SEQ ID NO: 5343754 - DNA, 25 bp, Homo sapien
tgatgttaattacccgccctgagct

SEQ ID NO: 5343755 - DNA, 25 bp, Homo sapien
cttcccgaccacaaggcaggcagaa

SEQ ID NO: 5343756 - DNA, 25 bp, Homo sapien
ggagacctcagctcatcgtgggatc

SEQ ID NO: 5343757 - DNA, 25 bp, Homo sapien
cttgagctcgaacaggcctgtcccg

SEQ ID NO: 5343758 - DNA, 25 bp, Homo sapien
tctcagaggctgcttgagctcgaac

SEQ ID NO: 5343759 - DNA, 25 bp, Homo sapien
cgattcagtggcttgtaaacaccct

SEQ ID NO: 5343760 - DNA, 25 bp, Homo sapien
cctcgaagcacatataatcagcaac

SEQ ID NO: 5343761 - DNA, 25 bp, Homo sapien
agatggcgagggtcgaccgcgatgc

SEQ ID NO: 5343762 - DNA, 25 bp, Homo sapien
gaccggatcccaaagcgattcagtg

SEQ ID NO: 5343763 - DNA, 25 bp, Homo sapien
cgttggagtagaggcggcgcagatc

SEQ ID NO: 5343764 - DNA, 25 bp, Homo sapien
cggcctcaatgccatacgtgttggc

SEQ ID NO: 5343765 - DNA, 25 bp, Homo sapien
catacgtgttggctatggcgtggat

SEQ ID NO: 5343766 - DNA, 25 bp, Homo sapien
tccttctcgatcacccgcagcgcgg

SEQ ID NO: 5343767 - DNA, 25 bp, Homo sapien
gatttatttagagggcctggccttc

SEQ ID NO: 5343768 - DNA, 25 bp, Homo sapien
gactctgggttggataagttcagca

SEQ ID NO: 5343769 - DNA, 25 bp, Homo sapien
aatgaggctaacgtgccccagaatc

SEQ ID NO: 5343770 - DNA, 25 bp, Homo sapien
cagacgaggacacgcacacttggtt

SEQ ID NO: 5343771 - DNA, 25 bp, Homo sapien
gtaaatcgcgtagagcgagcctccc

SEQ ID NO: 5343772 - DNA, 25 bp, Homo sapien
tagatgacggcaccatgggccaaag

SEQ ID NO: 5343773 - DNA, 25 bp, Homo sapien
tctgcatacttgaatagctctggga

SEQ ID NO: 5343774 - DNA, 25 bp, Homo sapien
gggccaaagatactaccagggagct

SEQ ID NO: 5343775 - DNA, 25 bp, Homo sapien
cattcaggaggcaccgagtgatgcc

SEQ ID NO: 5343776 - DNA, 25 bp, Homo sapien
tctcctcggtgtcgtactggtagtc

SEQ ID NO: 5343777 - DNA, 25 bp, Homo sapien
aacgggtggatctcacgcacagcct

SEQ ID NO: 5343778 - DNA, 25 bp, Homo sapien
tactggtagtcatctatgaacgggt

SEQ ID NO: 5343779 - DNA, 25 bp, Homo sapien
gtcatctatgaacgggtggatctca

SEQ ID NO: 5343780 - DNA, 25 bp, Homo sapien
aagggacgggtcctcctcagtgcct

SEQ ID NO: 5343781 - DNA, 25 bp, Homo sapien
tcttcatcgtcgttctcctcgccct

SEQ ID NO: 5343782 - DNA, 25 bp, Homo sapien
ctgtggggatttcgttcctcctgca

SEQ ID NO: 5343783 - DNA, 25 bp, Homo sapien
tgtcttcatcgtcgttctcctcgcc

SEQ ID NO: 5343784 - DNA, 25 bp, Homo sapien
gatttcgttcctcctgcatgtcttc

SEQ ID NO: 5343785 - DNA, 25 bp, Homo sapien
aagttccctcggccattatgacagc

SEQ ID NO: 5343786 - DNA, 25 bp, Homo sapien
tttggcatcagaggcatcggcgtcc

SEQ ID NO: 5343787 - DNA, 25 bp, Homo sapien
tctccttgcgtttggcatcagaggc

SEQ ID NO: 5343788 - DNA, 25 bp, Homo sapien
tgcgtttggcatcagaggcatcggc

SEQ ID NO: 5343789 - DNA, 25 bp, Homo sapien
cctgcttctccttgcgtttggcatc

SEQ ID NO: 5343790 - DNA, 25 bp, Homo sapien
gatcccgctgtgtagctcttcgagt

SEQ ID NO: 5343791 - DNA, 25 bp, Homo sapien
gagtgtttacgttcctgaaagctga

SEQ ID NO: 5343792 - DNA, 25 bp, Homo sapien
ccagcgttgtccagatcccgctgtg

SEQ ID NO: 5343793 - DNA, 25 bp, Homo sapien
aaagctgatgctttattattcttct

SEQ ID NO: 5343794 - DNA, 25 bp, Homo sapien
tcttccatacagaaggactcctgga

SEQ ID NO: 5343795 - DNA, 25 bp, Homo sapien
accgcagctggtacacctggaattt

SEQ ID NO: 5343796 - DNA, 25 bp, Homo sapien
gcaggaactgaaaccgcagctggta

SEQ ID NO: 5343797 - DNA, 25 bp, Homo sapien
gcaggatgtcctcgggtctcaggca

SEQ ID NO: 5343798 - DNA, 25 bp, Homo sapien
gtgtcttgatgttggcgctggccac

SEQ ID NO: 5343799 - DNA, 25 bp, Homo sapien
tcatgggtgtcttgatgttggcgct

SEQ ID NO: 5343800 - DNA, 25 bp, Homo sapien
agcacgggcacgctcatcatgggtg

SEQ ID NO: 5343801 - DNA, 25 bp, Homo sapien
cctggtgagttgcttcttcaggctt

SEQ ID NO: 5343802 - DNA, 25 bp, Homo sapien
gtgacgttcatctcgcctctgcctg

SEQ ID NO: 5343803 - DNA, 25 bp, Homo sapien
caaagtggaaggtgttgagggtcat

SEQ ID NO: 5343804 - DNA, 25 bp, Homo sapien
gcaaagtggaaggtgttgagggtca

SEQ ID NO: 5343805 - DNA, 25 bp, Homo sapien
ttggaatgcccagggtgacgttcat

SEQ ID NO: 5343806 - DNA, 25 bp, Homo sapien
ggctctccgatgctctgggcagcca

SEQ ID NO: 5343807 - DNA, 25 bp, Homo sapien
ctgggtggagggctctccgatgctc

SEQ ID NO: 5343808 - DNA, 25 bp, Homo sapien
acagtgagcgctgccacttcagctg

SEQ ID NO: 5343809 - DNA, 25 bp, Homo sapien
gcctcgcccggctcacacagtgagc

SEQ ID NO: 5343810 - DNA, 25 bp, Homo sapien
acaagcggccgccttcttctggtat

SEQ ID NO: 5343811 - DNA, 25 bp, Homo sapien
tgagctgcccactcttgactgtagt

SEQ ID NO: 5343812 - DNA, 25 bp, Homo sapien
gatgcaaagtagatgtcaggacgcc

SEQ ID NO: 5343813 - DNA, 25 bp, Homo sapien
taactcttctctgtttgagctgccc

SEQ ID NO: 5343814 - DNA, 25 bp, Homo sapien
gcggttttcactctcaagtttcagg

SEQ ID NO: 5343815 - DNA, 25 bp, Homo sapien
ggctgcggccattgcggttttcact

SEQ ID NO: 5343816 - DNA, 25 bp, Homo sapien
tctgggaataactcaagaaggcgcc

SEQ ID NO: 5343817 - DNA, 25 bp, Homo sapien
tttttgatagctctgaagtggtgga

SEQ ID NO: 5343818 - DNA, 25 bp, Homo sapien
gtgagatcatactgcacgaccagcc

SEQ ID NO: 5343819 - DNA, 25 bp, Homo sapien
ccgtcactgtcacggaccgtgagat

SEQ ID NO: 5343820 - DNA, 25 bp, Homo sapien
cctccccatacaggaactgcaccac

SEQ ID NO: 5343821 - DNA, 25 bp, Homo sapien
cagcccctctaggtgcttgatgatg

SEQ ID NO: 5343822 - DNA, 25 bp, Homo sapien
tctcgtcctgccatgcagtggaaga

SEQ ID NO: 5343823 - DNA, 25 bp, Homo sapien
gcggctggttttcacagcagtgtcc

SEQ ID NO: 5343824 - DNA, 25 bp, Homo sapien
gccctctcgtcctgccatgcagtgg

SEQ ID NO: 5343825 - DNA, 25 bp, Homo sapien
ttggagatagcctgagcggctggtt

SEQ ID NO: 5343826 - DNA, 25 bp, Homo sapien
caattaagcctagaaatgagggaaa

SEQ ID NO: 5343827 - DNA, 25 bp, Homo sapien
tgccagacgccatcagcgggggtct

SEQ ID NO: 5343828 - DNA, 25 bp, Homo sapien
gggtctccgaccttccagttcaatc

SEQ ID NO: 5343829 - DNA, 25 bp, Homo sapien
gtttgatgccggtgaggaacctgcc

SEQ ID NO: 5343830 - DNA, 25 bp, Homo sapien
ggtgaactcataaggctcaaagcag

SEQ ID NO: 5343831 - DNA, 25 bp, Homo sapien
aactgtctgtgtaggccaaaaggca

SEQ ID NO: 5343832 - DNA, 25 bp, Homo sapien
caccatcatctgcaggctgttctct

SEQ ID NO: 5343833 - DNA, 25 bp, Homo sapien
tgcatcgtgttcacagttgaacctt

SEQ ID NO: 5343834 - DNA, 25 bp, Homo sapien
agttgaacctttggctcccgactgc

SEQ ID NO: 5343835 - DNA, 25 bp, Homo sapien
tcattgctgtaatggttcacttcct

SEQ ID NO: 5343836 - DNA, 25 bp, Homo sapien
tcatcatatgatgcggcttctggca

SEQ ID NO: 5343837 - DNA, 25 bp, Homo sapien
tgccattttcctcggacctcatcat

SEQ ID NO: 5343838 - DNA, 25 bp, Homo sapien
tgctgtaatggttcacttcctcctt

SEQ ID NO: 5343839 - DNA, 25 bp, Homo sapien
gatacgttgcctcttgacatctgcc

SEQ ID NO: 5343840 - DNA, 25 bp, Homo sapien
cccgcagtgggtggattcttcaatg

SEQ ID NO: 5343841 - DNA, 25 bp, Homo sapien
gcctttggcttcaccaaaatgtctt

SEQ ID NO: 5343842 - DNA, 25 bp, Homo sapien
cttcaatgatacgttgcctcttgac

SEQ ID NO: 5343843 - DNA, 25 bp, Homo sapien
gcctccatagatctcatagcagcag

SEQ ID NO: 5343844 - DNA, 25 bp, Homo sapien
atagcagcagtggaccaggccgtag

SEQ ID NO: 5343845 - DNA, 25 bp, Homo sapien
caaggtgaagcctctgtagagctgc

SEQ ID NO: 5343846 - DNA, 25 bp, Homo sapien
gtaggcggagctcccatagtgcgcc

SEQ ID NO: 5343847 - DNA, 25 bp, Homo sapien
gggactcgcacatcgagtcagggtt

SEQ ID NO: 5343848 - DNA, 25 bp, Homo sapien
taagttcagtgggatgtggtcctct

SEQ ID NO: 5343849 - DNA, 25 bp, Homo sapien
taaagccaggaacggatcgaggagt

SEQ ID NO: 5343850 - DNA, 25 bp, Homo sapien
tcccagtgattttcgcctttccaga

SEQ ID NO: 5343851 - DNA, 25 bp, Homo sapien
ctgtccacagcggaaagggcttcag

SEQ ID NO: 5343852 - DNA, 25 bp, Homo sapien
tagtgctcccgggtgaaaaagcaac

SEQ ID NO: 5343853 - DNA, 25 bp, Homo sapien
aaggagaaaggagcttcacgcgccc

SEQ ID NO: 5343854 - DNA, 25 bp, Homo sapien
tccgtgagtcctcggtacaccagct

SEQ ID NO: 5343855 - DNA, 25 bp, Homo sapien
tcagtcccgccaatggttggccatc

SEQ ID NO: 5343856 - DNA, 25 bp, Homo sapien
gtgatcctggatcagtcccgccaat

SEQ ID NO: 5343857 - DNA, 25 bp, Homo sapien
tcctggatcagtcccgccaatggtt

SEQ ID NO: 5343858 - DNA, 25 bp, Homo sapien
gatcagtcccgccaatggttggcca

SEQ ID NO: 5343859 - DNA, 25 bp, Homo sapien
tggacagctgtgaccacaaggggtt

SEQ ID NO: 5343860 - DNA, 25 bp, Homo sapien
cccttgaggagtgaacttggagaaa

SEQ ID NO: 5343861 - DNA, 25 bp, Homo sapien
acagaagatgccttcacgggctgct

SEQ ID NO: 5343862 - DNA, 25 bp, Homo sapien
gctgtgaccacaaggggttgccctt

SEQ ID NO: 5343863 - DNA, 25 bp, Homo sapien
tgctgatcagtgcaggccaggacgt

SEQ ID NO: 5343864 - DNA, 25 bp, Homo sapien
cttgggaacaaggtactgctgatca

SEQ ID NO: 5343865 - DNA, 25 bp, Homo sapien
tcatctcgtctccatcaaagtcggc

SEQ ID NO: 5343866 - DNA, 25 bp, Homo sapien
caaagtcggcattataggccttgca

SEQ ID NO: 5343867 - DNA, 25 bp, Homo sapien
tctgactgcgtcatacaagctgagg

SEQ ID NO: 5343868 - DNA, 25 bp, Homo sapien
tgagacatcctccagcgtaagcaaa

SEQ ID NO: 5343869 - DNA, 25 bp, Homo sapien
tccaaggagacctaaactctgaggg

SEQ ID NO: 5343870 - DNA, 25 bp, Homo sapien
tcaagggagaaactgcctagacctg

SEQ ID NO: 5343871 - DNA, 25 bp, Homo sapien
tctacgaacctgaatacaaacctta

SEQ ID NO: 5343872 - DNA, 25 bp, Homo sapien
tagcgaaacaccaggcacttaggaa

SEQ ID NO: 5343873 - DNA, 25 bp, Homo sapien
tgcattgctcacacagtgcctagcg

SEQ ID NO: 5343874 - DNA, 25 bp, Homo sapien
gaaaggcagaccgattctacgaacc

SEQ ID NO: 5343875 - DNA, 25 bp, Homo sapien
atccgaacaggagccggatgggtcc

SEQ ID NO: 5343876 - DNA, 25 bp, Homo sapien
ggtccctgaccaaagctgcccttac

SEQ ID NO: 5343877 - DNA, 25 bp, Homo sapien
cagaatccgaacaggagccggatgg

SEQ ID NO: 5343878 - DNA, 25 bp, Homo sapien
aacaggagccggatgggtccctgac

SEQ ID NO: 5343879 - DNA, 25 bp, Homo sapien
gaccgcttgcctaagttcctgaaca

SEQ ID NO: 5343880 - DNA, 25 bp, Homo sapien
cacattagggccgttgatgaccgct

SEQ ID NO: 5343881 - DNA, 25 bp, Homo sapien
gccgtcctcattgatgaccatggag

SEQ ID NO: 5343882 - DNA, 25 bp, Homo sapien
ggcctctcgctgggtcatgtccaca

SEQ ID NO: 5343883 - DNA, 25 bp, Homo sapien
ccctgagacttgcagcagtctgcag

SEQ ID NO: 5343884 - DNA, 25 bp, Homo sapien
gagaagtgacttcggggtctctcct

SEQ ID NO: 5343885 - DNA, 25 bp, Homo sapien
tggccctgagacttgcagcagtctg

SEQ ID NO: 5343886 - DNA, 25 bp, Homo sapien
tgagacttgcagcagtctgcaggtg

SEQ ID NO: 5343887 - DNA, 25 bp, Homo sapien
aattccaatttcgttggtgttgatg

SEQ ID NO: 5343888 - DNA, 25 bp, Homo sapien
gaattccaatttcgttggtgttgat

SEQ ID NO: 5343889 - DNA, 25 bp, Homo sapien
ggaattccaatttcgttggtgttga

SEQ ID NO: 5343890 - DNA, 25 bp, Homo sapien
tcccatcatgtgttttcggaacagg

SEQ ID NO: 5343891 - DNA, 25 bp, Homo sapien
gtagtccactcgctttcccatcatg

SEQ ID NO: 5343892 - DNA, 25 bp, Homo sapien
tgtctgggcagatgactgagcgcgc

SEQ ID NO: 5343893 - DNA, 25 bp, Homo sapien
catgtgttttcggaacaggccttct

SEQ ID NO: 5343894 - DNA, 25 bp, Homo sapien
gactggcctggaagtgtactcaaaa

SEQ ID NO: 5343895 - DNA, 25 bp, Homo sapien
aaagtttgtctatgagggactggcc

SEQ ID NO: 5343896 - DNA, 25 bp, Homo sapien
tactcaaaaaggatcggtcaatagc

SEQ ID NO: 5343897 - DNA, 25 bp, Homo sapien
gctctgaaggcgaatccaaatgttg

SEQ ID NO: 5343898 - DNA, 25 bp, Homo sapien
caatgccagaagttttcgaatcaga

SEQ ID NO: 5343899 - DNA, 25 bp, Homo sapien
tcaccgtctggccattagtaaacat

SEQ ID NO: 5343900 - DNA, 25 bp, Homo sapien
tcatgacagcctgcaagttcaccgt

SEQ ID NO: 5343901 - DNA, 25 bp, Homo sapien
tcctaggcgactgactgggcgatac

SEQ ID NO: 5343902 - DNA, 25 bp, Homo sapien
tcatcatccattcccgaaaaaaggt

SEQ ID NO: 5343903 - DNA, 25 bp, Homo sapien
cttgagggcggcaccaccaagaaat

SEQ ID NO: 5343904 - DNA, 25 bp, Homo sapien
ccatcatcatccattcccgaaaaaa

SEQ ID NO: 5343905 - DNA, 25 bp, Homo sapien
cacactgggattgaatctggattcc

SEQ ID NO: 5343906 - DNA, 25 bp, Homo sapien
taaggcagggttaatgagtccagga

SEQ ID NO: 5343907 - DNA, 25 bp, Homo sapien
taagtgaggcccacctgcagttgtc

SEQ ID NO: 5343908 - DNA, 25 bp, Homo sapien
cacagaggttatagtcagcgttcca

SEQ ID NO: 5343909 - DNA, 25 bp, Homo sapien
gttccacaacatactctcacaaggg

SEQ ID NO: 5343910 - DNA, 25 bp, Homo sapien
ggcagaaaggtgttcgcgggcactg

SEQ ID NO: 5343911 - DNA, 25 bp, Homo sapien
gcgggcactggtgggtgttaagtat

SEQ ID NO: 5343912 - DNA, 25 bp, Homo sapien
cctcgttttcctatctgagcttcct

SEQ ID NO: 5343913 - DNA, 25 bp, Homo sapien
cgttttcctatctgagcttcctcaa

SEQ ID NO: 5343914 - DNA, 25 bp, Homo sapien
ttctgcaatgggatttatcaattct

SEQ ID NO: 5343915 - DNA, 25 bp, Homo sapien
ataaatcagaaacaggtactctttc

SEQ ID NO: 5343916 - DNA, 25 bp, Homo sapien
aattctttatccccaagcctgcaac

SEQ ID NO: 5343917 - DNA, 25 bp, Homo sapien
tacatagcacatattacacagcagg

SEQ ID NO: 5343918 - DNA, 25 bp, Homo sapien
gcccagccaggttatgcattttcta

SEQ ID NO: 5343919 - DNA, 25 bp, Homo sapien
ccctggaacactgatgacataataa

SEQ ID NO: 5343920 - DNA, 25 bp, Homo sapien
gcaggtaccgctctcagtgcttctc

SEQ ID NO: 5343921 - DNA, 25 bp, Homo sapien
tggaaacgtgatagtcaacttgctg

SEQ ID NO: 5343922 - DNA, 25 bp, Homo sapien
caacttgctgttgtgttcctttcgg

SEQ ID NO: 5343923 - DNA, 25 bp, Homo sapien
tgttcctttcggacaacggatcgcc

SEQ ID NO: 5343924 - DNA, 25 bp, Homo sapien
gtgcaccatggctggaaacgtgata

SEQ ID NO: 5343925 - DNA, 25 bp, Homo sapien
gggacagcgcttagcattcatatgt

SEQ ID NO: 5343926 - DNA, 25 bp, Homo sapien
gcttagcattcatatgtgccttcca

SEQ ID NO: 5343927 - DNA, 25 bp, Homo sapien
tcttgctctcacacacgttctttac

SEQ ID NO: 5343928 - DNA, 25 bp, Homo sapien
acagcgcttagcattcatatgtgcc

SEQ ID NO: 5343929 - DNA, 25 bp, Homo sapien
attcctcccgaatttcagaggcaga

SEQ ID NO: 5343930 - DNA, 25 bp, Homo sapien
aggcagagggatcgggattttcttc

SEQ ID NO: 5343931 - DNA, 25 bp, Homo sapien
caatttcagttgtgtattgttctaa

SEQ ID NO: 5343932 - DNA, 25 bp, Homo sapien
cagagggatcgggattttcttccag

SEQ ID NO: 5343933 - DNA, 25 bp, Homo sapien
ggacaacatacaagcatctcttgtt

SEQ ID NO: 5343934 - DNA, 25 bp, Homo sapien
taagatataaagatcaaacgttctg

SEQ ID NO: 5343935 - DNA, 25 bp, Homo sapien
tatcggcatggtaactaggacaaca

SEQ ID NO: 5343936 - DNA, 25 bp, Homo sapien
tgttttcacactcagctattggtat

SEQ ID NO: 5343937 - DNA, 25 bp, Homo sapien
gaattctctcaagctcgtagactgc

SEQ ID NO: 5343938 - DNA, 25 bp, Homo sapien
agactgcttgtagggccccgacttc

SEQ ID NO: 5343939 - DNA, 25 bp, Homo sapien
agtcagcatgtggcagtttaaacaa

SEQ ID NO: 5343940 - DNA, 25 bp, Homo sapien
cagagtaagaggtgaatcacggccc

SEQ ID NO: 5343941 - DNA, 25 bp, Homo sapien
ccggagacccacacaactaaggcag

SEQ ID NO: 5343942 - DNA, 25 bp, Homo sapien
ggagacccacacaactaaggcagca

SEQ ID NO: 5343943 - DNA, 25 bp, Homo sapien
agcccggagacccacacaactaagg

SEQ ID NO: 5343944 - DNA, 25 bp, Homo sapien
agcagcccggagacccacacaacta

SEQ ID NO: 5343945 - DNA, 25 bp, Homo sapien
ggagcacacctctttggaatctgca

SEQ ID NO: 5343946 - DNA, 25 bp, Homo sapien
tgcagggcccaaagctaaatcgtac

SEQ ID NO: 5343947 - DNA, 25 bp, Homo sapien
gctgtccaggtatcgagggttcgta

SEQ ID NO: 5343948 - DNA, 25 bp, Homo sapien
tcgaagaggagagggttatacactg

SEQ ID NO: 5343949 - DNA, 25 bp, Homo sapien
cgccgccagggcatgttcttggaga

SEQ ID NO: 5343950 - DNA, 25 bp, Homo sapien
atcccgaaggaaatgccctgcagcc

SEQ ID NO: 5343951 - DNA, 25 bp, Homo sapien
tcagccgaatacatcccgaaggaaa

SEQ ID NO: 5343952 - DNA, 25 bp, Homo sapien
ttgagctcttcagccgaatacatcc

SEQ ID NO: 5343953 - DNA, 25 bp, Homo sapien
tcaagcccggagtcaccacgcgatt

SEQ ID NO: 5343954 - DNA, 25 bp, Homo sapien
ttgaattccgacaccccaagagacg

SEQ ID NO: 5343955 - DNA, 25 bp, Homo sapien
tcaccacctgactattcttaattca

SEQ ID NO: 5343956 - DNA, 25 bp, Homo sapien
tccaggtccgttttgaattccgaca

SEQ ID NO: 5343957 - DNA, 25 bp, Homo sapien
gattaataatctgggtcctggagcc

SEQ ID NO: 5343958 - DNA, 25 bp, Homo sapien
ggctgtagtataccaacttggagaa

SEQ ID NO: 5343959 - DNA, 25 bp, Homo sapien
taattatagcaccaaacctcaaggt

SEQ ID NO: 5343960 - DNA, 25 bp, Homo sapien
tgttttaatagccaagcaactagct

SEQ ID NO: 5343961 - DNA, 25 bp, Homo sapien
gtgagctcgggactttgagatcagt

SEQ ID NO: 5343962 - DNA, 25 bp, Homo sapien
taaaaatggaactactaggctggac

SEQ ID NO: 5343963 - DNA, 25 bp, Homo sapien
gtggatcctgtgagctcgggacttt

SEQ ID NO: 5343964 - DNA, 25 bp, Homo sapien
aatggaactactaggctggacatag

SEQ ID NO: 5343965 - DNA, 25 bp, Homo sapien
ccttgatccacttcttaagcatggg

SEQ ID NO: 5343966 - DNA, 25 bp, Homo sapien
cacttcttaagcatgggtatctttc

SEQ ID NO: 5343967 - DNA, 25 bp, Homo sapien
taagcatgggtatctttcttagatt

SEQ ID NO: 5343968 - DNA, 25 bp, Homo sapien
cgtgtccggccttgatccacttctt

SEQ ID NO: 5343969 - DNA, 25 bp, Homo sapien
ctcagtgaagaatgtgactaataag

SEQ ID NO: 5343970 - DNA, 25 bp, Homo sapien
tggactttcaaaaagtgatacagtc

SEQ ID NO: 5343971 - DNA, 25 bp, Homo sapien
gaagtgattgctttgagttagctag

SEQ ID NO: 5343972 - DNA, 25 bp, Homo sapien
cctaagtgtgtgctagtgtattgta

SEQ ID NO: 5343973 - DNA, 25 bp, Homo sapien
tttatctgtaactggagggttctcc

SEQ ID NO: 5343974 - DNA, 25 bp, Homo sapien
aatttatctgtaactggagggttct

SEQ ID NO: 5343975 - DNA, 25 bp, Homo sapien
atttatctgtaactggagggttctc

SEQ ID NO: 5343976 - DNA, 25 bp, Homo sapien
acctctggtttcaggcaacatgcca

SEQ ID NO: 5343977 - DNA, 25 bp, Homo sapien
ttgagaagtcagcacacactggcag

SEQ ID NO: 5343978 - DNA, 25 bp, Homo sapien
gatactggaacctagagatactccc

SEQ ID NO: 5343979 - DNA, 25 bp, Homo sapien
aaattgttatagcagggtgagccct

SEQ ID NO: 5343980 - DNA, 25 bp, Homo sapien
taggctgcacaactggtaaaatgac

SEQ ID NO: 5343981 - DNA, 25 bp, Homo sapien
ggataagcctgcacacctagagtgt

SEQ ID NO: 5343982 - DNA, 25 bp, Homo sapien
gcaacattgcggttttcagacacat

SEQ ID NO: 5343983 - DNA, 25 bp, Homo sapien
cctagagtgtcggtgagctgacctc

SEQ ID NO: 5343984 - DNA, 25 bp, Homo sapien
tggtaacgactacttctagcagctc

SEQ ID NO: 5343985 - DNA, 25 bp, Homo sapien
actgaccactttgcacgtacctggc

SEQ ID NO: 5343986 - DNA, 25 bp, Homo sapien
cacgagttgtccacataagcagctt

SEQ ID NO: 5343987 - DNA, 25 bp, Homo sapien
cagtaagtggaggtttgcagcattc

SEQ ID NO: 5343988 - DNA, 25 bp, Homo sapien
tagggcatatgaccgcctaagaaac

SEQ ID NO: 5343989 - DNA, 25 bp, Homo sapien
cacgtaggtgcttcttagtaaatgc

SEQ ID NO: 5343990 - DNA, 25 bp, Homo sapien
caaactcaaatctggcacgtaggtg

SEQ ID NO: 5343991 - DNA, 25 bp, Homo sapien
taagaaacagaacttcgagaagtcc

SEQ ID NO: 5343992 - DNA, 25 bp, Homo sapien
ctggcccaggaaatagcctattaaa

SEQ ID NO: 5343993 - DNA, 25 bp, Homo sapien
taagatacgctaggaaattgagtca

SEQ ID NO: 5343994 - DNA, 25 bp, Homo sapien
taaggcaatttgctaggacatggga

SEQ ID NO: 5343995 - DNA, 25 bp, Homo sapien
aattgagtcactaggagcatggatg

SEQ ID NO: 5343996 - DNA, 25 bp, Homo sapien
taaatcaaatgatctgttctgcact

SEQ ID NO: 5343997 - DNA, 25 bp, Homo sapien
tcatttgggacttggagactgcttt

SEQ ID NO: 5343998 - DNA, 25 bp, Homo sapien
gcactgagccaagcaagttactttt

SEQ ID NO: 5343999 - DNA, 25 bp, Homo sapien
cttggagactgcttttatccagaac

SEQ ID NO: 5344000 - DNA, 25 bp, Homo sapien
cagcctggaaactgtgagctagaag

SEQ ID NO: 5344001 - DNA, 25 bp, Homo sapien
tctgagcagcaggaatcaattcacc

SEQ ID NO: 5344002 - DNA, 25 bp, Homo sapien
ccaggtactagaaagaactaagctc

SEQ ID NO: 5344003 - DNA, 25 bp, Homo sapien
aggctgtggacttctggtgacgcaa

SEQ ID NO: 5344004 - DNA, 25 bp, Homo sapien
ctggccagaactgtactttttgaaa

SEQ ID NO: 5344005 - DNA, 25 bp, Homo sapien
cacctggccagaactgtactttttg

SEQ ID NO: 5344006 - DNA, 25 bp, Homo sapien
ctgcacctggccagaactgtacttt

SEQ ID NO: 5344007 - DNA, 25 bp, Homo sapien
tgcacctggccagaactgtactttt

SEQ ID NO: 5344008 - DNA, 25 bp, Homo sapien
caaagaaagcactcctggcgttcac

SEQ ID NO: 5344009 - DNA, 25 bp, Homo sapien
cgttcactgacatgatagcaaatgg

SEQ ID NO: 5344010 - DNA, 25 bp, Homo sapien
tattcagtttgctccgagggcaaaa

SEQ ID NO: 5344011 - DNA, 25 bp, Homo sapien
tcatttctagacaagtccgggactc

SEQ ID NO: 5344012 - DNA, 25 bp, Homo sapien
tgagtggttcctattcctacggcgc

SEQ ID NO: 5344013 - DNA, 25 bp, Homo sapien
tacccagcgggatagtaggtgtttc

SEQ ID NO: 5344014 - DNA, 25 bp, Homo sapien
tttgaacagcatagaaacgggctct

SEQ ID NO: 5344015 - DNA, 25 bp, Homo sapien
tacggcgctggcatatgctgtcagg

SEQ ID NO: 5344016 - DNA, 25 bp, Homo sapien
tgagacgacgaaattgtaattcttg

SEQ ID NO: 5344017 - DNA, 25 bp, Homo sapien
aacttgctcttgactgagacgacga

SEQ ID NO: 5344018 - DNA, 25 bp, Homo sapien
tcttgactgagacgacgaaattgta

SEQ ID NO: 5344019 - DNA, 25 bp, Homo sapien
cttgctcttgactgagacgacgaaa

SEQ ID NO: 5344020 - DNA, 25 bp, Homo sapien
gctgcctgtcggcgaagctgggttc

SEQ ID NO: 5344021 - DNA, 25 bp, Homo sapien
tgcctgtcggcgaagctgggttctc

SEQ ID NO: 5344022 - DNA, 25 bp, Homo sapien
cagctgcctgtcggcgaagctgggt

SEQ ID NO: 5344023 - DNA, 25 bp, Homo sapien
gggcagctgcctgtcggcgaagctg

SEQ ID NO: 5344024 - DNA, 25 bp, Homo sapien
tgtgccaggcatgtgtacacttcta

SEQ ID NO: 5344025 - DNA, 25 bp, Homo sapien
taaaccctggaaggtgattcaaaca

SEQ ID NO: 5344026 - DNA, 25 bp, Homo sapien
tatcaaccatgacaacagcagcttc

SEQ ID NO: 5344027 - DNA, 25 bp, Homo sapien
tatcctgaacgcctctaatgtgcca

SEQ ID NO: 5344028 - DNA, 25 bp, Homo sapien
gttcagcctgtatttcacttctgtg

SEQ ID NO: 5344029 - DNA, 25 bp, Homo sapien
atgtgcatgagcaatgagggagttc

SEQ ID NO: 5344030 - DNA, 25 bp, Homo sapien
cctgttcagcctgtatttcacttct

SEQ ID NO: 5344031 - DNA, 25 bp, Homo sapien
ttcagctgatcaatacgacgatgtg

SEQ ID NO: 5344032 - DNA, 25 bp, Homo sapien
taaaatttgtcctgccctgtcaacc

SEQ ID NO: 5344033 - DNA, 25 bp, Homo sapien
aatcagggaaagtctctcaggtgct

SEQ ID NO: 5344034 - DNA, 25 bp, Homo sapien
tgccaacgtggctcaagtttatcct

SEQ ID NO: 5344035 - DNA, 25 bp, Homo sapien
tgaggcacagacaaccccttgagaa

SEQ ID NO: 5344036 - DNA, 25 bp, Homo sapien
caagagtagtgttgcagctgtgtca

SEQ ID NO: 5344037 - DNA, 25 bp, Homo sapien
gattatggaattaaacactagctgg

SEQ ID NO: 5344038 - DNA, 25 bp, Homo sapien
aaagagatatgcatgcatgccagag

SEQ ID NO: 5344039 - DNA, 25 bp, Homo sapien
catgccagagggatgtggactacaa

SEQ ID NO: 5344040 - DNA, 25 bp, Homo sapien
gagatacaaccttagcctcagactg

SEQ ID NO: 5344041 - DNA, 25 bp, Homo sapien
actgagatacaaccttagcctcaga

SEQ ID NO: 5344042 - DNA, 25 bp, Homo sapien
tactgagatacaaccttagcctcag

SEQ ID NO: 5344043 - DNA, 25 bp, Homo sapien
tgagatacaaccttagcctcagact

SEQ ID NO: 5344044 - DNA, 25 bp, Homo sapien
cacagggtatgtgattaaattgaac

SEQ ID NO: 5344045 - DNA, 25 bp, Homo sapien
aatacacagggtatgtgattaaatt

SEQ ID NO: 5344046 - DNA, 25 bp, Homo sapien
cagggtatgtgattaaattgaacaa

SEQ ID NO: 5344047 - DNA, 25 bp, Homo sapien
tacacagggtatgtgattaaattga

SEQ ID NO: 5344048 - DNA, 25 bp, Homo sapien
aaacagtaacaacgaatacactttg

SEQ ID NO: 5344049 - DNA, 25 bp, Homo sapien
acagtaacaacgaatacactttgca

SEQ ID NO: 5344050 - DNA, 25 bp, Homo sapien
agtaacaacgaatacactttgcagg

SEQ ID NO: 5344051 - DNA, 25 bp, Homo sapien
cagtaacaacgaatacactttgcag

SEQ ID NO: 5344052 - DNA, 25 bp, Homo sapien
atgttgtgaagtttaccctctgcag

SEQ ID NO: 5344053 - DNA, 25 bp, Homo sapien
gactagaacgagactgttcgatccg

SEQ ID NO: 5344054 - DNA, 25 bp, Homo sapien
aacgagactgttcgatccgtaactg

SEQ ID NO: 5344055 - DNA, 25 bp, Homo sapien
gagactgttcgatccgtaactgact

SEQ ID NO: 5344056 - DNA, 25 bp, Homo sapien
ggaggaaagactagaacgagactgt

SEQ ID NO: 5344057 - DNA, 25 bp, Homo sapien
tgaaaacaccttggttagaagctag

SEQ ID NO: 5344058 - DNA, 25 bp, Homo sapien
tactagagtgaaccagagaggtagc

SEQ ID NO: 5344059 - DNA, 25 bp, Homo sapien
taattcatgagaagtacttagtgcc

SEQ ID NO: 5344060 - DNA, 25 bp, Homo sapien
taaacagcagctcttgcaaggatca

SEQ ID NO: 5344061 - DNA, 25 bp, Homo sapien
cagggagccctcacgattcagaatg

SEQ ID NO: 5344062 - DNA, 25 bp, Homo sapien
agaatgtttcataagtccgtcagac

SEQ ID NO: 5344063 - DNA, 25 bp, Homo sapien
ccatactgctgatgaggatctttag

SEQ ID NO: 5344064 - DNA, 25 bp, Homo sapien
ggcgaatacttaactgggtctcagg

SEQ ID NO: 5344065 - DNA, 25 bp, Homo sapien
tccactgtgcgccactgagcagatt

SEQ ID NO: 5344066 - DNA, 25 bp, Homo sapien
gcaccctccactgtgcgccactgag

SEQ ID NO: 5344067 - DNA, 25 bp, Homo sapien
gcgccactgagcagatttcttctcg

SEQ ID NO: 5344068 - DNA, 25 bp, Homo sapien
tttctgcgttccttcaatgcaccct

SEQ ID NO: 5344069 - DNA, 25 bp, Homo sapien
tattcctcctaaatgttactctaag

SEQ ID NO: 5344070 - DNA, 25 bp, Homo sapien
taaggataaataggaggtttacata

SEQ ID NO: 5344071 - DNA, 25 bp, Homo sapien
cctcccttgaggtgactcttacggt

SEQ ID NO: 5344072 - DNA, 25 bp, Homo sapien
tataagtcaactattgtcaaaaacc

SEQ ID NO: 5344073 - DNA, 25 bp, Homo sapien
tgacagcctggaccgcagcattctg

SEQ ID NO: 5344074 - DNA, 25 bp, Homo sapien
ttgacagcctggaccgcagcattct

SEQ ID NO: 5344075 - DNA, 25 bp, Homo sapien
gacagcctggaccgcagcattctga

SEQ ID NO: 5344076 - DNA, 25 bp, Homo sapien
gcattctgagctgcaatagcctgca

SEQ ID NO: 5344077 - DNA, 25 bp, Homo sapien
tgctgttctcctatctagtcttcca

SEQ ID NO: 5344078 - DNA, 25 bp, Homo sapien
tatctagtcttccattgcatttccc

SEQ ID NO: 5344079 - DNA, 25 bp, Homo sapien
aaatacatgagactcaaatttaggg

SEQ ID NO: 5344080 - DNA, 25 bp, Homo sapien
gagactcaaatttagggaatcaaag

SEQ ID NO: 5344081 - DNA, 25 bp, Homo sapien
cccatgacatgcgtgagtgaacagt

SEQ ID NO: 5344082 - DNA, 25 bp, Homo sapien
tgaacagtggacatcaagtacaggc

SEQ ID NO: 5344083 - DNA, 25 bp, Homo sapien
cagttgtgaaccactttatggaggc

SEQ ID NO: 5344084 - DNA, 25 bp, Homo sapien
gaaaccgtggtatttggatcccatg

SEQ ID NO: 5344085 - DNA, 25 bp, Homo sapien
cagcacattacaagggaaacaggag

SEQ ID NO: 5344086 - DNA, 25 bp, Homo sapien
aatttaagaatcctgacctaccgag

SEQ ID NO: 5344087 - DNA, 25 bp, Homo sapien
cagggtagggcagaaccagcacatt

SEQ ID NO: 5344088 - DNA, 25 bp, Homo sapien
tatgcttgttagctggaaaccagcg

SEQ ID NO: 5344089 - DNA, 25 bp, Homo sapien
gatgacaaacttgtgctgatagttt

SEQ ID NO: 5344090 - DNA, 25 bp, Homo sapien
aatgccactaaaaaacaaccgcagc

SEQ ID NO: 5344091 - DNA, 25 bp, Homo sapien
gagatgacccaaaatccttaagaag

SEQ ID NO: 5344092 - DNA, 25 bp, Homo sapien
cacaactaggtgatagatgacaaac

SEQ ID NO: 5344093 - DNA, 25 bp, Homo sapien
caggtggtcgctcccttatagaaga

SEQ ID NO: 5344094 - DNA, 25 bp, Homo sapien
cctgttgtgcaaggcgagctgcaac

SEQ ID NO: 5344095 - DNA, 25 bp, Homo sapien
acttcttcaggtggtcgctccctta

SEQ ID NO: 5344096 - DNA, 25 bp, Homo sapien
gcaaggcgagctgcaacttcttcag

SEQ ID NO: 5344097 - DNA, 25 bp, Homo sapien
acctagtgtaaatgtatacttagtg

SEQ ID NO: 5344098 - DNA, 25 bp, Homo sapien
gttgcctaggcattaaatagttctg

SEQ ID NO: 5344099 - DNA, 25 bp, Homo sapien
gcattaaatagttctgatgagtgta

SEQ ID NO: 5344100 - DNA, 25 bp, Homo sapien
acttagtgtctacgtgttgcctagg

SEQ ID NO: 5344101 - DNA, 25 bp, Homo sapien
ggggctgggaccgacagggtatcac

SEQ ID NO: 5344102 - DNA, 25 bp, Homo sapien
agattcctcaggctgaactgcaggg

SEQ ID NO: 5344103 - DNA, 25 bp, Homo sapien
tccttcaccaatttcagggtgatca

SEQ ID NO: 5344104 - DNA, 25 bp, Homo sapien
gcaggtgtgggttttccttcaccaa

SEQ ID NO: 5344105 - DNA, 25 bp, Homo sapien
tccttagagacacaaatatttgtac

SEQ ID NO: 5344106 - DNA, 25 bp, Homo sapien
caggggcactgtccactgcatacat

SEQ ID NO: 5344107 - DNA, 25 bp, Homo sapien
gcatacataaactcacacaaaatgg

SEQ ID NO: 5344108 - DNA, 25 bp, Homo sapien
cacacagaaatttactaccaccatc

SEQ ID NO: 5344109 - DNA, 25 bp, Homo sapien
gaagacgtgtgagcaggaaaaagat

SEQ ID NO: 5344110 - DNA, 25 bp, Homo sapien
gacgtgtgagcaggaaaaagattac

SEQ ID NO: 5344111 - DNA, 25 bp, Homo sapien
gtagaagacgtgtgagcaggaaaaa

SEQ ID NO: 5344112 - DNA, 25 bp, Homo sapien
aagagtggtagaagacgtgtgagca

SEQ ID NO: 5344113 - DNA, 25 bp, Homo sapien
tgaagctggagtatctcccttttgt

SEQ ID NO: 5344114 - DNA, 25 bp, Homo sapien
gaagctggagtatctcccttttgtt

SEQ ID NO: 5344115 - DNA, 25 bp, Homo sapien
atacactagagatttttagtggacc

SEQ ID NO: 5344116 - DNA, 25 bp, Homo sapien
ttacttctgatacactagagatttt

SEQ ID NO: 5344117 - DNA, 25 bp, Homo sapien
gcaaaagctctcgtatatacacata

SEQ ID NO: 5344118 - DNA, 25 bp, Homo sapien
atagcctggaatctatccttctact

SEQ ID NO: 5344119 - DNA, 25 bp, Homo sapien
ggtagccactgctaatagcctggaa

SEQ ID NO: 5344120 - DNA, 25 bp, Homo sapien
ttccctttccactctcttaggtagc

SEQ ID NO: 5344121 - DNA, 25 bp, Homo sapien
caaagcaatgaacatccatccctgt

SEQ ID NO: 5344122 - DNA, 25 bp, Homo sapien
cgatttcccataatttggtcaactt

SEQ ID NO: 5344123 - DNA, 25 bp, Homo sapien
caagaaattctgtttagttgcataa

SEQ ID NO: 5344124 - DNA, 25 bp, Homo sapien
tttaaatgaaaagcaccgtagtgta

SEQ ID NO: 5344125 - DNA, 25 bp, Homo sapien
ctcgaagagtttgtctgagtaaggt

SEQ ID NO: 5344126 - DNA, 25 bp, Homo sapien
ggcatataggatagtgccaccaata

SEQ ID NO: 5344127 - DNA, 25 bp, Homo sapien
taggatagtgccaccaatacctcca

SEQ ID NO: 5344128 - DNA, 25 bp, Homo sapien
aagagtttgtctgagtaaggtatgg

SEQ ID NO: 5344129 - DNA, 25 bp, Homo sapien
gctgcctgaagtagagtatctgcgg

SEQ ID NO: 5344130 - DNA, 25 bp, Homo sapien
aagtagagtatctgcggcatggtcg

SEQ ID NO: 5344131 - DNA, 25 bp, Homo sapien
ggtcgcaatggacggaggacaaact

SEQ ID NO: 5344132 - DNA, 25 bp, Homo sapien
tatctgcggcatggtcgcaatggac

SEQ ID NO: 5344133 - DNA, 25 bp, Homo sapien
gggtgctactgcaacaaaacataaa

SEQ ID NO: 5344134 - DNA, 25 bp, Homo sapien
gcagaagcctaatggccttccagag

SEQ ID NO: 5344135 - DNA, 25 bp, Homo sapien
ggcggcagaagctgaagaaccttga

SEQ ID NO: 5344136 - DNA, 25 bp, Homo sapien
tcatgactttgggactggtgttggg

SEQ ID NO: 5344137 - DNA, 25 bp, Homo sapien
gaatgtcaaagtagtcccagcgcct

SEQ ID NO: 5344138 - DNA, 25 bp, Homo sapien
tactttgcagccttatgtgacctgg

SEQ ID NO: 5344139 - DNA, 25 bp, Homo sapien
cctggagcggagaacacagatcatc

SEQ ID NO: 5344140 - DNA, 25 bp, Homo sapien
tgccaacaaactgcatgagcctgga

SEQ ID NO: 5344141 - DNA, 25 bp, Homo sapien
attaaggatgcaacaagccgccgct

SEQ ID NO: 5344142 - DNA, 25 bp, Homo sapien
gctccgctcgtcctgacgggaactg

SEQ ID NO: 5344143 - DNA, 25 bp, Homo sapien
tccttattaaggatgcaacaagccg

SEQ ID NO: 5344144 - DNA, 25 bp, Homo sapien
tcgtcctgacgggaactgtagttct

SEQ ID NO: 5344145 - DNA, 25 bp, Homo sapien
cgcctccgggagccccagtgctcac

SEQ ID NO: 5344146 - DNA, 25 bp, Homo sapien
gcgcctccgggagccccagtgctca

SEQ ID NO: 5344147 - DNA, 25 bp, Homo sapien
ggcggcggcggtcacacccgataac

SEQ ID NO: 5344148 - DNA, 25 bp, Homo sapien
gcggcggtcacacccgataactgac

SEQ ID NO: 5344149 - DNA, 25 bp, Homo sapien
cggcggcggtcacacccgataactg

SEQ ID NO: 5344150 - DNA, 25 bp, Homo sapien
tgggcggcggcggtcacacccgata

SEQ ID NO: 5344151 - DNA, 25 bp, Homo sapien
gcgcccggcgcaccggaagcacagc

SEQ ID NO: 5344152 - DNA, 25 bp, Homo sapien
cgcggcggcgcgagttaagtggagg

SEQ ID NO: 5344153 - DNA, 25 bp, Homo sapien
ctgccgcggcggcgcgagttaagtg

SEQ ID NO: 5344154 - DNA, 25 bp, Homo sapien
cgcgagttaagtggaggcgtgcttg

SEQ ID NO: 5344155 - DNA, 25 bp, Homo sapien
cacgcgggcctgtgtgtcacgcatt

SEQ ID NO: 5344156 - DNA, 25 bp, Homo sapien
ggtcagtggagagcgacatactcca

SEQ ID NO: 5344157 - DNA, 25 bp, Homo sapien
cgtttagactggaggttaacaagca

SEQ ID NO: 5344158 - DNA, 25 bp, Homo sapien
tgatttagaggctacgacctgccat

SEQ ID NO: 5344159 - DNA, 25 bp, Homo sapien
tctggaagaggcgaaactggtacgt

SEQ ID NO: 5344160 - DNA, 25 bp, Homo sapien
actcttagataaaatgacgacgtcc

SEQ ID NO: 5344161 - DNA, 25 bp, Homo sapien
aaatgacgacgtccttctggaagag

SEQ ID NO: 5344162 - DNA, 25 bp, Homo sapien
tggtacgttgatgatccttatcaga

SEQ ID NO: 5344163 - DNA, 25 bp, Homo sapien
gggtctctgttacaggggcctcaga

SEQ ID NO: 5344164 - DNA, 25 bp, Homo sapien
tattgcaaatatggatgacaagggt

SEQ ID NO: 5344165 - DNA, 25 bp, Homo sapien
gggcctcagagcaccttcgtttctc

SEQ ID NO: 5344166 - DNA, 25 bp, Homo sapien
gaaggatacttttgcacagcctcca

SEQ ID NO: 5344167 - DNA, 25 bp, Homo sapien
tggctgacaggcacataacttacgg

SEQ ID NO: 5344168 - DNA, 25 bp, Homo sapien
agagcctcagcatccaaagatggac

SEQ ID NO: 5344169 - DNA, 25 bp, Homo sapien
caggcacataacttacgggaaaggg

SEQ ID NO: 5344170 - DNA, 25 bp, Homo sapien
taggagggcttatcatcaacactga

SEQ ID NO: 5344171 - DNA, 25 bp, Homo sapien
cagcatatctacaaaactgggtaca

SEQ ID NO: 5344172 - DNA, 25 bp, Homo sapien
ccaaagtacagctaataagacccag

SEQ ID NO: 5344173 - DNA, 25 bp, Homo sapien
tgtgtatttccctgagtcttctaac

SEQ ID NO: 5344174 - DNA, 25 bp, Homo sapien
tcaacaagtgactgtaatctggtac

SEQ ID NO: 5344175 - DNA, 25 bp, Homo sapien
gccatttcaaatactgtgccaggtg

SEQ ID NO: 5344176 - DNA, 25 bp, Homo sapien
tatcagctctgggagtgtacactgt

SEQ ID NO: 5344177 - DNA, 25 bp, Homo sapien
tgtacactgttagaggatgaagcac

SEQ ID NO: 5344178 - DNA, 25 bp, Homo sapien
gatcattctatagggactacagaca

SEQ ID NO: 5344179 - DNA, 25 bp, Homo sapien
gctagagttcgctaaaacaaggtgc

SEQ ID NO: 5344180 - DNA, 25 bp, Homo sapien
tgtctttaagagagaaaccgactcc

SEQ ID NO: 5344181 - DNA, 25 bp, Homo sapien
taaaacgtctgataaggcctgtagt

SEQ ID NO: 5344182 - DNA, 25 bp, Homo sapien
tctgtctggaactactcaatgagca

SEQ ID NO: 5344183 - DNA, 25 bp, Homo sapien
aggaaatcggcagcactggtcacga

SEQ ID NO: 5344184 - DNA, 25 bp, Homo sapien
gaaatcgtcctttgtcaagcacaga

SEQ ID NO: 5344185 - DNA, 25 bp, Homo sapien
aagctcctctgtcaggaaatcggca

SEQ ID NO: 5344186 - DNA, 25 bp, Homo sapien
gtcacgataaaggagaaatcgtcct

SEQ ID NO: 5344187 - DNA, 25 bp, Homo sapien
gaaattgcaccaagagtgagctacc

SEQ ID NO: 5344188 - DNA, 25 bp, Homo sapien
tgagctacctgcctatccctggaaa

SEQ ID NO: 5344189 - DNA, 25 bp, Homo sapien
gaatatagaccacactcctgcaggg

SEQ ID NO: 5344190 - DNA, 25 bp, Homo sapien
tatcagaacctctggcagcccttgc

SEQ ID NO: 5344191 - DNA, 25 bp, Homo sapien
ccagcttgcggatttctatgttatt

SEQ ID NO: 5344192 - DNA, 25 bp, Homo sapien
gaaacattctgtggatccggtgctg

SEQ ID NO: 5344193 - DNA, 25 bp, Homo sapien
cggtgctgttggctcatctcactca

SEQ ID NO: 5344194 - DNA, 25 bp, Homo sapien
agctctttaaggcagagaagaaaca

SEQ ID NO: 5344195 - DNA, 25 bp, Homo sapien
tttcggtggccgaggatgaggtact

SEQ ID NO: 5344196 - DNA, 25 bp, Homo sapien
gtggccgaggatgaggtacttttct

SEQ ID NO: 5344197 - DNA, 25 bp, Homo sapien
tcggtggccgaggatgaggtacttt

SEQ ID NO: 5344198 - DNA, 25 bp, Homo sapien
tggccgaggatgaggtacttttctt

SEQ ID NO: 5344199 - DNA, 25 bp, Homo sapien
agaaaacagaaaggtgtccctcagt

SEQ ID NO: 5344200 - DNA, 25 bp, Homo sapien
gagaaaacagaaaggtgtccctcag

SEQ ID NO: 5344201 - DNA, 25 bp, Homo sapien
aaacagaaaggtgtccctcagtttg

SEQ ID NO: 5344202 - DNA, 25 bp, Homo sapien
cagaaaggtgtccctcagtttggtg

SEQ ID NO: 5344203 - DNA, 25 bp, Homo sapien
tcaggccgtgatactcagcagatgg

SEQ ID NO: 5344204 - DNA, 25 bp, Homo sapien
taaaagggatgcatgtgtgcctcac

SEQ ID NO: 5344205 - DNA, 25 bp, Homo sapien
cttagaattctttaggctgggctcc

SEQ ID NO: 5344206 - DNA, 25 bp, Homo sapien
tggagatacagcgatgaacaagcct

SEQ ID NO: 5344207 - DNA, 25 bp, Homo sapien
tttatacttgtacatgaaatccagc

SEQ ID NO: 5344208 - DNA, 25 bp, Homo sapien
tcagaaaacgccaatgggttttgga

SEQ ID NO: 5344209 - DNA, 25 bp, Homo sapien
tcctcgtcgtcagaaaacgccaatg

SEQ ID NO: 5344210 - DNA, 25 bp, Homo sapien
ggcaattccatccttcgaggtgctt

SEQ ID NO: 5344211 - DNA, 25 bp, Homo sapien
ccctcattcacatctccctcaacca

SEQ ID NO: 5344212 - DNA, 25 bp, Homo sapien
gacaactgaaccctaatcttgggca

SEQ ID NO: 5344213 - DNA, 25 bp, Homo sapien
tgagacccgacagtgcttggaggct

SEQ ID NO: 5344214 - DNA, 25 bp, Homo sapien
agggagccctcgctgaatactctga

SEQ ID NO: 5344215 - DNA, 25 bp, Homo sapien
gagctcagctctagtcccaagtcag

SEQ ID NO: 5344216 - DNA, 25 bp, Homo sapien
caggcctgaaagagtattgctatcc

SEQ ID NO: 5344217 - DNA, 25 bp, Homo sapien
taaagattggtgacccaacaggtcc

SEQ ID NO: 5344218 - DNA, 25 bp, Homo sapien
cttgcaaacctcaggtgatggtggc

SEQ ID NO: 5344219 - DNA, 25 bp, Homo sapien
ggtcatggccataacaacttgcaaa

SEQ ID NO: 5344220 - DNA, 25 bp, Homo sapien
agggcagggtttctgccgtcttcca

SEQ ID NO: 5344221 - DNA, 25 bp, Homo sapien
tgatgtttctgtattagcaaatgtg

SEQ ID NO: 5344222 - DNA, 25 bp, Homo sapien
ggcagggtttctgccgtcttccaca

SEQ ID NO: 5344223 - DNA, 25 bp, Homo sapien
gggtttctgccgtcttccacagcag

SEQ ID NO: 5344224 - DNA, 25 bp, Homo sapien
agggctgcaggctccacctcttctc

SEQ ID NO: 5344225 - DNA, 25 bp, Homo sapien
gcagccagggctgcaggctccacct

SEQ ID NO: 5344226 - DNA, 25 bp, Homo sapien
cagggctgcaggctccacctcttct

SEQ ID NO: 5344227 - DNA, 25 bp, Homo sapien
ctacagcagccagggctgcaggctc

SEQ ID NO: 5344228 - DNA, 25 bp, Homo sapien
tcagccctttaaaggcctgtgtagc

SEQ ID NO: 5344229 - DNA, 25 bp, Homo sapien
cagccctttaaaggcctgtgtagcc

SEQ ID NO: 5344230 - DNA, 25 bp, Homo sapien
tctcagccctttaaaggcctgtgta

SEQ ID NO: 5344231 - DNA, 25 bp, Homo sapien
agccctttaaaggcctgtgtagcct

SEQ ID NO: 5344232 - DNA, 25 bp, Homo sapien
actcttatgcacatgcagccttcca

SEQ ID NO: 5344233 - DNA, 25 bp, Homo sapien
gcagcaaccaacctgctcggggata

SEQ ID NO: 5344234 - DNA, 25 bp, Homo sapien
cttggacactgaatcctggacacac

SEQ ID NO: 5344235 - DNA, 25 bp, Homo sapien
acctgctcggggataaggaaccaga

SEQ ID NO: 5344236 - DNA, 25 bp, Homo sapien
tttccaggtcctgcaggtggagcag

SEQ ID NO: 5344237 - DNA, 25 bp, Homo sapien
ctttccaggtcctgcaggtggagca

SEQ ID NO: 5344238 - DNA, 25 bp, Homo sapien
gtcctgcaggtggagcagcaggtac

SEQ ID NO: 5344239 - DNA, 25 bp, Homo sapien
ctgcaggtggagcagcaggtacaca

SEQ ID NO: 5344240 - DNA, 25 bp, Homo sapien
ggtaggggcaccatcagtgacatcc

SEQ ID NO: 5344241 - DNA, 25 bp, Homo sapien
ggggtaggggcaccatcagtgacat

SEQ ID NO: 5344242 - DNA, 25 bp, Homo sapien
taggggcaccatcagtgacatcccc

SEQ ID NO: 5344243 - DNA, 25 bp, Homo sapien
atggggtaggggcaccatcagtgac

SEQ ID NO: 5344244 - DNA, 25 bp, Homo sapien
tggcacacaaagtcagtccttgcac

SEQ ID NO: 5344245 - DNA, 25 bp, Homo sapien
aagtcagtccttgcaccctgcagcc

SEQ ID NO: 5344246 - DNA, 25 bp, Homo sapien
acacaaagtcagtccttgcaccctg

SEQ ID NO: 5344247 - DNA, 25 bp, Homo sapien
acaaagtcagtccttgcaccctgca

SEQ ID NO: 5344248 - DNA, 25 bp, Homo sapien
aaataactccaagcacccctgccca

SEQ ID NO: 5344249 - DNA, 25 bp, Homo sapien
gaaaataactccaagcacccctgcc

SEQ ID NO: 5344250 - DNA, 25 bp, Homo sapien
gccggagacagagtcaaagttccct

SEQ ID NO: 5344251 - DNA, 25 bp, Homo sapien
gccaggatgaagtctagcctcttcc

SEQ ID NO: 5344252 - DNA, 25 bp, Homo sapien
gttgttctgagagaagttctgaggc

SEQ ID NO: 5344253 - DNA, 25 bp, Homo sapien
gaaggagcatgccttgctgtgctgc

SEQ ID NO: 5344254 - DNA, 25 bp, Homo sapien
gggagagtacaccagcccggtataa

SEQ ID NO: 5344255 - DNA, 25 bp, Homo sapien
tgctgggttgcacctttcctctttg

SEQ ID NO: 5344256 - DNA, 25 bp, Homo sapien
cagctggaaagagcactacactgtc

SEQ ID NO: 5344257 - DNA, 25 bp, Homo sapien
aaagagcactacactgtccttggcc

SEQ ID NO: 5344258 - DNA, 25 bp, Homo sapien
cctgctgggttgcacctttcctctt

SEQ ID NO: 5344259 - DNA, 25 bp, Homo sapien
cgccgtctcccctgatggtggtgag

SEQ ID NO: 5344260 - DNA, 25 bp, Homo sapien
tgagctgctagcgctctcagaagca

SEQ ID NO: 5344261 - DNA, 25 bp, Homo sapien
aagctccgcagtctctccgataagg

SEQ ID NO: 5344262 - DNA, 25 bp, Homo sapien
cctggacatcttaggctggccgtgt

SEQ ID NO: 5344263 - DNA, 25 bp, Homo sapien
tggatacaacacaggaggggcacac

SEQ ID NO: 5344264 - DNA, 25 bp, Homo sapien
ctggatacaacacaggaggggcaca

SEQ ID NO: 5344265 - DNA, 25 bp, Homo sapien
actctgaggcgcaggtgcccagaca

SEQ ID NO: 5344266 - DNA, 25 bp, Homo sapien
tgctccacaggtcacactcgacaaa

SEQ ID NO: 5344267 - DNA, 25 bp, Homo sapien
ggtcacactcgacaaaggccaagag

SEQ ID NO: 5344268 - DNA, 25 bp, Homo sapien
tggatcaactctgaggcgcaggtgc

SEQ ID NO: 5344269 - DNA, 25 bp, Homo sapien
agagaatgtgtcagagtgaaaatga

SEQ ID NO: 5344270 - DNA, 25 bp, Homo sapien
gagagaatgtgtcagagtgaaaatg

SEQ ID NO: 5344271 - DNA, 25 bp, Homo sapien
tgaaagaggatcctgctgaacaagc

SEQ ID NO: 5344272 - DNA, 25 bp, Homo sapien
tgtctgcaaggagcgtataagaagt

SEQ ID NO: 5344273 - DNA, 25 bp, Homo sapien
gagatgtgtctgcaaggagcgtata

SEQ ID NO: 5344274 - DNA, 25 bp, Homo sapien
gatgtgtctgcaaggagcgtataag

SEQ ID NO: 5344275 - DNA, 25 bp, Homo sapien
gatcagtttggagttagtcacacct

SEQ ID NO: 5344276 - DNA, 25 bp, Homo sapien
ctcgctgcccaactggatcagtttg

SEQ ID NO: 5344277 - DNA, 25 bp, Homo sapien
tagtcacacctctcaacagggttac

SEQ ID NO: 5344278 - DNA, 25 bp, Homo sapien
cagaccacgtgctggtgagcagagc

SEQ ID NO: 5344279 - DNA, 25 bp, Homo sapien
agataaaatgaaagagtcgagccac

SEQ ID NO: 5344280 - DNA, 25 bp, Homo sapien
acacttggattgagccctgggcaga

SEQ ID NO: 5344281 - DNA, 25 bp, Homo sapien
accaggtcatcaggtgacagcggaa

SEQ ID NO: 5344282 - DNA, 25 bp, Homo sapien
ccaggtcatcaggtgacagcggaag

SEQ ID NO: 5344283 - DNA, 25 bp, Homo sapien
caggaacacttggattgagccctgg

SEQ ID NO: 5344284 - DNA, 25 bp, Homo sapien
cacggccagcctatggtttattttt

SEQ ID NO: 5344285 - DNA, 25 bp, Homo sapien
accacggccagcctatggtttattt

SEQ ID NO: 5344286 - DNA, 25 bp, Homo sapien
catgtgagaatatgttttgcttaac

SEQ ID NO: 5344287 - DNA, 25 bp, Homo sapien
tttcatgtgagaatatgttttgctt

SEQ ID NO: 5344288 - DNA, 25 bp, Homo sapien
cacatgatcgtgagtgagtccaccc

SEQ ID NO: 5344289 - DNA, 25 bp, Homo sapien
cacttcagttgttatggcttggcac

SEQ ID NO: 5344290 - DNA, 25 bp, Homo sapien
gcacactagagggactgagactcat

SEQ ID NO: 5344291 - DNA, 25 bp, Homo sapien
agaaattcttaacctgggacgcaca

SEQ ID NO: 5344292 - DNA, 25 bp, Homo sapien
tgcacaagggcatcgtaacttcggt

SEQ ID NO: 5344293 - DNA, 25 bp, Homo sapien
gcttggaccagacaatcatcgattt

SEQ ID NO: 5344294 - DNA, 25 bp, Homo sapien
taacttcggtcttttgcttggacca

SEQ ID NO: 5344295 - DNA, 25 bp, Homo sapien
ggaagcagccatcacagccgctgtg

SEQ ID NO: 5344296 - DNA, 25 bp, Homo sapien
tccttatcttgacagggttgagccc

SEQ ID NO: 5344297 - DNA, 25 bp, Homo sapien
taatacccaacttgcggagcatggt

SEQ ID NO: 5344298 - DNA, 25 bp, Homo sapien
tacggatccagcgatgccctgagat

SEQ ID NO: 5344299 - DNA, 25 bp, Homo sapien
caggaggttctggatatggacagcc

SEQ ID NO: 5344300 - DNA, 25 bp, Homo sapien
atgagaagtctcctgcaataagatc

SEQ ID NO: 5344301 - DNA, 25 bp, Homo sapien
tgagaagtctcctgcaataagatca

SEQ ID NO: 5344302 - DNA, 25 bp, Homo sapien
gagaagtctcctgcaataagatcat

SEQ ID NO: 5344303 - DNA, 25 bp, Homo sapien
aatgaaagacatggcagcatatatt

SEQ ID NO: 5344304 - DNA, 25 bp, Homo sapien
ttcttttgaagatagcgtgggatgt

SEQ ID NO: 5344305 - DNA, 25 bp, Homo sapien
tagcgtgggatgtacaaacttcctg

SEQ ID NO: 5344306 - DNA, 25 bp, Homo sapien
tacaaacttcctgtacaggaggctg

SEQ ID NO: 5344307 - DNA, 25 bp, Homo sapien
gccttttgtgtagggagacagcagc

SEQ ID NO: 5344308 - DNA, 25 bp, Homo sapien
tgaaaacacaagttctgttaggttc

SEQ ID NO: 5344309 - DNA, 25 bp, Homo sapien
atgaaaacacaagttctgttaggtt

SEQ ID NO: 5344310 - DNA, 25 bp, Homo sapien
tagtgggcactttcatggcaagatt

SEQ ID NO: 5344311 - DNA, 25 bp, Homo sapien
cagcaagtcactggagggcccttaa

SEQ ID NO: 5344312 - DNA, 25 bp, Homo sapien
cagtcacctgtcctagtcttagaga

SEQ ID NO: 5344313 - DNA, 25 bp, Homo sapien
aaaacctgatgctatgagatgagac

SEQ ID NO: 5344314 - DNA, 25 bp, Homo sapien
gtatatatgactccctgagttgccc

SEQ ID NO: 5344315 - DNA, 25 bp, Homo sapien
gaagcattctatacacccgttacta

SEQ ID NO: 5344316 - DNA, 25 bp, Homo sapien
gagtatacaacgaagagtctccttc

SEQ ID NO: 5344317 - DNA, 25 bp, Homo sapien
tagactagggcgagggatacatcat

SEQ ID NO: 5344318 - DNA, 25 bp, Homo sapien
tgaatgtctctgctgtggtgaaaag

SEQ ID NO: 5344319 - DNA, 25 bp, Homo sapien
aatgtctctgctgtggtgaaaagtg

SEQ ID NO: 5344320 - DNA, 25 bp, Homo sapien
ggtgaaaagtgcaaatataatccag

SEQ ID NO: 5344321 - DNA, 25 bp, Homo sapien
aaaagtgcaaatataatccagtaca

SEQ ID NO: 5344322 - DNA, 25 bp, Homo sapien
cagggtaaagggtgccaaatataag

SEQ ID NO: 5344323 - DNA, 25 bp, Homo sapien
gcagggtaaagggtgccaaatataa

SEQ ID NO: 5344324 - DNA, 25 bp, Homo sapien
gacattccacaatcatcaggtttcc

SEQ ID NO: 5344325 - DNA, 25 bp, Homo sapien
agcactgttgccagggaacaccctg

SEQ ID NO: 5344326 - DNA, 25 bp, Homo sapien
cactgaaagggagagggctgttaac

SEQ ID NO: 5344327 - DNA, 25 bp, Homo sapien
taactgaaccaagtccgtttctggc

SEQ ID NO: 5344328 - DNA, 25 bp, Homo sapien
cggtctggcagagggtatcaaaagc

SEQ ID NO: 5344329 - DNA, 25 bp, Homo sapien
aggtactgatgtcctctgccagggc

SEQ ID NO: 5344330 - DNA, 25 bp, Homo sapien
tggtgccctcctcgctctcacacag

SEQ ID NO: 5344331 - DNA, 25 bp, Homo sapien
cagccaactttgagtgcatgtgtcg

SEQ ID NO: 5344332 - DNA, 25 bp, Homo sapien
cagatgacttaggagagccactgct

SEQ ID NO: 5344333 - DNA, 25 bp, Homo sapien
ccctgcagatgacttaggagagcca

SEQ ID NO: 5344334 - DNA, 25 bp, Homo sapien
ctgcagatgacttaggagagccact

SEQ ID NO: 5344335 - DNA, 25 bp, Homo sapien
gatgacttaggagagccactgctgg

SEQ ID NO: 5344336 - DNA, 25 bp, Homo sapien
cctgctggatacttgaactaaagga

SEQ ID NO: 5344337 - DNA, 25 bp, Homo sapien
caggttctgtctcacaggaattggc

SEQ ID NO: 5344338 - DNA, 25 bp, Homo sapien
gaaacttgagtaattcctgctggat

SEQ ID NO: 5344339 - DNA, 25 bp, Homo sapien
tgcaactgtgcatggccgtgcttgg

SEQ ID NO: 5344340 - DNA, 25 bp, Homo sapien
gcagcttgtgcccaaaggtcaccaa

SEQ ID NO: 5344341 - DNA, 25 bp, Homo sapien
cagctaatggagtgctgcctgcagc

SEQ ID NO: 5344342 - DNA, 25 bp, Homo sapien
gctttataaagccagcccagcttcc

SEQ ID NO: 5344343 - DNA, 25 bp, Homo sapien
gaagcttgacttcctcattaatgga

SEQ ID NO: 5344344 - DNA, 25 bp, Homo sapien
gacactaattttcaggccagtctgg

SEQ ID NO: 5344345 - DNA, 25 bp, Homo sapien
aagactcgggttcagcccttgttgc

SEQ ID NO: 5344346 - DNA, 25 bp, Homo sapien
cattctcaccgccaagactcgggtt

SEQ ID NO: 5344347 - DNA, 25 bp, Homo sapien
ggcacaatctcaccatcacacataa

SEQ ID NO: 5344348 - DNA, 25 bp, Homo sapien
tgaatggaaaggctgggacccagac

SEQ ID NO: 5344349 - DNA, 25 bp, Homo sapien
ccaggtgtgagatgagacatggtca

SEQ ID NO: 5344350 - DNA, 25 bp, Homo sapien
gaatcgggccatgactactttccta

SEQ ID NO: 5344351 - DNA, 25 bp, Homo sapien
tgagaagtttgctacctagctagcc

SEQ ID NO: 5344352 - DNA, 25 bp, Homo sapien
agcagcttggatgcctggctgtcag

SEQ ID NO: 5344353 - DNA, 25 bp, Homo sapien
ctgtcagctgagaaatttgcccatg

SEQ ID NO: 5344354 - DNA, 25 bp, Homo sapien
caaccacagctgatctcatcctgct

SEQ ID NO: 5344355 - DNA, 25 bp, Homo sapien
gtcagctgagaaatttgcccatgcc

SEQ ID NO: 5344356 - DNA, 25 bp, Homo sapien
gcctgggaggtgtcatcgccaccat

SEQ ID NO: 5344357 - DNA, 25 bp, Homo sapien
ccaccatgcgggtggctgtcacttg

SEQ ID NO: 5344358 - DNA, 25 bp, Homo sapien
gggctccaggcgtttactccaagat

SEQ ID NO: 5344359 - DNA, 25 bp, Homo sapien
cacttgaaaatttcccgtgcattcc

SEQ ID NO: 5344360 - DNA, 25 bp, Homo sapien
ctgcctttgccgctgtcgatgcaga

SEQ ID NO: 5344361 - DNA, 25 bp, Homo sapien
cctttgccgctgtcgatgcagacac

SEQ ID NO: 5344362 - DNA, 25 bp, Homo sapien
tgcctttgccgctgtcgatgcagac

SEQ ID NO: 5344363 - DNA, 25 bp, Homo sapien
gcctttgccgctgtcgatgcagaca

SEQ ID NO: 5344364 - DNA, 25 bp, Homo sapien
ttctgccaaaggagagagacgcgtg

SEQ ID NO: 5344365 - DNA, 25 bp, Homo sapien
tcggggcctctgcaaatcgaccgag

SEQ ID NO: 5344366 - DNA, 25 bp, Homo sapien
ccgcggtgcgcccattcggggcctc

SEQ ID NO: 5344367 - DNA, 25 bp, Homo sapien
atttctgccaaaggagagagacgcg

SEQ ID NO: 5344368 - DNA, 25 bp, Homo sapien
accaccagcctggagatgatccatg

SEQ ID NO: 5344369 - DNA, 25 bp, Homo sapien
cagcctggagatgatccatgacacc

SEQ ID NO: 5344370 - DNA, 25 bp, Homo sapien
caccagcctggagatgatccatgac

SEQ ID NO: 5344371 - DNA, 25 bp, Homo sapien
gcctggagatgatccatgacaccat

SEQ ID NO: 5344372 - DNA, 25 bp, Homo sapien
gctgctgcggcgttcccggaacgtc

SEQ ID NO: 5344373 - DNA, 25 bp, Homo sapien
ggaacgtcagtcagctcacggcagc

SEQ ID NO: 5344374 - DNA, 25 bp, Homo sapien
ggcgttcccggaacgtcagtcagct

SEQ ID NO: 5344375 - DNA, 25 bp, Homo sapien
ggcggcgcggctcggctaggctgcg

SEQ ID NO: 5344376 - DNA, 25 bp, Homo sapien
atccagacctaacctcttcagtctg

SEQ ID NO: 5344377 - DNA, 25 bp, Homo sapien
taacctcttcagtctgtccgttgct

SEQ ID NO: 5344378 - DNA, 25 bp, Homo sapien
cctcttcagtctgtccgttgctcag

SEQ ID NO: 5344379 - DNA, 25 bp, Homo sapien
agacctaacctcttcagtctgtccg

SEQ ID NO: 5344380 - DNA, 25 bp, Homo sapien
atcagaaaggagtaatcggggtgtt

SEQ ID NO: 5344381 - DNA, 25 bp, Homo sapien
tgattacgcagagacattaaccaca

SEQ ID NO: 5344382 - DNA, 25 bp, Homo sapien
gaatcagaaaggagtaatcggggtg

SEQ ID NO: 5344383 - DNA, 25 bp, Homo sapien
tctccaatcagcctattcttcctgc

SEQ ID NO: 5344384 - DNA, 25 bp, Homo sapien
ctgccaattctcaccttcaggttca

SEQ ID NO: 5344385 - DNA, 25 bp, Homo sapien
tgctgccaattctcaccttcaggtt

SEQ ID NO: 5344386 - DNA, 25 bp, Homo sapien
ctgctgccaattctcaccttcaggt

SEQ ID NO: 5344387 - DNA, 25 bp, Homo sapien
ccctgctgccaattctcaccttcag

SEQ ID NO: 5344388 - DNA, 25 bp, Homo sapien
ccaggacatcgatgatagggacaat

SEQ ID NO: 5344389 - DNA, 25 bp, Homo sapien
acacaagtgggttaatgtccatgct

SEQ ID NO: 5344390 - DNA, 25 bp, Homo sapien
cacatgcatcatggctgttgaatag

SEQ ID NO: 5344391 - DNA, 25 bp, Homo sapien
gctggagatgggattcatacagtca

SEQ ID NO: 5344392 - DNA, 25 bp, Homo sapien
tgaatagctcaggttgtccatattc

SEQ ID NO: 5344393 - DNA, 25 bp, Homo sapien
gaggcagctcctttggcacagtcct

SEQ ID NO: 5344394 - DNA, 25 bp, Homo sapien
gacctgctttggcacgtggatgagg

SEQ ID NO: 5344395 - DNA, 25 bp, Homo sapien
tggcacgtggatgagggagccggga

SEQ ID NO: 5344396 - DNA, 25 bp, Homo sapien
ctcaagatacgcaggtgcaccactg

SEQ ID NO: 5344397 - DNA, 25 bp, Homo sapien
ttctccagactgcaaggagctgcct

SEQ ID NO: 5344398 - DNA, 25 bp, Homo sapien
tttccccatggaaactgtgctgccc

SEQ ID NO: 5344399 - DNA, 25 bp, Homo sapien
cattaaagtgcattaccatcaggac

SEQ ID NO: 5344400 - DNA, 25 bp, Homo sapien
tgattaacccacatagtagccgggt

SEQ ID NO: 5344401 - DNA, 25 bp, Homo sapien
tcctgtggatcgtgcacctctgaag

SEQ ID NO: 5344402 - DNA, 25 bp, Homo sapien
tggtagaacaggaccaaagcaggtt

SEQ ID NO: 5344403 - DNA, 25 bp, Homo sapien
tatggtgccccactgatcagaatga

SEQ ID NO: 5344404 - DNA, 25 bp, Homo sapien
tttgtctccagatcacctcaggtgg

SEQ ID NO: 5344405 - DNA, 25 bp, Homo sapien
atctggacttttcttgaagcagaac

SEQ ID NO: 5344406 - DNA, 25 bp, Homo sapien
aagcagaacatcaggatggtgttga

SEQ ID NO: 5344407 - DNA, 25 bp, Homo sapien
atggtgttgagagagagccctgtct

SEQ ID NO: 5344408 - DNA, 25 bp, Homo sapien
tggacttttcttgaagcagaacatc

SEQ ID NO: 5344409 - DNA, 25 bp, Homo sapien
tagccctaaggtgaatatacgattt

SEQ ID NO: 5344410 - DNA, 25 bp, Homo sapien
tattggaacatctagctgctttgac

SEQ ID NO: 5344411 - DNA, 25 bp, Homo sapien
tagtaatgacagcattgggcatcct

SEQ ID NO: 5344412 - DNA, 25 bp, Homo sapien
gactgcatgctctatttagccctaa

SEQ ID NO: 5344413 - DNA, 25 bp, Homo sapien
tagattcataacagttcaggagacc

SEQ ID NO: 5344414 - DNA, 25 bp, Homo sapien
tagcgtcaccttaggataggccatg

SEQ ID NO: 5344415 - DNA, 25 bp, Homo sapien
aaatacttcaggtccagagcacaca

SEQ ID NO: 5344416 - DNA, 25 bp, Homo sapien
aaatttctcatcgttcatagcgtca

SEQ ID NO: 5344417 - DNA, 25 bp, Homo sapien
gtaactccacgcctttcttcattta

SEQ ID NO: 5344418 - DNA, 25 bp, Homo sapien
atttatccttcaaaatggcggactt

SEQ ID NO: 5344419 - DNA, 25 bp, Homo sapien
tcttttgctctaaatttaatgaacg

SEQ ID NO: 5344420 - DNA, 25 bp, Homo sapien
ttaatgaacgtcattatccagtaac

SEQ ID NO: 5344421 - DNA, 25 bp, Homo sapien
gcacttatagctcagggtctcgcca

SEQ ID NO: 5344422 - DNA, 25 bp, Homo sapien
ggaaggctcatcttcggtcgacagc

SEQ ID NO: 5344423 - DNA, 25 bp, Homo sapien
caaagttgataaccgatttcgcggg

SEQ ID NO: 5344424 - DNA, 25 bp, Homo sapien
ggtcgacagcctacgcggttgaaga

SEQ ID NO: 5344425 - DNA, 25 bp, Homo sapien
tgcgtggtgggcactcaagtcatgc

SEQ ID NO: 5344426 - DNA, 25 bp, Homo sapien
tatgtggtctggtctcctgccaaac

SEQ ID NO: 5344427 - DNA, 25 bp, Homo sapien
tcctggcacagtggttcagaggtct

SEQ ID NO: 5344428 - DNA, 25 bp, Homo sapien
tgccaaactatgcagtaagtgcgtg

SEQ ID NO: 5344429 - DNA, 25 bp, Homo sapien
tactttcgtagactctactgtggcc

SEQ ID NO: 5344430 - DNA, 25 bp, Homo sapien
taagtagctgtcgaatttgtaaagg

SEQ ID NO: 5344431 - DNA, 25 bp, Homo sapien
gagacccgttctgacttttcacatt

SEQ ID NO: 5344432 - DNA, 25 bp, Homo sapien
tcatgtgacagttcagagacccgtt

SEQ ID NO: 5344433 - DNA, 25 bp, Homo sapien
gaaagcaagttctaaagtaattctg

SEQ ID NO: 5344434 - DNA, 25 bp, Homo sapien
ccaatatttgtagacagtacatgca

SEQ ID NO: 5344435 - DNA, 25 bp, Homo sapien
taacatcagtgaggaatcgtctaag

SEQ ID NO: 5344436 - DNA, 25 bp, Homo sapien
catttgtcagggttgctagatacaa

SEQ ID NO: 5344437 - DNA, 25 bp, Homo sapien
cttctatgagttgtcaagtggggac

SEQ ID NO: 5344438 - DNA, 25 bp, Homo sapien
tggaatcttctggatatgtaatcta

SEQ ID NO: 5344439 - DNA, 25 bp, Homo sapien
gggaatgacatatttgagacttttg

SEQ ID NO: 5344440 - DNA, 25 bp, Homo sapien
aatggagtttcttgatggtaaggga

SEQ ID NO: 5344441 - DNA, 25 bp, Homo sapien
ggaaaacacccataatcctaatgcg

SEQ ID NO: 5344442 - DNA, 25 bp, Homo sapien
ggtcaatctgctggcattctagctg

SEQ ID NO: 5344443 - DNA, 25 bp, Homo sapien
tcactgtctaacaaggaggatgcct

SEQ ID NO: 5344444 - DNA, 25 bp, Homo sapien
taattagggctggattcgagttggc

SEQ ID NO: 5344445 - DNA, 25 bp, Homo sapien
gctaggggaattgtcacaacctgaa

SEQ ID NO: 5344446 - DNA, 25 bp, Homo sapien
ttcttaaaaaggtgtgctgcttatg

SEQ ID NO: 5344447 - DNA, 25 bp, Homo sapien
gttactacatgtggtgaactgactg

SEQ ID NO: 5344448 - DNA, 25 bp, Homo sapien
tggcatgtgtgaacagaggcataag

SEQ ID NO: 5344449 - DNA, 25 bp, Homo sapien
tcacctagtgcagaacttttaccag

SEQ ID NO: 5344450 - DNA, 25 bp, Homo sapien
tatcagctctggaacaatacctgca

SEQ ID NO: 5344451 - DNA, 25 bp, Homo sapien
gaacatgcatccttaaactgtgact

SEQ ID NO: 5344452 - DNA, 25 bp, Homo sapien
tgtaaaagcaaaacctcgtatcagc

SEQ ID NO: 5344453 - DNA, 25 bp, Homo sapien
tagacggatggtcaggttacagcct

SEQ ID NO: 5344454 - DNA, 25 bp, Homo sapien
tcaaggtgcctaaagccatgtgagc

SEQ ID NO: 5344455 - DNA, 25 bp, Homo sapien
gattaccatttgaagagcacctgtc

SEQ ID NO: 5344456 - DNA, 25 bp, Homo sapien
ggaaaaaggcccaaagcagacatga

SEQ ID NO: 5344457 - DNA, 25 bp, Homo sapien
gaatgcgtgaaccaacagtgctctt

SEQ ID NO: 5344458 - DNA, 25 bp, Homo sapien
tcagtgcccaacaaagtgtatgagg

SEQ ID NO: 5344459 - DNA, 25 bp, Homo sapien
tgccataaaaaaccacctgagagtg

SEQ ID NO: 5344460 - DNA, 25 bp, Homo sapien
aaacacagtcgtggcggaagggcaa

SEQ ID NO: 5344461 - DNA, 25 bp, Homo sapien
gtggatcctgacaaactggttctaa

SEQ ID NO: 5344462 - DNA, 25 bp, Homo sapien
tggtgggaatgcaaacggtacactt

SEQ ID NO: 5344463 - DNA, 25 bp, Homo sapien
tgaaagccactgtcaagataatgag

SEQ ID NO: 5344464 - DNA, 25 bp, Homo sapien
ggctatcacaaaacaataaactggc

SEQ ID NO: 5344465 - DNA, 25 bp, Homo sapien
aaaacatgcccatagaaaaacctgc

SEQ ID NO: 5344466 - DNA, 25 bp, Homo sapien
gagtcttcgacattcaggcaatcac

SEQ ID NO: 5344467 - DNA, 25 bp, Homo sapien
gggcagccgacaccttgaaagttta

SEQ ID NO: 5344468 - DNA, 25 bp, Homo sapien
taagatcgcgtatgtcaaagagctc

SEQ ID NO: 5344469 - DNA, 25 bp, Homo sapien
tactgcacagggcaatctacaatgg

SEQ ID NO: 5344470 - DNA, 25 bp, Homo sapien
ttttataagaacaatccctttgcga

SEQ ID NO: 5344471 - DNA, 25 bp, Homo sapien
atccctttgcgatcccaaaacctgg

SEQ ID NO: 5344472 - DNA, 25 bp, Homo sapien
acaacagaggtgtagtgcaagagac

SEQ ID NO: 5344473 - DNA, 25 bp, Homo sapien
tctccaaaatggtagtcctcacaac

SEQ ID NO: 5344474 - DNA, 25 bp, Homo sapien
tctgaggcagccatcgctcctggag

SEQ ID NO: 5344475 - DNA, 25 bp, Homo sapien
tctggaagggcatcagtcactttac

SEQ ID NO: 5344476 - DNA, 25 bp, Homo sapien
gctgcggagtgtggccagccgggac

SEQ ID NO: 5344477 - DNA, 25 bp, Homo sapien
ctttactgggtgctttgcccaaggc

SEQ ID NO: 5344478 - DNA, 25 bp, Homo sapien
cacctggccctcaaacgtttcattt

SEQ ID NO: 5344479 - DNA, 25 bp, Homo sapien
tgctactacagacatccttgaatta

SEQ ID NO: 5344480 - DNA, 25 bp, Homo sapien
gcacctggccctcaaacgtttcatt

SEQ ID NO: 5344481 - DNA, 25 bp, Homo sapien
ctacagacatccttgaattaaatat

SEQ ID NO: 5344482 - DNA, 25 bp, Homo sapien
cgaaggcaagggcttttgaatggct

SEQ ID NO: 5344483 - DNA, 25 bp, Homo sapien
gctttcaagaaagtctacaccagtt

SEQ ID NO: 5344484 - DNA, 25 bp, Homo sapien
gaaaggatggatctcacggtcatac

SEQ ID NO: 5344485 - DNA, 25 bp, Homo sapien
agccatcgcacttggcgaaggcaag

SEQ ID NO: 5344486 - DNA, 25 bp, Homo sapien
tcctgatcgtccatgctttcaaaag

SEQ ID NO: 5344487 - DNA, 25 bp, Homo sapien
catttcttcctgatcgtccatgctt

SEQ ID NO: 5344488 - DNA, 25 bp, Homo sapien
tcttcctgatcgtccatgctttcaa

SEQ ID NO: 5344489 - DNA, 25 bp, Homo sapien
tgatcgtccatgctttcaaaagtgt

SEQ ID NO: 5344490 - DNA, 25 bp, Homo sapien
ggttgtcagccacaggtctgaagca

SEQ ID NO: 5344491 - DNA, 25 bp, Homo sapien
aactcacgtgataaggtcagactgc

SEQ ID NO: 5344492 - DNA, 25 bp, Homo sapien
tctcattcaaacaacctgggccctg

SEQ ID NO: 5344493 - DNA, 25 bp, Homo sapien
gggaggtgatttctatgcacagcct

SEQ ID NO: 5344494 - DNA, 25 bp, Homo sapien
catttctttggacaactccctcatg

SEQ ID NO: 5344495 - DNA, 25 bp, Homo sapien
ctttggacaactccctcatggtggc

SEQ ID NO: 5344496 - DNA, 25 bp, Homo sapien
catggtggcctgaatctctggaatc

SEQ ID NO: 5344497 - DNA, 25 bp, Homo sapien
ctcatggtggcctgaatctctggaa

SEQ ID NO: 5344498 - DNA, 25 bp, Homo sapien
tgctcttctgcagggaaccagccac

SEQ ID NO: 5344499 - DNA, 25 bp, Homo sapien
cttctgcagggaaccagccactcgc

SEQ ID NO: 5344500 - DNA, 25 bp, Homo sapien
tgtgctcttctgcagggaaccagcc

SEQ ID NO: 5344501 - DNA, 25 bp, Homo sapien
tctgcagggaaccagccactcgcaa

SEQ ID NO: 5344502 - DNA, 25 bp, Homo sapien
cagcttggagtaactgtgacaccca

SEQ ID NO: 5344503 - DNA, 25 bp, Homo sapien
taacatgtcaaagagttggcaacca

SEQ ID NO: 5344504 - DNA, 25 bp, Homo sapien
caagctgttccctaaaaccggcaca

SEQ ID NO: 5344505 - DNA, 25 bp, Homo sapien
gagagagacagccaaattatgagcc

SEQ ID NO: 5344506 - DNA, 25 bp, Homo sapien
ccttgtgcagggccacattaatctt

SEQ ID NO: 5344507 - DNA, 25 bp, Homo sapien
agaagtttgtatttatccttgtgca

SEQ ID NO: 5344508 - DNA, 25 bp, Homo sapien
cttcagaagtttgtatttatccttg

SEQ ID NO: 5344509 - DNA, 25 bp, Homo sapien
cagggccacattaatcttctcagta

SEQ ID NO: 5344510 - DNA, 25 bp, Homo sapien
taaaagcaatgtcaatattagtcca

SEQ ID NO: 5344511 - DNA, 25 bp, Homo sapien
tttaaaagcaatgtcaatattagtc

SEQ ID NO: 5344512 - DNA, 25 bp, Homo sapien
tttttaaaagcaatgtcaatattag

SEQ ID NO: 5344513 - DNA, 25 bp, Homo sapien
aaaagcaatgtcaatattagtccat

SEQ ID NO: 5344514 - DNA, 25 bp, Homo sapien
ggcctcagtaaacttacaccatggt

SEQ ID NO: 5344515 - DNA, 25 bp, Homo sapien
ggaggcctcagtaaacttacaccat

SEQ ID NO: 5344516 - DNA, 25 bp, Homo sapien
tcagtaaacttacaccatggtggaa

SEQ ID NO: 5344517 - DNA, 25 bp, Homo sapien
agttctgtgggctgtacaggcttct

SEQ ID NO: 5344518 - DNA, 25 bp, Homo sapien
aatcatatcaaagtctgtaacacat

SEQ ID NO: 5344519 - DNA, 25 bp, Homo sapien
caaatcatatcaaagtctgtaacac

SEQ ID NO: 5344520 - DNA, 25 bp, Homo sapien
aaatcatatcaaagtctgtaacaca

SEQ ID NO: 5344521 - DNA, 25 bp, Homo sapien
tattcacgattttaaccccagtgcc

SEQ ID NO: 5344522 - DNA, 25 bp, Homo sapien
taccccatacctagagggcagtgat

SEQ ID NO: 5344523 - DNA, 25 bp, Homo sapien
gacaatactgcaccaacgaggaaga

SEQ ID NO: 5344524 - DNA, 25 bp, Homo sapien
tatatgcctgaaaagacgagggagg

SEQ ID NO: 5344525 - DNA, 25 bp, Homo sapien
attgtattagttctgggccaggtgc

SEQ ID NO: 5344526 - DNA, 25 bp, Homo sapien
catgtgtgctttggatgcatacagc

SEQ ID NO: 5344527 - DNA, 25 bp, Homo sapien
tggatgcatacagcttgctcacagc

SEQ ID NO: 5344528 - DNA, 25 bp, Homo sapien
gcactgagttcatgtgtgctttgga

SEQ ID NO: 5344529 - DNA, 25 bp, Homo sapien
ccatgagcactgagttcatgtgtgc

SEQ ID NO: 5344530 - DNA, 25 bp, Homo sapien
gaactatgcagacatccttctggcc

SEQ ID NO: 5344531 - DNA, 25 bp, Homo sapien
catctttcacagatcgtttcacttt

SEQ ID NO: 5344532 - DNA, 25 bp, Homo sapien
tccttgacctgatcatctccttggc

SEQ ID NO: 5344533 - DNA, 25 bp, Homo sapien
tccttggccagaactatgcagacat

SEQ ID NO: 5344534 - DNA, 25 bp, Homo sapien
cagtatcgtgttaaagagaagtggc

SEQ ID NO: 5344535 - DNA, 25 bp, Homo sapien
cagattgtccatcgttaatatagag

SEQ ID NO: 5344536 - DNA, 25 bp, Homo sapien
catgaaagggtgctaaatttggcca

SEQ ID NO: 5344537 - DNA, 25 bp, Homo sapien
tcctttggctagaagttcagtatcg

SEQ ID NO: 5344538 - DNA, 25 bp, Homo sapien
ttcctctgagtgttgcttttgctgc

SEQ ID NO: 5344539 - DNA, 25 bp, Homo sapien
ttgctgcaccttctaactttaggta

SEQ ID NO: 5344540 - DNA, 25 bp, Homo sapien
taggtatgttctgatttggttttta

SEQ ID NO: 5344541 - DNA, 25 bp, Homo sapien
cccattggttaagaatgtgttgctt

SEQ ID NO: 5344542 - DNA, 25 bp, Homo sapien
ttgacagtctgttactgtatacaaa

SEQ ID NO: 5344543 - DNA, 25 bp, Homo sapien
cagtattatctaactattatggaag

SEQ ID NO: 5344544 - DNA, 25 bp, Homo sapien
tctagttgatatacccattgttgac

SEQ ID NO: 5344545 - DNA, 25 bp, Homo sapien
tccacttttgctgcatatgttttga

SEQ ID NO: 5344546 - DNA, 25 bp, Homo sapien
ctctcactgtctatggctttctaca

SEQ ID NO: 5344547 - DNA, 25 bp, Homo sapien
tctctcactgtctatggctttctac

SEQ ID NO: 5344548 - DNA, 25 bp, Homo sapien
cttggcaagatctcacttgagttta

SEQ ID NO: 5344549 - DNA, 25 bp, Homo sapien
ctcacttgagtttatcctacctgga

SEQ ID NO: 5344550 - DNA, 25 bp, Homo sapien
caggcatgtaccaccacacctggct

SEQ ID NO: 5344551 - DNA, 25 bp, Homo sapien
tgtttttattttttgtagagatgag

SEQ ID NO: 5344552 - DNA, 25 bp, Homo sapien
ctggcctcaagcaacacacctgcct

SEQ ID NO: 5344553 - DNA, 25 bp, Homo sapien
tcaacttcctgggtaggtaggacta

SEQ ID NO: 5344554 - DNA, 25 bp, Homo sapien
catgagaagctagaactccctatag

SEQ ID NO: 5344555 - DNA, 25 bp, Homo sapien
tagtcatgagtgctcacccaagctg

SEQ ID NO: 5344556 - DNA, 25 bp, Homo sapien
caattattgcctataatgagtgttc

SEQ ID NO: 5344557 - DNA, 25 bp, Homo sapien
ggactaccataaatcttccatgaga

SEQ ID NO: 5344558 - DNA, 25 bp, Homo sapien
gatgctggccactgtatatgtttca

SEQ ID NO: 5344559 - DNA, 25 bp, Homo sapien
taccagttgtgtatccctaatcaga

SEQ ID NO: 5344560 - DNA, 25 bp, Homo sapien
tatgtttcattgttgggtgcctgca

SEQ ID NO: 5344561 - DNA, 25 bp, Homo sapien
aatagtatcttattggatgctggcc

SEQ ID NO: 5344562 - DNA, 25 bp, Homo sapien
aattattcagcttacagcttcctgg

SEQ ID NO: 5344563 - DNA, 25 bp, Homo sapien
gaacatcccagaggttcaacaaagt

SEQ ID NO: 5344564 - DNA, 25 bp, Homo sapien
tctgaggtctctattgaacatccca

SEQ ID NO: 5344565 - DNA, 25 bp, Homo sapien
gtctgatcagagctcaaccacttct

SEQ ID NO: 5344566 - DNA, 25 bp, Homo sapien
tgctaagatagagcagtgacaatga

SEQ ID NO: 5344567 - DNA, 25 bp, Homo sapien
ggaataaactatgtcttatgatata

SEQ ID NO: 5344568 - DNA, 25 bp, Homo sapien
gtcttatgatatataaatgcagttt

SEQ ID NO: 5344569 - DNA, 25 bp, Homo sapien
taaataactgatataggaataaact

SEQ ID NO: 5344570 - DNA, 25 bp, Homo sapien
ttatttgcctgtcaacaactctcat

SEQ ID NO: 5344571 - DNA, 25 bp, Homo sapien
tatttgcctgtcaacaactctcatt

SEQ ID NO: 5344572 - DNA, 25 bp, Homo sapien
gcctgtcaacaactctcatttcctt

SEQ ID NO: 5344573 - DNA, 25 bp, Homo sapien
tttgcctgtcaacaactctcatttc

SEQ ID NO: 5344574 - DNA, 25 bp, Homo sapien
tattcaaagattcgtagccgagggc

SEQ ID NO: 5344575 - DNA, 25 bp, Homo sapien
cctcggaaagagtacggtactgtct

SEQ ID NO: 5344576 - DNA, 25 bp, Homo sapien
tactgtctaggtacacaaagatttg

SEQ ID NO: 5344577 - DNA, 25 bp, Homo sapien
gaagaggtccaagtgcacagttagc

SEQ ID NO: 5344578 - DNA, 25 bp, Homo sapien
atctgaagaaccaaaagtatccagt

SEQ ID NO: 5344579 - DNA, 25 bp, Homo sapien
tctgaagaaccaaaagtatccagtc

SEQ ID NO: 5344580 - DNA, 25 bp, Homo sapien
ctgaagaaccaaaagtatccagtca

SEQ ID NO: 5344581 - DNA, 25 bp, Homo sapien
tcttcggagctattgggtacacttc

SEQ ID NO: 5344582 - DNA, 25 bp, Homo sapien
ttcccagatggggtggccgggcaga

SEQ ID NO: 5344583 - DNA, 25 bp, Homo sapien
ttcggagctattgggtacacttccc

SEQ ID NO: 5344584 - DNA, 25 bp, Homo sapien
ggcgcacctcacttcccagatgggg

SEQ ID NO: 5344585 - DNA, 25 bp, Homo sapien
tcacttcccagacagggcggccagg

SEQ ID NO: 5344586 - DNA, 25 bp, Homo sapien
acagggcggccaggcagaggcgctc

SEQ ID NO: 5344587 - DNA, 25 bp, Homo sapien
gacaatgggcggctgggctgatacg

SEQ ID NO: 5344588 - DNA, 25 bp, Homo sapien
acaatgggcggctgggctgatacgc

SEQ ID NO: 5344589 - DNA, 25 bp, Homo sapien
aatgggcggctgggctgatacgctc

SEQ ID NO: 5344590 - DNA, 25 bp, Homo sapien
cagacaatgggcggctgggctgata

SEQ ID NO: 5344591 - DNA, 25 bp, Homo sapien
gaaggattactgaagagctggacat

SEQ ID NO: 5344592 - DNA, 25 bp, Homo sapien
cactatgaatcacacaggttacctg

SEQ ID NO: 5344593 - DNA, 25 bp, Homo sapien
caaccaggtggccaaagttattagc

SEQ ID NO: 5344594 - DNA, 25 bp, Homo sapien
tgtaaagatctggtgtgtcactacc

SEQ ID NO: 5344595 - DNA, 25 bp, Homo sapien
taccctactgaagagtgtaccaata

SEQ ID NO: 5344596 - DNA, 25 bp, Homo sapien
tcagctttctcaggtagattaccct

SEQ ID NO: 5344597 - DNA, 25 bp, Homo sapien
cggctctggcaagcatagttttaaa

SEQ ID NO: 5344598 - DNA, 25 bp, Homo sapien
tctcaatttacgaatggcaatgcca

SEQ ID NO: 5344599 - DNA, 25 bp, Homo sapien
gagctctcgcgtcccacagccgact

SEQ ID NO: 5344600 - DNA, 25 bp, Homo sapien
gcaccaggagctctcgcgtcccaca

SEQ ID NO: 5344601 - DNA, 25 bp, Homo sapien
tcgcgtcccacagccgactcctaaa

SEQ ID NO: 5344602 - DNA, 25 bp, Homo sapien
ctctcgcgtcccacagccgactcct

SEQ ID NO: 5344603 - DNA, 25 bp, Homo sapien
cctgggtctttccaaacagccccat

SEQ ID NO: 5344604 - DNA, 25 bp, Homo sapien
gcggcttctcctgggtctttccaaa

SEQ ID NO: 5344605 - DNA, 25 bp, Homo sapien
ctttgggcggcttctcctgggtctt

SEQ ID NO: 5344606 - DNA, 25 bp, Homo sapien
cagttctttgggcggcttctcctgg

SEQ ID NO: 5344607 - DNA, 25 bp, Homo sapien
ccgtcttgccccttccggctttcag

SEQ ID NO: 5344608 - DNA, 25 bp, Homo sapien
aggcaggtcacgggcagccgcctgg

SEQ ID NO: 5344609 - DNA, 25 bp, Homo sapien
caggcaggtcacgggcagccgcctg

SEQ ID NO: 5344610 - DNA, 25 bp, Homo sapien
cggctttcagttccccgcgcccagg

SEQ ID NO: 5344611 - DNA, 25 bp, Homo sapien
cctgtgtcaagcaattctatcagtg

SEQ ID NO: 5344612 - DNA, 25 bp, Homo sapien
tgctgcatgtattctgactgctgca

SEQ ID NO: 5344613 - DNA, 25 bp, Homo sapien
ctgaacccatataatacaaggaact

SEQ ID NO: 5344614 - DNA, 25 bp, Homo sapien
gttgcaggtctcacattaaatcaaa

SEQ ID NO: 5344615 - DNA, 25 bp, Homo sapien
tctgtaactatctgcgttgtcctga

SEQ ID NO: 5344616 - DNA, 25 bp, Homo sapien
tatctgcgttgtcctgagttcttga

SEQ ID NO: 5344617 - DNA, 25 bp, Homo sapien
gtaagtgggaattcttctactcgac

SEQ ID NO: 5344618 - DNA, 25 bp, Homo sapien
cctgagttcttgatcgtctggtaag

SEQ ID NO: 5344619 - DNA, 25 bp, Homo sapien
gcattcaattaacacacaaggcaac

SEQ ID NO: 5344620 - DNA, 25 bp, Homo sapien
cattatttaaccaagaggtgctgga

SEQ ID NO: 5344621 - DNA, 25 bp, Homo sapien
catttaggataagaaaccggctcaa

SEQ ID NO: 5344622 - DNA, 25 bp, Homo sapien
taaaaaggcaagctgtaagatactc

SEQ ID NO: 5344623 - DNA, 25 bp, Homo sapien
tttattggcacatgaacaagcctca

SEQ ID NO: 5344624 - DNA, 25 bp, Homo sapien
ggcaaacagggcaacaatgtcggcc

SEQ ID NO: 5344625 - DNA, 25 bp, Homo sapien
tatcagcaggccaagttaaccaatc

SEQ ID NO: 5344626 - DNA, 25 bp, Homo sapien
ttataagaaggccaccggcaaacag

SEQ ID NO: 5344627 - DNA, 25 bp, Homo sapien
ttttcagtatcttgagacccctccg

SEQ ID NO: 5344628 - DNA, 25 bp, Homo sapien
tcccaatcagattctacaggaaagt

SEQ ID NO: 5344629 - DNA, 25 bp, Homo sapien
taagcgctccaagaataagtcaggg

SEQ ID NO: 5344630 - DNA, 25 bp, Homo sapien
aagtcagggtcttcgtcccaatcag

SEQ ID NO: 5344631 - DNA, 25 bp, Homo sapien
ccacagacttgataaccattctaag

SEQ ID NO: 5344632 - DNA, 25 bp, Homo sapien
ctgaaaagaagcaatcgggtggaag

SEQ ID NO: 5344633 - DNA, 25 bp, Homo sapien
gaagaggtagctggtgtaccagtcc

SEQ ID NO: 5344634 - DNA, 25 bp, Homo sapien
taagttattggcattgacttcatca

SEQ ID NO: 5344635 - DNA, 25 bp, Homo sapien
ttttaagctatattcataaaagcta

SEQ ID NO: 5344636 - DNA, 25 bp, Homo sapien
agtctgcccttacccatgaagccag

SEQ ID NO: 5344637 - DNA, 25 bp, Homo sapien
cataaaagctatctaagtaaggtag

SEQ ID NO: 5344638 - DNA, 25 bp, Homo sapien
aaacatccagtctgcccttacccat

SEQ ID NO: 5344639 - DNA, 25 bp, Homo sapien
tacctcgggttgtaatgagcgcaaa

SEQ ID NO: 5344640 - DNA, 25 bp, Homo sapien
aaatggttttgatccgagaagctgc

SEQ ID NO: 5344641 - DNA, 25 bp, Homo sapien
tgagcgcaaaaatgaatccatggcc

SEQ ID NO: 5344642 - DNA, 25 bp, Homo sapien
taatgagtgtggatcggacccagcc

SEQ ID NO: 5344643 - DNA, 25 bp, Homo sapien
atttctttagcacctcaccccaaag

SEQ ID NO: 5344644 - DNA, 25 bp, Homo sapien
taggctgtaatgcaaacaatttatc

SEQ ID NO: 5344645 - DNA, 25 bp, Homo sapien
taaataaacagctaggctgtaatgc

SEQ ID NO: 5344646 - DNA, 25 bp, Homo sapien
aaagtggtaccactacttggcagct

SEQ ID NO: 5344647 - DNA, 25 bp, Homo sapien
ccttttggaaacctgtctattgaca

SEQ ID NO: 5344648 - DNA, 25 bp, Homo sapien
gactgctacaaagtaatctgcacaa

SEQ ID NO: 5344649 - DNA, 25 bp, Homo sapien
cagattatcctaaggctgagtcact

SEQ ID NO: 5344650 - DNA, 25 bp, Homo sapien
caagaaaagagcaacagcaagcccc

SEQ ID NO: 5344651 - DNA, 25 bp, Homo sapien
gctgatgtggcatgctatatttaag

SEQ ID NO: 5344652 - DNA, 25 bp, Homo sapien
atatttaagaagaagcagggctcag

SEQ ID NO: 5344653 - DNA, 25 bp, Homo sapien
ccagatagaataaggttgtattacc

SEQ ID NO: 5344654 - DNA, 25 bp, Homo sapien
gactaaaaacgataggaaatatgcc

SEQ ID NO: 5344655 - DNA, 25 bp, Homo sapien
tgacactcttgccataaggcttcct

SEQ ID NO: 5344656 - DNA, 25 bp, Homo sapien
tcagctcctgcaatttccatgtcct

SEQ ID NO: 5344657 - DNA, 25 bp, Homo sapien
tctatcttctctttactaatcccca

SEQ ID NO: 5344658 - DNA, 25 bp, Homo sapien
atttccatgtcctctatcttctctt

SEQ ID NO: 5344659 - DNA, 25 bp, Homo sapien
catgtcctctatcttctctttacta

SEQ ID NO: 5344660 - DNA, 25 bp, Homo sapien
tgaacctcacaggaaaagccctctg

SEQ ID NO: 5344661 - DNA, 25 bp, Homo sapien
tagacagtcagaagttgctcagaag

SEQ ID NO: 5344662 - DNA, 25 bp, Homo sapien
tgaaatcgatctgctggttagggaa

SEQ ID NO: 5344663 - DNA, 25 bp, Homo sapien
ggcaaggccactccttctgggtaca

SEQ ID NO: 5344664 - DNA, 25 bp, Homo sapien
tatattactagtgggcaaaacaagg

SEQ ID NO: 5344665 - DNA, 25 bp, Homo sapien
caaaacaagggttctaagcagaaga

SEQ ID NO: 5344666 - DNA, 25 bp, Homo sapien
ttaagagatacaggaacttccctcc

SEQ ID NO: 5344667 - DNA, 25 bp, Homo sapien
aaagactttgtggtgaagatgagca

SEQ ID NO: 5344668 - DNA, 25 bp, Homo sapien
ctggaacagttaaatgtgcctgtac

SEQ ID NO: 5344669 - DNA, 25 bp, Homo sapien
cctgtacgtattccaaatcttgaca

SEQ ID NO: 5344670 - DNA, 25 bp, Homo sapien
gaacagttaaatgtgcctgtacgta

SEQ ID NO: 5344671 - DNA, 25 bp, Homo sapien
caaatcttgacacctttttaaccat

SEQ ID NO: 5344672 - DNA, 25 bp, Homo sapien
ttttgcccaccaagggacttctgtc

SEQ ID NO: 5344673 - DNA, 25 bp, Homo sapien
aattttgcccaccaagggacttctg

SEQ ID NO: 5344674 - DNA, 25 bp, Homo sapien
tgaattttgcccaccaagggacttc

SEQ ID NO: 5344675 - DNA, 25 bp, Homo sapien
attttgcccaccaagggacttctgt

SEQ ID NO: 5344676 - DNA, 25 bp, Homo sapien
gaagatcaagcaaagcaggcgccta

SEQ ID NO: 5344677 - DNA, 25 bp, Homo sapien
taagtccagggtatataggccaagt

SEQ ID NO: 5344678 - DNA, 25 bp, Homo sapien
aagcctccaggaagtgaagttgcag

SEQ ID NO: 5344679 - DNA, 25 bp, Homo sapien
taacaaatgtcagagggcagcagaa

SEQ ID NO: 5344680 - DNA, 25 bp, Homo sapien
tttgaagagtttaaggatccctgac

SEQ ID NO: 5344681 - DNA, 25 bp, Homo sapien
tattcagcaacgtgttctagcattt

SEQ ID NO: 5344682 - DNA, 25 bp, Homo sapien
ggtacaagacaatgttcaatgccag

SEQ ID NO: 5344683 - DNA, 25 bp, Homo sapien
caatgccagggccttatttattcag

SEQ ID NO: 5344684 - DNA, 25 bp, Homo sapien
ttagatattcggagagagagacacc

SEQ ID NO: 5344685 - DNA, 25 bp, Homo sapien
cagacagtggtggtcaatgcaaacc

SEQ ID NO: 5344686 - DNA, 25 bp, Homo sapien
gattgttctttcagaccaggccagc

SEQ ID NO: 5344687 - DNA, 25 bp, Homo sapien
gagactatacgtaacatggacctgg

SEQ ID NO: 5344688 - DNA, 25 bp, Homo sapien
tcaccactgaaattggtactagaaa

SEQ ID NO: 5344689 - DNA, 25 bp, Homo sapien
caagctcatagaagtgcatttcacc

SEQ ID NO: 5344690 - DNA, 25 bp, Homo sapien
ttccacaagctcatagaagtgcatt

SEQ ID NO: 5344691 - DNA, 25 bp, Homo sapien
tagaaaccgattcggatgcttcttc

SEQ ID NO: 5344692 - DNA, 25 bp, Homo sapien
caacagggtttgtatgacttggagg

SEQ ID NO: 5344693 - DNA, 25 bp, Homo sapien
tagaattgggttcacagaatttgcc

SEQ ID NO: 5344694 - DNA, 25 bp, Homo sapien
tgcaccatgatagcagcaaaaccat

SEQ ID NO: 5344695 - DNA, 25 bp, Homo sapien
tgagaaaccaagtactgcaccatga

SEQ ID NO: 5344696 - DNA, 25 bp, Homo sapien
caacgctaagaagccacactttaaa

SEQ ID NO: 5344697 - DNA, 25 bp, Homo sapien
cactttaaactgtcattttacgata

SEQ ID NO: 5344698 - DNA, 25 bp, Homo sapien
acgctaagaagccacactttaaact

SEQ ID NO: 5344699 - DNA, 25 bp, Homo sapien
ctaagaagccacactttaaactgtc

SEQ ID NO: 5344700 - DNA, 25 bp, Homo sapien
gctgggatccgcatacttgattgta

SEQ ID NO: 5344701 - DNA, 25 bp, Homo sapien
ctgggcagctttaacgcttccagga

SEQ ID NO: 5344702 - DNA, 25 bp, Homo sapien
gcttggacgaagaaacctgggcagc

SEQ ID NO: 5344703 - DNA, 25 bp, Homo sapien
tacttgattgtaggaagcttggacg

SEQ ID NO: 5344704 - DNA, 25 bp, Homo sapien
gaggtacaggtcgtcccctctccca

SEQ ID NO: 5344705 - DNA, 25 bp, Homo sapien
caggaggtacaggtcgtcccctctc

SEQ ID NO: 5344706 - DNA, 25 bp, Homo sapien
agcttcttgaagctcagcgccaccg

SEQ ID NO: 5344707 - DNA, 25 bp, Homo sapien
gatgccagtttcataccacacaatg

SEQ ID NO: 5344708 - DNA, 25 bp, Homo sapien
cttcttctcgggcaaccctgagtag

SEQ ID NO: 5344709 - DNA, 25 bp, Homo sapien
caccagctgggtggcaaagatgcca

SEQ ID NO: 5344710 - DNA, 25 bp, Homo sapien
ctggccaggacgaacaggaccagga

SEQ ID NO: 5344711 - DNA, 25 bp, Homo sapien
ttccagagagctcggaatacgggag

SEQ ID NO: 5344712 - DNA, 25 bp, Homo sapien
tcccagtcaagagccgacaaaaata

SEQ ID NO: 5344713 - DNA, 25 bp, Homo sapien
aaaccaataataggccccgagactg

SEQ ID NO: 5344714 - DNA, 25 bp, Homo sapien
tctgcagatggaatcggtctcggag

SEQ ID NO: 5344715 - DNA, 25 bp, Homo sapien
cctccacaaccgtgtatcagcggcg

SEQ ID NO: 5344716 - DNA, 25 bp, Homo sapien
tccacaaccgtgtatcagcggcggc

SEQ ID NO: 5344717 - DNA, 25 bp, Homo sapien
cacaaccgtgtatcagcggcggccg

SEQ ID NO: 5344718 - DNA, 25 bp, Homo sapien
caaccgtgtatcagcggcggccgcg

SEQ ID NO: 5344719 - DNA, 25 bp, Homo sapien
tggaaggctagcatcgttctgactc

SEQ ID NO: 5344720 - DNA, 25 bp, Homo sapien
cattagcaagatgttggaactccta

SEQ ID NO: 5344721 - DNA, 25 bp, Homo sapien
caatatagcaactcatgacgttcag

SEQ ID NO: 5344722 - DNA, 25 bp, Homo sapien
cctcatgttggatgatagtttggcc

SEQ ID NO: 5344723 - DNA, 25 bp, Homo sapien
agcacgcacctacctactgtatcgg

SEQ ID NO: 5344724 - DNA, 25 bp, Homo sapien
tatcggtgctgtgagaaaatccaac

SEQ ID NO: 5344725 - DNA, 25 bp, Homo sapien
gcccctgctgcgattgtgagcctct

SEQ ID NO: 5344726 - DNA, 25 bp, Homo sapien
gagttaagattaagccgtcagcacg

SEQ ID NO: 5344727 - DNA, 25 bp, Homo sapien
aaaaattgagtttgggccagatgta

SEQ ID NO: 5344728 - DNA, 25 bp, Homo sapien
taaaatgtatgacgacaatagcatg

SEQ ID NO: 5344729 - DNA, 25 bp, Homo sapien
caatagcatggagcaagaagtgaca

SEQ ID NO: 5344730 - DNA, 25 bp, Homo sapien
gtcgaattccttgagtgacacaaac

SEQ ID NO: 5344731 - DNA, 25 bp, Homo sapien
gtggatggaagattaactactggaa

SEQ ID NO: 5344732 - DNA, 25 bp, Homo sapien
tctaaggctgggttccctggaagga

SEQ ID NO: 5344733 - DNA, 25 bp, Homo sapien
cttcttcaggccctcctcaattttt

SEQ ID NO: 5344734 - DNA, 25 bp, Homo sapien
cgttaacaccagctgtgattctgcc

SEQ ID NO: 5344735 - DNA, 25 bp, Homo sapien
tttaatcatctaaggctgggttccc

SEQ ID NO: 5344736 - DNA, 25 bp, Homo sapien
gaagggcagttataatcagacaagc

SEQ ID NO: 5344737 - DNA, 25 bp, Homo sapien
ctcatcaggttaccgggacaggtct

SEQ ID NO: 5344738 - DNA, 25 bp, Homo sapien
gaagcaaccagagagactttccagg

SEQ ID NO: 5344739 - DNA, 25 bp, Homo sapien
cacaggtggcactatgaggcatgaa

SEQ ID NO: 5344740 - DNA, 25 bp, Homo sapien
gaaattctgacttcgttcacaacac

SEQ ID NO: 5344741 - DNA, 25 bp, Homo sapien
aattctgacttcgttcacaacacac

SEQ ID NO: 5344742 - DNA, 25 bp, Homo sapien
tccaggagcggcaaagggaacacag

SEQ ID NO: 5344743 - DNA, 25 bp, Homo sapien
aggaaattctgacttcgttcacaac

SEQ ID NO: 5344744 - DNA, 25 bp, Homo sapien
gtacaatgagttctggtatcagtaa

SEQ ID NO: 5344745 - DNA, 25 bp, Homo sapien
tataacccagttgtaggatataata

SEQ ID NO: 5344746 - DNA, 25 bp, Homo sapien
catataacccagttgtaggatataa

SEQ ID NO: 5344747 - DNA, 25 bp, Homo sapien
aatgagttctggtatcagtaagttc

SEQ ID NO: 5344748 - DNA, 25 bp, Homo sapien
ccagtcagatggaatagcatatgtt

SEQ ID NO: 5344749 - DNA, 25 bp, Homo sapien
tggaagtactacagcatggagaatg

SEQ ID NO: 5344750 - DNA, 25 bp, Homo sapien
caaactcagtttggtgccggatttc

SEQ ID NO: 5344751 - DNA, 25 bp, Homo sapien
gataaaagggtcagaagatttgcag

SEQ ID NO: 5344752 - DNA, 25 bp, Homo sapien
gttcagctctcctattgctccactg

SEQ ID NO: 5344753 - DNA, 25 bp, Homo sapien
ctgacaacatcccagtgaaagtgtg

SEQ ID NO: 5344754 - DNA, 25 bp, Homo sapien
actgacaacatcccagtgaaagtgt

SEQ ID NO: 5344755 - DNA, 25 bp, Homo sapien
aagttcagctctcctattgctccac

SEQ ID NO: 5344756 - DNA, 25 bp, Homo sapien
gtctagattgtattaaggtgagcca

SEQ ID NO: 5344757 - DNA, 25 bp, Homo sapien
cacggagctggacacgagacgtgct

SEQ ID NO: 5344758 - DNA, 25 bp, Homo sapien
gcaaaccagtcacccttttaatgtg

SEQ ID NO: 5344759 - DNA, 25 bp, Homo sapien
gtgggtaaatcttgtcacggagctg

SEQ ID NO: 5344760 - DNA, 25 bp, Homo sapien
tatctttctgagtatccatttgaaa

SEQ ID NO: 5344761 - DNA, 25 bp, Homo sapien
ttttttataggccaagatgctgaat

SEQ ID NO: 5344762 - DNA, 25 bp, Homo sapien
agtgagtaaccaatccttcctttgt

SEQ ID NO: 5344763 - DNA, 25 bp, Homo sapien
tgtgctggttgttgtaatgataaaa

SEQ ID NO: 5344764 - DNA, 25 bp, Homo sapien
aagtcagttttcgtgtggtattaag

SEQ ID NO: 5344765 - DNA, 25 bp, Homo sapien
caaccagaagaacgtatcacaatag

SEQ ID NO: 5344766 - DNA, 25 bp, Homo sapien
tcatttacctcaaccagaagaacgt

SEQ ID NO: 5344767 - DNA, 25 bp, Homo sapien
gaggagtatccacaatgatccaaag

SEQ ID NO: 5344768 - DNA, 25 bp, Homo sapien
gagaaatgagtgcttccaccctgga

SEQ ID NO: 5344769 - DNA, 25 bp, Homo sapien
cctgaagagacggacacagctgaga

SEQ ID NO: 5344770 - DNA, 25 bp, Homo sapien
caattgctggatgtgactctggtca

SEQ ID NO: 5344771 - DNA, 25 bp, Homo sapien
gggttttgtaccctcacatggagca

SEQ ID NO: 5344772 - DNA, 25 bp, Homo sapien
ctggctggtgtgagaagtcttccgt

SEQ ID NO: 5344773 - DNA, 25 bp, Homo sapien
gcaggctgcgtgtttaagaatttca

SEQ ID NO: 5344774 - DNA, 25 bp, Homo sapien
gcttttattgccaagaggtgcttgt

SEQ ID NO: 5344775 - DNA, 25 bp, Homo sapien
cgttagcatagagtggaaggagtac

SEQ ID NO: 5344776 - DNA, 25 bp, Homo sapien
agtctggccccatagcgacttttgc

SEQ ID NO: 5344777 - DNA, 25 bp, Homo sapien
ccagcttggagtgcttgtgtggtcc

SEQ ID NO: 5344778 - DNA, 25 bp, Homo sapien
tgtgtggtccaacctcagtctggcc

SEQ ID NO: 5344779 - DNA, 25 bp, Homo sapien
tcaccagcggttgggattggcccag

SEQ ID NO: 5344780 - DNA, 25 bp, Homo sapien
aggaagagaacagagacaaactctt

SEQ ID NO: 5344781 - DNA, 25 bp, Homo sapien
agagaacagagacaaactctttgga

SEQ ID NO: 5344782 - DNA, 25 bp, Homo sapien
ctaaagcagtgaaggaagagaacag

SEQ ID NO: 5344783 - DNA, 25 bp, Homo sapien
gaagagaacagagacaaactctttg

SEQ ID NO: 5344784 - DNA, 25 bp, Homo sapien
ttgtgaccgtcttcaagtgcatgga

SEQ ID NO: 5344785 - DNA, 25 bp, Homo sapien
tcttcatacagtcggcttgggccac

SEQ ID NO: 5344786 - DNA, 25 bp, Homo sapien
cagttatagacaaaggccatgggac

SEQ ID NO: 5344787 - DNA, 25 bp, Homo sapien
taactgaagcattggactctgcagc

SEQ ID NO: 5344788 - DNA, 25 bp, Homo sapien
tggtagactacattagccctctggt

SEQ ID NO: 5344789 - DNA, 25 bp, Homo sapien
caagaactcttggttatccgcacaa

SEQ ID NO: 5344790 - DNA, 25 bp, Homo sapien
gctcaacctctgataaagtggactg

SEQ ID NO: 5344791 - DNA, 25 bp, Homo sapien
caggtagtctcgcaggttatgcagc

SEQ ID NO: 5344792 - DNA, 25 bp, Homo sapien
ctaggatttagtgcctgatcttttt

SEQ ID NO: 5344793 - DNA, 25 bp, Homo sapien
gcagttgtggggttcactaggattt

SEQ ID NO: 5344794 - DNA, 25 bp, Homo sapien
gaaggggcgggaatgaatgtgttgg

SEQ ID NO: 5344795 - DNA, 25 bp, Homo sapien
cactaggatttagtgcctgatcttt

SEQ ID NO: 5344796 - DNA, 25 bp, Homo sapien
ccccgtgctcttgggttctatagta

SEQ ID NO: 5344797 - DNA, 25 bp, Homo sapien
tgtaacgagaatagtgttgcactgt

SEQ ID NO: 5344798 - DNA, 25 bp, Homo sapien
tagcatatccagtagtttcagggaa

SEQ ID NO: 5344799 - DNA, 25 bp, Homo sapien
tatttattttgcttaccccgtgctc

SEQ ID NO: 5344800 - DNA, 25 bp, Homo sapien
gtgtatgattggtaaagtggagccc

SEQ ID NO: 5344801 - DNA, 25 bp, Homo sapien
cagagtggcagtgagtgtatgattg

SEQ ID NO: 5344802 - DNA, 25 bp, Homo sapien
tgattggtaaagtggagcccggaaa

SEQ ID NO: 5344803 - DNA, 25 bp, Homo sapien
tatgattggtaaagtggagcccgga

SEQ ID NO: 5344804 - DNA, 25 bp, Homo sapien
catccctgtatctgctagttgagca

SEQ ID NO: 5344805 - DNA, 25 bp, Homo sapien
gttttttctctccaatgggcaggca

SEQ ID NO: 5344806 - DNA, 25 bp, Homo sapien
ggcaggcattgcttgtaccatacct

SEQ ID NO: 5344807 - DNA, 25 bp, Homo sapien
cctccttaagagagtcaggtctgcc

SEQ ID NO: 5344808 - DNA, 25 bp, Homo sapien
gattctgagaactctgcgggtagct

SEQ ID NO: 5344809 - DNA, 25 bp, Homo sapien
ggacttgctccctcaaaaggaagga

SEQ ID NO: 5344810 - DNA, 25 bp, Homo sapien
tgccgttggagactcaagcacctca

SEQ ID NO: 5344811 - DNA, 25 bp, Homo sapien
ggcacagtatcccaggtatcaagaa

SEQ ID NO: 5344812 - DNA, 25 bp, Homo sapien
tcagtttgaagtaatgtagtggctg

SEQ ID NO: 5344813 - DNA, 25 bp, Homo sapien
gtttgaagtaatgtagtggctgttg

SEQ ID NO: 5344814 - DNA, 25 bp, Homo sapien
aagtaatgtagtggctgttgcacag

SEQ ID NO: 5344815 - DNA, 25 bp, Homo sapien
cagtttgaagtaatgtagtggctgt

SEQ ID NO: 5344816 - DNA, 25 bp, Homo sapien
aaggctgggcttgtctcccgatttg

SEQ ID NO: 5344817 - DNA, 25 bp, Homo sapien
ctgggcttgtctcccgatttgacca

SEQ ID NO: 5344818 - DNA, 25 bp, Homo sapien
gcttgtctcccgatttgaccacagg

SEQ ID NO: 5344819 - DNA, 25 bp, Homo sapien
ttagacgtatctcgccgaaaggctg

SEQ ID NO: 5344820 - DNA, 25 bp, Homo sapien
ttttttctactccagtccttggcag

SEQ ID NO: 5344821 - DNA, 25 bp, Homo sapien
atagccaattgtccctgcatctcgt

SEQ ID NO: 5344822 - DNA, 25 bp, Homo sapien
cacttgagctgccagatagccaatt

SEQ ID NO: 5344823 - DNA, 25 bp, Homo sapien
ctgcatctcgttccccttttttcta

SEQ ID NO: 5344824 - DNA, 25 bp, Homo sapien
gacatttgcaaacacgtcttcggtt

SEQ ID NO: 5344825 - DNA, 25 bp, Homo sapien
catttgcaaacacgtcttcggttcc

SEQ ID NO: 5344826 - DNA, 25 bp, Homo sapien
cggggacatttgcaaacacgtcttc

SEQ ID NO: 5344827 - DNA, 25 bp, Homo sapien
gggacatttgcaaacacgtcttcgg

SEQ ID NO: 5344828 - DNA, 25 bp, Homo sapien
ggctttctcgcattctatctcccag

SEQ ID NO: 5344829 - DNA, 25 bp, Homo sapien
gcgggaagggctttctcgcattcta

SEQ ID NO: 5344830 - DNA, 25 bp, Homo sapien
caaaacctctccgagagcgcaagga

SEQ ID NO: 5344831 - DNA, 25 bp, Homo sapien
acctctccgagagcgcaaggagcgg

SEQ ID NO: 5344832 - DNA, 25 bp, Homo sapien
gtggttgcagtaaagggtgataacc

SEQ ID NO: 5344833 - DNA, 25 bp, Homo sapien
gacaggagaaggaccccacaagtcc

SEQ ID NO: 5344834 - DNA, 25 bp, Homo sapien
gtagatatcacaggcgaagtccagc

SEQ ID NO: 5344835 - DNA, 25 bp, Homo sapien
taaagggtgataaccagtgacagga

SEQ ID NO: 5344836 - DNA, 25 bp, Homo sapien
ggcgctggcgtcgtggtgggcttcg

SEQ ID NO: 5344837 - DNA, 25 bp, Homo sapien
cgacgcgatggtgggcgccggtgtt

SEQ ID NO: 5344838 - DNA, 25 bp, Homo sapien
ccggtgttggtggtcgcggcgctgg

SEQ ID NO: 5344839 - DNA, 25 bp, Homo sapien
cggcacgcctctgggcgcagggaca

SEQ ID NO: 5344840 - DNA, 25 bp, Homo sapien
ggccaggctggggttatggaggcgc

SEQ ID NO: 5344841 - DNA, 25 bp, Homo sapien
tgcaagagcaacagagcgtggttgg

SEQ ID NO: 5344842 - DNA, 25 bp, Homo sapien
caagagcaacagagcgtggttgggg

SEQ ID NO: 5344843 - DNA, 25 bp, Homo sapien
ctgcaagagcaacagagcgtggttg

SEQ ID NO: 5344844 - DNA, 25 bp, Homo sapien
ccgggctgaaccagcaaccctggag

SEQ ID NO: 5344845 - DNA, 25 bp, Homo sapien
aaccagcaaccctggagcgcgggtt

SEQ ID NO: 5344846 - DNA, 25 bp, Homo sapien
agcgcgggttgattgctgtccgcat

SEQ ID NO: 5344847 - DNA, 25 bp, Homo sapien
cattttacccacgagcaaacggagg

SEQ ID NO: 5344848 - DNA, 25 bp, Homo sapien
cagtatctaagtcgcttccaggtgc

SEQ ID NO: 5344849 - DNA, 25 bp, Homo sapien
cagatcggccggacgtaaaaagcca

SEQ ID NO: 5344850 - DNA, 25 bp, Homo sapien
cagcctcgcgttagcctcagtttgc

SEQ ID NO: 5344851 - DNA, 25 bp, Homo sapien
gaatcacacaagaatccgaactcga

SEQ ID NO: 5344852 - DNA, 25 bp, Homo sapien
cacgaagtggctgaagtacatgatg

SEQ ID NO: 5344853 - DNA, 25 bp, Homo sapien
ttgctcagggccgagcagaaatagt

SEQ ID NO: 5344854 - DNA, 25 bp, Homo sapien
aagaccggcacgaagtggctgaagt

SEQ ID NO: 5344855 - DNA, 25 bp, Homo sapien
gttctctcggcggaagtcgctcagg

SEQ ID NO: 5344856 - DNA, 25 bp, Homo sapien
cccaacctcttgcccgagaaccgct

SEQ ID NO: 5344857 - DNA, 25 bp, Homo sapien
tgtcccccaacctcttgcccgagaa

SEQ ID NO: 5344858 - DNA, 25 bp, Homo sapien
caacctcttgcccgagaaccgctgg

SEQ ID NO: 5344859 - DNA, 25 bp, Homo sapien
gtgtcccccaacctcttgcccgaga

SEQ ID NO: 5344860 - DNA, 25 bp, Homo sapien
gacgtcgggttggacagcagcacct

SEQ ID NO: 5344861 - DNA, 25 bp, Homo sapien
ctcggccgccttgggcttgttttgg

SEQ ID NO: 5344862 - DNA, 25 bp, Homo sapien
atccagcggcgacacccggaactgg

SEQ ID NO: 5344863 - DNA, 25 bp, Homo sapien
caggttccaggtccgatccagcggc

SEQ ID NO: 5344864 - DNA, 25 bp, Homo sapien
caagcagcgaggctgagcccgcagt

SEQ ID NO: 5344865 - DNA, 25 bp, Homo sapien
ggcaagcagcgaggctgagcccgca

SEQ ID NO: 5344866 - DNA, 25 bp, Homo sapien
agcagcgaggctgagcccgcagtcc

SEQ ID NO: 5344867 - DNA, 25 bp, Homo sapien
ggcggcaagcagcgaggctgagccc

SEQ ID NO: 5344868 - DNA, 25 bp, Homo sapien
cggcaggagcaaggcggtcactggt

SEQ ID NO: 5344869 - DNA, 25 bp, Homo sapien
aggagcaaggcggtcactggtaagg

SEQ ID NO: 5344870 - DNA, 25 bp, Homo sapien
gcaaggcggtcactggtaaggccat

SEQ ID NO: 5344871 - DNA, 25 bp, Homo sapien
agcggcaggagcaaggcggtcactg

SEQ ID NO: 5344872 - DNA, 25 bp, Homo sapien
ttggctcgaagctcgggcgcgaggg

SEQ ID NO: 5344873 - DNA, 25 bp, Homo sapien
cccaggacgctgcttggctcgaagc

SEQ ID NO: 5344874 - DNA, 25 bp, Homo sapien
tgcttggctcgaagctcgggcgcga

SEQ ID NO: 5344875 - DNA, 25 bp, Homo sapien
ctccccaggacgctgcttggctcga

SEQ ID NO: 5344876 - DNA, 25 bp, Homo sapien
cgccgaggagagtcaccctcctttt

SEQ ID NO: 5344877 - DNA, 25 bp, Homo sapien
aggatgtgatgtcacccgaagcccc

SEQ ID NO: 5344878 - DNA, 25 bp, Homo sapien
gtgaatagggccgtcgaggcagcct

SEQ ID NO: 5344879 - DNA, 25 bp, Homo sapien
ttttcgcggttgtcgccttccagcc

SEQ ID NO: 5344880 - DNA, 25 bp, Homo sapien
aattggtttgacattgaagaccagc

SEQ ID NO: 5344881 - DNA, 25 bp, Homo sapien
cagctttgccaatgaggttaatggc

SEQ ID NO: 5344882 - DNA, 25 bp, Homo sapien
tctttagctccaaggttttgatgag

SEQ ID NO: 5344883 - DNA, 25 bp, Homo sapien
ttaactttccttgaatctagtgagc

SEQ ID NO: 5344884 - DNA, 25 bp, Homo sapien
cactgcacctggttcatgcttttgt

SEQ ID NO: 5344885 - DNA, 25 bp, Homo sapien
ctggactcaaggaatccatccatcc

SEQ ID NO: 5344886 - DNA, 25 bp, Homo sapien
gccactgcacctggttcatgctttt

SEQ ID NO: 5344887 - DNA, 25 bp, Homo sapien
ggactcaaggaatccatccatccac

SEQ ID NO: 5344888 - DNA, 25 bp, Homo sapien
atttctaggactatagaaggagagg

SEQ ID NO: 5344889 - DNA, 25 bp, Homo sapien
ctgactcctgtagggggtgacccat

SEQ ID NO: 5344890 - DNA, 25 bp, Homo sapien
gctctgactcctgtagggggtgacc

SEQ ID NO: 5344891 - DNA, 25 bp, Homo sapien
ttctaggactatagaaggagaggtg

SEQ ID NO: 5344892 - DNA, 25 bp, Homo sapien
cacgctgctgtgcaatggataggag

SEQ ID NO: 5344893 - DNA, 25 bp, Homo sapien
agagaacggtgcttccccacgctgc

SEQ ID NO: 5344894 - DNA, 25 bp, Homo sapien
ttggagggtagagaacggtgcttcc

SEQ ID NO: 5344895 - DNA, 25 bp, Homo sapien
ggtagagaacggtgcttccccacgc

SEQ ID NO: 5344896 - DNA, 25 bp, Homo sapien
ctatgtgaagctggcgtatgggtgg

SEQ ID NO: 5344897 - DNA, 25 bp, Homo sapien
ttgcaggcttcgtccggcttcatcg

SEQ ID NO: 5344898 - DNA, 25 bp, Homo sapien
tgctgacccggcaccaattcctgtt

SEQ ID NO: 5344899 - DNA, 25 bp, Homo sapien
gggtttgcaggcttcgtccggcttc

SEQ ID NO: 5344900 - DNA, 25 bp, Homo sapien
tgagggaacacgtgatgccacgatg

SEQ ID NO: 5344901 - DNA, 25 bp, Homo sapien
ccatgaggacagatgagggaacacg

SEQ ID NO: 5344902 - DNA, 25 bp, Homo sapien
acgagagccggtgtgcctgaatcag

SEQ ID NO: 5344903 - DNA, 25 bp, Homo sapien
gggcacgccagccatgaggacagat

SEQ ID NO: 5344904 - DNA, 25 bp, Homo sapien
cacagcaagcgcctgagcggagacg

SEQ ID NO: 5344905 - DNA, 25 bp, Homo sapien
agacggccgacacgtttcccactgt

SEQ ID NO: 5344906 - DNA, 25 bp, Homo sapien
gcggagacggccgacacgtttccca

SEQ ID NO: 5344907 - DNA, 25 bp, Homo sapien
gcctgagcggagacggccgacacgt

SEQ ID NO: 5344908 - DNA, 25 bp, Homo sapien
gctcagcgcgccgtactgaggcaga

SEQ ID NO: 5344909 - DNA, 25 bp, Homo sapien
agaactcagaaaagatccggcccag

SEQ ID NO: 5344910 - DNA, 25 bp, Homo sapien
gggtcgcccgaaggtccctggcgca

SEQ ID NO: 5344911 - DNA, 25 bp, Homo sapien
gaggagggatctagaattcgtaggg

SEQ ID NO: 5344912 - DNA, 25 bp, Homo sapien
tgatgtgaatcctcgttttttgttg

SEQ ID NO: 5344913 - DNA, 25 bp, Homo sapien
tagtcgaagcgcgtcctgctgccag

SEQ ID NO: 5344914 - DNA, 25 bp, Homo sapien
tgccagctactaccaagtccttagg

SEQ ID NO: 5344915 - DNA, 25 bp, Homo sapien
gccgagcccgtttctctcctggtga

SEQ ID NO: 5344916 - DNA, 25 bp, Homo sapien
agtacttgccaagctcaatggttcc

SEQ ID NO: 5344917 - DNA, 25 bp, Homo sapien
tctgaaatgggtggtccatactcat

SEQ ID NO: 5344918 - DNA, 25 bp, Homo sapien
ccatactcatagtgatctggtgcta

SEQ ID NO: 5344919 - DNA, 25 bp, Homo sapien
aagcaaagatgttccccagtacttg

SEQ ID NO: 5344920 - DNA, 25 bp, Homo sapien
tacatttggttccacaagggggaca

SEQ ID NO: 5344921 - DNA, 25 bp, Homo sapien
ggattttgggcaaatttattcaaga

SEQ ID NO: 5344922 - DNA, 25 bp, Homo sapien
aggattttgggcaaatttattcaag

SEQ ID NO: 5344923 - DNA, 25 bp, Homo sapien
atggatacatttggttccacaaggg

SEQ ID NO: 5344924 - DNA, 25 bp, Homo sapien
cacagctcaccagggcagaacttga

SEQ ID NO: 5344925 - DNA, 25 bp, Homo sapien
ggcagaacttgagccccctatgact

SEQ ID NO: 5344926 - DNA, 25 bp, Homo sapien
ttgatggtggcagagaagtctctgc

SEQ ID NO: 5344927 - DNA, 25 bp, Homo sapien
cccctatgacttggggggttgatgg

SEQ ID NO: 5344928 - DNA, 25 bp, Homo sapien
ctgagcgagggaggaatctggtaaa

SEQ ID NO: 5344929 - DNA, 25 bp, Homo sapien
tagtaaagatccactcatcaggacc

SEQ ID NO: 5344930 - DNA, 25 bp, Homo sapien
gatccactcatcaggacctgtgctt

SEQ ID NO: 5344931 - DNA, 25 bp, Homo sapien
ggtaaaagtagtaaagatccactca

SEQ ID NO: 5344932 - DNA, 25 bp, Homo sapien
ttcaggatccatgggttaagcagct

SEQ ID NO: 5344933 - DNA, 25 bp, Homo sapien
ggacaaaggttcctgatataccttc

SEQ ID NO: 5344934 - DNA, 25 bp, Homo sapien
gctgtagtatccatgcaggcattgg

SEQ ID NO: 5344935 - DNA, 25 bp, Homo sapien
cttctgtgaggttgtagtattgctg

SEQ ID NO: 5344936 - DNA, 25 bp, Homo sapien
gagccaggcatatagcacttgatag

SEQ ID NO: 5344937 - DNA, 25 bp, Homo sapien
cacttgataggcctagggttaccac

SEQ ID NO: 5344938 - DNA, 25 bp, Homo sapien
caagagagtctcaatacatgcacca

SEQ ID NO: 5344939 - DNA, 25 bp, Homo sapien
aaattcaacacagaaagagccaggc

SEQ ID NO: 5344940 - DNA, 25 bp, Homo sapien
tgccatttggaatcaaggatgtacg

SEQ ID NO: 5344941 - DNA, 25 bp, Homo sapien
tagttttctgccatttggaatcaag

SEQ ID NO: 5344942 - DNA, 25 bp, Homo sapien
tggaatcaaggatgtacgggtcaac

SEQ ID NO: 5344943 - DNA, 25 bp, Homo sapien
aggatgtacgggtcaacagctgcag

SEQ ID NO: 5344944 - DNA, 25 bp, Homo sapien
tcattgaaaatgtgcctggtcaccc

SEQ ID NO: 5344945 - DNA, 25 bp, Homo sapien
caagcatgagggaggatatgaccaa

SEQ ID NO: 5344946 - DNA, 25 bp, Homo sapien
cagcacagcaggttatccaaaagag

SEQ ID NO: 5344947 - DNA, 25 bp, Homo sapien
aatgggcaaagtacgtgaccaagcc

SEQ ID NO: 5344948 - DNA, 25 bp, Homo sapien
atttctccagtggatgtaatcttag

SEQ ID NO: 5344949 - DNA, 25 bp, Homo sapien
tttctccagtggatgtaatcttagt

SEQ ID NO: 5344950 - DNA, 25 bp, Homo sapien
gactgagccaggtgaatgtcccaga

SEQ ID NO: 5344951 - DNA, 25 bp, Homo sapien
tcaggctcctatgggtgataactgc

SEQ ID NO: 5344952 - DNA, 25 bp, Homo sapien
tgcactagacacctctccgaagaag

SEQ ID NO: 5344953 - DNA, 25 bp, Homo sapien
tccgaagaagccaacagaaactgca

SEQ ID NO: 5344954 - DNA, 25 bp, Homo sapien
tgcatgctcaacatggtgtcagctg

SEQ ID NO: 5344955 - DNA, 25 bp, Homo sapien
ctgactgtaacaggctgcatgctca

SEQ ID NO: 5344956 - DNA, 25 bp, Homo sapien
tgtaacaggctgcatgctcaacatg

SEQ ID NO: 5344957 - DNA, 25 bp, Homo sapien
aggctgcatgctcaacatggtgtca

SEQ ID NO: 5344958 - DNA, 25 bp, Homo sapien
cgccactggagctctcggggggaaa

SEQ ID NO: 5344959 - DNA, 25 bp, Homo sapien
gggggaaaacatccatgacagcctc

SEQ ID NO: 5344960 - DNA, 25 bp, Homo sapien
ctgaatgtgcagacctccgccactg

SEQ ID NO: 5344961 - DNA, 25 bp, Homo sapien
gaatgtgcagacctccgccactgga

SEQ ID NO: 5344962 - DNA, 25 bp, Homo sapien
caagaagcgacagaggaaatatctt

SEQ ID NO: 5344963 - DNA, 25 bp, Homo sapien
ttccccgggagtgtcagtgacgcat

SEQ ID NO: 5344964 - DNA, 25 bp, Homo sapien
tcagtgacgcatcgaaggaggtttc

SEQ ID NO: 5344965 - DNA, 25 bp, Homo sapien
gtagattcggatcagctttgcagcc

SEQ ID NO: 5344966 - DNA, 25 bp, Homo sapien
ggatgagtaaggatgaaagggaggg

SEQ ID NO: 5344967 - DNA, 25 bp, Homo sapien
ggtagagacacaagctgcggggcgg

SEQ ID NO: 5344968 - DNA, 25 bp, Homo sapien
agagacacaagctgcggggcggggg

SEQ ID NO: 5344969 - DNA, 25 bp, Homo sapien
gggtggggatgagtaaggatgaaag

SEQ ID NO: 5344970 - DNA, 25 bp, Homo sapien
tgcaatagctcctaggctgctaaag

SEQ ID NO: 5344971 - DNA, 25 bp, Homo sapien
cggctaagatgggtctcaggcactt

SEQ ID NO: 5344972 - DNA, 25 bp, Homo sapien
tggacgtggtgcttctgttaatgca

SEQ ID NO: 5344973 - DNA, 25 bp, Homo sapien
gattctccctggacctggacgtggt

SEQ ID NO: 5344974 - DNA, 25 bp, Homo sapien
tttggtgcctgacttgaagccaggg

SEQ ID NO: 5344975 - DNA, 25 bp, Homo sapien
tggtgcctgacttgaagccagggat

SEQ ID NO: 5344976 - DNA, 25 bp, Homo sapien
gtgcctgacttgaagccagggatcc

SEQ ID NO: 5344977 - DNA, 25 bp, Homo sapien
cttctgtttggtgcctgacttgaag

SEQ ID NO: 5344978 - DNA, 25 bp, Homo sapien
tgaaagaagcattaagccatgggag

SEQ ID NO: 5344979 - DNA, 25 bp, Homo sapien
tacaactaagacatttgtataaaac

SEQ ID NO: 5344980 - DNA, 25 bp, Homo sapien
gcattaagccatgggagagtagaaa

SEQ ID NO: 5344981 - DNA, 25 bp, Homo sapien
gaagatgaagtgaactcctatcctc

SEQ ID NO: 5344982 - DNA, 25 bp, Homo sapien
agcacactctgtgaagtgccctggg

SEQ ID NO: 5344983 - DNA, 25 bp, Homo sapien
cctggcctctctgcgaggaaggtca

SEQ ID NO: 5344984 - DNA, 25 bp, Homo sapien
gacccaatgttactgccctaccagg

SEQ ID NO: 5344985 - DNA, 25 bp, Homo sapien
catgggcagcatttcttactcagtc

SEQ ID NO: 5344986 - DNA, 25 bp, Homo sapien
cagcagccattgaactctccagggt

SEQ ID NO: 5344987 - DNA, 25 bp, Homo sapien
agcagccattgaactctccagggtt

SEQ ID NO: 5344988 - DNA, 25 bp, Homo sapien
tcagcagccattgaactctccaggg

SEQ ID NO: 5344989 - DNA, 25 bp, Homo sapien
tagcaggacaccaaaaccgtattct

SEQ ID NO: 5344990 - DNA, 25 bp, Homo sapien
agcaggacaccaaaaccgtattctc

SEQ ID NO: 5344991 - DNA, 25 bp, Homo sapien
tgtagcaggacaccaaaaccgtatt

SEQ ID NO: 5344992 - DNA, 25 bp, Homo sapien
tttgtagcaggacaccaaaaccgta

SEQ ID NO: 5344993 - DNA, 25 bp, Homo sapien
tttcaggcaaacgatattgaatttc

SEQ ID NO: 5344994 - DNA, 25 bp, Homo sapien
acagcaagttgtgaaaccacttatt

SEQ ID NO: 5344995 - DNA, 25 bp, Homo sapien
aacaacagcaagttgtgaaaccact

SEQ ID NO: 5344996 - DNA, 25 bp, Homo sapien
ttattttcaggcaaacgatattgaa

SEQ ID NO: 5344997 - DNA, 25 bp, Homo sapien
gagacagctacactcaagttattat

SEQ ID NO: 5344998 - DNA, 25 bp, Homo sapien
ccggccttgaatggaactttctaga

SEQ ID NO: 5344999 - DNA, 25 bp, Homo sapien
aatccagcaggcatgtttaagccac

SEQ ID NO: 5345000 - DNA, 25 bp, Homo sapien
tataatgtgtacaacaatgcagagc

SEQ ID NO: 5345001 - DNA, 25 bp, Homo sapien
ttcatgaaacgaagccgggctctcc

SEQ ID NO: 5345002 - DNA, 25 bp, Homo sapien
gtttcatgaaacgaagccgggctct

SEQ ID NO: 5345003 - DNA, 25 bp, Homo sapien
catgaaacgaagccgggctctcctc

SEQ ID NO: 5345004 - DNA, 25 bp, Homo sapien
tgtttcatgaaacgaagccgggctc

SEQ ID NO: 5345005 - DNA, 25 bp, Homo sapien
cagcagaaccaggacgccagccacc

SEQ ID NO: 5345006 - DNA, 25 bp, Homo sapien
agcagaaccaggacgccagccacca

SEQ ID NO: 5345007 - DNA, 25 bp, Homo sapien
ccagcagaaccaggacgccagccac

SEQ ID NO: 5345008 - DNA, 25 bp, Homo sapien
gcagaaccaggacgccagccaccag

SEQ ID NO: 5345009 - DNA, 25 bp, Homo sapien
agccgtagcacacaaccggttcttg

SEQ ID NO: 5345010 - DNA, 25 bp, Homo sapien
tcagctgtccttacatgaagatgaa

SEQ ID NO: 5345011 - DNA, 25 bp, Homo sapien
ttagtgctaggatgaaggtttcttc

SEQ ID NO: 5345012 - DNA, 25 bp, Homo sapien
taaactgatgttgccgggttctcca

SEQ ID NO: 5345013 - DNA, 25 bp, Homo sapien
taggctctagagttgacacttggaa

SEQ ID NO: 5345014 - DNA, 25 bp, Homo sapien
gggagataggctctagagttgacac

SEQ ID NO: 5345015 - DNA, 25 bp, Homo sapien
tctagagttgacacttggaaagtgc

SEQ ID NO: 5345016 - DNA, 25 bp, Homo sapien
gataggctctagagttgacacttgg

SEQ ID NO: 5345017 - DNA, 25 bp, Homo sapien
tgggtaaccggcacactctcttctt

SEQ ID NO: 5345018 - DNA, 25 bp, Homo sapien
ggctcccgacgatcatgcagaagta

SEQ ID NO: 5345019 - DNA, 25 bp, Homo sapien
agaatgaaccggcttgcatcccgaa

SEQ ID NO: 5345020 - DNA, 25 bp, Homo sapien
cacgcttgtgagattgagaatgaac

SEQ ID NO: 5345021 - DNA, 25 bp, Homo sapien
gatagtcccttttgcggaatcccag

SEQ ID NO: 5345022 - DNA, 25 bp, Homo sapien
agggagattttagcctcgcaggaca

SEQ ID NO: 5345023 - DNA, 25 bp, Homo sapien
gttactgagggagattttagcctcg

SEQ ID NO: 5345024 - DNA, 25 bp, Homo sapien
cacctttatgtatgcaggggtctgc

SEQ ID NO: 5345025 - DNA, 25 bp, Homo sapien
ttttagcctcgcaggacagcatcac

SEQ ID NO: 5345026 - DNA, 25 bp, Homo sapien
agaacagagacatcacacattttcc

SEQ ID NO: 5345027 - DNA, 25 bp, Homo sapien
aggaaaagccaagaacagagacatc

SEQ ID NO: 5345028 - DNA, 25 bp, Homo sapien
cacattttcctagccacagctgtgg

SEQ ID NO: 5345029 - DNA, 25 bp, Homo sapien
gagacatcacacattttcctagcca

SEQ ID NO: 5345030 - DNA, 25 bp, Homo sapien
agcaaagggagacattgcaggccag

SEQ ID NO: 5345031 - DNA, 25 bp, Homo sapien
gcaaagggagacattgcaggccagg

SEQ ID NO: 5345032 - DNA, 25 bp, Homo sapien
aagggagacattgcaggccagggca

SEQ ID NO: 5345033 - DNA, 25 bp, Homo sapien
caaagggagacattgcaggccaggg

SEQ ID NO: 5345034 - DNA, 25 bp, Homo sapien
aggaccagggccaggacagccactt

SEQ ID NO: 5345035 - DNA, 25 bp, Homo sapien
ccagggccaggacagccacttatca

SEQ ID NO: 5345036 - DNA, 25 bp, Homo sapien
gaccagggccaggacagccacttat

SEQ ID NO: 5345037 - DNA, 25 bp, Homo sapien
cagggccaggacagccacttatcac

SEQ ID NO: 5345038 - DNA, 25 bp, Homo sapien
gcgcagacccttgggtagcccgcgc

SEQ ID NO: 5345039 - DNA, 25 bp, Homo sapien
gcagacccttgggtagcccgcgcgc

SEQ ID NO: 5345040 - DNA, 25 bp, Homo sapien
gacccttgggtagcccgcgcgccgc

SEQ ID NO: 5345041 - DNA, 25 bp, Homo sapien
agacccttgggtagcccgcgcgccg

SEQ ID NO: 5345042 - DNA, 25 bp, Homo sapien
agctgcgcggccaagaggagccaca

SEQ ID NO: 5345043 - DNA, 25 bp, Homo sapien
ctgtcagctgcgcggccaagaggag

SEQ ID NO: 5345044 - DNA, 25 bp, Homo sapien
tcagctgcgcggccaagaggagcca

SEQ ID NO: 5345045 - DNA, 25 bp, Homo sapien
agaggagccacagccgcggccgcat

SEQ ID NO: 5345046 - DNA, 25 bp, Homo sapien
gggggctcggcggagacagtcgcgg

SEQ ID NO: 5345047 - DNA, 25 bp, Homo sapien
gtgggtgaggagctggccgggcggg

SEQ ID NO: 5345048 - DNA, 25 bp, Homo sapien
tggcgcgcccgggacacctggcccc

SEQ ID NO: 5345049 - DNA, 25 bp, Homo sapien
gctcggcggagacagtcgcggctgg

SEQ ID NO: 5345050 - DNA, 25 bp, Homo sapien
ttatttcatctagtgggtgcagcat

SEQ ID NO: 5345051 - DNA, 25 bp, Homo sapien
gttatttcatctagtgggtgcagca

SEQ ID NO: 5345052 - DNA, 25 bp, Homo sapien
tatttcatctagtgggtgcagcatg

SEQ ID NO: 5345053 - DNA, 25 bp, Homo sapien
caggaaagtggatcaaagggcaatc

SEQ ID NO: 5345054 - DNA, 25 bp, Homo sapien
gctgaaagcagttcaacctctgatg

SEQ ID NO: 5345055 - DNA, 25 bp, Homo sapien
caaatgaggttctggcatctaacca

SEQ ID NO: 5345056 - DNA, 25 bp, Homo sapien
tatgggactacagaatacaacttgt

SEQ ID NO: 5345057 - DNA, 25 bp, Homo sapien
gcactcctcgaaggtctaaatcggg

SEQ ID NO: 5345058 - DNA, 25 bp, Homo sapien
agcactcctcgaaggtctaaatcgg

SEQ ID NO: 5345059 - DNA, 25 bp, Homo sapien
tgcgggggtaaagctagcacagtcc

SEQ ID NO: 5345060 - DNA, 25 bp, Homo sapien
aagctagcacagtcccccaatactg

SEQ ID NO: 5345061 - DNA, 25 bp, Homo sapien
gggcaagtaacccatccaccctctc

SEQ ID NO: 5345062 - DNA, 25 bp, Homo sapien
caagtaacccatccaccctctcaaa

SEQ ID NO: 5345063 - DNA, 25 bp, Homo sapien
tggcagggtggcactaaccctcacc

SEQ ID NO: 5345064 - DNA, 25 bp, Homo sapien
cagttaaacggcgatagcggcagga

SEQ ID NO: 5345065 - DNA, 25 bp, Homo sapien
tgggaggaaacaccttccacatttg

SEQ ID NO: 5345066 - DNA, 25 bp, Homo sapien
gcacacggggagtagtcctccagat

SEQ ID NO: 5345067 - DNA, 25 bp, Homo sapien
atgaggaggaacagcaggtttgttc

SEQ ID NO: 5345068 - DNA, 25 bp, Homo sapien
gaacagcaggtttgttcactggaag

SEQ ID NO: 5345069 - DNA, 25 bp, Homo sapien
cagcaggtttgttcactggaagcag

SEQ ID NO: 5345070 - DNA, 25 bp, Homo sapien
ctggatgaggaggaacagcaggttt

SEQ ID NO: 5345071 - DNA, 25 bp, Homo sapien
gcggtgaaccacatcctcgtaggct

SEQ ID NO: 5345072 - DNA, 25 bp, Homo sapien
gtgaaccacatcctcgtaggctggg

SEQ ID NO: 5345073 - DNA, 25 bp, Homo sapien
ctgggcggtgaaccacatcctcgta

SEQ ID NO: 5345074 - DNA, 25 bp, Homo sapien
gtgcctgggcggtgaaccacatcct

SEQ ID NO: 5345075 - DNA, 25 bp, Homo sapien
cggtagggaaaggaccagccccatg

SEQ ID NO: 5345076 - DNA, 25 bp, Homo sapien
agccccatggcatgccccatgataa

SEQ ID NO: 5345077 - DNA, 25 bp, Homo sapien
catgccccatgataagccaacaagt

SEQ ID NO: 5345078 - DNA, 25 bp, Homo sapien
cccatgataagccaacaagttgatt

SEQ ID NO: 5345079 - DNA, 25 bp, Homo sapien
agcctgagtttagctcgtcggtggc

SEQ ID NO: 5345080 - DNA, 25 bp, Homo sapien
tgcagcctgagtttagctcgtcggt

SEQ ID NO: 5345081 - DNA, 25 bp, Homo sapien
gttgcagcctgagtttagctcgtcg

SEQ ID NO: 5345082 - DNA, 25 bp, Homo sapien
tgttgttgcagcctgagtttagctc

SEQ ID NO: 5345083 - DNA, 25 bp, Homo sapien
ctaaagaggatgaggacagtccaga

SEQ ID NO: 5345084 - DNA, 25 bp, Homo sapien
gacagtccagagcagccagaaccac

SEQ ID NO: 5345085 - DNA, 25 bp, Homo sapien
tgaggacagtccagagcagccagaa

SEQ ID NO: 5345086 - DNA, 25 bp, Homo sapien
taaagaggatgaggacagtccagag

SEQ ID NO: 5345087 - DNA, 25 bp, Homo sapien
ctctcacagaggtagggctggttgt

SEQ ID NO: 5345088 - DNA, 25 bp, Homo sapien
tgctgttgcggcgcccgaagtgccc

SEQ ID NO: 5345089 - DNA, 25 bp, Homo sapien
gggctggttgttcactcctgggcac

SEQ ID NO: 5345090 - DNA, 25 bp, Homo sapien
tagtagtaggtgcagcagccagtct

SEQ ID NO: 5345091 - DNA, 25 bp, Homo sapien
gcccatcttcgctgaggccaccatc

SEQ ID NO: 5345092 - DNA, 25 bp, Homo sapien
ccggcccatcttcgctgaggccacc

SEQ ID NO: 5345093 - DNA, 25 bp, Homo sapien
ggcccatcttcgctgaggccaccat

SEQ ID NO: 5345094 - DNA, 25 bp, Homo sapien
gcccggcccatcttcgctgaggcca

SEQ ID NO: 5345095 - DNA, 25 bp, Homo sapien
gaactaacacctttcttgcatggat

SEQ ID NO: 5345096 - DNA, 25 bp, Homo sapien
gactatgaagtcaagtctagctaac

SEQ ID NO: 5345097 - DNA, 25 bp, Homo sapien
tgtaagtttttagctatggaaagca

SEQ ID NO: 5345098 - DNA, 25 bp, Homo sapien
gaaaatgtatagagatcagaagaac

SEQ ID NO: 5345099 - DNA, 25 bp, Homo sapien
cctcggcagttagggtaagcaggtt

SEQ ID NO: 5345100 - DNA, 25 bp, Homo sapien
ttagggtaagcaggtttcagccagg

SEQ ID NO: 5345101 - DNA, 25 bp, Homo sapien
gttagggtaagcaggtttcagccag

SEQ ID NO: 5345102 - DNA, 25 bp, Homo sapien
atgagccctcggcagttagggtaag

SEQ ID NO: 5345103 - DNA, 25 bp, Homo sapien
cctactaggctatccccacatggat

SEQ ID NO: 5345104 - DNA, 25 bp, Homo sapien
gggcctcagaactgtgccacaacta

SEQ ID NO: 5345105 - DNA, 25 bp, Homo sapien
ggatagataaatggtacctcaagtg

SEQ ID NO: 5345106 - DNA, 25 bp, Homo sapien
cacacactggtaagctcagaatcat

SEQ ID NO: 5345107 - DNA, 25 bp, Homo sapien
tagagtattaccactgtcaccacag

SEQ ID NO: 5345108 - DNA, 25 bp, Homo sapien
ccagcagaattaactcaaaggaggg

SEQ ID NO: 5345109 - DNA, 25 bp, Homo sapien
cacaactgtgtagtggtaaccaaac

SEQ ID NO: 5345110 - DNA, 25 bp, Homo sapien
cataagtgcctttgcatggtgtcac

SEQ ID NO: 5345111 - DNA, 25 bp, Homo sapien
tgcctcttctgaacatttcacataa

SEQ ID NO: 5345112 - DNA, 25 bp, Homo sapien
ttgcctcttctgaacatttcacata

SEQ ID NO: 5345113 - DNA, 25 bp, Homo sapien
gtttgcctcttctgaacatttcaca

SEQ ID NO: 5345114 - DNA, 25 bp, Homo sapien
gcctcttctgaacatttcacataaa

SEQ ID NO: 5345115 - DNA, 25 bp, Homo sapien
tcatttgctacataagcacccgttt

SEQ ID NO: 5345116 - DNA, 25 bp, Homo sapien
gatactgagaatattaaacctgtac

SEQ ID NO: 5345117 - DNA, 25 bp, Homo sapien
tctgctgtcttatgtagatactgag

SEQ ID NO: 5345118 - DNA, 25 bp, Homo sapien
gagggttaggtctgcaataatcatg

SEQ ID NO: 5345119 - DNA, 25 bp, Homo sapien
ggttctttgcgaaatgcagattcag

SEQ ID NO: 5345120 - DNA, 25 bp, Homo sapien
taagtcagtcatgcaggaactcgaa

SEQ ID NO: 5345121 - DNA, 25 bp, Homo sapien
gactatagtgaaggaggtcctctct

SEQ ID NO: 5345122 - DNA, 25 bp, Homo sapien
tgtaaaagagatgcttaagtcagtc

SEQ ID NO: 5345123 - DNA, 25 bp, Homo sapien
gagagtcacacgccactaggcccag

SEQ ID NO: 5345124 - DNA, 25 bp, Homo sapien
actacagagagtcacacgccactag

SEQ ID NO: 5345125 - DNA, 25 bp, Homo sapien
ctacagagagtcacacgccactagg

SEQ ID NO: 5345126 - DNA, 25 bp, Homo sapien
acagagagtcacacgccactaggcc

SEQ ID NO: 5345127 - DNA, 25 bp, Homo sapien
tgcattggacgtattattatataca

SEQ ID NO: 5345128 - DNA, 25 bp, Homo sapien
cctaacagtgtagatagtataaaaa

SEQ ID NO: 5345129 - DNA, 25 bp, Homo sapien
ggagctaatattgtttacctaacag

SEQ ID NO: 5345130 - DNA, 25 bp, Homo sapien
tctcattttaagataggagctaata

SEQ ID NO: 5345131 - DNA, 25 bp, Homo sapien
ttgtggcactgaaagggcgagagcc

SEQ ID NO: 5345132 - DNA, 25 bp, Homo sapien
aaagtaaacatatatcaagatggtc

SEQ ID NO: 5345133 - DNA, 25 bp, Homo sapien
tgaaagggcgagagccaagatctcc

SEQ ID NO: 5345134 - DNA, 25 bp, Homo sapien
gaagagtttttgtatatcaacatga

SEQ ID NO: 5345135 - DNA, 25 bp, Homo sapien
aagattctccctcagatagtctcgg

SEQ ID NO: 5345136 - DNA, 25 bp, Homo sapien
tatgctaagtatagttaggcaacac

SEQ ID NO: 5345137 - DNA, 25 bp, Homo sapien
gcaattgttaactttccttacagga

SEQ ID NO: 5345138 - DNA, 25 bp, Homo sapien
cttacaggaactaatcacagttggc

SEQ ID NO: 5345139 - DNA, 25 bp, Homo sapien
catcagtttagcagccttgaggaac

SEQ ID NO: 5345140 - DNA, 25 bp, Homo sapien
tgccaacatcttgattgcagccctg

SEQ ID NO: 5345141 - DNA, 25 bp, Homo sapien
tctatcttgctagcggactctctct

SEQ ID NO: 5345142 - DNA, 25 bp, Homo sapien
cacactttgttgaagcaagctacca

SEQ ID NO: 5345143 - DNA, 25 bp, Homo sapien
tgcactgccagtacagcaacatgga

SEQ ID NO: 5345144 - DNA, 25 bp, Homo sapien
gccatgcaattgaatactgctcagc

SEQ ID NO: 5345145 - DNA, 25 bp, Homo sapien
gatctcagttatccttcaactggca

SEQ ID NO: 5345146 - DNA, 25 bp, Homo sapien
gcattatgccagttgacagaggtca

SEQ ID NO: 5345147 - DNA, 25 bp, Homo sapien
taccttttggtaagagcactgcttg

SEQ ID NO: 5345148 - DNA, 25 bp, Homo sapien
taaccaaagtagaaacctactctga

SEQ ID NO: 5345149 - DNA, 25 bp, Homo sapien
taactatggttggttgctttagatg

SEQ ID NO: 5345150 - DNA, 25 bp, Homo sapien
gctttagatgtctagtgtgtacaca

SEQ ID NO: 5345151 - DNA, 25 bp, Homo sapien
cagatcagctttcatattgccttat

SEQ ID NO: 5345152 - DNA, 25 bp, Homo sapien
tgtggttattccaaatcaggatgta

SEQ ID NO: 5345153 - DNA, 25 bp, Homo sapien
tgtgaaatatctcactagtagtttt

SEQ ID NO: 5345154 - DNA, 25 bp, Homo sapien
tgccttatagacgatgacttcaaaa

SEQ ID NO: 5345155 - DNA, 25 bp, Homo sapien
tatttgggggctaactaagctccta

SEQ ID NO: 5345156 - DNA, 25 bp, Homo sapien
cctctaaaagtaagcaagaattgag

SEQ ID NO: 5345157 - DNA, 25 bp, Homo sapien
tattcactccccaacgctaatacat

SEQ ID NO: 5345158 - DNA, 25 bp, Homo sapien
gaaatcaggccagagtcattcccat

SEQ ID NO: 5345159 - DNA, 25 bp, Homo sapien
tctgggatctgagcaaagttttgct

SEQ ID NO: 5345160 - DNA, 25 bp, Homo sapien
aactggttccttgcttagcttcagc

SEQ ID NO: 5345161 - DNA, 25 bp, Homo sapien
gcaaaacagcaaagtctaccacatt

SEQ ID NO: 5345162 - DNA, 25 bp, Homo sapien
taataattcaggtctgctgggcatg

SEQ ID NO: 5345163 - DNA, 25 bp, Homo sapien
atctctctgttctggatcagtagta

SEQ ID NO: 5345164 - DNA, 25 bp, Homo sapien
gatcagtagtatagcaccagggccc

SEQ ID NO: 5345165 - DNA, 25 bp, Homo sapien
gcgcatcgttgtctggattcctcca

SEQ ID NO: 5345166 - DNA, 25 bp, Homo sapien
tcaggaatgtcgcagtagtcatctc

SEQ ID NO: 5345167 - DNA, 25 bp, Homo sapien
ctgaggggtgtgtagcaggtgagaa

SEQ ID NO: 5345168 - DNA, 25 bp, Homo sapien
tgaggggtgtgtagcaggtgagaat

SEQ ID NO: 5345169 - DNA, 25 bp, Homo sapien
gagttgctgtatagagacaaccatt

SEQ ID NO: 5345170 - DNA, 25 bp, Homo sapien
tagtctctgacttcgccatttggtt

SEQ ID NO: 5345171 - DNA, 25 bp, Homo sapien
ccatttagatgacaatcacaagact

SEQ ID NO: 5345172 - DNA, 25 bp, Homo sapien
tcatgaagatgagcctagactacct

SEQ ID NO: 5345173 - DNA, 25 bp, Homo sapien
cagacacagacggacactttacagt

SEQ ID NO: 5345174 - DNA, 25 bp, Homo sapien
aaggtgagtaacactaagttcctat

SEQ ID NO: 5345175 - DNA, 25 bp, Homo sapien
taataggcaagttgtgacatttgaa

SEQ ID NO: 5345176 - DNA, 25 bp, Homo sapien
cattactgagaacttaaggccacct

SEQ ID NO: 5345177 - DNA, 25 bp, Homo sapien
tttggacatcgtccctctgtagttc

SEQ ID NO: 5345178 - DNA, 25 bp, Homo sapien
tgttttggacatcgtccctctgtag

SEQ ID NO: 5345179 - DNA, 25 bp, Homo sapien
ttttgttttggacatcgtccctctg

SEQ ID NO: 5345180 - DNA, 25 bp, Homo sapien
gacatcgtccctctgtagttctttc

SEQ ID NO: 5345181 - DNA, 25 bp, Homo sapien
gaaaaagatctcatgcaccagaccc

SEQ ID NO: 5345182 - DNA, 25 bp, Homo sapien
tttcacaagacaccacgtgaaggtc

SEQ ID NO: 5345183 - DNA, 25 bp, Homo sapien
aaaaagatctcatgcaccagacccc

SEQ ID NO: 5345184 - DNA, 25 bp, Homo sapien
aagacaccacgtgaaggtctgcaca

SEQ ID NO: 5345185 - DNA, 25 bp, Homo sapien
tcaccagttagacaatgggccctct

SEQ ID NO: 5345186 - DNA, 25 bp, Homo sapien
caaacaggactataaaattgtggtc

SEQ ID NO: 5345187 - DNA, 25 bp, Homo sapien
caggcttttccgaggctgaaagaga

SEQ ID NO: 5345188 - DNA, 25 bp, Homo sapien
gctgaaagagatccaacccacttct

SEQ ID NO: 5345189 - DNA, 25 bp, Homo sapien
acaacgagtcgtttctttgcatttt

SEQ ID NO: 5345190 - DNA, 25 bp, Homo sapien
ttatgtgcttacaacgagtcgtttc

SEQ ID NO: 5345191 - DNA, 25 bp, Homo sapien
gtctgttccccccacgtgagttatg

SEQ ID NO: 5345192 - DNA, 25 bp, Homo sapien
ccccacgtgagttatgtgcttacaa

SEQ ID NO: 5345193 - DNA, 25 bp, Homo sapien
aaaggcatgcaatttctattgaaat

SEQ ID NO: 5345194 - DNA, 25 bp, Homo sapien
aatatagaccatgtcccccaaaatg

SEQ ID NO: 5345195 - DNA, 25 bp, Homo sapien
attctaagcagtgggactattgacc

SEQ ID NO: 5345196 - DNA, 25 bp, Homo sapien
tgcctcttattctaagcagtgggac

SEQ ID NO: 5345197 - DNA, 25 bp, Homo sapien
agccaagaccaaaaggaatgcttag

SEQ ID NO: 5345198 - DNA, 25 bp, Homo sapien
ctcaagctgacatggttagttagta

SEQ ID NO: 5345199 - DNA, 25 bp, Homo sapien
tcccatctccttgttaaatataaaa

SEQ ID NO: 5345200 - DNA, 25 bp, Homo sapien
gttagttagtaatcaaatcctgtcc

SEQ ID NO: 5345201 - DNA, 25 bp, Homo sapien
catcctaatgattatggaggacttc

SEQ ID NO: 5345202 - DNA, 25 bp, Homo sapien
tatcacacattgttgctctttactg

SEQ ID NO: 5345203 - DNA, 25 bp, Homo sapien
ctctttactgtgatattggaatgcc

SEQ ID NO: 5345204 - DNA, 25 bp, Homo sapien
catctctcatcctaatgattatgga

SEQ ID NO: 5345205 - DNA, 25 bp, Homo sapien
ctgtttcaactgttttacttcttct

SEQ ID NO: 5345206 - DNA, 25 bp, Homo sapien
tccctccctcataattttctctttc

SEQ ID NO: 5345207 - DNA, 25 bp, Homo sapien
cttccctccctcataattttctctt

SEQ ID NO: 5345208 - DNA, 25 bp, Homo sapien
tctctttctttctgtttcaactgtt

SEQ ID NO: 5345209 - DNA, 25 bp, Homo sapien
gcaactctggttgctttgaacccat

SEQ ID NO: 5345210 - DNA, 25 bp, Homo sapien
tttgtttttgggtcagaaagaagca

SEQ ID NO: 5345211 - DNA, 25 bp, Homo sapien
gaaagaagcaactctggttgctttg

SEQ ID NO: 5345212 - DNA, 25 bp, Homo sapien
tgtttttgggtcagaaagaagcaac

SEQ ID NO: 5345213 - DNA, 25 bp, Homo sapien
agatttctgggtaggtgcaacgacg

SEQ ID NO: 5345214 - DNA, 25 bp, Homo sapien
atttctgggtaggtgcaacgacgat

SEQ ID NO: 5345215 - DNA, 25 bp, Homo sapien
gatttctgggtaggtgcaacgacga

SEQ ID NO: 5345216 - DNA, 25 bp, Homo sapien
tctttgtcctcttcacattttgctg

SEQ ID NO: 5345217 - DNA, 25 bp, Homo sapien
gtgaaggcccctgggtattcacata

SEQ ID NO: 5345218 - DNA, 25 bp, Homo sapien
ctgggtattcacatagtcatccagg

SEQ ID NO: 5345219 - DNA, 25 bp, Homo sapien
gacactgaacagtgaaggcccctgg

SEQ ID NO: 5345220 - DNA, 25 bp, Homo sapien
caagattgatgttgatttgttcatc

SEQ ID NO: 5345221 - DNA, 25 bp, Homo sapien
aagattgatgttgatttgttcatcc

SEQ ID NO: 5345222 - DNA, 25 bp, Homo sapien
tgttctagcctttgggtgtagccca

SEQ ID NO: 5345223 - DNA, 25 bp, Homo sapien
taaaacattggtaatcctgtggcgg

SEQ ID NO: 5345224 - DNA, 25 bp, Homo sapien
tacaggaagaactactagcaaatcg

SEQ ID NO: 5345225 - DNA, 25 bp, Homo sapien
gatagctccttgaatggcttccact

SEQ ID NO: 5345226 - DNA, 25 bp, Homo sapien
tagaagaaccacttccttatgttcc

SEQ ID NO: 5345227 - DNA, 25 bp, Homo sapien
agaagtagaagaaccacttccttat

SEQ ID NO: 5345228 - DNA, 25 bp, Homo sapien
gtagaagaaccacttccttatgttc

SEQ ID NO: 5345229 - DNA, 25 bp, Homo sapien
gaagtagaagaaccacttccttatg

SEQ ID NO: 5345230 - DNA, 25 bp, Homo sapien
caggatgttgttgacttacatgaga

SEQ ID NO: 5345231 - DNA, 25 bp, Homo sapien
ccaatcccaggatgttgttgactta

SEQ ID NO: 5345232 - DNA, 25 bp, Homo sapien
gtcccaatcccaggatgttgttgac

SEQ ID NO: 5345233 - DNA, 25 bp, Homo sapien
aatcccaggatgttgttgacttaca

SEQ ID NO: 5345234 - DNA, 25 bp, Homo sapien
cctggtaggtgttagatgcattaaa

SEQ ID NO: 5345235 - DNA, 25 bp, Homo sapien
tagttgccctcctaatggcctcctg

SEQ ID NO: 5345236 - DNA, 25 bp, Homo sapien
ctttcccctggtaggtgttagatgc

SEQ ID NO: 5345237 - DNA, 25 bp, Homo sapien
ctacaaatgcgattttataaattag

SEQ ID NO: 5345238 - DNA, 25 bp, Homo sapien
tccatcagcatcgtgaaagcacaga

SEQ ID NO: 5345239 - DNA, 25 bp, Homo sapien
catcagcatcgtgaaagcacagagg

SEQ ID NO: 5345240 - DNA, 25 bp, Homo sapien
cttcataatccatcagcatcgtgaa

SEQ ID NO: 5345241 - DNA, 25 bp, Homo sapien
taatccatcagcatcgtgaaagcac

SEQ ID NO: 5345242 - DNA, 25 bp, Homo sapien
ggactattccagattgtgcatagga

SEQ ID NO: 5345243 - DNA, 25 bp, Homo sapien
tccagattgtgcataggaaaccaca

SEQ ID NO: 5345244 - DNA, 25 bp, Homo sapien
agggtaggcatgaagcaatggacta

SEQ ID NO: 5345245 - DNA, 25 bp, Homo sapien
agacttccactgtggcacggccctt

SEQ ID NO: 5345246 - DNA, 25 bp, Homo sapien
cccgggaactgccattctaggacag

SEQ ID NO: 5345247 - DNA, 25 bp, Homo sapien
tctgctgcccgggaactgccattct

SEQ ID NO: 5345248 - DNA, 25 bp, Homo sapien
gctgcccgggaactgccattctagg

SEQ ID NO: 5345249 - DNA, 25 bp, Homo sapien
ggaactgccattctaggacagctca

SEQ ID NO: 5345250 - DNA, 25 bp, Homo sapien
gatgtatcctgtgtatgccagaagg

SEQ ID NO: 5345251 - DNA, 25 bp, Homo sapien
taagccctaggataaagccctcaac

SEQ ID NO: 5345252 - DNA, 25 bp, Homo sapien
gacagtacaatgaccagcaagccga

SEQ ID NO: 5345253 - DNA, 25 bp, Homo sapien
gccaattcctggtgtagagcctagg

SEQ ID NO: 5345254 - DNA, 25 bp, Homo sapien
tctcttatgaggtcagtggtggcta

SEQ ID NO: 5345255 - DNA, 25 bp, Homo sapien
gggactatcggccaaaacactcaga

SEQ ID NO: 5345256 - DNA, 25 bp, Homo sapien
catgtgtctgggcttcctagaagac

SEQ ID NO: 5345257 - DNA, 25 bp, Homo sapien
ggcttggccaggtgattctcattct

SEQ ID NO: 5345258 - DNA, 25 bp, Homo sapien
gaattttacaaccaaggtcagagag

SEQ ID NO: 5345259 - DNA, 25 bp, Homo sapien
tttacaaccaaggtcagagaggata

SEQ ID NO: 5345260 - DNA, 25 bp, Homo sapien
gaaaatcagcttaatccagcacagg

SEQ ID NO: 5345261 - DNA, 25 bp, Homo sapien
tacagtacttgaaagaacgaaaatc

SEQ ID NO: 5345262 - DNA, 25 bp, Homo sapien
tcacactatcaccgtgggaggaagg

SEQ ID NO: 5345263 - DNA, 25 bp, Homo sapien
cacactatcaccgtgggaggaaggg

SEQ ID NO: 5345264 - DNA, 25 bp, Homo sapien
attggtttttaagtagatcatagcc

SEQ ID NO: 5345265 - DNA, 25 bp, Homo sapien
tagccaaagctagagtagcacctgg

SEQ ID NO: 5345266 - DNA, 25 bp, Homo sapien
gtagcacctggacaagtcacatcca

SEQ ID NO: 5345267 - DNA, 25 bp, Homo sapien
catccacatttatggtatctccttc

SEQ ID NO: 5345268 - DNA, 25 bp, Homo sapien
caggatgaacactagtattttccaa

SEQ ID NO: 5345269 - DNA, 25 bp, Homo sapien
gataagtatgcttaaaattaacata

SEQ ID NO: 5345270 - DNA, 25 bp, Homo sapien
taaaattcctctgataagtatgctt

SEQ ID NO: 5345271 - DNA, 25 bp, Homo sapien
gatctattactttgctgtgtactta

SEQ ID NO: 5345272 - DNA, 25 bp, Homo sapien
gtcctccaaccatgtactgatagag

SEQ ID NO: 5345273 - DNA, 25 bp, Homo sapien
ctccaaccatgtactgatagagctg

SEQ ID NO: 5345274 - DNA, 25 bp, Homo sapien
tgctcaggcacattgagatcagaca

SEQ ID NO: 5345275 - DNA, 25 bp, Homo sapien
tatgtttctccctatgcattcctgt

SEQ ID NO: 5345276 - DNA, 25 bp, Homo sapien
tgatccgatcaccttgccttataac

SEQ ID NO: 5345277 - DNA, 25 bp, Homo sapien
agcctctttagctcacgtgccaatg

SEQ ID NO: 5345278 - DNA, 25 bp, Homo sapien
tagtttgaccataagaatgtattgg

SEQ ID NO: 5345279 - DNA, 25 bp, Homo sapien
tcaaggccctaatagatggtcaacc

SEQ ID NO: 5345280 - DNA, 25 bp, Homo sapien
tctgtcagtgcagtattccatttca

SEQ ID NO: 5345281 - DNA, 25 bp, Homo sapien
gagtccattacttgacttctattgg

SEQ ID NO: 5345282 - DNA, 25 bp, Homo sapien
ggaagtgctgttatccaacacagta

SEQ ID NO: 5345283 - DNA, 25 bp, Homo sapien
tacccaccagcatgtaaaggaggaa

SEQ ID NO: 5345284 - DNA, 25 bp, Homo sapien
ggttcatcaccaacatacccaccag

SEQ ID NO: 5345285 - DNA, 25 bp, Homo sapien
tgtgagctgtcccttgatatacaag

SEQ ID NO: 5345286 - DNA, 25 bp, Homo sapien
taagaagccgagtaatagacatatc

SEQ ID NO: 5345287 - DNA, 25 bp, Homo sapien
gaaacaccaagtagcagtccaatgc

SEQ ID NO: 5345288 - DNA, 25 bp, Homo sapien
cactgcagccacttggacattgtga

SEQ ID NO: 5345289 - DNA, 25 bp, Homo sapien
caatccaagctgagtcgatctggga

SEQ ID NO: 5345290 - DNA, 25 bp, Homo sapien
gatattgagagtcgccagcttggta

SEQ ID NO: 5345291 - DNA, 25 bp, Homo sapien
gcaggagctatcttcaggccagcag

SEQ ID NO: 5345292 - DNA, 25 bp, Homo sapien
taaggtgcccattcaaacccagagc

SEQ ID NO: 5345293 - DNA, 25 bp, Homo sapien
tactgttgtgttccgaggaggggca

SEQ ID NO: 5345294 - DNA, 25 bp, Homo sapien
gttgggaggcacatcgatgtttcca

SEQ ID NO: 5345295 - DNA, 25 bp, Homo sapien
cacatcgatgtttccactattaagg

SEQ ID NO: 5345296 - DNA, 25 bp, Homo sapien
ggaggcacatcgatgtttccactat

SEQ ID NO: 5345297 - DNA, 25 bp, Homo sapien
gggcattcaccagattatactttta

SEQ ID NO: 5345298 - DNA, 25 bp, Homo sapien
cacaatgctatatgttccctacgaa

SEQ ID NO: 5345299 - DNA, 25 bp, Homo sapien
gcatccttttatagacttgagtcac

SEQ ID NO: 5345300 - DNA, 25 bp, Homo sapien
tgctatcgtttaaaatgcttagaga

SEQ ID NO: 5345301 - DNA, 25 bp, Homo sapien
aactatggtatatccgctgaatgaa

SEQ ID NO: 5345302 - DNA, 25 bp, Homo sapien
gctgtcctaagagttctacttctaa

SEQ ID NO: 5345303 - DNA, 25 bp, Homo sapien
ctaaatacacaggacgaatacgccc

SEQ ID NO: 5345304 - DNA, 25 bp, Homo sapien
acttgtgccagccagaaaggcaatt

SEQ ID NO: 5345305 - DNA, 25 bp, Homo sapien
caaggtaaacattcctcgtcctaca

SEQ ID NO: 5345306 - DNA, 25 bp, Homo sapien
taggaataggcaatggctctgttgg

SEQ ID NO: 5345307 - DNA, 25 bp, Homo sapien
cagtcagattcaatttaggaatagg

SEQ ID NO: 5345308 - DNA, 25 bp, Homo sapien
ttcctcgtcctacaggaagagccat

SEQ ID NO: 5345309 - DNA, 25 bp, Homo sapien
agttcgctgacacaattggagcaat

SEQ ID NO: 5345310 - DNA, 25 bp, Homo sapien
tctgaagaagccttcgcacatcctg

SEQ ID NO: 5345311 - DNA, 25 bp, Homo sapien
ttgacacggacaggatgcgcactct

SEQ ID NO: 5345312 - DNA, 25 bp, Homo sapien
ccatattaatgacatgacctcgtga

SEQ ID NO: 5345313 - DNA, 25 bp, Homo sapien
tcgatgaactcgtggtcactgagct

SEQ ID NO: 5345314 - DNA, 25 bp, Homo sapien
ttccaaagcaggcatgggttggagc

SEQ ID NO: 5345315 - DNA, 25 bp, Homo sapien
gatatataggctgatgtgtcatgac

SEQ ID NO: 5345316 - DNA, 25 bp, Homo sapien
tcatgactatactagcacagagaaa

SEQ ID NO: 5345317 - DNA, 25 bp, Homo sapien
gccgcaatgtatactgggactctaa

SEQ ID NO: 5345318 - DNA, 25 bp, Homo sapien
gactcaagcgatctttcaaccttag

SEQ ID NO: 5345319 - DNA, 25 bp, Homo sapien
ctgggactacatatgtgcactggcc

SEQ ID NO: 5345320 - DNA, 25 bp, Homo sapien
gactacatatgtgcactggccaccc

SEQ ID NO: 5345321 - DNA, 25 bp, Homo sapien
catatgtgcactggccacccagcta

SEQ ID NO: 5345322 - DNA, 25 bp, Homo sapien
acttgcaggattcctagaactcatt

SEQ ID NO: 5345323 - DNA, 25 bp, Homo sapien
gcagttttatgtgattaaacaaata

SEQ ID NO: 5345324 - DNA, 25 bp, Homo sapien
tgaaagacagtatttcgggagggat

SEQ ID NO: 5345325 - DNA, 25 bp, Homo sapien
cagacttgatgactgatgaaagaca

SEQ ID NO: 5345326 - DNA, 25 bp, Homo sapien
taaaattggaactctgaactttcta

SEQ ID NO: 5345327 - DNA, 25 bp, Homo sapien
ctgaactttctatgttgatactcac

SEQ ID NO: 5345328 - DNA, 25 bp, Homo sapien
actctgaactttctatgttgatact

SEQ ID NO: 5345329 - DNA, 25 bp, Homo sapien
tggaactctgaactttctatgttga

SEQ ID NO: 5345330 - DNA, 25 bp, Homo sapien
tgcttggaaagatcctgacgtccaa

SEQ ID NO: 5345331 - DNA, 25 bp, Homo sapien
tccaatcaagagacagacagcttct

SEQ ID NO: 5345332 - DNA, 25 bp, Homo sapien
ggtaagtttccttcgcaggcctgct

SEQ ID NO: 5345333 - DNA, 25 bp, Homo sapien
tcacgacagtgataaattgcatctc

SEQ ID NO: 5345334 - DNA, 25 bp, Homo sapien
cggaggccaatttttgaacagtatc

SEQ ID NO: 5345335 - DNA, 25 bp, Homo sapien
cttttccaacccgagaaacactgct

SEQ ID NO: 5345336 - DNA, 25 bp, Homo sapien
aacccgagaaacactgctgtggatg

SEQ ID NO: 5345337 - DNA, 25 bp, Homo sapien
gatgtctttgtggtcggaggccaat

SEQ ID NO: 5345338 - DNA, 25 bp, Homo sapien
ctgtgtcaaaacaagtcaaagtgtc

SEQ ID NO: 5345339 - DNA, 25 bp, Homo sapien
tgtccctgataattcagcatcttgg

SEQ ID NO: 5345340 - DNA, 25 bp, Homo sapien
aaacaagtcaaagtgtccctgataa

SEQ ID NO: 5345341 - DNA, 25 bp, Homo sapien
tgtcaaaacaagtcaaagtgtccct

SEQ ID NO: 5345342 - DNA, 25 bp, Homo sapien
ggctggcatatagaaacctgggagt

SEQ ID NO: 5345343 - DNA, 25 bp, Homo sapien
tacaaagtcacctcttggctggcat

SEQ ID NO: 5345344 - DNA, 25 bp, Homo sapien
aacttccctgggtaccacgatgtgc

SEQ ID NO: 5345345 - DNA, 25 bp, Homo sapien
cacgatgtgcagaaaggagttaaca

SEQ ID NO: 5345346 - DNA, 25 bp, Homo sapien
tagggaccagtttcgtggaagacat

SEQ ID NO: 5345347 - DNA, 25 bp, Homo sapien
ccagtttcgtggaagacatttcttc

SEQ ID NO: 5345348 - DNA, 25 bp, Homo sapien
gaccagtttcgtggaagacatttct

SEQ ID NO: 5345349 - DNA, 25 bp, Homo sapien
ggaccagtttcgtggaagacatttc

SEQ ID NO: 5345350 - DNA, 25 bp, Homo sapien
tttgaagacccctgacacacatgag

SEQ ID NO: 5345351 - DNA, 25 bp, Homo sapien
tatatgctgaattgtgtgactcctt

SEQ ID NO: 5345352 - DNA, 25 bp, Homo sapien
ttaagtgttgcctaccagggaagct

SEQ ID NO: 5345353 - DNA, 25 bp, Homo sapien
ggactgcctaactttggactttgga

SEQ ID NO: 5345354 - DNA, 25 bp, Homo sapien
atatctggagtttggtgctatttgt

SEQ ID NO: 5345355 - DNA, 25 bp, Homo sapien
ctggagtttggtgctatttgttacc

SEQ ID NO: 5345356 - DNA, 25 bp, Homo sapien
tctggagtttggtgctatttgttac

SEQ ID NO: 5345357 - DNA, 25 bp, Homo sapien
ggagtttggtgctatttgttacctc

SEQ ID NO: 5345358 - DNA, 25 bp, Homo sapien
tcgcgctccaccgtcacgcactgat

SEQ ID NO: 5345359 - DNA, 25 bp, Homo sapien
ggctctgcaggatctcgtgcttgag

SEQ ID NO: 5345360 - DNA, 25 bp, Homo sapien
gctccaccgtcacgcactgatccat

SEQ ID NO: 5345361 - DNA, 25 bp, Homo sapien
ccgccggtgtagtcgatgagctcct

SEQ ID NO: 5345362 - DNA, 25 bp, Homo sapien
tcggcgcccaggtgtccgcagccgt

SEQ ID NO: 5345363 - DNA, 25 bp, Homo sapien
cgcccaggtgtccgcagccgttcgg

SEQ ID NO: 5345364 - DNA, 25 bp, Homo sapien
caggtgtccgcagccgttcggcccg

SEQ ID NO: 5345365 - DNA, 25 bp, Homo sapien
cggctcctcggcgcccaggtgtccg

SEQ ID NO: 5345366 - DNA, 25 bp, Homo sapien
ctgctcctcgttccccaagcgggcg

SEQ ID NO: 5345367 - DNA, 25 bp, Homo sapien
gaaccgaccgatgacctggttctcc

SEQ ID NO: 5345368 - DNA, 25 bp, Homo sapien
tgttttcacgggaaccgaccgatga

SEQ ID NO: 5345369 - DNA, 25 bp, Homo sapien
cgacggcgcggccgattgtttttgt

SEQ ID NO: 5345370 - DNA, 25 bp, Homo sapien
acgttcgggtgcctgcgacggcgcg

SEQ ID NO: 5345371 - DNA, 25 bp, Homo sapien
ccttctccctttccaagacagccgt

SEQ ID NO: 5345372 - DNA, 25 bp, Homo sapien
ctctttctctgcagtaggttcttcc

SEQ ID NO: 5345373 - DNA, 25 bp, Homo sapien
ctccctttccaagacagccgttggg

SEQ ID NO: 5345374 - DNA, 25 bp, Homo sapien
ctgcagtaggttcttcctttctact

SEQ ID NO: 5345375 - DNA, 25 bp, Homo sapien
agccaaactccagagctgatgcaag

SEQ ID NO: 5345376 - DNA, 25 bp, Homo sapien
agagctgatgcaagtagcaaaggac

SEQ ID NO: 5345377 - DNA, 25 bp, Homo sapien
tgcttgtcgagtgccctgtccatca

SEQ ID NO: 5345378 - DNA, 25 bp, Homo sapien
tcctgcttgtcgagtgccctgtcca

SEQ ID NO: 5345379 - DNA, 25 bp, Homo sapien
gacctcctgcttgtcgagtgccctg

SEQ ID NO: 5345380 - DNA, 25 bp, Homo sapien
acctcctgcttgtcgagtgccctgt

SEQ ID NO: 5345381 - DNA, 25 bp, Homo sapien
tcctggtcacgcagtgtagcctgca

SEQ ID NO: 5345382 - DNA, 25 bp, Homo sapien
gaatgctacagccagttggaacagc

SEQ ID NO: 5345383 - DNA, 25 bp, Homo sapien
gcctctgggaagcttcagaatgcta

SEQ ID NO: 5345384 - DNA, 25 bp, Homo sapien
ctcctagaacttccgtagcctttgg

SEQ ID NO: 5345385 - DNA, 25 bp, Homo sapien
cttccagtcctggaggcgtcctcat

SEQ ID NO: 5345386 - DNA, 25 bp, Homo sapien
atgcttctgtacaggatgagggaga

SEQ ID NO: 5345387 - DNA, 25 bp, Homo sapien
gcttctgtacaggatgagggagata

SEQ ID NO: 5345388 - DNA, 25 bp, Homo sapien
gatgcttctgtacaggatgagggag

SEQ ID NO: 5345389 - DNA, 25 bp, Homo sapien
tgcttctgtacaggatgagggagat

SEQ ID NO: 5345390 - DNA, 25 bp, Homo sapien
tctggagcctttctattgaatatta

SEQ ID NO: 5345391 - DNA, 25 bp, Homo sapien
catacgccacagcagggtccttgtt

SEQ ID NO: 5345392 - DNA, 25 bp, Homo sapien
gaagtggcattagaaccttctggag

SEQ ID NO: 5345393 - DNA, 25 bp, Homo sapien
tgaatattaagtccttgaaggtttc

SEQ ID NO: 5345394 - DNA, 25 bp, Homo sapien
catccacatttatggtatctccttc

SEQ ID NO: 5345395 - DNA, 25 bp, Homo sapien
gtagcacctggacaagtcacatcca

SEQ ID NO: 5345396 - DNA, 25 bp, Homo sapien
tagccaaagctagagtagcacctgg

SEQ ID NO: 5345397 - DNA, 25 bp, Homo sapien
attggtttttaagtagatcatagcc

SEQ ID NO: 5345398 - DNA, 25 bp, Homo sapien
ctccaaccatgtactgatagagctg

SEQ ID NO: 5345399 - DNA, 25 bp, Homo sapien
gtcctccaaccatgtactgatagag

SEQ ID NO: 5345400 - DNA, 25 bp, Homo sapien
tatgtttctccctatgcattcctgt

SEQ ID NO: 5345401 - DNA, 25 bp, Homo sapien
tgctcaggcacattgagatcagaca

SEQ ID NO: 5345402 - DNA, 25 bp, Homo sapien
cagcagctaaggagtatgactctct

SEQ ID NO: 5345403 - DNA, 25 bp, Homo sapien
agccagcagctaaggagtatgactc

SEQ ID NO: 5345404 - DNA, 25 bp, Homo sapien
gcagctaaggagtatgactctctgt

SEQ ID NO: 5345405 - DNA, 25 bp, Homo sapien
agctaaggagtatgactctctgtca

SEQ ID NO: 5345406 - DNA, 25 bp, Homo sapien
gggctgcttgggttataaacttgtc

SEQ ID NO: 5345407 - DNA, 25 bp, Homo sapien
gagcagtgtctgagtcccattgagg

SEQ ID NO: 5345408 - DNA, 25 bp, Homo sapien
gagtactgtctggtgcaatagctaa

SEQ ID NO: 5345409 - DNA, 25 bp, Homo sapien
ttgaggattattggtggatgctgcc

SEQ ID NO: 5345410 - DNA, 25 bp, Homo sapien
gaaaatccaccttgtggttgaccat

SEQ ID NO: 5345411 - DNA, 25 bp, Homo sapien
gctggtggtataatggaaaataatc

SEQ ID NO: 5345412 - DNA, 25 bp, Homo sapien
cattggcacgtgagctaaagaggct

SEQ ID NO: 5345413 - DNA, 25 bp, Homo sapien
gaccatctgttagggccttgaattc

SEQ ID NO: 5345414 - DNA, 25 bp, Homo sapien
tttagaacattgtcgatgaaagcaa

SEQ ID NO: 5345415 - DNA, 25 bp, Homo sapien
gaacagcttttagaacattgtcgat

SEQ ID NO: 5345416 - DNA, 25 bp, Homo sapien
cattgtcgatgaaagcaaatatcag

SEQ ID NO: 5345417 - DNA, 25 bp, Homo sapien
cagcttttagaacattgtcgatgaa

SEQ ID NO: 5345418 - DNA, 25 bp, Homo sapien
gaagcggagcttacacttacccaga

SEQ ID NO: 5345419 - DNA, 25 bp, Homo sapien
tcatctggagactcacaggtggtcc

SEQ ID NO: 5345420 - DNA, 25 bp, Homo sapien
gaatgagtgatagccaccctgagtg

SEQ ID NO: 5345421 - DNA, 25 bp, Homo sapien
cagagtgcagcccatgacagtgtga

SEQ ID NO: 5345422 - DNA, 25 bp, Homo sapien
tggtagcagggagaatacagacagc

SEQ ID NO: 5345423 - DNA, 25 bp, Homo sapien
cagacagccttacacatctctgtga

SEQ ID NO: 5345424 - DNA, 25 bp, Homo sapien
tgaacctaaaggtgaatccaaactg

SEQ ID NO: 5345425 - DNA, 25 bp, Homo sapien
tgtctgaaacagtagccactcccca

SEQ ID NO: 5345426 - DNA, 25 bp, Homo sapien
cagccctccattcctcttcccctca

SEQ ID NO: 5345427 - DNA, 25 bp, Homo sapien
ctccattcctcttcccctcatagat

SEQ ID NO: 5345428 - DNA, 25 bp, Homo sapien
agccctccattcctcttcccctcat

SEQ ID NO: 5345429 - DNA, 25 bp, Homo sapien
ccctccattcctcttcccctcatag

SEQ ID NO: 5345430 - DNA, 25 bp, Homo sapien
attgcttccaaaagacgtgagcaag

SEQ ID NO: 5345431 - DNA, 25 bp, Homo sapien
gcttccaaaagacgtgagcaagaga

SEQ ID NO: 5345432 - DNA, 25 bp, Homo sapien
tatctgcaaggctggcgggggttaa

SEQ ID NO: 5345433 - DNA, 25 bp, Homo sapien
tggcgggggttaaggatttcattgc

SEQ ID NO: 5345434 - DNA, 25 bp, Homo sapien
gttgaggatcgtccccaacagcttt

SEQ ID NO: 5345435 - DNA, 25 bp, Homo sapien
gttgtggttgaggatcgtccccaac

SEQ ID NO: 5345436 - DNA, 25 bp, Homo sapien
cctttcaagcttcaattgtgcaaat

SEQ ID NO: 5345437 - DNA, 25 bp, Homo sapien
tggttgaggatcgtccccaacagct

SEQ ID NO: 5345438 - DNA, 25 bp, Homo sapien
cagcagcatcgtgaagaagccagtt

SEQ ID NO: 5345439 - DNA, 25 bp, Homo sapien
actcattgttgtgcggcttcttccc

SEQ ID NO: 5345440 - DNA, 25 bp, Homo sapien
gcattccatctctagtcttcgggca

SEQ ID NO: 5345441 - DNA, 25 bp, Homo sapien
gcttcttcccctttgcgatctggtg

SEQ ID NO: 5345442 - DNA, 25 bp, Homo sapien
tgtgatttgaggcttgtcaccactt

SEQ ID NO: 5345443 - DNA, 25 bp, Homo sapien
tgtcaccacttgtagagtttttgct

SEQ ID NO: 5345444 - DNA, 25 bp, Homo sapien
gcttgatcgtgtgttgtttgtccag

SEQ ID NO: 5345445 - DNA, 25 bp, Homo sapien
tgtccagctttggttaaggccgctt

SEQ ID NO: 5345446 - DNA, 25 bp, Homo sapien
gatgagtccatcataaatcttgtgg

SEQ ID NO: 5345447 - DNA, 25 bp, Homo sapien
gttttgtcgcaaagtcaggtttgca

SEQ ID NO: 5345448 - DNA, 25 bp, Homo sapien
tggatgagtccatcataaatcttgt

SEQ ID NO: 5345449 - DNA, 25 bp, Homo sapien
tttcatcattgtcgtgttttgtcgc

SEQ ID NO: 5345450 - DNA, 25 bp, Homo sapien
tagttgagaaatagccccgcagggt

SEQ ID NO: 5345451 - DNA, 25 bp, Homo sapien
cagggtaggtgatggcgtactcccc

SEQ ID NO: 5345452 - DNA, 25 bp, Homo sapien
cattctatctggaacccggaaggtg

SEQ ID NO: 5345453 - DNA, 25 bp, Homo sapien
gtgatggcgtactccccacttgcca

SEQ ID NO: 5345454 - DNA, 25 bp, Homo sapien
gtccagctgcaaggctctagttctg

SEQ ID NO: 5345455 - DNA, 25 bp, Homo sapien
aaggctctagttctgggatctagtc

SEQ ID NO: 5345456 - DNA, 25 bp, Homo sapien
cactgggctggtggacatgttccct

SEQ ID NO: 5345457 - DNA, 25 bp, Homo sapien
tcttggtgacggaggatcctggaac

SEQ ID NO: 5345458 - DNA, 25 bp, Homo sapien
ttcctttcatagtccaggaacacac

SEQ ID NO: 5345459 - DNA, 25 bp, Homo sapien
cttcctttcatagtccaggaacaca

SEQ ID NO: 5345460 - DNA, 25 bp, Homo sapien
agggttgatcctcgaggcctgtgcc

SEQ ID NO: 5345461 - DNA, 25 bp, Homo sapien
ctgtgcctctctccgggcacccgta

SEQ ID NO: 5345462 - DNA, 25 bp, Homo sapien
ggttgatcctcgaggcctgtgcctc

SEQ ID NO: 5345463 - DNA, 25 bp, Homo sapien
gggcacccgtaacaccctgctccat

SEQ ID NO: 5345464 - DNA, 25 bp, Homo sapien
caagtgcgagcgaaactgcgtctcc

SEQ ID NO: 5345465 - DNA, 25 bp, Homo sapien
gtgacaagtgcgagcgaaactgcgt

SEQ ID NO: 5345466 - DNA, 25 bp, Homo sapien
ataagataaaatttacggctgggct

SEQ ID NO: 5345467 - DNA, 25 bp, Homo sapien
tgcgagcgaaactgcgtctccaaaa

SEQ ID NO: 5345468 - DNA, 25 bp, Homo sapien
cacgatgcatgtgagtcaggtcttc

SEQ ID NO: 5345469 - DNA, 25 bp, Homo sapien
tcgcatgtgtgcctctaatggcagt

SEQ ID NO: 5345470 - DNA, 25 bp, Homo sapien
ggtcttctgcgtgtcctctgaatca

SEQ ID NO: 5345471 - DNA, 25 bp, Homo sapien
ggaaagcagatacatccgccacgat

SEQ ID NO: 5345472 - DNA, 25 bp, Homo sapien
ggtgtgcacactggcgggccttcac

SEQ ID NO: 5345473 - DNA, 25 bp, Homo sapien
ggttgcagcgacaaggtccctgcca

SEQ ID NO: 5345474 - DNA, 25 bp, Homo sapien
aggtccctgccaactgcggtgtgca

SEQ ID NO: 5345475 - DNA, 25 bp, Homo sapien
ctttcacccctgctggttgcagcga

SEQ ID NO: 5345476 - DNA, 25 bp, Homo sapien
tcccttaaaatccagctctcgaaat

SEQ ID NO: 5345477 - DNA, 25 bp, Homo sapien
cccttaaaatccagctctcgaaatg

SEQ ID NO: 5345478 - DNA, 25 bp, Homo sapien
ctcccttaaaatccagctctcgaaa

SEQ ID NO: 5345479 - DNA, 25 bp, Homo sapien
agactgaaggccacccagaggcttt

SEQ ID NO: 5345480 - DNA, 25 bp, Homo sapien
gaggctttggtcaccaagggtggca

SEQ ID NO: 5345481 - DNA, 25 bp, Homo sapien
aggctttggtcaccaagggtggcat

SEQ ID NO: 5345482 - DNA, 25 bp, Homo sapien
agctggctgcagactgaaggccacc

SEQ ID NO: 5345483 - DNA, 25 bp, Homo sapien
ccagccagctggatgcatgtaaaca

SEQ ID NO: 5345484 - DNA, 25 bp, Homo sapien
gactccgagtgcctgccatggtttg

SEQ ID NO: 5345485 - DNA, 25 bp, Homo sapien
gattccagagtggttggcctacaca

SEQ ID NO: 5345486 - DNA, 25 bp, Homo sapien
tagagcacggtcctttgcgtccctg

SEQ ID NO: 5345487 - DNA, 25 bp, Homo sapien
cctctgctgctccgtgttcctgtct

SEQ ID NO: 5345488 - DNA, 25 bp, Homo sapien
tctgctgctccgtgttcctgtctag

SEQ ID NO: 5345489 - DNA, 25 bp, Homo sapien
gtggtcactgcaataattgactgaa

SEQ ID NO: 5345490 - DNA, 25 bp, Homo sapien
ctgctgctccgtgttcctgtctaga

SEQ ID NO: 5345491 - DNA, 25 bp, Homo sapien
tcacagatccatgttgcagctggga

SEQ ID NO: 5345492 - DNA, 25 bp, Homo sapien
gtctttcacagatccatgttgcagc

SEQ ID NO: 5345493 - DNA, 25 bp, Homo sapien
aaatcaatgtgctggatgccctggt

SEQ ID NO: 5345494 - DNA, 25 bp, Homo sapien
gctaaggcgagtggggacaaatcaa

SEQ ID NO: 5345495 - DNA, 25 bp, Homo sapien
tgcagtgttcactaagcgcccacag

SEQ ID NO: 5345496 - DNA, 25 bp, Homo sapien
tctctgtgacctgctcatatgacga

SEQ ID NO: 5345497 - DNA, 25 bp, Homo sapien
agtgttcactaagcgcccacaggca

SEQ ID NO: 5345498 - DNA, 25 bp, Homo sapien
aaagtcgagcatgcttcattcacag

SEQ ID NO: 5345499 - DNA, 25 bp, Homo sapien
caagaattttagcaccctgaggact

SEQ ID NO: 5345500 - DNA, 25 bp, Homo sapien
tggttaaagaggcagaagggcacaa

SEQ ID NO: 5345501 - DNA, 25 bp, Homo sapien
gagctccttaagatttatgacccag

SEQ ID NO: 5345502 - DNA, 25 bp, Homo sapien
agttgtttgcaaagaaagggagctc

SEQ ID NO: 5345503 - DNA, 25 bp, Homo sapien
gaaggtctgtctggttatggcttta

SEQ ID NO: 5345504 - DNA, 25 bp, Homo sapien
gatagatgacttctgtatagtcaca

SEQ ID NO: 5345505 - DNA, 25 bp, Homo sapien
catctgtggcctcaaagagcccgtt

SEQ ID NO: 5345506 - DNA, 25 bp, Homo sapien
taaccagatgacctgaatcaagggt

SEQ ID NO: 5345507 - DNA, 25 bp, Homo sapien
tctccaaggcctcgtccacgtgccc

SEQ ID NO: 5345508 - DNA, 25 bp, Homo sapien
ctccaaggcctcgtccacgtgcccc

SEQ ID NO: 5345509 - DNA, 25 bp, Homo sapien
aagtagcctgtgctttggtctggtc

SEQ ID NO: 5345510 - DNA, 25 bp, Homo sapien
gactgcctgctgtttacgatgagaa

SEQ ID NO: 5345511 - DNA, 25 bp, Homo sapien
tggtctggtctcctgacgcccggtt

SEQ ID NO: 5345512 - DNA, 25 bp, Homo sapien
tcgttgtggtaaatagactgcctgc

SEQ ID NO: 5345513 - DNA, 25 bp, Homo sapien
tcacagatgtattgccgcagacacc

SEQ ID NO: 5345514 - DNA, 25 bp, Homo sapien
gaacctcacagatgtattgccgcag

SEQ ID NO: 5345515 - DNA, 25 bp, Homo sapien
tctggaacctcacagatgtattgcc

SEQ ID NO: 5345516 - DNA, 25 bp, Homo sapien
cctcacagatgtattgccgcagaca

SEQ ID NO: 5345517 - DNA, 25 bp, Homo sapien
ttccatagacgtcacagtatatatc

SEQ ID NO: 5345518 - DNA, 25 bp, Homo sapien
tgaacacaattccacactagagtgg

SEQ ID NO: 5345519 - DNA, 25 bp, Homo sapien
gaagcatctcttccatagacgtcac

SEQ ID NO: 5345520 - DNA, 25 bp, Homo sapien
ggagcggtcactcctagacctgaag

SEQ ID NO: 5345521 - DNA, 25 bp, Homo sapien
aattccccagtaggacaggaaagca

SEQ ID NO: 5345522 - DNA, 25 bp, Homo sapien
agctgcagcgcaggaattccccagt

SEQ ID NO: 5345523 - DNA, 25 bp, Homo sapien
agccaactgtttacagcgtccaagc

SEQ ID NO: 5345524 - DNA, 25 bp, Homo sapien
gtttacagcgtccaagctcttcctg

SEQ ID NO: 5345525 - DNA, 25 bp, Homo sapien
ggacccatctaccatgggaggactg

SEQ ID NO: 5345526 - DNA, 25 bp, Homo sapien
tgatcaggacccatctaccatggga

SEQ ID NO: 5345527 - DNA, 25 bp, Homo sapien
tctgctgcccatagagcagctcatc

SEQ ID NO: 5345528 - DNA, 25 bp, Homo sapien
gagttgccttcaggcaacttgggag

SEQ ID NO: 5345529 - DNA, 25 bp, Homo sapien
tctcatggataatctgaattgtaca

SEQ ID NO: 5345530 - DNA, 25 bp, Homo sapien
tgcatctcatggataatctgaattg

SEQ ID NO: 5345531 - DNA, 25 bp, Homo sapien
catggataatctgaattgtacatct

SEQ ID NO: 5345532 - DNA, 25 bp, Homo sapien
ttctttgcatctcatggataatctg

SEQ ID NO: 5345533 - DNA, 25 bp, Homo sapien
cagagcaagtgaccatggcatgcat

SEQ ID NO: 5345534 - DNA, 25 bp, Homo sapien
cttcgaaatttaccacatttgtcat

SEQ ID NO: 5345535 - DNA, 25 bp, Homo sapien
tgacttcgaaatttaccacatttgt

SEQ ID NO: 5345536 - DNA, 25 bp, Homo sapien
gacttcgaaatttaccacatttgtc

SEQ ID NO: 5345537 - DNA, 25 bp, Homo sapien
ctgacttcgaaatttaccacatttg

SEQ ID NO: 5345538 - DNA, 25 bp, Homo sapien
catgtggttgccaagtgcttgcagc

SEQ ID NO: 5345539 - DNA, 25 bp, Homo sapien
ctctcctgggaccaactctccctgg

SEQ ID NO: 5345540 - DNA, 25 bp, Homo sapien
gtctctcttggccacgattctttcc

SEQ ID NO: 5345541 - DNA, 25 bp, Homo sapien
tctccctggccgcagtctctcttgg

SEQ ID NO: 5345542 - DNA, 25 bp, Homo sapien
gaggtatgggttttctgttgacaca

SEQ ID NO: 5345543 - DNA, 25 bp, Homo sapien
gatgtgacctgtggtctaaaatgaa

SEQ ID NO: 5345544 - DNA, 25 bp, Homo sapien
tgtccgggttcccactcaagtccat

SEQ ID NO: 5345545 - DNA, 25 bp, Homo sapien
gatgaagctaagttctgattggttg

SEQ ID NO: 5345546 - DNA, 25 bp, Homo sapien
ggagtgtgcaatatcagcttcctcc

SEQ ID NO: 5345547 - DNA, 25 bp, Homo sapien
agatgccgatgggtccattctgggc

SEQ ID NO: 5345548 - DNA, 25 bp, Homo sapien
aagggagtgtgcaatatcagcttcc

SEQ ID NO: 5345549 - DNA, 25 bp, Homo sapien
cttcctccagagagatgccgatggg

SEQ ID NO: 5345550 - DNA, 25 bp, Homo sapien
ctgcagaagcccacaggaaaggggc

SEQ ID NO: 5345551 - DNA, 25 bp, Homo sapien
ggcagccaggggttgaaggagaaaa

SEQ ID NO: 5345552 - DNA, 25 bp, Homo sapien
gaggggtggggatgagacactccat

SEQ ID NO: 5345553 - DNA, 25 bp, Homo sapien
gagaggggtggggatgagacactcc

SEQ ID NO: 5345554 - DNA, 25 bp, Homo sapien
tacatatattcttggtactaaacct

SEQ ID NO: 5345555 - DNA, 25 bp, Homo sapien
ctttagctgcgtgtattagtccatt

SEQ ID NO: 5345556 - DNA, 25 bp, Homo sapien
gatattatgaatatcttgtcccagt

SEQ ID NO: 5345557 - DNA, 25 bp, Homo sapien
tagtcaacaatttaagtgcttaaga

SEQ ID NO: 5345558 - DNA, 25 bp, Homo sapien
tgcagcctaattcctcgctggtttc

SEQ ID NO: 5345559 - DNA, 25 bp, Homo sapien
tcatccatggataacaacaggatgg

SEQ ID NO: 5345560 - DNA, 25 bp, Homo sapien
tgctgctgccgcttgcagcctaatt

SEQ ID NO: 5345561 - DNA, 25 bp, Homo sapien
ccatggataacaacaggatggcatg

SEQ ID NO: 5345562 - DNA, 25 bp, Homo sapien
agggagacgggcatacaccggtggc

SEQ ID NO: 5345563 - DNA, 25 bp, Homo sapien
ggctcagggagacgggcatacaccg

SEQ ID NO: 5345564 - DNA, 25 bp, Homo sapien
aggctcagggagacgggcatacacc

SEQ ID NO: 5345565 - DNA, 25 bp, Homo sapien
ctcagggagacgggcatacaccggt

SEQ ID NO: 5345566 - DNA, 25 bp, Homo sapien
agggtcctctagtcccggtgtccag

SEQ ID NO: 5345567 - DNA, 25 bp, Homo sapien
gaatggtatcttgcctgcggtctgc

SEQ ID NO: 5345568 - DNA, 25 bp, Homo sapien
ccttgtatagaagaggtgtggccac

SEQ ID NO: 5345569 - DNA, 25 bp, Homo sapien
gggacccacaggctacgtcacatag

SEQ ID NO: 5345570 - DNA, 25 bp, Homo sapien
atccccatacatggctgtggaaaat

SEQ ID NO: 5345571 - DNA, 25 bp, Homo sapien
cacgggtgtggaaggtgattcacta

SEQ ID NO: 5345572 - DNA, 25 bp, Homo sapien
ccccagcagtcatagaagacatggt

SEQ ID NO: 5345573 - DNA, 25 bp, Homo sapien
gattcactagggagttggctcttag

SEQ ID NO: 5345574 - DNA, 25 bp, Homo sapien
ggctcttagcttagtgggtcatgta

SEQ ID NO: 5345575 - DNA, 25 bp, Homo sapien
cctgtaccatggacttccacagcaa

SEQ ID NO: 5345576 - DNA, 25 bp, Homo sapien
ttttgcagagtctgctgtgactgcc

SEQ ID NO: 5345577 - DNA, 25 bp, Homo sapien
tctccatccaaagggattgcatctg

SEQ ID NO: 5345578 - DNA, 25 bp, Homo sapien
ttgatccttagaagccaaccaggat

SEQ ID NO: 5345579 - DNA, 25 bp, Homo sapien
agctgaacacttagtgccctgtccc

SEQ ID NO: 5345580 - DNA, 25 bp, Homo sapien
tgggatcaagaatgaactggaagta

SEQ ID NO: 5345581 - DNA, 25 bp, Homo sapien
actgggagctcagagcgagtggctg

SEQ ID NO: 5345582 - DNA, 25 bp, Homo sapien
aatgaactggaagtaggatgccgcc

SEQ ID NO: 5345583 - DNA, 25 bp, Homo sapien
gtgtagcatgaacaggccaggctcc

SEQ ID NO: 5345584 - DNA, 25 bp, Homo sapien
tgagggggaacacctctgtcagcct

SEQ ID NO: 5345585 - DNA, 25 bp, Homo sapien
ccttagatgcacaggttgcaccagg

SEQ ID NO: 5345586 - DNA, 25 bp, Homo sapien
cagttgagcctccttagatgcacag

SEQ ID NO: 5345587 - DNA, 25 bp, Homo sapien
ctggaggcagcaggaggctggagcc

SEQ ID NO: 5345588 - DNA, 25 bp, Homo sapien
aggcagcaggaggctggagccacat

SEQ ID NO: 5345589 - DNA, 25 bp, Homo sapien
gaggcagcaggaggctggagccaca

SEQ ID NO: 5345590 - DNA, 25 bp, Homo sapien
tggaggcagcaggaggctggagcca

SEQ ID NO: 5345591 - DNA, 25 bp, Homo sapien
tacgtgggcacgattctttcctggg

SEQ ID NO: 5345592 - DNA, 25 bp, Homo sapien
tacagttggctagtaatcctggctt

SEQ ID NO: 5345593 - DNA, 25 bp, Homo sapien
tcctgtgcgcttgctacagttggct

SEQ ID NO: 5345594 - DNA, 25 bp, Homo sapien
gtagcccctacgtgggcacgattct

SEQ ID NO: 5345595 - DNA, 25 bp, Homo sapien
ctttgtctccaggggaaagagccac

SEQ ID NO: 5345596 - DNA, 25 bp, Homo sapien
tgtctccaggggaaagagccaccct

SEQ ID NO: 5345597 - DNA, 25 bp, Homo sapien
cctcatctatggtgcatccaccagg

SEQ ID NO: 5345598 - DNA, 25 bp, Homo sapien
ggctcctcatctatggtgcatccac

SEQ ID NO: 5345599 - DNA, 25 bp, Homo sapien
tcaccaggcgtgactggctgttgtt

SEQ ID NO: 5345600 - DNA, 25 bp, Homo sapien
gggcctgagagggatcgccctggcc

SEQ ID NO: 5345601 - DNA, 25 bp, Homo sapien
gaggcatcaccaggcgtgactggct

SEQ ID NO: 5345602 - DNA, 25 bp, Homo sapien
ggcctgagagggatcgccctggcca

SEQ ID NO: 5345603 - DNA, 25 bp, Homo sapien
aagagtgtgacgcgttcacacgcac

SEQ ID NO: 5345604 - DNA, 25 bp, Homo sapien
tggaaacctctaccgcggcagaggc

SEQ ID NO: 5345605 - DNA, 25 bp, Homo sapien
gtggaaacctctaccgcggcagagg

SEQ ID NO: 5345606 - DNA, 25 bp, Homo sapien
cttcaaatcaaggagacgggaggcc

SEQ ID NO: 5345607 - DNA, 25 bp, Homo sapien
catgggaggccagcttcattccagt

SEQ ID NO: 5345608 - DNA, 25 bp, Homo sapien
ctctgagaagtcaagcaaaagagaa

SEQ ID NO: 5345609 - DNA, 25 bp, Homo sapien
gaaaaatggcataataaccaacgtg

SEQ ID NO: 5345610 - DNA, 25 bp, Homo sapien
ctgtgggtctgtgcctcagaggctg

SEQ ID NO: 5345611 - DNA, 25 bp, Homo sapien
ggccctgtgcgtggaggcgtccgga

SEQ ID NO: 5345612 - DNA, 25 bp, Homo sapien
tcctgggcctgtgtactgtgggtct

SEQ ID NO: 5345613 - DNA, 25 bp, Homo sapien
caggaattggcacctgggtgtggag

SEQ ID NO: 5345614 - DNA, 25 bp, Homo sapien
gacaatccccaggtctgacactggc

SEQ ID NO: 5345615 - DNA, 25 bp, Homo sapien
tgacaatccccaggtctgacactgg

SEQ ID NO: 5345616 - DNA, 25 bp, Homo sapien
ctgacaatccccaggtctgacactg

SEQ ID NO: 5345617 - DNA, 25 bp, Homo sapien
gaccctggccttgctctggatcctc

SEQ ID NO: 5345618 - DNA, 25 bp, Homo sapien
atatgttttggaatcgaatatacca

SEQ ID NO: 5345619 - DNA, 25 bp, Homo sapien
tatgttttggaatcgaatataccat

SEQ ID NO: 5345620 - DNA, 25 bp, Homo sapien
ctgcttttgaatggagttgtacata

SEQ ID NO: 5345621 - DNA, 25 bp, Homo sapien
tccaggcacaagttagtactaaaaa

SEQ ID NO: 5345622 - DNA, 25 bp, Homo sapien
aacatgctttttcccttcatgaaca

SEQ ID NO: 5345623 - DNA, 25 bp, Homo sapien
gaagagtcactgtttatggtagaca

SEQ ID NO: 5345624 - DNA, 25 bp, Homo sapien
gcctgaagagcacctgaatggcagc

SEQ ID NO: 5345625 - DNA, 25 bp, Homo sapien
ctagctggatcaagagagctcttct

SEQ ID NO: 5345626 - DNA, 25 bp, Homo sapien
ttctagctggatcaagagagctctt

SEQ ID NO: 5345627 - DNA, 25 bp, Homo sapien
ctgaagagcacctgaatggcagcca

SEQ ID NO: 5345628 - DNA, 25 bp, Homo sapien
ctggctggacaaccacttctggctg

SEQ ID NO: 5345629 - DNA, 25 bp, Homo sapien
ctgcttgaggagcgccaaagcccag

SEQ ID NO: 5345630 - DNA, 25 bp, Homo sapien
caggtgctggctggacaaccacttc

SEQ ID NO: 5345631 - DNA, 25 bp, Homo sapien
cttgaggagcgccaaagcccaggtg

SEQ ID NO: 5345632 - DNA, 25 bp, Homo sapien
gagccacttcatggtcccaaaccag

SEQ ID NO: 5345633 - DNA, 25 bp, Homo sapien
ctcaaggttgtaattatttgcagcc

SEQ ID NO: 5345634 - DNA, 25 bp, Homo sapien
ccaaagtgctgcttgggctcaaggt

SEQ ID NO: 5345635 - DNA, 25 bp, Homo sapien
cgagccacttcatggtcccaaacca

SEQ ID NO: 5345636 - DNA, 25 bp, Homo sapien
ctggagcagtggacctccttgctta

SEQ ID NO: 5345637 - DNA, 25 bp, Homo sapien
tggacctccttgcttactttgaatt

SEQ ID NO: 5345638 - DNA, 25 bp, Homo sapien
gcagtggacctccttgcttactttg

SEQ ID NO: 5345639 - DNA, 25 bp, Homo sapien
ggagcagtggacctccttgcttact

SEQ ID NO: 5345640 - DNA, 25 bp, Homo sapien
gggactggacagggatgccacaggg

SEQ ID NO: 5345641 - DNA, 25 bp, Homo sapien
ctgggtgatgacagggactggacag

SEQ ID NO: 5345642 - DNA, 25 bp, Homo sapien
agggactggacagggatgccacagg

SEQ ID NO: 5345643 - DNA, 25 bp, Homo sapien
actggacagggatgccacaggggcc

SEQ ID NO: 5345644 - DNA, 25 bp, Homo sapien
tcctggagtgtctcctctttctctc

SEQ ID NO: 5345645 - DNA, 25 bp, Homo sapien
ctgcaggtcttcctggagtgtctcc

SEQ ID NO: 5345646 - DNA, 25 bp, Homo sapien
ggtcttcctggagtgtctcctcttt

SEQ ID NO: 5345647 - DNA, 25 bp, Homo sapien
cttcctggagtgtctcctctttctc

SEQ ID NO: 5345648 - DNA, 25 bp, Homo sapien
gtgaggttgatcagtctcccctgga

SEQ ID NO: 5345649 - DNA, 25 bp, Homo sapien
gttgatcagtctcccctggaaggcc

SEQ ID NO: 5345650 - DNA, 25 bp, Homo sapien
agtctcccctggaaggccaacagct

SEQ ID NO: 5345651 - DNA, 25 bp, Homo sapien
atcagtctcccctggaaggccaaca

SEQ ID NO: 5345652 - DNA, 25 bp, Homo sapien
ctagccaaaacctagtgccttggat

SEQ ID NO: 5345653 - DNA, 25 bp, Homo sapien
aacctagccaaaacctagtgccttg

SEQ ID NO: 5345654 - DNA, 25 bp, Homo sapien
cctagccaaaacctagtgccttgga

SEQ ID NO: 5345655 - DNA, 25 bp, Homo sapien
gcaacctagccaaaacctagtgcct

SEQ ID NO: 5345656 - DNA, 25 bp, Homo sapien
agattcagtgctgggagtccagtgt

SEQ ID NO: 5345657 - DNA, 25 bp, Homo sapien
ccagattcagtgctgggagtccagt

SEQ ID NO: 5345658 - DNA, 25 bp, Homo sapien
cagattcagtgctgggagtccagtg

SEQ ID NO: 5345659 - DNA, 25 bp, Homo sapien
ccaatacaggggctggatatgaaca

SEQ ID NO: 5345660 - DNA, 25 bp, Homo sapien
gatatgaacaggcaacagctgggtt

SEQ ID NO: 5345661 - DNA, 25 bp, Homo sapien
tacaggggctggatatgaacaggca

SEQ ID NO: 5345662 - DNA, 25 bp, Homo sapien
tcttgaccccaatacaggggctgga

SEQ ID NO: 5345663 - DNA, 25 bp, Homo sapien
ttagtgagcattgtgtccgctcagg

SEQ ID NO: 5345664 - DNA, 25 bp, Homo sapien
cacttagtgagcattgtgtccgctc

SEQ ID NO: 5345665 - DNA, 25 bp, Homo sapien
tagtgagcattgtgtccgctcaggg

SEQ ID NO: 5345666 - DNA, 25 bp, Homo sapien
tgggcatccgtctcctctgcagcat

SEQ ID NO: 5345667 - DNA, 25 bp, Homo sapien
ggcctctgatcagtgatgaccttgg

SEQ ID NO: 5345668 - DNA, 25 bp, Homo sapien
tctgatcagtgatgaccttggtatg

SEQ ID NO: 5345669 - DNA, 25 bp, Homo sapien
aggcctctgatcagtgatgaccttg

SEQ ID NO: 5345670 - DNA, 25 bp, Homo sapien
cctctgatcagtgatgaccttggta

SEQ ID NO: 5345671 - DNA, 25 bp, Homo sapien
tccccagatagtgaagctgcacaaa

SEQ ID NO: 5345672 - DNA, 25 bp, Homo sapien
gggccaagcgtgaaaccagtgatcg

SEQ ID NO: 5345673 - DNA, 25 bp, Homo sapien
tcttgccggccacaaaaggttatag

SEQ ID NO: 5345674 - DNA, 25 bp, Homo sapien
caaaaggttatagccagaattccac

SEQ ID NO: 5345675 - DNA, 25 bp, Homo sapien
gggggtgctgacctcagtggggtgt

SEQ ID NO: 5345676 - DNA, 25 bp, Homo sapien
tggggggtgctgacctcagtggggt

SEQ ID NO: 5345677 - DNA, 25 bp, Homo sapien
ggtggggggtgctgacctcagtggg

SEQ ID NO: 5345678 - DNA, 25 bp, Homo sapien
ggggtggggggtgctgacctcagtg

SEQ ID NO: 5345679 - DNA, 25 bp, Homo sapien
gaaggatttgcacagggtcccggct

SEQ ID NO: 5345680 - DNA, 25 bp, Homo sapien
gcttgtgatcagctcacctgctcca

SEQ ID NO: 5345681 - DNA, 25 bp, Homo sapien
gcttctgctatttatgagctccatg

SEQ ID NO: 5345682 - DNA, 25 bp, Homo sapien
catcttagcttctgggctaagacac

SEQ ID NO: 5345683 - DNA, 25 bp, Homo sapien
taggaagacaggcagtctccgcagg

SEQ ID NO: 5345684 - DNA, 25 bp, Homo sapien
aagacgccccactgctttgcggcag

SEQ ID NO: 5345685 - DNA, 25 bp, Homo sapien
ctgctttgcggcagacacaggtgga

SEQ ID NO: 5345686 - DNA, 25 bp, Homo sapien
tctgtagcttcagcatggacagtgt

SEQ ID NO: 5345687 - DNA, 25 bp, Homo sapien
agagggtcttccctccgtgcagcag

SEQ ID NO: 5345688 - DNA, 25 bp, Homo sapien
ggtcttccctccgtgcagcaggaac

SEQ ID NO: 5345689 - DNA, 25 bp, Homo sapien
aaagagggtcttccctccgtgcagc

SEQ ID NO: 5345690 - DNA, 25 bp, Homo sapien
agggtcttccctccgtgcagcagga

SEQ ID NO: 5345691 - DNA, 25 bp, Homo sapien
gactggccgtttcccaggcacagca

SEQ ID NO: 5345692 - DNA, 25 bp, Homo sapien
tctctctgattgtggggactggccg

SEQ ID NO: 5345693 - DNA, 25 bp, Homo sapien
gattgtggggactggccgtttccca

SEQ ID NO: 5345694 - DNA, 25 bp, Homo sapien
gggactggccgtttcccaggcacag

SEQ ID NO: 5345695 - DNA, 25 bp, Homo sapien
ctcagtgtagaggagactctggaat

SEQ ID NO: 5345696 - DNA, 25 bp, Homo sapien
tcagtgtagaggagactctggaatt

SEQ ID NO: 5345697 - DNA, 25 bp, Homo sapien
cagtgtagaggagactctggaattc

SEQ ID NO: 5345698 - DNA, 25 bp, Homo sapien
ggccccgagtccactcttggggtca

SEQ ID NO: 5345699 - DNA, 25 bp, Homo sapien
ttgaaatctccagtgtgctcgccat

SEQ ID NO: 5345700 - DNA, 25 bp, Homo sapien
aatctccagtgtgctcgccatgagg

SEQ ID NO: 5345701 - DNA, 25 bp, Homo sapien
ggtcctagcccacaggctttttgaa

SEQ ID NO: 5345702 - DNA, 25 bp, Homo sapien
gtctgtgattaaggacgactctttt

SEQ ID NO: 5345703 - DNA, 25 bp, Homo sapien
caatcactggcatagtttacttttt

SEQ ID NO: 5345704 - DNA, 25 bp, Homo sapien
gcttccttggttcaaagccagtgtg

SEQ ID NO: 5345705 - DNA, 25 bp, Homo sapien
gggctgcagcagtaagcctgcttcc

SEQ ID NO: 5345706 - DNA, 25 bp, Homo sapien
gtaagcctgcttccttggttcaaag

SEQ ID NO: 5345707 - DNA, 25 bp, Homo sapien
tctcagtagtgtgcaacttggcctt

SEQ ID NO: 5345708 - DNA, 25 bp, Homo sapien
ccagggggtgcatggcagtctctca

SEQ ID NO: 5345709 - DNA, 25 bp, Homo sapien
tcagcagtcactgccgtggccatga

SEQ ID NO: 5345710 - DNA, 25 bp, Homo sapien
catgtcgaatgttctgaggcctcca

SEQ ID NO: 5345711 - DNA, 25 bp, Homo sapien
tccgatgtaaccgaagacagacatg

SEQ ID NO: 5345712 - DNA, 25 bp, Homo sapien
tcaatggattgaacccacggatgct

SEQ ID NO: 5345713 - DNA, 25 bp, Homo sapien
gtcaggactctgcttttcaatggat

SEQ ID NO: 5345714 - DNA, 25 bp, Homo sapien
caccattttccacgagtcagcagca

SEQ ID NO: 5345715 - DNA, 25 bp, Homo sapien
cattccagacaagcggtgcctgagc

SEQ ID NO: 5345716 - DNA, 25 bp, Homo sapien
tgagcccgtgcctgtcttcagatct

SEQ ID NO: 5345717 - DNA, 25 bp, Homo sapien
ccttcgttgtaagaatgtagatgcc

SEQ ID NO: 5345718 - DNA, 25 bp, Homo sapien
gatggtcgctgctttttaagtttca

SEQ ID NO: 5345719 - DNA, 25 bp, Homo sapien
aaatcaggaagaacgtaaaaatgct

SEQ ID NO: 5345720 - DNA, 25 bp, Homo sapien
cactcagtctttgaggcctgacttg

SEQ ID NO: 5345721 - DNA, 25 bp, Homo sapien
caggctgttagtattccgatgaagc

SEQ ID NO: 5345722 - DNA, 25 bp, Homo sapien
gattgcaggagcgtattttacgtcc

SEQ ID NO: 5345723 - DNA, 25 bp, Homo sapien
gttatttggaaatcatcacagtatc

SEQ ID NO: 5345724 - DNA, 25 bp, Homo sapien
tctgtcctcacgcttcctgtctaaa

SEQ ID NO: 5345725 - DNA, 25 bp, Homo sapien
gacctaccctggagtggaagcagct

SEQ ID NO: 5345726 - DNA, 25 bp, Homo sapien
ctaaagccagctagagtaaatttct

SEQ ID NO: 5345727 - DNA, 25 bp, Homo sapien
gaataccctcctccaagtggtccaa

SEQ ID NO: 5345728 - DNA, 25 bp, Homo sapien
tgttgtcaaccacaagtccatgttg

SEQ ID NO: 5345729 - DNA, 25 bp, Homo sapien
agtggtccaaagtccttgaagctac

SEQ ID NO: 5345730 - DNA, 25 bp, Homo sapien
caagtagaccctggttacagagaag

SEQ ID NO: 5345731 - DNA, 25 bp, Homo sapien
ttgcaggcccctaacagtatcatgg

SEQ ID NO: 5345732 - DNA, 25 bp, Homo sapien
tgccaggaaatgtggacctaactct

SEQ ID NO: 5345733 - DNA, 25 bp, Homo sapien
aatggacatgtaggccccaagaggg

SEQ ID NO: 5345734 - DNA, 25 bp, Homo sapien
gcagcttcggaattgtgaattaccc

SEQ ID NO: 5345735 - DNA, 25 bp, Homo sapien
cttaggtgatgccaggaaacctggg

SEQ ID NO: 5345736 - DNA, 25 bp, Homo sapien
ttgggcttaggtgatgccaggaaac

SEQ ID NO: 5345737 - DNA, 25 bp, Homo sapien
ccattgtctgcggtggctgctacca

SEQ ID NO: 5345738 - DNA, 25 bp, Homo sapien
cattgcaacttcgacacctgcagtc

SEQ ID NO: 5345739 - DNA, 25 bp, Homo sapien
gcctgctccagttggggtggacccc

SEQ ID NO: 5345740 - DNA, 25 bp, Homo sapien
ctctgggagctgctcagggcctgct

SEQ ID NO: 5345741 - DNA, 25 bp, Homo sapien
tcagtgtgtggggggctctgggagc

SEQ ID NO: 5345742 - DNA, 25 bp, Homo sapien
ctgctcagggcctgctccagttggg

SEQ ID NO: 5345743 - DNA, 25 bp, Homo sapien
tgtcctctaactgtaggctccgctg

SEQ ID NO: 5345744 - DNA, 25 bp, Homo sapien
tctaactgtaggctccgctgctgga

SEQ ID NO: 5345745 - DNA, 25 bp, Homo sapien
ctccgctgctggaaatgtgtcgctg

SEQ ID NO: 5345746 - DNA, 25 bp, Homo sapien
tccgctgctggaaatgtgtcgctgc

SEQ ID NO: 5345747 - DNA, 25 bp, Homo sapien
tgtctgattgatagggcaccctctg

SEQ ID NO: 5345748 - DNA, 25 bp, Homo sapien
tgggctttgtcctgcttgctgctag

SEQ ID NO: 5345749 - DNA, 25 bp, Homo sapien
gcaaatgcacccagcaatgtctgat

SEQ ID NO: 5345750 - DNA, 25 bp, Homo sapien
gccactgtgtgagctcccagtctca

SEQ ID NO: 5345751 - DNA, 25 bp, Homo sapien
actgtccagccttgtggtatttgca

SEQ ID NO: 5345752 - DNA, 25 bp, Homo sapien
tgcagggcacatgcagccggactgt

SEQ ID NO: 5345753 - DNA, 25 bp, Homo sapien
gccggactgtccagccttgtggtat

SEQ ID NO: 5345754 - DNA, 25 bp, Homo sapien
acatgcagccggactgtccagcctt

SEQ ID NO: 5345755 - DNA, 25 bp, Homo sapien
ctgcgtggggatagacagccttatt

SEQ ID NO: 5345756 - DNA, 25 bp, Homo sapien
tgcgtggggatagacagccttattc

SEQ ID NO: 5345757 - DNA, 25 bp, Homo sapien
cgtggggatagacagccttattctt

SEQ ID NO: 5345758 - DNA, 25 bp, Homo sapien
tggggatagacagccttattcttgt

SEQ ID NO: 5345759 - DNA, 25 bp, Homo sapien
catctggaaaaaggcgctcatgaca

SEQ ID NO: 5345760 - DNA, 25 bp, Homo sapien
aaccttccacggatgcttttcagca

SEQ ID NO: 5345761 - DNA, 25 bp, Homo sapien
atgacaggtggtgccaaccttccac

SEQ ID NO: 5345762 - DNA, 25 bp, Homo sapien
catctcttgggatgaggatacagaa

SEQ ID NO: 5345763 - DNA, 25 bp, Homo sapien
gtggtttcgaattgagctcccaggg

SEQ ID NO: 5345764 - DNA, 25 bp, Homo sapien
cgagcgggaagtcgccatcctcagg

SEQ ID NO: 5345765 - DNA, 25 bp, Homo sapien
ggcccgagcgggaagtcgccatcct

SEQ ID NO: 5345766 - DNA, 25 bp, Homo sapien
atcctcacggtcagccgtggtttcg

SEQ ID NO: 5345767 - DNA, 25 bp, Homo sapien
ccagccccatggcttgctgtgcttg

SEQ ID NO: 5345768 - DNA, 25 bp, Homo sapien
ctccagccccatggcttgctgtgct

SEQ ID NO: 5345769 - DNA, 25 bp, Homo sapien
ctgtgcttgggctgtgttctctgtc

SEQ ID NO: 5345770 - DNA, 25 bp, Homo sapien
cttgctgtgcttgggctgtgttctc

SEQ ID NO: 5345771 - DNA, 25 bp, Homo sapien
gacctgtgggtcagttgttcgtaat

SEQ ID NO: 5345772 - DNA, 25 bp, Homo sapien
tctgggagctcaaccaacatgatgg

SEQ ID NO: 5345773 - DNA, 25 bp, Homo sapien
tgcagttgccccataaggagcagaa

SEQ ID NO: 5345774 - DNA, 25 bp, Homo sapien
gagcagaaagtttgctatcacttcc

SEQ ID NO: 5345775 - DNA, 25 bp, Homo sapien
cctttattaacaacttcaaggtgca

SEQ ID NO: 5345776 - DNA, 25 bp, Homo sapien
cagacaggcagttcaatgagcagct

SEQ ID NO: 5345777 - DNA, 25 bp, Homo sapien
cagcatgaacgtgactctaaagtac

SEQ ID NO: 5345778 - DNA, 25 bp, Homo sapien
ggtgcaaatttgtgagattccagac

SEQ ID NO: 5345779 - DNA, 25 bp, Homo sapien
gtggacttctcacagcgctcagtgt

SEQ ID NO: 5345780 - DNA, 25 bp, Homo sapien
ttttgtgacggtgggcgctgttccc

SEQ ID NO: 5345781 - DNA, 25 bp, Homo sapien
taacgcctctcagctaactgtgctg

SEQ ID NO: 5345782 - DNA, 25 bp, Homo sapien
cattcggttgcttctctccataacg

SEQ ID NO: 5345783 - DNA, 25 bp, Homo sapien
ttcctaggtggctggcagttgctct

SEQ ID NO: 5345784 - DNA, 25 bp, Homo sapien
tcacccttgatatccgcagaatcca

SEQ ID NO: 5345785 - DNA, 25 bp, Homo sapien
cacagtcacccttgatatccgcaga

SEQ ID NO: 5345786 - DNA, 25 bp, Homo sapien
cagtcacccttgatatccgcagaat

SEQ ID NO: 5345787 - DNA, 25 bp, Homo sapien
agttaaggcggaggtcatcactctt

SEQ ID NO: 5345788 - DNA, 25 bp, Homo sapien
cggaggtcatcactcttaataaagg

SEQ ID NO: 5345789 - DNA, 25 bp, Homo sapien
tttgagttggttggtcttacagtta

SEQ ID NO: 5345790 - DNA, 25 bp, Homo sapien
ggtcttacagttaaggcggaggtca

SEQ ID NO: 5345791 - DNA, 25 bp, Homo sapien
ttgttctttcttcccgcacatttga

SEQ ID NO: 5345792 - DNA, 25 bp, Homo sapien
gacagcaagtgtgaaaccagctgaa

SEQ ID NO: 5345793 - DNA, 25 bp, Homo sapien
ccgcacatttgaatctctcagtggg

SEQ ID NO: 5345794 - DNA, 25 bp, Homo sapien
gaaggcctgcaccaacgcacggtgc

SEQ ID NO: 5345795 - DNA, 25 bp, Homo sapien
tatagggttgtaagagcagaagccc

SEQ ID NO: 5345796 - DNA, 25 bp, Homo sapien
taaggatcagattttccagtgtaaa

SEQ ID NO: 5345797 - DNA, 25 bp, Homo sapien
tgctggtagacacagggaatgttct

SEQ ID NO: 5345798 - DNA, 25 bp, Homo sapien
tatatactccttatagggttgtaag

SEQ ID NO: 5345799 - DNA, 25 bp, Homo sapien
gaaagactgattagatagaggagga

SEQ ID NO: 5345800 - DNA, 25 bp, Homo sapien
gaagtgaagcatcagaggctgccca

SEQ ID NO: 5345801 - DNA, 25 bp, Homo sapien
aggctgcccaacagaggcaggagct

SEQ ID NO: 5345802 - DNA, 25 bp, Homo sapien
agaaagggaatgaggctgtgccttg

SEQ ID NO: 5345803 - DNA, 25 bp, Homo sapien
ccctggcatcatattgggacttgtt

SEQ ID NO: 5345804 - DNA, 25 bp, Homo sapien
ccagtaccttggaatgtgaccgtat

SEQ ID NO: 5345805 - DNA, 25 bp, Homo sapien
ccaaattcgtatggtgccaccccaa

SEQ ID NO: 5345806 - DNA, 25 bp, Homo sapien
tgggacttgttaagggctgaattgt

SEQ ID NO: 5345807 - DNA, 25 bp, Homo sapien
ttgtcctgaaccaagttgtagaatt

SEQ ID NO: 5345808 - DNA, 25 bp, Homo sapien
gaagtaaggcgatttctatggaaaa

SEQ ID NO: 5345809 - DNA, 25 bp, Homo sapien
tctgccttcagagctagtggggcct

SEQ ID NO: 5345810 - DNA, 25 bp, Homo sapien
acacattccagtagtttcctcttta

SEQ ID NO: 5345811 - DNA, 25 bp, Homo sapien
catagcttttctcagcggtgagaga

SEQ ID NO: 5345812 - DNA, 25 bp, Homo sapien
cttttctcagcggtgagagagacat

SEQ ID NO: 5345813 - DNA, 25 bp, Homo sapien
gtttcctgttgttacgcatagcttt

SEQ ID NO: 5345814 - DNA, 25 bp, Homo sapien
tcaccggggctgatgttgggatctg

SEQ ID NO: 5345815 - DNA, 25 bp, Homo sapien
actacgtgggtgtcacttattttca

SEQ ID NO: 5345816 - DNA, 25 bp, Homo sapien
taatatataacatgaactacgtggg

SEQ ID NO: 5345817 - DNA, 25 bp, Homo sapien
catggtgtcatggtggtcggaatca

SEQ ID NO: 5345818 - DNA, 25 bp, Homo sapien
tccttgagcctcgtgatctgcatct

SEQ ID NO: 5345819 - DNA, 25 bp, Homo sapien
cctgggtggcggtgtctccatagct

SEQ ID NO: 5345820 - DNA, 25 bp, Homo sapien
ctattggagggaggtgatcatgatt

SEQ ID NO: 5345821 - DNA, 25 bp, Homo sapien
cggtgtctccatagctgactgctgc

SEQ ID NO: 5345822 - DNA, 25 bp, Homo sapien
gatcatgattttgtaactctggctt

SEQ ID NO: 5345823 - DNA, 25 bp, Homo sapien
tctgttttaggcatccccttctcca

SEQ ID NO: 5345824 - DNA, 25 bp, Homo sapien
gaggcaggtgagtaggaggatctcg

SEQ ID NO: 5345825 - DNA, 25 bp, Homo sapien
gtgagtaggaggatctcggataaca

SEQ ID NO: 5345826 - DNA, 25 bp, Homo sapien
gaggatctcggataacagtttctgt

SEQ ID NO: 5345827 - DNA, 25 bp, Homo sapien
ctgtgttgttgtgagccttttgctg

SEQ ID NO: 5345828 - DNA, 25 bp, Homo sapien
gccttttgctggtgctctctacctg

SEQ ID NO: 5345829 - DNA, 25 bp, Homo sapien
gcacagaggtcggtgtgagcagagc

SEQ ID NO: 5345830 - DNA, 25 bp, Homo sapien
ggtgctctctacctgggcacagagg

SEQ ID NO: 5345831 - DNA, 25 bp, Homo sapien
gagctggtgaaaacacttctgttct

SEQ ID NO: 5345832 - DNA, 25 bp, Homo sapien
gagggttgagctggtgaaaacactt

SEQ ID NO: 5345833 - DNA, 25 bp, Homo sapien
atgtggtgttttgcatagggttgca

SEQ ID NO: 5345834 - DNA, 25 bp, Homo sapien
cagtgaggagggttgagctggtgaa

SEQ ID NO: 5345835 - DNA, 25 bp, Homo sapien
atttccctgctatttgttgaactcc

SEQ ID NO: 5345836 - DNA, 25 bp, Homo sapien
gcatggaaggctgtgtgcctctatt

SEQ ID NO: 5345837 - DNA, 25 bp, Homo sapien
tgaactcccttgagctccggtcctt

SEQ ID NO: 5345838 - DNA, 25 bp, Homo sapien
atttgttgaactcccttgagctccg

SEQ ID NO: 5345839 - DNA, 25 bp, Homo sapien
ctggcggctcatcaatattagacac

SEQ ID NO: 5345840 - DNA, 25 bp, Homo sapien
cattagaaaatgctagctcatagga

SEQ ID NO: 5345841 - DNA, 25 bp, Homo sapien
ttcccagaatgtgtaggaatcatgg

SEQ ID NO: 5345842 - DNA, 25 bp, Homo sapien
tttcactgtcactagccaatgaggc

SEQ ID NO: 5345843 - DNA, 25 bp, Homo sapien
gactcaaaacgggaagctggctttc

SEQ ID NO: 5345844 - DNA, 25 bp, Homo sapien
gtttccatgtactagagcgactgtc

SEQ ID NO: 5345845 - DNA, 25 bp, Homo sapien
aggctggccccaaacaaagcagcag

SEQ ID NO: 5345846 - DNA, 25 bp, Homo sapien
tctgtttatgtggacaccccatgtc

SEQ ID NO: 5345847 - DNA, 25 bp, Homo sapien
gccaatatttgaatagatgctgata

SEQ ID NO: 5345848 - DNA, 25 bp, Homo sapien
cttgggctttccactagagacatct

SEQ ID NO: 5345849 - DNA, 25 bp, Homo sapien
ggctttccactagagacatctgcca

SEQ ID NO: 5345850 - DNA, 25 bp, Homo sapien
ccaagatctccattaaccttgggct

SEQ ID NO: 5345851 - DNA, 25 bp, Homo sapien
ccccaagatctccattaaccttggg

SEQ ID NO: 5345852 - DNA, 25 bp, Homo sapien
gtccccaaccttctcatgggtagag

SEQ ID NO: 5345853 - DNA, 25 bp, Homo sapien
ttctcatgggtagagctgcagagag

SEQ ID NO: 5345854 - DNA, 25 bp, Homo sapien
tgggtccccaaccttctcatgggta

SEQ ID NO: 5345855 - DNA, 25 bp, Homo sapien
caaccttctcatgggtagagctgca

SEQ ID NO: 5345856 - DNA, 25 bp, Homo sapien
tgtgggcagaaagcacggaattgtc

SEQ ID NO: 5345857 - DNA, 25 bp, Homo sapien
acggaattgtctgtccaactaggga

SEQ ID NO: 5345858 - DNA, 25 bp, Homo sapien
gaaagcacggaattgtctgtccaac

SEQ ID NO: 5345859 - DNA, 25 bp, Homo sapien
tgtctgtccaactagggactcagga

SEQ ID NO: 5345860 - DNA, 25 bp, Homo sapien
ccgagagggttgataggcagcagac

SEQ ID NO: 5345861 - DNA, 25 bp, Homo sapien
ttatatccgagagggttgataggca

SEQ ID NO: 5345862 - DNA, 25 bp, Homo sapien
gagagggttgataggcagcagacac

SEQ ID NO: 5345863 - DNA, 25 bp, Homo sapien
tatccgagagggttgataggcagca

SEQ ID NO: 5345864 - DNA, 25 bp, Homo sapien
gtgtatgcagtatgtatgtttgtgg

SEQ ID NO: 5345865 - DNA, 25 bp, Homo sapien
caggataagcctctgtgtgtatgca

SEQ ID NO: 5345866 - DNA, 25 bp, Homo sapien
cagtatgtatgtttgtggtatgtct

SEQ ID NO: 5345867 - DNA, 25 bp, Homo sapien
catggcaccaccacaggataagcct

SEQ ID NO: 5345868 - DNA, 25 bp, Homo sapien
ccagcaccctgactgttgaggatgg

SEQ ID NO: 5345869 - DNA, 25 bp, Homo sapien
tccctgggcatccactatggctgca

SEQ ID NO: 5345870 - DNA, 25 bp, Homo sapien
aagccactgggtgcaatggtgttgc

SEQ ID NO: 5345871 - DNA, 25 bp, Homo sapien
tgagctccctctacagccttctggg

SEQ ID NO: 5345872 - DNA, 25 bp, Homo sapien
gggaaccatcccagcaaaatgaagt

SEQ ID NO: 5345873 - DNA, 25 bp, Homo sapien
gccgtaaattgactgcaggatcctt

SEQ ID NO: 5345874 - DNA, 25 bp, Homo sapien
ttaaccttgctggtaaacagggtgc

SEQ ID NO: 5345875 - DNA, 25 bp, Homo sapien
taactttgcttcaggagacacttgg

SEQ ID NO: 5345876 - DNA, 25 bp, Homo sapien
gatggagtctcctcaacattgtagc

SEQ ID NO: 5345877 - DNA, 25 bp, Homo sapien
gtgttgtccaaatacaaggtccata

SEQ ID NO: 5345878 - DNA, 25 bp, Homo sapien
gaaacactcttgatctgaggttgtg

SEQ ID NO: 5345879 - DNA, 25 bp, Homo sapien
gaaggcttggaggaacaaagaaaca

SEQ ID NO: 5345880 - DNA, 25 bp, Homo sapien
tcagttgaatgctggcagaccgtct

SEQ ID NO: 5345881 - DNA, 25 bp, Homo sapien
tggagggttcatcagacctgacagc

SEQ ID NO: 5345882 - DNA, 25 bp, Homo sapien
ctgggacctgtaagaaagtttctct

SEQ ID NO: 5345883 - DNA, 25 bp, Homo sapien
cagtcttctaagctatacggcagtg

SEQ ID NO: 5345884 - DNA, 25 bp, Homo sapien
catgacagaaaggaggtgggaaaac

SEQ ID NO: 5345885 - DNA, 25 bp, Homo sapien
atgacagaaaggaggtgggaaaact

SEQ ID NO: 5345886 - DNA, 25 bp, Homo sapien
tcatgacagaaaggaggtgggaaaa

SEQ ID NO: 5345887 - DNA, 25 bp, Homo sapien
tcctgatgaggtgacacagtgacca

SEQ ID NO: 5345888 - DNA, 25 bp, Homo sapien
tgtagtcagagagcgtggcaaccac

SEQ ID NO: 5345889 - DNA, 25 bp, Homo sapien
caccggtcacgtcaggaagagcagt

SEQ ID NO: 5345890 - DNA, 25 bp, Homo sapien
cctcagccgggaacatgaaagcttt

SEQ ID NO: 5345891 - DNA, 25 bp, Homo sapien
cagcaaatttcctcattaaatatac

SEQ ID NO: 5345892 - DNA, 25 bp, Homo sapien
aaactaaaggatgtggcagataaac

SEQ ID NO: 5345893 - DNA, 25 bp, Homo sapien
aatatacaaggcgactgagtgcaat

SEQ ID NO: 5345894 - DNA, 25 bp, Homo sapien
tgcaataaaaactaaaggatgtggc

SEQ ID NO: 5345895 - DNA, 25 bp, Homo sapien
tcccacttgagagtactggcctgag

SEQ ID NO: 5345896 - DNA, 25 bp, Homo sapien
caactgttcccacttgagagtactg

SEQ ID NO: 5345897 - DNA, 25 bp, Homo sapien
ttgctgccaaccttacaatatccag

SEQ ID NO: 5345898 - DNA, 25 bp, Homo sapien
agagccacactgcggtcccactggg

SEQ ID NO: 5345899 - DNA, 25 bp, Homo sapien
ctagaatctcccagaacctcacaaa

SEQ ID NO: 5345900 - DNA, 25 bp, Homo sapien
ggtatttatggtctcctagaatctc

SEQ ID NO: 5345901 - DNA, 25 bp, Homo sapien
tgcaaccccaggtactcagtttgga

SEQ ID NO: 5345902 - DNA, 25 bp, Homo sapien
caaccccaggtactcagtttggagg

SEQ ID NO: 5345903 - DNA, 25 bp, Homo sapien
atcactgggaatccctccttcttgc

SEQ ID NO: 5345904 - DNA, 25 bp, Homo sapien
tatcactgggaatccctccttcttg

SEQ ID NO: 5345905 - DNA, 25 bp, Homo sapien
cagatatcactgggaatccctcctt

SEQ ID NO: 5345906 - DNA, 25 bp, Homo sapien
gatatcactgggaatccctccttct

SEQ ID NO: 5345907 - DNA, 25 bp, Homo sapien
caggattcactgtgcgaggacccac

SEQ ID NO: 5345908 - DNA, 25 bp, Homo sapien
ttcaggaagtgcttcgcaaaagcga

SEQ ID NO: 5345909 - DNA, 25 bp, Homo sapien
taaccgaatgtgcagttcaggaagt

SEQ ID NO: 5345910 - DNA, 25 bp, Homo sapien
ttcgcaaaagcgaactgggctccag

SEQ ID NO: 5345911 - DNA, 25 bp, Homo sapien
cggctctcggaaagacagcctgacc

SEQ ID NO: 5345912 - DNA, 25 bp, Homo sapien
ccccacgtgttctcaagcccaccaa

SEQ ID NO: 5345913 - DNA, 25 bp, Homo sapien
gtggatggcaggccccacgtgttct

SEQ ID NO: 5345914 - DNA, 25 bp, Homo sapien
ggtgggtgtcggctctcggaaagac

SEQ ID NO: 5345915 - DNA, 25 bp, Homo sapien
cgcatgggcgcagtgtgcagagact

SEQ ID NO: 5345916 - DNA, 25 bp, Homo sapien
gagcctctgactgcatgttctgagg

SEQ ID NO: 5345917 - DNA, 25 bp, Homo sapien
agagactggccgaggagagctgtag

SEQ ID NO: 5345918 - DNA, 25 bp, Homo sapien
tgagggcagtggcatcgggaacgca

SEQ ID NO: 5345919 - DNA, 25 bp, Homo sapien
tccattttcagctggacttgtttct

SEQ ID NO: 5345920 - DNA, 25 bp, Homo sapien
acccacagcccagtatggcatttcc

SEQ ID NO: 5345921 - DNA, 25 bp, Homo sapien
aaacccacagcccagtatggcattt

SEQ ID NO: 5345922 - DNA, 25 bp, Homo sapien
ctttgggttgaggctggaacaaaat

SEQ ID NO: 5345923 - DNA, 25 bp, Homo sapien
gcttgttcaagcaatcgatgagcca

SEQ ID NO: 5345924 - DNA, 25 bp, Homo sapien
tccaggataacgttggtggctcagg

SEQ ID NO: 5345925 - DNA, 25 bp, Homo sapien
gatgtgtgcttgttcaagcaatcga

SEQ ID NO: 5345926 - DNA, 25 bp, Homo sapien
ctgtgataagaacctccaggataac

SEQ ID NO: 5345927 - DNA, 25 bp, Homo sapien
aaggctctgctggacctcggaggat

SEQ ID NO: 5345928 - DNA, 25 bp, Homo sapien
tttgggatttgagggaggtgtttca

SEQ ID NO: 5345929 - DNA, 25 bp, Homo sapien
ggctagcgaaagattgcatcttgtc

SEQ ID NO: 5345930 - DNA, 25 bp, Homo sapien
gaacccacccacttggggctagcga

SEQ ID NO: 5345931 - DNA, 25 bp, Homo sapien
gcccctgcacttgtgtgataccttg

SEQ ID NO: 5345932 - DNA, 25 bp, Homo sapien
cacttgtgtgataccttgagaaggg

SEQ ID NO: 5345933 - DNA, 25 bp, Homo sapien
cctgcacttgtgtgataccttgaga

SEQ ID NO: 5345934 - DNA, 25 bp, Homo sapien
tggcccctgcacttgtgtgatacct

SEQ ID NO: 5345935 - DNA, 25 bp, Homo sapien
gaggaccagtgctgcctctcctttc

SEQ ID NO: 5345936 - DNA, 25 bp, Homo sapien
cctctcctttcttggtacatgccag

SEQ ID NO: 5345937 - DNA, 25 bp, Homo sapien
ggagcaagaggaccagtgctgcctc

SEQ ID NO: 5345938 - DNA, 25 bp, Homo sapien
ctcctttcttggtacatgccagcat

SEQ ID NO: 5345939 - DNA, 25 bp, Homo sapien
tctcagagcccatcgctgacattta

SEQ ID NO: 5345940 - DNA, 25 bp, Homo sapien
catcgctgacatttagttcctctag

SEQ ID NO: 5345941 - DNA, 25 bp, Homo sapien
tgacatttagttcctctagaaacac

SEQ ID NO: 5345942 - DNA, 25 bp, Homo sapien
gagcccatcgctgacatttagttcc

SEQ ID NO: 5345943 - DNA, 25 bp, Homo sapien
ccaatgctgatgcatctggattcac

SEQ ID NO: 5345944 - DNA, 25 bp, Homo sapien
aattttgattgagcacagattcatc

SEQ ID NO: 5345945 - DNA, 25 bp, Homo sapien
ccggcaagaataaaccaattggaat

SEQ ID NO: 5345946 - DNA, 25 bp, Homo sapien
cagattcatcatatcttgccaggtt

SEQ ID NO: 5345947 - DNA, 25 bp, Homo sapien
gcacagagtggccttcatcctggac

SEQ ID NO: 5345948 - DNA, 25 bp, Homo sapien
ggacaggctcctttgatgtgagcca

SEQ ID NO: 5345949 - DNA, 25 bp, Homo sapien
ccacgaggcacctagggctgggtca

SEQ ID NO: 5345950 - DNA, 25 bp, Homo sapien
aggcacctagggctgggtcatctgt

SEQ ID NO: 5345951 - DNA, 25 bp, Homo sapien
ggttgtaaaaccctgaggatctctc

SEQ ID NO: 5345952 - DNA, 25 bp, Homo sapien
tgcagagaggccatcaaatcgactg

SEQ ID NO: 5345953 - DNA, 25 bp, Homo sapien
cctttgagctacctgggattctgat

SEQ ID NO: 5345954 - DNA, 25 bp, Homo sapien
caggattgctcggtaagcgctaagc

SEQ ID NO: 5345955 - DNA, 25 bp, Homo sapien
agatttccagtatccaagcccgtta

SEQ ID NO: 5345956 - DNA, 25 bp, Homo sapien
agttttccccttatcctgcccagat

SEQ ID NO: 5345957 - DNA, 25 bp, Homo sapien
tatccaagcccgttattttcttata

SEQ ID NO: 5345958 - DNA, 25 bp, Homo sapien
tgtcaaggtgatagatgcatataga

SEQ ID NO: 5345959 - DNA, 25 bp, Homo sapien
taataagctcaatctacatccagaa

SEQ ID NO: 5345960 - DNA, 25 bp, Homo sapien
tttaataagctcaatctacatccag

SEQ ID NO: 5345961 - DNA, 25 bp, Homo sapien
catttaataagctcaatctacatcc

SEQ ID NO: 5345962 - DNA, 25 bp, Homo sapien
taagctcaatctacatccagaataa

SEQ ID NO: 5345963 - DNA, 25 bp, Homo sapien
ccatggtatcatcagagtgcatcca

SEQ ID NO: 5345964 - DNA, 25 bp, Homo sapien
tggtatcatcagagtgcatccagag

SEQ ID NO: 5345965 - DNA, 25 bp, Homo sapien
atggtatcatcagagtgcatccaga

SEQ ID NO: 5345966 - DNA, 25 bp, Homo sapien
catggtatcatcagagtgcatccag

SEQ ID NO: 5345967 - DNA, 25 bp, Homo sapien
tacccagttaccatgacccacgagg

SEQ ID NO: 5345968 - DNA, 25 bp, Homo sapien
acccagttaccatgacccacgaggg

SEQ ID NO: 5345969 - DNA, 25 bp, Homo sapien
tattttttagtctcagagcctgttg

SEQ ID NO: 5345970 - DNA, 25 bp, Homo sapien
gaatggcccagatttaccactattt

SEQ ID NO: 5345971 - DNA, 25 bp, Homo sapien
atccagacagcaagaatggcccaga

SEQ ID NO: 5345972 - DNA, 25 bp, Homo sapien
gacagcaagaatggcccagatttac

SEQ ID NO: 5345973 - DNA, 25 bp, Homo sapien
ttcagagatggaggaatatgagctt

SEQ ID NO: 5345974 - DNA, 25 bp, Homo sapien
cttcagagatggaggaatatgagct

SEQ ID NO: 5345975 - DNA, 25 bp, Homo sapien
tcagagatggaggaatatgagcttt

SEQ ID NO: 5345976 - DNA, 25 bp, Homo sapien
ctggagcccaggaaatgcattctac

SEQ ID NO: 5345977 - DNA, 25 bp, Homo sapien
gcattgttgctacaacccatacacg

SEQ ID NO: 5345978 - DNA, 25 bp, Homo sapien
gccatcttgatttggttgtacaata

SEQ ID NO: 5345979 - DNA, 25 bp, Homo sapien
tgcattgcattgttgctacaaccca

SEQ ID NO: 5345980 - DNA, 25 bp, Homo sapien
gtacaatatgtacccattctctctg

SEQ ID NO: 5345981 - DNA, 25 bp, Homo sapien
gaaacattatggtcatggggaacca

SEQ ID NO: 5345982 - DNA, 25 bp, Homo sapien
gaggaaacattatggtcatggggaa

SEQ ID NO: 5345983 - DNA, 25 bp, Homo sapien
aacattatggtcatggggaaccatg

SEQ ID NO: 5345984 - DNA, 25 bp, Homo sapien
ctgaggaaacattatggtcatgggg

SEQ ID NO: 5345985 - DNA, 25 bp, Homo sapien
atgcatggttctgatgcattcaaag

SEQ ID NO: 5345986 - DNA, 25 bp, Homo sapien
tatgcatggttctgatgcattcaaa

SEQ ID NO: 5345987 - DNA, 25 bp, Homo sapien
gcatggttctgatgcattcaaagtc

SEQ ID NO: 5345988 - DNA, 25 bp, Homo sapien
tgcatggttctgatgcattcaaagt

SEQ ID NO: 5345989 - DNA, 25 bp, Homo sapien
aaaatctccagtctcataatcccac

SEQ ID NO: 5345990 - DNA, 25 bp, Homo sapien
caaaatctccagtctcataatccca

SEQ ID NO: 5345991 - DNA, 25 bp, Homo sapien
ttcaaaatctccagtctcataatcc

SEQ ID NO: 5345992 - DNA, 25 bp, Homo sapien
aaatctccagtctcataatcccaca

SEQ ID NO: 5345993 - DNA, 25 bp, Homo sapien
cacctgacgtaaattcttcttttgc

SEQ ID NO: 5345994 - DNA, 25 bp, Homo sapien
gaggtccacctgacgtaaattcttc

SEQ ID NO: 5345995 - DNA, 25 bp, Homo sapien
aagaggtccacctgacgtaaattct

SEQ ID NO: 5345996 - DNA, 25 bp, Homo sapien
gaccaagaggtccacctgacgtaaa

SEQ ID NO: 5345997 - DNA, 25 bp, Homo sapien
ctgctttagcttgatttagttcatc

SEQ ID NO: 5345998 - DNA, 25 bp, Homo sapien
tgctttagcttgatttagttcatct

SEQ ID NO: 5345999 - DNA, 25 bp, Homo sapien
tattgagtaacttctacatgtaagt

SEQ ID NO: 5346000 - DNA, 25 bp, Homo sapien
ttgagtaacttctacatgtaagtca

SEQ ID NO: 5346001 - DNA, 25 bp, Homo sapien
tgagtaacttctacatgtaagtcac

SEQ ID NO: 5346002 - DNA, 25 bp, Homo sapien
ttattgagtaacttctacatgtaag

SEQ ID NO: 5346003 - DNA, 25 bp, Homo sapien
cctagtcctagaggacgttggagtc

SEQ ID NO: 5346004 - DNA, 25 bp, Homo sapien
tgtgaacttattccccacctaggac

SEQ ID NO: 5346005 - DNA, 25 bp, Homo sapien
gaatagagttccacgctgcgatgag

SEQ ID NO: 5346006 - DNA, 25 bp, Homo sapien
tacctggtcagggtataaggcaaag

SEQ ID NO: 5346007 - DNA, 25 bp, Homo sapien
gctcactcttggtagggaacagagt

SEQ ID NO: 5346008 - DNA, 25 bp, Homo sapien
ggaagtgatcgtttcaaacttctct

SEQ ID NO: 5346009 - DNA, 25 bp, Homo sapien
tcctgcaagattgacagctcactct

SEQ ID NO: 5346010 - DNA, 25 bp, Homo sapien
cagttgccgtatttaccctggctgc

SEQ ID NO: 5346011 - DNA, 25 bp, Homo sapien
aatcatagaagtgccgaaaattaca

SEQ ID NO: 5346012 - DNA, 25 bp, Homo sapien
aagggcttcgggctttactgttcat

SEQ ID NO: 5346013 - DNA, 25 bp, Homo sapien
agggcttcgggctttactgttcatt

SEQ ID NO: 5346014 - DNA, 25 bp, Homo sapien
atcatagaagtgccgaaaattacaa

SEQ ID NO: 5346015 - DNA, 25 bp, Homo sapien
cagtgtgcccagtgtggcactgttt

SEQ ID NO: 5346016 - DNA, 25 bp, Homo sapien
cctgtgaatcaacttctctagcacg

SEQ ID NO: 5346017 - DNA, 25 bp, Homo sapien
gaatcaacttctctagcacgtccca

SEQ ID NO: 5346018 - DNA, 25 bp, Homo sapien
gctgggaaggtccagtgtgcccagt

SEQ ID NO: 5346019 - DNA, 25 bp, Homo sapien
tgcctttgtaccagaacgcattcag

SEQ ID NO: 5346020 - DNA, 25 bp, Homo sapien
tatgaggcagaacccattagtgagc

SEQ ID NO: 5346021 - DNA, 25 bp, Homo sapien
tgttcaaaaccgagatactggcagg

SEQ ID NO: 5346022 - DNA, 25 bp, Homo sapien
ctaatggacacactcctcatgaaaa

SEQ ID NO: 5346023 - DNA, 25 bp, Homo sapien
tagtgatatgcctgtgccagttctg

SEQ ID NO: 5346024 - DNA, 25 bp, Homo sapien
tcagagggaggttctagaataaagc

SEQ ID NO: 5346025 - DNA, 25 bp, Homo sapien
gatgctcttgcttttagccacaatg

SEQ ID NO: 5346026 - DNA, 25 bp, Homo sapien
gttcaattctgaacagacggacaga

SEQ ID NO: 5346027 - DNA, 25 bp, Homo sapien
aacggtagcgatggtagctccagca

SEQ ID NO: 5346028 - DNA, 25 bp, Homo sapien
caggaggatttttgcagacacccaa

SEQ ID NO: 5346029 - DNA, 25 bp, Homo sapien
ggagaggtcatttcaagtctctgca

SEQ ID NO: 5346030 - DNA, 25 bp, Homo sapien
ctggagtgccttccgacctggagag

SEQ ID NO: 5346031 - DNA, 25 bp, Homo sapien
tggtaatgtctgcgggcaattggcc

SEQ ID NO: 5346032 - DNA, 25 bp, Homo sapien
cagcagggagcatgctccatgaaac

SEQ ID NO: 5346033 - DNA, 25 bp, Homo sapien
ccatgaaaccagaatgagcctgttc

SEQ ID NO: 5346034 - DNA, 25 bp, Homo sapien
cgggcaattggccaggcccctgaga

SEQ ID NO: 5346035 - DNA, 25 bp, Homo sapien
tttgatgacgactggtcacactgct

SEQ ID NO: 5346036 - DNA, 25 bp, Homo sapien
ctcgcaggcagacctgcatggtttg

SEQ ID NO: 5346037 - DNA, 25 bp, Homo sapien
gaatacctaagagttgccagcaact

SEQ ID NO: 5346038 - DNA, 25 bp, Homo sapien
gcaacttcccattcaaataacctct

SEQ ID NO: 5346039 - DNA, 25 bp, Homo sapien
caggtaccagatctgccacacctgg

SEQ ID NO: 5346040 - DNA, 25 bp, Homo sapien
ctggatgagctcctatatccttatc

SEQ ID NO: 5346041 - DNA, 25 bp, Homo sapien
gccacacctggtaccggcatgagcc

SEQ ID NO: 5346042 - DNA, 25 bp, Homo sapien
tgagctcctatatccttatccaggt

SEQ ID NO: 5346043 - DNA, 25 bp, Homo sapien
ttcacagccctggtaatgtcctcag

SEQ ID NO: 5346044 - DNA, 25 bp, Homo sapien
tctcagcaaactggtgctctgccaa

SEQ ID NO: 5346045 - DNA, 25 bp, Homo sapien
agacctggctttcggcacagctggg

SEQ ID NO: 5346046 - DNA, 25 bp, Homo sapien
ggaccccagcgcttaggtttggctc

SEQ ID NO: 5346047 - DNA, 25 bp, Homo sapien
gacctggtctggtcacttgctgtgg

SEQ ID NO: 5346048 - DNA, 25 bp, Homo sapien
tgtggttgtgtgtgacacctctgtg

SEQ ID NO: 5346049 - DNA, 25 bp, Homo sapien
tgtcccacaggcctgctggattgga

SEQ ID NO: 5346050 - DNA, 25 bp, Homo sapien
gcaaatgaccttggagttactccta

SEQ ID NO: 5346051 - DNA, 25 bp, Homo sapien
tccctgcgggagcaagttcactgtg

SEQ ID NO: 5346052 - DNA, 25 bp, Homo sapien
ggatccattctcaggctgggcctta

SEQ ID NO: 5346053 - DNA, 25 bp, Homo sapien
tcttggagagggagttcacacggac

SEQ ID NO: 5346054 - DNA, 25 bp, Homo sapien
ggccttagtagtgggacagcatcct

SEQ ID NO: 5346055 - DNA, 25 bp, Homo sapien
ccaagatcgctgtgggcaattccaa

SEQ ID NO: 5346056 - DNA, 25 bp, Homo sapien
ttccaagccagtactgggagctgac

SEQ ID NO: 5346057 - DNA, 25 bp, Homo sapien
tccaagccagtactgggagctgaca

SEQ ID NO: 5346058 - DNA, 25 bp, Homo sapien
ccaagccagtactgggagctgacat

SEQ ID NO: 5346059 - DNA, 25 bp, Homo sapien
ggtgtctggtccgagtacctccagt

SEQ ID NO: 5346060 - DNA, 25 bp, Homo sapien
ggtccgagtacctccagtctcacct

SEQ ID NO: 5346061 - DNA, 25 bp, Homo sapien
tctggtccgagtacctccagtctca

SEQ ID NO: 5346062 - DNA, 25 bp, Homo sapien
tgtctggtccgagtacctccagtct

SEQ ID NO: 5346063 - DNA, 25 bp, Homo sapien
atgtaggaagtgttggagggacaca

SEQ ID NO: 5346064 - DNA, 25 bp, Homo sapien
tgtaggaagtgttggagggacacac

SEQ ID NO: 5346065 - DNA, 25 bp, Homo sapien
gttagtggatgtcggtcacttagtc

SEQ ID NO: 5346066 - DNA, 25 bp, Homo sapien
ttagtcctgataaaacagagtagat

SEQ ID NO: 5346067 - DNA, 25 bp, Homo sapien
tggttttcttagtaggagatcttga

SEQ ID NO: 5346068 - DNA, 25 bp, Homo sapien
tagatggttttcttagtaggagatc

SEQ ID NO: 5346069 - DNA, 25 bp, Homo sapien
tgggatcctactacgccagaggctc

SEQ ID NO: 5346070 - DNA, 25 bp, Homo sapien
cacttagtaagctgcagttgccctg

SEQ ID NO: 5346071 - DNA, 25 bp, Homo sapien
ccagaggctcaatgcctggcagagt

SEQ ID NO: 5346072 - DNA, 25 bp, Homo sapien
tttcatgacatgtcctgggatccta

SEQ ID NO: 5346073 - DNA, 25 bp, Homo sapien
tattccacacaggaatgacagacag

SEQ ID NO: 5346074 - DNA, 25 bp, Homo sapien
gcctcttgcgtcagtgggaatggaa

SEQ ID NO: 5346075 - DNA, 25 bp, Homo sapien
catttctaatttcttgggccctttg

SEQ ID NO: 5346076 - DNA, 25 bp, Homo sapien
tctccatgttccctcttgccttgca

SEQ ID NO: 5346077 - DNA, 25 bp, Homo sapien
tcttctggccaaaagttgacttggt

SEQ ID NO: 5346078 - DNA, 25 bp, Homo sapien
taattttggatgttctcttctggcc

SEQ ID NO: 5346079 - DNA, 25 bp, Homo sapien
tgacttggtccagaccaaatggaaa

SEQ ID NO: 5346080 - DNA, 25 bp, Homo sapien
tttaattttggatgttctcttctgg

SEQ ID NO: 5346081 - DNA, 25 bp, Homo sapien
acagaatcagatctctccgcagctc

SEQ ID NO: 5346082 - DNA, 25 bp, Homo sapien
caactgctccacagaatcagatctc

SEQ ID NO: 5346083 - DNA, 25 bp, Homo sapien
tgaaacctcaactgctccacagaat

SEQ ID NO: 5346084 - DNA, 25 bp, Homo sapien
ctccgcagctcccaaaagtgtccca

SEQ ID NO: 5346085 - DNA, 25 bp, Homo sapien
tcacctgtgaaaccaaaattccatc

SEQ ID NO: 5346086 - DNA, 25 bp, Homo sapien
tccctcattaccaagatccccttcc

SEQ ID NO: 5346087 - DNA, 25 bp, Homo sapien
cttccttcacctgtgaaaccaaaat

SEQ ID NO: 5346088 - DNA, 25 bp, Homo sapien
tcttccctcctttgtgacagagtgg

SEQ ID NO: 5346089 - DNA, 25 bp, Homo sapien
ctccaggtagaatgagctgtatcct

SEQ ID NO: 5346090 - DNA, 25 bp, Homo sapien
ttggccagaggatgttgcgcatcct

SEQ ID NO: 5346091 - DNA, 25 bp, Homo sapien
gcggcctcgggcattccagtgatgc

SEQ ID NO: 5346092 - DNA, 25 bp, Homo sapien
tccttggccagaggatgttgcgcat

SEQ ID NO: 5346093 - DNA, 25 bp, Homo sapien
ttctggactagagggctcttgcctg

SEQ ID NO: 5346094 - DNA, 25 bp, Homo sapien
gattctggactagagggctcttgcc

SEQ ID NO: 5346095 - DNA, 25 bp, Homo sapien
tggactagagggctcttgcctgagc

SEQ ID NO: 5346096 - DNA, 25 bp, Homo sapien
tctggactagagggctcttgcctga

SEQ ID NO: 5346097 - DNA, 25 bp, Homo sapien
agggtgagcacccaggttccacagg

SEQ ID NO: 5346098 - DNA, 25 bp, Homo sapien
tgagcagggtgagggtgagcaccca

SEQ ID NO: 5346099 - DNA, 25 bp, Homo sapien
ggtgagcacccaggttccacagggc

SEQ ID NO: 5346100 - DNA, 25 bp, Homo sapien
ggtgagggtgagcacccaggttcca

SEQ ID NO: 5346101 - DNA, 25 bp, Homo sapien
cagttaggattctatcatcatgaga

SEQ ID NO: 5346102 - DNA, 25 bp, Homo sapien
cgctcaacggagcaaactggaaggt

SEQ ID NO: 5346103 - DNA, 25 bp, Homo sapien
ccccttgcagtatcagttaggattc

SEQ ID NO: 5346104 - DNA, 25 bp, Homo sapien
acagtatccccttgcagtatcagtt

SEQ ID NO: 5346105 - DNA, 25 bp, Homo sapien
gccaccgaccccatcagccatgatt

SEQ ID NO: 5346106 - DNA, 25 bp, Homo sapien
tgggcatcagcgggcagggcccaca

SEQ ID NO: 5346107 - DNA, 25 bp, Homo sapien
gccatgatttatatccatgcctttc

SEQ ID NO: 5346108 - DNA, 25 bp, Homo sapien
ccatgatttatatccatgcctttcc

SEQ ID NO: 5346109 - DNA, 25 bp, Homo sapien
tagaaaatcagtgcggttttggctt

SEQ ID NO: 5346110 - DNA, 25 bp, Homo sapien
agtagctggtgcctggtagaaaatc

SEQ ID NO: 5346111 - DNA, 25 bp, Homo sapien
tactatcacagttttggcggctttg

SEQ ID NO: 5346112 - DNA, 25 bp, Homo sapien
catagatgtctcctctccgggaagt

SEQ ID NO: 5346113 - DNA, 25 bp, Homo sapien
cagagtgaccgtggaagttcgatga

SEQ ID NO: 5346114 - DNA, 25 bp, Homo sapien
ggtcaggaaacgactctcctggcat

SEQ ID NO: 5346115 - DNA, 25 bp, Homo sapien
tctcatgcagctgatcgttgggtca

SEQ ID NO: 5346116 - DNA, 25 bp, Homo sapien
tatatcagttgttgggggccgtgct

SEQ ID NO: 5346117 - DNA, 25 bp, Homo sapien
agagggtgctggttctgagccaact

SEQ ID NO: 5346118 - DNA, 25 bp, Homo sapien
cataggagccacaccggtgagggca

SEQ ID NO: 5346119 - DNA, 25 bp, Homo sapien
cagcagaccacgctcattacttaca

SEQ ID NO: 5346120 - DNA, 25 bp, Homo sapien
agccaactttgcatggaaggcccag

SEQ ID NO: 5346121 - DNA, 25 bp, Homo sapien
actatggccttttggctcaggtgca

SEQ ID NO: 5346122 - DNA, 25 bp, Homo sapien
ctggctcctgcactactatggcctt

SEQ ID NO: 5346123 - DNA, 25 bp, Homo sapien
gggccacccaggaaacgcaagccaa

SEQ ID NO: 5346124 - DNA, 25 bp, Homo sapien
cctgcactactatggccttttggct

SEQ ID NO: 5346125 - DNA, 25 bp, Homo sapien
tgaatgccagcacaaggcagtctgg

SEQ ID NO: 5346126 - DNA, 25 bp, Homo sapien
gaaacttggtgacgtggacagagcc

SEQ ID NO: 5346127 - DNA, 25 bp, Homo sapien
ccaggtatgagaggccccaatcaat

SEQ ID NO: 5346128 - DNA, 25 bp, Homo sapien
cataagctcttgaatgccagcacaa

SEQ ID NO: 5346129 - DNA, 25 bp, Homo sapien
tgcctggatacttccaggattccca

SEQ ID NO: 5346130 - DNA, 25 bp, Homo sapien
tcttgcctggatacttccaggattc

SEQ ID NO: 5346131 - DNA, 25 bp, Homo sapien
ttgcctggatacttccaggattccc

SEQ ID NO: 5346132 - DNA, 25 bp, Homo sapien
ttcttgcctggatacttccaggatt

SEQ ID NO: 5346133 - DNA, 25 bp, Homo sapien
cgtgaccctgagtttatcaccaagg

SEQ ID NO: 5346134 - DNA, 25 bp, Homo sapien
tatgagaactgactcgtgaccctga

SEQ ID NO: 5346135 - DNA, 25 bp, Homo sapien
tgcagagacaggtcctcaaattaag

SEQ ID NO: 5346136 - DNA, 25 bp, Homo sapien
gagtctggagagtgaacatccctat

SEQ ID NO: 5346137 - DNA, 25 bp, Homo sapien
tggtttatggagagcctgctcctcc

SEQ ID NO: 5346138 - DNA, 25 bp, Homo sapien
cactcttcctacagccccagctggg

SEQ ID NO: 5346139 - DNA, 25 bp, Homo sapien
gttctggctggtttatggagagcct

SEQ ID NO: 5346140 - DNA, 25 bp, Homo sapien
gctggtttatggagagcctgctcct

SEQ ID NO: 5346141 - DNA, 25 bp, Homo sapien
tccactcaagactgataatcgccat

SEQ ID NO: 5346142 - DNA, 25 bp, Homo sapien
taagtttaacttgtggacaatccac

SEQ ID NO: 5346143 - DNA, 25 bp, Homo sapien
tgtggacaatccactcaagactgat

SEQ ID NO: 5346144 - DNA, 25 bp, Homo sapien
tgacttgtcagatgtaagtttaact

SEQ ID NO: 5346145 - DNA, 25 bp, Homo sapien
ctgaaggcccatgcacctttctcag

SEQ ID NO: 5346146 - DNA, 25 bp, Homo sapien
cctgaaggcccatgcacctttctca

SEQ ID NO: 5346147 - DNA, 25 bp, Homo sapien
tgaaggcccatgcacctttctcagc

SEQ ID NO: 5346148 - DNA, 25 bp, Homo sapien
ccctgaaggcccatgcacctttctc

SEQ ID NO: 5346149 - DNA, 25 bp, Homo sapien
ggctctccaactacaacaccatgcc

SEQ ID NO: 5346150 - DNA, 25 bp, Homo sapien
ggctggctctccaactacaacacca

SEQ ID NO: 5346151 - DNA, 25 bp, Homo sapien
tctccaactacaacaccatgcccca

SEQ ID NO: 5346152 - DNA, 25 bp, Homo sapien
tggctctccaactacaacaccatgc

SEQ ID NO: 5346153 - DNA, 25 bp, Homo sapien
agatcaggtggattgaggatgtcac

SEQ ID NO: 5346154 - DNA, 25 bp, Homo sapien
tcaggtatgaagatcaggtggattg

SEQ ID NO: 5346155 - DNA, 25 bp, Homo sapien
caggtatgaagatcaggtggattga

SEQ ID NO: 5346156 - DNA, 25 bp, Homo sapien
tatgaagatcaggtggattgaggat

SEQ ID NO: 5346157 - DNA, 25 bp, Homo sapien
cacagactccagacagatagttcca

SEQ ID NO: 5346158 - DNA, 25 bp, Homo sapien
agcggcatgggcaacgtcagtagca

SEQ ID NO: 5346159 - DNA, 25 bp, Homo sapien
gctccacacaatcaggaggtctgcc

SEQ ID NO: 5346160 - DNA, 25 bp, Homo sapien
caacgtcagtagcatgcacatcagg

SEQ ID NO: 5346161 - DNA, 25 bp, Homo sapien
tccagcagacaatggcaaccgtggc

SEQ ID NO: 5346162 - DNA, 25 bp, Homo sapien
gacctcatggcgtgactgaacggag

SEQ ID NO: 5346163 - DNA, 25 bp, Homo sapien
cagaaagaggacattggtgggcaat

SEQ ID NO: 5346164 - DNA, 25 bp, Homo sapien
gctgagtgtcctgctttcggcctga

SEQ ID NO: 5346165 - DNA, 25 bp, Homo sapien
gaccagtggtccaaatttataccag

SEQ ID NO: 5346166 - DNA, 25 bp, Homo sapien
ggacaccccgggcagaccagtggtc

SEQ ID NO: 5346167 - DNA, 25 bp, Homo sapien
tgatgccttcccaatcacggttcct

SEQ ID NO: 5346168 - DNA, 25 bp, Homo sapien
tagcagtccacgaccactggcaggg

SEQ ID NO: 5346169 - DNA, 25 bp, Homo sapien
cagaacggagctttgattgatcctc

SEQ ID NO: 5346170 - DNA, 25 bp, Homo sapien
tcgggactggaaggattgggaacag

SEQ ID NO: 5346171 - DNA, 25 bp, Homo sapien
aaggattgggaacagaacggagctt

SEQ ID NO: 5346172 - DNA, 25 bp, Homo sapien
tgatcctcttgtccgcacttgtgcc

SEQ ID NO: 5346173 - DNA, 25 bp, Homo sapien
aacacaacgtgtactgtgtgccaaa

SEQ ID NO: 5346174 - DNA, 25 bp, Homo sapien
tccccatagggcttccacagaaaca

SEQ ID NO: 5346175 - DNA, 25 bp, Homo sapien
ctggaagcttccagatcctggcccc

SEQ ID NO: 5346176 - DNA, 25 bp, Homo sapien
agtagcactgacatcctcttcatcc

SEQ ID NO: 5346177 - DNA, 25 bp, Homo sapien
aacccctgtcactgtaatttctgat

SEQ ID NO: 5346178 - DNA, 25 bp, Homo sapien
cccctgtcactgtaatttctgatga

SEQ ID NO: 5346179 - DNA, 25 bp, Homo sapien
ccctgtcactgtaatttctgatgat

SEQ ID NO: 5346180 - DNA, 25 bp, Homo sapien
acccctgtcactgtaatttctgatg

SEQ ID NO: 5346181 - DNA, 25 bp, Homo sapien
gtgatggtgccgccagataaaagtt

SEQ ID NO: 5346182 - DNA, 25 bp, Homo sapien
tgttttggagtctcccagggtgatg

SEQ ID NO: 5346183 - DNA, 25 bp, Homo sapien
cagggtgatggtgccgccagataaa

SEQ ID NO: 5346184 - DNA, 25 bp, Homo sapien
ggtgatggtgccgccagataaaagt

SEQ ID NO: 5346185 - DNA, 25 bp, Homo sapien
cagagcaagcaggatgtgaccattt

SEQ ID NO: 5346186 - DNA, 25 bp, Homo sapien
caagtacaaggctagcactgggaga

SEQ ID NO: 5346187 - DNA, 25 bp, Homo sapien
gccttgtttgcctgacctagtctgg

SEQ ID NO: 5346188 - DNA, 25 bp, Homo sapien
gagaaatggagcatggacctaccca

SEQ ID NO: 5346189 - DNA, 25 bp, Homo sapien
gctggggcacctcatttcgttgatg

SEQ ID NO: 5346190 - DNA, 25 bp, Homo sapien
tcatatgaagagaggaattgctccc

SEQ ID NO: 5346191 - DNA, 25 bp, Homo sapien
tttcttcctctccacggagatgctc

SEQ ID NO: 5346192 - DNA, 25 bp, Homo sapien
ggaattgctccccagaaccgctggg

SEQ ID NO: 5346193 - DNA, 25 bp, Homo sapien
tactgtctcagtttgctccagctgc

SEQ ID NO: 5346194 - DNA, 25 bp, Homo sapien
gcaagggagaaccttcatgaaaatc

SEQ ID NO: 5346195 - DNA, 25 bp, Homo sapien
gaaaatcactgtcaagtactgtctc

SEQ ID NO: 5346196 - DNA, 25 bp, Homo sapien
tagacagcctactcctcgctgtgtc

SEQ ID NO: 5346197 - DNA, 25 bp, Homo sapien
cagccccagttcctctgttgaatat

SEQ ID NO: 5346198 - DNA, 25 bp, Homo sapien
tcctcaatttatctccagccccagt

SEQ ID NO: 5346199 - DNA, 25 bp, Homo sapien
aaacttctcattgctcctcaattta

SEQ ID NO: 5346200 - DNA, 25 bp, Homo sapien
tcctctgttgaatatcttctgcccc

SEQ ID NO: 5346201 - DNA, 25 bp, Homo sapien
agggctggtggagaccagccagcaa

SEQ ID NO: 5346202 - DNA, 25 bp, Homo sapien
ctggtggagaccagccagcaagtgg

SEQ ID NO: 5346203 - DNA, 25 bp, Homo sapien
gatgaagggctggtggagaccagcc

SEQ ID NO: 5346204 - DNA, 25 bp, Homo sapien
agagatgaagggctggtggagacca

SEQ ID NO: 5346205 - DNA, 25 bp, Homo sapien
tcaacaaaaactgtgcccctggtct

SEQ ID NO: 5346206 - DNA, 25 bp, Homo sapien
tcgaccctttcaacaaaaactgtgc

SEQ ID NO: 5346207 - DNA, 25 bp, Homo sapien
caaggaagtgcttcctggtcgaccc

SEQ ID NO: 5346208 - DNA, 25 bp, Homo sapien
tccagaggctttaggacagagtcaa

SEQ ID NO: 5346209 - DNA, 25 bp, Homo sapien
ttcaaaagactttactacctgagag

SEQ ID NO: 5346210 - DNA, 25 bp, Homo sapien
tcatgctaactgctgagtaaaacca

SEQ ID NO: 5346211 - DNA, 25 bp, Homo sapien
ctgagagggtttcatgctaactgct

SEQ ID NO: 5346212 - DNA, 25 bp, Homo sapien
gagggtttcatgctaactgctgagt

SEQ ID NO: 5346213 - DNA, 25 bp, Homo sapien
tgtttatctaacacagaatatcagt

SEQ ID NO: 5346214 - DNA, 25 bp, Homo sapien
caagaaaatatgtctcatacacagg

SEQ ID NO: 5346215 - DNA, 25 bp, Homo sapien
ggacaaaatcgattaatagaaactg

SEQ ID NO: 5346216 - DNA, 25 bp, Homo sapien
gcccagacataaaacttattagaaa

SEQ ID NO: 5346217 - DNA, 25 bp, Homo sapien
tagcttctaagtcaggggcaatgcc

SEQ ID NO: 5346218 - DNA, 25 bp, Homo sapien
aatgcctttccaccaggcagatttt

SEQ ID NO: 5346219 - DNA, 25 bp, Homo sapien
tgttttctgacacgtagtaagccat

SEQ ID NO: 5346220 - DNA, 25 bp, Homo sapien
gggcaatgcctttccaccaggcaga

SEQ ID NO: 5346221 - DNA, 25 bp, Homo sapien
taagtacatgcattaagtgtagttc

SEQ ID NO: 5346222 - DNA, 25 bp, Homo sapien
cctctatccccagtgatttaaaatt

SEQ ID NO: 5346223 - DNA, 25 bp, Homo sapien
aagaaatgctccctctatccccagt

SEQ ID NO: 5346224 - DNA, 25 bp, Homo sapien
tgctccctctatccccagtgattta

SEQ ID NO: 5346225 - DNA, 25 bp, Homo sapien
gggctgcttgggttataaacttgtc

SEQ ID NO: 5346226 - DNA, 25 bp, Homo sapien
gagtactgtctggtgcaatagctaa

SEQ ID NO: 5346227 - DNA, 25 bp, Homo sapien
ttgaggattattggtggatgctgcc

SEQ ID NO: 5346228 - DNA, 25 bp, Homo sapien
gagcagtgtctgagtcccattgagg

SEQ ID NO: 5346229 - DNA, 25 bp, Homo sapien
aagtcatactccttagctgctggct

SEQ ID NO: 5346230 - DNA, 25 bp, Homo sapien
catactccttagctgctggcttggc

SEQ ID NO: 5346231 - DNA, 25 bp, Homo sapien
gacagaaagtcatactccttagctg

SEQ ID NO: 5346232 - DNA, 25 bp, Homo sapien
cagaaagtcatactccttagctgct

SEQ ID NO: 5346233 - DNA, 25 bp, Homo sapien
gcagctctatcagtacatggttgga

SEQ ID NO: 5346234 - DNA, 25 bp, Homo sapien
ggacataggcgctttcaaacaggaa

SEQ ID NO: 5346235 - DNA, 25 bp, Homo sapien
ccataaatgtggatgtgacttgtcc

SEQ ID NO: 5346236 - DNA, 25 bp, Homo sapien
gacttgtccaggtgctactctagct

SEQ ID NO: 5346237 - DNA, 25 bp, Homo sapien
tatagtaagacatacgtgtacctct

SEQ ID NO: 5346238 - DNA, 25 bp, Homo sapien
ccagcaacagctgggatcacccatg

SEQ ID NO: 5346239 - DNA, 25 bp, Homo sapien
gagaagttctgagtgttttggccga

SEQ ID NO: 5346240 - DNA, 25 bp, Homo sapien
ttttggccgatagtcccagatgagg

SEQ ID NO: 5346241 - DNA, 25 bp, Homo sapien
gccttcagtaacagtagtccctgcc

SEQ ID NO: 5346242 - DNA, 25 bp, Homo sapien
tgaatgatccactgtccaccagatg

SEQ ID NO: 5346243 - DNA, 25 bp, Homo sapien
taaacttcttgaaacagagtgagaa

SEQ ID NO: 5346244 - DNA, 25 bp, Homo sapien
tcagagggatcaagccacccttgga

SEQ ID NO: 5346245 - DNA, 25 bp, Homo sapien
tcagaaactagtctgcagaccttgc

SEQ ID NO: 5346246 - DNA, 25 bp, Homo sapien
tgcaggctgctaagttatccgggtc

SEQ ID NO: 5346247 - DNA, 25 bp, Homo sapien
tatccatggtgagtctggacctcag

SEQ ID NO: 5346248 - DNA, 25 bp, Homo sapien
tatagtactgagagatccttgtgcc

SEQ ID NO: 5346249 - DNA, 25 bp, Homo sapien
gaggtcatggagatggactatcttg

SEQ ID NO: 5346250 - DNA, 25 bp, Homo sapien
gttgcttctttctgacccaaaaaca

SEQ ID NO: 5346251 - DNA, 25 bp, Homo sapien
tcagtacttcatcaatgccatgccc

SEQ ID NO: 5346252 - DNA, 25 bp, Homo sapien
ggaatgggttcaaagcaaccagagt

SEQ ID NO: 5346253 - DNA, 25 bp, Homo sapien
aggagatgggaagtctaagcattcc

SEQ ID NO: 5346254 - DNA, 25 bp, Homo sapien
tttacaaaatcacttctacctctat

SEQ ID NO: 5346255 - DNA, 25 bp, Homo sapien
ttttatatttaacaaggagatggga

SEQ ID NO: 5346256 - DNA, 25 bp, Homo sapien
acctctatgaccctgaaaataagat

SEQ ID NO: 5346257 - DNA, 25 bp, Homo sapien
tgtctagtatcacggcaaaactcca

SEQ ID NO: 5346258 - DNA, 25 bp, Homo sapien
tagaataagaggcacacaggatttc

SEQ ID NO: 5346259 - DNA, 25 bp, Homo sapien
tataaactccggtgggtacatacag

SEQ ID NO: 5346260 - DNA, 25 bp, Homo sapien
tacagttgctgtgggatattgacct

SEQ ID NO: 5346261 - DNA, 25 bp, Homo sapien
gccacactgccttcaccgagtccaa

SEQ ID NO: 5346262 - DNA, 25 bp, Homo sapien
cacactgccttcaccgagtccaaga

SEQ ID NO: 5346263 - DNA, 25 bp, Homo sapien
agccacactgccttcaccgagtcca

SEQ ID NO: 5346264 - DNA, 25 bp, Homo sapien
ccacactgccttcaccgagtccaag

SEQ ID NO: 5346265 - DNA, 25 bp, Homo sapien
ctgatctcgaagaaatataacttcc

SEQ ID NO: 5346266 - DNA, 25 bp, Homo sapien
gatctcgaagaaatataacttccct

SEQ ID NO: 5346267 - DNA, 25 bp, Homo sapien
tctcgaagaaatataacttccctgt

SEQ ID NO: 5346268 - DNA, 25 bp, Homo sapien
ctcgaagaaatataacttccctgtt

SEQ ID NO: 5346269 - DNA, 25 bp, Homo sapien
aagagctttgtttcttttcacattc

SEQ ID NO: 5346270 - DNA, 25 bp, Homo sapien
aaaagagctttgtttcttttcacat

SEQ ID NO: 5346271 - DNA, 25 bp, Homo sapien
agagctttgtttcttttcacattca

SEQ ID NO: 5346272 - DNA, 25 bp, Homo sapien
aaagagctttgtttcttttcacatt

SEQ ID NO: 5346273 - DNA, 25 bp, Homo sapien
aaaatgcaaagaaacgactcgttgt

SEQ ID NO: 5346274 - DNA, 25 bp, Homo sapien
ctagcaaacacctgccagctgcatg

SEQ ID NO: 5346275 - DNA, 25 bp, Homo sapien
gacatgggtgggcacactagcaaac

SEQ ID NO: 5346276 - DNA, 25 bp, Homo sapien
gttgtaagcacataactcacgtggg

SEQ ID NO: 5346277 - DNA, 25 bp, Homo sapien
tactgtaaagtgtccgtctgtgtct

SEQ ID NO: 5346278 - DNA, 25 bp, Homo sapien
aaagaactacagagggacgatgtcc

SEQ ID NO: 5346279 - DNA, 25 bp, Homo sapien
tcacctgtcaaaaatggagttccac

SEQ ID NO: 5346280 - DNA, 25 bp, Homo sapien
catgaatcaaagtatggaatggccc

SEQ ID NO: 5346281 - DNA, 25 bp, Homo sapien
cacagttggttgaatttgtggatgt

SEQ ID NO: 5346282 - DNA, 25 bp, Homo sapien
tattgtcatattgttattttctctc

SEQ ID NO: 5346283 - DNA, 25 bp, Homo sapien
ctttttcaagtcttttccatccaca

SEQ ID NO: 5346284 - DNA, 25 bp, Homo sapien
tgaatttgtggatgtggaacccatg

SEQ ID NO: 5346285 - DNA, 25 bp, Homo sapien
aactatttttggcaccatagtagaa

SEQ ID NO: 5346286 - DNA, 25 bp, Homo sapien
accagaatatgtgaataagcagaca

SEQ ID NO: 5346287 - DNA, 25 bp, Homo sapien
gatgtcgatgttcaactatttttgg

SEQ ID NO: 5346288 - DNA, 25 bp, Homo sapien
gacagaaagaatctttttgatgtcg

SEQ ID NO: 5346289 - DNA, 25 bp, Homo sapien
tcttgggtatggaggtttcttgaag

SEQ ID NO: 5346290 - DNA, 25 bp, Homo sapien
ttgggtatggaggtttcttgaagac

SEQ ID NO: 5346291 - DNA, 25 bp, Homo sapien
cttgggtatggaggtttcttgaaga

SEQ ID NO: 5346292 - DNA, 25 bp, Homo sapien
taggccaaatctgagaaaagaccaa

SEQ ID NO: 5346293 - DNA, 25 bp, Homo sapien
ctagaacatagaagaatgcctagtt

SEQ ID NO: 5346294 - DNA, 25 bp, Homo sapien
tcaatgaaactacgagttttaggcc

SEQ ID NO: 5346295 - DNA, 25 bp, Homo sapien
catatcaagttagaactctcatcac

SEQ ID NO: 5346296 - DNA, 25 bp, Homo sapien
catttttacattagagcccctagca

SEQ ID NO: 5346297 - DNA, 25 bp, Homo sapien
tctttcattggccatatccattctt

SEQ ID NO: 5346298 - DNA, 25 bp, Homo sapien
gttatgccatttttacattagagcc

SEQ ID NO: 5346299 - DNA, 25 bp, Homo sapien
gcccctagcatgttaatcttagtta

SEQ ID NO: 5346300 - DNA, 25 bp, Homo sapien
gcagagtttacaaacgccaatttaa

SEQ ID NO: 5346301 - DNA, 25 bp, Homo sapien
ttatatctttaaccttggcccatgg

SEQ ID NO: 5346302 - DNA, 25 bp, Homo sapien
agtgtaaggtcactgttattccttg

SEQ ID NO: 5346303 - DNA, 25 bp, Homo sapien
gcaccacaggattcattctggaatt

SEQ ID NO: 5346304 - DNA, 25 bp, Homo sapien
aatgactctggcctgatttcttcag

SEQ ID NO: 5346305 - DNA, 25 bp, Homo sapien
taggagcttagttagcccccaaata

SEQ ID NO: 5346306 - DNA, 25 bp, Homo sapien
tggcactaagatgggaatgactctg

SEQ ID NO: 5346307 - DNA, 25 bp, Homo sapien
aattatctgattatatgattggcac

SEQ ID NO: 5346308 - DNA, 25 bp, Homo sapien
ttttttcatgtaagcctttgaaatc

SEQ ID NO: 5346309 - DNA, 25 bp, Homo sapien
tacttttttcatgtaagcctttgaa

SEQ ID NO: 5346310 - DNA, 25 bp, Homo sapien
attacttttttcatgtaagcctttg

SEQ ID NO: 5346311 - DNA, 25 bp, Homo sapien
tcctgatttggaataaccacatttc

SEQ ID NO: 5346312 - DNA, 25 bp, Homo sapien
caagcagtgctcttaccaaaaggta

SEQ ID NO: 5346313 - DNA, 25 bp, Homo sapien
tcactgccatagctatgcaatgggt

SEQ ID NO: 5346314 - DNA, 25 bp, Homo sapien
actgaaatacaatctgtggtgggac

SEQ ID NO: 5346315 - DNA, 25 bp, Homo sapien
gcttttctcgatcttacgctgctag

SEQ ID NO: 5346316 - DNA, 25 bp, Homo sapien
gtctgacctctgtcaactggcataa

SEQ ID NO: 5346317 - DNA, 25 bp, Homo sapien
gagatcttcctcgtttttagcaatt

SEQ ID NO: 5346318 - DNA, 25 bp, Homo sapien
tgaaggataactgagatcttcctcg

SEQ ID NO: 5346319 - DNA, 25 bp, Homo sapien
tattcatttgccagttgaaggataa

SEQ ID NO: 5346320 - DNA, 25 bp, Homo sapien
tctgtgttttcatacgtatatatgt

SEQ ID NO: 5346321 - DNA, 25 bp, Homo sapien
cacaaggtttgtgcataggtttttg

SEQ ID NO: 5346322 - DNA, 25 bp, Homo sapien
ttcacaaggtttgtgcataggtttt

SEQ ID NO: 5346323 - DNA, 25 bp, Homo sapien
atattcacaaggtttgtgcataggt

SEQ ID NO: 5346324 - DNA, 25 bp, Homo sapien
agatctggcaggctattgtgaggca

SEQ ID NO: 5346325 - DNA, 25 bp, Homo sapien
atctggcaggctattgtgaggcaat

SEQ ID NO: 5346326 - DNA, 25 bp, Homo sapien
gatctggcaggctattgtgaggcaa

SEQ ID NO: 5346327 - DNA, 25 bp, Homo sapien
aacatttgcttccaaggagagaggt

SEQ ID NO: 5346328 - DNA, 25 bp, Homo sapien
acatttgcttccaaggagagaggta

SEQ ID NO: 5346329 - DNA, 25 bp, Homo sapien
tttgcttccaaggagagaggtaaaa

SEQ ID NO: 5346330 - DNA, 25 bp, Homo sapien
catttgcttccaaggagagaggtaa

SEQ ID NO: 5346331 - DNA, 25 bp, Homo sapien
gaaaatgtaaggtatctaaatctgc

SEQ ID NO: 5346332 - DNA, 25 bp, Homo sapien
caggccttacattctctctcttaaa

SEQ ID NO: 5346333 - DNA, 25 bp, Homo sapien
taaatctgctgctaaaccatcattg

SEQ ID NO: 5346334 - DNA, 25 bp, Homo sapien
cacattgataagagacaagtaggaa

SEQ ID NO: 5346335 - DNA, 25 bp, Homo sapien
gggctatatgactccattgtcttag

SEQ ID NO: 5346336 - DNA, 25 bp, Homo sapien
tagaccaagtgttgggctatatgac

SEQ ID NO: 5346337 - DNA, 25 bp, Homo sapien
gccaggatagtctcagtatcttgat

SEQ ID NO: 5346338 - DNA, 25 bp, Homo sapien
catttgcctagaaagtggactgctg

SEQ ID NO: 5346339 - DNA, 25 bp, Homo sapien
gaactgcagcaagacgttcttcaag

SEQ ID NO: 5346340 - DNA, 25 bp, Homo sapien
tgagcaaccgcagcaagttttccct

SEQ ID NO: 5346341 - DNA, 25 bp, Homo sapien
gcaacatcgtatttataacaggaag

SEQ ID NO: 5346342 - DNA, 25 bp, Homo sapien
ggctgagctgcaacatcgtatttat

SEQ ID NO: 5346343 - DNA, 25 bp, Homo sapien
ctggtgttagagaaatgagttaaaa

SEQ ID NO: 5346344 - DNA, 25 bp, Homo sapien
gtgttagagaaatgagttaaaaatg

SEQ ID NO: 5346345 - DNA, 25 bp, Homo sapien
tgttagagaaatgagttaaaaatgg

SEQ ID NO: 5346346 - DNA, 25 bp, Homo sapien
tggtgttagagaaatgagttaaaaa

SEQ ID NO: 5346347 - DNA, 25 bp, Homo sapien
tgatctgcactttttgtggtggaac

SEQ ID NO: 5346348 - DNA, 25 bp, Homo sapien
attaaataagacagtgaaattaaag

SEQ ID NO: 5346349 - DNA, 25 bp, Homo sapien
attggagcagcccaaaaaagcatat

SEQ ID NO: 5346350 - DNA, 25 bp, Homo sapien
ttttattggagcagcccaaaaaagc

SEQ ID NO: 5346351 - DNA, 25 bp, Homo sapien
gaagaacatatttagacagagtaac

SEQ ID NO: 5346352 - DNA, 25 bp, Homo sapien
gcagctgctctaaagactgtgtgta

SEQ ID NO: 5346353 - DNA, 25 bp, Homo sapien
gctgctctaaagactgtgtgtatgt

SEQ ID NO: 5346354 - DNA, 25 bp, Homo sapien
ctgtgtgtatgtgctggcggaagac

SEQ ID NO: 5346355 - DNA, 25 bp, Homo sapien
tgtgtatgtgctggcggaagacaca

SEQ ID NO: 5346356 - DNA, 25 bp, Homo sapien
ctccatgccttctccctcttcccgg

SEQ ID NO: 5346357 - DNA, 25 bp, Homo sapien
catgccttctccctcttcccgggtt

SEQ ID NO: 5346358 - DNA, 25 bp, Homo sapien
tccgtaatcagttgtctccatgcct

SEQ ID NO: 5346359 - DNA, 25 bp, Homo sapien
ctccgtaatcagttgtctccatgcc

SEQ ID NO: 5346360 - DNA, 25 bp, Homo sapien
tgcatgtctagaagcgggaggtctg

SEQ ID NO: 5346361 - DNA, 25 bp, Homo sapien
tctagaagcgggaggtctgtgtttc

SEQ ID NO: 5346362 - DNA, 25 bp, Homo sapien
agtgtgcatgtctagaagcgggagg

SEQ ID NO: 5346363 - DNA, 25 bp, Homo sapien
gaagcgggaggtctgtgtttctcct

SEQ ID NO: 5346364 - DNA, 25 bp, Homo sapien
agctgctaatgctccagtgacaata

SEQ ID NO: 5346365 - DNA, 25 bp, Homo sapien
cctaataagtgaccgatagctgcta

SEQ ID NO: 5346366 - DNA, 25 bp, Homo sapien
tgctaatgctccagtgacaatattt

SEQ ID NO: 5346367 - DNA, 25 bp, Homo sapien
taagtgaccgatagctgctaatgct

SEQ ID NO: 5346368 - DNA, 25 bp, Homo sapien
tcatactgagaatgctagttctata

SEQ ID NO: 5346369 - DNA, 25 bp, Homo sapien
catactgagaatgctagttctatac

SEQ ID NO: 5346370 - DNA, 25 bp, Homo sapien
tgaggaaggggtgctagtccaaaag

SEQ ID NO: 5346371 - DNA, 25 bp, Homo sapien
cgtacactgtaccaagttcttttgc

SEQ ID NO: 5346372 - DNA, 25 bp, Homo sapien
aaaaagactcacgttaatgcgcatg

SEQ ID NO: 5346373 - DNA, 25 bp, Homo sapien
gtagctgctaattataggcacgcac

SEQ ID NO: 5346374 - DNA, 25 bp, Homo sapien
tgcgcatgattcaagcatgagtccg

SEQ ID NO: 5346375 - DNA, 25 bp, Homo sapien
tccactctgggctactgaactagtt

SEQ ID NO: 5346376 - DNA, 25 bp, Homo sapien
ttttttctcacagggctacttgcca

SEQ ID NO: 5346377 - DNA, 25 bp, Homo sapien
gattcaacttggcaggagacttaga

SEQ ID NO: 5346378 - DNA, 25 bp, Homo sapien
tctgggagtgcttgaccgagaaaca

SEQ ID NO: 5346379 - DNA, 25 bp, Homo sapien
gatgtcatcgctgtcctcagtctta

SEQ ID NO: 5346380 - DNA, 25 bp, Homo sapien
tactggttcaaaatggatgtcatcg

SEQ ID NO: 5346381 - DNA, 25 bp, Homo sapien
aagtgctacttgtttggccaaaaat

SEQ ID NO: 5346382 - DNA, 25 bp, Homo sapien
gatttcctggttccgaaatgccaaa

SEQ ID NO: 5346383 - DNA, 25 bp, Homo sapien
agtaacattagctgctggtctgaga

SEQ ID NO: 5346384 - DNA, 25 bp, Homo sapien
ggaattatatgctggtgactgacta

SEQ ID NO: 5346385 - DNA, 25 bp, Homo sapien
gaagatactgggaattatatgctgg

SEQ ID NO: 5346386 - DNA, 25 bp, Homo sapien
ctttgtgggagtaacattagctgct

SEQ ID NO: 5346387 - DNA, 25 bp, Homo sapien
tggtaccggccattctaagttactg

SEQ ID NO: 5346388 - DNA, 25 bp, Homo sapien
cactggagtgtgaatctcggctcta

SEQ ID NO: 5346389 - DNA, 25 bp, Homo sapien
tcagaagtctgtcgtacgtaaaagg

SEQ ID NO: 5346390 - DNA, 25 bp, Homo sapien
ggcaagtgctttggagttacaccac

SEQ ID NO: 5346391 - DNA, 25 bp, Homo sapien
ggtccataattctctgtgggccaac

SEQ ID NO: 5346392 - DNA, 25 bp, Homo sapien
cataattctctgtgggccaacgatg

SEQ ID NO: 5346393 - DNA, 25 bp, Homo sapien
gtctgtgacccctgatatccatcag

SEQ ID NO: 5346394 - DNA, 25 bp, Homo sapien
ctgttagtggagccccatgaaatgt

SEQ ID NO: 5346395 - DNA, 25 bp, Homo sapien
tcttggcaaatcattttccgtaaag

SEQ ID NO: 5346396 - DNA, 25 bp, Homo sapien
cattttccgtaaagaattctgatct

SEQ ID NO: 5346397 - DNA, 25 bp, Homo sapien
gtaatggcctttacttcttggcaaa

SEQ ID NO: 5346398 - DNA, 25 bp, Homo sapien
cgtaatggcctttacttcttggcaa

SEQ ID NO: 5346399 - DNA, 25 bp, Homo sapien
aatatttggtaggagatggtgtaga

SEQ ID NO: 5346400 - DNA, 25 bp, Homo sapien
tcttcgagttcctgcatgactgact

SEQ ID NO: 5346401 - DNA, 25 bp, Homo sapien
gagaggacctccttcactatagtct

SEQ ID NO: 5346402 - DNA, 25 bp, Homo sapien
gaatctgcatttcgcaaagaaccat

SEQ ID NO: 5346403 - DNA, 25 bp, Homo sapien
ttttacagactccaggggcacaggc

SEQ ID NO: 5346404 - DNA, 25 bp, Homo sapien
ttacagactccaggggcacaggcaa

SEQ ID NO: 5346405 - DNA, 25 bp, Homo sapien
ctcttttacagactccaggggcaca

SEQ ID NO: 5346406 - DNA, 25 bp, Homo sapien
tcttttacagactccaggggcacag

SEQ ID NO: 5346407 - DNA, 25 bp, Homo sapien
cagtgggttatcagtaagaacgtac

SEQ ID NO: 5346408 - DNA, 25 bp, Homo sapien
aaaacactgaccagtgggttatcag

SEQ ID NO: 5346409 - DNA, 25 bp, Homo sapien
aatataagaccaacgcaaaaacact

SEQ ID NO: 5346410 - DNA, 25 bp, Homo sapien
cttctgtgcattaataacaacatat

SEQ ID NO: 5346411 - DNA, 25 bp, Homo sapien
tcttgaccactgaaagatttgaatc

SEQ ID NO: 5346412 - DNA, 25 bp, Homo sapien
tttcttgaccactgaaagatttgaa

SEQ ID NO: 5346413 - DNA, 25 bp, Homo sapien
ttcttgaccactgaaagatttgaat

SEQ ID NO: 5346414 - DNA, 25 bp, Homo sapien
agaaacaacactttttatagattca

SEQ ID NO: 5346415 - DNA, 25 bp, Homo sapien
aatgaacacttctccctatgtattc

SEQ ID NO: 5346416 - DNA, 25 bp, Homo sapien
ataatgaacacttctccctatgtat

SEQ ID NO: 5346417 - DNA, 25 bp, Homo sapien
gtttaaacagaggatcaataggttc

SEQ ID NO: 5346418 - DNA, 25 bp, Homo sapien
gaggatcaataggttcaggaatact

SEQ ID NO: 5346419 - DNA, 25 bp, Homo sapien
ataatggtcttacctacaaagcctt

SEQ ID NO: 5346420 - DNA, 25 bp, Homo sapien
taatggtcttacctacaaagccttg

SEQ ID NO: 5346421 - DNA, 25 bp, Homo sapien
tggtcttacctacaaagccttgtgc

SEQ ID NO: 5346422 - DNA, 25 bp, Homo sapien
atggtcttacctacaaagccttgtg

SEQ ID NO: 5346423 - DNA, 25 bp, Homo sapien
tgcccaatgtacaagcagagcaggt

SEQ ID NO: 5346424 - DNA, 25 bp, Homo sapien
ctcttagagtgtttatttcatgctg

SEQ ID NO: 5346425 - DNA, 25 bp, Homo sapien
agagtgtttatttcatgctgaacta

SEQ ID NO: 5346426 - DNA, 25 bp, Homo sapien
catgtttttcctgggctcttagagt

SEQ ID NO: 5346427 - DNA, 25 bp, Homo sapien
aaacctacgcactaagtgaaagcaa

SEQ ID NO: 5346428 - DNA, 25 bp, Homo sapien
taaaacctacgcactaagtgaaagc

SEQ ID NO: 5346429 - DNA, 25 bp, Homo sapien
aaaacctacgcactaagtgaaagca

SEQ ID NO: 5346430 - DNA, 25 bp, Homo sapien
ctcctttaattgtaagtggctggta

SEQ ID NO: 5346431 - DNA, 25 bp, Homo sapien
actgcttttctgtgaatcagagtac

SEQ ID NO: 5346432 - DNA, 25 bp, Homo sapien
aaccgcatcccaccaagatttttgt

SEQ ID NO: 5346433 - DNA, 25 bp, Homo sapien
gcaggcataacggctgataggagct

SEQ ID NO: 5346434 - DNA, 25 bp, Homo sapien
atgaattccactgtaagccaagcca

SEQ ID NO: 5346435 - DNA, 25 bp, Homo sapien
tttagccattttcggattccaggta

SEQ ID NO: 5346436 - DNA, 25 bp, Homo sapien
tccactgtaagccaagccaagtaag

SEQ ID NO: 5346437 - DNA, 25 bp, Homo sapien
tttcggattccaggtaaagcaggca

SEQ ID NO: 5346438 - DNA, 25 bp, Homo sapien
tccaatatcatcgctaccaagaaaa

SEQ ID NO: 5346439 - DNA, 25 bp, Homo sapien
tagaaaacagagcattatataacac

SEQ ID NO: 5346440 - DNA, 25 bp, Homo sapien
ttatataacacagactgcccgcttt

SEQ ID NO: 5346441 - DNA, 25 bp, Homo sapien
cattatataacacagactgcccgct

SEQ ID NO: 5346442 - DNA, 25 bp, Homo sapien
agcattatataacacagactgcccg

SEQ ID NO: 5346443 - DNA, 25 bp, Homo sapien
acagattgtatttgctcacgttgtc

SEQ ID NO: 5346444 - DNA, 25 bp, Homo sapien
gctggacaacaaaacgggtgcttat

SEQ ID NO: 5346445 - DNA, 25 bp, Homo sapien
aacatgattattgcagacctaaccc

SEQ ID NO: 5346446 - DNA, 25 bp, Homo sapien
gtatctacataagacagcagaaggg

SEQ ID NO: 5346447 - DNA, 25 bp, Homo sapien
tgtccagcttcaccttttattaatt

SEQ ID NO: 5346448 - DNA, 25 bp, Homo sapien
ttttgtccagcttcaccttttatta

SEQ ID NO: 5346449 - DNA, 25 bp, Homo sapien
gattttgtccagcttcaccttttat

SEQ ID NO: 5346450 - DNA, 25 bp, Homo sapien
tttgtccagcttcaccttttattaa

SEQ ID NO: 5346451 - DNA, 25 bp, Homo sapien
gaaaatcttgccataaaagttagcc

SEQ ID NO: 5346452 - DNA, 25 bp, Homo sapien
gcagatgcacttactagaaccacag

SEQ ID NO: 5346453 - DNA, 25 bp, Homo sapien
gaaccacagtattcctctgattaag

SEQ ID NO: 5346454 - DNA, 25 bp, Homo sapien
gttaactacctagctgcaatgcaga

SEQ ID NO: 5346455 - DNA, 25 bp, Homo sapien
taagaaagtagctgacagttcatca

SEQ ID NO: 5346456 - DNA, 25 bp, Homo sapien
atttctaagaaagtagctgacagtt

SEQ ID NO: 5346457 - DNA, 25 bp, Homo sapien
gacagttcatcatttccacccaaag

SEQ ID NO: 5346458 - DNA, 25 bp, Homo sapien
tgacagttcatcatttccacccaaa

SEQ ID NO: 5346459 - DNA, 25 bp, Homo sapien
gaagcataagattagcataggccag

SEQ ID NO: 5346460 - DNA, 25 bp, Homo sapien
tcctgcacatctctagtggaaagcg

SEQ ID NO: 5346461 - DNA, 25 bp, Homo sapien
tccaaacactgtaaagactccagat

SEQ ID NO: 5346462 - DNA, 25 bp, Homo sapien
ccagcagtaagtctgtattggttgc

SEQ ID NO: 5346463 - DNA, 25 bp, Homo sapien
aatgtaaagacccaatagcttttat

SEQ ID NO: 5346464 - DNA, 25 bp, Homo sapien
tgtaaagacccaatagcttttatct

SEQ ID NO: 5346465 - DNA, 25 bp, Homo sapien
atgtaaagacccaatagcttttatc

SEQ ID NO: 5346466 - DNA, 25 bp, Homo sapien
gtcttacataaagttctgactgaat

SEQ ID NO: 5346467 - DNA, 25 bp, Homo sapien
tctaaacttgaacgcaaagctatgt

SEQ ID NO: 5346468 - DNA, 25 bp, Homo sapien
gggtctgtacaacacacgaattcca

SEQ ID NO: 5346469 - DNA, 25 bp, Homo sapien
aaacttgaacgcaaagctatgttcc

SEQ ID NO: 5346470 - DNA, 25 bp, Homo sapien
ttcgctgccctttcaacccagtatt

SEQ ID NO: 5346471 - DNA, 25 bp, Homo sapien
agtttcgctgccctttcaacccagt

SEQ ID NO: 5346472 - DNA, 25 bp, Homo sapien
gtttcgctgccctttcaacccagta

SEQ ID NO: 5346473 - DNA, 25 bp, Homo sapien
aagtttcgctgccctttcaacccag

SEQ ID NO: 5346474 - DNA, 25 bp, Homo sapien
cttgcacactaaggtaagtacatac

SEQ ID NO: 5346475 - DNA, 25 bp, Homo sapien
tgcacactaaggtaagtacatacgt

SEQ ID NO: 5346476 - DNA, 25 bp, Homo sapien
cacactaaggtaagtacatacgtat

SEQ ID NO: 5346477 - DNA, 25 bp, Homo sapien
gcacactaaggtaagtacatacgta

SEQ ID NO: 5346478 - DNA, 25 bp, Homo sapien
agctttgcaaaatagaatcctctca

SEQ ID NO: 5346479 - DNA, 25 bp, Homo sapien
ttgcaaaatagaatcctctcaactt

SEQ ID NO: 5346480 - DNA, 25 bp, Homo sapien
tacagctttgcaaaatagaatcctc

SEQ ID NO: 5346481 - DNA, 25 bp, Homo sapien
ctttgcaaaatagaatcctctcaac

SEQ ID NO: 5346482 - DNA, 25 bp, Homo sapien
tgctcggattacagacgaagaatat

SEQ ID NO: 5346483 - DNA, 25 bp, Homo sapien
ctcggattacagacgaagaatattt

SEQ ID NO: 5346484 - DNA, 25 bp, Homo sapien
cggattacagacgaagaatattttt

SEQ ID NO: 5346485 - DNA, 25 bp, Homo sapien
gtgctcggattacagacgaagaata

SEQ ID NO: 5346486 - DNA, 25 bp, Homo sapien
gctccccgtaggctttgctgcgcct

SEQ ID NO: 5346487 - DNA, 25 bp, Homo sapien
ccgctccccgtaggctttgctgcgc

SEQ ID NO: 5346488 - DNA, 25 bp, Homo sapien
ccccgtaggctttgctgcgcctcat

SEQ ID NO: 5346489 - DNA, 25 bp, Homo sapien
gtaccgctccccgtaggctttgctg

SEQ ID NO: 5346490 - DNA, 25 bp, Homo sapien
ccactgtgacgcacttgtgtactgc

SEQ ID NO: 5346491 - DNA, 25 bp, Homo sapien
aaagccactgacgtagccggcggag

SEQ ID NO: 5346492 - DNA, 25 bp, Homo sapien
gtgtactgcgtcagcactgtgtatc

SEQ ID NO: 5346493 - DNA, 25 bp, Homo sapien
cctgaaagccactgacgtagccggc

SEQ ID NO: 5346494 - DNA, 25 bp, Homo sapien
ctgtgttggtacttccacctgcaca

SEQ ID NO: 5346495 - DNA, 25 bp, Homo sapien
tctgtgttggtacttccacctgcac

SEQ ID NO: 5346496 - DNA, 25 bp, Homo sapien
atgtacttgggcctgttagagtcct

SEQ ID NO: 5346497 - DNA, 25 bp, Homo sapien
gatcaatgtacttgggcctgttaga

SEQ ID NO: 5346498 - DNA, 25 bp, Homo sapien
tgagatcaatgtacttgggcctgtt

SEQ ID NO: 5346499 - DNA, 25 bp, Homo sapien
tacttgggcctgttagagtcctcca

SEQ ID NO: 5346500 - DNA, 25 bp, Homo sapien
tactacccgattttatgaagcccat

SEQ ID NO: 5346501 - DNA, 25 bp, Homo sapien
ttactacccgattttatgaagccca

SEQ ID NO: 5346502 - DNA, 25 bp, Homo sapien
tacggttgctttcttcctgttcagc

SEQ ID NO: 5346503 - DNA, 25 bp, Homo sapien
attacggttgctttcttcctgttca

SEQ ID NO: 5346504 - DNA, 25 bp, Homo sapien
acggttgctttcttcctgttcagca

SEQ ID NO: 5346505 - DNA, 25 bp, Homo sapien
cggttgctttcttcctgttcagcat

SEQ ID NO: 5346506 - DNA, 25 bp, Homo sapien
gatattcagtcaggccaaatgccaa

SEQ ID NO: 5346507 - DNA, 25 bp, Homo sapien
aaagtgttgaccctatgtccctgag

SEQ ID NO: 5346508 - DNA, 25 bp, Homo sapien
gctctacttctacaggactaaggga

SEQ ID NO: 5346509 - DNA, 25 bp, Homo sapien
taatgcctagaactggccaagcaca

SEQ ID NO: 5346510 - DNA, 25 bp, Homo sapien
gagctctgtgtggaattgggcccct

SEQ ID NO: 5346511 - DNA, 25 bp, Homo sapien
agctctgtgtggaattgggcccctc

SEQ ID NO: 5346512 - DNA, 25 bp, Homo sapien
agacacatataaagacgttagagga

SEQ ID NO: 5346513 - DNA, 25 bp, Homo sapien
taacttcagtggaaagtgaccctca

SEQ ID NO: 5346514 - DNA, 25 bp, Homo sapien
tacaacataatcatttttgctccag

SEQ ID NO: 5346515 - DNA, 25 bp, Homo sapien
tgtctgtatgtgcatgacagcaatc

SEQ ID NO: 5346516 - DNA, 25 bp, Homo sapien
gaaacttgtacacaatagaattgct

SEQ ID NO: 5346517 - DNA, 25 bp, Homo sapien
aaatccatgcaagaaaggtgttagt

SEQ ID NO: 5346518 - DNA, 25 bp, Homo sapien
ttttcaatgaattcccttcacaggc

SEQ ID NO: 5346519 - DNA, 25 bp, Homo sapien
cttacagatctaagttagctagact

SEQ ID NO: 5346520 - DNA, 25 bp, Homo sapien
cattccctgatgtaaatttctagtc

SEQ ID NO: 5346521 - DNA, 25 bp, Homo sapien
tacattccctgatgtaaatttctag

SEQ ID NO: 5346522 - DNA, 25 bp, Homo sapien
ttccctgatgtaaatttctagtcct

SEQ ID NO: 5346523 - DNA, 25 bp, Homo sapien
ccctgatgtaaatttctagtcctta

SEQ ID NO: 5346524 - DNA, 25 bp, Homo sapien
agcagcttcgagagctgtgcccagg

SEQ ID NO: 5346525 - DNA, 25 bp, Homo sapien
caaccagccctacctctgtgagagt

SEQ ID NO: 5346526 - DNA, 25 bp, Homo sapien
tccggccgcggagtgatggtggcct

SEQ ID NO: 5346527 - DNA, 25 bp, Homo sapien
tgtaggtggaggtatggctcgggcc

SEQ ID NO: 5346528 - DNA, 25 bp, Homo sapien
acagcagcggcagcgtgaaatcaac

SEQ ID NO: 5346529 - DNA, 25 bp, Homo sapien
agcagcggcagcgtgaaatcaactt

SEQ ID NO: 5346530 - DNA, 25 bp, Homo sapien
cagcggcagcgtgaaatcaacttgt

SEQ ID NO: 5346531 - DNA, 25 bp, Homo sapien
tgaaatcaacttgttggcctatcat

SEQ ID NO: 5346532 - DNA, 25 bp, Homo sapien
cctcctcagcaccttcaagccccca

SEQ ID NO: 5346533 - DNA, 25 bp, Homo sapien
cgcctcctcagcaccttcaagcccc

SEQ ID NO: 5346534 - DNA, 25 bp, Homo sapien
cttcgcctcctcagcaccttcaagc

SEQ ID NO: 5346535 - DNA, 25 bp, Homo sapien
tcctcagcaccttcaagcccccagc

SEQ ID NO: 5346536 - DNA, 25 bp, Homo sapien
gcaattctgactagttggagttttg

SEQ ID NO: 5346537 - DNA, 25 bp, Homo sapien
ataaaccacttgcaattctgactag

SEQ ID NO: 5346538 - DNA, 25 bp, Homo sapien
caatctatatggggggccataaacc

SEQ ID NO: 5346539 - DNA, 25 bp, Homo sapien
cacttgcaattctgactagttggag

SEQ ID NO: 5346540 - DNA, 25 bp, Homo sapien
ataataatgcttacatcatcagatc

SEQ ID NO: 5346541 - DNA, 25 bp, Homo sapien
ataatgcttacatcatcagatccag

SEQ ID NO: 5346542 - DNA, 25 bp, Homo sapien
aaataataatgcttacatcatcaga

SEQ ID NO: 5346543 - DNA, 25 bp, Homo sapien
taataatgcttacatcatcagatcc

SEQ ID NO: 5346544 - DNA, 25 bp, Homo sapien
ctggagcactgtggacattgtacca

SEQ ID NO: 5346545 - DNA, 25 bp, Homo sapien
tgtaccacttgacaagcatctgaac

SEQ ID NO: 5346546 - DNA, 25 bp, Homo sapien
ccactctgagtgataactgggtcct

SEQ ID NO: 5346547 - DNA, 25 bp, Homo sapien
ttctagtccatgctaagcggtctgt

SEQ ID NO: 5346548 - DNA, 25 bp, Homo sapien
ttataaatgaaacttctcaatcgta

SEQ ID NO: 5346549 - DNA, 25 bp, Homo sapien
tataaatgaaacttctcaatcgtac

SEQ ID NO: 5346550 - DNA, 25 bp, Homo sapien
taactcagaggtggcaatttcagga

SEQ ID NO: 5346551 - DNA, 25 bp, Homo sapien
ctaactcagaggtggcaatttcagg

SEQ ID NO: 5346552 - DNA, 25 bp, Homo sapien
gctgttggaaagtacaatcctcatt

SEQ ID NO: 5346553 - DNA, 25 bp, Homo sapien
tccaagctgttggaaagtacaatcc

SEQ ID NO: 5346554 - DNA, 25 bp, Homo sapien
ttggaaagtacaatcctcattatag

SEQ ID NO: 5346555 - DNA, 25 bp, Homo sapien
aatgtaagttccaagctgttggaaa

SEQ ID NO: 5346556 - DNA, 25 bp, Homo sapien
tgtaaaaagtcgtaaatacaataca

SEQ ID NO: 5346557 - DNA, 25 bp, Homo sapien
gtaaatacaatacaaatgaattctt

SEQ ID NO: 5346558 - DNA, 25 bp, Homo sapien
tcgtaaatacaatacaaatgaattc

SEQ ID NO: 5346559 - DNA, 25 bp, Homo sapien
aaatacaatacaaatgaattctttt

SEQ ID NO: 5346560 - DNA, 25 bp, Homo sapien
gaggcattgtgttggacatcgtcag

SEQ ID NO: 5346561 - DNA, 25 bp, Homo sapien
cattgtgttggacatcgtcagagag

SEQ ID NO: 5346562 - DNA, 25 bp, Homo sapien
ccaaggagtttactaagaggctttg

SEQ ID NO: 5346563 - DNA, 25 bp, Homo sapien
ctcgtccaatgatccaaggagttta

SEQ ID NO: 5346564 - DNA, 25 bp, Homo sapien
atttctcttggttggattccttctc

SEQ ID NO: 5346565 - DNA, 25 bp, Homo sapien
ttggtataatttctcttggttggat

SEQ ID NO: 5346566 - DNA, 25 bp, Homo sapien
gtataatttctcttggttggattcc

SEQ ID NO: 5346567 - DNA, 25 bp, Homo sapien
taatttctcttggttggattccttc

SEQ ID NO: 5346568 - DNA, 25 bp, Homo sapien
actgccgaggatggcttcatcccac

SEQ ID NO: 5346569 - DNA, 25 bp, Homo sapien
aacaactgccgaggatggcttcatc

SEQ ID NO: 5346570 - DNA, 25 bp, Homo sapien
cttcatcccacaggtccctctcctc

SEQ ID NO: 5346571 - DNA, 25 bp, Homo sapien
tcagtaacaactgccgaggatggct

SEQ ID NO: 5346572 - DNA, 25 bp, Homo sapien
cttcttctctctcccagaccttctc

SEQ ID NO: 5346573 - DNA, 25 bp, Homo sapien
tcttctctctcccagaccttctcac

SEQ ID NO: 5346574 - DNA, 25 bp, Homo sapien
ttcttctctctcccagaccttctca

SEQ ID NO: 5346575 - DNA, 25 bp, Homo sapien
gaagccaccggagtttgaagaaatg

SEQ ID NO: 5346576 - DNA, 25 bp, Homo sapien
gattcttcttgctgcgtctgggcct

SEQ ID NO: 5346577 - DNA, 25 bp, Homo sapien
tacagattccagtcttcgtggcgca

SEQ ID NO: 5346578 - DNA, 25 bp, Homo sapien
gtgagtctcccttcgcgcggtgctt

SEQ ID NO: 5346579 - DNA, 25 bp, Homo sapien
cctttcttggcacgcggagtcctcc

SEQ ID NO: 5346580 - DNA, 25 bp, Homo sapien
cccctttcttggcacgcggagtcct

SEQ ID NO: 5346581 - DNA, 25 bp, Homo sapien
gggagtccctgctgctccggccccc

SEQ ID NO: 5346582 - DNA, 25 bp, Homo sapien
gggcctccagaaggggagtccctgc

SEQ ID NO: 5346583 - DNA, 25 bp, Homo sapien
ttctgctttctaatataatcctcca

SEQ ID NO: 5346584 - DNA, 25 bp, Homo sapien
agttcatgttgaaaagagtcagaag

SEQ ID NO: 5346585 - DNA, 25 bp, Homo sapien
aagcaaagggttggttgcaatcctc

SEQ ID NO: 5346586 - DNA, 25 bp, Homo sapien
gttggttgcaatcctctggctttct

SEQ ID NO: 5346587 - DNA, 25 bp, Homo sapien
ggagtgcaggggtgtgatctcagct

SEQ ID NO: 5346588 - DNA, 25 bp, Homo sapien
cagttctcctcctcagcctccggag

SEQ ID NO: 5346589 - DNA, 25 bp, Homo sapien
gctggagtgcaggggtgtgatctca

SEQ ID NO: 5346590 - DNA, 25 bp, Homo sapien
gcagttctcctcctcagcctccgga

SEQ ID NO: 5346591 - DNA, 25 bp, Homo sapien
aattagctgcgcatgatagtgcaca

SEQ ID NO: 5346592 - DNA, 25 bp, Homo sapien
tagctgcgcatgatagtgcacacct

SEQ ID NO: 5346593 - DNA, 25 bp, Homo sapien
actgcacgtgagcctggatgacaga

SEQ ID NO: 5346594 - DNA, 25 bp, Homo sapien
aaaaagcttcatggtggctgggtga

SEQ ID NO: 5346595 - DNA, 25 bp, Homo sapien
tgtgctgctgatcaaccagctatga

SEQ ID NO: 5346596 - DNA, 25 bp, Homo sapien
gctgacaccagtgggtgcactctaa

SEQ ID NO: 5346597 - DNA, 25 bp, Homo sapien
tcaacctggagatggcgtcaggtcc

SEQ ID NO: 5346598 - DNA, 25 bp, Homo sapien
agcaaacagtcaattctgcagctga

SEQ ID NO: 5346599 - DNA, 25 bp, Homo sapien
cacactagcccgttgttatggcacg

SEQ ID NO: 5346600 - DNA, 25 bp, Homo sapien
tgtggatgttcgaacccaggagtcc

SEQ ID NO: 5346601 - DNA, 25 bp, Homo sapien
cgtgtgtcagccacctcgttttgga

SEQ ID NO: 5346602 - DNA, 25 bp, Homo sapien
agtccaaagatgcagtgagtaagcc

SEQ ID NO: 5346603 - DNA, 25 bp, Homo sapien
ctgcaataccaaatcgatgcgtaga

SEQ ID NO: 5346604 - DNA, 25 bp, Homo sapien
acagaagaacataccagatattaaa

SEQ ID NO: 5346605 - DNA, 25 bp, Homo sapien
tgcgtttaatatagcgttcatcaaa

SEQ ID NO: 5346606 - DNA, 25 bp, Homo sapien
gcgtagactagatagagtaaactct

SEQ ID NO: 5346607 - DNA, 25 bp, Homo sapien
acgaaactgtttcgggcagagcggt

SEQ ID NO: 5346608 - DNA, 25 bp, Homo sapien
tgaaagctctggagcgaccccaatg

SEQ ID NO: 5346609 - DNA, 25 bp, Homo sapien
taaaggacaagatttgcccagacgg

SEQ ID NO: 5346610 - DNA, 25 bp, Homo sapien
tagtgacttcgagctttgtcgcccc

SEQ ID NO: 5346611 - DNA, 25 bp, Homo sapien
cggccttgtaacgccctcggtgttg

SEQ ID NO: 5346612 - DNA, 25 bp, Homo sapien
gacagggcggccttgtaacgccctc

SEQ ID NO: 5346613 - DNA, 25 bp, Homo sapien
gacggtcaaggtgccttgaagcgga

SEQ ID NO: 5346614 - DNA, 25 bp, Homo sapien
tgtgggtgggcgacggtcaaggtgc

SEQ ID NO: 5346615 - DNA, 25 bp, Homo sapien
gacgtacatataagtggatatccat

SEQ ID NO: 5346616 - DNA, 25 bp, Homo sapien
cgacgtacatataagtggatatcca

SEQ ID NO: 5346617 - DNA, 25 bp, Homo sapien
acgtacatataagtggatatccatc

SEQ ID NO: 5346618 - DNA, 25 bp, Homo sapien
gcaaaagtatgtggatctggttgtc

SEQ ID NO: 5346619 - DNA, 25 bp, Homo sapien
ttgcaaaagtatgtggatctggttg

SEQ ID NO: 5346620 - DNA, 25 bp, Homo sapien
tgcaaaagtatgtggatctggttgt

SEQ ID NO: 5346621 - DNA, 25 bp, Homo sapien
tttgcaaaagtatgtggatctggtt

SEQ ID NO: 5346622 - DNA, 25 bp, Homo sapien
ctcagaggcaactgctttcagctga

SEQ ID NO: 5346623 - DNA, 25 bp, Homo sapien
gaccttatttccacataattgctta

SEQ ID NO: 5346624 - DNA, 25 bp, Homo sapien
gacaggcgtgaccttatttccacat

SEQ ID NO: 5346625 - DNA, 25 bp, Homo sapien
cagctgattactttgacaggcgtga

SEQ ID NO: 5346626 - DNA, 25 bp, Homo sapien
taagaaaagtggtatgaacacggat

SEQ ID NO: 5346627 - DNA, 25 bp, Homo sapien
tgtgcaaaggtcattaatcctccaa

SEQ ID NO: 5346628 - DNA, 25 bp, Homo sapien
taaactgattttgtatcaagactct

SEQ ID NO: 5346629 - DNA, 25 bp, Homo sapien
ttctgtgttggagagcaagcatgct

SEQ ID NO: 5346630 - DNA, 25 bp, Homo sapien
aatccaagaatagactggtcccaaa

SEQ ID NO: 5346631 - DNA, 25 bp, Homo sapien
tctgtcctttcttggccttgttcct

SEQ ID NO: 5346632 - DNA, 25 bp, Homo sapien
tagactggtcccaaagcatttcctc

SEQ ID NO: 5346633 - DNA, 25 bp, Homo sapien
ccaagaatagactggtcccaaagca

SEQ ID NO: 5346634 - DNA, 25 bp, Homo sapien
tcctttcgattcttaagcttttctg

SEQ ID NO: 5346635 - DNA, 25 bp, Homo sapien
tcttagagactacatctcggctttt

SEQ ID NO: 5346636 - DNA, 25 bp, Homo sapien
tgtctaagtcaatttcctcgcagct

SEQ ID NO: 5346637 - DNA, 25 bp, Homo sapien
tactgacatgtacggtttctatttc

SEQ ID NO: 5346638 - DNA, 25 bp, Homo sapien
taaccactgaggcaaccgattttcc

SEQ ID NO: 5346639 - DNA, 25 bp, Homo sapien
tctggtcaaacattctatacgtggg

SEQ ID NO: 5346640 - DNA, 25 bp, Homo sapien
gaaacagtccctcgtgaactgacag

SEQ ID NO: 5346641 - DNA, 25 bp, Homo sapien
tatacgtgggtctggaattaacctc

SEQ ID NO: 5346642 - DNA, 25 bp, Homo sapien
cctgggtgtgtagtaagttatacca

SEQ ID NO: 5346643 - DNA, 25 bp, Homo sapien
catgactgggtgtctatacaaagac

SEQ ID NO: 5346644 - DNA, 25 bp, Homo sapien
ttatttgtgatagccccagaaagaa

SEQ ID NO: 5346645 - DNA, 25 bp, Homo sapien
gaatgtatcctggtcgttaacggac

SEQ ID NO: 5346646 - DNA, 25 bp, Homo sapien
tcatagaagtctgataaaagagtac

SEQ ID NO: 5346647 - DNA, 25 bp, Homo sapien
actataataacagtggttgcttggg

SEQ ID NO: 5346648 - DNA, 25 bp, Homo sapien
gcggtgatgggtatgtccattatct

SEQ ID NO: 5346649 - DNA, 25 bp, Homo sapien
taaaaagtcatagaagtctgataaa

SEQ ID NO: 5346650 - DNA, 25 bp, Homo sapien
tcaggctgagaatttggtggagaaa

SEQ ID NO: 5346651 - DNA, 25 bp, Homo sapien
ttcaaatagtgagactacacaataa

SEQ ID NO: 5346652 - DNA, 25 bp, Homo sapien
aaatagtgagactacacaataactg

SEQ ID NO: 5346653 - DNA, 25 bp, Homo sapien
tgatcatattcactcagtttttcag

SEQ ID NO: 5346654 - DNA, 25 bp, Homo sapien
aaccacaattcagagatcaaaaatc

SEQ ID NO: 5346655 - DNA, 25 bp, Homo sapien
cacaattcagagatcaaaaatcaat

SEQ ID NO: 5346656 - DNA, 25 bp, Homo sapien
ccacaattcagagatcaaaaatcaa

SEQ ID NO: 5346657 - DNA, 25 bp, Homo sapien
accacaattcagagatcaaaaatca

SEQ ID NO: 5346658 - DNA, 25 bp, Homo sapien
tcttaaagcaagatgtagccatgtg

SEQ ID NO: 5346659 - DNA, 25 bp, Homo sapien
gatgccatggttagaaatcaaacag

SEQ ID NO: 5346660 - DNA, 25 bp, Homo sapien
tctgctgctgaaatgaggatgccat

SEQ ID NO: 5346661 - DNA, 25 bp, Homo sapien
gtttgtgacagagactaccagttgc

SEQ ID NO: 5346662 - DNA, 25 bp, Homo sapien
gcaaaatcctttgttatttgaactg

SEQ ID NO: 5346663 - DNA, 25 bp, Homo sapien
ttgaactgtaacactactccacaga

SEQ ID NO: 5346664 - DNA, 25 bp, Homo sapien
ctcataatgcaaaatcctttgttat

SEQ ID NO: 5346665 - DNA, 25 bp, Homo sapien
actccacagacatcttttataaaag

SEQ ID NO: 5346666 - DNA, 25 bp, Homo sapien
tgagtttgtcttcaaggtactctgg

SEQ ID NO: 5346667 - DNA, 25 bp, Homo sapien
tattgagtttgtcttcaaggtactc

SEQ ID NO: 5346668 - DNA, 25 bp, Homo sapien
ctacttattgagtttgtcttcaagg

SEQ ID NO: 5346669 - DNA, 25 bp, Homo sapien
agtttgtcttcaaggtactctggtg

SEQ ID NO: 5346670 - DNA, 25 bp, Homo sapien
tgtgagccactgtaaaaaattatca

SEQ ID NO: 5346671 - DNA, 25 bp, Homo sapien
gtgtgagccactgtaaaaaattatc

SEQ ID NO: 5346672 - DNA, 25 bp, Homo sapien
tcacgctgagcgaaagacagacatg

SEQ ID NO: 5346673 - DNA, 25 bp, Homo sapien
gaaagatcatccacccaacaaaggt

SEQ ID NO: 5346674 - DNA, 25 bp, Homo sapien
tgggagcatacacctatcacaaatt

SEQ ID NO: 5346675 - DNA, 25 bp, Homo sapien
tctagtaatagcagcagatcaatgg

SEQ ID NO: 5346676 - DNA, 25 bp, Homo sapien
taactgacatagtgagatgttctcc

SEQ ID NO: 5346677 - DNA, 25 bp, Homo sapien
tgttctcccaaccaattagtctagt

SEQ ID NO: 5346678 - DNA, 25 bp, Homo sapien
gctctgattttgaaccaactttctg

SEQ ID NO: 5346679 - DNA, 25 bp, Homo sapien
gaaggatggacctgatccttactct

SEQ ID NO: 5346680 - DNA, 25 bp, Homo sapien
tcttgcaccatatgaaatgtttttc

SEQ ID NO: 5346681 - DNA, 25 bp, Homo sapien
aaattttcatgcctcacagcgtgac

SEQ ID NO: 5346682 - DNA, 25 bp, Homo sapien
gcgtgacctgttgtgataatggcat

SEQ ID NO: 5346683 - DNA, 25 bp, Homo sapien
ctgtgccctgcctaatttaactctt

SEQ ID NO: 5346684 - DNA, 25 bp, Homo sapien
ggtgtattgggcctggcctcaacgt

SEQ ID NO: 5346685 - DNA, 25 bp, Homo sapien
aggtgtattgggcctggcctcaacg

SEQ ID NO: 5346686 - DNA, 25 bp, Homo sapien
tgtattgggcctggcctcaacgtat

SEQ ID NO: 5346687 - DNA, 25 bp, Homo sapien
gtgtattgggcctggcctcaacgta

SEQ ID NO: 5346688 - DNA, 25 bp, Homo sapien
cttagtaaagaccacgcagagcaca

SEQ ID NO: 5346689 - DNA, 25 bp, Homo sapien
tgggagactaggcaactgattctgt

SEQ ID NO: 5346690 - DNA, 25 bp, Homo sapien
tgaatgtactggctaggcgctctag

SEQ ID NO: 5346691 - DNA, 25 bp, Homo sapien
cagagcacagcactaaattttggga

SEQ ID NO: 5346692 - DNA, 25 bp, Homo sapien
cctcagaaggatcggtataggtgaa

SEQ ID NO: 5346693 - DNA, 25 bp, Homo sapien
tatccagaccaatacagaggagttc

SEQ ID NO: 5346694 - DNA, 25 bp, Homo sapien
ggtcctatcggaattttgaaagtca

SEQ ID NO: 5346695 - DNA, 25 bp, Homo sapien
gatacctttggaggaatctgctaac

SEQ ID NO: 5346696 - DNA, 25 bp, Homo sapien
gagtcactgggctagtccaattccc

SEQ ID NO: 5346697 - DNA, 25 bp, Homo sapien
gatcattcctagatgagagtcactg

SEQ ID NO: 5346698 - DNA, 25 bp, Homo sapien
tactgctagtactgtgtgaactgac

SEQ ID NO: 5346699 - DNA, 25 bp, Homo sapien
caaactcaaatccagaaagtgtggg

SEQ ID NO: 5346700 - DNA, 25 bp, Homo sapien
tcggaagccctggcgtctctttccg

SEQ ID NO: 5346701 - DNA, 25 bp, Homo sapien
actcgggccgcgccctggtcggcca

SEQ ID NO: 5346702 - DNA, 25 bp, Homo sapien
ttccctccgcactccactcggaagc

SEQ ID NO: 5346703 - DNA, 25 bp, Homo sapien
gccggtgaggggtgcgcgggactcg

SEQ ID NO: 5346704 - DNA, 25 bp, Homo sapien
gcaggggcgggcgtctacaactact

SEQ ID NO: 5346705 - DNA, 25 bp, Homo sapien
ccaacgccgccagccaggggataag

SEQ ID NO: 5346706 - DNA, 25 bp, Homo sapien
ggcgggcgtctacaactactgtccc

SEQ ID NO: 5346707 - DNA, 25 bp, Homo sapien
cggagaggcaggaacaaccgctgcc

SEQ ID NO: 5346708 - DNA, 25 bp, Homo sapien
ttcctgaggggaagtcgccgccact

SEQ ID NO: 5346709 - DNA, 25 bp, Homo sapien
tcctgaggggaagtcgccgccacta

SEQ ID NO: 5346710 - DNA, 25 bp, Homo sapien
cctgaggggaagtcgccgccactac

SEQ ID NO: 5346711 - DNA, 25 bp, Homo sapien
cggcttatgactggacagcacagac

SEQ ID NO: 5346712 - DNA, 25 bp, Homo sapien
tctcagtatcaaacccaactgacat

SEQ ID NO: 5346713 - DNA, 25 bp, Homo sapien
cttctgctaacaatctcagtatcaa

SEQ ID NO: 5346714 - DNA, 25 bp, Homo sapien
cactgtctgtcggcttggtgggcca

SEQ ID NO: 5346715 - DNA, 25 bp, Homo sapien
taacaatctcagtatcaaacccaac

SEQ ID NO: 5346716 - DNA, 25 bp, Homo sapien
ctgtgcttgtgggtatagctctcct

SEQ ID NO: 5346717 - DNA, 25 bp, Homo sapien
tccttgcccgtgtgcctgactggga

SEQ ID NO: 5346718 - DNA, 25 bp, Homo sapien
tgcccatagcatggagggaacttcc

SEQ ID NO: 5346719 - DNA, 25 bp, Homo sapien
tttattgggcgggtcagtgtcgacc

SEQ ID NO: 5346720 - DNA, 25 bp, Homo sapien
aaaataatatgaaatgcagacttgt

SEQ ID NO: 5346721 - DNA, 25 bp, Homo sapien
acaaagttcactttattacattaat

SEQ ID NO: 5346722 - DNA, 25 bp, Homo sapien
aattttacacactaaaataatatga

SEQ ID NO: 5346723 - DNA, 25 bp, Homo sapien
cactttattacattaattttacaca

SEQ ID NO: 5346724 - DNA, 25 bp, Homo sapien
gattctcttgaagacaatgtcaccc

SEQ ID NO: 5346725 - DNA, 25 bp, Homo sapien
caggacttactgcaggatagctcat

SEQ ID NO: 5346726 - DNA, 25 bp, Homo sapien
gaacctatcaaagggcgttggccag

SEQ ID NO: 5346727 - DNA, 25 bp, Homo sapien
aattgtcctcctatagctgtgaagc

SEQ ID NO: 5346728 - DNA, 25 bp, Homo sapien
tataaaaacagtggatgcatcagct

SEQ ID NO: 5346729 - DNA, 25 bp, Homo sapien
tgggtggttgatgctcacactctct

SEQ ID NO: 5346730 - DNA, 25 bp, Homo sapien
gggtggttgatgctcacactctctc

SEQ ID NO: 5346731 - DNA, 25 bp, Homo sapien
ttgggtggttgatgctcacactctc

SEQ ID NO: 5346732 - DNA, 25 bp, Homo sapien
attgggtggttgatgctcacactct

SEQ ID NO: 5346733 - DNA, 25 bp, Homo sapien
agtgatgacagcgccctgaggcagt

SEQ ID NO: 5346734 - DNA, 25 bp, Homo sapien
ctgttgtctgtgactccctaaagca

SEQ ID NO: 5346735 - DNA, 25 bp, Homo sapien
tgacagcgccctgaggcagtgttct

SEQ ID NO: 5346736 - DNA, 25 bp, Homo sapien
tgtgactccctaaagcatattctgg

SEQ ID NO: 5346737 - DNA, 25 bp, Homo sapien
ccccaaatagggtacaggatgtggc

SEQ ID NO: 5346738 - DNA, 25 bp, Homo sapien
tataaacgctaaatgggcaaaggca

SEQ ID NO: 5346739 - DNA, 25 bp, Homo sapien
cttgtaagctgccataatatgacca

SEQ ID NO: 5346740 - DNA, 25 bp, Homo sapien
gactgcataactggactgtgccagg

SEQ ID NO: 5346741 - DNA, 25 bp, Homo sapien
acacgctcagagcaccaccaactta

SEQ ID NO: 5346742 - DNA, 25 bp, Homo sapien
agtgctggcagatactgaccacagg

SEQ ID NO: 5346743 - DNA, 25 bp, Homo sapien
gacatgatggatcctcagtaagtgc

SEQ ID NO: 5346744 - DNA, 25 bp, Homo sapien
cattagggtatgtgagccgctcccc

SEQ ID NO: 5346745 - DNA, 25 bp, Homo sapien
cgttgagttcggtcacagacttgat

SEQ ID NO: 5346746 - DNA, 25 bp, Homo sapien
gaaagttgtcaccagtttattgtca

SEQ ID NO: 5346747 - DNA, 25 bp, Homo sapien
tggtgattatgtcgccgttgagttc

SEQ ID NO: 5346748 - DNA, 25 bp, Homo sapien
tgtcaccttccaactgaaccactgt

SEQ ID NO: 5346749 - DNA, 25 bp, Homo sapien
tgagcatggaacacctaagtggccc

SEQ ID NO: 5346750 - DNA, 25 bp, Homo sapien
ggttcctatgatcccaagcctctag

SEQ ID NO: 5346751 - DNA, 25 bp, Homo sapien
caccatgagttgtgcccagcagaag

SEQ ID NO: 5346752 - DNA, 25 bp, Homo sapien
tgaagccagagactttgtgaccacc

SEQ ID NO: 5346753 - DNA, 25 bp, Homo sapien
cccaccgtgaattcgttttggatca

SEQ ID NO: 5346754 - DNA, 25 bp, Homo sapien
ttcccattctgcacgatttccgaca

SEQ ID NO: 5346755 - DNA, 25 bp, Homo sapien
tgatggtgaacttgaagtgcttccc

SEQ ID NO: 5346756 - DNA, 25 bp, Homo sapien
cactttggacccagcggtgatggtg

SEQ ID NO: 5346757 - DNA, 25 bp, Homo sapien
aacgacatgacatggagggacagag

SEQ ID NO: 5346758 - DNA, 25 bp, Homo sapien
tttcatgaccgtggtaggtaggtga

SEQ ID NO: 5346759 - DNA, 25 bp, Homo sapien
tgaggtttagatatgggcagaggtg

SEQ ID NO: 5346760 - DNA, 25 bp, Homo sapien
ggtaggtgagagaaacgacatgaca

SEQ ID NO: 5346761 - DNA, 25 bp, Homo sapien
tcttctggcctgaagaaccgttcct

SEQ ID NO: 5346762 - DNA, 25 bp, Homo sapien
gcagcatcggctgtggcctcagaaa

SEQ ID NO: 5346763 - DNA, 25 bp, Homo sapien
cagagagttgatcttccaagctagg

SEQ ID NO: 5346764 - DNA, 25 bp, Homo sapien
aaccgttcctcttgtaagcaccctg

SEQ ID NO: 5346765 - DNA, 25 bp, Homo sapien
tagacacctgtcttccaaagctcag

SEQ ID NO: 5346766 - DNA, 25 bp, Homo sapien
tgaccttgcttgtgattactaaacc

SEQ ID NO: 5346767 - DNA, 25 bp, Homo sapien
tgtacatgaccctaggaggcacagg

SEQ ID NO: 5346768 - DNA, 25 bp, Homo sapien
tccatacacctgagggaatgcctta

SEQ ID NO: 5346769 - DNA, 25 bp, Homo sapien
taactccagaagtcagtaaaatgcc

SEQ ID NO: 5346770 - DNA, 25 bp, Homo sapien
gcaggaataggatcacacaacgaag

SEQ ID NO: 5346771 - DNA, 25 bp, Homo sapien
caacgaagtgccaatgacatggcca

SEQ ID NO: 5346772 - DNA, 25 bp, Homo sapien
tggtatctatccagcacagtgctca

SEQ ID NO: 5346773 - DNA, 25 bp, Homo sapien
agctttgcctttcagtccagcactc

SEQ ID NO: 5346774 - DNA, 25 bp, Homo sapien
ctttgcctttcagtccagcactcac

SEQ ID NO: 5346775 - DNA, 25 bp, Homo sapien
gctttgcctttcagtccagcactca

SEQ ID NO: 5346776 - DNA, 25 bp, Homo sapien
ttcctggctctgcagttggtacttg

SEQ ID NO: 5346777 - DNA, 25 bp, Homo sapien
tctgcagttggtacttgccggagaa

SEQ ID NO: 5346778 - DNA, 25 bp, Homo sapien
ggctctgcagttggtacttgccgga

SEQ ID NO: 5346779 - DNA, 25 bp, Homo sapien
cagttggtacttgccggagaaactc

SEQ ID NO: 5346780 - DNA, 25 bp, Homo sapien
gtccactgtaggctgttttataggg

SEQ ID NO: 5346781 - DNA, 25 bp, Homo sapien
tcttcacgactgacctgcggctctg

SEQ ID NO: 5346782 - DNA, 25 bp, Homo sapien
ggtggcaatagagctccctcttcac

SEQ ID NO: 5346783 - DNA, 25 bp, Homo sapien
tctgccgaccagactgtccactgta

SEQ ID NO: 5346784 - DNA, 25 bp, Homo sapien
tagctaatattatcttggtgaaggt

SEQ ID NO: 5346785 - DNA, 25 bp, Homo sapien
ccaggatgcttagctaatattatct

SEQ ID NO: 5346786 - DNA, 25 bp, Homo sapien
gggagattggtgtcctgtttgtatc

SEQ ID NO: 5346787 - DNA, 25 bp, Homo sapien
ggatgcttagctaatattatcttgg

SEQ ID NO: 5346788 - DNA, 25 bp, Homo sapien
cattctcctgatttgcaaggtctac

SEQ ID NO: 5346789 - DNA, 25 bp, Homo sapien
tacccttctcctatgctccagtgtt

SEQ ID NO: 5346790 - DNA, 25 bp, Homo sapien
taagggaggggatctttgcattctc

SEQ ID NO: 5346791 - DNA, 25 bp, Homo sapien
tgcaaggtctacctgcaacctctct

SEQ ID NO: 5346792 - DNA, 25 bp, Homo sapien
aatcctacacttctaactgcctgtg

SEQ ID NO: 5346793 - DNA, 25 bp, Homo sapien
ggctgtttgcaaacactgtactgca

SEQ ID NO: 5346794 - DNA, 25 bp, Homo sapien
cccgttgttatgaacaatgccaaat

SEQ ID NO: 5346795 - DNA, 25 bp, Homo sapien
agctttccaaaaacacatgtgctgt

SEQ ID NO: 5346796 - DNA, 25 bp, Homo sapien
cagtgaccagactctcagtacctca

SEQ ID NO: 5346797 - DNA, 25 bp, Homo sapien
tacacagtctgattctacatccgag

SEQ ID NO: 5346798 - DNA, 25 bp, Homo sapien
tacaaaagtctttacattgagctag

SEQ ID NO: 5346799 - DNA, 25 bp, Homo sapien
gtggccatccagactgtgcatacct

SEQ ID NO: 5346800 - DNA, 25 bp, Homo sapien
cgcctccctggaatggagcatcctg

SEQ ID NO: 5346801 - DNA, 25 bp, Homo sapien
gaatggagcatcctgatctcctgat

SEQ ID NO: 5346802 - DNA, 25 bp, Homo sapien
tggaatggagcatcctgatctcctg

SEQ ID NO: 5346803 - DNA, 25 bp, Homo sapien
tccctggaatggagcatcctgatct

SEQ ID NO: 5346804 - DNA, 25 bp, Homo sapien
agatgtatccgctaagacaaaaggc

SEQ ID NO: 5346805 - DNA, 25 bp, Homo sapien
gggacggtagttgggctgtactgca

SEQ ID NO: 5346806 - DNA, 25 bp, Homo sapien
aggcatacgcgccaaaggctccttg

SEQ ID NO: 5346807 - DNA, 25 bp, Homo sapien
tagttgctgggctaattcagatgta

SEQ ID NO: 5346808 - DNA, 25 bp, Homo sapien
cttccgtctagacggaatctctggg

SEQ ID NO: 5346809 - DNA, 25 bp, Homo sapien
tctagacggaatctctgggattctt

SEQ ID NO: 5346810 - DNA, 25 bp, Homo sapien
gactctctaagcgtcttgctgctac

SEQ ID NO: 5346811 - DNA, 25 bp, Homo sapien
actctgggactctctaagcgtcttg

SEQ ID NO: 5346812 - DNA, 25 bp, Homo sapien
tgtgaggtttgtttggcggctcacc

SEQ ID NO: 5346813 - DNA, 25 bp, Homo sapien
taggcaccgagtgaccatctgtgag

SEQ ID NO: 5346814 - DNA, 25 bp, Homo sapien
caccgagtgaccatctgtgaggttt

SEQ ID NO: 5346815 - DNA, 25 bp, Homo sapien
cctgcacctcgtaggcaccgagtga

SEQ ID NO: 5346816 - DNA, 25 bp, Homo sapien
tctgggctttgtcatatgggaggaa

SEQ ID NO: 5346817 - DNA, 25 bp, Homo sapien
catggcagcgccctctaatccctga

SEQ ID NO: 5346818 - DNA, 25 bp, Homo sapien
gtgacccatggcagcgccctctaat

SEQ ID NO: 5346819 - DNA, 25 bp, Homo sapien
ttagtgacccatggcagcgccctct

SEQ ID NO: 5346820 - DNA, 25 bp, Homo sapien
cagcttacaggtggggtcgctggca

SEQ ID NO: 5346821 - DNA, 25 bp, Homo sapien
tcgctggcatttgcccagtggactg

SEQ ID NO: 5346822 - DNA, 25 bp, Homo sapien
agggttttgatcttgcacagggcct

SEQ ID NO: 5346823 - DNA, 25 bp, Homo sapien
tgcttggtgcacaggtggtggagac

SEQ ID NO: 5346824 - DNA, 25 bp, Homo sapien
tagccttggttcatcctcacagctg

SEQ ID NO: 5346825 - DNA, 25 bp, Homo sapien
ctagccttggttcatcctcacagct

SEQ ID NO: 5346826 - DNA, 25 bp, Homo sapien
tctagccttggttcatcctcacagc

SEQ ID NO: 5346827 - DNA, 25 bp, Homo sapien
ttctagccttggttcatcctcacag

SEQ ID NO: 5346828 - DNA, 25 bp, Homo sapien
catgagtaagaattgaacagagctc

SEQ ID NO: 5346829 - DNA, 25 bp, Homo sapien
tgaacagagctctccctgtctgaac

SEQ ID NO: 5346830 - DNA, 25 bp, Homo sapien
tgaactctttgctgtgcgccccttc

SEQ ID NO: 5346831 - DNA, 25 bp, Homo sapien
tctgaactctttgctgtgcgcccct

SEQ ID NO: 5346832 - DNA, 25 bp, Homo sapien
ttctgatagcccactaccatcaaac

SEQ ID NO: 5346833 - DNA, 25 bp, Homo sapien
gtggggtgttgtataccaacttcaa

SEQ ID NO: 5346834 - DNA, 25 bp, Homo sapien
atagcccactaccatcaaaccagcc

SEQ ID NO: 5346835 - DNA, 25 bp, Homo sapien
ggtgttgtataccaacttcaatgac

SEQ ID NO: 5346836 - DNA, 25 bp, Homo sapien
cgggaaatatcgctggccaccataa

SEQ ID NO: 5346837 - DNA, 25 bp, Homo sapien
gaagttgcaatccagaggtcagaag

SEQ ID NO: 5346838 - DNA, 25 bp, Homo sapien
gctaaagctgccaaatctcttgcaa

SEQ ID NO: 5346839 - DNA, 25 bp, Homo sapien
aatttggccattggcagaaccttgg

SEQ ID NO: 5346840 - DNA, 25 bp, Homo sapien
atttcctaaacctccaatgagtaag

SEQ ID NO: 5346841 - DNA, 25 bp, Homo sapien
ttataatcttctagatctttcaaat

SEQ ID NO: 5346842 - DNA, 25 bp, Homo sapien
tcctaaacctccaatgagtaagtgc

SEQ ID NO: 5346843 - DNA, 25 bp, Homo sapien
tttataatcttctagatctttcaaa

SEQ ID NO: 5346844 - DNA, 25 bp, Homo sapien
caaaagaatacagtaccaagagggc

SEQ ID NO: 5346845 - DNA, 25 bp, Homo sapien
aatgtgagaaccagcgcaccgatgg

SEQ ID NO: 5346846 - DNA, 25 bp, Homo sapien
cttggccgtggcagactaagggcac

SEQ ID NO: 5346847 - DNA, 25 bp, Homo sapien
aaggatagccaaagcccacctggtc

SEQ ID NO: 5346848 - DNA, 25 bp, Homo sapien
cacagatttcgtggaggaggagaaa

SEQ ID NO: 5346849 - DNA, 25 bp, Homo sapien
attgaagccgggcttgctggcttgg

SEQ ID NO: 5346850 - DNA, 25 bp, Homo sapien
tcacagatttcgtggaggaggagaa

SEQ ID NO: 5346851 - DNA, 25 bp, Homo sapien
gaggagaaattgaagccgggcttgc

SEQ ID NO: 5346852 - DNA, 25 bp, Homo sapien
cacacacggtttccgactgtgctgt

SEQ ID NO: 5346853 - DNA, 25 bp, Homo sapien
cacacggtttccgactgtgctgtct

SEQ ID NO: 5346854 - DNA, 25 bp, Homo sapien
ctacacacacggtttccgactgtgc

SEQ ID NO: 5346855 - DNA, 25 bp, Homo sapien
acggtttccgactgtgctgtctttg

SEQ ID NO: 5346856 - DNA, 25 bp, Homo sapien
cacgaacaagcggagacctggctga

SEQ ID NO: 5346857 - DNA, 25 bp, Homo sapien
ctacacgaacaagcggagacctggc

SEQ ID NO: 5346858 - DNA, 25 bp, Homo sapien
acgaacaagcggagacctggctgat

SEQ ID NO: 5346859 - DNA, 25 bp, Homo sapien
gctctacacgaacaagcggagacct

SEQ ID NO: 5346860 - DNA, 25 bp, Homo sapien
ggtaacagggtaggcagtaggcact

SEQ ID NO: 5346861 - DNA, 25 bp, Homo sapien
attcagggtaacagggtaggcagta

SEQ ID NO: 5346862 - DNA, 25 bp, Homo sapien
gagattcagggtaacagggtaggca

SEQ ID NO: 5346863 - DNA, 25 bp, Homo sapien
tcagagattcagggtaacagggtag

SEQ ID NO: 5346864 - DNA, 25 bp, Homo sapien
gcaacaactggctggcgcaaagtgc

SEQ ID NO: 5346865 - DNA, 25 bp, Homo sapien
taacatggtagcatcggcccaaact

SEQ ID NO: 5346866 - DNA, 25 bp, Homo sapien
tccagggctgtactttcagagctac

SEQ ID NO: 5346867 - DNA, 25 bp, Homo sapien
tcaatgatgggaaaacggagggacc

SEQ ID NO: 5346868 - DNA, 25 bp, Homo sapien
tctcccctgtgccagaaggaaggca

SEQ ID NO: 5346869 - DNA, 25 bp, Homo sapien
tgcctgccaaccaaaggtgaaaggg

SEQ ID NO: 5346870 - DNA, 25 bp, Homo sapien
ttttggagtccgaatgccgggagcc

SEQ ID NO: 5346871 - DNA, 25 bp, Homo sapien
cacctgtaccgagtttggccaagtc

SEQ ID NO: 5346872 - DNA, 25 bp, Homo sapien
tttcctgtctcataggagctctccc

SEQ ID NO: 5346873 - DNA, 25 bp, Homo sapien
ttcctgtctcataggagctctccct

SEQ ID NO: 5346874 - DNA, 25 bp, Homo sapien
gtgagtcccatcttttgacataaaa

SEQ ID NO: 5346875 - DNA, 25 bp, Homo sapien
gtttcctgtctcataggagctctcc

SEQ ID NO: 5346876 - DNA, 25 bp, Homo sapien
tccagggtcgtgctcattttcccct

SEQ ID NO: 5346877 - DNA, 25 bp, Homo sapien
gctcagggtctgtgcaagaacacgc

SEQ ID NO: 5346878 - DNA, 25 bp, Homo sapien
tctccagggtcgtgctcattttccc

SEQ ID NO: 5346879 - DNA, 25 bp, Homo sapien
ctcagggtctgtgcaagaacacgcc

SEQ ID NO: 5346880 - DNA, 25 bp, Homo sapien
taatctagtggttctgccccggaag

SEQ ID NO: 5346881 - DNA, 25 bp, Homo sapien
tccagtgtgcgttcacaggtggccg

SEQ ID NO: 5346882 - DNA, 25 bp, Homo sapien
catggtaaatggaaacccagcttta

SEQ ID NO: 5346883 - DNA, 25 bp, Homo sapien
ggtggccggcaatgtcacctgaaca

SEQ ID NO: 5346884 - DNA, 25 bp, Homo sapien
ctacccacgtcaggcgactgcagat

SEQ ID NO: 5346885 - DNA, 25 bp, Homo sapien
ttgaggctacccacgtcaggcgact

SEQ ID NO: 5346886 - DNA, 25 bp, Homo sapien
tcaggcgactgcagatccactgctg

SEQ ID NO: 5346887 - DNA, 25 bp, Homo sapien
ttaggtttgaggctacccacgtcag

SEQ ID NO: 5346888 - DNA, 25 bp, Homo sapien
caacatgacattggcatgtcgctgc

SEQ ID NO: 5346889 - DNA, 25 bp, Homo sapien
catgtcgctgctgatctgtaaacac

SEQ ID NO: 5346890 - DNA, 25 bp, Homo sapien
cagtaaacatgacctttgccttcca

SEQ ID NO: 5346891 - DNA, 25 bp, Homo sapien
taccaggatcctaacaggcagcagg

SEQ ID NO: 5346892 - DNA, 25 bp, Homo sapien
atagccagacagctctctgttaccc

SEQ ID NO: 5346893 - DNA, 25 bp, Homo sapien
catagccagacagctctctgttacc

SEQ ID NO: 5346894 - DNA, 25 bp, Homo sapien
tgtttctatcattgtatccacccat

SEQ ID NO: 5346895 - DNA, 25 bp, Homo sapien
aacaaccacaagtaccaaagaggat

SEQ ID NO: 5346896 - DNA, 25 bp, Homo sapien
caaccacaagtaccaaagaggataa

SEQ ID NO: 5346897 - DNA, 25 bp, Homo sapien
ctgaacaaccacaagtaccaaagag

SEQ ID NO: 5346898 - DNA, 25 bp, Homo sapien
tgaacaaccacaagtaccaaagagg

SEQ ID NO: 5346899 - DNA, 25 bp, Homo sapien
tctaggccctgattttttactggaa

SEQ ID NO: 5346900 - DNA, 25 bp, Homo sapien
gccggatgcatgacataggacgtaa

SEQ ID NO: 5346901 - DNA, 25 bp, Homo sapien
gtttcaaattgcaacagccagagcc

SEQ ID NO: 5346902 - DNA, 25 bp, Homo sapien
gtaacttcttgcgaacggattggaa

SEQ ID NO: 5346903 - DNA, 25 bp, Homo sapien
catagtttacaaagacgaaatatcc

SEQ ID NO: 5346904 - DNA, 25 bp, Homo sapien
tttacaaagacgaaatatcctttga

SEQ ID NO: 5346905 - DNA, 25 bp, Homo sapien
atagtttacaaagacgaaatatcct

SEQ ID NO: 5346906 - DNA, 25 bp, Homo sapien
tacaaagacgaaatatcctttgagc

SEQ ID NO: 5346907 - DNA, 25 bp, Homo sapien
attcaggccgcgaaccaacttgcag

SEQ ID NO: 5346908 - DNA, 25 bp, Homo sapien
gggattggaattcaggccgcgaacc

SEQ ID NO: 5346909 - DNA, 25 bp, Homo sapien
gcgccggctgggggattggaattca

SEQ ID NO: 5346910 - DNA, 25 bp, Homo sapien
gattggaattcaggccgcgaaccaa

SEQ ID NO: 5346911 - DNA, 25 bp, Homo sapien
taaggatggtgcttagcgggtgccc

SEQ ID NO: 5346912 - DNA, 25 bp, Homo sapien
tgactagccgtatatgttgccctgg

SEQ ID NO: 5346913 - DNA, 25 bp, Homo sapien
tgcctacggtgactagccgtatatg

SEQ ID NO: 5346914 - DNA, 25 bp, Homo sapien
ggtgtgcatgcctacggtgactagc

SEQ ID NO: 5346915 - DNA, 25 bp, Homo sapien
atcatgtctggaaaacagtgctcag

SEQ ID NO: 5346916 - DNA, 25 bp, Homo sapien
ccacatggtggggctctaaagattc

SEQ ID NO: 5346917 - DNA, 25 bp, Homo sapien
tatttgatgtctcagatcatgtctg

SEQ ID NO: 5346918 - DNA, 25 bp, Homo sapien
gattccaggaagctccagcggatgg

SEQ ID NO: 5346919 - DNA, 25 bp, Homo sapien
gatccagacgttctggaggaataac

SEQ ID NO: 5346920 - DNA, 25 bp, Homo sapien
acagatgtatgggatgatccagacg

SEQ ID NO: 5346921 - DNA, 25 bp, Homo sapien
tgctttccaggcgtgtttcataaac

SEQ ID NO: 5346922 - DNA, 25 bp, Homo sapien
caaggtatgcagtcagtcatgtgtg

SEQ ID NO: 5346923 - DNA, 25 bp, Homo sapien
tcttcgggtttgttgcaatttgaca

SEQ ID NO: 5346924 - DNA, 25 bp, Homo sapien
tcaaggtcctttagcctgaagtgtt

SEQ ID NO: 5346925 - DNA, 25 bp, Homo sapien
agcctctggtacaggtctagctctc

SEQ ID NO: 5346926 - DNA, 25 bp, Homo sapien
tacaggtctagctctcttgtgcccc

SEQ ID NO: 5346927 - DNA, 25 bp, Homo sapien
gcaggtaagatgtgacccattgcct

SEQ ID NO: 5346928 - DNA, 25 bp, Homo sapien
gagctgagcaggtaagatgtgaccc

SEQ ID NO: 5346929 - DNA, 25 bp, Homo sapien
cattgccttggtgctagaattgtca

SEQ ID NO: 5346930 - DNA, 25 bp, Homo sapien
gtgacccattgccttggtgctagaa

SEQ ID NO: 5346931 - DNA, 25 bp, Homo sapien
cctcaaatcagtgacacgcagtgaa

SEQ ID NO: 5346932 - DNA, 25 bp, Homo sapien
aaatcagtgacacgcagtgaaccct

SEQ ID NO: 5346933 - DNA, 25 bp, Homo sapien
tcagtgacacgcagtgaaccctgac

SEQ ID NO: 5346934 - DNA, 25 bp, Homo sapien
agtgacacgcagtgaaccctgaccc

SEQ ID NO: 5346935 - DNA, 25 bp, Homo sapien
caatagagcaaaagattggagcaac

SEQ ID NO: 5346936 - DNA, 25 bp, Homo sapien
aattgccattttaggttcatttgca

SEQ ID NO: 5346937 - DNA, 25 bp, Homo sapien
tagagcaaaagattggagcaactcc

SEQ ID NO: 5346938 - DNA, 25 bp, Homo sapien
atttgcaatagagcaaaagattgga

SEQ ID NO: 5346939 - DNA, 25 bp, Homo sapien
catcctggcgtagaggccatgctaa

SEQ ID NO: 5346940 - DNA, 25 bp, Homo sapien
tgcatgtcatcctggcgtagaggcc

SEQ ID NO: 5346941 - DNA, 25 bp, Homo sapien
ttgcatgtcatcctggcgtagaggc

SEQ ID NO: 5346942 - DNA, 25 bp, Homo sapien
atgtcatcctggcgtagaggccatg

SEQ ID NO: 5346943 - DNA, 25 bp, Homo sapien
gaataagtcctgaatgggtgccttt

SEQ ID NO: 5346944 - DNA, 25 bp, Homo sapien
tgggtgcctttcgggttgggtgaca

SEQ ID NO: 5346945 - DNA, 25 bp, Homo sapien
gatccttggctccaggtggaataag

SEQ ID NO: 5346946 - DNA, 25 bp, Homo sapien
tgggtgacaaaccaagggaaagata

SEQ ID NO: 5346947 - DNA, 25 bp, Homo sapien
gaggtgcagcatgcctgcccgccag

SEQ ID NO: 5346948 - DNA, 25 bp, Homo sapien
aggtgcagcatgcctgcccgccagc

SEQ ID NO: 5346949 - DNA, 25 bp, Homo sapien
agaggtgcagcatgcctgcccgcca

SEQ ID NO: 5346950 - DNA, 25 bp, Homo sapien
cgatgcctcgtgacagctgcactgg

SEQ ID NO: 5346951 - DNA, 25 bp, Homo sapien
cagccatgctgtgtccgggtggttc

SEQ ID NO: 5346952 - DNA, 25 bp, Homo sapien
tctctcctgcgtggtgttaccctga

SEQ ID NO: 5346953 - DNA, 25 bp, Homo sapien
cgtgggtagacttgagtgatagtac

SEQ ID NO: 5346954 - DNA, 25 bp, Homo sapien
gcaacttgagtgtcttccgaggctc

SEQ ID NO: 5346955 - DNA, 25 bp, Homo sapien
ctgggcaacttgagtgtcttccgag

SEQ ID NO: 5346956 - DNA, 25 bp, Homo sapien
aacttgagtgtcttccgaggctcac

SEQ ID NO: 5346957 - DNA, 25 bp, Homo sapien
gggcaacttgagtgtcttccgaggc

SEQ ID NO: 5346958 - DNA, 25 bp, Homo sapien
tacttccaaggaccatgatgtcatg

SEQ ID NO: 5346959 - DNA, 25 bp, Homo sapien
caaggtccgtaaggatgggaccaca

SEQ ID NO: 5346960 - DNA, 25 bp, Homo sapien
gacatggcaggaaattcactacttc

SEQ ID NO: 5346961 - DNA, 25 bp, Homo sapien
gatgatgtagcttatcaaggtccgt

SEQ ID NO: 5346962 - DNA, 25 bp, Homo sapien
agggctcttttgaaaggtagagtca

SEQ ID NO: 5346963 - DNA, 25 bp, Homo sapien
tagggctcttttgaaaggtagagtc

SEQ ID NO: 5346964 - DNA, 25 bp, Homo sapien
ctggaggcaagaggctagggctctt

SEQ ID NO: 5346965 - DNA, 25 bp, Homo sapien
ggctagggctcttttgaaaggtaga

SEQ ID NO: 5346966 - DNA, 25 bp, Homo sapien
cctcactctggaaatctttctccat

SEQ ID NO: 5346967 - DNA, 25 bp, Homo sapien
gacctgttgttcctcactctggaaa

SEQ ID NO: 5346968 - DNA, 25 bp, Homo sapien
tgttcctcactctggaaatctttct

SEQ ID NO: 5346969 - DNA, 25 bp, Homo sapien
ctggacctgttgttcctcactctgg

SEQ ID NO: 5346970 - DNA, 25 bp, Homo sapien
tggagcaaacaattaggtggcactg

SEQ ID NO: 5346971 - DNA, 25 bp, Homo sapien
catcagatgcatgttgtactcggtc

SEQ ID NO: 5346972 - DNA, 25 bp, Homo sapien
gatccaccttttgtgtggagcaaac

SEQ ID NO: 5346973 - DNA, 25 bp, Homo sapien
tggtgtgctttggtgtaacccatca

SEQ ID NO: 5346974 - DNA, 25 bp, Homo sapien
gagagcccacactaaacttctctgt

SEQ ID NO: 5346975 - DNA, 25 bp, Homo sapien
gactttactatgatgtgtggctggc

SEQ ID NO: 5346976 - DNA, 25 bp, Homo sapien
gcatcgttggctgcatggcagttaa

SEQ ID NO: 5346977 - DNA, 25 bp, Homo sapien
agtggcaatcttctggctcttacca

SEQ ID NO: 5346978 - DNA, 25 bp, Homo sapien
cagttaatcccattgtaggaaaggt

SEQ ID NO: 5346979 - DNA, 25 bp, Homo sapien
ggacttctctttcccgtgagatttc

SEQ ID NO: 5346980 - DNA, 25 bp, Homo sapien
cttctctttcccgtgagatttccat

SEQ ID NO: 5346981 - DNA, 25 bp, Homo sapien
aatgagtggacttctctttcccgtg

SEQ ID NO: 5346982 - DNA, 25 bp, Homo sapien
gagtggacttctctttcccgtgaga

SEQ ID NO: 5346983 - DNA, 25 bp, Homo sapien
cctggcggctatttgccaagactgc

SEQ ID NO: 5346984 - DNA, 25 bp, Homo sapien
taatacaaggctaacacactcactg

SEQ ID NO: 5346985 - DNA, 25 bp, Homo sapien
gctactctgttcttacctttccgta

SEQ ID NO: 5346986 - DNA, 25 bp, Homo sapien
tgcccagcgttgttggacaaacaaa

SEQ ID NO: 5346987 - DNA, 25 bp, Homo sapien
ctttcctgggcagcttcagagcatg

SEQ ID NO: 5346988 - DNA, 25 bp, Homo sapien
tcagagcatgagacctgagccactg

SEQ ID NO: 5346989 - DNA, 25 bp, Homo sapien
tgaggctcaggctcccaaccagcat

SEQ ID NO: 5346990 - DNA, 25 bp, Homo sapien
atccccatcatctggctttcctggg

SEQ ID NO: 5346991 - DNA, 25 bp, Homo sapien
ttttctttgctgccccagtttacat

SEQ ID NO: 5346992 - DNA, 25 bp, Homo sapien
caaatatagagttgtgctagaaaca

SEQ ID NO: 5346993 - DNA, 25 bp, Homo sapien
tgatgtcatttgtacctcaataagc

SEQ ID NO: 5346994 - DNA, 25 bp, Homo sapien
tttttacaatgtgcttctgttcctg

SEQ ID NO: 5346995 - DNA, 25 bp, Homo sapien
gatttgtgagctgcctatgcatagc

SEQ ID NO: 5346996 - DNA, 25 bp, Homo sapien
cttataactggctatggaggctggt

SEQ ID NO: 5346997 - DNA, 25 bp, Homo sapien
tgaatacatgacaagtgccgagaac

SEQ ID NO: 5346998 - DNA, 25 bp, Homo sapien
gacaaagtgacctaacatcctgaag

SEQ ID NO: 5346999 - DNA, 25 bp, Homo sapien
gatgaggctgttcaccatgctaaag

SEQ ID NO: 5347000 - DNA, 25 bp, Homo sapien
ggcagtactcttggtgccctccgga

SEQ ID NO: 5347001 - DNA, 25 bp, Homo sapien
gagagcccttcttcggactttgatg

SEQ ID NO: 5347002 - DNA, 25 bp, Homo sapien
taataggaagatctctggccggtgc

SEQ ID NO: 5347003 - DNA, 25 bp, Homo sapien
cttccgacggaagttcccattgtca

SEQ ID NO: 5347004 - DNA, 25 bp, Homo sapien
attttctcgcagttcggatcaagag

SEQ ID NO: 5347005 - DNA, 25 bp, Homo sapien
ggatcaagagtccaataattaccct

SEQ ID NO: 5347006 - DNA, 25 bp, Homo sapien
tcgcttccgacggaagttcccattg

SEQ ID NO: 5347007 - DNA, 25 bp, Homo sapien
gaccaagttagagaaggacctattc

SEQ ID NO: 5347008 - DNA, 25 bp, Homo sapien
aagatgagaaagaccaagttagaga

SEQ ID NO: 5347009 - DNA, 25 bp, Homo sapien
gatgagaaagaccaagttagagaag

SEQ ID NO: 5347010 - DNA, 25 bp, Homo sapien
gagaaggacctattcaatgcctgtg

SEQ ID NO: 5347011 - DNA, 25 bp, Homo sapien
attggcccgcctctgcgaatgtgga

SEQ ID NO: 5347012 - DNA, 25 bp, Homo sapien
tgagagctcccttgtaagtagaccc

SEQ ID NO: 5347013 - DNA, 25 bp, Homo sapien
ggacaagaagactcctggcagatct

SEQ ID NO: 5347014 - DNA, 25 bp, Homo sapien
aatgtggatgtaaaggtcaagctcc

SEQ ID NO: 5347015 - DNA, 25 bp, Homo sapien
gccggcccttgcgacccgcgtccgc

SEQ ID NO: 5347016 - DNA, 25 bp, Homo sapien
ccctgcgccggcccttgcgacccgc

SEQ ID NO: 5347017 - DNA, 25 bp, Homo sapien
ctgcgccggcccttgcgacccgcgt

SEQ ID NO: 5347018 - DNA, 25 bp, Homo sapien
gcgccggcccttgcgacccgcgtcc

SEQ ID NO: 5347019 - DNA, 25 bp, Homo sapien
ggcggccgcaccatcttcatcaggt

SEQ ID NO: 5347020 - DNA, 25 bp, Homo sapien
tgagagtgagtttgcgctcgggcgc

SEQ ID NO: 5347021 - DNA, 25 bp, Homo sapien
tatcggcgacgaactggtagatgtg

SEQ ID NO: 5347022 - DNA, 25 bp, Homo sapien
gccggccttgctgcgctggtagaag

SEQ ID NO: 5347023 - DNA, 25 bp, Homo sapien
cgggcgcggcgggcgaggcgggcgc

SEQ ID NO: 5347024 - DNA, 25 bp, Homo sapien
cgggcgcgggctgcgcgaagggccg

SEQ ID NO: 5347025 - DNA, 25 bp, Homo sapien
ggcgggcgcgggctgcgcgaagggc

SEQ ID NO: 5347026 - DNA, 25 bp, Homo sapien
gcggcgggcgcgggctgcgcgaagg

SEQ ID NO: 5347027 - DNA, 25 bp, Homo sapien
cgtagtcggccagcccgtaaggcgc

SEQ ID NO: 5347028 - DNA, 25 bp, Homo sapien
ggccgggctgcgaatacactccgaa

SEQ ID NO: 5347029 - DNA, 25 bp, Homo sapien
agtagagggccatgtcggcggccgt

SEQ ID NO: 5347030 - DNA, 25 bp, Homo sapien
ctccgaagttgtcgccgcagtagag

SEQ ID NO: 5347031 - DNA, 25 bp, Homo sapien
gatcgagtcgcggaattcacgtcca

SEQ ID NO: 5347032 - DNA, 25 bp, Homo sapien
gaggttattaacaggcccgcttggc

SEQ ID NO: 5347033 - DNA, 25 bp, Homo sapien
caaccgatcggcttccagtcgaaaa

SEQ ID NO: 5347034 - DNA, 25 bp, Homo sapien
tcgatgtgatttacaacgctttggg

SEQ ID NO: 5347035 - DNA, 25 bp, Homo sapien
tatgttgacattaaccaaactaccc

SEQ ID NO: 5347036 - DNA, 25 bp, Homo sapien
ggcaagctttccactaatgtggcat

SEQ ID NO: 5347037 - DNA, 25 bp, Homo sapien
cgagtctagtgttcgtgggaaactg

SEQ ID NO: 5347038 - DNA, 25 bp, Homo sapien
tacccctgccagttaccccactcag

SEQ ID NO: 5347039 - DNA, 25 bp, Homo sapien
ctttgtatcctacagccttctgctt

SEQ ID NO: 5347040 - DNA, 25 bp, Homo sapien
tgattgcctttcatataatagggac

SEQ ID NO: 5347041 - DNA, 25 bp, Homo sapien
agcctttgtatcctacagccttctg

SEQ ID NO: 5347042 - DNA, 25 bp, Homo sapien
taaaaattggtgattgcctttcata

SEQ ID NO: 5347043 - DNA, 25 bp, Homo sapien
ttggtgacagccttgattgtatggc

SEQ ID NO: 5347044 - DNA, 25 bp, Homo sapien
gaccgcgataatattggtgacagcc

SEQ ID NO: 5347045 - DNA, 25 bp, Homo sapien
tgacaacagctaagataccactgct

SEQ ID NO: 5347046 - DNA, 25 bp, Homo sapien
ctgctgctgttgtcgaccgcgataa

SEQ ID NO: 5347047 - DNA, 25 bp, Homo sapien
gctatgacacggttggctactgcca

SEQ ID NO: 5347048 - DNA, 25 bp, Homo sapien
taaagtcttgcagctctagggctat

SEQ ID NO: 5347049 - DNA, 25 bp, Homo sapien
gggtaaagtcttgcagctctagggc

SEQ ID NO: 5347050 - DNA, 25 bp, Homo sapien
tctagggctatgacacggttggcta

SEQ ID NO: 5347051 - DNA, 25 bp, Homo sapien
aagaccactgcgaatggcttctctg

SEQ ID NO: 5347052 - DNA, 25 bp, Homo sapien
ccagcccggcctctgagaaccataa

SEQ ID NO: 5347053 - DNA, 25 bp, Homo sapien
cataaataaagaccactgcgaatgg

SEQ ID NO: 5347054 - DNA, 25 bp, Homo sapien
actgcgaatggcttctctgtctgac

SEQ ID NO: 5347055 - DNA, 25 bp, Homo sapien
gccagacctcgcagttacctttgat

SEQ ID NO: 5347056 - DNA, 25 bp, Homo sapien
tctccacacttagcagaggtctgcc

SEQ ID NO: 5347057 - DNA, 25 bp, Homo sapien
aatggcatctccacacttagcagag

SEQ ID NO: 5347058 - DNA, 25 bp, Homo sapien
ctttgatttagctgtaatggcatct

SEQ ID NO: 5347059 - DNA, 25 bp, Homo sapien
aatttccattaaactcaagccaatt

SEQ ID NO: 5347060 - DNA, 25 bp, Homo sapien
tttgacatgcttgacagcatgagtc

SEQ ID NO: 5347061 - DNA, 25 bp, Homo sapien
gacatgcttgacagcatgagtcaat

SEQ ID NO: 5347062 - DNA, 25 bp, Homo sapien
tccatttgacatgcttgacagcatg

SEQ ID NO: 5347063 - DNA, 25 bp, Homo sapien
tgagttcgttctgagcttcttaaag

SEQ ID NO: 5347064 - DNA, 25 bp, Homo sapien
tgacccctgaggttcgtgatgcacc

SEQ ID NO: 5347065 - DNA, 25 bp, Homo sapien
aacacttcacacttcaaggtggact

SEQ ID NO: 5347066 - DNA, 25 bp, Homo sapien
gaagggcagccgaagaatgccatga

SEQ ID NO: 5347067 - DNA, 25 bp, Homo sapien
agtgtttcatggtgttgctcacagc

SEQ ID NO: 5347068 - DNA, 25 bp, Homo sapien
tcacagcaggttgggaatgtgtttt

SEQ ID NO: 5347069 - DNA, 25 bp, Homo sapien
aacagagtcatctgggtgcttcagc

SEQ ID NO: 5347070 - DNA, 25 bp, Homo sapien
ggctgccaggcggttagtgtttcat

SEQ ID NO: 5347071 - DNA, 25 bp, Homo sapien
ccgatctgtcaacacgatttctggg

SEQ ID NO: 5347072 - DNA, 25 bp, Homo sapien
ctcaaagtgactgaccgatctgtca

SEQ ID NO: 5347073 - DNA, 25 bp, Homo sapien
tctctgcacttcaattccagtgcga

SEQ ID NO: 5347074 - DNA, 25 bp, Homo sapien
gcgatggcatgagggagattctctc

SEQ ID NO: 5347075 - DNA, 25 bp, Homo sapien
gaagatcagctggattcggagatat

SEQ ID NO: 5347076 - DNA, 25 bp, Homo sapien
ctgagatgttcagaaaccttggaaa

SEQ ID NO: 5347077 - DNA, 25 bp, Homo sapien
cggagatatccttcgctagttctta

SEQ ID NO: 5347078 - DNA, 25 bp, Homo sapien
tgtgaacaactacctggaccaagaa

SEQ ID NO: 5347079 - DNA, 25 bp, Homo sapien
ctggcaatatcaggtaaagtgaccc

SEQ ID NO: 5347080 - DNA, 25 bp, Homo sapien
aatatcaggtaaagtgacccagaca

SEQ ID NO: 5347081 - DNA, 25 bp, Homo sapien
ggcaatatcaggtaaagtgacccag

SEQ ID NO: 5347082 - DNA, 25 bp, Homo sapien
gcaatatcaggtaaagtgacccaga

SEQ ID NO: 5347083 - DNA, 25 bp, Homo sapien
tgaggatggctcacaactttgccca

SEQ ID NO: 5347084 - DNA, 25 bp, Homo sapien
gaggatggctcacaactttgcccac

SEQ ID NO: 5347085 - DNA, 25 bp, Homo sapien
tcctgaggatggctcacaactttgc

SEQ ID NO: 5347086 - DNA, 25 bp, Homo sapien
cctgaggatggctcacaactttgcc

SEQ ID NO: 5347087 - DNA, 25 bp, Homo sapien
gccacagagggtatcatcttccaac

SEQ ID NO: 5347088 - DNA, 25 bp, Homo sapien
tgcgtcccggacaaatccattagtc

SEQ ID NO: 5347089 - DNA, 25 bp, Homo sapien
tgcccagcaggtctgcgtcccggac

SEQ ID NO: 5347090 - DNA, 25 bp, Homo sapien
gtctgcgtcccggacaaatccatta

SEQ ID NO: 5347091 - DNA, 25 bp, Homo sapien
gcaggtctgcgtcccggacaaatcc

SEQ ID NO: 5347092 - DNA, 25 bp, Homo sapien
aagtaccaggctttacgctggatgt

SEQ ID NO: 5347093 - DNA, 25 bp, Homo sapien
tggactacaagaaggtgtcccctta

SEQ ID NO: 5347094 - DNA, 25 bp, Homo sapien
tggatgttgctggactacaagaagg

SEQ ID NO: 5347095 - DNA, 25 bp, Homo sapien
caggctttacgctggatgttgctgg

SEQ ID NO: 5347096 - DNA, 25 bp, Homo sapien
tagaaacgaacaagggggagctgat

SEQ ID NO: 5347097 - DNA, 25 bp, Homo sapien
ggagctgatcttcgtcagagttgct

SEQ ID NO: 5347098 - DNA, 25 bp, Homo sapien
caagggggagctgatcttcgtcaga

SEQ ID NO: 5347099 - DNA, 25 bp, Homo sapien
cgaacaagggggagctgatcttcgt

SEQ ID NO: 5347100 - DNA, 25 bp, Homo sapien
actaaagcaggctgaccaagagatg

SEQ ID NO: 5347101 - DNA, 25 bp, Homo sapien
ggaaggaagtcgtttgagcagcact

SEQ ID NO: 5347102 - DNA, 25 bp, Homo sapien
gcactgctgcgagcgagtctggata

SEQ ID NO: 5347103 - DNA, 25 bp, Homo sapien
gagtctggatatacagtcagccaca

SEQ ID NO: 5347104 - DNA, 25 bp, Homo sapien
tgagggctataaagcttggccagca

SEQ ID NO: 5347105 - DNA, 25 bp, Homo sapien
cagattcctaatttacccgccaggg

SEQ ID NO: 5347106 - DNA, 25 bp, Homo sapien
gattgctgctacctccttaggcaaa

SEQ ID NO: 5347107 - DNA, 25 bp, Homo sapien
gaagtaggctattatctgcatcacc

SEQ ID NO: 5347108 - DNA, 25 bp, Homo sapien
aattgcttggcaaagggctatggga

SEQ ID NO: 5347109 - DNA, 25 bp, Homo sapien
cctggaaagtccaagtcctcaaata

SEQ ID NO: 5347110 - DNA, 25 bp, Homo sapien
tgaactcaaggagcgagacctctgt

SEQ ID NO: 5347111 - DNA, 25 bp, Homo sapien
tgtcttgaatgttttgttcccgatg

SEQ ID NO: 5347112 - DNA, 25 bp, Homo sapien
tgtactcttatgagccaccctggga

SEQ ID NO: 5347113 - DNA, 25 bp, Homo sapien
gaacactggacattaggctgaagga

SEQ ID NO: 5347114 - DNA, 25 bp, Homo sapien
aaacggccaggtttgatcactgtac

SEQ ID NO: 5347115 - DNA, 25 bp, Homo sapien
aactgagtcgactgctaaggaccgc

SEQ ID NO: 5347116 - DNA, 25 bp, Homo sapien
tggaaatttgagatttcttacatca

SEQ ID NO: 5347117 - DNA, 25 bp, Homo sapien
gatatttctgagtaaataatggtgg

SEQ ID NO: 5347118 - DNA, 25 bp, Homo sapien
atatttctgagtaaataatggtgga

SEQ ID NO: 5347119 - DNA, 25 bp, Homo sapien
ttattacagataccctagatggtgc

SEQ ID NO: 5347120 - DNA, 25 bp, Homo sapien
caagattcatctacgttgcggcaca

SEQ ID NO: 5347121 - DNA, 25 bp, Homo sapien
tatgtttcctgagcacagatgtaca

SEQ ID NO: 5347122 - DNA, 25 bp, Homo sapien
tctaccatggccagagatcaataag

SEQ ID NO: 5347123 - DNA, 25 bp, Homo sapien
gcaattcaaatagaatcaggcctaa

SEQ ID NO: 5347124 - DNA, 25 bp, Homo sapien
aaagaaaagatgtccactttatgag

SEQ ID NO: 5347125 - DNA, 25 bp, Homo sapien
aagatgtccactttatgagaatagc

SEQ ID NO: 5347126 - DNA, 25 bp, Homo sapien
ccactttatgagaatagctgtttcc

SEQ ID NO: 5347127 - DNA, 25 bp, Homo sapien
catcagtaaaacaggcccctcggaa

SEQ ID NO: 5347128 - DNA, 25 bp, Homo sapien
gtttgtgggagccagcaaaatctgc

SEQ ID NO: 5347129 - DNA, 25 bp, Homo sapien
tcggaaacctggagacttgccatgc

SEQ ID NO: 5347130 - DNA, 25 bp, Homo sapien
caggtatagctctgagatatgcatc

SEQ ID NO: 5347131 - DNA, 25 bp, Homo sapien
ggcttcccaagtcgtgagccttcat

SEQ ID NO: 5347132 - DNA, 25 bp, Homo sapien
taagcatccagatagaattcctttt

SEQ ID NO: 5347133 - DNA, 25 bp, Homo sapien
gagaggcttcccaagtcgtgagcct

SEQ ID NO: 5347134 - DNA, 25 bp, Homo sapien
cagtgtaatgggatggacccaggca

SEQ ID NO: 5347135 - DNA, 25 bp, Homo sapien
ctgttgtatgactatgtagaaaaat

SEQ ID NO: 5347136 - DNA, 25 bp, Homo sapien
gtcccactactcagaagcaatgact

SEQ ID NO: 5347137 - DNA, 25 bp, Homo sapien
cccactactcagaagcaatgactgt

SEQ ID NO: 5347138 - DNA, 25 bp, Homo sapien
actcagaagcaatgactgttgatat

SEQ ID NO: 5347139 - DNA, 25 bp, Homo sapien
taatataggaatgacaaactcagct

SEQ ID NO: 5347140 - DNA, 25 bp, Homo sapien
cattgggtttgatgtctattgccaa

SEQ ID NO: 5347141 - DNA, 25 bp, Homo sapien
aatattcacaagaaccattggcaca

SEQ ID NO: 5347142 - DNA, 25 bp, Homo sapien
cattggcacatatcgttcattgggt

SEQ ID NO: 5347143 - DNA, 25 bp, Homo sapien
taagcatgaatcaagcgagcagtgc

SEQ ID NO: 5347144 - DNA, 25 bp, Homo sapien
tttgcactgacagaacctaagcatg

SEQ ID NO: 5347145 - DNA, 25 bp, Homo sapien
caaaaggatgctctatgacagtaaa

SEQ ID NO: 5347146 - DNA, 25 bp, Homo sapien
taccttggatatgctaataaccctg

SEQ ID NO: 5347147 - DNA, 25 bp, Homo sapien
gaatttgatagcctcctaatatgta

SEQ ID NO: 5347148 - DNA, 25 bp, Homo sapien
tcagtctaccagtgggaatttgata

SEQ ID NO: 5347149 - DNA, 25 bp, Homo sapien
gtgagaatggcatttcaaggaaaac

SEQ ID NO: 5347150 - DNA, 25 bp, Homo sapien
ttggaagatttcagtctaccagtgg

SEQ ID NO: 5347151 - DNA, 25 bp, Homo sapien
tagaaactacatcttagctgtgtca

SEQ ID NO: 5347152 - DNA, 25 bp, Homo sapien
ggtacatctgctgctgtgctagtaa

SEQ ID NO: 5347153 - DNA, 25 bp, Homo sapien
gagaagagattcatcaggtacatct

SEQ ID NO: 5347154 - DNA, 25 bp, Homo sapien
aatccagccccaattcaggttgtag

SEQ ID NO: 5347155 - DNA, 25 bp, Homo sapien
ggtcagaaccgtctgctcttcctca

SEQ ID NO: 5347156 - DNA, 25 bp, Homo sapien
catcctggtccattgcagtcactaa

SEQ ID NO: 5347157 - DNA, 25 bp, Homo sapien
cagtttggtccctacttgtcctgtg

SEQ ID NO: 5347158 - DNA, 25 bp, Homo sapien
tgctctgggctcatatacagtttgg

SEQ ID NO: 5347159 - DNA, 25 bp, Homo sapien
gggtggcgcactagaaatctttaaa

SEQ ID NO: 5347160 - DNA, 25 bp, Homo sapien
caattcttggcaatcagtttgggcc

SEQ ID NO: 5347161 - DNA, 25 bp, Homo sapien
caagttggcatttgtgtgtacagca

SEQ ID NO: 5347162 - DNA, 25 bp, Homo sapien
gctgtttcccacctagtgataagcg

SEQ ID NO: 5347163 - DNA, 25 bp, Homo sapien
tgtcctggaggttgtatgctgcatc

SEQ ID NO: 5347164 - DNA, 25 bp, Homo sapien
gaaatccctactgaaaaagacctgc

SEQ ID NO: 5347165 - DNA, 25 bp, Homo sapien
cagtctgtaaggcaactgtcctgga

SEQ ID NO: 5347166 - DNA, 25 bp, Homo sapien
gatgaacttgtctggtcacaggaaa

SEQ ID NO: 5347167 - DNA, 25 bp, Homo sapien
tcgagccaggcattgaaatatctaa

SEQ ID NO: 5347168 - DNA, 25 bp, Homo sapien
acaatgcccgggtgttcaagcttgg

SEQ ID NO: 5347169 - DNA, 25 bp, Homo sapien
gcttggctaaggctttaacttctcg

SEQ ID NO: 5347170 - DNA, 25 bp, Homo sapien
cacttctctggtggtgcttcgagcc

SEQ ID NO: 5347171 - DNA, 25 bp, Homo sapien
aagtgcttgtgagagcctttgctcg

SEQ ID NO: 5347172 - DNA, 25 bp, Homo sapien
cacctccaagtgcttgtgagagcct

SEQ ID NO: 5347173 - DNA, 25 bp, Homo sapien
ttgtgagagcctttgctcgggccat

SEQ ID NO: 5347174 - DNA, 25 bp, Homo sapien
tccaagtgcttgtgagagcctttgc

SEQ ID NO: 5347175 - DNA, 25 bp, Homo sapien
tacagtactggcaactggctaccag

SEQ ID NO: 5347176 - DNA, 25 bp, Homo sapien
tatggcacgtgtattaaatggacta

SEQ ID NO: 5347177 - DNA, 25 bp, Homo sapien
gaaagcaacagacaaaactgtacag

SEQ ID NO: 5347178 - DNA, 25 bp, Homo sapien
ccagttaggtaaatatatgaccaga

SEQ ID NO: 5347179 - DNA, 25 bp, Homo sapien
gatagcataattgcagtcatctact

SEQ ID NO: 5347180 - DNA, 25 bp, Homo sapien
gggagacggatcctcttgatagcat

SEQ ID NO: 5347181 - DNA, 25 bp, Homo sapien
gaattggctcaaaatcagttagata

SEQ ID NO: 5347182 - DNA, 25 bp, Homo sapien
ccacgtcccaggcattgaattggct

SEQ ID NO: 5347183 - DNA, 25 bp, Homo sapien
gacactgagtttcagactccttcct

SEQ ID NO: 5347184 - DNA, 25 bp, Homo sapien
tctgtgtgcttcgtttgttcctctc

SEQ ID NO: 5347185 - DNA, 25 bp, Homo sapien
gaagaacaggatcctttttgcggat

SEQ ID NO: 5347186 - DNA, 25 bp, Homo sapien
taatgtgggttgtcgaggaatctga

SEQ ID NO: 5347187 - DNA, 25 bp, Homo sapien
gaaaagcctgcgcacaataaacgtt

SEQ ID NO: 5347188 - DNA, 25 bp, Homo sapien
catatggatactgcaagattgaaag

SEQ ID NO: 5347189 - DNA, 25 bp, Homo sapien
tgaaagtgcaccattactatattct

SEQ ID NO: 5347190 - DNA, 25 bp, Homo sapien
gcaagattgaaagtgcaccattact

SEQ ID NO: 5347191 - DNA, 25 bp, Homo sapien
aaacttatcattactgagacatttg

SEQ ID NO: 5347192 - DNA, 25 bp, Homo sapien
gatgactgcagatacagctggcctc

SEQ ID NO: 5347193 - DNA, 25 bp, Homo sapien
aaaggaataattgcgttttcattag

SEQ ID NO: 5347194 - DNA, 25 bp, Homo sapien
aataattgcgttttcattagtgaca

SEQ ID NO: 5347195 - DNA, 25 bp, Homo sapien
attaagggtttccatttgattgttg

SEQ ID NO: 5347196 - DNA, 25 bp, Homo sapien
tctggcagcttctacaatgtcttct

SEQ ID NO: 5347197 - DNA, 25 bp, Homo sapien
caagtaaacactgttttctgtggct

SEQ ID NO: 5347198 - DNA, 25 bp, Homo sapien
catcattagatgtataacttgtatc

SEQ ID NO: 5347199 - DNA, 25 bp, Homo sapien
ttcccatccttaagtaaccaggcag

SEQ ID NO: 5347200 - DNA, 25 bp, Homo sapien
tccatgtctggaatataccgaagtt

SEQ ID NO: 5347201 - DNA, 25 bp, Homo sapien
taaaggtgctttcaataaatccggc

SEQ ID NO: 5347202 - DNA, 25 bp, Homo sapien
taccgaagttcaaagtggccaacac

SEQ ID NO: 5347203 - DNA, 25 bp, Homo sapien
gaatgccataactttccagtcagca

SEQ ID NO: 5347204 - DNA, 25 bp, Homo sapien
cattggcgacaacccagagctgaac

SEQ ID NO: 5347205 - DNA, 25 bp, Homo sapien
ggtacgctgtagaagcaggatgtct

SEQ ID NO: 5347206 - DNA, 25 bp, Homo sapien
actgcgaggtccgacagctctaaca

SEQ ID NO: 5347207 - DNA, 25 bp, Homo sapien
catttcgtcactatcccattggcga

SEQ ID NO: 5347208 - DNA, 25 bp, Homo sapien
gaactgtttccatgctttcacggtc

SEQ ID NO: 5347209 - DNA, 25 bp, Homo sapien
ctttccactatatgcactgagtcca

SEQ ID NO: 5347210 - DNA, 25 bp, Homo sapien
catatgtagtcagagattttcctcc

SEQ ID NO: 5347211 - DNA, 25 bp, Homo sapien
caaccaaaacaacatcatctccaaa

SEQ ID NO: 5347212 - DNA, 25 bp, Homo sapien
ttttgccctaaggatggtctctgca

SEQ ID NO: 5347213 - DNA, 25 bp, Homo sapien
cgctaattggttgcttatgagtcat

SEQ ID NO: 5347214 - DNA, 25 bp, Homo sapien
taaatagctgctcttcgctaattgg

SEQ ID NO: 5347215 - DNA, 25 bp, Homo sapien
cattgaccatactgagaaaacttcc

SEQ ID NO: 5347216 - DNA, 25 bp, Homo sapien
caatcttgtcaagtctttcaggctg

SEQ ID NO: 5347217 - DNA, 25 bp, Homo sapien
ctttgtgccaatcttgtcaagtctt

SEQ ID NO: 5347218 - DNA, 25 bp, Homo sapien
tgccaatcttgtcaagtctttcagg

SEQ ID NO: 5347219 - DNA, 25 bp, Homo sapien
tcttgtcaagtctttcaggctgcat

SEQ ID NO: 5347220 - DNA, 25 bp, Homo sapien
tgcatgcagttcaggtacagagatg

SEQ ID NO: 5347221 - DNA, 25 bp, Homo sapien
gagtcacccgatagtcagctgcaaa

SEQ ID NO: 5347222 - DNA, 25 bp, Homo sapien
gagatgacatcacccttcacaatag

SEQ ID NO: 5347223 - DNA, 25 bp, Homo sapien
cctaagcataggaatgagtcacccg

SEQ ID NO: 5347224 - DNA, 25 bp, Homo sapien
tcttagctactattaactggcaaaa

SEQ ID NO: 5347225 - DNA, 25 bp, Homo sapien
gctaatagagtgaactttaggtgca

SEQ ID NO: 5347226 - DNA, 25 bp, Homo sapien
cacacaaacatgcaccttaacggtt

SEQ ID NO: 5347227 - DNA, 25 bp, Homo sapien
tagcttggttatgtatccacactct

SEQ ID NO: 5347228 - DNA, 25 bp, Homo sapien
aaggaaccggatcccacatccaaat

SEQ ID NO: 5347229 - DNA, 25 bp, Homo sapien
gctaaggctggatgacaccaaggaa

SEQ ID NO: 5347230 - DNA, 25 bp, Homo sapien
ctctggtttgctaaggctggatgac

SEQ ID NO: 5347231 - DNA, 25 bp, Homo sapien
gctggatgacaccaaggaaccggat

SEQ ID NO: 5347232 - DNA, 25 bp, Homo sapien
ggtttcctaactgccagattcactc

SEQ ID NO: 5347233 - DNA, 25 bp, Homo sapien
aatggtttcctaactgccagattca

SEQ ID NO: 5347234 - DNA, 25 bp, Homo sapien
tttcaatggtttcctaactgccaga

SEQ ID NO: 5347235 - DNA, 25 bp, Homo sapien
attttcaatggtttcctaactgcca

SEQ ID NO: 5347236 - DNA, 25 bp, Homo sapien
aagaaaggtcacactgcttggtgtg

SEQ ID NO: 5347237 - DNA, 25 bp, Homo sapien
atagagatctgataaacttccaagg

SEQ ID NO: 5347238 - DNA, 25 bp, Homo sapien
tggtgtggcacataaagcctttcac

SEQ ID NO: 5347239 - DNA, 25 bp, Homo sapien
agcctttcacaatttggtttcggtg

SEQ ID NO: 5347240 - DNA, 25 bp, Homo sapien
gacaggtcctctctgcaatctggaa

SEQ ID NO: 5347241 - DNA, 25 bp, Homo sapien
taaaaagcaatctcccatccctgtc

SEQ ID NO: 5347242 - DNA, 25 bp, Homo sapien
acatagtctaagcacagtcctggca

SEQ ID NO: 5347243 - DNA, 25 bp, Homo sapien
agtcctggcatcaattaagctaaag

SEQ ID NO: 5347244 - DNA, 25 bp, Homo sapien
cgcttggttaattcaaatctgttcc

SEQ ID NO: 5347245 - DNA, 25 bp, Homo sapien
actgaactaattaatattctctggg

SEQ ID NO: 5347246 - DNA, 25 bp, Homo sapien
acagctgttcatagtaaacgcttgg

SEQ ID NO: 5347247 - DNA, 25 bp, Homo sapien
taccggtctattattactgaactaa

SEQ ID NO: 5347248 - DNA, 25 bp, Homo sapien
gtgtgctcatcgccaaatctttctt

SEQ ID NO: 5347249 - DNA, 25 bp, Homo sapien
aagtgtgctcatcgccaaatctttc

SEQ ID NO: 5347250 - DNA, 25 bp, Homo sapien
ttaagtgtgctcatcgccaaatctt

SEQ ID NO: 5347251 - DNA, 25 bp, Homo sapien
gtgctcatcgccaaatctttcttcc

SEQ ID NO: 5347252 - DNA, 25 bp, Homo sapien
tttagcgtgcaagaattatccggcg

SEQ ID NO: 5347253 - DNA, 25 bp, Homo sapien
gatgcaggtgttccgcagatctcaa

SEQ ID NO: 5347254 - DNA, 25 bp, Homo sapien
tagatttcaccagcaaccccaggtg

SEQ ID NO: 5347255 - DNA, 25 bp, Homo sapien
gttccttggaagagaatcaatgccc

SEQ ID NO: 5347256 - DNA, 25 bp, Homo sapien
agggcgtcgtggccccgcgctcgtc

SEQ ID NO: 5347257 - DNA, 25 bp, Homo sapien
tggccccgcgctcgtccccaggtcg

SEQ ID NO: 5347258 - DNA, 25 bp, Homo sapien
aggcaggtcgctggccgggggatgg

SEQ ID NO: 5347259 - DNA, 25 bp, Homo sapien
ggatgctgctctgacccgtcggcca

SEQ ID NO: 5347260 - DNA, 25 bp, Homo sapien
atcctccgcggctcgcgcgcgtaaa

SEQ ID NO: 5347261 - DNA, 25 bp, Homo sapien
tcgcgcgcgtaaacaagttgcctcc

SEQ ID NO: 5347262 - DNA, 25 bp, Homo sapien
ctccgcagccgagggaagacgcccg

SEQ ID NO: 5347263 - DNA, 25 bp, Homo sapien
cggctcgcgcgcgtaaacaagttgc

SEQ ID NO: 5347264 - DNA, 25 bp, Homo sapien
gcgcggtcgcaactctgtctcatcg

SEQ ID NO: 5347265 - DNA, 25 bp, Homo sapien
catcgtctggttccggaccccgagg

SEQ ID NO: 5347266 - DNA, 25 bp, Homo sapien
actctgtctcatcgtctggttccgg

SEQ ID NO: 5347267 - DNA, 25 bp, Homo sapien
ccgccggtactcgcgtcgctgaggt

SEQ ID NO: 5347268 - DNA, 25 bp, Homo sapien
agcagcggccgccccgaggccgaac

SEQ ID NO: 5347269 - DNA, 25 bp, Homo sapien
gccgaacgccgcctccgccgtcggc

SEQ ID NO: 5347270 - DNA, 25 bp, Homo sapien
ccgaggccgaacgccgcctccgccg

SEQ ID NO: 5347271 - DNA, 25 bp, Homo sapien
gaggccgaacgccgcctccgccgtc

SEQ ID NO: 5347272 - DNA, 25 bp, Homo sapien
gcgccccgcggccaccgtccttgcc

SEQ ID NO: 5347273 - DNA, 25 bp, Homo sapien
cgtccttgccgcgagccccagcagc

SEQ ID NO: 5347274 - DNA, 25 bp, Homo sapien
gcagcagcgcccgtaccagcagccc

SEQ ID NO: 5347275 - DNA, 25 bp, Homo sapien
gcggccaccgtccttgccgcgagcc

SEQ ID NO: 5347276 - DNA, 25 bp, Homo sapien
ccgccccgcgcgcaggcatggaggc

SEQ ID NO: 5347277 - DNA, 25 bp, Homo sapien
cgccccgcgcgcaggcatggaggcg

SEQ ID NO: 5347278 - DNA, 25 bp, Homo sapien
cccgcgcgcaggcatggaggcgcag

SEQ ID NO: 5347279 - DNA, 25 bp, Homo sapien
gcgcgcaggcatggaggcgcagcca

SEQ ID NO: 5347280 - DNA, 25 bp, Homo sapien
tggacagccagccgtgttcccctgg

SEQ ID NO: 5347281 - DNA, 25 bp, Homo sapien
gcaaggacgtgctagggaccctact

SEQ ID NO: 5347282 - DNA, 25 bp, Homo sapien
tggccacgtctcagcccggcctctg

SEQ ID NO: 5347283 - DNA, 25 bp, Homo sapien
caagaaggcaaggacgtgctaggga

SEQ ID NO: 5347284 - DNA, 25 bp, Homo sapien
tatctcggacatcgcccattgagca

SEQ ID NO: 5347285 - DNA, 25 bp, Homo sapien
ccattgagcaaactttccgcgcgtt

SEQ ID NO: 5347286 - DNA, 25 bp, Homo sapien
ctgagtgacagcctatctcggacat

SEQ ID NO: 5347287 - DNA, 25 bp, Homo sapien
tccgcgcgtttgctctctcattggc

SEQ ID NO: 5347288 - DNA, 25 bp, Homo sapien
aatcaaatcgtaatttcgtcgttcg

SEQ ID NO: 5347289 - DNA, 25 bp, Homo sapien
caatcaaatcgtaatttcgtcgttc

SEQ ID NO: 5347290 - DNA, 25 bp, Homo sapien
caaatcgtaatttcgtcgttcgagg

SEQ ID NO: 5347291 - DNA, 25 bp, Homo sapien
tcaaatcgtaatttcgtcgttcgag

SEQ ID NO: 5347292 - DNA, 25 bp, Homo sapien
atgagaaatgcccttccccgacgtc

SEQ ID NO: 5347293 - DNA, 25 bp, Homo sapien
tgagaaatgcccttccccgacgtct

SEQ ID NO: 5347294 - DNA, 25 bp, Homo sapien
caatgagaaatgcccttccccgacg

SEQ ID NO: 5347295 - DNA, 25 bp, Homo sapien
aatgagaaatgcccttccccgacgt

SEQ ID NO: 5347296 - DNA, 25 bp, Homo sapien
gatgtccctcaaaggtctgcgctaa

SEQ ID NO: 5347297 - DNA, 25 bp, Homo sapien
tcctacaacagattggccatcgcgg

SEQ ID NO: 5347298 - DNA, 25 bp, Homo sapien
ggtgcgctcatcagttcccggaata

SEQ ID NO: 5347299 - DNA, 25 bp, Homo sapien
ttggaagcggcacttactacgtggc

SEQ ID NO: 5347300 - DNA, 25 bp, Homo sapien
gaagtccgcttgttagagatggcag

SEQ ID NO: 5347301 - DNA, 25 bp, Homo sapien
tagttagcctaagatcacgtagctg

SEQ ID NO: 5347302 - DNA, 25 bp, Homo sapien
gacctgtgacaatccagtctgcccg

SEQ ID NO: 5347303 - DNA, 25 bp, Homo sapien
gagatggtcctacttgtggccgcaa

SEQ ID NO: 5347304 - DNA, 25 bp, Homo sapien
catgccctgcctctagtgaaagaaa

SEQ ID NO: 5347305 - DNA, 25 bp, Homo sapien
cacttattattggagcaggatggac

SEQ ID NO: 5347306 - DNA, 25 bp, Homo sapien
tggagttgcctgatctagctagagc

SEQ ID NO: 5347307 - DNA, 25 bp, Homo sapien
tggtttgcatatccctgacgactag

SEQ ID NO: 5347308 - DNA, 25 bp, Homo sapien
aagtcttcattactttcattttctg

SEQ ID NO: 5347309 - DNA, 25 bp, Homo sapien
caaagtcttcattactttcattttc

SEQ ID NO: 5347310 - DNA, 25 bp, Homo sapien
ccaaagtcttcattactttcatttt

SEQ ID NO: 5347311 - DNA, 25 bp, Homo sapien
agtcttcattactttcattttctgt

SEQ ID NO: 5347312 - DNA, 25 bp, Homo sapien
cagggactctcagcggccatttgta

SEQ ID NO: 5347313 - DNA, 25 bp, Homo sapien
agggactctcagcggccatttgtac

SEQ ID NO: 5347314 - DNA, 25 bp, Homo sapien
ttacaccaagggctgtctttagtca

SEQ ID NO: 5347315 - DNA, 25 bp, Homo sapien
ccaagggctgtctttagtcacttca

SEQ ID NO: 5347316 - DNA, 25 bp, Homo sapien
ttcttccagtgttctcaatgggcac

SEQ ID NO: 5347317 - DNA, 25 bp, Homo sapien
ttccagtgttctcaatgggcactta

SEQ ID NO: 5347318 - DNA, 25 bp, Homo sapien
tctaacgagtgaatgaaaagactca

SEQ ID NO: 5347319 - DNA, 25 bp, Homo sapien
gactctaacgagtgaatgaaaagac

SEQ ID NO: 5347320 - DNA, 25 bp, Homo sapien
cgagtgaatgaaaagactcatggaa

SEQ ID NO: 5347321 - DNA, 25 bp, Homo sapien
actccagactctaacgagtgaatga

SEQ ID NO: 5347322 - DNA, 25 bp, Homo sapien
tcagtctttgtagatgcaatcttac

SEQ ID NO: 5347323 - DNA, 25 bp, Homo sapien
ttcagtctttgtagatgcaatctta

SEQ ID NO: 5347324 - DNA, 25 bp, Homo sapien
tttcagtctttgtagatgcaatctt

SEQ ID NO: 5347325 - DNA, 25 bp, Homo sapien
ctttcagtctttgtagatgcaatct

SEQ ID NO: 5347326 - DNA, 25 bp, Homo sapien
ctacactagaaaagacattgtatag

SEQ ID NO: 5347327 - DNA, 25 bp, Homo sapien
gcatctacactagaaaagacattgt

SEQ ID NO: 5347328 - DNA, 25 bp, Homo sapien
tctgagcatctacactagaaaagac

SEQ ID NO: 5347329 - DNA, 25 bp, Homo sapien
ttctgagcatctacactagaaaaga

SEQ ID NO: 5347330 - DNA, 25 bp, Homo sapien
tggaaccttggcccagtctccgcag

SEQ ID NO: 5347331 - DNA, 25 bp, Homo sapien
accttggcccagtctccgcagcaaa

SEQ ID NO: 5347332 - DNA, 25 bp, Homo sapien
gaaccttggcccagtctccgcagca

SEQ ID NO: 5347333 - DNA, 25 bp, Homo sapien
ttggcccagtctccgcagcaaatcc

SEQ ID NO: 5347334 - DNA, 25 bp, Homo sapien
tttaaagcttcagggccagaaaatc

SEQ ID NO: 5347335 - DNA, 25 bp, Homo sapien
gttccagaaattcctcacagcagga

SEQ ID NO: 5347336 - DNA, 25 bp, Homo sapien
ggtctgccacctgatggtaactcat

SEQ ID NO: 5347337 - DNA, 25 bp, Homo sapien
tgaccaaattgatcggccaataggg

SEQ ID NO: 5347338 - DNA, 25 bp, Homo sapien
gcttcagctggaggcattcaacccg

SEQ ID NO: 5347339 - DNA, 25 bp, Homo sapien
tatatgactcggataagttccctag

SEQ ID NO: 5347340 - DNA, 25 bp, Homo sapien
tagcaggccaccatacatgcagaca

SEQ ID NO: 5347341 - DNA, 25 bp, Homo sapien
gaacgaacgcaagaccctggaatta

SEQ ID NO: 5347342 - DNA, 25 bp, Homo sapien
gctcctttgcagatagcccctgaga

SEQ ID NO: 5347343 - DNA, 25 bp, Homo sapien
cttgtttttatcctaccagctcaga

SEQ ID NO: 5347344 - DNA, 25 bp, Homo sapien
gatagcccctgagatttatacttgt

SEQ ID NO: 5347345 - DNA, 25 bp, Homo sapien
ctaattggaactgtagctctgccag

SEQ ID NO: 5347346 - DNA, 25 bp, Homo sapien
taacatacatcaagaccttcaaggt

SEQ ID NO: 5347347 - DNA, 25 bp, Homo sapien
tactcctttatgtcaagagggcaaa

SEQ ID NO: 5347348 - DNA, 25 bp, Homo sapien
gccatttgcgagttcttaccccaag

SEQ ID NO: 5347349 - DNA, 25 bp, Homo sapien
caaggtcatatttgcagggagggaa

SEQ ID NO: 5347350 - DNA, 25 bp, Homo sapien
tgggaggaaattgcaaaagtcagcc

SEQ ID NO: 5347351 - DNA, 25 bp, Homo sapien
ggctcaagtactggctgctctgcaa

SEQ ID NO: 5347352 - DNA, 25 bp, Homo sapien
ttagaactcagtacccctgtgcagg

SEQ ID NO: 5347353 - DNA, 25 bp, Homo sapien
ccctaaggacaatggaggatgcctc

SEQ ID NO: 5347354 - DNA, 25 bp, Homo sapien
tagagtagaacggtgggctctgcct

SEQ ID NO: 5347355 - DNA, 25 bp, Homo sapien
atacttaaagcccatgcaggtgcag

SEQ ID NO: 5347356 - DNA, 25 bp, Homo sapien
gaccacactgggactatcatgggag

SEQ ID NO: 5347357 - DNA, 25 bp, Homo sapien
ggagttccttggaatctcagcccaa

SEQ ID NO: 5347358 - DNA, 25 bp, Homo sapien
tagaaatacaaccatgcgcaaagtg

SEQ ID NO: 5347359 - DNA, 25 bp, Homo sapien
catgaataaggtgaaagactcctcc

SEQ ID NO: 5347360 - DNA, 25 bp, Homo sapien
taaaatggttcaaaggtcctcaggc

SEQ ID NO: 5347361 - DNA, 25 bp, Homo sapien
gaccaacagtagtgggagtccagac

SEQ ID NO: 5347362 - DNA, 25 bp, Homo sapien
cagtggcccataccagtgacttgcg

SEQ ID NO: 5347363 - DNA, 25 bp, Homo sapien
gaagattcaagagctcacggcctca

SEQ ID NO: 5347364 - DNA, 25 bp, Homo sapien
gaaaggattccactaacagccgaga

SEQ ID NO: 5347365 - DNA, 25 bp, Homo sapien
tgataaccggcagttaacagtggcc

SEQ ID NO: 5347366 - DNA, 25 bp, Homo sapien
agatggacttcagctggcgccgtgt

SEQ ID NO: 5347367 - DNA, 25 bp, Homo sapien
cgtgtcgcatgtgagtttcctgggc

SEQ ID NO: 5347368 - DNA, 25 bp, Homo sapien
tacttggaattcttgtccatggcca

SEQ ID NO: 5347369 - DNA, 25 bp, Homo sapien
aagggccgcgtcgtctacagaagtg

SEQ ID NO: 5347370 - DNA, 25 bp, Homo sapien
gaaacaacagggtcaggtctaacac

SEQ ID NO: 5347371 - DNA, 25 bp, Homo sapien
caacagggtcaggtctaacactcct

SEQ ID NO: 5347372 - DNA, 25 bp, Homo sapien
actcctttctcggatgcatgggcga

SEQ ID NO: 5347373 - DNA, 25 bp, Homo sapien
gaacagaaatatccctgggcttcac

SEQ ID NO: 5347374 - DNA, 25 bp, Homo sapien
ctagccgtggcctaagtacacttcc

SEQ ID NO: 5347375 - DNA, 25 bp, Homo sapien
gccgtggcctaagtacacttcccca

SEQ ID NO: 5347376 - DNA, 25 bp, Homo sapien
cgtggcctaagtacacttccccagg

SEQ ID NO: 5347377 - DNA, 25 bp, Homo sapien
tacacttccccagggtaaggagtca

SEQ ID NO: 5347378 - DNA, 25 bp, Homo sapien
tgtgcgtaagcgaccagatttccgg

SEQ ID NO: 5347379 - DNA, 25 bp, Homo sapien
cattatgggattggtagtccagact

SEQ ID NO: 5347380 - DNA, 25 bp, Homo sapien
gcgattgcgcattccgtcgcggaga

SEQ ID NO: 5347381 - DNA, 25 bp, Homo sapien
cagggcacgcagactgtgtgcgtaa

SEQ ID NO: 5347382 - DNA, 25 bp, Homo sapien
aggccggagcgaggcgtcgggatgc

SEQ ID NO: 5347383 - DNA, 25 bp, Homo sapien
agcgccccgggcccttcagcaccct

SEQ ID NO: 5347384 - DNA, 25 bp, Homo sapien
gcggctgccggggcgtgcacagtct

SEQ ID NO: 5347385 - DNA, 25 bp, Homo sapien
tgccggggcgtgcacagtctgggac

SEQ ID NO: 5347386 - DNA, 25 bp, Homo sapien
ctgccggggcgtgcacagtctggga

SEQ ID NO: 5347387 - DNA, 25 bp, Homo sapien
ggctgccggggcgtgcacagtctgg

SEQ ID NO: 5347388 - DNA, 25 bp, Homo sapien
ctccacgatgtccaaggccgaggag

SEQ ID NO: 5347389 - DNA, 25 bp, Homo sapien
cagctgcggggactccaacagcatc

SEQ ID NO: 5347390 - DNA, 25 bp, Homo sapien
cccctccacgatgtccaaggccgag

SEQ ID NO: 5347391 - DNA, 25 bp, Homo sapien
ctgcggggactccaacagcatctgc

SEQ ID NO: 5347392 - DNA, 25 bp, Homo sapien
aatttcagtcgaaggaggttctggg

SEQ ID NO: 5347393 - DNA, 25 bp, Homo sapien
gctagtgctttgaaatttcagtcga

SEQ ID NO: 5347394 - DNA, 25 bp, Homo sapien
ccggcccctgagtgtactcttggag

SEQ ID NO: 5347395 - DNA, 25 bp, Homo sapien
ccatagggctgggtggactaagtct

SEQ ID NO: 5347396 - DNA, 25 bp, Homo sapien
tagcttgttgtaagtctgattggca

SEQ ID NO: 5347397 - DNA, 25 bp, Homo sapien
tgctaccctgttctggtgtagcttg

SEQ ID NO: 5347398 - DNA, 25 bp, Homo sapien
tagaagggatgttccagtgtgacct

SEQ ID NO: 5347399 - DNA, 25 bp, Homo sapien
cagccagttctgtagaagggatgtt

SEQ ID NO: 5347400 - DNA, 25 bp, Homo sapien
agcttgtctgattcatccgaattca

SEQ ID NO: 5347401 - DNA, 25 bp, Homo sapien
gattcatccgaattcacctctgtgc

SEQ ID NO: 5347402 - DNA, 25 bp, Homo sapien
caaagaacgagccttatacagagct

SEQ ID NO: 5347403 - DNA, 25 bp, Homo sapien
gcagggatcacatgggtgaagagct

SEQ ID NO: 5347404 - DNA, 25 bp, Homo sapien
gattgtccaggtagctaaacaactt

SEQ ID NO: 5347405 - DNA, 25 bp, Homo sapien
gggattgtccaggtagctaaacaac

SEQ ID NO: 5347406 - DNA, 25 bp, Homo sapien
tccaggtagctaaacaactttacta

SEQ ID NO: 5347407 - DNA, 25 bp, Homo sapien
cctttggggattgtccaggtagcta

SEQ ID NO: 5347408 - DNA, 25 bp, Homo sapien
tggaatcctgacctagtgcgagccc

SEQ ID NO: 5347409 - DNA, 25 bp, Homo sapien
ctagtgcgagccctgttctgacagc

SEQ ID NO: 5347410 - DNA, 25 bp, Homo sapien
caagcccctgatgtattcagtgcct

SEQ ID NO: 5347411 - DNA, 25 bp, Homo sapien
tcttgagagcattggtataggtgga

SEQ ID NO: 5347412 - DNA, 25 bp, Homo sapien
tggtctagtagactcagctgagctt

SEQ ID NO: 5347413 - DNA, 25 bp, Homo sapien
tctttgtggtctagtagactcagct

SEQ ID NO: 5347414 - DNA, 25 bp, Homo sapien
gctgagcttttactctttggtctgc

SEQ ID NO: 5347415 - DNA, 25 bp, Homo sapien
tcagctgagcttttactctttggtc

SEQ ID NO: 5347416 - DNA, 25 bp, Homo sapien
ccacagctgaaagggtgaagcaaga

SEQ ID NO: 5347417 - DNA, 25 bp, Homo sapien
gctgtctttgggaaatagaccttcc

SEQ ID NO: 5347418 - DNA, 25 bp, Homo sapien
tgtgaggtacagtcaccaactttcc

SEQ ID NO: 5347419 - DNA, 25 bp, Homo sapien
ccttgtctgttggtttcgagcaaac

SEQ ID NO: 5347420 - DNA, 25 bp, Homo sapien
cctcagtcatcatttgactctacag

SEQ ID NO: 5347421 - DNA, 25 bp, Homo sapien
gaaaatatctttatgcgacttttcc

SEQ ID NO: 5347422 - DNA, 25 bp, Homo sapien
aatactttctcaggaattttgtagg

SEQ ID NO: 5347423 - DNA, 25 bp, Homo sapien
cagccttgaccccttggcctctagc

SEQ ID NO: 5347424 - DNA, 25 bp, Homo sapien
cagttgaccagaaatgcttgccagt

SEQ ID NO: 5347425 - DNA, 25 bp, Homo sapien
tgttacacttttgctaagatctggg

SEQ ID NO: 5347426 - DNA, 25 bp, Homo sapien
tcctgctgttggaagcagttgacca

SEQ ID NO: 5347427 - DNA, 25 bp, Homo sapien
tattacttgcatggtttggcgtcag

SEQ ID NO: 5347428 - DNA, 25 bp, Homo sapien
ttagctgcatctggcccctgttcct

SEQ ID NO: 5347429 - DNA, 25 bp, Homo sapien
agggcttggttctctgggcttagct

SEQ ID NO: 5347430 - DNA, 25 bp, Homo sapien
cctctgtgccagtgatgctgccact

SEQ ID NO: 5347431 - DNA, 25 bp, Homo sapien
tcaccgatgagttctgaaggctcca

SEQ ID NO: 5347432 - DNA, 25 bp, Homo sapien
tgaacccatgagaagcactcacgag

SEQ ID NO: 5347433 - DNA, 25 bp, Homo sapien
catgagaagcactcacgaggcaaga

SEQ ID NO: 5347434 - DNA, 25 bp, Homo sapien
tcacgaggcaagagcccacaaggag

SEQ ID NO: 5347435 - DNA, 25 bp, Homo sapien
ctttgtgaacccatgagaagcactc

SEQ ID NO: 5347436 - DNA, 25 bp, Homo sapien
gccaatctggacaacgctctaggag

SEQ ID NO: 5347437 - DNA, 25 bp, Homo sapien
ctttgccctgagtgttgccaatctg

SEQ ID NO: 5347438 - DNA, 25 bp, Homo sapien
gacaacgctctaggagcctctcctg

SEQ ID NO: 5347439 - DNA, 25 bp, Homo sapien
tttgccctgagtgttgccaatctgg

SEQ ID NO: 5347440 - DNA, 25 bp, Homo sapien
ctgctggacggccagggaaagacca

SEQ ID NO: 5347441 - DNA, 25 bp, Homo sapien
cactggttcagggacggctgctcat

SEQ ID NO: 5347442 - DNA, 25 bp, Homo sapien
tccttcagggcagccgtcaagtctg

SEQ ID NO: 5347443 - DNA, 25 bp, Homo sapien
gttgtttgtcttggccgagttgaga

SEQ ID NO: 5347444 - DNA, 25 bp, Homo sapien
catctatatgtttgagcatcagcat

SEQ ID NO: 5347445 - DNA, 25 bp, Homo sapien
ttggccacggcacaatgggccacct

SEQ ID NO: 5347446 - DNA, 25 bp, Homo sapien
tcggctgagtaggtgcataaggata

SEQ ID NO: 5347447 - DNA, 25 bp, Homo sapien
ggataaagatagactctcagcccca

SEQ ID NO: 5347448 - DNA, 25 bp, Homo sapien
ctaaggtgtagtggaccctcgggct

SEQ ID NO: 5347449 - DNA, 25 bp, Homo sapien
gcaggcagcagccataggaaccccg

SEQ ID NO: 5347450 - DNA, 25 bp, Homo sapien
tggccacggagtggcatgcaggcag

SEQ ID NO: 5347451 - DNA, 25 bp, Homo sapien
ggcagcagccataggaaccccgatt

SEQ ID NO: 5347452 - DNA, 25 bp, Homo sapien
agcagccataggaaccccgattgcc

SEQ ID NO: 5347453 - DNA, 25 bp, Homo sapien
aggactgcgcctccagccgtgcgga

SEQ ID NO: 5347454 - DNA, 25 bp, Homo sapien
ttcggcccgggttgcaggaggcgtg

SEQ ID NO: 5347455 - DNA, 25 bp, Homo sapien
aggcgtgcaccctccggccggatag

SEQ ID NO: 5347456 - DNA, 25 bp, Homo sapien
atcacacgacctgggcgactgggtg

SEQ ID NO: 5347457 - DNA, 25 bp, Homo sapien
gtcatcatctaaagatcccagtttt

SEQ ID NO: 5347458 - DNA, 25 bp, Homo sapien
catcatctaaagatcccagttttga

SEQ ID NO: 5347459 - DNA, 25 bp, Homo sapien
tcatcatctaaagatcccagttttg

SEQ ID NO: 5347460 - DNA, 25 bp, Homo sapien
tgtcatcatctaaagatcccagttt

SEQ ID NO: 5347461 - DNA, 25 bp, Homo sapien
tggacctggtatattcgcactcgaa

SEQ ID NO: 5347462 - DNA, 25 bp, Homo sapien
tatgtggacctggtatattcgcact

SEQ ID NO: 5347463 - DNA, 25 bp, Homo sapien
ttcgcactcgaacagaatattggat

SEQ ID NO: 5347464 - DNA, 25 bp, Homo sapien
tattggattattgttgcttcagagc

SEQ ID NO: 5347465 - DNA, 25 bp, Homo sapien
catcgacaataggacaggtgcttca

SEQ ID NO: 5347466 - DNA, 25 bp, Homo sapien
gggtcacacatcgacaataggacag

SEQ ID NO: 5347467 - DNA, 25 bp, Homo sapien
tctgtaggggtcacacatcgacaat

SEQ ID NO: 5347468 - DNA, 25 bp, Homo sapien
ttcttctctctgtaggggtcacaca

SEQ ID NO: 5347469 - DNA, 25 bp, Homo sapien
aaaatgcgatgcactgcatgtcaaa

SEQ ID NO: 5347470 - DNA, 25 bp, Homo sapien
ttagcaaaatgcgatgcactgcatg

SEQ ID NO: 5347471 - DNA, 25 bp, Homo sapien
gcaaaatgcgatgcactgcatgtca

SEQ ID NO: 5347472 - DNA, 25 bp, Homo sapien
tagcaaaatgcgatgcactgcatgt

SEQ ID NO: 5347473 - DNA, 25 bp, Homo sapien
tttcagtaatacacacatgacgcat

SEQ ID NO: 5347474 - DNA, 25 bp, Homo sapien
gatattgacgctttttatttcagta

SEQ ID NO: 5347475 - DNA, 25 bp, Homo sapien
catgacgcataatacctctttgtaa

SEQ ID NO: 5347476 - DNA, 25 bp, Homo sapien
catcatttggcatatccacattgat

SEQ ID NO: 5347477 - DNA, 25 bp, Homo sapien
gagcactgtagtatgaaaattgtat

SEQ ID NO: 5347478 - DNA, 25 bp, Homo sapien
agagcactgtagtatgaaaattgta

SEQ ID NO: 5347479 - DNA, 25 bp, Homo sapien
cagttatgataataagtatgtcttt

SEQ ID NO: 5347480 - DNA, 25 bp, Homo sapien
cccaaacaggcttgacagtggagct

SEQ ID NO: 5347481 - DNA, 25 bp, Homo sapien
ggattctcaacagtgagggctttca

SEQ ID NO: 5347482 - DNA, 25 bp, Homo sapien
gataatcaggctgagtattcccctg

SEQ ID NO: 5347483 - DNA, 25 bp, Homo sapien
tccttggatcccaatgctggagagg

SEQ ID NO: 5347484 - DNA, 25 bp, Homo sapien
tctgtttatcatccagatggcaagc

SEQ ID NO: 5347485 - DNA, 25 bp, Homo sapien
gcaagcattggaagctgctttcggg

SEQ ID NO: 5347486 - DNA, 25 bp, Homo sapien
gctttcggggagaaataatcagggc

SEQ ID NO: 5347487 - DNA, 25 bp, Homo sapien
gggagaaataatcagggctttcaaa

SEQ ID NO: 5347488 - DNA, 25 bp, Homo sapien
tgtagagcagcatggtgacgaaggc

SEQ ID NO: 5347489 - DNA, 25 bp, Homo sapien
tagagcagcatggtgacgaaggcga

SEQ ID NO: 5347490 - DNA, 25 bp, Homo sapien
agcagcatggtgacgaaggcgaaga

SEQ ID NO: 5347491 - DNA, 25 bp, Homo sapien
agagcagcatggtgacgaaggcgaa

SEQ ID NO: 5347492 - DNA, 25 bp, Homo sapien
taatgcagtagtttctcaggtcctg

SEQ ID NO: 5347493 - DNA, 25 bp, Homo sapien
cagctcactcactaaggctgccgta

SEQ ID NO: 5347494 - DNA, 25 bp, Homo sapien
gggcctcagacatgatcatgacatg

SEQ ID NO: 5347495 - DNA, 25 bp, Homo sapien
gccacatatggccatgtcactcagg

SEQ ID NO: 5347496 - DNA, 25 bp, Homo sapien
tcagaatatgcttgatcacagggca

SEQ ID NO: 5347497 - DNA, 25 bp, Homo sapien
tggttccataggagcctagcccagg

SEQ ID NO: 5347498 - DNA, 25 bp, Homo sapien
cagggcattgtgtattctcctaaca

SEQ ID NO: 5347499 - DNA, 25 bp, Homo sapien
ggcctggtagtaagtcttggttcca

SEQ ID NO: 5347500 - DNA, 25 bp, Homo sapien
gaggagttatgctgctggttcttac

SEQ ID NO: 5347501 - DNA, 25 bp, Homo sapien
aggaggagttatgctgctggttctt

SEQ ID NO: 5347502 - DNA, 25 bp, Homo sapien
ggaggagttatgctgctggttctta

SEQ ID NO: 5347503 - DNA, 25 bp, Homo sapien
gtttgctacctgggtggtggctacc

SEQ ID NO: 5347504 - DNA, 25 bp, Homo sapien
taatgacgccctgggaaccgtgaag

SEQ ID NO: 5347505 - DNA, 25 bp, Homo sapien
tgaggttctgagacagttgctgcct

SEQ ID NO: 5347506 - DNA, 25 bp, Homo sapien
cgtgaaggatatgtcaaaaagatgc

SEQ ID NO: 5347507 - DNA, 25 bp, Homo sapien
ggccgggatcacacgctgaggttct

SEQ ID NO: 5347508 - DNA, 25 bp, Homo sapien
ttccctactagggacacatatttgg

SEQ ID NO: 5347509 - DNA, 25 bp, Homo sapien
cattccctactagggacacatattt

SEQ ID NO: 5347510 - DNA, 25 bp, Homo sapien
attccctactagggacacatatttg

SEQ ID NO: 5347511 - DNA, 25 bp, Homo sapien
acattccctactagggacacatatt

SEQ ID NO: 5347512 - DNA, 25 bp, Homo sapien
gctactgatgcaaaactgcttcctg

SEQ ID NO: 5347513 - DNA, 25 bp, Homo sapien
cagctggaagccaattgccaatgga

SEQ ID NO: 5347514 - DNA, 25 bp, Homo sapien
cacttggtggcagctagaatcatgg

SEQ ID NO: 5347515 - DNA, 25 bp, Homo sapien
catggaggagatgcagctactgatg

SEQ ID NO: 5347516 - DNA, 25 bp, Homo sapien
taactacattgagaatcttaggagc

SEQ ID NO: 5347517 - DNA, 25 bp, Homo sapien
gaggacaagctctgtagtaactaca

SEQ ID NO: 5347518 - DNA, 25 bp, Homo sapien
tcaccccaggcccatagtgagaaaa

SEQ ID NO: 5347519 - DNA, 25 bp, Homo sapien
attttgcttaagaaacctgtgacca

SEQ ID NO: 5347520 - DNA, 25 bp, Homo sapien
tggatagagcaggtgcagggctagg

SEQ ID NO: 5347521 - DNA, 25 bp, Homo sapien
ggatagagcaggtgcagggctaggc

SEQ ID NO: 5347522 - DNA, 25 bp, Homo sapien
ctggatagagcaggtgcagggctag

SEQ ID NO: 5347523 - DNA, 25 bp, Homo sapien
gatagagcaggtgcagggctaggct

SEQ ID NO: 5347524 - DNA, 25 bp, Homo sapien
cttgacatcccatttgctctatacc

SEQ ID NO: 5347525 - DNA, 25 bp, Homo sapien
ggtgatggaatcctctctcttccat

SEQ ID NO: 5347526 - DNA, 25 bp, Homo sapien
gtatgacaaatccagtaggtgatgg

SEQ ID NO: 5347527 - DNA, 25 bp, Homo sapien
tcatcgtgatctctgcctttgaatg

SEQ ID NO: 5347528 - DNA, 25 bp, Homo sapien
tgggctaaggttccatctttctctg

SEQ ID NO: 5347529 - DNA, 25 bp, Homo sapien
ttatgaaccaagaggttgggaaggc

SEQ ID NO: 5347530 - DNA, 25 bp, Homo sapien
gcttatgaaccaagaggttgggaag

SEQ ID NO: 5347531 - DNA, 25 bp, Homo sapien
ttgggaaggcaggtctcagttggca

SEQ ID NO: 5347532 - DNA, 25 bp, Homo sapien
ctgcttatgaaccaagaggttggga

SEQ ID NO: 5347533 - DNA, 25 bp, Homo sapien
cataggtctggagacagaaatctga

SEQ ID NO: 5347534 - DNA, 25 bp, Homo sapien
gggagaaaccatcccacacctctcc

SEQ ID NO: 5347535 - DNA, 25 bp, Homo sapien
cagagttagtgtcttctgcaggttc

SEQ ID NO: 5347536 - DNA, 25 bp, Homo sapien
gaaatctgaattcaaggcacaggca

SEQ ID NO: 5347537 - DNA, 25 bp, Homo sapien
gcacctgtcttcacttgcttaggtt

SEQ ID NO: 5347538 - DNA, 25 bp, Homo sapien
tgcttaggttatgggtgggtttcac

SEQ ID NO: 5347539 - DNA, 25 bp, Homo sapien
tatgggtgggtttcacttcagagtg

SEQ ID NO: 5347540 - DNA, 25 bp, Homo sapien
tcagagtgttatcttctgagaagaa

SEQ ID NO: 5347541 - DNA, 25 bp, Homo sapien
tcctccaacattagcataattaaag

SEQ ID NO: 5347542 - DNA, 25 bp, Homo sapien
cctccaacattagcataattaaagc

SEQ ID NO: 5347543 - DNA, 25 bp, Homo sapien
tctcctccaacattagcataattaa

SEQ ID NO: 5347544 - DNA, 25 bp, Homo sapien
ctccaacattagcataattaaagcc

SEQ ID NO: 5347545 - DNA, 25 bp, Homo sapien
agctggaggaccgcaataggggtag

SEQ ID NO: 5347546 - DNA, 25 bp, Homo sapien
ctggaggaccgcaataggggtaggt

SEQ ID NO: 5347547 - DNA, 25 bp, Homo sapien
tggaggaccgcaataggggtaggtc

SEQ ID NO: 5347548 - DNA, 25 bp, Homo sapien
ccgcaataggggtaggtcccctgtg

SEQ ID NO: 5347549 - DNA, 25 bp, Homo sapien
ggggtcaggctggaactgaggagca

SEQ ID NO: 5347550 - DNA, 25 bp, Homo sapien
gatgggagggggtcaggctggaact

SEQ ID NO: 5347551 - DNA, 25 bp, Homo sapien
gtcaggctggaactgaggagcaggt

SEQ ID NO: 5347552 - DNA, 25 bp, Homo sapien
aaggatgggagggggtcaggctgga

SEQ ID NO: 5347553 - DNA, 25 bp, Homo sapien
tttgtgacgggcgagctcaggccct

SEQ ID NO: 5347554 - DNA, 25 bp, Homo sapien
gcaggcgtagactttgtgtttctcg

SEQ ID NO: 5347555 - DNA, 25 bp, Homo sapien
gctcaggccctgatgggtgacttcg

SEQ ID NO: 5347556 - DNA, 25 bp, Homo sapien
tgtttctcgtagtctgctttgctca

SEQ ID NO: 5347557 - DNA, 25 bp, Homo sapien
gattggagggcgttatccaccttcc

SEQ ID NO: 5347558 - DNA, 25 bp, Homo sapien
tctcctgggagttacccgattggag

SEQ ID NO: 5347559 - DNA, 25 bp, Homo sapien
ttacccgattggagggcgttatcca

SEQ ID NO: 5347560 - DNA, 25 bp, Homo sapien
ggcgttatccaccttccactgtact

SEQ ID NO: 5347561 - DNA, 25 bp, Homo sapien
ttattcagcaggcacacaacagagg

SEQ ID NO: 5347562 - DNA, 25 bp, Homo sapien
acaacagaggcagttccagatttca

SEQ ID NO: 5347563 - DNA, 25 bp, Homo sapien
caacagaggcagttccagatttcaa

SEQ ID NO: 5347564 - DNA, 25 bp, Homo sapien
ctctctgggatagaagttattcagc

SEQ ID NO: 5347565 - DNA, 25 bp, Homo sapien
aggaaagaagcaaacaggatggtgt

SEQ ID NO: 5347566 - DNA, 25 bp, Homo sapien
aagaagcaaacaggatggtgtttaa

SEQ ID NO: 5347567 - DNA, 25 bp, Homo sapien
tgaggaaagaagcaaacaggatggt

SEQ ID NO: 5347568 - DNA, 25 bp, Homo sapien
gaaagaagcaaacaggatggtgttt

SEQ ID NO: 5347569 - DNA, 25 bp, Homo sapien
cccttgggtgtgttgtttgcggata

SEQ ID NO: 5347570 - DNA, 25 bp, Homo sapien
tgctttaggcaaagaatggccacgt

SEQ ID NO: 5347571 - DNA, 25 bp, Homo sapien
taatcacagggcatgttagggacag

SEQ ID NO: 5347572 - DNA, 25 bp, Homo sapien
ttatagcaaggagaccaagaagcgt

SEQ ID NO: 5347573 - DNA, 25 bp, Homo sapien
tgaattgatcaagccctcagtggcc

SEQ ID NO: 5347574 - DNA, 25 bp, Homo sapien
caattttcagccataccaggagagg

SEQ ID NO: 5347575 - DNA, 25 bp, Homo sapien
cactcaatcgagaaagaccgcggct

SEQ ID NO: 5347576 - DNA, 25 bp, Homo sapien
tttggctgggctgggctaaaacctc

SEQ ID NO: 5347577 - DNA, 25 bp, Homo sapien
aatctccagtcgtgtcccttggccg

SEQ ID NO: 5347578 - DNA, 25 bp, Homo sapien
atctccagtcgtgtcccttggccga

SEQ ID NO: 5347579 - DNA, 25 bp, Homo sapien
taatctccagtcgtgtcccttggcc

SEQ ID NO: 5347580 - DNA, 25 bp, Homo sapien
tctccagtcgtgtcccttggccgaa

SEQ ID NO: 5347581 - DNA, 25 bp, Homo sapien
acaaaaatctcttttcgctgttaat

SEQ ID NO: 5347582 - DNA, 25 bp, Homo sapien
aaaatctcttttcgctgttaatatc

SEQ ID NO: 5347583 - DNA, 25 bp, Homo sapien
tcttttcgctgttaatatcactaac

SEQ ID NO: 5347584 - DNA, 25 bp, Homo sapien
aatctcttttcgctgttaatatcac

SEQ ID NO: 5347585 - DNA, 25 bp, Homo sapien
aatcttgcaattgagatgcctcact

SEQ ID NO: 5347586 - DNA, 25 bp, Homo sapien
ctgaccgatgcagagaaaatcttgc

SEQ ID NO: 5347587 - DNA, 25 bp, Homo sapien
tgaccgatgcagagaaaatcttgca

SEQ ID NO: 5347588 - DNA, 25 bp, Homo sapien
cttgcaattgagatgcctcacttaa

SEQ ID NO: 5347589 - DNA, 25 bp, Homo sapien
atctggtactctttggaattgacct

SEQ ID NO: 5347590 - DNA, 25 bp, Homo sapien
attgacctgagctaatatctcaaac

SEQ ID NO: 5347591 - DNA, 25 bp, Homo sapien
tctggtactctttggaattgacctg

SEQ ID NO: 5347592 - DNA, 25 bp, Homo sapien
tctcaaacacaaaaacgctccaaat

SEQ ID NO: 5347593 - DNA, 25 bp, Homo sapien
ccaatcatatgagataggctgcttg

SEQ ID NO: 5347594 - DNA, 25 bp, Homo sapien
tggtgtcctgctatttacttctggg

SEQ ID NO: 5347595 - DNA, 25 bp, Homo sapien
cttgcacaaatgatacaatggcact

SEQ ID NO: 5347596 - DNA, 25 bp, Homo sapien
ggctgcttgttcagagaaaaatcta

SEQ ID NO: 5347597 - DNA, 25 bp, Homo sapien
cagtgattcgtcttaacttttccct

SEQ ID NO: 5347598 - DNA, 25 bp, Homo sapien
gggaatgaagtttgttagatccctg

SEQ ID NO: 5347599 - DNA, 25 bp, Homo sapien
ggaatgaagtttgttagatccctgg

SEQ ID NO: 5347600 - DNA, 25 bp, Homo sapien
gaatgaagtttgttagatccctggc

SEQ ID NO: 5347601 - DNA, 25 bp, Homo sapien
ctgtggaacaatttcccctcctctg

SEQ ID NO: 5347602 - DNA, 25 bp, Homo sapien
acaaagtaaactaattagcaacagt

SEQ ID NO: 5347603 - DNA, 25 bp, Homo sapien
caaagtaaactaattagcaacagtg

SEQ ID NO: 5347604 - DNA, 25 bp, Homo sapien
acacaaagtaaactaattagcaaca

SEQ ID NO: 5347605 - DNA, 25 bp, Homo sapien
cacaaagtaaactaattagcaacag

SEQ ID NO: 5347606 - DNA, 25 bp, Homo sapien
gacacagacaactgaggaagcaaag

SEQ ID NO: 5347607 - DNA, 25 bp, Homo sapien
tctgacaattgaccaaggctctgtc

SEQ ID NO: 5347608 - DNA, 25 bp, Homo sapien
gaaaatgtgcaatcaattctcgagt

SEQ ID NO: 5347609 - DNA, 25 bp, Homo sapien
ggctgattgcagagtcaccttatag

SEQ ID NO: 5347610 - DNA, 25 bp, Homo sapien
cctgggtcagctgctgaagctcaac

SEQ ID NO: 5347611 - DNA, 25 bp, Homo sapien
ggaacagagtcctgggtcagctgct

SEQ ID NO: 5347612 - DNA, 25 bp, Homo sapien
caaaggggaacagagtcctgggtca

SEQ ID NO: 5347613 - DNA, 25 bp, Homo sapien
aggggaacagagtcctgggtcagct

SEQ ID NO: 5347614 - DNA, 25 bp, Homo sapien
cttttcgagcaggtgtggaaaccct

SEQ ID NO: 5347615 - DNA, 25 bp, Homo sapien
ttcgagcaggtgtggaaaccctgag

SEQ ID NO: 5347616 - DNA, 25 bp, Homo sapien
agcaggtgtggaaaccctgaggctt

SEQ ID NO: 5347617 - DNA, 25 bp, Homo sapien
caggtgtggaaaccctgaggcttct

SEQ ID NO: 5347618 - DNA, 25 bp, Homo sapien
ggcgcatgccatctttggagctgcc

SEQ ID NO: 5347619 - DNA, 25 bp, Homo sapien
tagtgtttccatagtaatctcatca

SEQ ID NO: 5347620 - DNA, 25 bp, Homo sapien
tttccatagtaatctcatcaacaac

SEQ ID NO: 5347621 - DNA, 25 bp, Homo sapien
caggcgcatgccatctttggagctg

SEQ ID NO: 5347622 - DNA, 25 bp, Homo sapien
tattttcttttgagtccagctccat

SEQ ID NO: 5347623 - DNA, 25 bp, Homo sapien
gtattttcttttgagtccagctcca

SEQ ID NO: 5347624 - DNA, 25 bp, Homo sapien
cacatgcagtggtgatctgtaggaa

SEQ ID NO: 5347625 - DNA, 25 bp, Homo sapien
agatctttaggatgtgtgtggttca

SEQ ID NO: 5347626 - DNA, 25 bp, Homo sapien
tgccaggatccaccgttctacaaaa

SEQ ID NO: 5347627 - DNA, 25 bp, Homo sapien
agaagcatctgtgagactctgccag

SEQ ID NO: 5347628 - DNA, 25 bp, Homo sapien
tttgagctcagcagtcatgctggag

SEQ ID NO: 5347629 - DNA, 25 bp, Homo sapien
tatatatttgagctcagcagtcatg

SEQ ID NO: 5347630 - DNA, 25 bp, Homo sapien
gaaagtctgtagctgatatccatct

SEQ ID NO: 5347631 - DNA, 25 bp, Homo sapien
ggaaagtctgtagctgatatccatc

SEQ ID NO: 5347632 - DNA, 25 bp, Homo sapien
gctgccccattagccaggaagtagg

SEQ ID NO: 5347633 - DNA, 25 bp, Homo sapien
tcttccagctagtttgtcacgagtg

SEQ ID NO: 5347634 - DNA, 25 bp, Homo sapien
gctttagcttgactcctccttaaga

SEQ ID NO: 5347635 - DNA, 25 bp, Homo sapien
tggattcccaaggatcaaggctgcc

SEQ ID NO: 5347636 - DNA, 25 bp, Homo sapien
aggctgcaggtgttttttgacttcc

SEQ ID NO: 5347637 - DNA, 25 bp, Homo sapien
aacagagattcttgtcccactctag

SEQ ID NO: 5347638 - DNA, 25 bp, Homo sapien
tatcagggcttactatcctaggagg

SEQ ID NO: 5347639 - DNA, 25 bp, Homo sapien
gaaagagaagatagcagcaattgta

SEQ ID NO: 5347640 - DNA, 25 bp, Homo sapien
agccccagaaaagccgtacttcaga

SEQ ID NO: 5347641 - DNA, 25 bp, Homo sapien
tttccattgcaaaaacaggaggtgt

SEQ ID NO: 5347642 - DNA, 25 bp, Homo sapien
tacttcagagctatcgggctgggaa

SEQ ID NO: 5347643 - DNA, 25 bp, Homo sapien
ggctgggaatggtgataggtggaca

SEQ ID NO: 5347644 - DNA, 25 bp, Homo sapien
taactttccaaattttctactgcca

SEQ ID NO: 5347645 - DNA, 25 bp, Homo sapien
aactttccaaattttctactgccat

SEQ ID NO: 5347646 - DNA, 25 bp, Homo sapien
gcagcaagatggtgttgcagaccca

SEQ ID NO: 5347647 - DNA, 25 bp, Homo sapien
gggcagcaagatggtgttgcagacc

SEQ ID NO: 5347648 - DNA, 25 bp, Homo sapien
agacccaggtcttcatttctctgtt

SEQ ID NO: 5347649 - DNA, 25 bp, Homo sapien
tgttgcagacccaggtcttcatttc

SEQ ID NO: 5347650 - DNA, 25 bp, Homo sapien
gcaagtccagccagagtgttttata

SEQ ID NO: 5347651 - DNA, 25 bp, Homo sapien
tccctgaccgattcagtggcagcgg

SEQ ID NO: 5347652 - DNA, 25 bp, Homo sapien
actgggcatctacccgggaatccgg

SEQ ID NO: 5347653 - DNA, 25 bp, Homo sapien
gggacatcgtgatgacccagtctcc

SEQ ID NO: 5347654 - DNA, 25 bp, Homo sapien
aaagcactgtgggaggaaaattctt

SEQ ID NO: 5347655 - DNA, 25 bp, Homo sapien
aagcactgtgggaggaaaattctta

SEQ ID NO: 5347656 - DNA, 25 bp, Homo sapien
agcactgtgggaggaaaattcttac

SEQ ID NO: 5347657 - DNA, 25 bp, Homo sapien
ctaaagcactgtgggaggaaaattc

SEQ ID NO: 5347658 - DNA, 25 bp, Homo sapien
taattgtgagggtgaaatcggtccc

SEQ ID NO: 5347659 - DNA, 25 bp, Homo sapien
gtatcattagcttccacaggattaa

SEQ ID NO: 5347660 - DNA, 25 bp, Homo sapien
ctctgtcctggagacacggccaagg

SEQ ID NO: 5347661 - DNA, 25 bp, Homo sapien
ccccagtgtctttattggatgcttg

SEQ ID NO: 5347662 - DNA, 25 bp, Homo sapien
gagccccggaccctatctctgagag

SEQ ID NO: 5347663 - DNA, 25 bp, Homo sapien
agccccggaccctatctctgagagc

SEQ ID NO: 5347664 - DNA, 25 bp, Homo sapien
ggagccccggaccctatctctgaga

SEQ ID NO: 5347665 - DNA, 25 bp, Homo sapien
caggtgaagaggtatgacatcatca

SEQ ID NO: 5347666 - DNA, 25 bp, Homo sapien
cagtgaccagttggatttcgctccc

SEQ ID NO: 5347667 - DNA, 25 bp, Homo sapien
gctaggctcgtctttgcacaagcag

SEQ ID NO: 5347668 - DNA, 25 bp, Homo sapien
gatttcgctcccctgatgttggtga

SEQ ID NO: 5347669 - DNA, 25 bp, Homo sapien
cagtatcattgtggaatgttgacca

SEQ ID NO: 5347670 - DNA, 25 bp, Homo sapien
ccacagtggcatatgacttcttagt

SEQ ID NO: 5347671 - DNA, 25 bp, Homo sapien
tctctccatttctgttgtctacttc

SEQ ID NO: 5347672 - DNA, 25 bp, Homo sapien
tctgttgtctacttcaatcacagta

SEQ ID NO: 5347673 - DNA, 25 bp, Homo sapien
cactgtgtgaggaccttgcagaccc

SEQ ID NO: 5347674 - DNA, 25 bp, Homo sapien
accactgtgtgaggaccttgcagac

SEQ ID NO: 5347675 - DNA, 25 bp, Homo sapien
actgtgtgaggaccttgcagaccct

SEQ ID NO: 5347676 - DNA, 25 bp, Homo sapien
ccactgtgtgaggaccttgcagacc

SEQ ID NO: 5347677 - DNA, 25 bp, Homo sapien
tgtagataagaagctgtggagactg

SEQ ID NO: 5347678 - DNA, 25 bp, Homo sapien
tgtttgggactccatagaatttgtt

SEQ ID NO: 5347679 - DNA, 25 bp, Homo sapien
aattgtgtagataagaagctgtgga

SEQ ID NO: 5347680 - DNA, 25 bp, Homo sapien
cttgtttgggactccatagaatttg

SEQ ID NO: 5347681 - DNA, 25 bp, Homo sapien
gctactaatactctgactggcccgg

SEQ ID NO: 5347682 - DNA, 25 bp, Homo sapien
ctagacgccttatagatcaggagct

SEQ ID NO: 5347683 - DNA, 25 bp, Homo sapien
ccactttctaaactagacgccttat

SEQ ID NO: 5347684 - DNA, 25 bp, Homo sapien
accaggccaaccagctactaatact

SEQ ID NO: 5347685 - DNA, 25 bp, Homo sapien
cctacagatgcagacagggtggaag

SEQ ID NO: 5347686 - DNA, 25 bp, Homo sapien
cagatgcagacagggtggaaggaga

SEQ ID NO: 5347687 - DNA, 25 bp, Homo sapien
tgtctcctacagatgcagacagggt

SEQ ID NO: 5347688 - DNA, 25 bp, Homo sapien
tctcctacagatgcagacagggtgg

SEQ ID NO: 5347689 - DNA, 25 bp, Homo sapien
gagccccaggagctgagcggggacc

SEQ ID NO: 5347690 - DNA, 25 bp, Homo sapien
gccccaggagctgagcggggaccct

SEQ ID NO: 5347691 - DNA, 25 bp, Homo sapien
ccaggagctgagcggggaccctcat

SEQ ID NO: 5347692 - DNA, 25 bp, Homo sapien
ctgggagccagagcagcaggagccc

SEQ ID NO: 5347693 - DNA, 25 bp, Homo sapien
aacatgcaaatgagcaggggatggg

SEQ ID NO: 5347694 - DNA, 25 bp, Homo sapien
gtctgactcctgcacaaagtgtgac

SEQ ID NO: 5347695 - DNA, 25 bp, Homo sapien
ggtctgactcctgcacaaagtgtga

SEQ ID NO: 5347696 - DNA, 25 bp, Homo sapien
ctgcacaaagtgtgaccagcctatt

SEQ ID NO: 5347697 - DNA, 25 bp, Homo sapien
tggaatagagtccttagtctagggc

SEQ ID NO: 5347698 - DNA, 25 bp, Homo sapien
tgagagcttccaggcgctggccctg

SEQ ID NO: 5347699 - DNA, 25 bp, Homo sapien
caggtactgcaataattgaggagac

SEQ ID NO: 5347700 - DNA, 25 bp, Homo sapien
ctttatcaattgtggaaatgtggac

SEQ ID NO: 5347701 - DNA, 25 bp, Homo sapien
tacccattgctgaggatcatgagtg

SEQ ID NO: 5347702 - DNA, 25 bp, Homo sapien
acccattgctgaggatcatgagtga

SEQ ID NO: 5347703 - DNA, 25 bp, Homo sapien
ctacccattgctgaggatcatgagt

SEQ ID NO: 5347704 - DNA, 25 bp, Homo sapien
cccattgctgaggatcatgagtgac

SEQ ID NO: 5347705 - DNA, 25 bp, Homo sapien
gaagattgatagtttggaccctgaa

SEQ ID NO: 5347706 - DNA, 25 bp, Homo sapien
ggacattttgatcacagggctcagc

SEQ ID NO: 5347707 - DNA, 25 bp, Homo sapien
gcacctccatgagtcattgccagct

SEQ ID NO: 5347708 - DNA, 25 bp, Homo sapien
aaaacagcacatgtagctcagaggc

SEQ ID NO: 5347709 - DNA, 25 bp, Homo sapien
ttgattcctccgcagggcactgagc

SEQ ID NO: 5347710 - DNA, 25 bp, Homo sapien
gcagtgactacacgtgacacaagat

SEQ ID NO: 5347711 - DNA, 25 bp, Homo sapien
cacaagattcttgtgacaggtcaca

SEQ ID NO: 5347712 - DNA, 25 bp, Homo sapien
taccaattttctgaggacgaggctg

SEQ ID NO: 5347713 - DNA, 25 bp, Homo sapien
tgttcgggtgtgtaacactgtggga

SEQ ID NO: 5347714 - DNA, 25 bp, Homo sapien
gtaattgtaatcttgtagacagtaa

SEQ ID NO: 5347715 - DNA, 25 bp, Homo sapien
ttgcccggcaagtgatggtgactct

SEQ ID NO: 5347716 - DNA, 25 bp, Homo sapien
cggcaagtgatggtgactctgtctc

SEQ ID NO: 5347717 - DNA, 25 bp, Homo sapien
tgcccggcaagtgatggtgactctg

SEQ ID NO: 5347718 - DNA, 25 bp, Homo sapien
cccggcaagtgatggtgactctgtc

SEQ ID NO: 5347719 - DNA, 25 bp, Homo sapien
gactgggtcatctggatggcacatc

SEQ ID NO: 5347720 - DNA, 25 bp, Homo sapien
actgggtcatctggatggcacatct

SEQ ID NO: 5347721 - DNA, 25 bp, Homo sapien
gagactgggtcatctggatggcaca

SEQ ID NO: 5347722 - DNA, 25 bp, Homo sapien
tggagactgggtcatctggatggca

SEQ ID NO: 5347723 - DNA, 25 bp, Homo sapien
gccccaggagctgagcggggaccct

SEQ ID NO: 5347724 - DNA, 25 bp, Homo sapien
gagccccaggagctgagcggggacc

SEQ ID NO: 5347725 - DNA, 25 bp, Homo sapien
ctgggagccagagcagcaggagccc

SEQ ID NO: 5347726 - DNA, 25 bp, Homo sapien
ccaggagctgagcggggaccctcat

SEQ ID NO: 5347727 - DNA, 25 bp, Homo sapien
gagatggatagtgaatttggaccct

SEQ ID NO: 5347728 - DNA, 25 bp, Homo sapien
aaagctcgggactctcttccatgtg

SEQ ID NO: 5347729 - DNA, 25 bp, Homo sapien
cccctgggccgatagcagtgagcta

SEQ ID NO: 5347730 - DNA, 25 bp, Homo sapien
tcagcacagacaagtccttttctgg

SEQ ID NO: 5347731 - DNA, 25 bp, Homo sapien
ccagctttcatgactgaccagctgc

SEQ ID NO: 5347732 - DNA, 25 bp, Homo sapien
agaggctgcatggtcagaggaataa

SEQ ID NO: 5347733 - DNA, 25 bp, Homo sapien
tgcccagctttcatgactgaccagc

SEQ ID NO: 5347734 - DNA, 25 bp, Homo sapien
tctgcccagctttcatgactgacca

SEQ ID NO: 5347735 - DNA, 25 bp, Homo sapien
gttggtagtggccagagtgacatct

SEQ ID NO: 5347736 - DNA, 25 bp, Homo sapien
ggtgccaggctaggatgttcttcat

SEQ ID NO: 5347737 - DNA, 25 bp, Homo sapien
ctgcaggtgacagtgaccctctaac

SEQ ID NO: 5347738 - DNA, 25 bp, Homo sapien
tgttcttcatactctggccagccct

SEQ ID NO: 5347739 - DNA, 25 bp, Homo sapien
tattacatccatcaataggctgcat

SEQ ID NO: 5347740 - DNA, 25 bp, Homo sapien
gttttcatggagttgatcttattac

SEQ ID NO: 5347741 - DNA, 25 bp, Homo sapien
ccagtgagacttgatggagtttttt

SEQ ID NO: 5347742 - DNA, 25 bp, Homo sapien
gacataacatcttatagaattttag

SEQ ID NO: 5347743 - DNA, 25 bp, Homo sapien
tgcaccgggcacttctgggtctcat

SEQ ID NO: 5347744 - DNA, 25 bp, Homo sapien
gcaccgggcacttctgggtctcatc

SEQ ID NO: 5347745 - DNA, 25 bp, Homo sapien
gtaaacactgatggtcttgttgagg

SEQ ID NO: 5347746 - DNA, 25 bp, Homo sapien
taaacactgatggtcttgttgaggt

SEQ ID NO: 5347747 - DNA, 25 bp, Homo sapien
tggtgagagtgaagtctgtcccaga

SEQ ID NO: 5347748 - DNA, 25 bp, Homo sapien
ctgatggtgagagtgaagtctgtcc

SEQ ID NO: 5347749 - DNA, 25 bp, Homo sapien
gatggtgagagtgaagtctgtccca

SEQ ID NO: 5347750 - DNA, 25 bp, Homo sapien
ggtgagagtgaagtctgtcccagac

SEQ ID NO: 5347751 - DNA, 25 bp, Homo sapien
tggtggatgcaccatagatgaggag

SEQ ID NO: 5347752 - DNA, 25 bp, Homo sapien
ggtggatgcaccatagatgaggagc

SEQ ID NO: 5347753 - DNA, 25 bp, Homo sapien
gctgctgctaacactctgactggcc

SEQ ID NO: 5347754 - DNA, 25 bp, Homo sapien
ctgcaggagagggtgactctttccc

SEQ ID NO: 5347755 - DNA, 25 bp, Homo sapien
gactgtgtcattacaatttctctgg

SEQ ID NO: 5347756 - DNA, 25 bp, Homo sapien
gtcattacaatttctctggtggtat

SEQ ID NO: 5347757 - DNA, 25 bp, Homo sapien
gagactgtgtcattacaatttctct

SEQ ID NO: 5347758 - DNA, 25 bp, Homo sapien
ggagacaaagacagggtgggtggag

SEQ ID NO: 5347759 - DNA, 25 bp, Homo sapien
gaaataaaacagaaatgcactcatg

SEQ ID NO: 5347760 - DNA, 25 bp, Homo sapien
aataaaacagaaatgcactcatgta

SEQ ID NO: 5347761 - DNA, 25 bp, Homo sapien
ggaaataaaacagaaatgcactcat

SEQ ID NO: 5347762 - DNA, 25 bp, Homo sapien
taaaacagaaatgcactcatgtaat

SEQ ID NO: 5347763 - DNA, 25 bp, Homo sapien
gagccagagtagcaggaggaagaga

SEQ ID NO: 5347764 - DNA, 25 bp, Homo sapien
agctggggcttccatggttccgtct

SEQ ID NO: 5347765 - DNA, 25 bp, Homo sapien
ctgggagccagagtagcaggaggaa

SEQ ID NO: 5347766 - DNA, 25 bp, Homo sapien
ctggggcttccatggttccgtctgg

SEQ ID NO: 5347767 - DNA, 25 bp, Homo sapien
acaattccaagaatggcactgctgg

SEQ ID NO: 5347768 - DNA, 25 bp, Homo sapien
tggaacaattccaagaatggcactg

SEQ ID NO: 5347769 - DNA, 25 bp, Homo sapien
ctctggaacaattccaagaatggca

SEQ ID NO: 5347770 - DNA, 25 bp, Homo sapien
gctgcctgagactccacattcaagc

SEQ ID NO: 5347771 - DNA, 25 bp, Homo sapien
tgtttaagctgaccaggatgctgtc

SEQ ID NO: 5347772 - DNA, 25 bp, Homo sapien
ctggtgtttacacctccatatccca

SEQ ID NO: 5347773 - DNA, 25 bp, Homo sapien
gatccaactgattcagtgataaacc

SEQ ID NO: 5347774 - DNA, 25 bp, Homo sapien
aaaaataactacacttctccatgtt

SEQ ID NO: 5347775 - DNA, 25 bp, Homo sapien
ttttgtttgggtgtgtaacactgtg

SEQ ID NO: 5347776 - DNA, 25 bp, Homo sapien
tttgtttgggtgtgtaacactgtgg

SEQ ID NO: 5347777 - DNA, 25 bp, Homo sapien
ctgctaataccctgactcgcccgac

SEQ ID NO: 5347778 - DNA, 25 bp, Homo sapien
ttgatgggaccccactttgcaaagt

SEQ ID NO: 5347779 - DNA, 25 bp, Homo sapien
cttgatgggaccccactttgcaaag

SEQ ID NO: 5347780 - DNA, 25 bp, Homo sapien
tgatgggaccccactttgcaaagtg

SEQ ID NO: 5347781 - DNA, 25 bp, Homo sapien
tgtagatgcagagaatgaggatgga

SEQ ID NO: 5347782 - DNA, 25 bp, Homo sapien
ctgtagatgcagagaatgaggatgg

SEQ ID NO: 5347783 - DNA, 25 bp, Homo sapien
ggagactgggtcatccggatggcac

SEQ ID NO: 5347784 - DNA, 25 bp, Homo sapien
gtcatccggatggcacatctggcac

SEQ ID NO: 5347785 - DNA, 25 bp, Homo sapien
gccccaggagctgagcggggaccct

SEQ ID NO: 5347786 - DNA, 25 bp, Homo sapien
ccaggagctgagcggggaccctcat

SEQ ID NO: 5347787 - DNA, 25 bp, Homo sapien
ctgggagccagagcagcaggagccc

SEQ ID NO: 5347788 - DNA, 25 bp, Homo sapien
gagccccaggagctgagcggggacc

SEQ ID NO: 5347789 - DNA, 25 bp, Homo sapien
ggctgcattgtcacaggatgaagcc

SEQ ID NO: 5347790 - DNA, 25 bp, Homo sapien
cagtatcttcacttgccatgtttct

SEQ ID NO: 5347791 - DNA, 25 bp, Homo sapien
aatacacttttccacgtttaagctg

SEQ ID NO: 5347792 - DNA, 25 bp, Homo sapien
gatccaactgattcagtgataaatc

SEQ ID NO: 5347793 - DNA, 25 bp, Homo sapien
cataatcgcttttctcagatccaac

SEQ ID NO: 5347794 - DNA, 25 bp, Homo sapien
cgtttaagctgaccatgaatgtttc

SEQ ID NO: 5347795 - DNA, 25 bp, Homo sapien
gattgtgagagtgaattctgtccca

SEQ ID NO: 5347796 - DNA, 25 bp, Homo sapien
ggctgctgattgtgagagtgaattc

SEQ ID NO: 5347797 - DNA, 25 bp, Homo sapien
ttgtgagagtgaattctgtcccaga

SEQ ID NO: 5347798 - DNA, 25 bp, Homo sapien
ctgattgtgagagtgaattctgtcc

SEQ ID NO: 5347799 - DNA, 25 bp, Homo sapien
tgatgggaccccactttgcaaagtg

SEQ ID NO: 5347800 - DNA, 25 bp, Homo sapien
cttgatgggaccccactttgcaaag

SEQ ID NO: 5347801 - DNA, 25 bp, Homo sapien
ttgatgggaccccactttgcaaagt

SEQ ID NO: 5347802 - DNA, 25 bp, Homo sapien
actgggtcaactggatgtcacatct

SEQ ID NO: 5347803 - DNA, 25 bp, Homo sapien
gggtcaactggatgtcacatctggc

SEQ ID NO: 5347804 - DNA, 25 bp, Homo sapien
gagactgggtcaactggatgtcaca

SEQ ID NO: 5347805 - DNA, 25 bp, Homo sapien
ggtcaactggatgtcacatctggca

SEQ ID NO: 5347806 - DNA, 25 bp, Homo sapien
gccccaggagctgagcggggaccct

SEQ ID NO: 5347807 - DNA, 25 bp, Homo sapien
ccaggagctgagcggggaccctcat

SEQ ID NO: 5347808 - DNA, 25 bp, Homo sapien
gagccccaggagctgagcggggacc

SEQ ID NO: 5347809 - DNA, 25 bp, Homo sapien
ctgggagccagagcagcaggagccc

SEQ ID NO: 5347810 - DNA, 25 bp, Homo sapien
tgggactgactcctgcacaggtgtg

SEQ ID NO: 5347811 - DNA, 25 bp, Homo sapien
tcctgactgggactgactcctgcac

SEQ ID NO: 5347812 - DNA, 25 bp, Homo sapien
actgggactgactcctgcacaggtg

SEQ ID NO: 5347813 - DNA, 25 bp, Homo sapien
gtgtcctgactgggactgactcctg

SEQ ID NO: 5347814 - DNA, 25 bp, Homo sapien
tttcagcatgaaatctgtccccaac

SEQ ID NO: 5347815 - DNA, 25 bp, Homo sapien
actccagggtcgtgattggaaacca

SEQ ID NO: 5347816 - DNA, 25 bp, Homo sapien
tggcctgtcttctgtaggtaccagt

SEQ ID NO: 5347817 - DNA, 25 bp, Homo sapien
aaaccaaatagattgggagccaagg

SEQ ID NO: 5347818 - DNA, 25 bp, Homo sapien
ccactagctgtctgtaaaggaagca

SEQ ID NO: 5347819 - DNA, 25 bp, Homo sapien
tagtaaacactgatggtcttgttgg

SEQ ID NO: 5347820 - DNA, 25 bp, Homo sapien
ttttgtttcatgtggaatcactgtg

SEQ ID NO: 5347821 - DNA, 25 bp, Homo sapien
aaggaagcagctggtataataatct

SEQ ID NO: 5347822 - DNA, 25 bp, Homo sapien
tacgctgctgacagtaataaactgc

SEQ ID NO: 5347823 - DNA, 25 bp, Homo sapien
ccctgttggatgcatcatagatgag

SEQ ID NO: 5347824 - DNA, 25 bp, Homo sapien
tggccctgttggatgcatcatagat

SEQ ID NO: 5347825 - DNA, 25 bp, Homo sapien
ctgggatgccagtggccctgttgga

SEQ ID NO: 5347826 - DNA, 25 bp, Homo sapien
taccaggctaagtagctgctaacac

SEQ ID NO: 5347827 - DNA, 25 bp, Homo sapien
gagcctggccaggtttctgttggta

SEQ ID NO: 5347828 - DNA, 25 bp, Homo sapien
ttctgttggtaccaggctaagtagc

SEQ ID NO: 5347829 - DNA, 25 bp, Homo sapien
tagctgctaacactctgactggccc

SEQ ID NO: 5347830 - DNA, 25 bp, Homo sapien
ggtggctggagactgtgtcaacaca

SEQ ID NO: 5347831 - DNA, 25 bp, Homo sapien
ggagacaaagacagggtggctggag

SEQ ID NO: 5347832 - DNA, 25 bp, Homo sapien
tggctggagactgtgtcaacacaat

SEQ ID NO: 5347833 - DNA, 25 bp, Homo sapien
tgtcaacacaatttctccggtggta

SEQ ID NO: 5347834 - DNA, 25 bp, Homo sapien
tgaaattggaaataaaacagaaatg

SEQ ID NO: 5347835 - DNA, 25 bp, Homo sapien
aaattggaaataaaacagaaatgca

SEQ ID NO: 5347836 - DNA, 25 bp, Homo sapien
gaaattggaaataaaacagaaatgc

SEQ ID NO: 5347837 - DNA, 25 bp, Homo sapien
ctgaaattggaaataaaacagaaat

SEQ ID NO: 5347838 - DNA, 25 bp, Homo sapien
gaagagaagctgagctggggcttcc

SEQ ID NO: 5347839 - DNA, 25 bp, Homo sapien
ctgggagccagagtagcaggaggaa

SEQ ID NO: 5347840 - DNA, 25 bp, Homo sapien
aagagaagctgagctggggcttcca

SEQ ID NO: 5347841 - DNA, 25 bp, Homo sapien
gagccagagtagcaggaggaagaga

SEQ ID NO: 5347842 - DNA, 25 bp, Homo sapien
ttccctctgggtcctaactgagcag

SEQ ID NO: 5347843 - DNA, 25 bp, Homo sapien
ggttccctctgggtcctaactgagc

SEQ ID NO: 5347844 - DNA, 25 bp, Homo sapien
gttccctctgggtcctaactgagca

SEQ ID NO: 5347845 - DNA, 25 bp, Homo sapien
tgcttcttcctctctgcactgagca

SEQ ID NO: 5347846 - DNA, 25 bp, Homo sapien
ctgcttcttcctctctgcactgagc

SEQ ID NO: 5347847 - DNA, 25 bp, Homo sapien
gcttcttcctctctgcactgagcat

SEQ ID NO: 5347848 - DNA, 25 bp, Homo sapien
ggtagccccagcatctaatagagtg

SEQ ID NO: 5347849 - DNA, 25 bp, Homo sapien
tgttttgtacaatcatcagggcccc

SEQ ID NO: 5347850 - DNA, 25 bp, Homo sapien
gctattttcctgaccagacagctgg

SEQ ID NO: 5347851 - DNA, 25 bp, Homo sapien
ccattgggcagaatgaccatgttca

SEQ ID NO: 5347852 - DNA, 25 bp, Homo sapien
tttcttatagagttgcccaataaga

SEQ ID NO: 5347853 - DNA, 25 bp, Homo sapien
gaaaaggatgactcaatattctcca

SEQ ID NO: 5347854 - DNA, 25 bp, Homo sapien
cccaataagaagtcctcccatgaga

SEQ ID NO: 5347855 - DNA, 25 bp, Homo sapien
gagatttggaagtccgaaaaggatg

SEQ ID NO: 5347856 - DNA, 25 bp, Homo sapien
tatgttcgggttggtaacactgtgg

SEQ ID NO: 5347857 - DNA, 25 bp, Homo sapien
ttatgttcgggttggtaacactgtg

SEQ ID NO: 5347858 - DNA, 25 bp, Homo sapien
gttagcctgttgacaatagtaagtt

SEQ ID NO: 5347859 - DNA, 25 bp, Homo sapien
tagcctgttgacaatagtaagttgc

SEQ ID NO: 5347860 - DNA, 25 bp, Homo sapien
ttagcctgttgacaatagtaagttg

SEQ ID NO: 5347861 - DNA, 25 bp, Homo sapien
tcgcccgacaagtgatggtgactct

SEQ ID NO: 5347862 - DNA, 25 bp, Homo sapien
ggtcatctggatgtcgcatctggaa

SEQ ID NO: 5347863 - DNA, 25 bp, Homo sapien
cgcccgacaagtgatggtgactctg

SEQ ID NO: 5347864 - DNA, 25 bp, Homo sapien
gatgcagacacggaagatggagact

SEQ ID NO: 5347865 - DNA, 25 bp, Homo sapien
gagccccaggagctgagcggggacc

SEQ ID NO: 5347866 - DNA, 25 bp, Homo sapien
ctgggaaccagagcagcaggagccc

SEQ ID NO: 5347867 - DNA, 25 bp, Homo sapien
ccaggagctgagcggggaccctcat

SEQ ID NO: 5347868 - DNA, 25 bp, Homo sapien
gccccaggagctgagcggggaccct

SEQ ID NO: 5347869 - DNA, 25 bp, Homo sapien
tgtgtcctgactgggtctgactcct

SEQ ID NO: 5347870 - DNA, 25 bp, Homo sapien
gctgtgtcctgactgggtctgactc

SEQ ID NO: 5347871 - DNA, 25 bp, Homo sapien
ctgtgtcctgactgggtctgactcc

SEQ ID NO: 5347872 - DNA, 25 bp, Homo sapien
atctgtcccagatccactgccgctg

SEQ ID NO: 5347873 - DNA, 25 bp, Homo sapien
tgtcccagatccactgccgctgaac

SEQ ID NO: 5347874 - DNA, 25 bp, Homo sapien
ttaaactgttgacagtaataagttg

SEQ ID NO: 5347875 - DNA, 25 bp, Homo sapien
aaatctgtcccagatccactgccgc

SEQ ID NO: 5347876 - DNA, 25 bp, Homo sapien
gaggcatcatagatcaggagcttag

SEQ ID NO: 5347877 - DNA, 25 bp, Homo sapien
gatcaggagcttaggagctttccct

SEQ ID NO: 5347878 - DNA, 25 bp, Homo sapien
ctggaggcatcatagatcaggagct

SEQ ID NO: 5347879 - DNA, 25 bp, Homo sapien
ggcatcatagatcaggagcttagga

SEQ ID NO: 5347880 - DNA, 25 bp, Homo sapien
tgcccggcaagtgatggtgactctg

SEQ ID NO: 5347881 - DNA, 25 bp, Homo sapien
aatgccctgacttgcccggcaagtg

SEQ ID NO: 5347882 - DNA, 25 bp, Homo sapien
ctgctaatgccctgacttgcccggc

SEQ ID NO: 5347883 - DNA, 25 bp, Homo sapien
gctaatgccctgacttgcccggcaa

SEQ ID NO: 5347884 - DNA, 25 bp, Homo sapien
ctgggtcaactggatggcacatctg

SEQ ID NO: 5347885 - DNA, 25 bp, Homo sapien
gagactgggtcaactggatggcaca

SEQ ID NO: 5347886 - DNA, 25 bp, Homo sapien
ggtcaactggatggcacatctggca

SEQ ID NO: 5347887 - DNA, 25 bp, Homo sapien
gtcaactggatggcacatctggcac

SEQ ID NO: 5347888 - DNA, 25 bp, Homo sapien
tgggagccagagcagcagaagcccc

SEQ ID NO: 5347889 - DNA, 25 bp, Homo sapien
ctgggagccagagcagcagaagccc

SEQ ID NO: 5347890 - DNA, 25 bp, Homo sapien
ccaggagctgagcggggaccctcat

SEQ ID NO: 5347891 - DNA, 25 bp, Homo sapien
gaagccccaggagctgagcggggac

SEQ ID NO: 5347892 - DNA, 25 bp, Homo sapien
ctgtgtcctgagtgggtctgactcc

SEQ ID NO: 5347893 - DNA, 25 bp, Homo sapien
tgtgtcctgagtgggtctgactcct

SEQ ID NO: 5347894 - DNA, 25 bp, Homo sapien
gctgtgtcctgagtgggtctgactc

SEQ ID NO: 5347895 - DNA, 25 bp, Homo sapien
ccctgttggaaaccaaatcaatcag

SEQ ID NO: 5347896 - DNA, 25 bp, Homo sapien
caaatcaatcaggagccgtggaggc

SEQ ID NO: 5347897 - DNA, 25 bp, Homo sapien
tgaaaggggctatgactggatctac

SEQ ID NO: 5347898 - DNA, 25 bp, Homo sapien
tatgactggatctacaggagataga

SEQ ID NO: 5347899 - DNA, 25 bp, Homo sapien
tttcactaaagtacatgtccttgct

SEQ ID NO: 5347900 - DNA, 25 bp, Homo sapien
cagctttcactaaagtacatgtcct

SEQ ID NO: 5347901 - DNA, 25 bp, Homo sapien
ggcatcatcttggactagcaaggct

SEQ ID NO: 5347902 - DNA, 25 bp, Homo sapien
tacttgcctcaaacaaggcatcatc

SEQ ID NO: 5347903 - DNA, 25 bp, Homo sapien
atcttggactagcaaggctgtgggc

SEQ ID NO: 5347904 - DNA, 25 bp, Homo sapien
gttttatttgctatccttacatggg

SEQ ID NO: 5347905 - DNA, 25 bp, Homo sapien
aaggaagcagctggtataatctagt

SEQ ID NO: 5347906 - DNA, 25 bp, Homo sapien
ctagtaaacactgatggtcttcttg

SEQ ID NO: 5347907 - DNA, 25 bp, Homo sapien
gctggtataatctagtaaacactga

SEQ ID NO: 5347908 - DNA, 25 bp, Homo sapien
tagctgtctgtaaaggaagcagctg

SEQ ID NO: 5347909 - DNA, 25 bp, Homo sapien
agtgaactctgtcccagacccactg

SEQ ID NO: 5347910 - DNA, 25 bp, Homo sapien
gagagtgaactctgtcccagaccca

SEQ ID NO: 5347911 - DNA, 25 bp, Homo sapien
ggtgagagtgaactctgtcccagac

SEQ ID NO: 5347912 - DNA, 25 bp, Homo sapien
tgaactctgtcccagacccactgcc

SEQ ID NO: 5347913 - DNA, 25 bp, Homo sapien
tggtggatgcaccatagatgaggag

SEQ ID NO: 5347914 - DNA, 25 bp, Homo sapien
ggtggatgcaccatagatgaggagc

SEQ ID NO: 5347915 - DNA, 25 bp, Homo sapien
ctgcgtcatcactatttctccagtg

SEQ ID NO: 5347916 - DNA, 25 bp, Homo sapien
tgcgtcatcactatttctccagtgg

SEQ ID NO: 5347917 - DNA, 25 bp, Homo sapien
gcgtcatcactatttctccagtggt

SEQ ID NO: 5347918 - DNA, 25 bp, Homo sapien
ctgggagccagagtagcaggaggaa

SEQ ID NO: 5347919 - DNA, 25 bp, Homo sapien
agagaagctgcgctggggcttccat

SEQ ID NO: 5347920 - DNA, 25 bp, Homo sapien
ggaagagaagctgcgctggggcttc

SEQ ID NO: 5347921 - DNA, 25 bp, Homo sapien
gagccagagtagcaggaggaagaga

SEQ ID NO: 5347922 - DNA, 25 bp, Homo sapien
gggtcctaactgagcagttcctccc

SEQ ID NO: 5347923 - DNA, 25 bp, Homo sapien
tgggtcctaactgagcagttcctcc

SEQ ID NO: 5347924 - DNA, 25 bp, Homo sapien
ttatgtttgggtgtgtaacactgtg

SEQ ID NO: 5347925 - DNA, 25 bp, Homo sapien
tatgtttgggtgtgtaacactgtgg

SEQ ID NO: 5347926 - DNA, 25 bp, Homo sapien
atgtttgggtgtgtaacactgtggg

SEQ ID NO: 5347927 - DNA, 25 bp, Homo sapien
taactattatactgttggcagtaat

SEQ ID NO: 5347928 - DNA, 25 bp, Homo sapien
tattatactgttggcagtaataagt

SEQ ID NO: 5347929 - DNA, 25 bp, Homo sapien
ctattatactgttggcagtaataag

SEQ ID NO: 5347930 - DNA, 25 bp, Homo sapien
aactattatactgttggcagtaata

SEQ ID NO: 5347931 - DNA, 25 bp, Homo sapien
tagatcagggacttaggggctttcc

SEQ ID NO: 5347932 - DNA, 25 bp, Homo sapien
ctgctgaaaccaggctaaataattg

SEQ ID NO: 5347933 - DNA, 25 bp, Homo sapien
gtttctgctgaaaccaggctaaata

SEQ ID NO: 5347934 - DNA, 25 bp, Homo sapien
catagatcagggacttaggggcttt

SEQ ID NO: 5347935 - DNA, 25 bp, Homo sapien
tctcctacagatgcagacagtgagg

SEQ ID NO: 5347936 - DNA, 25 bp, Homo sapien
tcgcccgacaagtgatggtgactct

SEQ ID NO: 5347937 - DNA, 25 bp, Homo sapien
gagactgggtcatctggatgtcaca

SEQ ID NO: 5347938 - DNA, 25 bp, Homo sapien
tgcagacagtgaggatggagactgg

SEQ ID NO: 5347939 - DNA, 25 bp, Homo sapien
gagctgagcgaggactctcatgtcc

SEQ ID NO: 5347940 - DNA, 25 bp, Homo sapien
ggagctgagcgaggactctcatgtc

SEQ ID NO: 5347941 - DNA, 25 bp, Homo sapien
caggagctgagcgaggactctcatg

SEQ ID NO: 5347942 - DNA, 25 bp, Homo sapien
gctgagcgaggactctcatgtccat

SEQ ID NO: 5347943 - DNA, 25 bp, Homo sapien
ttatgttcgggtgtgtaacactgtg

SEQ ID NO: 5347944 - DNA, 25 bp, Homo sapien
gctgataccagcctaaatcatttct

SEQ ID NO: 5347945 - DNA, 25 bp, Homo sapien
tgctgataccagcctaaatcatttc

SEQ ID NO: 5347946 - DNA, 25 bp, Homo sapien
ctgctgataccagcctaaatcattt

SEQ ID NO: 5347947 - DNA, 25 bp, Homo sapien
cccggcaagtgatggtgactctgtc

SEQ ID NO: 5347948 - DNA, 25 bp, Homo sapien
tgcccggcaagtgatggtgactctg

SEQ ID NO: 5347949 - DNA, 25 bp, Homo sapien
cggcaagtgatggtgactctgtctc

SEQ ID NO: 5347950 - DNA, 25 bp, Homo sapien
ttgcccggcaagtgatggtgactct

SEQ ID NO: 5347951 - DNA, 25 bp, Homo sapien
ggagactgggtcatctggatgtcac

SEQ ID NO: 5347952 - DNA, 25 bp, Homo sapien
agactgggtcatctggatgtcacac

SEQ ID NO: 5347953 - DNA, 25 bp, Homo sapien
actgggtcatctggatgtcacacct

SEQ ID NO: 5347954 - DNA, 25 bp, Homo sapien
tgggtcatctggatgtcacacctgg

SEQ ID NO: 5347955 - DNA, 25 bp, Homo sapien
ctgggaaccagagcagcaggagccc

SEQ ID NO: 5347956 - DNA, 25 bp, Homo sapien
gccccaggagctgagcggggaccct

SEQ ID NO: 5347957 - DNA, 25 bp, Homo sapien
ccaggagctgagcggggaccctcat

SEQ ID NO: 5347958 - DNA, 25 bp, Homo sapien
gagccccaggagctgagcggggacc

SEQ ID NO: 5347959 - DNA, 25 bp, Homo sapien
cagggttgtaccactgtgttaggaa

SEQ ID NO: 5347960 - DNA, 25 bp, Homo sapien
gttaggaaactgtgtagcttgcatg

SEQ ID NO: 5347961 - DNA, 25 bp, Homo sapien
tcagggttgtaccactgtgttagga

SEQ ID NO: 5347962 - DNA, 25 bp, Homo sapien
tgtgttaggaaactgtgtagcttgc

SEQ ID NO: 5347963 - DNA, 25 bp, Homo sapien
cagctgattttcagtgtgaaatcac

SEQ ID NO: 5347964 - DNA, 25 bp, Homo sapien
cccagctgattttcagtgtgaaatc

SEQ ID NO: 5347965 - DNA, 25 bp, Homo sapien
ctgattttcagtgtgaaatcactac

SEQ ID NO: 5347966 - DNA, 25 bp, Homo sapien
gctgattttcagtgtgaaatcacta

SEQ ID NO: 5347967 - DNA, 25 bp, Homo sapien
tgcaaataggtatatccattactat

SEQ ID NO: 5347968 - DNA, 25 bp, Homo sapien
accaatgcaaataggtatatccatt

SEQ ID NO: 5347969 - DNA, 25 bp, Homo sapien
atgcaaataggtatatccattacta

SEQ ID NO: 5347970 - DNA, 25 bp, Homo sapien
ctccagggttgacgggcagggaggg

SEQ ID NO: 5347971 - DNA, 25 bp, Homo sapien
gagtctgggtcatcacaatatctcc

SEQ ID NO: 5347972 - DNA, 25 bp, Homo sapien
cggctctccagggttgacgggcagg

SEQ ID NO: 5347973 - DNA, 25 bp, Homo sapien
aggccggctctccagggttgacggg

SEQ ID NO: 5347974 - DNA, 25 bp, Homo sapien
attagcagccccaggagctgagcag

SEQ ID NO: 5347975 - DNA, 25 bp, Homo sapien
caggaacccaaagcattagcagccc

SEQ ID NO: 5347976 - DNA, 25 bp, Homo sapien
aggaacccaaagcattagcagcccc

SEQ ID NO: 5347977 - DNA, 25 bp, Homo sapien
agcattagcagccccaggagctgag

SEQ ID NO: 5347978 - DNA, 25 bp, Homo sapien
gaaatctgtccctgaaccactgctg

SEQ ID NO: 5347979 - DNA, 25 bp, Homo sapien
tagaaacttcataaatcaggcacct

SEQ ID NO: 5347980 - DNA, 25 bp, Homo sapien
ggcaccttagaggttggtctggctt

SEQ ID NO: 5347981 - DNA, 25 bp, Homo sapien
cagacttcctgttagaaacttcata

SEQ ID NO: 5347982 - DNA, 25 bp, Homo sapien
aaatcaggcaccttagaggttggtc

SEQ ID NO: 5347983 - DNA, 25 bp, Homo sapien
ccatttctatgaaaggggctctgac

SEQ ID NO: 5347984 - DNA, 25 bp, Homo sapien
tttctatgaaaggggctctgaccag

SEQ ID NO: 5347985 - DNA, 25 bp, Homo sapien
ctgcagaaaccaattcaagtaagtg

SEQ ID NO: 5347986 - DNA, 25 bp, Homo sapien
tcaagtaagtgtttccatttctatg

SEQ ID NO: 5347987 - DNA, 25 bp, Homo sapien
ctaaaattgagttgtcattgcagca

SEQ ID NO: 5347988 - DNA, 25 bp, Homo sapien
tgcagcagctatctgtaaaggaagc

SEQ ID NO: 5347989 - DNA, 25 bp, Homo sapien
attgcagcagctatctgtaaaggaa

SEQ ID NO: 5347990 - DNA, 25 bp, Homo sapien
gcagcagctatctgtaaaggaagca

SEQ ID NO: 5347991 - DNA, 25 bp, Homo sapien
ggtgagagtgaagtctgtcccagac

SEQ ID NO: 5347992 - DNA, 25 bp, Homo sapien
tcaggctccagtctgctgatggtga

SEQ ID NO: 5347993 - DNA, 25 bp, Homo sapien
aggctccagtctgctgatggtgaga

SEQ ID NO: 5347994 - DNA, 25 bp, Homo sapien
tgctgacagtaatacactgcaaaat

SEQ ID NO: 5347995 - DNA, 25 bp, Homo sapien
tgaacctgtctgggatgccagtggc

SEQ ID NO: 5347996 - DNA, 25 bp, Homo sapien
gccactgaacctgtctgggatgcca

SEQ ID NO: 5347997 - DNA, 25 bp, Homo sapien
gaacctgtctgggatgccagtggcc

SEQ ID NO: 5347998 - DNA, 25 bp, Homo sapien
cactgccactgaacctgtctgggat

SEQ ID NO: 5347999 - DNA, 25 bp, Homo sapien
gctgctgctaacactctgactggcc

SEQ ID NO: 5348000 - DNA, 25 bp, Homo sapien
ttcccctggagacaaagacagggtg

SEQ ID NO: 5348001 - DNA, 25 bp, Homo sapien
gagagggtggctctttcccctggag

SEQ ID NO: 5348002 - DNA, 25 bp, Homo sapien
ctgcaggagagggtggctctttccc

SEQ ID NO: 5348003 - DNA, 25 bp, Homo sapien
tcccctggagacaaagacagggtgc

SEQ ID NO: 5348004 - DNA, 25 bp, Homo sapien
gactgcgtcaacacaatttctccgg

SEQ ID NO: 5348005 - DNA, 25 bp, Homo sapien
tgcgtcaacacaatttctccggtgg

SEQ ID NO: 5348006 - DNA, 25 bp, Homo sapien
gcgtcaacacaatttctccggtggt

SEQ ID NO: 5348007 - DNA, 25 bp, Homo sapien
gagactgcgtcaacacaatttctcc

SEQ ID NO: 5348008 - DNA, 25 bp, Homo sapien
gaaaagtcacccatgtaatctaaat

SEQ ID NO: 5348009 - DNA, 25 bp, Homo sapien
gagttgccaggtaacaggacttgag

SEQ ID NO: 5348010 - DNA, 25 bp, Homo sapien
tgtattgactgagcagagttgccag

SEQ ID NO: 5348011 - DNA, 25 bp, Homo sapien
ccagaagagccagaattattgcttt

SEQ ID NO: 5348012 - DNA, 25 bp, Homo sapien
agagaagctgcgctggggtttccat

SEQ ID NO: 5348013 - DNA, 25 bp, Homo sapien
ctgggagccagagtagcaggaggaa

SEQ ID NO: 5348014 - DNA, 25 bp, Homo sapien
gagccagagtagcaggaggaagaga

SEQ ID NO: 5348015 - DNA, 25 bp, Homo sapien
gaggaagagaagctgcgctggggtt

SEQ ID NO: 5348016 - DNA, 25 bp, Homo sapien
gggcggctgggagggacatgcaaag

SEQ ID NO: 5348017 - DNA, 25 bp, Homo sapien
tgcagctgcagagacaatctgcctc

SEQ ID NO: 5348018 - DNA, 25 bp, Homo sapien
catgcccaggtgatcaggccagaaa

SEQ ID NO: 5348019 - DNA, 25 bp, Homo sapien
agctgcagagacaatctgcctcccc

SEQ ID NO: 5348020 - DNA, 25 bp, Homo sapien
tcatacttctatgggcgctgcacca

SEQ ID NO: 5348021 - DNA, 25 bp, Homo sapien
cagctctgtcctcactgattctgca

SEQ ID NO: 5348022 - DNA, 25 bp, Homo sapien
caccaagcatagagtccactgccag

SEQ ID NO: 5348023 - DNA, 25 bp, Homo sapien
tcagacacacgacccttagggctgg

SEQ ID NO: 5348024 - DNA, 25 bp, Homo sapien
catttaaaaccagcaatggttgcac

SEQ ID NO: 5348025 - DNA, 25 bp, Homo sapien
aaacctacatccattctgggctgag

SEQ ID NO: 5348026 - DNA, 25 bp, Homo sapien
tacatttggatatactgtgcatcta

SEQ ID NO: 5348027 - DNA, 25 bp, Homo sapien
tataactttaattgtcagtgtaaga

SEQ ID NO: 5348028 - DNA, 25 bp, Homo sapien
cagtgggtctagaccccaactggag

SEQ ID NO: 5348029 - DNA, 25 bp, Homo sapien
tgggtctagaccccaactggaggga

SEQ ID NO: 5348030 - DNA, 25 bp, Homo sapien
ggcagtgggtctagaccccaactgg

SEQ ID NO: 5348031 - DNA, 25 bp, Homo sapien
agtgggtctagaccccaactggagg

SEQ ID NO: 5348032 - DNA, 25 bp, Homo sapien
catgttatgggtgtgacccaggtca

SEQ ID NO: 5348033 - DNA, 25 bp, Homo sapien
tgacccaggtcaaggtgtttgatga

SEQ ID NO: 5348034 - DNA, 25 bp, Homo sapien
cttctgagccagggaacatttcatg

SEQ ID NO: 5348035 - DNA, 25 bp, Homo sapien
aacatttcatgttatgggtgtgacc

SEQ ID NO: 5348036 - DNA, 25 bp, Homo sapien
ccctggtccgcacaaataaatggtc

SEQ ID NO: 5348037 - DNA, 25 bp, Homo sapien
gaagcatctccagtatgaccccgag

SEQ ID NO: 5348038 - DNA, 25 bp, Homo sapien
ctttcactgtgtaggtattgttctc

SEQ ID NO: 5348039 - DNA, 25 bp, Homo sapien
aatttatcagctattgaaatgattc

SEQ ID NO: 5348040 - DNA, 25 bp, Homo sapien
ttttgttctgggttgtaacacagtg

SEQ ID NO: 5348041 - DNA, 25 bp, Homo sapien
tttgttctgggttgtaacacagtgt

SEQ ID NO: 5348042 - DNA, 25 bp, Homo sapien
ggtaaactactactctgatgacagt

SEQ ID NO: 5348043 - DNA, 25 bp, Homo sapien
actactactctgatgacagtaatac

SEQ ID NO: 5348044 - DNA, 25 bp, Homo sapien
taaactactactctgatgacagtaa

SEQ ID NO: 5348045 - DNA, 25 bp, Homo sapien
gaggtaaactactactctgatgaca

SEQ ID NO: 5348046 - DNA, 25 bp, Homo sapien
ttcagcttccaggctattgatggtg

SEQ ID NO: 5348047 - DNA, 25 bp, Homo sapien
tcagcttccaggctattgatggtga

SEQ ID NO: 5348048 - DNA, 25 bp, Homo sapien
cttcagcttccaggctattgatggt

SEQ ID NO: 5348049 - DNA, 25 bp, Homo sapien
ccaggctattgatggtgagggtgaa

SEQ ID NO: 5348050 - DNA, 25 bp, Homo sapien
ctttggagactgatctggtttctgc

SEQ ID NO: 5348051 - DNA, 25 bp, Homo sapien
gtaccagtgtaagctactaccaatg

SEQ ID NO: 5348052 - DNA, 25 bp, Homo sapien
actaccaatgctctgactggcccgg

SEQ ID NO: 5348053 - DNA, 25 bp, Homo sapien
tctcctttggagtcacagactgaaa

SEQ ID NO: 5348054 - DNA, 25 bp, Homo sapien
ctgagtcagcacaatttcacccctg

SEQ ID NO: 5348055 - DNA, 25 bp, Homo sapien
actgagtcagcacaatttcacccct

SEQ ID NO: 5348056 - DNA, 25 bp, Homo sapien
tgtatgaaaatcacctttaatcttg

SEQ ID NO: 5348057 - DNA, 25 bp, Homo sapien
cagcaaacatcagtacaacataaat

SEQ ID NO: 5348058 - DNA, 25 bp, Homo sapien
gtgtatgaaaatcacctttaatctt

SEQ ID NO: 5348059 - DNA, 25 bp, Homo sapien
tcagtacaacataaatatctgtgta

SEQ ID NO: 5348060 - DNA, 25 bp, Homo sapien
atgagttgtgatggcaacatcttcc

SEQ ID NO: 5348061 - DNA, 25 bp, Homo sapien
tgagttgtgatggcaacatcttcct

SEQ ID NO: 5348062 - DNA, 25 bp, Homo sapien
tcagggaaatggcattggtaacctg

SEQ ID NO: 5348063 - DNA, 25 bp, Homo sapien
aatggcattggtaacctgaagggtc

SEQ ID NO: 5348064 - DNA, 25 bp, Homo sapien
ggcattggtaacctgaagggtcaga

SEQ ID NO: 5348065 - DNA, 25 bp, Homo sapien
gggaaatggcattggtaacctgaag

SEQ ID NO: 5348066 - DNA, 25 bp, Homo sapien
agctaacagccttttctgacatgac

SEQ ID NO: 5348067 - DNA, 25 bp, Homo sapien
gacacagggatataagacaggaaga

SEQ ID NO: 5348068 - DNA, 25 bp, Homo sapien
tctacactcaggctaagctaacagc

SEQ ID NO: 5348069 - DNA, 25 bp, Homo sapien
gaaattcacctcacttatggaaaaa

SEQ ID NO: 5348070 - DNA, 25 bp, Homo sapien
catcagcatcttcgcatacggactt

SEQ ID NO: 5348071 - DNA, 25 bp, Homo sapien
tagcatcagcatcttcgcatacgga

SEQ ID NO: 5348072 - DNA, 25 bp, Homo sapien
aaggactggagaatcacctggtgag

SEQ ID NO: 5348073 - DNA, 25 bp, Homo sapien
tgctgcaacaactgatagcatcagc

SEQ ID NO: 5348074 - DNA, 25 bp, Homo sapien
gacagcaataagttataacatcttc

SEQ ID NO: 5348075 - DNA, 25 bp, Homo sapien
gcccctggagctgagtggggaccct

SEQ ID NO: 5348076 - DNA, 25 bp, Homo sapien
cagcaggagcccctggagctgagtg

SEQ ID NO: 5348077 - DNA, 25 bp, Homo sapien
cctggagctgagtggggaccctcat

SEQ ID NO: 5348078 - DNA, 25 bp, Homo sapien
ctgggagccagagcagcaggagccc

SEQ ID NO: 5348079 - DNA, 25 bp, Homo sapien
tgtgtcctgactgagactgactcct

SEQ ID NO: 5348080 - DNA, 25 bp, Homo sapien
gagactgactcctgcacagggtgtg

SEQ ID NO: 5348081 - DNA, 25 bp, Homo sapien
tgactgagactgactcctgcacagg

SEQ ID NO: 5348082 - DNA, 25 bp, Homo sapien
tgactcctgcacagggtgtgaccag

SEQ ID NO: 5348083 - DNA, 25 bp, Homo sapien
cagcctcagttgtgtgactggtagg

SEQ ID NO: 5348084 - DNA, 25 bp, Homo sapien
gagggcacttgcatcttctgtaggt

SEQ ID NO: 5348085 - DNA, 25 bp, Homo sapien
taaggctgcgactgctgaagtgatc

SEQ ID NO: 5348086 - DNA, 25 bp, Homo sapien
ggctgaatacatctggttgacaaat

SEQ ID NO: 5348087 - DNA, 25 bp, Homo sapien
tctccattggtgacgggcagagaga

SEQ ID NO: 5348088 - DNA, 25 bp, Homo sapien
catgtaaaaggttctgactagacct

SEQ ID NO: 5348089 - DNA, 25 bp, Homo sapien
cggctctccattggtgacgggcaga

SEQ ID NO: 5348090 - DNA, 25 bp, Homo sapien
tgtaaaaggttctgactagacctgc

SEQ ID NO: 5348091 - DNA, 25 bp, Homo sapien
ggaaattgtgtagcttgcatgcagt

SEQ ID NO: 5348092 - DNA, 25 bp, Homo sapien
aattgtgtagcttgcatgcagtaat

SEQ ID NO: 5348093 - DNA, 25 bp, Homo sapien
ttgtgtagcttgcatgcagtaataa

SEQ ID NO: 5348094 - DNA, 25 bp, Homo sapien
gaaattgtgtagcttgcatgcagta

SEQ ID NO: 5348095 - DNA, 25 bp, Homo sapien
taaattaggagtcttggaggctggc

SEQ ID NO: 5348096 - DNA, 25 bp, Homo sapien
cttataaattaggagtcttggaggc

SEQ ID NO: 5348097 - DNA, 25 bp, Homo sapien
aaattaggagtcttggaggctggcc

SEQ ID NO: 5348098 - DNA, 25 bp, Homo sapien
tataaattaggagtcttggaggctg

SEQ ID NO: 5348099 - DNA, 25 bp, Homo sapien
agagagaagtgcaaggttatgtaga

SEQ ID NO: 5348100 - DNA, 25 bp, Homo sapien
ctgaaataatgagagagaagtgcaa

SEQ ID NO: 5348101 - DNA, 25 bp, Homo sapien
agagaagtgcaaggttatgtagaaa

SEQ ID NO: 5348102 - DNA, 25 bp, Homo sapien
tgagagagaagtgcaaggttatgta

SEQ ID NO: 5348103 - DNA, 25 bp, Homo sapien
ttagagtcttcaccggagcactggt

SEQ ID NO: 5348104 - DNA, 25 bp, Homo sapien
tcacatgccttactcacgcagatat

SEQ ID NO: 5348105 - DNA, 25 bp, Homo sapien
gctagaagtttcctctaccattccc

SEQ ID NO: 5348106 - DNA, 25 bp, Homo sapien
ttacagatctaaacctcacatgcct

SEQ ID NO: 5348107 - DNA, 25 bp, Homo sapien
cccagaagctgagcaaggagcctca

SEQ ID NO: 5348108 - DNA, 25 bp, Homo sapien
cagggacccagagcattagcagccc

SEQ ID NO: 5348109 - DNA, 25 bp, Homo sapien
ccagagcattagcagccccagaagc

SEQ ID NO: 5348110 - DNA, 25 bp, Homo sapien
acccagagcattagcagccccagaa

SEQ ID NO: 5348111 - DNA, 25 bp, Homo sapien
aagcacgcaaagtcatcccaggctg

SEQ ID NO: 5348112 - DNA, 25 bp, Homo sapien
tcccaggctgagatattttggagct

SEQ ID NO: 5348113 - DNA, 25 bp, Homo sapien
gataacggctttgatatgtagccaa

SEQ ID NO: 5348114 - DNA, 25 bp, Homo sapien
cagggaacagcccactgataacggc

SEQ ID NO: 5348115 - DNA, 25 bp, Homo sapien
agatgctaaaactgagcagcaccac

SEQ ID NO: 5348116 - DNA, 25 bp, Homo sapien
ctgctataggggcagaatgagttct

SEQ ID NO: 5348117 - DNA, 25 bp, Homo sapien
ctctgctataggggcagaatgagtt

SEQ ID NO: 5348118 - DNA, 25 bp, Homo sapien
gctataggggcagaatgagttctag

SEQ ID NO: 5348119 - DNA, 25 bp, Homo sapien
atctctgctataggggcagaatgag

SEQ ID NO: 5348120 - DNA, 25 bp, Homo sapien
cactgtgggaggatcttgtgcatct

SEQ ID NO: 5348121 - DNA, 25 bp, Homo sapien
tcttgtgcatcttgcatgcagtaat

SEQ ID NO: 5348122 - DNA, 25 bp, Homo sapien
gcactgtgggaggatcttgtgcatc

SEQ ID NO: 5348123 - DNA, 25 bp, Homo sapien
actgtgggaggatcttgtgcatctt

SEQ ID NO: 5348124 - DNA, 25 bp, Homo sapien
ctatctggcactccagagaaccggt

SEQ ID NO: 5348125 - DNA, 25 bp, Homo sapien
tggcactccagagaaccggttggaa

SEQ ID NO: 5348126 - DNA, 25 bp, Homo sapien
tctggcactccagagaaccggttgg

SEQ ID NO: 5348127 - DNA, 25 bp, Homo sapien
ggcactccagagaaccggttggaaa

SEQ ID NO: 5348128 - DNA, 25 bp, Homo sapien
ggtgtatccatcactatgcaggagg

SEQ ID NO: 5348129 - DNA, 25 bp, Homo sapien
caaataggtgtatccatcactatgc

SEQ ID NO: 5348130 - DNA, 25 bp, Homo sapien
caatacaaataggtgtatccatcac

SEQ ID NO: 5348131 - DNA, 25 bp, Homo sapien
gtatccatcactatgcaggaggctc

SEQ ID NO: 5348132 - DNA, 25 bp, Homo sapien
tgctctccaggggtgatagacaagg

SEQ ID NO: 5348133 - DNA, 25 bp, Homo sapien
gagtctgggtcatcacaatctctgc

SEQ ID NO: 5348134 - DNA, 25 bp, Homo sapien
tgggtcatcacaatctctgcactgg

SEQ ID NO: 5348135 - DNA, 25 bp, Homo sapien
tctccaggggtgatagacaaggaga

SEQ ID NO: 5348136 - DNA, 25 bp, Homo sapien
ggacccagagcattagcagccccaa

SEQ ID NO: 5348137 - DNA, 25 bp, Homo sapien
cagggacccagagcattagcagccc

SEQ ID NO: 5348138 - DNA, 25 bp, Homo sapien
cccagagcattagcagccccaagag

SEQ ID NO: 5348139 - DNA, 25 bp, Homo sapien
ccagagcattagcagccccaagagc

SEQ ID NO: 5348140 - DNA, 25 bp, Homo sapien
cagctgatttagaacagaccagtac

SEQ ID NO: 5348141 - DNA, 25 bp, Homo sapien
gaacagctgatttagaacagaccag

SEQ ID NO: 5348142 - DNA, 25 bp, Homo sapien
tcagaacagctgatttagaacagac

SEQ ID NO: 5348143 - DNA, 25 bp, Homo sapien
gaatcagaacagctgatttagaaca

SEQ ID NO: 5348144 - DNA, 25 bp, Homo sapien
gcagcaaagtcagggcaaggcaaac

SEQ ID NO: 5348145 - DNA, 25 bp, Homo sapien
tcttggagccatggacaacaggaga

SEQ ID NO: 5348146 - DNA, 25 bp, Homo sapien
ccttatggatctgacactgtgtatg

SEQ ID NO: 5348147 - DNA, 25 bp, Homo sapien
ctgtgtatggtccagtggaatctgc

SEQ ID NO: 5348148 - DNA, 25 bp, Homo sapien
ccccaatttccttcttctctaagag

SEQ ID NO: 5348149 - DNA, 25 bp, Homo sapien
tttccttcttctctaagaggagcag

SEQ ID NO: 5348150 - DNA, 25 bp, Homo sapien
ccaatttccttcttctctaagagga

SEQ ID NO: 5348151 - DNA, 25 bp, Homo sapien
ttcttctctaagaggagcagctgct

SEQ ID NO: 5348152 - DNA, 25 bp, Homo sapien
ttcctatggatgagattgcgactgg

SEQ ID NO: 5348153 - DNA, 25 bp, Homo sapien
ccgttcaagtagatgtctccattcc

SEQ ID NO: 5348154 - DNA, 25 bp, Homo sapien
gtttgtcaccatatagatcagtggt

SEQ ID NO: 5348155 - DNA, 25 bp, Homo sapien
cagtggttgaggagattggtgtggc

SEQ ID NO: 5348156 - DNA, 25 bp, Homo sapien
tgcggctcccaggccggctgtattc

SEQ ID NO: 5348157 - DNA, 25 bp, Homo sapien
aggccggctgtattcagatgcctgg

SEQ ID NO: 5348158 - DNA, 25 bp, Homo sapien
cggctgtattcagatgcctgggcat

SEQ ID NO: 5348159 - DNA, 25 bp, Homo sapien
ctcccaggccggctgtattcagatg

SEQ ID NO: 5348160 - DNA, 25 bp, Homo sapien
tcagtcggaatctgtgggcagtttc

SEQ ID NO: 5348161 - DNA, 25 bp, Homo sapien
ctcagtcggaatctgtgggcagttt

SEQ ID NO: 5348162 - DNA, 25 bp, Homo sapien
cactctttcgttgttccctcagtcg

SEQ ID NO: 5348163 - DNA, 25 bp, Homo sapien
tccactctttcgttgttccctcagt

SEQ ID NO: 5348164 - DNA, 25 bp, Homo sapien
tgacaggcaagctcctatgttgttg

SEQ ID NO: 5348165 - DNA, 25 bp, Homo sapien
ggggatgaaatcagtccacccactg

SEQ ID NO: 5348166 - DNA, 25 bp, Homo sapien
gacaggcaagctcctatgttgttga

SEQ ID NO: 5348167 - DNA, 25 bp, Homo sapien
gaaatcagtccacccactgtcacta

SEQ ID NO: 5348168 - DNA, 25 bp, Homo sapien
ggacccctgattgcaaagtggatgc

SEQ ID NO: 5348169 - DNA, 25 bp, Homo sapien
ggagactgggtcatctggatgtcac

SEQ ID NO: 5348170 - DNA, 25 bp, Homo sapien
gggtcatctggatgtcacatctggt

SEQ ID NO: 5348171 - DNA, 25 bp, Homo sapien
gactgggtcatctggatgtcacatc

SEQ ID NO: 5348172 - DNA, 25 bp, Homo sapien
gtcatctggatgtcacatctggtat

SEQ ID NO: 5348173 - DNA, 25 bp, Homo sapien
ccaggagctgagcagggaccctcat

SEQ ID NO: 5348174 - DNA, 25 bp, Homo sapien
gagtcccaggagctgagcagggacc

SEQ ID NO: 5348175 - DNA, 25 bp, Homo sapien
ctgggagccagagcagcaggagtcc

SEQ ID NO: 5348176 - DNA, 25 bp, Homo sapien
gcaggagtcccaggagctgagcagg

SEQ ID NO: 5348177 - DNA, 25 bp, Homo sapien
ttacccaagctgccggtcactggcc

SEQ ID NO: 5348178 - DNA, 25 bp, Homo sapien
ctctcctgaaccatggggctgagga

SEQ ID NO: 5348179 - DNA, 25 bp, Homo sapien
tagcagcttctctcctgaaccatgg

SEQ ID NO: 5348180 - DNA, 25 bp, Homo sapien
ctgccggtcactggccctggtctgt

SEQ ID NO: 5348181 - DNA, 25 bp, Homo sapien
cccgaggtcaggatgaaagtctctg

SEQ ID NO: 5348182 - DNA, 25 bp, Homo sapien
gcccgaggtcaggatgaaagtctct

SEQ ID NO: 5348183 - DNA, 25 bp, Homo sapien
tgcccgaggtcaggatgaaagtctc

SEQ ID NO: 5348184 - DNA, 25 bp, Homo sapien
ccgaggtcaggatgaaagtctctga

SEQ ID NO: 5348185 - DNA, 25 bp, Homo sapien
caggaagctcaggacctttccccat

SEQ ID NO: 5348186 - DNA, 25 bp, Homo sapien
ttcctgacttcctgaaggtcaggaa

SEQ ID NO: 5348187 - DNA, 25 bp, Homo sapien
gaaggtcaggaagctcaggaccttt

SEQ ID NO: 5348188 - DNA, 25 bp, Homo sapien
cataaacatgatccttcctgacttc

SEQ ID NO: 5348189 - DNA, 25 bp, Homo sapien
caagcagcacatgtgagcaactagg

SEQ ID NO: 5348190 - DNA, 25 bp, Homo sapien
cacatgtgagcaactaggcaacccc

SEQ ID NO: 5348191 - DNA, 25 bp, Homo sapien
agcaactaggcaaccccaggaggag

SEQ ID NO: 5348192 - DNA, 25 bp, Homo sapien
gcagcacatgtgagcaactaggcaa

SEQ ID NO: 5348193 - DNA, 25 bp, Homo sapien
gtagagcttgcatgcagtaataaac

SEQ ID NO: 5348194 - DNA, 25 bp, Homo sapien
tttgtagagcttgcatgcagtaata

SEQ ID NO: 5348195 - DNA, 25 bp, Homo sapien
ttgtagagcttgcatgcagtaataa

SEQ ID NO: 5348196 - DNA, 25 bp, Homo sapien
tgtagagcttgcatgcagtaataaa

SEQ ID NO: 5348197 - DNA, 25 bp, Homo sapien
ggcccgattagaacccaaatagatc

SEQ ID NO: 5348198 - DNA, 25 bp, Homo sapien
tcagtgtaaaatctgtgcctgatcc

SEQ ID NO: 5348199 - DNA, 25 bp, Homo sapien
cgattagaacccaaatagatcagga

SEQ ID NO: 5348200 - DNA, 25 bp, Homo sapien
cagtgtaaaatctgtgcctgatcca

SEQ ID NO: 5348201 - DNA, 25 bp, Homo sapien
gactgagtcatcacaatatccccac

SEQ ID NO: 5348202 - DNA, 25 bp, Homo sapien
gagtggagactgagtcatcacaata

SEQ ID NO: 5348203 - DNA, 25 bp, Homo sapien
tggagactgagtcatcacaatatcc

SEQ ID NO: 5348204 - DNA, 25 bp, Homo sapien
gagactgagtcatcacaatatcccc

SEQ ID NO: 5348205 - DNA, 25 bp, Homo sapien
aaataatgaattgcaaagttatgta

SEQ ID NO: 5348206 - DNA, 25 bp, Homo sapien
ataatgaattgcaaagttatgtaca

SEQ ID NO: 5348207 - DNA, 25 bp, Homo sapien
aataatgaattgcaaagttatgtac

SEQ ID NO: 5348208 - DNA, 25 bp, Homo sapien
ccaggagctgagcagggagcctcat

SEQ ID NO: 5348209 - DNA, 25 bp, Homo sapien
cagagacccagagcattagcagccc

SEQ ID NO: 5348210 - DNA, 25 bp, Homo sapien
ttagcagccccaggagctgagcagg

SEQ ID NO: 5348211 - DNA, 25 bp, Homo sapien
ccccaggagctgagcagggagcctc

SEQ ID NO: 5348212 - DNA, 25 bp, Homo sapien
cctccacctgagtttggtgtggatg

SEQ ID NO: 5348213 - DNA, 25 bp, Homo sapien
gctcacaggagtctgtgcactgtct

SEQ ID NO: 5348214 - DNA, 25 bp, Homo sapien
tgctcacaggagtctgtgcactgtc

SEQ ID NO: 5348215 - DNA, 25 bp, Homo sapien
cctgctcacaggagtctgtgcactg

SEQ ID NO: 5348216 - DNA, 25 bp, Homo sapien
gtcctgctcacaggagtctgtgcac

SEQ ID NO: 5348217 - DNA, 25 bp, Homo sapien
ctccatgtccctgcagggctgagca

SEQ ID NO: 5348218 - DNA, 25 bp, Homo sapien
tgtccctgcagggctgagcactgac

SEQ ID NO: 5348219 - DNA, 25 bp, Homo sapien
ccatgtccctgcagggctgagcact

SEQ ID NO: 5348220 - DNA, 25 bp, Homo sapien
catgtccctgcagggctgagcactg
